United States Patent Application Publication US 2011/0183924 A1 - sequence listing, part 298

SEQ ID NO: 1018254 - protein, 328 aa, Homo sapiens
GTSGTRKDSYVGDEAQSKRGILTLKYPIEHGIVTNWDDMEKIWHQTPSTNDDCVWTPEEHPVLSDRVPPLNPRAKPPDMMTQSHVLTTFNQPPGTLVPVAYSQGCASPCAASGLYRLAIGDGNSGDGGSPTSCAHSTRGMPSPMPSCVWTWVGRDLTDLPHAMILDRALATVVQPIHGRAGISAALTLSAERLCCSRPGLRAKSMAARCFQASSLERSLTSCLTAPVISIRHLERVLGGPVRHSCQTSPPLGLVVLVASRSKLLFRLLSLHVCVVILEDRYANAVVSGGAHQFLGCGRVPLVFSVRARTEISASPRGATRGDGALAGP

SEQ ID NO: 1018255 - protein, 114 aa, Homo sapiens
MEIPTRVKVKGPPQASHSLLSFLPDQVCQPMASYAPHPHCFCLHVNETKGLSISWEDWGLLPNGPLCPIIGARHPIHTFAPLLQDSIFLFTQSLYSRIQSWVVVYLPGKLIIFV

SEQ ID NO: 1018256 - protein, 114 aa, Homo sapiens; identical to SEQ ID NO: 1018255

SEQ ID NO: 1018257 - protein, 297 aa, Homo sapiens
LEKVENSVIMCPGDPEQLAREDLEENEEILGKEENLGELDSLVRREWLEDMVLMAQKAVQVHLGPLEIQAHQCLQGMPGERGIAGTPGPKGDRGGIGEKGAEGQLEHDGARGLPGPLGPPGPAGPTGEKGEPGPRGLVGPPGSRGNPGSRGENGPTGAVGFAGPQGPRRTAWSKQVNLAEPGQKGDAGSPGPQGSSRIPGPHGPNACPGLKGGRGTQGSAWWLQGFPGFCGPTLDLEGPAGSSGTLRDRLMGTPDRRDLQVFVGAPGSHGVLEMRTSVSLVCRRLEGRDNMAPVSSP

SEQ ID NO: 1018258 - protein, 173 aa, Homo sapiens
  misc_feature (20)..(20): Xaa can be any naturally occurring amino acid
CFISDVQIYLGDCREPIHHXWKLTNEGEAPLPCLSCGHHYPDGQTDKMSLSSSEFMTKPPRTGKSPFCSMNLSIQISSTNDCGRRSYHQTVRGSLCEPPALPGDWTRIPAVPWLQVSTSRRRRGLHRKMQLNPGLGYLHVSEGHFPGASAMAPGPSQDFVITEKTTLGAATGP

SEQ ID NO: 1018259 - protein, 173 aa, Homo sapiens; identical to SEQ ID NO: 1018258
  misc_feature (20)..(20): Xaa can be any naturally occurring amino acid

SEQ ID NO: 1018260 - protein, 96 aa, Homo sapiens
GKKYSFHLRSFMYVPGKLHDVEHVLIDVGTGYYVEKTAEDAKDFFKRKIDFLTKQMEKIQPALQEKHAMKQAVMEMMSQKIQQLTALGAAQATAKA

SEQ ID NO: 1018261 - protein, 107 aa, Homo sapiens
GKKYSFHLRSFMYVPGKLHDVEHVLIDVGTGYYVEKTAEDAKDFFKRKIDFLTKQMEKIQPALQEKHAMKQAVMEMMSQKIQQLTALGAPAGLCAGPLLWDDGCTRR

SEQ ID NO: 1018262 - protein, 76 aa, Homo sapiens
ICSHYSGGWTSKIKALADLVPPKTSREKVTTCKLRKEVCVLTWPFLYTCTPGIPSASYKDASAIELSSCSYDFIYL

SEQ ID NO: 1018263 - protein, 151 aa, Homo sapiens
PPGGGVYFGIVVGRLALCDAPLVVMSEAPFVMFSPPPMFPSRRGGCFSARQVRLRCSSLRRGVFFFTVGGWCFSHRALFSCAPGVVLVGSPCTEVQQHVGPRAAHTNGVFLKNFFRGADGAPRAQSCCFFVCFFFCCCAPLFIFFFFVFFF

SEQ ID NO: 1018264 - protein, 234 aa, Homo sapiens
MLRVPEPRPGEAKAEGAAPPTPSKPLTSFLIQDILRDGAQRQGGRTSSQRQRDPEPEPEPEPEGGRSRAGAQNDQLSTGPRAAPEEAETLAETEPERHLGSYLLDSENTSGALPRLPQTPKQPQKRSRAAFSHTQVIELERKFSHQKYLSAPERAHLAKNLKLTETQVKIWFQNRRYKTKRKQLSSELGDLEKHSSLPALKEEAFSRASLVSVYNSYPYYPYLYCVGSWSPAFW

SEQ ID NO: 1018265 - protein, 238 aa, Homo sapiens
PSKVNVHVLGVLLGQKEGTRSIKEEMSSSTLEEGVYGRALKLMSTSNTWCDLGINYYRQAQDLAETGSNMNDLKELLEKSLHGLKKAVRLDRNNHLYWTCVLRVVACYSGDGNLCALLSDCFIKSIQFENKLMLLHGPTWECYTSPNENIEPKLMRLSKWLNPLIHLISTVLDWHKLLFAEAVGKVMTPWSLFQATRTWNLHMHYWVGVKVMRSRVLPTFARLTSSENQKVVPFKSSQ

SEQ ID NO: 1018266 - protein, 126 aa, Homo sapiens
  misc_feature (98)..(98): Xaa can be any naturally occurring amino acid
SGHPGVAGNAPLGLTSDHLPLLPSFHTEAPALLCLRGPQLASALLPLPFEVGTIHSTCRQVKRNGKFKARLRQNQDAECPMKRLTTLETPETSSSISXKTQRLDDININDPTLKHNLPSVITQHPH

SEQ ID NO: 1018267 - protein, 88 aa, Homo sapiens
  misc_feature (62)..(62): Xaa can be any naturally occurring amino acid
TKDIVNGLRSVQTFADKSKQEALKNDLVEDFEEKAAMLNLCFMLTRHAVHSLDSFLKKTRFXHPTLVPSLPYRSHNSCIIDRTAHISP

SEQ ID NO: 1018268 - protein, 221 aa, Homo sapiens
  misc_feature (207)..(207): Xaa can be any naturally occurring amino acid
DASEIFSLLESARKPTEFIGGVTSTSQSWVQKMETKTESSGIETEPTVHHLPLSTEKVVQETVLVEERRVVHASGDASYSAGDSGDAAAQPAFTGIKGKEGSALTEGAKEEGGEEVAKAVLEQEETAAASRERQEEQSAAIHISETLEQKPHFESSTVKTETISFGSVSPGGVKLEISTKEVPVVHTETKTITYESSQVRYSVKTRXLAAYFTPLWPSVFT

SEQ ID NO: 1018269 - protein, 294 aa, Homo sapiens
DASEIFSLLESARKPTEFIGGVTSTSQSWVQKMETKTESSGIETEPTVHHLPLSTEKVVQETVLVEERRVVHASGDASYSAGDSGDAAAQPAFTGIKGKEGSALTEGAKEEGGEEVAKAVLEQEETAAASRERQEEQSAAIHISETLEQKPHFESSTVKTETISFGSVSPGGVKLEISTKEVPVVHTETKTITYESSQVDPGTDLEPGVLMSAQTITSETTSTTTTTHITKTVKGGISETRIEKRIVITGDADIDHDQALAQAIKEAKEQHPDMSVTKVVVHKETEITPEDGED

SEQ ID NO: 1018270 - protein, 264 aa, Homo sapiens
DASEIFSLLESARKPTEFIGGVTSTSQSWVQKMETKTESSGIETEPTVHHLPLSTEKVVQETVLVEERRVVHASGDASYSAGDSGDAAAQPAFTGIKGKEGSALTEGAKEEGGEEVAKAVLEQEETAAASRERQEEQSAAIHISETLEQKPHFESSTVKTETISFGSVSPGGVKLEISTKEVPVVHTETKTITYESSQVDPGTDLEPGVLMSAQTITSETTSTTTTTHITKTVKGGISETRIEKRIVITGDADIDHDQVVCVRR

SEQ ID NO: 1018271 - protein, 276 aa, Homo sapiens
DASEIFSLLESARKPTEFIGGVTSTSQSWVQKMETKTESSGIETEPTVHHLPLSTEKVVQETVLVEERRVVHASGDASYSAGDSGDAAAQPAFTGIKGKEGSALTEGAKEEGGEEVAKAVLEQEETAAASRERQEEQSAAIHISETLEQKPHFESSTVKTETISFGSVSPGGVKLEISTKEVPVVHTETKTITYESSQVDPGTDLEPGVLMSAQTITSETTSTTTTTHITTGDADIDHDQALAQAIKEAKEQHPDMSVTKVVVHKETEITPEDGED

SEQ ID NO: 1018272 - protein, 294 aa, Homo sapiens; identical to SEQ ID NO: 1018269

SEQ ID NO: 1018273 - protein, 294 aa, Homo sapiens; identical to SEQ ID NO: 1018269

SEQ ID NO: 1018274 - protein, 260 aa, Homo sapiens
DASEIFSLLESARKPTEFIGGVTSTSQSWVQKMETKTESSGIETEPTVHHLPLSTEKVVQETVLVEERRVVHASGDASYSAGDSGDAAAQPAFTGIKGKEGSALTEGAKEEGGEEVAKAVLEQEETAAASRERQEEQSAAIHISETLEQKPHFESSTVKTETISFGSVSPGGVKLEISTKEVPVVHTETKTITYESSQVDPGTDLEPGVLMSAQTITSETTSTTTTTHITKTVKGGISETRIEKRIVITGDADIDHDQEE

SEQ ID NO: 1018275 - protein, 260 aa, Homo sapiens; identical to SEQ ID NO: 1018274

SEQ ID NO: 1018276 - protein, 235 aa, Homo sapiens
DASEIFSLLESARKPTEFIGGVTSTSQSWVQKMETKTESSGIETEPTVHHLPLSTEKVVQETVLVEERRVVHASGDASYSAGDSGDAAAQPAFTGIKGKEGSALTEGAKEEGGEEVAKAVLEQEETAAASRERQEEQSAAIHISETLEQKPHFESSTVKTETISFGSVSPGGVKLEISTKEVPVVHTETKTITYESSQVDPGTDLEPGVLMSAQTITSETTSTTTTTHITAGSGN

SEQ ID NO: 1018277 - protein, 276 aa, Homo sapiens; identical to SEQ ID NO: 1018271

SEQ ID NO: 1018278 - protein, 141 aa, Homo sapiens
  misc_feature (40)..(40): Xaa can be any naturally occurring amino acid
  misc_feature (44)..(44): Xaa can be any naturally occurring amino acid
  misc_feature (60)..(60): Xaa can be any naturally occurring amino acid
  misc_feature (65)..(66): Xaa can be any naturally occurring amino acid
  misc_feature (93)..(93): Xaa can be any naturally occurring amino acid
SFSSPQLGTRPRSYAPAQSGSTLSKFKVGEGWPRRVSTNXPPPXAPAPVPSTPPGAGRGXSASGXXGPERRLTLDGVDERPVLMADLAATAFXASASKLAGSIISSPESDGSVSSRLERSEEPFVSAEPRRDLGDKGDASG

SEQ ID NO: 1018279 - protein, 348 aa, Homo sapiens
MNDSLRTDVFVRFQPESIACACIYLAARTLEIPLPNRPHWFLLFGATEEEIQEICLKILQLYARKKVDLTHLEGEVEKRKHAIEEQGPSPGPVAWGHTGAGWYLGVLPCQWSQCIDFVIALLGAIWDHCKLRLPDSGDSCASASQVAGIAGAHHHAQSLAVLPVESPKEGKGSKPSPLSVKNTKRRLEGAKKAKADSPVNGLPKGRESRSRSRSREQSYSRSPSRSASPKRRKSDSGSTSGGSKSQSRSRSRSDSPPRQAPRSAPYKGSEIRGSRKSKDCKYPQKPHKSRSRSSSRSRSRSRERADNPGKYKKKSHYYRDQRRERSRSYERTGRRYERDHPGHSRHRR

SEQ ID NO: 1018280 - protein, 286 aa, Homo sapiens
PHPHHQPWAQLHPSPQNTPQKVPVHQHSPSEPFLEKPVPDMTQVSGPNAQLVKSDDYLPSIEQQPQQKKKKKKNNHIVAEDPSKGFGKDDFPGGVDNQELNRNSLDGSQEEKKKKKRSKAKKDPKEPKEPKEKKKPKEPKTPKAPKIPKEPKEKKAKTATPKPKSSKKSSNKKPDSEASALKKKVNKGKTEGSENSDLDKTPPPSPPPEEDEDPGVQKRRSSRQVKRKRYTEDLEFKISDEEADDADAAGRDSPSNTSQSEQQESVDAEGPVVEKIMSTRSVQSED

SEQ ID NO: 1018281 - protein, 159 aa, Homo sapiens
TPSSPALGTAPPITPEHPAESACASAFPVGALSRETSAGYDSDNKKPDSEASALKKKVNKGKTEGSENSDLDKTPPPSPPPEEDEDPGVQKRRSSRQVKRKRYTEDLEFKISDEEADDADAAGRDSPSNTSQSEQQESVDAEGPVVEKIMSPRSVQSED

SEQ ID NO: 1018282 - protein, 246 aa, Homo sapiens
MTQVSGPNAQLVKSDDYLPSIEQQPQQKKKKKKNNHIVAEDPSKGFGKDDFPGGVDNQELNRNSLDGSQEEKKKKKRSKAKKDPKEPKEPKEKKKPKEPKTPKAPKIPKEPKEKKAKTATPKPKSSKKSSNKKPDSEASALKKKVNKGKTEGSENSDLDKTPPPSPPPEEDEDPGVQKRRSSRQVKRKRYTEDLEFKISDEEADDADAAGRDSPSNTSQSEQQESVDAEGPVVEKIMSTRSVQSED

SEQ ID NO: 1018283 - protein, 149 aa, Homo sapiens
  misc_feature (9)..(9): Xaa can be any naturally occurring amino acid
  misc_feature (88)..(88): Xaa can be any naturally occurring amino acid
  misc_feature (113)..(113): Xaa can be any naturally occurring amino acid
MSPAQHAPXERARARWEPHTPRTWLGSASGSGRDLSVRLRRRRRFLFSKTGSDLDVYGRCVCQMLPTEVLALVGFSLPRVVIKSWGMXSAQPPPGRAAPPLIGLLFFFFSQNXFFLPASLRAPPHPARTHSVHCLNTSLMGLFSHNINE

SEQ ID NO: 1018284 - protein, 39 aa, Homo sapiens
PGRSSPAAVPWLPGRPTLAVDTFAVRAAPPHLPLEDAGA

SEQ ID NO: 1018285 - protein, 127 aa, Homo sapiens
RLWFTSAWDYAHCIVSRQYRLLVFQRHPEQRWREVADVLEELTTTWYFGARLIVLWLLSRVLENNFLLAIAGLAILAARRLVSLLAKDKKLHHLTSKHPYAADPVVAVITSSGHKLFHTISRLASFK

SEQ ID NO: 1018286 - protein, 149 aa, Homo sapiens
MPLFPLSFRGTDGLTAGLPIPSVSCRRVAGGRSDKAWSLPLCLCGVPAQQAWDLAAAPPPGHREAWGAGTLRLGGLWDTDPCKPVASYFSHPTSLPLPDDSHGWGFCLPKALCLSFLTKEQGANGDKGDQETAQPGAKPAAIAMEVHSC

SEQ ID NO: 1018287 - protein, 172 aa, Homo sapiens
  misc_feature (33)..(33): Xaa can be any naturally occurring amino acid
ETALNAKAYKRSKRQSLAEARITEKLRSSRRSXQRKRRQKHQEYLNSILQHAKDFKEYHRSVTGKIQKLTKAVATYHANTEREQKKENERIEKERMRRLMAEDEEGYRKLIDQKKDKRLAYLLQQTDEYVANLLQQTDEYVANLTELVSEHKAAQVAKEKKKKKKKKKAKKK

SEQ ID NO: 1018288 - protein, 89 aa, Homo sapiens
LKLFLQRGNDLLEFKLLQGGYLVFSTFAVSYTASIMSSPFNPLNTYTAFSLTELMATMNLNSEIHRGEFVLTAAFTMKPWSYYSQDPWF

SEQ ID NO: 1018289 - protein, 214 aa, Homo sapiens
ALTCGDQPIQFRQQRIFAASPFKERALPAAQRRFFYGHRRSSTANRSVSHAASCLSRYSSASRCAFNGLLTTSPHGISQQFTNEGEAQCAYADVVVSVSHRMDSIFVDIEALSNQAATACCTFNALLPPAFLRLLYGAPGEQPRFTLRRNDLWLRNQVECPVADAVLVDPFFRLNDLRYLSGAAGDAVGDPVKLNERYAKLLGDFAASDRAAAS

SEQ ID NO: 1018290 - protein, 764 aa, Homo sapiens
MNVNQVAENLALSHQEELVDLPKNYPLSENEDEGDSDGERKHQKLLEAIISLDGKNRRKLAERSEASLKVSEFSVSSEGSGEKLGLADLLEPVKTSSSLATVKKQLNRVKSKKVVELPLNKEKIEQIHREVAFSKTSQVLSKWDPIILKNQQAEQLVFPLGKEQPAIAPIEHALSGWKARTPLEQEIFNLLHKNKQPVTDPLLTPMEKASLQAMSLEEAKMHRAELQRARALQSYYEAKARKEKKIKSKKYHKVVKKGKAKKALKEFEQLQKVNPTVALEEMEKIENARMMERMSLKHQNSGKWAKSKAIMAKYDLEARQAMQEQLAKNKELTQKLQVASESEEEEGGTEVEELLVPHVANEVQMNVDGPNPWMFRSCTSDTKEAATQEDPEQVPELAAHEVSASEAEERPVAEEEILLREFEERQSLRKRSELNQDAEPASSQETKDSSSQEVLSELRALSQKLKEKHQSRKQKASSEGTVPQVQREEPAPEEAEPLLLQRSERVQTLEELEELGKEDCFQNKELPRPVLEGQQSERTPNNRPDAPKEKKEKEQLINLQNFLTTQSPSVRSLAVPTIIEELEDEEERDQRQMIKEAFAGDDVIRDFLKEKREAVEASKPKDVDLTLPGWGEWGGVGLKPSAKKRRQFLIKAPEGPPRKDKNLPNVIISEKRNIHAAAHQVQVLPYPFTHHRQFERTIQTPIGSTWNTQRAFQKLTTPKVVTKPGHIIKPIKAEDVGYQSSSRSDLPVIQRNPKRITTRHTKTR

SEQ ID NO: 1018291 - protein, 766 aa, Homo sapiens
MNVNQVAENLALSHQEELVDLPKNYPLSENEDEGDSDGERKHQKLLEAIISLDGKNRRKLAERSEASLKVSEFSVSSEGSGEKLGLADLLEPVKTSSSLATVKKQLNRVKSKKVVELPLNKEKIEQIHREVAFSKTSQVLSKWDPIILKNQQAEQLVFPLGKEQPAIAPIEHALSGWKARTPLEQEIFNLLHKNKQPVTDPLLTPMEKASLQAMSLEEAKMHRAELQRARALQSYYEAKARKEKKIKSKKYHKVVKKGKAKKALKEFEQLQKVNPTVALEEMEKIENARMMERMSLKHQNSGKWAKSKAIMAKYDLEARQAMQEQLAKNKELTQKLQVASESEEEEGGTEVEELLVPHVANEVQMNVDGPNPWMFRSCTSDTKEAATQEDPEQVPELAAHEVSASEAEERPVAEEEILLREFEERQSLRKRSELNQDAEPASSQETKDSSSQEVLSELRALSQKLKEKHQSRKQKASSEGTVPQVQREEPAPEEAEPLLLQRSERVQTLEELEELGKEDCFQNKELPRPVLEGQQSERTPNNRPDAPKEKKEKEQLINLQNFLTTQSPSVRSLAVPTIIEELEDEEERDQRQMIKEAFAGDDVIRDFLKEKREAVEASKPKDVDLTLPGWGEWGGVGLKPSAKKRRQFLIKAPEGPPRKDKNLPNVIISEKRNIHAAAHQVQVLPYPFTHHRQFERTIQTPIGSTWNTQRAFQKLTTPKVVTKPGHIIKPIKAEDVGYQSSSRSDLPVIQRNPKRITTRHNKEEKL

SEQ ID NO: 1018292 - protein, 214 aa, Homo sapiens
LGDPPPSPRWQRPIPGSGARDGRIALGLRLPGPALPRFPRLFHCVSAPRRHPASPSDGREDGCTELAVTMLAQQAEEGSARLREMLSVGLGFLRTELGLDLGAGSRNGLPRAGVDPGWGTFGAASGAACLLGISAGSYRLGAAALRPGRPGKKGGSEARARKAGSEGGGPRPGRGPPNELGPLLKEISGARNKKKKNRKKLSEEGPNQMGGLLK

SEQ ID NO: 1018293 - protein, 158 aa, Homo sapiens
  misc_feature (15)..(15): Xaa can be any naturally occurring amino acid
  misc_feature (20)..(20): Xaa can be any naturally occurring amino acid
  misc_feature (36)..(36): Xaa can be any naturally occurring amino acid
  misc_feature (41)..(41): Xaa can be any naturally occurring amino acid
  misc_feature (46)..(46): Xaa can be any naturally occurring amino acid
  misc_feature (48)..(48): Xaa can be any naturally occurring amino acid
  misc_feature (53)..(53): Xaa can be any naturally occurring amino acid
  misc_feature (64)..(64): Xaa can be any naturally occurring amino acid
  misc_feature (74)..(74): Xaa can be any naturally occurring amino acid
  misc_feature (77)..(77): Xaa can be any naturally occurring amino acid
  misc_feature (116)..(116): Xaa can be any naturally occurring amino acid
TYDGRGDSVVYGLRXKSKKXRRPDIQYPDATDEDIXSHMEXEEFNXAXKAIPXAQDLNALSDWXSRGKDSYETXQLXDQSARNPHAHKQSREYKRKANDESNEHPEVIDSQELPKXSREFHSHEYHSQEDMLVEDPKSKEEDKHLKFRNFTGIRKCIF

SEQ ID NO: 1018294 - protein, 162 aa, Homo sapiens
ETQTVDNANEKSEKPPENQKKLSDKDTVATKIQAWWRGTLVRRALLHAALSACIIQCWWRLILSKILKKRRQAALEAFSRKEWAAVTLQSQARMWRIRRRYCQVLNAVRIIQAYWRCRSCASRGFIKGQYRVTANQLHLQLEILLDSGPCIVTECIPFSIKE

SEQ ID NO: 1018295 - protein, 105 aa, Homo sapiens
VPVPPEWALPGPRPFPSAFYAPSLLFRLFRALCQKPGPLTWPSGSFCPPPFCGVLHALPALDSAREAGDEEDKENQGDETQGQQTTSTSVPPRTSSYRAQTPRKP

SEQ ID NO: 1018296 - protein, 105 aa, Homo sapiens; identical to SEQ ID NO: 1018295

SEQ ID NO: 1018297 - protein, 105 aa, Homo sapiens; identical to SEQ ID NO: 1018295

SEQ ID NO: 1018298 - protein, 241 aa, Homo sapiens
  misc_feature (229)..(229): Xaa can be any naturally occurring amino acid
GGRGPGGPAPGGTNGLSLSGELRLGPGWAGGASGPGGAGRARPLPCSGEGEREQRRTEGISSLAPGTSSKPRPSFLLSCRHAPLTRTDPRQGRRRRLHPRNECFGVAVAVVVFVAAAAACKAAGAGLENISGLGPSLTTASSLPGQRRPAIRCDASTCHPRTRDYRGHGTGGVTAPAPGARPSCCSARLREPQGGEAGRTKRQAAEGCGPELRLRAGRSPRPTRTSVTXSPPQTLSDKGGG

SEQ ID NO: 1018299 - protein, 289 aa, Homo sapiens
  misc_feature (277)..(277): Xaa can be any naturally occurring amino acid
MCKGVHQRSFRVSKRYLSVEMKTGEFLLAGLVLGWMILVWNLTGCLCCHLHKKCHLFFAQRVDNPKDANWCWISYFQRPFLSSSFWTVFTLSSIWFLYHIAVTVRIFTLNWFCEPRFGHFTAVQLASSFISLLILDPRQGRRRRLHPRNECFGVAVAVVVFVAAAAACKAAGAGLENISGLGPSLTTASSLPGQRRPAIRCDASTCHPRTRDYRGHGTGGVTAPAPGARPSCCSARLREPQGGEAGRTKRQAAEGCGPELRLRAGRSPRPTRTSVTXSPPQTLSDKGGG

SEQ ID NO: 1018300 - protein, 69 aa, Homo sapiens
ASWESRTHTEGTSEDPAGVQMSLTALLSQSEDESAQPLQKPAPSLPDPTTEKPPGAAGQCSAEGPSATA

SEQ ID NO: 1018301 - protein, 381 aa, Homo sapiens
GSGEPNPAGKKKKYLKAALYVGDLDPDVTEDMLYKKFRPAGPLRFTRICRDPVTRSPLGYGYVNFRFPADAEWALNTMNFDLINGKPFRLMWSQPDDRLRKSGVGNIFIKNLDKSIDNRALFYLFSAFGNILSCKVVCDDNGSKGYAYVHFDSLAAANRAIWHMNGVRLNNRQVYVGRFKFPEERAAEVRTRDRATFTNVFVKNIGDDIDDEKLKELFCEYGPTESVKVIRDASGKSKGFGFVRYETHEAAQKAVLDLHGKSIDGKVLYVGRAQKKIERLAELRRRFERLRLKEKSRPPGVPIYIKNLDETINDEKLKEEFSSFGSISRAKVMMEVGQGKGFGVVCFSSFEEATKAVDEMNGRIVGSKPLHVTLGQARRRC

SEQ ID NO: 1018302 - protein, 329 aa, Homo sapiens
  misc_feature (1)..(1): Xaa can be any naturally occurring amino acid
XRGSGKLLITVPGFSRPACPPSLSLLLALGPSVGLSCGEKPQPIGLRWDRLPRICPSSLTPPRIWPDPPRVRADPLTARLPVNLSGPASSLRLLKSPRLTRLAAANRAIWHMNGVRLNNRQVYVGRFKFPEERAAEVRTRDRATFTNVFVKNIGDDIDDEKLKELFCEYGPTESVKVIRDASGKSKGFGFVRYETHEAAQKAVLDLHGKSIDGKVLYVGRAQKKIERLAELRRRFERLRLKEKSRPPGVPIYIKNLDETINDEKLKEEFSSFGSISRAKVMMEVGQGKGFGVVCFSSFEEATKAVDEMNGRIVGSKPLHVTLGQARRRC

SEQ ID NO: 1018303 - protein, 173 aa, Homo sapiens
EEDDKEDDDDDEDDDDEEDEEEEEEEEEDDDDDTEDFADQENLPDPQDISCHQSPSKTDHLTEKAYSDTPRDFPDSFQAGSPGHLGVIRDFSIESLLRENLYPKANIPDRGPSLSPFAPDFFPHLWARGDFGAFAQLPEEPMGQWATGSGHQNRKIKEEEKESCPHPHHPQYT

SEQ ID NO: 1018304 - protein, 174 aa, Homo sapiens
MGARMTRAFRNFNVEKRAEQEISKRKPSMAPKHPSTRSLLQEHLSQYPEIEEEVSRKDNKLLSLLRDVYVNSKDPVPSLPVKAIEPQQQPKEFRLPIGDQFDKNIKDIPKGKITVVEALTLLNNHKLSPETWTAEKIAQEYHLELEDVNSLLKYFVTFEVKIVPPEDRKAIQSK

SEQ ID NO: 1018305 - protein, 102 aa, Homo sapiens
MGARMTRAFRNFNVEKRAEQEISKRKPSMAPKHPSTRSLLQEHLSRECGPFQASGDIEVSPRGLRWWQRQGIPEPKAARALFRGLHRMRSESRPNEVPRVSR

SEQ ID NO: 1018306 - protein, 131 aa, Homo sapiens
PAHVMAPEENAGTKLLLQSFERRFLAARTLRSFPWQVGGGASGEACGACGSPGQTGWVSLLKPPALLPREFLGSPRSGPRDPVPVPGAWPESLSPLLPRELAAEAGGVSTVLGGRRALVCGVQFTIIFMTF

SEQ ID NO: 1018307 - protein, 228 aa, Homo sapiens
  misc_feature (1)..(1): Xaa can be any naturally occurring amino acid
  misc_feature (5)..(6): Xaa can be any naturally occurring amino acid
  misc_feature (13)..(15): Xaa can be any naturally occurring amino acid
  misc_feature (21)..(21): Xaa can be any naturally occurring amino acid
  misc_feature (42)..(42): Xaa can be any naturally occurring amino acid
  misc_feature (45)..(45): Xaa can be any naturally occurring amino acid
  misc_feature (47)..(47): Xaa can be any naturally occurring amino acid
  misc_feature (57)..(57): Xaa can be any naturally occurring amino acid
  misc_feature (64)..(64): Xaa can be any naturally occurring amino acid
  misc_feature (66)..(67): Xaa can be any naturally occurring amino acid
  misc_feature (77)..(77): Xaa can be any naturally occurring amino acid
  misc_feature (79)..(79): Xaa can be any naturally occurring amino acid
  misc_feature (81)..(81): Xaa can be any naturally occurring amino acid
  misc_feature (85)..(85): Xaa can be any naturally occurring amino acid
XGGQXXKKKVHLXXXIHPFIXKSINIIKKYFEEYALVNQDIXENXEXWDKILALVPXTIHDELXQXXQKSHNSLQRXGXWXKVAXRYQYNINNDKYGPWLEWEIMLQDCFPRLDINVSKGINHLLKSPFSVHPKTGRISVPIDLQKVDQFDPFTVPTISFICRELDAISTNEEEKEENEAESDVKHRTRDYKKTSLAPYVKVFEHFLENLDKSRKGELLKKSDLQKDF

SEQ ID NO: 1018308 - protein, 255 aa, Homo sapiens
PPRPRVGPHSRLGVARRVEVLIVEPWLPGGRSRTVVDGGVAVAPDSARRGRSCFAIRVGLPRQWRHESWAPYAACPAWERGGCCKGPIGGFGLPAHSAAASGLASAEKILFYPALHLCSTASRLRAGVSTVVPAPKEVAEVPYRVDLQGSGMEPLFPAPFWEVIYGSHLQGQPVPPEPQPQSAAPASAAQCQPRRLPAPRAQGHHRGALPGRVCRRAPGELPCHVRHPQAHQNEDSHQYLPSLTWPGDTLVLLTL

SEQ ID NO: 1018309 - protein, 205 aa, Homo sapiens
PPRPRVGPHSRLGVARRVEVLIVEPWLPGGRSRTVVDGGVAVAPDSARRGRSCFAIRVGLPRQWRHESWAPYAACPAWERGGCCKGPIGGYRTEWICRAVAWSPSSPRRSGRLSTAATFRGNLSLLSPNHSLLPPHLLLNASHGAFLPLGLKVTIVGLYLAVCVGGLLGNCLVMYVILRHTKMKTATNIYHLYTWPGDTLVLLTL

SEQ ID NO: 1018310 - protein, 172 aa, Homo sapiens
MKLKSNYFGLPAHSAAASGLASAEKILFYPALHLCSTASRLRAGVSTVVPAPKEVAEVPYRVDLQGSGMEPLFPAPFWEVIYGSHLQGQPVPPEPQPQSAAPASAAQCQPRRLPAPRAQGHHRGALPGRVCRRAPGELPCHVRHPQAHQNEDSHQYLPSLTWPGDTLVLLTL

SEQ ID NO: 1018311 - protein, 108 aa, Homo sapiens
AECQLQLHNFPMDEHSCPLIFSSSTILAFRLSLHAYQLTFKSFKLDGVLQITSSETRFHSWGNEGSERLHLPPWGPQSWLVVAVNWEITFSDFSSRVLTTQHWEEPLN

SEQ ID NO: 1018312 - protein, 75 aa, Homo sapiens
SGLQDPVLPCSPSFQALPCVQPQFACCRISTTLPRGQRHRQTHHAPCRHVLCCARQAPATSLPPELAFSGDSGQH

SEQ ID NO: 1018313 - protein, 155 aa, Homo sapiens
  misc_feature (42)..(42): Xaa can be any naturally occurring amino acid
SHIQGGGGSRTIRAHRRRDRCRVSAPGRPTFARTTDTCCALXVRGSDDITFVARLLDSLPRSTCAGLSARLHITDSPAALRQAFCFACAAAGSHDRIVEFTGSMLLASEPVQESLRAMAAVTIAVLAEYDRVHTADLVASLRAFLEANGHWETAA

SEQ ID NO: 1018314 - protein, 637 aa, Homo sapiens
MIQSDKGADPPDKKDMKLSTATNPQNGLSQILRLVLQELSLFYSRDVNGVCLLYDLLHSPWLQALLKIYDCLQEFKEKKLVPATPHAQVLSYEVVELLRETPTSPEIQELRQMLQAPHFKALLSAHDTIAQKDFEPLLPPLPDNIPESEEAMRIVCLVKNQQPLGATIKRHEMTGDILVARIIHGGLAERSGLLYAGDKLVEVNGVSVEGLDPEQVIHILAMSRGTIMFKVVPVSDPPVNSQQMVYVRAMTEYWPQEDPDIPCMDAGLPFQKGDILQIVDQNDALWWQARKISDPATCAGLVPSNHLLKRKQREFWWSQPYQPHTCLKSTLSISMEEEDDMKIDEKCVEADEETFESEELSEDKEEFVGYGQKFFIAGFRRSMRLCRRKSHLSPLHASVCCTGSCYSAVGAPYEEVVRYQRRPSDKYRLIVLMGPSGVGVNELRRQLIEFNPSHFQSAVPHTTRTKKSYEMNGREYHYVSKETFENLIYSHRMLEYGEYKGHLYGTSVDAVQTVLVEGKICVMDLEPQDIQGVRTHELKPYVIFIKPSNMRCMKQSRKNAKVITDYYVDMKFKDEDLQEMENLAQRMETQFGQFFDHVIVNDSLHDACAQLLSAIQKAQEEPQWVPATWISSDTESQ

SEQ ID NO: 1018315 - protein, 300 aa, Homo sapiens
MRFDLDLGKKLYKDEETFESEELSEDKEEFVGYGQKFFIAGFRRSMRLCRRKSHLSPLHASVCCTGSCYSAVGAPYEEVVRYQRRPSDKYRLIVLMGPSGVGVNELRRQLIEFNPSHFQSAVPHTTRTKKSYEMNGREYHYVSKETFENLIYSHRMLEYGEYKGHLYGTSVDAVQTVLVEGKICVMDLEPQDIQGVRTHELKPYVIFIKPSNMRCMKQSRKNAKVITDYYVDMKFKDEDLQEMENLAQRMETQFGQFFDHVIVNDSLHDACAQLLSAIQKAQEEPQWVPATWISSDTESQ

SEQ ID NO: 1018316 - protein, 182 aa, Homo sapiens
KPMSSTDLPVPDARAETAARARQLQLTKPPGSLGRLEELACWFAARSGNPIPEISRTEVFVFAADHGVAAQGVSAFPPSVTGQMVANFAAGGAAINVLARLESCPMQVVDVGVAGDAEPPPAVRREKVRAGTRDLLVEAAMTEDELTAALGVGARCAREAIQRGAQLLIAGDMGIANTTAAA

SEQ ID NO: 1018317 - protein, 113 aa, Homo sapiens
TLKLTFESRLLQQPISNPTTSNLQNKTDLKLPLFSQTPACLNQSQGSLLPLPYVTPTKSYLPILYCRLLRRQVLPVHPTAAPHSLSYPTSRNFFKRRFYIGRHPTLKGVPSQL

SEQ ID NO: 1018318 - protein, 192 aa, Homo sapiens
MKEMLRKFSTEITLDPATANAYLVLSEDLKSVKYGGSRQQLPDNPERFDQSATVLGTQIFTSGRHYWEVEVGNKTEWEVGICKDSVSRKGNLPKPPGDLFSLIGLKIGDDYSLWVSSPLKGQHVREPVCKVGVFLDYESGHIAFYNGTDESLIYSFPQASFQEALRPIFSPCLPNEGTNTDPLTICSLNSHV

SEQ ID NO: 1018319 - protein, 261 aa, Homo sapiens
GTRETPCVHHSTSLEETGDAFLCSLCSHSWCASWEADSEVRGALERSEPLLLQCPEATTTELSLCRITGMKEMLRKFSTEITLDPATANAYLVLSEDLKSVKYGGSRQQLPDNPERFDQSATVLGTQIFTSGRHYWEVEVGNKTEWEVGICKDSVSRKGNLPKPPGDLFSLIGLKIGDDYSLWVSSPLKGQHVREPVCKVGVFLDYESGHIAFYNGTDESLIYSFPQASFQEALRPIFSPCLPNEGTNTDPLTICSLNSHV

SEQ ID NO: 1018320 - protein, 99 aa, Homo sapiens
GAPQPTLDSGPPTLRSVLPPRGLQAPPPTFFAMFLFCWNHTRLISNIKYLCLQQGGEEGPHAAELAPPPGTQARGDIGKGTPAPCPPLSAPYCGKETRT

SEQ ID NO: 1018321 - protein, 101 aa, Homo sapiens
GAPQPTLDSGPPTLRSVLPPRGLQAPPPTPSPSPPSPRPALHPYSPYLTPSFNSERKSGRTRRSWPRRLVLKPAGTLGRGPPPPALPSLHRTVEKKHALSL

SEQ ID NO: 1018322 - protein, 66 aa, Homo sapiens
AILVKFTLKSRIPQLSVAQPVKWQVQPSPYLSSRLPKDFVNLFTGEDAPKLIDFLKLKRNQQEDDL

SEQ ID NO: 1018323 - protein, 129 aa, Homo sapiens
GVFGFVHFGEDLIQGLQFLVREIRSVMGEVCRIQGHLGYPSSGVLPRQGIVGGSSSIKLLSGGDIKHHSLHCQVDGLIFLLFPIAGQLLLGEKPHWGPPLRRARLSARPGLWASPGASARTRASAASAR

SEQ ID NO: 1018324 - protein, 144 aa, Homo sapiens
DLAASESLFGESSVAALDAWPTCCKRWPMKVGKSRIAWPCAILPMWTMSASKRCLCDECPLPDFPRYPLSLRQPGVPGPAQWRTCGRGLRLAACSSQQLEISPEPTSRRDELDVFGNPITRLAFERPHDELLVNAGLTVEVLRG

SEQ ID NO: 1018325 - protein, 172 aa, Homo sapiens
  misc_feature (73)..(73): Xaa can be any naturally occurring amino acid
SADALSTSCTRSTQLNVATGKAGQACQYVKRPPIAAAEEPPNLSPQKDPQPPLSCSGPAGFPPQGMREGTLVXKPLLPSAFRTRSPGERLVVSSKVGLQVVLGSNITAQPSLTTDFVTVDLMRVVGESVPGNNPQLFLVAAGRGRFYTADLSPGKKHGALGTHCAWMGAGPT

SEQ ID NO: 1018326 - protein, 341 aa, Homo sapiens
MKKISLKTLRKSFNLNKSKEETDFMVVQQPSLASDFGKDDSLFGSCYGKDMASCDINGEDEKGGKTDQSESLMGTLKRLSAKQKSKGKAGTPSGSSADEDTFSSSSAPIVFKDLRAQRPIRSTSLRSHHYRPAPWPLRPTNSEETCIKMEVRVKALVHSSSPSPALNGVRKDFHDLQSETTCQEQANSLKSSASHNGDLHLHLYEHVPVVIGLMPQDYIQYTVPLDEGMYPLEGSRSYCLDSSSPMEVSAVPPQVGGRAFPEDESQVDQDLVVAPEIFVDQSVNGLLIGTTGVMLQSPRAGHDDVPPLSPLLPPMQNNQIQRNFSGLTGTEAHVAESMRCI

SEQ ID NO: 1018327 - protein, 36 aa, Homo sapiens
MAVTPVMPVISAVVLSPSIKGPQKIARKAKAASIRV

SEQ ID NO: 1018328 - protein, 551 aa, Homo sapiens
MLPLLLLPLLWGGSLQEKPVYELQVQKSVTVQEGLCVLVPCSFSYPWRSWYSSPPLYVYWFRDGEIPYYAEVVATNNPDRRVKPETQGRFRLLGDVQKKNCSLSIGDARMEDTGSYFFRVERGRDVKYSYQQNKLNLEVTALIEKPDIHFLEPLESGRPTRLSCSLPGSCEAGPPLTFSWTGNALSPLDPETTRSSELTLTPRPEDHGTNLTCQMKRQGAQVTTERTVQLNVSYAPQTITIFRNGIALEILQNTSYLPVLEGQALRLLCDAPSNPPAHLSWFQGSPALNATPISNTGILELRRVRSAEEGGFTCRAQHPLGFLQIFLNLSVYSLPQLLGPSCSWEAEGLHCRCSFRARPAPSLCWRLEEKPLEGNSSQGSFKVNSSSAGPWANSSLILHGGLSSDLKVSCKAWNIYGSQSGSVLLLQGRSNLGTGVVPAALGGAGVMALLCICLCLIFFLIVKARRKQAAGRPEKMDDEDPIMGTITSGSRKKPWPDSPGDQASPPGDAPPLEEQKELHYASLSFSEMKSREPKDQEAPSTTEYSEIKTSK

SEQ ID NO: 1018329 - protein, 129 aa, Homo sapiens
KAQWMHDSPEANHNKLNQDDARYGFRSCHIKNIWTAPLPLETELSRQMTTSTTSIDIMGLQAAYANLHTDQERDYFMQRYRDVISSFGGKTSYDADNRPLLVMRSNLWASGYDVDGTDQTSLGSTRPRI

SEQ ID NO: 1018330 - protein, 126 aa, Homo sapiens
KAQWMHDSPEANHNKLNQDDARYGFRSCHIKNIWTAPLPLETELSRQMTTSTTSIDIMGLQAAYANLHTDQERDYFMQRYRDVISSFGGKTSYDADNRPLLVMRSNLWASGYDVDGTDQTSLGQIL

SEQ ID NO: 1018331 - protein, 35 aa, Homo sapiens
PAELEDSGVYFCASSQSLEGTQYFGPGTRLLVLED

SEQ ID NO: 1018332 - protein, 131 aa, Homo sapiens
KTQGLSPKKRGCGKVPRRQTTDDPRPDAAEAEAAAFGGSPPSQIHTFWARPELSHVGVREPGAGGRCGGRAGGVLTPRTCFTGKAAVFTYLIANSDEFLYQLHSCAPRIQFLSSFGHPRFPAMDSCNKPLS

SEQ ID NO: 1018333 - protein, 171 aa, Homo sapiens
WPALTTLLFENVGGSEKSLLSSQVPLRDAGRAGHLGVTSASLALCLVVTLRLLREQYGLDVRQDAALGDGDFAQQLVQFLVVADGQLEVTRDDARLLFVPSSVGRQLQVYRGSDTLGPQPCKRERSAPLAPVSLPLRTGEMHSPYRELKANAGRARLGLGAGVASLRSTDQ

SEQ ID NO: 1018334 - protein, 34 aa, Homo sapiens
WPALTTLLFENVGGSEKSLLSSQVPLLSSSKQPY

SEQ ID NO: 1018335 - protein, 124 aa, Homo sapiens
APGKALRPLAIALRTNAQDQFLLKQLVSNVLIFSCTNIVGVCTHYPAEVSQRQAFQETRECIQARLHSQRENQQQERLLLSVLPRHVAMEMKADINAKQEDMMFHKIYIQKHDNVSILFADIEG

SEQ ID NO: 1018336 - protein, 204 aa, Homo sapiens
APGKALRPLAIALRTNAQDQFLLKQLVSNVLIFSCTNIVGVCTHYPAEVSQRQAFQETRECIQARLHSQRENQQQERLLLSVLPRHVAMEMKADINAKQEDMMFHKIYIQKHDNVSILFADIEGFTSLASQCTAQELVMTLNELFARFDKLAAENHCLRIKILGDCYYCVSGLPEARADHAHCCVEMGMDMIEPSRWSGLVRVD

SEQ ID NO: 1018337 - protein, 232 aa, Homo sapiens
SAWLSCGLNESLPYRYGVTKSTINGHLCPTWEQLNMCDWDLSQPYNQVRSHIPFKRSFLKIEDRELNIGPVVAGVIGARKPQYDIWGNTVNVASRMDSTACTRPHPGHHRHVPGAGCQHVPAGVPGRGQGQGQRRDDDLLPQWRVPAQLAAVGQWCQAAWPPEAWKQLLCVPGVAGKPCSSPQGCAAEIFHLDSRAASAFAGGQRPLSQAPGCQRPASTQLTKDVSLCRRLC

SEQ ID NO: 1018338 - protein, 190 aa, Homo sapiens
MKLMDQMKYINEHSFNNFQMKIGLNIGPVVAGVIGARKPQYDIWGNTVNVASRMDSTGVPDRIQVTTDMYQVLAANTYQLEFRGVVKVKGKGEDDDLLPQWRVPAQLAAVGQWCQAAWPPEAWKQLLCVPGVAGKPCSSPQGCAAEIFHLDSRAASAFAGGQRPLSQAPGCQRPASTQLTKDVSLCRRLC

SEQ ID NO: 1018339 - protein, 110 aa, Homo sapiens [sequence omitted]

SEQ ID NO: 1018340 - protein, 168 aa, Homo sapiens
TREFLEEKLGHRHGIDITCPQEPLSFPVGLGKAQHNPEVHVRAEPVQGCPCNYRAPSCKVTRTKSCSQQAIFVGQNYPTRIRQIIDKDRQPQKVEAFKGKILCQSHPQSMPHRKPVPHPNPTCRRQVSLVCPAVPTSAKSPVFSDVPFLTGQKMLPKHLQGGKFPPTK

SEQ ID NO: 1018341 - protein, 153 aa, Homo sapiens
CWYVYLESKNCIQRDLAARNCLVGENNVLKISDFGMSRQEDGGVYSSSGLKQIPIKWTAPEALNYGRYSSESDVWSFGILLWETFSLGVCPYPGMTNQQAREQVERGYRMSAPQHCPEDISKIMMKCWDYKPENRPKFSELQKELTIIKRKLT

SEQ ID NO: 1018342 - protein, 389 aa, Homo sapiens
MALTPESPSSFPGLAATGSSVPEPPGGPNATLNSSWASPTEPSSLEDLVATGTIGTLLSAMGVVGVVGNAYTLVVTCRSLRAVASMYVYVVNLALADLLYLLSIPFIVATYVTKEWHFGDVGCRVLFGLDFLTMHASIFTLTVMSSERYAAVLRPLDTVQRPKGYRKLLALGTWLLALLLTLPVMLAMRLVRRGPKSLCLPAWGPRAHRAYLTLLFATSIAGPGLLIGLLYARLARAYRRSQRASFKRARRPGARALRLVLGIVLLFWACFLPFWLWQLLAQYHQAPLAPRTARIVNYLTTCLTYGNSCANPFLYTLLTRNYRDHLRGRVRGPGSGGGRGPVPSLQPRARFQRCSGRSLSSCSPQPTDSLVLAPAAPARPAPEGPRAPA

SEQ ID NO: 1018343 - protein, 105 aa, Homo sapiens
  misc_feature (6)..(6): Xaa can be any naturally occurring amino acid
LPTAGXAPAFLELLARFSELPAPQRVGTSGPRGGVGPVVGAGGIGTGQAPWLRIHKPGFGLSIYKCVYSPDCNHIPSRKCLGVFAALEARSLLTPTTSRPCTAAA

SEQ ID NO: 1018344 - protein, 105 aa, Homo sapiens
KQERLHLRLKTSVVWVVRKEKPTRFPRLGAVSHCPQLLILQLVLSPSTSKTLPRSPQTLRAHDQKEKESQVGEEQGPPTPQPSTLPRGPTLGCLEPPKVATPATQ

SEQ ID NO: 1018345 - protein, 130 aa, Homo sapiens
MRLSQSTAGVGVGLIPELWWPLHLASFEGTPAGARCGVLPPVFSAQERCLHIGLPGLKSISFLILQLVLSPSTSKTLPRSPQTLRAHDQKEKESQVGEEQGPPTPQPSTLPRGPTLGCLEPPKVATPATQ

SEQ ID NO: 1018346 - protein, 106 aa, Homo sapiens
DTQAYTFSRLEVWDFGGSQFYETQRDRFRIYPPHEGNSPPREKFRTRANFFFGKPPSPFMATVWEFPEHWTLPKPPRKISPFGDGRNPPRKNPRRYSRKTGVGPPF

SEQ ID NO: 1018347 - protein, 314 aa, Homo sapiens
  misc_feature (1)..(1): Xaa can be any naturally occurring amino acid
XNDFFKDMFPDLPGGPLGPIKAENDYGAYLNFLSATHLGGLFPPWPLVEERKLKPKASQQCPICHKVIMGAGKLPRHMRTHTGEKPYMCTICEVRFTRQDKLKIHMRKHTGERPYLCIHCNAKFVHNYDLKNHMRIHTGVRPYQCEFCYKSFTRSDHLHRHIKRQSCRMARPRRGRKPAAWRAASLLFGPGGPAPDKAAFVMPPALGEVGGHLGGAAVCLPGPSPAKHFLAAPKGALSLQELERQFEETQMKLFGRAQLEAERNAGGLLAFALAENVAAARPYFPLPDPWAAGLAGLPGLAGLNHVASMSEANN

SEQ ID NO: 1018348 - protein, 314 aa, Homo sapiens; identical to SEQ ID NO: 1018347
  misc_feature (1)..(1): Xaa can be any naturally occurring amino acid

SEQ ID NO: 1018349 - protein, 108 aa, Homo sapiens
FYFVKVMTSYKLNFSDDWLVLSVFSWLQFGIVHCKISKDVEYCMILHTTGCHSSQQDCYTHPLFSEVICLGSRLSDSCLRFRHFSLKHAHVHQPTCPRVPPHQPSDWG

SEQ ID NO: 1018350 - protein, 172 aa, Homo sapiens
MFSWFLNLQQVLKRKALLAPCLPDLLSPSLPSLFLPSLLWFLSSPERRRVRPQGEPRAGVPNPCAMGTKRLQLFLLPWLFPEQKHNKQKGQRRAQTLSLSQLSRRDPLILHTTGCHSSQQDCYTHPLFSEVICLGSRLSDSCLRFRHFSLKHAHVHQPTCPRVPPHQPSDWG

SEQ ID NO: 1018351 - protein, 68 aa, Homo sapiens
PSVPLGSRDCRKEERQEGAGCAAPPPGGALGTGKESPVGGVRWLFTPASLSWSLDLSSAGRWHRTKHG

SEQ ID NO: 1018352 - protein, 316 aa, Homo sapiens
MEGAWALPTWKEEGREQAAGQGEEEECPICTEPYGPRERRLALLNCSHGLCVGCLHRLLGSASSADLGRVRCPLCRQKTPVLEWEICRLQEELLQADGPSRQPRREAPASYHRNPGPWGSLEHRYQLRFLAGPVGGRGCLPFLPCPPCLGARLWTLRERGPCARRLALLSLLALELLGLLLVFTPLLLLGLLFVLLDRLAAEQSPGQPAANRPGGPDWPTYPCLGAVRPDDQAGKTQGWVQGSGLQSRPPIAEPTTRATQRPDPARVHGCTAAQTLAEPKDTSAQGQLLEEASPAGKSVSRTPFTLRQTGTVLATG

SEQ ID NO: 1018353 - protein, 104 aa, Homo sapiens
  misc_feature (1)..(1): Xaa can be any naturally occurring amino acid
  misc_feature (27)..(28): Xaa can be any naturally occurring amino acid
  misc_feature (31)..(31): Xaa can be any naturally occurring amino acid
  misc_feature (38)..(38): Xaa can be any naturally occurring amino acid
  misc_feature (42)..(42): Xaa can be any naturally occurring amino acid
  misc_feature (44)..(45): Xaa can be any naturally occurring amino acid
  misc_feature (52)..(53): Xaa can be any naturally occurring amino acid
  misc_feature (59)..(59): Xaa can be any naturally occurring amino acid
  misc_feature (61)..(61): Xaa can be any naturally occurring amino acid
  misc_feature (64)..(64): Xaa can be any naturally occurring amino acid
  misc_feature (66)..(66): Xaa can be any naturally occurring amino acid
  misc_feature (69)..(70): Xaa can be any naturally occurring amino acid
  misc_feature (73)..(75): Xaa can be any naturally occurring amino acid
  misc_feature (81)..(81): Xaa can be any naturally occurring amino acid
  misc_feature (97)..(97): Xaa can be any naturally occurring amino acid
  misc_feature (103)..(103): Xaa can be any naturally occurring amino acid
XLPLMALPPCHALCQFYVVNSGAVLPXXPEXGRLGLRXALQXRXXRPSHEQXXTQHGPXAXEFXTXLGXXLFXXXTPATKXARGTRPSQAGFSKVEXVTQARXR

SEQ ID NO: 1018354 - protein, 73 aa, Homo sapiens
ATWASVCLFYIAIYALLTYIDCSTFTGLKPGDFIHIFGRCTYLPEIIIEPAENSASVVEPRTFPLVSGFFVKV

SEQ ID NO: 1018355 - protein, 234 aa, Homo sapiens
AGGGGVGVRGEARGLACGAACAPPGLSVPAPAAARPSRRRAHTQRTPCTPHTLAPLLTHTHTLSLAEQEPLTILQVSGPATARWAQTSRFPFPGFSLGDDDEGRRWARTQPRRRALVGPFSWQSRSPGRARASGQSRIQRSGRSRRARRMGTPLFPAGDSGKTKTVTRKKYERIVQLLNGSESSSTDNAKFKFWVKSKGFQLGQPDEVRGGGGGAKQVLYVPVKTTVSDSPSSV

SEQ ID NO: 1018356 - protein, 134 aa, Homo sapiens
AGGGGVGVRGEARGLACGAACAPPGLSVPAPAAARPSRRRAHTQRTPCTPHTLAPLLTHTHTLSLAEQEPLTILQVSGPATARWAQTSRFPFPGFSLGDDDEGRRWARTQPRRRALVGPFSWQSRSPGRARASG

SEQ ID NO: 1018357 - protein, 146 aa, Homo sapiens
AGGGGVGVRGEARGLACGAACAPPGLSVPAPAAARPSRRRAHTQRTPCTPHTLAPLLTHTHTLSLAEQEPLTILQVSGPATARWAQTSRFPFPGFSLGDDDEGRRNQRSPVWGSHHYSGYPPPAACLRLPTSPWNGYLFGALQSIL

SEQ ID NO: 1018358 - protein, 53 aa, Homo sapiens
LLSPPWAKQGRSGLGVAWMWAKSTVLLGGKSPLKKNQPSLPRILSWKIYEVGN

SEQ ID NO: 1018359 - protein, 159 aa, Homo sapiens
MGRIVQAPTPGLAPGSRAEGNPRADLWGRMRMKTWSFHCLGFDRPTGISTGDRGSGEGVALSRLFRGFPASGLLPLDRSQVRGGDVSAPGGGGDGEVEEVQPQAARLSPADSCGNRGGGTLPLSRRPRERWRGALNPRSFERLLCASAASRRARDKQWV

SEQ ID NO: 1018360 - protein, 257 aa, Homo sapiens
MNGRKHFVEKRYSEFHALHKKLKKCIKTPEIPSKHVRNWVPKVLEQRRQGLETYLQAVILENEELPKLFLDFLNVRHLPSLPKAESCGSFDETESEESSKLSHQPVLLFLRDPYVLPAASDFPNVVNRRSPPWDILPSSTAQACLAHIALQVVHCTSPSSVIHMDHSVNSIPSHAWNPALGELSKTLIIQTMDSQAIDERTGPENRIPERPDPDSRPIPITHLNVRMFGTSFVPAWFLHLASFAWTVLRCFPYAVPF

SEQ ID NO: 1018361 - protein, 169 aa, Homo sapiens
MNGRKHFVEKRYSEFHALHKKLKKCIKTPEIPSKHVRNWVPKVLEQRRQGLETYLQAVILENEELPKLFLDFLNVRHLPSLPKAESCGSFDETESEESSKLSHQPVLLFLRDPYVLPAASDFPNVVNRRSPPWDILPSSTAQVENPTWLKEAEASFEVTVKEINTTNLT

SEQ ID NO: 1018362 - protein, 126 aa, Homo sapiens
IRRLDHIVMTVKSIKDTTMFYSKILGMEVMTFKEDRKALCFGDQKFNLHEVGKEFEPKAAHPVPGSLDICLITEVPLEEMIQHLKACDVPIEEGPVPRTGAKGPIMSIYFRDPDRNLIEVSNYISS

SEQ ID NO: 1018363 - protein, 139 aa, Homo sapiens
LDTCEDRHYRQRHCRTDQCLPAQPPSRHHPVRSGRPIGGYTHTVNVTVDGRSYAVDTGFIVFNNWTYPNFIKLLGQIGVTFKPTEMSFSVCDPNAGFEYNGNNLNSLFAQRRNILSPGFWGMLRDILRFNRQAPLDLQE

SEQ ID NO: 1018364 - protein, 263 aa, Homo sapiens
MPIQAPSLPLLGPSPPPTHQSQHITHHHQQQQQQQQQQQQQQQQQQQQQQQTAAASRKLWGPLLLGAFPHPLEGGSYHHAHPYAMSPLPGVSEALATRDQTQPAPHLHSQVVLTGQAGTQMASSLFLFQLFLFHFSRVLPMFTPLRCRRALKGRPTLTIGDYGTPALRLPYKEHATVASIASTATRGLTTWAQRTAKRARTGGLQTAARAEYKPGRSSSEGAPRATSDPHRAGLRQPARDWPQRASGHRPTAPPARTKSVIHN

SEQ ID NO: 1018365 - protein, 123 aa, Homo sapiens
TNPGDKLGLQCGRGPSEVNRHKGDFRAQENVPSCCHRGHCHQERSREMRALACSPKANPKGHHCPAQKQGHQRQRQQLGPTSQGACVPSWSPPPQAKNGKHLGRPPSTAAGTDVCTEVSCLLN

SEQ ID NO: 1018366 - protein, 183 aa, Homo sapiens
HAAATPDTGFACNLCGQSFRGWVALVLHLRANSAAKRPIACPKCERRFWRRKTASSIIMRGATITAPEPGPSYAATVAGALPVGPASCHKRVHVAEALEEAAAKALEDTPGAPPVTAPRPGGDAVDRPFQCACCGKRFRKPNLIVTAACTRRAAPPVPECGKRFTNKPYLTLHRRIHTGEKPY

SEQ ID NO: 1018367 - protein, 59 aa, Homo sapiens
MVIPGEHWPAAVTVMLSPAPAPPGPDRQAPPARRRRGGGVDAVANAFARERVQEGAGGR

SEQ ID NO: 1018368 - protein, 151 aa, Homo sapiens
MWALHSLGVDQGGRLHSGGNNKQKQNKRGAERHKKYPQRRAPNYTDTQSFLEPRRLNRREGDINNAHQRHRRRRELTHTAPQRGKNSGNHGENHMEEEENPNHRRGARTHRWGTNSTGQRGYINTGETHINTTDESKVSEQTGDINRAVDK

SEQ ID NO: 1018369 - protein, 82 aa, Homo sapiens
MLKVHRLHILEGCLVWPLALQVLGASQQHGWRFLVLEAALCRLCRAGPLEKQWWGVAWLAGEAVVGSGLARWRSSAQAERPQ

SEQ ID NO: 1018370 - protein, 392 aa, Homo sapiens
MVRRLARGCWSALWDYETPKVIVVRNRRLGVLYRAVQLLILLYFVWYVFIVQKSYQESETGPESSIITKVKGITTSEHKVWDVEEYVKPPEGGSVFSIITRVEATHSQTQGTCPESIRVHNATCLSDADCVAGELDMLGNGLRTGRCVPYYQGPSKTCEVFGWCPVEDGASVSQFLGTMAPNFTILIKNSIHYPKFHFSKGNIADRTDGYLKRCTFHEASDLYCPIFKLGFIVEKAGESFTELAHKGGVIGVIINWDCDLDLPASECNPKYSFRRLDPKHVPASSGYNFRFAKYYKINGTTTRTLIKAYGIRIDVIVHGQAGKFSLIPTIINLATALTSVGVGSFLCDWILLTFMNKNKVYSHKKFDKMVDTPASEPAQASTPTDPKGLAQL

SEQ ID NO: 1018371 - protein, 471 aa, Homo sapiens
MAAAQPKYPAGATARRLARGCWSALWDYETPKVIVVRNRRLGVLYRAVQLLILLYFVWYVFIVQKSYQESETGPESSIITKVKGITTSEHKVWDVEEYVKPPEGGSVFSIITRVEATHSQTQGTCPESIRVHNATCLSDADCVAGELDMLGNGLRTGRCVPYYQGPSKTCEVFGWCPVEDGASVSQFLGTMAPNFTILIKNSIHYPKFHFSKGNIADRTDGYLKRCTFHEASDLYCPIFKLGFIVEKAGESFTELAHKGGVIGVIINWDCDLDLPASECNPKYSFRRLDPKHVPASSGYNFRFAKYYKINGTTTRTLIKAYGIRIDVIVHGQAGKFSLIPTIINLATALTSVGVGSFLCDWILLTFMNKNKVYSHKKFDKVCTPSHPSGSWPVTLARVLGQAPPEPGHRSEDQHPSPPSGQEGQQGAECGPAFPPLRPCPISAPSEQMVDTPASEPAQASTPTDPKGLAQL

SEQ ID NO: 1018372 - protein, 459 aa, Homo sapiens
CSAFLEVGAARAMAAAQPKYPAGATARRLARGCWSALWDYETPKVIVVRNRRLGVLYRAVQLLILLYFVWYVFIVQKSYQESETGPESSIITKVKGITTSEHKVWDVEEYVKPPESIRVHNATCLSDADCVAGELDMLGNGLRTGRCVPYYQGPSKTCEVFGWCPVEDGASVSQFLGTMAPNFTILIKNSIHYPKFHFSKGNIADRTDGYLKRCTFHEASDLYCPIFKLGFIVEKAGESFTELAHKGGVIGVIINWDCDLDLPASECNPKYSFRRLDPKHVPASSGYNFRFAKYYKINGTTTRTLIKAYGIRIDVIVHGQAGKFSLIPTIINLATALTSVGVGSFLCDWILLTFMNKNKVYSHKKFDKVCTPSHPSGSWPVTLARVLGQAPPEPGHRSEDQHPSPPSGQEGQQGAECGPAFPPLRPCPISAPSEQMVDTPASEPAQASTPTDPKGLAQL

SEQ ID NO: 1018373 - protein, 410 aa, Homo sapiens
CSAFLEVGAARAMAAAQPKYPAGATARRLARGCWSALWDYETPKVIVVVRIHRAEKLPGERDGPRELHHHQGQGDHHVRAQSVGRGGVREAGLRTGRCVPYYQGPSKTCEVFGWCPVEDGASVSQFLGTMAPNFTILIKNSIHYPKFHFSKGNIADRTDGYLKRCTFHEASDLYCPIFKLGFIVEKAGESFTELAHKGGVIGVIINWDCDLDLPASECNPKYSFRRLDPKHVPASSGYNFRFAKYYKINGTTTRTLIKAYGIRIDVIVHGQAGKFSLIPTIINLATALTSVGVGSFLCDWILLTFMNKNKVYSHKKFDKVCTPSHPSGSWPVTLARVLGQAPPEPGHRSEDQHPSPPSGQEGQQGAECGPAFPPLRPCPISAPSEQMVDTPASEPAQASTPTDPKGLAQL

SEQ ID NO: 1018374 - protein, 509 aa, Homo sapiens
CSAFLEVGAARAMAAAQPKYPAGATARRLARGCWSALWDYETPKVIVVRNRRLGVLYRAVQLLILLYFVWYVFIVQKSYQESETGPESSIITKVKGITTSEHKVWDVEEYVKPPEGGSVFSIITRVEATHSQTQGTCPESIRVHNATCLSDADCVAGELDMLGNGLRTGRCVPYYQGPSKTCEVFGWCPVEDGASVSQFLGTMAPNFTILIKNSIHYPKFHFSKGNIADRTDGYLKRCTFHEASDLYCPIFKLGFIVEKAGESFTELAHKGGVIGVIINWDCDLDLPASECNPKYSFRRLDPKHVPASSGYNFRFAKYYKINGTTTRTLIKAYGIRIDVIVHGQAGKFSLIPTIINLATALTSVGVVRNPLWGPSGCGGSTRPLHTGLCWPQGSFLCDWILLTFMNKNKVYSHKKFDKVCTPSHPSGSWPVTLARVLGQAPPEPGHRSEDQHPSPPSGQEGQQGAECGPAFPPLRPCPISAPSEQMVDTPASEPAQASTPTDPKGLAQL

SEQ ID NO: 1018375 - protein, 323 aa, Homo sapiens
MLGNGLRTGRCVPYYQGPSKTCEVFGWCPVEDGASVSQFLGTMAPNFTILIKNSIHYPKFHFSKGNIADRTDGYLKRCTFHEASDLYCPIFKLGFIVEKAGESFTELAHKGGVIGVIINWDCDLDLPASECNPKYSFRRLDPKHVPASSGYNFRFAKYYKINGTTTRTLIKAYGIRIDVIVHGQAGKFSLIPTIINLATALTSVGVGSFLCDWILLTFMNKNKVYSHKKFDKVCTPSHPSGSWPVTLARVLGQAPPEPGHRSEDQHPSPPSGQEGQQGAECGPAFPPLRPCPISAPSEQMVDTPASEPAQASTPTDPKGLAQL

SEQ ID NO: 1018376 - protein, 103 aa, Homo sapiens
MRLAAAGTWDVTALTLRHLLRRHRSCNSHWKVVKAKTVNHLLRVGVNLKRSNRRVKSRHLWNILVLALALFFLKLERDATNRATLDTPHQVCRETSDLVAQTL

SEQ ID NO: 1018377 - protein, 107 aa, Homo sapiens
  misc_feature (1)..(1): Xaa can be any naturally occurring amino acid
XLRSGGVPSNPPVSFLLVFTGGMRSCGRSHLVSLKRLPQGPADPSHPGGKRNYVLCGSPPTRLAGSEGEQDRSAATAPLTASSLGLRLRPWRGEGAPLCTPTSHQKL

SEQ ID NO: 1018378 - protein, 229 aa, Homo sapiens
  misc_feature (35)..(35): Xaa can be any naturally occurring amino acid
  misc_feature (42)..(42): Xaa can be any naturally occurring amino acid
  misc_feature (45)..(45): Xaa can be any naturally occurring amino acid
  misc_feature (58)..(59): Xaa can be any naturally occurring amino acid
  misc_feature (61)..(61): Xaa can be any naturally occurring amino acid
  misc_feature (67)..(67): Xaa can be any naturally occurring amino acid
  misc_feature (72)..(73): Xaa can be any naturally occurring amino acid
MKVASGSTATAAAGSQCALKAGKTASGSGEVVRCXSEQSVAXSRXPGASGRACLPCWXXKXYKVLFXEMNGXXSRLKELVPTLPQDRKVSKVEIFQHASDTSGTFRLELNSESEVGTPGGRGLPVRAPVSTLNGENQRPDGGGGMRSCGRSHLVSLKRLPQGPADPSHPGGKRNYVLCGSPPTRLAGSEGEQDRSAATAPLTASSLGLRLRHWRGEGAPLCTPTSHQKL

SEQ ID NO: 1018379 - protein, 107 aa, Homo sapiens; identical to SEQ ID NO: 1018377
  misc_feature (1)..(1): Xaa can be any naturally occurring amino acid

SEQ ID NO: 1018380 - protein, 126 aa, Homo sapiens
PQVHLLPPPSEELALNALVTLTCLVRGFSPKDVLVYWTNKGEEVPKDSFLVWKPLPEPGQEPTTYAVTSLLRVPAEDWNQNESYTCVVGHEGLAEHFTQKTIDRLAGKPTHVNVSVVVADVEGVCY

SEQ ID NO: 1018381 - protein, 137 aa, Homo sapiens
GTAPRRTRRACVQPPRKPAGPGAPLLVVGSSRNLLSPLSVMSASQALQTVALSAAHGSSSEPNLALKALAFNGSPLRFDKYRNSDFAHLIPLTMLYPKNHLDLTFHPPRPQTAPPSIPSPKHSFLAYLGLRERAETV

SEQ ID NO: 1018382 - protein, 135 aa, Homo sapiens
MFYEYIDMYTCTHSHRETHTGLLILTNPYKHDSGPLSVMSASQALQTVALSAAHGSSSEPNLALKALAFNGSPLRFDKYRNSDFAHLIPLTMLYPKNHLDLTFHPPRPQTAPPSIPSPKHSFLAYLGLRERAETV

SEQ ID NO: 1018383 - protein, 182 aa, Homo sapiens
KGIQRQCHIGDAICSERRRHKDNLWFHPAGKMTRAPMHTHHRVVVCSIARGGENGESHKPADGSLRRDLPAAATQRDPNFKLFIIRGSPQQIDHAKQLIEEKIEGPLCPVGPGPVCLSPAANGPFNPGPFNQGPPGSPTCRGPPPHQYPPQGWGNTYPQWQPPAPHDPSKAAAAAALDITRG

SEQ ID NO: 1018384 - protein, 689 aa, Homo sapiens
KGIQRQCHIGDAICSERRRHKDNLWFHPAGKMTRAPMHTHHRVVVCSIARGGENGESHKPADGSLRRDLPAAATQRDPNFKLFIIRGSPQQIDHAKQLIEEKIEGPLCPVGPGPVCLSPAANGPFNPGPFNQGPPGSPTCRGPPPHQYPPQGWGNTYPQWQPPAPHDPSKAAAAAADPNADVAAYYSHYYQQPPGPVPGPPHHGALPPPTGLQAPASPPPGSREMPPHQPEHYDPSRPAPPHTSLSPRNVQHAATPCSTTPRTPPQHPQQHPTPAPRAHRPSTQHTITPPAHRTLSPPAHRHQTPHAPSPTSRDRNTTTPPKPPHHPPPRHHTQTRAGHPHSERHGHTADDNQSQSTNKRNRATPPPPRGRQRKGTENTKGPQTHPLSHHPGTHTFTTYTTPHPTLDNTPSSPTHEYPQLQPTNNPKYHHKIPTLQLHLCPLYTTPRHPIPHTKPTQKLNQQPSDDKQPFAQTAPEPYVTDEKEWHTISPNGNTTQRAAPHPSRAWAEQSDRRRVTDQDNTDRTRRAYVPANTRPQINEGRTKQREKRDSTETPGTHVENSRPRTPTATHYTSRRRLIERQQRAHTVPEARWGKNRRGGTLEPTSAPADTDDSGVVHPLPHDITGHPHNPEHLTERSTVPELTDGHRYIATPMTHSHAQANSTPPARQQRARRLSTSETEAQTDKQEST

SEQ ID NO: 1018385 - protein, 158 aa, Homo sapiens
LDHPANGDESPGHLTSLQDAMCETMEQQLSSDPDSALTEDGSSSAPPSGLVLLPETSLGLQPGEATSHWIHPRPRFSILEGPSPGSRSVHDLPLVQFLISGLQWSSCARTQARLGVPQECEGQGRASQPACVQKLLPEGRAYLGTQKSIWEGRGLGVG

SEQ ID NO: 1018386 - protein, 80 aa, Homo sapiens
PMVKLFETPYGLFVKTFPGAQKKPFCCVICRADDVCVTHNGYSPFFDFDFCCVIKNLNSVRKSEFSVGESAFCSPGDNPN

SEQ ID NO: 1018387 - protein, 97 aa, Homo sapiens
IRGRVDLQKTTEGREVRDENKSLCLVIQEFFWKLPKTTTVVSVQACNSHSVIGLWGTPKVETGKVTKNLDDYTHVPSNTWKAFPRIGRNKPRLKRLQ

SEQ ID NO: 1018388 - protein, 71 aa, Homo sapiens
GSEVCGGLLRAPGIRGERASQKFGCSCPGGVVLAAPRAARGLSGRHLRSRAGFCVWHLLLMLRLATYRGGR

SEQ ID NO: 1018389 - protein, 152 aa, Homo sapiens
  misc_feature (7)..(7): Xaa can be any naturally occurring amino acid
  misc_feature (10)..(10): Xaa can be any naturally occurring amino acid
  misc_feature (19)..(19): Xaa can be any naturally occurring amino acid
  misc_feature (21)..(24): Xaa can be any naturally occurring amino acid
  misc_feature (28)..(31): Xaa can be any naturally occurring amino acid
  misc_feature (33)..(33): Xaa can be any naturally occurring amino acid
  misc_feature (35)..(35): Xaa can be any naturally occurring amino acid
  misc_feature (37)..(40): Xaa can be any naturally occurring amino acid
  misc_feature (51)..(53): Xaa can be any naturally occurring amino acid
  misc_feature (56)..(61): Xaa can be any naturally occurring amino acid
  misc_feature (64)..(65): Xaa can be any naturally occurring amino acid
  misc_feature (72)..(72): Xaa can be any naturally occurring amino acid
  misc_feature (74)..(74): Xaa can be any naturally occurring amino acid
  misc_feature (77)..(77): Xaa can be any naturally occurring amino acid
  misc_feature (80)..(81): Xaa can be any naturally occurring amino acid
RYLKQFXLTXFMSQEEVEXWXXXXENMXXXXLXEXAXXXXTDFLSFYTLGXXXMKXXXXXXVKXXLFFYNVXSXERXLLXXMSDALVLAKMKGFDVFNALDLMENKTFLEEAQVWHRGRQPAVLPLQLEMPQHGGREGWTGATITSHQCDSR

SEQ ID NO: 1018390 - protein, 152 aa, Homo sapiens; identical to SEQ ID NO: 1018389
  misc_feature (7)..(7): Xaa can be any naturally occurring amino acid
  misc_feature (10)..(10): Xaa can be any naturally occurring amino acid
  misc_feature (19)..(19): Xaa can be any naturally occurring amino acid
  misc_feature (21)..(24): Xaa can be any naturally occurring amino acid
  misc_feature (28)..(31): Xaa can be any naturally occurring amino acid
  misc_feature (33)..(33): Xaa can be any naturally occurring amino acid
  misc_feature (35)..(35): Xaa can be any naturally occurring amino acid
  misc_feature (37)..(40): Xaa can be any naturally occurring amino acid
  misc_feature (51)..(53): Xaa can be any naturally occurring amino acid
  misc_feature (56)..(61): Xaa can be any naturally occurring amino acid
  misc_feature (64)..(65): Xaa can be any naturally occurring amino acid
  misc_feature (72)..(72): Xaa can be any naturally occurring amino acid
  misc_feature (74)..(74): Xaa can be any naturally occurring amino acid
  misc_feature (77)..(77): Xaa can be any naturally occurring amino acid
  misc_feature (80)..(81): Xaa can be any naturally occurring amino acid

SEQ ID NO: 1018391 - protein, 127 aa, Homo sapiens
MSKLCTQEKSLGEASLCGLGPHGTDPRLAVDFRSGHFSNIRTHPVLTLNHTNSVASLWIKEQHVSAGPGNSPWKLENHPVPRCCQAQDLAPCRHLAGTGPAPGALGRTGVVTNSGPPTAGPRNQADR

SEQ ID NO: 1018392 - protein, 314 aa, Homo sapiens
SAPVARWRRPCWAPGLCVRSGRRRGPEGWRGDGVSPALGPSLRPLPPPIPSLLEMDLPVGPGAAGPSNVPAFLTKLWTLVSDPDTDALICWSPSGNSFHVFDQGQFAQGGAAQDLKANNHGQASCGKLNIVWFPEGGPHQPGAACSSQKKDNTESPSKPWFLAWPRSKLLGEPFKRNSDQVCPPLKECQTVTRSARNSVNQRCLTGPLQADDRGQQELQLGLPNAVLVPTEKPCNANLRGHYIGASRGDEMGPRPIFGARNDPHLPPAATRTGFRRATALAFRSSPGVVATWVATCPKNRELPLRGLQIKKTDS

SEQ ID NO: 1018393 - protein, 192 aa, Homo sapiens
SAPVARWRRPCWAPGLCVRSGRRRGPEGWRGDGVSPALGPSLRPLPPPIPSLLEMDLPVGPGAAGPSNVPAFLTKLWTLVSDPDTDALICWSPVRAAARARGLGGRRGSRAAADGAEGLRGGALPHFNLRAVSLPCPRQRRAAGPEPAQTQSLKLGKRLRDPHSVQPLPQRSFPVMGRMGRLLYWASANCWA

SEQ ID NO: 1018394 - protein, 73 aa, Homo sapiens
MACDSSRLEPAAAFTLARASAFISLVRNQSRGSSEAEPLISATLVSLSRKTSLNQLGYFRSSIVCGLSTRSGF

SEQ ID NO: 1018395 - protein, 1305 aa, Homo sapiens
LPVSADVISDGRGSRPSPAMASYAASPSHCLSVEGGPEADGEQPPRLATLGPGVMEGAAETDQEALCAGETGAQKPPGDRMLCPGRMDGAALGEQPTGQKGASARGFWGPRETKALGVCKESGSEPAEDSSRAHSRSEEGVWEENTPPLGPLGFPETSSSPADSTTSSCLQGLPDNPDTQGGVQGPEGPTPDASGSSAKDPPSLFDDEVSFSQLFPPGGRLTRKRNPRVYGKRCEKPVLPLPTQPSFEEGGDPTLGPARLPTDLSDSSSLCLCHEDPWEDEDPAGLPESFLLDGFLNSRVPGIDPWAPGLSLWALEPSREAGAEKLPSHCPEDDRPEAIPELHMVPAAWRGLEMPAPADDSSSSLGDVSPEPPSLERERCDGGLPGNTHLLPLRATDFEVLSTKFEMQDLCFLGPFEDPVGLPGPSFLDFEGTASSQGPQSRRTEEAAGAGRAQGRGRPAKGRRASYKCKVCFQRFRSLGELDLHKLAHTPAPPPTCYMCVERRFGSRELLRGHLQERHAQSKAGPWACGMCLKEVADVWMYNEHLREHAVRFARRGAGAEVLGGPARRPGGQQRCRPPSEQHHGTRAQTPQGQALRRQGRREPGRPVGARGRSQERQPGREGETPGTQHPQQPRRGRDPSSASATALADAGSPGPPRTTPSPSPDPWAGGEPLLQATPVHEACKDPSRDCHHCGKRFPKPFKLQRHLAVHSPQRVYLCPRCPRVYPEHGELLAHLGGAHGLLERPELQHTPLYACELCATVMRIIKKSFACSSCNYTFAKKEQFDRHMNKHLRGGRQPFAFRGVRRPGAPGQKARALEGTLPSKRRRVAMPGSAPGPGEDRPPPRGSSPILSEGSLPALLHLCSEVAPSTTKGWPETLERPVDPVTHPIRGCELPSNHQECPPPSLSPFPAALADGRGDCALDGALERPENEASPGSPGPLLQQALPLGASLPRPGARGQDAEGKRAPLVFSGKRRAPGARGRCAPDHFQEDHLLQKEKEVSSSHMVSEGGPRGAFHKGSATKPAGCQSSSKDRSAASTPSKALKFPVHPRKAVGSLAPGELARGTENGMKPATPKAKPGPSSQGSGSPRPGTKTGGGSQPQPASGQLQSETATTPAKPSFPSRSPAPERLPARAQAKSCTKGPREAGEQGPHGSLGPKEKGESSTKRKKGQVPGPARSESVGSFGRAPSAPDKPPRTPRKQATPSRVLPTKPKPNSQNKPRPPPSEQRKAEPGHTQRKDRLGKAFPQGRPLLRPPKRGTAVHGAEPAEPHTHRTAEAQSDLLSQLFGQRLTGFKIPLKKDASE

SEQ ID NO: 1018396 - protein, 79 aa, Homo sapiens
MVRSCRLDSLTVTFSSLKGFISGVHGLCTRQVRQRPEWELRGSGWLRLMDPSRSCAPGPVLSSRSVSMIYQKSVPMAAA

SEQ ID NO: 1018397 - protein, 79 aa, Homo sapiens; identical to SEQ ID NO: 1018396

SEQ ID NO: 1018398 - protein, 79 aa, Homo sapiens; identical to SEQ ID NO: 1018396

SEQ ID NO: 1018399 - protein, 121 aa, Homo sapiens
FLTLLSGTRNGPEFMTERSVRRERGDPGTDEALTAAISLASGAATGEDDADSEDEGSAHNGRERERGNVRVDLTCGDHAVDGNRLNGNGNEEGSKPAGGSRKPHVTEGSRDTEPASLEHES

SEQ ID NO: 1018400 - protein, 210 aa, Homo sapiens
  misc_feature (113)..(113): Xaa can be any naturally occurring amino acid
  misc_feature (133)..(133): Xaa can be any naturally occurring amino acid
  misc_feature (162)..(162): Xaa can be any naturally occurring amino acid
  misc_feature (169)..(169): Xaa can be any naturally occurring amino acid
  misc_feature (172)..(172): Xaa can be any naturally occurring amino acid
  misc_feature (195)..(195): Xaa can be any naturally occurring amino acid
MLVLLAGIFVVHIATVIMTFVSTIANVWLVSNTVDASVVFGKTVPTLAAVNSTVHMHSEDAPTRQCRPYMHYYYSYILTVYIALPGTYVLPDYLHHGEGKPVTYLLQGATTLXVAGLLHYLLGGVHTNTSTLXRIREWKRSIHHGLLPNILGLESDFCFQLXSYGRYSXLVXGEKKIKGRDEFHGGSGGGGGGGXPFEIWGGGSGRFAVT

SEQ ID NO: 1018401 - protein, 105 aa, Homo sapiens
RADAQAHSSPANGGGPPPPPQNVWPSHQAASQLGQGSRLRFSGVLRCSKAKEPPARLRLLRPPAEGVQRPECCPCGVGVAQEVYSPAGSRYDAALMVLQAGVCTT

SEQ ID NO: 1018402 - protein, 215 aa, Homo sapiens
  misc_feature (14)..(14): Xaa can be any naturally occurring amino acid
  misc_feature (21)..(21): Xaa can be any naturally occurring amino acid
  misc_feature (26)..(26): Xaa can be any naturally occurring amino acid
  misc_feature (34)..(36): Xaa can be any naturally occurring amino acid
  misc_feature (41)..(41): Xaa can be any naturally occurring amino acid
  misc_feature (44)..(45): Xaa can be any naturally occurring amino acid
  misc_feature (56)..(56): Xaa can be any naturally occurring amino acid
  misc_feature (78)..(78): Xaa can be any naturally occurring amino acid
PSRAKYAALGHWCXRRILPHXPRDGXAVLENVSXXXKELPXFLXXPPPPGHTLEAXWFLLRHCIRKGDPELRAHVIEXFLLLPSNSGWTLTHGGLFYFQDADNFCPPPAGVAHEALVATQSSPDSFLMVPVPLGTLCFAPLFPSGSVPFPQFRHPEYREWFGYLSREGKVALSIKGGPFKGCFHVPRCLAMCEELLGALLRQPAPAPSPAPSPAC

SEQ ID NO: 1018403 - protein, 157 aa, Homo sapiens
  misc_feature (6)..(6): Xaa can be any naturally occurring amino acid
RDVLLXRKVFKIALVLACFEIASGLVLGKWLIALVFGVDYEQSYIVFVMFMLRPAVAIPSILLGYPFLGAMGNASAANRSVLFAGSVQLVTLGVLWIYGWTSALAVVVAVLIAEIRPSRGASGMHSPTSNSPHNSGSSMKEVKNVAVILAGGKGTRS

SEQ ID NO: 1018404 - protein, 137 aa, Homo sapiens
  misc_feature (1)..(1): Xaa can be any naturally occurring amino acid
  misc_feature (44)..(44): Xaa can be any naturally occurring amino acid
  misc_feature (84)..(84): Xaa can be any naturally occurring amino acid
  misc_feature (102)..(102): Xaa can be any naturally occurring amino acid
XNNPTKQPLALNVANRRGLQILAAELFLPGSVGITDPCESGNFXGQTVMTLGQQDMVCYTAQTLVPILSHGGFREILGQEGDAXFLASEISTWDGVIVTPSXKAYEKPPEKKEGEEEEENTEEPPQGEEEESMETQE

SEQ ID NO: 1018405 - protein, 98 aa, Homo sapiens
  misc_feature (48)..(48): Xaa can be any naturally occurring amino acid
  misc_feature (51)..(51): Xaa can be any naturally occurring amino acid
  misc_feature (58)..(58): Xaa can be any naturally occurring amino acid
  misc_feature (61)..(61): Xaa can be any naturally occurring amino acid
  misc_feature (66)..(66): Xaa can be any naturally occurring amino acid
  misc_feature (70)..(70): Xaa can be any naturally occurring amino acid
  misc_feature (73)..(73): Xaa can be any naturally occurring amino acid
LVFPTIATIVGKLMFSSVTLIYKGQSWVDCVCCHKRSNLKFTSNSSKXLRXAHRKILXYPXTRRSXKLTXGCXGSSLIHNESDELFGFHQLMHIVGDL

SEQ ID NO: 1018406 - protein, 99 aa, Homo sapiens
CGAALAPGPSWAPWSRSWPCSLCSARRVDVEGGAGSVLSASPCVGWDRPRGADLLACPPWPRRTPGPPAAKGSGMDPSPSSARDKVVVTGAVMFDSRAV

SEQ ID NO: 1018407 - protein, 156 aa, Homo sapiens
ARLRIVGELEQMVSEDVPLDHRVHARIIGALGKAIRKIMDEFKVDIRFPQIGAPDPHCVTVTGLPENVEEAIDHILNLEEEYLADVVDSEALQVYMKRPQHNEEANGHSARGFVVRYRTPGTASSSEKAPDMSSSEEFPSFGAQVAPKTLPWGPKR

SEQ ID NO: 1018408 - protein, 121 aa, Homo sapiens
ARLRIVGELEQMVSEDVPLDHRVHARIIGALGKAIRKIMDEFKVDIRFPQIGAPDPHCVTVTGLPENVEEAIDHILNLEEEYLADVVDSSSEKAPDMSSSEEFPSFGAQVAPKTLPWGPKR

SEQ ID NO: 1018409 - protein, 101 aa, Homo sapiens
HPRPPFPRGRPRRLLALPRCGDSCLAARAFLPEARKSPKVTRDPCVPGLAQRLLTYSFSSVLQEIPKRRGPGGERWAAVGRRKERARRPRNTIKRDSPAES

SEQ ID NO: 1018410 - protein, 182 aa, Homo sapiens
ASFWQPWENAWASHVNTPFGVERREIHCRRCGGHQGHVFDDGPAPTGLRYCMNGAAMTFTAAYSMSSYKGIPHVAFGSRVSGRRADDCQPVHLPVLPFVFARTGQPFLRSGLPLLLGMAMTFALVASLAAVGGGWVVQVNQYGRWLALLFVALFGLTLLLPSLSERLTRPLVAAGSHLSEAA

SEQ ID NO: 1018411 - protein, 108 aa, Homo sapiens
MSKHLYCQTEKAAEGEGEGLLGAASPVDEKVRVCDRIKFKESFAEMNRGSNEWKTVVGGAMFFIGFTALVSCGRSTMCTAPSAQSFDKEWVAKQTKRMLDMKVNPIQA

SEQ ID NO: 1018412 - protein, 115 aa, Homo sapiens
  misc_feature (16)..(17): Xaa can be any naturally occurring amino acid
  misc_feature (20)..(20): Xaa can be any naturally occurring amino acid
  misc_feature (32)..(32): Xaa can be any naturally occurring amino acid
PSALCFLLHKCGFGEXXLNXAEEGAAEAFVPXNVCPLCAPVYRIKFKESFAEMNRGSNEWKTVVGGAMFFIGFTALVSCGRSTMCTAPSAQSFDKEWVAKQTKRMLDMKVNPIQA

SEQ ID NO: 1018413 - protein, 126 aa, Homo sapiens
MDPHPRTREDNDLDSQVSQEGLGPVLQPQPKSYFKSISVTKITKPDGIVEERRTLVDSEGRTETTVTRHEADSSPRGDPESPRPPALDDAFSILDLFLGRWFRSPVALLTPQRHSSPFHLSPIAHH

SEQ ID NO: 1018414 - protein, 126 aa, Homo sapiens; identical to SEQ ID NO: 1018413

SEQ ID NO: 1018415 - protein, 79 aa, Homo sapiens
QAQHAASRRQSGSLSLESLQSRGRGRKEGGWRESRKPRRAPRPLAQSAGQQVVDPGQSIPGGKEKGAGVELGMIGSVLS

SEQ ID NO: 1018416 - protein, 226 aa, Homo sapiens
  misc_feature (28)..(29): Xaa can be any naturally occurring amino acid
  misc_feature (31)..(31): Xaa can be any naturally occurring amino acid
  misc_feature (43)..(43): Xaa can be any naturally occurring amino acid
  misc_feature (48)..(48): Xaa can be any naturally occurring amino acid
  misc_feature (51)..(51): Xaa can be any naturally occurring amino acid
  misc_feature (76)..(76): Xaa can be any naturally occurring amino acid
  misc_feature (84)..(84): Xaa can be any naturally occurring amino acid
  misc_feature (92)..(92): Xaa can be any naturally occurring amino acid
  misc_feature (126)..(126): Xaa can be any naturally occurring amino acid
  misc_feature (145)..(145): Xaa can be any naturally occurring amino acid
  misc_feature (166)..(166): Xaa can be any naturally occurring amino acid
  misc_feature (174)..(174): Xaa can be any naturally occurring amino acid
  misc_feature (200)..(200): Xaa can be any naturally occurring amino acid
GFFFPNSLSLTGPWSLLALWGRRAFGGXXFXEGERGRNDGEGXRGGFXKFXHLETRGGLLKNGDFVVTAWGRGRIXRVSKKTWXSGGGVVAXRRVSLSVTVLTWSRRALTSRVVGESGCAWGFRRXVVVVAWGAKEREFRVKNVXNVAISVGRLGKGEKVFVRRGXVGGEGGGXVYESVRARRRASSCVARVEASRAERXRFTVWRVGAGSRCNLPSLCLSLTPKQ

SEQ ID NO: 1018417 - protein, 226 aa, Homo sapiens; identical to SEQ ID NO: 1018416
  misc_feature (28)..(29): Xaa can be any naturally occurring amino acid
  misc_feature (31)..(31): Xaa can be any naturally occurring amino acid
  misc_feature (43)..(43): Xaa can be any naturally occurring amino acid
  misc_feature (48)..(48): Xaa can be any naturally occurring amino acid
  misc_feature (51)..(51): Xaa can be any naturally occurring amino acid
  misc_feature (76)..(76): Xaa can be any naturally occurring amino acid
  misc_feature (84)..(84): Xaa can be any naturally occurring amino acid
  misc_feature (92)..(92): Xaa can be any naturally occurring amino acid
  misc_feature (126)..(126): Xaa can be any naturally occurring amino acid
  misc_feature (145)..(145): Xaa can be any naturally occurring amino acid
  misc_feature (166)..(166): Xaa can be any naturally occurring amino acid
  misc_feature (174)..(174): Xaa can be any naturally occurring amino acid
  misc_feature (200)..(200): Xaa can be any naturally occurring amino acid

SEQ ID NO: 1018418 - protein, 66 aa, Homo sapiens
  misc_feature (3)..(3): Xaa can be any naturally occurring amino acid
  misc_feature (23)..(23): Xaa can be any naturally occurring amino acid
  misc_feature (28)..(28): Xaa can be any naturally occurring amino acid
  misc_feature (34)..(34): Xaa can be any naturally occurring amino acid
  misc_feature (36)..(37): Xaa can be any naturally occurring amino acid
  misc_feature (44)..(44): Xaa can be any naturally occurring amino acid
  misc_feature (46)..(46): Xaa can be any naturally occurring amino acid
  misc_feature (52)..(53): Xaa can be any naturally occurring amino acid
  misc_feature (55)..(55): Xaa can be any naturally occurring amino acid
  misc_feature (57)..(57): Xaa can be any naturally occurring amino acid
  misc_feature (59)..(59): Xaa can be any naturally occurring amino acid
  misc_feature (61)..(61): Xaa can be any naturally occurring amino acid
  misc_feature (65)..(65): Xaa can be any naturally occurring amino acid
GKXEMGGPFSYVYFFCTVPEILXHNIVXLHGNFXRXXTYIWPHXPXGSFEAXXSXVXWXGXFHQXV

SEQ ID NO: 1018419 - protein, 125 aa, Homo sapiens
TSRDSESSARGLGEQRRLTRHRSCTAMHLRPCGVTFTEVLWHRDSSLAGLSPPKHRSLQNAASRTSPGDLPCSCVSLETEAGQELITSTSEGSESDKISFGNRTCVLGNILNLGKHQLMEFLLTG

SEQ ID NO: 1018420 - protein, 287 aa, Homo sapiens
  misc_feature (13)..(13): Xaa can be any naturally occurring amino acid
  misc_feature (22)..(22): Xaa can be any naturally occurring amino acid
PGGHEALEMPFTXSWCFSLWTXLKQILDKSLQRKGLWAVPEAGWGQDNTAASPGCPLWGPAGGWQRASVSGAAGLAMRVHLQPFGFKDGDGFALPLCPRVGLVGLQLVWELPHGWRWRGFAPCWAPPDCSTECWGWGPAPGGLESSACLGEPLWRGIKTWAPASFSVAEILKSERNGPLLASLLSRGSFGRPPFGEREGRDHSRVCVCSTVGPQAFLLSSPSSSFPLSLSSFPRRTSTVCTYRGSSPNIYVYTHPYTYIVWFPLSFLFLSNKTMEIIPQQMSENVLL

SEQ ID NO: 1018421 - protein, 92 aa, Homo sapiens
VNPRARCSRTFITSSDDATFEEWFHQGRPPKVPVREVCPVTHRPALYRDPVTDIPYATARAFKIIREAYKKYITAHGLPPTASATGPRAFRF

SEQ ID NO: 1018422 - protein, 92 aa, Homo sapiens
VNPRARCSRTFITSSDDATFEEWFHQGRPPKVPVREVCPVTHRPALYRDPVTDIPYATARAFKIIREAYKKYITAHGLPPTASATGPRPATS

SEQ ID NO: 1018423 - protein, 132 aa, Homo sapiens
QDSWLLGDSSFFLRTWLMTPLHIPETPAEYRYNMAHSATHSVIEKTFRTLCSRFRCLDGSKGALQYSPEKSSHIILACCVLHNISLEHGMDVWSSPMTGPMEQPPEEEYEHMESLDLEADRIRQELMLTHFS

SEQ ID NO: 1018424 - protein, 86 aa, Homo sapiens
HDVLTAPPTSMFKRYPAVSLLSSWTSATQSTEQGPVGIHVATLHLNISSICVVLGTQVELSPPGKGNLDKIFEAFHTPPSPLPASL

SEQ ID NO: 1018425 - protein, 46 aa, Homo sapiens
MSKSLDLKVSRLPGNSSRRSDSDIRSSAAGGLETLSTFMREKNAHE

SEQ ID NO: 1018426 - protein, 69 aa, Homo sapiens
AKKPQPLRVGLHGYPGLRPSFSRRSRDHGRSSREQIKIKTGVVKRLVKEKVMYEKEAKQQEEKIETNES

SEQ ID NO: 1018427 - protein, 464 aa, Homo sapiens
MILANVFCLFFFLDETLRSLASPSSLQGPELHGWRPPVDCVRANELCAAESNCSSRYRTLRQCLAGRDRNTMLANKECQAALEVLQESPLYDCRCKRGMKKELQCLQIYWSIHLGLTEGEEFYEASPYEPVTSRLSDIFRLASIFSGTGADPVVSAKSNHCLDAAKACNLNDNCKKLRSSYISICNREISPTERCNRRKCHKALRQFFDRVPSEYTYRMLFCSCQDQACAERRRQTILPSCSYEDKEKPNCLDLRGVCRTDHLCRSRLADFHANCRASYQTVTSCPADNYQACLGSYAGMIGFDMTPNYVDSSPTGIVVSPWCSCRGSGNMEEECEKFLRDFTENPCLRNAIQAFGNGTDVNVSPKGPSFQATQAPRVEKTPSLPDDLSDSTSLGTSVITTCTSVQEQGLKANNSKELSMCFTELTTNIIPGSNKVIKPNSGPSRARPSAALTVLSVLMLKQAL

SEQ ID NO: 1018428 - protein, 176 aa, Homo sapiens
FHVYNRSDLYGRLQELFGLEPTIIPPKKDDDKTREIGRTRTQSKIERVKVKTESQDPTSSWRSLIPVIKVNVSTGRLAFGNHYQPQTLCINFDDAFLTYTTKPPSSHLDQFMHIVKGKLENVRVMLVPSPRYVGLQNDEPPRLMGEGFVVMQSNDVDIYYYMDEPGLVPEETEEKK

SEQ ID NO: 1018429 - protein, 219 aa, Homo sapiens
  misc_feature (148)..(148): Xaa can be any naturally occurring amino acid
RVRFQTATTTMQAADSRWFPRVFRGYAERKRRKRENDSASVIQRNFRKHLRMVGSRRVKAQSSDLQSSHCTLDEAFEDLDWDTEKGLEAVACDTEGFVPPKVMLISSKVPKAEYIPTIIRRDDPSIIPILYDHEHATFEDILEEIESXKDEVTAISTPVEHGWKKNDRCGPETRRTPSAVPEGMLARRLPGGAPCGGGPVRRRPGPARPVARGCSAARH

SEQ ID NO: 1018430 - protein, 142 aa, Homo sapiens
KLAAAPSPGGQPVPPAPGWGQAAQLRTDRRDLPGATAGVHEATAGSGRLPGPLSQVIQAPGPRAGPCILPIVRDGKKVSSTHYYLLPERPSYLERYQRFLREAQSPEEPTALPVPLLLRPPASPFLFFSTVTVRPMPKAVLD

SEQ ID NO: 1018431 - protein, 150 aa, Homo sapiens
SLRPPPPLEDNLFLPPQGGGKPPSSAQTAEIFQALQQECMRQLQAPAGSPAPSPSPGGDDKPQVIQAPGPRAGPCILPIVRDGKKVSSTHYYLLPERPSYLERYQRFLREAQSPEEPTALPVPLLLRPPAPLYFFFSTVTVRPMPKAVLD

SEQ ID NO: 1018432 - protein, 132 aa, Homo sapiens
PFGQEAVIYPWSCQEKTKSNSKLKLVRSLAVCEESSTPFADGPLETQDIIQLHISCPSDKEEEKSTKDVSEKEDKDKNKEKIPRKMLSRDSSQEYTDSTGIDLHEFLVNTLKKNPRRIGKTSVKEECRNKEI

SEQ ID NO: 1018433 - protein, 136 aa, Homo sapiens
LLDKRRSSNHGHAKEKTKSNSKLKLVRSLAVCEESSTPFADGPLETQDIIQLHISCPSDKEEEKSTKDVSEKEDKDKNKEKIPRKMLSRDSSQEYTDSTGIDLHEFLVNTLKKNPRDRMMLLKLEQEILEFINDIK

SEQ ID NO: 1018434 - protein, 206 aa, Homo sapiens
MPVKGASSLLFLPLPPSAWQLCLLSKRRVHPIRTPLPFHSWIKALVISNQKVPERERPEGTGVLSDGCLGQSQEGEPLLSPPALAHFPLHARCCGSSWAWPGSAGEAIRMVSGAPFLCFLDGLDGLPCSSPMAALPAPMAALPARRQRQEHIEGGSQAVGSGVPLLAAGSLAQPPPAHFGFVQHKRQSDVFTAGCFPPGQVGQGEC

SEQ ID NO: 1018435 - protein, 206 aa, Homo sapiens; identical to SEQ ID NO: 1018434

SEQ ID NO: 1018436 - protein, 72 aa, Homo sapiens
RHTAADDRRRAGRGEVLIPRNAEQGQETRCPPGICPAPVASRKFSTKDVPQALCARLHQRPVRSFTLMGKPF

SEQ ID NO: 1018437 - protein, 206 aa, Homo sapiens; identical to SEQ ID NO: 1018434

SEQ ID NO: 1018438 - protein, 206 aa, Homo sapiens; identical to SEQ ID NO: 1018434

SEQ ID NO: 1018439 - protein, 141 aa, Homo sapiens
LNELLGTPPRRGGGRAEGLLTSPSMPGAVGAAGPGRGRRVKLSAWCLEHRFFASWMGWMGSRVLHQWQRYQHQWQRYQQEGKGRSTSRVGARAVGSGVPLLAAGSLAQPPPAHFGFVQHKRQSDVFTAGCFPPGQVGQGEC

SEQ ID NO: 1018440 - protein, 136 aa, Homo sapiens
SVSHEPVPVGSRAARFLPYPSKTQDEAHASLGVSFSLPAVHPLWTGPVSVPGGTRQSPINIQWRDSVYDPWLKPLRVSYDVASCLYIWNTGYLFQVEFDDATKASGECQLGLEDFLLSAPCSGSRVRGFAEKAEES

SEQ ID NO: 1018441 - protein, 176 aa, Homo sapiens
TCPPPCIVIHFLVCKPEEVEASINLNCLNKFPLVKALALNLFLTPSPAALCLEGLGREEGELEAAQEEYVKRALANSLPVKGKYTPSGQAGLLPASPSSSLTTPIKARGFPRVPPNTPGPAPFPLLEEEDILSRGFPGWPCRRSFFPRDNGCVVSSVNAKSITLSGTLPNKQLFKG

SEQ ID NO: 1018442 - protein, 85 aa, Homo sapiens
RIRRAIVRHRLGSTQAESGGAGMAETGASEYVRIPAGNTAIYAPGTKTRDYSYLGSDTVLHVGNELELVEDLWLTTGLAAIKSTW

SEQ ID NO: 1018443 - protein, 235 aa, Homo sapiens
EVDLDDPQVDLVLGDADYYISLTDSESDGYQHQSAGSGKGIAANFGYRFSPDLETRFYLRYRETTNDSPGRLTRDQISHDPRAANSLNAAHDSKRLQPGSTWIANKTTLRLDDNARVEVGLAYHDYPMDLREGTNRLKVAYTDISGTLNYIRQDSLFGHASTTTLGLRTTQAMPNNGASEYVRIPAGNTAIYAPGTKTRDYSYLGSDTVLHVGNELELVEDLWLTTGLAAIKSTW

SEQ ID NO: 1018444 - protein, 146 aa, Homo sapiens
LELPGSSVIRVPPNTKAFLGRSWAEPPGGQSLKRNCLGFRGRGRGNPTDMDPTLEDPTAPKCKMRRCSSCSPKPNTPKCAMCDGDSFPFACTGGEAEDRLREPETKKVLSSSLQHPGPVPALIMQLFQAHCFFLSTRPQPPTRPTM

SEQ ID NO: 1018445 - protein, 187 aa, Homo sapiens
  misc_feature (69)..(69): Xaa can be any naturally occurring amino acid
MACRRCGGRSGREETRTGEEGTIYRIVVILFGVYLVCTLSRPPFYAPLVSPPRGPLLAFRGNGPPPPSXDTRTVGFPPPKSAFNPPKIHIWAPGSQGGWKYQACPPPLEEKRKKNPDPFREKKQLMRLPETRPEKKRGEGKLTNNTRGPPDPRTPGLSPIKTGNSSSVACPSSHCCPGKYGTHGAAS

SEQ ID NO: 1018446 - protein, 187 aa, Homo sapiens; identical to SEQ ID NO: 1018445
  misc_feature (69)..(69): Xaa can be any naturally occurring amino acid

SEQ ID NO: 1018447 - protein, 321 aa, Homo sapiens
MVAQALELSRKPHVVIATPGRLADHLRSSNTFSIKKIRFLVSSPRPCRPQELGSEPPGPMSEPGAPSHPFRKRMSVRLSSKTLGTVTGTVQGPTRGGPVLAMLFGGRALLDLGEGQASLGRRVLQGLGSMSMPLKEACFRGGQDPGPWTAPSPLPPLARQVMDEADRLLEQGCTDFTVDLEAILAAVPARRQTLLFSATLTDTLRELQGLATNQPFFWEAQAPVSTVEQLDQRYLLVPEKVKDAYLVHLIQRFQDEHEDWSIIIFTNTCKTCQILCMMLRKFSFPTVALHSMMKQKERFAALAKFKSSIYRILIATDVASR

SEQ ID NO: 1018448 - protein, 355 aa, Homo sapiens
MVAQALELSRKPHVVIATPGRLADHLRSSNTFSIKKIRFLVSSPRPCRPQELGSEPPGPMSEPGAPSHPFRKRMSVRLSSKTLGTVTGTVQGPTRGGPVLAMLFGGRALLDLGEGQASLGRRVLQGLGSMSMPLKEACFRGGQDPGPWTAPSPLPPLARQVMDEADRLLEQGCTDFTVDLEAILAAVPARRQTLLFSATLTDTLRELQGLATNQPFFWEAQAPVSTVEQLDQRYLLVPEKVKDAYLVHLIQRFQDEHEDWSIIIFTNTCKTCQILCMMLRKFSFPTVALHSMMKQKERFAALAKFKSSIYRILIATDVASGAWTSLRYRWSSTTTPPGSPRSTSTESAGRPVQQR

SEQ ID NO: 1018449 - protein, 376 aa, Homo sapiens
MVAQALELSRKPHVVIATPGRLADHLRSSNTFSIKKIRFLVSSPRPCRPQELGSEPPGPMSEPGAPSHPFRKRMSVRLSSKTLGTVTGTVQGPTRGGPVLAMLFGGRALLDLGEGQASLGRRVLQGLGSMSMPLKEACFRGGQDPGPWTAPSPLPPLARQVMDEADRLLEQGCTDFTVDLEAILAAVPARRQTLLFSATLTDTLRELQGLATNQPFFWEAQAPVSTVEQLDQRYLLVPEKVKDAYLVHLIQRFQDEHEDWSIIIFTNTCKTCQILCMMLRKFSFPTVALHSMMKQKERFAALAKFKSSIYRILIATDVASGAWTSLRYRWSSTTTPPGSPRSTSTESAGRPVQVSSGGGGRALGLCPSSLPSKFRW

SEQ ID NO: 1018450 - protein, 109 aa, Homo sapiens
  misc_feature (2)..(2): Xaa can be any naturally occurring amino acid
  misc_feature (4)..(4): Xaa can be any naturally occurring amino acid
  misc_feature (11)..(11): Xaa can be any naturally occurring amino acid
  misc_feature (18)..(18): Xaa can be any naturally occurring amino acid
  misc_feature (22)..(22): Xaa can be any naturally occurring amino acid
MXRXRKKPPNXQSREQTXCETXVFTSPWVHPLEVVMLDCIQKLIFNFPGNLQTVFPEWLYHFAFPDRSVKAPDAPRPHQPTVLSALIVLTILVGLQCISLCFNLHYLDN

SEQ ID NO: 1018451 - protein, 91 aa, Homo sapiens
QSESEELTIAGMTLITLMFGAERERQSRLKIYLPAFSGIVFMVDCADHSRLVEYKVELNALSTDEKYTNVQILILGNKIDRTDAISEEKNP

SEQ ID NO: 1018452 - protein, 129 aa, Homo sapiens
LFSSSSLTLPLTQIRTFQKCVHLGPCPGTHGFGVVATRLRAAVSSGMGQLRAWGPLACPWREHLQGGAPESREHCGELLRAELTRRQLINPPPMDRGAPSTGEDSALCPHARWVPVTLSCPAARGQQWV

SEQ ID NO: 1018453 - protein, 106 aa, Homo sapiens
MFGSWNGGKKSVCRVETVVAEAAAPGRQEKETWTQARMREDNVERQGEDGHLQAKERGLEHTLTSWPSEGGHPVNTLSSDFSLQSCEKRNFCCLSPSVWGNFLWWP

SEQ ID NO: 1018454 - protein, 146 aa, Homo sapiens
  misc_feature (12)..(12): Xaa can be any naturally occurring amino acid
CPLTEGNLQIQXAFSLFNKDVDGTITTKELGTVMRSLGQNPTEAELQDMINEVDADGNGTIDFPEFLTMMARKMKDTDSEEEIREAFRVFDKDGNGYISAAELRHVMTNLGEKLTDEEVDEMIREADIDGDGQVNYEEFVQMITAK

SEQ ID NO: 1018455 - protein, 247 aa, Homo sapiens
MADHLEGLSSDDEETSTDITNFNLEKDRISKESGKVFEDVLESFYSIDCIKSQFEAWRSKYYTSYKDAYIGLCLPKLFNPLIRLQLLTWTPLEAKCRDFENMLWFESLLFYGCEEREQEKDDVDVALLPTIVEKVILPKLTVILKLINGYPSVVNAENKNTQVYLKALLLRMRRTLDDDVFMPLYPKNVLENKNSGPYLFFQRQFWSSVKVIKPPFQRGSCPIPRRKECCSERPRRIWTDRPCVVFS

SEQ ID NO: 1018456 - protein, 564 aa, Homo sapiens
MGNWVVNHWFSVLFLVVWLGLNVFLFVDAFLKYEKADKYYYTRKILGSTLACARASALCLNFNSTLILLPVCRNLLSFLRGTCSFCSRTLRKQLDHNLTFHKLVAYMICLHTAIHIIAHLFNFDCYSRSRQATDGSLASILSSLSHDEKKGGSWLNPIQSRNTTVEYVTFTSVAGLTGVIMTIALILMVTSATEFIRRSYFEVFWYTHHLFIFYILGLGIHGIGGIVRGQTEESMNESHPRKCAESFEMWDDRDSHCRRPKFEGHPPESWKWILAPVILYICERILRFYRSQQKVVITKVVMHPSKVLELQMNKRGFSMEVGQYIFVNCPSISLLEWHPFTLTSAPEEDFFSIHIRAAGDWTENLIRAFEQQYSPIPRIEVDGPFGTASEDVFQYEVAVLVGAGIGVTPFASILKSIWYKFQCADHNLKTKKIYFYWICRETGAFSWFNNLLTSLEQEMEELGKVGFLNYRLFLTGWDSNIVGHAALNFDKATDIVTGLKQKTSFGRPMWDNEFSTIATSHPKSVVGVFLCGPRTLAKSLRKCCHRYSSLDPRKVQFYFNKENF

SEQ ID NO: 1018457 - protein, 107 aa, Homo sapiens
MSILFVFFSETPSTEGHSDAESPPLSLKIASVPGRGDDLPSKASVKFRVQFVGVQQTPSPPHPNKNALISVEHLLSKASLSLGHWLLLDKPVTTVGWRWWDVSQAIH

SEQ ID NO: 1018458 - protein, 72 aa, Homo sapiens
VDDVMEPTLFATKRRGWRLYQVSRPANRKPAHPRVPTHSHHKPGGIKNAGHKVWGRCCVELGRLNPFTAIGQ

SEQ ID NO: 1018459 - protein, 75 aa, Homo sapiens
  misc_feature (9)..(9): Xaa can be any naturally occurring amino acid
  misc_feature (11)..(11): Xaa can be any naturally occurring amino acid
  misc_feature (19)..(19): Xaa can be any naturally occurring amino acid
  misc_feature (31)..(31): Xaa can be any naturally occurring amino acid
PGGNWAFQXVXLSRKKNPXAGAFRCVTLFNXAFRERRVPRLEPAPVLPPFLLFQEGFASEVRAQGLDVFLELGLR

SEQ ID NO: 1018460 - protein, 82 aa, Homo sapiens
MRLFLSLPVLVVVLSIVLEAQPQPRDPRRLQCLDKLKEFGNTLEDKARELISRIKQSELSAKMREWFSETFQKVKEKLKIDS

SEQ ID NO: 1018461 - protein, 1956 aa, Homo sapiens
MEFPIGSLETNNFRRFTPESLVEIEKQIAAKQGTKKAREKHREQKDQEEKPRPQLDLKACNQLPKFYGELPAELIGEPLEDLDPFYSTHRTFMVLNKGRTISRFSATRALWLFSPFNLIRRTAIKVSVHSWFSLFITVTILVNCVCMTRTDLPEKIEYVFTVIYTFEALIKILARGFCLNEFTYLRDPWNWLDFSVITLAYVGTAIDLRGISGLRTFRVLRALKTVSVIPGLKVIVGALIHSVKKLADVTILTIFCLSVFALVGLQLFKGNLKNKCVKNDMAVNETTNYSSHRKPDIYINKRGTSDPLLCGNGSDSGHCPDGYICLKTSDNPDFNYTSFDSFAWAFLSLFRLMTQDSWERLYQQTLRTSGKIYMIFFVLVIFLGSFYLVNLILAVVTMAYEEQNQATTDEIEAKEKKFQEALEMLRKEQEVLAALGIDTTSLHSHNGSPLTSKNASERRHRIKPRVSEGSTEDNKSPRSDPYNQRRMSFLGLASGKRRASHGSVFHFRSPGRDISLPEGVTDDGVFPGDHESHRGSLLLGGGAGQQGPLPRSPLPQPSNPDSRHGEDEHQPPPTSELAPGAVDVSAFDAGQKKTFLSAEYLDEPFRAQRAMSVVSIITSVLEELEESEQKCPPCLTSLSQKYLIWDCCPMWVKLKTILFGLVTDPFAELTITLCIVVNTIFMAMEHHGMSPTFEAMLQIGNIVFTIFFTAEMVFKIIAFDPYYYFQKKWNIFDCIIVTVSLLELGVAKKGSLSVLRSFRLLRVFKLAKSWPTLNTLIKIIGNSVGALGNLTIILAIIVFVFALVGKQLLGENYRNNRKNISAPHEDWPRWHMHDFFHSFLIVFRILCGEWIENMWACMEVGQKSICLILFLTVMVLGNLVVLNLFIALLLNSFSADNLTAPEDDGEVNNLQVALARIQVFGHRTKQALCSFFSRSCPFPQPKAEPELVVKLPLSSSKAENHIAANTARGSSGGLQAPRGPRDEHSDFIANPTVWVSVPIAEGESDLDDLEDDGGEDAQSFQQEVIPKGQQEQLQQVERCGDHLTPRSPGTGTSSEDLAPSLGETWKDESVPQAPAEGVDDTSSSEGSTVDCLDPEEILRKIPELADDLEEPDDCFTEGCIRHCPCCKLDTTKSPWDVGWQVRKTCYRIVEHSWFESFIIFMILLSSGSLAFEDYYLDQKPTVKALLEYTDRVFTFIFVFEMLLKWVAYGFKKYFTNAWCWLDFLIVNISLISLTAKILEYSEVAPIKALRTLRALRPLRALSRFEGMRVVVDALVGAIPSIMNVLLVCLIFWLIFSIMGVNLFAGKFWRCINYTDGEFSLVPLSIVNNKSDCKIQNSTGSFFWVNVKVNFDNVAMGYLALLQVATFKGWMDIMYAAVDSREVNMQPKWEDNVYMYLYFVIFIIFGGFFTLNLFVGVIIDNFNQQKKKLGGQDIFMTEEQKKYYNAMKKLGSKKPQKPIPRPLNKFQGFVFDIVTRQAFDITIMVLICLNMITMMVETDDQSEEKTKILGKINQFFVAVFTGECVMKMFALRQYYFTNGWNVFDFIVVVLSIASLIFSAILKSLQSYFSPTLFRVIRLARIGRILRLIRAAKGIRTLLFALMMSLPALFNIGLLLFLVMFIYSIFGMSSFPHVRWEAGIDDMFNFQTFANSMLCLFQITTSAGWDGLLSPILNTGPPYCDPNLPNSNGTRGDCGSPAVGIIFFTTYIIISFLIVVNMYIAVILENFNVATEESTEPLSEDDFDMFYETWEKFDPEATQFITFSALSDFADTLSGPLRIPKPNRNILIQMDLPLVPGDKIHCLDILFAFTKNVLGESGELDSLKANMEEKFMATNLSKSSYEPIATTLRWKQEDISATVIQKAYRSYVLHRSMALSNTPCVPRAEEEAASLPDEGFVAFTANENCVLPDKSETASATSFPPSYESVTRGLSDRVNMRTSSSIQNEDEATSMELIAPGP

SEQ ID NO: 1018462 - protein, 700 aa, Homo sapiens
MGGSRSFSISHQVVVDALVGAIPSIMNVLLVCLIFWLIFSIMGVNLFAGKFWRCINYTDGEFSLVPLSIVNNKSDCKIQNSTGSFFWVNVKVNFDNVAMGYLALLQVATFKGWMDIMYAAVDSREVNMQPKWEDNVYMYLYFVIFIIFGGFFTLNLFVGVIIDNFNQQKKKLGGQDIFMTEEQKKYYNAMKKLGSKKPQKPIPRPLNKFQGFVFDIVTRQAFDITIMVLICLNMITMMVETDDQSEEKTKILGKINQFFVAVFTGECVMKMFALRQYYFTNGWNVFDFIVVVLSIASLIFSAILKSLQSYFSPTLFRVIRLARIGRILRLIRAAKGIRTLLFALMMSLPALFNIGLLLFLVMFIYSIFGMSSFPHVRWEAGIDDMFNFQTFANSMLCLFQITTSAGWDGLLSPILNTGPPYCDPNLPNSNGTRGDCGSPAVGIIFFTTYIIISFLIVVNMYIAVILENFNVATEESTEPLSEDDFDMFYETWEKFDPEATQFITFSALSDFADTLSGPLRIPKPNRNILIQMDLPLVPGDKIHCLDILFAFTKNVLGESGELDSLKANMEEKFMATNLSKSSYEPIATTLRWKQEDISATVIQKAYRSYVLHRSMALSNTPCVPRAEEEAASLPDEGFVAFTANENCVLPDKSETASATSFPPSYESVTRGLSDRVNMRTSSSIQNEDEATSMELIAPGP

SEQ ID NO: 1018463 - protein, 254 aa, Homo sapiens
MSPEKQHREEDEVDSVLLSASKILNSSEGVKESGCSDTEYGCIAESENQIQPQSALKVLQQQLESFQALRMQTLQNVSMPTENQEENLSMEKSHHFEDSKTLHSVEEKLSGDSVNSLPQSVNVPSQIHSEDTLTLRTSTDNLSSNIIIHPSENSDILKNYNNFYRFLPTAPPNVMSQADTVILDKSKITVPFLKHGFVTNLDDICHSIKQMKEELQKSHDGEVGTLQMNFQTLQTDPRWFPGTGKYDLFPYSPG

SEQ ID NO: 1018464 - protein, 291 aa, Homo sapiens
MSPEKQHREEDEVDSVLLSASKILNSSEGVKESGCSDTEYGCIAESENQIQPQSALKVLQQQLESFQALRMQTLQNVSMVQSEISEILNKSIIEVENPQFSSEKNLVFGTRIEKDLPTENQEENLSMEKSHHFEDSKTLHSVEEKLSGDSVNSLPQSVNVPSQIHSEDTLTLRTSTDNLSSNIIIHPSENSDILKNYNNFYRFLPTAPPNVMSQADTVILDKSKITVPFLKHGFVTNLDDICHSIKQMKEELQKSHDGEVGTLQMNFQTLQTDPRWFPRNGKYDLFPYSPG

SEQ ID NO: 1018465 - protein, 307 aa, Homo sapiens
AEPRHATTRDRTAPDGSVTEKQHREEDEVDSVLLSASKILNSSEGVKESGCSDTEYGCIAESENQIQPQSALKVLQQQLESFQALRMQTLQNVSMVQSEISEILNKSIIEVENPQFSSEKNLVFGTRIEKDLPTENQEENLSMEKSHHFEDSKTLHSVEEKLSGDSVNSLPQSVNVPSQIHSEDTLTLRTSTDNLSSNIIIHPSENSDILKNYNNFYRFLPTAPPNVMSQADTVILDKSKITVPFLKHGFVTNLDDICHSIKQMKEELQKSHDGEVGTLQMNFQTLQTDPRWFPRNGKYDLFPYSPG

SEQ ID NO: 1018466 - protein, 283 aa, Homo sapiens
MSPEKQHREEDEVDSVLLSASKILNSSEGVKESGCSDTEYGCIAESENQIQPQSALKVLQQQLESFQALRMQTLQNVSMVQSEISEILNKSIIEVENPQFSSEKNLVFGTRIEKDLPTENQEENLSMEKSHHFEDSKTLHSVEEKLSGDSVNSLPQSVNVPSQIHSEDTLTLRTSTDNLSSNIIIHPSENSDILKNYNNFYRFLPTAPPNVMSQADTVILDKSKITVPFLKHGFVTNLDDICHSIKQMKEELQKSHDGEVGLQTCNFTLTLAKLPGIGPHTMA

SEQ ID NO: 1018467 - protein, 221 aa, Homo sapiens
MQTLQNVSMVQSEISEILNKSIIEVENPQFSSEKNLVFGTRIEKDLPTENQEENLSMEKSHHFEDSKTLHSVEEKLSGDSVNSLPQSVNVPSQIHSEDTLTLRTSTDNLSSNIIIHPSENSDILKNYNNFYRFLPTAPPNVMSQADTVILDKSKITVPFLKHGFVTNLDDICHSIKQMKEELQKSHDGEVGTLQMNFQTLQTDPRWFPGTGKYDLFPYSPG

SEQ ID NO: 1018468 - protein, 397 aa, Homo sapiens
TQAEKKSTKTHSLLVGREDRNDMSTAGKVIKCKAAVLWEVKKPFSIEDVEVAPPKAYEVRIKMVAVGICHTDDHVVSGNLVTPLPVILGHEAAGIVESVGEGVTTVKPGDKVIPLFTPQCGKCRVCKNPESNYCLKNDLGNPRGTLQDGTRRFTCRGKPIHHFLGTSTFSQYTVVDENAVAKIDAASPLEKVCLIGCGFSTGYGSAVNVAKVTPGSTCAVFGLGGVGLSAVMGCKAAGAARIIAVDINKDKFAKAKELGATECINPQDYKKPIQEVLKEMTDGGVDFSFEVIGRLDTMMASLLCCHEACGTSVIVGVPPASQNLSINPMLLLTGRTWKGAVYGGFKSKEGIPKLVADFMAKKFSLDALITHVLPFEKINEGFDLLHSGKSIRTVLTF

SEQ ID NO: 1018469 - protein, 375 aa, Homo sapiens
MSTAGKVIKCKAAVLWEVKKPFSIEDVEVAPPKAYEVRIKMVAVGICHTDDHVVSGNLVTPLPVILGHEAAGIVESVGEGVTTVKPGDKVIPLFTPQCGKCRVCKNPESNYCLKNDLGNPRGTLQDGTRRFTCRGKPIHHFLGTSTFSQYTVVDENAVAKIDAASPLEKVCLIGCGFSTGYGSAVNVAKVTPGSTCAVFGLGGVGLSAVMGCKAAGAARIIAVDINKDKFAKAKELGATECINPQDYKKPIQEVLKEMTDGGVDFSFEVIGRLDTMMASLLCCHEACGTSVIVGVPPASQNLSINPMLLLTGRTWKGAVYGGFKSKEGIPKLVADFMAKKFSLDALITHVLPFEKINEGFDLLHSGKSIRTVLTF

SEQ ID NO: 1018470 - protein, 137 aa, Homo sapiens
KHTATHSRRNDRQLHEHLPARGDKRTVEGCVPYCAEWLLLLLCGLFSSGLRFLLQLSPGWRRCGAAAARKNSTGGNVSINQRRDSVRMSALNWKPFVYGGLASITAECGTFPSDVTATAPVYHHQDRHLPELEATIH

SEQ ID NO: 1018471 - protein, 323 aa, Homo sapiens
KHTATHSRRNDRQLHEHLPARGDKRTVEGCVPYCAEWLLLLLCGLFSSGLRFLLQLSPGWRRCGAAAARKNSTGGNVSINQRRDSVRMSALNWKPFVYGGLASITAECGTFPSDVTATAPSATIKIGTYQSLKRLFIERPEDETLPINVICGILSGVISSTIANPTDVLKIRMQAQSNTIQGGMIGNFMNIYQQEGTRGLWKGVSLTAQRAAIVVGVELPVYDITKKHLILSGLMGDTVYTHFLSSFTCGLAGALASNPVDVVRTRMMNQRVLRDGRCSGYTGTLDCLLQTWKNEGFFALYKGFWPNWLRLGPWNIIFFATYE

SEQ ID NO: 1018472 - protein, 293 aa, Homo sapiens
KHTATHSRRNDRQLHEHLPARGDKRTVEGCVPYCAEWLLLLLCGLFSSGLRFLLQLSPGWRRCGAAAARKNSTGGNVSINQRRDSVRMSALNWKPFVYGGLASITAECGTFPSDVTATAPSATIKIGTYQSLKRLFIERPEDETLPINVICGILSGVISSTIANPTDVLKIRMQAQSNTIQGGMIGNFMNIYQQEGTRGLWKGVSLTAQRAAIVVGVELPVYDITKKHLILSGLMGDTVYTHFLSSFTCGLAGALASNPVDVVRTRMMNQRVLRDGRCSGYTGTLDCLLQVLP

SEQ ID NO: 1018473 - protein, 138 aa, Homo sapiens
  misc_feature (1)..(1): Xaa can be any naturally occurring amino acid
  misc_feature (24)..(24): Xaa can be any naturally occurring amino acid
  misc_feature (27)..(27): Xaa can be any naturally occurring amino acid
  misc_feature (50)..(50): Xaa can be any naturally occurring amino acid
  misc_feature (65)..(65): Xaa can be any naturally occurring amino acid
XREQKRPRRNASGRKSRRAITAGXGAXQVGRAQGTWTNWTSETNTTLDPXRKPDSTWTGLPPPHXPTLEPLRAKQQSGAELWDLSGKLRVRCAGPWVKAAARLLAATLRPARGPVIFALLNSHSILCLTSVAFPVIVP

SEQ ID NO: 1018474 - protein, 138 aa, Homo sapiens; identical to SEQ ID NO: 1018473
  misc_feature (1)..(1): Xaa can be any naturally occurring amino acid
  misc_feature (24)..(24): Xaa can be any naturally occurring amino acid
  misc_feature (27)..(27): Xaa can be any naturally occurring amino acid
  misc_feature (50)..(50): Xaa can be any naturally occurring amino acid
  misc_feature (65)..(65): Xaa can be any naturally occurring amino acid

SEQ ID NO: 1018475 - protein, 120 aa, Homo sapiens
VLCVVITSYGVIAEALLRLQLMQKCPLFLCLHKIFEKDLDHLEEQGYLGGFMQKFRYPFAPMYGGFPVKLRTYLGDPIPYDPQITAEELAEKTKNAVQALIDKHQRIPGNIMSALLERFH

SEQ ID NO: 1018476 - protein, 120 aa, Homo sapiens; identical to SEQ ID NO: 1018475

SEQ ID NO: 1018477 - protein, 120 aa, Homo sapiens; identical to SEQ ID NO: 1018475

SEQ ID NO: 1018478 - protein, 349 aa, Homo sapiens
MHRNFRKWIFYVFLCFGVLYVKLGALSSVVALGANIICNKIPGLAPRQRAICQSRPDAIIVIGEGAQMGINECQYQFRFGRWNCSALGEKTVFGQELRVGSREAAFTYAITAAGVAHAVTAACSQGNLSNCGCDREKQGYYNQAEGWKWGGCSADVRYGIDFSRRFVDAREIKKNARRLMNLHNNEAGRKVLEDRMQLECKCHGVSGSCTTKTCWTTLPKFREVGHLLKEKYNAAVQVEVVRASRLRQPTFLRIKQLRSYQKPMETDLVYIEKSPNYCEEDAATGSVGTQGRLCNRTSPGADGCDTMCCGRGYNTHQYTKVWQCNCKFHWCCFVKCNTCSERTEVFTCK

SEQ ID NO: 1018479 - protein, 1230 aa, Homo sapiens
MASASYHISNLLEKMTSSDKDFRFMATNDLMTELQKDSIKLDDDSERKVVKMILKLLEDKNGEVQNLAVKCLGPLVSKVKEYQVETIVDTLCTNMLSDKEQLRDISSIGLKTVIGELPPASSGSALAANVCKKITGRLTSAIAKQEDVSVQLEALDIMADMLSRQGGLLVNFHPSILTCLLPQLTSPRLAVRKRTIIALGHLVMSCGNIVFVDLIEHLLSELSKNDSMSTTRTYIQCIAAISRQAGHRIGEYLEKIIPLVVKFCNVDDDELREYCIQAFESFVRRCPKEVYPHVSTIINICLKYLTYDPNYNYDDEDEDENAMDADGGDDDDQGSDDEYSDDDDMSWKVRRAAAKCLDAVVSTRHEMLPEFYKTVSPALISRFKEREENVKADVFHAYLSLLKQTRPVQSWLCDPDAMEQGETPLTMLQSQVPNIVKALHKQMKEKSVKTRQCCFNMLTELVNVLPGALTQHIPVLVPGIIFSLNDKSSSSNLKIDALSCLYVILCNHSPQVFHPHVQALVPPVVACVGDPFYKITSEALLVTQQLVKVIRPLDQPSSFDATPYIKDLFTCTIKRLKAADIDQEVKERAISCMGQIICNLGDNLGPDLSNTLQIFLERLKNEITRLTTVKALTLIAGSPLKIDLRPVLGEGVPILASFLRKNQRALKLGTLSALDILIKNYSDSLTAAMIDAVLDELPPLISESDMHVSQMAISFLTTLAKVYPSSLSKISGSILNELIGLVRSPLLQGGALSAMLDFFQALVVTGTNNLGYMDLLRMLTGPVYSQSTALTHKQSYYSIAKCVAALTRACPKEGPAVVGQFIQDVKNSRSTDSIRLLALLSLGEVGHHIDLSGQLELKSVILEAFSSPSEEVKSAASYALGSISVGNLPEYLPFVLQEITSQPKRQYLLLHSLKEIISSASVVGLKPYVENIWALLLKHCECAEEGTRNVVAECLGKLTLIDPETLLPRLKGYLISGSSYARSSVVTAVKFTISDHPQPIDPLLKNCIGDFLKTLEDPDLNVRRVALVTFNSAAHNKPSLIRDLLDSVLPHLYNETKVRKELIREVEMGPFKHTVDDGLDIRKAAFECMYTLLDSCLDRLDIFEFLNHVEDGLKDHYDIKMLTFLMLVRLSTLCPSAVLQRLDRLVEPLRATCTTKVKANSVKQEFEKQDELKRSAMRAVAALLTIPEAEKSPLMSEFQSQISSNPELAAIFESIQKDSSSTNLESMDTS

SEQ ID NO: 1018480 - protein, 605 aa, Homo sapiens
MPSSVTALGQARSSGPGMAPSACCCSPAALQRRLPILAWLPSYSLQWLKMDFVAGLSVGLTAIPQALAYAEVAGLPPQYGLYSAFMGCFVYFFLGTSRDVTLGPTAIMSLLVSFYTFHEPAYAVLLAFLSGCIQLAMGVLRLGFLLDFISYPVIKGFTSAAAVTIGFGQIKNLLGLQNIPRPFFLQVYHTFLRIAETRVGDAVLGLVCMLLLLVLKLMRDHVPPVHPEMPPGVRLSRGLVWAATTARNALVVSFAALVAYSFEVTGYQPFILTGETAEGLPPVRIPPFSVTTANGTISFTEMVQDMGAGLAVVPLMGLLESIAVAKAFASQNNYRIDANQELLAIGLTNMLGSLVSSYPVTGSFGRTAVNAQSGVCTPAGGLVTGVLVLLSLDYLTSLFYYIPKSALAAVIIMAVAPLFDTKIFRTLWRVKRLDLLPLCVTFLLCFWEVQYGILAGALVSLLMLLHSAARPETKVSEGPVLVLQPARLSFPAMEALREEILSRALEVSPPRCLVLECTHVCSIDYTVVLGLGELLQDFQKQGVALAFVGLQVPVLRVLLSADLKGFQYFSTLEEAEKHLRQEPGTQPYNIREDSILDQKVALLKA

SEQ ID NO: 1018481 - protein, 554 aa, Homo sapiens
RLSPAIPADPAVATPGDPKLHRRVGPTVEMPSSVTALGQARSSGPGMAPSACCCSPAALQRRLPILAWLPSYSLQWLKMDFVAGLSVGLTAIPQALAYAEVAGLPPQASPLLLPSPSALDRSRTCWDYRTSPGRSSCRCTTPSSGLQRPECRVRTVARWGRLLPWDVCPSNLEAAALPHTRREQGLGRTSPSLLARNALVVSFAALVAYSFEVTGYQPFILTGETAEGLPPVRIPPFSVTTANGTISFTEMVQDMGAGLAVVPLMGLLESIAVAKAFASQNNYRIDANQELLAIGLTNMLGSLVSSYPVTGSFGRTAVNAQSGVCTPAGGLVTGVLVLLSLDYLTSLFYYIPKSALAAVIIMAVAPLFDTKIFRTLWRVKRLDLLPLCVTFLLCFWEVQYGILAGALVSLLMLLHSAARPETKVSEGPVLVLQPARLSFPAMEALREEILSRALEVSPPRCLVLECTHVCSIDYTVVLGLGELLQDFQKQGVALAFVGLQVPVLRVLLSADLKGFQYFSTLEEAEKHLRQEPGTQPYNIREDSILDQKVALLKA

SEQ ID NO: 1018482 - protein, 339 aa, Homo sapiens
MPSSVTALGQARSSGPGMAPSACCCSPAALQRRLPILAWLPSYSLQWLKMDFVAGLSVGLTAIPQALAYAEVAGLPPQYGLYSAFMGCFVYFFLGTSRDVTLGPTAIMSLLVSFYTFHEPAYAVLLAFLSGCIQLAMGVLRLGFLLDFISYPVIKGFTSAAAVTIGFGQIKNLLGLQNIPRPFFLQVYHTFLRIAETRVGDAVLGLVCMLLLLVLKLMRDHVPPVHPEMPPGVRLSRGLVWAATTARNALVVSFAALVAYSFEVTGYQPFILTGETAEGLPPVRIPPFSVTTANGTISFTEMVQVGGAGRQDGVAEAAVAPGLAPTLMYLLGARGSEVS

SEQ ID NO: 1018483 - protein, 151 aa, Homo sapiens [sequence omitted]

SEQ ID NO: 1018484 - protein, 605 aa, Homo sapiens; identical to SEQ ID NO: 1018480

SEQ ID NO: 1018485 - protein, 261 aa, Homo sapiens
MSSEPPPPYPGGPTAPLLEEKSGAPPTPGRSSPAVMQPPPGMPLPPADIGPPPYEPPGHPMPQPGFIPPHMSADGTYMPPGFYPPPGPHPPMGYYPPGPYTPGPYPGPGGHTATVLVPSGAATTVTVLQGEIFEGAPVQTVCPHCQQAITTKISYEIGLMNFVLGFFCCFMGCDLGCCLIPCLINDFKDVTHTCPSCKATSTRTSACANGAGTRDSPACQSGPLCFAPCAQWSLSRSHLGLGAVPPSPRSPVLFTLPYLSR

SEQ ID NO: 1018486 - protein, 153 aa, Homo sapiens
IRGRVDLDPLYVTGVGDQDIAPAQAHEHQAVHRQRQHVIQRQQGDVGFLLVLIQLIARPRPWLHQVGEDITVGEHRPLASPVVPPVYCRKAMSSWASLTFLTRSVAPCFIIRGKRIAPGRMETRHLFLDMPQHKVQGRALERPHQVADGVDAA

SEQ ID NO: 1018487 - protein, 168 aa, Homo sapiens
  misc_feature (130)..(130): Xaa can be any naturally occurring amino acid
  misc_feature (140)..(140): Xaa can be any naturally occurring amino acid
  misc_feature (150)..(151): Xaa can be any naturally occurring amino acid
MALWLGDPVDFYLAQQRGSDGWLNTHPLLYHVISVHIFPMSLRCLDLSPGHHHQCCSFPMWFCFGGVTAWLLEAAGISGEASSLGPHSVPRVFKDGSGSHSSPDAHGHHSVCPLPTALQLIEQRDVPVVXQCSSVGALWXLHPPGGSPSXXGVVASPHSRQPGLQRPH

SEQ ID NO: 1018488 - protein, 93 aa, Homo sapiens
ARAGVSPPVPLAARCVAARWLFRTEARLVFLQKFPPWAVVEVVTVIVAAPAAATATTRDGGGCSRNCNIPEVFPELLGCPNRRGPPGGVRGAD

SEQ ID NO: 1018489 - protein, 333 aa, Homo sapiens; identical to SEQ ID NO: 916514

SEQ ID NO: 1018490 - protein, 365 aa, Homo sapiens; identical to SEQ ID NO: 916524

SEQ ID NO: 1018491 - protein, 122 aa, Homo sapiens
MAAAAAGTATSQRFFQSFSDALIDEDPQAALEELTKALEQKPDDAQYYCQRAYCHILLGNYCVAVADAKKSLELNPNNSTAMLRKGICEYHEKNYAAALETFTEGQKLDSADANFSVWIKRS

SEQ ID NO: 1018492 - protein, 93 aa, Homo sapiens; identical to SEQ ID NO: 1018488

SEQ ID NO: 1018493 - protein, 303 aa, Homo sapiens
MAAAAAGTATSQRFFQSFSDALIDEDPQAALEELTKALEQKPDDAQYYCQRAYCHILLGNYCVAVADAKKSLELNPNNSTAMLRKGICEYHEKNYAAALETFTEGQKLDSADANFSVWIKRCQEAQNGSESEVWTHQSKIKYDWYQTESQVVITLMIKNVQKNDVNVEFSEKELSALVKLPSGEDYNLKLELLHPIIPEQSTFKVLSTKIEIKLKKPEAVRWEKLEGQGDVPTPKQFVADVKNLYPSSSPYTRNWDKLVGEIKEEEKKNRGYKGGRKKRYGKGLGPSCFRTQFLCPGGKSAGS

SEQ ID NO: 1018494 - protein, 333 aa, Homo sapiens; identical to SEQ ID NO: 916514

SEQ ID NO: 1018495 - protein, 390 aa, Homo sapiens
MAAQKDLWDAIVIGAGIQGCFTAYHLAKHRKRILLLEQFFLPHSRGSSHGQSRIIRKAYLEDFYTRMMHECYQIWAQLEHEAGTQLHRQTGLLLLGMKENQELKTIQANLSRQRVEHQCLSSEELKQRFPNIRLPRGEVGLLDNSGGVIYAYKALRALQDAIRQLGGIVRDGEKVVEINPGLLVTVKTTSRSYQAKSLVITAGPWTNQLLRPLGIEMPLQTLRINVCYWREMVPGSYGVSQAFPCFLWLGLCPHHIYGLPTGEYPGLMKVSYHHGNHADPEERDCPTARTDIGDVQILSSFVRDHLPDLKPEPAVIESCMYTNTPDEQFILDRHPKYDNIVIGAGFSGHGFKLAPVVGKILYELSMKLTPSYDLAPFRISRFPSLAKAHL

SEQ ID NO: 1018496 - protein, 317 aa, Homo sapiens
MKSVLTWKHRKEHAIPHVVLGRNLPGGAWHSIEGSMVILSQGQWMGLPDLEVKDWMQKKRRGLRNSRATAGDIAHYYRDYVVKKGLGHNFVSGAVVTAVEWGTPDPSSCGAQDSSPLFQVSGFLTRNQAQQPFSLWARNVVLATGTFDSPARLGIPGEALPFIHHELSALEAATRVGAVTPASDPVLIIGAGLSAADAVLYARHYNIPVIHAFRRAVDDPGLVFNQLPKMLYPEYHKVHQMMREQSILSPSPYEGYRSLPRHQLLCFKEDCQAVFQDLEGVEKVFGVSLVLVLIGSHPDLSFLPGAGLTLQWILTSR

SEQ ID NO: 1018497 - protein, 219 aa, Homo sapiens
RPPRAIYTKIKRATCGFLPLFLYLAPPRCGSGLVETSPYNTGVVSSFNPLAFDTFVVGLVPKGVCYPVYWTILFLFRMSRSKVVGTQSPTTAGQQVVDFNSCLDYSVLDSSFLTLFEAPTLRGGLYWGPCPLAQFELKTPVPFSAGLLCWTDKRDLFLDISRGDLEEPWKLSKKGAAQKQGQGPGWGGPEIQFINTLADIVIVGLTLVEALGYLSLLCF

SEQ ID NO: 1018498 - protein, 174 aa, Homo sapiens
RPPRAIYTKIKRATCGFLPLFLYLAPPRCGSGLVETSPYNTGVVSSFNPLAFDTFVVGLVPKGVCYPVYWTILFLFRMSRSKVVGTQSPTTAGQQVVDFNSCLDYSVLDSSFLTLFEAPTLRPLLDRLRVTCFVDISRGDLEEPWKLSKKGAAQKQGQGPGWGGPEIQFINTLG

SEQ ID NO: 1018499 - protein, 136 aa, Homo sapiens
INKGGGIKGWAKRQAGAGDAAGQAGSAVAFVATVAVAVTGSFWKWRRGGPPHRVFTCYFYTGWVDERDPTQAKCRCDRSPRTRRSSPAKPAAAVWPRTRPEKLHLRPEPAGPPSQVGPWAPPRKRGSVHLPWHQGV

SEQ ID NO: 1018500 - protein, 154 aa, Homo sapiens
MSEPDVRIRTKRAQELRLADPEKRGLDRSAAGEGSGARPPRQAGATAADGANKPPPEAEPSAVAMAAGRGREREARAARGTRGRRQRASRARGTWAERGAIPHIRPPITAAVFWRQRFPPPANPERRHAGIRGVNCPPAGRGGKGPSRWGRGHG

SEQ ID NO: 1018501 - protein, 332 aa, Homo sapiens
MLVVYCRYSSWCSPRTGMIYYDAALCMPPFGSAWKGPPMPVLGLQVSGPGCCAEGMPLVPPSIGHPGDSHESSPKVPWTPWRLSWVRPRRLVRCVQCNDVVPPKDSRRGTMVNLNYSTRGLRVPSSPNGGPPSDVKYSYSKPTAHARRHCTSRYADCGFGSWPSSCNQFGKQEPGSNEEIKESPAGYNVKFDMFSKICVNGDDAHPLWKWMKIQPKGKGILGNAIKWNFTKFLIDKNGCVVKRYGPMEEPLVIEKDLHPLVFSSQKFVATARAPAKAFGAFHRHLMAAFLENLLVGQTQKSSVHPAGGSSHGLLGFARPPHPWLPCGNKQTN

SEQ ID NO: 1018502 - protein, 156 aa, Homo sapiens
MLTGLALVNERNHQWKGYQGAFSKERDSKLQDEQLNAIQVWMRKNSRETEFQEWKHSKHHLPLSSPAAEEEGKNTDLLRTCGANHWLQKSKQGLPSAQQEAVSLVGGLTEETNVSTDNGQEPEALEPRGNPKKLIQVREPRIMQFHMATSKQESVK

SEQ ID NO: 1018503 - protein, 138 aa, Homo sapiens
  misc_feature (129)..(129): Xaa can be any naturally occurring amino acid
MPSTESGAAHTNLHPPTYNRHPSDYNDTTPTTHAHPQPSVLHSSGPRSISLTTPCSLNTKRPPRRNTPKNALTSAHTALAYNIHARPITADTHQTQHHTPPPSTTHETGPPVYATSHRPHLRPATSSHXTRITTMSQR

SEQ ID NO: 1018504 - protein, 105 aa, Homo sapiens
SLPRAVTSGPLLSLGCVPKTQGPWKVHLSVSHGSFFTQQEQRYREWRPGLLKDSQSMRQEAPQGSSGPPPPISSHTALCTFCSFFCKPKTALNNEVRHAETAHGC

SEQ ID NO: 1018505 - protein, 665 aa, Homo sapiens
  misc_feature (307)..(307): Xaa can be any naturally occurring amino acid
FAVRSGGATGVVVKGPDDRNPISFRMDDKGEVKCIKFSLENKILAVQRTSKTVDFCNFIPDNSQLEYTQECKTKNANILGFCWTSSTEIVFITDQGIEFYQVLPEKRSLKLLKSHNLNVNWYMYCPESAVILLSTTVLENVLLPFHFRAGTMSKLPKFEIELPAAPKSTKPSLSERDIAMATIYGQLYVLFLRHHSRTSNSTGAEVVLYHLPREGACKKMHILKLNRTGKFALNVVDNLVVVHHQDTETSVIFDIKLRGEFDGSVTFHHPVLPARSIQPYQIPITGPAAVTSQSPVPCKLYSSSWIXFQPDIIISASQGYLWNLQVKLEPIVNLLPDKGRLMDFLLQRKECKMVILSVCSQMLSESDRASLPVIATVFDKLNHEYKKYLDAEQSYAMAVEAGQSRSSPLLKRPVRTQAVLDQSDVYTHVLSAFVDFFLYGVFKHYRQKKEMPHKFVIAVLMEYIRSLNQFQIAVQHYLHELVIKTLVQHNLFYMLHQFLQYHVLSDSKPLACLLLSLESFYPPAHQLSLDMLKRLSTANDEIVEVLLSKHQVLAALRFIRGIGATAPLVQDNPYITPIRLSTTDSSNSSSDMYTIITTIGQGAAISHFRIGLGQKGPMSAIKFDEPSLSGRITVFGRHVWVDIEFRRHCVWVIIALGTLWKDEKM

SEQ ID NO: 1018506 - protein, 609 aa, Homo sapiens
  misc_feature (282)..(282): Xaa can be any naturally occurring amino acid
MDDKGEVKCIKFSLENKILAVQRTSKTVDFCNFIPDNSQLEYTQECKTKNANILGFCWTSSTEIVFITDQGIEFYQVLPEKRSLKLLKSHNLNVNWYMYCPESAVILLSTTVLENVLLPFHFRAGTMSKLPKFEIELPAAPKSTKPSLSERDIAMATIYGQLYVLFLRHHSRTSNSTGAEVVLYHLPREGACKKMHILKLNRTGKFALNVVDNLVVVHHQDTETSVIFDIKLRGEFDGSVTFHHPVLPARSIQPYQIPITGPAAVTSQSPVPCKLYSSSWIXFQPDIIISASQGYLWNLQVKLEPIVNLLPDKGRLMDFLLQRKECKMVILSVCSQMLSESDRASLPVIATVFDKLNHEYKKYLDAEQSYAMAVEAGQSRSSPLLKRPVRTQAVLDQSDVYTHVLSAFVDFFLYGVFKHYRQKKEMPHKFVIAVLMEYIRSLNQFQIAVQHYLHELVIKTLVQHNLFYMLHQFLQYHVLSDSKPLACLLLSLESFYPPAHQLSLDMLKRLSTANDEIVEVLLSKHQVLAALRFIRGIGGHDNISARKFLDAAKQTEDNMLFYTIFRFFEQRNQRLRGSPNFTPGEHCEEHVAFFKQIFGDQALMRPTTF

SEQ ID NO: 1018507 - protein, 269 aa, Homo sapiens
  misc_feature (11)..(11): Xaa can be any naturally occurring amino acid
  misc_feature (18)..(18): Xaa can be any naturally occurring amino acid
  misc_feature (27)..(27): Xaa can be any naturally occurring amino acid
  misc_feature (49)..(49): Xaa can be any naturally occurring amino acid
  misc_feature (65)..(65): Xaa can be any naturally occurring amino acid
  misc_feature (157)..(157): Xaa can be any naturally occurring amino acid
  misc_feature (159)..(159): Xaa can be any naturally occurring amino acid
  misc_feature (168)..(168): Xaa can be any naturally occurring amino acid
  misc_feature (172)..(172): Xaa can be any naturally occurring amino acid
  misc_feature (178)..(180): Xaa can be any naturally occurring amino acid
  misc_feature (201)..(202): Xaa can be any naturally occurring amino acid
  misc_feature (207)..(209): Xaa can be any naturally occurring amino acid
MMFALLKVYCXTYIPHAXLQLQRGPDXYQLEINLRIQEIDLHYNISIVXAILKTNRTSLLVCPGXIEGRVAIHYINPPNPAKDNFTFKCHRSNGTNTSAPQDIYAVNGIRSILFMAPLQLWDLMVDSASGTKMPEQNQKLRNSQTSPPQLAVSITMXTXSHTLPATTXQRNXKLTNPXXXITLPCPTHPKSKSPGKRSSGXXPPPTXXXPPPLCLISVRIWVPALLGCHPWTWISTPGENDVIVQQLRPQASAGDLPFLHSTACCRVFL

SEQ ID NO: 1018508 - protein, 114 aa, Homo sapiens
  misc_feature (2)..(3): Xaa can be any naturally occurring amino acid
  misc_feature (5)..(7): Xaa can be any naturally occurring amino acid
  misc_feature (9)..(9): Xaa can be any naturally occurring amino acid
  misc_feature (27)..(27): Xaa can be any naturally occurring amino acid
  misc_feature (29)..(30): Xaa can be any naturally occurring amino acid
  misc_feature (32)..(33): Xaa can be any naturally occurring amino acid
  misc_feature (36)..(36): Xaa can be any naturally occurring amino acid
MXXRXXXMXFSPSALYPFSFCPRQQGXSXXPXXNGXAEQRGSDRLWGWSRTGTGGNGHLSVRRLCCFPYHRNKQCSASLCRPAQPPGVEGGVSFVRVGVALCILSQWSKNMFIP

SEQ ID NO: 1018509 - protein, 126 aa, Homo sapiens
PWALFLREALGQEREGPQSQSEEVNTLLLFLPKTLESVDVHCFGHLLYEMTYGRPPDSVPVDSFPPAPSMAVGQYGVGKGLLGPSSVQSHSSPFSESRKDPEEVAVLHSPEFLQNLKVDPDHLDEY

SEQ ID NO: 1018510 - protein, 461 aa, Homo sapiens
RYSDFDLLNNSLQIAGLKSTSSSQKIDGNMDREFIAERQKGLQNYLNVITTNHILSNCELVKKFLDPNNYSANYTEIALQQVSMFFRSEPKWEVVEPLKDIGWRIRKKYFLMKIKNQPKERLVLSWADLGPDKYLSDKDFQCLIKLLPSCLHPYIYRVTFATANESSALLIRMFNEKGTLKDLIYKAKPKDPFLKKYCNPKKIQGLELQQIKTYGRQILEVLKFLHDKGFPYGHLHASNVMLDGDTCRLLDLENSLLGLPSFYRSYFSQFRKINTLESVDVHCFGHLLYEMTYGRPPDSVPVDSFPPAPSMAVVAVLESTLSCEACKNGMPTISRLLQMPLFSDVLLTTSEKPQFKIPTKLKEALRIAKECIEKRLIEEQKQIHQHRRLTRAQSHHGSEEERKKRKILARKKSKRSALENSEEHSAKYSNSNNSAGSGASSPLTSPSSPTPPSTSVEHAPF

SEQ ID NO: 1018511 - protein, 468 aa, Homo sapiens
RYSDFDLLNNSLQIAGLKSTSSSQKIDGNMDREFIAERQKGLQNYLNVITTNHILSNCELVKKFLDPNNYSANYTEIALQQVSMFFRSEPKWEVVEPLKDIGWRIRKKYFLMKIKNQPKERLVLSWADLGPDKYLSDKDFQCLIKLLPSCLHPYIYRVTFATANESSALLIRMFNEKGTLKDLIYKAKPKDPFLKKYCNPKKIQGLELQQIKTYGRQILEVLKFLHDKGFPYGHLHASNVMLDGDTCRLLDLENSLLGLPSFYRSYFSQFRKINTLESVDVHCFGHLLYEMTYGRPPDSVPVDSFPPAPSMAVVAVLESTLSCEACKNGMPTISRLLQMPLFSDVLLTTSEKPQFKIPTKLKEALRIAKECIEKRLIEEQKQIHQHRRLTRAQSHHGSEEERKKRKILARKKSKRSALENSEEHSAKYSNSNNQGYLHYLHLLHLHHHQQLPCLLRAPRHLPSSRLRL

SEQ ID NO: 1018512 - protein, 203 aa, Homo sapiens
ASRVQVILLPQPPEYWNYRLFSDVLLTTSEKPQFKIPTKLKEALRIAKECIEKRLIEEQKQIHQHRRLTRAQSHHGSEEERKKRKILARKKSKRSALENSEEHSAKYSNSNNSAGSGASSPLTSPSSPTPPSTSGISALPPPPPPPPPPAAPLPPASTEAPAQLSSQAVNGMSRGALLSSIQNFQKGTLRKAKTCDHSAPKIG

SEQ ID NO: 1018513 - protein, 456 aa, Homo sapiens
RYSDFDLLNNSLQIAGLKSTSSSQKIDGNMDREFIAERQKGLQNYLNVITTNHILSNCELVKKFLDPNNYSANYTEIALQQVSMFFRSEPKWEVVEPLKDIGWRIRKKYFLMKIKNQPKERLVLSWADLGPDKYLSDKDFQCLIKLLPSCLHPYIYRVTFATANESSALLIRMFNEKGTLKDLIYKAKPKDPFLKKYCNPKKIQGLELQQIKTYGRQILEVLKFLHDKGFPYGHLHASNVMLDGDTCRLLDLENSLLGLPSFYRSYFSQFRKINTLESVDVHCFGHLLYEMTYGRPPDSVPVDSFPPAPSMAVVAVLESTLSCEACKNGMPTISRLLQMPLFSDVLLTTSEKPQFKIPTKLKEALRIAKECIEKRLIEEQKQIHQHRRLTRAQSHHGSEEERKKRKILARKKSKRSALENSEEHSAKYSNSNNSAGSGASSPLTSPSSPTPPSTSG

SEQ ID NO: 1018514 - protein, 461 aa, Homo sapiens; identical to SEQ ID NO: 1018510

SEQ ID NO: 1018515 - protein, 461 aa, Homo sapiens; identical to SEQ ID NO: 1018510

SEQ ID NO: 1018516 - protein, 106 aa, Homo sapiens
  misc_feature (23)..(23): Xaa can be any naturally occurring amino acid
  misc_feature (48)..(48): Xaa can be any naturally occurring amino acid
MRKDSSFAYSSTWHPDPSQEVDXLSKERFSFIPIKCGLAKHVGEDFHXGSCLMWDMLTSYGLLKIHQHRRLTRAQSHHGSEEERKKRKILARKVSLLSLCSPSMSS

SEQ ID NO: 1018517 - protein, 524 aa, Homo sapiens
RYSDFDLLNNSLQIAGLKSTSSSQKIDGNMDREFIAERQKGLQNYLNVITTNHILSNCELVKKFLDPNNYSANYTEIALQQVSMFFRSEPKWEVVEPLKDIGWRIRKKYFLMKIKNQPKERLVLSWADLGPDKYLSDKDFQCLIKLLPSCLHPYIYRVTFATANESSALLIRMFNEKGTLKDLIYKAKPKDPFLKKYCNPKKIQGLELQQIKTYGRQILEVLKFLHDKGFPYGHLHASNVMLDGDTCRLLDLENSLLGLPSFYRSYFSQFRKINTLESVDVHCFGHLLYEMTYGRPPDSVPVDSFPPAPSMAVVAVLESTLSCEACKNGMPTISRLLQMPLFSDVLLTTSEKPQFKIPTKLKEALRIAKECIEKRLIEEQKQIHQHRRLTRAQSHHGSEEERKKRKILARKKSKRSALENSEEHSAKYSNSNNSAGSGASSPLTSPSSPTPPSTSGISALPPPPPPPPPPAAPLPPASTEAPAQLSSQAVNGMSRGALLSSIQNFQKGTLRKAKTCDHSAPKIG

SEQ ID NO: 1018518 - protein, 506 aa, Homo sapiens
RYSDFDLLNNSLQIAGLKSTSSSQKIDGNMDREFIAERQKGLQNYLNVITTNHILSNCELVKKFLDPNNYSANYTEIALQQVSMFFRSEPKWEVVEPLKDIGWRIRKKYFLMKIKNQPKERLVLSWADLGPDKYLSDKDFQCLIKLLPSCLHPYIYRVTFATANESSALLIRMFNEKGTLKDLIYKAKPKDPFLKKYCNPKKIQGLELQQIKTYGRQILEVLKFLHDKGFPYGHLHASNVMLDGDSLPASQFRKINTLESVDVHCFGHLLYEMTYGRPPDSVPVDSFPPAPSMAVVAVLESTLSCEACKNGMPTISRLLQMPLFSDVLLTTSEKPQFKIPTKLKEALRIAKECIEKRLIEEQKQIHQHRRLTRAQSHHGSEEERKKRKILARKKSKRSALENSEEHSAKYSNSNNSAGSGASSPLTSPSSPTPPSTSGISALPPPPPPPPPPAAPLPPASTEAPAQLSSQAVNGMSRGALLSSIQNFQKGTLRKAKTCDHSAPKIG

SEQ ID NO: 1018519 - protein, 524 aa, Homo sapiens; identical to SEQ ID NO: 1018517

SEQ ID NO: 1018520 - protein, 456 aa, Homo sapiens; identical to SEQ ID NO: 1018513

SEQ ID NO: 1018521 - protein, 424 aa, Homo sapiens
RYSDFDLLNNSLQIAGLKSTSSSQKIDGNMDREFIAERQKGLQNYLNVITTNHILSNCELVKKFLDPNNYSANYTEIALQQVSMFFRSEPKWEVVEPLKDIGWRIRKKYFLMKIKNQPKERLVLSWADLGPDKYLSDKDFQCLIKLLPSCLHPYIYRVTFATANESSALLIRMFNEKGTLKDLIYKAKPKDPFLKKYCNPKKIQGLELQQIKTYGRQILEVLKFLHDKGFPYGHLHASNVMLDGDTCRLLDLENSLLGLPSFYRSYFSQFRKINTLESVDVHCFGHLLYEMTYGRPPDSVPVDSFPPAPSMAVVAVLESTLSCEACKNGMPTISRLLQMPLFSDVLLTTSEKPQFKIPTKLKEALRIAKECIEKRLIEEQKQIHQHRRLTRAQSHHGSEEERKKRKILARKVSLLSLCSPSMSS

SEQ ID NO: 1018522 - protein, 108 aa, Homo sapiens
MCRARAGEGSERRTQGAGRRAERGCPFPGDKSGKPGWTASAPRASWTQGSLLDSGFPVLSSGDVQSHTAARSATQRSNLPPASLVPETTDILRFLTVAPFYPAQCAAA

SEQ ID NO: 1018523 - protein, 231 aa, Homo sapiens
MHPCGEFPGPSSGRGSAGWEGAAKKPELAAYSEIRGPPSLYSRVQLELAPPRSEPGRSLGVWCLCSDGGLWGSFLPALTSLFVPGLGLGQPWGIRRGHLGPAVYSEGGQPPPLHSASTKSAPESSRLLLFICAGPGPVKGQRDGHKEPAGGRSEDVLSRETSRESLAGLPQPRAPPGLRVVLSSGDVQSHTAARSATQRSNLPPASLVPETTDILRFLTVAPFYPAQCAAA

SEQ ID NO: 1018524 - protein, 159 aa, Homo sapiens
  misc_feature (7)..(7): Xaa can be any naturally occurring amino acid
  misc_feature (21)..(21): Xaa can be any naturally occurring amino acid
PPIFSDXIPMRQWLVVLQISXPVILWMRPQVPVPEPHARRNEPEVSAGNRVELRARAGEGSERRTQGAGRRAERGCPFPGDKSGKPGWTASAPRASWTQGSLLDSGFPVLSSGDVQSHTAARSATQRSNLPPASLVPETTDILRFLTVAPFYPAQCAAA

SEQ ID NO: 1018525 - protein, 110 aa, Homo sapiens
MNVLLGSVVILATFVTLCNASCYFIPNEGVPGDSTRKCMDLKGNKHPINSEWQTDNCETCTVLRNRNFMLHPVFLHLWVMTKTMPKNLQEGGLQVYRGGEEGPKKDLFCQ

SEQ ID NO: 1018526 - protein, 108 aa, Homo sapiens
MPVFCSPQVRTFPKRGQTCVVHYTGMLEDGKKFDSSRDRNKPFKFMLRQAGSVTPTAGEEGVAPELQVWGQTSQTDYISTIMPMVPLGTQASFPPHVALSSSMCGAFY

SEQ ID NO: 1018527 - protein, 95 aa, Homo sapiens
VEPPPGRCWSTPPVAPPARSASAAAMGVQVETISPGDGRTFPKRGQTCVVHYTGMLERWKGNLIPPGTETSPLSLCYGKQECDSDVLEKKGLPQN

SEQ ID NO: 1018528 - protein, 140 aa, Homo sapiens
  misc_feature (107)..(107): Xaa can be any naturally occurring amino acid
STAYAPQANSKQAILGEQRRGEDVKTSKNWVVGKNNHNSITRNTAKLGREDRGSCNHDKGDPWRWGKVIQQGRQSKGLTQKELGTKINEKPQVIADYESGRAIPKEXGAWHNPSGAFGLKLRGKGHLESPSRKGATGGNE

SEQ ID NO: 1018529 - protein, 108 aa, Homo sapiens
PGLFKELEGKKIRSQFMQGTVSQGRRQSCSPSSTAGLTQEALHLHVPHIAEGRAEDEREERAEPRASFSPTVPLLCVALDTRNHPRTVGLLEKIIAHEGSKSKACYIL

SEQ ID NO: 1018530 - protein, 121 aa, Homo sapiens
PTAKAAPHPDANTQEGLQNLLQGVGACGNRELPADSHLAPGSCFIEWAFVATRNRKPGKEDLRFRKRRPGLQATATGSGEHGAFPVNSQGVWASTHWQGTAVCPLQTPPPDAFIRNNKVLS

SEQ ID NO: 1018531 - protein, 195 aa, Homo sapiens
DERRQLTMVPYPIPGRLPYLHVTLIPSAHFSTGMDYAQCLQPAVGSGTVGVPLLLQSLERQRSSATCVVPAPRVGRDGESDEPGVVGSNSKRRRVVLGSSPAPSSPGFTRTPRLLDGTAMNARGLPSDLGNERKKGLRLALPPPNFARELRRLRAAGKLLPRAPPGSRRPRQPGEQSRAGPGSRMQPRAPELCGG

SEQ ID NO: 1018532 - protein, 503 aa, Homo sapiens
MGGKELWSWPWLHLTLCPGGPRRPVLGTCVHFVGNTSMSWNASVSTAISSTGAASAAIPVRPHCGQVATSSTQEMDISTASSTCPRQTTKRKAAIEALRVRYKTEGVYVYWGMGRGRGSRQTSALLGVTECRLLQHVSSVKAGMPVCLHFLFSQVSKTQPDTVCKWFEVNECQGSPLLRRGGLTPRPHSTLGRSLTRTTWWLFQELPTPSENSMPPGLSTPTASQEGAGPVPDPSQPTRRQIRLSSPERQRLSSLNLTPDPEMEPPPKPPRSCSALARHALESSFVGWGLPVQSPQALVAMEKEEKESPFSSEEEEEDVPLDSDVEQALQTFAKTSGTMNNYPTWRRTLLRRAKEEEMKRFCKAQTIQRRLNEIEAALRELEAEGVKLELALRRQSSSPEQQKKLWVGQLLQLVDKKNSLVAEEAELMITVQELNLEEKQWQLDQELRGYMNREENLKTAADRQAEDQVLRKLVDLVNQRDALIRFQEERRLSELALGTGAQG

SEQ ID NO: 1018533 - protein, 134 aa, Homo sapiens
MPPARVCPDCWPPSLVGEPHLFFSASCFLQEPRGPPDLSERSGFHRAPVPPSGAIVPLLPVEDALGVPFPTLPEWTLSVGALRGWLGQPAEKRHPLPPRAVHFGFIIHMAGSRRPDSSRSLYQPFPETQQIFHL

SEQ ID NO: 1018534 - protein, 73 aa, Homo sapiens
GTRNAEYTEQHQKKTLLRQAECFRGYGNLEARRTIGQKKPGYLNNLVEHRHLRGLDCQLTMGLSVREGNFPLV

SEQ ID NO: 1018535 - protein, 84 aa, Homo sapiens
FFRFLYLHVELLIAQRRGLGIRIRWLYAGGWSRGSAARLIAVVGSDGEIASRLESLSIVFHCRSYTPDMKTTSTLKRSFHLFSI

SEQ ID NO: 1018536 - protein, 56 aa, Homo sapiens [sequence omitted]

SEQ ID NO: 1018537 - protein, 112 aa, Homo sapiens
PRQTFFKSLKHNSSGGQSGNAVPKSISYRNALRKKLHSSSSVPNFLKFLAPVDENNTSDFMNTKRDFESKANHLGDSGGTPVKTRRHSWRQQIFLRVATPQKACDSSSSYEV

SEQ ID NO: 1018538 - protein, 133 aa, Homo sapiens
PRQTFFKSLKHNSSGGQSGNAVPKSISYRNALRKKLHSSSSVPNFLKFLAPVDENNTSDFMNTKRDFESKANHLGDSGGTPVKTRRHSWRQQIFLRVATPQKACDSSSSYEDYSELGELPPRSPLEPVCEDGP

SEQ ID NO: 1018539 - protein, 79 aa, Homo sapiens
NPGGTARVGHSSIVHGDPSPIKPDSSACLGPRFGPDTGSQQSTTGTIFPDLSVPFYMRTFIPLKLSSNTLTFVLILKIV

SEQ ID NO: 1018540 - protein, 71 aa, Homo sapiens
RPGVQEMGFNTRERDVFLDYEVRPQGKGCASALEVTSPEKTQKLWERLPQDKGTDESSWSHGKESYKLGPN

SEQ ID NO: 1018541 - protein, 115 aa, Homo sapiens
ELHTSCFFSGPMLLPRAVDFRGDDPGLPWAGLEELYPSMQSSLALPLLGRLREVKGVIQCHTALGSAVPGSLEGMCHDPFSLGSGGPSQALPGLRTQGTFPGVRLLMPLSHRERL

SEQ ID NO: 1018542 - protein, 115 aa, Homo sapiens
AAPYNLEAGQGDYAAPAAYDYFPAAPPPHRYPYLVTGITSPHPRVYKIQSRTVHRQLATSIVVEEACPLFQGLGAWRIATTFLGIFLAIILLPLGVFCCFALRKRRCPNCGATFA

SEQ ID NO: 1018543 - protein, 502 aa, Homo sapiens
GLIYFYSYIIDLLSGTGFLEETSLFYGHYTIDEVKFQNFTYDLPLAYLLSTIASLALSLLWIVKRSVEGFKINLIRSEEHFQSYCNKIFAGWDFCITNRSMADLKHSSLRYELRADLEEERMRQKIAERTSEETIRIYSLRLFLNCIVLAVLGACFYAIYVATVFSQEHMKKEIDKMVFGENLFILYLPSIVITLANFITPMIFAKIIRYEDYSPGFEIRLTILRCVFMRLATICVLVFTLGSKITSCDDDTCDLCGYNQKLYPCWETQVGQEMYKLMIFDFIIILAVTLFVDFPRKLLVTYCSSCKLIQCWGQQEFAIPDNVLGIVYGQTICWIGAFFSPLLPAIATLKFIIIFYVKEWSLLYTCRPSPRPFRASNSNFFFLLVLLIGLCLAIIPLTISISRIPSSKACGPFTNFNTTWEVIPKTVSTFPSSLQSFIHGVTSEAFAVPFFMIICLIMFYFIALAGAHKRVVIQLREQLSLESRDKCYLIQKLTEAQRDMRN

SEQ ID NO: 1018544 - protein, 179 aa, Homo sapiens [sequence omitted]

SEQ ID NO: 1018545 - protein, 217 aa, Homo sapiens
MSCAGAAAAPRLWRLRPGARRSLSAYGRRTSVRFRSSGMTLDNISRAAVDRIIRVDHAGEYGANRIYAGQMAVLGRTSVGPVIQKMWDQEKDHLKKFNELMVTFRVRPTVLMPLWNVLGFALGAGTALLGKEGAMACTVAVEESIAHHYNNQIRTLMEEDPEKYEELLQLIKKFRDEELEHHDIGLDHDAELAPAYAVLKSIIQAGCRVAIYLSERL

SEQ ID NO: 1018546 - protein, 217 aa, Homo sapiens; identical to SEQ ID NO: 1018545

SEQ ID NO: 1018547 - protein, 217 aa, Homo sapiens; identical to SEQ ID NO: 1018545

SEQ ID NO: 1018548 - protein, 217 aa, Homo sapiens; identical to SEQ ID NO: 1018545

SEQ ID NO: 1018549 - protein, 217 aa, Homo sapiens; identical to SEQ ID NO: 1018545

SEQ ID NO: 1018550 - protein, 217 aa, Homo sapiens; identical to SEQ ID NO: 1018545

SEQ ID NO: 1018551 - protein, 179 aa, Homo sapiens [sequence omitted]

SEQ ID NO: 1018552 - protein, 179 aa, Homo sapiens [sequence omitted]

SEQ ID NO: 1018553 - protein, 179 aa, Homo sapiens [sequence omitted]

SEQ ID NO: 1018554 - protein, 179 aa, Homo sapiens [sequence omitted]

SEQ ID NO: 1018555 - protein, 179 aa, Homo sapiens [sequence omitted]

SEQ ID NO: 1018556 - protein, 615 aa, Homo sapiens
GLIYFYSYIIDLLSGTGFLEETSLFYGHYTIDEVKFQNFTYDLPLAYLLSTIASLALSLLWIVKRSVEGFKINLIRSEEHFQSYCNKIFAGWDFCITNRSMADLKHSSLRYELRADLEEERMRQKIAERTSEETIRIYSLRLFLNCIVLAVLGACFYAIYVATVFSQEHMKKEIDKMVFGENLFILYLPSIVITLANFITPMIFAKIIRYEDYSPGFEIRLTILRCVFMRLATICVLVFTLGSKITSCDDDTCDLCGYNQKLYPVSCGAVAFGCMGPSGIQCMVKRTVVEAMGLNCICFVSCSSDETESGPMESNPRHFMRALKLKVCAEAQSLNQLMPSLEPQDLELERELKVSREPGFLCLSWGLSVSLTLFDFQCWETQVGQEMYKLMIFDFIIILAVTLFVDFPRKLLVTYCSSCKLIQCWGQQEFAIPDNVLGIVYGQTICWIGAFFSPLLPAIATLKFIIIFYVKEWSLLYTCRPSPRPFRASNSNFFFLLVLLIGLCLAIIPLTISISRIPSSKACGPFTNFNTTWEVIPKTVSTFPSSLQSFIHGVTSEAFAVPFFMIICLIMFYFIALAGAHKRVVIQLREQLSLESRDKCYLIQKLTEAQRDMRN

SEQ ID NO: 1018557 - protein, 615 aa, Homo sapiens; identical to SEQ ID NO: 1018556

SEQ ID NO: 1018558 - protein, 615 aa, Homo sapiens; identical to SEQ ID NO: 1018556

SEQ ID NO: 1018559 - protein, 101 aa, Homo sapiens
HGGESVVEEADSNCLNTLGTTCKITTVVNECFSEGINTNMRFLRVFHQFVFGSGGGINQERKEEGKFQAEEITCAKALLSMKEARAAPANLGVQRVTMSMV

SEQ ID NO: 1018560 - protein, 136 aa, Homo sapiens
FFERVSLSVDRLEHSSTTSGHCNLHLLGSRDSPASAFQAAGTTGACTTPSQPLHLQQRQGFTIAGQAGLGLFDPVIHPPWPPKVLGLQARRLCPAPAQVFQYSLDLGIQYPHSMVLINFLALFPFSCSLSLQLVFL

SEQ ID NO: 1018561 - protein, 325 aa, Homo sapiens
MELPPEPQANGEAVGAGGGPIYYIYEEEEEEEEEEEEPPPEPPKLVNDKPHKFKDHFFKKPKFCDVCARMIVLNNKFGLRCKNCKTNIHEHCQSYVEMQRCFGKIPPGFHRAYSSPLYSNQQYACVKDLSAANRNDPVFETLRTGVIMANKERKKGQADKKNPVAAMMEEEPESARPEEGKPQDGNPEGDKKAEKKTPDDKHKQPGFQQSHYFVALYRFKALEKDDLDFPPGEKITVIDDSNEEWWRGKIGEKVGFFPPNFIIRVRAGERVHRVTRSFVGNREIGQITLKKDQIVVQKGDEAGGYVKVYTGRKVGLFPTDFLEEI

SEQ ID NO: 1018562 - protein, 364 aa, Homo sapiens
MTEKEVLESPKPSFPAETRQSGLQRLKQLLRKGSTGTKEMELPPEPQANGEAVGAGGGPIYYIYEEEEEEEEEEEEPPPEPPKLVNDKPHKFKDHFFKKPKFCDVCARMIVLNNKFGLRCKNCKTNIHEHCQSYVEMQRCFGKIPPGFHRAYSSPLYSNQQYACVKDLSAANRNDPVFETLRTGVIMANKERKKGQADKKNPVAAMMEEEPESARPEEGKPQDGNPEGDKKAEKKTPDDKHKQPGFQQSHYFVALYRFKALEKDDLDFPPGEKITVIDDSNEEWWRGKIGEKVGFFPPNFIIRVRAGERVHRVTRSFVGNREIGQITLKKDQIVVQKGDEAGGYVKVYTGRKVGLFPTDFLEEI

SEQ ID NO: 1018563 - protein, 320 aa, Homo sapiens
MTEKEVLESPKPSFPAETRQSGLQRLKQLLRKGSTGTKEMELPPEPQANGEAVGAGGGPIYYIYEEEEEEEEEEEEPPPEPPKLVNDKPHKFKDHFFKKPKFCDVCARMIVLNNKFGLRCKNCKTNIHEHCQSYVEMQRCFGKIPPGFHRAYSSPLYSNQQYACVKDLSAANRNDPVFETLRTGVIMANKERKKGQADKKNPVAAMMEEEPESARPEEGKPQDGNPEGDKKAEKKTPDDKHKQPGFQQSHYFVALYRFKALEKDDLDFPPGEKITVIDDSNEEWWRGKIGEKVGYLLPRAARTRNLSGPACKSWKKTRIY

SEQ ID NO: 1018564 - protein, 364 aa, Homo sapiens; identical to SEQ ID NO: 1018562

SEQ ID NO: 1018565 - protein, 178 aa, Homo sapiens
MANKERKKGQADKKNPVAAMMEEEPESARPEEGKPQDGNPEGDKKAEKKTPDDKHKQPGFQQSHYFVALYRFKALEKDDLDFPPGEKITVIDDSNEEWWRGKIGEKVGFFPPNFIIRVRAGERVHRVTRSFVGNREIGQITLKKDQIVVQKGDEAGGYVKVYTGRKVGLFPTDFLEEI

SEQ ID NO: 1018566 - protein, 364 aa, Homo sapiens; identical to SEQ ID NO: 1018562

SEQ ID NO: 1018567 - protein, 398 aa, Homo sapiens
MIPEPKRHTTVITHFTYSMHVLRHEYTAIPTQGTMTEKEVLESPKPSFPAETRQSGLQRLKQLLRKGSTGTKEMELPPEPQANGEAVGAGGGPIYYIYEEEEEEEEEEEEPPPEPPKLVNDKPHKFKDHFFKKPKFCDVCARMIVLNNKFGLRCKNCKTNIHEHCQSYVEMQRCFGKIPPGFHRAYSSPLYSNQQYACVKDLSAANRNDPVFETLRTGVIMANKERKKGQADKKNPVAAMMEEEPESARPEEGKPQDGNPEGDKKAEKKTPDDKHKQPGFQQSHYFVALYRFKALEKDDLDFPPGEKITVIDDSNEEWWRGKIGEKVGFFPPNFIIRVRAGERVHRVTRSFVGNREIGQITLKKDQIVVQKGDEAGGYVKVYTGRKVGLFPTDFLEEI

SEQ ID NO: 1018568 - protein, 178 aa, Homo sapiens
MTEKEVLESPKPSFPAETRQSGLQRLKQLLRKGSTGTKEMELPPEPQANGEAVGAGGGPIYYIYEEEEEEEEEEEEPPPEPPKLVNDKPHKFKDHFFKKPKFCDVCARMIVLNNKFGLRCKNCKTNIHEHCQSYVEMQRCFGKIPSPAWGLGYLLPRAARTRNLSGPACKSWKKTRIY

SEQ ID NO: 1018569 - protein, 102 aa, Homo sapiens
MTEKEVLESPKPSFPAETRQSGLQRLKQLLRKGSTGTKEMELPPEPQANGEAVGAGGGPIYYIYEEEEEEEEEEEEPPPEPPKLVNDKPRPACKSWKKTRIY

SEQ ID NO: 1018570 - protein, 123 aa, Homo sapiens
TLGFFFSFSFKTHLDKEKTSLGSDFTLLVLVLGSYCVCVFLNGDERRRGTKPAGSIHHRGWLLTFSVFSRYSFFKQPLFTMNKLYIGNLSENAAPSDLESIFKDAKIPVSGPFLVKTGYAYVD

SEQ ID NO: 1018571 - protein, 111 aa, Homo sapiens
VCGFETELNVQFVSHMSLHVDKEQWMFSICCTACDFVTMEEAEIKTHIGTSTAGEDRKTPSESNTLSSSSLSALSDSANSKDDSDGSQKNKGGNNLLVISVMPGSQPSLEQ

SEQ ID NO: 1018572 - protein, 67 aa, Homo sapiens
DTSWRSEATFQFTVERFSRLSESVLSPPCFVRNLPWKIMVMPRFYPDRPHQKSVGFFLQCNAESDST

SEQ ID NO: 1018573 - protein, 72 aa, Homo sapiens
LRHPCEWTAYPPILGVLRDGVLLCCPGWFQTPGVKQSSRIGLQKRWDYRHETLLLDCAILKTGANNPLKCEF

SEQ ID NO: 1018574 - protein, 51 aa, Homo sapiens
MSQEGSSTQACRAQQGLAPVGRVGPGLPRRWTSPASSRCPSSCRLDLGPAF

SEQ ID NO: 1018575 - protein, 143 aa, Homo sapiens
VGLLVGMVTRAHHRPAGGMREAHGLRLALEHREDIGMRIAQHRQVVAGGRQVLSDGEHADVVGAQVAHDGKDFLVGLADADHQACLGRDGRVARLEGLEQGQRMRVVGAGARLPVEPQHGFQVVVEDVRRRGGEDVHGDVQAA

SEQ ID NO: 1018576 - protein, 80 aa, Homo sapiens
RALLGRKLPRWNPSPEKQVAGPRRGLTQWLNTRKELALGVQDILKFGIVPWIHHSQLKLSAQDQWTNQQDIDHLTRMILQ

SEQ ID NO: 1018577 - protein, 97 aa, Homo sapiens
RALLGRKLPRWNPSPEKQVAGPRRGLTQWLNTRKELALGVQDILKFGLLIRNIQSITESIVNRTTSTPLMALNKYQPVPNREELTCNEELNDSDAFY

SEQ ID NO: 1018578 - protein, 80 aa, Homo sapiens; identical to SEQ ID NO: 1018576

SEQ ID NO: 1018579 - protein, 1311 aa, Homo sapiens
MSRRKQAKPRSLKDPNCKLEDKTEDGEALDCKKRPEDGEELEDEAVHSCDSCFQVFESLSDITEHKINQCQLTDGVDVEDDPTCSWPASSPSSKDQTSPSHGEGCDFGEEEGGPGLPYPCQFCDKSFSRLSYLKHHEQSHSDKLPFKCTYCSKLFKHKRSRDRHIKLHTGDKKYHCSECDAAFSRSDHLKIHLKTHTSNKPYKCAICRRGFLSSSSLHGHMQVHERNKDGSQSGSRMEDWKMKDTQKCSQCEEGFDFPEDLQKHIAECHPECSPNEDRAALQCVYCHELFVEETSLMNHMEQVHSGEKKNSCSICSESFHTVEELYSHMDSHQQPESCNHSNSPSLVTVGYTSVSSTTPDSNLSVDSSTMVEAAPPIPKSRGRKRAAQQTPDMTGPSSKQAKVTYSCIYCNKQLFSSLAVLQIHLKTMHLDKPEQAHICQYCLEVLPSLYNLNEHLKQVHEAQDPGLIVSAMPAIVYQCNFCSEVVNDLNTLQEHIRCSHGFANPAAKDSNAFFCPHCYMGFLTDSSLEEHIRQVHCDLSGSRFGSPVLGTPKEPVVEVYSCSYCTNSPIFNSVLKLNKHIKENHKNIPLALNYIHNGKKSRALSPLSPVAIEQTSLKMMQAVGGAPARPTGEYICNQCGAKYTSLDSFQTHLKTHLDTVLPKLTCPQCNKEFPNQESLLKHVTIHFMITSTYYICESCDKQFTSVDDLQKHLLDMHTFVFFRCTLCQEVFDSKVSIQLHLAVKHSNEKKVYRCTSCNWDFRNETDLQLHVKHNHLENQGKVHKCIFCGESFGTEVELQCHITTHSKKYNCKFCSKAFHAIILLEKHLREKHCVFETKTPNCGTNGASEQVQKEEVELQTLLTNSQESHNSHDGSEEDVDTSEPMYGCDICGAAYTMETLLQNHQLRDHNIRPGESAIVKKKAELIKGNYKCNVCSRTFFSENGLREHMQTHLGPVKHYMCPICGERFPSLLTLTEHKVTHSKSLDTGNCRICKMPLQSEEEFLEHCQMHPDLRNSLTGFRCVVCMQTVTSTLELKIHGTFHMQKTGNGSAVQTTGRGQHVQKLYKCASCLKEFRSKQDLVKLDINGLPYGLCAGCVNLSKSASPGINVPPGTNRPGLGQNENLSAIEGKGKVGGLKTRCSSCNVKFESESELQNHIQTIHRELVPDSNSTQLKTPQVSPMPRISPSQSDEKKTYQCIKCQMVFYNEWDIQVHVANHMIDEGLNHECKLCSQTFDSPAKLQCHLIEHSFEGMGGTFKCPVCFTVFVQANKLQQHIFSAHGQEDKIYDCTQCPQKFFFQTELQNHTMTQHSS

SEQ ID NO: 1018580 - protein, 1347 aa, Homo sapiens
RYFLSDYVQSESLRVRGPLWSHPDGFGGLASIFHYYVDYRSDSAVQDLADPNCKLEDKTEDGEALDCKKRPEDGEELEDEAVHSCDSCFQVFESLSDITEHKINQCQLTDGVDVEDDPTCSWPASSPSSKDQTSPSHGEGCDFGEEEGGPGLPYPCQFCDKSFSRLSYLKHHEQSHSDKLPFKCTYCSKLFKHKRSRDRHIKLHTGDKKYHCSECDAAFSRSDHLKIHLKTHTSNKPYKCAICRRGFLSSSSLHGHMQVHERNKDGSQSGSRMEDWKMKDTQKCSQCEEGFDFPEDLQKHIAECHPECSPNEDRAALQCVYCHELFVEETSLMNHMEQVHSGEKKNSCSICSESFHTVEELYSHMDSHQQPESCNHSNSPSLVTVGYTSVSSTTPDSNLSVDSSTMVEAAPPIPKSRGRKRAAQQTPDMTGPSSKQAKVTYSCIYCNKQLFSSLAVLQIHLKTMHLDKPEQAHICQYCLEVLPSLYNLNEHLKQVHEAQDPGLIVSAMPAIVYQCNFCSEVVNDLNTLQEHIRCSHGFANPAAKDSNAFFCPHCYMGFLTDSSLEEHIRQVHCDLSGSRFGSPVLGTPKEPVVEVYSCSYCTNSPIFNSVLKLNKHIKENHKNIPLALNYIHNGKKSRALSPLSPVAIEQTSLKMMQAVGGAPARPTGEYICNQCGAKYTSLDSFQTHLKTHLDTVLPKLTCPQCNKEFPNQESLLKHVTIHFMITSTYYICESCDKQFTSVDDLQKHLLDMHTFVFFRCTLCQEVFDSKVSIQLHLAVKHSNEKKVYRCTSCNWDFRNETDLQLHVKHNHLENQGKVHKCIFCGESFGTEVELQCHITTHSKKYNCKFCSKAFHAIILLEKHLREKHCVFETKTPNCGTNGASEQVQKEEVELQTLLTNSQESHNSHDGSEEDVDTSEPMYGCDICGAAYTMETLLQNHQLRDHNIRPGESAIVKKKAELIKGNYKCNVCSRTFFSENGLREHMQTHLGPVKHYMCPICGERFPSLLTLTEHKVTHSKSLDTGNCRICKMPLQSEEEFLEHCQMHPDLRNSLTGFRCVVCMQTVTSTLELKIHGTFHMQKTGNGSAVQTTGRGQHVQKLYKCASCLKEFRSKQDLVKLDINGLPYGLCAGCVNLSKSASPGINVPPGTNRPGLGQNENLSAIEGKGKVGGLKTRCSSCNVKFESESELQNHIQTIHRELVPDSNSTQLKTPQVSPMPRISPSQSDEKKTYQCIKCQMVFYNEWDIQVHVANHMIDEGLNHECKLCSQTFDSPAKLQCHLIEHSFEGMGGTFKCPVCFTVFVQANKLQQHIFSAHGQEDKIYDCTQCPQKFFFQTELQNHTMTQHSS

SEQ ID NO: 1018581 - protein, 1347 aa, Homo sapiens; identical to SEQ ID NO: 1018580

SEQ ID NO: 1018582 - protein, 227 aa, Homo sapiens
  misc_feature (10)..(10): Xaa can be any naturally occurring amino acid
  misc_feature (36)..(36): Xaa can be any naturally occurring amino acid
  misc_feature (38)..(41): Xaa can be any naturally occurring amino acid
  misc_feature (47)..(47): Xaa can be any naturally occurring amino acid
  misc_feature (49)..(49): Xaa can be any naturally occurring amino acid
  misc_feature (73)..(75): Xaa can be any naturally occurring amino acid
  misc_feature (77)..(77): Xaa can be any naturally occurring amino acid
  misc_feature (81)..(81): Xaa can be any naturally occurring amino acid
  misc_feature (85)..(85): Xaa can be any naturally occurring amino acid
  misc_feature (87)..(87): Xaa can be any naturally occurring amino acid
  misc_feature (95)..(95): Xaa can be any naturally occurring amino acid
  misc_feature (101)..(101): Xaa can be any naturally occurring amino acid
  misc_feature (106)..(106): Xaa can be any naturally occurring amino acid
  misc_feature (171)..(171): Xaa can be any naturally occurring amino acid
  misc_feature (173)..(173): Xaa can be any naturally occurring amino acid
  misc_feature (176)..(178): Xaa can be any naturally occurring amino acid
CCPCCVRAHXDSSAGLSPLRVLCAEGLRICQRKWRXAXXXXPPPPPXQXLRFWAAWPCQSPPVGQEPSEHSGXXXLXARRXGPPXRXPGSSAQPXAPVSAXEGGVXCYSLPHPPPPPRGHLAPPSGTSPDGESLARVSDSVSPDICPGEPLGLREALAQLTGSEVWASGVXRXQQXXXVSPCPGMKDTARELPCTPMVSCITAQRGSLVATAVCSVSALGKLEVLGG

SEQ ID NO: 1018583 - protein, 309 aa, Homo sapiens
  misc_feature (16)..(16): Xaa can be any naturally occurring amino acid
  misc_feature (40)..(40): Xaa can be any naturally occurring amino acid
LSLMYLAIKSFLPYIXPSSDKMIFPPPTWWIDSQGLLKAXLDVGAPDPFCIIVNWLICRVTHPFHVFGRALTAAPAAGLNFGGGIFQAEAWSLFKKITEREGKFSRESLLLGLVVTATQSFLDTMFLLTPENFPLECAMKRRRQRQQQSSAQGATAAPGESEANFGAASPALCSVPGSLPGSRSLGPATPPLPSTAPAPGPAGALGCCPRSGQRWRGGGASLHGLCLDAAAPGPGPAARNGPQGGSESAKCLVGARGGAAGPRRRQQRLGSAQAARRGASDAKNVRNEDRNEMNARTDSLRRGGASRPA

SEQ ID NO: 1018584 - protein, 185 aa, Homo sapiens
MFLLTPENFPLECAMKRRRQRQQQSSAQGATAAPGESEANFGAASPALCSVPGSLPGSRSLGPATPPLPSTAPAPGPAGALGCCPRSGQRWRGGGASLHGLCLDAAAPGPGPAARNGPQGGSESAKCLVGARGGAAGPRRRQQRLGSAQAARRGASDAKNVRNEDRNEMNARTDSLRRGGASRPA

SEQ ID NO: 1018585 - protein, 258 aa, Homo sapiens
  misc_feature (16)..(16): Xaa can be any naturally occurring amino acid
  misc_feature (40)..(40): Xaa can be any naturally occurring amino acid
LSLMYLAIKSFLPYIXPSSDKMIFPPPTWWIDSQGLLKAXLDVGAPDPFCIIVNWLICRVTHPFHVFGRALTAAPAAGLNFGGGIFQAEAWSLFKKITSAQGATAAPGESEANFGAASPALCSVPGSLPGSRSLGPATPPLPSTAPAPGPAGALGCCPRSGQRWRGGGASLHGLCLDAAAPGPGPAARNGPQGGSESAKCLVGARGGAAGPRRRQQRLGSAQAARRGASDAKNVRNEDRNEMNARTDSLRRGGASRPA

SEQ ID NO: 1018586 - protein, 110 aa, Homo sapiens
THIHTHTHTHLRPPEDTSIPRAQQYTLGFQSSQWTCQRQHFPASETKLQRGAFWRSCWDRTSHCGRWEPSLRTAGDLGRNLLPILFSTPSCVTLSLESIVTLPGYISGLT

SEQ ID NO: 1018587 - protein, 118 aa, Homo sapiens
RVAWVPEGLLGTGSAELSAQQLLVGGGPRPRPQLLGVLRLLPAIRPLPRAEDARKSVMIWARKMPHALGPVSLPIPFVHCCLLQLLYIWSCSRQLILMLRSSSSSRSPSTFHYSQLLS

SEQ ID NO: 1018588 - protein, 166 aa, Homo sapiens
LSRKFNRETRSSTEVERGLGSSLSWSCVVMMFQSWAKALFLVSRFDAISQSRIANQPSKRNCVCMLYLFATSNIPLSGAGCSRWVVTLLCTQESCIINQFHNWKIAFGPECGTGVREMNWVAFVAGGVDEAWPVCTDGVGVLGSVVCCARSSYCLLDHSPFVNREL

SEQ ID NO: 1018589 - protein, 419 aa, Homo sapiens
  misc_feature (319)..(319): Xaa can be any naturally occurring amino acid
MDFLTEDSAFQPYQDDIDSLNPVLRDNPQLHEEVKVWVKEQKVQEIFMQGPYSLNGYRVRVYRQDSATQWFTGIITHHDLFTRTMIVMNDQVLEPQNVDPSMVQMTFLDDVVHSLLKGENIGITSRRRSRANQNVNAVHSHYTRAQANSPRPAMNSQAAVPKQNTHQQQQQRSIRPNKRKGSDSSIPDEEKMKEEKYDYISRGENPKGKNKHLMNKRRKPEEDEKKLNMKRLRTDNVSDFSESSDSENSNKRIIDNSSEQKPENELKNKNTSKINGEEGKPHNNEKAGEETLKNSQPPWDQIQEDKKHEEAEKRKSVDXQLQEDMIIHSSEQSTVSDHNSNDLLPQECNMDKTHTMELLPKEKFVSRPPTPKCVIDITNDTNLEKVAQENSSTFGLQTLQKMDPNVSDSKHSIANAKFL

SEQ ID NO: 1018590 - protein, 253 aa, Homo sapiens
SGPRAAATLAGAAVKLDPQAGVRGAGAAAAPQRCDSGPEGQLESSVLRGRGGRMFVASERKMRAHQVLTFLLLFVITSVASDRTASIIPEACECLDLLSLTYRVLLLLTMDAYSRGIGGGERVSQEAGALITLVLMLILLGAVALHQGDRRNEEPCGPPLSVPPGDLGALWGLDVLLSSIQEDENHLRLSDRFLWGRSLLRSGFSWLVEPGMARAGGLGAALARGPRAGSWVGLGLCLMLVTRHHRCAVGGGH

SEQ ID NO: 1018591 - protein, 104 aa, Homo sapiens
MSDNDDIEVETDEEHPRFQSAADKRAHHNALERKRRDHIKDSFHSLRDSGSHHFKERRHPGPKSLAKPQDFSSICRGKNPPPQQDFDDLKRQNALLEQQGESES

SEQ ID NO: 1018592 - protein, 106 aa, Homo sapiens
RVLFNFRTMCRMPGIILRQIAIKDVGENALIRWKQPAFQCPGVGMRSKTFGGRSGRTAADTVRVDDAHIRVKPLLSITFKCPQTIEKRLPFAISSLWRACICACDQ

SEQ ID NO: 1018593 - protein, 113 aa, Homo sapiens
SGVTQGRRTQAGWGLSALLGGIRGESFPWNPSPNRLSPALSGEERSAASGGSAFPKQFIFGRFSLKEKATNRLPAPAPHTRRRREKPRPGFLCLCASLAGCWRRGEGGGDGSA

SEQ ID NO: 1018594 - protein, 178 aa, Homo sapiens
SCRELKPNSVRDVRLLDRMIEHRVQRRRDVGRRVGRVEEAVRGAVLQTGRNVGDVPVGVIILVIGKRGIDRIDRLVRDVEHGDDDAAVLQRRAGRRRIDRGSMVAAGTMIRSHALDLRILRAIGDEEDVRQRVVPARCRADARYQRIHARQRRVDICAARAEIGVDVGVEQGREVRGR

SEQ ID NO: 1018595 - protein, 144 aa, Homo sapiens
GPRQGANTDVVTWSRRTREDARAETGSRALGRSKARTRHPRPRRACENGAEPARRMRGRRPAHHRVLNTRSSRGRAASGSPWNGSSDPCSLIRYQPSTSVDSSSRLPPSARRVAAGGARPPCFVSGGIYFSEGRSGLPFVPLSF

SEQ ID NO: 1018596 - protein, 104 aa, Homo sapiens
FLKSWEHKGFKKSCDNVVAGWAYKPTLLGQGVRATTIIVLKGWSTKQQEAERGSPQRGQGQAVRPSGSLGELAAHWEHGGFPERLSSHHTYPSSPLLSDTLFPA

SEQ ID NO: 1018597 - protein, 174 aa, Homo sapiens
HSSPHSSMNSGVGRGPQSGSCVSAGSPVRIHHKGYPPRGTTASFKLFLLKHSSRGKKSRVESLPGRTLGLGVSARQGHRDYSPGVPEPALPCSPEIPAIVKRICFLRWSLALAQAGVQWCNLCLPGSGGSPASASQVAGAAGMRHHTRLILVFLVEMGFHHVYLPGCSRAPGLK

SEQ ID NO: 1018598 - protein, 179 aa, Homo sapiens
HSSPHSSMNSGVGRGPQSGSCVSAGSPVRIHHKGYPPRGTTASFKLFLLKHSSRGKKSRVESLPGRTLGLGVSARQGHRDYSPGVPEPALPCSPEIPAIVKRICFLRWSLALAQAGVQWCNLCLPGSGGSPASASQVAGAAGMRHHTRLILVFLVEMGFHHVYLDNMVKALSLRMMQKN

SEQ ID NO: 1018599 - protein, 74 aa, Homo sapiens
MARADGARQGETTDLREFPAHYRRLCQQLALTQERGYSSHLVDALQQLALRGHQQLYRHRSHLGASVLGFVFVD

SEQ ID NO: 1018600 - protein, 180 aa, Homo sapiens
  misc_feature (54)..(54): Xaa can be any naturally occurring amino acid
  misc_feature (56)..(56): Xaa can be any naturally occurring amino acid
  misc_feature (96)..(96): Xaa can be any naturally occurring amino acid
  misc_feature (98)..(98): Xaa can be any naturally occurring amino acid
  misc_feature (100)..(100): Xaa can be any naturally occurring amino acid
  misc_feature (110)..(110): Xaa can be any naturally occurring amino acid
ARAVTLARRDDDPSLRQRVALLQFGGPGEQQVAFPLSHNLTAIHEALETTQYLXSXSNVGEGVVHAINAIVRSRVAGPEGTEGLSFVYLTDGVNGXQXSXRVGNSMRKQXVVPTGLALGSDVDMDVLTTLSLGDRAAVFHEKDYDSLAQPGFFDRFIRWVCSAAARAPQSRVVSPPRPWC

SEQ ID NO: 1018601 - protein, 177 aa, Homo sapiens
  misc_feature (56)..(56): Xaa can be any naturally occurring amino acid
IPIPENEAWNEFSLDDLLPTSCSTGQQAPSSPPSILQGEPGTGLMTQKHERMKVYXANGFSAFPFEVLHTPEKWVRFKYPKLISYSYMARGGHFAAFEELELLAQDIRKVPGGGGSGKDPPFSPRLPPPPTSALQAFFGEDTPFLRNEFASVPGPCWEPTLTPSPLQAHSPTPNSVW

SEQ ID NO: 1018602 - protein, 133 aa, Homo sapiens
RLFVCASWARRGFFDARRRLMKRLCPSSCDFWYEFPFPTVATTPPPPRTKTRVVAEGRNVTFPCGQKILPKKGKVDWDKDQEPLEFSYPGYLALGEGPLSIIANPVNEGPYPWVVGPQQGVLAPYSWGGRVRG

SEQ ID NO: 1018603 - protein, 1487 aa, Homo sapiens
MIRLGAPQSLVLLTLLVAAVLRCQGQDVQEAGSCVQDGQRYNDKDVWKPEPCRICVCDTGTVLCDDIICEDVKDCLSPEIPFGECCPICPTDLATASGQPGPKGQKGEPGDIKDIVGPKGPPGPQGPAGEQGPRGDRGDKGEKGAPGPRGRDGEPGTPGNPGPPGPPGPPGPPGLGGNFAAQMAGGFDEKAGGAQLGVMQGPMGPMGPRGPPGPAGAPGPQGFQGNPGEPGEPGVSGPMGPRGPPGPPGKPGDDGEAGKPGKAGERGPPGPQGARGFPGTPGLPGVKGHRGYPGLDGAKGEAGAPGVKGESGSPGENGSPGPMGPRGLPGERGRTGPAGAAGARGNDGQPGPAGPPGPVGPAGGPGFPGAPGAKGEAGPTGARGPEGAQGPRGEPGTPGSPGPAGASGNPGTDGIPGAKGSAGAPGIAGAPGFPGPRGPPGPQGATGPLGPKGQTGEPGIAGFKGEQGPKGEPGPAGPQGAPGPAGEEGKRGARGEPGGVGPIGPPGERGAPGNRGFPGQDGLAGPKGAPGERGPSGLAGPKGANGDPGRPGEPGLPGARGLTGRPGDAGPQGKVGPSGAPGEDGRPGPPGPQGARGQPGVMGFPGPKGANGEPGKAGEKGLPGAPGLRGLPGKDGETGAAGPPGPAGPAGERGEQGAPGPSGFQGLPGPPGPPGEGGKPGDQGVPGEAGAPGLVGPRGERGFPGERGSPGAQGLQGPRGLPGTPGTDGPKGASGPAGPPGAQGPPGLQGMPGERGAAGIAGPKGDRGDVGEKGPEGAPGKDGGRGLTGPIGPPGPAGANGEKGEVGPPGPAGSAGARGAPGERGETGPPGPAGFAGPPGADGQPGAKGEQGEAGQKGDAGAPGPQGPSGAPGPQGPTGVTGPKGARGAQGPPGATGFPGAAGRVGPPGSNGNPGPPGPPGPSGKDGPKGARGDSGPPGRAGEPGLQGPAGPPGEKGEPGDDGPSGAEGPPGPQGLAGQRGIVGLPGQRGERGFPGLPGPSGEPGKQGAPGASGDRGPPGPVGPPGLTGPAGEPGREGSPGADGPPGRDGAAGVKGDRGETGAVGAPGAPGPPGSPGPAGPTGKQGDRGEAGAQGPMGPSGPAGARGIQGPQGPRGDKGEAGEPGERGLKGHRGFTGLQGLPGPPGPSGDQGASGPAGPSGPRGPPGPVGPSGKDGANGIPGPIGPPGPRGRSGETGPAGPPGNPGPPGPPGPPGPGIDMSAFAGLGPREKGPDPLQYMRADQAAGGLRQHDAEVDATLKSLNNQIESIRSPEGSRKNPARTCRDLKLCHPEWKSGDYWIDPNQGCTLDAMKVFCNMETGETCVYPNPANVPKKNWWSSKSKEKKHIWFGETINGGFHFSYGDDNLAPNTANVQMTFLRLLSTEGSQNITYHCKNSIAYLDEAAGNLKKALLIQGSNDVEIRAEGNSRFTYTALKDGCTKHTGKWGKTVIEYRSQKTSRLPIIDIAPMDIGGPEQEFGVDIGPVCFL

SEQ ID NO: 1018604 - protein, 117 aa, Homo sapiens
MAENTDKKEAKEQTRQQKNNTKARRKSKRRKTTTQRRQRDERSEQERESTTRTNATRTRTPTRARHHAQIASAERMDGEERKKQQHEREGARRSDERNDTKKRERERERCKDNRTTK

SEQ ID NO: 1018605 - protein, 951 aa, Homo sapiens
GAWPRAPLPQAPPRTSPGLLLLCQLRQLASTWRGPAPLPAPSDRPRPAALSDHRLSDDQVPGELSESPPPPSFSPGCSCSASHAPPVHPGPPPRGHSADRPAPSPDSGKLRLLQLQAPANPEEPHGEGSRAPPAPGRPAAAGRSLILPPPPPSLFSSSPEVEFERRHGGGAALLPLLCLPMDMHCKADPFSAMHRHGGVNQLGGVFVNGRPLPDVVRQRIVELAHQGVRPCDISRQLRVSHGCVSKILGRYYETGSIKPGVIGGSKPKVATPKVVDKIAEYKRQNPTMFAWEIRDRLLAEGICDNDTVPSVSSINRIIRTKVQQPFHPTPDGAGTGVTAPGHTIVPSTASPPVSSASNDPVGSYSINGILGIPRSNGEKRKRDEDVSEGSVPNGDSQSGVDSLRKHLRADTFTQQQLEALDRVFERPSYPDVFQASEHIKSEQGNEYSLPALTPGLDEVKSSLSASTNPELGSNVSGTQTYPVVTGRDMASTTLPGYPPHVPPTGQGSYPTSTLAGMVPGSEFSGNPYSHPQYTAYNEAWRFSNPALLSEAAVGPSSSLMSKPGRKLAEVPPCVQPTSPYYYSAAPRSAPAARAAAYDRHYYRGDHIKLQADSFGLHIVPSDPTPEEGGPTRRMPPGHRPSLTPSHDPRNPSHHPPRRSDRTGGAAGRDPQARAHRPQPRLPPLPACLDCAAPEGDSAQLVPASTKPAPKPASHPAVLGRDLLVRAGCFCDTQSARTAARPSPGHPPRTLGRQELRWRGWAKEIKKKTTFCRRKSPLPNPWEKFFSPSASRTALAFRVCPVPEDGMGVWGSGSRNGLWGRQVFPRLGPKDRGAQQPAPIEPDSRLFTAPPGLPSSPGPGTSCCETRLSALPCPYLSVSSTCWPPSFPSCQSFACPLTPCILLPDSQPHRTLSRDRRRTSFHRLRTGVFLQQLLDAPSPDTDSQSAGGKNRF

SEQ ID NO: 1018606 - protein, 275 aa, Homo sapiens
GAWPRAPLPQAPPRTSPGLLLLCQLRQLASTWRGPAPLPAPSDRPRPAALSDHRLSDDQVPGELSESPPPPSFSPGCSCSASHAPPVHPGPPPRGHSADRPAPSPDSGKLRLLQLQAPANPEEPHGEGSRAPPAPGRPAAAGRSLILPPPPPSLFSSSPEVEFERRHGGGAALLPLLCLPMDMHCKADPFSAMHRCQDTMVIFPCLCLGDAAKNKEGLREEIEVRERASSAAFQVGPRQSAALLSALEAPCLDCRLPIEDHAASNLARGSAKSKK

SEQ ID NO: 1018607 - protein, 151 aa, Homo sapiens
MTSVTTERCGPIPPWTSPSMLTSTSPACRFGRAPLRYQLTPVVTTAPEAQPMSGPPNVPTLPATPPEAAAIPLATLPRIVLIASACCRVRGLEMQTVSRHGRFRACIRSYISTTMLLTWYMGAFRFAKVQLGQATSVAFHEGELRQIEDNP

SEQ ID NO: 1018608 - protein, 585 aa, Homo sapiens
MSQQHTLPVTLSPALSQELLKTVPPPVNTHQEQMKQPTPLPPPCQKVPVELPVEVPSKQEEKHMTAVKGLPEQECEQQQKEPQEQELQQQHWEQHEEYQKAENPEQQLKQEKTQRDQQLNKQLEEEKKLLDQQLDQELVKRDEQLGMKKEQLLELPEQQEGHLKHLEQQEGQLKHPEQQEGQLELPEQQEGQLELPEQQEGQLELPEQQEGQLEVPEQQEGQLELPQQQEGQLELSEQQEGQLELSEQQEGQLELSEQQEGQLKHLEHQEGQLEVPEEQMGQLKYLEQQEGQLKHLDQQEKQPELPEQQMGQLKHLEQQEGQPKHLEQQEGQLEQLEEQEGQLKHLEQQEGQLEHLEHQEGQLGLPEQQVLQLKQLEKQQGQPKHLEEEEGQLKHLVQQEGQLKHLVQQEGQLEQQERQVEHLEQQVGQLKHLEEQEGQLKHLEQQQGQLEVPEQQVGQPKNLEQEEKQLELPEQQEGQVKHLEKQEAQLELPEQQVGQPKHLEQQEKHLEHPEQQDGQLKHLEQQEGQLKDLEQQKGQLEQPVFAPAPGQVQDIQPALPTKGEVLLPVEHQQQKQEVQWPPKHK

SEQ ID NO: 1018609 - protein, 585 aa, Homo sapiens; identical to SEQ ID NO: 1018608

SEQ ID NO: 1018610 - protein, 77 aa, Homo sapiens
KFAAASTQDGQLKHLEQQEGQLKDLEQQKGQLEQPVFAPAPGQVQDIQPALPTKGEVLLPVEHQQQKQEVQWPPKHK

SEQ ID NO: 1018611 - protein, 34 aa, Homo sapiens
MSDPSQLTQNVCLTQEMELSKAFFGQRNQPSAFN

SEQ ID NO: 1018612 - protein, 151 aa, Homo sapiens
MAPSGPIEGTCENSGPAGKGLAYSVGVPIQILGRLAPMFGRPPSSRAPHEASVHHRASKKAPPGGLNFPGFWRNIFSSSLSRGKTPGSQGTRSLQKLREHSTCGTGQQGYLGALGGPHSGDVFSRSSSSSLGPLLYGSRGCPTYVGPVIPS

SEQ ID NO: 1018613 - protein, 133 aa, Homo sapiens
  misc_feature (2)..(2): Xaa can be any naturally occurring amino acid
AXKIVRWSPCRLWGHTCVRHLASFFAFPGSQAGRWEARLRSGPGCDVGARAGKGLFGRRCLSFCPSVVPAISPCQPSTLGIMVKLMQRCPGGGLGGGGAGPPYGMPTAGSSSCPWSPYHTPPPRPPPFNTVWI

SEQ ID NO: 1018614 - protein, 261 aa, Homo sapiens
SGARAGPGRGLSAAGGMPTNFTVVPVEAHADGGGDETAERTEAPGTPEGPEPERPSPGDGNPRENSHSSTMSRWNKRASLKGRTWHFSRRRWTVTPWCPRCSTSLANYTNLSQGVVEHEEDEESRRREAKAPRMGTFIGVYLPCLQNILGVILFLRLTWIVGVAGVLESFLIVAMCCTCTMLTAISMSAIATNGVVPAGGSYYMISRSLGPEFGGAVGLCFYLGTTFAGAMYILGTIEIFLTYISPGAAIFQAEAAGGEAA

SEQ ID NO: 1018615 - protein, 100 aa, Homo sapiens
MPAGCWKTLLRWLPVFLQTMLTAISMSAIATNGVVPAGGSYYMISRSLGPEFGGAVGLCFYLGTTFAGAMYILGTIEIFLTYISPGAAIFQAEAAGGEAA

SEQ ID NO: 1018616 - protein, 87 aa, Homo sapiens
  misc_feature (31)..(31): Xaa can be any naturally occurring amino acid
  misc_feature (33)..(33): Xaa can be any naturally occurring amino acid
DICFRVAASSFLRHKAISSAAARDYSRPLLXVXFLESEEPATSGGPPAVTLHGISPDVFTHVLYYMYSDHTELSPEAAYDVLSVADM

SEQ ID NO: 1018617 - protein, 218 aa, Homo sapiens
MSESSGSALQPGRPSRQQAVHPENLSLDSSCFSSPPVNFLQELPSYRSIARRRTTVHSRDKQSGTLLKPTDSYSSQLEDRIAENLSSHSLRNYALNISEKRRLRDIQETQMKYLSEWDQWKRYSSKSWKRFLEKAREMTTHLELWREDHPQHRREIWHWDSVLFLLLEIPGVAEFGDILIIFMLVFLPVLLTKYKITNSSFVLIPFQRHGLTNVQSIQ

SEQ ID NO: 1018618 - protein, 107 aa, Homo sapiens
MSESSGSALQPGRPSRQQAVHPENLSLDSSCFSSPPVNFLQELPSYRSIARRRTTVHSRDKQSGTLLKPTDSYSSQLEDRIAENLSSHSLRNYALNISEKRRLRFVH

SEQ ID NO: 1018619 - protein, 185 aa, Homo sapiens
IHLGGLSDCPCPGLCPEVVPISSMDKVAGVVVARHCRTNMVPASVDAINFHDKIRKGCVITIRDRMTLPSNKIHGDRGVGGRRPCLAASQKRYRAASAFFTYVLLSQEGRVAALSPNWCPKPRTKKSAFRKAKGGSCKLRRNDRAPRSLSPRLPPPAPGASSNHGNGPSVQSLKSSPLGPKPHSH

SEQ ID NO: 1018620 - protein, 145 aa, Homo sapiens
FAAASTRRSAASGWSKVALFQYSINCLRASVVSGLPRDKCDVVDADDCLGLLGRRVDSGLGQLRDTVLGQVNGVQRLMWPQALRPLGDPGVSQIHPAQVRQGTEVGSTRQGVAAQVDRLSEVSPSSRSTSASVRDNRLPLRSRRV

SEQ ID NO: 1018621 - protein, 87 aa, Homo sapiens
KGDVYLSLIPGTTARGSGGLQGDGEKSPDVPHPEGEFQPRRGQRKKCMDQENLAIGKQQRPRNFNITVHLPELITFPPPSHRLCAVS

SEQ ID NO: 1018622 - protein, 45 aa, Homo sapiens
  misc_feature (7)..(7): Xaa can be any naturally occurring amino acid
MIAFRTXTTSDFLGCRDVEFTQLRLKIEVHSSRARLEMQIDSSVL

SEQ ID NO: 1018623 - protein, 109 aa, Homo sapiens
VLLFEVVCDAWVSSWTAPHLALTGTGTDAVVPRPPPREAPAPAVWATRPAPHGQGCGGAGSTAHGGASGQVLPPLAVAVTLMPRWTAQTRLGAPSPPRRAGVDSRQRLP

SEQ ID NO: 1018624 - protein, 102 aa, Homo sapiens
SEVFCELWLCSRLSVSQTVGAVSLSLGLPPAFCDLCIPSRRQLLTPRAPLLGHQQGGRQRGQALSRGGAGRDPLPGPLGRTQTQMEPVPSTPGLGPSPALLE

SEQ ID NO: 1018625 - protein, 77 aa, Homo sapiens
AAYRSGIFLPCFIAIDQYMPFNPHSAGKFNQCFEPDWANSMTLILRHQNDVPLTRQFIDNPGFRFPFHQQPAACKQR

SEQ ID NO: 1018626 - protein, 120 aa, Homo sapiens
RFLSPLGPLGPATCPHAALDLGLGGHSLLPTEVRLIYISVHNRIHKTLHTGTHRVSPPTGIGAGPAHTPFLLEAKAFPMLPTWRKLCKISVAQSRTRKSSTHNRKEKAKFCKRGCRTHIF

SEQ ID NO: 1018627 - protein, 80 aa, Homo sapiens
IVLQRGGTGFAGSGVKLQSGEITAGDAGLSVCGRPNKPAWVRNDVAPSFAAWAPRGQGRRGCRAVQTVLLQRTLEFERAG

SEQ ID NO: 1018628 - protein, 48 aa, Homo sapiens
AAAAAAIGLVIYYLAFSAKSHIQAWRRHPSPALASFNKLPKDLGLQKK

SEQ ID NO: 1018629 - protein, 371 aa, Homo sapiens
GSSSGAAGTAAAPQAEKPGAGEAAAAAAMAGIELERCQQQANEVTEIMRNNFGKVLERGVKLAELQQRSDQLPGYELQPFNKTYTEPGPSKKLLGSNIRSTRTLRGGSVVRLAVPASLILTCGCLARPLSYRQQQLTTQLRCPTGPSALHGTCPQRPWAPRPPAWLLTARPANTGLHLADFWLSSRTSTLFRSPLTHPHVTAPRASPTMWPPPAFSLLLPQTGPLTGQHAAHCPLPGAQPHLAAPPHLLLRINTHPTHKPHTTTTILRAPPALNKTPQHTTMEGDSDAPAQTMSNPHPRVHSDETPQDRRHTTATTRWTRAISPTTINITPRGATRSVLRTHHTPRAPSERPRGDHIAHRRTRDSEPTPSA

SEQ ID NO: 1018630 - protein, 165 aa, Homo sapiens
  misc_feature (163)..(164): Xaa can be any naturally occurring amino acid
GSSSGAAGTAAAPQAEKPGAGEAAAAAAMAGIELERCQQQANEVTEIMRNNFGKVLERGVKLAELQQRSDQLPGYELQPFNKTYTEPGPSKKLLGSNIRSTRTLRGGSVVRLAVPASLILTCGCLARPLSLRAMTAVMPQGPQDAGNCLRAWELNPTVLEGEXXL

SEQ ID NO: 1018631 - protein, 115 aa, Homo sapiens
VQIRSGSQILGVRTWTALWGSPFKSLQLCLVPSRGSRGGSFLPLPVPGGFRHFWASGRITAISASISTWPSLLCLCLLFCLSEGHLSLHLGSTLTPYDLISTYLSNHIYKDTISK

SEQ ID NO: 1018632 - protein, 103 aa, Homo sapiens
MDDDKDGGIEVEERAEFIREDMPIYTMLLINTAICPEKKTYNDGGFMDTMENPQKFTNWTLEDTLQWLIAVGELPQYDEDILRDNTCRRNDTSQDSSARNLHL

SEQ ID NO: 1018633 - protein, 111 aa, Homo sapiens
AHWRKRQEASVHARGLLVAEAALPRPPVGNLVLRVRAGGALWAVRERGEKRERREPDIWEGQACLWDGEEPVHGSCCASVQGAPSSLGFARKCNQTTWAKCDAFILSQEHA

SEQ ID NO: 1018634 - protein, 112 aa, Homo sapiens
AHWRKRQEASVHARGLLVAEAALSAPASSGTWVLRVRAGGALWAVRERGEKRERREPDIWEGQACLWDGEEPVHGSCCASVQGAPSSLGFARKCNQTTWAKCDAFILSQEHA

SEQ ID NO: 1018635 - protein, 138 aa, Homo sapiens
MDRHRVMDDHYSPDRDRDCEAADRQPYHRSRSTEQRPLLERTTTRSRSTERPDTNLMRSMPSLMTGRSAPPSPALSRSHPRTGSVQTSPSSTPVAGRRGRQLPQLPPKGTLDRNNGVKEIEPYEEAGGKKLRSTVPKE

SEQ ID NO: 1018636 - protein, 65 aa, Homo sapiens
MRSARILAWLSISLHVISEILPLHVASFPLGLSRRTVRFLHDDPLSRKHKSISCRAFLHPDLEEL

SEQ ID NO: 1018637 - protein, 194 aa, Homo sapiens
WSVTRPGDRPDMWCPHPEGRPWRDDPPLPPPPIRLWTPSSLPPSTLPDPPKSPGSSLPQGTRSTAPSIPNGPDSQRGVRKEKAISHRLILLAPGSSTGRRVGLCRHDGSVVREGPPPMCLGRGPPKPLRGSAKGLESAPAHTGPCSLVAIVSATSTFRSLPRACPRSLSPPWHAPLCPHTLCVSGDSGDSSGVT

SEQ ID NO: 1018638 - protein, 194 aa, Homo sapiens; identical to SEQ ID NO: 1018637

SEQ ID NO: 1018639 - protein, 87 aa, Homo sapiens
PGPRGLLSTKVLLTGKPCRNFRVLVAYSMLQMVREQVLQESMGGDDILLACNNLIDLDADELISAACVVYAELIQKDVPQTLKDFFL

SEQ ID NO: 1018640 - protein, 102 aa, Homo sapiens
MVGRPVRPRPRMPRPCSRHVAVSLQGPCVHKVPSIFHPKLTKTQLGDPEVRGEMWVTSPSTTLSSRPARGKEGSQGLWGAHAGERQRPLGETGSVLSPGHAP

SEQ ID NO: 1018641 - protein, 225 aa, Homo sapiens
MNQPCNSMEPRVMDDDMLKLAVGDQGPQEEAGQLAKQEGILFKDVLSLQLDFRNILRIDNLWQFENLRKLQLDNNIIEKIEGLENLAHLVWLDLSFNNIETIEGLDTLVNLEDLSLFNNRISKIDSLDALVKLQVLSLGNNRIDNMMNIIYLRRFKCLRTLSLSRNPISEAEDYKMFICAYLPDLMYLDYRRIDDHTASVSLSVSQPCETDSSSPQVSWKRGIEE

SEQ ID NO: 1018642 - protein, 304 aa, Homo sapiens
  misc_feature (169)..(169): Xaa can be any naturally occurring amino acid
MAPSTEPPWEEMHRLGVGIPTSCVEGETARTRGGPLGFPFPRGPLFGLYTLSGGSCHPQLGLHRLPPREHLGREFFTLTLTRVRRLSSGEIVSLYSRHTPGREEILFRGGARPRETRGRPGRYNETLGARRLFLVRVIKINPSLVKNGSFRGIFGHTETLPHPLLEKSXETHFRERRVESSVETTESDNSLLVGNTVLNRPRRFTTRNEESLRGPAQRRERRSPITEHSSHTMHEARPGAQPGMWRHPRLDECQPQELLQNIAPAPARRRKCTRLTRTSRELLGISQPRSPTPFFPHPWKNFQK

SEQ ID NO: 1018643 - protein, 155 aa, Homo sapiens
  misc_feature (155)..(155): Xaa can be any naturally occurring amino acid
FFFFEGGMRCFLGKTWGKMNQPCNSMEPRVMDDDMLKLAVGDQGPQEEAGQLAKQEGILFKDVLSLQLDFRSMYPRFRGGGQGGPSLAFSAPSSSPRIPCKVHGRGSHISIKGLPGLQGIRSSTDVCKSVIFKCLHHFEYPRRSGFLISVGRMSX

SEQ ID NO: 1018644 - protein, 397 aa, Homo sapiens
MNQPCNSMEPRVMDDDMLKLAVGDQGPQEEAGQLAKQEGILFKDVLSLQLDFRNILRIDNLWQFENLRKLQLDNNIIEKIEGLENLAHLVWLDLSFNNIETIEGLDTLVNLEDLSLFNNRISKIDSLDALVKLQVLSLGNNRIDNMMNIIYLRRFKCLRTLSLSRNPISEAEDYKMFICAYLPDLMYLDYRRIDDHTKKLAEAKHQYSIDELKHQENLMQAQLEDEQAQREELEKHKTAFVEHLNGSFLFDSMYAEDSEGNNLSYLPGVGELLETYKDKFVIICVNIFEYGLKQQEKRKTELDTFSECVREAIQENQEQGKRKIAKFEEKHLSSLSAIREELELPNIEKMILECSADISELFDALMTLEMQLVEQLEVRLGPGHKCQNLAMQLHIHR

SEQ ID NO: 1018645 - protein, 397 aa, Homo sapiens; identical to SEQ ID NO: 1018644

SEQ ID NO: 1018646 - protein, 397 aa, Homo sapiens; identical to SEQ ID NO: 1018644

SEQ ID NO: 1018647 - protein, 248 aa, Homo sapiens
MAFTAFMQAPVQHPCPCAGGCSMAEAAWQRRCGSEEPLVTMPLPFPGQKKLAEAKHQYSIDELKHQENLMQAQLEDEQAQREELEKHKTAFVEHLNGSFLFDSMYAEDSEGNNLSYLPGVGELLETYKDKFVIICVNIFEYGLKQQEKRKTELDTFSECVREAIQENQEQGKRKIAKFEEKHLSSLSAIREELELPNIEKMILECSADISELFDALMTLEMQLVEQLEVRLGPGHKCQNLAMQLHIHR

SEQ ID NO: 1018648 - protein, 523 aa, Homo sapiens
MNQPCNSMEPRVMDDDMLKLAVGDQGPQEEAGQLAKQEGILFKDVLSLQLDFRNILRIDNLWQFENLRKLQLDNNIIEKIEGLENLAHLVWLDLSFNNIETIEGLDTLVNLEDLSLFNNRISKIDSLDALVKLQVLSLGNNRIDNMMNIIYLRRFKCLRTLSLSRNPISEAEDYKMFICAYLPDLMYLDYRRIDDHTKKLAEAKHQYSIDELKHQENLMQAQLEDEQAQREELEKHKTAFVEHLNGSFLFDSMYAEDSEGNNLSYLPGVGELLETYKDKFVIICVNIFEYGLKQQEKRKTELDTFSECVREAIQENQEQGKRKIAKFEEKHLSSLSAIREELELPNIEKMILECSADISELFDALMTLEMQLVEQLEETINMFERNIVDMVGLFIENVQSLMAQCRDLENHHHEKLLEISISTLEKIVEGDLDEDLPNDLRALFVDKDTIVNAVGASHDIHLLKIDNREDELVTRINSWCTRLIDRIHKDEIMRNRKRVKEINQYIDHMQSELDNLECGDILD

SEQ ID NO: 1018649 - protein, 357 aa, Homo sapiens
MNQPCNSMEPRVMDDDMLKLAVGDQGPQEEAGQLAKQEGILFKDVLSLQLDFRNILRIDNLWQFENLRKLQLDNNIIEKIEGLENLAHLVWLDLSFNNIETIEGLDTLVNLEDLSLFNNRISKIDSLDALVKLQVLSLGNNRIDNMMNIIYLRRFKCLRTLSLSRNPISEAEDYKMFICAYLPDLMYLDYRRIDDHTKKLAEAKHQYSIDELKHQENLMQAQLEDEQAQREELEKHKTAFVEHLNGSFLFDSMYAEDSEGNNLSYLPGVGELLETYKDKFVIICVNIFEYGLKQQEKRKTELDTFSECVREAIQENQEQGKRKIAKFEEKHLSVGPEPPEALPVSCCRPSLLLPLPL

SEQ ID NO: 1018650 - protein, 89 aa, Homo sapiens
RPLLLLLNSRRVDIVVLCCSYCADLSEIRVRCCARRTRRLMLRAVRIIAEETTAMLYSCRTERRRQQFIRALLQHHRPILMHDYDSTPM

SEQ ID NO: 1018651 - protein, 312 aa, Homo sapiens
  misc_feature (1)..(1): Xaa can be any naturally occurring amino acid
  misc_feature (72)..(72): Xaa can be any naturally occurring amino acid
  misc_feature (74)..(74): Xaa can be any naturally occurring amino acid
  misc_feature (76)..(77): Xaa can be any naturally occurring amino acid
XSHMFSCCPEGRQLDIKKSSYKKLSKFLQQMQQEQIIQDERRLRQKGVGEPFVVCCNWDTTPRDYTLFVHSXSXSXXPPQNYSRRVDRVTASITPPRYNNPLLLCPQPSMTLLFSGVWRTEKGSFVEGSEVRTIVINYAKKNDLVDADNKRCCEIWIPCLCDCILEKNEQHTVYEASMGQSSDHGVCEKLQPAYQVTLPGQEPIVKKGRICPIDITLAQKSVYIKKVTVVSDTLEAYGLDPYSVAAILQHADATASTTVKSVPLGDQGPAFTVQIQGKPGPPPRLAIRYEEYQLPRKHIQGLEKALKPGKKK

SEQ ID NO: 1018652 - protein, 112 aa, Homo sapiens
VSPPFFSPRPVGKKVRVPGLSGGRPEGRAHAPRACFQTPARKGLELFSEPVRVGSYGPGSYLAAFLSLGRSLHYLVSPRNKMFTYSLLVRLAQSTLLAVKPQVTRSPRRDHG

SEQ ID NO: 1018653 - protein, 99 aa, Homo sapiens
SKVKEDDFPPILTTPQSSPPKTDSAGYPRPGTSCWIQENSGTQTARSKHFIGSETASNPEPSARPRLESEPKACELGHPTSVFTLIRKPDTPGLPLNEY

SEQ ID NO: 1018654 - protein, 61 aa, Homo sapiens
MKEDDFPPILTTPQSSPPKTDSAGYPRPGTSCWIQENSGTQTVHYRGSGLAQSTYWVRADS

SEQ ID NO: 1018655 - protein, 107 aa, Homo sapiens
MGRDATRIGERLQGEGNFQLNFVTISSKLKVSWTESGKGVTQERRYSTETGAGGEAQILKAACFLSGEAWSLRQVFSPAHRLPGNKLSAIGVHSESETSLSGCVGAG

SEQ ID NO: 1018656 - protein, 364 aa, Homo sapiens
MPHPYPALTPEQKKELSDIAHRIVAPGKGILAADESTGSIAKRLQSIGTENTEENRRFYRQLLLTADDRVNPCIGGVILFHETLYQKADDGRPFPQVIKSKGGVVGIKVDKGVVPLAGTNGETTTQGLDGLSERCAQYKKDGADFAKWRCVLKIGEHTPSALAIMENANVLARYASICQQNGIVPIVEPEILPDGDHDLKRCQYVTEKVLAAVYKALSDHHVYLEGTLLKPNMVTPGHACTQKFSNEEIAMATVTALRRTVPPAVTGVTFLSGGQSEEEASINLNAINKCPLLKPWALTFSYGRALQASALKAWGGKKENLKAAQEEYIKRALANSLACQGKYTPSGQSGAAASESLFISNHAY

SEQ ID NO: 1018657 - protein, 137 aa, Homo sapiens
  misc_feature (65)..(65): Xaa can be any naturally occurring amino acid
  misc_feature (67)..(67): Xaa can be any naturally occurring amino acid
  misc_feature (93)..(93): Xaa can be any naturally occurring amino acid
  misc_feature (117)..(117): Xaa can be any naturally occurring amino acid
  misc_feature (119)..(119): Xaa can be any naturally occurring amino acid
NGPAHPHPRPPKPLPNPPETNEPPAHPRRPPPPHRHPHPTPSHPHNTPRHTTASTRPRQVPPPAXRXCNHQSPATQAASRRTPTGTPPPTQNXIRQGPATRTHTLCPNGAQQKQTTXPXAARNPRRDRNLILNEIEC

SEQ ID NO: 1018658 - protein, 75 aa, Homo sapiens
PLSTHPGPKVLPAQVGVWSFEQEEDMKHIPVSYDREGQGTHWTFQAPPEKQVLLCWEYLWSAGCVALGFNYFRNI

SEQ ID NO: 1018659 - protein, 75 aa, Homo sapiens; identical to SEQ ID NO: 1018658

SEQ ID NO: 1018660 - protein, 69 aa, Homo sapiens
HRAGSLREFTQGPPPISAFMSYILPGHPFLGEVIPGTGSPYRTLVESIRKVSSSGRFKDLIARSGFQHR

SEQ ID NO: 1018661 - protein, 149 aa, Homo sapiens [sequence omitted]

SEQ ID NO: 1018662 - protein, 82 aa, Homo sapiens
MAVFHAMVEIEDFQYDEDSETYFYPCPCGDNFSITKEDLENGEDVATCPSCSLIIKVIYDKDQFVCGETVPAPSANKELVKC

SEQ ID NO: 1018663 - protein, 106 aa, Homo sapiens
  misc_feature (1)..(1): Xaa can be any naturally occurring amino acid
XTFFTPPPNARGWGNLAQSNGGRNFRTKPPYTVCLRQKITPASRPPSPLKEIFINPVGFPENSFFKKPPPPKEAHLSRVLDPQLQLCIPSFVFQKNQRGPICLFPL

SEQ ID NO: 1018664 - protein, 119 aa, Homo sapiens
MSLDVLHSNRVVAILICKHAQSTGCQWAALAPGCATRCEQTVMPDVRRKLMLVLVIRTPSISLGNKHNRLKLLTIRKVFVLVTNLSYLPIITTLSSNTLHPPPDTQWWMWILVPKCNWW

SEQ ID NO: 1018665 - protein, 116 aa, Homo sapiens
MSLDVLHSNRVVAILICKHAQSTGCQWAALAPGCATRCEQTVMPDVRRKLMLVLVIRTPSISLGNKHNRLKLLTIRKVFVLVTNLSYLPIITTLSSNTLHPTSRYAMVDVDTCAQM

SEQ ID NO: 1018666 - protein, 104 aa, Homo sapiens
MVRSLSCSAELVACGQFELTFRALRTDALVLLITRLSVGITGEHLPTWQHFTGSLQFKALGGIGHAFVSVPAVFGAADVLGEVVLLGLEHRDTGIERTAVELVD

SEQ ID NO: 1018667 - protein, 87 aa, Homo sapiens
PSGSLLGSYELAGGDLAGLLGALFDMGLKEGVRLLRGPETRAKLPSTRVKEASGSGSQSVEQEAKKLGPPPEPPGGFCQGPPQPQVH

SEQ ID NO: 1018668 - protein, 139 aa, Homo sapiens
WSPAGIASFDHITLRPGLKGSVLVIPLLMGKKSAGQREMLTQKLRSSFSRIPCPDGLSIQCTRSAGRPCRPTHPEMRDAAKQWLCRTSGRVWMGAWRFPHMCADPLESRIEPETERRVPVGRWGLAPMVTCKSEASWRP

SEQ ID NO: 1018669 - protein, 143 aa, Homo sapiens
NVEQKKKRTFRKFTYRGVDLDQLLDMSYEQLMQLYSARQRRRLNRGLRRNNSSLLKRLRKAKKEAPPMEKPEVVKTHLRDMIILPEMVGSMVGVYNGKTFNQVEIKPEMIGHYLGEFSITYKPVKHGRPGIGATHSSRFIPLK

SEQ ID NO: 1018670 - protein, 82 aa, Homo sapiens
AQVPRAGTTSAGSRDGPGGNRDGPGGNRDGPGGNRDGPGREWQQQIKPRSPCPGWVPASLRHSVPVTLLCAEMNETGKATAP

SEQ ID NO: 1018671 - protein, 76 aa, Homo sapiens
HHAKIVCLAWSPANEHFASGGMDMMVYVWTLSDPETRVKIQDAPRLPHVSSLAGLDEPPLVPPSHDASVKEWPIPF

SEQ ID NO: 1018672 - protein, 72 aa, Homo sapiens
YDGFLDPDFVLVCPIFLYSLAITRGTHNGPPFVNIELYSEQTFRYYAIQKSCSRPYFKKVWVLGSIIRTGSA

SEQ ID NO: 1018673 - protein, 72 aa, Homo sapiens; identical to SEQ ID NO: 1018672

SEQ ID NO: 1018674 - protein, 743 aa, Homo sapiens
MILEILRICATLNIFSGGSLEAYRTVEELYKRPDEEYNEGTSSVQNRVRFELLPILKKGLFFDPEFWNFVMIKKNCVALLSDKSAVRFLNESTLENNAGNLKRTEEQQGLDEGFDSLTDQSTGETDPDDVSGVQPKGHINTKKNLTALNTSKVDHNVPRHRCMLCNKEFLGGHIVRHAQAHQKKGSFACVICGRKFRNRGLMQKHLKNHVKKIQRQQIAAAQQDDQEVTALEEINCSSSSISFENGNSDSKDLEVETLTASSEGNKEVIPEHVAEFIEIPISVPEDVIENVIENGSPNNSLNNVFKPLTECGDDYEEEEDEEGDYEEDDYDLNQETSVIHKINGTVCHPKDIYATDQEGNFKCPALGCVRIFKRIGFLNKHAMTVHPTDLNVRQTVMKWSKGKCKFCQRQFEDSQHFIDQLNRHSYPNVYFCLHFNCNESFKLPFQLAQHTKSHRTFQAQCSFPECHELFEDLPLLYEHEAQHYLSKTPESSAQPSETILWDVQTDSNPNQEKDSSSNEKQTISLPVSTSKSRKESTEPRTCIESMEKKTDSLVQNGNERSDDTVSNISLIDQKMPDIEPNSENNCSSSDIVNGHSEIEQTPLVSSDPALKIDTNRIRTENGSILPSVVPQEHNTLPVSQAPSKPNLTSEHTSYGLILTKPYVRPLPPSYLDERYLSMPKRRKFLTDRVDACSDQDNVYKKSVKRLRCGKCLTTYCNAEALEAHLAQKKCQTLFGFDSDDESA

SEQ ID NO: 1018675 - protein, 743 aa, Homo sapiens; identical to SEQ ID NO: 1018674

SEQ ID NO: 1018676 - protein, 743 aa, Homo sapiens; identical to SEQ ID NO: 1018674

SEQ ID NO: 1018677 - protein, 160 aa, Homo sapiens
  misc_feature (15)..(15): Xaa can be any naturally occurring amino acid
MNCYLENYCNRSGTXNAFSPRHKARPFCLPFPVILQACGKPRTSRARGPARSSCHHSSLCRCQHRRKPRSRLPLRHCGAVPGWSHGAPHPENPTWRGAGTQEGHRWEASLGSLKAQSRAHTHTQTHIHTRTHTHTHTHSVGGAGAGALPVLPALEEVGVF

SEQ ID NO: 1018678 - protein, 144 aa, Homo sapiens
CPSSTQGAYLEPQSQAACPSLLELQPCSFLFLSLCCWLSHFPPCQPQDSVPLLKVSMAEPGGSYNRLHAEGGRCGTIREGTELMVYGVGAGSLEGVVWGAGLRRPEAWAHHPGHAVPVMQSESCCQGRYPAPSLGVPRAKSTAD

SEQ ID NO: 1018679 - protein, 76 aa, Homo sapiens
  misc_feature (1)..(1): Xaa can be any naturally occurring amino acid
XRAVRLAASPFPAAGPRQYPERPFSLAMAALSVCPELAIGEVKVGFTLGTTVFLWIYLIKQHNEDILEYKSRNGLE

SEQ ID NO: 1018680 - protein, 107 aa, Homo sapiens
CQLPEFCLKMAPQHWLGTKGKIGAPQSCLGPGAQKPGNLWVQGPLGALPVERGRCFALSVSASACAKGGEVSPPKLFGRALLLPVLGPLVPTLGVPFLILGDPPSPN

SEQ ID NO: 1018681 - protein, 112 aa, Homo sapiens
FFASSGILLFISRGASSKQSYKVKGNSKFLTQSNPGSVFKNIEVGNPFWNSAFEVEVLGQLSSSSTSSSAHGVIRSAPKLPTRVWKAWLGVVRAVVHVAVPPGQSCFRAFIR

SEQ ID NO: 1018682 - protein, 76 aa, Homo sapiens
SGGTPMYPGIAGRIRKEITAWAPSPMKIKIIAPPERKYSVWIGGSILASLSTFQQMWITKQEYDEAGPSIVPRKWF

SEQ ID NO: 1018683 - protein, 204 aa, Homo sapiens
SRVKFGGKFENPSQVVERLTRKYNELLKSYQWKMLNTSSLLDQLKEQFNWVSRLANLTQGEDQYYLRVTTVASHTFDSDVPSGVTEVVVKLFDFDPITVTVPVEVSRKNPKFMETVAEKALQEYPKKPREELNVDVAFAPTGAFESSSPQNEVQPPKKSFARPQVTRPQPPGPQIRPAFPRFGSCTLTLDFAAHGKNKIAPACN

SEQ ID NO: 1018684 - protein, 71 aa, Homo sapiens
PLERTPTTTKFAAASTLEAHGGVKAVGVQAIVRDVIRNACDAAAAKRFLAAHVGQTDVATGHKCAVGPDDA

SEQ ID NO: 1018685 - protein, 72 aa, Homo sapiens
SVQRGIQTLADPGSFDSNAFALLLRAAFQSLLDARADEAALSTHTETDRPSGFKALSCSSCNLHPGGRKAPS

SEQ ID NO: 1018686 - protein, 147 aa, Homo sapiens
METPALHFATNNVKILRFGSANLLQFTFLSAGRIVEFFLKIEKQFRQSEISTRRIRSTAEAILGRKSIHSTVCAPNNCLHWESYEVQTTARPLILSLVISEEITSQLSNSLSKHLALTEVRRITICITIFMKLEYFPLLVSYMNGRC

SEQ ID NO: 1018687 - protein, 98 aa, Homo sapiens
GHFRRSHGGNATTNPSQLLPLELVDKCIGSRIHIVMKSDKEIVGTLLGFDDFVNMVLEDVTEFEITPEGRRITKLDQILLNGNNITMLVPEEKDLKCE

SEQ ID NO: 1018688 - protein, 98 aa, Homo sapiens; identical to SEQ ID NO: 1018687

SEQ ID NO: 1018689 - protein, 66 aa, Homo sapiens
ALPHTPITVLMAAPVPLPVDVAVRSLKEPPIIIVPESLEADTKQDTISNSLEEHVTQILNEQADIS

SEQ ID NO: 1018690 - protein, 102 aa, Homo sapiens
MADENIHDHNYKEISQPSPCSKATGAYEDNEPGRHPKEEVSKEKPAFEATTALPHAQKAKIGSCMRSDFQPPKTNKQKNQPNLKKNPDGSREYLGVCLVVCG

SEQ ID NO: 1018691 - protein, 124 aa, Homo sapiens
  misc_feature (3)..(3): Xaa can be any naturally occurring amino acid
FAXASTRQQHRQAVLIQAQGDTTRVGQVAVVHQRLHFHQHRPGAFPRCHHHTAWDFFLGTGKKNRRRVGDFFQAPVSHGEHSELVDRAKTVLHRPQQTQPPIGLAFEIQHGVDHVFQQSTRPRI

SEQ ID NO: 1018692 - protein, 120 aa, Homo sapiens
READLAKVKKTLALEIINFKQPQSHETALHCAVASLHPKRKQVTELLLRKGANVNEKNKDFMTPLHVAAERAHNDVMEVLHKHGAKVRHTPEQSARLSTEQPAALNTASLSPIFLKKLIL

SEQ ID NO: 1018693 - protein, 192 aa, Homo sapiens
LYGSDYSVYTHSYLCFGRDQMLSRLLVGLVQSRPAALLRHPCYLSGYQTTLALGPLYESPCVHATPPLSLPQNLTVEGTGNPGACVSAIRELFNFSSCQGQEDCAFDGVYQPPLRGQFYAFSNFYYTFHFLNLTSRQPLSTVNATIWEFCQRPWKLVEASYPGQDRWLRDYCASGLYILTLLHEGYGFSEET

SEQ ID NO: 1018694 - protein, 128 aa, Homo sapiens
SKGRYTVRSCGIRRNRRIAVPCAVRGAKAEEILYKGLKVREYELRKNNFSDTGNFGFGIQEHIDLGIKYDPSIGIYGLDFYVVLGRPGFSIAGKKRRTGRIGAKHKISKEEAMRWFQQKYDGIILPGK

SEQ ID NO: 1018695 - protein, 33 aa, Homo sapiens
MVARAGAWPGPGAWHGRPAEVQRALWCRTLRGR

SEQ ID NO: 1018696 - protein, 292 aa, Homo sapiens
  misc_feature (12)..(12): Xaa can be any naturally occurring amino acid
  misc_feature (32)..(32): Xaa can be any naturally occurring amino acid
LEHVGQHALARXIEENRFQCDICKKTFKNACXVKIHHKNMHVKEMHTCTVEGCNATFPSRRSRDRHSSNLNLHQKALSQEALESSEDHFRAAYLLKDVAKKAYQDVAFTQQASQTSVISKGTSRMGSLVYPITQVHSASLESYNSGPLSEGTILDLSTTSSMKSESSSHSSWDSDGVSEEGTVLMEDSDGNCEGSSLVPGEDEYPICVLMEKADQSLASLPSGLPITCHLCQKTYSNKGTFRAHYKTVHLRQLHKCKVPGCNTMFSSVRSRNRHSQNPNLHKSLASSPSHLQ

SEQ ID NO: 1018697 - protein, 108 aa, Homo sapiens
TAAVAGVLDGSGEPPGSITGLVYSSNFQNVKQLYALVCETQRYSDVDWMPVISSCRASSVLKKLTDAPGQGVLVRGGEVNPDWSVALSSGFSPDAVHCGDLEQVAQLK

SEQ ID NO: 1018698 - protein, 132 aa, Homo sapiens
HRRKSSPLHFAAGFGRKDVVEHLLQMGANVHARDDGGLIPLHNACSFGHAEVVSLLLCQGADPNARDNWNYTPLHEAAIKGKIDVCIVLLQHGVDTALRNTDGKSALDLADPSAKAVLTGKKTESYRMIISV

SEQ ID NO: 1018699 - protein, 150 aa, Homo sapiens
MQVQGTEIPPWAMWMLQPLWATDLGVGKKAAGEVVLLKSWIWGWVASLPKEISLRMVLHFFLRDKVLPWCPGWLHTLGSSDPPASASKVAGRVASAAPFRVVEASVLTHCDGFLLYGVPLLQKFTLSHYTGVSEAKVLKMGVFWFWFSHM

SEQ ID NO: 1018700 - protein, 175 aa, Homo sapiens
ASKQADVNLVNVRLLVKKAGLNVTPLQSLAAPGEQGFGECLLAVALAGAPSRAVGLVQGTTPVPQGLNGAVFRPEVPLRRDLPLLLFRTQTSDPAMLPTMIGLLAEAGVRLLSYQTSLVSDGETWHVMGISSFLPSLEGVEPAHVTEAFQFHFYPWSSLVPAFGAFLKKPPPCDQ

SEQ ID NO: 1018701 - protein, 122 aa, Homo sapiens
ASKQADVNLVNVRLLVKKAGLNVTPLQSLAAPGEQGFGECLLAVALAGAPSRAVGLVQGTTPVPQGLNGAVFRPEVPLRRDLPLLLFRTQHVTEAFQFHFYPWSSLVPAFGAFLKKPPPCDQ

SEQ ID NO: 1018702 - protein, 182 aa, Homo sapiens
MFLLLALLTELGRLQAHEGSEGIFLHVTVPRKIKSNDSEVSERKMIYIITIDGQPYTLHLGKQSFLPQNFLVYTYNETGSLHSVSPYFMMHCHYQGYAAEFPNSFVTLSICSGLRGFLQFENISYGIEPVESSARFEHIIYQMKNNDPNVSILAVNYSHIWQKDQPYKVPLNSQVTVIILML

SEQ ID NO: 1018703 - protein, 138 aa, Homo sapiens
MIYIITIDGQPYTLHLGKQSFLPQNFLVYTYNETGSLHSVSPYFMMHCHYQGYAAEFPNSFVTLSICSGLRGFLQFENISYGIEPVESSARFEHIIYQMKNNDPNVSILAVNYSHIWQKDQPYKVPLNSQVTVIILML

SEQ ID NO: 1018704 - protein, 158 aa, Homo sapiens
  misc_feature (15)..(16): Xaa can be any naturally occurring amino acid
RGSQLPGKAGFWFFXXTLLGMIYIITIDGQPYTLHLGKQSFLPQNFLVYTYNETGSLHSVSPYFMMHCHYQGYAAEFPNSFVTLSICSGLRGFLQFENISYGIEPVESSARFEHIIYQMKNNDPNVSILAVNYSHIWQKDQPYKVPLNSQVTVIILML

SEQ ID NO: 1018705 - protein, 175 aa, Homo sapiens
LCHVQVPASPSAMSKNSLRPPQKPSRCWSHACRACRTMIYIITIDGQPYTLHLGKQSFLPQNFLVYTYNETGSLHSVSPYFMMHCHYQGYAAEFPNSFVTLSICSGLRGFLQFENISYGIEPVESSARFEHIIYQMKNNDPNVSILAVNYSHIWQKDQPYKVPLNSQVTVIILML

SEQ ID NO: 1018706 - protein, 138 aa, Homo sapiens; identical to SEQ ID NO: 1018703

SEQ ID NO: 1018707 - protein, 147 aa, Homo sapiens
SSGNYSLILHRYTFWGYMMIYIITIDGQPYTLHLGKQSFLPQNFLVYTYNETGSLHSVSPYFMMHCHYQGYAAEFPNSFVTLSICSGLRGFLQFENISYGIEPVESSARFEHIIYQMKNNDPNVSILAVNYSHIWQKDQPYKVPLNF

SEQ ID NO: 1018708 - protein, 111 aa, Homo sapiens
MNNAGHGPTRRLRGLGVLAGVALLAALWLLWLLGSAPRGTPAPQPTITILVWHWPFTDQPPELPSDTCTRYGIARCHLSANRSLLASADAVVFHHRELQTRRSHLPLAQRP

SEQ ID NO: 1018709 - protein, 32 aa, Homo sapiens
MILRVDYGHVNLQKSFTYIIQTHYVVPTLATS

SEQ ID NO: 1018710 - protein, 93 aa, Homo sapiens
  misc_feature (8)..(8): Xaa can be any naturally occurring amino acid
PGGKAAHXTMEEKRRLLQNKRKEPPENVAQRAARLKTFPFKRFKEGPCQPGGQCCYSPSPPTPRVFADAAPDCPKTSNQTPPGPGAAAGPGID

SEQ ID NO: 1018711 - protein, 70 aa, Homo sapiens
IFQMDRQSVVVAKPLNLALPAVRGMAICKLQTIGIIHLETELRLLAPGSVDPREEHGLAGRLDVATDNTP

SEQ ID NO: 1018712 - protein, 105 aa, Homo sapiens
MGLGLLAKEVGRCRGAHRPYSAARSGRPLILPLQGVQLQDEASPTRTPDSGDPSVCGRPAPPKRRPGSAEAPSRICRSAIQDLPKRRPGSAAARKSPTIEDSGGT

SEQ ID NO: 1018713 - protein, 136 aa, Homo sapiens
GTSNIKAAWGKIGGHGAEYGAEALERMFASFPTTKTYFPHFDVSHGSAQVKGHGKKVADALANAAGHLDDLPGALSALSDLHAHKLRVDPVNFKLLSHCLLVTLASHHPADFTPAVHASLDKFLASVSTVLTSKYR

SEQ ID NO: 1018714 - protein, 108 aa, Homo sapiens
EIMWLHSAIITLKTDFKPHCHFSIKPDDPEDRPLQKVGYTLFQLQCWPHYHGNLVEAPTLLLVPACAPQLGTCISSEQRVSRWLLLLVPKEELGTLQQTAGFPAGEQE

SEQ ID NO: 1018715 - protein, 122 aa, Homo sapiens
AAAKDFCIPLTPPENPGLPSSGLSDSRLLLNHGEQPWRCRSQLDPRSLEKEMRFSTRGRPWLPSSGICKMATSSEIMGRGMARGQRSRPSSINLSIWAQNRHFWIFPSFPTPRMRLSKDVLN

SEQ ID NO: 1018716 - protein, 296 aa, Homo sapiens
VCRHFKSLERYCKETPRPSVPEIFDHIQDVQTPSISYLAYQGAGFVHNHFSDSDAKMFQTCVPQPSSAQDMHVPVPKQLAHLPLPALKLPSPCKSKSLGDLTSEDIACNFESKYQCISKSFVTTGIRDKKGVTVKTKSLEPIDALTEQLRKLVSFDQEDNCQVLYSKQDANQLPRALVRKLSSRSQSRVRNIASRAKEKQEANKQKVPNPSNGAGVVLRNKPSAPTPAVNRHSTGSYIAGYLKNTKGGGLEGRGIPEGACTALHYGHVDQFCSDNSVLQTEPSSDDKPEIYFLLRL

SEQ ID NO: 1018717 - protein, 115 aa, Homo sapiens
  misc_feature (32)..(32): Xaa can be any naturally occurring amino acid
MACVDINECDKAKAASPLCVNARCLNTDGSSXAFAARDLHPRTNRTIVGPHGPGLKPWHPLAAHPRPPLGAPAAHPAARLWVCARGRPPGPGKGTYGRLEIATPCTAPASTRASH

SEQ ID NO: 1018718 - protein, 101 aa, Homo sapiens
MALLVLLREALLEALDGFAQILADVAQTLGAEDQHDDRQHDQPVPDAETAHGVARGGKEGSKDNAAPAGRRVTARPSGQRFDLGRALDGLERLLCGLGGGR

SEQ ID NO: 1018719 - protein, 200 aa, Homo sapiens
MSTQLNHASLIRCPSHQLAQSVPMVKGTFMLMQEQWNICHMLPPPAKGCCAQLAVHRPDSTAQYTGRHRPPFPSKQQVADEDEIWKQRRRQQSEISAAVVRARKRREEEERRMEEQRKAACAEKLKRFDENCAILKNTHLQRKFGEGGQKKNRGLGKDFEKDQDQGRGRGGEKTKGNHQEKEKELEREQEKQREMEKERK

SEQ ID NO: 1018720 - protein, 119 aa, Homo sapiens
  misc_feature (61)..(61): Xaa can be any naturally occurring amino acid
MSLPPRSLSGGLRKSKERPKETSEQGELMASFLWGWRDNPEMNRAGRPPLRAAPIVPPGAXGLPPPPPPLPPPPPPRFVEEAEEQESTCPICLGEIQNAKTLEKCRHSFCEGCITRALQ

SEQ ID NO: 1018721 - protein, 70 aa, Homo sapiens
  misc_feature (2)..(2): Xaa can be any naturally occurring amino acid
FXFSPLQNFFEERGKGKATPLPPPPPPRFVEEAEEQESTCPICLGEIQNAKTLEKCRHSFCEGCITRALQ

SEQ ID NO: 1018722 - protein, 137 aa, Homo sapiens
SPGPAVSLRCSAGRGRTLPPQLIPGQRLHATVPGSANPCLAVMVLVISLAAQVQSPRRAGPITGPLPLPLLLLLPFGPPPPAKPAPEAALPSAATRGRAGALRALEPADPASVSWEGPAPAQSTHGNKGQAATVSTG

SEQ ID NO: 1018723 - protein, 106 aa, Homo sapiens
PKKNLAVLDDEKYGTDGLKQYANTSVPALKTALLSDSFLGLQPYGRQPTWCYSKYIEALEQERILLKIQEELEKKLFAGLQPLTNFKASSSTMSLKKNMSAHSSQK

SEQ ID NO: 1018724 - protein, 119 aa, Homo sapiens
MAPLHSSRGDRHSVSKKKRGVQGGSLKPYIEKVRHSLNATRCDILFNIVSGCPSNIFPSHRIKPRVFMSYKPYETWVPHSLWEPKFLQLSPSGTVLVALTKPSPQMLHSFHLPFPQLQC

SEQ ID NO: 1018725 - protein, 117 aa, Homo sapiens
STSIGIKDSNGRYVAALCMNLDLSLFQSMQSAMGQFTNVVKNGVTENLDTSNADAIRQRIDEFAARQAMTPRALKAEDKRLLLRELKGTGYLEVRKSMEVIAQHLGVSRAAAYSYVK

SEQ ID NO: 1018726 - protein, 99 aa, Homo sapiens
TQAPAPASEDEKVVVEPPEGEEKVEKAEVKERTEEPMEKSPKAEVKERTEEPMETEPKGAADVEKVEEKSAIDLTPIVVEDKEERRTRRRREKRDGGFT

SEQ ID NO: 1018727 - protein, 110 aa, Homo sapiens
KQFLVGKKPKSPDRLKVKSEKEPKVEDSADDFMMGASIKDWDKESEGEEPCWWQGKGRSQPLSGRREHSSSAANDPTVGSLRMAICQMLGLPENLCSRVPQVQTVLKLYF

SEQ ID NO: 1018728 - protein, 84 aa, Homo sapiens
AEAPLDTARSCSCLHIPATGEEGQLLQRQPWPWALSPSERLPSVRHRPTSVSALGHVPGVSSPSSACLKSSPTSQQSEKWASIT

SEQ ID NO: 1018729 - protein, 130 aa, Homo sapiens
SNWAWRAFSSSVVALMVACGEKGAHGGTRELGPAVEGEAAGMRRRPRPLTAVMSPSPAAQCPGDGAQALHPGSESPSVPQGPAAWTPRPPSRRPACASVQSVRRAPVQNGQRRGLPPAPGTMACVLFTAH

SEQ ID NO: 1018730 - protein, 130 aa, Homo sapiens; identical to SEQ ID NO: 1018729

SEQ ID NO: 1018731 - protein, 110 aa, Homo sapiens
CVQSVPNCPVGSCPWGGLVPLQGLGHLALLEQTLCAPHPPPSILAQYQPLPFRGWGRGTQALPASSLVHRVLWGPQAPPVPPPIHSAWGVVPPGLQDKSGPPLCLPPSPL

SEQ ID NO: 1018732 - protein, 180 aa, Homo sapiens
MAGVKYPGQDPVDLDIYQSSHMVDYQPYRKHKYSRVTPQEQAKLDAQLRDKEFYRPIPNPNPKLTDGYPAFKRPHMTAKDLGLPGFFPSQEHEATREDERKFTSTCHFTYPASHDLHLAQGDPNQVLQSADFPCLVDPKHQPAAEMAKGYLLLPGCPCLHCHIVKVPILNRWGPLMPFYQ

SEQ ID NO: 1018733 - protein, 175 aa, Homo sapiens
MSTADLMENLREELTCFICLDYFSSPVTTECGHSFCLVCLLRSWEEHNTPLSCPECWRTLEGPHFQSNERLGRLASIARQLRSQVLQSEDEQGSYGRMPTTAKALYDDEQGGKRLRSPETMVQTECISPDEAAGRHQQQRNSREMLESSQPCKENTEAPAGLTHEKERGENVPRQ

SEQ ID NO: 1018734 - protein, 146 aa, Homo sapiens
  misc_feature (5)..(5): Xaa can be any naturally occurring amino acid
GDDGXAPPQHAGAQHRGLGHADDGQVEQFSRAQQARVAEGSDDRRIDVRVMLGQHLTARWRRRSAARRGWRYRPPRVGRSGARVRCRARRHAGRGHQGAVMPSLVLGFRTRMRMVSRDASRVQRAAVSAIGVSAGGQQLLDEARGR

SEQ ID NO: 1018735 - protein, 97 aa, Homo sapiens
RVLHGDLGVVITSGQLTSPTFGDPFPVLLVESWGEAVGAAWNSRSGPTGAQSYPLLITEGGGPRVRSWSKPGGNWNTKFALLLEEFKELLLTPAFVI

SEQ ID NO: 1018736 - protein, 106 aa, Homo sapiens
ARGSWPPGGGVEAPRSGSRVLSATTPQCEDSPRRSPWELRGSCSGWGEGRGAAQRVRPGLKSRGVLGHTEPCLRVLHGDLGGNWNTKFALLLEEFKELLLTPAFVI

SEQ ID NO: 1018737 - protein, 107 aa, Homo sapiens
  misc_feature (12)..(12): Xaa can be any naturally occurring amino acid
SSICPDASCGPXSVRAALSWLSLCPGLGHGPPRPTHSRPGAVSEEAGRSRQLYPWPECQPPQARGLAGQNLVGEGEDCCGHRPPEGQGPQNLEGGKGWEQVWSGARG

SEQ ID NO: 1018738 - protein, 68 aa, Homo sapiens
ARGNGSGSPRIWGWERDCTDCFKKMADKPDMGEIASFNKAKLKKTETQEKNPLPTKKTFEQEKRSEIS

SEQ ID NO: 1018739 - protein, 68 aa, Homo sapiens; identical to SEQ ID NO: 1018738

SEQ ID NO: 1018740 - protein, 124 aa, Homo sapiens
  misc_feature (2)..(2): Xaa can be any naturally occurring amino acid
  misc_feature (26)..(26): Xaa can be any naturally occurring amino acid
  misc_feature (52)..(52): Xaa can be any naturally occurring amino acid
  misc_feature (105)..(105): Xaa can be any naturally occurring amino acid
  misc_feature (112)..(112): Xaa can be any naturally occurring amino acid
  misc_feature (114)..(114): Xaa can be any naturally occurring amino acid
  misc_feature (117)..(117): Xaa can be any naturally occurring amino acid
  misc_feature (121)..(121): Xaa can be any naturally occurring amino acid
  misc_feature (124)..(124): Xaa can be any naturally occurring amino acid
FXVLVNHDFTPLEILWTFSIYLESVXILPQLFMVSKTGEAETITSHYLFALXVYRTLYLFNWIWRYHFEGFFDLISIVAGLVQTVLYCDFFYLYITKSPKGEKVXFSGNTPXLXNIXLGSXGKX

SEQ ID NO: 1018741 - protein, 124 aa, Homo sapiens; identical to SEQ ID NO: 1018740
  misc_feature (2)..(2): Xaa can be any naturally occurring amino acid
  misc_feature (26)..(26): Xaa can be any naturally occurring amino acid
  misc_feature (52)..(52): Xaa can be any naturally occurring amino acid
  misc_feature (105)..(105): Xaa can be any naturally occurring amino acid
  misc_feature (112)..(112): Xaa can be any naturally occurring amino acid
  misc_feature (114)..(114): Xaa can be any naturally occurring amino acid
  misc_feature (117)..(117): Xaa can be any naturally occurring amino acid
  misc_feature (121)..(121): Xaa can be any naturally occurring amino acid
  misc_feature (124)..(124): Xaa can be any naturally occurring amino acid

SEQ ID NO: 1018742 - protein, 143 aa, Homo sapiens
MCECLPHMRGVLRLGSVLFRTSTLTPCLPSVLWRVLRGLERLAYLLMCTAWQLSRLTPGLLCLCLPRPVPLVAGAGVHLLLTFILFFWAPVPRVLQHSWILYVQLPLGCGSALNKTGLSTLLGILYEDKERQDFIFTIYHWWQ

SEQ ID NO: 1018743 - protein, 216 aa, Homo sapiens
QYQKNQNNKIPTQQKNTTTLDHKDKEKTKNKKKKNAPPRTRPGGHDPHRTGIEVLPVAERTRLVLKAKGIRHEVININLKNKPEWFFKKNPFGLVPVLENSQGQLIYESAITCEYLDEAYPGKKLLPDDPSCSTQLASTACIFSSCFLKVPSLASGKLSFRQPQIKDSTMLALQRQQFRQQHIYQAQQEVLTNQAQHDLLGGNSISHDRLPHLALV

SEQ ID NO: 1018744 - protein, 111 aa, Homo sapiens
KEKKNNNTHIRPTTEKNMITMDDVREEDLAPFSLRKRWESEPHPYVFFNDDHTTMTFIGFHLQPNINGSVDAISHLTGKVIKRDVMTRDLYQGLLAQEVPFNVDFDKLPRH

SEQ ID NO: 1018745 - protein, 70 aa, Homo sapiens
YADTVIDAARAGIVTEALRGTFWKSVWTNIFSGALYTVILIVFALILSKSGIDLLGIFEHMTKTAPATGG

SEQ ID NO: 1018746 - protein, 139 aa, Homo sapiens
MTLINGLWSKVNVEEVGGEALGRLLVVYPWTHRFFDSFGNLSSASAIMGNPSVKAHGKKVLTAFGESIKNLDNLKSALAKLSELHCDKLHVDPENFKLLGNVLVIVLASHFGNEFTAEMQAAWQKLVAGVATALSHKYH

SEQ ID NO: 1018747 - protein, 56 aa, Homo sapiens
APKNNGPGNGPGHAGRASLCCLPLWAPASTLWLKKVPPFYVPYPPICDYNKFFIPV

SEQ ID NO: 1018748 - protein, 34 aa, Homo sapiens
  misc_feature (34)..(34): Xaa can be any naturally occurring amino acid
MNLLDKSPAPHYEDHCPPALCSPHCAARPHPYWX

SEQ ID NO: 1018749 - protein, 143 aa, Homo sapiens
LVSGPGHEGLISMKGVIREDLMCGVWSAGTWSMWAAEHCLDKPGAMCIIEGPVDSWDSPVMAKGLVKSGQSTCLDGPGRSCSEILKDKGKGRARVAAEMVTVYGLHRMKEARKQAGWAVGVQGEAGACWEVRPCEGFGGVRLG

SEQ ID NO: 1018750 - protein, 148 aa, Homo sapiens
ARQQHVAQVRDVAEGQAQRLNLGELAAAGSVGISVRSAVKAVFTLLVRSRSRAFAVLPLPGLTAWPAPWPPAPGPPAPRPPPGALEAAARRVHATGFLVGARAVAAAVLVLRQRAHLGVQVAARRRRAQRGEGHGAGGGAASALSRAA

SEQ ID NO: 1018751 - protein, 291 aa, Homo sapiens
LRSSGEGPYSSLVSCRNHQDVAIEPVQSVLRMSVSSIGGPTLDSVSIEAWHESRTADDLEAVLHGVIWTGSTDARTELSWALMHADTCLVYTPKTSDCCVIDESFGNPRSLYRYNGEWRATGPAGGLSWEAIINLATQPKRPMSIPIIPDIPSRWDAQSGEDYKSLPYVQRCTCYDSPSGTQRPSVSDDTEHLVNGRMDFAFPGSTNSLHRMTTTSAAAYGTHLSPHVPHRVLSTSSSLTRDYNSLTRSEHSHSTTLPRGLLQPHLVSSHGLPPIWEHGREQASAVWAWGP

SEQ ID NO: 1018752 - protein, 260 aa, Homo sapiens
LRSSGEGPYSSLVSCRNHQDVAIEPVQSVLRMSVSSIGGPTLDSVSIEAWHESRTADDLEAVLHGVIWTGSTDARTELSWALMHADTCLVYTPKTSDCCVIDESFGNPRSLYRYNGEWRATGPAGGLSWEAIINLATQPKRPMSIPIIPDIPSRWDAQSGEDYKSLPYVQRCTCYDSPSGTQRPSVSDDTEHLVNGRMDFAFPGSTNSLHRMTTTSAAAYGTHLSPHVPHRVLSTSSSLTRDYNSLTRSEHSHSTTLAKE

SEQ ID NO: 1018753 - protein, 105 aa, Homo sapiens
MTFYDSPSGTQRPSVSDDTEHLVNGRMDFAFPGSTNSLHRMTTTSAAAYGTHLSPHVPHRVLSTSSSLTRDYNSLTRSEHSHSTTLTEGHTPTVTSVILPNEISA

SEQ ID NO: 1018754 - protein, 87 aa, Homo sapiens
  misc_feature (26)..(26): Xaa can be any naturally occurring amino acid
  misc_feature (38)..(38): Xaa can be any naturally occurring amino acid
  misc_feature (41)..(41): Xaa can be any naturally occurring amino acid
  misc_feature (44)..(44): Xaa can be any naturally occurring amino acid
ITEEFVQMNYLKDQRVPYVEPPEYEXFWGSRASRGITXMQXMEXLARVFKKDPQAWPSRNREALEEARAPREANPTAHNPRSSVSEH

SEQ ID NO: 1018755 - protein, 100 aa, Homo sapiens
NPSGIKKRWILANGPWAPPPHPWFGPLLAKALFPEPPPNKMGASPLACLGFSPNPFKWGGEKEERGGGLPPPQGFGRALPPWAFPFPGGSLPDPFVKNKP

SEQ ID NO: 1018756 - protein, 98 aa, Homo sapiens
PRSVLRRIRGSAQAITNSALVKDEILTAALSFVEPQPLAVVASHAADGSLWSSVLFGRPGFVRAVDTHEVRIDLSGAHLIPGDPVLQNLQDDPRVGML

SEQ ID NO: 1018757 - protein, 96 aa, Homo sapiens
  misc_feature (2)..(2): Xaa can be any naturally occurring amino acid
  misc_feature (4)..(4): Xaa can be any naturally occurring amino acid
VXAXGTLEDSPTVVYRRTVVLPSYCGVTVVLWCYRRTVVLPSYCGVTVVLWCYRRTVVLPSYCGVTVVLWCYRRTVVLPSYCGVTVVLWCYRVNEG

SEQ ID NO: 1018758 - protein, 412 aa, Homo sapiens
MLESYVTPILMSYVNRYIKNLKPSDLQLSLWGGDVVLSKLELKLDVLEQELKLPFTFLSGHIHELRIHVPWTKLGSEPVVITINTMECILKLKDGIQDDHESCGSNSTNRSTAESTKSSIKPRRMQQAAPTDPDLPPGYVQSLIRRVVNNVNIVINNLILKYVEDDIVLSVNITSAECYTVGELWDRAFMDISATDLVLRKVINFSDCTVCLDKRNASGKIEFYQDPLLYKCSFRTRLHFTYENLNSKMPSVIKIHTLVESLKLSITDQQLPMFIRIMQLGIALYYGEIGNFKEGEIEDLTCHNKDMLGNITGSEDETRIDMQYPAQHKGQELYSQQDEEQPQGWVSWAWSFVPAIVSYDDGEEDFVGNDPASTMHQQKAQTLKDPIVSIGFYCTKATVTFKVGLFSCCLYL

SEQ ID NO: 1018759 - protein, 475 aa, Homo sapiens
MLESYVTPILMSYVNRYIKNLKPSDLQLSLWGGDVVLSKLELKLDVLEQELKLPFTFLSGHIHELRIHVPWTKLGSEPVVITINTMECILKLKDGIQDDHESCGSNSTNRSTAESTKSSIKPRRMQQAAPTDPDLPPGYVQSLIRRVVNNVNIVINNLILKYVEDDIVLSVNITSAECYTVGELWDRAFMDISATDLVLRKVINFSDCTVCLDKRNASGKIEFYQDPLLYKCSFRTRLHFTYENLNSKMPSVIKIHTLVESLKLSITDQQLPMFIRIMQLGIALYYGEIGNFKEGEIEDLTCHNKDMLGNITGSEDETRIDMQYPAQHKGQELYSQQDEEQPQGWVSWAWSFVPAIVSYDDGEEDFVGNDPASTMHQQKAQTLKDPIVSIGFYCTKATVTFKLTEMQVESSYYSPQKVKSKEVLCWEQEGTTVEALMMGEPFFDCQIGFVGCRAMCLKGIMGVKDFEENMNRSDN

SEQ ID NO: 1018760 - protein, 124 aa, Homo sapiens
RYPRCHNTVILGLSSAAVKWLNPVSTDTTNFSPGQHAGNAFQTHLRQYFNISKSFRQSFRPFFLMRRAHGSLIRIPESASKPINSRQCSSGQCLSSTGRRMKELRHIRPASCRQVRLEKCCAIA

SEQ ID NO: 1018761 - protein, 234 aa, Homo sapiens
MARLSVSLALQGTCPNGCLASAAAVICLQGNWGVRKLGTHINMANLLKTVVTGCSCPLLSNLGSCKGLRVKKDFLRTFYTHQELWCKAPVKPGIPYKQLTVGVPKEIFQNEKRVALSPAGVQNLVKQGFNVVVESGAGEASKFSDDHYRVAGAQIQGAKEVLASDLVVKVRAPMVNPTLGVPEADLLKTSGTLISAIYPSQNPELLNKLSQGKSTDLGNGPGSKKSQLLRDMMR

SEQ ID NO: 1018762 - protein, 70 aa, Homo sapiens
QRRMGRKPGVLPWRDFRLAGPAGHMPNGCLASAAAVICLQGKLGSQKIGNSYQHGKPIENSGDWLLVSST

SEQ ID NO: 1018763 - protein, 248 aa, Homo sapiens
MRSARGQGPACAQRDVLSRTSGHSRMGCGLSAGLLAFMGSGESENGERRYSIYGQIRSGKILVVTCGVSCTLVSNLGSCKGLRVKKDFLRTFYTHQELWCKAPVKPGIPYKQLTVGVPKEIFQNEKRVALSPAGVQNLVKQGFNVVVESGAGEASKFSDDHYRVAGAQIQGAKEVLASDLVVKVRAPMVNPTLGVPEADLLKTSGTLISAIYPSQNPELLNKLSQGKSTDLGNGPGSKKSQLLRDMMR

SEQ ID NO: 1018764 - protein, 169 aa, Homo sapiens
  misc_feature (1)..(1): Xaa can be any naturally occurring amino acid
  misc_feature (144)..(144): Xaa can be any naturally occurring amino acid
  misc_feature (157)..(157): Xaa can be any naturally occurring amino acid
  misc_feature (159)..(159): Xaa can be any naturally occurring amino acid
XSAFIGGGNMARSMIAGMIRQGAPSTSICVIEPIAALRDALIADFNIKAVTTATEAATDTSTWVLAVKPQVMPDVCATLPLPVQPNTPLVISIAAGITTCKLKHWLGDTCAIVRAMPEYSSPARCRRDRTIRHLSTPRPHNAPXAEELFNRRKARPXWXTEGSVNGRRD

SEQ ID NO: 1018765 - protein, 146 aa, Homo sapiens
  misc_feature (1)..(1): Xaa can be any naturally occurring amino acid
  misc_feature (135)..(135): Xaa can be any naturally occurring amino acid
  misc_feature (138)..(138): Xaa can be any naturally occurring amino acid
XSAFIGGGNMARSMIAGMIRQGAPSTSICVIEPIAALRDALIADFNIKAVTTATEAATDTSTWVLAVKPQVMPDVCATLPLPVQPNTPLVISIAAGITTCKLKHWLGDTCAIVRAMPEYSSPLLRLPRALYLCTXPPXLSNYLVRL

SEQ ID NO: 1018766 - protein, 173 aa, Homo sapiens
LANVLLAGKASGAGQPCHSTPAFFYAARAGSPPPPPPPPPARDGENTQPKQICTFCLSNQKKVEQGPRQKDSDSQLGGGRQQPGGRRCWGRWTPGVTADSPHLGPELGKAHRKHAPRPALAASGAEGQTDVQTGAGSGTLRWPQHLPGPTGTFCAGFSSGHCVMASCVFDMII

SEQ ID NO: 1018767 - protein, 99 aa, Homo sapiens
  misc_feature (5)..(5): Xaa can be any naturally occurring amino acid
SRGIXQMSLKLPPVWGLPRLHGIEPNEVNVTLPLGERVGHTLALGTTRVGKTRLAELFITQDIRRKDAEGEHEVVIVFDPKGDADLLKRMYVEAKRAAA

SEQ ID NO: 1018768 - protein, 85 aa, Homo sapiens
WDEVRSESFRFVIIDEAFGRGERVGHTLALGTTRVGKTRLAELFITQDIRRKDAEGEHEVVIVFDPKGDADLLKRMYVEAKRAAA

SEQ ID NO: 1018769 - protein, 104 aa, Homo sapiens
  misc_feature (99)..(99): Xaa can be any naturally occurring amino acid
  misc_feature (102)..(102): Xaa can be any naturally occurring amino acid
MRCVQNQFRFVIIDEAFGRRSDESAEYGLRLFQKLNLQLLIVTPLQKIHIIEPFVFSVGFVQTRAGCDSQLRCLSDLRSTKPGRQLETHRGILLEVDLXGHXKA

SEQ ID NO: 1018770 - protein, 224 aa, Homo sapiens
MFLVGLTGGIASGKSSVIQVFQQLGCAVIDVDVMARHVVQPGYPAHRRIVEVFGTEVLLENGDINRKVLGDLIFNQPDRRQLLNAITHPEIRKEMMKETFKYFLRGYRYVILDIPLLFETKKLLKYMKHTVVVYCDRDTQWHRDAADSLNRKDAEARINAQAALTDKARMAAMSKTTRAKWSVTKPPGQSSLHTELERFLEYLRLRLGSSQGSLALAASLLVPH

SEQ ID NO: 1018771 - protein, 132 aa, Homo sapiens
MFLVGLTGGIASGKSSVIQVFQQLGCAVIDVDVMARHVVQPGYPAHRRIVEVFGTEVLLENGDINRKVLGDLIFNQPDRRQLLNAITHPEIRKEMMKETFKYFLREPRTSPRGKKHVPSALKEADSLMRRDT

SEQ ID NO: 1018772 - protein, 132 aa, Homo sapiens; identical to SEQ ID NO: 1018771

SEQ ID NO: 1018773 - protein, 224 aa, Homo sapiens; identical to SEQ ID NO: 1018770

SEQ ID NO: 1018774 - protein, 114 aa, Homo sapiens
MATVTALRRTVPPAVTGITFLFGGQSEEEASINLNAINKCPLLKPWALTFSYGRALQAFALKAWGGKKENLKAAQEEYVKRALAHSLACQGKYPPSGQAGGAANESLFVSNHAY

SEQ ID NO: 1018775 - protein, 140 aa, Homo sapiens
FFPPGWGEWVLTSCVPLGSGPRVLAPGTVVVLWLQGSQEFPPKKFFFWAFRQGPSQGPPPLFFDQLFGGGTQGVEKGGPLFLLGGPRGPSVGLSPEGLCPFGGLTPPCPFVCCFGGGGGALVFWPPPCPPPWFNSLFPPA

SEQ ID NO: 1018776 - protein, 102 aa, Homo sapiens
DESQAAARLGLIDESQAAARLVRRTRGAESLRPAVHAVRSVTARRGASHARWSGWHGPSRSGLDARESVAVSTMLGRRVFPWSGAVSAMRLPALAVVSAVAG

SEQ ID NO: 1018777 - protein, 271 aa, Homo sapiens
EVPGCRTHRLAQFPGLSFLREADSGRVGEAQREGEAPPGPLDRPDGPLRPRGPGTRSLDTLLIVPGHGSLPSARSSPRPRASGRAIGRAGRGGGGGDLIAVPRGRLAGAESQVPLTGAPPDRARAAQGPGAGPGDWGRNRQLFLEGPFPGVQRDQAFLGRGVTPQRVACVLAVEDASVPRTSFSRKPGTLQPGQGQVLEGLTHPPIGGRHTSPPRWQTPHPPHSSGQTGTAATPERKASSHNTPRKSNKTLATARGTDKPRTTTQGETKTH

SEQ ID NO: 1018778 - protein, 102 aa, Homo sapiens
GTRTGVTGRPSGADMGTLKPQHNAEGALPRLCISEDQVLHPARDSGLSWSCGPYPEVESVERTSFHTPMIASPTSQPHPPSSHLPTKLSLKTLVSEFSRRVN

SEQ ID NO: 1018779 - protein, 121 aa, Homo sapiens
RHPTVAAGKPSPPHQTARRVHHSAHRPALPQPSPSIASHRQNAAPSDLDSPRRYLGWPQSLDSDPDSWPPPKGFVTFSETYFLPTPRNLLCFCLGPGVPGSQIESLIFSCGPVSFAHNPVF

SEQ ID NO: 1018780 - protein, 99 aa, Homo sapiens
  misc_feature (99)..(99): Xaa can be any naturally occurring amino acid
DAQLSIAHDARKARIASSVGNIQMTVGIGSGTKQGVGGGDDRLFGSTKYSTNNRHTGLRGVHAILIRRQSDLASLDVFGTQRKRLSHSDHDLGSIDLDX

SEQ ID NO: 1018781 - protein, 121 aa, Homo sapiens
  misc_feature (121)..(121): Xaa can be any naturally occurring amino acid
MSLKLPPVWYNNAKFGIFIHWGVFSVPAFGSEWYSRNMYQQGSKEYQHHLATYGPQNTFGYKDFIPQFTASTFDPNAWATLFKQAGARYVVPVAEHHDGFALYDSHLSDWTAVKTGPKRRX

SEQ ID NO: 1018782 - protein, 311 aa, Homo sapiens
YFQQRVLCHNLTVNFFSLLLISPNLQGNYTCLALNQLSKRHRKVTTELLVYYPPPSAPQCWAQMASGSFMLQLTCRWDGGYPDPDFLWIEEPGGVIVGKSKLGVEMLSESQLSDGKKFKCVTSHIVGPESGASCMVQIRGPSLLSEPMKTCFTGGNVTLTCQVSGAYPPAKILWLRNLNQPEVIIQPSSASHYPGWQNSNLTIHKCSQDLDEGYYICRADSPVGVREMEIWLSVKEGEIWGDSWEPNVEPPFCWDWTLSQGLLLHYSPVFCWKGRKHFQGDKNMDDVMVSVDSEEEEEEEEEEEEDAAVGE

SEQ ID NO: 1018783 - protein, 302 aa, Homo sapiens
FPAASPLPQPDSQLFLTVTDIAKPPGELHLFSLESAQQETSKDPPPSAPQCWAQMASGSFMLQLTCRWDGGYPDPDFLWIEEPGGVIVGKSKLGVEMLSESQLSDGKKFKCVTSHIVGPESGASCMVQIRGPSLLSEPMKTCFTGGNVTLTCQVSGAYPPAKILWLRNLNQPEVIIQPSSASHYPGWQNSNLTIHKCSQDLDEGYYICRADSPVGVREMEIWLSVKEGEISGGLGEPNVEPPFCWDWTLSQGLLLHYSPVFCWKGRKHFQGDKNMDDVMVSVDSEEEEEEEEEEEEDAAVGE

SEQ ID NO: 1018784 - protein, 86 aa, Homo sapiens
PCLENFKKLSDENSQKTQEYDITTDTEPGVMTVQVKEHQGSPAATQPRKRILLLKSLYFGTYEFQPCPSYPVGVKIPGRTLFPRCN

SEQ ID NO: 1018785 - protein, 134 aa, Homo sapiens
KAWDCLQSSSLPLGLQCREQPAPPLCRNHFNHFLFHDCTALTGLPPAQTADSPWSGRSRLLPWPLTEFCLLIRKPKWRLKISVFLISRDFTSVKQNCLETWVIFVVFCGELFCYDFWPVYFILNLVLNKSCIKI

SEQ ID NO: 1018786 - protein, 397 aa, Homo sapiens
MTYHETRALAQSDLQQLYAALETTEFGAYFATPADDTLRFGIGAIATAKTAQALQGAVVFGAQSFDEQEYPQSELMAGFWFVPEVMVTIAADKITFGSDTVSDFTTWLAQFVPKQPNTVTTSHVTDEVDWIERTENLIDTLAIDQTLAKVVFGRQQTLQLSDTLRLAQIIRALAEQANTYHVVLKRHDELFISATPERLVAMSGGQIATAAVAGTSRRGTDGADDIALGEALLASQKNRIEHQYVVASITTRLQDVTTSLKVPAMPSLLKNKQVQHLYTPITGDIAAHLSVTAIVDRLHPTPALGGVPREAALYYIATHEKTPRGLFAGPIGYFTADNSGEFVVGIRSMYVNQTQRRATLFAGAGIVADSDAQQEYEETGLKFEPMRQLLKDYNHVE

SEQ ID NO: 1018787 - protein, 154 aa, Homo sapiens
MACTISCAEENGGFDLILGAVSSRRVCLLLRRGLCCKLCCQLQVRGHNSAQSGNWRRPVTAWNMAECKELGTLMVPLRESGTVLTMPPGGSGSGMWIFRGEIWGYSGRSGECWGLFFVIERRELDLDGRAGKPEGTLLGQKPVKLVAENEKERN

SEQ ID NO: 1018788 - protein, 114 aa, Homo sapiens
CSFSTAHTLRDLALPGATPLPLSWLQGGRAASLEGPVHEDAVLAEAAQVEVRLLEAELQVAPRDEAGQAHAQVHRALRRVAADGDAGLAHEELELAALQPRQRRPRALPYRGGR

SEQ ID NO: 1018789 - protein, 229 aa, Homo sapiens
MACTISCAEENGGFDLILGAVSSRRVCLLLRRGLCCKLCCQLQVRGHILHKAVTGGDRHRVDMAECKELGTLMVPLRESGTVLTMPPGGSGSGMWIFRGEIWGYSGRSGECWGLFFVIERRELDLDGRAGKPEGTLLGQLQGGRAASLEGPVHEDAVLAEAAQVEVRLLEAELQVAPRDEAGQAHAQVHRALRRVAADGDAGLAHEELELAALQPRQRRPRALPYRGGR

SEQ ID NO: 1018790 - protein, 132 aa, Homo sapiens
GRKPCHNDAHLLPAEIIQQASLKAPNYCGPIDHCELAQVPPLLRDGGYATEFTVNAALHGVGTPVTPTRGHKVLLQLSQSSEAHGLSPTLYLEGSERADFLAEYRGVSLSCACITIASRERLPMMRWTRDME

SEQ ID NO: 1018791 - protein, 84 aa, Homo sapiens
RYTLEKEDSSVAFAFQALSKFFLHLCGLCPRLPKDISFTSWIVCKEKQGEAGVEARRNKGRAGDKGSRLADTQGPVGVSLPCGR

SEQ ID NO: 1018792 - protein, 166 aa, Homo sapiens
  misc_feature (26)..(26): Xaa can be any naturally occurring amino acid
  misc_feature (71)..(71): Xaa can be any naturally occurring amino acid
  misc_feature (86)..(86): Xaa can be any naturally occurring amino acid
RAFSNGRQRPQDSKPWALTSASPLGXGPASLSFELSRHTCFGLQVRFLRVAFRPFGNANPPKWVGHLNPNXAYVIWILGSPNEDPXAKVAVCSTGGQLFLFQPPGLRTLNLGRKSPQFQDQEGAMGPPFLWYFMQEGLQWVRTSKPNFYFEKLAGQYFKKKCPEGS

SEQ ID NO: 1018793 - protein, 68 aa, Homo sapiens
MRVLALRFLACWERGCIGTRARIHACTGTQWVVFTDPRRCGSANPYTVYLVTPHFLVYLCDAYCTVLW

SEQ ID NO: 1018794 - protein, 91 aa, Homo sapiens
MQHRDGEGDALLVSALGQCSACHEGAGLAFSCVLGAWLHWNRGRGFMPALRTQWFVYTDSRRCGSANPYTVYLVTPHFLVYLCDAYCTVLW

SEQ ID NO: 1018795 - protein, 187 aa, Homo sapiens
MPGHLPQRHAAPLLIRSVFPWCPGERSRQKVRVYFLLSSTQSPTAANARGQKMFGGRKTKAGSGGGLTVRVCLQRREGAGSVSSCFSKLQGPGSPLQGRAPLLPARHWRWPPGEEKANACARLVRRKRLTRRFGQQNRPSLSEASSDLARKVGEGGLAQSLRDPPLWGLPSLSLTLLSTAFAGGISE

SEQ ID NO: 1018796 - protein, 187 aa, Homo sapiens; identical to SEQ ID NO: 1018795

SEQ ID NO: 1018797 - protein, 98 aa, Homo sapiens
  misc_feature (25)..(25): Xaa can be any naturally occurring amino acid
  misc_feature (78)..(78): Xaa can be any naturally occurring amino acid
KQELNEPPKQSTSFLVLQEILESEXKGDPNKPSDSEVVKAPVTKVAASIGNAQKLPMCDKCGTVLQQASAAAFSLSVXALSSLESSLPTLVFPLLVKH

SEQ ID NO: 1018798 - protein, 235 aa, Homo sapiens; identical to SEQ ID NO: 796183

SEQ ID NO: 1018799 - protein, 106 aa, Homo sapiens
ASEEMLVDCVPLVEVDDMMIMGKKPDPKCVFPYVQSLYNHPGTPRTGPARQECLACPPAWPASGKLPPPLSGPRFLPGGPPPAALFVGTPLPPPYTRRVLINYWFS

SEQ ID NO: 1018800 - protein, 77 aa, Homo sapiens
RSTRHLKRLALMIQSSGNTVLLLILCMQHSFPEPGRLYLDLILAILALELICSLICLLIYTVKIRRFNKAKPEPDIL

SEQ ID NO: 1018801 - protein, 67 aa, Homo sapiens
KHMGIISILLLKVIAKIWFSKSKKLQPSGINGLGGHVMRNMGSFVIFSCRIGAVLDMADPDYKSIGI

SEQ ID NO: 1018802 - protein, 97 aa, Homo sapiens
  misc_feature (7)..(7): Xaa can be any naturally occurring amino acid
  misc_feature (30)..(30): Xaa can be any naturally occurring amino acid
VTVNASXLSTRFIANVVLPIDGRAATMIKXDGCKPAVLFVEIVITGVYPGNAIVWLLKQLLNTRHGCVEHIGDVLRPFVFVRTTFGNLKDAALTVTK

SEQ ID NO: 1018803 - protein, 106 aa, Homo sapiens
ASDTSAKNRVKSRLKKFFTRSPSLKTLQEKGLIKDQIFGFHLPKVCERENSPVPWFVKQCIEAVEKKGLDVDGIYRVSGNLATIQKLRFIVNQEEKLNLDDSQWED

SEQ ID NO: 1018804 - protein, 89 aa, Homo sapiens
ASDTSAKNRVKSRLKKFFTRSPSLKTLQEKGLIKDQIFGFHLPKVCERENSPVPWFVKQCIEAVEKKGGWLNVQQFPPFLPPLPNQYSS

SEQ ID NO: 1018805 - protein, 177 aa, Homo sapiens
ISSSCSPSWRMISEKENPMRELRIRKLCLNICVGESGDRLTRAAKVLEQLTGQTPVFSKARYTVRSFGIRRNEKIAVPCTVRGAKAEEILEKGLKVREYELRKNNFSDTGNFGFGIQEHIDLGIKYDPSIGIYGLDFYVVLGRPGFSIRKQKAQDRLHWGPTQNQQKGGPALVPAKV

SEQ ID NO: 1018806 - protein, 79 aa, Homo sapiens
PSPGPMTAFPEDPGHAAVPPHGQMDTQSLGGHLLARCERQAFPPRPFRRPNQGLCKRGGPGTQMPFRPGSWAGLWQAPP

SEQ ID NO: 1018807 - protein, 354 aa, Homo sapiens
  misc_feature (100)..(100): Xaa can be any naturally occurring amino acid
  misc_feature (102)..(102): Xaa can be any naturally occurring amino acid
  misc_feature (121)..(121): Xaa can be any naturally occurring amino acid
  misc_feature (132)..(132): Xaa can be any naturally occurring amino acid
  misc_feature (153)..(153): Xaa can be any naturally occurring amino acid
  misc_feature (157)..(157): Xaa can be any naturally occurring amino acid
  misc_feature (189)..(189): Xaa can be any naturally occurring amino acid
  misc_feature (256)..(256): Xaa can be any naturally occurring amino acid
  misc_feature (261)..(261): Xaa can be any naturally occurring amino acid
  misc_feature (275)..(275): Xaa can be any naturally occurring amino acid
GQLNHRHIRYTRCKDEWVLVQLTHKAALAGSSGAPGFEDSAPPCPFNPLCSGAIRANGEVNPQYDSTFLFDNNFPDLQPDAPSPGPSDHPLFQAKSAREXCXVLCFHPCSGVTLQLLSVPXIRAVVNAWAYXTEELGAQYPWVQIFENKGAMXGCSXPHPNCQVWASSFLPDIAQREERSQQAYKSQHXEPLLMEYSRQELLRKVPLVLTSEDWLGLVPFWATWPFQTLLLPRRHVRRLPALTPAERDVLASLMEXLLTKXYNLFETSFPYSMCXLGAPTGSEAGAYWNHLQLHAHYYPPLLRSATVRKFMVGYEMLAQAQRGLTPGHAAEKLWALPEVHYHLGQKDRETATIA

SEQ ID NO: 1018808 - protein, 119 aa, Homo sapiens
GQLNHRHIRYTRCKDEWVLVQLTHKAALAGSSGAPGFEDSAPPCPFNPLCSGAIRANGEVNPQYDSTFLFDNNFPDLQPDAPSPGPSDHPLFQAAEKLWALPEVHYHLGQKDRETATIA

SEQ ID NO: 1018809 - protein, 468 aa, Homo sapiens
MAPWLQLLSLLGLLPGAVAAPAQPRAASFQAWGPPSPELLAPTRFALEMFNRGRAAGTRAVLGLVRGRVRRAGQGSLYSLEATLEEPPCNDPMVCRLPVSKKTLLCSFQVLDELGRHVLLRKDCGPVDTKVPGAGEPKSAFTQGSAMISSLSQNHPDNRNETFSSVISLLNEDPLSQDLPVKMASIFKNFVITYNRTYESKEEARWRLSVFVNNMVRAQKIQALDRGTAQYGVTKFSDLTEEEFRTIYLNTLLRKEPGNKMKQAKSVGDLAPPEWDWRSKGAVTKVKDQGMCGSCWAFSVTGNVEGQWFLNQGTLLSLSEQELLDCDKMDKACMGGLPSNAYSAIKNLGGLETEDDYSYQGHMQSCNFSAEKAKVYINDSVELSQNEQKLAAWLAKRGPISVAINAFGMQFYRHGISRPLRPLCSPWLIDHAVLLVGYGNREFRCLSCIQPGHRQGWDHSISGPLEGK

SEQ ID NO: 1018810 - protein, 484 aa, Homo sapiens [sequence omitted]

SEQ ID NO: 1018811 - protein, 102 aa, Homo sapiens
LLLPGSEAQPSAPSTPRQLLASAPHGPWEEGQARGSLLQPGRPGLPVTLTPQQEQPAWWPSGARTPGGQRSHRNRPRPPPPRRTWRPPRRPVPRLPGRAASV

SEQ ID NO: 1018812 - protein, 89 aa, Homo sapiens
  misc_feature (3)..(3): Xaa can be any naturally occurring amino acid
  misc_feature (21)..(24): Xaa can be any naturally occurring amino acid
  misc_feature (26)..(26): Xaa can be any naturally occurring amino acid
  misc_feature (28)..(28): Xaa can be any naturally occurring amino acid
  misc_feature (31)..(37): Xaa can be any naturally occurring amino acid
  misc_feature (39)..(40): Xaa can be any naturally occurring amino acid
  misc_feature (43)..(43): Xaa can be any naturally occurring amino acid
  misc_feature (45)..(45): Xaa can be any naturally occurring amino acid
  misc_feature (50)..(51): Xaa can be any naturally occurring amino acid
VIXVPCPLSPTPPKRRPRPSXXXXTXKXPTXXXXXXXKXXKKXEXGPRGXXTSERQGSGYFEFSIDIVKISAIWISCFLIFILVSQMND

SEQ ID NO: 1018813 - protein, 313 aa, Homo sapiens
HGSWEVKGETTDYTDQVQIDARDCPHISQRSQTESVSFWGNHDDSRALYAIPGLDYVRHARHPTPTRLHVIRFPSNMNSLKDFVLYDQIEAPPFVASGDAIGPVKRRICPWLELSRVVHRETIEEHYVSLVIPFYMGVREAQKYPRGIGGAFVSVWRTLSSDVVQLLERHWRIFSLSGTLETVRGRGVVGREPVLSKEQPAFQYSSHVSLQASSGHMCGRSFERADGIQVEVRISLLAGKNQDVKNTSGFTVGSGPVASLGYGKKFSPNVELSPLGQVLMRGATGGRETPTRGPGGANGTDAKGQKRPEETES

SEQ ID NO: 1018814 - protein, 79 aa, Homo sapiens
MAPGPRCPSTGCGRLGQAQASRSPCPPWLATEWPDAGFLLPLPPGQPPPFLVVGLGAQPTRHCHVCHPPAPTSIFQKFP

SEQ ID NO: 1018815 - protein, 47 aa, Homo sapiens
MERAISPGLLVRALLLLLLLLGLAARTVAAGRARGLPAPTKEAAFGL

SEQ ID NO: 1018816 - protein, 112 aa, Homo sapiens
  misc_feature (26)..(26): Xaa can be any naturally occurring amino acid
  misc_feature (29)..(29): Xaa can be any naturally occurring amino acid
  misc_feature (36)..(36): Xaa can be any naturally occurring amino acid
  misc_feature (49)..(49): Xaa can be any naturally occurring amino acid
  misc_feature (53)..(53): Xaa can be any naturally occurring amino acid
  misc_feature (63)..(63): Xaa can be any naturally occurring amino acid
  misc_feature (66)..(66): Xaa can be any naturally occurring amino acid
  misc_feature (73)..(73): Xaa can be any naturally occurring amino acid
  misc_feature (79)..(79): Xaa can be any naturally occurring amino acid
  misc_feature (82)..(82): Xaa can be any naturally occurring amino acid
  misc_feature (85)..(85): Xaa can be any naturally occurring amino acid
VSRYCPRSANPAMQLDRFIQCATLLXELXEAFREKXTAVQGNIRFSFGXFVTXTASRSFDPPXCGXWSAPGTXPGFLEXEKXVHXSSFPVPLEEHSPLLDGKLFQKRVKSPA

SEQ ID NO: 1018817 - protein, 330 aa, Homo sapiens
  misc_feature (327)..(327): Xaa can be any naturally occurring amino acid
MFKDLLGLRRVGPAPGRTPPIRGREWSGPRPQCCWLLPGCWVQSAGFWVSGFAGRSHVACAGSSGESVRARCPGTARLPGVRGPRHSGLQIDGDPGCTARPRALTDGSKTWWERRCGDGSLRIPMPTSPRCSGSLEKQGLAGKAAPAVTKDHKQHEDPRGSWPSVGCRPSAFSTAAEVATGSRPGRHMWMMTLFGSPAGTRPTPPDFDPPWVEKANRIRGVGQEASKALGAEKGSCEINSSSRGSSPTAHTKEEEQIQTHQPLPVLPVMSRCLAPDLKAPAVGAPRNGEGGLPPKLPGSLVDATTYPQGVATRPAQGGTLRAITSWXLKK

SEQ ID NO: 1018818 - protein, 81 aa, Homo sapiens
MFKDLLGLRRVGPAPGRTPPIRGREWSGPRPQCCWLLPGCWVQSAGFWVSGFAGRSHVAWPLPHHPLSCCQVRINGVIANL

SEQ ID NO: 1018819 - protein, 215 aa, Homo sapiens
  misc_feature (3)..(3): Xaa can be any naturally occurring amino acid
  misc_feature (6)..(6): Xaa can be any naturally occurring amino acid
  misc_feature (212)..(212): Xaa can be any naturally occurring amino acid
MLXKRXKKKKLVKLFARRSLEKQGLAGKAAPAVTKDHKQHEDPRGSWPSVGCRPSAFSTAAEVATGSRPGRHMWMMTLFGSPAGTRPTPPDFDPPWVEKANRIRGVGQEASKALGAEKGSCEINSSSRGSSPTAHTKEEEQIQTHQPLPVLPVMSRCLAPDLKAPAVGAPRNGEGGLPPKLPGSLVDATTYPQGVATRPAQGGTLRAITSWXLKK

SEQ ID NO: 1018820 - protein, 269 aa, Homo sapiens
  misc_feature (266)..(266): Xaa can be any naturally occurring amino acid
MPYEAKGMLQFNKVLDLHIVTFNPQFCVDPYKLDKIRSYFHRACRKRDLNCETRACVKRFLVAREGEAFGKQGGFWAWARGNNLGVNPREPQGSMKTPVELAVSGMQTLGLQHRCRGGYRVKARTSYVDETLFGSPAGTRPTPPDFDPPWVEKANRIRGVGQEASKALGAEKGSCEINSSSRGSSPTAHTKEEEQIQTHQPLPVLPVMSRCLAPDLKAPAVGAPRNGEGGLPPKLPGSLVDATTYPQGVATRPAQGGTLRAITSWXLKK

SEQ ID NO: 1018821 - protein, 168 aa, Homo sapiens
MRKVAILSLQGDERTWVWIQSPGGQCPPAGRLLSPRFSGAASPRPRLGPPSSSSSAAASSSSSGCSRLGGQVPALPARGRGRGRLLPAADRCAPAALPGPGVEAAEIPHDQRLQQQHRERREQRRVERRASLRAHGAATIFGARPASEARGPRHAPGRPRAPRSSRGR

SEQ ID NO: 1018822 - protein, 74 aa, Homo sapiens
ASVSSPPPLPLARRGDCTTAARAKPATSSGPTLSSHDDKSTFEETCPYCCQLLVLITLECSIKPKARLLSKSPV

SEQ ID NO: 1018823 - protein, 66 aa, Homo sapiens
MSAQPLVLLPPATRTYVPEKGHSISLGPEMRGHMELNLKMAHSRPAVNSQPLCNAGKEGNVNIIDY

SEQ ID NO: 1018824 - protein, 190 aa, Homo sapiens
  misc_feature (2)..(2): Xaa can be any naturally occurring amino acid
  misc_feature (13)..(14): Xaa can be any naturally occurring amino acid
TXTNSVPITSNVXXMIPSEPRKPFEGLSMPKKTRKQPKRRKCLTDPKHTEAKSWAKFMNHVMESGKKAVAERIVYGALEKVKERKNSDPLEIFEKALDAIAPLVEVKSRRVGGATYQVPVEVRPSRRNALAMRWLVRLRPYSAGEKSMALRLAGELVGRLLKVKVLVVKKREDVPPYGLKPTKAFSHYRF

SEQ ID NO: 1018825 - protein, 165 aa, Homo sapiens
LKPAHRTNARGPGPGAKAPSPAPPRRRRRRRRLPSHPGGKTRRGETRGGLARDRAAGRAPTAFSAVPHPPHIHAGSTPARGERASRPQASHPLKPMGRTAPAPRPRGRGPQGRDPALSPSEQWTGCRGSPSPPDPRLARLLAASLWGPGVPIRGLCLDGRRQDAE

SEQ ID NO: 1018826 - protein, 68 aa, Homo sapiens
MYAAVNVFLHFPIFPVNIQYFRNSEYKRKRAREGRILPAGARGALAGSNEFSVSENLSLLTFSDSRGR

SEQ ID NO: 1018827 - protein, 74 aa, Homo sapiens
MCRSRGKPKAIVALEHTLLTVVWIMLTDNVVYDEPGADYYQHRHPERTKNRAIYDLHKLGYEVTITPHGAAHPL

SEQ ID NO: 1018828 - protein, 168 aa, Homo sapiens
  misc_feature (18)..(18): Xaa can be any naturally occurring amino acid
AGEHRQPGPSRLQVPGFXRAVAGSAQRSRARRRGEERQGRGVNAAAVSSPGPASSPTSRRHLTASGGLGSRETAGHLADEHRQWRAVETPGTTALRAITHPPAPPREPRPASPAAASPAPRAPPREPRPASPAPPSPAPPAPHRQPREPRPAPRAPRIGRVPAATPPT

SEQ ID NO: 1018829 - protein, 156 aa, Homo sapiens
  misc_feature (18)..(18): Xaa can be any naturally occurring amino acid
AGEHRQPGPSRLQVPGFXRAVAGSAQRSRARRRGKKGRVAAQRGGRLESRARVLPDLPTPPHGLRGTGLPGNRRPPGGRTQAVAGSGDARDHRAESDHSSASPAPRAPPREPRPAPRAPPRRAPHRRPRTASPASPAPPRALLALAESPRPHPLPD

SEQ ID NO: 1018830 - protein, 190 aa, Homo sapiens
PCGNVTGWSHRVCSLSRLAFHFVICISGFSMSFHGWKAHSFLALNSISWSAWTCHSSFLQSSAKGHLGCFQVVVIVNDAAIIIQCILSLPSTLAILRIPLHADITKTGPFYVHFSQHPWVTSLRGTGSSGRCFCWIQEGREVLSFGAGSEEPQLSAPFCLLWAAWSSHQPSHPTNACRTDRHMARARRLV

SEQ ID NO: 1018831 - protein, 81 aa, Homo sapiens
MEKTRHETVEKPHHQKPLPHAPSSPHLWMHGGLQAGLPPWTQEQAGKLLPHQAKGSGGGGGEARLAPAAVTVVPPHWPVRP

SEQ ID NO: 1018832 - protein, 72 aa, Homo sapiens
GCLEMKKGVGPVRKKKFKIRGVCYGATGTKVRQGPLKKGGYNVKGQKTIGVTKPCTPKTKAKAKAKKGKGKD

SEQ ID NO: 1018833 - protein, 133 aa, Homo sapiens
  misc_feature (123)..(123): Xaa can be any naturally occurring amino acid
QEWTCGQTGGSGFSCQYFYGTYGPLSRPSSQARNRVQVGKQGTFISPTKCREALKVEEKKPYLMWGFSSDFWGEKPNLSYIIGKDTWVEPWPEEEECQDEENQKQCQDLGAFPEGMVVFGGPXWPPPPFPHSR

SEQ ID NO: 1018834 - protein, 636 aa, Homo sapiens
LKGKGPLPMEAIEKMASLCMRDPDEDEEEGTDEDDLEADDDLLAELNEVLGEEQKASETPPPVAQPKPEAPHPGLETTLQERLALYQTAIESARQAGDSAKMRRYDRGLKTLENLLASIRKGNAIDEADIPPPVAIGKGPASTQTNVTQLGNITETTKFEKLAEDCKRSMDILKQAFVRGLPTPTARFEQRTFSVIKIFPDLSSNDMLLFIVKGINLPTPPGLSPGDLDVFVRFDFPYPNVEEAQKDKTSVIKNADSPEFKEQFKLCINRSHPGPLAQLQSRQRDYKLAALHAKQQGDTTAAARHFRVAKSFDAVLEALSRGEPVDLSCLPPPPDQLPPDPPSPPSQPPTPATAPSTTEVPPPPRTLLEALEQRMERYQVAAAQAKSKGDQRKARMHERIVKQYQDAIRAHKAGRAVDVAELPVPPGFPPIQGLEATKPTQQSLVGVLETAMKLANQDEGPEDEEDEVPKKQNSPVAPTAQPKAPPSRTPQSGSAPTAKAPPKATSTRAQQQLAFLEGRKKQLLQAALRAKQKNDVEGAKMHLRQAKGLEPMLEASRNGLPVDITKVPPAPVNKDDFALVQRPGPGLSQEAARRYGELTKLIRQQHEMCLNHSNQFTQLGNITETILANMVKPCFY

SEQ ID NO: 1018835 - protein, 220 aa, Homo sapiens
RSPSVYLGGSSLVTPQGSFENGHKISWLPSPLGPGFWDGFPIVLRVHSCQFGPTKGKTGHASPGGYWPMTTKRNFPRQDLSGYSMLAIGIGTLIYGPWSIIKWNRERRRLQIEDFKARIALLPLLQAKTDRRTLQMLRENLEEEAIIMKDVPHWKVGEFVFPTNPLGAPLDRGTVRAAPPKGGFPCQPRLYVVHVGPVPSGPLDPCPSPLGRNKCFAGLE

SEQ ID NO: 1018836 - protein, 163 aa, Homo sapiens
  misc_feature (8)..(8): Xaa can be any naturally occurring amino acid
  misc_feature (23)..(23): Xaa can be any naturally occurring amino acid
  misc_feature (48)..(48): Xaa can be any naturally occurring amino acid
  misc_feature (97)..(97): Xaa can be any naturally occurring amino acid
  misc_feature (105)..(106): Xaa can be any naturally occurring amino acid
  misc_feature (111)..(112): Xaa can be any naturally occurring amino acid
  misc_feature (117)..(117): Xaa can be any naturally occurring amino acid
QPAPTSEXLTSATNIVKWITKQXNAQGGFSSTQDTVVALHALSKYGAXTFTRTGKAAQVTIQSSGTFSSKFQVDNNNRLLLQQVSLPELPGEYNMKXTEEGCLSXXTSFKXXILPEXEQFPFAFRSADFASNLVINPSPPPASKFPLSVSSQGPALPSNMADR

SEQ ID NO: 1018837 - protein, 87 aa, Homo sapiens
DQLSGRVRLWMRFWRCFLTEMYRNTKLVDERDAFQDNLRVSDEDFAVRQPGLGSTWMKKGCYVIQEDFPTLTPGNVVSIFYVPWSYD

SEQ ID NO: 1018838 - protein, 100 aa, Homo sapiens
MGSVSISSTLLLEAMYSAMHSTLAEVVTPPHLQVFATGPTFIQGSVQDQPWEASLASTESTAPSSVPLSPWALPPFSPDHLVVFLSKSPVKSDIPETGDQ

SEQ ID NO: 1018839 - protein, 104 aa, Homo sapiens
GPGVFAQGSPGPGRQVGQGTSVVLPPAIFRDEWVNNLNAGLLGPEVAVVLITLVVSVAFSSSLGVDQEPVKDGPGQMFGPPPISEVTSTLPPISCLPVKPSINA

SEQ ID NO: 1018840 - protein, 85 aa, Homo sapiens
DRFQDFALIDAPTLEDEPQEGQQWEIALPNNWQRYPRTKVEEKEASDTGGEEPEKEEEDLYYGLPDGAGDLLPDKELGFEPDTQG

SEQ ID NO: 1018841 - protein, 87 aa, Homo sapiens
PPPFSPKTKGPLVPFLGLWVPGVWTSTGGGAPKATHFLFQNQFPCPPTLVIWGVASPDLCRTVCLTPALPLGPGGWAVKKLLGKEGA

SEQ ID NO: 1018842 - protein, 59 aa, Homo sapiens
FPADLLKTLRYSAAAVNTLLTGFGFFVVIYNIPVRLQGVNGQSPVQAGIALLPLLGSSA

SEQ ID NO: 1018843 - protein, 121 aa, Homo sapiens
VLLVFISITQKRKRRARARGIPLARFEGFQPSRVGLEGNLGAAPKETRAGLSVPSIEQLKIKIVPSGCCSERLQESAKQTRLENAALENQSEGLKDAFNTDSSRNPASFGTGRFTKPKNTK

SEQ ID NO: 1018844 - protein, 121 aa, Homo sapiens; identical to SEQ ID NO: 1018843

SEQ ID NO: 1018845 - protein, 72 aa, Homo sapiens
  misc_feature (5)..(5): Xaa can be any naturally occurring amino acid
SVDLXPLIRVGEEPEEDPEEHRKPPPEGQGRRRLRNGCGAQMKKKNPPRVFPLKKMNCKLFSPPLGPVGEGM

SEQ ID NO: 1018846 - protein, 120 aa, Homo sapiens
  misc_feature (33)..(33): Xaa can be any naturally occurring amino acid
ILTSHLHLAFIDFVHAQPIEKPAGPNVADSLRXLMEEDEDASKKPFSPYIKNRGTPALMGGMDKKGPAAIRENPVFEKKPQKEVKKKGGARPQMSLAQKKGGGAPKKASFLRGQGGGGEG

SEQ ID NO: 1018847 - protein, 155 aa, Homo sapiens
YPAFVAISLQCIKEEDTPPDNDSGICMSPESYLGFPQHSPFTRGFPKRSLPSPGVFCGFARPKPYDPPGKKMVAAKVKGEKLDKKLKKMEPNKPAAPRFPQKKRAEQEAFSGECKKLEKKNEALKKRGDSLAKEIQYLKNFIKKVPKARGKKRVP

SEQ ID NO: 1018848 - protein, 77 aa, Homo sapiens
GKASCKVGVDIKVHAFAIKKKEIMCFTAIQMELEAMILSKLTQVQKTKYHMFSLIKWELNIAYTWTPRRHGYTFGPT

SEQ ID NO: 1018849 - protein, 226 aa, Homo sapiens
MEAERRRQAEKPKKGRVGSSLLPERHPATGTPTTTVDSSAPPCRRLPGAGGGRSRFSPQGGQRGRPHSRRRHRTTFSPVQLEQLESAFGRNQYPDIWARESLARDTGLSEARIQVWFQNRRAKQRKQERSLLQPLAHLSPAAFSSFLPESTACPYSYAAPPPPVTCFPHPYSHALPSQPSTGGAFALSHQSEDWYPTLHPAPAGHLPCPPPPPMLPLSLEPSKSWN

SEQ ID NO: 1018850 - protein, 131 aa, Homo sapiens
PLWADLPATPLDNILDELPLHASPTSQLTAIIQSPEERAAKTGLDFCRGLLSWLSSGAGLWREAQTCSSTSSSPMCPQEGHNKPLYLTSSVCPSRRWQERKSSDSFSGTWGRKTCLQKPTYLEGIFIPILL

SEQ ID NO: 1018851 - protein, 215 aa, Homo sapiens
  misc_feature (36)..(36): Xaa can be any naturally occurring amino acid
GTTLLVGAVQGLVGASPNIRGPRISPTRGGSRLDIXPLGMTPRRGLHWPRSTRGNAPQQVYAKDRCPLPSLFLESTDSHFVPPHRPEETKEFMLSRLFNQFPGFKEVRLVPGGHNIPFVEFHNKVQAGAAPNPLQGFKFPQNNPMKFSFAKKKPLFPPGRPLPLFGGPPFPPGVSPLKVSPPLGAFLDPGVSEGSPPSIVPKVCPQPLPRGLLGR

SEQ ID NO: 1018852 - protein, 225 aa, Homo sapiens
MTQPFTFLHQLPLLPNPHDRKCGQIFMSLSSNNISHSWKFYNSITSMDQWSLFGPVCLGPQEQDHLEPGSTLCSHTGEVRISRRIAVLGSQNHRCPCQKLTATSLPSVHLYLARPKTDKSKREPLKPTLSQLFFSLHFTPFAPAITSTHRTHRLCTQMSTVTGQGMKLTKQGEPQATGPGGDCSELCLHPSEEVAAAQLQPWGNDDQMLLDLHTFQEKLEVLLFT

SEQ ID NO: 1018853 - protein, 104 aa, Homo sapiens
MTQPFTFLHQLPLLPNPHDRKCGQIFMSLSSNNISHSWKFYNSITSMDQWSLFGPVCLGPQEQDHLEPGSTLCSHTGEVRISRRIAVLGSQNHRCPCPAPALGE

SEQ ID NO: 1018854 - protein, 99 aa, Homo sapiens
MGSWLSYLLFEGGPDTSTLLTALPIKRDSLGQSGPPPYPRGRHPPGRGQTLAPCCQVKVLAWKQAHVEHHIPLSKVESTPPRSTQPTRVQAALGRYHAA

SEQ ID NO: 1018855 - protein, 116 aa, Homo sapiens
  misc_feature (18)..(18): Xaa can be any naturally occurring amino acid
MAHLPALQKDKAITLRGXVFGHHIHLSEGGPDTSTLLTALPIKRDSLGQSGPPPYPRGRHPPGRGQTLAPCCQVKVLAWKQAHVEHHIPLSKVESTPPRSTQPTRVQAALGRYHAA

SEQ ID NO: 1018856 - protein, 166 aa, Homo sapiens
  misc_feature (4)..(4): Xaa can be any naturally occurring amino acid
  misc_feature (9)..(9): Xaa can be any naturally occurring amino acid
  misc_feature (20)..(20): Xaa can be any naturally occurring amino acid
WMPXLKTQXQCQLGGNTCKXCGKVLHKAGYALNQCPACGVVSPIARIHKSRNQGMEMRATLLTITPSDPLANFLLLVSMSLCYAGLEVLVPKGGMFLPGDTTMIPLNWKLKLPTSHFGFLMSLNQQANKGVSVLAEGDLILTTKGETGLLLHNGGLIQSVEDLGSK

SEQ ID NO: 1018857 - protein, 54 aa, Homo sapiens
MCRSDKNKGNASRMSFGFGKLVVSLGMLSTVVGTSLPAAAQSGAASWYGSGTCV

SEQ ID NO: 1018858 - protein, 65 aa, Homo sapiens
HGMEDPDVILVGELRDLETIRLALTAAETGHLVFGTLHTTSAAKTVDRVVDVFPAGEKAMVRSML

SEQ ID NO: 1018859 - protein, 78 aa, Homo sapiens
KALGTSCNPFSSHVRVHPAKPQARGYLRPWGPNPCSRVSVRQHTKSKKIIFFPQKPFFSHDPLTGFASFPSPSQADLR

SEQ ID NO: 1018860 - protein, 126 aa, Homo sapiens
MSQAQSLPSGSSWSRIEDSLNRCPLSAEDLAAPSQGAGAHRCCMLRVFYFNTHGVSRRLRFPWFHTCYLSSRCACPQPGRIGQKSFKVAVSGDLFLAPGQVLFGSVLSSLPPGESSHHIYWTPTAC

SEQ ID NO: 1018861 - protein, 94 aa, Homo sapiens
  misc_feature (27)..(27): Xaa can be any naturally occurring amino acid
CIWSGKPRGLSFSDIPPGVVCWCDISXQFGGGLPTGGKKAAGAGQGPSLARKVRRVKGFFPLNPPPPFLSGGGGRVQNWLVSLGPLGLGEKAGL

SEQ ID NO: 1018862 - protein, 94 aa, Homo sapiens
QLATNLQESLACRGMGRGVSASGEHLGLYETHTRSSAAYFCFGNDLRLKMDEWQFGSLAKMRLQMNTLPQGTRFQQSKPGIIFYLMLPNSWKLS

SEQ ID NO: 1018863 - protein, 64 aa, Homo sapiens
MRIVLDTSKSAGQITNYWTHHKLLDPSQTTGPITNYWTHHKLLAFVKLNDITISTLLGKPITNF

SEQ ID NO: 1018864 - protein, 97 aa, Homo sapiens
MGNLDHYSSLLGKPITNYWTHHKLLDPSQTTGPITNYWTHHKLLDPSQTTGPITNYWTHHKLLDPSQTTGAITNYWRLRSLNDITISTLLGKPITNF

SEQ ID NO: 1018865 - protein, 196 aa, Homo sapiens
  misc_feature (67)..(67): Xaa can be any naturally occurring amino acid
GFSIEQGVLTMAVSARYEEGAFLFQTKENWRKKEKSVRGCLVDANLSVLHLGIVKKGEKDIPGLADXTGPPRLGPQKGSRIPQLFHLSKEDDGPPDVGRKPFNKEGKKPRAQAPQIQGLGSPRVLQPQRRGIAFKKQRAQKNKEEGCRIWLTFGPKNKRGLRRRARDQLGKGAAFPLCGVLLLSLDPGRNKIFWGT

SEQ ID NO: 1018866 - protein, 89 aa, Homo sapiens
WLRKLLGISVSTNRAFVQLLWEPGHFRGKSSSLDGIVAPLGRRTGGLLNDYRGHTVEILDFAFSKNASLVVATSGDHKGKVFCVQRPDR

SEQ ID NO: 1018867 - protein, 377 aa, Homo sapiens
MAEDKHNKNPLKMLESLGKELISGLLDDFVEKNVLKLEEEEKKKIYDAKLQDKARVLVDSIRQKNQEAGQVFVQTFLNIDKNSTSIKAPEETVAGPDESVGSAATLKLCPHEEFLKLCKERAGEIYPIKERKDRTRLALIICNTEFDHMPPRNGAALDILGMKQLLEGLGYTVEVEEKLTARDMESVLWKFAAREEHKSSDSTFLVFMSHGILDGICGTMHSEEEPDVLPYDTIFRTFNNRNCLSLKDKPKVIIVQACRGANRGELWVSDSPPALADSFSQSSENLEEDAVYKTHVEKDFIAFCSSTPHNVSWRDIKKGSLFITRLITCFQKYAWCCHLEEVFRKVQQSFEKPNVKAQMPTVERLSMTRYFYLFPGN

SEQ ID NO: 1018868 - protein, 197 aa, Homo sapiens
DSTQVICKDWSNLAGKNYIILNMTENIDCEVFRQHRGPQLLALVEEVLPRHGSGHHGAWHISLSKPSEKEQHLLMTLVERAGGVPTQDVLSMLGDIRRSLEEIGIQNYSTTSSCQARASQVRSDYGTLFVVLVVIGAICIIIIALGLLYNCWQRRLPKLKHVSHGEECASWRTAATTTPRWTWPATASRRCRRSTPA

SEQ ID NO: 1018869 - protein, 360 aa, Homo sapiens
DSTQVICKDWSNLAGKNYIILNMTENIDCEVFRQHRGPQLLALVEEVLPRHGSGHHGAWHISLSKPSEKEQHLLMTLVGEQGVCPLKMSFPCWVTSAGAWRRLASRTIPQPAAARRGPARCAATTARSSWCWWSLGPSASSSLRLACSTTAGSAGCPSSSTCRTARSALRGERLPRQPHAGRGQRQPVGDAGEAPQPERRRGPQRPGELGGAHGGQAGPRGLGRVRGGHAPVSAAEAQAEWAARTKRGGPRNGRPGARTSPAPTRAAPAAWPSARAPSRFPRLHTAASDQLPHSRPRGRPQSPPWPRFPAPEPRPRGRRAALPAPRDSIKPARRPRRAQQKNNTAQLTRNQNQQRTYKNG

SEQ ID NO: 1018870 - protein, 259 aa, Homo sapiens
DSTQVICKDWSNLAGKNYIILNMTENIDCEVFRQHRGPQLLALVEEVLPRHGSGHHGAWHISLSKPSEKEQHLLMTLVGEQGVCPLKMSFPCWVTSAGAWRSPNATYPRRNHGTPGPQSEETWPLPPLRDWHPELFHNQQLPGAGQPGAQRLRHALRGAGGHWGHLHHHHCAWPALQLLAAPAAQAQARVARRGVRFVENGCHDNPTLDVASDSQSEMQEKHPSLNGGGALNGPGSWGALMGGKRDPEDSDVFEEDTHL

SEQ ID NO: 1018871 - protein, 98 aa, Homo sapiens
GSCFFPAVLGPGFCSSSASGKSRVDVQGPPNPQTLPPRVGLKWVPRRPPRPIGFDFSSTHGCAKGLWVGLHVICKSFACPHPPHFQGSDGKPQGDLAK

SEQ ID NO: 1018872 - protein, 116 aa, Homo sapiens
MWKVPFVTPVFQPKGAGACYGKKVCPCFGEKVVPPDPPLVFGLSKDPFETHILPPASEAVFYQVMERVQQAVWEHQRTLSPVPLQLGRVGNIWRPWVQPCCGPFPLWWGLREDDPP

SEQ ID NO: 1018873 - protein, 68 aa, Homo sapiens
QATAQEEGIFECADPKLAISAVWTFSRPRGSAAVRRALQAPGSTCPLTFASLDNQEKLEQFIRQFICS

SEQ ID NO: 1018874 - protein, 60 aa, Homo sapiens
QGLMLISQLPMMVAVEFELRLKIPGPEGEVQAVDLTATCLWCHEDINPQHYDSGASIPCG

SEQ ID NO: 1018875 - protein, 244 aa, Homo sapiens
SHEVSTERHICLPIESGEIKGYKIMSPRGLVDLICTKSFALVGVVETALSLSTSVRECEPPWQVPVQGPAALHLGRVTGRRLCARGLTLPSPSLEAPTDITEQPSSIPLRPISLCAPPHQGFSRSPGLIINKHCYSKKDTKITYKEKKKPLKTSPAPSSLRGQNTEGSAPTPAETNKECGAGLSRRSLHQNAALTAGYATTVGQDGAAPAYTTWRPRSSTSAKPTSVPDALQARRKANGPPAHT

SEQ ID NO: 1018876 - protein, 174 aa, Homo sapiens
  misc_feature (5)..(5): Xaa can be any naturally occurring amino acid
  misc_feature (14)..(14): Xaa can be any naturally occurring amino acid
MTWSXVTARTEEAXPAYLNTLGWWGCGKKRVCFFTSSTESAHYGFPLGSQNPQHERNGATQLKPGLLNPDTKPSSLEMNMLHFTTTALPDSGIGFWKVKLEEPDLISPTSKTPSEQERPQHPPRTGDVHLHGHPLRRTVDHQPPHHPRAELLQRDDAVPTTSLFFFFILLSLCF

SEQ ID NO: 1018877 - protein, 85 aa, Homo sapiens
MRSRPQQKKPPSKRGTDRWVRHDSGARRGRACLHNVAAAVVNCAKPTSVPDALQARRKANGPPAHTEPPTDKGQTTGTKTGGTIH

SEQ ID NO: 1018878 - protein, 187 aa, Homo sapiens
MTGRRLCARGLTLPSPSLEAPTDITEQPSSIPLRPISLCAPPHQGFSRSPGLIINKHCYSKKDTKITYKEKKKPLKTSPAPSSLRGQNTEGSAPTPAETNKECGAGLSRRSLHQNAALTAGYATTVGQDGAAPAYTTWRPRSSTSAKPTSVPDALQARRKANGPPAHTKPPTDKGQTTGTKTGGTIH

SEQ ID NO: 1018879 - protein, 62 aa, Homo sapiens
KKPNSTSDHCYTFEMVFLEEPGESGERQALYLFIQLCSDLAKKSLMFYLYPPEMEIKDGAQT

SEQ ID NO: 1018880 - protein, 58 aa, Homo sapiens
FPACRPQGPPCLATGTASIPCSAQPRPQPKVLKDFQLHRPPPQGVAAVTKTINPDGHG

SEQ ID NO: 1018881 - protein, 347 aa, Homo sapiens
LDAKENQSIRAFNSEHKIPYVRLERLKICAASSGEMPVFKLKPQKNDQDGSFLLIIECGTESSSMSIKRPPEVEGTSPEEHRLIPRTPGAKKGPPAPIENEDFCAVCLNGGELLCCDRCPKVFHLSCHVPALLSFPGGEWVCTLCRSLTQPEMEYDCENACYNQPGMRASPGLSMYDQKKCEKLVLSLCCNNLSLPFHEPVSPLARHYYQIIKRPMDLSIIRRKLQKKDPAHYTTPEEVVSDVRLMFWNCAKFNYPDSEVAEAGRCLEVFFEGWLKEIYPEKRFAQPRQEDSDSEEVSSESGCSTPQGFPWPPYMQEGIQPKRRRRHMENERAKRMSFRLANSISQV

SEQ ID NO: 1018882 - protein, 110 aa, Homo sapiens
  misc_feature (13)..(13): Xaa can be any naturally occurring amino acid
MGPSAGPGPSTTXPNKMLWPKMKVPNGIFCPEMLQLNPWTSGDIEAWKKKKKRHRLILVPPFCVQISCSPITEFHNGPEKPCSRSILCREIRFSRLVSVEHSADSLEFSH

SEQ ID NO: 1018883 - protein, 182 aa, Homo sapiens
  misc_feature (3)..(3): Xaa can be any naturally occurring amino acid
  misc_feature (16)..(16): Xaa can be any naturally occurring amino acid
MGXQPYVTTKSLQILXKVYEARNLHMILSRLDDYGKKVMQVWTEKQKSLGQKRNQCLKKMIQVFNQLKKIHELNLSQPIPLIIEEKQIPASTTFVQKPFLKLLMEEDRTSDICKKFRQQEDQTEAIWNVDLSTSSYPIAEKTSMHSLWAQLGGYPDIPRLLQLEVQSTFRKSLASLQSRSSG

SEQ ID NO: 1018884 - protein, 185 aa, Homo sapiens
  misc_feature (3)..(3): Xaa can be any naturally occurring amino acid
  misc_feature (16)..(16): Xaa can be any naturally occurring amino acid
MGXQPYVTTKSLQILXKVYEARNLHMILSRLDDYGKKVMQVWTEKQKSLGQKRNQCLKKMIQVFNQLKKIHELNLSQPIPLIIEEKQIPASTTFVQKPFLKLLMEEDRTSDICKKFRQQEDQTEAIWNVDLSTSSYPIAEKTSMHSLWAQLGGYPDIPRLLQLEVQSTFRKSLASLQSRVKKIPK

SEQ ID NO: 1018885 - protein, 155 aa, Homo sapiens
  misc_feature (7)..(7): Xaa can be any naturally occurring amino acid
  misc_feature (128)..(128): Xaa can be any naturally occurring amino acid
  misc_feature (151)..(151): Xaa can be any naturally occurring amino acid
DCLGHAXLVYEYTLGEEKFTFIEKCNNPRSVTLLIKGPNKHTLTQIKDAVRDGLRAVKNAIDDGCVVPGAGAVEVAMAEALIKHKPSVKGRAQLGVQAFADALLIIPKVLAQNSVFDPQETLVKIPAXHSESGAALGVDLNTSEPKVAAEXGGMG

SEQ ID NO: 1018886 - protein, 131 aa, Homo sapiens
VEVVDDATEVRRTVPVLEIDLGFLRNLKASLENSLKEVEAPYALQMEQLNGVLFPPESKLAQTRAKGQRQAQEYEALFNIKVKLEGEIAPPPPLVEDGEDFNFGDALGSSNSMQTIQKTPPPRIVDGKVGF

SEQ ID NO: 1018887 - protein, 145 aa, Homo sapiens
CAGWVPPPPSFFETNGKFQGPKEASPEPQREKCFPQPWEQQQKGPCPKAPLLLLKGAPGIEKDGASVEKDPWAVAVPPEGVLIFQQDIQSQGKVNRQPPLSDASLSGMPAKRRKFRFDIQKGLQEDPNYSPQGFPNAQGAFVDDP

SEQ ID NO: 1018888 - protein, 94 aa, Homo sapiens
PPNGGNVVIFDRVIPNQEEPYQNHSGRFVCTVPGYKYFTFQVLSQWEICLSIVSSSRGQVRRSLGFCYTTNKGLFQVVSGGMVLQLQQGDQVWV

SEQ ID NO: 1018889 - protein, 173 aa, Homo sapiens
  misc_feature (22)..(22): Xaa can be any naturally occurring amino acid
HDCSYGGQVGGSILSLSVLRGXKARDVTVTRGRHEFTYALMPHKGSFQDAGVIKDAYTLNFPRVGFASPQAKGPPPPGSAFSVSSPAVVLETVKQAESSPQRRSLVLRLYEAHGSHVECWLHLSLPVQEAILCDFLERPDPAGHLTLWDNRLKLTFFPFQVLSLLVVVQPPPH

SEQ ID NO: 1018890 - protein, 310 aa, Homo sapiens
LRPCSTICHGWLGCYGLELLCLSFCAVHAVTDCDVAPCACPAVLLWNLASPVTVCRPVRCGWGKLCPQNLTTPVAMRTQNLMDENLYEKNPDSHGYDKDPVLDVWNMRLVFFFGVSIILVLGQHLYVAYLPDYRCTGCPRAWDGMKEWSRQEAERVVNYLRGQWPSHHGNQLLRAQTRSNCQRMSEQVLSGRLKKAPPSPPPACHYDLFSEPLLKGAESLKNKKKNRSHTLHRRQQQQATRQWRHGQTSTKAPHSRHTWATACAPHSGRKYQTQGTCMANSAREAEESEYGEYNMQEGGTIDWMKGVGTY

SEQ ID NO: 1018891 - protein, 176 aa, Homo sapiens
  misc_feature (106)..(106): Xaa can be any naturally occurring amino acid
  misc_feature (159)..(159): Xaa can be any naturally occurring amino acid
  misc_feature (168)..(168): Xaa can be any naturally occurring amino acid
MNGQLNGFHEAFIEEGTFLFTSESVGEGHPDKICDQISDAVLDAHLQQDPDAKVACETVAKTGMILLAWGNLQSRAAVDYQKVVREAVKHIGYDDSSKGFDYKTCXVLVALEQQSPDIAQGVHLDRNEEDIGAGDQGLMFGYATDDLLAYWKKKTEECXPLTIVLAHXLNAKLAKL

SEQ ID NO: 1018892 - protein, 209 aa, Homo sapiens
SCPGCFRLRLLILRLSERNMKVLLAAALIAGSVFFLLLPGPSAADEKKKGPKVTVKVYFDLRIGDEDVGRVIFGLFGKTVPKTVDNFVALATGEKGFGYITRGDGTGGKSIYGERFPDENFKLKHYGPGWVSMANAGKDTNGSQFFITTVKTAWLDGKHVVFGKVLEGMEVVRKVESTKTDSRDKPLKDVIIADCGKIEVEKPFAIAKE

SEQ ID NO: 1018893 - protein, 117 aa, Homo sapiens
MYLCGILLTRGDGTGGKSIYGERFPDENFKLKHYGPGWVSMANAGKDTNGSQFFITTVKTAWLDGKHVVFGKVLEGMEVVRKVESTKTDSRDKPLKDVIIADCGKIEVEKPFAIAKE

SEQ ID NO: 1018894 - protein, 227 aa, Homo sapiens
SCPGCFRLRLLILRLSERNMKVLLAAALIAGSVFFLLLPGPSAADEKKKGPKVTVKVYFDLRIGDEDVGRVIFGLFGKTVPKTVDNFVALATGEKGFGYKNRKFHRVIKDFMIQGGDFTRGDGTGGKSIYGERFPDENFKLKHYGPGWVSMANAGKDTNGSQFFITTVKTAWLDGKHVVFGKVLEGMEVVRKVESTKTDSRDKPLKDVIIADCGKIEVEKPFAIAKE

SEQ ID NO: 1018895 - protein, 111 aa, Homo sapiens
TSGPNQPSIEGKPDKYMAAMAELFSQVDEKRKNQTPPPTCVARSAFELMREPCITPSGITYDRKDIEEHLQGVGHFDPVTRSPLTQEQLIPNLAMKEVIDAFIFENGWVED

SEQ ID NO: 1018896 - protein, 405 aa, Homo sapiens
MSLYDDLGVETSDSKTEGWSKNFKLLQSQLQVKKAALTQAKSQRTKQSTVLAPVIDLKRGGSSDDRQIADTPPHVAAGLKDPVPSGFSAGEVLIPLADEYDPMFPNDYEKVVKRQREERQRQRELERQKEIEEREKRRKDRHEASGFSRRPDPDSDEDEDYERERRKRSMGGAAIAPPTSLVEKDKELPRDFPYEEDSRPRSQSSKAAIPPPVYEEPDRPRSPTGPSNSFLANMGGTVAHKIMQKYGFREGQGLGKHEQGLSTALSVEKTSKRGGKIIVGDATEKGEAQDASKKSDSNPLTEILKCPTKVVLLRNMVGAGEVDEDLEVETKEECEKYGKVGKCVIFEIPGAPDDEAVRIFLEFERVESAIKAVVDLNGRYFGGRVVKACFYNLDKFRVLDLAEQV

SEQ ID NO: 1018897 - protein, 129 aa, Homo sapiens
  misc_feature (17)..(17): Xaa can be any naturally occurring amino acid
  misc_feature (22)..(22): Xaa can be any naturally occurring amino acid
  misc_feature (31)..(31): Xaa can be any naturally occurring amino acid
  misc_feature (41)..(41): Xaa can be any naturally occurring amino acid
  misc_feature (55)..(55): Xaa can be any naturally occurring amino acid
  misc_feature (64)..(64): Xaa can be any naturally occurring amino acid
  misc_feature (66)..(66): Xaa can be any naturally occurring amino acid
  misc_feature (83)..(83): Xaa can be any naturally occurring amino acid
  misc_feature (114)..(114): Xaa can be any naturally occurring amino acid
  misc_feature (117)..(117): Xaa can be any naturally occurring amino acid
  misc_feature (129)..(129): Xaa can be any naturally occurring amino acid
AGLPGRGGGQAKVNKTXRGGCXHAPGGLIAXSVESAPRYSXGPALLPRQPLKDSXQGGTGQAGXRXSQNLTRCAGRGRGLGAXFAPSPGNGCARKEYCRHLNGLPGIFKQKAKXCCXKSIADQASRFLX

SEQ ID NO: 1018898 - protein, 105 aa, Homo sapiens
MLEFGGSLLMKIEVCMQPWNPGYSSEGARDQETYTCPKMIEMEQAEASLLQLGLLDSMFPGEIELHRRMSSWRCSRTEEIVVKMKTREGRSSKVYFTINMNLDVS

SEQ ID NO: 1018899 - protein, 173 aa, Homo sapiens
  misc_feature (43)..(43): Xaa can be any naturally occurring amino acid
FAWFGENPNFGKEKGKGTGLVYRGKKAQGKPMVTIVIMGQKLXEMIRFLAPRLVFKGGNLEKTLKVDKANAQAAVLYKVFDATGQMNLTKVVDSSPFALELLIFDDCFVLDNGLCGKIYIWKGRKANKKERQAPLQVAKGFIWGMQYAPNTQVEILPQGRESPIFKQFFKDWK

SEQ ID NO: 1018900 - protein, 213 aa, Homo sapiens
MEVLRRSSVFAAEIMDAFDRWPTDKELVAQAKALGREYVHARLLRAGLSWSAPERASPAPGGRLAEVCTVLLRLGDELEQIRPSVYRNVARQLHIPLQSEPVVTDAFLAVAGHIFSAGITWGKVVSLYSAAAGLAVDCVRQAQPAMVHALVDCLGEFVRKTLATWLRRRGGWTDVLKCVVSTKPGFRSHWLVATLCSFGRFLKAAFFLLLPER

SEQ ID NO: 1018901 - protein, 36 aa, Homo sapiens
MSLLKWSPSKGDRLRHGCHGQLLLHRESSPPSVVFS

SEQ ID NO: 1018902 - protein, 129 aa, Homo sapiens
  misc_feature (17)..(17): Xaa can be any naturally occurring amino acid
RERGRRPTPCGSGLRSXPKGKGILGNAIKWNFPKFLIDKNGWVVKRFGPMEEPLVIKKDLPPYFELPKCVAPPEPLPTPLEPFPGTYDGLPANLLVGQTRKFRVPPPGGRFHGLLGLGWGPPPWVPCGN

SEQ ID NO: 1018903 - protein, 30 aa, Homo sapiens
SEDGADYYCSSYTTTNSLVFGGATKVTGLG

SEQ ID NO: 1018904 - protein, 268 aa, Homo sapiens
MAGLRLTAVAWKLGLLAGCLAKRLACSKSNVPWSIYPKTVLALLSLLSRDADAAEPTNWCLGATWCGGLCCLRCMPSMDAEWFTPVERDGLSNLLFRCFAPWTTCPALAMEPREVLLRLLRRPLLSRAVDSLAASTSVMFAILAERVAGGPDAVRSLSHEGLAGTVHPKSAIENSRASRASVVSQPLPLKMAQFHGMEMPFTKEPHWLSGTMERYLKQIPGPGPNWASLRLTLLEMYSLKDEMGNLRKLLESTPSPVVFCHNDIHSSS

SEQ ID NO: 1018905 - protein, 105 aa, Homo sapiens
HYLAEAKKGETLSQEEQRKLEEDLLEMYSLKDEMGNLRKLLESTPSPVVFCHNDIHSSPDSTLPLLGFLLEPPGQDLGGRNNEQKALATGLSPQVKLRFRRPACS

SEQ ID NO: 1018906 - protein, 118 aa, Homo sapiens
MAECRSVVYRMTTWAASMMTGELVYYVVKTDLGLFDAPPVVRYHGSGKGVLKVLCVELFLARDLDCCFPNSEFWVSCVKKRACRSPRRYFYSKVAVCHWAVIFGNTFWGKGFRPLLPD

SEQ ID NO: 1018907 - protein, 118 aa, Homo sapiens; identical to SEQ ID NO: 1018906

SEQ ID NO: 1018908 - protein, 113 aa, Homo sapiens
RVDVRSSLVSSHQDQIEDAADPCPMWKAKSPPRDWVSAVRELHELEGKQTERSGHWAVSRLPAPRTEQTVTRTANKARREALKGGQSGRALWLTPVTPACKPSYSGGRGRRSA

SEQ ID NO: 1018909 - protein, 80 aa, Homo sapiens
KRPARWGGFWSRGAEHLSAWKGTFRGFIRVVLPVPDFAHANLHPRASGGTLRPVGGSGAAAGVLSSSVIPVFAYGDPPPD

SEQ ID NO: 1018910 - protein, 114 aa, Homo sapiens
  misc_feature (14)..(14): Xaa can be any naturally occurring amino acid
VGNKTKKTPLCQVXYALDTSSYRPQCPLGRRQWRTKPHGLKISPQFPKCFWGPKTLGLTFFFAQGGPGPKGRTGGLEMWAFYKPPWAFIPWPGDGKWAVFFYGYSVCKGILCIQ

SEQ ID NO: 1018911 - protein, 548 aa, Homo sapiens
MGFEELLEQVGGFGPFQLRNVALLALPRVLLPLHFLLPIFLAAVPAHRCALPGAPANFSHQDVWLEAHLPREPDGTLSSCLRFAYPQALPNTTLGEERQSRGELEDEPATVPCSQGWEYDHSEFSSTIATESQWDLVCEQKGLNRAASTFFFAGVLVGAVAFGYLSDRFGRRRLLLVAYVSTLVLGLASAASVSYVMFAITRTLTGSALAGFTIIVMPLELEWLDVEHRTVAGVLSSTFWTGGVMLLALVGYLIRDWRWLLLAVTLPCAPGILSLWWVPESARWLLTQGHVKEAHRYLLHCARLNGRPVCEDSFSQEAVSKVAAGERVVRRPSYLDLFRTPRLRHISLCCVVVWFGVNFSYYGLSLDVSGLGLNVYQTQLLFGAVELPSKLLVYLSVRYAGRRLTQAGTLLGTALAFGTRLLVSSDMKSWSTVLAVMGKAFSEAAFTTAYLFTSELYPTVLRQTGMGLTALVGRLGGSLAPLAALLDGVWLSLPKLTYGGIALLAAGTALLLPETRQAQLPETIQDVERKSAPTSLQEEEMPMKQVQN

SEQ ID NO: 1018912 - protein, 144 aa, Homo sapiens
HAVEHVTLPPSPLGWSPPGVGQCSILNPEVLDITEETLHSRFLEGVPNVASVCLQIGYPTVASVPPSIINGDKRVLALSVETDYPFPLAEKVKAFLGDPSAFVAAAPVGAAPPAAPAVVAAPAKVEAKEKSEESAEDMGFGLFD

SEQ ID NO: 1018913 - protein, 1031 aa, Homo sapiens
MGRESRHYRKRSASRGRSGSRSRSRSPSDKRSKRGDDRRSRSRDRDRRRERSRSRDKRRSRSRDRKRLRRSRSRERDRSRERRRSRSRDRRRSRSRSRGRRSRSSSPGSKSKKAENRSRSKEKAEGGDSSKEKKKDKDDKEDEKEKDAGNFDQNKLEEEMRKRKERVEKWREEQRKKAMENIGELKKEIEEMKQGKKWSLEDDDDDEDDPAEAEKEGNEMEDEELDPLDAYMEEVKEEVKKFNMRSVKGGAGNEKKSGPTVTKVVTVVTTKKAVVDSDKKKGELMENDQDAMEYSSEEEEVDLQTALTGYQTKQRKLLEPVDHGKIEYEPFRKNFYVEVPELAKMSQEEVNVFRLEMEGITVKGKGCPKPIKSWVQCGISMKILNSLKKHGYEKPTPIQTQAIPAIMSGRDLIGIAKTGSGKTIAFLLPMFRHIMDQRSLEEGEGPLAVIMTPTRELALQIPKGVRSFKTLGLRVVCVYGGTGISEQIAELKRGAEIIVCTPGRMIDMLAANSGRVTNLRRVTYVVLDEADRMFDMGFEPQVMRIVDNVRPDRQTVMFSATFPRAMEALARRILSKPIEVQVGGRSVVCSDVEQQVIVIEEEKKFLKLLELLGHYQESGSVIIFVDKQEHADGLLKDLMRASYPCMSLHGGIDQYDRDSIINDFKNGTCKLLVATSVAARGLDVKHLILVVNYSCPNHYEDYVHRAGRTGRAGNKGYAYTFITEDQARYAGDIIKALELSGTAVPPDLEKLWSDFKDQQKAEGKIIKKSSGFSGKGFKFDETEQALANERKKLQKAALGLQDSDDEDAAVDIDEQIESMFNSKKRVKDMAAPGTSSVPAPTAGNAEKLEIAKRLALRINAQKNLGIESQVDVMQQATNAILRGGTILAPTVSAKTIAEQLAEKINAKLNYVPLEKQEEERQDGGQNESFKRYEEELEINDFPQTARWKVTSKEALQRISEYSEAAITIRGTYFPPGKEPKEGERKIYLAIESANELAVQKAKAEITRLIKEELIRLQNSYQPTNKGRYKVL

SEQ ID NO: 1018914 - protein, 112 aa, Homo sapiens
QWPERGWPYRPVTARDRAQSLHFSCPEIPGASEGDEGGLHEVGGGVRGGLYIVLNRKWLALASLVCDVMSLGRTVSMRSSGRDGDGCLRCSRPVRGPRSLAVPALCPGLEAD

SEQ ID NO: 1018915 - protein, 152 aa, Homo sapiens
PSTGSHASSEIENVREVQRAGILFFRIMLLELQESIQLLNSMEFVSLLLYDHTLVTEPNSPQDSKSMELEANVKLVRDILKAVILFFHPELEFSSDFGSWDKCKFYVNKYLVNNICAFDPTAKHVEVNVQLIDEYIRGKFPLNYSLNLCQQQ

SEQ ID NO: 1018916 - protein, 86 aa, Homo sapiens
MLSQKPKKKHNFLNHGLSLNLVIKPYLALEGSVAFPAENGVQDTESTQEKRETGDEENSAKFPVGRRDFDTLSCMLGRVYQSCWQV

SEQ ID NO: 1018917 - protein, 86 aa, Homo sapiens
MLSQKTKKKHNFLNHGLSLNLVIKPYLALEGSVAFPAENGVQDTESTLEKRETGDEENSAKFPIGRRDFDTLRCMLGRVYQRCWQV

SEQ ID NO: 1018918 - protein, 263 aa, Homo sapiens
SPQVQPPAWSSVAAFSHSEAKKKTQEKIMASPDWGYDDKNGPEQWSKLYPIANGNNQSPVDIKTSETKHDTSLKPISVSYNPATAKEIINVGHSFHVNFEDNDNRSVLKGGPFSDSYRLFQFHFHWGSTNEHGSEHTVDGVKYSAELHVAHWNSAKYSSLAEAASKADGLAVIGVLMKVGEANPKLQKVLDALQAIKTKGKRAPFTNFDPSTLLPSSLDFWTYPGSLTHPPLYESVTWDPSVREKHQCQLRAAGTIPQPSIKC

SEQ ID NO: 1018919 - protein, 30 aa, Homo sapiens
TVQSLLALGPWSHHPFPSTYHPFPPLLSSS

SEQ ID NO: 1018920 - protein, 71 aa, Homo sapiens
VFLQHSCFQHERRQPAWRSALARGKQVNPRRGKLRSLEDHRGRLCDSSTGKRLLDSEVLAQGLCQVHLLLS

SEQ ID NO: 1018921 - protein, 110 aa, Homo sapiens
LTNPLLLFPPPPWHGTGSTPYTAILLFLHAPPLVPGHTRYLWGTGGLITGMLVYIDPLAFSLPFPSSPRITFLGHPEAACPRVLCVPAISPEKHSQGFVTTSLIPSPSLA

SEQ ID NO: 1018922 - protein, 101 aa, Homo sapiens
  misc_feature (37)..(37): Xaa can be any naturally occurring amino acid
  misc_feature (42)..(42): Xaa can be any naturally occurring amino acid
  misc_feature (44)..(44): Xaa can be any naturally occurring amino acid
  misc_feature (46)..(46): Xaa can be any naturally occurring amino acid
EACDPAPCLASMTCWMLPPISFLSYLLFGLTYMPLGXPFFFXGXPXSNPLGSLIPVCGPACSGPGMLHLQATMHFPGERTSMRSGGRAHIHLCRKVWPGVG

SEQ ID NO: 1018923 - protein, 85 aa, Homo sapiens
PQQPYIAGQQPMYQQVSHSRGLTAAPAGHPQASRFSNGTPGPSGDCPVRLLTGGDAYPRPLLSRQNEDTSLRADTRIRKCRQEKP

SEQ ID NO: 1018924 - protein, 109 aa, Homo sapiens
RGLTLSLWGNFLVGDALSVGDALLWVTALSMGQQPMYQQVSHSRGLTAAPAGHPQASRFSNGTPGPSGDCPVRLLTGGDAYPRPLLSRQNEDTSLRADTRIRKCRQEKP

SEQ ID NO: 1018925 - protein, 196 aa, Homo sapiens
  misc_feature (37)..(37): Xaa can be any naturally occurring amino acid
  misc_feature (109)..(109): Xaa can be any naturally occurring amino acid
  misc_feature (114)..(114): Xaa can be any naturally occurring amino acid
VRPTQPPHLGSLTPARCPITRLSLAPKGGGGREARPXNMFPWPQGCPWSPTTATQRHPHEAFFLGSLPNPSVQGSSPRRTVPGSAARRRSIRMGTEGSAQGAAPVKKHXFCSSXLMHFQPFNPPRLCGSPQPPCKFMACPSQTPAPLALRPVLPFVFSFPVLPLSLSLFFSLFVCVCVCVCVCVCVSCASSDLSRF

SEQ ID NO: 1018926 - protein, 196 aa, Homo sapiens; identical to SEQ ID NO: 1018925
  misc_feature (37)..(37): Xaa can be any naturally occurring amino acid
  misc_feature (109)..(109): Xaa can be any naturally occurring amino acid
  misc_feature (114)..(114): Xaa can be any naturally occurring amino acid

SEQ ID NO: 1018927 - protein, 107 aa, Homo sapiens
RYVNKILNSKFGFTSRKVPAHMPHMIDRIVMQELQDMFPEEFDKTSFHKVRYSEDMQFAFSYFYYLMSAVQPLNISQVFDEVDTDQSGVLSDREIRTLATRIQILQT

SEQ ID NO: 1018928 - protein, 128 aa, Homo sapiens
TCLLPAPLPPRLLVNGHCAQPGPCNPGRGGAWAWPPLSFCEASRFRQDKAFSFPPALPTGPRDLRWPQFNFPLLVVGPYLPQGPSFWQFWNGRVLAAPTFLRAKVEGGGRLVGTQGHACPPHFIQTPP

SEQ ID NO: 1018929 - protein, 32 aa, Homo sapiens
QFLLLLVKNSLQNPHTHIHTHTHMMPALLSSS

SEQ ID NO: 1018930 - protein, 122 aa, Homo sapiens
LVVKGGKKKNQVLKFTLDGPHPVEDGIMDAANFDQFLQERIKVTGKAGTLGGGVVPIERSKSKIPVPSEGPFSKRYLKFLPKKYLKKNNLRAWLGVVATTKKSSEFRSFQITQAQKKEEAED

SEQ ID NO: 1018931 - protein, 324 aa, Homo sapiens
WETQLRRYYIISAGKDGSEQGGGRGGRRGQVWGNFEGTANRMYCRAGCGVLGVREAAKALPENWGGPGAPFTELGNTMSCFVNSVQAPGHLKAGLYGTARGRSTDRALLGPALGSASSLTFGGPRLLPPEPAFGPGPRGLFPPCRPRASPAGSPSARRPETRGAGRGHTTHAGSLTPSAPRGRHRRKPAKPNSRETPPESRTLRGSASRRAPVCVAVAAPPCVRFPGASAAARLCSGLGRSFSSGPARRAPVSQAPCRCPQLLGGSGAGEAGPQKAQSEPSDTRPGPPPSRSFRPRRLVLTDARAAPGRPFSLGSGLLSLPALA

SEQ ID NO: 1018932 - protein, 167 aa, Homo sapiens
MSCVKLSMHAYWEMVLHGAHSPDCSANGICVAMKKKTCKEHLPLGGPGAHHTLFVDCIPLFHGTLALAPMLEVALTLIDSWCKDHSYVIAGYYQANERVKDASPNQVCREVWPPESPRASATTALILVDNTQVYEGLEVRLRTNVYQHHEKEWVSKTKQDMEMASKA

SEQ ID NO: 1018933 - protein, 198 aa, Homo sapiens
MASCLLLPMWCLLCGPSLVSCIALWVNTDHTMWPTCKDWCLPLAANVTLHLLPVNGGSVGVPEKQKPAVRSTSPWAAPAAHHTLFVDCIPLFHGTLALAPMLEVALTLIDSWCKDHSYVIAGYYQANERVKDASPNQVCREVWPPESPRASATTALILVDNTQVYEGLEVRLRTNVYQHHEKEWVSKTKQDMEMASKA

SEQ ID NO: 1018934 - protein, 150 aa, Homo sapiens
  misc_feature (4)..(4): Xaa can be any naturally occurring amino acid
  misc_feature (10)..(10): Xaa can be any naturally occurring amino acid
  misc_feature (13)..(13): Xaa can be any naturally occurring amino acid
  misc_feature (25)..(25): Xaa can be any naturally occurring amino acid
  misc_feature (27)..(27): Xaa can be any naturally occurring amino acid
  misc_feature (32)..(32): Xaa can be any naturally occurring amino acid
  misc_feature (38)..(38): Xaa can be any naturally occurring amino acid
  misc_feature (65)..(65): Xaa can be any naturally occurring amino acid
MVEXSLKSVXSHXASKGDCIPVVNXLXAAPQXSEPQSXIIGKSSNCERWWRPLSMEEARGSLSTXSCVPSNSSHPAWFTPKEPSDPTSNLSTFHPGNSQKPVKRPGATSISSVCKGGVSACPFLMSLVEQVLRAGKPLICTPENRGIEFR

SEQ ID NO: 1018935 - protein, 159 aa, Homo sapiens
KEILNDAAIARPSATKQSEEEEGAVFGQDSPRNVAGVSTLAMAKNMLESFVTTQDRDATRGLWGKANPLIHLGVVFSSSENETFTKVLEHEAETLVLTLSFELLKGTHAQWSMHTSNTANTISVSHPLEEEEDTEGRPVITLISSLPPHHIILIKHDRP

SEQ ID NO: 1018936 - protein, 149 aa, Homo sapiens
  misc_feature (144)..(144): Xaa can be any naturally occurring amino acid
  misc_feature (149)..(149): Xaa can be any naturally occurring amino acid
MSARALGMHGLGTTLTQCAGSRGGIPLWTKVMRKEARHTQMRDRASGVHPDILEHLPPKKTRVCLLYCFVLSPLISLGAVPHHHLALSVKEFTLQLQFIKFLVFLPFNFQLSLQSGARNPPRFTNYAWAAKTHFEGGGPVTQFXPISEX

SEQ ID NO: 1018937 - protein, 109 aa, Homo sapiens
RWQYGSEQPEWQVITCGTAAVGVSALWLWFYEIGQLPLAMAVTLNYMSPIWIAAILLVSAWRRRQRNMDWRLMAAIIMGFGGVVLLLRPSIHADQWIGGVVVQIRYCQR

SEQ ID NO: 1018938 - protein, 128 aa, Homo sapiens
PFLEPPKEGPHPLPLLFLGMWVPSRIGGLFAHPLCTQDPSPLPFGPAASCKKTSFWSPLKTMSLVLFFACPPCALPSSLYLSPWAAPLGGPPLPGSPLVSCQAFCKEKPLGEKWKRAKKINKFPLAPG

SEQ ID NO: 1018939 - protein, 127 aa, Homo sapiens
DSPRNKVNQRSKVMEKKCKSPQKAAFQGYFLSTRPLNNHLKICSRSIFWRWHCRWDLKAKSLHMIQANRCLHDLLLLAFCHDCEASPATWNFFHPVTTKWRNYRLEGERINHLRKLDGRLKVAKGEA

SEQ ID NO: 1018940 - protein, 152 aa, Homo sapiens
LCPSADSYCVLRCISWLYTQGPGSILPPFPPVPQPRLEKGPGVPEEPICALLGQQAWHWEVGVSPLQPCPSPRVATCLPLPKREGREQGTVLSCGNAEKFSPLHAGFGLRGGFFFPWPPVPPRRIWARCTAPQSTTAFYLVGWGKCWAVVVP

SEQ ID NO: 1018941 - protein, 208 aa, Homo sapiens
  misc_feature (22)..(22): Xaa can be any naturally occurring amino acid
PKATAVDNAIFCPLVTHFATMXQVPLSPNRCLLADWFRGGEAALTRSQPGSAEYMIARRTEGQGNTTIDLFLVEKAPADYASLDAFADDYRNRGIRIDSYHGECETYFGEALTLAAGASLFVFLDPCGAVLPMASIRKILQQRGTWPRTEVLLNFNADLIRRVGGQLKMGQLELGGVAQADEVCGGVWWRDVALQAHYTSGGQTWEAA

SEQ ID NO: 1018942 - protein, 190 aa, Homo sapiens
  misc_feature (9)..(9): Xaa can be any naturally occurring amino acid
  misc_feature (11)..(11): Xaa can be any naturally occurring amino acid
  misc_feature (25)..(25): Xaa can be any naturally occurring amino acid
  misc_feature (52)..(52): Xaa can be any naturally occurring amino acid
LTQQHNGWXMXDDAHGTGVIGEQGXGSCWLQKVKPELLVVTFGKGFGVSGAXVLCSSTVADYLLQFARHLIYSTSMPPAQAQALRASLAVIRSDEGDARREKLAALITRFRAGVQDLPFTLADSCSAIQPLIVGDNSRALQLADCVTRLLGHGDSPANRTRWYCATALTLTAAHEMQDIDRLLEVLHGNG

SEQ ID NO: 1018943 - protein, 33 aa, Homo sapiens
QHQPDIYVPLCQQFPSGGRAYEQYFGPGTRLTV

SEQ ID NO: 1018944 - protein, 93 aa, Homo sapiens
  misc_feature (10)..(10): Xaa can be any naturally occurring amino acid
  misc_feature (67)..(67): Xaa can be any naturally occurring amino acid
  misc_feature (74)..(74): Xaa can be any naturally occurring amino acid
ARDGLRDASXPFSAVWLRLPDSPTTSLAGRPAGLCGWPKGEGEPRVLGAPSGRGGGCAGHPVWGICXGLCWCLXPGEGPVVWVGGKSLPCLAK

SEQ ID NO: 1018945 - protein, 1147 aa, Homo sapiens
MACPWKFLFRVKSYQGDLKEEKDINNNVEKTPGAIPSPTTQDDPKSHKHQNGFPQFLTGTAQNVPESLDKLHVTPSTRPQHVRIKNWGNGEIFHDTLHHKATSDISCKSKLCMGSIMNSKSLTRGPRDKPTPVEELLPQAIEFINQYYGSFKEAKIEEHLARLEAVTKEIETTGTYQLTLDELIFATKMAWRNAPRCIGRIQWSNLQVFDARSCSTASEMFQHICRHILYATNSGNIRSAITVFPQRSDGKHDFRIWNSQLIRYAGYQMPDGTIRGDPATLEFTQLCIDLGWKPRYGRFDVLPLVLQAHGQDPEVFEIPPDLVLEVTMEHPKYEWFQELGLKWYALPAVANMLLEVGGLEFPACPFNGWYMGTEIGVRDLCDTQRYNILEEVGRRMGLETHTLASLWKDRAVTEINAAVLHSFQKQNVTIMDHHTASESFMKHMQNEYRARGGCPADWIWLVPPVSGSITPVFHQEMLNYVLSPFYYYQIEPWKTHIWQDEKLRPRRREIRFTVLVKAVFFASVLMRKVMASRVRATVLFATETGKSEALARDLAALFTYAFNTKVVCMEQYKANTLEEEQLLLVVTSTFGNGDCPSNGQTLKKSLFMMKELGHTFRYAVFGLGSSMYPQFCAFAHDIDQKLSHLGASQLAPTGEGDELSGQEDAFRSWAVQTFRAACETFDVRSKHCIQIPKRYTSNATWEPEQYKLTQSPEPLDLNKALSSIHAKNVFTMRLKSLQNLQSEKSSRTTLLVQLTFEGSRGPSYLPGEHLGIFPGNQTALVQGILERVVDCSSPDQTVCLEVLDESGSYWVKDKRLPPCSLRQALTYFLDITTPPTQLQLHKLARFATEETHRQRLEALCQPSEYNDWKFSNNPTFLEVLEEFPSLRVPAAFLLSQLPILKPRYYSISSSQDHTPSEVHLTVAVVTYRTRDGQGPLHHGVCSTWINNLKPEDPVPCFVRSVSGFQLPEDPSQPCILIGPGTGIAPFRSFWQQRLHDSQRRGLKGGRMTFVFGCRHPEEDHLYQKEMQEMVRKGVLFQVHTGYSRLPGKPKVYVQDILQKELADEVFSVLHGEQGHIYVCGDVRMARDVATTLKKLVAAKLNLSEEQVEDYFFQLKSQKRYHEDIFGAVFSYGVKKGNALEEPKGTRL

SEQ ID NO: 1018946 - protein, 273 aa, Homo sapiens
MVKGSKQQKELTILNICASNTGAPSFIKKVLRDLQRDLDSHTIIVGDFNNPVSILDRSIRQKIDKDIQDLNSALDQADLIDIYRTLHPKSTKHTLFSAPQCTYSKTDHLIGSKALLSKCRIREIITNSLSDHSAIKLELRIKKLTQNHTTTWKLNNLLLNDYWVNNEMKAEIKMFFETNENKDRAYQNLWDTFKALCRRKFIALNAHKRRQRRSKIDTLTSQLKELEKQERTNPKASRRQEITKIRTELKERHEKPFKKSVNPELVFLKRSTK

SEQ ID NO: 1018947 - protein, 283 aa, Homo sapiens
MNGEEQYYAATQLYKDPCAFQRGPAPEFSASPPACLYMGRQPPPPPPHPFPGALGSLEQGSPPDISPYEVPPLADDPAVAHLHHHLPAQLALPHPPAGPFPEGAEPGVLEEPNRVHLPFPWMKSTKAHAWKGQWAGGAYAAEPEENKRTRTAYTRAQLLELEKEFLFNKYISRPRRVELAVMLNLTERHIKIWFQNRRMKWKKEEDKKRSSGTAVGGGGVAEPEQDCAVTSGEELLALPPPPPPGGAVPPAAPVAAREGRLPPGLSASPQPSSVAPRRPQEPR

SEQ ID NO: 1018948 - protein, 92 aa, Homo sapiens
AFPAGKPTTVKVAEKCTFVIADTGTSGSTAAAVDGVSMLRDIQPRVVDRVVEDLANLTDDVVYSLGIGDPIRVGQSMHEAHSLLAYLGVSSP

SEQ ID NO: 1018949 - protein, 154 aa, Homo sapiens
SIRLFFFWPFDSLLMPREDLLAQLPGMFALLSLFHFFEAATRPQPCGQENKKFGDKTVIRAHPKPQKAAVGAFCPADPVQTLALSGPCSGSGGSPFSLASVGTSMVMGMVDGNLGMQGFHICVLQPLYLELVLHIGPVCKKNADSNEQGKLGFI

SEQ ID NO: 1018950 - protein, 104 aa, Homo sapiens
MAQAKRWLYQRPQASHQLLRILTDALVPYLVGQVVAGAQAMQLFESHAGHLGPQLFNKFALPYIVYVAKQMKARLREAGLAPVPMIIFAKDGHFALEELAQTGY

SEQ ID NO: 1018951 - protein, 141 aa, Homo sapiens
IPWRPWLEDCRRVPGGRTANGTRLRSHAPAALRQHCPLSYECGRCEASHLLTPGDNAQQLQADFGPESNRVSLAASAASTGLFLQHWWRETRCHQAQEILPSPSYPRSLGARRVSQRREGGTLHWFKWPVLRDAAMDPREY

SEQ ID NO: 1018952 - protein, 155 aa, Homo sapiens
PNLLYQKFVKMATLTSGGEKPNKDLESCSDDDNQGSKSPKILNDEMLLQACEGRTAHKAARLGITMKAKLARLEAQEQAFLARLKGQDPGAPQLQSESKPQGPGQACSPRGPGAGLPGSSQRPGPWGPSTAVREQAPQKKEKEKEAERGGRSYSI

SEQ ID NO: 1018953 - protein, 78 aa, Homo sapiens
AGCASWVGVAMASRVLSAYVSRLPAAFAPLPRVRMLAVARPLSTALCSAGTQTRLGTLQPALVLAQVPGRVTQLCRQL

SEQ ID NO: 1018954 - protein, 118 aa, Homo sapiens
MASRVLSAYVSRLPAAFAPLPRVRMLAVARPLSTALCSAGTQTRLGTLQPALVLCCSVTRGDFACLLCAMVSVDLVPWWGVGGACGASWWLLPAASAGCDPGGAAGSLRSPRCLKVFS

SEQ ID NO: 1018955 - protein, 115 aa, Homo sapiens
SGSCFVPGRLSVQLEGVSRLQGVGPPLRFWSFWVFLQPQPHWDLLPFRGGYEFGAGGQISEPKGGNGKTWAAEENPGGWGELMMFHPTPPMAPLPNLSKFGVFKVLEASPDPASC

SEQ ID NO: 1018956 - protein, 87 aa, Homo sapiens
SIESALLRNGTTGPQRPQGSSSPAAGSKRSAMSAFRNSFEGAKEKEIKAGTERGRKGGKERKKEKKRKKQKEQAKAERVMGGGCWFQ

SEQ ID NO: 1018957 - protein, 168 aa, Homo sapiens
SLQAYRLYNSSLPGDSCPDLKLHPATTRKDVSRIELASEDGVSVSCDVPTGLCSLTLGLWQHGISAGLLGTNDNEAGNELMLPDGSMARSLEELSLAWQVGGDCRATEKPQQEQACPGQLPACWAFFEGPHSSLRDCFRVVDPTPFLSLCVQVPCGTQELQPACNLAA

SEQ ID NO: 1018958 - protein, 144 aa, Homo sapiens
  misc_feature (8)..(8): Xaa can be any naturally occurring amino acid
  misc_feature (36)..(36): Xaa can be any naturally occurring amino acid
  misc_feature (42)..(42): Xaa can be any naturally occurring amino acid
  misc_feature (122)..(124): Xaa can be any naturally occurring amino acid
  misc_feature (140)..(140): Xaa can be any naturally occurring amino acid
ESEHPVSXLRPRDLLSQWDPGEMSAPDQVQLAGDKXRRWTSXSHWVWWSLSGSLVIVIVCSTVGLIICVKRRKPRGDVVKVIVSVQRKRQEAEGEATVIEPCRPLRTSPRWPWRRQNPSLFXXXLTTNLHTLHPYARDTXSNGC

SEQ ID NO: 1018959 - protein, 445 aa, Homo sapiens
MEAAVAPGRDAPAPAASQPSGCGKHNSPERKVYMDYNATTPLEPEVIQAMTKAMWEAWGNPSSPYSAGRKAKDIINAARESLAKMIGGKPQDIIFTSGGTESNNLVIHSVVKHFHANQTSKGHTGGHHSPVKGAKPHFITSSVEHDSIRLPLEHLVEEQVAAVTFVPVSKVSGQTEVDDILAAVRPTTRLVTIMLANNETGIVMPVPEISQRIKALNQERVAAGLPPILVHTDAAQALGKQRVDVEDLGVDFLTIVGHKFYGPRIGALYIRGLGEFTPLYPMLFGGGQERNFRPGTENTPMIAGLGKAAELVTQNCEAYEAHMRDVRDYLEERLEAEFGQKRIHLNSQFPGTQRLPNTCNFSIRGPRLQGHVVLAQCRVLMASVGAACHSDHGDQPSPVLLSYGVPFDVARNALRLSVGRSTTRAEVDLVVQDLKQAVAQLEDQA

SEQ ID NO: 1018960 - protein, 445 aa, Homo sapiens; identical to SEQ ID NO: 1018959

SEQ ID NO: 1018961 - protein, 75 aa, Homo sapiens
MTYLLWIGHIGTETTGYDDRLIIRSLRYYYDVSIPVSHQDNELRRWSLACLPMCLIKAPVRHRSITDIGVQDLIT

SEQ ID NO: 1018962 - protein, 75 aa, Homo sapiens
RVLCHRVMLNPQHVQLHFGNEVRPDHMAMKQIWLARWFGEPAPLHERGSVKEEEEVGAEPPPHPTPLPSPDIYVK

SEQ ID NO: 1018963 - protein, 118 aa, Homo sapiens
  misc_feature (84)..(84): Xaa can be any naturally occurring amino acid
  misc_feature (91)..(91): Xaa can be any naturally occurring amino acid
  misc_feature (106)..(106): Xaa can be any naturally occurring amino acid
  misc_feature (108)..(108): Xaa can be any naturally occurring amino acid
CRGSVKEFYASVEWEDDVSQDRRDVVRGLPLYKQGASHGENAVKLSSNENPFEPLPSVVEAVTRTLPRFIRYPLMSAEEVRSTXAGHFGVXREPGGGGGWIDGGSXSXHAMPWLVPVT

SEQ ID NO: 1018964 - protein, 86 aa, Homo sapiens
GTRTESRCVHPHHQIHQMDQEANEQWSLLRSLCLCLPPVPVLAAAAPDGLLTSLPFPPPALPLLNGARWFDQGHVSIFKKSQGGEE

SEQ ID NO: 1018965 - protein, 92 aa, Homo sapiens
EDTCSNADFSFGEGDANGTCFTECRIHGVAGDNGRRLCKPISFGNDATGGVFPLFNKFHGKRHSAGESEADTFNGDLPLFRFAQYTLVNGCH

SEQ ID NO: 1018966 - protein, 82 aa, Homo sapiens
EWNCWAIGKLCETSDTSAGRLEALDPQGLDLRALSRFPVHQCTHARSALHPGNFASTAFQIPAGLVMNQPTREQSETHLNGI

SEQ ID NO: 1018967 - protein, 128 aa, Homo sapiens
RSPAKRFILALTTGAERLYNNIFQFHQLRQIAKELNIQGADFENLIGSLNDQGYLLKKGPKVYQLQTKEKDFTKLGPPGVYAELKPSQERKAGTHRQTDTHTPPPTHTHTHTHTVKYCSLKNDVPKVL

SEQ ID NO: 1018968 - protein, 34 aa, Homo sapiens
  misc_feature (12)..(12): Xaa can be any naturally occurring amino acid
  misc_feature (34)..(34): Xaa can be any naturally occurring amino acid
MGGSLEPKSSKXAVSYDYTIALQPGPQSETLTPX

SEQ ID NO: 1018969 - protein, 66 aa, Homo sapiens
  misc_feature (2)..(2): Xaa can be any naturally occurring amino acid
  misc_feature (40)..(40): Xaa can be any naturally occurring amino acid
AXSSRGEELQDEKCLSSCWLMEANPLIVLLLIDRAEGFVXFEGSIMGTCTCHTLTVTGGTEKVRLL

SEQ ID NO: 1018970 - protein, 373 aa, Homo sapiens
WDSYDVVAFILRQVIEKERHMLVECEESSIYHALAFLQGRSGMRKRTQVKIRNVTSNHRASDTVVCEGRPQVLSGRFMYGPLDVVTLTGEKVDVYIMTQPLSGKWIHFGTEVTNSSGRLTFPVPPERALGIGVYPVRMVVRGDHTYAECCLTVVARGTEAVVFSIDGSFTASVSIMGSDPKVRAGAVDVVRHWQDSGYLIVYVTGRPDMQKHRVVAWLSQHNFPHGVVSFCDGLTHDPLRQKATVFWQSPGGSEVETGYIRGPGYGVSPHNVGRDIRPAAWRRDHGGKNLTYVARPRRKAKGSSASHVVQRANVGPAASWNSGTNTACSSEPRHVSWHTHHAVGAPGHVAQNNVRHDDQQDRSGATHTRRTER

SEQ ID NO: 1018971 - protein, 121 aa, Homo sapiens
  misc_feature (10)..(10): Xaa can be any naturally occurring amino acid
ILGCGEELAXVVGVEILEDQRGQLRRGGVRLATGVPDMIHLQIDQDRGQHHGDHHGDDDDHEGGLGHQATVIAPETGQAVTDSRHHRCVHPVQLVTVRGWNTAATPWWSCASAVGRTVTAS

SEQ ID NO: 1018972 - protein, 96 aa, Homo sapiens
PEALSKTVNFKGNRIDIGGHRFFSKIDTVMERWLNILPPEKTGGETFTLKHQGKSRPFEGDADGVDPETTDDVMLEYCSNPVVELCISSWTYSDCV

SEQ ID NO: 1018973 - protein, 86 aa, Homo sapiens
  misc_feature (23)..(23): Xaa can be any naturally occurring amino acid
ALPPGSRSTLAMDPTGLPAPGMXPFCHLWGPVTLVAAGAAQPAASMVMFPHFPALPPHCPPSPRTSQYMPANDGPQGYPDYPDQSP

SEQ ID NO: 1018974 - protein, 103 aa, Homo sapiens
QALPPGRLTTTLPRGPRLRRTRRRWRRGRGRPRRMEERKEEGEAEIQEHGPEHWFSKWERQCLAEAEQDEQLPPELQEDGWLCLPAACPDAQCSMNACGTFFP

SEQ ID NO: 1018975 - protein, 44 aa, Homo sapiens
EIRLFKGAGDRNCGFGSAGGRVATGAITNARVDGLRWLWSFLLC

SEQ ID NO: 1018976 - protein, 117 aa, Homo sapiens
MGRRPAAFLMQRKPSGWDGSGARPLRMAPPSTWLEALPIAGAGLRGGRFGGRQAHNGGGMAQADALGAGVRLAPMVRGAAGYGGGCRSGRCCARGEFEHGHGLHQVLGLLVQAGGGR

SEQ ID NO: 1018977 - protein, 95 aa, Homo sapiens
MFDVDSKDPTLGMSCPPPAFVEQSFLQKVKSILTPEGVFILNLVCRDLGLKDSVLAGLKAVFPLLYVRRIEGEENEILFCQLHPEQKLATFGDNN

SEQ ID NO: 1018978 - protein, 95 aa, Homo sapiens; identical to SEQ ID NO: 1018977

SEQ ID NO: 1018979 - protein, 262 aa, Homo sapiens
KAANSLEAFIFETQDKLYQPEYQEVSTEEQREEISGKLSAASTWLEDEGVGATTVMLKEKLAELRKLCQGLFFRVEERKKWPERLSALDNLLNHSSMFLKGARLIPEMDQIFTEVEMTTLEKVINETWAWKNATLAEQAKLPATEKPVLLSKDIEAKMMALDREVQYLLNKAKFTKPRPRPKDKNGTRAEPPLNASASDQGEKVIPPAGQTEDAEPISEPEKVETGSEPGDTEPLELGGPGAEPEQKEQSTGQKRPLKNDEL

SEQ ID NO: 1018980 - protein, 277 aa, Homo sapiens
  misc_feature (194)..(195): Xaa can be any naturally occurring amino acid
KAANSLEAFIFETQDKLYQPEYQEVSTEEQREEISGKLSAASTWLEDEGVGATTVMLKEKLAELRKLCQGLFFRVEERKKWPERLSALDNLLNHSSMFLKGARLIPEMDQIFTEVEMTTLEKVINETWAWKNATLAEQAKLPATEKPVLLSKDIEAKMMALDREVQYLLNKAKFTKPRPRPRPPKKGEKFGGGXXPEDKNGTRAEPPLNASASDQGEKVIPPAGQTEDAEPISEPEKVETGSEPGDTEPLELGGPGAEPEQKEQSTGQKRPLKNDEL

SEQ ID NO: 1018981 - protein, 98 aa, Homo sapiens
GRVPPMRLPLGRKKGAKLSLEEKRVFNQKRVSKKFQKKYDERKKNAKITSFLEEQFQQGKLFGCIASRPGQCGRANGYVLKGKKLEFYFRKIKAPKGK

SEQ ID NO: 1018982 - protein, 484 aa, Homo sapiens
EDELEGVRGGLWRWSRSFVPASSSQVMTFTGDLRLMFAFQVQGAIMVSSVVEVVIGLLGLPGALLNYIGPLTVTPTVSLIGLSVFQAAGDRAGSHWGISACSILLIILFSQYLRNLTFLLPVYRWGKGLTLLRIQIFKMFPIMLAIMTVWLLCYVLTLTDVLPTDPKAYGFQARTDARGDIMAIAPWIRIPYPCQWGLPTVTAAAVLGMFSATLAGIIESIGDYYACARLAGAPPPPVHAINRGIFTEGICCIIAGLLGTGNGSTSSSPNIGVLGITKVGSRRVVQYGAAIMLVLGTIGKFTALFASLPDPILGGMFCTLFGMITAVGLSNLQFVDMNSSRNLFVLGFSMFFGLTLPNYLESNPGAINTGILEVDQILIVLLTTEMFVGGCLAFILDNTVPGSPEERGLIQWKAGAHANSDMSSSLKSYDFPIWDGHSKKNYLSEIHSYLPSLQRIFFKFKRSDCNSRRHSRKYRNCICVHQGL

SEQ ID NO: 1018983 - protein, 283 aa, Homo sapiens
ARAGPLSSHPLFSSGTAQTCAPKMRAQEDLEGRTQHETTRDPSTPLPTEPKFDMLYKIEDVPPWYLCILLGFQHYLTCFSGTIAVPFLLAEALCVGHDQHMVSQLIGTIFTCVGMFCTLFGMITAVGLSNLQFVDMNSSRNLFVLGFSMFFGLTLPNYLESNPGAINTGILEVDQILIVLLTTEMFVGGCLAFILDNTVPGSPEERGLIQWKAGAHANSDMSSSLKSYDFPIWDGHSKKNYLSEIHSYLPSLQRIFFKFKRSDCNSRRHSRKYRNCICVHQGL

SEQ ID NO: 1018984 - protein, 598 aa, Homo sapiens
MRAQEDLEGRTQHETTRDPSTPLPTEPKFDMLYKIEDVPPWYLCILLGFQHYLTCFSGTIAVPFLLAEALCVGHDQHMVSQLIGTIFTCVGITTLIQTTVGIRLPLFQASAFAFLVPAKAILALERWKCPPEEEIYGNWSLPLNTSHIWHPRIREVQGAIMVSSVVEVVIGLLGLPGALLNYIGPLTVTPTVSLIGLSVFQAAGDRAGSHWGISACSILLIILFSQYLRNLTFLLPVYRWGKGLTLLRIQIFKMFPIMLAIMTVWLLCYVLTLTDVLPTDPKAYGFQARTDARGDIMAIAPWIRIPYPCQWGLPTVTAAAVLGMFSATLAGIIESIGDYYACARLAGAPPPPVHAINRGIFTEGICCIIAGLLGTGNGSTSSSPNIGVLGITKVGSRRVVQYGAAIMLVLGTIGKFTALFASLPDPILGGMFCTLFGMITAVGLSNLQFVDMNSSRNLFVLGFSMFFGLTLPNYLESNPGAINTGILEVDQILIVLLTTEMFVGGCLAFILDNTVPGSPEERGLIQWKAGAHANSDMSSSLKSYDFPIGMGIVKRITFLKYIPICPVFKGFSSSSKDQIAIPEDTPENTETASVCTKV

SEQ ID NO: 1018985 - protein, 84 aa, Homo sapiens
GGMGTKSKDKKLFGTNLEQEDEFEDPNIDGEEEKLQPPPQGSTPFAHFKSPPKPFLPFAFNLPLPPGPPGPSAPDEKEEKDFDS

SEQ ID NO: 1018986 - protein, 137 aa, Homo sapiens
MPSLTVHSCRTILVSLSIWTKWEIHCPWAKCSWQGQNIGVGIPRSPGWTVPDILNDGKPRPQFIGGPPHQVWLSDPGAWGTNITLNPQASQSLEQYISVREPRSCRKMTECKSNVRGKKHPADSETNRTHLSMPLNK

SEQ ID NO: 1018987 - protein, 137 aa, Homo sapiens; identical to SEQ ID NO: 1018986

SEQ ID NO: 1018988 - protein, 200 aa, Homo sapiens
  misc_feature (170)..(171): Xaa can be any naturally occurring amino acid
  misc_feature (176)..(176): Xaa can be any naturally occurring amino acid
  misc_feature (198)..(198): Xaa can be any naturally occurring amino acid
LSESEGPSACVCPGHRGGRWAGPLYRWKTGASGRPWWPRRAVMAAPAAPSPPPRGSRAGPVVVVAPGPPVTTATSAPVTLVAPGEARPAWVPGSAETSAPAPAPAPAPAPAVTGSTVVVLTLEASPEAPKPQLPSGPESPEPAAVAGVETSRALAAGADSPKTRGGSTLXXPKTRXPHRDPYQDPFQNGSWAALTAKXPA

SEQ ID NO: 1018989 - protein, 201 aa, Homo sapiens
  misc_feature (170)..(171): Xaa can be any naturally occurring amino acid
  misc_feature (176)..(176): Xaa can be any naturally occurring amino acid
  misc_feature (198)..(198): Xaa can be any naturally occurring amino acid
GWPRREARGAAPSAASPAGGCEGLARWAMETGTAPLVAPPRRHGAPAAPSPPPRGSRAGPVVVVAPGPPVTTATSAPVTLVAPGEARPAWVPGSAETSAPAPAPAPAPAPAVTGSTVVVLTLEASPEAPKPQLPSGPESPEPAAVAGVETSRALAAGADSPKTRGGSTLXXPKTRXPHRDPYQDPFQNGSWAALTAKXPAC

SEQ ID NO: 1018990 - protein, 135 aa, Homo sapiens
EGLLCVGGCLRVFSLLLAARGFRGGLCPCPMLCRACACVVPPPCLFPWFLAPSRCGPGAPPCGEFRGFTPPSPVATGLWGVTSRVVPPVFPGCAWNLGRRCQTDVGPQLDAPRGGSTAIGGPHTRCQLFCAALEG

SEQ ID NO: 1018991 - protein, 33 aa, Homo sapiens
MGKRWRAGSERFGHPAGRLSSRAIPASSSASTP

SEQ ID NO: 1018992 - protein, 51 aa, Homo sapiens
GVRSVCIAKPEYSYNDKVPKAFIINDLMICARWSPPRSLKTSYTARPFCRL

SEQ ID NO: 1018993 - protein, 112 aa, Homo sapiens
MCKLCCTLTYAMTPGMPGKVGGSLLPGPVRGLTPSYPKGNLPAGFYALSKRKPFWNFFLGQFSCGLPGLYFHVGSPPDVGEQLASLLSSMPIRTLAFDLAVDFEIRIWKFLN

SEQ ID NO: 1018994 - protein, 129 aa, Homo sapiens
TKQETTGERGARQTLKRRTGWGRAHWGSPADGDTNRQALAEGSCAGLFINRITLECSSPGRAAQVGGRIQPEGRDGEAEFQSNDQGRGGAWSAHPGRTNPPPWVMNHEPKIVKRLGCWRWGQAGRLLLK

SEQ ID NO: 1018995 - protein, 128 aa, Homo sapiens
TKQETTGERGARQTLKRRTGWGRAHWGSPADGDTNRQALAEGSCAGLFINRITLECSSPGRAAQVGGRIQPEGRDGEAEFQSNDQGRGGAWSAHPGRTNPTIQQPSLFTAFCSLLTTQGGGARPAACY

SEQ ID NO: 1018996 - protein, 111 aa, Homo sapiens
  misc_feature (76)..(76): Xaa can be any naturally occurring amino acid
VGIKRLGGPHPFSSSPHLMTGEIWNASWGGPAEKFYPTKGKGTWKVDNAPPIGVPPGKCPKAGQQGQPLQPQQPPXGEQSRFRETQSFRLGSPPSGPEFGRSKKLPPGERV

SEQ ID NO: 1018997 - protein, 33 aa, Homo sapiens
ETPVFICATAGVSPGTKKPSAWCSLPDPPSITI

SEQ ID NO: 1018998 - protein, 248 aa, Homo sapiens
ECKEIQGSWRGTSESQPKRKKQRQKRHQERQRCEGGKEQESRKETQEEGAASPVNTEEHLFAVKIDLPRHPETMDIIFGRNRKEQLEPVRAKVTGKIPAWLQGTLLRNGPGMHTVGESRYNHWFDGLALLHSFTIRDGEVYYRSKYLRSDTYNSNIEANRIVVSEFGTMAYPDPCKNIFSKAFSYLSHTIPDFTDNCLINIMKCGEDFYATSETNYIRKINPQTLETLEKVDYRKYVAVNLGNVTSPL

SEQ ID NO: 1018999 - protein, 132 aa, Homo sapiens
MPILKGRSEVGLNSAFLFFFFLIFFQFYLYTYTMEYYSAIKNEIMYFAATCMELEATILSEVTQDWKTKCWHILAYKWKLCCGYTGPPEWYNGHWRLRRSEGGSGVRNEKLPIGYSVHCLGDGYTKSPDFTI

SEQ ID NO: 1019000 - protein, 91 aa, Homo sapiens
AQTPTTSKVPPLLESPIATGSFMFKLSVSSSVVGCCCWGILHAKDLYPTLPLLQSKLSAVSLRGMGSPSTDASASDVHGNFAFEGIGNEDL

SEQ ID NO: 1019001 - protein, 80 aa, Homo sapiens
GTQAQGSVRVAAALDTAWALGRFKRMLAAQGGGFRFGPSPVLGKSRRTPAAVALRPGAGGNFGAPKWDPLGPGAPGGPRA

SEQ ID NO: 1019002 - protein, 105 aa, Homo sapiens
GTQAQGSVRVAAALDTAWALGRFKRMLAAQGGGFRFGPSPVLGKSRRTPAAVALRPGAGGAAGARKWHRGAGPGASAGAGSARARGRAQPRWGTAPPGGGRKTAG

SEQ ID NO: 1019003 - protein, 162 aa, Homo sapiens
GLKFKALSGWPRRWTRLGPLAALNGFWRRRGVDSGLARALCLGSPAERRQLLPCAREQEELLAPANGTVELVRALPLALVLHELGAGRNRAGEPLRLGVGAKLLVNVGQRLPRGTPWLRVHRDGPALNGPQNRALQEGLVLSDRGPFAAPSPFAELVFAAAV

SEQ ID NO: 1019004 - protein, 347 aa, Homo sapiens
MALMLSLVLSLLKLGSGQWQVFGPDKPVQALVGEDAAFSCFLSPKTNAEAMEVRFFRGQFSSVVHLYRDGKDQPFMQMPQYQGRTKLVKDSIAEGRISLRLENITVLDAGLYGCRISSQSYYQKAIWELQVSALGSVPLISITGYVDRDIQLLCQSSGWFPRPTAKWKGPQGQDLSTDSRTNRDMHGLFDVEISLTVQENAGSISCSMRHAHLSREVESRVQIGDTFFEPISWHLATKVLGILCCGLFFGIVGLKIFFSKFQCKREREAWAGALFMVPAGTGSEMLPHPAASLLLVLASRGPGPKKENPGGTGLEKKARTGRIERRPETRSGGDSGSRDGSPEALRF

SEQ ID NO: 1019005 - protein, 126 aa, Homo sapiens
MAALGAGANPAPAAGPGQVLTSPARATHAEDGNTCPAMSLGRLLRRASSKASDLLTLTPGGSGSGSPSVLDGEIIYSKNNVCVHPPEGLQGLGEHHPGEPGQARLQGRTAQVIFRARALKALGHST

SEQ ID NO: 1019006 - protein, 247 aa, Homo sapiens
MSLGRLLRRASSKASDLLTLTPGGSGSGSPSVLDGEIIYSKNNVCVHPPEGLQGLGEHHPGYLCLYMEKDEMLGATLILAWVPNSRIQRQDEEALRYITPESSPVRKAPRPRGRRTRSSGASHQPPRRSCGYPDPKDEDILVVAQSVPDRCSPALRQRMREKLAQGLGVDGAQPARKPACSPSGDLVDRQPEDVTEEGGTEGLSRGQKMVLEVNDGGDRDYYEKTKHYLACFDIKGGAKTAVERTDR

SEQ ID NO: 1019007 - protein, 74 aa, Homo sapiens
FPGPRWFIPILRVLLKARESKSPSGAPPERSFPESLKRTPWKTLGSCFSVNPFAKALGRDPLFFPARDSQPRGG

SEQ ID NO: 1019008 - protein, 124 aa, Homo sapiens
FRARLAPVGDLEEIQRGHPKYLHKAVFRGLLPEKAGPVIKVIPSIFNLVVKFRSQVISQAWGPPGGPRGAKPPNFALMQQSYNTFKDYSPFFFKMVAKLVNPGYQPPLEDFFLGINFNNYYQDP

SEQ ID NO: 1019009 - protein, 162 aa, Homo sapiens
  misc_feature (69)..(69): Xaa can be any naturally occurring amino acid
  misc_feature (73)..(73): Xaa can be any naturally occurring amino acid
  misc_feature (108)..(108): Xaa can be any naturally occurring amino acid
  misc_feature (110)..(110): Xaa can be any naturally occurring amino acid
  misc_feature (116)..(116): Xaa can be any naturally occurring amino acid
  misc_feature (146)..(146): Xaa can be any naturally occurring amino acid
  misc_feature (160)..(160): Xaa can be any naturally occurring amino acid
TVTAEAVSQASSHPENSEEEECRPFTIPQVLRTKVPREGQEEDAQDQEDDADEEAAKPDHYVQAACSAXREGXSQAHGLSRKKGYRHDSSQQWPAAPEAMGRAVDNPXTXEECTNXVQDQPHRRTMADRKRSGISHPETCQGQWGXGPDSQAGSIAGASXWG

SEQ ID NO: 1019010 - protein, 184 aa, Homo sapiens
  misc_feature (91)..(91): Xaa can be any naturally occurring amino acid
  misc_feature (95)..(95): Xaa can be any naturally occurring amino acid
  misc_feature (130)..(130): Xaa can be any naturally occurring amino acid
  misc_feature (132)..(132): Xaa can be any naturally occurring amino acid
  misc_feature (138)..(138): Xaa can be any naturally occurring amino acid
  misc_feature (168)..(168): Xaa can be any naturally occurring amino acid
  misc_feature (182)..(182): Xaa can be any naturally occurring amino acid
KVPLHPGESLPYHSVYSKDEYDDTYDGTKVGANDADSDDELISRRPFTIPQVLRTKVPREGQEEDAQDQEGDADEEAAKPDHFVQAACSAXREGXSQAHGLSRKKGYRHDSSQQWPAAPEAMGRAVDNPXTXEEGTNXVQDQPHRRTMADRKRSGISHPETCQGQWGXGPDSQAGSIAGASXWG

SEQ ID NO: 1019011 - protein, 84 aa, Homo sapiens
KFLPSSDPPASASQSDGITGVASAPAFSSIFACILRHTFARHLINYIILPHVPFRQGIQMVRVLPASRGGSKGASALTGAGRGG

SEQ ID NO: 1019012 - protein, 134 aa, Homo sapiens
  misc_feature (1)..(1): Xaa can be any naturally occurring amino acid
  misc_feature (29)..(29): Xaa can be any naturally occurring amino acid
  misc_feature (36)..(36): Xaa can be any naturally occurring amino acid
  misc_feature (41)..(41): Xaa can be any naturally occurring amino acid
  misc_feature (55)..(55): Xaa can be any naturally occurring amino acid
  misc_feature (58)..(60): Xaa can be any naturally occurring amino acid
XGECESGLVNNFFWVACLEDFIENARLFXFETFCRXPQCFXINMLADKLDITPEXAEXXXVNLIRNAKLDAKIDSKLGHVVMGNNAVSPYQQVIEKTKSLSFRSQMLAMNIEKKLNQNSRSEAPKWATQDSGFY

SEQ ID NO: 1019013 - protein, 73 aa, Homo sapiens
WQEDIGLGASQAPPPQEAIAFGPPGPVPIGLPARPRGWNPAPSGTLQTRAPPSDSVLVFPLTFPEVPVPPTRI

SEQ ID NO: 1019014 - protein, 103 aa, Homo sapiens
WQEDIGLGASQAPPPQEAIAFRPPGPVPIGLPARPRGWNPAPSGTLQVRGPLGMGGRGDLPGEKGPFIFFFWLPPIQTRAPPSDSVLVFPLTFPEVPVPPTRI

SEQ ID NO: 1019015 - protein, 75 aa, Homo sapiens
YFKFHMSQRRTHVAKTILSKKNKAGDITIPDFKLCYFQAYSNQNSMVLIPKQTYRPMEQNRDFRNNTTHLQPSDL

SEQ ID NO: 1019016 - protein, 112 aa, Homo sapiens
LEQTRLGTVALLQLMETPKLAGQEDPVRMQQLKMKVIKTMEAISEVFQDLRFDAELPSDGGSPGMPPAKWKTGGMENNPALTASWLGLGPPGLLTFLQFQTPPPIKSSSSVK

SEQ ID NO: 1019017 - protein, 86 aa, Homo sapiens
MHERTSSREEVGRERLNYGHTLAHAIEAHKHFTWRHGEADAVGMVFAAELSHRYLGLSDEVVARTRTILSEIGLPVTCDEIKWADP

SEQ ID NO: 1019018 - protein, 108 aa, Homo sapiens
WLAHGWNEFLLLTTANLCGRNTWIKFKNPLMPAAAWALTLVSVLTKEYEDAISIATASALSVVTVAFIQEYRSEKSLEELTKLVPPECNCLREGNSSTCCSRTVRDPL

SEQ ID NO: 1019019 - protein, 112 aa, Homo sapiens
MESSRGPKTLFHHPFIGMKFAGIHDPPPPAIMKCDIHIRKDLYAPNVLSGGPPMYPGIAARMQKEIPALAPSPMKIKIIAPPERKYFVWIGGPILASLSPFPADVDQQTGIQ

SEQ ID NO: 1019020 - protein, 70 aa, Homo sapiens
TPETESCQPAGIPHQTTGTPQGNRSSSTLSANPPEELVDFVVLATSTQDPATGRTAQRWGGGSLKKSHWF

SEQ ID NO: 1019021 - protein, 110 aa, Homo sapiens
TAAGIRLNEMELFLFGLQNSLKIEGLCLRGPSPWGSPRGWGRVFNAQPGAGGPWPPPVAHTLFGSLCPQYLSVLDREPGLRPALGRLWQEVLSPIPPFGAPPTFAQLSRC

SEQ ID NO: 1019022 - protein, 180 aa, Homo sapiens
  misc_feature (32)..(32): Xaa can be any naturally occurring amino acid
AFYFIFILRQCLTLSPRLWSAMAGGTAASTSXASSCAPISASQVAETTEKHHHAQLIFIFFVEMGFCHVAQAGLELLSSSSPSASASQSARIIGMSHCACPHCSFDLHFRNDSDGEHLFRCLLATCTPSLGKHLKAFATLIFLEMGFCCVAQASPKLLGSSDPPASASHIAGTTGAHHHS

SEQ ID NO: 1019023 - protein, 305 aa, Homo sapiens
MSVDPACPQSLPCFEASDCKESSPMPVICGPEENYPSLQMSSAEMPHTETVSPLPSSMDLLIQDSPDSSTSPKGKQPTSAENSVAKKEDKVPVKKQKTRTVFSSTQLCVLNDRFQRQKYLSLQQMQELSNILNLSYKQVKTWFQNQRMKSKRWQKNNWPKNSNGVTQKASAPTYPSLYSSYHQGCLVNPTGNLPMWSNQTWNNSTWSNQTQNIQSWSNHSWNTQTWCTQSWNNQAWNSPFYNCGEESLQSCMQFQPNSPASDLEAALEAAGEGLNVIQQTTRYFSTPQTMDLFLNYSMNMQPEDV

SEQ ID NO: 1019024 - protein, 66 aa, Homo sapiens
  misc_feature (17)..(17): Xaa can be any naturally occurring amino acid
AARHVCEKTTEGSQEGXQAPTIETVVLYTEETRSDRSGQRIIDRDRKRHPGSPRIDTKDVKRITSQ

SEQ ID NO: 1019025 - protein, 157 aa, Homo sapiens
MDEQALLGLNPNADSDFRQRALAYFEQLKISPDAWQVCAEALAQRTYSDDHVKFLCFQVLEHQVKYKYSELTTVQQQLIRETLISWLQAQMLNPQPEKTFIRNKSRPSLRLGFLVQKYLTKWPKFYFDILSVVDLNPRGVDLYLGILMAIDSEFGGS

SEQ ID NO: 1019026 - protein, 188 aa, Homo sapiens
LCCDFMCYVRLPYMHVLLCVSVVYSVFPLVYLCLWLVCTVLLFVVCLCPVHAVVCSDLCRNNMRCALCVVYLHYTCAVSLCRTPVLLVQGVVWPVWASWVCVCAKGPRRPAVCLCQGPPVPARRAVFPQQVCELVVCAMSAAWRLRVRRGVAAPRRGARVLASGRGGCAPAGRAGAGGGWRRCGARRP

SEQ ID NO: 1019027 - protein, 122 aa, Homo sapiens
VSLGLYFPDSLLSYLSFSSSLQELRTAPFLFEAGLSMRTLGLTSMEDHPSLPRARNPMAVFHKPAGLLLFSLFNYTSLGVAYMLHLHFLTPSTPQSTILLLRLLTWPLSSTLFSTPTCPGAH

SEQ ID NO: 1019028 - protein, 174 aa, Homo sapiens
MKVGEIEHFPVPIQGLVTSVAPSLVALGFGRLVSGLTDGYRLDSPPPSLSSPTLSPAPWLIPSILYKPAPTRVQGRRLSTVGHPGSLRLHRLLTLDCKGWVRRQKVGILRQCSRPARDSGEEQQGSLNCHLQVAASSYHGAPRTQLRLAPGFFLVEPVAKQGGDLVYSLLGSLC

SEQ ID NO: 1019029 - protein, 141 aa, Homo sapiens
NDHWKLLHTISYWRSVYIFVCILEYLEYSLPCKKHFTCCFLRWGFTLSPRLEGTGEILAHSDLHFLGSGDPHTSAIQVVETIELCHHRPVSPCWAEFCGDRVLPCCPGSSLTVGLRCSARLGLSKCWGYRHETFSLNSCLI

SEQ ID NO: 1019030 - protein, 46 aa, Homo sapiens
MAEEREAPPVGRGRPRLSASAGLGTPRDALFPDAAPPPASPLDSAA

SEQ ID NO: 1019031 - protein, 107 aa, Homo sapiens
  misc_feature (15)..(15): Xaa can be any naturally occurring amino acid
  misc_feature (26)..(26): Xaa can be any naturally occurring amino acid
  misc_feature (28)..(28): Xaa can be any naturally occurring amino acid
  misc_feature (38)..(39): Xaa can be any naturally occurring amino acid
  misc_feature (49)..(49): Xaa can be any naturally occurring amino acid
  misc_feature (69)..(69): Xaa can be any naturally occurring amino acid
  misc_feature (78)..(78): Xaa can be any naturally occurring amino acid
  misc_feature (81)..(81): Xaa can be any naturally occurring amino acid
  misc_feature (88)..(88): Xaa can be any naturally occurring amino acid
  misc_feature (91)..(91): Xaa can be any naturally occurring amino acid
  misc_feature (94)..(94): Xaa can be any naturally occurring amino acid
  misc_feature (96)..(96): Xaa can be any naturally occurring amino acid
  misc_feature (99)..(99): Xaa can be any naturally occurring amino acid
  misc_feature (107)..(107): Xaa can be any naturally occurring amino acid
LEDPVYTNRIEFDTXYSTDDDIVFEXFXRLRLKGMKDXXYDDQLCWNRXGKKGGDGVGRGEGRIKIPTXNGGLSQPIXPSXNLEASSXKPXTLXPXPPXDTHWTLSX

SEQ ID NO: 1019032 - protein, 112 aa, Homo sapiens
RLDQVRLYGAVHHRGVVELIIARWAEMHLEMCLKDREEEGACMCLNIYDPVVSVEEESVKSKEVVRISYSQPHTNTSHYHSLCPHSFKRRPFGDKAVSLFLSIKKKSKSFSK

SEQ ID NO: 1019033 - protein, 253 aa, Homo sapiens
KAESWAPEGLPTTAPGCAIATSSQPPAQTRDSPSMAPEMDQFYRSTMAIYKSIMEQFNPALENLVYLGNNYLRAFHALSEAAEVYFSAIQKIGERALQSPTSQILGEILVQMSDTQRHLNSDLEVVVQTFHGGLLQHMEKNTKLDMQFIKDSRQHYELEYRHRAANLEKCMSELWRMERKRDKNVREMKESVNRLHAQMQAFVSESQRAAELEEKRRYRFLAEKHLLLSNTFLQFFGRMLADGRLVVSTLWLS

SEQ ID NO: 1019034 - protein, 292 aa, Homo sapiens [sequence omitted]

SEQ ID NO: 1019035 - protein, 35 aa, Homo sapiens
RRRQKGGPWTAKAKPREGKKHEKERKNEERNEGKK

SEQ ID NO: 1019036 - protein, 431 aa, Homo sapiens
MGRLVLLWGAAVFLLGGWMALGQGGAAEGVQIQIIYFNLETVQVTWNASKYSRTNLTFHYRFNGDEAYDQCTNYLLQEGHTSGCLLDAEQRDDILYFSIRNGTHPVFTASRWMVYYLKPSSPKHVRFSWHQDAVTVTCSDLSYGDLLYEVQYRSPFDTEWQTQSRSVTQAGVQWCISACYNLRLPGSSDSPASASQVAGITGTRHHAWLIFVLSVETGFLHVGQAGLELATSGDPPASASQSVGFTGVSHCVRPRGSILEVSETVNPPEGKLWTDRCLCRDTNASQTKAVQIYFNFQPGHPSDGVSPPSVFMEIMESEKFLIPSVPDPKSIFPGLFEIHQGNFQEWITDTQNVAHLHKMAGAEQESGPEEPLVVQLAKTEAESPRMLDPQTEEKEASGGSLQLPHQPLQGGDVVTIGGFTFVMNDRSYVAL

SEQ ID NO: 1019037 - protein, 371 aa, Homo sapiens
MGRLVLLWGAAVFLLGGWMALGQGGAAEGVQIQIIYFNLETVQVTWNASKYSRTNLTFHYRFNGDEAYDQCTNYLLQEGHTSGCLLDAEQRDDILYFSIRNGTHPVFTASRWMVYYLKPSSPKHVRFSWHQDAVTVTCSDLSYGDLLYEVQYRSPFDTEWQSKQENTCNVTIEGLDAEKCYSFWVRVKAMEDVYGPDTYPSDWSEVTCWQRGEIRDACAETPTPPKPKLSKFILISSLAILLMVSLLLLSLWKLWRVKKFLIPSVPDPKSIFPGLFEIHQGNFQEWITDTQNVAHLHKMAGAEQESGPEEPLVVQLAKTEAESPRMLDPQTEEKEASGGSLQLPHQPLQGGDVVTIGGFTFVMNDRSYVAL

SEQ ID NO: 1019038 - protein, 46 aa, Homo sapiens
MRGIYGLAGYIGELSMRFRRLCARSELRSMRMLGSRRAREKRLVKK

SEQ ID NO: 1019039 - protein, 267 aa, Homo sapiens
  misc_feature (207)..(207): Xaa can be any naturally occurring amino acid
MAQAGNRVESSVGRLKLLLAVATAAHVALVFAVAVLLVSEVAPVGALLVVKHPFVVLHQAAQLLGQLQSQVLLGSGLTAVHHHCLCWLVQGGHQLLINEHFADDGVHRGQIQLKHVLQRLHADGVIDTAVGEEGGPQGLFLDLPNQHGADFVSLGEKAPHFPIHFFIEEKPVTGLSDTHLYGLGGTNHIARWTQGDPAGAVARSRAXVVELLAEHALAGIALMGGHVGDLQEHGRNQGDTLQQPQVDVQVEGDLTAPLHLLLLLVAL

SEQ ID NO: 1019040 - protein, 262 aa, Homo sapiens
  misc_feature (4)..(4): Xaa can be any naturally occurring amino acid
  misc_feature (21)..(21): Xaa can be any naturally occurring amino acid
  misc_feature (42)..(42): Xaa can be any naturally occurring amino acid
  misc_feature (63)..(64): Xaa can be any naturally occurring amino acid
  misc_feature (203)..(203): Xaa can be any naturally occurring amino acid
  misc_feature (211)..(211): Xaa can be any naturally occurring amino acid
  misc_feature (227)..(229): Xaa can be any naturally occurring amino acid
GRGXHGGKVAGGKAAVQKLQXKGLSPRFHKWDIDDSQSIRAXRDSGRKEYGGLNVLVNNAAVXXTSDDPTPFDIKAEMTLKTNFFATINMCDELLPIMKPHGRVVNISSLQCLRAFENCSEDLQERFPSETTLQKETWWISMKKFVEDTKNEVHEREGWPNSPYGVSKLGVTVHSRIPPRRPDEQRKPDSTPVNACCPGPVKXDMDGTDSXRTVEEGAETPVYLALXXXEKNEKSEKLVNDKVVQTPVNVCLGGCWLIKDGG

SEQ ID NO: 1019041 - protein, 278 aa, Homo sapiens
MYTRTYGAYLDKAPPPGLPVETIKDLMRHSSNRPRFPSCHIASVSPSICKPRGTFLVTSWWYLVNAGVTFGLGQVSLQAYQTGSLQHRELVSTCWIRDASPKFFCSPHMQHLCAHVECGCIFAQMYRRKPLFCGNSEADQLGKIFDLIGLPPEDDWPRDVSLPRGAFPPRGPRPVQSVVPENGGVGQHSCCWQMLTFNPHKRISAFRALQHSYLHKDEGNPGVSNGVAAMEGRKAAISLLDTERAIIAFISEAMEGPPPSFYRDYFAALMTFPSHLSF

SEQ ID NO: 1019042 - protein, 131 aa, Homo sapiens
  misc_feature (93)..(93): Xaa can be any naturally occurring amino acid
GTPRPSRADPQRLSPQKPIETHGPPRQDPQGRANQKPMETPGPRPAGPEGDEPTESPLETPGPGRQDFKGISQPRRGRQQSCRTQRWSLLPSXGTLKERSARRGFGPPVPAAGAGASGAAAGSPQGLVCDP

SEQ ID NO: 1019043 - protein, 123 aa, Homo sapiens
VVVRAPPHSFKKCKVTGGGAHLFFAFLREALPAPKEEPPRFMTTPSSSPGFRCVATMLPGTFKSSWWALTVCPYAGTTPASRPLTLSLTLKPCCFKGPVVLGGPSYPGCLAVAVLLSRGGFHL

SEQ ID NO: 1019044 - protein, 67 aa, Homo sapiens
  misc_feature (32)..(32): Xaa can be any naturally occurring amino acid
EEPLAGRTWRCQRLNSSIEPAGFQSPRKNLAXLKQSASRWRVVPGEKDLAIPFQYLLPVSLTHDLAS

SEQ ID NO: 1019045 - protein, 151 aa, Homo sapiens
MRDLQRQGSDGWLHDAAKRCPQFCCCAQGTMFSPSHRPACAYQTCTKGPGVGTEPGVGLGGDEDREGTWGLRQGGRGRGGTQSPPGTRGPRRDPAFGMGHQGGCHAGSASPGTSVASHTFLCELGKQVAGVRLGKVGAWDDVQCLWLSDRD

SEQ ID NO: 1019046 - protein, 137 aa, Homo sapiens
  misc_feature (6)..(6): Xaa can be any naturally occurring amino acid
  misc_feature (36)..(36): Xaa can be any naturally occurring amino acid
EKQARXKCVPNLGRCSPSGPKALGYSFFPPKEKPLXWDMGWRAGPKGPQGRPPSGAVPPGGKEGALCAPQEEKALSSGIKHPFTCIPPQKQAPQGPLSVPFPTPWPAPAAHPPKARPPPWECAQELRAGWTFVPKGA

SEQ ID NO: 1019047 - protein, 113 aa, Homo sapiens
PQLILLTSLGLRHASLFICNSHRHKNEFRIYFTNYLAGIWISLTCLIQLQYLCTNRGLRKEAKFAFHPNSNKRQLKPSSLLVAFKPLCYYDIYSLLSTEVLRDTYLLLFSAYF

SEQ ID NO: 1019048 - protein, 120 aa, Homo sapiens
MRGGCLGSGICAPSAHSSLSGPTGPCVFVFRQALLCRGLSFLPPTWAQCPEAGRWRSAADVPSSPRGGKLLLFPSEVWANMPRILPIPFLLSSSDHFQNVTSIILIFMLPEEVRKIFFLV

SEQ ID NO: 1019049 - protein, 184 aa, Homo sapiens
MDAPRRDMELLSNSLVPTRTSGQPESFGLYFVLGVCFGLCHPLPARHQTSRGAPDPRPGAGSAPGPRSSSLEPEEDDEERGGHGDSAGPDETLRARAVQKSGRVPSTSGLQVGGGSWSCAQRPGEARTDPAEILADGQRLVGTSELGQPRQGAGALTIMWARPVKGRVRTTMSKTQLGGSPKPG

SEQ ID NO: 1019050 - protein, 79 aa, Homo sapiens
STQAATRGQRLKGFRGSGTRPHTRAPWVGLALLFTPMLCQLHVLPKTVDVNYFKGKPVLFILKNPDNPPAVGHSFAPSL

SEQ ID NO: 1019051 - protein, 106 aa, Homo sapiens
MIIPLHSILGDRVGPCLKIQIQMKSQVRPDPFEAKQALQPHSCMIGFVWLWMRRPLSNCWLCNQFIFQYSNQIYFIILDGLRYVWILEFPLEQVVTSYWLHNSIIF

SEQ ID NO: 1019052 - protein, 106 aa, Homo sapiens; identical to SEQ ID NO: 1019051

SEQ ID NO: 1019053 - protein, 149 aa, Homo sapiens
LCPSGDHLSAWAPVSPACLPGITGVQVFRVVFSCTFGALPSRLCTLHAFSRLCNGHRVVLGVCQAFSVVVCRSLLLGTSRFRTLCIHWEFISTTSFFATQNSEGTLPIFLSSEHKKECLIPITCLGPVGVLGMLGPLGPQAWGTEPLVW

SEQ ID NO: 1019054 - protein, 99 aa, Homo sapiens
DRDPEEGDAGIYGFSTEGLTGPLNTNQNGRLNTTETHVLTVLEARTQNQGASRATLPPRSLGEQKVLRRDLLPQPFPSCSCLSAISASMATRHLLPGMG

SEQ ID NO: 1019055 - protein, 99 aa, Homo sapiens; identical to SEQ ID NO: 1019054

SEQ ID NO: 1019056 - protein, 287 aa, Homo sapiens
VAARPPVSRMEPRAADGCFLGDVGFWVERTPVHEAAQRGESLQLQQLIESGACVNQVTVDSITPLHAASLQGQARCVQLLLAAGAQVDARNIDGSTPLCDACASGSIECVKLSLSYGAKVNPPLYTASPLHEACMSGSSECVRLLIDVGANLEAHDCHFGTPLHVACAREHLDCVKVLLNAGANVNAAKLHETALHHAAKVKNVDLIEMLIEFGGNIYARDNRGKKPSDYTWSSSAPAKCFEYYEKTPLTLSQLCRVNLRKATGVRGLEKIAKLNIPPRLIDYLSYN

SEQ ID NO: 1019057 - protein, 173 aa, Homo sapiens
MEPRAADGCFLGDVGFWVERTPVHEAAQRGESLQLQQLIESGACVNQVTVDSITPLHAASLQGQARCVQLLLAAGAQVDARNIDGSTPLCDACASGSIECVKLLLSYGAKVNPPLYTASPLHEACMSGSSECVRLLIDVGANLEAHDCHFGTPLHVACAREHLDCVKVLLNAA

SEQ ID NO: 1019058 - protein, 152 aa, Homo sapiens
SASRIAPRSMFERSTFSSRLRRTVRPTRLCSSQKRLIASACMRLSSRTSTLLTGWSSVISRIPDGRSDQFELAAGIHRRRFRHMEIDRRVRAHAQRRTDPHVAIERQVVCRHVIGGERGHVVDARTAQQVRRRHPEIGKRRGQRLVDRAAAQ

SEQ ID NO: 1019059 - protein, 85 aa, Homo sapiens
MGHRAQCPQGTLRKARSNAQCQETFGVTKPCPPKAKAKAKAKKGKGKVYPPSLDAKEPLVSNGAWPTPSLSQARDVTHQGLWFAG

SEQ ID NO: 1019060 - protein, 154 aa, Homo sapiens
IASLRVQSARLDHEHARAGACALAHLPLPGARRSRRDHLGVALLLQQVHARHGLSQHVYEQFLLQLQVVVLLQQHLAFGPLHLRLPAPGGPREQRRPRPRQLALSGPPPAAEHEGLVAEAHARRAVGEAQLGLARVVVQQVEGGQGGHAAQWRP

SEQ ID NO: 1019061 - protein, 103 aa, Homo sapiens
MTSFRWMGAKNLKKGLSQPLQCRPPAPLGLPVVLLPSFVGAGPLWGFVPCFGGQGGGGPQFPGPNSLQKWVKELAPPWAPHPGVLPPPPPALSLPPLLVGTSE

SEQ ID NO: 1019062 - protein, 137 aa, Homo sapiens
  misc_feature (1)..(1): Xaa can be any naturally occurring amino acid
  misc_feature (12)..(12): Xaa can be any naturally occurring amino acid
  misc_feature (129)..(129): Xaa can be any naturally occurring amino acid
XQELGIEPAGGXLNPGPQEAILKELSRHEPRNQQAISMELSSDESCCSTGNNQARDQAGITQLQLAIVKQMSRQKSRSSAGPDQVTLQALITWLISPDHVTEHALSTWLSCTDDVTAACPDDVADQALXTWLILVPN

SEQ ID NO: 1019063 - protein, 153 aa, Homo sapiens
  misc_feature (2)..(2): Xaa can be any naturally occurring amino acid
  misc_feature (13)..(13): Xaa can be any naturally occurring amino acid
  misc_feature (94)..(94): Xaa can be any naturally occurring amino acid
  misc_feature (145)..(145): Xaa can be any naturally occurring amino acid
WXAGIGHEPAGGXLNQGEQEAILKELSRHEPRNQQAISMELSSDESCCSTGNNQARDQAGITQLSWQLSSRGDDRIHAAQMAIVMQMSRQDFTXSAGPDQVTLQALITWLISPDHVTEHALSTWLSCTDDVTAACPDDVADQALXTWLILVPN

SEQ ID NO: 1019064 - protein, 218 aa, Homo sapiens
MPRGRKSRRRRNAKAAEENRNNRKSQASEASETPMAASVAPSTPEEYLSGPEEDTSTLEKASSTPSEASSTALVQKPVTRSNFQGTKKSLLMSILALIFIMGNSAKEALVWKVLGKLGMQPGRQHSIFGDPKKVVTEEFVRRGYLIYKPVPRSSPVEYEFFWGPRAHVESSKLKVMHFVARVRNRCSKDWPCNYDWDSDDDAEVEAILNSGARGYSAP

SEQ ID NO: 1019065 - protein, 42 aa, Homo sapiens
HVSGKITTGWQFTHAERDPLRGEWVQSAGNQGRHIGGDKPGM

SEQ ID NO: 1019066 - protein, 139 aa, Homo sapiens
EFGTSRIEAMTGCRRAPGPLWVGTSSQHRSLLPGTLGPAGSSANPVPRARARARDGDPQPLSVGHGQGFSRLPPPHRSPGVCGRLSPAFCVPSWAPSLPGRRAGPRPPFPLLPRAGASGGPFHLEKHSHSPLPPLYSEL

SEQ ID NO: 1019067 - protein, 134 aa, Homo sapiens
TSTHRTTVPSTMTPMLVTDTEAFWQPQPWFVVVLTATGALLLLALGWLLGRLLQGLAQLLQAPSKPAQALLLNSIQEIKGSIEGFLEAPKMEMSQAPSSVMNVQHFDDRAQDSRPEETTCLTHTQEPGAGSEAK

SEQ ID NO: 1019068 - protein, 86 aa, Homo sapiens
FLKSRVVRKSLARVFPVFNPTPKKNLRKFFKGKKFKPLDLRPKKTRAMGPRVNKPEENLKTQKPQRKERLFPLRKYPVKALGEALS

SEQ ID NO: 1019069 - protein, 163 aa, Homo sapiens
  misc_feature (6)..(6): Xaa can be any naturally occurring amino acid
  misc_feature (124)..(124): Xaa can be any naturally occurring amino acid
  misc_feature (129)..(129): Xaa can be any naturally occurring amino acid
  misc_feature (139)..(139): Xaa can be any naturally occurring amino acid
  misc_feature (144)..(144): Xaa can be any naturally occurring amino acid
FFSAAXDPFFFLLSFWLHFSLFFLLLLQLFLLFLLSLSVFFPLLLSLLFLFFFKFFLTLPVSFSRSLPLISSGDGCFFQDAKLSHPIVSGFSAQSCPPLVFPFFFFLFLSSYQHVYCCRNSEWXLRFAXIFIFISTLLXWKGGXGLSRTAGNWKVDASVRHFW

SEQ ID NO: 1019070 - protein, 54 aa, Homo sapiens
MPGHLSELQPVNEVNTKGQLLARASSGKDPQVPNTAGQVGLLSPGNNLEGWARY

SEQ ID NO: 1019071 - protein, 50 aa, Homo sapiens [sequence omitted]

SEQ ID NO: 1019072 - protein, 205 aa, Homo sapiens
MPGPCPVEGSVGVSGMSTCLGGLKEAHGRPWPKKLIALGPEESAHQMVLWRIQELSDRVWREDQQDPFILADLDILASRHQAFCQALPQVSPFYAVKCNSSPWVLRVLAALGTGFDCASQVELEQVLGLRVAPSRIVYANPWKPASHIRYAAQHGVQLLTFDSEEGAHQGGPAPPQAQDSQSTFPLSTSSGPGWKLLGPGHVCKN

SEQ ID NO: 1019073 - protein, 100 aa, Homo sapiens
MVTISPGKRLGPDAEMGVGDELVVSRVLLRWVRLRVHISALLTGHPGERDEEGGEFFHIASLSPSSPGAPSRLRPPQLCGAGPDPEAEKTGDTPITAICG

SEQ ID NO: 1019074 - protein, 118 aa, Homo sapiens
VLKKIFGKGSKQRQNSIRTNAIPLAVPRLDRSLALGKKGPVASAFDLGQPPLPPLGFWGPLAPLQPQGLSLPFGSKNQTVPCSQPPQGFKVFMPFPKNLFFLAPPPRVGPPNKAVLFP

SEQ ID NO: 1019075 - protein, 359 aa, Homo sapiens
LEERAMRQFAMDAAATAAAQRDTTLIRHSPQPSPSSSFNEGLLAGNHRHQEMESRLKVLHAQILEKDAVIKVLQQLSRKDPGKATQGTLRPAKSVPSIFAAAVGTQGWQGFSTSERQTDAPARQTVDRGPAEEPPATPPLPAHTKHGSRDGSTQTDGPADSTSACLASEPDSLLGCNGSQGNLSGLYSCNQSPGSVRHGGNTDLKEGGLGDPEAWLPHGIPAIVFKCCTSLPPTSNGFVQELREEHSRGARKGCTPRRLLFFDLYFSHDNEEGRGLLLEQEGAEPPPSCQFVFGHEGKGDWILIPKNGWTPAKWSAGIIRPNHGVLWLSMAPASPNCSQSLTAFFRSLRLESFGEPLGV

SEQ ID NO: 1019076 - protein, 67 aa, Homo sapiens
  misc_feature (44)..(44): Xaa can be any naturally occurring amino acid
AHPNSYQATLQAEPSTDRAPPTGPRPPQATSHPSEVKAQGLFFXPPNLPQQTRERRMSLVLRKSIVP

SEQ ID NO: 1019077 - protein, 126 aa, Homo sapiens
ALAVTDLNNQDQAEHAEKSAAQTERVVRTIANNLQKLAEASQEAMTKIGTLDERAQQISGIVNLIREIADQTNLLALNAAIEAARAGEQGRGFAVVADEVRKLAERTAVGPLPISHDWLFQIRYCQ

SEQ ID NO: 1019078 - protein, 196 aa, Homo sapiens
  misc_feature (138)..(138): Xaa can be any naturally occurring amino acid
  misc_feature (180)..(181): Xaa can be any naturally occurring amino acid
  misc_feature (190)..(190): Xaa can be any naturally occurring amino acid
ALPVGSLHGPSSCLSPSSPGPVLFPAGLSRPNSPSQLCLPAQLLPRKSHVRPSSCPAPGSLCKPQDPLSQAFQALPLAPRWHGEAQLLPDSGLSRPSSCLTLASLGHVSACLAAAPDNPGSCLPMASFRLISCLTTAXTRPHSCLSVASAGLTPASQWPLQARLVPRRGLLRPTFALLAXXQAQDFLKSXFASPVG

SEQ ID NO: 1019079 - protein, 190 aa, Homo sapiens
RASRCSVDHSGARGPREGGKSSLQVPAIPPESETAEVLRGHPRSDTTPGRAGPRGSERESAVVAERSVRTPFRHENARDAAGPCAVGRGRLAGPAKPDEPGAGWLQLALPPWPGPEAPASRDPRTPGPNRLSRASDGVDPGRPQFGRFPGSPPVGSGRSGPRASGSLVPWAAPGRWRFSGARGGPPQTFP

SEQ ID NO: 1019080 - protein, 172 aa, Homo sapiens
  misc_feature (25)..(25): Xaa can be any naturally occurring amino acid
  misc_feature (110)..(111): Xaa can be any naturally occurring amino acid
  misc_feature (113)..(113): Xaa can be any naturally occurring amino acid
  misc_feature (116)..(118): Xaa can be any naturally occurring amino acid
EPDSVVFCFLVIEMKKKYDIALQFXFTLIQSFCCDNDINIVRVSGMQRLAQLLGRRPRPRAPPRPETCIVFWSRPFIWTLGKAHGLVEVASYCEESCGNNQWVPYISLQXXLXPSXXXNLFVFSTNKKYNKYLNPLPPQHNPPKQPNPRGPSGAESLETEEEEEEEKGSERP

SEQ ID NO: 1019081 - protein, 143 aa, Homo sapiens
PPLSPAHSPSGYSASGASVVGSPRLLDRPTGPLYISLDCFIEGPLWAPVLFFFLLKDRFLSVLTLGVCGPGHECFLVVDWREALWTLYLGLPSLNWARPITVHRHRSCQGPSPPGSLSAEPSWCCPNLPVAFASEPPPVTCEQ

SEQ ID NO: 1019082 - protein, 236 aa, Homo sapiens
MASDEGKLFVGGLFDTNDSRWTGFQSTDRFECGVRQETKIRDWVVTFENIDDAKDAVMHEWEVCNGRQIRVTSRQVVRQRSRGTVVALRAGASSVGAEDGPWVLYGEGPSYGGNRFESRSGGYGAPNYYSSRSQVVATVTDSGGSYRDSYDSYGKSHSEGATLLWPAVGARYTLVPSPSTLGWTLRPCPLVLAQKRRICPLRSHFYRQDAKKPNENEQKRQGKARTRWDSQLGAIV

SEQ ID NO: 1019083 - protein, 32 aa, Homo sapiens
QCVRSTLIAQTQSHRAPNSKEIPKRGNFCRLL

SEQ ID NO: 1019084 - protein, 137 aa, Homo sapiens
SFLEWRLPPEEGSGKNPISTFGQRKQPGSGRCRESRSFNSRLIRGEPGGNPKIFQKAQLHPHNSSFPYQSFKVNFYPTRGSVVVRDKITTCQKAGGSRGVKTPPRPRSTLEPTPMGTACRLHVGCLHRSDVKIQSRR

SEQ ID NO: 1019085 - protein, 159 aa, Homo sapiens
EGWGWEIPAGAPAEQSPVSPRNSDALGLALRGWDHRGRAAAFATRSAAGLRLPQTARQGPFPPLPHPAKPPSQLPRRRRRDVTFRSPARTWEEVLVPSAAAPVSLVTLVSRWLSRKYPSIIVNCVEEKVRRRQPCAAMGVPAFFRWLSRKYPSIIVNSV

SEQ ID NO: 1019086 - protein, 244 aa, Homo sapiens
VFKLQTSLPINSMVLFDTVGGLKKYDPVWDFSEPFFDLSLKYYGLRKEWLLGMLGAESAKLNNQARFFLEKIDGKIILENKPKKELIKVLIQRGYDSDPVKAWKKAQQKVPDEEENEESAPEKETEKSDSVTDFGPPFNYFLDMPLWYLTKEKKDELCRLRNEKDQELAPLKKKSPSDLWKKDLAPFIEKLEAVEAKEKQNEQVGLPGKGGKAKGKKTQMAEVLPSPGGQKVLPRITIKMKAEA

SEQ ID NO: 1019087 - protein, 72 aa, Homo sapiens
PSCCLLCAVPPLCCPDSRKYVNGSTYQRWQFTLPMMSTLYRLANTVKPRLYEKYKNESCVVARVYNPSYWGG

SEQ ID NO: 1019088 - protein, 176 aa, Homo sapiens
QLALHMQRNSTHAAYATQLTLYATQLALHMQFNSHCVCKSTYCICNSTHCVCNSTRTAYATQLALRMQLNSHCVCNSARTAYATQLLQVLISGHFLFLTTTPSQYFSSLKSAQDEALDSRTCCMPLGLLEVCRLASPRLHPALSCLSCENPVASASPGSDFCLLPSSAAPLGPCLE

SEQ ID NO: 1019089 - protein, 298 aa, Homo sapiens
  misc_feature (11)..(11): Xaa can be any naturally occurring amino acid
FSQAMEMIKTXRDTVTGKTVLLLNYLQTVTFNGLKNNNNISVVYYWLNPTNPIEPRYLRNEDTTCAVCLNFWGRTVHALSHFPSLFFRFVADVFGVGGTSATGVFRLEVTCNNQNFCVARNTGDHNGLVIDPEPQAPGAHTDAVLRIERGGLKSPEASEGEIAPRLLLDGEPLALSGDKWRISPWLLVTDDTATITAFLQMIQEGKGNHLTLNGDQTISLSGLKQRCCLFDAQQKRGLGSENRVDPERGTEPPLRYRTGAALKEVAGLPKGRRHSQIRKREHLLDYGNWGIKWSGMAR

SEQ ID NO: 1019090 - protein, 177 aa, Homo sapiens
LAKITMKDYSKLGVHDMNDRKRLFQLIKIIKIMQEEDKAVSIPERHLQTSSLRIKSQELRSGPRRQLNFDSPADNKDRNASNDGFEMCSLSDFSANEQKSTYLKVLEHMLPDDSQYHTKTGILNATAGDSYVQTEISTSLFSPNYLSAILGDCDIPIIQRISHVSGYNYGIPHSCIR

SEQ ID NO: 1019091 - protein, 68 aa, Homo sapiens
SQDDPLGPQRISWKSPFTLGSELFGSLRPSLKRMTETLWATRCVSALGEAVIIDQLERYLFIQKLGEG

SEQ ID NO: 1019092 - protein, 122 aa, Homo sapiens
MLHEGILPRRALQDHSCQRGYATLENVVKSHSDILSWQMKGQPDSKWTRGIHGITACRVHVERHRRPVILDHCRTWGQFQAVSPILLKRSPQKAHSLVAQVNCAHPIERNCWLGTISCVLYA

SEQ ID NO: 1019093 - protein, 103 aa, Homo sapiens
  misc_feature (12)..(12): Xaa can be any naturally occurring amino acid
MPPRPDSLSIPXIFFLVHTLPPGLFPSGKEALFLIFYSFTWGQLRDLKGPIPNSPRFFFPRETKNDLENGGEGPSGTRAKTGLKVCGAGTVFGIFIPKKFGKG

SEQ ID NO: 1019094 - protein, 143 aa, Homo sapiens
QIDSPTIVSYIKPLVEISYDPAKRATTLALRGLDFADAARIFEGPIYETEDDRFDYPEPRYSTIGLLEGRMVVIIWTETEKGRRIISMRKANEENKPNTDPGWLDPADDAPEWTDEMFDMAAYIVGGKVIREATGYLGPNGMV

SEQ ID NO: 1019095 - protein, 70 aa, Homo sapiens
  misc_feature (23)..(23): Xaa can be any naturally occurring amino acid
  misc_feature (35)..(35): Xaa can be any naturally occurring amino acid
  misc_feature (38)..(39): Xaa can be any naturally occurring amino acid
  misc_feature (44)..(44): Xaa can be any naturally occurring amino acid
  misc_feature (46)..(46): Xaa can be any naturally occurring amino acid
  misc_feature (52)..(52): Xaa can be any naturally occurring amino acid
TGLGEIPERDCSKMALFNPRVAXGCAITDEPEEVXPPXXFGLRXSXQTSIFXLGIEKKYVLSLIRYFDIY

SEQ ID NO: 1019096 - protein, 120 aa, Homo sapiens
RIARATRRSGSLESTARFMISAEIIDERDRSCARDVVRPIPDRAESCQDQLRALLQAVGDLDLLGQRIDDGAVMGDDPDGVHDAGVHRHPEDLDECGDGALIEGTEGLIEEQCRHSPTKD

SEQ ID NO: 1019097 - protein, 69 aa, Homo sapiens [sequence omitted]

SEQ ID NO: 1019098 - protein, 283 aa, Homo sapiens
  misc_feature (209)..(210): Xaa can be any naturally occurring amino acid
  misc_feature (212)..(212): Xaa can be any naturally occurring amino acid
  misc_feature (216)..(216): Xaa can be any naturally occurring amino acid
  misc_feature (226)..(226): Xaa can be any naturally occurring amino acid
  misc_feature (251)..(251): Xaa can be any naturally occurring amino acid
  misc_feature (255)..(255): Xaa can be any naturally occurring amino acid
  misc_feature (259)..(259): Xaa can be any naturally occurring amino acid
  misc_feature (262)..(262): Xaa can be any naturally occurring amino acid
  misc_feature (276)..(276): Xaa can be any naturally occurring amino acid
WNTLELKYLLPNGGAAVGLLPPEGDAGGFRVGRAAGLAPGLCPGFMVLTALGQPQALGAYCSTSLSKSFSLAWYSLMKGWDLWASFSWDRYRFVTSGGFAQVLGQDDEVDQRLRVATILVYRLLQQALSGLPAALGHVAGRLPIEQQQGGRALVSHLLEDVVGILQLLTTRGQADPGSGELGEGGILVQVLLLFSSFRAMFQAVQFSRXXMXWLCXPGCPPGAAPXGGLRVLVVALAGGGPAPARGVGPVXAPAXLSVXLGXDAVPPTLVGEVVSXHAHGPGA

SEQ ID NO: 1019099 - protein, 122 aa, Homo sapiens
GRSRSASRTLRTAGVHIIREQDEAGPVEISAWAASGSPERRPRSAASGPGESWGWEARARRAGDEGRSRGGAGVSGVNVYELRRRRRVRGGGSVDMVKPGRICFRFTGCVLTWYRLCPLRTT

SEQ ID NO: 1019100 - protein, 256 aa, Homo sapiens
FLGEVKLCEKMAQFACYKSLQRPNLKRTHHRKEKGSREEKQKPQAERKEEKKAAAPAPEEEMDECEQALAAEPKAKDPFAHLPKSTFVLDEFKRKYSNEDTLSVALPYFWEHFDKDGWSLWYSEYRFPEELTQTFMSCNLITGMFQRLDKLRKNAFASVILFGTNNSSSISGVWVFRGQELAFPLSPDWQVDYESYTWRKLDPGSEETQTLVREYFSWEGAFQHVGKAFNQGKLVKFPSLAFPCPPASSVHAGVCH

SEQ ID NO: 1019101 - protein, 236 aa, Homo sapiens
FLGEVKLCEKMAQFACYKSLQRPNLKRTHHRKEKGSREEKQKPQAERKEEKKAAAPAPEEEMDECEQALAAEPKAKDPFAHLPKSTFVLDEFKRKYSNEDTLSVALPYFWEHFDKDGWSLWYSEYRFPEELTQTFMSCNLITGMFQRLDKLRKNAFASVILFGTNNSSSISGVWVFRGQELAFPLSPDWQVDYESYTWRKLDPGSEETQTLVREYFSWEGAFQHVGKAFNQGKIFK

SEQ ID NO: 1019102 - protein, 143 aa, Homo sapiens
  misc_feature (34)..(34): Xaa can be any naturally occurring amino acid
QELFKGKKGVLFGVPGAFSPWMFQDTLPGFVEQXKALKAKGVQVVACFSVNNAFVTGEWGRAPKEEAKVWFLAVPPGAFGKETNLLLNDSLVSIFGNRRLKRFSMVVQDGKVKALNVEPNGPGLPCSWAKFLPPPLPISPAQP

SEQ ID NO: 1019103 - protein, 168 aa, Homo sapiens
  misc_feature (34)..(34): Xaa can be any naturally occurring amino acid
QELFKGKKGVLFGVPGAFSPWMFQDTLPGFVEQXKALKAKGVQVVACFSVNNAFVTGEWGRAPKEEAKVWFLAVPPGAFGKETNLLLNDSLVSIFGNRRLKRFSMVVQDGKVKALNVEPNGPGLPCSLAPNFFSQVWGPWAKFLPPPLPISPAQPCVGALQLECWPNF

SEQ ID NO: 1019104 - protein, 126 aa, Homo sapiens
SDSLTLSPRLECNGMVSTHCNLHLPGPSYFPASAFQVAGTTGTCHHAQLIFVFLVEMGFHYVGQAGLKLLTSGDPPASASQSAGITGVSHRTWLDMILLTFVMCSILGVCLHPTRHLGGIMRRAGS

SEQ ID NO: 1019105 - protein, 107 aa, Homo sapiens
  misc_feature (4)..(4): Xaa can be any naturally occurring amino acid
  misc_feature (60)..(60): Xaa can be any naturally occurring amino acid
KHFXKNPSAPEWLGLEPSLQPQGGKLLVFGWWGMVPHPNYLGDLIMALGWSLPCGVSHLXPYFYLLYFPALVVPRKARDKRQCLQKYGLAWQEYCRGVPYRIMPYIY

SEQ ID NO: 1019106 - protein, 160 aa, Homo sapiens
SGGTSRRALGAGTRPPSVGSGLYSELRTEPQLRLSALGITGRGDPGATRRAPSDDPLPQTGRGTPAPGGRSGAGRTKRLREDSVFPARLRSPGRGFSDRPARYRGNRKLAGCAPAPAAVPRSLGHRSHPALVKGLPHRPVLPICLALCAELESMAVINEF

SEQ ID NO: 1019107 - protein, 63 aa, Homo sapiens
DQTVTAASADPKLSHGKGMINGVLRRFLREQPALVADMQADPSAATNYPMWWIDAVRSAYPDA

SEQ ID NO: 1019108 - protein, 421 aa, Homo sapiens
MGSERLRLPPHASQVAWDYSAFSTDALANSRKTLHERYGSLYVALSSSQTPGLKVILLLWTFPKRWDYRLLEPWASGPEDTGLPVAMTTGDCCHLPGSLCDCSGSPAFSKVVEATGLGPPQYVAQVTSRDGRLLSTVIRALDTPSDGPFCRIWPWKEANEGVIADPGVDDNGTLGAVHKTLSGEVASLNLTPATASCATRSLQWRNGLEPLTEWLKDPGPRTEKRTLELLTVRVLSVVSIDNTDVPVHLRGWVVPAAGPKDHLTGPQPSLAGRWVIIALSNLPVFTIYVLWTLVSFLLYTASCNSEWRKNQAESSLTIREAGQTRGPPGCSMAAGLLKKVAEGETDLNAGSPGTMQQIGQKVAGDTLSLWKDFHFQERFRLKQGLRHVTVNRLSKAEGTLPWRKAKIRGNSFVEGYLCKGD

SEQ ID NO: 1019109 - protein, 90 aa, Homo sapiens
LEYLSWALNELQCVQKGEKEGRGWTQWIEGDELHLEMRVEGVVCKAKYSRRCSEAQADNLCPKESAGCVGQDPPFCPALGKNVQPPPGIC

SEQ ID NO: 1019110 - protein, 160 aa, Homo sapiens
  misc_feature (16)..(16): Xaa can be any naturally occurring amino acid
FLEPRAGTRFVQENQXSGQPATEAAERTPWSSADQPQFQNMRQVIQKNPGLLPALLQQLGQENPQLLQQISRHQEQFIQMLNEPPGELADISVVEGEVGAIGEEAPQMNYIQVTPQEKEAIERLKALGFPESLVIQAYFACEKNENLAANFLLSQNFDDE

SEQ ID NO: 1019111 - protein, 69 aa, Homo sapiens
TLKEPASQGRIPPGGNCRKELQKSAQGSLESVLRTRLYMYRRKLHKPGKEEKGACKVNNFQTSHTVMTY

SEQ ID NO: 1019112 - protein, 93 aa, Homo sapiens
RERMVVPGEGPLAPGNLSPSKQGVPGPRESVGTGQPVFCSFLGWEAQGQNNTPGKVGGGVGALSRPPMLGKAAKAWGLQPGTAVMGYPGDGPL

SEQ ID NO: 1019113 - protein, 208 aa, Homo sapiens
  misc_feature (196)..(196): Xaa can be any naturally occurring amino acid
RSQAGLESLLPAPDWAGSPGLVSKSGYREQPDRGEGLREAEHRPQRPACSRNMSTNASASFPGGTGTGTSTRTSTGTGTSTRTSTGTGTSTRTSTGTGTSTRTSTGTGTERKAEGPPEAGGTTAQVPNPDSSLDDTSYSLSEWSVRSEWRSVSDPLASSQVEHVLNCRGRLPGAPAYTPQSALPVLARVLTSDFKXWASGVLSGFTNP

SEQ ID NO: 1019114 - protein, 99 aa, Homo sapiens
WVVENCARLRRDGVRNAPDSAWAVVLEPQQVGVRPCQPFPASIPGHLQSLPPGVCFETSLPGPPAGGQSALGHPPSCPGDVALSVFGGCCPLALGPHGP

SEQ ID NO: 1019115 - protein, 345 aa, Homo sapiens
MTLGGLAPASKMNKNGKKSFYYTISDFFGWGSPHVVLIFRGVNIYITKTVKTRKKNRNLAVAETGEATLLSSVQEFPGSQLAGKNLLTFSFGSCFLKNNQKHSNVQILVSLPLNGLDVPLVLVKVVASLYAKFLEWSLILKVTCRWLQVPEEPGVTQNCSAGWLDQGSPVGASPALASWPSCEGAYGGRGLNAGHRRHRRYPRRTPDGSVGTTGVDLQIPSNLQPLQLLRQLVDQEVPVTDSERIRWNTQEPRSQKDVHTTEGLPTHNLCATITSRNIRQRNGEHTTVNPQPQRPSHDENGRTPHPEYSTNTERRTRHAPNKILTAHTQNYTTTPQSTHPKNRTT

SEQ ID NO: 1019116 - protein, 547 aa, Homo sapiens
FFYIFLMIKTKHLKPQFLEEPLVLACFVSLFRLSWLDATTGPQSTSSLATNTTTDRHHSSIAPHRTRQHERAGQPDTLAPRQTEDKTRHSGAQREKAIPTKTDTNSTRKHYKTNSRYYNLTHKQHYQTHSTGKLLKDKYTTMRTKTQRTTKKPEQTLTDRGLPDTNHNDTENPTEHKRNGTNDKAEKQRKAQEQETQQNNRGEQRAKKSTERDKHERDRANHSAERKANQNSTGQQKQKKQDTTEDRTTQTQERKRAGQAHRAERERGQERENEKRKSRERKHGQKRREPTRSADEKRERTRREEGRERAATPTAKDASREDPQRGEKQERTDTERTARKNRQKEDSKQDNKPQERTRNSTAHRKPETQKTEEQTTEQGADDSTASNAAHSSRDRNAQMNRRSERKEEHEKRSKKKREEKARRGQWRRPEEEKGERGEERQTTGARRGAGRQEQQTSRARGSRREQAGGGDRREEEGKERERARGNEERAGKGEGRRRARREKKQGEKQSGARSTIRQRQRRAKAEEEGRRELAAGARGQRPQERES

SEQ ID NO: 1019117 - protein, 73 aa, Homo sapiens
VGFISCPKKLDEAVAEAHLGKLNVKLTKLTEKQASTWACPVMAPSSRITTATESQVCVSPSSCCPCPGPTSPP

SEQ ID NO: 1019118 - protein, 97 aa, Homo sapiens
AGPLLSPWAWQNIAESTKGNDPTLALTVAKSYRSFSNLWKHGKTHQQQHQAAVRQQLAEAEAAVGLAVMETAVEALPLVEAIEIYPLAEVEGVQISG

SEQ ID NO: 1019119 - protein, 102 aa, Homo sapiens
  misc_feature (26)..(26): Xaa can be any naturally occurring amino acid
  misc_feature (32)..(32): Xaa can be any naturally occurring amino acid
MGMRFYHSGKFMPAGLIAGATFADGXHTRWSXVCSTDPLAEVMFQLRLMKNSKSASSTIFNILREISAAFWLLTFYLKKKTPNLAERWKISHDYKPTEVASM

SEQ ID NO: 1019120 - protein, 112 aa, Homo sapiens
GHLHNYLVVVPPLNTAGLFDNPGIGPGGFSSLCGAREKDKYARNPALNMAPLSTCGLPFWANHQRPGWPFLGGEYIGPTLKNHGAKRSRFPWVLTRARSFWATFKPGPWGCL

SEQ ID NO: 1019121 - protein, 102 aa, Homo sapiens; identical to SEQ ID NO: 1019119
  misc_feature (26)..(26): Xaa can be any naturally occurring amino acid
  misc_feature (32)..(32): Xaa can be any naturally occurring amino acid

SEQ ID NO: 1019122 - protein, 101 aa, Homo sapiens
LMVQKQQEALEEQAALEPKLDLLLEKTKELQKLIEADISKRYSGGPVNLDGNLFVTPPVFLPAHFFRFWDENENQGCCFGALQGKRPGCLENGKPQEGSGP

SEQ ID NO: 1019123 - protein, 106 aa, Homo sapiens
FYPWHTGRDYQQLCSQQDLAILPWVREFNKFDLYTKCPDLPDVDKLRPYYQGVIYKYCPGILEVVTLLPPKLLLDLGLALRLPGKAWPWANNRHQGLPRWGTPLPP

SEQ ID NO: 1019124 - protein, 116 aa, Homo sapiens
SWGAQVLLIEAQPAQRICRRGAKCTRRAARSCSPATAPRPAPPRGDSEPLPPPPGAERRALGWESGTRSRQLFISRKPPQPERKGTFCHQRGISQRRAWIYEDTHARSGQDLDKLF

SEQ ID NO: 1019125 - protein, 80 aa, Homo sapiens
QTPLQPSSKRCVSYSTSLRERITRLWIQYMSNSYEQLSKLDNTVQDAGLYQGQVLVIEPQNEDGTWPRQTLQSKICHYVR

SEQ ID NO: 1019126 - protein, 103 aa, Homo sapiens
IQQRGAVLLAGAGPVDMQVTTARGVWSGRPGSSTLTATGSDAAGRCGTALETGCELCDPGPKRRASCRGDPLGGFVKTTSQTSCLEAGCPLPASAAWCPLPGA

SEQ ID NO: 1019127 - protein, 115 aa, Homo sapiens
  misc_feature (8)..(8): Xaa can be any naturally occurring amino acid
MKSSTLLXILVLQALLVSTAVPKGPAGPKKQCWCGECTSWSGVWTCDDLLTKCAATCKNCVPVSTDKGATKYRCRDFLPRKLRLQDPLDSSTAAQPMDPSMLLRPSALLQAGSHQ

SEQ ID NO: 1019128 - protein, 151 aa, Homo sapiens
MGLDYKEGGSPFLPYKMCDFLPKEGVGILAPRPPPPIPRGAANDLGPTLHHGVLCGPLTLNPFAKPALPLCLFRGPGPRPGSWGMGLFVSPLPEFMFRGPELNMSPCSQNPALSGSSRSPPLFPPPPGVCGPRAFGDSPRDKLLMFPSLPL

SEQ ID NO: 1019129 - protein, 108 aa, Homo sapiens
MVGYTKELAPVRAIWSHGKNMIQGGTLGLRYKIRAVYAPFPPNGVIQEKGFLVENPNFLGEKNNPRGRIKPGVACSVFPAPKNEFIPEGKDLEAGSNSTAFIQPAPPV

SEQ ID NO: 1019130 - protein, 44 aa, Homo sapiens
MTLNSGGLTVPKWVQVAVTSTYGSIAPNAAWVASDESLGFQGVV

SEQ ID NO: 1019131 - protein, 156 aa, Homo sapiens
MGLPSYIPTPIYFGAVIDTTCMLWQQECGVQGSCWEYNVTSFRFVYFGLAAGLKFVGFIFIFLAWYSIKYKEDGLQRRRQREFPLSTVSERVGHPDNARTRSCPAFSTQGEFHEETGLQKGIQCAAQTYPGPFPEAISSSADPGLEESPAALEPPS

SEQ ID NO: 1019132 - protein, 112 aa, Homo sapiens
DKVRFNYMFWIMCWVFTLYGFLLVMFVEKNYQVLFLEYEGKLVKHISELDRTPTNIVLPISKSFTVFSHNGRYQLFCNMLAVLHVDRIFKITSVILISLLGIRIIFPHFYSL

SEQ ID NO: 1019133 - protein, 103 aa, Homo sapiens
MQRKTLAQQSKRSHSSKTRTVNHFPRKKENSPLGKKEEEHWILTFWILTLGCKTYLPLSRLPSPSTLNVLLSFSVSAPSSPFTLPPPHTLHPLCTRRSEGHLE

SEQ ID NO: 1019134 - protein, 141 aa, Homo sapiens
  misc_feature (9)..(9): Xaa can be any naturally occurring amino acid
SPSAFSAAXAPPWLEETPPQSVPLLPKATPISSGALGGLFGPPLYSPGPTLMNMPAAQQPGGSDSPVFEGEFMHHPSPWQPPGDSPFSIASLFLSAKVTARSDQLDLSGEPRLLHCGLCMDPRGCGDLGDSNQVIPFSRMH

SEQ ID NO: 1019135 - protein, 141 aa, Homo sapiens; identical to SEQ ID NO: 1019134
  misc_feature (9)..(9): Xaa can be any naturally occurring amino acid

SEQ ID NO: 1019136 - protein, 217 aa, Homo sapiens
  misc_feature (27)..(27): Xaa can be any naturally occurring amino acid
GKRFPSKGKLLGSFPSSWRVVVFRKKXVQGYFRSMSLQKSGQGVSRAQRQFKRGAPPRRLSIRNAHSIHHGLRKRLNQDAIAATASVFCSNDAARGGRDRKAPGARLRRSGKRSAFNPAGGAPAAEGRPHPEPLQREPPAEAGVFRFRVEGSPQLAFRPFPPRACTYVFYKAWGLDAEGSPDPCPGRLPPPSINVAWSGPRLCRNAGRAGVRPRVFF

SEQ ID NO: 1019137 - protein, 94 aa, Homo sapiens
CRDRARQSPSEPVFLLSHPPFLSRAYACMHACVNSHTHGGGSGPSVTLLQSLHSSDKKLFVKTNVISENTILHAPMACHNFFFFKWNSPILLHE

SEQ ID NO: 1019138 - protein, 67 aa, Homo sapiens
VYVVDVSQGIVNAVKDPDANGKSFAFVGPSGDLFFHLGNTSLLWVTDCSSHSPCRFLPIDGEQKFFK

SEQ ID NO: 1019139 - protein, 96 aa, Homo sapiens
RPDDEPRPLNTMFLTFWVGVNGTILKMSSERFACFDEKQRHLQEDYLRELLTTMGDRFTDEEVDELYREAPIDKKGNFNYIEFTRILKHGAKDKDG

SEQ ID NO: 1019140 - protein, 96 aa, Homo sapiens; identical to SEQ ID NO: 1019139

SEQ ID NO: 1019141 - protein, 82 aa, Homo sapiens
LLPDTADHLTRLTTHTASWPGSSCASIVCQVCVWLAFLCAACRACRTPFGSQDAPPQRGTGPPEGPGKPCSNHMPHRSCYVS

SEQ ID NO: 1019142 - protein, 253 aa, Homo sapiens
RVRCILHGSHGGGLASVRMELILLLQESQQETSEPLFSSPLSEQTSVPLLFACTANAKTVVANPLLHLSNLTHDILHAIINFDSPPHPDIQSNKVYVMHTLAASLSACIYQCLCGSHNYSSFQTNQFTGMVYQTVLLPHRPSLKTGSLDEALTPNTSPAQWPGITCLIRLLNSSGEEAQSGLTVLLCEILTAVYLSLFIHGLATHSSNELFRIVAHPLNEKMWSAVFGGGAHVPSKEQTHSKTLPVSSLVEEG

SEQ ID NO: 1019143 - protein, 114 aa, Homo sapiens
FPRGYGPAAFPRPPLGLPPAGPLGFVLAFTWCAVCPAPMGREGGFLGGFPFPPPFGYGGFVWPPTPGLSQICFNPPPFPHSGGVGGGGGVFLTKLFFFNPPVPRGPPPPFFFPP

SEQ ID NO: 1019144 - protein, 114 aa, Homo sapiens; identical to SEQ ID NO: 1019143

SEQ ID NO: 1019145 - protein, 114 aa, Homo sapiens; identical to SEQ ID NO: 1019143

SEQ ID NO: 1019146 - protein, 114 aa, Homo sapiens; identical to SEQ ID NO: 1019143

SEQ ID NO: 1019147 - protein, 186 aa, Homo sapiens
MANLRCRKIMSDPPMGFDPGTNAKGPQGTPGDTLRILVKAQKIPEADECGFDCNWGMICSSPPSLRPHVEKEAGTPANSTERKGKQGKKGLISLYLYITPGKTQKFVPALFVPPLPLGPPSTGMVFSPLPPSSMFFSPAPSCCFGCFPKVGFFFIWGSGHVMGRGGGFSNLRSQLFHVVYFVVPFS

SEQ ID NO: 1019148 - protein, 121 aa, Homo sapiens
QSQTASKQVAESVDQKHEYVTTTGKPMLLRAQPFCLLEGLSLGVNLKLIITLRQKLFFLKTDPAFVLSPSTLVKLHLWGNEGLQESLESLVLHDAALVILVPNLVCSPMSERDRGSGTPRE

SEQ ID NO: 1019149 - protein, 82 aa, Homo sapiens
RSVTGGMFSVYLENSKKVVGISSEHLEPIPPPKNTRVKVILGEDREPTGVLLSIFEDGIVRMDLDEQLKILNLRFLGKLLEA

SEQ ID NO: 1019150 - protein, 193 aa, Homo sapiens
GGGHGIVVELGRLHPGQRLMLTPLHEPLPAPQQIERHEEVKVLVGMAGEDEGGEAGLGRPNSQLLLQLAHQTGLRRLAGFELAAGKFPQAGELLALWSLADQHPAVHVHQGGGGHDQHLHASVPLLRPPLDLPRQGGQLMSPLLAQLYRAFAEAPALTGRRLQVYLWLLFGLNAAVALIWLGLAVMHGGLAQT

SEQ ID NO: 1019151 - protein, 109 aa, Homo sapiens
PANSVRYLLNPGGCGTGPVGKLGDEAARAEVPHLFGGDGVGGRVVGTAAGLRDEHDRLHGHRGHPLRVDGGAQLAGLAGRLHQLRQQREQGRMRDLDLSGVCHQQTRCE

SEQ ID NO: 1019152 - protein, 165 aa, Homo sapiens
  misc_feature (36)..(36): Xaa can be any naturally occurring amino acid
RSVLVFQREAGPQGNKACVRAATVCGPGGCMCHLEXGTNHSKPPHLLFPPPGPGLWPPKCLGELFSLDRPVGWGPGGLLCVNKIVRFALLTCCRHGGSINPPPHLFPAPEKGVLRWRCGVCTLAPALRLLFCPNATAARLPKGVDACRSPSKPGNSGKFPGLGRF

SEQ ID NO: 1019153 - protein, 76 aa, Homo sapiens
KSAVEASRLVAGKLKKNTAFENEKLISGKRQELVTKIATFWMPCSPWPHPPGGPGGLPFSVAGKLGGSGRLCMEAS

SEQ ID NO: 1019154 - protein, 133 aa, Homo sapiens
RGRGRGTGEWNGMECNGMESSVMEWKGMEWNRMEWNGMEWNGMEWNQLGSNRMEWKGNTPNRMEWNGMERNGTERNGMEWNGMEWNAMEWNGMEWNEMQWIQLDVKWNGIEWNGMEWNGINPNRMECNGMERN

SEQ ID NO: 1019155 - protein, 105 aa, Homo sapiens
MTDRPSPAQTGCNMDGWVGPLVRLVKGHGQEPGGLDSLPPTLFINRVDPNSGCLPLGFVQRICHRGMSSRGDDHLYRLGGSFPLHQVRHSHSGGWSWAVHLSGDA

SEQ ID NO: 1019156 - protein, 88 aa, Homo sapiens
SVSLDEVSLLSSVFDSVCSYVDSWSLEAFERLGYFFKKLFSHIASKLNILGFHSLKTDNPNMYGNFELLGYLVSMLVKMGNSCPCDRS

SEQ ID NO: 1019157 - protein, 152 aa, Homo sapiens
  misc_feature (42)..(42): Xaa can be any naturally occurring amino acid
  misc_feature (55)..(55): Xaa can be any naturally occurring amino acid
  misc_feature (93)..(93): Xaa can be any naturally occurring amino acid
  misc_feature (106)..(106): Xaa can be any naturally occurring amino acid
  misc_feature (120)..(120): Xaa can be any naturally occurring amino acid
RAQRKNPQGQHTPKPKPKPQAEQGHDQPTRTGTNQRDGDQTXQKQMEQANQQTGXTDSATKRPKHPQARQPAPGHQTTPQHPEQRQPAGKTGXAATTQPGPRLPFXQHSQNPPPKHKVTXRKKKQHHTPHPIVGEGIPCVSQANKIYLPLPK

SEQ ID NO: 1019158 - protein, 43 aa, Homo sapiens
  misc_feature (10)..(10): Xaa can be any naturally occurring amino acid
TQPGGRRGGXHPRGIVRLTPHPIVGEGIPCVSQANKIYLPLPK

SEQ ID NO: 1019159 - protein, 98 aa, Homo sapiens
LQTPLAREQLDPACLLQPRGGCLAPGAVNNGRPVSGSPFTMCTGSPARAMHLILHQLLPSPPENADVWIQWGMCSCSMLPISEQTFELSYSFLIGSPF

SEQ ID NO: 1019160 - protein, 120 aa, Homo sapiens
MKLCCFGHLGWGPLLWQLSGCLPLWGRPIPVGEAVVPVQEGERGFLSVFTSPAHVETGSGWSPSSSGEPVYSRSPLIQRSPRSRSSFLWGCPQGLFKRCPSAICPGPSALEVSRLICGGV

SEQ ID NO: 1019161 - protein, 108 aa, Homo sapiens
  misc_feature (11)..(11): Xaa can be any naturally occurring amino acid
RKSPGTVAMTXQSSGPELKGDIEKCLTAIVKCATSKPAFFAEKLHQAMKGVGTRHKALIRIMVSRFEIDMNDIKAFYQKMDGVSLCPALLDETKGDYEKILVALCGGN

SEQ ID NO: 1019162 - protein, 130 aa, Homo sapiens
PLRGAARTWAAFTWTVVLCFPPAQGPRRRLLRAPQQMAAKRLPAPASRPGHLSHFCFLTKVGTAGCVPSGRRHLTPWRGNRPSRQGRGMGGASVISTTHAPTQDAGPQTPPPQRFLIPRTAVAGRRVWKH

SEQ ID NO: 1019163 - protein, 155 aa, Homo sapiens
MLDHQEKDEKGMPVPARVVFVFGPNKKLKLSILYPATPGRNFDEILRVVISLQLTAEKRVATPVDWKDGDSVMVLPPIPEEEAKKLFPKRVFPPKSSLLAKNTSATPPTLKFFGKAGAVSQRMSAANCVFLQQFHKPILGSSHPRFLGCYTNGFF

SEQ ID NO: 1019164 - protein, 144 aa, Homo sapiens
CASSLVVTATVKSMVREPREGPPVTVSLIGAYKTGGLGLPSPPTGASLKFYGPCKQGPPMKKGVSYFLMGQVKKNKGPVLPPKRFVVFPRPNQGQILPNLNKRKGPFQPVGGAGSQDLKAGQPRPLALRPFFLSKKMFFNEGWG

SEQ ID NO: 1019165 - protein, 146 aa, Homo sapiens
  misc_feature (58)..(58): Xaa can be any naturally occurring amino acid
GASAGPLPLVESPRVPGRGPVSCLSEANAVWLRHFCAFMFNFMRATGLCSTQPSGRFXAFWHRGFICPHGGDPVTASSHSQAPSLFVHPGAALEGVCWGTGAFAGTPEPQKLPQLTLGGGRAFYSTRGQVGTPFPPPATIKFAPTS

SEQ ID NO: 1019166 - protein, 129 aa, Homo sapiens
RGRGRCTGEWNGMECNGKEWNQIDWNGMEWNGMKWNGMELTPIERNGMEWNGTEWNGMEWNGMEWNQPDCRGMEWNGMQWNGFNLNGMERMESTRVEWHGINPNRKEWNGMEWNGTEWNGMEWNGMEST

SEQ ID NO: 1019167 - protein, 68 aa, Homo sapiens
  misc_feature (34)..(34): Xaa can be any naturally occurring amino acid
EQKLLASVTSCTKRLGTESQIFIPRTYDATTHFXTTCDDIKNIYKRMTESEFDFEEMKRKKNDIYGED

SEQ ID NO: 1019168 - protein, 69 aa, Homo sapiens
AVNESPATHNEFLPQWAKGYPICIEATNSLGNRYSLHNIQSLVNTHVFIHFIPTVKPYLYGSDQYPIEH

SEQ ID NO: 1019169 - protein, 38 aa, Homo sapiens
MRLFFFPFIFLLSILGSFFFFLLSPVLLLLHHFLLSSS

SEQ ID NO: 1019170 - protein, 85 aa, Homo sapiens
  misc_feature (33)..(33): Xaa can be any naturally occurring amino acid
LFKGKDNASSAEDLMALGSLPVTKNDGHSWEIXLCLLKKRQEHKRGFPESQLQEGKHVIGLQMGSNRGASQAGMTGYGRPRTIIS

SEQ ID NO: 1019171 - protein, 76 aa, Homo sapiens
NVSKKQLSMGAWPLRKKAQNVARWRKSKEISPLPGMGKSLRPRGSLADGRGGFPVPHLALEGRGAHPTVARIAEFS

SEQ ID NO: 1019172 - protein, 106 aa, Homo sapiens
MSPGTRITRFVCWDRRLQKDAIPSEESSNDELSGRISPSVTHPHHPPQATQLIRCAINQSNISTQLRNESQGVSPCIAGNSTDTAHIMTSRTPESNYSSELIDTCN

SEQ ID NO: 1019173 - protein, 240 aa, Homo sapiens
ISSSSSFGFISSSSPASFCSFFFSSSSFFISSSSFSFISCCKALMRFLLVLGVKPVPACLLVFIFTVVLFIFTFFLIGTRSKREDDISNSRERDRLGNAPFLSISTHSRISSSRSAISVDHKKLFAEEFRQAFEELVLEAAVIPRQELGQELKSICIAAEGTVALLELANGLFSHTWGDGATEFLTDFIQEAREVGMQGASFLGDRDGPVLGFASEKGDQKGHPLGAPGEMNLMVGYEGL

SEQ ID NO: 1019174 - protein, 105 aa, Homo sapiens
MWPHRERGGATHTTHITCAGPQALHGWCHTHGGRKHWSPGERGAPTHIRNIFSLRGLPRAHKVLPFLTGLEHLRIILYTNIGLASTAPLLPLVPPFSTGGVRTHV

SEQ ID NO: 1019175 - protein, 76 aa, Homo sapiens
  misc_feature (5)..(6): Xaa can be any naturally occurring amino acid
VLRPXXICDRGRAPFQKFLMFDNTLGPFADPKSVGVVVIIKRIWGFQVVRAKDLRPEGLTLPIWVGVLSICPPLDL

SEQ ID NO: 1019176 - protein, 67 aa, Homo sapiens
  misc_feature (5)..(6): Xaa can be any naturally occurring amino acid
VLRPXXICDRGRAPFQKFLMFDNTLGPFADPKSVGVVVIIKRIWGFQVVRAKDLRPEGLTLPIGWEC

SEQ ID NO: 1019177 - protein, 141 aa, Homo sapiens
RKPARELLTLDEKDPERLFEGNALLRRLVRIGVLDEGKMKLDYILGLKIEDFLRETLQTQVFKLGLAKSIHHARVLIRQRHIRVRKQVVNIPSFIVRLDSQKHIDFSLRSPYGGGRPGRVKRKNSKKGQGGAGAGNHKEED

SEQ ID NO: 1019178 - protein, 172 aa, Homo sapiens
  misc_feature (16)..(16): Xaa can be any naturally occurring amino acid
  misc_feature (40)..(40): Xaa can be any naturally occurring amino acid
PGLPGDLCGIFHFQFXQYGEWVKVVIDDRLPTKNGQLLFXHSEQGNEFWSALLEKAYAKLNGCYEALAGGSTVEGFEDFTGGISEFYDLKKPPANLYQIIRKALCAGSLLGCSIDVYSAAEAEAITSQKLVKSHAYSVTGVEEVNFQGHPEKLIRLRNPWGEVEWSGAWSDE

SEQ ID NO: 1019179 - protein, 186 aa, Homo sapiens
LPSGLSCFLCNACAFLCFSCVLLSSIGCFLFHCVPFSPFSIAWFVYGSFGKFLPAFSTAPWGLSRFIASLFNVWVVLLVLLVCFRCPVIRFPALWRLRWSLPFSCWFPTSRASLGLAVYQLGFLSEVLPDALVFSCPYFVLTFWLSSEFHTHSITYCGKESNSCRWAMFVATSLRCRRSGVYKATF

SEQ ID NO: 1019180 - protein, 108 aa, Homo sapiens
LDKFWIGSSLAPPKVDALKKMLLIKGLCPVFSSLLSPTGRGNLMDCSPGTTGPNYSGIILMPLTPNYYLCPPVQLANFYLAPLHYRLAVVQCVAVIWNSYLSWKAHRL

SEQ ID NO: 1019181 - protein, 113 aa, Homo sapiens
LGPPLAVNWAARPSKAEYSKGAVSLALSPPPPPLGLRPACVWGLGAFPLVVAPWFPGFGSLPSRAPSQAFGGPLDLTPSRKGLCKIVPGWGGSLCAPRPASSPMWPRSEPLGL

SEQ ID NO: 1019182 - protein, 117 aa, Homo sapiens
SLPHHTSVFPPSCFGAFPLHQPEFRFGPSTLQVGPVEQPLGSLGRGVLRLLLSHPPVCFGLKPGFEFCDQNQVGFPFLPPPGAPALEWEGWLPLPSKLPQRPVMDPRPQSPLCFGKG

SEQ ID NO: 1019183 - protein, 69 aa, Homo sapiens
  misc_feature (9)..(9): Xaa can be any naturally occurring amino acid
LLVQGSTHXQQAVCVFKKVLKTGRLPDHPLGKPRSCFGTKGELHPFSKFLGLPENHMVFPVPIDQCIDG

SEQ ID NO: 1019184 - protein, 278 aa, Homo sapiens
  misc_feature (9)..(9): Xaa can be any naturally occurring amino acid
  misc_feature (17)..(20): Xaa can be any naturally occurring amino acid
  misc_feature (44)..(44): Xaa can be any naturally occurring amino acid
  misc_feature (73)..(73): Xaa can be any naturally occurring amino acid
MGEQQNSVXTFGKRHPXXXXVVDLTNIDPDVAYSSVPYEKGFAXLFYLEQLLGGPEIFLGFLKAYVEKFSYKXITTDYWKDFLYSYFKDKVDVLNQVDWNAWLSLSWNCLPYSPIMICILTNACISLSQRWITAKEDYLNSFNATDLKDLSSHQLNEFFGQTLQRAPLPFGDIKRMQEVDYFNAINNSEIRFRWLRLCIQSKWEDAIPLALKMATEQGRMKFTRPLFKDLARSLTNPMIKLSEPTKSTKKACIPVTAKLVGKNFKKWIKRPAYVMSFR

SEQ ID NO: 1019185 - protein, 333 aa, Homo sapiens
  misc_feature (8)..(8): Xaa can be any naturally occurring amino acid
  misc_feature (22)..(22): Xaa can be any naturally occurring amino acid
  misc_feature (66)..(66): Xaa can be any naturally occurring amino acid
  misc_feature (68)..(68): Xaa can be any naturally occurring amino acid
  misc_feature (98)..(98): Xaa can be any naturally occurring amino acid
  misc_feature (101)..(101): Xaa can be any naturally occurring amino acid
  misc_feature (103)..(103): Xaa can be any naturally occurring amino acid
  misc_feature (116)..(116): Xaa can be any naturally occurring amino acid
  misc_feature (134)..(134): Xaa can be any naturally occurring amino acid
  misc_feature (147)..(147): Xaa can be any naturally occurring amino acid
  misc_feature (164)..(164): Xaa can be any naturally occurring amino acid
  misc_feature (193)..(193): Xaa can be any naturally occurring amino acid
  misc_feature (198)..(198): Xaa can be any naturally occurring amino acid
  misc_feature (203)..(204): Xaa can be any naturally occurring amino acid
  misc_feature (228)..(228): Xaa can be any naturally occurring amino acid
  misc_feature (324)..(324): Xaa can be any naturally occurring amino acid
LSILHPAXLTDACDRHADTREXFASSRLPMSIIIVGVANADFTDMQVLYGDDGVLRSPRGEPALRXIXQFVPFRELKNASPAALAKCVLAEVPKQVVXYYXHXGLPPRSLGFPAGXASPGCNLDICGGRRLGAXRNGSVQPLSATCXGSLKLPPTSQKPPVPTXPHSLCPPGISAGLWPFSGAPKAEEVTKYXPPCLXLPEPXXLMDVYHEGLGVSWVVHPRDDLCPXEIVSVYLWVLCFASNSFVGEGQQGSPPTLRRKPGGPMYTCPHSQSLGTQTSFPQSQPPVPAGAPTPTYPVLFAVGPLHRGSMGSAGVCGGSAWPVXVSAGWGSQE

SEQ ID NO: 1019186 - protein, 115 aa, Homo sapiens
NTSPLSAPRLAHPFYKDPSQGWLWEFECAQPVKKDPALSIPQVLYASGDKRQEVPFRGFPLPQKFEPSLRRGQKPGGHQKHRVLALVPNELLKQTNQLFAIFCPQTCVIYVPGTL

SEQ ID NO: 1019187 - protein, 246 aa, Homo sapiens
  misc_feature (26)..(26): Xaa can be any naturally occurring amino acid
VPKRKPSAPKKEQDRQTRLYETWQHXMRGALYSVRDYFKDGGDGDKIPETFQATVDSRTRGLNNYSTKFWRQQPGNPSFIRRSEGGKRHSGAARAKLPDRDAKLLRLVGQIVLDAGAREVQDPDRQGLQHRIVTLERRGFVVLRPIGLEGDLRHFAVVSPFGRDQLGAFGRSAVQQHHVRVLGVDLIKLGPDQPVVVEVEPTGQRHLRARRQENLVMRALLRGQEIATVDHRRGQIAVVSLDPLRG

SEQ ID NO: 1019188 - protein, 69 aa, Homo sapiens
HEHQLYWTPPRKFGQGFRSCGVCSNRPGLIRKYGPNMCPQCFRQYRRKSVSLSWTKGSSFKGLSGAFTQ

SEQ ID NO: 1019189 - protein, 135 aa, Homo sapiens
RSTLSLYSGGQNRATSPFKVWGKSSSRSPYEEGAGRKANENKVGGMNAPKGQIGNSNGGAGSGGNIDRWKESDRKDGKKGSKTPRSAPEPKKTWGKSQLLSSVLQASMLLSLLMVKMKMREKIMPNRPLHPGVFS

SEQ ID NO: 1019190 - protein, 128 aa, Homo sapiens
  misc_feature (23)..(23): Xaa can be any naturally occurring amino acid
MAGLPRWGLGTNSQGPWTDKTYXLKPPVYGACKLLDMELEMAFFVGPGNRLGEPIPFPRPMSPFLDGPYERLECPTHSKVGVCPSRAIPWEKFWDPCEVIITGFCQGDGYALGFGQCAGKVLPAFLPS

SEQ ID NO: 1019191 - protein, 67 aa, Homo sapiens
AGATTWPKGPSLSPEEGAGAGVLPPSPPELSPGPGGPGPGGFGAPGSPGRVGGRPPPLGGGLGALVF

SEQ ID NO: 1019192 - protein, 69 aa, Homo sapiens
NTDIAQELCLPPVKCTAPCWAEDAIQAALADFNFKQEPQKGEAEKKMSPPSGKPPAGHTSCFPPGVQSP

SEQ ID NO: 1019193 - protein, 303 aa, Homo sapiens
ADEPPSLDPVQSFSQEAVDTARVLYLHSGPEAWSDAFSLDVASGLGAPLKGVLVELEVLPAAIPLEAQNFSVPEGGSLTLAPPLLRVSGPYFPTFLGLSLQVLEPPQHGALQKEDGPQARTLSAFSWRMVEEQLIRYVHDGSETLTDSFVLMANASEMDRQSHPVAFTVTVLPVNDQPPCLHDYIRPADVGGGTAPIPAEALRSTDGDSGSEDLGLHHRAASNGRVVLRGARALSAQFHASPGGTGGSVLSHTEGPRVEGRIALLKGREIPGKSLRWRAKQVAFAEASDLAVCSSEQEASQMV

SEQ ID NO: 1019194 - protein, 260 aa, Homo sapiens
GCAQAVSVRFESRGEGARRRPPGMSYDRAITVFSPDGHLFQVEYAQEAVKKGSTAVGVRGRDIVVLGVEKKSVAKLQDERTVRKICALDDNVCMAFAGLTADARIVINRARVECQSHRLTVEDPVTVEYITRYIASLKQRYTQSNGRRPFGISALIVGFDFDGTPRLYQTDPSGTYHAWKANAIGRGAKSVREFLEKNYTDEAIETDDLTIKLVIKALLEVVQSGGKNIELAVMRRDQSLKVITKFVCFLYLSVFSHDQG

SEQ ID NO: 1019195 - protein, 240 aa, Homo sapiens
MSYDRAITVFSPDGHLFQVEYAQEAVKKGSTAVGVRGRDIVVLGVEKKSVAKLQDERTVRKICALDDNVCMAFAGLTADARIVINRARVECQSHRLTVEDPVTVEYITRYIASLKQRYTQSNGRRPFGISALIVGFDFDGTPRLYQTDPSGTYHAWKANAIGRGAKSVREFLEKNYTDEAIETDDLTIKLVIKALLEVVQSGGKNIELAVMRRDQSLKILNPEEIEKYVAEIDNRKSKKY

SEQ ID NO: 1019196 - protein, 183 aa, Homo sapiens
MNRYAAGSDVTRHIRMGTIKPGSRIQPDHIYHKLPATPSESWSQVAGSAGCDQLFNRERAEVQSGHANFHQWEMPAGLRLNFASKEEATHSPMQCCFLNIMNSQEGGPSSQRQVQNGPSPDEMDIQRRQVMEQHQQQRQESLERRTSATGPILPPGHPSSAASAPVSCSGPSNRTLKEQNTQP

SEQ ID NO: 1019197 - protein, 124 aa, Homo sapiens
  misc_feature (20)..(20): Xaa can be any naturally occurring amino acid
ATQQYVGPGQQLVPGEALLXSQRPTSQGATLDACSFGVTGLKLQGATCNNNKLSLSNAISTALSLTQLRWVKQTNPEKKASVVTLPVYLNFTRADLIFTVDFEIATKEDPCSFYERGVAVLGTK

SEQ ID NO: 1019198 - protein, 478 aa, Homo sapiens
  misc_feature (38)..(41): Xaa can be any naturally occurring amino acid
  misc_feature (46)..(46): Xaa can be any naturally occurring amino acid
  misc_feature (52)..(52): Xaa can be any naturally occurring amino acid
  misc_feature (73)..(73): Xaa can be any naturally occurring amino acid
  misc_feature (119)..(119): Xaa can be any naturally occurring amino acid
  misc_feature (129)..(129): Xaa can be any naturally occurring amino acid
  misc_feature (173)..(173): Xaa can be any naturally occurring amino acid
  misc_feature (176)..(176): Xaa can be any naturally occurring amino acid
  misc_feature (180)..(180): Xaa can be any naturally occurring amino acid
  misc_feature (183)..(183): Xaa can be any naturally occurring amino acid
  misc_feature (188)..(188): Xaa can be any naturally occurring amino acid
FGKMMDYLQGSEETPQTDVRWMSETGIIDVFLLLGPSXXXXFRQYXSLTGTXALPPLFSLGYHQSRWNYRDEXDVLEVDQGFDDHNLPCDVIWLDIEHADGKRYFTWDPSRFPQPRTMXERLASKRRKXVAIVDPHIKVDSGYRVHEELRNLGLYVKTRDGSDYEGWCWPGSXGYXDFTXPTXRAWGXNMFSYDNYEGSAPNLFVWNDMNEPSVFNGPEVTMLKDAQHYGGWEHRDVHNIYGLYVHMATADGLRQRSGGMERPFVLARAFFAGSQRFGAVWTGDNTAEWDHLKISIPMCLSLGLVGLSFCGADVGGFFKNPEPELLVRWYQMGAYQPFFRAHAHLDTGRREPWLLPSQHNDIIRDALGQRYSLLPFWYTLLYQAHRERHSCHEALWVQYPQDVTTFNIDDQYLLGMRCWFTCIRIWSQVVQVNCLAKRRGGFELSGYQKIMVPKPYGRKSKRIRVHAGATRQEETGSK

SEQ ID NO: 1019199 - protein, 124 aa, Homo sapiens
PSPKFYIFICLMKFSSTCPTGTNKIRSEQNIIFFKISLHPNRPLLAQLTIPACIHLINQNPRNVGVIYLLPSTSLPKNWIGLVISQSSVLFSLPVFQLCLFSLVPATALVRYSSSLAWLHPGDT

SEQ ID NO: 1019200 - protein, 250 aa, Homo sapiens
  misc_feature (168)..(168): Xaa can be any naturally occurring amino acid
MIQSTEFEDSQEEQNNYICNYLFQVKLIASSMITFFCFKINQLRDWAWWFMPAIPELWEATVGGSVEVRSLGPALGSVVKSCLYWRMQELAGCGGPRLWFQLLGKAKAQKSRCCLQSADHRARSVSRQNNKKLTRKHGIHVTCEGTLGSATQGFAYNKQQRRWVRYCXTPNTACEAGSLTGQPVAVKTRGYVPNNETGPRCLLNTIIDIDTAHQESTNTSRRTSNNTSSPAYVQRTTEHAGNYSLNINEL

SEQ ID NO: 1019201 - protein, 249 aa, Homo sapiens
MDNRTFRLSPECAYIPHAPQRSGRVYLNLQAVVISTAYGCADVRTAGQVPVMHRPAQFIAHKVVLASSSPVFKAMFTNGLREQWLEVVSIEGIHPKVMERLIEFAYSGSISMGEKCVLHVMNGAVMYQIDSVVRACSDFLVQQLDPSNAIGIANFAEQIGCVELHQRAQEKYIYMHFGEVAKQEEFFNLSHCQLVTLISRDDLNRCSVRVLRVFHSLSINWVNVRAANSDGLRSGGCAGGGLHSLRRNS

SEQ ID NO: 1019202 - protein, 139 aa, Homo sapiens
MGGWFCHCPALAVTFHCPQPSGHWRCQGSQGCNQNAPARGGLERGGRKLNPFGPQPCIAGWPLTSLGSPKLVQGGKSGFSIRAQKNNPLGFQKFLGLPLTPIYTAKMVFWKLLSFSIWGLFFKGKILKLNLGLLPPKNP

SEQ ID NO: 1019203 - protein, 497 aa, Homo sapiens
HEGFAPAKWAQPWLLRPVAATSIALLSLRALGVAQGGTWVNGSGSCERRSPRRRGLRRRRGHRDARMESAGRWAVHRRLTWTHGLCGAGALQNRLADWAREHEAWLGARCGPGARCAGIPGSRVNTAEPRDLPVVAGGGMVFCLSSEEPRRPAAKRHGPLPGPRKSSKLLHNKFVVILGDSIQRAVYKDLVLLLQKDSLLTAAQLKAKGELSFEQDQLVAGGQLGELHNGTQYREVRQFCSGSGHHLVRFYFLTRVYSEYLEDVLEELTYETFPPHEFFNYNPVEDFSMPPHLGCGPGVNFVPGPLPPPIPGPNPHGSTGAQWSTGGCHCFDVLDLHFHFRHAVQHRHRDGVHWDQHAHRHLSHLLLTHVADAWGVELPKRGYPPDPWIEDWAEMNHPFQGSHRQTPDFGEHLALLPPPPSSLPPPMPFPYPLPQPSPPPLFPPLPQDTPFFPGQPFPPHVRRMGGPCRQRLRHSERLIHTYKLDRRPPAHSGTWPG

SEQ ID NO: 1019204 - protein, 603 aa, Homo sapiens
HEGFAPAKWAQPWLLRPVAATSIALLSLRALGVAQGGTWVNGSGSCERRSPRRRGLRRRRGHRDARMESAGRWAVHRRLTWTHGLCGAGALQNRLADWAREHEAWLGARCGPGARCAGIPGSRVNTAEPRDLVIGCERGARMRVDCAVLATWRRRMGGAGAGTAPPVPWEALLGLEGPPLPSGYPECDQGLVATNVALLPVTILPYSIEQPLEGLALRADLPEFPTIGAALGGLYPCSPVVAGGGMVFCLSSEEPRRPAAKRHGPLPGPRKSSKLLHNKFVVILGDSIQRAVYKDLVLLLQKDSLLTAAQLKAKGELSFEQDQLVAGGQLGELHNGTQYREVRQFCSGSGHHLVRFYFLTRVYSEYLEDVLEELTYETFPPHEFFNYNPVEDFSMPPHLGCGPGVNFVPGPLPPPIPGPNPHGSTGAQWSTGGCHCFDVLDLHFHFRHAVQHRHRDGVHWDQHAHRHLSHLLLTHVADAWGVELPKRGYPPDPWIEDWAEMNHPFQGSHRQTPDFGEHLALLPPPPSSLPPPMPFPYPLPQPSPPPLFPPLPQDTPFFPGQPFPPHVRRMGGPCRQRLRHSERLIHTYKLDRRPPAHSGTWPG

SEQ ID NO: 1019205 - protein, 54 aa, Homo sapiens
MLLLVALLAPTLLLVAVCGARVGVWSADFSLGVLALKAGRVLAYLGLAAALAAC

SEQ ID NO: 1019206 - protein, 155 aa, Homo sapiens
  misc_feature (20)..(20): Xaa can be any naturally occurring amino acid
  misc_feature (44)..(44): Xaa can be any naturally occurring amino acid
LGALPLGRRPEVTSRVRARXPGGENRDAEAQRLVPDGDGRTSPXGGARSSSQRSPVGPAGVRSPRPGSPQMQASPSPGIAPKPKTPPTAPEPAAAVQAPLPREPLALAGRTAPAQPRAASAPPTDRSPQSPSQGARRQPGAAPLGKVLVDPESGR

SEQ ID NO: 1019207 - protein, 135 aa, Homo sapiens
GQVKIKRLGLRHLFSSSRLLNEQLKSGPAFVGGLVKNFYPKEAKVQWKGGYALPLGYSQESVPEQGSQGSTFSLSSPLAVGKAGFEKPKVFAWGVPPQGLGLPVPKKLHQGKVLKGEGPPPAPQFQPDPLPSFGL

SEQ ID NO: 1019208 - protein, 78 aa, Homo sapiens
RMLVADELGVDCMVQPESQIYGVITYFRLIQICRLAGKESVTLPGPIIGTSQQERLSGNGPSPSQQISRVLGKGHLVL

SEQ ID NO: 1019209 - protein, 82 aa, Homo sapiens
SVTGGMCSVYLKDSEKVVSISSEHLEPIHPPKNNKVKVILGEDREPTGVLLTINGEDAIARMALDEQLKILTLRFLGKLLEA

SEQ ID NO: 1019210 - protein, 228 aa, Homo sapiens
AVVLVQVFERDPSTEGILLPKACISIEIAYKSWGAGPQECSCLPSDSERWRVLFIGTMVNSFLYAGAANFIMVAHLAINVAKARKKYKVEYPIMYSTDPENGHIFNCIQRAPPEHVGSVSSLLIFLAVGGVYQPRIATGLGMAWIVGRVLYAYGYYTGEPSKRSRGALGSIALLGLVGTTVCSASQHLGGLQVAWAVDQMAALQNHRGLKISFISNDLPLFPVTCFLN

SEQ ID NO: 1019211 - protein, 118 aa, Homo sapiens
AVVLVQVFERDPSTEGILLPKACISIEIAYKSWGAGPQECSCLPSDSERWRVLFIGTMVNSFLYAGAANFIMVAHLAINVAKARKKYKVEYPIMYSTDPENGHIFNCIQRAPRIQGII

SEQ ID NO: 1019212 - protein, 82 aa, Homo sapiens
MKAIDFEYYGYLDEDDGVIVPLEQEYEKKLRAELVEKWKAEREARLARGEKEEEEEEEEEINIYAVTEEESDEEGSQEKGGD

SEQ ID NO: 1019213 - protein, 305 aa, Homo sapiens
PGSNMSKNRSVSEFGVLEELPVVHTGKAGPYIGVEKGERLSWVEEDMKAFGCQWMGGGGRFGPVHLPVSSLKLRHTSVGCSFCLGIFLSFYLLTVLLACWEKLEAEEEDTDMVDIEEPAQKAVTLESMADSFPGSSPYEGYNIWLLRECHWIVAMDLDDSAGHWGPSSYTVARDRVQLNRVGYSDTRTGSPVRLCWEEDDYEHKDRDSRYRQAQSNRQPDKERLNVARHLATEGTKTVIRCAETKQDTNNRRSAGTQNGHNAIREDSKKRERYMRATQTEKEQPRPRTGGQTREARAGQEESGRT

SEQ ID NO: 1019214 - protein, 124 aa, Homo sapiens
GKNILRKALVFNLNGITPVCRDIGGSLLTYGRRIPLADMGKPDFGGGFQCWYVKFAPSTSMTSAQQWLDMAPLRSSQTTTGSVGACFGCAFRREAYVSKRAGPGFVVPPPPQTQHFGSFNLCHR

SEQ ID NO: 1019215 - protein, 76 aa, Homo sapiens
  misc_feature (7)..(7): Xaa can be any naturally occurring amino acid
GLDSLHXTSVSQISVLNGGKAKCSQFCTTGMDGGMSIWDVKSLESAFKALKINMTCEEYVAFILNSWGNGERGQGG

SEQ ID NO: 1019216 - protein, 85 aa, Homo sapiens
  misc_feature (55)..(56): Xaa can be any naturally occurring amino acid
  misc_feature (59)..(59): Xaa can be any naturally occurring amino acid
TTTIFLGTTYDALSPELYTTYFVTKTLLLTSLVLMSSNSIPPIPLLTNSYTSYEXXSSXSRYDYVPLYISKPITISSGPYRFWGG

SEQ ID NO: 1019217 - protein, 57 aa, Homo sapiens
MQPQQQQQQQQQQQQQQHVTSWPGKQVETLRLWEEAVKARKKEAANLCQTSTAATGV

SEQ ID NO: 1019218 - protein, 224 aa, Homo sapiens
  misc_feature (216)..(216): Xaa can be any naturally occurring amino acid
MDPNTIIEALRGTMDPALREAAERQLNEAHKSLNFVSTLLQITMSEQLDLPVRQAGVIYLKNMITQYWPDRETAPGDISPYTIPEEDRHCIRENIVEAIIHSPELIRVQLTTCIHHIIKHDYPSRWTAIVDKIGFYLQSDNSACWLGILLCLYQLVKNYEYKNQRSGVHWVAANAAFSCQFYTDRFNPSFFLTSLISLSHPETDIQIFYALGPDHXLDLYQNLG

SEQ ID NO: 1019219 - protein, 79 aa, Homo sapiens
VSSVVPSQPEPLTLSKSPPPPLGLTPGLAFEYHDRRPSAEPLAGGARWNSYLQKKKRKGESEGKGIRWLQPNAATGGGS

SEQ ID NO: 1019220 - protein, 129 aa, Homo sapiens
  misc_feature (1)..(1): Xaa can be any naturally occurring amino acid
  misc_feature (22)..(22): Xaa can be any naturally occurring amino acid
  misc_feature (35)..(35): Xaa can be any naturally occurring amino acid
  misc_feature (39)..(39): Xaa can be any naturally occurring amino acid
  misc_feature (41)..(42): Xaa can be any naturally occurring amino acid
  misc_feature (47)..(48): Xaa can be any naturally occurring amino acid
  misc_feature (52)..(52): Xaa can be any naturally occurring amino acid
  misc_feature (55)..(56): Xaa can be any naturally occurring amino acid
  misc_feature (67)..(67): Xaa can be any naturally occurring amino acid
  misc_feature (78)..(78): Xaa can be any naturally occurring amino acid
  misc_feature (93)..(94): Xaa can be any naturally occurring amino acid
  misc_feature (102)..(102): Xaa can be any naturally occurring amino acid
  misc_feature (105)..(105): Xaa can be any naturally occurring amino acid
  misc_feature (110)..(110): Xaa can be any naturally occurring amino acid
  misc_feature (112)..(112): Xaa can be any naturally occurring amino acid
  misc_feature (116)..(116): Xaa can be any naturally occurring amino acid
XKLEEEEKKEVTEEEKTKEEKXEAKGVKEEVKLAXNGHXQXXKKEEXXTYLXQPXXFYIFYFSVYLXKNLLNINIPRXRNQGPELRAAVLGEXXQEPPCHPXFPXLTLNXKXNKKXVKGILLCNHKTNS

SEQ ID NO: 1019221 - protein, 143 aa, Homo sapiens
GFASTRAGSGKEAAVAIVKFCGGPAKDGGLNLTSTFVRKNQCETRPMLLQPAGSIGSYSYRSPHWGSTYSVSVVETDYDQYALLYSQGSKGPGEDFRMATLYSRTQTPRAELKEKFTAFCKAQGFTEDTIVFLPQTDKCMTEQ

SEQ ID NO: 1019222 - protein, 114 aa, Homo sapiens
SCAQWCVPVIPVTWETEAAESLEPEEAEFAVGISSLAQTSFLSCKTSRTSFVSCTLWVISKCLVLELPGVVARRTKSGVQQTEISSVGKVIDWPPFNSSPEMVFEIATYNAVPN

SEQ ID NO: 1019223 - protein, 75 aa, Homo sapiens
VPTLDIMQIMYGISSSCILLYIDAQGHQRLYNCTLATNLQCLYRVSGKISGRSSDRYTRYEEFQQLSAGIAGGSL

SEQ ID NO: 1019224 - protein, 121 aa, Homo sapiens
MTDPSPVEVAWGAVALSGGPSRQGCQPLECARCWTEYGIRHFPCPSPESKLQNRCVGKDGEGDLGPAGTPICPKGQEAEGLGLPLKAADAGAHLITTIGPRKDSVAGPMAGWRGQRYPGTK

SEQ ID NO: 1019225 - protein, 148 aa, Homo sapiens
LYESDCSRGHIRVESHRTSPFFFLSWSLTLSPRLECCGAIVAHCSLCLPGSSESPASASRVAGITGARHHACLIFVFLVEMGFHHVGQAGFELLASSDLPASTSQSAGITGVSHRARPPFCVLTSLSTMSSGLTICCSTSQNFPPLQG

SEQ ID NO: 1019226 - protein, 210 aa, Homo sapiens
MSLKNDMYATFHHQLDGKVRVDVTYPAGFTGCHQHRVRQREHFRLCLMTPGPFIAVYRISSGRGKVQVVVISEEDSCGSDVESSLVTHDARTIRVPEILSSMVNDTVQIDLGTGKIINFIKFDTGNLCMVIGGANLGRVGVITNRERHPGSFDVVHVKDANGNSFATRLSNIFVIGNGNKPWISLPRGKGIRLTVAEERDKRLATKQNSG

SEQ ID NO: 1019227 - protein, 708 aa, Homo sapiens
MGVGRQQRGPFQGVRVKNSVKELLLHIRSHKQKASGQAVDDFKTQGVNIEQFRELKNTVSYSGKRKGPDSLSDGPACKRPALLHSQFLTPPQTPTPGESMEDVHLNEPKQESSADLLQNIINIKNECSPVSLNTVQVSWLNPVVVPQSSPAEQCQDFHGGQVFSPPQKMPPFQVRGSQQMIDQASLYQYSPQNQHVEQQPHYTHKPTLEYSPFPIPPQSPAYEPNLFDGPESQFCPNQSLVSLLGDQRESENIANPMQTSSSVQQQNDAHLHSFSMMPSSACEAMVGHEMASDSSNTSLPFSNMGNPMNTTQLGKSLFQWQVEQEESKLANISQDQFLSKDADGDTFLHIAVAQGRRALSYVLARKMNALHMLDIKEHNGQSAFQVAVAANQHLIVQDLVNIGAQVNTTDCWGRTPLHVCAEKGHSQVLQAIQKGAVGSNQFVDLEATNYDGLTPLHCAVIAHNAVVHELQRNQQPHSPEVQELLLKNKSLVDTIKCLIQMGAAVEAKDRKSGRHSQVLQAIQKGAVGSNQFVDLEATNYDGLTPLHCAVIAHNAVVHELQRNQQPHSPEVQELLLKNKSLVDTIKCLIQMGAAVEAKDRKSGRTALHLAAEEANLELIRLFLELPSCLSFVNAKAYNGNTALHVAASLQYRLTQLDAVRLLMRKGADPSTRNLENEQPVHLVPDGPVGEQIRRILKGKSIQQRAPPY

SEQ ID NO: 1019228 - protein, 708 aa, Homo sapiens; identical to SEQ ID NO: 1019227

SEQ ID NO: 1019229 - protein, 708 aa, Homo sapiens; identical to SEQ ID NO: 1019227

SEQ ID NO: 1019230 - protein, 241 aa, Homo sapiens
SHFDNVSEPGVTMTCCEGWTSCNGFSLLVLLLLGVVLNVIPLIVSLVEEDQFSQNPISCFEWWFPGIIGAGLMAIPATTMSLTARKRACCNNRTGMFLSSLFSVITVIGALYCMLISIQALLKGPLMCNSPSNSNANCEFSLKNISDIHPESFNLQWFFNDSCAPPTGFNKPTSNDTMASGWRASSFHFDSEENKHRLIHFSVFLGLLLVGILEVLFGLSQIVIGFLGCLCGVSKRRSQIV

SEQ ID NO: 1019231 - protein, 38 aa, Homo sapiens
EDPIAVGGDLFCWNFSSSSSSSSSSSSSSSSSNNSSNN

SEQ ID NO: 1019232 - protein, 122 aa, Homo sapiens
MENEALKESVSSCTQRQGMKGAAGAWLPALGLPLVEEQLIRYVHDGSETLTDSFVLMANASEMDRQSHPVAFTVTVLPVNDQPPILTTNTGLQVRASLGTPPCLLRERGQRPLLRGSELPQL

SEQ ID NO: 1019233 - protein, 111 aa, Homo sapiens
  misc_feature (39)..(39): Xaa can be any naturally occurring amino acid
DFQGHPEKLIRLRNPWGEVKWSGAWSDDAPEWNHIDPGXKEELDKKVEDGEFWMSLSDFVRQFSRLEICNLSPDSLSSEEVHKWNLVLVNGHWTPGPHSWGLPEVPRLLLG

SEQ ID NO: 1019234 - protein, 102 aa, Homo sapiens
DGLARACAALGDWQKSATHLQRSLCVVEVRHGPSSVEMGHELFKLAQIFFNGFAVPEALSTIQKAEEVLSLHCGPWDDEIQELQKMKSCLLDLPHTPVGPAL

SEQ ID NO: 1019235 - protein, 102 aa, Homo sapiens; identical to SEQ ID NO: 1019234

SEQ ID NO: 1019236 - protein, 120 aa, Homo sapiens
TRESVPFAQHSSLDSRIEMLLKEQRSKFSFLASDTEEEENSSMVLGARDTGSEVPSGSGHGPCTPPPAPANFEDVAPTGSGEPGATRESPKANGQNQASPWSSGDDMEISDDDRGGSPPP

SEQ ID NO: 1019237 - protein, 169 aa, Homo sapiens
FLALVPTRVKDPVTRPPLKIRNTFGPEVHLLPPPSEELAFNKLVTLTCLAPGFSPKEVLVCWLQGSQELPPEKFLIWASRQEPSQGTPPFVVTSILGVATKDWKKGDPFSCMVGPEALPLAFTQKTIDRLGGKPPHVNVFVVMGEVGGPCFLAARLSPPLNKLHVPPSS

SEQ ID NO: 1019238 - protein, 84 aa, Homo sapiens
VCANQTIAPSKPAENLGRSSRNMIELDWNLPSFNRKDDCNENLAAFWSDKELLIWMLGSIDPLRLESCIRIYLKPRADWGRTIF

SEQ ID NO: 1019239 - protein, 114 aa, Homo sapiens
RLKGPQKDELKSFILQKYMMVDSAKDQKIPRPMASKEAPKKLIRYIDNQVVSPKGERFKNVRNPEAQEIKATYINLKPARKYRFHLGPCRTLPEPFRVRFQRDAGALYPYTGAP

SEQ ID NO: 1019240 - protein, 103 aa, Homo sapiens
QNTPHSHLVRATNISAQPVWLPQATATTHRCGHRSPLTSVGLAQTLDRPAAAIQAETPYFHLPCTALDCVPPDSGGSPQVVTVSSSLLVGLPCTCPGGGVGRE

SEQ ID NO: 1019241 - protein, 106 aa, Homo sapiens
IGNSEAVQYTQTSVLAHLPSGKNLLPKSISQTCRLPGFLTSLQSSHLTTFVRTIYAGNALCTVKCDEKVKVYAVRGTSFDAAATSGGHASSEKASSTSPVEIKPLQ

SEQ ID NO: 1019242 - protein, 33 aa, Homo sapiens
DTTIIIMIARHRYDHHHHDRSTSIRPTTTSVVF

SEQ ID NO: 1019243 - protein, 82 aa, Homo sapiens
GFVPCLPQSWTARFPVLNPDRRFHFDSRGLQLSWRCLESCQSSPSNFSQGFEELQGTAICVSIGEPWSRHLPRDPAPAVARD

SEQ ID NO: 1019244 - protein, 240 aa, Homo sapiens
MARLLEEASLDSGSGLWRAFMGAALHLSSAGACGTIELSLSKRKADISPLRCVNHPAAPRASHMNLQAHARRHCIQWLHPRPSKEQQHLEGSSTCQPWKGTPGSWRGQGVLACSRNSELMWPGPGAAWLLTGARSGTGEVGRRLPSCQGLDTTAFSCAPIFVQASLCVGIALCSTGMMWDASPVGLSEDNTVLPRGSDLGLTQAWGAKGEPNQLLPLCRAPPSPLPLCSPLHLLQEGSHS

SEQ ID NO: 1019245 - protein, 101 aa, Homo sapiens
RLRGAASTSETPPPPPRPLSLRPLPLKPRPPPPRPRLHLRDPFLRDPAPRLRDPASPLRPRPRQQLSPSCLLPLVLWVCPELCLCAPASSYVCNFNKTKQS

SEQ ID NO: 1019246 - protein, 78 aa, Homo sapiens
RVRLLADVHVSAEPRDLPAASVTPRSSGNPRLWDPALPLRHPPTPPLRCPPRLRDPASTSETPFSETPPPASETPPHL

SEQ ID NO: 1019247 - protein, 122 aa, Homo sapiens
PVRASVLGRAGPFAPGGEVTRRGLDGRRRGVRARTRGAQGRRGSRTLPAQRRLSLAPGCAQRARLSGPCGARCQREGSGHAGARDERARCFPKRGAQCRGSAGAPPKAHLEPSTTAFWKRCV

SEQ ID NO: 1019248 - protein, 144 aa, Homo sapiens
  misc_feature (8)..(8): Xaa can be any naturally occurring amino acid
TLVHRTPXYSLKIECGLKYPEAPPFVRFGTKINMNGVNSSNGVVDPRAISVLAKWQNSYSIKVVLQELRRLMMSKENMKTPSAARRTVLQQLIKKKNHRPFPFPPIRFNQSSFSTVVNFLDTSCRHSEYWKASSHSKEIYLKIL

SEQ ID NO: 1019249 - protein, 122 aa, Homo sapiens
  misc_feature (8)..(8): Xaa can be any naturally occurring amino acid
TLVHRTPXYSLKIECGLKYPEAPPFVRFGTKINMNGVNSSNGVVDPRAISVLAKWQNSYSIKVVLQELRRLMMSKENMKLPQPPEGQCYSKYEDSLSRPKDSVTAINQKEKPQALPLPPNSI

SEQ ID NO: 1019250 - protein, 141 aa, Homo sapiens
  misc_feature (21)..(21): Xaa can be any naturally occurring amino acid
WAPPPPCFGGPRRRALLPPPXFLGEWGSPPGWGAFCFPPFDPGFLFPAPWGQGFSPKKKFFVSPKNPFPRGFFLLFPLGPPPPLFFLFPGGPPWGAPPPRFPLGVFFGLFPGKTPLGKIGKGQKNFFIFPGPRGGWGVFPR

SEQ ID NO: 1019251 - protein, 103 aa, Homo sapiens
  misc_feature (4)..(4): Xaa can be any naturally occurring amino acid
  misc_feature (27)..(27): Xaa can be any naturally occurring amino acid
CPRXEATAGSRGARRGWRGRLYNGGPXRCGGEGGVRRRVTVLRSLALPSLEGVSEKQYTIYIAPGGGAFTTLNGSLTLELVNEKFWKVSRPLELCYAPPKDPK

SEQ ID NO: 1019252 - protein, 199 aa, Homo sapiens
VYLGWLQQLYPSLTANMAAQKDQQKDDLSAVKCAELARPCCLKLIPPGAVPGEWLELAACATILALEHLLWTSMLLLTGPATWESIVPAPRTQRGCTTRATMCTLFLGLILYCVVTSPMLLVAPGFFFGACYILYLRTLESTLVLFGRQVSPAHQYALAGGISFPFFWLAGAGSAVFWVPGSPPGGYWVPRFLSPKLRF

SEQ ID NO: 1019253 - protein, 102 aa, Homo sapiens
SFSVSDFLNGLRTRKKQAPASPDSNENVPPEIRMPFLSSVEVKKGPGKCTECSSYAQTQTSVNVPSMLLKEHSCPSKMGKSLYPPPSPGMLTLIAKVNPVMK

SEQ ID NO: 1019254 - protein, 79 aa, Homo sapiens
  misc_feature (2)..(2): Xaa can be any naturally occurring amino acid
LXPFRTNPSMMIDDLLDSMLTRDPGAMEMTWMDVPGDKLLEPVVCMSDMLRSLATTRPTVNADDLLKVKKFSEDFGQES

SEQ ID NO: 1019255 - protein, 79 aa, Homo sapiens; identical to SEQ ID NO: 1019254
  misc_feature (2)..(2): Xaa can be any naturally occurring amino acid

SEQ ID NO: 1019256 - protein, 205 aa, Homo sapiens
  misc_feature (1)..(1): Xaa can be any naturally occurring amino acid
  misc_feature (4)..(5): Xaa can be any naturally occurring amino acid
  misc_feature (9)..(9): Xaa can be any naturally occurring amino acid
  misc_feature (12)..(12): Xaa can be any naturally occurring amino acid
  misc_feature (14)..(14): Xaa can be any naturally occurring amino acid
  misc_feature (21)..(21): Xaa can be any naturally occurring amino acid
  misc_feature (32)..(32): Xaa can be any naturally occurring amino acid
  misc_feature (39)..(39): Xaa can be any naturally occurring amino acid
  misc_feature (42)..(42): Xaa can be any naturally occurring amino acid
  misc_feature (84)..(91): Xaa can be any naturally occurring amino acid
  misc_feature (95)..(95): Xaa can be any naturally occurring amino acid
  misc_feature (102)..(102): Xaa can be any naturally occurring amino acid
  misc_feature (110)..(110): Xaa can be any naturally occurring amino acid
  misc_feature (116)..(116): Xaa can be any naturally occurring amino acid
  misc_feature (122)..(122): Xaa can be any naturally occurring amino acid
  misc_feature (125)..(129): Xaa can be any naturally occurring amino acid
  misc_feature (133)..(133): Xaa can be any naturally occurring amino acid
  misc_feature (135)..(136): Xaa can be any naturally occurring amino acid
  misc_feature (138)..(139): Xaa can be any naturally occurring amino acid
XNTXXKKQXKTXNXPPKHPTXPPPPPPPHPPXPPTPPPXPPXPPPPPPPPPPPPPPPPPPPPPPPPPPPPPPPPPPPPPPPPPXXXXXXXXHNYXHYPYLRXHYTTSSLXKKPPSXPLPRTXPPXXXXXTPSXQXXQXXRQPASPTARSFYAQVLLLESRLADAPATPAQALPQRPSDISHSHPPRFTSRAVSSLGEEMVSFRSG

SEQ ID NO: 1019257 - protein, 74 aa, Homo sapiens
FSELFLSPQGEYRVAAWVILGGIYFFYTTENLNWVPVPVKGYWQITVDSITMNGEAIACAEGCQAIVDTRHLFC

SEQ ID NO: 1019258 - protein, 79 aa, Homo sapiens
  misc_feature (8)..(8): Xaa can be any naturally occurring amino acid
  misc_feature (70)..(70): Xaa can be any naturally occurring amino acid
  misc_feature (76)..(76): Xaa can be any naturally occurring amino acid
  misc_feature (79)..(79): Xaa can be any naturally occurring amino acid
RGSLGEPXASPGEIRLPSDTSEELNSQDSPPKQDSTAPSSTSSSDPILDFNISLAMAKERAHQKRSSKRXPQMDWXNNX

SEQ ID NO: 1019259 - protein, 111 aa, Homo sapiens
MPEKLTVEIEERAVSIIRYVHPGISTRKRFPEAGVLGAPMHLDYIRTVKELGNSLDKCRNNEKLAADPQQCAHHGRQRPALHHPGQQLSGGGACERLEDGCDMALELERLK

SEQ ID NO: 1019260 - protein, 169 aa, Homo sapiens
VASAAPGSAVATRISACEVHHGGRVPEAQRPICNFGGTDTTPSFIIGYRCLQLSIKGQDRHRFPPCSSARTDDPCELHRVPYSESLFNGSPLMYLNGNPAEPGASLLYRVAVTAHQIYYSSPSATSNMKDVVIDASTVDVLGFLVVLTLTHFGASSLTFSFWFELARKA

SEQ ID NO: 1019261 - protein, 169 aa, Homo sapiens; identical to SEQ ID NO: 1019260

SEQ ID NO: 1019262 - protein, 169 aa, Homo sapiens; identical to SEQ ID NO: 1019260

SEQ ID NO: 1019263 - protein, 150 aa, Homo sapiens
RREKRRKGSRGTRRFQLPRPGGAPPIGAPWGQGSAPPPGCCCFFFIACSAASHSLPVPGKGHPSAARRRARLTGCTWGGPRGGQPGGGGEGPKLPGSGDFLRHGPRRRGPSGRGVRPRFGALPVTGRRARPAPASVPTPRAPPRLGLACG

SEQ ID NO: 1019264 - protein, 241 aa, Homo sapiens
  misc_feature (66)..(66): Xaa can be any naturally occurring amino acid
  misc_feature (96)..(96): Xaa can be any naturally occurring amino acid
  misc_feature (105)..(105): Xaa can be any naturally occurring amino acid
  misc_feature (136)..(136): Xaa can be any naturally occurring amino acid
  misc_feature (159)..(159): Xaa can be any naturally occurring amino acid
  misc_feature (161)..(161): Xaa can be any naturally occurring amino acid
  misc_feature (194)..(194): Xaa can be any naturally occurring amino acid
  misc_feature (207)..(207): Xaa can be any naturally occurring amino acid
  misc_feature (211)..(211): Xaa can be any naturally occurring amino acid
MAPQSSIEHVEPVNVLVVEHNASDNPSHQEHSSQDTEEACARGEVHLGLKAEDGDWNGYHRSDDHXNDDGFGLVHTGNGARHEAHGKRKKGQQKEXPGETASGSXAAGKDQVGDNEDSKGHEEDSHNPPHKGADRXHKGEDSKEATEKSSRTEKKEKTXRXKVRRTPRPSHPPGPKPPPTALPPPPKPGPGPQXRGSGGGGGRGGGXPAGXPKPGGGQPGKAGNPPGRKTAAHSPQGAEGR

SEQ ID NO: 1019265 - protein, 116 aa, Homo sapiens
HLAIFFVFLVEMGFCHVGQAGLELLTSSDPPASASQSAGITGVSHRVLPALPVSFPRVTLSREMKVETSLLWLSGLRAGFRGRGHRLPSASWLWAAPFLEPSCLPRTSHLAAQLHP

SEQ ID NO: 1019266 - protein, 96 aa, Homo sapiens
  misc_feature (4)..(4): Xaa can be any naturally occurring amino acid
  misc_feature (6)..(7): Xaa can be any naturally occurring amino acid
  misc_feature (10)..(10): Xaa can be any naturally occurring amino acid
KCQXYXXITXIETTALVYKTKAVYAIPDVICRTAEFERLDEHAERSCQLQMAAHGARTGMRVWAARQVYDPVLSDSRVPELGEPSHNTSTQYYNSA

SEQ ID NO: 1019267 - protein, 146 aa, Homo sapiens
WGLTPLAFPHSNWAPISHSLASAPDRLRQSASMGFCQIPLAHFLGLPGDPIQWVQPHPRSTHYVDRHMANMELKPVWAGAHLVVVGLQSSCRCPKVVRPHPPGQVETVFLDDSGYSRAKHDLDDTRRKSRLEPRKSWPCTLRYFQQ

SEQ ID NO: 1019268 - protein, 70 aa, Homo sapiens
KRAQFLVEKAKKEQRQKIVQPEGEAEAAQDAWRSTEQEPWLHQNFARFRAAQEYLTRRSPHHKNRIYLTS

SEQ ID NO: 1019269 - protein, 110 aa, Homo sapiens
LGSQSSHSRVAPARWGLWPLWPAGSTARGKHVCTPTHLPAHLSAMCSRTRAGASLGSKGPQEPPWSGWTGSPGGLGCWRPLRTRPPYQQVQGQVQLSILPTSSALPVRTG

SEQ ID NO: 1019270 - protein, 69 aa, Homo sapiens
LGSQSSHSRVAPARWGLWPLWPAGSTARGKHVCTPTHLPAHLSAMCSRTRAGASLGSKGPQELSLLALA

SEQ ID NO: 1019271 - protein, 121 aa, Homo sapiens
  misc_feature (5)..(6): Xaa can be any naturally occurring amino acid
  misc_feature (9)..(14): Xaa can be any naturally occurring amino acid
MEVGXXYEXXXXXXVGTARGRSGVTWSQESAVPYPHWYHLIPRCLCLCHPGLVAALKPGSLLETERKEGIGKVPAAQRRWEDALRLILMGALAWSLGPPAFGGLGSRPDGGGGARKKWSDD

SEQ ID NO: 1019272 - protein, 189 aa, Homo sapiens
PQGGLTGLVCLVCILSATCFTLQSGNYWLEIFDNFAASLNLLMLAFLEVVGVVYVYGMKRFCDDIAWMTGRRPSPYWRLTWRVVSPLLLTIFVAYIILLFWKPLRYKAWNPKYELFPSRQEKLYPGWARAACVLLSLLPVLWVPVAALAQLLTRRRRTWRDRDARPDTDMRPDTDTRPDTDMRPDTDMR

SEQ ID NO: 1019273 - protein, 153 aa, Homo sapiens
RALLQLSLAWSLSPASLFSCFFNDESWPVLLAEAGGPVCPGRSESPPSCGVGRVAGAVSSNSVLTRNILLHRDCGMGRAGNWKLRAAGSPPPHSTRSAQPCKAWPQPLLAVLQDLQGPCQSDWTLPGCTVLFFPSQSPTWFSNFNLITLFTKV

SEQ ID NO: 1019274 - protein, 123 aa, Homo sapiens
GCVTEARGPVENHWRGQWLHENARQLTNSSQAAQNLATSTRRCKETQGSVGGSMGSEDSGVQRRGDHGRAARRPRTLEHSESAHSWGSGSPWTAPAEPASLAGLEGARSLPQLQTAPRRARAE

SEQ ID NO: 1019275 - protein, 70 aa, Homo sapiens
PQGSGAFFYLIFQNLLPKINNRKAVKEDRSMICLWPGCPWARMPAVTTRETQGPTSFVKDAGTGFAEPPS

SEQ ID NO: 1019276 - protein, 103 aa, Homo sapiens
  misc_feature (28)..(28): Xaa can be any naturally occurring amino acid
AGGRWRGGGEGGGRGGKKEGGGGGVWGXGGDARNKGRRPYIQTARHNIWPGKPITLLGASRRPPHFNLNGGATSKLPFYHHGASGIGTILPNNPNPNTNYLPN

SEQ ID NO: 1019277 - protein, 110 aa, Homo sapiens
EPKTSNLCGNRAYGKSLIPAVPRISVKTSASASLEATAMGTEKGAVLMRGSRHLKKMTEEYPALPQGAEASLPLTGSASCGVPGILRKMWTRHKKKSEYVGATNSAFEAD

SEQ ID NO: 1019278 - protein, 103 aa, Homo sapiens
PSLGGPPSPPWPFHCFHFPGPIQVFALSQGGSLPAAPHQHYAKGPGVRGRAKVPRLVYQVVGEGPQPRGRLLSLGSVFPVGLRFGFFIWQTPMIFQKKISDAP

SEQ ID NO: 1019279 - protein, 47 aa, Homo sapiens
  misc_feature (1)..(3): Xaa can be any naturally occurring amino acid
XXXFFMQFVTINSIVKLHFKINKKLFWTANLHTQRTDAIQRVLTISK

SEQ ID NO: 1019280 - protein, 152 aa, Homo sapiens
MLKFTKVVENKGRGIVSHHLVFQPLWEAEGRRISGRSGSREQAGPHGATPPGTNSSKIGPEIEGVHPYVLGTPRKTRWTERNSLGVPQETQTDAKQRPHKWDTRETHTRGVESGDRRPTTRVEATHHWATKTIPPRGTDTKQVNYASDAKQR

SEQ ID NO: 1019281 - protein, 26 aa, Homo sapiens
MGVEESLWYEPSLEELLGCVDAARPR

SEQ ID NO: 1019282 - protein, 114 aa, Homo sapiens
KRKRWFRCPGNSPLSRMLRIPQPRSLGRAFVTRSIEWFQAMLHRLQTWWHGVLAWVKEKVVALVHPVQALWKQFQSFCCFLSELFMSSFQSYGAPRGGKEELPPQKCFEPQSSK

SEQ ID NO: 1019283 - protein, 69 aa, Homo sapiens
MGIEESPRTKREQKKGKRRRGAKKKALKKPRRNGKEKREKKREQKNKEERRENTQREEDKTEEKRVDDE

SEQ ID NO: 1019284 - protein, 104 aa, Homo sapiens
LIFALDGPGNKACGLVSPFQTQTKHGEFVPLAGSLAVDPNKPNVDDSKEYFFQTQLGWLTDSELVPLPRCLCWVSTCAPTWVPYFDPGKANLPLQTPQYGALEG

SEQ ID NO: 1019285 - protein, 53 aa, Homo sapiens
LEDFIFAFASRFRRFIQLSSNLQSMKFADQSPLNPVALLEELYTSQLIDATTC

SEQ ID NO: 1019286 - protein, 126 aa, Homo sapiens
AYASSECPLTGLHAALSIWAMQLALQQQQHKKASWPKVKQGTGLRTGPMFGPRGSHGTTVSPAVSRSDTVGREVLTCPVLHTWAFHSYPAVKPPCNTMSHLGTIHTHFAFCSTQVVPVNWELEGWP

SEQ ID NO: 1019287 - protein, 257 aa, Homo sapiens
  misc_feature (4)..(4): Xaa can be any naturally occurring amino acid
  misc_feature (221)..(221): Xaa can be any naturally occurring amino acid
  misc_feature (226)..(226): Xaa can be any naturally occurring amino acid
  misc_feature (228)..(228): Xaa can be any naturally occurring amino acid
  misc_feature (231)..(231): Xaa can be any naturally occurring amino acid
  misc_feature (234)..(235): Xaa can be any naturally occurring amino acid
  misc_feature (243)..(244): Xaa can be any naturally occurring amino acid
DKDXSIAPKTIPVTYPAKAKGTFIADSHQKLALFFQLEDVNTGAVLTPHQTFVRLHNQKTGQEVVFVAEPDNKNVYKFELDTSERKIEFDSASGTYTLYLIIGDATLKNPILWNVADVVIKFPEEEAPSTVLSQNLFTPKQEIQHLFREPEKRPPTVVSNTFTALILSPLLLLFALWIRIGANVSNFTFAPSTIIFHLGHAAMLGLMYVYWTQLNMFQTLXPPPPXPXPTXPPXXPHPPPPPXXQNSTLVPEERWKF

SEQ ID NO: 1019288 - protein, 248 aa, Homo sapiens
  misc_feature (4)..(4): Xaa can be any naturally occurring amino acid
DKDXSIAPKTIPVTYPAKAKGTFIADSHQKLALFFQLEDVNTGAVLTPHQTFVRLHNQKTGQEVVFVAEPDNKNVYKFELDTSERKIEFDSASGTYTLYLIIGDATLKNPILWNVADVVIKFPEEEAPSTVLSQNLFTPKQEIQHLFREPEKRPPTVVSNTFTALILSPLLLLFALWIRIGANVSNFTFAPSTIIFHLGHAAMLGLMYVYWTQLNMFQTLKYLAILGSVTFLAGNRMLAQQAVKRTAH

SEQ ID NO: 1019289 - protein, 142 aa, Homo sapiens
PERWTKVFRNKSCNREVRLRQQVRNEQQIWKQKIRELRLKSIDICLQMGEPRMSEDMRLKPRASLWCLPNPIPGVFAGRWLIEGGPLVVLLDVGASAWALERWKGELWDTCNIGVPWYDREANDAVLFGFLDTWFLGEVGPV

SEQ ID NO: 1019290 - protein, 296 aa, Homo sapiens
ASFCLGPNASGQGAVCNEEAERLARHSRSGDQSTRPRTLLVHTLDTSGDPYRWEIPGALAFLRQSCLENRDFVHVLTVQDWRTGRMNFDRENAVLFEVGWEVANKVGGIYTVLETKAKVTWGRMGRQIYFLVGPNTEQGVRTQVELGGGPPSPAPDEDTEIPCNSKGIPGVFAGRWLIEGGPLVVLLDVGASAWALERWKGELWDTCNIGVPWYDREANDAVLFGFLDTWFLGEFLAQSEEKPHVVGPFHKVSGHALDITPGVEHANCLVQTIITTMTRCWERNLVAVARTSTETG

SEQ ID NO: 1019291 - protein, 45 aa, Homo sapiens
MWGQEGDFLASVDGMRVWVEVESGYGGLTTVHFQFHAVDLDTPET

SEQ ID NO: 1019292 - protein, 364 aa, Homo sapiens
  misc_feature (4)..(4): Xaa can be any naturally occurring amino acid
  misc_feature (24)..(24): Xaa can be any naturally occurring amino acid
  misc_feature (26)..(26): Xaa can be any naturally occurring amino acid
  misc_feature (32)..(32): Xaa can be any naturally occurring amino acid
  misc_feature (42)..(42): Xaa can be any naturally occurring amino acid
  misc_feature (45)..(46): Xaa can be any naturally occurring amino acid
  misc_feature (52)..(54): Xaa can be any naturally occurring amino acid
  misc_feature (61)..(62): Xaa can be any naturally occurring amino acid
  misc_feature (65)..(66): Xaa can be any naturally occurring amino acid
  misc_feature (68)..(69): Xaa can be any naturally occurring amino acid
  misc_feature (77)..(77): Xaa can be any naturally occurring amino acid
  misc_feature (79)..(79): Xaa can be any naturally occurring amino acid
  misc_feature (84)..(84): Xaa can be any naturally occurring amino acid
  misc_feature (91)..(91): Xaa can be any naturally occurring amino acid
  misc_feature (101)..(101): Xaa can be any naturally occurring amino acid
  misc_feature (116)..(117): Xaa can be any naturally occurring amino acid
  misc_feature (125)..(125): Xaa can be any naturally occurring amino acid
  misc_feature (133)..(136): Xaa can be any naturally occurring amino acid
  misc_feature (141)..(141): Xaa can be any naturally occurring amino acid
  misc_feature (146)..(146): Xaa can be any naturally occurring amino acid
  misc_feature (151)..(152): Xaa can be any naturally occurring amino acid
  misc_feature (156)..(156): Xaa can be any naturally occurring amino acid
  misc_feature (161)..(164): Xaa can be any naturally occurring amino acid
  misc_feature (174)..(174): Xaa can be any naturally occurring amino acid
  misc_feature (187)..(187): Xaa can be any naturally occurring amino acid
  misc_feature (194)..(194): Xaa can be any naturally occurring amino acid
  misc_feature (196)..(196): Xaa can be any naturally occurring amino acid
  misc_feature (202)..(202): Xaa can be any naturally occurring amino acid
NVFXSEDNVAKVSDFGLTKEASSXQXTGKLPXKWTAPEALRXKKXXTKSNVXXXGILLWEXXSYXXIXXTRIPLKDXVXRVEKXYKMDAPXDYARTAVYEXMKNSWHLDATCGPPXXSSESSLKXEKPKSCTXXXXPPPGXMGLWXLNLEXXGPGXPAHWXXXXTEPQRAGGHXSCVPACTPPAPIXIRTHLWXLXSPLEGXGRKEATEREAAPHHVGLPWPPATRLLRVLFLSFFEIFFPCVYFLLFFKIRRKKVPSKWAFYKKYEFYFSCPAREGGGGPGPFLGTPGPSLIPHFVSHVPCLLGRPVFGLDNGALFARAPGKSLSGGWILCAAANRPPALGDGIVNNPAKRTPPPASGVSPPE

SEQ ID NO: 1019293 - protein, 82 aa, Homo sapiens
RLAVDLAVALTSENPRGCVKMALDLFSLRMHGGIPALFVRMRMDGSVCPTEQCIEELVISALVDRVTGNSDASALQIDPFEK

SEQ ID NO: 1019294 - protein, 121 aa, Homo sapiens
MLRRMEMDKTREWAEQLTKMGRGKHFIGDFLPPDELEKFMETFKALKEGREPDYSEFKEFKLTVENIGYQMLIKMGWKEGEGLGSKGQGIKNPVNKGPPPVDGAGFGIDRPAELSKEDDEY

SEQ ID NO: 1019295 - protein, 127 aa, Homo sapiens
MFVFALMVPQDPPFPPLGKEGGPMCFSSFFGIGGPPPKNEPPVSSIIWVPFGFGENFKFWEVLPFPRVGFVAGIPLKTSLEFGPDGPSPGFWGSQPPMWILGGPFCVSPPLQGLLSFFPKKPKILGG

SEQ ID NO: 1019296 - protein, 140 aa, Homo sapiens
MKRLLAFGLVASVPFIALGGVVGGWWPLNVMFTLLAATAMLYLVERGRSVAPIALFVVAGGLVEFCWPALLLAASVWLYLKRPTWAAALMALLSCASLWYINGNLWALAVVPLVIVAAGVDLRVPRLRWAFYTYYPLHLC

SEQ ID NO: 1019297 - protein, 128 aa, Homo sapiens
  misc_feature (76)..(76): Xaa can be any naturally occurring amino acid
  misc_feature (81)..(81): Xaa can be any naturally occurring amino acid
  misc_feature (90)..(90): Xaa can be any naturally occurring amino acid
  misc_feature (93)..(93): Xaa can be any naturally occurring amino acid
VFLLALTIIASTWALTPTHYLTKHDVEEIEDLVARLDELGGVYLHFEARTGNNSAYLDAATYKLMDYLGTEPSINXDQVIXLMNAIFSKXNFXSSPEAFSVASAAAVLSHNRYHVPFVVVPEGSASDT

SEQ ID NO: 1019298 - protein, 283 aa, Homo sapiens
  misc_feature (38)..(38): Xaa can be any naturally occurring amino acid
  misc_feature (40)..(40): Xaa can be any naturally occurring amino acid
  misc_feature (56)..(56): Xaa can be any naturally occurring amino acid
  misc_feature (60)..(60): Xaa can be any naturally occurring amino acid
  misc_feature (63)..(63): Xaa can be any naturally occurring amino acid
  misc_feature (66)..(66): Xaa can be any naturally occurring amino acid
  misc_feature (69)..(69): Xaa can be any naturally occurring amino acid
  misc_feature (71)..(71): Xaa can be any naturally occurring amino acid
  misc_feature (77)..(77): Xaa can be any naturally occurring amino acid
  misc_feature (87)..(87): Xaa can be any naturally occurring amino acid
  misc_feature (94)..(94): Xaa can be any naturally occurring amino acid
  misc_feature (98)..(98): Xaa can be any naturally occurring amino acid
  misc_feature (103)..(103): Xaa can be any naturally occurring amino acid
  misc_feature (120)..(120): Xaa can be any naturally occurring amino acid
  misc_feature (129)..(130): Xaa can be any naturally occurring amino acid
  misc_feature (153)..(153): Xaa can be any naturally occurring amino acid
  misc_feature (166)..(166): Xaa can be any naturally occurring amino acid
  misc_feature (168)..(168): Xaa can be any naturally occurring amino acid
  misc_feature (183)..(183): Xaa can be any naturally occurring amino acid
  misc_feature (231)..(231): Xaa can be any naturally occurring amino acid
  misc_feature (236)..(236): Xaa can be any naturally occurring amino acid
  misc_feature (245)..(245): Xaa can be any naturally occurring amino acid
  misc_feature (248)..(248): Xaa can be any naturally occurring amino acid
VFLLALTIIASTWALTPTHYLTKHDVEEIEDRLKASLXRXFTNFEFAFYSIVGLSXLGAXVLXVKXACXYXISNLYXSNVDSLFYSXSSPASAXSGCXISISXETKDLFLAAVIEDSSVXQIYHAVAAXXGFGLPFGHPHMKHLVASYCLSYXGGDCAGNSSSSAXSXPTCFSMLPDGCIVEXILVLLLSWMKLGGVYLQFEARTGNNMRLFEAATYKLMEHLGTEPSINXDQVIXLMNAIFSKXNFXSSSEAFSVASAAAVLSHNRYHVPFVVVPEGSASDT

SEQ ID NO: 1019299 - protein, 106 aa, Homo sapiens
VPPRVKKLGFGLRYYFRNGTPNMFREYRGLTPPGAVTQCFPKMGGRPRAPAPSLQIIKVEEIPANKFPRPAVKQFPDSKIKFPLPPRVLGRQHKPRFPPKRAHPFF

SEQ ID NO: 1019300 - protein, 294 aa, Homo sapiens
MPSVAEACWGGSCKRESFESEWKEQKVALSQLTSLEMKDDFLHGLQMLKSLQGTHVVTLLGYCEDDNTMLTEYHPLGSLSNLEETLNLSKYQNVNTWQHRLELAMDYVSIINYLHHSPVGTRVMCDSNDLPKTLSQYLLTSNFSILANDLDALPLVNHSSGMLVKCGHRELHGDFVAPEQLWPYGEDVPFHDDLMPSYDEKIDIWKIPDISSFLLGPIEGSDMVRFHLFDIPKACKSQTPSERPPAQDVLETYQKVLDPLKDAMMFQAREMLPKPVQPIKVGLTGCLEVTAFYF

SEQ ID NO: 1019301 - protein, 86 aa, Homo sapiens
ATGKPPKYIAVNVVPDQLMAFGGSSEPCALCSLPSIGKIGGAQNRSYSKLLCGLLAERLGISPDRVSINYYDMNAANVGWNNSPFA

SEQ ID NO: 1019302 - protein, 91 aa, Homo sapiens
VLPARVQNAEDHYPTKNPFTWLFLLVSCPNNTPKDGVLIGFAIMTKVLPVALFSLVGFTQMTIWAKGKPRSYLKEFRDYPPLGMPIIPFLL

SEQ ID NO: 1019303 - protein, 70 aa, Homo sapiens
MQRLQMTVELPEYEYPREKLRRANWRRWGSGGSGVPFDLSKPLAKPSPTPPEKFLNELGGALGAKGGVAL

SEQ ID NO: 1019304 - protein, 68 aa, Homo sapiens
  misc_feature (5)..(5): Xaa can be any naturally occurring amino acid
QVQIXRRKKEIFRANERACVRFIQLDGLVWGASKLVPVGYGIRKLQIQCVVEDAKVGTNLLEEEIPKF

SEQ ID NO: 1019305 - protein, 164 aa, Homo sapiens
KAISKLKARINGLKKSYMPTGLGPQAKKVFLMRQVEPPAKEASHPSRGMTRDDDIALFGSDNEEEAKEAAQLREERLRQYPEKKAKKPALVAKSSILLDVKPWDDETDMAQLEACVRFIQLDGLVWGASKLVPVGYGIRKLQIQCVVEDAKVGTNLLEEEIPKF

SEQ ID NO: 1019306 - protein, 136 aa, Homo sapiens
MKTENKYTKQLITNRVLKAVRGSTTPNRPVLRFPQDKFNSSSFSVYQNTKEKSRGCLFRWQIGPLQAEGEKATSHTEVGCSRGAVGLGGPPARLARAPAGEAPDILPKCLSEPEFWGRRTHSGHTATEGQKGPCVP

SEQ ID NO: 1019307 - protein, 136 aa, Homo sapiens; identical to SEQ ID NO: 1019306

SEQ ID NO: 1019308 - protein, 277 aa, Homo sapiens
MARLMAGRLIRTRETGSKMRRRPRHVSGMDGERRWLQKDELSEREMGSGLEWDEQWDVDGMCCVMMSAWVPLVMWLKVSGWRMGCVARRCPSEGQDSDSSSDFFRLSASTAAMSLLLLVVSALHILILILRFRGHFGQGPGGLSLGKESLNLWYDCTWNQRPPKTWACSNVSENGWLKAVQVLMVLSLIFCCLSFILFMFQLYTMRRGGLFYAPASASFAPGVAVFTGALIYAIHAEEILEKHPRGGSFGYCFALAWVAFPLALVSGIIYIHLRKRE

SEQ ID NO: 1019309 - protein, 117 aa, Homo sapiens
MDLSKDGVSLLVFRLDNDIVGFSNGNPEFIDRHWLNVLTVGCDNRHFQAGDPHVEIGHRRAIDKAKPDFLPWLEDSRPVPIWRLAVHEVGVGVPAHVNEIGWAHLHLGPHLSIGHSS

SEQ ID NO: 1019310 - protein, 113 aa, Homo sapiens
  misc_feature (9)..(9): Xaa can be any naturally occurring amino acid
  misc_feature (60)..(60): Xaa can be any naturally occurring amino acid
KVCPLTFPXLFLLGTYVFRSVLVTGDSLKVFSNGADLFGVTEEAPLKLFQAVHKAVLTIXEKGGEAGGALFLEAIPLSIPPEVKFTKPFVFLMIGPNTKFSLFKGKVVNSTPK

SEQ ID NO: 1019311 - protein, 245 aa, Homo sapiens
AFCVRVDMSLAILEEVIMWDPRVSRPCLPLGHVATQYFAEQGHASVGWAEYPEEDLKRTMMACGGSNPDQCEGSVSRLCLARCQVFEETQLGGERYNLFDWLPQAKTCTFILRGGTEQFMEETERSLHDAIMIVRRAIKNDSVVAGGGAIKMELSKYLRDYSRTIPGKQQLLIGAYAKALEIIPRQLCDNAGFDATNILNKLRARHAQGGTWYGVDINNEDIADNFEAVRVGASYGADQCADSSL

SEQ ID NO: 1019312 - protein, 69 aa, Homo sapiens
EGSSQGLSPGLCFLLDGPSPAFWTLFISPALFLTTSWQKPWLQSLALPSTCTFLPLDFGFCQSCALRFF

SEQ ID NO: 1019313 - protein, 73 aa, Homo sapiens
ICSVGVGSLGLGSVVALCLLTFAPVFITFSLEGKRSWKVSGFSFLFFFFAKGLLPAFELWLSPLKVSYSALMN

SEQ ID NO: 1019314 - protein, 165 aa, Homo sapiens
MLPAPNPLWPQSHPPPQLCWSSAPGWHLHVAATLGLTCTSTLPRLTPILHPSPLLTTPAPPRAPTTPGLTPAPPTHTRRHTPPANPPPTPAPPPRHPTPHRDITRTPRHPTRPGPRPPPAPPTAPPPLPTPGPAPPHPTGPTPRPHPPPPPPHPPTPPPPPPPTP

SEQ ID NO: 1019315 - protein, 74 aa, Homo sapiens
VGSGSRAFFPFALILRKAEPLGCGGRGQGHIPTTCRARVPAGTFRLCWEEETWAWKEPVPDGFLVASPLPPFVS

SEQ ID NO: 1019316 - protein, 83 aa, Homo sapiens
  misc_feature (10)..(10): Xaa can be any naturally occurring amino acid
SSAQWGIGIXVVMIFGMISRMILWLCYPQEPEDGLESAYILQQESLPMKIGGIFCLFVLFCLVFGGWFFAPNFRIPFALLDKS

SEQ ID NO: 1019317 - protein, 140 aa, Homo sapiens
  misc_feature (12)..(12): Xaa can be any naturally occurring amino acid
HSWLPARALVEXALAQRFQVDPSGEFVELAKGACPWKELLYHLEFGLSPPVAIFFVIYTDQAGQWRIQCVPKEPHSFQSRLPLPKPWRGFRDKALDQVSGIPGCIFVHANGFIGGPRTRKGALSMARAPLAQRSYLPQIS

SEQ ID NO: 1019318 - protein, 152 aa, Homo sapiens
MIAVHCLIVLRYLLIPNVESSSVALLSFGPWSTPTLPPTVPVACHPEPSRVLLSCRASAAGQRVGEGGTDRRPRPDVVCMRWGGGEDGDRKRTESWTRSVFLVPLLFSSRMANPCGRCPSPATLVWLFDVLDVAVLGSIVCHACPPDSGAVT

SEQ ID NO: 1019319 - protein, 165 aa, Homo sapiens
MIAVHCLIVLRYLLIPNVESSSVALLSFGPWSTPTLPPTVPVACHPEPSRVLLSCRASAAGQRVGEGGTDRRPRPDVVCMRWGGGEDGDRKRTESWTRSVFLVPLLFSSRMANPCGRCPSPATLVWLFDVLDVAVLGSIVCHACPFPVPVGAPHVEGMRLAPSPQ

SEQ ID NO: 1019320 - protein, 80 aa, Homo sapiens
RAPPKRDTLIISTKPLFGLPWWWHHSGSSPFTTFCGSQTLGANGDCLKRALVAPHLGPGQWDRAWPGGHSKPLAFHWWVP

SEQ ID NO: 1019321 - protein, 266 aa, Homo sapiens
GGTPVRLSRGVVTATPGHQTTAFRTQGPASHPPGPKSLGPLCPEVRFPAPRFVAISSPQVSKDPRLARVPASRIQASGICAYQNLSLLQTFAIWGHSSLMDAKGPTVHSEKLLYFQLLGQGIRALRISQLLDIWHTGQSMRSLSAQPGEFEHSSFQEPRNFSAVNSQALRSPPKFQSPGAVTQLSPRNVGSWEGAQGVSSLASRRYETPVLPIMVADPPRDSKGLRSGGATANGGLALASIEDHGAAAGRLLRFPGPRCARCLLSP

SEQ ID NO: 1019322 - protein, 115 aa, Homo sapiens
AISGFGESYIWGQRQLHPGSGAAISRVRGSCIQGQRELHPGSEGATSGVRDSSGIGRVAETQYHLCPVVTTDASSWEPSYSMLVYLWLPILQAWFFILLEILRTLHYHLANSFSA

SEQ ID NO: 1019323 - protein, 152 aa, Homo sapiens
QDQGEKDEPMQEFCICRLRFNICLGESGDRLTWVTKVLEQLTGQNQVFSKARYTVSAFGNRRNEKTVVCCTVRGAKADEILENDLKVQECELRKNNFSDTGNFGFGTQEHIDLGIRYDPSIDVYSLDFYVVLEKPGFIIAGKKCGTGFIGAK

SEQ ID NO: 1019324 - protein, 69 aa, Homo sapiens
WAVWQSPPPALGFSGYRPPMESLAEWGSYNGFKPPLHYWLWAGCPPIRLGLLYFFLKKNFLGSRPLPWG

SEQ ID NO: 1019325 - protein, 195 aa, Homo sapiens
SVTLRIPARSNFFHQVGDARVGVDHDLVGQAHLAASVGLFGTEEVFAVGPVVIAQRHAHRGIGIHHLLSSDDFYLVGVGVQGITRRDTADFPVIGLDQFEGPLGASGNGLALVLFFGGHVTNLLLEEFTEDRVDIAGRDQLLLGERVGKGFADALVFEPQGLVLTGGDFDVSVVLQNGMIWLIKMSRQIGESSFQ

SEQ ID NO: 1019326 - protein, 146 aa, Homo sapiens
STPAASLALHDDAHASQHSRIQRYLQLLLLVIAAGAIYPMLYLRQVYQPTMLQFFRIDDVQLGYLYSSLGTIFLVSYLPSGWLADRLSPRWLICFSLLATGALGLVYATGPSFNTLVLIFGAWGLTTGLTFWAAVIKRVNMIAGPD

SEQ ID NO: 1019327 - protein, 104 aa, Homo sapiens
GGISQILDLVKGTHYQVACQKYFEMIHNVDDCGFSLNHPNQFFCESQRILNGGKDIKKEPIQPETPQPKPSVQKTKDASSALASLNSSLEMDMEGLEDYFSEDS

SEQ ID NO: 1019328 - protein, 185 aa, Homo sapiens
  misc_feature (7)..(7): Xaa can be any naturally occurring amino acid
GNAAAGXHAFMGTNTPWSQPRRSFAALFTPAVTEEFADTGGKLRCAGRGPGQPVRVAGKTAVVEKQRRSGTHVDGRQRFLPVSRDDEDGRWGSAACRRNSADRFPARSRWSARSGLKKETRAAAVIDEVSWLHTAHSGGSRPFCRRDIIPLLSIGLYDVWRSANLSLDQLRVLVTIADVGSFSAA

SEQ ID NO: 1019329 - protein, 164 aa, Homo sapiens
RLTLPASPMAAGVSGGYQFGIGQLRHSRAASPWVLSAGWSGSVLDGLEVGGGLIATDSYQATGFALGAQPWTQAQMQWSLGYSQPLHQERGMQSQMTLNQQFAGGWGEDLTYGLQSQSYQDLQQALEPSGRLEGLRDFFSVGLSWQGTGLCNFSVGGGQSRTRN

SEQ ID NO: 1019330 - protein, 139 aa, Homo sapiens
RSFDLWATASVCAAAGLPLSCCVLGRLLPAGQLGDWPALRVAPASSRWSQIICTWVWPALPVLTPRFSHPSHLLSSKFRLFSPSACFPRVDWWGRPVACLCCHLPRLSGPNQPVHPGQSPLKLLSNRMPHGPGPCGLRG

SEQ ID NO: 1019331 - protein, 120 aa, Homo sapiens
RSFDLWATASVCAAAGLPLSCCVLGRLLPAGQLGDWPALRVAPASSRWSQIICTWVWPALPVLPPGSAIPLTCFRRSFVSFPPLHVSRVEIGGEDPLLACAVTFRGFLGQISPCTLGRAP

SEQ ID NO: 1019332 - protein, 99 aa, Homo sapiens
FTGCMCCEYPKELAVEWVFGSVCALSVDPGAALSLKRPRAPGMARACLSPSGGHTPTPCHPMQDSPLCLAAPEAQGQPWCFVLLGPPRSQSLSFVAKAA

SEQ ID NO: 1019333 - protein, 207 aa, Homo sapiens
MRKIYLENYSNEAHSFSFRVQAHLQERVEPFYLLVLHRLVSKGTKNVSLQDITKEESFAKFYNSGPAAFRSQEFAIPLQETYDVGDQAAALNILTPDRDDGKEGLADMIPAPSKFYERRQSTGAEYRGSEQDQRRRSAQNLMVSVREKVQALMHGARKENTARHNVATSGQRDKEVQSVAAQRGHTDALRDAPALERGYGEEPSPPR

SEQ ID NO: 1019334 - protein, 285 aa, Homo sapiens
MLKQLSHDTLVQLPVQWNAMAAQSFKILQGAVNWHKGESQDAASEQETSILGTCATQHCLEALRMNWECVTNISWANIIRQLSSLGKYAEDIFGELFNEAHSFSFRVQAHLQERVEPFYLLVLHRLVSKGTKNVSLQDITKEESFAKFYNSGPAAFRSQEFAIPLQETYDVGDQAAALNILTPDRDDGKEGLADMIPAPSKFYERRQSTGAEYRGSEQDQRRRSAQNLMVSVREKVQALMHGARKENTARHNVATSGQRDKEVQSVAAQRGHTDALRDAPALERG

SEQ ID NO: 1019335 - protein, 242 aa, Homo sapiens
  misc_feature (214)..(214): Xaa can be any naturally occurring amino acid
  misc_feature (222)..(222): Xaa can be any naturally occurring amino acid
  misc_feature (228)..(228): Xaa can be any naturally occurring amino acid
  misc_feature (234)..(235): Xaa can be any naturally occurring amino acid
RWFSGAAPSRLPPAPRFSGPAAIFLSAQGPPSGAMQPTLLLSLLGAVGLAAVNSMPVDNRNHNEGMVTRCIIEVLSNALSKSSAPPITPECRQVLKTSRKDVKDKETTENENTKFEVRLLRDPADASEAHESSSRGEAGAPGEEDIQGPTKADTEKWAEGGGHSRERADEPQWSLYPSDSQVSEEVKTRHSEKSQREDEEEEEGENYQKGERGXDSSERNLXEQERHXTLFSMXXSMLQLYK

SEQ ID NO: 1019336 - protein, 169 aa, Homo sapiens
RAGLMDRAARCSGASSLPLLLALALGLVILHCVVADGNSTRSPETNGLLCGDPEENCAAATTQSKRKGHFSRCPKQYKHYCIKGRCRFVVAEQTPSCVPLRKRRKRKKKEEEMETLGKDMTPINEDIEETNIAYKAMKLPPGWWQAAKCLAHLKMDRMRLRKTASRHEF

SEQ ID NO: 1019337 - protein, 143 aa, Homo sapiens
MDRAARCSGASSLPLLLALALGLVILHCVVADGNSTRSPETNGLLCGDPEENCPAATTQSKRKGHFSRCPKQYKHYCIKGRCRFVVAEQTPSCVCDEGYIGARCERVDLFYLRGDREQILVICLIAVMVVFIILVIGVCTCCQ

SEQ ID NO: 1019338 - protein, 117 aa, Homo sapiens
LKKWMPRQHKQDPGTPTGYGAVPQSQGPGFLPREVRNKNNFSLVPFSSPDNDFSTLDLPFLVPNPHPVVSCRHHCLQGMPSAAHLHPNYKLPEGDANLCLGRLIVKKGGQGTCSPKD

SEQ ID NO: 1019339 - protein, 147 aa, Homo sapiens
MPSSSFRRSKITLTLAMAAVPHADVTLLRAHMEGNAVRYQAQVAGEDQQVHCHVGLAAELAGQRPVGSGGAFGQDTHVHFRARCGLGNDAQVGFGVGGVQTHALLVEVADVLGLLDGVAVADAVSADATVHHLVQFVDRGDDEARTF

SEQ ID NO: 1019340 - protein, 201 aa, Homo sapiens
MLDVMWQIGCEMKLEKLTVSYMNECSRSMIEYESHIQCNCLALVINVQSEDEDGVLMPSSIYVWHMCDLLVAIRQEELGSSLSLACVFRFNRVTNTCVDKFSGHPKGFAYIEFSDKESVRTFLGLRMSSPILRKGKSRWSQIEPNRPGISTTDRGFPRARMRALDTIYNSYRSVIVQMVLAAGAGVAFTGAGLERIMVSPY

SEQ ID NO: 1019341 - protein, 170 aa, Homo sapiens
  misc_feature (165)..(165): Xaa can be any naturally occurring amino acid
MVFFSEVVKNRSCDGCFLTVPTAPMTVSPYGGISQPSSVGPNPLQPSFRVLFSRPLSGLSGQPCPFHFLPPGGGAPGPQNHKSLETQRTSSWREGAGPVGPPCHIAFSGPTWGPWRGFSSQTPSPHPQEKGVFLPPVIVVFWEEILLVQGQLIFLLTLEKIVIYXVSSFK

SEQ ID NO: 1019342 - protein, 105 aa, Homo sapiens
HFLHRETRGAAQGCLGRPQERHPAASVLWTSGARLLRVGLLSTPSSTPGLCPPEANSLAPAVRTEISPDVATGPLGGRSSHSLNCALEDGKAPQRPSLLMSLSCA

SEQ ID NO: 1019343 - protein, 236 aa, Homo sapiens
  misc_feature (12)..(12): Xaa can be any naturally occurring amino acid
YCEDRVIEHYLXIKGLTRGQAVVQYMKIVEALPTYGVHYYAVKDKQGLPWWLGISYKGIGQYDIQDKVKPRKLFQWKQLENLYFREKKFAVEVHDPRRISVSRRTFGQSGLFVQTWYANSSLIKSIWVMAISQHQFYLDRKQSKAKIPSARSLDEIAMDLTETGTQRASKLVTLEAKSQFIMASNGSLISSGSQDSEVSEEQKREKILELKKKEKLLQEKLLKKVEELKKICLREA

SEQ ID NO: 1019344 - protein, 108 aa, Homo sapiens
MAISQHQFYLDRKQSKAKIPSARSLDEIAMDLTETGTQRASKLVTLEAKSQFIMASNGSLISSGSQDSEVSEEQKREKILELKKKEKLLQEKLLKKVEELKKICLREA

SEQ ID NO: 1019345 - protein, 47 aa, Homo sapiens
MDEYGFRAINDFGSVTISSTYKVLVFSERGTYQVTSQYTDRGGEGSV

SEQ ID NO: 1019346 - protein, 124 aa, Homo sapiens
IHDHPFPFSKIYLFIKTNTYKETEFDRVSLLLSTKKPQHVRISYGLAVSSSSCLYSFHILSISVTPRMSSGRSVLRKDIQSQQCQADLPELLSLQIPLRSLLSSINLLNERINQLRKSGSQTHP

SEQ ID NO: 1019347 - protein, 109 aa, Homo sapiens
AALRAPEAAVAGGPPDFSSRPVLERLTGPRPAASLSLALRGLGDWAAGLRVRGGGRLRPGASWPREPRDGGPGRGGGAAAVSLGGEGAAGPARFPARKLREAWTSAHWR

SEQ ID NO: 1019348 - protein, 148 aa, Homo sapiens
AALRAPEAAVAGGPPDFSSRPVLERLTGPRPAASLSLALRGLGDWAAGLRVRGGGRLRPGASWPREPRDGGASRGMGARAAEEAPLLCPLVERALPALRGFQPGSFGKPGRLLTGDDTCVGCWVSWCIGAGTGSILQCKLSPPVQNLK

SEQ ID NO: 1019349 - protein, 142 aa, Homo sapiens
AALRAPEAAVAGGPPDFSSRPVLERLTGPRPAASLSLALRGLGDWAAGLRVRGGGRLRPGASWPREPRDGGASRGMGARAAEEAPLLCPLVERALPALRGFQPGSFGKPGRLLTGDDTCVGCWHSCYLTREGGDFACDGLPV

SEQ ID NO: 1019350 - protein, 109 aa, Homo sapiens; identical to SEQ ID NO: 1019347

SEQ ID NO: 1019351 - protein, 186 aa, Homo sapiens
  misc_feature (148)..(148): Xaa can be any naturally occurring amino acid
  misc_feature (169)..(169): Xaa can be any naturally occurring amino acid
GGEVATGSAPLPSDPVSSLSVFLFQTTWTRLGCCEAAEPPPLGVAATTTIGVTSPASVRSRRSRAAHVSSESAHMATQAHSLSYAGCNFLRQRLVLSTLSGRPVKIRKIRARDDNPGLRDFEASFIRLWDKITNGSRIEIKQTGTNLXEQPGLLYGGSVEHDCGVLGGXGYDLESLLCLAPFMKHP

SEQ ID NO: 1019352 - protein, 89 aa, Homo sapiens
NHTVMALMASLDAEKPQGQKKVEELEGEIPTFNHKLQDASAEVERLRKENQVLSVRIAAKKYYPSSQDSSSVAAPQLLIVLLGLSALLQ

SEQ ID NO: 1019353 - protein, 98 aa, Homo sapiens
APLDCRVCDVRGKDVISVLGKKVARGPKFLESGRAAIVDMGPGKPMGVESFPDKPPLGRFAVCDIKQTVAVGVIKTVDKKAAGGGKVPKFAQKAQKGK

SEQ ID NO: 1019354 - protein, 457 aa, Homo sapiens
  misc_feature (1)..(1): Xaa can be any naturally occurring amino acid
  misc_feature (50)..(50): Xaa can be any naturally occurring amino acid
  misc_feature (105)..(105): Xaa can be any naturally occurring amino acid
  misc_feature (112)..(112): Xaa can be any naturally occurring amino acid
  misc_feature (130)..(130): Xaa can be any naturally occurring amino acid
  misc_feature (148)..(148): Xaa can be any naturally occurring amino acid
  misc_feature (351)..(351): Xaa can be any naturally occurring amino acid
  misc_feature (367)..(367): Xaa can be any naturally occurring amino acid
  misc_feature (399)..(399): Xaa can be any naturally occurring amino acid
XDDYHPPPPPDTEVLTGVVTATLMLSGSQAPPVRAGPISDPNATTTKPCXATAAAAVTRNNPSCLDTRASPSHPDGGLSTEMPRPRAQVLHAGLSPAGLGSPVPXESVVPSXGDPAGQVLQRLLHRVAQXLGPPLQQGVLLAAAAQTXAVAHTLCVPQLLVRNLQLLLVVVVLLDFGFEVLEPLPERLQLLVREVGGLRQAPQVNHPGLLELSLSAVALVADPAQAVQALVDVRSFLLQLRVPAVQDAALDVAQVRGANDVLVDLFGPAQGLQQDVVLVNFLFVMQELPPELVQFFAGEFPRGLRFVLQLFQPGVIQPVFLGATEGVVGHCRASFFSSRPYLAKMTLRLRXSFVFFSPSSSKPSSFXFFQASSSFSCIFRSAWSSASLTGGRCSCWAFXYSWFNFSMRYSSPDSRFGDGLGWFFSREYLPPWLAAGQGPRKSSSSSSAGSPGRNDLT

SEQ ID NO: 1019355 - protein, 84 aa, Homo sapiens
GKALQKCPNSGILWFEAIFLQARPHRRPQSVDSLKKCEHDPPVVLAVAKLFWSQRKIPKAREWFPRPVKIDSDLGEAWAFFYKF

SEQ ID NO: 1019356 - protein, 108 aa, Homo sapiens
GPTHPARGHLVVTATMESRSGAGSCRPRSVDRTLHFWSSASGWLTSLTVQDEILWGRAVGSELRSLLVPDPKLADRPRRGAHTSSQRQAGHGRYACVQAPRTPQDGGS

SEQ ID NO: 1019357 - protein, 1405 aa, Homo sapiens
GALRSGARGAARSPMQGSARHFRSRGRPVKPTWIRQRCATPQCRAPSCLRGLAPGPSTAHLLGPARQRPFVVKAPGPSAMPAAETASGSRVCFCALPGRGPGGLVPGALESLLRPHPRAVTVTHAAQPGGKIVRGCGFSMSSSVKTPALEELVPGSEEKPKGRSPLSWGSLFGHRSEKIVFAKSDGGTDENVLTVTITETTVIESDLGVWSSRALLYLTLWFFFSFCTLFLNKYILSLLGGEPSMLGAVQMLSTTVIGCVKTLVPCCLYQHKARLSYPPNFLMTMLFVGLMRFATVVLGLVSLKNVAVSFAETVKSSAPIFTVIMSRMILGEYTGLLVNLSLIPVMGGLALCTATEISFNVLGFSAALSTNIMDCLQNVFSKKLLSGDKYRFSAPELQFYTSAAAVAMLVPARVFFTDVPVIGRSGKSFSYNQDVVLLLLTDGVLFHLQSVTAYALMGKISPVTFSVASTVKHALSIWLSVIVFGNKITSLSAVGTALVTVGVLLYNKARQHQQEALQSLAAATGRAPDDTVEPLLPQDPRQHPWEQEAASCCCPRDTASPRNGQGRPPPWPCWGAGHGELSWHCLRLSRFVGEDQQKLKLGIPGISFLEVDTRPVADCVRRAHPQCNVKTASEAPMLGVHHFLSGRHPRVHREPEVGPVPTRAAPCHSQESPRRPTPAIEGPEALDRRQTGPGHEATEQGRREGTEGPGRKGLLLPRWALRTSPHLTQGCGHPQTIPEASQASSCSIARHSRAMTTEAVQSLLFRGRPPTSSTPCPPIPSTPWADELPATPGHPALLPVGVSSPEVEDKPLVFNLGGDVYVPFLFWTLSMRQAVLRSPWGEPVCPPSEPTVPIIIYHLSGSPREPWAGRCSVDGLGYVAFTWAPSLLKKETSTLNVSGARGVCQAPTLSHSPQGTVVRHTGATSQLNSSSCVTHPRGRRRPEEWLLEPCVRQRLLTMSELFTPNLATGGFPCPVQPVASQPLRPRAPGLVRGSMGLQWSRVSFPCLLFRPLAPMVTSLVFHLASHLGNTKIAPPEDKIVQKQSNNSDSLTSTYSKKSAMMMDRVRLFNPQVTFLFFGDGLALSPRLECSGMILARCSLDFLGSSDPPQPPMWLEPQARATMPGYFFVELGSRFVAQAGLELLGSSNPSHSASCSVENIGVGYYTCFSRFYKTADLCVEDRPGVCSLRCEDVLSRDFPWVSISFFLLSSKTNRRPAAVAQASSPSTLGGCRWRITRPGVRDQPGQHDETLSLPKIQKLAGCDGGCLWSQLLRRLRQENCLSPRGGGCSEPRSCHCTPAWATGQDSVSKTNTIRKCSGGGGELLICEDRLKATPRVALSTSPSRIWLPASLKIVVWHKERCRRLVLSTLEFPAAQHLVPSPPPSQGAAILFGFSVCGPETNVFPKD

SEQ ID NO: 1019358 - protein, 258 aa, Homo sapiens
  misc_feature (2)..(2): Xaa can be any naturally occurring amino acid
  misc_feature (197)..(197): Xaa can be any naturally occurring amino acid
  misc_feature (206)..(206): Xaa can be any naturally occurring amino acid
  misc_feature (222)..(222): Xaa can be any naturally occurring amino acid
TXHSQTTPHTTVTSGKKDPGASQPGAPRRRPPLQESEGAGPGVSGAAWEHLPLKGVGSSTKRDSLAAAPASPPGAVPPLTGKAVGQGPLCQTPPAPLQVLLLPAPGLQGSRLQGSAVGEGQGPGLQQGALVNGIEVEGRLPLTLASRKEGDPSDSGGHCAAHAANGRHGNLLKRKLLSSSMAWGDHVGLQPGAFQVXVVVTQSLVXSRQPLLGHKLAALQVXGPIKEDLRLHDGHNAILLAETGITGQNIGIFHEGEG

SEQ ID NO: 1019359 - protein, 120 aa, Homo sapiens
  misc_feature (7)..(7): Xaa can be any naturally occurring amino acid
  misc_feature (118)..(118): Xaa can be any naturally occurring amino acid
LLPAGKXKRVNFPFPLVVVLKSAERMGYTGLNITYPCKQAILPLLDELSDEARGIGAVNTVVFREGKRIGHNTDCLGFAEGFRRGLAQAARHRVIQMGAGGAGAAVAHALLSEGHQGXEN

SEQ ID NO: 1019360 - protein, 331 aa, Homo sapiens
  misc_feature (2)..(2): Xaa can be any naturally occurring amino acid
  misc_feature (87)..(87): Xaa can be any naturally occurring amino acid
  misc_feature (305)..(305): Xaa can be any naturally occurring amino acid
  misc_feature (307)..(307): Xaa can be any naturally occurring amino acid
  misc_feature (309)..(309): Xaa can be any naturally occurring amino acid
QXGPVTEEKTRTRHRTEESPGLGWWGPHPRALVAGRHGAQAWEPRAGVSGPHLAGRVKKRVEKSNRSRLILRRLRTSSSSSVTRTRXGLAAEHALLHGAAQDGLQLLRAAQEAGLRALLVEAQAQSEAPVARLVPVLGAQQVLFEVGQRQAGPEVLSQHADGRHRMAAFVTGPLMATVRMHCLLCTFQRRTVSSWELESSTLPLVDTDRQVTWFLFPLKTFPASCSGWKLLFLCPGQVKRSTWKMELSLPPQNIWCSARSMVTAMMDKSKRTESSSSPEETSHSFTVWSSEEVATRAREAPKPQXRXVXGSVFVRPEVPWRRNSGGVGLQH

SEQ ID NO: 1019361 - protein, 115 aa, Homo sapiens
MLFHGVVFNLLILMIRPSWPPKCAGITGMSTRAQPKFYFLTNHTDLVLKLMTCSYVQNCDKTEEKLITSLFILTFFFVNQKLLMLETYYEVPLSASDLRKILKLGCTGNDDASIS

SEQ ID NO: 1019362 - protein, 115 aa, Homo sapiens; identical to SEQ ID NO: 1019361

SEQ ID NO: 1019363 - protein, 67 aa, Homo sapiens
SSQPEGSWLPYSELEQQPPVWCFWQDCLMLEEQLTWVLVCRRVISSSEYLLSAEYVSTLLGLGTQKR

SEQ ID NO: 1019364 - protein, 125 aa, Homo sapiens
SDHFKHPAYFRKSPKPEGSGEPELRPLHHFGLGLDSTRQLKLWASPFGKLNQALSFLVPSSPAAPAVSAQPPPLGCRLGSQTTQTPFPLAPPPKGLDFLFGLFVFKQNGVKIKPLQGLAPCWFEL

SEQ ID NO: 1019365 - protein, 105 aa, Homo sapiens
WPFTPPHTTGRHTREKRPPPSHSAFHSVPFALLFPPLKKGAPTPGALISSGGYVPLVFVATQRLCGGPSLGLLSHTISGRCVAMSVICPGDKKFSRGKTPWRNDA

SEQ ID NO: 1019366 - protein, 127 aa, Homo sapiens
  misc_feature (2)..(2): Xaa can be any naturally occurring amino acid
  misc_feature (12)..(12): Xaa can be any naturally occurring amino acid
  misc_feature (15)..(15): Xaa can be any naturally occurring amino acid
  misc_feature (18)..(18): Xaa can be any naturally occurring amino acid
  misc_feature (22)..(22): Xaa can be any naturally occurring amino acid
MXTSNGNFVPLXLWXTLXYDDXPFCASCALHTSRGRHPHIYEMPPQELHRHSLHANKQLLLVLGLSWVALELGGTLFLAIRGPEHDIEYPFKKGEMLNREDLIFITLDHHLVTEHPLFTPGPYPFDG

SEQ ID NO: 1019367 - protein, 143 aa, Homo sapiens
  misc_feature (13)..(13): Xaa can be any naturally occurring amino acid
  misc_feature (32)..(32): Xaa can be any naturally occurring amino acid
  misc_feature (35)..(35): Xaa can be any naturally occurring amino acid
  misc_feature (44)..(46): Xaa can be any naturally occurring amino acid
  misc_feature (51)..(53): Xaa can be any naturally occurring amino acid
  misc_feature (59)..(60): Xaa can be any naturally occurring amino acid
  misc_feature (64)..(65): Xaa can be any naturally occurring amino acid
  misc_feature (71)..(71): Xaa can be any naturally occurring amino acid
  misc_feature (92)..(92): Xaa can be any naturally occurring amino acid
  misc_feature (96)..(96): Xaa can be any naturally occurring amino acid
  misc_feature (98)..(98): Xaa can be any naturally occurring amino acid
  misc_feature (103)..(103): Xaa can be any naturally occurring amino acid
  misc_feature (105)..(105): Xaa can be any naturally occurring amino acid
  misc_feature (114)..(114): Xaa can be any naturally occurring amino acid
  misc_feature (116)..(116): Xaa can be any naturally occurring amino acid
  misc_feature (123)..(123): Xaa can be any naturally occurring amino acid
  misc_feature (127)..(127): Xaa can be any naturally occurring amino acid
SVEIPELEFELGXAVLGGKFTTLEGLLKDIRXLVXNNPFTLGDXXXPALTXXXPEFRQXXALLXXGHMQAXFLMDDPAGNSYLQNVYAPADXPEMXVXRHTRXFXQNEELGLNXMXTEGFEAXLLRXGSSGWLKGQPPALLFL

SEQ ID NO: 1019368 - protein, 131 aa, Homo sapiens
MMDSWSLEVMSQVQVLLYFFQLEAIPAPDSKSQSILFSTEVKGPSPSPGGRQMAWKPLANRAIRRAGTFLRCPWATPKCWAICQETATQSRRTGGLGRFRPGLGAPGWPQTVVFYVATRGGPKPVHFRVQA

SEQ ID NO: 1019369 - protein, 120 aa, Homo sapiens
PEAHPPSPRSPAAMTLSITMAEPGARNDGTQEKGFWAQEKHLHSGALSFACTESVVILVASKCQPFLKPTSDHPEFPLGPCLLRVMKAGCYAHSITMKPGIGPRGTNSRCPCLPVQETAS

SEQ ID NO: 1019370 - protein, 73 aa, Homo sapiens
  misc_feature (71)..(71): Xaa can be any naturally occurring amino acid
GAVGGGGVEVDHGTVVAALADDQHQHVGTVQTAQAVGAGDAVIGRTGRALGERWQGFLQRTAQAGFASLFXLL

SEQ ID NO: 1019371 - protein, 160 aa, Homo sapiens
VPRIVSALFYTSPLTVAECAGTDDRSQQPDSVLTVAEYVRADDRPPQPDSVLTVAVCGGADDMPPQFDSVLTAAECVWAQVTGHHNLNQDSVGLPASAIRKTILGLLRGAKNNLHVRETLIVCGQRTNCGLLKTAAGSYYASHQEVESNHLPPLNHGWSQ

SEQ ID NO: 1019372 - protein, 127 aa, Homo sapiens
  misc_feature (69)..(72): Xaa can be any naturally occurring amino acid
  misc_feature (74)..(75): Xaa can be any naturally occurring amino acid
  misc_feature (77)..(77): Xaa can be any naturally occurring amino acid
  misc_feature (85)..(85): Xaa can be any naturally occurring amino acid
  misc_feature (95)..(95): Xaa can be any naturally occurring amino acid
  misc_feature (127)..(127): Xaa can be any naturally occurring amino acid
MADKFQVDQLAKGKANVKHEEQEAQGSTRRCWLVFRKSSSKGAPSGLEKYPDEKSVCLRGCPKVTEISXXXXVXXLXKETKRQAXAIIFTDDSAXTFTCDSELEAEEWYKTLSVELSGVRLNDISVX

SEQ ID NO: 1019373 - protein, 127 aa, Homo sapiens; identical to SEQ ID NO: 1019372
  misc_feature (69)..(72): Xaa can be any naturally occurring amino acid
  misc_feature (74)..(75): Xaa can be any naturally occurring amino acid
  misc_feature (77)..(77): Xaa can be any naturally occurring amino acid
  misc_feature (85)..(85): Xaa can be any naturally occurring amino acid
  misc_feature (95)..(95): Xaa can be any naturally occurring amino acid
  misc_feature (127)..(127): Xaa can be any naturally occurring amino acid

SEQ ID NO: 1019374 - protein, 151 aa, Homo sapiens
  misc_feature (11)..(11): Xaa can be any naturally occurring amino acid
  misc_feature (26)..(27): Xaa can be any naturally occurring amino acid
  misc_feature (35)..(35): Xaa can be any naturally occurring amino acid
  misc_feature (42)..(43): Xaa can be any naturally occurring amino acid
  misc_feature (53)..(53): Xaa can be any naturally occurring amino acid
  misc_feature (58)..(58): Xaa can be any naturally occurring amino acid
  misc_feature (60)..(60): Xaa can be any naturally occurring amino acid
  misc_feature (69)..(70): Xaa can be any naturally occurring amino acid
  misc_feature (74)..(74): Xaa can be any naturally occurring amino acid
  misc_feature (77)..(78): Xaa can be any naturally occurring amino acid
  misc_feature (80)..(80): Xaa can be any naturally occurring amino acid
  misc_feature (84)..(84): Xaa can be any naturally occurring amino acid
  misc_feature (87)..(88): Xaa can be any naturally occurring amino acid
  misc_feature (104)..(104): Xaa can be any naturally occurring amino acid
SSAAPQRHLPXCNRYLTHTQRPRSAXXPYAQVTPXMEETPPXXMPWIEVQSLXKAVDXLXQCRATLMYXXVFAXSLXXNXQPIXFEXXHADLENATEVLSGSLXRDISQDSLQDIKQKVQDKSRYCESRRRVLFQHVHEGYEKDLWEYIED

SEQ ID NO: 1019375 - protein, 165 aa, Homo sapiens
  misc_feature (19)..(19): Xaa can be any naturally occurring amino acid
SWISARGCHCHGAEEHSSXLARWTCCALLAGSEYLKLGYVCRYHVKDSSRHVILGTQQFTPNEFASQINLSVENAWGILRCVIDICISWRRANPPPSFPNYPPKGPQQAGHPCLPAFPDGHLQLLYVRMKEEEEEEESRKKKEEENFNPVMWSWSLSFPRDYEGL

SEQ ID NO: 1019376 - protein, 76 aa, Homo sapiens
VGPSATYIALKHVAPYGLACAGLSSLMGPQQRLLHPTHENSRLHSHQGIREVASHRVAAFKSEPLSYWPWEEQRSL

SEQ ID NO: 1019377 - protein, 137 aa, Homo sapiens
  misc_feature (128)..(128): Xaa can be any naturally occurring amino acid
  misc_feature (131)..(131): Xaa can be any naturally occurring amino acid
PSAENDTVYRKPPRPSHTPIKNYKKISPPSLRCLGSLSPPVALQLWGGQLTTAPSPSPWGGGGCWWLRRLKPFVPVLPVPKLALPSFPPGSGAKGEGAEMSPAMGGNSGGGNFAQGGLKSSHLPPPSXPLXKEKKAV

SEQ ID NO: 1019378 - protein, 191 aa, Homo sapiens
MLSSIVHRDLKPSNIHFTDGYEIKEDIGVGSYSVCKRCVHKATDTEYAVKIIDKSKRDPSEEIEILLRYGQHPNIITLKDVYDDGKFVYLVMELMRGGELLDRILRQRYFSEREASDALCTITKTMDYLHSQGVVHRDLFRGFSFVASSLIQEPSQQDLHKVPVHPILLCNSCLRWVATVQIFITLSRLSE

SEQ ID NO: 1019379 - protein, 248 aa, Homo sapiens
  misc_feature (136)..(136): Xaa can be any naturally occurring amino acid
  misc_feature (169)..(169): Xaa can be any naturally occurring amino acid
  misc_feature (185)..(185): Xaa can be any naturally occurring amino acid
VGLIPAVQFPGVITPQIAVRMGIVKLPCNTQDVFGSFAQQQVGQAEAQVLGSQLGPSWNVTSSDAYQLWVILRAIFMLGRDMDGACMVSCMLTEPSRLQIPPVRYSSPSFKAVCTATGTLQLPSRCLRKALSAMQXREVSGSCSTPTRTKMFWSLARTSTPKAPWPTAXMHFSGCRICPTRLCQXMRCRAAVARMMALNFCCSFSFRSRVLRFPRILLNSRSGNFLCSWAALRRELVPTTLFSGRVSR

SEQ ID NO: 1019380 - protein, 215 aa, Homo sapiens
  misc_feature (116)..(116): Xaa can be any naturally occurring amino acid
  misc_feature (152)..(152): Xaa can be any naturally occurring amino acid
MGIVKLPCNTQDVFGSFAQQQVGQADAQVLGSQLGPSWNVTSSDAYQLWVILRAIFMLGRDMDGSLHGLLYATEPSRLQIPPVRYSSPSFKAVCTATGTLQLPSRCLRKALSAMQXREVSGSCSTPTRTKMFWSLARTSTPKAPCPTRLCQXMRCRAAVARMMALNFCCSFSFRSRVLRFPRILLNSRSGNFLCSWAALRRELVPTTLFSGRVSR

SEQ ID NO: 1019381 - protein, 120 aa, Homo sapiens
MCVHLQAQAFVPQKGFDEKAAYFGHNLHDHACAAVHNLSDDGQPFFERSVHYGALSLASVEHVREVVAKDGMQTLLAFSHLAAELESVDEPSAEQRQRITVGLYFYTEATDPDSSKTPGP

SEQ ID NO: 1019382 - protein, 161 aa, Homo sapiens
AALEPAATRGRASGVREPSGECAAASAPAPALAAVSARTPTPSLTLPFSGAAAPRPATAAPPGIQRAPGGRGRGVLTLWCRPTTPTPGSGPAEEGDAPRVGQTGHLGCEGGLGAEAAVQGRLAQQPVPAAVPAVPPWRLRSRPTTGAINSPERKAAPWWPG

SEQ ID NO: 1019383 - protein, 30 aa, Homo sapiens
MARGRWRRAWLGGRLSIAKEAAQDAVRSGR

SEQ ID NO: 1019384 - protein, 154 aa, Homo sapiens
  misc_feature (21)..(21): Xaa can be any naturally occurring amino acid
DGEWAIKGWLDVASRGVTQIXFITFGKWYDAGKQKYFASSSTLFVIEFILFHYVEIRRWQDIKNPGSVNQDPIFKQYSLPPNEVGYPGGIFNPLNFAPTAEAKEKELANGRLAMLAFLGFIVQHNVTGKGPFDNLLQHLSDPWHNTIIQTFGGN

SEQ ID NO: 1019385 - protein, 174 aa, Homo sapiens
  misc_feature (52)..(52): Xaa can be any naturally occurring amino acid
  misc_feature (90)..(90): Xaa can be any naturally occurring amino acid
MKENCTHQKCCGKVTMDGESTGPQPLQSHWDHFYKRNKNLPPEEQMISALPXIKVLTLTDDHEFMVIACDGIWNVMSSQEVVDFIQSKIXQRDENGELRLLSSIVEELLDQCLAPDTSGDGTGCDNMTCIIICFKPRNTAELQPESGKRKLEEVLSTEGAEENGTSDKKKKAKR

SEQ ID NO: 1019386 - protein, 174 aa, Homo sapiens; identical to SEQ ID NO: 1019385
  misc_feature (52)..(52): Xaa can be any naturally occurring amino acid
  misc_feature (90)..(90): Xaa can be any naturally occurring amino acid

SEQ ID NO: 1019387 - protein, 90 aa, Homo sapiens
TFDVEALIKLRSQTRAISDALKAQAADYLATVAPLIRPQTLFGEYLQGAQRSSGRETQGHFQSLIELFDRIGSAAPFQLVNELEVPLNLI

SEQ ID NO: 1019388 - protein, 65 aa, Homo sapiens
MRCNVQNLHIANTPLEATQRLSAQTHSCSQSLQTNPLADRPAIAKAVAHQRIQTQKSSQPPRSAA

SEQ ID NO: 1019389 - protein, 171 aa, Homo sapiens
LHNGGMKPRVMKEAVSTPSRYGPQGIRNGMMLKLPENCKKKNFWLPQVDMRAAQVAQDEEIARLLMAEEKKAYYTSQGAGEIIFGQKKASPRVEAKEQLKQQIQSQKRVMNLTILRMKGQHGHHQPMHEQTGEDAGLHSLLQNLQRFHTAFLKYQSPRHKWFITYKTIEKR

SEQ ID NO: 1019390 - protein, 75 aa, Homo sapiens
TLGVEGPWQLPAASGDQKGSPVPPKPQQAEVWAEFIFLTFGHSFSNCPQGVPPAEERPGGPTLPVTLHLGLAVKP

SEQ ID NO: 1019391 - protein, 266 aa, Homo sapiens
  misc_feature (4)..(4): Xaa can be any naturally occurring amino acid
  misc_feature (41)..(42): Xaa can be any naturally occurring amino acid
  misc_feature (46)..(46): Xaa can be any naturally occurring amino acid
  misc_feature (48)..(48): Xaa can be any naturally occurring amino acid
  misc_feature (51)..(51): Xaa can be any naturally occurring amino acid
  misc_feature (58)..(58): Xaa can be any naturally occurring amino acid
  misc_feature (60)..(60): Xaa can be any naturally occurring amino acid
  misc_feature (67)..(67): Xaa can be any naturally occurring amino acid
  misc_feature (72)..(72): Xaa can be any naturally occurring amino acid
  misc_feature (134)..(134): Xaa can be any naturally occurring amino acid
  misc_feature (140)..(140): Xaa can be any naturally occurring amino acid
ELLXMSSRPHGCGVSPKVIRVSLLNAPGPNLKLVRPKALLXXCFLXIXVVXCSCCKQXSXLNWQDCXVPSPXSCSPEPSLQYAATQLYPPPPWSPSSPPHSTGSVRPVRAQGEGLLPWAPWMVTADRGSQTSSXRSSTGXETSRGGGGSPPWERTPGKGVFPLRGILCPSRAQLPAFHSCHGLTWKGGDLVTFRWMGTQLLASPGAALTVPPPKRGYLASYGPQQLRAQLWDAGEKASPAWPFYDPPAWQTGELGAEGGAKCPILP

SEQ ID NO: 1019392 - protein, 297 aa, Homo sapiens
  misc_feature (219)..(219): Xaa can be any naturally occurring amino acid
  misc_feature (251)..(251): Xaa can be any naturally occurring amino acid
  misc_feature (263)..(263): Xaa can be any naturally occurring amino acid
  misc_feature (268)..(268): Xaa can be any naturally occurring amino acid
  misc_feature (289)..(289): Xaa can be any naturally occurring amino acid
GGGGGGVLVGPERWVAGHRVGGCPVGGGVVYTQRTKGVTAVTCSLKPSALHLPPQLGGQSVWPLSRWWGHPGTRWGRTQERCVSGCRCRLPVSLPASPLCWTPSLSSFAGKSGEPAANQAPCRQARRQSPHQPFQSQASYERAALQSPMFKRRRRRSRAGGGPARASARLEVTIALPQGLCRLLPGSLQEGQLLGFLLLVSRLILQPVGDDPLDDEVCXEVAATVNLTEDAPSLGLLVWVGAIPVRDNFCXAVTHQVHLEVTXELCCXRVRGSNHHFCNVPAGQPAQSXSMQIHEGV

SEQ ID NO: 1019393 - protein, 260 aa, Homo sapiens
GTRISSDFFEEESPFLHSQAMSECIKKNRVPFYEICLRRPLAWTGALDGWGFNVTGCPLEELPGCALVVGCSSWRERKVSPRYLVVHLNHLLSLPKTRHLGRDFWVVRQNRAFKGDNSLESLKSLMDAPGGILHEFEQPRVSHHLQIMEDTGAGRAPGAMASPSGSSEATGKPRGRDGRPRREEDDVPPEEKRLRLLLEGGSAQPQDCEDGEDAPRPGREETGTQTGGDGRGVQWFTPVIPALWEAEAGGSPEVRSSRPA

SEQ ID NO: 1019394 - protein, 138 aa, Homo sapiens
SAPRGPTEPALRLPSSAERTLALGPSSSPGAGRAPGAMASPSGSSEATGKPRGRDGRPRREEDDVPPEEKRLRLLLEGGSAQPQDSPGSRQNAPRPPTKSRPPPLTKERRAQKSPFFNIFRASAFLHHLPQYTANELE

SEQ ID NO: 1019395 - protein, 233 aa, Homo sapiens
GTRISSDFFEEESPFLHSQAMSECIKKNRVPFYEICLRRPLAWTGALDGWGFNVTGCPLEELPGCALVVGCSSWRERKVSPRYLVVHLNHLLSLPKTRHLGRDFWVVRQNRAFKGDNSLESLKSLMDAPGGILHEFEQPRVSHHLQIMEDTGAGRAPGAMASPSGSSEATGKPRGRDGRPRREEDDVPPEEKRLRLLLEGGSAQPQDCEDGEDAPRPGREETGTQTGGDGRGR

SEQ ID NO: 1019396 - protein, 220 aa, Homo sapiens
SAPRGPTEPALRLPSSAERTLALGPSSSPGAGRAPGAMASPSGSSEATGKPRGRDGRPRREEDDVPPEEKRLRLLLEGGSAQPQDCEDGEDAPRPGREETGTQTGGDGRGPLPQSPLLESGIGNHICFSPRDCWKTKIRWPRKEHYMYSQLSLRVRSFASGCLKLLPLKHLARRNHPVWLAQLLHARALLEFSSQKYLGAWSQQNEMTFQQVCHHVRENR

SEQ ID NO: 1019397 - protein, 121 aa, Homo sapiens
ILSFNGMLARLEDAFVRLSNFSADIAHELRTPVSNLLTHTEVVLTKKRDLDAYEDNLYSNLEDLKRMSRMIDDMLFLAKADNGLIIPEQVDIDLVGLVSRLIEYYQLAAEDRSIRLALQGE

SEQ ID NO: 1019398 - protein, 105 aa, Homo sapiens
PTPKTYFPVFDLSPGFAQVKGPGKKVADAFHNAVGEVEDMPNALSALSDLQGPKFWVDPVNIKFLNPCLLVTLAAPLPAEFTPGGDASLDKFLGFVGPGLPPKNR

SEQ ID NO: 1019399 - protein, 149 aa, Homo sapiens
KKHPELPLTHTHICYPHHFIDLFSICTLHTVLRTRQGVCLPLVTCWISFALYCSGFELPNRSYSLVSPACPPPQRVAMISVSWTSYLSFMRSRSIWCCLVISVKYFPSYRYLCLTLIARDHSCSKVVFVWLVTSDAYANKACSQKENTQ

SEQ ID NO: 1019400 - protein, 93 aa, Homo sapiens
KACKKITANVRFLSPSKDVLFHRPPIEINLKIKIHPLQFLSGPLALFLLRCLTFPCVDISFQTKEIKARLEFWCTDVKSMEMLVEHQANNILT

SEQ ID NO: 1019401 - protein, 115 aa, Homo sapiens
MAFEYSRNRIIILQMSKKQKAPDHITSTLSQGQLRTEIFSVQARWLMPVIPALCDAKAGGSLEPRSARPAWAAERDPDSTKLAGHGGAHLLSQLLRKLRWRSAIAQEDEAAASCG

SEQ ID NO: 1019402 - protein, 69 aa, Homo sapiens
PTPPNYGKYCVRPKKPAQEALINYSRRGKGVLKHLHGRCNSESKVCSSEDSEADRYSDYGWGGPSSPFN

SEQ ID NO: 1019403 - protein, 56 aa, Homo sapiens
LMIIELSSYLDSGGAHGMPVCGFINYSRKLDKVLTLQDMLVPGQEDTFWKTVEESS

SEQ ID NO: 1019404 - protein, 307 aa, Homo sapiens
RESYEDTSASGKPENFLTYLVSERSAKEAEDKIKKAIEKGETLPTEARFDSNCITPGTEFMARLHEHLKYFVNMKISTDKSWQGVTIYFSGHETPGEGEHKIMEFIRSEKAKPDHDPNTRHCLYGLDADLIMLGLTSHEAHFSLLREEVRFGGKKTQRVCAPEETTFHLLHLSLMREYIDYEFSVLKEKITFKYDIERIIDDWILMGFLVGNDFIPHLPHLHINHDALPLLYGTYVTILPELGGYINESGHLNLPRFEKYLVKLSDFDREHFSEVFVDLKWFESKVGNKYLNEAAGVAAEEARNYKK

SEQ ID NO: 1019405 - protein, 386 aa, Homo sapiens
MGVPKFYRWISERYPCLSEVVKEHQIPEFDNLYLDMNGIIHQCSHPNDDDVHFRISDDKIFTDIFHYLEVLFRIIKPRKVFFMAVDGVAPRAKMNQQRGRRFRSAKEAEDKIKKAIEKGETLPTEARFDSNCITPGTEFMARLHEHLKYFVNMKISTDKSWQGVTIYFSGHETPGEGEHKIMEFIRSEKAKPDHDPNTRHCLYGLDADLIMLGLTSHEAHFSLLREEVRFGGKKTQRVCAPEETTFHLLHLSLMREYIDYEFSVLKEKITFKYDIERIIDDWILMGFLVGNDFIPHLPHLHINHDALPLLYGTYVTILPELGGYINESGHLNLPRFEKYLVKLSDFDREHFSEVFVDLKWFESKVGNKYLNEAAGVAAEEARNYKK

SEQ ID NO: 1019406 - protein, 170 aa, Homo sapiens
MSGLPDLLKRQIAKKAAALDVYNAVSTSFQRVVHVQQKDDGCCLWHLKPPSCPLLTKFKELNTKVIDLSKCGIALGEFSTLNSKLKSGNSAAVFMRTRKEFTEEVRNLLLEEIRWSNPEFSLKKYFPLLLKKQIEHQVLSSECHSKQELEADVSHKETKRKLVEAENSKS

SEQ ID NO: 1019407 - protein, 139 aa, Homo sapiens
MVLQLERKGPAAQEFVQPLRVPSNKAQVKPGQTFSVAGWGQTAPLGKHSHTLQKVKMTVQEDRKCEFDLRHYYDRTIELWVGDPKIKKTSFKGDFGGPLVCNKVAQGIVSYGRNNGMPPRACPKVSSFVPWIKKTMKRY

SEQ ID NO: 1019408 - protein, 69 aa, Homo sapiens
QYGDQDFQMEGKRAHRDYSALRASVAQAGLPAAYLRLGSTSAVKRLSASEPISSGNWKALRAVRFTSIG

SEQ ID NO: 1019409 - protein, 144 aa, Homo sapiens
AGRAGHRPESHRTVHRELSRSGELAVRALEQFATVGEAKLDKTKKGIVNEQFLLQRVADGAIDLYAMVVVLSRASRSLSEGHPRAQHEKMLCDPWCIEAAARIPKGMAALQFDPWQQEVYRNFKSISKALVERGGVVTNNPLGF

SEQ ID NO: 1019410 - protein, 64 aa, Homo sapiens
VVVGDEALVQADGGAVQRRHEPLHLDRGLGAGHELDLGVDVPQGVGFILGHREAEEEDLIIRDR

SEQ ID NO: 1019411 - protein, 427 aa, Homo sapiens
  misc_feature (33)..(33): Xaa can be any naturally occurring amino acid
  misc_feature (43)..(43): Xaa can be any naturally occurring amino acid
  misc_feature (69)..(69): Xaa can be any naturally occurring amino acid
  misc_feature (150)..(150): Xaa can be any naturally occurring amino acid
  misc_feature (197)..(197): Xaa can be any naturally occurring amino acid
  misc_feature (228)..(228): Xaa can be any naturally occurring amino acid
PEIKITPLGAGHDVGRNCILVSISGKNVMLNFXGHIDFNNDRXLETAWIKKYRPNLLITKSTYATTIRXSKHCREQNFLKKVHETVERGGKVLIPLFALGRAQELCILLETFQKHMNLKVPIYFSTGLTEKANHYYKLFIPWTNQKIRKXFVQRNMFKFKHIKAFNRAFADNPGPMVVFATPGMLHAGQSLQIFRKXAGNKKNMVIMPGYCVQGTSATRSSAGSGTRXEGRQVLEVKMQVEYMSFSAHADAKGIMQLVGQAEPESVLLVHGEAKKMEFLKQKIEQELRVNCYMPANGETVTLPTSPSIPVGISLGLLKREMAQGLLPVKAKEALRASLGTGLPLGNPLQTGTSETFPLGLGCPLEQALKELGLAEHQLRFTCRVHLHDTRKEQETALRVYSHLKSVLKDHCVQHLPDGSVTVESVLL

SEQ ID NO: 1019412 - protein, 89 aa, Homo sapiens
  misc_feature (1)..(1): Xaa can be any naturally occurring amino acid
  misc_feature (27)..(27): Xaa can be any naturally occurring amino acid
  misc_feature (32)..(32): Xaa can be any naturally occurring amino acid
  misc_feature (35)..(35): Xaa can be any naturally occurring amino acid
  misc_feature (42)..(42): Xaa can be any naturally occurring amino acid
  misc_feature (45)..(46): Xaa can be any naturally occurring amino acid
  misc_feature (48)..(49): Xaa can be any naturally occurring amino acid
  misc_feature (53)..(54): Xaa can be any naturally occurring amino acid
  misc_feature (57)..(58): Xaa can be any naturally occurring amino acid
  misc_feature (60)..(60): Xaa can be any naturally occurring amino acid
  misc_feature (72)..(72): Xaa can be any naturally occurring amino acid
  misc_feature (79)..(79): Xaa can be any naturally occurring amino acid
  misc_feature (85)..(85): Xaa can be any naturally occurring amino acid
XYYKFQLWDIGWYSGLTGNFNCGCYQXSYAAXSTXVSMDWPXIDXXFXXLWTXXLLXXWXPPSPPQNSDMSXMAWTVYXEMMAKXGLKS

SEQ ID NO: 1019413 - protein, 122 aa, Homo sapiens
FFITIIYYFYYSFKKLLSLHAAVLGTMKCLLPRGWEPLRPSSAVLSGSYRPDPDRNLGAVTLVSGGLLRAPNSSGPKDHERAGAGSPTDDGGRRAGHTGGAGVSAFGDAFSLKTQPLLGLAA

SEQ ID NO: 1019414 - protein, 317 aa, Homo sapiens
FFITIIYYFYYSFKKLLSLHAAVLGTMKCLLPRGWEPLRPSSAVLSGSYRPDPDRNLGAVTLVSGGLLRAPNSSGPKDLRGPEPGPQPTMEGDVLDTLEALGYKGPLLEEQALTRRPEGGLSSPEFSELCIWLGSQIKSLCNLEESITSAGRDDLESFQLEISGFLKEMACPYSVLISGDIKYRLKKKEDCLKLLLFLSTEIQASQILQNKKHKNSQLDKNSEVYQEVQAMLDTLGIPKSTTPDIPHMLNQVESKVKDILSKVQKNHVGKPLLKMDLNSEQAEQLERINDALSCEYECRRRMLMKPIRCDCTVLGMV

SEQ ID NO: 1019415 - protein, 168 aa, Homo sapiens
CQPPSATLRFSFDRQKHGTSTDRQEEMVTNWLVRNPDYTRSNLKYKDVAKSGYKGEHIKDGGGFAKLLQAVEAGDIQAGDVVLCEAMDRAGRLESLDMLTKVIAPILYAGVSIITLDDNTAYTKASVNTPQIHLLLAKIQAAHGYSQALSDRIKSKYATRIKNAKETG

SEQ ID NO: 1019416 - protein, 112 aa, Homo sapiens
LKLGGPRLIKGDGEVLKEIVTKERPKKINKQAPRGGCLAFQIRSGLLPLGPPLAKAFGRPWRPSLGRFQGANGKPYGGWWPFPPGLVFGPAQFFFRGRGWRLGSPACLAPPF

SEQ ID NO: 1019417 - protein, 118 aa, Homo sapiens
  misc_feature (57)..(57): Xaa can be any naturally occurring amino acid
  misc_feature (60)..(60): Xaa can be any naturally occurring amino acid
  misc_feature (65)..(66): Xaa can be any naturally occurring amino acid
  misc_feature (68)..(68): Xaa can be any naturally occurring amino acid
  misc_feature (73)..(73): Xaa can be any naturally occurring amino acid
  misc_feature (77)..(79): Xaa can be any naturally occurring amino acid
  misc_feature (91)..(91): Xaa can be any naturally occurring amino acid
  misc_feature (95)..(95): Xaa can be any naturally occurring amino acid
MQRFRGTREEAAPRGHSPAPRPDRVTAKAPPGCALQRGHAAHQLGQPRSVGRWRAAXNTXPPPHXXPXHAKHXNKTXXXPPPHPTQPTEKXRRKXHHDEKTGSKRNKDSEGTKEDPET

SEQ ID NO: 1019418 - protein, 208 aa, Homo sapiens
MQRFRGTREEAAPRGHSPAPRPDRVTAKAPPGCALQRGHAAHQLGQPRSVGRWRAAGKRWGPGQPRGPESPAGPPRWCVGGGAGRGRALKTPRARCGVVQQLAARGELAVLEHLLGLQVVVLVLVGEGDDLLGLVQRVVLVHGVHVALQLLGGHDAVVVGVNELLKLLFSVFHPVVVNVLALLVLHGAHGQGDELGHRELLVTILVQV

SEQ ID NO: 1019419 - protein, 522 aa, Homo sapiens
MAGDCRPGNLRASPHFLSRAVTSGSPPALLSGKLQMPFRAQAMPRMEGLSHWFGSAPQSPGLGCHPPEDEGWASCRAPVAGASWDLGNPISEPRPMAPPLPRREKAAASRSTQALGPRAQKTERTDCRVATTGWTMDPQEMVVKNPYAHISIPRAHLRPDLGQQLEVASTCSSSSEMQPLPVGPCAPEPTHLLQPTEVPGPKGAKGNQGAAPIQNQQAWQQPGNPYSSSQRQAGLTYAGPPPAGRGDDIAHQLLLLPLLPLLPLPPLLPLPQLLLLCHLLAQPTLPGPGPRLQQMWLTQCRDMPGHAGWLLSWASAPSHQALGLRPTRKVAVQPELLKRNPRSWLERDTPDYLKAQAIKQGDLPPSNSSLLQAPLGGGCSWTQGICPFMWTREHTHTVTVDTARTGMPLPHDVHTFPWPASPGSAQRLHEGLQRVHSPSSARSGFELTCLPGAETETVSWGQSMGRTAGGYSAWNWGDPRKGLQEKERVDKRVVGAAGAAGFREWKVGTGEPRQPGPRTAHW

SEQ ID NO: 1019420 - protein, 121 aa, Homo sapiens
SVKCLVRSVRFSLFPHVQPIVFKEKLTMKTDSLMEEKLECSLWCCLSDPSIPGRCCVLERRIVPWMQQESYSSSSPIWSVDSDEPNLTSVLERLEDTKENSSVRKETKLFSLFLMNIIFRN

SEQ ID NO: 1019421 - protein, 125 aa, Homo sapiens
IIRVSSSYISISMDRSAAAASGPRSRAPHSSATVAAAPPRPPPLLGPGARRPAPWAQAPAAAAAAALRPPPPEQGSPRRGMQREPDAGSARGSSSEQAAEALKAARQPSEDRAQQIASDSRSPGL

SEQ ID NO: 1019422 - protein, 112 aa, Homo sapiens
MGRTQESCTVCIENSTQGCLWNIQPFAQKTNPNQNIELSCAQAIDDLNTILRFYVRMHVARSNPVVRKKSSSSSALTFRSVVTSTRFFFFTHFDISASRASMYPAAFRSFSP

SEQ ID NO: 1019423 - protein, 186 aa, Homo sapiens
ACALLASVTLFPNPLTDPLCIPSRWLIRLIAPLPRWHTASWRYSRKGTINGGKLQDVLAHVLLVLSLDLDPLFYCSEVHLYATCQASVAPSALRHYRCGRSVQPASVGPGALPRCHQDPHEFSTSLIYTHTTGEAPGCGARTRNPKGHSIPSSDDREDQTPEMSTSRHTCLAMSHVPLSPLGIIWP

SEQ ID NO: 1019424 - protein, 97 aa, Homo sapiens
  misc_feature (43)..(43): Xaa can be any naturally occurring amino acid
  misc_feature (97)..(97): Xaa can be any naturally occurring amino acid
MFVFSRTFPLLSFHFLCITEASTFAGEKVSGSSRREITLRRIXLTFFVGVLPLLGQPPALGGRHRRVEDGENTSPSRRCEGAKLGQDRKLGRVWVVX

SEQ ID NO: 1019425 - protein, 111 aa, Homo sapiens
PRPRGETSGTYPFAQQRIGTKTAASRKINALQTGVNMEKRQSTARKRFSNSTRGEGSRPEGSKLVRQDAKPAGCDPLEAWEERCAHPASRRPYTEPDVAPKAQRLGTAAQR

SEQ ID NO: 1019426 - protein, 113 aa, Homo sapiens
MRLPSEEAVNDTDHQQPCRSRLFSSRPAQNQPLLAPSLRTPVSDLCTHAVICSSTSHHSPSSPFRTHWQCPPIPSTSLQKLPSHLNVRELASSLRDLLSLLQVIASFHAFCSV

SEQ ID NO: 1019427 - protein, 214 aa, Homo sapiens
  misc_feature (17)..(17): Xaa can be any naturally occurring amino acid
  misc_feature (48)..(48): Xaa can be any naturally occurring amino acid
  misc_feature (51)..(51): Xaa can be any naturally occurring amino acid
  misc_feature (57)..(57): Xaa can be any naturally occurring amino acid
  misc_feature (59)..(59): Xaa can be any naturally occurring amino acid
  misc_feature (91)..(91): Xaa can be any naturally occurring amino acid
  misc_feature (97)..(97): Xaa can be any naturally occurring amino acid
  misc_feature (107)..(107): Xaa can be any naturally occurring amino acid
  misc_feature (109)..(109): Xaa can be any naturally occurring amino acid
  misc_feature (117)..(117): Xaa can be any naturally occurring amino acid
  misc_feature (126)..(127): Xaa can be any naturally occurring amino acid
  misc_feature (150)..(150): Xaa can be any naturally occurring amino acid
  misc_feature (177)..(177): Xaa can be any naturally occurring amino acid
  misc_feature (202)..(202): Xaa can be any naturally occurring amino acid
  misc_feature (212)..(212): Xaa can be any naturally occurring amino acid
TQAPVVPYWRLPGLGIXIYLLKQSANVSSAIMTVIDRVSAQPQNAEQXPPXETKEWXQXATPAGVDKTPTAQKNGLARRRLVKVINNRAKXLPLCSXIIETRPFILXRXLEYYLLHXMPTDPQDPXXAPRTLFKSRRPQDPPAPETNLDXRSGLAIVSQHDLDQLQADATNAFGESXQKKLLDIEGLYSKVRSRYSFIQALXRRTRGLLRIXRN

SEQ ID NO: 1019428 - protein, 37 aa, Homo sapiens
ASIPAVHINQATNGGGSAFSDYSSSVPSTPSSSQREL

SEQ ID NO: 1019429 - protein, 108 aa, Homo sapiens
MGWRAGPKGPKGRPPSRAVSPGGKEGALCAPQEEKGLSSGVKPPFPCIPPQMQAPQGPLSVPFPTPWAGPAAHPPKAPPPPWECAQELRAAGAFVPKGAEFPIKGLAL

SEQ ID NO: 1019430 - protein, 128 aa, Homo sapiens
MWLRAHTGQSVLQGGEFEIFPQKPPLSSACALGGLSISGAFPARHPRGERGPWACPATIALEVRMRLPDTRGRPPEPEPDRAGVAGASRRRRSPRRRDGSSRWVTVSPPASPLPGFGVAGAPPHRGGR

SEQ ID NO: 1019431 - protein, 36 aa, Homo sapiens
MGARDSQEISFVHNPTHRSDRIVCSRCSGAQAQALP

SEQ ID NO: 1019432 - protein, 174 aa, Homo sapiens
  misc_feature (17)..(17): Xaa can be any naturally occurring amino acid
  misc_feature (36)..(36): Xaa can be any naturally occurring amino acid
  misc_feature (46)..(46): Xaa can be any naturally occurring amino acid
  misc_feature (56)..(58): Xaa can be any naturally occurring amino acid
  misc_feature (62)..(62): Xaa can be any naturally occurring amino acid
  misc_feature (72)..(72): Xaa can be any naturally occurring amino acid
  misc_feature (75)..(76): Xaa can be any naturally occurring amino acid
  misc_feature (90)..(90): Xaa can be any naturally occurring amino acid
  misc_feature (174)..(174): Xaa can be any naturally occurring amino acid
MWTCQLTLGGNRGYAIXLAGGGLQVLSWAWLPLPFXTCQKYSLYLXLVFLGGVGPXXXGLGXWAANGGTARXRCXXLLGAWPAFRLVGEXLFLFLAAKGAVSSWLRSLSRVQLNKLPNQTHPPLDCPCVSPWWVCQSTHQSHPESWSGARSCFLQIQGLQGVFLANHILLPLGX

SEQ ID NO: 1019433 - protein, 54 aa, Homo sapiens
ARVGGTRRTRPEPAGAAVPSDKKDLRQPWIPLRGRGLRGSDWYWTPPRSPAGSQ

SEQ ID NO: 1019434 - protein, 73 aa, Homo sapiens
TPGPCGAATVSTEIPKNRRLLLGAANIPGSLCNPLRPQGPGRLWVRTVCVRTGAETGLRPASLSPPQRPGTSL

SEQ ID NO: 1019435 - protein, 169 aa, Homo sapiens
  misc_feature (139)..(139): Xaa can be any naturally occurring amino acid
  misc_feature (142)..(142): Xaa can be any naturally occurring amino acid
  misc_feature (153)..(153): Xaa can be any naturally occurring amino acid
LSCLSPCFQAGSGLVFPRKDMAGELQCDPGAVASAETGLTSQDQLGYTRTILREVGSAMAVRQITGSPRVNVVLVMAYGSPGVMYCIFIFVKRQIMRYMQNENLEGDLTVPVGHQLTPKGLDKRGRLDNPKYPGFRKTXMNXSTLQKKKQEYXNWKPREIKVATTICIG

SEQ ID NO: 1019436 - protein, 169 aa, Homo sapiens
VDSRGSPWRLMTANGVVRSQIINDLALGRNMDELLRLVDALQFHEEHGEVCPANWKKGDKGMNASPEGVAAYLSENAGKLYIATRIKKPAFVAGFFMPGLQGFQCLSWLFAAPTGVCIPLEERLVSRKGRKASPWISDQSLKSRQPPISFQRLTMPQNSSAVFSVSSAP

SEQ ID NO: 1019437 - protein, 115 aa, Homo sapiens
MPDFGLQQLDTSRALAHRPGCKESLRLPSLSALPRSLARRQRGRASGGLAPRPSSGTHVAPPSAARRVPGLPWQSLLSGRAPGTPFSTDGGRPRGRNSPGTPARPGQEAMGGWRP

SEQ ID NO: 1019438 - protein, 88 aa, Homo sapiens
PALPGKVGRGPKTFEGFEAGAPPQVSVFFAPPCPGFRASVHKEPPPHGQVEGFFSPCQQLSSLGQVAWPAPWIGDGPGWARSGAQFGR

SEQ ID NO: 1019439 - protein, 175 aa, Homo sapiens
CRFVNECANGFNCLFTHNHNLIDHLIGEVQIGEALQKLQLDYFQIGLRFQYLGFGNFACRCGSTAGVKRPQNIDLGTYAAPLDINFSSSIDNRNQEGNFFFIGNSGNGQAELPQEQVAQGLEIELPCLNVRLLNQGLAHCAKPLLSINETKCGLYCGRTHRYRFGCVHLRAQGGR

SEQ ID NO: 1019440 - protein, 114 aa, Homo sapiens
SQKPGVGAGHGGDPKLSPPKVQGRSEAGAGPGPKASNFRGLGKGGRLPSAPPSSKDPTVFLDSSSSSSDLDPDVKSPPAGSKQHESIPGKAKKPKVKKKEKGKKEKGKKKEAPP

SEQ ID NO: 1019441 - protein, 94 aa, Homo sapiens
PKSPVWGRATGEIPSSVPPKFRAGRRQGQVRVQSKDPTVFLDSSSSSSDLDPDVKSPPAGSKQHESIPGKAKKPKVKKKEKGKKEKGKKKEAPP

SEQ ID NO: 1019442 - protein, 316 aa, Homo sapiens
  misc_feature (4)..(4): Xaa can be any naturally occurring amino acid
  misc_feature (27)..(27): Xaa can be any naturally occurring amino acid
  misc_feature (49)..(49): Xaa can be any naturally occurring amino acid
  misc_feature (53)..(53): Xaa can be any naturally occurring amino acid
  misc_feature (59)..(59): Xaa can be any naturally occurring amino acid
  misc_feature (63)..(63): Xaa can be any naturally occurring amino acid
  misc_feature (66)..(66): Xaa can be any naturally occurring amino acid
  misc_feature (74)..(74): Xaa can be any naturally occurring amino acid
  misc_feature (128)..(128): Xaa can be any naturally occurring amino acid
GRGXLPAEEFKAKVEAVVEKLGVPFQXLVATHAGLYRKPVTGLWDLLQXQANXGTPLSXGNSXFVXDAAERPAXWAPGRKKKDFSCAVRLFALNLGLPFATPEEFYLKWPAAGFELPAFDPSTFSRSXPLCLPESRALLSASPEVVVAVGFSSGSVEVPPVLKKAPSVSDADYVHCEQGTRLGSWQRVCDHVVKTALKQGKQGSTSQQHKHQTPDEPRLGTYAVRREPRAVPHASCFPSFTATLEQARHNNRFREITDSSHIPVSDMVMYGYRKQFEAPTLAEGFSAILEIRSRLWVEPRLGRLNCQFSEAEPRPA

SEQ ID NO: 1019443 - protein, 70 aa, Homo sapiens
MAAGEQACMAAVSLLRLRLQRRPLQPPCVLGSRGGPFSMIHPREARHGCPWGPREALEGRGGAGRSQKTQ

SEQ ID NO: 1019444 - protein, 131 aa, Homo sapiens
  misc_feature (46)..(46): Xaa can be any naturally occurring amino acid
PGLGAARPTRPARDGNYPGSGGGAASVGAGGAGRVEHRPDEGPGQXGPPRVPSVPQVPSVPRVLPRIPVMPQPRQGLGHGRTDRGAALGEVGRGEKTVAKRRSPGKERPGKLDAVGALEGPQEWTWGNRPP

SEQ ID NO: 1019445 - protein, 118 aa, Homo sapiens
MWSCYSLLFILWPFVYAVSLSVFNRLYFLVSTYSLHMLCALSFLVLGDIFSSACVMHGRGFFSYFGPVLTFPDGVCPVRGLPSWQGLPRDFLSVLGIVLYPGTHLSLKAHVIRMLFLP

SEQ ID NO: 1019446 - protein, 118 aa, Homo sapiens; identical to SEQ ID NO: 1019445

SEQ ID NO: 1019447 - protein, 293 aa, Homo sapiens
  misc_feature (288)..(288): Xaa can be any naturally occurring amino acid
METGAAELYDQALLGILQHVGNVQDFLRVLFGFLYRKTDFYRLLRHPSDRMGFPPGAAQALVLQVFKTFDHMARHDDEKRRQELEKKIKKKEEEEANTVSAAAADKEPVPVPLQEIKIHSTTQLDGHQELKKEAASSPYEGNGPWFTGGKSSKSSYMVLLKIPREPPILPKIQEQFQKNPDSYNGAVRENYTWSQDYTDLEVRVPVPKHVVKGKQVSVALSSSSIRVAMLEENGERVLMEGKLTHKINTESSLWSLEPGKCVLVNLSKVGEYVVDAILEGEEPIDIDXINKER

SEQ ID NO: 1019448 - protein, 76 aa, Homo sapiens
  misc_feature (65)..(65): Xaa can be any naturally occurring amino acid
  misc_feature (73)..(73): Xaa can be any naturally occurring amino acid
TRLLLYCRLSMYRISTKKELLLLERKEEDSHTTLHETPTTGNHYRAITSLERQQVPSEAGLFSKXKMIATSAXAIA

SEQ ID NO: 1019449 - protein, 255 aa, Homo sapiens
APGAGRSGAQPTWFGREAPGRGQLPACPGEPGANQPLCAPRPACPHYPALPRRPDLTPWPDALLRRLLSLPGAGPGTELSPVRGSVCDPDNEAELGKQTVIFPSSLTEEAQQCLVKLFNEIFDLLKEKKQERLRGARMGKIKKEMLQRGTLLILTLLIVNETHCARCLQLYQLLVELAKGSAWNCGLFTMQKAVAASTLEEQGMDIVNPCHSVPELVQNRLTGTWYYAACEQPCFNEVRKLPRFIRSLHWAGCTV

SEQ ID NO: 1019450 - protein, 221 aa, Homo sapiens
APGAGRSGAQPTWFGREAPGRGQLPACPGEPGANQPLCAPRPACPHYPALPRRPDLTPWPDALLRRLLSLPGAGPGTELSPVRGSVCDPDNEAELGKQTVIFPSSLTEEAQQCLVKLFNEIFDLLKEKKQERLRGARMGKIKKEMLQRGTLLILTLLIVNETHCARCLQLYQLLVELAKGSAWNCGLFTMQKAVAASTLEEQGMDIVNPCHMVNVSRHECI

SEQ ID NO: 1019451 - protein, 183 aa, Homo sapiens
APPGEASARQRARFGSKLRRCSRSDSGPRWAPRAAREPRTAASPEDAQSARVAAPRRAGAESEPGRPVAAWPAAAWWAAPAGSPRCPPPASASGLEAGSASEPMARGPCLLTPPPQKSNQHESRTGMVVPGADNEGYQSTRALQRRYESIAIASIDKRIPWKLRTQSIPLTEQKIEALSAQCR

SEQ ID NO: 1019452 - protein, 146 aa, Homo sapiens
  misc_feature (55)..(55): Xaa can be any naturally occurring amino acid
  misc_feature (58)..(58): Xaa can be any naturally occurring amino acid
  misc_feature (60)..(61): Xaa can be any naturally occurring amino acid
  misc_feature (79)..(79): Xaa can be any naturally occurring amino acid
  misc_feature (94)..(94): Xaa can be any naturally occurring amino acid
  misc_feature (109)..(109): Xaa can be any naturally occurring amino acid
  misc_feature (113)..(113): Xaa can be any naturally occurring amino acid
  misc_feature (119)..(119): Xaa can be any naturally occurring amino acid
  misc_feature (122)..(122): Xaa can be any naturally occurring amino acid
  misc_feature (126)..(127): Xaa can be any naturally occurring amino acid
APPGEASARQRARFGSKLRRCSRSDSGPRWAPRAAREPRTAASPEDAQSARVAGXGEXGXXSGGGGRGVPWGGGDGGGXGGLGAGGDGVGEWGXEEGVVGGWGGGGRGXGGGXGGGGGXGGXWGGXXGEGGGGWGGWVWVVVGGLV

SEQ ID NO: 1019453 - protein, 118 aa, Homo sapiens
  misc_feature (1)..(1): Xaa can be any naturally occurring amino acid
  misc_feature (26)..(26): Xaa can be any naturally occurring amino acid
  misc_feature (40)..(40): Xaa can be any naturally occurring amino acid
  misc_feature (109)..(109): Xaa can be any naturally occurring amino acid
  misc_feature (112)..(112): Xaa can be any naturally occurring amino acid
  misc_feature (114)..(114): Xaa can be any naturally occurring amino acid
XGGGGSGGSSSRSSCSGPPRPGGGHXPPRPRLEGRGAARXPRSDRHPPLPARPRAPRPAARSPPRALLAEEPSPPPARPPGAAPAPPARVRPPAPAAAAARLAPRRLPXSPXGXPLEQ

SEQ ID NO: 1019454 - protein, 123 aa, Homo sapiens
  misc_feature (93)..(93): Xaa can be any naturally occurring amino acid
  misc_feature (119)..(119): Xaa can be any naturally occurring amino acid
  misc_feature (122)..(122): Xaa can be any naturally occurring amino acid
MATHSPLAMLEILIGKIKPIFSRAGKLGNTTWQNCKRLILLPLIGWADAIAHTLVSFGFSDGKQLALSIEIRKEVNEQFSTLGGFFRKFELVXIAADEKDIIYTRSNIRMKMFILSHRXGRXL

SEQ ID NO: 1019455 - protein, 111 aa, Homo sapiens
PPPPPKESTYANNWNEILRQFQQGKWGYLIWVSHPNSSRQDLPYTSPEHLDTLSCLASSCYWKSNDDVFIQFIGLSISAKINVISVPAYLSEVGKLLCKVLDSKYYKLLKK

SEQ ID NO: 1019456 - protein, 138 aa, Homo sapiens
  misc_feature (17)..(17): Xaa can be any naturally occurring amino acid
  misc_feature (50)..(50): Xaa can be any naturally occurring amino acid
  misc_feature (80)..(81): Xaa can be any naturally occurring amino acid
  misc_feature (84)..(84): Xaa can be any naturally occurring amino acid
  misc_feature (94)..(94): Xaa can be any naturally occurring amino acid
  misc_feature (100)..(101): Xaa can be any naturally occurring amino acid
  misc_feature (105)..(105): Xaa can be any naturally occurring amino acid
  misc_feature (120)..(120): Xaa can be any naturally occurring amino acid
  misc_feature (126)..(126): Xaa can be any naturally occurring amino acid
MSLITSSSSSFVNMWEXWPGCTVASSMFVAFSFSSITCLGMMSEELMASXKVIDLWETACKELWAPPAAEPIPRPSHCTXXPDXSIPHTRRPFXSTPPNXXATPXPRDKAPGSPSPSPNXKARLDXAWVKLSTVIVSL

SEQ ID NO: 1019457 - protein, 150 aa, Homo sapiens
  misc_feature (4)..(4): Xaa can be any naturally occurring amino acid
  misc_feature (37)..(37): Xaa can be any naturally occurring amino acid
  misc_feature (75)..(75): Xaa can be any naturally occurring amino acid
  misc_feature (81)..(81): Xaa can be any naturally occurring amino acid
  misc_feature (88)..(88): Xaa can be any naturally occurring amino acid
  misc_feature (90)..(90): Xaa can be any naturally occurring amino acid
  misc_feature (100)..(101): Xaa can be any naturally occurring amino acid
  misc_feature (103)..(104): Xaa can be any naturally occurring amino acid
  misc_feature (106)..(110): Xaa can be any naturally occurring amino acid
  misc_feature (132)..(132): Xaa can be any naturally occurring amino acid
  misc_feature (143)..(143): Xaa can be any naturally occurring amino acid
MWEXWPGCTVASSMFVAFSFSSITCLRMMSEDLMASXKVIELWETSCKEPWAPPAAEPIARASPCPPRPRWGPMXRRGAFXLPSSPSXCXSPGAGHGAWXXVXXAXXXXXGGRGVGRAPRCPGLLVGGPGVXGLRSGFVGWGXGIGDWPT

SEQ ID NO: 1019458 - protein, 117 aa, Homo sapiens
TRGSIQIGHSAGSPTGVIPPYSIPDMPTVTWACVIPDPMHTASASATRGSIQIGHSAGSPTGVIPPYSIPDMPTASSIGAKDALRTSSFLRTTLLTSTLVVAKTRHATYFSMSPRFP

SEQ ID NO: 1019459 - protein, 254 aa, Homo sapiens
VDSNLVAYNKQDMYLSSKENITSNTKHLVHLDWMSREDGSHILTVGIGSKLFMYGPLAGKVQDQTGKETLAFPLWESTKVVPLSKFVLLRSLDLVSSVDGSPPFPVSLSWVRDGILVVGMDCEMHVYCQWQPSSKQEPVITDSYSGSTPSITSLIKQSNSSSGLHPPKKTLTRSMTSLAQKICGKKTAFDPSVDMEDSGLFEAAHVLSPTLPQYHPLQLLELMDLGKVRRAKAILSHLVKCIAGEVVALNEAAI

SEQ ID NO: 1019460 - protein, 312 aa, Homo sapiens
  misc_feature (2)..(2): Xaa can be any naturally occurring amino acid
  misc_feature (4)..(4): Xaa can be any naturally occurring amino acid
  misc_feature (6)..(7): Xaa can be any naturally occurring amino acid
  misc_feature (14)..(14): Xaa can be any naturally occurring amino acid
  misc_feature (16)..(17): Xaa can be any naturally occurring amino acid
  misc_feature (19)..(19): Xaa can be any naturally occurring amino acid
  misc_feature (21)..(22): Xaa can be any naturally occurring amino acid
  misc_feature (154)..(154): Xaa can be any naturally occurring amino acid
  misc_feature (252)..(253): Xaa can be any naturally occurring amino acid
  misc_feature (284)..(286): Xaa can be any naturally occurring amino acid
  misc_feature (305)..(305): Xaa can be any naturally occurring amino acid
RXLXPXXVFVVGLXTXXSXRXXQDKMDLGEEYNYLFKVVLIGDSGVDKSNLLLLFTRNEFNLESKSTIAVEFSTRSIQVDGKTIKAQIWDTAGQERYRAITYAFYRGAVGALLVYDIAKHLTYKNMEHWLKELQDHADSNIVIMLVGNKNDLRXLLAVPLTRPAPSQKEQLVLHRDLSLGFHYVEEAFKNILTEIYRIVSQKQIADRAAHDESPGNNVVDISVPPTTDGQKPNKLQFCQNLLPLRLHPACVXXLRPPPPRYPLAPPCCSSVAGSFQPSQELCTXXXGPRKDRSQFYPFCPGKARXPVCCTMK

SEQ ID NO: 1019461 - protein, 74 aa, Homo sapiens
ILGLCYPSHSRGSAQPGPKFDKQRLDGSVSSWFRSIQTRIVGAVVRHPYDTSTTESRDEKRGQSAFHRHGTSHH

SEQ ID NO: 1019462 - protein, 256 aa, Homo sapiens
  misc_feature (42)..(42): Xaa can be any naturally occurring amino acid
  misc_feature (48)..(50): Xaa can be any naturally occurring amino acid
  misc_feature (53)..(53): Xaa can be any naturally occurring amino acid
  misc_feature (55)..(56): Xaa can be any naturally occurring amino acid
  misc_feature (58)..(58): Xaa can be any naturally occurring amino acid
  misc_feature (61)..(61): Xaa can be any naturally occurring amino acid
  misc_feature (76)..(76): Xaa can be any naturally occurring amino acid
  misc_feature (80)..(80): Xaa can be any naturally occurring amino acid
  misc_feature (82)..(82): Xaa can be any naturally occurring amino acid
  misc_feature (87)..(87): Xaa can be any naturally occurring amino acid
  misc_feature (89)..(89): Xaa can be any naturally occurring amino acid
MLLSFHCQVIVPGSPPPPRFPPPLSLTRLAGGCGGRGGGRGXGAPLVXXXWGXGXXGXRAXGVGVGVGVGGVGVVXGLGXVXVGGGXGXGRGGGVVGGGVGGVLGGGGVGGAGGRHLQAAGRDVAHGRLHVVGDPLHEVAAVLVLHVEHLLVHLLHGHAAPEDGSHRQVAAVARVAGGHHVLGVEHLLGELGHVSARYCWLPRLVRGAKRGMKKCRRGKGTMFTASLRRSAFSWPGKRRQVVTPLMVADTRWLRSP

SEQ ID NO: 1019463 - protein, 193 aa, Homo sapiens
MLLSASVNSISSMPSPVYQCRKALRRNMAVNCSEMRLNSSWMAVLLPMKVADIFRPRGGMSHTAVFTLLGIHSTEVAAVLVLHVEHLLVHLLHGHAAPEDGSHRQVAAVARVAGGHHVLGVEHLLGELGHVSARYCWLPRLVRGAKRGMKKCRRGKGTMFTASLRRSAFSWPGKRRQVVTPLMVADTRWLRSP

SEQ ID NO: 1019464 - protein, 173 aa, Homo sapiens
SRRRPEPGAPLQRGAGCGAAACLAPLARAGRSPAMPGFDYKFLEKPKRRLLCPLCGKPMLRACAGFHLLATGFCDTCLQEFLSEGVFKCPDGPSFLCGLCQRSTHDPGKACERYNGYFWAPWPLIPGLLAIPHMCAVNGCLGRLWDGRCQRNLVTFITKGAHPLEVNPWHGFK

SEQ ID NO: 1019465 - protein, 111 aa, Homo sapiens
TLITQRKCCLTILEANTSTNPILGMDSSSAGRHIQHGRTHGSLGTDPAILPTHLSIHITTQTLETIVQRREPCICIAIGRRHTVIQLRFTHSIGCQHTCSHRHLAYIERAA

SEQ ID NO: 1019466 - protein, 142 aa, Homo sapiens
MHLYKPACADIPSPKLGLPKSSESALKCRWHLAVTKTQPQAACKPVRPSGAAEQNICGQSFYVFMEFRCRKPPEQRRAWHTGTADCKVIQPGTALMSKVVIQTTIRTEHSKTKPCTNTDGNNAVSPLHWVAFLSSGLRTFSV

SEQ ID NO: 1019467 - protein, 111 aa, Homo sapiens
MIAPGCFEALVPQQLRHAPQKARTPGMWFLRVVFYRQKSKNHFSPTYSKWAGNEVIIISKGMFSCTALENFDGPLGMLLKPNVPSILTNIRYDSRRIITSGYLFVGLYGQQ

SEQ ID NO: 1019468 - protein, 195 aa, Homo sapiens
  misc_feature (2)..(2): Xaa can be any naturally occurring amino acid
  misc_feature (39)..(39): Xaa can be any naturally occurring amino acid
  misc_feature (110)..(110): Xaa can be any naturally occurring amino acid
  misc_feature (115)..(115): Xaa can be any naturally occurring amino acid
GXPAAPQNPGALKFSVHLSILPMALARAQHGQGFWVGRXLSFLLAWSSQPYTLPQAAPSLTCCCPYRSEKPCLAGPRATVFPLFHPSPSQRSSPVLSQKPKENRGKASCXQQLPXFPTALGGPCLCSREGIFMGMIPAGAVRFDPNSAQFSSDEGLALMGTEKCVDLLPARAALSWVLGPSGGQGCANPVQNRVL

SEQ ID NO: 1019469 - protein, 141 aa, Homo sapiens
  misc_feature (2)..(2): Xaa can be any naturally occurring amino acid
  misc_feature (39)..(39): Xaa can be any naturally occurring amino acid
  misc_feature (109)..(109): Xaa can be any naturally occurring amino acid
  misc_feature (118)..(119): Xaa can be any naturally occurring amino acid
GXPAAPQNPGALKFSVHLSILPMALARAQHGQGFWVGRXLSFLLAWSSQPYTLPQAAPSLTCCCPYRSEKPCLAGPRATVFPLFHPSPSQRSSPVLSQKPKENRGKAYXVSRNFLSIXXAFGDHCLCSREGIFMGMFLLER

SEQ ID NO: 1019470 - protein, 114 aa, Homo sapiens
  misc_feature (24)..(24): Xaa can be any naturally occurring amino acid
MTYVLTRRGNVRGLHGSGLRYSAXRIREGIWGEIGLSGIKSLNRNQEKPNITRCAAGGTVHYYETGTEDGWGHVNGGNCRWGPACGQAACYGIAAFNDGTGWVKLIGNNNSSVH

SEQ ID NO: 1019471 - protein, 317 aa, Homo sapiens
  misc_feature (91)..(91): Xaa can be any naturally occurring amino acid
  misc_feature (315)..(315): Xaa can be any naturally occurring amino acid
FGAHLATVCHPPTDGQGKALKGWKDGSEIDKSRRGWEGEGSGMGDGKGKGHEGAGTMKAKGRTEDTGRGTMEKVMRYKGKRCAEEEKKESXRQLGEKIEVEMGEITSMDILMTIGGEQRKEGTEKWAPTDKEQKCYTRTKLHCTTGRERQWRWNDNEEDGLKIIIDGANVVVCQANKGMASTDGVGIANDPRLYDGRRRAGGPTPPCGTGGGTTTINTDENVKGAETGSRTISVKSTSITSRTGKDNTGTGINEGDERGAISNDYESRKERRERKEEKTERTGDAAEIGGNGGMTNMHAENEKETKEKQMSRVTXGE

SEQ ID NO: 1019472 - protein, 68 aa, Homo sapiens
  misc_feature (65)..(65): Xaa can be any naturally occurring amino acid
MPQLRLLGFALVSNGTKCVKYRNAVLLLVSKDGNAIVSCGILYSRLISNREHVGAAGPFGRNGHXARE

SEQ ID NO: 1019473 - protein, 334 aa, Homo sapiens
FGAHLATVCHPPTDGQGKALKGCVHDEKKSKHETERAPFDISVSASMITVGDTPYDTHFFYALRWAPPLHLGANNGLFTYWWCVFWAISCDDNARSAHCATYRADPELTASRDDDDKRNVIGPLKNGAGLNVGNVNNGLFTNFLYNRSNGGNRKNLRLNPTDIGGVNGRTNFIKRGLANHSTTGTNPLGGNLTRLHNNRGLVKFGNTPSGGDLRKNMPDFGGNGLNGLPLGNGGGRNWNPNHPEPYLNSEYDYNGPSVGNNGGGGNNGHKLLNRNDAYQPYGAPLSHFLPDVNNGNPRNPFNLGNGYAGKLGGFGGLAYTTLPGYFGYGALARL

SEQ ID NO: 1019474 - protein, 179 aa, Homo sapiens
  misc_feature (63)..(63): Xaa can be any naturally occurring amino acid
  misc_feature (106)..(106): Xaa can be any naturally occurring amino acid
  misc_feature (128)..(128): Xaa can be any naturally occurring amino acid
  misc_feature (170)..(170): Xaa can be any naturally occurring amino acid
FGAHLATVCHPPTDGQGKALKGCFWFRLWPPHLIFSWPSPFCVDLLNYPPIYGHFPVFFIFLXLSASGTRIYQTKLMNQNGFYYTRLYRTHDDSYNAQYCGVTVNXNVSDVTVAYLTYVENWGLTERXEFNSPRTKFVLDWSVSVLDEIRTGVFLWFLNDRLFSHALAMXVCLVATTPR

SEQ ID NO: 1019475 - protein, 233 aa, Homo sapiens
  misc_feature (99)..(99): Xaa can be any naturally occurring amino acid
YLLTALPGALLAPFCPSSVSAAAGSCSGAEWSEPRVLQNALTETISRLLRVEIKPMDFIVTSTSRQEAFDACSWDDNLLVNNEDLLSHSPGMFDENTPXNSRVYKNEHAWFTQITPDLNDSSSLSNNHNNVLCQLCGHCEYRMGSEYRTWVSILKFLEEYKWPIHGIPKVSAEHGQNDTNFCFPNLSKVVDAYLRPDSLLEIVTIELIDTWGKNYRPFRTSSADKLDYFKYCA

SEQ ID NO: 1019476 - protein, 163 aa, Homo sapiens
  misc_feature (137)..(137): Xaa can be any naturally occurring amino acid
WQVAPDWGQARIESMVANRPDWCISRQRTWGVPMSLFVHKDTEELHPRTLELMEEVAKRVGVDGIQAWWDLDAKEILGDEADQYVKVPDTLDVWFDSGSTHSSVVDVRPEFAGHAADMYLEGSDQHRGWFMSSLMIXTAMKGKAPYRQVLTHGFTVDGQEPTC

SEQ ID NO: 1019477 - protein, 304 aa, Homo sapiens
  misc_feature (22)..(22): Xaa can be any naturally occurring amino acid
  misc_feature (24)..(24): Xaa can be any naturally occurring amino acid
  misc_feature (26)..(27): Xaa can be any naturally occurring amino acid
  misc_feature (37)..(37): Xaa can be any naturally occurring amino acid
  misc_feature (278)..(278): Xaa can be any naturally occurring amino acid
  misc_feature (286)..(287): Xaa can be any naturally occurring amino acid
  misc_feature (290)..(290): Xaa can be any naturally occurring amino acid
  misc_feature (294)..(294): Xaa can be any naturally occurring amino acid
  misc_feature (301)..(303): Xaa can be any naturally occurring amino acid
PTRPVTATGQQRRGHREKKRSXPXVXXQSYKVYQKSXSLYINKNQRLQERLYIQNDGEDVLHLQTGSRPDGETRQRRGYREGREGASRPGEGRGEGRGGDGLLPASINRQRWEACASCCVRRSGWALRARGVRLPRPPLPGSSGFGPEHGSGWGRRAGWATRSQREGGNRSLESAKEKGRRRRRPPVLLASGQPRPSCRPPHPAKTLWDPSFMGAANRGFYAFPRAGRGSTGSCSSCGPGPAVQSSLEGWNEPATEGQQGGARGYRGGGGRRTFTHAXVEAQGTQXXAAXQPFXHPTVRGXXXP

SEQ ID NO: 1019478 - protein, 191 aa, Homo sapiens
  misc_feature (21)..(21): Xaa can be any naturally occurring amino acid
  misc_feature (68)..(68): Xaa can be any naturally occurring amino acid
  misc_feature (77)..(77): Xaa can be any naturally occurring amino acid
  misc_feature (81)..(81): Xaa can be any naturally occurring amino acid
  misc_feature (104)..(104): Xaa can be any naturally occurring amino acid
  misc_feature (120)..(120): Xaa can be any naturally occurring amino acid
  misc_feature (146)..(146): Xaa can be any naturally occurring amino acid
ARSSQAPRSVATAASPCALGXYPPRSHPRRRPGARSAAPESVPLRLRGDGHQKQKKRLAGAAYNLVRXEGSAVIWVXFKYXGSTIVPGEQGAEYQNFIQQCTEXVRLFAFVRFTTGDAMXKKSKFALITWIGEKVNGLQRAKNGTXKNLVKEVVQNFAKEFVISDRKELEEEFIKSELKKAGGANYDAQKE

SEQ ID NO: 1019479 - protein, 208 aa, Homo sapiens
  misc_feature (15)..(15): Xaa can be any naturally occurring amino acid
  misc_feature (21)..(21): Xaa can be any naturally occurring amino acid
  misc_feature (41)..(41): Xaa can be any naturally occurring amino acid
  misc_feature (48)..(48): Xaa can be any naturally occurring amino acid
  misc_feature (58)..(58): Xaa can be any naturally occurring amino acid
  misc_feature (66)..(66): Xaa can be any naturally occurring amino acid
  misc_feature (69)..(69): Xaa can be any naturally occurring amino acid
  misc_feature (72)..(73): Xaa can be any naturally occurring amino acid
  misc_feature (77)..(77): Xaa can be any naturally occurring amino acid
  misc_feature (92)..(92): Xaa can be any naturally occurring amino acid
  misc_feature (102)..(102): Xaa can be any naturally occurring amino acid
  misc_feature (104)..(104): Xaa can be any naturally occurring amino acid
  misc_feature (106)..(106): Xaa can be any naturally occurring amino acid
  misc_feature (118)..(118): Xaa can be any naturally occurring amino acid
TPPPPAISGTAPNPXTSQWHXTPRPHRGNPSIPARPEDEAXHSRGPPXPPRNPGMFMXPGTLYVYXIYXIAXXHAPXHPGGRGLPLAASTGXPGSSGAHASXPXTXRKGTPSRVLKDXELCSGPSKLLRKALASPQETLNQRDLVTRMKLYGVERGPLEPSEPGCSGSSPGGRSAMTGEWARKPPRFYVRGSPWVSVVDRVAEQDTQA

SEQ ID NO: 1019480 - protein, 323 aa, Homo sapiens
METILEQQRRYHEEKERLMAVMAKEMLTKKSTLRDQINSDHLDSGHAKIGDMEVSGNLRDQYDDKDGFTNGGAQCTLSGPEMSCCNTIIESCDVQEYRRKGPKSGSVCPNVRWSLRGTALKARMRIQVYKRHETWGRSQMKRDMVVISISMDVSSKYGNRKASETAGMNDIPCGILEQFIPTFLTERKNAEYEEIATRCCLTCHQDHTDRVKPLQDQTATLGEESGNETGKTGDELANLTRKKRRENSQDPASMSKPPTGRPEYALPREARPSRGSMQPATNVGERGGPTTHADHTRNRHQTVTKNLGRTWQRTPPKAGTPTQ

SEQ ID NO: 1019481 - protein, 49 aa, Homo sapiens
MCFGMEVEAPSHDGDAYEDKGRCGPTGEGDKRCGACNGKSCLKGVISAI

SEQ ID NO: 1019482 - protein, 247 aa, Homo sapiens
MPPSGPRGTLLLLPLLLLLLLRIHSEEEFGDTGEGWETVDDARLSLHPDVKTLRLLRTSDAWPALWQRTTLELAQCAPCCHHDHVMTMMCSSVRCDPHVGLPCHVLQDTTKMLACRLVLAHWMQLRMHAASSQQARPQGPELPTHEGQLKFHHQTQTMYPVPAPAGDQKEVDTSEKKLLERLPEVRGAPASVILREPSPQDFLMLHGDLMGAGLTWHSQLPWGPVSCWAPGARARHGISRIGCTQIT

SEQ ID NO: 1019483 - protein, 277 aa, Homo sapiens
MPPSGPRGTLLLLPLLLLLLLRAVLAVPLERGAPNKEETPATESPDTGLYYHRYLQEVIDVLETDGHFREKLQAANAEDIKSGKLSRELDFVSHHVRTKLDELKRQEVSRLRMLLKAKMDAEQDPNVQVDHLNLLKQFEHLDPQNQHTFEARDLELLIQTATRDLAQYDAAHHEEFKRYEMLKEHERRRYLESLGEEQRKEAERKLEEQQRRHREHPKVNVPGSQAQLKEVWEELDGLDPNRFNPKTFFILHDINSDGVLDEQELEALFTKELEKVY

SEQ ID NO: 1019484 - protein, 82 aa, Homo sapiens
LFPPSFRAATMVRMNVLADALKSIKSSRHKRGKRQVLIRPCSKVIVRFLTVMMKLVDMWPNLKYIDDPLELGRSRCEPQQAG

SEQ ID NO: 1019485 - protein, 242 aa, Homo sapiens
  misc_feature (28)..(28): Xaa can be any naturally occurring amino acid
  misc_feature (68)..(68): Xaa can be any naturally occurring amino acid
  misc_feature (151)..(151): Xaa can be any naturally occurring amino acid
  misc_feature (171)..(172): Xaa can be any naturally occurring amino acid
  misc_feature (206)..(206): Xaa can be any naturally occurring amino acid
MVSVLTLPGKAFVKSPCSLGPSKPCHNXSHSVSAHLSSEASFPECERDTDRETDRQACSSSSTCTRPXLPFGERLGGLIPLAAAPSQHSVHLWASWPAQPCVHLGREGPQGPMGYPPGGCMGWGGEAGTGPGRQAEVCGQEAVKNSEVREXPETGARLGGYRGERRGPPEXXRLGPPSGPRTAEHHLIDRFASVETSIATLCSQDXQPAQPTLSLLRKAPLVWAHGLAVFQPGDHRLGLPLH

SEQ ID NO: 1019486 - protein, 233 aa, Homo sapiens
  misc_feature (2)..(2): Xaa can be any naturally occurring amino acid
  misc_feature (64)..(64): Xaa can be any naturally occurring amino acid
  misc_feature (82)..(82): Xaa can be any naturally occurring amino acid
  misc_feature (103)..(103): Xaa can be any naturally occurring amino acid
  misc_feature (105)..(105): Xaa can be any naturally occurring amino acid
  misc_feature (109)..(109): Xaa can be any naturally occurring amino acid
  misc_feature (118)..(118): Xaa can be any naturally occurring amino acid
  misc_feature (120)..(122): Xaa can be any naturally occurring amino acid
  misc_feature (129)..(129): Xaa can be any naturally occurring amino acid
  misc_feature (134)..(134): Xaa can be any naturally occurring amino acid
  misc_feature (143)..(144): Xaa can be any naturally occurring amino acid
  misc_feature (151)..(152): Xaa can be any naturally occurring amino acid
  misc_feature (163)..(163): Xaa can be any naturally occurring amino acid
  misc_feature (169)..(169): Xaa can be any naturally occurring amino acid
  misc_feature (172)..(172): Xaa can be any naturally occurring amino acid
  misc_feature (176)..(176): Xaa can be any naturally occurring amino acid
  misc_feature (178)..(178): Xaa can be any naturally occurring amino acid
QXNPQYNPQTPGRRPCTTQTSSLPMLPPPPQGSYQPSPSPQSYHQVAPSPAGYQNTHSPASYHXTPSPMAYQASPSPSPVGXSPMTPGAPSPVDYNPHTPNSXIXQNSXYWLTTNIQXKXXXTYLYTQXVEQTXIIHNITGGXXSVYLKDXXKVINISSKHLXPITPTXNNXIKIXLXKDREATGVLLSIDGEDGIVRMDLDEQLKILNPPLPGEAHWKPEAGQGRWTSSDEE

SEQ ID NO: 1019487 - protein, 214 aa, Homo sapiens
GYQYTNSLQSKLAPVRTSPIGSIRVYALYSEAPFGYMSYWTTLDAPSPCVATIPQQRPRSSVHSMLEASHATCVNPTWTNSCMIGLRGQPTSDIYMVALATRHGDHPAVLHRRVHELLVMYLNGTSENGLSGIFSEHSGAVSPATRVTNNVLESCSLRTEDREATGVLLSIDGEDGIVRMDLDEQLKILNPPLPGEAHWKPEAGQGRWTSSDEE

SEQ ID NO: 1019488 - protein, 281 aa, Homo sapiens
MAPPAPGPASGGSGEVDELFDVKNAFYIGSYQQCINEAQRVKLSSPERDVERDVFLYRAYLAQRKFGVVLDEIKPSSAPELQAVRMFADYLAHESRRDSIVAELDREDEQERGRDQHHLPAHGPPPSISTNQNPDAALRAAAPGGQPGVHSHDQCEIRVVKLDRLDLARKELKRMQDLDEDATLTQLATAWVSLATGGEKLLDAYYIFQEMADKCSPHPGVLNGQAACHMARAVEREAVRRGKKDEGYGKWYLNAVQKGSLSEKILSVRVQVHLKGAAREM

SEQ ID NO: 1019489 - protein, 294 aa, Homo sapiens
MAPPAPGPASGGSGEVDELFDVKNAFYIGSYQQCINEAQRVKLSSPERDVERDVFLYRAYLAQRKFGVVLDEIKPSSAPELQAVRMFADYLAHESRRDSIVAELDREDEQERGRDQHHLPAHGPPPSISTNQNPDAALRAAAPGGQPGVHSHDQCEIRVVKLDRLDLAPGKRGGKALWANNGKELKRMQDLDEDATLTQLATAWVSLATGGEKLLDAYYIFQEMADKCSPHPGVLNGQAACHMARAVEREAVRRGKKDEGYGKWYLNAVQKGSLSEKILSVRVQVHLKGAAREM

SEQ ID NO: 1019490 - protein, 184 aa, Homo sapiens
MLPAATASLLGPLLTACALLPFAQGQTPNYTRPVFLCGGDVKGESGYVASEGFPNLYPPNKECIWTITVPEGQTVSLSFRVFDLELHPACRYDALEVFAGSGTSGQRLGRFCGTFRPAPLVAPGNQVTLRMTTDEGHRRTEGFLLLVQAVRAHLTGTEAPEFFAGEAGLDPSAPLVTPDHWPHS

SEQ ID NO: 1019491 - protein, 301 aa, Homo sapiens
  misc_feature (148)..(148): Xaa can be any naturally occurring amino acid
  misc_feature (301)..(301): Xaa can be any naturally occurring amino acid
MLPAATASLLGPLLTACALLPFAQGQTPNYTRPVFLCGGDVKGESGYVASEGFPNLYPPNKECIWTITVPEGQTVSLSFRVFDLELHPACRYDALEVFAGSGTSGQRLGRFCGTFRPAPLVAPGNQVTLRMTTDEGKGRRGFLLWYSXRATSGTEKKFCGGRLEKDKENLTKPNWPESDYPPGISCSWHIIAPPDQVIALTFEKFDLEPDTYCRYDSVSVFNGAVSDDSRRLGKFCGDESRGSISSEGNELLVQFVSDLSVTADGFSASYKTLPRGTAKEGQGAGPKRGTEPKVSCPQVPX

SEQ ID NO: 1019492 - protein, 118 aa, Homo sapiens
  misc_feature (10)..(10): Xaa can be any naturally occurring amino acid
  misc_feature (116)..(116): Xaa can be any naturally occurring amino acid
RQRNKQKKRXEWPKKKSREKDRQKDKKTTKWVKGPGQAQQQCPGISTSLPWGSGGGEGLAGASVLTGLLLLMPYYPSSSLLGSLAGGIPRAMDGWAELAEDRGSWRLPGEVEAWVXWG

SEQ ID NO: 1019493 - protein, 179 aa, Homo sapiens
  misc_feature (10)..(10): Xaa can be any naturally occurring amino acid
  misc_feature (111)..(111): Xaa can be any naturally occurring amino acid
  misc_feature (113)..(114): Xaa can be any naturally occurring amino acid
  misc_feature (120)..(122): Xaa can be any naturally occurring amino acid
  misc_feature (125)..(125): Xaa can be any naturally occurring amino acid
  misc_feature (127)..(127): Xaa can be any naturally occurring amino acid
  misc_feature (134)..(134): Xaa can be any naturally occurring amino acid
  misc_feature (138)..(138): Xaa can be any naturally occurring amino acid
  misc_feature (140)..(140): Xaa can be any naturally occurring amino acid
  misc_feature (144)..(144): Xaa can be any naturally occurring amino acid
  misc_feature (146)..(152): Xaa can be any naturally occurring amino acid
  misc_feature (154)..(156): Xaa can be any naturally occurring amino acid
  misc_feature (177)..(177): Xaa can be any naturally occurring amino acid
RQRNKQKKRXEWPKKKSREKDRQKDKKTTKWVKGPGQAQQQCPGISTSLPWGSGGGEGLAGASVLTGLLLLMPYYPSSSLLGSLAGGIPRAMDGWAELAEDRGSWRLPGKXKXXNNIRVXXXTRXNXVKYQNRXTTQXDXYIQXKXXXXXXXQXXXINKISNINKYKTEKHQTVQIXKN

SEQ ID NO: 1019494 - protein, 57 aa, Homo sapiens
TDSGISAEAAGIDWGIFPESDSKDPGGDGIDWGDDAVALQITVLEAEPVLRVLPSVR

SEQ ID NO: 1019495 - protein, 138 aa, Homo sapiens
MAHLRGFANQHSRVDPEELFTKLDRHWQGARYGEGLQGPSITTQRRWWPSMIIDLEEAEGIDNRGNIQARKITVPRVSADRPLNHPDTLASYVKEATKANGIIMDVPGRAGADTGQCLKPGPTEEDIMAQKLRKSKGR

SEQ ID NO: 1019496 - protein, 138 aa, Homo sapiens
MAHLRGFANQHSRVDPEELFTKLDRHWQGARYGEGLQGPSITTQRRWWPSKIIDLEEGRRHDNRGNIQARKITVPQSVQTAPKSPKYFRASYVKEATKAKGIIMEYLGAREQTRDSAYKPGPTEEDIMAQKLRKSKGR

SEQ ID NO: 1019497 - protein, 240 aa, Homo sapiens
MQMSYAIRCAFYQLLLAALMLVAKLQLLYLIAAVRHCTGRRSKTNIIELLSPRPHGPEDTGQGRSYRTALGLWQASQDASRPTYPAIYSAALPDRTTHCDPHTSAASLRTRHRPRRCNNPMADNPCSPGYLTWAQRPTRNRATLALIPAPLPRPVTSPGPNPQMARDTAGQRPAAHTRLDKGTHTTGSGLVEQPTGTPLSGEAHQTKPLGRASSAMPGHSRLQSRPTADRDRVLGPPRFP

SEQ ID NO: 1019498 - protein, 351 aa, Homo sapiens
  misc_feature (72)..(72): Xaa can be any naturally occurring amino acid
  misc_feature (285)..(285): Xaa can be any naturally occurring amino acid
  misc_feature (291)..(291): Xaa can be any naturally occurring amino acid
  misc_feature (297)..(297): Xaa can be any naturally occurring amino acid
  misc_feature (307)..(307): Xaa can be any naturally occurring amino acid
  misc_feature (310)..(312): Xaa can be any naturally occurring amino acid
  misc_feature (318)..(318): Xaa can be any naturally occurring amino acid
  misc_feature (323)..(323): Xaa can be any naturally occurring amino acid
  misc_feature (339)..(339): Xaa can be any naturally occurring amino acid
EWGLGTAPPSYSWGTAVGTREGQERGLKQGSSNGATTPQSQPRPLPDPGGSSCGLGWGVGDPPQALPLPSSXSLLSGSTHSFRQENEAQREEEVGEEDEGGAEVAAQMKAEVRGVGKATPPPHPPQKGARKQQHQAAGGGDKAGFKAEGPGAGGASGLSEKPCQLLFSELYSSPAPTHLKTSSSMGVQWCRFMKRASSVKRTQVQVPTSQASSFFSLRKPSLCAEFSHLKILPSGTGTKLRSLKCRLGTGALRTSLHSLFTGGRVKVISKLFRIFRKPTLNRKLXLLFWVXMNTELXSFSTKLTWLXEPXXXWPAAKXVLRTXGLLPCWLQHGRLLPSXPARNATKLSSLP

SEQ ID NO: 1019499 - protein, 248 aa, Homo sapiens
MSCSWISPEGKVTPCSLKPSVLVPAFRMVAYTRRARDFLVSRTATTPSERQYPFPAVSKALQVPSGLSIPSLKNCTEVYGLQQRRLIALPLMAAHVALHRCGLCLGKSVLQWTIKAWRKHALCPSCDCLRALLKLGQKKDEHGLSHQSLAGSPPCCSPRVSRGLGSGPPRSQSRSRPPRRQCVFLGVNLGDASVHDGFIGDFQQQPQLRVIVLLLLGVTPKKRLNLKVLSSDRGSAKPLRRFSAFPGC

SEQ ID NO: 1019500 - protein, 358 aa, Homo sapiens
RAPSCRTVHNGPLGNKPSNHLAGSSFTLGSGEGASEVPHSRQAAFSSPIETDVVPDTRLLDKFSQITPRLFMPLDETIQNPPMETLYIIDFFIALAICNTVVVSAPNQPRQKIRHPSLGGLPIKSLEEIKSLFQRWSVRRSSSPSLNSGKEPSSGVPNAFVSRLPLFSRMKPASPVEEEVSQVCESPQCSSSSACCTETEKQHGDAGLLNGKAESLPGQPLACNLCYEAESPDEAALVYAARAYQCTLRSRTPEQVMVDFAALGPLTFQLLHILPFDSVRKRMSVVVRHPLSNQVVVYTKGADSVIMELLSVASPDGASLEKQQMIVREKTQKHLDDYAKQGLRTLCIAKKVMSDTDL

SEQ ID NO: 1019501 - protein, 321 aa, Homo sapiens
RAPSCRTVHNGPLGNKPSNHLAGSSFTLGSGEGASEVPHSRQAAFSSPIETDVVPDTRLLDKFSQITPRLFMPLDETIQNPPMETLYIIDFFIALAICNTVVVSAPNQPRQKIRHPSLGGLPIKSLEEIKSLFQRWSVRRSSSPSLNSGKEPSSGVPNAFVSRLPLFSRMKPASPVEEEVSQVCESPQCSSSSACCTETEKQHGDAGLLNGKAESLPGQPLACNLCYEAESPDEAALVYAARAYQCTLRSRTPEQVMVDFAALGPLTFQLLHILPFDSVRKRMSVVVRHPLSNQVVVYTKGADSVIMELLSVASPGKFIQK

SEQ ID NO: 1019502 - protein, 33 aa, Homo sapiens
RIADLRMSVEADINGLRRVLDELTLARTAAGNA

SEQ ID NO: 1019503 - protein, 162 aa, Homo sapiens
MTEALQWARYHWRRLIRGATRDDDSGPYNYSSLLACGRKSSQIPKLSGRHRIVVPHIQPFKDEYEKFSGAYVNNRIRTTKYTLLNFVPRNLFEQFHRAANLYFLFLVVLNWVPLVEAFQKEITMLPLVVVLTIIAIKDGLEDYRKYKIDKQINNLITKVYSR

SEQ ID NO: 1019504 - protein, 272 aa, Homo sapiens
MSPLIMGLDVNPDACLTALLDICKLLEAVCPSSPTSSGHEIPTQLLGKDLQSSLCPPFPLAWALLLPTPLLSFHPEGCAPSHSHCLACHLSLHPVQTSSSGLPAHQPVMGWMPKCRAKLMHLLLMSFSVCLMTSGDPSSSARQPRSPTLSSAYLPSHGRQHPQSREVCASGTWNMQGFADSSSMLLPLPFSLPPKSTLLPRHHLCPPNSISTHQPLTSHPNSIGHLPNSLASTPLRPPGRDYAVHSDDPRTQECSPCVAGPLYMLLIQRHSG

SEQ ID NO: 1019505 - protein, 106 aa, Homo sapiens
HKENIEYWLGLIVTGKYFNKSSPKLHDRVHDDCATNELRASPFWLWLVVVVVFQPGCLSPTPPLPHLQSLSLCLALTKAEVQYCKSWLTVALTSRAEVILLPRPPR

SEQ ID NO: 1019506 - protein, 155 aa, Homo sapiens
MADQLTEEQIAEFKEAFSLFDKDGDGTITTQGVVGQLNEIPGKNPTEAELQDMINEVDCRWELGTLEVSLLEFLSMNGPRKDDETPTDEVTDEYDTRAVRSSVLDMGWGNWLHHAAARAAFTINDEPGGEKLTDEEVDEMIRDADIDWTIGQVNY

SEQ ID NO: 1019507 - protein, 272 aa, Homo sapiens
  misc_feature (31)..(31): Xaa can be any naturally occurring amino acid
  misc_feature (107)..(107): Xaa can be any naturally occurring amino acid
  misc_feature (120)..(120): Xaa can be any naturally occurring amino acid
  misc_feature (123)..(124): Xaa can be any naturally occurring amino acid
  misc_feature (133)..(133): Xaa can be any naturally occurring amino acid
  misc_feature (137)..(137): Xaa can be any naturally occurring amino acid
  misc_feature (149)..(149): Xaa can be any naturally occurring amino acid
  misc_feature (157)..(157): Xaa can be any naturally occurring amino acid
  misc_feature (215)..(215): Xaa can be any naturally occurring amino acid
RGRENKGGQHSRRGPGRKAREHRRAGKRPRXAKRGKRKSTQSNRGGRGHGEAGKATTTGQRSEKGGGSDKRTREKGEKEAAERGKGAGKEAGGGEKRKAERERGSTXESAGGKGETSKDXGTXXEAPGHRDGXKNRXTGTAQADGAGRXGAAGGGEXEAGSAKKGQTREQARRADTRGGKQRRGGGNKREATEPPDSQKREEERGKEGSTYIKKXGDNPDTGAFGPISGWNGDNMREPSANMPGGKGGKGTRKEGQGQWNHAAGGAGLQPTT

SEQ ID NO: 1019508 - protein, 465 aa, Homo sapiens
KDKMEQKENVPPGPEVCITHQEGEKISANENSLAVRSTPAEDDSRDSQVKSEVQQPVHPKPLSPDSRASSLSESSPPKAMKFQAPARETCVECQKTVYPMERLLANQQVFHISCFRCSYCNNKLSLGTYASLHGRIYCKPHFNQLFKSKGNYDEGFGHRPHKGLWASKNENEEILERPAQLANARETPHSPGVEDAPIAKVGVLAASMEAKASSQQEKEDKPAETKKLRIAWPPPTELGKFQECAYGGKGINNVNSRNMASLKTNISKPEVPEDVDLDLKKLRRSSSLQGKKPPIHCSSFISKHLCQEPKNCVPTYQERLEHVRAAVKSLWVEELQKGKQVENAKASKKNGNVGKNKPGKTKESKGETGKRSKEGHSLEMENENLVENGADSDEDDNSFLKQQSPQEPKSLNWSSFVDNTFAEEFTTQNQKSQDVELWEGEVVKELSVEEQIKRNRYYDEDEDEE

SEQ ID NO: 1019509 - protein, 280 aa, Homo sapiens
YCPSGRNGSQHGSGVRAMLQGPEKYFSFSLEITAYKSQVDNVKPGLGFSFEFTEQQKEFRSYCCKFAQSRQHPSQWLQTSCIKHWCNIQSPLIQQEPGNWFNATTHIPENLWRSCDYGNFGMLVVNSVAQHTGLWHVPGVSATAHCTRHTFFWGPNAVIHSLLGKLASSKSKGKSFARSNALQAAHWMCALMSVTATLAAGLWNGSWVINRNTSRNKHQAGCRSSFISIGQHTTGGHKTQTGTAHQHDSHSGNCSDTRDTGMQESEESRNSLPWVNSQTL

SEQ ID NO: 1019510 - protein, 331 aa, Homo sapiens
  misc_feature (266)..(266): Xaa can be any naturally occurring amino acid
  misc_feature (276)..(276): Xaa can be any naturally occurring amino acid
  misc_feature (302)..(303): Xaa can be any naturally occurring amino acid
SGPRSWLELRALPPRPLSRADAPGGRVAALRAPPYHARCPGWGRPSSQDTMPEDGAGDGGEVPALIPDGEPLREEQRPLKQSLGSSLCRESHWKCLLLTLLIHACGAVVAWCRLATVPRLVLGPEAALARGAGGPPPTYPASPCSDGYLYIPLAFVSLLYLLYLAECWHCHVRSCQAPRTDAHTVLALIRRLQQAPPCVWWKATSYHYVRRTRQITRYRNGDAYTTTQVYHERADSRTARGEFDYSAHGVRDVSKELVGLADTRPXAALQQVLHFXSAEAEASYLTQRARFFSANEGLDDIXXAREGMHLKDVDFRESLMVFADPAAALRT

SEQ ID NO: 1019511 - protein, 156 aa, Homo sapiens
TNFIFTLVGVWLVEKVGRRKLTFGSLAGTTVALIILALGFVLSAQVSPRITFKPIAPSGQNATCTRYSYCNECMLDPDCGFCYKMNKSTVIDSSCVPVNKASTNEAAWGRYITHFTIRIYNNISKRGLCLSFQSACTYSSSFKLAFITTLLCSIYW

SEQ ID NO: 1019512 - protein, 189 aa, Homo sapiens
  misc_feature (12)..(12): Xaa can be any naturally occurring amino acid
  misc_feature (22)..(23): Xaa can be any naturally occurring amino acid
  misc_feature (26)..(26): Xaa can be any naturally occurring amino acid
  misc_feature (184)..(184): Xaa can be any naturally occurring amino acid
  misc_feature (188)..(188): Xaa can be any naturally occurring amino acid
KKLANKKELKQXQGRSKKYQAXXNHXEDKQKNFLFLRLWDRNMDIAMGWKGAQAMQFGQPLVFDMAYENYMKRKELQNTVSQLLESEGWNRRNVDPFHIYFCNLNIDGALHRELIKRYQEKWDKLLLTSTENSHVDLFPKDSTIYFTTDSPNAMTTPRHDKAYVIGPFVDNEYAARHIPSQATXADPXN

SEQ ID NO: 1019513 - protein, 105 aa, Homo sapiens
  misc_feature (29)..(29): Xaa can be any naturally occurring amino acid
  misc_feature (91)..(91): Xaa can be any naturally occurring amino acid
  misc_feature (101)..(101): Xaa can be any naturally occurring amino acid
MAHRFPALTQEQKKELSEIAQSIGANGKXILAADESVGTMWNRLQSIKVENTEENRRQFREILFSVDTAINQSIGGVILFHETLYQKDRQXKLCRDILKEXEIVV

SEQ ID NO: 1019514 - protein, 122 aa, Homo sapiens
  misc_feature (1)..(1): Xaa can be any naturally occurring amino acid
XFTLGGPPLYKRMRDKQFICAKRPNPPVQENFDVNKYLGRWYEIEKIPTTFENGRCIQANYSLMEKDKIKVLNQEFVELDGTVNQIEGEATPVNLTEPAKLEVKFSWFMPSHRTDPATDYEI

SEQ ID NO: 1019515 - protein, 113 aa, Homo sapiens
MTLAGYGGSVSCDPSTFGRPRWGRITLSPLEFDTDAVGNIVRARYLSLFRLDFLRWSLALSPVLECSGSESRAHCKGPAPGFKKVDPGRQTSRSSMRLQAHRLPMTRIKLEVL

SEQ ID NO: 1019516 - protein, 182 aa, Homo sapiens
MVSLSCGAEAGLYCCHLGSLQPPCLILLPQPAECLRLQAALPRLTGLVETGFRCVGRAGLQPLTASDPPASASRGAGIADGVSFTQCSMVPRLECSGVISARYNYTSQPPALASKSAEIAASARRHPVWDSEECLCLAAIVWDGEEPSAWLPSLESEERLARPPSHLGSEECFPSGITSRNK

SEQ ID NO: 1019517 - protein, 149 aa, Homo sapiens
  misc_feature (11)..(11): Xaa can be any naturally occurring amino acid
  misc_feature (25)..(25): Xaa can be any naturally occurring amino acid
QWVDIMTMDYXIFNVLDLNMYNRPXYTYQVHDYLRSKLVFPSMKMTCIFDVTFRVLVVELGSDSVIMTGSYNYLLQDVLTRITKCVSDPLRRVEADNSKPRATPKPRKVGLGGKRRKDENSVDSLDFSNKTLHTAWHPPEKSMSSGGYK

SEQ ID NO: 1019518 - protein, 223 aa, Homo sapiens
SRNRSRSEAQPDPAMEQPRKAVVVTGFGPFGEHTVNASWIAVQELEKLGLGDSVDLHVYEIPVEYQTVQRLIPALWEKHSPQLVVHVGVSGMATTVTLEKCGHNKGYKGLDNCRFCPGSQCCVEDGPESIDSIIDMDAVCKRVTTLGLDVSVTISQDAGRYLCDFTYYTSLYQSHGRSAFVHVPPLGKPYNADQLGRALRAIIEEMLDLLEQSEGKINYCHKH

SEQ ID NO: 1019519 - protein, 271 aa, Homo sapiens
NEVTHSGDTGVETDGRMPPKVTSELLRQLRQAMRNSEYVTEPIQAYIIPSGDAHQSEYIAPCDCRRAFVSGFDGSAGTAIITEEHAAMWTDGRYFSPRLAKPIGPAPGHHSIDKWRLEGHTNSGRLAGELCFLKDPGLWSWTPCIIPTDYLEAKSAQFSTKCPAITSFLSRRTSLDKTLDRPSWAALATPLPHHWAWIYTRHSPWKRHTVGRPFALAPMGLRRNRYTVAFRLHPSPIHTRRTQPWPSFYTLPQEITMVRSHPIPPHSTLPY

SEQ ID NO: 1019520 - protein, 338 aa, Homo sapiens
  misc_feature (5)..(5): Xaa can be any naturally occurring amino acid
  misc_feature (180)..(180): Xaa can be any naturally occurring amino acid
  misc_feature (201)..(201): Xaa can be any naturally occurring amino acid
  misc_feature (205)..(205): Xaa can be any naturally occurring amino acid
  misc_feature (214)..(214): Xaa can be any naturally occurring amino acid
  misc_feature (224)..(224): Xaa can be any naturally occurring amino acid
  misc_feature (233)..(233): Xaa can be any naturally occurring amino acid
  misc_feature (252)..(252): Xaa can be any naturally occurring amino acid
  misc_feature (266)..(266): Xaa can be any naturally occurring amino acid
  misc_feature (272)..(272): Xaa can be any naturally occurring amino acid
  misc_feature (274)..(275): Xaa can be any naturally occurring amino acid
  misc_feature (290)..(290): Xaa can be any naturally occurring amino acid
  misc_feature (294)..(294): Xaa can be any naturally occurring amino acid
  misc_feature (297)..(298): Xaa can be any naturally occurring amino acid
  misc_feature (301)..(302): Xaa can be any naturally occurring amino acid
  misc_feature (312)..(312): Xaa can be any naturally occurring amino acid
  misc_feature (326)..(326): Xaa can be any naturally occurring amino acid
VSIHXDRRRTAGQAGGLRGSLPGLRRRGKPLHPPLEPRPKVADQTLHRPGGPVTQSTNRMASYLLADLPQGVDLGRPGIPPHETCHHLVHPVHTLTAWGTLAKALVLLELNEAGEGFHDVLERPMRITAAVPRPVCPSPSPSKSISTVSKTDLGISGVDEPPGITARRLSQPPVTPPACXSISSFKGTDISPPTVQGWLTXPEKXNSLVPEYAXSAKASQPGTXTAAECGGHXHFFHVGHSCWAAKHSHVCXEGGLQAGLALLFLXGLDERXFXXTEVGPSPAHHKHVKXIARXTCXXANXXCLIGLLDGHXQIGGSLQNSLGCRXRSPGPMAGPHRK

SEQ ID NO: 1019521 - protein, 182 aa, Homo sapiens
  misc_feature (17)..(17): Xaa can be any naturally occurring amino acid
  misc_feature (25)..(25): Xaa can be any naturally occurring amino acid
  misc_feature (28)..(28): Xaa can be any naturally occurring amino acid
  misc_feature (37)..(37): Xaa can be any naturally occurring amino acid
  misc_feature (40)..(40): Xaa can be any naturally occurring amino acid
  misc_feature (55)..(55): Xaa can be any naturally occurring amino acid
  misc_feature (67)..(67): Xaa can be any naturally occurring amino acid
  misc_feature (69)..(70): Xaa can be any naturally occurring amino acid
  misc_feature (75)..(76): Xaa can be any naturally occurring amino acid
  misc_feature (83)..(85): Xaa can be any naturally occurring amino acid
  misc_feature (89)..(89): Xaa can be any naturally occurring amino acid
  misc_feature (93)..(94): Xaa can be any naturally occurring amino acid
  misc_feature (96)..(96): Xaa can be any naturally occurring amino acid
  misc_feature (99)..(99): Xaa can be any naturally occurring amino acid
  misc_feature (101)..(101): Xaa can be any naturally occurring amino acid
  misc_feature (105)..(107): Xaa can be any naturally occurring amino acid
  misc_feature (110)..(110): Xaa can be any naturally occurring amino acid
  misc_feature (113)..(114): Xaa can be any naturally occurring amino acid
  misc_feature (121)..(121): Xaa can be any naturally occurring amino acid
  misc_feature (126)..(126): Xaa can be any naturally occurring amino acid
  misc_feature (130)..(130): Xaa can be any naturally occurring amino acid
  misc_feature (132)..(132): Xaa can be any naturally occurring amino acid
  misc_feature (134)..(136): Xaa can be any naturally occurring amino acid
  misc_feature (142)..(143): Xaa can be any naturally occurring amino acid
  misc_feature (148)..(148): Xaa can be any naturally occurring amino acid
  misc_feature (152)..(155): Xaa can be any naturally occurring amino acid
  misc_feature (160)..(160): Xaa can be any naturally occurring amino acid
  misc_feature (162)..(162): Xaa can be any naturally occurring amino acid
  misc_feature (164)..(164): Xaa can be any naturally occurring amino acid
  misc_feature (169)..(170): Xaa can be any naturally occurring amino acid
LFIIDPNGVIKHLSVNXLPVGRSVXKPXRLVKAFQYXKPXEKVCPANWTPDSPTXKPSPAASKEYFXKXXKKITXXNLHLLNXXXNHSXNLLXXFXRWXFXEGKXXXMLXFKXXTQNVLFXKFWQXPLKXGXLXXXEIVYWXXLGGWXASFXXXXFASKXRXSXLITQXXHSSPLPSPHPPL

SEQ ID NO: 1019522 - protein, 210 aa, Homo sapiens
SGESRGAAGLSPVSSSCSLGRAAVTVHRRRRGLHRRVHPPASMATTATCTRFTDDYQLFEELGKGAFSVVRRLCDENPHAGATQQKSSLPRNLSAPRITRNLEPLSARAYVALLKHPTHRAPPMTSIPASTGLPLPRCLDLCYRARTCFAAPRWPEQLLHSRSQHASPLLLRSRLLARVLTEHPPAMTIVHQWTLKPAEPAAGDVNARVP

SEQ ID NO: 1019523 - protein, 247 aa, Homo sapiens
MGCRACALREDGTCRLLLLLLLLGRRCGRRGAARRVLLLLLLGVLSAGLRPGALATEHYSPLSLLKQELQHRQQQEAPAGGGGCSPQSGDWGDQYSAECGESSFWNFHDSDCEPKGSSPCDSLLSLNTEKILSQAKSIAEQKRYPFATDNDSTNEELAYAYVLSGSGLSDEANTAFVQQLLQILSPLGRITEAVNDLTKAIQTAASDGWYRHRGTLELHITLDYATAHEHFTQSLELTKKQPIATLS

SEQ ID NO: 1019524 - protein, 141 aa, Homo sapiens
ETESPFVTRLECSDTILAHCNPRLLGSSDSPASASRVAGITGTCHHTQLIFIFLVETGFHHVGQAGFELLIWWSACLGLPECWDYRRKPPRLAKKIKIYLVYVLTSYTQRILDFFLKIIIKPPISPVEKEILRFLCSFFPA

SEQ ID NO: 1019525 - protein, 92 aa, Homo sapiens
  misc_feature (2)..(2): Xaa can be any naturally occurring amino acid
IXHDTETKMEEFKDQLPADECNKLKEEISKIGELLARKDSETGENIRQAASSLQQASLKLFEMAYKKMASEREGSGSSGTGEQKEDQKEEKQ

SEQ ID NO: 1019526 - protein, 212 aa, Homo sapiens
SGVADMPRRRELLLSSRPESSHYGEPWLLDAGSLCGHMELTLGTSDKKRPKPVQEWNIVEGQAYTSGQVHALECNRYPPSGAAGGWLAAIMDGGLRARLMRWCAAGSPMAGAHGDSLMVDGLGLTRALATHEIRCNKTRAKTKKPTMTAHALERPDTQAKRTRKRAGRTTAQVPLASGQVPTEPQAQTKHNRQMTHSRTDILSRENNAPTTQ

SEQ ID NO: 1019527 - protein, 175 aa, Homo sapiens
  misc_feature (34)..(34): Xaa can be any naturally occurring amino acid
MAPSASCCSRNCSLIIPFLCFISLASTTVANCSXSRIASLLLRFNSGWTSSLRLRLLLSPARCLICLPASPSRRPAFPKGFFRALPSSESSFPLSIQPCRATNSRRMSFVPSKIRKMRRSRSTRSTPGSFMKPIPPMIWMHSSVTFQAASEPKILLMAASIWKSVAPWSMLALTM

SEQ ID NO: 1019528 - protein, 296 aa, Homo sapiens
  misc_feature (181)..(181): Xaa can be any naturally occurring amino acid
  misc_feature (183)..(183): Xaa can be any naturally occurring amino acid
  misc_feature (192)..(194): Xaa can be any naturally occurring amino acid
  misc_feature (199)..(199): Xaa can be any naturally occurring amino acid
  misc_feature (204)..(204): Xaa can be any naturally occurring amino acid
  misc_feature (209)..(209): Xaa can be any naturally occurring amino acid
  misc_feature (219)..(219): Xaa can be any naturally occurring amino acid
  misc_feature (226)..(227): Xaa can be any naturally occurring amino acid
  misc_feature (233)..(233): Xaa can be any naturally occurring amino acid
  misc_feature (248)..(248): Xaa can be any naturally occurring amino acid
  misc_feature (250)..(250): Xaa can be any naturally occurring amino acid
  misc_feature (258)..(258): Xaa can be any naturally occurring amino acid
  misc_feature (262)..(263): Xaa can be any naturally occurring amino acid
  misc_feature (268)..(268): Xaa can be any naturally occurring amino acid
  misc_feature (270)..(270): Xaa can be any naturally occurring amino acid
  misc_feature (272)..(272): Xaa can be any naturally occurring amino acid
  misc_feature (275)..(275): Xaa can be any naturally occurring amino acid
  misc_feature (294)..(294): Xaa can be any naturally occurring amino acid
MLAYGQRLEAERTVSRAHRAVEREMPALGWAVAAILMLQTAMADLPGDSAQEGRGVFRPKQPRAEGSAQLPLVQEGAEAAALHTTTMAKNTVFLIEMLLPKKYHVLRFLDKGERHPVREARAVIFFGDQEHPNVTEFAVVPLPGPCYMRALSPRPGYQSSWASMFIFTAEYALLYHTLQEXIXPLHQFFLNXXXFSFQXCHDKXLAFTXVAPRGVASGXRRSWLIXXRYVESXFLHPTGLELLVDHGXTXAGHWAVEXVWYXXKFYGXPXEXARXYADGEVDVVVLEARCLGGXGH

SEQ ID NO: 1019529 - protein, 354 aa, Homo sapiens
  misc_feature (293)..(293): Xaa can be any naturally occurring amino acid
  misc_feature (308)..(308): Xaa can be any naturally occurring amino acid
  misc_feature (318)..(318): Xaa can be any naturally occurring amino acid
  misc_feature (333)..(333): Xaa can be any naturally occurring amino acid
  misc_feature (347)..(347): Xaa can be any naturally occurring amino acid
SRAVPPHGSPPPGRPEQSTADSGPLSHPRGPVASADPESGPSRTRAPPSRPRASPHPGSEVSRGPAWEELTVYQGKVASRCVGPGERVRREGPIAQGPGSCGGHPRLALAQGHPGFTVGAPAPASPVPTTEAVGHRPVMLERPPALDMPMPTEGTPPPLSGTPIPVPAYFRYAENGFFLKRPRGLRRSLPTPPTAKGSLPISRLFPPRTPGWHQLQPRRVSFRGEASEPLQSPGYDPSRPESFFQKSFQRLRCLGHGSSSEVFQVRSQEDGGLYAVKRSLSTFRGPKDRARKXAEVGSHEKVGQHPCXRAAGEAWEEXASCTCRRSCVSQRAXHCEAWGAPCLRPGXGYMRESC

SEQ ID NO: 1019530 - protein, 125 aa, Homo sapiens
LPPHYGCPHSFFGGPHFRSHTLGKGFPRRGAHLLLSLWPARVKEPLHVLIWRERPKGTRWTRGHASERGRRGLTCPPSYLRVTAPLNPRPRPRKRGDSSRFSLFVATAGGPRSLCTFISEPRGFG

SEQ ID NO: 1019531 - protein, 82 aa, Homo sapiens
ATKPAAAELPAPMSAHNRGTELDLSWISKIQVNHPAVLRRADTNPGSQNREKREGKLVCFLKAVTLLETYTPFGGGTTFQQL

SEQ ID NO: 1019532 - protein, 209 aa, Homo sapiens
YDAGSSGAARAMSAHNRGTELDLSWISKIQVNHPAVLRRADTNPGSQNRQQQAVPTLLLGSLHQLFTLYQHLHSHFQRDDYILPTFSPGPLVNKRAKYPNSGERLLLKRLYNIICIDYTLRIYLTGRRTGRKTTRPGLLVARLLNSHLYGLASACNIISLWRTQGAPAWAFPMLGPGPPLLKNTEFSNDESRLGAAATDSQATSKLDVA

SEQ ID NO: 1019533 - protein, 91 aa, Homo sapiens
  misc_feature (20)..(20): Xaa can be any naturally occurring amino acid
  misc_feature (22)..(23): Xaa can be any naturally occurring amino acid
  misc_feature (33)..(34): Xaa can be any naturally occurring amino acid
  misc_feature (42)..(42): Xaa can be any naturally occurring amino acid
  misc_feature (52)..(52): Xaa can be any naturally occurring amino acid
  misc_feature (55)..(55): Xaa can be any naturally occurring amino acid
  misc_feature (60)..(60): Xaa can be any naturally occurring amino acid
  misc_feature (65)..(65): Xaa can be any naturally occurring amino acid
  misc_feature (84)..(84): Xaa can be any naturally occurring amino acid
MTTGNNTVRFNPNFYRNGKXCXXILGTLTGPAXXPPHSISSXLISIQSLMTXNPXTINPXFNKRXIHEDSKNYNLFIPHETITXSVFYIIE

SEQ ID NO: 1019534 - protein, 247 aa, Homo sapiens
MATKDGALNWMPLLDFHHKKCLEYPFYVISTEPCGPAGNPNCPYALGPQEEVEQKQILLIQRVLYIMTPPLVAHDGPLTSSSSNVLEIFISNIFFTFLSFPNPVNAFFSPIPSCTTYLSRYTCVKKLDHPDISSVLSGLYSVVLSYICSSYPGRLTFSHATENPLVGNHQTVFICASMTTEEFSEHNFDILVSLETSTRGIYKANSHIFCFPQIAAPYRTQSSFSKECCYSKQFTGPLSMLYKPGKF

SEQ ID NO: 1019535 - protein, 226 aa, Homo sapiens
  misc_feature (1)..(1): Xaa can be any naturally occurring amino acid
XYRKVKGEEVQNPGTSTVGEWASPGEEGQLEKGKQEHRAGGDDGTTGVILHVLGRCRKNLDPTFSVGGAKKLSMDPGPKSPLPGLPLSSSVQLQPGSDGCLLPLSFPTRSQVEGRQGEPDACYPRFPHSHAQASGHCRPAGASPPGIWGALQVRAGLLSIAGAGPLGLQDNGLLSGGKREGGRGLHASFPRPGSVLVLRLRLPQEFPQYPWQLRALVNVFVPVAKV

SEQ ID NO: 1019536 - protein, 286 aa, Homo sapiens
VCWTAVVLLLARAEACGIYHWQMIPYRIGSLGRLLLLADRLAGGDALSLLLPTRCRMIIEVRSKYFNSSSSRIVLGKWSQPWPIGFAPCPCDDDDHGQDDSELRWMLGRGRYRGGEISPDPATSFGGTVVCEETSGAYEKTDTDGKFLYHKSKWNITMESYVVHTNYDEYAIFLTKKFSRHHGPTITAQLYGRAPQLKETLLQDFKVVAKGVGIPEDLIFTMADRREWGPGEADPQAILIPEIRKVFFPQKRKIQGGETGNGTPRKRNSFRWAIWPALYGKTTRFL

SEQ ID NO: 1019537 - protein, 123 aa, Homo sapiens
  misc_feature (20)..(20): Xaa can be any naturally occurring amino acid
  misc_feature (36)..(36): Xaa can be any naturally occurring amino acid
  misc_feature (63)..(63): Xaa can be any naturally occurring amino acid
  misc_feature (66)..(66): Xaa can be any naturally occurring amino acid
  misc_feature (71)..(72): Xaa can be any naturally occurring amino acid
  misc_feature (77)..(78): Xaa can be any naturally occurring amino acid
  misc_feature (80)..(81): Xaa can be any naturally occurring amino acid
  misc_feature (83)..(83): Xaa can be any naturally occurring amino acid
  misc_feature (86)..(86): Xaa can be any naturally occurring amino acid
  misc_feature (88)..(89): Xaa can be any naturally occurring amino acid
  misc_feature (91)..(91): Xaa can be any naturally occurring amino acid
  misc_feature (93)..(94): Xaa can be any naturally occurring amino acid
  misc_feature (97)..(98): Xaa can be any naturally occurring amino acid
  misc_feature (101)..(101): Xaa can be any naturally occurring amino acid
  misc_feature (103)..(103): Xaa can be any naturally occurring amino acid
  misc_feature (105)..(105): Xaa can be any naturally occurring amino acid
RGPTWAKDSKAAGTPGSAAXQAGWVGGRRAETGAAXPAEIQSELQSMGKRDSFRIRSVSTLAXKNXSNKKXXLVSLXXKXXTXTGXQXXHXPXXTKXXQTXPXHXLWPDVDIFCPGPPHMEVD

SEQ ID NO: 1019538 - protein, 46 aa, Homo sapiens
MTRQALWKHIPDMKILFPHPSMQLNQLLRTEKFGSPIVEVVNTLSF

SEQ ID NO: 1019539 - protein, 178 aa, Homo sapiens
  misc_feature (88)..(88): Xaa can be any naturally occurring amino acid
KCKCHGTSGSCQLKTCWQVTPEFRTVGALLRSRFHLLPLLILACTTCNWLAMLDAWAHAWVHPSAWLPGCSLGLRLTGAMPPACPGLXSKSLPDFCERDAAPWTLAGTVGPPCATRCSAGSDGCGSMCCGRGHNILRQTRSERCHCRFHWCCFVVCEECRITDVGQRLQVSGPGSPGP

SEQ ID NO: 1019540 - protein, 84 aa, Homo sapiens
KFGHKGRENSGGAIGQTKLGWNSGAWFGFSSETMFAKPDWAEIEKFDRSNLKKTETQETKGGVRRQYALTIPQAWPSNLTSLSG

SEQ ID NO: 1019541 - protein, 102 aa, Homo sapiens
KFGHKGRENSGGAIGQTKLGWNSGAWFGFSSETMFAKPDWAEIEKFDRSNLKKTETQEKNPRLSKEPMDQEKQAGESKGGVRRQYALTIPQAWPSNLTSLSG

SEQ ID NO: 1019542 - protein, 116 aa, Homo sapiens
  misc_feature (10)..(10): Xaa can be any naturally occurring amino acid
  misc_feature (13)..(14): Xaa can be any naturally occurring amino acid
  misc_feature (17)..(17): Xaa can be any naturally occurring amino acid
  misc_feature (26)..(27): Xaa can be any naturally occurring amino acid
  misc_feature (30)..(30): Xaa can be any naturally occurring amino acid
  misc_feature (34)..(34): Xaa can be any naturally occurring amino acid
  misc_feature (39)..(39): Xaa can be any naturally occurring amino acid
  misc_feature (41)..(41): Xaa can be any naturally occurring amino acid
  misc_feature (45)..(45): Xaa can be any naturally occurring amino acid
  misc_feature (48)..(51): Xaa can be any naturally occurring amino acid
  misc_feature (54)..(57): Xaa can be any naturally occurring amino acid
  misc_feature (61)..(61): Xaa can be any naturally occurring amino acid
  misc_feature (66)..(67): Xaa can be any naturally occurring amino acid
  misc_feature (70)..(71): Xaa can be any naturally occurring amino acid
  misc_feature (73)..(75): Xaa can be any naturally occurring amino acid
  misc_feature (89)..(90): Xaa can be any naturally occurring amino acid
  misc_feature (94)..(95): Xaa can be any naturally occurring amino acid
  misc_feature (100)..(100): Xaa can be any naturally occurring amino acid
  misc_feature (102)..(102): Xaa can be any naturally occurring amino acid
  misc_feature (104)..(107): Xaa can be any naturally occurring amino acid
  misc_feature (113)..(113): Xaa can be any naturally occurring amino acid
RVLGSILNAXTVXXAMXMVLTPTQKXXYVXPFSXQMVPXPXTTNXPSXXXXIPXXXXPPGXTHSPXXIIXXQXXXTPPHPSILFTNNEXXPGGXXPPIPXRXYXXXXDIPVKXIFC

SEQ ID NO: 1019543 - protein, 185 aa, Homo sapiens
MHDACTHHLGIHNSMWAPHTADTFWRRNLPIFQCVHSAELRATVWALINLYTAFGPGGPKPQHWCGIGVVPQRRSIFIGAALSSLAVLNPPRGHTHRMAPTWAGTPKTTVAQRAHRPTRPLWGHVCKLGALTHSALAPRYHGAPPIYTSHTYTPRFVAPSGVAAPTDIQIRRSHKFVRGAYPRSV

SEQ ID NO: 1019544 - protein, 253 aa, Homo sapiens
MSSNECFKCGRSGHWARRMSYWCEAVVCGMMKPVRTTRAYIRRAYMLKSQSGSSVSHVPTSSWSTFRPMHDACTHHLGIHNSMWAPHTADTFWRRNLPIFQCVHSAELRATVWALINLYTAFGPGGPKPQHWCGIGVVPQRRSIFIGAALSSLAVLNPPRGHTHRMAPTWAGTPKTTVAQRAHRPTRPLWGHVCKLGALTHSALAPRYHGAPPIYTSHTYTPRFVAPSGVAAPTDIQIRRSHKFVRGAYPRSV

SEQ ID NO: 1019545 - protein, 110 aa, Homo sapiens
  misc_feature (20)..(20): Xaa can be any naturally occurring amino acid
MYKGSQALGDAANIVFVHPXHGECLRILPQVPQRSEEFFIAGKLQDGLLHITTCSFVAPWNSLSLAQRRGFPKTYPVGCEESTVFPCLSIPCKLQSGTHWLWTAQLLQGF

SEQ ID NO: 1019546 - protein, 316 aa, Homo sapiens
  misc_feature (2)..(2): Xaa can be any naturally occurring amino acid
  misc_feature (117)..(117): Xaa can be any naturally occurring amino acid
  misc_feature (172)..(172): Xaa can be any naturally occurring amino acid
  misc_feature (174)..(174): Xaa can be any naturally occurring amino acid
  misc_feature (176)..(177): Xaa can be any naturally occurring amino acid
  misc_feature (185)..(185): Xaa can be any naturally occurring amino acid
  misc_feature (189)..(189): Xaa can be any naturally occurring amino acid
  misc_feature (196)..(196): Xaa can be any naturally occurring amino acid
  misc_feature (207)..(207): Xaa can be any naturally occurring amino acid
  misc_feature (286)..(286): Xaa can be any naturally occurring amino acid
PXAPAHTFTRAQEPPCGDCPLGLLLLLPLAGHLALGAQQGRGRRELAPGLHLRGIRDAGGRYCHRARTCAAAAVPTTVPCPYIGRQYVTCDPLLQPAQDPDCCPDFWDFCLGVPPPXPPNTKDVCYGRSISIPVIGERYMGTTGNPCATLPRQKQGSGAVVDLSNHGLVDPXMXKXXNKGNYSWXAGNXSAFWGMXLNEGIRYRLGXIRPSSSVMNMHEIYTVLNPGEVLPTAFEASEKWPNLIHEPLDQGNCAGSWAFSTAAVASDRVLNPFSGHNNAFSFAPEXFCLVTPTSSRAAAVGVSMVPGGSCVAKGGV

SEQ ID NO: 1019547 - protein, 226 aa, Homo sapiens
  misc_feature (2)..(2): Xaa can be any naturally occurring amino acid
  misc_feature (117)..(117): Xaa can be any naturally occurring amino acid
  misc_feature (173)..(173): Xaa can be any naturally occurring amino acid
  misc_feature (175)..(175): Xaa can be any naturally occurring amino acid
  misc_feature (179)..(179): Xaa can be any naturally occurring amino acid
  misc_feature (196)..(196): Xaa can be any naturally occurring amino acid
  misc_feature (198)..(198): Xaa can be any naturally occurring amino acid
  misc_feature (200)..(200): Xaa can be any naturally occurring amino acid
  misc_feature (202)..(204): Xaa can be any naturally occurring amino acid
  misc_feature (210)..(210): Xaa can be any naturally occurring amino acid
  misc_feature (212)..(213): Xaa can be any naturally occurring amino acid
  misc_feature (215)..(215): Xaa can be any naturally occurring amino acid
  misc_feature (222)..(222): Xaa can be any naturally occurring amino acid
  misc_feature (224)..(224): Xaa can be any naturally occurring amino acid
PXAPAHTFTRAQEPPCGDCPLGLLLLLPLAGHLALGAQQGRGRRELAPGLHLRGIRDAGGRYCHRARTCAAAAVPTTVPCPYIGRQYVTCDPLLQPAQDPDCCPDFWDFCLGVPPPXPPNTKDVCYGRSISIPVIGERYMGTTGNPCATLPRQKQGSGAVVDLSNHALVGFPXHXYNSXSNSGATYWLGQAWGTNXRXFXGXXXPGMEGXFXXRXGAPTRPXFXRF

SEQ ID NO: 1019548 - protein, 282 aa, Homo sapiens
  misc_feature (20)..(20): Xaa can be any naturally occurring amino acid
  misc_feature (27)..(27): Xaa can be any naturally occurring amino acid
  misc_feature (32)..(32): Xaa can be any naturally occurring amino acid
  misc_feature (35)..(35): Xaa can be any naturally occurring amino acid
  misc_feature (80)..(80): Xaa can be any naturally occurring amino acid
MAPDPHSREARQQRFAHFTXLANQSLXEEIVXFAXTATPAILQLSRGGTQIAPAERPSAIESDAFLDDILRKVQPLWTVXKYHPASKDDQLYTRERPFAQSQELQVELQSTSIFEFSRDMNELQLKLMPGVALLIAISIFSADRPNVQDQLQVERLQHTYVEALHAYVSIHHPHDRLMFPRMLMKLVSLRNPEAVVHVRSKFFALRLQDNRGSHRAALLKIMRMCTDMTVFVSPYFLVFLAGMAEAWVAASLEVDRAEKGETFLGAGQGDPPAGIKTESQDG

SEQ ID NO: 1019549 - protein, 259 aa, Homo sapiens
MAGAEDWPGQQLELDEDEASCCRWGAQHAGARELAALYSPGKRLQEWCSVILCFSLIAHNLVHLLLLARWEDTPLVILGVVAGALNADLLVVAWYTGVLTHGALWQLPIVAERLIIRLLPGSYQIDPDQAIITGSEVHTETKGDNCLVIDCCRCYNMGYKLPHPQPVNALEQLYPWECFVFCLIIFGTFTKQIHKWSHTYLGCTAGVTLLQELALSFLPRKQHRIHHVSPQETYFLHHHRLAQVPSGEDRLLGRLGDLI

SEQ ID NO: 1019550 - protein, 217 aa, Homo sapiens
  misc_feature (55)..(55): Xaa can be any naturally occurring amino acid
  misc_feature (58)..(58): Xaa can be any naturally occurring amino acid
  misc_feature (63)..(63): Xaa can be any naturally occurring amino acid
  misc_feature (134)..(136): Xaa can be any naturally occurring amino acid
  misc_feature (146)..(147): Xaa can be any naturally occurring amino acid
  misc_feature (152)..(152): Xaa can be any naturally occurring amino acid
  misc_feature (155)..(155): Xaa can be any naturally occurring amino acid
  misc_feature (161)..(162): Xaa can be any naturally occurring amino acid
  misc_feature (182)..(182): Xaa can be any naturally occurring amino acid
  misc_feature (186)..(186): Xaa can be any naturally occurring amino acid
  misc_feature (201)..(201): Xaa can be any naturally occurring amino acid
GPALPRRRGRQCPAPLISAVSLIPASALLSLFLFPEYRAQSLRPEGRPARSLARXPPXPETPXPPRPGAGAPAAAAAAFRPLRPGPGPPGHAASAPRAPAAQPEEMMLRNGTFLTLLLFFLCAFLSLSWYAALXXXRVVEFTGEFXXADSVXQRXESSALXXSPGAGEIRGPCQNARARDEXHSHXGRSQRTPMERGTLTXAVLHCPRLHHCDTAGK

SEQ ID NO: 1019551 - protein, 146 aa, Homo sapiens
  misc_feature (55)..(55): Xaa can be any naturally occurring amino acid
  misc_feature (58)..(58): Xaa can be any naturally occurring amino acid
  misc_feature (63)..(63): Xaa can be any naturally occurring amino acid
  misc_feature (132)..(133): Xaa can be any naturally occurring amino acid
  misc_feature (136)..(136): Xaa can be any naturally occurring amino acid
  misc_feature (139)..(139): Xaa can be any naturally occurring amino acid
  misc_feature (143)..(143): Xaa can be any naturally occurring amino acid
  misc_feature (146)..(146): Xaa can be any naturally occurring amino acid
GPALPRRRGRQCPAPLISAVSLIPASALLSLFLFPEYRAQSLRPEGRPARSLARXPPXPETPXPPRPGAGAPAAAAAAFRPLRPGPGPPGHAASAPRAPAAQPEEMMLRNGTFLTLLLFFLCAFLSLSWYAXXGGXKGXVVYXYHX

SEQ ID NO: 1019552 - protein, 178 aa, Homo sapiens
RREGLGDVRATERKAQRPGRRPCRRRQFIFIESPELNVALHVFSKLHRWLWGTRAQLTLLPARSPAPSSRLNRAAESAGKGSRQPGVGGARRGRAGSGGGAHLRRSRPRGRSCAGCRRCLSPASCGRASPARAPAGTCGAATGAGARARGSPPRRGASPGGPWPRPPAAPGRGSPAAA

SEQ ID NO: 1019553 - protein, 97 aa, Homo sapiens
ACIMRVYASGSGLYFIIAVMQQQAVTWTHTSPWSHNAYCYSRRIMAVYEETSMGSNRVCQALASEGHLLVRLRSSPLNLPPKPIPLLGTWQAMRIGP

SEQ ID NO: 1019554 - protein, 79 aa, Homo sapiens
EPTSSELERHYIHKPILRTHVGQHLGMTSHRKMGMYGLLSGHSEDRVWRQLTDHVDLASERTLEKTLGSTCICQAQTAE

SEQ ID NO: 1019555 - protein, 53 aa, Homo sapiens
  misc_feature (24)..(24): Xaa can be any naturally occurring amino acid
  misc_feature (28)..(28): Xaa can be any naturally occurring amino acid
  misc_feature (34)..(34): Xaa can be any naturally occurring amino acid
  misc_feature (37)..(37): Xaa can be any naturally occurring amino acid
  misc_feature (43)..(44): Xaa can be any naturally occurring amino acid
  misc_feature (47)..(47): Xaa can be any naturally occurring amino acid
MAPPSTREPRVLSATSATKSDGEXVLPXFPDADXFEXFALGSXXAIXKATGGL

SEQ ID NO: 1019556 - protein, 269 aa, Homo sapiens
  misc_feature (92)..(92): Xaa can be any naturally occurring amino acid
  misc_feature (94)..(97): Xaa can be any naturally occurring amino acid
  misc_feature (100)..(100): Xaa can be any naturally occurring amino acid
  misc_feature (104)..(105): Xaa can be any naturally occurring amino acid
  misc_feature (109)..(109): Xaa can be any naturally occurring amino acid
  misc_feature (120)..(121): Xaa can be any naturally occurring amino acid
  misc_feature (124)..(124): Xaa can be any naturally occurring amino acid
  misc_feature (130)..(130): Xaa can be any naturally occurring amino acid
  misc_feature (151)..(151): Xaa can be any naturally occurring amino acid
  misc_feature (192)..(193): Xaa can be any naturally occurring amino acid
  misc_feature (196)..(198): Xaa can be any naturally occurring amino acid
  misc_feature (203)..(206): Xaa can be any naturally occurring amino acid
  misc_feature (262)..(262): Xaa can be any naturally occurring amino acid
MGEETRDQDLHRSRSPNCKLTVYLGKRDFVDHLDKVDPVDGVVLVDPDYLKDRKVFVTLTCAFRYGREDLDVLGLSFRKRPVQSPPYPEPSXRXXXXPGXATGXXGGWXGSWASMGTPSXXPYXRIFHGXVTLQPGPEDTGKGCGVDFEIXAFCAKSLEEKRRKGTLCGVVIRKVQFAPEKPGPQPSAETTXXFLXXXRSLHXXXXLDKELYYHGEPLNVNVHVTNNSTKTVKKIKVSVRQYADICLFSTAQYKCPVAQLEXDDQVSPS

SEQ ID NO: 1019557 - protein, 46 aa, Homo sapiens
PEPGKTAIQDSDAGALLATCKDQHLLRGPLGLPWGAGCLGTVQDTH

SEQ ID NO: 1019558 - protein, 118 aa, Homo sapiens
MDGWMDGWVGEPINEWINEGSVFKVKETWKLDSNPQAPHGIVPGIVLPKFPLLAINSQNLVSVPTEKRPGIVALFGGKKGVPNSQGLFVDIYLGLKKKKNSPQSQMIVQSHGTPCPVP

SEQ ID NO: 1019559 - protein, 176 aa, Homo sapiens
  misc_feature (20)..(20): Xaa can be any naturally occurring amino acid
  misc_feature (38)..(38): Xaa can be any naturally occurring amino acid
  misc_feature (40)..(40): Xaa can be any naturally occurring amino acid
  misc_feature (42)..(45): Xaa can be any naturally occurring amino acid
  misc_feature (48)..(48): Xaa can be any naturally occurring amino acid
  misc_feature (53)..(57): Xaa can be any naturally occurring amino acid
  misc_feature (61)..(61): Xaa can be any naturally occurring amino acid
  misc_feature (86)..(86): Xaa can be any naturally occurring amino acid
LGTFDLTGIPPAPLWVPQIXVTFEIDVNGILRVTAEDXGXGXXXXFTXPGGQXXXXXEEIXRMVNDAEKFAEEDKKLKGRIDTRNXLDGYAFSLKIQIGDKEKLGGNFSSEDKETMEKAVEEKIEWLESHQDADIEDFKAKKKELEEIVQPIISKLYGSAGPPPTGEEDTAEKDEL

SEQ ID NO: 1019560 - protein, 176 aa, Homo sapiens; identical to SEQ ID NO: 1019559
  misc_feature (20)..(20): Xaa can be any naturally occurring amino acid
  misc_feature (38)..(38): Xaa can be any naturally occurring amino acid
  misc_feature (40)..(40): Xaa can be any naturally occurring amino acid
  misc_feature (42)..(45): Xaa can be any naturally occurring amino acid
  misc_feature (48)..(48): Xaa can be any naturally occurring amino acid
  misc_feature (53)..(57): Xaa can be any naturally occurring amino acid
  misc_feature (61)..(61): Xaa can be any naturally occurring amino acid
  misc_feature (86)..(86): Xaa can be any naturally occurring amino acid

SEQ ID NO: 1019561 - protein, 176 aa, Homo sapiens; identical to SEQ ID NO: 1019559
  misc_feature (20)..(20): Xaa can be any naturally occurring amino acid
  misc_feature (38)..(38): Xaa can be any naturally occurring amino acid
  misc_feature (40)..(40): Xaa can be any naturally occurring amino acid
  misc_feature (42)..(45): Xaa can be any naturally occurring amino acid
  misc_feature (48)..(48): Xaa can be any naturally occurring amino acid
  misc_feature (53)..(57): Xaa can be any naturally occurring amino acid
  misc_feature (61)..(61): Xaa can be any naturally occurring amino acid
  misc_feature (86)..(86): Xaa can be any naturally occurring amino acid

SEQ ID NO: 1019562 - protein, 176 aa, Homo sapiens; identical to SEQ ID NO: 1019559
  misc_feature (20)..(20): Xaa can be any naturally occurring amino acid
  misc_feature (38)..(38): Xaa can be any naturally occurring amino acid
  misc_feature (40)..(40): Xaa can be any naturally occurring amino acid
  misc_feature (42)..(45): Xaa can be any naturally occurring amino acid
  misc_feature (48)..(48): Xaa can be any naturally occurring amino acid
  misc_feature (53)..(57): Xaa can be any naturally occurring amino acid
  misc_feature (61)..(61): Xaa can be any naturally occurring amino acid
  misc_feature (86)..(86): Xaa can be any naturally occurring amino acid

SEQ ID NO: 1019563 - protein, 128 aa, Homo sapiens
EFGTRCLGKGGLLASLVLISMVTLYPSVPGRSGGYSKVCVSQVAAPLGNDGGAWLWTVLRSFHDALMFVVLFQSSWSHNRLGSYLMTAFYRWVYLRLREEEGLPRQVCGRAGIQGQALTLSGIWVLLL

SEQ ID NO: 1019564 - protein, 279 aa, Homo sapiens
QAVRPEYWMVAQSKGKFRPGPAQLAGSQVAGKGLAGAEHRHAEPWGRGLGCVVLGPAAEGGAGRQHAKPGALGRGAPGELRGRSASAPPNPRTCPTPPRRRPPPLQKRPGALPRRLGAGARRPRRLLRLERASPDRLSAAEPRGGCDGADDHAGRAVQSPPDTGRRLPWSTGYAEVINAGKSREQGGTRLAVTVGVCGRSEECSEELLGSLAEDGRILVYSYGGLICWDMQVSRSMLKIGHHGILAFDYIREQLKDLVEITFRNPSATIPFDSQHFGTK

SEQ ID NO: 1019565 - protein, 339 aa, Homo sapiens
  misc_feature (186)..(186): Xaa can be any naturally occurring amino acid
QAVRPEYWMVAQSKGKFRPGPAQLAGSQVAGKGLAGAEHRHAEPWGRGLGCVVLGPAAEGGAGRQHAKPGALGRGAPGELRGRSASAPPNPRTCPTPPRRRPPPLQKRPGALPRRLGAGARRPRRLLRLERASPDRLSAAEPRGGCDAPMTTRAGLCKAPRTRAAACPGAPGYAETLFCPRARRRXSPAKDELASSPSRPGSLKAKGKGVSRRSGVLFNRGHSGWEDSLTRFPAPAPQFPVPLTEFPSPSTPRNSPRHQEAASFPRSGEGDARGRGGSHLDALQPANSCWPGKEADPLPGAAGWPPGCVYFKCICRERRAPREMGALSSLRKVAGGPWT

SEQ ID NO: 1019566 - protein, 157 aa, Homo sapiens
MLVKENVEVDLSVLLCVGSVMWVGGGSGMWRVRLFVVLLLACCVLSLVVGARVPLWVGCAARAGVRVSSPAAPWAAWSRARVVCGAGYVRSVCGWVGGGGVVVKMGGGGGGGGGGAVVWGGVGCALLFAGGGSVVVRCSGGVRFCGVVFLLERGWVG

SEQ ID NO: 1019567 - protein, 132 aa, Homo sapiens
  misc_feature (43)..(43): Xaa can be any naturally occurring amino acid
  misc_feature (53)..(53): Xaa can be any naturally occurring amino acid
MAQGEKQSVPISPGTGTGKLLENSCRKTCGPFRLTVMLKITHXGVREQFLPFXCTKRQKFSIPQFEGNTAEGPWQSGFCFPWQVGGEQGKDLPQLFPNPAQSPLEWQGNLVTCSSPSVWQATDAVKGTSLQK

SEQ ID NO: 1019568 - protein, 320 aa, Homo sapiens
  misc_feature (253)..(253): Xaa can be any naturally occurring amino acid
  misc_feature (275)..(275): Xaa can be any naturally occurring amino acid
  misc_feature (284)..(284): Xaa can be any naturally occurring amino acid
  misc_feature (293)..(293): Xaa can be any naturally occurring amino acid
  misc_feature (297)..(298): Xaa can be any naturally occurring amino acid
MGSLEDYTRDHGMSISFSYWVSEAVVVYKWITTKLGLDLSHPSLAWYHFLSISQKAMSRPLLITFTPSAADPSDLWKDVAVSMTTDPEKPKSTLDGAAARAFYEALIGESEQRILTPKKISGLNLPDEKKREKKTKKNEGTSSMKRDEQEERHQRKTMVQGEIPLRLKDKDRLNRDTGEAAQRGRTCTELKETAENRIERREELGGNMIARACLLVDPHLNVCCIERVQGDSIVSYLLEPWRLPGVGVCELSXRDAAQLAEEAGFPEVARMVREXHGETKSPEXGLYSLPPVXRELXXHFQIPPPTSLLTAVYRGSQLQP

SEQ ID NO: 1019569 - protein, 276 aa, Homo sapiens
  misc_feature (200)..(200): Xaa can be any naturally occurring amino acid
  misc_feature (210)..(210): Xaa can be any naturally occurring amino acid
  misc_feature (213)..(213): Xaa can be any naturally occurring amino acid
  misc_feature (229)..(229): Xaa can be any naturally occurring amino acid
  misc_feature (234)..(234): Xaa can be any naturally occurring amino acid
  misc_feature (248)..(248): Xaa can be any naturally occurring amino acid
  misc_feature (257)..(257): Xaa can be any naturally occurring amino acid
  misc_feature (259)..(259): Xaa can be any naturally occurring amino acid
  misc_feature (266)..(266): Xaa can be any naturally occurring amino acid
  misc_feature (276)..(276): Xaa can be any naturally occurring amino acid
MEKWNHTSNDFILLGLLPPNQTGIFLLCLIILIFFLASVGNSAMIHLIHVDPRLHTPMYFLLSQLSLMDLMYISTTVPKMAYNFLSGQKGISFLGCGVQSFFFLTMACSEGLLLTSMAYDRYLAICHSLYYPIRMSKMMCVKMIGGSWTLGSINSLAHTVFALHIPYCRSRAIDHFFCDVPAMLLLPVQILGSMIYGFVXTALSPFPFHXASXLPVGRVLFAVYHMHSXEGREXPSPPFHTFTVVIFXYALLSTLSXPXISAHQLXTDLAVSTPSX

SEQ ID NO: 1019570 - protein, 38 aa, Homo sapiens
MADLDKLNIDSIIQRLLEVRGSKPGKNVQLQENEIRGL

SEQ ID NO: 1019571 - protein, 38 aa, Homo sapiens; identical to SEQ ID NO: 1019570

SEQ ID NO: 1019572 - protein, 304 aa, Homo sapiens
EEQIHLQVAVPSHGFALLALVGLVGVASDPAASRREHPELLHHFSTQEKTPQICVVGSGPAGFYKAQHLLKNPQAHVDIYEKKPVPFGLVRFGVAPDHPEVKNVINKFTPERAQFRPVCASLGATVECGQGTVTVPELRGGLTKPVVLTLRGQRTIRALEIPGERAATVCAPARAFGGWYNGLPENQELEPDLSCDTAVILGQENVALDVARILLTPPEHLERTDITEGSPGCTEAESSEDSVAQMGRRGPLQVAFTIKELREMIHVTGSPANYGSVDSLSTPGPDSEVPVQEAPADCRSKATT

SEQ ID NO: 1019573 - protein, 157 aa, Homo sapiens
PGLGPVRPPGWRAGRRTRRTAGPGRLSFGKTLAVPPLVSVDPAVAFSRAADLCPPVAPAVLEQKGPPSSRTEPRAPSPMEQASAGVPRLRPGRRALWHLFPPPRVPVRPGRDWLGNRGREEVAVQQGIGAALPWFLARPQVRPENTSMALPLCPTTR

SEQ ID NO: 1019574 - protein, 236 aa, Homo sapiens
RPGKPRQPRAQPIQRPGLHQSHGRQKSTDRTGLTQKRTSFNYAMKEAAAAALKKKGWEVVESDLYAMNFNPIISRKDITGKLKDPANFQYPAESVLAYKEGHLSPDIVAELGVPAILKGWFERVFIGEFAYTYAAMYDKGPFRSKKAVLSITTGGSGSMYSLQGIHRDMNVILWPIQSGILHFWGFQVLEPSLTYSIGTLQQTPELNPVRMGETPDDICMRHHDFAPRALCLNFSK

SEQ ID NO: 1019575 - protein, 330 aa, Homo sapiens
  misc_feature (328)..(328): Xaa can be any naturally occurring amino acid
VRTASDLTWPQLKGLGRRRRVRVWRGASWKRARVARPSPPPFPLSESGFCGATGEPSGVPEPRSPGRGPWWGLSATSRGRGRSWPRVVPPCGSVIGWKRSRTPRGARSLGDPVLRTPDICSSRVPALVAYGPLLRGHGENAASTGGASDSGKNGEVNSGPPGSWAQWQDKGGPSASAGKAEELRGKEAEEETEREGSGGEEAQGEVPSAGGEEPAEEDSEDWCVPCSDEEVELPADGQPWMPPPSEIQRLYELLAAHGTLELQAEILPRLASHAGGQSEEERSDEEPEAKKRKRKNTHATEFDFDDEQCHKGLLIDRRAPRNSAGAEXEA

SEQ ID NO: 1019576 - protein, 232 aa, Homo sapiens
  misc_feature (12)..(12): Xaa can be any naturally occurring amino acid
  misc_feature (21)..(21): Xaa can be any naturally occurring amino acid
  misc_feature (29)..(29): Xaa can be any naturally occurring amino acid
  misc_feature (36)..(36): Xaa can be any naturally occurring amino acid
  misc_feature (42)..(42): Xaa can be any naturally occurring amino acid
  misc_feature (52)..(52): Xaa can be any naturally occurring amino acid
  misc_feature (69)..(69): Xaa can be any naturally occurring amino acid
  misc_feature (76)..(76): Xaa can be any naturally occurring amino acid
  misc_feature (88)..(88): Xaa can be any naturally occurring amino acid
  misc_feature (101)..(101): Xaa can be any naturally occurring amino acid
  misc_feature (114)..(114): Xaa can be any naturally occurring amino acid
  misc_feature (116)..(116): Xaa can be any naturally occurring amino acid
  misc_feature (123)..(123): Xaa can be any naturally occurring amino acid
  misc_feature (128)..(128): Xaa can be any naturally occurring amino acid
  misc_feature (146)..(146): Xaa can be any naturally occurring amino acid
  misc_feature (204)..(204): Xaa can be any naturally occurring amino acid
  misc_feature (219)..(219): Xaa can be any naturally occurring amino acid
QSTYYGSFVTRXLLDSQLSDXHAIEESVXLIYDPIXTAQGCXSLKADRLTPXLMEVCKEKDFSPEALKXANITFEXMFEGVPIVIKHXHLINVLMWELEKXSAVADKHEWLSLXSXNHLGKNXQWLMXRVDEMSQDIVKYETDMRXTSKRQQQKHQYQQRRQQEDMQRQSRGEPPLPEEDLSKLFKPRQPPARMDSLLMAGQIXTDCQNIKEFTAQNLXKLFMAQALQENNN

SEQ ID NO: 1019577 - protein, 107 aa, Homo sapiens
MSPTTLDTRPLRVFLPARQQQQRQKQQEQKQQQNSSKFRPGTNPSTSFEPIKADPTGVLELPKELSEIFDPTRECMSSELLEELMSSEVVAPLLRLSPPPGEHPPLS

SEQ ID NO: 1019578 - protein, 116 aa, Homo sapiens
PLLGPLLRPLEKRSIRVGITQFSRCRLSPLSLTRKGNSLTRCASRVRQCLALLQLKLGALHPLSCTHFPTLPSEMNPVPQLEMQKSHVFCVAHAESCRLELFLFGHLGSTCRDILH

SEQ ID NO: 1019579 - protein, 291 aa, Homo sapiens
FPAPAAPEDCALRPFPRAPRAHRIVAGPPAVAIGAPLGEALKNRAPPRRRSLALYYSTPGHALACTPGPVSPPPEPPPLESAEPLGPAADLWADVDLTEFDQYLILQPDSARRPRAPVPRGTGQTGPARHVLPRGEQPDLRAVGRQQRGLLQRVHLRLVPPAPPRVPAALPSRSPRDRSDRDAAALLSNIRVYVWFHVTARLGASDARPGARSTSQATLPGLLGHLPSGGPCEGAWSSHVSRGFSRKPEPRTCWQSCQGNIFEAPAPFLAVYFLQPDCINIFYFVFLKKYT

SEQ ID NO: 1019580 - protein, 385 aa, Homo sapiens
GLEPFVWAGKKKPSDPSFSCFSSFFLSGFSSLQPAATMPRKKAAAAAWEEPSSGNGTARAGPRKRGGPAGRKRERPERCSSSSGGGSSGDEDGLELDGAPGGGRAAAALAVLTAGKAGGAAVVITEPEHTKVSASNLKGQQCKGQLLIHGATNWDLHWSKQKCLNSKLLTAISVRIVGAPQIMGAWQGVRVRTVVSGSLCCTQPPHQHGTRTLWQLGVDMRSASCDMVPPSRVKHPTHRRPTPTRERSPQCAATTLAPATETAPRRTRRTQTWPPSLRTDRSRTTPRNERQASDPNARPNPQTGCCNNPTWTPHMRWDTRRTQPPGSAADTRHVLSKPDTHHRYRGHRAKCAHTTPRHTLLITTSSIQAHTMTTKPPATYRNSTT

SEQ ID NO: 1019581 - protein, 117 aa, Homo sapiens
MKSDGSVLLPPLGILRWFCTNIGAMHNASSLEVVELGSLPGESFSKSVRILQKPATADGMEWKVACAMAKLGMDVDWQVQYTHVCMAQMHYTDMVRKRCFCLLVPKSLPRTGFLQMF

SEQ ID NO: 1019582 - protein, 209 aa, Homo sapiens
MATQADLMELDMAMEPDRKAAVSHWQQQSYLDSGIHSGATTTAPSLSGKGNPEEEDVDTSQVLYEWEQGFSQSFTQEQVADIDGQYAMTRAQRDELLCSLQTLDEGMQIPSTQCDAAHPTNVQRMAEPSQMLKHCSCKLDSLIKMMQKLPQVQSLNWPKLLNDEDTVVGQYRAQTMAPSPLQKREAPTPGNNARTPQQGHCHEVPCGIH

SEQ ID NO: 1019583 - protein, 253 aa, Homo sapiens
GRVAQVVRTVINADFPFPLGWLGGYLAVLAGAGLTFALQSSSVFTAAVVPLMGVGVISLDRAYPLLLGSNIGTTTTALLAALASPADRMLSALQPVCGLLPGGPTGSAPETPGHAAPPLTGRDKCGTPWNPPSFFLPLPCLYPLRPSQCRVLLHPLQEALQTAPVCGLLQVRQPLEGPVTLFSPPVALCLLPAGPGLCRLSTLGTEETGSLGRRHRQSQVGRCFPRRSPLRAAVMQSVLGGAGLDCSSQERAG

SEQ ID NO: 1019584 - protein, 102 aa, Homo sapiens
MACGATLKRPMEFEAALLSPGSPKRRRCAPLPGPTPGLRPPDAEPPPPFQTQTPPQSLQQPAPPGSERRLPTPEQNFQNIKTKNIARYHEVETLYEVVLNHE

SEQ ID NO: 1019585 - protein, 122 aa, Homo sapiens
GVHFKASVQQQGLESRFCGAPRPAPRTPLKQQEGVFHPVFCNILYKTVLCPWGRAGFGKEKTNETPFFFFRPTTLESFLPPYPFPPFGFYFKVRGLPGSWMPDKYYIKLGCYLKWNKAVCPG

SEQ ID NO: 1019586 - protein, 185 aa, Homo sapiens
  misc_feature (3)..(3): Xaa can be any naturally occurring amino acid
  misc_feature (37)..(37): Xaa can be any naturally occurring amino acid
  misc_feature (132)..(132): Xaa can be any naturally occurring amino acid
  misc_feature (143)..(143): Xaa can be any naturally occurring amino acid
  misc_feature (148)..(149): Xaa can be any naturally occurring amino acid
  misc_feature (152)..(152): Xaa can be any naturally occurring amino acid
  misc_feature (176)..(176): Xaa can be any naturally occurring amino acid
MTXTRSGVPLVDRNPFYVEVIVMWPLLSKQWVSLWRXVYVSGGVSRGRLFLRHYWCPSRCRSLTRVLVESYRKIKEAGQNFEIIFGSADRSEESFKQYFSEMAWLAVPYTDEARRSRLKPGVRKSKGFPTLXMLDPQRGDHVXGGGWXXWKXGGWGGCALAPQARAGALRLQRRAXKRGPLPRPF

SEQ ID NO: 1019587 - protein, 132 aa, Homo sapiens
HEAAEEPRVLCIIQDTTNSKTVNERITLNLPASTPVRKLFEDVANKVGYINGTFDLVWGNGINTADMAPLDHTSDKSLLDANFEPGKKNFLHLTDKDGEQPQILLVSYLESPIFIIFVHCHLLLEDAVSQRK

SEQ ID NO: 1019588 - protein, 106 aa, Homo sapiens
ALEILTGGNELQAFASIILDQFRYDPHDVPRHEVPGSEIRERLTPRKPVGDLAGDLRLMLPPGRWKFDGSCSEDRPCPAATWKTGKITLVLPGVTELGGIGPGDVV

SEQ ID NO: 1019589 - protein, 259 aa, Homo sapiens
QAVGAEGGAAGRGPMGPGGRARRRRGARLDSGVRGCEGARRALRPAREWASPGLAGLSRKKGGARAKACRAGGPGVEVEVGAEEGAEPRRKGSGEGGGGWAAWGERSGAPVRSSAVAPEKGCSGGERAGPDKRRRVGTEAPGGPPMEPGVWAPKKDPRAASNGETRRGNEELLLGRNQAVKKGETKNGKSDYPYDQNGQSTGSNGGMQFGAIPATRLLEGRKEDSRMPLKGLVAHCLLRAMIHELDTKTSWMRANITYH

SEQ ID NO: 1019590 - protein, 335 aa, Homo sapiens
SEDVRSDFQRRVPYNYLQRAYIKLNQLEKAVEAAHTFFVANPEHMEMQTEQLQYITGAHTLRCLNALQLGRQQKPSHTLAAAYKCSELNIMRLMTLRLAITALRTSLNENTFVEDTECRTLLCRRPQQTLKNYEYFTGTNGWICTEAIADHYMQVLVCQHECVRELATRPGRLSPIENFLPLHYDYLQFAYYRVGEYVKALECAKAYLLCHPDDEDVLDNVDYYESLLDDSIDPASIEAREDLTMFVKRHKLESELLHISCRRVWGFSSDWNRIASDQICGRDGMGTRVPFMTCTAWIGARRSVDFPLGTTWSLPSKLEPIEEWPPRYQKHLDGH

SEQ ID NO: 1019591 - protein, 322 aa, Homo sapiens
  misc_feature (262)..(262): Xaa can be any naturally occurring amino acid
  misc_feature (300)..(300): Xaa can be any naturally occurring amino acid
  misc_feature (319)..(319): Xaa can be any naturally occurring amino acid
RLPGAELFRFSPSQWRVGWGGRSPKPLGDMEPRRAAARGAWLGVSGGRWGRHLAAELVYHLAGALGTELQDLARRFGPGGWRPGAGCLLVVRALELLEQAAVGPAPDSLQVSAQPAEQELRRLREENERLRRELRAGPQEERALLRQLKEVTDRQRDELRAHNRDLRQAAWRPEALQEQLQRLLLVNAELRHKLAAMQTQLRAARDPREGAPQPWRKPTPQAKERARGQAGRPGHQHGQEPEWRPAGAGAPGNPEDPAEARXGSGRPSEAGQCRFSREEFEQILQERNELKAKVFLLKEXLAYFQRECSQTPGPRPSAXGMK

SEQ ID NO: 1019592 - protein, 132 aa, Homo sapiens
GGHKLSKAGRGTQASRTRARKEPPEGTLSLCVNMTSKLAVALLAAFLISAALCEGAVLPRSAKELRCQCIKTYSKPFHPKFIKELRVIESGPHCANTEIIVKLSDGRELCLDPKENWLQRVVEKFLKRAENS

SEQ ID NO: 1019593 - protein, 159 aa, Homo sapiens
MKLITILFLCSRLLLSLTQESQSEEIDCNDKDLFKAVDAALKKYNSPKVNNQFVLYRITEATKTVGSDTFYSFKYEIKEGDCPVQSGCTATVGKRSSTKFSVATQTCQITPAEGPVVTAQYDCLGCVHAISTQSPDLEPILRHGIQYFNSTTLHFFLFT

SEQ ID NO: 1019594 - protein, 111 aa, Homo sapiens
MTPPRNSVNGTFPAEPMKGPIAMQSGPKPLFRRMSSLVGPTQSFFMRESKTLGAVQIMNGLFHIALGGLLLIPAGIYAPICVTVWPPLWGGIMYIISGSLLAATEKNSRKC

SEQ ID NO: 1019595 - protein, 111 aa, Homo sapiens; identical to SEQ ID NO: 1019594

SEQ ID NO: 1019596 - protein, 109 aa, Homo sapiens
  misc_feature (16)..(16): Xaa can be any naturally occurring amino acid
  misc_feature (28)..(28): Xaa can be any naturally occurring amino acid
  misc_feature (30)..(30): Xaa can be any naturally occurring amino acid
  misc_feature (39)..(39): Xaa can be any naturally occurring amino acid
  misc_feature (41)..(41): Xaa can be any naturally occurring amino acid
  misc_feature (49)..(49): Xaa can be any naturally occurring amino acid
  misc_feature (59)..(60): Xaa can be any naturally occurring amino acid
  misc_feature (65)..(65): Xaa can be any naturally occurring amino acid
  misc_feature (71)..(71): Xaa can be any naturally occurring amino acid
  misc_feature (75)..(75): Xaa can be any naturally occurring amino acid
  misc_feature (78)..(78): Xaa can be any naturally occurring amino acid
  misc_feature (81)..(81): Xaa can be any naturally occurring amino acid
  misc_feature (89)..(90): Xaa can be any naturally occurring amino acid
  misc_feature (100)..(100): Xaa can be any naturally occurring amino acid
RTRELQSMADQEKISXAALKKTLLDRVXLXSPTVSTLTXKXPGKPLTRXLALGGKKDKXXICPLXDSDPLXETPXPKXHPXALLPPFPXXACKEKACLGXFQVLVIKPP

SEQ ID NO: 1019597 - protein, 280 aa, Homo sapiens
  misc_feature (212)..(212): Xaa can be any naturally occurring amino acid
  misc_feature (216)..(216): Xaa can be any naturally occurring amino acid
  misc_feature (239)..(239): Xaa can be any naturally occurring amino acid
  misc_feature (257)..(257): Xaa can be any naturally occurring amino acid
  misc_feature (270)..(270): Xaa can be any naturally occurring amino acid
HPASICRRAAATLPESTGHRSTITCPEFGPPPCRRPAQRASAPVCCVRACEMCSSVPRYARALAGTAPADCPGRRDSRRSVAVRALLRREARALPAGVRLVLGGHPVRRLRLLPDVTPCLWCRRVTGGDCTLRRGDSVAARCREEQQTLCTPSPAAKSACCAGRLTASAPHAAEAGSPESPESTEITEEELLDNFHVMAPSEEDHSILWDAXSTYXGSKALHVTNIKKWKEPCRIELYXVVESLAKAQETSGEEISXFYLPNCNKNGFYXSRQCETSMDG

SEQ ID NO: 1019598 - protein, 287 aa, Homo sapiens
  misc_feature (66)..(66): Xaa can be any naturally occurring amino acid
  misc_feature (108)..(108): Xaa can be any naturally occurring amino acid
  misc_feature (153)..(153): Xaa can be any naturally occurring amino acid
  misc_feature (155)..(155): Xaa can be any naturally occurring amino acid
  misc_feature (157)..(157): Xaa can be any naturally occurring amino acid
  misc_feature (159)..(159): Xaa can be any naturally occurring amino acid
  misc_feature (170)..(171): Xaa can be any naturally occurring amino acid
  misc_feature (173)..(173): Xaa can be any naturally occurring amino acid
  misc_feature (176)..(177): Xaa can be any naturally occurring amino acid
  misc_feature (182)..(182): Xaa can be any naturally occurring amino acid
  misc_feature (187)..(187): Xaa can be any naturally occurring amino acid
  misc_feature (191)..(191): Xaa can be any naturally occurring amino acid
  misc_feature (195)..(195): Xaa can be any naturally occurring amino acid
  misc_feature (211)..(211): Xaa can be any naturally occurring amino acid
  misc_feature (213)..(214): Xaa can be any naturally occurring amino acid
  misc_feature (216)..(217): Xaa can be any naturally occurring amino acid
  misc_feature (220)..(220): Xaa can be any naturally occurring amino acid
  misc_feature (227)..(228): Xaa can be any naturally occurring amino acid
  misc_feature (235)..(235): Xaa can be any naturally occurring amino acid
  misc_feature (238)..(238): Xaa can be any naturally occurring amino acid
  misc_feature (265)..(265): Xaa can be any naturally occurring amino acid
AAFGPCPLNRPLVSPVTAAPVNPERVFLSLAAFPHCFAPKGPGPGGGAPPPGFEGREGPPLFPKGXFSPPGPQDTVWAANLRPKSGGGSGGKKMKNEIAAVVFFFTRXVRKHDKLKKEAVERFAEKLTLILQEKYKNHWYPEKPSKGGGASEXDXGXKXEFQRVDARDVXXAXENXXRCVGXGSLGXAKGXRLLXGDAMEVCGREGEKNKXGXXAXXENXDENKDEXXRKVTRAXEKXTSDYHSGSSSSDEETSKEMEVKPSSVXAAASPVYQISELIFPPLPMWHP

SEQ ID NO: 1019599 - protein, 246 aa, Homo sapiens
  misc_feature (67)..(67): Xaa can be any naturally occurring amino acid
  misc_feature (107)..(107): Xaa can be any naturally occurring amino acid
  misc_feature (112)..(112): Xaa can be any naturally occurring amino acid
  misc_feature (114)..(114): Xaa can be any naturally occurring amino acid
  misc_feature (116)..(116): Xaa can be any naturally occurring amino acid
  misc_feature (118)..(118): Xaa can be any naturally occurring amino acid
  misc_feature (129)..(130): Xaa can be any naturally occurring amino acid
  misc_feature (132)..(132): Xaa can be any naturally occurring amino acid
  misc_feature (135)..(136): Xaa can be any naturally occurring amino acid
  misc_feature (141)..(141): Xaa can be any naturally occurring amino acid
  misc_feature (146)..(146): Xaa can be any naturally occurring amino acid
  misc_feature (150)..(150): Xaa can be any naturally occurring amino acid
  misc_feature (154)..(154): Xaa can be any naturally occurring amino acid
  misc_feature (170)..(170): Xaa can be any naturally occurring amino acid
  misc_feature (172)..(173): Xaa can be any naturally occurring amino acid
  misc_feature (175)..(176): Xaa can be any naturally occurring amino acid
  misc_feature (179)..(179): Xaa can be any naturally occurring amino acid
  misc_feature (186)..(187): Xaa can be any naturally occurring amino acid
  misc_feature (194)..(194): Xaa can be any naturally occurring amino acid
  misc_feature (197)..(197): Xaa can be any naturally occurring amino acid
  misc_feature (224)..(224): Xaa can be any naturally occurring amino acid
RRRGSRTRRTRLAALPVAQRGPVEAEPQFPARTRSGPPNLRPKSGGGSGGKKMKNEIAAVVFFFTRXVRKHDKLKKEAVERFAEKLTLILQEKYKNHWYPEKPSKGXGASEXDXGXKXEFQRVDARDVXXAXENXXRCVGXGSLGXAKGXRLLXGDAMEVCGREGEKNKXGXXAXXENXDENKDEXXRKVTRAXEKXTSDYHSGSSSSDEETSKEMEVKPSSVXAAASPVYQISELIFPPLPMWHP

SEQ ID NO: 1019600 - protein, 297 aa, Homo sapiens
  misc_feature (9)..(9): Xaa can be any naturally occurring amino acid
MDQLHDAMXRCGECKEDNASDQINPTGIDGVSGVKEHQQGCYHYRRKRRTCGETATKYHRHNLRKLQIPSKKRTRNKPKPIPKESDVKTFNYTAHLWDILVAKTSCEENKVIDQNRSYDQESVERALTCANCGQKLHVLEVHVCEHCCAELMSDPNSSMHEEEDDGKPARRRCKNDECREWYHPAFANQWWCSPECGTKIALERRSKEREKAEKAAEKKRRREEQKQKDKLKIRKLALKPRSYWIKQAQQAVNAFIRERDRDLPCISCGTLTSAQWDAGHYRTTAAAPQLRFNERNI

SEQ ID NO: 1019601 - protein, 322 aa, Homo sapiens
  misc_feature (220)..(221): Xaa can be any naturally occurring amino acid
  misc_feature (225)..(225): Xaa can be any naturally occurring amino acid
  misc_feature (232)..(232): Xaa can be any naturally occurring amino acid
  misc_feature (234)..(235): Xaa can be any naturally occurring amino acid
  misc_feature (240)..(240): Xaa can be any naturally occurring amino acid
  misc_feature (248)..(248): Xaa can be any naturally occurring amino acid
  misc_feature (253)..(254): Xaa can be any naturally occurring amino acid
  misc_feature (257)..(257): Xaa can be any naturally occurring amino acid
  misc_feature (263)..(263): Xaa can be any naturally occurring amino acid
  misc_feature (265)..(265): Xaa can be any naturally occurring amino acid
  misc_feature (267)..(267): Xaa can be any naturally occurring amino acid
  misc_feature (272)..(272): Xaa can be any naturally occurring amino acid
  misc_feature (277)..(278): Xaa can be any naturally occurring amino acid
  misc_feature (280)..(280): Xaa can be any naturally occurring amino acid
  misc_feature (296)..(296): Xaa can be any naturally occurring amino acid
  misc_feature (301)..(301): Xaa can be any naturally occurring amino acid
MLRSISDFSALKELLSGPNRLKIRIDDYAWSRGTVMYRRSSVKNSVPLRTQAVNCVPLEDFGGHHPDPNLTYAADLVETMKSGEHDFGAAFDGDGDRNMILAKHGFFVNPSDSVAVIAANHLQPSRISSRLGSAGFARSMPTSGALDRVASATKIALYETPTGWKFFGNLMDASKLSLCGEESFGTGSDHIREKDGLWAVLAWLSILATRKQSVEDILKXXGQNXGRDFFHXSXXRGVGXGGRKQMMXGLVGXXFDXSFVGKXYXAXNKFHXWEKAXXLXYSDPWDGNHFNKSGVXLHFHXWFSNRLPTERHGSAGATFGCT

SEQ ID NO: 1019602 - protein, 174 aa, Homo sapiens
DKEFFGLRDYYSLIKMVFAAAKASNRKPSPQDIAQAVLRNFSGKDDIQALDIFLANLPEAKCSEEVSPMQLIKQNIFGPSQKVPGGEQEDAESRYLLVLTKNYVALQILQQTFFEGDQQPEIIFGFGFPKDQEYTQLCRNINRVKICMETGKMVLLLNLQNLYESLYDALNQYY

SEQ ID NO: 1019603 - protein, 249 aa, Homo sapiens
  misc_feature (3)..(3): Xaa can be any naturally occurring amino acid
  misc_feature (33)..(33): Xaa can be any naturally occurring amino acid
  misc_feature (36)..(36): Xaa can be any naturally occurring amino acid
  misc_feature (38)..(38): Xaa can be any naturally occurring amino acid
  misc_feature (62)..(62): Xaa can be any naturally occurring amino acid
  misc_feature (132)..(132): Xaa can be any naturally occurring amino acid
  misc_feature (137)..(137): Xaa can be any naturally occurring amino acid
  misc_feature (139)..(139): Xaa can be any naturally occurring amino acid
QPXLESPGPAAMAVEGEIKYVKILLYVLQLAFXACXVXLIAVGVGVRLVLSQTIIQGTTPGXLLPVVIIAVGVFLFLVAFVRCCGACKEHYFLMVTFAFFLSLFMLVEVAAAIAGYVFRDEVISEFYYHFRXQMENXPXHNHTASILHGMQEFFSAVGLLTTQIGRKSPSMSKNRVPDSCCINVTVGCGINFNEKAIHKEGCVEKIGGWLRKNVLVVAAAALGNAFVEVLGIVFACCLVKSFKNGYEVK

SEQ ID NO: 1019604 - protein, 74 aa, Homo sapiens
YLVPTFGEDRMNVLDLGKKTSWVCKVLTLEIVDHDAVELQVLCAVSALPQYTLTPSSAPPGLMLPAVVLQDNTS

SEQ ID NO: 1019605 - protein, 222 aa, Homo sapiens
MAVAVFFEWSMEGPCGIQLQKQFVLNEPLEAGMMVTDEPGYYEDGAFGIRYLRMLPLWFHVKYQAIMFNNRGKPDLLNLLTLVPIQTKMIDVDSLTDKDVATGSNNYTAMSLQGDDDVREGIAENRADQESSRARLISRRRNPSSTQHVINTLPGFVFVKCSGGRKKPGRSLTSFPSPLPCLSRTSRFYTFIDVVKQEQKIFLSSLIVLVAKALSVLVIFVN

SEQ ID NO: 1019606 - protein, 138 aa, Homo sapiens
HTHPHPPPLKARHEALAPPPPPQGHAQNPLQVGAELQSRFFASQGCAQSPFQAAPAPPPTPQAPAAEPLQVDLLPVLAAAQESAAAAAAAAAAAAAVAAAPPAPAAASTVDTAALKQPPAPPPPPPPVSAPAAEAAPL

SEQ ID NO: 1019607 - protein, 334 aa, Homo sapiens
  misc_feature (78)..(78): Xaa can be any naturally occurring amino acid
  misc_feature (83)..(86): Xaa can be any naturally occurring amino acid
  misc_feature (92)..(92): Xaa can be any naturally occurring amino acid
  misc_feature (102)..(102): Xaa can be any naturally occurring amino acid
  misc_feature (104)..(107): Xaa can be any naturally occurring amino acid
  misc_feature (111)..(114): Xaa can be any naturally occurring amino acid
  misc_feature (122)..(122): Xaa can be any naturally occurring amino acid
  misc_feature (125)..(125): Xaa can be any naturally occurring amino acid
  misc_feature (134)..(134): Xaa can be any naturally occurring amino acid
  misc_feature (136)..(136): Xaa can be any naturally occurring amino acid
  misc_feature (138)..(141): Xaa can be any naturally occurring amino acid
  misc_feature (143)..(145): Xaa can be any naturally occurring amino acid
  misc_feature (324)..(324): Xaa can be any naturally occurring amino acid
SASRQWSHLEGLAASGRSHRPRPTMAEELVLERCDLELETNGRDHHTADLCREKLVVRRGQPFWLTLHFEGRNYEASXDSLTXXXXTGPAPXQEAGTKARFXLXXXXEEGXXXXTVVDQQDXTLXLQLTTPANXPXGXXXXIXXXSTGYQGSSFVLGHFILLFNAWCPADAVYLDSEEERQEYVLTQQGFIYQGSAKFIKNIPWNFGQFEDGILDICLILLDVNPKFLKNAGRDCSRRSSPVYVGRVVSGMVNCNDDQGCAAGDPGDNNYGGRRYPMSWIGSVDILRRWKNHGCQRVKYGQCWVFAAVAASAEVPGHPYPRRDXYNCGHDQNSN

SEQ ID NO: 1019608 - protein, 266 aa, Homo sapiens
  misc_feature (256)..(256): Xaa can be any naturally occurring amino acid
MAEELVLERCDLELETNGRDHHTADLCREKLVVRRGQPFWLTLHFEGRPTEEQKTVEIPDPVEAGEEVKGEWTCCRSTGYQGSSFVLGHFILLFNAWCPADAVYLDSEEERQEYVLTQQGFIYQGSAKFIKNIPWNFGQFEDGILDICLILLDVNPKFLKNAGRDCSRRSSPVYVGPGGCSGMVNCNDDQGCAAGDPGDNNYGGRRYPMSWIGSVDILRRWKNHGCQRVKYGQCWVFAAVAAQAEVPGHPYPRRDXYNCGHDQNSN

SEQ ID NO: 1019609 - protein, 146 aa, Homo sapiens
  misc_feature (7)..(7): Xaa can be any naturally occurring amino acid
LLPPTSXSTLPLPSGCAGAWGGEGRLVSPSSLIINNYQELALWDIRAPRPRERCRPASHASPEPTVLPSVPPSPSGALLGARSIPCSCFTLSFSPRRDSLATSSTAVQLPQSGTHCYTQPHEPLQTSQVSSRALPDPAHIPSAGLC

SEQ ID NO: 1019610 - protein, 309 aa, Homo sapiens
  misc_feature (284)..(285): Xaa can be any naturally occurring amino acid
  misc_feature (299)..(299): Xaa can be any naturally occurring amino acid
MASWCLFRVCATVLSRARSRGRPGQSSPPWDGEGVEAAPRCPPIHQQPPERRVVTVVFLGLLLDLLAFTLLLPLLPGLLESHGRAHDPLYGSWQGGVDWFATAIGMPVEKRYNSVLFGGLIGSAFSVLQFLCAPVTGATSDCLGRRPVMLLCLMGVATSYAVLGHLSELCGLPGLQADWGASAKGTSDLSKAIVADLGSPLARSQGMAVIGVAFSLGFTLGPYARSLPDPWNMAALVMPLLFAASDLLFIFCFLAETLALEKLEASIALGYRDAADLLSPLEEXXFSAVARGPAPPSGXPLPPCAAWGS

SEQ ID NO: 1019611 - protein, 132 aa, Homo sapiens
  misc_feature (9)..(9): Xaa can be any naturally occurring amino acid
  misc_feature (81)..(81): Xaa can be any naturally occurring amino acid
  misc_feature (132)..(132): Xaa can be any naturally occurring amino acid
TSLWAVLSXVGFLGVESVHHKGHSLSREGARPPPFRNCCGNKVLTCPQAVYGRPWAQCGMYRALGRGQCWRQSPACGGTLXRRGVWRSGRGWEGLASGRGAGCCGHQYGCLFRKRENMVKAARGLSVGTMWX

SEQ ID NO: 1019612 - protein, 182 aa, Homo sapiens
SLPDRSSCGGPRPQPTAMGWDLTVKMLAGNKSQVSLSSSMSVSKLKAQITQKIGGHAFQQRLAVPPNGVALQDRVPPSNQGLGPGSTVLLVVDKFDEPFNILVRNNKGPNSPYEVRLTQTVAPLKQQMNGLEGVQDHLFWLTFEGKPLEDQLPLGEYGPKPLSPVFINLGLRGGGPKPGGGS

SEQ ID NO: 1019613 - protein, 314 aa, Homo sapiens
ALEIANAHRKPLVIIAEDVDGEALSTLVLNRLKVGLQVVAVKAPGFGDNRKNQLKDMAIATGGAVFGEEGLNLNLEDVQAHDLGKVGEVIVTKDDAMLLKGKGDKAHIEKRIQEITEQLDITTSEYEKEKLNERLAKLSDGVAVLKVGGTSDVEVNEKKDRVTDALNATRAAVEEGIVLGGGCALLRCIPALDSLKPANEDQKIGIEIIKRALKIPAMTIAKNAGVEGSLIVEKILQSSSEVGYDAMLGDFVNMVEKGIIDPTKVVRTALLDAAGVASLLTTAEAVVTEIPKEEKDPGMGAMGGMGGGMGGGMF

SEQ ID NO: 1019614 - protein, 314 aa, Homo sapiens; identical to SEQ ID NO: 1019613

SEQ ID NO: 1019615 - protein, 171 aa, Homo sapiens
MWTVQNRESLGLLSFPVMITMVCCAHSTNEPSNMSYVKETVDRLLKGYDIRLRPDFGGPPVDVGMRIDVASIDMVSEVNMVSGLPRGPAVRLTQMGNGQVPLPSAFHWRSPRPWPLRSHSAPAPRSGTHTRSPLVCNFDTHGLLRCSRETCSALFWEGRVTVAPWICWGGV

SEQ ID NO: 1019616 - protein, 116 aa, Homo sapiens
  misc_feature (1)..(1): Xaa can be any naturally occurring amino acid
XHNHIHPLVIFHFQKSIIHFSRFVQQSIIKGFFSTLIKKFLHLQKSAYAIKYSQDHKIQMSLGLLNLEIHSLEYTGKRKKFALVKGVYHFLEELLKASNICECAKSRYKGILYNLC

SEQ ID NO: 1019617 - protein, 285 aa, Homo sapiens
  misc_feature (272)..(272): Xaa can be any naturally occurring amino acid
  misc_feature (278)..(278): Xaa can be any naturally occurring amino acid
  misc_feature (280)..(280): Xaa can be any naturally occurring amino acid
LSPFLTPFNQSPLLLLSASPAPDPFPQYPLPASLINPSVAAHHDPIRIQLKDSSKFPSVPQYPISLTHQKGLQPIVNKLCSCSLLRPTHSPYNTPILPVKKSDGSYRLVHNLQAISQAVLPIHPIVHNPYPLLSLVATNTTLYTAIDLKDAFFTISLHPDSQNLFAFTWTDPDTLQSQQLTWTVLPQGFRDSPHFFGQALARNLTSLNLSPSHLQNVDDLLLCSPSLKDSQTHTGTALLNFLAIKGYRGFPFKGQLFIFMMTYLGINFSLGXRYDSAXAXLIENY

SEQ ID NO: 1019618 - protein, 296 aa, Homo sapiens
  misc_feature (244)..(245): Xaa can be any naturally occurring amino acid
  misc_feature (248)..(249): Xaa can be any naturally occurring amino acid
  misc_feature (251)..(252): Xaa can be any naturally occurring amino acid
  misc_feature (260)..(260): Xaa can be any naturally occurring amino acid
  misc_feature (265)..(265): Xaa can be any naturally occurring amino acid
  misc_feature (272)..(272): Xaa can be any naturally occurring amino acid
  misc_feature (275)..(275): Xaa can be any naturally occurring amino acid
  misc_feature (296)..(296): Xaa can be any naturally occurring amino acid
VCSRQPRRQLARPPLGPARSFSPLATMSESFDCAKCNESLYGRKFIQTDSGPYCVPCYDNTFANTCAECQQLIGHDSWELFYEDRHFHEGCFRCCRCQCSLADEPFTCQDSELPCNDCYCMRFPRSAPLVGRLSCLGPGSWNKEAKHGMSTASCAVAVNSHWCSRSFVPDKGAHYCVPCYENKFAPRCARCSKTLTQGWSDIPVISHGIENVLVCYRMPERPWAGQQFHLPGMKIPTVWPVFGXXFAXXCXXCNAPIVRXGGSKXVSFEKRXWPXKCFSCARCSNSLVGPGFVTGX

SEQ ID NO: 1019619 - protein, 190 aa, Homo sapiens
GAGGGAPQGSAVFRAAGAAMAQLGKLLKEQKYDRQLRLWGDHGQEALESAHVCLINATATGTEILKNLVLPGIGSFTIIDGNQVSGEDAGNNFFLQRSSIGKNRAEAAMEFLQELNSDVSGSFVEESPENLLDNDPSFLCRFTVVVATQLPESTSLRLADVLWNSQIPLLICRTYGLVGYTEDHYIKNIQ

SEQ ID NO: 1019620 - protein, 190 aa, Homo sapiens; identical to SEQ ID NO: 1019619

SEQ ID NO: 1019621 - protein, 106 aa, Homo sapiens
MMRLKKQRMKTQKAKKGVNKTCTHTMDFICHEHLYVLIRHEHVHFILKSVPLVRLTVFCTLLRLYFHCLYINTRFCTAQRERSEGNVICAILTVHYKLLKLIFGNE

SEQ ID NO: 1019622 - protein, 258 aa, Homo sapiens
SGVDLLCGRLAGLDSGSAFYSAFLVSSAPSRGTLLCGCLKKKRNFIVPQPHLRLERGVLSDALQAEREGRRRRVEVAGPSPPSALAGGEGGTMSGSLQAGSGSAGTSPGSSAASSCDFRLLVFILFPVAAFRGGFGGSAGLRRGGPGRRLWAASGALVRCCAGGCPPYRVAAWVLVVHLACPGDTDARARPSAGVRRQQLQPKQQDRGSDSPRPPSATGSSTPYEDQQATTTYCPICYDMIDRSIHDNCGTAFATQVY

SEQ ID NO: 1019623 - protein, 230 aa, Homo sapiens
  misc_feature (21)..(22): Xaa can be any naturally occurring amino acid
  misc_feature (101)..(101): Xaa can be any naturally occurring amino acid
  misc_feature (125)..(125): Xaa can be any naturally occurring amino acid
  misc_feature (127)..(127): Xaa can be any naturally occurring amino acid
  misc_feature (137)..(137): Xaa can be any naturally occurring amino acid
AATAATPPRILPGLRRPAPHXXPRPRAPAPLSSRPRPSARQAPLPATRQAPRRPARRPGPARAPQPPAARAAMGVEGCTKCIKYLLFVFNFVFWLAGGVIXGVALWLRHDPQTTNLLYLELGEKXAXKNFYVGIYIXIAVGAVMMFVGFLGCYGAIQESQFLLGTFFTCLVILFACEVAAGIWGFVNKDQIAKDVKQFYDQALQQAVVDDDANNAKAVVKTFHETLDCCG

SEQ ID NO: 1019624 - protein, 62 aa, Homo sapiens
MTKSVDPSLAWIPLKYVNVVCDNTSASEEEKSGTAKKCKAQLQELTYSKNRSNLFGWLVSSP

SEQ ID NO: 1019625 - protein, 304 aa, Homo sapiens
EKQRSSAFVKKKTPESFSGPAFSKLVFVAMEELIVELRLFLELLDHEYLTSTVREKKAVITNILLRIQSSKGFDVKDHAQKQETANSLPAPPQMPLPEIPQPWLPPDSGPPPLPTSSLPEGYYEEAVPLSPGKAPEYITSNYDSDAMSSSYESYDEEEEDGKGKKTRHQWPSEEASMDLVKDAKICAFLLRKKRFGQWTKLLCVIKDTKLLCYKSSKDQQPQMELPLQGCNITYIPKDSKKKKHELKITQQGTDPLVLAVQSKEQAEQWPEGDQRSLQWMKWPRGSRVSSSSKLTGAQGQQLEE

SEQ ID NO: 1019626 - protein, 261 aa, Homo sapiens
MPDLERGYTGADGGARRAPAPGAPFVNVLAACSVGLFTLLHPCRRDGACVRGASAARWRPEPPDSGPPPLPTSSLPEGYYEEAVPLSPGKAPEYITSNYDSDAMSSSYESYDEEEEDGKGKKTRHQWPSEEASMDLVKDAKICAFLLRKKRFGQWTKLLCVIKDTKLLCYKSSKDQQPQMELPLQGCNITYIPKDSKKKKHELKITQQGTDPLVLAVQSKEQAEQWPEGDQRSLQWMKWPRGSRVSSSSKLTGAQGQQLEE

SEQ ID NO: 1019627 - protein, 175 aa, Homo sapiens
  misc_feature (102)..(102): Xaa can be any naturally occurring amino acid
  misc_feature (123)..(123): Xaa can be any naturally occurring amino acid
  misc_feature (164)..(164): Xaa can be any naturally occurring amino acid
  misc_feature (171)..(171): Xaa can be any naturally occurring amino acid
MLEPQDCELCQYLCAVMGLDRIEERLPILNQPSTQIVANAKGAVTGAKDAVTTTVTGAKDSVASTITGVMDKTKGAVTGSVEKTKSVKKKQKKLKAQLHSTXHLIEFARKNVYSANQKIQDAXDKLYLLMGRVEKDIGYDDTDESTCAEHIESRTFAIGPQPDXQLQTRAXPSCP

SEQ ID NO: 1019628 - protein, 116 aa, Homo sapiens
IFQTGTCSQADTHSKTHTHSRAAHMYIHTHTLTFPDSHTPAHAHKLPHTHKLPHTHTHTHRLMSTLSPTHGHTRKLSHSHNLSRAHTLNNHTKTPLPLWPVNLTSSERVGCRGSST

SEQ ID NO: 1019629 - protein, 264 aa, Homo sapiens
  misc_feature (196)..(202): Xaa can be any naturally occurring amino acid
  misc_feature (206)..(211): Xaa can be any naturally occurring amino acid
  misc_feature (214)..(214): Xaa can be any naturally occurring amino acid
  misc_feature (216)..(217): Xaa can be any naturally occurring amino acid
  misc_feature (219)..(219): Xaa can be any naturally occurring amino acid
  misc_feature (221)..(223): Xaa can be any naturally occurring amino acid
  misc_feature (236)..(236): Xaa can be any naturally occurring amino acid
  misc_feature (259)..(259): Xaa can be any naturally occurring amino acid
RLCLCLWRVVRVSAAAEEEARAAPSGGEQAAVGRAVAASRARRAAAQEARGWRSASRRRRRQRPSSWRRARLRLRGGPRAPPPHPGRPRRRVNWAGLQRTGSLVQAAGLEPDFWQPGPWARAPLAAKSRSTGPFGLGSTRHSASADVASSPDEVASARGSMELLEHCGVCRERLRPEREPRLLPCLHSACSACLGXXXXXXXNSSXXXXXXGDXTXXYXPXXXQQCFSKDIVENYXMRDSGSKAAPTPRMRTSAALAVXIMPQP

SEQ ID NO: 1019630 - protein, 111 aa, Homo sapiens
  misc_feature (11)..(11): Xaa can be any naturally occurring amino acid
WPGAGGGRDTXALSAPGGCGPGRGGAGRHPPGGRPAFLPTFAWEAPGPPGFVLFINVLLSKLPEERGLCVRQPGPQRRPQHTVGAQHGLLMGLRTSPDPWELPGASSTQNP

SEQ ID NO: 1019631 - protein, 128 aa, Homo sapiens
DFLGRQEPGIRNRSLQRLTRTYERVGYGGVRSQLQYPRGRGRRTIRGYEPESISVNTAKFCSHQNIKTSWMRRREFATLVIRGVRGTRAIRIREVEVRTESQPRNRISVRVIERDIAPTYTLRRGVWH

SEQ ID NO: 1019632 - protein, 154 aa, Homo sapiens
GQVTCAPAPPRYEKPPSVRARFNRGFSGQFSRGVSEIRHTADRWGVSLDVNHFAPDELTVKTKDGVVEITGKHEERQDEHGYISRCFTGKYTLPPGVDPTQVSSSLSPEGTLTVEAPMPKVATQSKEIPIPVTFELGAQFGGPKVAKSDETAAK

SEQ ID NO: 1019633 - protein, 69 aa, Homo sapiens
WFLGGPSWDPFRDWYPKSRLLDQALGLPRLPEEWSQWLGGSSWPGKVGPLPPAAIESPAVAAPAPWVFF

SEQ ID NO: 1019634 - protein, 203 aa, Homo sapiens
  misc_feature (89)..(89): Xaa can be any naturally occurring amino acid
  misc_feature (135)..(136): Xaa can be any naturally occurring amino acid
PLPVLRVSVSFPLLRAFFARSAAGLSPDLGFPLLAVRCYGHVARGFPLAQSEQPGAFRGPPPARGPKKTYWASTISKERGSGPTPFHSXDHPRLRARARTRAPVLRRSTSRKLELEYSLPGILAATNVAPQLILXXSSKLPHCLEVCRQNCQMNNLPHLHVLGLTWVIYIGIFWLYHHKILSLHLMCSLNQKILKTFWLQYIF

SEQ ID NO: 1019635 - protein, 80 aa, Homo sapiens
PLPVLRVSVSFPLLRAFFARSAAGLSPDLGFPLLAVRCYGHVARGFPLAQSEQPGAFRGPPPARGPKKNYWASTISEDRG

SEQ ID NO: 1019636 - protein, 280 aa, Homo sapiens
  misc_feature (178)..(178): Xaa can be any naturally occurring amino acid
FRWWRKRRSVMGIQTSPVLLASLGVGLVTLLVLAVGSYLVRSSRLPQVTLLDPNLKVACYELLDKTTCEASNTQEGSSCALAHRANQHVWGCRVGQTSIYRLQPGIDGSAGHQGHTLLSPGDEDQGYVDSESSSVYAERAVHPKIFLREGSMSQYLDSLNGWGLLDGAFGGQAGLRHXTTGKGQYKQFSPTRNRPPEPPSWRKKRGTMIAGGTGISRMLRLIRAILTVPEDPIPSAFCLCANQSRERISSCGEDLEELQARVSQSAFKLWFTSGSSPRRL

SEQ ID NO: 1019637 - protein, 74 aa, Homo sapiens
FRWWRKRRSVMGIQTSPVLLASLGVGLVTLLGLAVGSYLVRSSRLPQVTLLDPNLKVACYELLDKTTCEASNTQ

SEQ ID NO: 1019638 - protein, 167 aa, Homo sapiens
  misc_feature (145)..(145): Xaa can be any naturally occurring amino acid
MAVRGKLIAVIGDEDMVTGFLLGGIGELNKNRHSNISGGVRKDTHTMQVRIEEHFADYIMSKTGMTCGIILDQNSTSRRTYGVGNALDRPQQSDRIPRMVRGRVPSKERSSMTPAGHSNGLAVQWSRGDVHMHVSSCSLRGLPAXASRVIPYVFPKVLSPGLALQPF

SEQ ID NO: 1019639 - protein, 140 aa, Homo sapiens
MAVRGKLIAVIGDEDMVTGFLLGGIGELNKNRHSNFLVVEKDSTLNENQDPFRKFLNRDDIGIILINQYIAKMVPHALDAHQQSIPAGLENLFKEHPYDAAKDFILRKARACSLSKTCARGLLIALSPFLGSRPLPRLCH

SEQ ID NO: 1019640 - protein, 46 aa, Homo sapiens
SRAITSRSVKALPIVRVVAACLSRKFCAANSRSIRSNGSLSDQAIS

SEQ ID NO: 1019641 - protein, 124 aa, Homo sapiens
STPPSLITSVKVLPRRSGALSPQPSLTGTRANMRTPSRLTFGFAEVSIFQGVEEQFRLLPTSVTLSADLQFATLVAGLNTVHYPISNRYLPHRLGKIMGKLRVRRRAKIQAEWIVGQDTDVAAS

SEQ ID NO: 1019642 - protein, 210 aa, Homo sapiens
MNASEFRRRGKEMVDYVANYMEGIEGRHGSYPARGARCTCVPLIPAAAPQEPDTFEDIINDVEKIIYAWGDSTGNSPYFFAYFPTASSYPAMLADMLCGAIGCHSASPGVVPAHGMHPAGDCDDGLAREDAANYQRHFRNDNTLAEGGTAVIHGQVPGEATLVALTGPARTKVIHRLQARVPELTQAAIMEKLVAYSSDQAHSSVAHSWL

SEQ ID NO: 1019643 - protein, 253 aa, Homo sapiens
  misc_feature (1)..(1): Xaa can be any naturally occurring amino acid
XRALEPHLKNRLGAGGIRRSGGWREEPLRELKLRIKPDQDDNLPKAPRFVAEPMGEKPVGSLAGIGEVLGKKLEERGFDKAYVVLGQFLVLKKDEDLFREWLKDTCGANAKASPGLLRMPFREWCDAFLCDALWEGSQIPSPHPEFGSRVGTSSPLSSYEEEEMAMGRYSPPRYSGDIVGVFSPKTISNFFGDSRSWIASPASFFPLASSLVDRLQFLEWIPGPFLTQPLFNPVDNSGLPFVEEAWSCKVVRS

SEQ ID NO: 1019644 - protein, 130 aa, Homo sapiens
  misc_feature (1)..(1): Xaa can be any naturally occurring amino acid
XRALEPHLKNRLGAGGIRRSGGWREEPLRELKLRIKPDQDDNLPKAPRFVAEPMGEKPVGSLAGIGEVLGKKLEERGFDKAYVVLGQFLVLKKDEDLFREWLKDTCGANAKASPGTASDALQRVVRRLSV

SEQ ID NO: 1019645 - protein, 103 aa, Homo sapiens
  misc_feature (2)..(2): Xaa can be any naturally occurring amino acid
  misc_feature (45)..(45): Xaa can be any naturally occurring amino acid
  misc_feature (58)..(58): Xaa can be any naturally occurring amino acid
MXCALPKRRFFGPVQQIMKFKSLDDVIKRANNTFYGLSAGVFTKXIDKAIKISFDLQXGTVWVNFYGVVSAQCPYGGLKMSGNGRELGEYGFHGIYRGQKQSQ

SEQ ID NO: 1019646 - protein, 349 aa, Homo sapiens
  misc_feature (9)..(9): Xaa can be any naturally occurring amino acid
  misc_feature (49)..(49): Xaa can be any naturally occurring amino acid
  misc_feature (71)..(71): Xaa can be any naturally occurring amino acid
  misc_feature (112)..(112): Xaa can be any naturally occurring amino acid
  misc_feature (119)..(120): Xaa can be any naturally occurring amino acid
  misc_feature (125)..(125): Xaa can be any naturally occurring amino acid
  misc_feature (133)..(133): Xaa can be any naturally occurring amino acid
  misc_feature (137)..(137): Xaa can be any naturally occurring amino acid
  misc_feature (143)..(143): Xaa can be any naturally occurring amino acid
  misc_feature (153)..(154): Xaa can be any naturally occurring amino acid
  misc_feature (156)..(158): Xaa can be any naturally occurring amino acid
  misc_feature (161)..(162): Xaa can be any naturally occurring amino acid
  misc_feature (165)..(165): Xaa can be any naturally occurring amino acid
  misc_feature (172)..(175): Xaa can be any naturally occurring amino acid
  misc_feature (177)..(177): Xaa can be any naturally occurring amino acid
  misc_feature (179)..(179): Xaa can be any naturally occurring amino acid
  misc_feature (195)..(195): Xaa can be any naturally occurring amino acid
  misc_feature (198)..(198): Xaa can be any naturally occurring amino acid
  misc_feature (202)..(202): Xaa can be any naturally occurring amino acid
  misc_feature (323)..(323): Xaa can be any naturally occurring amino acid
  misc_feature (327)..(327): Xaa can be any naturally occurring amino acid
  misc_feature (332)..(332): Xaa can be any naturally occurring amino acid
GAPLLRVPXPSPLPAPLWDPPAAFPTNEIFAMSKRKCRGFRGAQQERAXRQPQVRSRVPRPTPASPAAAHXRRATPAGQQQMRAESRSGAQRRRGSARRGAHRDLRGCVRGXTRSSGSXXSNALXQAVDAAEXLALXSPLRRXLDQAQHFTNXXPXXXGPXXAPXLPPAGRXXXXAXLXLAPLAGEGHTRWRYRXAWXVGLXTLNCNPPHQIAQTTPRLLNLLKSKISPLPGPRCRGDCGELLCPHLLWPLTEAPGANHGTPDPSCVTESTPASLSQSCLQKGGDPSSKTPAQSLWPSLPGLRVPETLTFCLALGAEAGAGCXLQFXERWGXWATGTAAHLRTGSLAAG

SEQ ID NO: 1019647 - protein, 157 aa, Homo sapiens
  misc_feature (9)..(9): Xaa can be any naturally occurring amino acid
  misc_feature (49)..(49): Xaa can be any naturally occurring amino acid
  misc_feature (71)..(71): Xaa can be any naturally occurring amino acid
  misc_feature (113)..(116): Xaa can be any naturally occurring amino acid
  misc_feature (118)..(119): Xaa can be any naturally occurring amino acid
  misc_feature (121)..(122): Xaa can be any naturally occurring amino acid
  misc_feature (125)..(125): Xaa can be any naturally occurring amino acid
  misc_feature (132)..(133): Xaa can be any naturally occurring amino acid
  misc_feature (142)..(142): Xaa can be any naturally occurring amino acid
GAPLLRVPXPSPLPAPLWDPPAAFPTNEIFAMSKRKCRGFRGAQQERAXRQPQVRSRVPRPTPASPAAAHXRRATPAGQQQMRAESRSGAQRRRGSARRGAHRDLRGCVRGGXXXXRXXGXXGVXDGVDGGXXTTTMGVVGXDWVVGDYLDGGEGGG

SEQ ID NO: 1019648 - protein, 130 aa, Homo sapiens
  misc_feature (4)..(4): Xaa can be any naturally occurring amino acid
MCKXLLEVLGGFPLDIRVYCGYEYTINNLKFACYVEPGNAAIGEKLAWAKEKYSFGEPTVPSTVAEEFTYNPFMRVSGPGSSGGGGWHSLQPGVGLRREKTVQQHAGEMDPVTTMRAVRREKDQFKMPRD

SEQ ID NO: 1019649 - protein, 109 aa, Homo sapiens
  misc_feature (4)..(4): Xaa can be any naturally occurring amino acid
MCKXLLEVLGGFPLDIRVYCGYEYTINNLKFACYVEPGNAAIGEKLAWAKEKYSFGEPTVPSTVAEEFTYNPFMRVREKTVQQHAGEMDPVTTMRAVRREKDQFKMPRD

SEQ ID NO: 1019650 - protein, 110 aa, Homo sapiens
  misc_feature (55)..(55): Xaa can be any naturally occurring amino acid
  misc_feature (62)..(62): Xaa can be any naturally occurring amino acid
MSDLWLLSGLSLRLENDAECVLQWRAGQTISPHRHLLRLRSCALDAASSESLTLXMEWTKTXRRAVTMTVVGCAFSAGHAALGGLACCDEISLTYALASPISVLQIAVLI

SEQ ID NO: 1019651 - protein, 511 aa, Homo sapiens
MALRAMRGIVNGAAPELPVPTGGPMAGAREQALAVSRNYLSQPRLTYKTVSGVNGPLVILDHVKFPRYAEIVHLTLPDGTKRSGQVLEVSGSKAVVQVFEGTSGIDAKKTSCEFTGDILRTPVSEDMLGRVFNGSGKPIDRGPVVLAEDFLDIMGQPINPQCRIYPEEMIQTGISAIDGMNSIARGQKIPIFSAAGLPHNEIAAQICRQAGLVKKSKDVVDYSEENFAIVFAAMGVNMETARFFKSDFEENGSMDNVCLFLNLANDPTIERIITPRLALTTAEFLAYQCEKHVLVILTDMSSYAEALREVSAAREEVPGRRGFPGYMYTDLATIYERAGRVEGRNGSITQIPILTMPNDDITHPIPDLTGYITEGQIYVDRQLHNRQIYPPINVLPSLSRLMKSAIGEGMTRKDHADVSNQLYACYAIGKDVQAMKAVVGEEALTSDDLLYLEFLQKFEKNFITQGPYENRTVYETLDIGWQLLRIFPKEMLKRIPQSTLSEFYPRDSAKH

SEQ ID NO: 1019652 - protein, 135 aa, Homo sapiens
  misc_feature (78)..(78): Xaa can be any naturally occurring amino acid
  misc_feature (103)..(103): Xaa can be any naturally occurring amino acid
MGSALSHRALPPHSALPLLLALWLLHMEGPPRQDWSVEPTALSCVASILLAGPHGELLRMLLPTSPVAPIMGATCACXFSTCDCTLHGPLCSSYSLLSLSTRXCRRYGSLALSPSLISTPSVCPSALLLLPVVGA

SEQ ID NO: 1019653 - protein, 102 aa, Homo sapiens
WNATGLTRQAKCAEVKEKIDPGFGKKVEEGPLIFEVWGSRPWLIEFLASPCVVKASQKITLGGAFLFVIKHNTVRVGVFKQVDKKAAGGGKVPKFAQKAQKG

SEQ ID NO: 1019654 - protein, 128 aa, Homo sapiens
ACLSQGAPAKTTVGPYGWGTGIPKAVHNSWACPSFNLGLRETKVEPHLFSVAEEDEVSIKKAAKAVVKAMAFMGKVTFDTTKWDGQFKKPASNSKLRTYLPDFRFTPFKQAVKETCAWFPDNSKQARK

SEQ ID NO: 1019655 - protein, 189 aa, Homo sapiens
  misc_feature (107)..(108): Xaa can be any naturally occurring amino acid
  misc_feature (112)..(112): Xaa can be any naturally occurring amino acid
  misc_feature (117)..(117): Xaa can be any naturally occurring amino acid
  misc_feature (119)..(121): Xaa can be any naturally occurring amino acid
  misc_feature (126)..(126): Xaa can be any naturally occurring amino acid
  misc_feature (128)..(131): Xaa can be any naturally occurring amino acid
  misc_feature (135)..(136): Xaa can be any naturally occurring amino acid
  misc_feature (138)..(138): Xaa can be any naturally occurring amino acid
  misc_feature (140)..(140): Xaa can be any naturally occurring amino acid
  misc_feature (143)..(143): Xaa can be any naturally occurring amino acid
  misc_feature (148)..(149): Xaa can be any naturally occurring amino acid
  misc_feature (151)..(151): Xaa can be any naturally occurring amino acid
  misc_feature (153)..(153): Xaa can be any naturally occurring amino acid
  misc_feature (162)..(165): Xaa can be any naturally occurring amino acid
  misc_feature (167)..(168): Xaa can be any naturally occurring amino acid
RRGRGPAVLGAMRASLLLSVLRPAGPVAVGISLGFTLSLLSVTWVDVSRAAHVPCPNLDDSELACLLLCNTNCWLLPVPNSVCMPWSWSAENARVAWLNVRLVENFXXRVFXYHPSXPXXXAKKAXIXXXXITYXXIXHXLLXALLTXXYXSXHSFFFSLTXXXXLXXGSVWVFLDVAHGGRRGPTWAW

SEQ ID NO: 1019656 - protein, 139 aa, Homo sapiens
CSRVYEESPSTLNFEIGVTIHNRPFLKALVTDELQGLDATIPKATVARDDTTVTFHDVDVHANGIRHVREKSQTVAETMSASGRVDWSELSRLAGAKITYNDDAGETGRVTIVREMSVLGARVDVSITAVPGVEPMLVS

SEQ ID NO: 1019657 - protein, 224 aa, Homo sapiens
  misc_feature (221)..(221): Xaa can be any naturally occurring amino acid
MISPVLILFSSFLCHVAIAGRTCPKPDDLPFSTVVPLKTFYEPGEEITYSCKPGYVSRGGMRKFICPLTGLWPYQHSEMFTQSMSFCWNLRNSGAVRYTTFEYPNTISFSCNTGFYLNGADSAKCTEEGKLAPGAYLSVLPSSALHHPYLRYATLRVYKPSAGNNIPLSGHSSVELFATTCDVGNMIPFTCTTHGNWTKITRMQPSKHGPIPHQGPDHGFXDYA

SEQ ID NO: 1019658 - protein, 127 aa, Homo sapiens
  misc_feature (1)..(1): Xaa can be any naturally occurring amino acid
XSPSSERPLDMCVANEHTERHDASRHRGLQRKATAAGLAEAPTGSTGEPRSAPKAHPLLAGSQKARALGATMGHHLPITKGNSQHPGPAISHLDSPKGHEDTSPKTYSKILTPALFTIVQSRKQPGA

SEQ ID NO: 1019659 - protein, 72 aa, Homo sapiens
TCEANIRSWPSRTGRMLKPGSPAGLKNLTGRSLAPRSSSKLAGPRFFTFGAPFRVFRFSCSPYNNLSASKVL

SEQ ID NO: 1019660 - protein, 252 aa, Homo sapiens
MTAPVPAPRILLPLLLLLLLTPPPGARGEVCMASRGLSLFPESCPDFCCGTCDDQYCCSDVLKKSCGARKGVLCLGQVPASVEPVEQLGSAHEVRPGYNDPMSGFGATLASWPDIYVLTVVTIIICSPAPVLPLQDVPRPRPVVTTTNPHCGACPLSSASKCCARNLDQIPGYQHHALSRECRTDATNEEPTNLTRQARATGYTKPVEEERRNPAAALNPLCPEGQRDHGFSAQEEGHRKGATRRGTGTRGG

SEQ ID NO: 1019661 - protein, 198 aa, Homo sapiens
MWPARGAASRRSCLVSSAWTSELPVSREGAWNQGTLEPCNVTTSLGVALEGTGPGVRGGMSRFVTWRSGAQHRAGQVQRMPQPGARESRNDCGASTLAASLDGATSPVFSAAVPGRFAGTELTCKLSPFPGGPQEGFLDSRDFAATAPYGLCSLELVCLRGSPCVSPRPCSSRLPGASNSVLGALLTEEAPPLWMTWY

SEQ ID NO: 1019662 - protein, 316 aa, Homo sapiens
  misc_feature (85)..(85): Xaa can be any naturally occurring amino acid
  misc_feature (88)..(88): Xaa can be any naturally occurring amino acid
LPPPTPPPPPHTPHPPTTPHSPPPSPHPPPLLLPPPHPSLPPPPPPPPGPPPTHPPTTTPPHPTPPPPPHPQNNYRVYVYSRSRXVLXWSQGYSAVPSSPGMACSHPGTPRFQKRCSNGTDEHRSELNLRRLFDANKDRFNHFILTLNTNHVAYPVCDYSNEPGARTDVDAGMLVEYLCLDPGRGGRPVKRMFHGETINYTEGRSLCLHCVLLREPGLNTPILVRLCNGLLIAHECQQGFWTMMNVFLAHAVSRSGDLEVGTQCKTITDVINIGIGGSDLGPLMVTEALKPYSSGGPRVWYVSNIDGTHIAKTLAS

SEQ ID NO: 1019663 - protein, 326 aa, Homo sapiens
  misc_feature (85)..(85): Xaa can be any naturally occurring amino acid
  misc_feature (88)..(88): Xaa can be any naturally occurring amino acid
  misc_feature (181)..(182): Xaa can be any naturally occurring amino acid
  misc_feature (200)..(200): Xaa can be any naturally occurring amino acid
LPPPTPPPPPHTPHPPTTPHSPPPSPHPPPLLLPPPHPSLPPPPPPPPGPPPTHPPTTTPPHPTPPPPPHPQNNYRVYVYSRSRXVLXWSQGYSAVPSSPGMACSHPGTPRFQKRCSNGTDEHRSELNLRRLFDANKDRFNHFILTLNTNHVAYPVCDYSNEPVLTVSDCGLAVIAGCDLXXKSSGDCSDVPALWSGLFXCVDEMKSTYTRCVSDACAALCALREPGLNTPNPVYHCAMDVDAYECQQGFWTMMNVFLAHAVSRSGDLEVGTQCKTITDVINIGIGGSDLGPLMVTEALKPYSSGGPRVWYVSNIDGTHIAKTLAS

SEQ ID NO: 1019664 - protein, 98 aa, Homo sapiens
ALRSVNDRTDPCKVNNTAKRRYDHVIGFKTFTKEIGGRCAGLKRKTRRTWRHLSACDHVLIEALGIPPEPKPGDGQTFFSEIGLDQPPFAAVDILGFG

SEQ ID NO: 1019665 - protein, 33 aa, Homo sapiens
MIITIFHAISVVPIATVYDDGPGTHEKAGYFGL

SEQ ID NO: 1019666 - protein, 398 aa, Homo sapiens
  misc_feature (14)..(14): Xaa can be any naturally occurring amino acid
KLPLLSAAFFGREXCRFAASPKGGVVREQSAINTAPPSAHNAASPGGARGHRVPLTEACKDSRIGGMMKTLLLFVGLLLTWESGQVLGDQTVSDNELQEMSNQGSKYVNKEIQNAVNGVKQIKTLIEKTNEERKTLLSNLEEAKKKKEDALICRPGISVVQKLYRAPRSVLMKTMMALWEECKPCLKQTCMKFYARVCRSGSGLVGRQLEEFLNQSSPFYFWMNGDRIDSLLENDRQQTHMLDVMQDHFSRASSIIDELFQDRFFTREPQDTYHYLPFSLPHREASLLLFAVPHRPQAVNALLLRSEPPEASTAMFQPFLEMIPEAPAGHALHFQLPGLSRAAEILEKGRYPTGFGEIANSRAASDKARCSPGFSGVSPPPVRGADPGWGRIGARGPL

SEQ ID NO: 1019667 - protein, 75 aa, Homo sapiens
  misc_feature (15)..(15): Xaa can be any naturally occurring amino acid
GPGVRPSHCAGPVPXPNTASGTELLSDPRLVKFVPATTENRNENVTSQALRALCPRPQPGGRPCPASSTEREDGR

SEQ ID NO: 1019668 - protein, 130 aa, Homo sapiens
SSILKAVLSPLPTHWEPPHPRPSPAPPLSPPLPAPTQVLPHPAPIHVLLRPDVGPALAPGPRPRLTQAPPPLRPAPARAAGGPGAKAPEPAAAVGTMWFFARDPVRDFPFELIPEPPEGGLPGPWALHRG

SEQ ID NO: 1019669 - protein, 113 aa, Homo sapiens
MGISRVHGPGGLLQHRVHTQPQKDRLLHQPLSPYTLWKQTVFYMEDYLTVKTGEEIFGTIGMRPNAKNNRDLDFTIDLDFKGQLCELSCSSDIQDELRPGFPALDEIQGLECI

SEQ ID NO: 1019670 - protein, 212 aa, Homo sapiens
SGASEIRGRGTGGAALRPVRGDSAVRLQQKGNRVSPAPPGALRAGLGSRTGGDGTDEPAPCRNARQVPRYGGVTPAELPQVRPGAGTRRDRRSPRTPLDWAWRWRWRWRCALALVLSDSRVLWRSGRGSHLFSHKDILPGNIALVSRTPDDVFGLGEPSPDPIMKKVYSTAINLGLTEGSAMWLAWAPWHIKLCNHADDSNNWRVPIHCPLI

SEQ ID NO: 1019671 - protein, 170 aa, Homo sapiens
  misc_feature (116)..(116): Xaa can be any naturally occurring amino acid
  misc_feature (118)..(121): Xaa can be any naturally occurring amino acid
  misc_feature (124)..(124): Xaa can be any naturally occurring amino acid
  misc_feature (128)..(128): Xaa can be any naturally occurring amino acid
  misc_feature (138)..(138): Xaa can be any naturally occurring amino acid
  misc_feature (147)..(147): Xaa can be any naturally occurring amino acid
  misc_feature (151)..(152): Xaa can be any naturally occurring amino acid
  misc_feature (155)..(156): Xaa can be any naturally occurring amino acid
  misc_feature (158)..(158): Xaa can be any naturally occurring amino acid
  misc_feature (166)..(166): Xaa can be any naturally occurring amino acid
SGASEIRGRGTGGAALRPVRGDSAVRLQQKGNRVSPAPPGALRAGLGSRTGGDGTDEPAPCRNARQVPRYGDVTPAETAPGPAGSRDKTGPPEPPDSFGLGLALALALALALALGXAXXXXRLXALLXHDYQKYRVEXISMKRIRNXNTAXXEYXXGXASKDKVKXEQNS

SEQ ID NO: 1019672 - protein, 113 aa, Homo sapiens
VGLPKKPLFDWGKLNSPSYGSWVLVEILRDFGGTLSIKDLSQMPGITQNDIISPLQSLKMVKYWKGQHVICVTPKLVEEPLKSAQYKKPPITVDSVCLKWAPPKPKQVKFSKK

SEQ ID NO: 1019673 - protein, 154 aa, Homo sapiens
MRFRTAVTLALFGALIGGAPGAVAAPTASATTTTTYVDCSAPTPGRGTETSPLNSLTQLKSAFGPGRKVLLRRGSTCVGTVVINASGRAGADTLLGAYGVGKTPVIDAKASAHNPRSAIEVDNKSHFVIQDLTVRNGYFNDISVEAQCLLGSSE

SEQ ID NO: 1019674 - protein, 287 aa, Homo sapiens
  misc_feature (251)..(251): Xaa can be any naturally occurring amino acid
  misc_feature (261)..(261): Xaa can be any naturally occurring amino acid
MAVTITLKTLQQQTFKIRMEPDETVKVLKEKIEAEKGRDAFPVAGQKLIYAGKILSDDVPIRDYRIDEKNFVVVMVTKTKAGQGTSAPPEASPTAAPESSTSFPPAHSSGMSHPPTASREDKSPSEESSPTRRPQESVSGSVPSSGSSGREEDAASTLVTGSEYETMLNRRSMSMGYERERVVAALRASYNNPHRAEEYLLTGIPGSPEPEHGSVQESQVSEQPATEAAGENPWSSCGTSPVPEHAAGDSXNLRCCRPAPXLGQETLSFTAISGTGESSDVTSPGSW

SEQ ID NO: 1019675 - protein, 522 aa, Homo sapiens
  misc_feature (168)..(168): Xaa can be any naturally occurring amino acid
  misc_feature (205)..(205): Xaa can be any naturally occurring amino acid
EKSKLLEKFSLVQKEYEGYEVESSLKDASFEKEATEAQSLEATCEKLNRSNSELEDEILCLEKELKEEKSKHSEQDELMADISKRIQSLEDESKSLKSQVAEAKMTFKIFQMNEERLKIAIKDALNENSQLQESQKQLLQEAEVWKEQVSELNKQKVTFEDSKVHAEXVLNDKESHIKTLTERLLKMKEWAAMLGEDITDDDNLXIEMNSESENGAYLDNPPKGALKKLIHAAKLNASLKTLEGERNQIYIQLSEVDKTKEELTEHIKNLQTQQASLQSENTHFENENQKLQQKLKVMTELYQENEMKLHRKLTVEENYRLEKEEKLSKVDEKISHATEELETYRKRAKDLEEELERTIHSYQGQIISHEKKAHDNWLAARNAERNLNDLRKENAHNRQKLTETELKFELLEKRSLCTRCSKYSIWQESIPIWSLTIGLASSEQSFLSPQLVGVPPNSHLAAGRGKVRGPGPWLRFQKGIAVKYDHGPCGSCQTTKCLPEWLPPREVCGGHILGQEKFVQVY

SEQ ID NO: 1019676 - protein, 174 aa, Homo sapiens
MWLTAGGVGGPDAGPAMLYGLVGDGKLAQVVADHFGLDLHLVEGLAVVNAHHVLPTISGWMTHCSRRCAFFTISGFLQWAAPPSVALRQALQRGSVRASAEGPGFSRRRVARMCLQCASACLVGLCPAAVVSRLHAAVGDTCEKAPFFIRLYFCHCAPLHSSLGHRVRLCLQKK

SEQ ID NO: 1019677 - protein, 187 aa, Homo sapiens
WESCAPLLAEPLFERDEAGGVGGPDAGPAMLYGLVGDGKLAQVVADHFGLDLHLVEGLAVVKPTMCCPPSRVRMTHCSRRCAFFTISGFLQWAAPPSVALRQALQRGSVRASAEGPGFSRRRVARMCLQCASACLVGLCPAAVVSRLHAAVGDTCEKAPFFIRLYFCHCAPLHSSLGHRVRLCLQKK

SEQ ID NO: 1019678 - protein, 105 aa, Homo sapiens
MPEIVGYLFVGLFGFRLPDQETSTSVSGSDFNWRTVNRKSVSQGAHLKGGKLRKPWFETQEALTIESSFLNTQDEIYSLEKTQPQGHRLEILSSYRLAAKIKIFY

SEQ ID NO: 1019679 - protein, 736 aa, Homo sapiens
EAWRRLERFDIKLLSEFSSCLADQHLYFSPLMGKIADIVHRNLETTQDLSSLSVLMVNISSLISRHFQQQLVNKTELLFDTIDSSEVNVAKSIAKFLRNVRYRYQPLLERCNNVFLSNVDHLDLDSISKILSVYKFLQFNSFEFIIMAKKKLTEMIPLCNHPASFVKLFVALGPIAGPEEKKQLKSTMLLMSEDLTGEQALAVLGAMGDMESRNSCLIKRVTSVLHKHLDGYKPLELLKITQELTFLHFQRKEFFAKLRELLLSYLKNSFIPTEVSVLVRAISLLPSPHLDEVGISRIEAVLPQCDLNNLSSFATSVLRWIQHDHVYLDNMTAKQLKLLQKLDHYGRQRLQHSNSLDLLRKELKSLKGNTFPESLLEEMIATLQHFMDDINYINVGEIASFISSTDYLSTLLLDRIASVAVQQIEKIHPFTIPAIIRPFSVLNYDPPQRDEFLGTCVQHLNSYLGILDPFILVFLGFSLATLEYFPEDLLKAIFNIKFLARLDSQLEILSPSRSARVQFHLMELNRSVCLECPEFQIPWFHDRFCQQYNKGIGGMDGTQQQIFKMLAEVLGGINCVKASVLTPYYHKVDFECILDKRKKPLPYGSHNIALGQLPEMPWESNIEIVGSRLPPGAERIALEFLDSKAMPWESNIEIVGSRLPPGAERIALEFLDSKALCRNIPHMKGKSAMKKRHLEILGYRVIQISQFEWNSMALSTKDARMDYLRECIFGEVKSCL

SEQ ID NO: 1019680 - protein, 595 aa, Homo sapiens
EAWRRLERFDIKLLSEFSSCLADQHLYFSPLMGKIADIVHRNLETTQDLSSLSVLMVNISSLISRHFQQQLVNKTELLFDTIDSSEVNVAKSIAKFLRNVRYRYQPLLERCNNVFLSNVDHLDLDSISKILSVYKFLQFNSFEFIIMAKKKLTEMIPLCNHPASFVKLFVALGPIAGPEEKKQLKSTMLLMSEDLTGEQALAVLGAMGDMESRNSCLIKRVTSVLHKHLDGYKPLELLKITQELTFLHFQRKEFFAKLRELLLSYLKNSFIPTEVSVLVRAISLLPSPHLDEVGISRIEAVLPQCDLNNLSSFATSVLRWIQHDHVYLDNMTAKQLKLLQKLDHYGRQRLQHSNSLDLLRKELKSLKGNTFPESLLEEMIATLQHFMDDINYINVGEIASFISSTDYLSTLLLDRIASVAVQQIEKIHPFTIPAIIRPFSVLNYDPPQRDEFLGTCVQHLNSYLGILDPFILVFLGFSLATLEYFPEDLLKAIFNIKFLARLDSQLEILSPSRSARVQFHLMELNRSVCLECPEFQIPWFHDRFCQQYNKGIGGMDGTQQQIFKMLAEVLGGINCVKASVLTPYYHKVDFEMYLG

SEQ ID NO: 1019681 - protein, 76 aa, Homo sapiens
SGAVLQQLEGRGGGAGCPVLAMKPQQAPVSGKVFIQRDYSSGTLLPVPEPEFPAELENRIDMARSLNETVRTLNNL

SEQ ID NO: 1019682 - protein, 164 aa, Homo sapiens
  misc_feature (18)..(18): Xaa can be any naturally occurring amino acid
  misc_feature (30)..(30): Xaa can be any naturally occurring amino acid
  misc_feature (37)..(37): Xaa can be any naturally occurring amino acid
  misc_feature (40)..(40): Xaa can be any naturally occurring amino acid
  misc_feature (46)..(46): Xaa can be any naturally occurring amino acid
  misc_feature (52)..(55): Xaa can be any naturally occurring amino acid
  misc_feature (57)..(57): Xaa can be any naturally occurring amino acid
  misc_feature (61)..(61): Xaa can be any naturally occurring amino acid
  misc_feature (66)..(66): Xaa can be any naturally occurring amino acid
  misc_feature (72)..(72): Xaa can be any naturally occurring amino acid
  misc_feature (120)..(120): Xaa can be any naturally occurring amino acid
  misc_feature (126)..(126): Xaa can be any naturally occurring amino acid
  misc_feature (131)..(131): Xaa can be any naturally occurring amino acid
  misc_feature (140)..(140): Xaa can be any naturally occurring amino acid
  misc_feature (146)..(146): Xaa can be any naturally occurring amino acid
MKPQQAPVSGKVFIQRAXRRGPTAEPLPAXVPWRRGXPPXWLRPAXLARPPXXXXPXISDXAAPIXGNDTLXRLLWIVSPNSTLFTSSLAHSILRRFCRPITLTIPRSLHRSHAHPGLLXPAPLAXGLADXCPSTFCRPXPSTVSXSHAAFPATHIPAGIFLSN

SEQ ID NO: 1019683 - protein, 104 aa, Homo sapiens
MYETALWGSDLGRTTASPCLPPSPRAGSNAGARKRTWEGSGPYFPRGSRTRSPRVVRRKPKGRTQRSRRAQTLPRGPRGVPPARDSGAPGARKPHERRQRGPAL

SEQ ID NO: 1019684 - protein, 145 aa, Homo sapiens
EVLRGGYSEYDMITGHRFIDIWQAIKPQRIGRQEWPEVPMDEDFKLGTLKRLGLPHSTQADVGEAWQAMLVRVRDWHDLDSRFNTEMEKLIDFVTRDHFHELDNGGDGMSIDVDTVSDLIRDVSARVIDPRFRTLHDHQIHQKKP

SEQ ID NO: 1019685 - protein, 233 aa, Homo sapiens
MFAWYRCRCSQQRREKKFFLLEPQMKVAALRAGAQQGLSRASAELWTPDSEPTPRAAGTGVQTLTTWSPGAAVPPTLVSICRRPIASLQGREDTGEPALSADLGWRGLGLSSHPEGTDTGLLGRLGLCVTHSWVRADPSPPPPRSSKLCFLSFQNGTTSPPQHPTYQTHAPPSALIKPTDPAFIAASLAGPAPGVGSALSTPRAPRPSEGALPEPQTHSSSGLLGGLGTYLSL

SEQ ID NO: 1019686 - protein, 73 aa, Homo sapiens
KSPKPHLDLDSIIAEVKAQYEEIAQRSRAEAESWYQTKYEELQVTAGRHWDELRNTQQEIAFEIKPCLIQEAD

SEQ ID NO: 1019687 - protein, 102 aa, Homo sapiens
PSCSHPQSGHGAPQELQSHLFHRLPARAFLFMMSPFFEAWTHPFLSLGPAPSPLGPLWPGEKEFPWVFPVPRLPGWFSPPFPGRLPWPGGKCLFVCNPLPFF

SEQ ID NO: 1019688 - protein, 242 aa, Homo sapiens
CCCRQAPGAEAAPVRPPPEPPPALDVASASSAQLFRLRHLQLGLELRPEARELAGCLVLELCALRPAPRALVLERTRLCACTQPPSVAPPPRDENALAPYALLPHPGPGPSADRHPSQHRTIQPNGALEYRRQTDLDLYRLRAYTSGLGKRGIRPGITVLTTGITARYNRHKNMGTQQALAMSGGDAEGHHMIHQRVQLHDRTGDKEHAFWESHERAPPHGHKYLGGRSIGEERQGKSIRNR

SEQ ID NO: 1019689 - protein, 281 aa, Homo sapiens
MCLTGSHCHAKVDGTQLRGLTRCTRSHYHWIGDGTLVRLRYQHGGPGHGLLSILSAFALHASIWSLARSTSRGTTDGAQQLVGCRNYLSSRVSSAIGGEVPQRYVWRFCIGLHSAPRFLVAFAYWNQYLSCTSPCSCYRPLCRLKIRTQMSWRTVALLVLTYVSSSEDFLWVPGMHGRTCGNVFPAGDGPVPSHILDLPTSWCGHSAVDVAPESSFPFQPIRLTDHQENAFMVFIASSLGHMLLSCILWRLTKKHTVSQEVRSIPSGGSKADQKRIRTSVL

SEQ ID NO: 1019690 - protein, 284 aa, Homo sapiens
  misc_feature (209)..(210): Xaa can be any naturally occurring amino acid
  misc_feature (214)..(214): Xaa can be any naturally occurring amino acid
  misc_feature (217)..(218): Xaa can be any naturally occurring amino acid
  misc_feature (220)..(220): Xaa can be any naturally occurring amino acid
  misc_feature (222)..(222): Xaa can be any naturally occurring amino acid
  misc_feature (257)..(257): Xaa can be any naturally occurring amino acid
  misc_feature (261)..(261): Xaa can be any naturally occurring amino acid
  misc_feature (263)..(263): Xaa can be any naturally occurring amino acid
MCLTGSHCHAKVDGTQLRGLTRCTRSHYHWIGDGTLVRLRYQHGGPGHGLLSILSAFALHASIWSLARSTSRGTTDGAQQLVGCRNYLSSRVSSAIGGEVPQRYVWRFCIGLHSAPRFLVAFAYWNQYLSCTSPCSCYRPLCRLKIRTQMSWRTVALLVLTYVSSSEDFTIKKMLCMVFIASSLGHMLLSCILWRLTKKHTVSQEDRKXXSWKXRLXXIXFXSFFSALAVYFRHNMYCEAGVYTIFAILEYTVVLTXMAFXMXAWWDFGNKELLITSQPEEKRF

SEQ ID NO: 1019691 - protein, 120 aa, Homo sapiens
LHRGPCALRALGRQFPLRCVCCSASVWGGRSQRLLSLAPGGLWPSAWVSLGLLESGDVQGAPVEHPLCWEEQVPRACGSAGLTSQTGGLQDLTKPLGPGLMADEVLECRSVPQVPRTKPV

SEQ ID NO: 1019692 - protein, 217 aa, Homo sapiens
  misc_feature (133)..(133): Xaa can be any naturally occurring amino acid
  misc_feature (135)..(135): Xaa can be any naturally occurring amino acid
RADAASARACWARAAAVLRSLHGVPDEEVSVAAAAAANCATCCSLSPAALKRACCREPEMPAYPCDRCLMAFHLSLGLGSELLTAIGLGSETQANSTTDALNVLLIIVDDPAPSMACMGISWGGPPDRTNLHXTXFFFKMPLGSKQCAPRAAFLSSLAGDLCTNRLYEFKLYLKVQLGNFFNIPQDFQGEWAMGPMSGGKKLSTWGYLLNNTDEFSG

SEQ ID NO: 1019693 - protein, 87 aa, Homo sapiens
GSREPDPHLSSKQAQKGVLHRGLGRREVLLVLPGDRSAATPTVSWDSPDLLFNQRGAERHALVAALKAKRCTQPRVELVSGTAMTVA

SEQ ID NO: 1019694 - protein, 75 aa, Homo sapiens
TLLRIPGRFEARITGLTVLLPHSSAITIKSDTQQHEVLLGTSPFMSEADPPPEPLQTPQPHIPTLIRSPLLQARC

SEQ ID NO: 1019695 - protein, 297 aa, Homo sapiens
  misc_feature (185)..(185): Xaa can be any naturally occurring amino acid
  misc_feature (187)..(187): Xaa can be any naturally occurring amino acid
  misc_feature (213)..(213): Xaa can be any naturally occurring amino acid
  misc_feature (215)..(215): Xaa can be any naturally occurring amino acid
  misc_feature (221)..(221): Xaa can be any naturally occurring amino acid
  misc_feature (223)..(223): Xaa can be any naturally occurring amino acid
  misc_feature (234)..(234): Xaa can be any naturally occurring amino acid
  misc_feature (244)..(244): Xaa can be any naturally occurring amino acid
  misc_feature (250)..(250): Xaa can be any naturally occurring amino acid
  misc_feature (295)..(295): Xaa can be any naturally occurring amino acid
MAAAAAGLGGGGAGPGPEAGDFLARYRLVSNKLKKRFLRKPNVAEAGEQFGQLGRELRAQECLPYAAWCQLAVARCQQALFHGPGEALALTEAARLFLRQERDAAQRLVCPAAYGEPLQAAASALGAAVRLHLELGQPAAAAALCLELAAALRDLGQPAAAAGHFQRAAQAAQLAPQLRALAPRXRXLGEGRLLAKLLGAELHRAPWAVFTAXAXAWARGXRXATPVQVTAARXRPPGPQARAXGQRRPXPAALLPPNSGSAAPSPAALGAFSDVLVRCKVSRVLLLLLLKQPAXKA

SEQ ID NO: 1019696 - protein, 267 aa, Homo sapiens
MRTVEVVFRAISQAVLPTHPIVHNPYPRLSLVATNTTLYTAIDLKDAFFTISYTLIPKTYLLSPGLTLTPSSHNKSPRPVFTFLGFRDSPHFFGQALARNLTSLNLSPSHLQYVDDLLLCSPSLKDSQTHTATALLNFLAIKGYRVSPSKAQLSISMMTYLGIQLSPGAQAMTPARAALIENLPPPSSKSEILSFPGLAGFFRIWISNFALLAHPLYEVAKGPPNEPLNPSHNILPSFHKLQTALVTASAPSLPDISQPFTLYTAES

SEQ ID NO: 1019697 - protein, 158 aa, Homo sapiens
  misc_feature (106)..(106): Xaa can be any naturally occurring amino acid
  misc_feature (110)..(110): Xaa can be any naturally occurring amino acid
  misc_feature (127)..(127): Xaa can be any naturally occurring amino acid
  misc_feature (130)..(130): Xaa can be any naturally occurring amino acid
  misc_feature (133)..(133): Xaa can be any naturally occurring amino acid
  misc_feature (138)..(138): Xaa can be any naturally occurring amino acid
  misc_feature (143)..(143): Xaa can be any naturally occurring amino acid
  misc_feature (149)..(149): Xaa can be any naturally occurring amino acid
MGMGVPEGSGHLGLAVLEKPQQAIVNPHTGWTAQLAKERINGRTRPITIKDDKVATFNRCIAERGLRLFHHEYMDKLDAWRIRRHGLEIQADLRELDWKTTHRMSXPPPXLEGRQTVSQWPQTLSGXSAXEEXDDSQXRQKLXDLEPAXNAVNRVRHA

SEQ ID NO: 1019698 - protein, 368 aa, Homo sapiens
RLYGWSMGCERGGFRCPAKPFWRLPPSAPWAPWAPLAQYQLTWHVTSEPDAHGWLAGGTPCWLPIWCSSSASTWHATHMMDPFRKRLLVPQAQLPCLPSAGGGFKTARERKMADKVLPQRIRELVPESQAYMDLLAFERKLDQTIARKRMEIQEAIKKPLTQKRKLRIYISNTFRPSKAEGDSAGTAGTPGGTPAGDKVASWELRVEGKRVWMILANMKRKFSSFFKDDLGLVEHGAKGAVRGLTITLAGDGSRMPIQPSETDGFQGNNAVEILKGQDATFVLMLEHQAPQYKLDPRLARLLGVHTQTRAAIMQEPVALHKHKQLEDGHKREDINWKRYFRQIFSVADLRFSENLMKLAGLFTFKTLG

SEQ ID NO: 1019699 - protein, 458 aa, Homo sapiens
RLYGWSMGCERGGFRCPAKPFWRLPPSAPWAPWAPLAQYQLTWHVTSEPDAHGWLAGGTPCWLPIWCSSSASTWHATHMMDPFRKRLLVPQAQLPCLPSAGGGFKTARERKMADKVLPQRIRELVPESQAYMDLLAFERKLDQTIARKRMEIQEAIKKPLTQKRKLRIYISNTFRPSKAEGDSAGTAGTPGGTPAGDKVASWELRVEGKRVWMILANMKRKFSSFFKDDLGLVEHGAKGAVRGLTITLAGDGSRMPIQPSETDGFQGNNAVEILKGQDATFVLMLEHQAPQYKLDPRLARLLGVHTQTRAAIMQEPVALHKHKQLEDGHKREDINWKRYFRQIFSVADLRFSENLMKLAGLLQHPDPIGHQTMSFSVDPKRPEEDSCDDIDVEVGRTIEGPKGANFLGSYTNQAGDCLLECQDPMRPIESINQVKTQRRFKVSFRPNPRIPSRNGPVP

SEQ ID NO: 1019700 - protein, 153 aa, Homo sapiens
  misc_feature (10)..(10): Xaa can be any naturally occurring amino acid
  misc_feature (106)..(106): Xaa can be any naturally occurring amino acid
  misc_feature (118)..(118): Xaa can be any naturally occurring amino acid
  misc_feature (124)..(124): Xaa can be any naturally occurring amino acid
MGPGLPEWDXSSDQGDGLDTSVASPSSGGEDEDLDQERRRNKKREIFPKVATNIMRAWLFQHLSHPYPSEEQKKTVAQDTGLTILQVNNWFINARRRIVQPMIDQXNRTGQGATFIPXGQPIGXYTETQPHVAFRPPGSVGMSLNLEGEWHYL

SEQ ID NO: 1019701 - protein, 136 aa, Homo sapiens
VFLHQGPPRPGGGSPRSVDPVDGRLVQHSFQALVLKEQGRQFYNVAPDPVPQGLKGLKEGALKSPVSQKRRLCFPCAQIPQTHLVERTRLRCFEAQGMCAPHGCDLGHRPQSARSLKGVIGPGEHTARLAATSGRL

SEQ ID NO: 1019702 - protein, 59 aa, Homo sapiens
  misc_feature (35)..(35): Xaa can be any naturally occurring amino acid
DSRRISIRLAGNLCTLTILTSLSAEIEESNLTKMXMLDKRILCSPPLSGPPIEGYRSSN

SEQ ID NO: 1019703 - protein, 102 aa, Homo sapiens
AGEAPACQAAEGAGRAEPGVGARARMEALPVSPLRAAGRQDPATSRIPRAATRSRHAGGDGAAVAGCGHWQTGWPAEGEHRCFTSSPGGCGRHRLVLFPLVH

SEQ ID NO: 1019704 - protein, 102 aa, Homo sapiens; identical to SEQ ID NO: 1019703

SEQ ID NO: 1019705 - protein, 123 aa, Homo sapiens
  misc_feature (6)..(6): Xaa can be any naturally occurring amino acid
ENNEEXLPKSAYCSCEKVVKARIFHPQKESTDPDGDGLLKPYSANLTYSIRERRICVDEGGIWPYTSLGKRNRVLSASSHSLLLDNSYHDNLCFQGAENRRKLAYMRTDWPEEQQLLVANGVT

SEQ ID NO: 1019706 - protein, 210 aa, Homo sapiens
  misc_feature (45)..(45): Xaa can be any naturally occurring amino acid
  misc_feature (55)..(55): Xaa can be any naturally occurring amino acid
  misc_feature (70)..(70): Xaa can be any naturally occurring amino acid
  misc_feature (82)..(82): Xaa can be any naturally occurring amino acid
  misc_feature (87)..(87): Xaa can be any naturally occurring amino acid
  misc_feature (93)..(93): Xaa can be any naturally occurring amino acid
  misc_feature (98)..(98): Xaa can be any naturally occurring amino acid
  misc_feature (100)..(100): Xaa can be any naturally occurring amino acid
  misc_feature (112)..(112): Xaa can be any naturally occurring amino acid
  misc_feature (147)..(147): Xaa can be any naturally occurring amino acid
  misc_feature (153)..(153): Xaa can be any naturally occurring amino acid
  misc_feature (155)..(155): Xaa can be any naturally occurring amino acid
  misc_feature (160)..(160): Xaa can be any naturally occurring amino acid
  misc_feature (172)..(173): Xaa can be any naturally occurring amino acid
  misc_feature (179)..(180): Xaa can be any naturally occurring amino acid
  misc_feature (182)..(182): Xaa can be any naturally occurring amino acid
SGIPGIVRPLFCPAFNNLTNALSRVTLESDLLPSIFCFLVSDSCXFGMAMTGWSXLVTGAGGFLGQRLIXLLVPGAGARPAXRVLAXAFGPPXPTAFXPXPPPPPLPVLAGXLLAAPFLPRPCPDRLGPPHPPPVSFLSSVSLPPPXSCLSLXPXTPLLXPACLPARVPVFXXPPVASXXPXPPPPRPSSRLALPPRLWPPPGPLPPHTA

SEQ ID NO: 1019707 - protein, 225 aa, Homo sapiens
  misc_feature (45)..(45): Xaa can be any naturally occurring amino acid
  misc_feature (55)..(55): Xaa can be any naturally occurring amino acid
  misc_feature (70)..(70): Xaa can be any naturally occurring amino acid
  misc_feature (84)..(84): Xaa can be any naturally occurring amino acid
  misc_feature (88)..(89): Xaa can be any naturally occurring amino acid
  misc_feature (100)..(100): Xaa can be any naturally occurring amino acid
  misc_feature (104)..(104): Xaa can be any naturally occurring amino acid
  misc_feature (113)..(113): Xaa can be any naturally occurring amino acid
  misc_feature (118)..(118): Xaa can be any naturally occurring amino acid
  misc_feature (122)..(122): Xaa can be any naturally occurring amino acid
  misc_feature (132)..(132): Xaa can be any naturally occurring amino acid
  misc_feature (156)..(156): Xaa can be any naturally occurring amino acid
  misc_feature (161)..(161): Xaa can be any naturally occurring amino acid
  misc_feature (163)..(163): Xaa can be any naturally occurring amino acid
  misc_feature (171)..(171): Xaa can be any naturally occurring amino acid
  misc_feature (173)..(173): Xaa can be any naturally occurring amino acid
  misc_feature (179)..(179): Xaa can be any naturally occurring amino acid
  misc_feature (181)..(181): Xaa can be any naturally occurring amino acid
  misc_feature (183)..(184): Xaa can be any naturally occurring amino acid
  misc_feature (188)..(188): Xaa can be any naturally occurring amino acid
  misc_feature (191)..(191): Xaa can be any naturally occurring amino acid
  misc_feature (196)..(196): Xaa can be any naturally occurring amino acid
  misc_feature (202)..(202): Xaa can be any naturally occurring amino acid
  misc_feature (204)..(204): Xaa can be any naturally occurring amino acid
SGIPGIVRPLFCPAFNNLTNALSRVTLESDLLPSIFCFLVSDSCXFGMAMTGWSXLVTGAGGFLGQRLIXLLVKEKELKEIRVXDKAXXPELREEFSKLXNKTXLTVLEGDIXDEPFXKRAXQDVSVIIHTXSFIDVFGVTHRESIMNVNVKGTPXPLEAXVXASVPVFIXTXSIEVAXPXSXXEIIXNGXEEEPXENTWPXPXPHSKKLAEKAVLAANGWNLKN

SEQ ID NO: 1019708 - protein, 218 aa, Homo sapiens
LKGYSASVSVPSLLGPRRSSCTTCLRRGPIPLHPREAGPGLLAEDIRPNEHCPLYEMLSDKGPGKPSTEEFQAKWKPFQEFSRLWPGLLIRKSPESTKVSLKEPVETQSSCPPTTRSCGGERGSWLAFHPSCVSLLVHLSSLSRECLHLLPRPPLSHFFLVWLGVFRLPVLSRVCGAPAMRLFVTHSHHKGLYIPRSPELFRPASYLSVHILRNKPVT

SEQ ID NO: 1019709 - protein, 237 aa, Homo sapiens
  misc_feature (96)..(96): Xaa can be any naturally occurring amino acid
  misc_feature (112)..(114): Xaa can be any naturally occurring amino acid
  misc_feature (117)..(118): Xaa can be any naturally occurring amino acid
  misc_feature (125)..(125): Xaa can be any naturally occurring amino acid
  misc_feature (127)..(128): Xaa can be any naturally occurring amino acid
  misc_feature (131)..(131): Xaa can be any naturally occurring amino acid
  misc_feature (134)..(134): Xaa can be any naturally occurring amino acid
  misc_feature (152)..(153): Xaa can be any naturally occurring amino acid
  misc_feature (156)..(156): Xaa can be any naturally occurring amino acid
  misc_feature (163)..(163): Xaa can be any naturally occurring amino acid
  misc_feature (165)..(165): Xaa can be any naturally occurring amino acid
  misc_feature (177)..(178): Xaa can be any naturally occurring amino acid
  misc_feature (180)..(180): Xaa can be any naturally occurring amino acid
  misc_feature (184)..(184): Xaa can be any naturally occurring amino acid
  misc_feature (200)..(200): Xaa can be any naturally occurring amino acid
MSQLSALSGVTWRYLPPDCERCEVLVACAPSLPGVPSPSGSLVSPGLVCWLCCILSARPRGEGAARASESGAMEPRELGKVGLEGPGGRPLPPEDXRAGLGRGGAARAEAPXXXYVXXEGFAGPXSXXALXRPXPGGGGEERTLPFGVRCIXXELXSVRWVDXGXGDPRVERCEGAXXFXHHLXRFEEALLRLGVWIGRXLELQGGTLDGLILPRSSLTKKGLKREGIWHAFCHFCF

SEQ ID NO: 1019710 - protein, 74 aa, Homo sapiens
FEMESCSVTQAGMQWHDPVSLQPPSPGLKQFSRLGLPSSWDYRCPPPHPANFCIFSRDGASPRWPGWPRTPDLR

SEQ ID NO: 1019711 - protein, 128 aa, Homo sapiens
VRASRTMWIPRGCRLKSTLVQTSKLQPLNPNQTTKPPPPKQTTKNHQNACRRCCRYLRCLRHGPDRRLCLSHQRHQRHPHRCSHHRPYQRCQLPVPEHPPRCRCCCRPRCQPLSNFNFFLFETFLSLP

SEQ ID NO: 1019712 - protein, 113 aa, Homo sapiens
MPLFPRRGHVGRTSWAGSGSASQERDPKLGDLEILSGLWGPCLSSPPEIDDSLSSHTEVSPDLTSSRLTGVAGALGEWEAAQGQLFHENRETGELWGGGGGAENWKERRPAKV

SEQ ID NO: 1019713 - protein, 113 aa, Homo sapiens; identical to SEQ ID NO: 1019712

SEQ ID NO: 1019714 - protein, 107 aa, Homo sapiens
HLLAAHPPVFRSSPPASGGNSQMYQRSVCSTTGTPGLLYVQQRELAVTSPKDGSVSILGSDNATTCHIGVLLHTGYGATCLTHCDGTDTKAGVPLIMNSIKSFSDCA

SEQ ID NO: 1019715 - protein, 151 aa, Homo sapiens
MKSLGVLSPVKNSAVSLDILNLYMVNQISCKKKIPETVRKPTHVNMNRDIKMPLRKHNLELTMSPHCVPSKLCLDDTETNVNCQRLSSKEDLGPVQSQGMDSYSMLHPQFSKIENCSFTPSSFSVELPSNRHISKLNFTSGISTYSSGTCI

SEQ ID NO: 1019716 - protein, 151 aa, Homo sapiens; identical to SEQ ID NO: 1019715

SEQ ID NO: 1019717 - protein, 68 aa, Homo sapiens
AERLLGGWASGGGPEGAYSGPDVVRRPWGILLKLRFGAELRCLSSRHRDLSVKRFGKMNWVGGSRSRF

SEQ ID NO: 1019718 - protein, 218 aa, Homo sapiens
TEPGPQAAPCQLSSSHSRSNRLLSPMARRHASSARPQTIPGLHAGGTAAPAPDGRQPTRNRSIPELCGTRFRLGRHVPHQSNSTSHSSATHIASIQPWKRCCCGLKADTHDEIQLGHIHNVTEISEAPIRERSQVLLDTLIHPDSNLQMTARNGLLITEVLKIAGIARDDVISLLHSETFMNHFLDTAEATIKTIDYWKIGTPGEPVELEMRPAVALN

SEQ ID NO: 1019719 - protein, 262 aa, Homo sapiens
  misc_feature (2)..(2): Xaa can be any naturally occurring amino acid
IXTVCHRQTVRTDQRQCSEHRHGTFLLGLQDTTAQLIALDGFKQGLEVAFTKTIIALAMNELEEYGAHQGFRENLQPETAVATFRCAIEQNATVLQFCSRLTVRRQAAFQHLVIGLWRRSHKAHAHGFELVPGGNQIVSQEGHVLDAFTIELHQELFDLARTLGGFLIQRNADLAIGGGHGFGRQASVFALDVEVANLTEIEQVLIELGPVGHATAVHVVGQVIDLFQACAHGMTIHAVQVNEVNVVDGVAVDAPANLVVVG

SEQ ID NO: 1019720 - protein, 68 aa, Homo sapiens
VRTKLNEMCKITAQTLCWVPGDAEPSAGTLRPHVEACKDCVLDKDLLRHPCCSSQRLKDGCGTCGRLG

SEQ ID NO: 1019721 - protein, 102 aa, Homo sapiens
VRTKLNEMCKITAQTLCWVPGDAEPSAGTLRPHVEACKDCVLDKDLLRHPCCSSQRLKDGCGTCGRLGWVTSPRMPSLTTQRSSPGTPSLSCCNPFLAILFA

SEQ ID NO: 1019722 - protein, 287 aa, Homo sapiens
MVALENPECGPEAAVGTPGGRRLLPLPSCLPALASFPRCKRLSASRRKQHFINQAVRNSEPRCPKANGAEEPPAPVRTTQYLLTLLEKDGGLPGLEDGDLAPPVIIQGIFVRGLHTNATYVEVWNDFMNRILGEDAVMQGYFADSGGMQEHGVNGSGRKGPGRGEDRRKKDPAYTPRECFQRINRRLHKPVLKRIRIPMETLETWEERLLRFFSVFPQACVHQSTVYDNSFERLLLHAVCQYMDLISASADLEGKRPDEGHVIGTWISCPRGCSCPPTGASTADCGP

SEQ ID NO: 1019723 - protein, 171 aa, Homo sapiens
LRREVHSRGEMLMPVHFLLLLLLLLGGPRTGLPHKFYKAKPIFSCLNTALSEAEKGQWEDASLLSKRSFHYLRSRDASSGEEEEGKEKKTFPISGARGGAGGTRYRYVSQAQPRGKPRQDTAKSPHRTKFTLSLDVPTNIMNLLFNIAKAKNLRAQAAANAHLMAQIGRKK

SEQ ID NO: 1019724 - protein, 358 aa, Homo sapiens
GGSGRFCAGSRRLLLLLLFLGPWPAVDAIGGKYIGVEKNQPIAVSRNASPGEEFPHGEVEPAVGEMAQRSASLPPVRLAELHADLKIQERDELAWKKLKLDGLDEDGEKEARLIRDLNVILAKYGLDGKKDARAGDPAISLSGTQEDGLDDPRLEKLWHNGEDLWENSPRARTGQALAGEFLHHKEKVHEYNVLLETLSRTEEIHENVLSPSDLSDIKGTRTCTAGTRKLKEKLRSIHPGPGPACAGSGTRATALTLSSEEPQADVTCGTLDATPATHRTKSWHRSREGSSKALRRPRFDDSPSTTRQQLQNCAPSKLAGRHSTCADGQPCEPASRESPLSGGADPGAGYTVRSICGL

SEQ ID NO: 1019725 - protein, 153 aa, Homo sapiens
  misc_feature (19)..(19): Xaa can be any naturally occurring amino acid
QTHTDTCAPSHTLFSFYNXGVRRPLTAAAGSLKSDTRSRGSVAPASSDPQGLSTPRAPCLRGRSPVAKAFPPGPILRPAGGPPAGPPLRAVFRAGSAALSCARTCADACFHPGVCRHLVPGSSGAFSEAAECQALHTTPSPEPESFTSVENSN

SEQ ID NO: 1019726 - protein, 124 aa, Homo sapiens
  misc_feature (70)..(70): Xaa can be any naturally occurring amino acid
PYPPLNIPVGRGIVKGIPFFSPIILLRESVNCNKGITVPRQNEDFLGPARVTNAKRIYWRTVLSGGSLYXNIPGGALPKGSKDTFPVFLEFAEEQLRAAHVFICFPKNREEKARLAPTPQLFGL

SEQ ID NO: 1019727 - protein, 30 aa, Homo sapiens
MDTRGRLPGESCARSLRSIPSPRDPVDRPA

SEQ ID NO: 1019728 - protein, 318 aa, Homo sapiens
  misc_feature (285)..(285): Xaa can be any naturally occurring amino acid
  misc_feature (291)..(291): Xaa can be any naturally occurring amino acid
  misc_feature (294)..(294): Xaa can be any naturally occurring amino acid
SGGCWTRLECSGAISAHCSLRLQGSGDSSASASRVGDSGMDIMPQAFLLGSIHEPAGALMEPQPCPGSLAESFLEEELRLNCLEAWKAKAWPGFPEALVGHSFYNLPVGGYACGEPTLDNIAVISHTCQGPKEVLFLGMNPGPFGMAQTGVPFGEVSMVRDWFGHLLGAVADPSPKSILNDQCWDLELPTVRSELVPNSGAFFRNLCGQPEVFFPSLFCPQSIALCFSLAPSGRKLTPAELPAKQREQLLGSVMPALCRQVQLLGVRLVGGKWGDWQSSGHDGLXQVLCQXSRXKGSCIPLPVTQQANKGWEAVARKD

SEQ ID NO: 1019729 - protein, 62 aa, Homo sapiens
MVWPATIASSGCWRYSSMAAGNKFRARPRRMGLVGGISFLLMSMASWEADRAESMMRFLSSP

SEQ ID NO: 1019730 - protein, 78 aa, Homo sapiens
GLCRSLSDTFGSTSLILSFAGGRNQARAATMFRNQYDNDVTVWSPQGRIHQIEYAMEAVKQGSATVGLKSKTHAVWLH

SEQ ID NO: 1019731 - protein, 78 aa, Homo sapiens; identical to SEQ ID NO: 1019730

SEQ ID NO: 1019732 - protein, 318 aa, Homo sapiens
  misc_feature (40)..(40): Xaa can be any naturally occurring amino acid
  misc_feature (230)..(230): Xaa can be any naturally occurring amino acid
  misc_feature (289)..(289): Xaa can be any naturally occurring amino acid
  misc_feature (294)..(294): Xaa can be any naturally occurring amino acid
TRGPHSSVSLQLSVRPQPHSPAVPRLAGGSDLQVDKRCEXAKSCSSPRAWGSGGSTSMSTPRFRKLLRLDSATWGQFRTRSERSTGQSSANVLTPSLPTRRQRVRARWWSAGQFRANSGTAASPTLAWTARERLRRPAPRLCARDTMASSLSWRQVVRASSSRARAAISEARAARPVHPVTVRERYVLQGFGSPRPKPQAPGDSVARSGPTPQSAAADSAPPPAPGPRLXAIVVTWRQFQLLQHLGISQQLGQFGPRELRTHLRGIEATQPGQVKLHQRPEGPANALQXEQLAXGTRFRTCGSRHVFPGQVQDLKAPG

SEQ ID NO: 1019733 - protein, 259 aa, Homo sapiens
INQSDLRFQRKVFAFFFKSSLYDLSNLELLSRRTSYQERASDSQNYKCHKILTVPLVLYTSLSQPHAQEGPDHYGCSMLTLLRSRSRSSRMAFMVALVRFSSSSLLHSMAVRLSFSSLSPASSFSHRDLSSARLGYRSRPSTPSISSTVLIARSQCSLAVVSCSMCLSTSATERLQLLFFLPQTTFSSPVSTLCSSEFRSLQLSMSAVTMVDWFSGIETEVWSWSMLRESSLTSCWLWLSSDRSSEYSSSSLMVVPCRR

SEQ ID NO: 1019734 - protein, 241 aa, Homo sapiens
INQSDLRFQRKVFAFFFKSSLYDLSNLELLSRRTSYQERASDSQNYKCHKILTVPLVLYTSLSQPHAQEGPDHYGCSMLTLLRSRSRSSRMAFMVALVRFSSSSLLHSMAVRLSFSSLSPASSFSHRDLSSARLGYRSRPSTPSISSTVLIARSQCSLAVVSCSMCLSTSATERLQLLFFLPQTTFSSPVSTLCSSAGIETEVWSWSMLRESSLTSCWLWLSSDRSSEYSSSSLMVVPCRR

SEQ ID NO: 1019735 - protein, 96 aa, Homo sapiens
AINAIVRSRVGVAGKHPEFSLVFLMAGVTGNDSLHQSAHSMRKQNVVPTVLALGSDVDMEVLTTFSLGDRAAVFQEKDYDSLAQPGFFDRFIRWIC

SEQ ID NO: 1019736 - protein, 167 aa, Homo sapiens
  misc_feature (116)..(116): Xaa can be any naturally occurring amino acid
  misc_feature (121)..(121): Xaa can be any naturally occurring amino acid
  misc_feature (125)..(125): Xaa can be any naturally occurring amino acid
  misc_feature (133)..(133): Xaa can be any naturally occurring amino acid
  misc_feature (142)..(143): Xaa can be any naturally occurring amino acid
  misc_feature (161)..(162): Xaa can be any naturally occurring amino acid
PILQRRARRRRFPEATRSWSSGDRSWRPGAPAGLAEAREVAGRNGRTARAPCVPRTSGPVHAPDGCGLQHLGPGWGGGVQGAGGAADAPGRRLRPRCGAGTALASPEQARGILLCXCCDFXFKNXFPCFVALXFIRFIARDXXFAIHFLFLLSWPLLASLXXAFLPF

SEQ ID NO: 1019737 - protein, 278 aa, Homo sapiens
PILQRRARRRRFPEATRSWSSGDRSWRPGAPAGLAEAREVAGRNGRTARAPCVPRTSGPVHAPDGCGLQHLGPGWGGGVQGAGGAADAPGRRLRPRCGAGTALASPEQARGQQGRRRDARRKYLPVRCPTSSGYARMCPSAIISYLLHALAAPLTASSIHTMIQTALLDAFDGHRVIALFNPRNPGYEGHAGTLLDGPLIHHCACMDQPWPLLYPGATLFFQISMSFGCWPVTWLAASKVRVSPEGSESSQDDRTCPGNPVLRIYYTSRPALATLWLR

SEQ ID NO: 1019738 - protein, 142 aa, Homo sapiens
PILQRRARRRRFPEATRSWSSGDRSWRPGAPAGLAEAREVAGRNGRTARAPCVPRTSGPVHAPDGCGLQHLGPGWGGGVQGAGGAADAPGRRLRPRCGAGTALASPEQARGQQGRRRDARRKYLPVRCPTSSAMLEHCLTDP

SEQ ID NO: 1019739 - protein, 160 aa, Homo sapiens
  misc_feature (16)..(16): Xaa can be any naturally occurring amino acid
PGSNQKNHPLRVGGGXLCWGQKFCTRNTRIIDVVYNASNTEVVGTKPLVKNCLVFIDSPRYRQWYESHYALPLARKKGAKLTLEEEEFLTKNRFKKIQKKYDERKKNAKISSFLEDQFHQAKFFACIASRPGQCARPKGYVLEGKELEFYFRKTKAPKGK

SEQ ID NO: 1019740 - protein, 102 aa, Homo sapiens
MRLPLVRFKVGKLIPEEKTMIDDNPRAKKIQKKYDERKKNAKISSFLEDQFHQAKFFACIASRPGQCARPKGYVLEGKELEFYFRKTKAPKGKYNPCLVFPQ

SEQ ID NO: 1019741 - protein, 86 aa, Homo sapiens
DEESLECLCRLLTTIGKDLDFEKAKPRMDQYFNQMEKIIKEKKTSSRIRFMLQTCWIREGAMWVPRRGDQGPKTSDQIHKEAGSSR

SEQ ID NO: 1019742 - protein, 179 aa, Homo sapiens
MASHRLLLLCLAGLVFVSEAGPTGTSESKCPLMVKVLDAVRGTILATHVGPCMCPERLAGWTPGSHLPLGITSESGELHGLTTDEEYGERIYKVEIDTKSYWKALAIFRFHEHAEVVFTVNDSGPRRYNHLRSLLSPLLLIPPRLCVTNPTGMRDFSLPVDLKDEGLGFHVTKKYSHFY

SEQ ID NO: 1019743 - protein, 185 aa, Homo sapiens
MASHRLLLLCLAGLVFVSEAGPTGTSESKCPLMVKVLDAVRGTILATHVGPCMCPERLAGWTPGGAHFGSWGKTQLEVWESLALGLHKLGREEHLVRTGHYSQRLGNKNTQNSLPGKRPLWAFFPISHGRNGEGWVISQGQTTPGAPAATTICQPAEPPTPIPPRLCVTNPTGMRDFSLPVDLKD

SEQ ID NO: 1019744 - protein, 160 aa, Homo sapiens
MASRGRCLFGEVVHDWRPCRSPRWPRQPRELPRGHRRWHGCGHGLLGLLPQDLELMAPPPLGPGQEGPCPCPHYRPGLRGWRNPSPLPRATGPWVPALPPRFGSSRGPHCGDKKGMEWGKRRSRRPSSFCCPGVGASPLWRAGGRRWKPQGLAFLKLVLF

SEQ ID NO: 1019745 - protein, 176 aa, Homo sapiens
TCALWDIKTGQQTVGFDENSGDVMSLSLAPDGRTFVSGACDASFKLWDVRDSMCQQTFIGHESDINAVAFFPKGYAFTTGSDDATCRLFDLRADQELLMYSHDNIICGITSVAFSRSGRLLLAGYDDFNCNIWDAIKGDRAGVLAGHDNRVSCLGVTDDGMAVATGSWDSFLKIWN

SEQ ID NO: 1019746 - protein, 176 aa, Homo sapiens; identical to SEQ ID NO: 1019745

SEQ ID NO: 1019747 - protein, 176 aa, Homo sapiens; identical to SEQ ID NO: 1019745

SEQ ID NO: 1019748 - protein, 110 aa, Homo sapiens
MFPFSMEYDQRHHWCLFAFVALFYLINRMLFWEVDNRRDVRLFHQLGWKRKHIIGWFRQEMAVLLLLSASISLPGAWALQKWGRFGADFYLWFLIVLLAAAFILLISFRS

SEQ ID NO: 1019749 - protein, 84 aa, Homo sapiens
WFRRFLVRGGAFVPDWLRGKAEVNQETIQRLLEENDQLIRCIVEYQNKGRGNECVQFQEVVHRNLIYLDTIADASPTSTGKAME

SEQ ID NO: 1019750 - protein, 84 aa, Homo sapiens; identical to SEQ ID NO: 1019749

SEQ ID NO: 1019751 - protein, 121 aa, Homo sapiens
CVFQLRLKIREVPRRSCSHQSHGAACEAEAPPTGPPPNWHHCCPCPYSQPHVTLGQKQWWGSQGSVKSLSQLQDKFEHLKMIQQEEIRKLEEEKKQLEGEIIDFYKMKAASEALQTQLRTA

SEQ ID NO: 1019752 - protein, 180 aa, Homo sapiens
  misc_feature (1)..(1): Xaa can be any naturally occurring amino acid
  misc_feature (47)..(47): Xaa can be any naturally occurring amino acid
  misc_feature (50)..(50): Xaa can be any naturally occurring amino acid
  misc_feature (53)..(53): Xaa can be any naturally occurring amino acid
  misc_feature (58)..(58): Xaa can be any naturally occurring amino acid
  misc_feature (62)..(63): Xaa can be any naturally occurring amino acid
  misc_feature (74)..(74): Xaa can be any naturally occurring amino acid
  misc_feature (81)..(81): Xaa can be any naturally occurring amino acid
  misc_feature (87)..(87): Xaa can be any naturally occurring amino acid
  misc_feature (89)..(89): Xaa can be any naturally occurring amino acid
  misc_feature (92)..(92): Xaa can be any naturally occurring amino acid
  misc_feature (94)..(95): Xaa can be any naturally occurring amino acid
  misc_feature (100)..(101): Xaa can be any naturally occurring amino acid
  misc_feature (103)..(103): Xaa can be any naturally occurring amino acid
  misc_feature (115)..(115): Xaa can be any naturally occurring amino acid
  misc_feature (119)..(120): Xaa can be any naturally occurring amino acid
  misc_feature (124)..(125): Xaa can be any naturally occurring amino acid
XSFSISVTHSVNKNSYIGKIHSKKTWQITLSACQLALPSLLFPPPPXPFXPPXLPFPXALIXXHPDSRSTSLSXHPPLFSXAPPRHXPXPPXPXXHAPSXXRXTPAHPPLLPSPXPDSXXHLRXXPPLWKSQLRLQGPQYLALFQGMTEQDLFIPFGKIVIAALLLNLTFYKKDQEAAKC

SEQ ID NO: 1019753 - protein, 146 aa, Homo sapiens
DADDLLHVRQVLVLVVSLAVNRALRGPKPESPGHYCGGWRSPLNLGPALTGAAAERPLHPTIATQATLRNSKDAEKQDKERGPHPEGPAALYAGYSPPVSSEALKGHLGTLTCPPPPKCAGLRPLGREPGYVTREGGSGHGLAGQM

SEQ ID NO: 1019754 - protein, 49 aa, Homo sapiens
GQQEDDVTGRCVTVHGQLCLAGKAWAHDLRLRAEDVLHVIDELLRYTSA

SEQ ID NO: 1019755 - protein, 141 aa, Homo sapiens
  misc_feature (136)..(136): Xaa can be any naturally occurring amino acid
  misc_feature (139)..(139): Xaa can be any naturally occurring amino acid
AEGDRTMAARQRQCRGAAQLVGAGGGGLTALGRFTCPVCYRGVREAGTGALRTRLVLCMPAGMSEAEEACLWGCVAVALDTVGDPRPVEARRGQDRKRHKKTSLAMACRYRTFFPDPRIRFPPLANIVSKKPEFNXQWXGC

SEQ ID NO: 1019756 - protein, 210 aa, Homo sapiens
AEGDRTMAARQRQCRGAAQLVGAGGGGLTALGRFTCPVCYRGVREAGTGALRTRLVLCMPAGMSEAEEACLWGCVAVALDTVGDPRPVEARRGQDRKRHKKTSLAMACRYRTFFPDPRIRFPPLANIVSKKPRITIMRMGGQASIEEMAVLVSSQRKVVTGPVYTFALVLTVLRRSCGSGRSCWNHCNIDSIVTAYQILGVWSEYDASNA

SEQ ID NO: 1019757 - protein, 225 aa, Homo sapiens
ARGELPPIKEGCITEQVREFYGLESKKGKKGQHVGCCGSRTDLSADTVELIERMDRLAENQATASMSIVALPSNFQESNSSDRYRKYCSSDEDSNTCIHGSANASTNVRTNATTTASINFSTSATTTESTNFSTSATTTASINFSTNATTTASINVRTSATTTKSINSSTNATTTESTNSNTNATTTERPTPALMLLPLKVPTPTLVLLPPKVPTPTLVLLPPKV

SEQ ID NO: 1019758 - protein, 283 aa, Homo sapiens
  misc_feature (95)..(96): Xaa can be any naturally occurring amino acid
  misc_feature (261)..(261): Xaa can be any naturally occurring amino acid
  misc_feature (281)..(281): Xaa can be any naturally occurring amino acid
MELLSSLALPGFSLPDPWAGGTEAEQPQQPPKESSSWWVEPLTAEGRASLRCPAASRPTARMLTLDANPLKTLWNHSLQPYPFLEILNLHSCHLXXIIRSTFQEKGHLLTLVLGDNCLSENYEETAAALHALPGLSEAATCHGNALTEDMAALMLQNLSSLRSVSLAGNTILRLDDSVFEGLERLRELDLQRNYIFEIEGGAFDGLAELRHLNLAFNNLPCIVDFGLTRLRVLNVSYNVLEWFLATGGEAAFELETLDLSXNSCCSSRCCPVQQVADLLLXDK

SEQ ID NO: 1019759 - protein, 203 aa, Homo sapiens
HTFWALLASPKMEHKEVVLLLLLFLKSGQGEPLDDYVNTQGPSLFSVTREVMLVGSEAENECACKDVNEDKMNSPARGDSMYHSQEEQHMCDNGLKTGSPPIIIEDEQMQFYFELVNVSFRVHRLVNWKMNYRGDECPESEIEVGITMIKNGVSTFVAPKTLESDVFPFIFGFIYGKGSLWALEGIVSRTPLGLQKPILFKGP

SEQ ID NO: 1019760 - protein, 86 aa, Homo sapiens
HTFWALLASPKMEHKEVVLLLLLFLKSGQGEPLDDYVNTQGPSLFSVIQRIACLRVLRVHASRQDIVASDTYVQGRLIDIPALRRG

SEQ ID NO: 1019761 - protein, 102 aa, Homo sapiens
SGSRRRSHRAGRPPGGSYHCLCQRLNLQYSWLPSDTLGGVALAQELACLVTYRQEERLESEPPALALQLAALAGCDMSLVLASCGMLLKPLSTAANLRGNRL

SEQ ID NO: 1019762 - protein, 73 aa, Homo sapiens
SNRARYRYVLDRELVALFWVPVVVHHQMLIRIIPVPILMVKIVISAEHNAITILTKQNSLSPLWRRRSLCAFV

SEQ ID NO: 1019763 - protein, 103 aa, Homo sapiens
MWVETPGPLQGTLQSCFQAGTPAERSQSQRVAGLLALIFPLLGGSRGDLAPLLCPPDFPSKGFRRLLPFPNLSLCRISAKSQSHFQAKVLGHKDNKDIQFMKK

SEQ ID NO: 1019764 - protein, 116 aa, Homo sapiens
  misc_feature (9)..(10): Xaa can be any naturally occurring amino acid
  misc_feature (14)..(14): Xaa can be any naturally occurring amino acid
  misc_feature (28)..(28): Xaa can be any naturally occurring amino acid
  misc_feature (32)..(32): Xaa can be any naturally occurring amino acid
  misc_feature (37)..(37): Xaa can be any naturally occurring amino acid
  misc_feature (42)..(42): Xaa can be any naturally occurring amino acid
  misc_feature (44)..(47): Xaa can be any naturally occurring amino acid
  misc_feature (52)..(56): Xaa can be any naturally occurring amino acid
  misc_feature (58)..(60): Xaa can be any naturally occurring amino acid
  misc_feature (62)..(62): Xaa can be any naturally occurring amino acid
  misc_feature (73)..(73): Xaa can be any naturally occurring amino acid
  misc_feature (90)..(90): Xaa can be any naturally occurring amino acid
  misc_feature (105)..(105): Xaa can be any naturally occurring amino acid
  misc_feature (109)..(109): Xaa can be any naturally occurring amino acid
  misc_feature (112)..(112): Xaa can be any naturally occurring amino acid
MTSPHLLGXXAGAXCHGQPPLSPCTGGXAAPXPTASXGGQVXPXXXXPPPPXXXXXRXXXGXHPLPQGPPHVXARLVVNGPGWEQPLAHXPPTLLTMQFEFQATXAPAXGPXLPQP

SEQ ID NO: 1019765 - protein, 116 aa, Homo sapiens; identical to SEQ ID NO: 1019764
  misc_feature (9)..(10): Xaa can be any naturally occurring amino acid
  misc_feature (14)..(14): Xaa can be any naturally occurring amino acid
  misc_feature (28)..(28): Xaa can be any naturally occurring amino acid
  misc_feature (32)..(32): Xaa can be any naturally occurring amino acid
  misc_feature (37)..(37): Xaa can be any naturally occurring amino acid
  misc_feature (42)..(42): Xaa can be any naturally occurring amino acid
  misc_feature (44)..(47): Xaa can be any naturally occurring amino acid
  misc_feature (52)..(56): Xaa can be any naturally occurring amino acid
  misc_feature (58)..(60): Xaa can be any naturally occurring amino acid
  misc_feature (62)..(62): Xaa can be any naturally occurring amino acid
  misc_feature (73)..(73): Xaa can be any naturally occurring amino acid
  misc_feature (90)..(90): Xaa can be any naturally occurring amino acid
  misc_feature (105)..(105): Xaa can be any naturally occurring amino acid
  misc_feature (109)..(109): Xaa can be any naturally occurring amino acid
  misc_feature (112)..(112): Xaa can be any naturally occurring amino acid

SEQ ID NO: 1019766 - protein, 87 aa, Homo sapiens
ELAHRPPSSGCTMHVNGKVALVTGAAQGIGRAFAEALLLKGAKGALVDWNLEAGGQWKAALDEQGEPQKTLFIQCDVADQQQLRDHF

SEQ ID NO: 1019767 - protein, 87 aa, Homo sapiens; identical to SEQ ID NO: 1019766

SEQ ID NO: 1019768 - protein, 363 aa, Homo sapiens
MAGPGPTFPLHRLVWANRHRELEAALHSHQHDIEQEDPRGRTPLELAVSLGNLESVRVLLRHNANVGKENRQGWAVLQEAVSTGDPEMVQLVLQYRDYQRATQRLAGIPELLNKLRQAPDFYVEMKWEFTSWVPLVSKMCPSDVYRVWKRGESLRVDTSLLGFEHMTWQRGRRSFIFKGQEAGGPGDWKVDHDRQVGCMLETLGAHSCKEPETLLAAMRASGGACGSRSLSYRLHHLETRNVAFERNKCGIWSWRSERMATVNPLTGQVDHGPTWTRFTPHPRTLGIRNSARQEKTTAEKHPPVPARQTDSQHGTESRAQQTKTPQHSRQQRKEVPYTQQHEAAKPTHAPQPEDRHHEHHGAR

SEQ ID NO: 1019769 - protein, 269 aa, Homo sapiens
MAASQAVEEMRSRVVLGEFGVRNVHTTDFPGNYSGYDDAWDQDRFEKNFRVDVVHMDENSLEFDMCVDWDAAIANAFRRILLAEVPTMAVEKVLVYNNTSIVQDEILAHRLGLIPIHADPRLFEYRNQGDEEGTEIDTLQFRSPESDASQEATNAAKDSSDPKELYVKPTIVYTRQYDMDPHWGTRLSLFPEGHISRHRCMHEYPRSLSAAGQEIELLIAVCQGHWKDHCKFHPVPQAVTGSCRIHPVYPVKGTQLRVGRSSTRGFQGR

SEQ ID NO: 1019770 - protein, 250 aa, Homo sapiens
MAASQAVEEMRSRVVLGEFGVRNVHTTDFPGNYSGYDDAWDQDRFEKNFRVDVVHMDVRRILLAEVPTMAVEKVLVYNNTSIVQDEILAHRLGLIPIHADPRLFEYRNQGDEEGTEIDTLQFRSPESDASQEATNAAKDSSDPKELYVKPTIVYTRQYDMDPHWGTRLSLFPEGHISRHRCMHEYPRSLSAAGQEIELLIAVCQGHWKDHCKFHPVPQAVTGSCRIHPVYPVKGTQLRVGRSSTRGFQGR

SEQ ID NO: 1019771 - protein, 226 aa, Homo sapiens
MALRGRAELVCLSGPHPVPDPPGAPDGLPDHDFCVSCPPVMEQPRGWWFSEQEADVFSALEEPAVCRGLEESLGMVAQALNRLGPFDGLLGFSQGAALAALVCALGQAGDPRFPLPRFILLVSGFCPRGIGFKESILQRPLSLPSLHVFGDTDKVIPSQESVQLASQFPGAITLTHSGGHFIPAAAPQRWTSLQSERSRNVSAPTSSSSRGSLRHPCPPRTLHSLL

SEQ ID NO: 1019772 - protein, 236 aa, Homo sapiens
MLERRETHGLRSETLTKVCDLMCAGGVRAVPLRPWLARTAAAGTRRWRRWLLDALPGPQGPCPPVMEQPRGWWFSEQEADVFSALEEPAVCRGLEESLGMVAQALNRLGPFDGLLGFSQGAALAALVCALGQAGDPRFPLPRFILLVSGFCPRGIGFKESILQRPLSLPSLHVFGDTDKVIPSQESVQLASQFPGAITLTHSGGHFIPAAAPQRGGYSGFGQFAVRSPECFGLIRS

SEQ ID NO: 1019773 - protein, 189 aa, Homo sapiens
MALRGRAELVCLSGPHPVPDPPGAPDGLPDHDFCVSCPPVMEQPRGWWFSEQEADVFSALEEPAVCRGLEESLGMVAQALNRLGPFDGLLGFSQGAALAALVCALGQAGDPRFPLPRFILLVSGFCPRGIGFKESILQRPLSLPSLHVFGDTDKVIPSQESVQLASQFPGAITLTHSGGHFIPAAAPQR

SEQ ID NO: 1019774 - protein, 211 aa, Homo sapiens
  misc_feature (196)..(199): Xaa can be any naturally occurring amino acid
MALRGRAELVCLSGPHPVPDPPGAPDGLPDHDFCVSCPPVMEQPRGWWFSEQEADVFSALEEPAVCRGLEESLGMVAQALNRLGPFDGLLGFSQGAALAALVCALGQAGDPRFPLPRFILLVSGFCPRGIGFKESILQRPLSLPSLHVFGDTDKVIPSQESVQLASQFPGAITLTHSGGHFIPAAAPQRQKGGGPXXXXPPSKSFLDQFAE

SEQ ID NO: 1019775 - protein, 105 aa, Homo sapiens
MSIPLLHTRTSHCCSMSSQQRKQPCIPPLKFKQRQVKQPCQPPPKEPCIPKTKEPCHPSVPEPCHPEVPEPCQPKVPEPCHPKVPEPCPSIVTPAPAEQQPKQSH

SEQ ID NO: 1019776 - protein, 185 aa, Homo sapiens
  misc_feature (175)..(175): Xaa can be any naturally occurring amino acid
MEADEVGGGCCLFTSGPRKADGASKGLQGLKKAAESHFLPPLAPVSLAVQPLPPGSPPGRGPPRVRTGLACCGPVWLTGPCSSVQQLIHSRGTSFHPGPALGAESHPPSSFPCQLHRVWVGGSLTPRSGTGPGSGEDGQGPFSRRWGVKRARSGVGELAQHHPCGPHCSSNCIIXKVIGLATWFH

SEQ ID NO: 1019777 - protein, 39 aa, Homo sapiens
  misc_feature (38)..(38): Xaa can be any naturally occurring amino acid
SRTPEAVGLKKRDKKNKTKKLKQQQQQHLPQQQQLQLXS

SEQ ID NO: 1019778 - protein, 242 aa, Homo sapiens
GPRRLSESSEEVAAAGRWLLHLPNAKTAQMRSPRIAQKIKGPPRSRVRRIAAGTKPEKRRSASSGSSSTRSRSSSNFQLSAPAPALAQAVAPALPQHSSLLRKAPAPPAAPALDSSSWLSKSFSGADTTTGGAPAPNPNHLKSRMTKRSRKQGVRPILPKPTKVHMGDSPWNVTRITSWRYFPPYGENLKLIDMAVERMHPQSVKEYGYVEFEDPDERREGLKHMDGGQIDWAGDQCDACGP

SEQ ID NO: 1019779 - protein, 69 aa, Homo sapiens
IAIRVASPKLVMEEAPESYKNVTDVVNTCHDAGISKKAIKLSPIAVIKGETLGQQGCLTPPTLFEVEVD

SEQ ID NO: 1019780 - protein, 311 aa, Homo sapiens
  misc_feature (133)..(136): Xaa can be any naturally occurring amino acid
  misc_feature (143)..(143): Xaa can be any naturally occurring amino acid
  misc_feature (145)..(145): Xaa can be any naturally occurring amino acid
  misc_feature (148)..(149): Xaa can be any naturally occurring amino acid
  misc_feature (155)..(156): Xaa can be any naturally occurring amino acid
  misc_feature (164)..(164): Xaa can be any naturally occurring amino acid
  misc_feature (166)..(166): Xaa can be any naturally occurring amino acid
  misc_feature (169)..(170): Xaa can be any naturally occurring amino acid
  misc_feature (174)..(174): Xaa can be any naturally occurring amino acid
  misc_feature (190)..(191): Xaa can be any naturally occurring amino acid
  misc_feature (209)..(209): Xaa can be any naturally occurring amino acid
  misc_feature (214)..(214): Xaa can be any naturally occurring amino acid
  misc_feature (221)..(221): Xaa can be any naturally occurring amino acid
  misc_feature (308)..(308): Xaa can be any naturally occurring amino acid
PRPAGGCSGPGRRVCGPGAEAATRDAVRTLLCLRSAGPAMAVPPPRLPLISVSVSAPAFYAPLKKFGPVVAPKPKVNPFRPGDSEPPPAPGAQRAQMGRVGEIPPPPPEDFPLPPPPLAGDGDDAEGALGGAXXXXPPPIEEXFXPAXXEEEIFXXPPPPPESXVXALXXHIAXTTAQGEGEQFDLEIDXXFSLLDDMTKNDPFKARVXSGYVXPPVATPXSSKFSTKPAAGGTALLSPWKSPSSSQPLPQVPAPAQSQTQFHVQPQPQPKPQVQLHVQSQTQPVSLANTQPRGPPAIISGSSPKFSXVTP

SEQ ID NO: 1019781 - protein, 222 aa, Homo sapiens
KQNGLARKLPRGGGVAEASPEATERVRKMPKGSSGEEEEDIIARLREEGIQKRDDTGMAEESSRTFKMGPRPRSTTGTLHSDDGGHRAGLTSRARGKLHEMLIDLARSVNACRVWETIVCTMRERGDCPDSSVTSKSVWSCTRLVVKSLRKIAVGKDPLEGQRTCCRCCTDAVNTSSLGHARPGRPAAEAPEPIIYPHGDAEGGEPWHRTHQDPWAIDRRRR

SEQ ID NO: 1019782 - protein, 280 aa, Homo sapiens
  misc_feature (135)..(135): Xaa can be any naturally occurring amino acid
  misc_feature (280)..(280): Xaa can be any naturally occurring amino acid
LSLAGRTPRPRAPPPGSAAATRASLPCGTPSEPGGTLLFFWGRLLFACLFLSGDFCSFPISVFGAHGNPPSSVCRPFFLFWFTFFEILRQGFFYFLPRPLTVLELLGALCRLFNVYRSGLPAAPPPRLAAHCARXGAPRLASRAVRGPALCRGLQLEQGARARGSPRSRRKGLLDPDSFLRRADFVFDHSLSAGLRPRAFGAGDGEKTEAVFQLYFLWLGCVVLWAQGTAGQPQPPPPKPPRPQPPPQQVRSATAGSEGGFLTAEYREEGAAVAAASAAX

SEQ ID NO: 1019783 - protein, 240 aa, Homo sapiens
  misc_feature (5)..(5): Xaa can be any naturally occurring amino acid
  misc_feature (48)..(48): Xaa can be any naturally occurring amino acid
  misc_feature (79)..(79): Xaa can be any naturally occurring amino acid
  misc_feature (85)..(85): Xaa can be any naturally occurring amino acid
  misc_feature (92)..(92): Xaa can be any naturally occurring amino acid
  misc_feature (95)..(95): Xaa can be any naturally occurring amino acid
  misc_feature (98)..(99): Xaa can be any naturally occurring amino acid
  misc_feature (104)..(105): Xaa can be any naturally occurring amino acid
  misc_feature (133)..(133): Xaa can be any naturally occurring amino acid
  misc_feature (145)..(145): Xaa can be any naturally occurring amino acid
  misc_feature (155)..(155): Xaa can be any naturally occurring amino acid
  misc_feature (165)..(165): Xaa can be any naturally occurring amino acid
  misc_feature (167)..(167): Xaa can be any naturally occurring amino acid
  misc_feature (203)..(203): Xaa can be any naturally occurring amino acid
EFPDXPDSLDFFKEKLGKPGHNAAACFVQGLPGLSPELASPAQGLLAXSPELVSPAQGPLGLSPELASPVQGPLGSALXWPHLVXHPGISCXALXPAXXPAWAXXSLGTSVLRPTSLSKTPSRGLCRTASLSXVPIAGFSHQSSXNSYFTIKLKXSSSPQLGAAXGXCLVLGNQGQEAVADINLGDSAPSPEGPAGDRPGPWXYSPGGPVLTSYMTPDLQKKDFAGGDGMTQDTIEIERC

SEQ ID NO: 1019784 - protein, 333 aa, Homo sapiens
  misc_feature (3)..(3): Xaa can be any naturally occurring amino acid
  misc_feature (34)..(34): Xaa can be any naturally occurring amino acid
  misc_feature (54)..(54): Xaa can be any naturally occurring amino acid
  misc_feature (63)..(63): Xaa can be any naturally occurring amino acid
  misc_feature (165)..(165): Xaa can be any naturally occurring amino acid
ITXFLANNREKRASPWTEVKHEDTNWLLHPVEGXANREILGIIVSYKVKVKLLXSRGGDVAVXLPFTLMHPKPKENPRIGKFQENETPVDTNLIELDTNDDDIVFEDFARQRLKGMKDDKEEEEDEYRLSTAQQQIDGPALPPHGSGSTLVHSDAYSVFFLFWFXFPFVFQFLPGGPVGFQITVTEASGSQDLALTCTTRIHGPTAHLGSIPISAISISPPFHACLPEKSDQGLWTLELDLRWRMQTGEDCGECRDTGVVGMTGLDGVGMRAQDTREDVHGPRWLTKFWQLKDDRVEGHHPFWLGGAELWTDSQCLFEVLTHQRPSAFTLIPT

SEQ ID NO: 1019785 - protein, 76 aa, Homo sapiens
SAIMAGGIPGQSYSRVHITIRVYDLEVESGHPDGAAVIKGSLVQQIKVLRDLSSDRSNPGRFYLLKIPPCPKGQEN

SEQ ID NO: 1019786 - protein, 195 aa, Homo sapiens
MPGHELLVRTCSRIKPWIYPFVRIVDAYSARNNKVSRFPGVALELVGPVATLSLAQGIMDALPIYRELSYYLVVIYNARARVLNRLDSHHLGQGPHCAHTVQLERGRRGNRGQDSNFHIPTALVETSHGLETVGHSRGSIPLRFQGSSSTFLTVRPIDANHCVRRNGGSHCSYTKLCGDAQIFPHSDSLVSPYDD

SEQ ID NO: 1019787 - protein, 143 aa, Homo sapiens
  misc_feature (124)..(124): Xaa can be any naturally occurring amino acid
HLPYTDHCPSFRRLDLKNLARWGRYRQREVRALSIHTQLYLGEQGRLEARRRQATGEDGSAAREGPEDGGTESRRQHFRAGSSSGGRRRGGCTGGGNGASNRAEGTPNGSAMLEWKHLQVQDHXHRSSCSSTKAKPWRTHGTA

SEQ ID NO: 1019788 - protein, 265 aa, Homo sapiens
  misc_feature (13)..(13): Xaa can be any naturally occurring amino acid
  misc_feature (22)..(22): Xaa can be any naturally occurring amino acid
  misc_feature (43)..(43): Xaa can be any naturally occurring amino acid
  misc_feature (97)..(98): Xaa can be any naturally occurring amino acid
  misc_feature (103)..(103): Xaa can be any naturally occurring amino acid
  misc_feature (108)..(108): Xaa can be any naturally occurring amino acid
  misc_feature (112)..(112): Xaa can be any naturally occurring amino acid
  misc_feature (121)..(121): Xaa can be any naturally occurring amino acid
  misc_feature (128)..(128): Xaa can be any naturally occurring amino acid
  misc_feature (132)..(132): Xaa can be any naturally occurring amino acid
  misc_feature (145)..(145): Xaa can be any naturally occurring amino acid
  misc_feature (148)..(148): Xaa can be any naturally occurring amino acid
  misc_feature (150)..(151): Xaa can be any naturally occurring amino acid
  misc_feature (163)..(164): Xaa can be any naturally occurring amino acid
  misc_feature (166)..(167): Xaa can be any naturally occurring amino acid
  misc_feature (169)..(169): Xaa can be any naturally occurring amino acid
  misc_feature (172)..(172): Xaa can be any naturally occurring amino acid
  misc_feature (180)..(180): Xaa can be any naturally occurring amino acid
  misc_feature (183)..(183): Xaa can be any naturally occurring amino acid
  misc_feature (204)..(204): Xaa can be any naturally occurring amino acid
MQNLPPVSPYNSXPCVPRLGHXLPQLAPIIFSSSFILLPEASXVSSPSHPNILRLYNYFYDRRRIYLILEYAPRGELYKELQKSCTFDEQRTATVRXXHRRSXQMLYXHSHXKKVINTHIXPENLLLXLKAXLKIAHFRWSVHRXPPXGXXQSVGTLDYLPPXXIXXRXHNXKVDLWCIXVLXYELLVGNPPFESASHNETYRXIIKVDLKFPAFVPTGAQDLILQTVSGITPRNGCPWPRSQPTPWVRANSRRVLPPSALQSVA

SEQ ID NO: 1019789 - protein, 103 aa, Homo sapiens
MNHEQLQCVTGVAQLLWGFRLQGGKDFNMPLTISSLKDGGKAAQANVRIGDVVLSIDGINAQGMTHLEAQNKIKGGTGSLNMTLQRASVTQSLSRFLFKRKHK

SEQ ID NO: 1019790 - protein, 177 aa, Homo sapiens
GGLHHYDEFGVLIDNVERDRLRLRPGLRRRGHIDEKVLAFLHAVGRVDQNLGRAVSGARDAALIDQGLQSGAGQRLFSRLAPKGLGEILVEAVPAASGSTVTVWRWPPISTSSEDIMPEDTVQTAEMEMVPSLRTRRMLVAVVIVTAIVLVAGFAFVIATLVKRTSHPQTSTALVGP

SEQ ID NO: 1019791 - protein, 174 aa, Homo sapiens
  misc_feature (69)..(69): Xaa can be any naturally occurring amino acid
  misc_feature (84)..(84): Xaa can be any naturally occurring amino acid
  misc_feature (86)..(86): Xaa can be any naturally occurring amino acid
  misc_feature (95)..(95): Xaa can be any naturally occurring amino acid
  misc_feature (98)..(98): Xaa can be any naturally occurring amino acid
  misc_feature (110)..(110): Xaa can be any naturally occurring amino acid
  misc_feature (118)..(118): Xaa can be any naturally occurring amino acid
  misc_feature (121)..(122): Xaa can be any naturally occurring amino acid
  misc_feature (125)..(125): Xaa can be any naturally occurring amino acid
  misc_feature (138)..(138): Xaa can be any naturally occurring amino acid
  misc_feature (141)..(141): Xaa can be any naturally occurring amino acid
  misc_feature (144)..(144): Xaa can be any naturally occurring amino acid
  misc_feature (147)..(147): Xaa can be any naturally occurring amino acid
  misc_feature (159)..(159): Xaa can be any naturally occurring amino acid
MEEGGDFDNYYGADNQSECEYTDWKSSGGPPFPAISHVGFSPGPPREKVWCSGTVFSESAGKKEGRFSXIILSLSQPGAVGCTXTXRWVYVCPPXGAXPYHRYPGDLLYXGPYMGNPXLSXXRPXGMANPQSFGANNXNGXGGXFWXSTGAFKALRTGXTLGPIRCRGQGVAKM

SEQ ID NO: 1019792 - protein, 71 aa, Homo sapiens
  misc_feature (2)..(2): Xaa can be any naturally occurring amino acid
  misc_feature (9)..(9): Xaa can be any naturally occurring amino acid
  misc_feature (22)..(22): Xaa can be any naturally occurring amino acid
  misc_feature (44)..(44): Xaa can be any naturally occurring amino acid
  misc_feature (49)..(49): Xaa can be any naturally occurring amino acid
  misc_feature (58)..(58): Xaa can be any naturally occurring amino acid
MXGPLGTFXCKLSSYLIFVKMXASVFCLNGLSLESYNGNREASXNARLXLRVSGAVAXAVLWVLAALLAMP

SEQ ID NO: 1019793 - protein, 96 aa, Homo sapiens
GDGVLCLRESALCSLPYASLYATFPNFRGSLSGAPCSPHAFPRDLLGSDSEPFIWEKSTFYERSFRALLERKPPALRARGGVFPLKTQGPPFCALS

SEQ ID NO: 1019794 - protein, 375 aa, Homo sapiens
GDGVLCLRESALCSLPYASLYATFPNFRGSLSGAPCSPHAFPRDLLGSESEPFIWEKMQLLGAIHYSCHCMEKKQACTESPVSFVLFQLRNAMAATSSYMCALLMRIIKSYTDLELDINFIALFYMTRLTYLRSHNIYLYDKNNRRICAFIINYSWDLILFSTSRLGLLDLGQYIHGISKYLCHRTTKTNTDTPPPRLLSKTYKMRRQSGTHSQDGAQLGYTSNAIEVTQPLNNSFRGTRPPGTEQADNVHSTWTVHPSDSEHWQRSPTRQSRSPQQHAGNTSRNNEGQKPASPPEDQGETGLTKKGKVETVSNELRLGSSGAQEENRGVMTADDREGDKARKRTERHDQARDKKVSKHGGDTRRTHCAYDDASQ

SEQ ID NO: 1019795 - protein, 205 aa, Homo sapiens
  misc_feature (13)..(13): Xaa can be any naturally occurring amino acid
NTSPGSMNNFSSXTPNCFKVTVELSCDKFPPEDELPQEWENNKNAFLTYLEQVRMGIAGVVRHKDTKFGIADPVIAVEWDYPYVTTRVGRGLLGFLSPGEYMVTASAEGYHSVTRNCGVTFEKGPFPCNFVLTKTPKQRLRELLAAGAKVPPDLCRGLERLRGQKDLYLRFKSPRAGWTWQNGKGKSKKGGAKLGKGGPLSFRAP

SEQ ID NO: 1019796 - protein, 191 aa, Homo sapiens
MLVTHQVQRLCWSAAAKRPLAAWQLSLALLPLQVDCSPSPTVIINFVFAKARQVNLMEMETTTPASLVSDVVLTSAIPQAKHSFYQAHCLAGGRKFHRLSLGSFCRNNPYSSGQGANVSIQLAAKNVYPNKQGRPTDPLDPLEMDLGHSAFHDFSKQRGVVILSKSWRQCQCPATHHVPVLEKPLCTPLCW

SEQ ID NO: 1019797 - protein, 42 aa, Homo sapiens
VHLLFTLSEDYVISLDEPRLPLQLDDAVRPEAEGEEEGRAIM

SEQ ID NO: 1019798 - protein, 97 aa, Homo sapiens
MSFSDTSFLSFSNAGLGGSSQMTLHQLWQWLVLSKCLLEGEDGVHVYPPQLTLPVSLVDVSPNTLFFFSFFFFLSFGSFLFLNWNIFLTQRGSIFHK

SEQ ID NO: 1019799 - protein, 190 aa, Homo sapiens
  misc_feature (46)..(46): Xaa can be any naturally occurring amino acid
  misc_feature (48)..(49): Xaa can be any naturally occurring amino acid
MDFAGNVKKRSIGAKDNTLDEDSEGSDDELGNLETRKKKKRGLFFXLXXKESMDDEEFAEVDEDGGTFMDVLDDDSESVPELEVHSKVSTKKSKRKGTDDFDFAGSFQGPRKKKRNLNDSSLFVSAEEFGHLLDENMGSKFDKIGMNAMANRDNASLKQLRWEAERDDWLHNRDAKSIIKKKKHFKKKMY

SEQ ID NO: 1019800 - protein, 118 aa, Homo sapiens
MARGVAQVGLNHYIYSLCPCAAVEDTAVTDCALYTMGTRLLPDLCLVLLGLGFEVQRTQQAQQDEMPSPTFLTQVKESLFRYWESAKTGAQNLCQKTYLAAVDEKLKDLYSSVLKGEE

SEQ ID NO: 1019801 - protein, 241 aa, Homo sapiens
SGLLLHTSLALPHHWHQAPDTRSAARRMATHHTLWMGLALLGVLGDLQAAPEAQVSVSAQSSSQDKFLGRWFSAGLASNLELAPGEEGGVVPCCKSVVAPATDGGLNLTFHLPQERDQVLRPEAMLLQPAGSLGSYSYRSPHWGSTYSVSVVETDYDQYALLYSSGQARALCEDFLHGHLSYSRTQTPRAELKEKFTVFCKAQGFTEDTIVFLAQTDKCIDGTIGLPMGLDSLEIPVPSQG

SEQ ID NO: 1019802 - protein, 122 aa, Homo sapiens
CTEALALLWLDRACGIYHGRGAHSHEEPLGPALAGERLAVGERWACANGGRQHSSAGNFNISRIYGKWYNLCIGFTLALAEEEHGQDDSEHAGAGRRRFKAEISMTRTWWRKGVCEETSGAY

SEQ ID NO: 1019803 - protein, 141 aa, Homo sapiens
MKRATCVIPTLSIVLESSWSVGLVFQSAGILSSGGLPSEMEAVWGLLSLPSVAPCPSPVPFHVCLVSSAFTVHHQGDAAPWTLKDTSLPAEQLSPFRRLPPSPPLGSASLSHWSAHCRLSLSLCTFLIVAADLRSQGHLGA

SEQ ID NO: 1019804 - protein, 267 aa, Homo sapiens
  misc_feature (181)..(181): Xaa can be any naturally occurring amino acid
  misc_feature (262)..(262): Xaa can be any naturally occurring amino acid
FAMRPGAPGPLWPLPWGALAWAVGFVSSMGSGNPAPGGVCWLQQGQEATCSLVLQTDVTRAECCASGNIDTAWSNLTHPGNKINLLGFLGLVHCLPCKDSCDGVECGPGKACRIAGGPPALRVRARLDYRGSRSGLQVCGSDGATYRDECELRAARCRGHPDLNVMYRGRCRKFCEHVVCXRPQSCVVDKTGSATAWCVERRPALSPPAPARSFAATTTSPTSPRATCARPPASWAAPSACATRAAAQAPLRSRQVGESAEXEENFV

SEQ ID NO: 1019805 - protein, 201 aa, Homo sapiens
LLICGYQFIQTDNYYFSFGLYGAFLASHLIIQSLFAFLEHRKMKKSLETPIKLNKTVALCIAAYQEDPDYLRKCLQSVKRLTYPGIKVVMVIDGNSEDDLYMMDIFSEVMGRDKSATYIWKNNFHEKGPGETDESHKESSQHVTQLVLSNKSICIMQKWGGTTEKSCTQPSEHWGRSVDYVQVCDSDTMLDPASSVEMVKV

SEQ ID NO: 1019806 - protein, 126 aa, Homo sapiens
  misc_feature (5)..(5): Xaa can be any naturally occurring amino acid
NFFAXKGWRPAALGGLPRLPWSFQQLFGPAAAPTSFETCTFMLAASCLPVGALGMEEAKKGVPGLLYLGSSPSGCFMDFGPTHSQLFWVAPRSGASRPPGGLTFCFAKFGENRTINQMQVGAARPF

SEQ ID NO: 1019807 - protein, 65 aa, Homo sapiens
MASASPFMILPIQSSVVSVDTLYIFHTLLTLHLITLEPLVVAQRTPLHRRALICWGFCACAFPSC

SEQ ID NO: 1019808 - protein, 82 aa, Homo sapiens
DSKNRSPIVSGKQLKEDDVYNGDHGPGNDIYYKAANVLHTLRALIGDEAFFKITRIAVYGRPDPKPGNFTTRYLGTKDYIKI

SEQ ID NO: 1019809 - protein, 86 aa, Homo sapiens
MGCLPRTLGWEPGTPRTPRPPVQHRSYQEGTGIQGRTPAFFSVSPLFFRGLPQCFPASLQAWRPVLITPGAFCRQGCPTQHRHASG

SEQ ID NO: 1019810 - protein, 279 aa, Homo sapiens
RAVGRGVFFVPASQWPGLLRLVTPLSLKKALGARAPPPQRPAVLRHNRRPRPRSPHRTRPPRAMAAPGSARRPLLLLLLLLLLGIMHLCVNSNVYGDNNGQPDRVHNGQLLCCLLSELTDTKSGPKNIDPLTCHQMPQLVLNQQAPVDKENTSDPSLVNAIGKRTYTQLSNFHENMHHVYSRPAPMSQVYNFVKTQHLFPNAELQKKSRLVESITENPGPDISIKNTRCVKEHPGSTMNQRDPKRSNDAPIQGIPIPTRASAREKTRVNQTRTPQNKGP

SEQ ID NO: 1019811 - protein, 316 aa, Homo sapiens
  misc_feature (105)..(105): Xaa can be any naturally occurring amino acid
  misc_feature (120)..(120): Xaa can be any naturally occurring amino acid
  misc_feature (126)..(126): Xaa can be any naturally occurring amino acid
  misc_feature (199)..(199): Xaa can be any naturally occurring amino acid
  misc_feature (201)..(201): Xaa can be any naturally occurring amino acid
GDPGAQGIDLEGQLEGAEVCEDRLLRSRPWRGSWGIAPGQKSAWAAPSLPEPARPGRGEMPLWARCRCGPGCGARPGLGAPSQARPQEPAAPAVSSADVDTSGGXPVYACSSSGSPYSSXPLKMVXYFLSPIFLLPHEEVDADCVPGLQRQDEAEDAQGARAGLALGHRLILQALRLVATGVYAGHALVGAGQHGLHFXVXVPSQHRAQQVASSQWRCEHACLWIIIASIIEQDSVEGDRCLVQTGANSEQLKMPLGAQGLLVPPPLPVHLEDLVARWGPLARPCLVILEVSKGWGSCSPGGPGGQPLLQASEVFK

SEQ ID NO: 1019812 - protein, 98 aa, Homo sapiens
RPPEAEGKSKGGRIEVKQQQMECVHGQVGLTRGCCEPLVRVSPVPSRAIHDLRANVGHPDSSLIKSLILYSSSPFLPPSFLLPIHFIQQIFNLASTMC

SEQ ID NO: 1019813 - protein, 39 aa, Homo sapiens
MCRMNESLGFSLSLHHSATAGPALARLSQPLPTFSYAGG

SEQ ID NO: 1019814 - protein, 159 aa, Homo sapiens
MPSRHASPRGPWYPSSILHRRPCSSPLRGPMMHPSVPSQKTYQGSYGFRLGFLHSGTGKSVTCTYSPDLNKMFCQLARTALCSCGLIPHPAGPRRAMAIYKQSQHMTEVVRRCPHHERSSDSDGLAPPQHLIRVEGNVRVEVIWMAEPLSTCVGGAYNR

SEQ ID NO: 1019815 - protein, 80 aa, Homo sapiens
QRFVRDALFHPVRLARAQVALGAARELRLALEHEPRAHHTGIRRQERGELVANVHEPGARLRWIHFGVRRQIIPLVEPGE

SEQ ID NO: 1019816 - protein, 102 aa, Homo sapiens
GTPPPGFFPPKKNPGAVPPPGFFFGPGGGLLFSPGDPFSPLALFGGPFKPVFSKKRGGGGAGFPGFFSPPGPGGGVFFGGPPPPLGGPGGLAKKKKSFFSPF

SEQ ID NO: 1019817 - protein, 209 aa, Homo sapiens
MRRRRGQSGAADSPGPGAAPASRGLRSREVPPAATMNPEKDFAPLTPNIVRALNDKLYEKRKVAALEIEKLVREFVAQNNTVQIKHVIQTLSQEFSTCHQKPPQADKGAYIGSGPDLLPSHWAKELKGLYLQGMLDRAQWLTLLPNDGKTARLALTIACEGPHTTIVKVGREQLCLPPLQRCLFDRAVSKHEQLDTKNPNVKKTEFGES

SEQ ID NO: 1019818 - protein, 69 aa, Homo sapiens
GKSYKTQTSDSLGNFSFSPPLGTKLVNIQANGYYVDEITGRLSTSVINLQATVDLGEMPTPTVNVLTSQ

SEQ ID NO: 1019819 - protein, 51 aa, Homo sapiens
MLALLRQTFPNTIEHKKHIKAEHADMKFHECDQCKELFPTPALLQVHVNVP

SEQ ID NO: 1019820 - protein, 114 aa, Homo sapiens
  misc_feature (45)..(45): Xaa can be any naturally occurring amino acid
PWGGGSQGTKFGILGLAGPAGALNGPQGPEVASSCPKPALAPPKXAKGPTMAPQPPGVAVPFRRVPLGPTFRLGWKGRFGPGEVTCFWRGRAAPQSRDRCPNTGFPGGSAPPQT

SEQ ID NO: 1019821 - protein, 118 aa, Homo sapiens
RLLLAKRSANREACEDETPTTHKHSKPARKLLVGVGWNLSSYQFRVSASSPILVTSVQGSLSNKKELVATVWSAESRVQVQIWALHLLVVSPRAVTNLSVPVPSFANEDDTSTYLVEL

SEQ ID NO: 1019822 - protein, 103 aa, Homo sapiens
ARSGSTFGWTGAAVALVLLARELREARVLAVLGKRGVDRVGATLHLVVVLRLADLVALRLRLERIVRTGATGRGRRAAGKAGARELVLDRFLLCKGELLDLHA

SEQ ID NO: 1019823 - protein, 179 aa, Homo sapiens
SGGRRGGGAAAGVIVLAGLGRALSPSALRVSVRPASSQPLTPACVADSSMLAGRLCAVRLDVSRLSGTGVVGAEEEQQRGGGACVPCALELAEAMAYAYLFKYIIIGDTGVGKSCLLLQFTDKRFQPVHDLTIGVEFGARMITIDGQTDKTSDSGIRQGNESFRIQSQGRITEVQQELY

SEQ ID NO: 1019824 - protein, 287 aa, Homo sapiens
  misc_feature (4)..(4): Xaa can be any naturally occurring amino acid
  misc_feature (147)..(147): Xaa can be any naturally occurring amino acid
  misc_feature (166)..(166): Xaa can be any naturally occurring amino acid
  misc_feature (170)..(170): Xaa can be any naturally occurring amino acid
QAEXQVLGLGTSTHSGRFRGQLQQWLLQICGKCSSDDSLDPCCRKILPDGGLQVVEEQRPLAKEELIAELQDCEGLIVRSATKVTAACHQRQLTNTPRWWARARAQRGGRVLDLGRPQHEGTAASLGSLNTTSNGERAFSACSNSTXWQLTHDVPGPQGRGFSPMXCIGXFRSVQGRANMRQRGRRCMVEPELNGKTLGHSWVWAGLGEEVATRMQSFGMKTIGYDPIISPEVSASFGVQQLPLEEIWPLCDFITVHTPLLPSTTGFLNDNTFCPVQEGGCVVVNCA

SEQ ID NO: 1019825 - protein, 170 aa, Homo sapiens
  misc_feature (4)..(4): Xaa can be any naturally occurring amino acid
  misc_feature (94)..(95): Xaa can be any naturally occurring amino acid
  misc_feature (113)..(115): Xaa can be any naturally occurring amino acid
  misc_feature (118)..(118): Xaa can be any naturally occurring amino acid
  misc_feature (122)..(123): Xaa can be any naturally occurring amino acid
  misc_feature (125)..(125): Xaa can be any naturally occurring amino acid
  misc_feature (128)..(128): Xaa can be any naturally occurring amino acid
  misc_feature (130)..(130): Xaa can be any naturally occurring amino acid
  misc_feature (135)..(135): Xaa can be any naturally occurring amino acid
  misc_feature (149)..(149): Xaa can be any naturally occurring amino acid
  misc_feature (158)..(158): Xaa can be any naturally occurring amino acid
QAEXQVLGLGTSTHSGRFRGQLQQWLLQICGKCSSDDSLDPCCRKILPDGGLQVVEEQRPLAKEELIAELQDCEGLIVRSATKVTAACHQRQLXXSRWWAGLAQCGECGSGGXXXEGXLGFXXPXWEXPXCRRTXLWNDHVPGLADSPXRRLLMKDGXWERKKFMGKELP

SEQ ID NO: 1019826 - protein, 82 aa, Homo sapiens
MIPSFEIQQAILLWDTADRWASLARDALVHARLPSFAIPYAIDVLTTGSYPRLPTCIRVSSLLAPMFLKTKGFGTGLDCIIK

SEQ ID NO: 1019827 - protein, 59 aa, Homo sapiens
  misc_feature (3)..(3): Xaa can be any naturally occurring amino acid
  misc_feature (48)..(48): Xaa can be any naturally occurring amino acid
  misc_feature (58)..(58): Xaa can be any naturally occurring amino acid
MAXGHHMLMASWLHRAVNEVRAAGLYLLSAPDLMPVTAGPLLFKWQLXSGGRDESLRXA

SEQ ID NO: 1019828 - protein, 117 aa, Homo sapiens
VFSYRDELAFGIVVDREQLDAPWPLLDAVRSSLAELTAAVRNHQRRDAEFVQRQPDMFPENSFGVLRADLVAHDADGDLAVVAQGRHHQQAAGLLDVTLHDVVLDTPTDHVISLVDA

SEQ ID NO: 1019829 - protein, 309 aa, Homo sapiens
  misc_feature (153)..(153): Xaa can be any naturally occurring amino acid
  misc_feature (160)..(160): Xaa can be any naturally occurring amino acid
  misc_feature (174)..(174): Xaa can be any naturally occurring amino acid
  misc_feature (190)..(190): Xaa can be any naturally occurring amino acid
  misc_feature (276)..(276): Xaa can be any naturally occurring amino acid
  misc_feature (283)..(283): Xaa can be any naturally occurring amino acid
  misc_feature (286)..(286): Xaa can be any naturally occurring amino acid
  misc_feature (305)..(305): Xaa can be any naturally occurring amino acid
AVRRWQLWEEAVWKAEELKPGPIATFRAASLTLTAVPGSETGRMGRLRPESGHCVEPPGAEIRMYRFMRDVEPEDPMFLMDPFAIHRQHMNRMLSGGFGYNPFLQASRNGNIARDQAVQAARMQQRVELSPPLEMLGNVGVVSWNNVWGLMNXMIGNMEXITTGGNCQNFSSSXVISYSNTGDGAPKVYXKTSEMRSAPGGIRETRRTVRDSDSGLEQMSIGHHIRDRAHILQRSRNHRTGGQEERQDYINLDESEAAAFDDEWRRETSRFRQQRXLEFRRLXFSXAGGRRAEGPPRLAIQGTEXSPSR

SEQ ID NO: 1019830 - protein, 35 aa, Homo sapiens
RHEAGRSPPPADARATRRGVGGGGAPAPAGLPGGG

SEQ ID NO: 1019831 - protein, 194 aa, Homo sapiens
LTGKVCCYWLQSNPTPKNGPGPTKTKTAGPDQTEMTIEGLQPTVEYVLSVYAQNPSGESQHLLQTTVTTIPAPTDLKITQVTPSMLERPVDTIQMFSSTWIIELRLTPKEKTGPMKAINLAPDSIIRGCDSGFMVATKYEVSVYAPKDTVDQQTSSGSSHHSGESQHTKKGYVVTDCYHETHHHHVAGEPRLRR

SEQ ID NO: 1019832 - protein, 107 aa, Homo sapiens
HTGKSHKCLECGERRQSTHLIRHQEFIKIKCCRLGVVLTPIIPALWEAKAGRSFEIQEFETSLANMVNPVSTKNTKMSRAWWCMPVSPAIREAEVGESLEPRRRKLQ

SEQ ID NO: 1019833 - protein, 364 aa, Homo sapiens
  misc_feature (27)..(27): Xaa can be any naturally occurring amino acid
  misc_feature (279)..(279): Xaa can be any naturally occurring amino acid
LELLAIKPEADGSEREIGRVWQKLRVXRFRWQPDTCDLLGFCPPFSLLLRSGEPLDARQSRVLGCPTCRMTSLRLKDDLKEESVADQVIILGDSGVGKTSLLNQYVNIDFCNQYKATIGADFLTQEVMVDDRLVTMQIWDTAGQERFQSLGVAFYRGADCCVLVFDVTCPNTFKNPEIAGEMSCLIQASPRDPEYFPFVVSGNNDGARITRTKCAQSGPQAWCYSKILHSPYFEEPSAKEAINVEQAFQTIARNALKQETEVELYNEFPGTVNWTTSDXGQVLADKLANAEGQDTVWHTSPFRNPGTPVSAPRYSPLHLPTTILALQFGVQDTPVKRVTPISLTVTPSTHPRLNYNRCHSLRFH

SEQ ID NO: 1019834 - protein, 126 aa, Homo sapiens
HSPTVISGDPNIGCKWHEGPPEWIFYWIAPYYACCGSLTIKFRDEGFAWSAQSLKVLMPKQLLVEIHWEDSMSEQPLTGAALKFAGLKDLAEWIARSLRVLRSQTAAYKDGVTTRSQSQLTEHLSI

SEQ ID NO: 1019835 - protein, 125 aa, Homo sapiens
HSPTVISGDPIIGCKWPSAPPSGSSIGLPHGMPGAALPPVKTASCGDSLGGQHVEGGTHMRWCRTSLKHLSLLSTLTGAALKFAGHKDLAEWIARCLRVLRSQTAAYKDGVTTRSQSQLTEHLSI

SEQ ID NO: 1019836 - protein, 127 aa, Homo sapiens
DRRPAERSSRPIVGSLMLATNPFRAPGILAAGREQDQIGGGDALLGVGGLWGRVLGQIPPDGNDAVGHAMGGRVPSGVALAVGDVRDSPGGSARNLQSLCGDEPVCQQTGAGSIPGAVGGACAQTNN

SEQ ID NO: 1019837 - protein, 108 aa, Homo sapiens
WPGENVKAKIQDKEGIPPGQQGLIFAGKQLEDGRTFSDYNIQKESPLPLVLGLGGGIIEPFFRQVAQKNNWDKMICRKWYGCLHPRGVNCRKKKCGHPNNLGPKKKVK

SEQ ID NO: 1019838 - protein, 49 aa, Homo sapiens
PKTTLVRRFYGAGLGLRNQEADISLHYLFPVLLHSVIVDVKLKSYSCFS

SEQ ID NO: 1019839 - protein, 128 aa, Homo sapiens
QRYWSEVGNNKFGRSMGLVDPGSKLLGVRYCCRKTNKLNIFRSINNRFFPNSAPISIIHVMTFIYDNKGNIAQVATNVTKNGAIQHVAKNFGSHYNHRSITVDRKITREQTNFFIPVLLLQVIKLLVR

SEQ ID NO: 1019840 - protein, 286 aa, Homo sapiens
  misc_feature (259)..(259): Xaa can be any naturally occurring amino acid
  misc_feature (278)..(278): Xaa can be any naturally occurring amino acid
PRIGGGSGSRMQPRSERPAGRTQSPEHGSPGPGPEAPPPPPPQPPAPEAERTRPRQARPAAPMEGAVQLLSREGHSVANNSKRDYHDAFVAMSRMRQRGLLCDIVLHVAAKEIRAHKVVLASCSPYFHAMFTNEMSDEPAMTHVTLHDIDPQALRPSMDDTFAYTAEIVVGEGNVQTLLPAASLLQLNGVRDACCKFLLSQLDPSNCLGIRGFADAHSCSDLLKAAHRYVLQHFVDVAKTEEFMLLPLKQVLELVSSDXLNVPSEEEVYRAVLELGEXDVDARSSM

SEQ ID NO: 1019841 - protein, 338 aa, Homo sapiens
  misc_feature (311)..(311): Xaa can be any naturally occurring amino acid
  misc_feature (330)..(330): Xaa can be any naturally occurring amino acid
PRIGGGSGSRMQPRSERPAGRTQSPEHGSPGPGPEAPPPPPPQPPAPEAERTRPRQARPAAPMEGAVQLLSREGHSVANNSKRDYHDAFVAMSRMRQRGLLCDIVLHVAAKEIRAHKVVLASCSPYFHAMFTSKYPAWAALGAPWVPRVSSCNPAVPRSMTMSDEPAMTHVTLHDIDPQALDPAWNDTFAYTAEIVVGEGNVQVRAPSPGSRCPPTLCLPHLPLGAPETLLPAASLLQLNGVRDACCKFLLSQLDPSNCLGIRGFADAHSCSDLLKAAHRYVLQHFVDVAKTEEFMLLPLKQVLELVSSDXLNVPSEEEVYRAVLELGEXDVDARSSM

SEQ ID NO: 1019842 - protein, 122 aa, Homo sapiens
TFESSQPAILDFQCSKGGENLSVGQRQLVCLARALLRKNRILVLDEATAAIDLETDNLIQATIRTQFDTCTVLTIAHRLNTIMDYTRVLVLDKGVVAEFDSPANLIADRGIFYGMARDAGLA

SEQ ID NO: 1019843 - protein, 102 aa, Homo sapiens
HGIPPSGLSGRCWWGIKMNTLQTRTRAPQELFVPPETSGPTSEKMLVSFHGSSLRNEATPQYGLEEEAGNGRWQQSLSLECWPLWTSHPFGTPSLMTLAVER

SEQ ID NO: 1019844 - protein, 70 aa, Homo sapiens
LSEEPEPSTMMRLACFERTGEALAKFVGPKPRGECSKPEQLVVTFVPGFKAGVFWAIVSHPADFCGICVE

SEQ ID NO: 1019845 - protein, 159 aa, Homo sapiens
LLELVTAQRVQQVVAEVRIQVQLVAQRIGRAGQLAAADHPLEAAGQAVAMRLAAVGAAAVEAAQAIDQALVHRALRNLVGGVEAGVVTHRGEMKAARPVLPRIAQHHAAVEEVVVLPIGAVVVLAFNAVEQATAGQGRGTRGEAARVPYSHAAELQQLL

SEQ ID NO: 1019846 - protein, 204 aa, Homo sapiens
RPPPGQRAPLGLTDSDPPRGAPGSAHAPPSPLPHQGSPGLPAGSCPRTCSFFTFRSFYLDCRCFSPAGALLSSPPTFCPRFPLFSSCPPPPSLLLGLSPWKSPPHRDPSVNRCHLIGPQTIPGFQHKLGEETREGGERKVGIALGNSCLRSLLAEYFALARSLHPHPSPRSSPTPEDVAKERRARVALPAWNVLCSSVGGWRRC

SEQ ID NO: 1019847 - protein, 221 aa, Homo sapiens
MIGGLFIYNHKGEVLISRVYRDDIGRNAVDAFRVNVIHARQQVRSPVTNIARTSFFHVKAVQHLAGQQSPSQNVNAAHGLPNSSIQMCDVHGCLLWQDQRRKNYPRTILCSIYELLDEILDFGYPQNSETGALKTFITQQGHQESASEKEEQSQITSQVTGQIGWRREGIKYRRNELFLDVLESVNLVMSPQGQVLSGHVSGRVVMKQYQEWVPECKFGLN

SEQ ID NO: 1019848 - protein, 81 aa, Homo sapiens
SAPADTTWSDAPHPWRRYFSRSADYLVVGLPVLILLFIPLFAIFGASSLMMKLLSNAFVCQFLLVCLFRFSEAFLLSTWGF

SEQ ID NO: 1019849 - protein, 178 aa, Homo sapiens
  misc_feature (23)..(23): Xaa can be any naturally occurring amino acid
FEKMLGREVERQVRYQVARKTLXQLLDEAEGVAQRVRDTLRALDDMLNTHEAEVDRLRAYIQAGREFLDENPEAGAAKAGVIEFDKPRERFARKLANLATLMASHEMSVTQMKLTRAQAVDMLDRFSETASVLVPVWRQHTLALITTKNMNPAMVAEAAKAHQALMRSLSQSLEGINQ

SEQ ID NO: 1019850 - protein, 239 aa, Homo sapiens
RIMAAAALGQIWARKPLSVPWLLCGPRRYASSSFKAADLQLEMAQKPHKKPGPGEPLEYGKTFTDHIIMVEWNDKGWGQPRIQPFQNPHDCTQPPPDLQYSLTAARGHEGRHKGKDTDRCAHLTTLAQHGPECCAQHNAAMMPAESIDKPGARLECIRRLIEVDKDWDPRMTAAPDILCAASAHGNEPSLEMSRSQGALHDDKHCPKRDAYNTWRNPRPEKTLTGHDTKHKHTGAWHET

SEQ ID NO: 1019851 - protein, 183 aa, Homo sapiens
  misc_feature (11)..(11): Xaa can be any naturally occurring amino acid
IQAPFREPGFXVCLPRGGPHAFPGGFLFYPPPMGGGNRVSPLGVGGLASPRHPREVPPGGFMGWKGLGNFGAGGAPFPGTPQGGSALFGFFTKSLKRFKKKTGRLLKGRCPGGIFGGKGRPPPLGSLLPPPGVQMGLRGAGRPWGLLRNPPLKRGGPPPPRKNGFAAPPARAPEGGGAPPAGF

SEQ ID NO: 1019852 - protein, 94 aa, Homo sapiens
WSRLPFLSCDSMICNEENCSPVRRPYSCMTSPNPLNTWTTRFSGQSGNDVSTRKRRSPCSSVRDSASGTSPIKSLMAWSILKRLIVSSSSAGTG

SEQ ID NO: 1019853 - protein, 67 aa, Homo sapiens
NKTGRNASIHTLLDALERMEERHAKEKIQDLLVDSGKFIYLEDGTGSAVSLERKTLFTRGFLLGVRS

SEQ ID NO: 1019854 - protein, 67 aa, Homo sapiens; identical to SEQ ID NO: 1019853

SEQ ID NO: 1019855 - protein, 271 aa, Homo sapiens
  misc_feature (2)..(2): Xaa can be any naturally occurring amino acid
  misc_feature (52)..(52): Xaa can be any naturally occurring amino acid
  misc_feature (56)..(56): Xaa can be any naturally occurring amino acid
QXIIYRHEQANVDLLKPKQIGGIGWRCQGITDVGKILIEKFQLKNLSELQTXSFHXLVSQRHSTPQNKNAVSVHSNLNSEAVMNSLTQTFATVEVGRWNNNKKSPIKASDLTKFGDCGGSDDEEESTVISVSEDMNSEGNVDFECDTKLYTSAPNTSQGKDNSVLVVLSSDETPPSLEAAENETQELYVLLKIVAKGSHFKWTAQEVCFVTDALSVNDIYSSVWVLIHTILNLGTRKDQATEVAIDGTNTDDGHEDERQVTRRIQSDHDRT

SEQ ID NO: 1019856 - protein, 201 aa, Homo sapiens
  misc_feature (2)..(2): Xaa can be any naturally occurring amino acid
  misc_feature (52)..(52): Xaa can be any naturally occurring amino acid
  misc_feature (56)..(56): Xaa can be any naturally occurring amino acid
QXIIYRHEQANVDLLKPKQIGGIGWRCQGITDVGKILIEKFQLKNLSELQTXSFHXLVSQRHSTPQNKNAVSVHSNLNSEAVMNSLTQTFATVEVGRWNNNKKSPIKASDLTKFGDCGGSDDEEESTVISVSEDMNSEGNVDFECDTKLYTSAPNTSQGKDNSVLVVLSSDETPPSLEAAENETQELYVLLKIVAKGSHFK

SEQ ID NO: 1019857 - protein, 108 aa, Homo sapiens
LVKREKRPQFFRFGDPALVYLVSAHPPGVGRFSPHPPLGGFSVLEKTTPIWGGFLQTLAQKGSGGGKVPQFAPKAPKGLMNFFPNPPPPPFYQGGEDGFQTFFFHWPL

SEQ ID NO: 1019858 - protein, 52 aa, Homo sapiens
ATPNCCIRYPNSIINGYKPSPGLVCGDGFTPFPLAKRSRPSWLITSAFVAAA

SEQ ID NO: 1019859 - protein, 77 aa, Homo sapiens
MLPLIAAAVRRALYEQLIGISQLLVLRWLPSTSLVKLIRIMIKKNRTLSSLLTQNQPHNGLSQSDPAAEPSRVVGHG

SEQ ID NO: 1019860 - protein, 112 aa, Homo sapiens
LGKVNEIAKHKASVEDADTQSKVHQLYSCWSPIASTLPELVQRLVTIKQLHEQAMQFGQLLTHLDTTQQMIANSLKDNTTLLTQVQTTMRENLATVEGNFASIDERMKKLGK

SEQ ID NO: 1019861 - protein, 151 aa, Homo sapiens
  misc_feature (20)..(20): Xaa can be any naturally occurring amino acid
MMTRAQPGWGPPGGRLRSGXEPRSLEPMLSMPIGPMVTGTVGTMPPVPRSNSVTTPLPWFPALAGVPCPPCATVSPTLPQLGQAQGGGGDQHHIEAATPASHHFPPSRCQTGPSVSLGPLGICLCAVMTFLVSMTHGNTGETGCPSPQQMQ

SEQ ID NO: 1019862 - protein, 247 aa, Homo sapiens
  misc_feature (191)..(192): Xaa can be any naturally occurring amino acid
  misc_feature (194)..(194): Xaa can be any naturally occurring amino acid
  misc_feature (197)..(197): Xaa can be any naturally occurring amino acid
  misc_feature (200)..(201): Xaa can be any naturally occurring amino acid
  misc_feature (203)..(205): Xaa can be any naturally occurring amino acid
  misc_feature (209)..(209): Xaa can be any naturally occurring amino acid
  misc_feature (220)..(225): Xaa can be any naturally occurring amino acid
  misc_feature (227)..(227): Xaa can be any naturally occurring amino acid
  misc_feature (235)..(236): Xaa can be any naturally occurring amino acid
  misc_feature (238)..(238): Xaa can be any naturally occurring amino acid
  misc_feature (244)..(244): Xaa can be any naturally occurring amino acid
MAALTTLFKYIDENQDRYIKNLAKMGGYPECVCDGQEKRGEYQEDDWKIDCCRCYSSLVGSVELVDIGKQKLPDGSEIPLPPILLGRLGSDPQKKTVCIYGDTWMCSLHALEDGWDSEPFTLVERDGKLHGRGSTDDKGPVAGWINALEAYQKHRPRRFLTIVRFCLEGMEATQALRAYDELDSLPVKDTXXKXGDXGSXXDXXXRGKXSPGITYGLRGXXXXXXEXEGTTKTSXXGXTGARGXRHD

SEQ ID NO: 1019863 - protein, 90 aa, Homo sapiens
  misc_feature (6)..(6): Xaa can be any naturally occurring amino acid
FAVTAXVGKEHALPLDSFKCTELNKGSTGAPDCDEVVTVAHAAAVLKILTGHECTIIKIPAGHSHAGAANVAQLPGFFFLGDFSYQLPTP

SEQ ID NO: 1019864 - protein, 81 aa, Homo sapiens
AADGRVLGMVDRALTDLGLHLRADLEDDLARVLALLLRELLRELLREALVDLGDVRRVLEDDADDRGLCAVGDAHLSRRAW

SEQ ID NO: 1019865 - protein, 327 aa, Homo sapiens
  misc_feature (10)..(10): Xaa can be any naturally occurring amino acid
  misc_feature (25)..(25): Xaa can be any naturally occurring amino acid
  misc_feature (42)..(42): Xaa can be any naturally occurring amino acid
  misc_feature (124)..(124): Xaa can be any naturally occurring amino acid
  misc_feature (134)..(135): Xaa can be any naturally occurring amino acid
  misc_feature (141)..(141): Xaa can be any naturally occurring amino acid
  misc_feature (145)..(145): Xaa can be any naturally occurring amino acid
  misc_feature (151)..(151): Xaa can be any naturally occurring amino acid
  misc_feature (153)..(153): Xaa can be any naturally occurring amino acid
SRHTSSGHYXLLSLQLLLPGLLLLXRHHHLYPQEELGSGLQXGAPGAEEEVEESSPLQEPPSQAAGTTPGPDPKAYQLLSARSACLLGLLAATNALTNGVLPAVQSFSCSTYVCFSYHLVFGSXHCFQSPFLLXXHGCSVXFFCXSVLSFXCXAFFLGVYLMALAVLSPCPPLVGTSAGVVSRGAFLGAVSLLLFSYVKVAASSLLHGGGPAGIAGSRRGHPGGLSARRCCYVPPDQHLSLCSTAERTVQTPCDSLSLGRWGPRSSSHLSFPSMLPPCLSACSPGGPHTGTLVDTYTLHRRSWLSRVGKGKEHGLEPGTSGGCRVSP

SEQ ID NO: 1019866 - protein, 298 aa, Homo sapiens
  misc_feature (101)..(101): Xaa can be any naturally occurring amino acid
  misc_feature (118)..(118): Xaa can be any naturally occurring amino acid
  misc_feature (128)..(128): Xaa can be any naturally occurring amino acid
  misc_feature (258)..(258): Xaa can be any naturally occurring amino acid
SAGERRRDRAGRRGWRGRRRLKRERGRERDRGFPSCAWPPSAAARPRPGGVRAAVHGRGVLRRGTRPAPPALLRLLPRGGRPPPAPPRARPPLAAASLPPXLRLPRLLEPGGGLWRAXPRWIAPLLSXMGNMRLPWIVLNSEFGISARPPASSAPRVFFFFPFAFFPFLPPGSPFLLPPPLCSPSPPPAAEKWGRVSASRFPPHRARGEHVGASRARRPASRGPFPGVSTDDSAVPPPGGARHFGHYRTGGGAMGLRXAPVSSVAGMGMDPSTAGGVSFVLYTPPPGARRLREGARGE

SEQ ID NO: 1019867 - protein, 108 aa, Homo sapiens
GHEVLRGSIDRSGRVLQLIEGFVPDAAWLDDVETLTYLHSCISTKRHRVRLPEIPMHLDALLVDEPLAGGLEPRLGAQHLRTLSVVGFPTATFPGVLDELNQLAFPYR

SEQ ID NO: 1019868 - protein, 151 aa, Homo sapiens
IRSELIDPGADGLGRRATKVWVDGVLAFDGSASPESTPAFWASGATFEESLDSLHLCLAPASPFASQAVVTVRVVSRIKGGGAVLDETYRFTAEDRTAPKLVASVAVSPRAIRLAFDEPVTAPETNSITITPLGAPVVPVVVMSVNVTASV

SEQ ID NO: 1019869 - protein, 76 aa, Homo sapiens
VVRYPVIELGNVAHTCIRLLVQEPEMEELIGAPEFQGCSESCVGPLHFHAGVKEENLVLEKEIFGNHHGTHAFHKF

SEQ ID NO: 1019870 - protein, 178 aa, Homo sapiens
  misc_feature (1)..(2): Xaa can be any naturally occurring amino acid
  misc_feature (4)..(5): Xaa can be any naturally occurring amino acid
  misc_feature (7)..(9): Xaa can be any naturally occurring amino acid
  misc_feature (13)..(16): Xaa can be any naturally occurring amino acid
  misc_feature (19)..(24): Xaa can be any naturally occurring amino acid
  misc_feature (26)..(26): Xaa can be any naturally occurring amino acid
  misc_feature (32)..(38): Xaa can be any naturally occurring amino acid
  misc_feature (41)..(43): Xaa can be any naturally occurring amino acid
  misc_feature (48)..(48): Xaa can be any naturally occurring amino acid
  misc_feature (53)..(53): Xaa can be any naturally occurring amino acid
  misc_feature (57)..(57): Xaa can be any naturally occurring amino acid
  misc_feature (59)..(61): Xaa can be any naturally occurring amino acid
  misc_feature (73)..(73): Xaa can be any naturally occurring amino acid
  misc_feature (84)..(84): Xaa can be any naturally occurring amino acid
  misc_feature (87)..(88): Xaa can be any naturally occurring amino acid
  misc_feature (91)..(91): Xaa can be any naturally occurring amino acid
  misc_feature (93)..(93): Xaa can be any naturally occurring amino acid
  misc_feature (96)..(100): Xaa can be any naturally occurring amino acid
  misc_feature (103)..(104): Xaa can be any naturally occurring amino acid
  misc_feature (108)..(108): Xaa can be any naturally occurring amino acid
  misc_feature (111)..(112): Xaa can be any naturally occurring amino acid
  misc_feature (114)..(115): Xaa can be any naturally occurring amino acid
  misc_feature (122)..(122): Xaa can be any naturally occurring amino acid
  misc_feature (126)..(126): Xaa can be any naturally occurring amino acid
  misc_feature (135)..(135): Xaa can be any naturally occurring amino acid
  misc_feature (139)..(139): Xaa can be any naturally occurring amino acid
  misc_feature (146)..(147): Xaa can be any naturally occurring amino acid
  misc_feature (151)..(151): Xaa can be any naturally occurring amino acid
  misc_feature (153)..(153): Xaa can be any naturally occurring amino acid
  misc_feature (157)..(157): Xaa can be any naturally occurring amino acid
  misc_feature (159)..(163): Xaa can be any naturally occurring amino acid
  misc_feature (165)..(165): Xaa can be any naturally occurring amino acid
  misc_feature (168)..(168): Xaa can be any naturally occurring amino acid
  misc_feature (172)..(172): Xaa can be any naturally occurring amino acid
  misc_feature (176)..(176): Xaa can be any naturally occurring amino acid
  misc_feature (178)..(178): Xaa can be any naturally occurring amino acid
XXEXXVXXXLFQXXXXQSXXXXXXKXEHKIAXXXXXXXDSXXXRELAXASAEXPKPXQXXXRLRRLEEPSIPXPGPNPASEKTXRIXXQQXEXQKXXXXXSIXXAKNXARXXRXXVNKTTAXYALXGPPVASNFXEIPXQNVTRPXXSATXRXRIPXVXXXXXSXIGXKPKXLVEXQX

SEQ ID NO: 1019871 - protein, 70 aa, Homo sapiens
VRAMLSQLHWDHVNTQMLADGKMPVVTGNGGDELDVLAGPGFLSGNTVNESEHHQIMHDRQTGIVGSNDV

SEQ ID NO: 1019872 - protein, 101 aa, Homo sapiens
  misc_feature (55)..(55): Xaa can be any naturally occurring amino acid
MTPALLAWGALAGPETARVRVVNDDILEVGTLLLEDSVVRALWHELLSSGGASVXLWVLDAAGKLVLSGGIDTHTHMQFPFMGSRSIDDFHQGTKAVLSGG

SEQ ID NO: 1019873 - protein, 202 aa, Homo sapiens
  misc_feature (166)..(166): Xaa can be any naturally occurring amino acid
  misc_feature (191)..(191): Xaa can be any naturally occurring amino acid
  misc_feature (199)..(200): Xaa can be any naturally occurring amino acid
SGVARGAEKVVTPPGCRRESLNTSPNSPQGQSSLRPTPHLRQLPGPHSCTGVWGGGAKDQYSQTGTHTGARERGQGPPRTGGGPNRQDTTAGQPRHHAGQAGTEEADGAGYTTEEHWVWGVSSQQSGARNSPQPAQERPRQCFPPGAPCSPAPRYAALAATSAPPXLTISSFCHHYGAPVFPGPALMAHLXWFLDMTLXXVY

SEQ ID NO: 1019874 - protein, 77 aa, Homo sapiens
DIEISVKELRTILNRIISKTKELRTKGFSLELCRSMVNLMDRDGNGKLGLVEFNILWKPLAEGPSMLPELTRTMRQQ

SEQ ID NO: 1019875 - protein, 310 aa, Homo sapiens
  misc_feature (16)..(16): Xaa can be any naturally occurring amino acid
  misc_feature (20)..(20): Xaa can be any naturally occurring amino acid
  misc_feature (24)..(24): Xaa can be any naturally occurring amino acid
  misc_feature (40)..(40): Xaa can be any naturally occurring amino acid
  misc_feature (49)..(49): Xaa can be any naturally occurring amino acid
  misc_feature (52)..(52): Xaa can be any naturally occurring amino acid
  misc_feature (55)..(55): Xaa can be any naturally occurring amino acid
  misc_feature (60)..(60): Xaa can be any naturally occurring amino acid
  misc_feature (66)..(68): Xaa can be any naturally occurring amino acid
  misc_feature (74)..(75): Xaa can be any naturally occurring amino acid
  misc_feature (79)..(80): Xaa can be any naturally occurring amino acid
VTVVLLLLLLLLLATXLSTXLRRXSRDSGGYYHPALLGSXLWGFTRLLXLPXPQXSCYNXELNWGXXXITLNYXXMNSXXTMTTSRMVACRRDSWWKASSKCGESVSPEQVPVRAEEAKDSDTEGDLVLGSPGPASAGGIAEALLSDLHAFAGSAGWDDMRQGSWVAMGLHVYLHCRGRSWCAIPVTAAHSPCLCFPRCHGWTGPPAHMTMPQTVTSLSVPKSYVYPRSPRERSSTNHRHQATHLKVRTPSGLWKHQARNTEYLRLLKIIKSTDHRECCMCQKACRSRNREASGSGHQLVYTGLSYIDAS

SEQ ID NO: 1019876 - protein, 82 aa, Homo sapiens
  misc_feature (10)..(10): Xaa can be any naturally occurring amino acid
  misc_feature (18)..(18): Xaa can be any naturally occurring amino acid
  misc_feature (59)..(59): Xaa can be any naturally occurring amino acid
ALTTLRLWLXINLLTVLXLAQLRHKAPCTPTFSHYRNYGHYMGKIIWNYKAGTFPEVAXYTVWLSFPVSSRFLEVKYSNLVR

SEQ ID NO: 1019877 - protein, 143 aa, Homo sapiens
  misc_feature (109)..(109): Xaa can be any naturally occurring amino acid
  misc_feature (119)..(119): Xaa can be any naturally occurring amino acid
  misc_feature (122)..(122): Xaa can be any naturally occurring amino acid
  misc_feature (127)..(127): Xaa can be any naturally occurring amino acid
  misc_feature (132)..(132): Xaa can be any naturally occurring amino acid
TSASITSKPATLTTTSATSKLIHPDEDISLEERRAQLPKYQRNLPRPGQAPIGNPPVGPIGGMMPPQPGIPQQQGMRPPMPPHGQYGGHHQGMPGYLPGAMRPVWAGPXNGAPFPGWAXSPXDGNEXPCNVXRWPLLILLHPV

SEQ ID NO: 1019878 - protein, 374 aa, Homo sapiens
MQLSQHLATKSPTITMMLSTEGREGFVVKVRGLPWSCSADEVMRFFSDCKIQNGTSGIRFIYTREGRPSGEAFAELESEEEVKLALKKDRENMGTQIRCTVIQVSTSVATGIAVLKHHRSAISPAYCHTMASSRLQRHPIGLQQGKSMYKLYYRDWNIVPKWDDTDSWNFQGAKHRGSLCAVVFTGSIADKAESNHKERIGAQVHWRSYKSRPSCKYEKQYDAHVKRLLGYASGKVPYDKAGGMQQGYIGLERRQAGLDRIKVESPVHSTREGSDMTRPSDGQSVTDTATRHPKQIVEKDTHHTRPNVSSTAPEPEKHENDATRAQKQKTETQNQKRTKENTTQQHNRHNTTDSKAPSQPPTHTQRHTKRTNPA

SEQ ID NO: 1019879 - protein, 114 aa, Homo sapiens
GSRFYSLTLAEVVLVVAYRLAIAVGGKKEENYPVSLELHQRMQLSQHLATKSPTITMMLSTEGREGFVVKVRGLPWSCSADEVMRFFSDCKIQNGTSGIRFIYTSSKADQVVKH

SEQ ID NO: 1019880 - protein, 228 aa, Homo sapiens
SSGINAELPLWPGRSRLALRWLSHVRRPSRRVPRMPRGSRSRTSRMAPPASRAPQMRAAPRPAPVAQPPAAAPPSAVGLFCCCCPGSAGLSGPDGNHCSWLWLWALLWGTHWVTPLLGASVEEVMLRPAKAWTSTFNPRSLQGNPQARDTREREELVLSYRSTTQSPGVCPEPGDHQSSDEGFNEVLRTVPDLQTDWPTEGGASAGGDGEIELVITDVNLVYTNRIDT

SEQ ID NO: 1019881 - protein, 157 aa, Homo sapiens
  misc_feature (98)..(98): Xaa can be any naturally occurring amino acid
  misc_feature (120)..(120): Xaa can be any naturally occurring amino acid
  misc_feature (129)..(129): Xaa can be any naturally occurring amino acid
  misc_feature (133)..(133): Xaa can be any naturally occurring amino acid
MPRGSRSRTSRMAPPASRAPQMRAAPRPAPVAQPPAAAPPSAVGLFCCCCPGSAGLSGPDGNHCSWLWLWALLWGTHWVTPLLGASVEEVMLRPAKAXDHCPGASGGPAGAAAAALPRVXAGRFLGCAXGAGXHRGSDEGFNEVLKDSARLADGLAY

SEQ ID NO: 1019882 - protein, 167 aa, Homo sapiens
  misc_feature (17)..(17): Xaa can be any naturally occurring amino acid
  misc_feature (19)..(19): Xaa can be any naturally occurring amino acid
  misc_feature (36)..(36): Xaa can be any naturally occurring amino acid
  misc_feature (52)..(52): Xaa can be any naturally occurring amino acid
  misc_feature (54)..(54): Xaa can be any naturally occurring amino acid
  misc_feature (62)..(63): Xaa can be any naturally occurring amino acid
  misc_feature (79)..(79): Xaa can be any naturally occurring amino acid
  misc_feature (82)..(82): Xaa can be any naturally occurring amino acid
  misc_feature (85)..(90): Xaa can be any naturally occurring amino acid
  misc_feature (95)..(98): Xaa can be any naturally occurring amino acid
  misc_feature (124)..(124): Xaa can be any naturally occurring amino acid
  misc_feature (126)..(126): Xaa can be any naturally occurring amino acid
  misc_feature (132)..(133): Xaa can be any naturally occurring amino acid
  misc_feature (138)..(138): Xaa can be any naturally occurring amino acid
  misc_feature (164)..(164): Xaa can be any naturally occurring amino acid
MSKRKLQLLAHQYMISXKXEFYISESLPEYFAPYQXERFRRLGYVSLCDKEXTXCKARELKXXYVDAVGQFLKLIFHQXQVXKKXXXXXXALVAXXXXGDPADFSDESNTASREKLIDHYLGHXSXDPALEXXYARKXDYISPLDDLAFDMYQDPEVAQIIRKXDEK

SEQ ID NO: 1019883 - protein, 142 aa, Homo sapiens
METASLCLAGVSYEIGAEDDQPHHGSPLIPERWPVSFHLVLTQENGILTILKPELLARYYFKAMMKEFRCEPSSQMIEVQEGQNLKNTITGYRTAYSCYGTVSTLNGEPEQGVAMEAVGLNDCRISGEETVTDEEGTFRSRR

SEQ ID NO: 1019884 - protein, 266 aa, Homo sapiens
  misc_feature (13)..(13): Xaa can be any naturally occurring amino acid
  misc_feature (22)..(22): Xaa can be any naturally occurring amino acid
  misc_feature (28)..(28): Xaa can be any naturally occurring amino acid
  misc_feature (30)..(31): Xaa can be any naturally occurring amino acid
  misc_feature (37)..(37): Xaa can be any naturally occurring amino acid
  misc_feature (41)..(41): Xaa can be any naturally occurring amino acid
  misc_feature (47)..(48): Xaa can be any naturally occurring amino acid
  misc_feature (66)..(66): Xaa can be any naturally occurring amino acid
  misc_feature (69)..(72): Xaa can be any naturally occurring amino acid
  misc_feature (74)..(74): Xaa can be any naturally occurring amino acid
  misc_feature (106)..(106): Xaa can be any naturally occurring amino acid
  misc_feature (117)..(117): Xaa can be any naturally occurring amino acid
  misc_feature (131)..(131): Xaa can be any naturally occurring amino acid
  misc_feature (134)..(134): Xaa can be any naturally occurring amino acid
  misc_feature (197)..(197): Xaa can be any naturally occurring amino acid
  misc_feature (199)..(199): Xaa can be any naturally occurring amino acid
  misc_feature (215)..(215): Xaa can be any naturally occurring amino acid
  misc_feature (229)..(229): Xaa can be any naturally occurring amino acid
THLLRQSQRTPSXPNDYVQRVXRTECQXAXXYRGTSXTEAXRARKNXXEPTPHQPGPCALTPCPEXPFXXXXNXSIDRVFRNETLDATHLAEFHQIEGVVRDHGLXLAHLMGVLREXFTKLVSRNSLKPAXNPXTEPSMEVFSYHQGLKKWVEVGNSGVFRPEMLLPMGLPENVSVIAWGLSLEAPNDDQIWHQQYXGXWVGPTKVNLQMVYEQXPLLPPGCRAEAPSXTGGCVTWATLGQVILPESLLCALFASLASDLVFMRPL

SEQ ID NO: 1019885 - protein, 85 aa, Homo sapiens
FSIRIGVHVARVVLDVVGEVLLQHQAELLKEIVHRLLLGRCQFLGITAAAGADPGAEARVGIHQRGAGLAAAAVGDVGVGQLDDG

SEQ ID NO: 1019886 - protein, 48 aa, Homo sapiens
IEALSQSLSGITFICWNQQPPPLRPFSFCRFQQYALHSPGVQHVDTVL

SEQ ID NO: 1019887 - protein, 157 aa, Homo sapiens
AGGRSRLGMEPLGPSPPPPTITESGPGSYAAAGRGGSAGGHFLPVPRADGDAGTGGELLGGPASRALLSCLRPPRGARASPRPPAVLVGPGRVRALQREVLVAPRLQPGTHWAPACRLRPRTRSVGMGPAASPHPGAPGMWQDPALSTSRAPAPRPT

SEQ ID NO: 1019888 - protein, 128 aa, Homo sapiens
SPCRCRGYPVCSSQVCLSVISWFARFHSFLRPGLIPGNRWRKSAVIRHGGGIAGNYQRLGALLATETGDHRAALANVLRAFFAVGDMPAVGDIEQRLIGQQGLDFLEHRQAADARVDYRDRCVTHRVD

SEQ ID NO: 1019889 - protein, 159 aa, Homo sapiens
GGKEPGCPGEGCRRFQARMPRSSRAPLPLLLSRHPGSCPGSYCYCCIATTVAPEWMLGLPGSQLQSVFLSWCSGGLGEWSHGLNALKAELRDWGGMKSSRSEEMQRSRIPSPSPTPTQTQPTNWRVKIKKSYRKHGANDCEMFRFREVRSRGGAEAGVG

SEQ ID NO: 1019890 - protein, 108 aa, Homo sapiens
  misc_feature (62)..(62): Xaa can be any naturally occurring amino acid
  misc_feature (68)..(68): Xaa can be any naturally occurring amino acid
WSPWCPFGLGGARNRRDTSPESACVPSDYTPLPPWCRALTPTPERTPLGRDATGGSRRDNPXKKPRGXTHTHTHTHTHTHTHTFDPLLPSPSAFCDPQVQSCAHVDTQ

SEQ ID NO: 1019891 - protein, 132 aa, Homo sapiens
QLPPGDQGVVLHLLLAARAVGLAHLAAIGVGEHRLDARRHVAGQQRGSAGGGDGGEAAVAQAMGLDQAAGFVVQALEVRRIEDGLVIEREGPLLGGEMGRGAIGRALHGLQPGLHQRHGFIRTVARAAEHEG

SEQ ID NO: 1019892 - protein, 55 aa, Homo sapiens
  misc_feature (7)..(7): Xaa can be any naturally occurring amino acid
  misc_feature (11)..(11): Xaa can be any naturally occurring amino acid
  misc_feature (13)..(13): Xaa can be any naturally occurring amino acid
  misc_feature (20)..(20): Xaa can be any naturally occurring amino acid
  misc_feature (24)..(24): Xaa can be any naturally occurring amino acid
MPVAGLXIRGXAXVDLLGQXLALXRCDGRLALLLEAAVGVRLGSQVLLGAHQQDG

SEQ ID NO: 1019893 - protein, 64 aa, Homo sapiens
YSTKHKCLPPATRPHQCPELALSQLRFNSWASVRGEQCPHLLLSSSLTPSHPLASDPFSTVVPY

SEQ ID NO: 1019894 - protein, 94 aa, Homo sapiens
RVPGPPGNLRAGSPFPPPGFVSPGPFPPPFCGRVRAPGVGGAKWGFPFSFGSGVCMGKSFFPNAVGGRGVGAGGRWGSPCPRFWVGLPAPGVTQ

SEQ ID NO: 1019895 - protein, 119 aa, Homo sapiens
ITLGGGGIGFLDEAADLEAFLVQALAFLDIAKAGLGVGGHQAEGHQPALLGQLPGAVHGVGESLHIVDQVVGGQHQQLCIITVQAAHVQGGGGNGRCGVAPEWLKDEVQFDPGLVQQAL

SEQ ID NO: 1019896 - protein, 152 aa, Homo sapiens
PTVGMNGEGHIMERTHRKLWAPFPFHSALDRLSAIQIKPSVTRKPDRVGISQNSYSVRLHFLRFQQKAILWVSHSKVLMAHSPCKRPDNLSHPSSAHIARLAGIRNLFSWLIDMFLTGPLWKMCNLIWLGTGPSRYSHMTENSRAQYELWRS

SEQ ID NO: 1019897 - protein, 134 aa, Homo sapiens
PTVGMNGEGHIMERTHRKLWAPFPFHSALDRLSAIQIKPSVTRLRFQQKAILWVSHSKVLMGHSPCKRPDNLSHPSSAHIARLAGIRNLFSWLIDMFLTGPLWKMCNLIWLGTGPSRYSHMTENSRAQYELWRS

SEQ ID NO: 1019898 - protein, 109 aa, Homo sapiens
GGGPPWEFGNLVFSPLLPSAPCDFWAHRGILLPSPRSSSSLRDEGGPQWGPLPSFDPSSHQNLGQINLFLYKDPASGFLSEQPKMDSAGVKWGFPPPPKKLYFKILTPS

SEQ ID NO: 1019899 - protein, 144 aa, Homo sapiens
QRSLCHRQVLIHLAQMELEHFGKTLGLQGARQVKTRLAWPRGPEPHPVRPLLQSIRSLSCSNFQCAGSHGFCCLHGCHVGFIGSQSLVDAHHLLEVIDARLTHHAVRIGMRMARLVHEARLRAQVGNHRRNDAHLAHGSGEALR

SEQ ID NO: 1019900 - protein, 80 aa, Homo sapiens
EGVGAKDPRATPVSPPPRGSGLWWPPLLQDSMDQKTPVRGGLSSGTTPWSPVPGTCSPSGLLTSQKLFRGKSRDVGQTVP

SEQ ID NO: 1019901 - protein, 280 aa, Homo sapiens
  misc_feature (245)..(245): Xaa can be any naturally occurring amino acid
  misc_feature (249)..(249): Xaa can be any naturally occurring amino acid
  misc_feature (258)..(259): Xaa can be any naturally occurring amino acid
  misc_feature (261)..(262): Xaa can be any naturally occurring amino acid
VTAACGGNHGCSQSSALRIQSGKPLPDGAFLSGRPGDEGSAGMRNLKKAAKLPVMGLMMGNGVKQWWDLGLRMIIFVAELTYNYGRRETTSLAMTLWESRSLLDRLSATPGSWSGHLTEVAEGVFETEAPGGYKVLFGRIAVWPQSDPVLKVTLAVSDLQKSLNYWCNLLGMKIYEKDEEKQRALLGYADNQCKLEPQGVQGGVDHCTQLLEELAFLGPQKELPDLEDMMKRENQKILTPLVSLXTPGXATVQVVILXXPXXHEICFVGDEAFRELSKMD

SEQ ID NO: 1019902 - protein, 69 aa, Homo sapiens
RSSLRIPPSPTVLHFIKLKQVVDSILTRLVQQIDSAYEEPLVELVTPVPLRTEEGSPDPAFQQAGSLVV

SEQ ID NO: 1019903 - protein, 83 aa, Homo sapiens
LLGWEGVISMEELFADCREMREIRLHRAICGVSGGCCMSWLLNGEGDIGIIAKEARSRCGTSTPDHVSSFVFPALNKDNNAEV

SEQ ID NO: 1019904 - protein, 46 aa, Homo sapiens
MSWLLNGEGDIGIIAKEARSDVGPVPLTTFIGVYFLSQQGQQCEVI

SEQ ID NO: 1019905 - protein, 245 aa, Homo sapiens
  misc_feature (2)..(2): Xaa can be any naturally occurring amino acid
  misc_feature (46)..(48): Xaa can be any naturally occurring amino acid
  misc_feature (50)..(51): Xaa can be any naturally occurring amino acid
  misc_feature (73)..(75): Xaa can be any naturally occurring amino acid
  misc_feature (77)..(78): Xaa can be any naturally occurring amino acid
  misc_feature (82)..(82): Xaa can be any naturally occurring amino acid
  misc_feature (89)..(89): Xaa can be any naturally occurring amino acid
  misc_feature (92)..(94): Xaa can be any naturally occurring amino acid
  misc_feature (98)..(99): Xaa can be any naturally occurring amino acid
  misc_feature (126)..(126): Xaa can be any naturally occurring amino acid
  misc_feature (157)..(157): Xaa can be any naturally occurring amino acid
  misc_feature (160)..(160): Xaa can be any naturally occurring amino acid
  misc_feature (170)..(170): Xaa can be any naturally occurring amino acid
  misc_feature (177)..(177): Xaa can be any naturally occurring amino acid
  misc_feature (183)..(183): Xaa can be any naturally occurring amino acid
GXPPLSPWPPPGGGARPPPAPAPVSSGPSLLSLCGRLVPALPVRSXXXGXXPGRPGARAPPSCPGPRSPPPVXXXPXXRVPXASWRGGXGGXXXGAAXXRGARGEARPCPVFVGRLWGGIACVPLXPGGPASPSSPPRTVFWAEAGRGRGGGGGQGXPPXFRAHPLLRTXRLAQASXLCLLIXGGRSPSPPLPSPLPSPARYGPSGPSLSPSFVWSPLLVWNLFASEAISPCFVYTTALVAFGFC

SEQ ID NO: 1019906 - protein, 101 aa, Homo sapiens
HGCAHRNNGRIPVRAVPKHRRCKIFNLVSRQGKNICGSDSDFVIWDQDAVKIVSAKNHQSAAEYNIFEGMELRGAPLVVICQGKIMLEDGNLHVTQWFTDF

SEQ ID NO: 1019907 - protein, 132 aa, Homo sapiens
  misc_feature (6)..(6): Xaa can be any naturally occurring amino acid
ERRARXRIRAEARGAGHLERRRLHLLGDVHEIGTPIRVIAVHLLVRLPIGARRGDAARRIRGLFEITRGPRRDVGRQEIIERDGHRTGHAEVPIILIGIRVVRVVLARAFGFYDLIDDAGVERSRRQARVCR

SEQ ID NO: 1019908 - protein, 35 aa, Homo sapiens
EIEFTISPPLSPSSSSSSGASTYFRATLAGPLCTI

SEQ ID NO: 1019909 - protein, 112 aa, Homo sapiens
VNPIAVNSLCDVFTENKRVVSIISTAAFGKVAFVAIGATMVGSITFTREEGDYVQKGEEFGYFSFGGSTVICVFEKDVIKLDDDLLDNSMRSLETLVRVGMTLGVSTKTDGR

SEQ ID NO: 1019910 - protein, 185 aa, Homo sapiens
FGPRAQGRPFRPNGLLDKAASNVIASLTCGRRFEYDDPRFLRLLDLAQEGLKEESGFLREVLNAVPVLLHIPTLAGKVLRFRDPDQTPRDLTEAFLAEMEKAKGNPESSFNDENLRIEVADLCSAGMETTSTTLAWGLLLMILHPDVQREPIWAVQGPREEGYRRGPMNFAGTPGAPSTGLTRIL

SEQ ID NO: 1019911 - protein, 185 aa, Homo sapiens; identical to SEQ ID NO: 1019910

SEQ ID NO: 1019912 - protein, 308 aa, Homo sapiens
FGPRAQGRPFRPNGLLDKAASNVIASLTCGRRFEYDDPRFLRLLDLAQEGLKEESGFLREVLNAVPVLLHIPTLAGKVLRFRDPDQTPRDLTEAFLAEMEKAKGNPESSFNDENLRIEVADLCSAGMETTSTTLAWGLLLMILHPDVQRRVQQEIDDVIGQVRRPEMGDQAHMPYTTAVIHEVQRFGDIVPLGVTHMTSRDIEVQGFRIPKGTTLITNLSSVLKDEAVWEKPFRFTPTLPGCPGPLCEAGGLPAFLSRPRACLGEPLARMELFLFFTSLLQHFSFSVPTGAAPGTICHPWVIFAFPYG

SEQ ID NO: 1019913 - protein, 185 aa, Homo sapiens; identical to SEQ ID NO: 1019910

SEQ ID NO: 1019914 - protein, 185 aa, Homo sapiens; identical to SEQ ID NO: 1019910

SEQ ID NO: 1019915 - protein, 70 aa, Homo sapiens
  misc_feature (3)..(3): Xaa can be any naturally occurring amino acid
LTXLRWGASSNPPVPNRGHCAGLAVIAVVVIGAVVAAVMCRRKSSGGKEGSYSQAACSDSAQGFDVSLTA

SEQ ID NO: 1019916 - protein, 128 aa, Homo sapiens
FHVCGKMLSSAYISDHMKVHSQGPHHVCELCKQRYLVRYGPMCGRPAAAGRTAADSGLASMQDPPTGCGLPLGGGRAVPVSSQTTSLPTLVSSKIGCRGRGENGVESLGYRAPLPTSCTHQIRIYLPN

SEQ ID NO: 1019917 - protein, 110 aa, Homo sapiens
TAFGGQLPPVAPGRWARQFFVSLLVEGAHLDQARVHPFIEQLDGFALAGPFNAVDQDDHREALLLLQLILHFQQGFAQRRHLGVIGVFVNGVTDFGGFEHGQLRFKMAQD

SEQ ID NO: 1019918 - protein, 307 aa, Homo sapiens
AVTGPTFAVLQRRQRAESTMSGGPMGGRPGGRGAPAVQQNIPSTLLQDHENQRLFEMLGRKCLTLATAVVQLYLALPPGAEHWTKEHCGAVCFVKDNPQKSYFIRLYGLQAGRLLWEQELYSQLVYSTPTPFFHTFAGDDCQAGLNFADEDEAQAFRALGAGEDTKKESEAKWRQTASYPPPPKPANEERRGGLPPLPLHPGGRPREALQWVRSPWGWLTVDIQNPDITEFTITVGSQHLDLAQLIRNAQGRRRSSKADIGAPSGFTLSSQWVWTPRMGFVRVQPSTQKHGKLGLPAGIREDRYTKP

SEQ ID NO: 1019919 - protein, 100 aa, Homo sapiens
CERRKGFTVSVVAHGSSETNFFMNTSAKIVCLAWSPDNEHFASGGMDMMVYVWTLSDPETRVKIQDAHRLHHVSSLAWLDEHTLVTTSHDAFVKEWTITY

SEQ ID NO: 1019920 - protein, 42 aa, Homo sapiens
EGGGPTGSPGGSCRPRASQFVPAIYCLRPSLLHFVFVFHTEV

SEQ ID NO: 1019921 - protein, 168 aa, Homo sapiens
LSEDTQGDAVQKTETFHHEQDHPTFNTITPNLSEFAFRAIHASCGHQSNSTNIFFSPVSIATGFAMVFLGTKADTYEEILEGLNFNLTEIPEAQIHEGFQELLHITSNQADRQLQLTTGNGLFLNEGLKLVDKVLEEGEVDHSEAFTVNFGDTEEGQQINDYVEKGLG

SEQ ID NO: 1019922 - protein, 89 aa, Homo sapiens
AYGKAKHDKYMADMDELFSQVDEKRKKRDIPDYLCGKISFELMREPCITPSGITYDRKDIEEHLQRVGHFDPVTQSPLTQDQLIPNYGL

SEQ ID NO: 1019923 - protein, 119 aa, Homo sapiens
AYGKAKHDKYMADMDELFSQVDEKRKKRDIPDYLCGKISFELMREPCITPSGITYDRKDIEEHLQPGEGCGSGSRATGMVLGPHDGPRPFIVTSRVWVIVDPVTQSPLTQDQLIPNYGL

SEQ ID NO: 1019924 - protein, 83 aa, Homo sapiens
IRGRVDLFFQAQARKAAVERQAVLHVGHVRFGEHRGEWQVDFHFLERFRHLFAFEAMDFFLQKLEVHLVAHAADVAALRAAER

SEQ ID NO: 1019925 - protein, 68 aa, Homo sapiens
  misc_feature (19)..(19): Xaa can be any naturally occurring amino acid
HGDAGTPQQPLLHFGHIDXARSKMLVGALIIVVPFSVTGLCDADPFQASAVIMSYPPILSTVTPPLII

SEQ ID NO: 1019926 - protein, 70 aa, Homo sapiens
MVAKLRAFHPEAQVNPERINLNWIGLDFINGTPRDNKQAGVFEPTIVEVKRLPFATEAAITILRLDDHVA

SEQ ID NO: 1019927 - protein, 130 aa, Homo sapiens
MWLLALCLVGLAGAQRGGGGPGGGAPGGPGLGLGSLGEERFPVVNTAYGRVRGVRRELNNEILGPVVQFLGVPYATPPLGARRFQPPEAPASWPGVRNATTLPPACPQNLHGALPAIMLPVWFTDNLEAA

SEQ ID NO: 1019928 - protein, 128 aa, Homo sapiens
RLDSLTHLFVWRSASIRNVLGLFESASPESPYFSSSFMARFSIAFIPLQGAISSGRPFTTHPSTHLSSIFTFRWSLALSSRLKRSRHDLSSLQPPPPGYKRFSCLSLLSSWNNRHPSPCLANCVRHHP

SEQ ID NO: 1019929 - protein, 102 aa, Homo sapiens
MGHDVDDPHSFHQSKLTNEDFRKLLMTPGCHLPLHQLLSHVTMRCQGSTMRMKTQLHEGRTHTKELLCQAEAKQRNERERELAEKYRDRAKDTGEMAVNHSL

SEQ ID NO: 1019930 - protein, 113 aa, Homo sapiens
  misc_feature (4)..(4): Xaa can be any naturally occurring amino acid
  misc_feature (46)..(46): Xaa can be any naturally occurring amino acid
TRCXKTTEGDAIGIMSGRGKGGKAWGRVVLAPRKLLRDNIRALQNXYPAGLGAVASSAFPVLSMRRLEVCLGLENVIRDAVTYTEHAKRKTVTAMDVVYALKRQGRTLYGFGG

SEQ ID NO: 1019931 - protein, 49 aa, Homo sapiens
MAATTSIDTDRGQLNSNKPRTTTTLTASDRSKPSKSTHRPERARTPPAR

SEQ ID NO: 1019932 - protein, 50 aa, Homo sapiens
  misc_feature (11)..(11): Xaa can be any naturally occurring amino acid
SVDGGWVVNPXAADSSRGYFLVDEADAASRQFQILPLPPGTYSGIDFLVG

SEQ ID NO: 1019933 - protein, 129 aa, Homo sapiens
  misc_feature (82)..(82): Xaa can be any naturally occurring amino acid
  misc_feature (86)..(87): Xaa can be any naturally occurring amino acid
  misc_feature (107)..(107): Xaa can be any naturally occurring amino acid
  misc_feature (124)..(124): Xaa can be any naturally occurring amino acid
MAQEKMELDLELPPGTGGSPAEGGGQRRRLGGLRRSNSAPLIHGPQMTSSPVFQVRGAERHGGTAQLFLEAATACCCRPPLXAAQXXLAPKQTRKGQENLNTTEEEXSTNGEGADPQMQKKPLXGKEKI

SEQ ID NO: 1019934 - protein, 131 aa, Homo sapiens
MAQEKMELDLELPPGTGGSPAEGGGSGGGWVASGGLTASPLIHGPQMTLRRMFQVRGAETPWRNSTAVPRGRHVHCLADRVAPPVPACHSEVDLTPASTQRMRAWCLINRETVHATVRCYDLQSATIKPTS

SEQ ID NO: 1019935 - protein, 305 aa, Homo sapiens
  misc_feature (3)..(3): Xaa can be any naturally occurring amino acid
  misc_feature (21)..(21): Xaa can be any naturally occurring amino acid
  misc_feature (33)..(33): Xaa can be any naturally occurring amino acid
  misc_feature (46)..(46): Xaa can be any naturally occurring amino acid
  misc_feature (48)..(48): Xaa can be any naturally occurring amino acid
  misc_feature (96)..(96): Xaa can be any naturally occurring amino acid
  misc_feature (202)..(202): Xaa can be any naturally occurring amino acid
  misc_feature (249)..(249): Xaa can be any naturally occurring amino acid
  misc_feature (255)..(255): Xaa can be any naturally occurring amino acid
  misc_feature (258)..(258): Xaa can be any naturally occurring amino acid
  misc_feature (302)..(302): Xaa can be any naturally occurring amino acid
RAXDLGAQLPQQKHTFIRTHXPPPDTPPGLWNXPRVLLLSQPLDRXQXLPSPPPGFLAPWTPTAPLDFLVPEGGRMGRGAVVEGGGGGRSGGRGSXVGPGRLGLGRNPSKGENLRGLKGTRGLLWRRLGEPTVGWKEKPSLMLFRTEGATYVKPRKAWLALSLRAVSSGLFTGVCVVKRVSNWLTSSSDCRKGLKGGSTRQXRRSSQYMFRKKGCLCTPAASPGPPPIRWLGFRFRNFLTRSRASGCEXGGQSQXAPXELIHGFLPVLCGKGRRSSKHVVHKGPQAPPVHSPRCCHCAPESXGPC

SEQ ID NO: 1019936 - protein, 79 aa, Homo sapiens
  misc_feature (12)..(12): Xaa can be any naturally occurring amino acid
RGRSLVVHLKTXVSKESPRAERGPHSSIVTVLKTGFELRRLAHLSGRRGLMIPDLRRRVPMGVTGLALPSNRAPPPSGR

SEQ ID NO: 1019937 - protein, 100 aa, Homo sapiens
FQSQQNSQGGGTVMITSTSQTKGFVFPSIFLLLPFFQKVMWGGEGGPCGPGAQLPGTRVPGKAHLEEESLPPPKYWAALSLPRDHPSLPVMCTIMTNLFG

SEQ ID NO: 1019938 - protein, 111 aa, Homo sapiens
MEHLYRLSRVIQEILAGQTELGNHVVGAGDDMAADIIRLEDVQHLTRAGPQQFRLGIGGKNVPAPTHMRHRVDARIRYTPRENRNDARHILVQHLGNGRDLLRRHDRRDIE

SEQ ID NO: 1019939 - protein, 56 aa, Homo sapiens
MEDEQLKVWDVIGRCLIIDEGEDDLGRGGIPYPRSQGTPGRGWPVPSLHAPLAYST

SEQ ID NO: 1019940 - protein, 205 aa, Homo sapiens
  misc_feature (1)..(1): Xaa can be any naturally occurring amino acid
  misc_feature (43)..(43): Xaa can be any naturally occurring amino acid
  misc_feature (78)..(78): Xaa can be any naturally occurring amino acid
  misc_feature (89)..(89): Xaa can be any naturally occurring amino acid
  misc_feature (103)..(103): Xaa can be any naturally occurring amino acid
  misc_feature (170)..(171): Xaa can be any naturally occurring amino acid
XIARNPPEFAFVEFEDPRDAEDAVRELDGKVICGSRVRVELSXGMPRRSRFDRPPARRPFDPNDRCYECGEKGHYAYXCHRDSRRRRSXSRSRSHSRSRGRRXSCHAAGAGDEAQAQHLPDDQDLSPSVDQDQLHPEDLALVLLKDRGIPNSRRGQDPDPGLFHDPEAAXXSPALHLQKEVVPHQEAPAEVQVLKEWTEALKFTL

SEQ ID NO: 1019941 - protein, 115 aa, Homo sapiens
  misc_feature (4)..(4): Xaa can be any naturally occurring amino acid
  misc_feature (39)..(40): Xaa can be any naturally occurring amino acid
  misc_feature (43)..(46): Xaa can be any naturally occurring amino acid
  misc_feature (55)..(55): Xaa can be any naturally occurring amino acid
  misc_feature (65)..(65): Xaa can be any naturally occurring amino acid
  misc_feature (68)..(68): Xaa can be any naturally occurring amino acid
  misc_feature (72)..(72): Xaa can be any naturally occurring amino acid
  misc_feature (76)..(76): Xaa can be any naturally occurring amino acid
  misc_feature (79)..(80): Xaa can be any naturally occurring amino acid
  misc_feature (86)..(86): Xaa can be any naturally occurring amino acid
PSRXPPPPPPPPPPPPPPRPGPPPPPPPPPPPPAPSPPXXPDXXXXGGLGRGRGXGRGVAHPQRXQDXDPGXFPDXEAXXQSPDPXPQKEVVPHQEAPAEVQVLKEWTEALKFTL

SEQ ID NO: 1019942 - protein, 180 aa, Homo sapiens
  misc_feature (1)..(1): Xaa can be any naturally occurring amino acid
  misc_feature (43)..(43): Xaa can be any naturally occurring amino acid
  misc_feature (78)..(78): Xaa can be any naturally occurring amino acid
  misc_feature (89)..(89): Xaa can be any naturally occurring amino acid
  misc_feature (103)..(103): Xaa can be any naturally occurring amino acid
XIARNPPEFAFVEFEDPRDAEDAVRELDGKVICGSRVRVELSXGMPRRSRFDRPPARRPFDPNDRCYECGEKGHYAYXCHRDSRRRRSXSRSRSHSRSRGRRXSCHAAGAGDEAQAQHLPDDQDLSPSVDQDQLTQRSRSGSIKDRGIPNSRRGQDPDPGLFHDPEASFPIRKPPQKCKS

SEQ ID NO: 1019943 - protein, 156 aa, Homo sapiens
DLQKFKKILVAKSKRDTGDLVCTQVDVKIFDGIPVISTPPCGDNCVAPPTQNPTGTGDNGPDHQCGGTSGGELPKPRSASNFRSCGLPVNVATGAMWHQFIDFSIPGRTPDTEISFVRTYTSSPAQQPGPLGIRWQHNYQTHIERSSVPGSQDLSW

SEQ ID NO: 1019944 - protein, 336 aa, Homo sapiens
PLFPGFSRVLLITRSPARTICGIPAGRGHCRFWKMAKFMTPVILGLSPQAGVPVAVPEQFRGYALPASSAKEIGLERLQDWTGATYQDKRYTNKYSSQFGGGSQYAYFHEEDESSFQLVDTARTQKTAYQRNRMRFCPEEPPQRQRSSEHVAVQPEESCLRSANRRRENAFDCEHKVPETTWGLGTRMGSRNHRNPETLQLQFVVSAEVREGVDLPQFDDKCHLQVSEPQDIECVGPRIRTTKPLNASHVAWSTAKGKAHFRVSPQMTLYPKCKTREFVGMLHLAHDEYRHGFVNVPSGHPLQRNVCSKDGPKRSNGGGDTTSGGTRRNIRAVSPP

SEQ ID NO: 1019945 - protein, 253 aa, Homo sapiens
  misc_feature (14)..(14): Xaa can be any naturally occurring amino acid
  misc_feature (20)..(24): Xaa can be any naturally occurring amino acid
  misc_feature (26)..(26): Xaa can be any naturally occurring amino acid
  misc_feature (28)..(28): Xaa can be any naturally occurring amino acid
  misc_feature (32)..(32): Xaa can be any naturally occurring amino acid
  misc_feature (35)..(35): Xaa can be any naturally occurring amino acid
  misc_feature (37)..(37): Xaa can be any naturally occurring amino acid
  misc_feature (41)..(41): Xaa can be any naturally occurring amino acid
  misc_feature (43)..(43): Xaa can be any naturally occurring amino acid
  misc_feature (46)..(46): Xaa can be any naturally occurring amino acid
  misc_feature (48)..(48): Xaa can be any naturally occurring amino acid
  misc_feature (50)..(50): Xaa can be any naturally occurring amino acid
  misc_feature (52)..(55): Xaa can be any naturally occurring amino acid
  misc_feature (57)..(58): Xaa can be any naturally occurring amino acid
  misc_feature (60)..(60): Xaa can be any naturally occurring amino acid
  misc_feature (62)..(63): Xaa can be any naturally occurring amino acid
  misc_feature (66)..(66): Xaa can be any naturally occurring amino acid
  misc_feature (68)..(68): Xaa can be any naturally occurring amino acid
  misc_feature (72)..(72): Xaa can be any naturally occurring amino acid
  misc_feature (75)..(75): Xaa can be any naturally occurring amino acid
  misc_feature (77)..(77): Xaa can be any naturally occurring amino acid
  misc_feature (79)..(79): Xaa can be any naturally occurring amino acid
  misc_feature (81)..(81): Xaa can be any naturally occurring amino acid
  misc_feature (85)..(90): Xaa can be any naturally occurring amino acid
  misc_feature (99)..(99): Xaa can be any naturally occurring amino acid
  misc_feature (104)..(105): Xaa can be any naturally occurring amino acid
  misc_feature (107)..(107): Xaa can be any naturally occurring amino acid
  misc_feature (116)..(116): Xaa can be any naturally occurring amino acid
  misc_feature (119)..(119): Xaa can be any naturally occurring amino acid
  misc_feature (121)..(121): Xaa can be any naturally occurring amino acid
  misc_feature (123)..(123): Xaa can be any naturally occurring amino acid
  misc_feature (125)..(125): Xaa can be any naturally occurring amino acid
  misc_feature (127)..(128): Xaa can be any naturally occurring amino acid
  misc_feature (130)..(130): Xaa can be any naturally occurring amino acid
  misc_feature (143)..(143): Xaa can be any naturally occurring amino acid
  misc_feature (165)..(165): Xaa can be any naturally occurring amino acid
  misc_feature (245)..(245): Xaa can be any naturally occurring amino acid
MTRVCFQQNKNIQXKWKGGXXXXXGXGXGAGXEGXSXVWFXGXLGXRXGXHXXXXGXXWXGXXQGXKXGGVXEGXGXVXKXCALXXXXXXERWLRWVMXFCLSXXTXSAEEAGGTXEGXVXGXEXVXXVXQAREASSLGFRDXVAASRFRSRLRSTLMRSWSSMXMGDTGGVASRLRASGTFCGSSLKVEAPRPKPSCAVVATGEGRRVWEVADGGRRVRAPGPDGSPGAFRGRRGWGVAAEVGXTGGGSGPA

SEQ ID NO: 1019946 - protein, 105 aa, Homo sapiens
MASGSWQEDNNARRGWAESCASSQGPGCSGQGQGGSFSGHRCPAPGGGPATGLARWPQALRTQGRPRIYGKEGAEHLSLGTSRDRHCPQQPQLPPIKGTDAAPCL

SEQ ID NO: 1019947 - protein, 316 aa, Homo sapiens
  misc_feature (237)..(237): Xaa can be any naturally occurring amino acid
LSPREQTVSLLCPRVRRSPPAAPWRATTVPDQQKLQDLKDTANRLRISSIQATTAAGSGHPTSCCSAAEIMAVLFFHTMRYKSQDPRNPHNDPLVLFQVAMQLPILYAVVGVKLVSMAEAALLNLRKIRSDLDGHPVPRQVFTDVWHWSLGQGLGCRVVRDGYTGKYFCIIGHAYRVYCLLGDGELSEGSVWEAMAFQIYKLDNLVAILDINRLGQKWTWPVQHQMDIYQKRCEASXGMHHRWLDTSVEELVQALARQAPATAFCRPKGEERDKKELVEPPKRGDTRIASRRICPQEPVVVRPGKPGAEVHRALKG

SEQ ID NO: 1019948 - protein, 155 aa, Homo sapiens
  misc_feature (144)..(144): Xaa can be any naturally occurring amino acid
  misc_feature (154)..(154): Xaa can be any naturally occurring amino acid
GCRRGSRRYLCCVRVCAGPRLPHHGELPQCLTSRSCRILKDTANRLRISSIQATTAAGSGHPTSCCSAAEIMAVLFFHTMRYKSQDPRNPHNDPLVLFQVAMQLPILYAVVGVKLVFMAEAALLNLRKIRSDVGRAPFRVSTSXQWLLGGSGAXG

SEQ ID NO: 1019949 - protein, 80 aa, Homo sapiens
  misc_feature (7)..(7): Xaa can be any naturally occurring amino acid
VEPGDHXHAEVLRLGRGHVTAVRADIRRRHQDAEVRRPGHRVERVEHTFRHRVGRIVDPAHVLAELVQKSVTEAMAAARI

SEQ ID NO: 1019950 - protein, 68 aa, Homo sapiens
  misc_feature (68)..(68): Xaa can be any naturally occurring amino acid
MQKSALSFSCLGFWNLGWVPCSCITFSTELLSVALGNHHSSSSRAKMPGGPAGFSMRSMQGCRVKANX

SEQ ID NO: 1019951 - protein, 84 aa, Homo sapiens
HTDCRIDDQRPENRDGYVDSTLRPNKATADTISATVIEYSCVLPPTARAKLVRDALALTGNAWTRPAAAFAIPSARNSLFGLTS

SEQ ID NO: 1019952 - protein, 113 aa, Homo sapiens
MGGFDGQEPGDPDGLLQDHLEKVVLCVHVRVVGDDVERGAPGHHLKHEDSQRPPVHAEPVLLSPQIFGGDVIRGSAESARCVTRAQAFLAHAVVCELDVPVRIQEDVVQLQVL

SEQ ID NO: 1019953 - protein, 76 aa, Homo sapiens
MASNMDREMILADFQACTGIENIDEDYYTCLNNNNWDLVSSLSTGVSTTWKNGILQSAIWKVRPYQDLHLIQKVIQ

SEQ ID NO: 1019954 - protein, 76 aa, Homo sapiens; identical to SEQ ID NO: 1019953

SEQ ID NO: 1019955 - protein, 238 aa, Homo sapiens
MTFLRWLRSKNDVLSRSNVCINGNHVYLEQPEAKGEIKDEQPVLLPIPQGLQKEAFVLFYREPGGWVLEVSLLKRGGLSSDRQLSESSTKDSLKSMTLPSYRPAPLVSGDLRKNMVPANSEATKEAKESKKPESRRSSLLSLMTGKKDVAQGSEGENPLTVPGREKEGMLMGVTPGEDASGPAEDLVRRSEKELQLLSPDRQVLELFEDVRYEPELDRSSLNETQFLSEAPQTNCSPI

SEQ ID NO: 1019956 - protein, 113 aa, Homo sapiens
PSEEFPKTLRAGFDRAKMATPMHRLIARRQAVSKDPVRVHWRAGSGETRVNGLVSDPYWDRRRMSVSQTLFWLPGGSGPGDKSGDRGLADFAEDSRVKSAARDRAGFEDNCRV

SEQ ID NO: 1019957 - protein, 40 aa, Homo sapiens
VLEDPVLDEDKADHGTRQTPAARNKTRVVSYRVPTTKRYL

SEQ ID NO: 1019958 - protein, 40 aa, Homo sapiens
GAKILPAALTTCILTGIQRITIAAQGEQQSEENAITKKLD

SEQ ID NO: 1019959 - protein, 133 aa, Homo sapiens
FSYTKFSREKLDTLVEFPIRDLDFSEFVIQPQNESNPELYKYDLIAVSNNYGGMGDGHYTTFACNKDTGQWHYFDDNSVSPVNEIQIESKAAYVFFYQRQDVARRLLSPAGLFGAPASPACSSPPSFEFMDVN

SEQ ID NO: 1019960 - protein, 93 aa, Homo sapiens
CAGSAKVESLGIALLEAVESDDPTALIGLPLIRTCALLRRAGLEPPGMNKGRIILMPNTLDFGVDDSLDLREVLPQRVIEQAARLTHWAAENA

SEQ ID NO: 1019961 - protein, 113 aa, Homo sapiens
VEVDDLIQVGLIGLTDELSRFDAEQGVQFETFATQRIRGAMLDELRGGDWMSRGTRRQQREIEVAVHKVEQRLGRAPSEAEIAAEMGPPLTEYQELLSKVRGTQLVYLEDMSG

SEQ ID NO: 1019962 - protein, 115 aa, Homo sapiens
  misc_feature (7)..(7): Xaa can be any naturally occurring amino acid
  misc_feature (31)..(31): Xaa can be any naturally occurring amino acid
RGQVGPXLQLPACFSGTSRQAAQALGLISNXRHAAADHTQPTCPSLTRGPLSSRAQSGSRAQTQPPGAAHHGCGNFQASAQSPAWGQHGGQHAGRWGLGPARMPPRPPPTSTTIY

SEQ ID NO: 1019963 - protein, 106 aa, Homo sapiens
GAVSGAGMRPEVGAVARTTGLPGGPRTLARDCLQPCPAPWARESATRPPPPSLRVRDRPATLYRTSTPRARARAFPVRPVRSRALPLRPQGAGAHRPTPTSRCMQW

SEQ ID NO: 1019964 - protein, 70 aa, Homo sapiens
  misc_feature (67)..(67): Xaa can be any naturally occurring amino acid
PLKEEGGHGIAQVYGELADVEEGVLVGHNRLQGQQLHQGPSALNSDEVGGHQRDGLNLHVPDITVMXTFA

SEQ ID NO: 1019965 - protein, 93 aa, Homo sapiens
PLKEEGGHGIAQVYGELADVEEGVLVGHNRLQGQQLHQGPSALNSDEVGGHQRDGLNLHVPDIAIDICIDGIVYMENVSFIDRQIDETMVAST

SEQ ID NO: 1019966 - protein, 246 aa, Homo sapiens
EREPGELTLSQPAGVPEAVAAVDVGPDARTVAPAAAMADSGTAGGAALAAPGPLGLVQWLCPVTTLSTFMMPPRGLQGEVALGVVRDDEGPMLKAAKGNVTGQCMTRKRSYGRCLNLKEWILEQLTRLYELPGKMEIPKLEIDLDELLDMEDVTMPGVARVQEELLDLTVTKPTEAFISGLLDKIRGMQKLSTPQEEVRVPDPGRTVAPTGQFAAPNLRSNSITGDLRPGLVHEQALVPCQGLFLP

SEQ ID NO: 1019967 - protein, 214 aa, Homo sapiens
MNEKDMAEGHPVVLNGGRVKNSWYRQHPQPYIFPDSPWGAPLYERYRLASKGTPVEVVLSDELDRPSEKKDNSIPDYFVSREEQLEEICGGKACGDEMVNAAAGRKRHHGGPLTEALAPCARKEGDLPPTVRGILVSQTLESGPCKKERDLITFMLASEICYRNMHLPLDKNSGGKCSTRELTQRIQKPRGHFLCRGPANIGTHVAGCKPVFRA

SEQ ID NO: 1019968 - protein, 214 aa, Homo sapiens
MNEKDMAEGHPVVLNGGRVKNFWYRQHPQPYIFPDSPWGAPLYERYRLASKGTPVEVVLSDELDIPSEKKDNSIPDYFVSREESPGRNLRMGKPGNEMVNAAAGWKRHHGGPLTEALAPCARKEGDLPPTVRGILVSQTLESGPCKKERDLITYMLASEICYRNMHLPLDKNSGGKCSTRELTQRIQKPRGHFLCRGPANIGTHVAGCKPVFRA

SEQ ID NO: 1019969 - protein, 263 aa, Homo sapiens
MDEDGAVFSHQQKVLRLYKRALRHLESWCVQRDKYRYFACLMRARFEEHKNEKDMAEGHPVVLNGGRVKNFWYRQHPQPYIFPDSPWGAPLYERYRLASKGTPVEVVLSDELDIPSEKKDNVYLITLSPEKNQLEEICGGKGCGDEMVNAAAGWKRHHGGPLTEALAPCARKEGDLPPTVRGILVSQTLESGPCKKERDLITYMLASEICYRNMHLPLDKNSGGKCSTRELTQRIQKPRGHFLCRGPANIGTHVAGCKPVFRA

SEQ ID NO: 1019970 - protein, 95 aa, Homo sapiens
MLHPNCGRSLPPLEPSSSIHPQSPACRRDCSCLDSIFHPVCGDNGIEYLSPCHAGCSNINMSSATSKQLIYLNCSCVTGGSASQRQDRALSPGPT

SEQ ID NO: 1019971 - protein, 236 aa, Homo sapiens
MNTHPFYCLQRAPATADEARKLEEAKSRGSLVDFIKRFPCIFLRLLMNSLFVLVVLAQCTFSSVIAGLSTFLNKFLEKQYGTSAAYANFLIGAVNLPAAALGMLFGGILMKRFVFSLQAIPRIATTIITISMILCVPLFFMGCSTPTVAEVYPPRAIKFYTSQSPACRRDCSCLDSIFHPVCGDNGIEYLSPCHAGCSNINMSSATSKQLIYLNCSCVTGGSASQRQDRALSPGPT

SEQ ID NO: 1019972 - protein, 286 aa, Homo sapiens
  misc_feature (6)..(6): Xaa can be any naturally occurring amino acid
HDPVFXEADPPVNTAAVNLVPGDPRWIGAWWLGLLISSALLVLTSFPFFFFPRAMPIGAKRAPATADEARKLEEAKSRGSLVDFIKRFPCIFLRLLMNSLFVLVVLAQCTFSSVIAGLSTFLNKFLEKQYGTSAAYANFLIGAVNLPAAALGMLFGGILMKRFVFSLQAIPRIATTIITISMILCVPLFFMGCSTPTVAEVYPPRAIKFLHPQSPACRRDCSCLDSIFHPVCGDNGIEYLSPCHAGCSNINMSSATSKQLIYLNCSCVTGGSASQRQDRALSPGPT

SEQ ID NO: 1019973 - protein, 48 aa, Homo sapiens
GVPASRLHPAQRRRLVLVAPRSPELLDDTARANIVLDSQTTVARLNAV

SEQ ID NO: 1019974 - protein, 115 aa, Homo sapiens
TSGAKFRKGHSASSSSRNFLTASFESLFSSCGLLSHLLASTMHAQPDSPTRRAIRESCVVMPCSASTTRSAMSELSRLRVAYITPRSSTSFSRLAWRRIPAVSTSRKRRPWRSIS

SEQ ID NO: 1019975 - protein, 90 aa, Homo sapiens
VFGYPNITGAQMNRNALTFEDVLDGGADIVVFARGQSGPAFDHRDLGAEPAEHLREFQADVAAADDDQMLWHRVEFEDADIREVVDAAAK

SEQ ID NO: 1019976 - protein, 111 aa, Homo sapiens
MQTICYAISFSATTLEFPQPECNCKVFIFNSFIPSIKASMTSSRHISSNLQTIVLHSIESQFYPLHSIVPQVLGSLVAPFIYQFIHFQVLCPVELACFKKVPIAQALETIP

SEQ ID NO: 1019977 - protein, 286 aa, Homo sapiens
  misc_feature (4)..(4): Xaa can be any naturally occurring amino acid
  misc_feature (41)..(41): Xaa can be any naturally occurring amino acid
  misc_feature (44)..(44): Xaa can be any naturally occurring amino acid
  misc_feature (54)..(54): Xaa can be any naturally occurring amino acid
  misc_feature (67)..(67): Xaa can be any naturally occurring amino acid
  misc_feature (69)..(69): Xaa can be any naturally occurring amino acid
  misc_feature (74)..(74): Xaa can be any naturally occurring amino acid
  misc_feature (83)..(83): Xaa can be any naturally occurring amino acid
  misc_feature (285)..(285): Xaa can be any naturally occurring amino acid
QQEXQHIDYRFRCILQNGLVFIGTFKAFNKNMNLILCNFDXFRXFKPKNSKQAXREKKRVLVLGLLXGXNLFSXTEEGPPPKXTVIARVPLAGAAVGPEIGSVCWQRNPELVVPMPQAPAGLAGAISVGLVGAIPIMVMTPQEKEVLLQPLLLLTRASYCRGSKPVLTLASGGPPPPYGPQEHPSPGMYVALRLWFEASYGSPNVDPPWKRDSTGHAPSGNCGLLPLGCEAFFDPWPQSMEVAPQRRGLDSSGPRYHRPVCFLCCCSWILMGFSGFPYRAPSPGXA

SEQ ID NO: 1019978 - protein, 203 aa, Homo sapiens
  misc_feature (1)..(1): Xaa can be any naturally occurring amino acid
  misc_feature (28)..(28): Xaa can be any naturally occurring amino acid
  misc_feature (34)..(34): Xaa can be any naturally occurring amino acid
  misc_feature (149)..(149): Xaa can be any naturally occurring amino acid
  misc_feature (156)..(156): Xaa can be any naturally occurring amino acid
  misc_feature (186)..(186): Xaa can be any naturally occurring amino acid
XPDTVPFALVSWLAVRAHTKGGLRFNAXAPASCXGQPIFQGSSEVFSLNWPLLPAAWPLACSSKSCRCRMGSFSSVYALHISFFMTNSSEGSVRPSLERCHLAQGSLSVGDTDECRIDASHFQELPNKLVKEPGCGPRWRAFNSFCHTXIIKNFAXFFSFKEVRFWQLHPQGFLKLFYHVDSPEGXGEVNIVGFSPLGILGGR

SEQ ID NO: 1019979 - protein, 67 aa, Homo sapiens
PQQTQLQDHPPYHWESASLLRSEETKENEGFTVTAEGKGQGTLSVVTMYHAKGQRSTSPDNNIRTSR

SEQ ID NO: 1019980 - protein, 174 aa, Homo sapiens
MVKPLASQKARVNQAYFACEKNETWLPTSSLSQNFDDEVIPGTQAPEAPPLPLMCHESFIKGQYIDIHVYLRNGKKNPKFFKKPSQPVQLPVLLKWPPFPSPGPRQAVPPSSSPAQPAQEKAGTDWEGDKMGPSVASCPTLLLHAKTEKAAALPAPSSRENPLEGAPPHSFFLG

SEQ ID NO: 1019981 - protein, 95 aa, Homo sapiens
FGLTPVERSETRLICRGVGSAPVIHVTEKGEPGFAAIGFRAESLADLGRMAEAEKLAVEDLDWPGGGKVVRLTDPDGHLIEVVAGQTPAPALPLP

SEQ ID NO: 1019982 - protein, 53 aa, Homo sapiens
FVTLPLASKRRCVRCSSNCSMDKERAVAAGTARRNAILVIEDEPVMRLMAVDL

SEQ ID NO: 1019983 - protein, 82 aa, Homo sapiens
IVELKRSQNLDLKRIPGSMNFSPVMVHSGSAAGGHYYACIKSFSDEQRYSFNDQHVSRITQEDIKKTHGGSSGSRGYYSSAF

SEQ ID NO: 1019984 - protein, 82 aa, Homo sapiens; identical to SEQ ID NO: 1019983

SEQ ID NO: 1019985 - protein, 220 aa, Homo sapiens
  misc_feature (220)..(220): Xaa can be any naturally occurring amino acid
CFTQDLSLWECSTWKPEVFCRFACHDEVIQASQEICMMSAPKITFIGAGSTIFVKNILGDVFHREALKTAHIALMDIDPTRLEESHIVVRKLMDSAGASGKITCHTQQKEALEDADFVVVAFQIGGYEPCTVTDFEVCKRHGLEQTIADTLGPGGMLPGNAPSGCLRYPRWRKYRPAELHTGNAGSFAQRGRYGYTQYHFVYVIFQLGRSRIQIKVNFWX

SEQ ID NO: 1019986 - protein, 106 aa, Homo sapiens
GDHQVFEDAKVLVDSDDADVRGVGDGHRVAGVPLDAIPTRLVRVRVSEGVPPVVGDERERKRVGRLVHAPHAGDVIRRPVGDERVGVVPVAGGERALVSEVTGHEP

SEQ ID NO: 1019987 - protein, 184 aa, Homo sapiens
  misc_feature (12)..(12): Xaa can be any naturally occurring amino acid
  misc_feature (23)..(23): Xaa can be any naturally occurring amino acid
  misc_feature (30)..(30): Xaa can be any naturally occurring amino acid
  misc_feature (36)..(36): Xaa can be any naturally occurring amino acid
  misc_feature (43)..(43): Xaa can be any naturally occurring amino acid
  misc_feature (50)..(50): Xaa can be any naturally occurring amino acid
  misc_feature (58)..(58): Xaa can be any naturally occurring amino acid
  misc_feature (73)..(73): Xaa can be any naturally occurring amino acid
  misc_feature (76)..(76): Xaa can be any naturally occurring amino acid
  misc_feature (82)..(82): Xaa can be any naturally occurring amino acid
  misc_feature (97)..(97): Xaa can be any naturally occurring amino acid
  misc_feature (105)..(105): Xaa can be any naturally occurring amino acid
  misc_feature (112)..(112): Xaa can be any naturally occurring amino acid
  misc_feature (114)..(114): Xaa can be any naturally occurring amino acid
  misc_feature (118)..(118): Xaa can be any naturally occurring amino acid
  misc_feature (121)..(121): Xaa can be any naturally occurring amino acid
  misc_feature (125)..(129): Xaa can be any naturally occurring amino acid
  misc_feature (131)..(132): Xaa can be any naturally occurring amino acid
  misc_feature (134)..(134): Xaa can be any naturally occurring amino acid
  misc_feature (136)..(139): Xaa can be any naturally occurring amino acid
  misc_feature (142)..(144): Xaa can be any naturally occurring amino acid
  misc_feature (147)..(147): Xaa can be any naturally occurring amino acid
  misc_feature (150)..(150): Xaa can be any naturally occurring amino acid
PPSPSIFPNPQXPPTSFINFQPXITSYTQXSFNQLXTPFHLHXLSFQPFXYNFFPYTXFPFSSTLSFPTPPTXLHXFIFFLXLNTPTFIFLFFFLFXSTIFSYTXTSPFFPXPXQAPXPPXPSPXXXXXTXXPXPXXXXPSXXXLPXFPXHTAGVLGPGPPGQRQPGPGGAGTQLCGPHLFLVF

SEQ ID NO: 1019988 - protein, 86 aa, Homo sapiens
VPQHFHGMILNVLTGLLFDSDGYYVALAWTSSALMYFIVRSLRTAASGPDSMGGPAPRQRLQLYLTLGAAAFQPLIIYWLTFHLVR

SEQ ID NO: 1019989 - protein, 161 aa, Homo sapiens
  misc_feature (115)..(115): Xaa can be any naturally occurring amino acid
  misc_feature (153)..(153): Xaa can be any naturally occurring amino acid
MSVSPHPRFPLWQAGVSGWCTCPTSSRGHRPPSGWRGRCACSSRTSCADHLARVRLVLLHGGVAEQAHVIVHIEAEERPALAPRPGDDEVVEGVVVRQDEVLLDEHELLHAGGRXQRKSLRSPAAPSSGLLHRVALRTRTVRRSPDPSQELKXTSISSSFT

SEQ ID NO: 1019990 - protein, 121 aa, Homo sapiens
QLLRTHKTKKNPSSSYEFSVTALNTSCKKPRERSAMDYYRKYAAIFLVTLSVFLHVLHSAPDVQDGPECTLQENPFFSSRVPQKLQCMGWLLLYSISHSTKVQEDDVWSKRTVTSESTVLV

SEQ ID NO: 1019991 - protein, 44 aa, Homo sapiens
ETSGTLEQLLLAVVKSIRSIPAYLAETLYYAMKGAGTDDHTGSE

SEQ ID NO: 1019992 - protein, 56 aa, Homo sapiens
MTGSRKALPVQVSHTFGPDSAVFDEDNLVSCAGLVPVMALAEQAGLTRLLDNKIHI

SEQ ID NO: 1019993 - protein, 120 aa, Homo sapiens
  misc_feature (99)..(100): Xaa can be any naturally occurring amino acid
  misc_feature (114)..(114): Xaa can be any naturally occurring amino acid
MADHTPPPRHQQFPPCGCGDGLKPSHFGVRRFLSESVFLGIRPTEDVVTNSIDEAEDRGHGQPQGLRVVQQALGLQAVGEGHPGHVRKRQREAKTVMCXXHGGEDGLLVPHGIXHVERLV

SEQ ID NO: 1019994 - protein, 69 aa, Homo sapiens
TRQSALSPAAVGDRPIPERVQLAALAVPDRVSPLVALGKLVVDEHRAMQRLMQITHEMQDEGEPLEALD

SEQ ID NO: 1019995 - protein, 194 aa, Homo sapiens
MDPANRAAHLTQRLLTFSRRQPIDPQPFSVTTTLQSMADLFRRYTGEGVSLAFELDADLWPVRCDRNQFENALLNLVINARDAMPDGGPLTVSAANTYLDPAFLRPYPEAQAGEFVEVGVTDVGCGMTPDVLAHAFDPFFTTKPLGEGTGLGLSMIYGFAKQAGGVVTLESQVGAGTSVRIFLPRHQGTTADAA

SEQ ID NO: 1019996 - protein, 207 aa, Homo sapiens; identical to SEQ ID NO: 914986

SEQ ID NO: 1019997 - protein, 214 aa, Homo sapiens
MPWWMRLLLAALAFSRSRRRAGSNSKQRHSLRVSSAAADATVAPSGLMVRLRTRDVWPLSSATLAMVGHFQITSWVLCKAMGLKGAPCNGGDQRMGAHLGMGIHGTQTGPRAHIPEANVWITGAPSCGQDIGLPGTPCYGLDSPWMLGECLQRNPATLSRSTRPHIDQVIITTTGQMWSIWGPAHPHTSWLWPLSVATVVFRYPNIMVVDVART

SEQ ID NO: 1019998 - protein, 80 aa, Homo sapiens
HFEIHIEMRSRERGLLAALAALRLDAVEVLLRHVAGDVIAAEARILEMRHLRIDRAHVVDQRGEVLVDQLVGADFARDFL

SEQ ID NO: 1019999 - protein, 111 aa, Homo sapiens
  misc_feature (106)..(106): Xaa can be any naturally occurring amino acid
MCARNGQVQRLLVCCPLSPGPGANARPGSMGYFRPADLAIGVASLGRSFRRLQHEPGRESSSPTYHFHTIDRWRTEATAKKDIITRGFTPFLDGVGLKDARQQHAXFRMRP

SEQ ID NO: 1020000 - protein, 117 aa, Homo sapiens
EFAHHLTFMLNRIRFRVTIDEESVRSIRYQYPVAHRMAEISRDVIEERTGMRISDSETGLLTGYHQVFLDSHRACPYLRLAIVTATGRVSAHLMRIQLDKVLPHGTKYLMLTGDEAD

SEQ ID NO: 1020001 - protein, 75 aa, Homo sapiens
MGRRLPTLELEKPWGFPTLIPWKKIPFSPVGVIPKGPDPMAFPNIGPPYKGNGKLYRENFGKNPRILVNLFFNPG

SEQ ID NO: 1020002 - protein, 146 aa, Homo sapiens
MGVVTFQAFIDFMSGETPVSDLAGQVMASFKILAGDKSYIAMDELRRELPPDQGEYCIGRMAPYTGPDSVPGALDYMSFSPALYGESDLYATPPGRPRHCAPCPALHLRRRPSPAWVRFQLPASTRVSWGPRGIDPPCPRSDSLQN

SEQ ID NO: 1020003 - protein, 79 aa, Homo sapiens
  misc_feature (33)..(33): Xaa can be any naturally occurring amino acid
  misc_feature (71)..(71): Xaa can be any naturally occurring amino acid
EDDRRGSTGGLHAAACAAAMSLLIPVKVPAYLXSTQHQHRWAAVAFAITAIKGVGRRYAHVVLRADIDLTXRAELTEDG

SEQ ID NO: 1020004 - protein, 228 aa, Homo sapiens
MRDTSRLLQNSSKKIEIPEQNPSKALHMNGYEKFSRRRLACPDGGAEPSWRCKDRMVIDRQSLAAHLPEPEGARTRIAGPAGSQPTSQYKVHLDLWVKSLSPQDRAAYKEYISNKRKSMTKLRGPNPKSSRTTLQSKSEAEEDDEEDEDDEDEDEEEEDDENGDASEDGGDSFEASSEDESEDGDENEEDDEDDNADEDDDEDEDNESEGSSPRLLLLTATPQTLTPT

SEQ ID NO: 1020005 - protein, 135 aa, Homo sapiens
MAMQFIFSDTAVLLFDFWSVHSPAGMALSVLVLLLLAVMYEGIKVGKAKLLNQSTGEPANLHQPADLSQRQTGTLQAQIHSLLAESTTGGICVTLAQSLIHVIQVVIGYFIMLAVMSYNSWDCALVLVLGSAVGY

SEQ ID NO: 1020006 - protein, 74 aa, Homo sapiens
MDQTDAAGITLRDAMQAAGLPGTMEAIQSIKRDPSRYLGFVEVHIEQGPVLDSLDLPLGIVTSIDGSRRYTGEV

SEQ ID NO: 1020007 - protein, 95 aa, Homo sapiens
TLIRLFETLRAQGYEGGYDTVRRHARRWQREEVGRTATAFVPLSFEPGEAYQFDWSHEVVVLAGVTTTVKVAHMRLCHSRMFFVRAYPRETQEMV

SEQ ID NO: 1020008 - protein, 139 aa, Homo sapiens
MEVGRFRGCLRGLGPIWAGLGRDPGTQAGGSQLGLPFTTFWSLAGQTRDATSLSKGKFQELLVGIVVRECTLAVGEIKRVEAGGRGGFVQAARKGKLIFFYEWNIKLGWKGILKESGVKHKGLIDIVPNLSEENEVDDI

SEQ ID NO: 1020009 - protein, 170 aa, Homo sapiens
IAGSRMRYNLHEKFSLTPNQNIDCNNLEEKRVNSHSSKSHINGTETVRYQKQGRNLRNSFRILGLRVAGSLSWFPGKNTAFARLRKTLRPLLLTTFPGLFSIGLYSLCLWYTKREITVTNIAKQPRENHGHWFAILKGEAGSLLRNRNQGARENQACVIPQREAHTSTSQ

SEQ ID NO: 1020010 - protein, 85 aa, Homo sapiens
MSVKTGWLWRLGGQTAHPDMLVTKCCLYTEKQTHPQRRGTRSHRNPDLCEEILAFTGPTPSQRTIKKGPSFCFSEATLTSRNEEG

SEQ ID NO: 1020011 - protein, 84 aa, Homo sapiens
GNSAIMAGGQTGGPYRRQVEAVAVAMTRGNQRELARQRNLKRQSDWVKEKRQDDGLFVAARRQRDSEIMQKKQKRATEKKEDPR

SEQ ID NO: 1020012 - protein, 82 aa, Homo sapiens
GNSAIMAGGQTGGPYRRQVEAVAVAMTRGNQRELARQRNLKRQSDWVKEKRQDDGLFVAARRQRDSEIMQKKQNLLAFGLGA

SEQ ID NO: 1020013 - protein, 52 aa, Homo sapiens
MRRLTGSVYPWAPNRRQCCWTWECQSGTCNVNGGWLNGIPHPWPWQQGLPSG

SEQ ID NO: 1020014 - protein, 68 aa, Homo sapiens
  misc_feature (2)..(2): Xaa can be any naturally occurring amino acid
  misc_feature (18)..(18): Xaa can be any naturally occurring amino acid
  misc_feature (36)..(36): Xaa can be any naturally occurring amino acid
  misc_feature (41)..(41): Xaa can be any naturally occurring amino acid
  misc_feature (44)..(45): Xaa can be any naturally occurring amino acid
QXEYAEGPSIKAVLLGCXDRGSVTPCCSSPESEMLXTRVMXELXXAGLKGCSQTSALSQSKLGAPCPE

SEQ ID NO: 1020015 - protein, 123 aa, Homo sapiens
MCANLVPRPIYQRHPGPDHMASGFISHRPFARSTISRFKRYKQPSFTLPPTRHEDTNFLRECHTRQNQCFYILQVPECPPGEWDTSSDTREAENMLLTLLCLKDTKTLMVGSYLDHESCGLSF

SEQ ID NO: 1020016 - protein, 94 aa, Homo sapiens
MASGFISHRPFARSTISRFKRYKQPSFTLPPTRHEDTNFLRECHTRQNQCFYCTTYLNVQRGETKDTKSYMPAFDVNDEKNCGLCVYAGSQRRR

SEQ ID NO: 1020017 - protein, 87 aa, Homo sapiens
VAIDLAQELSPSAIIQVQRIPPAHVDETTALSCAGNASVLWKPVSKTRLAVYAVGCDPADHAETVQFRLKILDQPSLNTPGPIKLLP

SEQ ID NO: 1020018 - protein, 98 aa, Homo sapiens
  misc_feature (16)..(16): Xaa can be any naturally occurring amino acid
RSGEVRRVHIDCRATXGEVSNEEHSLRQYGKAGAIRWKGIRPTVRGVAMNPVDHPHGGGEGRTGEGQVPVSPWNTLTKGYRTRNNKRTQTFIVSRRKK

SEQ ID NO: 1020019 - protein, 71 aa, Homo sapiens
SGLQRQGDLHGVVLRDLKALQGIWSFPCLYLTAKLHEGDVMPPGYQTDLLEARELIEKHGQHELVDRLGVV

SEQ ID NO: 1020020 - protein, 104 aa, Homo sapiens
STRDIPIGQAVDDATLLLLRPDGQPCEVDEPGELLIAGGGLSPGYLGDAELTRERFIDLPWQGRTLRCYRSGDLVSRDGQGLYHFHGRSDDQIKLRGQRLSLPE

SEQ ID NO: 1020021 - protein, 121 aa, Homo sapiens
  misc_feature (32)..(32): Xaa can be any naturally occurring amino acid
  misc_feature (55)..(55): Xaa can be any naturally occurring amino acid
  misc_feature (66)..(66): Xaa can be any naturally occurring amino acid
  misc_feature (70)..(70): Xaa can be any naturally occurring amino acid
  misc_feature (74)..(74): Xaa can be any naturally occurring amino acid
  misc_feature (80)..(80): Xaa can be any naturally occurring amino acid
  misc_feature (84)..(84): Xaa can be any naturally occurring amino acid
  misc_feature (96)..(96): Xaa can be any naturally occurring amino acid
  misc_feature (101)..(101): Xaa can be any naturally occurring amino acid
  misc_feature (116)..(116): Xaa can be any naturally occurring amino acid
MHNRYSVSIIKPLRQEAVQQNRQRAHHHLCLXLHLLLQYPLSSLSPGLPFLPSPXPPARPRPPPPXAALXARAXCRPGPXRGPXPCSPGASASPLXGAARXALPFCFPAALFVSLXPFPPP

SEQ ID NO: 1020022 - protein, 109 aa, Homo sapiens
  misc_feature (10)..(10): Xaa can be any naturally occurring amino acid
  misc_feature (28)..(28): Xaa can be any naturally occurring amino acid
  misc_feature (30)..(30): Xaa can be any naturally occurring amino acid
  misc_feature (33)..(33): Xaa can be any naturally occurring amino acid
FPCPTCVVFXCLCLAKGVPNTGLATAPXRXIWXLGTEGTRDSSLIPRTPLAQSVVLETVPSPAPVLPPLHLPLQVPRGLPTIEAAKQGEPVPTVEWGGWAWTLNPCNLP

SEQ ID NO: 1020023 - protein, 43 aa, Homo sapiens
MHRASSDRVADVLARRAERSDFLAGVSVKQDGRASSFGGTLEE

SEQ ID NO: 1020024 - protein, 77 aa, Homo sapiens
  misc_feature (6)..(6): Xaa can be any naturally occurring amino acid
AAVRLXGRGKMATVAELKAVLKDTLEKKGVLGHLKARIRAEVFNALDDDREPRPSLSHENLLINELIREYLRIQAEY

SEQ ID NO: 1020025 - protein, 166 aa, Homo sapiens
MVAMAAGPSGCLVPALGYGRGRRLCFQAVSAFGAEFIIGGMQRVRLLLAEVAYAGSCDLLGQFNLLQLDPDCRGCCQEEAQFETKKLYAGAILEVVDENGKVPSSPSFVRSDKPKLFRGLQIKYVRGSDPVLKLLDDNGNIAEELSILKWNTDSVEEFLSEKLERI

SEQ ID NO: 1020026 - protein, 122 aa, Homo sapiens
REGAAGQVRFGRQTYSLEGRGTLRQGDLQLGRRQWQRGEGQGPLSPARKARCGPALRSVWGDLERLFSKLPPAISSLLSSFCLAPVYPQPQIKTPFFQGHYLFFVPFSFCKKHSQKPVQNPP

SEQ ID NO: 1020027 - protein, 129 aa, Homo sapiens
AVGSDDRMVHALTPSWDTAMCLKVRQKFVGQAPDPAGGKPLAVPPVAGLNVVLAHVAGQLMQILGHDFVRIGRRQRHAHLPQVAALDQCEALPLGQADDVCGFDQRNAGAADAVLCVRRECGGSRRVRA

SEQ ID NO: 1020028 - protein, 112 aa, Homo sapiens
GSMAAKAVVRDVARVQGKSYGLADRLSKMIPFEVGMTLEKAYEQEEILRDFIKVDEEAAEIWEMARKLEGVVRNVGKHAGGVVIAPTKLTDFSPIYCDEEGGGLVTQFDKDG

SEQ ID NO: 1020029 - protein, 102 aa, Homo sapiens
SGVVEDTGPQPSLLHPPARPFGPQAPFGGFFLASTPSPKVLAQNFILKVFFSFSKPPPSFPPALPRGQPCCPEGFLGQKKEMGVGGTELMLGFSFNKLVIFS

SEQ ID NO: 1020030 - protein, 146 aa, Homo sapiens
  misc_feature (79)..(79): Xaa can be any naturally occurring amino acid
  misc_feature (82)..(83): Xaa can be any naturally occurring amino acid
  misc_feature (86)..(86): Xaa can be any naturally occurring amino acid
  misc_feature (92)..(95): Xaa can be any naturally occurring amino acid
  misc_feature (99)..(99): Xaa can be any naturally occurring amino acid
  misc_feature (113)..(113): Xaa can be any naturally occurring amino acid
  misc_feature (124)..(124): Xaa can be any naturally occurring amino acid
SAVSNGKQHTRIPLQTLIFRRNAKTPELIPTCNYYFLDRSCHSGCCATCTQWLLHSPSLSPGFMAGNRSNSLMSVGVRXKHXXSIXAHAPAXXXXQPIXQGSTEVFIYEHGLXITCSLGLGLFXKKLPLPHGIIQLSIRIAYLFLH

SEQ ID NO: 1020031 - protein, 198 aa, Homo sapiens
  misc_feature (2)..(2): Xaa can be any naturally occurring amino acid
  misc_feature (31)..(31): Xaa can be any naturally occurring amino acid
  misc_feature (33)..(33): Xaa can be any naturally occurring amino acid
  misc_feature (40)..(40): Xaa can be any naturally occurring amino acid
  misc_feature (43)..(43): Xaa can be any naturally occurring amino acid
  misc_feature (50)..(50): Xaa can be any naturally occurring amino acid
  misc_feature (90)..(90): Xaa can be any naturally occurring amino acid
  misc_feature (93)..(93): Xaa can be any naturally occurring amino acid
  misc_feature (99)..(99): Xaa can be any naturally occurring amino acid
VXAGRRLAVLLPLGDFAKMPPYTPFLGTRAXLXCPSHPPXMLXWVLSLFXLLVLPQELEGLPRPPTAPGCRSVPQGRGNVAQGTPGSWDXRAXGPGPSXQGMEAHRGPSSPTLSSPHCLLSLPTLPARAVQLRWDLSISRAGGRIAVLGLCLEPGGSLLLPPSALPETDPCAACPPCPFVPMSGGGGRPTVPEAGHQP

SEQ ID NO: 1020032 - protein, 71 aa, Homo sapiens
MPALLSVASRLLVLPRVLLTMGSGSPSSQTLARSDFGSGYVPGSGSVDFGTWPNEKVAKEIARAAVEAPIS

SEQ ID NO: 1020033 - protein, 71 aa, Homo sapiens
  misc_feature (64)..(64): Xaa can be any naturally occurring amino acid
VLVTVAWDDFQSTWHQGVTIQQESSLVHTYAPSVGVQALCWQSVDVRVCRFRYKIHHLMDLPVXRNPVPPE

SEQ ID NO: 1020034 - protein, 120 aa, Homo sapiens
MTSCTSPTSDLPSRSKLEISKTPPVAAVSTPPVPRFWSLRFSRIFGKRLSLLSRGSLMCTPARSPVPRLDGQVKMYPKRSSHMNSQPRSWISLSTSLRPRQNLSNTLFMSPPFSMEITRV

SEQ ID NO: 1020035 - protein, 120 aa, Homo sapiens; identical to SEQ ID NO: 1020034

SEQ ID NO: 1020036 - protein, 127 aa, Homo sapiens
EGGMVFLCQLVFSLAVGWRQVRKVFGKLGQGVPGLGGPALSGRRKEVLQSPGLPAVGSTGAGIRANLVGASLISWSAFLNGGGVPPGGLVATLQSLGAGGSRVVIGKIGALMGYATHKYFDSEEDEE

SEQ ID NO: 1020037 - protein, 101 aa, Homo sapiens
GIGERERQKALLLQVRFVDTREGFHDHGHAAEETRAHGRVLAGGSFAVVFVAHHDPGFARRLVLARDLRRFRFGTREGVLHFARRAAERVHGAKEHVVRDV

SEQ ID NO: 1020038 - protein, 117 aa, Homo sapiens
  misc_feature (107)..(107): Xaa can be any naturally occurring amino acid
  misc_feature (116)..(116): Xaa can be any naturally occurring amino acid
ESQVFCSCSYDATTHFETTCNDIKDIYKRMAGTAFDFENMKRKQNDVFEKLSSDCGRPQPLLPQPVSVLLEGSSILCFPHHVPITHLIDPLTNILNPSDGLGDGGFXSILFLGPPXS

SEQ ID NO: 1020039 - protein, 121 aa, Homo sapiens
ARIARVATSSADPCACADSDGHMWVPGLTTFLPMGFGSTCKERCSSNKTLEWSQELLEEEQWSLSPELRQTPGHAQNLSAAGWGPAVSVAAAPGQVSSPQEGPLLLCLSGGPDHVAQQLAQ

SEQ ID NO: 1020040 - protein, 142 aa, Homo sapiens
MPLFQSHLYSRQPCGVRCTGPAYRCRKRDVLPSDKVTWLFSNTDKAPRQGTRGRRGQQLAVAADVCPQLHHSFLWLCHARGFKCPCVHVSALQELAAGVLGGPGLCSSISPAAGSPHHRFLSQKRWDGPHELHNMLRGHVLP

SEQ ID NO: 1020041 - protein, 242 aa, Homo sapiens
  misc_feature (3)..(3): Xaa can be any naturally occurring amino acid
DKXFQNRKPKEGKVFQEPLFYEAPRSVDWREKGYITPVKNQGQCGSCWAFSATGALEEQMFRKTGRLISLSEQNLVNCSGPQGNEGCNGGLMDYAFQYVQDNGGLNSEESYPYEATEESCKYNPKYSVANNTGFVNIPKQEKALMKAVATVGPISVAIDAGHETILPYKEGIYFEPDCSSEDMDHGVLVVGYGFESTESDNNKYWLVKNSWGEEWGMGGYVKMAKDRRNHCGIASAASYPTV

SEQ ID NO: 1020042 - protein, 71 aa, Homo sapiens
IDRARYLSSHNTFSCLSGMPRCYSGLPLMHTPHETSYHLVCSLVFLMGGSLYESDPACACNACALGLCCYY

SEQ ID NO: 1020043 - protein, 59 aa, Homo sapiens
RVLQAALTSSLCAFHLASPVKIEIPLFHVLNALLFKVDPSMSLTLHVHAMLVHLACAVI

SEQ ID NO: 1020044 - protein, 133 aa, Homo sapiens
  misc_feature (106)..(106): Xaa can be any naturally occurring amino acid
  misc_feature (109)..(109): Xaa can be any naturally occurring amino acid
MRQGRDKYKTLRQIRQGNTKQRIDEFEALNRQARTKRRGVLIQGAASPATLVVFSAPSLGTPSDPSSFRKQFPTEIFWAVIQGGALFVFPSCNSAKQGLDFSADYXFGXHLPVLWLGSRDWIGIYGCLLKFWS

SEQ ID NO: 1020045 - protein, 81 aa, Homo sapiens
VVIEAELGQRTIETNSEDALVSSCEALQILCTVLHALRRLTGIVLANSSLDIVLHDTYYVGRTANENNLSVHIVIINVWER

SEQ ID NO: 1020046 - protein, 53 aa, Homo sapiens
  misc_feature (51)..(51): Xaa can be any naturally occurring amino acid
MALPGTRGLTGFFMHTWQRLMCVRMRPALSVSAEGEPWKLCSGMVVSRSCXCW

SEQ ID NO: 1020047 - protein, 124 aa, Homo sapiens
RGERPYVLEPAQQERFSAGDRGVVCDVPHPCIRGSLKKEKPRLHAGIRGFSGLQKAVLALRDTAGLQLLLRAVAFERGLLLDRGDDVLAGGLLFVAILVEEHLAFQFRLVAFADKAEAEEFEDF

SEQ ID NO: 1020048 - protein, 79 aa, Homo sapiens
GHRDDRSVDNTAVQPTETPASGEPMAPLDFDEKALPAPVRAELRGVPADTAHIIEGHLVAAAELLYEDPAQANAHAQAA

SEQ ID NO: 1020049 - protein, 106 aa, Homo sapiens
LDILQSVPVRAGLGGCLRAGVVPSSSPPTRVKTPACRSCDCSPPVPCVWGESVKPPLKWFSSFSGDIQHASSDSSPTIHGPCNELPPFPLSSVDDGVRAGSCSPAA

SEQ ID NO: 1020050 - protein, 113 aa, Homo sapiens
YKRAGEEVFTLIRTTSSSTVSEQNFYVAKSLAALYPETGWGDDTQKIIRNRIGESRGQFYFDVQEGSNWALQREQQRLREERRVQQQMAELHSRVLERYEQLKAGMKDYEGRE

SEQ ID NO: 1020051 - protein, 113 aa, Homo sapiens
EYHNTPLNITAPQIVAINEERHRGGALGYAASESYSCVLIQAPVALTIHCASWLQAASGTVLNSGEWIRQLVCVLSSPEILSPFSSRALPRFASSKKPASPGSVRFSLHLTVP

SEQ ID NO: 1020052 - protein, 109 aa, Homo sapiens
CPLVPRWKKSPKIEPDSDRRIHIQTTQSKTKMKKGLREQMTKKIQLRTLQLTKMNGKLYSHHLDPVWRGNVKFTSFLFGATCFGLPPNPLLPCTVPCGIMGHRTQWVQQ

SEQ ID NO: 1020053 - protein, 213 aa, Homo sapiens
MPRSCCSRSGALLLALLLQASMEVRGWCLESSQCQDLTTESNLLECIRACKPDLSAETPMFPGNGDEQPLTENPRKYVMGHFRWDRFGRRNSSSSGSSGAGQKREDVSAGEDCGPLAEGGPEPRSDGAKPARARASALLHGALPLGQAGGQEAGPVKVFPNGAQDKSAKASPGVKGADLPRNPEEKCPTGLPDRARAQGPWSLLWWATEGPRM

SEQ ID NO: 1020054 - protein, 102 aa, Homo sapiens
  misc_feature (14)..(14): Xaa can be any naturally occurring amino acid
PKSGQPEPIPAPSXVCHFLTAPRKGTKENFFEICDELGVKRPFSVKVFSGKSERSSFGLLEWESKSDALETLGFLNHYQMKNPKGPNPYTLKLGFSPAQHPS

SEQ ID NO: 1020055 - protein, 133 aa, Homo sapiens
MVEIPSNRMDDESCTIAVFCTHESAVCVEVQSANAFKSSSVMSSVAGPHVKRGSNTTSHLHQAVAKATQQPFDVSAFNASYSDSGLLGIYTISQATAAGDVIKAAYNRVKTIAHGNPSNTDFPAAKNKLKAGY

SEQ ID NO: 1020056 - protein, 72 aa, Homo sapiens
  misc_feature (7)..(7): Xaa can be any naturally occurring amino acid
EPLFRMXCLIRLANGACRETRLIMRRASTWLLAALLSWVSIVACSGGSGDAGDAAEHAAVSGNVGAPGALGD

SEQ ID NO: 1020057 - protein, 77 aa, Homo sapiens
PRKFGHYGRKDGRIQEKFRKGLLHGDKVPFFCKIRERRGSFPEDAKGLDGLIEVPKGLRDHSSLVFGKTEASEVKPC

SEQ ID NO: 1020058 - protein, 68 aa, Homo sapiens
PRKFGHYGRKDWKLHGDKVPFFCKIRERRGSFPEDAKGLDGLIEVPKGLRDHSSLVFGKTEASEVKPC

SEQ ID NO: 1020059 - protein, 40 aa, Homo sapiens
FPASADSNGHRLQRERTLDGFKKYLESGAHGKGQGIDRRS

SEQ ID NO: 1020060 - protein, 51 aa, Homo sapiens
SSSVPPISLWNTGTERLANYTGGIYAEYQDTTYINHVVSVAGWGITDESKM

SEQ ID NO: 1020061 - protein, 56 aa, Homo sapiens
QSAQEVAAGSGEFLFQGHNERVHKPRDCTNLMLLVQHIEQVQPGQLVITQSHIDHL

SEQ ID NO: 1020062 - protein, 88 aa, Homo sapiens
SGGAMVRLKLKDQVWVQVGVGDYIGIYASIRQDSTFSGFLVYSDWHSSPVFAECPLQSELMLSLLEGGCEADNQVIQEGWPPWNIVND

SEQ ID NO: 1020063 - protein, 40 aa, Homo sapiens
MISSQEVGTLITALGCGIDREEYNIYKLRCHNIIIMTDAD

SEQ ID NO: 1020064 - protein, 108 aa, Homo sapiens
EFYRIRRFLLLTSDPGLGPSSGTPAQGPYERGAHRGQGLEVVRSPSRALPLSCSNSTRSLLSPLVHQSFQFDEDDGDGEDEEDVDDEEDVVHDAHDSEAKVASLKMEW

SEQ ID NO: 1020065 - protein, 231 aa, Homo sapiens
VDQAKIVGGHQRTHPQAVDVICRQAQGQVSTEQARADQHHQGSKIKGSKRFPDLAHRRSERLLAVGVRTTGMIVPGRRVRTAKTRGCRGIFCSCQLATCQTLDSDLRGTRCRRILAPPHPCLPCEPQTRARFGWCLKRLPHSTPGHKKAPPDKSDRGLLTFRPRGQERLCGVPGPVRTANLPLRRGMLYPIELLGLMTANRQGARRRTACMLTAQVNFVMSSVGFLSVGRR

SEQ ID NO: 1020066 - protein, 259 aa, Homo sapiens
  misc_feature (2)..(2): Xaa can be any naturally occurring amino acid
  misc_feature (28)..(28): Xaa can be any naturally occurring amino acid
  misc_feature (31)..(31): Xaa can be any naturally occurring amino acid
  misc_feature (47)..(47): Xaa can be any naturally occurring amino acid
  misc_feature (64)..(64): Xaa can be any naturally occurring amino acid
  misc_feature (67)..(67): Xaa can be any naturally occurring amino acid
  misc_feature (70)..(70): Xaa can be any naturally occurring amino acid
  misc_feature (75)..(75): Xaa can be any naturally occurring amino acid
  misc_feature (85)..(86): Xaa can be any naturally occurring amino acid
  misc_feature (91)..(91): Xaa can be any naturally occurring amino acid
  misc_feature (98)..(98): Xaa can be any naturally occurring amino acid
  misc_feature (107)..(107): Xaa can be any naturally occurring amino acid
  misc_feature (156)..(156): Xaa can be any naturally occurring amino acid
  misc_feature (159)..(159): Xaa can be any naturally occurring amino acid
  misc_feature (162)..(162): Xaa can be any naturally occurring amino acid
NXLGHLQQGALQPPLTGTMDQAGGEAMXWLXEKLREVYRKGRVFANXPDSACVIGLKKKAVAFXPIXEIXKDTDXEHRCHGNSGXXTLPAXVEDAGKXRISMAAYVXGELEHVTRRTLSMDKGSEASHAHAPPQPPPMPAQRQGSDGAWAVVSGAXKQXGAXSLLSPITLASYPLATLPRPPLQAGDLRDQHCTGPPAGWTEVPWGIHLPAHGDVALSVFGGCCPLALAHPMGTSAVSPCWAHYMGQPLLYLAGRLSGA

SEQ ID NO: 1020067 - protein, 75 aa, Homo sapiens
  misc_feature (5)..(5): Xaa can be any naturally occurring amino acid
  misc_feature (7)..(7): Xaa can be any naturally occurring amino acid
  misc_feature (9)..(9): Xaa can be any naturally occurring amino acid
  misc_feature (34)..(34): Xaa can be any naturally occurring amino acid
  misc_feature (42)..(42): Xaa can be any naturally occurring amino acid
  misc_feature (62)..(62): Xaa can be any naturally occurring amino acid
  misc_feature (73)..(73): Xaa can be any naturally occurring amino acid
MIAGXHXLXPATISLGVDQTDDHQQPTHSRINEXYECYLLQXGFNPTSCILTLYGFSVVPLXISPPDVPFLSXLS

SEQ ID NO: 1020068 - protein, 90 aa, Homo sapiens
YYPPDVQRLFPNSLHLHYKGKRGSTTGQGELKKVRFDPLFSLNHTCAMFRANVNRLFRKTWCTTKRSDRLYAHLMLYAQYHNEELLKPSA

SEQ ID NO: 1020069 - protein, 111 aa, Homo sapiens
LACKALVNQCLQQTMHIAFIEHQLIGQLGHTRASFVLGQGFQEAPGPLTKVLSNRISHQSLKVHELSHGTGPHHSQTSPYSKAASGFRNKFIRHAGRRACTLEPSTASPVD

SEQ ID NO: 1020070 - protein, 46 aa, Homo sapiens
DLQDLEHCQPVEDAEVGERLQATQDKLSVPFSGTSTSGQVTSLLDT

SEQ ID NO: 1020071 - protein, 120 aa, Homo sapiens
MKETIMNQEKLAKLQAQVRIGGKGTARRKKKVVHRTATADDKKLQFSLKKLGGKQYLWYVNEVNMFTNQGNSDPPLTTLKVPGIPLGQLNHFSPLPGHAETKSSLPEIATQHLKTSLVRD

SEQ ID NO: 1020072 - protein, 144 aa, Homo sapiens
QWPWGTHHASHTIAVWRDGRQVYEKPGAKPAYHNQSQGLVSQLQGQSKDMPPRFSKKGQLNADEISLRAAQSFLMNKNQVPKLQPQITMIPPSAQPPRTQTPPLGQTPQLGLKTNPPLIQEKPAKTSKKPPPSKAELLQLTKTV

SEQ ID NO: 1020073 - protein, 84 aa, Homo sapiens
MCGIVISSSCFVQESISERMPWGYPQITMIPPSAQPPRTQTPPLGQTPQLGLKTNPPLIQEKPAKTSKKPPPSKAELLQLTKTV

SEQ ID NO: 1020074 - protein, 151 aa, Homo sapiens
LYRYLPRNDLLDPNQSGFKTSHSTETALLCITEALRTAKANSLSSALILLDLSAAFDTVNHQILLSTLSELGISGAAHAWIASYLTGRSYQVAWRESVSSPRALTTGVPQGSVLGPLLFSLYTKSLGSVITSHGLSYHCYVDAAANLVVVG

SEQ ID NO: 1020075 - protein, 159 aa, Homo sapiens
SGLTPPGRGHSHQLAALLRTLDPRAPQPELVPMPLSRRGRGSRLAGSRAATSNLPRATALSPKSAGRGALSISHAQLLTRRRHSSEQVPPGSEPRADFRSGKWLQEPATGDARDSRQALRARMSSKHRSVSAATLRFEATSIRGRDPSPPGDRALQFPS

SEQ ID NO: 1020076 - protein, 259 aa, Homo sapiens
SGLTPPGRGHSHQLAALLRTLDPRAPQPELVPMPLSRRGRGSRLAGSRAATSNLPRATALSPKSAGRGALSISHAQLLTRRRHSSEQVPPGSEPRADFRSGKWLQEPATGDARDSRQALRARMSSKHRICSQEEVVIPCAYDSDSESVDLELSNLEIIKKGSSSIELTDLDIPDIPGLHCEPLSHSPRHLSQQDPLSEAIVEKLIQSIQKVFNGELKGELEKLKFLGDLSSLSQALPYDETGKSFIHRHIADIVHPLNV

SEQ ID NO: 1020077 - protein, 46 aa, Homo sapiens
SIYRIPASCSHQVHMRVLLPDCTITPNPLYFVVHILIVTDGTRLGT

SEQ ID NO: 1020078 - protein, 111 aa, Homo sapiens
TSRELAKTMTIDQAMASTGKSESAMRRAAHEGGFTFKSKIVDRERDLKLIERLSALRDAGVSRIAACRKVGISDSLLNRLVVDYDFNFPKRWEKRAWGASATARNSANVKP

SEQ ID NO: 1020079 - protein, 180 aa, Homo sapiens
  misc_feature (152)..(152): Xaa can be any naturally occurring amino acid
  misc_feature (160)..(160): Xaa can be any naturally occurring amino acid
MVAIIPGIELEISGVIAEAGMGTISAGKIRECCPFRGQGAAGIKGALDAGPTGRTGVIDDIEGPTDDKGSLSIPLWDTGVSHCCSVSSVCESNLARHKCLSSSRDGIDSPKTFLISCQVDVGVCCQPVGGDQPSAGNTELSTLSGLQVDLIXQVSHLTLXRLQEARANKKHITAAVLPGR

SEQ ID NO: 1020080 - protein, 147 aa, Homo sapiens
MVWPVLGGTWAIPHWCSTLTCEELKRSVGKLPSTVESLHIVQEQVHTLLHQDQCQGWRLSAKDFLDRLSSIDKLKASVSQVEADLKMLRTAVDRLCAYSVNIETNENNLESAKGLLDDLANDLDMLLGEVAKDSQNGLKNCVCMAPN

SEQ ID NO: 1020081 - protein, 147 aa, Homo sapiens; identical to SEQ ID NO: 1020080

SEQ ID NO: 1020082 - protein, 77 aa, Homo sapiens
LAAGFWMADTDAAAPFGKNGSNCLPRHPRWLAPIHPLSLSYWRNCCMNHKALGREAGSRFQAELTSDFTFEHRLNQI

SEQ ID NO: 1020083 - protein, 144 aa, Homo sapiens
TRGTRAAWAPGWRAPRGGERACVCVRVRMRGRPALSETGATKKGRVREREGAREERRRRGSSDALPRGRSPRGAAEAPTRGRPSARRPAPAPAGNDEEEQFRQAGTSGWKPAACTAREGRLGPEILKGKGFSGRFWKHSEICGD

SEQ ID NO: 1020084 - protein, 117 aa, Homo sapiens
MPGMSGLDLLKQLRVMQASGMPYVPVMVLSADVTPESILRCEQAGARAFLAKPVVATRLLEVLADVAANIRPEAGIQSVPALPAGDGVLDTAVLDELASLGMGDGFERKFIDQCLVD

SEQ ID NO: 1020085 - protein, 254 aa, Homo sapiens
  misc_feature (48)..(48): Xaa can be any naturally occurring amino acid
PAYDHRLANFEAPVPRARLVISEHILWCVSMGQQVRSRGHWTASIAEXSRHSMSEMAKCSRAEAEAWYQTKFETLQAQAGKHGDDLRNTRNEISEMNRAIQRLQAEIDNIKNQRAKLEAAIAEAEERGELALKDARAKQEELEAALQRAKQDMARQLREYQELMSVKLALDIEIATYRKLLEGEESRLAGDGVGAVNISVMNSTGGSSSGGGIGLTLGGTMGSNALSFSSSAGPGLLKAYSIRTASASRRSARD

SEQ ID NO: 1020086 - protein, 98 aa, Homo sapiens
MVLEVYNIDACLKVYYNSNPYDLVVLIRSRDTTPPEKDHATEKGYFELRPRKALKRLAQALRIGRRARLGSRTAGRWDTRSCACHTWYRSPLLRWRGR

SEQ ID NO: 1020087 - protein, 81 aa, Homo sapiens
VAVDLGEGADARDVAERGGAQARHIGCIDVAHDGLSERMFGLSFECARERQDPIAIEVADNDVRDLGVPLGEGAGLVEDDG

SEQ ID NO: 1020088 - protein, 76 aa, Homo sapiens
TGDGGPGKGPRCQLNVSYLHSSSGYLDPDVANHLDHVDPPFLGPVPLAGCGIGQRSPTNEVKGAHKIGYRSRRYSP

SEQ ID NO: 1020089 - protein, 101 aa, Homo sapiens
HRDRTGIGQGHQVDATLGLPVLAIQIGVALLFDFLNGLHDAANSIATIVSTRVLRPQYAVLWAAFFNFIAFLVFGVHVANTIGTGIIDPSVVDATVIFAAL

SEQ ID NO: 1020090 - protein, 67 aa, Homo sapiens
  misc_feature (2)..(3): Xaa can be any naturally occurring amino acid
  misc_feature (12)..(14): Xaa can be any naturally occurring amino acid
  misc_feature (21)..(21): Xaa can be any naturally occurring amino acid
  misc_feature (23)..(24): Xaa can be any naturally occurring amino acid
  misc_feature (27)..(27): Xaa can be any naturally occurring amino acid
  misc_feature (31)..(31): Xaa can be any naturally occurring amino acid
  misc_feature (38)..(38): Xaa can be any naturally occurring amino acid
  misc_feature (44)..(44): Xaa can be any naturally occurring amino acid
  misc_feature (49)..(50): Xaa can be any naturally occurring amino acid
  misc_feature (55)..(55): Xaa can be any naturally occurring amino acid
AXXAGGRRGEGXXXWPSRDLXIXXPEXPAVXNGEGSGXSAFLVXDERLXXNPLNXFFLSIPNSTIYN

SEQ ID NO: 1020091 - protein, 290 aa, Homo sapiens
RFRTGAPMAEQTLGPVSAASNVTHGKGQHQPPAPLGEDSAWGSADWFRIMELQMSSFLPGDVLGERRVVYTPAVLFAATLYFHEGCLPPLTHGAPGAAAGTNGEVGPLMWPYRGGGVDPGAGASLATCFVHRASPYYKLSELSKELPFTPVFMTMLHLAVIFLFSVLSRALVQGSSHRARVVLSWADYLRRVAPTALATALDVGLSNWSFLYVTVSLYTSDHNPQLTTSDMTFSLIFKLEELRAALVLVVLLIDGGLFMFTYKSTQFNRGGLRLACWGASFIGGIRWTFT

SEQ ID NO: 1020092 - protein, 1864 aa, Homo sapiens
MSQKSWIESTLTKRECVYIIPSSKDPHRCLPGCQICQQLVRCFCGRLVKQHACFTASLAMKYSDVKLGDHFNQAIEEWSVEKHTEQSPTDAYGVINFQGGSHSYRAKYVRLSYDTKPEVILQLLLKEWQMELPKLVISVHGGMQKFELHPRIKQLLGKGLIKAAVTTGAWILTGGVNTGVAKHVGDALKEHASRSSRKICTIGIAPWGVIENRNDLVGRDVVAPYQTLLNPLSKLNVLNNLHSHFILVDDGTVGKYGAEVRLRRELEKTINQQRIHARIGQGVPVVALIFEGGPNVILTVLEYLQESPPVPVVVCEGTGRAADLLAYIHKQTEEGGNLPDAAEPDIISTIKKTFNFGQNEALHLFQTLMECMKRKELITVFHIGSDEHQDIDVAILTALLKGTNASAFDQLILTLAWDRVDIAKNHVFVYGQQWLVGSLEQAMLDALVMDRVAFVKLLIENGVSMHKFLTIPRLEELYNTKQGPTNPMLFHLVRDVKQGNLPPGYKITLIDIGLVIEYLMGGTYRCTYTRKRFRLIYNSLGGNNRRSGRNTSSSTPQLRKSHESFGNRADKKEKMRHNHFIKTAQPYRPKIDTVMEEGKKKRTKDEIVDIDDPETKRFPYPLNELLIWACLMKRQVMARFLWQHGEESMAKALVACKIYRSMAYEAKQSDLVDDTSEELKQYSNDFGQLAVELLEQSFRQDETMAMKLLTYELKNWSNSTCLKLAVSSRLRPFVAHTCTQMLLSDMWMGRLNMRKNSWYKVILSILVPPAILLLEYKTKAEMSHIPQSQDAHQMTMDDSENNFQNITEEIPMEVFKEVRILDSNEGKNEMEIQMKSKKLPITRKFYAFYHAPIVKFWFNTLAYLGFLMLYTFVVLVQMEQLPSVQEWIVIAYIFTYAIEKVREIFMSEAGKVNQKIKVWFSDYFNISDTIAIISFFIGFGLRFGAKWNFANAYDNHVFVAGRLIYCLNIIFWYVRLLDFLAVNQQAGPYVMMIGKMVANMFYIVVIMALVLLSFGVPRKAILYPHEAPSWTLAKDIVFHPYWMIFGEVYAYEIDVCANDSVIPQICGPGTWLTPFLQAVYLFVQYIIMVNLLIAFFNNVYLQVKAISNIVWKYQRYHFIMAYHEKPVLPPPLIILSHIVSLFCCICKRRKKDKTSDGPKLFLTEEDQKKLHDFEEQCVEMYFNEKDDKFHSGSEERIRVTFERVEQMCIQIKEVGDRVNYIKRSLQSLDSQIGHLQDLSALTVDTLKTLTAQKASEASKVHNEITRELSISKHLAQNLIDDGPVRPSVWKKHGVVNTLSSSLPQGDLESNNPFHCNILMKDDKDPQCNIFGQDLPAVPQRKEFNFPEAGSSSGALFPSAVSPPELRQRLHGVELLKIFNKNQKLGSSSTSIPHLSSPPTKFFVSTPSQPSCKSHLETGTKDQETVCSKATEGDNTEFGAFVGHRDSMDLQRFKETSNKIKILSNNNTSENTLKRVSSLAGFTDCHRTSIPVHSKQEKISRRPSTEDTHEVDSKAALIPVWLQDRPSNREMPSEEGTLNGLTSPFKPAMDTNYYYSAVERNNLMRLSQSIPFTPVPPRGEPVTVYRLEESSPNILNNSMSSWSQLGLCAKIEFLSKEEMGGGLRRAVKVQCTWSEHDILKSGHLYIIKSFLPEVVNTWSSIYKEDTVLHLCLREIQQQRAAQKLTFAFNQMKPKSIPYSPRFLEVFLLYCHSAGQWFAVEECMTGEFRKYNNNNGDEIIPTNTLEEIMLAFSHWTYEYTRGELLVLDLQGVGENLTDPSVIKAEEKRSCDMVFGPANLGEDAIKNFRAKHHCNSCCRKLKLPDLKRNDYTPDKIIFPQDEPSDLNLQPGNSTKESESTNSVRLML

SEQ ID NO: 1020093 - protein, 134 aa, Homo sapiens
MITLAGAMSTAELGLTLAEKIRADKVHLISCTGANLEEDIFNLVAHDHYERVPHYRSLSAQDEQALLDKHMNRVTDTCIPEGEAMRRIEDVMLNLWAKAEKEGKRYFPHEFFFQAVRSGELKKHYQIDPKDSWM

SEQ ID NO: 1020094 - protein, 394 aa, Homo sapiens
  misc_feature (274)..(274): Xaa can be any naturally occurring amino acid
GRIPGRCLAATEREKRPRDAKNTMILEIWYQVAGETRRPLCRYGAYPLRTGCAPDTDDLKQRAKGVDRYISKYERDKAFSDRNTLIIYLDKVSHSEDDCLAFKVHQYFNVELIQPWSSQGLRLLQPVRKAVPGSTIRKKEDGKLNKLCRDRTVPACADVHDIAFITNSGTDRVTLDTNGWTRPVSHGVDYVYNDPTGQGSACPSDFVRVTFNGPLMQTYSSSVLVTEGATVVIMERHRFTLAPVTWCTQNAPASLAGRQKASIPFTVVVCLLPXYVMRAVMNAHKASADIQSAEAHSLCRAELTELRGYVTRTGQRTAHDETLRNSKCPWQLSSRPFRPDDAIGSDHIWGVRLKSLTSSPKFLPQFPRVKAFRVYYSSKNSGSHKDHRQPTDGN

SEQ ID NO: 1020095 - protein, 107 aa, Homo sapiens
MPTETKRERPHQMKKIPHLEGEGQKPAGISWGGKLANLSPNFRWAIPNRHIEHNEARDDVERFVGQMMEIKRKTREQQMRHYMRFQTPEPDNHYDFCLITLNPKSFR

SEQ ID NO: 1020096 - protein, 36 aa, Homo sapiens
MVDDVSFHALSPALSVYPRCSRRQRPYAERLEWRGV

SEQ ID NO: 1020097 - protein, 81 aa, Homo sapiens
  misc_feature (3)..(3): Xaa can be any naturally occurring amino acid
  misc_feature (7)..(7): Xaa can be any naturally occurring amino acid
RGXRHGXEKTTEGDLPARCLCCTRVCLLCPLFALSRHILQRASRMAHKQIYYLDKYFDEHYEYRHVYVYPENFPNKDLKLI

SEQ ID NO: 1020098 - protein, 157 aa, Homo sapiens
MTGYAVPPFEGHESTCVELGRLTSSGLAAWRLVVIDPYCAYLGVMYLPGKWNKGWHAAGSDPSWKCICYFVRRSTQGPFDDIAWVSADRGIWPQLVGMTRSSVFQEDPELGSTCSLERSRLDMPILHQAHSPRTVKLCGLESSKEPEATGTSCSDDW

SEQ ID NO: 1020099 - protein, 204 aa, Homo sapiens
MGSNVTNTTDPRSMNSRVFIGNLNTLEVKKSVYGSSFDLDYEFQRDYYDKMYKLPSTCTLNLSLTIAQGCNALKTSAVSGNTSRRGKSGFNSKSGQRGSSKSGKLKGDDLQAIKKELTQIKQKVDSLLENLEKIVKEQSKQAVEMKNDKSEEEQSSSSVKNDETNVKMESEGGADDSAEEGDLLDDDDIEDRRDEHLEFIKDDD

SEQ ID NO: 1020100 - protein, 75 aa, Homo sapiens
  misc_feature (53)..(53): Xaa can be any naturally occurring amino acid
FLIGVVPTYDSIGIWAPILLLLLRVFQGIGLGGEWGGAVLMAYEYAPPEKKGXYASLPQIGLAIGLCLASGTVAL

SEQ ID NO: 1020101 - protein, 75 aa, Homo sapiens
SRGSVFCLASCILGLPMSVTCTYSPASTRCFANCQDLPVQLWVDSTPPPVSRVRAMSIYNQSQHMTDVVTGCANH

SEQ ID NO: 1020102 - protein, 63 aa, Homo sapiens
GLAQSGGDREERLTRTGFTHERHELHLVVEEEIDGERLFGVAGIHTPQAFLRLHHGYHRVLHE

SEQ ID NO: 1020103 - protein, 31 aa, Homo sapiens
RICRLHMRVTLLTLLPAEPPGFTLADCSPSS

SEQ ID NO: 1020104 - protein, 105 aa, Homo sapiens
KSYLQKITWICCKPPGVCTVILLSGLVEGSIQYLYLPWTLQAYVPYMTEHLAQQSEFAATLLLLWAPLKTGRLTNSFVNGPGQHGKMCCILPPKTPVKYFFLTLS

SEQ ID NO: 1020105 - protein, 105 aa, Homo sapiens; identical to SEQ ID NO: 1020104

SEQ ID NO: 1020106 - protein, 105 aa, Homo sapiens; identical to SEQ ID NO: 1020104

SEQ ID NO: 1020107 - protein, 82 aa, Homo sapiens
VTPPLFVQACSCWASKQPLSEKRKKVDRSRKETKLFYACEFPHRYKTHTNKKSLERDFNKYLKQGKARKISGSTSNLYVQRP

SEQ ID NO: 1020108 - protein, 76 aa, Homo sapiens
PGSHLAKKRNRNRKKGWNKLEQGKTGCQGTWVGDTTLPLTSSMTLINKFNPPRPRFHIHENRIVMDRTSQSWKDQM

SEQ ID NO: 1020109 - protein, 44 aa, Homo sapiens
MAMPDSPTLFVSAMMHTVYVKPVSSCSSHYLGANFCGGSVTLVR

SEQ ID NO: 1020110 - protein, 174 aa, Homo sapiens
  misc_feature (130)..(130): Xaa can be any naturally occurring amino acid
  misc_feature (140)..(140): Xaa can be any naturally occurring amino acid
  misc_feature (144)..(144): Xaa can be any naturally occurring amino acid
  misc_feature (159)..(159): Xaa can be any naturally occurring amino acid
  misc_feature (172)..(172): Xaa can be any naturally occurring amino acid
HELTLKEEQEEYIREDIEWTHIDYFNNAIICDLIENNTNGILAMLDEECLRTGTVTDETFLEKLNQVCATHQHFESRMSKCSRFLNDTSLPHSCFRIQHYAGKVLYQVEGFVDQNNDLLYRDLSQAMWKXSHALIKSFVXKEIXPDQPGPLQQAHSQGXRATLMPTDQDPNXYR

SEQ ID NO: 1020111 - protein, 140 aa, Homo sapiens
MPLGITPATSPLRALYHGPPWSKEPSIFPGKSFWPSLASLALQVFHEGPPMVLWALSISDSLAKNGVRRPQVLLKPLRFVVGVLQKGLPSPGVLALTPAFHFVVKVAAPSWLWPSSWGAPSRAAQGLPLPKFKPLWPVAL

SEQ ID NO: 1020112 - protein, 101 aa, Homo sapiens
AFEQRGALVLDVFGIDVAQVDLGTVGDAGMTHRFDQRLVGVQQLHVLADHGDGDFMLGVELGVHHLFPLGQVGAVALQAETLDDEIVQALGVQHGRDLVDG

SEQ ID NO: 1020113 - protein, 55 aa, Homo sapiens
NDVDLAGYLFNVFSVGWILEALLSDLRNFAAHTAQANLGRAVVELVGCLLATGFI

SEQ ID NO: 1020114 - protein, 164 aa, Homo sapiens
FKDHLRVTSVAVKGCQVFLRACAEPKKQWKDFHLAFCLPRVQDPVTRHLLKIGKHIPAKGPPVAAAVEEVGLEQVGDVKVLGTRFKPQERVGSLAAGVTEVAPQKVLDLGIPAGAQPGHHHFCCDQNIGGGSQGLKKGGPFFLNGGPKGPAVGFHKKDHGRFGG

SEQ ID NO: 1020115 - protein, 38 aa, Homo sapiens
SPRAPWAFSQAKENLSLREEDRSPATARSQVSHSKTVV

SEQ ID NO: 1020116 - protein, 318 aa, Homo sapiens
MQSATPRRLPASSQGTVQVLLPRTTGPWLVAACDGSPQDHSPLARLTGDCHINEKVVHYLTMGATLCSAEMLSAFLAPDTWEAKGSLGGLVPALQDAPEEAPGFLNAFSRPCLQPFSRPSEFQTALTFVWSSVPRLAPPSSGQLLSTRGTSAPGAHSAMSGTVLAVTAGRGHHRNLVCRGGGPAQMPEVLQVRDTDLDPVTTKKRTGKVALKAPGNRPETPGVPEAGKAWSGAGTSLCGGWRCGDGDWSCLHTLNQNPPSSPSPATKPARRHGGWRWREASVLDCLSPLLRTTPRVAPSLPHQPRPKASSSSASRPGT

SEQ ID NO: 1020117 - protein, 318 aa, Homo sapiens
MQSATPRRLPASSQGTVQVLLPRTTGPWLVAACDGSPQDHSPLARLTGDWHINEKVVHYLTMGATLCSAEMLSAFLAPDTWEAKGSLGGLVPALQDAPEEAPGFLNAFSRPCLQPFSRPSEFQTALTFVWSSVPRLAPPSSGQLLSTRGTSAPGAHSAMSGTVLAVTAGRGHHRNLVCRGGGPAQMPEVLQVRDTDLDPVTTKKRTGKVALKAPGNRPETPGVPEAGKAWSGAGTSLCGGWRCGDGDWSCLHTLNQNPPSSPSPATKPARRHGGWRWREASVLDCLSPLLRTTPRVAPSLPHQPRPKASSSSASRPGT

SEQ ID NO: 1020118 - protein, 109 aa, Homo sapiens
MSYVPGYWIRMSRLMVSIITSMGIRGVRVPCWSAVMSYGPEQPGVIPRALMDLLQLTREEGAEGRPWALSVTMSYVEIYQEKVRLFSDRGRKRQRVKSDLVVEPVRHNR

SEQ ID NO: 1020119 - protein, 176 aa, Homo sapiens
  misc_feature (1)..(1): Xaa can be any naturally occurring amino acid
  misc_feature (30)..(30): Xaa can be any naturally occurring amino acid
  misc_feature (39)..(39): Xaa can be any naturally occurring amino acid
  misc_feature (73)..(73): Xaa can be any naturally occurring amino acid
XLTPCTKYTLLSFSLFPRSPFVQSNTGFWXLNSAILIGXIISVVPLLFLFFFLRQSLSLSPRLQFTGVISAHXNLCLPGSSTSRTSDSRIAGITDRHHHTQLILVFFAETGFRQVDQPSFKLLTSGELPALASQKCMGLKSTCSHRLPWTYFHSSCVNHHFHSSLATMPVLIFFMF

SEQ ID NO: 1020120 - protein, 74 aa, Homo sapiens
KSGINAEGPLRPGARHLGAAGTRVGWRLPDVGSLWGRVLRPCFSLLFHSRPRCRSTRPGRSSAALRRSFTSLTL

SEQ ID NO: 1020121 - protein, 74 aa, Homo sapiens; identical to SEQ ID NO: 1020120

SEQ ID NO: 1020122 - protein, 95 aa, Homo sapiens
IAAEGPTCSSKEISSSPDNHQSPAKRLNRTEQDVIANSPSNPQACTSKEWSTPEHRQQSSCFASGNMREIGGFLLNPTAEDFSSFTSSLLQYPPG

SEQ ID NO: 1020123 - protein, 93 aa, Homo sapiens
PCPAAEPRRNKPNKYRAGASCREFSLTASYTEPQERERNSSTFFSEARHQNTTKTAFVPTDASRATTAQKPRCRQTFAKSQHNAPNGAPAGRE

SEQ ID NO: 1020124 - protein, 226 aa, Homo sapiens
MVDLEGFYFGTYEDEVREWIDGRSGLNPVIRFDCSEITADIESFNWVGLNLTDDGFWFEDTKWFIVDRIDSLSAENFRQLITHLHDMETKLVIAFVQRTLNDTITKRSVQAIGSDAELYPRPIPAISDHDDLVEWVVGWLDRHDVGIQRKTVNRMIEFTGNVDQTPLVELCVTLASGFRGRTVSAADVKAQMGIDGKLDSYHLMTTLQAGDAESAIDIIRRADIEH

SEQ ID NO: 1020125 - protein, 39 aa, Homo sapiens
MSHRRRCRSPSPQCRRRTASRNRGRTPEDHPRSDRAACC

SEQ ID NO: 1020126 - protein, 122 aa, Homo sapiens
RARPRSPEGGGEAILSRPTPRNRAERLGEAAEPRSPPSEALDAATVRAFSKLFVCRPRRLEPFFHAITVLRPENALNEELAALEGPIPWGLRRREPEPLLPMVKRPTCFSLLLIGDPGVGFT

SEQ ID NO: 1020127 - protein, 120 aa, Homo sapiens
RARPRSPEGGGEAILSRPTPRNRAERLGEAAEPRSPPSEALDAATVRAFSKLFVCGPRLLEPFSYASSDLLPENALLRRRPHWGPIPWGQRRREPEPLLPMAAKTCVLIRFSDGLPYYLF

SEQ ID NO: 1020128 - protein, 37 aa, Homo sapiens
MAKKTYYLLLLLLIGDSGVGKTCDLCGCSDDAFYYVF

SEQ ID NO: 1020129 - protein, 92 aa, Homo sapiens
MKTLMRHGLAVCLALTTMCTSLLLVYSSLGGQKERPPQQQQQQQQQQQQASATGSSQPAAESSTQQRPGVPAGPRPLDGYLGVADHKPLKCT

SEQ ID NO: 1020130 - protein, 253 aa, Homo sapiens
SGFISLGTKASVGVATGSRLHVQLEDPRAQPGSGWHIAEAAGRAGGACCCNQWPRGCYEWTVHLEGGPRRVNHAAVAVGHRVYSFGGYCSGEDYETLRQIDVHIFNAVSIALDKAAPGEDSHPWASVLLVPYMRYWTTQSVLYRTTTVLLEGRARMTAEGVLASVLYAFESADCLTNDMHKLDTSTMIWTLICTKGRPARWRDFHSGTMLGKSHVCLWGPCRSIWGHSIPINEIYVNRIRVFEHQKLRLGWTV

SEQ ID NO: 1020131 - protein, 249 aa, Homo sapiens
EISPRGPKEVLNGCLGFDWSKNPRAQPGSGWHIAEAAGRAGGACCCNQWPRGCYEWTVHLEGGPRRVNHAAVAVGHRVYSFGGYCSGEDYETLRQIDVHIFNAVSIALDKAAPGEDSHPWASVLLVPYMRYWTTQSVLYRTTTVLLEGRARMTAEGVLASVLYAFESADCLTNDMHKLDTSTMIWTLICTKGRPARWRDFHSGTMLGKSHVCLWGPCRSIWGHSIPINEIYVNRIRVFEHQKLRLGWTV

SEQ ID NO: 1020132 - protein, 164 aa, Homo sapiens
RRTGSGLRRDWERAPQRTLARGSAQSVCEDPARRPPGDPMASEGLAGALASVLAGQGSSVHSCDSAPAGEPPAPVRLRKNVCYVVLAVFLSEQDEVLLIQEAKRECRGSWYLPAGRMEPGETIVEALQLEVKEEAGLHCEPETLLSVEERGPSWVRFVFLARPT

SEQ ID NO: 1020133 - protein, 45 aa, Homo sapiens
RPGDAHEHEPPDRAEVVGGGGDIQEVVHQDGAHEGERGEYAEEFV

SEQ ID NO: 1020134 - protein, 86 aa, Homo sapiens
TCGVAAPLRAGIRDGSETALPYRCPAQGEGQMESPDASQTTWLPKGKAGEAPWCPWWRAPQGVKGFPTEAECRGLAVSPHGPGKAF

SEQ ID NO: 1020135 - protein, 247 aa, Homo sapiens
ERGGRDGEGRGELERAETAAALQSWLVAAARVPVLPAGGAPRVGEGHGSAAPGAMGCIGSRTVGNEVIAVDWKGLKDVDQYENGKHQLTAREQLHWPLTEQTRTDFSWEGINLYHGGQHIHSFRSLMRNSNAYGIGALGNVINSQGSHWSMKDHVTNATAMRQGLVGPTGLSGKGMRERHQLYSHEAQAESVRRDTDAYSDLSEWRDKEAQYLTGVMAPVRYSLEGHSSLTWAIHGLVRTMEGEGRT

SEQ ID NO: 1020136 - protein, 113 aa, Homo sapiens
ERGGRDGEGRGELERAETAAALQSWLVAAARVPVLPAGGAPRVGEGHGSAAPGAMGCIGSRTVGNEVIAVDWKGLKDVDQYQKWKAPAHCTGAASIGHRLSKIELISPGKAST

SEQ ID NO: 1020137 - protein, 49 aa, Homo sapiens
MVKGLRDRAGDAQQSILHDGATDLGLHDDDQLHRTVEPPGDVLSVQDGA

SEQ ID NO: 1020138 - protein, 169 aa, Homo sapiens
  misc_feature (137)..(137): Xaa can be any naturally occurring amino acid
  misc_feature (145)..(146): Xaa can be any naturally occurring amino acid
  misc_feature (149)..(149): Xaa can be any naturally occurring amino acid
  misc_feature (156)..(156): Xaa can be any naturally occurring amino acid
MRDSGMIFLLSHYGGARVLSPAQECARPGHGGKYDPVLGTLTNPALALSLSTPGQTDRKTDHRYRDEDTGSDQEFGELQDIAVLWGFPPHAARASRPQGHCLEDQEPGAAFPYSHLLLELPRGHWQMSGEERDTLWXKAAMTAPXXGLXLISPGPXLGAAKGLCLHIEP

SEQ ID NO: 1020139 - protein, 178 aa, Homo sapiens
GGGLRCLAVWEGLTAVGGGVAVFMCEFARWWYALASLSQSRSPRLPQLRNAGNFCRRAPALRTHAAPAPTQGRPRHSNRAAGASRLPAQTQPGCALRHARRLLRYRPQPGVSRAGRMSRASHTGARGPVPPNAMEEAILSAPLAPTQHDPALDPSLSPPQGSAWASAPHESRPRARGR

SEQ ID NO: 1020140 - protein, 105 aa, Homo sapiens
  misc_feature (17)..(17): Xaa can be any naturally occurring amino acid
  misc_feature (27)..(27): Xaa can be any naturally occurring amino acid
  misc_feature (49)..(49): Xaa can be any naturally occurring amino acid
  misc_feature (99)..(99): Xaa can be any naturally occurring amino acid
PPQQGPPDLWLREANAXTWVTLPFCKXSWHTGAYRAPVMVSWTMDSFKXSDPFEFCTPRYIPFDKGSLLLITGALWNVCNMFLYSCIVGVHSKLSPAAXALCIGP

SEQ ID NO: 1020141 - protein, 96 aa, Homo sapiens
LEVRIEVAPAPTHLVFLRLRDLPVVEIVVDDAVFRAAEVVVQEIDRRAVDRSIAGAVHHVARHRHAVVERGQALAVGGIERHERQPVILRIAERKL

SEQ ID NO: 1020142 - protein, 37 aa, Homo sapiens
MPLDGRGIGVAAVRSEQMEVVGVIPIPRILGGRLIRN

SEQ ID NO: 1020143 - protein, 62 aa, Homo sapiens
HGLGAFWQHARDVVQQAATGDVGHGLDRAGVLDQLQQWLDVDAGRRHQQVGQWFAVQLDAFD

SEQ ID NO: 1020144 - protein, 347 aa, Homo sapiens
  misc_feature (18)..(18): Xaa can be any naturally occurring amino acid
  misc_feature (338)..(338): Xaa can be any naturally occurring amino acid
DSVSGYSGVEIASSLVVXDRQCQRTLVDKRRLGLSTCCGRHYNVQAVGMLCDLRTNSLPRLCRGLIERSPRLFVSILRYTIGVLVLEVDGRYARLHSVGTDAGRSSWFAGAATYKEARLRPKRPRLQTGAGRSLLRRRWVALKLRGQSGFSPSEGKAVCYSEERDGNEQEDAADGLGACAARWLRGGVGRPNRNDPRAHSGGGDEIIRRFVSLSVGQRKASYEVVNWLYRNRWNKRGQLCNAIIKFHVIFCVRGRSQLRLILTPQAGHVILLLMFGELALAKAHTTEEIPSKIKQCSLLTLNTVLPTTGCCIEAEGKARGRLSFGRTAYWGCHGLELXAQGMPSEKA

SEQ ID NO: 1020145 - protein, 141 aa, Homo sapiens
MAQALEIGDVVAGNPYEPHPSEVDQEDDQFRRLFEKLAGKDSEITANALKILLNEAFSKRTDIKFDGFNINTCREMISLLDEETQDTMQVPDSSETFWNTEADILDTVRRWPSMNQEGGPHRHQICQCFDLGLLSLRNYEK

SEQ ID NO: 1020146 - protein, 128 aa, Homo sapiens
  misc_feature (7)..(7): Xaa can be any naturally occurring amino acid
  misc_feature (20)..(20): Xaa can be any naturally occurring amino acid
  misc_feature (23)..(23): Xaa can be any naturally occurring amino acid
  misc_feature (28)..(28): Xaa can be any naturally occurring amino acid
  misc_feature (31)..(31): Xaa can be any naturally occurring amino acid
  misc_feature (35)..(35): Xaa can be any naturally occurring amino acid
  misc_feature (43)..(45): Xaa can be any naturally occurring amino acid
  misc_feature (58)..(58): Xaa can be any naturally occurring amino acid
  misc_feature (60)..(60): Xaa can be any naturally occurring amino acid
  misc_feature (115)..(115): Xaa can be any naturally occurring amino acid
  misc_feature (121)..(122): Xaa can be any naturally occurring amino acid
  misc_feature (124)..(124): Xaa can be any naturally occurring amino acid
  misc_feature (126)..(126): Xaa can be any naturally occurring amino acid
  misc_feature (128)..(128): Xaa can be any naturally occurring amino acid
TRQPDAXDGDSYDPYDFSDXEEXNAIKXTLXKTAXSQETKESXXXELSESRLKAFKVXLXDVFREAHAQSIGMNRLTESINRDSEEPFSSVEIQAALSKMQDDNQVMVSEGIIWXVGGGVXXGXGXCX

SEQ ID NO: 1020147 - protein, 96 aa, Homo sapiens
MARAPHNALSFRKICERTISSRDYCLIPLKCDLQPPTALEQPFAITFEKRRGKNDGKIREHKAKACRVGMPCPSGHGRGRSESGEEGAVAGLPLAD

SEQ ID NO: 1020148 - protein, 137 aa, Homo sapiens
  misc_feature (11)..(11): Xaa can be any naturally occurring amino acid
  misc_feature (21)..(21): Xaa can be any naturally occurring amino acid
  misc_feature (36)..(36): Xaa can be any naturally occurring amino acid
  misc_feature (108)..(108): Xaa can be any naturally occurring amino acid
WCGLVGKTFEXLAALGTSTRXLREHQKGRPTSTNPXAQQQSQDTGLEHRGKLDGNQDPNRFAQKREKGVRGDVCVEWEPLTKDLAGCIHGLSNVKLNEHFLNTTDFPXHPLKEQPWTEPWAGSRGRRHPWLQWRGQG

SEQ ID NO: 1020149 - protein, 38 aa, Homo sapiens
LPASRRNFSAEHATHVGVVAAYEERFPFGTRGVGVVSF

SEQ ID NO: 1020150 - protein, 74 aa, Homo sapiens
  misc_feature (43)..(43): Xaa can be any naturally occurring amino acid
DKTASVLQSVSLEVTRATAGMVLEKLSTFDRVGSNATGDGTKXKPFKTSLKALITIRKKPFPTIYVDSQKENKK

SEQ ID NO: 1020151 - protein, 37 aa, Homo sapiens
LTILQLECRDEESNLTKMLMLDKRILCSPPLSCPPIE

SEQ ID NO: 1020152 - protein, 101 aa, Homo sapiens
GQITPLLIIQIWQSPSCDLPLPASIPLPCSSYDNRDEVPDSSASPIRTLVKREDMFTPSVSIFPARAFRSLPALSATWSHSSCSTDHRQPWDLELDASRLN

SEQ ID NO: 1020153 - protein, 101 aa, Homo sapiens; identical to SEQ ID NO: 1020152

SEQ ID NO: 1020154 - protein, 101 aa, Homo sapiens; identical to SEQ ID NO: 1020152

SEQ ID NO: 1020155 - protein, 168 aa, Homo sapiens
LAEVRGRARPSGPGLRTSKLRPALRPLARTTFNSSTMSARRARPGVSPRARAFQRYRDLLVPAPGLGPSLTSQGSGIHWRRMCGVSVVTPGCNQLPTYGVQVENYTLTINDDQCNSSLRLSGELSYVWRLFSQLVGKSAEGTIFINKTEIEDFPRFPHRGLRVDTSRH

SEQ ID NO: 1020156 - protein, 196 aa, Homo sapiens
AVSKSHTSLFRPSTWLYISFVKSNVESEHLHVLSDALLIVALGQDQNPTLLASSAWQSGLRYACAFFAKAQRTGSSKSTGKFGSTHGSFSVGSQKHYRQPEQCLFDLQKSSRLTLVEVRMTFHLVADRLVLKPWLVEDHLQQPVVEVGQPDVTWANPASFDIYHWLPLGHKDPLCHQYLSIFIFRDHFLHLGLQTL

SEQ ID NO: 1020157 - protein, 104 aa, Homo sapiens
  misc_feature (70)..(70): Xaa can be any naturally occurring amino acid
MESGKTASPKSMPKDAQTDGTNPERIWGITEYEPRVINQMLEFAFRYVTTILDDALAIQCRADQSFTSPXPRDFLLDIAGQEIKPLCHGSSHIQVLSCHLINTA

SEQ ID NO: 1020158 - protein, 238 aa, Homo sapiens
RAGVQERGQELLGCERRRRHVRLSEKLTPGSRSSGACLEVQGSRPGQWNVTADMENEIRGLCLKSREICPEPAHSSGAGGSSSGSAGGHTRAVLRTVRADYSSMAGFPPGEQVAQFLGDYVDRGKQSLETICLLLAYKINVPRDLLPAPWEPRVCQGSIGIYGFYDEWQETLTHIELWKTFSELASTAWPIAGIAGGRRSSGATGGLYPELQSMEQIRRIIAAQDVALTRDWCVTAVV

SEQ ID NO: 1020159 - protein, 313 aa, Homo sapiens
MMAAEEPSGSYKQEPLGSDCEGVNCLAYDEAIMAQPGTEIQQEIAVQNPLCVIAVGSSRVLYNGGMLKHDKQSYRTERSRDLAQKCTRTILKIRPDGNCFYRASGFSHLEALLYDSNGVAASSQAVSRLRARGKTWCPRASLNSTIERFSTKRFMDLIAAGAHASTTSVVDLLASFNDQSTSDYLVVYLRLLTSGYLSVAESKFFDALHRGWHGLSKEFCQQEVEPMCKESDHIHIIALAQALSVSIQVEYMDRGEGGTTIIIALAQALSVSIQVEYMDRGEGGTTNPHIFPEGSEPKVYLLYRPGHYDILYK

SEQ ID NO: 1020160 - protein, 87 aa, Homo sapiens
WIAPIMTMDRAFFSLHTRVETLQQARETFARIAVGRGSAQEQKLRAEGFGDNQVYPFEIGENPAQLLLMGRVDAWFNGIPETQSIWR

SEQ ID NO: 1020161 - protein, 259 aa, Homo sapiens
ALLRRKKTSKSKAITPKRLLHIYNHKKQHSYLQSWPVQEVLSAVRTSNFALDVDLTHYTLSYSRNITHSLLLGHRSPILSSFYCARSSFHYKQSHTCHSAIPSCLQATAGLSLNPSFASHALSWFLAALAICTAMDVVSISSANTVHNHIICATLSKHAIAAQLRSTFPHQGTGITHSVAFTLGNTKSLRASANPDPNQPAHYTVATQAHQPSLAHSQLTLLHGNPSLQEAKPLDPGTHASPLVPTPQLGREATTQPPR

SEQ ID NO: 1020162 - protein, 99 aa, Homo sapiens
ALLRRKKTSKSKAITPKRLLTSITTKSNIHSSVMASPGGLKVAVRTSNFALDVDLTHYTLSYSRNITHSLFLDTGPLFYLLWKVTNLFTQIKCTSEFQC

SEQ ID NO: 1020163 - protein, 114 aa, Homo sapiens
  misc_feature (64)..(64): Xaa can be any naturally occurring amino acid
MLMVLSSTVVTALVAESPVVLNWTWLLSLLPREVAHAPRSLIKLTMMAPPNRSAKCVEMKPSRXASPREPVPGEIQIDNDALGRLQPRPYDTDTWLALCQHALLIADESRPFVG

SEQ ID NO: 1020164 - protein, 140 aa, Homo sapiens
MADYSTVPPPSSGSAGGGGGGGGGGGVNNAFKDTLQRAQQITAKIRDNTKTSLNSNNYNYKKQKRPLEHKYQPDTKKLTPQNNSFKTHLPPIHHHQSISIITKEYKVPHKIIKFIINRENKHISRIQQKSEYKIHISPHS

SEQ ID NO: 1020165 - protein, 146 aa, Homo sapiens
GGEIGAGVWPRPIRCSPFTSGSLISLVCNIDPGYCGRGGLLGRMGGCYINIDIILFSELRWCYLRLVMGEPSGPGWARLQPKHEPGLDHLSSLVGKTFLTDFVKDKAVAQPLLPATPLGTIHQLPEEVRRIHYVHAFAKGELSSLC

SEQ ID NO: 1020166 - protein, 114 aa, Homo sapiens
ISVFSKEEKIPYLIQAWVDPFNKEDKSKAPFTVIPPVSRLEPSQEKILRIIHTKGVSLPDDRESVFWLNIKNIPPSASNKATNSLEIAVKTRIKLFWRPANIRLIPEDAAPKVK

SEQ ID NO: 1020167 - protein, 205 aa, Homo sapiens
  misc_feature (4)..(4): Xaa can be any naturally occurring amino acid
  misc_feature (9)..(9): Xaa can be any naturally occurring amino acid
  misc_feature (11)..(11): Xaa can be any naturally occurring amino acid
  misc_feature (19)..(19): Xaa can be any naturally occurring amino acid
  misc_feature (23)..(23): Xaa can be any naturally occurring amino acid
  misc_feature (26)..(27): Xaa can be any naturally occurring amino acid
  misc_feature (40)..(40): Xaa can be any naturally occurring amino acid
  misc_feature (43)..(43): Xaa can be any naturally occurring amino acid
  misc_feature (65)..(65): Xaa can be any naturally occurring amino acid
  misc_feature (83)..(83): Xaa can be any naturally occurring amino acid
  misc_feature (137)..(138): Xaa can be any naturally occurring amino acid
  misc_feature (145)..(145): Xaa can be any naturally occurring amino acid
  misc_feature (153)..(153): Xaa can be any naturally occurring amino acid
  misc_feature (158)..(158): Xaa can be any naturally occurring amino acid
  misc_feature (160)..(161): Xaa can be any naturally occurring amino acid
SLPXGATQXQXINIDQIRXKLPXLPXXTRKKLVQQYGMLXEHXFTLLNEVGQLKFFQNVIKETKXEPKKVTSWVLNTFLGYLXQQNLAVSESPVTPSALAELLDLLNSSTISSSAAKQVFEGLWKREGNTPGQIVSXXPLALMQXQGALALLXHSLMXAXXQVIMDVKKKNTRAINKMIGLVRKATQSRADPVMIKEILEKKLSL

SEQ ID NO: 1020168 - protein, 87 aa, Homo sapiens
  misc_feature (3)..(3): Xaa can be any naturally occurring amino acid
  misc_feature (27)..(27): Xaa can be any naturally occurring amino acid
  misc_feature (38)..(38): Xaa can be any naturally occurring amino acid
  misc_feature (46)..(46): Xaa can be any naturally occurring amino acid
  misc_feature (78)..(78): Xaa can be any naturally occurring amino acid
  misc_feature (83)..(83): Xaa can be any naturally occurring amino acid
  misc_feature (86)..(87): Xaa can be any naturally occurring amino acid
RKXGLRPGVRHPFLGDLRKLITDDFVXQKYLEYKKIPXRNPPEYEXLWGLRARHETSKMRVLRFIAQNQNRDPREWKXHFLEXVDXX

SEQ ID NO: 1020169 - protein, 479 aa, Homo sapiens
CLSYFVLYLRPGLFLSAFPLSLLSCCSCFLGAFSVPSLFSLVLRALYDSFRFLCLVVSLVPGCLYSVRSFSFPCLPVFHFRVYSLVAFLSPLLVLYLPFSFFPPLRWLFLCSPCFCALVCLLLCLVSLVVLYLFVVSSCVCLFLLLCYPFSLFIYYCVFGSRSRVVLLRVLSCCSASCPACFLVCPCIVALRCLCRFACIAFSPCWSVLVLCHGSSLCRTSSMRWCLPFFPRLRPLAHDRFFVTVMCHPWDGFSSLSLSLSVASCSHDGACGVRCAHVLLALITLVPLCLLTGCRHLMLLVLDPLHRLSLVLCVCPLTVSSGLLWDGLARQSPFLCYWHIIGDVGILICLVVSSQTASGSELDALAVLRSPAAMPHEDAPTLLLVATRLLTVGLDTAGLQSPQFVSLVPLWLRWEGEGGVGPPARKRDRSTPGRIQGVREALPSGPPGGGPDVSPEPSAARMDFALGFAFAASLETVLE

SEQ ID NO: 1020170 - protein, 115 aa, Homo sapiens
MVPIGQRLQPNVGEDDQLVRGRGSGSVQLADLGLPGDSDVQRVTDLDRVTVADHGDEVPMTPATGGLLLGLRWQRYVTEQVEIFGSHHLSSELRSIGHGVEDHLLHLEGELLHHV

SEQ ID NO: 1020171 - protein, 110 aa, Homo sapiens
LKSSTVGPVLLWEKLRLGASAETGVKSLWELHRPEEHAFSSCPLMVSYLNFSPFVNILGGWAVLQGWSKQGLEPLFSSCCLLLMPWPHSGHFAEQMPLTSQDGCPPPCDM

SEQ ID NO: 1020172 - protein, 132 aa, Homo sapiens
LKSSTVGPVLLWEKLRLGASAETGVKSLWELHRPEEHAFSSCPLMVSYLNFSPFVNILGGWAVLQGWSKQGLEPLFSSCCLLLMPWPHSGHFAEQMPLTSQQGFPHPPLNEQVSAATRASSNHPTPMTLALC

SEQ ID NO: 1020173 - protein, 109 aa, Homo sapiens
YFADRVQCVKSEGMLSGPLAVSMGVPQGSILGPTLFSVYINDVALAAGDSLIHLYADDTILYTFGPSLDTVLSNLQTSFNAIQHSFRGLQLLLNASKTKCMLFNRSLVD

SEQ ID NO: 1020174 - protein, 143 aa, Homo sapiens
MTYAVRKLDNTKFRSHEVGYTRIIFFDQNVDTVVLTVEFQGKDSGKLVQVNCQISGFSYIVFIQHVLKIDVSLDLSMDTSVYPIVGDYFLQVKVDGPRSPSYGRSRSRSRSRSSFRITILTQESQYITKEEVRGSRLFSPYSL

SEQ ID NO: 1020175 - protein, 92 aa, Homo sapiens
GPDEIARCRGVCTERDMTYAVRKLDNTKFRSHEGETAYIRVKVDGPRSPSYGRSRSRSRSRSSFRITILTQESQYITKEEVRGSRLFSPYSL

SEQ ID NO: 1020176 - protein, 131 aa, Homo sapiens
RVGEGHAQLDYVGARCGQPLEDRQGGVVVRVAGGDESHQGGAVCFLQLGKTGLQAAHQCFSCWDCCMWCITVCMSLSATAREVDHHQVILGQVRCALEDFGQGMGAFQGRDDAFQAAALVERGQGFVVGHR

SEQ ID NO: 1020177 - protein, 135 aa, Homo sapiens
MGYISMERERALLQVPATGDLSAADSVTAPGKGPSHSHGWSGPRTEANLTSMRLNPTRRKRLSAVTFPDIIRNYKVMAAENIPENPLKYLYPNIDKDHAFGKYYSRPKEAPEPMELDGPKGTGYIKHELISVSEV

SEQ ID NO: 1020178 - protein, 113 aa, Homo sapiens [sequence omitted]

SEQ ID NO: 1020179 - protein, 718 aa, Homo sapiens
MAHHLPAAMESHQDFRSIKAKFQASQPEPSDLPKKPPKPEFGKLKKFSQPELSEHPQKAPLPEFGAVSLKPPQPQFTDLPKKPPPPEVTDLPKKPPPPEVTDLPKKPPPPEVTDLPKKPPPPEATDLPKKPPPPEVTDLPKKPPPPEVTDLPKKPPPPEVTDLPKKPSKLELSDLSKKFPQLGATPFPRKPLQPEVGEAPLKASLPEPGAPARKPLQPDELSHPARPPSEPKSGAFPRKLWQPEAGEATPRSPQPELSTFPKKPAQPEFNVYPKKPPQPQVGGLPKKSVPQPEFSEAAQTPLWKPQSSEPKRDSSAFPKKASQPPLSDFPKKPPQPELGDLTRTSSEPEVSVLPKRPRPAEFKALSKKPPQPELGGLPRTSSEPEFNSLPRKLLQPERRGPPRKFSQPEPSAVLKRHPQPEFFGDLPRKPPLPSSASESSLPAAVAGFSSRHPLSPGFGAAGTPRWRSGGLVHSGGARPGLRPSHPPRRRPLPPASSLGHPPAKPPLPPGPVDMQSFRRPSAASIDLRRTRSAAGLHFQDRQPEDIPQVPDEIYELYDDVEPRDDSSPSPKGRDEAPSVQQAARRPPQDPALRKEKDPQPQQLPPMDPKLLKQLRKAEKAEREFRKKFKFEGEIVVHTKMMIDPNAKTRRGGGKHLGIRRGEILEVIEFTSNEEMLCRDPKGKYGYVPRTALLPLETEVYDDVDFCDPLENQPLPLGR

SEQ ID NO: 1020180 - protein, 76 aa, Homo sapiens
QLGGARSSDHFEAQVDQITGHACNQRLVIVAHADERSTAGRQHFAGTHLGLGKGFAEGVAHAHHFAGGLHLWAEGR

SEQ ID NO: 1020181 - protein, 110 aa, Homo sapiens
MPVLPSSQVVRVSYILPRLHFHGNMAARTRGTTAAKFFPTSLTSKKQFGTLVPILCSPEVGLSHTCTLNSSLSGPPSPASRVFFNLAVCRGEVVTPPPHSPASELSIPTG

SEQ ID NO: 1020182 - protein, 121 aa, Homo sapiens
  misc_feature (50)..(50): Xaa can be any naturally occurring amino acid
WTGPSHIPQRLGQIECDYYMKRGECKFGERCKFHHPIDRSAPARNQTLEXNVKFTLAGLPRREGVQHCPFYMKTGTCSYAVNCKFDHPPPGEVMAAAGKETLTKAEEEGKESEEDAATAEK

SEQ ID NO: 1020183 - protein, 92 aa, Homo sapiens
LDFPWFPARVVCHDILGQTALVDLAGLRDAIADQGGDPALVNPVVPTQLIVDHSLAVECGGFDPDAFDKNRAIEDRRNEDRFHFINWTKKAF

SEQ ID NO: 1020184 - protein, 215 aa, Homo sapiens
  misc_feature (98)..(98): Xaa can be any naturally occurring amino acid
  misc_feature (103)..(105): Xaa can be any naturally occurring amino acid
  misc_feature (113)..(113): Xaa can be any naturally occurring amino acid
  misc_feature (115)..(117): Xaa can be any naturally occurring amino acid
  misc_feature (132)..(132): Xaa can be any naturally occurring amino acid
  misc_feature (135)..(136): Xaa can be any naturally occurring amino acid
  misc_feature (138)..(138): Xaa can be any naturally occurring amino acid
  misc_feature (140)..(140): Xaa can be any naturally occurring amino acid
  misc_feature (149)..(149): Xaa can be any naturally occurring amino acid
  misc_feature (154)..(154): Xaa can be any naturally occurring amino acid
  misc_feature (157)..(157): Xaa can be any naturally occurring amino acid
  misc_feature (161)..(161): Xaa can be any naturally occurring amino acid
  misc_feature (165)..(165): Xaa can be any naturally occurring amino acid
  misc_feature (167)..(168): Xaa can be any naturally occurring amino acid
  misc_feature (179)..(180): Xaa can be any naturally occurring amino acid
  misc_feature (184)..(184): Xaa can be any naturally occurring amino acid
  misc_feature (188)..(188): Xaa can be any naturally occurring amino acid
  misc_feature (207)..(207): Xaa can be any naturally occurring amino acid
ADRSGAGFMDLLHSEQHYPVSYTHICKDLGGVVDLILMGDTHSFVVTQMDKLGGRYHVFTLSIKTLEVFRRIPLRRARRGMTNTEDQTVPMAWLYPSXRVWVXXXCHSRCHTXIXXXDGFGSEVDAPQCIFXHEXXFXAXIDPKDAQLXNALDXSGXAARXELAXLXXLWFDLLHEDVXXPLAXFRFXLFAGRLAHLRCARNNRVCXGWQGCCCF

SEQ ID NO: 1020185 - protein, 178 aa, Homo sapiens
  misc_feature (86)..(86): Xaa can be any naturally occurring amino acid
  misc_feature (92)..(92): Xaa can be any naturally occurring amino acid
  misc_feature (142)..(142): Xaa can be any naturally occurring amino acid
  misc_feature (145)..(145): Xaa can be any naturally occurring amino acid
MELPDSELNRYPRLLILLHLFTPTCFSTQSGNWLKSSRITQDAQEMNALFLYRRTVTGSFKPKIKALSRKWDEIASQEKTGKRGNXHLNDFXGLLIFHGFSWRMDGTLPEGFSEARQAWVLGNSVAYYQAKLTGEDDEDSPXGDXDFFSNLGTNGKLQPASLSTAGGGALGCLAVGGG

SEQ ID NO: 1020186 - protein, 206 aa, Homo sapiens
MGAAGEGSQDERSGPGQPAADAPPEPTGPRPAPPTAPRSRSRPHHPRPPSPTGHARPALNAGRGGVPLRPGPALAPPGPPPGAGAMAFTFAAFCYMLTLVLCASLIFFVIWLIIAFDELRTDFKNPIDQWNPARARERLKNIERICCLLRKLVVPEYSIHGLFCLMFLCAAEWVTLGLNILFSSTTSGGTSTVLHMVLRCCVMRGP

SEQ ID NO: 1020187 - protein, 66 aa, Homo sapiens
PEWNKSSTPDGVPTLCCRNEAKQQISISRMWGLKVLLLPVVSFALYPEEILDTHWKLWKKTHKKQL

SEQ ID NO: 1020188 - protein, 75 aa, Homo sapiens
RNVLRIGVEELKSFRDVPSKVTLDECVELAKRFGTDDSSSFVNGVLDKVRHSLRESQRLMAALDPARKKAWKAAL

SEQ ID NO: 1020189 - protein, 286 aa, Homo sapiens
LVGSENHEQRSYEASNQYIAQDSYKPWTHSGSRGGSAPSSDQPASGHHASYDQQSGYAQHHGSYDEQSNYDQQHDSYSHKQQSYHSQRENYSHHTQDDRRDVSRYGEDGRGYGGSTGRRYRGRGGAYDKEVEECPMTEDQVGVTADGCKDMIGGHRELWSQQQMLIQNHDNSDNKTIWVPGLGEGVSTDQVGEFFKTNIGIIKTTKKTGDTIMIDLDTDKDIMEEPNGGGKRCVIVMTPPSAKCRPLTGLMEKNGHGNIIKVSFVTRMILEIHDEDGGSGVWGGEA

SEQ ID NO: 1020190 - protein, 109 aa, Homo sapiens
HEGIVELDGYLRLQVGISGRRPHHLCGTDEPVASVAACGSGGDGGGCGKLGRISHGEDQVTGPVHRRLDEEAVARCRDARRQRQGKPVHGLGEGAESGHAAVAQTREGI

SEQ ID NO: 1020191 - protein, 78 aa, Homo sapiens
NRTPFDLAEGESELVSGFNIEYAAGPFALFFIAEYPNIFIINPLPTTIFLGTTYDALSPELYTTYFVTKTLLLTSLFL

SEQ ID NO: 1020192 - protein, 104 aa, Homo sapiens
STPCGHRNTFSLQQLAPVLYEIVALCITSFACRSPRTQALSVGGSGAGWRQNFINYRPTPRVGGHQRVRSERRDTIRREGVGFGDYGVVPLLVHSSVLIPGYRA

SEQ ID NO: 1020193 - protein, 210 aa, Homo sapiens
  misc_feature (169)..(169): Xaa can be any naturally occurring amino acid
  misc_feature (200)..(200): Xaa can be any naturally occurring amino acid
MGSRVSREDFEWVYTDQPHADRRREILAKYPDIKSLDETWIPNLDMDSLFMMVLHPRLGGILPLVKDFELENGSHIWGAMRFGELAINPLHGLWAIPWRLAHNGWPLGNWQSNGGNRLGLGHGLRNPSLLGIPLFTFPFNEGIHSGIITRDLVSLSGVECRIFLTDFEXRGSPGTAFQTSLYGVILQASLLCLSTSVHQXQTNYVSGSYH

SEQ ID NO: 1020194 - protein, 108 aa, Homo sapiens
MGSRVSREDFEWVYTDQPHADRRREILAKYPDIKSLDETWIPNLDMDSLFMMVLHPRLGGILPLVKRLWTGKWIIFRAYTFNSYINHSITLTIHKITHNTTFNNYKAI

SEQ ID NO: 1020195 - protein, 129 aa, Homo sapiens
AKRALSRLKLKLNTDIVSSVGTYNLGQKALKPPPIKLYRETNGPVETKTRTFNTQAGGLLLSSDTKRAQIYGRRQIIPEKEGTGELKPVDDPRLMLKGFKARVPVEHHYLRASLFVYPQESLVIGAPLF

SEQ ID NO: 1020196 - protein, 49 aa, Homo sapiens
MTRRVLALIVGLALYGAGDALAIRAGLGVDPWTAFAQGLSLHTGIGVIS

SEQ ID NO: 1020197 - protein, 51 aa, Homo sapiens
MATAAVKLVLPAGPRSRPSILVRSSVMRRPRPGTLAGSRPCNVADVQHCAG

SEQ ID NO: 1020198 - protein, 151 aa, Homo sapiens
WGGEEGSKPLSQLKGPLLGRGIVLGPRGMESIKGVCGRGPGSLGVLFCFLGLSVQPVGTFHVPRGDSSHNTRPRAVVKKLFLVASMTYPRFFDAIRCHLLLFLDPLAFLPFHFLTPAPALPTQFRFLLFGGGKKFLIIGQRDLPLERPSAF

SEQ ID NO: 1020199 - protein, 82 aa, Homo sapiens
GVEDLVEASGAVFLHVAQSVTQRFAFERAIFGGKRFDLREVLGGEHGRKSLASSALSLLTLRRLKKRSIMMEMLITLTTPMR

SEQ ID NO: 1020200 - protein, 218 aa, Homo sapiens
MSRFFTTGSDSESESSLSGEELVTKPVGGNYGKQPLLLSEDEEDTKRVVRSAKDKRFEELTNLIRTIRNAMKIRDVTKCLEEFELLGKAYGKAKSIVDKEGVPRFYIRILADLEDYLNELWEDKEGKKKMNIINAQGVVSSLRQKIRKYNPDFQCAMIDKLQDRSPSESADEDAEKNEEDSEGSSDEDEDEDGVSVEFSGKEIRSPSGESRSSQRLDD

SEQ ID NO: 1020201 - protein, 178 aa, Homo sapiens
MKSRSRSPAYSRHSSSHSKKKRSSSRSRHSSISPVRLPLNSSLGAELSRKKKERAAAAAAAKMDGKESKGSPVFLPRKENSSVEAKDSGLESKKLPRSVKLEKSAPDTELVNVTHLNTEVKNSSDTGKVKLDENSEKHLVKDLKAQGTRDSKPIALKEEIVTPKETETSEKETSIAAQ

SEQ ID NO: 1020202 - protein, 294 aa, Homo sapiens
SYKKSPGSTSRRQSVSPPYKGAFGATRSSTRSPSPYSRRAEICQSLQQETVVQLRKKWLLLAGDRPVPMVEGGPASPFRELKRSLSRSPLPSRKSMKSRSRSPAYSRHSSSHSKKKRSSSRSRHSSISPVRLPLNSSLGAELSRKKKERAAAAAAAKMDGKESKGSPVFLPRKENSSVEAKDSGLESKKLPRSVKLEKSAPDTELVNVTHLNTEVKNSSDTGKVKLDENSEKHLVKDLKAQGTRDSKPIALKEEIVTPKETETSEKETPPPLPTIASPPPPLPTDYHSRTGDPL

SEQ ID NO: 1020203 - protein, 163 aa, Homo sapiens
GLIMEKVKVQYPRGPRPEAAEEDDGQVFPEVYREPWGFPGQLRAKVHPHVHGPLHGRLEPRVWRLQLGVAGGKSQNVTGEGGPPPPVHFHKSVLKGGVRMYVLPARGLGGWPRCWDKGDWVLPTPRPAPCQPVQFGFRGWGALPLPKVVAAQGPLLQAFGVFP

SEQ ID NO: 1020204 - protein, 131 aa, Homo sapiens
SNGSYRHGVRCTTYITSRFTMSDSMAWSAQSCFVNLSTSSQPVHLFWFQNGFIASEANPVPLTQMPHSPRPQATVTVTRKPCTPHTDSPIPLVTQALATAHPLSASGFATSGQFTHMRSHNMGSFVTCFFI

SEQ ID NO: 1020205 - protein, 155 aa, Homo sapiens
  misc_feature (120)..(120): Xaa can be any naturally occurring amino acid
  misc_feature (148)..(148): Xaa can be any naturally occurring amino acid
HEAYAGQVLVEVMAWRDVPALHLLVMHDDPVPPNGGDDVGLVEHVLLQLPQDLVALLLVQLARLLVVEVVHLAVHVARVVDGGAVRGQVLEQLQVGLIHEIAVEVQRRVVVALLLPCKVXAGLKLLVLHLGAHLPPLVDEEHAHRGCXAWARCGW

SEQ ID NO: 1020206 - protein, 244 aa, Homo sapiens
MRPPCCTEPRGTWGTLQALAPSTAGLAQRSGTAGAAAERAPGQTASTPGSCCGLPGLGAHDPYANRRLDTGDRHMRPSARRPPGAQCRSCPFRGWVRSFHGPHTTWLHAACGPVRASHMARTKYNNFDVYIKTRWLYGFIRFLLYFSCKTVHCGALGVRWRALLLPTVPGRRVLLRFQSKLSVLLCCWAAGGVDFRLVNELLTYGIRIPMMDRGLGWCSWTTGTFEGRGAKLMNSQAEGGSTQD

SEQ ID NO: 1020207 - protein, 128 aa, Homo sapiens
MGLYVDLACVICLKRVNLAENRLATLSAWTHSCVTGSAGPAQQVQASGTAVPWVAWRPGFGASTCKGIHSAVVAMAGCETSCTKAAWTWTPPKTLSWRLDSKREVCLSHVRAEDCEKGGLGNIPHHHT

SEQ ID NO: 1020208 - protein, 84 aa, Homo sapiens
  misc_feature (28)..(28): Xaa can be any naturally occurring amino acid
  misc_feature (65)..(65): Xaa can be any naturally occurring amino acid
  misc_feature (67)..(67): Xaa can be any naturally occurring amino acid
MGFCYATQAGLKFLDSSNPPALASQSAXITGASGCLSLSLSLSLSSDRVLGPGTVAHACDTSTLXGXDGQMMKLEFDQLTRCAP

SEQ ID NO: 1020209 - protein, 70 aa, Homo sapiens
HPSPSGRDAMAHWSTLFLAGPTPLPKLKFSGTNMFHCSLNLLGSSLSLPQPPGVAVDHKQLGHHTCALIF

SEQ ID NO: 1020210 - protein, 254 aa, Homo sapiens
  misc_feature (173)..(173): Xaa can be any naturally occurring amino acid
FFSSWKLPKIRCFACFFICLITDPFLDIYFSGLSVTERWKPFLYRGRICRRLSVVFAGMIELTFFILSAFKLRDTHLWYFVIPGFSIFGIFWMICHIIFLLTLWGFHTKLNDCHKVYFTHRTDYNSLDRIMASKGMRHFCLISEQLVFFSLLATAILGAVSWQPTNGIFLSMXLIVLPWESMAHGLFHEWRHCLGGTSVGYAIGISTNFCSPDGQQHCSPRTVRSKLRLLAVMLPGFVLGWDLVGLSSGGLDCS

SEQ ID NO: 1020211 - protein, 129 aa, Homo sapiens
VSLSASAAFEVPGFELVYTSPVEAKLDAPDLSNPTDVWVEMIDGAKKTLDFGEMYAVGKAGEPLDRVIEALSKAGDRGVKTRFMLEKKMLRASDDATIERLKKIKGLELRIYEFAKLGTNGIVHAKYFV

SEQ ID NO: 1020212 - protein, 69 aa, Homo sapiens
ICDRVDGNLALCLSPGITRLPMIGIIDVGKGSAGLISLLRNALPEEKRHLAMSLRLRMTPEFAINPLVD

SEQ ID NO: 1020213 - protein, 89 aa, Homo sapiens
LGLDVGEPTDIGGQRDRLLDQGEGVTAHAVHHDDRCSRSVLVALVEGIQQSLLQRCDQRRELGDLADEVLPLVLLDDRRIVGVGGAEVL

SEQ ID NO: 1020214 - protein, 31 aa, Homo sapiens
MDNSAILYLEAISTIGVTNSMVDQDIPGAAL

SEQ ID NO: 1020215 - protein, 68 aa, Homo sapiens
AAIRVTIGFRRFRSKHQSLLSSINHSWAAVTYPDPFYCYAEPHRAFTTGLPTLSTQRRSVWLLRRDVT

SEQ ID NO: 1020216 - protein, 162 aa, Homo sapiens
  misc_feature (26)..(26): Xaa can be any naturally occurring amino acid
  misc_feature (31)..(31): Xaa can be any naturally occurring amino acid
  misc_feature (41)..(41): Xaa can be any naturally occurring amino acid
  misc_feature (44)..(44): Xaa can be any naturally occurring amino acid
  misc_feature (48)..(48): Xaa can be any naturally occurring amino acid
  misc_feature (57)..(57): Xaa can be any naturally occurring amino acid
  misc_feature (64)..(64): Xaa can be any naturally occurring amino acid
FGDSFFFDLFRMGLVSRPLREGGGGXPFAGXVFSSGVSSEXPSXSVGXFREPFQVEXQVSKTNXPGGQKKTGLAFGPHDGFYPPGTLWENSWALFPSVFSTWATPALIPRLPQAARQGVRPVPGPGSKGFLCSWKCSRCGKASCSPASITRLWGGGFAGDAF

SEQ ID NO: 1020217 - protein, 78 aa, Homo sapiens
DRDARVGHPRDHRTIRRLGARLAAVRRACVRVRSEARLAAVRADRLAVLSAALRAVADGHETLVRDVFRQRAEVGRGA

SEQ ID NO: 1020218 - protein, 133 aa, Homo sapiens
QAQAQAQAQAQAQAQAQAQAQASQASQQQQQQQQQQQQQQQQPPPHFQSPGAAPQGGGGGDSKPSPPPQSDFDLTPYKTAEHDKDICLTVTTSTIQVEHLASSYRSVLPPTGKRKKKALVSSLCNSRREKSFA

SEQ ID NO: 1020219 - protein, 233 aa, Homo sapiens
QAQAQAQAQAQAQAQAQAQAQASQASQQQQQQQQQQQQQQQQPPPHFQSPGAAPQGGGGGDSKPSPPPQSDFDLTPYKTAEHDKDICLTVTTSTIQVEHLASSYRSVLPPTGKRKKKALVSSLCNSRRDGFPAQDTIAVSELFFKRNISPPDCDGLLSWWENPAASPPKQNFYNWGSVLKGRICYDLIEPCAVWALPYAYPPYTKFGLMDDYRPALPDTGTEPHVAPGFCALL

SEQ ID NO: 1020220 - protein, 257 aa, Homo sapiens
  misc_feature (14)..(14): Xaa can be any naturally occurring amino acid
  misc_feature (24)..(24): Xaa can be any naturally occurring amino acid
  misc_feature (32)..(33): Xaa can be any naturally occurring amino acid
  misc_feature (36)..(37): Xaa can be any naturally occurring amino acid
  misc_feature (39)..(39): Xaa can be any naturally occurring amino acid
  misc_feature (43)..(43): Xaa can be any naturally occurring amino acid
  misc_feature (47)..(47): Xaa can be any naturally occurring amino acid
  misc_feature (49)..(50): Xaa can be any naturally occurring amino acid
  misc_feature (52)..(53): Xaa can be any naturally occurring amino acid
  misc_feature (55)..(55): Xaa can be any naturally occurring amino acid
  misc_feature (58)..(58): Xaa can be any naturally occurring amino acid
  misc_feature (61)..(61): Xaa can be any naturally occurring amino acid
  misc_feature (64)..(64): Xaa can be any naturally occurring amino acid
  misc_feature (67)..(67): Xaa can be any naturally occurring amino acid
  misc_feature (70)..(70): Xaa can be any naturally occurring amino acid
  misc_feature (73)..(73): Xaa can be any naturally occurring amino acid
  misc_feature (77)..(77): Xaa can be any naturally occurring amino acid
  misc_feature (79)..(79): Xaa can be any naturally occurring amino acid
  misc_feature (84)..(84): Xaa can be any naturally occurring amino acid
  misc_feature (87)..(87): Xaa can be any naturally occurring amino acid
  misc_feature (91)..(91): Xaa can be any naturally occurring amino acid
  misc_feature (97)..(97): Xaa can be any naturally occurring amino acid
  misc_feature (109)..(109): Xaa can be any naturally occurring amino acid
  misc_feature (130)..(130): Xaa can be any naturally occurring amino acid
  misc_feature (137)..(137): Xaa can be any naturally occurring amino acid
  misc_feature (140)..(141): Xaa can be any naturally occurring amino acid
  misc_feature (145)..(145): Xaa can be any naturally occurring amino acid
  misc_feature (147)..(148): Xaa can be any naturally occurring amino acid
  misc_feature (151)..(152): Xaa can be any naturally occurring amino acid
  misc_feature (155)..(157): Xaa can be any naturally occurring amino acid
  misc_feature (161)..(161): Xaa can be any naturally occurring amino acid
  misc_feature (164)..(164): Xaa can be any naturally occurring amino acid
  misc_feature (167)..(167): Xaa can be any naturally occurring amino acid
  misc_feature (174)..(174): Xaa can be any naturally occurring amino acid
  misc_feature (178)..(178): Xaa can be any naturally occurring amino acid
EAFENLGKRSLEAXRCLPKSVHLXHFQRPTPXXALXXRXRHLXFTFXEXXLXXLXSQXLPXKLXQSXIKXCQXTEGXFXMKLKXILXSFIXSIASNXLGKMTVPLCIGXSTDKASMEVRYQTFVFFGFLXPCSLFLXFLXXLLFXSXXLLXXFFXXXLQFXLLXLHXLLVPSSXVGTXDLLLPMLIQDPMAFRTPVAPDAQGYSLGASDGVDNIRQTVETMGSCFTVSYSEERGENTSYRMEEKSDFMLEKLETKSV

SEQ ID NO: 1020221 - protein, 35 aa, Homo sapiens
WQYQQETEEAVKGPQIYTGKKLPKSTRMKKIPWAG

SEQ ID NO: 1020222 - protein, 89 aa, Homo sapiens
QQREALLFGQHFLFIAPFGGQLIFFFYLDENVPVAQLHEAMIPGNHVEPAFDVYHFVFCQFGNGFQEYLLHRVFGCFFIFEVFHTNTQQ

SEQ ID NO: 1020223 - protein, 131 aa, Homo sapiens
EARAVWKITSQSWVTSATLYPTHEQLPKLGRRPGAPERKCSRGALYTSFSILGTLVLAGQATTAYFLYQKKGRVDLTRTFQNLEVENLRMKLSKAPKAVSKKRKGTPLLMQALSIGDLSQGPMRNGTKYVL

SEQ ID NO: 1020224 - protein, 272 aa, Homo sapiens
  misc_feature (241)..(241): Xaa can be any naturally occurring amino acid
  misc_feature (243)..(244): Xaa can be any naturally occurring amino acid
  misc_feature (246)..(246): Xaa can be any naturally occurring amino acid
MREIVHIQAGQCGNQIGAKFWEVISDEHGIDPTGTYHGDSDLQLDRISVYYNEATGGKYVPRAILVDLEPGTMDSVRSGPFWAPPKGKKFFPLQIFRPDNFVFGQSGAGNNWAKGHYTEGAELVDSVLDVVRKEAESCDCLQGFQLTHSLGGGTGSGMGTLLISKIREEYPDRIMNTFSVVPSPKVSDTVVEPYNAPSPSNQSGRAILDETYCIDKEALYGLSGFRPLKLTTPTYGDLNHXVXXTXSGVTTCLRFPGQLNADLRKLAVNMVP

SEQ ID NO: 1020225 - protein, 261 aa, Homo sapiens
  misc_feature (230)..(230): Xaa can be any naturally occurring amino acid
  misc_feature (232)..(233): Xaa can be any naturally occurring amino acid
  misc_feature (235)..(235): Xaa can be any naturally occurring amino acid
MREIVHIQAGQCGNQIGAKFWEVISDEHGIDPTGTYHGDSDLQLDRISVYYNEATGGKYVPRAILVDLEPGTMDSVRSGPFWQIFRPDNFVFGQSGAGNNWAKGHYTEGAELVDSVLDVVRKEAESCDCLQGFQLTHSLGGGTGSGMGTLLISKIREEYPDRIMNTFSVVPSPKVSDTVVEPYNAPSPSNQSGRAILDETYCIDKEALYGLSGFRPLKLTTPTYGDLNHXVXXTXSGVTTCLRFPGQLNADLRKLAVNMVP

SEQ ID NO: 1020226 - protein, 229 aa, Homo sapiens
  misc_feature (69)..(69): Xaa can be any naturally occurring amino acid
  misc_feature (98)..(98): Xaa can be any naturally occurring amino acid
  misc_feature (124)..(124): Xaa can be any naturally occurring amino acid
PESDPSPGPRARGRDWAFHHNHILAQDQIDPSRFGQKVGLGREECPSVRRVEPGSSARSVPSIRRGAEXKPFLPKKEKMKLRREQWLQKIEAINLVEXKHREDRRRRAPVVVGDLHPLRNALPXLLGFKVGSGGQAPSRESNKPRPSKFSRMSAAQRQQFFEEKRTRFQELLASPAYRASPPGGHWANVGPANAVGKWRPVFTRAGGMPQLLRTHVGQVKRAGPSRTMA

SEQ ID NO: 1020227 - protein, 246 aa, Homo sapiens
MRRGERRDAGGPRPESPVPAGRASLEEPPDGPSAGQATGPGEGRRSTESEVYDDGTNTFFWRAHTLTVLYHPHLYAWLCRRCWRKHLKTRPTTPREVLWPVFWFSVCFGVTQAKDKPFSRPHTNLLKILALHRVVVYELVLILYTLPDYSGRPAVSKSMLTPSWECHLPERDYSENCLIYDPDNETDPFDTTSGTQWMAWYPAHYSLAGTWKTLMIRDGDVLNISEMYEYLDNAGAQCQLSDAWTG

SEQ ID NO: 1020228 - protein, 67 aa, Homo sapiens
RTLRQRTPPIVPSSDRYFHSAQCTANIQQVTGLILWQIKKLQCSPAILVWISIIRELRTYFRASVSS

SEQ ID NO: 1020229 - protein, 122 aa, Homo sapiens
ALEKWEMQIFDRLFPRISEIVREIDRGWGEDMNKRGVDGQTIEYMAPVADSWYGFRKDKIDELALSLKVFELTDPRILITGSRQYDRPGIIQGAILSAKIRADGGLGRSAGFGPNLRFPIGV

SEQ ID NO: 1020230 - protein, 119 aa, Homo sapiens
IHFLNSRLAPFFDKKGPNSPFWAPGFSDPHGGGGKKKGMGFPPEAINPFGKGQTLFPRELRGGALIPRAFFPPRDPGSPPKGPPRFQGGPPVFFLPRGQNFFLGPVNFPPPKKKKARFF

SEQ ID NO: 1020231 - protein, 137 aa, Homo sapiens
TRAHAVHRAADRPATGQTPPDAPTTIPRSCQRPFRSRAAISGVMEAWTLTISDSVFRDTSKAVAASVMVSFSGSSQSSCRISPGCGGLCRRMVCFPWWDESESKRRRLPQRAAPLFQKKAPFKPSPPPSETARSTPG

SEQ ID NO: 1020232 - protein, 35 aa, Homo sapiens
MGKEPGSYRSGSEETPKRLPVNTISRCQLWPARSR

SEQ ID NO: 1020233 - protein, 116 aa, Homo sapiens
  misc_feature (23)..(23): Xaa can be any naturally occurring amino acid
RYFWKGSTGAYKKLKNPSTCLKXGFQFGKERKNSKKKIQGIGPIKERYWMNTFRFLKYGEHFDPLLEQIVKHVFWTCKQMLLQTNIACDSLRCYFEGVPGLFTENSNILTFKWTNG

SEQ ID NO: 1020234 - protein, 401 aa, Homo sapiens
  misc_feature (263)..(263): Xaa can be any naturally occurring amino acid
TYTRLRDGTRPQHAKQTGNTHVITFFNNEVQTQPCYWDADDTTGDTAASCLDEPGDTEEKPTISFNLYNSLARFPGSENTVREIMKATIILLLLAQVSWAGPLSTEQAYLDLYARRLTAPGIRPEVPDDRDIRSHSLGPDVAPFRMSTAIFRRGYKCNDRRPGHHNMWANGIIPPLDTKIWLRTWQHNTQTIHPAHHEDRTPFTGTLERNHSTPLGTPLIDTIYTFSKQVKRPAQAFNTHHSGGKLANRPTIGSKQIQRKEHXARNKNAPKKLIQEQPMPQLTTRRCRNTGEQGIDINGALRTHMTAAKTRRAQQRLTTDPANAEVRAPRTSKSTHTNKKWRHTDPTHIDKASTRTEQKLRCHNDGYATTDHATPHTAQLELLDDEPHAPREEANNKSGDV

SEQ ID NO: 1020235 - protein, 170 aa, Homo sapiens
MGAFCRRTGSGALCRLLGAGAAGPQAPWGRADRTKPSMRRPGVWGPGVQVLGLPVWMCLEPLRQAAFTDGAGQGSRAGLATWRWIWVVAAQPSQACPLGAFSRGCWVSWQARPVGSARRLQRRVGLRSGAEAPISAVWTRSPELSLQLPPTSLAESVSRPSPDLFLGTLQ

SEQ ID NO: 1020236 - protein, 183 aa, Homo sapiens
  misc_feature (175)..(175): Xaa can be any naturally occurring amino acid
MQTMPCQDARQVNWWGPFVASGQGGGEGSVMQAVADSSDLLSFAVVHQCCLAGSPRGYLFPPNFWDLDPGQPVGVTGAALCGTVGPSCLDNGGWWPGVCWSPLWGALELLIFFSVVNVSVGLLGAFAYLLTYMASFNLVYLFTVRIHGALGFLGGVLVALKQTMGGLCGPASAPXARQCDAHA

SEQ ID NO: 1020237 - protein, 138 aa, Homo sapiens
REFRARHLLTLRLSPVSRRPVPCRPAVLRPPRHHGLCCRAPGVGGGCLGNEFSILNHQGLFVFRNGNLPIPGERIPDVAALSMGFSVKEDLSWPGLAVGNLLSSSSGYRHGDGEGSEQTGSTPRQCSFAYPFGESSSF

SEQ ID NO: 1020238 - protein, 149 aa, Homo sapiens
REFRARHLLTLRLSPVSRRPVPCRPAVLRPPRHHGLCCRAPGVGGGCLGNEFSILNHQGLFVFRNGNLPIPGERIPDVAALSMGFSVKEDLSWPGLAVGNLLSSSSGYRHGDGEGSEQTGSTPRQCSFAYCLLEKWQVSLFSSLEPGWL

SEQ ID NO: 1020239 - protein, 260 aa, Homo sapiens
LKAVARGCPHSHVKRYASIVRVSAPSLAGVEQPRHAAGDRNWSRVRLRELVPEPGVWRLGARLTGCHVPNSVSISILRLPGSTHVYPLSLIMFIERPAHTTESHIARVMVPDPIQHTQSLSEESSSLRSSRVAHPEIRAQGAPSEATSSRAILKALQDEWDAVMLHSFTLRQQLQTTRQELSHALYQHDAGLPCHCPSHQGSHCCPRSSGYPETTGWLIVPQAVSSSNQVLWVRVSQLDLGELLGMTQENFRSSRKACEQ

SEQ ID NO: 1020240 - protein, 119 aa, Homo sapiens
  misc_feature (8)..(8): Xaa can be any naturally occurring amino acid
MPPPRGPXLVILKALQDEWDAVMLHSFTLRQQLQTTRQELSHALYQHDAGLPCHCPSHQGSHCCPRSSGYPETTGWLIVPQAVSSSNQVLWVRVSQLDLGELLGMTQENFRSSRKACEQ

SEQ ID NO: 1020241 - protein, 142 aa, Homo sapiens
  misc_feature (38)..(38): Xaa can be any naturally occurring amino acid
PRVETPDKPELRTVCRMTAQCSWDSEMSQNTKADWEHXRLKAGGGGQMPRSRGRAVYRTPLGQSMRAEPATDEDRQPSTCWFQEMLAVAFRGEGSTCHARTETRLQQESLCECICMETGKSRDNIHIGATGKTLRTILTAFL

SEQ ID NO: 1020242 - protein, 159 aa, Homo sapiens
MGALERTISHTCMSVDPQTDSWFHHPEFNRTLRFCDAVVRYLVAFSLELTVRSPTPLGPTGTWGPNEARVTFRKPMGLTPFQDQSLLLPPFTLGFKRFRHFLNPILPVGIHRKYTRVYCSLGNTDSQIGFAYEGSMWLWKVINKGLPLRVNRRSPGDAT

SEQ ID NO: 1020243 - protein, 100 aa, Homo sapiens
MLWGPREKVGSLNAKALLDPGTQPGRLAVASGVSPLVRVLLAFASKPLTRISFAGTWKEGKGTPPPNPCWLGAPNWVNFPIPPPKAQTGAPQLSRRVSSG

SEQ ID NO: 1020244 - protein, 216 aa, Homo sapiens
GNRSSRLLVALLAGRRSAAERVSAQARPKPWYPARCGPQSAAMGAFARLLRAVIMGAPGSGKGTVSARITTHFELKHLCSGDLLRDNMLRGTEIGVLAKAVIDQGKLIPDDVMTRLALGGRKAEALDRAYQIDTGINLVVGFEGVKQRLTARWIHAVGGERIMGLTLPDWGSDDLTGKPLIGVEMINPAVSGTEGYKTDGGVLGCGGRGLGTLCDG

SEQ ID NO: 1020245 - protein, 120 aa, Homo sapiens
GNRSSRLLVALLSRPAQCCRAGERAGQAKALVPCAVRASVCGHGGVRACCCRAVIMGAPGSGKGTVSARITTHFELKHLSSGDLLRDNMLRGTEIGVLAKAVIDQGKLIPEDCDDSAGPS

SEQ ID NO: 1020246 - protein, 149 aa, Homo sapiens
MAKISSPTETERCIESLIAVFQKYAGKDGYNYTLSKTEFLSFMNTELAAFTKNQKDPGVLDRMMKKLDTNSDGQLDFSEFLNLIGGLAMACHDSFLKAVPFPEADLRTPVALAFKPTPVSFQPFCHHLHSPPIPLSTLNQAHAGPQRAK

SEQ ID NO: 1020247 - protein, 34 aa, Homo sapiens
PSVVEHVVGVLGYHTGWCGFLDVRTPGLHALVCG

SEQ ID NO: 1020248 - protein, 98 aa, Homo sapiens
GDTQEHRFAHRGTAAFGQHAGVLFVELRTVDRFTDDEGRIAHLVHLHPAEHLANDRFDVLIVNLHTLQAVHFLDLIHEVTSESGDTAYAEDVVRVDRS

SEQ ID NO: 1020249 - protein, 104 aa, Homo sapiens
  misc_feature (6)..(6): Xaa can be any naturally occurring amino acid
  misc_feature (18)..(18): Xaa can be any naturally occurring amino acid
  misc_feature (67)..(67): Xaa can be any naturally occurring amino acid
MEAAAXSCAFANGSALLXYEVVDAYAANGAHAVEEHVGFKIKINVGAFGKKSAWLGAAVGLLGARNXAGSFWGGLEGGAGFTLKMRGDLRANALSQYGETRCLY

SEQ ID NO: 1020250 - protein, 113 aa, Homo sapiens
RHQIDGRGLFQIVVGEVALDGLAAVGRGEVAAHPKAAAGAVDQLVRIERIDLHVGDPAAHPFAFAPGEARRAMGLLAQGRPMRPAVPGDEDVVRLRPPVVEGGGDDGAGMGGI

SEQ ID NO: 1020251 - protein, 51 aa, Homo sapiens
IEDPFDWRATYARLTILTSLSAGDEESNLTKMLMLDKRILCSPSLISPPIE

SEQ ID NO: 1020252 - protein, 43 aa, Homo sapiens
MERVRKVLLYVRGIIRVVVGLDHNPIRNDVLEPLEQALPAQPL

SEQ ID NO: 1020253 - protein, 364 aa, Homo sapiens
APCTPVLGGQRGWLCVAQSGWHVCGIEHGCLVAWMWTTELIWPDLCCISQGALQRLHLVWWKMPQSPLARVELHSTCQTISVDLSAGSPLVWLTGCPVAGMTSTYGRTPMYGSQTPMYGSGSRTPMYGSQTPLQDGSRTPHYGSQTPLHDGSRTPAQSGAWDPNNPNTPSRAEEEYEYAFDDEPTPSPQAYGGTPNPQTPGYPDPSVPNPQNPKRGGGVNPQYNPADCQGRLAMYNTDQFSPYAAPHHPQGTYTATDTQHTQELNQPWWQTQSTSKGVPEITQLHPGHMLSQTLTPVRTNRAQYRAKTHRHRRPPYEDNKYTNKKTWNAIPQSPHEERYETTQPPGPRAYKAIETRKHHNAEQK

SEQ ID NO: 1020254 - protein, 355 aa, Homo sapiens
APCTPVLGGQRGWLCVAQSGWHVCGIEHGCLVAWMWTTELIWPDLCCISQGALQRLHLVWWKMPQSPLARVELHSTCQTISVDLSAGSPLVWLTGCPVAGMTSTYGRTPMYGSQTPMYGSGSRTPMYGSQTPLQDGSRTPHYGSQTPLHDGSRTPAQSGAWDPNNPNTPSRAEEEYEYAFDDEPTPSPQAYGGTPNPQTPGYPDPSVPKVNPQYNPADCQGRLAMYNTDQFSPYAAPHHPQGTYTATDTQHTQELNQPWWQTQSTSKGVPEITQLHPGHMLSQTLTPVRTNRAQYRAKTHRHRRPPYEDNKYTNKKTWNAIPQSPHEERYETTQPPGPRAYKAIETRKHHNAEQK

SEQ ID NO: 1020255 - protein, 475 aa, Homo sapiens
RTPEDVRHYLQGRSSIAGLLLKATNEKLSVYAALQRQLLSPGTALILLEAQAASGFLLDPVRNRRLTVNEAVKEGVVGPELHHKLLSAERAVTGYKDPYTGQQISLFQAMQKGLIVREHGIRLLEAQIATGGVIDPVHSHRVPVDVAYRHGYFDEEMNRVLADPSDDTKGFFDPNTHENLTYLQLLERCVEDPETGLCLLPLTDKAAKGGELVYTDSEARDVFEKATVSAPFGKFQGKTVTIWEIINSEYFTAEQRRDLLRQFRTGRITVEKIIKIIITVVEEQEQKGRLCFEGLRSLVPAAELLESRVIDRELYQQLQRGERSVRDVAEVDTVRRALRGANVIAGVWLEEAGQKLSIYNALKKDLLPSDMAVALLEAQAGTGHIIDPATSARLTVDEAVRAGLVGPEFHEKLLSAEKAVTGYRDPYTGQSVSLFQALKKGLIPREQGLRLLDAQLSTGGIVDPSKSHRVPLDVA

SEQ ID NO: 1020256 - protein, 113 aa, Homo sapiens
  misc_feature (40)..(40): Xaa can be any naturally occurring amino acid
  misc_feature (112)..(112): Xaa can be any naturally occurring amino acid
AGELGAQPPGEGKDMPEDGEALRCGAPSSITISLPGTDPXDAERRRQLALKALNERLKRVEDQSIWPSMDDDEEESGAKVDSPLPSDKAPTPPGKGATPESNLITFEATPPXL

SEQ ID NO: 1020257 - protein, 134 aa, Homo sapiens
HEDAQAAMSIQLFSAAARAAQRHRGPVGRSEQHVQARRRRIVGEGARLFQRLAHVRLQLLGHRRQRLRAVGVRRFDQEVAVAVAQRARRVDDRRHAVARTHALDRAAGPQQLAGEAQVLPAQHAGQGPQGAAFG

SEQ ID NO: 1020258 - protein, 80 aa, Homo sapiens
ETLAVLDLDHSYLFIQGPPGTGKPINAAHAIVALLRAGKRVGVSSNSHKAINKLLGEVDPLAAKASFRFSGVISPTILYA

SEQ ID NO: 1020259 - protein, 160 aa, Homo sapiens
TRIVARMALVPRTLEARGLDATPLIQHKLRQVGTPDALAAVAILDTILREEVGHVAIGNHWYGWLCTRDGLDPVAHYAALVQRYEAPRPKPPLNEAARRAAGFSEAEMLLAAARLNRLHPHCHPRAIGGSSLQCQQRYATPLPPALAPAGGIRIARYPAH

SEQ ID NO: 1020260 - protein, 48 aa, Homo sapiens
LGAAVGLADAGVLGDVVHAFDDDAVLLDEDLEDLALLAAVSAALGLGA

SEQ ID NO: 1020261 - protein, 255 aa, Homo sapiens
LVCSLSDVYQMEKDIAMEQERNARYRTPKILEPTAFQEPPPKPSRPKYRPPPQTNLLAPKLQFQVPEGLCASSPTLTRPYGVSISRELTAHPDRLHRHNVFKRHSMREEDIHPITSSLEEAQQRVERLKRSNMRQILDEQQKQMVEDYQWLRQEEKSLDPMVYMNDTSPLTPEKEVGYLEFTGPPQKPPRLGAQSIQPTAKLDRTDDLVYLNVMELVRAVLELKNELCQLPPEGYVVVVKNVGLTLRKLIGSVDE

SEQ ID NO: 1020262 - protein, 191 aa, Homo sapiens
LVCSLSDVYQMEKDIAMEQERNARYRTPKILEPTAFQEPPPKPSRPKYRPPPQTNLLAPKLQFQEEDFIQPSSREEAQQLWEAVVWLRQEEKSLDPMVYMNDTSPLTPEKEVGYLEFTGPPQKPPRLGAQSIQPTAKLDRTDDLVYLNVMELVRAVLELKNELCQLPPEGYVVVVKNVGLTLRKLIGSVDE

SEQ ID NO: 1020263 - protein, 98 aa, Homo sapiens
LDTVILDVEVQGQRLVGIVGQLWGPKGEGPRFLHGHRLHELEQVTAHVQGGTLCLQKPLNVLCGFPTATSTTHPHLHGVQVLALEVHICLTVSSVRNP

SEQ ID NO: 1020264 - protein, 232 aa, Homo sapiens; identical to SEQ ID NO: 919423

SEQ ID NO: 1020265 - protein, 81 aa, Homo sapiens
TKERRLGEIQAQEADPSFWNDNIRAQKIQKEKAAISATLNEFKSLRGKVDDAGALIELATEDPGDKSLLTELGASIADMQP

SEQ ID NO: 1020266 - protein, 348 aa, Homo sapiens
GGCDADAGVRMSYPGYPPTGYPPFPGYPPAGQESSFPPSGQYPYPSGFPPMGGGAYPQVPSTGYPRELEATLRLEVIQAPGGYPGAPDMRMGRAPSPYSPVSVTPMCTQDFEEVPTQGGMHGLFLACTPQRTFTVLMEEEVQSHGSIYLVAFAVMDRCRFISNPVMDQIASYPSQPATVTQVTQGTIRPAANFDAIRDAEILRKAMKGFGTDEQAIVDVVANRSNDQRQKIKAAFKTSYGKDLIKDLKSELSGNMEELILALFMPPTYYDAWSLRKAMQGAGTQERVLIEIWCTKNTHQDIRRNGQMYQSEFGRDCKTWTLRSALHQDILERLLVSMCQWKSVMRTRV

SEQ ID NO: 1020267 - protein, 338 aa, Homo sapiens
GGCDADAGVRMSYPGYPPTGYPPFPGYPPAGQESSFPPSGQYPYPSGFPPMGGGAYPQVPSTGYPRELEATLRLEVIQPLEAILVPHSQGELHPIPEFLRAKDLESHQVEQAVGGYPRGDAFSRLDGGGSKRTRFQYLVAVLEDRMPFSVIREDEPTYPSQIKYRFCCLPIPVFSPVRVAYPSQPATVTQVTQGTIRPAANFDAIRDAEILRKAMKGFGTDEQAIVDVVANRSNDQRQKIKAAFKTSYGKDLIKDLKSELSGNMEELILALFMPPTYYDAWSLRKAMQGAGTQERVLIEIWCTKNTHQDIREIVRCISQNLDETQDMDTQVSMTSGHS

SEQ ID NO: 1020268 - protein, 329 aa, Homo sapiens
GGCDADAGVRMSYPGYPPTGYPPFPGYPPAGQESSFPPSGQYPYPSGFPPMGGGAYPQVPSTGYPRELEATLRLEVIQPLEAILVPHSQGELHPIPEFLRAKDLESHRIKQAFLDIHSHLHSLIKVIQHKFHYLIDFPKRQIPSRYPRKQPTYPSQPATVTQVTQGTIRPAANFDAIRDAEILRKAMKGFGTDEQAIVDVVANRSNDQRQKIKAAFKTSYGKDLIKDLKSELSGNMEELILALFMPPTYYDAWSLRKAMQGAGTQERVLIEIWCTKNTHQDIRRNGQMYQSEFGRDCKTWTLRSALHQDILERLLVSMCQWKSVMRTRV

SEQ ID NO: 1020269 - protein, 119 aa, Homo sapiens
MREPPLLLDTIGGPQGIHGPLCEKEFTSSLPPEGPSLPSCGVLFGTLDYEEKDKMDELGLWGSACTTLGAQGPQHPPGQEILGYLSAGVQVLHKGYSSKPPVFHSCPQLKGVENSQMEK

SEQ ID NO: 1020270 - protein, 103 aa, Homo sapiens
  misc_feature (1)..(2): Xaa can be any naturally occurring amino acid
  misc_feature (4)..(6): Xaa can be any naturally occurring amino acid
  misc_feature (8)..(10): Xaa can be any naturally occurring amino acid
  misc_feature (12)..(13): Xaa can be any naturally occurring amino acid
  misc_feature (15)..(15): Xaa can be any naturally occurring amino acid
  misc_feature (17)..(17): Xaa can be any naturally occurring amino acid
  misc_feature (24)..(24): Xaa can be any naturally occurring amino acid
  misc_feature (26)..(27): Xaa can be any naturally occurring amino acid
  misc_feature (36)..(36): Xaa can be any naturally occurring amino acid
XXLXXXNXXXPXXGXYXEPETVPXHXXLNNTADTIXRNKKSKDTTACGEEDWARIFRVQRELATIHAVCPLGSQSPLDGSRKIMKGTSREHDKDEVYTVLHGD

SEQ ID NO: 1020271 - protein, 73 aa, Homo sapiens
IDSSNHLSDRQIRVIRSLWYGIGVGGVLIAGFIILYPGHTDLWGIPEWIAGIQSMPSRRSRSGGRRDRGDRQV

SEQ ID NO: 1020272 - protein, 293 aa, Homo sapiens
MCDDGEPSQQAHSSVQDVQWLTWLLDVPCTIRFVADSQKIKEPRMSVFIRGISLVQLMHQCEIWRELFSPLHALNFGIGGDGTQHVLWRLENGELEHMRPKIVGGLGGHQSITDITARAGDWVASRPLCNLVNEQTATRPGLCVLGLLPAEANDSEYHFGRRTREVNRAGTGVHCTWHPRDPLPRCRALALCTHYGSNQRIMTCMITLQSEPSGLTDLFAGICSHLSFLRLMGPRTQGKGGPLCGDRDLRIPGWLSHKINCPSSEAPQIPSKTNINTRATRRTTPGGNTLQIP

SEQ ID NO: 1020273 - protein, 304 aa, Homo sapiens
  misc_feature (43)..(43): Xaa can be any naturally occurring amino acid
  misc_feature (45)..(45): Xaa can be any naturally occurring amino acid
MMCDDGEPSQQAHSSVQDVQWLTWLLDVPCTIRFVADSQKIKXGXKKKTPPPQPRMSVFIRGISLVQLMHQCEIWRELFSPLHALNFGIGGDGTQHVLWRLENGELEHMRPKIVGGLGGHQSITDITARAGDWVASRPLCNLVNEQTATRPGLCVLGLLPAEANDSEYHFGRRTREVNRAGTGVHCTWHPRDPLPRCRALALCTHYGSNQRIMTCMITLQSEPSGLTDLFAGICSHLSFLRLMGPRTQGKGGPLCGDRDLRIPGWLSHKINCPSSEAPQIPSKTNINTRATRRTTPGGNTLQIP

SEQ ID NO: 1020274 - protein, 97 aa, Homo sapiens
PEDPFDWRHLHVHQGQSGLKHGNRGKRQALKSASTDLGTADVVLGRVLEVTDLPEGITRTEADKLFTQLAMSGAKIQWLKDAQALPGGGGGDNSGTA

SEQ ID NO: 1020275 - protein, 102 aa, Homo sapiens
MQSPAFSIAADVKDAKGAQSNENLSDSQQEPPKSEVSEGPVKPFNWDQNVQSMETQIDKAQAVSQPVTPCELSLYLLNLLNLQKPGGMEGGTAEATSSLTGR

SEQ ID NO: 1020276 - protein, 107 aa, Homo sapiens
PSPTIPPSVSEEDLKVLFSSSGGVSKEFKFFQKDRKMALIQMGSVEEAVQALIDLHNLRTSGRTTNGAGSPSSKSHQSRGTGPTRPGHPGDNFHHSREKPRLENRLK

SEQ ID NO: 1020277 - protein, 97 aa, Homo sapiens
HVIADTAVFLCTLNRLVNILLPRVKAAVERILWGLHRRGHKVRELVVLKPGRLVVQIAVPLFKVLLHGGFQRVLFLAARRLRRESVKLCASLFQAAS

SEQ ID NO: 1020278 - protein, 83 aa, Homo sapiens
ETIQTEYTVYMDELSSFIVAKPNIPWVFLTDPKLATEGYFGPCSPYTVYSCGAHSSGQEPEMRILTQWDRSLEPMQTPVVGRL

SEQ ID NO: 1020279 - protein, 79 aa, Homo sapiens
YDKDNDGRLDPQELLPWVVPNNQGIAQEEALHLIDEMDLNGDKKLSEEEILENPDLFLTSEATDYGRQLHDDYFYHDEL

SEQ ID NO: 1020280 - protein, 72 aa, Homo sapiens
VSPTPREGEEADHLRSGVRDQPDQHDETPSLPKIQKLAGHGVGDKYVMLSPTPTEAVSPMTWGSGPEDPPSF

SEQ ID NO: 1020281 - protein, 141 aa, Homo sapiens
TRLESGAGGGRDAELRSWVACLVRPLTDHLEELGNPTWYARFAAQAMTDPAYYNIIVKGALSSPSLVQVVEGINRCLPDLPAEVHFERNVMARNLLMHTCADRERALAAGTSTSHRSWRAAASGLIDAIVGLWLAPVTPYE

SEQ ID NO: 1020282 - protein, 115 aa, Homo sapiens
  misc_feature (52)..(52): Xaa can be any naturally occurring amino acid
VSFMNWDPDDQLHASCLSLATAPSLTTLSFYGDSISIISLQSLLQHLIGVNXSDATCCILSAWRVMRTIHGTLPLERLAYLHPRLRELLCELGRAQHGPGFVPSPVLHCGDQNLL

SEQ ID NO: 1020283 - protein, 343 aa, Homo sapiens
  misc_feature (320)..(320): Xaa can be any naturally occurring amino acid
QHLPTEFIREGDDDRTGCREIRHNSTGWLGMKGPWGQGPENLAGDWFNHNPFQAKLGAEAHQILQGRGKVDQKIHEAGKVLPVENAPSSLLKQLNEQLNWVSRLALTQGEDQYYLRVTTVASHTSDSDVPSGVTEVVVKLFDSDPITVTVPVEVSRKNPKFMETVAEKALQEYRRKHREEGDVDVAFAPTGASESSSPQDELQPPRESSARDQVTRPQASGRQLRPAFAVWILHSGTGGVVLMGRTELLLHASDSIKLSWEAGKRGAGVGGGRGGGGRGGGGAGGGEWKRMEWGTVFELAWERPWGPRLKRLGAGPLARXAGMAGRAGRRAVRRGGGAEMGGG

SEQ ID NO: 1020284 - protein, 142 aa, Homo sapiens
DDTAKVNAAITTVSPQIGFTFIEHGKDANGVVSWTGQSSTDPSLFANVVILPATKMQQQTISVAVHSTGHIKATDENAFIATVHAQYHAAKASPSPTDTCSAAEHRLDAGDPLRDAPEVGVTGIQDDEPGDQHAANPDAVPQ

SEQ ID NO: 1020285 - protein, 152 aa, Homo sapiens
SRPSNALDNPEPFLHTNVVGTFTILEAVRRNGVRLHHISTDEVYGDLELDDPQRFTESTPYNPSSPYSATKAGSDMLVRAWVRSYGVRATLSNCSNNYGPFQHIEKFIPRQITNVLTGRRCKLYGSGHNVRDWIHVEDHNSAVRRILEKGES

SEQ ID NO: 1020286 - protein, 361 aa, Homo sapiens
  misc_feature (1)..(1): Xaa can be any naturally occurring amino acid
  misc_feature (22)..(24): Xaa can be any naturally occurring amino acid
  misc_feature (26)..(27): Xaa can be any naturally occurring amino acid
  misc_feature (30)..(30): Xaa can be any naturally occurring amino acid
  misc_feature (35)..(35): Xaa can be any naturally occurring amino acid
  misc_feature (38)..(38): Xaa can be any naturally occurring amino acid
  misc_feature (40)..(43): Xaa can be any naturally occurring amino acid
  misc_feature (49)..(52): Xaa can be any naturally occurring amino acid
  misc_feature (60)..(60): Xaa can be any naturally occurring amino acid
  misc_feature (76)..(76): Xaa can be any naturally occurring amino acid
  misc_feature (79)..(79): Xaa can be any naturally occurring amino acid
  misc_feature (91)..(91): Xaa can be any naturally occurring amino acid
  misc_feature (104)..(104): Xaa can be any naturally occurring amino acid
  misc_feature (157)..(157): Xaa can be any naturally occurring amino acid
  misc_feature (194)..(194): Xaa can be any naturally occurring amino acid
XREQAALDLYPYDAGTDSGRHXXXPXXRHXPAGHXDRXNXXXXQPPGQXXXXPAAEGPAXHRQGDTAAAATEPQGXQPXRPQAGPAGDKEXVDSASVPETPLDXEVSLWSSWGLCGGHCGRLGTKSRTRYVRVQPANNGSPCPELEEEACVRSLITXGRKTRSPAAPGAPRSHGVSGAPVQAHAAGGRGHRGLXAAPDRGEAAPTISALKGPLVAGTVHWGNSLLLSQPCFLGAPVSRLALSLLLLPGYKSYPKVSQLRLDIMSPYKLLLLQEIVLHRPGALVPTWLQDTSDLVALAVLSPLSRGTHPSGGPLENVNTLGRHSESVKCIPWYMDLSAVLNTDLSSVAHNNNTHNHNTNNNT

SEQ ID NO: 1020287 - protein, 241 aa, Homo sapiens
PTRGRSLWTGQSWEERSAPRTHRSRAHYSSISPTSYLPLAGGQAVKHRRQEELEPHWPARGRRTSGFKEELRGSGWDPHRCRPCQTISALKGPLVAGTGIGKQPPPFPTLLLRGPRVPSCSQPPPPARIQVIPQGLPATSNIMSPYKLLLLQEIVLHRPGALVPTWLQDTSDLVALGCAEPTLPRDASKRWATGECEYTGAAFGKRQVYPMVMDLSAVLNTDLSSVAHNNNTHNHNTNNNT

SEQ ID NO: 1020288 - protein, 306 aa, Homo sapiens
MPSSVSWSILLLTGLCCLLPVFLADDPHGDAAQQTDTSYHDQEHPTFIKITPNLAEFAFSLYRQLSHQSIRTNIFFSPESIATDFAMLSLGTNCWHWTDEILEGLNFNLTEIPEAQIHEGFQELLRTLNQPDRQLQLTTGNGLFLSEGLKLVDKSLEDVSVYHSEAFTVNFGDTEEAMKQINDYVEKGTQGWVADQVKELDRDTVSALVNYIFYKGRWERPFEVNDTEEEDFHVDQVTTVKVPMMMRRCMFDIHHCQKLCSWVLLMYLRNATVIVFLPDDGILRHLVSASLHLPRLLITGTYDLGV

SEQ ID NO: 1020289 - protein, 286 aa, Homo sapiens
MPSSVSWSILLLTGLCCLLPVFLADDPHGDAAQQTDTSYHDQEHPTFIKITPNLAEFAFSLYRQLSHQSIRTNIFFSPESIATDFAMLSLGTNCWHWTDEILEGLNFNLTEIPEAQIHEGFQELLRTLNQPDRQLQLTTGNGLFLSEGLKLVDKSLEDVSCTTQKPSLSTSGTPQRPGNRSTITWRRVLKNIFYKGRWERPFEVNDTEEEDFHVDQVTTVKVPMMMRRCMFDIHHCQKLCSWVLLMYLRNATVIVFLPDDGILRHLVSASLHLPRLLITGTYDLGV

SEQ ID NO: 1020290 - protein, 33 aa, Homo sapiens
MGEEHEQQMNKYGEEAPEFSNGCSVTGLPQFTG

SEQ ID NO: 1020291 - protein, 80 aa, Homo sapiens
SGKLSLVSEGLQCPSLGDAPYESLMGPWEWAEKRRSKEGQKRGATSYTSAVGFLSPTTLKKSPRVTFTIHVVNERFLNAY

SEQ ID NO: 1020292 - protein, 149 aa, Homo sapiens
HEGPDERPASPIEPTKRRRSVVIDVNVIETSSLGDRSYLATDGEVAVVVDPQRDVDRVLALAGRLGVRISHVVETHVHNDYVSGGLELARLTGAAYVMSARDDLAFARTGVVDGDVLEASPRLRLRVLATPGHTFHHLSYVLEGPDGPQ

SEQ ID NO: 1020293 - protein, 101 aa, Homo sapiens
FNRSYSSPSTVTSCIIYYIKLLYLSPIHQCSSVFLIFSFFVLLLFIQHHPPSASESRCFLVLSVIASLFVKLGQELEDTLSVVIQVGNLTVKEDPGFSEHI

SEQ ID NO: 1020294 - protein, 164 aa, Homo sapiens
MGAGIAQVSVAKGLKTILNQMPPSLRSDRGQQQVFKGLNDKVKKKALTSFEQGFHLQPTCTGQLCITKVLKRPHMVIEAVSAGPSVLQHRVLKRKSQAEDSSITDILCTITHLTLPNQCKLACLSATQHLRTVIWHATTIYSRGQDAARWQIINERENLPKDTT

SEQ ID NO: 1020295 - protein, 102 aa, Homo sapiens
MPPSLRSDRGQQQVFKGLNDKVKKKALTSFERDSIFSNLYWAALHYQGFEKADMVIEAVLCRTILSGTVWMDAHSRRVMLQIADPLPSNIIGSPITGTRLLV

SEQ ID NO: 1020296 - protein, 89 aa, Homo sapiens
WGALVARLHVSASSCSSLPATLLANHSLGELDLNNNCLGDRGILQLVESVRQPGCLLEQLVLYDIYWFEEMEARLQALEKDKPSLRVIS

SEQ ID NO: 1020297 - protein, 100 aa, Homo sapiens
RTQAVDDDDPQGERDLATQVGRAQNAREGAEHVDVLQNGMPARAARTESQVIPQPPQSRRRRLRGNANRGRSMLRPLSATYLTLPPAATVFCSAEPETLS

SEQ ID NO: 1020298 - protein, 181 aa, Homo sapiens
MLGAVEGPRWKQAEDIRDIYDFRDVLGTGAFSEVILAEDKRTQKLVAIKCIAKEALEGKEGSMENEIAVLHKIKHPNIVALDDIYESGGHLYLIMQLVSGGELFDRIVEKGFYNGGGTAKPPQSSRCWDAVKYLIDLGNCNTGIFSQRNLLYYKLDEGLPNHDLRLLASPRMEEPGQCALQ

SEQ ID NO: 1020299 - protein, 234 aa, Homo sapiens
VIVLAEDDEGVLVSDSDDFGATSAMENPGIGKRLQIGDSPLVSSGSPRVPEAWAGCDDLVVQKSWGNPQAPFSTWCGRLRTLGLRGTTWLYGFQPLHLGKKWPCGKPGDAQWTVLLRERSRTEDGDYLLQSTTTGPPTCSQLRGTPLSTTCARGTVLCGTCGQPADKASASGSGAQVGGPISSGSSASSVTVTRSYRSVGGSGGGSFGDNLVTRSYLLGNSSPRTQSPQNCSIM

SEQ ID NO: 1020300 - protein, 234 aa, Homo sapiens; identical to SEQ ID NO: 1020299

SEQ ID NO: 1020301 - protein, 148 aa, Homo sapiens
  misc_feature (53)..(53): Xaa can be any naturally occurring amino acid
MEKAGPGPWGGGGAGAGARAWSGDRRWGGGLGAGGSAGGGGGGGGGGGDERGXGRWGRVERGGGYGRAGGAGRGRGVTGGREHAGGTGERLRRVAGVAAADGGGDGGRRRREGVHGRGGTGGWREWEGEGGVGGGGRREGGGWEGRGG

SEQ ID NO: 1020302 - protein, 78 aa, Homo sapiens
  misc_feature (78)..(78): Xaa can be any naturally occurring amino acid
RRYKVSLKRPLVLGFTVFPRNLWLLVECSRPPSETPNPASVVASSVVHSLIGILQFVLVGCNIKLPHEGQRLEVVVQX

SEQ ID NO: 1020303 - protein, 117 aa, Homo sapiens
TRPVRAYIAAMPDWKRPIGARLDALIERAVPGVHKAVKWNSPMYAVAVGAGWFLSFHCFTRYIKVAFFRGAALTPPPPEPSKSGDTRYLHIHESGLLDEAQFLDWVRQAAALPGERM

SEQ ID NO: 1020304 - protein, 48 aa, Homo sapiens
DDTRYLRRERVRGGRYGCRIDTRDRDRRVVPNPTEDRARTDRLHPRRE

SEQ ID NO: 1020305 - protein, 91 aa, Homo sapiens
MSPRSGFGAESADGCGRSLGAGQADDVMTGGEQFFDDGRADSSAGAGDEYAHELLLLSDETMVPSPYTSDGTKVASLKWGHGSLGTRRART

SEQ ID NO: 1020306 - protein, 297 aa, Homo sapiens
MLYLIGLGLGDAKDITVKGLEVVRRCSRVYLEAYTSVLTVGKEALEEFYGRKLVVADREEVEQEADNILKDADISDVAFLVVGDPFGATTHSDLVLRATKLGIPYRVIHNASIMNAVGCCGLQLYKFGETVSIMLISVMLHSLWLVIHLDTWRPESFFDKVKKNRQNGMHTLCLLDIKVKEQSLENLIKGRKIYEPPRYMSVNQAAQQLLEIVQNQRIRGEEPAVTEETLCVGLARVGADDQKIAAGTLRQMCTVDLGEPLHSLIITGGSIHPMEMEMLSLFSIPENSSESQSINGL

SEQ ID NO: 1020307 - protein, 280 aa, Homo sapiens
MLYLIGLGLGDAKDITVKGLEVVRRCSRVYLEAYTSVLTVGKEALEEFYGRKLVVADREEVEQEADNILKDADISDVAFLVVGDPFGATTHSDLVLRATKLGIPYRVIHNASIMNAVGCCGLQLYKFGETVSDTWRPESFFDKVKKNRQNGMHTLCLLDIKVKEQSLENLIKGRKIYEPPRYMSVNQAAQQLLEIVQNQRIRGEEPAVTEETLCVGLARVGADDQKIAAGTLRQMCTVDLGEPLHSLIITGGSIHPMEMEMLSLFSIPENSSESQSINGL

SEQ ID NO: 1020308 - protein, 159 aa, Homo sapiens
MLFSPRCARCRPTPTRAIGDKHHRHARRRLKGPEPDKRISCIRSSQSRVRCESSSMLREIVLDTETTGLDPRKGDRLIEIGCIELVNRIPTGQEFHRFINPERSVPAEAEAVHGISTAFLVDKPVFSKVAGEFLEFIGQDALVIHSATFDVGFLNMELE

SEQ ID NO: 1020309 - protein, 110 aa, Homo sapiens
LWKTGRRATSPQKAGLHGLGELPCRCSRQAQPLTRRELLLTSRSLGRLSPERTSSREMRLWPSRRSSYRSLMCLWALMRCLLTHLVKVFFCTRSRSSAMRMTARSAGSRT

SEQ ID NO: 1020310 - protein, 413 aa, Homo sapiens
GGAAVLVVLLSWWCCCPGGAAVLVVLLLTQPRLHLQLGHDALKTLQPLKLAAELLLPLQDGHVQLAPLLLHIQRVVARGHLELACLHRSLQGLVDALGPVLVGLLGWELHLLKLQELRPQDLNLLEAGGEPAFLKGGRVVSHPLKQQQHQLPVLLPAQLQLVGPHPILHVRHAGHGVIQRRDVGDDGLLVGLRDIHVLRVQEPRHSQVPLRHREGLVQVLQVGLPVHLVHVDEQGLVPVDDGIEEAAVSPAGGEVVASQALVPLHHSLRHSSSFSLAVMSSDCPLTWISEIWKLQNDGPDEAKGQLGVAVSDVIIPDVHQLHLAVPEVVQGNLDILQLVETHPPLLPGQAVPREDLQQGDEVVAIAEVFIQVTDVPLGLDEVLVDPLGEGFLLHTIPLICDANDRPLSWVQDT

SEQ ID NO: 1020311 - protein, 206 aa, Homo sapiens
QGKPDLGHTEGSAPSHSARRTTAGRSGGRTSSARSPSAEGVDPIVHRSAHDVASVDRPEAVHISRRQQCLVVVVEILLEDAAYEDRIGPPSACFVCQVSGAVDDVAHVDDIVDSAAAESRLDHEHSAVVDADADLQGVDPLLRVVVVEELDECVRLIGNAKHIVDVRLLRGLVHSPDAVPNDIHFPNVQIGVQHRHHLRDERAIYL

SEQ ID NO: 1020312 - protein, 159 aa, Homo sapiens
  misc_feature (68)..(68): Xaa can be any naturally occurring amino acid
  misc_feature (77)..(77): Xaa can be any naturally occurring amino acid
  misc_feature (81)..(81): Xaa can be any naturally occurring amino acid
  misc_feature (109)..(109): Xaa can be any naturally occurring amino acid
DLQTPQSQEVELRDSKDDDDIDLFGSDDEEESEEAKRLREERSWHKYRIKRKPNKPALVCQDLPYLLXCETLGMMRXDMAXIRRSASASIQARRLMSGAHTKLVPVAIXELRQLQHTACMIEGLIKGWKQDYCLEGARSPAFEGLVCKSNEMWLLSNKI

SEQ ID NO: 1020313 - protein, 172 aa, Homo sapiens
NVTDYRGKSLVSCFHPLDFTSVCPLTILAFGVQSCRIQISYLSEVVRMLCCFTVDPFGLWLIPLKYKERLGPIKIPVLSDLTHQISKDYGVYLEDSGHTLRGVFIIDGNAILRQITLNDLPVGDQRMRHYVWFKHSSTVSNTQASRPAGWNPGSQTIIPDPGGKLKYLDNPH

SEQ ID NO: 1020314 - protein, 110 aa, Homo sapiens
TRRLEARLSVRPELMATNGFLHAATVIALADTSCGYATLAHLPEGASSFTTIELKANLLGTVREGGIRSVAQAQHLGKSTQVWDAVVTDEGTGRKIALFRCTEMILYPKE

SEQ ID NO: 1020315 - protein, 101 aa, Homo sapiens
TDASSTGKRPRQRPQPARQQGLRHGALSRKSRCSSSVQIAGGQRAPLDRLTMVRVPLAKCGDIHAVKVISFRTWRIIILESSQPKNGAFHGINAVEGLDLV

SEQ ID NO: 1020316 - protein, 107 aa, Homo sapiens
  misc_feature (2)..(2): Xaa can be any naturally occurring amino acid
MXTRPGKQVLMSNMQTIQAGVPGGLLVGHPWVHPLLGGSSAERKAELCKACNHFPGSFKGTKQAQSNKLSFYISNSFLECAQNQGDIKLCKGFNEVLNKCRLATDLA

SEQ ID NO: 1020317 - protein, 234 aa, Homo sapiens
  misc_feature (4)..(4): Xaa can be any naturally occurring amino acid
  misc_feature (86)..(86): Xaa can be any naturally occurring amino acid
  misc_feature (159)..(159): Xaa can be any naturally occurring amino acid
  misc_feature (174)..(174): Xaa can be any naturally occurring amino acid
  misc_feature (177)..(177): Xaa can be any naturally occurring amino acid
  misc_feature (207)..(207): Xaa can be any naturally occurring amino acid
  misc_feature (225)..(225): Xaa can be any naturally occurring amino acid
  misc_feature (232)..(232): Xaa can be any naturally occurring amino acid
  misc_feature (234)..(234): Xaa can be any naturally occurring amino acid
THCXKVINWETGSEGHRNNCHRPSSLSVDEAGQGRPPGWGLGREGSQSLEKVIGFHVPMFSVCGLDQTSRRSLRSAAMLMFQDATXVEALGHQKWSREYSRLTFGALHRHGGSVLEILGRQSLKAASSMTSLSGNTRLISPLPRASSAIILRAVKASTXTRLWFPMTLGRRCSXPTXAAKPTFTFFTWKKASWAQYRMLQAVDKVHXSANTAPMDGSYYGLWAPXDDVEGLXVX

SEQ ID NO: 1020318 - protein, 60 aa, Homo sapiens
MRGHGVAPGEQRKENGQDKSSRSLGMQQLPERCLVPQEAQHDSGPCCPGDSPDTGPHQAW

SEQ ID NO: 1020319 - protein, 80 aa, Homo sapiens
LNGATLDNRDGGTVGSTKALTLEVAEVDNRGGEISSSEGLSLLGTRLDNSDSGKLLAGTDLGLREAQVINQNRGLLFGKG

SEQ ID NO: 1020320 - protein, 138 aa, Homo sapiens
RGDVVPHHVDLAGQQILVRRRAALVRHVQQVDLGELLEELATDLRAGAGAGRCEGVLTGILAGDGDQLGHGLCRQVEARHEEVGHRPQHGDAGEVLAGVERQLGVERRRDGVAGHGVEADRVAVGRRLGDRIGADIAA

SEQ ID NO: 1020321 - protein, 172 aa, Homo sapiens
MAIAVVLAATRLLRGSGSWGCSRLRFGPPAYRRFSSGGAYPNIPLSVSPYLRCTRMPSVFAHRLQWHEAIEFRKPKVSHIGVMGLRVVISEYTFWTVLYSRNSYQFRIENMKRQYLSGIAHFLEHSASYALHARMLTAKRMNILLHVGIQAWGVSVTARPLNDDNTMYAVSC

SEQ ID NO: 1020322 - protein, 89 aa, Homo sapiens
MAIAVVLAATRLLRGSGSWGCSRLRFGPPAYRRFSSPRYRKGNATSGIRNHFDVIRRTVHGQPSIKTADIVGVVGVLRLEGWFCSRASV

SEQ ID NO: 1020323 - protein, 132 aa, Homo sapiens
MPVTCAFEFAISAGNEFVIEPVFQGARLFQRFLKTARHVAVGLLEAIVCGRGLTYLVDQITATGRTANSQSAQQHEAQRRKRDRDDQHRQCARYAGDARQYHGLGAGRFVVWTFVDLGGQVIEVLQRVRNGF

SEQ ID NO: 1020324 - protein, 241 aa, Homo sapiens
  misc_feature (3)..(3): Xaa can be any naturally occurring amino acid
  misc_feature (48)..(48): Xaa can be any naturally occurring amino acid
  misc_feature (111)..(111): Xaa can be any naturally occurring amino acid
  misc_feature (171)..(171): Xaa can be any naturally occurring amino acid
  misc_feature (192)..(192): Xaa can be any naturally occurring amino acid
  misc_feature (203)..(203): Xaa can be any naturally occurring amino acid
FEXLFPVISGMYRAPPHTSYPPYAFGDEAPHSLCNGIPVDTKHLQQLXRLPTSWYPVNCQVGDSDARFAHYCTGHSLTNATFIIMVLHGEDPALGGTSAVENYFFVQGLFXEGVQHADVDFFFLQQFGSGQGLVQGHPSPDNGHLVILALQDHLGFFDLEVLIVVIDDGIXWAVGPVEADTLCIGGQFHCFXCSNAITWDIKXVDVGIDRNIARSSRAIWEGPSSPMETPQWEPQRLMLLS

SEQ ID NO: 1020325 - protein, 31 aa, Homo sapiens
MPPSTSSTEAITHTGPRSTPRHPIRVRGVIS

SEQ ID NO: 1020326 - protein, 121 aa, Homo sapiens
EDRVRRAPSQALDRPDQGAGDPPTPALSAFSLQEVPLPPGTSDVGAGTNRVGRNPSVPDVHPPRRDAPSIFRDSLSPYTGALAPVINQQLLCTGELTNIPQSRTAPSPILGVPSNPGPSTA

SEQ ID NO: 1020327 - protein, 85 aa, Homo sapiens
SRHSEFIVTVREWLHTRLDEYAFRGLPRYWCVLARGTCRVPHAAHGVGLPYCSPVTDRNTEVSTCWKRTVASRSQVLSQSSGTVQ

SEQ ID NO: 1020328 - protein, 136 aa, Homo sapiens
RGVNCGLCLGDGDAIGIARIVLVSLFSLLQGELRILLLAVRDVTHGARYRFTSRLRGGHHIGLLAQYISQIRVLAHCGVRGSGIPVQRRQILFLICRIGNCDGAGRNPGLRETFLATAVTLRDHGADATSVFPRSR

SEQ ID NO: 1020329 - protein, 87 aa, Homo sapiens
RHQRDVALLHALRLQQVVNHVGLAVERGPDALELPLVAQEQRLHAVAHVVAPALRARHAELGQVLDGGVFRQHRVEHLAADAGAGVA

SEQ ID NO: 1020330 - protein, 105 aa, Homo sapiens
  misc_feature (29)..(30): Xaa can be any naturally occurring amino acid
  misc_feature (32)..(32): Xaa can be any naturally occurring amino acid
  misc_feature (36)..(38): Xaa can be any naturally occurring amino acid
  misc_feature (43)..(43): Xaa can be any naturally occurring amino acid
  misc_feature (47)..(50): Xaa can be any naturally occurring amino acid
  misc_feature (54)..(55): Xaa can be any naturally occurring amino acid
  misc_feature (58)..(59): Xaa can be any naturally occurring amino acid
  misc_feature (64)..(64): Xaa can be any naturally occurring amino acid
  misc_feature (67)..(67): Xaa can be any naturally occurring amino acid
  misc_feature (71)..(71): Xaa can be any naturally occurring amino acid
  misc_feature (73)..(73): Xaa can be any naturally occurring amino acid
  misc_feature (75)..(75): Xaa can be any naturally occurring amino acid
  misc_feature (77)..(77): Xaa can be any naturally occurring amino acid
  misc_feature (79)..(80): Xaa can be any naturally occurring amino acid
  misc_feature (82)..(83): Xaa can be any naturally occurring amino acid
  misc_feature (85)..(85): Xaa can be any naturally occurring amino acid
MKATSVLCKPTPKNSSVHFLHGIPVSAIXXKXLPLXXXLDSSXVSEXXXXCILXXPRXXAFCCXQMXMVAXPXLXPXPXXPXXFXQPFHHVCFPGYLSWIVYVDQ

SEQ ID NO: 1020331 - protein, 133 aa, Homo sapiens
ACSSLSFCVRSPPSSRASPLILPPALSPLCSLSGRVVSFVVTIALSVRSPHWHLLYVRHLSRARPGSSLNDVRFVQLHFEREGFVVSLSISFDACFSLTWRTAGVYVACLHRLLFILTQGGFFTVLVCAGRLG

SEQ ID NO: 1020332 - protein, 110 aa, Homo sapiens
DNEDRGSSKLQSRNRRSKKSRSGFLRLPSGLRMFSICWLRLLEGGVHNGGHRSRTTLESVSPVVAVTIVSLLLRWLGQEAEVETSAGRTRGTRRSRRAGGTNRTSITSAT

SEQ ID NO: 1020333 - protein, 81 aa, Homo sapiens
DAETGKTTAASRYASNHHCEHYKDHHHDAEAHPALHSGGPEVQSNISHELSLREYRNNSQAGRGQPDRCHTEQGEQDPDSA

SEQ ID NO: 1020334 - protein, 156 aa, Homo sapiens
  misc_feature (142)..(142): Xaa can be any naturally occurring amino acid
TGGQFAQPIAQRLESALVLFDELSQRAVVRHARQPPGERGAPPDAQVVNPFVIDVLAPPESFERLDLLTDERKVVSDVDPFPAGGCHAAADTLPRPRLHAAPRQGREIQAETGFLAAGADTFISFIRLPPMIFALSSSLKSXSSSTKLIGSFKPSG

SEQ ID NO: 1020335 - protein, 71 aa, Homo sapiens
  misc_feature (57)..(57): Xaa can be any naturally occurring amino acid
  misc_feature (59)..(59): Xaa can be any naturally occurring amino acid
YVDDADDTPDQSGIEDRGDDVHHECCRDDQEHRYHDEPVVDVLTLHRATSPCLASGXRXRFVYIPLGPLGL

SEQ ID NO: 1020336 - protein, 136 aa, Homo sapiens
YVDDADDTPDQSGIEDRGDDVHHECCRDDQEHRYHDEPVVDVLTLHRATSPCLAIAWVSMCSPTDNCAEIERGVGVPLRSPENSVAPDTTELGTRLSGGYRRKIHSDDTGGHQLRSDPTGQGVGVGLQQQACLTGT

SEQ ID NO: 1020337 - protein, 104 aa, Homo sapiens
RAPGSRHRLPPVGLRLRANAAGCSCQRLHGLGVDPLLERLQADALQRLDEGFVAFPVAYEGGDDAFDHLGDFLGAEGRADHLAQGTVTALGPAQGDLEPLAAVL

SEQ ID NO: 1020338 - protein, 288 aa, Homo sapiens
  misc_feature (1)..(1): Xaa can be any naturally occurring amino acid
  misc_feature (32)..(32): Xaa can be any naturally occurring amino acid
XPICTARAWCTLMSSLPTSSLGPRGRCKLGDXGLLVELGTAGAGEVQEGDPRYMAPELLLGSYGTALDVFSLGLTILEIGMQQWKLPHGGGGLAAVRQGYLPPEFTPRSVLPSLRFCTLYMMLEPDPKHAGQQAEALLELRCVDGSRGASGDVLWCMAAEALSRERWALWQALLALLCLALGMGWLYPCQLATAPGPAEPPRLAHHPAVCSWTAASPANWDDDSLGPSLSPEAVLARKLVSTSTPRSRCTPRDALDLSDINSEPPRGSFPNFEPRNLLSLFEDTLDPT

SEQ ID NO: 1020339 - protein, 110 aa, Homo sapiens
ELRTCGWASWLTPVIPALYEAKVGGPPEVRSFRPAWPAWRNPVSAENTKKIGRAWWCMPVVSATQEAEAGETLEPGRQRLQWGKIVRLHSSLGNKSKTLSQKKKSLLDYL

SEQ ID NO: 1020340 - protein, 102 aa, Homo sapiens
ATEPRDHGTCWTPGGQEGEFRPLDPRGAPGRWAASESVHTRRAFLDKPWGLGKTLGRDGPEPEFFPVTGCVAFMEPLLGAWRCTESCAQVISSSSQLSPFHR

SEQ ID NO: 1020341 - protein, 196 aa, Homo sapiens
  misc_feature (5)..(5): Xaa can be any naturally occurring amino acid
  misc_feature (21)..(21): Xaa can be any naturally occurring amino acid
  misc_feature (23)..(23): Xaa can be any naturally occurring amino acid
  misc_feature (29)..(30): Xaa can be any naturally occurring amino acid
  misc_feature (33)..(33): Xaa can be any naturally occurring amino acid
  misc_feature (47)..(47): Xaa can be any naturally occurring amino acid
  misc_feature (56)..(56): Xaa can be any naturally occurring amino acid
  misc_feature (61)..(61): Xaa can be any naturally occurring amino acid
  misc_feature (66)..(66): Xaa can be any naturally occurring amino acid
  misc_feature (68)..(68): Xaa can be any naturally occurring amino acid
  misc_feature (70)..(70): Xaa can be any naturally occurring amino acid
  misc_feature (88)..(88): Xaa can be any naturally occurring amino acid
EERPXPTPWGSKMPFGELMFXSXSSCGWXXGVXFSASGSRVAWVSHXSTVCLADAXKKMAXANLAXEXLXRLALTFITNNSLVAAGHXCFPVLFTYDAAAGMLSFGGRLNVPKQSSQRGLTARERFQNLNKKASSEGGTAAGAGLNSLHKNSVSQISVLSGGKAKRSQFCTTAMDGGMSFWDVKGLESALKDLKIK

SEQ ID NO: 1020342 - protein, 121 aa, Homo sapiens
ILVLATSMWMAFAIDFPLPMASERGQLDKTIVECLKNVNKCWFLSYIKPSEPICGSDQVTYSSDCHLCSKILFEGLNITKLYDGQCVKLLNVRQRIIKPTESPDCQVKHNGCLFKYIPFNY

SEQ ID NO: 1020343 - protein, 205 aa, Homo sapiens
SRCCPFLFFRRREDGGHFRSEACLPKARRPSFNNKKRVLLGETGTWRQAPDGTTRPSFWASMTPNGGLLDAAALIIRTTCNNCPSFPTRVNSGAIFDEAETTILYETIEMTNDCNDGPRRDHFRLIPVTSIYLAISHSVIRYQTAFEMQCAEEMNMSVHLSPCFRDVQIGDIVTVGECRPLSKTVRFNVLKVTKAAGTKKQFQKF

SEQ ID NO: 1020344 - protein, 100 aa, Homo sapiens
  misc_feature (96)..(96): Xaa can be any naturally occurring amino acid
MDVLLRPAAPKDSAEIAAMSRDLIETGLTWSWTPARVAASIRHRETMALVAEAQGRVAGFAIMEFGDETGHLNLLAVRPRFQRQGVARRLVEWLEXSCRT

SEQ ID NO: 1020345 - protein, 118 aa, Homo sapiens
RGGHCGAGPQIVQPELPARHVDQRGDQPALQRPGGVDHRGADRHGHRELTIAGAGAHADVPEQLRQRRRARVLVGVPDAQRPAAEVVELAGVDGGAVQFRTQPVQSLRTHHGVNDDGG

SEQ ID NO: 1020346 - protein, 171 aa, Homo sapiens
  misc_feature (135)..(135): Xaa can be any naturally occurring amino acid
  misc_feature (143)..(144): Xaa can be any naturally occurring amino acid
  misc_feature (151)..(151): Xaa can be any naturally occurring amino acid
  misc_feature (155)..(156): Xaa can be any naturally occurring amino acid
  misc_feature (159)..(159): Xaa can be any naturally occurring amino acid
  misc_feature (166)..(166): Xaa can be any naturally occurring amino acid
SACPEPSEGRAAPLGSLSDMNPSVPKFAVVVQPSPIDGMGVFAAEPIPAYKKIGELRGESISVREARRRAKRQQRIMIVEVSDKRAIDASQSPDAMRYNNHSCSPNTVLRIRRGRVEFYALRPIAAGEELTANYXRPHESTLXXRAVANAXTLGXXIWXGNLTGTXESIWI

SEQ ID NO: 1020347 - protein, 56 aa, Homo sapiens
PRNWDHVSALHTDHSMMPAGTSYDRIRRVKVSELACINTRCLTGTVGVINAMGTHL

SEQ ID NO: 1020348 - protein, 306 aa, Homo sapiens
GTRECGTLAGKGRLSPRALARPLRVWSVFSRHPCTARGNVPIAAEARGTPVQQRLEPWSLATAPIPPPAPNAFVFCAPIIQRRLRREEEEEEEEPPKQAEPDGALTFESPPKGSQKGERVELRVDIHPTRRHGEDDLLELQNTSIDDPISAAGKTARKRSLVSHEGAHLSRPPVRRAPSNTALPELQKRTRSVKHKTARTHDGIILALGATPQYPGQLPGMRTDDGHAQATQATEDEPKDGRPTQNRTGRMIPNHGRPQNEERANTRDQRTGTRAPKDTGGRTGGEGTQKAGTIRLRDANNGPRTQ

SEQ ID NO: 1020349 - protein, 109 aa, Homo sapiens
MSRSSILADSGGMMLVKWPKQFDVIVTDNLFGDMLSDIAAMLTGSLGMLPSASLGEVDVKSRKRRALYEPVHGSAPDIAGQGLANPIAMISSFGMALRYSFDMGDLADK

SEQ ID NO: 1020350 - protein, 75 aa, Homo sapiens
RRSICRRKRKEELENMMLLTPDESVFAEPGGNSWRRQGNQVEGGCSVVSVHETSISAFASPFIHLAFIERCWCTG

SEQ ID NO: 1020351 - protein, 123 aa, Homo sapiens
MVRDAYVNQLMLMGIAVTDGRLAYANAADAFVGWISNSKPVEHEDSLCLSCEPEIQKTIYLWLGHYIRASRSVLRLDVVQVTRETLTLLSVTRNDVGPYECGIQNELMCVTTCDPVILNVLYC

SEQ ID NO: 1020352 - protein, 424 aa, Homo sapiens
MELGRRCSTMSTEEIIQRTRLLDSEIKIMKSEVLRVTHELQAMKDKIKENSEKIKVNKTLPYLVSNVIELLDVDPNDQEEDGANIDLDSQRQGARCAVIKTSTRQTYFLPVIGLVDAEKLKPGDLVGVNKDSYLILETLPTEYDSRVKAMEVDERPTEQYSDIGGLDKQIQELVEAIVLPMNHKEKFENLGIQAPKGVLMYGPPGTGKTLLARACAAQTKATFLKLAGPPAGADVHWSMVPSYVRDAFALAKEKAPSIIFIDELDAIGTKRFDSEKAGGPVEVQRTMLELLNHAGCASMPNTQVNGNSSHKHVVDILDPCPPPLCVPALTCKIEFPMPNEEARARIMQIHSRKMNVSPDVNYEELARCTDDFNGAQCKAVCVEAGMIALRSGVPRSSPTRTTWKASWEVQAKKKANLQYNAEHT

SEQ ID NO: 1020353 - protein, 406 aa, Homo sapiens
MELGRRCSTMSTEEIIQRTRLLDSEIKIMKSEVLRVTHELQAMKDKIKENSEKIKVNKTLPYLVCQASSSSWMLILMTNEEDGANIDLDSQRKGQVCCDQNLYTTDVLPSCDWRWWMLKKLKPGDLVGVNKDSYLILETLPTEYDSRVKAMEVDERPTEQYSDIGGLDKQIQELVEAIVLPMNHKEKFENLGIQAPKGVLMYGPPGTGKTLLARACAAQTKATFLVRDAFALAKEKAPSIIFIDELDAIGTKRFDSEKAGGPVEVQRTMLELLNQLDGFHAQHPMLMCNSSHKHVVDILDPCPPPLCVPALTCKIEFPMPNEEARARIMQIHSRKMNVSPDVNYEELARCTDDFNGAQCKAVCVEAGMIALRSGVPRSSPTRTTWKASWEVQAKKKANLQYNAEHT

SEQ ID NO: 1020354 - protein, 72 aa, Homo sapiens
KKKKKKKKKKKKKKTKTMAQWEGTLHLSSRELSFIVHFCHVFEACSTEDQYSTKTNESYQNDMAKVDAAANL

SEQ ID NO: 1020355 - protein, 44 aa, Homo sapiens
MIEIGARVPDATLYEYFETEAGGCALGPNAFSVAEYGKGRRIVV

SEQ ID NO: 1020356 - protein, 70 aa, Homo sapiens
PIPATQSHTSVYAISSQGGLKAWGGMWHGPHWDLINMSDPGPGLSKSLLESLDVGQVSRDVDRLTDYGLK

SEQ ID NO: 1020357 - protein, 66 aa, Homo sapiens
RGLYAFDADCRAAEVEWTLGASSAVTAVLDDTGHDASFPIMRSVHEVLRDRADAIAVRRRMALPLV

SEQ ID NO: 1020358 - protein, 93 aa, Homo sapiens
MWGLMPFLQSRHSMKQVKKSVLLWHTPHEMYELVTQVERYPEFLPWCNKVEVLAREGDSVTARLHLAYAGVKHAFTTRNRNEADRSVRMELVD

SEQ ID NO: 1020359 - protein, 43 aa, Homo sapiens
AHQARYWRGCSFDEDERWTNNFREYNLHRVQLMNSAILLDSPI

SEQ ID NO: 1020360 - protein, 263 aa, Homo sapiens
MARGPKKHLKRVAAPKHGMLDKLTGVCAPRPSTGPHKLRECLPLIIFLRNRLKYALTGDEVKKICMQRFIKIDGKVRTDITYPAGFMDVISIDKTGENFRLIYDTKGRFAVHRITPEEAKYKLCKVRKIFVGTKGIPHLVTHDARTIRYPDPLIKVNDTIQIDLETGKITDFIKFDTGNLCMVTGGANLGRIGVITNRERHPGSFDVVHVKDANGNSFATRLSNIFVIGKGNKPWISLPRGKGIRLTIAEERDKRLAAKQSSG

SEQ ID NO: 1020361 - protein, 182 aa, Homo sapiens
GGAWLTVSPRPQSQPLHTLPVGQVPPFPLPPLEPRAFAKRGRVFWRHFVAGLCSQPQPEQLSTVPSPLCQVPGQGPGGHPGTPITIHPCYSTARSGVGSTFPLTIQEVSSTDYYQPCSVYSVPPWTSQESARTTQSDLELIPNSGIGVSWLAGSWLCRAGGSPSCQQGTEPSAGRSLTNLIS

SEQ ID NO: 1020362 - protein, 133 aa, Homo sapiens
HEGEVVGAIVRGGAVELHPPAGHLPADGAIGNARRSLEQQMLEQVRHAGLAIAFVPATDQVGDIDRGGRLRRIRGEQHAQSVGQPVFRDALGAGNRCGQARHRLAGRCGRSGRWRRSFHRRARGMDRTSAAQR

SEQ ID NO: 1020363 - protein, 167 aa, Homo sapiens
KLRTKITTLNYMYSHEDRDWKSIGLTLQASLAPLGINLKMKNLANATMGERLGKGDFDVSIGSWAPDFSDPYMYMNFWFDSSLQGLPGNRSFYSNPMVDKLIRDAAANNDTAKRTELYQEAQKIVLKDSVYAYLYQKNYTLPMRDSVKGYVFHPMLEQVFNVAEISK

SEQ ID NO: 1020364 - protein, 61 aa, Homo sapiens
SLRVIDRHGGRLCPDPQIVCPDLPCQTELSVAQCTQRAVDIVFLLDGSERLGALCYDRYQL

SEQ ID NO: 1020365 - protein, 153 aa, Homo sapiens
HEAHASMRETAKHSRHRPCAAAPDGRLPPASPAPRDPTAGCWSRTGRRLDSSQCCLPPLAIACAPSRNVRDVRRRVVHRVSVHPGFVMNTPVKSTPAPVAGGGFFEVADWRPEEAAFWQANRAFAIRTLIISMLALHLAFAVWFTWSALVVRL

SEQ ID NO: 1020366 - protein, 406 aa, Homo sapiens
VNEDRMRMWSVPVGEELWVVEGMPWVECGSDGKGPTGSKTRRRVGLKAPGIIPRISVREPMQTGIKAVDSLVPSGCVVSVQLIIGERQTGKTSIAIDTIIEPANLFNDGSDENTKKLLLYLCSVLVKMEIHCGPGGEETYRCRMPVNVHPIVVSATASDAAPVQYLAPYSGCSMGEYFRDNGKHALIIYDDLSKQAVAYRQMSLLLRRPPGREAYPGDVFYLHSRLLERAAKMNDAFGGGSLTALPVIETQAGDVSAYIPTNVISITDGQIFLETELFYKGIRPAINVGLSVSRVGSAAPTRAMKQVAGTMKLELAQYREVAAFAQFGSDLDAATQQLLSRGVRLTELLKQGQYSPLAIEEPVAVIYAGVRGYLDKLEPRQITKFENAFLSHVVSPAPSLVGHYQG

SEQ ID NO: 1020367 - protein, 157 aa, Homo sapiens
MCCVSEVMEQGVTRNRKRHHLLLNQKKNEDTEDAGLDDWEAMASDEETEKSRRKHHVHIEVRENPDEEEEEETKEGEDDEESERTRRKEEGRKRRHVKVMRNDAQVSDEKDSGMTLDKKPSKEMSSDSEYDSDDDRTKEERAYDKAKRRIEKRRLEQ

SEQ ID NO: 1020368 - protein, 149 aa, Homo sapiens
MPDRVLVGTEFQLLDIALRIGEFFQDLRVLHLDHLLQLFHVHLFHVVGPARPLARLQALRAAHHLSQTLEQHQETRDGNQGLEVGQGRPPGGCAGVLLQSPGSLREVYARVSQCQNAGDEEQEVQRQVQPCLEAGRKEAVEHVTTHVAV

SEQ ID NO: 1020369 - protein, 131 aa, Homo sapiens
TRRQHRLLRARFDLEHADGVGLAQHLVGVLVVLRNVLHAARQLRMRGIRVRDHRQRAADRGQHAECQHIDLQQAQRFEIVLVPLDHAALLHRRVLDRHQPRQLVPRDHEAADMLRQMARKAAQLRHQAGPL

SEQ ID NO: 1020370 - protein, 39 aa, Homo sapiens
MIFLFAYTILRFVPNKLGGVLALLLSILILTIIAVSLDG

SEQ ID NO: 1020371 - protein, 228 aa, Homo sapiens
IPVSSEEPVSEKALRFRVNWHHHVIAGVVDDVIAGRRKDVVINVPPGSSKTELVAINVMARGLALNPYARFLHISYSDDLALLNSETAREIVQSDEYRALWPLEIADDAKSKKRWNVVVDGKKAGGVYAVSLGGQVTGFRAGHMAPGWQGAIIIDDPLKVEDAYSKTGRSKANRKLVSTVKSRKASPDTPIIVIMQRLSQDDPTGFTSLGITGALECLRIRLLICYVP

SEQ ID NO: 1020372 - protein, 222 aa, Homo sapiens
  misc_feature (14)..(14): Xaa can be any naturally occurring amino acid
  misc_feature (38)..(38): Xaa can be any naturally occurring amino acid
  misc_feature (43)..(43): Xaa can be any naturally occurring amino acid
  misc_feature (45)..(45): Xaa can be any naturally occurring amino acid
  misc_feature (50)..(50): Xaa can be any naturally occurring amino acid
  misc_feature (54)..(54): Xaa can be any naturally occurring amino acid
  misc_feature (56)..(58): Xaa can be any naturally occurring amino acid
  misc_feature (62)..(64): Xaa can be any naturally occurring amino acid
ARICPESCAEQKPXREELMEDTGPYGPTVGGDLSCYHXDRAPXPXSNWLXCLFXPXXXHTAXXXLACSLIGQADPQQQLEGAVKRKAASVVLVGHKHSGHLSLSGALTWEESYEMNIGMSISVGMAGFGLLVRNGWRFGRMPLRRRYAACLVPVLHWKEFKYAPGSLHYFALSFVLILTEICLVSSGMGFPQEGKHFSCSGKPRLFSFGAGTYMCLVNLLVT

SEQ ID NO: 1020373 - protein, 80 aa, Homo sapiens
AGVNRPRQLPSLCAVNKCGPAQRGVGAETCEATWERLGSRLRALRPGLGACASLEPPCPAVVLPPSRLSTLPWSTCQLVH

SEQ ID NO: 1020374 - protein, 114 aa, Homo sapiens
RRCEGSRRHVCAYAMGWACGTAPEFLSKRNKRTYRTEPNNLEGRNFFRFNGLSSTEECGRGARSPPHFYVRTTINKNGCATLRRIRHMIRKNKYRPDLRMGDIRKGRGILCRQA

SEQ ID NO: 1020375 - protein, 147 aa, Homo sapiens
KGFLPAPSLTLRYMCPPKYQPSQGEKPQLTEHLLGARNLLTNDIKILQQPCQTRSYFPYFTDAEPDAQQRGKDSRSLDPPRKRCQLDQQEAGGEQEAAMNQSLENSRISEERKNFSPAKSFMRWKGISYLLYCILIMVSINPLGRCP

SEQ ID NO: 1020376 - protein, 71 aa, Homo sapiens
GTRAGKENSISGPMVCPGELSTGLSTPCGIQRAKMQNLMPSKGERIAGALIHPGRGASWISKRLVENKKLL

SEQ ID NO: 1020377 - protein, 83 aa, Homo sapiens
MHQPHVANHHAIARQRGQAGEVQRQILLRHGVAQAAQQEHDRLLHQRHGDPLAGTAMMIGGLRTALRDEVEGRGRAGQEALRE

SEQ ID NO: 1020378 - protein, 174 aa, Homo sapiens
MRTKTTLTRRISICSSDKRIACEEEFSDSEEEGEGGRKNSSNFKKSQESQTQRMNKEKDPEEKKEVTKRRKQGGEARSQRGQGGGPVGLNGPLQLWLPAESLTFLPQLLSMNIFYISVYLYTNFITYNFPPGTETKAPSSGQLSWVKLFQEPPCQPFYPYLTLNRAEDVRYRAR

SEQ ID NO: 1020379 - protein, 72 aa, Homo sapiens
MELYLHLLLAVWFKFRCLVSSFSPILSVTSSGTYRCVATTQMGRASCYLTLSVTEPSQGRVAGVSDWGAPGA

SEQ ID NO: 1020380 - protein, 118 aa, Homo sapiens
RVGRSVMPNATPHVVIFLEAKPGAGVTNRSASPVSSLSSLCVVVVVYPLSQSIQAPPGFGFYVNSFMRRCPDNIHHRRISHTQPTYTFVLRVTHGRSGKSWKNHVFFFYSKRLSKTSK

SEQ ID NO: 1020381 - protein, 358 aa, Homo sapiens
  misc_feature (45)..(45): Xaa can be any naturally occurring amino acid
PVGFFKVDFNKNGEIMHSVETVPPPPPLERYLPAISCLSPSPRFXNPGILVVSPEAKGRGQRALPRPDASCSLEVLRQGADGKEGSLWGATRGLDLCREATSHPISCFWVPAPLCGGVVCVFKFSLWEQIDKKKLDERGIKLAINVATMVAPGFKKTNKKQKKNKTFWWARHMAPRENGSYRETIWVGAPEGPQDKDTGNTWAPNRGGPKRATPRGHRETRAAGEIITTQIKQKSARGGRHTPGRVSSRHNIPREGGSPERGPNKTRGDHTTPRGRGHQKRRSPRRNYNENIKGPARRGGGENPHKRETTDEVYANQRIRQKMTDDDVRANDTDGDDEPTQNTKSRHDTQLGIGQSIQ

SEQ ID NO: 1020382 - protein, 115 aa, Homo sapiens
MTAPVVKTYQLNRFNLGKARSFAPIISGRTKFPSTVGMTGIRKNHTITIPCAVNSLLYNSAVTSAPRGVIRFSRTTVAAAPPTKKKSVTVTIYRIAIRLWSVVNSHDRQPCGSVR

SEQ ID NO: 1020383 - protein, 120 aa, Homo sapiens
MPTRSPSVVISDDEPGDDLDLFCIPNHYAEDLEKVFIPHGLIMDRTERLARDVMKEMGGHHIVALCVLKGGYKFFADLLDYIKALNRNSDRSIPMTVDFIRLKSYCNDQSTGDNKSYWWR

SEQ ID NO: 1020384 - protein, 141 aa, Homo sapiens
TRGDLAGGCHGETGREGCRGAGASGHDERARAVRRCDHDRCRLRRLVRHLRDDDGLAGHAPRRRLDADARRHRDCRRHRHPRFVLRHPAHGERAGVRIVRRVHALPGDGCGLDRAVGGGQLRVRQHPCGACSRRHRDRFDL

SEQ ID NO: 1020385 - protein, 119 aa, Homo sapiens
IHLTRRETGTCARADLQPCRPRADRGRTPRGGARTPTAHWQPSHVWSQRTDLSSAPLRPPSCTQWAPPSQSTGTSWRLGSAGDTWCGPGGSQCLDSPPQMKVLDEAGHVDVAKAKALQV

SEQ ID NO: 1020386 - protein, 118 aa, Homo sapiens
VPPGDKIVNEAVMCLQEGILATPAEGDIGAVLGLGFPPGSGKAFPALMDLYGAQKIVERLKKYEAAYGKQFTPCQLLADTCVTALTSKFYQMSRPHASLSQCTNPSRRQCWFSNRDGV

SEQ ID NO: 1020387 - protein, 187 aa, Homo sapiens
MEDYLLLLECNTLIMYNVSYVRGFPCSVGFMLIQEWVVPRDMVLTREELVILRKCMHVCLCCANIDIMMSMMIHGYEFWALHCHCSSPGSLQCIAGGQVLASWFRMVVDGAMFNQRFIWYREVVNYNMPKEVMFMSSVFMRGRHLIYLRLWYDGHVGSVVPAMSFGYSALHCGILNVDAAANLVVVG

SEQ ID NO: 1020388 - protein, 146 aa, Homo sapiens
RRDLRAVPRHGPIPTADHLEQVADRSLPQRHRLAVQGEPAGRIGVEVRRLHVPAFRDRAAAGPDRVVADGAEDRVPLLPAVEVGPGQLERECVHELPRIARGTPRWRGRGLLARRGRGATGSRFQPGHQRVVAPQPLACDRALGRP

SEQ ID NO: 1020389 - protein, 92 aa, Homo sapiens
TRGIGREMHEPPEVLHWGRPRTGLALREGMVFTIEPMINQGGNAVLTEDDGCTVVTRDGQLSAQFEHTVAVTRNGVRVLTLRPDEKAPNFAS

SEQ ID NO: 1020390 - protein, 133 aa, Homo sapiens
LYFPVSITLYRLQCNASTAENPRTDYYQELQRDISEMFMSDLSTRGVVWASPIIKFRPGSVVVQLTLAFREGTINVHDVETQFNQYKTDAASRYNLTISDVSVSDVPFPFSAQSGAGVPGWGIGLLSLVIAGA

SEQ ID NO: 1020391 - protein, 34 aa, Homo sapiens
VSISSSGVSISSSGVSISSSGVSISSSRSQHFQQ

SEQ ID NO: 1020392 - protein, 141 aa, Homo sapiens
TRAARRRPPHSASKNGAETFAVAGATDIAFALIVPDGRALAVHHVGPRPRHDDLEDEARRLVAHMRVHQWRAAQRIAAVDVAAGIAQGPDDVEPADRCCGHHWRGAGLVAGIGVGAVGDQLLHGTLLTRRSGQMQRREAER

SEQ ID NO: 1020393 - protein, 157 aa, Homo sapiens
TRYEAFFTELKVAMFAAFFVAFPIIANQVWAFIAPGLYRQEKRAFLPFLIATPVLFTLGAALAYYIVMPIAFRFLLGYQVSSGDLQIDALPSIAEYLSTVMQFIFAFGVAFLLPILLMILERAGILSLQQLMAGRRYAIVAAFVIAAVFDPARCHFA

SEQ ID NO: 1020394 - protein, 256 aa, Homo sapiens
  misc_feature (153)..(153): Xaa can be any naturally occurring amino acid
MHPEPAPPPSRSSPELPPSGGSTTSGSRRSRRRSGDGEPPGAPPPPPSAVTYPDWIGQSYSEVMSLNEHSMQALSWRKLYLSRAKLKSLQTGPRLCSPASPWLEIGGRCKLERLTHGTTPPGGLLIAIQVPCNNKVLGGWCTVFALNESGTLXSLPKQSKAEEQTMHKYSAPVKGVPHMSALHRHIELGWGLTPPVIGTAGLSNLTWSCTCWGKVLPHQDPARHAKAHQGGPRQRRTKPRKDQRDHQRPAEAHENH

SEQ ID NO: 1020395 - protein, 104 aa, Homo sapiens
HEGQTGTVKTFIMESERSPNEEYTCEEDPLDGTIPRYLHQIFEKLTDNGTEFSVTVSLLEIYNEELFDLPNPSSDVSERLQMFDDPRYNRGVIIKGLEEITVHN

SEQ ID NO: 1020396 - protein, 81 aa, Homo sapiens
LRGSALGKASEPPGRFDGDTSVRATPMSRAVGKGKQPGLSLQRGLNIKILLFIPCWKTEFLLVLQMTKSAHCTTTILLNSG

SEQ ID NO: 1020397 - protein, 93 aa, Homo sapiens
TFHDDTFLTIVLYEDQRKHENAPKHARLEGIHPIETATQLRTVMTEKQPGLSLQRGLNIKILLFIPCWKTEFLLVLQMTKSAHCTTTILLNSG

SEQ ID NO: 1020398 - protein, 148 aa, Homo sapiens
MITPSYVIRLTVNDSTFTQYRSWDLAYNYGDPQTGIRSWTLLCTPDVTCCSEQVYWSLPDMMQDPVTFRSTSQISNFPVVGAELLPVHSKSFYNDQAVYSQLIRQFTSLTHVFNRFPENQILARPPAPTITIVSENVPALTDHGTLPL

SEQ ID NO: 1020399 - protein, 40 aa, Homo sapiens
MWVQSLALLSGLKELTLLQAVVQIWLASGAALAYSTCRYR

SEQ ID NO: 1020400 - protein, 218 aa, Homo sapiens
SLHQAEEKPHAPRPNQVLYQGIRFAPLTLTHEPRLRRQESLANGAGRSWITGTCPTGHLPPKPIKREPEGTTVDGETFDELNYIAFLSRLKKKKKKKKGRVFWNNMDPFRLELNENDNTPQFWGWGEYLLMEHYKPNQGQNYAIWGHPVDHNVGAGNSLHIFSALEVEHFYEGTGYRHLLTLNPPGFFWVTTGAREPRGTGQMEGQPRNKPNFSRSTR

SEQ ID NO: 1020401 - protein, 133 aa, Homo sapiens
HEACVRPPPPPDRHRWTSPDAIMQDAPLKPFRFTDAAALVRAGVPVTMVTIVEVKGSAPREPGIRMLVTGDDLIGTIGGGHLEWRGMAIAREMLDAAAHGEASSLAPDATRRIVRIPLGPALGQCCGGVVQLA

SEQ ID NO: 1020402 - protein, 170 aa, Homo sapiens
VWVVGPERQGASWAVLKGSKIKVPSFSETLSALNVVQVAGGSKSLFAVTVEGKVYACGDSHRMAGWWLGISSGTVPIPRQITALSSYVVKKVAVHSGGRDATALTVDGKVFSWGEGDDGKLGHFSRMNCDKPRLIEALKTKRIRDIACGSSHSAALTSSGELYTWGLGEY

SEQ ID NO: 1020403 - protein, 120 aa, Homo sapiens
TRALSLALGSSPAMADPSKDASMLKLAASSGCTVCHSVEPAKNADGRTPVGPPWRDVAARYYGVKDAQKQLVQTVMKGSNPYDSHWKGKAAGLAMPPNAVAINEADASKLVGWILSMDVR

SEQ ID NO: 1020404 - protein, 281 aa, Homo sapiens
VPSLELIQAAEAMKGNRMGRPRGAHSHCMRMSSWELQPAIEACETKRLEQLKTPGPEAKGGSLSPLEILEEQILRKLRKSQYAGSQQFTGKRLRRLPREDIVAQGKVGAIPGNCTCARWDSGSPGPSISAARNGGCGNQGICDEARPMQHVQGHASQEKLISSAKQVAGSTGPGSLVACKVKGDQDSEAMKRLQAAGNAVKRASDNLVKARYRRLQPCEEQENETDGGEREKMVEGIAQIIGTEEGNATRRNEQVEEAAEANWAQNPGRSQYKFLTSQLSR

SEQ ID NO: 1020405 - protein, 147 aa, Homo sapiens
QRDDRRAPRLQEQDHDQHHQRNRLEQRVRDRLDTVPYELRGVVDDAVVHAVREVLLELFHGLAHIVRDLDRVRARGLEDRNRHRGLVVEQRTQRVLRRAQLDAGDIAQIGHAAVRRGAQDDAAEVFLGVQAALRVDRELQVGARQRR

SEQ ID NO: 1020406 - protein, 262 aa, Homo sapiens
PPPGLAFLSCRRGCLHKEQMDSAPGFEYSWVPPSQAPPGRLAGAWPHSSRTLLCLQPQFHNGESEESHEQFLKALQNAVTTFVNRMKSNHMRGRSITNDSAVLSLFQSINGMHPQLLELLNQLDERRRRCPRHGASAQGQPGVVSAILGQGLPLRVLSSCESFIGAVASSRECQQEVVSVMTMPCPALPCPALPCPGPSACLPQSPAPSEPSAEGWAQGGHLRVRSTQELLGTVPEWSGLLCHLPTVYYEGLQDKLAQIRDA

SEQ ID NO: 1020407 - protein, 128 aa, Homo sapiens
TRSILNGLRKAAEFTSWREVPNNRFYEDERLFSPVLRVMPAPFAVLFALGLPGLILLLRRPGSGWLLWLPTLTGVATVVVFFAEDRFRLVVVPMFAFGAALWLAWLVHAWRAGNRALATGGLMVSVAL

SEQ ID NO: 1020408 - protein, 56 aa, Homo sapiens
HLLVVCAFPYSLLISYIRSQKTHHQATPWRLGGEGNLLLAPRPARRGASGHTLYMH

SEQ ID NO: 1020409 - protein, 138 aa, Homo sapiens
TRRAPIQAVAAQRIRRTPPRSHAPSRRPRLPIAEHLRLDAPGKRSGLPCPILQGRDGPQPDDAVYEKSFLRGEQLVQGQIPHFEGDARGAGKRHDPLPLHSFDPATAEIGGHQATMEHAEQVAHGAFHHPSPIVQEQP

SEQ ID NO: 1020410 - protein, 134 aa, Homo sapiens
EDYARIKLKQDIIALQEAINAGDAATATSLAKIVEEDYKRVWAYQAQNIALGIQNGTIQNIQNAAKLIPQDMNLINLGNLKSALDYINEMLAKLAKVPNSQDNASANATGKNPVVIPPVVVVPPPVSANPNWDP

SEQ ID NO: 1020411 - protein, 182 aa, Homo sapiens
MCGGNAAVRVMLGLLLLGLLYTREVCPGGVVEPEILEELSEMRYGIEILPLPVMWDVARAQSSGRCVIGTPSKYKQRYECQPARLELFSSSVTGRRKQPAYQGPGIPELLSPMRDAPCLLKTKDWWTYEFCNGRHIQQYHMEDSEIKGEVLYLGYYQPAFDWDDETAKGLQAGSSIRYNSQT

SEQ ID NO: 1020412 - protein, 174 aa, Homo sapiens
LNAVQLHYKDYIFHLIDTPGHVDFTYEVSRSLAATEGALLLVDATQGIEAQTLANVYLAIENNLEIITIINKIDLPAADVDRVKEKIENAIGIPTDDAILISAKNGTNIEAVLEAIINKIPAPKVVENEKELKALVLILILILQRSNYFSKNWFRSIKGGTKLSSWQMGRSLVG

SEQ ID NO: 1020413 - protein, 177 aa, Homo sapiens
MSDPKAVLRYGLDSDLSCKIAQLPLTGSMSIIFFLPLKVTQNLTLIEESLTSEFIHDIDRELKTVQAVLTVPKAEAEVTKGEVTKSLQEMKLQSLFDSPDFSKITGKPIKLTQVEHRAGFEWNEDGAGTTPSPGSAACPPLPSRWTITLNQPFIFVLRDTDTGALLFIGKILDPRGP

SEQ ID NO: 1020414 - protein, 150 aa, Homo sapiens
HEGFDTVMAPCNGCYHNLKKAEYELATSEEALKTVQDLARQADDPVYKGDVRTLHLLEWLMEELGPEGIKARLKKSLNGIRVANYYGCMYTRPRQIFPEKDRGPGSESTHKPHFMDDLLAAAGAVNVDFPLKTACCGGAHTLSGNPGPGG

SEQ ID NO: 1020415 - protein, 178 aa, Homo sapiens
MAGITTIEAVKRKIQVLQQQADDAEERAERLQREVEGERRAREQAEAEVASLNRRIQLVEEELDRAQERLATALQKLEEAEKAADESERGMKVIENRALKDDEKDGTPGNPTQKKLSHHCTKRQIGSMKRWLVQLVIIDRRLGNAQEERAELAESRLPREWDEQIRLIGPEPEVSECC

SEQ ID NO: 1020416 - protein, 129 aa, Homo sapiens
HEGQHVPVDPFGQPDLHVGALLERADLVARNGLQVVRETGHREKVGQVGAEPLVGLGVRVDKAAGARLVVLQRMGADEGREISVLAVQDRHQAELGEFRLAPVVDRHLRRAFHRDRSVVGREGMHRQVE

SEQ ID NO: 1020417 - protein, 97 aa, Homo sapiens
TIWYRDHAHYRYVAIGHWQGRLHLCLLKKPQLHQACSHKRRPKFVVIYEAVTVLEAVNAMAITLTVHHPHRLTPTDDQAASRLYSLVCRGAMALCIE

SEQ ID NO: 1020418 - protein, 66 aa, Homo sapiens
MPDGLFGFAVVDIHADDSFLVGVRVIPAPGAVTTPAAVAPAIAIAPTVTTIEAGITVHHVSLTDAV

SEQ ID NO: 1020419 - protein, 141 aa, Homo sapiens
RRVMASAAGTLKRLTLELGGNDAAIVLEDVDPKEVAPKIYAAAMANTGQACIAIKRLYVHDSIYDAVCDELGKLARETVVGDGLDSKTQMGPLQNPAQFEKVKGFLDDARQNGKVVAGGRVVEREGYFVSPTIVRDISDDA

SEQ ID NO: 1020420 - protein, 31 aa, Homo sapiens
MDLFTITIYTGRNTSSSMTLSELATAMPDTA

SEQ ID NO: 1020421 - protein, 162 aa, Homo sapiens
RGVGQRARRAVLFKVGTAGAVELFEAPERHRDQAVVADRAHAQHAVEALAHQIDPPVGAAHLDFQLRVTRQEFRQAWNDQIPRERERQIDAQPAPQIRLSAGGKQRIQFVEVGNQVATALVIGLAVLGELHLARGAMKQSRTERALQLLHRIRHRRFEQSQV

SEQ ID NO: 1020422 - protein, 146 aa, Homo sapiens
TRTRDELNFFPLIYWPIVPGAQKPSPEALARIDAYMKQGGTVLFDTRDAIMAPPGPGGEARSPGMLALREILSSLDIPELEPVSKDHVLTKTFFLLRDFPGRFNTGQLWVEALPTQDDLDGETENKRPARAGDGVSSILITSNDLA

SEQ ID NO: 1020423 - protein, 163 aa, Homo sapiens
TRPRADDFFTGTRAAICGGTTTVIPFAAQEKGGSLKAAVADYHRRAEGRAVADYGFHLIVADPTPEVLKHELPELIHQGYTSFKVYMTYDDLKLSDREMLDVLDVAKQNNALVMVHAENADCISWLTEKLVGEGRISPRFHGLSRPAAVEREATHRAITFAEL

SEQ ID NO: 1020424 - protein, 136 aa, Homo sapiens [sequence omitted]

SEQ ID NO: 1020425 - protein, 89 aa, Homo sapiens
  misc_feature (27)..(27): Xaa can be any naturally occurring amino acid
MVSVAMYSYACPMCGAPLGYAIAVVTXKGGREASAGAVMVRLLYTSVSRDRPAPPLPEPVGTLVDAHTHLDACGATDAASVAAIVDKAE

SEQ ID NO: 1020426 - protein, 149 aa, Homo sapiens
MRLLVSELSEAMSDGVRWLGVPMMGSKTLQLDLEDGNGAWNEVQHWTPRMGIQFLCRENELLQNTPCWRSALLPVQGLTGLNKTAIGDYLGEREELNLAVLHAFVDLHEFTDLNLVQALRQFLWSFRLPGGGPEIDRMMEGFRPGILLC

SEQ ID NO: 1020427 - protein, 137 aa, Homo sapiens
  misc_feature (1)..(1): Xaa can be any naturally occurring amino acid
  misc_feature (6)..(6): Xaa can be any naturally occurring amino acid
  misc_feature (18)..(18): Xaa can be any naturally occurring amino acid
  misc_feature (41)..(42): Xaa can be any naturally occurring amino acid
  misc_feature (73)..(73): Xaa can be any naturally occurring amino acid
XTPNCXKVWPKQGSQARXPPKSVSEDPPPWGQACVGVSRKXXLGSGQLWCIREGTTSPGHEPFAHSCPILTKXYVSLSHPSREELNLAVLHAFVDLHEFTDLNLVQALRQFLWSFRLPGGGPEIDRMMEGFRPGILL

SEQ ID NO: 1020428 - protein, 135 aa, Homo sapiens
SSLTSQKRYSKLPGRSLSYPQKCILPPEELVITKTHHNLHKLSHVGLFEFQEGIIIIHADVIGIALDSTLGHMGAFQPGSTVNFIVLAAWLEVESVGPIYHASLILGALAKPTSYSFVVVLFTIEFFHSSYACGQ

SEQ ID NO: 1020429 - protein, 117 aa, Homo sapiens
SCRIRHATLKSALLMLQSHDQALVGDKSLAFWLMDAEMYTNMSVLAPFTPVIDRGIQLHKMIRLITHGLGGEGYLNFMGNEFGHPEWLDFPSKETNESYKFLNNFDRDMNRLGIGWL

SEQ ID NO: 1020430 - protein, 90 aa, Homo sapiens
RGASGEEKIRELAQSLRQGGVSLAFSSLKKQVREVFEAGGLIALLGKENIFGSFENRVGNGVPEAAVKGGRSPAERTLDAQDREIRWPMA

SEQ ID NO: 1020431 - protein, 130 aa, Homo sapiens
TRVPASVTDPVERSKQAWVAFAADAAGTGPFKMSRFVARERLEVVKNAQYWDAKRVPKIDKVVMMPMPEANARTAALLSGQVDWIEAPAPDAIAQIKSRGFQVYSNAQPHMWPWQLSFAPGSPWLDKRVR

SEQ ID NO: 1020432 - protein, 38 aa, Homo sapiens
QPALPRVSAALLFLTICRSFAAVAVRRQRDRAFVGLIL

SEQ ID NO: 1020433 - protein, 153 aa, Homo sapiens
RGRLEQDLAPSEIEHGRRADRERGKHDLGAGESLLAKRFLVDREVPIRPCAEAASKLVMADEGRLIGFESRVSEHVVRMHVRVDDVADRQRRDRADGLVKTGPDTGAAAGVDHRHGLPPDDEAGVRDVALVGRSVEPNLTSVSISPGRDFGDK

SEQ ID NO: 1020434 - protein, 121 aa, Homo sapiens
MVDVVDVPGVHVREEHRERGECPAGAVLQVEQVVDLLGRQRQRLAAGRHPLLDLRDREAVRSVLGDDVSQVTKQRVEPGTPDALFDEAAEDPLTECAAVLSLAGSGAIGLVQPPLVDVVRD

SEQ ID NO: 1020435 - protein, 36 aa, Homo sapiens
YRSFEDWMTSGLEGDMLFHSHSLAFRVPPLAHFQRL

SEQ ID NO: 1020436 - protein, 121 aa, Homo sapiens
MTIATIATSSPTVPPLSTCDPMRRPTGMCTTDSGSATGSSAPSMIPVMPPLTTAAAADARDPGRETVSARASARRAPDASRRMSGRTSSAFEVDRYSSLTLESMPAPTISSFANPTSREII

SEQ ID NO: 1020437 - protein, 73 aa, Homo sapiens
RIRNTWTSCLTWTARMVAELGRIAVRIPETRRKPKYIYEGPARKLNVSSDIVHPGVRRLSSNLLTDSSKLMIF

SEQ ID NO: 1020438 - protein, 111 aa, Homo sapiens
RGVVTVTPYEDPAEAIRIANDSDYGLAAMITGSDSLKAVEIARQLRTGNVWINAGGNIGNAPFGGFKLSGIGREGGVWGMHEFTEVQHIVLAQLRRRPLAATRPLAATITP

SEQ ID NO: 1020439 - protein, 120 aa, Homo sapiens
IIEDLSSSPVFFFFPLYFVSATYKQDTRTQDVENATSENVSAIHPSVLLMRCIRDCRKPRLLRRQDCRWATKHPSSCPRKNLTMSCNPWSSHHLRGRSLNPPPSLFQAHKLNLPGADIAK

SEQ ID NO: 1020440 - protein, 147 aa, Homo sapiens
MPRPSCGLAGEQALRPDRQDDYQQHEGDDVLVVGRHVEAAEALRHADDQAAEDRAGDAAHAAEDDDHEGLGDDQVPHRRIDQIDRRIQRCGNRRERARDREHQQRDARGVDADQRRAFAVLRHRHDGRAGDRAGQEQMQHHHQREGG

SEQ ID NO: 1020441 - protein, 71 aa, Homo sapiens
  misc_feature (29)..(29): Xaa can be any naturally occurring amino acid
MEKRMRSDVRGKSSFSLMRPHEFGNRFVXDADRIGDALQALAFAQHTQDLDLAVGELAQRVLGAHAAHYQL

SEQ ID NO: 1020442 - protein, 102 aa, Homo sapiens
MSISPSAAPANCCTHAGVGAALFTPKSFPQPMDQAALGISAQGNHHPSLKIPPKMRRRFTRLFGPLSHGELSDQVDNYPEGLGEVLYREQFDFIAEPPWEPT

SEQ ID NO: 1020443 - protein, 86 aa, Homo sapiens
CLLLSRFITANQYEMCKEKSFKNDGIRDLFEKGTAAIFERLPKNVRAQYIIHLPCSLYPLPHNVQLTLPPSLCSTFQPTSRVVSIL

SEQ ID NO: 1020444 - protein, 86 aa, Homo sapiens; identical to SEQ ID NO: 1020443

SEQ ID NO: 1020445 - protein, 114 aa, Homo sapiens
  misc_feature (23)..(23): Xaa can be any naturally occurring amino acid
  misc_feature (38)..(40): Xaa can be any naturally occurring amino acid
  misc_feature (47)..(47): Xaa can be any naturally occurring amino acid
  misc_feature (49)..(52): Xaa can be any naturally occurring amino acid
  misc_feature (55)..(55): Xaa can be any naturally occurring amino acid
  misc_feature (57)..(58): Xaa can be any naturally occurring amino acid
  misc_feature (63)..(64): Xaa can be any naturally occurring amino acid
  misc_feature (68)..(69): Xaa can be any naturally occurring amino acid
  misc_feature (71)..(71): Xaa can be any naturally occurring amino acid
  misc_feature (73)..(75): Xaa can be any naturally occurring amino acid
  misc_feature (77)..(81): Xaa can be any naturally occurring amino acid
  misc_feature (83)..(83): Xaa can be any naturally occurring amino acid
  misc_feature (85)..(86): Xaa can be any naturally occurring amino acid
  misc_feature (88)..(88): Xaa can be any naturally occurring amino acid
  misc_feature (90)..(94): Xaa can be any naturally occurring amino acid
  misc_feature (98)..(98): Xaa can be any naturally occurring amino acid
  misc_feature (100)..(100): Xaa can be any naturally occurring amino acid
  misc_feature (102)..(106): Xaa can be any naturally occurring amino acid
  misc_feature (108)..(109): Xaa can be any naturally occurring amino acid
  misc_feature (111)..(111): Xaa can be any naturally occurring amino acid
  misc_feature (114)..(114): Xaa can be any naturally occurring amino acid
RVSTPPRAPVRPPATRPPPAAPXIAPKAHTPATTHPPXXXLFFSLNXIXXXXPPXKXXLPSSXXPTHXXKXLXXXPXXXXXHXSXXKXTXXXXXPSPXTXLXXXXXFXXSXPLX

SEQ ID NO: 1020446 - protein, 130 aa, Homo sapiens
MLQANTVLGEYAPMMKRPGAMPGDANKSLEPKIIHLMAASVAGLAIARFSTNIRSVTTSITSRRRTYTYSINNQRIVALLKGIGTVGEKDLLNTVTRSLAQAAATVGKFIDRPCYVIEGNWSVRFRDVDT

SEQ ID NO: 1020447 - protein, 145 aa, Homo sapiens
  misc_feature (7)..(7): Xaa can be any naturally occurring amino acid
NGGPGAXVELHESLAVDSCAYSFYEDRRSDAKAAMENIVHRMYLSMYSDMITVQNKKHAKNVFGYIHSYLPHSVSRYIRETANYVAAMKYNATIEELVARLQEEAKRPFPILDDKDRELAAAYVNTIVKRWNQLRSREEVQPVVE

SEQ ID NO: 1020448 - protein, 122 aa, Homo sapiens
MGGNVMRSLDLSDMQWTDGFQAGPAVVGVGWRADLARSSSIQTGRGRGNGPRGCPSSAGDAGREAGAFLHQALELLAGVEGHHAASGDRDDFASLRIAAGTLRLVPQLEVAEAGQLDAVALL

SEQ ID NO: 1020449 - protein, 45 aa, Homo sapiens
AAFQDAGGYAYFLRGRLYWKFDPVRVKALECFPRLVGPDFFGCAR

SEQ ID NO: 1020450 - protein, 173 aa, Homo sapiens
TTKHLCMISGSTNSLDSAVMRLRKYRHASIPGSGRLPVIHAVTAYEQTVNQEINFQKSFNNHVRTLVAREEVAIGLMHLWDFVSALEQNPNSKPLMAQLFLIVQHSRDNEAFRDALLNIVKPEGRWLLDLINILQSIVVQERSLSLADKVAAINYSMLSLGKFYARKIYHTPY

SEQ ID NO: 1020451 - protein, 248 aa, Homo sapiens
MLGVILDEGGTNPYIPPTVLLPPLLLLLALLLCCQPSELRLVLRCPVLLGKVVQCVGCPVWLRGGGGWGCRQPSVLRCEAECACLSEWSVCSELRVVYTPELAAPVTCMCHPAQGLTEAAFCVALACSCLVPAAFLALPRLLFAEENPKESKPQAGTALQRMSTRQLTQQRNPGTSTTRSQPNSAGVKTLRWAHAVDIWTQCCSNSRLIVYRGAQTLYVPIVTIEASTGSGSAVLPGAAQRVPDGVWI

SEQ ID NO: 1020452 - protein, 82 aa, Homo sapiens
MATKAVCVLKGDGPVQGIINFEQKESNGPVKVWGSILALTNRSEMAASVKTCRHTSSSLEHPRGAQKYGHTTLSPWVRSRLK

SEQ ID NO: 1020453 - protein, 106 aa, Homo sapiens
LLSQSFLNAAENTLSVSLSNPSSYWHSCSSSLILLTPLQDVDAAYLNKVELEAKVDSLNDEINFLKVLYDAVRAPSSPPSRERESPICDAAGWDSQFFERTPAPLF

SEQ ID NO: 1020454 - protein, 154 aa, Homo sapiens
HEVDLLGAQECRSKCHGHGVCDSSRHCHCDEGWAPPDCMTQLRATSSLTTGLLLSLLLLLVLVLLGASYWYRARLHQRLCQLKGSSCQYRAAQSGPPERPGPPQRAQQMPGTKQANVSFPVPPSRPLPPNPVPKKLQAELADRSNPPTRPLPAD

SEQ ID NO: 1020455 - protein, 148 aa, Homo sapiens
RGFSAAAISSDGGRIGRRAISVRRAAGGGGSAGSLIGNEVFMRVSFPVRDGGGVTIDQTAGQAQRCERRGGFSDVGLTVPGALEQVDHGGEIARGGRQPGAADAGGAQCRGVGDQAMLRRRLRLYAIQGEEVLLFGGVEQQAVRVFDA

SEQ ID NO: 1020456 - protein, 76 aa, Homo sapiens
LEVGGAGLKASETEQIMSHKQIYYSDKYDEEEFEYRHVMLPKDIAKLVPKTHLMSESEWRNLGVQQSQGWVHYIDP

SEQ ID NO: 1020457 - protein, 132 aa, Homo sapiens
RGHVHVEGLVVGRALEYRRQRGHRRLDRSHAVAGHEATDHQTEDGDVLGGHPQRGQTAVQCVGADRSGKDDHVADDQKHGISLCMTDVRGINHCVPAGLTAPPPGNLTKSAAQVNSTRRTKKCRCGLPRSGE

SEQ ID NO: 1020458 - protein, 262 aa, Homo sapiens
MPKRKAAGQGDMRQEPKRRSARLSAMLVPVTPEVKPKRTSSSRKMKTKSDMMEENIDTSAQAVAETKQEAVVEEDYNENAKNGEAKITEAPASEKEIVEVKEENIEDATEKGGEKKEAVAAEVKNEEERLRKKTEEDQNEENGESWKTTDQRLNNGDRRWTHEDYPLDPDDHGDRCKREKKMDNNVVKTETGNGEDGKRRKEKMTHEDEDEKKPGDGKEIDDATRDRGLQKRGKDVKSKKMKREKRIGKKIKVAIEEEGGKE

SEQ ID NO: 1020459 - protein, 120 aa, Homo sapiens
  misc_feature (108)..(108): Xaa can be any naturally occurring amino acid
HEEEQGVPRGIGHAGRGVPGRLQRQRHRLVVAPLAQHHGRIERIGDMVDVGQRDAGLLQAVVDRMVGQLPGRERHRPLAVLDMREPFVLGRGDDLAVAHQAGGGVVIXGVDSKRVHGGSS

SEQ ID NO: 1020460 - protein, 154 aa, Homo sapiens
RFLVRRTGSKFNAVVLKRLFMSKINKAPLSLSRLVKYMEGKDGRIAVLVGTITDDIRVYEVPTMKVCALRFTETARARIEKAGGECITFDQLALRAPLGQNTVLLRGPKNAREAVKHFGKAPGVPHSHTKPYVRANGRKFERARGRRNSRGYRV

SEQ ID NO: 1020461 - protein, 160 aa, Homo sapiens
HEAGREPERSGAEIRVVAYVVPRQRSNGQAVLVSSCRTGDHRTIKIRVALDRDIEPAFTSPNGCLFGDIGVATVGLALGRRKTGCPAALADAEATALAFLPGVDHLGVLTALQVQVAANISRNLAAGDDAAQDIGIAAGNIATESVPVMWLFTCVALTLS

SEQ ID NO: 1020462 - protein, 141 aa, Homo sapiens
RGDLVVRVTGTAEGTRIDARSQSRVGRSDLGVNAKRVRTFLRELASRLEAERRSAWLIRRFTDPERRSFWGEKSLPTAPKIASSQDLSKSMREEETATHRARERYGHSIAFAEALKVWARVAALSFGGPAGQIAVMHRILV

SEQ ID NO: 1020463 - protein, 82 aa, Homo sapiens
SGDPRSREREGEEERASGKDGPLPPTPEREALILGSQRTAAAAAAGTITRPRATANCCECTGRGPGSGGGGGSRVAVKNVSH

SEQ ID NO: 1020464 - protein, 113 aa, Homo sapiens
MLYNDDDFEPYLSSQTNQSNSYPPMSDPYMPSYYAPSIGFPYSLGEAAWSTAGDQPMPYLTTYGQMSNGEHHYIPDGVFSQPGALGNTPPFLGQHGFNFFPGNADFSTLGTSG

SEQ ID NO: 1020465 - protein, 132 aa, Homo sapiens
MRGPIVVVEPVSSRVTILPGEGLTRVDEHDTHRQVTRIAFRRRQSRIDRRCRCAQDVDGFGRVDASEQRPEHMIDVGDIDVIVDDDTVRSMPPVLFRPAAANNACMAFPVPVCSIYITIINWRAYAHTPLMF

SEQ ID NO: 1020466 - protein, 138 aa, Homo sapiens
RGERDPALVELEVRRGLVTVDGARRYGVVIGDESATAALRTEMRAARPAELPVFDMGPPMETILANCEAETGLPAPKRPGVDLTGEPPRESGPRRVRVGATVSRGALVTGPHGASFSGRVGWGDRAGLLVVDLVRAYT

SEQ ID NO: 1020467 - protein, 125 aa, Homo sapiens
  misc_feature (49)..(49): Xaa can be any naturally occurring amino acid
MERSSTLRARTQEAVGSWEVSGLLERHRIQTGAAPAAALLLARAAQSEXSDGRGPPSYHSMRSNCVHFALCLLVPGPSLDPRQIDGSSSRCQWTWTCPRIKHDLGPPGWTWRLQKDSLNYFPKLK

SEQ ID NO: 1020468 - protein, 113 aa, Homo sapiens
VARALGTGLVSPAACKPKNHPGQKKKKYTKRNEGGLGPKPPGGRPVGPLKGGRFEEFWPELVPEGVQLFKLVPNLGPGLLGVGNRQPGSLEQPPPVKGQVGAKQGVANLGGWN

SEQ ID NO: 1020469 - protein, 36 aa, Homo sapiens
FLQLMFVKATNHTHPLRCGRYRHLPLEHVHGIGQRW

SEQ ID NO: 1020470 - protein, 123 aa, Homo sapiens
HEVDRSADRAPRVVDEDIDRAVLLQHRLHEAVAIGHVGQVGGVGEHLAARGAQLVTHLEQLVLATRAQHGDRAGFGDLARGGKADARGAAGDHDHLALHPALERAIDEQIGIEMGLPVVPQPP

SEQ ID NO: 1020471 - protein, 103 aa, Homo sapiens
YIPQSVSRLKQAAQGPQLQNLGFKYPLGVSYWFHLYGYQSEAEVKAPSLQTLILLAQRNPLISSVASSRSHRDKIRIMPQEEERLLMSYLEALTGAPAELDFP

SEQ ID NO: 1020472 - protein, 108 aa, Homo sapiens
YIPQSVSRLKQAAQGPQLQNLGFKYPLGVSYWFHLYGYQSEAEVKAPSLQTLILLAQRNPLISSVASSSTSIERYDSREISMVMSEKIGCFAVNHGEARADDDYADDM

SEQ ID NO: 1020473 - protein, 57 aa, Homo sapiens
MAHAKHQQFVPAPVSGGPHDRLSSREADQGGADRGQDGNLACRNVGFTWINQRDRFA

SEQ ID NO: 1020474 - protein, 122 aa, Homo sapiens
  misc_feature (88)..(88): Xaa can be any naturally occurring amino acid
  misc_feature (97)..(98): Xaa can be any naturally occurring amino acid
  misc_feature (117)..(117): Xaa can be any naturally occurring amino acid
LTAPWRLLQCCELEAGELGMAVPAAAMGPSALGQSGPGSMGPVVLSEHAARRCYCALWMQEAVPGATAMTAADVPCAAHAANGALCGXEVATGRRYXXGGSFDKTPSVFCWGKEPGXGQRKQ

SEQ ID NO: 1020475 - protein, 116 aa, Homo sapiens
LTAPWRLLQCCELEAGELGMAVPAAAMGPSALGQSGPGSMGPVVLSEHAARRCYCALWMQEAVPGATAMTLLMFPVLHMLPMVPSVCACDVCDCGCLPSLVGPSDKTCQLSSCWMK

SEQ ID NO: 1020476 - protein, 181 aa, Homo sapiens
MLVEFMLVQMVVDKDSLRLMSRDTLRLTECLARVHRTLHTPLYYAVNIHQGTTPLQGMQSSPHRHALTFPPRLATGELLPTMHVLHHLGSEQASSEKSFMTIPSCRWTILNSIQITAAVTLLDLFNNTEEQDHCAVQVSTSYELMGDVATLTSILSFLPSFPPTVPFPHMPSSEKTCSSVL

SEQ ID NO: 1020477 - protein, 185 aa, Homo sapiens
MLVEFMLVQMVVDKDSLRLMSRDTLRLTECLARVHRTLHTPLYYAVNIHQGTTPLQGMQSSPHRHALTFPPRLATGELLPTMHVLHHLGSEQASSEKSFMTIPSCRWTILNSIQITAAVTLLDLFNNTEEQDHCAVQVSTSYELMGDVATLTSILSFLPSFPPTVPFPHMPSSGLLAGRLHHFTP

SEQ ID NO: 1020478 - protein, 166 aa, Homo sapiens
DEELSDVLERFSPRFHGVVEVAPRQLNVFRARDVIGDVLAISGWDKWVVPMLDDKRWHAHGRKQRPYLQFGHHRHHDSNGPRARCQPFESRPRRPDLLIPRHIGIERSFELARSPHGHHRIEERLMSNPVVALSRRIRVDLESDQSRGARRISGREQRRGRESGIR

SEQ ID NO: 1020479 - protein, 88 aa, Homo sapiens
ISSPNYGCTGTVGVRLNSILFLRQYSTTAGGFPLALSSLAYREAHPMDTRQQVLGRLICQTPAPASGRSQTERYLMATGSAHLPERPN

SEQ ID NO: 1020480 - protein, 149 aa, Homo sapiens
TRQEFRPFRDIVIDWRQQDGGVRIMALSGRPWRDASGQIAGYRGSARDVSRQVKAEEDLRALNHELDERVRSRTSSLRAAFEELESFSYSVSHDLRGPLRAIHGFASVLESEMTRPDVSGLGKASFDALSRILRAALPMEHLVDDLLEL

SEQ ID NO: 1020481 - protein, 290 aa, Homo sapiens
GDVHLSLRYTSRTFSPFVNGKGSLFLALTYGSLFSKKKKKKKERKKATKHKTHKRPVPPVTLGLTEPPPSHAMGPRPAASHAPPHRSPPWLSFQPHVPYSVLLPASLSSVTKGVDHSETDVLSHLLRLLDAQMSLALFSPFKRCACAHWTPEEAGGGLPRFAHPGKCLNFNIMIILLEEKRTAWAHRLQEYSLGPSVNWPGSPSLCRGCEGSPGWSHGGYSGLCLRGQPLAAEGLPGALQRTARSPCLVRAHPTGSHVGLGRSHGGPPVTLASKALGWAPRLLVRFVIVP

SEQ ID NO: 1020482 - protein, 64 aa, Homo sapiens
MASRSGEVCEPTSASARAPKPYPPLAICCSRIAMTSAFCASVSPRGPALGPTIASVTVRSGYCI

SEQ ID NO: 1020483 - protein, 131 aa, Homo sapiens
HEGTMGVYLHLMKGSVSVREGQRVETGSLLARSGNTGNSTGPHLHFVVQRNVGLAVESIPFNFRQPVNSLPNFAVGGEYARQGLPAALLLRISRRNTVARSRISGVSVVAQWRRCAWRTLRGMRVPRTGLV

SEQ ID NO: 1020484 - protein, 125 aa, Homo sapiens
ISSVPWYGSGKRLMKLRDTALKMKAADVRDISIGLKGFFDGKKVEDYVNQQVNNLPLEKMNNSRCTVVATELKHGTKTVFNYGQYGTGGESISLNTSMFVPTKIGKSEYVDGRFSHVRYLPLPYH

SEQ ID NO: 1020485 - protein, 107 aa, Homo sapiens
LVPDVLEASVRPMLVVILLRCCPHKVQEGSETRAPASEVHPAVKGWGQRPPGDADRRSLMQVPDGPGTVSPGGMGQNTPLPQNCPSPAQRTPHLRASPHVRCALAVL

SEQ ID NO: 1020486 - protein, 77 aa, Homo sapiens
WTVTVGVHAVLDSCNCSSSIICWRIMNFCTLPGHGHRHLLDEADVARHDCRLGARGRCAHVLSPGCACGVDSGNPPE

SEQ ID NO: 1020487 - protein, 156 aa, Homo sapiens
RGASSRYTRAGRRLAKSSSALRIRSSPCSGRFSLGSPSYLGAPTAPSRMASAVRASSRVDAGNGFPSASTPAPPMGASAHSRWSPSRRSRSSTFTAWAVISGPIPSPGRMAIFIQPVNAQPNSHGASARRLASEALILSTCRRVSPMSSRPLSRQY

SEQ ID NO: 1020488 - protein, 102 aa, Homo sapiens
SGEKGEGGDPGLVLVIVSGTSYSPGENSCKKERILHRPKMLVSVLLQSTSGAVEPVARCSWQAPGIVLPCPHPQSRPPNYQGNIFALGPKRVFHQTSPLDDQ

SEQ ID NO: 1020489 - protein, 68 aa, Homo sapiens
  misc_feature (1)..(1): Xaa can be any naturally occurring amino acid
XSFPQDITLTVNSISLSPNRKLAPPGIRMLAVCRIMPTKNDFFQEELIPARPEKAHMGQNMRSAFASY

SEQ ID NO: 1020490 - protein, 177 aa, Homo sapiens
RGVRSELAEHLCRHAFTLADEAQQNVLGANVVVAQLQRLAQCQLKHLLGAGRERDVTGGGVRALADDLLHLLAHAVQRNVHGLEGLGGDSLALADKAEQDVLRPDVVVVEHARLFLGEHHHTSGSIGEPFEHVILLVSYPGWAGIRRSHLWRCVQANQGARVRMPMFATGVMAVTFS

SEQ ID NO: 1020491 - protein, 112 aa, Homo sapiens
  misc_feature (103)..(103): Xaa can be any naturally occurring amino acid
HEARAGTSRGSGSRLRQDSHRRLCGPALGNGRPQQRHGRVTRPFLGGKDGLAGAGSAAPRRRMDRPSEYSLPSTELGARPSRAAMSRLVRPSATRARSRATSXGLQGRLPWA

SEQ ID NO: 1020492 - protein, 161 aa, Homo sapiens
ELRTGMCCRPAHKLIVMLTYDDLNERCKRQPQRPAGRRVHRPPGGGSIAFFSRQKVRNQRIGVTMAHAVFSLEQGHKLHMLPGTGGLEQIQPVANGLPIVFFDGGEVRRWPFCFCIVGHDANSLFAEVINARITLPLWTHRVHRTARHYTPPLAYSTCRYR

SEQ ID NO: 1020493 - protein, 181 aa, Homo sapiens
MLTLYDLSHSATSQRQIGGIVALAHSPTTTWLRHKRGTSLAHGVEVRITLDEEAFVGSSMHLYVQLIDHFLGLYVQINSFIELVVLSLQSGEELIQMQAKKRIAESGVIQHLLAEPYRYQFVQAVRILLCWLRQQNVSHAQAFGQVLRFRSKLSLSFPASEIERLSLDEHEQLDLITGYMR

SEQ ID NO: 1020494 - protein, 93 aa, Homo sapiens
QIESPNGFPKWIPKWNPQMESPNGIPKWIPKWNPQMESPNGIPKWNPQMDSPNGIPKWNPQMESRNKYTVPRLSPVVFQDSDENETVPGITEN

SEQ ID NO: 1020495 - protein, 187 aa, Homo sapiens
TRGCVVAHRHVKELKRRKAVVAILRAHLYPPAGNIPHGPPNLLMTGNDLGASPYRNQTSQKKNVKELVFNALTQTTFRRLFDLWQVGLLLRVYIRKRFLFWMICNAANPLSEFCGGQKPIFGIDKQLALYRKMLLIRKVEEMLGNASLAAELPGPVHLYVGQEAIAVGVCHHLAETDWIAARIPGTG

SEQ ID NO: 1020496 - protein, 48 aa, Homo sapiens
MAPCQYPFPLSEKTFHACLAHDYLAQTTQFLGRQWRTAFITILMLVLV

SEQ ID NO: 1020497 - protein, 39 aa, Homo sapiens
MEKPVPLTSLALAPSRITRNVWMSDSGTEIKSNHCNTVS

SEQ ID NO: 1020498 - protein, 213 aa, Homo sapiens
LPVAEPAVYFKEQFLDGDGWTSRWIESKHKSDFGKFVLSSGKFYGDEEKDKGLQTSQDATAYYSRLYGSGSYRSLVSRSIGGQYRCVVLVRSVKHEQNIDCGGGYVKLFPNSLDQTDMHGDSEYNIMFGPDICGPGTQEGSCHLQLQGQERADQQGHPYARMMSLHTCSTLIVRQTNTYEVKIDTAGGIRLLGRRKGFWQQRNKGSDASKRKM

SEQ ID NO: 1020499 - protein, 204 aa, Homo sapiens
LPVAEPAVYFKEQFLDGDGWTSRWIESKHKSDFGKFVLSSGKFYGDEEKDKGLQTSQDARFYALSASFRAFQQQRPDAGGAVTVKHEQNIDCGGGYVKLFPNSLDQTDMHGDSEYNIMFGPDICGPGTQEGSCHLQLQGQERADQQGHPYARMMSLHTCSTLIVRQTNTYEVKIDTAGGVRLLGRRKGFWQQRNKGSDASKRKM

SEQ ID NO: 1020500 - protein, 115 aa, Homo sapiens
PCPTSGVTLFIAYMDVAQLHGGATEIELAAVEIRTLQTRLELRVTAHCNTGDAQPGTGAPQIGTALADPPGGIQGDIPTEQADPAEQAHVVIAEVTVVGGQVRYPCIGEAELGPH

SEQ ID NO: 1020501 - protein, 116 aa, Homo sapiens
  misc_feature (81)..(81): Xaa can be any naturally occurring amino acid
MVSGGERGSEPIVPSRTRKYEANHFGAEDRKLRWTICPPAGQTKIIFWLIGAATASSACRSSPHLPSRLAVPAAFPCVCMXAHARREDSAGITRRTSKKGDPMTTRPTRLSRSRRT

SEQ ID NO: 1020502 - protein, 139 aa, Homo sapiens
RGGTRKNSKFLKFLVIFILGLFVLGIASILYYYFSMEAASLSLSNLWFGFLLGLLCFLDNSSFKNDVKEESTKYLLLTSIVLRILCSLVERISGYVRHRPTLLTTVEFLELVGFAIASTTMLVEKSLSVILLVVDYWLC

SEQ ID NO: 1020503 - protein, 105 aa, Homo sapiens
  misc_feature (8)..(8): Xaa can be any naturally occurring amino acid
GSFSSRPXAALMPPVSPRRAAAAAGRLNAEGAEGARGGGSSYSEMAETVADTRRLITKPQNLNDAYGPPSNFLEIDVSNPQTVGVGRGRSPLTKSGSRQIFLFSS

SEQ ID NO: 1020504 - protein, 60 aa, Homo sapiens
QARARGWQCATIFADDAEQIRDSSHILETVMHERYLDAYSAAYSAAAQYKFFIVACDPPQ

SEQ ID NO: 1020505 - protein, 120 aa, Homo sapiens
LCVTSCLSLCVHQVFTGFEIQSSTATFFSNATCLLSGINNYTQHLSALNNTFLHDSFHNAAAVCDYAQNCLQKSSAQLTKHSSKHVNMTDCRLTSGKYPQCRYSAAAQYKFFIVACDPPQ

SEQ ID NO: 1020506 - protein, 43 aa, Homo sapiens
MPGCPIRKSSDQWSFAPTRSLSQLITSFIASENQDIRGAPLLE

SEQ ID NO: 1020507 - protein, 41 aa, Homo sapiens
YTRSACCRSAALSAVCHRCDQICWSTSCQLSSNTDNGSQHQ

SEQ ID NO: 1020508 - protein, 155 aa, Homo sapiens
TRARQIGCDFLITGPAHSKILGEKMLGSTAARIVRRASQPVLAVRRRPEGPYKTIVAGVDFSEASRTALMRGRAFFPSAQLTAIHTYSVSPNWAGPNADKSIDVVETEERARVVREAEQDMADLVAGLNDAPGRIQTVLMEGAPETTLADFVDKK

SEQ ID NO: 1020509 - protein, 52 aa, Homo sapiens
MIDPTFSESSYGFRPGRRAHDAVLQGAGVTVQEGFGRGREMSTLEKFFDPGQ

SEQ ID NO: 1020510 - protein, 99 aa, Homo sapiens
VFSVPLAEYCLITKAQMDRRYVPDPNKAQDLEKKREKALLKEFEQYQQHSGRKLKEFRLEVLRAGFKDAWSRKDYQTIIKVAQKIPDEALQEDEKLLLW

SEQ ID NO: 1020511 - protein, 99 aa, Homo sapiens
TRTADAERDQQHRGDEQPARQRRQTHHLSQFAPLAGDGEHEKADAAAGQRSEVAVQHPQQHADQPARGTARFDQQMQRPGAGDTRIYIERDETGRRGGP

SEQ ID NO: 1020512 - protein, 138 aa, Homo sapiens
RGATEVADRLAVDAVDEAAGVATNSRLEVIQPKDAGRQQRNRVRNQRSLTRRDQRGELAAANGGLGQRRRNLYIVVEDQISANSTRCTIGSNLFVASPSATILLLESKQHYSRVVQILRVERLDAEVVVVNEVIAGEL

SEQ ID NO: 1020513 - protein, 41 aa, Homo sapiens
NNLKMQVLYEFEVGIHGKLTVVQVEKLEVLDHSKRWCLERD

SEQ ID NO: 1020514 - protein, 116 aa, Homo sapiens
  misc_feature (100)..(100): Xaa can be any naturally occurring amino acid
MPPAYLREGAPPESVLSAGSAMLVEVGGNSSHWGRSKGKNPKCLTSKGGPVPLESGVHCKALADDLGFVVPPPPAEHSVLFSKLTSIPTAMADIGLEVWXKTKTEFGNLGPLLSLW

SEQ ID NO: 1020515 - protein, 150 aa, Homo sapiens
HEGENGAADGVHPLLVERFSPVSFDRDATLSDAEVDVLLDAARLTPSAGNSQPWMFIVGRRDDPVHSRIVNHLAPSSARWAPDAALLIVNLAHVLVEDTDWEFSEFARYDLGQAVAHMTIQGLVMGLGAHQFRAFDRDGVPREFGVPGAW

SEQ ID NO: 1020516 - protein, 116 aa, Homo sapiens
VQPWRNVQVEGGGGDYGADRVGYVQLGYGTYAVFVGGIRIVGDAVNALEVYHRSCAAHYKCVLSTCQIRGMARTHWCVGNVKGRQHHRRRSVEPDMNETPEVFRPGAYNVSPLATR

SEQ ID NO: 1020517 - protein, 99 aa, Homo sapiens
PILTGAIATTETKVLEIPVETLKQQYEGAPQMLKVIIKSLADRLRLAMNDVRSSKLEKDSSPCPEDQVAKVFGAVFHTANHKGDLSQPGRVEHPFNRPS

SEQ ID NO: 1020518 - protein, 203 aa, Homo sapiens
EKPYKCEECDRAFSQSSNLTEHKKIHTGEKPYKCEECGKAFNRFSTLTKHKRIHTGEKPYKCEECGKAFNQSYQLTRHKIVHTKEKLNKCEEFGKAFKQSSHRTIHKIIHTGEKPYKCEEHGKVFNQSSNLTTQKIIHTGENLYKFEEHGKAFNLFSNITNHKIIYTGEKPHKCEECGKAYNRFSNLTIHKRIHTGEKPYQCV

SEQ ID NO: 1020519 - protein, 45 aa, Homo sapiens
GRTRSGRTRLDLLSFSLTCVAGHVVAGHVQQKAYALFYRLDLYVS

SEQ ID NO: 1020520 - protein, 42 aa, Homo sapiens
MKTYSVHVSGHYVSGHVAGHVVAGHVQQKAYALFYRLDLYVS

SEQ ID NO: 1020521 - protein, 116 aa, Homo sapiens
MGKGDPNKPRGKMSSYAFFVQTCREEHKKKHPDSSVNFAEFSKKCSERWKTMSAKEKSKFEDTGRNSDKARYDRGMKNYVPPKGDEKGKKKDPIAPKRPPSAFFLFCSERSPKDQK

SEQ ID NO: 1020522 - protein, 51 aa, Homo sapiens
MRGDYLDGRPEMLRSPRYETRLDNLAAGGKVLRYQHGTVRVSHSELGQMSE

SEQ ID NO: 1020523 - protein, 94 aa, Homo sapiens
SRGTEHECSGTTLNMLRQIGDVSRRKLIQYQRFACGLSTLAIFSPLQRTIPDKRIWETQNTRTGMASTHLAYSFNHQNLIFPRCHYQTRYIRVL

SEQ ID NO: 1020524 - protein, 260 aa, Homo sapiens
SSFDLRKEASQSEVSGENEGNLPSPEEDGFTISLSHVAVPGSPDQRDTVTTPLREVSADGPIQVTSTVKNGHAVPGEDPRGQLGTHAEYASGLMSPLTMSLLENPDNEGSPPSEQLVQDGATHSLVAESTGGPVVSHTVPSGDQEAALPVSSATRHLWLSSSPPDNKPGGDLPALSPSPIRQHPADKLPSREADLGEACQSRETVLFSHEHMGSEQYDADAEETGLDGSWGIPGKPFTTYIWGYPHSGPTLTHEQEVVMC

SEQ ID NO: 1020525 - protein, 290 aa, Homo sapiens
SSFDLRKEASQSEVSGENEGNLPSPEEDGFTISLSHVAVPGSPDQRDTVTTPLREVSADGPIQVTSTVKNGHAVPGEDPRGQLGTHAEYASGLMSPLTMSLLENPDNEGSPPSEQLVQDGATHSLVAESTGGPVVSHTVPSGDQEAALPVSSATRHLWLSSSPPDNKPGGDLPALGQERKHPTRLGWQELVCPQTPSSCPATVENVTMAQNPGRSQGAYKAKFSLGYPSVFQDGGTLRSAQPWSKAPQGVIRAHQDSVMNGGPRFREESLIDTVVLMNGRLGQVVNRAEH

SEQ ID NO: 1020526 - protein, 108 aa, Homo sapiens
GTAVFSHQQSKFYVLLNFLMTHCFFYLHSSIKTCMHSLKQSFVKYIIPSHSTFYEVTTVTTIFPIPSTVPSTRYTFNIFFFKKNIFPPGAVARACNASTWGGLGGSIT

SEQ ID NO: 1020527 - protein, 145 aa, Homo sapiens
TRVDADGKALDREAMVEGTDAPVLQDAPRDAVLQELDEVCDIRLRLQPDEVVSGEGTCQLAILWNGEKRLRRRHGDVQIESNRIVHARPSQLCRKRNEVVVVNPNDVVGLDEGAERAGETLVHTDVSSVETGIELREIQPVMKYR

SEQ ID NO: 1020528 - protein, 56 aa, Homo sapiens
MTRDEAAYGELRAMVLDLRAFYAELYHIISSNLEKNCQPQSVTEKPSTVLEPVYIG

SEQ ID NO: 1020529 - protein, 73 aa, Homo sapiens
TKCERTDLPSRCCTARTSPLGSNALTEASPDSASAVAPPFFPHFHCTTPRRIASPLLDQSVRMLTCERTDHMT

SEQ ID NO: 1020530 - protein, 110 aa, Homo sapiens
MNIPSKQQHRFPMRKSKHRENKNTKVQSLLTFERHSTDSGPEDEAQETPNSVTMAIGHETLLGEGTIHIVRSNCCQEDRSAFTETERSLKAQSFVSRTESQAHTLLGCTS

SEQ ID NO: 1020531 - protein, 123 aa, Homo sapiens
LPAGGAGTRTAACALHVQVVTLSDVQDGFALTDFVRLLGAILQNKSYLQFFPGFGFFKWPWFKNEDVEKGRNLVVVVVRVSRDGEVRKRCAAMFDILAVCPARVTIFSIGGGLSIDTRSAYFV

SEQ ID NO: 1020532 - protein, 284 aa, Homo sapiens
MDPRQQLARARLCVPRAMERASLIQKAKLAEQAERYEDMAAFMTGAVEKGEELSCEERNLLSGKPIKKLWWAGTEALLWRCAVQYLMQKSTEEVLCEVNEGALRCCEYRETRVGGLELQGVCDTVLDLLDNHLIKEAGDAESRVFYLKMKGDYYRYLAEVATGDDKKRIIDSARSAYQEAMDNQPRRRCLPTNPISALVPGPMNFSVSYHYEIRQQPRGGHLSGQDQLLTRAGMICTTSDEDFRTKDEHRVIMQACCEITDTVELTRQTTGEEGRRGSPGVHQS

SEQ ID NO: 1020533 - protein, 141 aa, Homo sapiens
TRVDHEVRHVVADPASLVGIPPDVALAFAPRFAVRVGRRAVVEHPPVGGPRPAPLRLAGRCTAVGHPARGLVDGVGVHPGVDPAAGGGRAVGAQLGVGRQRVRGLADPVSVDLGQHRLPVRVAVLVGGVIPGQIQQSAVPP

SEQ ID NO: 1020534 - protein, 149 aa, Homo sapiens
LEAKIERGADQVTATGQLFLTDPRARQVLLHIIAEKGAIAGGDAAPGQFVGLRQNSQRLGLGRAQRVGLAGDVLDHRVEHQVAPGQGALGVGVGVERAGRLHHAGQQSRLLPVQVDCVDPEVGPGSVLDAERVVSERDQVQVAGEDLRF

SEQ ID NO: 1020535 - protein, 165 aa, Homo sapiens
RGIHQGGHERRRGAGRIEAEPLQDEGQHRAGQRAEGDDADQCSADGDRQQDPVLAVIMQAAQLPDHDAHDGQAAEDRAEHHAGRDLAQGHLPPIAQAQFAQCQAADQQRRGLRAGVATRAHDQRNEQGQHHRPRQFVLVVLHRAGGQHLAQEQHAQPTGALAQHL

SEQ ID NO: 1020536 - protein, 133 aa, Homo sapiens
TRPWLSPQAAKQAGAGLPDVRVTIQETMPTDIRSWWEHQKKMPLAGLFVGNHQRKTAAIEEVGIMSGLRFVPQPWRGRALVVLSHLNKDDPRLWPRFITGDLTIRHLECTHMSIVREPHIGAVAAMIDEVLGH

SEQ ID NO: 1020537 - protein, 65 aa, Homo sapiens
NHSYDQSDGYDRDIFQDTQIAFQIIFIFLGLRLYIALQGGQVLRLYLSIPLSNLTTLALISDEGE

SEQ ID NO: 1020538 - protein, 148 aa, Homo sapiens
RGQELALRRGDVGRHRDHAAAMARAQVCGGLVQRLGAARHDHHVDCLGGQRIGTGKAQALARAAHQRMLASQSDFHAPFSLIARFSNRSGALCGPFRSARSCRATADEMPPITSALPASCTSVIGSPSSQKPRNSVDTGPIMPACDAI

SEQ ID NO: 1020539 - protein, 104 aa, Homo sapiens
LLTLCSRFVPIKPTLIRMRGWEQFTAAVVSWLHQNSNGLVILLWGSYAQKKDSAIDRQRHYGLQTAHPSPVVSVSRVPLDVDNFSKTNELLQKSGKKPIDWKEP

SEQ ID NO: 1020540 - protein, 37 aa, Homo sapiens
MTGVLVRDKIENGKGHVKLQAEPRKAWNHQELEEGAC

SEQ ID NO: 1020541 - protein, 112 aa, Homo sapiens
TRGFQVQYSGDAGEVDALADQFADPLEALEIVVAVATGAAVGARRRQQSPSFVQPQRLRRGGGQLGGHRNAVDAARGSSGRIAGQLVSPCRNDPVFLARKEYLRRWHKIYVN

SEQ ID NO: 1020542 - protein, 133 aa, Homo sapiens
HEASASITVRGTIFDVFVEDGGTSWLLLHEGAVRVCNATGTCRDHSEPGKLIRISSGGELSKPTRWATLPGIEKISFDTAFPFVGTPPSVDPKPVLTREAVLQPTSDTAKETPKRRAEAPKEEAPAAGFRRGY

SEQ ID NO: 1020543 - protein, 80 aa, Homo sapiens
MLEVGLVAGVWVMGADSSWLTSVLEIVSEFLPDLAVLVLWHPHHPRVAPVLPVCCAYPHFIFHHNWKLPEALELYLNRGT

SEQ ID NO: 1020544 - protein, 62 aa, Homo sapiens
MLEVGLVAGVWVMGADSSWLTSVLEIVSEFLPDLAVLVLWHMLTARLPILFLQRQVVLLTEE

SEQ ID NO: 1020545 - protein, 35 aa, Homo sapiens
VAHSTSTNKQCNGSSRQEGRKERKKKKKDREHSRA

SEQ ID NO: 1020546 - protein, 132 aa, Homo sapiens
TRARRATARSAAPRSHRRPARKRCRRHSVPSPNVHPMVGLTLRSHPDWSSCKPSVRAGTRGDSSAGRRRVRTRRGLGLWHRTRRLRARLHRSCSADANEGERVAMTGPLQPGKDPVGRPGVRGPSALPTPPK

SEQ ID NO: 1020547 - protein, 144 aa, Homo sapiens
PRAIVGAAEIGRGHVNCEDWGNDALAYLQGSQVGSPPLGASRLGFRGSEGRPSGSTQAGDHGGGLWFCSPFKEALHESVGLLSLQHPHIHSFVHSYMHVYMQTHMPLLSSLIVYLCVFSSFSLPFSHNHHGDDHCGYRFLPIKW

SEQ ID NO: 1020548 - protein, 31 aa, Homo sapiens
MGDFEEINWTEEKEYEFDGFEEVALPDGSKM

SEQ ID NO: 1020549 - protein, 42 aa, Homo sapiens
SVPRHVSWTPQLKRKLRQAGTLRKNCLSAFVFRAVRVRYVSG

SEQ ID NO: 1020550 - protein, 128 aa, Homo sapiens
RGGTLLFDGEARVLHLALPEQADQQQIKDRVHAWLQHQAKRLLAERLDIYAEKLGVRHRAFALSSANTRWGSCTSDRKIRLSWRLMHFPLSVIDYVAAHHLGHLNEMNHSPRFWDTVASIFPEFRDAR

SEQ ID NO: 1020551 - protein, 84 aa, Homo sapiens
LPSENRYREVSSISICGDFQAQRMKLRYKEDGKTLYANTINGSGLAIDRIIAIILEQYQTESGYIEIPEVLIPYFGKIKQITNK

SEQ ID NO: 1020552 - protein, 156 aa, Homo sapiens
SVDCAVCRRWWCSVLTLVFAGEVLNTQQILGILLIPFGMVCLLWQGGGGDRLPWSMLPVVVLIGLCIGCYDLSVRAGAAALVASAGSPGVADADQRPGRFRCWRWCASVRTSSLFWRTPVAVGLKGGAVRVVELRFGTLGHAVGLIAETAALREVS

SEQ ID NO: 1020553 - protein, 50 aa, Homo sapiens
MEIMVTRSRAQRPKVSEHARRALSCFFAQVLSCYARGWLQHLLGRVERVE

SEQ ID NO: 1020554 - protein, 103 aa, Homo sapiens
DASTRHARHHLIIRLTKRCPRRRSWTPLHPAHLTIGPTYQGEDLPTPSPRVEQRPERPAGVAQGEVGRGSEVQVPAAGRCGDGPGIGNAAPGGGERGYDLGPV

SEQ ID NO: 1020555 - protein, 96 aa, Homo sapiens
TQAVKSGKFKLMTGESPVQNRMHYDQSQNSLLQCDRPCNVTHIAAVEPVARTCWRDPPKMLAYLLPTTPQYLLYHTGDSYFTITWTLYWASGCPVK

SEQ ID NO: 1020556 - protein, 65 aa, Homo sapiens
MAMTMASAPRTPAAHSSARWPGENVRRAGGAGRWLPLAGRGRGVPGAGRAGSMAARACVLDGIAA

SEQ ID NO: 1020557 - protein, 161 aa, Homo sapiens
HEASCRDVHDSELPCRREQDSAPAGSVSQRPRCAAFSGHARIGTERMSSSHFNASGSSGLDLHQNLCLNSTIDCANRRLNAPPVQLHQVGTSLRPMSFTLHFAVRPLLIYIKGIADRLRGKAIGLLPPAFGIEGYSMSCAHHGPKRFELLLLFLGEDSFEL

SEQ ID NO: 1020558 - protein, 284 aa, Homo sapiens
  misc_feature (8)..(8): Xaa can be any naturally occurring amino acid
GLCAEVGXGSGGGSEVSREESVAVAEPSSCVCLRLGRLSRGRFAEPVSAPGRDTPPPCPLPASPNTSLFVRNVADDTRSEDLRREFGRYGPIVDVYVPLDFYTRRPRGFAYVQFEDVRDAEDALHNLDRKWICGRQIEIQFAQGDRKTPNQMKAKEGRNVYFFSEMMIMTDTDVLEAEVMKGGDQEVGLLITTIEDRIVLETVDRLEDHGVAEAIPTMIDQTAAGNTRVQFCLLQLQANDLTSGKKNHKKGASFNANKGGVWKCCSMNMFESFGSGLDKISNVF

SEQ ID NO: 1020559 - protein, 189 aa, Homo sapiens
  misc_feature (8)..(8): Xaa can be any naturally occurring amino acid
GLCAEVGXGSGGGSEVSREESVAVAEPSSCVCLRLGRLSRGRFAEPVSAPGRDTPPPCPLPASPNTSLFVRNVADDTRSEDLRREFGRYGPIVDVYVPLDFYTRRPRGFAYVQFEDVRDAEDALHNLDRKWICGRQIEIQFAQGDRKTPNQMKAKEGRNVYFFSEMMIMTDTDVLEAEVMKEEIKKSVF

SEQ ID NO: 1020560 - protein, 65 aa, Homo sapiens
DPALEQGPRNVLHVPAGQAEHRGLQQNMAVSIGNKQASAFSNLKNALELAPSSLVLPAVRLDMQS

SEQ ID NO: 1020561 - protein, 112 aa, Homo sapiens
HEALRDDVAQTVLTDQSADIDALLAQAQKDAQEKLERLRRRMPRGRSDRQSRGIHHRSLSLSEGRPTIPTSRQAQRPVIDHDHHAPAAARPAGHASAGGTRSPQGASFPAHL

SEQ ID NO: 1020562 - protein, 94 aa, Homo sapiens
WAYSDRRRAWSIEDYCRAQGIAMMGVGLTVLPMMYCEEELAQRPAGAIATAVVIARRLAAGGLTRTGAKCCRPIRAWIVLSGMKASKGCGDRLL

SEQ ID NO: 1020563 - protein, 172 aa, Homo sapiens
TREHRIKPCFWVGHHGHPRKIRCPEPVPPWLAALVAVCGLVLEGRPSLPQPLPGDEAHTVWRDVAPLHPHPRVPSAIRRLVRGAVSVPRRTVATPTTIPGYPRGPEDGVSRIITDHGIPVIRRQEPVNQMPTIRNGQDMQEIQEGKLAHLFLIPGIERHLAAVHRIPIGGVR

SEQ ID NO: 1020564 - protein, 51 aa, Homo sapiens
CGNPEDYRQKLYTPSGMRRVLAAHSRAGTAFLPKAERPCCDMAHTPAQAAR

SEQ ID NO: 1020565 - protein, 109 aa, Homo sapiens
TRNREGAATLELTIGRHDGGLVSNHLYDHARRGMVVGLAGVGGDFVLPDPRPRRVLFVSGGSGITPVMAMVRTLVSQRHRGEIAFIHYAPTPAEACYRDYLVALPSVRV

SEQ ID NO: 1020566 - protein, 75 aa, Homo sapiens
LIAGTLVLEAAVTGVPVKGQDTVQGRVPFNGQDPVEGPVSVKGPDKVQAQEPVKGPVSSEPGSCPIILIRCAMLN

SEQ ID NO: 1020567 - protein, 123 aa, Homo sapiens
MEAQNTTEVYVKWKFKGRDIYTFDGALNKSTVPTDFNSAKIEVSQLLKGDASLTMDKSDAVSHTGNYTCEVTELTQRQVTPIIELKYRVVHGFLQMTIFLSYFPNFCYTPVLRDSFGITTLTL

SEQ ID NO: 1020568 - protein, 72 aa, Homo sapiens
HEAAHNRQQQLCGKLDELVSSGTWEVTLGITMSSTLDWMSSIEYTVFPNREGHSPKPLSLQASLMRKRHSEK

SEQ ID NO: 1020569 - protein, 104 aa, Homo sapiens
  misc_feature (99)..(99): Xaa can be any naturally occurring amino acid
  misc_feature (104)..(104): Xaa can be any naturally occurring amino acid
LETMGGGDGSFTWQERIRNGYHQTKEPLWSPSRAKPSLSSLQWEQLSCHSSSPPVFACSKFVSTPSLVKSTSQLLSRPLSAVVLRPEILTDESLSSLAXLMSPX

SEQ ID NO: 1020570 - protein, 142 aa, Homo sapiens
HEADDTHAQDAVIYALGLIGNQYRFGGRNPDSGVDCSGMVSWIFEQVAGIRLPHNAAQIARLARPVDRASLQPGDLVFFNTSGKPHSHMGIYAGEGRFIHASSTRGKYVRTDALDSGWFAARIIGLRTLRRDVLKEILMGLA

SEQ ID NO: 1020571 - protein, 66 aa, Homo sapiens
MNNRRAVFLDHPSLDLGDLDLSGLHGCFSQLQLFEQTTPENVLERLQGAQVAISNKIPLTAQNLAA

SEQ ID NO: 1020572 - protein, 240 aa, Homo sapiens
QQCANPEEGVRQVVGGKADAFIHDAPYNLISDESATEQYMLALEQPFTFEPLAFGLKKGDYDSLNWINHFLNQIAQDGTYGRLMTSGTGYGLDSRDRLIVITAYTSIPDREAALKRLRLCLAGSLSGFSDTRLITFTGETFVADNEWVQDRTPKWRSPLVRQPYKNRSGVLMMKKYLSMLMLGVTALVAATAAQDGAIDEAVKRGTVESMAWTPPYMPIEMTDTRVEIIGFEVDILKAMA

SEQ ID NO: 1020573 - protein, 131 aa, Homo sapiens
MMQGGVGIPTIRWCGAEGDYNVMVMELLGPSLEDLFNFCFQEIQPQKPSCWLLNQMISRIEYIHSKNFIHRDVKPDNFLMGLGKEGHWWFIIDYGLAKKSRMAAPPRLIPFVGNRTPGRRRDAPTKKELVL

SEQ ID NO: 1020574 - protein, 56 aa, Homo sapiens
MTLSLVDRQLQVLQPQDCLGSPEKCKSCTEFDSRNPRELTVVQVEKLEGSGPQEAV

SEQ ID NO: 1020575 - protein, 163 aa, Homo sapiens
HEVDKPYVMVGANVFAADEEAEARRLLSSIQQAFLNLRRGTPAPLPPPVEDFEAQLTPVERAGLDQALSNSAVGTPRQVREQLAKIVERTRADELMLTAQVYDHSARLRSFEIAAEAMKAMQHKHRAAREFRLNSLRTHKKAEDGPLAPYAPRRPSRPWDAGR

SEQ ID NO: 1020576 - protein, 64 aa, Homo sapiens
MEVGLGNSPMGRFNGAELNGQCTAVCQVGNISEACKRRAHLDGLNIYVYDLNVQAQDWYEFTDT

SEQ ID NO: 1020577 - protein, 116 aa, Homo sapiens
QYWMCCCVPPKRQPDNKSVPHWPTDVPTWILPISLTPKLVCSSAPCGARQDAGGWVLPTGNTEDLQVCVITVTLVALLILAHSLLLVNCKKMASSSWNRRTIFLQAGAGTLLLSAN

SEQ ID NO: 1020578 - protein, 145 aa, Homo sapiens
RITVAPNVRRRGMLCHADQVAVQAASDAGGLGSHHDHRADSRFDRPAFDSSVRPLTPSQASQLPQLTASLGQYAIPVGTIAQPAFLPLVSNCPNGTRRSMALDRIIEVLLKPNFATRLIRLSNSGIEPTAACMITQGSPVTRWHS

SEQ ID NO: 1020579 - protein, 37 aa, Homo sapiens
MDVFKLRESLVSDYSSFARSFTSILADDIRGGSSQHC

SEQ ID NO: 1020580 - protein, 40 aa, Homo sapiens
PVCGHVIGVPVDVAENVGMILSVLTGLLFGSDGYYVYVSG

SEQ ID NO: 1020581 - protein, 70 aa, Homo sapiens
VAELHHELLLLRLLLSPSVIIHGFLESGLRLSSEMHGIHVCVAPGAAVNEGESSGVEKMNAELKVPMQKH

SEQ ID NO: 1020582 - protein, 70 aa, Homo sapiens; identical to SEQ ID NO: 1020581

SEQ ID NO: 1020583 - protein, 162 aa, Homo sapiens
IAVGNLEGALWRLSMLMAIANPIDLVREYVEGNTTGWRVATRLGGAAICHVLLILALAVAVDAVIRHRHRILSSVAAVSHLACLAASGSRAGTISLALFVIGLVFFGRSYRTRSRKQRIVIAVLGIVASGVAIWLVTTVRSGSLVDPALCANLGIVDAPANL

SEQ ID NO: 1020584 - protein, 63 aa, Homo sapiens
MTTPSPTEHSQPSHKQQDQPSTNHHFQPSNNYSSTSINKSSYIFTILNDNPYYPMRAISAIGL

SEQ ID NO: 1020585 - protein, 73 aa, Homo sapiens
SDDVSTGLLLDRPHALRLTGMLSTHLTSMFEYLAPPRRKGSQITQQATNQRSQSRHHQPDGDRARLLRAGACQ

SEQ ID NO: 1020586 - protein, 68 aa, Homo sapiens
MKRFLSTAANDQTQQAHSTRQYDQNRSSNDSIPIDCSARAITPCHVLTPSTATQRKKGISHSVSHVCA

SEQ ID NO: 1020587 - protein, 197 aa, Homo sapiens
MSHVRRNRRGRTRKPTSGISRTGFDHRVRHVSRAGRRHRHRVRCGRSTPQWPRWGRRCWPWPGSLPSLMYSKLTSMIACQASFKSMKACSSTMRYHPQFGGGEFTPFDTWRDGRRPPKEVVHQLEHQLGVEDEQRGTGVNGLDLDQVEGWWARTASARTHRTSSPARRPRPRPPSGAAVEHADASVAAKGTLIISRY

SEQ ID NO: 1020588 - protein, 53 aa, Homo sapiens
ETPSYNFIFLLSLLTLTVFSPDLLVLTQMNDTLANPLNTPPRYMQDMQARYMQ

SEQ ID NO: 1020589 - protein, 268 aa, Homo sapiens
MRSRPKPVPQPSCAPGAPRLCPSCKDGTGRANSGDVFGQPVKNDQCYEDIRVSRVTWDSTFCAVNPKFLAVIVEASGGGAFLVLPLSKTGRIDKAYPTVCGHTGPVLDIDWCPHNDEVIASGSEDCTVMVWQIPENGLTSPLTEPVVVLDGAHQASGHHRLAPHGPKRAAQCRLRQRGTHLEWWAQLEELYRLDMPVTLTLYLQCRAWNHNVQLVLSQHAMDLSVRIIEPVRGDLVAEREKAHEGPGHAGIFLEMASVHHRLSAMIER

SEQ ID NO: 1020590 - protein, 38 aa, Homo sapiens
CAPSGSTLLWLWCRKAAVALIQTLAWEPPYAVSAALKS

SEQ ID NO: 1020591 - protein, 135 aa, Homo sapiens
VTSKAAGSAGGGGEACRFPCRGVVEGFHGTGQAGFGEFAQVAVDQAPIGLVEQRSRQGHGTHGLAEAAAGVEQHVVEVQALGGQVSADALHAFGLVDEQEGSPSGRMRWAFSSTGISRRHGGHQVAQRLITNGPP

SEQ ID NO: 1020592 - protein, 158 aa, Homo sapiens
HEDDAEGDRSRRGHRPHGLSTSGQPSRHRSGLTPGGPPLSGVGVSAVQHAERNVCRRASALEHSEHVVAAAGKRPDPLQVEDQQPAQQRLARCVFEQLGGGRVVQLAFNRQHRDIESKPPGGHFEGRRPAGGLRAAVPRGDCIILDCTSVMSGSICWC

SEQ ID NO: 1020593 - protein, 113 aa, Homo sapiens
TLLVMEARLGIEDFIVRKASAMMGVGFTVLPMMYCEEELASGRLVQLPPQWSLPGGWLAGWSTRTGAACCRPSGPGSTIWKKASKAVEIGCYEHDGRTSRTFLPEPARRTGRL

SEQ ID NO: 1020594 - protein, 83 aa, Homo sapiens
FTTPHWLDYRDCILRASFSKTSAKSLTQPGRGSSSIPAGMLFGSAAEATQIRCACDKAPQRLSWLNVLGVSTRVSSTSRPHVG

SEQ ID NO: 1020595 - protein, 125 aa, Homo sapiens
GPLIRLGNQRGEEQPYVRQSLWESPTENWPLRPNTLRDSPKKQTERMSFKVLLCLKFGIPGNHKREDIDWDGLNSVMKQCKLQLAYSYVVCTTLKCWQRYGETGTLHYWSEGRLVQSPCLSKRIS

SEQ ID NO: 1020596 - protein, 143 aa, Homo sapiens
RLNIHFVFMDGSLPPFAFQEYPSSSTSKGALGEGRPFWLRPQWPPWKHRLALGLFHLLPLSPDLPPPSFLWLLLASSTSQGALGEGRPFWLRPQWPPWKHRLALGLFHLLPLSPDLPPPSFLWLLLASYQLITNSFLFLCMPA

SEQ ID NO: 1020597 - protein, 67 aa, Homo sapiens
MWVAGTYSQTRQAFVNQLLLPKGFLKCARRFAPLVGGNSPERSDCALSIFSACCSIAWASRSQSSRF

SEQ ID NO: 1020598 - protein, 170 aa, Homo sapiens
RGVVALSVEHACRTAVIRKLTLDDIDLPNRRITLAGHNQRLGELTHIALNTWLDHRRDRWPHTPNRHVLLTTKTALRTTPVSQKSVKPSLSDNGFTIERIRADRILHEALTAGPDPLHLSLVFGISHNTARRYTTVAERLLSDELEQPVEPVVPPNAARLRAREPAAVMN

SEQ ID NO: 1020599 - protein, 64 aa, Homo sapiens
MPICECSSHPTSGSIYSRNPDKNPYPCSFDLLICRPCSKSNFRWVLTFVQQSWLPTASIATRSL

SEQ ID NO: 1020600 - protein, 183 aa, Homo sapiens
DSWPRQWHWLLLMAVGQESRTLDLGGPQRSDGLSLPSLDLGVSWSPQAGHVQVLLLGWTGLCHCGELGCCCFSHRTRACDLVLSSEDTDQASPSQAPPVRPPVSWAGLAPVGAGHCAASVHWAGAAEEIYVLSVSHLGSKQRAEQRWIAMETLRSILAEGIQKAPGGGGTKSGLEVWSFEVSS

SEQ ID NO: 1020601 - protein, 166 aa, Homo sapiens
MARCLFGMKPVMTGNPSSPSLDLGVSWSPQAGHVQVLLLGWTGLCHCGELGCCCFSHRTRACDLVLSSEDTDQASPSQAPPVRPPVSWAGLAPVGAGHCAASVHWAGAAEEIYVLSVSHLGSKQRAEQRWIAMETLRSILAEGIQKAPGGGGTKSGLEVWSFEVSS

SEQ ID NO: 1020602 - protein, 136 aa, Homo sapiens
KHRMCRISTNPQSITPTIPPNVLNATTAPTSWPTRSLPTQRRKARGNAAPNSSVGTNTMLNAATANLELMPSNSLAPNDSTQDSTRLCANTNHRPSSAISSKATNPVPAISKPNTPLGSRIRSIRRASSRLPKKQP

SEQ ID NO: 1020603 - protein, 59 aa, Homo sapiens
MNALGIRHAYCELTDAQQNPCARVGHYVPRVDGLLVNFVAVTVDDLLFREVGHHRLGHF

SEQ ID NO: 1020604 - protein, 68 aa, Homo sapiens
LKIFLDCAVSKHQNGTKLILEKGCTCCPSEPELHPCWISQNAGTGRALNGQLVQLPHLTDGETEVRRN

SEQ ID NO: 1020605 - protein, 136 aa, Homo sapiens
CQSFITNQVVILEHDNQGVWVRRDPRVSSYNSVKLFLCMITRLAPPRPPHSSDHSSSEHSSKENEASNDAHDGDGGLERRLPSQGEGLGETLMLHMAGVSLLLSRRHHHNRPLLEGSIPCRPGLHELRVLGLVRVP

SEQ ID NO: 1020606 - protein, 182 aa, Homo sapiens
LDHNIGFDQSKTHESLAFHVDTSVDLHSFCKEREISRSSLLHIAWALVLSRWMGIDRPCFGYLSSGRDMDVGGLDNMVAPLVNLLIGCVDVSTGLTDALAEIRNYSIDNLRFQHTSLAEIENRLGLRGQHLFNTVLSVHDRGPHSLASDGLQVRNTSEDDPHEVSIAYINQTSVSNRKLSSI

SEQ ID NO: 1020607 - protein, 35 aa, Homo sapiens
TTWFIYVVSGIRHRCRRCSEPVCLCHLFHELMGED

SEQ ID NO: 1020608 - protein, 189 aa, Homo sapiens
  misc_feature (1)..(1): Xaa can be any naturally occurring amino acid
XSTNVDCLVSARAGAAAVRAVATAALYVGDQRHSQGILKDFALRDVNAPRTDADIRLAQVLVDQLRQAPVHDCFLPYARHPGLLGVLEGMQAEPGDNRPLAQWAEQVHVSERTLARQFVRELGMSFGEWRQRLRYLAAIEALDSEPAVCNTVALDLGYSTASGLIAMYQRHAGCTPEQYRRRTFVAGKL

SEQ ID NO: 1020609 - protein, 42 aa, Homo sapiens
NLVIEKLILKSLLIRLRTLLLWTVSLGQYLRSAITTGSVRVL

SEQ ID NO: 1020610 - protein, 58 aa, Homo sapiens
MLTRLLRTYMGAYRRELSAVVILQFVATAAMLYLPTLNADIIDNGVAQGDTGYILQVE

SEQ ID NO: 1020611 - protein, 96 aa, Homo sapiens
MRKSLLVLLLWAPFATALIAQPTERLDQAAQQAIQHFLLHNRIFDSPEDLDNAPYIIAAQGGRVLGANDERVHARGRLDPAQPSYGIIRRGKAYTD

SEQ ID NO: 1020612 - protein, 86 aa, Homo sapiens
TGTAIQETAIQEQLYQETAIPGNSYTRKQLYQETAYTRKQLYQETAIPGNSYTRKQLLPGNSYYQETAITRKQLSPGNSYYQETAV

SEQ ID NO: 1020613 - protein, 185 aa, Homo sapiens
GIEYAAEARAKIVYERLMNVTDDAGVKDALGFGMTREIAHQISFEKALHAIQPNFPQGKLPGKPEFTQVYFNMSQGAENLRGPWNQGDGWEFVENPQPAVDGGDGTASVQLDADDEAVLSAMKIRTLSDPNSDPHHRRCPGGGPQAQARPWIENSRTLKGRAVLSTFLDEDNDSGNPRGNLLECL

SEQ ID NO: 1020614 - protein, 136 aa, Homo sapiens
RPHTLFDVVDILRHRHLRVPELVRCLPRGQSLVVEDRRHRLPERVSGHPLQVQCCADLAPPPLHRLGVQDRAGPRLEHIRRVLTPPLEHVDGELGEREHTSVAGLGLGEILAHQTLSAMRTICPVTMRLASAKVCH

SEQ ID NO: 1020615 - protein, 169 aa, Homo sapiens
MIAMDINEMAPWDSQKREQSKRSEICRRHLLMDTISRRDEEKENQGSISRSHFEQMMSGGSVKYNGENERASRFGEVDKQIGQSIGGHHIRFVISGVRSTYIKKIIITVWPLGEGQRLEINVCMALVHSSYLNKAQGREDNLGRMFDKDPGSSCERSLILPVIRVGCQK

SEQ ID NO: 1020616 - protein, 44 aa, Homo sapiens
ALALRIRRTEDGCGIALRDHLTLIAPILGSLRMRCSASNEKPRS

SEQ ID NO: 1020617 - protein, 71 aa, Homo sapiens
MTFAAQQLQGLVKVSFPLDDLPDLISPSRLVLELQGTRRTHIWAWCYRNQGYLKQASQKLDIDPASRCEKR

SEQ ID NO: 1020618 - protein, 151 aa, Homo sapiens
MTSSDKTWMRLHRDDQKYRDGVEAFLNFAEFSIKRDKMPGPCMKCENLNFEDRTIMKTHLIVLWYTDPIMIFGTFMGRRDLESNDIDDDTDEADDDTDDDDIEKNDDVPQQDDEIENTNVPQQDYVPQHDDEVLVETCKDQYMDEITEGFI

SEQ ID NO: 1020619 - protein, 38 aa, Homo sapiens
MCPKWINIMTERSVPHLQKVFDRYKSYRPYDMLESIRK

SEQ ID NO: 1020620 - protein, 56 aa, Homo sapiens
MSEALADGYHIRRDEAKSSTSKDNFSASNICNKCMQSVVSVHSKHMGQQCSSSKSG

SEQ ID NO: 1020621 - protein, 219 aa, Homo sapiens
DSTDAYAYPITAICIIPNKLGIKPSYDQKTFGEQEKRGKLRVVVSPDGAEGSVAIQQDARMYAGLFDGEETAELSLGDGRLAYVHVVRGKVDVNGRRVSAGDALMMQAEPQVRIANGDKAEVLVFDLPGNRLGTQLIGGRKTQKAPWNGGFFVSAFIFAIRGHKKARQPEVVWGGEHTCFGGWRACSENYRLACCFATEKCPYSCNADDRIPAFSDWVC

SEQ ID NO: 1020622 - protein, 84 aa, Homo sapiens
MAVVSAPGAAGAKVSGYPGLTLDSRGNSLWCRTLRPFELIEVAIDPIGSTLDVELNEIQANKSPHALAPWIAILSNNTNQGREV

SEQ ID NO: 1020623 - protein, 119 aa, Homo sapiens
QIIRDPSAYNSPRGRNTEEELENVCSNSREKIYNRSLGSTVSSMPSEDYGYPKQTAETQTAGAFEASSVAPAFETVMVKRSGMLCWIRTGIARIVEESATAVSAGSEMDRCAIGVLCVF

SEQ ID NO: 1020624 - protein, 88 aa, Homo sapiens
GHDYWLDRLHIRERYNGMNKFTSAMAQVCTSPILVMVQLMQMPNPFIYVMFCMYPKSPKTSFQLPNSHKIMMSFLKFIHLIFLSRISV

SEQ ID NO: 1020625 - protein, 157 aa, Homo sapiens
  misc_feature (1)..(1): Xaa can be any naturally occurring amino acid
XYSASSCIMRRMLILPTLCLDDFLFRRLRGVARQVGQRRLGHFQRRGGRAGDGVGFGLLQFLGDDRRLGRRIGKRCGAGHQHCRDEVGFEHSWRRLPSEFPDHVDKRAVQCRSRPGCHRHRLGLNTTGTANAPRLKARRSNWLSAAGSKPFLKYLVD

SEQ ID NO: 1020626 - protein, 53 aa, Homo sapiens
MALQSKNLMQTFQDNENYVQFKQQLKELKKQCGLQADREADGTEGVDEDIIVT

SEQ ID NO: 1020627 - protein, 36 aa, Homo sapiens
MGGGCLIVGGRIVPPLPGLPWVDTQAAHGIPDARQF

SEQ ID NO: 1020628 - protein, 69 aa, Homo sapiens
EDPLSTNVRRALLEFFGGGAQHVRLAQHQGLGGAVHRQVCRFDRHLVAFFFHTLRQQRGGRKGGDKRQR

SEQ ID NO: 1020629 - protein, 72 aa, Homo sapiens
YRIEISTVKRGQRSSGLKGHNGLQGLLVSLVTMVIKVLLCSVGPAGPSGPCVVLLGPACENDGRTWTSVGWI

SEQ ID NO: 1020630 - protein, 58 aa, Homo sapiens
MTTRGRGRVFELIAGHLDGLRIDSLIVEKPKTGPALREDRRFYPEMLGYLLKFVLPKE

SEQ ID NO: 1020631 - protein, 54 aa, Homo sapiens
RIPCKRLVSGYGWMGGVRRWIGGKGCCGDVVRRDVGVVGAPSLPLPPSTIHKPL

SEQ ID NO: 1020632 - protein, 153 aa, Homo sapiens
DYCSTEWSKRRHNRILRGAIYKCNSCRKAVTFLREEALIDKNINVIPKLFVSTADSPLSDAHIRQIAGMIIEHQVMALVADPLMKVDAKLGTLGKTLRVSESAVTRHTNPSTLPGGVTHAIIFGDCQVERQQRVAKAFEQRGVIVRKVRIAKA

SEQ ID NO: 1020633 - protein, 58 aa, Homo sapiens
RVSPVSSSATCIVLSSPRVDIRRQEGLLDGHIGSLGALAAILQLESIGHALAEPVSIN

SEQ ID NO: 1020634 - protein, 44 aa, Homo sapiens
WSDLDFRDETAHSDKKHRDSKSLEGRPMVEKKSKKPKKKEKKHK

SEQ ID NO: 1020635 - protein, 48 aa, Homo sapiens
MFCGWFNEFLIPWIPSYSTVSSDSTAEGERRTEDEVVAILESLGVALC

SEQ ID NO: 1020636 - protein, 127 aa, Homo sapiens
GCYRALNVPRDMTRGITIKPSAPTLAAWAAWDTASRLFTAPVPTMVGTPVATRRATPSWRWASVSSGQSPMEPQYTTALMPMSISSRPLATSASKFGWRSAVQGVIRAGMQPVKMLSLMVLTPVSVE

SEQ ID NO: 1020637 - protein, 76 aa, Homo sapiens
MAMLGLAQNSEGTEDCVEETPAERCPCTSNGQGPGSRHHGERCTRTEPRAASHSKGQGLGSHHDFPSTRRTRLCLD

SEQ ID NO: 1020638 - protein, 105 aa, Homo sapiens
REKRKAENQRKFELGGAVLAAFKDLGMDISESTPEQIRNRIKNVTKFHNDVLKSKVYQEVKNYKNEYFERNKLFHQVLHGLSTWSNKGEHLYLIEIKKALAKNQE

SEQ ID NO: 1020639 - protein, 107 aa, Homo sapiens
TAAASHATQHQIVVLRTVALATRQAHSLDQIVFETDQVSQVHLRQEQVVVPIRLEVRITQPAILTQHVVVGIDDSASCLDMAIHYRRQRVAVEHVVVIEERHPPSAR

SEQ ID NO: 1020640 - protein, 38 aa, Homo sapiens
FDGKVTYGQKRAAGGGSYKGHVDIWAPTVQELAALEKE

SEQ ID NO: 1020641 - protein, 71 aa, Homo sapiens
VDDTYRKNKATQGEQISRISTHEGYKQARPPAFKVEDEPRDKTELSSEKHRDVPLRAVLSQVKKGILRGGQ

SEQ ID NO: 1020642 - protein, 84 aa, Homo sapiens
SSYPHHLSLTRRLNRLFINRPHHLSRKLWLNHPLPSRQWRLNILYLPLPYTSGEAYITDHDSTQKPEDIGHYPPCLATIATGRS

SEQ ID NO: 1020643 - protein, 84 aa, Homo sapiens
SSTNVYNSYLPGKGDTVIKKAVTQAQAQPLHSDCADPCEFPKCGNLDCIIYGSGGLRSRSPLILMLKKYTNRFNLTCVSTQEFN

SEQ ID NO: 1020644 - protein, 73 aa, Homo sapiens
SSTNVYNSYLPGKGDTVIKKAVTQAQAQPLHSDCADPCEFPKCGNLDCIIYGSGGLRSRSPLMSCLMINCCLA

SEQ ID NO: 1020645 - protein, 124 aa, Homo sapiens
MPILDDSGVPHPVLGIQSQADFQKAVLEPLYQAMGITSAASLDTRITEVERRLRSMTVKDNLEMRGYRFIETVQSHAPLRDMLAMANQRALTSNGSTVFITLADPDCLTGRHSVYRHKCVPAWK

SEQ ID NO: 1020646 - protein, 35 aa, Homo sapiens
MGAHPHPSSVHKLILSSCAAVNFIFVLILEVLHKA

SEQ ID NO: 1020647 - protein, 167 aa, Homo sapiens
LPLCRPMTCFPSCSLFSVTSLLCSCRFLHKPVGISTVVPFILGHCQTAQSHQGPLHCCHVFAFKEVNSLEHVSLDDPIVPSRLQDLNHLLHLLKYHRGWVLGHLHRLGANQGTGCSPACSESRHSSARPGSPSAQCLERTTSGPQCTIIHSTSRSSSSSSYFFSILD

SEQ ID NO: 1020648 - protein, 82 aa, Homo sapiens
MSSPNRLAVTRVSRRNRTLNDLILTNSNNEQTCEQPIQYTTNVNSDALYRNLDESAHQYPIHFNERHVQNHETDDSDYRPVL

SEQ ID NO: 1020649 - protein, 363 aa, Homo sapiens
ANRSHSAGRTPGRTPGKSSSRGFRPLLARPGLVHRVYPPSQCMPSMEGGQAFLPDARRTSSERPPVSPHQARKHQNAWALNLNRFLTARRKPETTFGPQVGKRTIDAAHERFIRTQVLIRYCYYATKATPGSSRKTCRYIPSLPCTVILECCLKVHNDYYLNLVALAVLGNVLACGTGQQCVPVECKLWGHPAALQMEQPGEYISSVAWIKEGNYLAVGTSSAEVQLWDVQQQKRLRNMTSHSARVGSLSWNSYILSSGSRSGHIHHHDVGLAATLWAPEWPSRKCCGLRLGPDGDIGRVVIYLVTWCALCPEKGGGVTGEFPAQGVQAACSLGLLSQGPCSHPHMFPAIGSHHCLFYDEPVA

SEQ ID NO: 1020650 - protein, 219 aa, Homo sapiens
LETAIENDEESLRAALARLRGYSVQATILLAQRAKSVAIASQQRHGDKLVSVIAGHPDSPESPIVAIDQALGARLATKHLIEQGYRNLLHVPGDLEWQDASERLSSYIAVCKEVGIDPAWMPANSWGAEAGAAVAEELIAGHLPDAVLAGNDDIAIGMCHTFLTHGVRIPDDIGFVGFDDIPLLRWMTPSLTTVRSRTSKHPDTKLSSSTLVSPYSADI

SEQ ID NO: 1020651 - protein, 47 aa, Homo sapiens
PIDPMNPKWNQWNPNGIPNGIPNGIPNGIPKWNPKWNPLHWFLSFHK

SEQ ID NO: 1020652 - protein, 55 aa, Homo sapiens
NQIKHMEKFVENIRQLGIIVSDFQPSSQAGRNQKLNFIVTGLQDIDKCRQQLHVG

SEQ ID NO: 1020653 - protein, 236 aa, Homo sapiens
  misc_feature (13)..(13): Xaa can be any naturally occurring amino acid
VNKRSCGGAGPVXCDSGFCCGCVGDFGGCQVLAALRNGGPKLPFLFSVYKKLDVVQVARNLEKWNERYQCETERSPNDLLQCRLYSGCQLPKKMPFPVSKSTGFFKFLHHSQLHSDQSYTKSDEQKRPNLRVERAKALSQLRSSTPSSLMSQMFRTMERGLLSLLNDFHFLENFKHLEMNVPLNMMEHCSGGMQEKLARLKFASSMGELEGTSWRIREKQPVTQIWDRRLSELART

SEQ ID NO: 1020654 - protein, 247 aa, Homo sapiens
SEDPLEYDGFSTSWLSIVCKIREGCKILIFQEFKRLCCKAAKGKKEVESKDGILELIMTAHQGPVMGLEGKSPEIPMENGVQWVKPEQEKVQQETASCGREKCLIRGTAAKSITKKCEKSSSSWKETECVVVDTPGIFDTEVPNAETVQGRLCACISFGLPRGLMICFVGVPSGRLHWMKSTKQEKILKMLREGYNVHDPHINGKDDLGDTKLGCYLREVQKNSDVMGISVTGNVVKQQGKGVGEEA

SEQ ID NO: 1020655 - protein, 201 aa, Homo sapiens
MAAQYGSMSFNPSTPGASYGPGRARAQKFPMENGVQWVKPEQEKVQQETASCGREKCFIRGTAAKSITKKCEKSSSSWKETEFVVVDTPGIFDTEVPNAETSKGSLCACISFGLPRGLMICFVGVPSGRLHWMKSTKQEKILKMLREGKNVHDPHINGKDDLGDTKIGLLLKGSPEEFRLMGISVTGNVVKQQGKGVGEEA

SEQ ID NO: 1020656 - protein, 168 aa, Homo sapiens
NTVSYSQSSLIHLVGPSDCTLHGFVHGGVTMKLMDEVAGIVAARHCKTNIVTASVDAINFHDKIRKGCVITISGRMIFMSNKSMEIEVFGVTPSLLWDSSQKRYRVPASAFFTYVSLSQEGRSLPVPQLVPETRGARRKRFEEGKRWRGTLQMYGPKQTGDHAVVLKA

SEQ ID NO: 1020657 - protein, 125 aa, Homo sapiens
IKHMATRGTSGKTRELWLRLRVALSLRRDLQVPTFAFFTYVSLSQEGRSLPVPQLVPETEDEKKRFEEGKGGWYLQMTAKRGEGARWRSSCRMSSRPLCQWCLRVAMAKTVPSVNMSLTKFPPWA

SEQ ID NO: 1020658 - protein, 201 aa, Homo sapiens
NTVSYSQSSLIHLVGPSDCTLHGFVHGGVTMKLMDEVAGIVAARHCKTNIVTASVDAINFHDKIRKGCVITISGRMIFMSNKSMEIEVFGVTPSLLWDSSQKRYRVPASAFFTYVSLSQEGRSLPVPQLVPETRGARRKRFEEGKRWRGTLQMTAKRGEGARWRSSCRMSSRPLCQWCLRVAMAKTVPSVNMSLTKFPPWA

SEQ ID NO: 1020659 - protein, 115 aa, Homo sapiens
GGILLASRVWWRSLSASCTRSPSSEEKSFRRTSVLSVALVEDFLKKHNLNPARKYFPQWEAPTLVDEQPLENYLDMEYFGSIGIGTPAQDFSCPLFYTRSSNLWVPSVYCPRVEK

SEQ ID NO: 1020660 - protein, 39 aa, Homo sapiens
TRSASVRSESDVYRAVWNTVKGSMGNLVEYFDVYTYTTF

SEQ ID NO: 1020661 - protein, 245 aa, Homo sapiens
VPQKSYSVMNKGWDGYDVQWECKTDLDIAYKFGKTVVSCEGYESSEDQYVLRGSCGLEYNLDYTELGLQKLKESGKQHGFALFSDYSFISGPRQDFLVTLSGLIYHPCYSLVIGLWKVILSWYLKVKGQYSPPTRYFLEYSSIFPTVYQEDSPTQARNLTPPGLSSPEFYRYHEKYWAVVQQAGSGSAFTGQQGSDHIQDQGSGQRFGNWWNTRIFCLGSNRSGNTLLRLVVLPVLSSLLPWHVE

SEQ ID NO: 1020662 - protein, 252 aa, Homo sapiens
MMMPTEAEHQRAYLEDTLAWSGSHKYLEKGKETLLHLEPPKTHVTHHPISDHEAYPEVLGPGSSTLREITLNLGDDRMVEGHYPQATGDSWTPGLQGMCTFQKWARLWWCLLERSIDTRAKCSHEGLPDARSNLKMESRSVTQAHGITHRGHHCVDLVLLGICGLWKLWFAAVIWTEERTHRGPRRHATLTARLERQCPRGSRHLTSVGKSLETGCLVCRLGDAQAALCCQFECGISLTLPYVFRGPGALFA

SEQ ID NO: 1020663 - protein, 82 aa, Homo sapiens
MVVRQIRALLSSLLWAWRRARLQGRSAFQLVRACLREGAKGPRHFARRMAAYASGGSASPPPVSLDAYESWHSALPQLEVPA

SEQ ID NO: 1020664 - protein, 52 aa, Homo sapiens
RSLQHDVLQVLLQDGVFHSMEHEADVLVSMRCEVMKSAAAVTLSCRSTDKPL

SEQ ID NO: 1020665 - protein, 43 aa, Homo sapiens
RSLQHDVLQVLLQDGVFHSMEHFLIRLVRIVFHLLGLGYQGTE

SEQ ID NO: 1020666 - protein, 430 aa, Homo sapiens
MLRLVVAACQACACSTETVLLGCGIAERIRSCADDEEDVTAPLLERQLEPEELYQTFQRIVENVNVIISTYGEGESGPLGNIMIDPVLGTVGFGPGLHGVAFTLKQFAEMYCGPQFARARGRDQIGGRARAGQESRGHDDRSCGADRYFDPANGKFSKSATSPEGKKLTRTFCQLILDPIIQGVGGDHESQEERRQQELIDEKLDVTIRKGSKEKRTQGKREKGKDRMRERELKHAARHEHAMRDNAMAARNDTPESHTEPYTHDARPAGKVPRLTTDLPWKQKRGTHRRTTRRDWTTWESINNKLETPPKRGHIKRRKRNNTPKTKESHTHSRNKPTGDTKRPMGHGSRTARGRDNTKSARKRTKENKGRPQRKNTLGEKTGRQQQQQKTQHAQKKQTEQKGRENRTTRTEEKARRTKVSNKKERQEKR

SEQ ID NO: 1020667 - protein, 261 aa, Homo sapiens
MSRSAVKGCGAVMGKNTMMRKAIRGHLENNPALEKLLPHIRGNVGFVFTKEDLTEIRDMLLANKVPAAARAGAIAPCEVTVPDPETLVYGPEKTSFIPGYIGITTGDKVGAIEATLLNMGNICRFFGGLVIQQGFGGVGIYNPEVLDITEETLPYLAFLEDVRNDASVCLQDGYPNCVHQYHHIYQSDGYRRVLDLSVETEYTVHLVEESTALLADPSCFGGGAPWLLATQVVRRVVAAHLGWRAVRMWVVRQDMDGRALL

SEQ ID NO: 1020668 - protein, 289 aa, Homo sapiens
MSRSAVKGCGAVMGKNTMMRKAIRGHLENNPALEKLLPHIRGNVGFVFTKEDLTEIRDMLLANKVPAAARAGAIAPCEVTVPDPETLVYGPEKTSFIPGYIGITHSKYSRGHTYEHPRVMCSMIKTGEQSWEPDEDTRMHEHSSNTHPPFSIRAMDQSRQGVRTMASIYNPEVLDITEETLPYLAFLEDVRNDASVCLQTWLPKLCASVPPYLSIKRVQRVLDLSVETEYTVHLVEESTALLADPSCFGGGAPWLLATQVVRRVVAAHLGWRAVRMWVVRQDMDGRALL

SEQ ID NO: 1020669 - protein, 143 aa, Homo sapiens
MRPASIDWPAGWARAHVHAQVGVVLTHGRLSGNRVQGTVDGLEAVTADQLAVAMHQETTAARQPLLAPGTVHPGQQVSSATLADRGAPGARLLLRHSQCPGTRIASLSTVRCPGRGWGAVLIVGTDRGQAQGWHVDQQQVVPH

SEQ ID NO: 1020670 - protein, 47 aa, Homo sapiens
PEHNERKSVRFMHAHIILRLAAAVLIILFPPLLIPTSKYLINNRLVI

SEQ ID NO: 1020671 - protein, 119 aa, Homo sapiens
EKFGRGVIAGLVDIGETLQCPEDLTPDEVVELENQAALTNLKQKYLTVIPNPRWLLEPIPRKGGKDVFQVDIPEHLIPLGSGALGHEESQVWAPEKNVPEKPAKIMAPSICHGDADLDK

SEQ ID NO: 1020672 - protein, 119 aa, Homo sapiens; identical to SEQ ID NO: 1020671

SEQ ID NO: 1020673 - protein, 121 aa, Homo sapiens
MGRDGGGVRAVSASSIEITFQYQGVRCRERVQLKPSAANIKKAELHKAAIEHAILAGTFDYALTFPNSKKALAFKIPEDSQSLGVYLVEWLDKNNGSAQVKHRRTLPGNDRWSADTNVRPL

SEQ ID NO: 1020674 - protein, 128 aa, Homo sapiens
MVGQCAQSDASCIADDVNGVTDRVRTILERVKAAMKTPRATVVVTGYWDVGLDGKAGRENGPDYFKVTDMITEAFNANVKKIAHEVGAVYVDFRTPFRGADGTRDDTALLTDDGDHPSEQGHKVLAEA

SEQ ID NO: 1020675 - protein, 67 aa, Homo sapiens
SCSIGHACLGNNPIVQIADWLDAVNQTWSGSRIGLMNKPFIAISVRPRLSSINPHDHENAVFYFFLE

SEQ ID NO: 1020676 - protein, 104 aa, Homo sapiens
MSWYPHRYIWFSQSYALAVGTGQAPRIKSPRLRHQKGPQLPSLGSREETGHTRQSSSPPKTGSGGPSRGDTHSCGHTAHALIKHTRLPAPSPPPREVGPNLPPI

SEQ ID NO: 1020677 - protein, 210 aa, Homo sapiens
MRESLILFTRPLYTRYEPSDYHASDAFFVGLFPEDDAVKIAATWSASKKRFGANSLICANMMEHRPHPRRINPPRLRPRQPVDGSAGAGLLSVVVRSSNQCELISGVIRISDDGVKTTTHDRLTDRHNKGFLYWQYSGARPATLFKGLAKAPQRTVLGTTRLSCDSLLCSVLLVKLRNLLGIEQRDRFCRREPLGHPLMELCTNSSSSVS

SEQ ID NO: 1020678 - protein, 43 aa, Homo sapiens
APGGLLPCRSIRAEVKGVCTEAGMYALRERRVHVTQEDPPERG

SEQ ID NO: 1020679 - protein, 66 aa, Homo sapiens
SFWGNFPEIPIKFDLTGVVGGYFCYRRCRATGKETRYFRFNRVLARENLKEYLDQICPHEVAHYIA

SEQ ID NO: 1020680 - protein, 110 aa, Homo sapiens
MGRGTGYSKNEGITTQGRRKARETGVKVDVGRSRRGGGALLIKQEEGGGLPEVSAADPQAERGARTEQLSIKGTRIREDHNNVLEGRPGTADQSSRTKPIKRTTRTPTIT

SEQ ID NO: 1020681 - protein, 36 aa, Homo sapiens
SGEAYITDHFSTQKLKHRPRPMCRKRQIKNIEAPLA

SEQ ID NO: 1020682 - protein, 110 aa, Homo sapiens
SARTTLALAQAQIPSFTQNWEIAVMYGPHGAPDFFTKQDIDTFFANEFEIHYNSSRTGIRLIGPKPEWAREDGGEAGLHPSNIHDNAYAIGAIDFTGDMPIILGPDGPSG

SEQ ID NO: 1020683 - protein, 195 aa, Homo sapiens
GLDTEKVTGKALSALREAVKADDLARDKALMASPQLAIEHLADGVSLRIDGADLDVPIGTTNQRRVHGELVMEMGEAWRVRISPTSEVMTLGNDAEKAHQTVVSQLEDLGVASLEQAESRLAERRVMETHISSWREHLEEEQGEVTIQELEAMAERTTETVSITAAEAQKLEEEAVAAANEARYAQGRLTPVKTV

SEQ ID NO: 1020684 - protein, 129 aa, Homo sapiens
GADLAWMQQSAELDFNTLELITDPRGFATLWLSRETKNNAFNAEMIRELIIALDQVQGDPALRFLVLRGRGKHFSAGADLAWMQQSAELDYHTNLDDARELAELMYNLAKLKIPTLAVVQGAAYGGALG

SEQ ID NO: 1020685 - protein, 178 aa, Homo sapiens
LDQYETQGHPYYSSARLWDDGVIDPLQTRDVLALALSASLNAPIEPSRFGVFRMYMELHPMTDFNTLELITDPRGFATLWLSRETKNNAFNAEMIRELIIALDQVQGDPALRFLVLRGRGKHFSAGADLAWMQQSAELDYHTNLDDARELAELMYNLAKLKIPTLAVVQGAAYGGALG

SEQ ID NO: 1020686 - protein, 39 aa, Homo sapiens
MIHSALYLNIRVSETEEGSFEEASNQLINHIEQFLDTNV

SEQ ID NO: 1020687 - protein, 75 aa, Homo sapiens
TCDESCSTLSGNEIAGCIEKGYENILSTEATWLLSFNTPKKMTDYAKKRGWVLGPNNYYSLASQQQKPEDTTIPY

SEQ ID NO: 1020688 - protein, 59 aa, Homo sapiens
VKRKQENRLEEEKRAFEEARRQMVNEDEENQDTAKIFKGYRPGKLKLSLEEMERQRREY

SEQ ID NO: 1020689 - protein, 241 aa, Homo sapiens [sequence omitted]

SEQ ID NO: 1020690 - protein, 628 aa, Homo sapiens
DAAGGADGSGPRVAAAMGEGGLPPAFQLLLRACDQADTETARRLLEPGAAEPAERGAEPEAGAEPAGAEVAGPGAAAAGAVGAPVPVDCSDEAGNTALQFAAAGGHEPLVRFLLRRGASVNSRNHYGWSALMQAARFGHVSVAHLLLDHGADVNAQNRLGASVLTVASRGGHLGVVKLLLEAGAFVDHHHPSGEQLGLGGSRDEPLDITALMAAIQHGHEAVVRLLMEWGADPNHAARTVGWSPLMLAALTGRLGVAQQLVEKGANPDHLSVLEKTAFEVALDCKHRDLVDYLDPLTTVRPKTDEEKRRPDIFHALKMGNFQLVKEIADEDPSHVNLVNGDGATPLMLAAVTGQLALVQLLVERHADVDKQDSVHGWTALMQATYHGNKEIVKYLLNQGADVTLRAKNGYTAFDLVMLLNDPDTELVRLLASVCMQVNKDKGRPSHQPPLPHSKVRQPWSIPVLPDDKGGLKSWWNRMSNRFRKLKLMQTLPRGLSSNQPLPFSDEPEPALDSTMRAAPQDKTSRSALPDAAPVTKDNGPGSTRGEKEDTLLTTMLRNGAPLTRLPSDKLKAVIPPFLPPSSFELWSSDRSRTRHNGKADPMKTALPREPAGAPRGRRGHRHYTRQAC

SEQ ID NO: 1020691 - protein, 362 aa, Homo sapiens
DAAGGADGSGPRVAAAMGEGGLPPAFQLLLRACDQATLETARRLLEPGAAEPAERGAEPEAGAEPAGAEVAGPGAAAAGAVGAPVPVDCSDEAGNTALQFAAAGGHEPLVRFLLRRGASVNSRNHYGWSALMQAAREAAVARGARDQSGARRWPETRSPAAGAPGGEELRTPESWNDEEKRRPDIFHALKMGNFQLVKEIADEDPSHVNLVNGDGATPLMLAAVTGQLALVQLLVERHADVDKQDSVHGWTALMQATYHGSVPAPRPQRQGQTDALAMRWRFPMGSSGPEMLHTNPRDYDDQLEGIGRDYKQSVGEQVLNLYSAQLSGAQEFACSPEITGFSANGPLKYPLLKESIYLREVD

SEQ ID NO: 1020692 - protein, 370 aa, Homo sapiens
DAAGGADGSGPRVAAAMGEGGLPPAFQLLLRACDQATLETARRLLEPGAAEPAERGAEPEAGAEPAGAEVAGPGAAAAGAVGAPVPVDCSDEAGNTALQFAAAGGHEPLVRFLLRRGASVNSRNHYGWSALMQAARFGHVSVAHLLLDHGADVNAQNRLGASVLTVASRGGHLGVVKLLLEAGAFVDHHHPSGEQLGLGGSRDEPLDITALMAAIQHGHEAVVRLLMEWGADPNHAARTVGWSPLMLAALTGRLGVAQQLVEKGANPDHLSVLEKTAFEVALDCKHRDLVDYLDPLTTVRPKTGQAACPPWLHRGPQIVFMWLKLRIALLEGHAELQSPALQTTETEEVVCLSIGGIACDMQVLGPLSAE

SEQ ID NO: 1020693 - protein, 62 aa, Homo sapiens
GYSPVRQPATKLLELIGRCTDLAVDCALAGKTGVIGQDEENGDKLTNIAFDRIKGGKPFDTT

SEQ ID NO: 1020694 - protein, 81 aa, Homo sapiens
GLARRQRHVTYVVAKKGVGLQSARASWKSEVISMVVDSQDEDMTKEHNNLRNIDNTLTEVSISARFPRHHGFLEERFVICI

SEQ ID NO: 1020695 - protein, 158 aa, Homo sapiens
CDTPDGSGPDDRPTVEDMASSLDEVARVIRDEQPDILLLQEVDEGAKPSSYQDQLALLQERLADLYPCSAQAFDWKADFVPDLHIFGSVGRKLVTMSRYQIEHAERLQLPVARANLISRQFQAKPALLLTYLPLSDGGQLAVLNTRLDGTAPGHNAVL

SEQ ID NO: 1020696 - protein, 108 aa, Homo sapiens
VVGSADRLGQCTPAQGGIVLSRYVAPVQPEGVKSSQLQSYRFLGVLPLNRPAHRAYEQSPSAYHCSKRQKLHLLDYATATEKQYLSCLCDLHHSLQECTNSSRGLPKL

SEQ ID NO: 1020697 - protein, 48 aa, Homo sapiens
NWFFDDDLSLSDSVCVCVSIVIWRGHFRMDKCVDLRIIPNTCVIEEPI

SEQ ID NO: 1020698 - protein, 183 aa, Homo sapiens
  misc_feature (14)..(14): Xaa can be any naturally occurring amino acid
MSTGDWAAWAEGAXEAKESPFFRSLDWHWQQVLLPSLLSPLAPTPTHPGSGTTARHLPGWAIPGLAWPEVSLMLAWVRPHAAPGTGPAQVGGQHTTRRLAGALYSVPPHPGPIQCTPAQAGQPHSPRPVSAAASPTACPLVPVALPVWCRAFSPPGLGWRTLPSRLLIPRGVSLPIFECDFKE

SEQ ID NO: 1020699 - protein, 254 aa, Homo sapiens
PPSTQGQGTVTAIPTSNVSHCTPSVTTDLGMDPCTCPCLALVFEREEGAPLSPLALQLPLHSRLGLPVPIIQEKPSGDHLAASSSHFPDTCGAWLREWHWQQVLLPSLLSPLAPTPTHPGSGTTARHLPGWAIPGLAWPEVSLMLAWVRPHAAPGTGPAQVGGQHRQGGWLGPYTDVPPILAPSSVPPPTAGQPHSPRPVSAAASPTACPLVPVALPVWCRAFSPPGLGWRTLPSRLLIPRGVSLPIFESDFKE

SEQ ID NO: 1020700 - protein, 156 aa, Homo sapiens
MTRVMLPCTLSYILPYFSAVNLECAITVTTGSLQLATAPGEKTMSWQQIQTVGKNRQRLNERSLIGAPKAASRKGTSKQVGKGKSIQGGEPGLPGICGEHWPKETKARKVQPQGRLKPGLITQQGPEKLAGDAVYTKSFVHPNEPLRQQISCAENP

SEQ ID NO: 1020701 - protein, 76 aa, Homo sapiens
NLPVGQRAKVFSLRYTLTNVGYATGPMLGVVIAGQMPLAPFLIASAIAFGSLFLMIGIPPTQRDDSNKPLSFLSTT

SEQ ID NO: 1020702 - protein, 75 aa, Homo sapiens
VSRELSLEDPDASCASGWTGLGVAEYLSGGLVDLHAGGDDLAILDLFHNGTHLTGGHRFFLVLSQVGILSLQQRR

SEQ ID NO: 1020703 - protein, 126 aa, Homo sapiens
RLFWERFTWAGNPRPYYCGADGGLPPWPPGLPAGLLRSSRVGLVDLHAGGDDLAILDLFHNGTHLTGGHRFFLVLSQVASSPSSSGGRWQSPAPPRLHIQQDFVFLVLLLHLAEKVGQAEPPVLPI

SEQ ID NO: 1020704 - protein, 86 aa, Homo sapiens
AHTSFAHTSFAHTSFAHTSFAHTSFAHTSFAHTSCSQDRDFEEEQLADLRGEESSEFKWTNVKSRLEGLTFHRVCKPRGVLLRFNI

SEQ ID NO: 1020705 - protein, 70 aa, Homo sapiens
LLDQGVRHQAFLMAYSDAVLSGLCGVGGLCGGGVDVAAYLGSMLWLAQVSAMFRVCFYGLGGLSTYPLFG

SEQ ID NO: 1020706 - protein, 150 aa, Homo sapiens
TVKHMYLRDHLHTSTAFVCHTLLVKAGWLHCLPQPNIAFVWENASDRQLSHGSGHLHGGYAHLRGTLKLQLVPQTHCWVRRTPGGGGRPGHLEGEGDLGAFLRGLGHVAIARTLSRTNYGIIVNDFLIYLSQFMYLNVKAEKYIDHVKVM

SEQ ID NO: 1020707 - protein, 76 aa, Homo sapiens
NWFFDDESFLSLMQLLFLQVSDETSPLRNLPGPPAGAGGEAPLLWAPTTPWPPFTIETIRHSDDIVLPLELIEEPI

SEQ ID NO: 1020708 - protein, 81 aa, Homo sapiens
DLESFWILGDVFNPPVLYLSSEGANNLGQAWPPWLKPKSLQPPPRKIWPLSVPTLDVSNSPDCSSQGSVEVLALFPVLPIT

SEQ ID NO: 1020709 - protein, 81 aa, Homo sapiens; identical to SEQ ID NO: 1020708

SEQ ID NO: 1020710 - protein, 85 aa, Homo sapiens
PVPLAFFVKGFFSRGIPLGWGGHWPPGDKYQAPPSLFGSGGSFFLFRKVPLGQGRLPPGELFSLPLVAGGFPHPFPPGGLFLFPG

SEQ ID NO: 1020711 - protein, 103 aa, Homo sapiens
DFPVKVKLIPNCVHQSGPFRESVACAKSHSPSQLLILLGLCEIAHPEFLFPSSVTSPSSMAPSCCILSLPSTWVVERNYQVGLSLSPEAQSLRPSPLQLRFTS

SEQ ID NO: 1020712 - protein, 38 aa, Homo sapiens
SRNPHHPSSKACIQVDHYSHLGKGLMTGFNEGLMTGFD

SEQ ID NO: 1020713 - protein, 71 aa, Homo sapiens
HRTSKIWSITPLYWLPIAVWVHFHAADKDIPETGQLQKKALLGLTVPCSWGGLTIMAEGERHVSHGSRKRE

SEQ ID NO: 1020714 - protein, 253 aa, Homo sapiens
SSVLVSGLRGLGVEIAKNIILGGVKAVTLHDHGTAQWADLSSQFYLREEDIGKNRAEVSQPRLAELNSYVPVTAYSWTPREDFLSGFQVVVLTRIPLEDQLRDEVTFMSHTDGIQLCGGQNTRGLVWAKLFLVTFAKKEKIDPFQRFPIGEKQPPQVLVVSMVTKDNPGVVTCLDEARHGFESGDFVSFSEVQGMVELNGNQPMEIKVLGPYTFSICDTSNFSDYIRGGIVSQVKVPKKISFKSLVASVAEPD

SEQ ID NO: 1020715 - protein, 106 aa, Homo sapiens
VLSIGRLTDSFVRELSRLDVNPVWAGHRILPGRRGKRRVTDGRQLWRLQHLDAGGDLRHPRQVDGKTGHQAVLLVGQLHEPLNQVEHPHVDRQGGDAGTTLHRQDI

SEQ ID NO: 1020716 - protein, 73 aa, Homo sapiens
WTSLGLVSVVTVVATVLIVSVVSGGALMLDRAHARAKADSDGAAGLVALGWTAIGVAGLIVLYGLYLLIPYFH

SEQ ID NO: 1020717 - protein, 86 aa, Homo sapiens
GVALEDPRRQRSHINFPSNIQIAVETFILDIQIGTDESKLLFKRNKLLGILKVEAGSQIISELIKQKAHSVQIDVAALLRGPLDHP

SEQ ID NO: 1020718 - protein, 73 aa, Homo sapiens
FDKDDSARLVIDELLAASRRGVKVRVLIDQLSAISDLQILGALSGAHENFQLRVYNPTFGKARLNYFDYAGSV

SEQ ID NO: 1020719 - protein, 103 aa, Homo sapiens
MPPVKDLKARASESTVVTAVDSCCEPSAAGNTYTKEAYKKYIKDYMKSFKGKFEEQRPERVKPFMTEAAEHKSCTSLLISKTTSSLIGENLNPDCMESSIGLP

SEQ ID NO: 1020720 - protein, 747 aa, Homo sapiens
GLRRTGRTQRHARPPCLAAAAARATEPCRARSAPAGSLRVGRGQPRSRVPIAVHWPEAGAAMGRGARAALGRWSRAPLEERLPGRGSGRLAGRPGPRAAPGAVGSRPRQLQVRGFCRARRSSAPARPVPGRSRSRCLGRGRGLAARAGGASRGKGRLRPAAAGLPEARKLLGLAYPERRRLAAAVGFLTMSSVISMSAPFFLGKIIDVIYTNPTVDYSDNLTRLCLGLSAVFLCGAAANAIRVYLMQTSGQRIVNRLRTSLFSSILRQEVAFFDKTRTGELINRLSSDTALLGRSVTENLSDGLRAGAQASVGISMMFFVSPNLATFVLSVVPPVSIIAVIYGRYLRKLTKVTQDSLAQATQLAEERIGNVRTVRAFGKEMTEIEKYASKVDHVMQLARKEAFARAGFFGATGLSGNLIVLSVLYKGGLLMGSAHMTVGELSSFLMYAFWVGISIGGLSSFYSELMKGLGAGGRLWELLEREPKLPFNEGVILNEKSFQGALEFKNVHFAYPARPEVPIFQDFSLSIPSGSVTALVGPSGSGKSTVLSLLLRLYDPASGTISLDGHDIRQLNPVWLRSKIGTVSQEPILFSCSIAENIAYGADDPSSVTAEEIQRGLKGQAVAFIRNFPQGFNTVVGEKGVLLSGGQKQRIAIARALLKNPKILLLDEATSALDAENEYLVQEALDRLMDGRTVLVIAHRLSTIKNANMVAVLDQGKITEYGKHEELLSKPNGIYRKLMNKQSFISA

SEQ ID NO: 1020721 - protein, 737 aa, Homo sapiens [sequence omitted]

SEQ ID NO: 1020722 - protein, 52 aa, Homo sapiens
SRYLSETQLKIFGTGHLKMTTNMPGLKELIHLMKYCLSEMGLLDLLFEGKRP

SEQ ID NO: 1020723 - protein, 147 aa, Homo sapiens
GELVIQQKLLVPKESYVKLLIGPKGHVISQIAQEAGHDLMDIFLCDVDIRLSDEAPQADHPLLTLPGQFQLKLLAGTDQFFPWLGTLQALVRDMNTDWPLAGLALLSLHSPCPAVSSRWNERNPALAQFPRARFFSPRHTQHTKVYV

SEQ ID NO: 1020724 - protein, 79 aa, Homo sapiens
MNPDYHVELSAQIILVMHALAHRGAQNHVNRSAPSSMMLLLLPSGTAGYLGQVPTINKGCAPSVMSCHPKPLPETPSNT

SEQ ID NO: 1020725 - protein, 57 aa, Homo sapiens
VARGISSERQVSTVSRFKCRVHVWLMHGWGMHAGSLFFCAILRINGPIWAQKPVQRG

SEQ ID NO: 1020726 - protein, 164 aa, Homo sapiens
FEHTAKRTYIRFIDASHTAHFRIFHEHYWFMEEISWLPSGLVQTKLRRGFGRLLRQVVKKRRPEGIVPAWGSAYWALTRECCEFVLEYMRELPDVVRWVRTSFAPDEQFFHTVVANSRFLHRSDGFVPYQAPSVHLLSNLHLIAPGLRKDPHRARLRRSGRVAE

SEQ ID NO: 1020727 - protein, 141 aa, Homo sapiens
DVLRMSRRKKKEGVRERETLRNSLSSAPGHKTPGRGWGCLCKWSRHTRPSCTPVHQATSTAVAPAQSSSFAEHLLSGFIAEGAKITPLCRQQNKSLQNMKGFLQPPYEMGTEYPHYREGNGYIVYLRPCEMKDWTGTRMQT

SEQ ID NO: 1020728 - protein, 187 aa, Homo sapiens
LGSVEHHVDALRRNVIPGGEHQYMRAVGHLGLIPADRLDLFANVRISHHRQFKWLEAARGRRQSYRFQNSLQLFSRHGLGTGHNFSSHNANSVTRLFCSFFIFHVGQRSLSSPIRIPSGLRSGLYCWITVNLKIKQKMKIGEISRRTGLAASAIRYYEEQGLLDAPTRDVNNLSLLPAKPPLNAWKS

SEQ ID NO: 1020729 - protein, 58 aa, Homo sapiens
TLSGSGTGESTSPSDKVVKKGKKDKKIKKTFFEELAVEDKQAGEEEKVLKEKEQQQQQ

SEQ ID NO: 1020730 - protein, 96 aa, Homo sapiens
MRIGQARIHMPCHHNKYIVTERATYIGNFNWSWNYFTETAGTSLLVTQNGRGGWEHWSHFPEGLDSPYSMTLTPHVQRGNRSACSEPDQWQQALAR

SEQ ID NO: 1020731 - protein, 71 aa, Homo sapiens
MTDPMLLWLWRRPVATAPTGPLAWEPPYAAGVALEKAKRQTYTHTQNLTKTVFQCKIPSPTSSKTHLGVRA

SEQ ID NO: 1020732 - protein, 96 aa, Homo sapiens
DPLCHHASLLAVIRGNWYFGNFLCKAVHVIYTVNLYSSVLILAFIMSVTCYLAIWHATNSQRPRRLLAERWPMLALGSLPPADYPDSIFANVSEAS

SEQ ID NO: 1020733 - protein, 125 aa, Homo sapiens
MVQLLGFGSAFTMDNQRDLKIPGPWVLDMAWELVELLGYLFWQSTTHAANIHFVKTSLVRTTSYSLPPTLSSVETSGVTQPPSWHVLRDSIIRSCSKLQTPKNPRTCITDYACVPVTTIQRSKRW

SEQ ID NO: 1020734 - protein, 106 aa, Homo sapiens
MGIALSGTLLAGCAPSYSVWTGGMNAFVGTRFDVHLYDDCSRGCGDSYWSPVNKNKVYDQVVKEGDSQRYFLTWIRDCRYSVLVSGEGIIQSWRYETEDRSSCHVF

SEQ ID NO: 1020735 - protein, 73 aa, Homo sapiens
WAVGHVPIITDGHWVVVCVALYDEEGVLEVGAQWGQNYSEAPDDEGHDQHWLLVPGILGEGADSRSHLCLPGI

SEQ ID NO: 1020736 - protein, 240 aa, Homo sapiens
MLAARLVCLRTLPSRVFHPAFTKASPVVKNSITKNQWLLTPSREYATKTRIGIRRGRTGQELKEAALEPSMDTKYLTIDQMGRWFVAGGAAVGLGALCYYGLGLSNEIGAIEKAVIWPQYVKDRIHSTYMYLAGSIGLTALSAIAISRTPVLMNFMMRGSWVTIGVTFAAMVGAGMLVRSIPYDQSPGPKASCLGCYIPGVMGAAGGSLTNIPGVLFVIELHGTQVDLWEALMWPVFARK

SEQ ID NO: 1020737 - protein, 89 aa, Homo sapiens
MLPSTGRQESLYNKRLPEGKLLTAKGLRLNQQKNLVELSFLPGDTGKPDVLSASLEGQLTKQEERKTEAEERDQQGEKKNQTRNEKKNQ

SEQ ID NO: 1020738 - protein, 78 aa, Homo sapiens
MRELDRERQKLETPGGRKSLQDIKKMAKQGQMDCCPHHGKRLGAHPGAYCAPRWLMDGGPTFPGWCPLRIQNIQVHKL

SEQ ID NO: 1020739 - protein, 61 aa, Homo sapiens
RVFELKLRNATLTFSVHAYAWKITGFHSTVQGLEEQGDYPLDRGLLQGAEQEQSTGPSLQT

SEQ ID NO: 1020740 - protein, 109 aa, Homo sapiens
GRSRGSPLSLGKTRKKRIHRTNEEILSTSTKSRLIITEDFTKNCCVSPIPSAAHSPRASSNFVYMSNVQLSSILAQSQQKNKQTREKNGHPPKQKHPQAPVPRKSVLKQ

SEQ ID NO: 1020741 - protein, 33 aa, Homo sapiens
MCADASVVGHFYPNGPPWRKPTKAINVPTAMMN

SEQ ID NO: 1020742 - protein, 98 aa, Homo sapiens
GPGQGRLPRCQAAQWDSAAPEASTGQGRQTRRGKESQPHLYTRVLRASRRSSGLLVKPDWVHRCGHEESSGERGPTAEIGVLCVDPQGGGGPRSPEDS

SEQ ID NO: 1020743 - protein, 63 aa, Homo sapiens
PVYQPRTNQPGLSFTPRVGYRSLSLEAPMSWRDRLLPASFRGVGFWVDQAKVPVGKKGQLHEY

SEQ ID NO: 1020744 - protein, 114 aa, Homo sapiens
DKEQHRELCDENLVEDISRIQIEQVIRAQHFVWVKSPGLETEASETACDAQDPTPPAPFQSTLSRESQGRSLSVGVTGPVCSHSISSPFMEAWPLLHIHFLHNGNNNIYLVGSL

SEQ ID NO: 1020745 - protein, 97 aa, Homo sapiens
SVASTVGKAWILVDAGLADGQSGQMSRPCTVVRMNKAQLDNYYAIHIAKHCPTATIFILCVNGLSHNEAEDARHRCAAACHAGSVTERGMALCPTRQ

SEQ ID NO: 1020746 - protein, 40 aa, Homo sapiens
YAVVLRSAFMQLLVDHLDHKTAARGSRFAFNDCHDAPLPY

SEQ ID NO: 1020747 - protein, 61 aa, Homo sapiens
GLQVLELEVLETSMGWPDSLSVGHRDCDLLMVMARGRNFYHITVVFGSLGAAAHGSCHRAT

SEQ ID NO: 1020748 - protein, 75 aa, Homo sapiens
MVVEARQIDNPDYKGTWIHPEIDNPEYSPEPSIYAYDNFGVLGLDLWQVKSGTIFDNFLITNDEAYAEGYQLDCI

SEQ ID NO: 1020749 - protein, 126 aa, Homo sapiens
ANSENFVHEALGNMFRNVWFSGKKVNCKNGQGHCYQEALPAMHINRLAPDKRLQVTQLCIPEQPEGETHHCGHVKGAQYVPDHFDATVEDSQLGQSTTRYPTSLNLILSTAASSLLLPCCERSNYS

SEQ ID NO: 1020750 - protein, 97 aa, Homo sapiens
DCEEDTGEDGEEDIGEGCEEDTGMDGEEDTGKDSKENTGEDSEEDTGEDSEEDSEEDIGEDSEEDIGEDSEEDTGQDGEGDTGEDSKEDSEEDMGGQ

SEQ ID NO: 1020751 - protein, 79 aa, Homo sapiens
GPVIVQSLKADYRATRFRCAGAGSLSRTVVSGWQGGIDRMSRGTGISLYGHGLRATPSTRLHSSLAPSVRQSMVSATGH

SEQ ID NO: 1020752 - protein, 41 aa, Homo sapiens
MTCWNNYLVLIPCGGRLGLQGMGGWSSGQCSWMPAVMRRRR

SEQ ID NO: 1020753 - protein, 40 aa, Homo sapiens
ARYPNETGNRRLRREVFVAIYSMQRIDQRAANRPVARATV

SEQ ID NO: 1020754 - protein, 123 aa, Homo sapiens
RKEGDDRRVEVDGWRQASTMTGGLKEMGGGRREMTGGLREMGGGNRAEEGGRWEMTGGLKEMGGGRREMTGGLREMGGGRREMGGELRGKWEMGGGRREMTGGSRGMGGRRGRAVSSSSSTRP

SEQ ID NO: 1020755 - protein, 114 aa, Homo sapiens
DSEWVAPGKPPHTDGTGSMLFLILLSLSCYSRWVLKGSQCPVILDSSSFCHCTFLSVQPCGMAQLQGFCMMGQQTALCFSGYDIGHPYVHADVCICAWNLHHILYLDFLNLGCQ

SEQ ID NO: 1020756 - protein, 152 aa, Homo sapiens
TVSRQKHSCELVLSPLLKSNKPALWLERKPELVYLQVTLSGLSWDMVESGDMEYLIVKRLPLPGLKGKLMDHSPLLSLLASWPLGPAEQEAQLSFSLSFFLFLFYEMESLTLSPRLECSATILAHCNLNLPGSGDSPVSASRVAGTTSACQY

SEQ ID NO: 1020757 - protein, 44 aa, Homo sapiens
FDYVNYLCLVMASSSLCFCRSFPFSSVPITSSAPYLPSVIEATI

SEQ ID NO: 1020758 - protein, 67 aa, Homo sapiens
DWTRVSHTDTRVLIRIGWKSVGAATMLKHIPECYDKRERKKHSLHENPSKMPFPYKVLKDLDPRNLS

SEQ ID NO: 1020759 - protein, 267 aa, Homo sapiens
GHAPGPNADQSQRTPTSPRAQFLARQPLTAPATHEQLDSINKAKYLTKSTPGSQRWSLVKMLDESPPAAERLSDPVERDDQASSSPSEVTRLPQQPASTPCKFPLANCILHAQAGHQPPTRPPLNGVRFLGTSGQNVSDIFRVQQTWRITWRSWRWTLRVRHISPTAADTLGCYPFVAKLTRFILAQSARMSTFVANTHSFGSKIISGPEDQTVLLVTVPDFSATQTACLVNLRSLACQPHQLLGPSGQRTDDLGGQGHGHLTQKSG

SEQ ID NO: 1020760 - protein, 79 aa, Homo sapiens
RGPISYMVQAVVCLLHCKTSPFPVDGPGSHVSRGTVMSVGAQYVSPAQSSSVHGTVMSVQASHVSPGRILSAVAPSQAM

SEQ ID NO: 1020761 - protein, 165 aa, Homo sapiens
TCRRSGINRGPGAHASGLYETFDGLPLTGPGGTPYELKDPLWLSRVEVLRGANGFDLGALALGGAVNYVTHTGYDAPKLQVRYEAGSHGYAQREISSGQVLGDADYYISLTDSHYDGFQNHSAGSGKGMAANFGYRFNPDLETRFYFRYRETDNDSPGKLTRDQI

SEQ ID NO: 1020762 - protein, 59 aa, Homo sapiens
MADMDPELAISCNQARADTSEAKQNNEDQNKDVEKEIQKKEITWEEGRRGREFSSSRRR

SEQ ID NO: 1020763 - protein, 88 aa, Homo sapiens
MVQRGKNSRSHRNRGHHNNRTKSTTVGAHGARQTPQQPAQGPGPHPTAPRPRGPANRGHTHGANQNNGRDRRPEPAGRRKDPHTRKPT

SEQ ID NO: 1020764 - protein, 224 aa, Homo sapiens
  misc_feature (18)..(18): Xaa can be any naturally occurring amino acid
FYETGEIPQKNLDVMKEXWFSQRNRLLRLLGSWRNRRRYRFKKERNGWLHLPSRLPENRRSTPEECEEMSEKRTKKKKPKPQEVPQENGMEDPSISFSKPKKKKSFSKEELMSSDLEETAGSTQYSPEEEVYTPGGNQLMTLRRPGPPEVAPRKRGNSPKRSPVSRGPEEAAGQSSSQKKKKFHKASPEDENANGHSLGGGAYHRPQVTFPPLCRVPPIKTNSP

SEQ ID NO: 1020765 - protein, 188 aa, Homo sapiens
RKLYRRDAIPGTLLLGCINLYSRIVRLSFPLRDECKTPKKKKPKPQEVPQENGMEDPSISFSKPKKKKSFSKEELMSSDLEETAGSTQYSPEEEVYTPGGNQLMTLRRPGPPEVAPRKRGNSPKRSPVSRGPEEAAGQSSSQKKKKFHKASPEDENANGHSLGGGAYHRPQVTFPPLCRVPPIKTNSP

SEQ ID NO: 1020766 - protein, 221 aa, Homo sapiens
MVNFTGDQIRRIMDKEDLYLKPIQRTILMMGRYVEPIEDVPCGNIVGLVGVDHVPGEDGQHHHLRARAQHAGDEVQRQPCVSEWPWRPRTRSDLPKLVEGLKRLAKSDPMVQCIIEESGEHIIAGAGELHLEICLKDLEEDHACIPIKKSDPVVSYRETVSEESNVLCLSKSPNKHNRLYMKARPFPDGLAEDIDKGEVSARQELKQRARYLAEKYEVGRG

SEQ ID NO: 1020767 - protein, 425 aa, Homo sapiens
SRRLPDVCGQVRRQGGGLVVGPAERAKKVEDMMKKLWGDRYFDPANGKFSKSATSPEGKKLPRTFCQLILDPIFKVFDAIMNFKKEETAKLIEKLDIKLDSEDKDKEGKPLLKAVMRRWLPAGDALLQMITIHLPSPVTGPEVPLRAPVRGAPGRRGCQWAIKSCDPERPSYDVYFQNGAKLRLRSVLTPLGNGVFSGLDLHMELKVRIMGPKYTPGKKEDLYLKPIQRTILMMGRYVEPIEDVPCGNIVGLVGVDHVPGEDGQHHHLRARAQHAGDEVQRQPCVSEWPWRPRTRSDLPKLVEGLKRLAKSDPMVQCIIEESGEHIIAGAGELHLEICLKDLEEDHACIPIKKSDPVVSYRETVSEESNVLCLSKSPNKHNRLYMKARPFPDGLAEDIDKGEVSARQELKQRARYLAEKYEVGRG

SEQ ID NO: 1020768 - protein, 190 aa, Homo sapiens
PDVCPMYVAKFAAKVEDQRLACERAKKVEDMMKKLWGDRYFDPANGKSQQVSHQPRREEAADLPKLVEGLKRLAKSDPMVQCIIEESGEHIIAGAGELHLEICLKDLEEDHACIPIKKSDPVVSYRETVSEESNVLCLSKSPNKHNRLYMKARPFPDGLAEDIDKGEVSARQELKQRARYLAEKYEVGRG

SEQ ID NO: 1020769 - protein, 440 aa, Homo sapiens
SRRLPDVCGQVRRQGGGLVVGPAERAKKVEDMMKKLWGDRYFDPANGKFSKSATSPEGKKLPRTFCQLILDPIFKVFDAIMNFKKEETAKLIEKLDIKLDSEDKDKEGKPLLKAVIFFFFFFFFFFIFIFFCAAWLPAGDALLQMITIHLPSPVTAQKYRCELLYEGPPDDEAAMGIKSCDPERPSYDVYFQNGAKLRLRSVLTPLGNGVFSGLDLHMELKVRIMGPKYTPGKKEDLYLKPIQRTILMMGRYVEPIEDVPCGNIVGLVGVDHVPGEDGQHHHLRARAQHAGDEVQRQPCVSEWPWRPRTRSDLPKLVEGLKRLAKSDPMVQCIIEESGEHIIAGAGELHLEICLKDLEEDHACIPIKKSDPVVSYRETVSEESNVLCLSKSPNKHNRLYMKARPFPDGLAEDIDKGEVSARQELKQRARYLAEKYEVGRG

SEQ ID NO: 1020770 - protein, 428 aa, Homo sapiens
AHACRDDSQKYLSDNVHLVCEETANYLVMWCIDLEVEEKCALMEQVAHLTIVMQFILELAKSLRVDPRACFRQSFTKIKTADRQYMEGFNEELEAFKERVRGRARLRIEKAMTRSYDGRRSASRACLEPRSGLDPRTRFYDVPHLSELHASASSVRGRCKNCCQSTSEIKAKNWTPNLTPIGTDYVRRMLVELLVSILCGPPRLYTAQSSANGRDEDGTVLGDHMYWNACSPRIVAIEERDVRCDDRDPSVAPDTLASRAPYGAPLFRKTREMPVSDRLRELPSNLTLSSEHSTEGTPTRPPMASPHVIHSSEQPIPSLMLMSQRGLHVTESAKRKVGRCQRKLKELEVDEGGQAELIASGRGQQAGKEGAELPAKLQDMAEGGRGYQERDTPGQRTDEHGSQARKRSSENRREKSKRSTRKTHSRRE

SEQ ID NO: 1020771 - protein, 106 aa, Homo sapiens
VGLDRRCRKGDVRPGTPRPAKSSAYLSFQERSLGPLKSEYCWELSRYTLSHWERDIDLKYVVQGGKAKDLAVRLQWATNRGSNGYSAVDRDVDEYRMIVDYPINVF

SEQ ID NO: 1020772 - protein, 128 aa, Homo sapiens
SSSVPLNRLMLFQETGVSLPTWEARDRLACPGIGWRTLVTQKWTSPLYATSPAGRRGTCHLAALWMSVGLVLTPGRILKVILAWPRCALSSSKGAYKCRVPLAWVDSCSPASLARPSNSGTGSSIWRT

SEQ ID NO: 1020773 - protein, 72 aa, Homo sapiens
MTPPDPTLGGGGLSALGIPHICCHPPSQCFSQHPLVVFSQQPLSGSPATDSSALTPWDGRITAPPPSSKNQL

SEQ ID NO: 1020774 - protein, 91 aa, Homo sapiens
YNSSSLLPNWFFDDEVVDAVVEVIELQVLELALGGAEEFFHAVHVLVHRAAHVHQQQHLDLVVAFGLHADVQQAGVGGRAVDGAVQVQLKV

SEQ ID NO: 1020775 - protein, 222 aa, Homo sapiens
QRPPRVKNIGSPSGGLFVLRRLTNVLRFDSHQEGQMGKTMYGARRSDSPPYGFGDVTSENFKGIPFKFEADQALQAARQDHPKETYRLVYSEEELYMVNEQDMKRVRRLLALLRAEGIDCIIAGGFARDVFFEADPKDIDIICGGVDHYTISTLFEETGTLTRSYPKYNGPESDRLAGVWKILDTNIDVILYEVPTALEAVSKFDYNLNQFVSNEETETSHD

SEQ ID NO: 1020776 - protein, 38 aa, Homo sapiens
MSELKTDVIHRGDCFEVLRALPDASVDMVFADPPYNLQ

SEQ ID NO: 1020777 - protein, 75 aa, Homo sapiens
MPTSTYSEGSTPLTNMSFSTTPVVSSEASTLSTTPVDTSTPVTTSTEASLSPTTAEGTSIPTSSPGEGTTPLASM

SEQ ID NO: 1020778 - protein, 83 aa, Homo sapiens
RGPPVIGVIVIDDTAASIWPDCTAAKSPANGMFVNLTSEPRRLPTSVMRSTSKPTILPLASWNSHGTLPTLAPTLSSAPYADA

SEQ ID NO: 1020779 - protein, 70 aa, Homo sapiens
HTVLSLVNEYDDMERVSSYFVLHISLTSLRTRLWLMQSLGDSKTIPGDTAWLLYDTYGFPDGSDWTDLLK

SEQ ID NO: 1020780 - protein, 170 aa, Homo sapiens
MTVLSLVNEYDDMERVSSYFVLHISLTSLRTRLWLFRAYNDHVVNNYIQFIQRHNILGICPHMTEDNKDLIQGKDLLIAYYDVDYEKNAKGSNYWRNRVMMVAKKFLDAGHKLNFAVASRKTFSHELSDFGLESTAGEIPVVAIRTAKGEKFVMQEEFSRDGKALERFLQ

SEQ ID NO: 1020781 - protein, 45 aa, Homo sapiens
MQTAKTRGLLRFRSPLLSESRLMSFPRASEMFQSPGSTSLSCDTI

SEQ ID NO: 1020782 - protein, 263 aa, Homo sapiens
MSDAAVDTSSEITTKDLKEKKEVVEEAENGRDAPANGNANEENGEQEADNEVDEEEEARWGRHSRQAAKKEQVMAEAKEALAGCKMQEQLSQLTGKAGQPARLMQDDDVDTKEAEDRRRMTRQHNKGKVTAIKTKRPPGPIHPPYSRPQNLTVVTFDVDRPARPPMSSATPADDTRSQPPNPKPLSNFRNQGEDTQRSSKIFPKAPDFFLYTVPLPPANLLGLRIPLPLLLVTYLVRATPFNDLVMTILLRGFPALLDLPCVY

SEQ ID NO: 1020783 - protein, 66 aa, Homo sapiens
MIKSAYHIISGPGRYFGVDVVHQQLLQNSVPQLLRHDHGEHEVKSVGFEHNGGILSAKLWEETRNE

SEQ ID NO: 1020784 - protein, 150 aa, Homo sapiens
MSSSLPLIGSSMTPSDTCACRQGVLVDTAVLQTRARVARVPWWTPLDIGYGHESPGTAGRPLRPTDMDPSPLGQLLKTKGSRTKMQVAREGWLTPQALGAGPESPGTSVGIPVPREWSRVARETWSTQSALKTVPESPKTSGRPSSKNQL

SEQ ID NO: 1020785 - protein, 49 aa, Homo sapiens
ELGTPIAGTLTLSPCDTPAPSSPSTIIATITLVNLYFYLRLIYFTLYTQ

SEQ ID NO: 1020786 - protein, 93 aa, Homo sapiens
TQRLSGHGAFPGHTWGYPGHPTPWAYPSFGQASGPRGPTLPTGPMAPLLGTLIVALYTPPLPGGMVPRMLITILGTRESPMPTRNCFRFPKRE

SEQ ID NO: 1020787 - protein, 137 aa, Homo sapiens
SSSSANTTPPLRQILLLLSARYYSISPPDLLLLSARSYSSPPDPTPPLRQILLLLSARSYSSSPPDAPPRLRQILLVSARCSSSLRDAPPLHRMLLLSSRCSSSPRDAPRLHRLLLVSAGCSSSPPDAPPLCQTLLL

SEQ ID NO: 1020788 - protein, 45 aa, Homo sapiens
IADDRPDLTLTTDSAPEIEALCLITPPIAADVSKKSRMPFASASS

SEQ ID NO: 1020789 - protein, 106 aa, Homo sapiens
SAGQIASLRLGYFEFVCIPICYSAHANKRTLCLATHFFPPFNNGIESIKSRGRFGSCVWETVTDGTVQFPHLMPLCQHKIIQRDFSMRLKLRMNFLAGYVILEFSV

SEQ ID NO: 1020790 - protein, 58 aa, Homo sapiens
SWLTVRENISFGLEMQGRPEKERRALVDEKLELVGLAQWRNKKPDELYGGMQQRVGVP

SEQ ID NO: 1020791 - protein, 278 aa, Homo sapiens
  misc_feature (234)..(234): Xaa can be any naturally occurring amino acid
SSPAHPLNRGHLSSPLRQAADEDDKGMRSETPPVPRPTTLSGPGYPGLPENGAPGSPQSLAVPLEEPGPPYASSVAPQASDESVQDEQTPPTKKEPPKEETCDMLTGARSRPESLPAESGVEARAPQHHAERVAQRPAGALVQGAVVVESLQRSQGPPPRQGWAYKESSTTYKSRRAGLPKPLEQGEEPPKPRSQTQLKITKGKLGGPKETQPMDTLLPLSQGFGGTIPYERVXPTSCRVRGRGEYLARGRGYTEDYGGREREPKPGIRRKRHVRRHM

SEQ ID NO: 1020792 - protein, 103 aa, Homo sapiens
NWFFDDASLGFSPGSSSKPEHVPRALPSRRQVTSSSPRPSSPCTCDGWHTSRLLDTHPYLPAHGHTMGISNPVLSLSSTFSSSEQCHCGLHPNSGSIRHRRTN

SEQ ID NO: 1020793 - protein, 49 aa, Homo sapiens
DSQLILRINQIFSVLLQQGKASCKLHGVDRSIGEKRYEPIQATPPPPPW

SEQ ID NO: 1020794 - protein, 74 aa, Homo sapiens
KVVSEVQAHCPNTPIILAGNYNLILADDKDTIETLKEKKLTPITYPQGLAMAKEIGAVKYLECSELTQRGLKTV

SEQ ID NO: 1020795 - protein, 130 aa, Homo sapiens
RRREFGHRYYSSRPDSDSSPPDTTPPLHEMLLVSARMLLRSERCSIVSARCSSGPRDAPPIHRMLLISAGCSSSPPDAPRLRRMLLLSAGCSSSPPDTTPPLHQILLLSARYYSSPPDTTPPLRQMLLAR

SEQ ID NO: 1020796 - protein, 77 aa, Homo sapiens
MTAGMAQESKIELQGERPKASIHEKVSSIGTDKDDRKWQKPTLEKTVTNAVVTVPAYFNDSQRQATKDAGSYARSSM

SEQ ID NO: 1020797 - protein, 137 aa, Homo sapiens
PGTEIFNLPAVTTSGSVSSRGHSFADPASNLGLEDIIRKALMGSFDDKVEDHGVVMSQPMGVVPGTANTQFVTSGETRKRGSGTHHLIQEEFCKPKLISKSNSRKSKSPYTWGKATRTRSQSPLYIQKIAEQPPQQR

SEQ ID NO: 1020798 - protein, 43 aa, Homo sapiens
QSDLIFRASLKKYGLGEMYFCVYCHRVVEKGIGMPLCKLHSLL

SEQ ID NO: 1020799 - protein, 149 aa, Homo sapiens
LLLLNSRPRRRKKERKKDKETKEGKNKERERPKEGRKEKERERKREREKGRKEEREKERKEERKKERKKERKKERKEGRKEEREREREREKERKKERKKERKKERKKERKKERTVQGYPTEIVGGGASIAAVHLAGDVDAAANLVVVVD

SEQ ID NO: 1020800 - protein, 41 aa, Homo sapiens
MVLLSLRCSSSSSSCRPWRISGSRAEKGSSISRISASIAKA

SEQ ID NO: 1020801 - protein, 45 aa, Homo sapiens
MIRMINASSSTAITAPTIPYTRLVGMLNSQVSPQYQCVFVFGHRQ

SEQ ID NO: 1020802 - protein, 48 aa, Homo sapiens
HTLSLGKEKATHTERTKLPIRKEPSYHTERTKLPYGKNQATIRKEPSY

SEQ ID NO: 1020803 - protein, 57 aa, Homo sapiens
DTLAVGATSSSRSSTVPMYVRKTMKATVSDVDWKRSPSQRASDKGCTMSNLPQPTRP

SEQ ID NO: 1020804 - protein, 160 aa, Homo sapiens
IPAERYIARSYRAVRKRSWIMDVIQIKNYQEPSVTLSQINRASGYFTQRTWVDGKCQSQTVRVQIVGRTVEYIDHQFHPTGFDAVANHIAQQAVAAHQRVQFAAAAELDGFRANGGAPVDRALQQFAGLVGVQQVVVADKPGGQAVQRCQAQASAAVPGY

SEQ ID NO: 1020805 - protein, 139 aa, Homo sapiens
SSFYSSSRTWLTWTTTLFVRFDSDATSPRKEPRRMDEQEGPEYWDRETQISKTNTQTYRESLRNLRGYYNQSEAGSHTWQRMYGCDLGPDGRLLRGYNQLAYDSKDYIALDEDLSSWTRDTHAQITQRSIEKRSSSHRS

SEQ ID NO: 1020806 - protein, 68 aa, Homo sapiens
IFGKIQNYQRTLVLSPAQLNSAVGQFNNFQKGRWHKSLFSTKGRHYISHQRGLAQDLNSFLYGLMNGA

SEQ ID NO: 1020807 - protein, 144 aa, Homo sapiens
CNVMRVALFMSFGRYFMCIAAEMHIYTEHHLMLYTPSFNTPRSSSPTAFLQPGDSLEHFPKLRCPLFIPTIPIEMINQHLRRRRSSMGDEEVTNHHQEIFAFRLFADHVHGRLECLNSWKTRSHLASTAGLRRRGREFSSSRRP

SEQ ID NO: 1020808 - protein, 48 aa, Homo sapiens
CVHLYTDEVRLTHNYWGVLLSADLCRAFLFAFLLMLSYISGIDPMLAR

SEQ ID NO: 1020809 - protein, 118 aa, Homo sapiens
SRYTAWKPSGFAIYRGRLTGWMDRFSLMLIAGGREAMAVSRRSSMVLSASFESQIFSSSRIIHQSEYGSSCWAPRDIRLTTVQKPDNPMMPTLRSFFGRPIQIQCSVMRVKGELHIAA

SEQ ID NO: 1020810 - protein, 88 aa, Homo sapiens
LDVLQKPEQGSCITWINQPVVPRVCAAVEGGGLAVEFLCGDLFEHVEHIGIGHQAVFQLLGKRIDMAMLQLGCYGRSNKSIVRRKGIW

SEQ ID NO: 1020811 - protein, 46 aa, Homo sapiens
AVNQLGTRLHFHAVHFMRTLPTGSVDPNFGRRVRNRRQLNSLQNTW

SEQ ID NO: 1020812 - protein, 112 aa, Homo sapiens
FLGGKDDMQNPLQGATENRIGKDGTSGADQQWHDSKQMSDESASWGDTENYNFKLHEARNVPIENTEEIIPTMKKEINLQVYQKGRKADVGKTSIYGGTNRNASDKRGAAIT

SEQ ID NO: 1020813 - protein, 77 aa, Homo sapiens
MSFLLLLRPCIIMELVRRLHNWDTDALGQRWAEYRPLHCEGRYLALLLLHSNVILQANVMDLHIIGAPFPKELEVWG

SEQ ID NO: 1020814 - protein, 77 aa, Homo sapiens
SRTFADVIVQRLGHVELAVHGADGLGVKRVAHQPNRLTGNAQADGELRAERHEVEIIGEGLAAQLRLFVPAVEAHVL

SEQ ID NO: 1020815 - protein, 31 aa, Homo sapiens
MRVGSPRDEKRRGGQRVVCETTPEAASGPSR

SEQ ID NO: 1020816 - protein, 75 aa, Homo sapiens
ITRPYVTDSTYQVIGFSCCYIFTTTQWGSLTHHINNIKPSFTREKTQNDPPKNDPPKNDPPKNDPPKNDPPKNDP

SEQ ID NO: 1020817 - protein, 94 aa, Homo sapiens
ICGRSEDPRWAHSGALPRFTVLDDKDRQALHTFFTKFALLSARVAVPGANIIIASNPLLSHIVADAMISAGLELRGYVARQVTDYAKVNGILLA

SEQ ID NO: 1020818 - protein, 77 aa, Homo sapiens
MLITFHSNGRGRSPDAYLTMLVPCSQAVGNVLRRQDSRTRRVHRRPARSWPSSGIERAIEEAQGTHEEDEEDEDKPP

SEQ ID NO: 1020819 - protein, 95 aa, Homo sapiens
CVNSQVGLVDMFVAVDVDAEVVGLPVWVLALASRSVLGVPPRSSRSTAVRANSAASTLAVCNGEGRTLLGLAVTRDSSWCAGAYPGRRQVRPWLL

SEQ ID NO: 1020820 - protein, 69 aa, Homo sapiens
LIGSSMTPRVPRQCPAAGGSLTEQRPEEPPPLPSKVIRAQGVHREEHEHRCLASGLLGELCSAEQRHRR

SEQ ID NO: 1020821 - protein, 132 aa, Homo sapiens
MVEDFQVPADGVSFSVSYRNTFFVVLIVFLVLFVIDASLEIRKYDDVTEKVNLQNNPGAMEHFHMKLFRAQRNLYIAGFSLLLSFLLRHLVTLISQQATLPASNEAFKKQAESASEAAKKYMEENDQLKKGA

SEQ ID NO: 1020822 - protein, 99 aa, Homo sapiens
MADVDSRGYLRSFEVAYQRVYAHTFAREGAVLGAHGRYWKVDHLCTVVRSAFRGLSLDRDPSLARVLRVHEQAWWAVREPLRCLLGVYEMPGEVLWNHQ

SEQ ID NO: 1020823 - protein, 77 aa, Homo sapiens
HMAVKHASESKPDGHTIKKGEGGDRAGRHEALNTHRRQVMAGFKTLGQTRSKGTVHQHRIFSLPQTQMLRRQPTLHK

SEQ ID NO: 1020824 - protein, 181 aa, Homo sapiens
SIYQDPGRSDMHSASSARMAPFQPFSAPRRCQRAHGWAPELVIQPFVDFRDGAHMLEQGTRVWELNVFDATRLKRDPALGVVLWRRIGVFRQLHLVQAGRQRLNRIEALQDRAMLVTRHACGDENAEVSDMRVGEIHDSLAGGDQSFRTFVHDGNPAERLVRWRDVVAVRGKDDDRFANAP

SEQ ID NO: 1020825 - protein, 100 aa, Homo sapiens
SAALKREKYKNQVLDWSLFIKKKGYLWLDTIMTRHMCTTTTVHHDTVHHDTVHHDTVHHDTVHHDTVHHDTVHHDTVHHDTVQTRHSAPRPQCATTQCTT

SEQ ID NO: 1020826 - protein, 84 aa, Homo sapiens
DCVGTNTRFIHSIYPYLYPLTSPYFPPAPSLHHPSQHHDTVHHDTVHHDTVHHDTVHHDTVHHDTVQTRHSAPRPQCATTQCTT

SEQ ID NO: 1020827 - protein, 127 aa, Homo sapiens
VLITPCPCYRNLTQVRRDSFIGGNSRTCTDATISSQEWHPVKSTLNTLRDANRVTELTVDPTAAGDVRPLMHHPPNQIDDHDTVHHDTVHHDTVHHDTVHHDTVHHDTVQTRHSAPRPQCATTQCTT

SEQ ID NO: 1020828 - protein, 78 aa, Homo sapiens
TEINRSFRKPSGSVISDKRPATSRNSEKVSTTTTQCTTTQCTTTQCTTTQCTTTQCTTTQSDQTQCTTTTVRHDTVHH

SEQ ID NO: 1020829 - protein, 122 aa, Homo sapiens
MPGRMAAAGIRLVTVRSNNRPRASRLTPLVHAVKRTELSSPTDVHMHEGSTVHATCCQKCIIHSIGSLLTAEIICIPQQMTADADPTKAPSTIEYGAHRRWANGRISNCLIHANLSKSASST

SEQ ID NO: 1020830 - protein, 136 aa, Homo sapiens
MALWMRLLPLLALLALWRCWPSGDLTQPRAFVNQHLCGSHLVEALYLVCGERGFFYTPKTRREAEDLQVGQVELGGGPGAGSLQPLALEGSLQKRGIVEQCCTSIMLPLPGWRTTATRRSPQAAPHPPPPAPREME

SEQ ID NO: 1020831 - protein, 68 aa, Homo sapiens
NIVSFVSEHSCPHSCPEHSCPASFVKSHHVEGSLVKGCKSADFGLARVIEDTNVQGHRSSQFVTSMVH

SEQ ID NO: 1020832 - protein, 77 aa, Homo sapiens
GTVNCDLFKTLLFDKKLFSRINDPGFIAKINDLRKGGECANQDLMVGYKSENVSDKKQRVTKSRRRGREFSSSSRRP

SEQ ID NO: 1020833 - protein, 47 aa, Homo sapiens
PSSYPSLQALAEAKHWLDTIAYTGSLVVSWWLQWWGNPCDHQETTKE

SEQ ID NO: 1020834 - protein, 149 aa, Homo sapiens
MTTVRDREMPEALEFNLSANPESSTIFQRNSQTDALEFNPSANPEASTIFQRNSQTDVVEIRRSNCTNHVSTVRFSQQYSLCSTYSLDDSTAIQHYLTMTIISVTLEILITITLRDADRSLSIPDEQLHSSGQVSPCRPGWSELETSDP

SEQ ID NO: 1020835 - protein, 62 aa, Homo sapiens
VISKNVKRGYITAFLAKATKILYPHQASLQISEHAEYSLKCFEVAQCTAKTQDVRYLKEVKG

SEQ ID NO: 1020836 - protein, 58 aa, Homo sapiens
KYVRPTRTEKVTYPLWSIYYPSTYRLLSVNQSVDDPSIISMAMLCLYHLSISPSPVAW

SEQ ID NO: 1020837 - protein, 41 aa, Homo sapiens
MLGNACPPFSFSAGSLQDPCGLTEGNPGRATSPRAPFSGGV

SEQ ID NO: 1020838 - protein, 53 aa, Homo sapiens
LVAAKIFTCDGNGALRNRDLFPCVIHSEDPSQMTGISNGERVYISWDPVFPVE

SEQ ID NO: 1020839 - protein, 169 aa, Homo sapiens
RTFVNLRDRFANVVGRTVPFVQAEDFCDCLFSIHHALPHSSVILRSAIAGPTLMPTPVCINAAFTPGAAAQERKRPWATGTIDALPALHDLDLAAQGVFGQFDHPGVHLFGIEGDGSLPLVMTEKDAVKCRAFARPDWWYLAVDAAPSPAFIAWFDTQLMRLLPARLLP

SEQ ID NO: 1020840 - protein, 147 aa, Homo sapiens
ERLHSAHDADKNGAGQSVGCFAYLPAVAPSLVNLHTGKRQPVDHFPVGQQVHAVAGIGNPERFFDTLETATLTPIPHAFADHAPYSAEVLNFTPALPLVMTEKDAVKCRAFARPDWWYLAVDAAPSPAFIAWFDTQLMRLLPARLLP

SEQ ID NO: 1020841 - protein, 208 aa, Homo sapiens
VSVHIPQELSFSGPRNLTRCRHGGLCSHLISSDQLCPKWSGVASGLCRSFCPWSRIAYSCDWKELCSMAAVPMVLSAMGFTAAGIASSSIAAKMMSAAAIANGAGVARAAFWLHPAVTCGATGLSGLTKFILGSIGSAIRGCHCEVLLAPCTLATAEKRTMPGEKDPAIVTQRGANYPKYTWGEIYQILDLQRKLRNKDELLQLESPK

SEQ ID NO: 1020842 - protein, 311 aa, Homo sapiens
MIWWYRYAFFDAALGREHFGACQLTLLALIDMTLHGAVLFGVALGLLVACKLGTEDGLVELSNQTSIVFSTCGMGLGHVETALRITDRVALLTQSDHGVGGRFFCLTCETHRIAELLRLSCFVLRSWYLISCIASSSGSNSVPAPCDVYGSRYTDVGCGRRDTGVAEPEPYSASSSASDGCGVSVLPLPYGSRGRPAALFADTYGFSSLLLLGSAGGCSTGGILGFRRNKGFMRAEKQDAPPPSGGISASMGPQGSKPARTLGARVPTGPLKAPSTAAPAASRFHKDECTYNLLTHERFSAMRVIPNSCGI

SEQ ID NO: 1020843 - protein, 108 aa, Homo sapiens
PDHDLCYVNEIRKGLQLYTSAPTEPYLSYQNYGELFIQHRFIWLVDDTNVYNVHYFTSTFEGNLTPKPNQREPSSSTNPRTGTDVPQDNPHVQCVSGQDPYGAEDKGA

SEQ ID NO: 1020844 - protein, 75 aa, Homo sapiens
SPLPALAIAPETKLGEACLIMEGAEFTENIINGVERPVKAAELFAFTLRVRAGNTDVLTDAEENVRQKLRAEGVM

SEQ ID NO: 1020845 - protein, 55 aa, Homo sapiens
MRVPRGSRDVIPNTREKERHSYFPLGTNYDDANIPFVQALGSVNQVVKFVLGDNI

SEQ ID NO: 1020846 - protein, 42 aa, Homo sapiens
MSSVQSVYHSYTFTTHHSITITITIFITITINFNITTIITTN

SEQ ID NO: 1020847 - protein, 73 aa, Homo sapiens
MARDYHIKQRDSKTHPEKAEDRGGQVSVGGRDIPFQRAEIRRHEITVHTYQGAWRRSPPHKTQHAPHSRSPAS

SEQ ID NO: 1020848 - protein, 131 aa, Homo sapiens
MVEDFHVPADGVVIVLCATPSLWFSLSSLSCSSSMPVLEIRKYDDVTEKVNLQNNPGAMEHFHMKLFRAQRNLYIAGFSLLLSFLLRRLVTLISQQATLLASNEAFKKQAESASEAAKKYMEENDQLKKGA

SEQ ID NO: 1020849 - protein, 145 aa, Homo sapiens
GAFAELLHSAMPAPSFTLAHRWLYARPSTSHEFGVLADADLGLYVLWRLVPVGPCGRCLAQRPGSGAAVDRASAMNRINPAKLLLSEWTAARPQHKEKHFLVTQLLRDEEGDVQEIELEAVMSHRVQRLPWQTLQNAEDWKIGWK

SEQ ID NO: 1020850 - protein, 104 aa, Homo sapiens
MHLPCVAKYFQSNAEPRCPHCNDYWPHEIPKVLDPEKERESGVLKSNKKSLLVQAALAIVPCRGAGCLEWPDRHSPSWKKGVRVSGSTRVTSFVLMFTVHSFGI

SEQ ID NO: 1020851 - protein, 37 aa, Homo sapiens
MKIFTIGFTKTSARSFFTKLSASGAKRLVDVRLNNVS

SEQ ID NO: 1020852 - protein, 82 aa, Homo sapiens
MPVLCGVMSTHCIVNRLVHSIRSFGRKNQNDSVTPRTRMPALAAARKKPNYNHPLSHWATTVHLKRTTEVDELIKLNAIHPT

SEQ ID NO: 1020853 - protein, 196 aa, Homo sapiens
MCYRIRSLLIRVTDTCYRYVLPIRVTDTCYRYVFPIRVTDTCYRYVLPIRVTDTCYRYVLPIMAYTCYRSWHTRVTDHGIHVLPIMAYTCYRSWHTRVTDHGIHVLPIMAYTCYRSWHTRVTDHGIHVLPSMSIHCVTDHGIHVLPIMAYTVLPIMAYTCYRSWHTRVTDHDIHVLPIMAYTSYRSWHTRVTDHGI

SEQ ID NO: 1020854 - protein, 126 aa, Homo sapiens
MAYTCYRSWHTRVTDHGIHVLPIMAYTCYRSWHTRVTDHGIHVLPIMAYTCYRSWHTRVTEHGIHCVTDHGIHVLPIMAYTVLPIMAYTCYRSWHTRVTDHDIHVLPIMAYTSYRSWHTRVTDHGI

SEQ ID NO: 1020855 - protein, 134 aa, Homo sapiens
MLLHVLPIMAYTCYRSWHTRVTDHGIHVLPIMAYTCYRSWHTRVTDHGIHVLPIMAYTCYRSWHTRVTEHGIHCVTDHGIHVLPIMAYTVLPIMAYTCYRSWHTRVTDHDIHVLPIMAYTSYRSWHTRVTDHGI

SEQ ID NO: 1020856 - protein, 67 aa, Homo sapiens
EWYRSCGCGLFRRGELNFAECSSGMVFGTMGEMGPSVLKPPSVALVGIAGAAPGRHFPAKSSFSTKE

SEQ ID NO: 1020857 - protein, 96 aa, Homo sapiens
MVPHSDTVQTEDVLVISSVNFITKEVKGGSASTISISLINESSLSEVVVTALNIKRKADNLSYASQGIKADKLTTTRIQDVNNALAGKISGIQVRS

SEQ ID NO: 1020858 - protein, 91 aa, Homo sapiens
  misc_feature (19)..(19): Xaa can be any naturally occurring amino acid
PPVPAQGLKTGPPPPFRPXGDFGGPPPFRPGVDSGGPPPLTPTGDSETAPRAAHGLNPGPPPVPPTGDFEAAPVPPTDDSKEAQMPAVIRF

SEQ ID NO: 1020859 - protein, 233 aa, Homo sapiens
  misc_feature (6)..(6): Xaa can be any naturally occurring amino acid
  misc_feature (21)..(21): Xaa can be any naturally occurring amino acid
  misc_feature (23)..(23): Xaa can be any naturally occurring amino acid
  misc_feature (36)..(36): Xaa can be any naturally occurring amino acid
  misc_feature (45)..(45): Xaa can be any naturally occurring amino acid
LFIDNXFRFTQAGYEVSALLXRXPSAVGYQPTLATXMGTMQERIXTTKKGSITSVQAIYVPADDFDVTLPLLRLLCPPCIATTRTAAVPIAELAIYSSLVDPLDSTSPTMDPNIVRQPTITMLPRGVHKILHGLQIPPGYHCHPGLWMKLSEEDKLTVSRARKIQRFLSQPFQVAEVFTGHMGKLVPLKETIKGFQQILAGEYDHLPEQAFYMVGPIEEAVAKADKLAEEHSS

SEQ ID NO: 1020860 - protein, 110 aa, Homo sapiens
NSSSYPTSYASSLTSHHCFYSILFYSVLFYSVLFYSVLFCSVLFYSILFYSILFYYILFYCILFSSVLFFSVLFCSILFYSNLFYSVLFYYIVFYSILFYSVLFSSDLFY

SEQ ID NO: 1020861 - protein, 47 aa, Homo sapiens
MMNSELPIQCKADGARVSPIHAVIKADTIEYFLSNRLLILIDAGKWS

SEQ ID NO: 1020862 - protein, 265 aa, Homo sapiens
MEAIKKKMQMLKLDKENALDRAEQAEAEQKQAEERSKQLEDELAAMQKKLKGTEDELDKYSEALKDAQEKLELGEKKAADAEAEVGSLNRRIQLVEERAGSCSGAPWPTALQNAGRRLKKAADESERGMKVIENRALKDEETDGTPGNPIKEAKHIAEEADRKYEEVVVSWVIIEGDWEGTEERAELAESKCLRLEEELKNVTNNLKSLEGQAEKYSHKEDKYEEEIKIFNDKLQEAETRAEVGERLVAKWKEIVTGNEFHARNE

SEQ ID NO: 1020863 - protein, 127 aa, Homo sapiens
MKKQMELQEIQLKEAKHIAEEADRKYEEVVVSWVIIEGDWEGTEERAELAESKCLRLEEELKNVTNNLKSLEGQAEKYSHKEDKYEEEIKIFNDKLQEAETRAEVGERLVAKWKEIVTGNEFHARNE

SEQ ID NO: 1020864 - protein, 71 aa, Homo sapiens
RHINGEGCILSLGGRRGGRHEGRSEPACPLLKGRLGDAAQSPRGAQPPCITARSSSGRGALLDIIPSPVAW

SEQ ID NO: 1020865 - protein, 166 aa, Homo sapiens
MRRRERIRGEERGDLGIVAPEADIDTRDALRLGSHINSGAEFLERAQIVDPQPDGVAALLCELPGQAPAHADVAVVVDDAAEEIPGCDGAHGVKRRRPEKADIVSAACSTLTPSEPANAMPPDPTPPDLPETPESVEPSAAANVPDFDAKATIARLPNLPGVYRYF

SEQ ID NO: 1020866 - protein, 327 aa, Homo sapiens
MLTTCSCTRLNQPYSQCFNNSPPARHQPQTITSSHTTQPQQHSQRPHIPGTREQNNATKHNCAHTRTPPHARHTGTHRQNTPKHTRWIKTQDRNNTNNKEATPDTKPPPQSRPREDTTGQIRKKPHADDKQATQTQNNKQHSPRTPQTTTHKSTSNNKRKGQQYMSHHIGPHKRHQHREPPNTQAKTERTKPTTNAKHNNKTTEHTEISKTQTHELRTLTKYTQQYRRIKWKMSGEAEERSGSREGGEHRAGGGGRWQGGHGQVRACARDNTNREQEERRARRAGRQKREDRGGRGEREQIVERGDRERTEAGERRREAREGKGRVW

SEQ ID NO: 1020867 - protein, 101 aa, Homo sapiens
EQHRAFYELLPYLVVGAVDDQGLPWATLLEGAPGFVYSPDPYSLRIDSLPAVDDPSRGGAEEGCAVGLLGIDLNTRRRNRMNGVVVRLALMVLRWTWGYRA

SEQ ID NO: 1020868 - protein, 117 aa, Homo sapiens
SQDLRNCVVLWQAPREELARRFEEQARVQQIQNEMLQAQQKSIEELKSMVAALLGHSTKSKSMDASPSKTTKGKGKEKMAEHSASDDAVDSEPEIVVSSAEEPEAGDRKRNVHNTTQ

SEQ ID NO: 1020869 - protein, 35 aa, Homo sapiens
RGKSTVWQLLRARQGRKAGVLGAPADIHAPATLLL

SEQ ID NO: 1020870 - protein, 117 aa, Homo sapiens
YFFGYDSETIRLFKGNSPDGVGKSFKDNRDPNGVYVNRDLVKVGKDGTHYLQYSSTQPGQTELVPKLGYTEYLPKWDMVIGTSVNLDGIDAQVAEVQAKVEKRMEGVVLSIIGIAVV

SEQ ID NO: 1020871 - protein, 313 aa, Homo sapiens
GTMATVSHHRRDQRPGSCGSCWSLQWAVEAISDRICIHTNAHVSVEVSAEDLLTCCWQHAVVDGCNGGLSCCSLELLDKKRPGILVAIYEIAMYGVHDSYRPSRSLMRHHCQIVISRARMHRGDGTIPPQRVVNRSVEPVLTSAVPDETGTKAATRIQIPYRRTPSSVEADIIGLRSYRKRAPVAGTLSHVSFRTFHAHTESGSVRNTSPGEMMGGQCHPHPGLGSGRMAHPTGWLPTPGNTDWGDNGFFKILRGQDHCGIESEVVAGIPRTDQYWGKDLICRGPVVPVLGARLGVANVHYSPPIFINYSVDN

SEQ ID NO: 1020872 - protein, 144 aa, Homo sapiens
QREYLERIAKTKKKMAENGIEVLLITNPANMNYLSGYDGWSFYVDQMLVLIIDEEQPLWIGRKMDAAGARATTWIYHENIISYPDIFVHSRERHPMDFVAEILKQIGQSQRHIGVEMESYYFTALVWERLKAGLPIPPKTGDRA

SEQ ID NO: 1020873 - protein, 58 aa, Homo sapiens
CLDVLCLDVLPFEAGAAAVGLALANVVPVIVQGDAAAPAGDGGDQQLAAGVFTHVFGF

SEQ ID NO: 1020874 - protein, 55 aa, Homo sapiens
MHKPSPVAWCARRRRREKGLPKYESPIKRQTDRQLSLIEAITGPKTQELQKHRQE

SEQ ID NO: 1020875 - protein, 69 aa, Homo sapiens
QVPSGRRLLAESVPGGVPIVAQWLTNPTRNHEVVGLIPGLAQWVKDPALPELWCKSQMWLGSCVPYIAV

SEQ ID NO: 1020876 - protein, 41 aa, Homo sapiens
RSTYSSQSSRRAGHEDPPIIPTCKGTCKPGTWVHATRYMQR

SEQ ID NO: 1020877 - protein, 100 aa, Homo sapiens
SPSYNKYIRSINHLTSRNTSISLHNTSVILPYYVLEGLILSLYMYSYSHNPTTPLPLSQYCAYCHTSLCRLRDTVGLALLVSISNTYGLDYVHNLNLLQC

SEQ ID NO: 1020878 - protein, 100 aa, Homo sapiens; identical to SEQ ID NO: 1020877

SEQ ID NO: 1020879 - protein, 125 aa, Homo sapiens
AAWMNQSAAWVNQSVHLLLCVAKFNEPAAMRVQRVVSSSLVHRNRKRSLRFINFFRSFEIDRHRRKFPVCNMYPFAPACIFAWKNYLTAPGKTIVADETASHKHCRVLSFDFSGRTKEKLKSSYC

SEQ ID NO: 1020880 - protein, 94 aa, Homo sapiens
AIALQQIIIISHPSGVESQLNYLDAGGDSDDYGSGGEICSCVYVYSYGTYMVVRTQMKPRKPIDISSSDHTYGIQMVRVFRSSSYNIGDYSEAW

SEQ ID NO: 1020881 - protein, 49 aa, Homo sapiens
LDRAGVLDQLEQRLHVDTGRCHQQVGQRLAVELDGFDVSTGHFDDLADQ

SEQ ID NO: 1020882 - protein, 105 aa, Homo sapiens
MSQRGSTREEDVQTARAEVRATQARIAMFQAQIRQAQASLRSDEAELGYTRIYAPMSGTVVAVDAREGQSLNAQQQTPLILRIAKLSPMTVWAEVSEADIGHVKP

SEQ ID NO: 1020883 - protein, 160 aa, Homo sapiens
  misc_feature (160)..(160): Xaa can be any naturally occurring amino acid
PDKDADGAFTAGQILRDDNLYYLAGDFFLADGFSLRALAYHHDDRGEGLNWNSGAWSNKGTAQEIPIIFRNTIYTIDRDGGTLSFDWELGAHRIEGGVWYERNTSSAERYQTAVDGPRDLSGMNTLPSDVGVFAQRTRYKTHQFFLKDTWRLLDDRLTLX

SEQ ID NO: 1020884 - protein, 58 aa, Homo sapiens
AGVCDLYVLVCGWIRAGVCLDDVLVCGLHDVLLCAIPEVLVCGWIICCCVDRAATVVM

SEQ ID NO: 1020885 - protein, 107 aa, Homo sapiens
HDLSSFGSIPSNGTAGSNGISWFWILEESPHCLPAVVELIYTPTNSVKASYFSTSSPTSVVSIVFLIASPFSIWCAHWYLTCSICICHFSCNAPVHAALLIIMSYLA

SEQ ID NO: 1020886 - protein, 36 aa, Homo sapiens
  misc_feature (2)..(2): Xaa can be any naturally occurring amino acid
MXLKDEKEENVAEGVFDCVVRLERNGVISAHCNTVS

SEQ ID NO: 1020887 - protein, 100 aa, Homo sapiens
KLLEGDPSKAKAIAKRYADIAAVMSKSGAMTAEDITQFGKYAYSGASAAGISDTTVAAIGMALKRANMTGQESGTMVRQLASRVLSPTREGRQSAIANGI

SEQ ID NO: 1020888 - protein, 223 aa, Homo sapiens
AWQARGNRPRTGTILIATDVASRGLDVEDVKLVINYDYPNSSEDYVHRIGRTARSNNKGAGVYLLHPREPKTGQESLSKCWKRPIRAINPKLMQLWTTEEAAEAGEGVVVSRYRTTSSANNPNLMYQDECDRRLRGVKDGGRRDSGRSIGIVGETYRAVVMLMAVAYGSRKILPSEHKQAQIHRMVKAPMGQLLMGPDSYTGSKNMVLANLWSVVAAQLQAGQ

SEQ ID NO: 1020889 - protein, 392 aa, Homo sapiens
CEHRGIMACTGQRLCGHSAVYANTLVDVCAYAGSGTVLKVQQLLHICSEHFDSKEKERKTKTQKDTRTDTDKKASPCMTWEHIRAVAVLGIALPLLCGGGALVQSWHYNHLRHLLRYGGAYNSERDIVTILATWTLISVIQHPRLNILRYHKAKLLSCMLIQKFHYNSNDIEHGALVRAVVTKYLPRTGLHNVCSQIYASQLLKTTGEPTNTTIIHWIAPMRHQGTLDNTIVRRQTEHNPIKRPLIAPPIPPQQQRHQERRPYKADPNGMAAQVRSGNTSGPPTHEHATGTTNNDTTRTKLHTPAKHESHKSPLKRSKTTCHKRLQRTTEQAPYAGPRDEAPTDQHDPRPTQEKKNSEHTHSATDNTTAQSSNDRHHSKAQQSETVDNRRPP

SEQ ID NO: 1020890 - protein, 58 aa, Homo sapiens
SGHTPPEKVTSVSTTRRDLVHVGVVIDQQDLPRGHRQRGVHGRVLADTIGMWPFSGGV

SEQ ID NO: 1020891 - protein, 259 aa, Homo sapiens
MLTRKTYISRSSSISRASSICSSSNISTSSSISVSSSIFMSSNNYQSSINWLNIHVFQRLQCADLLTFRSSSVCNIQGFRWHLCQGPSNNSGSSSDFKSSNNLKVFQIILSFQKIHIFQTIHVCPDKPCLPRQLQVFQSIKSSSKSSLPAITGLPPNPDLPGKSTSSRKSMSSNNFKVFHQIQIFQLIHVFQKNLCVPPNPSLPVKLVLPEKSRCSSQSVSSREKSRSSSISVSSSIFMSSNNYPVFHHTGSISMSSNP

SEQ ID NO: 1020892 - protein, 225 aa, Homo sapiens
MLTRKTYISRSSSISRASSICSSSNISTSSSISVSSSIFMSSNNYQSSINWLNIHVFQRLQCADLLTFRSSSVCNIQGFRWHLCQGPSNNSGSSSDFKSSNNLKVFQIILSFQKIHIFQTIHVCPDKPCLPRQLQVFQSIKSSSKSSLPAITGLPPNPDLPGKSTSSRKSMSSNNFKVFHQIQIFQLIHVFQDFKSSNNLKVFQIILSFQKIHIFQKILVFPQIH

SEQ ID NO: 1020893 - protein, 72 aa, Homo sapiens
LEVIWWTETSNLHLGRASRESHVHVNDIAELWTRQHQHDHTTSSTVSFVGGHIHGSCEPRWTTPSVTCAPQP

SEQ ID NO: 1020894 - protein, 202 aa, Homo sapiens
MHTNHISCERVLKQLPLFKYREIATGLVFFKCILKNMGIFFCSCQFTDQKKKKNSENYLDLWWNPKLLQYSKKSGEANLRGTWGHTELAFFSYTEGPGAAISTFPKTKGPGPVRTVDGPGFYTYLENVFSPRVVEALAAHVVVVVWCQEPVKVLHFESDQNVGTLTQLALRRGTRVHLSHVGHWEGALVGPSGVKYPGEYTA

SEQ ID NO: 1020895 - protein, 93 aa, Homo sapiens
PLSDAWENRNKARIMSKLSWAEGMETMTNISVNVLTSAGHRGGENTPGLTELVAAHEVHLAPAEDVQDEALVGVRELHRSMYLFAVGAGLLRL

SEQ ID NO: 1020896 - protein, 38 aa, Homo sapiens
YQTYAKIHFTSHIRRLNLLSSHNRFLGSIWNAPKFLRL

SEQ ID NO: 1020897 - protein, 90 aa, Homo sapiens
RARYPSDGDVTDDHDRHRRLVDLALARQEPRALALHHPAIEGFQRLQQRKRRMAFVPGLEQTISHGHQGWLAASTVVMRKCPLGYPLDTS

SEQ ID NO: 1020898 - protein, 88 aa, Homo sapiens
DECTKSASAACAFIIYPPAEFTDKTFKEHLGEEFLFVHEGQVEVDFMNERVLLARGDALHFNAQKPHRIRSVGEVQAQLLVVVHSAEE

SEQ ID NO: 1020899 - protein, 57 aa, Homo sapiens
MLSPNTVVVEMMGVTVVLFVLVGVGVGVIVVVVVMSTVVGDCVPVGVGIEVTEKEEV

SEQ ID NO: 1020900 - protein, 74 aa, Homo sapiens
SAVPPQDSCEERRICSHLSVSIFPAKGYYSLFPSQIFFEAIPPCSTAHPSALVFTACMSTLLDYGMQLHTSFSS

SEQ ID NO: 1020901 - protein, 130 aa, Homo sapiens
GTPAGWRVSLACWAPESSCKAEVIAMCELYVKADPILYESRSRSLRICGVVTTVRLENQFWDILSEIAEADGMTTNQLIAKLYEEVMDYRGEVVNFASFLRVSCTRYLSKQRVHAPELSLVNTRNGAQKI

SEQ ID NO: 1020902 - protein, 48 aa, Homo sapiens
LVHRTFSDFLSACFKENPCVQNACSQLAPYQMVSFTQISEQQIELILL

SEQ ID NO: 1020903 - protein, 239 aa, Homo sapiens
MIRYAEHYGHREKTYSECEDGTYSPEISWRHRKGTKGSEDSPAKHAGNNESHSSRRRSRDSKSKVTSGVERNEKPWLVKDVPECLELRGKWNSFGTPREEVEATGQAGRGEGTWGSLFEIEVLFPTDLGRVRPDPSAGGPLATLGALSLLLTELLMCRHRWQRGVLTGTTVAIHSQLPRAAPRLLDQWMQRKHLPSDRGMNPMVNGLVSPAFISFSKIYLSIDLTFTFRPLFCLLFRLL

SEQ ID NO: 1020904 - protein, 51 aa, Homo sapiens
MLSPTPTGTQSTTLTPITTTTTVTPTPTPTVHTDPNNDPISTTTTVLGDNI

SEQ ID NO: 1020905 - protein, 88 aa, Homo sapiens
GRATELKYLCRSHNYWFNVLRLQTTPYLTLQPKNKQYQAIHRSWIAAKPNPKEDGFGEGIYSGNSDGAEPQKIELYKLTNKKVLEWLA

SEQ ID NO: 1020906 - protein, 138 aa, Homo sapiens
AGTFNISFRQRNAIKTTMRYHLTPVRMAIIKKSGNNRCWRGCGEIGTLLHCGWDCKLVQPLWKSVWQFLRDLELEIPFDPAIPLLGIYPKVYKSCCYKDTCTRMFIEALFTIAKTWNQPKCPTMIDWIKKMWHIYTME

SEQ ID NO: 1020907 - protein, 141 aa, Homo sapiens
AALRHFFMHFQSLGLDRLLADSAVTLERQFPGEQAQALRFGFEGFVQAFGAVLRQGFALGLGGEGVEGVELRDDLRVFVQETVQRALVVIAGLGQCVTPNRKGFKRRCDVAPGVFAQAALDGVAYRLKQKQQQVSHQHRDQ

SEQ ID NO: 1020908 - protein, 95 aa, Homo sapiens
YEVDNLVGGSTDGDAALPRGPVSQCTIGVRVGTLPAPSPGSMVQVEVSGQLILTKLSVTSSGTYRCVATTQMGRASGELTRLGYRIPPGGEWPAL

SEQ ID NO: 1020909 - protein, 107 aa, Homo sapiens
NWFFDDRTFGIPPCLPATPHVTVLRLALASKAQLELMLALLSDTCHRPIDGVLSENQHLWCLSLSKALNPNTVLSHDDDPLQLLRAWVEPTVWQRLRLRFARHRRTN

SEQ ID NO: 1020910 - protein, 109 aa, Homo sapiens
KIPYTTCCTLYVIPTLSVLSYVSLCAVSCCSLSLSCLPFCISVYFHVYLSVIISDVSYVHHLYSVSLSLSVFLSLFFSLPLSVSPLCVSLYLFLSLCLSLSVSISVLLY

SEQ ID NO: 1020911 - protein, 133 aa, Homo sapiens
APVGISFRPLATHRPRRLLWLADAVSPQGQIVITDGAVEAATQRHSSLLAVGVTRVHGDFQAGDPVTILASDGRVVGRGIAQFSHDEVRVMRGRSGAWLAAEMGPAASREIIHRDAMVLSRRRKAEPSSKNQL

SEQ ID NO: 1020912 - protein, 64 aa, Homo sapiens
CSRSEDPPLTWIVTANSPSAITPERIPRAKSRFQCFGKIREFAANRAIDNQVAGANDDTTNQGG

SEQ ID NO: 1020913 - protein, 138 aa, Homo sapiens
MSLAPGVIRDAIISFLHALGSDASSTEIVAGISCTLGQVSPSSVRSYLALNTPKIFERTERGRYRLQGLPLIHLSGVGDFTNTKIGQASLYRADCFDWLASQEASSVHAIVTDPPYGLVEYTAKETTKLRSGKGVPSS

SEQ ID NO: 1020914 - protein, 163 aa, Homo sapiens
MHCILDDITYLIGYNFFEPGSDAIPCCVIQRLYRRHVFLIGQVLHIQRHLPVLARRFIPHVRPEDCVGGRIEAVRIIHRRTRSRLHVHPGIEARRVLILHFALIDMLRNSRQLVVAEGRVVPVVEVVVGVHLAQGDFFTRGVFPQARIQAGLDPLMDRRVALN

SEQ ID NO: 1020915 - protein, 219 aa, Homo sapiens
VQPTSEERIPKTIEIKSITHDIEEKGVRMKLTVIDTPGFGDHINNENCWQPIMKFINDQYEKYLQEEGQNQTEKRAYGTRVYTCVSHIISATADYSPRGLLDIEFMNTLSKVVNIVPVIAKAETLTLEERVHFKQRITADLLSNGIDVYPQKEFDEDSEDRLVNEKFREMIPFAVVGSDHEYQVNGQEDLGRKTKWVEDTNTVSFLTAGPSHQAPIVRF

SEQ ID NO: 1020916 - protein, 33 aa, Homo sapiens
MAIEELSLTHGGQALRSCVSAFSAGSAMEVGLV

SEQ ID NO: 1020917 - protein, 141 aa, Homo sapiens
VTNTFSLYRRWLRLPCPSSCWYHRRDTLRLDVGKGYNMWVACSLQSTVAWSLLCPFFKYFLRKWTSAPFFSALLHSLTVLPAAPMRRRCEGSLRTSTSRKRKQENYFLPPSLDQISLPSAPESAAKIFLRDAVKTRGRGQP

SEQ ID NO: 1020918 - protein, 112 aa, Homo sapiens
RFDLEDPHAAPRYKTQNHRCGVLGKIKVESAFHTPTGDVRRHGGPDTKLRHSTVQFGEYTRPGLASWSGGTSSEQKSDKKETCVHQTCHDNGKNDQHETRKEYVCRHGILRT

SEQ ID NO: 1020919 - protein, 46 aa, Homo sapiens
LGPSHGVNKVTRSDGFIRGFRFGIFLIFSCYHHVRSAIASRYEMLE

SEQ ID NO: 1020920 - protein, 361 aa, Homo sapiens
SDTVPTYQSNMSGYLKQQVQLTQIAMEQQVKSYKKALTASLPVLDAEVDIDYKNQAKIAKTLSTQNLGIIRRLEFINDRFNELKTLGDEGAAIIRKTIRELPQLTLIELKSLEIGLGRYLCIDETQSQVPATVRERMGQIVDSAEINVESFSEIIERGNGASLDNRIEVLNSLVEQFSSADQRLLDLHADYPQHLLKPRLERFRLQISEFSQRAIHDLAYLLRGKKAQQPKPGSSRAEPAPRREVIKTRHHGLVMGEPREADSSLVDVKAHMTGKVLATFHEKAPGVWVKRQKAPSQPSAPVAVDLDTSINTGQALLDGEQAETRKYQAFSRKPWHAPQDIQDMFDDHAKALEKAQRYEEA

SEQ ID NO: 1020921 - protein, 225 aa, Homo sapiens
MGQIVDSAEINVESFSEIIERGNGASLDNRIEVLNSLVEQFSSADQRLLDLHADYPQHLLKPRLERFRLQISEFSQRAIHDLAYLLRGKKAQQPKPGSSRAEPAPRREVIKTRHHGLVMGEPREADSSLVDVKAHMTGKVLATFHEKAPGVWVKRQKAPSQPSAPVAVDLDTSINTGQALLDGEQAETRKYQAFSRKPWHAPQDIQDMFDDHAKALEKAQRYEEA

SEQ ID NO: 1020922 - protein, 66 aa, Homo sapiens
MSRQYGEFVGSTTSAQHSAPLGRASHPKLRLVLDVVVAAAGVALLVWGIMVMASPTVSCRGSQTFL

SEQ ID NO: 1020923 - protein, 102 aa, Homo sapiens
MGIERKKFFREMISQPLSLYNERLRGPGALTMSYAAWTVGKGESSASLDGQEGEAPPPLQSPTPHERLKAADNSRGTLLPDIGKVSTTTIVIKRCGLTLITG

SEQ ID NO: 1020924 - protein, 37 aa, Homo sapiens
TKQTDDMILLDDNFASIVTGVEEGRLIFDNLKKSFAE

SEQ ID NO: 1020925 - protein, 130 aa, Homo sapiens
YRVNVQHDETYNLLKDYLDWALYRQLRLKHGLSYGPWVEREVLGGVGFLSLNADLERENLPEAEQVLQDLKAQLLKDGLDPTVFTRLQQAAIARQAWAVQGNSALADYYWSAAGDYSNERFSDPVKRIKA

SEQ ID NO: 1020926 - protein, 204 aa, Homo sapiens
LVFLALSSIIGICDLLRKHWVANNLFGLAFSLDGVEVLHLNNVSSVSILLGGLFIYDVFWVFGTNVMVTVAKSFEAPIKLVFPQDLLEKGLEANNVAMLGLGDVVIPGIFMCRCCCGCDIICLKKKYHNNLTFLTPSFGKAYNASGLGPLPSSIMHIFKHAQPALLYLVPCLHRSFRVLVVALAKGEVTEMFSYEESNPKDPAA

SEQ ID NO: 1020927 - protein, 102 aa, Homo sapiens
VHKLGSLSGAAARALAQPPVPFDFDVEFRNVADLDRTIDRSRCGLDPFAVAAIPTMNYSSEAFHSKDDAQCSICLGEYNDKEILRIMPTCRHNFHLECIDVW

SEQ ID NO: 1020928 - protein, 80 aa, Homo sapiens
APSRQIPASRIGTCAAQHLPEREVPRHHRQNRPQRAIFDARTLRFNLGGFAAEHQRAIFGACLNQIAVACPGFAEVGPRA

SEQ ID NO: 1020929 - protein, 79 aa, Homo sapiens
MPTLPPSYNTSEFLRIKWSKIEVDKNGKDLKETTVLVAQNGNIKIGQDYKGRVSVPTHPEAVGDASLTVVQASWQVIPG

SEQ ID NO: 1020930 - protein, 53 aa, Homo sapiens
GTYQVCSVLKEASGGDRDKRTSGRSRLDTLDSKENREHTPDHYTRHSTYQSIA

SEQ ID NO: 1020931 - protein, 62 aa, Homo sapiens
  misc_feature (62)..(62): Xaa can be any naturally occurring amino acid
RYTHQAHRPNPDTHLHHHYGDPNPNTHRHTDPNHDTHHHHHHGDPNPNTHCTQLPTPHHYHX

SEQ ID NO: 1020932 - protein, 185 aa, Homo sapiens
SPRAPVQSGSSRMLQLMNRTYTREWYMAKVDRIKELLPDCGISSDIIAGFGTETEEDHQETLSIMQYSGYDMSYMFFYSERPGTLAARRYEDDIPDEVKKRRLQEIVDLQGELSRQSNLKDLGKTFKVWVEGNSRKSDADWMGRNSQNKVIVFPKKDMNEQLKGSYVMVKVTDCTKTTLRGEREL

SEQ ID NO: 1020933 - protein, 43 aa, Homo sapiens
MDGPERRAAGPLWVRWYEERGGVTRPPSRLSSADRFAVMGHAA

SEQ ID NO: 1020934 - protein, 80 aa, Homo sapiens
  misc_feature (80)..(80): Xaa can be any naturally occurring amino acid
HATGEGLAASTHPVHLIGASIGAWRMATGAMHDAARQFRRLAHDYIHERYEPEPGRRTPSAAQVSRRFSAALDAFSVLAX

SEQ ID NO: 1020935 - protein, 181 aa, Homo sapiens
MIPTLQLGVPTGSVRLGICEFCASPFCYMHMQQKNIVLGTTFFPPFNNGIESFKSWGRFGSCVWETVTDGTVQFPHLMLLCQHKIIRGTFSCGFTQDELPGWILILRISRISSNIKQFHASGTKFASALEFLHCGWLEACLEAGSWRYRSAILVVQLVCGLVPLLLKRGWYLEMECKLTSA

SEQ ID NO: 1020936 - protein, 171 aa, Homo sapiens
MDFKCQLYDLRAELGALHSAWVTMPWFQHYRNVTVGPPENIEVTPGEGSLIIRFSSPFDIADNSTCFFCYYVHYWQTTRNPTGQRAFQKRLHSWVIKTSECLFQSRQLFGTVPLSGVMQHFCQTKRDAPGVIRIDIGEDTMDPRETVSGDNRGNMVPRVPLKFNTPKVEDT

SEQ ID NO: 1020937 - protein, 68 aa, Homo sapiens
TPPHLHWNTDPNINTHHHHQYGDPNPYTHWHTDPNIDTHTPPPATCDPKHHTPTGHTEPLTLSTHRPP

SEQ ID NO: 1020938 - protein, 244 aa, Homo sapiens
DPHMESLSQAKPVARHKAAKPPATATVTPQTPPFTVVGIEYRGGERFLSVAPPGSTQLNQIYLIRPGDAVAGTAWRLNALDGRSARFDVAGTSQTVTVRNRTSFMHSPTTSSKTMKPRNILGFIAGLATFAFAYGCHAASGQLTSISNTQNSEVHNSSQGASQTELAREWGLTPQEWSRFQTVMEGPRGIYSPGLDPLTALGIEAKSEEERRRYAELQVRAERQRIDKELAYQRAYDQAFARLY

SEQ ID NO: 1020939 - protein, 105 aa, Homo sapiens
LEYPPILACSGREVQQKTDRLLKVELRLKDCLAEKAQEERAAQSGACCNSHETIASLRVQSPPVRYVIKTVEVESSKTKQALSESQARSPAPAGPGWLSKSPGCL

SEQ ID NO: 1020940 - protein, 177 aa, Homo sapiens
SRLVGPEIDVILKFRDKIEKMEKDVYAVLQLEAEEKEMQQSEAQISTAKRLLEKGKEAVVQEPERSWFQTKEERKKEKIAKALQEFDLALRGKTEKEEVYEGCQKTRGTMTAAGTGLSLETPQGARMLSLTRLRERSESPAAKRARANARGSEASEQVLAKQAKTQGNANLVFALTE

SEQ ID NO: 1020941 - protein, 136 aa, Homo sapiens
LLHVPPQSNQLRAASSFNFSSTCFLLPFTMRHHMAICPGKSRHATQHSISQKFNWCHASVIIRHLLRITGHSFDPSRDTEVQEYQLCHETATQPPHRTQSLMAMAHDASTELQKLAAHDRILHSCTWTHVLTLVPL

SEQ ID NO: 1020942 - protein, 242 aa, Homo sapiens
FLKGDIVRKLVTKGCIVLKNRQRFPSSGGVARRILLATQNVRQLRYKSGMVLAVSALLFHYSSLVSLLFIWASWSRWLKTSNVLVVPFVVCALVFLLSLNGDYFLAKLLSYQDSESPNPLSGLSKVGVLLLFVAALFFSKLPNAEKTKLIVLGAGFTISFWLVSAVSYAGSRFLDLISFAFPVAILLTYSRLALKFDTTIKLAFIMAGVLSAASGYRNFVAEEGIGPSPFMPYHFIGFPYGD

SEQ ID NO: 1020943 - protein, 212 aa, Homo sapiens
MSPSFCPHKRSLILRIVLGMVLAVSALLFHYSSLVSLLFIWASWSRWLKTSNVLVVPFVVCALVFLLSLNGDYFLAKLLSYQDSESPNPLSGLSKVGVLLLFVAALFFSKLPNAEKTKLIVLGAGFTISFWLVSAVSYAGSRFLDLISFAFPVAILLTYSRLALKFDTTIKLAFIMAGVLSAASGYRNFVAEEGIGPSPFMPYHFIGFPYGD

SEQ ID NO: 1020944 - protein, 58 aa, Homo sapiens
CCFSDLRIPAASGINDGAIRPEAESPGSAGRQRGPSEQGPMRPGELVDTAGVHLMPLA

SEQ ID NO: 1020945 - protein, 56 aa, Homo sapiens
SSVLPFGVFALLGSLLFWGLCSFGVFAQSAQEVAAGSGKFLFTLSKDPKRAKTQKE

SEQ ID NO: 1020946 - protein, 107 aa, Homo sapiens
IHRVCQENRLLPLPPTASGRLPSGLLAFSQRVVAGEQVAVVRNVIGEQRPQALDVVAPVAVQLTGQAKPGHQLRAVGRHAGPGGLLGQFVESAGGVGDHKHFKAFGQ

SEQ ID NO: 1020947 - protein, 196 aa, Homo sapiens
QTTSFYSRSDKDAVELQVYQRSELRQERKTQKRPRAVMMKNHHQKRHAHNQTVKPKQKKGIAVKKMAAKTAVKMEPVEIDEEEEDDPRPAKKSKVAPKKASPKPTPPAQETEPSDVEDEEPSKRKTGPKRAKTAAQSTKTAEITPDAGSRRRESKRLMILSQKAESEEEEEKPEVAAKARAKVHSTLKATGTAKHI

SEQ ID NO: 1020948 - protein, 74 aa, Homo sapiens
ALAALMNDYLTHQSGRSKAFFIPQSRRVKGNNSEIIPSKVPGGKSHHMLSPAVLWTVLNGALFLYTGRSLDAAS

SEQ ID NO: 1020949 - protein, 80 aa, Homo sapiens
MLNCSRWWQVVDQRAVELGFAVLVETDGGVQLGNVLARQDALEKADEFRWHGYIDHEIGTGEREDDRHVGFVSDQSIDLD

SEQ ID NO: 1020950 - protein, 102 aa, Homo sapiens
RCTAFQTISLHWETPKRMRALQVSALTLKVRLSSISRYTPSSAIRAPVHTQAEQVKKTTSTSRTPALNRLPITHNEEMPTQKANFFHWHETCLSVLTYTGKF

SEQ ID NO: 1020951 - protein, 181 aa, Homo sapiens
TRIVLGPAQWMGRLLNHTVVTDVTLAGEQGGQLNPLIKMKNLGDTLMGTAEVAVATYGGLKALERVTDGNSAVGLTTKFVNFFSGGWDAGKGLLDAMSPFIIMAIFALFLLGATLSIYLPMTPFIIWFGAAINWLVVVGEAIIAAPLWAFTHLGGEGDGMGQRTAHGYLFLLNCLFRWGIL

SEQ ID NO: 1020952 - protein, 226 aa, Homo sapiens
IRRFIGWRPCVVNLYQGAMDAYAVQKSTNTNANPLGDKWSSGHSGTSKVMSHLFAPMQKITTSLVTDVNFNGEQGGQLNPLIKMKNLGDTLMGTAEVAVATYGGLKALERVTDGNSAVGLTTKFVNFFSGGWDAGKGLLDAMSPFIIMAIFALFLLGATLSIYLPMTPFIIWFGAAINWLVVVGEAIIAAPLWAFTHLGGEGDGMGQRTAHGYLFLLNCLFRWGIL

SEQ ID NO: 1020953 - protein, 101 aa, Homo sapiens
DLCLICTPNSSQFQAVTLCLRLAHSRSSPLSQSCVEIGCSASRSSQCLSSGLVFRSLFVASAFRREFLGILFSEDWMLPLYLKVILSGYKILGSHIFPCVS

SEQ ID NO: 1020954 - protein, 164 aa, Homo sapiens
MLISVQLLRALAAWVVVGHHVMQLFFNFEAHNAFEDLLVEKGGAGVDVFFVISGLVIFLASADKALTPWRFMLMRVARIAPAYWFYTVLLAVLVTVMPWMFPDVQLELGHALLSMLFIPAQNPAGYGVYPLLDVGWTLNFEMLFYCLFAVALLVLSGSVTDPLG

SEQ ID NO: 1020955 - protein, 163 aa, Homo sapiens
CCYPFTATRGGRAGREPTNSPNDPPYWTPGSPLLPAISHHHGTPSNSRPELPFTPSSPPRLSLINVTSTHQPLPSIPRTPPLAPDPAPAGHRNHHYSSRLITLRPPPGPTRPPREPTSPHLSPAPNGQPRPRTDLHHAMPPQSPALEVVHHSLPPSIQQQPFA

SEQ ID NO: 1020956 - protein, 69 aa, Homo sapiens
MTWRTREKVESSDLDPSNVDLTQSGDCVLSTKKIVHCKTERVKGSRIILERLKAFLFSLRPSLYRMESH

SEQ ID NO: 1020957 - protein, 46 aa, Homo sapiens
MSHYHPMLCHCGGLDIALSDSKVHGGHDATQAKSQEHACSCLPVKF

SEQ ID NO: 1020958 - protein, 180 aa, Homo sapiens
  misc_feature (175)..(175): Xaa can be any naturally occurring amino acid
MVHARTHPSPLFHPHALSRAVLQNPHPQTYPDRSKGQTHRPGFSVDPAHQALFANLHVAGSRRTEKGSLKHQHVTSPQAAQLVHGQPQVPKRYVNRQPKLRRHLAQPWIATAPPCIAPESSRQTATDSPPRERPQASRRVDNQSSWGERLAANAGPKQSLHLKSQMMLEQLPEPXVRIIP

SEQ ID NO: 1020959 - protein, 56 aa, Homo sapiens
MIILLMGVNHEKYDNSLKIISSASLHHHTCLDTPVASVHPVTTFGICGRELMTQQS

SEQ ID NO: 1020960 - protein, 97 aa, Homo sapiens
MTTSNQSGGEPKFFSPSNLLPLAPKYSQISMAHFTASSRIVCISGQPGIGANTDMSSPPSFPEQVKAALANVDKCLAAAGASKQNIVRNTQYMVPHG

SEQ ID NO: 1020961 - protein, 64 aa, Homo sapiens
MESTYVVGSTSKYGPMNGNWIAANGGAIHGFLFSGRLTIGKQFKQNGDILATLRSSGRTGPDTW

SEQ ID NO: 1020962 - protein, 80 aa, Homo sapiens
MSQVVDAGTARRVSGSFKLPDGTLLTMGGKTGTGDNRIESFGAGGRLIGSRSLNRTATFVFFLGDNHFGTFDGVHLMPLA

SEQ ID NO: 1020963 - protein, 91 aa, Homo sapiens
SVEVVLAGVGQVGTTTLYPTAVISPGNDGSPIGTLTVNGNLTFGESTIYRVHADPASTASDRIHVTGVAYLDGSVAHVGPEGNYAPRTSGY

SEQ ID NO: 1020964 - protein, 87 aa, Homo sapiens
ARFPSYSTPNFPALMTLPLVFVEHRQLGGAAAKGARVNYLRNLWVDQVRPLPGIEVLTSDDPRLYCGITAFKFIGRDQQMMVETLCR

SEQ ID NO: 1020965 - protein, 53 aa, Homo sapiens
PQQLYVIDSSTRVQSVETKVTKWSETQAPRGRGTPARGSSLKAQGRLEEPCVG

SEQ ID NO: 1020966 - protein, 121 aa, Homo sapiens
  misc_feature (18)..(18): Xaa can be any naturally occurring amino acid
ARPDGPCPQCIRLMPPSXEVKWSECFSFHILLVFFHKYNFHLLNIFKDSPCYTQRNPNSPSGPQSSQTLFASGSKLASASEKGTVIRVFSVPDGQKLYEFRRGMKRYVTLSSLVFSMDSQL

SEQ ID NO: 1020967 - protein, 145 aa, Homo sapiens
  misc_feature (18)..(18): Xaa can be any naturally occurring amino acid
ARPDGPCPQCIRLMPPSXEVKWSECFSFHILLVFFHKYNFHLLNIFKDSPCYTQRNPNSPSGPQSSQTLFALFCLHAFPWVILFSNITLCIILGSPEKEQRDRGRDIHIERDRLICCKGWLTWLWKLRSPGVCSQQAGDPGQPMI

SEQ ID NO: 1020968 - protein, 169 aa, Homo sapiens
LVHAGLEDLDFFPNMWIDLEDLDLVEDVDLFWKTLTDWKTWISFWKTLIDWKTWISFWKTLMTGRSRFFLEELDLLEDLDLVEDTDFSGRHGGHVEDVDFLEDMACLEDVDWQEDPNDPEELDCWEDAGFSGRLGGYWKTWIFWKTWIFWKTWIFRKTYMLEDLEPTVD

SEQ ID NO: 1020969 - protein, 66 aa, Homo sapiens
LVHAGLEDLDFFPNMWIDLEDLDLVEDVDLFWKTLTDWKTWISFWKTLIDWKTWISFWKTLIDWKI

SEQ ID NO: 1020970 - protein, 93 aa, Homo sapiens
FKIHLELCQTQVRWGGRSSTKSKMAASRRLMKELEEIRKCGMKNFRNIQVDEANLLTWQGLIVPDNPPYDKGAFRIEINFPAEYPFKPPKITL

SEQ ID NO: 1020971 - protein, 58 aa, Homo sapiens
ESTRQPGWQRCRLVPFFSFLPWKAALPGDLLLALRDVQMGTINKGTLPFLSSSQSALP

SEQ ID NO: 1020972 - protein, 32 aa, Homo sapiens
MREAVHRCASFMDCARIQVVLCSCVLCIVCAV

SEQ ID NO: 1020973 - protein, 59 aa, Homo sapiens
SAAHMPPEKGKEHARFVDRQVFLHFGHLCLHLCNKRIGAVLHVEDLAQVAQVLLRVAWY

SEQ ID NO: 1020974 - protein, 56 aa, Homo sapiens
ELPEHQVIGVFIFNEEYALVTDSQLISEELDANCGGSGTILAVFHSIYGKSVEGSL

SEQ ID NO: 1020975 - protein, 54 aa, Homo sapiens
IGHRSSHNNKRDGPMQNSTQAANAWRILFLLFLANLFNFFDRTIPAIIIEPERP

SEQ ID NO: 1020976 - protein, 119 aa, Homo sapiens
SGTSTVVGVAVGWGEDRAQISRGACRRRALILGRRSSGCVPGRCAFIDVFIPSSGTGDYCGSFESNLAMGLLQICGGHDVFFDGGDRRRIDDGGRWRLLAIWGITGSRVLNEIYVFLRG

SEQ ID NO: 1020977 - protein, 185 aa, Homo sapiens
VNTICIWHCYELDSAVLEFAGFLQRRRSGCYRRSCGNDTQLWLFYPAIAAKKGMMPLSQSTTARTLKHTRAITIEAFSRDDGLWDFDARITDHKERDIQLASGTRPQGVALHDLTLRVTVDLQMNVVGVAACSDAVPYPGYCESIDPDYKKLIGLNLMRQFRQGVKDRMSGIQACTHLTELAQIM

SEQ ID NO: 1020978 - protein, 44 aa, Homo sapiens
GTQRKARTCWSLCFKRPVDGDRDKQASGDAVLTPWQHWTLRAHN

SEQ ID NO: 1020979 - protein, 174 aa, Homo sapiens
MSFPDFFFLSLSVLLGRIVRYLMRSREIILVSATKDNLDVMWTCLWRVRPGRYPGKQGVIKLKYNGDFFIANEGRRPIYIDGRPVLCGSKWRLSYNSVVEIASLRFCLPYQPGPSIALIRAEAAKIHHSDGVVAGLSGPSPACFPCHSSPLELGTQAQWKNLGRWEAQHAGQLI

SEQ ID NO: 1020980 - protein, 124 aa, Homo sapiens
MSFPDFFFLSLSVLLGRIVRYLMRSREIILVSATKDNLDVMWTCLWRVRPGRYPGKQGVIKLKYNGDFFIANEGRRPIYIDGRPVLCGSKWRLSYNSVVEIASLRPDEGNEVLVDKEDDSGILY

SEQ ID NO: 1020981 - protein, 132 aa, Homo sapiens
KQLIHDPGQEPGLRAWWLLSVIPVLWEARQVDHLRSGVRDQPGQHGETPYLPKIQKLIGRGGTGHTVPATWEAEAGESPELGGRGLQRAEIAPLHSSLGDRARLCLRKKKQWLEWPYGYLPDLRGKAFSCPP

SEQ ID NO: 1020982 - protein, 64 aa, Homo sapiens
SDRPKVPLKLIDDPIGAKTISSYPALKHKPASLQVKGFVSSSNARLCQTSLQFISIYLPILSSY

SEQ ID NO: 1020983 - protein, 51 aa, Homo sapiens
MIRIELGTLIRGNVQKNSDRISACSSSIKDMGQHSHNTELVLLTRPLGPYR

SEQ ID NO: 1020984 - protein, 321 aa, Homo sapiens
MRLKKTEREQLRLKYRWPLSLCEELCLMGNRWHEDQLEPIIRQVDKPTERPENHRLDNMMPACAPCNRSKGRQELEGWRNWLAGHVNSLNEYHGIYRMAKAFGLVVETAAPVVFYFEKCQAGLRMKALTIRQPWAWLIVHAGKNVENRSWRSHYRGRFLVHAAKGMTRREYEEAKAWSCACGAIEIPAFGELDRGGVIGSVELVDVLDHSDSPWFMGPKAFLLRDPQPLPFVPLKGRLGFFEDQPLMTEIDELQEERRLCSICDDPMIEGQAFHGIRQAHWDCAQQAPAETPAQGFICSCGNRGRGCYGGSPAYSLTPTPI

SEQ ID NO: 1020985 - protein, 69 aa, Homo sapiens
PHSTEKASTLPIGMELGNVEPKEIARTPVCLEQEEYVESRSGYADQHHLVIYSASIDEALSMLPFSGGV

SEQ ID NO: 1020986 - protein, 54 aa, Homo sapiens
NNKKQHAHTLLGLALLGGLMTTGKCAGGRLLHANLRCAWLGARVWWRFIVQERP

SEQ ID NO: 1020987 - protein, 153 aa, Homo sapiens
WLTLVGSLLLQRFRKQAEEIGEKLHRTELATQEKVTLVQTLEIQRQQSDHDAERLREAIAELEREKEKLQQEAKLLQLKSEEMQTVQQEQLLQETQALQQSFLSEKDSLLQRERFIEQEKAKLEQLFQDEVAKAQQLREEQQRQQLAPELAAR

SEQ ID NO: 1020988 - protein, 74 aa, Homo sapiens
VLVPELSPSPRPPNCLASLLPPPSSASCFCRLRPYHPERARSRLISEAKQECEDSLGELLLTKNIAIIVGQKQE

SEQ ID NO: 1020989 - protein, 56 aa, Homo sapiens
MAASCFSASCFCRLRPYHPERARSRLISEAKQECEDSLGELLLTKNIAIIVGQKQE

SEQ ID NO: 1020990 - protein, 100 aa, Homo sapiens
CVCQFSLPGMQLHLLKVFPGSPTADHFPPHLHSLFPLYFIFLQITSTILPSASCFCRLRPYHPERARSRLISEAKQECEDSLGELLLTKNIAIIVGQKQE

SEQ ID NO: 1020991 - protein, 43 aa, Homo sapiens
TPPEKVSFHKQTTTQENDHHQLVTCAHLPTPVSHQGTPSPVAW

SEQ ID NO: 1020992 - protein, 38 aa, Homo sapiens
VGPCILYGEAWLMGQDSALSTAFSLTLTGQERQREGRD

SEQ ID NO: 1020993 - protein, 64 aa, Homo sapiens
AAPMLHSRFIARTPLFREEIGAFTTSEFAFWTNCNEPFFTISWITRGASSADGTRCAGLAGGRE

SEQ ID NO: 1020994 - protein, 131 aa, Homo sapiens
IPVRVSSKGTLIPCAGERRQTTPKQVTRRRRLMRCWIPGPSLAVSLVSAVSICVCLCLSLCLSRSACLSLSVSLSVCLSLSVCLSLSLSFSLCLFLSVCLCLSAFLSPSLSLCVSFCLSVSVCLPFSLPLF

SEQ ID NO: 1020995 - protein, 30 aa, Homo sapiens
MGEDCAHLLPSVFFSSHYICPGSSISINPF

SEQ ID NO: 1020996 - protein, 122 aa, Homo sapiens
LPDRTLLVVCGNEQVRFRNTPWGRLCRQLVAQFTAFALRGGDPQRSLVQHIGQEHLAGVLHQGDELTCGRRNGGSHRHGVSMIVADGEQHAAGQAHTELDPIDSATPGRDHGQAIVDIGVAR

SEQ ID NO: 1020997 - protein, 95 aa, Homo sapiens
NHSVPCSSVMLILLHDLRSESGADNLSAADDRFAGSTGPLRQDSDFLCGGKCADIAIRIGGANPQVILTGCWSRDLQFCLIQFFGEVQRMEGWIG

SEQ ID NO: 1020998 - protein, 57 aa, Homo sapiens
WRETLYPNASLLSRTVTQNDTGFYTLQVIESDLVNEEATGQFHVYPELPKPSISSNN

SEQ ID NO: 1020999 - protein, 36 aa, Homo sapiens
MDEVVAGLDGEVVASPSGRSCCATTSSIVICGVWMF

SEQ ID NO: 1021000 - protein, 197 aa, Homo sapiens
HIRMSRTQLDACREVFAKWLDFYQVNSAVMRIAPLTAPGLSLGLDRRSHQQTLPDARYLNLTKMLNVNVGVHTNPRAATSHGCKKSCTYLDLHSSNSAQTALNFMVVGADPRPVFQRGPSASVGASLDEAARAQLERWGAEGVEYPLSPGRADSPRRFALLMGALPSSSAREAAGGAYLYCETQTYWGILAATLAWC

SEQ ID NO: 1021001 - protein, 150 aa, Homo sapiens
SYRDIQVTRPYGYALVGCEALIRDFKQYDNGLLGIRVEGGRRFRVREAGVQKDQLLVADVQWLQELPDQPLGEEDADLLALLEALAEHPMVASLDMGGQAEGQQALSNQLAYLLPFNEADKIDLLQLDDPGQRLDAIQLLLDELQGELFT

SEQ ID NO: 1021002 - protein, 126 aa, Homo sapiens
  misc_feature (63)..(63): Xaa can be any naturally occurring amino acid
  misc_feature (70)..(70): Xaa can be any naturally occurring amino acid
MGQALRKRKPRQSSPDSFPLASRGSAISPPLRDGENYVVLLKTTLPRSQYDYILPQVSFTAVXYHKHITXIFNPTRKLPEQDIGQRSYHCLPLTLAVLLGRYHHDKLISLLLQLTSRLQAVRFLAQ

SEQ ID NO: 1021003 - protein, 192 aa, Homo sapiens
QPMAIHDHIWHLLRTGERQPDFISQLRVQHTSGHRHHLIAVLTLNQEVPSTAPSFWICVTSDPLISPNGKPIMTMTCSNTAFGLIALLLIFGNQAKADGMVPDTSVVIVHEADGEASVSVTNSDSQLSLLHVTLQDIPEDTEPLLVVTPPLSRVDASTSQLVRFIQQNQKPLLTQRLKRTVYEGMPQDRAEF

SEQ ID NO: 1021004 - protein, 184 aa, Homo sapiens
MLTTECTIRPGEQLHVGMDFNISRMAATVHVIRDGLPLLLEEATHLFDTPAMIVELKRRFSGHSITVYPDASGKNRKSVNGSESDHSLLRAAGFMVMANPSNPAVRDRVLAVNAMFLNIDHKRRYLVNTDNCPVTTQVLEQQAYTENGEPNKDGTEDPVDALGYFIVQRFPIAGSYTLANVSNS

SEQ ID NO: 1021005 - protein, 332 aa, Homo sapiens
YRIPGSRSNASVHATCSSSLDITVLLKPRPSCCAHRPPGYLRRGDNPHVQVRHLHLPINVQLKNVCKGYQPTKRGIRRVPAIHQDDAVRWLRGQYVLSNPAAAVGKALTHLKFQIPAGISGERVNQSHRLRSTGIALARAQSHDLYVVGPQRCRNGLQQRGFTGAFGAIHRNKQRTSHTERCIIVQVVQFHGASGSVRLGELASIMGNPIAQCEAGLADVPSPRRQSVIQHPAFRHTSLIPQRPWRNQPLRGLAGFAFKHEVAAFLGKLLAVFHHVESHLSQLLLTTAFNLLSIQHGFSRACVKVLIIGRRHGQPLAKATGRMFDRRYGDHS

SEQ ID NO: 1021006 - protein, 72 aa, Homo sapiens
GEAAVQFLCKETDKEGVFMNLMALIRMFTIRFRMEGAIGVVLLLLGLLGGVGMWSMLRIYDLHQDFIQVHLA

SEQ ID NO: 1021007 - protein, 51 aa, Homo sapiens
LSHARSGILTISSISASLHAASLTSSTAPAPLSCSAARYSPIAAAPFSGGV

SEQ ID NO: 1021008 - protein, 54 aa, Homo sapiens
IGWAQIRCNSLRQCLILNLLIKTRIKPLSFWTLCCILNLLSHNGKSMLQLLVTE

SEQ ID NO: 1021009 - protein, 143 aa, Homo sapiens
RLLLSRARSSRSVSSTPIWNPTASPPRSSQVLIIMAQFGVDTPAELCRNLSLDSGSMTRMLDRLEQKDLLSRKRSELDRRQVQLVLTAEGQRLADMLPHIGAKALNQLAGVLEPGELETLERILKKMLIAAGDPITIQRVGSS

SEQ ID NO: 1021010 - protein, 148 aa, Homo sapiens
NFKSGYLSENVLVALGSLIAEPYSIKHEGPKLVNDLVPNLGGSRQSISWQRYRYLELDLHTENAFQAYDSRGDTCRWLFCFSAFAVTLPGLGPKTWVADAREALQVLEQADIEILYGKHFIIRQPYRWRNSAAGAKETHVYPILSGPL

SEQ ID NO: 1021011 - protein, 208 aa, Homo sapiens
DSIARRQAFQAARGKIGRFLQRKGKHRTDWSMRWASLHRQEIHQQQALCVIEANAPVALIKDLGQQVQTRDDLAELNGKAEVTALLWYLVGKQQQHAIGILTLTEQPGGLFDIARGIADKLRVDRVGHIKLRTPAVSGHEHAANRVDERADAVAAKVRAQGITQGSQVTTISQCGQGTAIFDGLTDLPGGGHCIRIPRLTPLENDPGI

SEQ ID NO: 1021012 - protein, 63 aa, Homo sapiens
CRAGARGLRYLSWRKKTPRPSTLPKITLSSQTVCVDSRPPCISKGKGDKHANFDSRRRHIATW

SEQ ID NO: 1021013 - protein, 76 aa, Homo sapiens
DGQNTTHTEKNEKACITGPNKCSANAVSGDREPLNQDQARPKSGEVRASRATSVLGFGSLMWHPCEAEERVPKRLL

SEQ ID NO: 1021014 - protein, 83 aa, Homo sapiens
  misc_feature (83)..(83): Xaa can be any naturally occurring amino acid
LVEVAQGLFGELAFGLVDHKDVETIHRAVTAKPRQVLHQRMAGAAIAMRRHRHEAARLALERGGDLVCAPGIHLVAEHFAMSX

SEQ ID NO: 1021015 - protein, 65 aa, Homo sapiens
SYRKAFRRSSSTTSMPCRRPVALTSSNGGSRHSIHRNSSRALHRNMPSFGRNRLFRTDAHLACPD

SEQ ID NO: 1021016 - protein, 223 aa, Homo sapiens
MVIKPRRIPLLARITQRAITLFARITLLREGRRTKRMIRLASDDPRFTVQFQRTRAQMIAKGVTVLIIRQLLRRRAFPMQHLHRGAAGLDGDDVQFLAIPIARFQPWYISGLTDQGAGVGLRRAHLALAHAVGTVDVALGVIEAQRALHHMHMAQLVTCIPTQCSAAVQHQQVAVGIEASESQLRSVASRPPRAGSDYCACRRLHTPMLLWPWWISSSNAASS

SEQ ID NO: 1021017 - protein, 105 aa, Homo sapiens
MQRTMQVHCSENDQRQEWSCCSRRHVGILGMLKIPSEEENRSLKADLQKLKDELASTKQKLEKAENQVLAMRKQSEGLTKEYDRLLEEHAKLQAAVDGPMDKKEE

SEQ ID NO: 1021018 - protein, 41 aa, Homo sapiens
TGYDSAQYQIGGQCIAGADQTLTVLQAFLFHNRIEHIGPYR

SEQ ID NO: 1021019 - protein, 46 aa, Homo sapiens
MRILLPSDVPPPDTVPFSLNAVTEQLVSCFFSRSTSFFKNLLEKTA

SEQ ID NO: 1021020 - protein, 193 aa, Homo sapiens
RWLAAPMLVTIFLAHYLLVPAAGQSSVKVFDVAFQLRDNPRDISGLVLVETILGLNDNSCMPECLQRGSSFVLYLQLMDKVKCVPTVQWGYEICYDIQKARLNQAKPRALLNDDDPINEETLWHDSKEMIYSMHGMPRVFLYGLVKMTCYYIKTLTKQFGRDKMPLMDVATTPYDVPITLKMFNGYPSLWNNA

SEQ ID NO: 1021021 - protein, 91 aa, Homo sapiens
AASVLVVPSGQGRLSCKERCGTRRLVCSGQISTVESDTPLRRSDRCVQFGNGWGVRALSLSTERTATVLVFLKPERLGAPAWPSAHAQARD

SEQ ID NO: 1021022 - protein, 41 aa, Homo sapiens
MPLWIETGGELVTRMEHETIVDVHQLARLNVQRPRYAFKRV

SEQ ID NO: 1021023 - protein, 103 aa, Homo sapiens
MLRVLLSALASVELIATTRVAAAPKSRRIFIVLPRKCCARRMPSDVNLLLCGAPRPLHAHQSRGCLVSGGLTLRSSTCCHKRPALTATSGKQETTSHRQQDDL

SEQ ID NO: 1021024 - protein, 225 aa, Homo sapiens
DVCLAQRRGWRRSEKPPMYKQVFCASADLARSRRATASADSLKRRISCCAPRWRFKGVTSLSPQWRLLLMPDVIENIDNLNPENSQRIITSRQRTRHRQTNKHQVRDQPSLRRSIPDQVGIASSEEDREILPPIASRQLELSQHETSKHERTTTLDGLYGRATWRETLQRPLSGRVVVAYLASMGSQLITHKRHTRKNKTTSGSYPLVGSVTKKQVSVHQITYAL

SEQ ID NO: 1021025 - protein, 247 aa, Homo sapiens
QYEMEGGKNFPALTAGPESRRLIKPTVTAVTPPADGVILSGGKTDARDCINFTHEEMAKKLGRAFTWPLLNVESGQTFKVTWAYTAPHTTRGYRWLITKDGWDPKQRITRAQLEAQPFAEDFYAQVPYYSHAGELKAKVDHEVKLPTHKKGQHVIVLMWIVANTGNAFYQAFDVDFKEARAVKPTRSEGLEHVKIDFTSLQSPLNDAASPMPSIAGKKILMGFWHNWPAGPSDGYQRGQFANISLVD

SEQ ID NO: 1021026 - protein, 182 aa, Homo sapiens
MAIPITVLDCDLLLYGRGHRTLDRFKLDDVTDEYLMSMYGFPRQFIYYLVELLGANLSRPTQRSRAISPETQVLAALGFYTSGSFQTRMGDAIGISQASMSRCVANVTEALVERASQFIRFPADEASIQALKDEFYGLAGMPGVMGVVDCIHVAIKAPNAEDLSYVNRKGLHSLNCLMVCDH

SEQ ID NO: 1021027 - protein, 59 aa, Homo sapiens
SRSLFLRFCFLLLPLPASCFCRFLLLPCKLAASCFCRFLLLLPASAIHVRCDLLLLTFH

SEQ ID NO: 1021028 - protein, 51 aa, Homo sapiens
PSTSLIDGQKQEAAEAGRAEAGSASCFCRFLLLLPASATHVRCDLLLLTFH

SEQ ID NO: 1021029 - protein, 169 aa, Homo sapiens
KPPPPGVVMGPSDYTLLVAVGLGGPGARRRLIFSLLCHPRWGGREVSDSSFSLALLFPKPPWPQYKCGELSASSPEFCLKSGPPALVWGTMGHDVVTTQSCLGPGAPKAGATSGYRGHGVPSQFEEGPLFACVPAVPVPVPECGEVSPPEFLCRALPSVPVLAPSAPHA

SEQ ID NO: 1021030 - protein, 51 aa, Homo sapiens
RVAEHFIPPRSKAAVRSMLQFEDVAVVGLPAESGNESVVAAILPRQGRPVT

SEQ ID NO: 1021031 - protein, 137 aa, Homo sapiens
VEHRMCTIKSHACANAWMTFWRIEAKSRSASASVWLPIGTTLPVSKDNAGHNRSIRFSGRQDGSNGKWTGRQYYGPFIDTAHRFGMVELFRRWLGVSDDEIRIQTVSRYLNLVSRSGLCYLLNFSLMRVEEAGTCVD

SEQ ID NO: 1021032 - protein, 96 aa, Homo sapiens
VVDGRENGCWIILAEFLEEPLGCALIHTPSLGDLRQRPIDVAAQRIIGELQLSVEHISYRFAFKHRVVVLPVLLLVLRVEFTPELLAKRSSSNKPL

SEQ ID NO: 1021033 - protein, 47 aa, Homo sapiens
LPARELTLDLRSAAGIMEIKRRGQSVIGYPALVDRGAHCDLDVFDDP

SEQ ID NO: 1021034 - protein, 113 aa, Homo sapiens
TDIEAGAVAEAATLWKADAEGDLGFRERLVDRLKKGKRTDVWSNRLKPYPLTGGPTSAARSLDQPQRCNSWELRNCRDGDSFILLFFFTFLLVYKYRAIEGYRKDKFLCSIML

SEQ ID NO: 1021035 - protein, 50 aa, Homo sapiens
MLDVTQNVMFRKVLNPQSRSILQGPGYRKVPVDNNRVHCHDDQHNHGRGF

SEQ ID NO: 1021036 - protein, 52 aa, Homo sapiens
HGGPPRTEKVIPFPCLVIASARSLLTVDHNNFYRLSNCKLALVSNSSFSGGV

SEQ ID NO: 1021037 - protein, 35 aa, Homo sapiens
EQVAASVSCLFQLQSIHCYLVNSTSRGISIPRSLT

SEQ ID NO: 1021038 - protein, 131 aa, Homo sapiens
DSCSSWEMPSSSDSPDSSLMKLEGNIPVFPLRTPSHHPSSTFSTGRKSFSTSIDLGLSLIGLSLKMSPKPTPLTFLGWIAAVATVPLAPSDLVLLESPPSLSEPVVSLKLILDSCSSWEMPSSESDGRCIL

SEQ ID NO: 1021039 - protein, 182 aa, Homo sapiens
DSCSSWEMPSSSDSPDSSLMKLEGNIPVFPLRTPSHHPSSTFSTGRKSFSTSIDLGLSLIGLSLKMSPKPTPLTFLGWIAAVATVPLAPSDLVLLESPPSLSEPVVSLKLILDSCSSWEMPSSFVSPDSSLMKLEGNIPVFPLRTPSLLSFLYLSSQLYDVANFQLKFIVTLGQVAECHLAK

SEQ ID NO: 1021040 - protein, 113 aa, Homo sapiens
MPGADISRGPIIMKKTKTRGGEKVGGRLWNWRPWSPNKNTGELRDPKKASPQRWASGQEIATTEGGALTQQSYVSQKEPHNGSGNSRKYNNTKCFTNTQETQGHSRGHNSTHA

SEQ ID NO: 1021041 - protein, 147 aa, Homo sapiens
GDLAGSLTRVISPWGVSSNTDTGLGLGLRRHCPVASAHTLAQAIRARIKMKAMHAGSKRLKGMGEIKSRPQLGVSAAYNLGGVIIGATLEHALEEDKHKETGKAFTHLELSLGTNLYEGRYGSVDAAINSHFGDRNYLQTWYGVTAD

SEQ ID NO: 1021042 - protein, 74 aa, Homo sapiens
ELGTTTPPEKVPDRDVFGRDQRIPDRRVVLALILRAGPRTADGAALGRLPFPVLAREDIAGWSISLIGLLRWLG

SEQ ID NO: 1021043 - protein, 35 aa, Homo sapiens
CASHRRMQTCPRCQPFPRSGPILLVTWPSGCIPTE

SEQ ID NO: 1021044 - protein, 51 aa, Homo sapiens
PRYEMETWKISSNGHGDWSRGTLTNQVSRVYNDIGGFRICHHRTISQQRFL

SEQ ID NO: 1021045 - protein, 82 aa, Homo sapiens
ADLPRGAPFDLQVLETFGVSPQLAARYVESGWLVRIGHGIYAFPNDNFDVTGALRFLQQRVAGLHVGGKSALATQGVRDTLS

SEQ ID NO: 1021046 - protein, 83 aa, Homo sapiens
PPRQSSSCASSRPSGQRTSARRLGEVTLERVRPSAPGLSLRVTQVGREARAAGSSTAQSPEVLHGFEQQHAVVLEQDLPRCQR

SEQ ID NO: 1021047 - protein, 56 aa, Homo sapiens
YRVDTLATIRLALAGLLALAALPALALEPFVASYQAWHEGQQLGTATLQAKPTGGN

SEQ ID NO: 1021048 - protein, 207 aa, Homo sapiens
DLERSVTHSADRKVPLFMPLRGKLTGAGITANGIYTVVTCYTAEKGPGLRSTAWGSMDSEATAATNALEHEADIAKARIGLGHANISTTKIYDRRQNRPEDSPTYKVRVLENHDDSEAPLGYRDSVRACASTSLLMIVLRCRLIQRSVKLIRRDGFPSGTKNPPIGGGMSKTGRLYRSGPEALEAKRRARQKLEPYRLLSHTDIPSV

SEQ ID NO: 1021049 - protein, 46 aa, Homo sapiens
VFHQSHSQHGIRATSATYTTAHGTAWILNPLSKASDRTRTHIVQRL

SEQ ID NO: 1021050 - protein, 124 aa, Homo sapiens
MQDATQKLRIEALLKLHGANTAQVWESIDRNKGSVQHLPFLSTVERACYKTRDELNPLLALKAIETKDIDRQLMAMRYLLLGLMQDCPEYKVALQVLEEAAPSVVALSNVQHAIWTCLATRPVS

SEQ ID NO: 1021051 - protein, 134 aa, Homo sapiens
MAAHCATCKVDHRRRVVLTVDAVDHWRLDAGGRGIVIGGQAQIIVAARASGAVLAIQGEGLQGVQIEYVGNACAGLSRNGRGSGGTVGLTVVIERALVDDICLFFQVAGLVEVQLVPACGGDAGGSGHQQGGGK

SEQ ID NO: 1021052 - protein, 79 aa, Homo sapiens
KPVSRIKHTDPAISQRFAPQMKYAFAFLQGARPMLLSALAKTMQLISLKLRYSEQSVHVIVVIPYTLVFPSLTVHSIYA

SEQ ID NO: 1021053 - protein, 127 aa, Homo sapiens
MFTKLVLCRRVRRGLGAKRPSWLREHGCGLGAEGLPAPNPASPRRRTRGQCDSGAGNPQQSSRAHVRHNRGRERCLTQDPSPVCDLHDSSWQHWILNPVSEVRIEPATSWFLVRFVSAAPQWELRKT

SEQ ID NO: 1021054 - protein, 118 aa, Homo sapiens
SRIPCSTNVLDTLDGQSEDYEQARQHLMTIAVFTSEPEFQVKAIGYLQAQLALNEAGVNEELVPFTSKLSPVLEQLPIHAPPPHTSDIADYQQIVEMSDSMIKRLDYAQSRFTFGGPG

SEQ ID NO: 1021055 - protein, 241 aa, Homo sapiens
RKERPQYSAQAKRQAYLDTLDGQSEDYEQARQHLMTIAVFTSEPEFQVKAIGYLQAQLALNEAGVNEELVPFTSKLSPVLEQLPIHAPPPHTSDIADYQQIVEMSDSMIKRLDYAQSRFTELRKFGPAGFDVIRESKRKLPRYMSDDLRALQVTLARHLCLAPESLATEPHAWEMLNDTLDSADVAVQTLRDTLDERSEYRLDERIDALSNLVEQSSSSMSAEGLSQSLERPGTRTPGGGP

SEQ ID NO: 1021056 - protein, 225 aa, Homo sapiens
YRNRSTDAHVAAERRDAVERSMTHRMYGEHRVESTYTSASIPGRYRFRNEFLPGRWRLMENYRAPVEGPNATDVTWHQYEMISRHNNFYGVLPQAIVRWNVQNNEALLATQQQEGMLERFLASEGNGRSTQRIMTAFGLRATGITRQEVYDYQLGADVDIIEVHVEPQPVLEPAPMVRSPSLEALTRAVERDLRRAARNPVSRVCPSMFGETCIESFKVAVPDVP

SEQ ID NO: 1021057 - protein, 45 aa, Homo sapiens
APRGSYAPYLLVFQAIFYSLFHLSFACAQLTMIYILNHYLYDLNH

SEQ ID NO: 1021058 - protein, 71 aa, Homo sapiens
HLRIGARLWSGLALNDPGAFYIFRNGQLTPLGQPNPQINPATIGKTELVYYKARDGLDIPGFLSKPPAEIY

SEQ ID NO: 1021059 - protein, 62 aa, Homo sapiens
ELARGYVYGGQACRQHGGLPGASADQPAWTCACMRVMRHVFVCQCVCRQAHTCVCLCVRHNR

SEQ ID NO: 1021060 - protein, 35 aa, Homo sapiens
MLTPENTLRPKGLTLKPSTLALNGWLTVEWHYKFR

SEQ ID NO: 1021061 - protein, 122 aa, Homo sapiens
MYDSVWPYLFSLLSASQCFCASSLKLLLRMLGMHAAPFRASLAVQHPGLLLLQLPVAERDGPVCPGARKPPVSSGTAARSASRSCRKASYSSRVRLFLSRKVLLELRELDPLPEPEGPRKVK

SEQ ID NO: 1021062 - protein, 111 aa, Homo sapiens
TGPKLIVLYLYDNYSYDPLARVDGTGKHQCVRYYHNDLNGLPEYLTETDGLIVWQARYEAWGAPLEEVREAYFIEEQNLRFQGQYLDRETGLHFNTLRYYDPDVGRFTTPL

SEQ ID NO: 1021063 - protein, 131 aa, Homo sapiens
MAVTKQCRTHETIAFDVRFADGAKFAVVENRVARADHVDVRFNRFIVRHGAFLVLVDRRNGLGDKKKSTLQQRADVTSNNKMAFEQSAVAGHEQDGTLASMKTRKLLCQGLTFSSRLKESGISPAIADIVV

SEQ ID NO: 1021064 - protein, 130 aa, Homo sapiens
RAPCQTPPTSISKHVAVTHGLGIVIGIRNVLTEEISDIAGYRPIVGLGRVGQKDLHISATHPDDDVKLVIDGQHTDSPSITGQTPQLGDELIEVISEHRFHRNCDALTVIVVEGYYKVDLILAGVLEIVV

SEQ ID NO: 1021065 - protein, 96 aa, Homo sapiens
MHSKRLTYGSNRVFDFLVLWILPVGLLLLLSALFFVGNRNVLHRIVYILFSVPTLFLLCMRPREFKDLLREPWHRVPGVLRLGVDQSAPEPAPRDY

SEQ ID NO: 1021066 - protein, 244 aa, Homo sapiens
ARKLIVLMAEQEHGKRQRFLRRYRDHIKKAVEEAVSRRSITDMEHGEQISIPGRDIDEPVLHHGRGGKQTVVHPGNKEFTTGEHIQRPQGGGGGKGPGKAGNSGEGMDEFVFQITQEEFLEFMFEDLELPNLVKRNLTGTDTFKTVRAGISNEGNPSRINIIRTLRSAHARRIALSGSSRAKLKQAKEELARLKREEPDNFGDIQEIEAEIEKLSARIHRVPFLDTFDLKYNLLVKQPNPSSRL

SEQ ID NO: 1021067 - protein, 217 aa, Homo sapiens
MTNDTFLDTSPGRSRYLERTIIALEDRLGLTLMDRFPWINLSKAPGPMQWSSRTRQQLNVSWEPCLWFARDPILCKADNRRVLRPHTERHAKLLSQGGEHRSTSYGDRAYRVRPGSFGGITNGAIPKNTLQIGHSCARGREHRKALTSLGLTQHGAGWPFAVPDFFIKFLTEPGDLVADIFSGRAMTGRAAEENQRRWICVESALQYVRGAAELFRS

SEQ ID NO: 1021068 - protein, 121 aa, Homo sapiens
DTIDYSHQNNRRKNKGIGLVQDVIINQSAPVILLLIFYVVYFFKTNFTPIILESSSLCSSKGRAWYIPTNDLESLFSTPKSREYKLCPNGVLNSYRLINMRAREFIGKPTWLSPWGRLDIS

SEQ ID NO: 1021069 - protein, 130 aa, Homo sapiens
FSVQVYQQYVIAPQVNQSLTSVPPMNPATTLPGLMPLPAGLPNLPNLNLNLPAPHIMPGVGLPELVNPGLPPLPSMPPRNLPGISTSSPGIRIPSGIIPLGPKKSSFCKQGSRESWLGFPFRAQQDKAPF

SEQ ID NO: 1021070 - protein, 129 aa, Homo sapiens
MTSDGYARYSQAKRLRTHRFGKQHPPEFIAVILGAVAVMHGHRDWNTVSAAMSKVPALQQEREPLMVYVTPDTSAAKLRGDVENLLRRAPMVLRFRLDTGIAFEQARFARSVATEVEHAGVKVEFDSPL

SEQ ID NO: 1021071 - protein, 46 aa, Homo sapiens
MYGIHCVQFKSIAPHCMESTAFSRDPLGHAASNPLHSIGIHVRHNR

SEQ ID NO: 1021072 - protein, 203 aa, Homo sapiens
MGFIEEAPMQTWQITFVDDHGETSVQQFTCEQKPSLEDAAHMIRAKLVPIAAKLDLNDLEGRKPEPTVKILKDQNSIQILDISPSVQTFFTRHTSTSGGGDSFTLLCNRDQRMNAKVWSCQLHACFPAVMLCRGARASRARGFRKHGKSIHRCEEDVFMSTAYQEDISTNVLRRMKEGGFDFSRFHPIEFYAISPDEERARRL

SEQ ID NO: 1021073 - protein, 99 aa, Homo sapiens
TRIGVTSTRLGAARTCNAPASRARNARLHTRAIKEISMNDSSASPAKVLVWDMPVRLFHWLMVLCFAGAYLTAETERFRLVHVTLGYTMAGLVALRRCG

SEQ ID NO: 1021074 - protein, 202 aa, Homo sapiens
FTSSSSMRHFTRRQRSVFSAVLQLDPAHTGGQTLEQRAQTCGHIAQPVVEVVGTRIKQRAALVRVRQARFVAAQGIDAFLVFRLTGWQHPTLVIEVEARLGLGQVSVFSRLRLGAGEVFTQGAGKVTHLHQHAVFPARHVVHPQARRETIVGDVAAWLVQQGADHGLEGFDGGVTHHHLLAFLLGGKLGILLHRKQRRLLAP

SEQ ID NO: 1021075 - protein, 113 aa, Homo sapiens
EDYSTEHITPDKNTSLRQVAGVLLERTDHERADIAAEVAHRVDQGNTGRRTGAGKEAPRQCPEHGGAGKHGKRRQAQRGHLQYWHREPGAAEQADGAQHIERGEMAVTVVQTV

SEQ ID NO: 1021076 - protein, 125 aa, Homo sapiens
ACLANIAHGRAPPQPNPGIANVARFAAAAVCGFSASHSCSFVPTAVAVLTIGVDCQGALRLDVGGVEKIYSGGELSLRLVMILELDCGNSFIKWRVLESSDASVRAEGIAGSDIALIDSLVALPG

SEQ ID NO: 1021077 - protein, 125 aa, Homo sapiens
ACLANIAHGRAPPQPNPGIANVARFAAAAVCGFSASHSCSFVPTAVAVLTIGVADIVFVMSCTEIEVLPFSTLRLPSRICSWPCNIPPGSWEFANVSRSPLLSQGSIPLERLSRVCCCGAPVGPT

SEQ ID NO: 1021078 - protein, 108 aa, Homo sapiens
KDQLESNDCYHWVPGSSQVVEPDREKPVEIQAYFYLGFDPAIQTLSMTPSLILRFRGKANESRCSRFNQRQAGENRGWRQSRRVLRRRVSLTLLIDLDPSRHCPCSIR

SEQ ID NO: 1021079 - protein, 178 aa, Homo sapiens
WRDTRCTGFLNRSAERLVSAGAALESSSAAVASMRLSNGMTLKADPLSSISDGAAGVLVIPSLGLDGMLDANGHEPCGLDARYTDGIALRPVGHAGCPASGTLGLPTSTRAGGRVVRQLYGGAGAGGRPGLLDGRRVTSHWGNWGALLCKAFTAGHRLDPGLQWLPEEGRPTTLPANM

SEQ ID NO: 1021080 - protein, 50 aa, Homo sapiens
WENLVNKDVRSRAHPATPCKARSAAPPAPPSDARRTGAMRSCTTLLPLAP

SEQ ID NO: 1021081 - protein, 70 aa, Homo sapiens
MRGNAYRGHDYGGIVSAKASDYDGYYYEEDYYKCMGCDDNVVDVVVTYEVACCPARSYKEAETVLDSNSD

SEQ ID NO: 1021082 - protein, 208 aa, Homo sapiens
GIERYPTVSSGADTSFDSLRIRGFIASNDFHLDGIRDDSQYVRDLHNIERIEVLKGPAAVLYGEAARDGIVDRVSKVASPGQKSSIEAQGGSNDERSLYATVSTDPTDNISLRLNMGNQDNNSFRDGVSGNRQLFAPSMSWQLTPELNWLVQYEYSRYNRTPDRGIPGVNGRSGDVSRSTTYLITAITYDDKSQSLRSRLAYELNAEW

SEQ ID NO: 1021083 - protein, 135 aa, Homo sapiens
MFSASLYENGRVSPAQLALPTERLEGLGAPLNTIGPTGNLSLSWNHLHFSRDNRMLLWPPGNYQLHLDGNRFPPVTNPALRQILYEFPSSVQHYASLNLMTDRPYDAKRAAVTSPMDIFSFPVKPGHSKGRKQNW

SEQ ID NO: 1021084 - protein, 176 aa, Homo sapiens
QCSTEWYRCGAFAKPVKVHPSGYYAWLAEPQSARSKEEPRLLGLIKHAWLESGGVYGYRKIPDDLRELGEECGRNRVGRLIAGGRGCVLKRAIGGVPGFYGGKPTVASPKPPRAAVQGEVSPNKVWVTDITYIRTYKGELYLAVVLDLSSRQVIGWSMKPRMCSDLDIDAMTFRAH

SEQ ID NO: 1021085 - protein, 66 aa, Homo sapiens
MLEDPEAQRRTGRSRHGQLIFGDNVRMKDPKLPDALTPGQMISAHRPGKKAGPSDALITYPSSVLS

SEQ ID NO: 1021086 - protein, 80 aa, Homo sapiens
MNGCGHSCVVRALSENPYCTRRKTTLHTPKCPYPLVTQVCLDEVVAQQLRPRDLRPSMVIRRVQQQLRPSGLEVFGHSAC

SEQ ID NO: 1021087 - protein, 54 aa, Homo sapiens
MTSNWIYTQADPVIGVHRQYASKEIRKGTVFVNASRWSSPETDKLMDAASSEIR

SEQ ID NO: 1021088 - protein, 144 aa, Homo sapiens
MALGPICYVAAESLLWHNQRHDFFDRNLDQSCSPEQFRAMAEGGMQLLFLVDATGKKNHRLKRVLNRDAFPKELTNKKRFMSERAQRKSNSHKLNEIPEAVILQLGKRSDRDLSVECGISAYFLKQKRLAWGIDQFKRGVYRTT

SEQ ID NO: 1021089 - protein, 90 aa, Homo sapiens
  misc_feature (6)..(6): Xaa can be any naturally occurring amino acid
QSSPIXGFYTLTFVGYQKAVTTDGTKMRLRPISILPASTDILERTIRAAVEQHLFDLQSSIDHDLKNLQQQSVVCNNEAESIHSRWEQDA

SEQ ID NO: 1021090 - protein, 128 aa, Homo sapiens
MPMAIMRIHDLLNLRVWIFCRAAYSETPDNFSSWALAAVPAPQLHMYLSPSRNSLACATVAPPAREQAISIIPTERICILTYPPENKSDFGEDFVTKGPLNCLTAQSDSLDASYQGLSSNSAGIGGHC

SEQ ID NO: 1021091 - protein, 128 aa, Homo sapiens
SEILNYSRYPSIHPIWPKKLATILILRENLHAASETQGSGWGEPYIGYFPSCTAHWADSLKPSKTITWMARDRTGLPNNTMNSAHHAKKTASFQARFYWSNITGGCDSKIPSFPSPGLWIRSGFWLYD

SEQ ID NO: 1021092 - protein, 241 aa, Homo sapiens
ALPRARVSPPGGRKTPRWRLHREHPLGSGCIGTDVRAPQPHTTVALGHAACTPACPLGDTGSLERMSLSGRLGGEKPKMWPKTAKFNLTEPCHGGWGELYLAVCLFRVAQAGTLPTRPTTAPPEGPRWSKPQIHTPHWAQPRSPALANHVIYCLRPCRALGHLAWRLFPHGSQVPPTPGRPFPEPSHGTQPKGPQVHTLLRAVSCASPAPYPRYFVLCLPGSGRGALSCFLSDREINAPEG

SEQ ID NO: 1021093 - protein, 54 aa, Homo sapiens
TLDDPQLRAGDFTPSADVEIMNPDLHIATLEEGGKLYMEVRVDRGVGYVPAERH

SEQ ID NO: 1021094 - protein, 48 aa, Homo sapiens
MVNEQCRARHRALAEHWLAIQLFLDPLKLRLDHRIGVARAGGQVVDVN

SEQ ID NO: 1021095 - protein, 114 aa, Homo sapiens
MESNLSELLNRRLALLGKREHLSLLEQCLHGIEGECLRVTNEGRLAQTPHPEALGAALTSEQITTFFSESLLEFITPALPNPADTLSSLDKIRRFAYTKLGSEYLWSPSNIRCS

SEQ ID NO: 1021096 - protein, 73 aa, Homo sapiens
MTTLLLLTLEDETAARSVWTEVVEISMDEGHNFSIAISLRYLSQSIAFVWYFGVCKNNFVHHDLCHQGVGSPR

SEQ ID NO: 1021097 - protein, 63 aa, Homo sapiens
EHAPLIASGNTSPISDYERRHQRAAVESRFFSGQRGGQAINKCVRPSTLRIHCQRKGPSASVA

SEQ ID NO: 1021098 - protein, 64 aa, Homo sapiens
GSQLETLESLGPDEQGFVVGLAGTPAQQASDIIIALESAVSRLTLRLSGSSRHARASPPASRHK

SEQ ID NO: 1021099 - protein, 315 aa, Homo sapiens
TECSAGRGQELGGQQAARRCLGAEALEQCCLLVGTEAVPDFDHLQGSVEYSGSGVSEGEVVIVKVSDNSGSVESAQRRAFHTVWYGVISAFALDWFCFFGLRLLVAGLLRCWLLSWVQVWEGEIRYLVHRGRSSQGLFFPSQVIPRSQKALAGYSTVNDKKTFISTDAQFLMVQAQVTEVTRLERHLAQDHVAVHHKIPQQAVERVLKGGGAVLIEEEVAYPGKAVACQGQRQQQNQGASADGVRENAYYQGGADKVQASAGAVAMFAQVVRVELGKTVEFLDVFHGHRPSGCCAAHGCAAGSLFESRVISANSQ

SEQ ID NO: 1021100 - protein, 39 aa, Homo sapiens
SGIKWDGGLKNQALVQSASLPEKSKIHQGCYIRATLAST

SEQ ID NO: 1021101 - protein, 115 aa, Homo sapiens
TLRIYKRREDTVNVLTDVLDFDSEDIDGIDNDVGEEQEPPPTGHWTATSSYDIYTGGTPGKENNGDEATERQTPLGKKPKHGHHWHCSKPCHRNTGTGQENNPDGAKEEYNPLCV

SEQ ID NO: 1021102 - protein, 35 aa, Homo sapiens
MTVQTRNHAGQRPKRDTTFKLIKSNATTETRLENQ

SEQ ID NO: 1021103 - protein, 69 aa, Homo sapiens
TTTACSAIETAVNDSSYTINKCIIVDFFSVKYVDTSISYSSFSSKKNFKKDGFDTLTILIILQSKYVFG

SEQ ID NO: 1021104 - protein, 101 aa, Homo sapiens
MSQRMTPAKPQPTLDFHRTGAVQPRPLKRQDSIQRTIGEGQQFLAGDHRHRAAVGNGLVRWRRRIPLRIRRHRRHIIHTLFLRQHYVLPRSPAHRVRSGRG

SEQ ID NO: 1021105 - protein, 201 aa, Homo sapiens
HAVPERVGAKLRTCSGPYMSEVLVVVLAEEDARREGQSSFADVDGIGPACRTISRNQPRLPRTPYRHGDGDEESEQTDTTRNRTACVEDVRRVGIKEEPPFEQAPRVIKPVHLEDRTRANRGVLDSQGSLLSICVAPQTPGDHDADYHSDLAEQNVRPLLDLSSDFSCAGVSLKSVHTGCRRLRNRSGLVPVREPSQDNDR

SEQ ID NO: 1021106 - protein, 76 aa, Homo sapiens
HVVNWTATLVERLRRRYGDRMTIHAGDALAFDFDQLKQPGRPLRIVGNLPYNISSPLLFHLMEFADHRAANNGGSS

SEQ ID NO: 1021107 - protein, 76 aa, Homo sapiens
CVIRDHCHHHAGLVSTVSSANNISLWVEVVGQALQFLLFSWGLVAADHHRGRILPVQDIFAVFQVFPQSRRHSSSR

SEQ ID NO: 1021108 - protein, 108 aa, Homo sapiens
MVRMVPVLLSLLLLLGPAVPQENQDGRYSLTYIYTGLSKHVEDVPAFQALGSLNDLQFFRYNSKDRKSQPMGLWRQVEGMEDWKQDSQLQKAREDIFMETLKDIVEYL

SEQ ID NO: 1021109 - protein, 75 aa, Homo sapiens
CIVQQLRVDQPKEKGEILSMFSSVASLAPTESPALDQLHITQDFNGAPEDSWVEEDYDKCMGCDDNVVDVVVTLK

SEQ ID NO: 1021110 - protein, 82 aa, Homo sapiens
RLQRNFHRVLRERVAMETLTPSELRRPGQPGSCPSHAENCGPEEKIANLGSWNDSQLEFRSFWELIGEAVKSVKLERPVRGH

SEQ ID NO: 1021111 - protein, 100 aa, Homo sapiens
MKFNFIKVDVSDQVARLTLDDADSHNALTEGMQREMMVALESFKERDDVGALIITGSGKAFCSGADLKWLTNQSKSGPCVNPKALQMLDDLANMDVAALL

SEQ ID NO: 1021112 - protein, 119 aa, Homo sapiens
GTGSDATWGLELPKSDLASTLLTPKVAPVDTLGVTRQFALNPAMTRMATLFNTGKAAIQLNVGPLIVPLTRDNYDSTDHKTYPRPPQLFSHNDQQSIWQSSNPEGAKIGWGGNIADVAS

SEQ ID NO: 1021113 - protein, 177 aa, Homo sapiens
SVQAEGVEFDALDSRRHRGVIGHLWWAMRRAMPGNIRKPSKLYKARAVNKAPTARINPLGMGERHLCRTRVPWSMAREFGFEEPWALGNFLQMQDQRLQRRLSVSGGKVGSRCYNLPFAHRAPGFFCAAQHLLTPVFHADLCQVVAANQHAIVGGGQQCGFEQALIVAQQIDRAEGA

SEQ ID NO: 1021114 - protein, 174 aa, Homo sapiens
AIHSYTGVTTVYEVSQLTRKCQFAWLGALPYWSNGIERPTVNDHRNTESLFLAVLALLQRLLGKKTDASDASPIPAYFQKKAEQQGYTLSDGQIRAITALNREAQHLLNGQATRRLYLHGPVWRGKSWLLDGFFQALPIAEKQLRAFPPTSFARMHQGMFLNREHDEALGATLA

SEQ ID NO: 1021115 - protein, 55 aa, Homo sapiens
MGSACVRGWVLEEHLSDGCLSGHIFGNGSFPGMRDFSWDKGPRGGWSAALRTWRL

SEQ ID NO: 1021116 - protein, 54 aa, Homo sapiens
RNYHVLHASEALWSLLWLGQELHWAIPLWLDHISVWHGAPKSIQLIHFNASSSL

SEQ ID NO: 1021117 - protein, 78 aa, Homo sapiens
PGHSTSHREITRVGDRRHMRVICIVDLVDIALVAMGIDGDLGDSARSHKGVFRVSLTLQPVASHVLRGHVHVVASSSG

SEQ ID NO: 1021118 - protein, 83 aa, Homo sapiens
MRSMTLTWRGESGSWGEERRGKREEAVGKVEVYRVESQVRAMGGWKWRPVVGVCERGYVVSVFRSSGGVQNSDGAPLTPDRII

SEQ ID NO: 1021119 - protein, 252 aa, Homo sapiens
  misc_feature (10)..(11): Xaa can be any naturally occurring amino acid
  misc_feature (27)..(27): Xaa can be any naturally occurring amino acid
  misc_feature (29)..(29): Xaa can be any naturally occurring amino acid
  misc_feature (32)..(33): Xaa can be any naturally occurring amino acid
  misc_feature (38)..(38): Xaa can be any naturally occurring amino acid
  misc_feature (51)..(51): Xaa can be any naturally occurring amino acid
  misc_feature (53)..(53): Xaa can be any naturally occurring amino acid
  misc_feature (55)..(55): Xaa can be any naturally occurring amino acid
  misc_feature (61)..(61): Xaa can be any naturally occurring amino acid
  misc_feature (66)..(66): Xaa can be any naturally occurring amino acid
  misc_feature (75)..(75): Xaa can be any naturally occurring amino acid
  misc_feature (77)..(77): Xaa can be any naturally occurring amino acid
  misc_feature (80)..(80): Xaa can be any naturally occurring amino acid
  misc_feature (84)..(84): Xaa can be any naturally occurring amino acid
  misc_feature (87)..(87): Xaa can be any naturally occurring amino acid
  misc_feature (94)..(94): Xaa can be any naturally occurring amino acid
  misc_feature (104)..(104): Xaa can be any naturally occurring amino acid
  misc_feature (108)..(108): Xaa can be any naturally occurring amino acid
  misc_feature (114)..(114): Xaa can be any naturally occurring amino acid
  misc_feature (126)..(126): Xaa can be any naturally occurring amino acid
  misc_feature (129)..(129): Xaa can be any naturally occurring amino acid
  misc_feature (134)..(134): Xaa can be any naturally occurring amino acid
  misc_feature (138)..(138): Xaa can be any naturally occurring amino acid
  misc_feature (156)..(156): Xaa can be any naturally occurring amino acid
  misc_feature (175)..(175): Xaa can be any naturally occurring amino acid
  misc_feature (183)..(183): Xaa can be any naturally occurring amino acid
  misc_feature (195)..(196): Xaa can be any naturally occurring amino acid
  misc_feature (203)..(205): Xaa can be any naturally occurring amino acid
  misc_feature (212)..(213): Xaa can be any naturally occurring amino acid
  misc_feature (216)..(216): Xaa can be any naturally occurring amino acid
  misc_feature (220)..(220): Xaa can be any naturally occurring amino acid
  misc_feature (223)..(224): Xaa can be any naturally occurring amino acid
  misc_feature (228)..(228): Xaa can be any naturally occurring amino acid
  misc_feature (230)..(231): Xaa can be any naturally occurring amino acid
  misc_feature (250)..(250): Xaa can be any naturally occurring amino acid
MLLPLLLLLXXCWAVEVKRPRGVSLTXHXFYXXSKAFXLPGRFGHHPNLIXSXKXIATAKXALTNXAQLPVLKAXSXAPXLAKXPCXTPPTGSXMVFVTAAMEXTSTXAASSCXKTLQRKRPEEKXSPXNKRPXSPAXEIPSEENPERGLEKEHGXEKKKKLIELQAGKKSLEDXVEMLRTVXEEAEKPEREAKXXHQKLWEXXXAAAKAQXXQEXADDXFKXXDDDXDXXVSMTELQTHQEMEPAGGEXLY

SEQ ID NO: 1021120 - protein, 137 aa, Homo sapiens
PPMESADKCAWGSFLELGFRQRTGDVLNAGVPGGFQNVDSRWVDAFQKKELDLALIERSLAHLRKPVSRRKLAGSRAAQADPDGRKAVTAETPFGSVLRGRYASIRTPLNTYSCDVKRSQDDHELFVCSVDDPSCPD

SEQ ID NO: 1021121 - protein, 195 aa, Homo sapiens
WPGLRHVGGVAVEHYLWRLAKQDLAAQRLLEDGGGAANGRIRVGQRDAWRGRGGARGALGGACRGPQDGALGKGQRRHSQGQSGRDRPETAGHGVDPGAVDRRRDSTARVSADVGNMLGCRVPEGGALIRENHMGLVDFIKKQFIDVIEWTESTDGVLAWRYPFEDREIQNGATLVVRESQMALFVNEGKVDVAS

SEQ ID NO: 1021122 - protein, 94 aa, Homo sapiens
NLNNAEQLCRYQCPVLLIRRTKDEIITTTVPEDIIVQPEAMNSLLKLLQHRYSPGDWQRRGLRRWVSGGGWEASFNSWEESLNFISRMGGLKKD

SEQ ID NO: 1021123 - protein, 195 aa, Homo sapiens
TPHRRFKSRNARAAFRLPQAVELDKVNARMRLAKLGWVRVRMSRDVCGKLKNATVYREQGNWFVSLQTERDEELVPRTGTAVGVDFGAVRAGTSTDGQTLVLEARLSKGAARLRYLQRCMSRKQLGSRRRQRAKARLAKVHARVVRIRNDAMHKLEPSAYREHAVVCVEDSTDCDDGHRPARISLSLRSTHIVHA

SEQ ID NO: 1021124 - protein, 56 aa, Homo sapiens
MTSRKCSQEMEPRMCRTSQASIHHIKPTELSSLCACNGNVHIAQRGICVTQRNGRQ

SEQ ID NO: 1021125 - protein, 80 aa, Homo sapiens
VPCWRIVVGWVITEMYGRPAARKLPSAAEVLAICISENRLSCMRAPPLAEKLTKGQPSSSAFSAPRAKRSPTTEPIEPPM

SEQ ID NO: 1021126 - protein, 156 aa, Homo sapiens
RKQNTLKMIYASMQNPQWHERIISPHTLVYTGFRWHVRAYCHQSKQFKDFLLSRIDRTPVVVAIDTVDPVQDQHWHEEILLTLIPNPKLNSSQQALVEKDFGMPDGRLQIPVKKALALLYFAMRYQAAITLAEADDALKYAFGTTTLRYRKAVILP

SEQ ID NO: 1021127 - protein, 167 aa, Homo sapiens
SSWAWQRSSCSDPSRGGKPALALLLIPKLDAKKSQHRAGFGFQVSINWLLGRLHVVRDERDESILLAVGELTKTLQQFAFVQGQLLTLSLRAKGHIPIERTPFDSDSALAWTKVAELRCSCGKFFQPVRKNANQYWHKAFRRFNICHRIDANEMANLRHDAASLQFA

SEQ ID NO: 1021128 - protein, 86 aa, Homo sapiens
MAEQLLTLSLRAKGHIPIERTPFDSDSALAWTKVAELRCSCGKFFQPVRKNANQYWHKAFRRFNICHRIDANEMANLSMMRPLAIR

SEQ ID NO: 1021129 - protein, 79 aa, Homo sapiens
YNAKAIRTCRPAERGVKTLLAVLPQPRVVATAIFHPNLRLQMVGEHDVSKDGMRNTFARRAPCGKKRIHFTDQKIALAL

SEQ ID NO: 1021130 - protein, 39 aa, Homo sapiens
VQQCSQSAMFQCSLRVFVQCPHSVRMQSGAQGSLTHQLG

SEQ ID NO: 1021131 - protein, 148 aa, Homo sapiens
MNSVYIQRAQYLDGQNRQALLLDALANAGAPLPPAVSSQPMSRRNGQLGERLIELFNSPAMSGNHLRPDLRHVRIVRHRRAQGARRPLSRWCTPWLRLVLRVRLDGVAFYTEHRHLFAWYRTPEQASLFKTENYGRDKSGWIQVFDRA

SEQ ID NO: 1021132 - protein, 219 aa, Homo sapiens
WVTLQDRYTVRRIEPPTVSGLNRSLSRRIATAHCQADCNRSLSSGLQPLTVKRIATAHCQADCNRSLSSGLQPLTVKRIATAHCQADCNRSLSSGLQPLTVKRIATAHCQADCNRSLSSGLQPLTVKRIATAHCQADCNRSLSSGLQPLTVKRIATAHCQADCNRSLSSGLQPVTVKRIANAHFSDATYLSDATYFSDQPFNRCTSFNDHALNDTRLTM

SEQ ID NO: 1021133 - protein, 58 aa, Homo sapiens
MRTGNAINQCSPLERFNIYQHTTAQRCTQMVLGYCTITLHTWSHIGTGTHRGRYKCAQ

SEQ ID NO: 1021134 - protein, 207 aa, Homo sapiens
PVSCSASTPGTMATENGASCMPVGRSGDPFVFCTEGMPQHCWVALNPLAGTTMKICKYYNRMWIETYRKICPKAMRMGHWQGKGAPNSNAVCALNAGPWLMRDVCLPFIGLTSELSNRNTIMKNKTLHSCRPAAWALAVGACLLLLGTPARAQWLVQDEKLYKLVKEGIVDKIATSGNGKGSFKKDGTVKDDSHEFHALTLTTKELL

SEQ ID NO: 1021135 - protein, 92 aa, Homo sapiens
QAQEKPCEVGCRVLEELTVVQGNLPQDMSAWPSCGAALNPSTRKPQLEIAKMRSRWWFQQGVSFQDHEILQGDLDFVGHLSGSGPLTPQFEA

SEQ ID NO: 1021136 - protein, 77 aa, Homo sapiens
LLLPFTAISPIPHPLSPIQQPPLSWSYHPPDTTYYTRIPDSPAQAAHFTDLTASETSSPPDRLFTNSSDPPSRDTPT

SEQ ID NO: 1021137 - protein, 108 aa, Homo sapiens
TEAAAARNTGHRHILEEHGHLHLITELSMEDHCRHDAVPRQQPRDDTTFKTHDQQQTRTNFKHHRRPEQHCRQVHRLHITAYSFGVIDFANAGQNKEQSHQHACSDHY

SEQ ID NO: 1021138 - protein, 129 aa, Homo sapiens
MPSPNDTTHIDIAGQQVPVVKGGLYDRFRSNPPLSVVAAELPGVDLSWFKGLQKHKVDIGFESYSPNFYYQNSRVTAVYTADIDKLRALMPPQVLAAVQPLQVWPGRGLIAFTAYTYEHDSLDHSRILY

SEQ ID NO: 1021139 - protein, 154 aa, Homo sapiens
AVQDTEGSQRRCGRRKPLGLSGWVGWCETWHLGRLPPGGQEVRPLGLWWTERWEGGNWHWLSLGKVQPPLASPRHGPKPHVWRLEKGKSQCQSRSESQCAEGSAVAALGKRPKLKGRTANTEPMHHPVSYHPSAGATRDFMTPSADTRSFPDPR

SEQ ID NO: 1021140 - protein, 49 aa, Homo sapiens
WYQLSIRGILGTLSDGPSSPKLAKRRRMCLSPRSHDRYHVTILMWTQDV

SEQ ID NO: 1021141 - protein, 113 aa, Homo sapiens
MLYCNPIDPQDSTDRPLRNRSSPPPPNLIPKPSHPSSPSPSHPSSSSQPWGTSSSNLLPQSVSRGSTPAYPNRFHRHSGVGEGHSPSRGGAHHPLTTCPCQSISGIYTLRPGT

SEQ ID NO: 1021142 - protein, 41 aa, Homo sapiens
MTDSSLHQVLVGKKVAFSSGCVTWTFLKCKPIGLMNLSYLG

SEQ ID NO: 1021143 - protein, 235 aa, Homo sapiens
MASGNARIGKPAPDFKATAVVDGAFKEVKLSDYKGKYVVLFFYPLDFTFVCPTEIIASTNRGKRTFARLGCEVLGVSVDSQFTHLAWINTPRKEGGLGPLNIPLLADVTRRLSEDYGVLENKLEGIVYRVPLIVTRWARVSFAQNHLLSDFACGTAPVDEALRIASSAFLVSQTTIVESLAPRELESLGSMTRLRPSCGLTRLGHYFSQTAVRVGNRIVRLVPLPMFLWLGVPLV

SEQ ID NO: 1021144 - protein, 48 aa, Homo sapiens
EIAPQHGLDSKLVVHKSFQGHRLCLPVPLLLSVVADASPAFCCSQTGP

SEQ ID NO: 1021145 - protein, 75 aa, Homo sapiens
PVSQQLVATHTLLLRYINATCNEIAEIHPGPAPPAISLPTAPPSMIRAQAVPASAPTAVSSCRRIACFLLQPDWT

SEQ ID NO: 1021146 - protein, 171 aa, Homo sapiens
DLEDPRTDWTVLHEILFVEEYCSLFTSCTVQRDRALLMGLGAVIKSSMQIVKVSYSHQETRVKGTSPCGLCCLEYFVLSQFLRATGKEEGSALHKRGGVTSIDSPQTLWAFSINSQVQSFLLQINVTEGCPGLHTFSSKPSLRLEINWFKAPALKLHYCLEVLIVFSIVRL

SEQ ID NO: 1021147 - protein, 225 aa, Homo sapiens
MANRMEGSLGCTVDCLNHRQACISEFVTFEPNRPDEPDTRQRLHPISRDVVALIILGGFVEPQYVPALLLGQHQRYFNHLFSHTALPSVSVSATRSKSWPYWWQLQSTTFVSPTDSHWHSCATSFSYKVASIPSATSARDRLTLRRSVVDGCLYVKVSASPRRRSSFGKTCGLEFGATWAQRQPPYRLAVNELDLIPRNRVTLAVLAFTAANLAVFVLVRIRGVL

SEQ ID NO: 1021148 - protein, 126 aa, Homo sapiens
GRGESPPGSGSRTRCRTHTALQGMSLQVEDAHAIHGNEQMLRLAVTDADALQVERRQTAARRQAGIEKLRGTAVPHDPLDIRKGRGMHRRVGRDHFRQVGRTGQTPLKRLQHEYLVPRILTAHACD

SEQ ID NO: 1021149 - protein, 83 aa, Homo sapiens
CTCSSASLIRIIFAASGVPGIGMVMGEHLAIHPRDIASPGTTFSINFLTMWIFEKCEHQFRPLLIGTWSWCDDRAASLCDHLV

SEQ ID NO: 1021150 - protein, 223 aa, Homo sapiens
SVLGRGLGGGMAAPMYPVRAAKRTAAAARAPRGLEVTDAEGRVEDAEFDSDPGSYPGPSTRAAGRWERQDYPFNQWGRAASKVSSSRPRAEYARPDNQPKSRAGLMTQPRFYDCVKELARMSRGNLRKVDECREKTLVVVEMAEQEGDARKIKQEQFMRKIVANPEDTEIPGGSELLPLSVKDPQDMKNTWRNIEKDEAHKRYLLMSIDQRKKMLKNLRNTEL

SEQ ID NO: 1021151 - protein, 92 aa, Homo sapiens
MPTGEAQAETQAVFELESLADVVVLQFGTGEHRHADPGFDVGLERLTGKFIHKDRRERQAAGACTVITFPIGIGAAPIAGQATDITLHSSLV

SEQ ID NO: 1021152 - protein, 143 aa, Homo sapiens
ARSKIHTDASTEVVKKSVVECDPGRFTQAHSSRKCNTRYWFMISLINSHHFDDIGDSLHSVFQASVEESPFLEKKPTNPSLPPAIGFIIYGSCVSHDFLPFIHHHSNETRLWTVAETPSVGREIFPAYVKRVIATECSNLVSA

SEQ ID NO: 1021153 - protein, 70 aa, Homo sapiens
RIAAGRIGRVKDDFQILDVIVKRWRVEGFDLILDISVNVRNITAKALALVAALEARHLQKQVMVNKAIGH

SEQ ID NO: 1021154 - protein, 212 aa, Homo sapiens
HFYDESKAFTCLDGFGTPSHIDQVNDDYSDCKDGSDETEGDGMPVLMAASTAHNTGYKPLIVSPSNQGQQMVSCAHAAMATGRVQQAASSVRTPAKRRAGKERESLTAVMAEVTREGFRLKKILIEDWKKAREEKQKKLIELQAGKKSLEDQVEMLRTVKEEAEKPEREAKEQHQKLWEEQLAAAKAQQEQEAGVLTAFKELDDDIGRDGLG

SEQ ID NO: 1021155 - protein, 142 aa, Homo sapiens
AVREPSMGGALDQRRQVRFQLFHLRRRQGLDELGEQLIMQVCMSIKPPMEEPPHSGWLENRLFEAGQVAVGIVVDHGQHHRFGRQFGGKPGDGHHVGGGGEAQADGVGAHDAFHHVDAVLARNLEHAFNHIEVEDARDQPNL

SEQ ID NO: 1021156 - protein, 53 aa, Homo sapiens
MGENEFSQCVPDARSPVTLNTSLDDYFAAECLQIFAQVEDLFLYQTSSTKYLT

SEQ ID NO: 1021157 - protein, 306 aa, Homo sapiens
  misc_feature (229)..(229): Xaa can be any naturally occurring amino acid
MEVQKEAQRIMTLSVWKMYHSRMQRGGLLAAPGVCSCLLVMRSARELYLSAKVEALEPEVSLPAALPSDPRLHPAPRSRCPRPETADPLTGDAPCFRSQWTRRRRLTAEETSACCDPAPRQSQPQTTQQQPERRRGRWTGPEQESPSGRTRKKRRERHPKSPICLQAPPAQAEGAYPKLARVLQRRFSGLLNCSPGAPPTAPPAVQGKGRLPPGGQNAQRARAGRGGFXRTPSGACRSPESRRTFARGSIPEAKHPFLLGERHENEKKHSGSKPESLTRDTQKDEHTITRRATKQHVTSHNNTPKK

SEQ ID NO: 1021158 - protein, 124 aa, Homo sapiens
PNRRKKNRLVEKVGAPTLRRHYQVLSRLRIWLSDREAAAFLFIGMTAALLFVVAISQLAMSPAVKAGHIYAVMTYLWTFVTSLDEAPGMVDQLARLKDIGKRVDPGLWGGLSLNETDPPHDASL

SEQ ID NO: 1021159 - protein, 154 aa, Homo sapiens
MDHYDSQQTNDYMQPEEDWDRDLLLDPAWEKPAEKRHSRDGVTPTSGRAGTQIENIEEIFRDGLKAHEWLLEVMLQVNSLSQARARQDESEQDLTCQQGPGFHSQQKAYKVVVHREPEEIVDGNVKMTLGMIWTIILRFAIQEITVEETSAKEG

SEQ ID NO: 1021160 - protein, 40 aa, Homo sapiens
ITQLDARFSEPRLHHCTPAVSNKRKTLSQTKQNIKTPYGD

SEQ ID NO: 1021161 - protein, 79 aa, Homo sapiens
RQQAGLLRRKNENITSSINESWTGFSAIWWVYFNGKRSPAALGYFERRYAISVTLHVISPAQNSCTTRFRTLFLLSVAP

SEQ ID NO: 1021162 - protein, 185 aa, Homo sapiens
MARVGGKARSRTLPCNRVRFLQKRRTKVAHGPSGDLVCGLVAGQHPRMDEVPPRGLPAGVSGEVVGTWVLNLSIASSPSRWVQKRSNPAVAPGRHRVSNIYTEMLLGSGRVRTLPEVRTTRATHITTDIPEKVGATSKSAASRGVAGDALLPVNTAIVPVRRSQGAAFRRRVGSRTFTGHERFTF

SEQ ID NO: 1021163 - protein, 206 aa, Homo sapiens
MRADVDMLKHYVPPKPETAIERDDSALASVLQKVAEALPYPSKDALAYLGGRGISERVAREACDRGILITIPNDPCQAKAFLTEVAGKELMERAGLWKPDKKAPACAFRPLWFRSQSHCAAEFRLMREPREGEKKAMRYGGKSPWIWEGEHTEEYMIIEGPIDLLSAVEMGSKRTIFGLPGCETGNRLVQMMAEERVMRGSDSWFA

SEQ ID NO: 1021164 - protein, 40 aa, Homo sapiens
VRFCFCYSPNLIQIISLTCVYPFYTLVDCLSDLQSLQRPF

SEQ ID NO: 1021165 - protein, 41 aa, Homo sapiens
MAHTCDPSTTLWTRVLARVEKFWFGVFPAATNSYNLQHNLG

SEQ ID NO: 1021166 - protein, 101 aa, Homo sapiens
GCCVTPQPVLSDGMPSCSSPSICRRWGRTWSVVLCLRADESIASVLRRVAMSDSPSGSPINSRFVLAAKAPTAAYIPLPPLPGSTQLTSIQTFFGFTITEK

SEQ ID NO: 1021167 - protein, 194 aa, Homo sapiens
RLLARMVKLNLVRWTLGQTDKREYKREDLTSSTPEFEPYEQWNHRGPPRYPAYRFFPQLTKKTESRDHKKDTYSVFYSDWRIVIVPHYNPGMRDRPALSDDDDRDGEELLEITALEISHELKYNPKPNKRPHGKNKGKKATLRGCAAERRLGMIERPRLVEAIRARRLRLRQDNVTSSAGRQEQGQRQEAESEA

SEQ ID NO: 1021168 - protein, 64 aa, Homo sapiens
MFTINRNTGVISVVTTGLDRESFPTIPWWFKLLTLRRVSTSNSGQSRHTIPPIFNPHVQGQVPE

SEQ ID NO: 1021169 - protein, 104 aa, Homo sapiens
SSITLNYYALLRSSPFQIPTMEGEDKLRSRHESGAIVVKLSVQQREVPTTMHLINLNRGKGGFMVAQKIVFLLWATTRPLFNKESAFIDIPSQPPPLHTCDPCP

SEQ ID NO: 1021170 - protein, 295 aa, Homo sapiens
  misc_feature (146)..(146): Xaa can be any naturally occurring amino acid
  misc_feature (166)..(166): Xaa can be any naturally occurring amino acid
  misc_feature (174)..(174): Xaa can be any naturally occurring amino acid
  misc_feature (176)..(176): Xaa can be any naturally occurring amino acid
  misc_feature (179)..(179): Xaa can be any naturally occurring amino acid
  misc_feature (205)..(206): Xaa can be any naturally occurring amino acid
  misc_feature (235)..(235): Xaa can be any naturally occurring amino acid
  misc_feature (245)..(245): Xaa can be any naturally occurring amino acid
  misc_feature (253)..(253): Xaa can be any naturally occurring amino acid
  misc_feature (264)..(264): Xaa can be any naturally occurring amino acid
  misc_feature (266)..(266): Xaa can be any naturally occurring amino acid
  misc_feature (271)..(271): Xaa can be any naturally occurring amino acid
MTSCPWAGTQGPLSDPIIRQALCAPVVRAEEVRLSQSLLELWRRRGPVWQEAPHATCVTHIGITILNAIEQHLGGWSSRGDTGCGKTTRIPQLLLERYVTEVPRCRCNVIITQPRRISAVSVAQRVSHELGAFLRRMVASRWGWKXRPPSRGGALLFCTVGILLRXCRATPAWXAXSTXIVGGGGMRRGRETQTYLLILLKGLEXXNPGLRLVLMSATGDNERFSRYFGGCPVIXVPGFMYPVKXHYLEGILXKLGKHQYLHRXRXHESEXECALDLDLVTDLVLHIDARGDQVG

SEQ ID NO: 1021171 - protein, 190 aa, Homo sapiens
  misc_feature (3)..(3): Xaa can be any naturally occurring amino acid
WRXNVSGYLSECRWRSLCVLGPHGEQVGGAWVQVGEPHGMSHCGAWRWYVVGLARSLPGLMTDALVADLIRGDETIVFLGLLPLEEDHVLQWSEGQGLGCNPTGHILIRLESDLLALFAPLSVSEDKPHVNVPIGQQVLDGVAADTLLCLHTLSDGLVVAAAQGVVIAQRHSIGVATRHVVSPVFPLQGQ

SEQ ID NO: 1021172 - protein, 60 aa, Homo sapiens
RHEIPPTETSRQVVIFKYPTTTDSGRYQLEKDSDQHQLAVILMTINETPLPAYPALRVAF

SEQ ID NO: 1021173 - protein, 244 aa, Homo sapiens
  misc_feature (76)..(76): Xaa can be any naturally occurring amino acid
  misc_feature (112)..(112): Xaa can be any naturally occurring amino acid
  misc_feature (147)..(147): Xaa can be any naturally occurring amino acid
  misc_feature (150)..(150): Xaa can be any naturally occurring amino acid
  misc_feature (169)..(169): Xaa can be any naturally occurring amino acid
  misc_feature (181)..(181): Xaa can be any naturally occurring amino acid
  misc_feature (183)..(183): Xaa can be any naturally occurring amino acid
  misc_feature (203)..(203): Xaa can be any naturally occurring amino acid
  misc_feature (214)..(214): Xaa can be any naturally occurring amino acid
  misc_feature (218)..(218): Xaa can be any naturally occurring amino acid
  misc_feature (220)..(220): Xaa can be any naturally occurring amino acid
  misc_feature (225)..(225): Xaa can be any naturally occurring amino acid
MNDKNNPIFWSSCEALQGFEVGGTFPCLLNCSYNIKTGWTLFFSFELNLYNNLNAFSRMYQFKGFVDFIKRKIVSXKFINFYLFGQIFRHQLWDTFYTLPSPKGSPFPCATXYQPEWTSGNFFTCSSHSNHDADAPPLVKSLKCCSXELXITNTFKGIVHSSIGHLNEXFLDGFTKILRVXTXSGSKLFGPCKFIFIDVHTNXPGSTSHFTAHXNCQXDXSQNKXGTNRARVQLGSFHSSPITG

SEQ ID NO: 1021174 - protein, 59 aa, Homo sapiens
RLEDSDSTEEAMEKASADNGDEVQQVVGRDGGSCVREVTEHLGKESLRGCPPLCCPVLS

SEQ ID NO: 1021175 - protein, 300 aa, Homo sapiens
LLERGVVQQVKGHYRQAMLRKAMAALEGQDPSGLQLGLTEALHFVAAAWQAVEPSGHSRCFREAGFGGGPNATITTSLKSEGEEEEEEEEEEAGGQQGEARGRARHGNGEAGRQAAKGGGQARAELGGGQQAGGARRVMLHKLHDSKRRKMRRAPRRAWEAEDWAQGVVGGRLAAFGAYGAQEEAQCPTLHFLEGGEDSDSDSEEEDDEEEDDEDEDDDDDEEDGDEVPVPRLEGRTMAYYSHGSKRYLTILPHMMTDVQSTNPPHWNNDLVHVSKEEPRQEDAEYEVLDIKAELTGPRM

SEQ ID NO: 1021176 - protein, 91 aa, Homo sapiens
INCWSLISAAAWAKSMFPPPSISPSQWALVSNQSQSIQNLLISESETGSNNRPPKLNHMNDFPSWKNRFHTYVQGQSTDLWTCFINDQQFI

SEQ ID NO: 1021177 - protein, 169 aa, Homo sapiens
MLRAIELLPVALVVAYKASGLPPTTVLELRIGSQGASSVRAGCVLLGGAMAAHACPWVGGDPADIGPLSSLAPQCPIELPGLASHVATDVPADLTRLRDAAPFSVPASRSPGRSDPDFAVTDTPAPTVRQLPRSPSPLVWAAWASIALLPSGGLRGFPCPASRGPPALA

SEQ ID NO: 1021178 - protein, 137 aa, Homo sapiens
MLRADRALVLSLSSWVQGLPSSSTLRAQSAKAATGFIPCCSCALPCVGAMSRYCLLGAGVESCPVWTAFMRRKCRQCRLRTCLAGRDEGTVLSFLKKRLRKKKNRKQQQQESQITVAVTCWGPAGQAASSASGPGDS

SEQ ID NO: 1021179 - protein, 38 aa, Homo sapiens
MPYVPVAQLKDYVGKELGRSEWLTIDQARINLFAEATG

SEQ ID NO: 1021180 - protein, 49 aa, Homo sapiens
LALISSKRYPGKSTISVSLAVAAIPEGLPIVVTVTLALGVIEWGLLLRR

SEQ ID NO: 1021181 - protein, 144 aa, Homo sapiens
MCAQECFVHLDKLGLAHCTHLWSSCPRAVVPRLPDIAGVWTEPLPGNPYPRILVWLRLGVSWLIPVPTEGLPSDLARSLLDMLATLCSSRSSGVGTRQDRVVCSILGQRAEAMGSGPGGGAAGLGGLVGFVRDVGRGSGQGWGG

SEQ ID NO: 1021182 - protein, 32 aa, Homo sapiens
MGSGPGGGAAGLGGLVGFVRDVGRGSGQGWGG

SEQ ID NO: 1021183 - protein, 98 aa, Homo sapiens
LVTVNKGLVGGQDVYFHTLNPVAARVRQAAALRMREKHVHPLSYDEIPAIFRKAVIATEDRRFWSDPGIDPIGIARSVVVDVERDGYVEALVTWYAAT

SEQ ID NO: 1021184 - protein, 68 aa, Homo sapiens
MSCHIIVVSLYEILNYENYQLRNRMQLIMQRDGDINGVLNESPRRNYSWPSCSGSMTNNLLINDQQFI

SEQ ID NO: 1021185 - protein, 58 aa, Homo sapiens
MLVLSVQVNEEPPVVGGADDLGVLNVIAAAAGKLGEAARPGRPDEPPDIHLSVGGLTS

SEQ ID NO: 1021186 - protein, 69 aa, Homo sapiens
QAIRFNAHAFPHTPCHHMSLRKQVCNDSGDLVVYIDRCKQALVSVLESGPVRKAWIKAKRKAKEGEDGD

SEQ ID NO: 1021187 - protein, 133 aa, Homo sapiens
  misc_feature (55)..(55): Xaa can be any naturally occurring amino acid
MVASGGEVLVGLGQVLGKPFRAILGRGSQWAIRKCEQVLVVDVLRTGARVEVLTXFTGISGQHPGASAIVLKWGGSAGWEVLRPSESDLSGPPWKEVLPHVVASSARADQCGQFGFGLRKLGSQHPRDALSLR

SEQ ID NO: 1021188 - protein, 85 aa, Homo sapiens
MLNKLLVIDDGSSDVKCLFEKWLNEENSFPIHYHVKENGGKHTAFNVALEKARGELFFTADSDDYLTADALQTVNNWVINDQQFI

SEQ ID NO: 1021189 - protein, 238 aa, Homo sapiens
RRCTEPWRLPSHHMLPRIPNIQIHHYPNGIVTVNCARLLKADHHATNGVVHLIDKVISTITNNIQQIIEIEDTFETLRAAVAASGLNTMLEGNGQYTLLAPTNEAFEKIPSETLNRIPGRPRSPERPAGTTTVLKSAMCAEAIVAGLSVETLGGTTLEVGCNWGHCLTINGKAINLQLKDILATQRGDPLLLMSYSSQTHAKDDYLKFGWQSLMCPPGIDLCQTSRARQSIISWKVSG

SEQ ID NO: 1021190 - protein, 266 aa, Homo sapiens
MSLTSMYQEFPTSRQIHHYPNGIVTVNCARLLKADHHATNGVVHLIDKVISTITNNIQQIIEIEDTFETLRAAVAASGLNTMLEGNGQYTLLAPTNEAFEKIPSETLNRIPGRPRSPERPAGTTTVLKSAMCAEAIVAGLSVETLGGTTLEVGCNWGHCLTINGKAINLQLKDILATQRGDPLLLMSYSSQTHAKDDYLKFGWQSLMCPPGIDLCQTSRARQSIILMESERLTLTGSPEILDYKRWRHPSNVDAPYKEFAFGSRLN

SEQ ID NO: 1021191 - protein, 81 aa, Homo sapiens
MKIAECMGAEAGTSRFAMASYSYGGNPNLRAKRIVAIPNDVDVEVGDWVEVSITDCRLALKNKLWKQRPLSLLHPSFLSAL

SEQ ID NO: 1021192 - protein, 243 aa, Homo sapiens
KERHFVTISSPLATQIPQAVGAAYAAKRANANRVVICYFGEGAASEGDAHAGFNFAATLEDAPSSIFCRNNGYAISIAHRLETAICWAEWSFFIDEAPGYGIMSIRRGWLTDVFAVQQRSSKAGPTAALLAVVTRPFLIVGHDLQDRAPQLPVTDSSAYRSVDEVTYWDKQDHPISRLRQLSAEAKGWWDEELGGRPGAKQSRRKVMEAFEQAERKPKPQSQAALLSTCIRRCRPVRKQQESL

SEQ ID NO: 1021193 - protein, 71 aa, Homo sapiens
LEDLNKLLVIDAKTGIRGRKTPTKATHHSTVEQNFRIYKVHEHQHIPEIEQELAERDGEQTPISINDQQFI

SEQ ID NO: 1021194 - protein, 44 aa, Homo sapiens
RACQRVVVMVGAGIITPSGIPDFRSPGSGLYSNLQHHNPTTISH

SEQ ID NO: 1021195 - protein, 61 aa, Homo sapiens
SDDHPGDMYMVVNLLMAILLTVEADSSKLHASCQHSRYDSHRVITIRPRGTDASKFCNSVA

SEQ ID NO: 1021196 - protein, 110 aa, Homo sapiens
  misc_feature (71)..(71): Xaa can be any naturally occurring amino acid
MQPAFAKGSNRRDYVFLNFGVEDSKDVNVNFEKSKLTFSCLGGSDNFKHLNEIDLFHCIDPNDSKHKQKRXTDQTFNVWFTEQGRIVAESWCKVLQTERAKLNWLSVDFK

SEQ ID NO: 1021197 - protein, 205 aa, Homo sapiens
MALFVRLLALALALALGPAATLAGPAKSPYQLVLQHSRLRGRQHGPNVCAVQKVIGTNRKYFTNCKQWYQRKICGKSTVISYECCPGYEKVPGEKGCPAALATLKPLRDPGSRWDPPPLSCTRTATEKLRPEMEGPGSFTIFAPSNEAWASLPACEDDLQYSARGDSYGELPYLPRGVRMMNWESAEHYHTWFKEAYSINPIRTG

SEQ ID NO: 1021198 - protein, 309 aa, Homo sapiens
  misc_feature (280)..(280): Xaa can be any naturally occurring amino acid
  misc_feature (305)..(305): Xaa can be any naturally occurring amino acid
MALFVRLLALALALALGPAATLAGPAKSPYQLVLQHSRLRGRQHGPNVCAVQKVIGTNRKYFTNCKQWYQRKICGKSTVISYECCPGYEKVPGEKGCPAALATLKPLRDPGSRWDPPPLSCTRTATEKLRPEMEGPGSFTIFAPSNEAWASLPAEVLDSLVSNVNIELLNALRYHMVGRRVLTDELKHGMTLTSMYQNSNIQIHHYPNGIVTVNCARCLKADHHATKGEEHLIDEVISTITNNIQQIIEIEDTFETLRAAVAASGLNTMLEGNGQYTLLXPTNEAFEKIPSETLNRILGDQKPEXLLKT

SEQ ID NO: 1021199 - protein, 77 aa, Homo sapiens
MSVEAMQSIEMDEENSASQTVCACYSFFSWSGCCVVSQAVEASYRVRRRRLPVPRGTHTPRPGQSRSMTNNLLGYRA

SEQ ID NO: 1021200 - protein, 114 aa, Homo sapiens
CSGFVFGFSLPSTNASRSLRRHSRRSVSLTAEHHAVQFKLLRVLIGDDIYNVRCGNCQDQSVTIKTMLARFREWMMKEYDDPVSSTKCELQLIFKKGHSVVSPTTRMTLLLLKR

SEQ ID NO: 1021201 - protein, 139 aa, Homo sapiens
MQRDTLLTQDELDFIQDMTHNPQLNLRDAWSSLTVNGGAQIRDLLTRLAAHDQVTIQAQFDNQQLTFPLHLVEDEFHAVHLRLGVPSIFEDGPMIRPWRLALETPVALENIKGYSSALWVHEVSFKGVLVEVRGRVKRQ

SEQ ID NO: 1021202 - protein, 115 aa, Homo sapiens
CQSVVQTQLGSHACPTPAFPESVCPDFTGLPLLQPSPHAHSQITGCTMAVPFPCTFFELKMLFFFGLLNVYMLIPESAPCVLPVSKTQLGYSDVIPEFHLRNSQSCLICSVKTKE

SEQ ID NO: 1021203 - protein, 106 aa, Homo sapiens
DLEDPVGRSLYYARRPRVGGIEGMHRTRIVAARCRSHIGDNAPPLRFACPADGQTVFLLFGDERRQDHDLAAVGAQLSRARHAGGHPDAEAGPPRRQWSTVIDQGT

SEQ ID NO: 1021204 - protein, 288 aa, Homo sapiens
MPFCKTFTGDRMKIVPHLEVSLESESRGFLQLHHGMNGSVQLKYPDCPSVSMHNRSSVLATVTVIACEEPGSYSAACILSEHDTLRTVGKHLHPRLDQVVEGGYQSSMSKQVAHPVVTFRLEDLGTPEVLGLRLVRSISPTVCQGQSIHGDSARGCVIMKTLPPLSEKSLLPTVELAIQRTRDDFWTSWAHSLEILTDADDGRRRSATRTGNTRLDGGVLRNSAPAFGDQPMQHYWAANWSISEDVDRLSSIIWQGSDGRWGQPSAHPEDPVGVERGLPGGPSRHTFH

SEQ ID NO: 1021205 - protein, 131 aa, Homo sapiens
GDRSCGGSRMTPLPLQQFLHPGFTERLCKMAVTSLIFRQPDYDRGLDLHQDQHRLRQRQHSGPGCQRRLSVVAGNQTRHPQRSLPMVPLQGRRHARGAHPYLSLEQRRALVLQACLERLQRRGVLRPYGAL

SEQ ID NO: 1021206 - protein, 193 aa, Homo sapiens
MSLLDDLEPGDANGFDVNWSFSSQLCQCMELAESVLPCAQWCAMAGMQCACMHVDVMCWCVWSWMEVTWASDEADKMDAGPLPRTEVCPPEERPPVVLPLPPPPPSSSAVFRLDQVIHSNPAGIQQALAQLSSRQGSVTCTSVVIQGTSLGPPQGPQGPSPRPPNRYEPQRVNSGLSSDPNFEEPGHGERGGW

SEQ ID NO: 1021207 - protein, 50 aa, Homo sapiens
RAQGAVCSHHVVGESEANVREIFDKDPPSCPLCAILDELDSTAKARGGNI

SEQ ID NO: 1021208 - protein, 90 aa, Homo sapiens
VPPCLARNVVGIILTVLVGRYAIVALNRYLEKQKQTEALPDIERRKELSYDTALARLAKKVCPGCERSVDLTNTAIDYCPHCGICLFDHV

SEQ ID NO: 1021209 - protein, 55 aa, Homo sapiens
MSLIQDKFASVFSNYDVTTQPRPDGGILLTLRNSEGKQVKRSISYQQLHTADQLT

SEQ ID NO: 1021210 - protein, 61 aa, Homo sapiens
PAWRAVGGFLSSWARVLSSPGLYGLTLLVWGRRHVASCCRCSSPLTRDYPPIPWCRLVPAT

SEQ ID NO: 1021211 - protein, 253 aa, Homo sapiens
  misc_feature (3)..(3): Xaa can be any naturally occurring amino acid
  misc_feature (48)..(48): Xaa can be any naturally occurring amino acid
  misc_feature (57)..(57): Xaa can be any naturally occurring amino acid
  misc_feature (61)..(63): Xaa can be any naturally occurring amino acid
  misc_feature (65)..(66): Xaa can be any naturally occurring amino acid
  misc_feature (73)..(74): Xaa can be any naturally occurring amino acid
  misc_feature (82)..(82): Xaa can be any naturally occurring amino acid
  misc_feature (101)..(101): Xaa can be any naturally occurring amino acid
  misc_feature (146)..(146): Xaa can be any naturally occurring amino acid
ESXWFVWVTQMNHIPMHIDHDRNMNWFLTQLQATCNVHNSAFNNWFSXHLNFQIEHXLFPXXXLXXYHIVAPXXYSLCAKHXIEYQSKPLLSAFAYFIFLXKESGRFWLDAIFTNNNSHPAQSGRRGGRLWSQGRGELEGQCHYSXILRGGWVWGHKASDSNSSLLSSSHSSKTQSGGWTQKSLGGKELLGQGCKLFPFSSLAHAGSWWTERTRRVTEEEGPTEPRVRKRFNTKIPLMPGVVARACNPSYPGG

SEQ ID NO: 1021212 - protein, 38 aa, Homo sapiens
SRGSRSSSTRMQAWMRILFPIAPHSCLKPIRVCSVEIE

SEQ ID NO: 1021213 - protein, 54 aa, Homo sapiens
SLLRSREPGCTFLSPHDESVVRYYRILQSEVVLTCELSRVDFPGNLVQGCAEGG

SEQ ID NO: 1021214 - protein, 132 aa, Homo sapiens
VSAGRFLADGQGAVAFPGNPHAVEWKPSIRKGFAILKIAFTVAGNHFVQYQRLAVPVDVHQVALEALATFVEGDDQRVMAFLQHPQRAGDFQRRGEHLGWLRCIFRIKGVEHGSSISRQNTTTRKNRHFASM

SEQ ID NO: 1021215 - protein, 353 aa, Homo sapiens
MARYEAGFGVDTFNPFLLVRERSSAGSLLGLQDADERPPVVPRHEELLTDMKREGVSKVFDVTVPELCCSKTLSSQPLPLFASATTNHLSTCSTFSSLVAKRGVSESPACETVSGIPAKDVPSFTFLAFTNTRGQLSSQPLQPSDAVALSEDAVEQSEVVEELSDARYEPELLPLLQQCQVVRLDDCGLTEARCKDISSALRVNPALAELNLRSKRSWAMSACIAVLQGLQTPSCKIQKLSLQNCCLTGAGCGVLSSTLGNPAQPLQELHLSDNLLGDAGCKLDLEGTPGPQVPPDRGCSWSIAASRLPVENPWSPCLGAKADCKELTVSNQATSMTLRPVLCPGLKDPPAVE

SEQ ID NO: 1021216 - protein, 387 aa, Homo sapiens
AWNVLALGRWGCACVVLVLTWAVKPSSALDSSELRKQSCAQPELASPNPVILDLIPPKKLASLVNGACPVLDEDSNWLPQPGLFVGKVHEELLTDMKREGVSKVFDVTVPELCCSKTLSSQPLPLFASATTNHLSTCSTFSSLVAKRGVSESPACETVSGIPAKDVLFPLPPTQCQLFTSTMSLDIQSLGHPVWSERELTLDRSLSSSLCSSSAKWSGWTTVASRKHGARTSALHFESTLHWQSSTCAANEAGRCRRALRAPGPADPLLQDPEAEPPELLPDGGRLRGPVQHTRQPCPPLQELHLSDNLLGDAGCKLDLEGTPGPQVPPDRGCSWSIAASRLPVENPWSPCLGAKADCKELTVSNQATSMTLRPVLCPGLKDPPAVE

SEQ ID NO: 1021217 - protein, 454 aa, Homo sapiens
AWNVLALGRWGCACVVLVLTWAVKPSSALDSSELRKQSCAQPELASPNPVILDLIPPKKLASLVNGACPVLDEDSNWLPQPGLFVVESVGWSCVCARSWEGVVLLLSIAVSFCPGTTWWDLDCRVPLNAACLGALREDVTSKHKLGMGTYVWPCVKWVCHPVGIGRNIDRKCGPQGTSRLITLGAECLPRPKGCPSRMPIGGETPMEVTFLDRPDVSPEYEPCLLSKDVFRESGPFKERAWVGGGPPPFIYSGNLVCEHMPWFITGTHGNNTPRFLPNGLVPVSLLGGNFGCFVRLIITVAIIATLSHCVQKLCYASGCDHGTSQHESVNDDVLAPECSGLHNRYPSSRDITPLVKGSTRQVSPRITKPLSRHQNRVSWFKKYPPSYYCTRYNSSVTLIDISVVLAPLQYEFATERSPRILNFPRAITILAIGRLAIGLIGTAMVAIEYLSEGE

SEQ ID NO: 1021218 - protein, 253 aa, Homo sapiens
MARYEAGCWCRHVQPVSAGSRTEVVPARSWVSRTPTSVRQSSRGPLVQPTTMSPGSSMLWSERELTLDRSLSSSLCSSSAKWSGWTTVASRKHGARTSALHFESTLHWQSSTCAANEAGRCRRALRAPGPADPLLQDPEAEPPELLPDGGRLRGPVQHTRQPCPPLQELHLSDNLLGDAGCKLDLEGTPGPQVPPDRGCSWSIAASRLPVENPWSPCLGAKADCKELTVSNQATSMTLRPVLCPGLKDPPAVE

SEQ ID NO: 1021219 - protein, 228 aa, Homo sapiens
GWEASCCRGCSDVHVCSPGSGDGKLLRARGGERVNLPGPFGVLGPAGPVVFNAVMPCCPRCLSCFFSLLLAAWLLLLPGPRSWALSQAGAEENDWVRLLQANADVCQMMFVWWELKVTPYDVKPGYDHMECDLARCYGILEHEVPLACQNYNLMSDLVGVDRQFNWTSHFGKRLLGVIACTRRGPAAIEFAKGMSETFETLHNLVHKGVKVVMDIPYELWNETSAEVA

SEQ ID NO: 1021220 - protein, 237 aa, Homo sapiens
ITVKCGDYPTHEHTQSWMALMSSDDKGIVSYLWTRDEGSPAAGEVLNHSDHHPIRFSFRDLVDGKPYIFSRSKCDLMQQGESEHRPGPPVDGEHAGSQVEKQPWLEESVFATINVMPANVRRLTGDVHPARCGVLLGGARIPDIIGAKRLQPGTGEQTNLKDGHFVVQKRCLPEQIFKGHEGGSDAQGVSCGQPEGRLFDIQSLGSLTLSMSAELFRPWHCDSFTKTRYLVTLLAGN

SEQ ID NO: 1021221 - protein, 141 aa, Homo sapiens
PRKQYDYYAQNSKKNKKTSSQMFNKIHLLPQTPALPCRGTVAPGLASLRVGYVTGDLTPVLLYLYTEKVSVRQGPLDQPASRRFITGEWFCWRSTLLGPICLGSPYTSSSVSWKPCSLSTKLAQSWQAASLKSLPQGCGGI

SEQ ID NO: 1021222 - protein, 117 aa, Homo sapiens
NEKEAMEDGEIDGNKDTLDWAKPKVKVASGVVVEAEAALEDEVVGRVRPSEGFWWQRPAQAMEGEEASEEAEEEEVTTSHKERRRRLNRLRPYAYPSSIRKKGQWGLYCYLNNDRAF

SEQ ID NO: 1021223 - protein, 93 aa, Homo sapiens
VDDQLAQEQVADLLDGERGGLGFVAAGGHVGLQEFQRGLFVAMVGQHRLADARGDRQDHDVVLFEVVLRQVAAGIDDDTDTHAALQTTTLAKH

SEQ ID NO: 1021224 - protein, 148 aa, Homo sapiens
ISRLLQVDPEARLTAEQALQHPSLSVVKAAKPWNPHPPRQRFRVAVWTVAGCSDEWPYAPIVYGHCSQEEHIVVGEHPKRVRLMPAPLIRTTWLAFRLYGHWVKKGEQQNRAALFQHRPLGLFPSWALNEEGDSAAITEDRGQCIVLG

SEQ ID NO: 1021225 - protein, 167 aa, Homo sapiens
STQVPLKTLCQPTQGSAFPQPWAPQPPHPPLAMVLPLLPDPWAPRQPSYHSRALVCWQSTPSPHWCLTAPYSRAWSGTPSPPSMQKQPHCMCRVRQQLQTCSPSSPESQHGGKVSTPGGGLRPACKTTNGGCKLMRSDGRKGPCAMIERDPYEHPERLREVCSRKLE

SEQ ID NO: 1021226 - protein, 226 aa, Homo sapiens
YKARYEAGGESGSEASTYPMIWRGALQRSSQPRTMAEVGSSVSCSSRLSRLRKSISHKRNEDCVVRAVIREIPKTFFPVIFSKASEYLQLVFGIEVVEVVRIGHLYILVTCLGLSYDGLLGDNQIVPKTGLLIIVLAIIAKEGDCAPEEKIWEELSVLEVFDGREDSVFAHPRKLLIQDLVLENYLEYRQEPGSDPACCEFLRGPRALIETSYVKVLHHLLKISGG

SEQ ID NO: 1021227 - protein, 187 aa, Homo sapiens
MMGMEAGDVLLLEATPDTAGLRWSPLSWEPVSAAAPIMECVQMTKEVQKAMDDKRFDEATQLRGWELREQLEHLQAPRPPEAPQWRMSNFSLAILNVGAPAAGMNCRPVQTRASAGPGISHGHTSTTVVPRLASEGLAQGTRVPEVAGTTGRLVRDVLAHDGDQEDLPGQLIHVEKSAYGSRPAAAS

SEQ ID NO: 1021228 - protein, 58 aa, Homo sapiens
  misc_feature (39)..(39): Xaa can be any naturally occurring amino acid
MVEDRAVIARLLKGVTVDLMRPGLLGGRSLVSPRAGLGXGSSHNCVVGMPTCPMNLPN

SEQ ID NO: 1021229 - protein, 133 aa, Homo sapiens
MRNQASPPEDTLSKPFVTHWGLPMKRYYNVVVLGDLCGKPDFCKHLLKRSFSRVFCLDGVKGDLLIDISSGPTIYQLLSACESFKEIAGTDYSNQNLLELEKRLKKEPTAFCLVPRGDPFGVTLKGTTFTGPE

SEQ ID NO: 1021230 - protein, 46 aa, Homo sapiens
GSPSVFKKRDDIFGMARVFYGCGLLISHREAKIHNSQGRQPAIAEI

SEQ ID NO: 1021231 - protein, 408 aa, Homo sapiens
RALSCPQCPSPAASSPFGGMEVMVKRQRKGSLDLTTQTEPGECVFVCDPLTTKYYKNQRSRTRSVRITTGHAYEREHTCNLEQSNNRTKQAYHAPPRTNGPTKRHKKRPPPRETQKRETREHTQRKNNLNDQRHTTSKEQTNKQKEERKDKRTTPERRTKHNTEHKTQNRQTTKTENETATRKKKTRTHTNRKKQETNPNKNAHRQDTTKRNQQKHRKHQQQDKQQNNKTYDNQAHRETDNKITTYQAKTLDKQNSEKTETPKRQQKTLSAATGEQPRHNKTQATRNPSDNTKENRHPHIDTGKRDKIGERQHTENKEQHTDRTERRKTADKTKQPQEQQERDREEEKQKENKRKQRKKKREEKHKKSKKRNKRKERKEEKRKRDEPTRRQQKERREDSHRREEKRDK

SEQ ID NO: 1021232 - protein, 188 aa, Homo sapiens
ERAGDRWGWCLWEDCLLIVFTRISFRRSTSYVLKLLGHEVDGKQVELALWDTAGRNMIVAFYHTDVSCASIDSLTANIPEKWTPEVKQLRAPKMPIILVGNKKDLKGKTKHTMGESLAKYEAGSPFGLRTGRDMANRISAFGYLECSAKTKEGVREVFEMATRAGLQGPHRTSVGVGCPDSLSIPKER

SEQ ID NO: 1021233 - protein, 119 aa, Homo sapiens
MPIILVGNKKDLKGKTKHTMGESLAKYEAGSPFGLRTGRDMANRISAFGYLECSAKTKEGVREVFEMATRAGLQGPHENKRRSGLSRFSEYPQGALTYMPSHPVHKGYRNYPPYKPRLL

SEQ ID NO: 1021234 - protein, 73 aa, Homo sapiens
DIQSALYLKIRVTYTHIDNNLTKEQVTLRIKRNPILESISTIGFTSLDVGSGHPDGAAAIKGSFVQRLKSYVI

SEQ ID NO: 1021235 - protein, 91 aa, Homo sapiens
MKFKRDHKRETHHKLLQHVTNSCRTRESFFTKSHLSLEEPALIPIDCCAALLRSPGDPEPPPQIQYHQSNHPLPRSQLDPIDSVLRCYVWD

SEQ ID NO: 1021236 - protein, 34 aa, Homo sapiens
ASTNQTSMYLCASSHRDSGHTVTQFFGPGTRLLV

SEQ ID NO: 1021237 - protein, 68 aa, Homo sapiens
TLDRRCKILHTSIAENLAVRLGGGPFRDPQAGGIGAECPGSQCSLWLVSILQVALPHITIWGLEEDRG

SEQ ID NO: 1021238 - protein, 53 aa, Homo sapiens
HTRSSLQVLHTSIAENLAVRLGGGPFRDPQAGGIGADVPMCSHVHACWLSVHS

SEQ ID NO: 1021239 - protein, 130 aa, Homo sapiens
MAEEQPQVELFVKAGSDGAKIGNCPFSQRLFMVLWLKGVTFKCYHRVTPKGGPRQCRKLCPGGQLPFLLYGTEVQHRHQQDVRESLEAVLCPPRYPKLGSSEPVSPTQLVLGHIVAKFSGYIKEFKPSIK

SEQ ID NO: 1021240 - protein, 39 aa, Homo sapiens
SPLLLILTVFSISTREKLKNAFSLQLFTGGIPPVCSCVL

SEQ ID NO: 1021241 - protein, 87 aa, Homo sapiens
RTASVLRKVEIAPGDPELTKSQRFLEISGCCTTRKGALGMAATPVCYHLVITLSCDKHLNPGRGGCGELTLHQCALAWATRVKFHLK

SEQ ID NO: 1021242 - protein, 31 aa, Homo sapiens
DSSFYICSATSRRAGSSTDTQYFGPGTRLTV

SEQ ID NO: 1021243 - protein, 37 aa, Homo sapiens
ILKTAASTSAVLGRTIRGGPERSTDTQYFGPGTRLTV

SEQ ID NO: 1021244 - protein, 31 aa, Homo sapiens
GDSALYLCASSQARTGSTDTQYFGPGTRLTV

SEQ ID NO: 1021245 - protein, 34 aa, Homo sapiens
HPEDSSFYICSAQLDTQYCSTDTQYFGPGTRLTV

SEQ ID NO: 1021246 - protein, 120 aa, Homo sapiens
MNSFTKSLRVLHCSIQQCLLLYLPLLLYLLVLDKHRLYPQGGTDPGCFSAWMALVKIWQPPSIPPEDTVEDYMVDAGAVCADSDGEAWVQYLAPSISERLQKPSNQNQNSGRLRLTILNE

SEQ ID NO: 1021247 - protein, 46 aa, Homo sapiens
CAILDFQYRLSRAGLQLPGPRDSAPQMKRRVWGGERCREPWKRSTE

SEQ ID NO: 1021248 - protein, 245 aa, Homo sapiens
RPAGGDVGALKSGSHSRPTPLMANRYTMDLTAIYESLLSLSPDVPVPSDHGGTESSPGWGSLGPWSLSPSDSSPSGVTSRLPGRSTSLVEGRSCGWVPPPPGFAPLAPRLGPELSPSPTSPTATSTTPSRYKTELCRTFSESGRCRYGAKCQFAHGLGELRQANRHPKYKTELCHKFYTPGPLHLRLSLPLHPQPLAKTLAGPRATLLCFSRASASPGLPSGRRTSPPPPGLAGPSLSSSSFSPS

SEQ ID NO: 1021249 - protein, 142 aa, Homo sapiens
RPAGGDVGALKSGSHSRPTPLMANRYTMDLTAIYESLLSLSPDVPVPSDHGGTESSPGWGSLGPWSLSPSDSSPSGVTSRLPGRSTSLVEGRSCGWVPPPPGFAPLAPQPGPLSCHALRSFSATLGYPSYLNPHFGAFTREL

SEQ ID NO: 1021250 - protein, 32 aa, Homo sapiens
ELRDSAVYFCASSPPSGAGGEQFFGPGTRLTV

SEQ ID NO: 1021251 - protein, 329 aa, Homo sapiens
  misc_feature (31)..(31): Xaa can be any naturally occurring amino acid
IFNGTDGSENVTGLDLSDFPALADRDRREGXCNPTPLINPLAGRAPYVGMVTKPANEQSQDFSIHNEDFPALPGSSYKDPTSSNDDSKSNLNTSGKTTSSTDGPKFPGDKSSTTQNNNQQKKKIQMLPDGRVTHNPQAMVTDQFGKKGLLTFKRAAETDPGMVPLALGSDLTTLGLNLNSPENLYPKFPSPWASSPSPPQHKHFHVPSENLTNIHIREKLAAIKLGRYGEDLLFYLYHMNGGDVLQLLAAVELFNRDWRYHKEERVWITRAPGMEPTMKTNTYERGTYNFFHCLHWRKVAKEFHLEYDKLEERPHLPSTFNYNPAQQAF

SEQ ID NO: 1021252 - protein, 111 aa, Homo sapiens
  misc_feature (4)..(4): Xaa can be any naturally occurring amino acid
ATGXSSEERADRSRTCPIQAPPAVGRSAGRMARNPARCRGTRKRKRPTGEGWAWKDGGADATGIQPTLSTIEQSRALSAVVESIPGLDRDQVSNVGWQPIRQTSLETRYEL

SEQ ID NO: 1021253 - protein, 264 aa, Homo sapiens
  misc_feature (204)..(204): Xaa can be any naturally occurring amino acid
  misc_feature (230)..(230): Xaa can be any naturally occurring amino acid
  misc_feature (245)..(245): Xaa can be any naturally occurring amino acid
CEHCGWALRISRFLPGFHSFAPCTVAPSLRAQPAKQRAPVAGVMQRARPTLWAAALTLLVLLRGPPVARAGASSGGLGPVVRCEPCDARALGPVRASARRVARSWCASRAAAACLDVRTERGPAVRHLHRALWLRPSLPAVARRGATAAGAAGRPRALRQRYVPVSRLRAYLLASAASSREMLGEIGGKTAAPAVVESPVLSPXTHRGVCIPSFHPPPFQRIFIIKKGVXVRQQRYKVDYESQSXDTQNFSSESKRGDRIWSLP

SEQ ID NO: 1021254 - protein, 212 aa, Homo sapiens
MYSVRCQERNNAGYAGIRDQANHHYTRIFGSALLMSGVTAASSYATDRNRNNSGIYSQPTASSELSQALGQQLGNVYGADDLEESEHGSDSPNSPWLSFQHHHGEGPQFHKAVQIFGLLTPRSHEHENFLKNALTIKNAGIAVVLLVGISQQTQAGMPVIDISNLDHNIVSAVQQVAAVEKQLQQYQTQLQQYQNCVAKHGCTERFHLGPGS

SEQ ID NO: 1021255 - protein, 46 aa, Homo sapiens
VTDSRSWPGSVVLLGQHRLGSCSRLPQSSSSHLSAVLLSSAVSLSS

SEQ ID NO: 1021256 - protein, 81 aa, Homo sapiens
SRTSNKLLVIDTRLEEQFTQYDIEQISGLSSAYAVRMYELLICWRSTGKTPIIELDEFRKRIGVLDTEYTRSMTNNLLEIL

SEQ ID NO: 1021257 - protein, 73 aa, Homo sapiens
VVGRGDVSYGGNVLFLSSIKKALGECIFRTTLNLCFLVTVITLGLSKPPTSPPKRHAKCHTKGHPMSHTKSRV

SEQ ID NO: 1021258 - protein, 177 aa, Homo sapiens
MAMGLIFLSVNNPLYLALALPMHAVLYLISANDPKIFSSIHMWLKTNGRCRNFLFGRASSFSPLATKKLEKVRLLTRIVKYFRVRENKGEIFMGAAFKYADALKNEKSTALFIPYSSHVTKNVVKLVNGDYIATIRMQGAAHESADVQDITSWHDQLNGFMRNIASPTWRCGRLWYE

SEQ ID NO: 1021259 - protein, 382 aa, Homo sapiens
RRTDRSGEAVLRRHRSPTPRRTGSPERRMSMPDRTRAGGAPRRAAVPTEPKSAHRRRSIFKGGFCYHSKPVVGIQFTRPPEVEKYLLDNDCQLFVAEKTGLNFEARIRQNEINEPQVRIVSETPKLTLNHAYYRPQGQLRFNGTGKGSRSPSRPPISLEGQCKQASEAEPPSMQLPQKVQAQVIQETIVPKEPPPEFEFIADPPSISAFDLDVVKLTAQVCGQELGARFLTQLMQKEHAHIYQFDFLRPQLQPLHSTSRSLVEQYTKHLEFHPKVLLFNTLIGKEADKSPGASLGSGVLTEWNWAKFQERDRKKERRGERMKDAGGLVLRLDVALILCELEETVDFQPNEQGNFPPPNTPELLGARILIQERYENVGESEDR

SEQ ID NO: 1021260 - protein, 47 aa, Homo sapiens
AGKGAWLGFGAGGKEGAPGNTVPKRTEAAKGFELLYQPEVVRLYLSL

SEQ ID NO: 1021261 - protein, 214 aa, Homo sapiens
ATNGFGSLAVNYTLVVLDDIAQGMDEPGGPDSSSVVVNDGPRQPAAVALTCASHMPSNDDGACGDRTGPWVAPVRLNVRGQLVHPLCPDITWMKDDQCLDPPRVPLSPVKKKWTLSLKNSAVPGGQLANTPAACRTALGAINATYKVDVIQRTRSKPVLTGTHPVYTTVDFGVDQSFQCKVRSDVKPVIQWLKRVEYWCRGPPQLHHRCGRPEV

SEQ ID NO: 1021262 - protein, 78 aa, Homo sapiens
SSSAVVLSARVKDLIRAITTEVTDNISVGAMPLYNDLSISNVSPIALEQDCPPVLQNSLTSTGMVISTLIACQLDSYL

SEQ ID NO: 1021263 - protein, 45 aa, Homo sapiens
GTSLSFVDHVIHCGLTLRQIVYIRHFTCEFIRVRMAFQEARGIIL

SEQ ID NO: 1021264 - protein, 103 aa, Homo sapiens
MSTALVMQEIERFLALLAKILEILCVRGKWGTGKTYNWKTIAKAAKLKDGGVAMNTYAYISLFGVNSLGDFKMQIVQATVPRSSIGDPNPANRWIAINDQQFI

SEQ ID NO: 1021265 - protein, 232 aa, Homo sapiens
AAVLRLGTGMLGSLTEGVGQVEVSVTSRGTEEDQPGRLGTLSCTGAMLVCACCQDPDDDENAVLLNVSDVPGAMCCVPVLCGVCMPDVWALGFLCYACKLFRVTTDAVCPVLREHGTCTSSPGLGDHKILIDRYDWTVVTCMTFLEYDAEYSTWNRDYQLSEEEARIEALCDEERYLALHYWTCFEEEAKERGKNTKRLMCSTSQSDGSYNAVESLTVATITTRQSRTEEED

SEQ ID NO: 1021266 - protein, 221 aa, Homo sapiens
AAVLRLGTGMLGSLTEGVGQVEVSVTSRGTEEDQPGRLGTLSCTGASGGRAKPERKSGAKEEAGQAVPGGWGAARVGKLLGISGLMPENAVPGHRQSGASGLREQGQHLIPWMGDHKILIDRYDWTVVTCMTFLEYDAEYSTWNRDYQLSEEEARIEALCDEERYLALHYWTCFEEEAKERGKNTKRLMCSTSQSDGSYNAVESLTVATITTRQSRTEEED

SEQ ID NO: 1021267 - protein, 43 aa, Homo sapiens
RAGIALFMGVSDSSAEQSVSTHIHALCCQGRPPSASATVMVRA

SEQ ID NO: 1021268 - protein, 134 aa, Homo sapiens
THASGTFSYITPHAIIALRRINDHVKYQLMSIPYLNILELSSIFADLVCSPPFPTSNGSLPILVSFFFCFLIEDYTAVSYVSFTLKQNRNIILFFVILTFEIQASYLVEGPAFWTCLIVSSLSDSIQDKFWGIG

SEQ ID NO: 1021269 - protein, 50 aa, Homo sapiens
GPAGMSYAVMHSQPILVTIKVSLSLMKVLKLWVLRVEKIMYSLARKTYPR

SEQ ID NO: 1021270 - protein, 257 aa, Homo sapiens
SFGASRAFFDGNWTLDRQREETPAPLAAAYLTRVPCHCLDPGGPTGSLAVPQDLTEDEQTVEDSIIEDEDDEADVEEDEPTDLVEDKEEEEVSGEPEASPSADTTILFVKGEDFPANNIVKFLRGFTNKGTEDSIDESLDASFRYPHDYQFYIQNFKALPLNTVEPPQRQATFENSVNPAEAMGGPPFVWTSTELQRSDGNVSKMQPSSNSTSIEDRMAIWINNLKYKALVASCSGKLLAFITPKIYTPTTLPGRRP

SEQ ID NO: 1021271 - protein, 73 aa, Homo sapiens
SSTGLYGFFTPQGLGYYGLLLCLLHTVVTDTVTTNDWNLPHTPLDHITDTSYYDKYLTYSLTGTCTDLDGHYD

SEQ ID NO: 1021272 - protein, 69 aa, Homo sapiens
MSLAGGQRRELGVDKSWVMSQSRGMYHQGLPPPRIRRSWQRHLKRTSTQGLPETSNEDSGARNVNIGKA

SEQ ID NO: 1021273 - protein, 140 aa, Homo sapiens
MGIREKHPQELASSWRSSVSCCWKRSSTHIRSLEFPCRSYNLRTSVVVIEAHMESCTKKGWIRCNTDQIKERVDSVAITDASFTGYFVLCCTLEFHDRLKNIVPTPDLEEQPVPPCMAVAKTDWGLPLYRTCCGLGSTSK

SEQ ID NO: 1021274 - protein, 212 aa, Homo sapiens
MDRDPLGGLADMFGQMPRSGIGTGPGVIQDRFSPTMGRHRSNQVINGHGGHIMPPTQSQFGEMGGKFMKSQGLSQLYHNQSQGPLIPACKDSSKDSATSSVSKTRTAVMQQQISREGLLSSVPNDIQNSECHKTSGPKHTLLMSVLGAQATQRSSEHPASGDRAPSSWRLKKLSPPRLSRHKPARDQAKQPPTGQRQELLTTNWTRLVTGHI

SEQ ID NO: 1021275 - protein, 72 aa, Homo sapiens
VQHETWIGTHLEDLLICLDKCHVAELVLVQELSRIDFHPPWDVIVEIKSWMAMGDTSCLPHNRSLERWEASL

SEQ ID NO: 1021276 - protein, 95 aa, Homo sapiens
RARADAGSLSERRILVPPSFVPLSAAAACARHEEECLVFSPYRASFIQRAYLVKPGVPRFPLQVLGFEIDAVNSVQFSNHTGYAPTWKGQCAEFK

SEQ ID NO: 1021277 - protein, 142 aa, Homo sapiens
RARADAGSLSERRILVPPSFVPLSAAAACARHEEECLVFSPYRASFIQRAYLVKPGVPRFPLQVLGFEIDAVNSVQFSNHTGYAPLGRANVLNSDELQELYQGLRLDHLNEFYFLLTRYSKDQAFLALVGDLGPELEPQNPK

SEQ ID NO: 1021278 - protein, 260 aa, Homo sapiens
RARADAGSLSERRILVPPSFVPLSAAAACARHEEECLVFSPSRASFIQRAYLVKPGVPRFPLQVLGFEIDAVNSVQFSNHTETRSVSVAQAGVNVAQPAHCSLDLLWLNESFLPPPPDVAGDYMLCTMHCPPPCPWVCYLVVCHCVACFLPGDVATNAMTPCAWDTGVFHTMLAMFVFPDSPSVLERVWKCLIPPRCLQEPTWLQASPTSMAAARTSSPFPHGPGPRILEGRTTRCVHFYHTVSWAWQSLQLVASIPSGT

SEQ ID NO: 1021279 - protein, 58 aa, Homo sapiens
PGCSEDSRSARTTQIRIVVPIPTHVLVARQFLDPVILDWNELGRAVRGSSDSSSSSER

SEQ ID NO: 1021280 - protein, 71 aa, Homo sapiens
VPMASVEVQDGRRCCSILHCVVKEYLRLVSIYKGKRFIWLMVLQAAQRHGASICFWGGHSHPVGASCPLHR

SEQ ID NO: 1021281 - protein, 120 aa, Homo sapiens
ACPAPQPARSQFSLSPACPLPCLLALSLALSSRIEGTLTTACGWEGRQRRRRLRGNEAAVVVVGRCLGEDEQQEQTIAEDLVVTKYKMGGDIANRVLRSLVEASSSGVSVLSLCDEKVMP

SEQ ID NO: 1021282 - protein, 79 aa, Homo sapiens
EHALRLSPRARSSRSRLPARSLACSRFRSPSPRGSRGEDLVVTKYKMGGDIANRVLRSLVEASSSGVSVLSLCDEKVMP

SEQ ID NO: 1021283 - protein, 54 aa, Homo sapiens
SAGQPADGAAQQAEPEAKHDDVVGFSIGFSITDHLLNFFIRQAGVGLDGDLLLF

SEQ ID NO: 1021284 - protein, 44 aa, Homo sapiens
MFTNRSLPLTAISAVRRCATERGVGTLLVGDRRAPRSIRRHIAR

SEQ ID NO: 1021285 - protein, 69 aa, Homo sapiens
MRAFKSHPCSAYTDHEDTRNRATLLLSRDIPTGGLDCRLPSPPYPLHDIQRLLTPFSPLMWHALKRGTP

SEQ ID NO: 1021286 - protein, 85 aa, Homo sapiens
SLQIRKATINDEKRHKIATTRRQSDDKRTSKIRENIYPLTFHRESHRHIYIVVQEEDRKSKLSAYVTRLRSSKYAQRSPCEGPSN

SEQ ID NO: 1021287 - protein, 123 aa, Homo sapiens
  misc_feature (59)..(60): Xaa can be any naturally occurring amino acid
  misc_feature (62)..(62): Xaa can be any naturally occurring amino acid
  misc_feature (76)..(76): Xaa can be any naturally occurring amino acid
  misc_feature (83)..(83): Xaa can be any naturally occurring amino acid
  misc_feature (87)..(88): Xaa can be any naturally occurring amino acid
  misc_feature (90)..(90): Xaa can be any naturally occurring amino acid
  misc_feature (92)..(92): Xaa can be any naturally occurring amino acid
  misc_feature (112)..(112): Xaa can be any naturally occurring amino acid
MTHITEGIQEDSLKVVDILLEQYPALITGRSSILLKNFENLFLISSCPKDWINRDRSQXXIXSVNPNRRLTSQQWXLKVLVRXSKFXXTXEXGSSRLRKSEGLRDRKKIPCXRNPFFTLEENA

SEQ ID NO: 1021288 - protein, 256 aa, Homo sapiens
RESLGAWGCLAASRHGLCQQTALDTQAQGLEPRDESAQGRCEPWLGCPLTCLLKPQKRALRPGLPCLLAQLRLSVRRVLLAAGLRPGPGAGGSAGDSSVLECRAVLAGLRSPRGAMRPEQEELVMVGTNHVEYRFAKANGRSSLRRVRCASHVGTTLMRAMLDAHPEVRCGEGDPPSSPRVLAMRPGPGPSLAVTKLRLDEAAVTDDVLDSSVQVFILEVIAKAREPASVLVIKDRSTSQNSVYLVRLDPDLQTSA

SEQ ID NO: 1021289 - protein, 471 aa, Homo sapiens
  misc_feature (198)..(198): Xaa can be any naturally occurring amino acid
  misc_feature (326)..(326): Xaa can be any naturally occurring amino acid
  misc_feature (357)..(357): Xaa can be any naturally occurring amino acid
MPIDFCSEELKTEEGVSEAPASCVISPSSVSPDDHQHNGELSRHSPQEGVQIGPEEAMERLQETEKIIAELNETWEEKLRKTEALRMEREALLAEMGVAATGRMGELWASFFSKERLPSLVNPDTEGTLLDDHEFVVCLTTDQNELGRYYQESGPELSYGLFHMPRAVTGFISGVADRLIWFAGRIRAQATNWSEGRXVHSLEALDRKGSCSSDIVYLGTAIGATGGPTELTAHGAGGTTRSCCNEGQGNPSGCLPGRNHITKARGGQGDKGAWVNPVRNLDGRVRRAQISPKGPSALLEDTKGTESRVQTYVGAPSTGLTIVGWXRAHPERGQFRKPVQRWPCGDHIGDEHHRGVXQGDIPWERKNLQSVHTGDTGYNNGGKTNKCTDTSFTLELGVRPNDACDEKPGVTLPGNTFVGTKAGGECEHAPVPPKPAQPIVVTHDTHSEPAKRGDPQQVAITPDVVRGTTHL

SEQ ID NO: 1021290 - protein, 199 aa, Homo sapiens
LLKAMKITFNVYYFSSCSPANLSSAYDWNLVSATDASGKPLVAMNKGIERKLRVAFGDKNLSISGGCNRQFGGFHYQYGVLKVQPLASTLMACDKSLMDLDAQVGRLFKGDLRAVISGDNVAPMLQLTTADGSVLKLQGEATPQTRYGSEGEVKFLEVAAKTVKCSHPLIPGYQCLQLRERRYVDAELRLATQDTGCAF

SEQ ID NO: 1021291 - protein, 44 aa, Homo sapiens
  misc_feature (1)..(1): Xaa can be any naturally occurring amino acid
XTLEFPCQSPPTEDNKEKKSAKDASLLWCQMKTAGYPNVNIHNF

SEQ ID NO: 1021292 - protein, 105 aa, Homo sapiens
ALAARDLVCPPRLPSHKSRHTTEIRGYSPEGPIRPRSLPPFTDPRTNPRLPLPQPPSLRADTPSVYTRTRLHLVEIPRPESTLPRPTPSMLGSVIACGLRMIRGE

SEQ ID NO: 1021293 - protein, 114 aa, Homo sapiens
WLNPPDFDYAFNLAYGKKTHRCPTLVRSVASTDRSSDRAKAPRRRVTGVITPPWPQSPPPPPTPPATATPLLATRCAPVCLAVRACQRTGYSRAATRQNPACHRSLRRRPETPV

SEQ ID NO: 1021294 - protein, 120 aa, Homo sapiens
MYLVRTLALLADLRSRPDPCVKALTKVAAHRLQPGAKCMIDQAHQERTANPTDLSTSRDLLEDLSISRPSGKPWTENMDLLARYNWLLKTLVRKFICHVVGYHLPASLTDWLLGRDARGS

SEQ ID NO: 1021295 - protein, 96 aa, Homo sapiens
LGGPRARRSNMHFTSSSMVDFFFSEFIFSKHREAMDPIAELLSQLSGVRRSAGGQLNSSGPSASQLQQLQMELQLERQHCPGSTEQLETDATQPGY

SEQ ID NO: 1021296 - protein, 102 aa, Homo sapiens
MAEYELITRIRAVFVIGIYSLPLLEIVLSGHPCSMIINRHKESSVTPGLNKGPFLSDYRTWWTLLSGCNTINHEFWMDIRSCYVDDDEKEHYRWLQQDEDSF

SEQ ID NO: 1021297 - protein, 107 aa, Homo sapiens
YGRSSAAINNDIRPIDVSPSITHKRNEWPREFPRMSHPAHRIPCIPAVTRFLQPLAIIQYCVHVSRAQAVYTDAIAAPFCRQALCQREECRLRRIVCALRLRVIICW

SEQ ID NO: 1021298 - protein, 193 aa, Homo sapiens
TSSCRFLFGYATTVILRVYTYYVSTVLFAIVGIRMLREGLKMSPDEGQEELEEVQAELKKKDEEFQRTKLLNGPGDVETGTSITVPQKKWLHFISPIFVQALTLTFLAEWRDRSQLTTIVLAAKEDPYGVAVGGTVGHCLCTGLAVIGGRMIAQKISVRTVTIIGGIVHLALAFSALLISPDSGFNRLLVIYM

SEQ ID NO: 1021299 - protein, 55 aa, Homo sapiens
MWYGFLLVTPEAFYCADQRASYSNPSSEQQRRRRRKRWRLVAIGEDIRILNGKGE

SEQ ID NO: 1021300 - protein, 273 aa, Homo sapiens
MSCVKSGRGKRRCYGCRARPGGGENMVRRFLCDPPDSARVRAAASEGFLWFTSRGSLGDVGSCQVAPASVALVLMLLRSQRLGQQPFLEDQVMMMGSARVAELLLLHGAEPNCADPCHLTRPCALTAAREGFLDTLVVLHLGLGRGWTCGDALGPLCPVDPGMKELGHRDVARYLVRRERAGGTKRQYPYARIDAAEGPSDIPELNGRTKRGSENTSGKLRSSVTDGSYRAHNVAPRAKESHPRFRRCTLEDELEGIHKQPMVPWPFSERYDY

SEQ ID NO: 1021301 - protein, 505 aa, Homo sapiens
  misc_feature (326)..(328): Xaa can be any naturally occurring amino acid
MSVIDATTCPSTLDRECMRVFTSVDDTPSFPGGIRMQAPFKQHVLYATGRLVKLEVRPSGKSCGISSQLRSRVSHHKAPVAPAVNGQSTAFSSIAKGEYHQPQVRRFITARYSIPKAGIGVGGPVPQQGQHDSPSVNAPQATVCLQDTGEGMEAGFVLSSLGPIPQLQHASGSSPGPGAGQINCSSHHRPGPHYSEHVTDLGEVRGFPSLSQPAPGTSAVASHRHVNGPRLQGPVRSAGPRIAPQGRHQRSCNRAEGSAHAPPALRSDTRWKPAQGAGAQRKGGREKAELKEELDGSVREGAVTDLETRGKALFSPNKKRPAIEKXXXEGLREIFLVRLAKLERSRIDTATIQLRGDGRGGEQLSRDLKDRRRPKGGEDARPPQPLSSRCHAPCKPSRFLLVVAAVLWGAAPTRGAHSSELGPQMPALDFARSFQALCGGYLDAKEGLQGFPCGGSPQTMPCRPICPKHPPAPVNGSVFMALLRRFDCNFDLKVLNAQKAGYGAD

SEQ ID NO: 1021302 - protein, 115 aa, Homo sapiens
MHPASLPASCWLWPLCCGERPRPGGLIRANLGPQMPALDFARSFQALCGGYLDAKEGLQGFPCGGSPQTMPCRPICPKHPPAPVNGSVFMALLRRFDCNFDLKVLNAQKAGYGAD

SEQ ID NO: 1021303 - protein, 40 aa, Homo sapiens
LPVHQHLLSSAGENEVWVECLGRGERMREAARWATLPSIF

SEQ ID NO: 1021304 - protein, 349 aa, Homo sapiens
  misc_feature (254)..(254): Xaa can be any naturally occurring amino acid
VDRCLTEKKKKNNPRPRKSRAWCLPHDVKRCLSHSALLWPLWALCVDPVETLWFQATGVGLSSPLRGYPRVAPLFCARLCAPGAPCVCALCRGAEKAVRLSLLSEPQRPPERSFVREGVEAEVSSFVCNRTFGRIIRRKSGSRVFLSLQTTEPRGGARAQGGTTGEEGGETVGSRGARDNNNPGRDNTRGKRAKKTEPFLSETKRETPWCVGAHCVRLFRAYVGGENLYQLAERRRRIYPRGGACHIHIEISSXLAVLCVQEAAPFYKYKISEGGSEKRKPQRFYKQQGGVSPRRGVRNTSMWRRKNTPKKEARPSSVRKSPTIYTKTAKRGVLLFPPPKGAPKRGAPK

SEQ ID NO: 1021305 - protein, 175 aa, Homo sapiens
EHHGSDSMPLAQVVNTHMCIHSEIHHTQTQQVYWIHDKPSSWTMQTPHAPVQSAETLSRLKASTASPLLSCATSALSDLTQRPVHTESPAIGYTETEKGTAHDNFAVITPRRRKCSLNPTATEIPSKETGPAAPHGPVQTSRHNCALACAFGPGQPMRALRQQMGGAVYSWSKND

SEQ ID NO: 1021306 - protein, 30 aa, Homo sapiens
MRSAGDQRKNLDIVKSLQLGLAYLSIDVPT

SEQ ID NO: 1021307 - protein, 78 aa, Homo sapiens
PRETTLHKLRMNTFTGVNAYRFQLKASGQPGVFWPKTSAKKGNWVLRLGLSNPDRPARQNNWFLPASREIPEHSALTR

SEQ ID NO: 1021308 - protein, 184 aa, Homo sapiens
AGQPAGHVWALSGPATLCPGVEAAQTVSDEEEAGTREGYEEDEEGIGCAARGGATPLSYPSPGPEPPGPELDMPTVMSPCCHIMNCRLDLWPPCRSSCVDGYDACTSWCLHAPYMGPLSCAPCGLPTQSLASPPARDALQLRSQETHTTPQHLRNATEGSKVTEPSAPCQGLWLAIGDLQATFH

SEQ ID NO: 1021309 - protein, 213 aa, Homo sapiens
AAAAESLKQGRRTHNSRRGGRYSLNGLRCTQRKHIAAHRHRKRRKRIKSRSEKKAINHHRYNPGRLPASIRYSARPRSSQRPYPHARPRRSPKRFPRHEARGSSYTRHVGGLCPHPRHTPPTAPNPQPPAPNATPALNSKSAQASNKPKRKENTPLPNANALHVIRNQQPTTRPPREKWPKNRQGTARRRVHPLNLTSAPPPRRSNISPPTRP

SEQ ID NO: 1021310 - protein, 136 aa, Homo sapiens
LKHNHKLQISNKINNSNKNNHNPKPKTPEMYSNPPTRRPNTTNTQIPYDRLNFRTDDSRHTNTRRHIMGETSQPITNTSPHSSKYHKNPITPITKNPPEAPNTTNTQIPKQPTRNPKTTNTKIPHHRRTSEPPHPG

SEQ ID NO: 1021311 - protein, 121 aa, Homo sapiens
KNLPLDISQGSVSYILESSEAFIWEPGVAHTVGIRRQDGTLSGPWTATRISDYHLRIPTLDFVPDTSWDREPPHLLFGPVARECHRVLISKVTPKGSESVSVQGLNYDDRVYLYDNATAPD

SEQ ID NO: 1021312 - protein, 106 aa, Homo sapiens
PGVIMQAEPAPGLLPALCQPLSHPLVPHGPWSLPSARISLSGLVGRGWSRTGWRSGAPWMAGQEGPGRTRSLRTRWHPAPDGLGPTAPPPAFLTAEEIDVACAETG

SEQ ID NO: 1021313 - protein, 188 aa, Homo sapiens
QSECGCLMTRRCTTTCNCPVDSEAAPAANDSANASTDLCDPLTTIDEPQNLQPAKNYVNRHVYGGKVAVCFSADQTRNEEHTIRIEAAVSSGGRSYNWDDKIAIQVSTRKLPSVMATLLQIQNKFEGKGHGAQNEKWFVLENQPDKVFLSVECKWGLLLLDLYRSQPGDCYQVITLVMEQMLKNTFIC

SEQ ID NO: 1021314 - protein, 246 aa, Homo sapiens
EVAFCPGRGSQIAEGPGLQFASCYIHCEEKSLGLGPPSFDENWVLSATGGTEECSWGAFPMELTQPCWKTINPDHSENPCSHNFGDPEDPRRGGLKMAQTLGAIISFPAPSEPVNPDPDANVSSPQGQLPEAVHHSHQPVMEGTKCQLCRHPETPCGIHQLAAQGELDQLKEHLRKGDQPRQQAKTSAVHPPHLGSAFGEIESVRFLLEWGADPQILAKSERAPVAGSTRRYTDIVGLLLERDVDI

SEQ ID NO: 1021315 - protein, 114 aa, Homo sapiens
EVAFCPGRGSQIAEGPGLQFASCYIHCEEKSLGLGPPSFDENWVLSATGGTEECSWGAFPMELTQPCWKTINPDHSENPCSHNFGDPEDPRRGGLKMASDTGGPQNFSLHPLSL

SEQ ID NO: 1021316 - protein, 80 aa, Homo sapiens
MLVGYTGTPPKLHVSRASVGGLLAKSLIGNASQKTYIQRRYHRITSVLSSFFGDHKVRVSNSVEKFPGNSVQKFPVAQAF

SEQ ID NO: 1021317 - protein, 174 aa, Homo sapiens
MGNHFAPEESGTLLANLAYRLLAVGFLICFRRGLLVIVNPFNAPKLSAKRLRNALVTGSALFCLFGAGQLWAFSLDDVSAKAKELAGQKYEAPRSNLPNEFREMKFADYQKIRFRNEKAEWADQNTPFKLSFYHQGMHFDTPVKINEVTADSVHEIKYDPTRFDLHSLCTHSSV

SEQ ID NO: 1021318 - protein, 60 aa, Homo sapiens
WPVRGNYEFYGALMSPVQLYGILWGSNGLCGMRSIGSYGVSTGFQGEVTELCWAATGHSG

SEQ ID NO: 1021319 - protein, 94 aa, Homo sapiens
MGELDHRQLEHEMRSEYPEDCTRCLSRHVLAQLLTAQSSAQIVDYRDHRVEERTGESGEAHDQYIQARASCQRIGKKRQRIVTVRQALTHDSRT

SEQ ID NO: 1021320 - protein, 101 aa, Homo sapiens
MLTWLVPASTSGVGAESAMAAFIIIAAIAGVGHRVAISVEVQVDDLVGLATECIGSQLRTRLECSHGIFEQRIFAGPARGIGGGEVHAVHLQSVGCAFTGY

SEQ ID NO: 1021321 - protein, 70 aa, Homo sapiens
RAGTQQAWAQIKMSGDSWRTLGLSTQETGCAARAQSFSEKLGCLLRNTRKNHKELLRASLEEAPSFPWTL

SEQ ID NO: 1021322 - protein, 78 aa, Homo sapiens
DGLYLDHIGFEHDLLYLDPDQADIWRLDGLEFPNSANFRPARQQIGIGGFARYSYVHILCKADVVATLVGVYGLNMTL

SEQ ID NO: 1021323 - protein, 179 aa, Homo sapiens
CWTERRMTPLNLYLDNANPAQVREALEDYSLAIKQLAAANIFPGDMLLKNFGVTRHGRVVFYDYDEICFLTEANFRHIPAPRTPEDEMASEPWYSIGPLDVFPEEFPPFLFADAGQRRLLDELHGELYNADYWKGLQDAIRAGKVIDVFPYKRKEQLLRQASTASKADLLSPAPSASAV

SEQ ID NO: 1021324 - protein, 247 aa, Homo sapiens
SSVGGGFAGLEFARRRSRSRGLGPGGPPDVDGGGGGAPDSVGAHPRPSAESHPRKSRLDEVMAAAALTSLSTSPLLLGGPSVQPSAQSLAVEPWNGGPGASPRQLQQQTATVETGDGTWPVTILSVQPVTTTLHPTEAAHISCNGEPNLRKRKSPGHSVMSKMSVEGAAGKGAEQGVGDARDTIRLVHLVGVQARALIRVMVQEDFYYTELDVRCGHADRRACQDLTPVSPKATMRLLPQLEVAEWW

SEQ ID NO: 1021325 - protein, 180 aa, Homo sapiens
SSVGGGFAGLEFARRRSRSRGLGPGGPPDVDGGGGGAPDSVGAHPRPSAESHPRKSRLDEVMAAAALTSLSTSPLLLGGPSVQPSSPEPGQVMSKMSVEGAAGKGAEQGVGDARDTIRLVHLVGVQARALIRVMVQEDFYYTELDVRCGHADRRACQDLTPVSPKATMRLLPQLEVAEWW

SEQ ID NO: 1021326 - protein, 449 aa, Homo sapiens
RGWRRRQRVRLRVAHGVGAEPRPGAGAAATGDHGERVGCQLAARRAATAACAGPRGAACHLRPRRRASLLPACWECSLGAWHQYESKFGTGPPGLQPPAPQWCLPEDGACGLPAQPWAHSRSATWKCKELFPIQMEGVKLTVNKGLSNHFQVNHTVALSTIGESNYHFGVTYVGTKQLSPTEAFPVLVGDMDNSGSLNAQVIHQLGPGLRSKMAIQTQQSKFVNWQVDGEYRGSDFTAAVTWGTRRLVGSGILVANNSRASRLAWPWVDELVYHRRPWMKDGHVCMSSKLRDQLQRIELNMAVGTRLTVGPWRGLHRNYTTNKCQGLKLAGGLWQFEASNNGMPGPTQLSPFGLPKAGNAVTNGPILLFKGSVDSNWISGCHRWREKLANPCPVEQLAHMGVLSLRSTDKETKFSSGGLHGTSSIGLESLPWPNRASNVTFWNSMIHSG

SEQ ID NO: 1021327 - protein, 417 aa, Homo sapiens
MGNVLAASSPPAGPPPPPAPALVGLPATSALAAGLHCCLPAGSAAWAPGTSTSRSSELDPRGCNLPAPQWCLPEDGACGLPAQPWAHSRSATWKCKELFPIQMEGVKLTVNKGLSNHFQVNHTVALSTIGESNYHFGVTYVGTKQLSPTEAFPVLVGDMDNSGSLNAQVIHQLGPGLRSKMAIQTQQSKFVNWQVDGEYRGSDFTAAVTWGTRRLVGSGILVANNSRASRLAWPWVDELVYHRRPWMKDGHVCMSSKLRDQLQRIELNMAVGTRLTVGPWRGLHRNYTTNKCQGLKLAGGLWQFEASNNGMPGPTQLSPFGLPKAGNAVTNGPILLFKGSVDSNWISGCHRWREKLANPCPVEQLAHMGVLSLRSTDKETKFSSGGLHGTSSIGLESLPWPNRASNVTFWNSMIHSG

SEQ ID NO: 1021328 - protein, 123 aa, Homo sapiens
GYRSWPSSLNALFFWAPKKSPFYSTLAQARLREQSFNAAESERKEESLPLYPELGSRALEYPRQEVRAMVYNRTLLWDWLELGSLILDVKRFRFNRGIEAITLGSYLSEGEPIFQKQFGRGLF

SEQ ID NO: 1021329 - protein, 65 aa, Homo sapiens
  misc_feature (14)..(14): Xaa can be any naturally occurring amino acid
PESQVVEDVMWRWXLHWRGLSRILNEMRDQYEKMAEKNRKDAEEWFFTKTEELNREWPPTGERGA

SEQ ID NO: 1021330 - protein, 231 aa, Homo sapiens
ECEIFREEFLFSSLQEGRDKDTFSKMAMVSEFLKQAWFIENEEQEYVQNCEVIQRWSRISGEPLSYLQSILGMSLPCTKAIMVKGVDEATIIDILTKRNNAQRQQIKAAYLQETGKPLDETTLRNASQVSGKVATSKPAFFAEKLHQAMKGAGTRHKASIRNMVPRSEIDMNDIKAFYQKMHGISLCQAILDETKGIMRKPRWLFGGENKQPLEGLKLGSEEPKINNPIPR

SEQ ID NO: 1021331 - protein, 134 aa, Homo sapiens
ECEIFREEFLFSSLQEGRDKDTFSKMAMVSEFLKQAWFIENEEQEYVQNCEVIQRWSRISGEPLSYLQSILGMSLPCTKAIMVKGVDEATIIDILTKRNNAQRQQIKAAYLQETGKPLDETLKKALTGHLEEVF

SEQ ID NO: 1021332 - protein, 187 aa, Homo sapiens
MGRDPGVEPEPDALEPAPEPLNLQPGGCPGDACHALWADACPARRCSHELRRSSVPGLGHCDALLIDWQQADGLPAGHGSPGLQPRPDLPQAPRPIPFASWAGRCSPTSQVVINCAIVRGVKYNQATPNFHQWRDARQVWGLNFGGKEDAAQFAAGVASALEGVGRQVDPSTPDFHRGGPNGAPERC

SEQ ID NO: 1021333 - protein, 177 aa, Homo sapiens
  misc_feature (42)..(43): Xaa can be any naturally occurring amino acid
  misc_feature (47)..(47): Xaa can be any naturally occurring amino acid
  misc_feature (50)..(50): Xaa can be any naturally occurring amino acid
  misc_feature (53)..(53): Xaa can be any naturally occurring amino acid
  misc_feature (56)..(56): Xaa can be any naturally occurring amino acid
  misc_feature (58)..(58): Xaa can be any naturally occurring amino acid
  misc_feature (60)..(62): Xaa can be any naturally occurring amino acid
  misc_feature (64)..(66): Xaa can be any naturally occurring amino acid
  misc_feature (151)..(151): Xaa can be any naturally occurring amino acid
  misc_feature (156)..(157): Xaa can be any naturally occurring amino acid
  misc_feature (168)..(168): Xaa can be any naturally occurring amino acid
MGRDPGVEPEPDALEPAPEPLNLQPGGCPGNNQPVGKPPPRXXPITXTVXSAXPAXLXLXXXGXXXSLPAGHGSPGLQPRPDLPQAPRPIPFASWAGRCSPTSQVVINCAIVRGVKYNQATPNFHQWRDARQVWGLNFGPPAAAGPFAAGXPLPSXXGPPGAPPPPPXPWSVRPALP

SEQ ID NO: 1021334 - protein, 392 aa, Homo sapiens
MHTTITTLTLTSLIPPILTTLVNPNKKNSYPHYVKSIVASTFIISLFPTTILHVPRPRSYYLELDTEPQPKQPSFSLSFKLDYFSIIFIPCKQLFEYMVHHRILTVIYKTQTQTLISYFKYLLIFLITILILDIPITNLFHLYIGLGRAYGHPYPNYGIIQYDDNAQRQMPNTADHIKQSYTSRIGDIGFILAFSMIDPTLPTHEDPEHNSHFYKLIQRLSPLLGLLLQQQAYQANKVIDKLTHHQDIEETHHSHQPYFHVRHYQTQERRDLPHADTARSTNNRPYCDTRNKHKSMTLVRKADPWHRTDTHGERVLDTIEEDAPDSTRSKDGKTTQAHKDQNGDGEPEQLTSTTTKASQHSTLNTAQDTPDSKRAQQGNDAQQRARNRKSAQ

SEQ ID NO: 1021335 - protein, 109 aa, Homo sapiens
LLERLPQAVTEYWQALAHGSWHTRQERWAESYAAAFAEQAFMARQLDEISIAGMTLVQQLVDAPDTEARQRAGGSWASVRVSQLMWPGLPAVAIPGAQHIYRDGDPEGA

SEQ ID NO: 1021336 - protein, 314 aa, Homo sapiens
MPCWPAPSICLPASSLLLCAECCLLLAMAAGVHVPHACCCPGCLLWALPGVSMPGVKLTTQAYCKMVLHGAKYPHCAVTRAPGGLRSRMPRNGSNLPPWERPQAAPTKPHTISRDCIPPLPRTPWPISPHAGGGSHPDRFMVQTDHSYVMLVIIKLLSNNTGCQSKPGSQARGLQNRQRLQARNETIKDENSTETMDRKRLRATRTSTREQMGGAEDPTQHKEQNAKRQKRTSTPWKAASQTTEPHTPRYNGKPKNRRNRGGIALWTADAWTAPDYLLSRTYNEKNWKVEGQTKREARNRERSEETVQEAEADQ

SEQ ID NO: 1021337 - protein, 82 aa, Homo sapiens
ACPCANDIHPDCMAICRLGHHVVQPVMGLYAESEGWVRALGCTAQVVVVHFLNGLEIDNSLQLRLMLVHIIGKGALDCLDYK

SEQ ID NO: 1021338 - protein, 120 aa, Homo sapiens
VKAHLLGIARAVGAEVQRITATGVVHVDMATIQKQSLTLFCVAESGVAAFFGHVIGFGFNNSRRKPEIAHTMTNDFSEYFTRKQLGIAVEEAIGQRAGGEQWGKVGHGGQGLIRLNVTES

SEQ ID NO: 1021339 - protein, 102 aa, Homo sapiens
RVVKIAASVPNTLPSNMVNTTYTKTPAGPPRAETTATEILLPLLIMIIILFTIIIIIIVLLRLGLLLTTTIRRSNTYPQKRSRLRRGRQTTYYYEPTTPSSN

SEQ ID NO: 1021340 - protein, 113 aa, Homo sapiens
MAARARSGPHKSHPLSPTILPLRSNVYIHIYPKKPPLPTGLTLKQYYTTRKPRNTLNTSWDTERKLSKIPRNAQVIPKASEVEVKKKKKNLRGGLAFNLFHSELHHNLSVAAP

SEQ ID NO: 1021341 - protein, 113 aa, Homo sapiens
MYRVVIYPRLAIQLKKATLEQPVRNSLNPEKQAAIFKLTTPERHERGIITFGKRQTSYKAIPRPTTVNKNYQKTSRCTYPKSPRPSRTKAHNSTNSNIQSPPPGKDRREHPLG

SEQ ID NO: 1021342 - protein, 217 aa, Homo sapiens
GVLLWRWLSQNQRTFWVVGTWYEAEGSPVKLTRHTSPPSPKLLTQNATPTLLINPPPNSNPTFRPGDSIPRPRSATSNTPPPRSTTLLARRERTPVYNFLKPTHPDSHRHSVSHGASTRIDKRNKIIPSFRVVHIPAIGNALTTAREIRPRRVRHSLNTHSSQNPKNPPPPRETGLGRAAQVGSEPSDPSDFFILIPRAVEIIGVRYRFGPEIPKNP

SEQ ID NO: 1021343 - protein, 63 aa, Homo sapiens
GVLLWRWLSQNQRTFWVVGTWYEFHKKHGIAHKRATLAPYPDPFIYKLANARSPELNRAATLS

SEQ ID NO: 1021344 - protein, 150 aa, Homo sapiens
GVLLWRWLSQNQRTFWVVGTWYESRSTPARVFRLLGYYYEASSSFGISGSPYSLGSRLELDNSRLVDMHLVIGFVDDEVFDVEIIVVVIIVIIVVFIIVIIVVLIIVCKDTLAPFKRAGDSLNGRARFRDGTSPSSSYPAIITYVLRDPT

SEQ ID NO: 1021345 - protein, 139 aa, Homo sapiens
MLESYLGNGVIITGKATTQTSGLQSPKDYELNKIAETLPSEKHTNTSIYNSYGTLKVLRTSRSLLAMTTRELQIHIPGAGETTHPRNPPRIAPQTTNYGLTQTRPSKTRRQTGAQPPPNQPSERTRLRTPAARYLIPRR

SEQ ID NO: 1021346 - protein, 202 aa, Homo sapiens
MSDNEALASEVIGTPKKPFNSGKQTRAITRLRRRERESLTEELVRRSRRRQGISRRLRMGVRLAVLAVLKFRRRGAIRLVARATIFPLVRAWRDRRFLTITGLLLLFSGFLLCPLFRLLQILRLIFLIVIVIRFGLVSGRGRGGLLAGISGVRSYPLLRRPLLRTRLLRILFATVMRRAIVSRVWVVWSNVFARKKRRDVVI

SEQ ID NO: 1021347 - protein, 140 aa, Homo sapiens
LHSYHSNIVLPQYPSIPDGDRSEAPSSPLTWTPPIPPVTPPWHPDSPLSPSLAPRRGGEASAIKRPHPRGPRHPHPDRYRTCDPPGPNPHPLPIGACSPAGVPLGGDYHPPIPLSSQSPVSLELLQDAPSPRNQTRLQCP

SEQ ID NO: 1021348 - protein, 183 aa, Homo sapiens
AKQRWDDRHWSQKKLDEMTDRDWRIFREDYSITHPRWQDPQSHPILERLFSAPTHLEVIDKCGYKEPTPIQRQAIPIGLQNRDIIGVAETGSGKTAAFLIPLLVWITTLPKIDRIEESDQGPYAIILAPTREWAQQIEEETIIVWETARYPHCGCHWWHLQRRPGFRLRMGCEIVIATPGLFD

SEQ ID NO: 1021349 - protein, 242 aa, Homo sapiens
NQSCRRHRTWYVVYTGDRTCDGKNATLDFLGWKEVRPPLLQQIEHFIHIITGVAVFLGCVLSSSCALILEYTWLEAVIFLIGIIVAKVPEGGLATVTVCLTLTAKRMGKGKLLSEELRSCGDLGVHMHHLLCDKTWNSDSEPGMTSGPTWWFDKSTSTEDDTTENQSGVSLDKTSSYLACYCPEVQVFVAGQCFRLIRMNLPILKRAVAGDASESGLLRVHRAVLGSVKDDEEKIRKSSRYA

SEQ ID NO: 1021350 - protein, 185 aa, Homo sapiens
MVKLAEPGLAAAPGPLGPGQLTLRLRACWAQLRRPHGYGMGLYDLSPCLCLFTPGACDVCCCGCLLNLHVGADGSQLTCNGMDDLGDGCLNRSCGLVGMEEVTCALVQTFLIPECHDLLRKLLPCSSITLQPTWSSLTSGNLQPVPQRLGNTLAAGGVGMAAVQLCRTSGECDRVRNGLGQSKPE

SEQ ID NO: 1021351 - protein, 114 aa, Homo sapiens
MVKLAEPGLAAAPGPLGPGQLTLRLRGLAGLNFADLMAMAGAVRPVSLPLPVHSWCMEGAGVVIALGEGVTRTGKARQTGVSGVEPGPGLCARNKVSVPSVPDLPGFLHGPLTF

SEQ ID NO: 1021352 - protein, 124 aa, Homo sapiens
RGFDQQGLNPTTLNAIEQAPSNLTMNPSNYGTPQTHKSNSVGRNYEEQADYGTTKRANPSYSTRSSPGPSRKTTPSPERQNSKAPKLTLDSQTHDSLIAECTVAEKCIVQDHMSDQYPCSCELS

SEQ ID NO: 1021353 - protein, 186 aa, Homo sapiens
  misc_feature (186)..(186): Xaa can be any naturally occurring amino acid
VIQATSSADVDGVTCEDIDECALPTGGHICSYRCINIPGSFQCSCPSSGYRLAPNGRNCQDIDECVTGIHNCSINETCFNIHGGFRCLAFQCPENYRRSAPTRCERLPCHENRECSKLPLRITYYHLSFPTNIQTPRGGFSKWAPSNAVSPGTGLALGITRRELKEGFFTNPEGEAPTGGGWALTX

SEQ ID NO: 1021354 - protein, 241 aa, Homo sapiens
YLKKGYLTLSDSGDKVAVEWDKDHGVLESHLAEKGRGMELSDLIAFNGKLYSEDDRTGVVYQIEGSKAVPWVILYRRGKGPVEKRLSQADVAATDERKQSSSTVGGLGKEWTTTTGDVVNENPEWVKVVGYKACVDHENWVPNYNALLAAVGIQPPGYLIHESACWSDTLQRWFFLTAEQQERYREKDDERKGATLAAERSPDFGDIAVDTLGAGSQSGSSSFNVHPQTDDQIHVAYNPRR

SEQ ID NO: 1021355 - protein, 103 aa, Homo sapiens
  misc_feature (18)..(18): Xaa can be any naturally occurring amino acid
  misc_feature (39)..(39): Xaa can be any naturally occurring amino acid
FGGGLLVQTRDYQENAPXTENSGGALAKVEDSNPSEDFXHYKTGLKESKQPPGLMKSEPESRLEKGVDVKFSIEDLKAQPKQTTCWDGVRNYLAALSGTSLSS

SEQ ID NO: 1021356 - protein, 177 aa, Homo sapiens
ERRRSVGRQRWRQRRQEPRDRQKYTGGRRRKESAVLSRKHTLLHLAPPPPLCAACPGWAPEACSDCYVTARLREDRGQGTKRLSRGKPLRTKFRGHFCSASLLSSRPSPISAALERPEVLFSSSRAQPPRFPATMVTMEELREMDCNVLQNGMMNRDENGGGAGGSGSHGTLGLPSG

SEQ ID NO: 1021357 - protein, 204 aa, Homo sapiens [sequence omitted]

SEQ ID NO: 1021358 - protein, 459 aa, Homo sapiens
MAAPLEAQDQAPGEGEGLLIVKVEDSSWEQESAQHEDGRDSEACRQRFRQFCYGDVHGPHEAFSQLWELCCRWLRPELRTKEQILELLVLEQFLTVLPGEIQGWVREQHPGSGEEAVALVEDLQKQPVKAWRQDVPSEEAEPEAAGRGSQATGPPPTVGARRRPSVPQEQHSHSAQPPALLKEGRPGETTDTCFVSGVHGPVALGDIPFYFSREEWGTLDPAQRDLFWDIKRENSRNTTLGFGLKGQSEKSLLQEMVPVVPGQTGSDVTVSWSPEEAEAWESENRPRAALGPVVGARRGRPPTRRRQFRDLAAEKPHSCGQCGKRFRWGSDLARHQRTHTGEKPHKCPECDKSFRSSSDLVRHQGVHTGEKPFSCSECGKSFSRSAYLADHQRIHTGEKPFGCSDCGKSFSLRSYLLDHRRVHTGERPFGCGECDKSFKQRAHLIAHQSLHAKMAQPVG

SEQ ID NO: 1021359 - protein, 87 aa, Homo sapiens
NEPATTRYRRDRPPAPAGNLSAVGNIGDGTLDQLSLNVIVPLDKFGISGARFTFRNDWNKTSVTDPTTGEERPISRVRASQANVGFQ

SEQ ID NO: 1021360 - protein, 100 aa, Homo sapiens
MLRSIFCVCLVSLTCFISSAKANFQPRATFSSSLQSIKPASIDDVIDRAHELLGTPYKWGGTSAEQGFDCSSFLVYLFKTQANIQLPRTTAAMHRSSLPW

SEQ ID NO: 1021361 - protein, 84 aa, Homo sapiens
DGRGEILAFVGHQVGDGLGLAVAKVRTDQVGIVDPAVIDVLVGLHLGLQLLHHVAFLQQVVGQLDAGDFTEGLGQHLGFVLVVI

SEQ ID NO: 1021362 - protein, 119 aa, Homo sapiens
MFLRSFKAPQPANDMAMASTTLLCRDEVIVYSWIIERAGRIQYTRSTRFSVYSTTFRFTSEVERERKSNFTALLKSLFNDALTVTGTSTDASHESCQPSLVAHLTKTRRSVTSLSDTTH

SEQ ID NO: 1021363 - protein, 203 aa, Homo sapiens
  misc_feature (179)..(179): Xaa can be any naturally occurring amino acid
MALFGALFLALLAGAHAEFPGCKIRVTSKALELVKQEGLRFLEQELETITIPDLRGKEGHFYYNISEGEGSQSCNLNIFRARFPATAGADASISPDASLGLLFLRQLLYWFFYDGGYINASAEGVSIRTGRGALPRDPAGRMKVSNVSCQASVSRMHAGFGGTFKKVYDFLSTFITSGXRVLLNQQICPVLYHAGRFLAQLPP

SEQ ID NO: 1021364 - protein, 178 aa, Homo sapiens
  misc_feature (61)..(61): Xaa can be any naturally occurring amino acid
  misc_feature (63)..(63): Xaa can be any naturally occurring amino acid
  misc_feature (67)..(67): Xaa can be any naturally occurring amino acid
  misc_feature (73)..(74): Xaa can be any naturally occurring amino acid
  misc_feature (76)..(77): Xaa can be any naturally occurring amino acid
  misc_feature (87)..(88): Xaa can be any naturally occurring amino acid
  misc_feature (90)..(90): Xaa can be any naturally occurring amino acid
  misc_feature (92)..(92): Xaa can be any naturally occurring amino acid
  misc_feature (94)..(94): Xaa can be any naturally occurring amino acid
  misc_feature (96)..(97): Xaa can be any naturally occurring amino acid
  misc_feature (99)..(99): Xaa can be any naturally occurring amino acid
  misc_feature (102)..(105): Xaa can be any naturally occurring amino acid
  misc_feature (107)..(107): Xaa can be any naturally occurring amino acid
  misc_feature (110)..(110): Xaa can be any naturally occurring amino acid
  misc_feature (122)..(122): Xaa can be any naturally occurring amino acid
  misc_feature (136)..(136): Xaa can be any naturally occurring amino acid
  misc_feature (146)..(146): Xaa can be any naturally occurring amino acid
  misc_feature (178)..(178): Xaa can be any naturally occurring amino acid
MALFGALFLALLAGAHAEFPGCKIRVTSKALELVKQEGLRFLEQELETITIPDLRGKEGHXVXKSMXRSVYDXXSXXINSGMRFLLXXEXCXVXYXXGXVLXXXXLXTVXVRSSVDELVGIXYSLMKDPVAYTSNXDMDFRGRFFXLTERNWSLPNRAVEPQLQEEERMVYVAFSEFX

SEQ ID NO: 1021365 - protein, 276 aa, Homo sapiens
MGRKRLITDSYPVVNEEGGAVWAQKGELAPELGEEPQPRDKEEADLELLRQFDLGWQYGPCTGITRLLAAGVGAKQMWLEVDLPLEVWHGAEDSTRRPHAFRGGQSSGISIPYEARTERPPGLSSLCLTQPRTISDEKLRAHCSCFSSARAAEEPLAGRGCTVSTRPFNSVRSNQWLQESPEELRVLRACVSGWIGPVVTAGLRPWCIAFPIACCLSSLDPMILGTVRARSAVGGVVPRGGRMRVPPAGRASWHPGWACAHTPRGSPLWFFPADFG

SEQ ID NO: 1021366 - protein, 89 aa, Homo sapiens
MGRKRLITDSYPVVNEEGGALWGLGVTSGMGGAVRAGEDLDDLLDNLNDAQYMRTELVQQAHTAVDRADCYLDKLYDMAYKDSTWNHAN

SEQ ID NO: 1021367 - protein, 202 aa, Homo sapiens
LRLVRPVLIGRGSSPSHDSSHYMCRRLCLRSPGHGSVASTPIVPPCPVSAAHHACALLLPTIRFFMPEACLPASPMLAAMDVLPLFCLVCLSSAHLSILQSLVPAAGSSLYLVCHHVPSTKCYHAIVNSCAEPLCVLVMLGHVDPASQLVVLVMARRLWETPPVPLPPWLPMRSLCGMPWMGWASSGCGEPLAGDGFSDWMT

SEQ ID NO: 1021368 - protein, 196 aa, Homo sapiens
MAAIRKKLVICWVMVPVGMTCLLIVFSNGSVSVMVYVPTVFENYIADIDVWTVKQVELALWDTAVAVKSYDSDMLCSLSYPGLLSVRVLHVLLHLISPEQPGENIPEKWTPEVKHFCPNVPIILVCVNTEGPECKTEQHHVRELANDECSDALFGLSEGLGHGNLDHVPLATLSAQPNDKAGVREVYEMATRAVLQ

SEQ ID NO: 1021369 - protein, 93 aa, Homo sapiens
FKRRDLAFGLAMSTNNMSDPRRPNKVLRYKPPPSECNPALDDPTPDYMNLLGMIFSMCGLMLKLKWCAWVAVYCSFISFANSRSSRGHEANDE

SEQ ID NO: 1021370 - protein, 93 aa, Homo sapiens; identical to SEQ ID NO: 1021369

SEQ ID NO: 1021371 - protein, 93 aa, Homo sapiens; identical to SEQ ID NO: 1021369

SEQ ID NO: 1021372 - protein, 164 aa, Homo sapiens
MNKRFNNNVPVIITTLTRFEIMVSVPYGLEALGSSLSRRIVDLNSAGNYETLLGDSMSSGCRLRAWRLDCVVTALTGGRYSAQPAPGLGQRVANSTRLIAECPGRWRVGSRRGRTPRWRPFRWRMRGLRRHWPGGFRGRWSGLRGIGCCLGVQQAQRRRMGASD

SEQ ID NO: 1021373 - protein, 72 aa, Homo sapiens
LEDPTGGLVLFFFFTALATLTVAILLIMEGLSAFLHALRLHWVELQNKFYSGTGYKFPPFSLEHIREGKFEE

SEQ ID NO: 1021374 - protein, 289 aa, Homo sapiens
  misc_feature (33)..(33): Xaa can be any naturally occurring amino acid
  misc_feature (36)..(36): Xaa can be any naturally occurring amino acid
  misc_feature (209)..(209): Xaa can be any naturally occurring amino acid
QGCGGRNGVSFTPPSSSWSSSPTASVPSGFSSXRTXGGGPPQDTTRLPSSRGLAMATHGQTCARPMCIPPPYADLGKAARDIFNKGFGFGLVKLDVKTKSCSGVGILNAPDQLKQDTGKVTGTLETKNKWCEYGLSSTEKWNTENTPGTENAIEDQNSQGLKPTFETTPPPNTGKKSGKNKSSYKRECINPGRDVDLESAGPATQGSAXPGYEGWLAGYQMTFDSAKSKLTRNNFAVGYRTGDFQLHTNVNDGTEFGGSIYQKVCEDLDTSVNLAWTSGTNCTRFGHCS

SEQ ID NO: 1021375 - protein, 302 aa, Homo sapiens
  misc_feature (33)..(33): Xaa can be any naturally occurring amino acid
  misc_feature (36)..(36): Xaa can be any naturally occurring amino acid
QGCGGRNGVSFTPPSSSWSSSPTASVPSGFSSXRTXGGGPPQDTTRLPSSRGLAMATHGQTCARPMCIPPPYADLGKAARDIFNKGFGFGLVKLDVKTKSCSGVGILNAPDQLKQDYWYSNWDPGDQKRSGVSMDRLAQKSGISDDTLGNSRSVAIEDQICQGGKHDNLEYYSFTRKTQEPKIGIIHVVRCHRGMCTKPLCLLRVRGLDYAWTDASPWVQQYYGYEGWLAGYQMTFDSAKSKLTRNNFAVGYRTGDFQLHTNVNDGTEFGGSIYQKVCEDLDTSVNLAWTSGTNCTRFGHCS

SEQ ID NO: 1021376 - protein, 275 aa, Homo sapiens
  misc_feature (33)..(33): Xaa can be any naturally occurring amino acid
  misc_feature (36)..(36): Xaa can be any naturally occurring amino acid
QGCGGRNGVSFTPPSSSWSSSPTASVPSGFSSXRTXGGGPPQDTTRLPSSRGLAMATHGQTCARPMCIPPPYADLGKAARDIFNKGFGFGLVKLDVKTKSCSGVGILNAPDQLKQDYWYSNWDPGDQKRSGVSMDRLAQKSGISDDTLGNSRSVAIEDQICQGGKHDNLEYYSFTRKTQEPKIGIIHVVRCHRGMCTKPLCLLRVRGLDYAWTDASPWVQQYYGYEGWLAGYQMTFDSAKSKLTRNNFAVGSCEKTFNRKDHLKTTSRPTTPQAP

SEQ ID NO: 1021377 - protein, 154 aa, Homo sapiens
MCPGYQVDLDSEHVQKVAEVCVSASLQCGMELPERLCSCTWWSAANLPEEQLGALLAVHAQHCSSRPSVCPHTRLKPDTFRDQAPGALHTPMNLVGDLAKLVYGSQRPLLDSCEPKQQGAWLAEGMLNYTVDGVDVAISTSALATSLNSRVLMQ

SEQ ID NO: 1021378 - protein, 112 aa, Homo sapiens
SLEVPPSYTSGEAVVVRRRARVGRRYRLVISSRGRRRPGRCRPPAPASRISATRPCRRSKWRPTRVRLDTFTGKHLLQQLALHQIFRFVDSLHGRTFLFVLAAHYSFSLRVS

SEQ ID NO: 1021379 - protein, 30 aa, Homo sapiens
MPVTFSKSALLLALMLGLGQAQAAEPDIRT

SEQ ID NO: 1021380 - protein, 144 aa, Homo sapiens
MSMLLGIVDEDRCSCGLVCFIAQAHRSVTTCKDSVRDEFSTEVVGQCRSKLVHGSTVVAMESLPYRRTSLVMALSSSRIARMDAGLLAKGVRPTFVSGEFGPRADSAEGIRGGLAERMQRTQTWTAGRLSFQGTVKESQTERMS

SEQ ID NO: 1021381 - protein, 51 aa, Homo sapiens
MGEPTGPAEAEHDGTRAVENHDHGADNTMNRQTLSDRRGSLEKTPPKPWQV

SEQ ID NO: 1021382 - protein, 99 aa, Homo sapiens
DPPLIGAVRVRCTDVTQLDQFAPLDSVMHQAAPLQRDALPRRTASSTRLESLLHKPLRSLPISTPAASHLRQPGLSVVDDGAVDHLLRRLWQAPTIEMR

SEQ ID NO: 1021383 - protein, 112 aa, Homo sapiens
MAVTDKTNDQQDRKKKDRQQAAKQNSQKQKRHEHNIRHRKRHRTNHTAPLTQRHPKRATNCASHPAKNTQLDERETRTQQHQMAATSHDRNNGNRRQSHTDNEDNTTRHNTT

SEQ ID NO: 1021384 - protein, 116 aa, Homo sapiens
SSSARSRETVHDKLTADHRDQPQNKIELQTPSSKSGSAVSARVVNVLVSAETVIQDSPPCSRANVDAKSRTPRTGSTAISALNQAFGALRVSLPSVWFLTARTSGCNLIKPSSAAV

SEQ ID NO: 1021385 - protein, 392 aa, Homo sapiens
AGGLPRGAARPSASGAWLASRSRGPPVPRCRARRGSPLCGPGAGLVSAGSALCSAGWLPRCERPVVSFCAPRWSAGDGGVRPCCRRAPRLPPFRSTWSVERARRALPRPRWSSRASARAGERCGAPPSSPASVAPARVRSLAAAVVVVAARGVDALVYAGAGDGAVLAGVARRLSVCRGDMSRGGGGGGGWRGSGVGGGGGGGVGGGGGGGGGVAAPIGAELLYSSKVRVPEREAFAPFVRRSRDACAQCDACARAVVSVSVITSALHRAADWAKSVFSSAALGDPRRTARLVNVAAQLAKYSGKSITISSEGSEAMQEGAYRFIRNPNVSAEAIRKAGAMQTVKLAQEFPELLAIEDTTSLSYRHQVAEELGKLGSIQDKSRGWWVHSVLL

SEQ ID NO: 1021386 - protein, 116 aa, Homo sapiens
CTHSKYVPLMSLKHTPRQVGSGKIHLQKFPWFGQTRLFECVIGKHGLFGPLLRAKFASSIMSCHLKGEHCSAVPCSYLCQDLFFHTVQLTNNVSSDGNPFGIKVVVTNCSVNVKAC

SEQ ID NO: 1021387 - protein, 114 aa, Homo sapiens
RCLNGLLPQVAWDWNQEGVVALRCIDLQVADVFLGGHQGIHQLTGARWRKAPVGGERHYAELGRGVLEGFRQVVIVIGGRVEVVQGLGHQQVGIGVETPRGTPLALGNCSVAFH

SEQ ID NO: 1021388 - protein, 146 aa, Homo sapiens
RHPGPGAQWGPVVVLTSPCCWIGALQSYRAHWGPLGVAFIGNRLFQFWKDQLLLDSKINIRSATDLVRPGRMLVGYTTDTGNPVHIPDEDLMRHGFILGQSGVGKTVLGKLLMFQQIQRGGGLTFIDGKMNADDLQTIYQYCCWAG

SEQ ID NO: 1021389 - protein, 208 aa, Homo sapiens
RLELSTPLASYRVLGLKVTHCEGMIKSSLMYIELLHPCGPQLTEVFPKNLERLLQELLHGVALSHLDCPPVAQMPSQELKVISISSLLIFSLLGFPLLPQFFPEADSPPPHGLDQARSLCQRLGPSPVFLFFVVISSLSNLLLIIGRLLFLLASLFFLLQGEGQAGDPSSLRPFLRSFSRSFSSSICSSLDCSFLRSCFSRSFTRASR

SEQ ID NO: 1021390 - protein, 129 aa, Homo sapiens
RFFVNSGEVSRNEFDGFAKPLLLHARAYAWAPRIFRTQRSLFEQDISRQRGIPFSIRELNTSGELAPAAERDEYVPVLYSQTQSLLGSPLGFDLLASPAPCSAGACTTKRPLVGVTAHAIVSEYRRYRL

SEQ ID NO: 1021391 - protein, 249 aa, Homo sapiens
LGSEAGFESAEGSLVWRCGSWGLTGAAAYPLRSTPSMRPPWFWSPVIMLVTPLLGLTVPVWLAKIAEMEDVGLLFARLGKYILCCLLGHAIHGLLVLPLIYFLFTRKNPYRFLWGIVTPLATAFGTSSSSATLPLMMKCVEENNGVAKHISRFILPIGATVNMDGAALFQCVAAVFIAQLSQQSLDFVKIITILVTATASSVGAAGIPAGGVLTLAIILEAVNLPVDHISLILAVDWLVDGPVRLNVEG

SEQ ID NO: 1021392 - protein, 317 aa, Homo sapiens
LGSEAGFESAEGSLVWRCGSWGLTGAAAYPLRSTPSMRPPWFWSPVIMLVTPLLGLTVPVWLAKIAEMEDVGLLFARLGKYILCCLLGHAIHGLLVLPLIYFLFTRKNPYRFLWGIVTPLATAFGTSSSSATLPLMMKCVEENNGVAKHISRFILPIGATVNMDGAALFQCVAAVFIAQLSQQSLDFVKIITILVTATASSVGAAGIPAGGVLTLAIILEAVNLPVDHISLILAVDWLVDGPVRLNVEGDAPGGQDPPKITVDRYGVEESTEPEWIQVKSELPWIRLQSPLEEGNPSSNTIRGAAGHATGALEGSVM

SEQ ID NO: 1021393 - protein, 283 aa, Homo sapiens
MTARYEAGFESSPGVSRVRDSSSLVAASLAGVVDVLWPPPEGVWALTETPEVAGMGWAGPGCARSSRRYGTDVHNVLPALGLVGLWAKCWHLCGCCCRECCVADVSATWPGLEWRPAGRGLPVDALSHGCIPGRGMPLGQAAGGLSACVCLPVSVGDQIICPSCFSGLQTFVHHVFVNAPVTCTHQLSTDGEGTDATLLELRRYRKMATNFLAHEKIWFDKFKYDDAERRFYEQMNGPVAGASRQENGASVILRDIARAEEDSNPWELGPASGARGPVSLSVR

SEQ ID NO: 1021394 - protein, 301 aa, Homo sapiens
  misc_feature (271)..(271): Xaa can be any naturally occurring amino acid
  misc_feature (279)..(279): Xaa can be any naturally occurring amino acid
QSVPAAPSSRPGLGLAVVYSLRPNRKMATNFLAHEKIWFDKFKYDDAERRFYEQMNGPVAGASRQENGASVILRDIARARENIQKSLAGSSGPGASSGTSGDHGELVVRIASLEVENQSLRGVVQELQQAISKLEARLNVLGEELAWPPGHGPTDPARISHAPSWSPQPRSQPHQQRMTRMMTLTCMAVTMRRRTRRRHSCGRSGYGSTRRRRPRSLHWWPKSSILLDVKPWDDETDMAQLEACVRSIQLDGLVWGASKLVPVGYGIRKQXIQFVVEDXKVGTNQMEEEITKFEENVQSVD

SEQ ID NO: 1021395 - protein, 309 aa, Homo sapiens
  misc_feature (279)..(279): Xaa can be any naturally occurring amino acid
  misc_feature (287)..(287): Xaa can be any naturally occurring amino acid
MTARYEAGFESSPGVSRVRDSSSLVAASLAGVRKMATNFLAHEKIWFDKFKYDDAERRFYEQMNGPVAGASRQENGASVILRDIARARENIQKSLAGSSGPGASSGTSGDHGELVVRIASLEVENQSLRGVVQELQQAISKLEARLNVLGEELAWPPGHGPTDPARISHAPSWSPQPRSQPHQQRMTRMMTLTCMAVTMRRRTRRRHSCGRSGYGSTRRRRPRSLHWWPKSSILLDVKPWDDETDMAQLEACVRSIQLDGLVWGASKLVPVGYGIRKQXIQFVVEDXKVGTNYMEEEITKFEENVQSVD

SEQ ID NO: 1021396 - protein, 196 aa, Homo sapiens
DGCYPSTIWQHAHRVIGEHGGIFHAALAQADTSAVLEIDSGDNQHLANLIRYSAMLGKSGFLKRPQVAFDAFEPFFKERLRVENRPVVIMRRHFGGEQLKNFGDLERAQLELEAVFHEPLDLVGSLTLLLGREVQDRRLRLPGHLPATIPRGEILQQLQAMGMAFLRVKLHGKARTIGQCGGKIDAVMPATCTDRR

SEQ ID NO: 1021397 - protein, 106 aa, Homo sapiens
GGTAILRSRVIPEPLPPKPEVAAHIPGLSIKRNGAKPDNIWSGFRQGPDGNCVTVSAIKAAMYRFGQSPTDIFRSVRKEPGGYHVVMRDDFQLRLTDSELAQAAQG

SEQ ID NO: 1021398 - protein, 265 aa, Homo sapiens
MARDSSRLKFVTDGKLNEEMEFPSVDEDARLGSIKGTEDMSVVGPYTYYDPKLFCSGSPSGGMMMNDSSDEESIKDDSAVATACTSSQQNDTMIQYRQGGCLEYCRGTDGIATDCHPGHAEMKRVPGSGVFLGYCRPESWVQTLSFDEREQHHELLTSMTVEMRLPMSPFKMKVIPSIHPGRLAMEATYINHNFSQQCLRMGKERYNFPNPNRFVEDDMDKNEIASVAYRYRRWKLEDDIDLIVRCEHNVVLTGANGEVSFINIK

SEQ ID NO: 1021399 - protein, 82 aa, Homo sapiens
GSRELSVNYAPRAGQKPNLDSNAGNSKNIGNVGITYQKVYLAMIGNLLHRLLFNIKPDQCQEGDQAAVLQQIHRAYRFALRF

SEQ ID NO: 1021400 - protein, 48 aa, Homo sapiens
LHRHPVHRRDHTIIGAGAASGGVMDASNLLKPLLSSGDILLHWLEQVG

SEQ ID NO: 1021401 - protein, 37 aa, Homo sapiens
INDIKPHQTREHPHVSTPYPPFSSYPSTPTSLPGFPL

SEQ ID NO: 1021402 - protein, 318 aa, Homo sapiens
PGLATAPRRPGRSSCGPADPSDGPPSACGSRRAGLGCNQCGFVWDAHIPEAIPGSANRSAAGARGGEISWPCDPTWAGTGMGRQCECWRAWLGRWCCALRGSCSYGCQQDRTGPALVPAFALCRGLWRMRRNMEARAAWRVHRNLRLHHWTIEAPQAQPGMETWQASASESTTELWKKQRVPKATAPKPPKMRDDGHPEDTFMNTVQERRQEVQGKVGGELQHVPPIPGGGLEAERRGRDQSWSPLCKATTDTPKSPRHDLEIPPRRKMKWEQRGPWALEGREIGGQAAKRDGEGSSTGPVERPKQKRPEDRPVSHLK

SEQ ID NO: 1021403 - protein, 48 aa, Homo sapiens
DYMHRTYEGILETAEAEACELIVMGSHGRKGVQALILGSVAQKVLTHA

SEQ ID NO: 1021404 - protein, 241 aa, Homo sapiens
MAEAGPQAPPPPGTPSRHEKSLGLLTTKFVSLLQEAKDRLCLTSMLAADTLAVLPEAADLLTLPMFLDTVSGLIENTQSKNSIQWKGAGRLCCNYPGTHLLDKLIELKAEIEELQQREQELDQHKVWVQQSIRNVTEDVQNSCFGLRSLMKDICRCFAGDTLLAIRAPSGTSLEVPIPEGLNGQKKYQIHLKKCEVVPFEVLPGEPRSAWLLTPCGDACATTEDLLTKPSAVLHLHSGQLA

SEQ ID NO: 1021405 - protein, 390 aa, Homo sapiens
MAEAGPQAPPPPGTPSRHEKSLGLLTTKFVSLLQEAKDRLCLTSMLAADTLAVLPEAADLLTLPMFLDTVSGLIENTQSKNSIQWKGAGRLCCNYPGTHLLDKLIELKAEIEELQQREQELDQHKVWVQQSIRNVTEDVQNSCFGLRSLMKDICRCFAGDTLLAIRAPSGTSLEVPIPEGLNGQKKYQIHLKKCEVVPFEVLPGEPRSAWLLTPCGARALVCPHICNMRSRAHLAVYYTYTPSCPRALPSRPSSQCKLYTFQIEVLKLNSHLAVPWAVQKSTAMAGPAAEITVEWRPWALKQGHVVSSVHSHWDPTTLDTRPLQSSALAGQQHAASRQQQAAAAATSKQQAVRPDPTLLPPLSPSRQTLQVYSELPIELSEIFDPTRECM

SEQ ID NO: 1021406 - protein, 90 aa, Homo sapiens
HRFRETGREATKAEEVLAVHVIELGEVVAAGDLVSELVVNAAEVEVLAGSAADKTAVLVVEGDLFVVSGIAVFGFIQAAAGKHQVLEFFG

SEQ ID NO: 1021407 - protein, 154 aa, Homo sapiens
YSDRRYSDRQCGRLAGHAVLEVVQGRDLACTGEHALHVVQLLGVATIGDDHLPRHGRLDAGFETIDGQFHGFAGGDLLDQWVAHHRQDDGYGCHDRLAARQIHRAQARPQEDGEGGVGNERQHDPPGKVLGGVFAGFRDVRLEHDEDDALGESC

SEQ ID NO: 1021408 - protein, 221 aa, Homo sapiens
FHHADNRRCLEVQVRVFFVSEGQHLLQRFNGVGARGDDVIEHGQLVALLVQLRRGVARVAVEAHALAVGRLADDQDKCGRLAGHAVLEVVQGRDLACTGEHALHVVQLLGVATIGDDHLPRHGRLDAGFETIDGQFHGFAGGDLLDQWVAHHRQDDGYGCHDRLAARQIHRAQARPQEDGEGGVGNERQHDPPGKVLGGVFAGFRDVRLEHDEDDALGESC

SEQ ID NO: 1021409 - protein, 40 aa, Homo sapiens
QARPYHYCTVATGLKDTGGARPGVLHLEEPDGSRSHLLYT

SEQ ID NO: 1021410 - protein, 334 aa, Homo sapiens
WLLNNFNGLIVGVTREVCWPQGFFRGHPQSWLVQGGRAEWASSFSSRKGLGRLPSEAPGMSPSDHQWQPQLLKGRFCPPRGAYPEFQQKDRGGQDVANFAIDSRLYPDAQSAALGVIFSSVGRFYCHRTFLFSHWGDWSANVRGWALACNRPLGPGEISVQAGESRGNREQSPKGDWFWQGTESPGKKVSGVSPRAGVWVQSGAGATEAGDRGYGRAGGSVNLASQGGGVSSLAPSRWVKDVWHRCDVIRGSIAMSWSKDPCFGRAGGEPGTGSHRQDQHSRGPWGHVKKRGQEPPNDAEEAPRYGKRGDTKNTKQGREKKNAQKERNHDDNTT

SEQ ID NO: 1021411 - protein, 136 aa, Homo sapiens
MLLVSWLSSQYSRFSVQSRSDGINAVGTDGVHSSGCLMLLRSEQGQSAARVQRANTGVLEQGLEQTLQNPLRGVELPGTRVLHVFLIMQVGDLFNLKVNGIRRGPGSVWPGKEDGVPVVAQYTVEVPGVLVVGTEF

SEQ ID NO: 1021412 - protein, 136 aa, Homo sapiens; identical to SEQ ID NO: 1021411

SEQ ID NO: 1021413 - protein, 41 aa, Homo sapiens
MPKVQPAKVVTIQLQVQQPQQKNPDCTTTTIIAATAPAATL

SEQ ID NO: 1021414 - protein, 213 aa, Homo sapiens
  misc_feature (48)..(48): Xaa can be any naturally occurring amino acid
  misc_feature (61)..(61): Xaa can be any naturally occurring amino acid
  misc_feature (65)..(65): Xaa can be any naturally occurring amino acid
  misc_feature (69)..(69): Xaa can be any naturally occurring amino acid
  misc_feature (71)..(71): Xaa can be any naturally occurring amino acid
  misc_feature (73)..(74): Xaa can be any naturally occurring amino acid
  misc_feature (79)..(79): Xaa can be any naturally occurring amino acid
  misc_feature (82)..(82): Xaa can be any naturally occurring amino acid
  misc_feature (91)..(91): Xaa can be any naturally occurring amino acid
  misc_feature (94)..(95): Xaa can be any naturally occurring amino acid
  misc_feature (97)..(97): Xaa can be any naturally occurring amino acid
  misc_feature (99)..(99): Xaa can be any naturally occurring amino acid
  misc_feature (102)..(102): Xaa can be any naturally occurring amino acid
  misc_feature (113)..(113): Xaa can be any naturally occurring amino acid
  misc_feature (116)..(116): Xaa can be any naturally occurring amino acid
  misc_feature (119)..(119): Xaa can be any naturally occurring amino acid
  misc_feature (123)..(123): Xaa can be any naturally occurring amino acid
  misc_feature (128)..(128): Xaa can be any naturally occurring amino acid
  misc_feature (136)..(136): Xaa can be any naturally occurring amino acid
  misc_feature (138)..(138): Xaa can be any naturally occurring amino acid
  misc_feature (141)..(141): Xaa can be any naturally occurring amino acid
  misc_feature (185)..(185): Xaa can be any naturally occurring amino acid
  misc_feature (195)..(195): Xaa can be any naturally occurring amino acid
MDAVNMDLENKCEEDGLRSLSNGFWMPLCLKLHKQIIVECDSELHFWXKICRNCKCGQEKXDVLXRNKXDXKXXKLFEXTKXNTLIAKKKXDGXXMXKXNVXKKTNPVAAKKXISXNKXTYEXDPPDXKQELARKXMXKLXKEKQKVAGSEGAQYRKKQLAKQLPAHDQDPSKCHELSPREVKEXEQFVKKYKSXSGEEEMSNFPVRWMPKAP

SEQ ID NO: 1021415 - protein, 121 aa, Homo sapiens
MVRGWVLGAGPLRRTGRRKFDGAGRVAVERRRGSSCRFPVFAAEPEAAEPGLCGSLDRTDGCVDPYGLLLTCDLENKCEEDGLRSLSNGFWMPLCLKLHKQIIVEVILNLQLSWQQTIIVR

SEQ ID NO: 1021416 - protein, 71 aa, Homo sapiens
MLEASLSQLEQLVSDLVQQNQELLGSNESLKAELARAKDENDSLQLNLMEQEEKHGATAARIQALGLRWCG

SEQ ID NO: 1021417 - protein, 195 aa, Homo sapiens
  misc_feature (170)..(170): Xaa can be any naturally occurring amino acid
  misc_feature (187)..(187): Xaa can be any naturally occurring amino acid
GQSIAPPRGEARLVSSSHHTPEDTHPHRCTSTRDPSETRLVGSREPTTRPEGKPPQARRNAHRGPNIRFRKSNGLTNTALPPSPLGRPSPDSSSLRVRLPETRERIAPLNLPASGPGNSRRHQFYKQHPPYRAPSIHTSTSNTSYFNFSPAFLATGFRTPTTPRPLSARXPASDKILYNHTDERDLXREDWTSPS

SEQ ID NO: 1021418 - protein, 138 aa, Homo sapiens
PCRRGGAGAGRATPAGAVRGREPAPPWWRRPLAVQRQTHRVGSGLQPGREGGDRVCGAGTRGLGGARNTQCGAAPGVAGASARLTRSPRGVRRRPMGQSPFQPDRGDDNDAVAQSVDTPDWTAWIEACSRPDMWFIQR

SEQ ID NO: 1021419 - protein, 189 aa, Homo sapiens
MGQSPFQPDRGGGRRNAGGQAVETPGLEGPRRTRAPSPEVYEIRHLWTTAQGGFSTSVGVLMGRGFRPIQRGLNEIETVTFRQTPSTELTLNVDGPVAKPEVGAWVRVLLGEFYPLPYPLLFHLLGAAIWFHPGALRVEIVLMEDGAEMTGVEGFEGFSCAKESDTFGLTAFRRVELRGTGTRGAQAGL

SEQ ID NO: 1021420 - protein, 220 aa, Homo sapiens
VACTATYHAVCHSRTGTKNMQESDLHTAIMRSKLELESNGIDLGSSSSMAFHVGNTMTSCPAVMVLPSLPGWSHGPHQQLLKPIHADPVAPDTTFDELWKCTQQHYGLTAATVITDAAGIPISKIVVGAWVHVGSSKTTNLASLIGMRFFPRTLIRQPTMDRMAKATSGTVRVFGIIGRGMPFVAAGLAVFDLVSIGKCAYEATNGRSLARADISEKVIS

SEQ ID NO: 1021421 - protein, 147 aa, Homo sapiens
CPECGKTFTVRSNLTIHQVIHTGEKPYKCPEAPECGKVFSHKSSLVNHWRIHTGEKPYKCNERGKVFKHRSYLMRHQQTHTGEQPYECSECGGKAFFESAALIHHYVIPTGEKPYECLECGKAFSHRSYLKRHQQIQTGEKPITSEF

SEQ ID NO: 1021422 - protein, 116 aa, Homo sapiens
CPECGKTFTVRSNLTIHQVIHTGEKPYKCPECGKVFKHRSYLMRHQQTHTGEQPYECSECGGKAFFESAALIHHYVIPTGEKPYECLECGKAFSHRSYLKRHQQIQTGEKPITSEF

SEQ ID NO: 1021423 - protein, 91 aa, Homo sapiens
  misc_feature (1)..(1): Xaa can be any naturally occurring amino acid
XTRYRSRETGRTHVVEHVVTNLMKYTMPAIDDLTQVQTRDRIDQAELGRDRTLGHVRGQIDIEDIAAHTDGDVLVSRTDVVVTGEDHSALL

SEQ ID NO: 1021424 - protein, 257 aa, Homo sapiens
PRRAPPRLRPGSRLPERSGLARCPGPECVPWMAPGLAQAAAGESDSRKVAEETPDGAPRSAPALRRCRRSRLFTACRTLTRWPPLGTGTFGRVHLVEGEGQPSIFFGPQGDEHSRAVIRLKQEPTRSHNEKSVLKEVSHPFLIRLFWTVGMKKGLPLTYASLELRAGRGRLFQLPCATGGRFSRHQRGLFYSAEDPSCATRGYRALQRGLSTGDLDRRRHSCGVGLRVRLGLGSAKLLPACPLDPGSTPILGARGRI

SEQ ID NO: 1021425 - protein, 226 aa, Homo sapiens
AFSSQLLLKQEGRREDSINRNLIGDYIGMEEHPEAPGSFVGNDGEKIDFADTATKYDRRFKVCKARTAPYPKVLVLLLGREKRQTGSQRRVLVKRRLNRNNRDQNGSCLSSFIARQDDMIILHEQEYDSLLESVFKTEFLSLLAKRYEEKTQKQLPLKFSNTLELKLKKENWGPWSAGGSRQVQFHQGLGDLAVLKPSNKVLQVSIGPGMAKNYRPYRKNTTQNTG

SEQ ID NO: 1021426 - protein, 35 aa, Homo sapiens
KSSSVHGHEQQHNDRQVITSGITNGAVTRPPNSVR

SEQ ID NO: 1021427 - protein, 48 aa, Homo sapiens
MQQGPGKPVGRTYTHSPQARIFGAMDTEACSATGEVLGSVPSSGLSQA

SEQ ID NO: 1021428 - protein, 260 aa, Homo sapiens
GQDMQVEACLIGRGEASVPRDSLLKLSIACRHIILAGPRRPPGGQKRSAEHHAAARRAAQALLVSACHPCCPVSLLSPACLRTVALLPSSTPGPCPALGGAGPPGLRFGPVGRRATRAPEAGGRLAIGGGAVEQAAAGMAQPGPVLNCGGTRIHTTGGLAHSYFGTLGRLLASETEVARLLQITFDSQVTLLVIANPGSTRGARVSQAPGAALPDREAHELCAQHFVGTGPVFAPGCTGGKSPLPWAHNKRWRGRFKGVT

SEQ ID NO: 1021429 - protein, 134 aa, Homo sapiens
QDCLRHLTMEGAKKRYGEITESIQERLDFELLTISNSGYPGYFLIVQDFIAEARKMDVSVGPGRGSAAGSAVAYCLGITNIDPIKYDLLFERFLNPDRVSMPDIDIDFDDEGRGRVMEYVINKYGQKQVSQHSL

SEQ ID NO: 1021430 - protein, 47 aa, Homo sapiens
RAGRAGPWNLVETWTPVKGGNLAESVLTDSLQDYPFDGLAAAWQEPA

SEQ ID NO: 1021431 - protein, 112 aa, Homo sapiens
AAGGRQAIPPAVRPMRGRPSPDGLWLLLSGGGICGGLGGGADPGRKRQLRRRRRWRLGRRRIKGPPPGDAVTAAAGPGAEWAPALSPSRRTRFPQLSIFSCRPRSPRRPQAP

SEQ ID NO: 1021432 - protein, 77 aa, Homo sapiens
MDIARDGYVYRDKAWVNAGKIAEEVAKSITWNAQIYEAWTYGFASKIHSICATMTCFDAEILLIASGFQNQDLSELS

SEQ ID NO: 1021433 - protein, 304 aa, Homo sapiens
LNVWCSYVIIGGDYAKVQRRCVIMCQGTKTVRQNLEPLFEQYINNLRRQLDSICGGNWGLPVTHERTSSCLDLCVQDLKNKYEDEINKRTAAENEFVTLKKDVDACLHEQVELQSQGQTLSQNEINIPEEPCMTAELSQIADPSSQDTTLCVLSSGQATVNLDLDSIIAEVKARSSEEIAQRSRAEAELLWYQTKYEELQVTAADYGDDLGNSKQEIAEINRMIHEAGSEIDIVKKQCANLLAGMLDAEQRGEMALKDAKNKLEGLEDALQKAKQDLSRLLKEYHGADECQAGLDVEIALRNVR

SEQ ID NO: 1021434 - protein, 322 aa, Homo sapiens
VGLRNTLARSRALDIQFASFIDKVRFLELYNKVLDTKWTLLQEQGTKTVRQNLEPLFEQYINNLRRQLDSICGGNWGLPVTHERTSSCLDLCVQDLKNKYEDEINKRTAAENEFVTLKKDVDACLHEQVELQSQGQTLSQNEINIPEEPCMTAELSQIADPSSQDTTLCVLSSGQATVNLDLDSIIAEVKARSSEEIAQRSRAEAELLWYQTKYEELQVTAADYGDDLGNSKQEIAEINRMIHEAGSEIDIVKKQCANLLAGMLDAEQRGEMALKDAKNKLEGLEDALQKAKQDLSRLLKEYHGADECQAGLDVEIALRNVR

SEQ ID NO: 1021435 - protein, 224 aa, Homo sapiens
  misc_feature (8)..(8): Xaa can be any naturally occurring amino acid
SRGPPHHXSQYANQPRPGTGVRAAAVNLFGQRQLGAAFAILADLEQQLGAALFQPGVVGTQRSDLRQHRIQRFTGFKGLLALVQEQKPVHILTAAYPTRLGAELDFFIGVDAQICQHEFRPVLVQIAEEHQAQAITQLHYRQAVERVVYVGAPLGKAARLGKLRGQRFKPIGLVTLGLIDPGLEGAEQFTLLQQREQGGKRQRALILHPSQLTQGPRRRMGLRD

SEQ ID NO: 1021436 - protein, 83 aa, Homo sapiens
QEIKNFVILCLKAPCNSLRPRRIQSRVSHVVSPESTSAALPVNEIDTVITLRVSAPSRRAGMMIVLTSDTIVSATFLPTSLSL

SEQ ID NO: 1021437 - protein, 103 aa, Homo sapiens
SYAPSHIGGTTEMMHSSTGNQKFVNLCSSEAPDHTAFRGQYGYYLALAHVVSPESTSAALPVNEIDTVITLRVSAPSRRAGMMIVLTSDTIVSATFLPTSLSL

SEQ ID NO: 1021438 - protein, 625 aa, Homo sapiens
  misc_feature (424)..(424): Xaa can be any naturally occurring amino acid
MAMAPARTMALLPASPRAFIPACLLVASVHSRASSGTHVPGPPALLHPCVLALLCEPDFLNMLYLPCGAWLLFLDTNCLCVINWSYLPGCPPPVLPWAVTAFSPAAPPRTATFLYVDAACPTCVGWTAICLPASSSTASTSRTIVCKFCAHVDGLHQLPHEGMCTAPTCQLRTQGFGGSGIPKAWAGIDLKVQPQEPLVLKDVENTDWRLLRGDTDVRVERKDPNQVELWGLKEGTYLFQLTVTTLMTTTEDTANVTVTVLSTEGRTVRLPASASQTTVGSADQRASFTTTGTYDPTDADTAYELSVLVRRAGISGQTYEATFILAGERNEMAIRSPALRDDAEVTHPLANGTMPVDGSCVTLVQGTNTKFPSDYDTLGCLTFCRDIYSEHGVTDYLSKTCPPIVSIRLDGLLLVTIHYHRKWXFELEASKRDPMFPQCDSKGHLLLDHCQELLGTLPMKKPYQWPGLLKNSFLANHVGPRVKPMGGRYGAPDETTFVGHNTQGPPNPWSQARYFHSKWPLFLGPVMAGRKISPPCPKQGFRVWNKAFLDRRISGRDRAIVGGGGDTNPSSVYMSVLSSEALSQEKFLRCATDNNTTTPPASSIVLIHRKRGRPSQSSHRRPSVK

SEQ ID NO: 1021439 - protein, 79 aa, Homo sapiens
EVRVVTVSETDCLGPCEPSGRVLGEAHGCQRVFPDTRAPTRFVDDEELAYVIQRYREVHDMLHTLLGMPTNILGECPQP

SEQ ID NO: 1021440 - protein, 79 aa, Homo sapiens; identical to SEQ ID NO: 1021439

SEQ ID NO: 1021441 - protein, 94 aa, Homo sapiens
LTLTSIRLGSLPGLCCRKVPGTALITSAKLFLMIYFLSTPPLLTLFNILMTFFFVAPPLNLLNKTYFCSFTISNGIHGSTFFVATGFHGLHVII

SEQ ID NO: 1021442 - protein, 56 aa, Homo sapiens
MSTHSNSLMTPTSPDPERRAPASRSPCWTCIPGAGRRNWPVLAVNQLSPVGHVVAH

SEQ ID NO: 1021443 - protein, 33 aa, Homo sapiens
HHRKRHEEEQHVHGSALHGHRRMRNGLCRCRGC

SEQ ID NO: 1021444 - protein, 86 aa, Homo sapiens
AHLHPGEISSLVAHTKPVWWSLHSNANEIWCHHSDQGTSLGRSIPCPPALCSMRKIHLRSLLLSTNQPKEHLTNFKSDLLSLAAED

SEQ ID NO: 1021445 - protein, 45 aa, Homo sapiens
PLEQGHNKSGLPDKLSSKRVCVEALSVQSKCYDIIKLLPSVHTNL

SEQ ID NO: 1021446 - protein, 94 aa, Homo sapiens
LPHGSPGRSPFLAVVAALFRVMVQVAVGEVGLGGRGRQVNILSRASAPKSSWCPSTFSHTCWISCFSSSVSMAAAKGLRWAGWLPRVLCVVTTA

SEQ ID NO: 1021447 - protein, 328 aa, Homo sapiens
MTRRGATCISEADAARRRAGRMGGQIACRRAPRGQAGGRQRGKEAGGGGVHAVVAVAGPWECRCLTGCRCPGLGEELEGSAQGDRVTAAGSISFMATVTKELKKQIQFADVRCQEFYQSPRPNTGAQIFDTRRSHRSSIDSYSSVCILHRYGSDDEVSPREKQQTNSKGSSNFCVKNIKQAEFGRREIEIAEQDMSARDFTQETCSGGRSPMAGAKIVGCTHIKAQTAVLIETLCALGAQCRWSACNIYSTQNEVAAALAEGWSCKCSLGRASQKMTSGGVLTRCVNMDGWQANMILDDGGELSPTGVYKKVSKRVLRRSEGIVEEEP

SEQ ID NO: 1021448 - protein, 35 aa, Homo sapiens
PETVDAIEEYPEAWGSGVEVLVSVLVGLAMEVGLV

SEQ ID NO: 1021449 - protein, 104 aa, Homo sapiens
TGHALVACGDQNQCLTRGYSDWGLEAHRLLTTGRTLRRPSLGSIVRTPVPGGKPRAVSRRTIAWPSPTAWSHSSGQRGLERQPAAGGPGHCVLQSKTPLPSDEY

SEQ ID NO: 1021450 - protein, 81 aa, Homo sapiens
CPRCFLLLDSEDPLHGFLRHLELSYDPDEPPSLKLLDIDTRLGTQLAGGIARPPERLAGSAAQCEAADLLAEELTQVRRQS

SEQ ID NO: 1021451 - protein, 88 aa, Homo sapiens
GSPVCRKPHGPSHAARFAERGFVDDAYQLTTKGLRVLEADPQGLRDVLCTARIEDLLQERGSEVSHIVNHAMQVALEGDAELAAQLIS

SEQ ID NO: 1021452 - protein, 105 aa, Homo sapiens
  misc_feature (1)..(1): Xaa can be any naturally occurring amino acid
  misc_feature (23)..(23): Xaa can be any naturally occurring amino acid
XTCVLVQSPAGLVAPEKALHLFXSPRKPSSLRLMSKRKLFLKPFRENIPPIIGKRKQPPGKCFLPSLLLEPTSGIDEPHFSTAEGVCEYSRLNPFYFTPQGSEVP

SEQ ID NO: 1021453 - protein, 100 aa, Homo sapiens
MSSSDLSSSLTSRSHQTADWVPRASLWQGKWLVMPRVPTVPPRPPDVKMCLAREPRPTGRSLWRGPHLTVCSTTQARSTLGPEGAALEANPPHTPLPFPS

SEQ ID NO: 1021454 - protein, 109 aa, Homo sapiens
AVNAEVGIWEAHHNIHYHETTAERAAKVNKFAFFYGWWLQRSQNYGLDEYGENSFSLLPAHYTKFQYTLMLQSSLRDSSREIAKGSLLGSGYLPAFNEPVFFVHSILWL

SEQ ID NO: 1021455 - protein, 69 aa, Homo sapiens
NVKRSWRHVVLLGCEEHAIKLDNTETITAQHMPRRTYTRLNLTLPVRSSESLKQHLAESRQAGLKPNSI

SEQ ID NO: 1021456 - protein, 253 aa, Homo sapiens
GASWRLAGPRSLPPNKPGLQDAQVFILKTLCPAVKEPNVQLTPLVIDSVKTVWLSQGRNQGSTLPLSYSFVSVQDLKTHQRLPCCSHLSWSSSAYQAWAQEAGPNGNPLPREQLLLLGTLTDLSADLEQECRNGSLYVRDNTGVLSCAAHRPGPYLVGPSYILFPALAVTSLHATVDISSCGTVATCEACGDAPAAKCFLLTIQSWTQFTLIPDTLPQRVLPACSGSDTSSEVCSETWLRVYYDLSALGDQLN

SEQ ID NO: 1021457 - protein, 34 aa, Homo sapiens
MSLIQHLINGELVNDSGRSADVYNPSTGQVIHQV

SEQ ID NO: 1021458 - protein, 249 aa, Homo sapiens
GWRVSPSLAASAAELGQVRGFHPGRRCHCAVGTLSALSAENGASHVWRVQPDNTLERTPVRIGAFGENTVPILEGLAATDWVVAAGVHVLHEGQLVRPVDRSNRVVNLAAKEYVPMGFNLSEWALRNRQIVLFPMILLAVVGTLSYTKLGQSEDPPFTFKAMVIKTNWPGATAQEVSRQVTERIEKKLMETGEYERIVSFSRPGESQVTFIARDSMRSAQIPELWYQVRKKISDIRHTLRRISRVRVLR

SEQ ID NO: 1021459 - protein, 230 aa, Homo sapiens
DVRLPSASSPWTADDSRAPKGSLRQFLEHHLPVWPGNGHLCVLTMLAVDAQWYERCRPVPVVLHVVSTVGGQWMYFIYEGYQGMVDWRLNTSAEGLTGRVSPASCNVCAGTIIWHVRGSQGTIRTREGRLKAACNLLQQLASPTCDVIGGDWETSPGDNLFRKGRGVGCWRSWTVNGQIAQGGTVQKYAYLQRGGTMVCSIDNDFLLELTMNHRHGLQPAQDHRGRDANH

SEQ ID NO: 1021460 - protein, 283 aa, Homo sapiens
GCSRRHFSERDVRTPLHCGPPARRSSRLLLRSLMHCQCDGVSLPVCADCCAAVRCVVWLWVCACVDAAWSLYWLCCALVVAMAVLCSLLLCACLPCSYVVSILQGGLDYDTASYILTSDLGLAGLRINFPYLYIVGLPLIAQLSCLQGSVFEIHLNGPSPDMTEGCDLMAPTCIQRTRSMMWTREMGPIGTVPGHNVQQGLEEVTRDKTIMQALKKKNAGGALWTADCTLLDDINAVVDWKIPKSEAYITWKLRNRIRAGLGTLASQWRPKCFHIVRPTHDRT

SEQ ID NO: 1021461 - protein, 103 aa, Homo sapiens
WADLEDPRVGPCPIRIPLQTFLPSGRSALQPKLVPSADFLSVHSIPSSGPLIQLLNKTATQLSSGDRPPAELSSAHSDSNPEHPASCAAAQATDNPADPGRRR

SEQ ID NO: 1021462 - protein, 47 aa, Homo sapiens
IEKEKWYSLAIWGIISKAVVGMVCGVSNFSKSIHTGKTGSLEPLASD

SEQ ID NO: 1021463 - protein, 186 aa, Homo sapiens
MTPLYRWEHRGARGRGRGPHSTDGSTEVPKAGGEDPTLQNGSSEVPKVGGDDHILQDGSTEVSGGREVMTPLYRWVHRGPSGKSDDRHSTDGSTEVPEAGGEDPTLQMEALRSPKVGVDDRILQMGALRTFEVGEVTDPTLPEWFAMEDPLKRKSDDPHFTDGNTGGALEGDEETHKVLEHCDDPS

SEQ ID NO: 1021464 - protein, 165 aa, Homo sapiens
MCTCASIPASNRACVHHSSIRQQCTSIPASNRASVYHSGIWQQCTSIPESNRACVHHSSIRQQCTSIPASNRASVYHSGIWQQCTSIPESNRACVHHSSIRQQCTSIPASNRACVHHSSIRQQCTSIPASKRASGNIPVSSGTCAPGRSSVVSFQARSKAKGIKR

SEQ ID NO: 1021465 - protein, 183 aa, Homo sapiens
ETIQYTYADMEQHGLVHGKARSSQTISTTTIRLVRHNEFVMGGIIDASVRIFLDVVSANRSQFLFLARGQYGGCLAVRQAIAALRDDITRDLAADLTLMPKLQHLDAEGLHVMADLIVKSVFATLPDIIDPPAHALPAHLTPQAKITQQLRFIFIGLKHWQGLGSTEEVNQPAVWNRWAVDSG

SEQ ID NO: 1021466 - protein, 56 aa, Homo sapiens
RIVCETSSSKLRCRYAGGHIILDVDINKDSRGETTLAGIRDQHQARKDPSTVRERR

SEQ ID NO: 1021467 - protein, 60 aa, Homo sapiens
MSNVFVFDPAAFKAAFPQFSKFTDEQLTQFFEEVENTVLDNTESSCIGLKDRKKFFYLLV

SEQ ID NO: 1021468 - protein, 45 aa, Homo sapiens
MGMRKAGGFHHRPARLIGLPHVVSDHIDKLVISAHSSRSAVRGEE

SEQ ID NO: 1021469 - protein, 421 aa, Homo sapiens
PPGGIGLRGPRDLLDSPCSLVPQDLPDPLDTQESSLKALLTFSAQVSARQVPQGPLECQGSMGPTGYKGEQGEVGKDGEKGDPEPHLGPPDSRAAWGCRAPGDYEDCQGHSGPPGDRGPIWDSEGRLGSQERLGKRVTDGERGPEGFRGPKGDLGRPGPKGTPGVAGQAGEPGMPGKDGQNGVPGLDGQKGEAGRNGAPGEKGPNGLPGLPGRAGSKGEKGERGRAGELGEAWLPLVELRRPVDDAGMPGDAACECWPPGLIGVPSWPQWPSLEPPGVLRLPGGQKGSMGDARPSECPQGLRGDVGERGPGGACEDPKGDQGIAGSEGLPGDEGELGPSGLVGAKGESGMIEGSWAPRGTQGPNGQQRMYRGVPGPPRVLWGLPGPSRVFLGITVKPGVPVKEASRAAQSVKLCGGDDQGT

SEQ ID NO: 1021470 - protein, 166 aa, Homo sapiens
TPPESTGEFGEDANGFEHVLALLSLVHVLVVDPAVAVAANLVAGGDHGADHIRMPLGGHGHGEDGQRDVEFFEQLEDAPHTGTAAVLVQRLHAHVALALQRLRRDHFREEGFGLFVTVQNVALAAFFVVEYERQRNACLARPVGVRRVTAVTDQVAWVVSALVLVP

SEQ ID NO: 1021471 - protein, 42 aa, Homo sapiens
PARGQQSVLGKLAQAGARQLRFLAQLFDARILFHPELRTTHR

SEQ ID NO: 1021472 - protein, 102 aa, Homo sapiens
MQVPLTPLWELGLGRVVENADALAIAIVLNNQWSLVPNRGISYFLPVSMKLGGDRVSCQFLTATSHQWLHSVSLTQQHGTRVPAIRQCFYSSNPKMLELEGT

SEQ ID NO: 1021473 - protein, 348 aa, Homo sapiens
GGFQKRCRTDRAALAVGALVCCLVLLHLSAMISASRAAAARLVGAAASRGPTAARHQDSWNGLSHEAFRLVSRRDYASEAIKGAVWVLIWVLPTPAWQFMEGKQAKVLENADRCQNHPFSVWPLQQMVSDLCGMPGKRQAVTNPNNTFYATKRLIGRRYDDPDRTGKTLKMFPLKLSVCSNGDAWVEAHGKLYAPSQIGALVLMKMNETADNYLGHTVTLDAVDITRPSYVNDSQRRPLKMLADIWDCMCFRVTNEPQLVVLAVVLEKFRRPVLVVMIYSGGTSAFPSGIRQGAFGGNPPRGTLGGGPNPLLAVRVSAQQRCGTLVQEQGKIRPTKKANDTPKRTWKR

SEQ ID NO: 1021474 - protein, 321 aa, Homo sapiens
LAALLCCPALVALTCYVCDSGQPVDWFVVYNAASILEVSVWDVLAADEVAAVQVSWTMMLLDGWRVTCRALINMPWSGGLCGLNAMHACCTWSNTSQLAFLLYNDQPASTQQGSGLFHAWAHEWVSCSLTTMGASGWSTVYLTSLHLASSAAYSWPHSACTYGQTLLCVSFPFAQFSKMGKQLTYTYPWVYNYQLEGIFAQEFPDLGECGQGPPRKPRTLVTAASDSHPKAGLFSRSFAKFSKLEMAVLRLVGSSLGTNCRSVMHKCRHPASSWSDTGQGLVVTDSFPGPAAKLHSPVPSEGVFQRPDFCVLSTGRDGWAR

SEQ ID NO: 1021475 - protein, 249 aa, Homo sapiens
  misc_feature (177)..(178): Xaa can be any naturally occurring amino acid
  misc_feature (186)..(186): Xaa can be any naturally occurring amino acid
  misc_feature (197)..(197): Xaa can be any naturally occurring amino acid
MRRPDGHAPVHQQRCCPMVAVPSTIHCDHLIDAQVGGEKDLRLGQVTSNHVNDLLSIPCATCMDANILAVCASVKTWICESVQPEFFLEEHMRTPVCSFVIWHMSSPTRHHMGGRHLEGILHLELGGADCCGCHGWDPLGAEVPQGDWREADGLSLRLVLTQRCDPEGGMASSREKXXFRRILWNXHGPGVDSISCXAATLSWGPELCSPWPPLTGPGFYPGPQGMSRPGVPPLSAWEEKHCSSLVCRC

SEQ ID NO: 1021476 - protein, 207 aa, Homo sapiens
GSHQQGHPASRRPMTEGVHFKECLQSEPASQDHQPEELRVPRQHCRSGRRSDSLRPTALWDINHDDPRERSRGVSPRNMDTSAVLAEDSLTGPMEENQFRLVYSQSPALELDKFLEDVRNGIYPLTAFGLPRPQQTLAGGGDHHLSCPPRVNDSDDLNQLEVETLQGVVLECDVLTIAVVCERGESEQPCLDTSCCDSLVGRNLKRL

SEQ ID NO: 1021477 - protein, 126 aa, Homo sapiens
MCDVTQCERRRRSETSSDETTQANEDQQDGGTTCLVCRSTHSVLLPPRHVGPQKLALDWRGAELAAALSLDQKAPPPSPRVTQSEPQEATRGSKQDPRLGREAWLRRDPTSGNRGGHSGSGPFWTG

SEQ ID NO: 1021478 - protein, 124 aa, Homo sapiens
NQQRTPSFLVQRDEVKRVGYIVVSSDRGLAGGLNNNLFRKMLGEMRQWQDKGADIDVVTVGQKASTFFRRVKVNMVGTVTHMGDVPHLEQLIGVIKVMLDAFTEGKVDRVYLVYNRFINTMTQK

SEQ ID NO: 1021479 - protein, 42 aa, Homo sapiens
RFCDTQARSTLQIRRRENHPRRVLNTDSRVETTAAGIGINTK

SEQ ID NO: 1021480 - protein, 122 aa, Homo sapiens
MSEEQFWLGDWGGGSGKRLAGKAALAGRAGGEPVVAADTGWAAGVRAWKAEPGTWRAEASRLGVHPQGEQLPSREGGRRLDASKNRGRDGRPIQNSSPNEHSGKQRTAHAGKNGNMCFIRRP

SEQ ID NO: 1021481 - protein, 240 aa, Homo sapiens
MGWAVRHHGLWQLCVCRLWISCDAWVTLCGAGNQQYWNVHPECGWACSPESREVVCRQDLDQPCKRTEGGMEGLFKTPPPTNTLESSDGTRGKEWKHVFHKEALAGTTKKERILNGLIFTKFGEVCKNCTLNVKDSYSTGGEYKGVRLCAISRIAQCTKGQVSKDLIDGNGMSLTGKPHKGRLKTFGGGLSYNLKKQQNGGTEEGAQAQVTAPTRAQTPKKTNNEKQRCEVETEAAKQES

SEQ ID NO: 1021482 - protein, 86 aa, Homo sapiens
ICVIRGSPPHLHGRQQEMDLLVEGVLDRGNHAMIFGGRGTGKTSLARVFANVADNRGYLVFYMACEPGQDFTSLIAPFLDAARGNL

SEQ ID NO: 1021483 - protein, 203 aa, Homo sapiens
GAWLRVGPGSSEVEWLVPPVAAWPRGGCWLPCARLRQGFACLHLSVLRAHDSGLMPPDGPPSALAMPGSAGFCWALCPRSSPCAGTWVRGPRDCFWSLAKWSCCMLCGCAGCWGPRRCLPRAGPLGGCLPASPPSGFAPGALLVKFFPLLLLYPAQLPGSKSIHLLDHLASERHRGPQGTKLHQICASGPAPGEDPVTRKAFM

SEQ ID NO: 1021484 - protein, 215 aa, Homo sapiens
RSTNNLRGVRAGLRLHRSLTMSDASEAEGGPPEPRASLCMEAPCARLRQGFACLHLSVLRAHDSGLMPPDGPPSALAMPGSAGFCWALCPRSSPCAGTWVRGPRDCFWSLAKWSCCMLCGCAGCWGPRRCLPRAGPLGGCLPASPPSGFAPGALLVKFFPLLLLYPAQLPGSKSIHLLDHLASERHRGPQGTKLHQICASGPAPGEDPVTRKAFM

SEQ ID NO: 1021485 - protein, 204 aa, Homo sapiens
VYIRRVRGFAARGRSARVPSSGAMDTSDLFASCRKGDVGRVRYLLEQRDVEVNVRDKWDSTPLYYACLCGHEELDSTFVANGARCEANTFDGERCLYGALSDPIRRALRELQAGHGFLAGRRRFTMTDFRCSRLRRSRGIPTSDGWSFVQYSGIVHVRDALAAVLWCTIVAYLCQACWTAKWQGQECRWFSGDPLIKPRGPLEA

SEQ ID NO: 1021486 - protein, 121 aa, Homo sapiens
AGTGRQRQLWQTVLNRQHITDGGRDQQWDHRTDLFMQPRQETHHLGIEPQRQGAFGQNQEAGGHQQARQNPQQPLTNRTQRLRAGQDRQALGQEKFEQGVRHGPSSACHRLPLKISGRKHR

SEQ ID NO: 1021487 - protein, 142 aa, Homo sapiens
KGADESGVGFYDHISYPLNMYCFYARACYVGPRLTDFPTPRIMMTSSLPLLDRVLSGKEKGVSIHRIQVLFPTDTCSPLEGDYDIGRVMRVTRLKASGRGKPRYLVESTSGVILEGDVNVLWATYERTVLFDYYPRSLAGED

SEQ ID NO: 1021488 - protein, 56 aa, Homo sapiens
RLLPDYEGCVRKDTSHRSGSLYPGSDRHTQGPRRARVGHWSIGATTQKSQCGFERC

SEQ ID NO: 1021489 - protein, 258 aa, Homo sapiens
MTEMSHEVQLKLTNDYTVDGLRKDGDVNDEVRASSDEYRLARVVAVNGMIEDVTRRSSSSDETTRGVCAVIDCVRDGYRVEESRFRVLDRRATSLFVDLLLTSKCRERVNAKERGPTIRVRVNSVRVGSTRCPWSEVALDRKVIISKKGVPHTAEYLRRRERNQARLVGCATVCKVTDSRRDEILLSEDRCFPSSGECESKEKERHSVVDVVTLNAEICRPKPTKRGQGSYKRRSGQRATHENEAEGGMRTRSTRRKY

SEQ ID NO: 1021490 - protein, 199 aa, Homo sapiens
LRPCHAQTGAAIPGMVELDPKVMMQGILRVQVQATPDSPSALQPTAQGRDQRAAAHTAIDRHQRHYFRAQLRGNDGLLVDTFVRNTAEKVHSCIDAVGIMGNVFTKQRQNFFAEAHSLLLKTQLKDVKVSKCGHLPQIYSIGALVGGHSVTKARECHYKAVFMPDFHDGRTIVNLMAYQPCVFHSLAAVKHEPKTPNRR

SEQ ID NO: 1021491 - protein, 88 aa, Homo sapiens
FSSLQGIVKSGLMLAFGAQPVFDRRLICAETLALVGLSSPSSTPFQWEMRMSSIGPSSDWVKLILGFTGSCRIAACCRSDERGNVGKS

SEQ ID NO: 1021492 - protein, 197 aa, Homo sapiens
MRFRAPLLYEQYIVADLTQEELSARTPTHQPPKPGSPGRPACPLSNLLAPCPTEDAGSYMQLSCSNMQEEEECLLGWNDGRGWMDMWLMEEPEVMATDSGGLGVPDSRARGLILRRGRSPAACTKRFLDGKDGDFDYMHSMTTNPDFDNLDIVARDEEERYFDEEEPEDAPSPELDGGLMACTLPTACPIPIPNKAS

SEQ ID NO: 1021493 - protein, 101 aa, Homo sapiens
HARTKRRVNFSPKRYRRLNRRFGLTKGGCHVKVSVYRYNPDQDAAPFMQEFQVDTGGKDLMVLDVLALIKSRTRVSPIVALAVKVCAFRRHDITPKRLAVP

SEQ ID NO: 1021494 - protein, 338 aa, Homo sapiens
MMMMALSKTFGQKPVKFQLEDDGEFYMIGSEVGNYLRMFRGSLYKRYPSLWRRLATVEERKKIVASSHDSRIHDLLDHQSDPCYQRLGKVEELLDGQTNTRSNTDEMVHTATGAQHQDSTHQGTRKRQRKEQDSMEIPNAQDAEEESTQQKKHCRGHKRTSNKSADQTKETTAKWTTRKTQTESNTTNRPERRRVEHNAPRRKMKRPMTKTDKQKRHQREAVRNPTNTDQATKRKNTEEQNRNAEQTKRTDPPSKTTDTETKRKKTNQTQHGKERTKRPKQPETRTNKEADAKAKRQDKTKRRQEAQTARTTITTHSTKNQTRKRNRTTRQKPNRQQD

SEQ ID NO: 1021495 - protein, 183 aa, Homo sapiens
MMMMALSKTFGQKPVKFQLEDDGEFYMIGSEVGNYLRMFRGSLYKRYPSLWRRLATVEERKKIVASSHGKKTKPNTKDHGYTTLATQCRPCQKASERGRDTGWQRCRSTRLVSISTEHTHYLREQKDRRNRQEYTTPDRTDHNTINAETCSTTSTGNSMGQRPETESPHLLSDHDPVITRKAL

SEQ ID NO: 1021496 - protein, 122 aa, Homo sapiens
TSMGRSTCTELLRLIADVLKVLSLHRPAHAPEVAVFQVDRAGLVFIALGDGLPVRFVISIPWHGESLSDGGQVYRVWRAAVRAIRTGRCGRFPATRPVSRPVPRGGNLHGRTNSGKAQAGRQ

SEQ ID NO: 1021497 - protein, 141 aa, Homo sapiens
  misc_feature (130)..(130): Xaa can be any naturally occurring amino acid
VCELRVDCVVTGVPLSRPVAGERGCVELRLACGTKVVRGVGCPPQWLMASCASIDIDGRHCSTCWDILNAWTVPRWAVPRVSDEHHCAYHVPTDGDSQVELLCPKTRSAQVIVPQLTRLVFGPCHPLTCXRSRSSVFSEMI

SEQ ID NO: 1021498 - protein, 212 aa, Homo sapiens
IATSSMPGVREERGYESLGVKFPDPTPRCQAARRSDGGELSVEMQQLTAGPCVPGLALMDALLMMLCLWVVGHLMNACVLPDMHADCLLWPARVGQCKMAWIDFLGCVVQMLLDLLCMPVLMEEVSEEQDSELQTPPALSSVTIPEFILSVSHCGHVAWGDMCVSPMHLCTLVHSQTPTCWCPTCTASSSDLGSAIDKIIESTIGPDLIQNC

SEQ ID NO: 1021499 - protein, 241 aa, Homo sapiens
SDSVGRSPYKFFSSQPGTRKGVVIGNPTGTNVQLTNVRLRNVIAHGYDYIGIEGLETVIGFSFGHRVVFENVNVHHCYVNWWLKELFEYSTGTNCYGYEGFVGMLMVGGNNTFVASNFEENFNNLQMAGGYNHAHGKFIGCSFNHAADGGLGFIGNGVVNGHTFVGCTFWYSPITLSGCAGISITQSQIVYGKVIIAGGGLNNIDDNYTPQGLVKESTGNTFTTFRRNRVSYNTVLLNRRI

SEQ ID NO: 1021500 - protein, 70 aa, Homo sapiens
SRGSRAYGRGSPQNSAIVHPLAIDTLGHQVIRRFFLQADPGFAGVRLGDRAGAGRTVNRQSQGRELTTVV

SEQ ID NO: 1021501 - protein, 64 aa, Homo sapiens
MGCVFRQTGIAFQYSNGVVVHVVSGHVSLAEDLLEVLVGHGREVIAIFRRNTQYHRVGGQRFAV

SEQ ID NO: 1021502 - protein, 162 aa, Homo sapiens
RVFRCGGAPVDQHRYHFRLGAAVSGGDCGTQYRLRQDALGELKEALVGVVGLDLAGIIGLLGAQAIELGQGCTTLEFLQVIENRLLDQPVRRAVNGGRGGLQAFAGRVVEFDPKGGRCHFFILMGATTEWHLLAARLALPILRCNRVQPFCWLNVRRLIGKK

SEQ ID NO: 1021503 - protein, 117 aa, Homo sapiens
RGYRPYDNSFIHPSIHPYHPSIHLFIHPSSIHSRSIGGVSTSIYPGIHPPTHYPSNYPSIPEALADRAHPSIHPSIHPSIIHSFQKHGLSEHIHLSMHPSTHPLPIQLSIHSRSMCR

SEQ ID NO: 1021504 - protein, 257 aa, Homo sapiens
  misc_feature (6)..(6): Xaa can be any naturally occurring amino acid
KFYINXISYKRSEIFKPAARVAAMASPQLCRALVSAQWVAEALRAPRAGQPLQLLDASWYLPEAWGCDAADASSEELPHPGAPAFFDIDQVQRPAPLPYDHMLPRGLSISAGVLQGRPWCCVVRAAHPPSVDLTSAKLTQGLIHPDPQRLVDVTAPSDTTADVTDLMCRLRQLAAARTSRQQHPAKSQTAPDEYPRIARPRHHQDLRGHQGEPGIPELPGGGITEHRQGPGTRPEPTEDDQANPGPENPQKSEQRLK

SEQ ID NO: 1021505 - protein, 174 aa, Homo sapiens
  misc_feature (6)..(6): Xaa can be any naturally occurring amino acid
KFYINXISYKRSEIFKPAARVAAMASPQLCRALVSAQWVAEALRAPRAGQPLQLLDASWYLPEAWGCDAADASSEELPHPGAPAFFDIDQVQRPAPLPYDHMLPRGLSIFWGRGVTGRGLGHGRWVSAKPGTNAIYNVSCVSGVVCVAFDVFEESVARRGASLALALLGVDSHA

SEQ ID NO: 1021506 - protein, 285 aa, Homo sapiens
PSHTEAGLVTMEEIGILVEKAQDEIPALSVSRPQNRACPSWALSLRTWRTCTAATRSCSNELEFLEVQEEYIKDEQKNLEKGNFSMPQEEVKRIQSIPLVIGQFLEAVDQNTAIVGSTTGSNYYVRILSTIDRELLKPNASVALHKHSNALVDVLPPEADSSIMMLTSDQKPDVMYADIGGMDIQKQEVREAVELPLTHFELYKQIGIDPPRGVSCMAHLAVGRPCWQRRWHITQQLHSSGSWGSEFVQKYLGEGPDGRDLFAWQGKWPASSYRRIDACNKRLMS

SEQ ID NO: 1021507 - protein, 230 aa, Homo sapiens
MRSQHCPCPGPRTGLSFLGPEPEDLEDLYSRYKEEVKRIQSIPLVIGQFLEAVDQNTAIVGSTTGSNYYVRILSTIDRELLKPNASVALHKHSNALVDVLPPEADSSIMMLTSDQKPDVMYADIGGMDIQKQEVREAVELPLTHFELYKQIGIDPPRGVSCMAHLAVGRPCWQRRWHITQQCISSGSWGSEFVQKYLGEGPDGRDLFAWQGKWPASSYRRIDACNKRLMS

SEQ ID NO: 1021508 - protein, 104 aa, Homo sapiens
CCGAPEDPGSSPTRSITLFMIETVQISNQAAVTPLRHQKKCFPYGYIVKFHNRIYNIITVVLSGLGLAIALRHILLGDHDPIQCPLNFYTCFIDLFLFTLLLGL

SEQ ID NO: 1021509 - protein, 96 aa, Homo sapiens
RHEADLVCLVPISYSYGGLCIPTFSCYYLYQSTPPKCHNFCDAYSPDELSTFQGLFLWQSHTVEASLLESVTEPYTQERLAQIISNLVMSWLPDMF

SEQ ID NO: 1021510 - protein, 145 aa, Homo sapiens
PLLGVGKEHRLRGEELRGPLSVEMRSAVLSEPVLLPEAVHGLRALRCSPILMPCCTLCNPVTTTLDAGAVVDVAKRCLRSPPEACGHVTTVWLANALMPGDMTCPGQCMDDVQARRGCPETLAKSFTGDPALVQLRSVPQGRQIH

SEQ ID NO: 1021511 - protein, 279 aa, Homo sapiens
MRSKTKLNPPPHVTGGQGKKQKRNKPSRETTTVLAPRHFISALMDFGFPLCSLWLGLEFDVGVTPLPVGGALGHLSPLVENVTEGDVEKRPLSPARGLSVGQQVVVVSPRKSPVRGGREVVGVLATRGSSLSRCASREGVLSVVAPGERGTSWDVGHSKRLAPWEAGDSGRLTPACLRVTPHGAGPPPPTAGGRMVLLPALREHLVVGKPLLRSTPVGGQNSCDPGPHSDTLGPWSTRERFPKPSGGAPLGRTGVVLRPAYQETATAGLGPQEDGKVPG

SEQ ID NO: 1021512 - protein, 184 aa, Homo sapiens
PFHSISYDMLRLSCTLCTECDCAIGEGSGNLLPDFDVLDLSQSHDNRSIPPDRSLGNTRIGIKLVSTFLPLGISNLRSIEPLDHNQGCSTHLRVNNRKAIRTQSHWLHGRRYACDVDRPACREKVDATIERGLLLLTGVEGKGFTRVDRSGSVAAFFFLGIGKLDEIHQAASLCGAGGQHYQGR

SEQ ID NO: 1021513 - protein, 65 aa, Homo sapiens
YHTDDLHNGQDERAKGQGACVVPERPAKGREERELPGMAVFLAQGPVVGGFFSRQRDLAQRQHEV

SEQ ID NO: 1021514 - protein, 136 aa, Homo sapiens
QDRHIEMRRVDDGGDGTLEIMTSIPSVWCTTVPTFIAHRERVIVGHVITAWILLTTMVYFSTQCMGRRNYTTFYAFLIHTALLLLIGMVGCILKLYYIASPKTSEQGRPQAHPSRGFVHALKTTPESAVFFYLSFV

SEQ ID NO: 1021515 - protein, 96 aa, Homo sapiens
LLLAFSFLAGCASKPAYYISPAPVHIPKTATYWLDTFDVDVVGKNPRFLPDDKVREQLGVDLVNRLITAKRYATSKESADYLWDVKVVYARHFQQI

SEQ ID NO: 1021516 - protein, 251 aa, Homo sapiens
TGIQPGTSLLTLMGFRLEGIFPAALLPHVADHDSFPGPTDAASSYGLHLCDLDRCGLKVCPGSPRLLWTLLTYTDMTVWTSVNQVIAPLTEELDDSRDLYSMAMYSTVHGAWAPCLMYHLYRIYSILEIDPLFSQVLIDAAAISSQMQQWGTSFYVCLRYQFSYDKVSSVTYTCFHVFIRTGHLDWAQFVFAITFWPIYNGLPQLFVRLGAHPQRRPCMQAIAWVWDLLASVQALREPALRAATLCCFVRQ

SEQ ID NO: 1021517 - protein, 38 aa, Homo sapiens
MPTSGVEDNYRGLSPSLVECDRHILSCLAHHEAYDIAA

SEQ ID NO: 1021518 - protein, 94 aa, Homo sapiens
ETQVPRRSVTGIKPAEPSLRALFEPRLIEQVYWVNECAFDTSQLSIWASRELKESGVQVHYQTRVVAISKGRLAPLEVVVDLAQGVKPREDPVV

SEQ ID NO: 1021519 - protein, 242 aa, Homo sapiens
LGVIRPRNPDFPFSPVMMGSIIIKKHPEHPNWGEREVRVLGVIQSQEIEVKLSLLSENFPPVPCNCSVGIQTEGQNSTESRDPSHLEEAQWGHCNQRVLEVGLMGFPYPQSHSCVVKYFFGGSVDLLGLAIQNRKSDPCEALEGQKSAALYQSSPLSSSGARKEVKHLSAEYLNMGSFLQDDHRGSRDFELPTLQNPGAIAMGDLRTYEGWLYFTGHLSMGSDCIMGKGFERNYFSATTQGT

SEQ ID NO: 1021520 - protein, 107 aa, Homo sapiens
LWPPYLEIMKRRPVFNQLVEQIESELAGGVFEAGEVWVSGARSWLRNLGQAEKITVLGSRAITRRRDPASLAVLRLHHHAGSAHPDPPPKRPGILCMKSHLSLYSRA

SEQ ID NO: 1021521 - protein, 135 aa, Homo sapiens
PVLATFYRAHPKVTFNIVIASASATLDALCSGEADLGLAFYLQERADVEVTAHCQLWHRVLVSAEHPFGQRESIELSELQGQPLAIPDSAYGVRQALEVAAKKRGVTLEPGVHHQLPGSAEKPGPATGSGADFAP

SEQ ID NO: 1021522 - protein, 257 aa, Homo sapiens
MRSSWPWHEQLGTFTTLVGGPEYVHCLLPPLESLATVEETVVRDKAVESLRAISHEHSPSELESALCAASDTRLWRADDVVHLPLPRAAASSPSANPRVSSAVKAELRQYFRNLCSDDTPMVRGGRSSKLGEFAKVLELDNVKSEIIPNFLPTLGSDGAGLGCGCCRLEGVRENICQLLPQEDLAALVMPPLRQAAETSLAASVHVAEVRTQKVGRIQRLSCSTLKSTPERPPRKVKPGREGNHAHRSRPELRNRVP

SEQ ID NO: 1021523 - protein, 108 aa, Homo sapiens
TLRGSPTPPESMGLPAAWASSIILIKGQARLRRLTGSSTKGTDSRSSTIADDTSSDKAFNMARARGISSGSMMPGCWATLPNKPSSLLPKSFKSSKSAVTPHRSLIVI

SEQ ID NO: 1021524 - protein, 136 aa, Homo sapiens
MLRSRRKRIFMKKLCLLGLVATLASHPVWAETKPAALNDKDAFVSDLLKQMTLDEKIGQLRLISIGPEMPRELIRKEIAAGRIGGTFNSITRPENRPMQDAAMRSRLKIPMFFAYDVIHGHRTISRSAGLAQVRRP

SEQ ID NO: 1021525 - protein, 201 aa, Homo sapiens
RRRLAKRRRAGLSAAEQSLEPERGRRRRAGSGRAEMPYKLKKEKEPPKVAKCTAKPSSSGKDGGGENTEEAQPQPQPQAPAPSPVSATDHPTSVPAIARRHPHAAQQNQVLREGPRLSRRSRQDKSVHPRISSIRQRIRELQKLPDPERYRQPEETEKEHDIVQGQLTPGADVTSIDMNDGQKHNTVNLKIQKESEDGQGN

SEQ ID NO: 1021526 - protein, 248 aa, Homo sapiens
  misc_feature (155)..(156): Xaa can be any naturally occurring amino acid
  misc_feature (158)..(160): Xaa can be any naturally occurring amino acid
  misc_feature (162)..(163): Xaa can be any naturally occurring amino acid
  misc_feature (171)..(171): Xaa can be any naturally occurring amino acid
  misc_feature (180)..(180): Xaa can be any naturally occurring amino acid
  misc_feature (182)..(182): Xaa can be any naturally occurring amino acid
  misc_feature (185)..(185): Xaa can be any naturally occurring amino acid
  misc_feature (188)..(188): Xaa can be any naturally occurring amino acid
  misc_feature (191)..(192): Xaa can be any naturally occurring amino acid
  misc_feature (194)..(194): Xaa can be any naturally occurring amino acid
  misc_feature (244)..(244): Xaa can be any naturally occurring amino acid
RRRLAKRRRAGLSAAEQSLEPERGRRRRAGSGRAEMPYKLKKEKEPPKVAKCTAKPSSSGKDGGGENTEEAQPQPQPQAPAPSPVSATDHPTSVPAIARRPPRSSAKSSTQGGPQIVKKELFIQKLRQCCVLFDFVSDPLSDLKFKEVKRAGSTXXWXXXTXXVDVVYVAXLPVAVYMFXMXLLXGAXYLXXIXQGPSFDPEEDEPTLEAAWPHLQLVYEFFLRFLESPDFQPNIAKKYIDQKXVLAL

SEQ ID NO: 1021527 - protein, 217 aa, Homo sapiens
LGLRGKEWAKQCDYPDVITAMASVAVQLSDSLSSVLACSDKIGGMTLLPDFDQLNPEQLRAIAAQLMQRVETLDQKVESMDKQIHHYKTVNDKLTPEIAQLKRFKFAKRSEQLNPYQTSLLDDVIDADIAAIEAELETLQPAPAPTVARQKPKRTALPPEFPRTPIHHEPDNTHCQCGCALKRIGEDVSEKLDYTPGVYTVEQHIRGKWVCEDCENL

SEQ ID NO: 1021528 - protein, 185 aa, Homo sapiens
MLADQWPQAVLHPQHRIPSGRVAEVTDAEEMRTVVKGRKCVGGRLQHQGAPVEQGGRHLELFGEQTDFHVGDHQADVTAVNGGDFAFGQVGVGHALELVFQRRREQGAEVVAVGLGFHLLFEPLVTGVAQALQVGGFQHAQGVGAALFYAPAELLLHHETVEQHDIRGQFANKVVETAVFSSMVR

SEQ ID NO: 1021529 - protein, 44 aa, Homo sapiens
MDKVVIITGGSRGIGAQTALLAARQGYRICINYQSDEDAARTEM

SEQ ID NO: 1021530 - protein, 312 aa, Homo sapiens
  misc_feature (170)..(170): Xaa can be any naturally occurring amino acid
DNEAVLIAGEGEGEAGSSCEVLGQERGSSSGICVHTGGLLGLSGAGQPQFLVRRTCSWVDTTLPSCTSMTLVRIGGLEEVTSLDDCYPEENWEEEEVGVLYLQQAAVGGNFLLQPLLHIQQDFVHLVLVLHLAAELGQLLLHAANQALDLGQLHAVASSVSSRFASRDAXMLSWDCSSISRFCMVRRSSEISLLPLFTSSLLVATSRFISSVLVKNHSSASLRFFSAIFSYWSRISFRMRLRSTPGAASISTLTSPPTWPLRAFISSSWFFFQVGQLLLQALNLHLQVSSGQGQFVQHPAQAIDVGFHTHAL

SEQ ID NO: 1021531 - protein, 244 aa, Homo sapiens
  misc_feature (102)..(102): Xaa can be any naturally occurring amino acid
MTLVRIWGLEEVTSLDDCYPEENWEEEKVGVLYLQQAAVGGNFLLQPLLHIQQDFVHLVLVLHLAAELGQLLLHAANQALDLGQLHAVASSVSSRFASRDAXMLSWDCSSISRFCMVRRSSEISLLPLFTSSLLVATSRFISSVLVKNHSSASLRFFSAIFSYWSRISFRMRLRSTPGAASISTLTSPPTWPLRAFISSSWFFFRYGQLLLQALNLHLQVSSGQGQFVQHPAQAIDVGFHTHAL

SEQ ID NO: 1021532 - protein, 115 aa, Homo sapiens
EDPVDKQPLALLSICFISACSISSSKEIKQAEKLLQSFDCQNIERDQADHSSMTSYHEQVLASSKQKAQSYVESYQHGDQIFDLPLPEVIETQLQSYTAACQSLGGVLPNPQQSP

SEQ ID NO: 1021533 - protein, 295 aa, Homo sapiens
DHMPVAVEGMTEAVRRLSVKRGCSVVVVCEDCLWLDVTEQHGANYLLSDLVCDQCIQMWCGDICQQGTSGPWVEASSSGSVRYLSLSVTKSVIAIDYGKKQGKSSMKEKEMEEMVLLIPTSISVNNCVCHFSPLKSDQDYILKEGDLVKIDLGVHVDGFIAYVAHPYMWMIVAQGTQVTGRKADVIKAATPLLLKLPYCLVKPGNQNKQVTEAWNKVAHSFNCTPIEGMLSHPLKQHVIDGEKTLIPDPTDPQKKDPEKAEFEDHEVYAVDVLVQLQRGQGQGCRTETTIYMRPV

SEQ ID NO: 1021534 - protein, 228 aa, Homo sapiens
MKHVDFYAFSYYYDLAAGVGLIDAEKGGSLVVGDFEIAAKYVSSDPGDHSRKSSTLLMLGRSTVRQACYFQRVLAFPGATVLKLTRKIDNVETMLGSWGPLFHYIDSLDRQKSPAFIVAEPSLIPDSSVCVSGINPPVLGRDFIPEEPQDKPVLALICTLASGTCKKRLGASPWHSELLTSHNFGPEGAVWDLEPCSNVTLVCLGLQSWAWDPANRSNRQHHLQGCSC

SEQ ID NO: 1021535 - protein, 55 aa, Homo sapiens
QGVRVSSINYIHVNDATITNIHFQNTLSPVNNMSPFLPATGTYHSTFCLYKLDIL

SEQ ID NO: 1021536 - protein, 138 aa, Homo sapiens
YGRVLKGGVDQLFAGLAEGSVFNPQGCLGGQAFADAGRAVGLIVMAAVGEPTGDLFQELLSAPEKRVRYRVQALAGNPDAPTWFGEHPQVRQCKSPFVCRHCALQMLGVPVTAFMWTCAAFSSNASDKIGVEISTGRP

SEQ ID NO: 1021537 - protein, 250 aa, Homo sapiens
VRRRCSVSSRSRGGYGGHVFGEVVKAPCRAGTEDEEEEEEGRRETPEDRQVRLQLARKQRTAAASFEDKQHNIFWKFLRLEKYPVLQVYNSAIGNNAASISVIILLMNFTELWEEVGCAKVWNEWCRNNRELTHLYLPQSDLSVCYLSSRKSKSLGFFSAQLQFAYARTKIKQLLTVAGKGFGSVSKEEHADNYSHTVDPVTDYKTSESTGSFLLLFLRALKEQQNFKDLGAVSIARTTEYSTATSCSKF

SEQ ID NO: 1021538 - protein, 59 aa, Homo sapiens
LFYQLRTQENNMRMLMNVRIPHELFNTYVRDGSIAELIPRVMAAIKPEAAYFTEQAGTR

SEQ ID NO: 1021539 - protein, 42 aa, Homo sapiens
SWGGGVQPDDEYLTAQRSTGGKPVPRAVPVVAGDINDDAVLY

SEQ ID NO: 1021540 - protein, 150 aa, Homo sapiens
PFHSTRVDSTPSHCITFHFIPLGLIPFRSIPFHSCSFHSVPFHFIPFHSITLHSVPFHSVPFHSIPFHSCGLTSIPFHSIPFLSIPFHSIYHPSTHSPIHPTFQPFIHPSNYFHLVIFHPFTHLLIHSSIHLPIHLSSIYPPIHPSILPP

SEQ ID NO: 1021541 - protein, 141 aa, Homo sapiens
  misc_feature (13)..(13): Xaa can be any naturally occurring amino acid
  misc_feature (52)..(52): Xaa can be any naturally occurring amino acid
GAGRTKGAGRGDXEEEGKKGKKPGIVSPFKRVFLKGEKSRDFEAHEKVLFMXRVHTVVLSLPERVEPDRLLSDYIEKEVKYLGQLTSIPGYLNPFSRTEILHFIDNAKRAHHLSGHLTQEHDAVLRLFVYNVKLAWRDRED

SEQ ID NO: 1021542 - protein, 106 aa, Homo sapiens
MCLEFSSQLCHRPWYVCWSAYLNRRVIRKQDEQSSSMWSHLDTTSMNKNCGIRIVPIHMTLPDTQRKNARGLCSGAIRGHLLIEPYESVHEYFGIHCQLVATDFAP

SEQ ID NO: 1021543 - protein, 109 aa, Homo sapiens
MDEVGLAVSFLGHFENQKVMYWLLAVVNGLPMLALPKLRAHQLGVCAKMCLDALQVLLVPATVAKCGRVLPVVSTVICELPAAWQDIDAVCHRAAGSLTGWRDSPALCC

SEQ ID NO: 1021544 - protein, 112 aa, Homo sapiens
LVVSYFSFHLLVLCIVSSTAVIFSSSLFLLVVMFVLHGSCVGFPLWCLFLFGLPIILSHGGALFPDKFPLGFNFPLIFSRDIFYSKRPGYFIMDSPVLDSSHSCGRPNWSTQ

SEQ ID NO: 1021545 - protein, 78 aa, Homo sapiens
MLIAFSRIEPADGVWAAGIDEHQFFLRGRMRSGFRKHWFGQLGTLEALDLVIAKGGGIPDDQLAPRRRCSQVDIGAEL

SEQ ID NO: 1021546 - protein, 117 aa, Homo sapiens
MQLLRSGRTLRTARLAQTLAPAASAFARSGDRCQGMQLRDLLLRLQENALCSPHIISSRISENGSEVSTSAELSESILDGEQNALVTRRSSRPETAALGHLLRLRFGEGKDTPAGVA

SEQ ID NO: 1021547 - protein, 73 aa, Homo sapiens
EMTGFLFLRNSRNDLQKVSSEAVTIHPVQLYDREEGESNPSSYARIQPVAGACVPPKKAGTGADGVSPPVWRT

SEQ ID NO: 1021548 - protein, 159 aa, Homo sapiens
MTGFLFLRNSRNDLQKVSSEAVTIHPVQLYDREEGESNPSSYANFSPWRERACLQRKRGPGRTASLPRCGERDRCEGGADRHTACSSPASPPQHRAKSFKRDLGHCLFLREERPALCPGGSRGLSNHTAGGKGSICQTLPITLFWSPHPPEVHPVSPMT

SEQ ID NO: 1021549 - protein, 180 aa, Homo sapiens
TVYGQATGAEQKQQDKPTSLNVGKTLTNRRTGRAVGKWCNQPDYNPGQPSSHGVEIWGDAWKDLGECGGFQGNRLTLNFSTLSGRGPISQPTPGVARADQVVTGVLRCKAAGDPISAKSGETIHLDNLKACDYQRGDEPRWWVCALEHTAFVSFQREEGEEQAVTTEVIATVQTFVLRIL

SEQ ID NO: 1021550 - protein, 104 aa, Homo sapiens
MTLGSIRAALEDSSKPDTTLNATAEDTDEQLGTSLSGSGSTLEYVSNAFRIATGNNQQYKELGTNLRIVETKQIFFNLTPHHEVQRRHVFYYFHSLIRHDQVNQ

SEQ ID NO: 1021551 - protein, 429 aa, Homo sapiens
FWAVTVMVIILTLQPVPGLQVPSEWPQAIGFSGRCVGILFWSSGMLVHRCADIDQDLQTQKLMGSWHDHTKDTHKPKPTAWTALHPGNRCRQQPHPSRHTIATARSARQHTPWQHPGASTSSSHSKAPIKQHGASEHQNHTRAPSTSTTTGETHTGTYPGRKTLDRHTPMGLTRNGDPCDKATKANEQAKAYHTLTPSLGKPTETFNRGLVAAQNNRDSTTITLTDARTQRLRGDPNPSTSDPAGRGAQIEQDQNRTPDKDTSTIAKKTQPRDAAHITTIAGTRHQPDTKITPDKTPGPPTTQQGGDSRTKPRQGAGTHHSVPNATRTTGKETRNRARRHDAEERATQHARGEPGSTDRDAQEEDSRGDPQSNQATAPSNKSRRHTRTRQQPTQDAQRLPTSRSQHETHTPGATTGRTDKKTKTKPRRQ

SEQ ID NO: 1021552 - protein, 180 aa, Homo sapiens
FWAVTVMVIILTLQPVPGLQVPSEWPQAIGFSGRCVGILFWSSGMLVHRCADIDQDLQTQKLMGSWHDHPQPGSSDQESEEQQQFRNIFKQIAGDDMVICADFFFLVLNTTVFLHKDLKTHAFTLESCRSMIALMDTDGSGKLNLQEFHHLWNKIKAWQKIFKHYDTDQSGTINSYEMRN

SEQ ID NO: 1021553 - protein, 68 aa, Homo sapiens
MSDGSHTAYIHLLVITRTLHHAPSMLILDHMKRLAPTFPFHQRGVKSTSLKYASFPFTIYLRLTSPQC

SEQ ID NO: 1021554 - protein, 61 aa, Homo sapiens
SRHMAAGLALHSPCTRARCVHPTVSAAWPLSCMHAQAGGILSQSHLPGHAKLWPLGRSVFP

SEQ ID NO: 1021555 - protein, 378 aa, Homo sapiens
EKAAADTVLAPPKKLQLMAQDAFRDVGIRYRSDVTSISSTTFGCHLTDDYRPGVDPALSDPVLARRLRENRSLAMSRLDEVISKYAMLQDKSEEGERKKRRARLQGTSSHSADTPEASLDSGEGPSGMASQGLPFWPPELRQMTKTMRRVMRTEEEEEEEEEEEATDSEEEEDLEPDAGGSRRMMKRQDERGRSSEQVKMETQSPMSSLQISNEKNLEPGKQISRSSGEQQNKGRIVSPSLLSEEPLAPSSIDAESNGEQPEELTLEEESPVSQLFELEIEALPLDTPSSVETDISSSRKQSEEPFTTVLENGAGMVSSTSFNGGVSPHNWGDSGPPCKKSRKEKKQTGSGPLGNSYVERQRSVHEKNGKQMTEEGMD

SEQ ID NO: 1021556 - protein, 517 aa, Homo sapiens
EKAAADTVLAPPKKLQLMAQDAFRDVGIRYRSDVTSISSTTFGCHLTDDYRPGVDPALSDPVLARRLRENRSLAMSRLDEVISKYAMLQDKSEEGERKKRRARLQGTSSHSADTPEASLDSGEGPSGMASQGLPFWPPELRQMTKTMRRVMRTEEEEEEEEEEEATDSEEEEDLEPDAGGSRRMMKRQDERGRSSEQVKMETQSPMSSLQISNEKNLEPGKQISRSSGEQQNKGRIVSPSLLSEEPLAPSSIDAESNGEQPEELTLEEESPVSQLFELEIEALPLDTPSSVETDISSSRKQSEEPFTTVLENGAGMVSSTSFNGGVSPHNWGDSGPPCKKSRKEKKQTGSGPLGNSYVERQRSVHEKNGKKICTLPSPPSPLASLAPVADSSTRVDSPSHGLVTPAKESRKEKKQTGSGPLGNSYVERQRSVHEKNGKKICTLPSPPSPLASLAPVADSSTRVDSPSHGLVTSSLCIPSPARLSQTPHSQPPRPGTCKTSVATQCDPEEIIVLSDSD

SEQ ID NO: 1021557 - protein, 81 aa, Homo sapiens
NGVNGMEWNGKEWNGTEWNGMECNGINALQCEWNVMECNGMESSGWNGMEWNGINPECNGMEWNGMERNGTTLNGMECNGE

SEQ ID NO: 1021558 - protein, 59 aa, Homo sapiens
MCYRQTPVFFGGGYIVRDLDKNFGGFKKPTLDLGLLGGVGVSNNLFFQKDLSPQGLGFG

SEQ ID NO: 1021559 - protein, 46 aa, Homo sapiens
MTPLIGMDRRHCCRLSEPKTGVSLLRPRKRLSDPRTLLATRRIRMP

SEQ ID NO: 1021560 - protein, 56 aa, Homo sapiens
VQVGELAGIEHRGLDTRRALVVVVVEDAHGNLEQERQGEQVDEREHGHGDVGEGGY

SEQ ID NO: 1021561 - protein, 276 aa, Homo sapiens
RNPVKAHPPANKVILLFDEKPPFAITLRGELKEQALKKVDFSVATELVTEPGSVVFALNDTLTNNGDYPKEYQALYHSNFSTPFLEQGARFVAPVKQVSPFNDKAKGELADWQTYRAPTKDYDETVYNVVPYADAKGDTLTVLHNKAGSLGVSVGFNTQTLPVFSLWKNTDTQGQGYVTGLEPGTSFSYNRRYQRPLNLVPTIGAKEHKQLRISYSLLADKAAVEKALKQVSEIQGGRETEVRQTPLVDLTKEVTLAGAFTRGPAFFIDAGIALQL

SEQ ID NO: 1021562 - protein, 136 aa, Homo sapiens
TNTRRRDEVRSAMGLVLVHQERIFMHPPDQPVAHRNGLTGTKRHQALAATHGNAVLDKRGIAIGADAISVLNRLIRLTGHAGLQVLAQLDIAHHTVLEKIVVQDLGVVVSHHPVQIAMSPAQVMAQNQLAGSVGRP

SEQ ID NO: 1021563 - protein, 211 aa, Homo sapiens
LYRHADDGVFGGTLQVTQDKMICLPCKWVTKDSCNDSFRGWAAPGPEPTYPNSTILPTPDTGPTGIKYDLDRHQYNYVDAVCYENRLHWFAKYFPYLVLLHTLIFLACSNFWFKFPRTSSKLEHFVSILLKCFDSPCVTIEVPMSETMWCDVMMLTPNALALSRQRIELVVLCEQENVHLTLFMLIGPIVMCHRCCASALHAVTNGQLCSF

SEQ ID NO: 1021564 - protein, 208 aa, Homo sapiens
LYRHADDGVFGGTLQVTQDKMICLPCKWVTKDSCNDSFRGWAAPGPEPTYPNSTILPTPDTGPTGIKYDLDRHQYNYVDAVCYENRLHWFAKYFPYLVLLHTLIFLACSNFWFKFPRTSSKLEHFVSILLKCFDSPCVTIEVPMSETVVEESEPEPAFSKMNGSMDKKSSTVSEDVEATVPMLQRTKSRIEQGIVDRSETGVLDKKEG

SEQ ID NO: 1021565 - protein, 270 aa, Homo sapiens
AEAAGGKVAEYLASIFGTEKDKVNCSFYFKIGACRHGDRCSRLHNKPTFSQTILDSNTSIVNPQNSAQTADGSHCAVSDVEMQDTLMMSSYDARFCTEMEEKYGEVEEMNVCDNLGDHLVGNVYVKFRREEDAEKAVIDLNNRWFNGQPIHAELTPVTDFREACCRQYEMGECTRGGFLQLHAFEAHFQMSCGGSCMAAVARSIDQDPRSRERRSRSKRPWSWRWRWRWWRWPADGSVTGGGRKIVKDLGDSEPCHFYLMSAKSGELIEP

SEQ ID NO: 1021566 - protein, 191 aa, Homo sapiens
LTHPDTATYNKFLEEVLTEMEEKYGEVEEMNVCDNLGDHLVGNVYVKFRREEDAEKAVIDLNNRWFNGQPIHAELTPVTDFREACCRQYEMGECTRGGFLQLHAFEAHFQMSCGGSCMAAVARSIDQDPRSRERRSRSKRPWSWRWRWRWWRWPADGSVTGGGRKIVKDLGDSEPCHFYLMSAKSGELIEP

SEQ ID NO: 1021567 - protein, 292 aa, Homo sapiens
AEAAGGKVAEYLASIFGTEKDKVNCSFYFKIGACRHGDRCSRLHNKPTFSQTDLGFKYIYRESPITVHRRLTAHTTIALLNIYRNPQNSSQSADGLGRVRESDVDDARTMMSEWGEEVTEMEEKYGEVEEMNVCDNLGDHLVGNVYVKFRREEDAEKAVIDLNNRWFNGQPIHAELTPVTDFREACCRQYEMGECTRGGFLQLHAFEAHFQMSCGGSCMAAVARSIDQDPRSRERRSRSKRPWSWRWRWRWWRWPADGSVTGGGRKIVKDLGDSEPCHFYLMSAKSGELIEP

SEQ ID NO: 1021568 - protein, 60 aa, Homo sapiens
MKHNPRSADFEFIDATLLKYGEDHSVLNMAELDGYFTALVSSPAKVDVAECSRQSGVGKT

SEQ ID NO: 1021569 - protein, 103 aa, Homo sapiens
LSTNVTAHSQVRNKPVKLRVLIRLSLDLASLSWGEWAHRFPRRGIRSLMVIRSSASIRPTNYGRQTVWITDSGGVIKSGSDQLEAFLCVNLVLTHSVVQGTEL

SEQ ID NO: 1021570 - protein, 249 aa, Homo sapiens
SSCGHEAVDSTLGFGFAAFIQCRVVGVGVLLAQQVSDVACDVVLFQLLGTSAPHVIRQVLHAVLPVVEAWAIGDVERHRALRAEVRIGRRVSHHIPQADALGIQQWVVVAGEGEALHHLAATGMPGDHDFFQCREQFAVAQVLDDLVQSAIRADLPWAGGRFAGHPVVTLPTHYLVAQVVAFHVGLIEKLRRDHQCTAAHPGMLGGVDPALQVGSCIAQAAMHDDQCARDLGQRLAPVLAQAQAEGVRS

SEQ ID NO: 1021571 - protein, 337 aa, Homo sapiens
MAAPWWRAALCECRRWRGFSTSAVLGRRTPPLGPMPNSDIDLSNLELAGEVPGASDRYRRRSRAGGAVPLHWCAVTYREYFGGEGQDPKEKIDIGLPPPKVSRTQQLLERKQAIQELRANVEEERAARLRTASVPLDAVRAEWERTCGPYHKQRLAEYYGLYRDLFHGATFVPRVPLHVAYAVGEDDLMPVYCGNEVTPTEAAQAPEVTYEAEEGSLWTLLLTSLDGHLLEPDAEYLHWLLTNIPGNRVAEGQVTCPTFHLPAEVGITVASASETAIDFETKPTCKWQGPRLITETELTGVVFIGSRHSLKDVGAPTNQAEGEPRREGTARFFVKCR

SEQ ID NO: 1021572 - protein, 116 aa, Homo sapiens
SGSFSTNVMLAEQALRYIQLLYEIESEIRDLEPDVRRRIRQEKAVPVMNMLHTWMIAQRELVHEGVDIAKALDYSLKRWTAESRHFMTGGAIATTTSSSKSGHGSSDAGTGSMQGR

SEQ ID NO: 1021573 - protein, 58 aa, Homo sapiens
MDVTRFHPDKGIRLLMVELCKEILPVNIEDELKQSYLDYSMSVIVGRATALMLRDGLK

SEQ ID NO: 1021574 - protein, 98 aa, Homo sapiens
ATDALKKMNGGEVQHSFSKLLYLSQIIATPPVFRMYDVLNMMMLLCSDTRVTQRHALEKIEKWSPGIAERYCEIWKKKSSLCSYGEKRWFFTIVVIVR

SEQ ID NO: 1021575 - protein, 160 aa, Homo sapiens
MALRVTRNSKISAENKAKINMAGAKRFPYRPLLAITPNARTDGPSNSVFGDIGKQSQVNNCQAKKAYEEGSKTFSYWHNSLLITKLPETLEKVPMLVASATCLTSSCQQPESCSQNLSLFKKNEHFAVTPILVDTSSPSPNGNIWMCPFRKKTCVRLSLM

SEQ ID NO: 1021576 - protein, 202 aa, Homo sapiens
VTLEDPLSTNVMRSISSWLRVDRVSIWGVIRSALAGMPLAGTSTSPALVAVYSPALISSISAGLCSRKAANIAGSLKACLLPFTDNCSPLSASCTSLVFRVASSSRMFTGRSPFVRSLRRSRLGSVVRTSPAHRLPCLPGAGARSSSRQASECPPSSKKLSVAPYPLHLEQLGPELGQEDLGVAFGRRVLTYLQRVHTTFVL

SEQ ID NO: 1021577 - protein, 197 aa, Homo sapiens
  misc_feature (1)..(1): Xaa can be any naturally occurring amino acid
  misc_feature (159)..(159): Xaa can be any naturally occurring amino acid
XTKGTKPGQFSPVSLVALELIANTKKDPRLLLAYLGLARHTTMRDLDGRGPNMLTGAGAEKVRVLTGCGTPMATGIVNALAGMGLIKKPAAGLPPNQARWAMQHQGTVNIPHALIDGGIGNADGIGRLLKDGATDEVVVCAVMLLINCYAVHDLEMFGXIDHQQIWRHWNHMVSSEAEGVRVTAEPINDTAQAKFIS

SEQ ID NO: 1021578 - protein, 278 aa, Homo sapiens
NLRAAVPLQTVPVDLQRYIGRWYVIANIPYFGERGNVGSYAEWALRPDGRIDDAYVYRPGGFDAPFKRMQFVDSVVAGSGGGEWRVRLFWPIYVSQQTLYVDPEYRVTLLGYPDKSLGWVFSRDPDMSDADYRAALNRFEAMGYDTSRLPCDVARQFPEPALGNQASSRRGTTTSRMRITVTRPADGGAGQVPGAGGEPDIEEGAGKGRVVNLGRQLPVGIEARTAVRLVTPHSVSPGFTSTNAGIIASCHRAKVASDGGGIMNPPNLINAVCDSGYS

SEQ ID NO: 1021579 - protein, 91 aa, Homo sapiens
MQWTQEQQPIIHSTADKLLVQAFAGTGKTTTLVGYATQHASVKMLYLCYNKSVELAAQGRFPRRNVVCKTAHGLAYGKDRRGILLESPQQH

SEQ ID NO: 1021580 - protein, 231 aa, Homo sapiens
  misc_feature (8)..(8): Xaa can be any naturally occurring amino acid
RVLTPTYXDFIESTLTRLGKTVRVLTPDLLLVRDKQVLLYSVAGAIQAFDSLEAFSQAWGSRMQREFQFDSLTWQRNETAANVFEQQAGLILNQQLEDLAALSFQGQDEKELDQRLDMITNPARYFTDIKLPDTERLGTVSQQLPQWLKQAEPADRFAYHRHLQDMAHVLQKNQGRSFNEGIENIHTFSRSALRKQMQADHGGFDPDAVPLDFAVAAGIRRAGSSSTCACA

SEQ ID NO: 1021581 - protein, 119 aa, Homo sapiens
PCAGEMPAGSGDFRGDEGQLVANLYAQLGRGLVTDDDAKAARRQLVELTLQHELVDDRDVALLGRVDAVEQDLLHFAVIGQQPLHLGKRRYRHHLGVLLDLGGQALPVVDGRIALDGRV

SEQ ID NO: 1021582 - protein, 124 aa, Homo sapiens
PLRTHGRLTAIGDLTVNATTLNNYGTLGGAGKVRLNATHLVNDKGLLFSGNDMALRVNDFSNRYGDVYSLGALDIARDDASARSSLIENVSGSLDSGTGMRLLADTLSNRRDQFTTEMKLVSRP

SEQ ID NO: 1021583 - protein, 75 aa, Homo sapiens
GLRLNLHQKTHLHDKPSRCSECGKNFRCNSHLASHQRVHAEGKSCKGQEAGESPGARKRQRAVPVPKCHVCTECE

SEQ ID NO: 1021584 - protein, 110 aa, Homo sapiens
RIISTNVIAKADEPGAYSFFNAFNYIPPIIGFSSVGRKDSLNNIEQTGEFVWNLATRPLAEQMNQSCAGVSPEVNEFELSGLTPVASKIVGVPRVGESPDEDEMQETQII

SEQ ID NO: 1021585 - protein, 132 aa, Homo sapiens
RSEAHDHRRHAGAEQGHDQAEDLAQPGDLVLGETLVDIEHVAMTPITVSDMQIGGNQPEQQQRLPTVVQDKVVDRREHGREAPAAHGWEAQGSEDDIEDGAQERAVFHQQFPQTHALEQHAGECRCCTGVRS

SEQ ID NO: 1021586 - protein, 223 aa, Homo sapiens
MAGNFDSEERSSWYWGRLSRHGVLVAAACKWTSWHWGSYLDAGTLSTSPWDYVLMLSQRTRAVSHYIINMQLALLPCRVPPVARPASALGCCPSRLLNRRSRVLIHLPALLEFYKIHYFGHYNVDRTSFQIQCRVVGVILSAGVRRSMCEPSLTLIGNDEEDLPFNEGDILRIRDKPEEQLVDCGDSEGQRGMIQVLTSRVRLLRSFWSIGVPGVPPQPGGRT

SEQ ID NO: 1021587 - protein, 132 aa, Homo sapiens
MSDLCVPGDTTLCFLAGTWPSLLALPVDTLPWPWTLTRNLWFQPRATLAVEPGCHLLGPKFGGYLAGISRKRPGAGASPRRSHAPMWPPLFVVLPFASCVVFASRGGHFLLPARRPGSLYLALSAAACLRLL

SEQ ID NO: 1021588 - protein, 75 aa, Homo sapiens
QEDAGCYAAHRRYVYSLRCEKNDLLIIPAGVPHWFDIGENPHCVTLRLFNTAQGVVPSLTGDAIAARFPRLGVRS

SEQ ID NO: 1021589 - protein, 187 aa, Homo sapiens
ANNLPGCAVLAELSLVGCYNLSFIPEGKRAQLLLESAKKNLRGMAFFVPDLSFHVSNDCMYLFDAGLFNLKFIPALHAVQYALLGGLAVEVDEDTILAASEDAQLTCDIACCTDYCQWTSSSSCYQYNAVQPVMLHVDACCTDVMPADGAVCCTWANGWHCLLGGCLTSLGRLCPPEDYMSHIIEKW

SEQ ID NO: 1021590 - protein, 106 aa, Homo sapiens
VTLRPKLRWQPALLFIVRVRGPLAVNIPNKAFKILSLLRLVETNTSVFVKLTKNVYPLLKVITPYVVIGKPSLSSIRSLIQKRGRIIYKGENEAEPHEIVLNDNNT

SEQ ID NO: 1021591 - protein, 266 aa, Homo sapiens
AATPLPPESPPRHSLEEEPAGNWLQDALFLSAGAGSAVTMPVTFALHAPPGPGHCVTQCYDTTGPAPILPTRHVTAAGYACGWAPALRHCALYPSETTYGASGNLAKGSLTIWHFWVGPFLHDIHVSLRFLVTAEDRPSAYILYCCLVAISGGPMECMLVGTGPDHGPGDHSGGPMKRVTFHIHTQVLSDTVAGTRPNFHDGGKDMGETSARGLRRGKHEGSMRKGPSMAKNVNGTNSMDRHDRNRPPVNQGTTHTEDEKTGKNKT

SEQ ID NO: 1021592 - protein, 238 aa, Homo sapiens
AATPLPPESPPRHSLEEEPAGNWLQDALFLSAGAGSAVTMPVTFALHAPPGPGHCVTQCYDTTGPAPILPTRHVTAAGYACGWAPALRHCALYPSETTYGASGNLAKGSLTIWHFWVGPFLHDIHVSLRFLVTAEDRPSAYILYCCLVAISGGPMECMLLAQAPPLPVGLRGCPDNVVDLPLHTSVLKATCLACQPTYRIGGFGVPMPGLSVQLGSAQAAFQFFGHACRFAARAGPRF

SEQ ID NO: 1021593 - protein, 109 aa, Homo sapiens
TRRAAPSRRLTEMALDSDLWSRLEEKARAKCERDEAGNPAKESSDADGEAEEEGESEKGAGPRSAGCPVLLEALGQGPGACAALAASAASNVLYCAEIKDIGHLTRCTL

SEQ ID NO: 1021594 - protein, 185 aa, Homo sapiens
TECGYCCMLRDIHGKPLPQGAAVLGPENALLTTVVGDGMIFLSKRRTRPRPLKSLPAQCPARCNSTFRSKPIMANSTKPLRRSVGEMARMNEWRIGCLKGLGLLLSCLLLAAPASAANCRLSLSQPIIGLRACIAQGDQLENRGAIAGKAYGRLNVICVEAAVIALRIPGVPANETGLQVRAGQD

SEQ ID NO: 1021595 - protein, 55 aa, Homo sapiens
MKVISVISTKGGVGKTTTAANLGGLVADAGLRVLLIDLDVQPTLSSYFEAYVAGG

SEQ ID NO: 1021596 - protein, 64 aa, Homo sapiens
EADDRHPHRQHPHAHAGPVAHVNDVGDGPHRAEVGALGNGPEGHRQKESSPENLGCDGLEIDVL

SEQ ID NO: 1021597 - protein, 479 aa, Homo sapiens
MKDCDFPAEDEFPETELPTTTTVAKDADPRASTRELRAKSTAEAASQLDGRHPDRTVDKPGHPYIMTVETAGRADRRRSYEVCKDLFDPIIEDRHGGYKPSDEHKTDLNPDNLQGGDDLDPNYVLSSLGAALGLQHPVGFLAHPPLHCMPAGKRRGHLRKLAGGKPCPCLDWLTCAGLILLLLNDATDWMCVMHAACSSDDHFLFDKPVSPLLLASGHGPADLALTPAVSGTMIKKTFLVWVNEEDHLRVISMQKGGNMKEVFTRFCTGLTQIETLFKSKDYEFMWNPHLGYILTCPSNLGIRAAEQVCISMLANLGKHEKFSEVLKRLRLQKRGTGGVDTAAVGGVFRRLQALTVLGFSELELVQMVLRLRVKLLIGDGTDGVEQGQAMRRTITACPENEAPANTRHQRAAAFHNIIAWAVPTMHPRCYAVWEPSSLAVETSVYTWYSLFHLMGNDTADAEIKTRVMAGQKYRQKNIG

SEQ ID NO: 1021598 - protein, 152 aa, Homo sapiens
EPGPRLAGQPTVVSGLWQPARQAPVKAEEHQRQNINKFELPDNALPSRCLRSPGDGEDTNDLHAEAGGGAGNPTAPSPEQSRLPWVPLDAAQNINVVKYVGKRSKDTSNAGFCEVEFQGPPLHPGKSGLRNLQQAAILEMKLFQKRTHHKHE

SEQ ID NO: 1021599 - protein, 129 aa, Homo sapiens
TPRTNVLLLRRVNLTRYLSDDSQTPTGSYLAINRIIAGISTWDFLPIMGAFEGKRTGITGCVTEPVMRQQLGDLTGALRRQPHQHILEISIRIMPIKVANWIKLISAAARCPLRNDPAKSQFLRPSAHG

SEQ ID NO: 1021600 - protein, 63 aa, Homo sapiens
MRQQLGDLTGALRRQPHQHILEISIRIMPIKVANWIKLISAAARCPLRNDPAKSQFLRPSAHG

SEQ ID NO: 1021601 - protein, 52 aa, Homo sapiens
GQVELQPALEHLPRQLKRKLETLDGGVAQLFVIRCGSGACQRTLQSCQGEFK

SEQ ID NO: 1021602 - protein, 85 aa, Homo sapiens
  misc_feature (5)..(5): Xaa can be any naturally occurring amino acid
MPRLXRGIPIDDQGRSRSSTAYSAYHFNLDVILTQQVLSQIMSLYCLKYLLLRIKCSGEKFLKDPAPFYLSRLIYFSLLFLYHIL

SEQ ID NO: 1021603 - protein, 293 aa, Homo sapiens
RHEERAARWRSRTYDMAALSCWALHAVGPPHMLCLCCGRQALAGLCREERANSVSSGVTTCLMLGPMAEYPCLELAVQDDCSCTADLTEDKDGTPCYSDYQHAQMSCAWVPRSNTLSSRPETNEAFGHCCPGPCTQDNKRCLIRELISNASDALEKLRHKLVSDGQALPEMEIHLQTNAETGTITIQDTGIGMTQDELVSNLRTIARSGSKAFLDSLQKQAEASSKIIGQKAVGNYSAFMGGCQSGGLFPVGKPSGSLGYRGHFRWYRNCLATREASEVRNGTALINHLHTRL

SEQ ID NO: 1021604 - protein, 127 aa, Homo sapiens
DPYQNRAGHLSAIYASAMGEQALHPIQFHDLDWGKIEPVEFEWYFPHASRFLDAMGRVSDAGGRPHDLVVYRDCADLGRGNGRCSPRRTSRGNGSAPGVTSTSEERLMKRIMMVGAIVVSAACWWKG

SEQ ID NO: 1021605 - protein, 225 aa, Homo sapiens
PAVVAKQRLYVAATATDGSDGWGGASPWDSRVQEDPWSQWSWLLASRGKEQLLMETLERESVRREIVPLFESRECSGVAPVPGNPKLHVRLRLPTCPTLVPHMKIAMTGSQSAPVILPDLIATRQRYQQVQSDSGGPSDAAAAHSSSSHWCGGPPFVGPVGFGPGDLESPGTGQRLEKPCSCGGQLWPPRGPLSCVQPSSPTCYREQDSALSSAAAGPRRMLFGP

SEQ ID NO: 1021606 - protein, 209 aa, Homo sapiens
GSFSTNVPASVHQTGQADDDTRRDGRVLQRHEEIALQHRHQERVARIGGKVKAKPGQDQPQKGRHSQHATDRAVDALLGDLQGVRRTTLGFFYVEHKHRKDQPRHRRDKEGRAPAVERLDHRTDRKERQQQAQRQAKHENSPWLGARRLGGEQRSPISELAAGAEAGFADANAHAYQQEGPETGDHAVERRQTAPGEQDSTHIRGSGYE

SEQ ID NO: 1021607 - protein, 71 aa, Homo sapiens
ALQAFIFMMLTLVYVGQAHDKHCSPEVNEFRFFFPSVNYSLIGAIMENVLGLVALACGLIISLGAIGACIG

SEQ ID NO: 1021608 - protein, 38 aa, Homo sapiens
FWTPPNNQLMMANNQDTNGNINVRDVDICGYDWDVRDV

SEQ ID NO: 1021609 - protein, 268 aa, Homo sapiens
ARRGAAAGLDARPGLGAGSAARKISPRESGPATGRGLRRDGMRWAVTGVTAGKIASNVQKKLTRAQEKVLQKLGKADETKDEQFEQCVQNFNKQLTEGTRLQKDLRTYLASVKAMQEASKKLNECLQEVYEPDWPGRDEANKIAENNDLLWMDYHQKLVDQALLTMDTYLGPSSPDINVTAFAKAVAFKLGWHYDSWPGTTNESFKTAKKKGEAKIAKAEEEVIKARKVFEEDHVRPGSDFAPCVHTGSLRNRSSIRAGKFQGIGPNS

SEQ ID NO: 1021610 - protein, 225 aa, Homo sapiens
MSSLTQCVQNFNKQLTEGTRLQKDLRTYLASVKAMHEASKKLEVTCLQEVYEPELDLAGMRISGLPGSVKAMQEASKKLNECLQEVYEPDWPGRDEANKIAENNDLLWMDYHQKLVDQALLTMDTYLGPSSPDINVTAFAKAVAFKLGWHYDSWPGTTNESFKTAKKKGEAKIAKAEEEVIKARKVFEEDHVRPGSDFAPCVHTGSLRNRSSIRAGKFQGIGPNS

SEQ ID NO: 1021611 - protein, 305 aa, Homo sapiens
RGVERQPVWTRGRGWGLGARRARSPRARAALATGRGLRRDGMRWAVTGVTAGKIASNVQKKLTRAQEKVLQKLGKADETKDEQFEQCVQNFNKQLTEGTRLQKDLRTYLASVKAMHEASKKLEVTCLQEVYEPELDLAGMRISGLPGSVKAMQEASKKLNECLQEVYEPDWPGRDEANKIAENNDLLWMDYHQKLVDQALLTMDTYLGPSSPDINVTAFAKAVAFKLGWHYDSWPGTTNESFKTAKKKGEAKIAKAEEEVIKARKVFEEDHVRPGSDFAPCVHTGSLRNRSSIRAGKFQGIGPNS

SEQ ID NO: 1021612 - protein, 113 aa, Homo sapiens
GGGADSSRARRTRSAPASVWDWLARDFLRPLPIAGDDFRGFFRLSRVAKERLGCLARPLSSLVLLMLACRTLGVPALLPLSTMMCPWKAFLLLLLLWAWCMLAWPWRVPEGPD

SEQ ID NO: 1021613 - protein, 38 aa, Homo sapiens
MVLNLRSTPTHGETNRATPNILSPHYSSEPGDTQGTAA

SEQ ID NO: 1021614 - protein, 54 aa, Homo sapiens
MGGTPYRGRKPETKEPGQAEACPARCAIEKQQLALEVLTVRYGTYRALFRCVRS

SEQ ID NO: 1021615 - protein, 54 aa, Homo sapiens; identical to SEQ ID NO: 1021614

SEQ ID NO: 1021616 - protein, 228 aa, Homo sapiens
RELPNSSAARRPLPEPGVEAAIAAGSPQPRPEPAAPFEGAPGAHGEGDVNSVWPRRRPEKDEPKSGRRRSSSPPTPSRWTASDPDDVVPVWPKKSLVLVHVLWTSIYACRCILGGAYLYKYFALQPDDVYYCGIKYIKDDVILNEPSADAQCSLPDNLKTDIKIFEEEEVNLSVCLSQSLQIVILPTLFMTLTKKLTGYLDLNLDKVLCDPSEHFHCYATQKPTGVTY

SEQ ID NO: 1021617 - protein, 164 aa, Homo sapiens
GRGQTGSDAFMGLFGKTQEQSRPEKLVNEGSLKIRKEVRVVDRQIRGYPRENEEKGESDSVKGVLPEKGQKDVCVVLAKEMIRSRKAVSKLYASKAHMNSSAHGDEEPARGLASGWFTAEEHRSDEGHARVVVKIPEIQGRHEGVVQKKMMKAGIIEEMLEDTF

SEQ ID NO: 1021618 - protein, 120 aa, Homo sapiens
AYGRSAHRQATGKCRCRRWLRISPLITAAYSRIMLSVTTAGADIAADAASGNDDGVSIKTGDQVAQDGASGHVIDVLGQLHIHSANGATALVGHIAVLRGIDEGASLHPEGVVPIALEQR

SEQ ID NO: 1021619 - protein, 138 aa, Homo sapiens
MGELNWQGGAHCHYGPLESRQEEINHMDIRGGRESCLEKVRGQQPAEAEPGGFGAGASVVEGHPPGSNSSHEEILALVELLYVIFVGWSCPSDGASLTRACLGLLALPGPGLATLLQGSSGCLGAALAWLQPADVDPG

SEQ ID NO: 1021620 - protein, 188 aa, Homo sapiens
MFPFYSCWRTGLLLLLLAVAVRESWQTEEKTCDLVGEKGKESEKELALVKRLKPLFNKSFESTVGQGSDTYIYIFRVCREAGNHTSGAGLVQINKSNGKETVVGRLNETHIFNGSNWIMLIYKGGDEYDNHCGKEQRRAVVMISCNRDTLADNLTLCLRSVAKSRLLLLFEMDSSWLFTRDLNLSVGF

SEQ ID NO: 1021621 - protein, 74 aa, Homo sapiens
MRPSLPCFQQFSVDALDIAPGKYFPELTKATGEDIAQVKAWWAERGVGITGMQALLFDTKGLNIFGSARRKLLA

SEQ ID NO: 1021622 - protein, 44 aa, Homo sapiens
IGITAAQERLPLRLLILQLPVQRCPQIRLLPNFCGGVPGVALLQ

SEQ ID NO: 1021623 - protein, 110 aa, Homo sapiens
NGSAASASRLRWGVSTSTMGGIEASPQFLLVVESKCTGGKFRSMDGCEICSVIERLINAIAGSPADVHSVEVLREVAERGGLSSIGRVVPVVGITGYNPAFAGFLVVTNL

SEQ ID NO: 1021624 - protein, 56 aa, Homo sapiens
MKGLKSLLAAGLTTLSLSLPVSAAQAPVHFADLNWESGSLITEVLRFIVEKGGYWH

SEQ ID NO: 1021625 - protein, 236 aa, Homo sapiens
NTMDLVLKRCLLHLAVIGALLAVGATKVPRNQDWLGVSRQLRTKAWNRQLYPEWTEAQRLDCWRGGQVSLKVSNDGPTLIGANASFSIALNFPGSQKVLPDGQVIWVNNTIINGSQVWGGQPVYPQETDDACIFPDGGPCPSGSWSQKRSCVYVWKTWGNTGKVLGGPVSGLSIGTGRAMLGTHTMERDCLPSHGDPGAMCSVIQLSFTYDRCFSDGPVGLDEEQHSEISLTCPQS

SEQ ID NO: 1021626 - protein, 235 aa, Homo sapiens
DPKQGRTYKLRMRRKSPSASIARQPITFGKAPGANDFQTVDVVQVPGKRRKRRRQAHDALRRLVQQRLAGGLQHLHFVQGAVAVDRHQQSQIAVDLLAAGFVRVVQVADALDLLAPLVLIPGAFVAHGGGSIQAVDPRALGVQLLFVGQFGFQAGNFTGELRAIKRRGRRGRRGFGLGLFPLSGRFLRFGCDGSDSGLGCSLFHLRLGRWRWRDLIDLVVLDRRHFGVLITRPDR

SEQ ID NO: 1021627 - protein, 167 aa, Homo sapiens
WSVLLVGASHQQPLHRFAQIPGIGTGWFEARSTNTWTKRPAAHASCLARLEYRQLILHRAIAQLAHPQTDLNALGKSARGEVIAGRTHHKPHHLTVMNIQPALFDQVGINGCIEEAVVSDVIHMAVGIVVVPTRGDRLEVAVIVAHRRRVRHRQVSTKLIQLSRDPL

SEQ ID NO: 1021628 - protein, 75 aa, Homo sapiens
ELSDDQNEVAHRETLDILNKASGFLRQELSRRIKTRITPRLRFHYDKTNAYGNYMFGLIEKAVQDLPKRESDDEE

SEQ ID NO: 1021629 - protein, 165 aa, Homo sapiens
SCHNLRSVHWWLMARCLLTMYEVFPQLIAHNSASLFCMADSYFRFASGNKSDESTSATVKAFGRRAEGPWLITRDAAHAGYLQRGPIPDAEGLIMDILKSRRRFLGGLAAEGVFGPPHHSVAWRACALAGQNQQAKLKVVFFVVPDGLAVDSVTGYSSDGRGRLL

SEQ ID NO: 1021630 - protein, 199 aa, Homo sapiens
MVLHHYRSGRFDSAEESMIPAYGAYKRVESREILFELGGFLEEANRLDNVPTERQIQCFGGPHFQGRGHHQHRVRDDLETILTWCQPAISHEVEFGSQLFRCVGNVLEPINQIRRGVETTQVQVTRSIAEPPSHLHQRVVHFGSPKKIANTQAFKRKSSSQLVSSNCDDLQPRGAVYIVQRILCSAIDHAHIDLLQQIR

SEQ ID NO: 1021631 - protein, 180 aa, Homo sapiens
NLSSGTPNNLRGARIKQRLANNHSLDLWQARWEQAPCFQHIDPNHQPEQRDHHDGKTEVVVKEPTDQRRQNSCRAAQPQGIVLGQADRAFFRPGFTPPTHRNGYKEQHADDAGLVDKVQPQVGDPQQVCARYRRVNLEANAERIRHHGLGEHAVFIKTNFGAGVARRKDRRQAFLQRWGG

SEQ ID NO: 1021632 - protein, 138 aa, Homo sapiens
PAFLLLISTVTQISLCALNTRVGTKRYMLPNVLDDSLNKNHFQPYIMADIYSFGLIFWEMARRFITGGIVEEYPLPSYIMVPSDPSYEDMREVVCVKRLRPIVSYRWNSDECLLAVLKLMSECWALNPASRLTALRIK

SEQ ID NO: 1021633 - protein, 283 aa, Homo sapiens
RGCRCPASRRPGLERDGRGGEEGGSVRSGAGPDSDPRGASSPPAGHRGTAASPSASMPPPRCTPAPPHTRARAEPRAPLGPSVAQGVSGSLGSLGQVSTLMKATVLMRQPGRVQEIVGALRNGRLETWLQVISDFDMTLSRFAYNGKRCPSSYNILDNSKIISEECRKELTALLHHYYPIEIDPHADRQRRSYLIWWNGGPKPHNLLCQQKIQKCQIAQVVQRVQCKCSGRGYKDLLQHNSNITKFPYDITAGIDDICKNNRRYSVTKINGLQLKKKSTQKRR

SEQ ID NO: 1021634 - protein, 145 aa, Homo sapiens
VAGTAPPRAARRAILISFSALSDQRTTLFLLSATLIFRLPGHDTHRTIRPTQGGLMNDELQHLKNLGKTSAQWLHAVGIHSASDLRRLGAVDAYRAVRTRGFRASQVLLYAIEGALMDVHWNDIPTERKEALNRQLEAISVHQKN

SEQ ID NO: 1021635 - protein, 45 aa, Homo sapiens
MKKFRLPGLLFLAQATTALASETPLANDDKGFWYAQTSVYTEVIG

SEQ ID NO: 1021636 - protein, 138 aa, Homo sapiens
SCAGGRGCRGRAAPGRALQAAKRLGKALSGRSLALSPKLEYSGTISAHCNLRLPGSSDSPASASQVAGITEVHHHTWLIFVFLVETRFHHVGQACLKLLTSSDPPTSASQSAGITGMSHHAWPEEPPRLARVVLIEVL

SEQ ID NO: 1021637 - protein, 96 aa, Homo sapiens
YCAYPARPLLQAPMSFGVVNFVYWYSERTAQHPGPRRQRRYLKGRSLLTQSRLMLGSGASPAIGIVVCQTPIIATVSWGSDVSNFCNSSFIACFLV

SEQ ID NO: 1021638 - protein, 230 aa, Homo sapiens
ARDLVSWEELDRIVTPGSTVQDFLNLADKVEQHLGMVFHRYLEGTRPRLRILLNGQPVKPWDPFMTDHPGKPYNPPVFKHPTLKGIEAECHVLPHKDMLSGEDFEVLGGPEGWTAQQGFNVYRNERLLVAGSWLGLGTGRSWTKDEAHRLARIRLDIPNSADADWKIDIRKSTARPPVYLRDWLTRLAEATRGRARRAFAHRRRATLLGNQQVAEAWKVEAGPLGDPRVD

SEQ ID NO: 1021639 - protein, 37 aa, Homo sapiens
DFTRLADRQIAAFVVADGDFGARNRQADGARELVGIG

SEQ ID NO: 1021640 - protein, 246 aa, Homo sapiens
GEDRGTAMAESSESFTMASSPAQRRRGNDPLTSSPGRSSRRTDALTSSPGRDLPPFEDESEGLLGTEGPLEEEEDGEELIGDGMERDYRAIPELDAYEAEGLALDDEDVEELTASQREAAERAMRQRDLGGWPGPGAACAVGSCMTAMRRTRSALTDKAPPGGSGPRRTARRTEDDDTRASRTLEDLRKCHYLCGELGEAWRAPGWRSNHALIENFLRTQVAQTMGTTVLPQERIQDFAKKNRENL

SEQ ID NO: 1021641 - protein, 109 aa, Homo sapiens
MPITSTLGVVGFQGLPRPPNQTNTRVTAMNFNLFSIIAASAVSATVDLPAAASVEVTGKKSNVTAYTQKYLLQSAKLLCGAGSQDSKLIVEGFKPQATRESALGFDVSS

SEQ ID NO: 1021642 - protein, 521 aa, Homo sapiens
MLATRRLLGWSLPARVSVRFSGDTTAPKKTSFGSLKDEDRIFTNLYGRHDWRLKGSLSRGDWVQDKRRSWLKGPDWILGEIKTSGLRGRGGAGLPHCGLKWSFMNKPSDGRPKYLVVNADEGEPGTCKDREILRHDPHKLLEGCLVGGRAMGARAAYIYIRGEFYNEASNLQVAIREAYEAGLIGKNACGSGYDFDVFVVRGAGAYILWSRRQRSSSPFEVQAGQAPPEAPPFPARLWRGVLGWPQQAVDQSLETDVDVITPQVWPPVDAYLLLRGVLADEREAQSTIDSFNHLCAMYNHPLHLWRRSMSVPLKELDLRSMLGGVTGGWDNLLAVIPGGSSTPLIPKSVCETVLMDFDALVQAQTGLGTAAVIVMDPSTDIVKRIRPLIEFYKHEKLWQCTPCREGVDLENKGDGTYREGGCPDGETRITVGRITKARIRKAIQTRAPGGRSRSACAGAGSGTSAGAKTESHRRPQDEARQMAYSTHLTERKGTPLDRGEHNNKERHPPEKQTHTTTAQTE

SEQ ID NO: 1021643 - protein, 418 aa, Homo sapiens
MNKPSDGRPKYLVVNADEGEPGTCKDREILRHDPHKLLEGCLVGGRAMGARAAYIYIRGEFYNEASNLQVAIREAYEAGLIGKNACGSGYDFDVFVVRGAGAYILWSRRQRSSSPFEVQAGQAPPEAPPFPARLWRGVLGWPQQAVDQSLETDVDVITPQVWPPVDAYLLLLGVLADEREAQSTIDSFNHLCAMYNHPLHLWRRSMSVPLKELDLRSMLGGVTGGWDNLLAVIPGGSSTPLIPKSVCETVLMDFDALVQAQTGLGTAAVIVMDPSTDIVKRIRPLIEFYKHEKLWQCTPCREGVDLDDKGDGTYREGGCPDGETRITVGRITKARIRKAIQTRAPGGRSRSACAGAGSGTSAGAKTESHRRPQDEARQMAYSTHLTERKGTPLDRGEHNNKERHPPEKQTHTTTAQTE

SEQ ID NO: 1021644 - protein, 218 aa, Homo sapiens
YVKNKTQGNYIFFKGTWTQPFDLASTREENFYVDETAVVKVPMMLQSSTISYLHDAELPCQLVQMNYVGNGTVFFILSDKGKMNTVMGELRRDTSNRGAGGLTSSQVDLSIQEGTICGVYGLEEVLEEMGIGDLVSDQANFSRMTQDAQLKSSGVVHAGLQLNEEGVDTGGCTGVTLTGRSTYHLAFEPGLDDHDLRPLAREQAVRGGYDPSGGEPRP

SEQ ID NO: 1021645 - protein, 141 aa, Homo sapiens
YVKNKTQGNYIFFKGTWTQPFDLASTREENFYVDETAVVKVPMMLQSSTISYLHDAELPCQLVQDELRGQWDCLLHPVRTGGGGPQSSVRGGAARVTGGGEALTSSQVDLSIARGHHLWSLWPRRGAEGVHGGVVNQPAEF

SEQ ID NO: 1021646 - protein, 317 aa, Homo sapiens
  misc_feature (281)..(281): Xaa can be any naturally occurring amino acid
  misc_feature (291)..(291): Xaa can be any naturally occurring amino acid
RGAWRLLPAARESDSGGGPGGGSGGGGASMSWLFGINKGPKGERRWGRRRLCRPRSPGPSGGGDLRLGMTWPGCPEDKLEQLSDPTCALDAAALSNGWLLLMLDGTLLFMPMDALNLGTECMDARRLQCGCNMSNAQKSMSACLWMQLNELSRSWAQAEERRKNPERGDPGSTRPGPSIHRHSVRPGTRYRRTELYSKAANYLELTGRIYRTRRTDVLCKKQDSPVRRATGVSWEMELRHKNEMLRVEAEARARAKAERENADIIREQIRLKAAEHRQTVXEYIRTAGTLXGEGFRAFVTDWDKVTATVAGLTLLAV

SEQ ID NO: 1021647 - protein, 309 aa, Homo sapiens
  misc_feature (69)..(70): Xaa can be any naturally occurring amino acid
  misc_feature (72)..(72): Xaa can be any naturally occurring amino acid
  misc_feature (77)..(77): Xaa can be any naturally occurring amino acid
  misc_feature (87)..(87): Xaa can be any naturally occurring amino acid
  misc_feature (95)..(95): Xaa can be any naturally occurring amino acid
  misc_feature (273)..(273): Xaa can be any naturally occurring amino acid
  misc_feature (283)..(283): Xaa can be any naturally occurring amino acid
RGAWRLLPAARESDSGGGPGGGSGGGGASMSWLFGINKGPKGEDAGAAAAFAARAARGRVAAGTCGLGXXPXPKDKXSNFDPTGLEXAAKAAKEXMSTLLFMPMDALESGHRMQGCKTLQCGCNMSNAQKSMSACLWMQLNELSRSWAQAEERRKNPERGDPGSTRPGPSIHRHSVRPGTRYRRTELYSKAANYLELTGRIYRTRRTDVLCKKAGQPMRRATGVSWEMELRHKNEMLRVEAEARARAKAERENADIIREQIRLKAAEHRQTVXEYIRTAGTLXGEGFRAFVTDWDKVTATVAGLTLLAV

SEQ ID NO: 1021648 - protein, 93 aa, Homo sapiens
MVGTTKVSDRRRTSDFLFLINETILGKCFRSGPSCAGSKNFTSSGALGMPPDVPLNHGLSSENQHNENRGPIPLFLSCGIQAMIKRDGRFKCG

SEQ ID NO: 1021649 - protein, 189 aa, Homo sapiens
SCLQHFVATGCFATIAGLAPEQQLRTLGLQSFARCGKGGAGAVFGGQFIGDCSGWAACDGLAFITQLAVDLADRAHGVNAFLVFSGAVIDDLRINLTGYRREILAAGQIGGKYHGAETTKAQGTDTSFTQAHRISEPWPMLVTAISSVFMVDSLSIRPASAVDPAKSRRGEEPIETVCNKSRTGLVIQV

SEQ ID NO: 1021650 - protein, 69 aa, Homo sapiens
GLFQRVEDLGVGVGPQYFFDTHVVVDEEMTRHVQHRQGVGGPDTGFAVDFNWQLRGDLGHGNSTPENSF

SEQ ID NO: 1021651 - protein, 131 aa, Homo sapiens
MALHVPKAPGFAQMLNGRERNTYQRLEQAVYEKHTSLLTELDHTTLYSDMDHIGTVNIELVIYTILQKSFVINNDASYLVLIRSRSTAFLLLKVSRKGLLSTAESKKSEMALNLCSGYLLGSSPGLSCKNF

SEQ ID NO: 1021652 - protein, 190 aa, Homo sapiens
MQPDELRLSWCAVHMSPVLWSLMKNCVLVEDTMVCCELTDGWSAGMPAGLMFTVCPCPMEELLKCVQAAPVLGYCTRWALLAALLARLALACLLGACGHNLCELPGVCRRDYRTQNVVGTRGALYLHRLTFSAFQGQLVRATWRGLKGRLDYLSSLKVTGLVLVSTSQDQKDDVAQTDLLRSNPIWLNEN

SEQ ID NO: 1021653 - protein, 63 aa, Homo sapiens
MIIWMDAWSLAPMMQLAESEHWCAPSRTGFQELAGAQFCMFEHAVCAFDCHHPACDVELAGSW

SEQ ID NO: 1021654 - protein, 303 aa, Homo sapiens
GSWSRSADGQDLRLGPGHSAAVVLGKPTESLPCLSQSANLSPPPPLIRRPLPPSGPGRPNLHHRRAPGARDPKRNMSAVRGPRTRTHGPIARPDNMMRGDRQVPGRHNAASISDGECEDPGGEADGSLAGRDPCKNGKMGRHETPGNPRQTQRNGPEQGGWTTKTATHQHGQAAPEEKPQTAPDKEAADDYDQLTYSNTGKTPLERSKQAKKRQGAGRYRKEAYPTRRPHQIPKDRTPEHGAGKDHADTQRGANENAQRKTASSATKAEPATKHKDKQRQHRQRAAHDNRKEDTKKKKQKEND

SEQ ID NO: 1021655 - protein, 149 aa, Homo sapiens
MLLELDITVDDAWLCSIVVEEFQPSCGRLRRSSTRCIHDKTGPGWDPFDTLFTMENIMQGASCRILISKNTGAPHSSGTRKVGSYCHVCPRETADTCARNSWSGCLPESSLFTAHFVAIFEYTKENSRVRPLSYKSIIAEVLGYFLQFF

SEQ ID NO: 1021656 - protein, 314 aa, Homo sapiens
KHSLGTTLDVSPPLQPSPSERRVPTRQKLGALGVSRRQARGRTGERAGSRSGGGAGSSGAAGSRRGGLQARRSTLLKTCARARATAPGAMKMVAPWTRFYSNSCCLCCHVRTGTILLGVWYLIINAVVLLILLSALADPDQYNFSSSELGGDFEFMDDANMCIAIAISLLMILICAMATYGAYKQRAAWIIPFFCYQIFDFALNMLVAITVLIYPNSIQEYIRQLPPNFPYRDDVMSVNPTCLVLIILLFISIILTFKGYLISCVWNCYRYINGRNSSDVLVYVTSNDTTVLLPPYDDATVNCACKVHRTYVVA

SEQ ID NO: 1021657 - protein, 267 aa, Homo sapiens
MHAVLLAGAPCADGWSTLLKTCARARATAPGAMKMVAPWTRFYSNSCCLCCHVRTGTILLGVWYLIINAVVLLILLSALADPDQYNFSSSELGGDFEFMDDANMCIAIAISLLMILICAMATYGAYKQRAAWIIPFFCYQIFDFALNMLVAITVLIYPNSIQEYIRQLPPNFPYRDDVMSVNPTCLVLIILLFISIILTFKGYLISCVWNWYRYINGRNSSDVLVYVTSNDTTVLLPPYDDATVNCACKEHRQLKWLLSLHVGGAEG

SEQ ID NO: 1021658 - protein, 209 aa, Homo sapiens
KHSLGTTLDVSPPLQPSPSERRVPTRQKLGALGVSRRQARGRTGERAGSRSGGGAGSSGAAGSRRGGLQARRSTLLKTCARARATAPGAMKMVAPWTRFYSNSCCLCCHVRTGTILLGVWYLIINAVVLLILLSALADPDQYNFSSSELGGDFEFMDDANMCIAIAISLLMILICAMATYGAYKQRAAWIIPFFCYQIFDFALNMLVHY

SEQ ID NO: 1021659 - protein, 73 aa, Homo sapiens
EPVRCGLVNVTLLVERQSGGVAVCLEFLRDSLGFSMPCVRPEAGAEVHRVSVLNRELAISEALPGQVFGMWRE

SEQ ID NO: 1021660 - protein, 188 aa, Homo sapiens
MRESYYSVSVGPGGKKMVLDLDLFRVDKGGDPALIRETQEKRFKDPGLVDQLVKADSEWRRCRFRADNLNKLKNLCSKTIGEKMKKKEPVGDDESVPENVLSFDDLTADASSMRSRTFLICERHEAELLRRDPLTSLSVGREERRWCWTLDLLRVDKGGDPALMREMQEKRFKDPGGSGQLVKADSEW

SEQ ID NO: 1021661 - protein, 112 aa, Homo sapiens
MRESYYSVSVGPGGKKMVLDLDLFRVDKGGDPALIRETQEKRFKDPGLVDQLVKADSEWRRCRFRADNLNKLKNLCSKTIGEKMKKKEPVGDDESVPENVLSFDDLTADAVS

SEQ ID NO: 1021662 - protein, 217 aa, Homo sapiens
KDPRRHVMNRLVDVLSEPMLAAMACLPASSGPVDMRAAEPADCDAANVLGCIHGWPCELMELLTFVTLRHHWMGDFCLGSCVLGPCACPSSTFPLGAPVLMAWDSSLWMDVHVLCLGTITLLLLAVVNMHDVNDHVDLVTCLVPLCLCSGGAWLKVSPGGPGDSQWSENCWQTSMTDFYHSKRLADLLQEEALIRPQEACSPVKREGLKWPALHLLP

SEQ ID NO: 1021663 - protein, 50 aa, Homo sapiens
MQVRTNQPCKFGLTSHASSGLTSHASSGLTSHASSGLTSHASSDNQPCKF

SEQ ID NO: 1021664 - protein, 43 aa, Homo sapiens
MQVRTNQPCKFGTNQPCKFGTNQPCKFGTNQPCKFGLTSHASS

SEQ ID NO: 1021665 - protein, 339 aa, Homo sapiens; identical to SEQ ID NO: 823478

SEQ ID NO: 1021666 - protein, 326 aa, Homo sapiens
QRAGIMVEWNPPFTPLGGPCALTQSLERAPHVLEVFPHFRVPVPVLRGRPVFISVGYVDDTQFVRFEKTPESEDGAVGAVRWSRRGQSIGTWETLERQDTCNRFSDVNLLDRCAATTIMRRGRVVTSPASGMHGCELGARRSASSAGMNQFAYDGKDYLTLNEDLRFLDRGGQRGSDLRAKTSNDASEAEQPESLPGRHMPWSWLHKYLAEGQGDAASLKAPKTHVTHTISDMRHLRCWPASTLRDNSDRPQAPKANQGNGPGNPPQELTSNGQPGGPTPTIRPRTDGPPAGRRPHTTEDARRRQRQTRGNKDTEATEHHHHHQHG

SEQ ID NO: 1021667 - protein, 152 aa, Homo sapiens
  misc_feature (116)..(116): Xaa can be any naturally occurring amino acid
  misc_feature (118)..(118): Xaa can be any naturally occurring amino acid
  misc_feature (120)..(122): Xaa can be any naturally occurring amino acid
  misc_feature (124)..(127): Xaa can be any naturally occurring amino acid
  misc_feature (129)..(129): Xaa can be any naturally occurring amino acid
RLERLCNRTRQERTRGEAGHCCVTARRLTTLRCTHARHSPSSRPYFLHFPLLPEPEEPLFPRGAFWGPRSSPPLPPSPEGSEKRPRPERKSGVATGEKLTPIADSRRQKGPPTSSXVXLXXXQXXXXLXSGTIEGTMSSLNIVVEESKGCKL

SEQ ID NO: 1021668 - protein, 116 aa, Homo sapiens
RLERLCNRTRQERTRGEAGHCCVTARRLTTLRCTHARHSPSSRPYFLHFPLLPEPEEPLFPRGAFWGPRSSPPLPPSPEGSEKRPRPERKSGVATGEKLTPIAAARRHEMATDTHR

SEQ ID NO: 1021669 - protein, 152 aa, Homo sapiens
MPSKGPLQSVQVFGRKKTATAVAHCKRGNGLIKVNGRPLEMIEPRTLQYKLLDSQFCFSAKERFAGVDIRVRVKGGGHVAQIYAIRQSISKALVAYYQKYVAMTVFHSNGSIKEDRCLIQYDRTLLVADPRRCESKKFGGPGARARYQKSYR

SEQ ID NO: 1021670 - protein, 148 aa, Homo sapiens
MPSKGPLQSVQVFGRKKTATAVAHCKRGNGLIKVNGRPLEMIEPRTLQYKLLDSQFCFSAKERFAGVDIRVRVKGGGHVAQIYAIRQSISKALVAYYQKYVDEASKKEQIKDILIQYDRTLLVADPRRCESKKFGGPGARARYQKSYR

SEQ ID NO: 1021671 - protein, 133 aa, Homo sapiens
MRPVQYSWEIERDLGNAIVLTVQIDLLADDLGLGFHLPMLGQPERVAGLGGYRQGVALGIHLHPSVGLVVAIQAGTHGHQVDVPAGRIGECPVSAEVVAVEFDPPGAMVLPAHCKALHVAAQAALADKEDSFG

SEQ ID NO: 1021672 - protein, 239 aa, Homo sapiens
WEAPAHGPERQGPEQGAFVHDPSRGTVHHTHPLSCTWAKGVCHSASRARWRAGEGGGAQVSETPQRRPESPSEGPACVNTKGRPRTLVGKVSGAHTLIALHPKRTCIRDSIPSLPNSVPEAKKFPRALSHFSLVFPVKLLPAPIVAGPFTRSRRRGEIVPVAEATVIIPQGESLAALRRVPMGGVHNQDALPGGGLQIHMVHTCASLPTTWEFLSCVDDIRGTLGGKANKRASQVLEPE

SEQ ID NO: 1021673 - protein, 77 aa, Homo sapiens
MGSRARARETHVGDILQLMFEGWACVRLSRNMMNSEKGEGVMDTTLGYTPLEGGWERRSQQRNVKRDWIIFPSYSQI

SEQ ID NO: 1021674 - protein, 200 aa, Homo sapiens
MKIYTYEQLTRDLGEAGVWTPLPSTMDNIHLHPEEEKYRKIKLQNKVFQERINCLEGTHEFFEAIGFQKVYASLPRIRSDPEEIIRAEDETTLAQPQSLERHKEQLHGLRSTVLLPMLDRQRRCLPALDPWPRSSNCLGTYFKLTAEEIKREQRLRSEAVELAELCCWTKDMLWIMEEQLGACASKTTRLMMRAASPMAY

SEQ ID NO: 1021675 - protein, 110 aa, Homo sapiens
PQCTLQVVDSQGRLGLGLVQDVWCMCVRCCKGATVHEKCISGFLYGPRVIPEAPASPVALWRLSELDDADEFGYSRLRRGSGFGPQPRSRLVPLPLPGGCCSTPNPREGL

SEQ ID NO: 1021676 - protein, 296 aa, Homo sapiens
MLATDEWSGVTALGVSKLHLAGTKVDLLSSVLSCSKLRAGELSVNLSNLRSYKRPLSRKERLEIGAQRSEIRGRIRTYREEREIHATGYYKVDDPVWNIHNCKDAELPTIYRKVYEQPFHMLSPRERRGTIAIQAPWTSPVSRVLLSEKRQEKFLMENRVQSFYQQELEMVESLLSLANQPVIHSACSDQVNLKKDTSFQGNSSILRSAIQLLRGKRTVSFHEPLMVLDNLYYVPGADHAARMIPGIFSRTAEAIPGEGLPLSALLGCVRLGSARLATVSQQSWARGPGPVASGFQ

SEQ ID NO: 1021677 - protein, 290 aa, Homo sapiens
ILWLEARRLHTGVAATAARIWASRHGHDPSEVSSGCGCWFAGTQGVNRWVNIAGGGWGRANQTQGPGVGGSFLLEGQVGHLLVLTMLVGTLDLIAQGPVLPVPLGAFRGNAHPGPSGAGGLPFRGQGSGPIYGCDEGPVRVGTEASTGRLASPLGLALKRLDCQAQRETLVVALAGNDRPRKHAYILWTSPVELSEALGQIFDSQGGLDCPSAVNVQGEDALGFCGAHGHPDCNLEAQALLEKEPGSSVPLSVDAECVPMGRGLLRYLLLPGGICFSLFVVIVPQAGSGH

SEQ ID NO: 1021678 - protein, 280 aa, Homo sapiens
GSVAGSEEAPHGRCSYRSQDLGIQARHDPSEVSSGCGCWFAGTQGVKMYGDMAAGRMGAPTRPGIAWEIFYEKASGALCVITCGDLTDARVLCTGPGLREVLDQGLGNEHAFVARDSGPIYGCDEGPVRVGTEASTGRLASPLGLALKRLDCQAQRETPGGGSGTEMIDPGSSQNPWTSPSGALRGPCARSLTASGACDCPSAVNVQGEDALGFCGAHGHPDCNLEAQALLEKEPGSSVPLSVDAECVPMGRGLLRYLLLPGGICFSLFVVIVPQAGSGH

SEQ ID NO: 1021679 - protein, 402 aa, Homo sapiens
GEWRAGASAATHTPRSVLVPRVCGSLACRPSCHTDCYPGVAQGLVTPLAGPGRGPRSPQGSWTSVAVSTLPVEEESSSETRMVVTFHDVHALESMCQELAKSKAEVACHRTLYATRRVCRPEPDSSDAPFRNARPRIYSTRLLRNPYLYGCFTLQIHLVFPQHLPKQESPGHSTIHRGIVPSSLALTDYMPVSIPKQNTEFSIIHHVVNYAPITHAILYTLTPPGPFNLTFPHTHTSPNNIPISTPPPHSQPLHTLGTHNQPAKAARMKKPHRHPHQPPHSFPPNRVIHRRSICSHSHPPPTTDVSSLLLRTNSEHVPPVQPAHPPPTHPSQSSLLRSPRPHLPPHASLSTLDYNISYQSHQINLTSYPPPPHSYGSLPLSILRHTQHHNTPPTHHTSFAPY

SEQ ID NO: 1021680 - protein, 368 aa, Homo sapiens
AERGSALGGSSGRGAGRGRRAFPLGGVGRPGAGRGAPARGIRSGGSRAGRSRMAAAAAAGEARRVLVYGGRGALGSRCVQAFRARNWWVASVDVVENEEASASIIVKMTDSFTEQADQVTAEVGKLLGEEKVDAILCVAGGLGRGPMPQSKVSLSRTVTCCWTARRIWAIDQSPAHLATKHSQRKGGPPKPWLAHNGCPGMGLLAMIGVRHGHGVLFTKLCQSLAGKEQRHAARGQPAIRLCSPGYPGIPRGTTELHCLSADFSSWTPLQNSYVENFPMTGSPAKTDPSSGSLIPRGNHRTEGRNFTPAYFYRLHLRAYAGGCQQPSLTCLTVALSTLVVPCNPVAVETKRLLFLTTLLRPQDASTPR

SEQ ID NO: 1021681 - protein, 85 aa, Homo sapiens
RRLGSPNPNPLVGGHLVPFGGETVSFPPILLLVSRVAPQPLLCIASLLVYTYAYWFCVKSFLLLKLGMETESSSDGWRRIGPHSL

SEQ ID NO: 1021682 - protein, 55 aa, Homo sapiens
MCCRPAAPGRDSGQSHIPEPELTVYDPNNIFARILRGELPCHKVYEDADTLAYST

SEQ ID NO: 1021683 - protein, 127 aa, Homo sapiens
YAIRKKSQGIVDNKEYAVNEVVAGIKEIIQCDVGTQLLYKFERPQYAEILLAHPDAPMSQVYGAPHLLRLFVRIGAMLAYTPLDEKSLALLLGYLHDFLKYLAKNSASLFTASDYKVASAEYHRKAL

SEQ ID NO: 1021684 - protein, 234 aa, Homo sapiens
KIRLGTRPGVNRPRLCPRSPRPPRPRAPRHAAPPRPAAAAAALLYGTVGAADGPAGCLVVPLLLLALLCLASCANNAFAFWSGAQQPHHCLLAIQTHKLCLPVACLPPSYLHVMQHACMQHVALAALPLHACLCCLPSATLPAGAAAAPSPPFSFHACRAALSRLARVLTAPPKAPRTPCRHRDDATYGGSLELLAALTRPLSLPSLDPGLPAANSSSLLLHLRATECKDGAAM

SEQ ID NO: 1021685 - protein, 109 aa, Homo sapiens
QDPSVYISRRFSPDPMANDEQDRWRRLLDEEMSEVISPYLVERDGISTELATVREHKRQIEYGIKVRKQQNEIFGEIETLGRTIDRITLQLDELRKKAPSIGEVLSVLG

SEQ ID NO: 1021686 - protein, 305 aa, Homo sapiens
EEEGPTVVLNPHPSLVLQGDPGKARVVSECSGCVMELVKPGAEECSGPRREVENSEHSHAEMSDVSDGDWQCGPCNGLFLWVGEGAGELDAVRWFEGAVLSKEWDVTPNCWSNDVTMLANVMLDVLRMLAGWCAGGGVRDNLVTCSMNALLPGVPCVPTVLHVGPVGLQAAELMGLEAILPVDVTCLDVLVPAPPGVLSATPEDEEMRRSGSCKPADQRTSELESLSAIECRAGESGPPAAGTTAGLRHRLQGWAQGTLVALALAVPWQAWPDARTLLSVGMEAQLASQAALLPYGLSYLVHCLG

SEQ ID NO: 1021687 - protein, 291 aa, Homo sapiens
EEEGPTVVLNPHPSLVLQGDPGKARVVSECSGCVMELVKPGAEECSVTPKWKWRTCEHSHAEMSDVSDGDWQCGPCNGLFLVVEGAVLSKEWDVTPNCWSNDVTMLANVMLDVLRMLAGWCAGGGVRDNLVTCSMNALLPGVPCVPTVLHVGPVGLQAAELMGLEAILPVDVTCLDVLVPAPPGVLSATPEEKKEEEGSCKPADQRTSELESLSAIECRAGESGPPAAGTTAGLRHRLQGWAQGTLVALALAVPWQAWPDARTLLSVGGGSAASQAALLPYGLSYLVHCLG

SEQ ID NO: 1021688 - protein, 232 aa, Homo sapiens
SASDRRDDPSPKRPETNPSWLASPCMWPAGEREGRSVHPVARTGGEGALLSAREVIMKSGWSDCPTPGMPIHARGLGQLLSELLKGASFSLRAVSCSLLLSPTGEHVCLRRDTARSYGFDSSPCLSPAGPALGVWQAEPGPGRKQIFQMMGLPSQRAHVGAKAFLCQSCASLGHIMPFGEGNRPMVVLWEVCDLGMLEGPHLTKGLLVVPKGAPVRALGAFREPKLFLGAPF

SEQ ID NO: 1021689 - protein, 322 aa, Homo sapiens
WAEGAVRRWQLVGGGGVEGLRSSSRWTNPHVPVACDPEPCSCTGKLKTGLGWCLLSPESGHLCVSPPGAEIRMFRCMRDCGGLMDPMFADGSLCYSAVSNMSRMWSGGFGYSPPFLMQSQDCATVPCGPEACPGRLECSEAWKTVIPTFGIAWEMSGGFMDMFGMMNDMIGNMEHMTAGGNCQTFSSSTVISYSNTGDGAPKVYQETSEMRSDQAGSGRHGGLFGMQTVDWRQMSIGHPIRDRAHILPGGPKTIAPGEPGGAAGLIIKLDESEAAAVDDEWRRKGPHRRAIQGPEDSSSRTVPPLMTGEGPGLKLSGTRLRG

SEQ ID NO: 1021690 - protein, 264 aa, Homo sapiens
MTRDEDDDEEEEEEGGSWGRGNPRFHSPQHPPEEFGFGFSFSPGGGIRFHDNFGFDDLVRDFNSIFSDMGAWTLAFPSFLNFQVLSQRPPGERLREGQDTSGLNGLSIQIVTSPGSLGGSWRVMQEGESPQAAPDWGSQRPFHSLDDVWPMDPHPRTREDNDLDAQGSQEVLAGSTAQQIYFKSISVTKITKADGLVEEARTVVGQRGAGQRTTGKRHEGDSTPEGDPGITKNSSLGESVSTWKILGRGYRGRRLVNPKEPKGH

SEQ ID NO: 1021691 - protein, 261 aa, Homo sapiens
MKMMMRKEEEEGGSWGRGNPRFHSPQHPPEEFGFGFSFSPGGGIRFHDNFGFDDLVRDFNSIFSDMGAWTLAFPSFLNFQVLSQRPPGERLREGQDTSGLNGLSIQIVTSPGSLGGSWRVMQEGESPQAAPDWGSQRPFHSLDDVWPMDPHPRTREDNDLDAQGSQEVLAGSTAQQIYFKSISVTKITKADGLVEEARTVVGQRGAGQRTTGKRHEGDSTPYGDPGITKNSSLGESVSTWKILGRGYRGRRLVNPKEPKGH

SEQ ID NO: 1021692 - protein, 96 aa, Homo sapiens
MGHKGAVWGAKLNKDATKDSYSKLQISQPKVWDAVSGDELMTLAHKHIVKTVDFTQDSMIIVKRGDRNKPVTHIMIGTNLKQRLRKLMVINSGYNN

SEQ ID NO: 1021693 - protein, 247 aa, Homo sapiens
RVVTSCRCRCGRCESWLARFSASPHPLLSSLPPFPSLVDCCLLVADSLTPPSPLPNLGATGLPFFSCCPEPALVSGRGPGADPRHCSRREKRQRRPSDSPVRISMSISPTDTMDKGETDRHDINHRQHETQQQQTARSVEIYEHIFTKRPIKQPINESYYSIYTSQDDYRHTDMDKHTYDINSPKEKTYQANAPGNYGTTTLQSEITIPIRWPLLSMTTTSHHTHWNTYTGIDTHPQKNNTITHTKT

SEQ ID NO: 1021694 - protein, 375 aa, Homo sapiens
QAVSARSYGIYKLLSPPPHSVVLRSEFQMGSSPAVLRAVRLYQWSLKSSAQFLGSPQLRQVGQIIRVPARMAATLILEPAGRCCWDEPVRIAVRWPSPGAAWSLLRCCPCADEKGCCFSHVPTLRYLLPTLLAELDLERCCPAAGLCMLLLGLEPHGGLLLGLVSPEETLWCWLCECARVLNCPCAVDAGGCWMATTPDPWGGCLLPDCGTERYFPPGPGGCGAMPVLRVGLVVRRHRIFLLAEPGALSLWIVRTIVRGNLRAGALHVRNRGAYVCWLENGVTGCSIGSALSHSPMNDPPQDPVHHASPSWRTNLSTANPIEIKLWHSRSIPGRLITWPQRTLGALLRKLPNTRAVNPVPIQVPPTLTGHSQSCR

SEQ ID NO: 1021695 - protein, 343 aa, Homo sapiens
LSKDDIENMVKNAEKYAEEDRRKKERVEAVNMAEGNFNDTETKMEEFKDQLPADECNKLKERDFQNEELLASNKTAKQEKILDRQHPLFSQALIEAVRNGIQQRWHLSEKALEAPGTGEQKEDQNGGQNSNNQQNTPKPRRTTYEAYGVKRLPEQIMGELQLFSTCVPQLLLYIHILKFVNTLVTITLVITSNWTADSNSYKASQYSMSLACHSPACTVTQEARIAHSTHHNRFSTIPLLNSDHYPPRGAQPSRTQQRTVRHSTALRHRRPHYGPLTILHTPPVTHRLHTPLPCTSTAPQRRPLPTPPCPRPARQHGNTPPYTHAQTTPAAPRHAPHTSPDRP

SEQ ID NO: 1021696 - protein, 131 aa, Homo sapiens
LSKDDIENMVKNAEKYAEEDRRKKERVEAVNMAEGNFNDTETKMEEFKDQLPADECNKLPFREVCWPAMSRMCCSLMSLPCPGIETLGGVLTKLINRNTIFQQEEQVFSSALMVKRKLDINVCHGEDNGLG

SEQ ID NO: 1021697 - protein, 192 aa, Homo sapiens
MALQRVREAVCTTAKCELSSSVQTDINLPYLTMDSSGPKHLNMKLTRAQFEWIVTDLIRRTIAPCQKAMQDAEVSKSDIGEVILVGGMTRMPKVQQTVQDLFGRAPSKAVNPDEAVAIGAAIQGGVLAGDVTDVLLLDVTPLSGIETLGGVLTKLINRNTIFQQEEQVFSSALMVKRKLDINVCHGEDNGLG

SEQ ID NO: 1021698 - protein, 104 aa, Homo sapiens
MLSDLEDPGMCGVMVTLYTSGTQYSVLKDNPRAIGPSDICGDSVAVLTGSVYEEMANDKNDDCKHNGKKGVTIQSYKNSADVATAVAGGKADLWFSDSPVVDYA

SEQ ID NO: 1021699 - protein, 315 aa, Homo sapiens
  misc_feature (232)..(232): Xaa can be any naturally occurring amino acid
  misc_feature (251)..(251): Xaa can be any naturally occurring amino acid
  misc_feature (258)..(258): Xaa can be any naturally occurring amino acid
  misc_feature (263)..(263): Xaa can be any naturally occurring amino acid
  misc_feature (283)..(283): Xaa can be any naturally occurring amino acid
  misc_feature (287)..(287): Xaa can be any naturally occurring amino acid
  misc_feature (297)..(297): Xaa can be any naturally occurring amino acid
MVPLGLAAAAASLFREEKRDAHSAPGPARRGGGGAGKSTAPAAPEVATVCMLPVEDVHSRPSPWAELLWPGPSPGPWALPLGADAGPLALGSLAGLRPQHDGAQPRAALSRTPRSPPRGLERYPQDNMHQMHKPMESMHEKGMSDDPRYNQMKGMGMRSGGHAGMGPPPSPMDQHSQGYPSPLGGSEHASSPVPASGPSSGPQMSSGPGGAPLGMVLYPQALGEQNRGPNPXFNQKPAATSSRATDHGPYXMLGQGGXPLPRXTSQEAVQGKRPLARGSNHKXPKLXTTLRSSAKKXPALGPGPLAPAPVPRPRP

SEQ ID NO: 1021700 - protein, 297 aa, Homo sapiens
LVQAWVFDPAARVVRALWPGGCCLGLEAGEAAPAAATHAEPGWLRGGGGLARAPWLQLVRGALRLLGAAALALVGEPWCACTTRRGGTCAPRTSTAERSAAQLSLSSRLQLTLYQYKTCPFCSKVRAFLDFHALPYQVVEVNPVRRAEIKFSSYRKVPILVAQEGESSQQLNDSSVIISALKTYLVSGQPLEEIITYYPAMKAVNEQGKEVTEFGNKYWLMLNEKEAQQVYGGKRGQTTGERLKMEEDGGRVDGAPESHPRCSEATEDWVYEYVVRKGSRNVSVLQENDRGKTYKKG

SEQ ID NO: 1021701 - protein, 294 aa, Homo sapiens
RRRRHDRCAGVRAAVAWWVLPVLQAVSAPQPLLPTQSRAGFAVGGGLARAPWLQLVRGALRLLGAAALALVGEPWCACTTRRGGTCAPRTSTAERSAAQLSLSSRLQLTLYQYKTCPFCSKVRAFLDFHALPYQVVEVNPVRRAEIKFSSYRKVPILVAQEGESSQQLNDSSVIISALKTYLVSGQPLEEIITYYPAMKAVNEQGKEVTEFGNKYWLMLNEKEAQQVYGGKRGQTTGERLKMEEDGGRVDGAPESHPRCSEATEDWVYEYVVRKGSRNVSVLQENDRGKTYKKG

SEQ ID NO: 1021702 - protein, 312 aa, Homo sapiens
  misc_feature (55)..(55): Xaa can be any naturally occurring amino acid
  misc_feature (129)..(130): Xaa can be any naturally occurring amino acid
  misc_feature (132)..(135): Xaa can be any naturally occurring amino acid
  misc_feature (137)..(137): Xaa can be any naturally occurring amino acid
  misc_feature (142)..(145): Xaa can be any naturally occurring amino acid
  misc_feature (150)..(151): Xaa can be any naturally occurring amino acid
  misc_feature (158)..(158): Xaa can be any naturally occurring amino acid
  misc_feature (161)..(161): Xaa can be any naturally occurring amino acid
  misc_feature (165)..(165): Xaa can be any naturally occurring amino acid
  misc_feature (172)..(172): Xaa can be any naturally occurring amino acid
  misc_feature (176)..(176): Xaa can be any naturally occurring amino acid
  misc_feature (179)..(179): Xaa can be any naturally occurring amino acid
  misc_feature (185)..(185): Xaa can be any naturally occurring amino acid
  misc_feature (283)..(283): Xaa can be any naturally occurring amino acid
  misc_feature (312)..(312): Xaa can be any naturally occurring amino acid
GVRSGLRASSQRSLGEPRLAAAAAEPAAALPLLPHPRLARGLLPGWGPSRATARXRRRRGRNPALPSLPPQPASGRRSPRGVEREEPRGPDRASGAAPGSQLRRSKIEPQWRRSEAELCRGRAGYIVFXXRXXXXSXFRFFXXXXPGRSXXPLPLPGXPSXPLLXPIPLCTXPPGXPCXPALPPXRMDRPQAADAARGRVARTAVPQESSNGTKCQVGFTVTRGRQSSCEDVSNTGRLAIRYRMYCQVQLPRHCEQDLPFCKGDVLTIVAVTKDPNWYKAKNXVGREGIIPANYVQKREGVKAGTKLSLMPX

SEQ ID NO: 1021703 - protein, 279 aa, Homo sapiens
TESDWYRIKQSIDSKCRTAWRRKQRGQSLAVKSFSRRTPNSSSYCPSEPDDEHPTVLPGELPQPLGRSAGTLNYALANAQQVQIHQIGRKTDSVQVIPQGHLPHRPGAARGSKVLVSRTDSEGNLQIHQRGGQGTVTVLQEVHKLIAGGLLRTPGRQGGPCDWVRPTSMVTADYSQGPRSTVQAGRHVEVTTRPGAQDRAKALKPRLTGRRLQLEPRWAIPDSREAGAPWQPGSPSRVSDLRAGPPKRPGSTGARPQAAGCTCSARSGLKGVPPGNNLY

SEQ ID NO: 1021704 - protein, 164 aa, Homo sapiens
MLSGFPRRALASPQGPPPLLVAIDAFTLKASAKQSLTVQEENAVTNHLKFAMLAAWKSFWYQKSALHPLTFRAKTIPSSVVSTGYVEKITCSSSKKNEFKSCRSAVRWNNPYFGSSKGLSVCVALIFAFLVIIRQQTIGQKGSGKGAGSKSTPYSYIPPLYPGS

SEQ ID NO: 1021705 - protein, 83 aa, Homo sapiens
LLTPVLMIICVAEAYGVPTRKATGNPFEETSPQKRESIGVKNNEFYQSKYHFSALVHTGQKICHLIKVTSLGLRKDCYCTLEG

SEQ ID NO: 1021706 - protein, 285 aa, Homo sapiens
  misc_feature (284)..(284): Xaa can be any naturally occurring amino acid
MAAETLLSSLLGLLLLGLLLPASLTGGVGSLNLEELSEMRYGIEILPLPVMGGQSQSSDVVIVSSKYKQRYECRLPAGAIHFQREREEETPAYQGPGIPELLSPMRDAPCLLKTKDWWTYEFCYGRHIQQYHMEDSEIKGEVLYLGYYQSAFDWDDETAKASKQHRLKRYTDQTYGNGSKCDLNGRPREAEVRFLCDEGAGISGDYIDRVDEPLSCSYVLTIRTPRLCPHPLLRPPPSAAPQPILCHPSLQPEEYMAYVQRQADSKQYGDKIIEELQDLGPQVXE

SEQ ID NO: 1021707 - protein, 256 aa, Homo sapiens
ASAAECRAEEKQLEASLDALLSPVADLKNSLGSFMGKWENEYGPADLGHLSLDSLCLCISGQAEHRLNKVCVSMKKTSACPGIQVIISIWWFVSRPESERVVMRADCDMDRVPCFQATDGKSLKPAENPERLSLVKVVKKEEIANCTIMTAAPHLVQGWRTTIAESTSLILTTVFKAFWYEHSQQDDGATNSEELEVSRLEHSRMLSTSTVHVLPWLAVVAVRARTSLMETFRRGGPGRRPAELGDLVDLRFSGMG

SEQ ID NO: 1021708 - protein, 118 aa, Homo sapiens
ASAAECRAEEKQLEASLDALLSPVADLKNSLGSFIGKWENEYGPADLAICPWTAFAFAISGQPEHRLNKVCVSMKKTSACPGIQVIISIWWFVSRPESERVVMRADCDMDRVPCFQAH

SEQ ID NO: 1021709 - protein, 137 aa, Homo sapiens
MLVSSGEKCPFCGDIGQTKNIDHFLPIAHYPEFSVMPINLVPSCRDCNMGEKGQVFAVDEVHQAIHPYIDKDIFFREQWVYANFVSGTPGAISFYVECPANWRQEDKHRALHHFKLLNIANRYRLEAGTHSGSSRHP

SEQ ID NO: 1021710 - protein, 69 aa, Homo sapiens
ESLLVGVGVHNGVDHGRMWWKKPSAGLPGALVEAVIIVLVVSFISLGMRAGLVVACSNSVGAVDSLNIH

SEQ ID NO: 1021711 - protein, 284 aa, Homo sapiens
LAIYPPCGRRKIILSDEGKMYGRNELIARYIKLRTGKTRTRKQVSSHIQVLARKKVREYQVGIKAMNLDQVSKDKALQSMASMSSAQYRLCQCPAEQGSAHRSPLSPRPSSPLPSRFWSSPPLLGQQPGPSQDTLSPLHMTDYTISEAAPACASDAAVNDELLAHRSPLSCCLCCLCGRTRTIASSRLRLLELFSLHGGAADDPDTYSKHLCVHIGQTNPAFSEPALEAVDVRQIYDKFPENQGGIDTELYAEGAPYCISLQRTGPTSQNTQERPRNPKQKHPH

SEQ ID NO: 1021712 - protein, 112 aa, Homo sapiens
MKLVVGMNIEKVQVREPGVSSVSHVWMPWRGSWWHNLQHSCTVERTALLSPSITSCKVPGTDVLHGQAVGSNPGPDLASLFCVEAIALRTLKPASLRACGDQTSKDEVSMVE

SEQ ID NO: 1021713 - protein, 200 aa, Homo sapiens
MVVRAAAAADGCHGRRGGDVPGSGKSARPSCSCATTCGYLVTQDELTMTLEEFKAQFGDKADVRGVPRRTDLTVLVAHNDDPTDQMFVFFPEEPKVGINDHQWCTAMRMQEENITRALIVVQQGMTPSAKQSLGRHGPQSTSWSSFCRQELLINITEHELVPEHVVMTKEEVTELLARYKLRENQLPGSRRGTLWRATLG

SEQ ID NO: 1021714 - protein, 276 aa, Homo sapiens
PPECWAARSCCSALDPTRQAQATHTRLCAAAPRSIARPTLALPTATGRWDWLVTGSGLMGTCSSGALSALGCLQPCSLPAFPRACGPFPPVDAWLVLSGCPTCTCAGKLAGRHVQPPLAGLSCARCIGPSGLLYLRAALLPLVRGELVLTETRPGPAGAMSFFGFGQSVEVEILLNDAESRKRGRAQGLEDRRKKEKYFLFYDGETASGKVSLALKNPNKRLEHQGIKIEFIGQIELYYDSREHHESVSWVTDWPGLERLPSLQAFDFDVTTLRAV

SEQ ID NO: 1021715 - protein, 107 aa, Homo sapiens
MSGDDRISSVYVESDAIAYYGDNEELRGSTPEAAAQVVQWVSFADSDIVPPASTWVFPTLGIMHHNKQATENAKEVNVRRILGLREYVLTCKTEDFFWLRRNRDDIG

SEQ ID NO: 1021716 - protein, 106 aa, Homo sapiens
NIQRVGTVGGDGQAELFQDVGALGVGEQFIHQLDGVVEDVRILLGQAHDAGVEGHHVIVGHAHVQQALAQGGVEDAFGDCRRTWCRKRCTAGCRAVRGSNRESLES

SEQ ID NO: 1021717 - protein, 54 aa, Homo sapiens
VCSTDVQLVVVSVKLNGEHGNRAFAFPWGRNPLADGFAPELSNSHRVTFWLPHP

SEQ ID NO: 1021718 - protein, 628 aa, Homo sapiens
AFLTPLRHGPVKKLVVKGGKKKKQVLKFTLDGTHPVEDGIMDAANFEQFLQERIKSEGKAGNLGWRGGDHRKGARSKITVTSEVPFSKRVLEISQQKILEEENLGDWLLRSLLTEKRVTNSRYFQINQDEEEEEDEELNSFIWKICHEFLNKIGTKMGVNRGISAVSVRTRPFGIIVKGLPLVRIIYLDLTSFSLVKIQSPGYTTLQDGGYRLKPWTTSVLNGREHGLNIATQVYGPRPGTATKKRLISEPGTRSERKSLVRWVLYCQLCLLIVTPNYPHQLVITLTTHLLPHNDRSITDVINLRLKTPTETQTNDQYCSTSKTEENNEDHRSTEPARQRPESARKHKTEAGRNTEAREPDDTHQEKNDREAENRTADRDQTTTDAHRTHTTTRKAESHADSPNEPRCGHTQRPHKHTPHATRETERGENTAGMNSHKHSRAARGTETTEAKTERPRDDQPKGEDTNAAKRTADAAATPRTHRGDERLHDEEDKEEHEKRPPDQRQRRAGKRRRERRAHAGTRTEEAQRDRQNETQQNSRQEGTKRKPEKRREDRPRRHRHETDTENAQPTTPDRHKNRTTHSNKSRKQRNITGNRDHGARRKEHAQQRDRREQTRTRRKTAPTNSAK

SEQ ID NO: 1021719 - protein, 188 aa, Homo sapiens
EIDGLLISQEQPRMTSRGSQRSCNNPPGQLYDREEGEFKLHSSLRPELQPVAGACVPSKRRAGTVGGRGFSPRVVGRTVTECDRVWALNRTQRAVTASPVQVPTTDIDAKVHFKKGFKASVAFSLREEAASSVARGVHGAVSNHTAMGKEEYLPRRFHITYSVSYIHLEVHPGFPPLDLRNRASGANV

SEQ ID NO: 1021720 - protein, 212 aa, Homo sapiens
MSGVTTCLRFPGQLNADLRKLAVNMVPFPRLHFFMPGFAPLTSRGSQQYRALTVPELTQQVFDAKNMMAACDPRHGRYLTVAAVFRGRMSMKEVDEQMLNVQNKNSSYFVEWIPNNVKTAVCDIPPRGLKMAVTFIGNSTAIQELFKRISEQFTAMFRRKAFLHWYTGEGMDEMEFTEAESNMNDLVSEYQQYQDATAEEEEDFGEEAEEEA

SEQ ID NO: 1021721 - protein, 212 aa, Homo sapiens; identical to SEQ ID NO: 1021720

SEQ ID NO: 1021722 - protein, 104 aa, Homo sapiens
MELALGRFPYPQIQKNQGSLMPLQLLQCIVDEDSPVLPVGEFCGAMVYEFHHSVLCENRPKERPAPEELMGHPFIVQFNDGNAAVVSMWVCRALEERRSQQGPQ

SEQ ID NO: 1021723 - protein, 69 aa, Homo sapiens
APRVTRCPLDAGSSRMPSASAPGLGGAAVPSFGLRTRLVMASQNSFRIEYDTFGELKVPNDKVLLAPSP

SEQ ID NO: 1021724 - protein, 104 aa, Homo sapiens
MMDVLLSYVNSVRRVLVQCLHTLVALAPPVPVGPARRPLSSVEPAAGGAVHPVAGPCGPSSMRQAGSEAHLKVRRPEWLAVITLLNEKEQELRETETHCCTNEK

SEQ ID NO: 1021725 - protein, 168 aa, Homo sapiens
AGRGLSGRYRRGTSAICCARRRRPALLRTPALREYGNLRRQASPVLCRQTQVRPAGINRSCVWRSEQLLSSATCTGEECGLMLAAVFETDERIMGQATFWSIWLSREQRIGLAVPWRRRWRAWGPILMPTAPGSTQPYYIKALSKDLPKAVELLGDIVQNCSLEDSQI

SEQ ID NO: 1021726 - protein, 327 aa, Homo sapiens
AGRGLSGRYRRGTSAICCAAASSALLRTPALREYGNLRRQALQFCVRQTQVRPAGINRSCVWRSESAPLSATCTGEECGLMLAAVFETDERIMGQATFWSIWLSREQRIGLAVPWRRRWRAWGPILMPTAPGSTQPYYIKALSKDLPKAVELLGDIVQNCSLEDSQIEKERDVILREMQENDASMRDVVFNYLQCRSEVSRAHLIAQAVEGPSENVRKLSRADLTEYLSTHYKAPRMVLAAAGGVEHQQLLDLAQKHLGGIPWTYAEEAVPTLTPCRFTGSEIRHRDDALPFAHVDIAVEGPGWAAGQMWLASGNAIIGTYDCTLWC

SEQ ID NO: 1021727 - protein, 60 aa, Homo sapiens
SLPFTARTAITAITAITAITAMHCHALPCTAMHCHALPCTAMHCHALQCITCSACTACTK

SEQ ID NO: 1021728 - protein, 69 aa, Homo sapiens
MTAITWSRVTSTPQADSEREASPLGSSVEPGTEEKSLISDKTAEWIAEDDDDVFVASRTTEDLFTVIHR

SEQ ID NO: 1021729 - protein, 116 aa, Homo sapiens
MEGVNLYVKNLDDGIDDERFRKEFSQSGTIISAKGYDGEVVSSKGFGFVCFSSAEEDSKAVTEMNGRIVATKPLYVALAQRKEERPGSHSSNPVYAENGQVYELFPIHVINTSFER

SEQ ID NO: 1021730 - protein, 198 aa, Homo sapiens
GLLGRDYEKVPLPYSVFVNTTESYEVERQLQGYKPSGESRQDEFLTSIRATPSYQVSGHSFPGCARCGTQTFMNKCAGNYRIFEKRLRKVPTMEGRRSVFVKCRAALVDARTTAHCAAHANQSLLLLAPLRLQLGLGDGTSDVAAQAKAVTGALTPGHTGSHRGPDPTEATQTDMGPLWEGEQEQGCSLPRASVMDIS

SEQ ID NO: 1021731 - protein, 186 aa, Homo sapiens
GLLGRDYEKVPLPYSVFVNTTESYEVERQLQGYKPSGESRQDEFLTSIRATPSYQVSGHSFPGCARCGTQTFMNKCAGNYRIFEKRLRKVPTMEGRRSVFVKCRAALVDARTTAHCAAHANQSLLLLAPLRLQLGLGDGTSDVAAQAKAVTGALTTEATQTDMGPLWEGEQEQGCSLPRASVMDIS

SEQ ID NO: 1021732 - protein, 173 aa, Homo sapiens
SQDYKWRHLITPAGLVLMLLCGQLPPVRRFCPDLLVPEVSVGGRHLGPFPPFSAPPGLGGPGGPHSGSLGLNVGWGMTAVLSDVSPIKIWVNGSANPRGHPGGTGAGCESSSRVEPVLIVGSKLLVLGQFDGIHPFGDFQLPGLFGGRLPKALTELLRVHVFNRYTPGIVRID

SEQ ID NO: 1021733 - protein, 60 aa, Homo sapiens
GTVCPYLAPEYIHVSKELEYTIGQCYKRAREARHEFMTVEHLLLALLDNPSAQAVLKACG

SEQ ID NO: 1021734 - protein, 44 aa, Homo sapiens
LKKLNRIAWSNQHFRTPTVLEKALAAIQQLMMTLDRTVSEDGLK

SEQ ID NO: 1021735 - protein, 110 aa, Homo sapiens
TPYTKTHSTIHHTAHTCDTKTHSTIHHTAHTVTLKHTQRSTIQITPVTLKHSTIHCTDHTCNTKNTLNNPLYRSHVLHKHTTIHYTACTCDTKTHSVIHCTAHTCDTKTH

SEQ ID NO: 1021736 - protein, 222 aa, Homo sapiens
MGVARFFDSMCLDVFTQWLPLSNFVPPRPSPAPSDSPASPDEDLQAWNVSLPPTAGPEMWTVAPSLPRLVREPVRCTCSAQGTGFSCPSSVGGHPPQMRVVTGDILTDITGHNVSEYLLFTSDRFRLHRYGAITFGNVLKSIPASFGTRAPPMVRKIAVRRAAQVYYNNKGYHSMPTYLNSLNNAILRANLPKSKGNPAAYGITVTNHPMMYARADSSVQVG

SEQ ID NO: 1021737 - protein, 103 aa, Homo sapiens
PLCPIPAVSRAVRASCGLAECLEARTSHSYYLPRRASGRSTREMYLHRFWGLVTVCKSNTSLKAVKKKKTPGLWARRNLLLESTQELPGSGLWEALGFHLSSV

SEQ ID NO: 1021738 - protein, 388 aa, Homo sapiens
SGASPGDNCGTERPMPAVPPPPPPQDSPSEPLESLWQNSNGRRSSCSPGEHGCHLRWIEPGQVAARTHSQVAVAPASPDRMSGSDGGLEEEPELSITLTLRMLMHGKEVGSIIGKKGETVKRIREQSSARITISEGSCPERITTITGSTAAVFHAVSMYCFHNWMRTFCAAPANGGTCLQASSDPAPCHPCQSSCGSLIGKAGTKIKEIRETTGAQVQVAGDLLPNSTERAVTVSGVPDAIILCVRQICAVILEYPPKGATIPYHPSLSLGTGLLSANQGYSVQAQDGGWDPKLEGTKAPAAPNAMQGPFGNPSVVARTGSRDTDQLTGVLGSQRFAWLCDRAPEDIHRYSEIRQMSRGTYQDRETKQRAPESGLSPSLALRSPSACP

SEQ ID NO: 1021739 - protein, 397 aa, Homo sapiens
SGASPGDNCGTERPSRRAAAAAAAGQPQREPGQVAARTHSQVAVAPASPDRMSGSDGGLEEEPELSITLTLRMLMHGKEVGSIIGKKGETVKRIREQSSARITISEGSCPERITTITGSTAAVFHAVSNEFAVFPKTFGKLKGNPLFLLGPLGPFPPFGVPKAKKSFVGGALWAGDNTKIQTFVGFLSQASSDPAPCHPCQSSCGSLIGKAGTKIKEIRETTGAQVQVAGDLLPNSTERAVTVSGVPDAIILCVRQICAVILEYPPKGATIPYHPSLSLGTGLLSANQGYSVQAQDGGWDPKLEGTKAPAAPNAMQGPFGNPSVVARTGSRDTDQLTGVLGSQRFAWLCDRAPEDIHRYSEIRQMSRGTYQDRETKQRAPESGLSPSLALRSPSACP

SEQ ID NO: 1021740 - protein, 360 aa, Homo sapiens
SGASPGDNCGTERPMPAVPPPSAAAGQPQREPGQVAARTHSQVAVAPASPDRMSGSDGGLEEEPELSITLTLRMLMHGKEVGSIIGKKGETVKRIREQSSARITISEGSCPERITTITGSTAAVFHAVSMYCFHNWMRTFCAAPANGGTCLQASSDPAPCHPCQSSCGSLIGKAGTKIKEIRETTGAQVQVAGDLLPNSTERAVTVSGVPDAIILCVRQICAVILEYPPKGATIPYHPSLSLGTGLLSANQGYSVQAQDGGWDPKLEGTKAPAAPNAMQGPFGNPSVVARTGSRDTDQLTGVLGSQRFAWLCDRAPEDIHRYSEIRQMSRGTYQDRETKQRAPESGLSPSLALRSPSACP

SEQ ID NO: 1021741 - protein, 209 aa, Homo sapiens
VQPGEPGTWSRSRRETPVVCVLECGLAVIPPLTLLPGGGPWREISDLDLDDLMQACVCLRAHQVRAECQGPVLLSAMMRSWRVMSNVQRVDSPVTCVRADIHGQFYDLKELFRVGGDVPETNYLLHGGTIVDRGFYSVETFLLLLALTVRYPDRITLIRGNHEQRQITPVYGFYDECLLQVRLGDCVALLVLRSFDYLRLSPSSMARSS

SEQ ID NO: 1021742 - protein, 136 aa, Homo sapiens
PDCGIECMTAREHGIDINPSTIIIRPDARIWQIVYKNVGDNDRGITRLQEFNYYATRMLQNRQPGEKVLAVVGRSHMNTARNVPGVAELTGGIGVGVYPATTTDKSIAISGPSIRRDAGASVANSHTAGDYQIFQK

SEQ ID NO: 1021743 - protein, 455 aa, Homo sapiens
MTHVYLWEYGYVASLMGPKQRPSLPGYDPVMKQCWWKAYLRVLDFPKCLHGVTLLSQSQDSWTWDLELTDAASRKDCSIAVASSCDPTPTMTATRRSPLPSTGGGGPPAAADAWHQKGVKRRIAVMQRPAGPQTTWRTCRLCCRRGAQVRVVDMQKLTHGVLHSQVLGGWTRPTSTWAVPTMDWRSLTQCQRSWAWSCTTASCLARDLSKIFEAYWFLGQAGSSIPSTWPRFYDTRYNQETPMEICLNGIPCSGLPGECAPTPVSKWPHSRPEGSTQRGGQLPGVSSTVAVMNYLPTLEFSHPHRFWPAIDDGLRRATYYAWRPGAPVHLAAGDYSEPVHAGRSCSLWSVPADNHSPARDIQVTCLCGPRRSDGPGSDSHMPVSNHEQRYMVTERASYIGVLQGGLATIFTETAGTSLLVALNGRGGLREPAGGHFAEGLGLPLWAWPFTSCPLG

SEQ ID NO: 1021744 - protein, 38 aa, Homo sapiens
TPITLNNNVSIQKYCTISQPLLPNWNKESGAKFTWIEM

SEQ ID NO: 1021745 - protein, 68 aa, Homo sapiens
SGLLAPPSSLNANSALPQMLDLTGVRYKTVTKVKSSDYYRCKWQIHLKKEILKKVSETDYATSGSTEV

SEQ ID NO: 1021746 - protein, 68 aa, Homo sapiens; identical to SEQ ID NO: 1021745

SEQ ID NO: 1021747 - protein, 49 aa, Homo sapiens
ADNYNSHCMPILIILRSTVFLGTALYFLIRPDLGQPSDLLGYDHIYDVI

SEQ ID NO: 1021748 - protein, 116 aa, Homo sapiens
VYASWVTGSKRLAGGSSGFEALVGLQRCGKQSTSELRRTARRPSPARADSEGVALICTQQSAGGVRVLGPRSPSPSFSLIPTYCGFPHGPRPSSCWAEASSGLVLSYHLSRAPVAP

SEQ ID NO: 1021749 - protein, 207 aa, Homo sapiens
METRDTHSLAATWDASGVARVLPPSQQSVSRPLGGFRRPLLVLLESECAGGSSFPGVCTNFTSDVCLGMDDACWTPGDGLGQPLIACLRAPATCPVAMEGPRELDMPDLIMAPWDPSGSDSVAEGPMMFAELSSGVHASRHASKGKKALRPLARGAGTLREQPETQRTQSNRSKDGEAHTRGPGARGTAGPQPADGRHHTREHEQPR

SEQ ID NO: 1021750 - protein, 311 aa, Homo sapiens
  misc_feature (239)..(239): Xaa can be any naturally occurring amino acid
ENAPAIIFIDEIDAIATKEIRCSDRGRQGGSREILLETADIYMDGFDQNVNSLKVNHGPQTRGQTPWILALATGQDGMAPEKLKFSIFHDRRQEEIDFVFHIFTSKMKPHHDGRLICWKDIVVAPAQSKDFAESLISDLHSVRRDGKVGWSVKTDYIVPGPEDVLKKAYKYMLHSEKDAAGSMKFSQCDPIPIPLLSQHHLRGWGFSRSPSTSVPKPHSLFAFTQGLGFFKLDTDKDVXPYRDEDDRTFESILCSGSRTEQEFIVLVTVARPVVPWNPGFLFVCRRDNLPGLPYKEGPYNVGNPGSPVDPG

SEQ ID NO: 1021751 - protein, 60 aa, Homo sapiens
TEVLKSVVAKFNASQLITQRAQVSLLIRRELTERARDFSLILGGCGLTELSFSRESRLLE

SEQ ID NO: 1021752 - protein, 318 aa, Homo sapiens
TKWSSIPCFECHGWVTCSHEDLQHPPVPGGVSVRTCVLEKLQLAPVPPVHEMEPWERGEQCLLVVRVTPDGTHFACTKFASPFVMDDPSTLSSEGSDTQRRADDFPVRDDPSDVTDEDEGPAEPPTAPKLPLPAFRLKNDSDLFGLGLEEAGPKESSEEGKEGKTPSKEKKKKKKKGKEEEEKAAKKKSKHKKSKDKEEGNGVSGDVRAAAAPAQQGEDGCLMMLECFPGVCAGAPGRACHPGVWRLRWSSRPAWAVCRPVGGVCVPVTAWGGICLCTIALCRCPVACRVLLLSLEEAGHLVVPRAGPCRVLGLQGPV

SEQ ID NO: 1021753 - protein, 41 aa, Homo sapiens
MPGSAAITMVSRAIRCTTRCHCNSSEHRKTIVGAGLLAKAA

SEQ ID NO: 1021754 - protein, 295 aa, Homo sapiens
RWRLPSESAADLEGGSGYGEPKGRILASPVRVPSSHTGAMEVAEPSSPTEEEEEEEEHSAEPRPRTRSNPEGAEDRAVGAQASVGSRSEGEGEAASADDGSLNTSVSRPLSPGRCPRQPLRSKFGHQGSTVHEKVIICLDLSEEMSLPKLESFNGSKTNALNVSQKMIEMFVRTKHKIDKSHEFALVVVNDDTAWLSGLTSDPRELCSCLYDLGDGFPVPTFQFLGKDFSSLIQQKTDAFRSQQNVQTIPPPYVGPDIPGLQPSNFASPSLLEEPMMKHVPVPYFFFDVGYIPQA

SEQ ID NO: 1021755 - protein, 281 aa, Homo sapiens
RWRLPSESAADLEGGSGYGEPTQEPWKWQSPAAPREEEEEEEEHSAEPRPRTRSNPEGAEDRAVGAQASVGSRSEGEGEAASADDGSLNTSVSRPLSPGRCPRQPLRSKFGHQGSTVHEKVIICLDLSEEMSLPKLESFNGSKTNALNVSQKMIEMFVRTKHKIDKSHEFALVVVNDDTAWLSGLTSDPRELCSCLYDLETGFPVPTFNSWAWDFSSLIQQKTDAFRSQQNVQTIPPPYVGPDIPGLQPSNFASPSLLEEPMMKHVPVPYFFFDVGYIPQA

SEQ ID NO: 1021756 - protein, 132 aa, Homo sapiens
SSESTAMSGGPHHHTSSFGENLDSQRTPAVVSLLLVLSPKPSTRASSSLENYQAQMNTALAAIQGSGWAWLVQDKQTGSIAIKTYGGKLILGFSWWQRRSYLSKSHFRTRTPLLDSSSPSLVLMLGSTLLSE

SEQ ID NO: 1021757 - protein, 340 aa, Homo sapiens
GGAAVGRPGSAECSAPEGQCLRPSVARRQVGEEAAGSRRRYTAGRRFASPVPATGRILFARKRRGRCGNPSGRAAGFAGRRQCRSSPLRVAVVCSSNQNRSMEAHNILSKRGFSVRSFGTGTHVKLPGPAPDKPNVYDFKTTYDQMYNDLLRKDKELLYHSNEDFTSCLDRKSGESKPQAQKDSSNCKGPVLIVIRHLQKRRVYDLGGGKILNFQITGETCQALCHVVTVDSRTTTEEGPPGGGSHLVSSGKCFQHTGQTLRHELRELVQEFEEKEWAAFLEPLVYEAGRLALWVRGRVPLEWLSRVRAGATHIVLLGGPPQDVFPLGVTSHERRYVPRQ

SEQ ID NO: 1021758 - protein, 100 aa, Homo sapiens
YLYIFRYYASSRPGLLSPQSSVSIPLTTWLDRLHRQAAGPGGADQGAGAEGLAHIGVGAGDEQGAHQQGSISGLTASARRSTSASEWPAVKAIRRRAVPA

SEQ ID NO: 1021759 - protein, 86 aa, Homo sapiens
GSTCAACCCQLEVMLITDTGVPDRFIDTDDWGGEVMLRLDDGWCAALDRDTTMCTIYEKRPLICREFEMGAPECIDERQGLATVYR

SEQ ID NO: 1021760 - protein, 300 aa, Homo sapiens
AERREQESARSRRQPPAQQSWSCEEIRAVTLPPLRPATGRFCPRTHSNNLVETMVDLRMQVLGVHEHNASPEDIKKAYRKLATCKWHSKIRIVLSNKEREQQRKFKQVAGGDMEVAATECLNEYGHIYDKYWRKKGLRLVEDGVWKISLAQSISNFGFTFRNPDDVFTGTFQVEGTQSSFDFFGKALTRLMPVGTRRGPRGKQKPRDGVVTHLTFSGFPSFGSWIHYYSIQRKQHPTGSTTRPQAGTSRTTTQPNDHYGWAPAPWAHTTNSNTHTRTPPKTAQDSTRTLDKRNRRSTRPR

SEQ ID NO: 1021761 - protein, 241 aa, Homo sapiens
MTYTASLPRRGLFTKGEESVSLATCKWHSKIRIVLSNKEREQQRKFKQVAGGDMEVAATECLNEYGHIYDKYWRKKGLRLVEDGVWKISLAQSISNFGFTFRNPDDVFTGTFQVEGTQSSFDFSGKALTRLMPVGTRRGPRGKQKPRDGVVTHLTFSGFPSFGSWIHYYSIQRKQHPTGSTTRPQAGTSRTTTQPNDHYGWAPAPWAHTTNSNTHTRTPPKTAQDSTRTLDKRNRRSTRPR

SEQ ID NO: 1021762 - protein, 236 aa, Homo sapiens
MRSARRDSYKEAYRDNWLLKWHPDKNPEKKEEASSRKFKQVAEAYEVLSDAKETGSSMIKYGQKKDESGGGRRWEVIFDSPFEFGLHYSVTQMMSSGNFLVEGTHFHLDFFEDPFEDFFGNRRGPRGSRSRGTGSFLSAFSGFPSFVSGWSSMDAGFTSLGSLGHGVLTLFSSTSFGGSGMGNYKSISTSTKLVNGRPITTKRIVDNSQDRVQVEDDGQLKFLTIGYEQLLCLDNK

SEQ ID NO: 1021763 - protein, 656 aa, Homo sapiens
  misc_feature (167)..(167): Xaa can be any naturally occurring amino acid
LLRAGIMGSRSSHAPCSRRHRAVRAPSVAYPAALHPRRGTGALVRPDSVPLRSAVMATKIDKDGLPGGYNLVRDDGSAVIWVTFKYDGSTIVPGEQGAEYQHFIQQCTDDVRLFAFVRFTTVDAMSKRSKFALITWIGENVSGLQRAKTGTDKTLVKEVVQNFAKEXVISDRKELEEDFIKSELKKAGEPITTPRRSNPSPRPHQPLPKSSACSPGEQRPPRLKLLAPPGPPRDANSKPLTQAAAPPTLLLHHAPHPIPDSPLQQPPAPALPSSLHCHRPPLRNNPSLSPLYCNPSHILLSHILVPTPPSHPSSNTHRSSLHTTPPTTRSHSPPRHSAPPGAFPPLPPYRPTTSARPTSPRPRALAPLPPFAPPPPPHPPPSFPSPPFAAPPNFHPRPSPFPLPAPHPAPRAQPRRTGRRTPPFGPPPPHNALLRPPGRHFPPLGPRSFRPPTPPCFRRHARGFFTGGASLLVPSAPLLTRAENGAAPPPHSAGGVRASARRCVSTVSRRHPAPSAPPLHRNIYSPRHLAARAAAVQLILHSLTPRHHMVRPGPRPAAISPPRAFCSHHPVIRALLARLSPTPPREALLLLRPTLAPRQRHVSPIRQGRPPRTCLLRARPRAPAPHHTCCPSRATKGSPPLPMPTLLVRAPSASPR

SEQ ID NO: 1021764 - protein, 621 aa, Homo sapiens
  misc_feature (167)..(167): Xaa can be any naturally occurring amino acid
LLRAGIMGSRSSHAPCSRRHRAVRAPSVAYPAALHPRRGTGALVRPDSVPLRSAVMATKIDKDGLPGGYNLVRDDGSAVIWVTFKYDGSTIVPGEQGAEYQHFIQQCTDDVRLFAFVRFTTVDAMSKRSKFALITWIGENVSGLQRAKTGTDKTLVKEVVQNFAKEXVISDRKELEEDFIKSELKKAGEPITTPRRSNPSPRPHQPLPKSSACSPGEQDRRASATSPTMPTTGEEKPVRWQRPTNMCPQDPHHSRVPIRTHAVSISHDAHGSLISLNLHLYYNSPLIFKVLKKKSFRCKVLPCHQIRGASLQVTPLPCALLIPQRRGLPSETHGNEPSQFALPRRPRGTLYRANPKIKPWSHMIIWCYQMDGGTALGPVKLVTPSDMSSTYKKRQHSVPVTPNYRAPETSVEVLTTGGIPVIGTRVQYREVDTKNAMVQDNKARALHPEWGQKAEREPEGTKHRNAQTGRTTSTGYKNINPGEKRKQERTEDRKTKQWYHSKLNQKIAEVDTQKVARDIESPAVAGEGELHEGTTTGPPELGQATVGSESTARSEGKYTTQRERPSRTQHTVQHTGQVGTRYGSREVEDRENTKTHTGRTTACISQANDISARSAQPTYGA

SEQ ID NO: 1021765 - protein, 202 aa, Homo sapiens
MKALSPVRGCYEAVCCLSERSLAIARGRGKGPAAEEPLSLLDDMNHCYSRLRELVPGVPRGTQLSQVEILQRVIDYILDLQVVLAEPAPGPLMAPQLPSGKPRSRGRGGTPGKDAAGPRSSLIASRNSSRTFPLIQTCRARLRELVISNEQKELLPLTRPCPDTLQVSIYLYLVDARVKPGKSLEFGRPFLKHLAPHSVYGN

SEQ ID NO: 1021766 - protein, 205 aa, Homo sapiens
MKALSPVRGCYEAVCCLSERSLAIARGRGKGPAAEEPLSLLDDMNHCYSRLRELVPGVPRGTQLSQVEILQRVIDYILDLQVVLAEPAPGTTPLFEIGAPPKPFFFPPPISKTCRARLRELVISNEQKELLPLTRPCPDTLQNAGAGSPFCLGTPGTSPAGSRDGRDGPQLRPAHLTSPNPFPGRLNLVLQERRTVHLVGCKKQS

SEQ ID NO: 1021767 - protein, 195 aa, Homo sapiens
MKALSPVRGCYEAVCCLSERSLAIARGRGKGPAAEEPLSLLDDMNHCYSRLRELVPGVPRGTQLSQVEILQRVIDYILDLQVVLAEPAPGPSLDGPPLFPVQTCRARLRELVISNEQKELLPLTRPCPDTLQNAGAGSPFCLGTPGTSPAGSRDGRDGPQLRPAHLTSPNPFPGRLNLVLQERRTVHLVGCKKQS

SEQ ID NO: 1021768 - protein, 164 aa, Homo sapiens
MVRQIRALDSDMQTLVYENYNKFISATDTIRKMKNDFRKMEDEMDRLATNMAVITDFSARISATAAGPATSCITKLAVGPLRCCGKLQFLFELPSRPHQVLLELGLPMGRRVRYQGRAQAVLAGSTNTCPRSAAIQDDCQVSHVAVLAQSCGSAFGGGGRGPGQ

SEQ ID NO: 1021769 - protein, 101 aa, Homo sapiens
  misc_feature (90)..(90): Xaa can be any naturally occurring amino acid
MCSHQVAGLHVQFLQQKVELRVLSKLLLQLIHFLLEEHFHILQNHLRLFHPLFCGLQLILMFFPLRIQAPPGLLSLKAEQAMQLGHTVLXHQPDLLQVLGL

SEQ ID NO: 1021770 - protein, 73 aa, Homo sapiens
SQLRPAKRSTQVLGRTGMHLHALLIFIFLVGMAFTMLALSDPSALASKVLGFQASVTTPDPSLVFQHLGTTLW

SEQ ID NO: 1021771 - protein, 179 aa, Homo sapiens
  misc_feature (51)..(51): Xaa can be any naturally occurring amino acid
  misc_feature (65)..(65): Xaa can be any naturally occurring amino acid
  misc_feature (72)..(73): Xaa can be any naturally occurring amino acid
  misc_feature (77)..(77): Xaa can be any naturally occurring amino acid
  misc_feature (80)..(80): Xaa can be any naturally occurring amino acid
  misc_feature (90)..(90): Xaa can be any naturally occurring amino acid
  misc_feature (94)..(94): Xaa can be any naturally occurring amino acid
  misc_feature (98)..(99): Xaa can be any naturally occurring amino acid
  misc_feature (105)..(105): Xaa can be any naturally occurring amino acid
  misc_feature (110)..(110): Xaa can be any naturally occurring amino acid
  misc_feature (143)..(143): Xaa can be any naturally occurring amino acid
  misc_feature (176)..(176): Xaa can be any naturally occurring amino acid
MSWLGLSGGPRTLPGFLLPEKLVPGPPAGHRLPGTGHWGRCRVVASGLLGXCCLLGLGLPAALVXPAVVFFXXCPGXAGXVCWGRCRPGXRLGXCGHXXLHILIXNVKSXRLPGFLDGAPRRPGFLFCFSGLMSSSMMSSMPXSERRPSFQSSSRCGVCGRGFRGPFFSRAFLNGXGVW

SEQ ID NO: 1021772 - protein, 176 aa, Homo sapiens
STAAGRGCGGPERECVVTGQRQARPPLVMVIVLQSSEEEIPAQEAGRVTQGSSFQSLEDPVLSVCPPEALRFCAGPPAPWKQGELQLGAPPLISLRVALASSPVEGEAQETKAAALLTARYQEFVTFEDVAVHLTREAWGYLDPVTEGPLQRSDVRELWERGLTGHTSPPSHHPDS

SEQ ID NO: 1021773 - protein, 93 aa, Homo sapiens
SQARTTGAPLYLRCLLFPVREAQETKAAALLTARYQEFVTFEDVAVHLTREAWGYLDPVTEDLYREVMSENYGNVVSLGILLRLPTTRIHSVT

SEQ ID NO: 1021774 - protein, 188 aa, Homo sapiens
MFENAAVLPQPDGGGRGKLAVVLGEAVARGRGLRRKPQGDGGPEKISGSGTVSGNAPVAQEEAAGVVAAGLARTLRQFWPPLLRLCVGHLFCGRGRPRVGRGSGGGCRSNSGGTVTFGPSRERPRAPMAEHCDPWVGSRMEWLGRPLAQALGGLASRGAFWEESCPRGIWGNVVRKHGRRGRQSLSDL

SEQ ID NO: 1021775 - protein, 308 aa, Homo sapiens
GGGGGEGTRHAADARPVPQPERVEAVARSGPGPWAPRAARVMRTEAEVAGTRIEPGDFGKLALCPSSSSSTTWDCGLACSRMVLRYLGQLDDSEFEMMALQKLQLTRSIWTIDLAYLMQPLLSCDGTTAVPRTAVVSTRATQKQSVLAGSSGLISGRDPGESSCCAQSKGPARCWWRKCPVSVNGQSRRDLASGASVRQSVRGRTRGLLALVSCGSQARVTRNRLFHPPVAPTCVLATLPDYQGHFIVLGLVTTVATGGYSRRPSYLDQEWWVQLSDLRRQKPFGMRHSWLMERATDRGREPEHINTG

SEQ ID NO: 1021776 - protein, 152 aa, Homo sapiens
CLWLDSSSIPSICHGQDAQALCAPALHFLVLAVVAGMTPSWTRCWDWNWNCPSEGRGAHLLITHSSLGLSTLVAYAVCYCTWSGNGGSGSRLILALSQQARPESHEEVAALMATQEAGRGGVREDSSKISFVTPFTAPTLALPYARFPSSNS

SEQ ID NO: 1021777 - protein, 88 aa, Homo sapiens
PEVSYEIALREVRMAQQQRRDEPGRASGAAAIRKSPYPARSPPTRASSRHGMASSFRPRRGVPEEAHHMKLREFKHSYASRDRVAHCP

SEQ ID NO: 1021778 - protein, 96 aa, Homo sapiens
MVLMCYPRCDEWTMMDVMLCMLQYLHDHDVTMEAGRCLSGPFDVHDAWDEHVWPTMSVHVHYVAGADDTGLGRWLGPMGTLLALGSAVPLGWSWAS

SEQ ID NO: 1021779 - protein, 182 aa, Homo sapiens
  misc_feature (9)..(9): Xaa can be any naturally occurring amino acid
MAGSRPGVXRCEAHIFNGSNGIMLIYKGGDEYDNHCGKEQRDAVGDDLLQSIDDRYADNFNPVSEERGKVQDSFYLLSELDSSLAVFTKEIVPPQVWVPSYLVDVLHQLVAVYVVGGFLYQRVVVGAKGMEQFPHLAFWQDLGNLVADGCDFVCRSKPRNCCLQHIVVWGMTSWGEESRRKG

SEQ ID NO: 1021780 - protein, 167 aa, Homo sapiens
  misc_feature (71)..(74): Xaa can be any naturally occurring amino acid
  misc_feature (77)..(77): Xaa can be any naturally occurring amino acid
  misc_feature (79)..(80): Xaa can be any naturally occurring amino acid
  misc_feature (83)..(83): Xaa can be any naturally occurring amino acid
  misc_feature (88)..(88): Xaa can be any naturally occurring amino acid
  misc_feature (90)..(90): Xaa can be any naturally occurring amino acid
  misc_feature (92)..(92): Xaa can be any naturally occurring amino acid
  misc_feature (95)..(98): Xaa can be any naturally occurring amino acid
  misc_feature (100)..(100): Xaa can be any naturally occurring amino acid
  misc_feature (106)..(106): Xaa can be any naturally occurring amino acid
  misc_feature (110)..(110): Xaa can be any naturally occurring amino acid
  misc_feature (115)..(115): Xaa can be any naturally occurring amino acid
  misc_feature (119)..(119): Xaa can be any naturally occurring amino acid
  misc_feature (125)..(125): Xaa can be any naturally occurring amino acid
  misc_feature (128)..(128): Xaa can be any naturally occurring amino acid
  misc_feature (133)..(133): Xaa can be any naturally occurring amino acid
  misc_feature (141)..(141): Xaa can be any naturally occurring amino acid
  misc_feature (144)..(144): Xaa can be any naturally occurring amino acid
  misc_feature (146)..(146): Xaa can be any naturally occurring amino acid
  misc_feature (153)..(153): Xaa can be any naturally occurring amino acid
  misc_feature (162)..(162): Xaa can be any naturally occurring amino acid
RRRDLLVERRPLERSGAEIAPSQPARRRLRCSGALTPAGPCKAATVLAMHAPGAECLPHGKGGGGGEEGGXXXXVRXGXXRGXGVGGXGXGXGLXXXXRXGGGGGXHGGXGREEXGEGXGVGEGXDGXAARGXMVLRGWGXGRXKXVRWGEMXKGGAGGVEXVRGVR

SEQ ID NO: 1021781 - protein, 214 aa, Homo sapiens
MHAPGAECLPHGKAWRSLATTCCMENFRKVRSEEAASGGAGGRWEAALGSGPLRRPGAVALGAHCGSRKGSKILEPDGLRHRPALAAASHAAPIVFSELACLGHHPRTVTVAAEDSFKAPAIGGAVHQVSRGLRYREAVREVWQSLPPGPTQGQTPGEPGAESQRTLRNVPGLAILLSKDAHGSATARIPAPRIPQSWSLVPARTANVQEELGE

SEQ ID NO: 1021782 - protein, 104 aa, Homo sapiens
  misc_feature (104)..(104): Xaa can be any naturally occurring amino acid
VVVVTSEQADLLLKPALPGIALRRWRLLHRVKQAHAAELFHVTQSTISRWESGVQAMEPAAHQHLEQLLAARLEAAADQVLARLVKESPRPMHLVLIHWYQQSX

SEQ ID NO: 1021783 - protein, 92 aa, Homo sapiens
  misc_feature (4)..(4): Xaa can be any naturally occurring amino acid
SRGXLWTMRYAVLTGRKKAFSEMCAALRQRLEEAQRKGGEIQEMLTASFAKLNAEYGFGLATPKAPDLTRFIRDLDLIERNYMQYRVAHLSI

SEQ ID NO: 1021784 - protein, 176 aa, Homo sapiens
CASSSSLAASRCLEPAGAPSLAIVGDELRQAGSNGGKAYEPCSNALVGRGGVAEIKPGVTVCPERTVITENLPEKLTAFKEKYMEFDLNNEGEIDLMSLKKDDGEALVSPRPTWSMKKMISEVTGGVSDTISYRDFVNMMLGKRSAVLKSVMDVGQENANESSPKPVGPPPERDIC

SEQ ID NO: 1021785 - protein, 140 aa, Homo sapiens
MRATYYNRDPRARLVLKKQRTQARLANEKESLVLQVSVLTDQVEAQGEKIRDLEFGLEEHREKWNATEEMLQRELLSRTSLETQKWDLSAEISNWKWKLTAVEKDRWDYEDKSRDTEGRDQEIKDWRLKVSERDSERLQL

SEQ ID NO: 1021786 - protein, 103 aa, Homo sapiens
MRATYYNRDPRARLVLKKQRTQARLANEKESLVLQVSVLTDQVEAQGEKIRDLEFGLEEHREKWNATEEMLQQVCAEARTKMDFPAELCEMLHFYVVFALMQQ

SEQ ID NO: 1021787 - protein, 86 aa, Homo sapiens
QPQSNPSPGNTCPWDGLSPSTTLEAPTRWVCPLVLLLCAVHLLCASSVLSTSSVLSTSSVLSTSSVLSTSSVLSTSSVLSTSSVLS

SEQ ID NO: 1021788 - protein, 149 aa, Homo sapiens
MGRAASAPRRGCLWRGGGAAAEAEAEAVAMAPFPEEVDVFTAPHWRMKQLVGLYCDKLSKTNFSTQHTSSASPALIRVLLSHRQLPPLPCTHAPANRDITPLLASRASTQRQPRPTLIHRPFLDHSTLLPRIRTPSICNSGTRTPCFTP

SEQ ID NO: 1021789 - protein, 94 aa, Homo sapiens
MAPFPEEVDVFTAPHWRMKQLVGLYCDKVTELLSLPLWAVRAAMGSGLGSWGGLACAAPAAPCRRRASSRLRSCQWPARFPSLPAPCEAFAEPA

SEQ ID NO: 1021790 - protein, 328 aa, Homo sapiens
MEVAVCTDSAAPMWSCIVWELHSGANLLTYRGGQAGPRGLALLNGEYLLAAQLGKNYISAWELQRKDQLQQKIMCPGPVTCLTASPNGLYVLAGVAESIHLWEVSTGNLLVIMSRKYQDVSCLQFTGESSNFISGGKDCLVLVWSLCSVLQADPSRIPAPRHVWSHHTLPITDLHCGFGGPLARVATSSLDQTVKLWEVSSGELLLSVLFDVSIMAVTMDLAEHHMFCGGSEGSIFQVDLFTWPGQRERSFHPEQDAGKVFKGHRNQVTCLSVSTDGSVLLSGSHDETVCLWDVQSKQCIRTVALKGPVTNAAILLAPVNMLSSDFSP

SEQ ID NO: 1021791 - protein, 151 aa, Homo sapiens
RFLSDPFRVFKMSKRGRGGSSGAKFRISLGLPVGAVINCADNTGAKNLYIISVKGIKGRLNRLPAAGVGDMVMATVKKGKPELRKKVHPAVVIRQRKSYRRKDGVFLYFEDNAGVIVNNKGEMKGSAITGPVAKECADLWPRIASNAGSIA

SEQ ID NO: 1021792 - protein, 31 aa, Homo sapiens; identical to SEQ ID NO: 957009

SEQ ID NO: 1021793 - protein, 76 aa, Homo sapiens
  misc_feature (76)..(76): Xaa can be any naturally occurring amino acid
PVNKGRNVIGLGWMLGGLSFAGMLFGPSNMAMVVGLYSLGLFFLIGPYSAALFFISESFPTSIRATAALFTVTATX

SEQ ID NO: 1021794 - protein, 266 aa, Homo sapiens
  misc_feature (137)..(137): Xaa can be any naturally occurring amino acid
  misc_feature (215)..(215): Xaa can be any naturally occurring amino acid
  misc_feature (240)..(240): Xaa can be any naturally occurring amino acid
  misc_feature (255)..(255): Xaa can be any naturally occurring amino acid
MKLDDLPEDDQAEFDAEELTSTSVEHIIVNPNAAYERVQGQESGDKRDWISQIVVEKTKRTGYESGEYEMLGEGLGVKERPQEKYQRAYCMRSRELKTEVEKIKKTVKESATEEKLSPVLLAKKLEALKQQLVASHXEKLLGPDAAINLTDPDGALAKRLLLQLEATKNSKGGSGGKTTVDPPDSSLVTYELHSRPEQDKFSQAAKVAELEKRLXELETAVRCDQDAQNPLSAGLQGACXMETVELLQAKVSALXLAVLDQVEARL

SEQ ID NO: 1021795 - protein, 160 aa, Homo sapiens
MPVSRALDTHDSQGPWFRSAVRPACGLRGAMPMLREPVCSAFLRDCKEAKWKSVSSSGRKAAVPALLRTAPKTPWDGPDVMPNPMPLPLGLLWCWTSCDTTDTRMTIRAYGRPGALATDERLAAFSFRQPYAGFVLTLESSTVQTRWRPLLEPPAELPIA

SEQ ID NO: 1021796 - protein, 234 aa, Homo sapiens
RRLCSDRGLQRSFGSMSAAVTAGKLARAPADPGKAGVPGVASSLELRRLAPPAKRDPGGPSGPTQPGWRICAWAAFMGNGLALPMCFRDLGRGHQRRCSRAQIVPKSLLLNAAPEGEDVHGKYPFTRSLAPPARSLLTSKAIHEDQRLRCYARVGSSARRKGLSWKPATKRRKALTAALEARITSLRQIGAVACQYLRRNRVYPRDLKLGKLFPEWKICRWKIRGLWNGNQSRI

SEQ ID NO: 1021797 - protein, 47 aa, Homo sapiens
YRLPGFHPESSADYRAEPGGRRQLVKLLNDVRKVAIFAGAGVEGAHD

SEQ ID NO: 1021798 - protein, 250 aa, Homo sapiens
PSRERDNYAAELSTQNEPWTSTVTAKRSLLPSVLSWTILLLPGQLAITDSEHSDAEVSCTDNGTFNLSRGQTPLTEGSEDLDGHSDPEESFATDLPDFPSINMDPAGLDDRGATLDIWTLPHGFGIGYTCVPPGPGELRGAPRGSNLASRGQRLALPGAPAMDALPVGSNLYQSNLVLARSPMGDDSGLALSWGLREPGRFLEHAAQRATRGFLRSPSSDLDTDAEGDDFELLDRVGAESGWTLGSARSH

SEQ ID NO: 1021799 - protein, 179 aa, Homo sapiens
  misc_feature (54)..(54): Xaa can be any naturally occurring amino acid
  misc_feature (60)..(60): Xaa can be any naturally occurring amino acid
  misc_feature (65)..(65): Xaa can be any naturally occurring amino acid
  misc_feature (68)..(68): Xaa can be any naturally occurring amino acid
MGEVSVALKEQQAAVTSSIMQAMRSAAGTPVPSAHLDCQAQQAHILQLLQQGTXNTGQPXGADSXGAXGGGREVCETGDPAQVFGQPPCPLSQPVLLSLIQQLASDLGTRTDLKLSYLEEAVMHLDHSDPITRDHMGSVMAQVRQKLFQFLQAEPHNSLGKAARRLSLMLHGFVTPSLP

SEQ ID NO: 1021800 - protein, 130 aa, Homo sapiens
GHRIPKETKLKQALTAADLNLVLYVCETGDPAQVFGQPPCPLSQPVLLSLIQQLASDLGTRTDLKLSYLEEAVMHLDHSDPITRDHMGSVMAQVRQKLFQFLQAEPHNSLGKAARRLSLMLHGFVTPSLP

SEQ ID NO: 1021801 - protein, 570 aa, Homo sapiens
SGVTEAFNLEHKTTGESSRGPPRRMTRGSHDSRTLGGKCEGKKTMDLGPIYTDGKAYKLANEGLSEGSLGFRGRKFHRGRRYKLSRGGWGAITLARDTPGQSVCVARVASRERACGAVTREGRGARGVYAKRGVHLKRGLVALCAPNRGLILWGHQKGVSLCEKILAVARGQTPFSPFFAVSPKSSLSPLPNFREKRKPGVCDHFVGTKTRASRRSSRATVCAPTYGSVGTLWAPSCVRTVRPKQPPGVSEREIERVYLLSEVSSPGDSELEKPNLVRSGPHKALVVALVWGPKILWDSRLVEKGEEILRAPSGRSTQIPGACALLRKPTWKGHTCGTEETHFPRDNPRGRIERTELPYYVAGVGARRGEESIPYPPPQYQPLGEFSCGTRCGRGVTTFRGATKGFPPQKVTLPRGVTPDGGQIFLRDMRTPPTWGRKHPTERQKRSLLYTQRPPPQRVGHREQKMDPRRGRTQHGRRTIGEPHGAPNLPRNTAEKHPGGPPTHHCPQQPHTSGGARVHKKTYSKQQEQLKSKNVRGKNHAVPTTGEGTQHLAQITRGASHTKEHKQTKA

SEQ ID NO: 1021802 - protein, 194 aa, Homo sapiens
  misc_feature (1)..(1): Xaa can be any naturally occurring amino acid
XTVSLPQMKPSEPCHQRERSRLLEDAKELANILKYHIGDEILVSGGIGALVRLKSSQGDKLEVSLKNNVVSVNKEPVAEPDIMATNGVVHVITNVLQPPANRPQERGDELADSALEIFKQASAFSRASQRSVRLAPVYQQLFREDEAFRLKHLQEECTTAAHPPISLRFPQRLFECFQNQVSHFNVHGPHHNEM

SEQ ID NO: 1021803 - protein, 205 aa, Homo sapiens
MPTALPATPASLPSQGLPVCCPFPEAVACGDGHHCCPRGFHCSADGRSCFQRSGNNSVGAIQCPDSQFECPDFSTCCVMVDGSWGCCPMPQASCCEDRVHCCPHGAFCDLVHTRCITPTGTHPLAKKLPAQRTNRAVALSTRHVSGRTGRCLMVLPACELAKGERMAGDPIAKRPLAGSITWHCGPKNTVCDLDPGITCLSKGEL

SEQ ID NO: 1021804 - protein, 247 aa, Homo sapiens
  misc_feature (29)..(29): Xaa can be any naturally occurring amino acid
MVSSARVACCLDPGGASYSCCRPLLDKWXTTLSRHLGGPCQVDAHCSAGHSCIFTVSGTSSCCPFPEAVACGDGHHCCPRGFHCSADGRSCFQRSGNNSVGAIQCPDSQFECPDFSTCCVMVDGSWGCCPMPQASCCEDRVHCCPHGAFCDLVHTRCITPTGTHPLAKKLPAQRTNRAVALSTRHVSGRTGRCLMVLPACELAKGERMAGDPIAKRPLAGSITWHCGPKNTVCDLDPGITCLSKGEL

SEQ ID NO: 1021805 - protein, 525 aa, Homo sapiens
MGLEKMLGVHLSWLQGSCPVTIYPRIFNRTWDCLGCRSILEVAYSWSVILVIDLEDKVGVSYNRYGDGIARVHGLRNVQAEEMVEFSSGLQGLSLQLGNLTMLASSVFGKCINTHFKARQHISEQQAQAAIAGTFPVGCRKLVRVVLSLHALVINAHCLAKGSKYGFRTTRSARLGTAKPPVIHSSTLFRLRGHHTARPGAITRLASRLRLGSPTHWHRGITALTRESHRVDQTDLATPNLDTSSLTTTTPQLHPQGHTSQTGCDSCTRHKERQLVTGIARYAYPGPQTQDIPTRELPTLAEKNKNMHNDTAAKTTANEYQRKKERLSRDSRNLRHIIAHRTQHQTTENNTYNSQEKMTTTKKEQKSLQQETTQHTNTRHQNPPEQNKNYKQTKGKPDATRTPQDSKKDPDRTNPWTSERPNTRQQAETTKTRHGENAKNEEHTVNAEYRNERPRREYTREKKNKRRNKEKGAVTHGSSNKGRSNRRRTQSQRQSKTREDRQPGDRQTRKDVDNNSATQKPEPSK

SEQ ID NO: 1021806 - protein, 188 aa, Homo sapiens
MLSICEFEHCAPGLGRHQNLAFSRLIIRLNATDTIWSANPEVSSCAGSTTFKSVSQYSFAIRYSLPACANEVWAASFFSLLTWFLAWRLAIHIAAMIAAIDPNACTHDAKPGWLSIQQNTTSQLITHSPVDPGTIHGEDPLCPHNKKLPQFIHVQPSMGLPFEKELVVDLFAGVAAPAPASPGHTGAD

SEQ ID NO: 1021807 - protein, 34 aa, Homo sapiens
FRKSKNILFVITKPDCLQVALTSRILYNTFFRGT

SEQ ID NO: 1021808 - protein, 327 aa, Homo sapiens
RQGARRLDLVSRAAMAQWRKKKGAPEAPEAAGLPGPRSDSEDGEFEIQAEDDARSRKLGPGRPLSYLPHSGMHPRNVLSRTPRGDGCVPERTKKQINHILEASSPCGLSYPVVQRPHEEKAYKVPRHRIQMNDHPVILGWQGRVGHWPLDCCVGARQRCFRVSPELFEAGVKTLPVLPDLVARALYPSRLTSDELALQNPWNVRLRELGTVSLALHRFACSWVYDAACMTMFCSPCTEIIIDVFISLRTARTGWVHCLLVAYAALNLQQVLDTVGGSGGRLPGFLELGFRRNTLPGDSICAAVPGGPPQGWFPAGCQNGGGIARAAS

SEQ ID NO: 1021809 - protein, 122 aa, Homo sapiens
MTDDSETIDSVLVMCRSDVPIGDLDRLYLACACLCMLVACSSWRLADCGGVSITVGLPPHPSPSYVPDWSVDIDPHVRSLLFRRSVLAALCGAYWAPLLWVCGPSLWRLLVDPRGVHGCVAV

SEQ ID NO: 1021810 - protein, 196 aa, Homo sapiens
  misc_feature (34)..(34): Xaa can be any naturally occurring amino acid
  misc_feature (109)..(109): Xaa can be any naturally occurring amino acid
KDKARYEAGGIGRGEIQGIFPFETLELPPLERKXPGGFDISLFYRDIISIAEDEDSGLTLRNPAARRPVAEGSRKETRKRALSRLKLKLNKDIVISVGIYNLVQKALKXLFPFPPKNLKKKGPFSLKISRGGGKKKPQKNEPVKTKTRTFNTSTGGLLLPSDTKRSQIYGSRQIILEKDGNQQELNNGLVIQCLDA

SEQ ID NO: 1021811 - protein, 169 aa, Homo sapiens
KSLPMTLMSQGSDYSLGELLCVCANLCTDVQLQCSDGHYRVINASCIEMIDYSHLMVIVHVLNSSAETEGPKKPVSLRRYEASSVDLECTLKETCEGFDRVVRCSSTMSTRSSTMHDVSDADLRASTFERIHAKLRKTLLREQVRSQRRSQDIDAAHAELDTLESFNHT

SEQ ID NO: 1021812 - protein, 70 aa, Homo sapiens
MAFTPLVQAHLDAWVACAADFGPFLSGQETTLTLNEQRKAYEQVLCSHPIPAGVSFCDVDMGGIPGMMST

SEQ ID NO: 1021813 - protein, 70 aa, Homo sapiens
CHRVTDFRLSEPQQVKKQIGHGDSGSHCALLLRKDGCALLKMILYDSATRVGPSLLQAVPRCLKEHSKRR

SEQ ID NO: 1021814 - protein, 222 aa, Homo sapiens
MAPGNDSKSASLLFGMRNSAASDEDSSWATLSQGSPSYGSPEDTDSFWNPNAFRDWIPDLHGWMDEGPGHLQGPITGTIANRELDLSGKPPVGRGSLLTGEHGPPKSESQAQPETGFRNRNGSRVMAHFLEGIDPCDEAPMELGLNGTWGWGLFDLPSSEPQPRAVAPMRMEKLPPLEYQPRDQCVSAVRSLGWVEMTEEELAPGRSSVAVNNCIRQLSYHK

SEQ ID NO: 1021815 - protein, 57 aa, Homo sapiens
TCERTDHRSNAFVEAMNGLLQQAKRAARGFRTSQNFIAIAYLRMSKLKHLPISPFAC

SEQ ID NO: 1021816 - protein, 231 aa, Homo sapiens
RGLLPSTGSCEDSRHSVLWAPQKPAFRSRTRQPEQEPWDRAPHPLRRVMGPRRREPKARGPEEAHPEPDPRPPGPSLAGPLPSGASSHQTQSGGDNGLAKGDSERLQKSTTPSLIKEAALSSRLARRKYVLNSLVVWTSIGQAQALIGPYKEAAEAFLVNLFEDAYLLTLHAGRVSLFPKDVQLARKAPGALKEGTRVSSLHPVFLSVLPAQPGGLIRGLSEPASPWICEC

SEQ ID NO: 1021817 - protein, 30 aa, Homo sapiens
CGVGSRTCAETASVAAAGSGFISNAATEAA

SEQ ID NO: 1021818 - protein, 70 aa, Homo sapiens
VNRDLAALFDDICGCRRCRKVQLRVEAWVYMFNATVTRSTLPVRSPLPNRQPSTRSRRIRPNSVAPRRPY

SEQ ID NO: 1021819 - protein, 163 aa, Homo sapiens
  misc_feature (2)..(2): Xaa can be any naturally occurring amino acid
  misc_feature (5)..(5): Xaa can be any naturally occurring amino acid
  misc_feature (8)..(9): Xaa can be any naturally occurring amino acid
  misc_feature (17)..(17): Xaa can be any naturally occurring amino acid
  misc_feature (20)..(20): Xaa can be any naturally occurring amino acid
  misc_feature (28)..(28): Xaa can be any naturally occurring amino acid
  misc_feature (33)..(33): Xaa can be any naturally occurring amino acid
  misc_feature (36)..(36): Xaa can be any naturally occurring amino acid
  misc_feature (39)..(39): Xaa can be any naturally occurring amino acid
  misc_feature (41)..(41): Xaa can be any naturally occurring amino acid
  misc_feature (43)..(43): Xaa can be any naturally occurring amino acid
  misc_feature (47)..(47): Xaa can be any naturally occurring amino acid
  misc_feature (49)..(50): Xaa can be any naturally occurring amino acid
  misc_feature (78)..(78): Xaa can be any naturally occurring amino acid
  misc_feature (156)..(156): Xaa can be any naturally occurring amino acid
MXPSXPNXXMASLYVGXLHXDVTKAMLXEKFSXAGXILXIXVXKDIXTXXSLGYAYVNFQQPADAECLWDTMNFDVIXGKPVRIMWSQRDPSLRKSGVGNIFIKNLDKSIDNKALYDTFSAFGNILSCKVVCDENGSKGYGFVHFETQEAAENLLXNEWNAPK

SEQ ID NO: 1021820 - protein, 163 aa, Homo sapiens; identical to SEQ ID NO: 1021819
  misc_feature (2)..(2): Xaa can be any naturally occurring amino acid
  misc_feature (5)..(5): Xaa can be any naturally occurring amino acid
  misc_feature (8)..(9): Xaa can be any naturally occurring amino acid
  misc_feature (17)..(17): Xaa can be any naturally occurring amino acid
  misc_feature (20)..(20): Xaa can be any naturally occurring amino acid
  misc_feature (28)..(28): Xaa can be any naturally occurring amino acid
  misc_feature (33)..(33): Xaa can be any naturally occurring amino acid
  misc_feature (36)..(36): Xaa can be any naturally occurring amino acid
  misc_feature (39)..(39): Xaa can be any naturally occurring amino acid
  misc_feature (41)..(41): Xaa can be any naturally occurring amino acid
  misc_feature (43)..(43): Xaa can be any naturally occurring amino acid
  misc_feature (47)..(47): Xaa can be any naturally occurring amino acid
  misc_feature (49)..(50): Xaa can be any naturally occurring amino acid
  misc_feature (78)..(78): Xaa can be any naturally occurring amino acid
  misc_feature (156)..(156): Xaa can be any naturally occurring amino acid

SEQ ID NO: 1021821 - protein, 41 aa, Homo sapiens
CYPGRTTDFALSDRYGPSSVLPPPLCSSSVCPPSVLSSSVL

SEQ ID NO: 1021822 - protein, 98 aa, Homo sapiens
GRYRSVTSSLCGYRYWPSGGSRLPSHQEATHLVRHIPVLATSRCWFRILYACPQPRPEDPWASLHRDRLPATAYESSTNSRPLSGQSIAPWVGIPLWV

SEQ ID NO: 1021823 - protein, 116 aa, Homo sapiens
STKGAKTFGIHSFLASNTVTHLYYPELARQLFELAVEIKEKLGISLDFINLSGGIGVNYRPDQEPNDIALIGEGVRKVYEEVLTPAGLGQIKIFTELGRFMLAPHGALVTRVTHSR

SEQ ID NO: 1021824 - protein, 191 aa, Homo sapiens
MRSLVKELAALPKATILDLSCNKLTTLPSDFCGLTHLVKLDLSKNNAACSCQQTLAVCVNLQHLDLLNNKLVTLPVSFAQLKNLKWLDLKDNPLDPVLAKVAGDCLDEKQCKQCANKVLQHMKAVQADQEREEAAAGLDKVAHVEGQQTDRRCRAYPQQAIAEGLQDPGTLPDTAEDTAERSTEPRTHGRL

SEQ ID NO: 1021825 - protein, 151 aa, Homo sapiens
HRAGSSTEQGAAQSQGTAQSRGTTQSRERHRAGNGTEQRNGTEQRTGTEQETAQSLGAAQSLGAAQSWERHRAGNSTELGAKSPDHALLAGPYWPLALTADCSGHVPGLSEQEELPVLTRPRVLHTAGNQCSLHGWKPSSRTCCVLTGRPG

SEQ ID NO: 1021826 - protein, 211 aa, Homo sapiens
RQANVAVVICTSKFKEGRLSPSEATDMADSARSFNDYLIDSHGGRFDRSHVKLLENAGATRQGIMSALGQNFLGNAVGKDDLVVVYLATSAFPTTDGNTYLCTYDCALDNIYGTCISMQSLMSTLKKNVHSDRILLVLQAAYSGAAELESGAKSLEHRAAQSYNLDPNKVIMGNGFIILSSTQANEITWSTAFSKNLTTALRQILAGRFSA

SEQ ID NO: 1021827 - protein, 74 aa, Homo sapiens
GIRKAVSSLGKSYLVFRCQGYNPLFELVPDNSSKDVSSPSTTSSSFLTSLKKPYGIFSFLDNFISCIHRIYYLI

SEQ ID NO: 1021828 - protein, 193 aa, Homo sapiens
RYAWCKSDEAPGACPPLPVGTTAVAAGRGVGGSVGFCLTVGVRAVQLPAMAELDPFGAPAGAPGGPALGNGVAWCRRRKTLVAAFLAQLMRARLRGIENDEAFAIPGRVVRPRAPSRNGEAAGGVRDAVDGVIEMVNTTRKVMFQTGHDMQAIFTKVDRLQSEPESIRKWREEQEWKPLVKHLGCQFSGSTEY

SEQ ID NO: 1021829 - protein, 149 aa, Homo sapiens
MPGVNLDEAPGACPPLPVGTTAVAAGRGVGGSVGFCLTVGVRAVQLPAMAELDPFGAPAGAPGGPALGNGVAWCRRRKTLVAAFLAQLMRARLRGIENDEAFAILGRVVRPRAPSRNGEAAGGVRVNGPSRQLCNAITPKWIGFGMSEL

SEQ ID NO: 1021830 - protein, 123 aa, Homo sapiens
DPGIADSPFVRSPRLSCFAPCCLLGAAQCDWRWWVGELCQSLFLCWMMGQVNALSAVSYSTPASPVFGPSLALNRSVITPDNILQPVISIRVTNHPLEYTFQKRDLHQMVSPRQLAAPHQTTN

SEQ ID NO: 1021831 - protein, 224 aa, Homo sapiens
GDIIYGDCHGCGSKGCRYDILQMPSAAAMPKAKGAELDHTVKSRGMLHTWLLLQAMADKAELEKLDLNGNTLGEEGCEQLSVSVLEGFNMAKVLASLSDDEDAGRQAGRQGSKQSKATQEASTASRQAAQSIAGQSSAATASRQRGRGGKQSSHQEAAAARSRRRSRTRRIQKRNKKITWETTYNNMGGKNQGQITPMNNDQYTHKHIHMKETVHHKSFHIETY

SEQ ID NO: 1021832 - protein, 348 aa, Homo sapiens
GDIIYGDCHGCGSKGCRYDILQMPSAAAMPKAKGAELDHTVKSRGMLHTWLLLQAMADKAELEKLDLNGNTLGEEGCEQLSVSVLEGFNMAKVLASLSDDEVRWMEEEDGEEDEEEARQKMEEEDEEEEEEEEEEEAEDPQQSRAQGEKSAMPSRMILDPNTGEPSSRAVLPTLLCESVIARFTGLLPSSREAACAIGPKSSVLIAQLDYTSDPEKVVSAFLKVSSVFKDEATVRMAVQDAVDALMHKAYNVLVPSTPTPSSPGCSCTMVCSRVTTRFKAIANLLRPPDGSEHMVPARTISPRRLAPPCCSAFGDASPTRALASLLLRPANSLLPTLSPGLRLTGSSR

SEQ ID NO: 1021833 - protein, 144 aa, Homo sapiens
MPETAHKAVSLRVLTVDDSSVAAQAGHAVACKLVGVEVVALNDGRQALDYLRKLADEGKKPEEEFLMMISDIEMPEMDGYTLTAEIRNDPRMQKLHIILHTSFVGGIQSGNGQEVSVRMTFWPSSVLDDLASRVVARIKAADHG

SEQ ID NO: 1021834 - protein, 79 aa, Homo sapiens
RRRQGLSQGRDMRLVASAEREATIPGPVWPGCKQGCLEKRGGGEGSDRTRAMLHAPCSGVPPAETWPTQHPTLPRHQGR

SEQ ID NO: 1021835 - protein, 261 aa, Homo sapiens
  misc_feature (1)..(1): Xaa can be any naturally occurring amino acid
XLTARYEAGCAEGPLAVLRDRAQQISCPLYLCPMLDVPSMNGGPPLTLGLEWGRTSWSKSLPCAIACFAQLLVLACCAVTCHVLLGVMPNGIQGHVAPVGMLAPVHLCSMPTSHMLCSVCFCEHWMCACVPVTACVLAVLLVPLTCVPWTVLLHNLPCMLLHVPCVALVFLPGRLHVACREADAGWPRWFDVLLFNCYLGTWCDPGGPAVKLLQPCQFDYAVFCPNLTEVSSTGNADQQNFTVTLDHVLLRCLEHQQHWRQ

SEQ ID NO: 1021836 - protein, 355 aa, Homo sapiens
  misc_feature (345)..(345): Xaa can be any naturally occurring amino acid
  misc_feature (352)..(353): Xaa can be any naturally occurring amino acid
MRPRRGGRTLGRSELASGPRSLALEPPFRPPPGPRPRPGLARPPPPPPGPMDYSYLNSYDSCVAAMEASAYGDFGACSQPGGFQYSPLRPAFPAAGPPCPALGSSNCALGALRDHQPAPYSAVPYKFFPEPSGLHEKRKQRRIRTTFTSAHFKELERVFAETHYPDIYTREELALKIDLTEARVQVWFQNRRAKFRKQERAASAKGAAGAAGAKKGEARCSSEDDDSKESTCSPTPDSTASLPPPPAPGLASPRLSPSPLPVALGSGPGPGPGPQPLKGALWAGVAGGGGGGPGAGAAELLKAWQPAESGPGPFSGGLVLLSPEARPRPEDQSLLAAGLWRLRAXSQRRPFXXRT

SEQ ID NO: 1021837 - protein, 70 aa, Homo sapiens
TLEEPLLVIQAVEDVSHSGSQKDLAGEVAVDQEAKRLVRVRENLARLGLSAELIAADGRDTATCDCLDYK

SEQ ID NO: 1021838 - protein, 195 aa, Homo sapiens
MCCPTWPVPCVAAWELPGLLCAGVGMPLHVEVACFPCWCLPLTCDPVPAASSLGLVEHLQLLLGPMYIEPPDLCNNREVLYRAHRESGGPATAPRSPWSNHQSCTGRPSSHAGILKLRQIWNPEVDAVWVTEDIGPLDSGPGGPTASAQICPPTALPRRCCQQSRTLSETSVHKEYIHFSVGSFLSGMVTKVVFG

SEQ ID NO: 1021839 - protein, 257 aa, Homo sapiens
MAGNRRVRGPGGARPFAARALFLWLVFSAGASGGTWEIMGSTLGEPWLGAARSLPDGLSALCSTLLHCEGWLQLPVDLGLPELLCDVVHLPSAVLRVFSSSVSGRGFLVLVEQCAGDSDSILNQSNMPILVCILATHYSYGKCCLRDYCWASVLMLLSSLDVSLLVLAYLARGSLFFGALVEFLHLFGITTYAYHIVSLNVDSGFPGKVQETPGRRLMKCTDALNPKPRLASSCFGFGHCDALPKGGISWVLEGLDV

SEQ ID NO: 1021840 - protein, 148 aa, Homo sapiens
MVLRLGLIRAQEPDEFAAECTGCGVTAKMLSVRVAAGRGPRPSSCGPDWSPEMLWVHLSLLQGNFHASNTHLQKTGTAEMSSILEERILGADTSVDLEETGRVLSIGDGIARVHGLRNVQAEEMVELSSGLRGYVLDTWNLTMLVLSV

SEQ ID NO: 1021841 - protein, 267 aa, Homo sapiens
MVLRLGLIRAQEPDEFAAECTGCGVTAKMLSVRVAAGRGPRPSSCGPDWSPEMLWVHLSLLQGNFHASNTHLQKTGTAEMSSILEERILGADTSVDLEETGRVLSIGDGIARVHGLRNVQAEEMVELSSGLRGYVLDTWNLTMLVLSVCGNDKLIKEGDIVKRTGAIVDRSSGEELWGRVVEMPLGPAIDGGGPVGANDGVGELGLQAPGLIPRVSVRAPMQTGLRLWIVGGTWSWPVDRLGARDGRPPGCWRAYPKVHVLLEKGRL

SEQ ID NO: 1021842 - protein, 208 aa, Homo sapiens
MDGRVQLIKALLALPILACDAIAGGTRISYYPETFDVLIPEPTTRRYICADEAPTVFVDERHVSSSDALKGDCSYIIAAYTGTTALRVGDPPTIEAMESPLPTMIYRGYSGRDRSEYYMDEEEDEDYLGRETLGPGGGCYWGGYRCSILGRRPGSPPGCHYPTEPTLPAYEAAEMYPCATCIPTLRSSYSPLCYHGNKLLPGSKLDDP

SEQ ID NO: 1021843 - protein, 68 aa, Homo sapiens
GRPPIDEGAQDQEPSEDVQRGLWGEEHGGHSWSDRSVQRWDGSRKPKKSRPWNQVEGRQPGHDPEQVI

SEQ ID NO: 1021844 - protein, 152 aa, Homo sapiens
AECASSEGTGGSPSSSLRASVSGWALTSHLRRGSEPGPDPGDCRPLLSSLHEGFPASHTPPLDLPFLLFSACGGSQRLGRSEPGGRPPLKTSRGPIHHGRRRRRERQEPRSSPEPLEQETVSTMQPGLGEVQRHLHSSPTELAHSACHFHIM

SEQ ID NO: 1021845 - protein, 323 aa, Homo sapiens
  misc_feature (286)..(286): Xaa can be any naturally occurring amino acid
  misc_feature (293)..(293): Xaa can be any naturally occurring amino acid
  misc_feature (298)..(298): Xaa can be any naturally occurring amino acid
  misc_feature (303)..(303): Xaa can be any naturally occurring amino acid
  misc_feature (319)..(319): Xaa can be any naturally occurring amino acid
MMPTPVILLKEGTDSSQGIPQLVSNISACQVIAEAVRTTLGPRGMDKLIVDGRGKATISNDGATILKLLDVVHPAAKTLVDIAKIPEMLEVGDGTTSSDLGVAAEFLKQVKPYVEEGLHPQIIIRAFRTSHPQRQLTRSKEIAVTVKKADKVEQRKLLEKCAMTALSSKLISQQKAFFAKMVVDAVMMLDDLLQLKMIGIKKVQGGALEDSQLVAGVAFKKTAHSRWVSTMQPKKYHNPKIALLNVELELKAEKDNAEIRVHTVEDYQAIVDAEWDILYDKLEKIXHSGAKLXCPTPXGDVGXQYFAEQDMFCAGEYLXGSEE

SEQ ID NO: 1021846 - protein, 377 aa, Homo sapiens
MAAPRWSASGPWIRGNGQGCGSLFTLVSKPFCAAAAASTAINAQRLAEKLRAQKREQDTKKEPVSTNAVQRRVQEIVRFTRQLQRVHPNVLAKALTRGILHQDKNLVVINKPYGLPVHGGPGVQLCITDVLPILAKMLHGHKAEPLHLCHRLDKETTGVMVLAWDKDMAHQVQELFRTRQVVKKYWAITVHVPMPSAGVVDIPIVEKEAQGQQQHHKMTLSPSYRMDDGKMVKVRRSRNAQVAVTQYQVLSSTLSSALVELQPITGIKHQLRVHLSFGLDCPILGDHKYSDWNRLAPQKLSVGTLKKLGLEQSKARYIPLHLHARQLILPALGSGKEELNLVCKLPRFFVHSLHRLRLEMPNEDQNENNEAKCLGAQ

SEQ ID NO: 1021847 - protein, 114 aa, Homo sapiens
TSERHPLRAVLPRRVLGEIFSCQLKPLAFSFLGGPGVQLCITDVLPILAKMLHGHKAEPLHLCHRLDKETTGVMVLAWDKDMAHQVQELFRTRQVVKKYWYEPADVFQSMDPLD

SEQ ID NO: 1021848 - protein, 378 aa, Homo sapiens
LRLLKRNPLGPRYRATLGRVCGSLFTLVSKPFCAAAAASTAINAQRLAEKLRAQKREQDTKKEPVSTNAVQRRVQEIVRFTRQLQRVHPNVLAKALTRGILHQDKNLVVINKPYGLPVHGGPGVQLCITDVLPILAKMLHGHKAEPLHLCHRLDKETTGVMVLAWDKDMAHQVQELFRTRQVVKKYWAITVHVPMPSAGVVDIPIVEKEAQGQQQHHKMTLSPSYRMDDGKMVKVRRSRNAQVAVTQYQVLSSTLSSALVELQPITGIKHQLRVHLSFGLDCPILGDHKYSDWNRLAPQKLSVGTLKKLGLEQSKARYIPLHLHARQLILPALGSGKEELNLVCKLPRFFVHSLHRLRLEMPNEDQNENNEAKCLGAQ

SEQ ID NO: 1021849 - protein, 175 aa, Homo sapiens
MLLCAPWVRHALLPAVLALLLCAGQVTALPVNSPMNKGDTEVMKCIVEVISDTLSKPSPMPVSQECFETLRGDERILSILRHQNLLKELQDLALQGCQGEGTSGRRNTAVLKIELSEVLENQSSQCRAEMRLVEEPSSKDVMENNERIPMDVQRKVGEANRLGAMAPVPSLEPMQ

SEQ ID NO: 1021850 - protein, 70 aa, Homo sapiens
RAGGGGVEMAAPLRIQSDWAQALRKDEGEAWLSCHPTQPVGSHQEASMLCADAFIVRVLLELGKRIFVMC

SEQ ID NO: 1021851 - protein, 273 aa, Homo sapiens
RAGGGGVEMAAPLRIQSDWAQALRKDEGEAWLSCHPPTWQARREAPQYSEVRMLVRMLLVAVCSNRKPSLYGRLTCSERIGASMVIPRRLTELQEGFDCDMRNKQGKALHIACPKENAVFYSIFGTIYYFCSRNSYRRSVSIACAHFQPEEVIGVIFPGGSRRRTMKRVSGEAFQLDELRMQYLEGHVFDVKLLQVLSHQGLVVLSGGMDAQLKIWSAEDASCVVTFKGHKGGILDTAIVDRRRNWWCLLSRDGHSTDFGDLSGAQACWGSPL

SEQ ID NO: 1021852 - protein, 76 aa, Homo sapiens
RAGGGGVEMAAPLRIQSDWAQALRKDEGEAWLSCHPPGKNHSLYGHGLQLVMDISARRWSSRGGLQSFRKRFDMCT

SEQ ID NO: 1021853 - protein, 174 aa, Homo sapiens
MNPSVRLDFDIWGPFKMEYLYVFGFSFNLEIIPSHALKKFLLRSGAQVFGELWDKLDTPLYLYVASPSWAPGYWGTWVRLEAIYEAGSSIFGVLQAQGSRLSLVGPRPGFSPLLRKVGVGGAAHTGFHLCSRSARIHSGGYVPAPYVFQCPKTGVPGVSGPHRRPAPLGRGAFL

SEQ ID NO: 1021854 - protein, 269 aa, Homo sapiens
MAGPFSRLLSARPGLRLLALAWSGVSSRCGFCSDRNLYELASCNDRRPVSLRALSTQNIRRENNNCVAMSPVPQQVYALASADKVTTTSHGLDARSVYPDWRGSNLVATPSIKTVAHAVAGDVERPTEVFADLFDPVIQRNNTNEYDPRTMKHTMDLDASKIRSGYFDERYCIGPLESELAEGIRGLSLPPACSRAERREVERVVVDALSGLKADLAGGFYRAQEMTEAEQQQLIDDHFLFDKPVSPLLTAAGMARDWPDARGIWHNKE

SEQ ID NO: 1021855 - protein, 45 aa, Homo sapiens
TLEAPKVFGLSPLEDIAVDSERGRRGPGRIADNEYRENHSSLDPK

SEQ ID NO: 1021856 - protein, 207 aa, Homo sapiens
MRECISIHVGQAGVQIGNACWELYCLEHGIQPDGQMPSDKTIGGEMIPSTPSSGETGAGKHCAPGARALYDLGTHSSFDEASHWHLTRQASVHPGGSIMDKAREDCCHSNYRPEGHYHHLAKETHFDHRCSDRDSAQLACTKCTESPGTSWIDPHALRGAELGSAFTSLSHGTSLSQRYGKKGPKLEFSIYPAPRVSTAVVEAYNSL

SEQ ID NO: 1021857 - protein, 177 aa, Homo sapiens
MPLAQSGLLATARSLLPCWACHSLPGLGEGCCCQWLLEPIQKVMTYQQPFSNRRTCPNRLIVDEAINEDNSVVSLSQPKMDELQLFRGDTVLLKGKKRREAVCIVLSDDTCSDEKIRMNRVVRNNLRVRLGDVISIQPCPDVKYGKRIHVLPIDDTVEGITGNLFEGIPYAVLPGSV

SEQ ID NO: 1021858 - protein, 142 aa, Homo sapiens
MEENFPLNCVTTKNTIARPQDEIPEYEGGNGSSTSGEPTTRSQVKMALTEIATYRELLEGEESTDFSASSQRFLLDLGGTNLEFNSLWVITHLQEEHCLSKERVKLEMDTVYPPELSQDFTVALEYKYCSTTPVQPYITRQD

SEQ ID NO: 1021859 - protein, 138 aa, Homo sapiens
MEENFPLNCVTTKNTIARPQDEIPEYEGGNGSSTSGEPTTRSQVKMALTEIATYRELLEGEESTDFSASSQRFLLDLGGTNLEFNSLWVITHLQEEHCLSKERVKLEMDTVYPPELSQDFTVALDINIAAPDAVARRT

SEQ ID NO: 1021860 - protein, 186 aa, Homo sapiens
MVCTRKTKTLVSTCVILSGMTNIICLLYVGWVTNYIASVYVRGQEPAPDKKLEEDKGDTLKIIERLDHLENVIKQHIQEAPAKPEEAEAEPFTDSSLFAHTGARSSAPKAGGVALKQFQYYGYNAYLSDRLPLDRPCLDLRTRGVTKLSELDSCRSDIEDTTNERSGRRDTSTARKGPKKARNQGD

SEQ ID NO: 1021861 - protein, 67 aa, Homo sapiens
LQTQDEEPRVDQRYLSPGMVNFSSASEVDFYIDKDMIHIAVHLRLVQVVYGDFFIRQIQQHFEESYI

SEQ ID NO: 1021862 - protein, 129 aa, Homo sapiens
  misc_feature (69)..(69): Xaa can be any naturally occurring amino acid
  misc_feature (98)..(98): Xaa can be any naturally occurring amino acid
  misc_feature (128)..(128): Xaa can be any naturally occurring amino acid
MDVGHGSLCNVLVRLILFLVPFYEALSTFILFRYHAGARLKGGDEVIDVAPARLLKQNAPCNKTGLVGXAARGERHATSTPLQSLVRQRPPVFSVAAXRRLLSHRVRPLPFLPCLFPFASPCLGPHTXP

SEQ ID NO: 1021863 - protein, 215 aa, Homo sapiens
MDVGHGSLCNVLVRLILFLVPFYEALSTFILVCFHLVCRSYLGCWGGIQTLSQGPAWEGRRGPPPRQKSMPFAVACKQACDSTCRSQIACRGRGANERHSRRTEWGVEELWRCLDVAQEGGRGGPIHRQGTRQWATLTITKWLRVSPRRNDTAIKQVLYGPVVPRGRGATSSLWVWVRPGTPVSAVVTWCRFSTSVLPCPLAWLFPSANLAGPIF

SEQ ID NO: 1021864 - protein, 258 aa, Homo sapiens
GSREERRALGPLPPCSYALQLGMAGYLRVVRSLCRASVLAAVPGRRLALTAPTSQEQPRRHYADKRIKVAKPVVEMDGDEMTRIIWQFIKEKLILPHCVHIHAKCIYSSWSPKPVTMTDVTMVTIDSALATQKVHVWLSIVPPSPLIRPVWKTVQAEEDVEKSQCELSWNILGGTVFREPIICNNMPRLVPVLDQAHHLLAGTPMFDLVQGAQYFWWQYRGRHFPNMVFTPKRMAVVFRGTWEVYNFPRRPPLGVGLF

SEQ ID NO: 1021865 - protein, 197 aa, Homo sapiens
GSREERRALGPLPPCSYALQLGMAGYLRVVRSLCRASVLAAVPGRRLALTAPTSQEQPRRHYADKRIKVAKPVVEMDGDEMTRIIWQFIKEKVQAEEDVEKSQCELSWNILGGTVFREPIICNNMPRLVPVLDQAHHLLAGTPMFDLVQGAQYFWWQYRGRHFPNLVFTPKRMAVVFRGTWEVYNFPRRPPLGVGLF

SEQ ID NO: 1021866 - protein, 75 aa, Homo sapiens
MMMPCTETLKPWHRARVRGLGDCLVRITKSDGIRGLYQGFSVSVQGIIIYRAAYFGVYENGIFIGGTELGSRLMV

SEQ ID NO: 1021867 - protein, 332 aa, Homo sapiens
LHTLVYCNTRSGWEVRGVRMAAMPDVCAHPCLLVSMATVDRDPWGKPGHVGLVGEGWIQGRLLRSGFPFLPDSTIPCDLPLSCVFSSILVSTKALYSPTPMPGVQLTPSHPQRPEEATRHPYRETFTRMDVWAAAPITKGKAPGSWASIRGPPNTQYPFRHLHRRSPYTIKPGLAASHERPGQREAGLDGRARGQMGSLCLTEYRSCRLWGKINSQVFRALHPPWSPKLGTTIDDPTKTPQRALRHSGATHNNPEGEMDTDLRHIHTKKVRTLKRFEGDIKANRRKIPQGNLDTPQGATNREEPIHTPRKWPILAHDHKMKPSVERGIPLTS

SEQ ID NO: 1021868 - protein, 36 aa, Homo sapiens
MTHVLSAVAWPYANWPRATSGHVAGFGVPSARYCLM

SEQ ID NO: 1021869 - protein, 239 aa, Homo sapiens
SLGPEQPTHQPRQLQVTMDAEGLALLLPPVTLCSPVWTAGSGEDCPWAQLQQPWSAGAGPSQAALWAKSPGVLAGQPFFDAIFTQLNCQVSWFLPEGSKLVPVCQSGLRSWGPAHCLLLVGTGWPSTLLALLQWHCQCCRLLQVEAAKGGRLDWARGRHEEDHRQGFLAGGEVWAPWWAGPAFDTSYDLGVAGDGDRITMWKDGREDVEKAVLGWTEQGGVDFSSEGGKWKWQRDLEGR

SEQ ID NO: 1021870 - protein, 150 aa, Homo sapiens
MDNVLQTKECNIEEIVVFGYENYNNMQLDVVSNRIKSGVRIDNGEAVMKRLAGVVGATVVLTFGMAVGAFASTSGNIGIDTGQNVSFHGRYTYGVAHRGWAGKAVEGHRNLGVTGSNSGHVNVPQQGYSWRRIGHRNIGRKVGVTSDVEP

SEQ ID NO: 1021871 - protein, 301 aa, Homo sapiens
MTPVRMQHSLAGQTYAVPLIQPDLRREEAVQQMADALQYLQKVSGDIFSRISQRVEQSRSQVQAIGEKVSLAQAKIEKIKGSKKAIKVFSSAKYPAPERLQEYGSIFTGAQDPGLQRRPRHRIQSKHRPLDERALQEKLKYFPVCVSTKPEPEDDAEEGLGGLPSNISSVSSLLLFNTTENLYKKYVFLDPLAGAVTKTHVMLGAETEEKLFDAPLSISKREQLEQQVPENYFYVPDWARCLRLMFRPTCLTCPALPATSCTVRPGPGLPPLPLAPFQKLPTFHTEVAEPLKADLQDGVLT

SEQ ID NO: 1021872 - protein, 279 aa, Homo sapiens
SGEAAAGASGRAARRHHDSCEDAALPGRSDLCRAPHPARPAARGGRPADGGCPAVPAEGLWRHLQQVFSSAKYPAPERLQEYGSIFTGAQDPGLQRRPRHRIQSKHRPLDERALQEKLKYFPVCVSTKPEPEDDAEEGLGGLPSNISSVSSLLLFNTTENLYKKYVFLDPLAGAVTKTHVMLGAETEEKLFDAPLSISKREQLEQQVPENYFYVPDWARCLRLMFRPTCLTARHCHDLMYSATWARIALSAPGTIPELPTFHTEVAEPLKADLQDGVLT

SEQ ID NO: 1021873 - protein, 258 aa, Homo sapiens
RNQARGTLRLEGGAQDCGTRQGCCLSQQQRKMSDSEDSNFSEEEDSERSSDGEEAEVDEERRSAAGSENRRRRLRTTEDGRTEEEEYDEEEEEDRLTDLNRPNDNPCQWKCFNSWTDGCMFDRLSTEDEDHVGRTGAEDILEKEEFEASNISIVVLLVMIIRCRVARCLDNYPRRGKLDQRRKKELCEFYMKKYAKSSVGETVYGGSDELSDDITQQQMLPGVKDPICGLSLYDGGGTGHAISLMRKFLPPVTERPWI

SEQ ID NO: 1021874 - protein, 161 aa, Homo sapiens
MTASPDYLSCVLFGITAGATGVQRYGSDEKDLILLYCTQSRLWPTTTVGQLHEAASYDRESVGTDLERLLTKETYHIDVEMPVLGVAAGPKPSDRFNQSVSNELNHWTRDFLLSLYLMGSFMSGKSCILRLPRTMSYYLNCSMPSGIFDKAIHDTVALVSP

SEQ ID NO: 1021875 - protein, 150 aa, Homo sapiens
  misc_feature (82)..(83): Xaa can be any naturally occurring amino acid
  misc_feature (100)..(100): Xaa can be any naturally occurring amino acid
MFVNGASLGAPVAAMFERGPRGRPGPFLRCYPRAWRIHSFTQAHPLLSSRSTRLQLGKNNPVVGQPSAVGKYRSSSRGLAPXXCNIVAKGSLGPLNERTXAEKDCGSEPARVPERLTGLPLGQLEDAQKLQGATSMGQRVSSGVGGIRIR

SEQ ID NO: 1021876 - protein, 71 aa, Homo sapiens
MFVNGASLGAPVAAMFERGGNYVLEGGATMVLRGSSLEASLATMSEEGQTAMFVRGASPGAPVAAMYEMGT

SEQ ID NO: 1021877 - protein, 109 aa, Homo sapiens
RLFSRAHRQLGRSDPRGSAKDKPVGLKEEEEWKKNKKKTQCKVTGPSKFDSLEKKRAVGRQCEKIELARWIGIDDDHFSKLKESSVFHLRTLCWAQRTPRNKHFGDQIE

SEQ ID NO: 1021878 - protein, 99 aa, Homo sapiens
LALALRPGSMGLPRLVCTFLLAACCCCPRVAGVPGEAEQPAPELVEVEVGSTALLKCWPLPVPRQPQPCRLVFCPQGEADAHLPVCASGQGQMRTLGEY

SEQ ID NO: 1021879 - protein, 62 aa, Homo sapiens
EGTGSITAPPSGETVGGQEEGCCGSLSPWKHVSPSEAAAGHQARSWSVEVGQDVFRSCMDRA

SEQ ID NO: 1021880 - protein, 225 aa, Homo sapiens
ADVGEGCGRKRAGRGVPGAWWGSPAPAPTAPKKAWPWVPSAEPWGVWGRWCPGAADGPGTLQRPELAPVPAAAVPGWRGLSYCRWATSSSDLCASMWFTYLLLYLHSVRAYSSLLAAGGCLLLAGAMVGRDWCCAHRSWGYEDLTAPQAVCARYGPRIGPVYLVGTVLMSCLSFPFIFSPCLGCGAATPEWAALLYYGPYIVIFQIGWASNRSHTKTHPGARNED

SEQ ID NO: 1021881 - protein, 34 aa, Homo sapiens
VVHLVPQYCFRIRGYHPLWPDFPFRFANNTAKEY

SEQ ID NO: 1021882 - protein, 115 aa, Homo sapiens
RKMSRGISLCYLARYLVVVVTSVPSVCIQPKESLGRNGNRACPCFMENSFFWLWVLWENETGNKDVGVSDGVKVNVCVSAVVPSSSAMVWLEVNSGGSSWDIFRVDVGESVRAEV

SEQ ID NO: 1021883 - protein, 76 aa, Homo sapiens
LVFHIIVTTVETHHPPPHCAHIHSLVSINIQEVLMDVIGCYFFHVEECSDTPLLHMHFCVRYRSVRLALRCHTRQA

SEQ ID NO: 1021884 - protein, 234 aa, Homo sapiens
VRLRLIAELALPRARPAGSNLNMCLRDSQIYAVDYETFDCGLFSGRLAAWSWAWCLTVLPADEPASCSCSACLPALRAWACLVTRKSWLVAARRAVLLAASLLGAGPTTRVQNLDHVEWPGGILTFKGKTESEALEIEHVMYHDWRLVPKHDGGGLHRVHAWRRKTCLASVPYPPLLRGHDYQQNDRKMETQATEEPMLNVQRIRMEPWDYPAKQEDKGRRKAPPSKCRTVGYR

SEQ ID NO: 1021885 - protein, 157 aa, Homo sapiens
  misc_feature (131)..(131): Xaa can be any naturally occurring amino acid
NCEAARSRILSIQKDLANIAEVEVSIPAKLHNSLIGTKGRLIRSIMEECGGVHIHFPVGGSGSDTVVIRGPSSDVEKAKKQLLHLAEEESKAKEFHVLTSRAKPGGQRLPDQPFPPVRCKVGAGEQFLGKXCADSTGARVIFPAAEDKDQDLITIME

SEQ ID NO: 1021886 - protein, 102 aa, Homo sapiens
KRGMYWSSGRVILPSQYESFTFSRANEKGVLQALFTHIYTDYMDVKDGHLNTHGSGDIRVLAEFDTPGHTLSWGPGIPGLLTPCYSGSEPSGTFGPVYHVCG

SEQ ID NO: 1021887 - protein, 132 aa, Homo sapiens
MGWRTHRPHPMLPTRLWDPPCHMTASLTAPVAGESGSPGNPLTASRDVRDTERGGAISDPYVLARWGEKDTPVRAGSEARIRRDDPGTRAEARILRDMLRNQGASELGTQSGKVSKEVRIEGGTERYPEGHN

SEQ ID NO: 1021888 - protein, 206 aa, Homo sapiens
RLGSRARGASVTPDSGPRAFSASAADASQNLLVPSRARPAGGRNPRFTACPPRTLLLEGEGTPNQPASEKEPANARSQRGERGGTEDEDDEAGRQAAGSSKKQSLIRGTGKRDTAHTTSHEVDNASLFLTERAIYNCTRTQGQHNLVNLRGYILSLKKTKTDELRNLQQDCFTTGQATVSSLKKNVGQFSGFPFEKGSVQYKKKEE

SEQ ID NO: 1021889 - protein, 217 aa, Homo sapiens
  misc_feature (155)..(155): Xaa can be any naturally occurring amino acid
  misc_feature (157)..(158): Xaa can be any naturally occurring amino acid
  misc_feature (160)..(160): Xaa can be any naturally occurring amino acid
  misc_feature (163)..(163): Xaa can be any naturally occurring amino acid
  misc_feature (168)..(168): Xaa can be any naturally occurring amino acid
  misc_feature (174)..(174): Xaa can be any naturally occurring amino acid
  misc_feature (180)..(181): Xaa can be any naturally occurring amino acid
  misc_feature (196)..(196): Xaa can be any naturally occurring amino acid
  misc_feature (217)..(217): Xaa can be any naturally occurring amino acid
PQRDSRKGGREGAGGTAPHHSYRYGPNLPLPPPLHRPGARTPPNPVCPLGTDTPTETETQPSATTAAAAWLGRGPAPPWPHYPSEVARMDLWPGAWMLLLLLFLHAALTCMTTLMVLQAPDAKYFFKMAFYNGWILFLAVLAIPVCAVRRTQRRXPXXLXSTXAPPPXPVRAPXAVRGAXXFPPSPPSVVVSPPPXSLALLGLMEVLPGRCVPIAKX

SEQ ID NO: 1021890 - protein, 356 aa, Homo sapiens
PQRDSRKGGREGAGGTAPHHSYRYGPNLPLPPPLHRPGARTPPNPVCPLGTDTPTETETQPSATTAAAAWLGRGPAPPWPHYPSEVARMDLWPGAWMLLLLLFLHAALTCMTTLMVLQAPDAKYFFKMAFYNGWILFLAVLAIPVCAVRRTQRRENMKILRTNACVHNQDYDVTGLRVEVATGAQTVTLPPGPIVGCLQPDQTLVSTLHWRMHGGYLPMAGDVAQFARAGEQLMGLDYMPGLDLRCWARESILPDEPEARRGDSPGTEGRRGSDGDQTQERPWRRPAGPVKGDQARGSPSEGKRRKRDMGARSGGARQQRSARHTTNATQGAPAGRSRRGAQRGRRRPNQQKEGGT

SEQ ID NO: 1021891 - protein, 221 aa, Homo sapiens
MDPACAGVCWALWPGGCALAWRLGVPPPAAATHAKPGLASAGAAGGLSPVAAARTGEPAACWELRRWPCGGALGLYHTAAVAPARPRTSMLSAQPRTLPVHPPAVTLYQYNDVSFYSKVRAFLDFHALPYQVVEVTPVRRAEIKFSSYRKVPILVAQEGECRQQLNDSSVIISALKTYLVSGQPLEEIYYTRHDVYQPGGGGWERGLARGGPVVAAGAMAV

SEQ ID NO: 1021892 - protein, 203 aa, Homo sapiens
  misc_feature (171)..(171): Xaa can be any naturally occurring amino acid
  misc_feature (173)..(174): Xaa can be any naturally occurring amino acid
  misc_feature (201)..(201): Xaa can be any naturally occurring amino acid
GSVPEIEFRSYLPDLPGIANDLMYSADLGPGIAPSAPGTIPELPTFHTEVAEPLKADLQDGVLTAPPPPPPPPPPPPAPEVLASASPLPPSTAAPVGQGARQDDSSSSASPSVQGAPREVVDPSGVRATQQETIRQAGGNGKAKLRSVKERKLEKKKQKEQEPSREPRVQXGXXKPDPPNKLAMRRKGIPGKGPGAGEGPXGT

SEQ ID NO: 1021893 - protein, 298 aa, Homo sapiens
GSVPEIEFRSYLPDLPGIANDLMYSADLGPGIAPSAPGTIPELPTFHTEVAEPLKADLQDGVLTAPPPPPPPPPPPPAPEVLASASPLPPSTAAPVGQGARQDDSSSSASPSVQGAPREVVDPSGVRATQQETIRQAGGNGKAKLRSVKERKLEKKKQKEQEQVESHEPRLRDFDRADALAHKSASLRSTTGILWERTWGMVDGAHEKEHFAPRSQTTSPCLCRHRSSHRTEEDEERLGMRSGASSDTFTPPDPDMGHVLLTWTQPGQDCSDTACLGGGDRNQSSVTETSFKERKDWR

SEQ ID NO: 1021894 - protein, 55 aa, Homo sapiens
PCHDSEHVRPPPGSLLEDVASLQVSPQAPEAGGQRGLSQLLGCWEQTESFLMDWH

SEQ ID NO: 1021895 - protein, 432 aa, Homo sapiens
GPPDVCPTPCRLSGAGSELRSAVEAADAGGARGGHSSMGQSGRSRHQKRARAQAQLRNLEAYAENPHSFVFTRGCTGRNIRQLSLDVRRVMEPLTASRLQVRKKNSLKDCVAVAGPLGVTHFLILSKTETNVYFKLMRLPGGPTLTFQVKKYSLVRDVVSSLRRHRMHEQQFAHPALLVLNSFGPHGMHVKLMATMFQEPVPLHQRAPRVNLNTIKRCLLIDYNPDSQELDFRHYSIKVVPVGASRGMKKLLPGEVPQHEPLQDISELLVTGAGLSESEAEPVRRPHTSHELPQGLSLAVAQHAGAKSECTCGSPRSALRMTLQLIKVQEGVWAGPPDVPQFCAARRSEELQAPPGSPGVKKLRLKRTGGPQARNVHRKQEQRDAPNEEPGGLKKAGRVGKEASVTLRRDCVAFRARERCPPGKRAGKIPRA

SEQ ID NO: 1021896 - protein, 438 aa, Homo sapiens
GPPDVCPTPCRLSGAGSELRSAVEAADAGGARGGHSSMGQSGRSRHQKRARAQAQLRNLEAYAENPHSFVFTRGCTGRNIRQLSLDVRRVMEPLTASRLQVRKKNSLKDCVAVAGPLGVTHFLILSKTETNVYFKLMRLPGGPTLTFQVKKYSLVRDVVSSLRRHQKRARAQAQLRNLEAYASEPALNSFGPHGMHVKLMATMFQEPVPLHQRAPRVNLNTIKRCLLIDYNPDSQELDFRHYSIKVVPVGASRGMKKLLPGEVPQHEPLQDISELLVTGAGLSESEAEPDGDHNITELPQGLSLAVAQHAGAKSECTCGSPRSALRMTLQLIKVQEGVWAGPPDVPQFCAARRSEELQAPPGSPGVKKLRLKRTGGPQARNVHRKQEQRDAPNEEPGGLKKAGRVGKEASVTLRRDCVAFRARERCPPGKRAGKIPRA

SEQ ID NO: 1021897 - protein, 52 aa, Homo sapiens
MTYNYSRSPERDQDIQKRTGNKDEKHGVTYQRGYRDVRIEERGRKHAERAER

SEQ ID NO: 1021898 - protein, 92 aa, Homo sapiens
MRSRGSQCDQLCGRVRARADRDLVEVMDPSFVCLKIGACPSAHKPLLGTDEVYMWAQANWCQYHSRQQPTCNAARRIAKRHVVELWSDGGVP

SEQ ID NO: 1021899 - protein, 225 aa, Homo sapiens
GHCAKTMVVGVGTTLCGVAVRESWEAGLVRARRCDAQTWAPRFPARLRSPGRPDPRHVCDPTWQKEYKCGDLGVRQDERVPHYLAGSVIRTTMPEAVPVKINQSQQTTNVYSFSVTHETAFLGPKDLFPYEESKEKFGKPNKRKGFSEGLWEIENNPTVKASGYQSSQKPELCGSSLNPEPRSMPAVVHGASQHRGNASRGSQRTQDRAQLVIDEPAKEKNEKGA

SEQ ID NO: 1021900 - protein, 32 aa, Homo sapiens
MLHYINPWNKEKPNINDEMRWGSRWMECGCAC

SEQ ID NO: 1021901 - protein, 252 aa, Homo sapiens
ENLCEEREGASRDFKGRCEAIMDAMKRGLCCVLLLCGAVFVSPSLGNPCPITESGCHDLTKVAASQGVSTGAPDQQALYFSDFCVPVPREDLAWGKVAGEIRLPGPRCYREHQGITLQGARGAHSDEWRPSAPNWNKQRVRPRQPYRTGRRPDAIRLGPGRTTTLLQQTQIDDSKPMVHTVFKCWGSTSSGVHVRHHLHIDSDGKTVTATLGNGSAYCGNAQAHRIGCLLTTVRIHDPDRQGYTTRTQCQHW

SEQ ID NO: 1021902 - protein, 184 aa, Homo sapiens
KDANSVTSSLRKANLDKRLLELFPVNRQSVDHYAKYFTDAGLKELSEFLRVQQSLGTRKELQNGAPGASFSGMPDRGGGALCQMNDTEEEVIFQETAADWLLPVEHCIMNACSDVEPKKRTDTLLQSQALKHPASNYAPLLAVFSSQRPAQSLILLQTGLRKYVRTTNIHFSERPFQKIVVSLL

SEQ ID NO: 1021903 - protein, 33 aa, Homo sapiens
LRRKQYEMICCSRLSPKDSSYLFTCRCACLGIV

SEQ ID NO: 1021904 - protein, 70 aa, Homo sapiens
  misc_feature (1)..(1): Xaa can be any naturally occurring amino acid
XSISTCCSSIALTVSCYVHSHWVCCRCAEAGTAGTATLSVVSGTKPSIKSATLRTSTTATLVVVYISHVF

SEQ ID NO: 1021905 - protein, 415 aa, Homo sapiens
KEKVADEDDVDNEEAALLHEEATMTIEELLTRYGQNCHKGPPHSKSGGGTGEEPGIPGTSNGDAHETLERSQSRETPSQENGPTAKAYTGFSSNSERGTEAGQVGEPGIPTGEAGPSCSSASDKLPRVAKSKFFESTVQDESDEAEEEEEAPREGMQRGSRMATAVRQAENEEDEDDTEEAEEDDEEASKKQHDGARDGKATEEPGSDSGTTAVVGPDTREAVEIVATRKETLDCVVSEAGKRFKTMSYDHKPEDEVETSTAIKEMLCGKVTMDGRVNAGAVKHLLEPIVDHFISEKTKNRANLRTQSDLQPRILTIKVHVTLTDDHEFTGQLPVMASGNVMSSQEVVDFIHIKDAASVMRNGRSFGLLSSIVEELLDQCWTPNTPGDGYQGVTTLTCIHHLLQPENTEEAPAKK

SEQ ID NO: 1021906 - protein, 141 aa, Homo sapiens
KEKVADEDDVDNEEAALLHEEATMTIEELLTRYGQNCHKGPPHSKSGGGTGEEPGIPGTSNGDAHETLERSQSRETPSQENGPTAKAYTGFSSNSERGTEAGQVGEPGIPTGEAGPSCSSASDKLPRVAKSKFFESTVQRM

SEQ ID NO: 1021907 - protein, 205 aa, Homo sapiens
  misc_feature (29)..(29): Xaa can be any naturally occurring amino acid
  misc_feature (45)..(45): Xaa can be any naturally occurring amino acid
  misc_feature (69)..(69): Xaa can be any naturally occurring amino acid
  misc_feature (95)..(95): Xaa can be any naturally occurring amino acid
  misc_feature (107)..(107): Xaa can be any naturally occurring amino acid
  misc_feature (121)..(122): Xaa can be any naturally occurring amino acid
  misc_feature (125)..(127): Xaa can be any naturally occurring amino acid
SPSSGVICADRLAGLFNGSGLQVGTVWLXMERTAPQESEPQPGCXGGRYRCSAPSEKGIKWWGTILKKXKCINHCWLFAYLVRIGFIFDQIILLXFFAINQIPHIYXWYEVLHPPLYVSVXXFLXXXGGLHSLLPSPSSPPHIMSPKRVCFLSRTPVMPSSPIPRAPYCRSYPGQGFFQVGGTEHEQSDIPTAPQTCKATKAGGV

SEQ ID NO: 1021908 - protein, 117 aa, Homo sapiens
MVSKFTSPATSSMEATSIREPSTTILTTETTNGPGSMAVASTNIPLGKGYITEGRLDTSHLPIGTTASSETSMDFTMAKESVSMSVSPSQSMDAAGSSTPGRTSQFVDTFSDDVYHL

SEQ ID NO: 1021909 - protein, 236 aa, Homo sapiens
GSPGTLAKLQGPEQGAFVHDPSTGTVHHTHPLLALGKGCLSFQQAVFGGGQEKEVCTGELNNSQRGQNLSLQGVSVLVTTQEEAETFVVESEWGSYLYKSSSQRTCTSGIAYLLFQIRAQAKNLPGVFSIQPRGPHVELLFRSPICAGPSSKPFAVGNLPGQAMIIPQVTFCGLRLSPMGGVPNPDALPWCGAPGSPFCPPCCVSLRPPWGSPRRVIHSGALGGERHIRRADSDPV

SEQ ID NO: 1021910 - protein, 283 aa, Homo sapiens
LSGRAWAAWRILFAMPTGDFDSKPSWADQVEEEGEDDKCVTSELLKGIPLATGDTSPEPELLPGAPLPPPKEVINGNIKTVTEYKIDEDGKKFKIVRTFRIETRKASKAVARRKNWKKFGNSEFDPPGPNVATTTVSDDVSMTFITSKEDLNCQEEEDPMNKLKGPEDRVPAAICKGDHWTTRCPYKDTLGPMQKELAEAAGPVYCREGEAGGRARAGAGHAGHDREYVPRAWATGQPPGGPWGHRERKRPPGPILRRGTTGGSGWPPEPGGKGPGSTPGEGR

SEQ ID NO: 1021911 - protein, 146 aa, Homo sapiens
QEPVRAEQSRGRAASGAGLMRAPSSRHGPWNTLSSLLPAGVDYSTKFDDEQEFVDEQEEAAAAVLAGAGPGTPERWWTGLLLSKGDMLRGIPMQALLETLPVKHQRINAVTGSEAQGVVLKCAHRNFREQLQIEQAVRVTWTETWR

SEQ ID NO: 1021912 - protein, 382 aa, Homo sapiens
MRRSADASHVPCPWLRSLTLVARMDDEFTKVMHNTDASLPDYYVEHLKDDAQVCAIIDRVQRYLEEKGTTCRGLAAVYTDCVIPCIDPELQSIDLSYAPSHVAQSDPVLRAPQSLMQDQEKDEGDDSAVLMERLCKYIYAKDRTDRIRTCAILCHIYQRECRAWWYMWQGWQHVPPCSDSRWYQARTHAHDHLQDNIQHADPPVQILYNRTMVQLGICAFRQGLTKDAHNALLDIQSSGRAKELLGQGLLLRSLQERNQEQEKGGAGAVRSPSNLHHQPWRLLECVYLAVCHAPWRLPLHGRPCEERVPADAMIKQAVPPPGCALEQSDRGARGMGSALQSPMARKHVDRLTSKCHGRMGDWEAPVDRFVSSMRTMNGKVCG

SEQ ID NO: 1021913 - protein, 365 aa, Homo sapiens
MRRSADASHVPCPWLRSLTLVARMDDEFTKVMHNTDASLPDYYVEHLKDDAQVCAIIDRVQRYLEEKGTTCRGLAAVYTDCVIPCIDPELQSIDLSYAPSHVAQSDPVLRAPQSLMQDQEKDEGDDSAVLMERLCKYIYAKDRTDRIRTCAILCHIYHCSDSRWYQARTHAHDHLQDNIQHADPPVQILYNRTMVQLGICAFRQGLTKDAHNALLDIQSSGRAKELLGQGLLLRSLQERNQEQEKGGAGAVRSPSNLHHQPWRLLECVYLAVCHAPWRLPLHGRPCEERVPADAMIKQAESTTQACALEQSDRGARGMGSALQSPMARKHVDRLTSKCHGRMGDWEAPVDRFVSSMRTMNGKVCG

SEQ ID NO: 1021914 - protein, 60 aa, Homo sapiens
LEDSKSLIAPGILYQPTCVGFGYGLTRRLFPGTPSPPGQSNKTERYTASVTIRWPGNIHP

SEQ ID NO: 1021915 - protein, 325 aa, Homo sapiens
MDLECQSVGLGQQMLAGVAAIGRATGQRPTGLSTNKPAGGPGQPPARVPEGPVGYRTARETRQTPKGGEFGQAGQNPPEGPGSPDSPGPQQAGILRFTDRVRKAPRVPGNIPFFRNLRDQEASQSSKNPEPKGVPTFPKFPSVGSFPESPGIRRVPKCTRYFGVPREVPPAKWSKEGDIREFPGYGDSEETFPQKGSPLDGRTGTRVGPFTDTMIRFESRDSRQTGKGHAGHTSSPVDHRRGEPHPSQLQMKRPCTLANTNEEQDDGTTPQAHGAASHRPRRTTRIEEDKSKHDDGGKDKKKTTQSAENTAESTSSETRTRHRTR

SEQ ID NO: 1021916 - protein, 247 aa, Homo sapiens
PWNTVAPELVSLRPEDPPRWLDVLRLCGAGDAGCVMLVLLCGACDAPAGPSSMRPAVTPAEVLLCLPSPAKTYLIFLAVCNCVDVLIDPSATNRQLLCLPCPDLEPLWSVLQSNVPASALLTGCALRCLWSSVPLFLTCVLTLVLLHACWVPVEAWPPPGAAPLLGMLLCFHLKCSAKQRLPVQEEKLSAKHLKFAIAGWWKSQEVAEECSPCSNFRAKTTPECGPPRICRENHLQPHLEQIESNSC

SEQ ID NO: 1021917 - protein, 104 aa, Homo sapiens
MAVTEASLCASALLLRPQNRSKTVYEGFISAQGRDFHLRIVLPEDLQLKNARLLCSRQLRTILTGYHRKVHTDDCSYSPDPMSIYDGDVKDADWNAGLENRQEL

SEQ ID NO: 1021918 - protein, 198 aa, Homo sapiens
PRQCPAASRKRKKFPERLRSRAASQTPGEPSLQLPGAAEGGGGSGPAPLPEPSPERVTGGRRAGFPAPREGWCRDRGVAARRLSSGGGAGGRPPPPCRPEGLQQRVEFLAQAREEVGATRGGSGKGAEAGAAARSTAQLQVAPLATRTPLRPGKGRWRAVLPPPFGKPATSHPLRRRPGKGSKGSRSRSCYPAGFSHS

SEQ ID NO: 1021919 - protein, 101 aa, Homo sapiens
  misc_feature (83)..(83): Xaa can be any naturally occurring amino acid
  misc_feature (91)..(91): Xaa can be any naturally occurring amino acid
  misc_feature (95)..(95): Xaa can be any naturally occurring amino acid
  misc_feature (98)..(98): Xaa can be any naturally occurring amino acid
VIQIWGRANFKTAKAQVSSKGWGKGSRCSAPGTLELWGTCNLALSNQFKFLGFSWKTFYTPIFLPSILKFISFQIRLFHFLSXFCWDITTXFCIXSSXCSM

SEQ ID NO: 1021920 - protein, 189 aa, Homo sapiens
WLPGLKGKRFGGRGPDLGRGVRPQGQFYTGISISTLPILLSVDLRAFVHFIQEAPISARHPENPEWCDAGTLEFLSGVYKFSEEAQRVERYVADRNMCCVRSPIAGLSCVDLRILPDKTSLSLRHIYVAEVSKQNSVTTMCAWWGASLLGGRKYKRREIFSREYLCGETHKGVSLRDAPKDWGVRTVER

SEQ ID NO: 1021921 - protein, 486 aa, Homo sapiens
MEEKLRGVLRFLMAAAACGTKAMALFKRTLVLSPAAAPSVPWAQAPAPAGLLLASCPPGPCKGLASCGEVRQCCGACLPQSHSHSQSQSHSHSHSDSMLLDVSHRRCVLSAQQDSLSSSLKTCYKYLNQTSRSFAAVIQALDGEMRNAVCILIWFSETLDTLEDDMTISVEKKVPLLHNFHSFLYQPDWRFMESKEKDRQVLEDFPTISLEFRNLAEKYQTVIADICRRMGIGMAEFLDKHVTSEQEWDKYCHYVAGLVGIGLSRLFSASEFEDPLVGEDTERANSMGLFLQKTNIIRDYLEDQQGGQRVLASRGLEQVCSRQSGGFAKPGGILTVAVQGLNELYNQCTDHIPDVITTFRDSETRSVFNFCAIPQVNGHWHFGWLLIITSRWFKGPVEDPGGQAVTLVMIAPICSGKHQYTIWRELHRSDRPLCKQDFPSREFQGGSKPTIRSRGAGTHLRQCRQTWGTGLQTQKSRRRGTFVACE

SEQ ID NO: 1021922 - protein, 424 aa, Homo sapiens
  misc_feature (24)..(24): Xaa can be any naturally occurring amino acid
  misc_feature (45)..(45): Xaa can be any naturally occurring amino acid
PGDRRGESRARESAAGARMECVKXLGHPEEFYNLVRFRIGGKRKXMPKMDQDSLSSSLKTCYKYLNQTSRSFAAVIQALDGEMRNAVCILIWFSETLDTLEDDMTISVEKKVPLLHNFHSFLYQPDWRFMESKEKDRQVLEDFPTISLEFRNLAEKYQTVIADICRRMGIGMAEFLDKHVTSEQEWDKYCHYVAGLVGIGLSRLFSASEFEDPLVGEDTERANSMGLFLQKTNIIRDYLEDQQGGQRVLASRGLEQVCSRQSGGFAKPGGILTVAVQGLNELYNQCTDHIPDVITTFRDSETRSVFNCCAIPQVNGHWHFGWLLIITSRWFKGPVEDPGGQAVTLVMIAPICSGKHQYTIWRELHRSDRPLCKQDFPSREFQGGSKPTIRSRGAGTHLRQCRQTWGTGLQTQKSRRRGTFVACE

SEQ ID NO: 1021923 - protein, 282 aa, Homo sapiens
MIVESRGSHMVEMTLQWDLNAWTKSAEAFGRDCGRASWHSAHQALAPMGPSQEPQGPWSKQGSGSSRPMERAGGLWALGLADDPYYTVRSPMCQVSRRSRSGEGEVSGLMRKVPRVSLERLDLELTADSQPPVYQGTSQAVTTEDYNLYMLLERGCCLLQLPASQWTAPAGTPGAPPLAGMAIVKEEETGGCHWSPSYQPLEGPETKPVLIGYYAEGYLVLEGPRLAYNLSGSTSSVAWKVGGYLSGTYRPQVVAREPLDDSCHHFAGVCQKPGDTGNVQPV

SEQ ID NO: 1021924 - protein, 264 aa, Homo sapiens
  misc_feature (209)..(209): Xaa can be any naturally occurring amino acid
  misc_feature (215)..(216): Xaa can be any naturally occurring amino acid
  misc_feature (238)..(239): Xaa can be any naturally occurring amino acid
  misc_feature (263)..(263): Xaa can be any naturally occurring amino acid
HQPRARVEIFYKRPSGAPVCDNTVGPELMPSVVLPGPFFFFLLCLCFVLLFFFFFFFWAFRERYPGSGQSCLRAKDQGPIMLDEVQCTGTEASLADCKSLGWLKSNCRHERDAGVVCTNETRSTHNLDLSRELSEALGQIFDSQRGCDLSISVNVQGEDAWASVANGHPDANLEAQALWKEPGSNVTMSVDAECVPMVRDLLRYFYSRXIDITLXXVKCFHKLASAYGGQELQGYCAXXFAILLPQDPSFQMPLDLYAYAVAXG

SEQ ID NO: 1021925 - protein, 274 aa, Homo sapiens
  misc_feature (219)..(219): Xaa can be any naturally occurring amino acid
  misc_feature (225)..(226): Xaa can be any naturally occurring amino acid
  misc_feature (248)..(249): Xaa can be any naturally occurring amino acid
  misc_feature (273)..(273): Xaa can be any naturally occurring amino acid
MHGHDPSRLFWVWLLVAGSQGVIDGDMWLVDGGATNQGCVVMFFEVSGVLCVIFVGFDVMLVLSAGFWAFRERYPGSGQSCLRAKDQGPIMLDEVQCTGTEASLADCKSLGWLKSNCRHERDAGVVCTNETRSTHNLDLSRELSEALGQIFDSQRGCDLSISVNVQGEDAWASVANGHPDANLEAQALWKEPGSNVTMSVDAECVPMVRDLLRYFYSRXIDITLXXVKCFHKLASAYGGQELQGYCAXXFAILLPQDPSFQMPLDLYAYAVAXG

SEQ ID NO: 1021926 - protein, 192 aa, Homo sapiens
SLPPRRSPRRSRLRVPPPHPLSRRWLCHPRMPILANLPVDVFTKGYGFGLIKLDLKTKSENGLEFTSSGSANTETTKVTGSLETKYRWTEYGLTFTREMEYRQYTRHRGLLWKIILHVDCKLTFDSSFSLNHWENKCYTSMTGYNAGAAVKPVVCDMDFDIAGPSIRGALVLGYEGWLAGYQMHFETAQDPE

SEQ ID NO: 1021927 - protein, 145 aa, Homo sapiens
IPVIFDALVDADCVVQNNLRLEGTFLSVDQQVNGAWTRVRSDSHPSTLYQWNRTNTVCRTPPTLHPAMHLFTIVPLRRFWDTAWSTSRGPLSPTLPVSILSVTLHCNEYILTISLAAGSYRLAYFRGREGSTSTGTISPFEGTSS

SEQ ID NO: 1021928 - protein, 172 aa, Homo sapiens
APRVRPCVSAQAGLCPPPPPPAYVADIEVTLRGAAGAVSLAHPDSRCWFLAWNPAGTLLASVLAGDLENSCTLVGTGLVDTLDLAQYCPNLKASQRTVRKCSLVPRAVITWPLPGFDATTCIWKKNQDDFAVCKPRLEGHENEVKSVAWAPSGNLPGTACEARDKERLGLGS

SEQ ID NO: 1021929 - protein, 102 aa, Homo sapiens
MRQFLRGLDFLHANCIVHRDLKPENILVTSGGNSQAGLTLAWPRIYSYQDGTYTRGWLHSGTELRSSSGVHICNTVDMWSVPDSEQVVLETLYVELDSDIAN

SEQ ID NO: 1021930 - protein, 102 aa, Homo sapiens; identical to SEQ ID NO: 1021929

SEQ ID NO: 1021931 - protein, 85 aa, Homo sapiens
VAALCTMTAPATLQGVRMRMAVATRAMWLIDEYAMSDFEVCMLEPEGLEKATTYNSHTYSPSGGEVSEELSLKLPTNVVEDSARA

SEQ ID NO: 1021932 - protein, 268 aa, Homo sapiens
ASTRLGLNRPRAQVSLAEGAAPRRRSGSPVGADAPVLAQIPRLGWQRASSTPRVPGSRLHPSCSPDLDPCPVKMCAVCRVPADYMPLPWMQHFFRAENFCISSSMQQTGPGDMTRRVNTQAPPPPGGGRTRGAQEKPLAAQEADPAAMAEAEEDMSILNTVRAAMMMKKMISPAEDRFCRHNSKMFRAQWMFELAQVYSSSNLEQSTLQKQQEALSRKHREDTKRRNKNKAKEEKARELFLTAVEEEQMELFYEDIQDYRKGNELVLI

SEQ ID NO: 1021933 - protein, 33 aa, Homo sapiens
MGPVEKNGEETKMMICFSSIGLRAVASLSMSDG

SEQ ID NO: 1021934 - protein, 40 aa, Homo sapiens
MEAMLNDRRRQARENYITAQQAVPPRPRQVFNMLKKYVRA

SEQ ID NO: 1021935 - protein, 125 aa, Homo sapiens
MRRRPDMGASGSKARGLWALRLGGRRRRLRWQQELRQALERTLEGPKAVPPIRYFTTPRLYGSMIEGWGSGITEILIEETIVNTRNGTEAGQAEASAIRNLIPQGIVKLDHPRIHVDIPVILYEV

SEQ ID NO: 1021936 - protein, 106 aa, Homo sapiens
MRRRPDMGASGSKARGLWALRLGGRRRRLRWQQELRQALERHSGTEAVPPIRYFTTPRLYGSMMRCDPGSVADQKSPPAPGRNSQAQIKEDGYPIEEPRAVAQTLK

SEQ ID NO: 1021937 - protein, 224 aa, Homo sapiens
HLVYLASMSGPAAMTGWQWPCAKANVCCSSRAGLQFPVGLMYTCAAAVKWPLRLMLLLAAVLRQCTWLAVLDVPHLLRSCDAGCGNAGPADNKNDCESSPATCMLAILQLTMDAQQCLLWLAVTDLPMGGVLPNIPVPVLLPKKDQRHLWGRMAPSGRQEVPPSGSQVSTNEVPCCLWPGRHGLPNATHKWALLSVPPTAPHGQELSLLQTAVATAGAAVPVPA

SEQ ID NO: 1021938 - protein, 115 aa, Homo sapiens
MPGAESPWVPARNTQLIITSRKTPRPRPPETPGLRNPLRAVPPWAPRSALTSPGGFPSLPLRFLHLAIIHEEKALTMEVVRQVKGDLAFLNFQNNLQQVRCLPAPCLLGSASLTP

SEQ ID NO: 1021939 - protein, 141 aa, Homo sapiens
PAPPFSAGNGAVPVLLPSHGFTSRPSATCWRCVTAALIFFAIWHIIAFDELKTDYKNPIDQCNTLNPLCTPRVPHPRFLLCHVSCVQPEWLTLGLNMPLCGISYWRYMSRPVMSGPGLYDPTNIMNADILAYVSEGTDGAN

SEQ ID NO: 1021940 - protein, 262 aa, Homo sapiens
GGRKGRRRTCETGEPSGSRVRRHKFRGPAQVYLPGPGACVREGEELVMDEGGYVLYQRVEDWCPPCSSSFDHSPGIHPVEDKAVTELPLYTFTCVCWDPKAESAQSKQELMMLRNAQIVHGDQEPAQPFRRGTGLNGTTRGQDTTGKQGGKQRRRKPFKLGNALGPMGGPNLMRCALSNAREGFRGGWLTGAFARFDQGMAPLLDQPWGAWVALHGNAQGGPKGWASVGPWAASRRRRLPCQACVGVVAPQGALGEALFSRG

SEQ ID NO: 1021941 - protein, 357 aa, Homo sapiens
GSWVVNRHRGVTCWVSLTGLSLHLLILYWCFLKCFLEVARSRMQRIDHQRSLSPTSLPLSPPPSLPLSLSPPPFSLLLSPSLFFSTTLPHLLSTLSVSLPAKESGNNGELLRTAMASQWGPLMRRQRTEDLAGWEATSNERSGDYAPDLQRAHTTLGKVGVSKEPQLLARDMPQSASNASNAAGRRVSEGSARSNTAVGTEEEVGERVTTEHDVKRQKAPNHRGSAGNRPREGGSTPKRGAHNQQEESRPAREKQAKLPTQEHMHKSGPRCYEQRHKEDEYHKSETKKQTDCHKGENIHINARANVCQGTGTRGGIPAGKKGEHGTKRRTKGEEKRGEAGKQHTRSKTRELDTTEGP

SEQ ID NO: 1021942 - protein, 265 aa, Homo sapiens
GSWVVNRHRGVTCWVSLTGLSLHLLILYWCFLKCFLEVARSRMQRIDHQRSLSPTSLPLSPPPSLPLSLSPPPFSASLFSLSLPPPPSHFLYSLPRFRTTPLSLSDLSPCYESGNQVDECQDTLDIPVAVHLDAPVDLNALTYGPHLPRPGGLLPPHLAREPTPLTYLVLREHSTAFRHPATSAPPSTHDALGLRVKELQRTKRSCETAKQARQTRDPVADLALKMSFPYKLVVDSTLLLARIPPHLPTSTEHPESQHHPHLPNL

SEQ ID NO: 1021943 - protein, 108 aa, Homo sapiens
MNEEEATKEDAEAQASEIMRACMAAPHVSRGAPSTVPAAVCVCYWAKLARACKLGTPFPPQRALLFYSLFPLQAQPMEIDLDGAGHLGLTSRSPYSYDLSQSHVFSLE

SEQ ID NO: 1021944 - protein, 284 aa, Homo sapiens
ILDEACTLLIPAALASFILAFGTGVEFVRFTSLRPLLVMGSLESWWSGCPPGMVWLPWQEPTAFLAPLAWDLEARCLTDLLVVKSACLMAAERVKAWTSRYFGVLQMVICIVACTAWALQLADAGTGTPISRRPCCGGDGSWLSHWAVLGAVSSCFVLLVSVSWLRHLYASFSSLTMLSSWASMQVSLPMLVGLVRCLWSRAVSPGSQSSSRRPAPPSVCGAADGAVRWCLPWARTGSSLLIAPYRSTWVLGRGLDRVLSSDSSVAPSYGDQSICSLGPDGVAR

SEQ ID NO: 1021945 - protein, 442 aa, Homo sapiens
  misc_feature (302)..(302): Xaa can be any naturally occurring amino acid
VLLVCMGSMVASVFGSGPGGESLLLALGVVRKWDCVFLVSCMVGDASSLISGVLPPCCRVPSAVLHAPRIGLGHLSQGGTHKAVFYVAAGLGRRPPVRLLVFDPVKSVFSSPPLLVFASPPIAVSSRPTNSGLLAHPPVAPRGLVRRVPDFLGFYRWCEDTFSFGPPTRSAGRKYQPVSHPPRERDLVWEVGPPSPGKPFGGVMAPGASSRTIMPWPSVCLAPATRPVGPQVTPPGGCYPGEASLGTGPLSRCGTHTCPTAGSSWVEPCDPGRFLEKKHSPKYYVMDRFHREELCVIAHGRXRGGTPPSPGATSPRGLTHLEAPHALVSSSLRLSNTASTPTLPSTLCETSRGSAHLALSHTSHLLFTSSLFLGMTHRNFGYTANTGLVEPPLGPPLALPTGGKETPGATQPHGQSTQRKERGPSTSLGSSLPPHSRPPPTT

SEQ ID NO: 1021946 - protein, 244 aa, Homo sapiens
MLGTSRVLASSLVRSACNLLLLRHGLSCIRLRRVTLAANEVYVLGTLVPQSRLRRGYLPRFPCELTCSGPPAANGRGRYRHTAFGQAVDRARRASGKTTYCLGMSESYLRALGRRVAVVEPRTRDNEGLAVRVCRWTVERRLGGGWGDRRQDALAPRGPTAAQLYCIGVPRKGQPRTRLAVAHATTPYRGHYTILLSTSPVPGRSSSTHTRRLAQHLLPNWRSGTYRLDCRTTYVDTHYLHRPC

SEQ ID NO: 1021947 - protein, 161 aa, Homo sapiens
  misc_feature (80)..(80): Xaa can be any naturally occurring amino acid
GLWHEEMKNQIIACNGSIQSIPEIPDDLKQLYKTVWEISQKTVLKMAAERGAFIDQSQSLNIHIAEPNYGKLTSMHLPTXLEAGFGGGGLLRGRRGMYSFTGQDQQANPIQFTLNKEKLKDKRKRYQKEGKNEKERKHRQPMVVLFWGEIGDEWSGMVWIP

SEQ ID NO: 1021948 - protein, 152 aa, Homo sapiens
  misc_feature (80)..(80): Xaa can be any naturally occurring amino acid
GLWHEEMKNQIIACNGSIQSIPEIPDDLKQLYKTVWEISQKTVLKMAAERGAFIDQSQSLNIHIAEPNYGKLTSMHLPTXLEAGFEDWDVFIYRTRPAANPIQFTLNKEKLKDKRKRYQKEGKNEKERKQHHVSLGDRVNSNLGPEKAGRDT

SEQ ID NO: 1021949 - protein, 180 aa, Homo sapiens
MNILGLVVFAIAALAVALSEQLVGLNGEPGYIRLSSISFQLRATDGFVVSLALTVGTVPVLAHQVFAGWSGNRVRERLRGLVGFTSCVPHVEPMYTLMMHALPWVTVQSSVSSLDTDTAHSYVSIFPPDKKTPPYAAFPWWGDNSDELARTWVPTYDHNWENRPFHRFPGLTILTQNMTD

SEQ ID NO: 1021950 - protein, 231 aa, Homo sapiens
RTKVRVHGLMLKSPVKTIEDFLRRFTPSCLTSGCSSIGSLAANKSSHKLGSSFPSTPSSDGMLLRLEERLGQPTSAIASNGYSSQADNWASELAQEQESERELRYEAESPDEAALVYAARAYNCVLVERLHDQVSVELPHLGRLTFELLHTLGFDSVRKRMSVVIRHPLTDEINVYTKGADSVVMDLLQPCSSGTPTPAQLHPSSGEEVLRNIPTQFLLLSKVIFINPFQQ

SEQ ID NO: 1021951 - protein, 209 aa, Homo sapiens
TYVLGTRLGCGNWPPLREPGGTRFPPPRGSASGLVLSPAAPCRRSHRSSYRREWRADQGAAGLPVRHFPCLCARGGPPEAGSPMPLWPEAHLQLYARPRRPPCGRRERMGEILCQSVALGLGLAAGKLGGRQGHPLVLGLEGTWVAAWLSGGFGGGDPSPSTSCHPFRESNCAWLLAVKQSKAGIFTGDGLLRASGTSLMYKICIRLAE

SEQ ID NO: 1021952 - protein, 182 aa, Homo sapiens
  misc_feature (127)..(127): Xaa can be any naturally occurring amino acid
YSSGGRTRLRGFRALAPDMQRQNFLAPNILLTLVLGGVRFGVAGSSFLGEPTGGVRDHWHAIPVLKRNGYWESGTDTACLYGAPGLRPYGEQVHVSREHWAAASRGAGSGLRPLAATLAPTPGPPRXPSSNSATPQGSSRPTPRVLQGHLHHLDQGVLEKKECLMSWKIISSLQCLKILGLA

SEQ ID NO: 1021953 - protein, 40 aa, Homo sapiens
YQVRSILVSNDVTHVSKAKELKDRHRDFPDVISGAYIMKY

SEQ ID NO: 1021954 - protein, 156 aa, Homo sapiens
MTDAAVSFAKDFLAGGVAAAISKTAVAPIERVKACLLEGWRYCHRQGMITARIKAIHQTAIYKNRGGGPVIPQRGRRGSSGPFQGGGKTVGQLVHQDYFPQPKVSINFGFQKINTSRSSWVVWTKRTPVCGATLCREIWHRVVPQGATSPVFGVPS

SEQ ID NO: 1021955 - protein, 111 aa, Homo sapiens
PRSAGVKAGSRPSPVLQQSASSFNMTDAAVSFAKDFLAGGVAAAISKTAVAPIERVKLLLQVQHASKQITADKQYKGIIDCVVRIPKEQGVLSFWRGNLANVIRYFPHPGS

SEQ ID NO: 1021956 - protein, 105 aa, Homo sapiens
LCTVGSSHEYSCLVYGLKSRISSLLSLVDFKSLVASLSAKAPECVCVPVSNNVRRWRDQPNLGVHCDPCSHADLCFLPSHLSCSREVGLDVSISVSTLCALSHNF

SEQ ID NO: 1021957 - protein, 325 aa, Homo sapiens
DLTRVIMPLEQRSQHCKPEEGLQAQEEDLGLVGAQALQAEEQEAAFFSSTLNVGTLEELPAAESPSPPQSPQEESFSPTAMDAIFGSLSDEGSGSQEKEGPSTSPDLIDPESFSQDILHDKIIDLVHLLLRKYRVKGLITKAEMLGSVIKNYEDYFPEIFREASVCMQLLFGIDVKEVDPTSHSYVLVTSLNLSYDGIQCNEQSMPKSGLLIIVLGVIFMEGNCIPEEVMWEVLSIMGVYAGREHFLFGEPKRLLTQNWVQEKYLVYRQVPGTDPACYEFLWGPRAHAETSKMKVLEYIANANGRDPTSYPSLYEDALREEGEGV

SEQ ID NO: 1021958 - protein, 358 aa, Homo sapiens
  misc_feature (63)..(63): Xaa can be any naturally occurring amino acid
  misc_feature (358)..(358): Xaa can be any naturally occurring amino acid
IEQVSQLSALLWMHSVDYHRLAVQILDELAEKLKRRMREASSRPKREYKLLKPRVALLTLVEXCSSPNWVASPVDPQTPRSHGFIVFPIFRQDPIRSPLAGALPPLDQPSCKALYDFEPENDGELGFHEGDVITLTNQIDENWYEGMLDGQSGFFPLSYVEVLCAPAAVTHPCARPGPPSTLAGVPPAGSPAFHGAPAARAVSEPAGATWAPALEVLPEQDPTLGWGGLSGWVGMPVLHIALTPKGDRLPFPTPWRQPPPPLPNFSPSWQRRGNTKVLLETLMFLWGSPNSVLTRRGPEPTAYPRVPQLNRMGSRVPWEWLRDRTLVLNPSPAGAGDRAWPYSRPMSHDSKRTPSLKX

SEQ ID NO: 1021959 - protein, 83 aa, Homo sapiens
LTATVVKYDHVIPQNKTIRKDSIVPNEEMEKDETVSDCSPHIANIGRLVEDEEPAKVRSTLNEIYLGRTKDIVNELRSVQTFC

SEQ ID NO: 1021960 - protein, 167 aa, Homo sapiens
WSHNALTSIETWYFGRWRPHLVYLWGSGSWVWWSGSPIKKGGDGIQGKIQGWWGIPFPRLVESEGESRGRTAITSLTSKVMLWLPDQQIWLWHHEPREAAFTRQMEKDETVSDCSPHIANIGRLVEDEEPAKITSTLNEIYLGRTKDIVNELQVCADFLLTNPNKKL

SEQ ID NO: 1021961 - protein, 209 aa, Homo sapiens
MSCVLCGFLRVCRLRRCRASLDPSSRWLSLLVFTITCSCSRLFSGLFVCDCRTSGRPARLPRSVILLILLLPVSRFVCVVGVDRSLPPFSRSSTGVFVGDLMIVVDCCSVSFAAPVECTLAVLDIMGSSLSGPLALDRSSAAPSPSLVAALSLPSAIQGRSVTFMRVPRASLFMTRCTQHVLSRPDQPRFGRGLPAPPTVFQPLLSSAP

SEQ ID NO: 1021962 - protein, 209 aa, Homo sapiens; identical to SEQ ID NO: 1021961

SEQ ID NO: 1021963 - protein, 43 aa, Homo sapiens
MEETRTTQSWKAGGRKDTIQLTLQIQNADLSQLVQWDVTSNFF

SEQ ID NO: 1021964 - protein, 45 aa, Homo sapiens
PWQKYRYGDNLAHSCSSVSDFNFVTSHAGKETVDSDFDFSMVSMS

SEQ ID NO: 1021965 - protein, 41 aa, Homo sapiens
LAFMEADSVSSKGLPRPLQHVFGSGTPDPAPARDHRSRISH

SEQ ID NO: 1021966 - protein, 135 aa, Homo sapiens
MSRWLRAGGRRRSGVELAEALAGIQMVARQVGQHWQRFDVIVSPTLAQPPLPVGALRDDEDPAADFDAQCRFTPWTSLWNITGRPAMSLPLHNTRIDGVELPIGIMIGGRLYDEATLLALGCALENTRDCERSCR

SEQ ID NO: 1021967 - protein, 147 aa, Homo sapiens
MAICQFFLQGRCRFGDRCWNEHPGARGAGRSDGRSRGSEPSGNNRRGWNTTSQRYSNCQSRPSSFSKVHTMVGAAEIKKSHISVLLILELQLTGKEGLGLSENPVCFTYVLMSRTDEKEHFWNDIVTDMRGLGNHQGRWMFTGIFTQ

SEQ ID NO: 1021968 - protein, 150 aa, Homo sapiens
MGLPPKTGRNALSAEREKRDICDPPWRERKCSRERDPTRDFSHRRPPGLYTREPRDSRETQIYVFLWRETFERCFSLRTISAPLSLKYISTKSPVILGATAGAHLIDVCCARSLEAHNDIVIEKAHNVVGDSIYKGIEIHSDVHRDSYKR

SEQ ID NO: 1021969 - protein, 53 aa, Homo sapiens
MRFMLLFSRQGKLRLQKWYLATSDKERKKMVRELMQVVLARKPKMCSFLEWRD

SEQ ID NO: 1021970 - protein, 320 aa, Homo sapiens
MYRPNGLRVAEHIRNGMITNGWGKGVTQTIGYEWSERSTEGELKLEFVGSPLRKTMICSTSIELRRSCLEDLLLGPNEVRTPVLAPINSTQCGTPYQVPNNSKPGDHDLCILGCLLGNGCRKGPNPPWDALKGKRTGEEHRNQGGLGKGRWLPKPLWERVPFEYSKHPSWALIGAPHAGASYKGARAGARAGRPQTLSWEHLSSSQSFLFPGSVAALAAPHHGNIVTFGAPNHAVTLWVSPQEGPPYPCQTIYTSVGALLAQVTPDARAANNAAATSCNGAHMSHKTPCQRQNTNTPADPNCCARNALTQHRHNQPVTTL

SEQ ID NO: 1021971 - protein, 646 aa, Homo sapiens
  misc_feature (238)..(238): Xaa can be any naturally occurring amino acid
  misc_feature (253)..(253): Xaa can be any naturally occurring amino acid
  misc_feature (288)..(288): Xaa can be any naturally occurring amino acid
  misc_feature (323)..(323): Xaa can be any naturally occurring amino acid
HEIRRPLSSGCLFNTLRRYIHKRCAAAPKRREAMATVLRSCSADEESDGKWGEGRPTLIGGERLDATKSELSLAQKTQWSRIIETLFLAVQGSQNEEGKCEVTESDVSVDGEASINNRKGKLIFFYEWSVKLNWTGTSKSGVQYKGHVEIPNLSDENSVDEVEISVSLAKDEPDTNLVCLNARKRGVYQLLMMKPLRECTSSTLIDMQTVHPHVDMYSINLHIEVRRWSGRITMYVWXEREVICEKLDVRLQXAYKSLESLSDKPPGSIEHLIEKITLLRHIYGEYSXCCTREQPVSLIGSAKKGGLLLEVAFSTNHIEPELXRGHLYRPNGLRVAEHIRNGMITNGWGKGVTQTIGYEWSERSTEGELKLEFVGSPLRKTMICSTSIELRRSCLEDLLLGPNEVRTPVLAPINSTQCGTPYQVPNNSKPGDHDLCILGCLLGNGCRKGPNPPWDALKGKRTGEEHRNQGGLGKGRWLPKPLWERVPFEYSKHPSWALIGAPHAGASYKGARAGARAGRPQTLSWEHLSSSQSFLFPGSVAALAAPHHGNIVTFGAPNHAVTLWVSPQEGPPYPCQTIYTSVGALLAQVTPDARAANNAAATSCNGAHMSHKTPCQRQNTNTPADPNCCARNALTQHRHNQPVTTL

SEQ ID NO: 1021972 - protein, 115 aa, Homo sapiens
EVAKMATALSEEELDNEDYYSLLNVRREASSEELKAAYRRLCMLYHPDKHRDPELKSQAERLFNLVHQAYEVLYQIPGRPALRCLVRGLVRPSGYQEQSQQDRYMMDKLRKEPDF

SEQ ID NO: 1021973 - protein, 306 aa, Homo sapiens
MVAKMATALSEEELDNEDYYSLLNVRREASSEELKAAYRRLCMLYHPDKHRDPELKSQAERLFNLVHQAYEVLSEPPNSHGSIYDIYGNERTGKLERTGEVVDKDVRTPADKFDEDVSTRLHETRETRRGRFAAANQSQGERSALDVDCHRPFCIATDEDVCTDVLRQVAFRHDFEHLITMQHNPRSIEAPLTATDTDILSGEPLNPEWNMEEVPLTPRSDAVTSRQSGWRRARNQETGTTYTAAFVSVLNAASANLTPTMPSATTTPRSAVFTTVDIRPGLTTDHTRHLHKNTAQHRTGERYPAP

SEQ ID NO: 1021974 - protein, 219 aa, Homo sapiens
RAKVERSKPRRRWKGWRTHLNMWNPNAGQPGPNPYPPNIGCPGGSNPAHPPPINPPFPPGLSPPQESHGSSSPGGPHLCKQVSGCNVVLPLIHVPESSVILVRHGGPAVIVDKKMQKKMKKAHKKMHKHQKHHKYHKHGKHSSIIPPPLPAVILTEYRPWTLPSSLTSSALPSSFRCHVYWGNVALVLPTPLPPPEPHPAVETLMWLGEWEEDCHGLAI

SEQ ID NO: 1021975 - protein, 168 aa, Homo sapiens
MAIAAFPPRWDPTHPVTNSQGIQDAKPLGPYRSSIPIDCPWNPSCESLGSWHGYGPAVIVDKKMQKKMKKAHKKMHKHQKHHKYHKHGKHSSIIPPPLPAVILTEYRPWTLPSSLTSSALPSSFRCHVYWGNVALVLPTPLPPPEPHPAVETLMWLGEWEEDCHGLAI

SEQ ID NO: 1021976 - protein, 46 aa, Homo sapiens
QNAITKSCLVAELVVRWIKTPPFKISVRLRSCSSRRPPGEAPVTGV

SEQ ID NO: 1021977 - protein, 346 aa, Homo sapiens
PSPPDRKRFNGGHEPWEAGLGSGATPGARAMDVRRLKVNELREELQRRGLDTRGLKAELAERLQAALEAEEPDDERELDADDEPGRPGHINEEVETEGGSGAGGDRCSHLAARGCSLPLRSPGGYSGPGRTIYAMDNITKAEPNSTIPKSSNKKTSQATRGDHLELEQQQAYRPEMTDRDEARSTQPASSRPEGFSTQARTGQQFQSRKEAFMKKTRGTGGTFDAPAEDRRGRSPLLLCSPRMKMTLTDNHGRHIDTYNCERSLHGWTEIASKWLSGPLIDVLCSTLLGTRRAPLSKRKRGPERAACIAFETGKISYRKSTGEQHLRDTVSLGPQLRYTQADDWDP

SEQ ID NO: 1021978 - protein, 227 aa, Homo sapiens
  misc_feature (103)..(103): Xaa can be any naturally occurring amino acid
PSPPDRKRFNGGHEPWEAGLGSGATPGARAMDVRRLKVNELREELQRRGLDTRGLKAELAERLQAALEAEEPDDERELDADDEPGLTRAHQLMECLMLHAMPXLQPWDGYMPWATAAPLASTSTTTVPTNYGSYWRYNTGPLYPTATPHRTEPNPQTQLQPRHSAPLPSTENQTNRPGPARTAHTTGNYEPRGHTPRRHKRKHHKITKKPPPTPKEPQRAQATHTTQ

SEQ ID NO: 1021979 - protein, 100 aa, Homo sapiens
MNILQQPAGKRGTGEQEQGSPRDEMAHPRAQRKRNLSEIDGKTQTNKGQRYPISDKVKHTTENNPRANKCNRKDQQHNTHTTTHRTPGPEGGIETPERPY

SEQ ID NO: 1021980 - protein, 55 aa, Homo sapiens
GSGRSKARLLESKGFSVGQKEELQKSLNILTAFQKKGPRKRSLKRLSCDFARSSV

SEQ ID NO: 1021981 - protein, 367 aa, Homo sapiens
MIGPKDFFPLLDLCHDMPRDTLHLIIATRCRDADVMSASTAPTENAGILEQSRIPHLHTYFPSYPVQSHPYAVPHEMKKELLSSLTECLTVDPTQCQTSGGSCTLSTCHSPAVLLEHLTHAPGEQIPKKVQKSLQETIQSLKLTNQELLRKGSSNNQDVVTCDMACKGLLQQVQGPRLPWTRLLLLLLSLRMIGFLCHDLKVTPDSFTGPPITGRWLRIILAFSTLHKPKPYRLVDTAPNKWHSLNIHRKPKGFPFGQTGGPINRLGTLGGPFWERAGKLESEPLGPPGILRAPNLAHRGAAQLAAGLGSHQCHSQTSFLPTVPLTLRGLGDSLTSLSQKDTDPAYPDSVNHATPLSRAELPLQYHQ

SEQ ID NO: 1021982 - protein, 243 aa, Homo sapiens
RAPRIRPRDGPPPPAPREARTGQCAGGWVLAARADGTKAAGVCGRFPRLVDPGRARNAGWQGNMADAEVDYFAKESNMIEKWRQESHWPEEDVCRKYKTLKNFLSKPESKVCISLEHVLSGPPFAKRSSQIRLNCKGQTHVYEPSCTVVQDSSERETIGDYIMDRFHLILDKPSNPSSHEVVAWHSNGILLGGEDQGTGGTLEYQVTGCYIVCIEAMPRRLVEVYNRVQAKEYCGDRPAAQCY

SEQ ID NO: 1021983 - protein, 167 aa, Homo sapiens
MTPNTTPSDYAETDGGGGLDDSESRVKTLTTWTPDACAMQPEQRGTPGNSTWYGEATSNGAKEYPGTMVGPPQGARRDRDIPPINSTTATDMTGPSGAPPPKAVQKPHTENRGGTSPKEHCRRTPTDTNDRPTPHTTEPHPRRRKDGADTDRGPKQGPRKHQENEPN

SEQ ID NO: 1021984 - protein, 310 aa, Homo sapiens
PISKGSTHPLTPSRHHQVSPSLAPSTSNNQLFAPGAATEPGARAAAGGSGAKPSDAASEAARPATSTLNRFSALQQAVPTMKAQIIDVLVQMEYALSLRTEGEKTLETEETAYESGVNGGRGAVGTGVDRCAEHLATKRRLSGRNVEERSRERASQPEGLRKAATPSRRHSGAVGGTRRESEKLGLAPSEPPEVRLLSEEDAETKKIQGLVSIGEHVISYLGVEHVTPVKIQGGAGKEDWDVKRASVSFNPPITDMSRSEDSYKNMRRAAVDQWRRGKPVMSAKTWLPREGASAGVGASMAYYGPQAITQ

SEQ ID NO: 1021985 - protein, 434 aa, Homo sapiens
QNWEEELEAGGSPRSGRRLEAAHRVPARIHDLTGPREPALPLGCPGSVWDAQCSQCLAVAVAWRAAVSLAVRGSAEEREPAAALCCCAALAVLCVNVCMFLCACGLLPSGMWLCCGSTSCQVVMWPLCVVLCLVQNLGRNVKRFGCMVQCGLPLKVEAVGVGPWSASIGHLLGEVQKRYPTGERPRQQYGLPIHTGCALNGLWLFTYITGISRQWLDGSDKRTECFRSFERRVEPHWGGTTAIENCARHWGAPGAFPFSEPGRIAGGKVVRFIPREKSYSGGNQHWETLGGGIRFPICFGVPHMGSRQRPRGQDETKAKVPYSYHSGLGKCFGGPQESADRNRTAKIPPSVEWGDLFPKHGLVQKHTGGVEPFNPKQAIGLPKGSPTTGISWGTLSDVWTSDPKGKHKRKSTGPGRLHVDCDNYSDNTQLRERT

SEQ ID NO: 1021986 - protein, 238 aa, Homo sapiens
QNWEEELEAGGSPRSGRRLEAAHRVPARIHDLTGPREPALPLGCPGSVWDAQCSQCLAVAVAWRAAVSLAVRGSAEEREPAAALCAAACGREGQFLGLGLLLQLGWRLPAQSQGPWVGCWRLENIKFVRSVIARVERGGLGPLALYGGNFPRKAAKGALAAEQAFVTGYRQAGGGGCLAEGDPGHLGFPPGPGSSDGDGEGAIQNLREQEHADPHFGPGPRAGKTTILFKLSWAVGDH

SEQ ID NO: 1021987 - protein, 204 aa, Homo sapiens
MMGHGSDYSLSEVLWVCANLFSDVQFKMSHKRIMLFTNEDNPHGNDSAKSQRAEQKPVISEIQAIFLDLMHLKKPGGCDLCLLCTEISSSIEEDEDSGFILRNAEARRLLGRFASSEYPREMVAVMRLKVMLYITISSDLCGHFLSWSRRTLMPHRIKLYRETSETSDKLLIPDFNYRVQAVLVLLSRYQEGLEILWESSRIIT

SEQ ID NO: 1021988 - protein, 275 aa, Homo sapiens
QVAGRLGLGCPLHLHVFAVVSAMLPLLRCVPRVLGSSVAGLRAAAPASPFRQLLQPAPRLCTRPFGLLSVRAGSERRPGLLRPRGPCACGCGCGSLHTDGDKAFVDFLSDEITEDKNNFRSIKTFPKMSGGWELELNGTEAKLGAESCRGKKSRSLFNINNSIPPTFDGEEEPSQGQKVEEQEPELDINSQFPWLKFYTNDDGKKALCGTVIIQRMRLARRTRVRSDIFSIGKLGFSPLASLDGRYLFSLNTDFWEVYMTPRVPAGGGDNLGERG

SEQ ID NO: 1021989 - protein, 354 aa, Homo sapiens
QLTASVGTNDRERGNEFTRNQAGSTGGGKPEKENEEKDKYVNLAQTQINFTCGLVEFHVPSNGNPFTVHIPCTYMESPTQAEAPYCAWLLTCVSEKIIQHLRHVTMMFPALVLLGPKAAPLDGQSVSPLRFPSVDGRSQADEPLMAVGIECASCEAYQLQSCCTCAGCTVPAHNIWPLWITHCGRGNACWACASEWLPGTLVLLIITVLWVISDMAQTKEAIVNVVPKLPMSIIIVGVGQARVRRHVVELDGDDVRISSRGKLAERDIVQLVPFRDYGDRAGHTCLSIGPGPGPPKERLVGQKDPCTNLVVPSLEGPAISHTVYPTRQVKPLHTSGIRKESTHTTQAKENGKKK

SEQ ID NO: 1021990 - protein, 38 aa, Homo sapiens
MRIGFPFNHIKVMVSNSPLSVGRLLEVDVGIAQVAAGD

SEQ ID NO: 1021991 - protein, 89 aa, Homo sapiens
IELRYHMRLLHMVGEERYIDNDTEEEFYLRRLDAGLLVYQHIGYIMAEICNANVPQTRQRVHQILNMRGSSIKIVRHIIKEYAENIGDG

SEQ ID NO: 1021992 - protein, 378 aa, Homo sapiens
AAAAVSESWPELELAERERRRELLLTGPGLEERVRAGVGSCRRGFHPAAAALLGSERLRELAARRGLAWLQGLPQLHSLVLRRNALGPGLSPELGPLPALRVLDLSGNALEALPPGKAWAPPSRRAFRSCRASTSAANRLRELARPTWRAAPRALQSLKLTGQLPRTPFPPSSFAPAALPLLSELADVNNASENSAPNRPTGLAQDVGPLEQPAERDPLQSLRDCPKLKEITFPWGTRLRDKRLEKMVSGADQIILEVPARREAVVVGRGKARPRGSETRKKSREERGGRRKHRREGCACRGAVIWRSGRVCQGLHVSKTRNYDSQSEPEVREFGLNSGACEDTDRNPQRSTGTVTDFKRVTSTDANRIRKKSANTRE

SEQ ID NO: 1021993 - protein, 182 aa, Homo sapiens
MAQGVLEYKDTYGDDPVSNQNIQYFLDRFYLSRISIRMLINQHTLIFDGSTNPAHPKTHLAASDPNCNVSEVAKDAYDMAKLLCDKYYMARPPVEARGKDPKAGNPKLPQAPKRSQRAKPRKFHKWVYVPSHLYHMLFELFKNAIEGDLWKATESSLILPPIKVMVAMGEEDLSIKISDQGG

SEQ ID NO: 1021994 - protein, 166 aa, Homo sapiens
MAQGVLEYKDTYGDDPVSNQNIQYFLDRFYLSRISIRMLINQHTLIFDGSTNPAHPKTHLAASDPNCNVSEVAKDAYDMAKLLCDKYYMASPDLEIQEIDAAESKQSIHMVYVPSHLYHMLFELFKNAIEGDLWKATESSLILPPIKVMVAMGEEDLSIKISDQGG

SEQ ID NO: 1021995 - protein, 285 aa, Homo sapiens
VSREKTHPESSRCAGFYTTIMLSFCCPCMIEKVDSRGSEMPQLDSLQTLNAMLMLLYGQKELNGLPPQPYWCFYHCMRGCFHDGKLSEVEGSSGLAALLLPDLQCKFSHLLLAALHAAASAPLNSFLSRNIRTGPARPPPCAQPGPLTTWLLRPTLPTAAQHAPPTTLPLVAQAPCLTSMHTQAKQTPDPHNMPRTNNDQPKNHTHQEGQNQAERETKYHSTQNAHPRRQTIERHRSHTQTKQPPEHHNTQHTRPSYNKRHTNKPQQTHHMTHTRHTQQHHRQTT

SEQ ID NO: 1021996 - protein, 112 aa, Homo sapiens
VSREKTHPESSRCAGFYTTIMLSFCCPCMIEKVDSRGSEMPQLDSLQTLNAMLMLLYGQKELNGLPPQPYWCFYHCMRGCFHDGKLSEVEGSSGLADPSYSLTCSVSSRICC

SEQ ID NO: 1021997 - protein, 173 aa, Homo sapiens
  misc_feature (122)..(122): Xaa can be any naturally occurring amino acid
DRAEEDMDEEAQAATCNHTVMALMASLDAEKAQGQKKVEELEGEITTLNHKLQDAVCRGGVTEKRKPGLKRENRGQEVLPQLPGLQLRCGAQLLMCAAGPQRSVAVRSQEAGTSVEGPSCSXFRCEHSLDLIKFERVNGATRLAGEHGVAGEGPLSRSGGAMGQSWVWDTVGV

SEQ ID NO: 1021998 - protein, 258 aa, Homo sapiens
ARLFPFGSEAFGSSLFRARRPDPSRTRSSDPSVSAGLESRCLTRCSRLLLRGASSLPCPGALTSGFFPRALICAALCGVAQEVMHGWRVGGALGGGGVAWSCGGKRAGTARPPPARRAAQTMSPEEWTYLVVLLISIPIGFLFKKAGPGLKRWGAAAVGLGLTLFTCGPHTLHSLVTILGTWALIQAQPCSCHALALAWTFSYLLFFRALSLLGLPNPTPFSNAVQLLLTLKLVSLGSEVQDLHLAQRKEMASGLQQG

SEQ ID NO: 1021999 - protein, 232 aa, Homo sapiens
ARLFPFGSEAFGSSLFRARRPDPSRTRSSDPSVSAGLESRCLTRCSRLLLRGASSLPCPGALTSGFFPRALICAALCGVAQEVMHGWRVGGALGGGVRGLELRRQAGWDCSAASCPASSSGPGLKRWGAAAVGLGLTLFTCGPHTLHSLVTILGTWALIQAQPCSCHALALAWTFSYLLFFRALSLLGLPNPTPFSNAVQLLLTLKLVSLGSEVQDLHLAQRKEMASGIKQG

SEQ ID NO: 1022000 - protein, 209 aa, Homo sapiens
MSGAAHLWCQRAATADADARPWRRVSNMVQQVLECTLRHSVARSGPSRVRVLVVHNPCGSRWSWAAPGAPAVVALVLMLLKDASVQGSIRFLEDQVMMMGSARVADAAACSHRSAEVLNVLPPRPRLTPYPCHYAVREGFLDTLVVLHRAGARLDVRDAWGRLPVDLAEELGQSRCRTGTCRCWLRGAPEAVTIARNRCRGRVPSDIPD

SEQ ID NO: 1022001 - protein, 119 aa, Homo sapiens
AQYPKQYLQLRILPGRPQPIGMAQEFVNCKIQPGKVVVFIKPTCPYCRRAQEILSQLPIKQGLLELVDITATNHTNEIQDYLQQLTGARTVPRVFMGKDGIGGCSDLVSLQQSGELLTR

SEQ ID NO: 1022002 - protein, 445 aa, Homo sapiens
  misc_feature (157)..(157): Xaa can be any naturally occurring amino acid
  misc_feature (171)..(171): Xaa can be any naturally occurring amino acid
  misc_feature (198)..(198): Xaa can be any naturally occurring amino acid
  misc_feature (279)..(279): Xaa can be any naturally occurring amino acid
VRSLGRSCCVHLVCLLSNSLLVTPLLFCGLRLMLLLYSLFFRAVVVARRVGFVLAPGPSAGSAPGEKFLCRGPAPVKWFGARAAEELSREPAQRVGLRREAPPRAKSITKFFPLFFGAHTTKICVRPLCLILSLLLCVEDALFLPRCGAKPVLSVVXPLSEVLRAIIGVLXFFVSAHPPPTAHTEDGWERGWWERASXPLGLKKATRPLVVAPGLVYALGVEPLGVFSTTKRMVPHAVAHIWRRAVLRDLHSVHSTSPRFCLEILVWRPPTLGVSHTGXGALLTNSCPTPVSPTLCLGVPLWVWERATLGPHRVITQRESLLCVGHTVSGEPHPHPPQPPSCPERPLWGPPPLGGPPHSVWRPLNGELPHSVALLGVHTLVNAWVKGSGRGEGEEFSTERPAEKNIGLALSEEKEIIERRGLVVEISVEKEDRVKEKKGRGRKSN

SEQ ID NO: 1022003 - protein, 95 aa, Homo sapiens
MDPQDDSESLSGKSKNILLVITKPDVYKSPASDTYIDFGGSQDRRFIPASTTQQLLRNPKFKVKLSQTFKKTHRLQLYKKESAEEEVDKPVVKFR

SEQ ID NO: 1022004 - protein, 72 aa, Homo sapiens
RTAAIRVSGGCGRLVFLGYTVGGSEAGRRGATTGLRNHCDDGAGSDLKKMSGFRRGLEMLSNALDVGGKAQY

SEQ ID NO: 1022005 - protein, 169 aa, Homo sapiens
AVPEITMESAAACQGAWGPSDWKLHIGTLPPVPQGPRMPITSLACTAGIWRLPQSSSEKQAASLIDTSRWTASHLHGIARSGCGLAILVEMAMLYSIRPLQNDVTMGRDDEKMICSAECKAGSQGPPLWLADGLTGEAGPRGHIASIAQVAHRLSLSGYTIKGSCHRYQ

SEQ ID NO: 1022006 - protein, 69 aa, Homo sapiens
LLPGSQKRAKEENISCDNLVLEINSLKYDYTITLKEEMLVTEPRVSWSSPVQQYGFPCLTPSRFVCFRV

SEQ ID NO: 1022007 - protein, 30 aa, Homo sapiens
MPKHEFSVDMTCGGWLKLSPRGPKKLGGVS

SEQ ID NO: 1022008 - protein, 169 aa, Homo sapiens
MAVSGEAGAIKEEHVIIQAEFYLNPDQSGEFMFDFDGDEIFHVDMAKKETVWRLVGLWRFASFEAQRALANIAVDKANLEIMTKRSNYTPITNVPPEVTVLTNSPVELWEPNVLIWFMDTFTPPGVNVTWLRNAKPVTTGVPETAFPPREDHLFRKFHYLPFLPLTEAA

SEQ ID NO: 1022009 - protein, 37 aa, Homo sapiens
HFAQLVLCLFHCDAVNSKTALGVIDQAEMFTCLLDAG

SEQ ID NO: 1022010 - protein, 336 aa, Homo sapiens
MRCPRVRMVQVQGEVARPLVGWMCRVRMVQVWGEVARPLVSWMCGVRMVQVRGEVTRPSVIWMWHVLLVITEVGMCNQARPAASRPSRESDDILRPQITMPPCADRRAYSTIPTLPPRVLTLTLYTGGTHVHTTCTHGDIHLTHTRERQGCHWNAKKIEKDDIAQIQAHRHFAQHVAVPALQRQALVGGNEIRVQGQTIEDRPCDHDPMPGNASPETPTAAPPRSPLHANLARPGRGRNHIGTTTARTETTPQHHGYHEQNDTRPGHTDERDTHNDRPGGKGNPATQDEAHNPQRRRHTSTTRPPRHNTTGTRPHRNAPRPPATDHAHTSGPGHST

SEQ ID NO: 1022011 - protein, 57 aa, Homo sapiens
SLRVQHRGEEQLTANAAAALIPAMLGGNAELVCAPGCKPFPSHDATHSRSLGQTADT

SEQ ID NO: 1022012 - protein, 192 aa, Homo sapiens
MFLCSCVCARGFVYALVVCVWCRPPSLLGVPCGHSPFPDLCLLSSSLLESGSFQGLPGPLFIWGPWHRMSSFVVCHVAGDLHAAISPALVRRSPLVLLLWKHSHTLIIEEQNFFGSCNVQILMSKTLYSEATSLFIKLNPAKVLTGRLLVHSHLIFAPPQIEASCPPNTLLPPLLDPCREKTCPTVTFRTAF

SEQ ID NO: 1022013 - protein, 102 aa, Homo sapiens
MGERREPTWVPLVKTPVDTTAEMGAIIYKERSFCAREGTHLLRKAIFFPPRAHTSGHRRKNFSRESLYKGPTHGESKMSLYKHSVILPTSDDTSHTEKGDII

SEQ ID NO: 1022014 - protein, 73 aa, Homo sapiens
ELSELPYYLKLVWLPGSSLIEREEYGIGKKNVTETIELKVNLDEDTAFVLYGHLSSQSHHKLGIALLSVDTDA

SEQ ID NO: 1022015 - protein, 48 aa, Homo sapiens
TKQLDIKQRLTLLNSEHTLDLPPKPITIPELPELGTDDAGEEWAHAAF

SEQ ID NO: 1022016 - protein, 102 aa, Homo sapiens
  misc_feature (44)..(44): Xaa can be any naturally occurring amino acid
  misc_feature (56)..(56): Xaa can be any naturally occurring amino acid
CTIYAADKSPYHAQTSSCWELVEVYFFRKLKYTKKVQVVTFVQXCCYMGIRELATXEGLRAFPRSQGQLSHRSLWCMVHVCPCTALVVPAPAPFTALGYALT

SEQ ID NO: 1022017 - protein, 161 aa, Homo sapiens
MALAVSTVTKTRAARTTTSDGTRTARTTTVESSFVRRSENGSGSTMMQTKTFSSSSSSKEDGQHLRAGGPGQPMGRQPGGCFEKRLAEKKKELTEGAESAQELSLQARKAIDLSRWRTEGAGESPGGPRAAVQRYNRFRGPQRQQYQADAGWTGGRAKTRG

SEQ ID NO: 1022018 - protein, 40 aa, Homo sapiens
FHDGTGLYLIYLRRVSAVQQPSEGVGGGRCSEISAELIRY

SEQ ID NO: 1022019 - protein, 121 aa, Homo sapiens
MQNACKGCPVGGCSQLESNPFGEPRILCFTLKTRREVWLRNCLSKHKVDELTAFKSQENTFSLTFRDISGPFLGGLGPIAKNHRYSMSFLLGVRKLGEGIEFYNSNNLAVFLVCKYFYTIR

SEQ ID NO: 1022020 - protein, 535 aa, Homo sapiens
GAAVVEGASRSRSELPTRVLPAEGWWWERSGSGGAEPGPVGRVGAWAGVPGLADGWDGAAPVSCLRTRLAGLSCSKMIDKNLREGRRRRRLREGEVAAVVVLGSSVEEHQSVKAGMTDSSTRMGYSRGRHMPAVPGRVVYSNTIQSIMAILSKPCGNPADLTFARAPPELDERQARYLHWSCSRRVSKACSLMTCPASSGGSGLTMVLQACFGRSREYQLNDSAAYYLNDLERIAQSDYIPTQQDVLRTRVKTTGIVETHFTFKDLHFKMFDVGGQRSERKKWIHCFEGVTAIIFCVALSAYDLVLAEDEEMNRMHESMKLFDSICILQVVHRHVHHPLPQARRTCFEEKESHPPRLPVTHSVFPLMLQQGANKYDEAAQLHLRVKFEDLKKLLTTPKEIYTHFTCAHRRHKNVQFVFDAVTDVIIKNNLKELRPLLRGSGAWRDGPPPTLYPPSPEDDGAQKITLPACSPDAFLLLSLFVSGPPVPSGPDVGDGVALGLPVEALPLLRMRYWLGPPFGAQSGLPLLALLTEWDC

SEQ ID NO: 1022021 - protein, 240 aa, Homo sapiens; identical to SEQ ID NO: 842924

SEQ ID NO: 1022022 - protein, 164 aa, Homo sapiens; identical to SEQ ID NO: 842925

SEQ ID NO: 1022023 - protein, 240 aa, Homo sapiens; identical to SEQ ID NO: 842924

SEQ ID NO: 1022024 - protein, 212 aa, Homo sapiens
MCRSRVGYVSRLVQKNSVEWQSSGRWTLTREGRVKVGVMRAAVCIASLVVHLIDPDNEVDDSCLSVIEYKANCQRSSVEPMLPSASHLCLERIKCMPVILEASNIILVVKSSVRGVQIPLQLLRGRGPTSHGMTAFVTQPVRVLTGAPSKSKILSEEPPVWSRVGMLCSDWKVGACWVLVSLPAEEVELRLRARRCLLPSVQMLIKDDSDTE

SEQ ID NO: 1022025 - protein, 223 aa, Homo sapiens
MNTSPGTVGSDPVILATAGYDHTVRFWQAHSGICTRTVQHQDSQVNALEVTPDRSMIAAAGYQHIRMYDLNSNNPNPIISYDGVNTRTSASVGFHERRPLDVHGRGEELHSQDLGPQVPEPAVPRRIFQVNAPINCVCLHPNQAELIVGDQSGAIHIWDLKTDHNEQLDPLSPQVSITCAPTHPAASSLARLPLRTGKTAAVWNLRGGIGDEVTQVIPKTKIL

SEQ ID NO: 1022026 - protein, 254 aa, Homo sapiens
MNTSPGTVGSDPVILATAGYDHTVRFWQAHSGICTRTVQHQDSQVNALEVTPDRSMIAAAGICDPVISKSPELWWVDLRHSQAFRFSRVSRGYQHIRMYDLNSNNPNPIISYDGVNTRTSASVGFHERRPLDVHGRGEELHSQDLGPQVPEPAVPRRIFQVNAPINCVCLHPNQAELIVGDQSGAIHIWDLKTDHNEQLDPLSPQVSITCAPTHPAAQLPGQPAPSPGKTAAVWNLRGGFGDEVTQVIPKTKIL

SEQ ID NO: 1022027 - protein, 60 aa, Homo sapiens
DAVGPRGKHIRHVDGLSPMGTNIPPQKDAEHTESHMSCYVHMKLQRSSYDRSSQSPDSSS

SEQ ID NO: 1022028 - protein, 102 aa, Homo sapiens
NTKAAQKRREDRLELLKLSTFALIITPGDPHLVISSGCATRLFEALEVGAVPVVLGEQVQLPYQDMLQWSEAALVVPKPRVTEVHFLLRSLSDSDLLAPLLC

SEQ ID NO: 1022029 - protein, 60 aa, Homo sapiens
EWNTGVEKRRLVDREIYSKAPFASNISQHSVNPKQICFMIDLPNIGTHLTSSSQSIRNTD

SEQ ID NO: 1022030 - protein, 377 aa, Homo sapiens
MAGMMKGIRWSCPCHRLHQPDEVLTGEGTALPHPGISGGHAPDVGRPPGCRCVPIGPGSRRAQKVSPLPFLGAVLGPFPPFMAGPEGTTHEPPHESTRSALCSWRRHSRVESWSQPQPGTPRWSRVVSALNRIQGPGLILLGSPITAGLIFPKTHFVWEGVGPRCSAAGAARSGTASGGNKWRPPLMYLYGFSPMALADTQPSTSFLQTRQSPHLFLTFQQLPQPKAGSQRPCLYKSVLRAQFQFRYQTRTGTSPKGTSPGLPSPPKPARQLTQQPTHMANTQHTTPHLHQHCTTDAEPATSRNQHTPHGEAARKTTETQGENPPRNGPRHMAPPGQSRLTPAPRPQRAHPHSPAPRAPTCAHTQRGVNTGTPTEYT

SEQ ID NO: 1022031 - protein, 83 aa, Homo sapiens
ECGGGWHGAPMLPPAWHAFLKDHRISTFKNCAFLEWLLPAALERMAEAGFIHCPTENEPDLCPVLSSCFMELEGWEPDDDPIE

SEQ ID NO: 1022032 - protein, 167 aa, Homo sapiens
MADGGRRRGELALVGGGGTSQASAVGSDWRYCGPAGVLVAPFNPASLPSLATLQLIALIVEHAQEPGAYFDSFRRDCLADVDTKPAYQNLRQKVDNLVSTHLDKQEWNPTMNKNQLRNGLRQSVVQSGMLEAGRRQDYFSVWWIQNVKHIFRPQIERAIQEYLRGPE

SEQ ID NO: 1022033 - protein, 154 aa, Homo sapiens
ENFECGGGSSRRRGRWYGPGGPSARGSRGGELRRALKCEEEEDSCCRSSGQGIVLDAPASGRGRPLSTFPPAPPSTPGLSCESLERRTEVGLKVRNKGVVIPCLTSLRFPVSFSNFGWPKGSGRWSPELARALRRVQATLIWRLADVPGFQWRP

SEQ ID NO: 1022034 - protein, 66 aa, Homo sapiens
ENFECGGGSSRRRGRWYGPGGPSARGSRGGELRRALKCEEEEDSCCRSSGQAKDGQGKMPEKVLSR

SEQ ID NO: 1022035 - protein, 130 aa, Homo sapiens
  misc_feature (6)..(6): Xaa can be any naturally occurring amino acid
  misc_feature (15)..(15): Xaa can be any naturally occurring amino acid
MPPSLXYGATSSGRXWILAPPRRQEQEEIQKGWEPNLSSVQFTPSRSKAWWVSRHCQGPLRTAESLEWRPGHVWCEKLGLDPTVVGSRAARQAWWTLLAANKEMTAAWLLSALRVCVCLFGPWWLGLVGI

SEQ ID NO: 1022036 - protein, 61 aa, Homo sapiens
NLYSLRTPGSSFSFVSDFLVSFRASSFFFLASSRLLSSVLRSSLVFSDESLYRVSPKAPVY

SEQ ID NO: 1022037 - protein, 121 aa, Homo sapiens
MTISDAGCDPEKRLASSDVLSQRSQLSGASLAEAMSLTSCASLHPHAIIQGTDCGYVAAVVFNHALIHIHEYWIVCSKKSLHALKTLLSTSFLTYFVSSIYQQLAATTFPLVIYPLSSWKY

SEQ ID NO: 1022038 - protein, 147 aa, Homo sapiens
MAARKNMLLAAQHTVSRIHTNFSAKTGHPMGPAGSPRVLETNIQNCLSRFHALITQSGLASQAICAAVSALQNYIKEALIVIDKSYMNPGDQSPADSNHRTLVTNGDNTLGELRIVNEEEVRRVGKEQDCYKSFSTATDWEPLLAWG

SEQ ID NO: 1022039 - protein, 149 aa, Homo sapiens
  misc_feature (113)..(113): Xaa can be any naturally occurring amino acid
KLVEPGLNRRGLLGIAICCCCCCRRKRSRKPDRSEEKAMREREEEADTEEERRAEMKTRMMNSEKNMACLKKKTRMLDLKTTKALQHISPDASCEVHAPQPMPQPGMNQRCAXFAVSLNSLAQVKRCQPSMDRRAEKLPLKDSPLVLQT

SEQ ID NO: 1022040 - protein, 41 aa, Homo sapiens
MNCNKWIFGRVTNRKLSCAITGNIDFNSCTTVTNFISARQK

SEQ ID NO: 1022041 - protein, 90 aa, Homo sapiens
EEQFGGDGGGGSGNGGGRRLGGRAGGSHGGGDTGGSAESEGAKIDASKNEEDEGHSNSSPGHSEAATGTVGKMWKVSIGGLSWDNYKRKI

SEQ ID NO: 1022042 - protein, 113 aa, Homo sapiens
GGAVRRGRGGGSGNGGGRRLGGRAGGSHGGGDTGGSGGGGKRSRDRGRNRVWRHRRGQRPSRRGRRLTPVRTRRMKAIQNSSPGHSEAATGTVGKMWKVFIGGLSWDNYKRKI

SEQ ID NO: 1022043 - protein, 73 aa, Homo sapiens
FRTHQCFITKDDCAAGGGYNVKNYGFPQGEAQNYATLTFSVMHDAKKITGFHSTVKGLEEQAIILRKEAESRG

SEQ ID NO: 1022044 - protein, 105 aa, Homo sapiens
MALQLPVNDEVIKVNDMKVRKSSTQEEIKKRKKAVLFWFKRDKRQIYERKQSRSVVGDIGDTVEDPYTSFVKLLPLNDGRYAWYDATYETKESKKEDLVIYILGS

SEQ ID NO: 1022045 - protein, 136 aa, Homo sapiens
PGYTAPPPPPPPPPAYNYGSYGGYNGRPPIPQRHPATGEQTYPQASYNQGSADDAQQRNQYYQNQGQWPPYYGNYDYGSYSGNTAGWHKYTVSQCDPEAPGGPMTEIPPRRRHDSATSSAPRPDPVVHGDGGHPRD

SEQ ID NO: 1022046 - protein, 134 aa, Homo sapiens
FLRKCGTQRRSCSRAGLGLGSMSLRVGARAKRNPWASGDPGGPDQCSLVVGGDAWAHHVAGRVLYSAWCVACWTPGLVRLGMDMRVLGPWPYEDGLLEAQEQVGEGLVSPVAPELCMAKAPGPGRVTGPGYQPA

SEQ ID NO: 1022047 - protein, 205 aa, Homo sapiens
MNGQQGGKNELGEQFENLKIQNECPEGGYMTLDLYMKGYRNRRTRKQQEYRGTVQIQKHGQRLYIEDETNSLMRFLDQQDLLERHDGDTDLERELREFTEVNLKKVGFLKRQGGMDKNCVWSYEIQNSFPAELLAGAGKLEAPEGHVCNGLNRAWRMKNKDVTGCLGKPVGPTMPWGCVDPSGAWEPHQGANGMFCKLAVQGQDR

SEQ ID NO: 1022048 - protein, 205 aa, Homo sapiens; identical to SEQ ID NO: 1022047

SEQ ID NO: 1022049 - protein, 122 aa, Homo sapiens
  misc_feature (29)..(29): Xaa can be any naturally occurring amino acid
  misc_feature (36)..(36): Xaa can be any naturally occurring amino acid
  misc_feature (91)..(91): Xaa can be any naturally occurring amino acid
MKFTAYLEAAGIHNPLNKIYITTKRLPYXPIVNFLXLIAQLPKLQYNKNLGMVCRKPTDPVIGQFICSTVEQCTSQKIPEIPADVVGALLXLEDYVRYTKLPRRVAEAHVPNFIFDEFRTVL

SEQ ID NO: 1022050 - protein, 110 aa, Homo sapiens
MCAKKLQNATAKFWGKWVCPAITRPEPGFEWATPTLVPGDMLHILLERQCPSSRVYTRSQFSGATGLGPVESASTGGSPQCNTVHEDISREKFLARDVCGCPFLFPGEEI

SEQ ID NO: 1022051 - protein, 121 aa, Homo sapiens
GDSPELQRTGSVQSSSAFSNPAVEGRSLFGEGQEEVLHLGGSDSDASSQLLLVGRLSLASKLAPPLHDGTGVPGPRLALVQNRVLAAEKLTLCRAVTVGNGLSCWKACSPGFTEFPRLAMS

SEQ ID NO: 1022052 - protein, 132 aa, Homo sapiens
EADEVPVGRVQEVVDTYGSSILSILLEEVSPELVCSMLHLCSGTRLPALTVQRDSAKGRWLLRYVCKKLVGYLDRNLEKKQQPSRRSWLLLRRGCSFLADPYQKQCDQFVAEYEPVLIEILVEGDGSFLRCA

SEQ ID NO: 1022053 - protein, 127 aa, Homo sapiens
CLISCLDHLLSDLSCCLIYLLEEVSPELVCSMLHLCSGTRLPALTVQRDSAKGRWLLRYVCKKLVGYLDRNLEKKQQPSRRSWLLLRRGCSFLADPYQKQCDQFVAEYEPVLIEILVEGDGSFLRCA

SEQ ID NO: 1022054 - protein, 208 aa, Homo sapiens
RGMNGVRKEGTALLPPLPAPPPAQQGKAKAKAAREIHAVKQVQIDGLVVIKDNQTLSGKKDKATEAAPRSALGVWLVERSAFETYQLLLLSLSTQRMMLTLMKLQVSDWKMMREPFAMLDIDHLHVGVGSSPQYYGSVRLPGSSLDSQFSYQRCQFGRNMSVLIYDPSKELAKDISHLKEYRLSPKSDGKFVEKKDFSPEALKQAHIT

SEQ ID NO: 1022055 - protein, 231 aa, Homo sapiens
  misc_feature (32)..(32): Xaa can be any naturally occurring amino acid
MAKCVVVTRWPSQAVMWPGRHGRLADSCIMTXRPHVYITGRHLDTLRVVAQEAQSLGGQCVPVVCDSSQESEVRSLFEQVDREQQGRLDVLVNNAYAGVQTILNTRNKAFWETPASMWDDINNVGLRGHYFCSVYGARLMVPAGQGLIVVISSPGSLQYTVQCPLWCGQKLRVTSWLLTGAHELRRHGVSCVSLWPGIVQTELLKEHMAKEEVLQDPGVEAVQIQLLICGN

SEQ ID NO: 1022056 - protein, 77 aa, Homo sapiens
  misc_feature (64)..(64): Xaa can be any naturally occurring amino acid
  misc_feature (70)..(70): Xaa can be any naturally occurring amino acid
DRARTALCADARMYGVLPWNAFPGKVCGSNLLSICKTAEFQMTFHLFIAAFVGAAATLGFPCSXFIDCCXLTIFAVL

SEQ ID NO: 1022057 - protein, 329 aa, Homo sapiens
MSLKLQASNVTNKNDPKSINSRVFIGNLNTALVKKSDVETIFSKYGRVVRLFCAQGAMPLLHATPNEPPCPGQHVPGEINGAGLLARGKTLDINMAGEPNSLTMNLKGLKKRAAICHIHGSSDYRGPSDRPCPVPMAVPVKRPRVTCLLWSGVSKLNVPCLSLFARSYTICSPERTLMTYRINVIMTHDDAEQCRIKTVSLTTDQVQAIRCPAEPLGADLLLETYGQSLWLEEPVMEVAPDGCAAAVVGGSALSDCTGGAVAVVAALLQPPRRLHLMLPVSWGELDPILTGLEGPDHVPESCLTVPTPSGLSNRLKVGPRKGGPLWGTR

SEQ ID NO: 1022058 - protein, 206 aa, Homo sapiens
AQVQQRIDYANLTGISVSSLSDSLLCFMYSVRTISKREMWCCRGDHVIDDADQDSPQCRNRVNSININQGSITFAVGPGQGLAPLDFTPGSELLITKAKNGHLAVGRPTAEFSVIKAPTWTLPNAQMLLLFSSSPCPVTKDSNFQRGTQGHPEAHSRISQLLAIPLLREHAGARSYPRSGPGGHQSIRKARPERAIAKRYCRCPTI

SEQ ID NO: 1022059 - protein, 154 aa, Homo sapiens
MCNICLDTAKDAVISLCGHLFCGRVYISGWRPDLTDRCVLFAKLASAETRSSPSMEGADTGQQDPREKTPPRPQGQRGRAGGIEGDSRIGFGDGGFQMSFEFGAFPFEIFAQHLIYMMGGSSSLSLETQYVTSSPVTLFYLWPVIMSGSDAKGG

SEQ ID NO: 1022060 - protein, 224 aa, Homo sapiens
MPLHKYPVWLWKRLQLREGICSRLPGHYLRSLEEELEAHIPLHYRPHGAEGSQDPIHKRRAAEERVEGHGPIPILLYHPESQRWSCGGGEGVCILGRNIMPTKENVSPERRERTVWTAISCVSESSSSEDPGARSSQVTVRQCGPLEPHRWRLTVRSRTCYIATRATKEEPRGSRVVWTGPESRRGCWLVSALARQGTPEIGTPGRNPGAGRVRHSTSKLQGTL

SEQ ID NO: 1022061 - protein, 179 aa, Homo sapiens
  misc_feature (92)..(92): Xaa can be any naturally occurring amino acid
  misc_feature (97)..(97): Xaa can be any naturally occurring amino acid
  misc_feature (99)..(99): Xaa can be any naturally occurring amino acid
  misc_feature (104)..(104): Xaa can be any naturally occurring amino acid
  misc_feature (119)..(119): Xaa can be any naturally occurring amino acid
  misc_feature (133)..(133): Xaa can be any naturally occurring amino acid
  misc_feature (147)..(147): Xaa can be any naturally occurring amino acid
  misc_feature (151)..(152): Xaa can be any naturally occurring amino acid
MPLHKYPVWLWKRLQLREGICSRLPGHYLRSLEEELEAHIPLHYRPHGAEGSQDPIHKNGQRKSVWKDMALFPSYFTTPNPRQGVVGRQRIXTRKNXCXKRQKXQEDEESVEDKMFKRXFYSEILNKKYTVNXTKRPLELIDETNGXNIYXXKTPKRTLCSKFGMNLKRRMLLRLDRRT

SEQ ID NO: 1022062 - protein, 287 aa, Homo sapiens
MRCRGSQNARMGWHTLGVTLSTRSYGVNLLKAPETFGVKLFSLGAKMGLQLSRKCVFPRDVSFVATFVWVTAHKCDRPAWEDSLGFQLPQVIYSLDPSKAHIKRPGLLPPLVIGVAAPASTMCNAQVLLKTEGKELISPVFGEKARKMGPKISLKVLVDSSPHCLNIWFLGKAHMCVEEAFSTSYIHPLGRLCCFAEYMRPRPRFACGCSHHKARWNTRKACWRAWQRSPTSLAHERLTKGYNEILFPKYLPPPPFLNHVGGENRFSRELVWFHNWPHLSLVVKELG

SEQ ID NO: 1022063 - protein, 55 aa, Homo sapiens
ARFISDFIVNQNLPTFLDGLHSRPEQIHVELFKFGPSQCLRKVFSFIEVTQFQFL

SEQ ID NO: 1022064 - protein, 99 aa, Homo sapiens
DYIRSVGSDSAHHTEVVTEEPENVIETIASLLGSVTLDLSQYGMGIVKGLAWSPEIRQPRLMDEAVLERRNLVRQCSDSSAMVSLTKHLFAILGGVGSM

SEQ ID NO: 1022065 - protein, 176 aa, Homo sapiens
MGCAWFSASHRALRLRWVSANGRLCRRFPATSSTCSSVVWASSGGRTARRLSLKERTLSATQPPISGGSASRWFRSTLRLVSLVSFPRERGRAWPRRGGQRTLGACRGWEGDDSPWQEGTDTPGQLQPGSLTAPGDRDKDLTTEAVSTPLRALCSPSSAHYPQPSVPTTKTPHAHP

SEQ ID NO: 1022066 - protein, 233 aa, Homo sapiens
MAKPSVSTERGQGAGRKRGGGAAPYMNISTYRPVRKLDPKIAVAGQNCYNSDYWGFTGEISSWHDKRLRSHVGGFLGHSERRHVFGESDELIAAESDPCSGTGDLGGVIACIGEKLDEREAGITEKVVFEQTKVIADNVKDWSKVVLAYEPVWAIGTGKTETPQQAQEVHEKLRGWLKSNVSDAVAQSNRIIFGGPVTGGTFKELGSQPDVDGFLVGGGSLKPEFVDIINAKQ

SEQ ID NO: 1022067 - protein, 89 aa, Homo sapiens
CSQRITEGAAINVYHWNKESKGIMIKRRLQPAGGPMGQLGFTLDAAVVPPQFYHPTSSFTNMQVLSFPASQIDRQMGKAGAAYTWYSSS

SEQ ID NO: 1022068 - protein, 227 aa, Homo sapiens
SALVPRLLGPPSSHGSGVRLTQPDREASGSGGRRRSSSKSPKPSKSARSPGAAVLARLFALGPGTVNGLTHQLGGLKPMAPENQSYRSRSRRVLESGPLRPGHPLSFLPPRQVYNGRYCGPPYGSDKPWPSLLDKEREESCGKKRLGERERMWRIGELLKYGDFLQRILNQILLNLHHVEDEEPRKALLQGLLQKEDKPGRSLGGSKRKGPEKGERNKSFDGSHKSF

SEQ ID NO: 1022069 - protein, 107 aa, Homo sapiens
PTSQRPVRPGMPSAGAGPRPWKRPGELARGGLGAGRSRGGGAVDPFMDESIVGNTFFSPCGVGGPQVRVLRQPDGLDKVFKNPFPPGDPCPRREIPNDLQSWGVILV

SEQ ID NO: 1022070 - protein, 159 aa, Homo sapiens
DRWAACVMVRPLLGCSELRGAALCARVAPGPSLTSAAHWRREVRLTATTREPGTHVWTGEAPMAVQTVGSLGDVIQRFEMRCFTLVGMKMLQAPESALAQRHYQRYLRERKPFISLALIRLHESHGPVVAMVWEGYNVVRAFEGHDVDTPTRLRLPQEP

SEQ ID NO: 1022071 - protein, 208 aa, Homo sapiens
DRWAACVMVRPLLGCSELRGAALCARVAPGPSLLVQPLAREVRLTATTREPGTHVWTGERSDGCATVGSLGDVIQRFEMRCFTLVGMKMLQAPESALAQRHYQRYLRERKPFISLALIRLHESHGPVVAMVWEGYNVVRASRAMIGHTDSAEAAPGTIRGDFSVHISRNVIHASDSVEGAQREIQLWFQSSELVSWADGGQHSSIHPA

SEQ ID NO: 1022072 - protein, 237 aa, Homo sapiens
GWSGWGAQTQVSGTQALLQVIVREHGLAAGQAELGPLLARGAGRLRRAPRLVPVLACGGAPEPGPSAAAAGRCLPAPWPGWHGAEPLGWGTARRSRGGPWGGDMGLAGGAWLGLAGAWPPAALRPIVAAVREDVCLKTFGGPGATSAGEAGSEDGWNELAHRLQAAFMAPALLTDLGEACERDGRGDLKTQDWRLLISWSTPGAPGFCHVSGHSVDGWRPTISVGPFGESTRTEVAG

SEQ ID NO: 1022073 - protein, 45 aa, Homo sapiens
FDWWLQEQWEVNSQEAGQRFPVDPDGPRRLLGQWLVGKVRQGPQR

SEQ ID NO: 1022074 - protein, 281 aa, Homo sapiens
FGPEKWIAACAAWNVRVKKAVGCADSPPLETLSFLVMKRLSEVVEFDPWSCRTKMPWPSEMEDVRLCMEEEEEDVATEDGLGSMNPSEWGGLARMDGPLTIAEVTFCIALSICVFVVSLDPKINTLCMLTGGEDDKAFVWLCSAMAELLFECAGHKDSVTCAGFSHDSTLVATGDMSGLLKVWQVDTKEEVWSFDSGRPGVDGVASSGTCPVGWAQLTGNTLDVEMSRMVTGRTYRVPTAQTLVAESSLMGKRAVVGYDRWDHQDLGTCMQGRPSQCTDTG

SEQ ID NO: 1022075 - protein, 264 aa, Homo sapiens
GQSTNTFISKRSKCSRGKRGAPPSPQRLSSAPSQGAGQQGTRGPQGWQAGCGIQTKVIRCPGSIDRARHCEPPHYSLQEPPWNVGAGVKPRDYTGLLVPQKKPDTFGPLENQFSGAGANYHIVAWSSWRLQDVSCPLGLLERRAPGTFLAVSREWLTFTFFFLHQIPPFIRAVPEAGGKGQDSPAGLRARSIGGTPIHSPSLSPNPPRYAAEMYSAETRGPWAVLTGTWICTHKKVMSRGHRGGVAGGWRLGMGRPWLPVAAVS

SEQ ID NO: 1022076 - protein, 317 aa, Homo sapiens
VLASGYSHSVCVFSPDGLAGCVWSRFLPQSVWWLFVPRAPALGPGICAGVRCVARCAQITLRGPRRRISCPGMSPSSAQLSGPVYVACGLPIGPLSLLGFVMPLGDLGASGFRPCWEGTKGASAACGVCMPDGNRFLLQDARKDAELPVAGISGSSGYAPVVPWVEEVTPHRRACYFDSGPDRAVPKVNGSTDAAGCSSVWGHRTGLAIDGKAGAPVEFFWPHERTAPHGVSLHPSLPFLATLPPVTRVFPEAPTRKWGRRKRTWAFPCSPPRHRPHLEMSASASGGVGGPQTPRIPDDHQGEKGQGGTEGGVGELI

SEQ ID NO: 1022077 - protein, 96 aa, Homo sapiens
MTGSCGSQAKPNGKKPAAEERKAYLEAWAHQGQDHRLPDSRSWWCCPDEIDLNEWLASNTTTFFHHINLQYSTISEFCTGEPCQTMAVCNTTVLLV

SEQ ID NO: 1022078 - protein, 47 aa, Homo sapiens
DKLFSCYTSHIHTFPCLPVDIFTVLCSSEYPNFLAASVSFSSIFLQE

SEQ ID NO: 1022079 - protein, 89 aa, Homo sapiens
MLCISLCLDNKEVNHKYHYNGRRIGESKKLNVGTLIEITTEEFQSNCCQLSCQGSSFNSGAHVFPGLNGEHKTEQHQFQGILTMGSSSS

SEQ ID NO: 1022080 - protein, 270 aa, Homo sapiens
GSGARSDLYPPCSFALQLVDGLATMPWSVLLCSAEPQARVPAWAAGGPDMTPPLNDDASVLPPMPEKCDQWWLNALWLDDGLCDEMTLYYLGMFIKEEAHPAPTWTSSLKSILNSGLPNRDQTDDQVTIDSALATQKYSVAVKCATITPDEARVEEFKLEKIVSTQSQLELFRNSPVGVTCLYREAPSSCKNIARPISPGWYPKPITIGEAPAHGRTSTRPQDFGGGQDGTFKSGLHRKKIASGVMGVGCVKLSLERGEGIWISQRGVIY

SEQ ID NO: 1022081 - protein, 148 aa, Homo sapiens
MQGYICVYVCGFFRKVNCGFEIYFKYCVETLDKCVENVCELDCDFPCKTKGSQIFCAEMVMGGMVRGDKYDEMCYTKLVTKISGKIWGWLSTELQTVCITGEEFDLRRIQKFYLAASIKGQLALLINVKGPPVIGGEIKYTGVSKRGG

SEQ ID NO: 1022082 - protein, 117 aa, Homo sapiens
RAQDMELITNVTEYEKLAKEKLPKMVYDYYASGAEDQWTLMENREAFSKILFRPRILMDVSHIDMATKRLGYNITAHIESALSPVQKRAHPDGELATEKSNPLCENNRDIVLRVYFQ

SEQ ID NO: 1022083 - protein, 128 aa, Homo sapiens
CRDSSESRYCNMLLEDLRCNLDHFLENVHSPLLLEMPAHFFDATGIPLRPWPFSNVHGNHFVQCAETAVTVSSDMALPCSVVLLFPPGSLWTRSRMAYLPMSSLFLTSKAMFRSAVATEHNTRSLSIT

SEQ ID NO: 1022084 - protein, 226 aa, Homo sapiens
MRDEDYEGDMEEEVRGGTKRVCSGPGGMSMVQLGQHGLCVGGGGRWRNDLDYYLGDMEEEDLRGEDEEDEEEVLEEVEEEDLDPVSPLTHGSSALERCFTLSLSAVLELFARLEMSRPNLQLANMVQVIRQDCIPIPLVAAEPEVEAIQGICPKPPYEALKALTVEVDEEAHSDVVDRRIQEPQRATALDDHMEAGRSKSHTRTKLQGSSVEDTEADNWRTDAERM

SEQ ID NO: 1022085 - protein, 171 aa, Homo sapiens
MALYTAGIGLEGGTPKKTDTQTAPPSRAGRAAFWGLVNTGWGGAEEPDRRLRPGAWRGQRQPRRPPRSPEAPVGVASQVGGRRGLSASHSFQGPWRRKPRAAPKAGGGCTVGELCRYFSWHSGAHLAGWCVSGLRTRAPGEVTVAREILGVEHSHEKAEIWAAGEKGGMVQ

SEQ ID NO: 1022086 - protein, 198 aa, Homo sapiens
TSPQANLSAFPRGAALLLRLRLLLCSATGFLLLSSQPARRAAPEMETLSPGVADKVMMNPGYDLDFILCIPNHYAEDFGKGCLFLTGPNYGPGLNVCARDVMKDDGRPYYISSPSDVLKGGYKVLLLDLLDYIKAAGIDRYVIDPVPMTVTLDLDLKSYGNGPVNQRDSNKYSVADDLSSFNVEENVLIVEDILDTGI

SEQ ID NO: 1022087 - protein, 313 aa, Homo sapiens
AERAGSCVLLGLSCLSRFCPRALHPGPGARWRSPRSHRADWSCCPGPRSAWCSSRGAIPASAAMTDSPLRGDSSSAVAAETDERLAPGRGTVRLGSVAWPFRWDAADHLLLPLRTWFLGPRKLAGWALREGWHAPGGVLLAAWLAGDCVGLGGLLGCFMANQCRFVTGLRVRRAAHRSAQLYRTPLLRELTPRSPRPLWRRLHGRPGHASALMAGLAGRLRKGRGEDPRQEELQSILLIGERQRLEQIVHIMFRALRVQHNPSEQKANKKGMKIHDGPEANVEIVMASTTFSWAAPITGPPSIPSWTYSFNPR

SEQ ID NO: 1022088 - protein, 54 aa, Homo sapiens
SPSDCRRSLLLHHTERSKSADDGLNTFRTSLLELTKQICSFLQTAPEQFPIRSK

SEQ ID NO: 1022089 - protein, 57 aa, Homo sapiens
VLRQDLFYQGNSQTVREWLNVAITRTLHQAEESLLELTKQICSFLQTAPEQFPIRSK

SEQ ID NO: 1022090 - protein, 142 aa, Homo sapiens
RPAMTVILETIYDATLDAEEIVICFAVELVLDCHPTRTWRRGARSGFFVLVDIIAFTWGRGDDDLDGLCLGGVLDFTLGGEDPEQLCLEGVLDFKSGSGDDSEQLRLCGVTDCSLAWGLVMDPVPRWCARLARLRMTGDELE

SEQ ID NO: 1022091 - protein, 58 aa, Homo sapiens
RGVEAGTVYLAEKPALDSYHLCHSKGHVWNDDFVAANLAELRGAVGYPRPPHLYRHNL

SEQ ID NO: 1022092 - protein, 158 aa, Homo sapiens
GFFSVFWHVCGPVCSSAFLEDLERTDGSAERPYFMSSTLKKILNKTNKKAAEVRDRAASALPRVSTEVVQCSHGVASMYARARCSRAYTSVEAHLKSYHVPLCTRPHVARSQQFLDVERSGASPSYAKGRCGVFMAAHPDCEKQVKTHWGLLMSGMAA

SEQ ID NO: 1022093 - protein, 215 aa, Homo sapiens
MGWRELACVRESHSVVWACKVRGGTAPSPSGAEGHIMSDTKSRGSGSRQGVEAVQRCGMPSVFSPRGCTRETRVNLLCALMEWYQSDRLDYLVYKSERVHNWEEDLGGHEPFTGLNKHRVGLLSEVYRNDVFKTPRVVPGAESLFEWRRRTGLKEACEARFCLRVLATSLVAAERYCHATSALSGIMVPGVRKEWLTAGGWMCPSNVIVFHFWQG

SEQ ID NO: 1022094 - protein, 169 aa, Homo sapiens
MKFWPKPALAVAHTFFTEPVGNKVCTFSKKKKQQNDSKKDKRKRRKNKKEGGARQIKDNPQEGEPTILQQTANFVRKGGRQKGGAIYKRAATARVIKHRRGGGENTATRDTYGEQDQHTGGGTKWEEQPPTQEYKPPRGKHNTRQMHGAQTTATYLVRRKKAHTDYEQL

SEQ ID NO: 1022095 - protein, 136 aa, Homo sapiens
GEITALWAGRGQELPSGFWSPACGELTPAAVNNADPRGSNSESSLWCASGICDSLLYSHGRHTRDQVTSETMSLSPSQGRHGIPGSGNSSCLLVTPGRQRPPLGRSDGQLASGRPRGKPKTKGANEKSLHWSPAYR

SEQ ID NO: 1022096 - protein, 367 aa, Homo sapiens
MFLVNSFLKGGGGGGGGGGGLGGGLGNVLGGLISGAWGRRRLAAGGGGGGGGGWWRWNGHAHPRRSHQRHQRGTGRARGTDSVMPPCCTRQTITSESSWGLDGDVREGRGEFRDDRRFVPMRGHVTMTMAGPDAEQERQLRPFSSEYSVDASQRDPDLKTDGFGIDTCRSMVAVMDSDTTGKLGFEEFKYLWKQASKGGRPLYKQFDTDRSGTICSSELPGAFEAAGFHLNEHLYNNDHPMLLRMKSGNMDFDKLHQLVGPGLDDHVPVPFKSLEKDGTGQIQVNIQEWLQADYVFLNWSPRPAPHRLAIGVTWSLGLSQGRSCLQSHLLWGLLTHKLLFLLSTCYPSFSNIQGPNCALPWKFPPGL

SEQ ID NO: 1022097 - protein, 137 aa, Homo sapiens
MSILYNNDHPMLLRMKSGNMDFDKLHQLVGPGLDDHVPVPFKSLEKDGTGQIQVNIQEWLQADYVFLNWGPRPAPHRLAIGVTWSLGLSQGRSCLQSHLLWGLLTHKLLFLLSTCYPSFSNIQGPNCALPWKFPPGL

SEQ ID NO: 1022098 - protein, 123 aa, Homo sapiens
MFLVNSFLKGGGGGGGGGGGLGGGLGNVLGGLISGAWGRRRLAAGGGGGGGGGWWRWNGHAHPRRSHQRHQRGGCAVQRLEPPPPRTHYSNIEANESEEVRQVPETLLPSWLEMTWRSAPQNS

SEQ ID NO: 1022099 - protein, 72 aa, Homo sapiens
NEYKREKLKEKKLTPITYPPGSTHAKGDVVLVKYLECSALTQRGLKTVFDEAIRAVLCPPPVKKRKRKCLLL

SEQ ID NO: 1022100 - protein, 160 aa, Homo sapiens
MDFYQTTEGVPGSPAVSYALKTYFSMGITRPPEGEQGTSNYTFFSLDHKEISGKNSFKNSYSSASMCVTPNVSAFSSVMGELAQCRRLSVRVEKKPPTQKPVDPQTLTNNTDDSQQACKMAYFDCHFGSFSQKANTVTQPGNFPAFQPLECERVIGMSGS

SEQ ID NO: 1022101 - protein, 273 aa, Homo sapiens
MAVMAPRTLVLLLSGALALTQTWAGSHSMRYFYTSVSRPGRGEPRFIAVGYVDDTQFVRVLNRRTPLSQRMEPRAPWIEQEGPEYWDRNTRNVKAHSQTDRESLRIALRYYNQSEDGSHTIQRMYGCDVWGLDGRFLRGYQQDAYDGKDYIALNEDLRSWTAADMAAQITQRKWETAHEAEQWRAYLEGGCVEWLRRYMENGKETLAAHGRPQDAYDLTTLSLTMRPPLRVLGPLSFYHCGRITLDPGSGMGRTKTQDPGARWRPGLQEIGTF

SEQ ID NO: 1022102 - protein, 69 aa, Homo sapiens
PICAVRNADPNSMVNVMYTAPLDDDGYMNGRVMSVTSHLKWLLHEKVDTRGQSTKATGHHYWIDLHKYL

SEQ ID NO: 1022103 - protein, 277 aa, Homo sapiens
  misc_feature (116)..(116): Xaa can be any naturally occurring amino acid
GIWVLQPPPEQENVQYAGLDFEAILLQPGSPPDKTQVPMVVMPTGGPDSSFVTERGCCSQHMSLQDGTLSVLLVNLYVAYHGLWAGQGSLSTPRSNVGAPRMVKDVQVLQWNRCVXEEHFDASHVVPYGWFPWLAFICRDHVDRSCRPRDLARACVAPEARDQAYASMIGLHVSIPDWCVVEAWVSFAAVTALSDLSVWAEMLENIAASDTASGEDTTVTDVGPGRTVVCPSKQGMEYYRALKNRNVPVRLLLYPEATHALSEVEGGVRQLHECCAL

SEQ ID NO: 1022104 - protein, 236 aa, Homo sapiens
RSSSLLSQRSAAARPSSFPDMANLERTFIAIKPDGCSAAGGRDHQALRAEGIPASVAMKVPPWPLKNTLKQHYIDPEETGPFFPGLGECYMKLRAVLWPWSGKGLNVVKTMARVMLGETQSSRFKSQATIRWGLRAFSFGREQSIPWQLIHVQRVLNKEITPMVKRLKNVVDYKVWVLNDVGSYDLQKVAHNRQSPFSKALVCPLDKSSSIPFDLRGNRIDHSFYRAYLQIKLWEA

SEQ ID NO: 1022105 - protein, 306 aa, Homo sapiens
  misc_feature (1)..(1): Xaa can be any naturally occurring amino acid
  misc_feature (94)..(94): Xaa can be any naturally occurring amino acid
  misc_feature (96)..(96): Xaa can be any naturally occurring amino acid
XWLWTKPIARDFLHQPPFGETRFSLLSDSAFDCWAPVVAGGGVPAAAGVTRPHLEAFLCLAEARVEQLRREAGRIEAREIQQRVVRVYCCVTVXGXQYLTPLILTLNCTLLLKNAGKAIPGAWAPLLYYPPTHPQPRAAPIGSGEDEVQQYCSADFRGPGWPAYSPLPPWRPGLPHLVDGCLPAGRQPFRPLLPPELGRLLAACRPSWGPEVCSWGSGTLACPLCLRPRVPHCKVGPDSPAFPSPQCLTRGPPWTPSFCLSTVSPGPSSMSGPQAHCLRSVCARFEWRRVMLAVFLNQIKEHPPIF

SEQ ID NO: 1022106 - protein, 289 aa, Homo sapiens
MAPSRNGMVLKPHFHNGLACWLLWPLWFNHAWPCNDPADCNVPWQCQWLRLHLPLRPAVVVPSWPICAAAPLVLCTTLNGARLAAASALEELMGGLAFTNELVCPDTSGDFLCDPEECWNKSTDVPCMANVQLAEVSTDPKLILFPSECPRDPKKGRQVLACKNLKLATQLTWTGHALSGHVYTERSKARVNLLDGIAARTSPQPSLRSPTWPGDNDRVFGHTGAHTYTNGTAAANTDVFDPRTNDTAPFPRDPGMSTTTSQNNVEKLQYRESGTKRVYRLCTRRISVP

SEQ ID NO: 1022107 - protein, 128 aa, Homo sapiens
MEKSGHEIPHSRGWPRNSFPLSQGDISRERHAQSPGEMTLVGENPGRLRMPHMEIVAHKHSCGEKICGNPRATNSENWHHKLGHLSHKFEPPTLLLWRLFTLRDHHLSLENEATGEKPLTKRIVVNHR

SEQ ID NO: 1022108 - protein, 48 aa, Homo sapiens
IVQKITFIVQKITSTLKVQVSAVVVAVPVQFNVIQVGCMCNDISVLER

SEQ ID NO: 1022109 - protein, 74 aa, Homo sapiens
DLMHHSDVKQAIYLSLSCLAFSTIRESFIIIIWNSHLNDVQVFNTFMQSINTWVMNLFIQGGLFEEVLSFNTPV

SEQ ID NO: 1022110 - protein, 191 aa, Homo sapiens
AGSGSSSGQGKMGQSQSGGHGPGGGKKDDKDKKQATYEPPVPTRAGEKRSKTNQEGPDAASKLPLVTTHHSVPVSKFTASSEQELNKTYLLMDAKEHSIHEHPRNNMKPIQTEKAKQAGHRSKVDDLRGTPMSVGTLEEIIDDNHAIVSTSVGSEHYVSILSFVDKDLLEPGCIGSMIKHKVHAVIGVLMG

SEQ ID NO: 1022111 - protein, 258 aa, Homo sapiens
RPRLQSCRAGSLRAVCVRAAGAQLSQRTAHPFGAGRQGPCGRQAGSPGGTGTPEPNGGGGGKIDNTVEITPTSNGQRRDRSRRCSVPHCEPAVQACCGELLSADGGTGRLLGCATRLGQEGLVGWAVPPGPISSLEALIAQVGALGGCSSCELGLCCLPVLFVALGMASDPIFTLAAPAAIADYGGLPRLMPLCWEQLSHMPGGVSAFASCCPSSQLPDSRVATSTDPIVQTVSPLPYFNHCLKGLGPKLAYLVLNGR

SEQ ID NO: 1022112 - protein, 135 aa, Homo sapiens
MGLRACTKALTCLSGYYHLPTAYFGIYDPAKGMLPDPKHTHIVISLDDRPDCHCCCRVDFLSHVTLFAPALMIPSRAPKEPDIMYTRHRLTAGGRLPRDEGGQAFFRVPGPMFSEALGGAFVLVLYDENPKKYHH

SEQ ID NO: 1022113 - protein, 301 aa, Homo sapiens
MDLSELERDNTGRCRLSSPVPAVCRKEPCVLGVDEAGRGPVLGPMVYAICYCPLPRLADLEALKVADSKTLLESERERLFAKMEDTDFVGWALDVLSPNLISTSMLGRVKYNLNSLSHDTATGLIQYALDQGVNVTQVFVDTVGMPETYQGDVHARVKYNLNSLSHDTATGLIQYALDQGVNVTQVFVDTVGMPETYQARLQQSFPGIEVTVKAKADALYPVVSAASICAKVAEDQAVKKWQFVEKLQDLDTDYGSGYPMIPDKSVVEGARWSPVFGFPQLGGSAGHGQTILEKEAEDVNG

SEQ ID NO: 1022114 - protein, 251 aa, Homo sapiens
MDLSELERDNTGRCRLSSPVPAVCRKEPCVLGVDEAGRGPVLGPMVYAICYCPLPRLADLEALKVADSKTLLESERERLFAKMEDTDFVGWALDVLSPNLISTSMLGRVKYNLNSHMIQPLGLYSYALDQGVNVTQVFVDTVGMPETYQARLQQSFPGIEVTVKAKADALYPVVSAASICAKVAVDQAVKKWQFVEKLQDLDTDYGSGYPMIPDKSVVEGARWSPVFGFPQLGGSVGHGQTILEKEAEDVY

SEQ ID NO: 1022115 - protein, 252 aa, Homo sapiens
MDLSELERDNTGRCRLSSPVPAVCRKEPCVLGVDEAGRGPVLGPMVYAICYCPLPRLADLEALKVADSKTLLESERERLFAKMEDTDFVGWALDVLSPNLISTSMLGRVKYNLNSLSHDTATGLIQYALDQGVNVTQVFVDTVGMPETYQGDVHAGHGIGDKVSGSECDWDGWWLVLPASVPGWPGPGVKKWQFVEKLQDLDTDYGSGYPMIPDKSVVEGARWSPVFGFPQLGGSVGHGQTILEKEAEDVNG

SEQ ID NO: 1022116 - protein, 89 aa, Homo sapiens
RGSKDPKTAHTGTPGFASSITTTKTTSHSTPSFTSSIATSNTTSSSTPGFTSSIATTETTSRSTPGFTSSIVTTETTSPHTPGFTSSGR

SEQ ID NO: 1022117 - protein, 72 aa, Homo sapiens
GAVIIIFCHLLGKLQVLLFSLTPFLCRLQVLCCTILGGNLMALYRHVVGYTRQKEMRCVEGYLGALAVEYDV

SEQ ID NO: 1022118 - protein, 161 aa, Homo sapiens
MALLTAFSSSVAVTDKDTFELSTFLDSSKAPKYERNELPEQRGAGGGLDVPLSTRPGMGAEESLGLLDDSPWRVAKHLQTSWVLQRQRLRRAPPNGWRVDGCVSPSNNSKEDAFSGTDGCGDTWIEGVRLMDALSGIDDLETMPDDFLTTLDDTLCISLPP

SEQ ID NO: 1022119 - protein, 86 aa, Homo sapiens
QTVEPQATGQSRLGSHDCGGGDSVGSLAHGLTWQEVPLALELRQTDGRGYFGGHKEKTKEGLRSLQPLAPPTRAGTRSHTTRYRAR

SEQ ID NO: 1022120 - protein, 150 aa, Homo sapiens
RAAGTLPIFWKRIWLAGGATKVESLLLLFVSLWQRFCGTGTLKIAAMAENGDNEKMAALEAKICHQIEYYLWRLQFATEQVLYKEQIKLDEGWVPCGDNDKNSTRLNRLTTDFNVIVWKHLSNIQGQNIMEISEDKTKHQKVSKQTPYLK

SEQ ID NO: 1022121 - protein, 321 aa, Homo sapiens
  misc_feature (307)..(307): Xaa can be any naturally occurring amino acid
RRLRSEGLVGPRADHQVFGLVGSYFSRLAIGDVAPVITCRVVFRERGHAAVPSYKTGSWDTCIANLRRKVARLWSPDDLAEGFQVDEFGAQWADCGRRRCKGSATVLRAPVLQLRSLPLSCAYENRLKYPVHVELENERPGRAVEIGYVQMMNWDRTGRKMDWAWEQCGSKDAMNAAIRAGPFKAQASMSPKKAPPGPAKEAKDMSVSRGVLVAVGTHDRDPSGDSHPWLQWFATEGERSWAKQQEEDSEEEEEDLDGDDWEDIDSDEELECEDTEAMDDVVEQDAEEEEAEEGPPLGAIPITDCLXLFPSFQLADEDVAQ

SEQ ID NO: 1022122 - protein, 314 aa, Homo sapiens
  misc_feature (110)..(110): Xaa can be any naturally occurring amino acid
  misc_feature (113)..(113): Xaa can be any naturally occurring amino acid
  misc_feature (115)..(117): Xaa can be any naturally occurring amino acid
  misc_feature (120)..(120): Xaa can be any naturally occurring amino acid
  misc_feature (124)..(125): Xaa can be any naturally occurring amino acid
  misc_feature (131)..(131): Xaa can be any naturally occurring amino acid
  misc_feature (146)..(146): Xaa can be any naturally occurring amino acid
  misc_feature (151)..(151): Xaa can be any naturally occurring amino acid
  misc_feature (154)..(154): Xaa can be any naturally occurring amino acid
  misc_feature (300)..(300): Xaa can be any naturally occurring amino acid
RRLRSEGLVGPRADHQVFGLVGSYFSRLAIGDVAPVITCRVVFRERDMQRCPAITTGSWDTCIAILRRKVARLWSPDDLAEGFQETSSVRSGPLRQEEMRRARPPTAPFXVRXLXXXTPXITTXXSGVYVXLEKKAVQAVNWKVEXMNDNXFEXGLGVGACVGARSAMNAAIRAGPFKAQASMSPKKAPPGPAKEAKDMSVCRGVLVAVGPMSETRVEIGTPGSSGLQQQVKKLAKQQEEDSEEEEEDLDGDDWEDIDSDEELECEDTEAMDDVVEQDAEEEEAEEGPPLGAIPITDCLXLFPSFQLADEDVAQ

SEQ ID NO: 1022123 - protein, 244 aa, Homo sapiens
FPALVLTVVGVGLSVGSCAFYLAVFGFSWLLAPPFLPCLQLGSVRSRGKLGFFLSPEEFNTNMDIRPIHTIYITIMNDKINKGRMEEILYMPCFLSWSCGGHGGLKTMKMRGQALVIFKELAHPQMPVRQLQGFPFYGKPMRIQYAKTDSDIISKMRGTLCDKDTDTERKKTKCGTRTGKQKKKLAGNSKFSNTQGNSNQISGPDYLQYILFLNTYRRDNGTLFPGGNQARSRSTLGRGLAWVA

SEQ ID NO: 1022124 - protein, 189 aa, Homo sapiens
HASRRLMETHLPCWEIQCPEQVVGGIYGVGNRKRGAVFEESQVAGTPMFVVKAYLPVATSRLWLHRCTVRSNYVCGMALPPAVVFMMQLARSCPCRSPFDNSYSAPVQVVAETRHERKGLKEGIPALDKLTLDKIVWRPSCKRAAAPGDSQSPAAPRPRILRRHLETVPTQRRSPERYSGGRVRAITQA

SEQ ID NO: 1022125 - protein, 74 aa, Homo sapiens
AAIVVYDITNEESFCKSKKFARFKELQQAASPNIVIAFIGKQGRPSTIKEQQISQEAQSYADDNSSHLFMETIR

SEQ ID NO: 1022126 - protein, 234 aa, Homo sapiens
GRRRPGRRLGHSNGSAVSRGTRADSRRRRRLRPPSSPGLRLSLLRAASPSPCPLPLALLLQKISNYTCTMLFENKEYVDLLMKQWNKLLGATNKEPLVMFGTTSKEQHGMTRFSDIYALCVAYPEPLGERLYTETKIFWENSCSGICHKKKFGVRKNKYLVMYSLGTGEEYKQGLQDLYGPANNRLSQQHQDYYNNDIILTRRRTLQYGYVVVDMNEPFMEEETSMDMWGNVVD

SEQ ID NO: 1022127 - protein, 150 aa, Homo sapiens
MTGPTWGRAPGYLLFPPPHSRPQERPLRASADPNSRGYDPKNRKSPLHTVLAARADLSCLVPSPQRGCPQRDLLCHQQGAYGQRFQTGGPAPMSWSLPMPTLEEPTERMEAPTVGVARRRRRSKGGLVVGGGGSSTEMLYAIGNLLGSPL

SEQ ID NO: 1022128 - protein, 199 aa, Homo sapiens
VPSKFSDAAFFAPRVLATPSSLLARCTPMGSLGGLCPQASEIRIRCRRCLLLKRLDLRYICCSPGVTGQRPQERPLRASADPNSRGYDPKNRKSPLHTVLAARADLSCLVPSPQRGCPQRDLLCHQQGAYGQRFQTGGPAPMSWSLPMPTLEEPTERMEAPTVGVARRRRRSKGGLVVGGGGSSTEMLYAIGNLLGSPL

SEQ ID NO: 1022129 - protein, 67 aa, Homo sapiens
ESRGHEDDVTNTKHEISEMNRMIQRLRAEIDNVKKQCANLQNAIADREQCGDVLALNIMPGNKAGAS

SEQ ID NO: 1022130 - protein, 253 aa, Homo sapiens
SKNYRLIYTRKQTREQEAAEDKTSLQAPVHSNVRGHLCEEENLVKFEQAASQDVPNISPDVNNSSKFFQVCNDEYAGELSPSVQYFPSFTCDSLEWLPFFGMRFHRSPDRAPTYTCRRSSQILSPKWLLIFGLEDKSSLVQTQRGQHNLLNHIHKTQCMYKGDTMSTEIFEKENTRELVAISFSSLFNLSTSKSVAAGSILVVDINSSPSEDNWLHGAQELDNRPFAIGNDDLELFFSDWMTGSQEQMTAESV

SEQ ID NO: 1022131 - protein, 185 aa, Homo sapiens
  misc_feature (121)..(121): Xaa can be any naturally occurring amino acid
  misc_feature (126)..(126): Xaa can be any naturally occurring amino acid
  misc_feature (171)..(171): Xaa can be any naturally occurring amino acid
TASGGDYWRILNPGEYRVTAHAEGYTPSAKTCNVDYDIGATQCNFILARSNWKRIREIMAMNGNRPIHHRPIAPYDPPTATPAASDAYNNRLAASGTDPACGAFNATNNLGPQHLGLPTLXPCPWXTTLEALTIEALGAFIPANQPLAWEGSPEDFETYTEGGDRSFGNRXGKPRGLGTKVGPGF

SEQ ID NO: 1022132 - protein, 70 aa, Homo sapiens
RHPPVVDITPSAQQRPNDPPWGGAHNNAEKERERTPLHKVAVPPHNIIRCLYLRLDDKPHHRYKNTGGKN

SEQ ID NO: 1022133 - protein, 70 aa, Homo sapiens
SPKVIFKISTEFLPVLRLCPESKLFVPVTTVSPVHLIHGHVLRRWFKGENPHNSREKLRETPARGEEIEK

SEQ ID NO: 1022134 - protein, 282 aa, Homo sapiens
  misc_feature (1)..(1): Xaa can be any naturally occurring amino acid
  misc_feature (86)..(86): Xaa can be any naturally occurring amino acid
  misc_feature (89)..(89): Xaa can be any naturally occurring amino acid
  misc_feature (176)..(176): Xaa can be any naturally occurring amino acid
  misc_feature (190)..(190): Xaa can be any naturally occurring amino acid
  misc_feature (201)..(201): Xaa can be any naturally occurring amino acid
  misc_feature (206)..(206): Xaa can be any naturally occurring amino acid
  misc_feature (222)..(222): Xaa can be any naturally occurring amino acid
  misc_feature (239)..(239): Xaa can be any naturally occurring amino acid
  misc_feature (245)..(245): Xaa can be any naturally occurring amino acid
  misc_feature (258)..(258): Xaa can be any naturally occurring amino acid
XQENWSHPALEGSAPLLEDAAHLFQDVTEALVLGRTAGQGELKLVEVGVHLAPGFLEPQEVRGTLVELHQQHHLVKDVIGQEAVLXVGXLHIHGDAIVTGPLLGRRHHPERRELGLGAWVARLVRGAEQGEAGLEAFLELCSRAGSPSVLLMFSSSMAAAVSAFPSRLRQGKALSXVSFWLLTFQRPPRXPTTSLRVRGLXKFSRXSTWLETATLNGWDLLXAAKDVTSTRVWGFLAKXRLPSMXLRTGTRILLFTRXPGVVASGWAGSEGLFPSCLRLLFS

SEQ ID NO: 1022135 - protein, 131 aa, Homo sapiens
MMAACRVILLEYLLPARRHRGGGPAATTSLPPLPRPRSLHPSLPPTSSRGGLVHRDTMSDSEEESQDRQAEESSCWVTGTIREDLLNYVFCSRTLLETTVQNKLYGLDFLYEKDNIGQENLECYRFKILAI

SEQ ID NO: 1022136 - protein, 312 aa, Homo sapiens
VIRELLSNQEKRDAFVFAIKNHYWYQMYIDDLPIWGIVGEADENGEDYYLWTYKKLEIGFNGNRMLYLINSVHRKGDPWFQILKIQMSYSSQTWQQSACALLTHRIRQISCIRPFFNHRPSLVFNFQLLHAWCIFLVGSSFHAFPLQNPITPQASCSVTSQEAATGCYGQQTSRDDSWLATGAWHMSFQTIKSHPCILFPSLMALGLSPLSPVSLHPFITGRTPTRHNLIYLSGDSHGSQPQPLTRHYARPPPPVHLLIPRRNSDSQNHRSRPRSTHTSLGHPHPTQAALACLPPIHPSSPPTTPPATPPPP

SEQ ID NO: 1022137 - protein, 144 aa, Homo sapiens
MKMVYIQCGVLVLGDLHIPHRVHQFCQLNSNNSWCLGKHSAHPLHQEYLGTKESDDYLKTLAGECPSVRGDFDAESEIIQRQKVVTVGTVSKCGLIPCTIKVIPWGDMASFSPVAERHFDVDISYLADTHTKFEAFEHENKFYH

SEQ ID NO: 1022138 - protein, 89 aa, Homo sapiens
SLRKRAATVVVTERSLVTGWLGTDGVLVLGDLHIPHRVHQFCQLNSNNSWCLGKHSAHPLHQEYLGTKESDDYLKTLAGECPSVRGDFE

SEQ ID NO: 1022139 - protein, 129 aa, Homo sapiens
SSAAWSRGKHLAVTEEPPRGDRVSITAKLLQQKKNVGKVLIVDWDIHHGNGTQQAFYNDPSVLYISVNSYDNGNFFPGSGAPEEVGGGPGVGYNVNVAWTGGVDPPIGDVEYLTAFRDSGDAHCPQVLT

SEQ ID NO: 1022140 - protein, 105 aa, Homo sapiens
IIKTHWAWGPDDGKSILELSCSHLEGQLQQAFYNDPSVLYISVNSYDNGNFFPGSGAPEEVGGGPGVGYNVNVAWTGGVDPPIGDVEYLTAFRDSGDAHCPQVLN

SEQ ID NO: 1022141 - protein, 169 aa, Homo sapiens
RASVPLPGSPGPSALNAEMFIENPHVPRASVPDGFLSELTPAAGPRPTRQAPPSTSRCTWSRTQLMAFGGSQRAVLRSASLHSIGQIGGAQNRSYSQLLCGLLAERLRISPDTVVYINYYDMNAANVGWNNSTFAYEPPGPPLSALAPPGNPPPPVFEAPPPPPSGGEK

SEQ ID NO: 1022142 - protein, 166 aa, Homo sapiens
HDHSSRGLAFVSGAVQGCCRGTDSFDFYKNGFLNLALLFLLGSLDPLAAPRHQYYIPRVDIVGIALRYKGLQPNGEEMTLTQFLDYFETEHKLEITLLSQGVSTLYSSFMPAAQLKERLDHQMTRDCDPVSKRKLGRHVRALVLELCSLRRDGEDSRFPMSDTPLR

SEQ ID NO: 1022143 - protein, 263 aa, Homo sapiens
MWTPECHPSLELVEPIKKYDVPGKSDVYCEVCEFLVKDSDLLIDKQLIDKDILVRFGHNVSRRLSKSLSEECQRCVDASGRHPSCSILPDRRSRACIWCASIAVASDSCTRLTALTVHVTQPKDGGFCEVCKKLVGYLDRNLEKNSTKQEILAALEEGCSFLPDPYQKQCDQFVAEYEPVLIEILVEVMDPSLRVLENWSLPLGHKPLLGTEKCIWGPSYWCQNTRDSSQWQMMSSIANAMCGTRRRNIPSGETQHWFFYLCV

SEQ ID NO: 1022144 - protein, 447 aa, Homo sapiens
  misc_feature (22)..(22): Xaa can be any naturally occurring amino acid
  misc_feature (43)..(43): Xaa can be any naturally occurring amino acid
  misc_feature (75)..(75): Xaa can be any naturally occurring amino acid
  misc_feature (108)..(108): Xaa can be any naturally occurring amino acid
  misc_feature (127)..(127): Xaa can be any naturally occurring amino acid
  misc_feature (159)..(159): Xaa can be any naturally occurring amino acid
RIASGRPEELWEAVVGAAERFXARTGTELVLLTAAPPPPPRPXPCTYTAHGRRALAEATRRYLHNIALAHKAATXARPPAPPPTPQPPNPTPNPPRPTLAKKDNEEDXDKPTKTKTSGEQLGINDNXGLFLMDEDATLQNLPPFYKSNPENTNNGSLNXETPAGPPTCSMPPTSTLPTQQYAKSLPVSVPVWGFKEKRTEALGHQMRRMGRPLRPTWTASRPSMRALVLREAECHPGVFWGPAERVRGLNHSATFQKLQVGQILKSTGGMRPWCRAPPRSHCYAAAPTSRGLLKSEADSGNSASLPFFPTSQMYLSRPLSSSSVQSLSMSHDRAVAEGNGDLSRCTRFGVCQSLIRLADWSPVLVDGIRPQLRFVQPYDGSNSFVCPALATQGFCSRRHWLHPLVGWTSSFGGVGSTPVKGFDQASTLVPCGFPEFPPHGPASGGCR

SEQ ID NO: 1022145 - protein, 132 aa, Homo sapiens
AEPGLFLALARLQEGHPSPSLFHLLLREGKMSESSSKSSQPLASKQEKDGTEKAGPGLGRAKQPSEGAQTEGANNPKRLSGPTKREAENKGAAKTRKTTTTPGKDNQGADPKNCEKEEEEGISQESIASEEQ

SEQ ID NO: 1022146 - protein, 147 aa, Homo sapiens
AEPGLFLALARLQEGHPSPSLFHLLLREGKMSESSSKSSQPLASKQEKDGTEKAGPGLGRAKPASAVSPGATRACVGESRQKEPSEGANNPKRLSGPTKREAENKGAAKTRKTTTTPGKDNQGADPKNCEKEEEEGISQESIASEEQ

SEQ ID NO: 1022147 - protein, 64 aa, Homo sapiens
MKTGYDGQFLHSELLSGLLVAMQPLHLILALLPTCSGLVNRRMQSVSVVIPDTWLSPFTTLKSI

SEQ ID NO: 1022148 - protein, 289 aa, Homo sapiens
MGPWGEPELLVWRPECGSFRASSACGAGGEVGGPGAAAGAHPPLQPGAHLCAAAWPGANHEGSASRQKALSLVSCFAGGVFLATCLLDLLPDYLAAIDEALAALHVTLQFPLQEFILAMGFFLVLVMEQITLAYKEQSGPSPLEETRALLGTVNGGPQHWHDGPGVPQASGAPATPSALRACVLVFSLALHSVFEGLAVGLQRDRARAMELCLALLLHKGILAVSLSLRLLQSHLRAQVGGWLWILFSCMTPLGIGLGAALAESAGPLHQLAQSVLEGMAAGTFLYITF

SEQ ID NO: 1022149 - protein, 213 aa, Homo sapiens
MVHKQEEESCVYEEGAAFFVGRSPYYILGEKKRVVGYIQTREGRTRGGEKRAIKEGRQTTGRRSGQHHQTPRGREKTQREGRQQTTGTSNGQIQKQNEESERNKKENEESKNEQRDREVNNNNRHKKIAADAETRRELRVLRASNANRPTILTTGREPTIIKNNTRGSLLHQTAHATHHQTTVSTPHNHQRRNTTTHANTNPHQHTPHPTADQ

SEQ ID NO: 1022150 - protein, 76 aa, Homo sapiens
WTPDYTRYRRYTVGKAPSVRWFLLGRDCDSPARQCMWLPQHPAPEAPGGQQLPLAPSSPQKLRRRHSASTEAPLWE

SEQ ID NO: 1022151 - protein, 254 aa, Homo sapiens
RQRVRAEPLPPPCSQQYRTAGVWPRPPCVPPSDYVSDRIPHSGCGSTEPRAGSKTREKEKMKEAKDARYTNGHLFTTISVSGMTMCYACNKSITAKEALICPTCNVTIHNRCTRHPRQLYQGQAEATESGLLKNNTDLQSVSLRSKTTIRERPSSANLPLRQLPAVPPGLPPWQSSLSLAKSVPTHQHLLGHIQLMSLPCGLRRILSTVHRSLKMPEPTLSGHSLIDEAQGIYSELLSDLDTDDKDLPLILGLV

SEQ ID NO: 1022152 - protein, 385 aa, Homo sapiens
  misc_feature (265)..(265): Xaa can be any naturally occurring amino acid
QGKITFLETPPIGKIWFRAYKAPSSLAIRVFLQWVPWNGFLLLQGLEKRARAKLESVGGQLDILRVQFFSKSPAGFCLATSKELAGGVEPPVFLGPHHTAPYSFDKSLWVHLPPIGAQEPPERELVALVRDEVNKSSGEAIGLLESSLAVSFEIRGKPLGQIFIKFSLVGSHKGGEGSAFYGPGPGPQRRLTRAGCHAPITGHLGQASGGLGGQFLGVPTMGDPFGSLGPWSPRLTSEQSHPWRKHWCSPGTWRARDSRGPKPSXLGQSGPVTPGIYNKGGRLRGQETGRIGVWACTGEWGDTQGGKAFTRGLGTPTQQSGDTDKGRPEEMATTIKPAGPHGSSTQDHARRTGAPPRPTGGLGSPHVLARHNDSRGVAHHARSTA

SEQ ID NO: 1022153 - protein, 321 aa, Homo sapiens
AGFCAPSSSEKPPVFLHLALLYLQAGSPEIPAPNPPCTLGPALLPPERTFCSYSEHTLTSAEGAGQRSAGRRRQAPRGDLGSPAGSIMKFQYKEDHPFEYRNKGQAKRSGRKYPDRVPACMSEKAPTSPGVLIVDKEEEPELPSAPYCGQSILIRKRIHLRPEDALILLVKQPTIPSQQCITWGQLYEDQIMRKNIPCHVAYRMTRVYCDTEGLHPSRGSTMTARRRGVDADRRNTVAPTAGDHGGDLKNRPTHANYTWPRHSGIPALDKDQTVNDSKPPKQNNGQRKSKNSGQNKHTRHRHASTTPKTHHHNTRTLFLLS

SEQ ID NO: 1022154 - protein, 255 aa, Homo sapiens
  misc_feature (249)..(249): Xaa can be any naturally occurring amino acid
GWVLQVLGLGTLPGDSAWRAIPRVARALSPPAGVDAVGAARVARAGSRRRDHGDWDEASRLPALPPREDAARVARFVTHVSDWGALATISTLEAVRGPAFADVLSLSDGPPGAGSGVPYFYLSPLQLSVSNLQENPYATLDHDFGTDQLSARNMDFNHKVPFVVHNNCSQELLPKVNEHQKWILEKHSLFIRHPEMKSWPSSHKLVLCLELNIHQYLGPGPNFGGTKNCDNRRILYMAQFSEEDCGEFXNTYEVS

SEQ ID NO: 1022155 - protein, 130 aa, Homo sapiens
MREFNSGTSQSSGGDETQLPLSLWARFMPGASVDRGHAPGLPKLEKAARLRSEGQNSTVSPTESRWEQGRWLPRLCGRIRFLAVEVACTPQLVLPVSNDWSFLLLSLHLPPSPSPALLLQGSEEMESSYR

SEQ ID NO: 1022156 - protein, 81 aa, Homo sapiens
ARACDQKPAVGLHTRLFTRWKQDGGFGLGLAVFCSRYWNLHLDPAAPTARKQLDKEQVRKAVDALLTHCKSRKNNYGCAFE

SEQ ID NO: 1022157 - protein, 227 aa, Homo sapiens
RGAELEWELTGADDGRVLWHACLRGHGDVGAEPGAGADGRWPALGPRNPALLPTILLLSEPEKDCTMNGDSRAAVVTSHTPDTAPHKAEDFDRVDEKKPEYLRERNMAPDLRQDFNMMEQKKRVSMILQSPAFCERNWNQVIQEQFTKGQEAHRPIGITARLPDSYDHECTKMSTQAAPQGGDGCLKTMSLGMVTPVNDLRGSDSIAYDRTDEQVITACKVGSGLID

SEQ ID NO: 1022158 - protein, 252 aa, Homo sapiens
RKSRLTVALAAREAGESGSPVAAGGLVSMVARLVNHQLLHPMASVWRPRWQSRLGTHRPEPGARHPALPAMVNDLSQYLPYCGHQEVGQVLAGRARMLLLQFWRVLFCNHPPFALGVMSFLYGSFYVFLYGRQSATSDPVHFILQDQTVDSSNNLTLLLPVYANVSLTNGWTLIGWLMYGTGVSVLPLELELPESPVNQDLGMFLVTISCYTRGGRIISTSSRSVMLHYRSDLLQMLDTLVFSRPPAGTELI

SEQ ID NO: 1022159 - protein, 168 aa, Homo sapiens
MECACSSGGENNEHPGMATQVTVFDLRFCVPNKEVMPERGIHTLEHLIGVVLVRNHLNGNGVEIIDYLANGLPRPVFILSLMVRQMSSVLLMPGKRGHWIDVLTVQVSESESRQLTVYQCGTYPDALACRKRRLWQRSILDRDVRINSKRKNWACRQEKLRGTALSSQ

SEQ ID NO: 1022160 - protein, 76 aa, Homo sapiens
PRVGPAPLRALSMSCSMAIPCHSSSNVVVEPSGLLELNNFTSQQLDDDETAMEQDIDSSTEDGTEPSPSQSAVERS

SEQ ID NO: 1022161 - protein, 476 aa, Homo sapiens
AQKGHMLSRLLIGRGRTRRCGVGRCCSALDRRHSAIRPLCAVSRREHSDSSRRQRVRGHRPQRPSSWPAERDAASASATAAAAPPPSLSRRVARGPSKPWSEDYWDRCACGETGGARRSRELIPGRLPMRRPRRAPRALRLLARPRRSPWDRMKKIKRQLSMTLSSAPEIVHEDLKMGSDGESDQASATSSDEVQSPVRDINKRLSLPADIRLPEGYLEKLTLNSPHLLTSPSAAASVVSAYLRLGLGNRGRSIIYCVQHAGADEPMYAVLALDKGKDVNAHSTSLVGDSRRSDWNMKRGTLHRIREVSLLKDLKHANIVTLHDIIHTEKSLTLVFEYLDKDLKQYLDDCGNIINMHKVKLFLFQLLRGWLLHRQKVLHRDLKAQNLLINERGELQLVDFGLARAKSIPTKTYSNECDLGYRPLKSAWVQGLLPSDAMWGLGCSLRDATRLFGHEGQGTPRLDPGMRVARHIHRDA

SEQ ID NO: 1022162 - protein, 491 aa, Homo sapiens
AQKGHMLSRLLIGRGRTRRCGVGRCCSALDRRHSAIRPLCAVSRREHSDSSRRQRVRGHRPQRPSSWPAERDAASASATAAAAPPPSLSRRVARGPSKPWSEDYWDRCACGETGGARRSRELIPGRLPMRRPRRAPRALRLLARPRRSPWDRMKKIKRQLSMTLSSAPEIVHEDLKMGSDGESDQASATSSDEVQSPVRDAYAQHPPRKDSPLRTFNKRLSLPADIRLPEGYLEKLTLNSPHLLTSPSAAASVVSAYLRLGLGNRGRSIIYCVQHAGADEPMYAVLALDKGKDVNAHSTSLVGDSRRSDWNMKGGTLHRIREVSLLKDLKHANIVTLHDIIHTEKSLTLVFEYLDKDLKQYLDDCGNIINMHKVKLFLFQLLRGWLLHRQKVLHRDLKAQNLLINERGELQLVDFGLARAKSIPTKTYSNECDLGYRPLKSAWVQGLLPSDAMWGLGCSLRDATRLFGHEGQGTPRLDPGMRVARHIHRDA

SEQ ID NO: 1022163 - protein, 82 aa, Homo sapiens
RVLPSAGAGSLCVCPLALCSVLRLPTALLRSTMALLHSGRLSSRGIAADLPPRASSASWSLPGASLLAGPSVEDGDLARSHI

SEQ ID NO: 1022164 - protein, 119 aa, Homo sapiens
  misc_feature (2)..(2): Xaa can be any naturally occurring amino acid
EXIDYVNRYRVQSPSYGKTSGERTDLTLYTAQNRITPNVNRRPKITLQKKIKITPIFIFKKVPALELQKLEKPKDVPPLERGRQQRVAVLAFKAELKRSRHSSLEFLCFRIFPLYCCHV

SEQ ID NO: 1022165 - protein, 177 aa, Homo sapiens
MIRCGLACERCRWILPLLLLSAIAFDIIALAGRGWLQSSDHGQTSSLWVGNAPQEGVRHGSYEEGCQSLMEYAWGKAAAAMLFCGFIILVICFILSFFALCGPQMLVFLRVIGGLLGHWLLVFQIIVPGNLPLLKYTQTFNLHCQTVLSTYIYNLGTYRLLRWRRPRIILNRLVHFY

SEQ ID NO: 1022166 - protein, 114 aa, Homo sapiens
VDVRTPPMNARSVVCMDLHDESSSPGSPQSQMCSEYQVHLIDLVQIGAFIRPVVASTAGRRSPRGVSVMTITTQPLSHTFCPKVSHGGGQRSLGGDVRGVPRVVIHDGPSVDVV

SEQ ID NO: 1022167 - protein, 312 aa, Homo sapiens
ESFIYPSMCWIRDSLVRYITNLGLFSLVFLFNMAMLATMVVQILRLRPHTQKWSHVLTLLGLSLVLGLPWALIFFSFASGTFQLVVLYLFSIITSFQGFLIFIWYWSMRLQARGGPSPLKSNSEQRQGLPYSSGSTSSSAHLGSHSPSCPCDEAEMRPRRTLPVAPEPGPDPGQSAADFGKPNDHGEMGRCHGGRTPGLGFEWAGDYSALTQLHGTQKCAAMLPRVLSPHLCPPSWKAWSLPYNPWPASCWGAGLDLEVWATLILCPAWEQKGPMACSRGPRGPGTRAEPRGPGKGRDTSKPGEPANTQPLA

SEQ ID NO: 1022168 - protein, 52 aa, Homo sapiens
YSDYVEDDDDDEEEDSEEEAMETTPAKGKKAAKVVPVKPRTWLMDEIRDPLS

SEQ ID NO: 1022169 - protein, 152 aa, Homo sapiens
GSARRALARLVLAWCRWLVSATCVGTADRKMSSGNAKIGHPAPNFKATAVMPDGQFKDISLSDYIRNNMCVFFFYPLDFTLCVPHGRSLLSVIGQKNFKKLNCQGDWCFCGFSLLSSSMGQYTYRIQGGLGPMNYSFGIKTRSAPLLRIMGS

SEQ ID NO: 1022170 - protein, 271 aa, Homo sapiens
  misc_feature (12)..(12): Xaa can be any naturally occurring amino acid
  misc_feature (101)..(102): Xaa can be any naturally occurring amino acid
  misc_feature (195)..(195): Xaa can be any naturally occurring amino acid
  misc_feature (206)..(206): Xaa can be any naturally occurring amino acid
  misc_feature (223)..(223): Xaa can be any naturally occurring amino acid
  misc_feature (229)..(229): Xaa can be any naturally occurring amino acid
  misc_feature (231)..(232): Xaa can be any naturally occurring amino acid
  misc_feature (245)..(246): Xaa can be any naturally occurring amino acid
  misc_feature (251)..(251): Xaa can be any naturally occurring amino acid
  misc_feature (263)..(263): Xaa can be any naturally occurring amino acid
GCSRPPRSPASXLAARPSSVLPGQPASQPGGAGGGEQAVPMPEPGPRMNGFSLGELCWLFCCPPCPSRIAAKLAFLPPEPTYTVLAPEQRAAGASAPAPAXXTAAAAAAQPAPQQPEEGAGAGPGACSLHLSERADWQYSQRASLATPSQALSSRLTNWAHGGNNTASACHASVRCSAPPASLHACLSLARANAXPTLAPRMLQPXYNCALAPPANQTCKQSXSLTHYXGXXGAQLGAKPLRAKXXLRRTXDARAGRRLRTRXMALSSREH

SEQ ID NO: 1022171 - protein, 257 aa, Homo sapiens
  misc_feature (12)..(12): Xaa can be any naturally occurring amino acid
GCSRPPRSPASXLAARPSSVLPGQPASQPGGAGGGEQAVPMPEPGPRMNGFSLGELCWLFCCPPCPSRIAAKLAFLPPEPTYTVLAPEQRAAGYRSEPEEGAGAGPGACSLHLSERADWQYSQRASLATPSQALSSRLTNWAHGGNNTASACHASVRCSAPPARYTPASLSHGTAVDLGQMCSSTLASVPINCNIFSYDYSGYGVSSGSLREELYADIDAALARRCDTRYGVSPRTLSSMVRALGLSPGKIWLRGND

SEQ ID NO: 1022172 - protein, 178 aa, Homo sapiens
MPTLSRTNHPRWTQSARDSPNPSFAATLRVPRPHAYQLVMPKPRRSAPFHLISGLHNQTHTAPPPTDVNDCLVSELESSHHPTTHDRIRSTSTTPPPAMPPPLPLSAPTSHPTPSLPTTPVTNNHPATPPTPLSIELSVHTMHHLMTSHPIITPHRSAHPTPALHTSHATDSPPRSTS

SEQ ID NO: 1022173 - protein, 74 aa, Homo sapiens
AGLRAAVSLRRSRMRPAAVAPASAGAAAAEAAAEAAATAAPPPDEMRLGPGASGADADPRGGGVGKCFVSRPTI

SEQ ID NO: 1022174 - protein, 257 aa, Homo sapiens
EVKKRGEGKGGPEPGREKGGAAHQPAVSPQNRLSIQAPGVTQLQRQWQPYILSAKWHGMTDRTRGPRTGGPQSLTTAAWPSPMAFNDLLKQVGGVGRFQLIQVTMVVAPLLLMASHNTLQNFTAAIPAHHCRPPANANLSKDGGLEAWLPLDKQGRPESCLRFPFPHNGTEANGTGVTEPCLDGWVYDNMHLPFTIVTEWNLVCSHRAFRQLAQSLFMVGVLLEAMMVGYLADRLGRRKGGDPELPGNSCAGNLCSL

SEQ ID NO: 1022175 - protein, 76 aa, Homo sapiens
SREFGMQERKKRGWYPGSSRCNFREVLVCLVRELRGPGCVKVVLLPTCPVVPAPVWTATLPFFHPRVGSTTVEICF

SEQ ID NO: 1022176 - protein, 282 aa, Homo sapiens
  misc_feature (2)..(2): Xaa can be any naturally occurring amino acid
  misc_feature (36)..(36): Xaa can be any naturally occurring amino acid
  misc_feature (67)..(67): Xaa can be any naturally occurring amino acid
  misc_feature (91)..(91): Xaa can be any naturally occurring amino acid
  misc_feature (113)..(113): Xaa can be any naturally occurring amino acid
  misc_feature (118)..(118): Xaa can be any naturally occurring amino acid
  misc_feature (126)..(126): Xaa can be any naturally occurring amino acid
  misc_feature (129)..(129): Xaa can be any naturally occurring amino acid
  misc_feature (154)..(155): Xaa can be any naturally occurring amino acid
  misc_feature (158)..(159): Xaa can be any naturally occurring amino acid
  misc_feature (215)..(215): Xaa can be any naturally occurring amino acid
VXGLTIGARESQGQGPKRKLLGSLALQEEEEEAAWXPVPLSQPPEDELDRLTKKLVHDMNPPPSGEXFGQCGGCGEDVVGDGAGVVALDRXFHVGCFVCSTCRAPVRGQNFYXVERRXYCEGCYVXTLXKCATCSQPILDRICGLWGRPTTLAXXPAXXVTAASNGIPSHPVECYEATSPLHLKEFSPGKFVRPKMLTFAVGPHKCLSPRSRRRXVRIVALESKFSHLAVTSARKCGLLLSSEGECQGCYLLDGHFLCKGLLRLAASTGGFQPPSPLTAEFS

SEQ ID NO: 1022177 - protein, 43 aa, Homo sapiens
SLRGRTLKITITGYEPLTVAMSTVSSLNGEPEQGVAMEAVGQN

SEQ ID NO: 1022178 - protein, 164 aa, Homo sapiens
PDFIYQLYSEEGHSVFDSGRTCWVTSSTGGAPSPFDRNFGTQISARAMEWIPAKLTGGPEAEEKNLPPDDSICVLGISQRNVIFQPVAELKKPTDFEHHGFPKDPWWLQLRPLMEILAQYKATLCRCRNSRPRWDTVHALEVSEPTSRLHVPAAPVELSLFVTP

SEQ ID NO: 1022179 - protein, 102 aa, Homo sapiens
VPQNFARSEVHIAHVHCILLDNHLNTEGTWKRTDCGHLGAKGPKALKGTAYCHLSLPIALICGDIGGGSHGRRLLMAVEGAGSQMHFFCHVAYFEKTIRKDA

SEQ ID NO: 1022180 - protein, 103 aa, Homo sapiens
GLCCRLLGAALGDQSRVEMSYIPGQPVTAVVQRVEIHTGYEAVAQMKPGGLRVHSHSPEGVLASPRVWPSYGFRPRYEAHLISAALRIVICLFCLWVHTCVFF

SEQ ID NO: 1022181 - protein, 156 aa, Homo sapiens
GLCCRLLGAALGDQSRVEMSYIPGQPVTAVVQRVEIHKLRQGENLILGFQHCDVWTFGPGTLSQNPFLLKNKTDKGILIVTRVSEGGPAEIAGLQIWRPRSCQVNRLGTMNHWSHRNQGPGKRFTKRSEEVVRLLVTGKSLQKAVQQVHAGPKQSA

SEQ ID NO: 1022182 - protein, 283 aa, Homo sapiens
MIWGFNLFRRSFCFGGRAEGNVHILEFKKNTSTFTKINQHKIKEEKAEQTKLFLRYFNLKHPWCFLHYKSPILKNPQTHYNISFMHFTTNILHCVSAIRIIPSYGGVPTERRQRRAPGGVGLAPAEGLPGAPPPWGQETLHRHEYTERGTEARTGCTDNLHTKRTMHTDKTSSDDVWYTTDAQHTQRHRNRRRQTQRTQRKSATSEQRRDRQDDVNRRSNDDTRTPSDCNARENGQPGRTKPRTGEDEESESGTKPSRDTKNQSESSSERGKREAARADRRPR

SEQ ID NO: 1022183 - protein, 100 aa, Homo sapiens
CPRRSESAKKEVVAEVVLAPQVVAEAAKTAKRKRESESESDETPPAAPQLVKKEKKKSKKDKKAKAGLESGAEPGDGDSDTTKKKKKKKKAKDVELVSEY

SEQ ID NO: 1022184 - protein, 345 aa, Homo sapiens
MALPLGLLPAAAQGFPVPLSSAGLPEPRAACWSQYSLVACWLEEGELPNVRGGKPCAAAGRVRTWPCAAGAPGPSGHVNPRWLDALWAGTERVCDAGSFLLRAWRRVARGLAVRPTLRGPPGLIARCAGLSYRRRRRGLTPSYEASPFSNVWGRPLAACTLFGTHGLDPRVTPMSSFLHRFPFKSLGYISDSTGGRFQKRPQHLVEHSPALPPFYTRSPCKSWSCAPFRFPRAGHGAGRVPALLRCARCRPCAVCAPFLPGLLWRRSRLPPLPGSATRPPAPACPPSFPSCTAPPGLDVLPFGIRAFSVGPFLHRCGPLTSLQPYNATRRAQFRHARTDNPPGGP

SEQ ID NO: 1022185 - protein, 192 aa, Homo sapiens
PNSGGNDSPLPSPRALLPFPYVSASLSDAKRARRTAEGRSRGTLLGQALPLGLLPAAAQGFPVPLSSAGLPEPRAACWSQYSLVACWLEEGELPNGRGGKPCAAAGRKNPANFHPVKRGPGLRKRGPGMRAPAMGPGSSGGNAKGPPTRGGSGRSRRRELTTRGHEVALWINTITHLMAGKARSGHRGIQER

SEQ ID NO: 1022186 - protein, 256 aa, Homo sapiens
VLVQNFIKGSLEEQHPELQKYSCQGDPCDMLVGTWRGAVAGGFVAFPPFVSLKVGGWVGRYLILGSHKAHGGSGRGFYRANSLPVGAPRAASDSFTLCIAQNTLCSVSNNVWRNSKVLNDSELNQGSSGVVDSLKAIQQTLRDYSPSVLREFPDTKTSQPGAPLSMDEPEHTIAGPSGQKALLESWYRRDSAGAKGTQTSRGHLFSIKLYMALWKAKPLLELQQSVPESAGLLTKTHLCSGGTIRIWTGGCNRTSV

SEQ ID NO: 1022187 - protein, 150 aa, Homo sapiens
MISTRRSTYNHLSRWLTDARNLTNPNTVIILIGNKADLEAQRDVTYEEAKQLLKKMAYWFLEVSAKTGENVEDAFLEAAKKIYPEPFRHGELGSVMLREIWCDKTNLQPRTGGRLTSEPPPQERNGCALLGDLFAVAPHLTFAPLSVGTT

SEQ ID NO: 1022188 - protein, 119 aa, Homo sapiens
  misc_feature (8)..(8): Xaa can be any naturally occurring amino acid
  misc_feature (12)..(12): Xaa can be any naturally occurring amino acid
  misc_feature (21)..(21): Xaa can be any naturally occurring amino acid
KNLNMTLXNGAXPASLVALEXDDARRTRRDTRMHNIEYIDVEYAGSAYAGQVLFHVTQSSEIVMHVKTHTVGISLIFQPGTVPPFELIWEEIIQDDWKKGDVILSETWSWELRRREGLD

SEQ ID NO: 1022189 - protein, 315 aa, Homo sapiens
NTSSAGPVGGRIQVWHAEQRGMLKDSAMLEYLKIAQDLEMYGINYFEIKNKKGTDLGLELMPLDLDIYEKDDKLTPKIGFPWSEIRNISFHDKKFCHLAHLTQKAPDFVFYAPRLRINKRILQLCMGNPELYMRRRKPDTIEVQQMKAQAREEKHPEAAGAATAGNREEEERDRWREKKEQMLREKEELMLRLQDYEEKTKRAEKELSEQMEGPPTGGKRGGEPRREAEVWEATMVRLRARENSRDGADRLRAGRGGCEAGEDTGRMTWWGRGSPKTRSKVDTGEEPELGAEDDWVEPAPPLIRTRRKRKGYKNK

SEQ ID NO: 1022190 - protein, 463 aa, Homo sapiens
GRAHAPGKPGCFWAGLQTPRARVTVSFPVRHDEWMEMPWNQGLELAVAVSLMLLWDACSVVPPPPAAAFSVLPWLMVQCALLVAGGSAACLSCAGVGAASGCQLGAAEPREAECVAVAAGDGDDDDSRACAQPLPCRRPAFSSLPYVPECGSTASFPAARLSSRPLGAGEPYSQRQVVLTLYPKGGNSWLSSSLLLVGTMSLKLQASNVTNKNDPKSINSRVFIGNLNTALVKKSDVETIFSKYGRVAGLSVHKGYAFVQYSNERHARAAVLGENGRVLAGKTLDIKHGLESLRHDRPKGLKRAASAIYSGYIFDYDYYRDDFYEEGSSTTGGVVSPVADGHVGPCEATRVTVPWIGVSKVTVTVKLFDLSTGVITRSGESSSTQRELQHQRGDQIGSNMMRVNGGQIAGPKGIRMQKKGGGGPREGVCGRGKVSVGGRAPPKIGGGRNAKKGARRREGRQEA

SEQ ID NO: 1022191 - protein, 258 aa, Homo sapiens
ALITALNQPGYQLGLFSSDGFTSPLYRQALLSDFSMPSVRTQSDEQTATQGINWLGRYAQEDNRWFSWVSFNGTNIDDSNQQAFARKYSRAAGNVDDQINRVLNALRDSGKLDNTVVIITAGRGIPLSEEEETFDWSQGHLQVPLRDSLARHAGAAYLNALTDHTRSDDDADGKACYIVRNTCPANIRKVQDQCKTSTTTLPGVPQRKNEYAGEYPPRTRRGTEPIAETTALDTYVVERVTDEKHRNDGMHCMTHAKR

SEQ ID NO: 1022192 - protein, 86 aa, Homo sapiens
SSDPSATRTEAARSGYLVQEILGTVIQLVLVGAFVAGTRSFILPQSLGMLIEFGREVKVRHVHHTQNAFHSELHLGGGQVPGGHLF

SEQ ID NO: 1022193 - protein, 114 aa, Homo sapiens
MPKAPKGKSAGREKKVIHPYSRKAAQITREAHKQEKKDHIDRMKRPCVSTLLVKNCNGFKIILIPKKRDIQRKMLCELIERDSRHSKCSNLKTFREWDFDLKKLPNINMTKNLR

SEQ ID NO: 1022194 - protein, 242 aa, Homo sapiens
MVGLSGHFCGVPLPAGDPTGLRIPVQILAQDLYTGSGSFKRTPSNVADLTSLRAPLDIPIPDPPPKDDEMDTDIARRRKKSLSVEFLPGNEKVLSQLALGKPRSLELLQEEIALLVIYTGGPTTLNPPRVEDGNDFGVAIPEKVLERVYALKHPKWELSQTNPFPSTSQERGDAVAQASPGRLIVMDYPGPWCMSDDEAAYGELTGPGAGPEAPSYAELYHIISSNLEEIVNPKGEEKPSMY

SEQ ID NO: 1022195 - protein, 105 aa, Homo sapiens
  misc_feature (2)..(2): Xaa can be any naturally occurring amino acid
  misc_feature (26)..(26): Xaa can be any naturally occurring amino acid
  misc_feature (32)..(32): Xaa can be any naturally occurring amino acid
  misc_feature (40)..(41): Xaa can be any naturally occurring amino acid
  misc_feature (67)..(67): Xaa can be any naturally occurring amino acid
MXFNPEESELDLDYGNRYKNVKLPDXYERLIXDVFLREPXXFVRSDELREAWRIFTPLLHQIELEKXKPIPYIYGSRGPTEADELMKRVGFQYEGTYKWVNPNKF

SEQ ID NO: 1022196 - protein, 161 aa, Homo sapiens
MGVALTLSFCFYPATSAHTHVRCQEYNVYLLPSRGSESRLSEEGIFLLAKGLHMSCGGEISSPPEVIQDIFNVPSCAHINTDMTLLPEVGNPYSRITQNDPGYLSNKKRPYSMKLTNVYKQENNQENGFPTVPGRNDKGLYGGSSYVDFLVLCPHGDLSAA

SEQ ID NO: 1022197 - protein, 112 aa, Homo sapiens
SAIWAIASWSSPPPLSPWSSCKSARMSQAEFEKAAEEVRHLKTKPSDEEMLFIYGHYKQATVGDINTERPGMLDFTGKAKWDAWNELKGTSKENPMKAYINKVEELKKKYGI

SEQ ID NO: 1022198 - protein, 408 aa, Homo sapiens
RSADLLFNVRECLCCNTHGEGHFLAPSAKYLQTLGRLLHSQIDRTSLNSFRINEHHHVQVSECKTSTTMCDGFLHRHALLLLVVRVRHRLVHCAWREQLSEQQHPWSPHPASRSSRSADDAGHAAGPETVSQTTTGRHRVQEYVAITLSTDSVPSRLVAIPKRSVADLQEGLQTGPARAGQQLACEMRHLDQYALGWTVSYHVQLRGHTESIHEQGTGVHTPYMASKIQIEGSLVLMGHGRSVEAGTGAHAIPRGLRMPQRRKEGQPDYTIGRSVVRLRCTLASRTAHGTRQRSMVTDSQRKRRARKTYMEHRMKGQTHKTMPKGNNPRHYRNTHVKQTRKKDRQGPRERQHTADRGHQEKTIEEERQNNQSRQKDPDPRQGENKDRTKRVQTKQKPWMEKIQQTTAP

SEQ ID NO: 1022199 - protein, 88 aa, Homo sapiens
SLKGHETYSYYGPLNLLTFNVGYHNEHHDFPNIPGKSLPLVRKIAAEYYDNLPHYNSWIKVLYDFVMDDTISPYSRMKRHQKGEMVLE

SEQ ID NO: 1022200 - protein, 88 aa, Homo sapiens; identical to SEQ ID NO: 1022199

SEQ ID NO: 1022201 - protein, 76 aa, Homo sapiens
EDYFTQAMEVKAFAETHIKGFTLNDAANSRLIITQVRRDYLKEAVTTLKTVLDQQQTPSRLAVTRVIQAVAMKGDV

SEQ ID NO: 1022202 - protein, 315 aa, Homo sapiens
GKVNIDVGGAEQERKSRLFLYEASRQFHTNKACFGAAGAKESELGAMRVTIRVFLFGAYDWFLWVHLLPGRPSDASSGPAELDSNWNWFQLRCMQVVRECQCEGFVVANMDAQPSDANTKYNMPESAQMYREKIRQLGSAGLARHGTDLWIDNMSSAVPNHSPEKKDSDFFTEDTQAPAWDAPATEPSGHPAAMTRLQQSSGLATCLEHGTSQTCLEQQPKPSLELKSSSLARRSQQQLRKGWVPRTALGAQKVSSKSFQWRMEREGSGGHETVREAGRQAMPRRQAEELHGRLHGDWANRGSQWTKKEEQSYNR

SEQ ID NO: 1022203 - protein, 424 aa, Homo sapiens
MHRLQVVLGHLAGRPESSSALQAAPCSARFPQASASDVVVVHGRRTPIGRASRGGFKNTTPDELLSAVLTAVLQDVRLKPEQLGDISVGNVLEPGAGAVMARIAQFLSGIPETVPLSTVNRQCSSGLQAVANIAGGIRNGSYDIGMACGVESMSLSGMGNPGNISSRLLESEKARDCLTPMGMTSENVAERFGISRQKQDDFALASQQKAASAQSRGCFRAEIVPVTTTVLDDKGDKKTITVSQDEGVRPSTTMQGLAKLKPAFKDGGSTTAGNSSQVSDGAAAVLLARRSKAEELGLPILGVLRSYAVVGVPPDVMGIGPAYAIPAALQKAGLTVNDIDIFEINEAFASQAVYCVEKLGIPAEKVNPLGGAIALGHPLGCTGARQVVTLLNELKRRGRRAYGVVSMCIGTGMGAAAVFEYPGN

SEQ ID NO: 1022204 - protein, 256 aa, Homo sapiens
  misc_feature (8)..(8): Xaa can be any naturally occurring amino acid
SGFLPTLXRLALASVLERPLPVNQARVFRDLEGRADLLDLGPGSLSDGLSLAAPELGCPSKEAIGHPTMQLHGNDSQRLAFKFRHGVSSCRLTPRATAGAYSCLPEGGMKVIDDQPYTVLGTQWLVGAGDVQLLGNGCVGSATVDISVQLRRDKGDAVSVASVPPSCLPTWCISTQGNGACRMGTMICGWDKRGPGLYYVDSEGNRMSGATYLCGSGSVYAYGVMDRGYSYDLEVEQAYERAVEPFNKALQRCYQK

SEQ ID NO: 1022205 - protein, 166 aa, Homo sapiens
SWDWVSGVVPTMHLTIAEELVKATTVGQMGCASSWSVMYITGAGLYAARIPEGFFPGKFDIWFQSHQIFHVLVVAAAFVHFYGVSNLQEFRYGLEGGCTDDTLSLSLPTCGVAARNFPGALEILLAEVRGQSLSGLFLEETLENQYPTSFEPIFTPMGNTIPFPFS

SEQ ID NO: 1022206 - protein, 103 aa, Homo sapiens
SAPTLFKDHGVYGYSEGEEWAGVVSAQGARSIATECSSLTVFWSVSTVLTEARNWSREACTAGVNSAGRRGDQGSPAGSEVRSVKLDRVHPRHVRVQVDSGRT

SEQ ID NO: 1022207 - protein, 157 aa, Homo sapiens
MQAVIFCNTKNERWYWADGDKLTGSQLQLYPPCMETCPQKERESIMKEFRSGRLAGVLYFYEKSGPGGWMSLRCPSSVTYESPVYIPTGELVTHITPRIVETHGRYGRKGVAINFVKNDDIRITHETIEQYYSTSEFECKKSDERLLILSESSRSVG

SEQ ID NO: 1022208 - protein, 45 aa, Homo sapiens
RTASTPTPPQTGGGLEPQANGETPQVAVIVRPDDRSQGAIIADRP

SEQ ID NO: 1022209 - protein, 367 aa, Homo sapiens
MSKWDLIVVAPIHLRKRSKIQVTRWMQSHPDAGPLLHHTPLSHVTVDEHFSPGSHPSHIPSDVNSKQGMSRHPPAPDIPYVINPLSPRWCRTDHPTSWLARSACISHTRVDSVQAYPSSLSVDTSMSRFSHHMIPGPPGPQQLASLIQHIVTPQVKQEHPHTDSAPNATCTASSMQPAATGSSEPKKTSTFKQASECFSCSSHAPEHESECRCMSDSKRHVQLSTRFLAEGGMPSPVKSTLKYSCNSSHGNAKHSSQYASIYPRLCLHAATLWYAKRKRQERENYGILHPGEQTTLISNVASQGIRHPRNSSGDATLVTNPDWLKGHARLNQRKPGLQYNPVRPERTANQYSKKRNTRHMKGQTQKP

SEQ ID NO: 1022210 - protein, 295 aa, Homo sapiens
  misc_feature (11)..(11): Xaa can be any naturally occurring amino acid
  misc_feature (239)..(240): Xaa can be any naturally occurring amino acid
  misc_feature (242)..(242): Xaa can be any naturally occurring amino acid
  misc_feature (244)..(244): Xaa can be any naturally occurring amino acid
  misc_feature (248)..(248): Xaa can be any naturally occurring amino acid
  misc_feature (254)..(254): Xaa can be any naturally occurring amino acid
  misc_feature (261)..(261): Xaa can be any naturally occurring amino acid
  misc_feature (264)..(265): Xaa can be any naturally occurring amino acid
  misc_feature (268)..(268): Xaa can be any naturally occurring amino acid
LFSHRNRLFFXIQKKTKKQNKTKHQQQQARRNIFKRLLRARLTVTRGLRQSRVHTRSAMFKPIASTSKPARPPAPGEGQREKQRVYHSSVHIDVSSLNNTTGGSPICMCGWFGQKYRYIYMIKYSNYRRAPRAAKCPSAKVLPAPPRAGARARARALPGVSAPAGRGTRAGAALAVAGGGERGLGQLLEQVPQGAELARHLLHLLLQPLVLGRELQELVLRLQVAHLGLVAALAHGDVXXLXPXLVLXAVLVHXLLGLALXLRXXLRXPAYRRVGGAWLHGAPRAGRLDEETGEL

SEQ ID NO: 1022211 - protein, 306 aa, Homo sapiens
KETTGQNLLHGWVKQKGGGIFSIVERLLKKGYEVIYLTEPVDEYCIQALPEVDGKRFQNVAKEGVTRSDESEKTKEHVGKQAEKEFEPLLNWMKDKALKDQDYEKAVVSQRLTESPCALVASQYGWSGNLERIMKAQAYQTGKDISTNYYASQKKTFEINPRHPLIRDMLRRIKEDEDDKTVMDLAVVKLEREHFGQDIFYQTTEAYGRIAIETNCFGLSLNKDPEAQVEEEPEEEPEDNSERGSKTQSQDEGEGDGAGTKRKAGNARDLEKVTEFTSEDRGRRELKALENGGVHPLRGKGGPGRQ

SEQ ID NO: 1022212 - protein, 110 aa, Homo sapiens
MQAIFLVTLSVFLHVLHSAPDVQDCPECTLQENPFFSQPGAPILQCMGCCFSRAYPTPLRSKKTMLVQKNVTSESTCCVAKSYNRVTVMGGFKVENHTACHCSTCYYHKS

SEQ ID NO: 1022213 - protein, 249 aa, Homo sapiens
NSYSSCTHSSRNGNFRNAYERKNCRLYTTTQRTQRVGPYGLLQAFADAIEVFTQRAPKTRHIYHHPLHHRPDLSSHHRSSTMNPHLPPYPIPLVNLKPRPPINTSHTLELAVLLNTSDQGEHQDIKNKTLIESPETQSATDNLHMKSHLDHHYYYPTLNNKMDSTYTYSSPSSPHKNHRLIYYLSITDRSGQKYEKYRPDIADRHKTQPRFRNLPNEGCPTLVSWTYNNRIRRRTTSTVYLHRLELHTT

SEQ ID NO: 1022214 - protein, 153 aa, Homo sapiens
KVAGPPFKANTLIAFTKLLGAPTHILRDCVHIMKLELFPDQATQLKWNVQFCLTIPPSAPPIAPPGTPAVVLKSKMLFFLQLTQKTSVPPQEPVSIIVPIIYDMASGTNPAGRHSQTAELFCCCSHDGQQHSEEVCRDESTTTRFDQGDWMPK

SEQ ID NO: 1022215 - protein, 122 aa, Homo sapiens
HVVVIGAAFVVEPLGEYVSVRPARVLFTYDVLRFPQRGFLAPVADVRKFDSCVSVLQGPPQSCSRRYPPGGLPALCITRAHLPWVLTADTCGEILWLVSAPGPPWWIPDVWKWKRTGRVRFP

SEQ ID NO: 1022216 - protein, 46 aa, Homo sapiens
GPHMRWNKGTILKASAEYIKWLQKEQHRARELEHRQRKLEQANRRL

SEQ ID NO: 1022217 - protein, 67 aa, Homo sapiens
TMVLSFFSEKKADYQAVDDEIEANLEEFDISEDDIDDGFRRLLAQLAGRGWENLVPCELETHPEEGF

SEQ ID NO: 1022218 - protein, 205 aa, Homo sapiens
KHKSYGKPCPDKIDRNKTDKHGDLSSEMAHTMLNPKTTLYEAESRKRSLVAQRDLEEPDHEIKNDKSSTPLLKDTYRIGRAWWCTLVVPVIKGAETGGSLQPMSLMAAVSCDLRHYTPAWMTGRNLSQKHQKTKTWSPGVMVAQTHMTDVLRGSEACPLTWGSGPGEIWGTCCPICDALKDRGIIPSQEAPEQGTVRCSGFCEAQ

SEQ ID NO: 1022219 - protein, 73 aa, Homo sapiens
SPLSKRLAHQGVGKRGGRHRDKLASGIIKEGLCRSGSLQLHAADAPRGRPLDEAEEQQASLSSRLGRNAHRLS

SEQ ID NO: 1022220 - protein, 130 aa, Homo sapiens
GVSTNHSQLRAWETRPVWERPRGLCSGTPLCRGSGGAVRSPRPGRPPAHPPQPVHRHVVSDRGNLAAVLQQWVSWWKLASWAQPDPPLVPASWSARWKSAWATGPFPDTCCFQAREAFHGLRSLLPSRGR

SEQ ID NO: 1022221 - protein, 108 aa, Homo sapiens
MVFISLFLFFSFFIWFCTPGGPGVSQSVPGSVFSVFAFRFLGERWPNTLAIWNYSKPGFSNVLSRLSGPQGLSAHLRPHEVLDYRPGHPCPAHIIPVEWNFATTTPLL

SEQ ID NO: 1022222 - protein, 108 aa, Homo sapiens; identical to SEQ ID NO: 1022221

SEQ ID NO: 1022223 - protein, 73 aa, Homo sapiens
  misc_feature (25)..(25): Xaa can be any naturally occurring amino acid
VIAVESDHTAVRHHSVPAIFYPYLXVAPHYSYSCFIFEILHEKEMNGFEWNCPLEHDYLFPWTNIFLPLLFLA

SEQ ID NO: 1022224 - protein, 115 aa, Homo sapiens
  misc_feature (100)..(100): Xaa can be any naturally occurring amino acid
TSNPFAHRDRVNAGTPQSGLRTMGRGLLKGRERSQAKRETHEPKRGKYNRMAQDPREGDNRMGVGGAMKHGRIPHGSGARNFHLLGGGAAEAYEANPGVXTATMRGSKMGSDMRT

SEQ ID NO: 1022225 - protein, 117 aa, Homo sapiens
MNRLFGKAKPKAPPPSLTDCIGTVDSRAESIDKKISRLDAELVKYKDQIKKMREGPAKNMVKQKALRVFTSQKRMYEQQRDNLAQQSFNMEQANYTIQSLKDTKTTVDAMKLGVQGN

SEQ ID NO: 1022226 - protein, 126 aa, Homo sapiens
MNRLFGKAKPKAPPPSLTDCIGTVDSRAESIDKKISRLDAELVKYKDQIKKMREGPAKNMVKQKALRVFKAKEDFLSSGFCHTWYEQQRDNLAQQSFNMEQANYTIQSLKDTKTTVDAMKLGVQGN

SEQ ID NO: 1022227 - protein, 101 aa, Homo sapiens
LRGADGILRAHKHHGHLAGVAEAAKTHEVVVHRLETDFILQAEHKHHWIHPGSKLELRGASFILDQQQVTLAIHHNFLFKPPPFRGLLLDISPRQKTGHQG

SEQ ID NO: 1022228 - protein, 257 aa, Homo sapiens
HASPGRGDGCPGRLLSPGVLVRTGHTVLTWGITLVLFLHDTELRQWEEQGELLLPLTFLLLVLGSLLLYSLCRLMDPGYVNVLAPSLRRELTEEQTAMVPPASLFVRCRYCLVLLPLMGSVHCRGVPPLLSCRYDTTVAWMENCVGERNTHSLWVLPVGCSWVVRFCGACDLWHVVRAPGSSRPWGLWLRCQRGSCDGTFLLLSLFSLVAQLLLGSDLYLVARNHHLGFTLKRMANSAGPTLDGLTNCHFWVPGRDL

SEQ ID NO: 1022229 - protein, 391 aa, Homo sapiens
AVTGVCRLFGLRRRVCLRLCFFGGTSSGVPGRACSLLVRVGGHPFSGGHMGVHRCGVPSLFGKARVWGTTPLVRRPSGPVPPAWELSLHSGILAFVFTPGGPSLVVRDPFAAHKGPTLCPVLGHCPNGKSPVASPGPLVFGPREDLPCFPPFRYPPLESPRGHPLESLSEFGTAESRLGGPKWEAREAPRCVDLRLTIFPLFPLGLVQPTPGFLTNGQHIYQPPEDALMIHQRGNSSPFLRFLEGVPPMFAQMSLVLPEIGVTHTLLPLQYPHSYLIHRVTKQESLALGLLENRSYHPSPHLPVKGPGPSLADPILPFVAAAPCGLLPTHQLLLLLLQPPAKVEAQEESGGIRTRIWDLVSLTNPPQKPTHLAHVLFAKPGNKGLLSFKSP

SEQ ID NO: 1022230 - protein, 263 aa, Homo sapiens
  misc_feature (196)..(196): Xaa can be any naturally occurring amino acid
  misc_feature (198)..(199): Xaa can be any naturally occurring amino acid
  misc_feature (212)..(213): Xaa can be any naturally occurring amino acid
  misc_feature (218)..(218): Xaa can be any naturally occurring amino acid
  misc_feature (220)..(220): Xaa can be any naturally occurring amino acid
  misc_feature (227)..(227): Xaa can be any naturally occurring amino acid
  misc_feature (235)..(235): Xaa can be any naturally occurring amino acid
  misc_feature (239)..(239): Xaa can be any naturally occurring amino acid
  misc_feature (242)..(243): Xaa can be any naturally occurring amino acid
  misc_feature (247)..(247): Xaa can be any naturally occurring amino acid
  misc_feature (255)..(255): Xaa can be any naturally occurring amino acid
  misc_feature (262)..(262): Xaa can be any naturally occurring amino acid
MWPLWRLVSLLALSQALPFEQKGFWDFTLDDGPFMMNDEEASGADTSSVLDPDSVTPTYSAMCPFGCHCHLRVVQCSDLGLKSVPKKISPDTTLLDLQNNDISELRKDDFKGLQHLYALVLVNNKISKIHEKAFSPLRKLQKLYISKNHLVEIPPKPTQLLVELRIHDNRIRKGAQGERSEGLRNMNRIETGREPXEXXGFETGAFDGLKLXXLRISXAXLTGIPKXLPETLNEXHLDXKKXXAIEXEDLLRYSXLYKLGLXH

SEQ ID NO: 1022231 - protein, 67 aa, Homo sapiens
LTGWPFEDANRVLTTPTCTNMPQGHPACPPHTLEDVLKDPLMMGNLFIVPRKKKRISLLPVIGSSER

SEQ ID NO: 1022232 - protein, 169 aa, Homo sapiens
ELLDLLSCVESLRGVRLNAQEVSREWKQLSRILKFIFLPSELTTGLVAWRGILKWPGFETGDETPALGVGFYTIIEETDSEGLQTQGVLTTRHYDERLEINDSEEVASNLYIPTPKNQGLSFVLPIFLSKAMADNSSDECDRGTHNKEKKKTSQDDTSRGALVKNADDR

SEQ ID NO: 1022233 - protein, 271 aa, Homo sapiens
MYTMENISVTLADLFFAGTETTSTTLRYGLLILMKYPEIEEKLHEEIDRVIGPSRAPAVRDRMNMPYMDAVVHEIQRFINLVPSNLPHEATRDTVFRGYVIPKGTVVIPTLDSLLFDNYEFPDPETFKPEHFLNENGKFKYSDYFKAFSAGKRVCVGEGLARMEAVSALSAILQHFNLKSLVDPKDIDLSPVTIGLAVSHANLNSVSFLVHETCAIIIPLQNDCLKKLPSGLVRRLQWVKSTRMLFRSPEFTYQQHMGAHTICIENRLALK

SEQ ID NO: 1022234 - protein, 378 aa, Homo sapiens
ANYIALNEDLNTWTAADMAAQITRRKWEQAGAAEHYKAYLEGECVEWLHRYLKNGNADAAAHRFRQKAHVTHHPRSRGEVTLRCWALGFYPADITLNLAKLDMGEELTQGPLDALCENQGLAGDGTFQKWASVVVPLGKGAELHIAVCTMRGCLSPLTLRWEPPPSTDSYMVIVAVLGVLGAMAIIGAVVAKDEEQGETQVEPGGDYALAPGSRALKCLSEDCKARRQLAWNWYWSDRRMCPGLSWYIQKPQFPLHKHCLMSLGSWVRGEKRWSTKTCPDTQGTHTVMPLVPSKATLGPATPGADCGMFERVATKWAATHRGQNRRGGGTNQRQRPQERRPARALPSMCPITGQKLTINKAETLSCFLLFFSSFSCTE

SEQ ID NO: 1022235 - protein, 42 aa, Homo sapiens
SRNAACCGTLPKLVVEFARAGLTEPVLIRLDVDTKLNEQRST

SEQ ID NO: 1022236 - protein, 136 aa, Homo sapiens
GGEKRKLRLGTRPGFDAQDGCSIVRRGMLLARKWFFLSSLLQVKDTCFLQGYVDSHKVGSQEKEEHYCLADLASLMDKTFERKLPVSSLTISRLIDNISSREEIDHAEYYLYKFRHSPNCVVPEKLDYATPWIRQV

SEQ ID NO: 1022237 - protein, 107 aa, Homo sapiens
MLLHSAARDAPGAVKDTCFLQGYVDSHKVGSQEKEEHYCLADLASLMDKTFERKLPVSSLTISRLIDNISSREEIDHAEYYLYKFRHSPNCVVPEKLDYATPWIRQV

SEQ ID NO: 1022238 - protein, 186 aa, Homo sapiens
MDMKSNTGHGLFLGRQPSFSVRSMPGTPALAICQPHNPGPPMGTPTEDPSGALFLCLFLSPQSFLVLSWAISRLPSLFLLSGLCPQKPQTLHLAPNLKAKRLTFFCNTSWPQYKLENGAQWPENSTSNSSIGGDLDNSMGTWHWAVDPLSGLHHTSQRVQGASPFFSVYPLQGGHVWTPFPHKGFE

SEQ ID NO: 1022239 - protein, 192 aa, Homo sapiens
  misc_feature (146)..(146): Xaa can be any naturally occurring amino acid
  misc_feature (153)..(153): Xaa can be any naturally occurring amino acid
MAHQTGIHATEELKEFFAKARAGSVRLIKVVIEDEQLVLGCHRRQPVGRLGSGLLHRAVLALLDAQPALATWSNGLEFKRNWLQGLSEIGFFPSAWSALINFPPVGGLGRMAGTAGPRWGHRCKKEFARWPHHRIELFGDCEGMTXLFCWVPXNTLFVLCGTCPADLAERELQQIRINEVKTEISVESKHQT

SEQ ID NO: 1022240 - protein, 347 aa, Homo sapiens
MAHQTGIHATEELKEFFAKARAGSVRLIKVVIEDEQLVLGCHRRQPVGRLGSGLLHRAVLALLDAQQPPPTLLYRLDSQNASGPLATGLFLALARLTNLPPCAPASTACTARPTPPAPPAAQQRTPGALAPPTPARSLHRAQLADTASHPPPPRPARLPTTPPLSPPLLPATLPPAPATPSPPATKTQALTATHSRPLHPHGRPDPARTPPRSRPTPHTPQNPLAKPAHRPIHPPCPRPERPHTRQPPTHNPPTATPQRGPHLPPPTTRTRLPPPASPPPNPTLKPTGRTTTPQAPQAHRQRPQALTTYPDRRPPHERAGPQTTPPPPPTEPSPTTPIHRRRHLPCR

SEQ ID NO: 1022241 - protein, 292 aa, Homo sapiens
AERDYRPPRRRRRELSLRRVCLGGADRSALRRPVRPQPPPRRGGDGLARAQRRSGRGLGPPSQRVRRSSAGRWVGAGRRAPGSDGPSRAAAPLRRRLGDMQEHWGLPCCWCWTHGWSWAGPAALLDLCAIFACLDLASCNKVLCWTVGNLAPAQTGVLVACLRKPSFYLVQLNCGANIYTHWCWALAGAFLGACVPNVTIALVVKLGKDGLAGEAHIAWPALHPLQAPCSITSLCATKVGMRCVRPGSSPWTCVGVCLVNTLGALPIIHCTLACMPGCAGAWWATCVVGFAG

SEQ ID NO: 1022242 - protein, 108 aa, Homo sapiens
RRGTTGHRGAAAASCPCGASALAEPTAVRSGVRCVPSLRPGAGATDSRVRSCRSGRGLGPPSQRVRRSSAGRWVGAGRRAPGSDGPSRAAAPLRRRLGDMQEKGMKER

SEQ ID NO: 1022243 - protein, 66 aa, Homo sapiens
MPVKHVNNNGVGNKCDLTTKSSSDYNNQRQEFADSLEFRFGNQCKNATTVEQSFMTTGREIKSDWS

SEQ ID NO: 1022244 - protein, 102 aa, Homo sapiens
MALAPSSCHYIAHYRHQPQGPEGKPGLSHCYLRGPGHSARLWGREGMRPSGMRQTGPGPQFSLLHIGTNAGHRCEWEWECFAKLGSATHAAALAVAVGSSVP

SEQ ID NO: 1022245 - protein, 69 aa, Homo sapiens
KRTWGMYNFSPFLVKKRQRKATWAERNTGVHQAPRPRLTSSATPRYWVTSLHSELQTWPERSQLPHVRW

SEQ ID NO: 1022246 - protein, 102 aa, Homo sapiens
MSLLACRCACSWSRGPGATRLGLFCVSTPQPRHTFYAGPRLSASASSKELLMKLRRKTVLLLCKLQESSGDLWRWTSNSAEIWLHKEAQKGRCWQLKTAIAP

SEQ ID NO: 1022247 - protein, 1056 aa, Homo sapiens
MDDKASVGKISVSSDSVSTLNSEDFVLVSRQGDETPSTNNGSDDEKTGLKIVGNGSEQQLQKELADVLMDPPMDDQPGEKELVKRSQLDGEGDGPLSNQLSASSTINPVPLVGLQKPEMSLPVKPGQGDSEASSPFTPVADEDSVVFSKLTYLGCASVNAPRSEVEALRMMSILRSQCQISLDVTLSVPNVSEGIVRLLDPQTNTEIANYPIYKILFCVRGHDGTPESDCFAFTESHYNAELFRIHVFRCEIQEAVSRILYSFATAFRRSAKQTPLSATAAPQTPDSDIFTFSVSLEIKEDDGKGYFSAVPKDKDRQCFKLRQGIDKKIVIYVQQTTNKELAIERCFGLLLSPGKDVRNSDMHLLDLESMGKSSDGKSYVITGSWNPKSPHFQVVNEETPKDKVLFMTTAVDLVITEVQEPVRFLLETKVRVCSPNERLFWPFSKRSTTENFFLKLKQIKQRERKNNTDTLYEVVCLESESERERRKTTASPSVRLPQSGSQSSVIPSPPEDDEEEDNDEPLLSGSGDVSKECAEKILETWGELLSKWHLNLNVRPKQLSSLVRNGVPEALRGEVWQLLAGCHNNDHLVEKYRILITKESPQDSAITRDINRTFPAHDYFKDTGGDGQDSLYKICKAYSVYDEEIGYCQGQSFLAAVLLLHMPEEQAFSVLVKIMFDYGLRELFKQNFEDLHCKFYQLERLMQEYIPDLYNHFLDISLEAHMYASQWFLTLFTAKFPLYMVFHIIDLLLCEGISVIFNVALGLLKTSKDDLLLTDFEGALKFFRVQLPKRYRSEENAKKLMELACNMKISQKKLKKYEKEYHTMREQQAQQEDPIERFERENRRLQEANMRLEQENDDLAHELVTSKIALRKDLDNAEEKADALNKELLMTKQKLIDAEEEKRRLEEESAQLKEMCRRELDKAESEIKKNSSIIGDYKQICSQLSERLEKQQTANKVEIEKIRQKVDDCERCREFFNKEGRVKGISSTKEVLDEDTDEEKETLKNQLREMELELAQTKLQLVEAECKIQDLEHHLGLALNEVQAAKKTWFNVVHLP

SEQ ID NO: 1022248 - protein, 997 aa, Homo sapiens
MDDQPGEKELVKRSQLDGEGDGPLSNQLSASSTINPVPLVGLQKPEMSLPVKPGQGDSEASSPFTPVADEDSVVFSKLTYLGCASVNAPRSEVEALRMMSILRSQCQISLDVTLSVPNVSEGIVRLLDPQTNTEIANYPIYKILFCVRGHDGTPESDCFAFTESHYNAELFRIHVFRCEIQEAVSRILYSFATAFRRSAKQTPLSATAAPQTPDSDIFTFSVSLEIKEDDGKGYFSAVPKDKDRQCFKLRQGIDKKIVIYVQQTTNKELAIERCFGLLLSPGKDVRNSDMHLLDLESMGKSSDGKSYVITGSWNPKSPHFQVVNEETPKDKVLFMTTAVDLVITEVQEPVRFLLETKVRVCSPNERLFWPFSKRSTTENFFLKLKQIKQRERKNNTDTLYEVVCLESESERERRKTTASPSVRLPQSGSQSSVIPSPPEDDEEEDNDEPLLSGSGDVSKECAEKILETWGELLSKWHLNLNVRPKQLSSLVRNGVPEALRGEVWQLLAGCHNNDHLVEKYRILITKESPQDSAITRDINRTFPAHDYFKDTGGDGQDSLYKICKAYSVYDEEIGYCQGQSFLAAVLLLHMPEEQAFSVLVKIMFDYGLRELFKQNFEDLHCKFYQLERLMQEYIPDLYNHFLDISLEAHMYASQWFLTLFTAKFPLYMVFHIIDLLLCEGISVIFNVALGLLKTSKDDLLLTDFEGALKFFRVQLPKRYRSEENAKKLMELACNMKISQKKLKKYEKEYHTMREQQAQQEDPIERFERENRRLQEANMRLEQENDDLAHELVTSKIALRKDLDNAEEKADALNKELLMTKQKLIDAEEEKRRLEEESAQLKEMCRRELDKAESEIKKNSSIIGDYKQICSQLSERLEKQQTANKVEIEKIRQKVDDCERCREFFNKEGRVKGISSTKEVLDEDTDEEKETLKNQLREMELELAQTKLQLVEAECKIQDLEHHLGLALNEVQAAKKTWFNRTLSSIKTATGVQGKETC

SEQ ID NO: 1022249 - protein, 219 aa, Homo sapiens
MEYLSAFNPNGLLRSVSTVSSELSRRVWNSAPPPQRPFRVCDHKRTVRKGLTAASLQELLDKVLETLLLRGVLTLVLEEDGTAVDSEDFFQLLEDDTCLMVLEQGQSWSPKSGMLSYGLGREKPKHSKDIARITFDVYKQNPRDLFGSLNVKATFYGLYSMSCDFQGVGPKRVLRELLRWTSSLLQGLGHMLLGISSTLRHVVEGADRWQWHGQRHLHS

SEQ ID NO: 1022250 - protein, 133 aa, Homo sapiens
PPGVVAEEERAPMAVLLETTLGDVVIDLYTEEGPRACSAIFLQTVQNTQYYTLCALIHNATEAHFHPYQQWRSYSALAVEENRIFGNCMVIRQAFVRQKKSRELSTRRTASVHGELMAVINMDLSFLSPQEKI

SEQ ID NO: 1022251 - protein, 202 aa, Homo sapiens
QASRRAVRSPSSSAQPAACGGVRRRQASASSSVSRCGRRSSLHPPPRPPLASLLPLPELRRCPGHARTLLQEQRKTPRWAAEPTFRLAAPDPASRPAACGTQGARLSLPGGLGPASSCRLRARNPAFAFGTLQAEKIWLRRLTQTPGAHAVYTQDGGFYGNPRTNMELCSGVLPKNILQKAANSGKNEPNGDTLGGATVLPQ

SEQ ID NO: 1022252 - protein, 156 aa, Homo sapiens
QASRRAVRSPSSSAQPAACGGVRRRQASASSSVSRCGRRSSLHPPPRPPLASLLPLPELRRCPGHARTLLQEQRKTPRWAAEPTFRLAAPDPASRPAACGTQGARLSLPGGLGPASSCRLRARNPAFAFGTLQGPEKEPLKVNSTPLAKRELQSGK

SEQ ID NO: 1022253 - protein, 697 aa, Homo sapiens
GTRAGRSDVLPVAGGEVRALQEGGCGDKMKIFVGNVDGADTTPEELAALFAPYGTVMSCAVMKQFAFVHMRENAGALRAIEALHGHELRPGRALVVEMSRPRPLNTWKIFVGNVSAACTSQELRSLFERRGRVIECDVVKDYAFVHMEKEADAKAAIAQLNGKEVKGKRINVELSTKGQKKGPGLAVQSGDKTKKPGAGDTAFPGTGGFSATFDYQQAFGNSTGGFDGQARQPTPPFFGRDRSPLRRSPPRASYVAPLTAQPATYRAQPSVSLGAAYRAQPSASLGVGYRTQPMTAQAASYRAQPSVSLGAPYRGQLASPSSQSAAASSLGPYGGAQPSASALSSYGGQAAAASSLNSYGAQGSSLASYGNQPSSYGAQAASSYGVRAAASSYNTQGAASSLGSYGAQAASYGAQSAASSLAYGAQAASYNAQPSASYNAQSAPYAAQQAASYSSQPAAYVAQPATAAAYASQPAAYAAQATTPMAGSYGAQPVVQTQLNSYGAQASMGLSGSYGAQSAAAATGSYGAAAAYGAQPSATLAAPYRTQSSASLAASYAAQQHPQAAASYRGQPGNAYDGAGQPSAAYLSMSQGAVANANSTPPPYERTRLSPPRASYDDPYKKAVAMSKRYGSDRRLAELSDYRRLSESQLSFRRSPTKSSLDYRRLPDAHSDYARYSGSYNDYLRAAQMHSGYQRRM

SEQ ID NO: 1022254 - protein, 669 aa, Homo sapiens
MKIFVGNVDGADTTPEELAALFAPYGTVMSCAVMKQFAFVHMRENAGALRAIEALHGHELRPGRALVVEMSRPRPLNTWKIFVGNVSAACTSQELRSLFERRGRVIECDVVKDYAFVHMEKEADAKAAIAQLNGKEVKGKRINVELSTKGQKKGPGLAVQSGDKTKKPGAGDTAFPGTGGFSATFDYQQAFGNSTGGFDGQARQPTPPFFGRDRSPLRRSPPRASYVAPLTAQPATYRAQPSVSLGAAYRAQPSASLGVGYRTQPMTAQAASYRAQPSVSLGAPYRGQLASPSSQSAAASSLGPYGGAQPSASALSSYGGQAAAASSLNSYGAQGSSLASYGNQPSSYGAQAASSYGVRAAASSYNTQGAASSLGSYGAQAASYGAQSAASSLAYGAQAASYNAQPSASYNAQSAPYAAQQAASYSSQPAAYVAQPATAAAYASQPAAYAAQATTPMAGSYGAQPVVQTQLNSYGAQASMGLSGSYGAQSAAAATGSYGAAAAYGAQPSATLAAPYRTQSSASLAASYAAQQHPQAAASYRGQPGNAYDGAGQPSAAYLSMSQGAVANANSTPPPYERTRLSPPRASYDDPYKKAVAMSKRYGSDRRLAELSDYRRLSESQLSFRRSPTKSSLDYRRLPDAHSDYARYSGSYNDYLRAAQMHSGYQRRM

SEQ ID NO: 1022255 - protein, 179 aa, Homo sapiens
MFVKTVDALTHSWTFPWVPFSTNVASDVLSIGTIGTYSVDLLLCSRMIAYIPFCLVQPPYGECLRCPLTDVLAFPMHLACLSLALVVVWGGCSPVSRHLVSGTVPVILGVRATRSPLSRSLSEHFPSIPSCQFLWSMWLSPASLMPLLVALVEDACPGMSQHHVAREPHCQPLLDLFPT

SEQ ID NO: 1022256 - protein, 179 aa, Homo sapiens; identical to SEQ ID NO: 1022255

SEQ ID NO: 1022257 - protein, 207 aa, Homo sapiens
MLSLLIALKQKKPWNSTCDALTFECKCSFLAALAGGVPCCLLAIAAELHKTRRASETVRDRSWGRGVQHASGLSRPGRSTCPWNKADYLHTLERGRTRMGALTDSRQGRKLTKTHRYRDYQSGLRTYGTRDSGERQARAVEAHHVTVKGNTKHTGSRAPRQVTRKGAPVQAAGRATPLDRTPGRLEGATKREREGREHVTRRKCEAP

SEQ ID NO: 1022258 - protein, 321 aa, Homo sapiens
MRVKCSPGGPVETLSPETVSGGLTGSARHPVTSTLPVLEVTTAPLPLPFSHLFTRSHRHALLPLRKTGLTLRIESLHHGELEQLNAELGLEPETTPKPPDAPPLGPDHPCSGTVQTKKLRPWQSHEPAVEEGAARTVGASLARSELDSSFANTLGWGNCVGKLAVDGSYSTPLALTALDCCPGHGAVPCAIGQASQMRKLIYHDALEECEQALGEVFTTRLALGSPDTSSYTRSHYAQRLIGLAPTKPHIIRTAAPRRRTQGAQASTTQARPGPHGDAARRENHTHCTPHGQAPAPADKEGGPTPRGPSHHQTPADKAGPV

SEQ ID NO: 1022259 - protein, 375 aa, Homo sapiens
MWAFSELPMPLLINLIVSLLEICRPQVTLIPGLPGATSLACSAICRSVTINKTSTDSMIPRIPGSDSAVLYIHYHPSSAFIPFPFLNCFVTGAVYRHSPNHDFVALISVPSLPSACTDLPEAFADDVLNLRWRHKLLQYLQLTSTYLSSWSISPNLGHHDIDGAPRPSDRSLGPASRTCGILCTIVSTWGAWPVFLEPLPITVSISNALNSAYKRGQTTHPLHDNNQETFNLAKLTTHITQTTNLSTHHTYYIPTTLHTPYSICHNTKLKSRLADALRMLQTLLGCRSRRSRLIEEGEKKAKHIAECSDVTNRQAESRMLIRARKNNTSAALAARRRCSSENQIYPHTTIHNITTPAMHEESSLRLCRFLLVVAQ

SEQ ID NO: 1022260 - protein, 236 aa, Homo sapiens
MPELDGGCPARRGLRTNGSALHLRALGMLLALPGPWARVAALEDSVGSSSVTVVLLLLLAPTAGHWPSTGLAPASAVTQGATTTLARLGAALWGRTRRLASGPGPPGLLACRPGAEAGVHRQMTLSDKEDEQGHRAMTTSRDGGLEGLTLGECASSNVERRSKPKKQSSPVRGLRKARRQVTLGGATWSFGSPGPASAGGSAEALLSDLHAFAGSAALGYSARHLGASASMSRDCR

SEQ ID NO: 1022261 - protein, 102 aa, Homo sapiens
MMRGVECSRSVSLSLLCSYILALVLVVSFLISPPCVYYFCFRLCSFLPIRSVCFVPRALPVCVLSVLDLSVPRPCIMIFIGLFLPRPYSGIPRCRGKLGELY

SEQ ID NO: 1022262 - protein, 145 aa, Homo sapiens
MDNGMFSGFIMIKNLLLFCISMNLSSHFGFSQMPTSSVKDETNDNITIFTRILDGLLDGYDNRLRPGLGERITQVRTDIYVTSFGPVSDTEMEYTIDVFFRQSWKDERLRFKGPMQRLPLNNSLPARSGPQTRSSTTGRSPSLTT

SEQ ID NO: 1022263 - protein, 84 aa, Homo sapiens
CVSRWHRVVSEGHTLENCCYQSKSAGVCRLLGVHLHLLWAQSACVVLSPERSYILEQRPGDLQGSSHYFANPRSPPVQGTPVSL

SEQ ID NO: 1022264 - protein, 168 aa, Homo sapiens
MEQEQIIFKYLFFKGSEIKLSILCGHEGERTLLIKRPEVVSTMASTLYFSVKIICTVSRTSHCCSMSSQQQKQPCIPPPQLQQQQVKQPSSLHLRNLCIPKTKEPCHPKVPEPCHPKLPEPCQPKFQSHEPKVLEPCPSIVTPAPAQQKDEQKYVVTAMPLGSRHQML

SEQ ID NO: 1022265 - protein, 93 aa, Homo sapiens
MSRHSRCEQRSSYEAILQANRQPGNLYNPTQTPRPTNTYFGSDIHDPRVVNKDGYQECHSLSQTCLFDYRVPVLVILTHLHPLFVEKLALFWN

SEQ ID NO: 1022266 - protein, 73 aa, Homo sapiens
IRGLKLGAIAEMRKIAASRNFSFCIAHRAKPIYVALLATRLQVIGVHHAFGDLLVILTHLHPLFVEKLALFWN

SEQ ID NO: 1022267 - protein, 315 aa, Homo sapiens
  misc_feature (4)..(4): Xaa can be any naturally occurring amino acid
  misc_feature (311)..(311): Xaa can be any naturally occurring amino acid
GGVXTVWAASWGGRGRPAARRRPRGLAATMGFELDRFDGDVDPDLKCALCHKVLEDPLTTPCGHVFCAGCVLPWVVQEGSCPARCRGRLSAKELNHVLPLKRLILKLDIKCAYATRGCGRVVKLQQLPEHLERCDFAPARCRHAGCGQVLLRRDVEAHMRDACDARPVGRCQEGCGLPLTHGEQRAGGHCCARALRAHKGAPGPLGALHKALKKEALRAGKREKSLVAQLAAAQFELQMTALGYQKKFTEYSARLESLSRWRWPRRPAAQGEETKRLILSARDPGSWDSYYWWRPSVDNYDGYSVKNLCIXIVEV

SEQ ID NO: 1022268 - protein, 297 aa, Homo sapiens
MCAQRVTDTPEVKWQKVLYERQPFPDNYVDQRFLEELRKNIYARKYQYWAVVFESSVVIQQLCSVCVFVVIWWYMDEGLLAPQWLFGTGLASSLVGYVLFDLIDGGDGRKKSGRTRWADLKSTLVFITFTYGFSPVLKTLTESVSTDTIYAMAVFMLLGHLIFFDYGANAAIVSSTLSLNMAIFASVCLASRLPRSLHAFIMVTFAIQIFALWPMLQKKLKAYTPRSYVGVTLLFAFSAFGGLLSISAVGAILFALLLFSISCLCPYYLIHLQLFKENIHGPWDEAEIKEDLSRFLS

SEQ ID NO: 1022269 - protein, 83 aa, Homo sapiens
AYQESTLRAVRLGAVQRVLFVSNHAIKRSVSQCCPNTPVPCPLPLLKEEAASSWAPVLACPAHICIWGDPTRCRRCMAMQCLC

SEQ ID NO: 1022270 - protein, 154 aa, Homo sapiens
SPATSGHRPHPGAGRFRPESESASKPHASQNVRRGRRSVGAAACPCSRTDSNKSVSTSTSHICVNAEACGCAGLARLHSVQTHGLMHAHARAHTHTPNYLRDGESRCGLASRAVTHAQGAGRLRKAVSFFFFPSFSSLYRFHLMGKTTGRALKG

SEQ ID NO: 1022271 - protein, 210 aa, Homo sapiens
MAWPGGTLLLDALGSGGAAEPHVSRRWAAGSPKTGRSWQQTHSGPLTLGGAGDALRPVDQEWLKGTRCCRRSNDGYTIALHWLITYDTRDAAALTGSPASAGGIKGHSHGMRRQQSGWDPEAEETIGDKANRGHERLGGAINVIRGDGDHKTNTVRRTHWQFECTARGYTRATQARLNGGRFGRMRALGESEASRTGTVTDDPVGNSVRP

SEQ ID NO: 1022272 - protein, 399 aa, Homo sapiens
GADDFVCRSSGGLRTRGDPQEIDPLRTPELLQLVTTLLPLDTYVPFLHKLAHCHDECAQRCVMPACSLAAAPCDSQGFALSVGAVCVVPRCASRAPRALCGLCGQFPCGPHRNHSNGLCLQTWPITRGASCKQPGALASRNLNVADGRGGQGARAGQGQLIATAPYPRAQPGDGSVARRLERCCLLSWLSQSLRPTRDWETRRSQRRARNHAIELSRGAPWQPAWHDPAVSNHGTIAGTHFCHAVMAMSPAWVGRDTWHGRALRGLRCRGTATYSIARRGSSGTAAHATPGTHRAGDPADALPSKPDCRLLDQTNPCDTGAPPTALLAQHLARGRTPSARVPCVENTPTVNGHPRPPTGPHTQTRAPGQDRLLSTTYDHTLNQPRHAPSTPNDKTAEPH

SEQ ID NO: 1022273 - protein, 369 aa, Homo sapiens
GADDFVCRSSGGLRTRGDPQEIDPLRTPELLQLVTTLLPLERHIFPFFTRSAAGQHERLEGGAGLALALPPGLPGFALQGAGGGGRLAGILRRGWLWANCPGTPSCQTFARAMLAKSGPVDLLGILERYARTRSRPENSSEVMDEAVMWSGKEGHSTGHAYPGGPRRGRTVGRGTRSDAGHPDVAWSLGPMGALSCWREGRTQGGGGPMQMKRRGGALGCLLGRTLLLRHSWDRLACRICWPSVSVGIASLLGVGAGYPGRAGGLGGTCGVRGGYTLIAHVAVRGRWPPSRSKCAWSLGGPGVTMAGAGWNREGLGSTGGGVWAAYFSQYSGQGPEKPGRSGVGGSRSHWDGVTKGYKGGHGQTGAKPT

SEQ ID NO: 1022274 - protein, 415 aa, Homo sapiens
EREREVAARSARRPEAVARIPPLRRGATTLGVTTPAVSWGDAPSGGGVPCVGEPEGLPPPAKKGLGSLRRGFLPEDPDGAGSSWDPTHCVKSKPWKREAAAAALGRLRYCCEPWLRVEGCVVDRFREGRTEHQYPSSRAEACHVTQGTKSKSRRTAPGAGQGTEGQRDASVARDYCVLLGQRVSTRLLDVTCYVEQGPGEAPGAGLHRSLVHRKRGDDDHTIARPPTHLDPSRPRGMKERRTATIKGAVGGDPAKDHPLIGLALQQGTRRADRMRLRGEIHESIVESARTGGHSVDNHRDLLGERGQGTPWGEDLVRRVPHEGGTPNGGPGGTQEGSTGKKRGGAGGVTPPYGGPNNEKSSDQGRWAQTRTGSDNGEHSYGTVGEPRAPRQVDTIGEGDGRETTERGIATRSKNR

SEQ ID NO: 1022275 - protein, 330 aa, Homo sapiens
EREREVAARSARRPEAVARIPPLRRGATTLGVTTPAVSWGDAPSGGGVPCVGEPEGLPPPAKKGLGSLRRGFLPEDPDGAGSSWDPTHCVKSKPWKREAAAAALGRLRYCCEPWLRVRGLLLSFEGSEEPMTHACLGLTTRVTQWSTVPAVKALGTAKVESSTPVIAVDNAVSLSGTEGPGCNSRQHRAREAPCGWLPVACTPMLGVPPSSPTHGPAPACRSGAAKACGGPQGPLFGGGQGPWPSWLVGSRALGLSVKLSTGSVTGHGCLAALWPVQSTPTWPCQCRGEGLRGYRHGHKRALRAVTARPGPVSSEPGRGALVARGLEGGI

SEQ ID NO: 1022276 - protein, 493 aa, Homo sapiens
MADSKPLRTLDGDPVAVEALLQDVFGIVVDEAILKGTSASEKVCEWKEPEELKQLLDLELQSQGESREQILERCRTVIHYSVKTGHPRFFNQLFSGLDPHALAGRIITESLNTSQYTYEIAPVFVLMEEEVLKKLRALVGWNSGDGVFCPGGSISNMYAMNLARFQRYPDCKQRGLRALPPLALFTSKECHYSITKGAAFLGLGTDSVRVVKADERGRMIPEDLERQIILAEAEGSVPFLVSATSGTTVLGAFDPLDAIADVCQRHGLWFHVDAAWGGSVLLSRTHRHLLDGIQRADSVAWNPHKLLAAGLQCSALLLRDTSNLLKRCHGSQASYLFQQDKFYDVALDTGDKVVQCGRRVDCLKLWLMWKAQGGQGLERRIDQAFALTRYLVEEIKKREGFELVMEPEFVNVCFWFVPPSLRGKKESPDYSQRLSQVAPVLKERMVKKGTMMIGYQPHGTRANFFRMVVANPILAQADIDFLLGELELLGQDL

SEQ ID NO: 1022277 - protein, 472 aa, Homo sapiens
MATKCTKCGPGYSTPLEAMKGPREEIVYLPCIYRNTGTEAPDYLATVDVDPKSPQYSQVIHRLPMPYLKDELHHSGWNTCSSCFGDSTKSRNKLILPGLISSRIYVVDVGSEPRAPKLHKVIEASEIQAKCNVSSLHTSHCLASGEVMVSTLGDLQGNGKGSFVLLDGETFEVKGTWEKPGDAAPMGYDFWYQPRHNVMVSTEWAAPNVFKDGFNPADVEAGLYGSRIFVWDWQRHEIIQTLQMTDGLIPLEIRFLHDPSATQGFVGCALSSNIQRFYKNAEGTWSVEKVIQVPSKKVKGWMLPEMPGLITDILLSLDDRFLYFSNWLHGDIRQYDISNPQKPRLAGQIFLGGSIVRGGSVQVLEDQELTCQPEPLVVKGKRIPGGPQMIQLSLDGKRLYATTSLYSAWDKQFYPDLIREGSMMLQIDVDTVNGGLKLNPNFLVDFGKEPLGPALAHELRYPGGDCSSDIWI

SEQ ID NO: 1022278 - protein, 74 aa, Homo sapiens
MPAWSPEEACLLFKSGMGAVGCECSGAAVENTSCLIERVLETEDGTQPGQPAPGLYRIARCTFLLMGNGVFGHV

SEQ ID NO: 1022279 - protein, 206 aa, Homo sapiens
MEEEEEGGTTDADGSQVQSQGGPTRVVTGHCRAKDPNRDPAQASSQTLNGSSVRTVPATVRPWHNVPHGPVPRIETSFSARYSFCVTVFHPRMSVQAKSHKAQLNAYEASEHARERVTLPVVAPGATVRHKDQDVDPLVFMNGCLMTRKCTSTNTGTHKCKPTDDYVVEPCHSALQHTKGQPDMEPNRELTQTRDRSMRRDHVEHN

SEQ ID NO: 1022280 - protein, 228 aa, Homo sapiens
MLVDYARSRARGVLSARPRPGPPPMHHRGRPRGVTPGLRWLSRDPKPLPCRARAKPVPDLDRLCCPKLELSRRLSPSCSGGKPRGGGPFCGLVTAGSGAAGLGLVAPGAPASSPGPFEIGGISLRENRNLASVTLPKGAEGIAAGTSGPGPSQGRRLRWGQKQAPPISLEKLDRLLAIRINLRLGIASSQGSSRGEGCRGSFPGAWAVSGATQVPAACRLQNFAIIWW

SEQ ID NO: 1022281 - protein, 299 aa, Homo sapiens
TQCLSPALQPQPQCLKATSQREHVAFSNSRADFLRAPSPSLSDEAEEPCLGSLPSSEDGLESSAGVDSPYAPTAGSALPTLADAQQHNTVVRQDATDELPAPVRWHNTKGWSSLPYSTPLCQTTSGQETEKAGSLVADCALRIFLAKLIVLQHTVGSTIRRFPSFSGNHFLFSGLQKAGKASSTSFGYAPAAWELTADLSGSPPDAGGTLEWSPKLAAPPVPFGQPCLVRGSPISLILIEAPRFYDCACRRVNTLGITLSWGTPRDPVNVDTTWPFFGPDYLYSFLQGGYTAVSTSLAL

SEQ ID NO: 1022282 - protein, 281 aa, Homo sapiens
REKPLRLGRGLVYRTRGQADDSLKNLHLELTESCLDMMARYVFSNFTAVPKRSPVGEFLLAGGRTKTWLVGNKLVSVTTSVGTGTRSLLGLDSGELHVRPGVRRSQPRGACVDSTIGGCRAKLVVPGWAARCPAGGPVDRVRSMSVGAMVFEFGALDVPGLPVPVELWLLLQDHWTAPVARNLRRPQLAPGFLCRRRLNPGGLCAPADPGLGGDPGPGGATWEDQLVLMSLENPLSPFSSDNQTNIAPAGSLSKALMAVERFKGGTGTQALLPVTCRCRQA

SEQ ID NO: 1022283 - protein, 53 aa, Homo sapiens
MTALTETALTETALTETALTETALTETALTETALTETALTETAQTALTETALT

SEQ ID NO: 1022284 - protein, 99 aa, Homo sapiens
DPPIHPSILPSFFHPPTHPSLHSPSIHPSEDQLPSHLSTSVCPTLLHKHEEWPWDPRDRSYRDRSYRDRSYRDRSYRDRSYRDRSYRDRSYRDRSDRSY

SEQ ID NO: 1022285 - protein, 183 aa, Homo sapiens
MVKEWKCRNQPPFKKKKIQKADKSWEYGKGPMMTPTRGSLGLEGWGVSGLRTSISISPGHRLWPDPLSSAPFWVPLPQLPPGTGALPFHLLLVSQPSPGAVGPAHEPWHPAWGGEVPGQSPRNSGGAMGLLAKHLADWPCPVWASSGWLLVRDGLTPSSSRVTQQGWGGCGTLELEDSGEAGL

SEQ ID NO: 1022286 - protein, 177 aa, Homo sapiens
MPRTLVHFWVMSLCMDAECSYCSWYYALSAMLIAGCIQQLHRVTAGPRRSGADGIRGLSLNADRYALTGAVEARAPPQQKNGRAHGDGDAGNRKRRRQVKEPRPWVHRVQGKAGRADNGGRTEETYGQAMELKGTEDNGPMTQTQRLARGLYLAGPQSQEAGETKVRTSTEHRHTQW

SEQ ID NO: 1022287 - protein, 68 aa, Homo sapiens
MQKDVNNGECFRADHLLKAHLQKLMSDKKSSVEKKSEMESVVAQLDNYGQQELADLFVNYNVKSPITG

SEQ ID NO: 1022288 - protein, 151 aa, Homo sapiens
PPPHRISRREPAPPAPIVGGNKGRSGPLPPVPLGIAPSPTRPRGPPAPGRGGSSKHIPLQLLTSGPLAPLHPWSCWATNCINSGNNGNYSQAPGELDQPSPNSPPALVPAGAWAPRWGSGSAFGIKSGREFQLNKDPGGPRRGQELEATTQ

SEQ ID NO: 1022289 - protein, 342 aa, Homo sapiens
MAKPGCAPIRSPIKAWTGSACCGPGWSDDSSRRFDAGTGFRLVGLSDSSSVAILIGDTFESSTTLTMNGPDPYLTSCEDMVDRYKLTLLVGRYVAMVWEGLNVVKTGRVMLWGDQSSRFKVQGTIRGDVSCIQVGRKHHSWHVHSVKSADAEISLWFKPEELVDYKSVLMTRVYEEEVDTTAVSFSIGVVESLDTALHSIDLEATGLIILFIDALIGTTNSVLDSREQDLTQGASPFKRYHYERNPNIIGYHRVSCYQMCHNSTPYSKAPRPWPRRYHPVSDLVTQRMHGKNFESGTLISSGRTICAQTTPRNIKHYKNTYPSDAGYTGYTLTTNISIITSD

SEQ ID NO: 1022290 - protein, 99 aa, Homo sapiens
CWVLSGVVFAGLVKYMNSGRYVAMVWEGLNVVKTGRVMLWGDQSSRFKVQGTIRGDVSCIQVGRKHHSWHVHSVKSADAEISLWFKPEELVDYKSCAHD

SEQ ID NO: 1022291 - protein, 177 aa, Homo sapiens
MAAMASLGALALLLLSSLSRCSAEACLEPPDQPLSYYTTSDAVISTETLFHMWEISLTFKNRVQNMALYARLSVENNSLSLWGQDVGRYHGVLAAWTTRAPTQCTYEVSEFFDEESYSPPHGRLRVNNEDISIIPPLFDRSSVDHRGTCETGPGCPLTCAGCACIGLVIYYLAFRCE

SEQ ID NO: 1022292 - protein, 306 aa, Homo sapiens
GLRCARRTSEAAGSGAGPPGPLQWPQRQQLGPPPRPADRRTQEVGPGVTPPPGRPAAMNLQRGEPYPSSDHRAVVVQRTVTTLTEDPHPMAIKVFPKRGGPHRPPGHHRRALRGPPYAGGLFRSETPCCGKDFPRFPTPRANFLTKYLPTPELVGRQIGEICVKRGSRGDWHRPEPGAIRPLYWLNPSMCLFVSTLNPEFCTQRGRRAACSLENLRGVLQARGPSASQIIHGGPPGGPAAGPEAGVPASGISFSTTWARGPEEAGGSTWRNLVERKRVGADKRESGAGGEWAVLFPDAVFCSLNCF

SEQ ID NO: 1022293 - protein, 218 aa, Homo sapiens
MWPPSGAVRNLALVLARSQRARTCSGVERVSYTQGQSPEPRTREYFYYVDHQGQLFLDDSKMKNFITCFKDLQFLVTFFSRLRPNHSGRYEASFPFLSLCGRERNFLRCEDRPVVFTHLLASDSESPRLSYCGGGEALAIPFEPARLLPLAANGRLYHPAPERAGGVGLVRSALAFELSACFEYGPSSPTVPSHVHWQGRRIALTMDLAPLLPAAPPP

SEQ ID NO: 1022294 - protein, 145 aa, Homo sapiens
MLSVRHRLGADGGDGAPGVLKPGNPLPPGVDLHDAEHRARLVCSKHEGDGIARHTKVWTLRTKSLRTEAFQSPVPRVRRHNTHTVNTHNMRPDGLPRGVHIRGAGFRIHGRAIRDTLTGPEQKTQARLVGHLDAQYARYRLGALG

SEQ ID NO: 1022295 - protein, 35 aa, Homo sapiens
MAFRSRYLNIEILSTTYNDLVNGGTVAPMDLLLIT

SEQ ID NO: 1022296 - protein, 211 aa, Homo sapiens
  misc_feature (7)..(7): Xaa can be any naturally occurring amino acid
  misc_feature (32)..(32): Xaa can be any naturally occurring amino acid
  misc_feature (39)..(39): Xaa can be any naturally occurring amino acid
  misc_feature (136)..(136): Xaa can be any naturally occurring amino acid
RPRMETXPPQPCGKRARPKECRKTRQAARQTXPSKKMSXTEQGDASHHELRGNAFYNNNAYFALDAYNKGCRAARSYEAVAAAAASVYNYAEQTLSQLPQVQKTAMASHLTSTSLDPYDRHLLPTSGAAAHQVLLXQQQLLLLLQLPLHITGGIGAPCFALQPQSPLLERATVTGMRVSCPKLQQPRGILCTTWPGMEREQYADRARNSAF

SEQ ID NO: 1022297 - protein, 257 aa, Homo sapiens
MSRSSGPVMLRGPWLPALCSFSCCCSRARLSPAAPPGRGREPTSRARPGPGRASSCLQEQLMGGGVPSPSVYWTASSACQVCGPMTCDGGTRSAMPPGPLGLAPSSVGPSGYLDLLTTWYCSFNRLAALEWDCRISKQFYMEQLDEARSGRCSSSATRAWSSSMKRRSCTQAAWRSLCHTLERRAPEWPQGLSLHGLSYCISGTLQDMEKALESMPLGWGEGVSRREGLQEDPGVLPLQPHDKVKSQGGDIINEVES

SEQ ID NO: 1022298 - protein, 357 aa, Homo sapiens
MSRSSGPVMLRGPWLPALCSFSCCCSRARLSPAAPPGRGREPTSRARPGPGRASSCLQEQLMGGGVPSPSVYWTASSACQVCGPMTCDGGTRSAMPPGPLGLAPSSVGPSGYLDLLTTWYCSFKDCCPRVGLQNLQATLTGLEWDLNVRLKLAQNLCVPGSLVLRNSEGLLRDAPCQEKALALSSTDWSGTGKELRVATDAGGRTLYSGNGADELTVVSRDVNRHVPLSSPQICGTLYKDMEQLDEARSGRCSSSATRAWSSSMKRRSCTQAAWRSLCHTLERRAPEWPQGLSLHGLSYCISGTLQDMEKALESMPLGWGEGVSRREGLQEDPGVLPLQPHDKVKSQGGDIINEVES

SEQ ID NO: 1022299 - protein, 254 aa, Homo sapiens
RKGGSWRPEEGVGAGEDGGSEAGTASWRCPVARRESSEKPNAEDMTSKDYYFDSYAHFGIHEEMLKDEVGTLTYRNSMFHNRHLFNGTRVVCLDVGSGHRHPLHCFAAKARGPAKVNRDRVFQYISRLMRVERSLKGPNKVRPRGVTIIKADTGWQGRWEASQLAEVCGPSSSASGWATCLFYESMLNTVLYARDKWLAPDGLIFPERATLYVTAIEDRQYKDYKIHWWENVYGFDMSCIKIVAIKEPYVDVVD

SEQ ID NO: 1022300 - protein, 229 aa, Homo sapiens
  misc_feature (76)..(76): Xaa can be any naturally occurring amino acid
MAAKVFESIGKFGLALAVAGGVVNSALYNVDAGHRAVIFDRFRGVQGHCGRGRDSFFSSPWGYQKTNYLWIARVSXTCNGAQSSHVVAKIYRNVNITLRHPLPAVSPASFLASSPASERTMMSVCCRPSQLRSSSHVVARFDAGELITQRELVSRQVSDDLTERAGTFGLILDDVSLTHLTFGKEFTEAVEAKQVAQQEAERARLWWKRLSNRQRRPSSLLRATPRQLS

SEQ ID NO: 1022301 - protein, 115 aa, Homo sapiens
MERHGRQLGRREQDRTTDSSNCLLEQTGRQLEEEPMYLLGSRTPLDSILAAAVLQVSKMGGRCLYFIFLRWGGIGNREQMCKTRWEGQSVRKEQAVAAGVGEQSPSPRGKSPDGR

SEQ ID NO: 1022302 - protein, 69 aa, Homo sapiens
DPRFAMAMSSGGSGGGVPEQEDSVLFRRGTGQSDDSDIWDDTALIKAYDKAVASFKHALKNGDICESFG

SEQ ID NO: 1022303 - protein, 316 aa, Homo sapiens
MLGPEGGEGFVVKLRGLPWSCSVEDVQNFLSDCTIHDGAAGVHFIYTREGRQSGEAFVELGSEDDVKMALKKDRESMGHRYIEVFKSHRTENGLGVEAQWSQQCRQGQQMASCRLRGLPFGCTKEEMCSSSQGGNCGTTGSTLPVDPERQRLQGKRRAVSLARKKAEKALGKHKERIGAPGTICGLFKTQQAGQQVITQIPSLKFMSWSKRARAPNDRGRGLPVGYHGAFGEARARAVKGNEACAYMHEGYGGYEGKLQVPSGWLRVQQPDWSGGDLNGLLGMVWTPGLRRQYSHLVGTTKGIGPLRSAAKDREDI

SEQ ID NO: 1022304 - protein, 313 aa, Homo sapiens
GVCEGRRCLFLPFNSGLNPAGTLWNYGNNILQEKVTLPKPGAQYSQDLNKEEQTKLSTSDFLTTFRNFQACWPQHSGTPPPTRNNIIIVIILHIYIYPYTKLSNVITTNVQEHLHPVPKTHVAPDSQLLDQKAPASLARPHQSSIIIQHRQCTEHRFLASSNTETLTSPCHSSAFPATPQQHCWLQPKATRVTTHLITVPSKLPQDPYYHHRLITLAVKSYRNGYHLSADLQWQTYQCNARKGNCKRRSQELPEYCTFTGIIAAFVYELAQHSHMFRQPFIIRELGHTLVEVRTCRHQLRGYHPTPRGQSAYT

SEQ ID NO: 1022305 - protein, 135 aa, Homo sapiens
MIVSEKGLHSLIFEAESELQMQGLMHVSPRIEQEKPPFTVQLDVLAKEHNKSTNVLSTNHRANKEFQREIQLKLECQISAIPPPKLLLEKEHHSEHRYNSSTDRISLYQDNTGRVTLLIKDVNKKDAGVVYCVSS

SEQ ID NO: 1022306 - protein, 49 aa, Homo sapiens
MSTRRTAKASLHGGCLQFPSDCYGICPNTNNLVIAHSDQQVFEYSIPDK

SEQ ID NO: 1022307 - protein, 38 aa, Homo sapiens
MVNDGVEDLRCKYISLIYTNYEAGQDDYLKALPGQLKP

SEQ ID NO: 1022308 - protein, 408 aa, Homo sapiens
CESSNTRLVEAGVNREGLVVLSRLLAARGGRRFLGHLLAWPVRRLRASLLRSRFAGREEGLGRPVPSPSEPQVCAADPSQGEMSADAACRGLPLPLALLPGEGSERLRLPPARGEGQVGPVHPAWWSPARRPRRRRLLAGDRLVEVNGENVEKETQPAGGEAASAAALNAVRLRGGRPLRRTEQLQKLGCPGPRGAACAPRKRRGRPKPAGRRRGCMGGMATKIEASRGPTRATRSSGELRPRALYHEEGAPVAMASICTATMSNASAISSWSVDPDSPAEASGAPVAQDRIVEVNGVCIGGESRWGTVVSASGWRVTRTKLVVVDRETDEFFQNMQSDPTLQEHLIGPCLFLHQMRRYSKENEEVNALRGGLAEAQAKPCNIGFMTQESFIPDGPKRHQCLVTLLDR

SEQ ID NO: 1022309 - protein, 186 aa, Homo sapiens
MEPPRGPPVSGAEPSRAVGTVKVYLPNKQRTVVTVREGMSVYDSLDKALKVRGLNQDCCVVYRLIKGRKTVTAWDTAIAPLDGEELIVEVLEDVPLTMHNFVRKTFFSLAFCDFCLKFLFHGFRCQTCGYKFHQHCSSKVPTVCVDMSTNRRQFYHSIQDLSGGSRQQEAPSNLSVNELLTPQGPR

SEQ ID NO: 1022310 - protein, 143 aa, Homo sapiens
MTDLKVKRRLLAGDVKNQGSTNCTKETQLPSSSHKNALPNKLSLQSACPSSDELNKGGRSASYGPFYLEYSLLAEFTLVVKQKLPGVYVQPSYRSALMWLEYYSYGMDFTKMAVFKVYQLYIPDNYPDGDCPRWVFDIPVFTR

SEQ ID NO: 1022311 - protein, 143 aa, Homo sapiens
MTDLKVKRRLLAGDVKNQGSTNCTKETQLPSSSHKNALPNKLSLQSACPSSDELNKWGRSASYGPFYLEYSLLAEFTLVVKQKLPGVYVQPSYRSALMWLEYYSYGMDFTKMAVFKVYQLYIPDNYPDGDCPRWVFDIPVFTR

SEQ ID NO: 1022312 - protein, 132 aa, Homo sapiens
MRARYEAACLPLPSLTGGHGGHPMQHNPNGPPHPLDAATTTTDEPGPPPSWAPWPSSNDQYLGKYCLWALGVYRLHQGKGMMPPPPMGMMPPPPPPPSGQPPPYPSDALCLMGITVGGASANASVQQQYGFQ

SEQ ID NO: 1022313 - protein, 285 aa, Homo sapiens
MLFFFFFGKRFGLFVSPVGVAGDDLNSQLTGEPPASRDIPGLSLRGSGDYKHPTEAQLILGFRVETGFHHVGQASLELMTSSDPPIRSPKVRGITGMSQRRRAPKVLLNRKPRDGRMLTELLLNVCGGNVCHVRGSVSLAYYKGIRATRGWGVARGENPSCCDLSDPACRLCAPVAMFDALKFLICRGGNDTHSTGVGSFTVGRSSHNTHTHTKKNKRAPLNIRGTIATFCNGHKEILKTAPRNIAGTARLGTLLVSGTPTPEKSWPLAFCDTSYPLCAPASLHT

SEQ ID NO: 1022314 - protein, 123 aa, Homo sapiens
PRGRMTVSNVSVPGLCLQNARGLRGNLSEGVLIFSATFRSPQGMRFLLKPADLALVLYHAGTGLLNSLLDTVPVRSSVDELDGIDYSLMKDPVAFTSNLDMDFRGAFFSLTERDWSLPNRAVE

SEQ ID NO: 1022315 - protein, 113 aa, Homo sapiens
TWEKSSFSLLFYKLHILILSCGNICQLTPGSQNLMPRSRLVGPSQACAPHAPLCATPALESELSCGALGPLGFLSMSCSLMASSELFLLLPSVTPPTLSVWAWDRTRLHIPPV

SEQ ID NO: 1022316 - protein, 223 aa, Homo sapiens
MKFEVATNSIKAEEIVVNHKREPVSSLFCNLEEKFSSKDRSGGGPRWETQIIIKRFLGTVFQPYSLDQECNYLQIKMPTDHEEPCGPSHKSFCLNGGLCYVIPTIPSPFVGALKTIQELVVKRFFSQAPASKLKVTCLKLCGMAVLVTLIIGAFYFLCREKATFRRSQFKASIDITWVEKRQYQWPTTVMNNTEETSSGTNIIVFILPKAENGDTTKSKNYTI

SEQ ID NO: 1022317 - protein, 216 aa, Homo sapiens
LPSVGVSCGGGGAGGRAGVRRDRLDAQRRAAREPMELLAPGAPGARGRGWASHRNRHGDLWLRGSLGLWAYGTPAELGGLGGTLETLPFKRGGLAIDPGGRRDYAFGGVVGSIIPTRCPGNVRDAATHDAYTLARSDNAPVAGRRSERGEAPPGRRRGPRDNWTAGGEQGRRANGGNDRHGHLEGTWLGTTYLDGPRNYGPRDHEHADREEVADED

SEQ ID NO: 1022318 - protein, 246 aa, Homo sapiens
LPSVGVSCGGGGAGGRAGVRRDRLDAQRRAAREPMELLAPVWPGVEARPVAAAQHEMGCRLSEHVLPVVLRVPTVPRAHRCQCLPFLAVGGRPYFPWCLVARCRGTGGGRGRPHWESPESLTQGAPGALGELHRDGRVPDFQIQPSASLDTHRESSPTRESPAANRGLRALYVPLACLVASVQRSCFSHGNAVDLGQMSSFYIGLGSRIQCNIFSYRILRLRCSSGRPSERNLYADIDAAGRPAHQ

SEQ ID NO: 1022319 - protein, 47 aa, Homo sapiens
VTGGRSSPIMYILATNGVIHYIDELLIPDSAKTLFELAAESDVSTAC

SEQ ID NO: 1022320 - protein, 301 aa, Homo sapiens
LNFFAGHYDTPYPLPKSDQIGLPDFNAGAMENWGLVTYRENSLLFDPLSSSSSNKERVVTVIAHELAHQWFGNLVTIEWWNDLWLNEGFASYVEYLGADYAEPTWNLKDLMVLNDVYRVMAVDALASSHPLSTPASEINTPAQISELFDAISYSKGASVLRMLSSFLSEDVFKQGLASYLHTFAYQNTIYLNLWDHLQEAVNNRSIQLPTTVRDIMNRWTLQMGFPVITVDTSTGTLSQEHFLLDPDSNVTRPSEFNYVWIVPITSIRDGRQQQDYWLIDVRAQNDLFSTSGNEWVLLNSM

SEQ ID NO: 1022321 - protein, 233 aa, Homo sapiens
  misc_feature (102)..(103): Xaa can be any naturally occurring amino acid
  misc_feature (111)..(111): Xaa can be any naturally occurring amino acid
  misc_feature (119)..(120): Xaa can be any naturally occurring amino acid
  misc_feature (126)..(126): Xaa can be any naturally occurring amino acid
  misc_feature (130)..(130): Xaa can be any naturally occurring amino acid
  misc_feature (133)..(133): Xaa can be any naturally occurring amino acid
  misc_feature (165)..(166): Xaa can be any naturally occurring amino acid
  misc_feature (175)..(175): Xaa can be any naturally occurring amino acid
  misc_feature (182)..(182): Xaa can be any naturally occurring amino acid
  misc_feature (186)..(186): Xaa can be any naturally occurring amino acid
  misc_feature (188)..(188): Xaa can be any naturally occurring amino acid
  misc_feature (191)..(191): Xaa can be any naturally occurring amino acid
  misc_feature (195)..(196): Xaa can be any naturally occurring amino acid
  misc_feature (201)..(201): Xaa can be any naturally occurring amino acid
MASGTASRSEDEESLAGQKRASSQALGTIPKRRSSSRFIKRKKFDDELVESSLAKSSTRAKGASGVEQGAVRGVKPSSSEKKKVSKAPSISCATQPRPQTPXXTKSVKKNXTTTFSEPXXGALGTXQRTXGSXSCVADQRPDSVHLGVKFSCRFTLREVQERWLXXPLRSCSSPXLACQAMXAAAXQXYCXHPRXXPCFSXAEEQLLEQSGDRPASPPCETFQDLLHRHPDAF

SEQ ID NO: 1022322 - protein, 201 aa, Homo sapiens
NSQRLDFMYTEIISKPSKREMKSFRLGEGVQALGLKYTVEVMDIIDEKIYKSDLVSCKPGRVTPGSSLCSLALDCDCAWILPLRLHLCAFPARLVSGSGGFKATRFHFFLVGGALLDRGGGVRRLSDADWRASFVLSPSDVVHGCLYDSLSIISVEGLASSHCGLVLDVSRRAMREGADMPLYHRIVQVVGRFAPQVEHVK

SEQ ID NO: 1022323 - protein, 361 aa, Homo sapiens
WALRRHLCVLDAAIRLDNAYGLCDFPATPPAEEQQGLVSAQLLWRTRAPSTPEAIEQIKQIKKDLKKYSKIFDSRRIALELSSIKSSEECNLVRMYEARIHAWKISGEYRKDGPYGSLYSWMPEQHERLELRGGVDTDKLRQQRWTYWCTEETGLSFFVDCRDSLIPLVCTHGVTWEHLWGRTPPAVPALSYRTPECEPRFLCCGAAVCAVGAEVRPAGSRVTPGSSLCSLALDCDCAWILPLRLHLCAFPARLVSGSGGFKATRFHFFLVGGALLDRGGGVRRLSDADWRASFVLSPSDVVHGCLYDSLSIISVEGLASSHCGLVLDVSRRAMREGADMPLYHRIVQVVGRFAPQVEHVK

SEQ ID NO: 1022324 - protein, 305 aa, Homo sapiens
AAAVASGGAGRTDRRTEGARGARPPGPAMEGASFGAGLLQGPPWTPVSFSAAAPDPAPGRVLGVLHRRLRGPSSNEGYVNTDSGPELRCVFNGRRGRLPLLAFALGLGAFLRLQPPSLLLDVRFPANAGAGTTTPPRPKLGILALYPSHVPEGSRPSRSVIVGASRRSTLSLLSTGCKQPSLSVCKPRPRLRGHLLRSQKGVPLSGGPGPAHGGWPGTEGTVPVARHTACPSTSARPCQERTIMGARAQAIKDTHGTCTPQMAVCTLDAAAHTVRPPAPTQHSQGNTRHTRKRRTIAPRSRRTAS

SEQ ID NO: 1022325 - protein, 315 aa, Homo sapiens
QRQRPRAGRPDGQADRRRQGRASARAAMEGASFGAGLLQGPPWTPVSFCAAAPDPAPGRVLGVLHRRLRAPSSNEGYVNTDSGPELSLRVHRETLGACRFWRSRWASEPSFACAAFLLLDVRFQSDQQRPRLAGRAVLLDLGFSGLWSFLWFGGFCFLTNQWQLTVPMGRSRIAWPGDACVVACHRLQQFFSILSWVALTVYRPCSRFRLGTDMSLVRPPKQLEHRGEPGLSRVSGGQRRGGHRRLPEARLHRDLGHSPKGFTKVPAYLAAGSAQTSGSKGNPTSKAQGLRNSLWAFSSNARDQSEVAALAIRGQ

SEQ ID NO: 1022326 - protein, 247 aa, Homo sapiens
VVPAGRNIRFSPVNLPESLGDDAYNDGCTPEIQVVKATQKGFRCMVPKPMTAMIGGQPLGGADYVEVDVPDLVTNVLAVDTTDRATGQCPLSHRIAADWRHKMTSCTLIYVAGDVMTMRRRLGAAAVAVALVECGFRVCEFPEQRVTTDGKYRLVTMKYRMTMPVEHCSKFINPSSELTTAPDHRLRGYSWSRCARGPGQTRSGSSLTPNGDPDVSLEHGYWCLDSDPGLSTPRGFRSSAGCVPIFS

SEQ ID NO: 1022327 - protein, 337 aa, Homo sapiens
GLERCLLHFALQLLQLQPDRERAKRLQQLAERWRRPPQDTTRYPLLPAGSPWKTTDRLDARPMCIPPSYADLGKAASSIIFNNRHLVSGLVQHWHVKTKVLPVAVEFATSRFHLNTRHWYKYLGTLETKYKWCEYGLTFTDTRGPTDNKSGNQNIAIEEPDYVNGLEHLTLDTTFVTKHRNQTRGKHQVLLTKRGSGYYHTLSKCPGSAHPHHCLWNPGEVANETHSQGHISDECTGLALAVPPATEPQDPQADNPQSDAHKAKLTVYGQPSRPNPVKHAWPDPQPLATPPSVHPGLDNSNLRELNTRVDQPTSLGEQTPWDQLSEPPLGLCAHSLA

SEQ ID NO: 1022328 - protein, 132 aa, Homo sapiens
MIKVLFNIIEHLKINNMMCAFLVVGVTLEKCVSQGTHIKSNKFLPPNKLVLVQPVPITCVGLSTCSYNRNSVGLGGIGCVGVPCGEAGWLFSYSEVTSVFSGRVLNGPSKCVHPGEDLTFLYPCGYTPIGGQ

SEQ ID NO: 1022329 - protein, 160 aa, Homo sapiens
AAAVRQDLAQLMNSSGSHKDLAGKYRQILEKAIQLSGAEQLEALKAFVEALVTENVSLVISRQIAELSFLHNIFLTLPDSSRPQEDLISFNLGKEDPSPSSSLLIYDVSRFAFHYKTAFLAFYTTEETESNALGRQDALPKVLRGEFLLEDRDNKTRYNW

SEQ ID NO: 1022330 - protein, 118 aa, Homo sapiens
MALLEDQRTGLSAPPRCPPPAPRPLPRHPTGPTPARAASHSPRYPRSRFPDPNRHPRAPSLTATPPTSPPRPPTPTAAPPAPLPLLVRDLTAASHPLPPTPPPPPPPPHPPPPPPPPP

SEQ ID NO: 1022331 - protein, 118 aa, Homo sapiens; identical to SEQ ID NO: 1022330

SEQ ID NO: 1022332 - protein, 265 aa, Homo sapiens
RDIGNVKKAVHDLGIDYPVAIDNGYSIWRAFGNEYWPAHYFVDAQGRIRHHHFGEGEYAQSERAIQSLLAEAGHPEALNVPLGLAGAPAKGALAAADAADVRSPETYVGYARAEDFTSPGGVVRDAAHRYDAPARPDLNDWGLAGTWQVGAERATLAAPAGRIVYRFHARDCTSCSAAGENGQPVRFRVTLDGAGPAPRTVPTSMRKGYGTVTGQACTSSSGSRAIGDARSDRVSIGVDAYAFTSGERGPVIGPAHRIEEKRTIP

SEQ ID NO: 1022333 - protein, 170 aa, Homo sapiens
MLSPVPAAVHAGPLCPDVMTPARVDPSPATDSAACPLLTPVPVPPYVNAWPSPVCLQPVFLRRLLFVSILALQALGLVLRYRHKLLSYQSVFLFLCLFLGLPADLSSSPSTFKDLRGGRFCSGPFGLLACIYCFPVCLQFFTRHADELCYFTQNSLKKVPVLSPFSRGGN

SEQ ID NO: 1022334 - protein, 257 aa, Homo sapiens
AERDARRPPRVRRRAVSPDEARVVPACAGAPPGPDVMTPARVDPSPATDSAACPLLTPVPVPPYVNAWPSPVCLQPVFLLRLLFVSIYVQALGLVLRYRHKLLSYQSVFLFLCLFLGLPADLSSSPSTFKDLRGGRFCSGPFGLLACIYCFPVCLQFFTRHADELCYFTQVIFKAKSKYSPELLKYRLPLYLASLFISLVSLLVNLNLLLVLGKDRKLGTRKVIVSVRVAINDTLFVAGVPVLSLHPVSTKFSKDVL

SEQ ID NO: 1022335 - protein, 108 aa, Homo sapiens
AGITTVSHYAQPDLSFFMTLRNIWQNSPSLQIWKLRLEDKISCQRSQNNIKTAYFPHQIIWATSEEQTCNVSQYHKPNQPPTGRRTNLANLSSYHMLFKKRKLAKNLF

SEQ ID NO: 1022336 - protein, 289 aa, Homo sapiens
MDVRRPYSARVASPFRVGEINHAVAAVVEHLQNFFALFEAAAQAHTDKDAGVFGIGKTVVELGDRTPAKQLAEFEEAAFFFRNGHRQQRFTLFAQFAAFCDVAQAVEVHVGTGKNMRQPFAANVVQGDIFYYIPARRQRARGFRHRRTSSNKSFIAAQIASLSTVMMSSENTPGINGRFRHRMRVNRYAFRNKPYAREINPDDNEFKRHDFQGTGGVFRLLQEITLIWRDQDSMISTGKARSQTAADDWDKYAVPDGVLLEIQGQVPAGDPIRCRRGPSDPVVDINAMV

SEQ ID NO: 1022337 - protein, 465 aa, Homo sapiens
WGFVSPSCSRRRRACRPSASSSGAIFGPGVSGGAGASAADVAAACGGVPELLLSDCELSAPVRFMRFSAVVGVDLRRLGTALRIVTDCSNGRTQRDLELPGEFALYEKLVTYFNVISMSLSLFHSEHQESQDTTFGNDRVMTAIFPRVKVEHAKDILDQKINEVSSSDDKDAFYVADLGDILKKHLRWLKALPRVSPFYAVKCNDSKAIVKTLAATGTGFDCASKTEIQLVQSLGVPPERIIYANPCKQVSQIKYAANNGVQMMTFDQCKLQLNEKLPRATIPKQQLVLRDAHCMIPKQAVRLQCGTFRATLQNQQAPLGNGRNSSSTHRCGWMSASMIGRGCTDPETFVQESLNARLCFLDMGAEVGIQTCLCLISDDAHSPGLCRNVENYNIWHKTTPGIHHTQAVEQNQQDETNMRVQQQKKEPRAIPQIDKRITTTTHTKARQGITEKRTRKHTIQPKQPL

SEQ ID NO: 1022338 - protein, 315 aa, Homo sapiens
GATQVYPRRLSMTLIPDLHMRHGSILACAEVLTPRTKLQPKRTGPSRTIWTSRQLQGPEADSPAGSMIVSYSRGLGGQAHEDNASVCFNGKVVTCQERPLRGDTVIDGWAMADKDTLRHLHLISSHSRQQMKDAAVSALAALCSEYYMKEPGEADPAIQEELITQYLAELRNPEEMTRCGFSLAWAPSRLLLKGRLQQVLTGLRAVTHTSPRGRKFAESQEKTVEMPLRGFASTVGVKARAQTEGCVREDGPQITVAAGCWDVYTRIEGGGGLGRRRLNVGGCNFWRTRMQANLGLVVAAEFVVPGLAVGPRPKY

SEQ ID NO: 1022339 - protein, 307 aa, Homo sapiens
MTLSGGRRWWHEARTVDVPGGTYSPMTLSSGQPRKERSAVTELTVGQGWPGIMPEPKRLYLAESTLFVWELESSYIREAYPEFRSPSHLGSMTNLEKYASSPTPGVPAFDDQSIVEGDTIAEAFFALDHGNSSPGQVQSRSSSVTEHSCAVRGGRRGYILRCYTQNIDTLERIAGLEQEDLVEAHGTFYTSHCVSASCRHEYPLSWMKEKIFSEVTPKCEDCQSLVKPDIVILVRASQGGSSPVCSQTSCKVGSFPGQWVPSWQVAAFASSSEGTSLTLLVIKGRQLAVDLPGGIGREVTASKAPRV

SEQ ID NO: 1022340 - protein, 129 aa, Homo sapiens
MSAGSCTTWFCCSILAVELGQCSYHCLFPSQSPGFWAKLHAVTRPFGLLQAVLQGCFHAELGLQLNLQVLHGELARGELALEALHQLACWWPPRGSSSSVYGEEPISSASLRFYSGIFSYCSRISFRMR

SEQ ID NO: 1022341 - protein, 381 aa, Homo sapiens
VEEPYEAPDGQLQLGPRHQHSSSGASQEEQNDLGLGDLPSDEEEIINSSDEDDVSSESSKGEPDPLEDKQDEDNGMKSKVHHIAKEIMSSEKVFVDVLKLLHIDFRDAVAHASRQLGKPVIEDRILNQILYYLPQLYELNRDLLKELEERMLHWTEQQRIADIFVKKGPYLKMYSTYIKEFDKNIALLDEQCKKNPGLLLCREFEMSPRCANLALKNYLVKAVRKIPQYTVLLTDYLKNLIEDAGDYRDTQDALAVVVEVANHANDTMKQGDNLSEIMQIQYSLNGHHEIVHAWSGFSQRRNPDEAVSESDATSNVFLFNDDLLYTTPVQSGMYKLNQCSHWLDMHGQKTTQEAYQNDSQIEQCPTSFILSASSANRKGEW

SEQ ID NO: 1022342 - protein, 295 aa, Homo sapiens
AGVSRGRVRVCGALLAPPAPLGCQRSGAPPGPFPTGTPPEPPGELRQVGGKKVGRGLPASAAPRQRPKVGAAGAATLLPPSSPAGPAVAGGNPQGLGSGAPDDLAANLEGALLHRSHLSWGRPGAAEAQAEAGLAGWPWGELSGRGTEPGCPCDCGVLGKRKLQRYCLMSVKGCFNDFHIDFERHFRIGTMFSGVGRLFGMIPPKLHNLELYEEWVLSGKQSDIFLGDRVERCQRIELKQGYTFFIPSGLDPCQSTPPVDSKGVRRKHPDTGFNVPMQVRIYEIEDRTAGEKPNL

SEQ ID NO: 1022343 - protein, 245 aa, Homo sapiens
  misc_feature (175)..(175): Xaa can be any naturally occurring amino acid
ADELDGEIDLRSCTDVTEYAVQRNYGFQIHTKDAVYTLSAMTSGIRRNWIEALRKTVRPTSAPDVTKLSDSNKENALHSYSYPEGPPEGRGACGRALRSISRGGPRKADGQRQAWSYVERLAADPELSPQWARDPSPALRERLDKQEELGAGAGPGAPEELVATWFEAIMTRAGXPKRVPDWLKGGRCRGLGVPPLTEDQQNRLSEEIEKKWQELEKLPLRENKRVPSLPCQPKPGDGRGPPSEA

SEQ ID NO: 1022344 - protein, 419 aa, Homo sapiens
AARVESRTVPDMGLEDEQHDAYRIRSILQEAGKREQEEFSGSPNNSERRMRATWQNCVQARERLELCDERVSSRSHTEEDCTEELFDFLHARDHCVAHKLFKHTCTPNCVDLIHPSLHTIWASEYFLHGFGCTIRHLISVTCKFTMNLMALGLQAGSFYANFANDSTRKINQVLMDSAHNHNRYKPRTNPHSAPYNAPRHCRQNTQAHGYTRAPQAPTTSVTPPEHPRPLHGLTPNARPNKSQERRPHRTLTTTHPTITIRDNKDTNRAHTTGDKKGKTRGATRPPEPLTANPRAADAQPSPHTDSRGLHNTPRIHTPTPTMATLEEKQRAGQQRRKSGKGPHARPEEHEHQGRLAARGRHKSRRAQRRNGHPEREECEESEGKNEQGETANQSTTLREKQEEEQGNTACGPAQEQKAG

SEQ ID NO: 1022345 - protein, 423 aa, Homo sapiens
MIPSKEKFYEVHVNFTVTQIRNKWYIRIRSILQEAGKREQEEFSGSPNNSERRMRATWQNCVQARERLELCDERVSSRSHTEEDCTEELFDFLHARDHCVAHKLFKHTCTPNCVDLIHPSLHTIWASEYFLHGFGCTIRHLISVTCKFTMNLMALGLQAGSFYANFANDSTRKINQVLMDSAHNHNRYKPRTNPHSAPYNAPRHCRQNTQAHGYTRAPQAPTTSVTPPEHPRPLHGLTPNARPNKSQERRPHRTLTTTHPTITIRDNKDPNRAHTTGDKKGKTRGATRPPEPLTANPRAADAQPSPHTDSRGLHNTPRIHTPTPTMATLEEKQRAGQQRRKSGKGPHARPEEHEHQGRLAARGRHKSRRAQRRNGHPEREECEESEGKNEQGETANQSTTLREKQEEEQGNTACGPAQEQKAG

SEQ ID NO: 1022346 - protein, 76 aa, Homo sapiens
SYDPIPVSVDSVINPLLPDSRTDQGRRSASAVKYFPAMMLVDPKQGSVRPLSYGFISQDDLAKQFLNVSEDFKPNF

SEQ ID NO: 1022347 - protein, 134 aa, Homo sapiens
ALCVAYSGQCYISHAQTGRSANRGDCSQACRLPYTLKDDQGRVVSYEKHLLSMKDNDQTANLGALIDAGVRSFKIEGRYKDMSYVKNITAHYRQMLDAIIEERGDLARASSGRTEHFFVPSTEKTFHRGSTDYL

SEQ ID NO: 1022348 - protein, 69 aa, Homo sapiens
PGVLPLFQHPEEERAGSSLQERGGAAGPKAQPLCSQDPLILTLSCMVGPLCSSLPVASRLFSVHLVSSL

SEQ ID NO: 1022349 - protein, 145 aa, Homo sapiens
HASPRVAGSSSSDSEGSSLPVQPEVALKRVPSPSPAPKEAVREGRPPEAKPQPNGRGALDSFQFQLLLFIFTSILTSSSVILDLPPSFLVTIFFLLIFLTPTSLFHHTLPHWLKPGPSGPLRQNLQAPKKRTPLDETEVRCMYLH

SEQ ID NO: 1022350 - protein, 245 aa, Homo sapiens
HASPRVAGSSSSDSEGSSLPVQPEVALKRVPSPSPAPKEAVREGRPPEAKPQPNGRGALDSFQFQLLLFIFTSILTSSSVILDLPPSFLVTIFFLLIFLTPRRSSITPFHLAKALDPQAMDPKGCKPLQKPARTMESGGPDSTPGTPIDYPQGPSYGPVSYSPDGAFGPNTTGTPKHHQPNGETQARSKTKTRWKAAEVHREARAQTVGGTSTHPTQDKKAEGEAQQTIEHIEDTRRTNDELQGN

SEQ ID NO: 1022351 - protein, 127 aa, Homo sapiens [sequence omitted]

SEQ ID NO: 1022352 - protein, 299 aa, Homo sapiens
LNTSPLALPSRSPSYRERRVKGAMSKISEAVKRARAAFSSGRTRPLQFRIQQLEALQRLIQEQEQELVGALAADLHKNEWNAYYEEVVYVLEEIEYMIQKLPEWAADEPVEKTPQTQQDELYIHSEPLGVVLVIGTWNYPFNLTIQPMVGRHRVLVEQQLVLEAPRELSENMASLLATIIPQYLDDGICTQYSLGGVPETTVLLMDEVRPYLYTGSTGLGKIIHDRLRAKATDPVTLELGREESLLRGQRIVDLEWLAEARLGGHFMNPGGPGLVLCPRILSSVDPRFRKPQLGEPPGS

SEQ ID NO: 1022353 - protein, 202 aa, Homo sapiens
MRFELGKAVPSRVSIKMLGPGAYVRGRVSYVADIAHSKEVKDVACQTTDEARDDRRRGDAIRRLTLVPLRRYQPDPGSADPEINGLKRVKALRTEIKPKNAGNGMSHYAYNSADITTGCQSRRRQPQRSLYTDKGTQAPRADKPANPGPHDRAAQGKQNPTRIADGKSRHKSRHIDSAHATDIPSDALAPPRGTHSQTRKRV

SEQ ID NO: 1022354 - protein, 114 aa, Homo sapiens
IPFVDRSRRIWPPPYRSYAHPSAYCMPPVIRPLVLLVAIFHKYSGREGDKHTLSNEGAEGSLLQKELTIGSKLQDAEIARLIGRLGPEQGPGSVNFQEYVTFLGALALIYNEAL

SEQ ID NO: 1022355 - protein, 73 aa, Homo sapiens
GRLGAPSRADALRVPPFFRASPLAAARERGRDGDEIAKAQVARLCGDTILGKIIRKEIPAKIILEDDRVPCFP

SEQ ID NO: 1022356 - protein, 76 aa, Homo sapiens
SYNSSGIISSRVIFINTQNKFDHPVDPVSMCLGDLPDLKPEDMEQQFHKDKMTTIPSQDLYVALSASAVIAIKCLK

SEQ ID NO: 1022357 - protein, 331 aa, Homo sapiens
IPESPEQTHLYCLQLCLVTIDTPGGACSCLQPAPVTITATMMQLRPETQQPTLTDQTTRPTLPNNTTSHSPHSHHILNTRPTTQLLQSHHTLTTTYTYHTHPYSSQLIIHTPRITLLPITPPSDTTGYTISNPKIHNSLLSTGLGYLLHNLVAPPLNLGTLIDLMTLTPPSYSSSLASRDQMRLSTRTSRAPMDAALGSRAPLKLREDRYKKVIDRAANPRPLRAHRLTSTSRPAHESELTFDSYRPHRHNDPVEGASGDTTTHHRTNTNYKTSLISLLTHSYTLPNHYPHLTTQHPTLTPPHPPTTYIYTISYTLHSYNHYHYTTAAIRI

SEQ ID NO: 1022358 - protein, 330 aa, Homo sapiens
  misc_feature (13)..(13): Xaa can be any naturally occurring amino acid
SPAPSPPPPAPGXRALLCPRIGALVPEAPLGNRNPEKVTLGGGARGLPCGDGEAAPRSPAPRRAPSRAMGEAPSPAPALWDWDYLDRCFARHRVCISFGLWICASSCWIAAHALLLYLRCAQKPRQDQSALCAACCLLTSLCDTVGALLARQLTIQVFTGAYLAAIDLVNFMFILFPVCGSKFKSNSDREARERKRRRQLRASVFALALPLEPGPVLGSVGCCPEGFSHHPGATAEAASEPCCREILRSSATCWGSVAAFGSWASRIPPLSRILPGENISLHHLLAGLLSALGGLLYASAIVATDRTLSPAAATLVPDSSGVRTGLAIFS

SEQ ID NO: 1022359 - protein, 309 aa, Homo sapiens
  misc_feature (13)..(13): Xaa can be any naturally occurring amino acid
SPAPSPPPPAPGXRALLCPRIGALVPEAPLGNRNPEKVTLGGGARGLPCGDGEAAPRSPAPRRAPSRAMGEAPSPAPALWDWDYLDRCFARHRVCISFGLWICASSCWIAAHALLLYLRCAQKPRQDQSALCAACCLLTSLCDTVGALLARQLTIQSVDPNSSLIQIGKPERGRGGGSSGPVCLPLALPLEPGPVLGSVGCCPEGFSHHPGATAEAASEPCCREILRSSATCWGSVAAFGSWASRIPPLSRILPGENISLHHLLARLLSALGGLLYASAIVATDRTLSPAAATLVPDSSGVRTGLAIFS

SEQ ID NO: 1022360 - protein, 42 aa, Homo sapiens
PVKQLKEFEGKTLVSVTKEGLELPEDECVWFWWGENRSCCNW

SEQ ID NO: 1022361 - protein, 184 aa, Homo sapiens
  misc_feature (17)..(17): Xaa can be any naturally occurring amino acid
MDWGSFRLCMKKRDIKXAWKTKKKHLLMWCVLRSRTCVVLFIPPCAKQMKSEVCYTNSSWERSYAVWEWVTKSEAYFIGLHSDQFLVAFKEVGRKPPPFGDVSVIALELLNSGYEFDEGFLIFNKFRSVISYKTEESPIFFLNTVAVLTSMSIYDDIDVDVLPKLPRIPIWPNIIYYSLKESHH

SEQ ID NO: 1022362 - protein, 252 aa, Homo sapiens
MKAENRCRRRPPHGPERHEAWVPDSARSRIQTARSTAEDTTMDAAELTPNARRHPHSEHGPRTRGSQQPPTELLTGSRKGQQHDPAPPQAGQPATSKTHDAMARTQGTKRQQRTREPSKPKMTVAPPAPRGTRPTQKPDIDPSKHPAKRTPAHNHSTQRKAGARTEDRPHRTRTTPSNSTAHTRDKEKRDTASPPDQQTEDTATQPRQTSQTTKTQQEHTNKGPRSDRTQQPGQARAGERAPEQNNLHVSQK

SEQ ID NO: 1022363 - protein, 285 aa, Homo sapiens
DAAQLQDGVAHGGLDEHGEVAARVDRDDDLAHRHAEHVLIERLVGQALEVALHRLLAHEVDDELEAHLAAHRRLAKDGLDVEQADAAHFEQVEQQLGAAALDGGLRDAEEVHRVVGDEAVAARDQLQAELALAQARFAGQQHAQAQDVHEHAVAGRAVGEQLGQVAAHHVDDMAGGFGRAEQRDLGAVAHGHQARRRHGVVGADQHRRLQRDDARDAAVLDLRALLAEVGDLAGAEDLPPVGVVLVRVAEQVGGPGLRRRAVKGRRGGGTPRGPGVKPGAGGKGG

SEQ ID NO: 1022364 - protein, 151 aa, Homo sapiens
MSALGAVIALLLWGQLFAVDSGNDVTDIADDWLAEAPRDCTLVYVEPSVAHYPVVIELHTNLGAQNTSRMELYTLNRWEAVDEITAVGDKTFLNCESHVTVGDCPCISGHTPECKSGSVGRTPGIAEVGEHFPGKARMVSQSYSHAQGANC

SEQ ID NO: 1022365 - protein, 412 aa, Homo sapiens
GSSRGKTNQDECPGSCHCPPALGTDFLQWTQAMMSRISADDWLAEAPRDCTLVYVEPSVRSSASSSEWLNREQLFLQSMDTSDHTFTIPHTCSEHTPTMSPSSTVPGGHHHSNQFIEQIKHALPKDNMTQKLTQRASTPLTTTYTRTPTMPPSTYTNPKQPLHRPGTANKSGVPHRHEAETHTASTLQNTHQLQHGEGQTHSAQSSPPTALQHARDTHGDHGTHSTDTNTHTDPTSTIANTTHQQQPPTHTHTTQPHPPPDHTQRAPSTPPHPTRTHSSAGGPRKSKKPAPTTRDTHRNRRAAKSGSETNDQTRKTAGDLTPESVRHTQTLGHERPKTQQETTARNRDPTNDTGSKDNNKKRKDKDERRNKQDQQAEDNDYTHGNSTRDTTDGASTPNDKNTDETRQTDDDK

SEQ ID NO: 1022366 - protein, 118 aa, Homo sapiens
GPGAHKEVGGAAPFLGVDFSSLDMSLCVVLYVASSLFLMVMYFFFRAEVQAVEGQAPPPGRVSARVLPATAEAPLEAALPRATCSFNIYDQGFYKHAGLVSHRMAPFGFKVLVLQTLF

SEQ ID NO: 1022367 - protein, 288 aa, Homo sapiens
MSLGIMVTRWAGIAHRWVSLKKANQNGPHLGLLGKDTDSCAPRGKRRIVVYKSSQSNFLGHQKRVERERWRNSESFQVDFVIKRSNFSAEAPTVTEAVLTNEVSLHPFQLAGAHSGEGLLVRQWLSVGVLSPPVRFGGAVWVGNEPGVTEDLLDLPPVLPCGGELGERKAGLGGGKREEESRVKTSEKCIIKGVKRHPQRGDRTPFEGENTTHGAHMGSDPPQRRLLRQGDPARQQNTRTEQYDAPRITTKREVEPRTYATKESGNNWAKRNTRRPEEPARNRDSAQM

SEQ ID NO: 1022368 - protein, 122 aa, Homo sapiens
MGTKFPGPVHICVSWESSSGIAECEDQWDTCGEKRVCDKGYLWKLSPDCPGAGTGSYGGKLIGGSLVGEIGDCTCGLCAARKKIFLSAYQGTHLLHYLDWRVRHELKAWTTNLGGEEVDQRR

SEQ ID NO: 1022369 - protein, 142 aa, Homo sapiens
MSTINWGKDSNKFKPFHIDLFARSIPGPVHICVSWESSSGIAECEDQWDTCGEKRVCDKGYLWKLSPDCPGAGTGSYGGKLIGGSLVGEIGDCTCGLCAARKKIFLSAYQGTHLLHYLDWRVRHELKAWTTNLGGEEVDQRR

SEQ ID NO: 1022370 - protein, 175 aa, Homo sapiens
PRGFWRGAERRRAQLAGRPRSGGAARLPPAPLPLGRQPLRGGDRDIPWGTGGPAPDLWDRQSSKAPRGDVTAEEAARTLPPTKDNGPGEWPREKHWRLITAKGEGESPTVNGTDEEPGPPGDAIEHSTPHSQAAEAKGEDPPPKEDTPKGSTDRTFLISKHSLYNIEPALSFNET

SEQ ID NO: 1022371 - protein, 189 aa, Homo sapiens
TRILARSGAAAGAASGSAAERRCSSASPGTPPPRAPDPRTITTDRPTPTVLSHCGRRARGGSKRPPKRPPSWDRQSSKAPRGDVTAEEAARTHSPDEGTTEQENGHVKSNGDLSPKGEGESPTVNGTDEEPGPPGDAIEHSTPHSQAAEAKGEDPPPKEDTPKGSTERTFLMSKHSLYNIEPALSFNET

SEQ ID NO: 1022372 - protein, 375 aa, Homo sapiens
GRAAAEGVRGCCAPGSRVSPPERVEEAQAVLGALPLPFPPCVLSRPISALLCLSDARLSRPGFGDRESHVSAQAAELQLVPINASRATIVSPEIQQQFSNLSHPQGSLELHDHGIVDMPEYIAVSSYDIELPKTASLDKQPEDTWYMSQIARSCLIRLPVRYIPCEHGLVWTLECARPHKMLSEAATYEMTTHRVRTPTFRTMNLADWFTCIRVSLTVSNVHDTLVTSVITVLQTLTVSILLQLRSSNEKLLDQRYNNGRYRKRRHLNSAVSPLESFDGKRQILCKMVQDELCIVDSIDNQSILVIKNWYTTCNYIDVHIVLNNSLITSNFDLRPSPDTTKQGGQPAKDTPRDHRGTHTPNGHQHADGSTRTHQN

SEQ ID NO: 1022373 - protein, 101 aa, Homo sapiens
GRAAAEGVRGCCAPGSRVSPPERVEEAQAVLGALPLPFPPCVLSRPSLRMHSVVVLSDHSTCTLAPGIMLLRVTSQNNSSLQPEQMPTKATAGTESKTTRT

SEQ ID NO: 1022374 - protein, 216 aa, Homo sapiens
HTPAGQDISEVCNATDGSLPPHLHNLPLSNLAIPGSHDSFSYWVDEKSPVGPDQTQAIKRLARISLVKKLMKKWSVTQNLTFREQLEAGIRYFDLRVSSKPGDADQEIYFIHGLFGIKVWDGLMEMDSFLTQHPQEIIFLDFNHFYAMDETHHKCLVLRIQEAFVNKLCPACSVERFDAANSVGEELPGSYFLPLSLLQAVPLPVARKEDPAPGQH

SEQ ID NO: 1022375 - protein, 106 aa, Homo sapiens
RRRRKPFRENSNKLSCCDRGEQDGGAEGEPLGEDPTGLPPLLLLTMALAGGSGTASAEAFDSVLGDTASCHRACQLTYPLQTYPKEEELYRMSERLQAVFNLSVGG

SEQ ID NO: 1022376 - protein, 111 aa, Homo sapiens
PFPELSFFGPRIAHHVVIGGDCGPGRLCPKVLQSTWASTSAGNLPLSLPLASPDDVPRRPIAQWGWNCLRATPCGYICQSLGANWTSPGLTQFYPGLPLGLPLRLSIARFY

SEQ ID NO: 1022377 - protein, 104 aa, Homo sapiens
MRVVLARNLMLHLFMELQWVGELVSQSMGNFEWLQKSVFWLCQKMNRTVPDVGGGYSCHDSRKNWVLLAYSDSGLKGRDVLQSTNSLTTFVDSWKSRPCRGSIG

SEQ ID NO: 1022378 - protein, 176 aa, Homo sapiens
NKFKNSSTFSPPPRAIYNQSKEGLLALGGQKALGVVIFFVLFISVLEGPGGRWGAKAEKRQKGRKGWSGGSEMWGRGVAGPGGGGLVMSPLPHQFLVVLKIHPPGSESGPGNSFWSWRFRFPSHRFFRAAVAWVSGPRVGRLLFPIQVGCLPGPPGCREQMPPGPSRSQTAAPARC

SEQ ID NO: 1022379 - protein, 386 aa, Homo sapiens
NKFKNSSTFSPPPRAIYNQSKEGLWLWGEDEKVELFSNLLKKNNIKGGNTHNKTNNKRNKKKKKTHKKKNTKKREKKKTTHKQKKKRAATAIPTPTDTETANTQSNRHNTAPHNTEEGNKQEDKQPPNNNNTRHKGAKTNKTKRQNKRDQPTRQKGEPDNEKRTPLTHENQTTRQKNNKKTNKQQAKSNDKQKQNTTRDEDAKRKKREAEQEKKDKERKEDAEQERATANREKPSTRQAEKPRKKEKKPRTVKNRKPNEKEEKKKEKKNKKHKRKKARRQRRNKRQRTDNKNKAQEEEREPRKRKESKKEKDKRSKKDGNEGEKKRHQRTRREKQETNGARREDGRRHRNEKKIKKRAKEEKTERTRTTEKQEEKRKGTRERHKKK

SEQ ID NO: 1022380 - protein, 69 aa, Homo sapiens
MDPDCWNDNQCIAVTEEMAYRLGRRSTDTINAWKQVDYISALERMTYLFSTLTSSSDDIFSRMFFLYFG

SEQ ID NO: 1022381 - protein, 69 aa, Homo sapiens; identical to SEQ ID NO: 1022380

SEQ ID NO: 1022382 - protein, 69 aa, Homo sapiens; identical to SEQ ID NO: 1022380

SEQ ID NO: 1022383 - protein, 69 aa, Homo sapiens; identical to SEQ ID NO: 1022380

SEQ ID NO: 1022384 - protein, 419 aa, Homo sapiens
CPSCWFSTLVLAPGVCKMKIEEVKSTTKTQRIASHSHVKRAGGWDSELGLGQGSAVPHVACVASENCAQRHVAVIVSTFNQTATAHTWLAQQLSCEAGTSWNWAKTALALGSLLQAARVVTGPASAPHGWGSAQFHSTSSIESKHSRCCMAATSARAIWRCAIQGSTKASFMQGASHKQLNSDVQHSSHPHGAGIMDKTHSANVHPSGTQKQANRETKNRVATVAPPAIICTSWRAKQRSRKAGSMVQFTIARANTGAGPVTRRARGSGVDLPTGAQDNYDPRTGMKTVLSRLGAPGWLWHTREQDTTSKHVNLALTLGNVGKNDAAPQGGDTSDNSPGPTDVRGPKKMDKPKRNHTALTEPNKQQEQTQEGTGHTEHRTRDHARLGPEDEAVNTATTMHIKTTHQETRRKLTNKHINK

SEQ ID NO: 1022385 - protein, 117 aa, Homo sapiens
CPSCWFSTLVLAPGVCKMKIEEVKSTTKTQRIASHSHVKRAGGWDSDAVLVPSQCCASCGLCGQAELRSECMWLSYVELIKSKKMAWKMLSCLAVTSCELGKTCSVLLWLFAHVSLV

SEQ ID NO: 1022386 - protein, 214 aa, Homo sapiens
MPKKKKMGFLLQGISRKHGLHFMKTYIGIHRVTGRALSLSNSYEAILCTFQVHPLSNKLRATGQANPSKISLVPVNFSNRGHQRAWPPRPPHGANCPRINYLRTHPHRHIYLSDQLTTKDLPPMGAYNVGNANGSNSRTYDHLHTLPTIGDNGAIKAHLEPSTPSSTNPHPRARPPLTDTSDKLTRTAQHVEPPTPSGTAAGVTPPQTSAGKTT

SEQ ID NO: 1022387 - protein, 210 aa, Homo sapiens
MPLLAYHIGGILSRPVDEWPGVYDPLETSVNADILAYGQKEGWCKLAFNLLAFFSYLYGMIYVAGELLEELQQKNGPVKCMQTSLPNEGILSSKILSKSSLWNLISYFNKLTPYCHMFPHCCRGHDGLICTYLSIPRFLTRALRILSSTAASPGVDRSNLPLSQDPPYPPNDALFDDVYYTRPLSSQLSGHPLPPSTPSHSAQPATTRTV

SEQ ID NO: 1022388 - protein, 181 aa, Homo sapiens
MNADILAYCQKEGWCKLAFYLLAFFSYLYGMIYVAGELLEELQQKNGPVKCMQTSLPNEGILSSKILSKSSLWNLISYFNKLTPYCHMFPHCCRGHDGLICTYLSIPRFLTRALRILSSTAASPGVDRSNLPLSQDPPYPPNDALFDDVYYTRPLSSQLSGHPLPPSTPSHSAQPATTRTV

SEQ ID NO: 1022389 - protein, 282 aa, Homo sapiens
RVGCYGINELIRRTDVRMNEDEDEDGGQKPEGEPQQDPGTEETYGEVEEEPLDEAQDDDLDELMEMEPTFVHASSQTSGPTSGYHAENFLGASPPIIQPSRRRNQNRVPLLEGLPGTNSPFYSSPPLIRRTGRLGQRQVRRRPPVLFRLTPRQGGHTSCSWPNSSLSAGARWPPRTHPSFESPAPAYAAIPAPFADQDFREFQTCENLKKTCRIPDHLATVAREQTCCPIQGHLGKEWIKHSAWPTWHGTLLSQATKLENNVSGPVPINELVTLLYFPSGCS

SEQ ID NO: 1022390 - protein, 173 aa, Homo sapiens
MRLSALLALESKVTLPPHYRYGMSPPGSVADKRKKPPMDQAAAQWVWKPNLCSEELVSVLWRTRVGDPRRQGCRERQGNSGLNVIRSETGVAVGGLEDTLSLHLEDHGMTRGTHDPSEAPLTSGRYTVVDPMEQESDEIDWRFTEDRRGGNESPKNKGELFLKRNLPELVDWS

SEQ ID NO: 1022391 - protein, 153 aa, Homo sapiens
SLVYERSGGPVRGSDLPAELTLRDPGQLLLAAGDCGLFSAMHPLQMCSPSAKVSGVRTIGLCVRWLSLRHVHVADMDVSLVSLCASPESAEGWSSEGLQVQAGVCGPERCSHIIVVQQSASAPQEKPDLQKWKTQPPYLTMDEASWKATRKSL

SEQ ID NO: 1022392 - protein, 118 aa, Homo sapiens
SLVYERSGGPVRGSDLPAELTLRDPGQLLLAAGAPQVIHPPQARKRWDYRIGDSVAKSDPARKHLGEGLQSGGGITLKVKGGIEEQGDEKKNGEKRKVDDEKKYQTNKETGDGERDNG

SEQ ID NO: 1022393 - protein, 172 aa, Homo sapiens
LGTVGAAAVCGEAAAGVMAELSEEALLSVLPTIRVPKAGDRVHKDECAFSFDTPESEGGLYICMNTFSGLWENSMWRDISNNDRSHAQVYLPPPAGPGARKRGGPCYRHWRPTPGRSPSRDWPIGVEGGFDLRDGDNVRIHDEDVKIVSFARLPGDCPGMDWGDCLSLSDIG

SEQ ID NO: 1022394 - protein, 110 aa, Homo sapiens
SFTLVAQAECNGTTLAHGNFSLPRFKQFSCLRLLGGWDYRRVPPRQANLYFGGDIPCGQASLELLTSGDPPASAFRGAGITGISHCTWQIFILLVKSIKPHMVYLKYFII

SEQ ID NO: 1022395 - protein, 202 aa, Homo sapiens
GATKMVVSGYEAGTKPRDSGVVPVGIVGKLPKESDRPTISKSELNLVMRNVRIDDVNKTASCFRPPHLKELGGQDTKSLSCLLGMRRRGKQEAVSVFNDGSIYAWVKPSPSLEDAKSEDQVVIEIIEKNLEAIFEKRNDTKMYIKWRTFWNNSWFLWNILKLPVQRALLQLVKALMLVKDHMDHVGYNFHFWSTVVTDKAFL

SEQ ID NO: 1022396 - protein, 221 aa, Homo sapiens
AEVGAVRRRHLSRRSSPGRLKKELLLRSAPAVAPADLTSSRLGRACAGKQRTCTNTGNLSGLHTFILQARLSNQRACKGLRTFDFPLPNLWYYASLPFSVGTGKGTKEHNEYNNSVAVAANKILDTAQNANSAKQSSTPEILLWQQNPYDPVDNCWNMNIVDLTCGIFRSLWWVDLTHNRSVCGFVDERRTTRRNARRVTQDMVQLGVEQEMRSCQDREYL

SEQ ID NO: 1022397 - protein, 107 aa, Homo sapiens
MSTKCPSVSPVSGEMKKRKAITLEMKLKIIAQHEGGKPVMAIARELGLWQSTISTILRDKKQISDAAKSSASVKSTVITKKRAGPIDDMETLLVMWMEEPDREAYTI

SEQ ID NO: 1022398 - protein, 68 aa, Homo sapiens
AEWLHSKVTKKQMGCEGDKPFCLNTNSIDNELAEAAGEIMKMCESTAVRHVKPSYSRFGLLTSSISIA

SEQ ID NO: 1022399 - protein, 311 aa, Homo sapiens
MARGPKKHLNALLHAPKHWTAGQTNGCYFAPRSTRQVPTTLTGTALPSCTRLLPQRNYDLNALRLHLRRTDGYTRKTTAMQRFHSKLTGKVRAGMSHTPAGLHWHCSSATRRTTGCNISAWLYDTKGRFCLFTASQLDRGKATSCAKGGHDYCWDVKGIPHLVTHDARTIRYPDPVIKVNDTVQIDLGTGKIINFIKFDTGHWCMVIGGANLGRCSAVITNRRNDILALPTVRACDWMANGQQLATRLPTSRSLATVDLPSPYFFYKTILKKPKDRIHYHNQQLDDYRRRAPALKGRSTRPDRSFHGPSRP

SEQ ID NO: 1022400 - protein, 216 aa, Homo sapiens
MWTCNKAGSRMVVDAANSNGPFQPVVLLHIRDCKMHKIRDLCIQEGQLYIRTGSAGRLWDLNYAWIGHVPPADQEKLKSRSYVSVASSLDFASDPLSDLKWQGRQHELLHSAPWYTISTIIGNVITEPMYPEVVHMLQLTCFGTLTTSSNPKERTLDRRHCMSQRLATQAWTQSTAGYDYHPNGLTQFPDFQPNIAQHYIEPEAWPCAAFTSPCDP

SEQ ID NO: 1022401 - protein, 123 aa, Homo sapiens
MVVPSCHACPGHRLEYLMHYRLCSSVMVPSLDRDKVEARSSRVFKAVSFKSQVVAGTNDVHQGALSAIEDCAYTLRVLPMLLPCMNNKPCEPVMLIYQTNKAKHDELTYVLILTLDKALQPED

SEQ ID NO: 1022402 - protein, 406 aa, Homo sapiens
WVGGVCVWLCGGSARRRGGAAERSLGVWDVWVSMFRRGGRAVGVGVAGFLWGWWARSVVCHKGRPGRVLGRLRVSPAWGDLAGSRGAGERESWGARGVVKGRVPRGGVRSPRPVAHVVARSRREVLRGQCQPWWGKGSLLSHLVGGPLAPLGDRRSAPVEGYTTLPGAKANSDSRIMRSVPRGENRQGRSQGPMVCAHVTVGLRDVAPQRPTNRGDPHKGFGGHSAPPQGPGEGKVWPRWSPRIGGWAGPADEEGYIGLIELGHPPAKACGEMREHPKISGACVLCRCPCGPARLFRHPDARGIVTQRIAGFTPGSFAQNWVCFRIEREEVVEHQKRRSYRIPSETRPLESQNSLAQNLEAQDFMKRTFLIGKMSKPAMMPPSLLKLFPFREIAPSPMPPDVELSS

SEQ ID NO: 1022403 - protein, 128 aa, Homo sapiens
LVLSLFAINLAAAHSWVHTAFMSCDTHCKVCSFTPEANETTNPRGGMNNSRHATLRAVTLTAKVRSFTPEPEIHEPPQKEETLNTSKHQKEQTPDTPPLRTVTLILRVRGFILEVSETKNPPIPDTLS

SEQ ID NO: 1022404 - protein, 138 aa, Homo sapiens
MGNNHLCLAPILLPSTCAPNGQYRTAIDVLCRLASWFRSSSVEIIHWFSHFWLFVAKANIGLISVFQLQPTDMSVHLSPFFQHTQLRDKEGLQGIGDKEYIFNAKKPCRENRNNGVLPNIQYPWANPGKGSKEKPVAA

SEQ ID NO: 1022405 - protein, 330 aa, Homo sapiens
TSGRYSVYYSGRFLAYLLPAGSTALQVFFFLKESCFLHNSIQEWLYPNHCKMVVDRSNSVDHTFREVHTCCSILNKFLKPLQEFFQNAKSNFDSKVKANLARHTDVNAWSSQTETKYSTLMMTGNSLGRAWHACLTVHHPDHCMMSATWTFDMEDCTSRPNFYTYAERHTYLAHSSQKSPTYQRGTLSHIPPTAKGATKPHGWPSNGRPITIQSGTTRALRPRHHCRSHTLRPKIGLDTVPQDIRPVVRSTPAPAAKRGPATQTIYHSHLVNQASRHTTRARSPPPVPPPKNTPLTRRKQTRTDKQAKRPAEALHTRPPRTTDESDSRTH

SEQ ID NO: 1022406 - protein, 101 aa, Homo sapiens
RRNHLLAGQIRTTNPGSGELRTTVVNEAGASHTDLSEDRQESRNKNIVPQGSLKKAVWFYLPRNSYLVLNWKQNFLWHLVPLRYSPCSPPVSSASGSWKEV

SEQ ID NO: 1022407 - protein, 185 aa, Homo sapiens
MKCVFVTARDHHACDDLTCVCVGARQSANKIESLGYKPSYSCKLGRGTGVYLNPSATEIVKLWTVYPVQGIPLKRTTIPAQQIWVISHAGAGSCWETLDTRKATRRWLINAHSWMNNHQLEPVDKSSYTTEGHLFYGTCEHAFLGLGYKFNWTFIQHVTSVLFLTGQARKNFLASKDRVCGINKH

SEQ ID NO: 1022408 - protein, 379 aa, Homo sapiens
APCPSPPAACLGRAEDAAQRLGGQACSPPARLLTSPATSPFCPPGRPVSPRPPGRVLQERQALPPCALRRSPARPRSPPAPSAPRPRPCPRAVMLAPPAFVAALACLACLGPGRAWATEAIHCPPCSEEKLARCRPPVGCEELVREPGCGCCATCALGLGMPCGVYTPRCGSGLRCYPPRGVGEAPAHTDARARRVQWSWRRSRPSRKALQPSDRDEGDHPKKSFSPCSAHDRRCLQEDTSPKIRDRSTSGGKMKVNGGAPGGCLAWCPRAPARSELHRALERHGRFQTEPEATRTFYINARIPNLGPELEISNPSKCHPRFWYWAAWPCAWCFGPDKRGLNAFRGAWSPRGDPAGHQVVYGFQDGACHQAGTPVRGNR

SEQ ID NO: 1022409 - protein, 381 aa, Homo sapiens
  misc_feature (84)..(84): Xaa can be any naturally occurring amino acid
  misc_feature (91)..(91): Xaa can be any naturally occurring amino acid
  misc_feature (94)..(101): Xaa can be any naturally occurring amino acid
  misc_feature (104)..(104): Xaa can be any naturally occurring amino acid
  misc_feature (106)..(107): Xaa can be any naturally occurring amino acid
GPLPLAARRLPGPGRGCGAAPRRPGLLPSGTPANFPRYVPVLPAGPPRLPAPSGSGPPGAPGAAAVCPPPLARAPALPACAQRXGARGGEXVGXXXXXXXXFLXLXXLLGLPGPGPSLGDEAIHCPPCSEEKLARCRPPVGCEELVREPGCGCCATCALGLGMPCGVYTPRCGSGLRCYPPRGVGEAPAHTDARARRVQWSWRRSRPSRKALQPSDRDEGDHPKKSFSPCSAHDRRCLQEDTSPKIRDRSTSGGKMKVNGGAPGGCLAWCPRAPARSELHRALERHGRFQTEPEATRTFYINARIPNLGPELEVSNPSKCHPRFWYWAAWPCAWCFGPDKRGLNAFRGAWSPRGDPAGHQVVYGFQDGACHQAGTPVRGNR

SEQ ID NO: 1022410 - protein, 270 aa, Homo sapiens
SYLTQRARFFSANEGLDDYLEAREGMHLKDVDFRESLMVFADPLQPALCTRCAWVFWLVSAATLSVAPARVAAYGTAHVHYQVEKLFGASSPPPGAVPSGPPLSRVATVDFTELEWHICSNRQLVPSYSEAVVMGAGSGAYLRGCQRCRRSVSSNSLPPARPSGPRLPFSLSQLSLGGWRPGPRQGVFRSLSVGDRYGGTVKEDTENPVKDPTCYEDAFYFPGDSLVHGDKRLTGQDEKGCSSETTKSTHKRKTQTPKNTRKEIKIRKKK

SEQ ID NO: 1022411 - protein, 238 aa, Homo sapiens
QTRYGIITNWDDMEKIWHHTFYNELRVAPEEHPVLLTEAPLNPKANREKMTQIMFETFNSPAMYVAIQAVLSLYASGRTTGIVLDSGDGVSHTVPIYEGFALPHAILRLDLAGRDLTDYLMKILTERGYSFTTTAEREIVRDIKEKLCYVALDFEQEMATAAASTSLEKSYELPDGQVITIGNERFRCPEALFQPSFLGMESCGIHETVYNSIMKCDVDIRKDLLLTARYELDRYADN

SEQ ID NO: 1022412 - protein, 264 aa, Homo sapiens
LCPSSLFFFSRTPPLVLNAPCVPGNVPPAPRGDPRWCSCRPGHRLSLGRTLGCVTFPTESTPLYRNPHWSSAPSDKGPTPLFSRGTPLHGFIKCPPFPPPLIKFSSRVWWFLGGTHTHSTLVEREAISAPSGYSPPTTWNTSERALCIKSSTTRIYKTVGSHREALAPRDALKCALLWPSRESSGSPDTMFPRIPPAHRYYYIRHGKVFPVPLLHHHHTEKHLVAHKVGIEGESPPTSQCPHNEERWLSSGCRLLVTPEDDHDE

SEQ ID NO: 1022413 - protein, 94 aa, Homo sapiens
  misc_feature (3)..(3): Xaa can be any naturally occurring amino acid
SSXGKKEPSDKAVKKDGSASAAAKKKLRDKVDSNDRGTVIKENEAALENGIKNEENTEPGAESSENADDPNKDTSEKRSMVKSDENKDDYTSPR

SEQ ID NO: 1022414 - protein, 327 aa, Homo sapiens
PPSQSRDKLGYHFLILLFSKVRGHCLLTLNMNEEEVEKRFEGSGSTEVTCHGSLYVEDGLSRVMKRQLVKPPKYVTVPGNFQGHSGAQCITLFRTKAKLRTALPVGAVASVYVHKPRCGTSAFDEISFVNVVLVVPTYLRRSFDFEIETKQGTQYTFSSIEREEYGKLFDFVNAKKLNINNRGLKTGHEPNYDEYADSDEDQHDAYLERMKEDGMIREENANDSSDDSGEETDESFNPGEEEEDVAEECDSKATASSSSNEGDSDRGWERSGDSPKRAKMAKDRKNRKKPAGGEERAKTTNAYQEAQCVDTVRVAQSPAREKISQSG

SEQ ID NO: 1022415 - protein, 653 aa, Homo sapiens
  misc_feature (25)..(25): Xaa can be any naturally occurring amino acid
  misc_feature (27)..(27): Xaa can be any naturally occurring amino acid
  misc_feature (44)..(44): Xaa can be any naturally occurring amino acid
  misc_feature (51)..(51): Xaa can be any naturally occurring amino acid
  misc_feature (63)..(63): Xaa can be any naturally occurring amino acid
  misc_feature (67)..(67): Xaa can be any naturally occurring amino acid
  misc_feature (72)..(72): Xaa can be any naturally occurring amino acid
  misc_feature (77)..(77): Xaa can be any naturally occurring amino acid
  misc_feature (84)..(84): Xaa can be any naturally occurring amino acid
  misc_feature (114)..(114): Xaa can be any naturally occurring amino acid
  misc_feature (141)..(141): Xaa can be any naturally occurring amino acid
  misc_feature (147)..(147): Xaa can be any naturally occurring amino acid
  misc_feature (149)..(149): Xaa can be any naturally occurring amino acid
  misc_feature (158)..(158): Xaa can be any naturally occurring amino acid
  misc_feature (177)..(177): Xaa can be any naturally occurring amino acid
  misc_feature (180)..(181): Xaa can be any naturally occurring amino acid
  misc_feature (191)..(191): Xaa can be any naturally occurring amino acid
  misc_feature (193)..(194): Xaa can be any naturally occurring amino acid
  misc_feature (228)..(228): Xaa can be any naturally occurring amino acid
PLRAGTSSPCRPCLTTTESRQQPMXLXVALTKGGEARGELFWDXGESLEFXLRGAYTQVIFLXRNNXIVNEXVRVTXEGGGVEXQKVTVLGVATAPQQVLSNGVPVSNFTYSPXTKVLDICVSLLMEEQFLVQLVLAGRSXLVSPEXGXFPREAEPVXGQQLCAGLEVRMCHLELGXNHXXPPHRLFPPPXPXXWPPTCLGELSPQIALWAGALEGCSCVNKIVRFAXLTCCRHAGSISHPPPSVPSTGEGGAQVEDVGYAPELLLFAPSSYCPNATAARLPRGLDACRIPEQAWDSGKFTGHWEILNLHVHIYSFTSNSGQLGTSTNTNKNNKANTTTQHKQQTTQTTNNKKTTPHNTRSAGDDKATQLYTAEATHTPKQAPRRRDGTRTSTTTEPHEHTSRRGQTHDSYEPKGSGRSSGPHNTGKTQDAGNNKRETTNGAEIGGWKRKDKTNNTTRAGEGADTTATGRDPRRPGERAATRTHRAPTDRPPTTPPAKRNHTARNKQTHQDPRRRRDHTAHETHEHNKKETTRPTPHTPPHDAPQQTNNKEQQTTRAHQKDQRGSTRGVQGDERRRRQPNAGAGRERTRNAISKATRGLSASERGQRKSKKTNGTKDGDEGGRQIKEDQRQNRPDDGKQTRPNRGSGQRKQRE

SEQ ID NO: 1022416 - protein, 75 aa, Homo sapiens
DRVVGAAWRGVLKKTTGLVGLAVCNTPHERLRILYTKILDVLEEIPKNAAYRRYTEQITNEKLAMGKSGTEMLKN

SEQ ID NO: 1022417 - protein, 167 aa, Homo sapiens
  misc_feature (80)..(80): Xaa can be any naturally occurring amino acid
MAMAPRWLSGKKKCKRGKKAACGMRGTAGGQLDEWDDAGVSGQFSGFHSKSRGRGEKSAAGQHFGAIMIGEVGYDILEKXNPVLPGCRHSDPIEPIPDHGLPSEPGALSIGKTASVKTGAKFQTYEISQRSQLKGDTGAEQNSRLQGSNAGQNVDVPMHGHTRDEAK

SEQ ID NO: 1022418 - protein, 65 aa, Homo sapiens
MENSLGKPTKSHVRPQVIMNTGDKTKVPKAVSRNMRHDESALLWPPDLLRDHDFFDPLRYLWSYW

SEQ ID NO: 1022419 - protein, 221 aa, Homo sapiens
MHGRLARFHSVSSYVEEHKSPSYCRNVVAIVTCKVSSIKFTLCQRYIIPVCGGPCLLRTLFEEHIRTGKMSEQLTKDKVAIYKSFRPGDIVLAKVISLGDAQSNYLLTTAENELGVVVAHSESGIQMVPISWCEMQCPKTHNERIPESSPSTTRSSCRPKKAQFTLWKGVSLFLTYYSKDGAIRMQTRARRPTLTYENNLQVYAVDGQVYVIIAMEFHCSE

SEQ ID NO: 1022420 - protein, 253 aa, Homo sapiens
MGGLCGRMNDTEEVWNRNKGVWVGKAEAQGVSLRLRFVGKGDSLRGKESLWQAIAEATNQIKKFWRNLLTITVGRPVLHHAVKDTRVLRVLLGKGSKSGIQEAKELGLGETGSYNHPFQHTLGKTANSGTRCTAQHSEGGGRSSARWDLTRGARRLGLGPALRALVTRGEGVWSLIINPTCQNIGRRKTPNGDDAGAAGGPEGLGGLGWEPRGHPEVTQDIGPGSNGQRGQAKPRKPEEGCRTMAGKNKTREH

SEQ ID NO: 1022421 - protein, 59 aa, Homo sapiens
ASPTITVAMPGVPAFLQGMTDFLQATQTAPPPPTPPPQNDPEKCISRKGTRVTPPPSPP

SEQ ID NO: 1022422 - protein, 184 aa, Homo sapiens
MDGEGQLTLTGQLGDVMKESAHLAISWFRKARQRSTMLTKCFIGGLDSVFDKQQTSICTSQLELVTQRWTIVLELTDSNPVYASLFTLGGWYRSDVAHDLDDNYTERSCASSGWNQQTNVLGGNTERALQASHYSSEKCNKTLRESQATYDRISGFVTASCLDEVLKWRLLMGGLPDKNQTWLC

SEQ ID NO: 1022423 - protein, 155 aa, Homo sapiens
PRACAAADAACGPDSAAVCFATFSPSTARAGGMANVADTTLYDILGVPPGASENELKEGIQNMLAKEYHPDKEVQMQETNLQNISFAYEVLSNPEKRELYEQISESEGLSGSAAAAVAGMDDILLSHFSALADSLRLHGPIRVEVDLAARTSDRT

SEQ ID NO: 1022424 - protein, 340 aa, Homo sapiens
VLTRSWPGPVASLRPEETVPGSMVPGPERASAETQGPGWSRGPRDPAVGHMLLPSQLFDVAPAMAWGPWPGASSSANGLALNSGLLWPLHPVEEPGAEWTRAMVWAPAGTGGSVRPRPLPPPPWPWSPRHGPQAESEDYFVQGPTPPPRVSCGLPGLGAHDPYANSRLDTAAGHCDLAPPPPGPNAGHAHSAGWVRSFHVAAHQLRCMLACGPVRASHLARTKYNNFDVYIKTRWLYGFIRFLLYFSCSLFTAAALGCAVLPSSCLQNLGVRVLLGFQRKLAVLLLLLGRGRVHFRLVNELIVYGIHVTMMLVGAGLVDQWDRRRHCKGRWLEFSGIDRA

SEQ ID NO: 1022425 - protein, 345 aa, Homo sapiens
GEATSPGRPARARSSGEGNVLARSGAGWMGAVMACPTGVPSDGTGCYVLPLLGQTASWLACALMSPFYLHGLTPCLADAVNHCPHACLAICPQPVRPSTMLADPAALEPQRDMGATLQALAPKHLPVRGTQMVLGLPGCLPAGDGHLGRRLPPGSAAGLPGLGAHDPYANSRLDTAAGHCDLAPPPPGPNAGHAHSAGWVRSFHVAAHQLRCMLACGPVRASHLARTKYNNFDVYIKTRWLYGFIRFLLYFSCSLFTAAALGCAVLPSSCLQNLERPGLLGFQRKLAVLLLLLGRGRVHFRLVNELIVYGIHVTMMLVGAGLVDQWDRRRHCKGRWLEFSGIDRA

SEQ ID NO: 1022426 - protein, 243 aa, Homo sapiens
MADKEAAFDDAVEERVINEEYKILDKRTPLSFTDLAAAPMLFQLGPSRHLPSWLPPCPQDQDGKAFPRPPSALAPARHPPPSPLAPPPLSLPTPRAARIPSPALPALPLPPCRLSHPHPPRLHAPPAAPSPPALHRPSAPAWHPHHPPHLRHPPHPPIKPPTRPHAAPHPPHPHPAPPPRPPSLRPPPPSPPPPPPPLPHPPPHLPSPPPAPPTPPAPPPPPHPPPPHPHPPPPHPSPPPPPT

SEQ ID NO: 1022427 - protein, 137 aa, Homo sapiens
EPARHCRHRCPTAFRETGVEGREDFQASVLEGVCGRARSTYRTPEEGEEQSWSAIMAGEEINEDYPVEIHEYLSAFENSIGAVDEMLKTMMSVSRNELLQKLDPLEQAKVDLVSAYTLNSMFGFIWQPKELILRNIQ

SEQ ID NO: 1022428 - protein, 108 aa, Homo sapiens
QVHNKGAKKEECKTGKQLNILTESAIMAGEEINEDYPVEIHEYLSAFENSIGAVDEMLKTMMSVSRNELLQKLDPLEQAKVDLVSAYTLNSMFGFIWQPKELILRNIQ

SEQ ID NO: 1022429 - protein, 108 aa, Homo sapiens
EPARHCRHRCPTAFRETGVEGRESAIMAGEEINEDYPVEIHEYLSAFENSIGAVDEMLKTMMSVSRNELLQKLDPLEQAKVDLVSAYTLNSMFGFIWQPKELILRNIQ

SEQ ID NO: 1022430 - protein, 121 aa, Homo sapiens
MACSHKLSQYLGSGRQLAHSLHYDMYQFGLKDIFVSTKSRSSRISTAFLHQQSKVSTVSMQQPVSCLHNLWHNYHGNRQHIYQHMQGISYTAHNMAQGILGIQFNSDHSDQSTISTAFTQS

SEQ ID NO: 1022431 - protein, 119 aa, Homo sapiens
MIIRNVSCVGADNVRLKQMQQIRMSLRGKAVVLMGKNTMMRRAIRGPPWKKNPASGENGAYISGEMWLCVTKEDLTEIRTCCLAIMVPVLPVACAFAPMVKSLVPARTCLGRKDLPFQA

SEQ ID NO: 1022432 - protein, 203 aa, Homo sapiens
CDWTRGELPFSRALLIRRSEFVPGFRAAGPAKEAIIRKGRGGPFPGKYEAAGKRIQGGEALLLSSPLSAMSLDVQEGSSLEVLVGLSSMEFMEIFHASHIQVSFQRVEFQDVIPPDDFLTSDEEVDSVYVGSCERSCVLELRYYTGVVNNNEMVDYNEILITLMIRMQLKYTDVNGKSSWHLKKELAVLGLYHGQQIGEIEGV

SEQ ID NO: 1022433 - protein, 115 aa, Homo sapiens
CDWTRGELPFSRALLIRRSEFVPGFRAAGPAKEAFEAAGKRIQGGEALLLSSPLSAMSLDVQEGSSLEVLVGLSSMEFMEIFHASHIQVSFQRFEFQDVIPPDDFLTSDEEVDSV

SEQ ID NO: 1022434 - protein, 400 aa, Homo sapiens
  misc_feature (130)..(130): Xaa can be any naturally occurring amino acid
MSAGRIGGVYIHQQERFLDGWGSLGRRGGKSFFFRPFRKNMVATREEIIMLEKEVFADNCFNRQRKIVPRKPFGSYYNPRGGTRLMVFHTTRGCKKRQPRAPLVEELVEALFSPHSGGPIRKDYRFCSHXPVGQHTEIMVGCRRPIRGLPHTRDMMAPQARHSSGVLGKRPAHTSVREVCSKKTVTPRSLGVTLSGVFSLSLLCLCVCCARVVSDWMIKIRTHTTQFTDIFSEKTLSFYSGSHGPPTHTGSLANTYSLEKDIEMEMENSLHETFAERGGSQSHTRRLCEKRSCGPQYKFECVHRATPLCEKRDTMRKAACHIVYFIPPPPRDVLSLIEKSIKMAEKKAPQFENWEKLTGGFTGEKARKFLEKSPSGNEDTGAIKLDETDGYVTPPPRNLF

SEQ ID NO: 1022435 - protein, 68 aa, Homo sapiens
MALPLNGTEATSNAKTTAIGVAASSTQAYATADTTVTAHSHWRRWTAPQRCCTVSNPFAIQPALLTLH

SEQ ID NO: 1022436 - protein, 103 aa, Homo sapiens
MGCFLNENEIVFFSGGQLMEKLPSKELRVRWTLPHSIRSDSEDICLFTKDEAQFNLLRKGTEQFYRKLLNKHGIKTVSQIISLQTLKKEYKSYEAKLRLLSSL

SEQ ID NO: 1022437 - protein, 121 aa, Homo sapiens
AGRGLATSLPPLLPGNLAPPELIAASPDACVLVSRSRRRRQWRPACRSPTGSLPWGSDAPDPLFRGSGRDNEETTGDKGQAGGGFVSPGMEEKLRRERCWHRAPAGGGSLGPGGTYPGRLD

SEQ ID NO: 1022438 - protein, 105 aa, Homo sapiens
MSTKTILCPSLPPQIAATSNAQHSRVGVDTIQYSHLGLLTTTGGVERTPLGTNSRVTGILCVITDAKKPPKVHHDKPLHSTYNRVIRARHTVLVTKVTRLANPDL

SEQ ID NO: 1022439 - protein, 261 aa, Homo sapiens
  misc_feature (77)..(77): Xaa can be any naturally occurring amino acid
  misc_feature (85)..(85): Xaa can be any naturally occurring amino acid
MSTKTILCPTFHPRFLQRSNAQHSRVGVDTIQYSHLGLLTTTGGVERTPLGTEQYGSTGDRSGYPPILNRTLPKTRXKIKPLSAXYSDGYSHAKVLGTLKIRAIPNPVPNSLWGDWDMINWMACGEMLIDEERTRELFKRDMKQKRIEYNESMNGYHNSPEYLAYINAKSRAEAAVEEESRQRQSRMENGEPYMSIQPAEDPDDYDDGFSMKHTATAFQGEKPALISEILSESVVPDVRSSVTNSKMQSQTAVQALWFIRK

SEQ ID NO: 1022440 - protein, 238 aa, Homo sapiens
  misc_feature (164)..(164): Xaa can be any naturally occurring amino acid
MMEGLDDGPDFLSEEDRGLKAINVDLQSDAALQVDISDALSERDKVKFTVHTKSSLPNFKQNEFTVVGNMRNLSGFMIPFVENEDYAGYIIPPAPPRPDFDASREKLQKLGEGEGSMTKGTQISNQKELEIPRETWEAEYLAIFKKTVCDALKVVIPFLGWFQXVGKQQSYLREEIYIPMSFLEYNPRFEWCEDKNQNRETVKTSLKNMLNQQMEYPPGVRVYIDSCEQNEILGGSNG

SEQ ID NO: 1022441 - protein, 235 aa, Homo sapiens
ALGLGAAMMEGLDDGPDFLSEEDRGLKAINVDLQSDAALQVDISDALSERDKVKFTVHTKSSLPNFKQNEFTVVGNMRNLSGFMIPFVENEDYAGYIIPPAPPRPDFDASREKLQKLGERTNGVTDRQEDFTIDDTRNWKLNYFGKYSNEGQLRLLKVFPVSCGQHILFVRRDLHSHVFLEYNPRFEWCEDKNQNRETVKTSLKTWLNQQMEYPPGVRVYIDSCEQNEILGGSNG

SEQ ID NO: 1022442 - protein, 185 aa, Homo sapiens
SGIARDPAAGQACCFLLLGSPFQTKIEKMVDLTQVMDDEVFMALASYATIILSKMMLMSTATAFYRWTRKVLANSRVRRSSDAIYGHRRTIKWRKVHVTLFRSEDEPRVANVVTHVGPTVDTDRWKTVSDYRCLRMDMCAYLIIPLVRESTSPRLTDTIPDNVQKAYVVWEDTGNRTLTSQLSLL

SEQ ID NO: 1022443 - protein, 94 aa, Homo sapiens
SGIARDPAAGQACCFLLLGSPFQTKIEKMVDLTQVMDDEVFMALASYATIILSKMMLMSTATAFYRWTRKVLANPEDCVALWQRRKCQEVSSNR

SEQ ID NO: 1022444 - protein, 94 aa, Homo sapiens; identical to SEQ ID NO: 1022443

SEQ ID NO: 1022445 - protein, 57 aa, Homo sapiens
MHARDNPLTHPGQSPETQEKAEELKPSLPPGLATEGTVNGPRHPDWDCIIFKYLKSQ

SEQ ID NO: 1022446 - protein, 131 aa, Homo sapiens
  misc_feature (113)..(113): Xaa can be any naturally occurring amino acid
SGGEVLLRGVNTWVEKRSLWSPPPRSPARRPLSRPLSLSWKIVREIQETSPALHQPRTKGNAPILLRIPEKIRDPHCEEFEEFWKPPRYPLPPLGLIHLHPRRKSQEKTVNDXSLPPGLATEEDCKWTQTP

SEQ ID NO: 1022447 - protein, 264 aa, Homo sapiens
MNKKLKLRIKKFEVYILAVNLERWLKNVPSAVLQYKSPLLIKPDSREDGFAVTRYRMAAKCPTREIEADAANRRETARRTKFSVGNFSPVTIHWGHARIRNGQFPTSAPPLFLSPLLSLFSLESLPGPTGSALLTVSVLASHCSEQRYSLPAQVPASPYSSHSISLATLHLHPPKATLRTRRLNRIPASPALSCSTHPKDTHQPHRHSPPQPTPTLRTVAPHPTAPHSRHAAPHRQARTTPTAHHAPRRHPRPHAHRRHPTPNP

SEQ ID NO: 1022448 - protein, 370 aa, Homo sapiens
  misc_feature (206)..(206): Xaa can be any naturally occurring amino acid
HELRKGGKGSWRRGKRLLTPWLQQGEAAAARLKKEGGSGERMALKIFPRLQITDGFALGARDSLPPPEVRSHERDLMFGGTGAPYRRASQFVHCKHDGNYTRSNLTYRGIFYYVHTSGHWRVESFGAPVRIPGHKVTPLSEPDACSSSCADAENLLDRAIDDEAYHVLGNQRTLAFGGGTGLLLRGSDAVNRLKLWASNRLHNTQXMGKGPVVLWGWDRLGKSHYMLMIEHRSPSQPGHKKRQRGLCSAPPTSSVAPSYHIVEASHSLVEARPNSPGSKWVSRKSAQPRTGQMPSIRERQKHNRRCSQAGVQTKGNDPGGQGAWGKKATTLATGELLVPVTKGAHVGKRLTKDEKMGPKTRDAHQQRNTR

SEQ ID NO: 1022449 - protein, 272 aa, Homo sapiens
HELRKGGKGSWRRGKRLLTPWLQQGEAAAARLKKEGGSGERMALKIFPRLQITDGFALGARDSLPPPEVRSHERDLMFGGTGAPYRRASQFVHCKDGNNHTCYRVSYNSSIWHWRVVIKGAPFQSRHKYPIPSGTVLTLPHHNSGPQQTTRLQLLEQLTLAYGGELDHTSEDRCFNSSNLSNTSCQPQPWQTPEDLGLEQKANLTNAISSTVNSSQDTATTELRGHAPHTTTFCRDPSYRPFWTRFSFACVEPTGPKPPVTTVRLSKRTFSQ

SEQ ID NO: 1022450 - protein, 98 aa, Homo sapiens
MITCINRQRRCTRLDTISIENSYTASHIPRSTSIPDRSHNSCIIDRTAPSLPENKADSHPPPAPSLLLPHLALSSLHISIETVWLLFTRAPRLPPCPP

SEQ ID NO: 1022451 - protein, 271 aa, Homo sapiens
MACAGLLTVCLLRAARAPAPCPMTPRQPQLVATEPGPALEQALFQDVFRRADKNDDGKLSFEEFQNYFADGVLSLGELQELFSGIDWASHRQFRNRRNCVTTSQSTWDVYRPGCWLPLESLNLQLLAAMDATKLEYERASKVDQFVTRYPAAGRTVSQLQCHFRSSPGAGRQDTLDGPGPLAARSDAESVERAHAGSVDSRMGRSARRPFEDVSALVHSTREYPLRSTLTQAAALSQCRKIELSAYQGRHLAYEEVIQTQLKVNGPPELTP

SEQ ID NO: 1022452 - protein, 265 aa, Homo sapiens
AEFGLEPELRRRGWRARPSRQYHRHLEYRTSVACGPRVSVEEPSGSLPSRASSGPGPGDLWAAGARTAGIELLESSGCWDLGTVDKDFSGVPREDYFEFRVVACGLAYLELKSIIWGTMDFDGFYKTGAGRMDMNPRESRYGLAGISQSCSCGYDNRSEALQRWVQAPIAREYTHCLDRMSSDGTDATGKVALVGAYCGRLVTPLVPKGDTGKQRVSGDVISKPPGARIIHAPKPHSTESQTRDDGMPLRDLNRALCAMKMRLKT

SEQ ID NO: 1022453 - protein, 184 aa, Homo sapiens
  misc_feature (90)..(90): Xaa can be any naturally occurring amino acid
  misc_feature (108)..(108): Xaa can be any naturally occurring amino acid
  misc_feature (110)..(110): Xaa can be any naturally occurring amino acid
  misc_feature (136)..(136): Xaa can be any naturally occurring amino acid
  misc_feature (143)..(143): Xaa can be any naturally occurring amino acid
  misc_feature (153)..(153): Xaa can be any naturally occurring amino acid
  misc_feature (155)..(155): Xaa can be any naturally occurring amino acid
GLVVWAAESLNRGRLGRILDGGSKRKTIVRRERLSAAFFGPRKGSAGRALRGACPERAEQRFATHAARALAPRAPPPPRAPRATPPAIAXPPPPPPPHPAPPRDALRXPXPHPPPPHPPPAPPPAAPPPPPPPTPXTHTPLPXPPHPTPPPPXHXPPPPSHTPPPHPPPSPPPPPLHTPPLPRP

SEQ ID NO: 1022454 - protein, 227 aa, Homo sapiens
GLVVWAAESLNRGRLGRILDGGSKRKTIVRRERLSAAFFGPRKGSAGRALRGACPERAEQRFATHAGAARGSDPLGLGDAPECDRAPVSLTLPREKEERAEEAARERQDCWGGLAPSRLKNGRSCINGAQYRELGRRISKWFWIQRMPCYDGSRCNLSLAIVQQLWYTSAGTSDDGKFIRSFYDKQTIGYSVREQAKKQWVNVRNGMSCIEWLMKATHGEGPEPGVL

SEQ ID NO: 1022455 - protein, 190 aa, Homo sapiens
RLGPAGGHGCHTLGPDMMASMRVVKELEDLQKKPPPYLRNLSSDDANVLVCARSSSYPTKLTYHPEKAFNLRISFPAGGIRFMASHDQIHKPEDLATPDCGLRNWIRFALRAIISSVETGKPCATQDLAKFLCSALNGAGLKYDADNIHGEHSWRDGTSLDLADTESGAVQKECRRVHPRIRSDRPPNSC

SEQ ID NO: 1022456 - protein, 186 aa, Homo sapiens
GRAGSEASSVLEANSCRGAGVTSFSNLSAGAHPRQSQNVRMLNSSFEDDPFFSESILCTHRENMRQMIRSFLNPLEETGSDISAMVEGELIIVEDIMMVEDACDLITRLSALFQTMDPNGVHPMRKLYGENIKKETSVNLPDGSNMDIHLGAFLSYDFIPTPREMNRQKFFQGLNLKVVEAPQERI

SEQ ID NO: 1022457 - protein, 238 aa, Homo sapiens
MGNSRGTLGPQKPRTLILWARGAGPLDPFQGFHQKPKTGHRDQVGNAWFPGKPSSSPGDLPSVRGLPWRLKPLLVAQPKSSQGKSGQLGLGCLEQRWQKAAHEQGVAMTGDMGQQGPPASGSQKSLASADNRGGPGLKGAGTPGDPYGNNHINPAFSKTGRTDQNAPEICLGPGMDTQLGTTSRGGGRTTGKPKQEQSLGSSTDNSKNTKPKEDPSPPERVTLGPLTHNHRNWGSRRT

SEQ ID NO: 1022458 - protein, 249 aa, Homo sapiens
RLKGVIDLIFEKAISEPNFSVGYANMCRCLMALKVPTTEKPTVTVNFRKLSLNRCQKEFEKEKDDDEVSGEEAKKRWSESRATAEELMERPERKMLEEARDIARRRSIREYQALLESCIKLTDVNRGNKCMSDVVKTDLRNHDEESLECLQSCMITTIGEEPWTFEKQAKPRMDQYVNPDGKESLTEEEDVIPRSALCCKDVLDLRGSNVGATPEGDQGPKNMDQIHKGGCDGTNIERPIKCNAASMAQ

SEQ ID NO: 1022459 - protein, 161 aa, Homo sapiens
MLEAGAGERGSPRLRLWQRRENKEVRLKRCCQGVCPGGQVNHPPLCDKAPVEPCVHLSYRIGPLYKAQEEGLVCGLVGTSSQRGVAGGEGLVIQDHKSFNIRLPTEGVWKICLLWLAPTAGPYKTSLGTQWDSFHICVGLPRKAVGYYPGDWSHGQLELRG

SEQ ID NO: 1022460 - protein, 84 aa, Homo sapiens
GFSGSCVFPLSARSTARRTRNQESVAVCWRLEPGSAARLACGCGSDGDRSAAGAMCQVVPVPANHSSLFGSTVNTVHPVSSDGT

SEQ ID NO: 1022461 - protein, 263 aa, Homo sapiens
MAVRALKLLTTLLAVVAAASQAEVESEAGWGMVTPDLLFAEGDRSLLCAGTGPGAGPEHGTGLLLLPWQILTLPFCLLLPHPVCLPDFPWDAGPLTGPPALCPVASWRLHALRDLSFFGGLTAVSAACLRRGLGPPAAPPRSAKSMELEFRKRSPYNYLQVAYFRSTSWRKAVAAGNTFFVGNPEPHGNMQQTLDYYQDHVMELKEADFKGSLRTQPPLLQRISDLGNCDSTSEDTANRKAVAPTLEGVRLQEYFVGYEELRA

SEQ ID NO: 1022462 - protein, 459 aa, Homo sapiens
EKLKEDLEREQRWLDEQQQINGISSMYYTVNCTHIRLKHFLTSKQSFNELKTNYMLQYTKNIKEKLLSTLGEFLEDHFPLPDRSVQQEQNDTNIQESSVNLITLHEHVQRFLEIDYLMFHMIHMSNISDSFWPPYVELLLRYMDIALRHPEDPTRIRFSKLSIESTRMSSFVHTSNKFLIIQGILEPQDYVAKETITGKFNAHRPSILLLAKMACAAIYRFIFNMVISYSVSASRLLQLYGIRNAGSIHILGYNNHFNVAFLMHISLGILGRFHDIAKYPYFVKIYQQSSLMHFGVQLVLLASSQHTFIPCGKVIQFASMRLHTSQVIIWRWHNFTTHIHAHRVPLILLVLLSTTTVHTFGTTAPPYIDYKLTPTIGYFNAGIFNILHVTVTIVEPHVEAGYFISHQAWVYVTFHSPPWDNPWTRNRCRHTSDKLGYTYRARVSPTQHNIEHVKSPPST

SEQ ID NO: 1022463 - protein, 246 aa, Homo sapiens
MGKKRTKGKTVPIDDSSETLEPVCRHFRKGLEQGNLKKALVNVEWNICQDCKELTIKVETIKLKKKQKKSLQFGLCLKCGHQGCGRNSQEQHALKHYLTPRSELTVWFLVVDNGVYGVTYVIMRSSIGSSNQLGQVVDYVRKQGSITNSKAREKIMEILTLTITIWTHTTKKKKIVGARRPEKFLNIGGRGPRGNGHGQRGKNRAEKVVPQKSRRRSETQGPVRHAVIPPVRGSTRSKSTYAESTA

SEQ ID NO: 1022464 - protein, 164 aa, Homo sapiens
MDSTEERDHPRDIRYSRGSLITIVAVDLREPDDEDLMRQTEGRVPVFSHEVVPDHLRTKPDPEVEEQEKQLTTDAARIGADAAQKQIQSLNKMCSNLLEKISKEERESESGGLRPNKQTFNPTDTNALVAAVAFGKGLSNWRPSGSSGPGQAGQPGAGTILAGT

SEQ ID NO: 1022465 - protein, 114 aa, Homo sapiens
SAHSKHFELPSEPTHLLSNPFFAYPSTLFSPLSCQYPYCIIRVTPSRLLLRVPPYTLPCCFAAELSLSCNSLTATNERIETIRSRLSGSSMRCLSAPAPVFHALWNSSIRQRWV

SEQ ID NO: 1022466 - protein, 111 aa, Homo sapiens
LPQSHFCVAHSYNQHCFESYSNSDADCPLALPENRKVMDMIRAQEQKRDLHDLFQHQLKCSNDSFSVIADYFGRGVFNKLTLLTDPPTARLTSSLEAGLQRDLLMHSRRGT

SEQ ID NO: 1022467 - protein, 138 aa, Homo sapiens
MSDFDSNPFADPDLNNPFKDPSVTQVTRNVPPGLDEYNPFSDSRTPPPGGVKMPNVPNTQPAIMKPTEEHPAYTQIAKEHALAQAELLKRQEELERKAAELDRREREMQNLSQHGRKIIGHLFLAIFLSDLVSIRNFL

SEQ ID NO: 1022468 - protein, 196 aa, Homo sapiens
SKTSEPAKRAADGPRVAMALRDYALQKEKVKKFLQEFYQEMIELGKKQFKYGNQWFGWLIVEQVALYVDLEDVAEDDPEIGGHLRFLGECLGGYAKLVLLDAVQELLPQLRRSRAHVVMITDVLGPCSLEHRHSDGSTRQSGTLGWSEAPSNHVTPCVNLIAADLSCDLQGPMGARMPRCDPGNVRGMTSCVGTGW

SEQ ID NO: 1022469 - protein, 92 aa, Homo sapiens
MTALVDASSLCLSGGGGGGVLDGGHLPPPTELRPPPMALPLLELKPPPNAKTTAIGIDCFTPPRPKPLPTPLAPPEPLETVDCTTEMLPFGE

SEQ ID NO: 1022470 - protein, 85 aa, Homo sapiens
PADAHMDPGPKFYSYANDGLPRVMDFKNFSRSLAFLCLFACFNALSSVPGCFLITPFAYFVNKLYWPPLPLHSDDKHLLNYFRSL

SEQ ID NO: 1022471 - protein, 362 aa, Homo sapiens
MGRGLVTGGKWGWGVVRSVTRSQVRGGSSRGCQAVGRVRATLQQLRACAGPCAPGLPWHRFNPSLKAGLQAAGGADRERVQSLASYNVADKIATRKAYGQALAKLGHASDRIIALDGDTKNSTFSEIFKKEHPDRFIECYIAEQNMVSIAVGCATRNRTVPFCSTFAAFFTRAFDQLRCASPKQILCGPLGSIGEDGPSQMALEDLLMFGQSHINCLYPSDGVLQRRQWNYAIHGYLSRTSAKNASSSKTNEDFQCRIKPGGPEEQDDQVTVIGLVTYEALRALLRRKIHRCDLTEPDEISQGRHKRPRGQIKAGAADNATVPRNGRDNEGNGAQSHRGPETDQNREKEKERRRKTTQKPPR

SEQ ID NO: 1022472 - protein, 159 aa, Homo sapiens
MGRGLVTGGKWGWGVVRSVTRSQVRGGSSRGCQAVGRVRATLQQLRACAGPCAPGLPWHRFNPSLKAGLQAAGGADRERVQSLASYNVADKIATRKAYGQALAKLGHASDRIIALDGDTKNSTFSEIFKKEHPDRFIECYIAEQNMVGAGAGRDRSTQG

SEQ ID NO: 1022473 - protein, 381 aa, Homo sapiens
MGRGLVTGGKWGWGVVRSVTRSQVRGGSSRGCQAVGRVRATLQQLRACAGPCAPGLPWHRFNPSLKAGLQAAGGADRERVQSLASYNVADKIATRKAYGQALAKLGHASDRIIALDGDTKNSTFSEIFKKEHPDRFIECYIAEQNMVSIAVGCATRNRTVPFCSTFAAFFTRAFDQLLLWPASPEEQLSSRLLASHVRAFPIWRNDLWPFPGLARSKIVGVVFRSQSPIINLFFYPKVIVRCVLREWHVELSPPNTRWRIVLSFRYQPAHEDMPVIYKTNEDSMSDQAKVVLKSKDDQVTVIGAVGVTLHRGLGRCRTAVEKEKINIRVLDPFTYQCPWDRHTSVLDSARATKGRILTVEDHYYAKVAFGEGVSSASTGQS

SEQ ID NO: 1022474 - protein, 452 aa, Homo sapiens
AAEHWLRATVGSGAVLGAAAADAGRRRGGVVPSCQQRAVVAPQASWYLLTLSPPMGRLWGPKARATSGCANGGGFVECEQPLAGVRILVGCEDASEGVRVRKEPAAAGGSCWCCRGMARVITALTAHDDPRCVMLTCTLIAINPEPGVPGALSKITRRVHTPYRSTGLKLACPQATGPLSTKHSSVGPVLFLQEDDDSAMTSGCVAEEPCELQHSYQARGERFGPNDPMEQWPRKPYGGTKGYGAHLNRSIVVHHEQQKVALFKRRNKAGQAVGRPAKCKARDGRWKGKRTGQQRDPQGKGNGSQQAGVDTGKRANGPGDGHGQAWHAGPRDKPRDAETMLDNLAERPKPARRKTSHRALNRKPHTGPANGDERQKSGSGQHKEKVNKHNGDNDEGQEDERKNREARRTSRQEQTDQQRTPAAQKTPHEAQYNRHTPDQTGEREQARENVEH

SEQ ID NO: 1022475 - protein, 69 aa, Homo sapiens
GGIGVKMEEYAREPCPWRIVDDCGGAFTMGTIGGGIFQGNQRFSQFSSGSKPQTTAGSLTAIKQPGLHS

SEQ ID NO: 1022476 - protein, 101 aa, Homo sapiens
  misc_feature (53)..(53): Xaa can be any naturally occurring amino acid
  misc_feature (57)..(57): Xaa can be any naturally occurring amino acid
GGIGVKMEEYAREPCPWRIVDDCGGAFTMGTPLVGWVGYSFHTPNSKGGFSQXFFPXWGDVKNQQELTEGRDVFGKPRASNCEIHPKGAFPQARLFQGHGA

SEQ ID NO: 1022477 - protein, 98 aa, Homo sapiens
  misc_feature (49)..(49): Xaa can be any naturally occurring amino acid
MTLTGLRCWTHFGIPEQEYRCVVKDGLLGELTVICRNLQPLLEMAVVYXLGAHAARDSPGTWNSRLRPYWSPTFCAQTGTVHKMRTVHNCSGRTFEAH

SEQ ID NO: 1022478 - protein, 152 aa, Homo sapiens
AGVDVGVGVGTGVDAAVGVDVGTGVDAVVGVGVGSGVDADVGVGVGTGVDAGVGVGVGTGVDAGVGVHVGTGVDAGVGVDVGTGVDAGVGVDVGTGVDADVGVGVGTGVDAGVGVDVGTGVDAGVGVDVGTGDAEVSVDSRRGREFSSSRRP

SEQ ID NO: 1022479 - protein, 84 aa, Homo sapiens
ASGIWLSSAMASLEVSRSPRRSRRELEVRSPRQNKYSVLLPTYNERENLPLIVWLLVKSFSESGINYEIIIIDDGSPDGTRGCC

SEQ ID NO: 1022480 - protein, 84 aa, Homo sapiens; identical to SEQ ID NO: 1022479

SEQ ID NO: 1022481 - protein, 84 aa, Homo sapiens; identical to SEQ ID NO: 1022479

SEQ ID NO: 1022482 - protein, 297 aa, Homo sapiens
RIMEFLSEKFALKSPPSKNSDFYMGAGGPLEHVMETLDNESFYSKASAGKCVQAFGPLPRAEHHVRLERTSPCQDSSVNYGITKVEGQPLHTELNRAMDNCNSLRMSPVKGMQEKGELDELGDKCDSNVSSSKKRRHRTTFTSLQLEELEKVFQKTHYPDVYVREQLALRTELTEARVQVWFQNRRAKWRKRERHGQIQQAKSHLLPPMIYQFGQGLTAYHRFRTIVGGMPGGLGPHCCSSELPRFELFMLEIRYGCTPNISAQILASLGRTLKPVRGSSKDPWGHFEYPVGLSTTL

SEQ ID NO: 1022483 - protein, 66 aa, Homo sapiens
AVITLFNEPSADDSKKGPLTVAQKKTQNIMESFENPLRMYLPHWDTVLPSLRQRSSIHQPNSMKSA

SEQ ID NO: 1022484 - protein, 212 aa, Homo sapiens
MLQWLVGHRVILLSGGYVLWVKTMRHCGQIDVHIFNAVSLRWTESCAPGEVVPSVGKAPVVPYMRYGALNASSSTDTVLLWGGRNDTEGACNVLYAFGRQRTVFPSDIHKLDTSTMTWTLICTKGSPGRLEGLPLSHNAGKSHVCLRGPCRSVWAIAIPKMRFTVDRIRVFDSQMKAWVVRSPDIQMLPEGAPESTRALGTREHAIGGEKDR

SEQ ID NO: 1022485 - protein, 254 aa, Homo sapiens
MLQWLVGHRVILLSGGYVLWVKTMRHCGQIDVHIFNAVSLRWTEAAPLVKSCHPWARLLWVPYMRYGALNASSSTDTVLLWGGRNDTEGACNVLYAFGRQYVSKWFTPRGVRSQYPGVPGMDIQPVSYGKIMLHLMGATSSRRTVFPSDIHKLDTSTMTWTLICTKGSPGRLEGLPLSHNAGKSHVCLRGPCRSVWAIAIPKMRFNWNRIRVFDSQMKAWVVRSPDIQMLPEGAPESTRALGTREHAIGGEKDR

SEQ ID NO: 1022486 - protein, 275 aa, Homo sapiens
YTETRWQKWQNKDDQGSTDRQRGPAPTGAGRRPAGAWGGRGRGSTNSKLTMGRGCLVSLPEPRPPGLLLCESHQEPRARPCPQGFLLFSCAPGEAEGEGWRRPQHSLISMCTRVYVCMRVCTCVCVCVRVCTCVCTHAWPPVVCTCALGSEASPELGAGWRGKGMLWGSVYLRKQGPPSPFCLVSPVASGPPSSLSASHGVVQAGTSRYPFCTPWALGALKAGGVYTGSTSTSPELVWALVHKHSVAERQRIQAAMLSHLLRAFLSHRPPRRTRG

SEQ ID NO: 1022487 - protein, 88 aa, Homo sapiens
MCSDDVTSYCEDALTRCPRAYLVRLPLSTDSFQMKEPYSLTKERIQLCLTWTLPSCAHTGNYRIERRPEHAVGSVWAASRSLPLYRAI

SEQ ID NO: 1022488 - protein, 56 aa, Homo sapiens
LKCSECMLMNIAPLSKGELCSTHSPAFDREALGGDVVVVNCWNTKERDLVKEIRPS

SEQ ID NO: 1022489 - protein, 104 aa, Homo sapiens
MPVGVGRHCSERIGNEKVATPFLPCIHALLHGATAWWPWFDHGIWPQVRPPKGGGKGDLREQQLRLSCYLKGEPLGRCHGLCARLSLLQDQFVSRFLRVTKEGG

SEQ ID NO: 1022490 - protein, 125 aa, Homo sapiens
  misc_feature (57)..(57): Xaa can be any naturally occurring amino acid
LPPENSEDMNSRQAWRLLLSQGRGDRWVAPCSSEREEKVPRPPPGFTPVCWATPMPXAPTLPMFAPRWRGTEESTAFLFLKRTFEGLGFARGSFSAVVPVFGDKRLVISSGANVRVLHYHNQGGI

SEQ ID NO: 1022491 - protein, 240 aa, Homo sapiens
VVVVWVYSGRMPEDTRLFAVSPSHLPVGIFATNDVWCAAHCWGVGGVHCPLWWSDPPPRPGGPLFEVPKMVMVGPPSVSAPSECYNFPRCGTSKGEKLVPKFNIDAPTRPSVGAPNTKKKKGLVEGGVNTTCPEGRFLILLTTQERMWVAPFYKLGGHNLEKKFPSGCNHEEVVLCWEKENGDRRRPLCGVGFVLGGAAHTTNRRGGVLILTRGILREKKVERAPQKVPHVWCSFPPSAR

SEQ ID NO: 1022492 - protein, 190 aa, Homo sapiens
  misc_feature (5)..(5): Xaa can be any naturally occurring amino acid
  misc_feature (61)..(61): Xaa can be any naturally occurring amino acid
  misc_feature (79)..(79): Xaa can be any naturally occurring amino acid
  misc_feature (100)..(100): Xaa can be any naturally occurring amino acid
  misc_feature (155)..(155): Xaa can be any naturally occurring amino acid
VASGXLDINSSVKGARSVRFSDAFNIPLITFVDVPGFLPGTEQENGGLLRHGPKLLYAFAXATVPKITVLTRKAYGGAXVFMGSKHLCGYPHYPWPTAEXAVMGAKGAVEVLFQGHENVEAAQAKYIEKFANPFPAAVRGFVDHLIPPSPKRARXCCDLDVLASKKVQRPWRKHCKYSIVNKSKETETKN

SEQ ID NO: 1022493 - protein, 227 aa, Homo sapiens
MARQGLYDRLPPLPVTPRHGSGAGVVIALGLQGVSDRKAGERVMVLNRSGMWQEEVTVPSVQTFLDILTSEEVGEVTIMDVWALPKATGRVRGRPAAYLTHHPFPRELLCCFLSPRLAQSPPVCVPCAFSIMTSSYPSRYLEPCADIRQRIESVSSGYGANLCESSMYRVISLDVPSDLGLTQDARLMGYDTDYLNTYRYLWYPQSFLKPQYGDNFQYIQGFHCTLL

SEQ ID NO: 1022494 - protein, 118 aa, Homo sapiens
MARQGLYDRLPPLPVTPRHGSGAGVVIALGLQGVSDRKAGERVMVLNRSGMWQEEVTVPSVQTFLIPEAMTFEEAADLPRQLRYQTTMVLFDFGNYSLATASGYTWLAGGVGMAAVHC

SEQ ID NO: 1022495 - protein, 253 aa, Homo sapiens
ECGGARERRQLGAAEPREAEGAVAAAHGDDEEIPRVCPSLFPPQDSPYSSLPLQSPELLEVPASIPQTSAGISLQHLLRQQGETPITPAGQVVLDPDNPKDGNMLGIKTSSSVTWWGTMSLESFSAKRIVKPNKNLNPKVHSTPRVFHVENLKQQLWVTETQMWETILLLSMARVAGCFGAPGPMPCVSHSIERMPGKLVLGKQCAVAAGQTLELHLAGKLRLRDQGQERLGFTGYLDRSRRLQARTACRNRA

SEQ ID NO: 1022496 - protein, 137 aa, Homo sapiens
MAPCKGEGKEGENHGHSRLGASTVAVKERNVFGVCPQILCIPSNDTLCPKSRDLFGQGTLCPCDLVGLRLRPDRDESSTHMLLCWLPRMCPEVKELGITALHIKLRATGGNRTQTPGPGAPSALRALARSGIKDRAD

SEQ ID NO: 1022497 - protein, 70 aa, Homo sapiens
RPRRAAEVDDDLARLDKLFRFVDLFQLVGRTRPVTLFLCQFDIRVVNVVVNPVFIEFVLGHSRKILLLCR

SEQ ID NO: 1022498 - protein, 241 aa, Homo sapiens
MREAAGGGPREGSREDLFEALRTPPPRGPPHCRFRKPCLNPKADRKMSSRKVLKWGHPCPQISKATVCYAKKGQVLKDITPGLLYQGKNFVGVLSFNPSCDFTLCVCPTEIMWFTVHGGKNDITGNSTCQVMGGFCGILISVISALGQIHLKKQGGLGPMDISFGIRTRKRTMCQDYGVLKGPDEGISSGPFIMRIRYLEIMNDSCGRLGMRLELVRAHGPGNWVSVVDWVSHHLVQGEFS

SEQ ID NO: 1022499 - protein, 563 aa, Homo sapiens
GGGSKSGLCAWTKSALSSIGGFTQIAQNAGVKVVDGYQNTIIVPECGRCTDGRMSRSIAEMGAYVSILEYKNCEGMILLSELSRRRIRSINKLIRIGRNECVVVIRVDKRTTGIIIAFSPTHSTAVSSQQAQPITTCASTQIQQHIPNSCFISHSLRPCMLQVVQHINTTGMQHAVNSLFPAGTVLGSIACTKYHRSTLAHGCRMHAISRHCRSPAAHLIFGPSVYSNLDMQACNRASHSIQSHHLTSGCCAPRQGWSKHSAAQTHSARSGLGRLRYWTGHLTWLVTHKNSPLQQARSMDIVSHRNTFPIYSFPSNITRTYTRGTVHMTVTEQTIGRRNTDRHLSWSLPVQDILRSDITRQNTLADTRRDGCTTGSTRASAQNKLFTQTFTNCKHWDIRRPPRTWMNELATTENWDKVKREHDTVRQKSVKQTKLSNYNQFVRQHTVHNLEEPHTSSASPEVATTTLERRTTDGHDLHQQTAIVEQNKRTTTTETIVRHMNENASNPNRTHSHYSRRGTLQHSTTTTRHHVTTTNPINQQQLTLDTQTKIPHQRRPSRHTTND

SEQ ID NO: 1022500 - protein, 150 aa, Homo sapiens
MLNDIDECQTRHETLVIIFCKNIVGSFDCGCKKGFKLLTDEKSCQDVDECSLDRTCDHSCINHPGTVACACNRGYTLYGFTHCGDTNECSINNGGCQQVCVNTVGSYECQCHPGYKLHWNKKDCVVKGLLPTSVSPRVSLHCGKSGGGDG

SEQ ID NO: 1022501 - protein, 372 aa, Homo sapiens
PEVPPAWGSTRTLIYILEINMAKTSQTVAHLFLVYDARQQKGLTSSGGSMERAVILELKRAVCERRGLPFDGRHPCLGTWRYYMNQVGGETRYCVEPVDLLKDYFPVQVVTARCCCGIYQELLGLAFHHRGGRLVPVPEDVRLYTARDAASGEVVGKFYLDLYPREGKYGHAACFGLQPGCLRQDGSRQIAIAAMVANFTKPEAADAPSLLQHDEVETYFHEFGHVIAPALAQAEFAMFPGGPTLSGDFVGGAVADAGELGCGSRKRCCGISGLPTGSAVPRELLEEVIESPGGHNRAFLTLAGIVLSHGWTTGPFTEKGSCPRESICALFGKHSGPARRKQFCGPCHWRVLYPNWTVLRETETNNTHKVLA

SEQ ID NO: 1022502 - protein, 168 aa, Homo sapiens
MRIEKCYFCSGPIYPGHGMMFVRNDCKVFRFGKSKCHKNFKKKRNPLSLLGWNRQHSGKRSWNRAYTWMILFEFSNVEMKPIIHTMQRAYGDKTIDAMKRVEEIKQKRQAKFIMNRLKKNKELQKVQDIKEVKQNIHLIRAPLAGKGKQLEEKMVQQLQEDVDMEDAP

SEQ ID NO: 1022503 - protein, 163 aa, Homo sapiens
MRIEKCYFCSGPIYPGHGMMFVRNDCKVFRFGKSKCHKNFKKKRNPRKVRWTKAFRKAAGKELTVDNSFEFEKRRNEPIKYQRELWNKTIDAMKRVEEIKQKRQAKFIMNRLKKNKELQKVQDIKEVKQNIHLIRAPLAGKGKQLEEKMVQQLQEDVDMEDAP

SEQ ID NO: 1022504 - protein, 174 aa, Homo sapiens
MRIEKCYFCSGPIYPGHGMMFVRNDCKVFRFGKSKCHKNFKKKRNPRKVRWTKAFRKAAGKELTVDNSFEFEKRRNEPIKYQRELWNYKTYFGLPELRTTQRTFRHDNSEPGTRQAKFIMNRLKKNKELQKVQDIKEVKQNIHLIRAPLAGKGKQLEEKMVQQLQEDVDMEDAP

SEQ ID NO: 1022505 - protein, 180 aa, Homo sapiens
MRIEKCYFCSGPIYPGHGMMFVRNDCKVFRFGKSKCHKNFKKKRNPLSAKKVLRVGPKSNSGNSSWVNELTGGLNPIFGKTFCGEKKKPLGKIEPIKYQRELWNKTIDAMKRVEEIKQKRQAKFIMNRLKKNKELQKVQDIKEVKQNIHLIRAPLAGKGKQLEEKMVQQLQEDVDMEDAP

SEQ ID NO: 1022506 - protein, 136 aa, Homo sapiens
MDAELEFATSAQIQLANNFFDQVVNNQWLLREVWFIGLQYVAQHKVILHWFKPKYKGYHSQDCSTTQQNSFTRSSLELNFLSLKMLPDEQLIQEHNPETLLPCKLQNAISKLMRYIAPPENCKSYGLTYACPKPKY

SEQ ID NO: 1022507 - protein, 157 aa, Homo sapiens
PTRRDHASPTRSLSGQVVGGKDSGSVLTRPWPEAQWPPALPPRTNSVTSQAQSWTAHLGTRFSHFLRTSPRLEERSEEVGDGLFARTPAAGPGEAARRRRAAAGGDMAEEQDLSEVELSPVDSGGAPLTVPGGDAPSCRCPDGRPAGRIRALRSTAR

SEQ ID NO: 1022508 - protein, 145 aa, Homo sapiens
RTMAQGQRKFQAHKPAKSKTAAEPLKRIGAQEKAVVLSLPRRRASCSSKSSRENLEVGIRKKIEHDVVMKASSSLPKKLAPAEGPAKKKGAACLPPPPRHLPEDAGPSAGQIPTPYLHIGTLQGPSHRLHVSGKRDPVPPARGFT

SEQ ID NO: 1022509 - protein, 84 aa, Homo sapiens
VEEQASAAVAGCRFDKIKAAGKWTVRFREMEGSGICIDDAWREDKLPFMQDVGNTTECSFLNLNKTMSGTTESVKEQRNEVEQT

SEQ ID NO: 1022510 - protein, 179 aa, Homo sapiens
  misc_feature (99)..(99): Xaa can be any naturally occurring amino acid
VEEQASAAVAGCRFDKIKAAGKWTVRFREMEGSGICIDDAWREDKLPFMQDVGNTTECSFLNLNKTNWWGNQTKENSLAPNKGKTKERLDSCDYDFSTXNQVTVQLRMFPPCGNWTLWFLFFVDGFSQSTQIKAVVVFSVSKIQTLVSNKSASQECTAQFSWWVAKCKWKLNEKLEISQ

SEQ ID NO: 1022511 - protein, 334 aa, Homo sapiens
VLPGPTFHPVPWTLGWVAPPERPKSRAFQGALQSHKSSMAAARKPKKPFPGVCTDLGDLRLENYPIPEPGPNEVLLRDAVLWAICGSDVHYWEVWSNGELSCVKQAPWLLGHDSFRGSSSDRKRGTHRYKAPIQFRGECVCAYLSRLVASPQKSDRTSCKKRADTNLFTFHAFFCATSSPPYDGEHSAGYYKQQSAAFVLQSFLTNVTFEEGALIEATFAGGGIHDLQEEEELPPGNTTVLCGGGAGPIRDGHFAPGQSNGEHAKVVVNDLSATSDCAIAKEIGADLVLQISKESPQEIARKVEGQLGCKAGSHIECRGKRAPSRGAFKQFVWW

SEQ ID NO: 1022512 - protein, 111 aa, Homo sapiens
MPTVSVKRDLLFQALGRTYTDRKNFDEPTVFELWVWTLDEIKDLSFYVQGAVRPLITSILMFGPLKQGCLLSRKKLDAIQCTVEGESANYIDKRHNYTNQTNHWNWQKQDI

SEQ ID NO: 1022513 - protein, 178 aa, Homo sapiens
MPTVSVKRDLLFQALGRTYTDRKNFDEPMYLNFGSGRLMKLTTLRTETNKVQLTPGNVNGSRSLCCCIFTNTLTVPCQYDIDLLVVLDRESGSQTGLSKRSFPTDRTQGIEYGIPVCYLNTGGKMALDWDTKFPRHKSSTSHFPRENKVKLTQPFIGLYRYPFFGAGGYEPGPRFRRG

SEQ ID NO: 1022514 - protein, 185 aa, Homo sapiens
AGEGYGKPPAGNPGRRGTVDRCPRPTAGLGLVSGLRTLEALVDHPFRSCPKWSWNWMLVTKICWLFLATMEQCDDFWETVQPDCRPVMDPYCDMVRLRLFLSVPELTGEVSMDSAGGSLLSPPASCEHSQALSNPRALSTMTITYSSSQGNTVSMDLESESCQKEVGDPRRLQQHMEELAEQEIR

SEQ ID NO: 1022515 - protein, 69 aa, Homo sapiens
GPSHATSREASWAQAAAFDIQRNRCHRHSSGSRMGYTEGSCSLLQQSPLAKMHDSQSTFYSHCETLPKC

SEQ ID NO: 1022516 - protein, 381 aa, Homo sapiens
MPGALGCAKYFRTPRGVEHQSTAIGRVWAKRQHSALFFQNRRAPIEGGESHNKKEKSGGGEPPHVCSKGKKEFGVYEMGERTHPVAVIGFQQKLMRKLFLGRKAPRCLVLHPRGRPNKGDPPKMVAQSAEVGSFNKGGSSLLCFGKDGRSFSLPVEMFRPKRIGVGESVAQFVIERKISSKSAWRFYPLEKKECVSQRGLLKKPLRALGAVEHVFPTTGAPIGRSSLYHPVGDPQNEEGVPPIGVPTHKYMRHDNHIGILERLPHTVWNKVATGAFTTRRRGVYTHERLCRASVSSLCVVGCVFICSIDKTPAHPLLIYRRYSREKTPLSYIALNGPPDTRGVSAHTYLPGEDDEMIDECENIYFEAPSRECAHSTHNETL

SEQ ID NO: 1022517 - protein, 140 aa, Homo sapiens
ANETFKNGEADAWDTVTVSNIAKFLTDLGSEEVFVNDYGDIIENPDREQQVKKKSKITVYFDNLRKINKEQFSKFRDMADLNFRSSDFASEETKGNVFSSMMSGINLFLQDNIAKLTSKNSIDLESVDAAANLVVVVGGR

SEQ ID NO: 1022518 - protein, 202 aa, Homo sapiens
ECSQCAGVGLSPCQSAAACGLVALWQRRRQDSGTMSGFSTEERAAPFSLEYRVFLKNEKGQYISPFHDIPIYADKDVFHMVVEVPRWSNCKQVEMATKDPLNPIKQDVNNRKNSAMSANSFPYKDYTLATMAAIPQTWRKTQATFDNTYCCSVADTLNPIDVCDTSDAAYVQGGDILGVKRSRHYGAMIDEGENRLERSFAH

SEQ ID NO: 1022519 - protein, 128 aa, Homo sapiens
RRLSSQMWPVPLICVQVAGVVASEIVHAAQVVRVGLSDTKVPETDTCSPYTIVTVCLRKAACGCKSHLGQRTQQLCFLIPTASSRPHFLGIFVDMMYPTPFVKALPVNCPAQIHLCLGHGDGDGLPSK

SEQ ID NO: 1022520 - protein, 112 aa, Homo sapiens
MSRSPDAKEDPVECPLCMEPLEIDDINFFPCTCGYQIGRFCWHRIRTDENGLCPACRKPYPEDPAVYKALSQEELREDQRMRKKRKKMRETEKISENGKDLGSVRVYKKKLV

SEQ ID NO: 1022521 - protein, 141 aa, Homo sapiens
MEENLVNSEPQLSTSGSISTADGSALVKWGKYYSNSVELKQNFAAPINRCPLIKDTLFLMWIYHALCSSRFRSGPPGEEAQVASQFICRCHLKNSQIIQKEDLCIFSRKACLGFYTGDLILPRLRWKHLWMPAHCACARRV

SEQ ID NO: 1022522 - protein, 103 aa, Homo sapiens
GFRVGRSSMRSHESLQVYRYGINLTDPMFRGIYRGVQKHQDDLQDVIGRAVEIGVKKFMITGGNLQDSKRCTAFGTNKWYAQYSWDVILQDVVNLKRITLIFT

SEQ ID NO: 1022523 - protein, 266 aa, Homo sapiens
  misc_feature (184)..(192): Xaa can be any naturally occurring amino acid
  misc_feature (206)..(207): Xaa can be any naturally occurring amino acid
  misc_feature (210)..(211): Xaa can be any naturally occurring amino acid
  misc_feature (213)..(213): Xaa can be any naturally occurring amino acid
  misc_feature (216)..(216): Xaa can be any naturally occurring amino acid
  misc_feature (218)..(218): Xaa can be any naturally occurring amino acid
  misc_feature (220)..(220): Xaa can be any naturally occurring amino acid
  misc_feature (224)..(225): Xaa can be any naturally occurring amino acid
  misc_feature (228)..(228): Xaa can be any naturally occurring amino acid
  misc_feature (233)..(233): Xaa can be any naturally occurring amino acid
  misc_feature (247)..(247): Xaa can be any naturally occurring amino acid
  misc_feature (254)..(254): Xaa can be any naturally occurring amino acid
MTKARLFRLWLVLGSVFMILLIIVYWDSAGAAHFYLHTSFSRPHTGPPLPTPGPDRDRELTADSDVDEFLDKFLSAGVKQSDLPRKGDGAAGLAPGSIGRKSRERATTGSPGDARAQPRPGPGSRRSGGACCGGFVRQLPALPFPTKERAFDDIPNSELSHLIVDDRARGPSTCYVPKVALHQXXXXXXXXXLNPSSPLFSNLYPXXNPXXHXHNXIXHXTHNXXFLXYFNLXLHPNNFNLNNNTNXLFFLYPXSLPNPSYLINIY

SEQ ID NO: 1022524 - protein, 186 aa, Homo sapiens
DIELRAHLRTAQMRAAGHPPHLVSRSSSRHMYWSEAQMVTHHTINGCDLRPGDLLGTGTLSGPTPGSEGTLMELSHGGNDPITLPNGEIRTFVEDGDEVLLTARARRPGAASIGFGECVAVVQPAITYPDFSGVMHQAVRHLVVHVGEEAADHVFDLSESSGAEKNWLIVRDVVGLHPHSADVERP

SEQ ID NO: 1022525 - protein, 359 aa, Homo sapiens
MRRDVHPVAHKTEEPLVTYEGGACAHDGAPHLQTAHTQATITSPTETRAHNTGESTRRRAPLRHNNSPHQKSDPTRGRVREHADHAYRYHTLRESERGAAPTRERGDTSAAVTTGQTERAETRPREQEKSKQQMRRQHLTRRTETHRPTHRPRTRTPNEREESEDTPERDTQQPASRTTPAAPSPTKRKEGTRATALNGPPPARNRNHGQRQHGERQHHPPKRRTDQQRRPIQRRGGTPQRPNRRQPRRPRRDGEPSHKPPHNEPTKEPARQRSNTHAATHTHRGRTSNKNRTERKNSSHHEHIHAIRRRRQNYTTDTRQEAQARQQQNTAARRQTPTTRTDANPNQRHGRPEKSIERR

SEQ ID NO: 1022526 - protein, 194 aa, Homo sapiens
PLIGLLFWCFLLFSVRLVSVTEWSSVWCVDVGWCSIVVWSVVCCVGVVWGLWCWWLVGVFVVGVAVCWWWFVVCLFLGGLWVVVVWPDCSLGVVPRTFDPMPLCVFDEPPMRCFGGPPQCVTSGKGFPSTRGGAPIQATALCLYPPRPDGMLLFFCVPIWVLRSPLCVVGGIFVHSMGGPHWGIGMPRRVGTGR

SEQ ID NO: 1022527 - protein, 97 aa, Homo sapiens
QNGDAAMEDLTRLKETIDNNSVSSPLQLFSREHGSYMVSAGFFNHPKGRDNIMDLFLYQPQYLNAIQTMCPHILRYSDYSSHNKQGCRTTSAGYERL

SEQ ID NO: 1022528 - protein, 97 aa, Homo sapiens
QNGDAAMEDLTRLKETIDNNSVSSPLQLFSREHGSYMVSAGFFNHPKGRDNIMDLFLYQPQYLNAIQTMCPHILRYSDYSSHNKQGCRTTSAGSNKI

SEQ ID NO: 1022529 - protein, 85 aa, Homo sapiens
KNQNLQPVVISKSFYVQILSLHKGYYLRFAALIVDFSVDHNFWIRRLQLLSVDVNLRTSSTGFLSEILHKKSAIWVLICCNKMKI

SEQ ID NO: 1022530 - protein, 103 aa, Homo sapiens
GKQILVCVPQAGSALGTNLGPRAPPASVGPGNFPCLSLPSKREITGHPTTQCPANFGLFLTKELIMVYLIKSGFHQLWARRVLNSGPQVILRHGPPKVREFQA

SEQ ID NO: 1022531 - protein, 215 aa, Homo sapiens
GHSAPGPGSGAAGSRFGFVAPVPGPGRSLRPPQPGAAAGGVGTLWTHPSGPRRRSASGPGSQSRRPRRPMESQCDYSMYFPAVPLPPRAELAGDPGRYRALPRRNHLYLGETVRFLLVLRCRGGAGSGTGGGPGLGSRGAWAELATALAALASVSAGGGMPGGGGAGDQDSEPPGEGILGGEAVVFRGCSPLLYATGPGTCYLKGSDHGEELWGT

SEQ ID NO: 1022532 - protein, 62 aa, Homo sapiens
MAEAEGRGGKWRSVDCPLPCPTRLLTLYLKTGDALEGDLGGAGRRLGCGGVLNLTEAGDAER

SEQ ID NO: 1022533 - protein, 107 aa, Homo sapiens
MKSKSGHIKFLTKGDNNAVDDRGLYKQGQHWLEKNRCCGESQGFVSYIGIVTILMNDYPKFKYAVLFCWVYSCWVIVSKNLLAVWEDAIVSYWRWSHTGWIGGLANT

SEQ ID NO: 1022534 - protein, 75 aa, Homo sapiens
KKVAHLGRLAHEVAWKYHAVTSPPGGEEQKEEPRVPFPGEETSSMRLPETRPEKNLEKGNVANTTRGPPDPRLLV

SEQ ID NO: 1022535 - protein, 405 aa, Homo sapiens
FVVISAGCVFLPLFTWLVGGFSSSVLPLLYAVAAARPFIYHFLCLGGRPPNITSPIFFVLGREALLLLERGIIFFGRPPFPPHPYWREGAITCLPALSCGGALVSVTKRVVVFVRARQYSLLSPPLLLAVVPKVGIYASVNFGGGGFSTCALAPAVSKGVLSVRVSLVKGRRLPPKEKKVVVAPQYYFVGALPPFVARSTTEEEFFGSVGENGVFRPRRPLGGSHCFHPPPWGRVKRERGGEIEWISLPKDSLSFTPAVIDYRDTHAFFIRGGVNTGRHTRPPRERSHVCERREEVCDPHKPHERFLSPGGALRRLSSGVCEAPPNVKELCVEYVLSLGVCASGPLRSPLLVWAPSEISNAGDPTGGTRTRTVSHRVGAHTVHRPLGDTQRRSSGERHTGEKGVL

SEQ ID NO: 1022536 - protein, 100 aa, Homo sapiens
RLPVLSPRRRCLRLPLHARFFSPGRGPGDQSEEAGTMLPTQVDGSRTTIEPRSVFNVQEMKTEFRNFIVWVEDQKIRHYIVLKTEGIYRDIHSSDWPKFY

SEQ ID NO: 1022537 - protein, 87 aa, Homo sapiens
MKPDGRLGSATARSHQTEPTARAPPGCKKGKEAKMNPLSKYESQRLTAVAITAACETHTLDPDRAAAVCVTPPLPLGGTGLTLPPPH

SEQ ID NO: 1022538 - protein, 106 aa, Homo sapiens
SQDSVHHTSGDKSTDYANFYQGLWDCTGAFSDELSSKRGDVIDILSKEYNRYGWWVGEMKGAIGLVPKAYIMEMYDILRVLEKENSSAVCKCFGFRSVTESTSDSS

SEQ ID NO: 1022539 - protein, 179 aa, Homo sapiens
  misc_feature (140)..(140): Xaa can be any naturally occurring amino acid
  misc_feature (160)..(160): Xaa can be any naturally occurring amino acid
MSSASGLRGGTRQVGEENMTETDAFYKREMFDPAEKYKMNHRQARGIALIFNHERFFWHLTLPESGHLRQIEDKSYPQFPDLGFDMNALMILKAEELLLKIHEVSPVRPTQMPGCALCVSPEAMAEGNHIYAYDASNSDXTGCSRRQVSQPVGPDIIISXRGTSTMCHHPWMYSIDELD

SEQ ID NO: 1022540 - protein, 84 aa, Homo sapiens
  misc_feature (75)..(75): Xaa can be any naturally occurring amino acid
GVASVLRSSELYKVQKDSVSEDEVTSEDHYIYFQNGRIIPKLNIAHGNAYVDMLGSVYEGVLANDGVWACGAGAXRPTSHEVFW

SEQ ID NO: 1022541 - protein, 103 aa, Homo sapiens
HASRNLDFFFNYCKNVKPILSSQAMEKLVGTRPSSLAGWAGEGAVTVAAATHCSVWKTQDLAITARRTIMCGRSLRDAVSCPRALFIFCCFSALKEFTWKHVL

SEQ ID NO: 1022542 - protein, 67 aa, Homo sapiens
MTWGNLLIITGMIHLMNSHHTTPPCTIFLSILSLADMGFTSTTVPRMIVNIQTHSRIISYAGCLTQM

SEQ ID NO: 1022543 - protein, 120 aa, Homo sapiens
GTASGLLRDWTGRRSKARPPFALFVGLIMKRLGSVQSENAVCVCDGGEQRSLPPKKGASAILKFGHTDTCQSHKAIQLQIYTVQFHTEKVDWQHVVYVPTYKDQPYLWGSTSIEKPTKQS

SEQ ID NO: 1022544 - protein, 121 aa, Homo sapiens
GTASGLLRDWTGRRSKARPPFALFVGLIMKRLGSVQRKMPCVFVTEVNRGAFLPKREHQVSTYWGNPLISHILKFGHTDTCQSHKAIQLQIYTVQFHTEKVAGNMCECSYLYRSAIPMGLD

SEQ ID NO: 1022545 - protein, 105 aa, Homo sapiens
LKLVSRGAAHWWLGQCRAPIGRYREALVAFRLDGAGQPWYAGFWVFEPAAMSDLHRLNNPGSGLTTCGRATDRSVPGKRFEIAFYKTKVCVCGELCQVHKKRDSS

SEQ ID NO: 1022546 - protein, 132 aa, Homo sapiens
LKLVSRGAAHWWLGQCRAPIGRYREALVAFRLDGAGQPWYAGFWVFEPAAMSDLHRLNNPGSGLTTCGRATDEACREALRNRLVQKTRVVGWRSGVEKDLDEVLGDPLSVCKVFLNGQVAKKEDLISAFGNR

SEQ ID NO: 1022547 - protein, 68 aa, Homo sapiens
EAVVSGDDLAVRQLVATSTRQELGSSRGHLYARKSSDDCSHMLSTLTVTALISLLRAVWVCSKLVSTL

SEQ ID NO: 1022548 - protein, 269 aa, Homo sapiens
MDEKVFTKGAGPSGSEQLNDVQAAVRVPGQEPLASKAKEISDKEESNVQEVRCPSYLSVENVHGQFHDLMEPVQKLRGNINQDTNYLVYWEHYCRPSGYYFTLPTVTAACTLLQVPLTVNPITTASRDIPEQQTRSHKFSGPYDALFTKIWTLPLFANFSPDLLDYLPLTALGGWARSSVYGGWSPRPFYRFGWVHIRSLGSPTGKFPMRVHCFTCVARSQYGGGGGISLRGGLHLCGREFFAAESLRGPVCVTPPHGGVHGGAGLDGA

SEQ ID NO: 1022549 - protein, 71 aa, Homo sapiens
PVPEHACLPAGRRVFTTAQHASLYKIRRHVSTVLTSKYVKLEPGRRVFTTAEHASLYKFRRHVSTVLTSKY

SEQ ID NO: 1022550 - protein, 138 aa, Homo sapiens
EIDAIHFYNKSLAEHRTPDVLKKCQQAEKILKEQERLAYINPDLALEEKNKGNECFQKGDYPQAMKHYTEAIKRNPKDAKLYSNRAACYTKLLEFQLALKDCEECIQLEPTFIKGYTRKAAALEAMKDYTKAMDVYQK

SEQ ID NO: 1022551 - protein, 91 aa, Homo sapiens
NVIINAPYLDYYERLNYYFKNYVSEAEKILKEQERLAYINPDLALEEKNKGNECFQKGTGCSWGIGGAVLGVPPVPGCGVNGRLHIEGADM

SEQ ID NO: 1022552 - protein, 198 aa, Homo sapiens
GFGMADFFWPGGPSCRLIRREDVEFQKEVAQVRKRITQRNKNKNNLLLEQSMCAHPPNLLARNPDLCHYFFPALASVTTVQAVHEVNRTWKIATGYAIGGVGALRMLPKIVAETMNNYLFGVEQNFLEVSIIIATLEKKYIKELLIKDWTLFHFKQAIISISGNGFNRKSGQLTTKSYGLEERFIIRTEHDYSGQKVS

SEQ ID NO: 1022553 - protein, 104 aa, Homo sapiens
  misc_feature (48)..(48): Xaa can be any naturally occurring amino acid
MSFWSWKSHCLLHGPEKPLAGVDDFTFFPIRSTMLTSYILPVSSDDIXLGPALFVSDRGKMSVTPFICWLPVRAASGSRMDLEDVATTVPSWEASSDLLQPSYF

SEQ ID NO: 1022554 - protein, 357 aa, Homo sapiens
DNCWRTVVAQKVVLYSSSELCLAMAWKSGGASDWGAPPQSPHHMESITAQIKYRESDAWLQDRSQYATMYPQYMDSSTINRFPSNNQLLHTCMHMPKNFYLISCMKELKLLHVGSGSGIPYCMFARMVGCTGKGHRIDHIKELVDDSVNNVRKDDPTLLSSGRVQLVVGDGRMGYAEEAPYDAIHVGAAAPVVPQGANRSVKARRKIDIACWSLQAETKCWSSMTSYKMAAIQNEASDGGDYSWCHFTQYKRKAVAPGMNGKSKHQLDQYKITSGMVISVLKAVWKTKTISSWLWTGVTTVYLFSMNICVSYRVSDSSKRHKSQIGQRKDAKVFNLCNITLDIAHSFTWDNIYKKGV

SEQ ID NO: 1022555 - protein, 237 aa, Homo sapiens
DNCWRTVVAQKVVLYSSSELCLAMAWKSGGASDWGAPPQSPHHMESITAQIKYRESDAWLQDRSQYATMYPQYMDSSTINRFPSNNQLLHTCMHMPKNFYLISCMKELKLLHVGSGSGIPYCMFARMVGCTGKGHRIDHIKELVDDSVNNVRKDDPTLLSSGRVQLVVGDGRMGYAEEAPYDAIHVGAAAPVVPQGANRSVKARRKIDIACWSLQAETKCWSSMTSYKMAAIQNEAS

SEQ ID NO: 1022556 - protein, 75 aa, Homo sapiens
LSRLRCSECGTSPSCSQASYAIVLPVYSIGSGYRMDFGRRESALDLQGSHVQTSTTFASPDEFIVGQNQALIEPG

SEQ ID NO: 1022557 - protein, 85 aa, Homo sapiens
RVSGGPVAPECTEDGGCCRTVAPSVGCPTCECHSLGHFCHCSPQACCMWKNELDKFIVFWFQSSKIIQHQFLMPCTCCHPACTLF

SEQ ID NO: 1022558 - protein, 85 aa, Homo sapiens; identical to SEQ ID NO: 1022557

SEQ ID NO: 1022559 - protein, 84 aa, Homo sapiens
RVSGGPVAPECTEDGGCCRTVAPSVGCPTCECHSLGHFCHCSPQACCMWKNELDKFIVFWFQSSKIIQHHAFSDKANEFHDVNL

SEQ ID NO: 1022560 - protein, 88 aa, Homo sapiens
VSLRRVLPGLDVVCLLRPLFALSFHFLQRASRMAHKQIYYSDKYFDEHYEYRHVMLPRELSKQVPKTHLMFCKKRVEETVGVQTRSLG

SEQ ID NO: 1022561 - protein, 37 aa, Homo sapiens
MRIVLVLEAEPASPERDYSPYYKTIEELRDKILTANS

SEQ ID NO: 1022562 - protein, 121 aa, Homo sapiens
MAETDPKTVQDLTSVVQTLLQQMQDKFQTMSDQIIGRMDDMSSRIDDSGKEYRGPHDTRAGVEELKSEIQDSCHAKELKVVIIYTESWLFSNAKRRSKWFLELTTMCRQVLLLIKYGILIT

SEQ ID NO: 1022563 - protein, 225 aa, Homo sapiens
MAETDPKTVQDLTSVVQTLLQQMQDKFQTMSDQIIGRMDDMSSRIDDSGKEYRGPHGIFTSVDLGSVCAIHYENTKTLGVLGITLSDFLVDFCEVISFLVNSFGSQLLVGSKVDCVIFYSTNSKPFNHSLRLLRDRKMLRRTLAAPLTPWHNVTVELTPNSVSGNTFSTWLKTPKTLAHSRNSLSLALLPNLRHKNLYDRLPGVPLDPLLKGRSTTLTPGPGLVV

SEQ ID NO: 1022564 - protein, 104 aa, Homo sapiens
HSSQPACRRFTIILNVNQRVDVSQSSLISTTVSRFHNHPKCQPACRRFTIILNVNQRVEVSQSSLMSTSVSTFHNHPNSTTVSRFHNHPKCQPACRRFTIILNL

SEQ ID NO: 1022565 - protein, 382 aa, Homo sapiens
QVRPGVNRTRLSPLLYDCTPAPSPKSPLFGLFDLLTWLRCTLCVCVFALRSLLRRLLYFNSYTVDALSRPPSPDPSDLRSLYDVIAVQYDNGPFPWVMAELMALNESSPPKEIHTTGAVLRLLDDFILTNGFTLPVGSQGTRPFSIFHGKCDAATRYSSVLGRQLQVFYATKFTSCGKIQSQQRLVRKMSTEKVDQKEEAGETRGVRRPDQRDRTKRRNHQLLHPICQGWRPGGRAARNARLNLGPDDLLSRHGQTSNYCLLWAQEVAVWGVPRCVVGAPDILLCSGVVFLYGPSISYCAVSHLSPVHFYYRTTVIPPHSSAPSLCQCLADYGTYRASWTRSVLKLDCKSWIKIGLFWHILYTEVRYLILRSVMWITVNLSD

SEQ ID NO: 1022566 - protein, 300 aa, Homo sapiens
QVRPGVNRTRLSPLLYDCTPAPSPKSPLFGLFDLLTWLRCTLCVCVFALRSLLRRLLYFNSYTVDALSRPPSPDPSDLRSLYDVIAVQYDNGPFPWVMAELMALNESSPPKEIHTTGAVLRLLDDFILTNGFTLPVGSQGTRPFSIFHGKCDAATRYSSVLGRQLQVFYATKFTSCGKIQSQQRLVRKMSTEKVDQKEEAGETRGVRRPDQRDRTKRRNHQLLHPICQGWRPGGRAARNARLNLGPDDLLSRPWSGPPITAYCGPRRWAKSWQAVPAGSLLQFGGALLHNPPFALGVCLL

SEQ ID NO: 1022567 - protein, 327 aa, Homo sapiens
GVGVGGLVRGAAGEAAGGQHGGGGRGGCAQVAAGEACEFQSRARGPVLTKAGLPAGGSLSAEVGERDPVSLGLPFPIHFRAFFFPENACPARAVPSFKCRPHGTEDCQARGKILSRGNSQVRGLKHRVFRTFTSFGAGPPKGVLPREPLDTTFEASGGYYFECDRTLGNHGRRESGQESGKQVVEVGPIREAPGHRYKGMCFAPQTTKWVFYLISIPSKRQRGIRWETHTFQETHSPTSIGLPDNFRVRGRHALSINQDGGPWVGHTLVGPQSTPIMTTLWTGRALQGTPSYQQDDSLSHHNVVILQHTGGLNLHPNYTAFNQYPKG

SEQ ID NO: 1022568 - protein, 40 aa, Homo sapiens
IDAGTPSDFLQCHLLQKAQPDPPNVEYKCPMCHMNAMCDS

SEQ ID NO: 1022569 - protein, 226 aa, Homo sapiens
PRYKVKEPEICAVGPLPISLTSPFKPKLEPTVHRPSMLSPWLSAMLTCKKQIKHMMAFIEQEANEKAEEIDAKAEEEFTHRDTGRLVQTPKTNRLWNYYENEHEKQIEQQKNIQMSRFDESSETQSPPEQEMTLSQDLLNEAKQRLSKVVKDTNTGTKVLAEWTGSPGFVLPVGWSPEVIVRGRENKDFPSGKWLQEQTGNSYCTKIGTNNDVDVHIDQESYLPED

SEQ ID NO: 1022570 - protein, 192 aa, Homo sapiens
PRYKVKEPEICAVGPLPISLTSPFKPKLEPTVHRPSMLSPWLSAMLTCKKQIKHMMAFIEQEANEKAEEIDAKAEEEFTHRDTGRLVQTPKTNRLWNYYENEHEKQIEQQKNIQMSRFDESSETQSPPEQEMTLSQVPVGWSPEVIVRGRENKDFPSGKWLQEQTGNSYCTKIGTNNDVDVHIDQESYLPED

SEQ ID NO: 1022571 - protein, 75 aa, Homo sapiens
RGSPCATLPSKNIFMKIILIHQGINLGLQLHLVHVGSIYILLQHHKLILSSGTLLISSSYLFLKSSTRSCMFLSS

SEQ ID NO: 1022572 - protein, 39 aa, Homo sapiens
MGGGHNNDCPPKSKGKHTTIPRGSDDEGSRTQRDAHKQQ

SEQ ID NO: 1022573 - protein, 338 aa, Homo sapiens
RALRRLGCCSQWCGVRKGTDLGALPACAEFLSAFPTQTGVSQSEALRVQPRAGPVCNLRRWAGRCPRSCCVLPPHTPMSSEFPRSQRAPHHDTPRKAMNADRTELPEIFSANSTDDCTELAKQHTQSDLVLNWGSHVVYQETNGETRVEIKESGSVSQDMLHYNRTNNQRCEYKHVMELLIMEYKHLKDCLCQGTIIGVIPYFPYSKQSKHEEEGTIVCKLLAIHAGESRFNSHYRLWIFIKGNTRLFRIPVTTLEPHLTAQYIREEFNLRQCRKSYVADAEGGPAYDESCVWVGRFREHQARLEWRRSNPLVDDFTRCVLRAGSPTCECPANGHHGN

SEQ ID NO: 1022574 - protein, 333 aa, Homo sapiens
AGRCEGSAAVVSGVGCARARTVGALPACAEFLSAFPTQTGVSQSEALRVQPRAGPVCNLRRWAGRCPRSCCVLPPPRSRFRSAPPSPRHDAVDGTEFSAIQALHGAGRSSIKSDLVLNWGSHVVYQETNGETRVEIKESGSVSQDMLHYMQTNNQRCEYKLCMELLIMEYKHLKDCLCQGTIIGVIPYFPYSKQSKHEEEGTIVCKLLAIHAGESRFNSHYRLWIFIKGNTRLFRIPVTTLEPHLTAQYIREEFNLRQCRKSYVADAEGGPAYDESCVWVGRISGNIRPDLNGDGRTRLEMTYPLRAEGRQPYVRVPRQRTPRQLDGAQSKLT

SEQ ID NO: 1022575 - protein, 206 aa, Homo sapiens
IFYSTLLKIKTTETKPNVPKLKEVGKQTGSKGSVVTGGEVDNSAVTSHSHPVATEEPRKRVRVALSVPFFHHEAPRKPVQENVKTITNIFNRASLVAKGSKERAVEIRNLSAKKGQAASSVDIRVCKKRLTTLNQHAGIRNSAGSDPGYGGGDKALGGGKMFSNQVRHTGKAFPPKGLRSTKARLGRTTTSSVPGCSHDHPGYNAL

SEQ ID NO: 1022576 - protein, 297 aa, Homo sapiens
QRSRLSRARQNLSQVPEADSVSFLQELLALRLALEDGCGPVALDPLRELMLHQIIPMLSCACEMTCLACWPAVNLVGAALRGPGWQRGMWPHEAVTRKLMLSPYDLESTSLLESEAPRHYFLKFAYIVDLDRDTVDKFLQLFGTRGVKRVLCPIKIPLVGPPRFTHCELRCWGEGAWTEAATYCEVHDYLTVLVSMGVMADDFSHKRPMTGGRRGAAEPTPLLALRGVTWTAAFSLLGFMALEVPLAQPFSATGGVCWNTLTGPWASMLVPGREDELLGGVGGRSGPRRGWSRASPF

SEQ ID NO: 1022577 - protein, 95 aa, Homo sapiens
DPPQCLGLQRTRILFGAVSPAQDDILLMRMTCKGWSRTGYGSHLMHNFLPCTYRDKFGQPPGLQRDSCSYSSDPMWAKERKLIPLLPSSGPGQKW

SEQ ID NO: 1022578 - protein, 282 aa, Homo sapiens
EISAAKLRLPGPGLCPGARLRPTTRTPASSGFARGPPSSHPRQTPVGSPSLTPRPPASTCNRVALPSSKFRGWLLTVYRNFPYTPSRGPWGRRRPASEEVDGAQVSPLGCPLENEDSEGWDTRWATPGQGPRPIKSRSHYRVPEQHETWRIIDRASISIILRSIPGSSTGSPISWGHEMQFEQHLTHCQIPTDISSMEITCKGLIHQNKRQAAAQRSRRDLMAIDHYSAAGNTTAKLEHYEDPLTGTNIAQRQDANEDDSLEEPKNPNDLHSNPVNLVQMGN

SEQ ID NO: 1022579 - protein, 70 aa, Homo sapiens
RDDPVACSKLFVVLCQRNFMEYFFPPPFLCFPLPVSPPSHLFLSFPIPCTLTSSWMHLLPSLSSCCFLPV

SEQ ID NO: 1022580 - protein, 72 aa, Homo sapiens
GYVPLWLLVLNLEPYPDMGLAGLSKMMLTESGDPEEEEEEIGGIIGSPNNSERAMLSSLEKCVIGPWERLEL

SEQ ID NO: 1022581 - protein, 122 aa, Homo sapiens
MQEVAVSLGVSQRGMLSRMMSPGGPKHSEDPGTPRGSSGDHLMGTPGFGLAFQGSKKCHTHWCLAGNTTVSTGDIKGQPQGTRVAGGLARDVDNPQKEYKLTRMVVQYQRDHLMGELGSHQE

SEQ ID NO: 1022582 - protein, 231 aa, Homo sapiens
MSYVNDALWTAHRAHSSMVGVNLPQKAGGFDEEGAELLCKGLESPERPFLAILGGAKLRTRSSSSSNMLGKVNEMIMCGGMAFTFLKVLEQSWRLATTRVDEEGAEDCQYDLVSKAEKNGVKITLPVDFVTADKFDENAKTGQAMVASGNTCWLDGLGLVVLKAAKIMLRLSLGLSRLCGMVLWGYLNGKLLPGEPQALMDEVVKATSRGCITIIGGGDTATCCAQMGPGG

SEQ ID NO: 1022583 - protein, 42 aa, Homo sapiens
MGYNLIQQVSILLDALRDNRPPGGLSSRGSLECPIHPLKFQV

SEQ ID NO: 1022584 - protein, 257 aa, Homo sapiens
EPSVETEDPSPETFRQLFRRFCYQEVAGPRGGPEPPLGAVLPLAAGRSCAPMEQILELLVLEQFLTCAACGEIQCSVRTAEQHAWRAGEEAVVLVWTGLHAECPSEDTCACCVAQMLAYLDDEVPPRGLGGDMFFKTSMCTMAHDHDVIWSLDGNDGSDSPDQTAPQTQPEPQATEGPAVVAMSRGPPAPPCISEMASASPFLSAWSQVPVNLEDVAVYQSGEEPRFLDPAQRDAPLENCRTGIQLEAGGDARHDAR

SEQ ID NO: 1022585 - protein, 109 aa, Homo sapiens
LVHASAPPGRGTLLGRPRVPPRCSVPSSQLEPSSSPAVLPQRLAAGRRQTKGLEPRLTLAFVPRPSSAAAVEAASPSPSMFGLSRLLSACVGERGTRRNERTGACLHGN

SEQ ID NO: 1022586 - protein, 159 aa, Homo sapiens
EPSCVLSAAVPFAAMPLENLEEEGLPKNPDLRIAQLRFLLRPARAPVKTLPCRNELMAAVRDNNMAPYYEAFVPKFPSTWQIDRGPYFNKMKKANEDELNDVWMRTLEDAREESRERAKFAMAIDGKGRVPLPDRVTKEGASLTAFRKIMTKCVPWVTD

SEQ ID NO: 1022587 - protein, 73 aa, Homo sapiens
NSRPRRRLRGGLPDAARQVVAVEIDPPLAQQLPHTIAKFRPDKAQNVNVVLMDALKVTELPHTPDALLTRPRI

SEQ ID NO: 1022588 - protein, 120 aa, Homo sapiens
MTFSYRPWEEYSRAAEKLDLADPMKAQCGSQIYGILTGNLCVDSNTDDLDIPTLERMYKKIEKFHSQLMRLMVKANGSPHCYHGNLSEWFESEDFVVYFREVTYLLNLPESVGTESTLCN

SEQ ID NO: 1022589 - protein, 73 aa, Homo sapiens
GFDLGRATPGRSVVRVAEVLKPWVLFNCSTLAIVWLEYQSLGMDVHTSLSEQMSLPRLTRMRGPRVVLMIWAF

SEQ ID NO: 1022590 - protein, 174 aa, Homo sapiens
MIHHYLSHHQYLTTPPATTYSPPTTTPLHPLPSPPLLHSSTLNTIKQTYTLSHLHPPAPHLPPHTPLSPSPSPPPPPPHNQLPQPTPHPYNIIPTTSTPPTTSHLTLPPLLTLPPPTKHPPPHTTPAPTPPHNTPTTHSSHFSTYLTPHTNATLLTLHNSINSPPFLPTSFPTH

SEQ ID NO: 1022591 - protein, 135 aa, Homo sapiens
MPTRLTLSGLRQYLPPVPLSDARLPPPDATPTLGHCGILPAPVDTRHSSVIFRTIWRGTKAQYLAAKAAKESSHGDSTPSTCMWFQRHEEPKTITDEFEQGTYIVRLTYREVGASGRRNGSAPCEYRYLEDRDLQ

SEQ ID NO: 1022592 - protein, 39 aa, Homo sapiens
MAITWHFVHHMGYATHELSACRPLKELDKNPKAPQDSTS

SEQ ID NO: 1022593 - protein, 101 aa, Homo sapiens
VDSEDFWLVLGLNPVDLFYSTLIVNALNHDAHHYPPEELTSSFPRCVGIRTEERFPGDTLRCPHRDQDAFVDSLALTSVMLLATHGNPSMNEASKTFLGVC

SEQ ID NO: 1022594 - protein, 132 aa, Homo sapiens
MSGLWRQQPGCVQVALTATAQEQCRVESEHPSAQPQAPSEAVERALRMPQSWALVGGFQVKPWGPGSPAQQAALDPTSAAPDPTSAAAGSQGDEGPTREMVGELVAPGNAGHQGGSTGPHPSLPGLHPALSP

SEQ ID NO: 1022595 - protein, 251 aa, Homo sapiens
WQSCSPGSRAHNHDAKDTPDEPWAFPAREFLRKKLIGKDSLFHDSKTSTPQGRRVMRMHRHRMAKSIPTCGQHTFASQSTWLAKQRHSAKPSSSKAMQQAKSIHASQHTGNSSNRRKKHSQRQAKNSGCGVRGTGSHTIRDLKYAIENPRHFVDSRHQKPVNAIIEHVRDGSVVRALLLPDYYLVTVMLSGIKCPTFRREADGSDTPEPFAVSSQNISMSRDCFKEMSDHSGELTQQNILGTILHPNGTSQ

SEQ ID NO: 1022596 - protein, 255 aa, Homo sapiens
CGGRCSMFEPSVLHRYTSLTMSGPRQDWRKARAKDKKRSSRAGSSSSQWAVYTGCCGRATTPSASAPARQCTLAAVLEYLTGESWSWRAMRNRDNKKTQNPSPAKLRVQAIRNNEELNKLLGGVTIAQGGVCPTSMAVLLPKKTSATVVAECAPRAGKKATQASQWSTNEWPCAAGLACHGLPNATTNGPFKGHHLPVMVKELSLLQSCGAKRCAAHLPLEVIKNWALHGGKNDNAWLLHLTPKHKTCKRPSKKT

SEQ ID NO: 1022597 - protein, 119 aa, Homo sapiens
MRQGFLPPNGKCKLNWLLKATLVEKFLLHGFTPWWRRLFQSLHDCPVEKPTRPVLPHPNCVTDIVPTLVQKEERKPEEESPRKDDAKKAQPEPRGEREAMGMLSPSGNEISENTLEEGG

SEQ ID NO: 1022598 - protein, 115 aa, Homo sapiens
  misc_feature (38)..(38): Xaa can be any naturally occurring amino acid
AQLSPSHSERNVLSFCGCNLFSLGMTCYVWTLIRAAAXRRSHAIINYPVSLGVRSPPPPPPTFFSSPSSSSHWKSRCGWFLGGFQAHADQHHLPLATLPCDRQHMSPHAAPAWGA

SEQ ID NO: 1022599 - protein, 327 aa, Homo sapiens
  misc_feature (7)..(7): Xaa can be any naturally occurring amino acid
MGAWYVXTSTLLGVQVAMRTNWELRSSGSGLLLEGELIMEARTLPTGIPMSIDNGLVAEFEHEADSDYRSSPVCDTTAQSQLVALVVREPSHCRSEREVAEAASRARRLFAGSENEAVSDPQHPAASEGPPRAAASPPLLRCLVLTGFGGYDKVNAAWSRRQRPRPWARQLTLRLRACGLNFADLMARQGLYDRLPPLPVTPGMEGAGCVIAVGRGSQRPRRQDDRVMVLNRVRDGGRKKVDCALGPDLPGFLRPGPLRKAVPCVVNLHYSLHGPSLTSEPTALAKAVLVHMVQGVWYGCCAAVPYSADVTSVRNGSPSSTSTEGDG

SEQ ID NO: 1022600 - protein, 163 aa, Homo sapiens
  misc_feature (1)..(1): Xaa can be any naturally occurring amino acid
  misc_feature (28)..(28): Xaa can be any naturally occurring amino acid
  misc_feature (38)..(39): Xaa can be any naturally occurring amino acid
  misc_feature (42)..(43): Xaa can be any naturally occurring amino acid
  misc_feature (46)..(46): Xaa can be any naturally occurring amino acid
  misc_feature (52)..(53): Xaa can be any naturally occurring amino acid
  misc_feature (56)..(56): Xaa can be any naturally occurring amino acid
  misc_feature (58)..(58): Xaa can be any naturally occurring amino acid
  misc_feature (62)..(62): Xaa can be any naturally occurring amino acid
  misc_feature (68)..(68): Xaa can be any naturally occurring amino acid
  misc_feature (75)..(76): Xaa can be any naturally occurring amino acid
  misc_feature (80)..(80): Xaa can be any naturally occurring amino acid
  misc_feature (95)..(95): Xaa can be any naturally occurring amino acid
  misc_feature (108)..(111): Xaa can be any naturally occurring amino acid
XLQLNPGTPLYAAHFRPGQYVDVTAKTXGKGFQGVMKXXGFXXLPXTHGQTXXHRXPXAVAXGDIGRXWPGTKMXXKMGXIYRTEYGLKVWRINXKHNIIYVNGFVPXXXXCLVQIKESKLPAYKDLGKIHPFPTNFPDGDEEETGQKDLYDEKRVPAPGGAF

SEQ ID NO: 1022601 - protein, 182 aa, Homo sapiens
  misc_feature (1)..(1): Xaa can be any naturally occurring amino acid
  misc_feature (28)..(28): Xaa can be any naturally occurring amino acid
  misc_feature (38)..(39): Xaa can be any naturally occurring amino acid
  misc_feature (42)..(43): Xaa can be any naturally occurring amino acid
  misc_feature (46)..(46): Xaa can be any naturally occurring amino acid
  misc_feature (52)..(53): Xaa can be any naturally occurring amino acid
  misc_feature (56)..(56): Xaa can be any naturally occurring amino acid
  misc_feature (58)..(58): Xaa can be any naturally occurring amino acid
  misc_feature (62)..(62): Xaa can be any naturally occurring amino acid
  misc_feature (68)..(68): Xaa can be any naturally occurring amino acid
  misc_feature (75)..(76): Xaa can be any naturally occurring amino acid
  misc_feature (80)..(80): Xaa can be any naturally occurring amino acid
  misc_feature (95)..(95): Xaa can be any naturally occurring amino acid
  misc_feature (108)..(111): Xaa can be any naturally occurring amino acid
  misc_feature (162)..(162): Xaa can be any naturally occurring amino acid
  misc_feature (169)..(169): Xaa can be any naturally occurring amino acid
  misc_feature (174)..(174): Xaa can be any naturally occurring amino acid
  misc_feature (177)..(177): Xaa can be any naturally occurring amino acid
XLQLNPGTPLYAAHFRPGQYVDVTAKTXGKGFQGVMKXXGFXXLPXTHGQTXXHRXPXAVAXGDIGRXWPGTKMXXKMGXIYRTEYGLKVWRINXKHNIIYVNGFVPXXXXCLVQIKESKLPAYKDLGKIHPFPTNFPDGDEEETGQKDLYDEKRVPARCAXDDIGRTXLDVAXPDXGCERR

SEQ ID NO: 1022602 - protein, 148 aa, Homo sapiens
RIRHEAARRRWGPKFLAPRRTASPPHSPQRTGPLPAAACPPCLPPTGPRSAPSQPHLWVLSLVEASSFICLFVLFSLLPSPPLSLPLFFLFSFFFFFCLCSVYPGSPLSNFFDVIKQLFSDEKNGQAAQAPSTPAKRSAHGPLGDSAA

SEQ ID NO: 1022603 - protein, 277 aa, Homo sapiens
SLLSCRSQTCGVPGRGNLWSLHLPGKGAPEVKEMAWWKSWIEQEGVTVKSSSHFKPDPGCKRPSTKTSEGDLVTDKRAGSIIVVCSHKMERHDCSGSRSPKSFKALVSARTLTVVPLKSELMWLKFEEAHCGLLVYPRIPDYQEAKGAALTTDARGLHGDQGRGVIIEDPGLSAPGTMAAGTMLKAYEEDYGSSLLRRTSKADTSGYTGEDPGVPPAGLLGLCELFLWPLGCASKTRWALYAAGETLRGTDALRFITHPVHAQGRFGLCECSDELMD

SEQ ID NO: 1022604 - protein, 297 aa, Homo sapiens
SLLSCRSQTCGVPGRGNLWSLHLPGKGAPEVKEMAWWKSWIEQEGVTVKSSSHFKPDPGCKRPSTKTSEGDLVTDKRAGSIIVVCSHKMERHDCSGSRSPKSFKALVSARTLTVVPLKSELMWLKFEEAHCGLLVYPRIPDYQEAKGAALTPMQGLSESNGPVSIDMTILALSGPRSQLRDIMKALLSERLLGPRLEDGHPNSDTMWPNLGEQDPVVCAPCHRPSDVVLDCLKPRPWVGTPSALRPLPQVVPQDLVIPCRAEDSNPSATPASDFTFSSPLLMPAPVSPHLCLQCFAP

SEQ ID NO: 1022605 - protein, 147 aa, Homo sapiens
MNKRSTLGCSQSSQAAHPKKKKKKIKNKQKQQQTKTNNVVCGPPARPPEKEVFITQHLCVGAARGATEWGKREKRGAKTRVVPQEGESTAGDTKRKQGGGRRFLSHHIYKKNRRRGGGATPREALLAERKNLPETRGRGHTEEGGTI

SEQ ID NO: 1022606 - protein, 145 aa, Homo sapiens
MVDTPKVCGDSACARNHIGQDNNQLTQECDTIKNGSSKTRNGTRHTRDEACNEERAKIDGRRRQQEKQPQTADNQGPTHIEAHSPEAVTEQRGATEQNPTRRKRQRNQTPHTTDNSQTHAAAHTSNTATTQHTCATTPQGTRTAT

SEQ ID NO: 1022607 - protein, 549 aa, Homo sapiens
  misc_feature (24)..(24): Xaa can be any naturally occurring amino acid
MASMRESDTGLWLHNKLGATDELXAPPSIASLLTAAIIDNIRLCFHGLSSASLLTAAVIDNIRLCFHGLSSAVKLKLLLGTLHLPRRTVDEMKGALMEIIQLASLDSDPWVLMVADILKSFPDTGSLNLELEEQNPNVQDILGELREKVGECEASAMLPLECQYLNKNALTTLAGPLTPPVKHFQLKRKPKSATLRAELLQKSTETAQQLKRSAGVPFHAKGRGLLRKMDTTTPLKGIPKQAPFRSPTAPSVFSPTGNRTPIPPSRTLLRKERGVKLLDISELDMVGAGREAKRRRKTLDAEVVEKPAKEETVVENATPDYAAGLVSTQKLGSLNNEPALPSTSYLPSTPSVVPASSYIPSSETPPAPSSREASRPPEEPSAPSPTLPAQFKQRAPMYNSGLSPATPTPAAPTSPLTPTTPPAVAPTTQTPPVAMVAPQTQAPAQQQPKKNLSLTREQMFAAQEMFKTANKVTRPEKALILGFMAGSRENPCQEQGDVIQIKLSEHTEDLPKADGQGSTTMLVDTVFEMNYATGQWTRFKKYKPMTNVS

SEQ ID NO: 1022608 - protein, 264 aa, Homo sapiens
SARKVARPASPRDSLLKSVYCLPPHPYLAVAPSAHHGCDKMLVPLNTMLACSGVPAQCSAGELPPPRCPRVPPCPACLLHLCPAPMLYSMAPVPALGAAAHRASLVAVCRLRSTTLSLPCRRPTGGGAGACDAGWRTTAVLNAQKPDSNPPGPGCTNYMEPAQHACSRQRLDVFFNHLRLGGATPNYDLTPRFTPAGQPQSSLTVTRGYSPAWTRRGQIVDSAQHLVGQDPEDWALGWEQGGKKERPSLALVDGPTNLQTLETV

SEQ ID NO: 1022609 - protein, 112 aa, Homo sapiens
TVVSGKRDSKWVAVAAALHGGNVGVPGPHPGRENAGAEKGPGLGREIGEGAVAIPDRRRSRSPRRHRSTSPSPSRLKGKNEMRQKKEPKETKSKERQITEERLRGAKTRGRT

SEQ ID NO: 1022610 - protein, 64 aa, Homo sapiens
MITCSWSQRGPSGLLHSLGILSSKASFSSREHLEALTPTDLKGEIFSIQWFLLWLGRGAGVVGQ

SEQ ID NO: 1022611 - protein, 249 aa, Homo sapiens
PLSVEVEFGGGAELLFDGIKKHRVTLPGQEEPWDIRNLLIWIKKNLLKERPELFIQGDSVRPGILVLINDADWELLGELELPASGPGQRPLAISTLQRAAEGPFSGAWAPLRGENEAIRHPPWALASRSPVSPLAVAFFPALSPKLPPGREKRPRCVRKWSLSQAREHAEGQTGRQSPGIHFSSRLCVGEGSPARFVQELKESSVAKVTLGCLSQSLYLMAIPSGVGADRGASSPQSHAFFMGKMNGPE

SEQ ID NO: 1022612 - protein, 219 aa, Homo sapiens
MHDSGNDDLSEQWLVMLEANHDAYRKGRGNPCVNVIPWYVTLLRFFPKALTIMQGWVSSVPSMTNQCGPGRTYRLEDLSQFQKILGETVHGYSSRIQASHGKKTKAVCPKRKRWQTESDAEVECDLSNGWHITEELRKYFAETRGLGDERGGNKKMEDERPDRYGTLTRPVTETPAAGKAHWKPGDGAANEVARKGAQPTEPGTTGKLGHTGGGPEEQT

SEQ ID NO: 1022613 - protein, 202 aa, Homo sapiens
RTAKMQQHVCETIIRIFKRHGAVQLCTPLLLPRNRQIYEHNEAVLLHGPQRDAGDASFGPCGIPFCRDMWQEIIVLEFAKRYCCSERVSQAALSSESISSQENFWSVHLISVYCAYHTRSAFHDPLLNTYLQLVYARSSKEFSRHCQAIEDYSYLYLRPYHVIEQQYPYTVGSQKINSVKVYTYSVMTAVTETADEDENVES

SEQ ID NO: 1022614 - protein, 99 aa, Homo sapiens
AGPVGRGGGGGMGAPKLPPAWQPFLKDHRISTFKNWPFLEGCACTPERMAEAGFIHCPTENEPDLDQCFFCFKELEGWEPDDDPIEEHKKHSSGCSFPF

SEQ ID NO: 1022615 - protein, 293 aa, Homo sapiens
SGGGRGDRGGGGGGEELCLPPLQPRQDGGGRRNPGRGQHAASRRAPPPGSGPDTRGERESGSGGGGGGGGGRMQGKKPGGSSGGGRSGELQGDEAQRNKKKKKKVSCFSNIKIFLVSECALMLAQGTVGAYLVSVLTTLERRFNLQSADVGVIASSFEIGNLALILFVSYFGARGHRPRLIGCGGIVMALGALLSALPEFLTHQYKYEAGEIRWGAEGRDVCAANGSGGERGARTRPSSGRQPDGLPNMMYLLAIGAQVLLGIGATPVQPLGVSYIDDHVRRKDSSLYIGILC

SEQ ID NO: 1022616 - protein, 137 aa, Homo sapiens
MVSHSYCEFLFIPLFFFYKPMVYSWRIGGNFFRITPESTGWSSWWAQTELAVPAGLVQQGGRLASVRAQQQGSRDIRGVWSGGHQAQVGLPGQCPDTGREGTTEQSSAGGQGGGTTRVGNHITPPSVEAPRSTNVGS

SEQ ID NO: 1022617 - protein, 41 aa, Homo sapiens
MGSLGAPLGIILTSMYLGAGSQVASGELGIVKGTDLVLIEG

SEQ ID NO: 1022618 - protein, 215 aa, Homo sapiens
CVGSRAAAERPPRPRFRSGKVRAGAVASGAGRGGGGGAGGEPNPLHGTPRAAREEAGPAAPCARHGGLGGDVSGSADPERGPGRDLSRRRAPGAMRPTLLWSLLLLLGVFAAAACGPARPSFPAARSSAPEEFACNNAEQVLSWEPGGPEQKHEACVYQVQFKYTDSRWFTGDIMSIGGELYTDHSQQSVTFTGRPDPISRLPNGFQVSLYAFRG

SEQ ID NO: 1022619 - protein, 509 aa, Homo sapiens
SWSKILLKGLIEKQLPDSKIQLPEETRLYVLGGTVAVGHVAGGSLGFSHPFVVRESGGWVGRYSSFSVGFSTMCLTCGLRDGGASLISAPHLLYPRVWVSQEDRHVISSHLCVYVATSTTPLCVCEHNTLGAAQHSQSVSHTLIRTCINEGSSRARGGSLIERHISHTQTFRCEHLIAASLCVSLRRVFLHEETHNKSSLGRDSVWGPPNSLSQSESGKHAAEAHTPDIARGPLSRPQSAKSAPLSKRESVLVITQAEEETLSVRCARHRWCGPHTETLSLLVWRPHPYVYRRPYEKRLSYNQLVSPSGVRKEAQKPSLSLWNTIPRDELIEVFSAEKIAHAETPFFFTARERTPFFVGVSRGGGTLQEITSGHFAGRPGAFGRGLTLRATLSKVFREERCYAPYSLRSHKALPEKFKQNTASSYKVPTPIWNTEIAPHQSGETKNFPPTFLWRAKLGRPRGRPEIIWHHPRGACGDNPLWDTRLNKDNSEGASDEIKHTAPGDYRGRT

SEQ ID NO: 1022620 - protein, 355 aa, Homo sapiens
  misc_feature (1)..(1): Xaa can be any naturally occurring amino acid
  misc_feature (28)..(28): Xaa can be any naturally occurring amino acid
  misc_feature (305)..(305): Xaa can be any naturally occurring amino acid
  misc_feature (308)..(308): Xaa can be any naturally occurring amino acid
  misc_feature (325)..(325): Xaa can be any naturally occurring amino acid
  misc_feature (329)..(329): Xaa can be any naturally occurring amino acid
  misc_feature (335)..(336): Xaa can be any naturally occurring amino acid
  misc_feature (346)..(346): Xaa can be any naturally occurring amino acid
XRKERTKKRQERSEFRGIRLPVPRSLLXSPDSALAVALAIRTDPTWAEVARAPRHEPVTKLGAEREAAVAEECEEEAVCVIKCASVKYNIRGPALIPRMKTKLPEFYYITLYIHGTYLGIIATWHVSVLDPILSSPQKTGNVEKRSIRDAAGLLGCQQKVPSQSRGRSQLAELHTCPDVYRCGFNPKNKIKAGYIYCSDHKYAATDFGVSVSNNISREYNELLMAISDSDYYTDCTSNAACPDIDPSIRCASPRNTLRIKADSNKRMAQLSRLRIEGRLTCCSTCCLGGPPDYNTALDVPRDRAXLAXGGFSTWTYRQGYDVSIXVYSXLSAEVXXQRKDRSTAIXLPVISGGCH

SEQ ID NO: 1022621 - protein, 173 aa, Homo sapiens
LEEKVQGLGASVRRFQQLVQPAGTLDGVAGLLLQLSQAAAGGHAGPLATLKDAYLEVTLRPLEEVWRERAEEAMRRLQAWVPGMPGNGGPRPIRAALGAMKGALELAAHQMLSWAEATFSRALKRLCKPLLDLYSLSARNRSVVVMLPLLPAGDEPLDVARVTSYLMEEKLLR

SEQ ID NO: 1022622 - protein, 199 aa, Homo sapiens
LEEKVQGLGASVRRFQQLVQPAGTLDGVAGLLLQLSQAAAGGHAGPLATLKDAYLEVTLRPLEEVWRERAEEAMRRLQAWVPGMPGNGGPRPIRAALGAMKGALELVSEQGWGVVGKVRMTEPALTVPSLLQAAHQMLSWAEATFSRALKRLCKPLLDLYSLSARNRSVVVMLPLLPAGDEPLDVARVTSYLMEEKLLR

SEQ ID NO: 1022623 - protein, 237 aa, Homo sapiens
GHLLLVGWSTLCAVDCRRQLVELDAGPPGPLLGRSGSSWAPRPGLADLKNCSEVGAWGWTRPRAWPAAMNSNVENLPPHIILPVVQGGDDTDLQTHPMGIKVFPNRGVTSPTSSVTIEGPEGTPYAGGLFRMKLLLGKDFPASPPKGYFLTKIFHPNVGANGEICVNVLKRDWTAELGIRHVLLTIKCLLIHPNPESALNEEAGRLLLENVLREYAAQGPVYSQEIQVGAAGQRKAN

SEQ ID NO: 1022624 - protein, 237 aa, Homo sapiens
HAELVTAMEGSLRMCVAALCERSQGCQQYRKDPKECCKFMCLDPDDDAFEPVEVSCQPLGMVGVKVHYSGAWSSSAHCVVASLADLEDSADSSERPAPVPPDPAQSGEHPSCRGNCQGVGRHSRSSLNTVVVDCLGLYPKRSWEHLSVVENNGSLGRLEMAPVPGLDAKATCRHVTWRARVVYMETTGRHSARRSDGLHRASLRASETCIAWITVFYLIKWRKSDKFIQTANVRRRE

SEQ ID NO: 1022625 - protein, 68 aa, Homo sapiens
GALQPRLLGRGPGNPRTRVCGGGICVVALALQRLVRAVRRREGAALGLVSLVVVRPVGALPCVLRVPR

SEQ ID NO: 1022626 - protein, 68 aa, Homo sapiens; identical to SEQ ID NO: 1022625

SEQ ID NO: 1022627 - protein, 244 aa, Homo sapiens
ERCARGEERGLGDPALPTLMFEEPEWAEAAPDSPRVLGSRNFNDLRLRPPRKTRPHPFSLGPTVIPDLPLRVSKRRQSLGHHKRARRGSSLFSRDIPPALVYKVISEGGGGGKEEEVPLRRHLAKPLPEVGADGERRTCQRSVGPSLASDSEDTEVAKEERNCHQHRLLWHVTLLKMRHRKRNCQTIMPAYQIQRDVSLFRFPKDWAPLVGPRLSFQACSFPPMSLTSAGELWIFLATGRHDLT

SEQ ID NO: 1022628 - protein, 227 aa, Homo sapiens
ERCARGEERGLGDPALPTLMFEEPEWAEAAPDSPRVLGSRNFNDLRLRPPRKTRVSKRRQSLGHHKRARRGSSLFSRDIPPALVYKVISEGGGGGKEEEVPLRRHLAKPLPEVGADGERRTCQRSVGPSLASDSEDTEVAKEERNCHQHRLLWHVTLLKMRHRKRNCQTIMPAYQIQRDVSLFRFPKDWAPLVGPRLSFQACSFPPMSLTSAGELWIFLATGRHDLT

SEQ ID NO: 1022629 - protein, 183 aa, Homo sapiens
MTHSKEFTTKSSRALHAAVERYNPGLTREAPTNVVSNGLNPRRCQAGGESEDRRNRHYTTGRTKKRPQLNKTEPNKGKYRTTVENGRKRADKKTNSMSKQQYSRDLHGRKNQTKQRREDSESTRARNETRDPPRQPQEDRDNDPGQRKNEKKQGKKRNKKTRKRPDRKTTDELSNTSNAAPAT

SEQ ID NO: 1022630 - protein, 136 aa, Homo sapiens
MSPAPWAGGPGTGLYLAVGCPSSDTLETKKKPWEMERVSGNRTNVISARDWATELGLMIVIDSLVTQEMAAMDQGGLCDKTENAKHLEGRVGTGVGGLKLVYPHARLEKADVWSAINLTVSDVRRPALGKSTLISY

SEQ ID NO: 1022631 - protein, 188 aa, Homo sapiens
IRQGTPCSIFNSLPTLVHWTYHKHLLFYRNLIDGSFLSDYPISACCVPRITSLQPGLRFFKISDPIATCLYHHSSAKKSSMMQLHLPIHWSLYFFPDMAKPTMLCPSGVQCPFGTSATRQWSKGCSPKPSSSRSFSVKITCSSMYSYLASSLISRSMSLQSAAVAGRITNLAIFVFCFSSLCGPGPCT

SEQ ID NO: 1022632 - protein, 106 aa, Homo sapiens
GTSRTASTLRLASDSPDCLRLLSSWDYRCAPPHPANFDVVFLVETGFHHIGQAGLTTPDLMIQPASSLPKCWDYRHEPPHPAILVFLVETGVLLCSPGWSRTPDLK

SEQ ID NO: 1022633 - protein, 150 aa, Homo sapiens
MGIQGGSVLFGLLLVLAVFCHSGHSLQLLQLFLTQLLTAKQAVNCSSDFDACLITKAGLQVYNKCWKFEHCNFNDVTTRLRENELTYYCCKKDLCNFNEQLENGGTSLNQRKQFFLLGELAIFWQLACEPSSLMSSTDGELSPKTPRYLL

SEQ ID NO: 1022634 - protein, 162 aa, Homo sapiens
  misc_feature (131)..(131): Xaa can be any naturally occurring amino acid
  misc_feature (149)..(149): Xaa can be any naturally occurring amino acid
MGIQGGSVLFGLLLVLAVFCHSGHSLQLLQLFLTQLLTAKQAVNCSSDFDACLITKAGLQVYNKCWKFEHCNFNDVTTRLRENELTYYCCKKDLCNFNEQLENGGTSLSEKTVLLRGDPDSAHARAWSAFXRPKSTPRDGASPQTPALXGVVPAFLFACHNS

SEQ ID NO: 1022635 - protein, 127 aa, Homo sapiens
RSLSESVLGAGGVKGLERASCRIILFPLPLSRPVSLCIASLRRIDFFVGPCVGGSVGRLDLEIPHIRSSSSVPCGSPEPVRVPRVRAKGSSRTALVTRPCGHTSTCAQTPVSSWQGCIRYHEYPSAS

SEQ ID NO: 1022636 - protein, 184 aa, Homo sapiens
MEDDRADKSSILMTGARDMISSGEHVKKTGVYDLWDTQAESVPAFPWAGFQMSSDVDFITIILALLYVTISFRIYKSGIQAVTEVRRRPSMSKAYLDVDITLSSEAFHNLHDMLAMVHNHNGALNTSLFRLFLVDRIWLTSLKLAVLHVADDLCWCWVFNGIPLLILAGTGHFQGAIVYETYQT

SEQ ID NO: 1022637 - protein, 362 aa, Homo sapiens
ASLRQSEPVSPTMLRDGQSIIHKHRRAMKKQRKNKKSNLEAKWQTITIFRKQHSLIFLVDASKAMFESQSEDELTPFDMSHPSVSKVCTSDKIISSDSTTLLAVVFYGTDDKTKKFTLNSKNTLPSYSELDNPGRKTNSSSLTSFKGAEGTNNVSIDMMGHGSDYSLSDVLWVCANPLSVDVQIQDRVDKEDHMLFTNEDKPHGNDSAKASRARTKKTVILRDTGIFLELMHLEENWGALTYPCSTRDIQTRIARRHEETPRDQQREKYKHRLEDPVLQKDQTTGEPKEQANTITHRVQRLKRLNDRIQQKPRGTINTPWPNKGTKDIIPDNSTTQENTLTQRHTNTGPYRQYRRLHNKQQQ

SEQ ID NO: 1022638 - protein, 110 aa, Homo sapiens
MAIYPLLGRGYQGVVNVSSCKWWLLVQAYIKLKHPARGGRAKKHNLLLGGPLQPQKKKFLEKTQSLVGDSGGTHRGHRAKRGHHSVSPRKAPGDRAKGVVCSPPKKNAGG

SEQ ID NO: 1022639 - protein, 214 aa, Homo sapiens
MDEAGSSAELAGGFLPGRGQPGLNLPNSRIFLVIMQCTHREYGAGRELLLSLFGEHPWTSWVGAWTMHTNGVQWAFAIRQCSPCSSHGLHGPMEEMHGHVHSARNDTEATSRLFMCSVPDHRGSHLRCLKHAQNLQAIFCHCYQMSYTARRSARTNFKVYGDIEYCSIIKNTVTGESKGLGYVRYLKPSQAAQAIDNCDRSFRAILAEPTHYSI

SEQ ID NO: 1022640 - protein, 110 aa, Homo sapiens
MDEAGSSAELAGGFLPGRGQPGLNLPNSRIFLVITIHTDRAERFAGSDLGGNNRSAVVSRPAHRLRAMEEMHGSARPNDTAISAGAGSGCLGGRMGLWTPFTCCSAGREE

SEQ ID NO: 1022641 - protein, 157 aa, Homo sapiens
QTKAGPEGTVPEASGPGNGNRHNSAPEHPGGPGAFRAREGLSPRARRGRGSQPRRRPREKPPSLSTRQLEEAGPGLGTAGSTRLGLGRRLGIADRGGRTCETLFPARREAGRSPNFRRRRRVPPGGRRGGPSAHAPDSVPTARPGAPGPPCDWPGRP

SEQ ID NO: 1022642 - protein, 109 aa, Homo sapiens
SILNDENNGEDIFRTGIIGRVLILYNIAPATLHSDSRSILRNRPGIIFSLSARLSESPSESSASLSISEGGSKLAVELSRSSRFTDSLEDVRTIDSLEEDRNRDSFIGL

SEQ ID NO: 1022643 - protein, 321 aa, Homo sapiens
TQGSGAWGKSGAGAGTHRWRGGDGGRSDLVEASGAAMAEFPSESLALLDQHVLLQGGRSLGVVRCALDLGFRALPASGALMLLQLGAWALLCVRLLIAGHTRYHTCIRAIWAGVTVRSASLPSELVNNSVTSSNLIALFQAWHIDSFVHVFPWATWLLHDSLDIKATGSHTFTGLSSAVLWRQVEPDIPGGAPGPYNQRADASFFACRVMIAYGVSAFFSYQAWRGVGSNAATSQMAGDMPKPPVPRAPLGLKPPLGHRAVSPLKPEAGEPCVGVRASGDWVLGPSLAGQTLALQRRQGEQAPGVGGSFRVAGGRLAGSLF

SEQ ID NO: 1022644 - protein, 335 aa, Homo sapiens
RHLWACFLVMGQGLVFNANTCASWCRDIKGHNQSLEDAWDLKPESRKALGGESSSVQGASTPVYFISTKRSVLIDRLYLIHLDKLCCTSASFPCVWIAASVLPDHFSPENANDDGQGNMPNIGLGKIASIRELIPRDNTWRLSILKCNRFLSKTGIHIICLPLVDYVMIRGIGDPLVSVYARAYLCRVGMEVAPHLKETLNKNFFDFLLTFKQIHGDTVQNQLVVTRGSGASQSYLPLYPPAMDVDLPGSIVPTHAPEALLTEMMERCKKLGKQVPLPGSESFSCHVVPFPGLQFTRHKVMDFIGMIKECDESGFPKHLLFRVTGRLYKPFAPLP

SEQ ID NO: 1022645 - protein, 174 aa, Homo sapiens
RSSWVLPDLREGRVKAISDSDGVSYPWYGNTTETVTLVGPTNKISRFSVSMNDNFYPSVTWAVPVSDSNVPLLTRIKRDQSFTTWLVAMNTTTKEKIILQTIKWRMRVDIEVDPLQLLGQRARLVGRTQQEQPRILSRMEPIPPNALVKPNANDAQVLMWRPKRGPPLVVIPPK

SEQ ID NO: 1022646 - protein, 174 aa, Homo sapiens; identical to SEQ ID NO: 1022645

SEQ ID NO: 1022647 - protein, 228 aa, Homo sapiens
GRGTPAVHAFGPPWLTHRPRRRTMDAPRQVVNFGPGPAKLPHSGVVEDEYRQGHLTGELQEESAFVVLDNDVTGPQSFGKIMKQYRESCAGMLAVPDNYKVIVSAKEVGDGQLQCCPLKPSLDLKAGRCADYVVTASLVSYRPQNEAKKKGDFTKSSYILTLGQLIQKIPDPKTPGTSHPDASYDVLLRKLRRLLDDGVSTFIPDVKGAATGFVTCPQTSCPSQWDVS

SEQ ID NO: 1022648 - protein, 162 aa, Homo sapiens
MLTKTSCEFTGDILRRSPVSEDMLGRVFNGSGKPIDRGPVVLAEDFLDIMGQPIKPQCRIYPEEMIQTGISAIDGMNSIARGQKIPIFSAAGLPHNEIAAQICRQAGLVKKSKDVVDYSEENFAIVFAAMGVNMETGRFFKSDFEEMGQWTMSAPFELGYDP

SEQ ID NO: 1022649 - protein, 231 aa, Homo sapiens
RGVSARWRLGSGVLALAKRAPARLAGTVHEVGDAVPPRAPDQDISCLNRDPARVVVVDCRRKPSAGPYNGVALRPWAGNSDDPGLVDLSAFLKTIALDGVEDVRTVLEHYALEDDPRGGLQTAESRVEQEEQQCLARLSKSKKPEHSFLGSLNHALVGLAPKQPETLGSSKLSDLGPGPQLLPRQDFGPQLVQVKYIPDATPVVFPRVSNDGGHQVDGPGDFLGSHRPTSG

SEQ ID NO: 1022650 - protein, 440 aa, Homo sapiens
AWRQRKMAARQRCSRACEAGSGSARGDCARGWRRRPASGPRSGPSEIGQAAGALSAQGPQVSSRAQEGPSYANNKLRSELAGAALDAGWDCDASVYTLVGNNPAGRNTWCQAFLMSSTMTPILVQQLRRTYKYFKDYRQMIIEPTRPLPSPRPSAGTCTTSHPTRSFVEAHRLSSCILSGRLATGWRFKKRPGIETLFQQLAPLYEIVIFTSETGMTAFPLIDSVDPHGFISYRYFRDGHKIHGMDDHVNGYFMSESGPSSSSSCGPAEGSLPLDPITALPCGPGDGNSDDPGLVDLSAFLKTIALDGVEDVRTVLEHYALEDDPRGGLQTAESRVEQEEQQCLARLSKSKKPEHSFLGSLNHALVGLAPKQPETLGSSKLSDLGPGPQLLPRQDFGPQLVQVKYIPDATPVVFPRVSNDGGHQVDGPGDFLGSHRPTSG

SEQ ID NO: 1022651 - protein, 107 aa, Homo sapiens
  misc_feature (48)..(48): Xaa can be any naturally occurring amino acid
AYSSLVCCILCALVCVLVVDLLSSSLVRTPSFDLASTFPPWWLCLVAXVHGVRPLCLWVLCSVLGCVWDHWWLSFLALTPWALVFRVARTASFCSVGGLCARILCCY

SEQ ID NO: 1022652 - protein, 370 aa, Homo sapiens
TPQHPQASGGSGVNGTEATWLAQQKRMNKNGEDFSLTDFLAEDGGTGGGSTYVSKPVSWADETVMTWQGDVSDHLSTVTMTMCIVAPPIDRSILPTAPRGAGVNPVTDRSLSYPNRHPTMLFLGNLPNDVKKDQFTEFFRGLNISAVRLPREPSNPAEVERYTVHAEEEDLDSLLSALSLNEESLGNTEKFEWTLLIKHRIQTGMLVLMAVIEIADFCQPDTDWRARPATDSLMTTHLEEVMHRYGDTFSRSLCIRTGIGDAHGMGSGLPPPGNWIDKGDRERKEDRGHKKHEDSEGNPAKDEHKKGHLGTAGTRGKRTTDADAETRHDARHTHAHIASGNHNTIRQTTKRTEDTHQNQPRGKTDDKEQA

SEQ ID NO: 1022653 - protein, 368 aa, Homo sapiens
GDRSPMATCPAPPQPILRESNGSMSATTVAPSCQLVGRAITLGSGQLVYSYSLLASKRTHGGDCTGWHECLLTSLDKALKVRCLNQDWCVVYRLIKGRIDWFTSVWIISPLLRLDGEELIVEVLEDVPLTMHNFVRKTFFERWAFCCTFCLQGFMYPVAFRCQTCGYKFHRMHCSSKVPTVCVDMSTNRQQFYHSVQDLSGGSRQHEAPSKTAALNELLTPQVPSPRASYCDSVITSPSLTQSPDAPPTVSLRSDGATLQASIWVSIHGPHGLQPHPDSLARVSALMLPVVQEVVMEPPGGAQAQSACPRGGSPQHSKFTSRAANEPEVLGDDKKTVKNLGYPGYSGYYWEVPPSDEVQLLNRIGTGS

SEQ ID NO: 1022654 - protein, 476 aa, Homo sapiens
MIRPQLRTAGLGRCLLPGLLLLLVPVLWAGAEKLHTQPSCPAVCQPTRCPALPTCALGTTPVFDLCRCCRVCPAAEREVCGGAQGQPCAPGLQCLQPLRPGFPSTCGCPTLGGAVCGSDRRTYPSMCALRAENRAARRLGKVPAVPVQWGNCGDTGTRSAGPLRRNYNFIAAVVEKVAPSVVHVQLWGRLLHGSRLVPVYSGSGFIVSEDGLIITNAHVVRNQQWIEVVLQNGARYEAVVKDIDLKLDLAVIKIESNAELPVLMLGRSSDLRAGEFVVALGSPFSLQNTATAGIVSTKQRGGKELGMKDSDMDYVQIDATINYGNSGGPLVNLDGDVIGVNSLRVTDGISFAIPSDRVRQFLAEYHEHQMKGKAFSNKKYLGLQMLSLTVPLSEELKMHYPDFPDVSSGVYVCKVVEGTAAQSSGLRDHDVIVNINGKPITTTTDVVKALDSDSLSMAVLRGKDNLLLTVIPETIN

SEQ ID NO: 1022655 - protein, 475 aa, Homo sapiens
MIRPQLRTAGLGRCLLPGLLLLLVPVLWAGAEKLHTQPSCPAVCQPTRCPALPTCALGTTPVFDLCRCCRVCPAAEREVCGGAQGQPCAPGLQCLQPLRPGFPSTCGCPTLGGAVCGSDRRTYPSMCALRAENRAARRLGKVPAVPVQWGNCGDTGTRSAGPLRRNYNFIAAVVEKVAPSVVHVQLWGRLLHGSRLVPVYSGSGFIVSEDGLIITNAHVVRNQQWIEVVLQNGARYEAVVKDIDLKLDLAVIKIESNAELPVLMLGRSSDLRAGEFVVALGSPFSLQNTATAGIVSTKQRGGKELGMKDSDMDYVQIDATINYGNSGGPLVNLDGDVIGVNSLRVTDGISFAIPSDRVRQFLAEYHEHQMKGKAFSNKKYLGLQMLSLTVPLSEELKMHYPDFPDVSSGVYVCKVVEGTAAQSSGLRDHDVIVNINGKPITTTTDVVKALDSDSLSMAVLRGKDNLLLTVIPETI

SEQ ID NO: 1022656 - protein, 218 aa, Homo sapiens
GLKGAWLVPGSLDGPCSSWAWPCFAGPVAPALALFPAAAPVARLSPCCAASMACGMWNLTMPVARAWCLAWCFHAALQRRSSVAVRCALSKRYLELFSLPVCGPDDCDDGRVMAATVWPLGWRLPLFEAKRYLDLLTTWYCSFKDCCPRGDLHESPTTFTGKDFVGTDSLVETLYRAGLNEYLVLRECPFATFHFSSPQYMWTLYTGAADEPDPGDAA

SEQ ID NO: 1022657 - protein, 305 aa, Homo sapiens
GLKGAWLVPGSLDGPCSSWAWPCFAGPVAPALALFPAAAPVARLSPCCAASMACGMWNLTMPVARAWCLAWCFHAALQRRSSVAVRCALSKRYLELFSLPVCGPDDCDDGRVMAATVWPLGWRLPLFEAKRYLDLLTTWYCSFKDCCPRGDLHESPTTFTGLEWDLNVRLHGQHLVQQLVLRTSGGYLETPQPENGLALSFHGWSGTGKNFVARMLVAEPSIGDEADEVNCCPAMSQRHASHFSFNIKTMWNLYHRDAACTSCHNPGTNASRLLPSRTLLPLRLNRYTLQTRYAWKASRHPLKNA

SEQ ID NO: 1022658 - protein, 198 aa, Homo sapiens
MKRKEKKNEGNNHLYPGPVVVGGIQYKEHWSEPTSSAALETLAAMHKSKMVSGTMSNPHLLPFFFFFKNSLTLVGPGGSKGAGALISGSLATCGLLGLKPSSLASQVSLETTGWWYQHVSGLIVVWVFIGGGGGGDEGFGQCVCPGCGLESAIGLKVIVPTLRSSHKVLEIPDGEPLGPSPKPFTFHKGTGDDQTDGL

SEQ ID NO: 1022659 - protein, 121 aa, Homo sapiens
MVLLPLGPPLVLPFTLQLAPGLGLSFEPKGPYWIPCPPLFGRHGPTHILDGMALGAHGPQQPLERMALEPHWVPPAFGAMGPPHGPRPLATCTFSGMGLGHIGLPACRVPQHFGPVPNLKM

SEQ ID NO: 1022660 - protein, 49 aa, Homo sapiens
MVSKHNRSASIARRILIALEERGSHQELQHWIPLLPLHLHHYLEQKVYL

SEQ ID NO: 1022661 - protein, 396 aa, Homo sapiens
YAWRAMATARVRMGPRCAQALWRMPWLPVFLSLAAAAAAAAAEQQVPLVLWSSDRDLWAPAADTHEGHITSDLQLSTYLDPALELGPRNVLLFLQDKLSIEDFTAYGGVFGNKQDSAFSNLENALDLAPSSLVLPAVDWYAVSTLTNYLQEKLGASPLHVDLATLRELKLNASLPALLLIRLSYTASSGLMAPREVLTGNDEVIGQVLSTLKSEDVPYTAALTAVRPSRVARDVAVVAGGLGRQLLQKQPVSPVIHPPVSYNDTAPRILFWAQNFSVAYKDQWEDLTPLTFGVQELTLTGSFWNDSFARLSLDAMNDPGSQELQFRLDKRTTMAARRITGRPDTEGRTIQYRNGTTTDQQANKNKHKPTHPETNNTQRETKKPRHQPLTTHTWHSQ

SEQ ID NO: 1022662 - protein, 282 aa, Homo sapiens
YCRCSRRKGLRDKMKLIILEHYSQASEWAAKYIRNRSSSLTQGREVLHPGAPHWEYPTWLLQEADEYYKNGDLSFKYVKTFNMDEYVGPSLETTRRVYHSFMWNQLSFKAHVDIHPRKTPTLLDWECTLDPTGRTVIASVKEKDHRAAQLGIEAYSALRTALGPEWHHTCLHTSQAPVWLSTDPCEPRWATGPTNPGQLLGLFRVEELTHSCPAWPCTVAVATVTGMLAAGEDLITGAHKAIALYKAIARPGVQPHVDRVWLRRTRPVGCGRSLGELSRSFH

SEQ ID NO: 1022663 - protein, 92 aa, Homo sapiens
MADDLKSISCSNKVTNVLKGLHAIVGVMIEMEYLLSKWLHMTMLQELCCCDSVSYPLLPLQQTKERTWTFQIKCLCYSNTSPVVHIIAYPGG

SEQ ID NO: 1022664 - protein, 278 aa, Homo sapiens
  misc_feature (255)..(255): Xaa can be any naturally occurring amino acid
  misc_feature (261)..(261): Xaa can be any naturally occurring amino acid
EVRDGRGGEGQRLGASRPLSGVPLSRPCRGPPGCPRSSRSPPEPLRGGRSPAAPRGHHRPTEQHSSPTPGSIFAPFHLSSVTRPQGDLEDRGPAWVGSHGVLQHTQGLPADRGGLRPGSLDAEIDLLSSTLAELNGGRGHASRRPDRQAYEPPPPPAYRTGSLKPNPASPLPASSIWGPHIQPSYTTASTPAGPAFPVQVKVAQPVRGCGPTRRGASQASGPLPGPQFPLPGRGEVWGPGYRSQREPGPGAKEEXLGLWPXKRRGASTGPGALSSLRG

SEQ ID NO: 1022665 - protein, 308 aa, Homo sapiens
  misc_feature (6)..(6): Xaa can be any naturally occurring amino acid
  misc_feature (41)..(41): Xaa can be any naturally occurring amino acid
  misc_feature (85)..(86): Xaa can be any naturally occurring amino acid
  misc_feature (88)..(88): Xaa can be any naturally occurring amino acid
  misc_feature (96)..(96): Xaa can be any naturally occurring amino acid
  misc_feature (109)..(111): Xaa can be any naturally occurring amino acid
  misc_feature (122)..(122): Xaa can be any naturally occurring amino acid
  misc_feature (133)..(133): Xaa can be any naturally occurring amino acid
  misc_feature (135)..(135): Xaa can be any naturally occurring amino acid
  misc_feature (141)..(141): Xaa can be any naturally occurring amino acid
  misc_feature (143)..(143): Xaa can be any naturally occurring amino acid
  misc_feature (145)..(145): Xaa can be any naturally occurring amino acid
  misc_feature (148)..(148): Xaa can be any naturally occurring amino acid
  misc_feature (153)..(153): Xaa can be any naturally occurring amino acid
  misc_feature (156)..(156): Xaa can be any naturally occurring amino acid
  misc_feature (164)..(164): Xaa can be any naturally occurring amino acid
  misc_feature (166)..(166): Xaa can be any naturally occurring amino acid
  misc_feature (177)..(177): Xaa can be any naturally occurring amino acid
  misc_feature (182)..(182): Xaa can be any naturally occurring amino acid
  misc_feature (192)..(192): Xaa can be any naturally occurring amino acid
  misc_feature (218)..(219): Xaa can be any naturally occurring amino acid
  misc_feature (222)..(222): Xaa can be any naturally occurring amino acid
  misc_feature (225)..(226): Xaa can be any naturally occurring amino acid
SPGPVXVFPLPLAWPLAAGALSRALLAALFPRSGPASPPCXAPCRAPLSSLSRRSAPVSAPSCRSRPFFCFLWVPPPPPARPSPXXVXPPSLLFQXTDLGSFHDLLRRXXXCAVQEGEGHSXLCLNRLQLEAXHXVRFSPXLXSXGWXVSGEXSGXVRIHFVRXLXSPLGHRMQLEXRAHFXAMFQPPPPLXALASLQPAIAFCQLPSLGPHQILGVXXVKXKWXXCTMSHRNWGPSLDSDHARLWTFRPASPGLLRSHSFYRHSVITAPCGQGGSPSDQLSRLLSLRLWLMRKHSGLTYAWESNCSY

SEQ ID NO: 1022666 - protein, 297 aa, Homo sapiens
QTLTFSASVQRHGALQEVLRGGTLEMNGRKQSLGELIGTLNAAKVRPTPRCLCAPPYAYIDFAGKKARSQDVLWLRRNVTKVTNGAFTGEISPGMIKGLGSHVVGSWGTQREGHVWGSQMSVMWAERCPVLWKEGTRSNRLMGGEADEGKWQSLRGCVRADKGHRDKVKDLYAVSSAYERVWAMGYARLETPQKAQEVNEKLPENGEVNLASDAGGHRGTVSLMRARDGKLKEVATSGGGGYLGGAPQANGHHMAKGPIHSYLCRPEKGKQKARRGEAPAQGSEFRGSPQWTQRGGE

SEQ ID NO: 1022667 - protein, 280 aa, Homo sapiens
EEKPDIRRATLEHPALVPLQPEEMVELMSRCGSSFCPSFCIWLRPKSGKCCPVGCVHQTVQLPGKVVVVTGANTGIGKETAKELAQRGARVYLAVPGMWKKGELVAKEIQEQDRKPAGVVCGKLDLSDTKSNRALAKGASKLRKKRPPGLDQQCRSDDVSVLEDRRWFGMHIGVNHLVHFLPKTNLAAKKKLKEFSPIRDSKMCLSSAHHLGRIHFHNLQGEKFYNAGLAYLSPAKLANILFTKELAPETKQALGVYDVYLYTLAQVQSELVRALIFHED

SEQ ID NO: 1022668 - protein, 281 aa, Homo sapiens
MSIDAYTKWLTASHIVSHSEYTDARDITGSDACIVAQVHQRTLRHEQSHMYTAHERAQKACLVSPRIGADVTFSACGRLERCRSDLRMKQERRWWRLLTIVADTIHGGCGHLWCYVERPLAGLRTFKTVFAEHISDECKRRFYKNWHKSKKKAFDQMYCKKSGRMRTGNEAAARTDFSSMEEVLQRLVRDHCPHPDGAMLPLSHKKAQADWRSTVNGGTVAEKLDWARVEAVMQQVPVKAKSMGSDADDRRNIPGDPGAKARPGGHRGVGDTEGSCPGKNP

SEQ ID NO: 1022669 - protein, 260 aa, Homo sapiens
VCVPRLSAPVPERKNPAQPRAAAGGESRRGSGDSARAAGSALRGGSGPARGARALRIRPLPGSRPLGDSSGCSGGFAVGRGTRGSGRHAGTRCCLSVLRPEGPVASGHSPWAFTPEPAQRHLGGGAVAARPDPSLETLSCRRAVTTNAARRPNSVQPGSGSAEKPGARRKAPGRIGSRASCPYTTLHKPGQGALEKARPGTRLHHARKHVASGQRLMLEVLTLSEPGMTTLGGAPMNRTLRHRLKRVVFPDRAHGGAGAT

SEQ ID NO: 1022670 - protein, 139 aa, Homo sapiens
LLWSRPRDSTTPGLQTLTFNVHVQVSVSPEDEEEEEEEDEEDEDEDLEELEVLERKPAAGLSAAPVAHRPLPPAAPLMDFGNDFVPAWLPLGTPCLACSPLSPPELAACLWDPEPWCRSTCAPLRIPCLSCCTQVLATP

SEQ ID NO: 1022671 - protein, 71 aa, Homo sapiens
PKISPRGPRRGQLPWPWAISNFGDLTFSSGWGAPSGNRGNQPSRNKRMVFFFQFWPPQCPPTLVHDLRGPS

SEQ ID NO: 1022672 - protein, 231 aa, Homo sapiens
MRAGQSKTEHAESAPKTKRDRQNYEQAENSEQSRRTRPRTRSRQPPDNTRENEAATEDNAGDRQPRAGTNASRASQTASDRAHETHKQQTEPPRSSRARHPKQQRRQQERKQQEDESQRRRRHTRANAANTSRSAKPEPAAERLQRQTEQQEATQPGKRDSSTTNTDTEGKTKRKRARQKRSKGTRKAQTKETGAAKGNNTDSIADTGTDRHTGRGREHKQKSTRERSTDR

SEQ ID NO: 1022673 - protein, 226 aa, Homo sapiens
RDPEAADGRRTSCARLSAGELRCRTGILGLAVSFSLGRHCAHESPMATAGARPRGGQSEWGCGAPGDIRGGVAVFAAVAVSVHSSSLSPFEYRGETPRETRFTARNIETMELPILLGYPLFTLVAKLAITLFPVWFNAYARQSSAVCLIVEQIAGIINFYVNAFTGFLVHLLEESLAAGVYSFSRLTMAGGPLAAEVKSINNLFVGLLMALTVHFEEAALLRRDQR

SEQ ID NO: 1022674 - protein, 142 aa, Homo sapiens
REWDQRWCGDCFRTPGTALGGSWPQTSVFSAAVKARGCRIATLPMDLIWFWVMHALADFVEALFGYITEKVVFPSLIRWVFVVGCVGRANGSFTRVSNDKRRCTPCHLCLSLMMIPENIVFVACSEHSGRKHEKLKFTVILL

SEQ ID NO: 1022675 - protein, 117 aa, Homo sapiens
REWDQRWCGDCFRTPGTALGGSWPQTSVFSAAVKARGCRIATLPMDLIWFWVMHALADFVEALFGYITEKVVFPSLIRWVFVVGCVGRANGSFTRVSNDKGDVVSVAVYSVSSLGYH

SEQ ID NO: 1022676 - protein, 191 aa, Homo sapiens
MWWRRAPAGPGEKSFYKTHIARGGARGPQEGKGNRGHKGGSPREENTAGARENKREEGNLSPHKYKNNSAARGDTPREAFSEKNLPKRGRASEERGQEEGGPSIHKRESHQEERAREIYKILYQRPPRGPAGGGVKHNTRTEHKTNNERATKHNTNNKHTTPTKPQERKHITTKKHNTKHAKTHETSTKKN

SEQ ID NO: 1022677 - protein, 85 aa, Homo sapiens
CSAQHSVGASDWRRENCPSLSRTSSKGQNAQFRKINSPLPTFFFFFKTVSLGAPGWERKGAWIWAHWRTSGLPGFKAILLPQPSK

SEQ ID NO: 1022678 - protein, 252 aa, Homo sapiens
GRTGAFALLYAAVQEVEAGNGIPELPQLVRRMREQRKHMLQEKLHLRFCYEAVVRHVEQVLQRHGVPPPCKPLASASISQKNHLPQDSQDLVLGGDVPISSIQATIAKLSIRPPGGLESPVASLPGLKSPQASGQPSLPESTPIPSFPPQPPFFPPNYLEAPQPRGGAASCLKSPPARGAPPYSSLEIAWPPLTPRGLSPWTDSLRGQNQRDEASNNFSAGPITGQGVGGAPGPLERPLQPSGIHSWTLNKT

SEQ ID NO: 1022679 - protein, 110 aa, Homo sapiens
FRCCKSLVRWWERYRQGQRCRRGPGADPSDFPSVPSHSSRSMSGDEMILILYDARRHHEEEEAFYVQMQEGDYPKTMRKTQSSETKRSGARATEDKDWKLLKRTLGKKMF

SEQ ID NO: 1022680 - protein, 287 aa, Homo sapiens
LPDVSSGGGAGISLRGQNGARGHEQIYQPSEPSVFPHLTVVLWAIGMFFTACSSFTEGHHLPSTPRDIYKELLISISGLTLQWAVEVLFLLLMGGHLRVSTQGLTTQDGFTVKPVLCVTLLFFQPGVLESGSPPWVLINYKCRMYKTTKKKNKEQMNTQHTRDSTKQNTQQNNTKGWGGASGARAKKRDRLRPHNKLMRGAGRDTTSEERKDRRVSTRVCTNKKETPSAQSTQRAEGGIHQTKKKNAPGGTDSVLRKTTPREDIGSHKRVTTKDETSGNKTAAAVGE

SEQ ID NO: 1022681 - protein, 225 aa, Homo sapiens
  misc_feature (116)..(116): Xaa can be any naturally occurring amino acid
  misc_feature (125)..(125): Xaa can be any naturally occurring amino acid
  misc_feature (176)..(176): Xaa can be any naturally occurring amino acid
  misc_feature (190)..(190): Xaa can be any naturally occurring amino acid
  misc_feature (210)..(210): Xaa can be any naturally occurring amino acid
  misc_feature (213)..(215): Xaa can be any naturally occurring amino acid
  misc_feature (220)..(220): Xaa can be any naturally occurring amino acid
  misc_feature (223)..(223): Xaa can be any naturally occurring amino acid
QKLCKRNGQPLKLPDTKRTLLFTFNVPGSGNTYPKDMEALLPLMNMVIYSIDKAKKFRLNREGKQKADKNRARVEENFLKLTMCKDRKQHSRAREEKKRAEKERTRKEEDPEKQRXPEEAAGRRXQKKSEKKQRKRKQTKGKARESHPREGRPDATRKPRIHRKHEKRQPISQPEXPDRPGQPRNPDATXHPGGGGGVHRDGRYLERALXQEXXXPDNQXMGXRL

SEQ ID NO: 1022682 - protein, 421 aa, Homo sapiens
WLAVWCWGPCEREDGVLCAVRRTGPAAAVVAAGGGSSGQVTSNGSILDGTLPAGGPMPQNPPGPCLAPKCLAVSSKVCAVLGSSSSVAISMFVFRLMGLGSLSDPVLGPGRMPQRCRTCLKPSSPNDSFNDTFHVVQSQKQRCTLAGPSDATDRHYFCGDSSDLVYGDWTSGENSDGCYEHFAELDIPQSVQQNGSIYIHVYFTKSGFHPDPRQKALYRRLATVHMSRMINKYKRRRFQKTKNLSLLQQVLGFLTGETEADPEMIKRAEDYGPVEVISHWAPNITINIVDDHTPWVKGSVAPPLDQYVKFDAVSGDYYPIIYFNDYWNLQKDYYPINESLAADSIRVSILPTLCFGAGSSMLAQSTKSPWNFLGDELYSSQPDEEPGLVLNGGPVWKNKRQLVALTIISDIFRNKMPYFRD

SEQ ID NO: 1022683 - protein, 414 aa, Homo sapiens
WLAVWCWGPCEREDGVLCAVRRTGPAAAVVAAGGGSSGQVTSNGSILDGTLPAGGPMPQNPPGPCLAPKCLAVSSKVCAVLGSSSSVAISMFVFRLMGLGSLSDPVLGPGRMPQRCRTCLKPSSPNDSFNDTFHVVQSQKQRCTLAGPSDATDRARTICGDSSDLVYGDWTSGENSDGCYEHFAELDIPQSVQQNGSIYIHVYFTKSGFHPDPRQKALYRRLATVHMSRMINKYKRRRFQKTKNLLTGETEADPEMIKRAEDYGPVEVISHWAPNITINIVDDHTPWVKGSVAPPLDQYVKFDAVSGDYYPIIYFNDYWNLQKDYYPINESLDRLTASESPSDHISALALARSMLAQSTKSPWNFLGDELYSSQPDEEPGLVLNGGPVWKNKRQLVALTIISDIFRNKMPYFRD

SEQ ID NO: 1022684 - protein, 182 aa, Homo sapiens
  misc_feature (101)..(101): Xaa can be any naturally occurring amino acid
  misc_feature (108)..(108): Xaa can be any naturally occurring amino acid
  misc_feature (110)..(110): Xaa can be any naturally occurring amino acid
  misc_feature (122)..(123): Xaa can be any naturally occurring amino acid
  misc_feature (125)..(125): Xaa can be any naturally occurring amino acid
  misc_feature (132)..(133): Xaa can be any naturally occurring amino acid
  misc_feature (136)..(136): Xaa can be any naturally occurring amino acid
  misc_feature (152)..(154): Xaa can be any naturally occurring amino acid
  misc_feature (156)..(156): Xaa can be any naturally occurring amino acid
  misc_feature (160)..(164): Xaa can be any naturally occurring amino acid
  misc_feature (166)..(166): Xaa can be any naturally occurring amino acid
  misc_feature (170)..(171): Xaa can be any naturally occurring amino acid
  misc_feature (174)..(177): Xaa can be any naturally occurring amino acid
  misc_feature (179)..(182): Xaa can be any naturally occurring amino acid
MAMVNQQEGTVKAASGFNAMEDAQTLRKAMKGLGTDEDAIISVLAYRNTAQRQEIRTAYKSTIGRDLIDDLKSELSGNFEQVIVGMMTPTVLYDVQELRRXMKGAGTXEXCLIEILASRTPXXIXRIIQTYXXQYXRSLEDYILSYTSFIFXXXLXSLSXXXXXEXNYLXXALXXXXSXXXX

SEQ ID NO: 1022685 - protein, 283 aa, Homo sapiens
FTGTLRRSRRGPAPAARTPGASAPAGSRPVSCPEAAGSRRHGVPTVSQPNTGEVLRGRVGAPMHARALRFSAMQGWRVSMEDAHNCIPELDSETAMFSVYDGHGGEEVALYWCQNILPAYPSKASRRPPKGRQAHKKAFSKNAFLAHCTPKLTTAQNSPFKELAQIAGRTTEDDDDKKKVDEDDVATLRRLHCLREEGYHGLLKSCDTLRETVTGPPTSNPGVAADKVRPMEAELDNRNLQKMASKPQAPNHGRRTEPTRRAVTEDINLNRKEEKKQEKPNNS

SEQ ID NO: 1022686 - protein, 470 aa, Homo sapiens
FTGTLRRSRRGPAPAARTPGASAPAGSRPVSCPEAAGSRRHGVPTVSQPNTGEVLRGRVGAPMHARALRFSAMQGWRVSMEDAHNCIPELDSETAMFSVYDGHGGEEVALYWCQNILPAYPSKASRRPPKGRQAHKKAFSKNAFLAHCTPKLTTAQNSPFKELAQIAGRTTEACKHAHTQHKTVACMHSMHGGPTSQAACHLLPGQQAYQVQLKRHATCATRQRRPNNRQRRGNDHRTSTARDWQDERNKPKDNQRHPKGNSEERHSNQAPEEDAHGTATTPFTRAHTGHHQGHRGDNTRPKSHTKSRNRTGTRRNQGTENRIEPGTAPTSADREQRTRRTATDKEEERERDTAGRGSARGSVGTSHRGGRTKQEDDGRRDRVDRQKRRHGKTEGRGEDDEARTEAEADQGSKNETHKGGSETEEKEGGEQAGSETTEEGHADDAGEKAGEGRAGAKARRGKSGGNEREN

SEQ ID NO: 1022687 - protein, 309 aa, Homo sapiens
  misc_feature (134)..(134): Xaa can be any naturally occurring amino acid
MRPRRGLRNSAKRVKRKKQTEERKKHTTNKKKKLCGAPARTRKRSFQQHCRGGTGDPRDTQHDGSPAGAAERERGATNRGAVVSPQKKRRGGHTSRLFGHTPRRRLARNKDGLSQERMPHRKRDNNNRPARGGXTNKQSLLLRRTDQTAHDQPRRHSERHETETRVGKTEASSRARRSREEELIENRVLGSHTTRTTRKARRHEEASAAAAADEREPQRQGSDEIAEETIALPAANAEDNRSKSDVEKYRQQMPIEHSTTDENGQQLRNRQEDNKGQAVQQTRRAHREDRESDRYRREMNGQRQREKNE

SEQ ID NO: 1022688 - protein, 36 aa, Homo sapiens
MWHNYNKLVIPKLVIPKLVIPKLVIPKLVIPKLVIP

SEQ ID NO: 1022689 - protein, 51 aa, Homo sapiens
RFYGVLTFSLIKRYLYYKSYLCKLVIPKLVIPKLVIPKLVIPKLVIPKLVI

SEQ ID NO: 1022690 - protein, 345 aa, Homo sapiens
MWFKYLPLHLSDEAADEAAGPVLGVCSGQLVELGLEPQSAPKKLKEMDFLFFFLKRKTHSVAQNWSAVARSVAYYNLRLRGFKRSSCLSPPPAWDYRHMPPVPGIIEWYLKVETRLRQCGPGWYSNPVSSGDSTVPRPSQSGKGAHITKGQQVIPSRGLRGPRLFQWPKAWLWVALLVPPPSGLWEHQMNSGGRGGALFEEGSETTQPNGFSTLEKALGQEGGAVSGAALLGFRDRGGSRRVSSPWPKCQVARSTHAQSLCGVGISGVVSWKNPLEILYEDPVADLTFTGGVVISPGPCVGLPRKAMGVEAPSTNVKPALSQEGSGCPIKTRKREGPNISGATGP

SEQ ID NO: 1022691 - protein, 255 aa, Homo sapiens
MPPMNCADQCTHVLVTCMLEMLCLLCCSEALELAPQWTLPMTAWCLPWMCTKMEHALLPRLTHTQLRDTGRGPWWPLSTRLQTPETEPGGQPGLTPTWSLKAAWCARGPWPRGLAGGGSYFSGQGSDTWRVSQARLFGAGTPDCPQQQRRDHRRRLHPRDSTFTPAGVAAVEVQGGARGGITEEQEGFADGYGQGLDDLAKMKPRDTTQRVLGRYRVAPCGPVAVKRAGATPFNHLSSIPALSRSPGLRDWTRRA

SEQ ID NO: 1022692 - protein, 74 aa, Homo sapiens
GVKKGPAFKQQRRKMAATTGSGVKVPRNFRLLEELEEGQKGVGDGTVSWGLEDDEDMTLTRWTGMIIGPPRTIL

SEQ ID NO: 1022693 - protein, 123 aa, Homo sapiens
MYTCVSCISDAGGHVRHVGISDWNGGLGEARTNYLLYRVASDTLQLQYKGGKGRPQYRISDTLGNRVVKPEKVAYSGGRPSVTWTPLVRGALQIREACPISRGGPLLGSVAAAKTVGSSLGRE

SEQ ID NO: 1022694 - protein, 338 aa, Homo sapiens
VPLATSTPRHLLCGSCASQAQCLQLHCLEVACMLALAAGACPALGLCVLLGLLPPAAGPARALDLLGSAVLPWCSATLACVAGIGITAAMVAPEICLRQDCRAVGWGSSVWCLLGLLPAAMLAVPCTSAPPQLSPALHSWKSSGKFFTYKGLRIFYQDSVGVVGSPEIVVLLHGFPRSSYDLYKIWEGLTLRLHRVIGLDFLGFGSVTKLRPITIPYFEQASIVGSGFCGHLGAPEPGGSHFFLMTMAAYWWPRKLLYSFQRRIGLGRAYHKTSLALSQFEELIPGELYGPLISQEGNSKIARWSDPDFYTDCMTPLCIHSRVYPQVWDAITAPFIIR

SEQ ID NO: 1022695 - protein, 253 aa, Homo sapiens
RLGRGWVFNRRGCRGVEGRGVPGASPGARVLAPWPCVTVSRSPPGSGASTALWGPGIPERGEGTALPALTCPGAALSAGPGWSSEGVDSSEAELCGAPVGAVLGTARMEGDKWMMASKKAKFLKANRTEGPRSLEEEASTGGPRPDFRAKGSQKSPESTEEQEREHSAASWYRRAEAAGMTSDLEAQAGGTPGLPGIRIPCLVVSTREGRRSEPRMRRSSWDVDFPDSRFEQGEERRGKEGLHVSLVAKRIFK

SEQ ID NO: 1022696 - protein, 327 aa, Homo sapiens
  misc_feature (65)..(65): Xaa can be any naturally occurring amino acid
  misc_feature (320)..(320): Xaa can be any naturally occurring amino acid
  misc_feature (322)..(322): Xaa can be any naturally occurring amino acid
  misc_feature (326)..(326): Xaa can be any naturally occurring amino acid
DFSLFDVVLKMRKQRPAAVRAEEQYRFLYHTVAQMFCSTLQNASPHYQNIKENCAPLYDDALFLXDSPGTSRPYPAHQEGSSGASLCPGPRATPWLTPTRWCRSAGLQRAPGVGRRRGRGRGRGRAARKGGAALQQGDARAPSDPGRTREDARGTLPGRVPADQSPAGSGAYEDVAGGAQTGGLGFNLRIGRPTGPRDPPAEWTPGVGLPRQFLPVASCELRTADAPVLLSAVRRSGNNGPGSPVKISQGGKCGGFARMNVAMQGLKLEEVAKVLVAAEAAQTQHSCKDRIQGGGDAPLSYAGGEGDRLSFRRVFSITTXHXSILXT

SEQ ID NO: 1022697 - protein, 98 aa, Homo sapiens
  misc_feature (10)..(10): Xaa can be any naturally occurring amino acid
  misc_feature (19)..(20): Xaa can be any naturally occurring amino acid
RLTDWGSEMXAWGFLQNVXXISPPGDCLEDSGAWAAFAYSHLLLSCPGGHWQVSRRREETHLLEEAAHDSSPSWDSPSSSSYSPFLGCSLKGPMSSHH

SEQ ID NO: 1022698 - protein, 256 aa, Homo sapiens
MPSRRRPKSPRKHNYRNESARESLCDFSSSDISQDPSSGNTEELNTLFTSLGPTEYSYSRHSYSTTQDTRKEINTTPQGGMTPGRLLQIYEDVSCCLLKGGAGNKRDNTFVRGGGGQCSYNEEHETDDKKRLKSHKPSSQICSSPKSSKSVFQCKTTISSVIATHKNSTSHTGEDQNNATTSQLGKLSQQTDITSTFHEARAWDDLTHKGINLHLNLLSPSDGHRVHARLPETIILLKIARLPFRNHYRLLTLPST

SEQ ID NO: 1022699 - protein, 75 aa, Homo sapiens
LGLIIRRQYDGFIPVHERQNDVRRPESYKSISSFFRAATAIERCFLSSSSSASISRTCLTSCFFFSSLCSSRPCR

SEQ ID NO: 1022700 - protein, 236 aa, Homo sapiens
AEACGGMSGLGGSGRARRENRQLGSSTVHSCELESIASLNMCNDDLDFETGDAGALSSAFPKCRCSGLRKNGFVVLKWRVACKIVEMSTSKTGKALASAKGPIWIGIDHLLPGKEHIEVIILPRQPHNMVCPQIESKGSDFQLIGIQDGYLSLLQDSGEVREDLRLPEGDLGKEIEQKYDCGEEILITVLSAMTEEAAVAIYLTFYFGFPHPLNLSGSPCPSPSSLGQERAKLWPW

SEQ ID NO: 1022701 - protein, 376 aa, Homo sapiens
AEACGGMSGLGGSGRARRENRQLGSSTVHSCELESIASLNMCNDDLDFETGDAGALSSAFPKCRCSGLRKNGFVVLKWRVACKIVEMSTSKTGKALASAKGPIWIGIDHLLPGKEHIEVIILPRQPHNMVCPQIESKGSDFQLIGIQDGYLSLLQDSGEVREDLRLPEGDLGKEIEQKYDCGEEILITVLSAMTEEAAVAIKASGKNNGPRVPGGGSSDPLNLQKAPPRAGLALAPVLKLDSSYTIDLTCIEGFRHPVNLDGETLPLTKYVCKNRRSEALEKCIIGAINKTAGEKKGGNCKGQQGRRVYNTQKRKREQDKTVATKKGGAEKEQAEKPNGRPRTVIHNRDNKEGTTVEATTAAKEKEKETSITGHRT

SEQ ID NO: 1022702 - protein, 207 aa, Homo sapiens
MVAIRKKLVIVGDGACGKTCLLIVFSKDQFPEVIRPYWSLENYIADIEGATGKAGGAGSVGTQQAREDYDRMRPLSYRDTDVILMCSSNRTALEAWENIPENIGPPEGDSTSGPKCAQSILGGEIKKGPEGKTEAHQREELAKMKQGARPGLEDMAGTYGEPGISAFGVTSECSAKTKEGVRRGVSAMPLRAGLQGPKNKRWRAAIL

SEQ ID NO: 1022703 - protein, 323 aa, Homo sapiens
RAIVVTGWFNRHEGELLWCGAFGGRRRAAQGLPAGLGAQRVAAGVEWAGRAGGPGAAGPRPGPARGGRATPGELPGRRVCPAAERRREPGEGPSKTPVETQGRESWGAVFPGEGPRRTPRCKVTVLGPREKGSSGWTPAGALGEGGGEDRTRGASERGEGRGATGGSKGSGGLDGMRASSDGAGQGSAEGWKRGLRGPFGGGATRNLPGGKAGAGGSGIAGTFPKEERPGAGEMNGFTRESEAKGPRQQGGADGDRERVALEGGDVVRPGNALRRGQKAPENQVASKEERILVQKFRGSRETRVEFRTRIRVSRTTLEGRERK

SEQ ID NO: 1022704 - protein, 99 aa, Homo sapiens
MIIALYSSLGDTASPCLRVSKDFSWGKVAESCETPSSPILSSLSASGSECCWVVMAVYFATRFGGKAWTLNGMEGVNIARVSNEDTSEGWQQLWARERD

SEQ ID NO: 1022705 - protein, 259 aa, Homo sapiens
MSLRWDPTDLSKLENSVIHKIFSKFGKITNDFYPEEDGKTKGYIFLEYASPAHAVDAVKNADGYKLDKQHTFRVNLFTDFDKVYDRSSDELGYSRENSVSKTWGNLRYWVEKGRMLEISTGVTFEEVGNRLHSFWRLERYTEPRFSLVRTARAFVTEASSVVGEVVPYKGGPTHGGPLSLRRVSLSAESGDENQMQHTHDHDAITTRATHSQHPPPDSSRIHVCSILPDHDAYASPYPHPNCAKHTSTYGIATMRHSAQ

SEQ ID NO: 1022706 - protein, 164 aa, Homo sapiens
FAAASTIGVTVTEASATFSGHGSKMAIPGRQYGLILPKKTQQLHPVLQKPSVFGNDSDDDDETSVSESLQREAAKKQAMKQTKLEIQKALAEDATVYEYDSIYDEMQKKKEENNPKCFGERQKAQVYSQLAKSTLRSEKQEQDTTELDKKIQREREMETQGEFD

SEQ ID NO: 1022707 - protein, 97 aa, Homo sapiens
FAAASTIGVTVTEASATFSGHGSKMAIPGRQYGLILPKKTQQLHPVLQKPSVFGNDSDDDDEDLALSPRMECNLCSHNSWQPSTSQAEARLFTSASQ

SEQ ID NO: 1022708 - protein, 95 aa, Homo sapiens
FAAASTIGVTVTEASATFSGHGSKMAIPGRQYGLILPKKTQQLHPVLQKPSVFGNDSDDDDEDLALSPRMECSGAISAYCNLCLPGSSSSPVSAS

SEQ ID NO: 1022709 - protein, 215 aa, Homo sapiens
AGSGWCNRGEGCLAVLCYLLPVRTEPAVSTRRVESSPDSRSREKTTRDTLGAVRRAELVLKRGSEAGYIFSSGLLLSLGTGCQCLDGGFQRHMGAPLPPGSPVPHPVTGRSGKMPVQVHEDEKFPWGGSSSSRKYGVLSAPKCKISSYCRSQTPARLISGEEHFSSKKCLAWFYEYAGPDEVVGPEGMDNNFVKTLVLKPENIIMVGFKGGNLGG

SEQ ID NO: 1022710 - protein, 148 aa, Homo sapiens
  misc_feature (12)..(12): Xaa can be any naturally occurring amino acid
MNYINPAVAKLXLRCIFLRKASQNMGAPGRKSRTHGWAFAAEKAEAKGGAGNRPRSSGADPGAFHGPGGKGRAHREASSPRPRWDPQARPGRCREAGPAALLARIDPSVPGCPLTRLPARTAPGSRVPGKAERSGPKPKARPPQGASG

SEQ ID NO: 1022711 - protein, 70 aa, Homo sapiens
MTNEETEEHEAPRKRQNNEPKRHKTGDRQTNLTTQHNNQTTSTQQKHSRQRTPKTRTIQTTGQPKKTIDG

SEQ ID NO: 1022712 - protein, 271 aa, Homo sapiens
LPQLQNFRPARPFGFLTLGYGDRFLCGVLRAIMSVLTPLCCGADKARPAAPSAARKIHSLPPEGKLGDHGTVAVWFNLLLRDLPPASGVAPGHTLEDLTGGQQCKGVRSVPHNVDLDPAPPPILGSWNWHFVAGSPESCHPNFQYTSFCIHDLCDVSMGDPPVGVTGPLSGGVPLCNNKIYLTKTDRSAAKQPNNNFCWAGLRSSEKGSKDPIWWGGAGPGRFSVQLCPMAAPKGDCGIGILGVVPPEKSARGNRGFGNKSKGGLGAIQAL

SEQ ID NO: 1022713 - protein, 234 aa, Homo sapiens
KKVYILIWGGGSKKASPYTGPYSGAASGPIGYKEDSEEIKVVGKNPGVVAWYVVRGRRDEVKCEGPSYPPSVPQTMSWNPGGEKAPLSFRLLGMVDGHVVIRERQAKKSGQAQNGWAERWAELARPGIILDQSGLGLRGHQENLGNKSPWRPPSRMERETRESQELFMAQEKAGIPVRHFSQNRTGVLTEDERGHPEIGECNGRGIKEDREYKATGTAQYNRGYDGGSSIRDLV

SEQ ID NO: 1022714 - protein, 285 aa, Homo sapiens
MWALCPRRTPILHSKMAEGNSTQRSLKENIRARAQYVSPTSVVSPQEPGRDHKLFSPFYNGLQGKHLLAVAHTVLEPPVGWRTKIHQINTRGHIKTAEEHLYLMDAPGESAGSPRAINSHPVKTRYEKDPQRVSISPTVAAGGPIFFGVSCPPPPQPVLRHRKPNTFPLSEPRQATPFFFGTSLRSAPQYVRPPKRKNVFLSKKSPAEGRFSTSTIYQCPAVTDVHGWEANRANGSTRAVVEDHHILTLAHSDDPHQPPSCRTLRERTAQVLTRTVCEQQTTQND

SEQ ID NO: 1022715 - protein, 365 aa, Homo sapiens
PVKLGTRPRSRTAQPNSGLLQCLGHHPLHHVMSPGQPYPVSLNRNATPICQPSWATTHTLCAAPRRAMRPSGGMPRAFVGLIIFLLCTLFISLRSSDHRQVNSLMQTEECPPMLDATQQQHAARLARLLQAPGPFAQRRSDVRHLQPTPSSNFCLAAGPHCTVMMTLTNLVPALVRPWTDDLSTCAAVWVTHSVPAWPGLLLYLCHPWSPHSSCRNRDFPPEAALTALPSGAFLLSLVCHLQSFALTWPNFASLSLHRIQRYVSISSNHLTLTLSVLALGACGSFMPLATKAPPQVTPTTGSPCELLLYYPPAAHSSKCLLPRSPLPDPYYSLCLTPILLECSGLKLCNSFVPPRSHAKLERSTT

SEQ ID NO: 1022716 - protein, 96 aa, Homo sapiens
LCCQGECQWLHLDLIKEMRQFCQSLFPVVAYAYCTIPTYPSGQIGFMLCSKNPSTNFQEPVQPLTQQQVAQMQLKYYNSDVHRAAFVLPEFAAQGP

SEQ ID NO: 1022717 - protein, 238 aa, Homo sapiens
MTSVSGQPGARKNSENRQAGLVDAEARQVAARMPAGSTYRYSRGKHRGRHSGWARSQPRKGPRRGCRAELQDAIHVSGHLRGSLGGVVMSCGGASAPPAPGRTSLLVLAQPTKVLQAPEMLPGCPVGRDLSVCLVSLAFHPPSLYQLVLQGPSLCLSVAPQLTKTRVFIDTKTQTTKQQHLLLALSALKNSLNQSLGARPQDIETWQVAQEDWDRHGGFPLNRGPGGTQACDTGYGRA

SEQ ID NO: 1022718 - protein, 51 aa, Homo sapiens
CAGVTRGSREYVNMSVGGNISNHSSMKTIFNSKGIWSRLQGGKEYGYENTE

SEQ ID NO: 1022719 - protein, 163 aa, Homo sapiens
  misc_feature (99)..(99): Xaa can be any naturally occurring amino acid
MVPFLREDVSILHRCVLAGAEESLVRRSLGLRSRFKRPCELTQKKKKAGDIMTGGGKGGIEWGLASFAGPGFLCQGGNSGGPMGADNCRRGHRRSGETXNARRRAHKAVPLGTKWQAQMTVANILPEKTTVSDEDRETKRKADRRDRTPEQNNDQRKHRTQAA

SEQ ID NO: 1022720 - protein, 93 aa, Homo sapiens
  misc_feature (3)..(3): Xaa can be any naturally occurring amino acid
WSXRSVVVAHGVGFLSWQGGMGSQNVGPWGALSVPVAPQESLSFAVVLRMAQRVPERPQCGQLGFKLTSEPPCGGGASEGSEVIFLCGFSLLA

SEQ ID NO: 1022721 - protein, 582 aa, Homo sapiens
WVRVRGWRQRAPYLPGPPIGVPYPIPDPGVRARGPGITRLPVMVLKAFFPTCCSRRDSGLLVGRWVPDQISAVVLAFLHFPLIPIQVKQCSCAQVRQASQCVDVAVLVHLCATAGRRPEESLGPLPGEPGLLSSPQDALAAAVPGERLDVLELRGQPTGKRPLAPDAPGEDQVMLIFYDQRQVLLSQLHLSHLSCPDLPGWSHHCQQQGWPWLPVFDTDSTAVSVLFQTDDQHLMSGPDAAEATGQYGGRGGPRILADAGTGRHLEDPFVCMFGPDLHVRIGLQDCHDALARSGSKGYWDTHDPIPTRDAKHRHNGDGNRTPGNPGCETTITADIYSYNVTGRTKTPDHKREMQERANHRERPHLMTRLAQLAPWAHQCLLSLSIHRGRKAEIGAFMGTERHNGSSVGMNTLGRRTHQGHYVMADRHRTGDGSHAWGLTNEPTGAQQGYTTVAWGNAVHSHIAQNPTWCEYVVTNPSHQCMHTYRSEHNIAIADRWRIIVAWYVAPIKCCTMRTNPTLETVDLQRPYYRLQQVNGGDADTSVGPHGYSHESDQWQGATSSGHRPSSTSVSDYTAKQRSYKYA

SEQ ID NO: 1022722 - protein, 536 aa, Homo sapiens
  misc_feature (241)..(241): Xaa can be any naturally occurring amino acid
  misc_feature (269)..(269): Xaa can be any naturally occurring amino acid
MAKGLISSKEPRHGPSQIPPWVSFQFPPLPNAVRIPFQFSSNLQNQPLFFFQQAQTFPNLFSTHKCNYTCVKFTHTFLTYFTEERGAQLENKSLHLVVSTQDTWWTPPRGFVRQAVAKELLSLCGTQFLEESPTGEKNGGSCKRVWKFRGVERGFRGVHPTSVAPFFSLREECVLRACGTPSAAKPVGVSEGAHKGAEFVQTVGPLGGTQRDTRGCELCECACAHWCGPPCVTESFKKTRXVTIFRKKSLRHRRVSHTGCWRRRSSCFXQRGVCVGPVLKTFYTKGTKKVFLFHQSGRPNRLVCVGASWGRPTQYYIFGALGVGAQMVLISVYTRPPQEWGLTQTIHEGSHPHEEGTTHAVGVIMFPLFNSFPLVGRAPTQALANVLPPTLGPTTCSSVSKTMGYRTYPSIALTTSSPGTTPPSWGYQTADLYGPSQGPLVVLGRSPRFSRGGKRSPLFTLSSRCVTTRWWAQKKVGAYRGFLSSTCAPRGSTHPRTSVPGQTVSRHRLFGGPLLLLSSRKPIIKRGFVIPQRVVG

SEQ ID NO: 1022723 - protein, 159 aa, Homo sapiens
  misc_feature (10)..(10): Xaa can be any naturally occurring amino acid
SRRPPATRQXRCPPASQLVCRSARPSVPEPADRDPERAGPESRETVPGAARSSGPRDPGTGPGPQRPGGRGHHRKGLRSVFVAGEAARALPGAASGPSPAGGLRPAGRGRGREGRAAPSASWVAASEHDPRGPAPRALIRGDPALPQPWAPGAGGGRRP

SEQ ID NO: 1022724 - protein, 44 aa, Homo sapiens
SLLADTTRTRKLQEQRLRVVYSTSYRAEEYGNRITVHGNGSLDI

SEQ ID NO: 1022725 - protein, 228 aa, Homo sapiens
  misc_feature (217)..(217): Xaa can be any naturally occurring amino acid
HEGVLMDGKWRLSEWETQLQRLQPRSPAAKGPPSSGRGRPLRPSALRPPAPPPPPPCSFALQVSEDPILALPVSARNLPEAVGATPSPCGPPRAAHACPPAPRSAGLYPRQGWLSEPGRSVPLSAASPATRGPRYPLPAAGGAWTPGGGWLDAGACGVPRGRRLPEVIRDDADSSVLLGGCAQFVAFAAKAPGAFFIYICAGREIRTVIQYQTVRYXILPLSPVSRNR

SEQ ID NO: 1022726 - protein, 100 aa, Homo sapiens
NGARELTDTLQAETDQLEDEKSAMQTEIANLQKEKGKTRVIPGSLTEPGLQESLMNLVFPKREMSARSPYLYSGGPQRGVPPRVSRGSPTPSLYYSSPVE

SEQ ID NO: 1022727 - protein, 78 aa, Homo sapiens
GFRWQGLGKRRRRMSGREGGKKKPLKQPKKQAKEMDEEDKAFKQEKKEEEQKKVEELKARGGGRGPWAQVELMKSGKK

SEQ ID NO: 1022728 - protein, 366 aa, Homo sapiens
GFRWQGLGKRRRRMSGREGGKKKPLKQPKKQAKEMDEKKKKKKKKKMGGGLAEKSFLRPFRCGGPRRAPFSYVEIWALRARVAKRKDAGSYALECLGFFHQLKNRPRGTPELRSEQIPREGVPEANHGLPITGVPRDEALDINYAPRPGSGKEERRGKNTIKGASGQQVSSNTTKQRQEEKLKNGKAGLTDTVRDEGGNNKFRTYGKKRGGTNNVATHCDPVKRQNTGKTHTQEEWGGTNKKNLNTKPPRETRPDTPEQATNRVNIDVNQQREQGGRSTTKRENVQSSHRKRGKREEQPKTKETLHGNKTEEKHSDEMKNRRTRGIDSYRRNTKAEKNDKEEQSTDRHIEQDSHQHRDKQQQHRRQ

SEQ ID NO: 1022729 - protein, 116 aa, Homo sapiens
GIDVKNLGGDVQGRSVIPGHDTICSTGVQTAPALDSHRGTFSQKNQSTSNCCGYLHNSNEKRGPFGLTSVSYEVWNESYEHWNCGIGEENEDPHTMIKVKKQVKEFLLLYSYLHHV

SEQ ID NO: 1022730 - protein, 158 aa, Homo sapiens
  misc_feature (132)..(138): Xaa can be any naturally occurring amino acid
  misc_feature (140)..(142): Xaa can be any naturally occurring amino acid
  misc_feature (145)..(146): Xaa can be any naturally occurring amino acid
  misc_feature (150)..(150): Xaa can be any naturally occurring amino acid
  misc_feature (152)..(152): Xaa can be any naturally occurring amino acid
  misc_feature (154)..(155): Xaa can be any naturally occurring amino acid
  misc_feature (158)..(158): Xaa can be any naturally occurring amino acid
RGLEEASVPGEAGGSWRLAGAARAARAPQPGPVLGAMSWLVGLREAALWWLWAEARTSSFAEPWRLEAGGGGGWPLEALASGPGGTGGVKGICRGHGWGRRGLELRGWTRLACGGGGSGGPVRRQLSFPPPXXXXXXXIXXXTTXXSTQXQXPXXTQX

SEQ ID NO: 1022731 - protein, 279 aa, Homo sapiens
MCTGTEKARIVMDDEIHRNIMDIFFKAPFIFKCGTETGGFEELKEARHDTARNKHAAKCPEIERQIAAKTAHNDAKQRQCAAAIGAAVSQRASVISFGLRFSGQAVVSFHNGAIQIQQPRARKHALRPKHDQFPHAIFQRIMASSSLFGQNQRDRFAWQAYPTLIDMDQMRNPSPFRHVKRNRLTFDRYWGTIWIRCPSTHIRIRHGHRGKHGNNSRMVKRESFSLREWKRRLVGSHQAELGPRKTGLPLVSKTHSVRGKRNHGVPGQKVAPHVLCGKY

SEQ ID NO: 1022732 - protein, 220 aa, Homo sapiens
DAWVRFALLGQKCLKQWGTCHPTLTLSLPQPPTHTHTHTHTHTHTGTMHTRIWEGNAMLPVKGTCLFPQLSSGCSNKGCGGALEEHPRVTRVLCALSHRPPWWTPPAGGADDPALSLPSRGPGAPRPRDLWTGQDSGIPISPPKQQPAREEPNKPKVVDPQCSANLGPHHEVSHSTQTCRLDGAGGWDVKGVCIDRWHKGGAQERGDSEGRDDPERNATP

SEQ ID NO: 1022733 - protein, 95 aa, Homo sapiens
GRNMADRLTSSFSDAVNSLADQFCNAIGVLQQCGPPAPFNNIQHSKLSKDQPANPTEEYAQLYGSTDVHDQRKDIDVGDRFLTRGEEFYSCFTGC

SEQ ID NO: 1022734 - protein, 117 aa, Homo sapiens
MDNRFATAFVMACVLSLISTIVLLSSLHVQRLLGMNIGSPDQRKFPVIGIMKHLGDEFISDEADETDSLMTALFRLQLAQWDVDDRCITIPKNMLGIAHQKGQSHLTVVTKMCELPQ

SEQ ID NO: 1022735 - protein, 331 aa, Homo sapiens
MVDGTLLLLLSEALALTQTWAGSHSLKYFHTSVSRPGRGEPRFISVGYVDDTQFVRFDNDAARSEDGVRGPPLDGRRQRRSELLRDPGTTTADATGPPHSSLFRADTLRTAAAPYYQLSSEAGLLSTPGKLDCTGLTQPGRPTRRFPSEEYDTATAYDAAQDSILTRELRTCASWTAVDNGGPQIVRHKSRHCLPLSAEHQRAYLARHNAVAVASTNTCSTGQGDTAYTLEPPKHTTDITNPNLWTMTANLTCRARRYYLLETHMDRHKKAQSHTQDTTPRTPAKGQNIEGKRRNKDTEKKRYTQQAPNDKLNAPQPHNKQPTAPDDEDTS

SEQ ID NO: 1022736 - protein, 232 aa, Homo sapiens
  misc_feature (11)..(11): Xaa can be any naturally occurring amino acid
HPEPPKAEMQXPPPPPPGHYGAWAAQELQAKLAEIGAPIQGNREELVERLQSYTRQTGIVLNRPVLRGEDGDKAAPPPMSAQLPGIPMPPPPLGLPPLQPPPQPHSSTRPWSWFPMEPSHQIWGPRPPLRVGDARWHCQRRSGCTLAQQQAALLMQQEERAKQQGDHSLKEHELIGGSRSGQSVELGAGNESRQIANDGHPGPRPPKDMAPRFGVRTPLGPRVSCSSGPDGT

SEQ ID NO: 1022737 - protein, 177 aa, Homo sapiens
MLGLFPPKAAHLQNLDSWTGTWDTFNPLTRLQFRLTHFLPQILEYPLGRRLLIIPFQINPRAPKILTTLTKPPSEGAQTIVVGITFHKAYHGGSVPGSEWVGAMVLDVLNMRDRTYNFLKEYYTHRDIPLRHVHPETTDITNMTATKEMNKHIFALWAAREIAKIDGPMKKDREQTT

SEQ ID NO: 1022738 - protein, 90 aa, Homo sapiens
MSREPTSYTRERRDGKVAETGKPRETLELDTKFTQGKARTLGETGKCPQTIHAPCVTSSAPMGPVTPDRICLTQRFKIDTTIASPHALPP

SEQ ID NO: 1022739 - protein, 70 aa, Homo sapiens
MSREPTSYTRERRDGKVAETGKPRETLELDTKFTQGKAREKRRDDFKYFTISSTIELPVTLSAFHLLTPV

SEQ ID NO: 1022740 - protein, 167 aa, Homo sapiens
SGAAADVGVSEAAPVTHGGCRAPDPGLLPEFLHLSSGAPHPSTVALSPVATEAALLCILRCPGLPALVSCWLLLALPAPSCLPDVTAAVRRHSHGRVVVKAAVLRVSQCDSRRRSRKVLASPRRAAASVGAPNISDTVTVKNPERTNGRNSPCQRIAPSSSLTERNL

SEQ ID NO: 1022741 - protein, 73 aa, Homo sapiens
AQTSLPSFSLRPPEHQRALSCPQESLPLLQPESPYWREEVREEERKGSLDLKYPDQSRVHMGLVGVTTQINTA

SEQ ID NO: 1022742 - protein, 88 aa, Homo sapiens
SGSQRVVSTGKCTPPCDSVMQTKVPFGPVPVMSQFSHQRTGHLVGLQVTRAFKTSVVRTDIERPTTLTYRPISQMVSSITACRRFDGA

SEQ ID NO: 1022743 - protein, 326 aa, Homo sapiens
RDRERERPRAAPAPSAPSPPGPRAKDARPPPSPRLPAHRAHRAATPTPLRTACPLRHQLVGVFVAALAPGYLLRATNELAASPGRSPLVVTLLHLTRLALLHLPPLPATAPWRRPSARRGGRDWSGTGCGCCKVCAKQPKEDCSKKAALENNKGAGNETSAPDHRSERGICKNISQRADPVNITPESNKKGKGSSPTVNISDHVLMAPGAAFLCVPKKYLSPTWAVPTLGWSKLPGSAAEEWVCDEDSIKDPMEDQDGLLGKELGFDASEVELTRNNELIAVGKGSSLKRLPVFGMELASYTTFTRQKCIVQQLHGPVLKTVDWYL

SEQ ID NO: 1022744 - protein, 68 aa, Homo sapiens
MDLVPYYWQNGTKAIFDSLRENSYKTSSHSYILEANDRLLNTVNVFTWAFVKAWPKRRDTYAINRRFY

SEQ ID NO: 1022745 - protein, 130 aa, Homo sapiens
LLLNSRPRRMEVGHRDYRSMEVGHRDYRSVEVEHRDYRSMEVEHRDYRSMEVGHRDYRSMEVEHRDYRSMEVGSQGLQVNGGGAQGLQVNGGGAQGLQVNGGGAQGLQVNGGGGRDCFSFCPRGREFSSS

SEQ ID NO: 1022746 - protein, 134 aa, Homo sapiens
LLLNSRPRRMEVGHRDYRSMEVGHRDYRSVEVEHRDYRSMEVEHRDYRSMEVGHRDYRSMEVEHRDYRSMEVGSQGLQVNGGGAQGLQVNGGGAQGLQVNGGGVTGTTGQWTWSTETAGQLRQTTGRVDAAANL

SEQ ID NO: 1022747 - protein, 151 aa, Homo sapiens
LLLNSRPRRMEVGHRDYRSMEVGHRDYRSVEVEHRDYRSMEVEHRDYRSMEVGHRDYRSMEVEHRDYRSMEVGSQGLQVNGGGAQGLQVNGGGAQGLQVNGGGAQRLQGSGGGVRRTAYQWRWRAQGLQVNGGGGRDCFSFCPRGREFSSS

SEQ ID NO: 1022748 - protein, 190 aa, Homo sapiens
  misc_feature (16)..(16): Xaa can be any naturally occurring amino acid
  misc_feature (65)..(65): Xaa can be any naturally occurring amino acid
  misc_feature (77)..(77): Xaa can be any naturally occurring amino acid
  misc_feature (83)..(83): Xaa can be any naturally occurring amino acid
MERQGARKTVSPTPSXQYCENCDTHFQDSNHRTSTAHLLSLSQGPQPPNLPLGVPISSPGFKLLXRGGWEPGMGLGXRGEGRXNPIPTVLKRDQERNLGISESSILLALEMTHIRPALGYLESGGWDGERPPSGGHHLSLEGGEKEGGERQGIGQLGSTGLYMKPRVLTLVKSDPSLLLKSELGLLTWAL

SEQ ID NO: 1022749 - protein, 126 aa, Homo sapiens
MAGVGPGWDVAVGLGHGLQGLIGSLGPPGFKVILWFSVPLRQSPTAQLHIFCGDYRGLISVAIGLSGTFRGLKEICVALASIKVRGYRALSSLSPAVLYRFKDAYDHLAAYPENPGRLLYFQGQLI

SEQ ID NO: 1022750 - protein, 87 aa, Homo sapiens
MRAEPISTPKLDKMPGMFFSANPKEFKGNHSFTSGRQNAKKEAKDFLGLDIKAYLQIYDPTTWILELNLPKSQGCTSSSEGINVLTF

SEQ ID NO: 1022751 - protein, 290 aa, Homo sapiens
SGGAELGKGRQRRRRQRQRQSPVPETKRQTGGAGPRKAGSASSPDTRAGEEKQRLLARIPGSRTPDWPGSQGLRSRSRGRLCSASDEGWPFGSAPSTAGPRQATMTENSTVRPCGQGPMRAKAIQEVHRPTQCIQTLIVAAIQAREEPRWLLAPVHSEVYQEPATRWCENADSQIKLSIKRLVTTGVLKQTKGVGASGSFRLAKSDEPEEVSGLQEDHRRTSQNGSHAKEGIQAKKACSNSPKQESQEPPGSGSQEEAGGTPRKPKPQDWQGQPARIQAQKGKPVEPSKV

SEQ ID NO: 1022752 - protein, 106 aa, Homo sapiens
RPPTTTKFAAASTAMEEAKKEGYDLRSDAIPIVAAKASRDIASDYKYKEAYRKQLGHHIGARAVHDDPKIMWSLHIAKVQSDREYKKDFEKYETIQQPRRSTRPRI

SEQ ID NO: 1022753 - protein, 121 aa, Homo sapiens
  misc_feature (13)..(13): Xaa can be any naturally occurring amino acid
  misc_feature (21)..(21): Xaa can be any naturally occurring amino acid
  misc_feature (47)..(48): Xaa can be any naturally occurring amino acid
  misc_feature (54)..(54): Xaa can be any naturally occurring amino acid
  misc_feature (56)..(56): Xaa can be any naturally occurring amino acid
  misc_feature (60)..(60): Xaa can be any naturally occurring amino acid
  misc_feature (68)..(68): Xaa can be any naturally occurring amino acid
SWDVEYGQPWRSXSHEHCTVXERDPFVFPYRPPPRALSAQSLDARHXXPSGGSXLXTGHXWKTPQPLXLNVHFQEASPVPTDISTLCSDTCHPAEAWRATGHHVLYLKVAAGPDMGPVLKR

SEQ ID NO: 1022754 - protein, 446 aa, Homo sapiens
  misc_feature (17)..(17): Xaa can be any naturally occurring amino acid
  misc_feature (22)..(22): Xaa can be any naturally occurring amino acid
  misc_feature (28)..(28): Xaa can be any naturally occurring amino acid
  misc_feature (30)..(30): Xaa can be any naturally occurring amino acid
APFTPPSTPPSNTNYNXKTNKXIDDVEXVXEQKQTHLQIKIFYTLSPVNGKITGANAKKEMVKSKLPNTVLGKIWKLANVDKDGLLDDEEFALANHLIKVKLEGHELPADLPPHLVPPSKRRHECWRPAPHLPFARPAGRQRRGEGKPHHFSRSIKTERMFPRLSKRKTTIFLLRLFLGLAGEAELRGWNRVHKNCGYFNIYTLEAAFFVAASPDVPSPVCTDSDPPGLCCGLELDMCSDCDLWGSQVRPFWPAAEAEAAWTGTPGTLTCASELRELHVDRGFLPHLGSAFPTCISGAKMEYLWPYTLHEDPVVTVTRSLDPLHPRDTTGFRALQHRTQARIHRKARGPGQHGTIRRGRSRDRTPERTGYTHKKTYQHELNNRVSGNKTNLTHNLYPNEPTPNIPTQQGHTRTGAYGPPTTTPPTEGDTRPAGQQGERTVRPRRVH

SEQ ID NO: 1022755 - protein, 512 aa, Homo sapiens
MHELAAEPRTSALCPGDEAQAVSDTVGLTCSAIRTSSRLIGDGCGRSESLDALPRVGHTARRLLTGLMNRAVRVLAHRAMGGRLRASDYVGVGELRQWINAHLQIKIFYTLSPVNGKITGANAKKEMVKSKLPNTVLGKIWKLANVDKDGLLDDEEFALANHLIKVKLEGHELPADLPPHLVPPSKRRHECWRPAPHLPFARPAGRQRRGEGKPHHFSRSIKTERMFPRLSKRKTTIFLLRLFLGLAGEAELRGWNRVHKNCGYFNIYTLEAAFFVAASPDVPSPVCTDSDPPGLCCGLELDMCSDCDLWGSQVRPFWPAAEAEAAWTGTPGTLTCASELRELHVDRGFLPHLGSAFPTCISGAKMEYLWPYTLHEDPVVTVTRSLDPLHPRDTTGFRALQHRTQARIHRKARGPGQHGTIRRGRSRDRTPERTGYTHKKTYQHELNNRVSGNKTNLTHNLYPNEPTPNIPTQQGHTRTGAYGPPTTTPPTEGDTRPAGQQGERTVRPRRVH

SEQ ID NO: 1022756 - protein, 301 aa, Homo sapiens
  misc_feature (239)..(239): Xaa can be any naturally occurring amino acid
MSSINAVLCCSFPLCPVLLFLVCSFWVVVRRSSRELVVVVCPPATMSPFGSPRSRLMDSLPLFSSGESPPNNGGSCCAVVLLLEYHLRFCPPPLGMAVAYIFNRGDPQRVHNLAPPVVKCPQCCCYGGDPLGECCAHPALSWFSFLPWRFPCAHNTNWLLAPRWPPVFNSPGPKPVWGILWETELPLAPHGPPVPNLQAPPPGKDLCDGPPLRGNLCWPCMGPRAAFSPGRVYIPPAVXYMGARAQGLVGAKRSIPEALHREDVYMAIGHSRGLPTCPTGSTWLAHMTPARFRKHFRPIFE

SEQ ID NO: 1022757 - protein, 171 aa, Homo sapiens
MRSPRIAQDRLYGATKEIELTHMCIAWRRQKPTRGSALPVEQQYQVSVQLDFQLRLQSSTGSSSGSSVFLSIQPLRKLQSPPAAPGSEQLFWLSKSFSAQTADNRRRSRSKSKTNLKGDLQPGDGKWRAPILLSPRKCHLRDSTGLCRKDLVVENISTYEETSMMAARKGW

SEQ ID NO: 1022758 - protein, 164 aa, Homo sapiens
EESDARIVADSDQLTSVMILVMILLHARRRRSRRNQKRLINYKKTQKVTVPRTFCDVVTNYKRVHERRLSSSESEESYLSKNSEDDELAKESKRSVRKRGRSTDEYSEADEEEEEEEGKPSRKRLHRIETDEEESCDNAHGDANQPARDSQPRVLPSEQESTKK

SEQ ID NO: 1022759 - protein, 104 aa, Homo sapiens
THHVHLCTKDELREISLSTNIKLKEVYRDALLIENILMLILLYACLNKLRNSNTPRRNKENKNPGCTAVILHRIKTLGFHAVIMLTKRQCSRAKRMRPNTHSMD

SEQ ID NO: 1022760 - protein, 326 aa, Homo sapiens
LFPAPAPPPAPAFAPPPKVPSPERSAPRVPLPSPQPSYPFRPAASGGTPPTACLPPAQPCQGSPAMNLFRFLGDLSQPPRHHLATAQESGSPARAPEFQGRARSCLPVVFTARYLDLFTNYISRLQHVYEGGLHSLLLHHGLARLYTPSSQATYDGNHDTFRVEFLVVPTAILAFLVNHDFTPLEILWDLLHLPGVSGHLCRSLFMVEQDRRGRRPSPGHYLLCARRLPNSSILFKLDLALPISQGFFDLIAMWQACPDSPLLHFFYLYIPRLLKGRKLSFAGIAPVLSISLLGSTEKETDAAEDVSRFPIQGDFSNTHSGAPSAS

SEQ ID NO: 1022761 - protein, 233 aa, Homo sapiens
LFPAPAPPPAPAFAPPPKVPSPERSAPRVPLPSPQPSYPFRPAASGGTPPTACLPPAQPCQGSPAMNLFRFLGDLSQPPRHHLATAQESGSPARAPVRGPPGLAKERDRRAGVGRTYAGPQEGSCGALGAPGSTPHCIAGDLSLLGSWVSKGHTASLPQDWPGEHYSCSLCTAHYTPPTSATPPAPVWRSPQGSLAPRSQGTRGTRAQARCESGDAGPGRPRRDTGGKVTGLG

SEQ ID NO: 1022762 - protein, 376 aa, Homo sapiens
CYLFLSVLFSPDDAPALLSLSSLPLDPLFGPPLFTFTLSLPLSLPPSILDTTADLHITRYLFPTRRSDNDLAPTHSPEDKPGSYPWTYYRRVLHLLGIDVSRGFSMVVQDGIRDRTCSVVNQIGTCAGILLDSESNPNIHLHETLVVRLGPDYFTTTPYPSHLPSPVLGPMQIGNDGPDCLQINHSAGLAAQVKKTNNQNKEQTTKKHKKQRDATQHNNKQTPRKQAPHHTPTTTHTKQRQAKEEGQPTKDKSNTYQNQRQRGGKHHATRNRANNAATPPAYTTTTTNPAGQITASTHKEEDEYTKQERIRNRTTTKHHRKPRNDSTYAQPTQRTYMKDTKNNHGRNQQHTAQDRSENTRQHSRAGTRKTRRQKQR

SEQ ID NO: 1022763 - protein, 340 aa, Homo sapiens
AARMLSVALNFAYTGEHTAIYHLSPVMVWCCMLPVHEDCEEATEFLTCHGLTCFLTGCVELNLVCYSCEAAGIDPGDLGGVWCFIHYVKLTVSSRGNCELEGHCTLAARVVMPPCVQGSTSQNKCIGESLAAGAGRQEPESRLRQQWAEGEERSVVEEAGMHLLCSLAHSALTGRWSLIMGSASCPGGEPVCRRPGLCASCLCELNQRLQSRVSMYSDPRYSPAGPGVTWTQPKLLTRKPRATDPRRDVGAAACLTEAGWPTRECPYCLPRRHGTQLQPATPSMASELTRRTDTTTPTDRTPHPPRATPSYYRTSPDTHTHHPHTPPIPHTRAQHKPHTP

SEQ ID NO: 1022764 - protein, 140 aa, Homo sapiens
MPREDAHFIYGYPKKGHGHSYTTAEEAAGIGILTVDPWEVFNCSFGWWDLEKTENGVHQQPVTEDKEVLQCVDISSGVAFNKKMPNKKGWIIGAQQKCLFKRKIGEPVVPNGSTLLLTEKLLLQEQVTTTLFNLKSQRDT

SEQ ID NO: 1022765 - protein, 42 aa, Homo sapiens
SLGGIYLPRRVPSVKNGFVAGIAPHGGQSPSASALSPVYSSR

SEQ ID NO: 1022766 - protein, 56 aa, Homo sapiens
SAQVTRCLEEDCSSESFKVREENKQQPKSLLSKMSVWAQGTRRARFDTKPMNPWGR

SEQ ID NO: 1022767 - protein, 333 aa, Homo sapiens
TKCELRYPSNVGISHGVPRALFLQVAVIHVVSYVQPCVPPAVESFLLRQGQCGLNISWSLEAVSLPLLPPLALALILAFSLPAPRVKTGHSAPTDSAQLCNGDLQVHGAWNTCGSPLGQTSVCYCPSPPCPSFPDRKRVLLDYKVSPGVCDGAPGGQLLSLCLLTSFVPFFSCIHSVDVVLSKLRMSALCEVLGALRGDDSMFLPQGLPIQLGDRQLTTRAGLLVCTGGVLPGSRAPTVLCGSRLPGYLNPIPPIILTQSMGLGRKPGERDIAPRPRVENLVVVQQCLSSVLLSVGQAPMALWTFHSSRQGRAWGKAGLECFGDTEGTCPHPT

SEQ ID NO: 1022768 - protein, 223 aa, Homo sapiens
MADDFWQLLDKYALEALLRSCVRMRLCSEPVRWRTLPEIPHPGRPPHAQIQLKPQAMDFIHYHASDVLETSGWKSMVVSHPPLVAEAYRFWLQHHVPLFWEPPPPTPDSHPIDPACCKTPFNFHEARSHLLLPPEPPTVDTRHLWSFYSLVRGRDCTCGPRLFKQQLNNLGENGGRENEMETLCCVTVFPLGLAEFDTVGIQFRRWPEDIPAVVLRRHLSASD

SEQ ID NO: 1022769 - protein, 184 aa, Homo sapiens
  misc_feature (64)..(64): Xaa can be any naturally occurring amino acid
MSVYVYVQLPFMEDLRQYMFSSLKNSKKYAPTEAQMNAVDALIDSNGAVAKARDEIILDDPYGXTMFPNQIRIDPQDPSHLQRLYQCLLHRALTSPGMRILLTLISSKTIILVIIARTSFPVGELHYCIDVKHSIIILKNKRTLVFRLMCKRQEERHQSDCSGTFFHMKTSQCREWDAEQAKET

SEQ ID NO: 1022770 - protein, 190 aa, Homo sapiens
DSVLCFVGVLSTIARWFGGSISRLVSLDPVGGPPLSAEPGIGRNLRVDEDTSVGPMASGQIRVCLPVTTPPLWCSGTTALCPGPHAPIFWRIRRFNTAHDDNVTQVGPFYVNVLNEEPRKRLCENIAGHLKDAQIFIQKKAVKNFTEVHPDYGSHIQALLDKYNAEKPKNAIHTFVQSGSHLAAREKANL

SEQ ID NO: 1022771 - protein, 190 aa, Homo sapiens; identical to SEQ ID NO: 1022770

SEQ ID NO: 1022772 - protein, 38 aa, Homo sapiens
MAKGHKNIQTEEPQYTQADTKHSRDILYIKYAIGHETG

SEQ ID NO: 1022773 - protein, 223 aa, Homo sapiens
MSRSRQPGASLVLGEPPWGELGPPEICGAPKKRVHMGVRRDVCCAQQNWAFPKKPWGFRRPTHPFPTGLYSRFQHKNICSHVSWGLYTGVPNTQAISKSVPFVENPQRPHVCQRVPHNGTQVITQGPNPHPQAAQDTQGEHIVIERPLPTGPQDSRFLVARPERIHPFTKKDGASTHKFTIADEFERHTWWLKKRLNPQNGCGVKRHIPQIVALLDKWRALHS

SEQ ID NO: 1022774 - protein, 303 aa, Homo sapiens
MSLWQPLVLVLLVLGCCLCCTPDSRQYSPLCLFPGMTCERNLTERGSLVMRNTCSRYGYTSGEHGDDVVDVLINSLGRSATCLTVYPEDRLIPAHEILVELEYAALQLNGHDETPRCGVPDLSAWFQTFEGDLKWYQHNITYWIQNYSEDLPRAVIDDAFARAFCTVERGRRRLTFTRVYSRDADIVDPVMVLRSTGDGYPFDGKDGLLDTLPFLLAPAFRETPISDDDELVVPGARASWFQHRYGNADGAACHFPFIFEGRSYSALQHLTVASDGLPWCSTTANYDTDERFGFCPSEKSTPG

SEQ ID NO: 1022775 - protein, 85 aa, Homo sapiens
DRVCVVGVVLHHGSVGATSSSWFQHRYGNADGAACHFPFIFEGRSYCCLQHLTVASDGLPWCSTTANYDTDERFGFCPSEKSTPG

SEQ ID NO: 1022776 - protein, 108 aa, Homo sapiens
GVSWKLLQVKRARKELQSKCGLFPFFAPFHYPSSVFTLSPGLRVEPANFEEEVAKWEKRGVGYGVKCMLCICIFNFLISTFSPTLSAAANAILPVLRRLVHLRGSLSG

SEQ ID NO: 1022777 - protein, 74 aa, Homo sapiens
MLISIKSSSPTIYFIIFLTGIVGNGMVILVMGYQKKLRSMTDKDRLPFQLPTPFCHRLLFWAVDAVANWYFGTP

SEQ ID NO: 1022778 - protein, 35 aa, Homo sapiens
MSWDTRHRVPHETQKHYAHIHTHPSMAHSLCHTRP

SEQ ID NO: 1022779 - protein, 214 aa, Homo sapiens
MTLEISSQNNRSFTQAGCAHRDVLIQHRSCEFYPLVGDGRVTQGARDASSKKDQRQFYIRLLGIYVGWVMDSRRTHGPSYCFHQLLAPQKRTPTVGSYACTPQSLPKFQHPSHELLKENGFTQHVYHKYRRRCLNERKRLGIGQSQEMNTLFRFWSFFLRDHFNPKMYEEFPACWLWTDAKTGYRYGLECLSSILPLWPGKRSSGWNIRIFTEK

SEQ ID NO: 1022780 - protein, 212 aa, Homo sapiens
MHTLYRVCFIQKIEGRAIRLELQGPRGSPNARSQPSKISVCQTCLSEDTTEETLKESFDGSVRARIVTDRDNWVLQRALAFVDFNSEEDAKAAKEAMDTTVNIDGQIQVTLALAPRTLNGVNRWPSEGIVGGGQPGGFGGRRLVVEEAEEDLLAEAGGGSGGRGRLPRRQRKEDRAPQDHKAQEDDTRIASVPLLSHFPLCTERDSGSLPVT

SEQ ID NO: 1022781 - protein, 206 aa, Homo sapiens
MNEHGQIEGRAIRLELQGPRGSPNARSQPSKISVCQTCLSEDTTEETLKESFDGSVRARIVTDRDNWVLQRALAFVDFNSEEDAKAAKEAMDTTVNIDGQIQVTLALAPRTLNGVNRWPSEGIVVEASQAALRGRRLVVEEAEEDLLAEAGGGSGGRGRLPRRQRKEDRAPQDHKAQEDDTRIASVPLLSHFPLCTERDSGSLPVT

SEQ ID NO: 1022782 - protein, 253 aa, Homo sapiens
MQPEETLQEVFEKATFITVPQNQNGKSKGYAFIEVASFEDAKECFKFLSLAREIEGRAIRLELQGPRGSPNARSQPSKISVCQTCLSEDTTEETLKESFDGSVRARIVTDRDNWVLQRALAFVDFNSEEDAKAAKEAMDTTVNIDGQIQVTLALAPRTLNGVNRWPSEGIVGGGQPGGFGGRRLVVEEAEEDLVAEAGGGSGGRGRLPRRQRKEDRAPQDHKAQEDDTRIASVPLLSHFPLCTERDSGSLPVT

SEQ ID NO: 1022783 - protein, 104 aa, Homo sapiens
  misc_feature (20)..(20): Xaa can be any naturally occurring amino acid
  misc_feature (22)..(22): Xaa can be any naturally occurring amino acid
  misc_feature (74)..(74): Xaa can be any naturally occurring amino acid
  misc_feature (85)..(85): Xaa can be any naturally occurring amino acid
  misc_feature (88)..(88): Xaa can be any naturally occurring amino acid
MLLQKYPETDCMAAGGNGNXPXQVNPWLVRDSSSVVKDSREITLMVRRTRLYHLPRSHSVAKRCPQQGSLRLCXVNTESRESCVXNPXNERSEYKVADQSETRD

SEQ ID NO: 1022784 - protein, 185 aa, Homo sapiens
MMLHDHVILIEERGLSILPERLSPQACELTSVPCQVIRCRLYERTLWSPVGNGQGFIVDWDDGYKAKRIFISDGATILIDFLMLSILRQSTVWVDIARESQDAEVGDWRRTSVTVGGRARSCTEARVESPYVAGMGVTTPQDRSISSISRHRERTLAGRVNIRFKRSIGLCNPLKESAWIYTSWA

SEQ ID NO: 1022785 - protein, 180 aa, Homo sapiens
IKENPMRELRIRNQLCLNICVGESGRQTEREQPQVVGKQLIRADPCCFLKTRYTVRLLMASGDNEKIAVPCTVRGAKAEEILEKGRKVRASMSEEANNFSDTGNFGFGIQEHIDLGIKYDPSIGIYGLDFYGGAGYGQDFSSAAQPEAQDQAALGPNTRISKEEAMRLVPGRSITSVILP

SEQ ID NO: 1022786 - protein, 1032 aa, Homo sapiens
MNCYLDARNAHNCCMVCGSLDNNPDTVNLMFSEYPDGSVCADYTADHRHQGYTGLLHGGMTSTLLDAAMTHCLFMQGVQALTAELTVRFISPVCTGDKLMVCARLLGQRRGVYQLEAWLAKGQQKVARATAKFIVPSQDIALAHGYVWQTPGVTGYYKNMNACFAQTGKNNGISYIPLKQCEEVVMSKQIIDIGIPESSRVEIADGLSRLLADTYTLYIKTHYYHWNVTGPMFNSLHLMFENQYNELATAVDDIAERIRSLGCFAPGTYHEFSRLTAVNEDKDIPAAKNMIENLVQGQETVVKTARSLFPVVNNANDEATADLLTQRIQLHEKTAWMLRSLLEECKPVAAEKTVCQPQAIAVSAVTIRAAVAVFSDRNSIKTDEINKLNSERVSDKYSPDRHYRWVYPDHCRFPVIISRYRPGSSQPDRVNAAMIKRFAWKAGSHYSCYGFLYLCLPAGSRDHTRYLKRHDTVILNTVIYHFTCPSGLDKLQAAHYTQLLRQGRLSDTDCSFQLGHIRFPMANWHINSNRSLLASPRKTSAAPRAAFFISVCRFVSSFMGIAGFSHSVFLYNVIYYTDGAIILPPCSPGLQRPAGLGNKLYLADILPRVNREDVMKIVIVGGVAGGASAAARARRLSEDVSIVVFERGSDVSFANCGLPYHIGGKIPLRQSLILKTPEDFKSRFNIDVRTCHEVTSVDPVNKTVTVKNLTSGEIHTEVWDRLLLSTGAAPVVPPLPGLQQEGVFTLRNLTDMDAILAWIEQHNVAHTTLVGGGFIGLEVMEALSERGIRVTLLEMEEQVMAPVDPEMASALHQEIRNHGVDLRLRTALTEVLRTETGFRVALSDGGFVQTDMVILAIGVKPENSLATVAGLEVGKRGGISVNACMQTSIPDIYAVGDAVETPDLVFQEPANIPLAGPANRQGRIAADNMLDHHSLYHGSQGTSICKVFSLSIGSVGANEKQLKAHGTRYEKVYVHAADHAGYYPGATMISLKLLFSPDTGKILGAQASGKKGVDKRIDVLSVAQRAGLTVND

SEQ ID NO: 1022787 - protein, 125 aa, Homo sapiens
TLRSCGSGHIKLRQRLYIQPHLSGTGEMTGEETQASMGTGVTVDTGVGCLSTSSHYANRDADTFRCLCRKRCQRLLKSQRGGVKKSCISDPHKTAVSGFSSCERHIRALGTVAGRSLRVAPFFST

SEQ ID NO: 1022788 - protein, 34 aa, Homo sapiens
MDGILSHSFLVGLYTSTSAESSLTKYMSPFRVAA

SEQ ID NO: 1022789 - protein, 117 aa, Homo sapiens
MRLSMHSRPDNILTLNKSSIIENGKNYLEQRAVGEFAKVGSRFGPVAENQFWRTASLLVMEYLHNALEHDMSIYVVEKPQCPVLNSCDHCAIAFYSNTGIKVQSMIEWKTTIKETST

SEQ ID NO: 1022790 - protein, 72 aa, Homo sapiens
NLNEEPQRFLGHFRVMPDLINLAGETGIIENGKNYLEQRAVGEFAKVGSRFVTCSREPILENSLTSCDGILT

SEQ ID NO: 1022791 - protein, 303 aa, Homo sapiens
PTRTPTRRGRVGRPTRSGEKPRDRPCAPGCCARRRLACPEARASGSACTSWDPGGAPCLVPASHGAALVARTCHDATVRAGAARPLVNPEGVPTPSWRSQAKVTTLTREGSTKMRRIRWRRVGSIETNLLLAQWCASKRLLPLVYAPRFLSGVLDAFGARDNRPRVNEISLYREHSELDMRHQTQYKTKPGREAAALGVEESILRPNSRWGGDPPKGVRPRGEHTLQGSLCVAVRTDQFRVRRTKRRDPNTQEKGLPQKAPQRGGRPCFTHNLVTAWVLNRVGLRPKRGGNIRLGAWHLRQNG

SEQ ID NO: 1022792 - protein, 73 aa, Homo sapiens
THAYAHASRTRGSTHAFRTHASADALGRGASCASTDSCGSNQHSGPGIVELETRLCTLLNSTQCRVSVDKVSI

SEQ ID NO: 1022793 - protein, 394 aa, Homo sapiens
RRWRAVMAAGDGDVKLGTLGSGSESSNDGGSESPGDAGAAAEGGGWAAAALALLTGGGEMLLNVAAGGSGAAGGLPACAPGGPGLTGLSTACLGPPELDARKCAGQCCLAGVLDDACDLCVRQGPKGPVLLTTRSLCCLHQALCATPGGPFRGEQSFKEWEPGPLNLAWVAREQAKWETQGNAPSPRKATTRSTGRGAALKDSKRRQVPHGPLGLVPNQFHHGCGGSNEFPPSGTSPYEFRSFYGGSLGTMTDPHRALQPLLVFPKPVDPRSLPLETAGSRKETWPKVPRPSWSMAPFEIPLGEGQRKQIFAMGVGPSFRFAPSEQQGNLPKEPEGFPAFLSLTPRGRDSLRPEARFPGPRFLPRYAFLNRDASNSKSAFACYTHEKNGLAVEP

SEQ ID NO: 1022794 - protein, 227 aa, Homo sapiens
RRWRAVMAAGDGDVKLGTLGSGSESSNDGGSESPGDAGAAAEGGGWAAAALALLTGGGEMLLNVAAGGSGAAGGLPGCGLRWVAAGSGGRGLVAGEESPATSLPRMKKRDFSLEQLRQYDGSRNPRILLAVNGKVFDVTKGSKFYGPAGPYGIFAGRDASRRTWATFCLDKDALRDEYDDLSDLNAVQMESVREWEMQFKEKYDYVGRLLKTKRRTIRIYQSEREST

SEQ ID NO: 1022795 - protein, 127 aa, Homo sapiens
  misc_feature (8)..(8): Xaa can be any naturally occurring amino acid
  misc_feature (21)..(21): Xaa can be any naturally occurring amino acid
  misc_feature (31)..(31): Xaa can be any naturally occurring amino acid
  misc_feature (33)..(33): Xaa can be any naturally occurring amino acid
  misc_feature (58)..(58): Xaa can be any naturally occurring amino acid
  misc_feature (61)..(61): Xaa can be any naturally occurring amino acid
KAKELNMXMHLAGKTGQAKAXLARLAFIRKXRXEAARKKEEERKEKTVPHFQENKRNXSPXISNCNPWEKMPGTWAALPGHLLYLAHPVTWRRCNSPSWPGAPHAWGLLFILEQKLFGGWGGGLGEG

SEQ ID NO: 1022796 - protein, 127 aa, Homo sapiens; identical to SEQ ID NO: 1022795
  misc_feature (8)..(8): Xaa can be any naturally occurring amino acid
  misc_feature (21)..(21): Xaa can be any naturally occurring amino acid
  misc_feature (31)..(31): Xaa can be any naturally occurring amino acid
  misc_feature (33)..(33): Xaa can be any naturally occurring amino acid
  misc_feature (58)..(58): Xaa can be any naturally occurring amino acid
  misc_feature (61)..(61): Xaa can be any naturally occurring amino acid

SEQ ID NO: 1022797 - protein, 363 aa, Homo sapiens
SRLPGLKGGGGWGQFIQKVALRKLGGQPLGVGLALLRGAFTEGLVGPRIRIVDLVPALASFERVPTSSGRGPSSRVCAFGCAPEVSNSVPGFQLASLPANKCATEREFGRSHVGRVETGVASTKDISGERVDRRLLSVACAPTRTQGPAGRRRPCDSGGAHRCGAGQRDVPEGALAAQRACGPTCPNRVRGTVWGHPVVEKKHTRGVWAKTGATTGCDKGDQSVGCGGGPREGAGANTTGESTGRGARRHHCGDTYKGDTGGGRLRRRKTKGPGTQKIPSGWRVETHHEGWTSTNANGGQAREWGRAHRTTRGCNALWARDTKGGKPPRGGDKSTTMRSLGGRPSPNDPGKSPGKTREGENST

SEQ ID NO: 1022798 - protein, 308 aa, Homo sapiens
SRLPGLKGGGGWGQFIQKGGSEAKVHPVAGGLLQGKGDGKRPVRLGGSVKGGRKSPRGGSHSSNAERESFPVAQSPELTTQAGPGAQAEACTALRVASWAARGLPKRGRNPRNAWGAHRASLPSPMGRGLENTGQRTAQLQGLTPGPRESPDPGSGSLPDGASLQWSPQSSAGAFSKLAWVAPRSNMSTRQGLSGKKGPEKSGVHWRREPGATTVWEGGAGPLMAQGKSPGRTAQHLGHMWAPRMPKAPQGGPAPAERGAVQNLVGKTPDEYVGAQQNATPQAGVPQYTTPPAHLLTNEIQSHRATRL

SEQ ID NO: 1022799 - protein, 69 aa, Homo sapiens
MREPTSMSSGRIGKMKATPMAPKQAMKQYMQKLISFEHHEIFSYPEIHFFESKAKKHQGRPNNSSYDDD

SEQ ID NO: 1022800 - protein, 118 aa, Homo sapiens
MGGYCIEFPAGLIDDGETPEAAALRELEEETGYQGDIAECSPAVCMDPGLSNCTIHIVTVTLTEMIRNARPKPKPGDGEFVEVISLPQNDLLQRLDALVAEEHLPVDPTGSIPNASST

SEQ ID NO: 1022801 - protein, 88 aa, Homo sapiens
MVLNLIVYPSVVLWNVFPERCLSGGAVSRYATPEGWMEPKGRCRSAWCFSELGAGEATYTAASRGRSTTNKNHDRRRLSSYNACSVYT

SEQ ID NO: 1022802 - protein, 112 aa, Homo sapiens
MTVGKSSKMLRALLTIGMRCILRRMGRDLQIVQPLRALDKQYDFDPLVICDEFMNRSRPKNCESKQSVKKSGFKGLSVAALRRNLVIHDCRTGQPPKILALLGYHLLGAAGG

SEQ ID NO: 1022803 - protein, 38 aa, Homo sapiens [sequence omitted]

SEQ ID NO: 1022804 - protein, 311 aa, Homo sapiens
GELSSGEPAAAAVMARVAWGLLWLLLGSAGAQYEKYSFRGFPARGPDCLLASGVTGTLCDACTRERDAWPLMMLLLLPWMGWRCWAAPGSCCGQARPSCHCQLQRPRGPAVQCPDPRTAVLRKNDVGLLSCGSSGRCPGAEPGCLRAAAKPDCCPPFQSALPDRGQLLRDFQSRLPYQYLHYALFKANRLEKAVAAGYTFLQRNPEVTKLNRQVFSNYYQGDAWTSPTRSLNGTLEAQPYEGRVPPGCKASYKQRGSSRKQHWGHWPGLSEYLEGLAGPAGLMGLSRGTQGFTGAKIFWSPRGGGVAIAPC

SEQ ID NO: 1022805 - protein, 106 aa, Homo sapiens
WDVVSVVAIEEVKLGVLCEVLSVVVITEVKLRGLCEVDSVVVIKEVKLGGLCEGVSVVAIEEVKLGGLCELVSVVEIEKVKAGGLSEVVSVVVINEVKLGVLLRCK

SEQ ID NO: 1022806 - protein, 119 aa, Homo sapiens
PTVKAWTVWDGVAISPAELSVSLWAQGCSDSGSQVLVSALRRRTPPPVCSRADRSSSKVSMAWLQFALTAQELLNGGLKALDPTIFATCNCSREVKVLFARKGLLLGFSNLSILGLYTE

SEQ ID NO: 1022807 - protein, 155 aa, Homo sapiens
  misc_feature (53)..(53): Xaa can be any naturally occurring amino acid
  misc_feature (63)..(63): Xaa can be any naturally occurring amino acid
  misc_feature (66)..(66): Xaa can be any naturally occurring amino acid
  misc_feature (88)..(89): Xaa can be any naturally occurring amino acid
  misc_feature (137)..(138): Xaa can be any naturally occurring amino acid
  misc_feature (150)..(150): Xaa can be any naturally occurring amino acid
LSGGPHIFNVFTLYLRNVSGALNTKSTQIRFPSGFSVHLCCFQAISCWDYATXYNGGIGALVXRIXFLWAFVLLGRVVSSCFQLNSWXXVKKFWFHAYSGARNKTNNKFRVLLSHSNRCSSVVPSGQGAGGAHFRNXXAPPMQRQAHFLXAFHNS

SEQ ID NO: 1022808 - protein, 47 aa, Homo sapiens
MKVKPMPSPAVTLRSVDSIHSVRKPGYKPGVFRRTTALSDSDGREVD

SEQ ID NO: 1022809 - protein, 149 aa, Homo sapiens
RQSLAAGERNRLDFGAASDGHWAYTLYSLLQEPLFCVQTPSQLLAPKERFLKKHLAVETRTNGTCGALVADRSRGHYNLTSQIETFNPTLVQNPAGLEEGGHFDYIQVQTQIVANCVVNFCTYNLGVELLRWEEKVGGPPGKKGTICPG

SEQ ID NO: 1022810 - protein, 271 aa, Homo sapiens
MGLLNTYFTGDLSFGPGRDRYTVLTVEKRLRWRIKEEKTGKHQIRGEKKNVDSKRPATHVVAGDKVPSGGSQEQKRRATWQWKRWATKGHTPQGAHKQAQGRPGEQLGLRPKSLLIIRAIVNRLEGLSYEHRHLPGAGRNHFVQAMRCEGSTRRGYHDADGILVMMTGASRQNPRSAGKRVIGIRGPVGRGQKCHVGASNHSGPHAPGNDKALHVTQEQVREQQGTLGATLSNPGLENLVPGRTGDGGHVKRGRNPGAVYKGPGGGEKNRD

SEQ ID NO: 1022811 - protein, 43 aa, Homo sapiens
SGWSVYGFRWRDAGPRTREKLPRCPHQSRRNARRTGPAQYRPE

SEQ ID NO: 1022812 - protein, 284 aa, Homo sapiens
GARPSDSCSTVMFLRLSRDLDGLFQLPEALEVARVDVSSKVEVVWADNSKTIILRPASLYNIEPDDLRRSDYDFALEGSTTRGILGCNGNDDSDRVGDGSMELVDGRAPQRIEEPPIPPLEQAVEALRTTGVVIRGTRHDSKHDVQRRLAAQMDIDPMETRLMETGWQRTGQPNELARVVNRGHHQIPRHQPLSNIDYVEPAADGARATSPTVGSLSKPNSGEDCLLACTSRSSLDKPQEDWTNGRAIGTSTGRRSAAVPDDPSVGSDSDGDGSTRIAVLPGKP

SEQ ID NO: 1022813 - protein, 190 aa, Homo sapiens
GLRQWSRGCSERASGVSRALLQSAPGTPATVGISVGELWPFARCCSHSYVRSLRGLSVSTHLLCFTIYINESQYEQKQEEIKENYTRIVLSPRENSEDDSAFCIWISCWKEKMSCPQGLVPKGTIGIDPLNYLQISSPGVIVPESSGTLNTLGGSHPRSHLIFMNSKKIHPSQYGKDVAEKREKGLYEAL

SEQ ID NO: 1022814 - protein, 236 aa, Homo sapiens
GLRQWSRGCSERASGVSRALLQSAPGTPATVGISVGELWPFARCCSHSYVRSLRGLSVSTQEVGKRRQEVGTQGRKGTKVSKETRFPSGQPLKPGPTCDSCRARGLVFCASPSTYMNPSMKQKQEEIKENYTRIVLSPRENSEDDSAFCIWISCWKEKMSCPQGLVPKGTIGSDPLNYLQISSPGVIVPESSGTLNTLGGSHPRSHLIFMNSKKIHPLSNGKDVAEKREKGLYEAL

SEQ ID NO: 1022815 - protein, 86 aa, Homo sapiens
RVMGGLLALDAVFQIILTVVIDPVKYTQTFTLHANRAVTYIYNWAYGYGWAATIILIGCAFFFCCSPTTKMTFVGNAKPRYFYTSA

SEQ ID NO: 1022816 - protein, 90 aa, Homo sapiens
YWEKFEDENFILTAYRGPGHLDPMGKLLVSNTNGSQFIICPAKTEWLDGKHVVSGKVIEGMNIVEAMERFVSRNGKSSKKITIADCGQLE

SEQ ID NO: 1022817 - protein, 336 aa, Homo sapiens
  misc_feature (267)..(267): Xaa can be any naturally occurring amino acid
GLSTGYFIGWSLTRCGSLRPLPLLSEGLYCGNVVREGQNSVCVVWVDVSVVAGNLPSQVKGSLFFPSVVLSCGVEAVVWSPGGFYTLLFGVPMCVAPCGVVPPTLCVCCVYAKDSRVCVIYRGTNVSLFDNKSVVLVVREGTKCPRPPRRFKECVERRKWRVFAVYVKSLREERHPTRGVSSSVCKPPRVLPPLEEQWGHPLPRVDAHRDDIQTQTPLCLFEMCSYTLPMIIFVRTTGFLSLYYDNARDEGSYKGFSTSLKLLGNRXVCVGAPKEWGKKHKRAKQRGLTNVVHQMSGRRCLFSPAVIYHRTTSEGGLILEHLFWRPQTERTPFVWT

SEQ ID NO: 1022818 - protein, 47 aa, Homo sapiens
MIPFTAVAIGRHEVPADPRGAHLYLTHYEEAERRGGGGAPLMALASG

SEQ ID NO: 1022819 - protein, 60 aa, Homo sapiens
NLATLDSGLNKKFFSVCISATSSSGNDFRSFFFLCFFGKIITSASAMLPCTAFVPPGPQP

SEQ ID NO: 1022820 - protein, 242 aa, Homo sapiens
TRQACAGNMAAPGERGRFHGGNLFFLPGGARSEMMDDLATDAAGPGRGAEMTLAASDLDSQPRLPEPPILLVAEDASRRRPVPGPCFDFKERWIAEARRRPGHQSLGEDFARLDRRGTWDLHNSMGLSSRILAVLHNPDLPNPRNSSKDIGPKFQTLCSKVLTPCEECAEDPKKKGCAGNHPDTGSPGMLHTVAGHVHNEVNPHSWAERDFECSKSGERGAYGWKDAPVSGGGQHSFPGEQQ

SEQ ID NO: 1022821 - protein, 111 aa, Homo sapiens
RQQVSDPQAQPCDVVLYSHVSGPGRDLGMEPTEPRAFAAADFRPTFPSGGYYTGNCAGEDFAIVCFWILDVSERVSQFHTAEIAPKCYKFYQTKNSPFGMPAGSQWRLSYA

SEQ ID NO: 1022822 - protein, 289 aa, Homo sapiens
AVLRGAPFRLTAPGGGRQPWLLAGSGGGCGGAMASGGGGGNTGAGGWAVGLGLMPGPGSGSEAYGSDVTAADVTADGVTAATVLTAVGRLATTVCGCALLRLGWQVLAAAQAVAGVGDTPLRQAWVTAAALKRLSSGMLSYIVPSEPFFLLSCLTFWPSFLRGSLAASLISLTFQQSFPRGAITLTIHLQELLQYKTAESSSASAFESALGCAVLAVLGHYVPGIMISYIVMMSLLLWPWGVYHELIPEDVHSAWSPWFIALGLRLKAESMPASTTDQGTVSGKWPPRL

SEQ ID NO: 1022823 - protein, 321 aa, Homo sapiens
AVLRGAPFRLTAPGGGRQPWLLAGSGGGCGGAMASGGGGGNTGAGGWAVGLGLMPGPGSGSEAYGSDVTAADVTADGVTAATVLTAVGRLATTVCGCALLRLGWQVLAAAQAVAGVGDTPLRQAWVTAAALKRLSSGMLSYIVPSEPFFLLSCLTFWPSFLRGSLAASLISLTFQQSFPRGAITLTAEGCGVRRPGRHLLSVPEFVPDTWLRRLVTFPIHLQELLQYKTAESSSASAFESALGCAVLAVLGHYVPGIMISDIVMMSLLLWPWGVYHELIPEDVHSAWSPWFIALGLRLKAESMPASTTDQGTVSGKWPPRL

SEQ ID NO: 1022824 - protein, 35 aa, Homo sapiens
QCVCFIFLQYGLIGNVVLMNVRYNFPFETPAILRR

SEQ ID NO: 1022825 - protein, 334 aa, Homo sapiens
EKNEIAPHQLERQNKEAWVKLHEMEGTVHVQVQGPPSPSSKAKIAQLEEQLEDEDRRMRQADCMKVRRTEKKLQDVLLQVDDERRNAEQYKDQADKASTRLKQLKRQLEEAEEEAQTGQRHTRQELQRELEDATETPDAMNREVSSLKNKLRTLGTIDVMSCPGEWTGKARGWLRRKQVDRKEAWGMRPTHDDLNPLSPEDLRWMAQNDCTAPETQEPSRKEHTNPGRPMRTDRENSPTQGATNTKNQEQEARHGRNNRETKTRVRPHATRTPPRGPGETTQTQHRTGERENTTRGNTWEQSKREKRRKTEKKRRDTAERKKKENTRDKQHREN

SEQ ID NO: 1022826 - protein, 290 aa, Homo sapiens
RWVPERSPCPEAAAPPPGPAGLSDNFTKAPSWECELPLPPPREDCCGTHGVCCAGLAVSVAVSPMSPQDGAGGSAFSFHGGCLRAPSPPSRRDAGLQVSLGAAETRSVATWAHDTSMPACCLPCLPRMCWVAVPWLSAGGAVAPPEPAEPVRDCDAGTEKGIDCGDGILAAAMEVEVLGMAIQKHLERQIEEHGRQGAPEHAPPPVPGPGGTGSVRTWPPDWCLRGVSLACYARCCIVCAGGVLLGGGTQGDVICPHLYAEFLTSQGPFLITGPRKGPSGATGLEGGVQH

SEQ ID NO: 1022827 - protein, 95 aa, Homo sapiens
RLQALAPPRGPPLSCCSEGSKYPDNRSHSPAPCSPLAAGCGERKRVREKKPKANPLSTSPLRRPSLGSSEPSGFSSERPLVSLPISILGALVPPV

SEQ ID NO: 1022828 - protein, 270 aa, Homo sapiens
AGSSPLLLAAGRAGRLLQRPRWLRRPERSRWQAAAGDRQQQQQQQQQPLASCPAALAERSPTSRVTPAVLRRHDLTSDGAPSRPPAPRQTPSGGPPDSPSAFRRQPEPQPERHPGATATATSPPGIDLRHSPGFRTPAASFLWATGSLCARKSWKVGNAPCPKIKLGCAQPAPAAALQRPAEPTTAWAARAQEDRDAPWEVRQVTKVGRFHVARAGFELRSNSDASWVIPKTLPGGPSKHVEQGPRFPTGGDSANEHSACPLEVVLLPDR

SEQ ID NO: 1022829 - protein, 308 aa, Homo sapiens
FLLGGSRKRVLVRVERATVYSVEQDNDLELADAYYLGGVPPDQLPPSLRVALPHSEAVRSRGVRFKGIERPWDKYVDHRSGVNERTGREPPVLAPHGTCVVVARHALFQLGHVSFPSPGVVSENVDTAPLDDTYYIRTYGRSHSDVSGTDARGSYIPVTSPGWAYVQVSPASRDRVSHTVSLRTECEILNAGFADGAPPISVAFYSNATGVWLYVDDQLQQMKPHRGPPPELQPQLRGPRGSSWELAESGTIYNFSGCISNVFVQRLLGPQRVLICAELGASCEPVCPPGANPAGLGGAAGAPRGAGL

SEQ ID NO: 1022830 - protein, 35 aa, Homo sapiens
TSSRPEYKVLFCRPQSSRLSRLSVKKRIGSAISSD

SEQ ID NO: 1022831 - protein, 411 aa, Homo sapiens
  misc_feature (14)..(14): Xaa can be any naturally occurring amino acid
  misc_feature (36)..(36): Xaa can be any naturally occurring amino acid
  misc_feature (40)..(40): Xaa can be any naturally occurring amino acid
  misc_feature (265)..(265): Xaa can be any naturally occurring amino acid
  misc_feature (277)..(277): Xaa can be any naturally occurring amino acid
  misc_feature (389)..(389): Xaa can be any naturally occurring amino acid
  misc_feature (395)..(396): Xaa can be any naturally occurring amino acid
  misc_feature (407)..(407): Xaa can be any naturally occurring amino acid
AWPALRTLSSLRAXAPRECPSMPWVMECLPAGACCXLLLXRTAGTLRTLENGWLLAGAWSLDPAQTWAPAWPEPLGMSGGRKGPDEAEESQYDSGIESLRSLLLPTRVHLGSSLRALRTAAPSPAPILRDTVKEPQEKEDADGERADSTYGSSSLTYTLSLLGGPEAEDPAPRLPLPHVGALSPQQLEALTYISEDGDTLVHLAVIHEAPAVLLCCLALLHQEVLDIQNNLYQTELHLAVHLDQTGAVRALVLKGASRALQDRHXKKKLSCGLPAPXLACARCLLEGRPEPGRGTSHSLDLQLQNWQGLACLHIATLQKNQPLMELLLRNGADIDVQEGTSCKTALHLAVETQERGLVQFLLQAGAQVDARMLNGCTPCTWQLAGVSWXLITLCXXSDSCCGCGDEXPGLT

SEQ ID NO: 1022832 - protein, 172 aa, Homo sapiens
IRDRGVCGRRLIRIIASSFSVFLFNTENKLLLQQRSDAKITFPGCFTNTCGSHPLSNPAELEESDALGVRRAAQRRLKAELGIPLEEVPPEEINYLTRIHYKAQSDGIWGEHDIDYIWWVRKNVTLNPDPNEIKSYVLCVKGRTKRTSEKKQPGGEIKITPWFENYGSDFSL

SEQ ID NO: 1022833 - protein, 123 aa, Homo sapiens
MYVIVVYDVEQERVGKVCQLLRRYLRWVQNSAFEGELTESQLERLKEDLKAIIDSEKDSAYFYLLRDAKWMTEGDNRAKQGILLTIFVIAPSKTLASSGINNEIRWLSFVIALSRGLSCSLSF

SEQ ID NO: 1022834 - protein, 358 aa, Homo sapiens
GGGCVRAAAAEQRSRGAAAGTRHPPPGAGSVLSSTATMTANGTARGGCRSSSASSTAGNKYLTAEAFGFKVNASASSLKKKQIWTLEQPPDEAGSAAVCLRTTWAATWRRTRTANVTCEREVPGPDCRFLIVAHDDGRWSLQSEAHRRYFGGTEDRLSCFAQTVSPVREVELCDICDAPSGSTSTASPVKRYAHLSALAGDEIAVDLDVPWGVDSLITSAFQEQRLQRADRLSTVSAATKALGGGPEPAWYTAGVQTGRAFGMRGGLGRRDQGAQRGQGTRLARKRPLAGPKCAQYSSRGHNAGSSPGSAADTMRQGSKPEDMPDHVLSTADCVGPGATERVDWGATVQSYPSSAEKH

SEQ ID NO: 1022835 - protein, 171 aa, Homo sapiens
GGGCVRAAAAEQRSRGAAAGTRHPPPGAGSVLSSTATMTANGTARGGCRSSSASSTAGNKYLTAEAFGFKVNASASSLKKKQIWTLEQPPDEAGSAAVCLRTTWAATWRRTRTANVTCEREVPGPDCRFLIVAHDDGRWSLQSEAHRRYFGGTEDRLSCFAQTVYKKRSGE

SEQ ID NO: 1022836 - protein, 386 aa, Homo sapiens
IDFVWITIIKLVALAKSLRQRRAQASYAGPPPTVAELVEAHTNFGFQPDTAAAGWAQRSGALRASEAGALAHGAEEPRRPERMTSLRHRQDCWTLIESRQVTGDAIVTLSPCPPPGRTRDCTERAKTVCPRGLTVWCPLQRVGRVALQGQQLVSFNREASGNWSVYWPRALYESTVLVHGCRNKLYLTPGFLTLVPYLSLILVLNDPIGNTLIHGGRTTDHSQVTQSANHNPPRRRRTQRRGLRPIVAYTITLTHSSPQHLDTSLETATKRMDGHRRHVDTGATTTDRNSETTMATKHAATSLDVSASCANENHRGHDKNHSEQANKKNKEHQTTHATGRHSPTPRFARHHRNTRRRRTSTQRQARRTHTPAAHRGPPHATHRPTR

SEQ ID NO: 1022837 - protein, 217 aa, Homo sapiens
RLAPPDDLDLFPTPDPHYEKKYYFPVRELERSLRFDMKGDDVIVFLRIQKDGLATTFWPATFVQNRTASQVRVLTAGPGQEEVHAAYPAQAAAKNLSVFLPASPPVLDACWALHCRTWSRSSDKHDVARACVDRQRDSCLLLRHAPGSFYYIDACYETPVSRYLSELAACAERVPRWQDRRSHYCVMGARPTPEELCACYEGTDWSGCTLQEFMDCP

SEQ ID NO: 1022838 - protein, 143 aa, Homo sapiens
PARGEPQPGQLERIWGKEENGGSQPLSSFPPPPSLIGCASLEPNFSRSRLHLSPEGVGAPRHGAGGAATNPGVSISGPLGGGARTGSAPAASARPISLPLAASASLSPRPFLPSQQAASLLPPPPPRTRLPARHLPPVSHSCH

SEQ ID NO: 1022839 - protein, 136 aa, Homo sapiens
  misc_feature (88)..(88): Xaa can be any naturally occurring amino acid
  misc_feature (100)..(100): Xaa can be any naturally occurring amino acid
  misc_feature (116)..(116): Xaa can be any naturally occurring amino acid
MYGGSVGSQPPPCGSSSHGPVPSSPSQEPPTKREYDQCRIQVRLPDGTSLTHDFLGPGNRLAACRGSICGAPPVGTELRWRAMDPCAXCLSGFPMTGLLXKLTLERPLQEPGTRAXLAVLICWQEMSQLRGLCPIV

SEQ ID NO: 1022840 - protein, 306 aa, Homo sapiens
  misc_feature (117)..(117): Xaa can be any naturally occurring amino acid
  misc_feature (129)..(129): Xaa can be any naturally occurring amino acid
VRRRRTTLKTALRPLTFRAPEMAPRTGMSVASLGNEQRRGPRRAQGSELVAANQGLISDDSGLSSRMVFSWDQTGTKVDLMSTSTSPAAMLLRRLRRLSWGSTAVQLFILTVADPVXLGGPPLLGPLGXPPPGSLSPDFYTLTSICAIGIMNQMSQEFLQQSLEEEGGGVASTILRSFRSAKWRQMPIVWQGHPPAWLVITIITVDRQPGFHYVLQVVSQFHRLLQQCGPQCEGQQIFLCNVERSVRHFDAKWSSKYCPGGQIAMQGLRLIWADETFGSNWVATGPEQGQSRRTPWNYNQKARWYT

SEQ ID NO: 1022841 - protein, 333 aa, Homo sapiens
  misc_feature (87)..(87): Xaa can be any naturally occurring amino acid
  misc_feature (143)..(144): Xaa can be any naturally occurring amino acid
  misc_feature (165)..(165): Xaa can be any naturally occurring amino acid
GEAPAHDLKTALRPLTFRAPEMGPPRDELASLGNDQKAGPSARAGDRAGRRQPGVWILRRVGIWRLGVFQVLDVLFSVRAEDHVERXSVTRHDALQTCFQACPVHSVREGMLVDLSLLRGKQLADLSHLSIRNTVGERSQSHXXDAPPWTVIDRNVSNNIYSIHXHCSSLWLLLRSHNWRRTRGCPARHKAWKRRVEAALHYFEELPSAKWRQMPIVWQGHPRAWLVITIITVDRQPGFHYVLQVVSQFHRLLQQCGPQCEGQQLFLCNVERSVSHFDAKWSSKYCPGGQIAMQGLRLIWADETFGATGWPQDPSKGKAGGHPGTITKKPDGT

SEQ ID NO: 1022842 - protein, 123 aa, Homo sapiens
IGGRVDPGSVIRVKGFLISYTATGSGICGKGFLISYTVPGSVICVKGFLISYTVPGSVIRVKGFLISYTVPGSVICVKRFLISYTVPGSVIRVKRFLISYTAQFLKCKRKTRVLKKESTRPRI

SEQ ID NO: 1022843 - protein, 200 aa, Homo sapiens
MRVEYKSRCQSYNRRPRVAELMGQGPVAKGLLPRSPPGSGVFNVSASFDLCLHAILQLVTRAFPDEIRVETGGGPRRLGYRADLLVDCAEGRFPLQAGAGIILKGLQPPVSPLTIGALWLGDFSASSSSNGHGASLNNAGLRGTEVVQVKAGTRGVRDVKLATGPHRVKLLNLQEGGGRDTQDAEDRPGIRARAAYKTRE

SEQ ID NO: 1022844 - protein, 97 aa, Homo sapiens
GLQKALFPLGPGLVRIVKKAAYWAWRERLRQKALLLVQRGPFRKSRVGLKKGLYSSVLEEGEPFQKKNTRPAQPSRATQAVVGGVAQVWSPPILSVK

SEQ ID NO: 1022845 - protein, 228 aa, Homo sapiens
GLQKALFPLGPGLVRIVKKAAYWAWRERLRQKALLLVQRGPFRKSRVGLKKGLYSSVLEEGEPFQKKNTRPAQPSRATQAVVGVCGSGVVSTHSFCEISLTLLLSIIGEGGVSSQREELSQREMWGAPGCGQRTPQGACERYPKRGAVGLKLFSPPRGPMWPELFSCGASRGGVYTPQLTFFSGVGFSWKCLRGKEETAAAHALVFALLQGDRLMAPRAFLPSANFAE

SEQ ID NO: 1022846 - protein, 136 aa, Homo sapiens
DDGGDLTNLIHQPSYPHGFCQAIRGISEGDHDWGSTSLYKMMANGILKVSAINVNDSVTKSKFDNLYGCRESLIDGIKRATDVMIAGKVAVVAGYGDVGKGMCPGPAGVFRSPAVIYHPRLSPINCNCRAANGACY

SEQ ID NO: 1022847 - protein, 215 aa, Homo sapiens
EDPPQKKKMKKENKIIVEAKLRATQEQEAKQKLEEDAEMKSVEDNRCECLLANFRGAFSMIETCREDLHHTFLEIMVDNKMDRLRSEEPKAGDQFSFQQQTSQGSHWVKPKHATNGNPTIKEQSKVTWEVTSTGAGGNKASHCKHNINQQAPTSNPSNTMAQSTKVDQHFNRHTQAQGSMKAAAAWVMVNRQQVTVCRAKNNEIVLSACMNMNEP

SEQ ID NO: 1022848 - protein, 102 aa, Homo sapiens [sequence omitted]

SEQ ID NO: 1022849 - protein, 56 aa, Homo sapiens
ASARRAPRPRPRPPALRLDRVDRPRVCDVVYSLALLRSTKKSDFVHVIIGEYTNRS

SEQ ID NO: 1022850 - protein, 251 aa, Homo sapiens
MDARDSTTCDEARKQGEMRSRDTRAISMEGTSAIAVDEELEKHGIVYQATHRKQLGRVYETWVITEENLRWLTLTKLFDDAFQGSDSTCESLVKDFYSKLGLQYRDSSSEDEIFPAYQTIIEIPDDTMTDCSSVIDFRCMLGRTHTSTTDQNVREGFWLGLNGNVPGSQNVQEKLLGMLFDSADDRPTDSGPKGNLDTPVRTHPQTADLDITQAISGSTEPKTGHQRNYCLTKRARNQLSHLDPGSTRADK

SEQ ID NO: 1022851 - protein, 36 aa, Homo sapiens
RIPNRLRNPSRRVGACVRALFSHLFDSPSPGCQPQS

SEQ ID NO: 1022852 - protein, 175 aa, Homo sapiens
KGPILPTHTLLSQPCPPGPCPPSTQELLHGNPGFPPKVAPSSRATARVSRMPTVGSLPSSIPTACPWNPSCESLGSWHGWTSSDSRQEDAEEKEESSIKRCTSTKLSHPKYHKHGKHSSSFRPPLPAVILTDTGRWTLPLKFSQIAALPIQLEDAHVVLGRNVAPVHPPPPYLPP

SEQ ID NO: 1022853 - protein, 306 aa, Homo sapiens
  misc_feature (8)..(10): Xaa can be any naturally occurring amino acid
  misc_feature (12)..(15): Xaa can be any naturally occurring amino acid
  misc_feature (19)..(20): Xaa can be any naturally occurring amino acid
  misc_feature (23)..(23): Xaa can be any naturally occurring amino acid
  misc_feature (26)..(27): Xaa can be any naturally occurring amino acid
  misc_feature (303)..(303): Xaa can be any naturally occurring amino acid
PPPAPAFXXXPXXXXPERXXLGXLIXXPSPANPFQTSSLGGTPPRQPASPPAPALPGFPSHGISSRSLGDLSHLLAIILLLLKIWKSRSCAGISGKSQVLFAVVFTARYLDLFTNYISLYNTCMKVVYIACSFTTVWLIYSKFKATYDGNHDTFRVEFLVVPTAILGFLVNHDFTPLEILWDLLHLPGVSGILPQLFMGEQDRQRRRPSPATTCLAQGVSPHALSLQLWIWRYHFEGFFDLIAIVGRPGPDSPLLRFLLPSIITKVLKGKKLSMAGHNPGSFSFSLLGSSGRQRKAAEDEELXIQG

SEQ ID NO: 1022854 - protein, 122 aa, Homo sapiens
SAPLIASRLHITITVITFIITITTITFITIVITITFITIITIISTLITIITTTTIITITFIITTIISHYHHHLHHLIITITFITIIHLITSTIIITIITITTIITIFTMTIMIITFIITIIF

SEQ ID NO: 1022855 - protein, 30 aa, Homo sapiens
MAGLRGAGLGRMWKGSELCPPSLKVFMSRV

SEQ ID NO: 1022856 - protein, 52 aa, Homo sapiens
MAVPNWLYLKWLHLNGCYLNGCYLNGCHLNGCYLNGCYLNGCYLKGHRARLR

SEQ ID NO: 1022857 - protein, 559 aa, Homo sapiens
TRLGSAAPFWVPRPKPLDSVCEWKGGHCYLSAAPAALCPRWIPADCGSFKSLSRVTLPHRSAPLAMLGCCGPGLTLAFGLLGLGAVCRGAGVLAVLGVTAAGAGCLWTCLCAWLPCACPVCCAVQPEFAPFVPCVVTPAVLGELGQCTVACLCGLGCMLNEPAELYCACATDPAAPCCVLLLGVWSMLADPELSPAVLTVLTRAAMCEFLLRSDSVHSCSTVPPNGRLPAAVASTAGNLAATATTVEPEGMDDHGFYLSKLRPGAHLTECLTTGEYKPVGPEYQHVMFEWASTARKGVELRNPGSNTEANLKGTGNGYHLYTVHVEMCVLFRRGLLNRSKQQSKETNTNNRHIKHQNRRVRTRAGQEREEARSEDKRRRDPHEEVEMRRERGESREEERGRRAPKVRQSGRERTAEANRRRRRRGKKEEKQETQEGAKPEKRATKEKGSQSSNERRRGEREAERRSKTRRSEGGEDRESRRGEEKRTRRDAETKRGQSKRDGRRRGKNEGRGAAAISQKRQSTTRKSRKEESRTGARDERRETEEDGARHERQRRNTNT

SEQ ID NO: 1022858 - protein, 338 aa, Homo sapiens
  misc_feature (120)..(120): Xaa can be any naturally occurring amino acid
  misc_feature (127)..(127): Xaa can be any naturally occurring amino acid
  misc_feature (130)..(130): Xaa can be any naturally occurring amino acid
  misc_feature (157)..(157): Xaa can be any naturally occurring amino acid
  misc_feature (159)..(159): Xaa can be any naturally occurring amino acid
  misc_feature (172)..(173): Xaa can be any naturally occurring amino acid
  misc_feature (178)..(178): Xaa can be any naturally occurring amino acid
  misc_feature (205)..(205): Xaa can be any naturally occurring amino acid
  misc_feature (209)..(209): Xaa can be any naturally occurring amino acid
  misc_feature (246)..(246): Xaa can be any naturally occurring amino acid
  misc_feature (275)..(275): Xaa can be any naturally occurring amino acid
  misc_feature (277)..(277): Xaa can be any naturally occurring amino acid
  misc_feature (296)..(296): Xaa can be any naturally occurring amino acid
  misc_feature (299)..(299): Xaa can be any naturally occurring amino acid
  misc_feature (308)..(308): Xaa can be any naturally occurring amino acid
  misc_feature (334)..(334): Xaa can be any naturally occurring amino acid
GGENGPALRSDLTARMRRGAPRSCGRPVVGAAERFRARTGTELVLLTCGPACHHPARAPVPMLPMVEEPWRRQPRRCLHDIGTGPQGLPLLLGLLLPPPAPQATQSPSPSPPRPTLAREXNEEDEDXPTXTETSGEQLGISDNGGLFVMDEDATLQXLXPFCESDPESTDYXXLSEEXPAGPPTFSVPPSLSPPTQQYAKSLPVXVPVXGFKEKGHRSRSSDEENGPPSSPDLDRIASSMRALVLXEAEDTQVFGGPATAAAYTSDFQKLKRKYXVXGGSARAASAPSTLRPAHSXACXSEAIGTGSXVSIPRLSALQSRVFSQTAGERDCPFXLVLF

SEQ ID NO: 1022859 - protein, 273 aa, Homo sapiens
  misc_feature (162)..(162): Xaa can be any naturally occurring amino acid
  misc_feature (179)..(179): Xaa can be any naturally occurring amino acid
  misc_feature (199)..(199): Xaa can be any naturally occurring amino acid
  misc_feature (272)..(272): Xaa can be any naturally occurring amino acid
QNILLLLKTLIPPVGAPFGHSMTLDLGGAELDAMGGCGGSRRRFSDSEGEETVPEPRLPLLDHQGAHWKNSGGLLAAGPFATNFSYVVMLSARPDILSPQEDIGKPEAMWTQAQRRSPHNSSSRFDLQPPVSYGCCAPWRTSLPHTRHQIVGLPPWPFHPAXPYSPPGSSVQWRFCACXEASVPGLPFSHFCGGPACCXCGSSLASSSGLVGGHLPLPHCLLPQGRDLLVVLRDWGSWAAGGPAYLGLTQAGLSPQQTLLSMLGIPALLLAXY

SEQ ID NO: 1022860 - protein, 330 aa, Homo sapiens
MPPKQGCKLVGGKHATGGRKPQRQSWAHAKKAWTYFSNVGKVCNSVLQETRPGPRWITRVTELELGYVMQQLGIANLAEPTRGNLCGHPPGSENAKLPRGIIKHFRVATLLPWSNTCWHDQPKGQQGDASFEQCQPRGSTGSHLASRLDQLPINQDPHGALEIPAVIPYSLEKRRLTRAREQVCRPGQIDPHGAMAHDAHTLALMATTMSRFRRPPATPKAHYPPRYEHSLPETGRSTRAPGSAYPKGFRPKTQPSRETKALRLSVRPHCGPHEPGDPTADHAPHQHAPPDTSNSDRPQQSTRKTPRAERSHPTDTQNTDHRAPHARTHT

SEQ ID NO: 1022861 - protein, 157 aa, Homo sapiens
MPTLTVATPCRVFCKYGFYEVFKVWYTQYVGEENTYLWAHQYIWLTLAVGEFFADIGLVLMESCLKVRIQTRQVMANTWRDAVPQGIRRRLKAYSKEVALSGEQVTYPRRRCLVGRREAGSGAKPRRKQSQQRALGRHTGGAGPRNGNGNKRGPARK

SEQ ID NO: 1022862 - protein, 146 aa, Homo sapiens
MPPESSQVPAALHSKTWGWMVPPSWFGTKTKVLSYEEAEVRKHFPVAQGHVSGTLGSTTKGVWHCLDHRNGSLELGKDLKAGDLVQPLPPGVWPEPVLVVLLCVWPCPGLQGVAAVKVFKIPVGSQMAETPGTLHSPQLWQESPQP

SEQ ID NO: 1022863 - protein, 101 aa, Homo sapiens
MITGIPHRNRMSMARILSILSVVSSYVLSGSVAWGIPKVRQSLSSFLCLEQFIKVDIEGHPLEQQALSVAAVYNDRPCVGIVASERTGVGKSLNVKRLHDQ

SEQ ID NO: 1022864 - protein, 39 aa, Homo sapiens
MAQSDTVHQHVGVHQVAVDLLQEYLELCIGVDIFIESLE

SEQ ID NO: 1022865 - protein, 86 aa, Homo sapiens
GLIDLQGAHPNGQTLGERPFPVSGTAPLGPTGAPAMGFPKEHSDLEGELKPEGPRMYKNGRPRSLVNIARSMPRRQAVSNIDARTL

SEQ ID NO: 1022866 - protein, 393 aa, Homo sapiens
GKPRHTGQIGGARKQGAFVHESLQRAQFTTAHPLLAAGQEGVCHISKPWSVEGRKKEVVHEVTEIHRREAENLPSEGAAVGEPPKREAETLCGEQVSGVHYPYIGLHIHKRDVALAEVDYTSLYAKIAVARGTKKMFPQGDSYTHLQTLCVFSIMWTPSLIADYPNLGASHVYHSETTSISPVRGTLVARGTRGPPVYSNLPPKRERSQCGDHVKRRDTTTGGGVVHITHTERPHHHVGEERGTSTENPTYWARNAPWWAQDPVAPHPNTGQDNTYTPRTLDSNTSRGVTNPRGVGPTSGTPTHQGPFNTHRPLGSSSPSKHYHGSPTIERTTRGPRVFPPPNSGERPPQISCTRKHLPRGQTTARHNAASDKEQDTTVRGNVLANTPLLGRR

SEQ ID NO: 1022867 - protein, 155 aa, Homo sapiens
CREPIYLPYTCTVIPRKGKRDARAVCHTSRLRYCARDGSTVAAAVGAGKRGTGPKKCPIDRAGRVADLTEQYNEQYGAVRTPYTMSYGDSLYYNNAYGALDAYYKRCVLTGPMRQWQLQLPPGIITQKQTLSQVPPVKNTCMAVTSPPTLSILHK

SEQ ID NO: 1022868 - protein, 298 aa, Homo sapiens
LVAVRALVRMVECMYIEKPCPGEATEQEIARQLFEPVCGRVLECDISYRITGFVHDEKTMTGELTDAEEQRRHVIAFTTRSVEDEPIKRWKPSERIRAKPSTKLHVGNISPTCTNKELRAKFEEYGPVIECDIVKDYAFVHMERAEDAVEAIRGLDNTEFQGKRMHVQCVTPSRLRYCARDGSPERLLSVRERGALVQRVSIDRAGRVADLTEQYNEQYGAVRTPYTMSYGDSLYYNNAYGALDAYYKRCVLTGPMRQWQLQLPPGIITQKQTLSQLPPVKNTCMAVTSPPTLSILHK

SEQ ID NO: 1022869 - protein, 82 aa, Homo sapiens
ADTDLQRLGSSAMAPSRKFFVGGNWKMNGRKQSLGELIGTLNAAKVPADTEVVCAPPSAYIDFARQKLDPKIAVAAQNLLTK

SEQ ID NO: 1022870 - protein, 198 aa, Homo sapiens
MVWGLTAEKRRSVVTPARVQFKTNPGVMHSSRPQEMAAVKEFPEKLLPPGLTSRMANQCSTPATWGGLSKAERGTILDLSRSSPCPHPSMTLVRFPHRPLGAGGNDLAGPSFLALSHLALICSRRQAAFLSISLEAGPQGSSIGGATRQTGERGTKPLTQLTQDLTHLAPLWAPNCDLMGLDPLGTTQAPCPKLILPK

SEQ ID NO: 1022871 - protein, 293 aa, Homo sapiens
  misc_feature (2)..(2): Xaa can be any naturally occurring amino acid
  misc_feature (20)..(21): Xaa can be any naturally occurring amino acid
  misc_feature (34)..(34): Xaa can be any naturally occurring amino acid
  misc_feature (37)..(38): Xaa can be any naturally occurring amino acid
  misc_feature (43)..(43): Xaa can be any naturally occurring amino acid
  misc_feature (48)..(48): Xaa can be any naturally occurring amino acid
  misc_feature (57)..(57): Xaa can be any naturally occurring amino acid
  misc_feature (65)..(65): Xaa can be any naturally occurring amino acid
EXLQKSRIRINSLSAQLSQXXKQLAAKEAKLRDXENXXARERXTSRRXLAEKEREMXYFFLRMQXQLDEYQELLDIKLALDMEIHAYRKLLEGEEGGYACPPALPRSAAVAVLPLTRSQTQGGGSVTKKRKLESTERPHAGFLTSHRIVTSEVAMCPLSTRSDEIVWHARQGYCYRVCVNEVTMMDQSMGKSGRSSCQNGDDPLLTYRFPPKFTLKAGQVVTIWAAGAGATHSPPTDLVWKAQNTWGCGNSLRTALINSTGEEVAMRKLVRSVTVVEDDEDEDGDDLLPITTT

SEQ ID NO: 1022872 - protein, 282 aa, Homo sapiens
  misc_feature (2)..(2): Xaa can be any naturally occurring amino acid
  misc_feature (20)..(21): Xaa can be any naturally occurring amino acid
  misc_feature (34)..(34): Xaa can be any naturally occurring amino acid
  misc_feature (37)..(38): Xaa can be any naturally occurring amino acid
  misc_feature (43)..(43): Xaa can be any naturally occurring amino acid
  misc_feature (48)..(48): Xaa can be any naturally occurring amino acid
  misc_feature (57)..(57): Xaa can be any naturally occurring amino acid
  misc_feature (65)..(65): Xaa can be any naturally occurring amino acid
  misc_feature (142)..(142): Xaa can be any naturally occurring amino acid
  misc_feature (162)..(162): Xaa can be any naturally occurring amino acid
  misc_feature (164)..(164): Xaa can be any naturally occurring amino acid
EXLQKSRIRINSLSAQLSQXXKQLAAKEAKLRDXENXXARERXTSRRXLAEKEREMXYFFLRMQXQLDEYQELLDIKLALDMEIHAYRKLLEGEEERSTPVPQPYLAAQPWPCSPLTRSQTQGGGSVTKKRKTGVTLRDRSXISQNARTSGRVAVEEVDEEXRXVRCVNEVTMMDQSMGKSGRSSCQNGDDPLLTYRFPPKFTLKAGQVVTIWAAGAGATHSPPTDLVWKAQNTWGCGNSLRTALINSTGEEVAMRKLVRSVTVVEDDEDEDGDDLLPITTT

SEQ ID NO: 1022873 - protein, 175 aa, Homo sapiens
MVAMAVGPSGCLVPALGVRLLLAIVVHEAVSDFGAEIFIGGMQRVRHLLGQLALQLLVIFSGQLNVVKVGFRMAERVGVQEEGTILKPERLYAGDYFLKFVDEQVGRFPQVQALVRSDKPKLCRGLQNQVCPVVTDPVVNSFGDGQWGTWLKKLSILRMEHRQCEEFLSEKLERI

SEQ ID NO: 1022874 - protein, 253 aa, Homo sapiens
MACWRTEPVSGACAPPPPLKDESGRRGQEPTEARLNTKRPDIWESSAAGGRSVCPGDRYAQPYMQGIPKTDISETDRDKPTGEQREQRHHYHDEVTHKSRQEKQTQKEEDGEPPKETGQQMRGETQTKKGDNHTRGEGKHEINHTEKHEEESEKRQDRTPERDKRERTGEQNKERQEEGYDRDKMGKYKDTQYTRTHRHRQKDGEITYKRHTPEHQERRQQQKEKEKATKEREAKTENDVEKHNTENNRINTG

SEQ ID NO: 1022875 - protein, 305 aa, Homo sapiens
GRAARALGKGGKGAGSRQGGVRPPDPPRLPRLARNKGTEMIEMACGRTEPVSGACAPPLLLKDESGVSGGWPTGATCTNEACLCVELLLAGTELLVLGRCCAICGVPSRCGRSGKPLGPRAPPPVVPRLQQHRGGWPQAQSAGDGPACRIPLWADACSPGRGGGAAGEGGLGPELGSPCSSSTPAMAISPPDTWGAGGGQEEKYLLMYGGGDTRLPHIRDINAAPAALKSGTCDPAIHPPNIIAGARKILRLTITADFGNTGSYAIYTETYLKEDRPLRLNPHDSDTGGTIRVSDLNTRKYYSTT

SEQ ID NO: 1022876 - protein, 204 aa, Homo sapiens
LLHIHQHWCSINTDLFEYKFVNCRLINSTFLRNKEGCPLDVTGTGEGAYVVYLGSSWGTTGSASCANIGGLPCIMDKIGKASECLLASSVNVPGVLRVSLCLEGTVSRLCSRLLCLFGGVSDCILECAGRVSVELYPSEKMRPQFVELPECTCVSLADCAGDQDLHILRGESTKAAPILFASAALALGSSLALKLPETRGQVLQ

SEQ ID NO: 1022877 - protein, 214 aa, Homo sapiens
  misc_feature (137)..(137): Xaa can be any naturally occurring amino acid
MRFATHNHCFSTIYFKSMKDSINTVLLVSPQSAFQATSIFAIDIISGYPLFVFKPVVQKNSPRALTQRKATPRFLFIRFFIRSLSLLHISIFSALFYFHFISLRRSSTLSPGWSEVVQSWLTATSNSRVQAILLAQXPECWDYRRVPSLVETGFHHVGQDGLYLLTLSICLPQLPKVLSMTGVSHQTQHFSSPLFHLNFFHFLYTRHIGPVTVA

SEQ ID NO: 1022878 - protein, 35 aa, Homo sapiens
PPDESVIPEMSIHIPGSHLHYCSSGQQSVTLPELL

SEQ ID NO: 1022879 - protein, 62 aa, Homo sapiens
SRAGLMTFNLYEEWTQVQVCRIKTKNFKTVENMSEVPPQNYVNFSYLIKFLAKLAQTSTNSL

SEQ ID NO: 1022880 - protein, 328 aa, Homo sapiens
  misc_feature (289)..(289): Xaa can be any naturally occurring amino acid
  misc_feature (321)..(321): Xaa can be any naturally occurring amino acid
HASADPEVAPWARGGAAGMAGAGAGAGARGGAAAGVEARARDPPPAHRAHPRHPRPAAQPSARRMDGGSGGLGSGDNAPTTEALFVALGAGVTALSHPLLYVKLLIQVGHEPMPPTLGTNVLGRKVLYLPSFFTYAKYIVQVDGKIGLFRGLSPRLMSNALSTVTRGSMKKVFPPDEIEQVSNKDDMKTSLKKVVKETSYEMMMQCVSRMLATPCMSSQVRCMVQFVGREAKYSGVLSSIGKIFKEEGLLGFFVGLIPHLLGRCGFLVGAVNCWATSSMLTWWMTAVSXTPGGLGNDQNPGSQFSQALAIRSYTKFVMEDXVSMLTYP

SEQ ID NO: 1022881 - protein, 97 aa, Homo sapiens
GEVPEAAEVVLVSVERSVGVLLPVGRGLKSFLRGTSLCEEMMSLALRSELVVDKTRRKTEEENCLRNRNPRNYKMLLNYCDTDKDEAIDYHELKGGK

SEQ ID NO: 1022882 - protein, 354 aa, Homo sapiens
MSASAVYVLDLKGKVLICRNYRGDVDMSEVEHFMPILMEKEEEGMLSPILAHGGVRFMWIKHNNLYLVATSKKNACVSLVFSFLYKVVQVFSEYFKELEEESIRDNFVIIYELLDELMDFGYPQTTDSKILQEYITQEGHKLETGAPRPPATVTNAVSWRSEGIKYRKNEVFLDVIESVNLLVSANGNVLRSEIVGSIKMLSLSSRGMPELRLGLNDKVLFENTGRGKANPVELEDVNVPPVCAAITLREMIRDHLLRSHPSGEFELMSYRLDSHVKTFDMDRVGDREAFPTAEIEYMIQRPNSQCKRRSTANNVEIQHSRAQVMPTHPKFKTDGGELKWVPENSEIVWSIKSF

SEQ ID NO: 1022883 - protein, 354 aa, Homo sapiens
MSASAVYVLDLKGKVLICRNYRGDVDMSEVEHFMPILMEKEEEGMLSPILAHGGVRFMWIKHNNLYLVATSKKNACVSLVFSFLYKVVQVFSEYFKELEEESIRDNFVIIYELLDELMDFGYPQTTDSKILQEYITQEGHKLETGAPRPPATVTNAVSWRSEGIKYRKNEVFLDVIESVNLLVSANGNVLRSEIVGSIKDAESFLSGMPELRLGLNDKVLFENTGRGKANPVELEDVNVPPVCAAITLREMIRDHLLRSHPSGEFELMSYRLDSHVKTFDMDRVGDREAFPTAEIEYMIQRPNSQCKRRSTANNVEIQHSRAQVMPTHPKFKTDGGELKWVPENSEIVWSIKSF

SEQ ID NO: 1022884 - protein, 77 aa, Homo sapiens
LTGTEMGDIGALKVEVTLSNCFLGNEKESKIGVWSSAVVDFCCLPLKTVTEKQPSFHLCNTVLLQGTYCPHNTTTNI

SEQ ID NO: 1022885 - protein, 72 aa, Homo sapiens
  misc_feature (10)..(10): Xaa can be any naturally occurring amino acid
GGHVTEMRAXGLRGLHCGGLGVLEAPLGALAGTCTKTVEVLQQAGVRRRRLPGTGKAHKGPLAPLQEEVGVT

SEQ ID NO: 1022886 - protein, 69 aa, Homo sapiens
TFFVSLAVPISLSIDCLDFDLLYPAIKGDTIQFYLGAKLLESQGKVTKWFNNSAAYLTMPTLDNIPFSL

SEQ ID NO: 1022887 - protein, 109 aa, Homo sapiens
RKLVKLRHCPLTTFYQNVGVQLMMDPQLEMLGMQALMDRYGHQAMAGMSMNHGAMGGGDMKGMDHGNMKGMEKGGMQGMDHGNMKGMAHGKMAGMDHGGAQGKAKAFDF

SEQ ID NO: 1022888 - protein, 62 aa, Homo sapiens
LWFTTIPPLYEILQQCDGKLDMLVASVGTGWHHHVCIARKLKEKCPGCRIIGVDPEGSILAE

SEQ ID NO: 1022889 - protein, 299 aa, Homo sapiens
  misc_feature (78)..(78): Xaa can be any naturally occurring amino acid
  misc_feature (97)..(97): Xaa can be any naturally occurring amino acid
  misc_feature (101)..(102): Xaa can be any naturally occurring amino acid
  misc_feature (121)..(122): Xaa can be any naturally occurring amino acid
  misc_feature (129)..(129): Xaa can be any naturally occurring amino acid
  misc_feature (131)..(132): Xaa can be any naturally occurring amino acid
  misc_feature (139)..(139): Xaa can be any naturally occurring amino acid
  misc_feature (141)..(141): Xaa can be any naturally occurring amino acid
  misc_feature (147)..(147): Xaa can be any naturally occurring amino acid
  misc_feature (154)..(154): Xaa can be any naturally occurring amino acid
  misc_feature (161)..(161): Xaa can be any naturally occurring amino acid
  misc_feature (184)..(185): Xaa can be any naturally occurring amino acid
  misc_feature (195)..(195): Xaa can be any naturally occurring amino acid
  misc_feature (198)..(198): Xaa can be any naturally occurring amino acid
  misc_feature (200)..(201): Xaa can be any naturally occurring amino acid
  misc_feature (209)..(209): Xaa can be any naturally occurring amino acid
  misc_feature (217)..(217): Xaa can be any naturally occurring amino acid
  misc_feature (233)..(233): Xaa can be any naturally occurring amino acid
  misc_feature (268)..(268): Xaa can be any naturally occurring amino acid
  misc_feature (284)..(284): Xaa can be any naturally occurring amino acid
ELEVVESRPSLGQKRYTWSMWFESVMNDTNGTWTADFCVIDTGELMVELLLVCRFPGWRTEVRAECWWSQWISPQLPXGQDFHPGPGCPFLSFSASXRCGXXGSHQRDGVGGAGSQATHVXXALDEEVXVXXPLGTPRXFXDSVRDXIFFSIPXSQYCMVXFIWSFMAGSTGVDARSIHHEVLXXLKGKAQRVVXGHXLXXRFLVIDCXVGYILDKXDGLSRLELAINILALXGVGVFTHDPLVVQDILRKPGWGDPLAAVIIEVLGXSPAAVPPRTASFRLRXRSQTPGPQWWRKSSN

SEQ ID NO: 1022890 - protein, 84 aa, Homo sapiens
MSEMAELSELYEESSDLQMDVMPGEGDLPQMEVGSGSRELSLRPSRSGAQQARGGRPNGGGGGLANGVRHEGKLEPSIGQRSGA

SEQ ID NO: 1022891 - protein, 403 aa, Homo sapiens
MSEMAELSELYEESSDLQMDVMPGEGDLPQMEVGSGSRELSLRPSRSGAQQARGGRPNGGGGGPANGWRQQGNTEPCITGPTLAEPAQARWQGAALRAAQDEVLMEFDAWEDDYRLSRRSEHAQWLPATEYQGRSVKKPTRCSENTENSPGWRVSDAIMRRTQTDQISFHRRAFITDGCQLVCPKNSDVTDDLYDSKSTEMAVTTSEGTYSTEGPKCTGYLSGDHPNKNGPLCTHQEPPTTQYEQQEVEPHKQATSSGHRCDNTHANTTKATRKPHNETHERSNTRHYPDTASKERKNEENEKKERRRQQPHTEDERDKQSDKNGEKQKQGRSTKTKRDNDDRQKAERREEDTDKQRARRHKKKTNEKITSNERDCTTQRETTTEPDPPKAYDTTRDQIQEKK

SEQ ID NO: 1022892 - protein, 162 aa, Homo sapiens
RQPELGQPWSWTDPAIITGIPASSGNSLDSLQDDNPSTLAKIPSGPHRDETAQRCSITRSSHSAPFSTQIPLHRASVESLPSSFKPFQLPSPQTPGLSDGFRPPDKTPTDLLTEFNDWTAIMAKEEQPLEKMQDLSHSVVSLYSPPTTSSLLISYVREESST

SEQ ID NO: 1022893 - protein, 41 aa, Homo sapiens
AWFRVPCTKCPAKTKKPVPATEQELPQPQAETGVLEQNFDS

SEQ ID NO: 1022894 - protein, 177 aa, Homo sapiens
GSQLSAQGPVFLHNVYCSGNPVRSSGMDGGSLYTPKCILGRVKAYTNFDAERDCFEHLNTAIKTKGVDEVTICEHFDQLAGNAQSTRTIAIRTYQRTDQNRNVASDTERQAFIWPPGDGDLLGLLKTPAQYDASELKASMKGLGTDEDSLIEIICSRTKQGAAGKFNTSLQGNMYQN

SEQ ID NO: 1022895 - protein, 450 aa, Homo sapiens
MSEGFSNCSSRRVSKHLKSAVFNVVRQTCHFALRRIVLQSRKDTTGKLVYCTLNKHMSHPYNTQNEQKAIDTITDEQKEDESHENVGDKKGKIVDAEIQEHQPSVLLELGAYCGYSAVRMARCCHQGEADHHRDQPRLCRTSPSGWCDFAGVKDKVPTLVVGASRNHPPAEDRSMMWTHWTWSSSTTGRTGTCRTRFSWRNVACCGRGQCYWHDNVICPGAPDFLAHVRGSSCFECTHYQSFLEYRGGVWTVLEKAILTKGPKAAEAEGPECPPRGPPSRALSTQPWVLKGARNVLPAEPSGRSGLCPKNAKQLSAEGPCAPDQCLTSSGTANTWIGTFFKDFHIIDFFYYTNWLRLISDLFYYYLQYSVVYTTYKLTTHSGPPKQDARTHAPTADVDNTTVVRRRRPWKRLLPTSQGGGRAPKGMSTGATARPQKPGDKQSRHPPKKRR

SEQ ID NO: 1022896 - protein, 320 aa, Homo sapiens
MSEGFSNCSSRRVSKHLKSAVFNVVRQTCHFALRRIVLQSRKDTTGKLVYCTLNKHMSHPYNTQNEQKAIDTITDEQKEDESHENVGDKKGKIVDAEIQEHQPSVLLELGAYCGYSAVRMARCCHQGEADHHRDQPRLCRTSPSGWCDFAGVKDKVPTLVVGASRNHPPAEDRSMMWTHWTWSSSTTGRTGTCRTRFSWRNVACCGRGQCYWHDNVICPGAPDFLAHVRGSSCFECTHYQSFLEYRGGVWTVLEKANSYQGPQGKLKLRALYCRASRDPPARGRLLIAMSVRIVQWLTTTLRRVPEPVLASVPGVVMSHT

SEQ ID NO: 1022897 - protein, 38 aa, Homo sapiens
IVVPFYLKAAVPKSLQLQLQAPVGTQFQLGVAFLSPSL

SEQ ID NO: 1022898 - protein, 105 aa, Homo sapiens
MKAELGVEDRSGGIVYACVWRPGSSRTPDRRPSMASNEILNSMYDTILLVKTRMYPTEGGGALEKRTCRERWSVCGDQKSPSWMDWMAELRWTYETTVAFTGWLR

SEQ ID NO: 1022899 - protein, 279 aa, Homo sapiens
SGVRRCLKMAAEEPQQQKQEPLGELTPGRCLTVVAYDEAIMALSRTEFSKRFAVEKPSVCQSGWKLPRSLYQGVLLKMTNFLSNQERIQGPSTKGNSEPFRKTQGLRGKLVSIGLRNSPHFGGQLLGLTGQRDVARRVPKGCVLPGSKGKTLLFPKGFNLEFTKLDGFPNKTTFHVTLIAAGVEKQTLCLPDLCWASFQIDPEELSRKTFGGSYTWRGWFHPSGANLGSRERPKVPSGQLPSEAWDRACQRSFLASRAVGPPCGMGDADPFQIHLCFGP

SEQ ID NO: 1022900 - protein, 429 aa, Homo sapiens
QPLINDGGRTWQMEEQEHLRKLEAERLRENAWKRMMDEKCSETQNTTVTQTDSELTGFAATTTPTDHGDLLSIQTTGHTTDTVDETRLSQDRRNSNGTPVTPDDATDGHERETVHGGDGHRRRRDHAQTSHLDLELQRGSVRTANRDSQQQEHEADSCGPGQHHTAATEQSSRNSYQKHELDLTQYADPESIMRNRDLTPPGQIDGRRRHSRRRAHPPRSNTTDNLATRTRRNNTHQPEGYTRANTKERIGNSMNQQEPHRHTRTQTRTRAPTPHHTPKKEPSTSARARNTQIGTPAHETAGQSGRKRRGNSETREHRQSSEQENKRNENTKATHKTAKRRQATRVITKATGPHSAPNRKKSTQRKTRRPARDHRRENNNCTECKEADNRDNDETNADARSEDSTHRRRNDILERERRGEQPRAPEESN

SEQ ID NO: 1022901 - protein, 112 aa, Homo sapiens
MRLHCHLYQVPKQQRGQLEQDALCVCEPGKFSLGERPYISWCLGKERHTGLWTGRECCMPDMAGRLRPWWTVVPPVAPKTHSYVIILVLLLLWGVHTGYIHFTWARPCESSM

SEQ ID NO: 1022902 - protein, 96 aa, Homo sapiens
DLEDLCGYCWRPGGEPSPEGTTGQSYKQYSQRYHQRTNTNVNLANLSGSCLYDVQGLAEEDSRRSKSSFPIQRNKALSTLPKGGNRSLGTLRYIHG

SEQ ID NO: 1022903 - protein, 242 aa, Homo sapiens
MRSNGPADHPGLRQRGNHSGCASDTMEGGRGKRRIKKPQGDVAGFVRKPAEQVYSHADLAGVPLDWYEALCSSLFDMWLHDTSCQDTDELYFTLPELTKNPGQDLELALSLRLGAMLHDMALAVVVQLNGLRLGLNGNPGTMAWFQTKKCYRLSDTLADLGNGGHFVVLTTSRFLWAFALIRALLVAIMGRKTTKVQKMTLEHQVAAGNPMTGLLSQLSRVVLRRDRPEVVLQDYGYQPLAY

SEQ ID NO: 1022904 - protein, 143 aa, Homo sapiens
RRLLLIGEAPLSSGSFLLRILSLLLAFKEQTRLVYHSSISHNNSLVISEVMDVEITSSSYTLPRGLCVAPNSPSDTHLPRWWKAPETDHEHTPSESSASTELRAAARNQELVAEIPSAPGTWKGTSPLLHACHSGHLLTDSLT

SEQ ID NO: 1022905 - protein, 172 aa, Homo sapiens
VVTVEKRVPPPTPRLSPHFTITVRPKNAALGPGRAQSSELILKRCLPIHQAAQVCRPSPYVESEDAPPHEEDKESRRPHVRVNECHPPKRLMSLMPRETRDFGGRSEASAEHHNYILEGQRRLSTFGPVFLTAQGTTCRSWVERTDDRPVNGRSLLNKRPPDVVSDSAPCAE

SEQ ID NO: 1022906 - protein, 190 aa, Homo sapiens
VVTVEKRVPPPTPRLSPHFTITVRPKNAALGPGRAQSSELILKRCLPIHQAAQVCRPSPYVESEDAPPHEEDKESRRPHVRVNECHPPKRLMSLMPRETRDFGGRSEASAEHHNYILEGQRRLSTFGPVFLTAQGTIVPEIRVKNEKCRAKVVMCDDKATEYVHSPPRPEELPKLLLVTGKDRRQDSGSR

SEQ ID NO: 1022907 - protein, 226 aa, Homo sapiens
APGATETRRGRLERCSPRDFLFVKSAFPTWRSLLTSRSLNLPQLEMLNEPVWTRNVGVLVQRSIWLELKVGTDPRMWTAKDCLNVAEQEQRGGTELLVPLNESYVCPWASCIDCATGAHRLWGPGYLCSRRTAEDAKALLSRRTDRFSNQGTMAKIQTSSSGDSTPLKQGVIGNDRVRQIQPVHSPGGQPQAYCYGPEEFFGRNLGAAGTPLWAVATLVLRTGLEV

SEQ ID NO: 1022908 - protein, 39 aa, Homo sapiens
GAHSILACDGPSTEKPIVPTSSPIASATKSADLPTTTTT

SEQ ID NO: 1022909 - protein, 113 aa, Homo sapiens
NSRPRRPIEELMVSPVSPHTILIGYTLGGVLRGLMVGVVVTLLSLFFTHLQVHHLGVTLLVVVLTATIFSLLGFINAVFARSFDDISIIPTFVLTPLTYLGGVFYSIVDAAAN

SEQ ID NO: 1022910 - protein, 317 aa, Homo sapiens
VSCAQEDGRGPAARSSGTLWRIRTLAVPLPGTHEPAACLLCLLRVSLLCCAPGQGGLWDACWGDGLALRLAAACPLALRGCETGGGRAKRLCPSYAGRMLESSGLQSAEGGRAGEAQRTGMLQAPGEKNVLQSSPEEGAAELSLPNASCNNTAGSSKQQAAACTEQQALGMGARTDASAHSHVVPRVVAKPQMPPCQSSKEAAVTPNMKERGLVWKRKGQCTMYFTVVMAEGKEIDFRCPVRTRAGTAEIMLQMVQYKNRQAILGVNPTRQDSSSTWSSKKPPSQTKRNRELRHETEEDLGGNQAKNNPSSSHNQDN

SEQ ID NO: 1022911 - protein, 185 aa, Homo sapiens
DPAARQDPWRIPRPHCPCGKAAPRAGPSAPRRAGSRSGSESEEAELSLSLARTKTRSYGSTASVRAPWGAGVIERHVEHRVRAGDTLQGIALKYGVHDGPRIKGANKTVYPVMCIFSEENFETSQLLSEKALGGFNGLTSMVDFLQKIETADTQFFSGTEDASVWPGKTSLLPVLKNLMFQACAA

SEQ ID NO: 1022912 - protein, 215 aa, Homo sapiens
HPGCCCVLIAPPQGLHLCAHPTHSGLLPFRPRHQGPDSWGHPKSTRPPYTRVMRSRWPRCIKGSQPLGDSPDIPVRLTPPAHGECLRDTSHQVPTNRQRGVSPLLGNCQDGLLPQSTTCQILWLPGTSLSLAQRRGFTQTYTVGCEECTSVSLCYPIPCKLQSGTPWLVDGPSSSQALKRASQSRHLACLPREPGLCTWQSLRSPDSLNPARSGS

SEQ ID NO: 1022913 - protein, 114 aa, Homo sapiens
  misc_feature (13)..(13): Xaa can be any naturally occurring amino acid
  misc_feature (22)..(22): Xaa can be any naturally occurring amino acid
  misc_feature (26)..(26): Xaa can be any naturally occurring amino acid
  misc_feature (29)..(29): Xaa can be any naturally occurring amino acid
  misc_feature (31)..(31): Xaa can be any naturally occurring amino acid
  misc_feature (33)..(33): Xaa can be any naturally occurring amino acid
  misc_feature (37)..(37): Xaa can be any naturally occurring amino acid
  misc_feature (47)..(47): Xaa can be any naturally occurring amino acid
  misc_feature (57)..(57): Xaa can be any naturally occurring amino acid
MTMDKSELVQKAXLAEQAERYXDMLXAMXAXTXQGHXLSNEERNLLXVAYKNVVGAXRSSWRVISSIEEKTERNEKKQQMGKEYREKIEAVLQDICNDVLELLDKYLIPNAYTT

SEQ ID NO: 1022914 - protein, 77 aa, Homo sapiens
DPEITLYEKGHTTRNVSTHRDLMRTQTTHTRRLRPSVYSRTSTHTHLEEGSPRYTKRATRVQTHTSQTLTHYTEAFP

SEQ ID NO: 1022915 - protein, 156 aa, Homo sapiens
VQLVDGAKKEAKAKGVNLQVQDASDDAATQANQLANAVSTSAKVVIINPTDSDAVAPSVKALNKAKIPVITVDRSSSSGDVASFIASDNIAGGIDAAKKLAEIMGDKGEVIHLQGTPGASASRDRGKGFSEEIAKHPGIKVVAKQTANFVDAAANL

SEQ ID NO: 1022916 - protein, 383 aa, Homo sapiens
PVSIRPGDAAVESGRAVKNLRSCPRPGLSIRPPEYDEVPRLPTAFPESPDLVVDSEAHKILRDQRTGMKAPVSARAHHPVLRWSSHAVYILAVLLEPACTLCLATCLDQHFPTGSRPTVPGPLSLQMDIAGVPDGKPLVREPCRSCAVVSTLRARCWAQAWVHEIDQCRECVFRYEPGRPPWALRRMWASAAPCVSSHNTMRAACCMRKLFTLLPGRPETRLYMVWGQGEAHGPGMLGRRDLTGTLAEGITREGNPRAVQGCTAFNVRRIDGPYGEQDLPREEERARTRLVMRLREVHEANVMPIAEPGSSGRSLDSRGTRTELEYTGAVLLMLFPRAGPLDEERSLAEARTHHQGVVDPGSVIGEPVVRDWLGWWVRFSNLA

SEQ ID NO: 1022917 - protein, 123 aa, Homo sapiens
GRGLCFLLRLTYSQAVSRQEALLSRHAVKHGALGQLAGSMCAGTYVPCELQVYPRVSHALALCICAHVCTHVCTHVYCALAQLCAVGMLTCVCVCVCVYVCVCMLWQVLSGRLPAREFSSSSR

SEQ ID NO: 1022918 - protein, 268 aa, Homo sapiens
MAPTQGPRAPLEFGGPLGAAALLLLSARHHVPPAPGGPVRAPARLLGPPASLPGLEVLWSPRALLLWGRLARPAGGGIYPTAGRKVAEGQELKDKSRLRYPINGFQALVLTALLVGLGMSAGLPLGALPGNAPALGVCRTPHHRHFIFERSFLYMKGAGSPSFGPGTWGELTAVRFATLFWDEKLNPRICFFELQDIACELRPGSSAGSSSELALVDDGGQVRGGPHGLWWPGPGASWGVPLGQEPPPHHGFPAGGSRVGHAGAPSRA

SEQ ID NO: 1022919 - protein, 246 aa, Homo sapiens
MAPTQGPRAPLEFGGPLGAAALLLLSARHHVPPAPGGPVRAPARLLGPPASLPGLEVLWSPRALLLWGRLARPAGGGIYPTAGRKVAEGQELKDKSRLRYPINGFQALVLTALLVGLGMSAGLPLGALPGNAPAPWRLSHLRSSSAFSTEGGAQFGRTGDSAPLHFLERLPLRLDQFRNGRPCGLSLLCERSREPQAGAVRHGSRKGAHRTKGARRERHNEHGTTGRATRTGQNNYGQRGETRTRG

SEQ ID NO: 1022920 - protein, 157 aa, Homo sapiens
ERTPRRANGPPLSSRHLLGVPRDFTLFLSNGHLWVLPPTPDSPPPRARLPRPLDPVPAPALPADHLPLGAEEGVALEALVVLALGDVCKHLVVHLVCCAIGDPVYGHVLNELVGEVVCQNNSPWRHLQSHLLQLLPTGLAEATVNPQATVNHKPRST

SEQ ID NO: 1022921 - protein, 120 aa, Homo sapiens
DATSMHQYQSLGPYLKKKDESPGRPATPYLASPIEEPEKLDGLYECHSSVPAVATQLPPATGGTETKYLGPRQFFMQAYRWMIDSRDDIPPEERLAQLPGPPSLYTRCPPPIMNCHQDLS

SEQ ID NO: 1022922 - protein, 313 aa, Homo sapiens
PAAHPQENVHLLGSWEDLTRHEGALLQCHQVVGVDVEWTPVFVAGGRPRPSLLQVAVEGHVFLLDVLALSQPPTGQGAQAFSRLVAQLLSDPSITKLGYGMVGDLQKLGTSCPALAHVEKQILGGMDLLLVHRQMRVASVPAPAVEQGQELRGLSLLVQQVLGTALDKTQQLSNWDRRPLYEEQVIYQLRRLLPVEVHQALCREPARFHLSEDWLEPEAQAQERDQAHGEATRLAKRQHRADQQVLWLGRAEGAPFKFGRASGGVVDLLRVAEPRAGGHLALGTRGADRTDTLELGTTARGAISAKGDRHYAR

SEQ ID NO: 1022923 - protein, 158 aa, Homo sapiens
MQPHCWYWQLAPPLGINFARFCLSRWRSGDPEAHPLRYLLRGCGGAGQSTFVRSPRTQVLLSDPVTCDAGYYCIGGKLDESWLVSKIAFSDESFAPSPLPRPLAPMALSSLPSHPSVSTQTLVRPMPRGGVLSLSWEAAMDGPGVKRQGLARGGGPLR

SEQ ID NO: 1022924 - protein, 106 aa, Homo sapiens
ELSKKEPESYNDHTMQKEEPSSSFMLHGVVIVRLWLLLGRNSLKRNSLDLDGGQRSPKIDCTAERNICSKYSVRGYPTLLSFPRREESQLAQLEAENLDSVTPLLS

SEQ ID NO: 1022925 - protein, 264 aa, Homo sapiens
ACRSVKWPGGGNNLEEPRGLALCHWRELTCGGREPLLCFLDLPNSVWGGPSQEVSDNNCVFAPADCDLCRRMCNTALALAKGKFGRVDVAVNCAGIAVASKTYNLQKGQSHTLEDFQRVLDVNLHVAPFNVIRLVAGEMGQNEPDQGGQRGVIINTASVAAFEGQVGQAAYSASKGGIVGMTLPIARDLAPIGIRVMTIAPGLFGTPLLTSLPEKVCNFLASQVPFPSPLGDPAEYAHLVQAIIENPFLNGEVIRLDGAIRMQP

SEQ ID NO: 1022926 - protein, 297 aa, Homo sapiens
ACRSVKWPGGGNNLEEPRGLALCHWRELTCGGREPLLCFLDLPNSVWGGPSQEVSDNNCVFAPADCDLCRRMCNTALALAKGKFGRVDVAVNCAGIAVASKTYNLQKGQSHTLEDFQRVLDVNLHVAPFNVIRLVAGEMGQNEPDQGGQRGVIINTASVAAFEGQVGQAAYSASKGGIVGMTLPIARDLAPIGIRVMTIAPGLFGTPLLTSLPEKVCNFLASQVPFPSPLGDPAEYAHLVQAIIENPFLNGEVIRLDGAIRMQPLLCFWTCPTRVGRPKPFPGVLLSSLGGSPVAIL

SEQ ID NO: 1022927 - protein, 296 aa, Homo sapiens
MASAMKAVTELNEPLSNEDRNLLSVAYKNVVGARRSSWRVISSIEQKTMADGNEKKLEKVKAYREKIEKELETVCNDVPVICLTTFLIKNCNDFQVMQSKGVYHLHKCKGDTTYTATLLGGPFISRGRFWGEDLTGGPKRSERCLTRRGFALVSKEADDSPRILIAVGLASAFSVFYYEDPRIAAEASLPLQANHAFDACHKLRQENPKTRDTYKEDTTLIMQTAENNPPPDKESRMKGRQATRGPPSRDISQRQPHQINTAQPNDKTQQKARRATKHAERAKTTTNAGRNNNQRY

SEQ ID NO: 1022928 - protein, 166 aa, Homo sapiens
MQKVVLFFFFFFLILLDQFGSRYPRRNVKGEKQRGLTGPDLDLVQMFSKASGYNKTTKFFLTVQMVYNKLTSGRGIRSYPDPLVSLSVSPSHFCPNSEYRVGGENLAEAASPVTSKKPGRAVLSHSTGRRVLGKQAGRRSGRAWKLLSLKPVAAVLDNLRWTPGSG

SEQ ID NO: 1022929 - protein, 364 aa, Homo sapiens
  misc_feature (167)..(167): Xaa can be any naturally occurring amino acid
MSPRCATHESLGPRPSGVPKGAIIVERNSDKVPPRGGGRKFFNSRSVVVVAAVARYFEKGEFHERDPPCGDMFCCPPLGGGPPSFLFQQEGIGQRFYLEQGMLYRPPQMCSKINAPKKPPPVCPSGPHQSCAATTQRGLFLHRTHQYFGVGRIILGEGAYSPHGAHXRSRVLLGWCKQVGLPHNKERLGSNTPPQIPTLGGPQSQNPPGAHKSVLSPTFWVSHRWPPQRGRKLVVGEHHTEILGHIAPHTHGGSPLCHKGGTHRAPTCPGFSVSLVIRPLKFPRHTPQGATLCALCVFPPHPGGPIREAVPSHRDVAGDIRDETAYTHLNSPAGLHTGHTLGHNCAPKATLLNATFYKNLTRYT

SEQ ID NO: 1022930 - protein, 285 aa, Homo sapiens
PDPSPAMLALRCGSRWLGLLSVPRSVPLRLPAARACSKGSGDPSSSSSSGNPAPCTLDVDAQRGKPGYGPPLGAWKPEWQIVRPQKNKLKKLSEAPVPLGLTKGLSATNRPPSFPHGVDSPFLSLCQVRRDYHQTTTWPPGGEVHLRKPAFLKSNFTLKHVGPGVLSTGLTAGPNTNASQFFICTKKKDWLDGKNVVFGQVKEGMDVVKQHYAIFRLLRVPGTSKKIAPHTTCVPVEANLCATVLALLAAAKLSSTQVAALRCSPAACNHTFAHSTVTVCPEEGC

SEQ ID NO: 1022931 - protein, 266 aa, Homo sapiens
  misc_feature (75)..(76): Xaa can be any naturally occurring amino acid
  misc_feature (83)..(87): Xaa can be any naturally occurring amino acid
  misc_feature (92)..(92): Xaa can be any naturally occurring amino acid
  misc_feature (101)..(101): Xaa can be any naturally occurring amino acid
  misc_feature (106)..(107): Xaa can be any naturally occurring amino acid
  misc_feature (113)..(113): Xaa can be any naturally occurring amino acid
  misc_feature (118)..(123): Xaa can be any naturally occurring amino acid
PDPSPAMLALRCGSRWLGLLSVPRSVPLRLPAARACSKGSGDPSSSSSSGNPAPCTLDVDANGKLLGRVVLEQKXXVVPKKAXXXXXLCTGXKGFGYKSSXFQRVXXSFMCQXGEFTXXXXXXGKSIYGSRFPEDNFTLKHVGPGVLSTGLTAGPNTNASQFFICTKKKDWLDGKNVVFGQVKEGMDVVKQHYAIFRLLRVPGTSKKIAPHTTCVPVEANLCATVLALLAAAKLSSTQVAALRCSPAACNHTFAHSTVTVCPEEGC

SEQ ID NO: 1022932 - protein, 78 aa, Homo sapiens
MYALKTGVTPDYMVTRGTTKPETNNRPRARRDGRGRKRHTTTDEHNRQNQDGPQKDTRQHRPTTKNQRNRNAAERGRH

SEQ ID NO: 1022933 - protein, 280 aa, Homo sapiens
GETRAQVTGGFLSFGGDGRMWALCSLLRSAAGRTMSQGRTISQAPARRERPRKDPLRHLRTREKRGPSGCSGWPNTVYLQVVAAGSRDSGAALYVFSEFNRYLFNCGEGVQRLMQEHKLKVARLDNIFLTRMHWSNVGGLSGMILTLRKPGFQSVYFLGPPPDVDQNSSEASPNEYFLVHLNSDIELAVRPHSDPEYEDETMTVYQMPSTQEQRRGKHHPGQSPEQDPQKAQASSELQTPSRMTHEPHTAPGVSPRRGSGIIPGRDPVCQLTYERKLLVS

SEQ ID NO: 1022934 - protein, 86 aa, Homo sapiens
MVFNRGPVTSSTSHEPAESECKDRTRADPEFSTMTSNPITWGQIKKTTQEAEKLLERQVQAKTPDSMFLAMLAVVSCASIGSGEPP

SEQ ID NO: 1022935 - protein, 48 aa, Homo sapiens
MSRRGPWQEPGDAGCPNGLTLKSAPKKESPTWLPTILVQSRKAGKHSG

SEQ ID NO: 1022936 - protein, 269 aa, Homo sapiens
GTCLAAGRTISVVFLVHFVSRRCFLESRRSYLFAPFPATLCPLEARRHQRLRLCYSLFGTEQSGTAVQRCWPGQKITSKDILALTVVICSKKDKQSVRTEETSKETSESQDSDKGKYDTKDLYGIINGHDTLKLSTVHCTNNKGPPKEDHLTSWEAYTLAGFEELQNMLQRERIGALSPELGGSCICCGQILSLWIGNTAKVRAAEPAPAALTDDVTRHRETASSSHLSFTYTYFSHLASCPICLTSRVRHDQKPVRNPQLGRTGTDDT

SEQ ID NO: 1022937 - protein, 327 aa, Homo sapiens
MASGGGGGDTGAGGGPGIGLSLGLGLGLSLGMSEATSEAEECVLATGLRLVVTACATDACVLAVLLLCLGVLVLAGGAAGLLVWEKAAGTGLVSLAVPVAQSGLFWSAVIRSVPPGPFFLHQGPHIVAYFLLDLLAVLAFSLDVSGIIPRRSHTLSSEVVLVVMCATGRHLLSVPELCRYLWLRAGSPFQIHLQELLRVQEAGIQLSSAFESALAVPVLAVLGTLCSRDYDFLHLSVESILLWALVVIIEADPEDCTPAWRPLLMQLGLQHEGQKARVAVDQKTRTRTEPSRDRMQPQGSVMKPLGADRRVKRGHLGWASPQCACEE

SEQ ID NO: 1022938 - protein, 293 aa, Homo sapiens
MASGGGGGDTGAGGGPGIGLSLGLGLGLSLGMSEATSEAEECVLATGLRLVVTACATDACVLAVLLLCLGVLVLAGGAAGLLVWEKAAGTGLVSLAVPVAQSGLFWSAVIRSVPPGPFFLHQGPHIVAYFLLDLWQPRFLPGRFRHHPQEEPHSERIHLQELLQYKEAGIQLSSAFESALAVPVLAVLGTLCSRDYDFLHLSVESILLWALVVIIEADPEDCTPAWRPLLMQLGLQHEGQKARVAVDQKTRTRTEPSRDRMQPQGSVMKPLGADRRVKRGHLGWASPQCACEE

SEQ ID NO: 1022939 - protein, 112 aa, Homo sapiens
  misc_feature (22)..(22): Xaa can be any naturally occurring amino acid
  misc_feature (28)..(28): Xaa can be any naturally occurring amino acid
  misc_feature (31)..(32): Xaa can be any naturally occurring amino acid
  misc_feature (35)..(35): Xaa can be any naturally occurring amino acid
  misc_feature (40)..(40): Xaa can be any naturally occurring amino acid
  misc_feature (44)..(46): Xaa can be any naturally occurring amino acid
  misc_feature (48)..(48): Xaa can be any naturally occurring amino acid
  misc_feature (50)..(50): Xaa can be any naturally occurring amino acid
  misc_feature (52)..(52): Xaa can be any naturally occurring amino acid
  misc_feature (54)..(57): Xaa can be any naturally occurring amino acid
  misc_feature (59)..(59): Xaa can be any naturally occurring amino acid
  misc_feature (61)..(61): Xaa can be any naturally occurring amino acid
  misc_feature (65)..(66): Xaa can be any naturally occurring amino acid
  misc_feature (69)..(70): Xaa can be any naturally occurring amino acid
  misc_feature (73)..(74): Xaa can be any naturally occurring amino acid
  misc_feature (77)..(81): Xaa can be any naturally occurring amino acid
  misc_feature (85)..(85): Xaa can be any naturally occurring amino acid
  misc_feature (88)..(89): Xaa can be any naturally occurring amino acid
  misc_feature (91)..(91): Xaa can be any naturally occurring amino acid
  misc_feature (100)..(101): Xaa can be any naturally occurring amino acid
NEKVDLWCIGVLCYELLVGNPXFESAPXNKXXPPXPKVDXKSPXXXPXGXQXPXXXXPXHXPPEXXPLXXVPXXPWXXXXXLRAXPPXXPXPPPRWPLPXXRVRVFVCSVYV

SEQ ID NO: 1022940 - protein, 137 aa, Homo sapiens
VACLVGPRPALVRGILSLHSLGGRCFRLRRGYILVAPRPPPSPPVGGEMAAVRCDHPATGESLLFCFATSYNVRKSAPVAGATDHTSGLLVTAAKEDSTCAGIHHRAPRSGWFPTFVEEGNICLGDHRRWGVLLKNG

SEQ ID NO: 1022941 - protein, 59 aa, Homo sapiens
MLSGVLRCGWSLLILAKEAGGRMAVMASWFCVVSAEDHHLGYHYHPGVSLGVLHEELSG

SEQ ID NO: 1022942 - protein, 251 aa, Homo sapiens
VTSSASGLNPTSAPPTSAVRRPVFLLFHSRQYLPYFRTQIFLDNGFLLGKPALQFNNSNVDISKINEVLTAAVTQASLQSIIHKFLTAGPSAFQHKVSDFFKGCSSSLKKAKHYYNYESPSVFNIVVRHPTKIMMVSPRISTPQIKHSPYQNFVISYSSCFITAKVSTPVRLSKDPGVTVSHTAACKLLTSSKVMNRVSPRKSSGLKVAKRSPINLVPINNSNSQSMAQIGTSVSQQEFSFWPDPSGSIKG

SEQ ID NO: 1022943 - protein, 114 aa, Homo sapiens
QSGSSLCSSTPPAPRPWRLPPHQPPSAPSKLSGNVNGVGQPPAPGPGLLRISASAPSCRAAGPTPTPSALHWDDCRAWCTGRSPVGRTLVGATFLNVLGTQTREAPSSKSLTHS

SEQ ID NO: 1022944 - protein, 296 aa, Homo sapiens
GARAEGAPAAVGADGLAVHGLAEPPARGRIDRVDQHLRAGQRLVLRADRAAVEHHVGLANDLQAAWRLAREELPGRREGRGRERGLAVVHARQHDVGRALERRAVEADVRRLAGRADPQAVGLGELVVVVRAQREPLHAGRHLVAVRALGRVELPHEGRQPRELVVLAQARHGPDAVRRIAAEHHVADDGRAAAVLHVVADGVAAARVADQTTLAAPVARRTARPVLEEGGRFGRGAAPGLGHADDDGAPSGKGGPKRQQPSGGSRRIEAQEVAPSTDNTVGGRNKRRHTPRMGAT

SEQ ID NO: 1022945 - protein, 120 aa, Homo sapiens
YLEAQRQKLHHKTRKWAHHREKTWLSWMFEKLVVVMVCYFILSIINSMAQSYAKLNPAAVELRARQTTSSRESFKTADNWRGWVLPITFGQDSKPRKAPLPIFQPVINSLNKLFLSCKAV

SEQ ID NO: 1022946 - protein, 73 aa, Homo sapiens
KVVSTSVRALYLNLHAYVRRALHRQYGDRFINLRGPIPAHLLGKDLTLPPHVPGSSSSCLAFQSMAPPTPRHV

SEQ ID NO: 1022947 - protein, 272 aa, Homo sapiens
PRVRDESCTARDKSPDGARRSRRESMELERIVSAALLAFVQTHLPEADLSGLDEVIFSYVLGVLEDLGPSGPSEENFDMEAFTEMMEAYVPGFAHIPRGTIGDMMQKLSGQLSDARNQREPGKRKRLMDVTNGQGAHHPQKPHDKRNRNGSQKRLGLSAACMLKTPKMRQQALRRSYLPGVDVTPWKVFPNCVAGSRPQWVLAKARGDLEEAVQMLVEGKEEGLQPGEGPNQELPERLRGPPKDELKSFIRQKYMRVKRKGSKITGPGPKKP

SEQ ID NO: 1022948 - protein, 270 aa, Homo sapiens
PRVRDESCTARDKSPDGARRSRRESMELERIVSAALLAFVQTHLPEADLSGLDEVIFSYVLGVLEDLGPSGPSEENFDMEAFTEMMEAYVPGFAHIPRGTIGDMMQKLSGQLSDARNKENLERRRLSVCSRCSCAYLHAEPAAGGPMIAQKRRGRFAVVVVADTQDEATGAEEELLPGVDVTPWKVFPNCVAGSRPQWVLAKARGDLEEAVQMLERERKRGLQPGEGPNQELPERLRGPPKDELKSFIRQKYMRVKRKGSKITGPGPKKP

SEQ ID NO: 1022949 - protein, 149 aa, Homo sapiens
PYLRILNLYRNGFPLVTQVVSVFLPSCSTRLVICKEKRFNWLMALQALQKAWYWHLLGFSGASRKLIVLTEGEGGAGTSHDKSRYKTQSKKSLITKGMAQAIHEGPTGWAPNTSHQAPPPSIGDYNFNLGFGREQIVKLYYPSTWFSFS

SEQ ID NO: 1022950 - protein, 44 aa, Homo sapiens
SQSTFLAILGGAKVADKIQLINNMLEKVNEMIIGCDMGVRILYR

SEQ ID NO: 1022951 - protein, 69 aa, Homo sapiens
SSAMASLEVSRSPRRSRPGAGRCAVHDRTNIRCFEPTYNERENLPLIVWLLGEKLLREWQSTYDNYNHR

SEQ ID NO: 1022952 - protein, 180 aa, Homo sapiens
MASLEVSRSPRRSRPGAGRCAVHDRTNIRCFEPTYNERENLPLIVWLLGEKLLREWQSTYEIIIIDDGSPDGNNGMLLKQVGRRSMGQTEFLLRPTKRTKGWGLGHLAIIFTGIETHCHRKIYYSSFMAADLSHQSKIYSLTFTSRKAQQERVNLDYLVFWENFVYHKGHRRRCILAGVF

SEQ ID NO: 1022953 - protein, 85 aa, Homo sapiens
AVIGATAAGYATATATWDLSCICNPHHSSWQRPILNPLSTARDQTRDLTDTSWVRYSWAITGTPHQRFKLQWESHCCKPASLIKL

SEQ ID NO: 1022954 - protein, 298 aa, Homo sapiens
MKLPDRGFSYTLGSRLPVLASATHRDGYPAVYGTNRYYIRNTEVFESKFFSPLQRSDATRLIVFKETWHSLLGEVLALVKGMTTLLSSLGAQCVIASRKMDVLKATAEQISSQTGNKVHAIQCDVRDPDMIQNTVSELIKVAGHPNIVHKHMQQGNFISPTERLSPNAWKTITDIVLNGTAFVTLEHGKTLIQSTERKQHIFLLTTIYAETWFRFEEVPSASAKTKVWSHEASLIAADMAVNHGNATHLLTQTQGLYKTKVALTTARDPLEHKTTEMIGNIPRDPGEQTEEPQTGDPR

SEQ ID NO: 1022955 - protein, 162 aa, Homo sapiens
MTNEKALKNPPASLPHSNHPLIEYYRKRGIHSAIDGIPEPRCRVRKHTRQLLQRPIPSIRRAGETGRLFINPGSDPWSNVLEQKGTGGKRTRSQERLATGAQGNRGPTARDGEAGRHTTHRTLNVSGTTHTNTRSERGNHTHTSQQENGGAESSTRARHARL

SEQ ID NO: 1022956 - protein, 267 aa, Homo sapiens
MVVELIEKNLETPLCEKWLLLDGFPRTVEGRQKMLDDLMEQRGQDYSLILSIEFSIPDSLLIRRITGQADTTPRVAVPTTREYNPPKEPMTQMTSPGEPFDPSIKMTNEKALKNPPASLPHSNHPLIEYYRKRGIHSAIDGIPEPRCRVRKHTRQLLQRPIPSIRRAGETGRLFINPGSDPWSNVLEQKGTGGKRTRSQERLATGAQGNRGPTARDGEAGRHTTHRTLNVSGTTHTNTRSERGNHTHTSQQENGGAESSTRARHARL

SEQ ID NO: 1022957 - protein, 44 aa, Homo sapiens
MPTLNSGGSFGSVVRTANIQMRLPMPSSRSSLSAGLQVHSDRLR

SEQ ID NO: 1022958 - protein, 481 aa, Homo sapiens
EFWFAVIKVVAILAMIVLGVLIIATGLGGGPPTGIGNLWRHGGFFPTGISGMLCGFVVVMFSFGGVELIGITAGEADDPRRSIPRAINQVVYRILIFYIGAISVMLCLFPWNQIGKAGSPFVTIFDKIGVAGAANILNVVVLTASMSAYNSGLYSNGRMLYSLAAQHNAPGIFWKTNRLGAPWVGVLASSVVTATAVLLTYLIPGKVFLYIISIALISGVINWTMIIITNLKFRRRIGPEGVAALEFRMPVIPSPVRGVGFLALVVVIMAMMPSYRVALVVGPVWLALLWVGYDVSCLVRRRHACGDERTAPVAGRTEPRARAGPARFPMWVIDPGCARRFCPCALDMVHRNGTVQLSGAPCWLNVSATGWPLVPVVVVRLSAVMCLRFNSLSPPPPPPVACVARSVFSEMSRNGDRLVGVSGLAGPRERQDGDSNRGRMRSMADNFPQLSDVLRCPQAPVDVNSINTDATPQAPGGKRET

SEQ ID NO: 1022959 - protein, 275 aa, Homo sapiens
MFKKFDEKENVSNCIQLKTSVIKGIKNQLIEQFPGIEPWLNQIMPKKDPVTNSPSVNVDIYRIFSEYMENYSFRRQGERAFFIHIPKDSFHKFSFLSCHTSRYDKGAIKLVLSGAQYHVVQAYTFYLKAKALPCCSRYHMCYHGTKENSMLYVLQVMKTVWQTDIEKVHQGMGIANIHYLMMGWAFDDFTELRGWLGLLMVWRNRSGRVWTHDDMPGYGDNPPLQTTKQTTRRRPKLNHGAAHIAVRQKGTGPTTRAQQVVVSKRPHRTEPSVPP

SEQ ID NO: 1022960 - protein, 188 aa, Homo sapiens
TCRLLFYFSSRGRDFRHTQVGGSHDVIVSQAVPVYDTNPHFFAHGGKHGRQCDVLVPLRVGRLLQDLAAQHFPRKADLHKGVHQVLLVTLEAKDLFHVVHHGIVHLRQVLGPEDLQAEVGSSQGYACGPEQVAFNVLLVFRGVFSLQTRFVPRPQHTKACFQVASGPSKRNSSGLRAGNQLPEIGRSG

SEQ ID NO: 1022961 - protein, 173 aa, Homo sapiens
MGTPKPRILPWLVSQLDLGQLEGVAWVNKSRTRFRIPWKHVPTAGCTAGRISESSRPGAEATVCHIVPGRGVSQDRAKPGKRNFPALALNRREGSRLAEDRSKDPARIHEYYIYEISERQELGDVFPVRHLSGHQWVEAVLLNPGRQFVDELLGNMVLGPVPDPGPPSLCCIP

SEQ ID NO: 1022962 - protein, 167 aa, Homo sapiens
MVKTRMQLEQKVRGSKQMNYTPVCSLRLPDRRHSGFYRGLTASYAGNFRNYNLLAIYEEFKRSYLEESSIKPSFCNGTEKNFPPVFFVGLMAGCCLFQKGGPPGFVNPHTKVKGPGPGKRAQSSLFVQRGPVVPEEVPCFIKDVAVFGIPIAWVYLRVVFENTQKAK

SEQ ID NO: 1022963 - protein, 79 aa, Homo sapiens
GCVGLQEKMAVSTGVKVPRNFRLLEELDTKDNKRTYGDRYQLRWWPWSMMQDMHTYKVAQHMHHGATQGTNYEQPEYIA

SEQ ID NO: 1022964 - protein, 592 aa, Homo sapiens
  misc_feature (496)..(496): Xaa can be any naturally occurring amino acid
GCVGLQEKMAVSTGVKVPRNFRLLEELDTKDNKRTYGDRYSYAGGLERLNYTTTDHLTNGGTSALNLLGDQPKGTNTYVTQPRQYYYGRDKGYENVLGHVKIYRADTGRFPVQVYDFGYSTNTLYTYVTRGHYTLHFPTVGNGVELPREAITKVDLATKWGKKCQKSAILTGVVHFKGRLKERYYMDVPKENILGTGLSQQGCNTEETGDQITNTHNPNSPQLVSTGGAVPSNTAVGALLKESQQKDVIINLHMCVNVGHSGRSNLLSPQTWQKLITTPFYRVTPKGNVPKDLGVNTTLYRVMAPILCDYGTLISFTFTYLGETHAQFNWVCPEGTTGEGTNIGRQKDSVYLALEKGALVSLEQQLNQCGEIREQLEHATGVTKQTYNAVCGATTRHNGDRRTQAACPPKENSPPHTTGERGSPHYDVAEPRRTQCHNTSTQAASGDSIQPARDAPHQTARRTADNTGETKPQCMKDDRYKYLGGCLFVVLLCFIXRTRTTGARLTRKDRDQLGDKERIRRKEIGNDKKGRTKISVKECTYSIEQSENGQSRKRIETGQRIKQIWILKIVLTISEDEDADDWRKRRKCKERA

SEQ ID NO: 1022965 - protein, 154 aa, Homo sapiens
LIKRIPFSTLVKLSWIWEGMHRLEFSPNPIEFTLVNLAKKVPYRYFQPLGLGPRGCAGKYIARVMMKAILVTLLRRFHVKTWQGQGVESIQKIHDWSWHPDETKNMRGMIFTPRNSDRCLGTQEEGGSVPTSGAFLIRSPHTNHPSLPIVSSSQ

SEQ ID NO: 1022966 - protein, 215 aa, Homo sapiens
RSGGAGGAVESGVKEGGREPESRNRSRSGGNRDPCAVREGGGAPTLTRAGGGPWGRSADLDRQDRGSLVAEELIKESEVKALCPKGRERSVVEEEQGGEGVDSPNVQQVVRGTSMDNSIDLKRSWSRVGGRRPLENQITFFSVGGLCGGTVVVSIEVENCSSVLAVTTSGVPVIPGSHSTIDPGATIEEVAKEFTAGLSGFIQNGFALRKVRACG

SEQ ID NO: 1022967 - protein, 257 aa, Homo sapiens
  misc_feature (164)..(164): Xaa can be any naturally occurring amino acid
  misc_feature (177)..(177): Xaa can be any naturally occurring amino acid
  misc_feature (180)..(180): Xaa can be any naturally occurring amino acid
  misc_feature (183)..(183): Xaa can be any naturally occurring amino acid
  misc_feature (189)..(189): Xaa can be any naturally occurring amino acid
  misc_feature (211)..(211): Xaa can be any naturally occurring amino acid
RSGGAGGAVESGVKEGGREPESRNRSRSGGNRDPCAVREGGGAPTLTRAGGGPWGRSADLDRQDRGSLVAEELIKESEVKALCPKGRERSVVEEEQGGEGVDSPNVQQVVRGTSMDNSIDLKEAVQSRVADVPETNYLFHGGFVDVGSIASKRSPAVGLKVRYXDRITLIRGDHEEXEIXKCXVSTMSXVREYGSVSVWRYCTEIFDYLSXGAIIDGKIFCVHGGLSPHQTWIIDMRKQSAHDGMCDSLSEQRTQLG

SEQ ID NO: 1022968 - protein, 65 aa, Homo sapiens
MPAPLGYVPGLGRGATGFTTRSDIGPARDAHDPVDDRHAPPGERTVGDPMKKNQAAGDDDEDLSD

SEQ ID NO: 1022969 - protein, 116 aa, Homo sapiens
DAVRARWCYLELKKLQQSCKPFCRRNNCWRQKDNVFQQIGQESNIKEGPKSRDLYVYTLGQPKNPHFKGLKTHNSQKPKLPQITRISAQNNTHLMQHWKAQHKGYTPGRIPHKKRV

SEQ ID NO: 1022970 - protein, 233 aa, Homo sapiens
PAEHRSRPGPPPASLLASSVSSAGRRDAAGPEDRGVGLLLLCAAAAGAGKAEELHYPLGERRSDYDREALLGVQEDVDEYVKLGHEEQQKRLQAIIKKIDLDSDGFLTESELSSWIQMSFKQLMLCKEAKQQFVEYDKNSDDTVTWDEYNIQMYDRVMDFDENTALDDAEEESFKKGFNFKGGQKEGEFEKANQDSGPGWSLEEFMAFEHPEESGLYDGICHSRSLEEHEKNG

SEQ ID NO: 1022971 - protein, 114 aa, Homo sapiens
NTHSHPSAGDGNRMMALSRTTPTRRQQQQGPPPPQEKPQGPPNRKAIPFLFKKGKRNNPNSEAIPGPPPGKATKNNPKQCGHQQGPPPPTPGKPQVPPPQGGRHKDLHRGSLLK

SEQ ID NO: 1022972 - protein, 128 aa, Homo sapiens
DLPGLRSQLRFSADPLSSPLPPPQVPKMSTGPTAATGSNRRLQQTQNQVDEVVDIMRVNVDKVLERDQKLSELDDRADALQAGASQFETSAAEVEEEILVDRIARCGQVGITVLVIFIIIIIVWVVSS

SEQ ID NO: 1022973 - protein, 240 aa, Homo sapiens
DLPGLRSQLRFSADPLSSPLPPPQVPKMSTGPTAATGSNRRLQQTQNQVDEVVDIMRVNVDKVLERDQKLSELDDRADALQAGASQFETSAAEVEEEILVDRIARCGQVGITVLVIFIIIIIVWVSLHEEPAELKTAVQETSSRLWNLEPAILSSLPTVISKHFGLVLTCKVAQFAEEDVPCVGVHMRLQMRRPGPSDIYAQVPLADFTYGLTEEACFKFQSAINLDVMFVTRLIAITPS

SEQ ID NO: 1022974 - protein, 81 aa, Homo sapiens
EFVLLLKGIMLVLMAEERREHVAKMKKMEMEMEQLFEMKVKEKVQKLKDSEAELQRRHEQMKKNSGSTAQRIGGKTSSVRG

SEQ ID NO: 1022975 - protein, 94 aa, Homo sapiens
AAASTFPASGDSMEPVIPDGATVAVDTGNKRVIDGELYAINQGDLKRIKQLYRKPGGKILIRSINRDYDDEEADEADVEIIGFVFWYSVLRYRR

SEQ ID NO: 1022976 - protein, 78 aa, Homo sapiens
KRRQRGKMAAAVPQRAWTVEQLRSEQLPKKDIIKFLQEHGSDSFLAEYKIIRKPLKYVAKTANKDHLGLQPYNHLLET

SEQ ID NO: 1022977 - protein, 112 aa, Homo sapiens
SAEAIQQSSSLTSVPPTTFSLTFKMESAQQSMGDFSKCKGKGVSSTSTAPPIATGVSSRASGPGTANYNTFSSASMPQIPVASVTPTASLSGAGTYIPLLEHKITVGDPLGH

SEQ ID NO: 1022978 - protein, 323 aa, Homo sapiens
MGAQFHGVTPCGHKSPTTQTFRVRKCFEANNDINAYQAFGTCGRVSRPRTMLLAIGASNPPNDPGSGTLGGFIGPSSQLRPASVKGTTASNAYSDPREQDPHRPSSVPLIGAMSDSPGETLCPSASGHSGCPLCKPLRRTLRADRGPVTRRPVRRSGQRYDDGRSRLPILRYGKGDRTARVSQWLMLMAAGLNLYPLFQSKMWDLESKGSMPPFAPPLIISHWALVSPPVRSNDLPSRLQPLDPFGAGPGLSPSAPNEPPQGVGEHCLYALQSNNTIFIFGFGQGGAGTWGKSRGPEPLAVQRLYFNVYMLQRETASWFKPFG

SEQ ID NO: 1022979 - protein, 222 aa, Homo sapiens
  misc_feature (12)..(12): Xaa can be any naturally occurring amino acid
  misc_feature (32)..(32): Xaa can be any naturally occurring amino acid
  misc_feature (36)..(49): Xaa can be any naturally occurring amino acid
  misc_feature (51)..(51): Xaa can be any naturally occurring amino acid
  misc_feature (53)..(53): Xaa can be any naturally occurring amino acid
  misc_feature (57)..(59): Xaa can be any naturally occurring amino acid
  misc_feature (61)..(63): Xaa can be any naturally occurring amino acid
  misc_feature (67)..(67): Xaa can be any naturally occurring amino acid
  misc_feature (69)..(69): Xaa can be any naturally occurring amino acid
  misc_feature (72)..(72): Xaa can be any naturally occurring amino acid
  misc_feature (76)..(77): Xaa can be any naturally occurring amino acid
  misc_feature (79)..(79): Xaa can be any naturally occurring amino acid
  misc_feature (82)..(83): Xaa can be any naturally occurring amino acid
  misc_feature (88)..(88): Xaa can be any naturally occurring amino acid
  misc_feature (91)..(91): Xaa can be any naturally occurring amino acid
TPSTHNTHIITXTHTHTSRGCHTTAWAHRVYXGYGXXXXXXXXXXXXXXVXGXLRPXXXDXXXEWEXEXYLXEGLXXRXDVXXVGVDXSVXYLYPLFQSNDVGLGEKGSMPPFAPPLIISHWALVSPPVRSNDLPSRLQPLDPFGAGPGLSPSAPNEPPQGVGEHCLYALQSNNTIFIFGFGQGGAGTWGKSRGPEPLAVQRLYFNVYMLQRETASWFKPFG

SEQ ID NO: 1022980 - protein, 84 aa, Homo sapiens
AEVLVIWSLFPSDTSFLQQRRRWSLRPVEGVKLAGILQFICRAVCFQQDPKLEKEEEETDPISARSHVYSKKNKQERNRRKDER

SEQ ID NO: 1022981 - protein, 85 aa, Homo sapiens
  misc_feature (46)..(46): Xaa can be any naturally occurring amino acid
  misc_feature (59)..(59): Xaa can be any naturally occurring amino acid
  misc_feature (63)..(63): Xaa can be any naturally occurring amino acid
  misc_feature (80)..(80): Xaa can be any naturally occurring amino acid
AEVLVIWSLFPSDTSFLQQRRRWSLRPVEGVKLAGILQVGVNVGVXWGFLVWGGLRQRXVGVXVRSVPPPSTSRSTGTDXPWERD

SEQ ID NO: 1022982 - protein, 112 aa, Homo sapiens
AEVLVIWSLFPSGYQLPSAAQAVVPEARGRSQTCGNFAEVMCIQRRISKKETEGRTRGRQIQDEILSKTWKENQKMRVNQSMRKSQSLRKKPEEEEKLEEEAKAKRNFLEKG

SEQ ID NO: 1022983 - protein, 348 aa, Homo sapiens
GWYELALNRQRARCRWLLEKHYGVCAHNSELFGEWKTIFDPPGIAGPARMLLKHIYVIQRARSNPENNVCLITLANDCEVLTTLTPDTGRLCTKLHTVQPKGKITFCMGIRVDHLVSEAPTMDKNHKMRIIAFVGSPVEDNEKDLVKLAKRLKKEKVNVDIINFGEEEVNTEKLTAFVNTLNGKDGTGSHLVTVPPGPSLADALIISPILAGEGGAMLGFLVPVTLNLESIPVLILSWPWPFVYLWKSSGSGRRREARRAAAASAAEARIATTGLKTQINALLKMTISQQEFGRTGLPELSRMTEEEQIVCMQMSCMEQSWQGGISRNVQVKYDTLSQQRVLQLGPES

SEQ ID NO: 1022984 - protein, 244 aa, Homo sapiens
GLCIQSYIRDEVVFGEPRIVCDCEVLTTLTPDTGRLCTKLHTVQPKGKITFCMGIRVAILVSEAPTMDKNHKMRIIAFVGSPVEDNEKDLVKLAKRLKKEKVNVDIINFGEEEVNTEKLTAFVNTLNGKDGTGSHLVTVPPGPSLADALIISPILAGEGGAMLGFLVPVTLNLESIPVLILSWPWPFVYLWKSSGSGRRREARRAAAASAAEARIATSGTEDSDNALLKMTIASKSLAALGFLN

SEQ ID NO: 1022985 - protein, 176 aa, Homo sapiens
MAEEGAGLSETVTETTVTVTTEPENRSLTIKLRKRKPEKKVEWTSDTVDNEHMGRRSSKCCCIYEKPRAFGESSTESDEEEEEGCGHTHCVRGHRKGRRRATLGPSPKLHHPQPPDPSAAPSRANAALNSLSPPAFLCLSGPKVYPCGYFSSPLLPSLLPDRGKRKRRTNTEILKF

SEQ ID NO: 1022986 - protein, 110 aa, Homo sapiens
AELYRVQLRRKTMLTLPNDYRPVTLTLVIMKCFKRLIMVHIKDSMPDTPDPLQFAYHCNRSTEEAISIAINTSGQEENLQYVRMLFIDYSSAFNTICFPPSSTPSSEPGS

SEQ ID NO: 1022987 - protein, 260 aa, Homo sapiens
KNVELNIHLTMNDFSVHRIIWAQGGVCAEVYGCRKADTGKNVRHVNAWYNTASSNTEVSGGDPWALKLRRIMLSLVSAGDCPFHCLHCHYAFQHRQDLSSRFSPGSLSEPGVVTCIQQLSAGTGSSQRPDIALLCGRASSWALGRTCTHRVQWFYRVSLRCHVASIRSGRSMATCRISEPGPESLWLRPAKKPHASVGTHGYMAPEVLQKGVAYDSQCLIWFSLEVHALQVAAGAQPLPAAQDTKTDRDSTSMTLTMAVT

SEQ ID NO: 1022988 - protein, 151 aa, Homo sapiens
GGYEPSSLRDRPNPAWRPPLLFPRTIQRAHTEDEWGYKHPTTAQCRKLPWPLEKKRETRPLLDHSKPTGFLPRHRSTPIFSVTSLGDITFLDEEMKAYPERMGGATLEPHTSTTGWVAREGWAVAKYSSSKRLNFSSTDYKKPFEAHSETF

SEQ ID NO: 1022989 - protein, 122 aa, Homo sapiens
IRGRVDLCLDLPLFSLPPAPLCSVCPGSKSLLLSLILMSLSVCCPSPYLAVCPSSLCTSSFSLHFSSCFSPPALLSFVFSLLLSLGKSLTIPYFAICYGSFSFFFYLSCCNWSCCNCPFWTW

SEQ ID NO: 1022990 - protein, 70 aa, Homo sapiens
VAAASSLFRSAWSCEWSVRCARACTMSVPAFIDISEEDQAAELRAYLKSKGAEISEENSEGGLHVDLAQD

SEQ ID NO: 1022991 - protein, 70 aa, Homo sapiens; identical to SEQ ID NO: 1022990

SEQ ID NO: 1022992 - protein, 46 aa, Homo sapiens
MSSQEQQEFSRELQEFSREQQEFSREQQEFSREQQEFSREQQEFSR

SEQ ID NO: 1022993 - protein, 56 aa, Homo sapiens
MDPIILLLLLLLLLLLLLLRWWRRRWWRQQQEFSREQQEFSREQQEFSREQQEFSR

SEQ ID NO: 1022994 - protein, 76 aa, Homo sapiens
MLKNLLLISPGLSPGNLSAILRGLGPLRKLRLFFPNRLSSPLGFESQTKQQEFSREQQEFSREQQEFSREQQEFSR

SEQ ID NO: 1022995 - protein, 70 aa, Homo sapiens
SVTGMAHFLAPTNAVSLAAEEGGEFCGEIVGRIHVGIGKSLSPHYKIGSDAGYSYSRTGGVKVVISSLNY

SEQ ID NO: 1022996 - protein, 179 aa, Homo sapiens
MAKSNGERWAARARGGESLSGTRESLAQGPDAETTRQNSALLGSDSEANGIRPSAESSKIAASSVGLAGPPEGAQSGEKVTPWRVLEGKREAQGGWTMLNEAGTKWIGLGTRQKKDSALRVARRVHSRPCHQCGGRCCGMYRCQGGQRLNVDTQEPLGKVMTEPGPCPAGGTHKVDVRR

SEQ ID NO: 1022997 - protein, 88 aa, Homo sapiens
MSVCERCQFQLLKAREGHTWLAARFQCACTSFVASLMSERQVLGTLPPYFTLACPRTPPPRQRDPGASGRHSAVPLVLAPCPRAPRAL

SEQ ID NO: 1022998 - protein, 303 aa, Homo sapiens
AASGRFLLLGRRVLGWREANSRYEDAGNGLLHALDDRVGRQRYKYEEAERRFYGTAEVQLQDETACRRHASMSSSRGRADEWALARTDPEDADEAGSLPVRRQHGVSPRKSLGTMQEGPCREKRKRVPPKKRARGPVGPWHLLRPSRHERVWLDKSRFRARAGVCSLCVQKSGQMVCCPGSLASCLVPLGVSATHGKQVAANHVTWGIWVNKSSFDQAERAFVEWSQALLLAPEGSRRQGTPNTGQAGGRPRTGPPDPTHQVNGTAPTGQAAGTGYRRGVAGRSPGMMQPKRGILTRTCFDGH

SEQ ID NO: 1022999 - protein, 43 aa, Homo sapiens
VPGSPRKTGSPRKTGSPRKTPVVPFQFYSELLRLGGLPVLRGL

SEQ ID NO: 1023000 - protein, 73 aa, Homo sapiens
TRQPPQDGQPPQDGQPPQDGHPQQDAAIHVKLERDELASCGGCRQPPQDGGVCCFLPVPAGKLQCSVGLRLAG

SEQ ID NO: 1023001 - protein, 309 aa, Homo sapiens
  misc_feature (42)..(42): Xaa can be any naturally occurring amino acid
  misc_feature (45)..(45): Xaa can be any naturally occurring amino acid
  misc_feature (49)..(49): Xaa can be any naturally occurring amino acid
  misc_feature (52)..(52): Xaa can be any naturally occurring amino acid
  misc_feature (64)..(64): Xaa can be any naturally occurring amino acid
  misc_feature (105)..(105): Xaa can be any naturally occurring amino acid
MAMGTRPHSPIRASSICRKTPGVYPVEGSKSKSGLPSDGPSXKQXYQNXNLXKMTVRGLSETRXCHLAPPSSCRASCSQIAKKLEATCTVWPEPQLDERLRWVAXLYTSPLKLMLYYRDSGDGSTQKAFICNSCLASDWDKLLSLLLSWKEASSGFDPPSVAEPSRSSNPKSGTAAKTPYHSKPPGTWISGPLVAMTNFVCVFNLLLQAYVAGPAPRTLLPLFEETVVKCWVPSPEQKRMMDILALGPSPPPLTSSLAEAITDGRRPCQPRPPRGASLKLPGPEVQTLDPIAGGLWCQKPGLGLVSIPG

SEQ ID NO: 1023002 - protein, 128 aa, Homo sapiens
SKNGLGRDEANGREREVSRRERILTTAFGEIRRKTTGCGQVASSLFRGEHHSRGGTGRLASLFSSLEPQIQPVYVPVPKQTIKKTKRNEEEESTSQIERPLSQEPAKKVKAKKKHTNAEKSWQTGKAL

SEQ ID NO: 1023003 - protein, 285 aa, Homo sapiens
GYIEDQKLVLSERALTRSLSRPSSLIEQEKKKKNKTSRSQPGDGPASEVSAEGEEIFLLTLFLSAEAAASCSWPAHLSCCPRVHKSLTLDAHCSSASSPPGRPQVLDNKQRSLEKQRQDLANLQKQQAQYLEEKRRRERDVGSSERELREREALLAQREEEVQQGQQDLEKEREELQQKKGTYQYDLERLRAAQKQLEREQEQLPPGRQSGSASGKTERGPVSGFPSTYQADEGSHRSPPVLRSPLAICTFHSQIKGHWHSELSVSPQRNSISRDTTKNRGLFTY

SEQ ID NO: 1023004 - protein, 264 aa, Homo sapiens
  misc_feature (105)..(105): Xaa can be any naturally occurring amino acid
MKHSVQKQACKISYKYTWLFTMQVSTSLKAGYFLGAQAKAKAYENKRKTGGSGKKVGHDYSIVTQSFSKTQEESVDEQTLLMYWNVDKEFQSEFNSFFKPEDPYXKKSHKMLLMCGKSFFQSSNLIQHRGSIRGKSPTNVMSVEKVSKESNLIQHQRIPYWGKIPISVMQWGRVQPESHLFAAFEDPHWAETLTVALNVATCFTRGPNWGRHEGGSKKDRKHGDNQGGLTLGKDRQSTVGAHKVDSGLSQKKQKIAGGHKIGRK

SEQ ID NO: 1023005 - protein, 251 aa, Homo sapiens
MPKRGHTRDARGGKTADELRTEPEAKKSKTAAKKNDKEAAGEGPALDGGSPPHMKTHPPGETARTSHNVRARVVWDCGSRRLDEEDRIRVGNRKKPQIYCAFKRPNVQRTNYQLNFRSCLDSLINTGQLLLDKEGYSGVGLLSRQCPLKVSYGIGDEEHDQDSGDVAAFDSVVPGNQHMLLMQGESGRLGYRALDEPSESGGRFRKPCVVGPCGLDLLASGTDVVSNPGRKGRGVAPPSLFCPGGFALSGA

SEQ ID NO: 1023006 - protein, 251 aa, Homo sapiens; identical to SEQ ID NO: 1023005

SEQ ID NO: 1023007 - protein, 293 aa, Homo sapiens
MSNPVRFRSGPATVRHPHAVQPDALPDSCRTDRQARVPEENHMNDATSRTLFGVGVGPGDPELVTVKTVRILREADVILVPYTEATTDGPGRAESIITAVVPEITGRIRRIPFSMRERSGVGEKRKASWQVSSDAVVTAFDEGARTVALATVGDPTVFSTFTYLRANVEERLPDVTVELSPGITAMQALSAASGRPLVEGKEILALVPATVGINKLGQVLDLVDSVAIYKGGRKLPDVVEQLRSRDRQAVIGTDVTLTSEQIITLDEVADAQTLPYFSTVLTTPERTTTGGKL

SEQ ID NO: 1023008 - protein, 42 aa, Homo sapiens
SRLFGYFKQPKLHGCPETSDTGSSFMRYLQFNPVIYKHNLPI

SEQ ID NO: 1023009 - protein, 114 aa, Homo sapiens
MGSNGHWGPTENVTFHSGFIGDHQVFWRMISLKRGPINRIGFLNIPNSFYIGVVVEVSVQHGGEYVEKLELNVVIQGMLSGVGGPLLVMGVCKVVEKMSVCGVCSCMLGCYVRG

SEQ ID NO: 1023010 - protein, 114 aa, Homo sapiens; identical to SEQ ID NO: 1023009

SEQ ID NO: 1023011 - protein, 112 aa, Homo sapiens
  misc_feature (7)..(7): Xaa can be any naturally occurring amino acid
KCLAAAXIVLTESGRSAHQVARYRPRAPIIAVTRNPQTARQAHLYRGIFPVLCKDPVQEAWAEDVDLPGELCHRMLALSRGFLQEVEMWLIVLTGWFPGSGFTYTMRVAPVP

SEQ ID NO: 1023012 - protein, 85 aa, Homo sapiens
ALLVLPRWSIQIGDTPAGGEAGMVLYCSASSGVQSSRACVGCNPGPMTLQGTNTYLVGTGPRRILIDTGEPAIPEYISCLKQALT

SEQ ID NO: 1023013 - protein, 345 aa, Homo sapiens
FESPLGQWDRGGRGHEQPLPVPPLLSVSPCPVFPGTCEPLPSTVLFSPSSPLPLLSAAPPRGVGAFFSFFFFSQGGGEEEERRGDSEACPKEGKAGEVGGGAKSQGPAKVCTFIRGIVGGWGLRPVNIAPNWEKSCSRGKSQGEPGGRAREGQKAEKKGRSKGPGVSRGVPGPSKVVPWGQGDMQPGVPFTIFTHPDHSPGSWHIYIPSSPRTETKCVALAMSSVIIVSLGLYHNLHPALCENAFHQHLPTQTHRRQRQHNHTTQRPHTTPGGQRNRRGRTNDDHNGTDRPPRRPRTGEGARIKPRQNRKEAREKNNRWAPSTHPRRGEEQRRPQPAPERRMNYK

SEQ ID NO: 1023014 - protein, 342 aa, Homo sapiens
MERRRITSAARRSYVSSGEMMVGGLAPGRRLWSWHPDLSPGLRMPPSTSRPWVDFYPGMVALNAWLQVRPWASERAEMMELNDLLLPATSRRFASWNSKTRLLAAELNQLRAKEPTQAGRRLPGMSMRELRLRHRSNSPGNSARLEVERDNLAQDLDTVRQKLQDDTTLRLEAENNLAAYRQEADEATLGPLDLEEEASKSLEEEIRIWRKDPEEEDEDTTGSTLADKQAKVEHEEAQAEPTEALEENESRRGTGAQNKHEAKRGRAKETNLQNEAANTARADQNPDPRLRRKNNDRDRDTRQQPRKTPKKEARGAPSRQGEQTQQGRNTPKRTKEQEPRTK

SEQ ID NO: 1023015 - protein, 233 aa, Homo sapiens
MAPVSLDTLYERFGKSCHGYQRSARTVPGGRWSSQISLKNYDPPKDQRFSGTLRLKSPPRPKFSVCVLGDPSSHCDEAKALDIPHMDIEALEKLHQDEKLVQKLAQKYDAFLASESLSQHEFPESSAHGLNKARKVPFPAHTPTETLVAQVDEVKSTIQFPMKKGVMSGCRLLVNVKMTDDELVYNIHLAVNFLVSLLQKNWPECPGLIYPEHPGPAPAPILRPPLNKFYYPV

SEQ ID NO: 1023016 - protein, 188 aa, Homo sapiens
MASHRHSGPSSYKVGTMAAQCDCHYCRDPLQGKKYVQKDGHHCCLKCFDKFCANTCVECRKPIGADSKEVHYKNRFWHDTCFRRGAKGGLSPPVATETIVWPRDKQGSVCNTVCNQLGEDSPQRATGGVAFPQGPFCVGQGESKTWTSQGRTGLAQQTCFTCSNVQGSHRDVKLSSLKGRTSTCVTVH

SEQ ID NO: 1023017 - protein, 169 aa, Homo sapiens
VPIVLSGCTAEYEDGFSLPYGWTPGVKRNGFPVALARAVSNEIVRFPTDQLTPGPGALTHVHAMGQLLDHDLDFTPEPAARASFVTWRPDQERSLMFMQWGQLLDHDLDFTPEPAARASFVTGVNCETSCVQQPPCFPLKIPPNDRRIKNQADCIPFFRSCPACPGSNI

SEQ ID NO: 1023018 - protein, 196 aa, Homo sapiens
  misc_feature (5)..(5): Xaa can be any naturally occurring amino acid
  misc_feature (22)..(22): Xaa can be any naturally occurring amino acid
  misc_feature (26)..(27): Xaa can be any naturally occurring amino acid
  misc_feature (31)..(32): Xaa can be any naturally occurring amino acid
  misc_feature (37)..(37): Xaa can be any naturally occurring amino acid
  misc_feature (42)..(42): Xaa can be any naturally occurring amino acid
  misc_feature (44)..(44): Xaa can be any naturally occurring amino acid
  misc_feature (98)..(98): Xaa can be any naturally occurring amino acid
  misc_feature (142)..(142): Xaa can be any naturally occurring amino acid
  misc_feature (144)..(145): Xaa can be any naturally occurring amino acid
LRVGXLKPKFKDGGRGANYSTXAIPXXMKFXXIRVKXTHVPXGXIKGNANDIGMDYDYALLELKKPHKRKFMKIGVSPPAKQLPGGRIHFSGYDNAPXRQFGVIASVTCKDETYDLLYQQCDAQPGARGSGVYVGVWGGRRXGXXRKIIGIFSGHQWVDMNGFRAQDFNVAVRITPLKYAQICYGIKGNYLDCREG

SEQ ID NO: 1023019 - protein, 103 aa, Homo sapiens
MLPFLSITATFLLSPKWIWLFLEAAMVGRWYQRACLGSLSPGQGQGPSASGSLNLSSARTRVISSQGSNWEPENCPSPSQCAPSLCPGPPAAMCNADVKAVCI

SEQ ID NO: 1023020 - protein, 186 aa, Homo sapiens
RRRRKDACVGESRILVWFFRSELVKRFRVADVSSPPGAMKTSEAQQRLSELRATVQEQLSIRGRSAWTQNGTIIGGHVHICSPSVFPRVTETRVVYIWIEACVEETEHGWQSGTVRIRPGSKASREKDNNLVPIGKPASEHYDDEEEEDDEDDEDSEEDSEDDEDVQDMDEMNDTDEFSGCMDECH

SEQ ID NO: 1023021 - protein, 54 aa, Homo sapiens
SLAPMYPFLPSYTPVCLLSEQYLRRVWCLTPVFPLLGSLMRAYHRTSGVRDPPV

SEQ ID NO: 1023022 - protein, 375 aa, Homo sapiens
RQRKQNPISLPGEQNGRKATPQAGALGALGIRGIPSLCQSEGTRWSRRGRRWAERCPPGVLGAGRSLGAQGSRLHSRPPPLSPLRKPGGSNQPRSAAAAGTQEACLQASGTTRGWKYHALPLRLDSRSGHSGSAFKAGSCPRLGGGGRGRGEAGAPYPLWAPACVAAAVAKVNPGMRTCKPSSPDPRHTRQQAENLRKGRWVRGSGEARNSAVKQGSPQLLDFWITDVDILLNSGLAVSTAHENKSWEQKQTLCHARRGKRKTDKQQEERREHRREEKKGGRKTEEGRHEDEHEDKRGPKEGAKKTGGAREEAERTSGGTVEEQHGGGQVNTHRKRASTREERRDTGRRDKKERKDEESGGGETDDGEASDRPSV

SEQ ID NO: 1023023 - protein, 238 aa, Homo sapiens
TDLPLALRMWCSLSSIPKNWFFQSMYFLEETLEPSVYFKKERMGENHNRLNAHRLLWVAFLTGKSQCGIRTFHGLCLLARNQYYRKSSVSSDKVLKLALILCNFIDEDKPQQGLPEVAEFTSVCVKLLRFSILNLCSSMCENTEDAVLLPGMNSVILTIKILCLLQVVPYMNKLPLQSPELFQELFSMCTEDTTLCLENLIYEDTDHRQPLDITKKFRPFFSNTKTIVEGGTGYLVHL

SEQ ID NO: 1023024 - protein, 243 aa, Homo sapiens
GTVSQLPPRLGAPSKPPGEDIPGWVNLPALGVEVVKAMAMQKIFAREHLGLQGNPTVEVDLHTAKGPDSRAAVPQWGFHTGIYEALELRDGDKGRYLGKGVLKAVENIEQYSGTLLLTGTKREEALRIKEEKLTKFMMELDGDRRKYKSKFGANAILGRCTWAVCKAGGSSQRGIPLDRPDRQILARETLEPHTPQGQPSTVSQPGALQCWKQAGPGRKCNESGMLGARPVQGGPCASEPKAD

SEQ ID NO: 1023025 - protein, 240 aa, Homo sapiens
EHRHLGLCARTVTSHSSPVRRDTPLKSRKFPRALEVQGCLFRKDDGVHQMQNLLKHRWEVRPYCGDQPFFPCHPLLAVPVPASLRATEPQSLVLPDDGAHEVISTTSTSFRGMYVPGPSKSHSSPATTLSPSLSSKSSSAFRWRTVLARTTCRGVMSFSSTSPGYRGKGSWASRISSSAWRSRTCPVTSICHTTLAPRDKGFDHLLSSNWANAHQCAMRPTSTRHSPARIRYRARVVSCH

SEQ ID NO: 1023026 - protein, 111 aa, Homo sapiens
MELNLRRTEFAVRPSPAPVPAVRLEKSGPYRASVVTSLYVGVARGPGVTLREPPLPANSVQAFTLLSSLRVNRSIVEEAAEPVVKKGISQLGHLCASQYTNWLSGKGYSQN

SEQ ID NO: 1023027 - protein, 184 aa, Homo sapiens
MVDIPDDHRVMVEDEGGLLADVALLAGEPRFRHIYTRRPDEVAQRWRRVLGDRAQVVIGDDAVAADLFGPVDVSTRSRFGDVLAITRGDWAIMSRATPKELTLVGMHGSLTPCEMRIPLLAQICEEMRMAELVFHTGPMDSGKSTLALQMDHAQSAHDRQGVRYTMHDRSGGDRITSRIGLSVE

SEQ ID NO: 1023028 - protein, 108 aa, Homo sapiens
SCVRAVGCVGLQEKMAVSTGVKVPPKLCACGKNFEGGTKTGVGRRDTDSLGALKDDEDMTSDTGGTGRDLLRPRKEQIMKTRIYGRKVECGTYITARSSSVSSDCVDQ

SEQ ID NO: 1023029 - protein, 102 aa, Homo sapiens
SLFGDGVLLCVTQAVELQGYNSCGSHCEPSVPSWGPEGFLSTFSSPNVVWDYSVLGHHGLGKSFGSDGDFGQCWPRLDSGTLGAQANLFLSLSLPKFGDYRA

SEQ ID NO: 1023030 - protein, 296 aa, Homo sapiens
PATRGPVPPPGGGGLPPGGWRSWAAGAPCGRPVPGFIGMMRDAGVCWWLAHVSVAYRACKLCELLHLPFAVRQIRTGTFKYQTVRYDITYPFIFLVSRNRLAQVKRKILVLDSGMRHLFTPTMIGVLKAHKVAGPGTAVLDFILKGEYIDTTFWSVFWITIRRAHCGFTSCESGESQWYEAGGVYTQALEIYGSGVADKLDNSRSILKEEILHDTDWNLEVGETTSRTSLVGPKMELIPDIVILDKSPGGLQEAFRQWHSHQNLGSVNPAKQTFSKLVPMLDGLRFTGDVRSVVSA

SEQ ID NO: 1023031 - protein, 113 aa, Homo sapiens
AQLRGEYKGEIEARYSTGLAGNLLGDYIYTTEGIPVLIVGPSYSCYGENHSTFEKTFLQSFVKHTPWGFRTVDELWSPRLCTRVPWVNRHFNTKNKDPSFQKPAPQGPIYHPG

SEQ ID NO: 1023032 - protein, 103 aa, Homo sapiens
LLNRFADGRRVNDCKHLLNMLGKEAEIQHLIAVMHVVEVQVLGKVIRLRRILCVDPLELISDCHDTRRQQAGETKRLSLLDSEGSAPIGQRVRQHLLATGRNP

SEQ ID NO: 1023033 - protein, 211 aa, Homo sapiens
MHLLQQAEAVKLRFPAEEESPTLRRPATSHMAKDADPRDCYAELRAKSTAERHTTLDDRYNPDRRGQTGPHRYITDQLGCRWTETHAEFHNEADNKDSHVDPRSVEDRPPADYEGPTLDEHQRTRPLNRRNRNPCNGARLKNRTHGETPRNVTVLTEAISQRDASHIEAQKGKITRVSTRRPYPPRPTYNAPDGGGKRSSTTNNTPYNRAE

SEQ ID NO: 1023034 - protein, 90 aa, Homo sapiens
ACDEAWMFAQTSLFLMGDRSWIWDQQSGRYSSWHNWQKALESNCQALLLLLADDDAQAAALQLNGAVPLGGLTPAALTALSPALKLSSQV

SEQ ID NO: 1023035 - protein, 281 aa, Homo sapiens
  misc_feature (239)..(240): Xaa can be any naturally occurring amino acid
  misc_feature (278)..(278): Xaa can be any naturally occurring amino acid
MALLFLLPLVMQGVSRAEMGTADLGPSSVPTPTNVTIESYNMNPIVYWEYQIDATGSLSLTVEVKNYGVKNSEWIDACYQNFSCIIVIFLIMLVSPSNSLGVRVRSQGWTKRNCLCKVRRICCMPRWKKWTTVEAGYQKRRSKQNKIDIFHPSVVVNGDEQEVDYDPETTCYIRVYNVYVRMSGSEIQYKILTQKEDECDEIQCQLSDSSILTEFSDTGVARTKEAYMVWGVTTEKSKXXCITIFNSSIKGSLWIPVVAALLLFLVLSLVFICFYIKXIIH

SEQ ID NO: 1023036 - protein, 102 aa, Homo sapiens
MAEPQPPSGGLTDEAASVAAPTRTPRTKDFLLQQTMLRVKDPKKSLDFYTRVLGMSANPKMCDFPIMKFSLYFLAYEDKNDIPKDKGCKNSLGRSPEKLHLS

SEQ ID NO: 1023037 - protein, 326 aa, Homo sapiens
SLPEHLSFFQPTAHSLTSLLCTMTTCSRQFTSSSSMKGSCGIGGGIGGGSSRISSVLAGGSCRAPSTYGGGLSVSSSRFSSGGAYGLGGGYGGGFSSSSSFGSGFGGGYGGGLGAGFGGGLGAGFGGGFAGGDGLLVGSEKVTMQNLNDRLASYLDKVRALEEANADLEVKIRDWYQRQRPAEIKDYSPYFKTIEDLRNQDHCGHHMRMRSPIWQMDNARLAAMTSGTKYKSRPWPGGKLWRQNVNGLEPGERKKLNAGKDMTVKMQIQKAALEGRNVDLPMRKKHTAKTGEVKGTEDGSTPERTNETREKMGELKQDEGPRTRKS

SEQ ID NO: 1023038 - protein, 299 aa, Homo sapiens
MTTCSRQFTSSSSMKGSCGIGGGIGGGSSRISSVLAGGSCRAPSTYGGGLSVSSSRFSSGGAYGLGGGYGGGFSSSSSFGSGFGGGYGGGLGAGFGGGLGAGFGGGFAGGDGLLVGSEKVTMQNLNDRLASYLDKVRALEEANADLEVKIRDWYQRQRPAEIKDYSPYFKTIEDLRNKILTATVDNANVLLQIDNARLAADDFRTKYETELNLRIECGSRHQWPAQGAGRTGPWPERDLEMQIESLEEELALLKKNTRRAMQCPERPGGCRLSTVADWTRDSWRWTINAAFLNREFVDH

SEQ ID NO: 1023039 - protein, 184 aa, Homo sapiens
  misc_feature (106)..(106): Xaa can be any naturally occurring amino acid
  misc_feature (119)..(120): Xaa can be any naturally occurring amino acid
  misc_feature (123)..(124): Xaa can be any naturally occurring amino acid
  misc_feature (130)..(130): Xaa can be any naturally occurring amino acid
  misc_feature (132)..(133): Xaa can be any naturally occurring amino acid
  misc_feature (139)..(139): Xaa can be any naturally occurring amino acid
  misc_feature (141)..(141): Xaa can be any naturally occurring amino acid
  misc_feature (145)..(146): Xaa can be any naturally occurring amino acid
  misc_feature (152)..(152): Xaa can be any naturally occurring amino acid
  misc_feature (161)..(161): Xaa can be any naturally occurring amino acid
  misc_feature (167)..(167): Xaa can be any naturally occurring amino acid
SLPEHLSFFQPTAHSLTSLLCTMTTCSRQFTSSSSMKGSCGIGGGIGGGSSRISSVLAGGSCRAPSTYGGGLSVSSSRFSSGGAYGLGGGYGGGFSSSSSNFALAXFARARDMRCAAHXXACXXRLPALXAXXHCACLXAXRIMXXASCSKXAEMPASLQXQLPCAXPKHAHKRLPLPPAQRSA

SEQ ID NO: 1023040 - protein, 330 aa, Homo sapiens
SLPEHLSFFQPTAHSLTSLLCTMTTCSRQFTSSSSMKGSCGIGGGIGGGSSRISSVLAGGSCRAPSTYGGGLSVSSSRFSSGGAYGLGGGYGGGFSSSSSFGSGFGGGYGGGLGAGFGGGLGAGFGGGFAGGDGLLVGSEKVTMQNLNDRLASYLDKVRALEEANADLEVKIRDWYQRQRALAWRNSKHRENRLTRVPYFKTIEDLRNKILTATVDNANVLLQIDNARLAADDFRTKYETELNLRIECGSRHQWPAQGAGRTGPWPERDLEMQIESLEEELALLKKNTRRAMQCPERPGGCRLSTVADWTRDSWRWTINAAFLNREFVDH

SEQ ID NO: 1023041 - protein, 327 aa, Homo sapiens
SLPEHLSFFQPTAHSLTSLLCTMTTCSRQFTSSSSMKGSCGIGGGIGGGSSRISSVLAGGSCRAPSTYGGGLSVSSSRFSSGGAYGLGGGYGGGFSSSSSSINGSVLVLRRADMSGGLACLAWVEGFAWWHLLVEMGVLVGSEKVTMQNLNDRLASYLDKVRALEEANADLEVKIRDWYQRQRRAWMINDYSPLTYKTIDGPAENKILTATVDNANVLLQIDNARLAADDFRTKYETELNLRIECGSRHQWPAQGAGRTGPWPERDLEMQIESLEEELALLKKNTRRAMQCPERPGGCRLSTVADWTRDSWRWTINAAFLNREFVDH

SEQ ID NO: 1023042 - protein, 321 aa, Homo sapiens
SLPEHLSFFQPTAHSLTSLLCTMTTCSRQFTSSSSMKGSCGIGGGIGGGSSRISSVLAGGSCRAPSTYGGGLSVSSSRFSSGGAYGLGGGYGGGFSSSSSFGSGFGGGYGGGLGAGFGGGLGAGFGGGFAGGDGLLVGSEKVTMQNLNDRLASYLDKVRALEEANADLEVKIRDWYQRQRPAEIKDYSPYFKTIEDLRNKILTATVDNANVLLQIDNARLAADDFRTKYETELNLRIECGSRHQWPAQGAGRTGPWPERDLEMQIESLEEELALLKKNTRRAMQCPERPGGCRLSTVADWTRDSWRWTINAAFLNREFVDH

SEQ ID NO: 1023043 - protein, 433 aa, Homo sapiens
SLPEHLSFFQPTAHSLTSLLCTMTTCSRQFTSSSSMKGSCGIGGGIGGGSSRISSVLAGGSCRAPSTYGGGLSVSSSRFSSGGAYGLGGGYGGGFSSSSSFCVKLASVVTDIGGVAYVVLVLTGSVGAMELLGYCVVGFELSRSDWGFMVGARSKTGVDRIARRPSIDSALGTRYLVTNGALLLERSVNGRGLERCTDPSTLVPNVQLGSQVADREALTHVPLTMQQNTLLEGPVTLNLRNQLCGATNLRKLQQSPIIAQTFDRIGQGWRQGRDDLSGDQGSVTAFASVARVRVHELFALDHDGPIGPLQPGVAFGMKARDPLGTSVLDPCNTLPQSDKLALQHGKGQRRARHRLKRDQETQRKGQELMGRGAHERHGKSTRGAGGEGGGSAASGRSCEAPSEQSGNPGAPAIPDTSKSAEEPGEERRSGETT

SEQ ID NO: 1023044 - protein, 168 aa, Homo sapiens
SLPEHLSFFQPTAHSLTSLLCTMTTCSRQFTSSSSMKGSCGIGGGIGGGSSRISSVLAGGSCRAPSTYGGGLSVSSSRFSSGGAYGLGGGYGGGFSSSSSFGSGFGGGYGGGLGAGFGGGLGAGFGGGFAGGDGLLVGVSGVYLIGGHCPEFSWVAGGWSSTKPTDQH

SEQ ID NO: 1023045 - protein, 307 aa, Homo sapiens
QREDIAAGGCAGGVKMSTKNIRVSDGDWICPDKKCGNVNLARRTSVIDVVGEKNEAKMMKAGGTEIGKKLCRKERGLFSANDGSVNTLQHCDCGQKIRVYMCNTPKYAKLEERPGYGGGLQLTRANLSQYLSKEKQSDEVNMHEFGKTQHKKKNTKICGSAWPPKNRFLEHFVVEGGTQIWIRKSGPQGVSKKTVDIKKGWVSPQKKNRRRNTGGSGNNPRGGSGRDLAGHQNGAQGAGKNTPARREKNRTTHQNNRSEKPRRRTYQPNSRPEPARASSIQNTATQIQETNKNQTTSETTKNTTHKR

SEQ ID NO: 1023046 - protein, 367 aa, Homo sapiens
SKQEHKDVMCGRTHLVASAASHEGPEQKQDSAPPLLAHFPRPELPTSPGAPLPPLSLGQVAALGSVSIRPARRRPTQQPATPSNKKAHPQGAVWRGMASSLRYELRRTERRGGGRGGTYYIALHIPDSCCDWKTGGQRLEDIISDYSGNCAIGAFLRLLEETPETQTGQGKAPTDKVALAQRLEIVIKVYIMRWDIPMLPVLTFELLGSSKTTPTSELHGVSWRYIESEATKPRTDGDDPLNRTWTKTKKRERDILANRDQNNLSKTRHDTPDPLDTSGIRPPGAARQRLHQRQKRGAPWPQYPPTGRTRRTPHGKKTHSHNPPVPRPAQQTPNKAHHNNNYNKTQNNDETAPREKATHRLPNHPQQ

SEQ ID NO: 1023047 - protein, 142 aa, Homo sapiens
MAAEITKRMALCRMPLMASCPISRSQHPCKAGWLVAVARKGTLKWDTEGAPSPDDSPWRGQEVPHHLPLHGGIKSHVALGVSWAPHLLLAHLTADLSPGSVRVPKGGHSGAVDRAGRRPAVLLALGDFPRCPPTNLSYGTQG

SEQ ID NO: 1023048 - protein, 73 aa, Homo sapiens
ENAGKPEVLRMAGTGWWLERLWWMRCRILIKVMKPLVCGKRLQRWWSEETRRYRPTKNYLSYLTAPDYSAFEI

SEQ ID NO: 1023049 - protein, 187 aa, Homo sapiens
ENAGKPEVLRMAGTGWWLERLWWMRCRILIKVMKPLVCGKRLQRWWSEETRRYRPTKNYLSYLTAPDYSAFETDIMRNEFERLAARQPIELLSMKRYELPAPSSGQKNDITAWQECVNNSMAQLEHQAVRIENLELMSQHGCNAWKVYNENLVHMIEHAQKELQKLRKHIQDLNWQRKNMQSQVDLN

SEQ ID NO: 1023050 - protein, 48 aa, Homo sapiens
MEYSASAAGSIAGVSKGKWYLLHQDYLPLSPYWQEDEAYTRLYGSALG

SEQ ID NO: 1023051 - protein, 107 aa, Homo sapiens
QLRPFLPEEEGLVSPPPGRKGLPCKTPQFGGSLKSCVLLSGKKKYRRGLVLMAAHRSRALKQPSAHFCWEKYSWLCGTWGWRVSRCQVLQPVWAHFPMLVSDREGLN

SEQ ID NO: 1023052 - protein, 199 aa, Homo sapiens
SFRSAVFLRRSRRAVGRHGAQRNVLVLEPHIPQRSRARGVGATMVCSQHGGLRIHHDSTVHGGQAKRRAQLDRTRSRSGSGPIRPIGALAQRYRYQKRTVQRTAAGLQTWTEPQRWPEFSKQGGPGPSRFHVDPRSAEQVTRKSLQAKRAAAEGVPLQNIILFPRKPSGPKKGDSYLLNELKLDTQLDGTRIMPRPERL

SEQ ID NO: 1023053 - protein, 136 aa, Homo sapiens
MVRCPPGGWLQTSGEKAQGWPWCCPQDGERHHPKILGSSEGGGTTPTGVPGQCKSSQEREWITGTKIHPSSPGSLGPQEGRSLLKDWRGHQGDGRSGRRTYKREGPVIRGETQLKRRARCRHTGSGWKNRTRRWKK

SEQ ID NO: 1023054 - protein, 69 aa, Homo sapiens
LLFDGCNLTRESWKALERASFSKLKLQHIQAPLSWELVRPHIYGYAVKKCELAVRELNGSKNLKLQFYI

SEQ ID NO: 1023055 - protein, 69 aa, Homo sapiens; identical to SEQ ID NO: 1023054

SEQ ID NO: 1023056 - protein, 92 aa, Homo sapiens
YPQGTHSQQVNSPFPKQTKPGKITDSLLTAPLSRPPSSGKAVRRFKLFGSSSFFRSLIWSFSISRAIGVISDAGKSSPGSKIFPMIFRYGSA

SEQ ID NO: 1023057 - protein, 270 aa, Homo sapiens
MKWLSLSELLLSLLLPALAPAASLPSSPSCTPEAIYSLDAWARAGGLGGAGADPLGTLRASSGAPGRWKLHLTERADFQYSQRELDTIEVLPHQVSPCGKHVVSVHDMFACSAMVARIARIHLSQHGQVPCDLGQDEQLTTIGPGASLPSTCHTSFVRTDYIPDYQGCTASGAALFREGYLYCQINLTSDTGQSPVGILEYRHQARDSDQSWYRAGASGTCAHTWTLASALTSVPTVVASTQPVTSGNARRHSPDTKEDLLLQTRFPKHR

SEQ ID NO: 1023058 - protein, 105 aa, Homo sapiens
MALARAWNRCPGSTTSTCCHGLYMLSPGSGRCQFHAGSIVGMALYTGYVFMPQHNHGDIALLWKSYNDQDATRIRGSLGKDPPYEVGMRPSDVIRNSSRCQITNL

SEQ ID NO: 1023059 - protein, 55 aa, Homo sapiens
MEVAAGTSGGEQRSSELSLRPSPTPSSPFPPPLGFRPLSPPSLSDDDLRGMVGST

SEQ ID NO: 1023060 - protein, 83 aa, Homo sapiens
YRTDAFYWVTIAVTRHRQSDQSIAVITKKKEEKPLAINTDIFVVSLYKKQIRVFMWGYSYVPAVTSRFNKLIWIHHSSHMATH

SEQ ID NO: 1023061 - protein, 99 aa, Homo sapiens
MRSPGTAQSVLEAISTYCEQKEWAMNCGRQDRQDRGRRDSGGTSPPCCWTLGAYCGYSAVRMARLLSPWAMLITIEIKPDCAAITQRMVAFAGMKDKVT

SEQ ID NO: 1023062 - protein, 273 aa, Homo sapiens
MLPNTGRLAGCTVFITGASRGIGKAIALKAAKDGSKYCYCCKGAPSHIQNSRHQSILLLKKLNAVWRKGLASVIVDVRDDPAASVLQVEKAIKKFGGMDTRGSIIASANLVCDQYIWNTPTKEMWICMMDREHPEATYLASKRHCIPLFDNKHATVAHILNISPTTEPKSSCDSNKHLWLNNQFAKGNWDCPMVIVPCDWPDTHSTVHLARQGIMGLKQAYTMDALDMLGGPGSAARVTKLLHAPAAIHSKAKFPGTLTAQSHTRLTCLLPHL

SEQ ID NO: 1023063 - protein, 150 aa, Homo sapiens
EGLPLSPMTSQNLRYSHQHACMTERFQWTLGSHFYIRLRSLSMSWDLQGRKVSDNAHVVVWCPSSPLYTTSYLFFACILDGSLLAIFPNTFCGVRRKFIHPNKAAKPFIFHLGTLAVAFERGGAHDGSTGGAVRPGPGLEKLEHPRVAAH

SEQ ID NO: 1023064 - protein, 152 aa, Homo sapiens
KDSTFSYDYQNLRYSHQHACMTQISVLGCDLLVDGIYREYRRHSNSLITSSTGIPMQCEGNGCARSTRHCVRLECTLSISAFLLYYTNVNALSIGLVSLVVAYLAIFLNTFCAYAESSSTRTKQRSPFIFHLGTLAVALKEVVPMMGVQVGP

SEQ ID NO: 1023065 - protein, 46 aa, Homo sapiens
PALPGHDTTLDKITVTGSLIPQTQVETQTPVMTISAEAIQSRGFNS

SEQ ID NO: 1023066 - protein, 463 aa, Homo sapiens
  misc_feature (449)..(449): Xaa can be any naturally occurring amino acid
RDAWCQSPGLVVRTEPGDGDSGSAGRRRGSWCKDYYQTLGLARGASDEEIKRAYRRQALRYHPDKNKEPGAEEKFKEIAEAYDVLSDPRKREIFDRYGDGRPKGEWLLMMAGTLRGGVVQIGSLLFELQQFPVGDRSMPMVLLDVSYRVAKKVPFELSLFAGAAETSGGGTRVDHLHDPSSAGFRYGQWSGFTKLWTFGPLTESDPRSPAQKRRAKITPRVQPTKPFGGLALNEESSSVLVSNEAGTILTKSGLKNRGRENSSPVPKQVQSKHTIRGTQPECGTTGGLGHRKGKPHNRTYPDGPRETVAPQQRITHRENTGTGSTRGTGPTQVTVKRRRMGTCSDTIPVAGITPEEGPRRHDHDRLPTEEGADNALIKHVKHRKSGQNLRQRPTTQNARWTPKGGAYQRGEQKPTTIYKKQPTGRTKTDDTRSEGGDGMRSTVTCLEVXRVHNSYNPPTISKI

SEQ ID NO: 1023067 - protein, 221 aa, Homo sapiens
RDAWCQSPGLVVRTEPGDGDSGSAGRRRGSWCKDYYQTLGLARGASDEEIKRAYRRQALRYHPDKNKEPGAEEKFKEIAEAYDVLSDPRKREIFDRYGEEGLKGSGPSGGSGGGANGTSFSYTFHGDPHAMCAEFFGGRNPFDTFFGQRNGDRKALDIDDPITLASLWAWVASHNVNFGRSRSAQEPDRRKQDPPVTQDLRVSLEEIYSGCTKKMTISHKR

SEQ ID NO: 1023068 - protein, 40 aa, Homo sapiens
AGAVSRPERTNVSAGARGAEAVAGGGGTGSRRVSRKIKKK

SEQ ID NO: 1023069 - protein, 477 aa, Homo sapiens
MTPTGAGLKATIFCILTWVSLTAGDRVYIHPFHLLYHNKSTCAQLENPSVETLPESTFEPVPIQAKTSPVNEKTLHDQLVLAAEKLEDEDRKRAAQVAMITNFVGFRMYKMLNEAGSGASGAILSPPALFGTLVSFYLGSLDPTASQLQTLLDVPVKEGDCTSRLDGHKVLAALRAVQGLLVTQGGSSSQTPLLQSIVVGLFTAPGFRLKHSFVQSLALFTPALFPRSLDLSTDPVLATEKINRFIKAVTGWKMNLPLEGVSTDSTLLFNTYVHFQGTMRGFSQLPGVHEFWVDNSISVSVPMISGTGNFQHWSDAQNNFSVTCVPLGERATLLLIQPHCISDLDRVEALVFQNDLLTWIENPPPRAIRLTLPQLEIRGSYNLQDLLAEDKLPTLLGAEANLNNIGDTNPRVGEVLNSILLELKAGEEEQPTTSVQQPGSPEALDVTLSSPFLFAIYEQDSGTLHFLGRVNNPQSVV

SEQ ID NO: 1023070 - protein, 57 aa, Homo sapiens
RVRCRARAQMGCMMPCVRIDSASSPNAPSSMRVRGWYLPARIFETGKVDGRPSGLAG

SEQ ID NO: 1023071 - protein, 90 aa, Homo sapiens
LQPHWHYLRAPQSQSTWCMGTWLPEGRVQGLATFSEGEGGISIIHSLAKFLEQGISLALQLLSFWHVIFSIVNRVIKSELGSPDISAAAG

SEQ ID NO: 1023072 - protein, 248 aa, Homo sapiens
AEQARQWVDANSTITSALHTLFLQRWRLSLIVQATTLNQQLLEEEREQLLSEVQERMTLSGQLEPILADNNTAAGRLWDMSAGQLKRGDYQLIVKYGEFLNEQPELKRLAEQLGRSREAKSIPRNDAQMETFRTMVREPATVPEQVDGLQQSDDILRLLPPELATLGITELEYELNRRLVDKPVGSPIRLHGESWRDNSDRTFRMVHKRLRMNSRAGRIIVCVGILPGSHGRTLMNQCCESGLAGLMR

SEQ ID NO: 1023073 - protein, 172 aa, Homo sapiens
MNQGLLNYWAGANVSSFSRSGGGFVAAGWAPQGVPHGGAAGGRSTEQHHGRGAVQNPESLYRTLSCLLGLPLRVQKIRSRPEHARAESLNIYLDWTYDFEICVMGNLEGGTKVAQTEINPLPARRRSKVEIHTAEYQDSKGAVCLLMQVSCRVCCVADFSIRTSFEKVEPKC

SEQ ID NO: 1023074 - protein, 107 aa, Homo sapiens
MTSSARDFMPKTVGIDPMSIYLCCKPDETGKSVLGNKSNREEAVLQRKTGSQRPCRPPARRLCPAALRMTLGLIGKKRALSTSALHSREDARCRRQCQSDRRMRNKP

SEQ ID NO: 1023075 - protein, 90 aa, Homo sapiens
GWALGSCARGRTRGIMEADKDDTQQILKEHSPDEFIKDEQNKGLYDEITTEKYSAKEGDPKAVKRSSKEATKEFQIKRIFLKQKMKFLSV

SEQ ID NO: 1023076 - protein, 43 aa, Homo sapiens
GSVPLKRHAGVAILITLLFHEPGILPVGTHARLKVSAPLFHCM

SEQ ID NO: 1023077 - protein, 125 aa, Homo sapiens
VCGRRLISCSRTDQTFVMMPEINTNHLDKQQVQLLVRDVYPYDENDNKIGAETKKNCHLNENMRKDYRIAALDVSSYLTHRTISFCYSKDQMLQITFPGCVDEYVSYVIHLCKSSRAVRKVTPLE

SEQ ID NO: 1023078 - protein, 217 aa, Homo sapiens
AAAGKMADGKAGEEKPEKSQRAGAAEDLKKKLEKPVKIRVFLPVMAGDKFQSQRLKKRISEEEACRDFPKKALQEISKVVGIVAIGSSGGKKEGLQAIFHQNCGIKVGFKEKWFQILVFQKILSGQQQFLMKYEDSEPEEDASEKQSMQDEEILAQGYTKIKLEQNFFNKGKHGFLDNPEAVGKRNYKISSVPIFYDQGPIKHGCLEIGGVQGGVYS

SEQ ID NO: 1023079 - protein, 245 aa, Homo sapiens
TQAHFSRESGADGSNMAAPSLSREKRPGKLSFLRSTVGIAAAEQGFWKGICVPEPPAWLGLNACVASHGVAMKSMVSMEHGLYKPCTCMFDIVGTHLTHRDVRVLSFLIVLDVIDDHERGLIRNGRDFLLDTGDARAACDDKYFRTGDCKLLGIITRHDLLPYVTLKEETGLCALDLVDKYLEEKSNIDIVNPRGPQVIQNQGSPASKNSAPHILWVCCPHFGSQMCCSVSPRRATCGAAKTRSH

SEQ ID NO: 1023080 - protein, 132 aa, Homo sapiens
MIYEVGSLCHPKTNTQTNKTFWGAAWGPWEKKSFSETTFLVGARSGQSEERMDTAKLWRRKRCVPKEDPWGPSAAGVGLLPRNKKKGRGGTHRGVSSTDSQREVRQHYGVLHTGGQGSEYVRDRVRRKRSQG

SEQ ID NO: 1023081 - protein, 103 aa, Homo sapiens
GVPSDRWRWRLRLSDGRWRPKSPGLKGGTNLGARRSPAGYCAKPWGDGEVKTYRALVPSQILQSYLVTSRMYLRFIEVEMSAVKEKSISDALSCHYKLLKKLT

SEQ ID NO: 1023082 - protein, 69 aa, Homo sapiens
SSSSAHLIADWAYQDAILARLQSQLDRLLLQHHRQHQAHLLHQPTKTGALITVLVMNVQLRTLTVTGER

SEQ ID NO: 1023083 - protein, 165 aa, Homo sapiens
TVSNDLTYAHNVAAQRNYIALASTTVETTDPEKELEPALELLEPIDQKFVAISDLYEPIDDGCESQVFCSCSYDATTHFETTCNDIKDIYKRMAGTAFDFENMKRKQNDVLLEKSEHVIVAAPSPCLPQPVSVLLEGSSILCFPHHVPINQLIGPLDTISYTYDA

SEQ ID NO: 1023084 - protein, 268 aa, Homo sapiens
MLLRRPGGGSGGGGCGRVCACGGDGGGSKRCPRRAACGVAGRSQRCGGAGRTLSGQLRHGWHGVVPECRSESQKRGEAKPRSAWVALTHGKTPFPLLQAAEALSSAQNGSTSPKYGLQKLLHDDGPEPQKRGDILKGFEPKKCEQNLVQGQSLNGKRGLNPKNYKENKTHSVVFVGKIPRAKEKKIFANSGTMGPFFSRESESAPGDFSLSVKFGNDVQHFQVPRDGGREVLPLGLVTSILDAAGGYQQIYLCSRNQRFLGTHTGQGE

SEQ ID NO: 1023085 - protein, 142 aa, Homo sapiens
VSSRRRSAQRWVSRSRSREEDGLHTRLPPVPFPPGPCDRRGKMASGVQVADEVCRIFYDMKVRKCSNQEEIKKRKKAVIFGLKCRTKKCIMCRRRQERSVGGEDCVVLTIKDDPLPGHLVWGSASLKKRLCRLVFVVMMQSL

SEQ ID NO: 1023086 - protein, 250 aa, Homo sapiens
NPRRERRLEELLDAEALPLPDGADMSEQSKDLSDPNFASEAPNSYGAQQPWGFGGGSSFRYLCRASYPSSIARRSAPHAAPASPGPERRGRPRMALQPRAGRDGAGGLAHHQGSPRRCEPNARARHRQPRRTLVQKAHELMWYVLVKDQPSKMIIWFPAPLVEKMSSRSLHSTVVQEQSFRRTSLILARVIRAAPEEITSLHPMEFALVKALEPEELDRVALSKHACPMTGLLLHDLETHLTWKGRGAQD

SEQ ID NO: 1023087 - protein, 102 aa, Homo sapiens
MANSGCKDVTGPDEESFLYFAYGSNLLTERIHLRNPSGRSSVWPACKDLSLIVAFPQGQNKSNCWHGGIATIFSESWQMKCGEVVWKMNKSSLNSLDEARRG

SEQ ID NO: 1023088 - protein, 117 aa, Homo sapiens
MANSGCKDVTGPDEESFLYFAYGSNLLTERIHLRNPSGRSSVWPACRQEGVKSGMYVVIEVKVATQEGKEITCRSYLMTNYESAPPSPQYKKIICMGAKDKWFAAGVSREVKSNRTK

SEQ ID NO: 1023089 - protein, 39 aa, Homo sapiens
  misc_feature (1)..(1): Xaa can be any naturally occurring amino acid
XIKKKTIRNLSPAPSGMFRIEEIPLDQVDIDKENEMLVT

SEQ ID NO: 1023090 - protein, 107 aa, Homo sapiens
  misc_feature (84)..(84): Xaa can be any naturally occurring amino acid
  misc_feature (88)..(88): Xaa can be any naturally occurring amino acid
  misc_feature (99)..(100): Xaa can be any naturally occurring amino acid
KRRAAIHRGGTLGPPRALGWQRGPLNSREAVFPGSRGNRWGNVGGKRKADGYNQPDIQASSDQQPTELGSQPIAQQPLQQGGDXSGNXGYNNDNQEFFXXTYGQQWK

SEQ ID NO: 1023091 - protein, 113 aa, Homo sapiens
TPSARADVTPCEHLLALWVPWILEGVHVVEEQPDHAIRLVQVPFHLPRPLWHFACSQQPDIRLQQGVGLVQLLLTQPRLHLQLGHDALKTLQPLKLAAELLLPRQDGASREAF

SEQ ID NO: 1023092 - protein, 43 aa, Homo sapiens
VLPDLSYERKVARDVIRRRRLKSWHDFAIAALTRRPMSGCSAG

SEQ ID NO: 1023093 - protein, 120 aa, Homo sapiens
MHLLLAGDSEVPYFPMGCESGRPFSLLTGLELALSPPWICGTCDVFPGDQNPIEAELQDMINEVDADGNGTIDFPEFLTMMARKMKDTDSEEEIREAFRVFDKDGNGYISAAELRHVMTT

SEQ ID NO: 1023094 - protein, 275 aa, Homo sapiens
ETGRVRCAVPVLQGVRAAGVRSAEACGCTPIVLGATFRDQCPKSLKKLVEESREKNQPEVDMSDAGHLRTMLDVERASLPYPISRDNWSVSHNKLTMVPANIAELKNLEVLRAFLSNQIEELPTAMISSASESQTTVNLGMNRLNTVATGYGSLPALEVLDLTTRTGAKILFLENSSYRDRPCVRLYLKVDNDVRDILAGRSLGERSPTVADTQGLGDYDLVSLPKNPGSLPSEGAPPSGKRYTRFGPQIRNLGLTGQSRIHSENTLVAPLGHLP

SEQ ID NO: 1023095 - protein, 127 aa, Homo sapiens
RPPSFSAAPSPFARSGCRLGGRLMPYRMLRPVLQPEKSEHVMLVDTALAVILDAVPDPLMCFITLGVLGRCVLSLSEQGQNTVSKHLIGLPRHQAIMPTVFMNGVAGVVHSSLDALVQRVAVGCHLV

SEQ ID NO: 1023096 - protein, 43 aa, Homo sapiens
MTEDPGCCRRNLKVISTMSVGIDHLALDEIKKREIRVGYTPRV

SEQ ID NO: 1023097 - protein, 486 aa, Homo sapiens
AEVGVTWHAQALGGEFPTGQDAEPTELSRALAKGGREADSGEEQSGTVDGAERRRCGSLNGAGVKGEANEGRSTLQTETGLTAEHSKRGVNLEYRHEKKVGAQMGSTSSFLPAQLSIVRASQAEKAFRGLSNCPAKFAIPLPPAVTPSLFVPARRAVLQCASGRGGGAAAWVVTNAGRGGPIRTFHFRVAAWRRFVRSDINGCCSAGCPPSCYLGALAWRSPSVLFCVQAFPSVPTRKATAEEARVDRQSEEAGASSRGSGPGYSRAMSYGDPPPDVSGVMTSRSKVDNLTYRPRHDTLRGVFEKLGRVEECTSRGSYIQGSSRGFAFVRFSTIERDDVEDANGMPWNGAVLERRELAGAHGALKVACGTHTRAPGDGTPLVTGAVATDAGAKPKQAVPAAEPELGAVKAPHRLAKRLEVRSRTGLTSGPQGHIPRRPVQLVDQFVRHSRSPRPPHVRGQPAVESSTLRRGLKSFAVQWRTDNSPV

SEQ ID NO: 1023098 - protein, 267 aa, Homo sapiens
SALGTLSALGARPRFSCSVDKFGYTLPGEFARLVEQIGLEEWLSFKMSTVHEDPGPSSAVEGDHSINPQVQMGSVNSRYTNFGLLERDALRHGYQAIERNQEDVALRCHHGPTFGTKRSKGTEDRDMACAYQEEGLTHKEACFRRLKVSLDRGLAVDDGDFGPSGKIMLLKYDRLSGLESFQWTGAGNPDEEPLHVRIICRETKQEVEEIEEKSTQEMYKNDLEKDIISEDLVNIRKLVVAGKGEEKDVMDGIEWWPDGGIYKLGGT

SEQ ID NO: 1023099 - protein, 105 aa, Homo sapiens
MTSGFSGADLTEFCQRACKLAFRELLRELRLRRDRERLTNPSALEVEEDDPVPEIRRDHFEEAMFFARRSVSDYDIRKYEMFAQTLQQSRGFGSFRFPPGNPLLG

SEQ ID NO: 1023100 - protein, 367 aa, Homo sapiens
RDAVVMAEVVSWKEPEPSQIKAHSEQADAHPVIELMKRPQCTLSRDTACMDLRAEWVSCFLKLFINDVYLAHLLQGLIEGLRWLKPRGGVRMCAGRCLPVWLKTAYEAADVADDQEEASYLLCIFVRILNSLVQKLLETTDRSDGHQNKLRSSVYESLMEHFEKQLPRNVTLLSRKTTLVIMERLQQVLQMESHIQSTSDRIQFNDLQSLLCATLQNVLREKCNIEDALQISDVVMASLLRMFQSTAGSGGVQEDALMAVSTLDGSVWVVNSSSTWRPFKTTSWAIGIKKLCQEITRFVVAAGVEHVAGSIFDAGAAAIPSSYLVCDEVMQLLIMENLGNEERSTGSGEVRRLLVSVGDIAWYGRRV

SEQ ID NO: 1023101 - protein, 296 aa, Homo sapiens
ETQRRTRWRRQLYRAGEAVVAEAVVGLVVLPTPGQEVAVAACWISGKIDDKPVKIDKWDGSAVKNSLDDSAKKVLLEKIQHMWTNSWSNLTGRLTICTISFFLCHSGLIRRLLCTPFQESKPVLAFVCHILIGDDGDSDHFIPHTKEKDASFSLGHKDDPTGMDPADTVTAVLSLTQVGLTNKTLKGDLHQVGSTNAEVPSASHRSTLKVRPQGQLARMTFEPNIQAPASCLAEQLGQFYSTPSRPGDTQARARAHKRHRAPQPQASRRGPPRGNRATTAANPHRATARPPPSTYT

SEQ ID NO: 1023102 - protein, 364 aa, Homo sapiens
MRVVRLSCRKRNSSSYMRFDDPGLMLMGCTPLVLLKARHYLSPSLFVYPEESLVIGSSTLFSALLIKCLEKEVAALCRYTPRRNIPSLFCGYGATGRRVGGPENIRLTPPGFQIGSFYPYADDKEDDARLLKNIMANPEQAGHRTEGYRLRSFAFTYRSDSFQNPVLQQNFRNLAGLDLGHLAWSRNNAVDRDIAQRVEAHEVKDWVSLVEDVYRSLVTHQDYKSCKWTVTKTKTRLLTRYLESNRGPKGRSTSTKKELEDPPSSTRVPLGPGSQLAHEFNHEGPSPEASPGLKEVGPKNTSNGQTWRGKETGYKPKARTQQEPGYHGEAENGYNSQDTLSRTQAARKGPGTLGTHKTDHTAEH

SEQ ID NO: 1023103 - protein, 112 aa, Homo sapiens
MPVLRKHSMSVTRQTLPSHGEYNSTRIKTTPRKMKKLRNHPQLNQQENSPKAVTNETDLCSLTDLDFKRETVKILKELREDMNSNSDTLRKELEHIRRSPEKLDHSFAYLGV

SEQ ID NO: 1023104 - protein, 68 aa, Homo sapiens
QPRYKTLEDRFFEHEVKLNKLAFLNQFHFGVFYAFVKLKEQECRNIVWIAECIAQRHRAKIDNYIPIF

SEQ ID NO: 1023105 - protein, 259 aa, Homo sapiens
MASNAGPPDVMIWRQGSGGIKLWCCGRGLCPRVCGVTGARVIITEIDPINALQAAMEGYEVTTMDEACQEGNIFVTTTGCIDIILGRHFEQMKDDAMLCNIGHFDVEIDVKWLNENAVEKVNIKPQVDRYRLKNGRRIILLAEGRLVNLGCAMGHPSFVMSNSFPNPADGADRAVDPSRQVPRGVHFLTKKLDEAVAEAHLGTADIEVDQANLEKQAQYLGNVPVMAPSSRITTDTETARSAVSTSSCLSIAQAQPHTH

SEQ ID NO: 1023106 - protein, 288 aa, Homo sapiens
SVPETQKRTRELLPHSWKAYAAGFGDRPRRILVLGLDNLNKITAQGQYDAPGGTCGTMGHDSALLSMTSSSVGDAKTRYKLKVEGYRGTGGDSMAYHNGRYFSTFDKDYSIRAITNVCSVLQRGFLVQELSPCQPDGEHMGTNNHSQGVNWFHWIGPSNTPIQFAEMKLDQAIFRNLKARRRRAVNSRDNWCERGIRPRARKGLLPRASNTNSPHHRSTPGHVVRVKADHGSWAEEQYVLTSLCFFFAQKIRLHMFRLGVSAKVPVKHRKLLPKGRDGQGRKRRCNTG

SEQ ID NO: 1023107 - protein, 58 aa, Homo sapiens
PWSEVSMMVNAHSSSWSSQTAAAKSPKFSIKFLRKSFLSVAKRQTPRMPISHVSGMLA

SEQ ID NO: 1023108 - protein, 136 aa, Homo sapiens
MARYLDLKVVFKPMAYRIYVFSQMHELRGLHNYHDLSKGNEFHSVMPGVCQNLAKRKWLSVELVLQNRSYFYTGSAPLMVLTSSGVLRTPGLPQSPLRVAQSAVCLFRDSRGLVPGLFSWVPISVWRRLPSPGLPE

SEQ ID NO: 1023109 - protein, 171 aa, Homo sapiens
MRSLSSQPVISCGPITLHSPSRCGSPPTLRVPKTFEQFFSDPYRKTPSPNKRSIYIQSMWLSRKHQNYQVKNILTWLTGYCKAYFYGLRVKLLEPVPVSVTRCSFRVNENTHKLQIHAGDILKFLKKKKPEDAFCVVGITMMDLYPRDSWNLSLDRPLGQMVWGIQFARYG

SEQ ID NO: 1023110 - protein, 42 aa, Homo sapiens
LGSCCMRRMAGSPISSTVTMAWMRNVLGSRVTNVKVTLRLDT

SEQ ID NO: 1023111 - protein, 180 aa, Homo sapiens
  misc_feature (106)..(106): Xaa can be any naturally occurring amino acid
AKFFEDYGLFMREGIVTATEQEVKEDIAKLLRYESSALPSGQYKPASQNTPARMRVRHPNIYYPVTPPSRHLAEHSPYYEAMKKKDTEVLLLLVSSFDELTLLHPXREVLDQGKEKLSPLCEDGDHKSVGFTYKGGDSLRTGPQPRSAYAEKETEELMAWMRNVLGSRVTNVKVTLRLDT

SEQ ID NO: 1023112 - protein, 168 aa, Homo sapiens
MCATYLTYFEETQIFSYFSQCGTVTRFRLSRSKRTENSKGYAFGDSGVLRIVAKIGGDNNEQLPVVVKRLWGGVILCHLKKYIKEFFKDVNIPFKAGIIFISDRVIIRNSDTKHKKLRREERFKKKERLLREEISKKGMDYDFPFLDITRKREVFQKINRQTSTKAVS

SEQ ID NO: 1023113 - protein, 235 aa, Homo sapiens
GRDPGGLGALQRSAARSVSVTALPPGPAGGCWWWRWRTALPGVGSRGGAPPELALGLPCCDARRGAVLAEIGAVTLVSARSRLSAPQPGLNPSSASKRRASRSRAACGKLSAGRPVVRELLEKDTEGQGAKKAETRTGFRGQLKPGGRLEPGAKEDETCDGQASGEQEEAGPSSSQQDPQWGSPLAQICSLCQVALQGSTGQGKALDWRVQSKRLAQRRLARAGYSITENCGSKV

SEQ ID NO: 1023114 - protein, 254 aa, Homo sapiens
GRDPGGLGALQRSAARSVSVTVCLPVPQEDAGGGGGERRSLVWGAEAVQALRERLGVGGRTVGALPRAPPELALGLPCCDARRGAVLAEIGAVTLVSARSRLSAPQPGLNPSSASKRRASRSRAACGKLSAGRPVVRELLEKDTEGQGAKKAETRTGFRGQLKPGGRLEPGAKEDETCDGQASGEQEEAGPSSSQQDPQWGSPLAQICSLCQLALQGSTGQGKALDWRVQSKRMAQRRLARAGYSITENCGSKV

SEQ ID NO: 1023115 - protein, 71 aa, Homo sapiens
DGQRTAGDPRFAAQIAGTQQGMPSAFTGPESSIRRLPGIHGKCVPPEREFQLDPTHIPRNMLLWHSTILRG

SEQ ID NO: 1023116 - protein, 400 aa, Homo sapiens
SRRSLLKKNVSINTVTYRVGSSCTRIKHWPGSTCRCYPREKQAVAGSEGAQYRKKQLAKELPGHDQDPSKCHELSPREVKEMEQFVKKYKSEALGVGDVKLPCEMGCPGPKHNVDISVRGYKQPHAADGGTLEGENTCLSDAQRASHIFLSICVTKMSMRRMVTQTIYAERAGYAEHCGTQTMYYVCSTCHELLVDMIHFWKNEKYTVADITVTGEKPRCAGCDELIFSNEYDQAENQNGTEHFCCFDCDSIYAGEINVMVNDKPGARPWLCEESPLLCVRMQHAIDQKAAERNYNNFSWLASPRAYQGTGEKCHIGQKYWRKRDEPGQEGKTRIKEEAQDGNKHPGAAHRKGSNKSATTPPKDSTRTEDKRKETDRHRQDTPKRTHDSQPPTDQREHST

SEQ ID NO: 1023117 - protein, 223 aa, Homo sapiens
MSKYLTFQGASHEVEKGFIWENLTPGGYWTLEVVGPKESFLKAGKKFFIPNFGGERFNNGPNTIFSIECVACFHTSHGGEDSYGQQGNWVKSLSNGGGHSKDEFPSNGVAYKLGERLVAMAKLLVLNDQWTAVFSFHTWAEADEFKQLGITILWNGLPAVQHIHVRHWSDVDLCVRKDPNSQIKVGGWKLWGTSRDKGAKDRGGLMYQAPIVSWGATKKLFQD

SEQ ID NO: 1023118 - protein, 80 aa, Homo sapiens
  misc_feature (73)..(73): Xaa can be any naturally occurring amino acid
TVAMNSVGEACTDMKREYDQCFNRWFAEKFLKGDSSGDPCTDLFKRYQQCVQKSNKRRKRFLLKDWSSWAMAXEKPENSS

SEQ ID NO: 1023119 - protein, 54 aa, Homo sapiens
SEDPRERGLIGIGRRLQLRFEPSLGTSVCRGSGPRNSDNNNNRQNNNNNNNNKS

SEQ ID NO: 1023120 - protein, 129 aa, Homo sapiens
MYGIEDTQDTVSLTVDGVVFHYRAATSRYTLNFEAAQKACLDVGAVIATPEQLFAAYEDGFEQCDAGWLADQTVRYPIRAPRVGCYGDKMGKAGVRTYGFRSPQETYDVYCYVDHLDGKMFEFLYLRMN

SEQ ID NO: 1023121 - protein, 142 aa, Homo sapiens
MYGIEDTQDTVSLTVDGVVFHYRAATSRYTLNFEAAQKACLDVGAVIATPEQLFAAYEDGFEQCDAGWLADQTVRYPIRAPRVGCYGDKMGKAGVRTYGFRSPQETYDVYCYVDHLDGDVFHLTVPSKFTFEEAAKECENQD

SEQ ID NO: 1023122 - protein, 99 aa, Homo sapiens
MMVNDSVRGLIGISYQMNHPKQQNKLRDEDLFRLKEPVHVGVKAQQMKMCDKNCVWEKSGKEKWKLPKKINGLRRKSFHGSERTVDNDCFKEIIPDFVW

SEQ ID NO: 1023123 - protein, 68 aa, Homo sapiens
SGVWRGGEAVASSALVSSLKGVTAVGCPRPLLPSREMSLLLRCKCTLSLLFNSENESYRGYIKNTFVK

SEQ ID NO: 1023124 - protein, 86 aa, Homo sapiens
TAVWAAPVSYGSSQARGRIRAVAGLAYTRATAMPDRSYVCDLHHSSRQRRILNPLSEARDQIHILTDPNVVLYHCATTGTPPKTYF

SEQ ID NO: 1023125 - protein, 130 aa, Homo sapiens
VNHPLGRGVTIQMDFGSDSRSEECTRMDHKMEFIKALALLVKFYFFILKKYSANGTGLGLAWKLASFFFFSFFCGRKRCVLKVFSRGGCVNSVQCGEKYRGVPANFLLLFLQKNLGVIPGVCSNTLILSI

SEQ ID NO: 1023126 - protein, 94 aa, Homo sapiens
LETPRCADGEPSDPFIDDGPDPLVGGADEAGDVQRRRTLVHRAGRVVLQHPPLTEHQQTDVQAHRLMLIVRDVDSGEVDLLVQRQELIAQLVRR

SEQ ID NO: 1023127 - protein, 70 aa, Homo sapiens
QSRARIPKMAAVKDSCGKGEMATGMGGGVHLGIPEAVFVEDVDAFSETVWEGDCMIQYERERWNEQYQTV

SEQ ID NO: 1023128 - protein, 43 aa, Homo sapiens
GDVMAVNGHMYHATPNLLSQHMGRVTKQWSPRESGIQFAGVFL

SEQ ID NO: 1023129 - protein, 309 aa, Homo sapiens
SWCDRRGTPVVAAGRLGGTGPRRHHGGATGAGPRLQLGRALLLRFTGKPGRAYGLGRTGPGGGLCAAGESSEAVPPSDRAQEPRLRFEARGSLTVSVFFRQSVAGLAARLQRQYVVQGLGAAAEPFGGGPVLFLAFQARVWGLIEEKPGGEPAGAGLGLSRTIQAIYTQEKQAGADACGHDDACRVSVEEYLIGQSMVRPASAVVFEDTNAYLVPDTGVTKSTGLFHGGASTSGPGEGGATRGPASLAQMCDFRRSQRALEQWQNCPEQCLVEVDPKRSRKSAQTAPTAAGQLMHQTTPKGSPSYHSVL

SEQ ID NO: 1023130 - protein, 82 aa, Homo sapiens
PQYKVEPTHHYEKGVFKLEVIIPERYPLEPPQIRFLTPINHPNIDSAGRICLDVLKLPPKGAWRPSLNIATVLTSIQLLMSG

SEQ ID NO: 1023131 - protein, 108 aa, Homo sapiens
IIGPMTFSDSVGAGYSPGTCIWRHMEKRGHGEVAHTCNPSTLAGRGRKITEARSLRPPWATERDPISTKNSKKLARHGGMHLVIPATQEAEVGKSTVGKSTVGKSTVG

SEQ ID NO: 1023132 - protein, 117 aa, Homo sapiens
MDQVSRYFSLAQSIAVPLTASTSSLYHLFLVVVVVVVVVLRQSLAQVPRMVQMVRDLELICNASILLRFKRIAPAFSPSRVAGITGVYHHAWQFFGIFSRDGVSPCWSGWSRTPDLR

SEQ ID NO: 1023133 - protein, 151 aa, Homo sapiens
GFTGDVKRREWSDAFESGIVSYVSSKEPGTEPVSPPCHPQTPRQTIDTHTPGHPHVTRVSPTDTRPPCQPQIHGPRVSHRYTAPRVTRVSPTDTRPPCHPRVTHRYMAPVSATDTSAPRVSHRYTDPRVNRVSPTDKRPPCYPRVTPNTAT

SEQ ID NO: 1023134 - protein, 117 aa, Homo sapiens
MAMINFNRQGAGRTKSNPTSKNHSIFINRTHRMNDSSIAIQHNHNNLKPTNLHHNNTSNIHTINPQLSNHNFIPIPYMKQDTHHHKPNNSNPTLNRRPASTIRIYTKMNNHSRNNKK

SEQ ID NO: 1023135 - protein, 82 aa, Homo sapiens
DTHTDENTSCDALYDAELSQMQTHISDTPVAAIHGQQPQTVTCDSIIAEVKGPIRGDCSEEPELKADIQIPDQFIGAVGHSS

SEQ ID NO: 1023136 - protein, 69 aa, Homo sapiens
MRMRTPSTPEPSYALEFHAYLMLNALYFISSRGPCILNIILEFIRKYKALRKYKALRKYKREGILKVTA

SEQ ID NO: 1023137 - protein, 333 aa, Homo sapiens
LHCQTQACPPLSWPQRHGHPSGYSRAIQFLHQDSPSLIHGDIKSSNVLLDERLTPKLGDFGLARFSRFAGSSPSQSSMVARTQTVRGTLAYLPEEYIKTGRLAVDTDTFSFGVVVLETLAGQRAVKTHGARTKYLKDLVEEEAEEAGGGFEKHPEHTASRSGCRCPGLLPSPLQIYKKHLGPPGTRGPCTTMRLGLGAWAQLACCLPCTCRAQKGGPPMTPVCTETARRSCMAVGGVGLPWAFGRPPCCIPPFPGRRPSYRCPALVRAPQWGLLHVQPLGSANQEPSAQGSQSSLQRGPKQPVDEYDESLSGLSAALCSWHLNSKLASGTRNP

SEQ ID NO: 1023138 - protein, 309 aa, Homo sapiens
LHCQTQACPPLSWPQRHGHPSGYSRAIQFLHQDSPSLIHGDIKSSNVLLDERLTPKLGDFGLARFSRFAGSSPSQSSMVARTQTVRGTLAYLPEEYIKTGRLAVDTDHLQLWGDLVEEEAEEAGGGFEKHPEHTASRSGCRCPGLLPSPLQIYKKHHGPPGTRGPCPTMRLGLGAWAQLACCLPCTCRAQKGGPPMTPVCTETARRSCMAVGGVGLPWAFGRPPCCIPPFPGRRPSYRCPALVRAPQWGLLHVQPLGSANQEPSAQGSQSSLQRGPKQPVDEYDESLSGLSAALCSWHLNSKLASGTRN

SEQ ID NO: 1023139 - protein, 67 aa, Homo sapiens
DKDEFAPGSSLKIMITHRLRPGICYDESDRNKDEKLTKEQILENWNMFVGTQATHYGEDLTTTHDEL

SEQ ID NO: 1023140 - protein, 59 aa, Homo sapiens
AGHVSLSLVAAPPCCGQGYLPVNEFFGFTADLRSNTGVQAFPQCVFDHWQILPGDPLNS

SEQ ID NO: 1023141 - protein, 302 aa, Homo sapiens
GCRRRETKMAARVGAFLKNAWDKEPVLCSVLSSSGASNSADDTTPEVCSMMTRTASKRAHSMTNPLLPPPGPRYLCKFLEFMPPLSPLHSSISDHDQQGHAPTTTQCPSVTDGNMPDVPSHPQEPQGPERMEWREDTVSTSTDRGGSSQGFPLKQCENLIINPPVGNAQEREGLNVGEQNPKEASQTCWARIWENTVGTNIPAGAADPGMNMLSLHSLRKTVAYRGLAAPTKKHAADGLPLGHREQGRTANYQGPQAINITRGGGDHFWGANTSPRPDSLPPRSHQYHPLFGDTPRATTVED

SEQ ID NO: 1023142 - protein, 261 aa, Homo sapiens
LSPPGDKDGCESRRLPQEVPGTRSQCLCSVLSSSGASLEFMPPLSPLHSSISGHDQQGHAPTTTQCPSVTDGNMPDVPSHPQEPQGPERMEWREDTVSTSTDRGGSSQGFPLKQCENLIINPPVGNAQEREGLNVGEQIQKKLLRRAGRGSGKTQWGLTYLQGPLTPVMNMLSLHSLRKTVAYRGLAAPTKKHAADGLPLGHREQGRTANYQGPQAINITRGGGDHFWGANTSPRPDSLPPRSHQYHPLFGDTPRATTVED

SEQ ID NO: 1023143 - protein, 83 aa, Homo sapiens
TRETVATSQDAPGTVQHEQQLTLRAQPEVKTPLTANITRIRKHIPARGPPAAAAVGGAGHVLGKRPHDLSGSTQCLRHPASFA

SEQ ID NO: 1023144 - protein, 171 aa, Homo sapiens
MATNWGSLLQDKQQLEELARQAVDRALAEGVLLRTSQEPTSSEVVSYAPFTLFPYMVPSCPVEQAYACARMDFNLLVDAVSKKRCFLEQTLSSTIKQDDFTVVSLTFHKQVLKEGIAQTVFLGLKSSDFMFQRRRKMAPQALKTDRNQTPSLQLGGLAPGPQCARIVSVSG

SEQ ID NO: 1023145 - protein, 120 aa, Homo sapiens
MPSVLLSAARALPACCAVVSPATDLPAGTPESAAPPGPNTGQTRRGANGTPERDPAKERIQRILGDGDRQRHHRAETYGEAQKQGRAELECTESDTNAKETQKQAHGNTIADRDDQGAGS

SEQ ID NO: 1023146 - protein, 46 aa, Homo sapiens
MRTDKGCHIVGYFSKEKESADAYNVACILTLPQYQRKGYGRLLIQF

SEQ ID NO: 1023147 - protein, 123 aa, Homo sapiens
LGASNIIVCDVDEKRIAAREHPPGNEMYTRRLRLVFEIDGQRGSGTWCRNLCLLSKMFLDHKTLYYDVDPFLFYVMTMRTDKGCHIVGYFSKEKESADAYNVACILTLPQYQRKGYGRLLIQF

SEQ ID NO: 1023148 - protein, 70 aa, Homo sapiens
MSRYAREEYGALVLAQRCEEEPQRAPVEPFDHRIGTALQRVHVRGAPHVDARAQRREQRVIATRIEALRP

SEQ ID NO: 1023149 - protein, 196 aa, Homo sapiens
MGLELKCETWVAWRQVTILVSSSSFYPSGFVTTGPLLSSVNMPKNDCHACGGFSPVFFHPSPLLTVTPALWQGTVAAVCSCHVPRPCGAGRLACISLSTYSDATRISGTEFNQYPGEKLLLLQSFGYANLICPNHPKTTISDVTLPCDRLIRFPGTGLFLELQPRHLCLLAPLSLSFDAAVTHRAERRMSRGPALD

SEQ ID NO: 1023150 - protein, 80 aa, Homo sapiens
MPPTSAACTSLGVSRPSLREAIQQLNSQGVLISRRGDGTYIQQLPEQWPQQLIVNPISNLIEEDPLYRFDVQEARWALVG

SEQ ID NO: 1023151 - protein, 49 aa, Homo sapiens
KRSIAFLHSSTATRGLLLGYQHDDIGVVRLILPGPDNLDAEIATGRRMP

SEQ ID NO: 1023152 - protein, 137 aa, Homo sapiens
GGSMRIFDSEEILAGYKRERIDPTPYYWYTDQRKYGHVPIGGYGLGLERFLTWILNRYHIRDVCLYPRFVQRLHAISHFLQKHGATDYEHGTGSLQKKDKESRDNLPFFHVPCGVSLSCYTLSTTIENYLKITLNIK

SEQ ID NO: 1023153 - protein, 50 aa, Homo sapiens
MISSSIRRVCVELPPTAKMHAIIERTASFVCRQGAQVEVVVEAQKVKLGV

SEQ ID NO: 1023154 - protein, 100 aa, Homo sapiens
IPRCHLCVRAQYAQTMAYNITPLRRATVECVKDQFGFINYEVGDSKKLFCHVKEVQDGIELQAGDEVEFSVILNQRTGKCSACNVWRVCEGPQGCCSSST

SEQ ID NO: 1023155 - protein, 37 aa, Homo sapiens
FKWSTSSLEMLRAAVAGLCCALILGLWVVLEVQPDSP

SEQ ID NO: 1023156 - protein, 45 aa, Homo sapiens
SATSTNSPGDTETHFLPDDTINLRPRGGIYTHPHSTGYTLFVEVA

SEQ ID NO: 1023157 - protein, 58 aa, Homo sapiens
MGELGSQVLTLVHGWAGTTDGAPFSIPLTRQGVRAPGGGRGEKGAAFSRTNPHSNSPR

SEQ ID NO: 1023158 - protein, 136 aa, Homo sapiens
ITGSYYAQTLLRMMEALCSKGLQCCRHFLGPFPRSVPRHNPVSEVYGQFFRPHGLVFALTCTVNCGTLYRQVCASPNHVKSIECTTGGLQSSCQNISRMINGNRMHLRSILSLIAKGQNNYVKKFSFFYTFVKKNK

SEQ ID NO: 1023159 - protein, 126 aa, Homo sapiens
MRDGLTILIGISQDVVFYFFDVPGSSPGACVATCARTRWAPTSAAVPCASGSLLIAGHVKTSSECSSSPCSQECANVYGSYQCYCRRGYQLSDVDGVTCEDIDECALPTGGHICSYRCINIPGSFQ

SEQ ID NO: 1023160 - protein, 72 aa, Homo sapiens
FLLLAPSQDPETKKSRVKLPSGSRKVISLSQESCGSSVVAGDGRVDKPILKCWTGYHKYEAEAGSRKRQKQE

SEQ ID NO: 1023161 - protein, 191 aa, Homo sapiens
  misc_feature (151)..(151): Xaa can be any naturally occurring amino acid
  misc_feature (172)..(172): Xaa can be any naturally occurring amino acid
  misc_feature (185)..(185): Xaa can be any naturally occurring amino acid
WGYGWSRTTSRNGFTAALVLPELPGIQTATLAEHRQGRFLWQEPRRVAGGASGHPPLSQGPRRPRLGAASCLKAPLLLCWAILRCFPSSATCFRSSKTSRCTWSTSRGSSRWRAAGSRGSRSTFCLSRVTSRFRSCTLSPSFLSASPEDTXPAWTDPPADQLGQTLRLDQLXQTLQSSLSRCGRXAETQHE

SEQ ID NO: 1023162 - protein, 99 aa, Homo sapiens
HQLFTLLGVLGHQLQGFLQQQACFAQLLMLQGTLLFQLSQFFLQAPAAQFDLLGAGTAGRQAGIEFAMQAVFFLAAAEQLFALLFQAQLLLAQGLGYRA

SEQ ID NO: 1023163 - protein, 55 aa, Homo sapiens
MLLVLGYRFFKLLVVSWPASAPMGLEHSVLKSLDNRNGLDGTSLLKPGQADLSKP

SEQ ID NO: 1023164 - protein, 94 aa, Homo sapiens
QESMDVRQEGAGVALHPHSLQKLKIPKRRICGERGDKEEWFGPASGPTVCLGVVRKMTTDGRRAHSQGPAHHVFVALIEPNLADRDASEEEVKA

SEQ ID NO: 1023165 - protein, 140 aa, Homo sapiens
  misc_feature (61)..(61): Xaa can be any naturally occurring amino acid
RVHIGRRWIKVQRKELTSQLTPHTHLATMDIAIHHPWIRRPFFPFHSPSRLFDQFFGEHLXESDLFPTSTSLSPFYLRAPSFLWGTQRGVLTLGSHADAPGEGGVRSVLSWLCVTAFPPEEELKVKGVGDDVIEVAMETH

SEQ ID NO: 1023166 - protein, 120 aa, Homo sapiens
  misc_feature (21)..(21): Xaa can be any naturally occurring amino acid
  misc_feature (24)..(26): Xaa can be any naturally occurring amino acid
  misc_feature (41)..(41): Xaa can be any naturally occurring amino acid
MRQKRPKLSRNSLGHSLPPIXKAXXXGALMMMAAAALGISXRPPGAGPPVLRAQKEGERTFVSSSGLSQGPASPYHPPPLFPPSPQPPDSTPRQPEASFDHHHRDHIPSTPSLVVYGSSR

SEQ ID NO: 1023167 - protein, 118 aa, Homo sapiens
  misc_feature (21)..(21): Xaa can be any naturally occurring amino acid
  misc_feature (24)..(26): Xaa can be any naturally occurring amino acid
  misc_feature (41)..(41): Xaa can be any naturally occurring amino acid
MRQKRPKLSRNSLGHSLPPIXKAXXXGALMMMAAAALGISXRPPGAGPPVLRAQKEGERTFVSSSGLSQGPASPYHPPPLFPPSPQPPDSTPRQPEASFEPHPSVTPTGYHAPMERPK

SEQ ID NO: 1023168 - protein, 55 aa, Homo sapiens
GAENLVGAENLVGAENLVGAGKPSGGSEKGRTPGPLIPSPCSFFFRFYETEVLAI

SEQ ID NO: 1023169 - protein, 31 aa, Homo sapiens
MYQYRNENYCMCSLIWQKQEAVEAGCGRSRK

SEQ ID NO: 1023170 - protein, 36 aa, Homo sapiens
RHPSAMRTKWWHGDPLCGRGRVLVSGDSHGPVFPFM

SEQ ID NO: 1023171 - protein, 76 aa, Homo sapiens
SVGHHCEEAREKYGKDFKDIRQDFLPGKSLTIIIEYYYMWKTTDRYVQQKRLKAAEAESKLKQVYIPTYSKPNPNQ

SEQ ID NO: 1023172 - protein, 315 aa, Homo sapiens
MACLTSRPRQLCLPPVPACCHFCLPPSRRATWPASVPACATWPASVPPRHLACLRPAAPLRLPPSPDPPRHACGRLGACRSRPLPPAAQERDRLSRVRRTGSCSTWGRSNNILLLQASGQDDSALGYRNPVGITGMPGALQPEQIELPSADNQTCVSGKVSSEELLWFITRDSTNANELSSKGRENLVMPMDPETFWTAWDSPPENNRDLGPVYGFQWRHFGAEYQRYGITIIQDRQSTTANEVIDTIKTNPDDLKNHHVRLEIHRDLPLMALLPCHVLCQFLIVVEPVSLYCQLYQRSGRHGPSVMLSTSPGYA

SEQ ID NO: 1023173 - protein, 123 aa, Homo sapiens
MSCRRSALTLLPKKGDLCELKNWRPVALLCADYKIFAKGLSNRLKSHLDSTVHGDQTYCVPGRSIKDNLFLIRYMLDCSRGSNVNFGLVSLDQEKAFDRVDHEYLFNVMSVLEFGALRGYPAR

SEQ ID NO: 1023174 - protein, 110 aa, Homo sapiens
YLTPQTHPHTFPSASRRPSTKVSFHPLSPLSAIHKANAQWQAVKDCVKSVFRGCVSDNVKRTKAHQLEWTTVAITPQSRSVSRAPEGLQLQLEKKSLRFLLALSLRARWC

SEQ ID NO: 1023175 - protein, 84 aa, Homo sapiens
PTVRLLDSDSFRLLVEQDAQYTSAVAHGAIVADLGTAQAHQQRAARIVELKRNYGLNVNPHSHNGKASAPPMSVKPEGKAQCRN

SEQ ID NO: 1023176 - protein, 85 aa, Homo sapiens
FINEHFAEVIYSDLSYAPNSNIRSFNLNHKLTGRIRMDKDGGCGEPMFQFHKGSVDRWRPCERYLGRDECREEGRQGDVTPNERR

SEQ ID NO: 1023177 - protein, 102 aa, Homo sapiens
MHRLVKKEDIQTSPALSPSLECSSAIIAHCHLEAGVKQSSSISLQSSWDYLRGPPHPANLCGFSFVFRSGFPSGAVAQACNPSTLEGRGGRITRGRRPACTT

SEQ ID NO: 1023178 - protein, 48 aa, Homo sapiens
MKVDNLDVLMLCQPTRYSGKLVVVQVKLPQMRRVGQRAIVNSRDAVET

SEQ ID NO: 1023179 - protein, 53 aa, Homo sapiens
MVFIELAPGLEAGPAIQWISSQQERSYRDRTGRVTVHPFISCASAIIWLQIYN

SEQ ID NO: 1023180 - protein, 139 aa, Homo sapiens
MATVVGKRPQTRKLATSPRAAMGPPRLESDLVQEGWTRDFARLFSELQRPLWPPLREKPSAHTHRLHIPTTFAPCPGTLSRHCNHKMVFIELAPGLEAGPAMSVISSQQERSYRDRTGRVTVHPFISCASAIIWLQIYN

SEQ ID NO: 1023181 - protein, 295 aa, Homo sapiens
RVMRAHDRWILPCFPGRWLVVRAWRALPWRMEFGGGRGLLSPPMGQSGLREVDPPMGPATSDMNMNVNMNMNMNLNVQMTPQQQMLMSQKMRGPGDLMGPQGLSPEEMARVRAQNSSGVMGGPQKMLMPSQFPNQGQQGFSGGQGPYQAMSQDMGNTQDMFSPDQSSMPMSNVGTTRLSHMPLPPASNPPGTVHSAPNRGLGRRPSDLTISINQMGSPGMGHLKSPTLSQVHSPLVTSPSANLKSPQTPSQMVPLPSANPPGPLKSPLGPRLLPQCPFTHWLAQQAQVSFHGGAL

SEQ ID NO: 1023182 - protein, 219 aa, Homo sapiens
GDGDRTWGRLTDGPPIEAVERLTRHVLHLPTVFHHLPHLLAKESMSADPRVALWATGRTATMSGWLTWALPKRCVRECCYLATLYLISSVISLYLRCLSPRMVVRMELGHSWVLIVARHDLTVSLRHVTENIKALFPTEIHSGLLEVISPSPHFYPDFSRLRESFGDPKERVRWRNKQNLDYCFLMMYAQSKGIYNVQLEDDIVAKPNYLSTMKNFALQ

SEQ ID NO: 1023183 - protein, 80 aa, Homo sapiens
FIDCHICMCHSSTCESSTCESSACLSVVHVSVHMCVSVYMEGSVICMYESVICMSVSLSSTCMSWSSMSVVCVCISHPHV

SEQ ID NO: 1023184 - protein, 70 aa, Homo sapiens
LCEPQANEPLSPAQQPFGPCPIEIGLETSGRLIAEHLAHIMHSKTMYFFLLPFGTRKPGTGHFFKKQELA

SEQ ID NO: 1023185 - protein, 79 aa, Homo sapiens
DAVVITDPYYAHTPLMDYDGSQHGTIIKPYNAGECGHIERLVMAHINSIIPDTLDPLHTFLTDPEKTQSQLHSTLSSLN

SEQ ID NO: 1023186 - protein, 112 aa, Homo sapiens
VIRNRGLPVRSGITGRVVYRSRINNFQQFLRTPFQLQLGPPSERVRITTPLLAVISGSILSLHSVDCERIRGPRPTATEAKRDSRSHVGCVINQESGGGSRLLLVPIYVTYT

SEQ ID NO: 1023187 - protein, 117 aa, Homo sapiens
NLAPLFRETSFILAGLGKTLVLLLAYSINNFQQFLRTPFQLQLGPPSERVRITTPLLAVISGSILSLHSVDCERIRGPRPTATEAKRDSRSHVGCVINQESGGGSRLLLVPIYVTYT

SEQ ID NO: 1023188 - protein, 119 aa, Homo sapiens
ASCGIGQLGLSPGLKHHPNTICTMCLSQAMRSPRVVLCTSTSPTDPQPSSLAWTPCESACLFSRSHHTLNPLTTAQPSLLSTLVSFSSSEPSSQSDRLTAPAQASPFSTFQKPSSHFQP

SEQ ID NO: 1023189 - protein, 38 aa, Homo sapiens
CQAGLVVEIATYRELLEGEECRLNGEGIADKSHVSVVQ

SEQ ID NO: 1023190 - protein, 37 aa, Homo sapiens
ELGTTSSEFPDTTTRSFGPTLHDEPQHTIAGPPPKHP

SEQ ID NO: 1023191 - protein, 100 aa, Homo sapiens
MVKRCCLCRCCHHHCRQGKRKKDKTKRFPKRPKKQIVMTNPGSTRYSRSQSSRALSQEVMLAGACRLRLEGWSSNKTSDAIHSDPDRKAKSSQLQITSEF

SEQ ID NO: 1023192 - protein, 47 aa, Homo sapiens
GTADCTLAQQTYPGTADVPCAQQTVPWHSITYPGTADVPSYQIKTNP

SEQ ID NO: 1023193 - protein, 245 aa, Homo sapiens
SVGRAGTTRPTEPIAERDSAFRSTRQQGVDRAGIRYTGNRMLPCPAGRDLVGVFLSASPLLGIPGERWLVFPTGGPPWCTGYPCPVLAQCPLLGAKRGQEDPRALCAPPSENDGMTETFRCLCPREKRISSAFLPDRRVLTEDEMGPPEIGDAMSPAQGGPAVQVPCDRRVSPGCDGGSSIPGSWGSQWTARMLIVSSGLNCALVCGPCCKFHAGGDDIMVHPLPAGTNLGGSKSGRGWVPSMIL

SEQ ID NO: 1023194 - protein, 68 aa, Homo sapiens
SLGRDRVEIFIFKSRKIQVSWQGLKAWIGQTSDLSSKETSPGYIPACAYSADRPCEPTVPAQSVLPTT

SEQ ID NO: 1023195 - protein, 113 aa, Homo sapiens
MVSDHSEGTFERLRYSFGGDRPSQNSPSGIVPRPDNGCRLEIQQYRGGIPTATLHYLASMLLSLPPILYEYYRIAVPNWSKAPWGLSVLLRVTSIFTGTSIITGCIVETAYLG

SEQ ID NO: 1023196 - protein, 267 aa, Homo sapiens
  misc_feature (65)..(65): Xaa can be any naturally occurring amino acid
  misc_feature (113)..(113): Xaa can be any naturally occurring amino acid
MALSWVLTVLSLLPLLEAQIPLCANLVPVPITNATLDQITGKWFYIASAFRNEEYTSLRLHVQDXNAYPYFLHLPSANQVQSDYVILSLRVGHQNLVPESMCSLIILLVYLAXCPSRRMQLGTSHPMHTAGHGQMIHCLLTLACSLQRTTDRRLDVLVSVPWHGMRRTGGCLSMLTSQETTQGATGRVLRSSRLLGQFPKSDVLYSRLETRISVSHWRKQHEKAEETGGGGNPSKDTALDSGHEHLGAILALQPDMCTSAFSPHLHQ

SEQ ID NO: 1023197 - protein, 220 aa, Homo sapiens
EHCLAPRASWSQYGAVLGSYSPEPPTSAGSPDPIVCQPSTGAHHQRHPGPDHWLSGFISHRPFETRSTIRSVQEIQANPSFTSPPNKTEDTIFLREYQEPDQDQCIYNSHPNLNVQRAQMVTISRYVGGQEHFAHLLILRDTKNYMLAFDVNDEKNWGLSVYADKPGDDPRSNWESSTKLSTAWAFPSQMSCTADRKQDKCEPLEKAAREGRGNRRRGES

SEQ ID NO: 1023198 - protein, 101 aa, Homo sapiens
PELLRMMMMGTRTHRAARLMMLGTRTHRAARLMMMGTRTLRAARLMMMGTRTHRAARLTMLGTRTHRAARLTMMGTRTHRAARLTMMGTRTLRAARIRSSC

SEQ ID NO: 1023199 - protein, 34 aa, Homo sapiens
MEGPGLPRGDCEGPMEDICSVLCHQGYRVSKFVS

SEQ ID NO: 1023200 - protein, 69 aa, Homo sapiens
  misc_feature (2)..(2): Xaa can be any naturally occurring amino acid
VXDQAEGTPLLQRHCRWLHESHWSLGQKVIEYKYTKTSRLAIIDVAPLVTLVPPDPGIAGFDVGPVCFL

SEQ ID NO: 1023201 - protein, 116 aa, Homo sapiens
YLERSVHRRVGGGNRLRWGCTPLVLVKSSVPEQHLQVAPPSWVGISSRDTAALVHVEVEAVALLAAADATLVGRGPVAAVAVLEHAGVPGQAQAIVADAGLPAVPHLPAARKLRLL

SEQ ID NO: 1023202 - protein, 121 aa, Homo sapiens
  misc_feature (7)..(7): Xaa can be any naturally occurring amino acid
  misc_feature (116)..(116): Xaa can be any naturally occurring amino acid
NALYFLXAILSQRFILPQRSILSQGFILPQRFILSQRFILPLDSQVRPSSQRRKAENSKNQNASSPPKDHNSLPAREQNWTENEFDEWTEVGFRRWILTNLPELREHVLTNARKLXTLKRG

SEQ ID NO: 1023203 - protein, 78 aa, Homo sapiens
RSRMNELGVWTCRIMTRLCGKSQEEVVAELQELVYQHPATGAWQTRDQYLSGNVKEKLSQAKIAAQQDPRYLANVSAL

SEQ ID NO: 1023204 - protein, 40 aa, Homo sapiens
YTAVSWLYASSPHAYEAGCARSPELGCLRVWDIQGLHLHP

SEQ ID NO: 1023205 - protein, 42 aa, Homo sapiens
SSSAPPDSLGVMTLAVYPGTFDPITLGHVDIVRRALTVFDRI

SEQ ID NO: 1023206 - protein, 126 aa, Homo sapiens
MQMCLQGMPCVWGCPSWKVTPFREAKILCFTLKTRREGCAEGMPFQAPRVMNLTAFKVSKKKLFSLILRRYFRPFPVWPGSLLGKDHRISLEFLLEWRQHWVGGNSIFKLVISCCVFGGGKVLFIP

SEQ ID NO: 1023207 - protein, 34 aa, Homo sapiens
HWLRKIIGGVDYKGVRDLLKVILEKILTIPNTVS

SEQ ID NO: 1023208 - protein, 109 aa, Homo sapiens
SSQSASAFFFFLLAPSYLLFCTFPAQPPPQPGSTATIPSLACCKYPQHCAPLSQLAENSPGESNSWTSLHLHTGCQELPEVLAQQPGWNHRAILNLGQALTAHLANPQV

SEQ ID NO: 1023209 - protein, 209 aa, Homo sapiens
  misc_feature (17)..(17): Xaa can be any naturally occurring amino acid
  misc_feature (38)..(38): Xaa can be any naturally occurring amino acid
  misc_feature (64)..(64): Xaa can be any naturally occurring amino acid
  misc_feature (72)..(72): Xaa can be any naturally occurring amino acid
  misc_feature (77)..(77): Xaa can be any naturally occurring amino acid
  misc_feature (93)..(93): Xaa can be any naturally occurring amino acid
  misc_feature (106)..(106): Xaa can be any naturally occurring amino acid
  misc_feature (135)..(135): Xaa can be any naturally occurring amino acid
  misc_feature (147)..(147): Xaa can be any naturally occurring amino acid
  misc_feature (196)..(196): Xaa can be any naturally occurring amino acid
MPGFQPAGQTSPCSSVXWKAWTSRRASSTERARRQMIXSDLAKDTLAIDDKEAPVGNALICFQXAVILRQAXGHVSXQGDVQGAQASALVRGXLEPSQGGELRVHXEAQHFTAQLAEVLCTVAERDDLGGAHKSXVQRVEKEDHVLXFVVRQLHLFEGAINHRCGLEVRGWLSDARVTGAMTESCVGKGYEARTIXRVDPRSQRQVSTG

SEQ ID NO: 1023210 - protein, 96 aa, Homo sapiens
QIAADIPASGCFPCIGRKLGSNSIQAPGNNMVLLLAVTTSDALQEKVADGTCIYQGKTLGILLLRLAEQEVNELREFALETLQVTVAITSQTQCEL

SEQ ID NO: 1023211 - protein, 251 aa, Homo sapiens
RAVRLRRSGSCRRTERPRPRRAARPPRMPFSNSHNALKLRFPAEDEFPDLSAHNNHMAKVLTPELYSGAAAPRARRAASRLERQSIQTGVGATRATPYINDQWSCVAGDRRSPTKVFKGSLSTPHHRGPATAATKPSDEHKDLTLNPRTTLAGRATDLGPRTTLLELRGVRHRARRHHVSILHYPPALQADGEAHAHIRESSADGKPLSKPGTCEPERAWILTPLKKHDGARTQQQLHRRTTSSFDKPVSP

SEQ ID NO: 1023212 - protein, 288 aa, Homo sapiens
SGLFACVAPGAADGRSAPGPAEASTPGGGDRPSVYEHSTKAPGRLALCSRARVDRCSRETSDSPYKTSQNWPNGWVDVTYAYQRRDAVDSAKGNDRPHDEAVKRLANRTDSLPKDQCGRKGTKHRPSWLVTHANSNTAGALVLGRGRTEVRSLARARCFETLIAESPVGSKVMPRLQGVLTKVTRSTRTQPRDTGHIHVHVNDTLVRVSCCTSIFGYNRDTNPSARNLRSGSQTKRKRSTIRIDYTLCALTVTCIYLLVERKAKPPIRGNCILGEVTDQETGTQRRFR

SEQ ID NO: 1023213 - protein, 102 aa, Homo sapiens
MSIRKSLYPGTVQTGLRRTYIRPIRRVERSLISTACLLHAYETHMTSCERVGEPDDVVKLRQGPNRLVSQECSGVGLQDLSRGQVILYPLNLTLNIARNNGF

SEQ ID NO: 1023214 - protein, 113 aa, Homo sapiens
AGCSPASLRELPTDGAPPAPPRRYDAQERTVLEGTCKLVLILEPPTLVWVYFHAKVETSQHNCQLIRVNAEPHPRCYVSSFTDTERLIGDRRKGIIVASGCPNKREFRDVKKC

SEQ ID NO: 1023215 - protein, 59 aa, Homo sapiens
PEWRNEDKKQMYAKMARQGHSHVTNYVTRVIKTKEDDAGNKDQFQDEIIDVEKDGQEIG

SEQ ID NO: 1023216 - protein, 141 aa, Homo sapiens
CAWNSVLVRSELRRRVAESTGGPGQCMSLVTWCTNPEDPVDSGLGEAEVTLGEAVVEAGEVHPCKGACNHNIDYAFWVAAGTKGTEGQWRTCHVSKGLVSRLQRREQSCWGYGRSNDLFSPVMSILNHDISGQSVHLVKGA

SEQ ID NO: 1023217 - protein, 142 aa, Homo sapiens
  misc_feature (136)..(136): Xaa can be any naturally occurring amino acid
VFIDATSVYRCHWCLSMPLVFIDATGVFDATGVYRCHWCLSMPLGVYRCHWCLSMPLVFIDATGVYRCHLVFIDATLPSQPGPRTGGSVRVWCLEKVVCSPGIVREADNLVKVSRPNKGTRQVGITKKESLKRVLXRCIRYT

SEQ ID NO: 1023218 - protein, 78 aa, Homo sapiens
VFIDATSVYRCHWCLSMPLVFIDATGVFDATGVYRCHWCLSMPLGVYRCHWCLSMPLVFIDATGVYRCHLVFIDATTS

SEQ ID NO: 1023219 - protein, 267 aa, Homo sapiens
MKPNIILCTFPCSSSVEKQAAVMGPTKVDQKGRLPSDISQFPQGPKGPALFWDKKASNKWNPKADLFIFNTLYHVRCQGLMTSPDKVSNSDLELPYIRDGTNITKRSLGGKVNQVAPILNQERQSTMHNFKRSFSQGTLYTIQGGQQLIVGTQTSFSRSRRIAHLDTGISSHIFKHQKKGCGVTGTKVKTNFPSTGCTTKGQTHTCGSQSSYVLQDLCTKLVSIHQQNNCCALQTISRFTTLPGDLPTILLVLTAVEEGNIFQRCKA

SEQ ID NO: 1023220 - protein, 43 aa, Homo sapiens
SGGLPGNCEVWGEDEEEDSPLGVRGQLPLPCTVTERHAPPGPP

SEQ ID NO: 1023221 - protein, 56 aa, Homo sapiens
LGTPSATTLVTEAALRCQSWQCCLIPVPSAGGATSQELAQDMSERLNIATTLQMHL

SEQ ID NO: 1023222 - protein, 34 aa, Homo sapiens
MSAITLPLILSGIFRELHGSRDSILCQCRRHWWE

SEQ ID NO: 1023223 - protein, 52 aa, Homo sapiens
VLSSSTPIASSPPHHTPYRRSIRALRLRRFDSYCLSKEETPDSKAVKTLASH

SEQ ID NO: 1023224 - protein, 43 aa, Homo sapiens
CGDRVLLDCDIDAVMHKVVLVAVLIHGPVVHLEGVTVHVFTIE

SEQ ID NO: 1023225 - protein, 106 aa, Homo sapiens
HHVVKRCKHLQTGFLVRVFNWDKHSGCGGCWAIGTCPYFVRNSPHAVFHTLRAMSHPHGHWMRFPGAAVRPACGVEFAVFSVSVGVQCWHTVLVSSVDTRYWGLLF

SEQ ID NO: 1023226 - protein, 49 aa, Homo sapiens
CSGHYPLGSYDSFDAPSDYIITEKTDLASRRRTVRGYGFVAPRGPRTQD

SEQ ID NO: 1023227 - protein, 57 aa, Homo sapiens
LTHTHTPNTHTCLVLGTPHNPGSLISRVSGRACHQPEHRPCDDTVERIRLPAPAADT

SEQ ID NO: 1023228 - protein, 122 aa, Homo sapiens
LVPPSFSNAPLVPFPTRFSTVRLEHHRDSPKCPLPLQELSKHPQSEHSKQHSPGATFQPWGLCTAVLFTWPALPPEREKRPSLVVPSKLHPSLTLLPAVSLLCSPNMHSTLFPLSTVCLSNY

SEQ ID NO: 1023229 - protein, 85 aa, Homo sapiens
CGGPLLGLFARRLWLLAGWLVVSSATACHVLLLAAWLMRFCRSSDPLRFLQPMPARSMSHKACLERRLNAGISTIKLCVDLEIGQ

SEQ ID NO: 1023230 - protein, 68 aa, Homo sapiens
HERQYPLEFSQLKVLRREAEFTTTSLCEVQPFTTAPSGARRRKVLGGASLRPRTQLTVDPVTFNAPKS

SEQ ID NO: 1023231 - protein, 44 aa, Homo sapiens
ELPPPGTQALMRDPSSFKVWLTGTELIEAHSTEMCPRAVEYMFL

SEQ ID NO: 1023232 - protein, 35 aa, Homo sapiens
IRSQGLACNVYCSGRETIATKASITTRANLLLLTQ

SEQ ID NO: 1023233 - protein, 121 aa, Homo sapiens
RSRGSYAGAGAEGEEIKELQNAGDRLLREDHPARPTVESFQAALQTQWSWMLQLCCCIEAHLKENAAYFQFFSDVREAEGQLQKLQEALRRKYSCDRSATVTRLEDLLQDAQDEKERVPRS

SEQ ID NO: 1023234 - protein, 113 aa, Homo sapiens
LSIEIQELLLVILMLEHLGVASCDPDSGDLGVASCDPDSGDLGVASCDPDSGDLGVASCDPDSGDLGVASCDPDSGDLGVASCDPDSGDLGAASCDPDSGDLVAVSVSRSRNC

SEQ ID NO: 1023235 - protein, 138 aa, Homo sapiens
KAPALWDGGFFGWSGVTSTAFSGAAVMVVLCDSAPLQGTRSLGRVPPGFSGILGVTSQPSTCSWTSQADSGQASEGSGQNVENVGGLWRVPWEGQDRATDSHFPCDARRQKVSAWLGFCGVKMDFCHWDYYHYDGVDV

SEQ ID NO: 1023236 - protein, 279 aa, Homo sapiens
VLGDQWLSNGHPGIVMPLGARTVSHMIQGHVPAWPYPRDPMEMNRAVVAKKYNMRVEDYEPLPRHDGRWGMAIYREDSLTAHSMRGDPWKYLGPCRALKVRTEECDRCNWHAYDMYRTGTDVGIHPPTPGFLDIVHVYAAPRFPGFHDIHCWVGDVYPVYQPVGPKQYPYNNLYLERGGDPVQRTSSGWFTMRSEEASWAFGPLTGLPHSYEQFYSPCKLEEFPPLDYRERSRVAWWTRAAIDQQVRLPRHQPISTHNRANRRGAALGASERAPAAGGL

SEQ ID NO: 1023237 - protein, 195 aa, Homo sapiens
  misc_feature (5)..(5): Xaa can be any naturally occurring amino acid
TSARXPKDKRHVWFGESMTDGFQFEYGVPGLRIPADVAIQLTFLRLMSTEASPELRPYHCKNSGGLHGTSMTGNPQVRSLLLQGSNEIEIRAEGNSRFTYSSHCRWLHESHPEPGAKTVIEYKTIQDLPACPSSMWPSLDVGAPDQEFGFDVGPVCFHVNSLHPNLAPLPPNQLSPPTRIQTSNPNLNPSHIAKL

SEQ ID NO: 1023238 - protein, 142 aa, Homo sapiens
NCLYQQVMSTNPQRRAAGQGVLCCCEGENGGCWDLAGEQEGMRKESRRSQKGGFTGARAEAGGVGCSARELCVRPFSGSSRNSVTPGFVQFQSGKFRFRGCYPSKLFFPSRGMLAGSATFSCTEGRIVVYPGALPQLRTIVG

SEQ ID NO: 1023239 - protein, 53 aa, Homo sapiens
MSVPKATPTACDEGSELVLVEAALPTSTSHLSCKHHTAHPTPHTYTTYTNTTP

SEQ ID NO: 1023240 - protein, 158 aa, Homo sapiens
MEAEPGLFLLCVMEGCEQTKAREQRMETGPGLFLMCVMEVCEQSKGRGRGMEAQLHVTVSCVHDGRLRAEQEFHRFWVQTGMPLPGGEGKVVVVTDSLVALGGGCWILGGSEGTPAPALSFLRAARHFLGASWEDHGCGPTNAHLGMAQGATVQRGAE

SEQ ID NO: 1023241 - protein, 47 aa, Homo sapiens
LGTLFAFHWDSCPIVKRIPPSVHDTEGLPFMKHGCVFSAHRRMNDML

SEQ ID NO: 1023242 - protein, 120 aa, Homo sapiens
SSRSPVQYWMCWINGKSDCALTGAQLGCQDLCLTLLAEELSGCFPSSWESGRPFFFFLGRTLQAFSLSKEDVLQCWGDVPPVGCGWAASHIQRRRGQFVLGHRDLPHGVPKTNRSQFFQK

SEQ ID NO: 1023243 - protein, 43 aa, Homo sapiens
ERRALRKLQALLVEASCRQGRKEALTLPSCHGTIYCSLQLCCA

SEQ ID NO: 1023244 - protein, 90 aa, Homo sapiens
SSVPCRSRAPRRSGRCDTRNLQKLPPAGLLQLLLAPGRRGAEQAAHGAVYAQFLQYFQFPFGFHHLGDQRQVDAVGGAENRFDEQPLVAF

SEQ ID NO: 1023245 - protein, 107 aa, Homo sapiens
MTPFWRPHQLQNQFLALTSFFFGNAVFLQGPHECFLLLHGREAAMAKLGGGANELKANFLQSPPFRLHQQGLAGGDHPLLGSHHTAFQHDKVMWHFTIGDKATQRVD

SEQ ID NO: 1023246 - protein, 100 aa, Homo sapiens
NEEYEVSLEIIMQITDIIGTVVCEDLSSCYELRSVFCFSLEIPRYLLNRLYRMIKLGLGIDEDEPTADDTSAAVTEELPPLARTTDRPTHAWTTRTTYTL

SEQ ID NO: 1023247 - protein, 56 aa, Homo sapiens
QLVPTVLEEDEKKRCLGVHNSSETCGLPTLVQTYVLQCGPEVAVTYPITCKSGGLA

SEQ ID NO: 1023248 - protein, 108 aa, Homo sapiens
SRGSWVMGVRVVLCVECTGGTTHTESISSPRGTTSTLHTTVESTPSPTTTTSFTTSTMARGTTFIHCINYRQRSDHLSQLYSHISPETTTLTLQLTFLQYLPREPVQT

SEQ ID NO: 1023249 - protein, 222 aa, Homo sapiens
MIHNCHHLSSHYVGTMGTSTSMISSTVSTGIPTSQPTTITPSSVGISGSLPMMTDLTSVYTVSSMSARPTTVIPSSPTVQNTEISISVSMTSATTPSGGPTFTSTENTPTRALLTSFPMTHSFSSSMSESSAGTTHTESISSPRGTTSTLHTTVESTPSPTTTTSFTTSTMARGSTFIHCINYRQRSDHLSQLYSHIPLKTTTLTLQLTFLQYLPREPVQTL

SEQ ID NO: 1023250 - protein, 98 aa, Homo sapiens
MVRRGSVPARARTWTRLLIGDSRGKDSYETSQLDDQSAETHSHKQSRLYKRKANDESNEHSDVIDSQELSKVSREFHSHEFHSHEDMLVVDPTPQRER

SEQ ID NO: 1023251 - protein, 146 aa, Homo sapiens
  misc_feature (60)..(60): Xaa can be any naturally occurring amino acid
SDGCGYPGGAVSLMPRGRTTGIVLDSGDGVTQQVSPFYEGYALSPCHRCVWISAGPTSHXTTCMKDPGLTRGYSFVYYVLRREDCPVTSRTKLCLCSSGTLHNEMATAASSSSLDKSYELPDGHVITIGHERCRCPETLFQPSFIG

SEQ ID NO: 1023252 - protein, 177 aa, Homo sapiens
GPAYWAYGGVAVPLWLPVEWSVPPWPSVELSVPVAISECPCVCAHLCMSAVCVCLLVYHCVSVRECAHLCMSVSVRVPVTVSVSVCVCVPVLVYLCVHVCTCQCICVLHVSVCACLVACACMCAFVSAFLCIWMGICVCACVCVCASVGLPVRVSLRVHTDTRASPNRWTRLGTHYG

SEQ ID NO: 1023253 - protein, 53 aa, Homo sapiens
AALTCDDGKSRRVMKAHDSKMLTCRVFLSTCISFLKAWACSAVGWTHLSTFTH

SEQ ID NO: 1023254 - protein, 51 aa, Homo sapiens
PPYAWGHFQILGHRRSSKMDPQCTMGLSNIPFVMAFLLSGAAPLKIQAYFN

SEQ ID NO: 1023255 - protein, 116 aa, Homo sapiens
FYKKTYISFLRVKHSSYFLSDDKNQLLTELVTPVSLTLSLKTMTSHLRPFPAPGIHHSTLCFYQFNFFRFPMSVRSDCVCLSVPGLFLSLFFCVCETIVLYCPGCRPVLPSPLTAA

SEQ ID NO: 1023256 - protein, 51 aa, Homo sapiens
MEMALPHRQFGRCGPRRAGGTWPVKATAASAGRQACVHNAAIRRWFRSPGT

SEQ ID NO: 1023257 - protein, 186 aa, Homo sapiens
SRYRRSLCGDYSDERDCPGVKRPRCPLNYFACPSGRCIPMSWTCDKEDDCEHGEDETHCNKFCSEAQFECQNHRCISKQWLCDGSDDCGDGSDEAAHCEGKTCGPSSFSCPGTHVCVPERWLCDGDKDCADGADESIAAGCLYNSTCDDREFMCQNRQCIPKHFVCDHDRDCADGSDESPECESRT

SEQ ID NO: 1023258 - protein, 105 aa, Homo sapiens
LLAEQIPPTPRQSCFLSPMAGVPVSRSCAHCNLCLPGSSDSPASTSRVGGITGTRHHTRLIFVFLVEMRFHHAGQAGLQLLTSSDPPASASQSAGITGVSYHTQP

SEQ ID NO: 1023259 - protein, 99 aa, Homo sapiens
RTLYLAVIAGEHSIGVEAKGVSHSGADRKENVGISKDKAGEKPARRKIKVFLSYANQLRVSRGLTHTREGEVDVQQVNIPVTINLIKVTERDNYRVLTE

SEQ ID NO: 1023260 - protein, 197 aa, Homo sapiens
MNDGPQLNDGPQLNDGPQLNDGPQLNDGPQLNDGPQLNDGPQLNDGPQLNDGPQLNDGPQLNDGPQLNDGPQLNDGPQAQRWSSAVLRESGELGERVEPARVVQVSGSGQAGNGEKWIAGVQGRGGGVAVRAFLLSGSSGSVINLEEPRTISFSESRSMTGTVAYNFDLALCRALPSSSEIDRVLCQLRVQVSAAVS

SEQ ID NO: 1023261 - protein, 196 aa, Homo sapiens
RWSSRARWSSAHDGPQLNDGPQLNDGPQLNDGPQLNDGPQLNDGPQLNDGPQLNDGPQLNDGPQLNDGPQLNDGPQAQRWSSAVLRESGELGERVEPARVVQVSGSGQAGNGEKWIAGVQGRGGGVAVRAFLLSGSSGSVINLEEPRTISFSESRSMTGTVAYNFDLALCRALPSSSEIHRVLCQLRVQVSAAVSL

SEQ ID NO: 1023262 - protein, 129 aa, Homo sapiens
RWSSSSRWSSAHDGPQLNDGPQLNDGPQLKSLSLCSLFFFGKSVSALLLRRECRGHNHGSRYPQPPQARDDPPASTSRVAGRRSYATIAGLFLVFFGTDGVSLCSPGCSRSSGFKLSAYLSLPKCWLFG

SEQ ID NO: 1023263 - protein, 96 aa, Homo sapiens
RWSSRARWSSAHDGPQLNDGPQLNDGPQLTWGAEVWRIVLNLGRQRLQEAKIAPLHSSLGDRVDSISKKKKNESGLVVNTWLVPAYRNKAEEWMIV

SEQ ID NO: 1023264 - protein, 94 aa, Homo sapiens
MNDGPQLNDGPQLNDGPQLNDGPQLNDGPQLNDGPQLNDGPQLNDGPQLNDGPQLNDGPQLNDGPQLNDGPQLNDELRTIVDLKDLVETPQEID

SEQ ID NO: 1023265 - protein, 46 aa, Homo sapiens
PSVLRSVSPTSPFWGLLTRRHRGANPPGVRVHSLHAAMFCLPTHVA

SEQ ID NO: 1023266 - protein, 42 aa, Homo sapiens
MTCQLLLQLRDHAFQLPFLALSCAAESPAAARSPPILRLQVL

SEQ ID NO: 1023267 - protein, 264 aa, Homo sapiens
AAFAPGGAPGADSARERGPQEQGECMTTCPHVVYIKEDNVGESFTQDATLLSRDTQQDNSGALASFEGTDAQIPSLQSLLETLKVFEEMMMKSKFWLAGEITHMIREATGACSDARPELRHSVMTGSCQSHLNAVESEQAETALRRFARLCQDESAGYGTELANHARRNLRARLQQLCGLKWQARRSKHLEFMNQLNSTTDDDISPSEDKDTDSTKEPLDDLFPNDEDDPGQGIQRQHSSAGAAAQQGGYEIPARLRTLHNLVD

SEQ ID NO: 1023268 - protein, 101 aa, Homo sapiens
SIRWGHKIYFINSFNRYLPSVCDVPGAGSSPGSEQNQTQTLPKWHRVVSWEASYQSKNHVTRGTAVTMVDVVLGVCKSGDPEGFPWEVMTERRDEGKVKSK

SEQ ID NO: 1023269 - protein, 35 aa, Homo sapiens
HRLQQSRLSGGASSHPGLTGSASTTTLTRAAVSRY

SEQ ID NO: 1023270 - protein, 35 aa, Homo sapiens
MTMLGKRPHMIWRSLTHTATTILHTEPLPCFIHKN

SEQ ID NO: 1023271 - protein, 40 aa, Homo sapiens
YTLQSFGEMADSFKADYFNMPVHMVPTELVEKEFCGHHMR

SEQ ID NO: 1023272 - protein, 92 aa, Homo sapiens
CGQRGGLRAGAGGWGRPKLIPSLADLTSRTFWPLVSLSVNWGRQYPPCGMSEGLASKWTTHGPSGQEDQRAGEEGQVGSLKGHSEAPGLPDL

SEQ ID NO: 1023273 - protein, 121 aa, Homo sapiens
MANFNVQTNYMRIKCRLRFNGSGKRHEILRFYQASHLPSLVTEIQGATRQLEMNNVVNRNKLLESEARHQISRGLHNFFNFTREQIETTECSNENYGLTSGLTFESSQKSLIKERGFTSHG

SEQ ID NO: 1023274 - protein, 40 aa, Homo sapiens
LYCYSTNRRKAYSERRIMGYSMQEMHEVVSNVQEYREFVE

SEQ ID NO: 1023275 - protein, 227 aa, Homo sapiens
SLALSTDLRTHSQDKLFSLSVFHHWQMVPGDPLDRCMSSGPRSAYSSRLLIWLREFTDHKPVVGRALIEDVSISKFFDDPMFAGTWQTGCCAQLPHVSAWTPGSSCSLQWAADSCEIYTLETSSIDVALSCCQTSVWEAAVASLEQSTILQPRATSERGAVGPSVSSFCGLCRAPLPTGNREELGLTERDGDETPRGPYSLGFTWNSIFYKLTLATGCRVSKNVLNK

SEQ ID NO: 1023276 - protein, 54 aa, Homo sapiens
SNILEDKEEVHYLFVPLCQTPTPEPAEVETRKVVLMQCNIESVEEGVNVALHQQ

SEQ ID NO: 1023277 - protein, 142 aa, Homo sapiens
RGIPLGRTLCSFNFLHLRISPHQQVGHAPAPPTPAPEPCRLLSPMPPARPPPPVLSAYRRSFCYCSISSGGCDCCASSITNAWFSSSSTGAGIILSHLSRISWVLPNAHAHGLIILMRLASIICHIHQCITESWTGSIPWTP

SEQ ID NO: 1023278 - protein, 79 aa, Homo sapiens
ISARYPVVRQEQIPADRARESDEDRDGVSVVTAHRIKGREFDVVAVCGLEEGNWPAGNHTGSLVRADRWSPDGLVAAPG

SEQ ID NO: 1023279 - protein, 286 aa, Homo sapiens
VDQLLRVRTEEREQIKTLNNKFGSFIDKVRFLEQNKVLDTKWTLLQEQGTKTAEARTWEPLFEQYINNLTEAAGQPSCGNGGRLDSELRNMQDLVEDFKNKYEDETQTQRYQLLRMSFVHCWQHTDCSMLPYTDYTGWEACAATGLTALDWMSTEPSCNDVSSELPAGLSPGMQHAMVLCTTLQMGPFYNGTNQTRHTLGNLGTRPCHFRHERAHTESAKDNGSGKKYGPNSRRAPGNQATTRKYHRGIILMGNPTGWTVTRGKAFGPSRRTTNAPGAQQSTVGGD

SEQ ID NO: 1023280 - protein, 165 aa, Homo sapiens
MIASTPILPQAAGPTSTPLLPQVPSIPPLVQPVANVPAVAADSVIHSQTQPALLPNQPHTHCPEVDSDTQPKAPGIDDIKTLEEKLRSLFSEHSSSGAQHASVSLETSLVIESTVTPGIPTTAVAPSKLLTSTTSTCLPPTNLPLGTVALPVTPVVTPGQVSTPV

SEQ ID NO: 1023281 - protein, 110 aa, Homo sapiens
TVVRYLPNERFKEYIRSTCTLNVFRDLQCERRQQSSPTMTGKTDQEMVASVWTIIPHRSSVIILASDGYYAMVGQVHGETHGYDTESHGEGLPTSLVLSATEVTGSTPGE

SEQ ID NO: 1023282 - protein, 37 aa, Homo sapiens
RQNHYKGVVWIERRSVQRAKVGPLSLCHSLVEGADLE

SEQ ID NO: 1023283 - protein, 264 aa, Homo sapiens
QFAQSGAGTLALGSPWRCFQCLPALAVAGAAAAHGARWPGPRPPRGLLLCLLLAASCAWSGVAGEEELQVIQPDKSVSVAAGESAILHCTVTSLIPVGPIQWFRGAGPARELIYNQKEGHFPRVTTVSESTKRENMDFSISISNITPADAGTYYCVKFRKGSPDTEFEVWQQALSCLCVPKPLPPWYRALRRGPEPQRHSELFSLRGPDWLSTTQKDITPESGSENCGIGRLQNFHEQRGTPVGRGAVSLPQSQQHSQGCVMSR

SEQ ID NO: 1023284 - protein, 76 aa, Homo sapiens
RDTTVRYVTDPDPQNPNGPDPTIADMDRPRSSKQGQILPPQTLTDPDPHTCTTANLLRHGETQILIPVLDSFLLRY

SEQ ID NO: 1023285 - protein, 94 aa, Homo sapiens
IPDHACTRSYLLRHEQIFILILMPDLTWRHDRPRSSYQGQSLPSQTLKDPDAYICAKSYFPRHGQSQILILMPDPTSSDMKRPRSLYQGQVLPP

SEQ ID NO: 1023286 - protein, 39 aa, Homo sapiens
TASTRSHYGHHNDRYSSRSTSKRFCWRRKRFSAEKGYGS

SEQ ID NO: 1023287 - protein, 42 aa, Homo sapiens
EGDVDCSAALTLCLQLVQAPSAYFKDPFPISAASCYCTFIVM

SEQ ID NO: 1023288 - protein, 130 aa, Homo sapiens
MVPGGKHLEGVEAECRPWRIFLQPLEYTVKLGDTNVHHRSKTALVVPVRDVVIHRYFTSPGIIENDIALALLDFPVNYSTHIQPVCLPEQAFMVQAGTNCWVTGWGKVNETDSQTKRIVKLSSALGPGNQ

SEQ ID NO: 1023289 - protein, 101 aa, Homo sapiens
MLWTRQDTWAPHGAAASSSEGRARSRGTRPEHPMPCSRSPGHLPTSHTGAPGSAWPARALVNHLAEQFPWSPFGSRAVSQDGPRLSLSRGTSCLGPMGTEL

SEQ ID NO: 1023290 - protein, 39 aa, Homo sapiens
ALTPNRESVMAIYDDNPCQLQELIELVEQDAQYTSAVAH

SEQ ID NO: 1023291 - protein, 57 aa, Homo sapiens
LCSDPHNVEHFLEYLLQPQVHLERNTGRERNTGRERNTGRERNTGRERNTGRSAAPG

SEQ ID NO: 1023292 - protein, 59 aa, Homo sapiens
ARKRSVRVRERILWISRGRAEHRAERNTGRERNTGRERNTGRERNTGRERNTGRSAAPG

SEQ ID NO: 1023293 - protein, 118 aa, Homo sapiens
PRCGLVGSDLHDQAEHPPCVYVNQQSRKAEEGASYRKVGRSWCCLCSHLGSLRWLSHDLAWPPASISSVPYGAVLGIPQNNVCERNTGRERNTGRERNTGRERNTGRERNTGRSAAPG

SEQ ID NO: 1023294 - protein, 40 aa, Homo sapiens
MSATLLLLELHEGIEDTKVELVQEGQLVPALTYVAQSNGL

SEQ ID NO: 1023295 - protein, 51 aa, Homo sapiens
GVGYVVRHLLSYGDHNSAALVCKSPLRSSLVYGKFRLTENRAQHQLMQTKV

SEQ ID NO: 1023296 - protein, 108 aa, Homo sapiens
VLLSPVVCPRPLLSYCPAVWPHGQKRYEQISGHAPSLFLLPPFGPHHLFLLNHPVCLNQVSFLCDLYQRTLLHPPPPPHPTSAWAVFSGPAGETLCVKEPTPRPEQAM

SEQ ID NO: 1023297 - protein, 306 aa, Homo sapiens
  misc_feature (14)..(14): Xaa can be any naturally occurring amino acid
  misc_feature (35)..(35): Xaa can be any naturally occurring amino acid
  misc_feature (50)..(50): Xaa can be any naturally occurring amino acid
  misc_feature (58)..(59): Xaa can be any naturally occurring amino acid
  misc_feature (100)..(100): Xaa can be any naturally occurring amino acid
  misc_feature (106)..(106): Xaa can be any naturally occurring amino acid
  misc_feature (249)..(249): Xaa can be any naturally occurring amino acid
  misc_feature (252)..(252): Xaa can be any naturally occurring amino acid
  misc_feature (282)..(282): Xaa can be any naturally occurring amino acid
  misc_feature (304)..(304): Xaa can be any naturally occurring amino acid
MRELVPLPAGPCGXPIGAQFWEVIRDEPGIAPPGXSHGDRDLPLARLHVXYHAAPGNXXVPRALLVALAPGPMDSVRSGPFGPIFRPAPFVFGPSGAGNXWAKGPXPGGAGLVASVLAVVRQASESCDCLPGFPLPPSLGGGTGSGMGTLLISQIREEYPNRILNTFSALPSPKVSDTVVEPYNATLSVHQLVENTDETYCIDNEALYDICFRTLKLTTPTYGDLNHLVSATMSGVTNLPALPGPAERXLRXWAVNMVPFPRLHFFMPGFAPLTSRGSQQYXALTVPELTQQMFDSKDMMAAAXAH

SEQ ID NO: 1023298 - protein, 78 aa, Homo sapiens
  misc_feature (61)..(62): Xaa can be any naturally occurring amino acid
YGPGRTAEQASCGERRMGVERTSMGHHYLLTGQMDKWKNRHMDKQTARRNGAVTQWVPFFXXSQHGNCHMTPINNGEG

SEQ ID NO: 1023299 - protein, 47 aa, Homo sapiens
  misc_feature (1)..(1): Xaa can be any naturally occurring amino acid
XVWNQRVSNSVSAPLALPQVPFLLLSFIPGSTLRLQVFLEFRDLSKP

SEQ ID NO: 1023300 - protein, 130 aa, Homo sapiens
GARLAARALPPPRALVPQPSLGPATPPSPFSLQNFPSCCPQHWDTKPSLSTLLIWLTLTRSETCVMLSWHAPLVFVDFSDGKELSMQSHINFYLPSPSSCLLLRMGTILTYSLFCPSAQSRCVEGWKYTE

SEQ ID NO: 1023301 - protein, 275 aa, Homo sapiens
  misc_feature (3)..(3): Xaa can be any naturally occurring amino acid
  misc_feature (39)..(39): Xaa can be any naturally occurring amino acid
  misc_feature (269)..(269): Xaa can be any naturally occurring amino acid
PHXTKYTPQWLTPANESERETGPPLPLKGPPGLGKGGGXVGWVSKEKKRRGEQVSGRGWKVIAGPHPPLPSVPYCLCWQTWGRGPFVPINNQKQQAGAAANNGQAFGHKILSLYISLTLLTHQGGIFAEGKVQDLSRVAPVVSKQAAGPGVPEAHDAIQAAGIYHGSACLPQQLHDARLVLTLMPKSLQYQVIDGQGPIQVANSCQGHHTAEAQGLHRVGLTLLPFSQAGLGGTVSGLKTPTTLPVVALTSLAWQSTEPVRIKLPSWLXATQVSG

SEQ ID NO: 1023302 - protein, 48 aa, Homo sapiens
CAALWEALNPQPHPELQPSRDSSPVLYEGKDCYVVLTSDRTPWIFMVS

SEQ ID NO: 1023303 - protein, 48 aa, Homo sapiens
CWSVLQLLRGVELHPALLLSQSAAELRARFAIAGVIVALPVGDAGQEM

SEQ ID NO: 1023304 - protein, 118 aa, Homo sapiens
VHVVTGFKCDKTHKTHHLNHFQCVVGGVTFTLLQALQVGGVTHIHTVAGVQVGGVTFGLLQAYRSVVYTHAVAGVQVGGVTHIHAVAGVQVGAVTHMLLQEYRSVVLHAVAGVQVGGV

SEQ ID NO: 1023305 - protein, 40 aa, Homo sapiens
ALRPTVENPPGESHGGGDPTHGGRHQVVEVPVGGFQQLEG

SEQ ID NO: 1023306 - protein, 614 aa, Homo sapiens
MGGSSPVTSKAIVDADGRIYIRNWQGGILSGGFEKNPKPIFTEGKNQLEIQNLQEDWDHFEPLLSSLLRRMPELETLEIMKLVNCPETFTPDMRCIMGESPAVQGYFVLAGMNSAGLSFGGGAGKYLAEWMVHGYPSENVWELDLKRFGALQSSRTFLRHRAIEVMPLMYDLKVPRWDFQTGRQLRTSPLYDRLDAQGARWMEKHGFERPKYFVPPDKDLLALEQSKTFYKPDWFDIVESEVKCCKEAVCVIDMSSFTKFEITSTGDQALEVLQYLFSSDLDVPVGHIVHTGMLNEGGGYENDCSIARLNKRSFFMISPTDQQVHCWAWLKKHMPKDSNLLLEDVTWKYTALNLIGPRAVDVLSELSYAPMTPDHFPSLFCKEMSVGYAKGIRVMSMTHTGEPGFMLYIPIEGMDFIGRDALLQQKQNGVYKRLTMFILDDHDSDLDLWPWWGEPIYRNGQYVGKTTSSAYSYSLERHVCLGFVHNFSEDTGEEQVVTADFINRGEYEIDIAGYRFQAKAKLYPVASLFTQKRRKDDMELSDFLALPPPPPNIHSGLFFPSHPSLSCSWWQEVCLTGQKQAPHHLVLEWASPWSFSSFRLCSSSGAFASHLLSP

SEQ ID NO: 1023307 - protein, 123 aa, Homo sapiens
PHCRLPCAVNFQGVGCPRLLHLLGVERVAMARHMGFGSSAEVTSALLVAAPRLSQTWYGSHSFIYLTKGRMLGNCASRLPVGCGCAVYVVRGGGCHWWGPNLRAFWSPFFPFARLHPRIETGL

SEQ ID NO: 1023308 - protein, 65 aa, Homo sapiens
GSIPVSLMVQEKNAQRSLIIKGRYTGLQEALYISSHLSVTSEKIFSFIQLSGYSCRQLALLQCAS

SEQ ID NO: 1023309 - protein, 171 aa, Homo sapiens
TTLTLPNLHSRGNEKTLMEESAEQAQRRDETRVGRRRHSWRSRQSSQTKEFIFSELLSNLYSRRNLQTLVEESAEQAQRVRRDGSFSELLSNLHSRGTRRHSWRRRQSRQTKEFIFSELLPNLYSRGNEKTLVEASAEQADQGVHLLRAAVQPALAWNEKTLWSVAEHATV

SEQ ID NO: 1023310 - protein, 114 aa, Homo sapiens
IELVPDSNSALPPALGFSLIYLCRFAVTGTYNTIAAFLDGSLTDFPTNFRYAYRFPLVWWVFLPYRYFACPGFCPPGFGFSLRVPTVLIICSTGICTCYPSTTSFDLALGPDLP

SEQ ID NO: 1023311 - protein, 68 aa, Homo sapiens
YQCDLRITHWPSLNMETSLQISVEFQRDLITLLLGFAISSFTSGKIPSRPPAAEVPSLTENMRNFSLF

SEQ ID NO: 1023312 - protein, 108 aa, Homo sapiens
VLRLRSTYHLATAPILPYLTVHMGEAATLPPACLGASSATEGQAPELELRALSQTAKATEVDHTGDSGLTALTGTCILCHCCALSPQSGCSVPLSRNVGVLQEELGEM

SEQ ID NO: 1023313 - protein, 143 aa, Homo sapiens
MRRDGLSAARRERPEVNGSRDGSGPMKSSMQQDPGDLATIAVLTFGGDAQGMNAAVRAVVLSWISSPVPDVFFVHEGYQGLVDGGDHIKEATMGERPMMLQLGGTVIGSARCKGLREREVTDSELPTTLVKRGITNSLLSIWG

SEQ ID NO: 1023314 - protein, 122 aa, Homo sapiens
MCLSPVLGLAEGLEGTAASSSQHSVALYQAPHLLLVLALVTSQGPSRCRGFLFGQAPCQGDLVASSFSFAIGMSPCSSLLFFFFEMDFHFCCPGLELQCLNSRSHLQPSASRVSSYRPALGS

SEQ ID NO: 1023315 - protein, 76 aa, Homo sapiens
MCTALQQSRSAEFSLFLCTLLGLANFPWARLAVTAPSCASLVSVLDQWWMSVGWREPLRALVLDAHAPDCEVPTGA

SEQ ID NO: 1023316 - protein, 192 aa, Homo sapiens
PPFRGRRVSDRVGSVWAGGKREALIVSVCDCETAVSFLTLDLEAALVMSWSSCDCSGYMYGYLWKQVATRRNGERALWLAMEPPPKLCGLLGRLHPAFGVCVRHFGYESPEMQADAESDAAEMERKTDVALSDARDVELCELVNPENVEDRGPTPSVWVVSPRDDYREEESSISSQISKKEKLLSQPEQGPF

SEQ ID NO: 1023317 - protein, 65 aa, Homo sapiens
PDVSVPFSTHNHHSLTMLISHEQPMQTCLTNTPVDLQQPERRETFSELSTMITPREPHRPRDHNN

SEQ ID NO: 1023318 - protein, 138 aa, Homo sapiens
RASERAEHIAAGSQSGQTLGGGVWQERRGASRRSAFPATVPRELELLGLGDPGRPPRCRRSRCLAAAAAAWCFLQVESRHLDALAGGAGPQTIGRFPRTSDQWLRHRTPSYDTGQAICEPLSKTHDALQKTGNPKKPL

SEQ ID NO: 1023319 - protein, 106 aa, Homo sapiens
MCIICKCFTLLYLPESPGPGRSVSLHSMAVYFVNMIRPTVSHQWPFEFTSEQSTTARPEGLLEGQSNAECVPSSQICHHRWIHVSSVDKVPCVASNSASSMPLHLL

SEQ ID NO: 1023320 - protein, 72 aa, Homo sapiens
CRRPRGSPLQSTGSAHALTAVCNHISSVRAVAVWGIGTPGGPQDPQPGLTAHVVSAGRRLGVLGSGVTMMLK

SEQ ID NO: 1023321 - protein, 44 aa, Homo sapiens
LDHRDALEVTALHSLAGRGSGRLMTRPPLAQPHHSVSMAAMVGG

SEQ ID NO: 1023322 - protein, 125 aa, Homo sapiens
MVVSVVLSAGRYEYYVLRLIWRRWFSLADYNVDYRRTSRRYLLILLRLKERYGISNHLHETGKRLALELPLGRAYAGTFMHPELRCMLKLAARIYCCRPEIHGRSHFINLKVRIRKIPCETQQNN

SEQ ID NO: 1023323 - protein, 205 aa, Homo sapiens
MGIYVGAKVFLIYEGYEGLVEGGENIKQANWLRVSNIIQTGADTSHLAALRMQGLYHQGRGAGQRPYNLVQHGKSPNCDVTRRGMAASQVPTSCRKRVEQHDWRSLVAERVRSQETTRPEPTRDLNIAETRWASNRYTDFCGNDMTNGTDLGPPPHSWRVINAITTTAPEPTEDLRAEEDDGPDTDGYLDSMVSSKDTKADWMPT

SEQ ID NO: 1023324 - protein, 83 aa, Homo sapiens
PLTEDTLRLLEKIAPSTLTYEHSCVNCPLAHNAKQDTEQGAAEVNELQYGDAFDAADQSWREQKATRPRILAAGDINAREMAF

SEQ ID NO: 1023325 - protein, 33 aa, Homo sapiens
MPKDDLGRGTETGTLDEKETTVRGLEYPETANF

SEQ ID NO: 1023326 - protein, 43 aa, Homo sapiens
  misc_feature (15)..(15): Xaa can be any naturally occurring amino acid
GSRKAEIEAGDVTFXPMHGMMCCNEPRSVPLHSMPGNMSETLS

SEQ ID NO: 1023327 - protein, 69 aa, Homo sapiens
GPELMLKGVEPKPGEYDDAYLASITRTVRTLRAHGIMTLLDAHQDMYNEKFEGEGAPDWAVLNKGYRAP

SEQ ID NO: 1023328 - protein, 38 aa, Homo sapiens
PADPAGHTVPSRSVRHLPREALHESQPGCDCALSGYSG

SEQ ID NO: 1023329 - protein, 51 aa, Homo sapiens
DSEWNLMDSGMERESNEEEWSFVEWNVWNRIEWNGKQWNGIEWNEEVKYEL

SEQ ID NO: 1023330 - protein, 67 aa, Homo sapiens
SSTPGILFQQEIPGAEALHYHKHLQTQSPLPLPGPTFSVSYLCPGMLPWTMKDPAALCYTWLGLLRY

SEQ ID NO: 1023331 - protein, 292 aa, Homo sapiens
HGAGTVATVDVAGQAHEGTTGVWTPVRREQAREGRHKVGATIVLDGVSESFDLRGGLEYLEVVAQPLYQRSSDGNRTFQGIDGGLVTDLVADGGQQTVLGEDGLLTCVHEHEAAGAVRVLRHALLEASLAKSGGLLIAKNAGDRGIDQQAVLATIAVDLGGGLDLRKHGLRNPHDLAHRVVPLQLSDVHEHGSGRVGRIGDVHATVNTAKSGSTSTQVFNVNRKQQIAGSGLAKAPPRCENPLTSARESVTADPHLWRGGPGNSQSSELDRVAPSVHARVGHTVRWIQQAGR

SEQ ID NO: 1023332 - protein, 33 aa, Homo sapiens
MGIVAVWHSDQIRAPIPRKCPSPVLHMSSPVLH

SEQ ID NO: 1023333 - protein, 127 aa, Homo sapiens
MRHQRTDHTLLDRLSNALEHEAKMPVIVSENTMESLLVDIVADLRPGFDDVDAEEFGTSLQGETELDGYLTFRDVLHRMVHRLTYYVETNRYGEATKVPVTSKEFMDVVSTVDGLINDFPDLPVSSL

SEQ ID NO: 1023334 - protein, 242 aa, Homo sapiens
SGAVAVSGSFANDCRRNNEDVIITALRGLGWGAADAGSSACAPRWGWAGLGWAGLELDRLSPPGPPSARGVCGARGFGAGWTWEPGEGPGGEIAGRGGRRREGGAPGQRRFAGGERTRGRGCAAGLRCASETRGPRSRPCALGARVLPAPARPPPPPPPVNGDPGHGLDLEIRDLSAGPGSSIDYRSKRSSSEFILRVDELGQPGLWGVGNCKYSPKRRRFSRLPGPRGLDGSSGDGNGGYP

SEQ ID NO: 1023335 - protein, 85 aa, Homo sapiens
PDSPTVVGSRTPCILCEELFKLLNGGHRYDSSPLNCTHDLYMIMRECWHAAPSQRPILQAAGGGPGPCPYRDVHRRVPGPVGLVG

SEQ ID NO: 1023336 - protein, 135 aa, Homo sapiens
  misc_feature (18)..(18): Xaa can be any naturally occurring amino acid
LDLGKRPTKDSYTLTEEXAEYAEIRVKVKELGAACVADPPHGPSSGPPLAVGSLPTQKYSGAGAGRGVMVMVISEGLGAHDLLLSSLTVTFVPAPPTPSLRLLSNLLYPHLSGGELCLSVLFIATSCIISWPHTW

SEQ ID NO: 1023337 - protein, 218 aa, Homo sapiens
EESAATGHYLVRDVTPVCPKASQSESCAAAGCSGVRVSGVRKDLSSSRGSSVPFPCPQSSELEPTDMQGTGMAKSRGDSGIDLGHAPTPCVGVFQHGKGGDHRQRPGGTVTTPSYVAFTDTERLIGDAAKNQVALNPQNTVCDAKRLIGRKFGDPVVQSDMKHWPFQVINDGDKPKVQVSYKGETKAFYPRGDLVHGADQDEGGRIAVPGYPGSPIRS

SEQ ID NO: 1023338 - protein, 179 aa, Homo sapiens
GPQARETWRALKLSLALSFSGAIGLTFLMLGCALEDYGVYLALYTSMIFHAISPPIPHFIAKGVTYDSDATSQMPVGNWNISSLYVRICVFSAYVDFPVIRCVVLAVIKLGSLRALVYGRQMQVIFLTIQGYVPLVFGRGDDFSWETVVALYSDYSGIEFLRTHTICIHVHMRHCYYGN

SEQ ID NO: 1023339 - protein, 71 aa, Homo sapiens
  misc_feature (59)..(59): Xaa can be any naturally occurring amino acid
  misc_feature (70)..(70): Xaa can be any naturally occurring amino acid
DKLYKKHAVPVRIPGSRPSSALLGPRAPQWPLSGDEDISSIADMDFSALLSQISSYRGXRLPSPENWVAXD

SEQ ID NO: 1023340 - protein, 106 aa, Homo sapiens
MTCHCCSWFSPVLPLRLTHLDDSETCQRPWTPRPKFPEPGPDDSCNVTLFMVPLPHFHLCHITNSWGGVPQTTGTNLNFARLLNFLAIFIICMALICTRAEPAEVS

SEQ ID NO: 1023341 - protein, 132 aa, Homo sapiens
  misc_feature (65)..(65): Xaa can be any naturally occurring amino acid
  misc_feature (68)..(68): Xaa can be any naturally occurring amino acid
  misc_feature (75)..(75): Xaa can be any naturally occurring amino acid
  misc_feature (80)..(80): Xaa can be any naturally occurring amino acid
  misc_feature (112)..(112): Xaa can be any naturally occurring amino acid
VCGDSRGCQCYSTNRFEGNLFTEKRTDGGSSSSLMAAPWRGIMWMLPCRARGVYYSTTDWGEFSXGTXCRRMMLXTVQPXEYAHTMGRLDSSRGTYNREHSVMASVLDILPXMEVALLFVGGSTGVPELDIR

SEQ ID NO: 1023342 - protein, 228 aa, Homo sapiens
MDPNCSCATGKVKLCALESPFPSPITEGLWVSGSRILSSERRGLQYFVRCFLPDHAPESIALIPGPLQSELRILRLKAELLHITQLVMGLLAGPQCSVQALSISVVGGAGNIDSSEFRTEGSGSQSQYSWVVCARGTFLVRYNRRVLALPSVSGEDMGLLFLCPEWERSSEGWACTEEGARGDSLTHCCTFCISLTAHCVFLFLVGGSCTCAGSCKCKECQMHLLQEE

SEQ ID NO: 1023343 - protein, 123 aa, Homo sapiens
  misc_feature (88)..(88): Xaa can be any naturally occurring amino acid
MDPNCSCATGGSCTCAGSCKCKRVQDAAFLHRKELLLAMTCPPVVLCQGVPTGHDDHARRGRSRERCKTAGALTGGKHGCLLRKNGKXSNTSRAYNALAIYVLYGHSIRHLSATLGVAFFSCY

SEQ ID NO: 1023344 - protein, 48 aa, Homo sapiens
HHTISMTLTITVITTIITITFSTIVTIIMTNTIDTTTTITNTVSPTRS

SEQ ID NO: 1023345 - protein, 378 aa, Homo sapiens
PGVSILVSGVDSARTSARGKRSYSYPGRGAGSLHYHPTPYLFHPDARRSRSASWQGTGGYMISTSRQAPATSPCSAGRDIVMHIYDHMEKMDDTTDYMRTLRMSDDQTGDPKGLRSSEPRCQHGWNNRYKTCMSIRYMQYKDGIQKASIDEQPSHGGRADMLLKWCVDIMRINRQRWPDIVHLTLGTELSSDARHTMGVTFHQDQYKKPVRTLRVPELAVMDINQQPYPMTPVANTSSLLRQSPQPGGRSTDIGNTQTARGLEPQITRNYPHKDKPTNNTGTDKGITLSSDTTMERTDKERNEGEETAFSHPPKLGGQQERHDLAKDREAGNAAVRDTCDLPHENAPRRTRLSVPGPSGDPSIAYTGGPEDPPRRARE

SEQ ID NO: 1023346 - protein, 177 aa, Homo sapiens
  misc_feature (36)..(40): Xaa can be any naturally occurring amino acid
  misc_feature (42)..(43): Xaa can be any naturally occurring amino acid
  misc_feature (45)..(45): Xaa can be any naturally occurring amino acid
  misc_feature (48)..(48): Xaa can be any naturally occurring amino acid
  misc_feature (50)..(50): Xaa can be any naturally occurring amino acid
  misc_feature (54)..(54): Xaa can be any naturally occurring amino acid
  misc_feature (59)..(60): Xaa can be any naturally occurring amino acid
  misc_feature (62)..(63): Xaa can be any naturally occurring amino acid
  misc_feature (65)..(65): Xaa can be any naturally occurring amino acid
  misc_feature (67)..(68): Xaa can be any naturally occurring amino acid
  misc_feature (71)..(77): Xaa can be any naturally occurring amino acid
  misc_feature (88)..(88): Xaa can be any naturally occurring amino acid
  misc_feature (92)..(94): Xaa can be any naturally occurring amino acid
  misc_feature (96)..(96): Xaa can be any naturally occurring amino acid
  misc_feature (101)..(101): Xaa can be any naturally occurring amino acid
  misc_feature (103)..(103): Xaa can be any naturally occurring amino acid
  misc_feature (105)..(106): Xaa can be any naturally occurring amino acid
  misc_feature (110)..(110): Xaa can be any naturally occurring amino acid
  misc_feature (113)..(114): Xaa can be any naturally occurring amino acid
  misc_feature (117)..(118): Xaa can be any naturally occurring amino acid
  misc_feature (125)..(125): Xaa can be any naturally occurring amino acid
  misc_feature (128)..(129): Xaa can be any naturally occurring amino acid
  misc_feature (132)..(134): Xaa can be any naturally occurring amino acid
  misc_feature (138)..(138): Xaa can be any naturally occurring amino acid
  misc_feature (141)..(141): Xaa can be any naturally occurring amino acid
  misc_feature (144)..(144): Xaa can be any naturally occurring amino acid
  misc_feature (149)..(149): Xaa can be any naturally occurring amino acid
  misc_feature (155)..(155): Xaa can be any naturally occurring amino acid
  misc_feature (162)..(162): Xaa can be any naturally occurring amino acid
  misc_feature (167)..(167): Xaa can be any naturally occurring amino acid
PGRLHFGLRCGLGKNQRKREAEIIATPAAEPAHCTXXXXXFXXEXEVXGXNGGXGGNVXXGXXGXKXXEGXXXXXXXLGSGEKRLMRXGVGXXXGXNDKKXEXLXXGWKXNKXXYVXXYEYKDGXRKXXVKXXXVERXMIXNVXEYGKXKVEELXLKLDDYXDEEKXGELKKEIKEK

SEQ ID NO: 1023347 - protein, 37 aa, Homo sapiens
  misc_feature (30)..(30): Xaa can be any naturally occurring amino acid
VQAGSGVAVTPITSNSCASCRGSFGWLHHXCVMVTVA

SEQ ID NO: 1023348 - protein, 36 aa, Homo sapiens
MAVHMMLHAPHNGAQLNWEREVARKGTDERMEAEER

SEQ ID NO: 1023349 - protein, 62 aa, Homo sapiens
MSLPVTSPFLAPLLLALTRNLSGSDPRRVLGLGRQCAPLLCLVHGSVKQPVSEPSRSWFAPH

SEQ ID NO: 1023350 - protein, 132 aa, Homo sapiens
CVRDKPHFPNLYYAVNFLSPFLPTTIHSPKGRVTLLKTKLMSLLRLGSEKLTITQSPEHTIQVLYSSSCGPSQPPAHHSHSLFCQRTIPSTDLSEHTMLCPTSTPSTLHLEHSPPLPFLPLPYLYTRDPHRV

SEQ ID NO: 1023351 - protein, 39 aa, Homo sapiens
TRGSRHGLRRRCSVAVFHQSIRSPRQSRAPPPFLSLELG

SEQ ID NO: 1023352 - protein, 115 aa, Homo sapiens
GSSDSNMRTANIAAGSSSGSFVSEGHLAIWGVSLPLLGGASQLGYLAVRDPLEEAVCLFSDLKLHAGRTTTLFKAVRQGHLSLQLALSFFLSFFLSFFLSFFLSFFLFLSLLVPL

SEQ ID NO: 1023353 - protein, 46 aa, Homo sapiens
MGQGTTASQGVTWATFFTGCRVSQGSPFCHLVMITGNGWDSVRPTR

SEQ ID NO: 1023354 - protein, 96 aa, Homo sapiens
MCFCVEAMKAEGLAPEKPSSSRPHHFTKEKGLPPPSPTCNVRSHTAVHETGISSRYPSRGAAEGLEASYELLDWGHPLRLVPYPYTYTDLTTEDIL

SEQ ID NO: 1023355 - protein, 44 aa, Homo sapiens
IELVPGGESESATDNSSNTAAAADNSIIMRGTALNHSAYVIPYS

SEQ ID NO: 1023356 - protein, 104 aa, Homo sapiens
HRMKRRRKAQTKGYLLPKRSFKIHLYSEHLLSTYNVLNTLRYKDWLSLSFLSFFLPFFFLFLPSFFPSFFLFLSSFLLSLSFERKRKKEGRKERKGEKERERRK

SEQ ID NO: 1023357 - protein, 101 aa, Homo sapiens
RRRVYQITLFEDSRHSRTPDDTDATKSVLSRVLTATERLQDDTLFTHVSLLLLLIVNPYKRLTIIMTRSWLIVVSGCLGPRPKCLCPSTDFGHQKEILQHL

SEQ ID NO: 1023358 - protein, 98 aa, Homo sapiens
MNYAKSLPEWALSPSTPLLRTVRYPNPPHPDALAVRTMGCIRVDKITEFLCEPLRKCLNDEGPYLRKTAAVCVANLHDFNAQLVEDQDFLDTLIDLIS

SEQ ID NO: 1023359 - protein, 272 aa, Homo sapiens
ERRGPCPRGLHDVRSERPPAVCRRRLLLPVRLWLSAAVPCAPLVAGPGLLHPCPLWPVPWHGKGWQAVLECMPLVPTGRAPDAPGSLTGDPALYPCTDVGAASKAEKCPAVEAERCQSYRLTVAFLQGERKSGRKNLKERTLCAGRIKMLEYALKQERAKYHKLKYGTDLNQGEKKADVSEQVSNGPVDSVTLENSPLAVRRRGGSFSAQYLDERSMTRMAYSHLPKEYLDKTVGYTRHHPSTMRTNAASVPAGPLAGAYNGAREADVKGAP

SEQ ID NO: 1023360 - protein, 75 aa, Homo sapiens
  misc_feature (4)..(4): Xaa can be any naturally occurring amino acid
  misc_feature (26)..(26): Xaa can be any naturally occurring amino acid
  misc_feature (34)..(34): Xaa can be any naturally occurring amino acid
  misc_feature (43)..(44): Xaa can be any naturally occurring amino acid
  misc_feature (67)..(67): Xaa can be any naturally occurring amino acid
QEVXSQSRARFNPSISMIKKCIEVLXDKQNIERXQAPADENSXXARCRPPPAWCEKIIAITIWCVPXGKSRTVPP

SEQ ID NO: 1023361 - protein, 76 aa, Homo sapiens
MYFSSKIREGTSYDLLSAIMAGKVRETFLHMVSLQMVSMPRNHVLGKCVLNPITMLYTHYLNGLQPMDSFVLVLWK

SEQ ID NO: 1023362 - protein, 122 aa, Homo sapiens
TIRMPSLSRRCLVPRLRCWSLEQHWEGLPFLALKRHLLKRVLLSLLLVCSLLGSHVQIPNLGLEALGFEVLLGSPSLPLCHSLPMWPLQQPDLLTVRSSLHGAFGIRCLPCLSPPPGLQTQF

SEQ ID NO: 1023363 - protein, 323 aa, Homo sapiens
IKEEFPNENQVVFARVDCDQHSDIAQRYRISKYPTLKLFRNGMMMKREYRGQRSVKALADYIRQQKSDPIQEIRDLAEITTLDRSKRNIIGYFEQKDSDNYRVFERVANILHDDCAFLSAFGDVSKPERYSGDNIIYKPPGHSAPDMVYLGAMTNFDVTYNWIQDKCVPLVREITFENGEELTEEGLPFLILFHMKEDTESLEIFQNEVARQLISEKGTINFLHADCDKFRHPLLHIQKTPADCPVIAIDSFRHMYVFGDFKDVLIPGKLKQFVFDLHSGKLHREFHHGPEPTDTAPGEQAQDVASSPPESSFQRLATSEYRV

SEQ ID NO: 1023364 - protein, 91 aa, Homo sapiens
MPMHRRLDFDQNRRARREVTHRSDVLTPRNRRNDLGIIQQAGGYFVARAPRIKDDDIFVPAVLTDRRHLLGYPDGKNVDSYSLGLLNQQLM

SEQ ID NO: 1023365 - protein, 275 aa, Homo sapiens
MASRRMETKPVITCLKTLLIIYSFVFWITGVILLAVGVWGKLTLGPPISPLLPRTPQNAPYVLIGTGTTIVVFGLLWMLCLHVVVDPWYAETVCHVSVPGCSWLSSYLAIVRGLVYRHGDQGTTFLRTYTDAMQTYNGNDEREPGELDQCAGARLKPAVVCRTVTNLEQQPTYFLGAWHLPPSLLHELKADCNPQDLQESDCGPPPKLIQKRLALIWVTKFHGRLTWDIICCEWRVWNPHSSQLIWNAAGLLSVPRFTHGPIKYEMALRKKICQQ

SEQ ID NO: 1023366 - protein, 156 aa, Homo sapiens
AEYGIEENGDQTCDNLSNHHISRYGAADRHPAFLCELTMLYCAIDCTLMCLAVMLLLSVLMLTVCSLSVSGDSYCSVVAEIDTFLNYTDAMQTYKHDERSRRDLCRTELVVCKLPTEHAYLTAPHLMTMMYPINRVPQVQVYTYYLNTGSLMVIIS

SEQ ID NO: 1023367 - protein, 79 aa, Homo sapiens
SIRSRVLCIRHSPVRVSPLIIPSTYVRDRRSRGWRRRAGAATDRPHASPCMRHHPPDRPRTYYCYISLQQQKIPSIFKK

SEQ ID NO: 1023368 - protein, 99 aa, Homo sapiens
AHSFSTSACSFPHRMYTMCHLPLPICAWLLTSLSYQLWPLERKQVCLIQHCTVRSKTGTGHGWSSKRMKQRLRLSFPKYYPTSPKRERGKHVVINGKGK

SEQ ID NO: 1023369 - protein, 191 aa, Homo sapiens
VYVPTTRVPSMLPSLPYLPSSGSSQQASPVSSHSIWTQPGAESAAYNPGSSHPPVSPRFSFSTSTPIPSTSSRDAAAAYSSSLSLSANGREQYSRGFGSSYSSPYPVYVSPEIGTTWTSSPFDSPMLHNLQSKGTPAAARHANIEFLDDYSEGRECVNCGACHPVWRRRWTGTTSECCGSIKDEGITVLSN

SEQ ID NO: 1023370 - protein, 146 aa, Homo sapiens
SDTAIRSGLELLKVLSFTHPTSFHSAETYESLLQCLRMEDDKVAEAAIQIFRNTGHKIETDLPQIRSTLIAHLYIKKQRGVLHDQVKTGCALYTRHIHQIREVQLAQIFEPLSRSLNADVPEQLITPLVSLGHIFYVSTRSVCFPK

SEQ ID NO: 1023371 - protein, 39 aa, Homo sapiens
GPRYHRHRGWCKIGVVEVEVNEGDGGMMVPMNGEVPMNS

SEQ ID NO: 1023372 - protein, 171 aa, Homo sapiens
MPRPSVVLPCGELACGIGRNWEAARVGPGEALWLLTLWFLRTWGAQDFLINRKDVFGVGASGEKFAGKERTRGMASGDHPSWNSEERRSGPSGSLGQKPSNPLDQRTACVGEKEAPVDLRETRVSDLSKELPRACERWGEDEIGSLAHRAPLGAESVQTRTGGTNGLPRQG

SEQ ID NO: 1023373 - protein, 210 aa, Homo sapiens
MCQSSLASKDLQNVNITLRHPLPDLYARPDITYVIIPPGIGEDYDERVLSVHLQTEILKDSGGYTLSAGELIHPERAGLQDMVKRQNFTELSRPTIGGSIPGMTVSVETIVTLSGKEFTKKTVEAKQEAQQDRPDEGQIRGGQRAEQRKKAAIISAERRLLRQTELIANSSGPLQGDGLIESAQAGSMRRTSCTRLSTLSEHRPILLSRG

SEQ ID NO: 1023374 - protein, 162 aa, Homo sapiens
VRNSYVLLFKNNDGVCYVAQTRVQWLVTGTIIRVHPLTPGLKLFSYLNFVSSGTTGTHHCAQLALLFVLCPTTSWTPKTTLMSYAHKFAIFLNFFFFLEMEVLVAQAGVQGCDYSSLQPRAFQVKVILLSHSASQIAGTTVSCNYNGLWNFFSRDGFWPCRP

SEQ ID NO: 1023375 - protein, 33 aa, Homo sapiens
MHEWRPHMPRRMLDHARLEESASPPTSREDLPP

SEQ ID NO: 1023376 - protein, 176 aa, Homo sapiens
MSRVGEEVHQIRIKIISAAIRAFGREKTGNSAKFGRPGIGPASIGPVMVQSFTLSFQESTRLNDPGGKDPEVTTGDLLGLQLAKFGDLQRIYSCKIPGGRDEQKSGNYLICFETHDGFASKRKGSGKLGSPQRRTECGSLTVGESAMGEYSCQGTRDTGGPSFVRTVHNYFETTNF

SEQ ID NO: 1023377 - protein, 61 aa, Homo sapiens
FSAAAPRQPVLMAQMATTAAGVAVCSAVGHTLCHAITGVFSGGSNAEPAMPDITYHEPQGT

SEQ ID NO: 1023378 - protein, 296 aa, Homo sapiens
  misc_feature (103)..(103): Xaa can be any naturally occurring amino acid
  misc_feature (181)..(181): Xaa can be any naturally occurring amino acid
  misc_feature (261)..(261): Xaa can be any naturally occurring amino acid
  misc_feature (296)..(296): Xaa can be any naturally occurring amino acid
LAFAAHSAAMEQRRVTDFFARRRPGPPRIAPPKLACRTPSPARPALRAPGLRIPGGSRKRARPPAAPGRDQARPPAAGDCGRRGTRVLSPRIPEAPDIPAFPXPGKKKKKTTPAAGQPPHLTSAQDQDTISELVSCQQRARELGARDRALKARAQDAGETCTPEAEGGPEEPSGEKAPAYXRFHVLVQLGLPGLVLPYKYQVLAEMFRSMDTIVGMLHNRSETPTFAKVQRGVQDMMRRRFEERNVGQIKTVYPASYRFRXSAVSPPSRMAQEADYQLTIEPLLEQEADGAAPQLX

SEQ ID NO: 1023379 - protein, 82 aa, Homo sapiens
MRGTLMDGSVRQVVLVKDCVVPRCTVLFQVSAPKPSGSQRLPGTASPGIHQCPRSAEEGWAKYLQIAKGLLKGLGKSRRSRY

SEQ ID NO: 1023380 - protein, 116 aa, Homo sapiens
MLEFYGVGISYLLLCNKFSSLKQQTLSHSFCGSEFCAVYLGLTGLVSHQAVKVLMAAVIIPRQDRERICLQAHIGRNHLRGCWTGPPFLDGYWSEAFYNTLSRGPLHRAPHHMATQ

SEQ ID NO: 1023381 - protein, 59 aa, Homo sapiens
MMISNFIHVLGYPIGFFIQSYTYPSGSFIQSYTYPSGFFIQSYTYPSGSFIQSYTGTEL

SEQ ID NO: 1023382 - protein, 130 aa, Homo sapiens
WGLGWGRGNSPLGVDVDPQSQGGKLVAQLAGGKAQVTSGRQVLLVGGPRVYLHGVLVSGTGLEGGQLQGSGRGWAGRIQEFIFNKRVTAEAPGDGHNVRIPQTDSRGLAEKAHLCTEARVGGGGGAGSPR

SEQ ID NO: 1023383 - protein, 34 aa, Homo sapiens
MYGPRFVHRGIVTLEQEKAFPQLVRRGDPLDHPA

SEQ ID NO: 1023384 - protein, 34 aa, Homo sapiens
MRVVGDDYEPYDRPYQWRDSFHEEYRPPTEMVEE

SEQ ID NO: 1023385 - protein, 136 aa, Homo sapiens
HPCLYIVLLSCDMTARQEEEQWWGLLEVEVLQEGEAEAEVNVVSTKEVLMKYEGVFGRGGGRELHRSQSWEERGDRRFEKPGRKDVGRPNLEEGGPTSVGRKHDFIRSERANWRIFREEQTGADDAGGWRLAESSQ

SEQ ID NO: 1023386 - protein, 109 aa, Homo sapiens
MEKIWHHTFYNELRVAPEEHPVLLTEAPLNPKANREKMTQIMFETFNTPAMYVAIQAVLSLYASGRTTGIVMDSGDGSPKLCPSTRGMPSPMPSCVWTLVGRDLELTTS

SEQ ID NO: 1023387 - protein, 256 aa, Homo sapiens
  misc_feature (104)..(104): Xaa can be any naturally occurring amino acid
  misc_feature (188)..(188): Xaa can be any naturally occurring amino acid
  misc_feature (200)..(200): Xaa can be any naturally occurring amino acid
  misc_feature (210)..(210): Xaa can be any naturally occurring amino acid
  misc_feature (218)..(218): Xaa can be any naturally occurring amino acid
  misc_feature (226)..(226): Xaa can be any naturally occurring amino acid
  misc_feature (229)..(229): Xaa can be any naturally occurring amino acid
  misc_feature (249)..(249): Xaa can be any naturally occurring amino acid
DAWVDPRVRALRLLKLAATSASARVVAAGAQRVRGIHSSVQCKLRYGMWHFLLGDKASKRLTERSRVITVDGNICTGKGKLAKEISEKLGFKHFPEAGIHYPDXTTGRWGRPLGHRTIMVQLVVWEKFYGWIRRSNGWATGYRPVQVLWFVQAVRPGWQLLQDGLGEALWLDAPGTKGGWWLGSGSHXFSGTCGGCLGRXDGNNPGGFPXRNRQVVVXTHLTNGGXKEXFTHSGGFTLAPPPPWGGFLXFGWWAPV

SEQ ID NO: 1023388 - protein, 356 aa, Homo sapiens
MTATTAPRMVEESKVVIPARTKSGYGESTAVVAPRKPVPAASLTSPYPRDELSRHMSQKNPVDTAAIRTHATSHRARGGRVRTIPPRSATPASATQRRHNFSGRKVVASSTMTRVVTDPDQIHHTPHAHGGAQTDAAPHTAAVMATTKVCVGVVREAYVGLIARTASPTSSTVGSTRFGTVTRRCHSARPHATAEPRMIHMGSTHMDAMDSAVESRPRASHAARLRSRVISVHICSSPLMRFAAVGHRYVQHGGDLSDVTAGLVEGEEPSARASCWHDAFTCCVDVVDTDMQDAHGVDDADAVNWTVPLASESLDDSTGDMREQGDDTPRNAAFMDEGTDMEREKAGVDPCSRRLR

SEQ ID NO: 1023389 - protein, 69 aa, Homo sapiens
RGGTRGQEIETSRQHGETGVSTKNTKNEPGMVAGTCSPSHSGGRGGRMPRTREVEVTVSQDRATTLQPG

SEQ ID NO: 1023390 - protein, 59 aa, Homo sapiens
LFHFLQRRDLRGFVYRRAQYRSEVFRPLGGGGQGVETRAIITPKFRFIAHRAFVALKPG

SEQ ID NO: 1023391 - protein, 170 aa, Homo sapiens
RNNYALVKQSEQERENAAADQAWQLFAQGKRIPEAILAQMPGRERVQLQESMRARAERLAKGGKVETDWDLYLQLREQLAAGDPVNLRAYTERIAPAQLEQLVDIQTKARSPGKQPEVATSEQQLSAYTSRLELKGERLGQFKSAAYDAFNEHCAVPAKEPTFEAPEDSV

SEQ ID NO: 1023392 - protein, 44 aa, Homo sapiens
MQALRTFRRTVKNNTDRHKLENLLCFRPMHFIDTLQKRHYLAPI

SEQ ID NO: 1023393 - protein, 106 aa, Homo sapiens
MIGSPKEEQRPPVESYTSHQVVGSMAGDQSMATYYGIEGQDLETMHRGRKNEAQLSDTEPAGEVPVTGQGDTPQRAVRGTGTAIAQHERQQANDRTSKETHRGHDK

SEQ ID NO: 1023394 - protein, 54 aa, Homo sapiens
DRSLSSILLSLWNYILSYGSSVLGPSAIPASGPEIPEAPISVSWAPASSDSSPG

SEQ ID NO: 1023395 - protein, 365 aa, Homo sapiens
MRFAGRSRLLAVLVLPPCSPRLVVSSPLACCPSVVPWYCLLFLWDAFTALSRVCAMDIICLPRGCLSNYALLSLSPASLVQGCVLSWQGLLCPAYSHIRVLSLRDALDVRTIPLAFCLVRPPGPVWNIVLLNDLYGNAKSKGGLPSKLKALPLKCKTLFALPAVIEHIRGCTQSLLTQEFHKTLEDAILKRHIRATSSGSSSLSLQGNRDETHKRAHVTSPMRDAQEPVLRPVRTAWESDVSKFNAVLCSRIRAHLVAVFNEYQRMTGRDIEKSICREMSGDLDEGMLEPVVIMFKNTPAFFAERLNKPMRGPGTKDRTLIRIMVSRSETDLLDIRSEYKRMYGKSLYHDMLGRYLQGIYREDSA

SEQ ID NO: 1023396 - protein, 214 aa, Homo sapiens
  misc_feature (164)..(164): Xaa can be any naturally occurring amino acid
  misc_feature (172)..(172): Xaa can be any naturally occurring amino acid
  misc_feature (185)..(185): Xaa can be any naturally occurring amino acid
  misc_feature (187)..(187): Xaa can be any naturally occurring amino acid
  misc_feature (194)..(194): Xaa can be any naturally occurring amino acid
  misc_feature (196)..(196): Xaa can be any naturally occurring amino acid
  misc_feature (198)..(198): Xaa can be any naturally occurring amino acid
  misc_feature (207)..(207): Xaa can be any naturally occurring amino acid
  misc_feature (210)..(210): Xaa can be any naturally occurring amino acid
MLELNASNDRGIDVVRNKIKMFAVNKKSISYPEADIEDHRFWMKQNMYDRAEPQQALRRNMEIYSKTTRFRLACNASDKIIEPIQFRCAVLRYTKLTEAHILTRLMNVIEKERVPYTDDGPEAIIFKAQGDMRQALDNLQCNFSGFGFINSEKVFKVCEETHPXLVKEMIHXCVNANIEEAYKIXAXLWHLGYXPXDXIGNIFRVCXISXWQNT

SEQ ID NO: 1023397 - protein, 290 aa, Homo sapiens
  misc_feature (240)..(240): Xaa can be any naturally occurring amino acid
  misc_feature (248)..(248): Xaa can be any naturally occurring amino acid
  misc_feature (261)..(261): Xaa can be any naturally occurring amino acid
  misc_feature (263)..(263): Xaa can be any naturally occurring amino acid
  misc_feature (270)..(270): Xaa can be any naturally occurring amino acid
  misc_feature (272)..(272): Xaa can be any naturally occurring amino acid
  misc_feature (274)..(274): Xaa can be any naturally occurring amino acid
  misc_feature (283)..(283): Xaa can be any naturally occurring amino acid
  misc_feature (286)..(286): Xaa can be any naturally occurring amino acid
VEAVCGGAGEVEAQDSDPAPAFSKAPGSADIKKLPWSLQEEGNVPNIIIAGPPGNGKTTSILCLARALLGPALKDAMLELNASNDRGIDVVRNKIKMFAVNKKSISYPEADIEDHRFWMKQNMYDRAEPQQALRRNMEIYSKTTRFRLACNASDKIIEPIQFRCAVLRYTKLTEAHILTRLMNVIEKERVPYTDDGPEAIIFKAQGDMRQALDNLQCNFSGFGFINSEKVFKVCEETHPXLVKEMIHXCVNANIEEAYKIXAXLWHLGYXPXDXIGNIFRVCXISXWQNT

SEQ ID NO: 1023398 - protein, 111 aa, Homo sapiens
NKTQMDGMSLLPILRGASNLTWRSDVLVEYQGEGRNVTDPTCPSLSPGVSQCFPDCVCEDAYNNTYACVRTMSALWNLQYCEFDWTQEGFGKISLSGCAKPETQYSSYTIV

SEQ ID NO: 1023399 - protein, 243 aa, Homo sapiens
  misc_feature (8)..(8): Xaa can be any naturally occurring amino acid
  misc_feature (42)..(42): Xaa can be any naturally occurring amino acid
LKDGIIMXQTLLIILFIIVPIFLLLDKDDSKAGMEEDHTYEXLDIDQTATYEDIVTLRTGEVKWSVGEHPGQEVRARSAHDLGAGFLPSLTASELPGSWPDPFPGPPFWFLKLAQPELPFVSSPWSPAFFIKGPGVEGQQGSYLRRKFSGKMDGMPAFMAGGYEVIRPHTSGNGGVQKLVQSLQMDSELRASQQSLGRAMDPTGPQKSHRNIIPLPQPLPPQEALASSAFPRGIKRCVLRNHN

SEQ ID NO: 1023400 - protein, 66 aa, Homo sapiens
AAVQLRVFLRPVLVCAPSNIAVDQLTEKIHMSGLKVVRLCAKSREAIDSPVSFLALHNQIRNWYGG

SEQ ID NO: 1023401 - protein, 159 aa, Homo sapiens
RYRGSRLSTLVKSTACFSATGLLLQRKLPLIGWVEGKPQGKLNILPAAPVLHGRSFQEHGYMKTSPRALFAQALAIVDYRADDKVVPGGNSPEPGSKEAYVIRAVLQRVIPCSSSLERGQSESSQPENLAVAGKRLFCYWSGLDLSSNCFPACSRRGIL

SEQ ID NO: 1023402 - protein, 93 aa, Homo sapiens
DHYWPSYGCRCSKGKINILGTLERFLDLLGETRTLGRKAGWSVCVLRAGATKPSLALAQEDFEAGLISCMSGNQPNHEGGPSARFPALFGCPR

SEQ ID NO: 1023403 - protein, 75 aa, Homo sapiens
GTPDDSTSVLAHGPVRMCRKAGWSVCVLRAGATKPSLALAQEDFEAGLISCMSGNQPNHEGGPSARFPALFGCPR

SEQ ID NO: 1023404 - protein, 42 aa, Homo sapiens
WRLEDPGHKGQQREPKATGVFTTLQPGSSIPPYNTEVTETTI

SEQ ID NO: 1023405 - protein, 277 aa, Homo sapiens
  misc_feature (130)..(130): Xaa can be any naturally occurring amino acid
  misc_feature (134)..(134): Xaa can be any naturally occurring amino acid
  misc_feature (144)..(144): Xaa can be any naturally occurring amino acid
  misc_feature (146)..(146): Xaa can be any naturally occurring amino acid
  misc_feature (154)..(155): Xaa can be any naturally occurring amino acid
  misc_feature (158)..(158): Xaa can be any naturally occurring amino acid
  misc_feature (169)..(172): Xaa can be any naturally occurring amino acid
  misc_feature (174)..(177): Xaa can be any naturally occurring amino acid
  misc_feature (181)..(184): Xaa can be any naturally occurring amino acid
  misc_feature (210)..(212): Xaa can be any naturally occurring amino acid
MAEEVLVTGGAGYIGSHTVLELLEAGYLPVVIDNFYIAFRGGGSLPESLRRVQELTGRSVEFEEMDILDQGALQRLFKKYSFMAVIHFAGLKAVGESVQKPLELLQSLPDPGPSMLLEIMKAHGVKNLVXSCSXTVYGNPQYLXLXEAHPTGGXXGGXFFFFFFFFFLXXXXCXXXXTFFXXXXAISTPQVPMPLAALVEDPQGIPNNLXXXVSQVAIGRREALNVFGNDYDTEDGTGVRDYIHVVDLAKGTFSLKEADRTVWLPDLHLGTAQAISA

SEQ ID NO: 1023406 - protein, 36 aa, Homo sapiens
MRSSRPSGVDMQGDGAGRAGGACYAVGGLQVPGNTL

SEQ ID NO: 1023407 - protein, 305 aa, Homo sapiens
MALVASVRVLARVLLRAGCPCSRARPSGGLERGGGGGDGARRFGSQRVLVEPDAGAGVAVMKFKNPPVNQPEPWSFCSGSWSVSLEKLENDRSFRGVILSLGPARVSSRAAVDLTEHVWDGAPATTLGTGEGVQELWLRLSQSNLGAGLPPSTEPAPVEGCLVALTCDYRILVDNPRYCSWDSIETQLGIIALSGGKTPLENTIGERAAERCLQVGLLYPAGGGPCMLRIVDHVVPGRSSVQSTECQPKPREGIQNMSKGDQALSGRACSRWSHTRKGVANGGSPRPPKPQSEEAEKVKGHVTKP

SEQ ID NO: 1023408 - protein, 299 aa, Homo sapiens
MTEGVKTLSLDDAERLVSAEDVLLGAGESGKSTIVKQMKIIHEDGYSEEECRQYRAVVYSNTIQSIMAIVKAMGQACRSTLRDPSKMRTDCQCRLFALSCTADVSNGVLPDDLSGVIRRLWADHGVQACFGRVNGKYQLNELRLAYYLNDLVAYCIRVTTSPRSARCATDPSYETTGICGDTASPFKDLHFKMLDVGGSAGLSGPKWIHCFDGRQQAVIFCVVLDAPNDLAASCRTRTMNRMRESVKLFREHSCTEQRWFTRQRPSSFVLDKKDLFEEKIQTQSLDHLVPEYTGGKIYE

SEQ ID NO: 1023409 - protein, 136 aa, Homo sapiens
MDVGCYKKMNGPTTVDINRGNEKGCNKNQQQGGGAEKEENPRGGGTKNIRGEHPIIVDPRGPQKGESEHKKHNGNGAQQNTKRYRQREQPGKEGTLWSNTPILRGADPNGKQTLKKIKRREEKYKWQRITAVNQRG

SEQ ID NO: 1023410 - protein, 73 aa, Homo sapiens
FNRHPRDHLPQYSQLHFLDHHQGDHLTQFSKLHFFKSTPPRPPSHSTPSFTSLITIIETTSHSFQLHFLDRHH

SEQ ID NO: 1023411 - protein, 107 aa, Homo sapiens
GAGSTSSDGWTGWWPWAVSICWQARRGGRQRSQSPGLVVQLWASQFTSLRLSLFPCAQRAAGGWIHDDKRCPGQGLSMLRARCKPPFSPRLLLFLLFQPRTQHKPGM

SEQ ID NO: 1023412 - protein, 144 aa, Homo sapiens
NRTRKEQVLSEQEGELQALREQISRRQEERAELHTQLTQKQQEAERRDAMYQEELGGQRDLVQAMKRRVLELIQEKDRLWQRLQHLSSMAPECCVACSKIFGRFSRRYPCRLCGGLLCHACSMDYKKRDRCCPPCAQGREAQVT

SEQ ID NO: 1023413 - protein, 64 aa, Homo sapiens
MLAGAHAGRGEVPVVTPDRRGRSSRTRQSKPPLTAVYLLSGGRTWLATCGPFNAHMSDDILNSG

SEQ ID NO: 1023414 - protein, 96 aa, Homo sapiens
SQPDPALDAGAICTIFSVVAISEAATGGTEETIIVLSPTILADAPSNVVFIPPTLTKQALLIQIGLLRPSTIIVAEISVPISRHRNLQMRKLRPRN

SEQ ID NO: 1023415 - protein, 150 aa, Homo sapiens
HEPALIWAQKSCLSELTGLLDSQDKRRLSFITKRFVSFVVLQTPNFIEFRSPGHESVRIVGDKTMMVSSVPPVAASLIATTENILHIAPASRGWKADAPSNVVFIPPTLTKQALLIQIGLLRPSTIIVAEISVPISRHRNLQMRKLRPRN

SEQ ID NO: 1023416 - protein, 35 aa, Homo sapiens
SRGSPVERERMYGDGRDVGEGEDVEREGMSERERM

SEQ ID NO: 1023417 - protein, 97 aa, Homo sapiens
MWLACSMGLCRVYYSSLSTVKFVADERPFISEQMSLNFRSSNGTWHASSDSAAVCKTSSYLAMVSTPVKVMPSSELLIFNALLLQAVHVHLQALLPV

SEQ ID NO: 1023418 - protein, 167 aa, Homo sapiens
SRHTCLMTRRVFYRNFIRLHTSDSGLYTCTVKNSAGSVSSSCKLTIKAIKDTEAQKVSYDKRLLKINTLEKTSVLSKRKFPTKALKVWTEIQDRQQAQISKQKFSPLKQEAYKGSRFLEEVKQIQQQTSPGTKSYWSYAGKSTQIHLQRIQQASPATLLLEHSQAII

SEQ ID NO: 1023419 - protein, 56 aa, Homo sapiens
AVQLRSPLQKMNPEFKHGRRNVHMGLLSYAKTGELASFIMHAYLHIRSTYSATGTA

SEQ ID NO: 1023420 - protein, 71 aa, Homo sapiens
PGKKWIQPTKATSHRALFPNYWHPSSPQEAQNRGETCSYFLGRNLDLQEFCLSGQHLLGRTGNQWGGDTPR

SEQ ID NO: 1023421 - protein, 72 aa, Homo sapiens
MLSCVSRWGLMDFGDLDWGDCSRSLLQLLQCPVASGVRHCARGSPVGVRRLGLGDSSRFLSPPSASSTPSGG

SEQ ID NO: 1023422 - protein, 40 aa, Homo sapiens
QLEQLVTLVLLCALSVHRTEYFCNSNSSCLTWIGALKPLG

SEQ ID NO: 1023423 - protein, 66 aa, Homo sapiens
LEDPCAHPTVNHHPNSRRSMRADNILQTIGNTPHVRINRLFGAGANVWIKSERGNPGGVTESLHSL

SEQ ID NO: 1023424 - protein, 103 aa, Homo sapiens
MYTACVKTRPCGVGEARRWPLSCWRRRSFRRGPKWKVTFIVGMERRCKWRQANAKGRKSIRLSNFPAASGHNISHVYTNIFGHGCLLQALGVKWKVITKNAYK

SEQ ID NO: 1023425 - protein, 54 aa, Homo sapiens
SRGSCRRTVAAKARYDLKVLLLTYKASIFVGLASIFSDLVLAVHTYTYATGTAV

SEQ ID NO: 1023426 - protein, 68 aa, Homo sapiens
RSYQVALFLLVMGKLGVDEDKYLDLVTDYGNMVSVAVPFGLAYALDHGYVKEGDTIFLMGTATGTADS

SEQ ID NO: 1023427 - protein, 42 aa, Homo sapiens
RVWRAPAILRETSEWNSIDVIARHDRYRPAHLSGPNTCARGP

SEQ ID NO: 1023428 - protein, 71 aa, Homo sapiens
LRPLTGRATGTVIRNAVGYTVSWKQGEHQIWTLRPCRASVISTTQVQQRFLVVALSVLLDIIVQGLAEAGS

SEQ ID NO: 1023429 - protein, 43 aa, Homo sapiens
WWTWDETPFSLPLDPQGFLPPHVGQDVQLDVADRGPVVPAHDG

SEQ ID NO: 1023430 - protein, 122 aa, Homo sapiens
QRAPSQLRNHAQLGLSFSPTHGHGTQTDLITVSTGGLHITKHNSQSTAPVFLDLSIASTVMDNSLLKRLYSASRKLHSGSSSSLSPRSGFPQSSELRPLPHSLGELTQTQDFSSLPADNFQR

SEQ ID NO: 1023431 - protein, 238 aa, Homo sapiens
GDLGAPGPLEQEAREVSLESVVCKVPTGPAGPRGANGAPGHDGAKGDAGAPGAPGSQAPLAFGNAWLERGAAGLPGPRGDRGDAGPKGADGSPGEDGVRGLTGPIWSSVVAAGCPLCDYTGDEVVPAGLLGPTGARVAPLEDLLCDSWSAPVACWLLPGPPGCCYGTIPGWLVGANTGDAWCLSRLMLGPALALAVIPAGTPEPIWLDLFGGSVRAMGCSLGSVGYPRGAYWVSTVCC

SEQ ID NO: 1023432 - protein, 73 aa, Homo sapiens
MRIPPRTVAPDGSVTFTPDKQFVGKPDPVTVKRVDKNGTPVTATYSPEFTKVTPTGTGATSTGPQGLPQLVRR

SEQ ID NO: 1023433 - protein, 49 aa, Homo sapiens
MIPIWWDTGGKLLLCATLYLQHGDHLLTLFSWRGSEPPNVPHCVPVVPP

SEQ ID NO: 1023434 - protein, 61 aa, Homo sapiens
MLEPPHGPEPRFPARLKTISLVIRGTQGAEEVLRAHEEQLKEAQAVPATLPELEATKASLK

SEQ ID NO: 1023435 - protein, 161 aa, Homo sapiens
MMNFLTLSSPHGNANGDKPHGVKKPSKKQQEPAAPPPPEDVDLLGLEGSAMSNSFSPPAAPPTNSELLSDLFGGGGAAGPTQAGQSGVEDVFHPSGPASTQSTPRRSATSTSASPTLRVGEGATFDPFGAPSKPSGQDLLGSFLNTSSASYALSPSSHRFA

SEQ ID NO: 1023436 - protein, 118 aa, Homo sapiens
MKLNVSFPASGWQKLIEEHDERKLRTFYEKRMDTEVAADALGEEVVGDVIRISDGYDKQGFLMKQGDCDLCTRPPASEYRRIPVTDQGDLQNEREDQFVLALSYKSERSQLGYCKKGE

SEQ ID NO: 1023437 - protein, 155 aa, Homo sapiens
  misc_feature (138)..(138): Xaa can be any naturally occurring amino acid
TGDAVGQNRTKLVDSKIVFPHGITLDLVSRLVYCAEAYLDYIEVVDYEGKGRQTIIQGILIEHLYGLTVFENYLYATNSDNANAQQKTSVIRVNRFNSTKYQVVTRVDKAGALHIYHQRRQPRVRSHACENDQYGKPXGCSDICLLPTATRRGPA

SEQ ID NO: 1023438 - protein, 79 aa, Homo sapiens
MVTRCNSRRDGRQSVPSCTIVGFRETAGNETFIVFPDCMISSLAVPVVVEYSALLDDSWSRSSSLGSRGPNPEQRHRCS

SEQ ID NO: 1023439 - protein, 41 aa, Homo sapiens
CYGGSVKPFLLDKRTGQGAGLREMNAQSLQDAAQGGGTSVA

SEQ ID NO: 1023440 - protein, 53 aa, Homo sapiens
MSRQYMSPPLIRRPSRTVPVTILAVLLVAAGVVAIIAAIQRLQHGSLPGWLAW

SEQ ID NO: 1023441 - protein, 44 aa, Homo sapiens
AYSGLVSFVNALYFAGVQRGDPVDHADADPARRTQTWRPDAALA

SEQ ID NO: 1023442 - protein, 93 aa, Homo sapiens
YRLLEEASKKKDKGHSSSKKSEDSLLRNSDEEESASESEHWKGPLPESDEKSQEEEFDEYFQDLFLGDEREKPSLLNVKLHEVLNFMQFEIPY

SEQ ID NO: 1023443 - protein, 54 aa, Homo sapiens
MGIEPYELQSNVECTSINEEITHEAQSQPILHQVVPDNQKVHSANEQRNVNRNE

SEQ ID NO: 1023444 - protein, 101 aa, Homo sapiens
  misc_feature (87)..(87): Xaa can be any naturally occurring amino acid
MGQRHFNLKTKEKSLLAVITKKCNSPSYEKQPGTLTPCYEWPLPALLGESYTSKHSSIAAVVPKDSEEPSEITIHARTLALNDHHPXFYLNFGPIKSNDKQ

SEQ ID NO: 1023445 - protein, 44 aa, Homo sapiens
ERLLENTGQSERITKRLPDSSVMKSTPRSSGRSQRLSRSRGSTR

SEQ ID NO: 1023446 - protein, 326 aa, Homo sapiens
CTGRVLRGRTRVAGAAMVKISFQPAVAGIKVSTMADKASRVGPCRRASDTWDPADCLAREEQPHNIGSKRGSSVGGVCYPGPMRALSRCIALLGLVFASVYIYEILLSCTAGPEITSFRCGVLYEDSLSLPGPDFSMELEEDVKIYLDENYGARLTCLVPQFGGGGPADVHPMTFQRGSDWYHDISLDKCYGHRTLDTIGDSPHSNFWELLIERQQGDLTVTAERTSFQEDMGGHVHANVTLTQGRPLRIRSYSNLVPHGANSSAHNGGPVAPGPHTYQGRIRNALRPQTRANVPTRDNLTQTPYLAAKTRSISQGFRCEEPMLTP

SEQ ID NO: 1023447 - protein, 57 aa, Homo sapiens
MGLRALDVVVQVAPERVDQVEGVDSSTGIGVTRDQPKGIVANVVTQRGDCVYQLQRR

SEQ ID NO: 1023448 - protein, 58 aa, Homo sapiens
LDYSELEVGHEVAEDEDAGAALQWHWLRLLLHCIAAGGLDVHLVRTAPPPWSAAVVSI

SEQ ID NO: 1023449 - protein, 76 aa, Homo sapiens
EDPCTVVHTCTVVHTCTVVHTCTVVHTCTVVHTCTVVHTCTVVHTCTVVHTCTVVHTWSLYRGEWGYEQQCRDPLE

SEQ ID NO: 1023450 - protein, 74 aa, Homo sapiens
EDPCTVVHTCTVVHTCTVVHTCTVVHTCTVVHTCTVVHTCTVVHTCTVVHTCTVVHTCRCIGGAVDDRDPQNSH

SEQ ID NO: 1023451 - protein, 71 aa, Homo sapiens
EDPCTVVHTCTVVHTCTVVHTCTVVHTCTVVHTCTVVHTCTVVHTCTVVHTCTVVHTWSLYPGGLYTSGGV

SEQ ID NO: 1023452 - protein, 75 aa, Homo sapiens
EDPCTVVHTCTVVHTCTVVHTCTVVHTCTVVHTCTVVHTCTVVHTCTVVHTCTVVHTPPECYNPPDTATRYEQQC

SEQ ID NO: 1023453 - protein, 85 aa, Homo sapiens
EDPCTVVHTCTVVHTCTVVHTCTVVHTCTVVHTCTVVHTCTVVHTCTVVHTCTVVHTWSLYRGCVGSVESASYPEEYEQQWDPLE

SEQ ID NO: 1023454 - protein, 113 aa, Homo sapiens
PRENSKRFVEGQNARGQGYVNETVKPEPRKNRPPIAIVSPQFQEISLQTTSTVIDGNATDDDKIVQYHWEDLKEPLREEMISEDTAISKLSKLVPENYTFSVTAVDSDGATNS

SEQ ID NO: 1023455 - protein, 51 aa, Homo sapiens
MVVLFDRARSFGRDAHGAVREEGDTRLASQISRINPGDQWGDRALIAQAGG

SEQ ID NO: 1023456 - protein, 226 aa, Homo sapiens
MVLADFLSIPYIRNVANDEACADVYRQVRRTAPGRPTTPAAWPPWASLKATWLRQIRGWGERYEKALTPDAPKWEAVRAWLKDKMPADHPTSSIVHNDYRFDNVILDRTNLMQIIGVCWDWELTTLGDPGDGTWATPSLNGSGAADPGGLVPLMRRQPSNAPGMLTRLQFCDYYAERTGIQIDNFDFYNTYGLYRLAGIVQQIYYRFFHGQTQDKRFAQFIHMTNC

SEQ ID NO: 1023457 - protein, 51 aa, Homo sapiens
GIHARGGHDGDAHLRRMGASHNWHPTYVRFGPDSQSPAVQPTDFQRRLRDD

SEQ ID NO: 1023458 - protein, 70 aa, Homo sapiens
WNEREALKMDHGRDCMSRRVSLMTLRPTRDRQNVVQLKGVYFTTFFKTKQNKTTKKMEKKTGVQAPVLHV

SEQ ID NO: 1023459 - protein, 67 aa, Homo sapiens
EGCLHRQVVLHRQVVLHRQVVLHRQVVPHRQVVLHRQVVLHRQVVLVLNSSIILSMHGPLELIVTYV

SEQ ID NO: 1023460 - protein, 50 aa, Homo sapiens
MSSLRSLYLRWCCQVQDFGLKHLLALGSLRLLSLAGCPLLTHHRAVGLVG

SEQ ID NO: 1023461 - protein, 77 aa, Homo sapiens
ARPVAGLLQTIIGYCSLLWRAQFDNYVSIGPACFNHAPGGRSPKLVLRCWRCLIDTGRVRYAIIGPALVEWGHVATS

SEQ ID NO: 1023462 - protein, 97 aa, Homo sapiens
GPVPLKISYAEGFGLPVIEALSVGTPVAVASGTSLDEITPPSAPRFSPTDGPALVQLMLSLGERSDESSAEQRKQWAERYNPNAYRRRLAELIEELK

SEQ ID NO: 1023463 - protein, 96 aa, Homo sapiens
GGYGARVEKSTSEHAGEGRGHVFPAVGNAQVGDLVGPHGFGQQGAVPRHQRAEQQHQQVDEDLQTPLAGRRQGVGPATRSRCGRRRARRRRGPAMV

SEQ ID NO: 1023464 - protein, 86 aa, Homo sapiens
PAHFSEVRVVRAFDYPIAGRSFRFAIHPPVRASGARRLRHSEFKTGRQCGLLHMKAKRRLISAAERHLAEVVRVQGETELVRLIEQ

SEQ ID NO: 1023465 - protein, 129 aa, Homo sapiens
MWLVLFLQIKFYWDKAKPIICKLSINIFMLQQSHQFQHETHLVSRSCKISHYLGPLQAQFAQTYSFNIHHTASAISIAHLSHHNTIVGTRDLLFFLEHGVLPLLHQRWTCSWHDQWAHVQPSATDYTHR

SEQ ID NO: 1023466 - protein, 66 aa, Homo sapiens
GVVEGACNPSYLGSRGRRICVNLCGSRGCTKPKSRHCTPILVDHCRPRWSDQSVTEVTDISSIGPF

SEQ ID NO: 1023467 - protein, 93 aa, Homo sapiens
IKIVFASCVSFKSEFSHSSGKRKKFIMVQQQSYKGQKQHHFQSRTYVTQKCKQAEARLVEHLRDSLDSKVFKETTSTLQGSTVVFMYNNIFNQ

SEQ ID NO: 1023468 - protein, 175 aa, Homo sapiens
VLGSTVVDSAWRESPEQGQCWAQGWRVSLLCMHPECTHPFTDFMELPSLCSVTAGTAACSQWGGHGDGCCGRARCMGFPAGVPLRMCVLLGRAPWAWRSVSERFESEGPEITGAVVSPRAHGRHLGKLQVCGGGRWGMYSCPLRARAPRLSAVCVAPSEEGDQGEGRGTEGMDEP

SEQ ID NO: 1023469 - protein, 38 aa, Homo sapiens
GSARIKTAALASLKKYGVGTCGPRGFYGTFDVHLDLED

SEQ ID NO: 1023470 - protein, 46 aa, Homo sapiens
PLTRSPQQAAVLHAGPGGDGPQYAAGVHSFGSKDAGFDYLGKLQSN

SEQ ID NO: 1023471 - protein, 35 aa, Homo sapiens
HSSFDLQLGPLAKSSRPLIILLTGINCKICRRGRE

SEQ ID NO: 1023472 - protein, 119 aa, Homo sapiens
MGTEILVINTCPKSYTCELMAPDYKLESHSPTRRNFLQFTHQHFYKVSTAAKKFTFQFKASTYKEDRESGNFKTNFCAHFIEMGTEIENVIWVHVMCGETLKQSENEELSQNNGKHVNF

SEQ ID NO: 1023473 - protein, 89 aa, Homo sapiens
VLYTRDKSCSSMTLCYLLRTPSHHPAPLGPTLFNIALSCSHPNPFQGLPKPLNCAERARASTYHRDELQEGSITYTGSCSCSPGTRWIS

SEQ ID NO: 1023474 - protein, 32 aa, Homo sapiens
MIAAAAQLRGPRGRQPKFDLGAGGRVAPVASE

SEQ ID NO: 1023475 - protein, 108 aa, Homo sapiens
RVSSPFIAQGCRHPLSIAQGCRYPTLPSLRGVDTLSPSLRGVDTLSTIAQGCRHPPFIAQGCGHPLYRSGCRHPFSIAQGCRHPLSIAQGCRHPFFIAQGCKHPISIT

SEQ ID NO: 1023476 - protein, 43 aa, Homo sapiens
RLVATAPIMCAQAKNPSLFPFSSVPMNFFRSHLPSFIEAVAYA

SEQ ID NO: 1023477 - protein, 161 aa, Homo sapiens
YSEGVVDSVKGGFTSFSQATHSAAGAVVSKPREIASLIRNKFGSADNIPNLKDSLEEGQVDDAGKALGVISNFQSSPKYGSEEDCSSATSGSVGANSTTGGIAVGASSSKTNTLDMQSSGFDALLHEIQEIRETQARLEESFETLKEHYQRDYSLIIQTPC

SEQ ID NO: 1023478 - protein, 35 aa, Homo sapiens
SVFQCWEDYRDDDQCMRMTSRNQLRAELEKHGYKI

SEQ ID NO: 1023479 - protein, 105 aa, Homo sapiens
MTAQAPVITSTFQPVGRGKGKGGNLNLHMVSHVTTLYGKEAWGCELFSHGRKQGKREKEHPAVSPGGHSCQVRSSSETECARLVEYGEELTRKIHVPSPCTVRDG

SEQ ID NO: 1023480 - protein, 46 aa, Homo sapiens
MLRVLAYIAARYNLVGIVFHRGGPCGGAVAFTVLQRFLSAGAVGVG

SEQ ID NO: 1023481 - protein, 37 aa, Homo sapiens
LEDPLENVHRYCIGFSAEEEEEEEDISEESPTEHIFQ

SEQ ID NO: 1023482 - protein, 60 aa, Homo sapiens
MGRRMSARECVSSPVGYWAVRRCCQSWAGQPGRRGGRQSRSVERDEDVGGTDVAEPRDCA

SEQ ID NO: 1023483 - protein, 175 aa, Homo sapiens
GCGGCSELRLCHCTPAWATERDSVSKTNKPQIGLSLSWLNTFQRLPITLDKKSTVSTMPWKALCGPAPARLSDAISGCSLSLIRIKTQELLSLPLDMKLPLPRVIRSCCSFLESASSRLSTLLSVQTPPLQRGLPRSPPTQCLHLHNLSMLEKKFSIMCDRGLRRALRLPVTPLQ

SEQ ID NO: 1023484 - protein, 121 aa, Homo sapiens
  misc_feature (70)..(70): Xaa can be any naturally occurring amino acid
  misc_feature (79)..(79): Xaa can be any naturally occurring amino acid
  misc_feature (83)..(83): Xaa can be any naturally occurring amino acid
  misc_feature (85)..(86): Xaa can be any naturally occurring amino acid
  misc_feature (88)..(88): Xaa can be any naturally occurring amino acid
  misc_feature (94)..(94): Xaa can be any naturally occurring amino acid
  misc_feature (105)..(105): Xaa can be any naturally occurring amino acid
  misc_feature (108)..(111): Xaa can be any naturally occurring amino acid
  misc_feature (113)..(113): Xaa can be any naturally occurring amino acid
  misc_feature (118)..(118): Xaa can be any naturally occurring amino acid
REEGEAVPGEGSSELLAGTAQEEQMKGSLLRQWARRQVASSGYTGATAVTTAGTRGCVSSPGTRKFQRLXINTLKAVLXRPGXLXXSXRHPNSXTLNRVSMKRSXQNXXXXNXTFIKXIHD

SEQ ID NO: 1023485 - protein, 137 aa, Homo sapiens
MSLSEALWIGDCLIKDRPHRGTLRSLHWHELLLEDAQGLVGSFVDGHVFWRIYSIREQDQPPSVLLVGTFLKVVVNEIDEVPKEKGRTVKRNSPSLPYLVRLVAPTWMPIAEPCEVHQQTRKISTLCALPLAQGAGF

SEQ ID NO: 1023486 - protein, 126 aa, Homo sapiens
DASLRLVACSGWSIASCVSPGAARTVGVRLAGETRGPARRAGTSGEGTSSNVAGSPERIPPRRAGSRVERTTSRAWQSTKGTGERSQYFRIVDGMVHSEQNQEMVGKKCIHITGMSLLGLHGTMEK

SEQ ID NO: 1023487 - protein, 38 aa, Homo sapiens
MGLLDTAGGRSALPSRLGGQLLARSLAAGDLRTVTDSG

SEQ ID NO: 1023488 - protein, 49 aa, Homo sapiens
VGPQIRGMLGNLISVREAVHRESYTDFYRPAVSRFQLVSERMQVVERKG

SEQ ID NO: 1023489 - protein, 136 aa, Homo sapiens
IPEYAVHGSISLTGCPGRSRRIHVSALSGYTTSRHASNTGLSPSMIVLSRTFFSQSKYDSVVLQTLLSVATEQVWAIPRSFATTRGIIIYFLFLKVLRCFSSLRSPHYFCSDNRSSTYWVVPFGNPWIKGYLHLPK

SEQ ID NO: 1023490 - protein, 77 aa, Homo sapiens
GQQGCSQERPSSPVEGETSSWGLNSEHNRKKRVTPKTATGVELEIKITDTPLLFVSSSPIMSPHYSPRPFLYQEAPP

SEQ ID NO: 1023491 - protein, 52 aa, Homo sapiens
SQARPLFWQAVYRDSLPDEASFINVDRKFLHFFTFSIVSVAAEEVVVATGTA

SEQ ID NO: 1023492 - protein, 42 aa, Homo sapiens
ENIMCVNKTGTRIKLIDFGLARRLENAGSLKVLFGTPGPLLS

SEQ ID NO: 1023493 - protein, 58 aa, Homo sapiens
HGQAIVYGPQFVQDGIHNFFRNIGDVGNFANDVLQLKPHAAGVDTARLLMNGPKMCKI

SEQ ID NO: 1023494 - protein, 65 aa, Homo sapiens
EDSHGNFSTIHRNVKAYLLAVIGAEYVLNMLPRGTHDYAKFIRPSELSAFVRTAGLQAQEMRGLE

SEQ ID NO: 1023495 - protein, 49 aa, Homo sapiens
VELSLECWGNTATPEATIASTRGLSIPIAWAACLTLQSVAETHSHTQAW

SEQ ID NO: 1023496 - protein, 71 aa, Homo sapiens
VLEDHRSVNIDVSEGIAASELKIVSQLHMRLQLQALGAHSSYRAIEVVLWQFGRQVFLIDTEQRRGEQVVG

SEQ ID NO: 1023497 - protein, 70 aa, Homo sapiens
MQYRRPLLQACHFFCGFRSPLGSGIEAEVLVVESFEELKKRQKEAIGKIVVYNQPFVSYEETVQYREFGA

SEQ ID NO: 1023498 - protein, 134 aa, Homo sapiens
TVMDVGIHRYSAPGVGWSGVRLVAQHAQQVSRADFSRYDLILAMDQSNLRNLKAMQPAQGKVDLDLFLRRYDSVVDEVPDPYYEGDQGFETVLDLIERACDLLVIELKGLVMTLQVLAQVSLKPFNSFGIDVRA

SEQ ID NO: 1023499 - protein, 82 aa, Homo sapiens
GVRCLRGNGIQCFRGEKPVLIFDILQCLLFTYRSFSPYTSPSNYVQMCRDLLSGLSPKALTLGLYFVPSPPPPPVTGLVTFT

SEQ ID NO: 1023500 - protein, 69 aa, Homo sapiens
PPPLYNSNHVQQKHHWLSRWSLSSEYLNGNGVPEQLDSSSWKSMQSAKPSQQLVGWDTACWRRHTPELH

SEQ ID NO: 1023501 - protein, 70 aa, Homo sapiens
IADFERIHRVDLVRLENLQKILTNIFSEGMHWISHEEIDTIPNDLSAPGESEPQFSDQLMILTRFFLSGG

SEQ ID NO: 1023502 - protein, 151 aa, Homo sapiens
ALDAQMISLGVSADDFEELVWRGARLLRQADCVSNGFAAVLQQVDALPLGDGLWWLHSEQTVKRPGLAFVTPDKPMRYLGQPLHGLFCLASLGEAHQTLLERLCALLIEGRGQELGRATSSRAVLEVLGGELPPDWPSARIALANAHGLHA

SEQ ID NO: 1023503 - protein, 90 aa, Homo sapiens
MASRVPNGDACGWPASCLGSVAGLCHCVWTVEVAGTLVAAALPLAAAACPMVQRALHGVVDVAHFVPAHLILNVKPNQLAVQTGKTDVQT

SEQ ID NO: 1023504 - protein, 58 aa, Homo sapiens
EAGTVRYKWDLGEPECGTKYLLNLNLEPFSEKSVPLCILYEKYRDCLTESNLITVRWP

SEQ ID NO: 1023505 - protein, 133 aa, Homo sapiens
MPVVLRAGIGHGLVSDSVPIGLNICPSLTFLINCETVGVAAVVRIVPGVVNRTLSVGFSVCWVDGASGAVVVAVKSTTSCSSRAVVETAWLSSIEERVERLLEGVVTSHLNSSSSREPSERRSRGYGLRHITS

SEQ ID NO: 1023506 - protein, 42 aa, Homo sapiens
PLVNRRLQLEGGTGLRRPIETGLVETEKTLAFLIGTYWSYAA

SEQ ID NO: 1023507 - protein, 153 aa, Homo sapiens
  misc_feature (67)..(67): Xaa can be any naturally occurring amino acid
SLKVVISRLVRSIRDLTASECSKLWGSKHAKPERGPFQKHDGLYVIRDCDESGSLRPSMCNGATFPXRVVPWGWFGENTWGWGSARTDKDTEITCSERVRTYWIIIELKHKAREKPYDSKQFCGLHFMNGDHNALSIWIQNYSPSFPYENNDI

SEQ ID NO: 1023508 - protein, 116 aa, Homo sapiens
SLECHTTSAPPVQTDIVNTSSISDLENQVLQMEKALSLGSLEPNLAGEMINQVSRLLHSPPDMLAPLAQRLLKVVDDIGLQLNFSNTTISLTSPSLALAVIRVNASSFNTTTLVAQ

SEQ ID NO: 1023509 - protein, 161 aa, Homo sapiens
MSSGLFMPKLTKLTIYIKPLLSLPDKLMGQMPRMKEFYLYDTNLSTVPWSLFANMSGMERLSLHLNNKLRELPPDLFCCLPNLQKLSLKSNDIQDLHPDIFSKLANMNTLLLNDNKLRSLSEDIFKGNPSLASVELKNNQLRTLPGEVFSTAGGLRVVTLS

SEQ ID NO: 1023510 - protein, 272 aa, Homo sapiens
AEGPINPRTRVTVRVFSNTHQPEGPSERGLHFFPSYSVSLSRKAKGKEAIWEAHHPAQEEMKPGGRRMSGMTPHLCNSHVLLLPLAWLIRGPAPGSIQSVFLLLASHLLCFLRDVSVAASEPTVYRNPTKMSCQQNQQQCQPPPKCPIPKYPPKCPSKCASSCPPPISSCCGSSSGGCCSSGGCGCCSSEGGGCCLSHHRHHRSHCHRPKSSNCYGSGSGQQSGGFWLLLWRGLLLTWTRSSTKGISGRRTHCSLEFYLLHSLAFAFWSPIN

SEQ ID NO: 1023511 - protein, 125 aa, Homo sapiens
VECIHQQVVGQGLRSDPQQVVGQGLRNDPQQVEGQGLRSDPQQVEGQGWWSDPQQVEGQGLRTDPQQVEGQEVEERISWTFCEGQVLRSDPQQVEGQGLRSDPQQVEGQVLRSDPQQVEGPGVEE

SEQ ID NO: 1023512 - protein, 53 aa, Homo sapiens
APANRRCPEAPSVVGLVHVALSEIRRYQKSTELLIRKLPLQRLVREIAQDLQR

SEQ ID NO: 1023513 - protein, 141 aa, Homo sapiens
HTAELGTTLLSSYPNPGSSCDLLSSSPNPGSSCDLLSSSPNPGSSCDLLSSSPNPGSSCDLLSSYPNPWLLLRPAVLIPNPGSSCDLLSSSPNPGSSCDLLSSSPNPGSSCDTLSSSPNPGSSCDLLSLYPNPGSSCDPGL

SEQ ID NO: 1023514 - protein, 95 aa, Homo sapiens
MHCFGVPQKASSSVLWGGRGVEETGSHQQGASPTACPMSSVPRAEPGTRSNGCLEPWGSALDVRPVCWGLSSSGEARGPASPTNLTKSAQGPASP

SEQ ID NO: 1023515 - protein, 74 aa, Homo sapiens
RAYTEQMLKEIKDYAQSDTAKQLEPGFTPRPDAVHEHFTTALYAHSLGSPSPVYNQSELVTTQKHRHSLNLFYS

SEQ ID NO: 1023516 - protein, 116 aa, Homo sapiens
GPCYWLRVDYSRGEGVCSCCPERVAEWDAAIGRKSIDDQFIELMDALDGYDSPEAISQRLAELQGPIRELAAACRQTVLFTRAQVEFESTKADIKLRPMEGGCLFAAWYLLMDRIA

SEQ ID NO: 1023517 - protein, 92 aa, Homo sapiens
SQIIAVINVEADHLDNWGTPQAYFDGFVSMATRPEVRYVVTNADHPGAAELACRLESTGTVRVVTYGESEQAEVRLVDLDLNGTTASATLVH

SEQ ID NO: 1023518 - protein, 37 aa, Homo sapiens
MAKNQAPPSSNHSFPEGALSPNHRTRYREILIAVDAA

SEQ ID NO: 1023519 - protein, 119 aa, Homo sapiens
MSPPVMSTSVPEDTPSNAKPPPCQEPVRDNLGSLHLIPGCDSCETFWFWDHSENSPGKRSQKLTLGRQNTAHSQPETHGLMFLFTNIPSLQDWPGDPPPSDCPGPHLAKHGGRETQARV

SEQ ID NO: 1023520 - protein, 169 aa, Homo sapiens
AVEDGPDDYDEEDEDEVEEEETNRLPGGRSRVLLRRYTCKSLPRDERCNLTQNCSHGQTCTTLIAHGNTESGLLTTHSTWCTDSCQPITKTVEGTQVTMTCCQSSLCNVPPWQSSRVQDPTGKGAGGPRGSSETVGAALLLNLLAGLGADGGQETLTHGPSPPPTASPV

SEQ ID NO: 1023521 - protein, 86 aa, Homo sapiens
SIQYRVCKLSSVVILRNMGRCEMHLVWGCQWCLRYAYVSSGDLYRARRALMVLWVAETYAYLTASSGEANQKLKRKQPFVSHLPVT

SEQ ID NO: 1023522 - protein, 84 aa, Homo sapiens
LEDPTRGRIASMPVWILVDPALHRKRGNARVQAEHEGSDAGRGQIQMTRLLGADALAAELNARTPVHMDRLDGRQREQQRRVHR

SEQ ID NO: 1023523 - protein, 123 aa, Homo sapiens
MRSFPQLGTSTVHLGTSGTPSSLPRPIVPGPLLVPFTLNFTITNLQYEEAMRHPGSRKFNTTERVLQGLVRVQPISLCLAHLTRFHLHHPCPGYRRRSHVNHLRPRVTSPTHWCQPHPPISCH

SEQ ID NO: 1023524 - protein, 60 aa, Homo sapiens
RVIPRAEANNCSPNSGWPAGVRLALMGIEESSAPAVDHANNRRVAEYLLEEILERLEPRD

SEQ ID NO: 1023525 - protein, 54 aa, Homo sapiens
EPFQGDMNRGTFLAIQNKFLARRFKLLEQALVIEEQLRRAAYLNMSEEPFSLTL

SEQ ID NO: 1023526 - protein, 59 aa, Homo sapiens
MLAVAPVWATVLAGGWAVVNPVPVSLCRAMGADIVIAVDLQHDAHLMQQDLFSIRIEEE

SEQ ID NO: 1023527 - protein, 44 aa, Homo sapiens
SSSWSFLSIGPQAPGTRHTSAEGEPLNSRSKGQRGTPGANRGLV

SEQ ID NO: 1023528 - protein, 75 aa, Homo sapiens
IEAPEVEVGLSALEIFQAALAHEEKVSEAIRELYRACTSAGDIDAIPLLQWFINEQIEEEATVDEIVGRIELIGD

SEQ ID NO: 1023529 - protein, 98 aa, Homo sapiens
MGAHTCRKKENGERRSRNKGWGPPQHKKTHSRRAGGRAANRGGDERDKKTTTHGEGRATARRGDNAGRTNKTAGPGERPAHRDATKDRTAPAGRGGGG

SEQ ID NO: 1023530 - protein, 101 aa, Homo sapiens
SGLRFHVRSKAPFTKICDGVVEVLASEPSRRDFLGHQIPAELNRDLYPPELLTRLEGIWLPGTGSSSRGISCVCPRPMAPLRACLPSPGSSPVQVGALLPW

SEQ ID NO: 1023531 - protein, 445 aa, Homo sapiens
GGNCTVEDAAILKDCGQLCAFCDAQSTQEIHEKVLNEAVGALMYHTITLTREDLENVQRPSASSVLDMGMWFLTTSDINVVPGIKAFACLQQCPAASCGGDRPDSTLCPHPEPVPAGHLAAPGAAGGHNESRASEQDPGRGWRTGRYTGIRRGRPMEHHRTNGRRGGRPSVQHAGPKAPTVTNNDCTYNGPINMYGGMRVAAVSLGTASRMSSNHMTGPGHIYQQRRQQALEPIETGRDQQRKPTQQPKLQSPTSHTPGHSPDQTDTRGAVPIARHNRHRGDEDQEMDNQQEQGKAMSPKEHRKAEETEEAHRKAQSKSRKDPIQRKGKTPTKHDDRTACHHNIPKRKEARNMGKGAHAATPTHRRNRQPDHDPIRRDGQSKNTRPDDEETENKRKGSADTRKNSERRRTQPRRETRPPHSTGQQREQSSSERDREQEGRTPDTK

SEQ ID NO: 1023532 - protein, 110 aa, Homo sapiens
EIIQLALGGSVWAHALNASGSGASAAGFVSTQEDRIRELAPHGMIQQDEDAGTDVGGGGAVDLIQESPGVGEPRDAGVPSRVDGQGLNVSLHGSSRAKPISRTYLSPVAC

SEQ ID NO: 1023533 - protein, 63 aa, Homo sapiens
  misc_feature (2)..(2): Xaa can be any naturally occurring amino acid
PXPTCGRSTKVWRSHRGHTEATNNELNLLGGINISADDYNPERVIFDIDNESYVTKSGDYFTE

SEQ ID NO: 1023534 - protein, 39 aa, Homo sapiens
SVTCLLTQCVNTTLQIKGKINSITVDNCKKLGLVFDDVV

SEQ ID NO: 1023535 - protein, 543 aa, Homo sapiens
MPRTPVYGYEKISWKTFLKYSEEVLAVFKSYKLDDTQASSKQQMARHCTNQEAEPCHILRHTFFHTQCTHSCMAFHQLQCTVNFRSAPPSCLPVISIIHSHIISKAAGPTFHTSSTLMLIHSCMQHIHFGIAQHHSPTIQFHPTHSILQEPPPHGTNSIFQSMVSSIIIHTPPGISKHLAHSVAHTYAQVCPTVSRRNSNSNHPASPTTLTQHITLPRQQHSMRPRRYSRSGHKAPPPNNTVIWTRYNMKRTFSVPTGFQGKLLSRLCITLLRRTAPAKHIHLAPLDAHYLLLPTYWQPNTPSLKQHSPKLALQCPSNPVTKDTQCVCHTHANLTHLHLLNPTLHTLYMDLALHTPISTSISMYLGRIAALILYISHTTHPTPASLVQDLITTTHISFHSHYGLHLNAYESIESSTGAPLSCGKHYYTRRHALATTNAVYIGCATVYGHYASPSYDPGENITTSVSHSPPTEISQLHGANNGSMQTTIERSRSPDTAPGTQHEQITTRTPSPLAPDGDWRNDVKRHDTTEADSQKILAERTNV

SEQ ID NO: 1023536 - protein, 68 aa, Homo sapiens
  misc_feature (2)..(2): Xaa can be any naturally occurring amino acid
AXRRYAFCYKEVKATYKDGQFELIPAPQFQQPHSMILGQSPPLWERTVSMCEMGGSSWACCCFPRLDS

SEQ ID NO: 1023537 - protein, 85 aa, Homo sapiens
GLFRAAGVVEVGGSSCGVVQGGPCALYPLSAAVPDATSVLEGQASEDVAQIRDHNSVLLIPKRAGHPSSTRGIEMVDVEARVAHE

SEQ ID NO: 1023538 - protein, 67 aa, Homo sapiens
PGLSLSTHPLCAYVRLPGADCIGPTCPAVPWGTVLGQNAKPKERSLAPALVDLESAPIARSTALQAV

SEQ ID NO: 1023539 - protein, 86 aa, Homo sapiens
VETPLMVADTRWLRSPVVGVGSLRERKQMSESASLSMQEASYVFSTSWCTDSVVLDGSTTVSDTLCEVTTLKCDMMRDGNSSRILL

SEQ ID NO: 1023540 - protein, 83 aa, Homo sapiens
DQNSNLLIEEFRNEFGEIQGDKSEMIWNFHCWVESWMTRPDLQPGYEGWQGLEPTPQEKSEGTYCCGPVPVRAIKEGDLSTKY

SEQ ID NO: 1023541 - protein, 89 aa, Homo sapiens
SRADYTMLRLRTRYTMLRLRTRYTMLRLRTRYTMLRLRIRYTMLRLRTRYTMLRLRITYTMLRLRTRYTMLRLRTRYTMLRLRTRYHAR

SEQ ID NO: 1023542 - protein, 66 aa, Homo sapiens
SRGSRTSILYTRLTLQGKKVRPDYLKAIGKVINGENVTERYRAGKKYNHDRYAEYVKLFMTVLVVV

SEQ ID NO: 1023543 - protein, 49 aa, Homo sapiens
MLSPLSTGLLVATEEMCGQDLRVIHSPIQIVTKQFQHRDNRLGSARDDD

SEQ ID NO: 1023544 - protein, 121 aa, Homo sapiens
  misc_feature (29)..(29): Xaa can be any naturally occurring amino acid
MPPCESRSLRRSSADRATLLSLTNLPCGXLRRVIEASKPTASAGWSLRALRVLGLWPLFRDRLRWCCYKKQLSRISPRARAWVQIACLGDDHRPKGIGRVMLRGVSPMILGCCTLRAPSHL

SEQ ID NO: 1023545 - protein, 163 aa, Homo sapiens
MPRTNKTEFQLELPVKYAVYMVVTSHGVSTKYLNFTASENTSRVMQHQYQVSNLGQRSLPISLVFLVPVRLTRLSYGTAPRSPSPRTSRVRAITKERLPSHSDFLAELRKAPVVNCSIAVCQRIQCDIPFFGIQEEFNATLKGNLSFDWYIKTSQTPPDREHS

SEQ ID NO: 1023546 - protein, 201 aa, Homo sapiens
PIFPENSEVTFNITFDVDSKASLGNKLLLNANVTSENNMPRTNKTEFQLELPVKYAVYMVVTSHGVSTKYLNFTASENTSRVMQHQYQVSNLGQRSLPISLVFLVPVRLTRLSYGTAPRSPSPRTSRVTCHTKERLPSHSDFLAELRKAPVVNCSIAVCLRIQCDIPFFGIQEEFNATLKGNLSFDWYIKTCITPPDREHS

SEQ ID NO: 1023547 - protein, 49 aa, Homo sapiens
RSTCSGLLVSRLYLVSRLYRVYLERPPFIRVWMSRRHRTPLNRVIVTSR

SEQ ID NO: 1023548 - protein, 343 aa, Homo sapiens
EVALEVLDRGVVPCRKDPKQPGADDAPDVAGMASEGSMEGFVVTVPNKSAEMRSTLRAEKGSHEEEPVKKRGWPKGKKRKKILPNGPKAPVTGYVRFLNERREQIRTRHPDLPFPEITKMLGAEWSKLQPTEKQRYLDEAEREKQQYMKELRAYQQSEAYKMCTEKIQEKKIKKEDSSSGLMNTLLNGHKGGELRMGSPPSMFPSSREEFLDQNKAREAELRRLRKMNVAFEEQNAVLQRHTQSMSSARERLEQELALEERRTLALQQQLQAVRQALTPSFASLPVPGTGETPTLGTLDFLTGPGFTGTPSKRDPPSTRRLIVRITQILAPVATGTCEDWPAQ

SEQ ID NO: 1023549 - protein, 437 aa, Homo sapiens
RALRGGGGAVVPGPGRGLSWPGGNRTSASRGGGNRPIKGFLVAPALEELPCSLDPVPPQRIRARASRGSPIAGYPEFAVCHRASPGATHAPSRDPCSSVRPGAAHVLTAPKSSPDAGRLCRAGRPMASEASMEGFVVTVPNKSAGDGSTLRAEKGSHEEEPVKKRGWPKGKKRKKILPNGPKAPVTGYVRFLNERREQIRTRHPDLPFPEITKMLGAEWSKLQPTEKQRYLDEAEREKQQYMKELRAYQQSEAYKMCTEKIQEKKIKKEDSSSGLMNTLLNGHKGGELRWVLHLRCSHLHVEEFLDQNKAREAELRRLRKMNVAFEEQNAVLQRHTQSMSSARERLEQELALEERRTLALQQQLQAVRQALTPSFASLPVPARANRPTLGTLDFLTGPGFTGTPSKRDPPSTRRLIVRITQILAPVATGTCEDWPAQ

SEQ ID NO: 1023550 - protein, 40 aa, Homo sapiens
HQSIKGLVGGRGAIVGSHNPQMINLRILALLHSPPCVDCQ

SEQ ID NO: 1023551 - protein, 62 aa, Homo sapiens
IGGTVHCVGGQSRGVFFNKVTFKLQKVTFKHKRGTKHKSQGDKKTVQAERKALPKALRQDSM

SEQ ID NO: 1023552 - protein, 96 aa, Homo sapiens
RIGSSSSARSAHPRLAAPLPALNLGMRPEAACKKPCGTPLEVLLRDHWTVHGLERHSEPSACCPRLRLTTAVLTANCYGTGTAGPKEGAGSPEEGP

SEQ ID NO: 1023553 - protein, 59 aa, Homo sapiens
CRDFLKILPPNELEYKCTVIEFDQLDRNGILGPIRQCSPGRSNVHSSPVVPSGIMVGGD

SEQ ID NO: 1023554 - protein, 133 aa, Homo sapiens
  misc_feature (96)..(96): Xaa can be any naturally occurring amino acid
  misc_feature (100)..(100): Xaa can be any naturally occurring amino acid
  misc_feature (105)..(106): Xaa can be any naturally occurring amino acid
  misc_feature (113)..(113): Xaa can be any naturally occurring amino acid
  misc_feature (127)..(127): Xaa can be any naturally occurring amino acid
MDPGNENSATEAAAIIDLDPDFEPQSRPRSCTWPLPRPEIANQPSEPPEVEPDLRGKGTHGGALRADPVALSAPRSRPGAPSPESLGGCNRSSEGXLPPXMPWGXXSYAELIXQAIESAPEKRLTLXQIYEWM

SEQ ID NO: 1023555 - protein, 40 aa, Homo sapiens
MHRLGIQAPEVIADQVLGNPAHPGAEGGLAAEAVPVTPGL

SEQ ID NO: 1023556 - protein, 71 aa, Homo sapiens
HRSVMRHADNQTKGLSFFCVMSTDEEYQQAQHKFLVAVESIEPNNIVVLLHTEPLPGLIRYLSAYLVSVRY

SEQ ID NO: 1023557 - protein, 81 aa, Homo sapiens
ALVYATSAVRKELSKASAETVIPNTCAAASLPSCLESDDQVNKSVFQVYSTVRIDSIADSTKEHAMSKNVMEIKIYTPLYC

SEQ ID NO: 1023558 - protein, 35 aa, Homo sapiens
SRMDKEHWDMAVSSIFTSYERGAAVTVLLARLRSH

SEQ ID NO: 1023559 - protein, 113 aa, Homo sapiens
MTSSSWLALRGMTPVPLRAQLMDGHEARTDKRGWYLNAKHSLAIGENGEYYHLVVPGGFAARLRGVKLHPSLPPMHIGRGGRDGETGELKEFLTWLIDSRYGFDGGRGVTLTT

SEQ ID NO: 1023560 - protein, 159 aa, Homo sapiens
TRNVTKDHILDDYSPPMGKYNEWGARGKDCIPIVSNGSAYVEFETPDEAEKALKHMDGGQIDGQEITATAVLAGLAEASPQEIQPSQENVATTAYVAQVSPMDEEKVPLPEAQVPRAPEITVPGPAPPQEPPQLQLLPDKQATEALAPVTYTPPSSVER

SEQ ID NO: 1023561 - protein, 91 aa, Homo sapiens
MQAMETPASYKRGYHWEWRRGKGEPTRRYVGNRYNHTDGRKSKRQRGAARDRREDKEVTPQHGGTHMVQAENTTQGRNDSMETQQNVEKNT

SEQ ID NO: 1023562 - protein, 301 aa, Homo sapiens
DGSSLPADVHRYMKMIQLGKTVHYLPILFIDQLSNRVKDLMVINRSTTELPLTVSYDKVSLGRLRFWIHMQDAVYSLQQFGFSEKDADEVKGIFVDTNLYFLALTFFVAAFHLLFDFLAFKNDISFWKKKKSMIGMSTKAVLWRCFSTVVIFLFLLDEQAGLLVLVPAGVGAAIELWNSEARHCTMTYFSDDGLLPELQYGTYSESDRKTEEYDTQAHERTCHTCCTLSVFGVAVYPPPEISHYKKLVLLVNQQLRQPGSMPWGILFMLTQVLVNYQVDVRVDILTWKASPNRAFQPPSWL

SEQ ID NO: 1023563 - protein, 176 aa, Homo sapiens
DGSSLPADVHRYMKMIQLGKTVHYLPILFIDQLSNRVKDLMVINRSTTELPLTVSYDKVSLGRLRFWIHMQDAVYSLQQFGFSEKDADEVKGIFVDTNLYFLALTFFVAAFHLLFDFLAFKNDISFWKKKKSMIGMSTKAVLWRCFSTVVIFLFLLGRAGGPFLVLGPAGGLGPPI

SEQ ID NO: 1023564 - protein, 70 aa, Homo sapiens
MVPPSGEVEGLALGDGEDERITVRLGAGAVTGGEDERGELGACDRRRRDREWSDIHLTDRPLTVLRVGEG

SEQ ID NO: 1023565 - protein, 61 aa, Homo sapiens
CGRNKATSAMDSISEERSMAAIRQVASDSILIIVSHKLKTLATADEIIVLESGQLTERGPL

SEQ ID NO: 1023566 - protein, 285 aa, Homo sapiens
APLNSRRRGSSSPPAAPSGVDLRCCGPVSYPGVTAAAQSCLCGKFVLRPLRPCRRYSTSGSSGLTTGKIAGAGLLFVGGGIGGTILYANWDSHFRAKCTTKTIPYSDKILRNMGPGPVRVFIQCPMCHNDPRISSRVHYNISSVSEVLTNTSNTSLPHNLHKTQQGDTPASANSNLQKRLKLHLLQQRDTLSDPAPAVQPEESFTQLITPELGDRTTPPPATFSTEASSSFYKGERPPAEQVARSPFAQPGQHYAPTVKWQSSSPIASEACSEANWQVAPLQGIG

SEQ ID NO: 1023567 - protein, 359 aa, Homo sapiens
VVLHFRERRREIGCGREARPLRRRIRRVSEPSESHTNDSGGKSSTDAASIFDYRMRCILQDGRIFIGTFKGIVDKHIEFRSVCDCDEFRNDQAKRTPNKQKGTEKRVLGLVLLRGENLVSMTVEGPPPKDTGIARVPHCWSCRGPRDRQGCWQRNPSWGSHDPRLLQDLLGQSSGVGGPSPTGDDPTRKRYCCSRCRLLTTDSIAGGSKLSTHLGSGGTSPNYGTLEHTLPGMNGANFHGIESSYGYPNGDPPLEEGLQWRHATLRETAGNLPHSIATRPPPPDKIPPRQRAHNNALTETLHHDAPPARRTRNTAAAKHTNQSRHTEAADNTTRRTHTTNPKAHTGSNTTHTTRATDTQ

SEQ ID NO: 1023568 - protein, 109 aa, Homo sapiens
SVLGAAGAIEDVAGTMMIAASLTRVNRDEVLVRGDLVETLRFNSLISHHQAGPGGEAKVKLGRFGSRHWWPDNYTLYFMSAGCMGCDQEYKSSMDVKAAEKDSDSALQS

SEQ ID NO: 1023569 - protein, 73 aa, Homo sapiens
LLASVLRDEVIWNLDTTVDDKADVNCACVTHAGLNIVTGDDFGLADRSLTFPCHRTHFATHTNADTSGHSCSL

SEQ ID NO: 1023570 - protein, 295 aa, Homo sapiens
EGSMTQVYERLGEAAGSGGGGARAFGGRQLHPPFPAGELLRVQHWLEPTVWCCSMVTPLEAPSGASAHGSRAAAVEAPYQPVESDDESLVRPLCCPALLALDSKLPSGPSTPQGGRLSSGGHGRRIELGEWPRIPGPQSVEGPGPWQLCIIVVKRPTARIIINPALSRTMVHEAGSCYDGWVPWHSLQLLSSSSLPGLGLGTVTVHGARMTSDEFQELIVFSLGRSPKSGSHSSHGQKFSWCTESSATLPAVRVGAHARGGETGVWPCCSRLCGHRQAEWNLAPCQHLGATKVAS

SEQ ID NO: 1023571 - protein, 50 aa, Homo sapiens
FGLGISHGKWQYVTVPDVRGQALCACISGLCLTGAGPHIWNRLHTALSHE

SEQ ID NO: 1023572 - protein, 129 aa, Homo sapiens
ASCLYFLNALYFSTFILPQRFILLNALYFSTLNALYFLNALYFSKFYTILNALYFSTLYTSQRYIYFLNALYFLNALYFSKFYTSSTLYTSQRFILLNALYFLNALYFLNALYFLNALYFLNASYFLDV

SEQ ID NO: 1023573 - protein, 59 aa, Homo sapiens
PLNANRVRCHLASNAVCSTCGLFEETGLHILGDCPMAREVWNIIIHPSSLHAFYNSSLI

SEQ ID NO: 1023574 - protein, 37 aa, Homo sapiens
HGVAVTCGSSVLIPACILVECPLVPSGEGTSKKGLWA

SEQ ID NO: 1023575 - protein, 50 aa, Homo sapiens
  misc_feature (1)..(1): Xaa can be any naturally occurring amino acid
XGDLVGSPSLLAGHRSWGSQVRLRYPYSPWGLSVDGDVGDGQLREEIPKS

SEQ ID NO: 1023576 - protein, 116 aa, Homo sapiens
LLSASLCCLPRALVTLSLSLGSRIVGITSMSHVPRFQLLILDFYLTVFVPPPPLFLIVRLLFPGSFFPGGTMLKDRHSLVWFLWLYNIVIVLHVLTLPFVPGQMEIKHSAYPVVCW

SEQ ID NO: 1023577 - protein, 33 aa, Homo sapiens
  misc_feature (17)..(17): Xaa can be any naturally occurring amino acid
MRGAALNHSARVKQCAXAVYSSGGSDSGHCLDS

SEQ ID NO: 1023578 - protein, 52 aa, Homo sapiens
MADTADSRPKDKPPPPQHNNAKKPDKQPVPHRETDNEQIARTQQQTAARPTD

SEQ ID NO: 1023579 - protein, 282 aa, Homo sapiens
RSGSGCVVDAGLSGPAPRDGLQGKEAAVLLPTRQRPRGATEMRVARQSHFTILAGRDGVYYVVQAGLYSGAQCPPARLQSAGLPGVSTTLVHRHVEEPGGSSLGTAGNPAFGGSSEGCQRMGGQRVMCVSVQPPFPSGGWRMRRPRESSSTSKAGLRGCNQRLKQAGNVLRQRCELLQRAGEDLEREVAQMKPAALPAAAAASSGSTLGACRLGQRTSGLTPGFPWGSSAQNGIHGVQPTCVLTHGAAHELWAAVHRRLIPAELVGPPSCPVLVTCGPLGLE

SEQ ID NO: 1023580 - protein, 59 aa, Homo sapiens
AQDEDLIDLEETDDNNRAFSYKPLWKLLIDRDMNKIQLQERAGISPATLSKLGRGGNVT

SEQ ID NO: 1023581 - protein, 139 aa, Homo sapiens
MGLALLGVLGDLQAAPEAQVSVQTIFQQDKFLGRWFSAGLASNSSWLREKKAALSMCKSVVAPATDGGLNLTSSFLRKNQCETRTMLLQFRGPGYYSYRSLHLGSPFSVSVVEVDFYQYAPLFSQGSKCPGEDFRMAAL

SEQ ID NO: 1023582 - protein, 76 aa, Homo sapiens
CPVALGPGQSSWQIKAGRWEERKAWTQYQGETSNQACHGHLTLRIPFPRMPMKIVFRGSHTHRPKSDVTGVPRLEI

SEQ ID NO: 1023583 - protein, 73 aa, Homo sapiens
LTPVRCRTCLWRGPQRGTGQRWGEVHAQCRLEDASARYTGGLDEVQLAIIAITLWPEAISRAPVPTVPCTERS

SEQ ID NO: 1023584 - protein, 219 aa, Homo sapiens
TLLREEPATVDCETQCTVLLPATPGWTPCRDPPPFGPQASQGFLWTGLSLLIHSPASPRPPQLQVATSSRQSDEVPASALRGPSAHNSGDHGGDAAWGSWTGAPTPLLAWNDYVRSISRLAQHLPLCWTRPRARAKPRRIPTGQPRPAGRGRTCCVPARHQLNVSVDSSPTTATWADTVDPLALARVWGVPGTSSQAQRDLHKEELALCLASVGPLYDR

SEQ ID NO: 1023585 - protein, 43 aa, Homo sapiens
TVNFSISLKKMMSQYVVRKPFFIEGLSYNILADIIFFAGHSSR

SEQ ID NO: 1023586 - protein, 85 aa, Homo sapiens
YPVPCTVRHAPMNTQSGIPSKCTAGSLPMNTHVMAFLSKHTVRQPLDEHTCQASPSKRTVRQAPMNTQSGISQRTHRQASMNTQS

SEQ ID NO: 1023587 - protein, 40 aa, Homo sapiens
RLKICAGMGDDDEHEQGGEHAPSRCRGRRSWHSRMAVGEL

SEQ ID NO: 1023588 - protein, 68 aa, Homo sapiens
CTVHSIGYPKCLVCGEILESKYQHNFVSCNCKNQTFTDGGLVYNRVGAVDLDLVENLCEYAEMTRGEH

SEQ ID NO: 1023589 - protein, 77 aa, Homo sapiens
PVSLLAGASWPGALLSDGCLLRAGHSRCITARGTHPLAKKLPAQRTTRAVALSSSVMCSEARSRCGYGSSCCELRSG

SEQ ID NO: 1023590 - protein, 70 aa, Homo sapiens
DVSGNNSAWLGRLRETDALSMVAINKRSASLRKQTNLGPAFNTAAESRFLIPKTSERPETPEWSRSGYRP

SEQ ID NO: 1023591 - protein, 39 aa, Homo sapiens
SVALGTQGVTPAPGSALRASILQVILRGTVAKSRGVPWP

SEQ ID NO: 1023592 - protein, 65 aa, Homo sapiens
MLLDICHITSLAFIRDRPFCFSGLYRCVHVIKQLLIHLHKQVQAIIDQSMDCLVPVDSWRPCRDA

SEQ ID NO: 1023593 - protein, 101 aa, Homo sapiens
  misc_feature (1)..(1): Xaa can be any naturally occurring amino acid
XDLVKDSFACAKNWWLDDERRAHIRGMEGGRLGGRINSRPGAMLVSLYSSANFSRGNDHMSSECCNVTSSDQETQEGLGSPKEAIGAIPKRRRNRQRSPQH

SEQ ID NO: 1023594 - protein, 103 aa, Homo sapiens
CGNEGMGHEQNQGAALLQDVYHFVWLLTPLLGPSPESVLLTYVAMMTCYRSHIPVTSECTAMDGMSQMWDSLMAYDERLRLSLVLSTFAHESLWVSSPWPEIC

SEQ ID NO: 1023595 - protein, 208 aa, Homo sapiens
LSVGSSSPGGEAGGGGVMRSLLRGAVAGDARKLRVCFTSERRKDVLYEEIPRTRPLVISLFPKSVYEQEIPAHPGLAMFVEVKDPEDKVILARQYGSEGRFTLTSHTLVSTRSVFTPIPPKFSLFAVGMLRVHLDIQVGEHANDYAEIAAKDKLSELQATEVRQLVATSGADPRKSRTHPAVAKERFRRPVRAPTSGCCGGSHSGKTL

SEQ ID NO: 1023596 - protein, 186 aa, Homo sapiens
LSVGSSSPGGEAGGGGVMRSLLRGAVAGDARKLRVCFTSERRKDVLYEEIPRTRPLVISLFPKSVYEQEIPAHPGLAMFVEVKDPEDKVILARQYGSEGRFTSLPIPLRVHLDIQVGEHANDYAEIAAKDKLSELQATEVRQLVATSGADPRKSRTHPAVAKERFRRPVRAPTSGCCGGSHSGKTL

SEQ ID NO: 1023597 - protein, 244 aa, Homo sapiens
RGVLLPECRRRSCCCRSPASCPTMSSHLVEPPPDPCTTTTNNCEENEQSLAPPAGLNQFLGGATHEQQQWRMIMATGNTLAGLETRTIRTSIHPQLETWRRYFWMHNMNQDRDSIQRQFITCDTTFRTQERWAQIMSDVEMQQQQGPYDLKSEDKKLVEGEKDVEAFDTHKLRTGSQNWLQSTRQTFHAKAVPLQDTLNVLCSLTHEEKGSHDEQARLHSAEFLTLSNPISLPFLTVGLGASIS

SEQ ID NO: 1023598 - protein, 94 aa, Homo sapiens
  misc_feature (82)..(82): Xaa can be any naturally occurring amino acid
MCATCDRRRNEETLIYCNEESAKVCRFQLEWVGTFALGFKLSENFMGTQEGQNRGDYYKAQTEVLEAFKPKASQEMRSLETXPRDDSITPNVLS

SEQ ID NO: 1023599 - protein, 110 aa, Homo sapiens
MDQLLSQIGQENTEENRCSDRQVLISADDRVKKCIGGVIFYHETLYQKDDNGVPFVRTIQDKVISVGIKDDKGVVPLAGTDGETTTQGLDGLSERCAQYKKDGADFAKWR

SEQ ID NO: 1023600 - protein, 144 aa, Homo sapiens
  misc_feature (86)..(86): Xaa can be any naturally occurring amino acid
LGIHLEGHTVLKIKHKRNCIDVIRMKTAWGREEYVLTYNYEGRGSPAGSVGCCSEKQEEDGLDFLNNLEPKFITLAEACTKREVAXLQLGLCQTFWRFPKIILVKFNFNMYVYDDFFLNFELCYSPIYIFKASWCLSFAKSEKL

SEQ ID NO: 1023601 - protein, 208 aa, Homo sapiens
SERLREHAYEHSLGQKLRATKQRAQEALLQLSQALSLMEIVKQGVDQKLVEGQEKLHLGCVLESCDTSKHASEGRRRKIRANARSGVELPWSLTYVPVTIAQSICQATCIAPWGPASSRASATNVKDHGAARPAVRWRTFHATFSRCYPVSSRTCPSQHSGPEPVSVSPAPARPWTTWWNMWPRTHLSRGIVGPFAPGITEKAPEEKK

SEQ ID NO: 1023602 - protein, 192 aa, Homo sapiens
HVYWLEMVLFYRAHFGTDETILDGKEYDIYVSYARNAEEEEFVLLTLRGVLENEFGYKLCIFDRDSLPGGIVTDETLSFIQKSRRLLVVLSPNYVLQGTQALLELKAGLENMASRGNINVILVQYKAVKETKVKELKRAKTVLTVIKWKGEKSKYPQGRFWKQLQVAMPVKKSPRRSSSDEQGLSYSSLKNV

SEQ ID NO: 1023603 - protein, 200 aa, Homo sapiens
PPGPTRKVGCSDGRACGAERWRRRLLWRPPCSCCVVRTRGRGLAPAWPKTELAKAGGGKHFNLLSSKGGDKSSNFLYLQVKGEVEAKVEELKFDRYSGFRPGVLVCDRQESRPGEWLVKKFFGSLPDSWARGHSVPVVTVGRAMLNNVGETKRQADGNCWENKAIHDLGGKRNGLSKAIDPTGRTWVFMCEPLPPNSANR

SEQ ID NO: 1023604 - protein, 183 aa, Homo sapiens
MLMKREDSSGKQTTVVNLVLSTVAGIISFFFHRVSVIIWLLSLPLIKVHENGSGEGKLLNVCSNYKVANGWLKKKRQRSNEQTQRTHEGQEPIRPATRKRPSRDRTLSVEEQGRHTKKENHDQPMGVTKTQRAPKRETHLGQQQNTRAKRNYAPNETTRRRETPRGRAEQTEPREEEYYRENQ

SEQ ID NO: 1023605 - protein, 78 aa, Homo sapiens
MCSAPEPGHSKRNHPKKKSFKAQGSEGCAQQPYFGAVNPELFIKPNKPVMAVRMGNSFTGGGDAWLLPFAIGRAIRRT

SEQ ID NO: 1023606 - protein, 42 aa, Homo sapiens
RPIQPFKFPFQKQRLRPCHSYVLLKIVYIGKRMLKARIFKIV

SEQ ID NO: 1023607 - protein, 190 aa, Homo sapiens
DAPSLAPALGELCHHVGPGCLPHPVRDSGLVLHPYILSSDCGRAGSARSHSQPWQVLVASRGPCSLRRVFWCTPEWVPHMLPTASWNQSRDLAGFGPALCHPEDTWPGISGQPQLPTPRIYDMSLLKNRYLRPGDDSRHELMLLRLSEPAELTDAVKVMDLPTTLVLLSVVDHFNRIGKVGNQKRVAVCF

SEQ ID NO: 1023608 - protein, 68 aa, Homo sapiens
ITAATTAPVITAPKRTRPAMMPTIPIVGIIAGLVLFGAMFAGAVVAAVRWRRKSSYRTGGSYSQAARQ

SEQ ID NO: 1023609 - protein, 104 aa, Homo sapiens
LCVHNKEGSPGCREPQVENNNEQLLYEQLLETANHKQPAGTMHLIPHVAPFSRTLSNFPPALASLQVAPSLLSCPLQHIFTISLINLPFFTYNYLGRWLYHLQN

SEQ ID NO: 1023610 - protein, 211 aa, Homo sapiens
REDLALKRPFFERPGPYSMPLSARDLFANPLPGPMPVLVPRGTCWHAIVQGQVPPLTLLPPWCPVTPPGALEPLCDSASVRLGGCHQPLPPRPEPEYGHPGPMEIHFKRAYPFPHSTHPPTFPRGKFTSELYPQKDGYSTEATGGPHGLRWGALLRRYSLPPPPMYPPLLPLRAFPTVSALGGEHVAAIRQRMSRSYPTLPGPTSLHPSPL

SEQ ID NO: 1023611 - protein, 84 aa, Homo sapiens
MPAALLTCGVVLTNAASEVGPQSARSSDEVLLCAVASDQAPLTRGASVLLRAFLRRLRPEPSHCPQAHTQNLTRTQNQAHTQTV

SEQ ID NO: 1023612 - protein, 64 aa, Homo sapiens
MQPNYCKAPTFNFRESGTSIGGEWVSVCLNGDEILLDLSTLHVSKESMQSDMVIPNSGSKMTGI

SEQ ID NO: 1023613 - protein, 182 aa, Homo sapiens
RERRCQCQALTKPGDSGGRGAFIPADRATSRWQPRHLTARLRGFYASFSHIKMGMKFSLDPYRWYPCVFSCANRVMQILSHNWSELISHFVSQAATGEEHFVFNKVVNLHVRVNDSEIGVMLTGRTWVPRCELHKTANSKLGWIYEFATEDSQRYKEGRVILERALVRESEGFEEHVPSDNS

SEQ ID NO: 1023614 - protein, 79 aa, Homo sapiens
RPPDSFGRRDSFGRRDSFGRRDSFGRRDSFGRRDSFRRRDSSAAGIPSAAGIPTDSLVKEGIAASFAVKLFKAWMAEKD

SEQ ID NO: 1023615 - protein, 248 aa, Homo sapiens
GAGRRERLVAGFSRPGPARPRRGGYQGGCGARARAQDTRGLSGAVGQALSRPPRGPVQAQAFQGCSAGRVREGLSGGPGAPHPLLPTWDSRGRPALAPLASVGLPGPLAALSRAGAPPWAAPLTPAVGLVRASVSDSAPACVGGSQDSRATGPFLWFVSVPQQHVGTFHRQPLGSPGHSCSVPWPSPGQAKVGQSWAASTPACMSPEQLPIGPLLAWGLQDAGRRELGGRAFELTPGGSSQRFPPSGT

SEQ ID NO: 1023616 - protein, 41 aa, Homo sapiens
GTLICIMVQLFEKGYGTDAAGIAMEAIAFARNQGFDVVLVD

SEQ ID NO: 1023617 - protein, 122 aa, Homo sapiens
RHVKTGGNGVMCSLKMEPSNIKERGLEEILPHSPQKELALWTPFQTSGLLSYRESIPVLLSPPICGSLSQRPQEANALSSAVQLWHLTGPLSRDGVKSFSYRMILMQRFRHKCQATQKRRVL

SEQ ID NO: 1023618 - protein, 32 aa, Homo sapiens
MMHSMSAIGWMETTLFFPMVWARNFGLKQVEN

SEQ ID NO: 1023619 - protein, 214 aa, Homo sapiens
GGKLAGLQPGGGPGPWCSARSKPPVPEEVGQGRAGLSAAWRERRPPRGPCGPGSRDRAAHVSAWRGPERKWRSSAPQPQPQPPAPFPLRQLPPSRARFSPRGLGPCASEAGHGDTEARRSPPSTPQTRSPGCDRSESPAEQWGTPQRQTAAPCPPKNHGIGKHGKLDEQDLPYPDEDTLTVIVRFGGTVRDRGPWGIAPEESRTVLPLFDGPGK

SEQ ID NO: 1023620 - protein, 122 aa, Homo sapiens
RSLMNVGEVSSPFLPYQCAPHTYSFTLFLLPPSIHLTKRHNLKLSYMLCYFLTKVPSTLPPSLHIPSEEHSQGRTGIIAIIPSIYLNPFSISSIPSINPIHPSNPSIHLIHPSHPSHPLSPS

SEQ ID NO: 1023621 - protein, 237 aa, Homo sapiens
ASTAFPGCPAASPRSLSSSSRAPAQLGSPRTEALGAPRTRGTPAAPGQPPAGAPSHLHAPSGPAPHPPRLCPQAQGLASKTQNPPGSPGDAPARQVARRWRKPQKRPLRNTGHHATGQTPIRQEETSYKQDEHGQTFRRNRNAGKVTFTTTPCTRAVSNLIRRHRRIRTVRGLGRVSWDAFTSWKPGVTFTRVSTAIEGLGVTVWLAGNYDRGDTSAETYFHPIIYDNKDLHQGIPQ

SEQ ID NO: 1023622 - protein, 73 aa, Homo sapiens
LRQKGNSNNSVKIYRNLEEFQKHMKNEALQKLWPQMFIELARDAVIEIRNKNSYMKLCLQQITDQKQKWPLVT

SEQ ID NO: 1023623 - protein, 167 aa, Homo sapiens
LIAGCDVYTRDYKTPATCVRTRRALFVTGTGVAGATVVLMQSYKPENILATTTVDGYGRWATQVDNPLPISPPDFTMTGYQSYFEGKRSGWLANRTIQVVDAPDLAIIETPAQGVENRTSASCCQVVVLRARPVVLLKSGDPYNAFVDPPLSMAIGRLVCAGGTELE

SEQ ID NO: 1023624 - protein, 35 aa, Homo sapiens
MPTHKQRHGQPFFELTHGVADGRRYTVQFLGGGAE

SEQ ID NO: 1023625 - protein, 45 aa, Homo sapiens
RTPLSPTQEHLWLCFTYFFYVIDQGETDVYVNNEWATSVGVGGER

SEQ ID NO: 1023626 - protein, 42 aa, Homo sapiens
  misc_feature (3)..(3): Xaa can be any naturally occurring amino acid
TLXLSREHLVTILSAAGLTPLDDDLWHQFSHRVDSSIHRDLI

SEQ ID NO: 1023627 - protein, 291 aa, Homo sapiens
MSQLAAAIPPQNDGTFIGYKERRRMWTNVSAPLNNFSVSADAMMMKTERARTKTFIILLACKWIHMSIERTFHVETPEEREEWTTAIQTVADGLKKQEEAGDGLPVWAHPVTTQELTEMEVSLAKPKHQRDHERGSEIPVTSAGLWLLSAKVTPGEGDMGTGRVLQPVKILKTGSHRWPRHEGEPTQSPENRVLETLQGTRVSSHGLKVLLARHHESPLAIVMDVRQEEGELYFHLIRERVFSEGPVPDFYGAEIVSALDYMHSEKERSCTGNSKLENLMLGQGRAHKDHR

SEQ ID NO: 1023628 - protein, 201 aa, Homo sapiens
MLQKSGIELRTCEPLSSRDVLELLLNNFCSAMSAGSRCSPGSMRRSPCLTSAADAPVFQGLSLVSHAAWGGSGPGLQVLPVQAQGAESKAQNTKATPGSYGSSQGKFTLVHLCDQTFQNHQEQRATLLQLALGIGSNLEATSSRTKPSPCTALGLSNTARAPPGRLFPSLLGTQTDLTLRQVQEDLARHTGIGDEGYIGAS

SEQ ID NO: 1023629 - protein, 211 aa, Homo sapiens
MDLSSKRKEETRWQISLKPKIACEAIIRRNKNRHKNRGKERKDKKGANCDRLTASLTTHLNWKQNVPKIAKELGFQPESGGCENSSVKECDDWRADGCLPSIVHPNPLERPIKMGWLKKQRSIVKNWQQRYFVLRAQQLYYYKDERGHEGPRAACIYPADVTHHGRIRHKPRKKPGTDCLWKSIPASWDQNPLGQDSYVLMASSQAEMEEW

SEQ ID NO: 1023630 - protein, 121 aa, Homo sapiens
MTGEQMAAFHPSSTPNPLERPIKMGWLKKQRSIVKNWQQRYFVLRAQQLYYYKDERGHEGPRAACIYPADVTHHGRIRHKPRKKPGTDCLWKSIPASWDQNPLGQDSYVLMASSQAEMEEW

SEQ ID NO: 1023631 - protein, 41 aa, Homo sapiens
MRECMGFPISSWRDAQTCIFDISVLQPFLGRCSATATSSSS

SEQ ID NO: 1023632 - protein, 123 aa, Homo sapiens
LRGSATVDLAGRWFVTHHDRQDHHFHQYRGEGQDHGAVGVADFFRQLFGVMGHAHRRHHDKRDQRKAGQQRNQLAAVEHPVLQRVGGDGGNQRQQHEFFLLEGCEHSGPFRTANQSLMEIYRW

SEQ ID NO: 1023633 - protein, 68 aa, Homo sapiens
SIASVHYRRALGRANVFQLERMDESDDGDATTGTAQILKARTAFDPPTSHSAMDKMWRNGKRVRRVKL

SEQ ID NO: 1023634 - protein, 310 aa, Homo sapiens
GSAGRTYLVRCEPANSLQACSAGPEPGGSRVRDSSPHGPSFAEGAMSHPADRHAGVPEEGCRARALLDKGRQTSRNVQIIFCTGIFGRQNITFNSHRQDLGTSRQASRDADGGIARNTQDDRTPQTQTMRHTRSHRARELKEPIMPPAWDLVPLTSIRYGTQTMRQDKKGNDAWTLTEGQQLVATSHYDCRLISHSGNSTECLTNIKKTICGKTMRGHRTSQDELEPEPDGPNTLTAMKQTPEQDSPGKWDVTASTLSRINSDKGKQGRSARTGEPKHDQTQSKEHNRGTQQDRKQTHDQKQSQTEAPSK

SEQ ID NO: 1023635 - protein, 77 aa, Homo sapiens
MQLPRINGGQGTLAMEPLSCPQAWALVLPLQSVRMAQQHWDGTHDHAMACWATNMSARSLVGNGLICWYEYQAPVAK

SEQ ID NO: 1023636 - protein, 80 aa, Homo sapiens
  misc_feature (36)..(36): Xaa can be any naturally occurring amino acid
LIIPSDPFWVPTTEEEYLHFGEKADSQRGRREYMNXLLKRKGLYVEEKIVEHAEKQGHSAKISSYLLLVDSFPYSEFKST

SEQ ID NO: 1023637 - protein, 46 aa, Homo sapiens
MNSQVNANVVHESEAQRQHARVKIPAKLRFFGADQTPMEVLRILAW

SEQ ID NO: 1023638 - protein, 262 aa, Homo sapiens
DHSVTVDRFGDDEAYMKKTVRLEMERNHERYVFLKWGKQAFSRFSVVPPGTGICHQVNLEYLGKAVWSELQDGEWIAYPDTLVGTDSHTTMINGLGVLGLGAYGGHRQQKPQLLGQPVSMLTPGCSGLQTYRKITLKVLPPQTWYLTVTQMLRKHGVVSDNSLDILLVDWSGSHYRWRIAPPYANNGRQQSGSHLVGFIPNRLLYNLRLTCSSTAAAQHERSRSKLAHRTNIMPKATGAIVAVTPGDRTTSKQAPYRPGIEC

SEQ ID NO: 1023639 - protein, 419 aa, Homo sapiens
MIEQHKRRGPRGWRWSRSLRGSMLSAVGERGSGPGDRAVEHGDAGRPCCERVPPHMSSASKTPVMAVSRGAVIGEVYLSAIIHPKGSTLASAGFDRLILLWNVYGDCDNYATLKGHSGDNVMELHYNDEMAVCFSQPSTDKTVAVWDSETGERVKRLKGRYFLCEFLLIQPMRGPRAFVWYLASSTDAHEVKPSGTSRERHAIPSEHISEPLYQVSQHVTPSNDTNVIHDSFLVEIDNDIKVWDLRQNKLIYTMIGHAMIQVTGADVEVRRDGSYLLSNATGHIQFVSGMSWPVCPRNERCVKIFQRECATFEKNLLRCSWSPDGKQYSSWLSRQVRLCVGYPRRAYGFTLAAMLLLKDWVPPCEPYYSFGAPLFGEIAPMWRPACLTHRCACGSPPNRSHGALPLSVAVPRVLYAGSY

SEQ ID NO: 1023640 - protein, 186 aa, Homo sapiens
  misc_feature (6)..(6): Xaa can be any naturally occurring amino acid
  misc_feature (46)..(46): Xaa can be any naturally occurring amino acid
  misc_feature (49)..(49): Xaa can be any naturally occurring amino acid
  misc_feature (51)..(52): Xaa can be any naturally occurring amino acid
  misc_feature (54)..(54): Xaa can be any naturally occurring amino acid
  misc_feature (57)..(57): Xaa can be any naturally occurring amino acid
  misc_feature (62)..(62): Xaa can be any naturally occurring amino acid
  misc_feature (76)..(77): Xaa can be any naturally occurring amino acid
  misc_feature (83)..(83): Xaa can be any naturally occurring amino acid
YGEGSXSLSASINEALNNNGILYSVGKFSTVNPVYVGNVALAHILXLRXLXXPXKTXSIRGXFYYISDDTPHQSYXXLNYTLXKEFGLRLDSRWSFPLSLMYWIGFLLEIVSFLLSPIYTYRPPFNGHIVTLYNSVFTFSYKQALSRTICAYYSSLYQLRAANAMVSKTVEVGLVSLCETGLQGDT

SEQ ID NO: 1023641 - protein, 107 aa, Homo sapiens
DPTFSDMVRPDPHTHPRSYLCRHGQTQILILMPDPTSSDMGRHRSSYQGQILPLHTMTDPDLHAYNRFLPSQTWRDPDTHTCTRFLPSQILTDSDPHTRARSYLLRY

SEQ ID NO: 1023642 - protein, 236 aa, Homo sapiens
MACRGEYWRSPRGKQGGGGLWGRAGPIISTPVLVVSDAVVLSKMGILPVWSRAREDSESLNLWPNKEKDRIYEHVEKEEGTRQRNFSKGDIDNIKRGKMGNPQKDREAGLSRRNKEKGCIYHKPGHQEINKQHCTNRKDTKRTTGNEKKEGREGQAQDTKRSMEDPCQGKGNSQSRERDQQGERGQSTDTRRGPSTEEEIRRTRRQKQRSTHRTKTKTKTEKGGEHGKARRAPTLD

SEQ ID NO: 1023643 - protein, 68 aa, Homo sapiens
KQLEAIKQLQEDAVNQEGILRKRLQETSQRTGGCGGAGRVAHGYIRFRGHLLRCPANHEIKMEEEQTN

SEQ ID NO: 1023644 - protein, 101 aa, Homo sapiens
MPAWLAMIWLNIWAWLSNLPINAALLSNEVSCCWALNAAINSSRLLSKTATCSGWVAMACRPLQALHHTGFQGADPSLQVCCFSGLAEGGIDLYLVVRLGL

SEQ ID NO: 1023645 - protein, 125 aa, Homo sapiens
TAQCCESTGRAIITCQVIFLVLFIRRQSLALSFRLEYSGAISAHRSLHLPGSSSSPASTSRVTGITGVCHHTRLIFLFLVETGFHHVGQAGLELLTSGDPPTSASQSTGIIGVSHGIQPHPSFNQ

SEQ ID NO: 1023646 - protein, 358 aa, Homo sapiens
MDYLDPRSGNSFERILTRLLLTPGHGYNRIITQKELPSDAENTRRHNTGRPDPTQQRTSVRDHSGAPRPLRNPTVISSRAYTLTHNTVATQNKTRTPKSPLCFYVRGWNDYLLGASFSGTYSNRSLDIARLSASPHSVPFLTVTRSTIWLPHSFQLSYSRNPSSNNSQELFAATTSSVSDGLTRIIFLASFPPVTLSSSSLSSECTNSTTWRTCSQRLFRILRYSERTTPRLIITISRSPPVFGCVVPCGSQPSSFSLGMLNAGPSAAHVPALVSREPSVPRPHRHPDAIWRARQRGSSPTSAGHRRATEPSCDEATDSETNPPHEEPTKATAHRRSDDTTARKPRERPEENTQSNQP

SEQ ID NO: 1023647 - protein, 234 aa, Homo sapiens
SGLRAPRLQPSARSRFRCHCLLPRAVRRLPPQARGSVRLGPLLLAPGQENELEEDAWDPVQGSPSLPQLWRGRKLELEMPIWSECRTRSRADPGEARPARPTGAMGRSGRRCLTPAVRARLETCHGQCPCRGSRVTLVAPEEMWRGSSGTTLPEPSVQCKLLSDPDARAVAMVMSQGTYTFPHVLRRLLAHLGSHRPALLPSADFLSRPHSNAPGGATCASRNLSALELEPSEL

SEQ ID NO: 1023648 - protein, 106 aa, Homo sapiens
MFGKTADAWLQDLLNWCMQIGQGMSYLEDVRLVHRDLAARNVLVKSPHHVQITDFGLARLLDIDETEYHADRGKVPIKWIALESILRRRFTHQSDVWSYGVTVWEL

SEQ ID NO: 1023649 - protein, 81 aa, Homo sapiens
LLILQVGDSEVEGEWHQERARGCVAREGGWSPRGFQVHCRGPRNTGGWHRAPMGEAIDIETVPVQGVGAQLCNAVGQLAQV

SEQ ID NO: 1023650 - protein, 102 aa, Homo sapiens
LLTICMSSFEKFFVMKSISSHVTIPGETTKEKSMHEHHCFYLMNSKKDLKKGLFHSIGATFENSVKLGADISLLAHRSTISPESLGHTSRKEICHSMQVLKS

SEQ ID NO: 1023651 - protein, 135 aa, Homo sapiens
ISGDDTCPGSPALWVTRWVLLVHRWPCRSFHYNPGQSEAFHLESSRYFSTEMTYLLWPLVAEPLEDPWAPEFRAIQRGSSGWHHSSARPFQCGREPRELITSGQNWMNGDSALLAGFHCGIMRHPDSQCSQTVTR

SEQ ID NO: 1023652 - protein, 246 aa, Homo sapiens
NVLVCVNRTSAQQPLQVYDFWCDAGVEFIQFIPVVERLADETTARDGLKLHAPGDIQGELTEWSVRPEEFGEFLVAIFDHWIKRDVGKIFVMNIEWAFANFVGAPGAVCHHQPTCGRSVIVEHNGDVYACDHYVYPQYRLGNMHQQTIAEMIDSPQQQAFGEDKFKQLPAQCRSCNVLKACWGGCRNTVHARCQRQTGTELFVCRVSALFPHLPAYLKAMADSAGARSPGQRHYACAFVVVSSRNR

SEQ ID NO: 1023653 - protein, 50 aa, Homo sapiens
MHGVKNQSKADADPTISIVTLDVNGVNNPIKSRHRPNYINRTIRCDWSEQ

SEQ ID NO: 1023654 - protein, 70 aa, Homo sapiens
VLNQNSDIPGAMADLAGCCKHSQWRKYTGGAEPRAMSPHILFFMAAQLSLSPQELDKIIDKMASIGATIK

SEQ ID NO: 1023655 - protein, 95 aa, Homo sapiens
YELDGFLGIDVMRHVAQVSSQGYLLIPNSLNDTHMLLLTGRTWKGAILVGFKRGDRKPKLVADFMAKKFSLDALITHVLPFEKINEGFDLLHSVF

SEQ ID NO: 1023656 - protein, 313 aa, Homo sapiens
MDDKAFTKELDQWVEQLNRAVSTVNENQAADAVRARQKEILTKESNVQGGSLPCLLSVEMCSGHTFMILLELFRIGWTDITRIQIYFIHWRDYCYDRGYFIQVETVTLLVAINTRAVTPETHLSIIDAGDNHRKPTNYPKLLLASMTELSADKLLGNANAFGTYFTDLFDYLPLTALVDGPQIFCLHGGLSPSIDTLDHITAWIVYRTVPPCRGPLCDLSSVRSRIDRACLAVFPPVLLAPFSAPPLLTFTLPWSHHWLPRAHPACTARIPLGRPASPSSAPPPAAPTSWYRCAHPAASVPRCPSHSPSAVGP

SEQ ID NO: 1023657 - protein, 84 aa, Homo sapiens
ATTIDLYQSHWDDPENAVEDVLGTYQELIKAGKVRAIGASNLTPERLTESLDVAKKHGLAALVKPCSRLYNLYDRSAFEDGLEA

SEQ ID NO: 1023658 - protein, 313 aa, Homo sapiens
GSPATRPGLDGRAAGLGRGGAEGGGRAQGRARLCLASRSGSSRAAASRGSERLPRGSVASAGAAGALAMRTLWMALCALSRLWPGAQAGCAEAGRCCPGRDPACFARGWRLDRVYGTCFCDQACRFTGDCCFDYDRGVPSSPVLRGGMEPLEWLCRPVQAYNPCAEALGAAGASERRGALAHPWKRELAAWSTPTRRGQDCGHTYVPAFITTSCIQQGENTTSYVSTLVYTHQRMLDTGMGSLETEVFDFLNCDSCENLCPWTRWDAVSPERDTRVCVDCQPPAMNSVSAFCSSGDGLDVLMEMQTLHWVSNW

SEQ ID NO: 1023659 - protein, 248 aa, Homo sapiens
EQLRGGVLDFLVLWAPWQLNSSVKLDEDYIQDKGESYLDSMSMVPHYRQALDMILDLEPDEELEDNPNQSDLIEQAAREMLYGLIHARYIRYQTVASSTDRLEKYQQGDYRLLVSQLCYYVEKPTLNSLPNLALSQNMHRGRSTVDEKTATCHQVHRMCTHHKSSRHHHTDGAYIRQLVFPHMLIHGASRVPAQETCQPVYVPQALQVFKIHARWRYTVLQIQAQPATSRAHVKTMSVIPSPTVSCSL

SEQ ID NO: 1023660 - protein, 57 aa, Homo sapiens
CTLMLWSYLEYPRAYLDLLAYLDLLAYLDLLAYLDLLAYLDLLASPEVIQVCQMAQV

SEQ ID NO: 1023661 - protein, 106 aa, Homo sapiens
REGELIISFLRPLYEEKQKEHIHIGEMKQTSQMAAENIGSELPPSATRFRLDMLKNKAKRSLTESLESILSRGNKARGLQEHSISVDLDSFLSRTLKNTSKEPSVC

SEQ ID NO: 1023662 - protein, 45 aa, Homo sapiens
MGRNFSVTNARTLFTAHRYPCNVVHRLFSHGPHFVVRLLIRPSYS

SEQ ID NO: 1023663 - protein, 356 aa, Homo sapiens
RAGRRQAAPQSGGSSGGSRKPLGRTGGPGGAGGGEAGGRHRPGRQKSLQFSRLQGKSRRPAKPPSRAAEPSRSPAAVPGGPMPRCPAGAMDEGPVDLRTRPKAAGLPGAALPSASARCARPPRSPPVPAALRALSSPWTLCAAVRPAGGPRGPPTAWPGRRRFTTPELTDFVPHSGHGLPVSSGEPGYTHITHDVAPMEQPHYMLNIAMANVTDEEGGHSLSHIAVVQGTMQVCNGGKLLPAVGPGAPHSKTTTGDTVPPGWDNALTVRSQAMGYGGAMPMWAERDGQKGATGVEHGPLAGTRGKTPALARGQNNRTPRRRHGETRVEGENKRQRIQDGDRRRKNAHTASSTQMKS

SEQ ID NO: 1023664 - protein, 55 aa, Homo sapiens
LEDPELSRVGVADSSLVRWPPDLLLVRGGMAIFSHSFLIMPHGPTPILGGELLAR

SEQ ID NO: 1023665 - protein, 289 aa, Homo sapiens
HASPTRPLGTRALLGAPELSHPDTIIPKTPALLPWQATCPPKATPLRPHLPTLSPLGTRSRRYILGPGRRQCPTQVPAPAPGFASLPLAQSPLALGVCCPLLATARGAFWPRTFLVPALDSRISDYTHERLSRVETVPRLGKTPVTRAMKLRLLGPGKPPGSGGRGEQMLRPVCAVDARQGPLTMIQPGRPRETCRCCSRLPTAATVAARVLPPVAIQEMEVQAPAGTSIGHVLQTLDIPSSPSSPSRMPSRQNSLAKWWGLLDLWLWHRHQTLSVKTRDESRQCGPIQ

SEQ ID NO: 1023666 - protein, 112 aa, Homo sapiens
TLARYPAASIAPPTTPEIAETTEPAAPWIPCTRPAMICEPIETICPAIPVMVLMICEPILINEAMTLCTPAVTALRKLDIAALTAETTDEKILDTVESTLESTLETTLSTAW

SEQ ID NO: 1023667 - protein, 110 aa, Homo sapiens
MEPFLLIRTPRPVIVEPLVQLDDEDGLPEKSCPEESNVSKGERNPSSFCPALALFEYGYFNSRLEGPLDEIGKPSKGDQVEKTMKDAKDKLEVKWKMPIMNIRQIFCAKI

SEQ ID NO: 1023668 - protein, 96 aa, Homo sapiens
APVDRSAPVDRSAPVDRSAPVDRSAAVDRSAPVDRSNTGNLTRPGTGQAWHRWISSYSHSVGGGAIAVLQWVAAIGLVNSDNATHIWHAQLVTRTP

SEQ ID NO: 1023669 - protein, 59 aa, Homo sapiens
MAWRGPFPKPSVQGRAPGNSPPPTSASLTHHGTGLQSFSGYPGAAEMETQGRLWNLLKL

SEQ ID NO: 1023670 - protein, 159 aa, Homo sapiens
MTGAPPTPPRALERNVHDIRRASSPRRHRPRDDNFDAIYQRPAQPSLIRPAGRVRTSAPPLAHSPHHPRTFFFPPSIPIPSPFVPRFPPQAPFPYSRTALLHPQHLQSHEPLGACATSSRSISNHDVPIPTQLSHTIAIRSTLPRYILSPSRVPLARPR

SEQ ID NO: 1023671 - protein, 46 aa, Homo sapiens
PRLDRPPIPTHLNITDEVVGKKRVVGKKRVVGKKRVVGKKRVVGKK

SEQ ID NO: 1023672 - protein, 49 aa, Homo sapiens
ALENYGYCDLRTYGLRTDVGHDTTRRRTRTTFTLLAFWRLTVTDWTSGR

SEQ ID NO: 1023673 - protein, 118 aa, Homo sapiens
RKATAQHGAAQLLLAFPFAGREVSMGHPLPPTLPPTTLPAATVDHSQRICDRLGLQTWMKETERNIRSKLSDNNIHLRCYGTTGGFQGCGLQGPNWDAYSRSNCWLIITIYGGVLSTC

SEQ ID NO: 1023674 - protein, 104 aa, Homo sapiens
MKQNLQIKYNIFDALASRLPCALTMPAATVDHSQRICDRLGLQTWMKETERKVRSKLSGNNIHPRCYGTTGGFQGVVCKDPIGSKFKEQCCLIITIYGGVLSTC

SEQ ID NO: 1023675 - protein, 61 aa, Homo sapiens
EIQTVPESKQCPESKQCPESKQCPLGAVVKGCTSHYDAVVNSASSGVLSAGLNSGVLGRYA

SEQ ID NO: 1023676 - protein, 54 aa, Homo sapiens
FQRRSDAYNACSDCINAALTASNAALTASNAALTASNAASGFGDLNPEWRRWMQ

SEQ ID NO: 1023677 - protein, 56 aa, Homo sapiens
  misc_feature (45)..(45): Xaa can be any naturally occurring amino acid
  misc_feature (47)..(47): Xaa can be any naturally occurring amino acid
MCILVLVLFYTLLSKDIPEDWVIYKKRFNGLSSSTLAEEQASQSXAXTVNAETNVT

SEQ ID NO: 1023678 - protein, 76 aa, Homo sapiens
DASSLYYVLDGPLLGIRQLWSRPSPPLSSPGLRSQPPNLDSLPCSLSQIQLLRTAARARALKHRPERVTVPLGRSC

SEQ ID NO: 1023679 - protein, 42 aa, Homo sapiens
MSAGKMVISRLWLDVCGCDREKSRSKRDEENAIRDFSPRLLR

SEQ ID NO: 1023680 - protein, 69 aa, Homo sapiens
NQVYQRKLPLRTGLSIMFVLGRIENHGSELCLAVRLSFLQGRDDSSRYHVVKIVVRECLYRYLYITCIP

SEQ ID NO: 1023681 - protein, 152 aa, Homo sapiens
MGRWRGAEPPGISASTQPASAGRAARHCGAMSGARGEGPEAGAGGAGGRAAPENPGGVLSVELPGLLAQLARSFALLLPVYALGYLGLSFSWVLLALALLAWCRRSRGLKALRLCRALALLEDEERVVRLGVRAWGPARLGSFSRQLKEQNG

SEQ ID NO: 1023682 - protein, 176 aa, Homo sapiens
MGRWRGAEPPGISASTQPASAGRAARHCGAMSGARGEGPEAGAGGAGGRAAPENPGGVLSVELPGLLAQLARSFALLLPVYALGYLGLSFSWVLLALALLAWCRRSRGLKALRLCRALALLEDEERVVRLGVRAWGPARLDGISLCCQAEVQWHHLNSLQPPTPGFKPFSWPQPPE

SEQ ID NO: 1023683 - protein, 108 aa, Homo sapiens
QVTVSRRATPMQVNKHHLVSRFIFQTAERAEWLNKTVKHMWPFICQFIEKLFRETIEPAVRGANTHLSTFSFTKVDVGQQPLRINGVKVYTENVDKRQIIYGPSALVS

SEQ ID NO: 1023684 - protein, 164 aa, Homo sapiens
MGRVAHHRLRRQEEQSHCSGSRHHSRSLGSVGPATSQILPKPPHNSSAALENSGTRRRPDRQASQHSISNTPAMEDLEQLTLVSIIGQPSTGRRHRVQVPVREGARGRGGRKRRRKRRTEDEDLEEHGGAGRGEPAERRSMSRQDPSRTKRHMKEQRAARKDGE

SEQ ID NO: 1023685 - protein, 45 aa, Homo sapiens
MSGKNIYHSIAKDEHGAGAGGSRLVISQYFGRPRRVDGGIEWYGG

SEQ ID NO: 1023686 - protein, 74 aa, Homo sapiens
RTLRAEVRSRLPTLSAGVTSRWKLAEDPEGRDEVPPSHAVSRRHSGTVMLSEHVSKPTECRTPRVNPNVNMDFG

SEQ ID NO: 1023687 - protein, 80 aa, Homo sapiens
GQADLDKGAGNYLENRLCAVIGHSAYPMDPGYPILGINPRGTSYMYTLEMVYQNIHSHPIHQSQSLEITPMPMEPESGPV

SEQ ID NO: 1023688 - protein, 74 aa, Homo sapiens
NSYDHSAGQVNHRAEIYQYRSVVNVQGATQHRPTYELMENPDFEGKVDDLYPLQSDLSVLLSGPWSVYNKDVHV

SEQ ID NO: 1023689 - protein, 120 aa, Homo sapiens
SSQHFIVTPTAVQGANVHMIMANSSKLNLQARFLLQLRLKVQLPTNTCKERLNEKTNFPAQAPASLSLTISTSVLSRFLEVYHTQNFPLQGLCMCCPLSMGDSVPQFVSKLAASHIPKIS

SEQ ID NO: 1023690 - protein, 37 aa, Homo sapiens
  misc_feature (26)..(26): Xaa can be any naturally occurring amino acid
MTSYSYLQSSATSSLRRPGRRAPCVXGPGGLLFRAPQ

SEQ ID NO: 1023691 - protein, 141 aa, Homo sapiens
LRTPDGRYRDLIFWRRELDKYRLAGISTVHQLADADCGDASIMAYAYMQGWTAVYRPDKVRQRRNRAHGNTVDENTARVNGVRTDRARSDADIVRRADVEIDVDMEAYLERGCYLWGIWDGATYRPFVTWQQLNSDAEARN

SEQ ID NO: 1023692 - protein, 358 aa, Homo sapiens; identical to SEQ ID NO: 839491

SEQ ID NO: 1023693 - protein, 313 aa, Homo sapiens
AQLEARVLMMSTNNILSPANGKPIIVPSQDMVLGLYYLSMMKEGEPGEGMLLGDMAEVHQALNAGAVTLHTKIISRVPQTDENGKQYLKRYETTPGRMLLGETLPHSHKVPFETVNRLLTKKDVGDVIDEVYRHTGQKETVLFADAIMALGFRHAFRAGISFGKDDMIIAPDKDKLVDETRDQVKDFEQQYQDGLITQQEKYNKVIDAWSRCGDQVANSMMNEIKAVRHYEDGADEGPEKDINSIYMDGPLGCPRFAGADQAARRHARLMAKQAGEIIETPIISNFKEAWRPDISIDQGPEARGHRVRRGNRE

SEQ ID NO: 1023694 - protein, 105 aa, Homo sapiens
GQGSESPPTKQASPESTMGGALPEGVRALDPSEPGQGDPWKPGGHLGLMQVGMCMSGADRVGANRGQRSLLGLPRPPPRRITAKCPCHLSARGQVSARMRNAHVN

SEQ ID NO: 1023695 - protein, 174 aa, Homo sapiens
PRGEVVIVHLGAMPVQGSRLLDRVQVFGRKEDMRQLWRHCKRRRMVVIKVNGRTLADDWMQLHAYQYNAAGAMLPASRARSEYAGRRHPCPLLTWVVVTVAPDLCYPIISISKDPGGTITRNYVGVRLPRRSIRKTSSSSMDLDPAGRLSLVAAEVHRKFGGPGARARYQKSYR

SEQ ID NO: 1023696 - protein, 66 aa, Homo sapiens
VTSETSVAPYVLRLAMTSYSYCQSSATYVLRRLSGGSVRFGPGVAYRAPSIHGGSGGRRRIRVLRP

SEQ ID NO: 1023697 - protein, 53 aa, Homo sapiens
MQARVLSQRLAIHHMITQDFFDTAYSFRCVGFIKKNRWCPTDVGPSWRRPFFS

SEQ ID NO: 1023698 - protein, 43 aa, Homo sapiens
GRLLLLLLLEFKLLTMYGDMFIHLSPILLLSLNPDIITGFSSQ

SEQ ID NO: 1023699 - protein, 275 aa, Homo sapiens
EVKLSVKFNMQEMFSLNEDAGPDKTVAVGTSEMSSICCVSHNEQTMVQRMPLLSLRHVAVEGRLLSCRVHESEVWSIYRVYGVATDIQVTEVLLLTVNNKDVSVMMSEMEVNAHLDGTLKLYFRDDCPEPLFTDEFYPNFAEGIALSDPVAKESCMLNLLLSLPEANLLTFLFLLDHLKRVAEKEAVNKMSLHNLCHGLWPHCCSWPSEKESQAPLPNPSQPIHHDWQLVLGRSCPRVQVLLYFLQLEAIPGHGQQETEHPVLHRSLKGPRSISW

SEQ ID NO: 1023700 - protein, 172 aa, Homo sapiens
  misc_feature (97)..(97): Xaa can be any naturally occurring amino acid
  misc_feature (101)..(102): Xaa can be any naturally occurring amino acid
  misc_feature (109)..(109): Xaa can be any naturally occurring amino acid
MKKDIFGHGSRRGLMCPSSVASKSRSSFPQELMCIEEFWRIRRFEVEMKENVPHKGNICKHQLNSMPTVLGQKNCQGRNYALPAPSSLIAYYMKEEXTLKXXKPKQTPXLDKKTQLAIYHSILRGKSSFSQSLFPRNCEKVQSCWMKKPVHQGLLPVSCALYQPKLSVPTWP

SEQ ID NO: 1023701 - protein, 66 aa, Homo sapiens
MELPLRLALLFGAVSALHLRSETSTFENPFGVLSTPALSDEETPEQRWRDLRYAEEREIHNSVITL

SEQ ID NO: 1023702 - protein, 107 aa, Homo sapiens
MRLSGHSPASASQDAGITGVSHCTGLFSPTLSFLPSLNSSVYPLPTSCYCLGVHLPLKGLFLQTVHFQTFRSPQVSRTAEDPTLVFKISIRIVFHATDAAVDSSFVD

SEQ ID NO: 1023703 - protein, 163 aa, Homo sapiens
KKLAGARAGGGFEDASSGLGRASERQHGIVELWSCECGERSVKGVPWPSKVGPRSCSSELVSNGVFESAQSRHDDPGVLGAMPGALRGAVAQWFRIRATESIHAWEPGYEWVARTHIVARVELLCLELAEYRLTFDHHIPFLVHHGLVRYYSAKLIGTLRNCA

SEQ ID NO: 1023704 - protein, 32 aa, Homo sapiens
MVLGPGDEGCWDLSGTAWGVVGLEVPGGMWEV

SEQ ID NO: 1023705 - protein, 37 aa, Homo sapiens
KLLTMYGDMLLHLYQPIESWQLLLDKADRIIILSFYK

SEQ ID NO: 1023706 - protein, 135 aa, Homo sapiens
AQEPVVGALRRTHHLEEVLRLWEPQGPAVRGSLGHVYRGSGYRIGRSTGRCQGRSRGSGALPGAQERRPGSRGQAAQAVGWGLSPGWEGVPRPGFPAAPGMGPRRAPSEGWCQTEPQLLCIPHNSPAGALGGECE

SEQ ID NO: 1023707 - protein, 124 aa, Homo sapiens
SRGSPSMASAAARAFCAFQCGRWRAAGSVTLWCRAVLSLLRACCGLAPVRPDPVPPIPQLRKESPALSGSHSVLEPLTPHVPDLCPWSQVRPTPWNSNCPSHCTPASHCTPGSHCTPGSQLHSG

SEQ ID NO: 1023708 - protein, 42 aa, Homo sapiens
GDLEDPPGRLDLFILLRLNVNLKSDDVLSLLKTIHLSVHLSR

SEQ ID NO: 1023709 - protein, 33 aa, Homo sapiens
GRLLLLLLLEFKLLTMYGDMFQTSLNKSNENPK

SEQ ID NO: 1023710 - protein, 47 aa, Homo sapiens
GCMHVDIEHENNNALRSMSGVDRSGYGHHSPGKLASWGSGFIMCSAQ

SEQ ID NO: 1023711 - protein, 156 aa, Homo sapiens
  misc_feature (23)..(23): Xaa can be any naturally occurring amino acid
LLVFVECVLTRLRSFVCSSLSHXSRMFILQPHRYIHSKVVKTFSEGEWLSFDVTDAVHEWLHHKDRNLGFKISLHCPCCTIVPSNNYIIPNKSEELEARFAGIDGTSTYTRGDQKTIKSTMKKNSGKTPHLLLMVMPSYILRLQQTNRWNKRALGC

SEQ ID NO: 1023712 - protein, 136 aa, Homo sapiens
GENPILCSVKEGATQLTHSAPTKEPKGETRRETGEEMRDPGSRPSGWDYKQALCDILPGPAPSSRSQTLSLAGTRCPTVMPLHGVPPQPAHCMILRLSSPTSPLGKWTLALRACPALCTCPPGVSFLPQHFSHGIT

SEQ ID NO: 1023713 - protein, 121 aa, Homo sapiens
MPLKRDSKMSAWSRKMQMWGTTEKVICGSLAGNNHLVQVIVQVIVQVIVQVIVQVIVQVIVQVIVQVMVQVMVQVIVQVIVQVIVQVIVQVIVQVIVQVIVQVIVQVIVQVIVRDPQSHRS

SEQ ID NO: 1023714 - protein, 234 aa, Homo sapiens
AEDAQRILTISLPEKRQSTLKAEATAPPAAFLSCYAEFPSMYQITACAKGLPGLPASVLEDVQNDMKHRLGFLLQKSDSCEHNSSHNKKDKAGYYCQRVSQRAKSRNGLNSLAKPRLRHAMCGWPAFQSLLLQGLTYQVQAAITRLLASAVQEYKTIKSPSKLSPKAKQRSIHELHLSPGNHKKVTPGFLHQGNVTSRHMLRAYNNLALMRPMKTIFNLMDKGSYRRFLKSRFY

SEQ ID NO: 1023715 - protein, 33 aa, Homo sapiens
GRLLLLLLLEFKLLTMYGDMEGVSLNANYFFKK

SEQ ID NO: 1023716 - protein, 46 aa, Homo sapiens
HLDLIMPAEDRQQYASHDFVNYYAEHPNSSFAAQVWTNNAWIAAQM

SEQ ID NO: 1023717 - protein, 85 aa, Homo sapiens
VAQCMVPGTAGHVLLTCRSKPELKQQLTGHSKRVAGSVTELIQAAEAMTGNRYGVDPEDPTSQLLENESPGRAAVRRLRAACRKS

SEQ ID NO: 1023718 - protein, 405 aa, Homo sapiens
GNPCHRAPGQRLHPGREGPPAPPPVKPPPSPVNIRTGPSGQSLAPPPPPYRQPPGVPNGPSSPTNESAPELPQRHNSLHRKTPGPVRGLAPPPPTSASPSLLSNRPPPPARDPPSRGAAPPAPPAVIRNGARDAPPTGSSNERRAETATHHAAARSATQDPPHPAPRQPPQTKAPGRRDPWTPQWTTQTTRPPDTAHKTAPHRQADNDNTTDHDPPPNRATDDRHQPQPHGHPPPRHAAETTHKKPQHDQTTQKQPRAAHQRTNDKQTTAEWNTNKERDSTDQKHTDETNQDTNQAPPRQTPRPPTHQPNSNHNDATHKQQPEDQKNTDNNQKHRHNTESHQPKAQNTNDTPKQPPPTQRTHGSHFTYGRHATPNADTNTHKQTERHDHKTTKTTATQKTHTPQA

SEQ ID NO: 1023719 - protein, 161 aa, Homo sapiens
  misc_feature (34)..(34): Xaa can be any naturally occurring amino acid
RGRPSQCRVRRLLHRYRGVTLMQWPLWLPCSSSXLLLLGLDSQFVGVEGFITGLLDLLPDSYYFRFQREISVVLCCALCFVIDLSMVTDGGMYVFQLFDYYSCQRHPPCSGRPFEECVVVAWVYGADRFMDDIACMIGYRPCPWMKWCWSFFTPLVCMGIF

SEQ ID NO: 1023720 - protein, 115 aa, Homo sapiens
ILFELLSWGVLAGPSADGPALPTVMSHPLSTSSHALPSNPCAAPPLKMSFQFSGASGPLGIELDPCCCPCIADTLFPPCLHGACTFTITATIVPVLPWVWRWHVQSQCVLLLTMS

SEQ ID NO: 1023721 - protein, 241 aa, Homo sapiens
RGNGGLRLRPGPRPIPLAPRCGSPGGPRCAAPSIPARRPAPMGGGPSAGAGLPSARGCDGDRSSYAPEGPGRITENIGLKAHRRRYRRRDEFQCLQKKQYLEPGREPKGTLFLETRTTPAAGAPDLQRGPGQGQKDIRRGVAEQGERRGGRLTFEDEIPPGKFRRRLTPRLGTGPFRRPPWQGPPGGPATALAPAFARFRWGSFRAVVYPRATPGEPRRGMVGPLWGCLGGPVARGALPHR

SEQ ID NO: 1023722 - protein, 285 aa, Homo sapiens
GGHATGGFLWRGNRYSRNTRASASVTTGGPDPTLPDLRAWVPCDAEAPRSRALRFWASQTPQMSKTQADPGVRRPPEIQASGIMAPPETLDSHCQIHPSIMVGTLYSLLERKVPRKRAHSRVKLSVFPALPRAKESRALRTPSFRTLWHTGQSREASDAQPGEFKHSSVPRAKELQCCELTTLRSPPKFQSPGAVTQLSPRNVGSWEGAQSAPSQLPGAKKPGAFPSLVADPPRDSNGARSGGGHRNGGLGAGSIEDQGAAAGGTGVPGQVRRASSQLAVLLNSG

SEQ ID NO: 1023723 - protein, 127 aa, Homo sapiens
MAASMITSPIVAPTSVPSLSRRGSSFAVVCSGGKKIKVDKPLGLGGGLTVDIDANGRKVGKKGVYQFVDKYGANVDGYSPIYTPEEWSESGDRYAGGTTGLLIWAVTLAGLLGGGVLLVYNTSALAG

SEQ ID NO: 1023724 - protein, 127 aa, Homo sapiens; identical to SEQ ID NO: 1023723

SEQ ID NO: 1023725 - protein, 74 aa, Homo sapiens
AEEDSLNVADLYSLRAQLDIPIPDPPPKDDEMGTDKQEKKEVPKCGFLPGARRSDVNGGVTDEINGLETWLRLL

SEQ ID NO: 1023726 - protein, 109 aa, Homo sapiens
  misc_feature (3)..(3): Xaa can be any naturally occurring amino acid
  misc_feature (79)..(79): Xaa can be any naturally occurring amino acid
  misc_feature (83)..(83): Xaa can be any naturally occurring amino acid
STXHRSIPASLTQSRTSNNTPSPGAYMITDNWYLLRSLMYPITKHRLINRSIYTLCCAALIERSLYIAPGSVVGPAPYXPLVXRSLRDRTNRIRNLQAKRLKPVVLSPN

SEQ ID NO: 1023727 - protein, 170 aa, Homo sapiens
MLLCKKLFVGGIKRTILRNITLEITLRNYGKIDTIEIITDRQSGNETEALALLLLMTMILWTKIVLQKYHTINGHNCTKLHEQRFVYTTRTMQEVHEFYQKWNDARPDLDYCAHHGWWRYPKRALMTNYGRTQNFMRNLATYHCILAYNSYTSQTLLNLTAPNRTDVKHP

SEQ ID NO: 1023728 - protein, 71 aa, Homo sapiens
LEIHGVIPPDDQDLFALLWGRLEQLKSKKDARIWRSRGKRDAGIREAKAKQEKVSAQYLSEIEMGKATGED

SEQ ID NO: 1023729 - protein, 36 aa, Homo sapiens
GARVKTGTQPEIAGVITQGTKTPDIHGRFLLTSVLS

SEQ ID NO: 1023730 - protein, 157 aa, Homo sapiens
MASKLLRAVILVAARLGQGAPCARGSPRNFGLHASLQLATSCWENIKASTDSSVSMATAVILEQQVFYGFHDHVITRLMHVPSSENRLGQAQAPLYGISPSVYPSEDRGRTTPMEPQRFLTAAVVIPSLEYQRFDIIAQNNEQELVKASASTEHGHP

SEQ ID NO: 1023731 - protein, 334 aa, Homo sapiens
VTPVFYGVFISQWHRGTTEGSAVVCLHNEGCARGVFSGLYKEVNRETQQWYNRDPPGAHTPGLERASSTVPGNRKINSSLQIPERVLNFLKEQFLMDGQSPEPAVLLLQPHGSATSDVGMYNRLYPVPGPNPYECPSSWALVTADLMKASELWAPGVHHQLRSLQIFSIGTARAESDPVTPTGGLLYADSHSGVVQVPMANCSLYRSCGDCLLARDPTVLGAVQLQARQLYQPQLAPGRGSGHRGSQRQGTCSASSVVSRFLYNREKHVSTSVQPTSEPFGCRSLQLGPIWYAGPRHARSAVSLAGGAPLGFLRAYGRRCLPGRGPRGPSLRRG

SEQ ID NO: 1023732 - protein, 34 aa, Homo sapiens
IELGTESRQCATLNNTALVIFIKVSPSVTRPLKS

SEQ ID NO: 1023733 - protein, 33 aa, Homo sapiens
GRLLLLLLLEFKLLTMYGDMEKWLMENKHQFPK

SEQ ID NO: 1023734 - protein, 37 aa, Homo sapiens
MALITPETTSSPARCVDLGLTLLADVQLSGSRRATAL

SEQ ID NO: 1023735 - protein, 73 aa, Homo sapiens
SGDEPVERRYTAPSYIILYTFYVQKEKLTIINSEVYSYITHYTGGVSLIRNAWDQRCFGFFLHFGIFALYLLV

SEQ ID NO: 1023736 - protein, 73 aa, Homo sapiens; identical to SEQ ID NO: 1023735

SEQ ID NO: 1023737 - protein, 63 aa, Homo sapiens
MALICGLIVVWFHLSPLHAKEEDFLASHVSPEVSDTAWASAIAEAIFLNIKACGNHFGEIMKV

SEQ ID NO: 1023738 - protein, 140 aa, Homo sapiens
MGDPSKQDILTIFKRLRSVPTNKVCFDCGAKNPSWASITYGVFLCIDCSGSHRSLGVHLSFSSPQLPFNQRQSFATFPNWAQWFQLRCMQVGGNASASSFFHQHGCSTNDTNAKYNSRAAQLYREKIKSLDLSSNTEAWH

SEQ ID NO: 1023739 - protein, 47 aa, Homo sapiens
TIHQFISLSSQAAPATSEMAASALHQTTSFLGTAPRRDDLVRSVGDF

SEQ ID NO: 1023740 - protein, 163 aa, Homo sapiens
RVQGGTEKPGRGLGPGPETDGNSGSVTHAAPTPPEQAPPCAQTPADSFDSGDAPAGPMQAAFGHRAPTTGESDTEQHSEAWDPEEGGGPGGLGSVGRGGRREEEEEEEEAPCDADWDEEERWWRVTGHKPTRIDLLIPGPYDSTHVPSRAASDHGTLEGPGST

SEQ ID NO: 1023741 - protein, 44 aa, Homo sapiens
VRLLLASQSAGCLTPEFVHAHRALGSCVRALLGCVVAPLESHCC

SEQ ID NO: 1023742 - protein, 103 aa, Homo sapiens
MSELEKATGGPHRRSPYLEEETAKLKNRIRAHHMSFPCLRNQEQRCGQVMKPDMMERECDSGIMAVAWFYCCTSLELSEKAQTPVQNGMQKQTAKGLQALARS

SEQ ID NO: 1023743 - protein, 132 aa, Homo sapiens
MSELEKATGGPHRRSPPTILARDWETHAQAEEIRHCMEHRSTMSVSHFLEDNSKSQEAVWTKVIGMHRGQGWRRQNVTFQEFNVPLLPLVYYLAAYRVLSEHDVRLAKQSNLILVNRRQVMRESRQLRACKP

SEQ ID NO: 1023744 - protein, 188 aa, Homo sapiens
MPSPGSRLTKKSVLVSVSEVKAVAEMQFGELLGCCEEGPGHSVMLFLEEKEQAALSQANGIKAHLEYRSAEMEKSTQELEEDGGHQRALSSSLEEYCKFKNTEDTHPSLSVYSRARRINVSGIRNVITEIQRYTLIQLLENYKKKLQEFAKEEEYDIRTQVSGVVHAQNMDFHELSPSTREQFLQVCV

SEQ ID NO: 1023745 - protein, 56 aa, Homo sapiens
AEVYTIGLGRGTWSLSPQREDLGLVGDAEETTDQVPGPSAWAPKIFRTVIYGRCLA

SEQ ID NO: 1023746 - protein, 225 aa, Homo sapiens
MKATWCAPLVLDPARLWPWGCSMLLRSVALEMALESYEPVMSVGPQICLVALNLTRLSIGLVNQVPKGTAGAFMFPYFIMLIFCGIPLFFMELSFGQVCKPGVPGGLEDQSPCSKELGYGMMVVSTYIGIYYNVVICIAFYYFFSSMTHVLPWAYCNNPWNTHDCAGVLDASNLTNGSRSAVLPSNLSQLLNHSLQRTSPSEEYWRLYVLKLSDDIGNFGEVRLP

SEQ ID NO: 1023747 - protein, 261 aa, Homo sapiens
MDAVVPGLKLVAGVAAVMLLLWVHLITTFTCASLCVLDVCLRVLVLLLDACRVAQCGQLLHCALPCRSGCHESLLLLGPDDGVLPLPCRMPVSFPAEPRVGCPMTVLAVLTVLPVLNGVCVLEKRSGGLLAAVEAGMLLLSSAELRGLQLFEGQGGTGAGQAQRRLRLRPGIKCRVSALEEHLGCHIYFTLVTEGGPGDRTSRLPPGKDPGLETAKITLEPGQVQRTMKAIQTVRARTEPRDRDLVVLEHRAHIYPSLYQQ

SEQ ID NO: 1023748 - protein, 156 aa, Homo sapiens
DINVTDQAIAGLNGMQLGDKKLLVQRASVEPRMLTVSPEHINETPVYPASAGLDELPGADGRHPTEVLCLMNMVLPEELLDDEEYEEIVEDVRDECGSPGLSRPSEIPRTCVTAVDVPGCGKILVDVHLLCNDVQKAMQGLIGPKVRKRVVVTEVL

SEQ ID NO: 1023749 - protein, 319 aa, Homo sapiens
SGGMTREARWSQGQKWRLLTPGNSPEGGAPPNPPGSKDTSRPAIKPRTKHTPESGTRLYAQGQIPKRDTRYRGERGQRPKNTSVQAKHKRTHGDGAPDLEETLRSVPTHHALWRHHNTGDGRDNTQQQEPNNEITRRQDTEQPTNTQNEKTSSDAYICEPRTRPNPHRTTQRTPTTDTTHHGQNRDDTHHRTQAKKTEPTRTNQDHQTARGTNTEDEENQHKEQDKEEKRMKPKQEERRRRKRPQKKARRKQHTKKNSDTGRQKDKLHKKPVKANHNRQKAPRTKRREQRQQKKKTEHQKKTKKKKERKRKTQDTNATK

SEQ ID NO: 1023750 - protein, 47 aa, Homo sapiens
EEKAAVTEAVRALLANQDSGEVQQDPKYQGLRARGREIRKELVHLYP

SEQ ID NO: 1023751 - protein, 124 aa, Homo sapiens
LLSSLTLPGALGSPSFSDKMSYQKKQPTPQPPVDCVKTSGGGGGGGGGGGGGCWLLRRRRLMAAGSSWFLAAGYSWLAGGILWRRLLCGGSSGWRWRLVAQPIGSASGNAVAHLMREACQTIRP

SEQ ID NO: 1023752 - protein, 35 aa, Homo sapiens
HGFAGAVQLGLIGTRIRARIRASNSSLEFEIQASN

SEQ ID NO: 1023753 - protein, 134 aa, Homo sapiens
WTRMSEEQMPLELSMSSVSEGLPRDTKMPRLILAGSRAQLEMPTKRILMCFGTAGSSSLHPSSSSGGRVFRGILGESSASPTSSNTTTETYCCRSFLLLKAGALPEGADDALWGGVRAALEGHQVDLLQAAEEI

SEQ ID NO: 1023754 - protein, 180 aa, Homo sapiens
MRRHCSWPRLPPASHSTDQHPNPTTNRACRPGTARKLTMRSDAMHSRPDLTPSAPGGDLAHLLPATRPSPHTRPPPPSLRTTPHQPRPPYPAHPAGPATAPGRHTNHPASAPQPASGHPWPCPPPATPSGPVRRPPPPGAPACQARPPPRNPPPAPRRPNPAPRSTPPRRPPARTPIWGG

SEQ ID NO: 1023755 - protein, 141 aa, Homo sapiens
AEGPCAACDFAPKYLLPRCPGQQSQQQCQPPPKCTPKCPPKCPPPNALQSVPLMCPPDLFLLRVSAPEDCVMAPALGGELCASQLWGLLQLWGRWLLPEPPQAPQVPPSQNPETLTAADQPSEGLQTAVEGAADSTLEAAC

SEQ ID NO: 1023756 - protein, 124 aa, Homo sapiens
PLTESKNFPKLTQNYAPELANSLLASDASMKYSPFFLHTETLDFSENTKPLPPSHKVAVYSTLLPCTSGLRSGVLSSLILITIPRLLGHHFPHALALITTFLLCLEFGPQVWFLLITSKFKSKS

SEQ ID NO: 1023757 - protein, 166 aa, Homo sapiens
REYKAHQLLIDALVDGQVVALLVQNLGAAWHESVKGGGKMASTTLWLKWKTWLSAGLRCVQRVPSRVFYSGLLEEAEGNMMPLVMPTNCIAVKLLAILLQDNDETSGNGLGRLDGIDVASSCSQLIRCITRDEQFPANGWRSEEMMDGIWSRCPSCVRALMLCSNS

SEQ ID NO: 1023758 - protein, 146 aa, Homo sapiens
SRIGEDTQVGVSRTVVYTAEPLQLCFAGPHPRCWVQDVTRWHGKLPGERWNWVFEGGPHGGSSSPSTATVGPCQEQVLRSLCGSQDKRSTRSSLEAAADDTVGPAQPRPQQLTPLRSEDVAEDVAFPSSSQENLVLLLRGPHFEDH

SEQ ID NO: 1023759 - protein, 102 aa, Homo sapiens
  misc_feature (30)..(30): Xaa can be any naturally occurring amino acid
  misc_feature (38)..(38): Xaa can be any naturally occurring amino acid
  misc_feature (52)..(52): Xaa can be any naturally occurring amino acid
  misc_feature (61)..(61): Xaa can be any naturally occurring amino acid
  misc_feature (65)..(65): Xaa can be any naturally occurring amino acid
  misc_feature (68)..(68): Xaa can be any naturally occurring amino acid
EGDPIKEGSSSEKIGGLALRKNRRSVGKLXQPLAIRFXYVGLSRAHIRAFPXSPSVHTHVXSHVXSRXRIAQRALLSLSLLIWGSGIVSSRFSIKGIIFSRP

SEQ ID NO: 1023760 - protein, 64 aa, Homo sapiens
CVCISTSYPERANNPSGAPAWFKCMVQVHGSSAWFKCMVPSAWFQVHGSKCMVPRVGHGSSQSV

SEQ ID NO: 1023761 - protein, 93 aa, Homo sapiens
IAHSQPANVISESAGEGCCHHRGRKAAISRSVSSAAIGRSFNFGRGERQCTFLLDIDRHQADAAFLHQHPRPFRRQTGFQQGVGGAQRWVAGE

SEQ ID NO: 1023762 - protein, 77 aa, Homo sapiens
ALRGYPYAYPPMPAMVATPWLRGLVPRFRYPARMAWSAVRIGLIWDNWVTVGVKSKSELPSDGPSPQPGYRTRVSKK

SEQ ID NO: 1023763 - protein, 123 aa, Homo sapiens
ALRGYPYAYPPMPAMVPHHGFEDWSPDSATPPPIGMGGIASPQIAPLPSAGIHWRLPCEGSIQSDPVMTHSLQNQSLQKMTVRGLSETRLCHLAPPSSCRASVISDCQENRSHLHGVARDSAG

SEQ ID NO: 1023764 - protein, 285 aa, Homo sapiens
ERDWVRNSQGCERPGRGDRTLQDETLGVASCPRSGGPSRASAGETELGATAVAFSSFDPRLFILGTEGGFPLKSFPWQHGEAALTRMPSCRGPCGPQHSLPSPPTAVPLYSVSCSPFHRNLFLSAGTDGPCPPCTTMLQAPPLTYAADSPLKYLFAVRWSTSAALGFCSCLMGKVTCSCLISRKAPRKPTVLIKQTQDESPVYCLEFNSQQTQLLAAGDAQGTVKVWQLSTEFTEQGPREAEDLGLPGSRGGGLRGPWQAGEAFAVPSLVLLTQCTARKAKVFTK

SEQ ID NO: 1023765 - protein, 427 aa, Homo sapiens
GSSCWVLLFVVSLCYSSSVVSCPPHRSSFRVLHRACAFSTLCFMSLGALRVYFLTCAVAWESLHGCPPLWGGLWFLWSSWRAPCSCVDKPGGKAWSCNPWHMSPLVIYPGPTMRVKLTWLCGCLEPWGTSHLFFLGGLDELTTGRKAATLAGNRASQECSVTEGFALVIQQLPTEHQAQEASPPGRPELGATAVAFSSFDPRLFILGTEGGFPLKSFPWQHGEAALTRMPSCRGPCGPQHSLPSPPTAVPLYSVSCSPFHRNLFLSAGTDGPCPPCTTMLQAPPLTYAADSPLKYLFAVRWSTSAALGFCSCLMGKVTCSCLISRKAPRKPTVLIKQTQDESPVYCLEFNSQQTQLLAAGDAQGTVKVWQLSTEFTEQGPREAEDLGLPGSRGGGLRGPWQAGEAFAVPSLVLLTQCTARKAKVFTK

SEQ ID NO: 1023766 - protein, 37 aa, Homo sapiens
WYRVGAMVSYLVLGAGDIGGGVEIAAILFLDDDAHRI

SEQ ID NO: 1023767 - protein, 284 aa, Homo sapiens
YTTTAPLSESTDAGHARVFLRAMATTAMALSPSSFAGKAVKDLPSSALFGEARVTMRKTAAKAKPVSSGSPWYGSDRVLYLGPLSGDPPSYLTGEFPGDYGWDTAGLSADPETFAKNRELEVIHCRWAMLGALGCVFPELLARNGVKFGEAVWFKAGSQIFSEGGLDYLGNPSLVHAQSILAIWACQVVLMGAVEGYRVAGGPLGEIVDPLYPGGSFDPLGLADDPEASLELKVKEIKNGRLAMFSMFGFFVQAIVTGKGPLENLADTLRPVNNNAWAFAPLRA

SEQ ID NO: 1023768 - protein, 79 aa, Homo sapiens
ETYLWQLSPVGITMTEDMIGAMMIGTTIADHTEEEVEEEEDGELPKTGIRFIEGGHLLLTIVVEDTDHVPDLESYSPRR

SEQ ID NO: 1023769 - protein, 111 aa, Homo sapiens
MGRTCPWRKRPKNVPPPGSSPNSLYSSTERPPCVGKTRGGTHVYGLNWGPPKIAGTGGNYNLPLGARIPCLISCTPQIFDEREPHNTASFDPLSRRFEIPRKIRAVRCTHY

SEQ ID NO: 1023770 - protein, 103 aa, Homo sapiens
RPPTTTKFAAASTFHADSLFSLVMFHADSLLSLVLFHADCLFSLVLFHADSLFSLVLFHADSLFSLVLFHADSLCLAWFCSMLILCLARFCSMLTVCLAWFCC

SEQ ID NO: 1023771 - protein, 147 aa, Homo sapiens
MVLARSAGGHTGTAKCMGDPTEAAGVGAGEKETLADGFCPRAQVSRGSEVPDKPGLKNPGKTGMRAPPGLVREPRLLPGNPAMRSREPLPGTWTGLGSRDAQESFLVILDSLLCVESLAGPGNQGILGRSAEGRHAFHTSLRSPEES

SEQ ID NO: 1023772 - protein, 90 aa, Homo sapiens
PARQIPPTSALGDSALRPGDDNSLGSLLPAGLYLSGPGTHPLHTWDSKVRNILQARTPGTIQVVGTPASTKGASKVPSASPLPSEALPLP

SEQ ID NO: 1023773 - protein, 169 aa, Homo sapiens
RDGTVTGLLTKVQLRSNQRVGRGQSWGGLSGGLWDNRLALYGTFGTRKLEEAYACFKMRMQLWDDSFADESLMLEEQREWVMSQRRFRFENETLVDDTECKYGKGRLCVCHKGGVSLMGVKVTEVVVSVDGNSYSCVPSLLFTMSYWLGSRDVVSPAMFFVHKDVFCSS

SEQ ID NO: 1023774 - protein, 134 aa, Homo sapiens
MSASLLAAAGDQDGHHHQGEPRSAEMNTGGLLDPSPAALGPTPLPATSPALVFYEDDYRYYYDDDSCLQEDQEGDHDAYQLLEDEDEDVAATGSLADRLRDLVRQRLAEVNASSAVVAGLGLVGSAVGAYFLWP

SEQ ID NO: 1023775 - protein, 207 aa, Homo sapiens
MASIYGTLFCLPRSVSNSIATDTETSTEMVADRWSRAYRGLQDLEPRESRAWDGSDGEVPAVSSLVGVPRPSCKSQPAPCFQSFRGRFDDGAEAAFRSLSTPELLIHKSQLWGRDGARLLVGEKRLNHSKDRKSAEITLGTCTESEKEEDSQQGAPGKTGPNYPKGGTDSWGMKPVGFRRTHGRIYLRSRGLRRPGKRRRPGRGYQA

SEQ ID NO: 1023776 - protein, 44 aa, Homo sapiens
PSVAAAAAHQQLALFHPAAMAATTTMALSSPAIKLAGASYALGG

SEQ ID NO: 1023777 - protein, 229 aa, Homo sapiens
MSPKRIAKRRSPPADAIPKSKKGLKVSHRSHSSRTRHGADTRPGDVGQLGLGENVMERKKPALVSISGGRGAGLEAGGMHTGVYSKSGQVYSFGCDDEGAPGREHIQGGLGDGPWESGAAREGGTRCQRETSPSRPHAMMAVSVSGGSSGDITGRLDWWRRKKHGRGGTDVPGKGATNHLARRTEDPNPARGRPTRGENPGAQPQRPTGTRTPQNTAAPPAGAPNAPPK

SEQ ID NO: 1023778 - protein, 33 aa, Homo sapiens
DIPESFNAILLFDYLDPYCIVPENPTCEARDSR

SEQ ID NO: 1023779 - protein, 63 aa, Homo sapiens
FHPAPPVHTAAARVSSRPRGEERRKRYSTTGNHGGGDRQQRREAEPVGGALRAGELVPPRPRA

SEQ ID NO: 1023780 - protein, 231 aa, Homo sapiens
AEHSSELEPAPAAWSSKGVRDQGQRAGERSPRPRALVTCRTLRCGCVCHVAPEAMTAGGLSGWQTAGVLPWPPEHRDTLNTRSQPCVLLKLYSDEQMGGGQQRTEVLRILFPGPVFSRGDWGHCSYLFGEEKQTLVLVPACSDAEDGCRAEPPEMISFLRALLECTFGPRWCHKPWFTKPLLLKNGKTAGKSTITIVAEEVSGSNDYVQLTFRAYKLDNKDLSSKSDPFME

SEQ ID NO: 1023781 - protein, 50 aa, Homo sapiens
SYSRGSCECNGIHRRDPLLISTGVLTCSVSELCWFNPSFMATGCPPGSGE

SEQ ID NO: 1023782 - protein, 214 aa, Homo sapiens
EPERASSQDARNERWLATHPRPGHVLRSCSGPVTRAPDPGPIPASWRRGPPLAGLAEQLRVRPPQTAASIPQPRTRYHRLVRMDVSMTGPVHGQGRASRQPAEKTQAGWSTRGGGEDQGGRPLRRKQRPDEECGTKVWLSSWLKKPTGTGLTFWEAAVILMGAGNIDSSTQGLVKREEFPTDLKPRGRGPGSCCRTLIEHHDGATKGESNEDHP

SEQ ID NO: 1023783 - protein, 214 aa, Homo sapiens
MEGEAQSEGTPARGARAPDPAAAAAARSPRRALWGPGPGGTLPREKAVETWAPTPVHPPQKPRSPVHSRGSTSGKPYHCAPRGQHLAPGQESRGMAVTSASMDVVPGVMGVKRSSGAWSFLGHIPGGPVIECRNSKMSLEGVALRALLESTLSTSPKAKMRLSKEEDRTIVRHARWRRVGTEAFEKRGERSKLSGLPAPAQRDKFRQRDMGRPR

SEQ ID NO: 1023784 - protein, 31 aa, Homo sapiens
MIRHIVCVEALWLLAEGSACLCQPIKVQFPR

SEQ ID NO: 1023785 - protein, 175 aa, Homo sapiens
MAPTVMASSATSVSSFPGLKSTAGLPVSRRSNGASLGSVSNGGRIRCMQVWPIEGIKKFETLSYLPPLSTEALLKQVDYLIRSKWVPCLEFSKVGFIFREHNASPGYYDGRYWTMWKLPMFGCTDATQVINEVEEVKKEYPDAYVRIIGFDNMRQVQCVSFIAFKPPGCEESGKA

SEQ ID NO: 1023786 - protein, 276 aa, Homo sapiens
AGARPRRPRRSPHPPGAVSPGCGSSSALRSSLPSRIAGASRGGDRSRRPRAGGVRRRAPGCGSSCRWQGGASPRGVAQPRERWGGGRGRRPQGEIAGSMAGLRARGARRPGLLALSALGFCLMLQVSAKRPPKTPPCPPSCSCTRDTAFCVDSKAVPRNLPSEVISLTALADPTVLTRVSPQTLVNAAFSEIQDGAFSHLPLLQFLLLNSNKFTLIGDNAFTGLSHLQYLFIENNDIWALSKFTFRGLKSLTHLSLANNNLQTLPRDIFRTLDIPE

SEQ ID NO: 1023787 - protein, 261 aa, Homo sapiens
AGARPRRPRRSPHPPGAVSPGCGSSSALRSSLPSRIAGASRGGDRSRRPRAGGVRRRAPGCGSSCRWQGGASPRGVAQPRERWGGGRGRRPQGEIAGSMAGLRARGARRPGLLALSALGFCLMLQVSAKRPPKTPPCPPSCSCTRDTAFCVDSKAVPRNLPSEVISLTLVNAAFSEIQDGAFSHLPLLQFLLLNSNKFTLIGDNAFTGLSHLQYLFIENNDIWALSKFTFRGLKSLTHLSLANNNLQTLPRDIFRTLDIPE

SEQ ID NO: 1023788 - protein, 312 aa, Homo sapiens
QEPIEDDTAVVHQEAMRNTYCHSSRVLCLVIAPTMMGHTIPDSVPTPLEMPIKMLAERGAMSKWFTLNPEMAKPLEPTARTRKEDGPRPWSASYPTTSSSVASIPKPPQFMSFRTLVVDIYVTLRKKVSDLASNGYDDGHDKVRQRRHQPHLADLKAEHFFKVGGLRDEEQVEGPAAAKVRNDDGIDGHGRKEAPPGVFNFVTGFMSLGLSRMASSMYLRSSSEMLGCSAGESYGDKRTRKGTKRSRSCHRHRRQNSILNTAQGPQPRAWQPPPQHRNRKRLSLPADSVLREGPICSRCHGQAGYVTPSTNP

SEQ ID NO: 1023789 - protein, 95 aa, Homo sapiens
MASQGVASMFALALLLGAFASIPQSVESIGVCYGMSANNLPAASTVVSMFKSNGINSMRLYAPDQAALQAVGGTGVNVVVGAPNDVLSNLAASPA

SEQ ID NO: 1023790 - protein, 288 aa, Homo sapiens
QLPLKADPYKQADHQGWSQATRLGAMQKWRSAPGKAGECRKEGGLREAGGSLPSPLWSWAGAVAAPKQPDVSFTTAAERQFPPSVCPSSVVVLRSSLRERAEEVALLASHDSPKGRFHKPHWQMGLPGQRLNHDTPPIVPRGPRHRNGIYTLRLGVDGKLIAIGEKIKTQEHHPWEEIGEQTWHHKMEFHTGEELANRTGRHNHRLEATTYGNGGNFPSVKRKETRERKRERHTFDSDYTHGSGCRTSWAATRGGRPEAKVSDVGSTKKRMHRPRHQPARDMEKGRNP

SEQ ID NO: 1023791 - protein, 195 aa, Homo sapiens
MEICPGEGRFLPKRSHVRTSLGMCLQEKCGLPSSPWMPVGCLPHPGCLWAAFLTLDACGQPSSPWMPVGWLSSPLECLWAAFLTLDACGQPSSPWMPVGCLPHPGCLWAAFLTLDACGLPSSPWMPVGSLPHPGCLWAAFLTLDACDLVSMAGFLSSGTPRPPSNLMTRPVSEHTCVVPEPLTSPLWNPATHFPS

SEQ ID NO: 1023792 - protein, 108 aa, Homo sapiens
  misc_feature (14)..(15): Xaa can be any naturally occurring amino acid
  misc_feature (17)..(17): Xaa can be any naturally occurring amino acid
MKESLDDVMDSLVXXTXKKWLVGPCFILELTESQNAQDQGDREWTSSSQETQSIWSIKLIKPAPITSACCGQTDDTFCYVEINLLGNPEIGKQVASIKALNCSCFQLN

SEQ ID NO: 1023793 - protein, 33 aa, Homo sapiens
SGRLLLLLLEFKLLTMYGDMEIKHPILPWAPAK

SEQ ID NO: 1023794 - protein, 38 aa, Homo sapiens
YAGTKYLVYILQKRNAAVFHSVVPNFCLPTESFRPQIF

SEQ ID NO: 1023795 - protein, 41 aa, Homo sapiens
AAAYYYYYCSIQASNDVRGHAMVAFPFSMNEFAFNKQPDPK

SEQ ID NO: 1023796 - protein, 51 aa, Homo sapiens
SRLGLDLPWPQRYWDWISSLVRGDLGTSMVSAEPIGPQIASRLAVTGWLVG

SEQ ID NO: 1023797 - protein, 283 aa, Homo sapiens
  misc_feature (279)..(279): Xaa can be any naturally occurring amino acid
PGVLCRLLTTIGKELDFEKAKPRMDQYFNQMEKIVKERKTSSRIRFMLQDVIDLRLCNWVSRRADQGPKTIEQIHKEAKIEEQEEQRKVQQLHDQGARGDQASKEWMKVDGILYKGPRTVVYWIPSKFLKITKPTIDEKIQLVPKAQLGSWGKGSSGGAKASESDALRSSASSLNRFSPLQPPAPSGSPSDTPLEFESRRALTSRGSMGRERRAKSNSNWNSRPPLVPEGAAERPVEHQSHEEQREKVVGPGTVKGADGEGHIGPAEKGASNWSVGGSXLNLL

SEQ ID NO: 1023798 - protein, 104 aa, Homo sapiens
MAFPTRSSPDPSDFDRCCKLKDPSASIVVDPPEGEVESGELRWTPEEYLVQEDEQEELRRDSDRKIKSSRKSPVDSHGSYQTASVPELCFIPIMTEEESEPQLF

SEQ ID NO: 1023799 - protein, 191 aa, Homo sapiens
MPTLVVGTPPTCLGDTPQPCHKNSQRQGPFSHGAPGRAADWKAVAKPRLCAPAAEDDVAALRWPGPSQQPDPPWAAPHVVGSDDLKEPGPWGKACSLPMWSTGPEARDGDSSVSSGRLSCSSGGHDVCVSWKERPPQVVGPQQRPRKSDARLEQLRDKIRAQAWQQGELCVPGHLSPSKASRVHKGFTLTL

SEQ ID NO: 1023800 - protein, 172 aa, Homo sapiens
PASRPQRQPHVWASHGSWPLGPTVAGKGRLCAPAAEDDVAALRWPGPSQQPDPPWAAPHVVGSDDLKEPGPWGKACSLPMWSTGPEARDGDSSVSSGRLSCSSGGHDVCVSWKERPPQVVGPQQRPRKSDARLEQLRDKIRAQAWQQGELCVPGHLSPSKASRVHKGFTLTL

SEQ ID NO: 1023801 - protein, 32 aa, Homo sapiens
GRLLLLLLLEFKLLTMYGDMTKNQKCIQPYQK

SEQ ID NO: 1023802 - protein, 43 aa, Homo sapiens
MSQWLVGARYVCVQDSRYWVMDARSSGARRDSEMQAARMAASL

SEQ ID NO: 1023803 - protein, 69 aa, Homo sapiens
AGTKRLFHPRVGSTSFPAFSLQAPILLVSAGRKPFPLGTSLPSVTGGVRPERDSGVMSGSGLAAGQDLN

SEQ ID NO: 1023804 - protein, 68 aa, Homo sapiens
RKYLGHVVQMNYHGENSLRLAVDILSTGFQTFSPGNICMNSTRYPTLAHCDILHPPPILPDLTQPTDP

SEQ ID NO: 1023805 - protein, 179 aa, Homo sapiens
MAPLRPFFILALVAWVSLADQESCKGRCTQGFMASKKCQCDELCTYYQSCCADYMEQCKPQVTRGDVFTMPEDDYWSYDYVEEPKNNTNTGVQPENTSPPGDLNPRTDGTLKPTAFLDPEEQPSTPAPKVEQQEEILRAETLIKDPEFQKENCAVEAFDAFTDLRNGSSFGFRGRTGFS

SEQ ID NO: 1023806 - protein, 81 aa, Homo sapiens
GDSRAAVYEERHWDEERHWDEERHWDEERHWDEERHWDEERHWDEERHWDEERHFIVMLWKPSYILNFSRSKPPKSSIIAD

SEQ ID NO: 1023807 - protein, 69 aa, Homo sapiens
VTLEPLFMRNVTGMRNVTGMRNVTGMRNVTGMRNVTGMRNVTGMRNVTGMRNVTITELLTPNWTNLSPY

SEQ ID NO: 1023808 - protein, 62 aa, Homo sapiens
GDSRAAVYEERHWDEERHWDEERHWDEERHWDEERHWDEERHWDEERHWDEERHWQAASNTC

SEQ ID NO: 1023809 - protein, 68 aa, Homo sapiens
VTLEPLFMRNVTGMRNVTGMRNVTGMRNVTGMRNVTGMRNVTGMRNVTGMRNVTKLLISQPGFMVLSV

SEQ ID NO: 1023810 - protein, 94 aa, Homo sapiens
VTLEPLFMRNVTGMRNVTGMRNVTGMRNVTGMRNVTGMRNVTGMRNVTGMRNVTGMRGEARRLEKEEKYTEGVFDCVVRVEGDFIGMGVTFLIP

SEQ ID NO: 1023811 - protein, 304 aa, Homo sapiens
AGLRGTWLSLQSLVSPPASLLQQPELESDPERTLAMDSALSDPHNVQCLMAVLCPPTALLLAAFHALRCIALAYGSLLLMALLPIFFVRPCSSCTLRPLARMLQTLPEDKSPAGIAARFPIIASLQHVIGGSTSFIQNILPSELHSNFLLVHGIPPDAGEIPGPWFKRHTISPFMTLRVCQASVSKIDRYQSALHNRALGKTKEEIINYELRHRRHLVCLGPEAASLDVLDNLLRKHWIAKNLYWTGLPPLMDVAAPAASQNVSHWAAFLLVRDLSSYECPPGYFGTNCDGDQRASTSRNNKTE

SEQ ID NO: 1023812 - protein, 129 aa, Homo sapiens
KSEHGAEEPGRPMALCALTSALRSLSLASAAITARVPTLLPAAQIQSNVLLQLPPALVSPSYRPVHMSADRSAKFVSWKSRTKYTVKPVKMRKSGGRDHTGRIRVHGIGGGHKQNYRMIDFLRFRPEKE

SEQ ID NO: 1023813 - protein, 38 aa, Homo sapiens
VYVDERGNPEGSLSAVSGTQVAVNLGQKVSRVLYGLLM

SEQ ID NO: 1023814 - protein, 447 aa, Homo sapiens
MDEEYDVIVLGTGLTECILSGIMSVNGKKVLHMDRNPYYGGESSSITPLEELYKRFQILEGPPESMGRGRDWNVDLIPKFLMANGQLVKMLLYTEVTRYLDFKVVEGSFVYKGGKIYKVPSTETEALASNLMGMFEKRRFRKFLVFVANFDENDPKTFEGVDPQNTSMRDVYRKFDLGQDVIDFTGHALALYRTDDYLDQPCLETINRIKLYSESLARYGKSPYLYPLYGLGELPQGFARLSAIYGGTYMLNKPVDDIIMENGKVVGVKSEGEVARCKQLICDPSYIPDRVQKAGQVIRIICILSHPIKNTNDANSCQIIIPQNQVNRKSDIYVCMISYAHNVAAQGKYIAIASTTVETAEPEKEVEPALELLEPIDQKFVAISDLYEPIDDGSESQVFCSCSYDATTHFETTCNDIKDIYKRMAGSAFDFENMKRKQNDVFGEADQ

SEQ ID NO: 1023815 - protein, 74 aa, Homo sapiens
ETGSSSCGIPSWRHKVRCRVIFSPSGDNSVTENLAASSACFVGSFHCTAIFKPADYFQQLHRLNILNFKAANDR

SEQ ID NO: 1023816 - protein, 244 aa, Homo sapiens
MEEAASQSLEEDFEGQATHTGPKGVINDWRKFKLESEDGDSIPPSKKEILRQMSSPQSRDDSKERMSRKMSIQEYELIHQDKEDESCLRKYRRQCMQDMHQKLSFGPRYGFVYELETGEQFLETIEKEQKVTTIVVNIYEDGVRGCDALNSSLACLAVEYPMVKFCKIKASNTGAGDRFSTDVLPTLLVYKGGELISNFISVAEQFAEEFFAVDVESFLNEYGLLPEREIHDLEQTNMEDEDIE

SEQ ID NO: 1023817 - protein, 281 aa, Homo sapiens
MAATTMSLSSPAFAGKAVKNLPSSSLFGEARVTMRKTAAKAKQVASRSPWYGSDRVLYLGPLSGEPPSYLTGEFPGDYGWDTAGLSADPETFAKNRELEVIHCRWAMLGALGCVFPELLARNGVKFGEAVWFKAGSQIFSEGGLDYLGNPSLVHAQSILAIWACQVVLMGAVEGYRIAGGPLGEIVDPLYPGGSFDPLAFADDPEAFAELKVKEIKNGSLALFSMYGFFVQAIVTGKGPLENLADHVADPVNNKRMGHSAPTLSPASKVGARACGEYAVSV

SEQ ID NO: 1023818 - protein, 55 aa, Homo sapiens
FRVWCVMHYGDLSQLPQDELQPPERALHVPSNQAPASRPPTPPRPLPASGILAPL

SEQ ID NO: 1023819 - protein, 41 aa, Homo sapiens
TGDLEDPGTMGWLSQIRISGYMLIKNFKDLVPTVRLTVISA

SEQ ID NO: 1023820 - protein, 164 aa, Homo sapiens
MWPPTGELVQSGKSEISELRRTMQALEIELQSQLSMKASLEGNLAETENRYCVQLSQIQGADWQRAREQLAQASLRDGAAEPEKYKILLDVKTRLEQARLPATTGLLEGEDAHLTQVQERTGEHPSGAYHCGQRSTDGQVISSREQVHQTTLAEDSSYPWRASH

SEQ ID NO: 1023821 - protein, 307 aa, Homo sapiens
FGARRSSEEAGEAAYPVPLPAAGTMGAGASAEEKHSRELEKKLKEDAEKDARTVKLLLLGAGESGKSTIVKQMKIIHQDGYSLEECLEFIAIIYGNTLQSILAIVRAMTTLNIQYGDSARQDDARKLMHMADTIEEGTMPKEMSDIIQRLWKDSGIQACFDRASEYQLNDSAGYYLSDLERLVTPGYVPTEQDVLRSRVKTTGIIETQFSFKGPQLQNVRCGRAAFPRRKKWIHCFEGCERAFIFIAGLSAYENGCWGGRTQLNRMGKSWTCSTGWDHRNWPKVIWASSQEGGFPKKRGLIVRIWRF

SEQ ID NO: 1023822 - protein, 71 aa, Homo sapiens
QELRYIEALSAIVETGQKMLEAGESALDVVTEAVRLLEELSTVLTPELALSFTRDETHELDACVMDGNTLK

SEQ ID NO: 1023823 - protein, 80 aa, Homo sapiens
LYRSLFAVLFHHLQAPPGLEDRVATLLEARLKWLGIDGGFSDVPHRSWSLEPTPVPPREEYMVPALGGMQARGVGTMFFI

SEQ ID NO: 1023824 - protein, 163 aa, Homo sapiens
  misc_feature (1)..(1): Xaa can be any naturally occurring amino acid
  misc_feature (8)..(8): Xaa can be any naturally occurring amino acid
XFPSSITXIGTKLDSTGAPSRTVIPGGMKGYLGKYQDMGVTIYLTPDGKHAISGYMYNEKGENLSNTLIEKEIYAPAGREMWQRMEQSHWLLDGKKDAPVIVYVFADPFCPYCKQFWQQARPWVDSGKVQLRTLLVGVIKPESPATAAAILASKDPAKTLATI

SEQ ID NO: 1023825 - protein, 283 aa, Homo sapiens
MYLRRAVSKTLALPRRAPPGPAPLGKDASLRRMSSRKFPGTSGSNMIYYLVVGVTVSAGGYYTYKALTSKQVRRTEHVAEPKEQTKAELQPLPGEKEEHVAEAEQVCSEPGDTAVTEAESVDAEEVPEAAVVLPEESQASAPSEVPAEAAVVEASLSSSEPELKITEASLVETTESVPESTQEVESAAPDQDDVCNEGADTSQEGADTSQEGADTSQEGADTTKEEADNSKEAEGTTTEDPRSISEESAELEESPPLGSEPPAQPESQEEETQVTEETASPQG

SEQ ID NO: 1023826 - protein, 57 aa, Homo sapiens
DGQLKGQRGPRISRGLARAKTVALESLPLALPSTPSHQLQVPKNKCVLELNFCDLLV

SEQ ID NO: 1023827 - protein, 340 aa, Homo sapiens
AGSVPSYFLLPHGCCCRPGVSEGFRGFGAGCEMPGRGRCPDCGSTELVEDSHYSQSQLAWLRVLRLDKRSVVKHIGDLLQHRQSLVRSAFRDGTAEVEPDCGCVVTEGVLTTTFSDEGNLREVTYSRSTGENEQVSRSQQRGLRRVRDLCRVLQLPPTFEDTAVAYYQQAYRHSGIRAARLQKKEVSVGCCVLITCRQHNWPLTMGAICTLYVLHDFATVFSRHITLQDSEAPGTGCAISVLGRTGERPIAADFKLYQAFSFLCQPNTWKTKEKIGVSNKCRMVEAGTAENVARLTWDANPLARHYCQRNFLALRSRTQPDTLSRYIFAFPDFVTHAQCD

SEQ ID NO: 1023828 - protein, 299 aa, Homo sapiens
REVSPPTSCCLTVAVADQESLKASAALGPVVRCQAEAAARTAAPRSWWKTRTIRRASWDCGCVVTEGVLTTTFSDEGNLREVTYSRSTGENEQVSRSQQRGLRRVRDLCRVLQLPPTFEDTAVAYYQQAYRHSGIRAARLQKKEVSVGCCVLITCRQHNWPLTMGAICTLYVLHDFATVFSRHITLQDSEAPGTGCAISVLGRTGERPIAADFKLYQAFSFLCQPNTWKTKEKIGVSNKCRMVEAGTAENVARLTWDANPLARHYCQRNFLALRSRTQPDTLSRYIFAFPDFVTHAQCD

SEQ ID NO: 1023829 - protein, 136 aa, Homo sapiens; identical to SEQ ID NO: 778873

SEQ ID NO: 1023830 - protein, 85 aa, Homo sapiens
LQTVTVNSIDSAGIQLHPGENADSPADIRIKEEEPDPEEWQLSGDSTLNTNDLTHLRVQVVDEEGDQQHPGRKKTSEGSLHLSQL

SEQ ID NO: 1023831 - protein, 268 aa, Homo sapiens
MAACGKTNKSHVIFKKVSRDKSVTIYLGKRDYVDHVSQVEPVDGVVLVDPELVKGKKVYVTLTCAFRYGQEDIDVMGLTFRRDLYFSRVQVYPPVGAMSVLTQLQESLLKKLGDNTYPFLLTFPDYLPCSVMLQPAPQDVGKSCGVDFEVKAFGSDITDLRRTRSPKKKSGRFLIRKVSMPPEMGAHQCEAREASVWKPELFVPRKRNSREPPGWTGTTARGDTSRDNTGATGNNRPKQKKHRQGGKEGREDTQTRVRYHDRTKKESR

SEQ ID NO: 1023832 - protein, 112 aa, Homo sapiens
LCALGRRSREPLEWEKARQVLASISKSGAAGGSAKSSSNGPVASAQYVSQAEASALQQQQYYQWYQQYNYAYPYSYYYPMSMYQSYGSPSQYGMAGSYGSATPQKPSAVPRH

SEQ ID NO: 1023833 - protein, 42 aa, Homo sapiens
MIRIELVPPTSPTGHQPDVCLPEQQAEEEMNNLGRRPVGLVG

SEQ ID NO: 1023834 - protein, 226 aa, Homo sapiens
SGAEWLVVPVAAWFEVAVEYDSAEFISLGIPVLTSLRLSVRMSARGPAIGIDLGTTLFVRRGLSNMATVEIIAKRPWTIRTTAQLRGLHGTPERLIGDAGEEPGGHESPILDTHHSTAKRLSGRKFEDATVQSDMKHWPSRGVSEGGKPKVQVEYKGETKIFFPEEISSMVLTKMKEIAEAYLGGKVHSAVITVQAYFNELASAQANQRTPGTITGLNVLRIINEP

SEQ ID NO: 1023835 - protein, 290 aa, Homo sapiens
PAETAAGARNFLLELSTSGFPLHLFTVPTLGDAFSPPEENLSFFFLLFPFSQPGALHWGRGDFKSWPGGTPSLPPYTVIPYLLVRGCFYNPLYWLGPGSLSPPCPAPQARKDVVGENGCGRAWLIVALYRLISYSCGGVKRMPLETVVLPAKAWGDHVQREKGPHSPGGAGEGTRAFSLAAAKFRRSRGPPERWSSGAELKNAWRRQRTDIRTNGHLSAITNICRCGQPRRRLYQKAKARRAKAWGDITHPGVNQESAVGPRWKSRREQGTRMPPSMARHTHTRGQTGTT

SEQ ID NO: 1023836 - protein, 74 aa, Homo sapiens
NLHEGIPAGIAKIYSSAKIYSSAKIYSSAKIYSSAKIYSSAKIYSSAKIYSSAKIYSSPRFTHRQDLLIAKIHF

SEQ ID NO: 1023837 - protein, 206 aa, Homo sapiens
TSFHPGTHRLEAGPDMASPPWQPDLSSRQCSVCSTCTHNSMHNTVFHSHIHSAGHQPTMYRPLVSMHQEAGSQQQVGCSEQATQEDWSQCTLPASRTPLWQPVPRLCCTLCHELVEDTHFVQCPSVPSHKFCFPCSRQSIKQQGASGEVYCPSGDKCPLVGSKCPLGLYARWKFATSLLEHVNSDKKESRLVTFAGFSKEPMITLN

SEQ ID NO: 1023838 - protein, 122 aa, Homo sapiens
MSGERGPRSWSETRSCRELDDRAECNIQAREAIPDFEHKRSHSIKRKYWLEKTIKDDDHLGSDFAAIILHHSSEAELADEKLAGDPFPLDHGFPQLDSSDFWTRSVYRRSLYETSFSAKNAI

SEQ ID NO: 1023839 - protein, 125 aa, Homo sapiens
MELQAMESKGSHEKPENPVRTVGEALRTYTAGKNVDFTNGREELLRSRFMEHDSSHGNGDPKGSDELYLDGTYTPLINEMNRIEIKMEVKSKKVCRQEQNPYSFEARYSMSAEPFLSVVEDEPFI

SEQ ID NO: 1023840 - protein, 108 aa, Homo sapiens
MAPDAEGSAVMDGSMPRGASGEETAEYRQWCNKCTFQTTEYHLSHLANVILPVTMGNPVEIGDINRMWDKRKGETKLPFGNPTQREYKGTYISQSINGITSLAMNVGL

SEQ ID NO: 1023841 - protein, 143 aa, Homo sapiens
VLVEVTSSLNPAWQSLTHRRDAQGRQGDLDHIYLICIQFWDNVVTDAIVLRSGACNLMRSSSTEHTLKLLLYGMCCVTEDSLNQLCCIVHCCVLCMPVILCSHLSGKNSLSLVSHKLSHDLMSDVNEHGQTCDVFPLWCSVSG

SEQ ID NO: 1023842 - protein, 237 aa, Homo sapiens
MDGFLGGGDGGLFYFFFWGQGLALSPGLECSGRDLGSLRPLASRVRAILLASASWSGWEIGGVRWPHTPGLDFLVFMGKKWEILANVWAQAGVSELLGLQVIHPALAVPEGAGNVQALSHTHRGAVVIYFNVSFITLIEDHLCKSLGISQSFLFHVNVRPANLIYSSLKGFVVDLALVSAHLVSSLIPLTVICLRSIGPFKVASPEQKKIGVPEVQKATFAYRMGVHTCWVCKFHQL

SEQ ID NO: 1023843 - protein, 553 aa, Homo sapiens
MLSVRVAAAVARALPRRAGLVSKNALGSSFVGARNLHASNTRLQKTGTAEMSSILEERILGADTSVDLEETGRVLSIGDGIARVHGLRNVQAEEMVEFSSGLKGMSLNLEPDNVGVVVFGNDKLIKEGDVVKRTGAIVDVPVGEELLGRVVDALGNAIDGKGPIGSKTRRRVGLKAPGIIPRISVREPMQTGIKAVDSLVPIGRGQRELIIGDRQTGKTSIAIDTIINQKRFNDGTDEKKKLYCIYVAIGQKRSTVAQLVKRLTDADAMKYTIVVSATASDAAPLQYLAPYSGCSMGEYFRDNGKHALIIYDDLSKQAVAYRQMSLLLRRPPGREAYPGDVFYLHSRLLERAAKMNDSFGGGSLTALPVIETQAGDVSAYIPTNVISITDGQIFLETELFYKGIRPAINVGLSVSRVGSAAQTRAMKQVAGTMKLELAQYREVAAFAQFGSDLDAATQQLLSRGVRLTELLKQGQYSPMAIEEQVAVIYAGVRGYLDKLEPSKITKFENAFLSHVISQHQSLLGNIRSDGKISEQSDAKLKEIVTNFLAGFEP

SEQ ID NO: 1023844 - protein, 112 aa, Homo sapiens
MCAISRFGFWHGIEENGLFQTVSMISRLHIFYTATHMSKMLGSSDCHLRTSQREDTEKLCLFLRNTEVPWSKLPFFCNNVISNALNSSTWLCFRKHSSVFSVFVNLSSSGRW

SEQ ID NO: 1023845 - protein, 375 aa, Homo sapiens
QYLLQLNNLADRSCNDLSQYPVFPWIIHDYSSSELDLSKSEEPSVDLSKPVGALNKERLERLLTRYQEMPEPKFMYGSHYSSPGYVLFYLVRIAPEYMLCLQNGRFDNADRMFNSIAETWKNCLDGATDFKELIPEFYGDDVSFLVNSLKLDLGKRQGGQMVDDVELPPWASSPEDFLQKSKDALESNYVSEHLHEWIDLIFGYKQKGSDAVGAHNVFHPLTYEGGVDLNSIQDPDEKVANGYATSWKLGKTPKQLFVTHILRRITPKFNKKSKSSSYNASMADPQVKSLLEEPERRKSNNTDLDIISPKACRYNEHVLQIHYRSKYMVSRVSRKDLQVFRNSKDSLENVSKESNDTPSYSSQRCVLLVTLHGIA

SEQ ID NO: 1023846 - protein, 105 aa, Homo sapiens
AGQNLRCSAGDWQDAVQRADFRDAGFFFLLECKYQSRYIEIRRSYSVGEAMEELLPDGQIWANMDPEERMWQLLQLLPTSVQGRVKEMSGEKPNLSNMIPTVKLQ

SEQ ID NO: 1023847 - protein, 78 aa, Homo sapiens
CPNKWIVAKPSSSFLRHRGVFLTPLLAMSSHKTFRIKRFLAKKQKQNRPIPQWIRMKTGNKIRYNSKRRHWRRTKLGL

SEQ ID NO: 1023848 - protein, 78 aa, Homo sapiens; identical to SEQ ID NO: 1023847

SEQ ID NO: 1023849 - protein, 259 aa, Homo sapiens
NRERMQPGVELGQARCTLVRLDMWTMSLQGLVPDDRLLCCAVLCCREMTAGVTSLCPPCPPLLLCQLGALSQSTSGLLAVYLAELSFLLSARDETQEDSSSTMELYWKLKWSELSRAVVKPKGESVTGTSVLVATERNSEPEGRGHRTVQLRELGSASRRGKQLSAEASERTRTGVFAVPAVPNGHLTSRVKLGSGSGRGGGSAMEGSQGRRLDMLQGKVKRSGWRSAGPRWAMYGDIFYLPRGVPEAAGRQRCLAQEP

SEQ ID NO: 1023850 - protein, 258 aa, Homo sapiens
MSPEGSECTSRQHESRGAVTISDQKPWSGIVPDDRLLCCAVLCCREMTAGVTSLCPPCPPLLLCQLGALSQSTSGLLAVYLAELSFLLSARDETQEDSSSTMELYWKLKWSELSRAVVKPKGESVTGTSVLVATERNSEPEGRGHRTVQLRELGSASRRGKQLSAEASERTRTGVFAVPAVPNGHLTSRVKLGSGSGRGGGSAMEGSQGRRLDMLQGKVKRSGWRSAGPRWAMYGDIFYLPRGVPEAAGRQRCLAQEP

SEQ ID NO: 1023851 - protein, 335 aa, Homo sapiens
MKLKLKNVFLAYFLVSIAGLLYALVQLGQPCDCLPPLRAAAEQLRQKDLRISQLQADLRRPPPVPAQPPEPEALPTIYVITPTYARLVQKAELVRLSQTLSLVPRLHWLLVEDAESPTPLVSGLLAASGLLFTHLAVLTPKAQRLREGEPGWVRPRGVEQRNKALDWLRGKGGAVGGEKDPPPPGTQGVVYFADDDNTYSRELFKEMRWTRGVSVWPVGLVGGLRFEGPQVQDGRVVGFHTAWEPNRPFPLDMAGFAVALPLLLAKPNAQFDATAPRGHLESSLLSHLVDPKDLEPRAANCTQVLVWHTRTEKPKMKQEEQLQRQGQGSDPAIEV

SEQ ID NO: 1023852 - protein, 104 aa, Homo sapiens
MWKIVPKENKVVEKAPVAEVKPPFKEGGEYQGAVEEIVNGGLGLPPWPRGFGRRMCPHRAGRITFAYDRLENGDDYGTGLSGGDEKSYRRKIRELQLEVQSAHS

SEQ ID NO: 1023853 - protein, 384 aa, Homo sapiens
MAAPGRRLPGCRASWCRRPSNDLEALRALTALFTEQRNRETAPRTIFQRVLDILKKSSHAVSLPAEIIPSGKPGFQSAVNNRMLQGVFASACIECSVNQNSIRTLGIRLVSAGGFDFISVPGTGKVEQDSLLTALTLWRLQIQIGNHCLNGNEDSQSIVWVHAFPELVPGLAITSSGQTEIVAYSSKLDKMYIPLNHDKTLKELEENLKYLALDVTTTACTKNILNQNGRSVTITDLISEKPGLGYKAMFTKLNNQRKKYHCKTLMIAKDNEDEPLTKDDIPVFVRHAELMQSTFVDQCKTVLKLAHEESLLMMRKALGTIGSRKSGGNDGILDCRYIEEFPVLEEKDFAGTQRREKTKLQWGIRQGYPGTGNIYTRKVHNNTK

SEQ ID NO: 1023854 - protein, 50 aa, Homo sapiens
RVLPEGGVATQLFTLTVGDVGAGGRRMAKQKRKVPEVTEKKNKKLKKASA

SEQ ID NO: 1023855 - protein, 151 aa, Homo sapiens
MTPGSAGVYLPVFPPSETGVALAFWRSEPNKHKKGIAGLDHCSPMALLLCPKLTLTHLPLLQLPAAHSNFCSHVFIFRSAAGSWTSERRGLDIRWQTHLSIFLVGPGSSYIWFLLLQDSFPSPCAHSSVSAPGSSHYTETSCICGISPIIN

SEQ ID NO: 1023856 - protein, 231 aa, Homo sapiens
MGPASPAARGLSRRPGQPAAAAAAATIAAASARAARHREPGRWEPRRGRGPGVGPGGWTMRAAITLQPGPDVTWLVVGNRKTTTWRLYDLCVYRGPRDAAVPGRYIAGQRKYPRKSDKIWARSSDEQGYGKGAIPHMGRRHELRRGFTRKAGVHGDTQNTPTQRKGLCHHFQTCTCPGVETFLVKVTCAHGMGVALERCVARMSFGTRGSGQCGPKMSREFPHPREGIQGN

SEQ ID NO: 1023857 - protein, 273 aa, Homo sapiens
REPVTAGAGPGGSAGDVRAQGPGHGARQPRCSRSKSPPGPACRCRCCCHYCCCFCARSPPSGAWPVGAPARPRPRGRPRWLDYAGSHNPSAGTCAAGLLGYQTPQSLSDAVSGTRSRVLEYCRQMYPESVEIARVEHGYERAIPMELLVLGVPGGGELRRQTLIDHGCARIRVPCLVTFVSEALLAVLKAAVFLHQERSGTNVTVQTAEAFREAQEALQAPQGPHAWHRRRGIASYPVASDRFRVCEYCVAGPLQGTPTIWDSSLVTLNRSWA

SEQ ID NO: 1023858 - protein, 48 aa, Homo sapiens
QTSLTHCAYAGSIITEKPLCCAGWQACGCWLRVLLSCGTPLKCSSLRA

SEQ ID NO: 1023859 - protein, 56 aa, Homo sapiens
SCPPVDLVKTRQVVTGAKFHFDAKFGSFFDIASPQLIHALEELILGFLSAVFVAQR

SEQ ID NO: 1023860 - protein, 182 aa, Homo sapiens
  misc_feature (77)..(78): Xaa can be any naturally occurring amino acid
  misc_feature (82)..(82): Xaa can be any naturally occurring amino acid
  misc_feature (85)..(85): Xaa can be any naturally occurring amino acid
  misc_feature (132)..(132): Xaa can be any naturally occurring amino acid
  misc_feature (137)..(137): Xaa can be any naturally occurring amino acid
  misc_feature (176)..(176): Xaa can be any naturally occurring amino acid
CQLDLAASTLKGFFDLIAVVAGVVQTILYCDFFYLYIDKSTQGKEAQFASISAKDHHQHLSFRVLGQNSYHSKGITXXRPKXTKXKRGGNRRRTPERKNNTKTPTTGSGKQEARRGGEEARKTGGETNKRKXRGRKXRATGKAQTEKTQQGRTKNAKGGGEGKKGGQKRNGCVVVXSQSVVV

SEQ ID NO: 1023861 - protein, 85 aa, Homo sapiens
CQLDLAASTLKGFFDLIAVVAGVVQTILYCDFFYLYIDKSTQGKEAQFASISAKDHHQHLSFRVLGQNSYHSKGIRCLIRKIRNR

SEQ ID NO: 1023862 - protein, 124 aa, Homo sapiens
DLEDPWVLIPPGPATKASSFLLEKKGESSRKHRYPQSMWEPEGKELQLDQEERAPWIEIFLGNSTPSTQGQGKGAMGTQKEVIGMEAEVTGVLLVAEGQRATEGTHNKGSRVESRPEAADAQPQ

SEQ ID NO: 1023863 - protein, 120 aa, Homo sapiens
ATPASPSSAPTLRASATASCGDLAFAAKESLVAAESGRKPYTGDRRHPIFFKRKLDPAEPFAGLASSALSVFETEPGGGGMRWFVDTAERYALAGRPLAELCDHNAKVARELGRNQVGRC

SEQ ID NO: 1023864 - protein, 183 aa, Homo sapiens
MSFPSPWNFGLVLGNNIFLKVGLIGGSGNLKYPNGLFSSVGVNPKSSHLLWDVPGAGTGLESFSGTVGMYGASILEAKRVGEWARNQSRAQDIPAGCIVWKLDGPGVWYTGLPLVGVLALAWLVASRQAPVLADDTLSSYPGNPKGQVGSNWWENRVGLHLGTHLVLSLPSPQPQSGTVNTCS

SEQ ID NO: 1023865 - protein, 362 aa, Homo sapiens
TDPDHSVVLDPTWGRIHDEDAGRTLRGHLAKIYAMHWVTDSRLLVSASQDGKLIIWDSYTTNKVHAIPLRSSWVMTCALRALRELCGLVEGLGQHTSYHTTASRPAQGNVQGTAGETSTGHTGYLVRVSRFLDDNQDDITSSGDTNWCPEETLRQASRQRVKLDTGGDVKSPEPWTPMADTSGVQSGTMMPTIKTDERTLREYTDADQTPIGQESDIKARGQTTNKGKPKTTGTDEATERHYDRGPEQHPHDSMDKSQGNTNEHSKTENAATRVTSQRTHQNDEGAKTEPPVTTRNHRGTSSQQWQTLEPTTQGHRPHGGPRAQHLKKKNTSHRAEIHKHLHEWLSTCNNEQQAPPNPPNRR

SEQ ID NO: 1023866 - protein, 136 aa, Homo sapiens
FPKPNSLGRNNEEERSQKEAEAAQRWPGEKAQASSIPVGSRCGGGRRNNSSRGTVMYVGLTDFKLGYWIVVRYDEPLGKNDGSVNGKRYFECHGESMGALCPSQTVVDGGGSYPERRIYRVGREYEHLKKFPCFSS

SEQ ID NO: 1023867 - protein, 115 aa, Homo sapiens
MPHCGLVQALEAQVRPDEERLRPWGSGLPGWAHGWMQEKEEPVFNVPTSVMMAEMTLRLTTWEHACSERLTAAMALSYSAGTPPFIGWVTLDEKRMSHVFPEIIQWPHRRICKSR

SEQ ID NO: 1023868 - protein, 218 aa, Homo sapiens
MVILNLRARFRLVFRQNLQAPPPHPSIYMNHSSSRDGARNLHFLMRSLGNASDALKLGTTVLGQSQQQLRSSKLHGSNRSLVSSSEEADMQRLHMQVHIHLGLHRHWLSTSRAPKTPFLSPCELIDTFRVWGTCLLPILSQKASPFLSSPSCYTWLASHPIFLEPQRTHPPFIHSFIHSFIHSFININHNLSCMCQAQGIPSRDNLPPRAHGLVEETD

SEQ ID NO: 1023869 - protein, 283 aa, Homo sapiens
MPFSGESNVKEGSGIENLLNTSGSEHVQKPVSSLEEGNTSGQHSGKKLKLRKKNVEVKMYRLRERKGLAYEEVSEPQDDDYLYCEKCQNFFIDSCPNHGPPLFVKDSMVDRGHPNHSVLSLPPGLRISPSGIPEAGLGVWNEASDLPVGLHFGPYEGQITEDEEAANSGYSWLITKGRNCYEYVDGQDESQANWMRYVNCARDDEEQNLVAFQYHRKIFYRTCRVIRPGCELLVWYGDEYGQELGIKWGSKMKKGFTAGRGGHYYDSLKKKEKREFSLRIFIF

SEQ ID NO: 1023870 - protein, 113 aa, Homo sapiens
  misc_feature (1)..(1): Xaa can be any naturally occurring amino acid
  misc_feature (10)..(10): Xaa can be any naturally occurring amino acid
  misc_feature (21)..(21): Xaa can be any naturally occurring amino acid
  misc_feature (23)..(23): Xaa can be any naturally occurring amino acid
  misc_feature (38)..(38): Xaa can be any naturally occurring amino acid
  misc_feature (77)..(77): Xaa can be any naturally occurring amino acid
  misc_feature (82)..(82): Xaa can be any naturally occurring amino acid
  misc_feature (84)..(84): Xaa can be any naturally occurring amino acid
  misc_feature (108)..(108): Xaa can be any naturally occurring amino acid
XPGKKGTPWXEGLFKLRMLLXDXYPSSPPKCKFNHHFXTRMCNFGNSVPVLQEENKNWSPAITIKQILLGKQELLNXPNIQXPXQEEAYTINCQNRVEYEKRVREQAXKFAPS

SEQ ID NO: 1023871 - protein, 281 aa, Homo sapiens
MPRSFLREILHSSHEGPNYRRLETQRDIIGACSACGGLVVPLLPRDKEAPSVPGDLPQPWDRSSAVACISLPLLPRIEEALGASGLDALEVSEVDPRASRAAIVPLKDSLNHLNLPPLLVLPTRWSPDLWAQTVHGAPEKLLGAELDAPSPGAALSAFTATNPTNTLAGLARHRQLATATLQVGRVFTCKYCDKEYTSLGALKMHIRTHTLPCILQDLVGKAFSRPWLLQGHVSTTQEEKPYACSHCSRAFADRPTFGPICKRTQTQEVPGAGLTKTFPDV

SEQ ID NO: 1023872 - protein, 33 aa, Homo sapiens
MTTTTINITTTTSVITATIIVTISTTISITVSI

SEQ ID NO: 1023873 - protein, 138 aa, Homo sapiens
PVARSWVCRKTYVTPRRPFEKSRLDQELKLIGEYGLRNKREVWRVKFTLAKIRKAARELLTLDEKDPRRLFEGNALLRRLVRIGVLDEGKMKLDYILGLKIEDFLERRLQTQVFKLGLAKSIHHARVLIRQRHISLWS

SEQ ID NO: 1023874 - protein, 361 aa, Homo sapiens
FSPLPVSNLCSGGSCSPARTPPATQDLRLPPPPLANPSRRPSLRKPGRLSPLRPRRVKVTVCKEGGNEWEHGHERRRIHLELRNRTPAAVRRTCLWTTCKSNDGQNCRDLTADYVNLEFLSLNKCTGLISDIKYSPSCLHIETQLDTQMKIEYFGGLDMSAEKLPNSHTSKLKLDNKPDQISDTVGNFETSQDMSETAWNLLNCEVTKLQMPKRRRVSSKTSYPNQDKQGMATAPKKRTRKHLYYRLTKYGKAVALKKRKTTNRRRMKQRPERTKQHKRKKKARRPPNHRTPTAETTREYEPNNNTKRQRQTRTYAKTYATHEKEKQTKKTEKEKTDKTTSTHSQPAHTHQNDTNKQQNCD

SEQ ID NO: 1023875 - protein, 177 aa, Homo sapiens
  misc_feature (173)..(173): Xaa can be any naturally occurring amino acid
LQGPSGIDCAGPLVRRALFLVISSKRDGRPIVRYTHLTNVRESSRLSQDTETEAGADEPTQLAAVLAAAVGARCECWLDLLLQCIRRARHEWSVTGVSAPTVTVFISSSLNTFRSEKRYSRKSSAIAEFKCKLELLVGSPASCMELELYGVDDKFYSKLDHEDALLGSYPVDXGCPI

SEQ ID NO: 1023876 - protein, 249 aa, Homo sapiens
ERVLSVLPLPSPGSQSSPRSSDGTMYPGSPGPLLCGINSNGWRLQLPEQQPQHQGAMELAAATVGSSLRHPDPHSQPPLSTGGGAGAVGCAVQLTVQLARGCDYNSVTLQVFYCMGFCHVNVRPTCLLLLHAPPLTCPVYVVRCATGILSARMGTGSPTGRPACMILTPYGKAFEHTDMNAICLHAAYTTTMFTPFAGFPQCPLTQIACDPSCSDTLTYPGDTSDVTEHCTTFCNLYGATCTNDSDLCA

SEQ ID NO: 1023877 - protein, 40 aa, Homo sapiens
SCIMDVSKGKVCSEMKVTEKIPVRHLYTKDIDIHEVRMAG

SEQ ID NO: 1023878 - protein, 314 aa, Homo sapiens
MGQQLSWEEAEAAGEMDVAELQEWYKKFVVECPSGTLFMHEFKRFFKVTGNEEASQYVESMFRAFDKNGDNTIDFLEYVAALNLVLRGSLEHKLKWTFKIYDKDRNGCIDRLELLDIVEAIYKLKKACRAELDLEHQGQLLTPEEVVDRIFLLVDENGDGQLSLTEFIEGARRDKWVMKMLQMDIKPGCWITAAEAEKRLVLRAKDPSGPNPSKILRVPELLAGGLVVKTCSRGVDSARANKVRTPRGQNSLRNLLVGPSTGQWPGKGQGRGHTNRSQKAERGPRERRKAGVATPTHTEETTTTRAQPRRGGPT

SEQ ID NO: 1023879 - protein, 257 aa, Homo sapiens
  misc_feature (247)..(247): Xaa can be any naturally occurring amino acid
VNPPAEVSTSLKTYQHFTLEKALPCSEGVLLGTFTPAAGDFMRFRFFQPLRLERFFFRSGNIEHPEDKLFSTSVEVLAFDNPQSDKEALQEGRTATLQYPPSPDGYLQISSFYKGVAEGEVDPAFGPLEALRLSIQTDPPVWVILRRDLPEKGLTKLRASEGTLWPALKPSISGGVVSCRPRRAQIRPRPKGSAWRRAGAGLGSAAGPEALGAGAAPARRAAEEAGGPHTVPEARNPSHPACPTHPXLEELLLGRPP

SEQ ID NO: 1023880 - protein, 89 aa, Homo sapiens
  misc_feature (30)..(30): Xaa can be any naturally occurring amino acid
  misc_feature (50)..(50): Xaa can be any naturally occurring amino acid
  misc_feature (57)..(57): Xaa can be any naturally occurring amino acid
  misc_feature (62)..(62): Xaa can be any naturally occurring amino acid
RGDPRARREIGTEVSRDAPKSPASLDGFQXFSQVTLLAPQLAVTSGPPWXHHTPQSXPGTAXAPALMVLKLSVMHHGVCVHTVINGLLS

SEQ ID NO: 1023881 - protein, 223 aa, Homo sapiens
SGVAADAVPRLPGHSSSISLAGSSLGLRPWSPGPVDPHSLGAPQPSLWSQRGGTKASHAQVYKHCPNFFKSHQVPAGCSGKHGSHGLGYRPLPHSSCFGLCPQSPSRVTNRDGQQSGAHFLRQPGDGDELRHQCPRSLRLRAGYPSAGKGPVQGAPRGLHAVHVAGGPAAGLDATLPSQQVLPVAGSWALGRGGPWLSVAEHVPLGQLLGLSCLPALPRTPST

SEQ ID NO: 1023882 - protein, 194 aa, Homo sapiens
MENPSPGLHDLGKAPLLLLLLATLERRTGQTSWRDESICSARAPAKYSITFTVQVEPEAFPKQYPLFLPPCCSGLLLAGGRRIAPDYSMWMEEPGTSVTWLRDFACCAVPMAWAADEVRSRRRGMALAELCTLGVFGLPCLSPAVHRGRRLAETLEVQRRHSAGLRLWLRIVAQPPDLVLWAVGQAWTLVRPGD

SEQ ID NO: 1023883 - protein, 654 aa, Homo sapiens
MPRPVLSVTAFCHRLGKRESKRSFMGNSSNSWVLPREEAQGWMGQAVQGGTRTSRSHASFPKLELGLGHRPSPTREPPTCSICLERLREPISLDCGHDFCIRCFSTHRIPGCELPCCPECRKICKQRKGLRSLGERMKLLPQRPLPPALQETCAVRAERLLLVRINASGGLILRMGAINRCLKHPLARDTPVCLLAVLGEQHSGKSFLLDHLLSGLPSLESGDSGRPRAEGSLPGIRWGANGLTRGIWMWSHPFLLGKEGKKVAVFLVDTGDVMSPELSKETRVKLCALTMMLSSYQILNTSQELKDTDLGYLEMFVHVAEVMGKHYGMVPIQHLDLLVRDSSHHNKSGQGHVGDILQKLSGKYPKVQELLLGKRARCYLLPAPERQWVNKDQASPRGNTEDDFSHHFRAYILDVLSTAPQHAKSRCQGYWSEGRAVARGDRRLLTGQQLAQEIKNLSGWMGKTGPSFNSPDEMAAQLHDLRKVEAAKKEFEEYVRQQDIATKRIFSALRVLPDTMRNLLSTQKDAILARHGVALLCKEREQTLEALEAELQAEAKAFMDSYTMRFCGHLAAVGGAVGAGLMGLAGGVVGAGMAAAALAAEAGMVAAGAAVGATGAAVVGGGVGAGLAATVGCMEKEEDERVQGGDREPLLQEE

SEQ ID NO: 1023884 - protein, 235 aa, Homo sapiens
RAAPGPQIEAASPSQPAAHSVALPRPAHSCLCRSCSRAGVRAGGLGGERRRPRRRQVRGGRKRLARRAQQLRRLARFLGVSVRRVGWGGSRGARAGEGVTGPAMADNEKLDNQRLKNFKNNMAADLETMTKTTTLKLYVDTYTDELQTEMTPSLKEKAMYHHEDICEDSDIDGDYRVPQLPSLEAIVQKCFHIDKPRNSIKVQVQSCLGRLLSKCIDNPPKLSDFPTPSGNIGPF

SEQ ID NO: 1023885 - protein, 61 aa, Homo sapiens
PRPGRRWCGGRRYGHWCWAADRRARKGPRPRISVCRCSSAACAMASSAASSEHFEKLHEIF

SEQ ID NO: 1023886 - protein, 162 aa, Homo sapiens
GLPSPAELWVNYTSFLYKLPVLSMSLQQHENRLIQTLSPIPGPDSYIYSIPLNVIRFSPFFTVTTSILAHSSVVLITADADFQDVNLILLLPCLNLQWLPTALGIRYLLLAWLVRRGLAWLLLPASLCPLQALSASLTPWSSHTCGLARVSLTLGWSHKQAE

SEQ ID NO: 1023887 - protein, 330 aa, Homo sapiens
MRSHTGLRALVAPGYPLLLLCLLAATRPDPAEGDPTDPTFTSLPVREEMMAKYSNLSLKSCNISVTEKSNVSVEENVILEKPSHVELKCVYTATKDLNLMNVTWKKDDEPLETTGDFNTTKMGNTLTSQYRFIVFNSKQLGKYSCVFGEKELRGTFNIHVPKAHGKKKSLIAYVGDSTVLKCVCQDCLPLNWTWYMGNETAQVPIDAHSNEKYIINGSHANETRLKIKHLLEEDGGSYWCRATFQLGESEEQNELVVLSFLVPLKPFLAILAEVILLVAIILLCEVYTHKKKNDPDAGKEFEQIEQLKSDDSNGIENNVPRYRKTDSADQ

SEQ ID NO: 1023888 - protein, 343 aa, Homo sapiens
  misc_feature (187)..(187): Xaa can be any naturally occurring amino acid
  misc_feature (194)..(194): Xaa can be any naturally occurring amino acid
  misc_feature (209)..(209): Xaa can be any naturally occurring amino acid
  misc_feature (240)..(240): Xaa can be any naturally occurring amino acid
  misc_feature (285)..(285): Xaa can be any naturally occurring amino acid
  misc_feature (339)..(339): Xaa can be any naturally occurring amino acid
TGRDTRGFRLLPHWKITPQASLAPSSELTGMVPREAPESAQCLCPSLTIPNAKDVLRKRHKRRSRQHQRFMARKALLQEQGLLSMPPEPGSSPLPTPFGAATATEAASSGKQCLRAGSGSAAMQQKACSRESLRALAQQMCGYRTVKMVGKGPRGRVNELARCSIVSYHGNVLYVQDTSGRENAHSXDIPVPRXGGGTHFWQTHCRQGXVPLSTVGPRKEDPLKPLKGKGGGGGTPLHNXLSRSLKYVPPYGAQSPGITTYVPKLPQRSPGLPQPRARGLSKWTXALQAAAAKKIQVGQHGHSSVEDATTAMELYRLVEVQWGQQEAAALDLPEDRELXQTDM

SEQ ID NO: 1023889 - protein, 137 aa, Homo sapiens
MAGIFKEFFFSTEDLPEVILTLSLISSIGAFLNRHLEDFPIPVPVILFLLGCSFERIKLYIFTGPKIRKRHTMDESRLIFSYIYTSSFSLLLHLTWIRTCFKQLILGRYLLTFNSRLFGYIILLRSLASGICNINYF

SEQ ID NO: 1023890 - protein, 309 aa, Homo sapiens
LPQDVAEGCWSGCTLGLLVGSQLAVMMYLSLGGFRRLSALFGRDQGPMFDYSHPRDVYSTSSVTCLGPPGGPHSFLKGLPYLSRNGFSSSLDGSLCRVSFSPGAKSRGSMIVDAGSPRSRTKGARYRACRVVSRRFPNRPSLCLIVPWEHLPCVLLAPYSNLLPLACSAEASLVLMASMSIHQGWKMDTFNRAKLLNVWGCERPCVMNEWGLPVLDTMWTSCQKNEQQSCMCVSPGVPPAYVSRRYEATLWIPGSRSPQYYGWSLKHLLLNRYLRDAMASPMNTGAGGGEEIDDIATRVRLGGMKISRP

SEQ ID NO: 1023891 - protein, 52 aa, Homo sapiens
ISLHVLISLTRPHLPYRLISLTVLISLTVLISLTSTSPYTSPRSLQFPMNKK

SEQ ID NO: 1023892 - protein, 124 aa, Homo sapiens
MSGCRVFIGRLNPAAREKDVERFFKGYGRIRDIDLKRGFGFVEFEDPRDADDAVYELDGKELCSERVTIEHARARSRGGRGRGRYSDRFSSRRPRNDRRNAPPVRTENRLIVENLSSRVSWQVC

SEQ ID NO: 1023893 - protein, 124 aa, Homo sapiens; identical to SEQ ID NO: 1023892

SEQ ID NO: 1023894 - protein, 39 aa, Homo sapiens
SGVERYLGAAAHGCGGATVRDALFAAKGRAADCESPREF

SEQ ID NO: 1023895 - protein, 239 aa, Homo sapiens
GRARAPQTPRARSSGPAAMARSVRVLVDMDGVLADFEAGLLRGFRRRFPEEPHVPAWKQLHAGLPGAAEAVPASPADPDLADKVAGVYEAPGLFPGPGGPSLGALDAVREMNDLPDTQVFICTSPLLKYHHCVGEKYRWVEQHLGPQFVERIILTQGQDGGLGGTCSLTDKAPSQRPGRRPQAWEHILLHHAATIGTWSCPRHGDGCSPGVTNWREILDSKRGAAQAAMSGDAGAAAES

SEQ ID NO: 1023896 - protein, 90 aa, Homo sapiens
MKHPIRAKLQIRYVTSQQGICGDFRGKNLAVIIRTEEIGQFKPSFQTSNALRNTDVKENNQKNGLWTVWKNSEQDPRVLSENLKDGDKDF

SEQ ID NO: 1023897 - protein, 82 aa, Homo sapiens
SRGSPFQTAPQQIAADIPRSGCFPCMGRRAWIAKHPGSRNKHGLLLQNTSVHRRRTSLWNLHLPGKTLGILLLSLQKKKNEL

SEQ ID NO: 1023898 - protein, 59 aa, Homo sapiens
SSSVPSSPYRQRFCAPISKPRAHWISMAVLLNPINDHQLKRGYAVVSHTSIYGERLHFL

SEQ ID NO: 1023899 - protein, 333 aa, Homo sapiens
AEWLQQPRGWGAPGRELDVLASGRTLRALRVPDAKHREHPVSGASGERCPMNVRGAAPGVLRVPASLAIPDFPTASRWQPRSRTMFRLWLLLAGLCGLLASRPGFQNSLLQIVIPEKIQTNTNDSSEIEYEQISYIIPIDEKLYTVHLKQRYFLADNFMIYLYNQGSMNTYSSDIQTQCYYQGNIEGYPDSMVTLSTCSGLRGILQFENVSYGIEPLESAVEFQHVLYKLKNEDNDIAIFIDRSLKEQPMDDNIFISEKSEPAVPDLFPLYLEMHIVVDKTLYDYWGSDSMIVTNKVIEIVGLANSMFTQFKVTIVLSSLELWSDENKNSTSW

SEQ ID NO: 1023900 - protein, 292 aa, Homo sapiens
AEWLQQPRGWGAPGRELDVLASGRTLRALRVPDAKHREHPVSGASGERCPMNVRGAAPGVLRVPASLAIPDFPTASRWQPRSRTMFRLWLLLAGLCGLLASRPGFQNSLLQIVIPEKIQTNTNDSSEIEYEQISYIIPIDEKLYTVHLKQRYFLADNFMIYLYNQGSMNTYSSDIQTQCYYQGNIEGYPDSMVTLSTCSGLRSLKEQPMDDNIFISEKSEPAVPDLFPLYLEMHIVVDKTLYDYWGSDSMIVTNKVIEIVGLANSMFTQFKVTIVLSSLELWSDENKNSTSW

SEQ ID NO: 1023901 - protein, 87 aa, Homo sapiens
LDEHGISGALEGIVNRRRGGRGPHTRITSLGYPYYLACRSADYEHTHVRRITGEYSCSEQELRSREMITLALEQTNKYMFQSCVLLL

SEQ ID NO: 1023902 - protein, 365 aa, Homo sapiens
MGTTVIKEVLQRAKVAPEEVSEVIFGHVLTAGCGQNPTRQASVGAGIPYSVPAWSCQMICGSGLKAVCLAAQSLAMGDSTIVVAGGMENMSKAPHLTHLRTGVRMGEVPLADSILCDGLTDAFHNYHMGITAENVAKKWQVSREAQDKVAVLSQNRAEHAQKAGHFDKEIVPVLVSSRKGLTEVKIDEFPRHGSNLEAMGKLKPYFLTDGTGTVTPANASGMNDGAAAVVLMKKTEAERRMLKPLARIVSWSQAGVEPSVMGVGPIPAIKQAVAKAGWSLEDVDLFEINEAFAAVSAAIAKELGLNPEKVNIDGGAIALGHPLGASGCRILVTLLHTLERVGGTRGVAALCIGGGMGVAMCVQRG

SEQ ID NO: 1023903 - protein, 303 aa, Homo sapiens
AGLPLPGCVAGASSRASNCPVTTNCHYSGWDPGLQAMWRVLFLLSGLGGLRMDSNFDSLPVQITVPEKIRSIIKEGIESQASYKIVIEGKPYTVNLMQKNFLPHNFRVYSYSGTGIMKPLDQDFQNFCHYQGYIEGYPKSVVMVSTCTGLRGVLQFENVSYGIEPLESSVGFEHVIYQVKHKKADVSLYNEKDIESRDLSFKLQSVEPQQDFAKYIEMHVIVEKQLYNHMGSDTTVVAQKVFQLIGLTNAIWFPSNYYELFWLHWELWIRLTLKLATLEKVMRFSPHFKEGKNSYPGEGPHEV

SEQ ID NO: 1023904 - protein, 103 aa, Homo sapiens
VTGTGGPGRNAPVLLAGPLCRSRQPGLLPRSAAAIHQPGPFCGRAMPLPDTMFCAQQIHIPPELPDILKQFTKAAILHPAGRRAAGGPRGYFSGSVEQEIHFL

SEQ ID NO: 1023905 - protein, 103 aa, Homo sapiens; identical to SEQ ID NO: 1023904

SEQ ID NO: 1023906 - protein, 88 aa, Homo sapiens
SDNLEDPERVMRLKKPGCASAVIVLLVEHWRRGHPVLSCGEHCPCPRLLPKAMHWCCTTVLASRMDVRLTLCETVVARDAVRAEHEGT

SEQ ID NO: 1023907 - protein, 109 aa, Homo sapiens
  misc_feature (7)..(7): Xaa can be any naturally occurring amino acid
  misc_feature (26)..(26): Xaa can be any naturally occurring amino acid
  misc_feature (51)..(51): Xaa can be any naturally occurring amino acid
HSTLVAXATYVQCGGDLAPRGGYSLXTQGPVTLLCPVCASHKVAYSNDSAXWTEYQDPRTGSSKIFPGNWDNHSHKKNLFETPILARYVRILPVAWNNRIALRLELLGC

SEQ ID NO: 1023908 - protein, 109 aa, Homo sapiens; identical to SEQ ID NO: 1023907
  misc_feature (7)..(7): Xaa can be any naturally occurring amino acid
  misc_feature (26)..(26): Xaa can be any naturally occurring amino acid
  misc_feature (51)..(51): Xaa can be any naturally occurring amino acid

SEQ ID NO: 1023909 - protein, 127 aa, Homo sapiens
VSSVLEVSHVFCCPNRVRGALSWNTGPGGLLAFGTSCSVVPYDPQKKVVITNLNGHTARVNCLQWIRTEDGSPSNELVSGGSDNRVIHWELENNQVLKSVLSKAMKDLFVLCTLFTRVGHPKGSSMR

SEQ ID NO: 1023910 - protein, 144 aa, Homo sapiens
AGLQMENDGRRGAAGASAPAPGLDLRGHLTPTCPGRAARGVKSGPGSGARLRAVGGGVPEFCPSQLQAPPQLPSPASHPPGGGATLGTETDPRVGDAGRPWAGDPRVEWAGRLEALGLRTAGTLEPGDTGIAEAVTPVATNVWT

SEQ ID NO: 1023911 - protein, 155 aa, Homo sapiens
MQDSVVGGKTRQVVEQLGRVPPVVFAPEDVVSPKNLRFHTGAWQNFTGPVLDNRTHKRIEVGRLVGTPLRDSSLLCTKCQDPLLFTLIRMLADGLLTSVRPETLDGVLQKWTGEIRELGPNTKRLWAAASLIGGQMVTYIVESYKSQEEPRVLGP

SEQ ID NO: 1023912 - protein, 152 aa, Homo sapiens
  misc_feature (14)..(14): Xaa can be any naturally occurring amino acid
VLENFMSSPPMSMXSALFLFTHITNKPGRKTFLGFLFISRFFLFLRMSDEEQSAIVCDNGSGMVKAGFSGDDAPRHVFPSIVGRPKNEQAMMGSASKKLLVGDEAQAKRGVLSLKYPIEHGIVTNWDDMEKIWHHTFYNELRVTPEFPQRPN

SEQ ID NO: 1023913 - protein, 106 aa, Homo sapiens
MSDEEQSAIVCDNGSGMVKAGFSGDDAPRHVFPSIVGRPKNEQAMMGSASKKLLVGDEAQAKRGVLSLKYPIEHGIVTNWDDMEKIWHHTFYNELRVTPEFTQRPN

SEQ ID NO: 1023914 - protein, 247 aa, Homo sapiens
SGCFSPGKAGALGSLQVQCPPVGRTLATSPRACLYSPIMKGFGKRTSPRRSGDHGLGTPGRDANQLAAQRHTGLTMSPLTGTLSTLLSGPAPTSQSSPLTSFLTSPIAGPLTGTLASSLGLPSTGTLTPSSLVAGPVAMSQSSPLYSPCDGHGGCLSEAAPSSAPLVIPPGVSQNLLAKPMSNLVLPRGPKLRLAEPLRGGPTGPQSPACVVPNGTPKSQSPLSPPVNPGPKLFKWRFAGKPSKIPP

SEQ ID NO: 1023915 - protein, 317 aa, Homo sapiens
SGCFSPGKAWGPGQPPGAVPSRGPHPCHSPQGMSLLTNYEGLRHQIERLVRENEELKKLVRLIRENHELKSAIKTQAGGLGISGFTSGLGEATAGLPSRQNNGVFLPPSPAVANERVLEEVGIMALAPLAEMLTSLQPSATPGSLMSPLTGTLSTLLSGPAPTSQSSPLTSFLTSPIAGPLTGTLASSLGLPSTGTLTPSSLVAGPVAMSQSSPLYSPCDGHGGCLSEAAPSSAPLAIPPGVSQNLLAKPMSNLVLPRGPKLRLAEPLRGGPTGPQSPACVVPNGTPKSQSPLSPPVNPGPKLFKWRFAGKPSKIPP

SEQ ID NO: 1023916 - protein, 281 aa, Homo sapiens
NGHRVLQSECRLAWRALAPRSLGLGLEPGEVLVMLGLCPGTAVAEVAAAWSLGSQAAQGSGTAGAVFLRVSWGPDVMAAVLPPVPESCTDGWPRSPVAAGAALHYLGSFSLQTLCVLPTLALPVPLLPWDNHCLLATALFTETPHDMTALDVADGLLEIGLLLPADSGSPSYSLGDPVVVLYWSHRDWTDKQAWASNQLKASQQEDAGKDATKISVVKVVGSNISHKLRLSRVKPTDEGTYECRVIDFSDGKARHHNGQGATLRVQSQGENSRPASAPKAT

SEQ ID NO: 1023917 - protein, 155 aa, Homo sapiens
MDYLSGWPRFWVALWAGWPAPGVPVGPPPLFKQLGAVVFQCASGPVLRPWAVCHVGKTPGVEQVKCWDSAFRTERTAREGGRGLEILRGDQRPSCACVAPSPGAAFLREIVTRGCLGQELGSERLHSKAQVPPYSSCVAHTLGPVGWNSGIFPKE

SEQ ID NO: 1023918 - protein, 83 aa, Homo sapiens
RGSREGRERAGEAAEDGVKMAAFSEMGVMPEIAQAVEEMDWLLPTDIQAESIPLILRGGDVLMAAETGQWLNLVLIVFQIIQV

SEQ ID NO: 1023919 - protein, 91 aa, Homo sapiens
  misc_feature (68)..(69): Xaa can be any naturally occurring amino acid
GPVGRENLQMPPSVRIPGVQPRPLCFPSTSGVCDKPQFEGLTQWFSRVDDLPPGDTSPCLEDIMWLSXXWWEPPPAPMCGGGSHDGGLGEC

SEQ ID NO: 1023920 - protein, 113 aa, Homo sapiens
ADYCSISGALSGNSKSRIRAARWPVTAPHSFAFWARGLNRAFQHRHFRRPALPATERFHVLGGLASVCCRPADMSRRVQTRGGYWGHQGVEPAGSVASRPGLGQWVQPSLGLS

SEQ ID NO: 1023921 - protein, 205 aa, Homo sapiens
MIRTLLLSALVAGALSCGYPTYEVEDDVSRVVGGQEATPNTWPWQVSLQVLSSGRWRHNCGGSLVANNWVLTAAHCLSNYQTYRVLLGAHSLSNPGAGSAAVQVSKLVVHQRWNSQNVGNGYDIALIKLASPVTLSKNIQTACLPPPGTILPRNYVCYVTGWGLLQTNGNSPDTLRQGRLLGVDYATFSSSSWWGSSVKSSMVCA

SEQ ID NO: 1023922 - protein, 238 aa, Homo sapiens
LAHVGLTSCCWGIQNRLSIGIGTRDPAMWPVCLDIHLYVPRFREAQCADAMTPAGCTCPSSTVQHLAVPEAEEHLNAGVGMAVTGLFLACCQCLRSLGGYVLSLVHDVRFHHFPIERQLNGTYAIAWWAKRTVDRQSSESYYVVATPDGLDLQDCASLCKRDDEASSRSRGDFDMPAEDAMVRDYVRQTVEAGGAEAPGARPVIKTGTRRVAGSVIATDGPREAECPWEQRASRDGVE

SEQ ID NO: 1023923 - protein, 223 aa, Homo sapiens
MDNDDFFSMDFKEVVENLVTNDNSPNIPEAIDRLFSDIANINRESMAEITDIQIEEMAVNLWNWALTIGGGWLVNEEQKIRLHYVACKLLSMCEASFASEQSIQRLIMMNMRIGKEWWDAGNFLIADECFQAAVASLEQLYVKLIQRSSPEADLTMEKITVDAVTTPECLSYQAESAVVKGIFKRASMCVLHCTDIVDEGPPDELPSPSSTLRYTLLELETPK

SEQ ID NO: 1023924 - protein, 238 aa, Homo sapiens
MISAHCNLRLLCSSDSSASASQVAGTTEVVENLVTNDNSPNIPEAIDRLFSDIANINRESMAEITDIQIEEMAVNLWNWALTIGGGWLVNEEQKIRLHYVACKLLSMCEASFASEQSIQRLIMMNMRIGKEWWDAGNFLIADECFQAAVASLEQLYVKLIQRSSPEADLTMEKITVDAVTTPECLSYQAESAVVKGIFKRASMCVLHCTDIVDEGPPDELPSPSSTLRYTLLELETPK

SEQ ID NO: 1023925 - protein, 107 aa, Homo sapiens
MGIHFGPSLGIFGSSCTRAVKKSKQEICRHKPGSVKGHLVPRSRDSPGQSQEEAKGFLAMLSGGGHQVPSPCTADIAITFLLLLWVVMGSPPGSPQDYDAAWQEGKV

SEQ ID NO: 1023926 - protein, 79 aa, Homo sapiens
FYRIAKVKLEVGQIGEIFCFCSKLSFLLPHTGMIFSALGLVSTWLMLERKGFLKPFHSLYEVISVSENRYLRNSKVKQK

SEQ ID NO: 1023927 - protein, 272 aa, Homo sapiens
REGVRGEATIITTTLQLGSCWWLAADGSPGPRDQEPGGQRCDPKSAAPAPGGLVDRKPRVGTGPPQPTGDRRPPAVFRPPPTNSEDADEEKFVASQESLGSCRNWVNVMNMEYGVYTTRNDTKEDLFIASDVPVKKEISPQKYLRSVGDGETVEFDVVYTERRVHEAVQCDWPGWSSCGVADGYALIGRRIQTWLLWKRAMAIPGITLGGGGRRERQQVKDLPPTTDRQFSGARNRLRRHQYRPQYRQQRFRLTTWDRRLTVAHGSYPSQQN

SEQ ID NO: 1023928 - protein, 85 aa, Homo sapiens
MSKYVNDMWPGSPQEKASPSTSGSGRSSRLSSRSRSRSSSRSSRRDSRSSSRSSSRSHSRPRRSRRSRSRSRRRHQRKYRRYSRS

SEQ ID NO: 1023929 - protein, 104 aa, Homo sapiens
MFNPSAPPPYEDRNPLYPGPPRPWGLWAASVLPSQGIHAYPGYLLGLATCLSLLVYPTARMPPNHYSDAHELRTRAMCIMEEERAVIEYLQQAHEAEIAKYTDN

SEQ ID NO: 1023930 - protein, 103 aa, Homo sapiens
MPRRPGLIHQENFSASWVLLLLILFPGNVRFHRMVNIFPWNRALRMLWCSMMTTIPVCQGMSNFLQFRTFGPKTSTVLDTLRLLVTLEEWRSGGYHSHILVEH

SEQ ID NO: 1023931 - protein, 110 aa, Homo sapiens
AGIELASALLALAAALPETRGAHRRISYLALSSGMTSSAHTSLPGPPSGCQGCCSSTCCAPLPPEPRSTDSRNPLPYRATPCGPPWDQDSEGQATKRIISGQLVSLGFKP

SEQ ID NO: 1023932 - protein, 79 aa, Homo sapiens
SWNRARLGSAGLGCSSSRNPGRPQKNLIPGSLFRDDIIGSHQSSRTTFWMPRLLLEYLLCTSTSWFFISCGPSFQGLSD

SEQ ID NO: 1023933 - protein, 176 aa, Homo sapiens
SWNRARLGSAGLGCSSSRNPGRPQKNLIPGSLFRDDIIGSHQSSRTTFWMPRLLLEYLLCTSTSWYPSHSLKLPACYYGLAKEHGFQEPTTIQSNSLWTPLGSGQRGTSDKEDHQWPASLSGVQTLNQCPSEGALAMALDLCSACVLSLSPFLYICARVHLLVNWSAAFPEEGRPL

SEQ ID NO: 1023934 - protein, 41 aa, Homo sapiens
DTITEVAERVGKSAVQLHLGCCGKLLIPDWGLRWWCWQVTV

SEQ ID NO: 1023935 - protein, 155 aa, Homo sapiens
MGNTTTKFRNALINGDENLACQIYENNPQLKESLDPNISYGEPYQHNTPLHYAARHGMNRILGTFLFGRDGNPNKRNVHNETSMHLLCMGPQIMISEGTLHPRLARPVEDDFRRADCLQMILQWKGAKLDQGEYERAAIDAVDNKKNTPLHYAAA

SEQ ID NO: 1023936 - protein, 48 aa, Homo sapiens
VYDRARYRIRKLGTALELPAFTYSLFKTQVSASPEGLGLLPWYRSLSR

SEQ ID NO: 1023937 - protein, 240 aa, Homo sapiens
TKCRKRKLERICAPGCDNGEDAQGRERGAVEYLPASSGSRWPSSRQKVMTPRQQRAVSLLLWVSMVTRLSELSPDPFTDTPPRLGRLGAHCLPTCGSKGQQSWWEQHHPVDLVGQHDKNQHMDSEHLTLPVTPSPFHTSTDYTKPPLPRLVLWYCLFIPAGNRPRVHIEYNISVYFNRAGEEGAIAAELAPTLVLKPAGDIGEGDPRPPDLPLICTRTVAKRKHALSPLKRSNVNDSVTA

SEQ ID NO: 1023938 - protein, 167 aa, Homo sapiens
MEETGRHHTGGKRGTEGRLRESTGRLLTTFDSRTDEPRRKGERKRESKQAIRRQREHNQTGRTKRTGTTREDDRDRGTRRQKHGRLRDRPNLRANPRGERKKSATRRVHDNRGPPHTVIEVTQRHTQITHHDNDEAREALDARPRTGNRTDDKGRHPRGGDSPHRKL

SEQ ID NO: 1023939 - protein, 68 aa, Homo sapiens
  misc_feature (6)..(9): Xaa can be any naturally occurring amino acid
  misc_feature (15)..(17): Xaa can be any naturally occurring amino acid
  misc_feature (19)..(20): Xaa can be any naturally occurring amino acid
  misc_feature (25)..(25): Xaa can be any naturally occurring amino acid
  misc_feature (27)..(28): Xaa can be any naturally occurring amino acid
  misc_feature (34)..(34): Xaa can be any naturally occurring amino acid
  misc_feature (40)..(40): Xaa can be any naturally occurring amino acid
  misc_feature (49)..(49): Xaa can be any naturally occurring amino acid
  misc_feature (55)..(55): Xaa can be any naturally occurring amino acid
  misc_feature (61)..(61): Xaa can be any naturally occurring amino acid
  misc_feature (67)..(67): Xaa can be any naturally occurring amino acid
IQATPXXXXATTKRXXXPXXNSRGXPXXLARAPXPPAPPXPPPPIANAXPPLPHXQSYYAXPPPLPXP

SEQ ID NO: 1023940 - protein, 89 aa, Homo sapiens
LEDRQGYITGREISLGGHLQIFLLHPFTMLLVSVDFDVIPKVTEENGEQLPCYFVMVSLQEVGGVETKNWTVPRRLSEFQNLHRKLSEV

SEQ ID NO: 1023941 - protein, 130 aa, Homo sapiens
TRGLNFQLPSTPALPDTMEKVLVLLLVSLLAVAYAAPGPRGLIINLEDGEICLNSMQCKSRCCQHDTILGIARCTHKAMENSECSPKTLYGIYYRCPCERGLTCEGDRSIIGAITNTNYGICLDSRRSKQ

SEQ ID NO: 1023942 - protein, 72 aa, Homo sapiens
DGMMSSSSLFLEVCSLSLGSGTCSPVPKVIALHTCGAGGGGGKASVTAAELWGMFCFTPYAVEVVVVPLGQR

SEQ ID NO: 1023943 - protein, 132 aa, Homo sapiens
AGSPLGVPAPPTSRVARFLSASLHSPSTLSFLSLPSRRTMTRYSTMARGPAPVRPRPLPSFARPGPPGSLVACVTRRPAQSKMEHRGRRPYVECDQAQKGTPEEKRYHPSLCGLVLGMPKECKFIQGSAYVV

SEQ ID NO: 1023944 - protein, 149 aa, Homo sapiens
MSGLPRLWERAAGIRTGSNRWQAVPAEEVLRLQSCLRLAHERLGTNRVFAGGCEGSGPWAAIAGGVERRPVSARPRLLSSSVLGGGACSSVGLSASPWPWALRINGASCLLSLQAQSICRFALGMPRAETMFDNGRGLPVRGPRCALQM

SEQ ID NO: 1023945 - protein, 63 aa, Homo sapiens
VVDLEDLVVLGYRHEHYAGLDTSFNPVNSVPLTATKAPIHRILQSAAHIHLENQQHVHLITSP

SEQ ID NO: 1023946 - protein, 245 aa, Homo sapiens
VAVQTASKQVDGDYVVSEWSEIIEFCTADYSKVHLTQLLEKAEVIAGRMLKFSVFYRNQHKEYFDYVREHHGNAMQPSVKDNSGSHGSPISGKLEGIFFSCSTEFNTGKPPQDSPYGRYRFEIAAEKLFNPNTNLYFGDFYCMYTAYHYVILVIAPVGSPGDEFCKQRLPQLNSKDNKFLTCTEEDGVLVYHHAQDVILEVIYTDPVDLSLGTVAEITGHQLMSLSTANAKKDPSCKTCNISVGR

SEQ ID NO: 1023947 - protein, 183 aa, Homo sapiens
MLILWTIPLFLLGAAQGKEVCYDNLGCFSDAEPWAGTAIRPLKLLPWSPEKINTRFLLYTNENPTAFQTLQLSDPSTIEASNFQVARKTRFIIHGFIDKGEENWVVDMCKNMFQVEEVNCICVDWKRGSQTTYTQAANNVRVVGAQVAQMIDILVRNFNYSASKVHLIGHSLGAHVAGEAGSR

SEQ ID NO: 1023948 - protein, 41 aa, Homo sapiens
AAAYYYYYCSEFKLLTMYGDMMLIFFQMWCNIYNKICHNQK

SEQ ID NO: 1023949 - protein, 38 aa, Homo sapiens
QPEEFSLASFPSPRREGATSVPFCVLPGQDTLIHTSYP

SEQ ID NO: 1023950 - protein, 250 aa, Homo sapiens
AGLSREGRQAAPASGGGLGDGGGVLSITWATAQLEDGPLGFAAAGEQASGAEAEPGPRGDDARRHSRVLSGAPESPLTAGTSSTTGRRAMASPEGALRHSSSTSELRERCALQYMGKGQTEPTDSWGHQERNPPEQRDFDDWRHGKQAGLHGRPNGSNQCVAWDKPNGTGPKTSDALDRDVGTTTRSPLPLGLLAIDGLMPSLRSHAVANGYQQIGIPSSNRGAVERQSPFTYRGPQGKQSGARRAKTLR

SEQ ID NO: 1023951 - protein, 191 aa, Homo sapiens
GSASAGLAAWCPEEWLLSPRPWSPLAGREPGMPRPRCGACGDVGRAPEALSLGDGSAPPPAPRLAQAAPPFPQHNRALGRFEERGAWEQSITPRFLRVDGGDFQGARKVQARPGLSSVARSPLAVDSGLDPGKPQRALPDPCRVEHLKEKLIEPGPGSETDCDLSWGDTDLDAQHRGPADGWRMSRLTAGR

SEQ ID NO: 1023952 - protein, 65 aa, Homo sapiens
CWLDLNPKSYISIPILRKHSYFMHPRSYTDTTHSTRMNTAHTRAQHTHEHTAHTQTHSTHSTQIS

SEQ ID NO: 1023953 - protein, 269 aa, Homo sapiens
MLRLLSSLLLVALASGCGQPSHNPSSRVVNGEEAVPHSWPMQVSLQYEKDGSFHHTCGGSLITPDWVLTAGHCISTSRTYQVVLGEHERGVEEGQEQVIPINAGDLFVHPKWNSMCVSCGNDIALVKLSRSAQLGDAVQLACLPPAGEILPNGAPCYISGWGRLSTNGPLPDKLQQALLPVVDYEHCSRWNWWGLSVKTTMVCAGGDIQSGCNGDSGGPLNCPADNGTWQVHGVTSFVSSLGCNTLRKPTVFTRVSAFIDWIEETIANN

SEQ ID NO: 1023954 - protein, 315 aa, Homo sapiens
MLQLRDSVDSAGTSPTAVLAAGEEVGAGGGPGGGLAGGGDACCCHDTLCLSASTDPTRLRPAVKGVLLLFLAREASSSAVEEILLWLVAALLEELAEIRVTCGCLPRWITWNNEKDAAGAGHGASPCLSVNYDFISLQCQQVGADSAQRSRHHFLRRIPCFPLNRSTSEKLGIRIQWDKQSRTFLHNQMESLVYQVPYATFTEHPMAGADEHDSISVSVLESFKGLLIQAVKTSQEEGLCQDQANGVLILESPSVIETYVGLMSFHYHEVELGYSITRGTIGFKPLVLGGYSTFPKGTDVGLENWTPASIMLPVT

SEQ ID NO: 1023955 - protein, 34 aa, Homo sapiens
MAADTCGFRGDLVCDEKEGGKGQCEATRPRYPPM

SEQ ID NO: 1023956 - protein, 296 aa, Homo sapiens
MSFFPELYFNVDNGYLEGLVRGLKAGVLSQADYLNLVQCETLEDLKLHLQSTDYGNFLANRGITSDVCQSFDDRLQGEDGGGVPPHEEPLPMMPLASFLDVHLLTVTMIDNVILLITGTLQPAAPSLSSCPMCQPTRQLRGRMEAVKHCFRHLLRLYKWPFWVDTPLAAFYSRTAFPEQDLDEMNIEIIRNNLYKAYLESFYKFCTLLGRDYGDAMCPILEFEAEPRAFIITINSFGHRAVQRGPCQALSTLGGRSYPEGLGQWVRVNDFERVKKVGDITGGQVSPRWGQPGKSWG

SEQ ID NO: 1023957 - protein, 35 aa, Homo sapiens
DQNVTRQTHDLHLTHRKRGAAIEEKLNFTFILYLG

SEQ ID NO: 1023958 - protein, 65 aa, Homo sapiens
SLTPAGQWQDNGETTTQGFGLGCLMRCAQYKKDGADFAKWRLCAEDWGTHPSGLAIMENANVLAR

SEQ ID NO: 1023959 - protein, 149 aa, Homo sapiens
MAPEHNPLRNLPPPQSNNLLYPKGQTRTNRHSALGVPDTCDYQQEADNSCIYVSKITHEVDELTQIIAEVSQDPKLPRTEDHPCQKCGHKEAVSSSHTVRAPEDGLRLYYVCTSPTMRHRGPSDLSIPRVLLKHQDFHEKQPTQTSNNN

SEQ ID NO: 1023960 - protein, 149 aa, Homo sapiens
TLLGTWLKGNVLTAAEAGGWSAEFDHDGTMHEIGVLDVWYRLARLRQNCSSRTRATVAEGRHSSCAAALCRSCGFVAFPDAIELNNRWGGAIGPMIRVAGGSDDDDDLAGVLEHFASNPRETASAWRRSANGLRQKPGRQALGSYRLSE

SEQ ID NO: 1023961 - protein, 178 aa, Homo sapiens
AAGFRGGRRADPRRRLRDPPPPATASAESAPSPSAGLFRGRRLSRAWSSQTAAGVGAAGTIGPGGPTGAWTRGRRTGAPDSVWQHIPDPSAREPPQEKPRHGRGHELPPDPLEGLSTQHRHPFMGGPELQPLSTKSLAWEPMDWRPWVQAPGSYKQQQTTVRDWEMGHWPDDQSISGQ

SEQ ID NO: 1023962 - protein, 57 aa, Homo sapiens
ELGPTCLVSMLFSTSLVAVVVRSPAGSEKRLHILNTKRNSTICELTFPTDIRAVRMN

SEQ ID NO: 1023963 - protein, 103 aa, Homo sapiens
  misc_feature (56)..(56): Xaa can be any naturally occurring amino acid
MPSPTMNNLKPKRFGPKDLNIFYPMTVKSFTELDFDIADVVFPQGGSSVHQRGLLXEMRPERLRGTSLACLLVLGFKSLSRATRSHSVPGDDSSMSFTKSFFC

SEQ ID NO: 1023964 - protein, 219 aa, Homo sapiens
GRPGRPGCERLPHAPPPLRHECSPRGGKRLQLPWEDGRSGLLSVRRSLVKCSVFHPVRGPASRCGFFSLLWLQLSVRLGTWPGQSGDKGRRPRALARACAREPPLSTGKKTRPRGHTQAPGRKLVPIPRNALEELLGLRAPHAPVPEEEEGSGHHIYVRNQVDHFRFNRAALINVGYQESSNQQRTTYACTDRRPDSHLNEELDYGINLRLGPIQVASP

SEQ ID NO: 1023965 - protein, 221 aa, Homo sapiens
AWTPARAYSHYHGGARILSETASARLASPLVIKFEELRSRDGYDPQKPSDNFPVVWPGGEWHLRDITNYMTTAAFELLRHAAVNRERWLRRFYEIGKEAIRERKEGELFAFVVPPAPAGSDRARRTEVLLATLQRGGVEIERASSFVADGTRYPDGTAVIRMAQPYGSFAKALLERQTYPDLRDAAGQPIPPYDVTAHTLPLLMGVEVRPIFKPFQYTARK

SEQ ID NO: 1023966 - protein, 42 aa, Homo sapiens
YCALGTGNSKNDLTKEECLKKAYRKMALKYHPDKNKEPNAEE

SEQ ID NO: 1023967 - protein, 464 aa, Homo sapiens
MWRLVHWHHVGKSDNGPPDARAAWPYAYPGKIPKDVVVHPLRVELVGAKRPRCVPNPARFLQNCRAPGGFMMQRFVETNLFLEEIQIKEPAEKQKFFQELSKSLDAFPEDICRHKVLPQWERFEFGNAGAVVLTPLFKVGNVPETLRSIKQKIIPDGGQDVLHPAERAMRIRLLAEDGAVQSRYLEEPTVSTQIFPKFGHGFLENNPAIREQTVKSMLLLAPKLNEANLSVELMKHFARLQAKDELGAHPLHSTTVCLGKNRLLPHGLAARHRVLTSAFSRATRDPFAPSRVAGVLGFAATRSSTQMNDCAQKILAVLCGAHCRILRNPVREQAFKGHSGASVFQLESVSEDPNQLEEVEKDCPCSIQPWNGEEAAASWAGLGRDRGSPHVTFQGWIRIGSQTIVPQRKAKIPQKNQGVKSSCARPEPGVTDTPNNLKGAGTTDEESTDTARGEHGRKDKGESD

SEQ ID NO: 1023968 - protein, 190 aa, Homo sapiens
GDLEDPCGDGVSGKRQFEVGVMESLRVASVWLWLRRGAFQRQVIRLGMAEGTREASDRQAIHGNAQVTSVGCSVPMASPSRQEGRITYLKLRSLDLLHLNLSGGGGTCGKCRPLGPNPAFGGESKHSMGELSPQGARVSMGWGSIQPLQGQGRDGHGGIYPRLEVDNGIFKEEIGWALWLHACNPSTLGE

SEQ ID NO: 1023969 - protein, 72 aa, Homo sapiens
LAPLEAKNMRKSSSFAPSSSLRSRQPDRAARRLCWPRLAGLPIPLDPATTHSCCLVNFPPVSGAMSGMKSFY

SEQ ID NO: 1023970 - protein, 68 aa, Homo sapiens
ILVTVPNRNRPEVIRLANVMAEGQGRRYHIQDFTLAFKNSSRNWCSGLPLELGCSLGFSPALEFGFIF

SEQ ID NO: 1023971 - protein, 327 aa, Homo sapiens
RKTDGSGLMRVPLAAVTVRFVSGPRDPERGEADRAVSCLSPSCGRPGDTEPSVVPGDWIGARTSTSSSAPGPGSSQGPGPRPCMPAHGLVPAMRELCVQVEGPLDWTWLPCCTRGLLVGSSFYGRVLYVTGATTRATRTGVSSARQGEEYRESCAPETPEARVKLGEWTVTFNRGFQQEVFLGKDLGGFDEDAETRPEPEEAAWSVFVQRWIVEPLNGRSVPKDDAWLDHGRRRRALPGGHGTTARHNFRAVGPERGRSRVSQTSIRVNVLASTGHNEEGGCRAHSGSRRNQRGPRNPGKPGKNRRARGHKGNTPDLNPSHTQTTTY

SEQ ID NO: 1023972 - protein, 408 aa, Homo sapiens
MSGLLSGQKLSNGSGITECPRGLVGLAFIGEATLDKLPRFPAPALPLLNRVDPHPRSCVAACPHPAAVLGTQSPPWCPGIGLEPGPRLPPLPLALAPPRDLGRGPACRPMVWSLRMRELCVQVEGPLIGPGFRAALVVSWWAAPSDGRVLYVTGATTRATRTGVSSARQGEEYRESCAPETPEARVKLGEWTVTFNRGFQQEVFLGKDLGGFDEDAETRPEPEEAAWSVFVQRWIVEPLNGRSVPKDDAWLDHGRRRRALPGGHGTTARHNFRAVGPERGRSRVSQTSIRVNVLASTGHNEEGGCRAHSGSRRNQRGPRNPGKPGKNRRARGHKGNTPDLNPSHTQTTTYWYPKRKQPGNTRQGARKTRETRPRKHNTDCQEPTYLECTEHTDNKRICLHKQVQHDTT

SEQ ID NO: 1023973 - protein, 182 aa, Homo sapiens
MVQGAPTVCLCILSSQPPLRCLLFTHDESLLSDSGHPEDSGQSAPGWPQGLLKPVHGLITHLDHPSMSWLLSKAPDPSLWRKREASGVLFVKQRCGRQLLFQSCLCLYPGTMGRNAPSLLFPCVEEAHPASSLLPQVKGAPLPGFEFQRCHFLSAPPGKFLLFPTFKAMAPPSQGGVRYTVW

SEQ ID NO: 1023974 - protein, 294 aa, Homo sapiens
CLEDPAWFCRRPGGTNWRWAERGHAHYQREGIISNKDILATNGVIHYIDELLIPDSAKTLFELAAESDVSTAIDLFRQAGLGNHLSGSERLTLLARPEILYCQRWNPIRIDAAIQGICFSERTVIKDQLASKYLYHGSDPGKRLGWRKGNVRGFVYISNSLCIENSCIAGPRQEGEVRDPVARMDRVLTPPMGTVMDVLKGDNRFSMLVAAIQSAGLTETLNGKESTQSSLPQMKPSEPCTKRTEQLLGDAKELGQHPEIHIGDEILVSGGIGAPGAVKSLPGDKWKSVEKTCG

SEQ ID NO: 1023975 - protein, 39 aa, Homo sapiens
AAAYYYYCSEFKLLTMYGDMPDTLPDTGDHQTDKFKKEK

SEQ ID NO: 1023976 - protein, 105 aa, Homo sapiens [sequence omitted]

SEQ ID NO: 1023977 - protein, 135 aa, Homo sapiens
IARVAMAASGAVEPGPPGAAVAPSPARTRSCPLSPVPAHQAEDRGAETTEIESLCMNCYCNGMTRLLLTKIPFFQRNNSELLFPASTVAGTPTEINRSEGRIQDQGVRLHFDSVRALEDMNRDSGEDMNVDDTRI

SEQ ID NO: 1023978 - protein, 146 aa, Homo sapiens
LGPVFSRAPFLTLVWITCVGMWHLSPFALGICDPSIVLRPLCPHFPVHVGDDGSPFPFAQLPPGARGPSPQGVWIYSFIRPGPPMFACLCTSTPNVSALPPEALCRASLFWRGRGCGVTCTLGLVDTVNSSQVDFSGGEKKGHLRL

SEQ ID NO: 1023979 - protein, 367 aa, Homo sapiens; identical to SEQ ID NO: 776241

SEQ ID NO: 1023980 - protein, 367 aa, Homo sapiens; identical to SEQ ID NO: 776241

SEQ ID NO: 1023981 - protein, 485 aa, Homo sapiens
GGPSVLCRGLEPGAWCLLEWVRAVSGWRDFHELDAVGPCTDAVAAVTKPARNPNAPVASCSHRRCGQPRTTPPPGAQCEVPASPQRPSRPGALPEQTRPLRAPPSSQDKIPQQNSESAMAKPQVVVAPVLMSKLSVNAPEFYPSGYSSSYTESYEDGCEDYPTLSEYVQDFLNHLTEQPGSFETEIEQFAETLNGCVTTDDALQELVELIYQQATSIPNFSYMGARLCNYLSHHLTISPQSGNFRQLLLQRCRTEYEVKDQAAKGDEVTRKRFHAFVLFLGELYLNLEIKGTNGQVTRADILQVGLRELLNALFSNPMDDNLICAVKLLKLTGSVLEDAWKEKGKMDMEEIIQRIENVVLDANCSRDVKQMLLKLVELRSSNWGRVHATSTYREATPENDPNYFMNEPTFYTSDGVPFTAADPDYQEKYQELLEREDFFPDYEENGTDLSGAGDPYLDDIDDEMDPEIEEAYEKFCLESERKRKQ

SEQ ID NO: 1023982 - protein, 480 aa, Homo sapiens
MSDGFESGPRCWSGPEPGPGRVEGAGLRAAVSRTERGLLSGHSHQPRNPKPRASCSHRRCGQPRTTPPPGAQCEVPASPQRPSRPGALPEQTRPLRAPPSSQDKIPQQNSESAMAKPQVVVAPVLMSKLSVNAPEFYPSGYSSSYTESYEDGCEDYPTLSEYVQDFLNHLTEQPGSFETEIEQFAETLNGCVTTDDALQELVELIYQQATSIPNFSYMGARLCNYLSHHLTISPQSGNFRQLLLQRCRTEYEVKDQAAKGDEVTRKRFHAFVLFLGELYLNLEIKGTNGQVTRADILQVGLRELLNALFSNPMDDNLICAVKLLKLTGSVLEDAWKEKGKMDMEEIIQRIENVVLDANCSRDVKQMLLKLVELRSSNWGRVHATSTYREATPENDPNYFMNEPTFYTSDGVPFTAADPDYQEKYQELLEREDFFPDYEENGTDLSGAGDPYLDDIDDEMDPEIEEAYEKFCLESERKRKQ

SEQ ID NO: 1023983 - protein, 219 aa, Homo sapiens
MCTGCVLLLLWVIWNHEAPQDQKTRHSVCLDVWELSANLIGGSGGGSTPTPRGKHSLISVGGGFRCQPAEGWTPLWSPMTAWKLPEIVDACQERVLTWVLGKASGRLLVYMAGMTAASSCGPSAKPYCIMSLTGHTSPRLESVFASTLPRGAQSWPCILSRRSHPELVGAVKHAKKFFSTLYGDTEGNNRADWDFHPVRPKFVVSGFPGDKIKALGTSG

SEQ ID NO: 1023984 - protein, 274 aa, Homo sapiens
ADRPSSEAQLPENNSNLPLWVIIMPSDLAKKKAANTQKGGCRKLRQAAQKHGHEENGDVSRQQPQVRERSNDGQLARETTEVDLLTKELEDFEMKKAACFELCTVLSWPLTPTDTECPQSLNLLTSPFTGSMSSLKVITKLEFKLRPCVHGLTWLQMELDKSMLLSDSSGKREVPIPAHIDIYHLTREMPPSDTDTLALLTDGRSDTAAAPMLAETRQSGWLMRMRTVEKLMELYERLEDAGCRPRSQMEGSRILHGLGFTAWHARKRLNASVW

SEQ ID NO: 1023985 - protein, 163 aa, Homo sapiens
MEGRSGAIVALAPNYAIYMLGRALIGVVVGGFWSMSAATAIRMVPKRDVPRALAIVNGGNALATVVAAPMGAYLSTVIGWRGAFLCLVPVSLIALAWQWKTLPSMPAAARAPGIGQVFKVFTLFKHPGVVVGMLASSLLSMGQFGLFTYVRPFLETVTNVHGA

SEQ ID NO: 1023986 - protein, 45 aa, Homo sapiens
AAAYYYYYCSEFKLLTMYGDMACWAWLGAPTPGYLVGINRQIRKK

SEQ ID NO: 1023987 - protein, 63 aa, Homo sapiens
MGSCADIQLKWSLEQHYYIQVRAGDNKYMHLNVLKSLPGQNEDLWYLTGLPGLTKEKELTTRD

SEQ ID NO: 1023988 - protein, 245 aa, Homo sapiens
LQLQQVALQQQHATACSSMQQQQAALQQQQQQQQQQQFQAQQSAMQQQFQAVVQQQQQLQQQQQQQQHLIKLHHQNQQQIQQQQQQLQRIAQLQLQQQQQQQQQQQQQQQQALQDQPHNSAATDAAATASVLPGCCPSSCSKMHHTQHQQPPTQPQQPPVAQNQSSQLPQQSQTSLWCHRRKLSLDKCSIPNTTEICPSSDGGAAAPSEPQVQPARRQAVLNASRSWNCRLEQYSDHLVFNNFHW

SEQ ID NO: 1023989 - protein, 184 aa, Homo sapiens
  misc_feature (29)..(29): Xaa can be any naturally occurring amino acid
  misc_feature (93)..(94): Xaa can be any naturally occurring amino acid
  misc_feature (102)..(102): Xaa can be any naturally occurring amino acid
  misc_feature (106)..(106): Xaa can be any naturally occurring amino acid
  misc_feature (112)..(112): Xaa can be any naturally occurring amino acid
  misc_feature (114)..(114): Xaa can be any naturally occurring amino acid
  misc_feature (118)..(118): Xaa can be any naturally occurring amino acid
  misc_feature (126)..(126): Xaa can be any naturally occurring amino acid
  misc_feature (130)..(138): Xaa can be any naturally occurring amino acid
  misc_feature (142)..(145): Xaa can be any naturally occurring amino acid
SSGEHREGSTLQDRTSHADRSICPGPRPXARTHTAPHTAPPHPATSPVDCLIHPPPRWPADLVPCSHPRAGGADAALWVPEGPGGSDDPPPPXXTVLNRPPXTREXKGAIKXRXLSSXNGEPEGHXSPAXXXXXXXXXRGAXXXXQASLGQPRFGPSREIRAPTSTSIADRKGRPSRQTSFFLG

SEQ ID NO: 1023990 - protein, 261 aa, Homo sapiens
KRALVSGAYIGPASPIPDTNPGRLPPSERGPHRAIEEPRQLQAYGTFKPRLATTSWDLGPVTACGALQAGLSLPTLQSCGPLPSGARPIERQGKNPTRDAGLDGRLFRGPPPYKAHWWCAHQSPCNAPFCAPTIAQRGAPGIDTPRRNSTKSQRLCDTMCVSSKKLEPVAQFPRWSTQSFLPNSRRDATGTTSYWTRSREAPKLCGGRCAHPKVVVWAPHKEIGRLPPGNLCGLGKHTGGYPRSARQGPRTVTMRHSPVGC

SEQ ID NO: 1023991 - protein, 476 aa, Homo sapiens
MAIKFLEVIKPFCVILPEIQKPERKIQFKEKVLWTAITLFIFLVCCQIPLFGIMSSDSADPFYWMRVILASNRGTLMELGISPIVTSGLIMQLLAGAKIIEVGDTPKDRALFNGAQKLFGMIITIGQSIVYVMTWMYGDPSEMGAGICLLITIQLFVAGLIVLLLDELLQKGYGLGSGISLFIATNICETIVWKAFSPTTVNTGRGMEFEGAIIALFHLLATRTDKVRALREAFYRQNLPNLMNLIATIFVFAVVIYFQGFRVDLPIKSARYRGQYNSYPIKLFYTSNIPIILQSALVSNLYVISQMLSVRFSGNFLVNLLGQWADVSGGGPARSYPVGGLCYYLSPPESMGAIFEDPVHAVVYIVFMLGSCAFFSKTWIEVSGSSAKDVAKQLKEQQMVMRGHRETSMVHELNRYIPTAAAFGGLCIGALSVLADFLGAIGSGTGILLAVTIIYQYFEIFVKEQSEVGSMGALLF

SEQ ID NO: 1023992 - protein, 247 aa, Homo sapiens
MATYGAAAAAAAAGMAEARSQPSAGPQLNALPDHSPLLQPGLAALRRRAREAGVPLAPLPLTDSFLLRFLRARDFDLDLAWRLLKNYYKWRAECPEISADLHPRSIIGLLKAGYHGVLRSRIPLAAKFLFTEIAHWDPKVFTAYDVFRVSLITSELIVQEVETQREWNQGLLFDLEGGAVIIIAFQITPSVAKKIAAVLTDSFPLEQFVASIDNEPEIANASFHEQHPDENKTDPDGPHKKCNSKFL

SEQ ID NO: 1023993 - protein, 98 aa, Homo sapiens
MATWGAAPAAAAAGMAEARSQPSAGPQLNALPDHSPLLQPGLAALRRRAREAGVPLAPLPLTDSFLLRFLRARDFDLDLAWRLECNGVISAHRNLRLP

SEQ ID NO: 1023994 - protein, 47 aa, Homo sapiens
AAAYYYYYCSEFKLLTMYGDMTHLHCECLSSHNWDTMHFNKNISAVK

SEQ ID NO: 1023995 - protein, 45 aa, Homo sapiens
AAAYYYYCSIQASNDVRGHVCDTKKFITEIQDSQLLLKCSGFTKK

SEQ ID NO: 1023996 - protein, 189 aa, Homo sapiens
TRLPRVAASPLKSLLVSTRISCEVPGMSKDGLHQLTESSFLYTDGRVKGENENRSKLLFCWESEGGREAGSAHVMKRVALSGVSRAEGFGRSWALVVFKDYWSLGFEEPHRRESPGKVSMRGENTIVGWNTRGESMFLILYNVKVCSPLRGCHSKVDMTGEPPLHVEPLRKGGEEENGFRTWMRDLPKG

SEQ ID NO: 1023997 - protein, 189 aa, Homo sapiens; identical to SEQ ID NO: 1023996

SEQ ID NO: 1023998 - protein, 262 aa, Homo sapiens
MVNFTVDQIRAIMDKKANIRNMSVIAHVDHGKSTLTDSLVCKAGIIASARAGETRFTDTRKDEQERCITIKSTAISLFYELSENDLNFIKQGKDGGGFLINLIEIFPGHVQSSPGEVDWCLSVVTDGRIAAWMDLACQRVCVQTETVLRKAIARHQACVMMNKMDGPVELQLEPEELLPDFPAHRGERATSSSPTTARARGGPMGTHHDRSWCSVTGGFGSGLKGGGFTLKRDCEKLWASSRQGEGSGAAERPRIRQGDNRA

SEQ ID NO: 1023999 - protein, 128 aa, Homo sapiens
SCLVTVSVVLNPHGIKVIYNEVNNKSWMDRPVHLHITCLKSWMDRPVHLHVTCLKFWMDRPMHLHVTCLKFWMDRPVHLPVTCLKSWMDRPVHLHVTCLKFWMDRAMHLHVTCLLWRGVGCAMFLLWD

SEQ ID NO: 1024000 - protein, 258 aa, Homo sapiens
GSSARPRRTIGKWRGGPRDQRREKLGSYVLLATRLAFQASDHNALPSLPRRSLLDDDRSPLSPPRFLTSDEVGSDHLYVWALPRPYWVVVRGRPGCIPAPASLSPWVMLCCVLCRTVQPSPPCLCSMCLRPLSHLSSRSSVPVSSPTVLGDVSSGVWGPFSVSPGVSLSLPYCPFSLELISCPPLWLDAVPHALSSVPRTCLYASIWACFQAPRFVCSSLVNQTEWRLTDTNGRVQSDDLSRPRSELWGRIQEPRPFT

SEQ ID NO: 1024001 - protein, 404 aa, Homo sapiens
GKVLKRRKKDKDDKEDEKEKDAGNFDPESSWQASTMQQSRTQNSSSNNHGEQAANVNTGYGNNHQEQPAKTGNIDSSMHNHRAHTQWQFQQARMHACTHSMDPYQHSCNTGQGNMHHGRDEEFSIPFSMRLPMAQHSATAGTAQTQHLTTAAQCTDRCDGRHTCNTASLEPTTSHNKLSLGCDNTKKQLWTSDQEDKVADGELTKDAMEYSSEEEDSDLQTALTGYQTKNRRTASSKPVNHWHKTRVLSHIRNKLLMFERPSTLANKLSSQEREQQCDFDLAPGQGHYQVIAGNTVAPNAITEPGGITKVATSQERNGGAIPLTNEQGKINKAHKPNQTPKTETRKKGRTTNQKGTAKTKAKSKKTREDRTTPKRNKEKRKKKHNKRKKTQRKHNNHKSNTPQQ

SEQ ID NO: 1024002 - protein, 95 aa, Homo sapiens
MALLVTRTVLATRAVLVARTVLVARAVLVTRTVLVTRAVLVARIVLVTRAVLVTRIVLVARALLVTRAVLVTRAVLVTRALLVARALLVASTELV

SEQ ID NO: 1024003 - protein, 36 aa, Homo sapiens
RVYSPLRCLLPVQVRRHVSTCDLQISLAGAGRSRGP

SEQ ID NO: 1024004 - protein, 176 aa, Homo sapiens
TKTDLVSAEDLGRLEGVIATFNPQARIVRAARGAVALDDVLDTGLFDPVRAEGAAGWQKALMGQMLPETEEYGISHFVYRAAKPFHPEKLKACLNSKWPGVIRSKGFLCLATRHDRVGGWSQAGAVTQFGPQGRWWASAPRERWPYDPTWRAAIEKVWRPIHGDRRQEIVLIGQNM

SEQ ID NO: 1024005 - protein, 40 aa, Homo sapiens
GRLLLLLLEFKLLTMYGDMHLDLYFCQKIQGYNKTKNYQK

SEQ ID NO: 1024006 - protein, 415 aa, Homo sapiens
ERARFGELRQAAGTCVRPDEQDRLLWFVTSTARTAILIQQCKHLTLPADCLACPSLGCWSRAQPRMTDAYHPCLEQPRTARNSCYMPCNADPHLTSRTHATNLTSRCPCCYLPSAALRHSAHILAAPTPAPTAPCAQATLPLPTGTHAAPIPQPTGTNSTNSHQTLAAASHQLELPPPPHMALAANARRTPSADHPTTHKLAVGPRLRPRAPSPRSSQKTTPALKSTTIGPLDERIDTGADTRAHEPTATAPVCPCYPADTQHGHWRGDIHQGEHPPYQPQEPPRHTPDGHRPPTSEPRPEQSAHPRRATPATTAPPHGPPPPTIGGLHPNTRTHQPGTLRPTHSAPSPDKTALTPGNTKSKTPTSHEHPHGATIGTPESTRMDNNTKQHKEHQNALTPSTSKCQDETQWNAHTE

SEQ ID NO: 1024007 - protein, 334 aa, Homo sapiens
RAARRRRACADKVRGGHGRRRRRIPGRYFCHVLLRGGSSRACRSYICPRCEILGSHRGASGRDQEHRKLVLARALTSKDVPQQDQSRSPLEHVDQHLCNAAQGYGQCAFGIFDDSFEIPTFPPGAQADDGRYPESRRERDHPSLAPGTVPDSPASRLTTRRATEPVSTKCCPHAVEGIMPAARQRAVITPCHHPQPEAPGGVLHFKTLCDYAWGANGLDAIIYDSSSNQFDKLQAPHRQDHRTKIQALPTVPVTEEHVCSGLECPVCKDDYALGERVRQLPCNHLFHDGCIVPWLEQLDSCPVCRNKPHGTEHGTNPPGLTGVSFSSSSSSSSS

SEQ ID NO: 1024008 - protein, 126 aa, Homo sapiens
VVSWASDFGLGICCGLRFTYFLSSSVRIYYLLLRRCPADMTQLMKALDRVQMEDTQPRERRAVSIQMKPKVGQRRGRANVLGLDLGASTQTQPDLLGSAERCTWVPATWPGSKCGKGGEATQEETL

SEQ ID NO: 1024009 - protein, 307 aa, Homo sapiens
NEASGGAKGVGSGFLQTFPGIWRDHRCRVFGFHDLRSGYAATAAATATPTVPGSVHISSQAAVACSSSGSGSGSGGHVVRRRRWVSEGWFGRGGGNGCWLCGVQLAAVASGLYRARALLGTLPWYLLARPVPLDLALCSDAVGGPVRRQCPPSEETTKVVPPDRSNFPEPPRFPPPQAWAVLSLEILGTPLFFPKLILKSLTHASVPKPSSQVLLRYIFHAPSSEKHPPGSLSERRLIWKKSSVESSGTKKLGTSNKSRDSREKPGRELKDIIHHGNRMKISTIRKRRISITRSNESHPNGRAANQR

SEQ ID NO: 1024010 - protein, 275 aa, Homo sapiens
MWLSLQSRVSPPVSLLQQAELESDPERTLAMDSALSDPYNGVPRRAAPQSIRGASTREGIALATELLLMALLPIFFGALRSVRCARGRMLQIVPETITSRDAARFPIIASCTLLGLYLFFKYFSQEYITLLLSMYFFVLGILALSHTISPLHELVFPSQSFQYRQYQLLFTQGSGENKEELIIYDFDPKALCVSGPEQIVGVWYLLKKAVYLPNNFGAGFSLNGVELLPLNNVSTWLDLGGGLFSTMSSVFCPSVGDVAHSRSPKIGVSRSVGKA

SEQ ID NO: 1024011 - protein, 96 aa, Homo sapiens
  misc_feature (17)..(17): Xaa can be any naturally occurring amino acid
  misc_feature (82)..(82): Xaa can be any naturally occurring amino acid
  misc_feature (91)..(92): Xaa can be any naturally occurring amino acid
QCTPVYLVLAVDNLFHXEVETDQLLTFSLFGVGCCNVFNFGLGGSVEVKKLFKIFYRNICESKPDHIRQGVTYPQPALPVLXLHVTASQSXXPGEP

SEQ ID NO: 1024012 - protein, 90 aa, Homo sapiens
  misc_feature (17)..(17): Xaa can be any naturally occurring amino acid
QCTPVYLVLAVDNLFHXEVETDQLLTFSLFGVGCCNVFNFGLGGSVEVKKLFKIFYRNICESKPDHIRQGEKLIRLHFQMEQIVYCQDQV

SEQ ID NO: 1024013 - protein, 41 aa, Homo sapiens
AAAYYYYCSEFKLLTMYGDMRNTKKLAFSLSVNKKYYTLEK

SEQ ID NO: 1024014 - protein, 35 aa, Homo sapiens
TPVRQRPDLGSAQKGLQVDLQSDGAAAEDIVASEQ

SEQ ID NO: 1024015 - protein, 46 aa, Homo sapiens
AAAYYYYYYSLEFKLLTMYGDMEAGPVRDLRLKKKKPIKKGSLMGK

SEQ ID NO: 1024016 - protein, 451 aa, Homo sapiens
MASLTVKAYLLGKEDAAREIRRFSFCCSPEPEAEAEAAAGPGPCERLLSRVAALFPALRPGGFQAHYRDEDGDLVAFFRCELTEIDIIGSMVHSCRRAGRSLPEIVPVEADDIEEEVAWAWTHPVHTVVSHVKSALENNGCTSQNCESCDRLAKWGLMGMETGIYVQSGLCLGLRLCGSGVPREQGVATGGGDTKKTSGIIPLVPFRVQTVSEGAFVGNTSVASPGKGELRGEHMSGVGQDWETMGSNEVKLEPTSSSCRGGPPWPHGRISFWSIGGSECEFPEERWGECGSLPLALWALKLISMWSTEVKRSRLSPVSPESSSTEEKSSSQPSSLLLLIPGSRVGNVEGATQSLAEQMRKIALGVRGAPLSDTTCELGINWFKEEIDDLDPSVFKSESGDPGLNSVKFQVPTRCRNPKVPQPPGTPPHEGPQGLDASCLVPISRNVNQAD

SEQ ID NO: 1024017 - protein, 414 aa, Homo sapiens
AESTESAHGRGVISSNGYLLGKEDAAREIRRFSFCCSPEPEAEAEAAAGPGPCERLLSRVAALFPALRPGGFQAHYRDEDGDLVAFSSDEELTMAMSYVKDDIFRIYIKEKKECRRDHRPPCAQEAPRNMVHPNVICDGCNGPVVGTRYKCSVCPDYDLCSVCEGKGLHRGHTKLAFPSPFGHLSEGFSHSRWLRKVKHGHFGWPGWEMGPPGNWSPRPPRAGEARPGPTAESASGPSEDPSVNFLKNVGESVAAALSPLGIEVDIDVEHGGKRSRLSPVSPESSSSRGEEQLTAKQLAASDPSEAVVGNVEGATQSLAEQMRKIALGVRGAPLSDTTCELGINWFKEEIDDLDPSVFKSESGDPGLNSVKFQVPTRCRNPKVPQPPGTPPHEGPQGLDASCLVPISRNVNQAD

SEQ ID NO: 1024018 - protein, 414 aa, Homo sapiens
GFPSARPLAMASLTVKAYLLGKEDAAREIRRFSFCCSPEPEAEAEAAAGPGPCERLLSRVAALFPALRPGGFQAHYRDEDGDLVAFSSDEELTMAMSYVKDDIFRIYIKEKKECRRDHRPPCAQEAPRNMVHPNVICDGCNGPVVGTRYKCSVCPDYDLCSVCEGKGLHRGHTKLAFPSPFGHLSEGFSHSRWLRKVKHGHFGWPGWEMGPPGNWSPRPPRAGEARPGPTAESASGPSEDPSVNFLKNVGESVAAALSPLGIEVDIDVEHGGKRSRLSPVSPESSSSRGEEQLTAKQLAASDPSEAGLGNVEGATQSLAEQMRKIALGVRGAPLSDTTCELGINWFKEEIDDLDPSVFKSESGDPGLNSVKFQVPTRCRNPKVPQPPGTPPHEGPQGLDASCLVPISRNVNQAD

SEQ ID NO: 1024019 - protein, 128 aa, Homo sapiens
QFNLRDDRGQPVPYFIRHAREIDPGLIDRQIVHYGNYDPFMEFDIQINQIVPSNGYRTLYIEANQPGNVIAAKSDAEGILENAFWQIALNEDGSLQLVDKDSGVRYDRVLQIEESSDDGDEYDYSPAK

SEQ ID NO: 1024020 - protein, 33 aa, Homo sapiens
ELDGLDPNRFNPKTFFILHDINSDGVLDEQEPE

SEQ ID NO: 1024021 - protein, 45 aa, Homo sapiens
AAAYYYYYCSIQASNDVRGHVSLLMIPLPPHLNLFNFLIKSDCLK

SEQ ID NO: 1024022 - protein, 348 aa, Homo sapiens
ASHEIWRSETLLQVLLKCGFITYILGGCIKKDAVPLMSKLEVLRHTRTSDVLQSPLYEPPANPDLLGPSYDLARSRVTPTEEHVLGGAPAAEAPDTPIANSLKPEQASPSEPHPHARQTPGGVQTGCCPEVRTSRNSTSSCSIAEDTGPWTHRTEAVQEMWLSYLKPWRYAPDKQASGKENPQTRECRQEKWAPYVQENTADVHQVDKWAYCTERSEQSMVRPKHALIGVRVGTVIGQTKPALDASKKVSKLYMEPEWIITNRQNEYKGPNIQWEQTCNHGNKEDDAPFKGQSKITRLERQRTAKTPRKVEQKHEHQHNTHKSRHAKQRQDITTIENTDDTSTRGVAK

SEQ ID NO: 1024023 - protein, 129 aa, Homo sapiens
MRVHRTIGSTRMDIKIAHARIENKIVNLLEPLATLAWTLGFEYHHGLLEKMWKEILKNHAHDSIGCCCSDKVHREIVARFELAEDMADNLIRFYMRKIADNMPQSDADKLVLFNLMPWPREEVINTTVR

SEQ ID NO: 1024024 - protein, 101 aa, Homo sapiens
  misc_feature (25)..(25): Xaa can be any naturally occurring amino acid
  misc_feature (29)..(29): Xaa can be any naturally occurring amino acid
  misc_feature (32)..(32): Xaa can be any naturally occurring amino acid
  misc_feature (34)..(34): Xaa can be any naturally occurring amino acid
LSGPKFLPVLPEETSHPNPSNDSPXWTTXYMXLXQSCQTVSFFEREDKNFQNEQNTINVNSRDGTLVFGWGENNPFEKKTTNEKTTKERHQEWIQQNHFTF

SEQ ID NO: 1024025 - protein, 74 aa, Homo sapiens
GGRARVGGGQASVHRLRREDKNFQNEQNTINVNSRDGTLVFGWGENNPFEKKTTNEKTTKERHQEWIQQNHFTF

SEQ ID NO: 1024026 - protein, 129 aa, Homo sapiens
MKCHPSCRPCSDLCNKEQSIKPSQGFEGVTYKMHNVKQCKSERCKIPIKELEADRCASDNSHLPTQEHSFQFSITEQQPEQLEGRAASQTSTNNGMRLDIWNHNHNRPERPTSLMTSFFFQRKVSVWGT

SEQ ID NO: 1024027 - protein, 124 aa, Homo sapiens
MKCHPSCRPCSDLCNKEQSIKPSQGFEGVTYKMHNVKQCKSERCKIPIKELEADRCASDNSHLPTQEHSFQFSITEQQPEQLEGRAASQTSTNNGMRLDIWNHNHNRPERPTSLMTSFFFQRKF

SEQ ID NO: 1024028 - protein, 102 aa, Homo sapiens
  misc_feature (74)..(74): Xaa can be any naturally occurring amino acid
  misc_feature (97)..(97): Xaa can be any naturally occurring amino acid
TGGSSSSGRKFVDRVSLIKGVWDSFKFFLLTRIVICRDVLARLVRLCFHDSLQCCQTIRDWLATKAHGDSVQAXRHHSLFNLVLKGFIFHPIQAEGXNSLLN

SEQ ID NO: 1024029 - protein, 59 aa, Homo sapiens
LELCLSEGAQPEEILVSGATRRDKMADREKKKKESILDLSKYIDKTIHERIRSWIVDVG

SEQ ID NO: 1024030 - protein, 45 aa, Homo sapiens
AAAYYYYYTARIQASNDVRGHAVGKMMLIDLLTARLPQTFSLSKK

SEQ ID NO: 1024031 - protein, 115 aa, Homo sapiens
RAAGAERHGRASVWAWYDRDQQNMSNVITTQVHRFTVNSTLQASQIHGGGSIDLFLRGSKKLQLSAHKVETEMETSSPTSREPRKMTGEETQVSMGTGAHSGQGGGLSLHLLTLG

SEQ ID NO: 1024032 - protein, 96 aa, Homo sapiens
STGVSTCIGSEVPSEDKFLPRASHFLTVDRLTRRNCNRTRQNRADLDPFTGLKSLDRSNNNQLSRSPNLGHMPELQTLNLSGTHISLFPENWLNRP

SEQ ID NO: 1024033 - protein, 95 aa, Homo sapiens
MIARIDAEKVFRKSLKSIPLLKTLSEIKSGIETRHNLDKGLFQKLNSDGILKSQTPQAFPLKSETSQGQAIIQQCPGTTDPMREAQMRTYRENYN

SEQ ID NO: 1024034 - protein, 346 aa, Homo sapiens
  misc_feature (315)..(315): Xaa can be any naturally occurring amino acid
LTPNRAPKKKMAISGVPVLGFFIIAVLMSAQESWAIKEEHVIIQAEFYLNPDQSGEFMFDFDGDEIFHVDMAKKETVWRLEEFGRFASFEAQGGMGQHSCGQSQPGNHDKALQAYTPITNVPPEVTVLTNSPVELREPNVLICFIDKFTPPVVNVTWLRNGKPVTTGVSETVFLPREDHLFRKFHYLPFLPSTEDVYDCRVEHWGLDEPLLKHWEFDAPSPLPETTEKRGVCPMPNYGPVGYHICLHFHHLREHFNRIDSIHLNHSPAPKHVRPYFYYIPLLVYLSSLQIPFYYFTFFISYFLLSYFFSPFIFLXLSLFFSLYLFSSYSLRLPLLLSLFSDHQTLY

SEQ ID NO: 1024035 - protein, 260 aa, Homo sapiens
LTPNRAPKKKMAISGVPVLGFFIIAVLMSAQESWAIKEEHVIIQAEFYLNPDQSGEFMFDFDGDEIFHVDMAKKETVWRLEEFGRFASFEAQGGMGQHSCGQSQPGNHDKALQAYTPITNVPPEVTVLTNSPVELREPNVLICFIDKFTPPVVNVTWLRNGKPVTTGVSETVFLPREDHLFRKFHYLPFLPSTEDVYDCRVEHWGLDEPLLKHWEFDAPSPLPETTEKRGVCPGADLWVWWASLLGNIFIIQGVRQSDAA

SEQ ID NO: 1024036 - protein, 31 aa, Homo sapiens
AVPGVITRSSQRWLGFHFRCHDLRNSTSLTL

SEQ ID NO: 1024037 - protein, 190 aa, Homo sapiens
MTPLSPGRPSRGQHLDDETQFRRRSTERSPSFPGSPGSLLPLLLYSWQMTTGKAKRGPRTEEAVPRVCRGHKPQKFASLLPETGRTVEFSFKSTCCTSVCNNHEITPVTANDKIKLVKMKLPMNQTGLNTAKTSRGQSIVRGGETSAYQAGARCTQGFRDRVFVSQGGESAGPIRRDIHAKAGVPALTAE

SEQ ID NO: 1024038 - protein, 100 aa, Homo sapiens
KNGPVQGACSDVFGLPALQVSDVYQHVTGEMMGGHAIRILGWGVEAMAHPTGWLPTPGTLTGVTMASLGNYSEDSVSAVEIEITKWWLEFHAPISTGKKI

SEQ ID NO: 1024039 - protein, 77 aa, Homo sapiens
ARYRPGRVVVAAFRAGEAFAGAGEFTGEAALVALVDRRVGAVVRHPGVAVVPHVFQRLQVVLQVRVFAVADEAAAGQ

SEQ ID NO: 1024040 - protein, 68 aa, Homo sapiens
HLARQSREACECLVLSWVPVADCGRFLGKAGEKLGDPGESLKAGAEEVKEMGDGCSKVREFAADSRVW

SEQ ID NO: 1024041 - protein, 170 aa, Homo sapiens
  misc_feature (166)..(166): Xaa can be any naturally occurring amino acid
MKRNNHEPGNTRLLQAQVRIGGKGTARSKRAPVVHRTADRADDRKRFFTCLLNVMFSGYNNISGYLTEVKYVVHNHMSYQQMIQFNDPKASGISGERTLSPLLAMLDKAADRYATQYLKPALVLDSLTSLRRLADALPKQSVDGKAPLATGEDDDDEVPDLVENFXEASK

SEQ ID NO: 1024042 - protein, 194 aa, Homo sapiens
LKAMKMIRDNLPPRLKNLHKVSPSLKGFLDRLLVRDPAQRATAAELLKHPFLAKAVPPASIVPLMRQNRTDEAQRPSPQAKEPPRVTPDPTECQVGGQGITELLPAREMLRVAPPSLLGVDEHPYYLNSSFGSRGLLEDTHGTRGEQCDGSQGTPALWEQAHPPNVPLCLQRRARGPPITGSLQWGSAGGGEND

SEQ ID NO: 1024043 - protein, 96 aa, Homo sapiens
PRYVLRVRNNAFDHDNLKIGIDEAHALGKKFYVVVNIQPHNSKLKNFIRDLEPIVAMQPDALIMSDPGLIMMVREHFPEMQIHLSVQANAINWATA

SEQ ID NO: 1024044 - protein, 305 aa, Homo sapiens
TPQATGCDRGRWRCLTRGAREDRHRGRPLQLGARADQELVTALMCDLRSCQTAGGMMDLDYVCEWEKWSRRMQPSCSILVSPLVLRLVPAEDLYRRFTMDLRQASDQDLTRMIHILEHSESALWTCTRSPRETATEAIYLPGVRTRSGSRPPVRQMPDGQIKVLDAMADTVGLNSWESSSGQPSGGGSPFVALSWLHNGVKLALERGEVGRLQLRGESSPESSSHRGITLSGGKPMEGWIAVTGRGLVTVFPGLKSQWVKVDDRRPESLCRLLGRVDLDDMASSRGNIVVGQEEEARVAVRIKVC

SEQ ID NO: 1024045 - protein, 61 aa, Homo sapiens
LQQHLAQLIMFSVTLYSAPRMLCGVVLIMFSERFTLLPGCCVIAVLIMFSEHFILLPGCCA

SEQ ID NO: 1024046 - protein, 125 aa, Homo sapiens
  misc_feature (4)..(4): Xaa can be any naturally occurring amino acid
  misc_feature (22)..(22): Xaa can be any naturally occurring amino acid
  misc_feature (32)..(32): Xaa can be any naturally occurring amino acid
  misc_feature (36)..(38): Xaa can be any naturally occurring amino acid
  misc_feature (50)..(51): Xaa can be any naturally occurring amino acid
  misc_feature (57)..(57): Xaa can be any naturally occurring amino acid
  misc_feature (59)..(59): Xaa can be any naturally occurring amino acid
  misc_feature (97)..(97): Xaa can be any naturally occurring amino acid
  misc_feature (106)..(107): Xaa can be any naturally occurring amino acid
  misc_feature (109)..(109): Xaa can be any naturally occurring amino acid
  misc_feature (118)..(118): Xaa can be any naturally occurring amino acid
  misc_feature (120)..(120): Xaa can be any naturally occurring amino acid
KANXINKQEHDIIKQKTQIPLXARELIDTILXKGNXXXNIFKNCLKEIDXXLYKNLXVXKNMKYIPTEDVSGMSLEEEMQEVARRTNYVKCVWTKKXLLYLSLVVXXSXPPPPPLPHXNXLFAGV

SEQ ID NO: 1024047 - protein, 111 aa, Homo sapiens
KRVVIAISPGDSVLHNFLWRIIRKITVVDGGDERADSVLAGLKAAGDAQWVLVHDAARPCLHQDDLARLLALSETSRTGGDPRRTSARYYETCRTGKNAIAHTVDRNGLWH

SEQ ID NO: 1024048 - protein, 49 aa, Homo sapiens
DEASGPNTQLRSISMEPFALVYFKLYLSLCIRTKKISWIMRMTAPVGFM

SEQ ID NO: 1024049 - protein, 103 aa, Homo sapiens
GAGGGLVAREARRRQARRLMSSEPGECRGGMRRGLARGSGGLGFGLPPVPCEAGPRPAREQQQRRRLLARLSPPPQPEPGEAKAGLGVWRGGGPLPENGNSLH

SEQ ID NO: 1024050 - protein, 411 aa, Homo sapiens
RAIVDQAVSARVRSHRQEQVAAWSSVGHFAYWAGSVLTTTVTRFPGLDRPDLRLPVSLTMEEHASQILDVEPPSESGIHLQTYGNYFLKTKFCPPVQSQAMDDLMLSPDDIEQWFTEDPGPDEAPRMPDGCSPEVAPHEDSKLPNTWLDPCQQTHLLGPCNQFCPFTRKPTMGSIRDTSLGILALLGQTKSCDLARTSPCPQQDVIANCAMTCPVAASGFDSKNHRHCDPEYAAIGPSTMQFTGTCRRIGEALEPPAMQRWLRITDGSGPLTSGILYHEVARTILQVMHEYGTEQNNTYYEHTAGEVPHMKTQPEDRGTETGPPSTATQLTIACTTDTQYCRRTDTGGPLSSRTNYNGDTPGKATENDNRSSRKQIDAEAANPGPKARIPETGRHSSSHRENKDIRNTTAH

SEQ ID NO: 1024051 - protein, 88 aa, Homo sapiens
  misc_feature (4)..(4): Xaa can be any naturally occurring amino acid
  misc_feature (9)..(9): Xaa can be any naturally occurring amino acid
  misc_feature (15)..(15): Xaa can be any naturally occurring amino acid
TREXEGKNXEQFTLXLTMMISMDKEGDSTILFRNSKGIPLAEITFTLCEYQGKRTMFIGGLQAQNGKFHIRKSRMRRKPATGYFPNAS

SEQ ID NO: 1024052 - protein, 53 aa, Homo sapiens
GTRSDITLQLVYLLNPHIISDGPHNHGRLVSPARKLHLPDHPGKGQRRPVGFM

SEQ ID NO: 1024053 - protein, 181 aa, Homo sapiens
  misc_feature (148)..(148): Xaa can be any naturally occurring amino acid
  misc_feature (150)..(151): Xaa can be any naturally occurring amino acid
  misc_feature (154)..(154): Xaa can be any naturally occurring amino acid
  misc_feature (162)..(162): Xaa can be any naturally occurring amino acid
  misc_feature (170)..(170): Xaa can be any naturally occurring amino acid
  misc_feature (175)..(176): Xaa can be any naturally occurring amino acid
MGTDKQIPQSSLIEYLSNTTLLETGPKIDSTGECLTGGGIRDTFPGGRFDDVVHTQNHLCCFSCTQKNLSLHLKTFCYTQDSHISNGAFPHIQSSSGIAFPGGSPELGHQVCTVIACIVSYGGWQHSQCFSIRIHCHSFFAWCSIGKXCXXMSXQHLRKASXIKCSRVLXSLRKXXKSIMQ

SEQ ID NO: 1024054 - protein, 282 aa, Homo sapiens
PGPSSTAARPTDSDVSLDSEDSGAKSPGIRATISVPAGGMAAFGSSVAASPPRPPAPPSSRSSQSPPREGEMPEEGIIEPGGPKVSGLFGSPRDEVSAEESSGVGDGLGTKAESSALALIQLCVTLGKTLPCDERSAFRMLYKCVAYGTRRIHQTSKFRLSIKYDTAMQHTLSLSLSLSLSHKQHTQQTDKTTDEDELPWVNDSGGMAVVILGPPARACIRAKGGQNTQARPPTLGSEGPAKSPDKATLVYQTAHTRGNHAPTQVAEQRGPGAKTQTTKAHR

SEQ ID NO: 1024055 - protein, 330 aa, Homo sapiens
GLQQRLKGLPGLLSSSWARRLLCLLGLLLLLLWFWGVLAAAGWAVLGWCLHSGCPVSLLCDAWAACLSLSAVPVIAGHPAALAAVPCGELRVSVVPAVVLGCACALCGQTGASCALDSVLPDLAVGVTPWGSCGALPVAAVTLFALLCSCALLSCCWLKLEMAVLLLLGGGFLLPACVALHAEGPQCPGPSGLPGPVARPPSLALPLGSGRDCVLLQEDFLAHRGLTHVYLQRIQLNNPTELLWPRCRLVGATCLASPKAFSSTLEKVRDHQFLIYSGRARLRHLGWCLLVLVGARRLVKRSSGSKTALDKTGAVGWCTVVAHNPQVLKS

SEQ ID NO: 1024056 - protein, 145 aa, Homo sapiens
  misc_feature (87)..(87): Xaa can be any naturally occurring amino acid
  misc_feature (100)..(100): Xaa can be any naturally occurring amino acid
  misc_feature (113)..(113): Xaa can be any naturally occurring amino acid
GQNVSPFNGDGNRCALVSTRQEVALPEHNAFTAGNIHRINNRLLPAVGTVILNDSRQHGRFFAEHNAVVISDAAASITWHYRQYAPXFFNPFHLTNRDFXLTANVSIRPVASXTDFTPPVELEGRVMPRPTERHSTSIRQPCRPF

SEQ ID NO: 1024057 - protein, 37 aa, Homo sapiens
MVLQALDDLDAMVAKVQLPQVHQVRQTLDLGQPVGFR

SEQ ID NO: 1024058 - protein, 226 aa, Homo sapiens
MRGSTHAIAVGRIEAAGGRGIGGSPLSLRGARQRMRPAVGHSLRWPNFAAAAPVAPGEPARCAENPVLSWAGEMVCLGAVLHGVLLALDLPEPRTRDPGSFLECVVGGQCRSSATGGCPRKLRAPPGIAPRPSPPGARGSGALRGSPRSPAVIPKLGYTAGLLFLPSICRLLFHPTSFTFSFPLIHPEAPRKWAHADTFRHRFPESSRIISQLVLLPLGEKRAPEH

SEQ ID NO: 1024059 - protein, 111 aa, Homo sapiens
ASVASVPRGPLAQPDISQGWRHMKIWDFGVSVFEPPVGNWLQELRNAEIPKSYERQVWLELMCCDRDIDPSGNGRTVTDFSAQRGELPSIVKSLIGAARTKTICAQNDSRS

SEQ ID NO: 1024060 - protein, 34 aa, Homo sapiens
GVNTVNSLSLSLQCWDLTWSGDVLGLGGGRVGFM

SEQ ID NO: 1024061 - protein, 52 aa, Homo sapiens
MQTQSILHIWCNEYHRTGVTFGNFRYQRCISAPVNIAQQTLLTRFDGQRITI

SEQ ID NO: 1024062 - protein, 259 aa, Homo sapiens
PRLRLRSPKDEAAPGFRSAGRPKGTAPRAAHAARARSADTPGMLAPQRTLRPKPPGQPQAHPEHAACRPGKGLELALLAVLHVLGARYGPVDAKDCTHEHTNYQTIATPRARCQPPDNGVMPDVRITRIPADSRKRSNSGAHQMCAFLLLHFRSRRPLSASDLSDAALHIYPLRNLLNGQTSGTGCRQRDSRPTSGAGNGATAQAPMGAHVPRECIHGFQTWRDLTTPSAAWGPEWSPSIPNGAFLSLLPLNPCGAHSP

SEQ ID NO: 1024063 - protein, 80 aa, Homo sapiens
EDPDTVVYPSWNQVNSSRCMDSTSFTRDAIHNAASDPVHSLMLHGIHCIQSGSIGPSCMKSIAVTLDAFHTAEWTPVHSI

SEQ ID NO: 1024064 - protein, 53 aa, Homo sapiens
MRQLSVKCFSQKSTWYKGYCCCCCCCVLLLVKRSSKNRSPAGELKRAPDPEWF

SEQ ID NO: 1024065 - protein, 112 aa, Homo sapiens
VPERPGLAVSGNLNWHSRLLSVNVQFLAAPGASFSALRRARPPAARAIVVATAGASDRRRDSQNAPVFSLETFGTGFQIASIHEQGIGREITEQRRQWFAEEQWLPVLDPGR

SEQ ID NO: 1024066 - protein, 104 aa, Homo sapiens
MGRGLREPAEQMVLVVCRRCNQMTGPVTTAFPSDSPMSSGHRCPPIQLEDLQEEAAVPGLRKPSFSRVVYIEHPGVHHERTVGSKWEANHQSSTWGGYSANSYS

SEQ ID NO: 1024067 - protein, 284 aa, Homo sapiens
MRTFPEAAASAAAGSRGRWALIAAVSPRRARRRPDGPRSSGPGRTLVPLTGGGSPARREENEEKGRQAKFDFQAQSPKELTLQKGDIVYIHKEVDKNWLEGEHHVTAWAFFPWLIIGRRLLDRKIEIPVGTIKGPPDYQVLEYGRGCGPDTTVQGGTWTVELVLPQGKSTSGLIRKVNENWYEGRITGHRGGQGALFPCLATLQGCTPCSPGSGICDQRHHRSPKRMLPPDLTREPRAGPQTQENHTQQNPNPHERDGKDQSGENRHQKLESEAKQKRPTEEKD

SEQ ID NO: 1024068 - protein, 34 aa, Homo sapiens
MTYGQITLTGIRAHANHGVLASERELGQPFSVDV

SEQ ID NO: 1024069 - protein, 88 aa, Homo sapiens
EGNWLKNGQPGNCESLLPDTSLMEYATTPVPQSTVFWQQGHLGQWAIWTKGGVWGPGWQLWPKHENLVFLPPLLLFPQSCFSSNLLCF

SEQ ID NO: 1024070 - protein, 131 aa, Homo sapiens
  misc_feature (48)..(48): Xaa can be any naturally occurring amino acid
MKHEEGYIVSVSRLLWCQKPSSGHCLILHRTDIYVCAVAECCRHMEIXCISRLADAVAGSEVEEAHMSVSQGRYTEGERQQRVSRSKGGPGSLEIRDENCKDFGLTTWRCWIDTTRTVSVERQWSWLQAIN

SEQ ID NO: 1024071 - protein, 272 aa, Homo sapiens
MSTEAVCEPLRTLAPVSAAVSAASCRTEPCTLEETPGGGDKLRSAANQPQPWVACSYWPSCSCALRGSPVSVAQCSFSFSQMFWKETAQEDRAFRVRHSLGDAPLQGVLGGRPRTIPLPTVHLPLLGTGEPRAVLGVSAGQSGLSLSRGPGGRGAWWLRGVPPSKGWNRGLHGSRSVRLACVPRVRLTDVSLALSEAGPQRTHGYLSLRGSRHGDRMTASDRCGGSRSTGVRLSSNEKGVCAGYAVSPFSWGAKKACCPRLRTTSGTRSKVL

SEQ ID NO: 1024072 - protein, 102 aa, Homo sapiens
MASKEMFEDTVEERVINEEYKIWKKNTPFLYDLVMTHALQWPSLTVQWLPEVTKPEGKDYALHWLVLGTHTSDEQNHLVVARVHIPNDDAQFDASHCDSDKG

SEQ ID NO: 1024073 - protein, 107 aa, Homo sapiens
  misc_feature (94)..(94): Xaa can be any naturally occurring amino acid
  misc_feature (107)..(107): Xaa can be any naturally occurring amino acid
MASKEMFEDTVEERVINEEYLQWPSLTVQWLPEVTKPEGKDYALHWLVLGTHTSDEQNHLVVARVHIPNDDAQFDASHCDKRQRVKLVALVLLXEKLNVKLKSIPKX

SEQ ID NO: 1024074 - protein, 97 aa, Homo sapiens
HPTGSSPRSSEIYPKRKEVVLTARDLINTDISKMFELEFKAMIIKILEGLKKHRKSLLVEIKELKSSQAEIKNAISEMQSQVEAHKNKDEQIRKVNQ

SEQ ID NO: 1024075 - protein, 108 aa, Homo sapiens
MGAGEVRVLGGTEAHEDGIPPEIHGPLQQMVIEPQSLYTWDIVCHEQIPKGKAYARCLKDTKPVNSVFCPLFPFHRDTLEAGYGSFMGVTGQTLVHWTDITTVEYYTD

SEQ ID NO: 1024076 - protein, 484 aa, Homo sapiens
MAAEGDQLSLPPQGTSDGPEDTPRESTEQGQDTEVKASDPHSMPELPRTAKQPRSPAPQVRKMDLSTTWPRSFPASLREQHERLHDRLMAFVRHAHAGSTAREGQSSCILRLGHQHTIHAPRPTASIPRELIQEFQGLTWPHLSRQLGGVMSIGHRPGLLLHPAARQEELEQFSSPSVKNEALLMILGKASAPAELCQFQAAVFHAFLSNNRKLYKKVVELAQDKGSYFGQPGAGLQGVQPGDDGRARPPARRCCQEIRTMMTQLKSYLLQSTELKALVDPDPALLKGGSSKAIVESALYKCVLKPLERKPIKLNCPVQFKEFQRRQGIGFRFARKLQGRNQVRDPWATTTIDLGVTTSVPEVPMMEKILQEVHQHAKAYSPEKKISILLKTCKLIYDSMALEPRKPYGADDFLPVLMYVLARSKLTEMLLNVEYMMELMDPALQLGEGSYYLTTTYGALEHIKSYDKITVNRQLSVEVQDPSR

SEQ ID NO: 1024077 - protein, 297 aa, Homo sapiens
AAAPAQPNPHGPEVAEGPGAGGDVVLEGLELVRAGRWTLAPAHGREPVAPGRARSPNTTTVASAAFLGLSVEHGTQNLVPIQSWCHLKPSFPEHEPQSKLTPSDTSTLQPYCTFRYLVTDRMDDVGAQCFKSRKSSLVTFHTQLSSDDERKKVLLDPYIATLDSGLGQVSRGFDSLVHHLLIHRPRTVVSKLRIMERLTGQARQTRSTTRSLQAMVAHDAEPTGLVGTWSPRSHQPESGCRDGAAPVPRPVLASSCSWRALRTSPEDARTSAALAPELLRCLVGRLPAPGSVRRCRT

SEQ ID NO: 1024078 - protein, 334 aa, Homo sapiens
GRPHLPNPTRTVRKSPRRPGAGGDVVLEGLELVRAGRWTLAPAHGREPVAPGRARSPNTTTVASAAFLGLSVEHGTQNLVPIQSWCHLNALLPRFLNSLVHHLLIHRPRTVVSKLRIMERLTGQARQTRSTTRSLQAMVAHDAEPTGLVGTWSPRSHQPESGCRDGALRPGPVPLLLACRLVPWERLFPSPSAPRDCTAPSAPLRRTPYKGPRLAALPAAGGRCARAVTRGLLARCPTQARVFPGRPMNGGGPREPGRAECLGEGLPFIQRCLQGLPEGSNAEHSLGLTLPLRRGKPGPHRLYLLGESCAWGGPGPWKIRGRSLLGRSRGPGEP

SEQ ID NO: 1024079 - protein, 50 aa, Homo sapiens
HEVKGGWCGQYRCAVVVEGVGWEDKVGGAGPSEPQARGRSQCEVQPFAKP

SEQ ID NO: 1024080 - protein, 50 aa, Homo sapiens
MTRNMTLSYGEVVLTCQACLSPGQVRLGDNYKATAAFNLFMVKRKNTTPS

SEQ ID NO: 1024081 - protein, 73 aa, Homo sapiens
RPVAFTIDPEIDAANNPHNGHKKRPEENEPHHQFTRVKVRYARGMHNTRHNIKNDTMRLIIFRIPRLLKTQDE

SEQ ID NO: 1024082 - protein, 58 aa, Homo sapiens
MGVCRVTIWYKRGLVTTMEVVQMEIEWFHGLAEEVWTFIYRSNKKCYMTKTTPKEILR

SEQ ID NO: 1024083 - protein, 58 aa, Homo sapiens
IWASVFKAPGHLIRFLMLTLHLHHKPTCQRSLSLEDCRLTPLLTLPRYWDLRCIDEAK

SEQ ID NO: 1024084 - protein, 104 aa, Homo sapiens
  misc_feature (46)..(46): Xaa can be any naturally occurring amino acid
MAQSKSGWAEARESISPPKVLSCNGVESKFKDVGPHRTRFGAVGLXSTGSWLGVNNRFLGPMELMGLPHSMAWRCERSQHWEPQSVSTGKLIPRNKSTLLWPRV

SEQ ID NO: 1024085 - protein, 56 aa, Homo sapiens
ELTTVMEMARYQYNKQQHCHQPRDTPVLPTQNHLPPYSESWARNEYGARKRVVGKK

SEQ ID NO: 1024086 - protein, 243 aa, Homo sapiens
RRAHPVLEALVGLGEAGLRKSGDCCTDSGTMNIFDRKINFDALSKHGSHITPSTQQHLKKVYASFGLWYVCGRAAGAYVHMGHSFHSGLDLLVWLGLPGLLMIWLDGKTYIDPETEQKRLGFLAGLCIPYQELCLGPALEFCIAVKPMDPSHHAFMGTVTESLICFITQMDIYAKGAGSYLLSAEVSWMSSPEAGCLSLPWGNVDFGSIWLFQAKLYVGLVVIVGFGLFDTQFIIAKGEHGDQ

SEQ ID NO: 1024087 - protein, 255 aa, Homo sapiens
MKEHACDVRGRTDDNVPRVHPARPSVQVLSGYDWTLVPMPVRCQRLPAKAMPDVNAAHERLQWCGLRLARRKHRGPVPCTCDNAELSKTLGKLWRLLNESDKRPFIEEAERLRMQHNERPPGLQVPAQCWRKNGDGLARADGWSAPCGGGLSKVGPAAIHGPLQELPILDHLAPSEKGSPNVRLGNPEAPLRPDAMGLTSRFKQPRRHDAAVVGNGRTRKRERAAPWARAGSLTIDFGTWSLGEIQPQGNVQNGD

SEQ ID NO: 1024088 - protein, 58 aa, Homo sapiens
  misc_feature (56)..(56): Xaa can be any naturally occurring amino acid
NGNSGCWENLRTSASGPALVTKDSVADPHNLKICCPSEWGSRPEQQPPNPDGIQRXGG

SEQ ID NO: 1024089 - protein, 81 aa, Homo sapiens
KIIEVISKAPFIQITGLGGSALVGRDLSFKLMKIGYRVACEATRTYNATVSQALKKGDVQIVISYSGSKKEIVLCAEAARK

SEQ ID NO: 1024090 - protein, 66 aa, Homo sapiens
WRDYSQGLTELSDAHVPRYKKEGADFAKWGCVLKIGERPPQPSHIMENANVLARYASIWQQNGIVP

SEQ ID NO: 1024091 - protein, 160 aa, Homo sapiens
  misc_feature (117)..(117): Xaa can be any naturally occurring amino acid
MATSSMSKGCFVFKPNSKKRKISLPIEGTIFNKGKNEPEDSSFEFRKLISLMMGPPIVDLENWANVPRREFNYKPCVTQLLELEFLGAKSSIFWGFPKGNSPKSFGAGSPIINFPRXFSTLGGASGASWGVEIGAPGSSLGVLDHFPRKGLKQERALFQK

SEQ ID NO: 1024092 - protein, 124 aa, Homo sapiens
MATSSMSKGCFVFKPNSKKRKISLPIEGTIFNKGKNEPEDSSFEFRKLISLIWQQMKSENERLQEEFNKNLFDNLIEFLQQIHIPGGIFPPKEKANFKADLGGQIKLREIPTAALVLGVNVTDH

SEQ ID NO: 1024093 - protein, 65 aa, Homo sapiens
TEDDLGSQLRNRSVVITGRASRAEATLQKHRASDVQSISDYEKFTKGMDDLGQQCGRTDRPKERG

SEQ ID NO: 1024094 - protein, 30 aa, Homo sapiens
MSGYLYAVHGHAWRVAAPGKSHPLRRQKDA

SEQ ID NO: 1024095 - protein, 56 aa, Homo sapiens
AELTQHIMLDQAKSARLHYSSQQHWILNPMMQGQRLNQQPNGYQSASLTTDARQAL

SEQ ID NO: 1024096 - protein, 109 aa, Homo sapiens
RVTALYDEENSSVRMPLLPSGTLSRCEQKAHWSTDLSGVNKRSLHSAPLQVTATIHINGKLQGVTSVQDGSPSREGASSFISCKAHSETDNANHLPDRPHMTYRHVFIF

SEQ ID NO: 1024097 - protein, 347 aa, Homo sapiens
  misc_feature (297)..(297): Xaa can be any naturally occurring amino acid
  misc_feature (347)..(347): Xaa can be any naturally occurring amino acid
MKSRPSGPPTLAASFAHLHRPPERNDSCEERTWQPIYRNHHRKAPRSCLPSPESIAGMSGDEVIGQTQKLTCSPPGTTSPKHYSRCLPFLKETFAISTVKGKGESPPGKKCDQGGGGRRPLGLPPVPPMCPAGPSSRFHSTWFRHRCGHFLTRPHNSHLLIHFLHWIKIMLGHGRLPSTVSNVRAWGYAGQGGYAPMSVEPVEKRGGPPGLKVCRFNWGLFSLGHKQASKGQVWHWSRMGWIPERSDQGPSEGLYNESLYVTGMAWKLPVKAPGPLHDEVTDEDSRQPTGTHEPNRXGTAGKRHKSDNTREDRHEGQSTNRDSIGGRTEPHQRHQGDSDDERSLRDX

SEQ ID NO: 1024098 - protein, 146 aa, Homo sapiens
KALLAHFYAVANWDIPDGFLCPPVPGRADYIHHLADLLAEASGTIPANASILDIGVGANCIYPLIGVHEYGWRFTGSETSSQALSSAQAIISSNPGLNRAIRLRRQKESGAIFTGIIHKTEQYDATLCNPPFHDSAAAHGQVVSVN

SEQ ID NO: 1024099 - protein, 188 aa, Homo sapiens
  misc_feature (67)..(67): Xaa can be any naturally occurring amino acid
  misc_feature (72)..(72): Xaa can be any naturally occurring amino acid
  misc_feature (75)..(75): Xaa can be any naturally occurring amino acid
  misc_feature (80)..(80): Xaa can be any naturally occurring amino acid
  misc_feature (91)..(91): Xaa can be any naturally occurring amino acid
  misc_feature (100)..(100): Xaa can be any naturally occurring amino acid
  misc_feature (118)..(118): Xaa can be any naturally occurring amino acid
  misc_feature (133)..(133): Xaa can be any naturally occurring amino acid
  misc_feature (143)..(143): Xaa can be any naturally occurring amino acid
  misc_feature (146)..(146): Xaa can be any naturally occurring amino acid
  misc_feature (148)..(148): Xaa can be any naturally occurring amino acid
  misc_feature (158)..(158): Xaa can be any naturally occurring amino acid
  misc_feature (184)..(184): Xaa can be any naturally occurring amino acid
RGRAPPWGRSPRVPLAVAAADACGGGGFGVGVRWRQQAQGPLSLLWGWLWSERFWLPENVSWADLEXPADGXGYXRGRHXLSVFPLAAGIXFVRLLFERXIAKPCALRIGIEDSGPYXVPNSNAILEKVFISXTKYPDKKRLXGLXHXQLDWNVRNTXHTAGFAHSGRNFTDNAPQPPYLRLSXETHC

SEQ ID NO: 1024100 - protein, 41 aa, Homo sapiens
  misc_feature (3)..(3): Xaa can be any naturally occurring amino acid
ARXPAEVEGIRESHDAISGERILVGPDTRREESCRPVAQRD

SEQ ID NO: 1024101 - protein, 336 aa, Homo sapiens
AIDPSAPSTVDSIAGEMKRTVTERPKVAQPPYPILFPCPYSLWRPTSPPRDILLPILVSALPATLFSFSDMLYKMDPHQIMESSPALVLYHHLDAKNSKKVLRRVCVYKRKCRDIRPDASLSDVLGLGLGQLLLTFLNSSSPGSPRPCAPINPGVAIHQDSLVDSYKHFLQVSCSCVQLCDNTILAVCQGPCLDHGSLASSSLGTIVCFQKSTVLDDQQKRAEDRPMPFTKKCADEQHLTLLVPMACSQISHAVSQQLLYQQKESSAIEGVTPGSLPCCALIGPWRFEQVRYSREVVSSCRAPGQGDSNHPPRFAQKIRKRDKRRGDPANTSSIKG

SEQ ID NO: 1024102 - protein, 42 aa, Homo sapiens
ESSRYPLTHAQVAVLSVMSEEQSCTERGSSEQKWLINLVLIW

SEQ ID NO: 1024103 - protein, 55 aa, Homo sapiens
MQVIQSEKTNPHTIRRMTRHRGTELRMRHATHSQTPAHNNKANRRENRTNNPRDH

SEQ ID NO: 1024104 - protein, 183 aa, Homo sapiens
MIFPYQFYGQIITKTGGNQGMLLALEGYPECQWYCDDAEYLKEVSPSGASWNQVIFTLGITRVDHIDAKRPLSNVTDLQVASFVDQNLLENSKITREKFFSKLKQLKKLHIKAHQADRVCGAHFPNLWQDLQSYSITKITKAGLFCKDWANLTFIPSSRDQIGLAKQDACFQLLLQGPEFHSN

SEQ ID NO: 1024105 - protein, 73 aa, Homo sapiens
RGSRTADEDPEPEGGAGLPEEEHEEEMNALRGQVGGDVNVEMDAAPGDAVGFHLLLVVLLQGKASSSLVPLSD

SEQ ID NO: 1024106 - protein, 67 aa, Homo sapiens
AHNRHSHKLQGNSRLSCTRVRNLGLLPCGHLPLLKSKSKGGGKGGFLLFKPCTLLWRVKSRACGERG

SEQ ID NO: 1024107 - protein, 50 aa, Homo sapiens
  misc_feature (1)..(1): Xaa can be any naturally occurring amino acid
XPHEGSLDLSSEMGTVSVGVPEGTAVLADCHSDFGRVATDLPRQDHPDAL

SEQ ID NO: 1024108 - protein, 103 aa, Homo sapiens
EFGTSSGCSWTEGTLGYGHRVTVTQMAQRGTAAAWPLLPKPAWSMQGAPEGGEVSHGAPSFIYGHGRPIWEPSYSFPFLFGPQMSLDAQRSFGGAFIWGSGSQ

SEQ ID NO: 1024109 - protein, 75 aa, Homo sapiens
RSCPPLPTKSVYWVLLHIASCALVQPMVQGPTCLSVSKQRFLKEELDFYFQQPGLTGLWYAVCELFRCAKLKAGP

SEQ ID NO: 1024110 - protein, 213 aa, Homo sapiens
MGLAGVCALRRSAGLYTRRCGAGGQVCVQRQHRLVHVESESVAVWLEVLQFQQSQLRAMAPIKVGDAIHRQCVGALNGEPGNKVNLAELMHKGKKGVLYESSCGALHALDVPRHNCQRYSGARLERSEGQGSTRWEAMSECNCCLLMTGRVGPSPQGRMATVRTPGLITTEGLSPQETDLELDDIAECPSIAELDVIKRFSMVEQGMALSEKP

SEQ ID NO: 1024111 - protein, 174 aa, Homo sapiens
  misc_feature (134)..(134): Xaa can be any naturally occurring amino acid
  misc_feature (138)..(138): Xaa can be any naturally occurring amino acid
  misc_feature (148)..(148): Xaa can be any naturally occurring amino acid
  misc_feature (160)..(160): Xaa can be any naturally occurring amino acid
  misc_feature (171)..(171): Xaa can be any naturally occurring amino acid
MIGQATAADQEKNPEGDGLLEYSTFNFWRAPMCQHPLLRTGLALRAKTSLSHHLALMVFPSQAPSFPLLSHFKSVFSPLMCWLVLMNLPELRSMYSLIYLATPFLSKSLKSQRKWSSNGVLGHRDSSFPPKSYXATSXTWSPRALTLXETILLIYTHHLXSILSAVHNISXYQL

SEQ ID NO: 1024112 - protein, 206 aa, Homo sapiens
MIGQATAADQEKNPEGDGLLEYSTFNFWRAPMCQHPLLRTGLALRAKTSLSHHLALMVFPSQAPSFPLLSHFKSVFSPLMCWLVLMNLPELRSMYSLIYLATPFLSKSLKSQRKWSSNGVLGHRDSSFPPNLIRNRAVGPGSCLVCTGHTGWRIKRQKSNFNLAGNTNLKGEPRMASHTVTEESLCPFQPGAAIHRNSLIVVVTYL

SEQ ID NO: 1024113 - protein, 41 aa, Homo sapiens
MGVGPGNPNVNTPGSLGFGHGAAGLLNALSFFTSSLYPSPP

SEQ ID NO: 1024114 - protein, 40 aa, Homo sapiens
  misc_feature (24)..(24): Xaa can be any naturally occurring amino acid
  misc_feature (32)..(32): Xaa can be any naturally occurring amino acid
MLFSLIQPTFGFQPRQADKHHRRXIKNSTFTXSTTGIFPA

SEQ ID NO: 1024115 - protein, 91 aa, Homo sapiens
SRGLRVDMLIWELGGWWPPSVPAYHRYACIPSLREKFPFLEAELGLLDLSWCNVMSSEFMEADRKEACSFMAWDLISDLSTHHHWIDCFAS

SEQ ID NO: 1024116 - protein, 46 aa, Homo sapiens
CVLVHIHKHLKCIKEQYGQQHVSFASPKAVFLLTLSPLLPYGPGPN

SEQ ID NO: 1024117 - protein, 155 aa, Homo sapiens
MEEEVVEASILVATGVVVGAGKRGNQSGTECDGGATIRSMRVVFIMSRNRKMDWVTKKPEIHLGNLDSCAEKRDPRILAKEMTKIEYRAWKTPYTTSKTSSSNILRWMLDQITDQTGGYGSLARGCLGRAGLPSALDIVGPDGLVYAVEFSHVLA

SEQ ID NO: 1024118 - protein, 59 aa, Homo sapiens
YASEALVVMAKAAVNIWVRLSCRHDFSAPGVETARSVTATLCFYVWKDLSWKVRRVIFL

SEQ ID NO: 1024119 - protein, 52 aa, Homo sapiens
  misc_feature (40)..(40): Xaa can be any naturally occurring amino acid
MLRSVRCSPLVMLYTRRKVAYRRLPGLPATLRARHFHSRXYRQRTAAMGNRY

SEQ ID NO: 1024120 - protein, 255 aa, Homo sapiens
MGHDYRGGVLTVKAGPGYRDRPPPSILCIAIHHGLAPLPLPTEVCLIYECRYICLASDIPQRAPELSSYLVCTGWGGSALSVSPLRCLLWHPLPAIAVDNNIPFPIAIENLDQSGLLRFAPGTEESYGASSPLSRHDLAYSVSPSSPWPVLSLELSVLRSFHGWESLTAASSLTEAGLALLLQVSFSHSCGCRNLIYREEPVAAGAPATAALTVLTTHLGQPFLAGALVASSFSIPFTVAKGWGEGMESNAADHG

SEQ ID NO: 1024121 - protein, 44 aa, Homo sapiens
MNTKKKQNTTTKITNTKHHHPHQNTARPSDKPNRHTASVPTQPA

SEQ ID NO: 1024122 - protein, 186 aa, Homo sapiens
RWLPPPAHFSDVVLSLFSLLCRLSAPLFLCTFSPSLGFALSVESLPLSSYSSFGFLLSSSFVFYLLSALCSSVLSSACDYLFVRSPPYSASPLVGVREPLYGLISRAFPPKGSSIWPNARVSGPSNISPLGVVGATSGHALLVDVSQTTRAPVSLRFGRVPRVCSWKCPRPLGLQFNWAIHRTSYF

SEQ ID NO: 1024123 - protein, 129 aa, Homo sapiens
  misc_feature (116)..(116): Xaa can be any naturally occurring amino acid
LELVDLAGGTNLLDLMKLEIETPTHLIDVNGLGLDKIEVTDAGGLRIGALVRNTDLAAHERVRRDYAVLSRALLAGASGQLRNQATTAVICSSARAAPIFTTPISPAISASPGAAXALEGLASARGGRR

SEQ ID NO: 1024124 - protein, 60 aa, Homo sapiens
VLPVLCQYTNTHWYWGETCEFNIAKSLVYGIVGAVMAVLLLALIILIILFSLSQRNRRIR

SEQ ID NO: 1024125 - protein, 111 aa, Homo sapiens
TVDDESVLQGRQDVGVQDARAGSELEPAAPGEIRRCSAARMACELGAGSVPECSVCAGIVCVVTMRDGVAAALVAHLVPGTEPPLPTARVLTGCSLVVHAPVPWPLPCAVP

SEQ ID NO: 1024126 - protein, 154 aa, Homo sapiens
MSEAGEATTTSKTKPPAGSDGGGRRVSTRTPAPKKPRVGKAGAPPRARGPLGDRPSNGRKGKTHEVGDQRAPGYARGAPHGPAHDVHVCSPWPGPAAQRATETAGEHITYGSLRGNTKLSSLVRTQWLKSGGFNAVPEKLGKYWGRLYYEFRKE

SEQ ID NO: 1024127 - protein, 234 aa, Homo sapiens
SGLLLRTSLALPHHWHQAPRHPLWLQENGYFITLLWMGLALLGGVLGRPAEQHRMAQVSVQPNFHQDKFLGRWFMLRALASNIEAGSTEKEGGVVHVQVCAWPLPRHGGLNLTSDLPLGKEPCVRPRTMLLQPAGSLGSYKLTGVPTGGSTYYRSQWWKTDYEPGTRCCTSQGSKVRLDEDFRMATLYSRTQTPRAELVGGKFTAFCKGPGTGTERYQWSFPAPEPMKVHDRNK

SEQ ID NO: 1024128 - protein, 33 aa, Homo sapiens
  misc_feature (30)..(30): Xaa can be any naturally occurring amino acid
  misc_feature (33)..(33): Xaa can be any naturally occurring amino acid
MPAGKQRQGFYWRYCCNRRCFQRSFDRFWXFNX

SEQ ID NO: 1024129 - protein, 87 aa, Homo sapiens
MDLLIVILSTSMTRCDHCGASCMVSSSSTLWWSLRALQTAASTFSVTYVAALQVMVPIMEGSHGSTDGHDCHSCWQTSADWAKRAEI

SEQ ID NO: 1024130 - protein, 150 aa, Homo sapiens
MARTKQTARKSTGGKAPRKQLATKAARKSAPSTGGVKKPQSANKGPGEPVDSIDAAFRSVNQGKVQNLELGSIPGESLAPFQERFRGGRGKNPGTKEKFSKKNPRNLGKRLSRVGRPSPKSQEIEPDLATERKGIKARHNRRRNNPIVGQ

SEQ ID NO: 1024131 - protein, 115 aa, Homo sapiens
MARTKQTARKSTGGKAPRKQLATKAARKSAPSTGGVKKPHRYRPGTVALREIRRYQKSTELLIRKLPFQRLVREIAQDFKTDLRFQSAAIGALQEASEAYLVGLFEDTNLCAHPR

SEQ ID NO: 1024132 - protein, 156 aa, Homo sapiens
  misc_feature (18)..(18): Xaa can be any naturally occurring amino acid
  misc_feature (22)..(22): Xaa can be any naturally occurring amino acid
EPHRYRKVGGEQWPGVAXLCGXSAHSSPARYRPGTVALREIRRYQKSTELLIRKLPFQRLVREDRAGFQNRPEVSERSHRCAAGKTKAWAGGGLGGFRSPSGINSAALVLNRRLAKRTWWVCSKIPTCVPIHAKRVTIMPKRHPVGSPDTGERELK

SEQ ID NO: 1024133 - protein, 86 aa, Homo sapiens
MARTKQTARKSTGGKAPRKQLLHGRQGALSTAGAKNPHRYRPGTVALREIRRYQKSTELLIRKLPLSLLPPRPATTSTHPPSHAPP

SEQ ID NO: 1024134 - protein, 115 aa, Homo sapiens; identical to SEQ ID NO: 1024131

SEQ ID NO: 1024135 - protein, 282 aa, Homo sapiens
ASSGRREEGSQAEPRPYRRGAAMWPPELRTRHVIPEACRQASQYRVPSGSPELRALDDGAGLSIVLSQRPALLPETRDRDTSVHHLYSAIVASSAICHFTHRSLMHGGIHGMTLDTTIHLRDYAMTTIEMTQMRKRTYDAEAQLDLVRFTLQALVYQPVERRALPNPNTYVAISPHEFKQGRPSTDRQNEVHTLKHIGGAYTHQNAPGDATTTRIKTGGLPTLQTRHPHVARGNRTQSSSTLTEHTSRHVLIQARNEKRRQTNSPISKTPHRTGTHTIAQRE

SEQ ID NO: 1024136 - protein, 567 aa, Homo sapiens
KHDDNKKQNLHAAVKDSLEECEVQTNLKIWREPLNIELKEDILSYMEKLWLKKHRRTPQEQLFKMLSDTFPHPHETTGDAQCSQNENDEDSDGEETKVQHTALLLPVETLNIERPEPSLKIVELDDTYEEEFEEAENIVPYKVKLADADSQRSCAFHDCQKNSFPYENGIHQHHVFDKGKRDFLNLCLRNSSTYYKDNSKGETSNTDFDNIVDPDVYSSDIEKIEESTSFERNLKEKNIGLESNQKSDDSCVSLESKDTLLGRDLEKAPIEEKLSQDIKESLELSNLYKRPSFEESKTTKSSLLLQEIACRSKPITKQYQGLERFFIFDTNERLNLLPSHRLECNNSSTRITLAEDREWIPDHSLSEYADNAIVLGVLQGAQSPSSSRKQQKMGQKSQRPSTANFPLSNSVKESSSCLSSSHPRSRSAAAQSSSRAASEISEIEYIDITDQNELSLDDTTDQHTLDNLEKELQVLRSLADTSEKLYSLTSEEFPDFSSQSLNISQISTDFLKTSHVRGPCGVEELSCSGRDTKIQSLLSLSESSTDEEEEDFLNKQHVITLPWSKST

SEQ ID NO: 1024137 - protein, 567 aa, Homo sapiens; identical to SEQ ID NO: 1024136

SEQ ID NO: 1024138 - protein, 100 aa, Homo sapiens
HIGLYCLCVLLVCGVLYRWVSVCARPCLPPLLTYRHVPPPRFYLIGRIQALPESPGPIVKKPPSFISNLIQKPTAQSYSDRLRKFQKLNILILLTRMSFP

SEQ ID NO: 1024139 - protein, 223 aa, Homo sapiens
YWGAHKIPQSHSIWNATGNRWCSWSLSQARLLTSFLPAQLLRLYQLMLFTLPGTTLFLSYGDEIWAWMQLSLPGQPMEAPVMLWDESSFPDIPGAVSANMTVKGQSEDPGSLLSLFRRLSDQRSKERSLLHGDFHAFSAGPGLFSYIRHWDQNERFLVVLNFGDVGLSAGLQASDLPARASLPAKADLLLSTQPGREEGSPFELERLKLEPHEGVVVRFPYAA

SEQ ID NO: 1024140 - protein, 147 aa, Homo sapiens
MEAPVMLWDESSFPDIPGAVSANMTVKGQSEDPGSLLSLFRRLSDQRSKERSLLHGDFHAFSAGPGLFSYIRHWDQNERFLVVLNFGDVGLSAGLQASDLPARASLPAKADLLLSTQPGREEGSPFELERLKLEPHEGVVVRFPYAA

SEQ ID NO: 1024141 - protein, 223 aa, Homo sapiens; identical to SEQ ID NO: 1024139

SEQ ID NO: 1024142 - protein, 199 aa, Homo sapiens
YWGAHKIPQSHTYLKCHWQSLVQLEFVSGKAPDFLLAGSTSPTLPADALHPARDQGPLFSRLTGTEIGLDWQRALSVEQGQSEDPGSLLSLFRRLSDQRSKERSLLHGDFHAFSAGPGLFSYIRHWDQNERFLVVLNFGDVGLSAGLQASDLPARASLPAKADLLLSTQPGREEGSPFELERLKLEPHEGVVVRFPYAA

SEQ ID NO: 1024143 - protein, 149 aa, Homo sapiens
MPLAIASPIVQLAFFNRATPQGHAVAITYSPGGAGAGRTREESVGDHAKEPPGDGAGDGQSAAHRLDTLWLQPRHGITELGTAAQLGCHGSGLNPSGSLREAGGAARGAATQAVQLPARSSADPSPGGSCALRFAAPVCEVSSYNKCEQ

SEQ ID NO: 1024144 - protein, 189 aa, Homo sapiens
ERPGSPHPSLVPGVVVGSQESGVGKVKGARLEKWGLGWRNRHLSGVKRQRRGYWAEFFRAESGPSGSQLTRGGAGAGRTREESVGDHAKEPPGDGAGDGQSAAHRLDTLWLQPRHGITELGTAAQLGCHGSGLNPSGSLREAGGAARGAATQAVQLPARSSADPSPGGSCALRFAAPVCEVSSYNKCEQ

SEQ ID NO: 1024145 - protein, 84 aa, Homo sapiens
LSTLRISCGPLGVGLLPEADPSFGAAGSDGSVSRNVFQAPSGRAQRRSEGMMGISGILVVPWGGQGHPVSKWRQGLGAIGLQQS

SEQ ID NO: 1024146 - protein, 77 aa, Homo sapiens
LEIPLLPPRCVLGSVNSLCWGGWGLSRSHYQGRYLTRAPAPSTSESLSPAYQQPVQPPYGDTKHSATSCFISTWKAL

SEQ ID NO: 1024147 - protein, 124 aa, Homo sapiens
  misc_feature (119)..(119): Xaa can be any naturally occurring amino acid
MPSRDALVRIWQEVALAREDASPCLRLGAFEIRRYQSQLWWIKSVTGQSENIVPWQTWLQPLELPAGLGSDSLMRGGGIRPPRADEAVSVRFKAPGLLHIFGRNGGRKLKKSGKSWACXRGYVT

SEQ ID NO: 1024148 - protein, 108 aa, Homo sapiens
  misc_feature (15)..(15): Xaa can be any naturally occurring amino acid
  misc_feature (21)..(21): Xaa can be any naturally occurring amino acid
IIDCFHVIFKEEEKXGWLTTXLDSRVDTFWYYAKGGRWVLPIPVSEIPVEASSEPERNGQVVLQHLVGFNTDSQLRKSVLNGLVATEVLMWFYVGEIIGKRGIIGYDV

SEQ ID NO: 1024149 - protein, 122 aa, Homo sapiens
RIGADGLSIARTMGHVVRNLVEKTRGAGERGCELVKPRMGHTYGVIYAKVELVLPIPVSEIPVEAIQRPEKNGQVVLQHLVGFNTDSQLRKSVLNGLVATEVLMWFYVGEIIGKRGIIGYDV

SEQ ID NO: 1024150 - protein, 101 aa, Homo sapiens
RLTSSSSSSSSLLFPTFLHSLPSPPLLPPPRPAQVAASLGNCSPFRSRGSCPVPGRERAHRGPQDTRCESRGRCAWEEGGGRRRGHRGAGYNGATGKRNGS

SEQ ID NO: 1024151 - protein, 339 aa, Homo sapiens
RLTSSSSSSSSLLFPTFLHSLPSPPLLPPPRPAQVAASLGNCSPFRSRGSCPVPGRERAHRGPQDTRCESRGRCAWEEGGGRRRGHRGAGYNGAKDPAAQSLMIMNKMKNYKRRFSLSVPRTETIEESLAEFTEQYNQPPQHGGMRTCSLGPSGRDPTEECSTYLPQQTSGEEPGQLLTLDVQFQLAGRTRSRFSMEREGHLELLTPGRWDRMHAQGVCTGRAACLNSQTLTAQQEALSCTWISACPKEFLTEATDGEPQIWPKAGSDRMSRPELPVQTFGFGKLETYVKLGQKGKRGTHNATGVQREQKTGRRTKYGPEKRSGLKHEEEAPSNGTPKG

SEQ ID NO: 1024152 - protein, 235 aa, Homo sapiens
MNKMKNYKRRFSLSVPRTETIEESLAEFTEQYNQPPQHGGMRTCSLGPSGRDPTEECSTYLPQQTSGEEPGQLLTLDVQFQLAGRTRSRFSMEREGHLELLTPGRWDRMHAQGVCTGRAACLNSQTLTAQQEALSCTWISACPKEFLTEATDGEPQIWPKAGSDRMSRPELPVQTFGFGKLETYVKLGQKGKRGTHNATGVQREQKTGLENQVGPEKRSGLKHEEEAPSNGTPKG

SEQ ID NO: 1024153 - protein, 322 aa, Homo sapiens
GVSCGSFLGFFPSPPVFFRHPGPCVAHLDPLARGRRAFEGVGWRVWGGECGLRQEEFILRLNVAGLWHSPDVAQAVAAAWARVFLLSPAALAVGWAGLACQQRRLLYSFGWETHRCVRAVEVARGSGDKTEKLSWWSMRWPVWILTPDTCAEMRLCCAAPCRVIAPVQWCLHQSKECPWGGVYTGEAVMALCRDHKIGYNWAQRWGAPPLWAPREKISDEVESSPPVLAISSPGCDVASTAGPQPEGAHNSLVSSRQNGPQWTEQPPEAFPSPTKSCFPKGTRMAPDDRDTKIAIWEQEPCVNLTQESAVPCGRAHHKEGCP

SEQ ID NO: 1024154 - protein, 32 aa, Homo sapiens
MIALLAPLNGCMYLYTLTCNSIVPFYLLLGVR

SEQ ID NO: 1024155 - protein, 134 aa, Homo sapiens
PHCAEGRHRLLRHSPSAPEVGATLALPVMGTKTIASENGQADADECYDKGDDEQKRFLRGLQPPSGKLPAPDAARYYLPSVAVMAAWVTMTPGSGADPWFSVTLVHVVSVLTTPSFYSLVDSDILALLPLEEAA

SEQ ID NO: 1024156 - protein, 201 aa, Homo sapiens
PHCAEGRHRLLRHSPSAPEVGATLALPVMGTKTIASENGQADADECYDKGDDEQKRFLSVDCRTTAVTIHARPRAASAHTRTRYAVTGLPRFTLSVRLGGLSWVIRVYPQVRVSLRCLSTPVLFLVLSDSVSYCAFFPIERTAEPMSDEYFRKLPYNTDSTAGFARRGTKTVGTRGRRSLFRFLQSRCIRNTSSRNIFHSR

SEQ ID NO: 1024157 - protein, 42 aa, Homo sapiens
GPLRGTGGRRPSRQTRGYMEGNNTHQGLSGGQGVGDHQDKHV

SEQ ID NO: 1024158 - protein, 174 aa, Homo sapiens
MDEDPNGVDLVAMDLGVYQLRHFSISFWSSLLGTENASVRLDNSSSGASVVAIDNKIEQAMDLVKSHLDVMRSREEVEVLKEQIKELIEKNSQLEQENNLLKTLASPEQLAQFQAQTADWSPTPWQQPDQRARTESPRTRAASQGLRTKRIAAYDPRTEPGCMQCELNRRQKMC

SEQ ID NO: 1024159 - protein, 131 aa, Homo sapiens
FFLPPKRKLVSNFQPKNLCQCSPMTLRGHVWKLVPRDYAQVCLVLLSCLPFTGSCTMQLQFPAVIRVLQAVGKGAKVLEDSLPALEASSAVCVCVCRQALVLSPRLECSGAIMVQCSFDLLGSSDPPTPAS

SEQ ID NO: 1024160 - protein, 155 aa, Homo sapiens
MHGSSSKGTCTSRFFFMPRLLCVTDGFAIEQLLTSYLTVVRHYGASHKRFCGQRPIISSRYVALGADVSSLGDKQSRDFIVESLHTRLRCHGLSSDTLHDTTRTYGPVCQVASLGHSRVQCHFRRSQPDTGQSPLPTCTQETPVSYEVALVGASP

SEQ ID NO: 1024161 - protein, 111 aa, Homo sapiens
EVRWLFAVAARPACAGDLRRWTPAEPPALALAAAGSAAGWQHGVAPCGLLGLGWLAVACVLGCWAALKLAIYSADPGLGRAEEQNAEDSGYALSKSAEDLTDGSYDDCSKC

SEQ ID NO: 1024162 - protein, 37 aa, Homo sapiens
MRNVTGTEDAPGTEERHWAEDNSCVVRCFESFEWLSS

SEQ ID NO: 1024163 - protein, 217 aa, Homo sapiens
  misc_feature (1)..(1): Xaa can be any naturally occurring amino acid
  misc_feature (98)..(98): Xaa can be any naturally occurring amino acid
XDVPSRGLDVEDVKFVINYDYPNSSEDYIHQIGRTAHSTKTGTAYTFFTPNNIKQVSDIISVLSEANQAINPKLLQLVEDRGSGRSRGRGGMKEDRRXRYSAGKRGGFNPFRDRENYDRGNSSLLKRDSGAKTQNGVHSAANYTNGSFGSNFEPAGIQTSFRTGKPTGTYQNGYDSTQQYGSNVPNMHNGMNQQAYAYPATAAPPMNGYPMPTGYSQ

SEQ ID NO: 1024164 - protein, 79 aa, Homo sapiens
  misc_feature (10)..(10): Xaa can be any naturally occurring amino acid
  misc_feature (18)..(18): Xaa can be any naturally occurring amino acid
  misc_feature (41)..(41): Xaa can be any naturally occurring amino acid
HLNPSAKLLXAQMKDIRXTGKSEYSKYARNWKEAWMADILXRGWCYRKRMDIEMAVEMKPKNMIRKLSTDFPQEKIPRN

SEQ ID NO: 1024165 - protein, 214 aa, Homo sapiens
MGPELDSDEDDDELGRETKDLDEMDDDDDDDDVGDHDDDHPGMEVVLHEDKKYYTKQAEEVYGPEVETHRFTEEDTSDLLTENPCITAQLKTNEHSTLMETDITYTVYETGIPCAGIRTRITHRRPQQKTADPIRQTPSSSQWQRTHEPPQGIGRHTKQTHPRENTGKAAHRPPRNPGAHHPPPPPSQQQSHSKQSAVKAHHKATNPAEQPDPA

SEQ ID NO: 1024166 - protein, 39 aa, Homo sapiens
MATTAAFSWSPIPPWLLGSAFVCCGHAQAHELGGERIRR

SEQ ID NO: 1024167 - protein, 338 aa, Homo sapiens
TGRRRQGSVDETVGGERSRFPGERRGPRQERGLRWAFTSPPVGGETAPYPRGRGDEGAMPSHFEAEAWRGFREQVLELLCQAGRLDQTPGRGRRRGPPAKDSPQPLCLRLLRLLCADRVLCCVGNAALCSGRGFLSPPPRLATADAGRQDSALGVTRAGSLPLVKGPRHPPHIVTSSPPVYFIRGPRYVYISHDHSTKPFWANPLSPVSEIPSLRAGTPRSVLIPVSPGESWRRGVWKALSKTFVEAKKRRNRVMSRDAVKDRLLGRAQGNTGGRSGSGWQDPEGRGGCRDALGARGASRPQQGRDKRLLVRGTDVRLRAQDYLSHNSCPKRSFSGGG

SEQ ID NO: 1024168 - protein, 146 aa, Homo sapiens
  misc_feature (35)..(35): Xaa can be any naturally occurring amino acid
MRDVHLSSTVGQDWCPDLAMPAESIYCLRTRHPQXPPRNLGQNMAKFRPHKQRGVGKDQIKKGNTPKAFIQHAQDRGGKHRRGNAGKLFGGISVSHPICMFPKKRPKTVLCIISPFFCTKQRLLDNMEKPHGTGGTDGPHFRGGAP

SEQ ID NO: 1024169 - protein, 130 aa, Homo sapiens
  misc_feature (4)..(4): Xaa can be any naturally occurring amino acid
RDSXPRFLASIGLHVSPRFVAYELTVLVFLTLSVGGDEVSPGGAGPVSHSAEEQPVHQVDRLCGACPGQRVFLCPGEPGAKSGRHLSGGVPPYTECDHAQPLARPGAVESCNHEVCAQTGETVQPLMARR

SEQ ID NO: 1024170 - protein, 79 aa, Homo sapiens
PIASQTPQSQSPAFEPFNLLFSSRYLCIDRLLVFEIAEFEIAVFEIAVFEIAVFVIAVFEIAVFEIAVFVIAVFEIAVF

SEQ ID NO: 1024171 - protein, 222 aa, Homo sapiens
MRGGTSRGAFLLAEHLPEDQTQRDENIDGNYGFRYDLEIDGIGGGNPLTSKVAIISRFQQIRVLMSIICLRRYRYMSNVSIPTPNCGNMLSGVGAFAIENGLIAATSPVTRVRIRNVNTGTFIEADVQTPNGVVEYEGSARIDGVPGTAAPVALTFLNAAGTKTGKVFPTDNQIDYFDDVPVTCIDMAMPVVIIPAEYLGKTGYELPAELDADKALLARIES

SEQ ID NO: 1024172 - protein, 48 aa, Homo sapiens
ERGPGTSPVASDLTGNVGAVLKALCLITIESQKQLLGSVKNSTETSKD

SEQ ID NO: 1024173 - protein, 133 aa, Homo sapiens
MLQVPDPDYCSQQRISGLRTQTEAFQGWERTMLRYPSVYYEGFALSRAPGPEGLNTSYQSQLIKPSRMAGKVPKTGPGKDAPPRKPLRLAKVESCDRRFSRSDELTRHIRIHTGQKPFQCRIPVPRAGDGYRA

SEQ ID NO: 1024174 - protein, 88 aa, Homo sapiens
YNIKNGLPSETYITCAEANEMAKTDSAQVAEIVAVMGNASVASRDLKIEQSPELSAKVVEKLNQVCAKDPQMLLITAIDDTMRAIGKK

SEQ ID NO: 1024175 - protein, 326 aa, Homo sapiens
EKSISVGTMRAIITTSLVYFSSVVLFGACIELSVVLRDKYGDGVSRNLVVRHTGLAFTLGHLYIELLLFNVLALEPPEPHRGTTPICSAIAKDNIIHHSYRECFGHGKVNGEPTWALLLTALIAELGHSFNRHYPRKWVDPIYIHVLILMMLPVREPRPDAVHDTSMRTPNCARAPVQVLSLGAGPFLGMSHLTGPICKSPPGTMPWWTCIIDRHDLQITSSTKGLRNGVGVTGIRRQTHETQTQQSAGTQEWRHGAQLHTKENGQAQASHERVATMDRPRTTGTIHTQTATPAESRHTEDSPTDSKDLRQRSPTQQAGYTAIPKG

SEQ ID NO: 1024176 - protein, 97 aa, Homo sapiens
KLCQHETVATSGGVLSIDSHTSVGSSTHTVSLSRYPHRPPPSTHRLTNTPTLFHTYFPTATRSVPHTALLVHTHSHSHLYPSALFSAETYVHVQIDT

SEQ ID NO: 1024177 - protein, 53 aa, Homo sapiens
MASTDLGEKPERAAFPEQTRIGAELGFPEESSTFLRKQLARSSDFGAIFLNMA

SEQ ID NO: 1024178 - protein, 255 aa, Homo sapiens
MQCALYDAGRCRSCQWIMQPIPEQLSAKTADLKNLLADFPVEEWCAPVSGPEQGFRNKAKMVVSGSVEKPLLGMLHRDGTPEDLCDCPLYPASFAPVFAALKPFIARAGLTPYNVALSGELKYILLTESQSDGGMMLRFVLRSDTKLAQLRKALPWLHEQLPQLKVITVNIQPVHMAIMEGETEIYLTEQQALAEVLMTYRCGSVRKVSSRLIRRSPASCTPPRATWVRQLPVKHMWDLFCGVGGPDQFAYSESI

SEQ ID NO: 1024179 - protein, 230 aa, Homo sapiens
MAVGKNKRLTKGGKRGPKKKVGWIHFLKNDWVYDVKAPAMFNITNIMGKDPRPPGPTGPKMASDASQGSSSSDSDVWLICRMDRHVRLFQNIFKLITGKIVQGSTTLAWTNLPMGHGILTRDQTWLSHGSTTMGSTSRLRTLHVSIVKRLPDGFTWLSSGPGSGVLTKNTHQSESRRNLFMSPATNRSRQIRTDGIVWTHPWTRRGADTLHLNEGGPLNGIPDSLGNRLA

SEQ ID NO: 1024180 - protein, 265 aa, Homo sapiens
IYQLNSLFDHYSGSVINVNTNIEEKEEEVTEAIRETKSSKNELHSLSKMLEDLRRVYDQLTWKQKRHENQYLEAVNDFYAAKKTWDIELSDVAKDFSAISLACTKLTEDNKKLEIDINKITEKTNESIRKKSKYESEIKYLTIMKLKNDKHLKNIYKEAYRIGTLFHLTKHKTDEMEDKIAEVRRKFKGREEFLKNSLKVEWLLNGASKKLFSIYEVQALKRKSYKNRAFVPCPADLQDLCFNKDELKNRSQQELLLLIPIVKDL

SEQ ID NO: 1024181 - protein, 164 aa, Homo sapiens
AKAPCALSRIGRGPCEGVRRGRQHQLTAWGPKQRLSTSLLRDSFDRLPGDGPKKHSSHFAAEELIVQNRAPPEAHPILTSCRTLPCLAFTVCSEFFLKENPRKRTKGTKKHGKAILMVRRCREKRKRVTWKRGPVGANEQVESEPPGFVVLTKGVVRTVGGSPH

SEQ ID NO: 1024182 - protein, 167 aa, Homo sapiens
MRKETPASLVPPRGREWNLPPNAPDCMERQLEAARYRVQTGGSIHPSGASRPDVGCMMGRIPSGIFKDPLCRPATKAFCIRRSPKEAGVADLTWVGERGILVDIRIQVRDENLWEIDENETSYGTRKVHARYEAVMTLSHKASVLSVLEKRMSVDRKDIMNQRDKGP

SEQ ID NO: 1024183 - protein, 114 aa, Homo sapiens
MVWGTMDVTDIKVRNSRNPKNYVNKKKLFVLFTKYSLRIILLKMQFEECPWEELSKKYDCLTMVGQVISVVHFMSITSGFSGVLKISEIKNLKICAFQCYQKQYFLPKSKIKEI

SEQ ID NO: 1024184 - protein, 97 aa, Homo sapiens
GERCDPRTPANMALRVVRSVRALLCTLRAVPLPAAPCPLRPWQLGVGAVRTLRTGPALLSVRKFTEKHGMGNNRKCALEQWESAIFAQEALGDVVYS

SEQ ID NO: 1024185 - protein, 53 aa, Homo sapiens
SRKCYPSRTCYFLANVLSLGYTLSTLDKTFARITRSRDHTFASGTEARSSYIS

SEQ ID NO: 1024186 - protein, 411 aa, Homo sapiens
SGGWGGSGRDAPGGRCPLTSLGGPARAAPEPRQPRPPRPASHGPRAHTAPRGGPSHKRAAAERNDDGQSPQVFFKCCTKRLEVTLGSFLQTRPMSFTSSFSRLTMKGPLGCQHGKPQSSGEPGCSSAQREPPCFSSDGSMPGTHQGGVKLRESERPESSTAQIYTYELTVKKFGTDRRTETSKSSDIKETDVKSMEKPRLNTCTRRTAHNACRLLTRTLQQQTNADSIHRSRGGNTHSKRTKRTTYLERSMTGRREVKKDGHQEGSDTRSRKGAQRHRTERASNRKTTEERKRAQNERSKNTQNGDYRIAKPDRESAPSERDAYAEKRATTKRKRDHRQNEPTSEKRKDRAGHKHTCTTEDEQTIQTNRRQSGHKPAAGTNRRRGRRPHNRREKEDGHEKAPVEQSRQERE

SEQ ID NO: 1024187 - protein, 435 aa, Homo sapiens
SGGWGGSGRDAPGGRCPLTSLGGPARAAPEPRQPRPPRPASHGPRAHTAPRGGPSHKRAAAERNDDGQSPQVAQRSGVLRHPPEQRPRSVSVMKAIMAFASAVQSVLKLLWVAFSRKTHELHQQFLEVTMKGPLDVSMASHKALENQLQQRTERTSLLLFRREHASTHQGGVKLRESERPESSTAQIYTYELTVKKFGTDRRTETSKSSDIKETDVKSMEKPRLNTCTRRTAHNACRLLTRTLQQQTNADSIHRSRGGNTHSKRTKRTTYLERSMTGRREVKKDGHQEGSDTRSRKGAQRHRTERASNRKTTEERKRAQNERSKNTQNGDYRIAKPRRESAPSERDAYAEKRATTKRKRDHRQNEPTSEKRKDRAGHKHTCTTEDEQTIQTNRRQSGHKPAAGTNRRRGRRPHNRREKEDGHEKAPVEQSRQERE

SEQ ID NO: 1024188 - protein, 318 aa, Homo sapiens
ACVPAVSNLEPGVGFRTHPRRVTRPSCDPHNVQCRGSAVPPSSTTRPPSTPEGIAAGHTGSLLLMALLPIFFGAHAAPVRCARGKNASDDALKLITSRDANRFPIICHAGHSWGSTSFSRIFSQEYINLLLSMYFFVLGILALSHTIVPLHEISSSPGQLAKSTSTTLLFSTGFVGNNKEEIIDIYEFDTEGPVCAWCLSSIVGVWYLLRKHWIANEAFIGLAFSLNGVELPWTSTMSALAAFLLGGLFIYEVFLGNMGPMFMGDQWAPVPLTGTAIKHLRVFPRESGCEKGALKPHNLVPMLGPSAHVCHSHASLKY

SEQ ID NO: 1024189 - protein, 79 aa, Homo sapiens
RPPTTTKFAAASTSKPPASGDHWRSGMKTDKGIFAILIPVFCHLIMDLRGGTFCSNRVDGMLVIEETECLDCKCVGEEV

SEQ ID NO: 1024190 - protein, 128 aa, Homo sapiens
MGNTVLSHIDLRPTVCDSKRLRVIRERVETKSQPVLRYSRKGKPQLSLLCPALPSDGASNAEQGPHVVVSGYSDILPRGAVNSWPWKCKMAAPVNGGEWRPTKSLQDRATTKYAASSYLRLNAEQGEV

SEQ ID NO: 1024191 - protein, 43 aa, Homo sapiens
MGAPRWTTRNDVLVTSPILASNLYLIKLKEHSRYSEGPIPPGR

SEQ ID NO: 1024192 - protein, 38 aa, Homo sapiens
RAAPSLRSIESQPSTQGFVYEWFSARVDAAAVDAAANL

SEQ ID NO: 1024193 - protein, 221 aa, Homo sapiens
  misc_feature (125)..(125): Xaa can be any naturally occurring amino acid
  misc_feature (153)..(153): Xaa can be any naturally occurring amino acid
MGALGVRHKDKKWEDGYRKWVGPPKNPRKNINAGRRTDALGAHYHFGFPMEKPYTGNKNTIVAKKTLWTLSGVHHQEYPYFSRRPLFSGVSPHVCFIAHNGCPLWRPLEQRSWGWLIIIQRRGGXVIHKGDLISPPGDHVATLCCVAQDTQRXFWRAVMIRRPRESVGWRQSSPLVGGAIEPMTSVLHESHQGALFVPVYEQRLATRGVSPRRTQSLGRIR

SEQ ID NO: 1024194 - protein, 79 aa, Homo sapiens
  misc_feature (47)..(47): Xaa can be any naturally occurring amino acid
  misc_feature (49)..(49): Xaa can be any naturally occurring amino acid
  misc_feature (65)..(65): Xaa can be any naturally occurring amino acid
MGRILINAENALFEGNLYRCRIDRFRFSNILIQVIAFKMIRRIAGPXLXRFHRRGVEIGAILEFXAFPQFHGCKSMPSS

SEQ ID NO: 1024195 - protein, 158 aa, Homo sapiens
  misc_feature (150)..(150): Xaa can be any naturally occurring amino acid
AGSVCGAFLARCVCTLHKTSKLSGPWSKAATFMSTVFINQPQYAWLKELGLREEKEGVYNGSWGGRGEVYYDAIARCVNKRATSKSLDWAYAVAGSIEDNCTEGRCIARKHGKNRGSDHSMASEAREEKEVDDRNWADGLAGEKDPIRHXGIAWVFFA

SEQ ID NO: 1024196 - protein, 238 aa, Homo sapiens
MRERHSGGGEESREGLVAETIRVYYFEYRPKIMSKTTLDKSLLEIISDPDAGTPEDKMRLFLIYYISTQQAPSEADLEQYKKALTDAGCNLNPLQYVEQWKAFTKMASAPASYGSTTTKPMGLLSRVMNTGSQFVMEGGKNLVLKQQNLPVTHILDNLMEMKPNPETDDYRYFGSQRWLRGTRQIHIPRNKNIIAQKPLAFVVGGGNYIEYQNLCRLHKGDTRANTFYMGCRELFNAT

SEQ ID NO: 1024197 - protein, 87 aa, Homo sapiens
MPATGVKNANTGLINTVIRPIETTQTANQLSAFGNGNQRIFNSARSDWFVATTHTNLNIRGKENTCNEQAGIQLNLKKYANKVTLIR

SEQ ID NO: 1024198 - protein, 99 aa, Homo sapiens
GSITVVYRGREYNTTALRTRVEAAGQLVHSESVRTQYSVGRGSWSILCHARTLVPESVGIARGPHSSSDLGPTEAVSVGRPGGSCDANNVVGLTGKHLQ

SEQ ID NO: 1024199 - protein, 250 aa, Homo sapiens
ARRKLLSHGRLRAGFGGLRSRLPGLSRPLDLNPRPAATAPASLLFPFVAGGCRRSGRGIRDMPHSAAEHAERAPAASHHMMHVALVSKPCGTHVSFSGNQIGRDDTTKRRAGASNVSLARTSGPSLAFAGRIPARRFIYVEIAFFSRWWHQQTNATQEVVRDLVRQGRLEYANGGWVMNDEADSHYGAIVDQMTLGLRFLAGHIWPMMARPRVAWHIVTPFGHSRRGKARCLRKMGFDRLSSLGALIIKH

SEQ ID NO: 1024200 - protein, 211 aa, Homo sapiens
ARESSSSTAVSAAGAQQGGYEIPARLRTLHKPGDPCTPRQWCASEVAVPLVQGKALEDLGVKTSGSDDHPVIVATMLKHSWPFGVQRIRNTIQGDAGYTYCSDALRYSVRKLSGDRSSLRWPADFEYTIAVLYGKRREVRSKLEHVGCIHMSFLESPDDKGLSGEMDHAPDVTPTLGHRLDLVPCELVAQKRLDELVYRNVGTLVILSIVV

SEQ ID NO: 1024201 - protein, 94 aa, Homo sapiens
MSVKGMAIALAVILCATVVQGFPMFKRGRCLCIGPGVKAVKVADIEKASIMYPSNNCDKIEVIITLKENKGQRCLNPKSKQARLIIKKVERKNF

SEQ ID NO: 1024202 - protein, 135 aa, Homo sapiens
  misc_feature (54)..(54): Xaa can be any naturally occurring amino acid
  misc_feature (62)..(62): Xaa can be any naturally occurring amino acid
  misc_feature (99)..(99): Xaa can be any naturally occurring amino acid
  misc_feature (110)..(110): Xaa can be any naturally occurring amino acid
  misc_feature (120)..(120): Xaa can be any naturally occurring amino acid
  misc_feature (129)..(129): Xaa can be any naturally occurring amino acid
MFSISTPSKKSSKAEVAATAPAATAKNKHECEGHGYSLGCDIVCYSCSRYAVIXISQPISSXSNVSNVFSSTFILKDMIKFYLISQIRSYYSFSTEMVXMFKILEMIIEXRNYGLHGIFXIWLELSGKXLLGNQF

SEQ ID NO: 1024203 - protein, 94 aa, Homo sapiens; identical to SEQ ID NO: 1024201

SEQ ID NO: 1024204 - protein, 94 aa, Homo sapiens; identical to SEQ ID NO: 1024201

SEQ ID NO: 1024205 - protein, 94 aa, Homo sapiens; identical to SEQ ID NO: 1024201

SEQ ID NO: 1024206 - protein, 96 aa, Homo sapiens
GQLSITLNLGNFLQLTDDPLYFDAYLQSLQVAAISTFCCLLIGYPLAWAVAHSKPSTRNILLLLVILPSWTSFLIRVYAWMGILKNNGVLNNFLLW

SEQ ID NO: 1024207 - protein, 89 aa, Homo sapiens
KQSMCAPIQNPAVLSSEDQVLAWLLLLGLLPMGILHVLCVPEEDMGNSGATSPRTAGPEQRALAHHQPLLPVPQEFILCCLARDPARRF

SEQ ID NO: 1024208 - protein, 40 aa, Homo sapiens
MQKLAGHGGMNLWSQLLRSLRKDCSSRGRKGCSKPRSRHS

SEQ ID NO: 1024209 - protein, 279 aa, Homo sapiens
MRMSHAKDRLCESNDLTFLLLPWWCSLEPWFVSTLVHVSMGVPEYSMLMENWHLVPYVRRTVHCEVQDDDRSTEGAAKIAFPSANEVFYNPGAWNSIWDLTCAVITEFARIQLGAKGIQIKVPGEKDTQKVVVDLSEQEEDKVELKESENLGLQETNLGTAAVGEICEEGLHCCWKAWQLQAYVSIRFALEVPGLRSVVANDASTRAVESHTPGMSSSMTVGHWYSRAKQIARIADVPAPEGCRRRFDVIDLDPYGKPSTFPVMQWCRLLVNDRVLCVT

SEQ ID NO: 1024210 - protein, 116 aa, Homo sapiens
VIILRKTRLDAPRLETKSLSSSVLPPSYASERLSGNNRDPALKPKRSHRKADPDAAHSHRILEMDKEENRRSVLLPTHRRRGSFSSENYWRKSYESSEDCSEAAGSPARKVKMRRH

SEQ ID NO: 1024211 - protein, 85 aa, Homo sapiens
  misc_feature (12)..(12): Xaa can be any naturally occurring amino acid
SYPHYPPKGQEXLQLKPTSRDEASALKRIRYHGRGRFGIMGEGGGDYFVKLVEGPPPPPEPPKTGVAHAKEYIQQLRSRTIVHTL

SEQ ID NO: 1024212 - protein, 137 aa, Homo sapiens
PRYSRAQYDRVMEELYPRLKSLTLLARQYDIGINIDAEESDRLEISLDLLEKLCFEPELAGWNGIGFVIQAYQKRCPLVIGYLIDLATRSRRRLMIRLVKGAYLDSEIKRAQMAALEGYPVYTQKVYTDGSYLPCPK

SEQ ID NO: 1024213 - protein, 63 aa, Homo sapiens
MVIGNITGFTRVLSYALASLHRFPRGLLYDTVKRTIEGLDQSCENLHVLNVCPPHRRYSPQYG

SEQ ID NO: 1024214 - protein, 77 aa, Homo sapiens
ADVTSLPSLSSSGLSPSTNCTQDQLAKAQQQKEKQPIDEKNWECKTYRRVWCWEDETCMRKAKDLAFQTDGIVFYIA

SEQ ID NO: 1024215 - protein, 49 aa, Homo sapiens
MWRPRCECADNDKKPRVEKKEGRTRGVYRSTEEEQVYINTAPLGAKTKT

SEQ ID NO: 1024216 - protein, 75 aa, Homo sapiens
AQFSPIMPKADPEEPPAGATSRKSSPPEKNRESSFACSTMNKVPRTFSLLTSFRGTSGSRNSSAKFLGNLLSVKT

SEQ ID NO: 1024217 - protein, 75 aa, Homo sapiens; identical to SEQ ID NO: 1024216

SEQ ID NO: 1024218 - protein, 82 aa, Homo sapiens
  misc_feature (75)..(75): Xaa can be any naturally occurring amino acid
AKVTMRRIILRHALKPALLPVLSYMGPAFVGIITGSMVIETIYGLPGIGQLFVNGALNRDYSLVLSLTILGGALXILFNALS

SEQ ID NO: 1024219 - protein, 71 aa, Homo sapiens
  misc_feature (44)..(44): Xaa can be any naturally occurring amino acid
QLAQKYNCDTMICRKCYARLHPRAVNFRKKKCGHTINLLPKKKXHNKCLFSSVERAALRAQCPVGPWMPQI

SEQ ID NO: 1024220 - protein, 112 aa, Homo sapiens
VKMELEEESALGDGLWAAGGHQCKDRTHSSRPGMGRDPQVCASLALNRASIPRLHKGRHLSAPELFRPIPVPGMSLTRYRFCTSEKALDRQAESGRVSSGQYSGSGTSYAEP

SEQ ID NO: 1024221 - protein, 105 aa, Homo sapiens
LSSQKSHSPAVFVAGGAGLAHQLPVRCLELPEAWAALEDAETPHACSFSHLHLLVVMCVPYFKQSHQDYYFMATFSALHSLVSDLLSGIMLQTYPRSFPAVKVFW

SEQ ID NO: 1024222 - protein, 486 aa, Homo sapiens
  misc_feature (473)..(473): Xaa can be any naturally occurring amino acid
GPSSLLLTCAGIAGIRALVSELGQSGNSGLLGKVVVATVHLSAQLFVGHVADYLIQSIKLVSVPLNYRQTFLYMYPEGDWILEGKPCLIIIVRCVNHPDPSPIMKHLGLPGDTPVVFSDLAVHVYSLFRIIYKKFQLRLCYRATMKQQWTVKLSWDSPDQGLNSSCEAQMFTVDSQMSYTRCPLWTLAFVCHPEVLPIYTELCLASKRKDDRPVANVVHRGHVLHDMGSASKPLDNLTFLQAVVERPEMLDMYKTRRTRSILCVQACAGAARRMNLNRCQVVLYPYTAGTLQQSAFIPGKAFRLATYYVAKRLILHGVGQCPCHLCAKHPGISLELSVSTSGPKPSSSSIPQHSYYLRSCSPLEGGSLSIILAQRSQAVCFGRPGKFTVFIGPSDLGITLFDNLGATIAKDRMVWTTWIKGRCLGTTGTLEAPIDTMEGGHRARTPTGTILNKGCGKAGMVPKKAEENRRAGXTAKAGNQDTSDNT

SEQ ID NO: 1024223 - protein, 145 aa, Homo sapiens
MLGSRNGSVLCTYTVNETYTTSVKPVSVQLNSMLCPAPILNKAGETLDVSVSFNGGKSVISGSLIVTATECSNGIAAIIVILVLLLLLGIGLMWWFWPLCCKVVIKDPPATPPLHQKRRKKNLCLLKSGQTVDASYYGGRGVGGH

SEQ ID NO: 1024224 - protein, 104 aa, Homo sapiens
MHGLFWPFPTETRASIKNGTLSSVSLPAFKRLRCFSLRQGLTSVSRAFLRYNFPCLLLSKLELFISSLGNVDPLSHTYGNIIKHAVRYVVFIFINSLINPLCAQ

SEQ ID NO: 1024225 - protein, 569 aa, Homo sapiens
ASWCCPCGKTGRVDNECAHVSVATQPLCYTSPGARTMTTVIARWLRRTDTYHGCGEIPRMGCLDACARVWVVPVVTLRVALHQCVCGICVPGTTTAHNVSAQCTVVTTVIMGVVTWALGRSCLTLGPRSVRPQTLIYSVGSGAVDGRPHLLPYLPGDICAVAASSEPRHRGDRDRDLRMDPIAPTHGDPVHRCCARCYCVVRGTDPDHGLQPHECRGRWRCGDTKHLEEPLSLQELDTSSGVLLPFFDPDTNIVYLCGKGDSSIRYFEITSEAPFLHYSLPCSVPRSPSGGMGYMPKRGLEVNKCEIARFYKLHGAAGVEPIAIDSASKSRTWSQEDLYPTHRWGPDPGLTVLRSWLVGSGMLGPFLISLKDGYVTPNGAVESEGHTRGLVPGPQVGTQPSRPSGSSQLAMPCLVLEEADAEAPGPRVLEPHRSRLYTAGVRLFQAIVEPRMGLQSWSSQFASYPRSASACPVTIGRGRSPPYKDGVNFSCLKASRCGWPPFLGALLLGSGEPGVWSGPGPQGFFSAVFYQGEARGPPVARRFRSRGRSSLHEAPTDPALPAPARPPPP

SEQ ID NO: 1024226 - protein, 42 aa, Homo sapiens
MAPHDWVLVLILNTYGPNRSWDITWHIQTGGRIKGNMVVFCY

SEQ ID NO: 1024227 - protein, 250 aa, Homo sapiens
VGLREWWAAVAGWVLLTVAQFWAVVGTQTGDPYAPGPPSPRTFPPSQSFLLRNLHPLPVGCGTLGSRPGSAALTCGAPRAVNGARTCKVEKPGAICGGFGPGGLRTSSELWASIRRWTKLDFCPGQGASSWMQGVLACPQGVTGIDFPRRWTWPTDLLLSRKDGGEVEHHHKTRRRVADTVMLLFLACDSHSIIPFILDEHRRLTFDGTDTVVVSCAAGVTESAPFEKKAVRGFGQDPRVIRCIDQKSRS

SEQ ID NO: 1024228 - protein, 288 aa, Homo sapiens
VGLREWWAAVAGWVLLTVAQFWAVVGTQTGDPYAPGPPSPRTFPPSQSFLLRNLHPLPVGCGTLGSRPGSAALTCGAPRAVNGARTCKVDNVIPAGTMGEVGTRLREERPGLVIWPPNLLSILPVSSPHESLVPSVGALGQGVSGPAVSVGFNQALAKLDFCPGQGASSWMQGVLAAHKDNWHRLPKTMDLAYRFTALRKDGGEVEHHHKTRRRVADTVMLLFLACDSHSIIPFILDEHRRLTFDGADTVVVSCAAGVTESAPFEKKAVRGFGQDPRVIRCIDQKSRS

SEQ ID NO: 1024229 - protein, 44 aa, Homo sapiens
MAEMEFTEAESNMNDLASEYQQYQDATEKEEEDFGEEAEGGGLR

SEQ ID NO: 1024230 - protein, 56 aa, Homo sapiens
MSKVPDTDETWEYDGIKGTKSPVPVGPQHKNPAIPFVGNLWGSESLVGAQRQQAAS

SEQ ID NO: 1024231 - protein, 125 aa, Homo sapiens
AWQGRELAPGLERPWADAAPPPWQGAGLRQQGTAGAPETQTGCVRLNPRPAEPGGKSHVRSRQPWGSESALGSVQLSPPRLWWRGFEIIPAQGGWGLGTGPREGPRAPRGVLPPEPRDQAGLGQR

SEQ ID NO: 1024232 - protein, 70 aa, Homo sapiens
  misc_feature (7)..(7): Xaa can be any naturally occurring amino acid
GPPCDRXVQGPWGKGSSHVIFWDQVRGPLVLQVKGAEAGPQGAVEVARSGEKPLDFRGQADRVRGGVGIQ

SEQ ID NO: 1024233 - protein, 307 aa, Homo sapiens
  misc_feature (92)..(92): Xaa can be any naturally occurring amino acid
SGVRWLDGRRQERAGRGEGRGGIENGVGELGSGVLRPRPGWGDGGAASPPPIKPPYNLLPRPSCVRLVNQPAHICSILLWTVPVAEGLAYRXRPLSRVPDAAQPRPGLGVRWRDLRGPGPTPDALRKPPCFTMLSSRAGQASTAFRKCGAAAGRGSGETGKADGAELTSRSHKPVNFLRAYQCHRLSQCTVKSASSSCQTEAKSGGPACERARACAAQGASERLLITSASADTVANCSTMQTAARPTGPPCPSRTDQLAVATISPGHSVEIVCLLYSCVSTPIHDHSTYPLNGLDPDPVPHTIWRTP

SEQ ID NO: 1024234 - protein, 176 aa, Homo sapiens
  misc_feature (119)..(119): Xaa can be any naturally occurring amino acid
EFGTRQGTNKRWSSYVDPSAWLQMRLDICHCCAPPAEPPMDYEDDFTCLKESDGSDTEDFGSDHSEGCLSEASWETVDKKETEVTAGFQTIWHHTCYNCDCEFWVANEDTIAEIVGMYXVLDAATKLPIPDSNSMTSSRLNSCYDKFKSFVPGTYDHSENPLYSQLMRGEPAILEV

SEQ ID NO: 1024235 - protein, 301 aa, Homo sapiens
FLAHKDEEWCRSKYHPDEVGKRRQEARGALKTELRVFLSLMETGWFDNLLLDIDKADADVKMLDAAVIEMEGGTENDLRILEQEEEAEQAGKPGEPSNEQKKDGLEHGLGARGAQKQRHTDDERTDIDGKQAENDTFYTDDKNNTNVGRVMGTQDPHATNRTTPEKEGHKHGVARQRNRNAPGRDDSFAERHACQEPARRESRAAGPGCRTQTGRRPNQPLHQEEREDSPTGNNHTGDERATRRHAGARDVEKTARSRAYEPGLPRHTCRHNSAPKAPAGRTTSPPPVQGDPGTTAGARQR

SEQ ID NO: 1024236 - protein, 52 aa, Homo sapiens
QSSSVPYLPGHLAESQYGLVELNREAIAKARVIGNPGCYPTTVLLGLAPLLD

SEQ ID NO: 1024237 - protein, 271 aa, Homo sapiens
LGKAGAPGLSHLFPSPASLSRSAGWTRWRSGCSTRDRPWVADSRQSLGRRGSGLKPRQVATRPDQGRSLPAGWAVGEGAAPVPRPGASGAVPRERRVRRRTEKTSSKVVRNGTCPYSRAAADFHLPPGLGIQQYGADALDAYGALLWEEAGTTGSLGCPAAPAGPHRVDTEAPGPFRHLWTAQECCWAPSSSSSLEGALAHPDRIIFPNHACEGPPQHVLLEVQGTLQRPLVRDSRTSPANCTGLILGSKEQTVTIRFQKLHLACGSERLT

SEQ ID NO: 1024238 - protein, 246 aa, Homo sapiens
MKPVEIVIARAVYSMVEFNGKLLASINSTVRLYEWTTEKELRTECNHYNNIMALYLKTKGDFILVGDLMRSVLLLAYKPMEGNFEEIARDFNPKLDMTLLVENLGTELTKLPGEAEHCPINIARDVTKGERCHHLPQGAGNTFQEEQNINHHRSTLWQKGIATGSPGNYNNSQGNELTTRNDRAQEAPQQNGNQRRATRDSRQPLAQNTQGANTSQHENSENRTTTRPHQRRKHHKRTLGTPQTHA

SEQ ID NO: 1024239 - protein, 365 aa, Homo sapiens
  misc_feature (70)..(70): Xaa can be any naturally occurring amino acid
RQALRPSASYPGSVQQCKLQQAVLQQHCFLMRPPLEKEVEVHRSYLIIDLTTAIGECVMPTRFLQNEYAXQAEFRLQGMWLKTPNIYFIAGHSNVCILIEAEPKQGRIVVFSGIRMENYRLWLNKEVNGAVYSMVEFNGKLLASINSTVRLYEWTTEKELRTECNHYNNIMALYLKTKGDFILVGDLMRSVLLLAYKPMEGNFEEIARDFNPKLDMTLLVENLGTELTKLPGEAEHCPINIARDVTKGERCHHLPQGAGNTFQEEQNINHHRSTLWQKGIATGSPGNYNNSQGNELTTRNDRAQEAPQQNGNQRRATRDSRQPLAQNTQGANTSQHENSENRTTTRPHQRRKHHKRTLGTPQTHA

SEQ ID NO: 1024240 - protein, 217 aa, Homo sapiens
MRREDEEEEGTMMKAKGDLEMKEEEEISETGELVGPFVSAMPTPMPHNKGTRFSEAWEYFHLAPARAGHHPNQYATCRLCGRQVSRGPGVNVGTTALWKHLKSMHREELEKSGHGQAGQRQDPRPHGPQLPTGIEGNWGRLLEQVGTMALWASQREKEVLRRERAVEWRERAVEKRERALEEVERAILEMKWKVRAEKEACQREKELPAAVHPFHFV

SEQ ID NO: 1024241 - protein, 217 aa, Homo sapiens; identical to SEQ ID NO: 1024240

SEQ ID NO: 1024242 - protein, 217 aa, Homo sapiens; identical to SEQ ID NO: 1024240

SEQ ID NO: 1024243 - protein, 103 aa, Homo sapiens
  misc_feature (88)..(88): Xaa can be any naturally occurring amino acid
EHVTVQVVVVRKREGLLHSSHISEELTTTTEMMMGRFERDAFDTLFDHAPDKLKRGEEVFFITFVNKHLNKLNFGGDGTWRPQFCRLXCTWFCSWAFLEDLTF

SEQ ID NO: 1024244 - protein, 183 aa, Homo sapiens
  misc_feature (169)..(169): Xaa can be any naturally occurring amino acid
MDTAGQAGGHAASSPQISQPQKGRKPRDLELPLSPSLLGAPGAERTPGSGTGSGLQAPRPALTLSLLPTHTLTPALLTPSSLPPSVHFRSSLSPAAPRSPAKLSCQLPSSGGAQVHIPSIGVAGLSTPAVLIARAPEAMTTTSTTTPSGVLHPCSLKEKHSSTERLMLXMWWGGDPWEGFLQE

SEQ ID NO: 1024245 - protein, 76 aa, Homo sapiens
RIPDGEHMPSDCGKVWSDRARMSDDGWRVLCSSISVSKITHTDISIPTTVIPTILSCNNHGRRIDKTSVTTSATPR

SEQ ID NO: 1024246 - protein, 314 aa, Homo sapiens
MKMLEFVQHNSSSEKPSEKSFQNCVKRASAGKRFEEKVLNCLVFSVGTPERNTVCKRCPDGFFSNETSSKAPCRKHTNCSVFGLLLTQKGNATHDNICSGNSESTQKCGIDVTLCEEAFFRFAVPTKFTPNWLSVLVDNLPGTKVNAESVERIKRQHSSQEQTFQLLKLWKHQNKDQDIVKKIIQDIDLCENSVQRHIGHANLTFEQLRSLMESLPGKKVGAEDIEKTIKACKPSDQILKLLSLWRIKNGDQDTLKGLMHALKHSKTYHFPKTVTQSLKKTIRFLHSFTMYKLYQKLFLEMIGNQVQSVKISCL

SEQ ID NO: 1024247 - protein, 350 aa, Homo sapiens
AEGPPQRRGGAQICFPSDSICPGPLRERKVKFALALPPAQVLGGLDLRLPGPGGSLESLRPNVVSLSDLGRRAALLTRQPLLGPAGPLVPPRVPRDSHEAPLHEHLLNSSYACFSLDPALKRTACVPGLTTLICLATLAIVSHLISRVANCNTVVDVAVTTMNDADLPSGAPGLWPPLSPITTMHLRMSEGGQSLTLQPHRPVPGPPGVSSPPVNDTYGHDLTSPPSHPRVAHGPAGPARTSDCLLVRPLAPVTPPPWPGPRCTVLPSLPRLLPRISGSLRRADPGNAPPSSPCPSSYARFLGARSSPCPAVLPPPLPARGALPPSPLPPSLLPAAPVSPPHARARPPAP

SEQ ID NO: 1024248 - protein, 100 aa, Homo sapiens
GPVREVRQLRREFEREPRAPWIEQEGPEYRDRNTQIYKAQAQTDRESLRNLRGYYNQSEAGSHTLQSMYGCDVGPDGRLLRWDDQYAYEGKDYIALNDDL

SEQ ID NO: 1024249 - protein, 221 aa, Homo sapiens
AECRLPSFRTARVSASLRAREEGSQAEPRPYRRRRHVAPRPRPDPGNPKPAGGSRPVPQWSPGSEPLLAGAGFSICSLKGRPPAGPSRVSSFITFICYVASSASAFLTAPLLEFLLALYFLFADAMQLNDKWQGLCWPMMDFLRCVTAGLIYLCYLHHRTIAKLPRTGAVQSRMEAVGILDTIVYATDCLPRSSTTCATLRHTRETLPAEHPKPTKTRSNQ

SEQ ID NO: 1024250 - protein, 206 aa, Homo sapiens
AECRLPSFRTARVSASLRAREEGSQAEPRPYRRRRHVAPRPRPDRTELPGSVRPGPGLGCAARSLPQAPVASRVSSFITFICYVASSASAFLTAPLLEFLLALYFLFADAMQLNDKWQGLCWPMMDFLRCVTAGLIYLCYLHHRTIAKLPRTGAVQSRMEAVGILDTIVYATDCLPRSSTTCATLRHTRETLPAEHPKPTKTRSNQ

SEQ ID NO: 1024251 - protein, 298 aa, Homo sapiens
PGAWTPRDLLDVGCDCCSEYLELKKALGYIERQSVQQLMKVNSSLSDELRRLQREIHNAAVLDGTLHAPCMPPCGLVPTTSTPHVNVAEHTPMAARAGVIDTCRDRQAFSMYEPGSALKPFGGPPWGRAHYAAAGLSNSTELEDDGQSSSVTRPWLSRLPGSGKGVSDSDVPFTPSSPLLYLLPGGKPGTTSNAFPPRQWSLTVTYDEPAEVGTQCWGWKWKRYSRCCGKEEDFQSRAGKPGWRPRILGFPSTEGCHLEGPMQVTKNIQDTVAGPATSSSMTRFVPCSEKIHFGVTRD

SEQ ID NO: 1024252 - protein, 86 aa, Homo sapiens
DLDDRYTVVYRHPFVDKDVEDGMERWVGGWVQLTSRVPFTSRIIQFWTTRELGTSCQPGHMHEVGNEQYPMEALFSLPLGVNELYP

SEQ ID NO: 1024253 - protein, 60 aa, Homo sapiens
RQAAAGVSCSSHNLGTPQAQLETEYEEVARRLAWEAGADLVLSNDELALSGSSTSSFLVM

SEQ ID NO: 1024254 - protein, 146 aa, Homo sapiens
MTRRGAARPPQSRQKENHCAHSTTWCPPREDSNREAEDNTDGGDEEDPHHHQKEQTTPPARDHHTERASMMLKAKNNTPEKSREHTIEEGTQHRRGAQDTQITQNEEDHTTKAEEDPNENQEKDNTPPPVEGANQRAEASARPTSH

SEQ ID NO: 1024255 - protein, 768 aa, Homo sapiens
PRVPQTGGGSLRPASYSPRLPAPSPSAPLYPQSARPSAAPFGTEVSRCPARRRSRVTAASSAPQRRPPGVRRPRRSGSASRASPGSPRSSLSARPARSLRFVSRAQSAEPSGARWAVAWATPNAARALTRVRWPAHSRTMTAEGPSPPARWHRRLPGLWAAALLLLGLPRLSVRADGKLFVLESQNGSQGLQLEAARLSCKSRGAHLASADELRRVVQDCSFAVCTTGWLADGTLGTTVCSKGSGEQQIMRAVDVRIESNPVPGGTYSALCIKDEEKPCGDPPSFPHTILQGRTGLEMGDELLYVCAPGHIMGHRETAFTLLCNSCGEWYGLVQACGKDEAEAHIDYEDNFPDDRSVSFRELMEDSRTEADEDRGQGDSSEEAPKQDRLVSISVGRENIARDKVFVPTTGSPGAGSSVPADSPGSRLLQKHLFWFPAEAFHKPGLEKEVDDDTKKQFSAGDNHSGVKLVPGEPETKVIYGNTDGPSGPFVGKNDSKAGDPVVSSSDESWLDGYPVTDGAWRKTEAEEEEDGDRGDGSVGLDENVLVTPDQPILVEVKKPKSSTLTPSEGMTHSSVLPSQMLDVEALALRPVNASETEGIGDGDLTKYQSTLPWRFITEESPMATLSYELTSSTLEILTVNTVKQTPNHIPSTIMATTQPPVETTVPEIQDSFPYLLSEDFFGQEGPGPGASEELHPTLESCVGDGCPGLSRGPVIATIVTVLCLLLLLAGVGMVWGYRKCQHKSSVYKLNVGQRQARHYHQQIEMEKV

SEQ ID NO: 1024256 - protein, 216 aa, Homo sapiens
GSTRLGLNRPREAPAAGLFLLLLLGTWAPAPGSASSEAPPLINEDVKRTVDLSSHLAKVTAEVVLAHLGGGSTSRATSFLLALEPELEARLAHLGVQVSREKMQDREQFWKYVKPKLPGYTVGDSSQLKLPVALDPGAHHFSLIVDNSPTPIVASSTIPTPDSPSPENTSSVVFDGEPLHFYSSLSKGRHQPMRVKLGSRNVESYTKLGNPSALRT

SEQ ID NO: 1024257 - protein, 219 aa, Homo sapiens
MAYYTTRYGAGVIGPEAPAAGLFLLLLLGTWAPAPGSASSEAPPLINEDVKRTVDLSSHLAKVTAEVVLAHLGGGSTSRATSFLLALEPELEARLAHLGVQVSREKMQDREQFGKYVKPKLPGYTVGDPSQLKLPVALESWRPTILTPRGNQSYDPLCFIHYSNPRFTQSRDTSSVVFEGNHFISTLPYPKEDTTMRVKLGSRNVESYTKLGNPSALRT

SEQ ID NO: 1024258 - protein, 224 aa, Homo sapiens
AGYRARALPALAQLLFPVMEAPAAGLFLLLLLGTWAPAPGSASSEAPPLINEDVKRTVDLSSHLAKVTAEVVLAHLGGGSTSRATSFLLALEPELEARLAHLGVQVSREKMQDREQFWKYVKPKLPGYTVGDSSQLKLPVALDPGAHHFSLIVDNSPTPIVASSTIPTPDSPSPENTSSVVFDGEPLHFYSSLSKGRHQPMRVKLGSRNVESYTKLGNPSALRT

SEQ ID NO: 1024259 - protein, 162 aa, Homo sapiens
GSTRLGLNRPREAPAAGLFLLLLLGTWAPAPGSASSEAPPLINEDVKRTVDLSSHLAKVTAEVVLAHLGGGSTSRATSFLLALEPELEARLAHLGVQVSVGDPSPPLPGPFPPPFLAVPDSSPGPLGLRKCGDPGGGRGTGGPWDCLGAREESWVARGPGAS

SEQ ID NO: 1024260 - protein, 100 aa, Homo sapiens
TGLSSIMVHGSELHHGGTGLSCIMVARAELHHGGTGLSCIMVEKIEDPVYGIYYVDHINRKTHYENPVLEAKRQTQRELSGFTPIQSLSVLPKELALCQD

SEQ ID NO: 1024261 - protein, 118 aa, Homo sapiens
TGLSSIMVHGSELHHGGTGLSCIMVAPGKSKLETTLEEAHTLNRAAWDSDTLLFSLVSTQYPLSSLQDDHLASKVPHGTVEQGPVSELLTTMGHETPLVPQMVYTLRIITKLKRILSN

SEQ ID NO: 1024262 - protein, 68 aa, Homo sapiens
IELVPPQHVPAALAILDDQDFLIHFRRTVYPAVVLATWGTPMRVTNRCQLNTKKLKLGAHVRALKDGV

SEQ ID NO: 1024263 - protein, 73 aa, Homo sapiens
SQSLEIAEHAVSVTSVWEVCRWVKRRSFHSDTSLILSHGVMFGNFIYLNLVFVLRVGKMSSHYISAFQPDPVG

SEQ ID NO: 1024264 - protein, 52 aa, Homo sapiens
CALGRRIRELTAVVQKRFGFPEGSVELYAEKVATRGPIFRPEDWTSLAVPKH

SEQ ID NO: 1024265 - protein, 184 aa, Homo sapiens
MSPTQWDFPVELCCRPMAFVTLTGLDVVYNAVHRAVWDAFCANRRADRVPISFKVLPGDHEYPKCRPKRASYEWYIPKGILKTGWMNKHLSSGASPGGCVTMKLDWDEPQWKEKQSEVRHQSGNSQAKVYKEETQKVAVVSDSARKPLWPQGEDVIASGQGCSFMHMHVNSQESLSKTLPHTDQ

SEQ ID NO: 1024266 - protein, 260 aa, Homo sapiens
MSAVAVERPARSRTESWRQEPQGHSVSLKLPPPAPVSGRSRGRKSSRAKKRGKGRAKARVLPAPDGRPLGAPDPSQYHESRGKTPIAGTVCRLAAGVRVALEGQLQSCCMILRARGRMACLPGSPLGLVGLSCLLGPELAEGTTGRPLPGPGLGKAASSLRSDLAADTGLRGNQREPVLNGRQNAPEEFEKPGVGPMTGERQGPQEKPGRHQQGDSGPSGSIGWLENGRTPKGGGNGEEYLVRPPGGGQRKEQRECKVRA

SEQ ID NO: 1024267 - protein, 62 aa, Homo sapiens
MIVKKLTLPKDFLWGGAVAAHQVEGGWNKGGKGPSICHVLTGGAHGVPREITKEVLPGKYYP

SEQ ID NO: 1024268 - protein, 91 aa, Homo sapiens
  misc_feature (1)..(2): Xaa can be any naturally occurring amino acid
XXKLADAYLSISHQINARFQRLTSECDPKTHTDYGLKDRMTHVHTYTLYKLHVTPYVKNTNLKAAHSNSDGPPKLLRLQSASRPRPPSDNF

SEQ ID NO: 1024269 - protein, 40 aa, Homo sapiens
DQNELVTIALEDLRRIPHERSKFSTVFAEWPLQADLREHT

SEQ ID NO: 1024270 - protein, 82 aa, Homo sapiens
MRRNHPCNRDKTGCRYNFLVFVLTVLKGATITVLEAWENAFFHFSQIGHGSDNDAVGFFSVSWLPCWLTCNCSSTFSPAFLR

SEQ ID NO: 1024271 - protein, 72 aa, Homo sapiens
MGGLLKFIRGLWTEEKENQPGDPQEKKSPQDGVPDTQKSKKEATQEKNRPDQKTPEVDSTTYGEKQIRSIVT

SEQ ID NO: 1024272 - protein, 164 aa, Homo sapiens
  misc_feature (144)..(144): Xaa can be any naturally occurring amino acid
  misc_feature (156)..(156): Xaa can be any naturally occurring amino acid
GLAGFGSSCGGGCRAWGRGRPRPPSQPPRLARLWLRSAVPFSGLPSERLARTSCSRRSRPSPAGPFPPGGLTGAEFGPAAGTFAAVPLAGPRLGVAGAAGTVFSWFHLVQPGTHKARREEAGLTACVPVTTRNRDNVGSRAPVXWSPNGPGEFLLXGNKFQGAW

SEQ ID NO: 1024273 - protein, 75 aa, Homo sapiens
  misc_feature (74)..(74): Xaa can be any naturally occurring amino acid
MSVPLYIHLAGSQGRQDDQRIGSAFIWLDDGQLRIRKIQLEESKITPFQRTTRQQLMALANAPFNEALPSPDLXR

SEQ ID NO: 1024274 - protein, 165 aa, Homo sapiens
ETSVNFQWIQMDIICLPQCDLFKIEDEQNECHWIHEVTRLPCPEYLQCSSSYSTQWVHGRERADICMRSTTNSAPSLCPSRSNELCLYHQRYCSRVSCAKGSRRRLLDRSVAYEARVVQEWTQEKKGSILKNCCSSHPEAFVALTKREARRTAEKHGKNDVKLCA

SEQ ID NO: 1024275 - protein, 239 aa, Homo sapiens
VAAKKFKDIIHYDPTKQDHATYERKRDDKPKESKAKRKKKREEAEKLPEVSKEMYYNIAMDLKEIFQTTKYTSEKEEGTPWNEDCGKEKPEEIQDPAALTSDAEQPSGFTFSFFDSDTKDIKEETYRVETVKPGKIVWQEDPRLQDSSSEAGKYVTEVNSITETPVLEKHHYFEKETTETPVLDEASLLEKETTRFFFFSKNDERLQGSDLFWRGVGSTMSRNSWEARTTKLRMDCRKE

SEQ ID NO: 1024276 - protein, 139 aa, Homo sapiens
MSAATQRARAGGGAMACAGLLTVCLLRPPAPEPSPQTPREPQLAPELVARRTTLFQDVPQGQMMMGSSHLRNSRPYFADGVLSLGGAAGTVSGIDGHLTDNLETEKLCDYFSEHLGVYRAVLAALESLNRAVLAAWMPP

SEQ ID NO: 1024277 - protein, 72 aa, Homo sapiens
TELCCGFEDELAVGVRRLVDVPEHGKCEFWLVWDLTEQFSWMGLFSTRVRVLLDLLTCNFVTAKEKRERQQH

SEQ ID NO: 1024278 - protein, 119 aa, Homo sapiens
MGLYRSVGVRQGRREGGGSRSGGQGGIVPGSGPSTQTPLTFTPALCSLRRLRPSMSSTGRHTPCEHRTQATLACPGARRQLPRNFLGERALGLPSPLRVSKWDDSRPRKTRGSLGLPEL

SEQ ID NO: 1024279 - protein, 87 aa, Homo sapiens
VHAHRTAVGVAISAGFLALKICMIRRHLFDDDSSDLKSTPGGLSGEGCGARAWLCPTQRGTEGHSVMLATARMNPQAQSPTGCKGRQ

SEQ ID NO: 1024280 - protein, 188 aa, Homo sapiens
RYGSAEMAEVEETLKRLQSQKGVQGIIVVNTEGIPIKSTMDNPTTTQYASLMHSFILKARSTVRDIDPQNDLTFLRIRSKKNEIMVAPDIRLFPDCDSESNRISHSLGLPVSFLNLMPPKNVNVNHVSGTSTWAVAWNPLTPIQWTVCGLGGSSPPPREPLCAPPSPELGAPLSFQFGAELQEPHQFF

SEQ ID NO: 1024281 - protein, 246 aa, Homo sapiens
MNGAFCVDSPCFDDLMVKKSWRQYSGRCLRRRVGGYSEYSSDSLASSEVPELICLSHTDATRESMVKLSSKLECRMSFAGEFGSPSTDASASRCPTAIFAFEGIGDEDLYMLHCLDVRALLPPEEFDRNLSLVVLVVPTVSKEAEGVFLTLLLFRTRTRCFIRLDPRGPRIRTIAVVTIGLVCNRGLPLLFSELALDAKLAFSIIAQSPKGIHGWPALGRNISPSGQLHGLLEPWAKGHKRNRERY

SEQ ID NO: 1024282 - protein, 143 aa, Homo sapiens
  misc_feature (8)..(8): Xaa can be any naturally occurring amino acid
  misc_feature (93)..(93): Xaa can be any naturally occurring amino acid
  misc_feature (99)..(99): Xaa can be any naturally occurring amino acid
  misc_feature (102)..(102): Xaa can be any naturally occurring amino acid
  misc_feature (141)..(141): Xaa can be any naturally occurring amino acid
MEDGLLEXMTKDGGDMPAPLEVSTVPAVGDVISGEYNGGMKELMEHLKAQLQALFEDVRAMRGALDEQASHIQVLSDDVCANQRAIVSMCQIXTTAPRXAAXGVVGGKGSFQSDPQEPETPSPGIGDSGLLGRDPEDEEEXEK

SEQ ID NO: 1024283 - protein, 357 aa, Homo sapiens
TSRTSATTTESTNSSTNATTTASTNVRTSATTTASINVRTSATTTESTNSNTSATTTESTDSNTSATTTEGTNVRTSATTTESTNSNTNATTTESTNSSTNATTTESTNASAKEDANKDGNAEDNRFHPVTDINKESYKRKGSQMVLLERKKLKAQFPNTSENMNVLQFLGFRSDEIKHLFLYGIDIYFCPEGVFTQYGLCKGCQKMFELCVCWAGQKVSYRRIAWEALAVERMLRNDEEYKEYLEDIEPYHGDPVGYLKYFSVKRREIYSQIQRNYAWYLAITRRRETISVLDSTRGKQGSQVFRMSGRQIKELYYKVWSNLRESKTEVLQYFLNWDEKKCQEEWEAKDDTVFVEA

SEQ ID NO: 1024284 - protein, 148 aa, Homo sapiens
AISRRRLLQGAGAMWLLSVSQVSLAAVSQVVAVRVWPASSYTRVTVESNRQLKYKQFALSNPERVVVDIEDVNLNSVLKGMAAQIRADDPFIKSVQTGTNRTDNYRAYNLKVRRVKRQRQVHQAAIGLGVRREAHVVFHVTRAEVFFM

SEQ ID NO: 1024285 - protein, 209 aa, Homo sapiens
GWTRPRASATRFCHSMEDGLLEIMTKDGGDMPAPLEVSTVPAVGDVISGEYNGGMKELMEHLKAQLQALFEDVRAMRGALDEQASHIQVLSDDVCANQRAIVSMCQIMTTAPRQAALGVVGGKGSFQSDPQEPETPSPGIGDSGLLGRDPEDEEDEEEEKEMPSPATPSSHCERPESPCAGLLGGDGPLVEPLDMPDITLLQLEGEASL

SEQ ID NO: 1024286 - protein, 71 aa, Homo sapiens
LNFIGKYRLTGVHRRKDLAGTHIDDAQVHGNLIELVLRVGTDAKISCPNPARFDVAFITDNRTFNHDICRR

SEQ ID NO: 1024287 - protein, 86 aa, Homo sapiens
FFIDLFLCWGLTTPERRNPAATFTRLLGKYFIIAIRLSVHDRNIATAVPTQKNLKNQENKSDVGFLAKKLSPIDDRLSHTKVKYSY

SEQ ID NO: 1024288 - protein, 182 aa, Homo sapiens
MLVPWDYRGEPTRPAQQWLLCGKKVRAEGPWEDAPPNMSSLIVGKLPMFAQPFSPIRASKRMAKVSSNNFASLPRQAPMLLFCPLWMPVTSVPQEAKLLRQLKFSQGTGVCVLIYTPLHTYFFKLSPTLGTPVLEYPQQFKGKKRLKQKDFFLPKLCLLAWGPRHADLKINQAWVGHGGSRL

SEQ ID NO: 1024289 - protein, 117 aa, Homo sapiens
VYYDETAQEIVDEFAMRYGVESIYQAMTHFACLPSKYMCPGVPAVMSTLLANINAYYAHTTASTNVSASDRFAASNFGKERFVKLLDQLHNSLRIDLSMYRKLPSQQPGETPEPHDG

SEQ ID NO: 1024290 - protein, 46 aa, Homo sapiens
MGISGRFLLLAVALVIAAAAVAADEQAAVDLAGPGEIAAGVKEAAE

SEQ ID NO: 1024291 - protein, 139 aa, Homo sapiens
TICQIINLFFDPRDSIFREDRRGANFACLVANDQLIVFDPDGAIRQVMRQCQRATYRDRLIEMLLIHLGIVLRALGTDWRFHNMHQRIFVRFNAVAERVQFQCGHGCYPRKVAVNPFWQAYCWAKSSSSGASSGFPGAS

SEQ ID NO: 1024292 - protein, 88 aa, Homo sapiens
WLNSYMILKKNKGGRLTLNITPYVEEAPRASTPLPPSMLSCGLELMTQANLEAVEVPPSQSPQAVMLVTTVILATAKQHAPKDTNSKE

SEQ ID NO: 1024293 - protein, 226 aa, Homo sapiens
RRPPARCCSGEWPPSTRPALLRRASAHPPPQPCGNPACGAEWGASTSGEREWQPLATEDDRRLPPGAATDKQFCWNHGNKCGKYQRTREGHGVDLLGRWTAVAAELQRRLVVGMRLCAPVLQPRGGWEFQMTTSNTAVTSRARRRRLVCGALARATDGKRRSRGGRRAHCCATVREAGSADEDDQMLLGRAWALSSFFFCEMNARSYGLKAMYRVVGQVTNPNVGR

SEQ ID NO: 1024294 - protein, 97 aa, Homo sapiens
  misc_feature (25)..(25): Xaa can be any naturally occurring amino acid
  misc_feature (35)..(35): Xaa can be any naturally occurring amino acid
MYTHFPNMVYTYMYAIFVNLKKKRXHLSQTKQPMXFWDGSHVYYKRTSRDEGGWGFSSSPAASAPGRPTQGQSLGIMRRVQPAVLLVNVEYGLPVTE

SEQ ID NO: 1024295 - protein, 59 aa, Homo sapiens
MTISSKRQQLYVASAVGVTHLSLHRCQAYGAACADCCLAWDPYCAWDVQACSGYTASSK

SEQ ID NO: 1024296 - protein, 139 aa, Homo sapiens
  misc_feature (14)..(14): Xaa can be any naturally occurring amino acid
  misc_feature (26)..(26): Xaa can be any naturally occurring amino acid
  misc_feature (29)..(29): Xaa can be any naturally occurring amino acid
  misc_feature (78)..(78): Xaa can be any naturally occurring amino acid
CRNKGKGAYRIEYXTYGFTEIVNVPXSRXTVVRKGCCSSATTGLLASRGRHLIIRSAITLSPHCRRTGTAHTGCTGWXSIMQQADFAADILFLLCGKDISTAGGSALSDWLITNSIFMPVCFANHLTVKVLISRQCPII

SEQ ID NO: 1024297 - protein, 81 aa, Homo sapiens
STVVYRQHSYQTIDFKTKDIKKDKEGHYLMIKGSIQGEDVTIVDIYAPNIGAPRYIQQILTDIKGDIDGNTIIVGDLNNHL

SEQ ID NO: 1024298 - protein, 70 aa, Homo sapiens
MAALAASMATSTAFAAKPRLARPPARLSVSCSASSGDNNTPSLSASIKTFSAALALSSVLLSSAATSPPP

SEQ ID NO: 1024299 - protein, 112 aa, Homo sapiens
LRLWTQSRCGEEIAVQFVDMVKGKSLHGGCDLPKALPVPFSPENNALDLVLADSYWVTLDCDAWAWVPQEDQSSVITTWDTSPEELLGNLPNAPQVICRGSVKGGFPSQGGL

SEQ ID NO: 1024300 - protein, 130 aa, Homo sapiens
ETQLVVDGGGKKMKQVLKLHSLIAPTLLEDGIMECCHTFEQFLQERITVNGKSWATLVEGVVTIEKEQDAMITVTSEVPFSKRYLKYLTKKYLKKNNLRDWLRVVANSKESYELRYFQINQDEEEEEDED

SEQ ID NO: 1024301 - protein, 130 aa, Homo sapiens; identical to SEQ ID NO: 1024300

SEQ ID NO: 1024302 - protein, 167 aa, Homo sapiens
MSSRPSSAVPNSASLSEDQSSDRSKFPKADDLIDERDRKLTELYCVSRLNQLLELTDENKLRKEIDAFLKKNDIRRGIRFDEASLPKLLHTAATPITKKKLKDVNLINVPNQRLSDSKMSRELPDNSENVSVKSESHFVPSHDNSIRENMVDSLRPAEKTGGMGTKG

SEQ ID NO: 1024303 - protein, 204 aa, Homo sapiens
MDPLRLLLPRAQAQPLLPLPAGVPAPSVRPRLVPRRRARRHRNGAARMLPASAVASESPWTEQDPPSGEKEERFDWLDQWYPFAPVEDLDPGAPHGKMVLGIRVVAWYDRGAGEWRVFEDACPHRLAPLSEGRIDDKGRLQCVYHGWCFDGRGACKFIPQAPALGPPVHTNSKACVASYPCVVQNKLLWFYPRAGPEHSDVLQR

SEQ ID NO: 1024304 - protein, 108 aa, Homo sapiens
MTISTLSNETTKSGSCSGQGKNGGKGFTYGKKCFTKEEWKEQVAKYSAMGELYANKTIHYPLKIQPNSSGGSQDEGFATIQTTPIEPTLPRLLLNYFVSMAYEDSRGG

SEQ ID NO: 1024305 - protein, 46 aa, Homo sapiens
NILFNPVPTLTVRGKEQWLPVEATNADPRPSPQRRSAKPEAQGAAA

SEQ ID NO: 1024306 - protein, 505 aa, Homo sapiens
RPVDAWVRARSRLGADLHPGAAGGSGACTPLRSSGGRRGGGAEAAGKGGVPAMERAVEPWGPDLHRPEEREPQRGARTGLGSENVISQPNEFEHTPQEDDLGFKEEDLAPDHEVGNVSLKPEGIQNWDDLWVQREGLGKPQPRDRGPRLLGEPRWGQASSDRAAVCGECGKSFRQMSDLVKHQRTHTGEKPYKCGVCGKGFGDSSARIKHQRTHSGEKPYRARPPAQGPPKIPRSRIPAGERPTICGECGKSFRQSSDLVKHQRTHTGEKPYKCGICGKGFGDSSARIKHQRTHRGEQPPRPVVPRTAAISGSTAATQGPKAQDKPYICTDCGKRFVLSCSLLSHQRSHLGPKPFGCDVCGKEFARGSDLVKHLRVHTGEKPYLCPECGKGFADSSARVKHLRTHSGERPHACPECDRTFSLSSTLLRHRLTHMEPQDFSFPGYPLPALIPSPTPPPLGTSHPLTPRSPSHSGETLRPAVALEPKSLGAQKAEEASSHTARGKAT

SEQ ID NO: 1024307 - protein, 576 aa, Homo sapiens
RPVDAWVRARSRLGADLHPGAAGGSGACTPLRSSGGRRGGGAEAAGKVRCGVLRAGEEQQVQVAAWRRVAGGHLGAAARTMGPDAARCPALAGRGQRQGAAGHTWLRDLRDAVCPLAQGGVPAMERAVEPWGPDLHRPEEREPQRGARTGLGSENVISQPNEFEHTPQEDDLGFKEEDLAPDHEVGNVSLKPEGIQNWDDLWVQREGLGKPQPRDRGPRLLGEPRWGQASSDRAAVCGECGKSFRQMSDLVKHQRTHTGEKPYKCGVCGKGFGDSSARIKHQRTHSGEKPYRARPPAQGPPKIPRSRIPAGERPTICGECGKSFRQSSDLVKHQRTHTGEKPYKCGICGKGFGDSSARIKHQRTHRGEQPPRPVVPRTAAISGSTAATQGPKAQDKPYICTDCGKRFVLSCSLLSHQRSHLGPKPFGCDVCGKEFARGSDLVKHLRVHTGEKPYLCPECGKGFADSSARVKHLRTHSGERPHACPECDRTFSLSSTLLRHRLTHMEPQDFSFPGYPLPALIPSPTPPPLGTRHPLTPRSPSHSGETLRPAVALEPKSLGAQKAGEPAATLRGGKPP

SEQ ID NO: 1024308 - protein, 478 aa, Homo sapiens
RPVDAWVRARSRLGADLHPGAAGGSGACTPLRSSGGRRGGGAEAAGRGARTGLGSENVISQPNEFEHTPQEDDLGFKEEDLAPDHEVGNVSLKPEGIQNWDDLWVQREGLGKPQPRDRGPRLLGEPRWGQASSDRAAVCGECGKSFRQMSDLVKHQRTHTGEKPYKCGVCGKGFGDSSARIKHQRTHSGEKPYRARPPAQGPPKIPRSRIPAGERPTICGECGKSFRQSSDLVKHQRTHTGEKPYKCGICGKGFGDSSARIKHQRTHRGEQPPRPVVPRTAAISGSHGSYPGTEGPGQANICTDCGKRFVLSCSLLSHQRSHLGPKPFGCDVCGKEFARGSDLVKHLRVHTGEKPYLCPECGKGFADSSARVKHLRTHSGERPHACPECDRTFSLSSTLLRHRLTHMEPQDFSFPGYPLPALIPSPTPPPLGNSHPLTPRSPSHSGETLRPAVALEPKSLGAQKAGEPAATLRGGKPP

SEQ ID NO: 1024309 - protein, 177 aa, Homo sapiens
  misc_feature (8)..(8): Xaa can be any naturally occurring amino acid
  misc_feature (16)..(16): Xaa can be any naturally occurring amino acid
  misc_feature (19)..(20): Xaa can be any naturally occurring amino acid
  misc_feature (29)..(29): Xaa can be any naturally occurring amino acid
  misc_feature (105)..(105): Xaa can be any naturally occurring amino acid
RQAVPDTXPHLKVPIXRAXXEACRRIQAXGYTLGNVDVTIIAQHRRCCRIIPQMRVFIAEDLGCHMDDVNVKATTTEKLGFTGRGEGIACEAVALLIEGNKMIEXDNLTYLHGKPQGTGLLKANPEDFVVVEDLGFEPDGEGEHILVRILKNGCNTRFVADALAKFLKIHAREALRW

SEQ ID NO: 1024310 - protein, 97 aa, Homo sapiens
  misc_feature (1)..(1): Xaa can be any naturally occurring amino acid
  misc_feature (10)..(10): Xaa can be any naturally occurring amino acid
  misc_feature (12)..(12): Xaa can be any naturally occurring amino acid
XPSRSVGSLXWXRLLPRGPHEQQPLVLGLQLPVHGQREAEEAPGVSIFPDHVVLPSVQVEGCAEPGQEPRRQVEQAQLPGGGHGRTHGEGSGDLQRP

SEQ ID NO: 1024311 - protein, 101 aa, Homo sapiens
HPGTTLPANPQQRCGDPERHPSPKHTREAQQSVPPAGVPANTPGGKNRRKALCLKQKKNCQCMASEKPKRLPGSPYFRITLSSRVSKLKAAPSRDRSPADR

SEQ ID NO: 1024312 - protein, 88 aa, Homo sapiens
AREHENEWIPYEIPLDLTVEPAHAPKHPVLHPSFKYVSYPFLKKSFWKEAVDTSVNLERLDIIQVMLYLERLGSFTMADSFSCRIRHE

SEQ ID NO: 1024313 - protein, 171 aa, Homo sapiens
  misc_feature (156)..(156): Xaa can be any naturally occurring amino acid
KYGTYCVVPYTRGEEVSRPSDDILFEIAQLAAQGVREVNLLGQNVNAWRGENYDGTTGSFADLLRLVAAIDGIDRIRFTTSHPIEFTDDIIEVYRDTPELVSFLHLPVQSGSDRILNLMGRTHTALEYKAIIRKLRAARPDIQISSDFIVGFPGEXPRLRENVELFAAQFR

SEQ ID NO: 1024314 - protein, 175 aa, Homo sapiens
LALLIMVSKSSRGPGMAAAGSEAEEALLLPERVAGDAGAPPGNASVLGAVFNVSTSVVGAGIMSIPAAMRVLGVAPALALIVCVALLANVAVDFMLRYTRGTPSYAALMGGSFGRAGAKLLNVFIAFNCVGTLTVYLIIIGDVMSGPVGSGEAHAGVLPEWFGPHWWTGGTAVLV

SEQ ID NO: 1024315 - protein, 75 aa, Homo sapiens
RLGMTLGRQLLCLPVGAPPAPAMLSALARPASAALRRSFSTSAQVWPDEGLACMAGWPPVPWATVLSPVFCWCML

SEQ ID NO: 1024316 - protein, 285 aa, Homo sapiens
  misc_feature (250)..(250): Xaa can be any naturally occurring amino acid
MTLGRQLLCLPVGAPPAPAMLSALARPASAALRRSFSTSAQNNAKVAVLGASGGIGQPLSLLLKNSPLVSRLTLYDIAHTPGVAADLSHIETKAAVKGYLGPEQLPDCPEKGWWMWVCNPGLESPKKPGFDPVDDLVSNTNCQQNLMDHHDTLPCAQHCPEATDSAIIANPVNSNIHITADSLSKKHGSVQTTNKIYQDVTTPGASVESQNFGLQAWNGFGSQVRVYLSLSLGWPCLGKNIIPLISQCTXKVGPFPRTSDRLTGRIRRPDGGGQGKSGAGSVNLS

SEQ ID NO: 1024317 - protein, 74 aa, Homo sapiens
  misc_feature (3)..(3): Xaa can be any naturally occurring amino acid
SRXHLVPTSIPLDNGNHSFLHETATWWFVPPRPTHFPISWTATVSQIPNMSLAASSSLGLATDRDPLQPELRHW

SEQ ID NO: 1024318 - protein, 310 aa, Homo sapiens
MEEAGSVALEELVEKEKDRFFSGVDYIVISDNLWISQRKPAITYGTRGNSYFMVEVKCRDQDFHSGTFGGILHEPMADLVALLGSLVDSSGHILVPGIYDEVVPLTEEEINTYKAIHLDLEEYRNSSRVEKFLFDTKEEILMHLWRYPSLSIHGIEGAFDEPGTKTVIPGRVIGKFSIRLVPHMNVSAVEKQVTRHLEDVFSKRNSSNKMVVSMTLGLHPWIANIDDTQYLAAKRAIRTVFGTEPDMIRDGSTIPIAKMFQEIVHKSVVLIPLGAVDDGEHSQNEKINRWNYIEGTKLFAAFFLEMAQLH

SEQ ID NO: 1024319 - protein, 329 aa, Homo sapiens
AFRALEQDLPVNIKFIIEGMEEAGSVALEELVEKEKDRFFSGVDYIVISDNLWISQRKPAITYGTRGNSYFMVEVKCRDQDFHSGTFGGILHEPMADLVALLGSLVDSSGHILVPGIYDEVVPLTEEEINTYKAIHLDLEEYRNSSRVEKFLFDTKEEILMHLWRYPSLSIHGIEGAFDEPGTKTVIPGRVIGKFSIRLVPHMNVSAVEKQVTRHLEDVFSKRNSSNKMVVSMTLGLHPWIANIDDTQYLAAKRAIRTVFGTEPDMIRDGSTIPIAKMFQEIVHKSVVLIPLGAVDDGEHSQNEKINRWNYIEGTKLFAAFFLEMAQLH

SEQ ID NO: 1024320 - protein, 310 aa, Homo sapiens; identical to SEQ ID NO: 1024318

SEQ ID NO: 1024321 - protein, 121 aa, Homo sapiens
MWLLPQELKRLDARGGQERELLFPSAEGKKGLLSQRETESVAKDLSFPMSLSSSPFIFPYLSDRISETPYVTAVCVLVHKLVFSVVCVCECCKYAHTQGLTTPHLGLQTPVRPVSSYRVSP

SEQ ID NO: 1024322 - protein, 82 aa, Homo sapiens
MHVNWELVCRLAILPVTQDFSSSLHFLDLYRANGNPSYASQPLKIRFVNSITLQVIGLPSLNDVILIRQAGPFMQGMLVVYV

SEQ ID NO: 1024323 - protein, 191 aa, Homo sapiens
TSFIRKVPNSIMKLSNLTILNLQCNELESLPAGFVELKNLQLLDLSSNKFMHYPEVINYCTNLLQIDLSYNKIQSLPQSTKYLVKLAKMNLSHNKLNFIGDLSEMTNLRTLNLRYNRISSIKTNASNLQNLFLTDNRISNFEDTLPKLRALEIQENPITSISFKDFYPKNMTSLTLNKAQLSSIPENYSPN

SEQ ID NO: 1024324 - protein, 207 aa, Homo sapiens
MASMGLQVMGIALAVLGWLAVMLCCALPMWRVTAFIGSNIVTSQTIWEGLWMNCVVQSTGQMQCKVYDSLLALPQDLQAARALVIISIIVAALGVLLSVVGGKCTNCLEDESAKAKTMIVAGVVFLLAGLMVIVPVSWTATTSFQDFYTSRWWPPGQKREMGGLALRQVGPPPACCSLAGGCVAATVNPAQTTTPQYSLPLCCCRIR

SEQ ID NO: 1024325 - protein, 387 aa, Homo sapiens
PSRRRPPTKPQAGAGAAAARACGAEPLARAVGESVRPSVRPSGRRSSRQAQRPRPLVSPHPEPPGGAGLAAAAMSMGLEITGTALAVLGWLGTIVCCALPMWRVSAFIGSNIITSQNIWEGLWMNCVVQSTGQMQCKVYDSLLALPQDLQAARALIVVAILLAAFGLLVALVGAQCTNCVQDDTAKAKITIVAGVLFLLAALLTLVTVSWSANTIIRDFYNPVVPEAKSRENWARPGTWAGAGRALQLTVVRHCLLILFPTRDEVTGTRVAYFATGSPGREPLATGIRTAGNSFRGPDPWRHPPPPRQSRAQFTQPGNAATRAQHVNKSEQTATPSHSRSDSEITTDKLTDRSSEAARAEQLACECNTIRSPVGVRISRHESDNNSI

SEQ ID NO: 1024326 - protein, 42 aa, Homo sapiens
  misc_feature (3)..(3): Xaa can be any naturally occurring amino acid
  misc_feature (8)..(9): Xaa can be any naturally occurring amino acid
  misc_feature (11)..(11): Xaa can be any naturally occurring amino acid
  misc_feature (23)..(23): Xaa can be any naturally occurring amino acid
MPXRPTGXXPXWGLGLSNRIVCXIRILGWNPFTNGFWFRMAP

SEQ ID NO: 1024327 - protein, 202 aa, Homo sapiens
PSRRRPPTKPQAGAGAAAARACGAEPLARAVGESVRPSVRPSGRRSSRQAQRPRPLVSPHPEPPGGAGLAAAAMSMGLEITGTALAVLGWLGTIVCCALPMWRVSAFIGSNIITSQNIWEGLWMNCVVQSTGQMQCKVYDSLLALPQDLQAARALIVVAILLAAFGLLVALVGAQCTNCVQDDTAKAKITIVAEARDGRGPV

SEQ ID NO: 1024328 - protein, 458 aa, Homo sapiens [sequence omitted]

SEQ ID NO: 1024329 - protein, 258 aa, Homo sapiens
MERKLTSPLKKAFIGCYMFIARDFDALNERIQKETTEQRALEEQEKQERAERVRKLREERKQNEQEQAELDGTSGLAELDPEPTNPFQPIASVIIENEGKLEREKKNQKMEKDSDGCHLKHKMEHEQIETQGQVNHNGQKNNEFGLVENYKEALTQQLKNEDETDRPSLESANGKKKTKKLRMKRNHRVEPLNIDDCAPESPTPPPPPPPVGWGTPKVTRLPKLEPLGETHHNDFYRKPLPPLAVPQRPNSDAHDVIS

SEQ ID NO: 1024330 - protein, 258 aa, Homo sapiens; identical to SEQ ID NO: 1024329

SEQ ID NO: 1024331 - protein, 258 aa, Homo sapiens; identical to SEQ ID NO: 1024329

SEQ ID NO: 1024332 - protein, 160 aa, Homo sapiens
WVKGAGLPRVTAGMKPILLQGHERSITQIKYNREGDLLFTVAKDPIVNVWYSVNGERLGTYMGHTGAVWCVDADWDTKHVLTGSADNSCRLWDCETGKQLALLKTNSAVRTCGFDFGGNIIMFSTDKQMGYQCFVSFFDLRDPSQIDNNEPYMKIPCNDS

SEQ ID NO: 1024333 - protein, 75 aa, Homo sapiens
WVKGAGLPRVTAGMKPILLQGHERSITQIKYNREGDLLFTKNTKISQAWWHTPIVPATQEAEAGESLEPRRQRLQ

SEQ ID NO: 1024334 - protein, 105 aa, Homo sapiens
HEETSPSSIETKLNATSVINEEGQSKVTKEADIDDLSSHSQNLRASLVKAGDNISEAPYDKEKKILDVGNTLAAHKSNQKPSHSDEQFDQEDHIDAPRSNSSRKS

SEQ ID NO: 1024335 - protein, 143 aa, Homo sapiens
TIDDLEDEVYALKMKYKSRSEYTGNALKCHNFLLTPSQPCHLSSLLSSPFHSLYGEASRQKNKKLPTLHSQGWEQPRESPIMPTTHSGTGFILYLSPSTLLGCLINSETWEKTQTKQNKIIKANTNRKKQKHLWVWRARPRDP

SEQ ID NO: 1024336 - protein, 129 aa, Homo sapiens
  misc_feature (4)..(4): Xaa can be any naturally occurring amino acid
  misc_feature (6)..(6): Xaa can be any naturally occurring amino acid
  misc_feature (8)..(9): Xaa can be any naturally occurring amino acid
  misc_feature (14)..(14): Xaa can be any naturally occurring amino acid
  misc_feature (27)..(27): Xaa can be any naturally occurring amino acid
  misc_feature (43)..(43): Xaa can be any naturally occurring amino acid
  misc_feature (60)..(60): Xaa can be any naturally occurring amino acid
  misc_feature (65)..(65): Xaa can be any naturally occurring amino acid
EILXIXLXXQTILXKFALTNIWSCQSXEPYSSFFRDFTSVTLXRFSQVWSGKHLYRPVLXRGVQXFLSPTCNFLTPRPKIFLNSLLLTHTHSGPTSWIMYFPHHNYLLHYQILVQDQDDLLVFELSSSF

SEQ ID NO: 1024337 - protein, 39 aa, Homo sapiens
PGSMQCIHRELASDLVVAHHEMGHIQLVSCSYKDLPCGA

SEQ ID NO: 1024338 - protein, 48 aa, Homo sapiens
MAVAPTWCQVLRTSAGIIGMSHHTQDVTPFPDLSISQMGHCNSFPTGP

SEQ ID NO: 1024339 - protein, 97 aa, Homo sapiens
  misc_feature (1)..(1): Xaa can be any naturally occurring amino acid
  misc_feature (3)..(4): Xaa can be any naturally occurring amino acid
  misc_feature (6)..(6): Xaa can be any naturally occurring amino acid
  misc_feature (8)..(9): Xaa can be any naturally occurring amino acid
  misc_feature (13)..(13): Xaa can be any naturally occurring amino acid
XKXXPXPXXTGTXNPNSHRWPPPPSPVTVPRESHPTSETPGTFIIHPIPDSHPRIAREDFGLANCVGYVSVVLIRDVHDCQSAFLTSVTTLLRCNSS

SEQ ID NO: 1024340 - protein, 398 aa, Homo sapiens
MDIRKFFGAISSGKKPVNETVKKNEKTKPSEGTVKGKKGVKEAKVNNPCKEDASRPKQHNKKKRIIYDSDSESEETVQVKNAKKKSEKLPVSCKPGKISRKDPVTYISETDEDDDFLCKKAASKSKENGVSTNSYLGASNVKKNEENTKTKSKPLSPIKLTPTSVLDYFGTESVQRSGKKMVASKKKESSQTPDDSRLNDEAIAKQLQLDEDAELERQLHEDEEFARTLALLDEEPKTKKARKDSEEGESFSPAKAELSKAAKQKSPANEHFSIGRKTYSPAKYGKGRGSEGTKQPCRSAHQKEACSSLKASSKLALMKAQEENSYKETELLAAKRESAIEPKGEKTTPRKTKGSPTKRESVSPEDSEKNRTNYQSLSKLLKSRRSQSPGLQRNTQGS

SEQ ID NO: 1024341 - protein, 251 aa, Homo sapiens
GPDAPVPARTATTEGADRSDLNGHLCSSSPGYLCAARPQTMLLGRLTSAAVEGLFLGQAGVRLGPSLECWAAVVCGAPLQSHRRPAQVGGSLPRKGAQLELEEMLVPRKMSVSPLESWLTARCFLPRLDTGTAGTVAPPQSYQCPPSQIGEGAEQGDEGVADAPQIQCKNVLKIRRRKMNHHKYRKLVKKTRFLRRKVQEGRLRRKQIMFEKDLRRILAGVLVLEGRPPEWLAGPPMIYLVGNTEFLGGQP

SEQ ID NO: 1024342 - protein, 251 aa, Homo sapiens
VEVWAWEWVSGRPEVRRALRQAGPGSSREAPLGPVCRSATDHAPGAPDFPAVEGLFLGQAGVRLGPSLECWAAGSAGPFTAHRRPAQVGGSLPRKGAQLELEEMLVPRKMSVSPLESWLTARCFLPRLDTGTAGTVAPPQSYQCPPSQIGEGAEQGDEGVADAPQIQCKNVLKIRRRKMNPPQVPEAGEEDAVPAEEGPGGTPETQADQVRERPEAQSGWKAGAKGRPPEWLAGPPMIYLVGNTEFLGGQP

SEQ ID NO: 1024343 - protein, 667 aa, Homo sapiens
TASAGGGGDGGAAARGRAAARRRRRRRRRRRRRRRRRRRRRRRRRRRRRRLGLERPQPTSRGRAPGASRAEEKMEELVVEVRGSNGAFYKAFVKDVHEDSITVAFENNWQPDRQIPFHDVRFPPPVGYNKDINESDEVEVYSRANEKEPCCWWLAKVRMIKGEFYVIEYAACDATYNEIVTIERLRSVNPNKPATKDTFHKIKLDVPEDLRQMCAKEAAHKDFKKAVGAFSVTYDPENYQLVILSINEVTSKRAHMLIDMHFRSLRTKLSLIMRNEEASKQLESSRQLASRFHEQFIVREDLMGLAIGTHGANIQQARKVPGVTAIDLDEDTCTFHIYGEDQDAVKKARSFLEFAEDVIQVPRNLVGKVIGKNGKLIQEIVDKSGVVRVRIEAENEKNVPQEEEIMPPNSLPSNNSRVGPNAPEEKKHLDIKENSTHFSQPNSTKVQRGMVPFVFVGTKDSIANATVLLDYHLNYLKEVDQLRLERLQIDEQLRQIGASSRPPPNRTDKEKSYVTDDGQGMGRGSRPYRNRGHGRRGPGYTSGTNSEASNASETESDHRDELSDWSLAPTEEERESFLRRGDGRRRGGGGRGQGGRGRGGGFKGNDDHSRTDNRPRNPREAKGRTTDGSLQNTSSEGSRLRTGKDRNQKKEKPDSVDGQQPLVNGVP

SEQ ID NO: 1024344 - protein, 632 aa, Homo sapiens [sequence omitted]

SEQ ID NO: 1024345 - protein, 101 aa, Homo sapiens
MQRLCVYVLIFALALAAFSEASWKPRSQQPDAPLGTGANRDLELPWLEQQGPASHHRRQLGPQGPPHLVADPSKKQGPWLEEEEEAYGWMDFGRRSAEDEN

SEQ ID NO: 1024346 - protein, 267 aa, Homo sapiens
VGAALLPSPHPLKIVACSKFVSTPSLVKSTSQFAEPSSYLQVVLKRPEILTDESLSSLESHVPLPHLSLAESSKPAPFQGHRHRQPMFIGAGAATFGVAWSGAGIGTVFGSLIICYAREPFSEAQSSPTPFWALPSSEANGALLSDGSLSHPLVPCEEPSPPPIVLPRSGWPRCVLFLIPPQAAGGTGLCSVFDRRNGPINFWQKQETTKKVVGRRTPEKFNTIVCAGPINKNCQVSQEPRRVCWLPKKPGAVSPHGWPGYGVTPTQ

SEQ ID NO: 1024347 - protein, 207 aa, Homo sapiens
  misc_feature (39)..(39): Xaa can be any naturally occurring amino acid
  misc_feature (64)..(64): Xaa can be any naturally occurring amino acid
  misc_feature (198)..(198): Xaa can be any naturally occurring amino acid
VPRCSLRPSRDGAPAYSGPSLLGLKAWASAGRAGRGRTXAQEGPGSRETVPAASPAPTCGSPAXPPADKRCGVSPRSASARSSSPAARSIPAQPPCPSTSAPRYSPRAQPPSRAAGPGAHELRRPGGLGSSSLYGLGASRRAWRAALPMGARWAGIREVTINQSLLARCGWTRPLPPAGAQEESEQIKTLNNKFAPSXTRCGFLEQQ

SEQ ID NO: 1024348 - protein, 61 aa, Homo sapiens
LRRSRGSHYGRDHKHVLKLVAPSKPPWSGLMRPEGRVQDLDPAPLSRRFMIGRTEKSCGHL

SEQ ID NO: 1024349 - protein, 183 aa, Homo sapiens
GAAALAPGPAPAPPPRFSLSFGLSPPQRDAEPGAEPCARACRSDLDEREAFCESEFAVNGIVHDVDVLGAGIRLVTLLVDRDGLYKMNRLYLTPDGFFFRVHMLALDSSSCNKPCPEFKPGSRYIVMGHIYHKRRQLPTALLQVLRGRLRPGDGLLRSSSSYVKRFNRKREGQIQGAVHTQCI

SEQ ID NO: 1024350 - protein, 161 aa, Homo sapiens
GAAALAPGPAPAPPPRFSLSFGLSPPQRDAEPGAEPCARACRSDLDEREAFCESEFAVNGIVHDVDVLGAGIRLVTLLVDRDGLYKMNRLYLTPDGFFFRVHMLALDSSSCNKPCPEFKPGIETDLNDAAYVLYTTVCNVGATARAVGRPAFFWERWGTMT

SEQ ID NO: 1024351 - protein, 115 aa, Homo sapiens
MLFSKLFLEAAVNGIVHDVDVLGAGIRLVTLLVDRDGLYKMNRLYLTPDGFFFRVHMLALDSSSCNKPCPEFKPGIETDLNDAAYVLYTTVCNVGATARAVGRPAFFWERWGTMT

SEQ ID NO: 1024352 - protein, 183 aa, Homo sapiens; identical to SEQ ID NO: 1024349

SEQ ID NO: 1024353 - protein, 115 aa, Homo sapiens; identical to SEQ ID NO: 1024351

SEQ ID NO: 1024354 - protein, 137 aa, Homo sapiens
MLFSKLFLEAAVNGIVHDVDVLGAGIRLVTLLVDRDGLYKMNRLYLTPDGFFFRVHMLALDSSSCNKPCPEFKPGSRYIVMGHIYHKRRQLPTALLQVLRGRLRPGDGLLRSSSSYVKRFNRKREGQIQGAVHTQCI

SEQ ID NO: 1024355 - protein, 347 aa, Homo sapiens
CPLLGGKGFVTKQTTKHVHHHYIHHHAVPKTKEEIEAEATQRVHCFCPGGSEYYCYSKCKSHSKAPETMPSEQFGGSRGSTLPKRNGKGTEPGLALPAREGGAPGGAGALQLPREEGDRSQDVWQWMLESERQSKPKPHSAQSTKKAYPLESARSSPGERASRHHLWGGNSGHPRTSPRAHLFTQDPAMPPLTPPNTLAQLEEACRRLAEVSKPPKQRCCVASQQRDRNHSATVQTGATPFSNPSLAPEDHKEPKKLAGVHALQASELVVTYFFCGEEIPYRRMLKAQSLTLGHFKEQLSKKGNYRYYFKKASDEFACGAVFEEIWEDETVLPMYEGRILGKVERID

SEQ ID NO: 1024356 - protein, 347 aa, Homo sapiens; identical to SEQ ID NO: 1024355

SEQ ID NO: 1024357 - protein, 282 aa, Homo sapiens
CPLLGGKGFVTKQTTKHVHHHYIHHHAVPKTKEEIEAEATQRVHCFCPGGSEYYCYSKCKSHSKAPETMPSEQFGAQSTKKAYPLESARSSPGERASRHHLWGGNSGHPRTSPRAHLFTQDPAMPPLTPPNTLAQLEEACRRLAEVSKPPKQRCCVASQQRDRNHSATVQTGATPFSNPSLAPEDHKEPKKLAGVHALQASELVVTYFFCGEEIPYRRMLKAQSLTLGHFKEQLSKKGNYRYYFKKASDEFACGAVFEEIWEDETVLPMYEGRILGKVERID

SEQ ID NO: 1024358 - protein, 255 aa, Homo sapiens
HEVCFNCTLRVDQTIHVKCFECPLRICILCFQCGAESPPHRRGHNYELVKPTSNPEAMSWTHEDEFELLKAAHKFKMGNWGEIAESIGRGRKDGHNCKDYFEKHFVRGWIGQFSIKSSSWDRIKYGMYINQTLDSVLQKNCLESTERMLLIRDAVRASGESWDENDPKLAIKVQQVLEQYVQKVIDDDIETKYERPKFLTNQYETELSPDDCDPDNERDMKSKRSVKQEINTDDSDNDNSPGPSSSCRKKGPPSP

SEQ ID NO: 1024359 - protein, 205 aa, Homo sapiens
REDGGAAVLVAVKRVIDYAVKIPVKPDMDLVWSLDGVMHSMNPFLEICVWSECLVLAQWRRSLVKEVICRQLWACTVAMETIRTALAMGAGPDGVHVDGAPSRSMNCLGPLQVCSGPGQAWQRMEKVDLVLLGKQAIDDDCNQTGQMTAVDFLTCATGHIRLPVCCLEWGQVKVEREIDWGLETLRLKLPAVVTAELRLKEPRYA

SEQ ID NO: 1024360 - protein, 529 aa, Homo sapiens
MRSEKSLTLAAPGEVRGPEGEQQDAGDFPEAGGGGGCCSSERLVINISGLRFETQLRTLSLFPDTLLGDPGRRVRFFDPLRNEYFFDRNRPSFDAILYYYQSGGRLRRPVNVPLDIFLEEIRFYQLGDEALAAFREDEGCLPEGGEDEKPLPSQPFQRQVWLLFEYPESSGPARGIAIVSVLVILISIVIFCLETLPQFRVDGRGGNNGGVSRVSPVSRGSQEEEEDEDDSYTFHHGITPGEMGTGGSSSLSTLGGSFFTDPFFLVETLCIVWFTFELLVRFSACPSKPAFFRNIMNIIDLVAIFPYFITLGTELVQQQEQQPASGGGGQNGQQAMSLAILRVIRLVRVFRIFKLSRHSKGLQILGKTLQASMRELGLLIFFLFIGVILFSSAVYFAEADDDDSLFPSIPDAFWWAVVTMTTVGYGDMYPMTVGGKIVGSLCAIAGVLTIALPVPVIVSNFNYFYHRETEQEEQGQYTHVTCGQPAPDLRATDNGLGKPDFPEANRERRPSYLPTPHRAYAEKRMLTEV

SEQ ID NO: 1024361 - protein, 43 aa, Homo sapiens
MRANWSWTSQPPEPPHCLLKVAFRNGAVLCPHLRSAALLRDLR

SEQ ID NO: 1024362 - protein, 129 aa, Homo sapiens
  misc_feature (72)..(72): Xaa can be any naturally occurring amino acid
  misc_feature (95)..(95): Xaa can be any naturally occurring amino acid
  misc_feature (101)..(101): Xaa can be any naturally occurring amino acid
  misc_feature (105)..(105): Xaa can be any naturally occurring amino acid
  misc_feature (108)..(108): Xaa can be any naturally occurring amino acid
  misc_feature (125)..(125): Xaa can be any naturally occurring amino acid
MKGHALNDVTAVVEHTADVLSVHSAGEKRVAVVTPISTGSADPQKLISNEVLGPGHAWVLSGLGSCILRSCXASKFWKVVLNLRFPSKDFLSEQXLLVEEXDHRXGAXHSVVPEALEEVQSLLQXVGLV

SEQ ID NO: 1024363 - protein, 81 aa, Homo sapiens
QEAHTDLERVRAIWIWICHHIEYDIAAAQEKDRQAFKPTDILRTQKTNCDGYAGLFEENVQVALSRGQASVGSMSRGPQRR

SEQ ID NO: 1024364 - protein, 166 aa, Homo sapiens
RFTDLKHYSDELQSVISHLLRVRARVADRLYGVYKVHGNYGRVFSEWSAIEKEMGDGLQSAGHHMDVYASSIDDILEDEEHYADQLKEYLFYAEALRAVCRKHELMQYDLEMAAQDLASKEGSSVEGTGNWGLLRNLSLLKGMTTKLFGQETPEQREARIKVLEEQ

SEQ ID NO: 1024365 - protein, 304 aa, Homo sapiens
MFNSVNLGNFCSPSRKERGADFGERGSCASNLYLPSCTYYMPEFSTVSSFLPQAPSRQISYPYSAQVPPVREVSYGLEPSGKWHHRNSYSSCYAAADELMHRECLPPSTVTEILMKNEGSYGGHHHPSAPHATPAGFYSSVNKNSVLPQAFDRFFDNAYCGGGDPPAEPPCSGKGEAKGEPEAPPASGLASRAEAGAEAEAEEENTNPSSSGSAHSVAKEPAKGAAPNAPRTRKKRCPYSKFQIRELEREFFFNVYINKEKRLQLSRMLNLTDRQVKIWFQNRRMKEKKLSRDRLQYFSGNPLL

SEQ ID NO: 1024366 - protein, 174 aa, Homo sapiens
MVPDEQIGVISSTSHITKATLITKNLKKVQHSSAHLERMKIEPGTDAEATSSIVWMTAEQLALKGGKKQIPETGGQGSGDWKEKLKVSKKPYAEAVKGLRKHERRVKELTYQTEEDRKNILRLQDLVRECVSGGDLLVGESALGCDRSNTNLAKFRKLQHELEEAEERAALLNP

SEQ ID NO: 1024367 - protein, 174 aa, Homo sapiens
MVPDEQIGVISSTSHITKATLITKNLKKVQHSSAHLERMKIEPGTDAEATSSIVWMTAEQLALKGGKKQIPETGGQGSGDWKEKLKVSKKPYAEAVKGLRKHERRVKELTYQTEEDRKNILRLQDLVDNFRQSEILYRGQPEEAEEQSNTNLAKFRKLQHELEEAEERAALLNP

SEQ ID NO: 1024368 - protein, 228 aa, Homo sapiens
  misc_feature (209)..(209): Xaa can be any naturally occurring amino acid
MPGEVDLDQDRCQRAEMGQRCGCLPATGAMPSRARLRSCSSSQNAPGRNVRKALVSGPDLLPQDWLLRPSALSGRTARGSSRTWGSILQNSSWLFQDLGLHLAEQLVALPGPGAPSCRTARGSSRTWGSILLRGAFLRLLRDDSDFPWGCAMAVIFQGPLGLGSEVATFPGAREGGLDASWAACLWRGRNEELVRLGPLGAWSCSHDAXPLKPDMGAEDSPAGSRFTD

SEQ ID NO: 1024369 - protein, 287 aa, Homo sapiens
  misc_feature (268)..(268): Xaa can be any naturally occurring amino acid
MPGEVDLDQDRCQRAEMGQRCGCLPATGAMPSRARLRSCSSSQNAPGRNVRKALVSGPDLLPQDWLLRPSALSGRTARGSSRTWGSILQNSSWLFQDLGLHLAEQLVALPGPGAPSCRTARGSSRTWGSILLEQSWLFQDLGLHLAEQLVALPGPGGSILQNSSWLFQDLGLQSSEPVVALPGAEGSILLKGCFLETALGTIPDFPWGCAMAVIFQGPLGLGSEVATFPGAREGGLDASWAACLWRGRNEELVRLGPLGAWSCSHDAXPLKPDMGAEDSPAGSRFTD

SEQ ID NO: 1024370 - protein, 135 aa, Homo sapiens
PTAKTGILRSLIIFSLVYRYSIKKAGPGKNNSNQGKGENQQFSEKDALSGGKGHHGKSVIVNLKKHHCIEGPASMGGAWIGRKFSRIGFFVDQHVTCEIGVFSIFIEVLGRGVLISNVASDPYHHNAFLLHHGFR

SEQ ID NO: 1024371 - protein, 92 aa, Homo sapiens
LAESDTSREGKVKFPEWLCVWGFIHPTWKWTYWKKGERMEKVEHSDWSFSKDGSFYLWYYTEFTPTEKDEYAGRVNQVTWSQPKIVKWDRDV

SEQ ID NO: 1024372 - protein, 71 aa, Homo sapiens
TRVSEALLLSARQEDVCRRRSAGPVAFTVLSSAGQAAAHGRHSSLQPQWHVEVVSTGLACNCVGLSALQPT

SEQ ID NO: 1024373 - protein, 78 aa, Homo sapiens
VPPPRAWAGRLGPARGAAAVLRALLALPTDIMLQFLLGFTLGNVVGMYLAQNYDIPNLAKKLEEIKKDLDAKKKPPSA

SEQ ID NO: 1024374 - protein, 78 aa, Homo sapiens
TAPRCQAQGTGPARLQRPRTHDELQLKAGDVVLVIPFQSPEEQDEGWLMGMKESDWNQHKELEKCRGVFPENFTERVP

SEQ ID NO: 1024375 - protein, 133 aa, Homo sapiens
  misc_feature (5)..(5): Xaa can be any naturally occurring amino acid
  misc_feature (13)..(13): Xaa can be any naturally occurring amino acid
  misc_feature (15)..(15): Xaa can be any naturally occurring amino acid
  misc_feature (89)..(89): Xaa can be any naturally occurring amino acid
  misc_feature (119)..(119): Xaa can be any naturally occurring amino acid
KSTTXLAREYFAXKXMRGAIMTERTPEEPSERYRQISCDGRDELPVDGDILRHRADQRQQIFCTSMSKCARRSGDDDRRMQVGSGFYHXLHRFEIVNIECRNRITAALCVVQHLLCRYXVHFHILSFVFDFKI

SEQ ID NO: 1024376 - protein, 85 aa, Homo sapiens
RRGSLSPARRAHQSFQRRFPATAFRASLRSQHGKFQKHAGKDGYNYTLSKTEFLSFMNTELAAFTKNQKDPGVLDRMMKETGHQQ

SEQ ID NO: 1024377 - protein, 88 aa, Homo sapiens
TPALCAARAPGFSISSTMSEFSSPPETERCIESLIAVFQKYAGKDGYNYTLSKTEFLSFMNTELAAFTKNQKDPGVLDRMMKETGHQQ

SEQ ID NO: 1024378 - protein, 102 aa, Homo sapiens
GEAPTAPHAARTRAFSAAPSHSLPRLAQVPTWPKFSSPPETERCIESLIAVFQKYAGKDGYNYTLSKTEFLSFMNTELAAFTKNQKDPGVLDRMMKETGHQQ

SEQ ID NO: 1024379 - protein, 115 aa, Homo sapiens
ILARCNLCLLGLSGSPASASRVAGITGVHHHAEPIFVFLVETGFPHVGQTGFKLLTSGDLPALASQSAGITGMSHCAQPQVTLVSLGLPTLKFWDCFCQATGVASSDGSFLFFLG

SEQ ID NO: 1024380 - protein, 184 aa, Homo sapiens
RHEEIFIANEGVHTGQFIYAGKKASLNVGNVLPLGSVPEGTIVSNVEEKPGDRGALARASGNYVIIIGHNPDENKTRVRLPSGAKKVISSDARGVIGVIAGGGRVDKPLLKAGHAFHKYRLKRNFWPKTRGVAMNPVDHPHGGGNHQHIGKASTISRGAVSGQKAGLIAARRTGLLRGSQKTQD

SEQ ID NO: 1024381 - protein, 38 aa, Homo sapiens
MDHACLSSALCVWAKTKDQGIASQRAYGSIDDGTHVRY

SEQ ID NO: 1024382 - protein, 345 aa, Homo sapiens
ARATISSLPSTWYDASSTSQTSVSYASQESDYAVNQNSWSASTNQLPSTSTTSYYAPTFSTSADFAASNVNAASDVSTASVPIDTSANSIPFTTTSNIETTTSAPLTSDTPLISTSTMSAADNVFSSANPISASLTTTDSSESFDQTSTAGAIPVQSSADFSSSSEILVQSSADFSSPSSPTTTDISLSAAPLQTSESSSFTTASAALPVSSTDVDGSSASPVVSMSAAGQIASSSSTDNPTMSETFSLTSTEVDGSDVSSTVSALLSAPFLQTSTSNSFSIVSPSVSFVPSQSSSDVASSSTANVVSSSFSDIPPQTSTSGSVVSVAQSASALAFQSSTEVYGA

SEQ ID NO: 1024383 - protein, 220 aa, Homo sapiens
IRFFENDTERYENVEMKFSVKSCKSVDECKLHKGGYNGLNQCLPTMQSKMFQCDKYVKVFNKFSHSDRHKIKHMENKPFKCKECGRSFCMLSHLTRHERNYTKVNFCKCEECEKAVNQSSKLTKHKRIYTCEKLYKCQECDRTFNQFSNLTEYKKDYAREKPYKCEECGKAFNQSSHLTTHKIIHTGEKPYKCEECGKAFNQFSNLITHKKIHTEVSRSD

SEQ ID NO: 1024384 - protein, 118 aa, Homo sapiens
RSTDLTTHKIVHTGEKPYKCEECGKAFNQSSHLTTHKIIHTGEKPYKCEECGKAFNRSSNLTKHKIIHTGEKPYKCEECGKAFNRSSTLTRHKIIHTGEKPYKCEECGKAFKLVLNSY

SEQ ID NO: 1024385 - protein, 88 aa, Homo sapiens
WDHPGNPGVWLGSSVASVPPVGDLRSEWEGQSPPKRWKRTGLGWKRLRGAIFPGCLFALCDHRAYTSESGTNSQITDPLSLLLMSSNG

SEQ ID NO: 1024386 - protein, 136 aa, Homo sapiens
AVYCWKLVHCARQARDAPTGTMRNCGQIFQEGVMQNISLPQYRAGCLVGTGPPPSSHTCSEAEKRAGQGRASLQPLGTNPCGRQTKAPRGLWKPGAEGQAMFGDSDCTGTFSMTWRGWDRGSCDPWSSGRGLQGQP

SEQ ID NO: 1024387 - protein, 100 aa, Homo sapiens
EPRGALLTVLPAQPSLEAAGPAEPPKPGGGNWLMAPRRSVLLGRQAQSPAATPTSYGVFCKGLSRTLLAFFELAWQLRMNFPYFYVAGSVILNIRLQVHI

SEQ ID NO: 1024388 - protein, 70 aa, Homo sapiens
  misc_feature (5)..(5): Xaa can be any naturally occurring amino acid
SNVKXAGAFLSHVPLGPGAKCWRTSYGVFCKGLSRTLLAFFELAWQLRMNFPYFYVAGSVILNIRLQVHI

SEQ ID NO: 1024389 - protein, 64 aa, Homo sapiens
HFKTLMIIYLSKEKWHSEEVAPCLLAQPPAILTPPGQAGTTADHSAMFQCMAHICQSWDLTQAA

SEQ ID NO: 1024390 - protein, 145 aa, Homo sapiens
GDAGGERRSRQDYFYRGSTFVVSLIFSRDMNEAKRRVRELYRAWYREVPNTVHQFQLDITVKMGPGSQSETQMFMTEMPMSQTPQGGLIFWSLKGTQNRHWKKTIKGIGKQRDHIVYAVLPSEHQKGAKGQKGLSLSKFYVGHDP

SEQ ID NO: 1024391 - protein, 162 aa, Homo sapiens
GDYGGERRSRQDYFYRGSTFVVSLIFSRDMNEAKRRVREIYRAWYREVPNTVHQFQLDITVKMGPGSQSETQMFMTEMPMSQTPQGGLIFLSLKGKRIDPERKQLKVLESQRDHIVMRFFPVNTRKGAKGQKGLSLSKVSYCLGQRIHDKSIHVEHGCTVDT

SEQ ID NO: 1024392 - protein, 72 aa, Homo sapiens
AVKAAISPGDSKCRIRSARGDVVLYSHVFGCWQRLGDGTAQSRGPFGAAISPYVFNGGTILAIAGEDLQCCF

SEQ ID NO: 1024393 - protein, 81 aa, Homo sapiens
ETAIDVEKKEPGKASETKQGTVKIAAQAAAKKDEKKEDSKKTKKPAEENNPREKEKKEKHVEPAKSPKKEHSVPSDKQVKA

SEQ ID NO: 1024394 - protein, 300 aa, Homo sapiens
RLYRSRVVWMRVQEQTGGSQARTMAALQEKKTCGQRMEEFQRYCWNPDTGQMLGRTLSRWVWISLYYVAFYVVMTGLFALCLYVLMQTVDPYTPDYQDQLRSPGVTLRPDVYGEKGLEIVYNVSDNRTWADLTQTLHAFLAGYSPAAQEDSINCTSEQYFFQESFRAPNHTKFSCKFTADMLQNCSGLADPNFGFEEGKPCFIIKMNRIVKFLPSNGSAPEWTAPSWTSPASSAAAAGQVLPSQRHLQSALLPLLREESPAPYKKPPLVASEGSSRFPGTAEGSPSVLQRSWQKPLTSKN

SEQ ID NO: 1024395 - protein, 107 aa, Homo sapiens
RLYRSRVVWMRVQEQTGGSQARTMAALQEKKTCGQRMEEFQRYCWNPDTGQMLGRTLSRWGKAEGPQSILKAELTWSPSCRTPVEGVHRLAPNVSRMSENSILKVCF

SEQ ID NO: 1024396 - protein, 105 aa, Homo sapiens
TQINTHTHTTSRTLKKMETPLDLLKLNLDERVYIKLREARTLVGTLQAFDSHCNIVLSDAVETIYQLNNEELSESERRCEMVFIRGDTVTLISTPSEDDDGAVEI

SEQ ID NO: 1024397 - protein, 115 aa, Homo sapiens
MASKRALVILAKGAEEMETVIPVDVMRRAGIKVTVAGLGWKRPSTVYRDVVICPDAILEDAKKEGPYDVVVLPGGNPGAQNLSESAAVKDILKEQENRKGLKSPICAGPYCSVGS

SEQ ID NO: 1024398 - protein, 115 aa, Homo sapiens; identical to SEQ ID NO: 1024397

SEQ ID NO: 1024399 - protein, 227 aa, Homo sapiens
KDFDSPENGADSFQSSDSLLQSWNSQSSLLDVQRVPSFESLEDDSAEPELYALNKPTMYFKDYIQERSDPVEQGKPVIPAAVLGRLHRKWTYSAVAVSPGAAITQILPVIHQLDWRLMEFKLADPDEVAASGERGLAHDELREAEPGLTLLLRLEHHAQDVGESATCSRLNVRTSETCLGFQRPEGTVTRITWAVTTPYTGRYLTFRPGTHPLNPAPQGFVVPVGCP

SEQ ID NO: 1024400 - protein, 100 aa, Homo sapiens
ELTPMGCRLPSIGGDGLLSGKEETRKIPVPANRYTPWKENGMKIFTPDGGTFGDFSIRFNCEIKGMYQIRHWIRKPSDVTCSDTKQRDLVKAFQSSAFQR

SEQ ID NO: 1024401 - protein, 237 aa, Homo sapiens
MEVLPCSRVAHIERTRKPYNNDIDYYAKRNALRAAEVWMDDFKSHVYMAWNIPMSNPGVDFGDVSERLALRQRLKCRSFKWYLENVYPEMRVYNNTLTYGEVRNSKASAYCLDQGAEDGDRAILYPCHGMSSQLVRYSADGLLQLGPLGSTAFLPDSKCLVDDGTGRMPTLKKCEDVARPTQRLWDFTQSGPIVSRATGRCLEVEMSKDANFGLRLVVQRCSGQKWMIRNWIKHARH

SEQ ID NO: 1024402 - protein, 323 aa, Homo sapiens
SGLVWKAERKPRLRWLENPRLFSGRLSHSRDNRQKPRNHLPRCEPDAETRFAPSGCKGQLQPGTAAPRTPPSRGRSRTPVWQCGGSMEVLPCSRVAHIERTRKPYNNDIDYYAKRNALRAAEVWMDDFKSHVYMAWNIPMSNPGVDFGDVSERLALRQRLKCRSFKWYLENVYPEMRVYNNTLTYGEVRNSKASAYCLDQGAEDGDRAILYPCHGMSSQLVRYSADGLLQLGPLGSTAFLPDSKCLVDDGTGRMPTLKKCEDVARPTQRLWDFTQSGPIVSRATGRCLEVEMSKDANFGLRLVVQRCSGQKWMIRNWIKHARH

SEQ ID NO: 1024403 - protein, 395 aa, Homo sapiens
GASEDGWADDGGRGSVPPLQLPSFRPLPAKGRLRAETTDRNPETTCHDVNLMQKRGSLPRDAKANFSLARRRRGLHHPGEGAGPLWVTWDCGAGVSPAGLELSSEEALGCRTGVREPGVSCVLCGHLGEEGAAPSCPGLWICPAVGGVGAAVWQCGGSMEVLPCSRVAHIERTRKPYNNDIDYYAKRNALRAAEVWMDDFKSHVYMAWNIPMSNPGVDFGDVSERLALRQRLKCRSFKWYLENVYPEMRVYNNTLTYGEVRNSKASAYCLDQGAEDGDRAILYPCHGMSSQLVRYSADGLLQLGPLGSTAFLPDSKCLVDDGTGRMPTLKKCEDVARPTQRLWDFTQSGPIVSRATGRCLEVEMSKDANFGLRLVVQRCSGQKWMIRNWIKHARH

SEQ ID NO: 1024404 - protein, 603 aa, Homo sapiens
MAVARKIRTLLTVNILVFVGIVLFSVYCRLQGRSQELVRIVSGDRRVRSRHAKVGTLGDREAILQRLDHLEEVVYNQLNGLAKPIGLVEGPGGLGQGGLAATLRDDGQEAEGKYEEYGYNAQLSDRISLDRSIPDYRPRKCRQMSYAQDLPQVSVVFIFVNEALSVILRSVHSVVNHTPSQLLKEVILVDDNSDNVELKFNLDQYVNKRYPGLVKIVRNSRREGLIRARLQGWKAATAPVVGFFDAHVEFNTGWAEPALSRIREDRRRIVLPAIDNIKYSTFEVQQYANAAHGYNWGLRCMYIIPPQDWLDRGDESAPIRTPAMIGCSFVVDREYFGDIGLLDPGMEVYGGENVELGMRVWQCGGSMEVLPCSRVAHIERTRKPYNNDIDYYAKRNALRAAEVWMDDFKSHVYMAWNIPMSNPGVDFGDVSERLALRQRLKCRSFKWYLENVYPEMRVYNNTLTYGEVRNSKASAYCLDQGAEDGDRAILYPCHGMSSQLVRYSADGLLQLGPLGSTAFLPDSKCLVDDGTGRMPTLKKCEDVARPTQRLWDFTQSGPIVSRATGRCLEVEMSKDANFGLRLVVQRCSGQKWMIRNWIKHARH

SEQ ID NO: 1024405 - protein, 76 aa, Homo sapiens
LLCTCMVACVCGGSVSAGRKRCSWCVGLYALAVRDPSGYRLESFLGLRLVQGLGAGGVSVMARVLVRDSFSGALFG

SEQ ID NO: 1024406 - protein, 183 aa, Homo sapiens
MAQSVINARQSEQLPLTIADIVLRFYDACDTLSAPDVTFDPELVVPVVAAGAVVYRVPGIVFILQSQHIQEILEMNPDPAMELQKMLPHGGIVVLVQTSGQDPSGLFIPGNPGGQSWMERSRPLQSLLSCMRKAGITTHEEHLRGLHQCLWDTLSCATATGSILPSGLCLQEHGSVRGSAGDA

SEQ ID NO: 1024407 - protein, 140 aa, Homo sapiens
  misc_feature (8)..(8): Xaa can be any naturally occurring amino acid
  misc_feature (15)..(15): Xaa can be any naturally occurring amino acid
AHSSYLRXSQSQHLXISQEAITDPHDAEELKKEQDTSAHLERMKKNMEQTIKDLQHRLDEAEQIALKGPRSSCRSWKPGAELENELEAEQKRNAESVKGMRKSERRIKELTYQTEEDRKNLLRLQDLVDKLQLKGQGLTK

SEQ ID NO: 1024408 - protein, 355 aa, Homo sapiens
TSTPSPLISSHVAANAQAVPLQNNNRNTSNGDNGSNVNHDNNNGSTNTPQLSLTPYANNSAPNGKFDSVPVDASSIEFETMSCCFKGGRTTSWVREDGSFKSIDRSLLDRFIAAYFKHNHRLFPMIDKIAFLNDAATITDFERLYDNKNYPDSFVFKVYMIMAIGCTTLQRAGMVSQDEECLSEHLAFLAMKKFRSVIIFQDIETVRCLLLLGIYSFFEPKGSSSWTISGIIMRLTIGLGLNRELTAKKLKSMSALEAEARYRVFWSAYCFERLVCTSLGRISGIDDEDITVPLPRALYVDERDDLEMTKLMISLRKMGGRIYKQVHSVSAGRQKLTIEQKQEIISGLRKELDEI

SEQ ID NO: 1024409 - protein, 237 aa, Homo sapiens
MVNFSSNQKRSPSHQWHASWRYAPLTALCTSNMDCQLSILLLLSCSVLDSFGELIPQPSNEVNLLDSKTIQGELGWISYPSHGWEEISGVDEHYTPIRTYQVCNVMDHSQNNWLRTNWVPRNSAQKIYVELKFTLRDCNSIPLVLGTCKETFNLYYMESDDDHGVKFREHQFTKIDTIAADESFTQMDLGDRILKLNTEIREVGPVNKKGFYLAFQDVGACVALVSVRVYFKKCHLQ

SEQ ID NO: 1024410 - protein, 966 aa, Homo sapiens
MEPQVTLNVTFKNEIQSFLVSDPENTTWADIEAMVKVSFDLNTIQIKYLDEENEEVSINSQGEYEEALKMAVKQGNQLQMQVHEGHHVVDEAPPPVVGAKRLAARAGKKPLAHYSSLVRVLGSDMKTPEDPAVQSFPLVPCDTDQPQDKPPDWFTSYLETFREQVVNETVEKLEQKLHEKLVLQNPSLGSCPSEVSMPTSEETLFLPENQFSWHIACNNCQRRIVGVRYQCSLCPSYNICEDCEAGPYGHDTNHVLLKLRRPVVGSSEPFCHSKYSTPRLPAALEQVRLQKQVDKNFLKAEKQRLRAEKKQRKAEVKELKKQLKLHRKIHLWNSIHGLQSPKSPLGRPESLLQSNTLMLPLQPCTSVMPMLSAAFVDENLPDGTHLQPGTKFIKHWRMKNTGNVKWSADTKLKFMWGNLTLASTEKKDVLVPCLKAGHVGVVSVEFIAPALEGTYTSHWRLSHKGQQFGPRVWCSIIVDPFPSEESPDNIEKGMISSSKTDDLTCQQEETFLLAKEERQLGEVTEQTEGTAACIPQKAKNVASERELYIPSVDLLTAQDLLSFELLDINIVQELERVPHNTPVDVTPCMSPLPHDSPLIEKPGLGQIEEENEGAGFKALPDSMVSVKRKAENIASVEEAEEDLSGTQFVCETVIRSLTLDAAPDHNPPCRQKSLQMTFALPEGPLGNEKEEIIHIAEEEAVMEEEEDEEDEEEEDELKDEVQSQSSASSEDYIIILPECFDTSRPWGILCTALRSHSQAWSEVLKASLGFEAGQEPAEAGERLPGGENQPQEHSISDILTTSQTLETVPLIPEVVELPPSLPRSSPCVHHHGSPGVDLPVTIPEVSSVPDQIRGEPRGSSGLVNSRQKSYDHSRHHHGSSIAGGLVKGALSVAASAYKALFAGPPVTAQPIISEDQTAALMARLFEMGFCDRQLNLRLLKKHNYNILQVVTELLQLNNNDWYSQRY

SEQ ID NO: 1024411 - protein, 937 aa, Homo sapiens
MEPQVTLNVTFKNEIQSFLVSDPENTTWADIEAMVKVSFDLNTIQIKYLDEENEEVSINSQGEYEEALKMAVKQGNQLQMQVHEGHHVVDEAPPPVVGAKRLAARAGKKPLAHYSSLVRVLGSDMKTPEDPAVQSFPLVPCDTDQPQDKPPDWFTSYLETFREQVVNETVEKLEQKLHEKLVLQNPSLGSCPSEVSMPTSEETLFLPENQFSWHIACNNCQRRIVGVRYQCSLCPSYNICEDCEAGPYGHDTNHVLLKLRRPVVGSSEPFCHSKYSTPRLPAALEQVRLQKQVDKNFLKAEKQRLRAEKKQRKAEVKELKKQLKLHRKIHLWNSIHGLQSPKSPLGRPESLLQSNTLMLPLQPCTSVMPMLSAAFVDENLPDGTHLQPGTKFIKHWRMKNTGNVKWSADTKLKFMWGNLTLASTEKKDVLVPCLKAGHVGVVSVEFIAPALEGTYTSHWRLSHKGQQFGPRVWCSIIVDPFPSEESPDNIEKGMISSSKTDDLTCQQEETFLLAKEERQLGEVTEQTEGTAACIPQKAKNVASERELYIPSVDLLTAQDLLSFELLDINIVQELERVPHNTPVDVTPCMSPLPHDSPLIEKPGLGQIEEENEGAGFKALPDSMVSVKRKAENIASVEEAEEDLSGTQFVCETVIRSLTLDAAPDHNPPCRQKSLQMTFALPEGPLGNEKEEIIHIAEEEAVMEEEEDEEDEEEEDELKDEVQSQSSASSEDYIIILPECFDTSRPLGDSMYSSALSQPGLERGAEGKPGVEAGQEPAEAGERLPGGENQPQEHSISDILTTSQTLETVPLIPEVVELPPSLPRSSPCVHHHGSPGVDLPVTIPEVSSVPDQIRGEPRGSSGLVNSRQKSYDHSRHHHGSSIAGGLVKGALSVAASAYKALFAGPPVTAQGLWGLLSFLHLAKKCFFLKAPSEAFSWF

SEQ ID NO: 1024412 - protein, 959 aa, Homo sapiens
  misc_feature (952)..(952): Xaa can be any naturally occurring amino acid
  misc_feature (954)..(954): Xaa can be any naturally occurring amino acid
MEPQVTLNVTFKNEIQSFLVSDPENTTWADIEAMVKVSFDLNTIQIKYLDEENEEVSINSQGEYEEALKMAVKQGNQLQMQVHEGHHVVDEAPPPVVGAKRLAARAGKKPLAHYSSLVRVLGSDMKTPEDPAVQSFPLVPCDTDQPQDKPPDWFTSYLETFREQVVNETVEKLEQKLHEKLVLQNPSLGSCPSEVSMPTSEETLFLPENQFSWHIACNNCQRRIVGVRYQCSLCPSYNICEDCEAGPYGHDTNHVLLKLRRPVVGSSEPFCHSKYSTPRLPAALEQVRLQKQVDKNFLKAEKQRLRAEKKQRKAEVKELKKQLKLHRKIHLWNSIHGLQSPKSPLGRPESLLQSNTLMLPLQPCTSVMPMLSAAFVDENLPDGTHLQPGTKFIKHWRMKNTGNVKWSADTKLKFMWGNLTLASTEKKDVLVPCLKAGHVGVVSVEFIAPALEGTYTSHWRLSHKGQQFGPRVWCSIIVDPFPSEESPDNIEKGMISSSKTDDLTCQQEETFLLAKEERQLGEVTEQTEGTAACIPQKAKNVASERELYIPSVDLLTAQDLLSFELLDINIVQELERVPHNTPVDVTPCMSPLPHDSPLIEKPGLGQIEEENEGAGFKALPDSMVSVKRKAENIASVEEAEEDLSGTQFVCETVIRSLTLDAAPDHNPPCRQKSLQMTFALPEGPLGNEKEEIIHIAEEEAVMEEEEDEEDEEEEDELKDEVQSQSSASSEDYIIILPECFDTSRPLGDSMYSSALSQPGLERGAEGKPGVEAGQEPAEAGERLPGGENQPQEHSISDILTTSQTLETVPLIPEVVELPPSLPRSSPCVHHHGSPGVDLPVTIPEVSSVPDQIRGEPRGSSGLVNSRQKSYDHSRHHHGSSIAGGLVKGALSVAASAYKALFAGPPVTAQPIISEDQTAALMAHLFEMGRRKKKFFFFFPPFWGVWEKPEGGXPXSVTGS

SEQ ID NO: 1024413 - protein, 310 aa, Homo sapiens
MEPQVTLNVTFKNEIQSFLVSDPENTTWADIEAMVKVSFDLNTIQIKYLDEENEEVSINSQGEYEEALKMAVKQGNQLQMQVHEGHHVVDEAPPPVVGAKRLAARAGKKPLAHYSSLVRVLGSDMKTPEDPAVQSFPLVPCDTDQPQDKPPDWFTSYLETFREQVVNETVEKLEQKLHEKLVLQNPSLGSCPSEVSMPTSEETLFLPENQFSWHIACNNCQRRIVGVRYQCSLCPSYNICEDCEAGPYGHDTNHVLLKLRRPVVGSSEPFCHSKYSTPRLPAALEQVRLQKQVDKNFLKAEKQRLRANNF

SEQ ID NO: 1024414 - protein, 966 aa, Homo sapiens
MEPQVTLNVTFKNEIQSFLVSDPENTTWADIEAMVKVSFDLNTIQIKYLDEENEEVSINSQGEYEEALKMAVKQGNQLQMQVHEGHHVVDEAPPPVVGAKRLAARAGKKPLAHYSSLVRVLGSDMKTPEDPAVQSFPLVPCDTDQPQDKPPDWFTSYLETFREQVVNETVEKLEQKLHEKLVLQNPSLGSCPSEVSMPTSEETLFLPENQFSWHIACNNCQRRIVGVRYQCSLCPSYNICEDCEAGPYGHDTNHVLLKLRRPVVGSSEPFCHSKYSTPRLPAALEQVRLQKQVDKNFLKAEKQRLRAEKKQRKAEVKELKKQLKLHRKIHLWNSIHGLQSPKSPLGRPESLLQSNTLMLPLQPCTSVMPMLSAAFVDENLPDGTHLQPGTKFIKHWRMKNTGNVKWSADTKLKFMWGNLTLASTEKKDVLVPCLKAGHVGVVSVEFIAPALEGTYTSHWRLSHKGQQFGPRVWCSIIVDPFPSEESPDNIEKGMISSSKTDDLTCQQEETFLLAKEERQLGEVTEQTEGTAACIPQKAKNVASERELYIPSVDLLTAQDLLSFELLDINIVQELERVPHNTPVDVTPCMSPLPHDSPLIEKPGLGQIEEENEGAGFKALPDSMVSVKRKAENIASVEEAEEDLSGTQFVCETVIRSLTLDAAPDHNPPCRQKSLQMTFALPEGPLGNEKEEIIHIAEEEAVMEEEEDEEDEEEEDELKDEVQSQSSASSEDYIIILPECFDTSRPLGDSMYSSALSQPGLERGAEGKPGVEAGQEPAEAGERLPGGENQPQEHSISDILTTSQTLETVPLIPEVVELPPSLPRSSPCVHHHGSPGVDLPVTIPEVSSVPDQIRGEPRGSSGLVNSRQKSYDHSRHHHGSSIAGGLVKGALSVAASAYKALFAGPPVTAQPIISEDQTAALMAHLFEMGFCDRQLNLRLLKKHNYNILQVVTELLQLNNNDWYSQRY

SEQ ID NO: 1024415 - protein, 836 aa, Homo sapiens
MEPQVTLNVTFKNEIQSFLVSDPENTTWADIEAMVKVSFDLNTIQIKYLDEENEEVSINSQGEYEEALKMAVKQGNQLQMQVHEGHHVVDEAPPPVVGAKRLAARAGKKPLAHYSSLVRVLGSDMKTPEDPAVQSFPLVPCDTDQPQDKPPDWFTSYLETFREQVVNETVEKLEQKLHEKLVLQNPSLGSCPSEVSMPTSEETLFLPENQFSWHIACNNCQRRIVGVRYQCSLCPSYNICEDCEAGPYGHDTNHVLLKLRRPVVGSSEPFCHSKYSTPRLPAALEQVRLQKQVDKNFLKAEKQRLRAEKKQRKAEVKELKKQLKLHRKIHLWNSIHGLQSPKSPLGRPESLLQSNTLMLPLQPCTSVMPMLSAAFVDENLPDGTHLQPGTKFIKHWRMKNTGNVKWSADTKLKFMWGNLTLASTEKKDVLVPCLKAGHVGVVSVEFIAPALEGTYTSHWRLSHKGQQFGPRVWCSIIVDPFPSEESPDNIEKGMISSSKTDDLTCQQEETFLLAKEERQLGEVTEQTEGTAACIPQKAKNVASERELYIPSVDLLTAQDLLSFELLDINIVQELERVPHNTPVDVTPCMSPLPHDSPLIEKPGLGQIEEENEGAGFKALPDSMVSVKRKAENIASVEEAEEDLSGTQFVCETVIRSLTLDAAPDHNPPCRQKSLQMTFALPEGPLGNEKEEIIHIAEEEAVMEEEEDEEDEEEEDELKDEVQSQSSASSEDYIIILPECFDTSRPLGDSMYSSALSQPGLERGAEGALLVYIIMVPQEWIYQLPYQKFLQSLIRSEEAPSWEQHCWRTGEGGFVCCCLCIQGPVCWATSHCTANNF

SEQ ID NO: 1024416 - protein, 966 aa, Homo sapiens; identical to SEQ ID NO: 1024414

SEQ ID NO: 1024417 - protein, 113 aa, Homo sapiens
  misc_feature (48)..(49): Xaa can be any naturally occurring amino acid
CPWVSVPLNLKKREGPTAVNCNTAAVNCNTAALPLSGSLPPAPPAPGXXALACPWASALLATCLHLGWGWGDQLSTQILASAPSARADFRTICNDETPRFPLSLGKAFFVLGN

SEQ ID NO: 1024418 - protein, 236 aa, Homo sapiens
GFLLWLSRNPSVSSGIHDFSAVILGKEWANNDAVLKRLEQKGAEADQIIEYLKQQVSLLKEKAILQATLREEKKLRVENAKLKKEIEELKQELIQAEIQNGVKQIPFPSGTPLHANSMVSENVIQSTAVTTVSSGTKEQIKGGTGDEKKAKEKIDTDTDETTAKKQQSIAGSADSKPIDVSRLGSSNRLHHNYSDIHLMQILACAAVDVGEIAQDSATGLGSRSLERMKTDGLHWN

SEQ ID NO: 1024419 - protein, 342 aa, Homo sapiens
SQSAEIAASAPGGQPGTSEVMDASSAMDRAIDRGNGDGSPIWPGRAEIWEVRMQLFPGVILSRKLRSVSDPGRAIIWDVGMHLLHSVWPLLMDVKSAFCAGASTHVVGTEECLVAPPRIPSREGFFCRHLGQKWANNDAVLKRLEQKGAEADQIIEYLKQQVSLLKEKAILQATLREEKKLRVENAKLKKEIEELKQELIQAEIQNGVKQIPFPSGTPLHANSMVSENVIQSTAVTTVSSGTKEQIKGGTGDEKKAKEKIDTDTDETTAKKQQSIAGSADSKPIDVSRLGSSNRLHHNYYDIHLMQILACAAVDVGEIAQDSATGLGSRSLERMKTDGLHWN

SEQ ID NO: 1024420 - protein, 256 aa, Homo sapiens
GASAASAGAGRGPRSHSLLFLGEAPECPGLEAMRRQWGSAMRAAEQCGLHGERLPGLDSPEAGPCGAAGWGNPEPVALGLVLLPRGHLRPLPASWQLKSWALAGRRLPAMADSCMWTDLLPCTVACVGPNWARVPGGLLLELVCLPMWLCTAPVRHASEPWPILPLSLLGCPRAAPGFLSELLLHAELAWLLGPTFARLFAGLMACGTCGCFSMRWLLGLTEVSDVTRMVDQLRAAGDGLALLGSAARPRRSVGCE

SEQ ID NO: 1024421 - protein, 550 aa, Homo sapiens; identical to SEQ ID NO: 842530

SEQ ID NO: 1024422 - protein, 141 aa, Homo sapiens
VLPRALQSCLRAVPVASPDVRSGVLLWVQSSGRSSGHTGDLGGLPMTVLLASAQRQIALVPVLPGTGMRQHQCPPHSAAVGGRTLEPGAAPGVLATGHQSHLAGVGQVVVAVATVTPLSLIMPHHDHAGSLQTGSRCRASR

SEQ ID NO: 1024423 - protein, 95 aa, Homo sapiens
KKATPGSLAPKTVRYGWGLAVLWTGQEAPWALDTARSSANCISGPGQALYLIAQWCLSPHLGNKANRICTKLSASRTLEGLNKIRDLIPRWNEEW

SEQ ID NO: 1024424 - protein, 57 aa, Homo sapiens
RGNKNLTVLPDEAETCTAKLTDPRLLYIGFLGYCSGLIDNLIRRSQTVTAGLHRQLL

SEQ ID NO: 1024425 - protein, 39 aa, Homo sapiens
NSVTAADTALYYCAREVRDNYIDHGIDVWGQGTMVTVSS

SEQ ID NO: 1024426 - protein, 40 aa, Homo sapiens
EDTAVYYCTTDLGGAYCTRGVCYYETFKYWGQGVLVTVSP

SEQ ID NO: 1024427 - protein, 141 aa, Homo sapiens
PAEHKRRLLQEAERNDLGRRGKASPQQKICLLTKSSSKIAPFLTSGFKITSHDKQPERADCESQMRQLGHRSAGGVSWVITKLHTSTMGPSKTVDPNKHIPVPLGALREAKSRLRGACNPKKMSGSRPRDPRRKVSQSSTD

SEQ ID NO: 1024428 - protein, 181 aa, Homo sapiens
MSHIQIPPGLTELLQGYTVEVLRQQPPDLVEFAVEYFTRLREARAPASVLPAATPRQSLGHPPPEPGPDRVADAKGDSESEEDEDLEVPVPSRFNRRVSVCAETYNPDEEEEDTDPRVIHPKTDEQRCRLQEACKDILLFKNLDQEQLSQVLDAMFERIVKADEHVIDQGDDGDNFYVIER

SEQ ID NO: 1024429 - protein, 395 aa, Homo sapiens
MSHIQIPPGLTELLQGYTVEVLRQQPPDLVEFAVEYFTRLREARAPASVLPAATPRQSLGHPPPEPGPDRVADAKGDSESEEDEDLEVPVPSRFNRRVSVCAETYNPDEEEEDTDPRVIHPKTDEQRCRLQEACKDILLFKNLDQEQLSQVLDAMFERIVKADEHVIDQGDDGDNFYVIERGTYDILVTKDNQTRSVGQYDNRGSFGELALMYNTPRAATIVATSEGSLWGLDRVTFRRIIVKNNAKEEEEWFESFIESWAPLLKSLEDVRTEVKMVDCDSERRSIRMESRIITQGEKADSFYIIESGEVSILIRSKTKSNQGWGTRRSRCPLHKGQYLESLPWSQQNQSAQLMRWDVKCQYGGTTMRGSGPDGIEKESNKRKRRNMGPRLNPAP

SEQ ID NO: 1024430 - protein, 60 aa, Homo sapiens
AAAYYYYYCSEFKLLTMYGDMSCPIPILPDPCDLPQIPSSQTAPGRGGAGVGARTPQSPP

SEQ ID NO: 1024431 - protein, 117 aa, Homo sapiens
  misc_feature (2)..(4): Xaa can be any naturally occurring amino acid
  misc_feature (7)..(7): Xaa can be any naturally occurring amino acid
  misc_feature (29)..(29): Xaa can be any naturally occurring amino acid
MXXXCPXIDFRGGKQTPFGNLPGTQPPSXEPTLAQPPFPGRGPASFAPARVQPVRKPRVCLVVSFRSPESGVRDAPSAHTRRTSRSDAACSRCDRVLPWADPKEAFWLSATSSCWTA

SEQ ID NO: 1024432 - protein, 201 aa, Homo sapiens
  misc_feature (165)..(165): Xaa can be any naturally occurring amino acid
  misc_feature (188)..(188): Xaa can be any naturally occurring amino acid
  misc_feature (192)..(192): Xaa can be any naturally occurring amino acid
EAGLEALGLPSGVLQTPASDMAPGLRNMRSAKIAKSARASSILMSWLYLARRYERQGAPVLICPVQSPTTRSAMNVSSVSPERWVHHHPPAIRLSQFARLDRFGHRADLVDLQQQTVAGLLLNGLGNPSWELVTCQGHTPDNLVCSRPVEGSEVQCGHSHPGISXLIESSYYSSARFSHSDVPSRDHXGDLXVTDRTSHMR

SEQ ID NO: 1024433 - protein, 220 aa, Homo sapiens
QTQPRFPWTCHKTKEDSCAEGAGSAASWLCQDHTYQGRTRMSDTEEQEYEEEQPEEEAAEEEEEEEERPKPSRPVVPPLIPPKIPEGERVDFDDIHRKRMEKDLLELQTLIDVHFEQRKKEDEELVALKERIERRRSERAEQQRFRTEKERERQAKLAEEKMRKEEEEAKKRAEDDAKKRRCCPTWGAILAATWSRQNRSVVSGSGPGDEGAHRSERKKL

SEQ ID NO: 1024434 - protein, 191 aa, Homo sapiens
MSDTEEQEYEEEQPEEEAAEEEEEAPEEPEPVAEPEEERPKPSRPVVPPLIPPKIPEGERVDFDDIHRKRMEKDLLELQTLIDVHFEQRKKEDEELVALKERIERRRSERAEQQRFRTEKERERQAKLAEEKMRKEEEEAKKRAEDDAKKRRCCPTWGAILAATWSRQNRSVVSGSGPGDEGAHRSERKKL

SEQ ID NO: 1024435 - protein, 224 aa, Homo sapiens
AGIRHEGKSKMSLKEIVDHLEKLYCSSYGVQYTHIPSKQKCDWLRERIEIPEPYQYTVDQKRQILDRLTWATSFESFLSTKFPNDKRFGLEGLESVVPGIKTLVDRSVELGVEDIVLGMAHRGRLNVLSNVVRKPNESIFSEFKGSSARDDIEGSGDVKYHLGMNYQRPTTSGKYVNLSLVANPSHLESQDPVVLGRTRALLHAKNDLKEKTKALGVLLHGDAA

SEQ ID NO: 1024436 - protein, 50 aa, Homo sapiens
GREMKVRILSERKKPLDIDYMGEEQLREKAQELSDWIHQLESEKFDLMAN

SEQ ID NO: 1024437 - protein, 162 aa, Homo sapiens
APGLETVVCGTPKPLSFHSAFCLVITFPWRRAQPWWKSPALALSLGMRWQRMVLLGDPHVCTLGAACLLHSSFKYLSSSCVPAAGLQDGSVLGDHAVAEEAGCSPHATTSPLPVHTNKVLLEYSHTHFSAYCLWLLSCYNRELNSWDRDLWPAKLNYLPSGS

SEQ ID NO: 1024438 - protein, 81 aa, Homo sapiens
  misc_feature (5)..(5): Xaa can be any naturally occurring amino acid
  misc_feature (81)..(81): Xaa can be any naturally occurring amino acid
RLSMXLHFLILYVGPLPLIFQITPLTVTQWLMVLKISLPVILMDETLKFVARNYLEPAILEYPLPKPFLQKCKGVRVACMX

SEQ ID NO: 1024439 - protein, 46 aa, Homo sapiens
VWWNSKLKEAETRAEFAERSVAKLEKTIDDLEDEVYAQKMKYKAIS

SEQ ID NO: 1024440 - protein, 142 aa, Homo sapiens
MMWPMHTPLLLLTALMVAVAGSASAQSRTLAGGIHATDLNDKSVQRALDFAISEYNKVINKDEYYSRPLQVMAAYQQIVGGVNYYFNVKFGRTTCTKSQPNLDNCPFNDQPKLKEEEFCSFQINEVPWEDKISILNYKCRKV

SEQ ID NO: 1024441 - protein, 229 aa, Homo sapiens
RAEHGGVQVEVLRLSDRYGIGVRARKAGASWLRAARPWGLSGPRDAGRYEEGQCSSTAGKSEPTITWNKGVRDSLDMEAKSPLCRGQMHFPRREMGGRQNLNPPVEPAGLKGTHKGFHNLFRPPSSREAFPAVPKTDEGPGNILITSGVAAFPRGCVKRQGAFLVQTKDPKLNRRASQEEKLLNAVWIDPRGTRLRRTKRRKWFLEVCSLTAGVFGKDQWRKIPKKEET

SEQ ID NO: 1024442 - protein, 55 aa, Homo sapiens
  misc_feature (47)..(47): Xaa can be any naturally occurring amino acid
IDKFEFVEKLKRQKYDITTLRSRIDQAQKHSKKAGTPAKGKVGGRWXERGQKGPS

SEQ ID NO: 1024443 - protein, 87 aa, Homo sapiens
GLRTVVVLPLVVRAAGARVADGGGGAGRTGVTVGRRAAAGFRIGDGRRAAVALGGARVVPPPVSDADLPVEVVEPLTLVELLLLDEV

SEQ ID NO: 1024444 - protein, 110 aa, Homo sapiens
HEIIMLPQHVKFILLSATVPNTYEFANWIGRTKQKNIYVISTPKRPVPLEINIWAKKELIPVINQNSEFLEANFRKHKEILNGESAKGAPSKTDNGRGGSTARGGRGGSN

SEQ ID NO: 1024445 - protein, 113 aa, Homo sapiens
PTKEELDAIIEEEDEDGSGTIDFEEFLVMMVRQMKEDAKGKSEEELAECFRIFDRNADGYIDPEELAEIFRASGEHVTYEEIESLMKDATEHTPLDFDESEMRGVRRRDSALP

SEQ ID NO: 1024446 - protein, 138 aa, Homo sapiens [sequence omitted]

SEQ ID NO: 1024447 - protein, 73 aa, Homo sapiens
DSKSQVRYLPSADLAFFLTPNTHSPPGTCVGRFELSPWTPNTHSPPGSSRLQMTCLLSVPGLRSDTCRIVNPK

SEQ ID NO: 1024448 - protein, 220 aa, Homo sapiens
MGNRAVYQHVTAFSGLDCGQASRGGDRDRDGCTWWTGLVMLWPSCGPGDSSSCRVLLSVFIYNPALLAAGQERLSESYNGKTCKDGKPVIDYHEEELLDEVYSSVLQQCYRHVQEVSGDPELQPVLAGLFLSMCLVTVLGNLLIILAISPDSHLHTPMYFFLSNLSLPDIGFTSTTVPKMIVDIQSHSRVISYAGCLTQMSLFAIFGGMEERHAPECDGL

SEQ ID NO: 1024449 - protein, 132 aa, Homo sapiens
ITILKWKPPSLNSVDFRLKITRMGGEGTSEDPERQLVLAGLFLSMCLVTVLGNLLIILAISPDSHLHTPMYFFLSNLSLPDIGFTSTTVPKMIVDIQSHSRVISYAGCLTQMSLFAIFGGMEERHAPECDGL

SEQ ID NO: 1024450 - protein, 138 aa, Homo sapiens [sequence omitted]

SEQ ID NO: 1024451 - protein, 144 aa, Homo sapiens
MPGVGLLVSHFSTLVSRQRCPNYADPQNLTDVSIFLLLEVSGDPELQPVLAGLFLSMCLVTVLGNLLIILAISPDSHLHTPMYFFLSNLSLPDIGFTSTTVPKMIVDIQSHSRVISYAGCLTQMSLFAIFGGMEERHAPECDGL

SEQ ID NO: 1024452 - protein, 120 aa, Homo sapiens
SYIPFPVKPKGIPKFYTSQTILQPVAAGLFLSMCLVTVLGNLLIILAISPDSHLHTPMYFFLSNLSLPDIGFTSTTVPKMIVDIQSHSRVISYAGCLTQMSLFAIFGGMEERHAPECDGL

SEQ ID NO: 1024453 - protein, 138 aa, Homo sapiens [sequence omitted]

SEQ ID NO: 1024454 - protein, 138 aa, Homo sapiens [sequence omitted]

SEQ ID NO: 1024455 - protein, 212 aa, Homo sapiens
MAARRGALIVLEGVDRAGKSTQSRKLVEALCAAGHRAELLRFPERSTEIGKLLSSYLQKKSDVEDHSVHLLFSANRWEQVPLIKEKLSQGVTLVVDRYAFSGVAFTGAKENFSLDWCKQPDVGLPKPDLVLFLQLQLADAAKRGAFGHERYENGAFQERALRCFHQLMKDTTLNWKMVDASKSIEAVHEDIRVLSEDAIRTATEKPLGELWK

SEQ ID NO: 1024456 - protein, 142 aa, Homo sapiens
MLPKASKLSMRTSACSLRTPSALPQRSRWGSYGSDPRLPTGDASPCSPPRGGRLAEGPVPSGVQTPQLQELFPGSRDLQAASSAPELGCTGDPRGGDLGSVDMSRAMEQSPALSPVLMALCCIFLLKFSDNSEQFHCDHCKW

SEQ ID NO: 1024457 - protein, 222 aa, Homo sapiens
MAARRGALIVLEGVDRAGKSTQSRKLVEALCAAGHRAELLRFPERSTEIGKLLSSYLQKKSDVEDHSVHLLFSANRWEQVPLIKEKLSQGVTLVVDRYAFSGVAFTGAKENFSLDWCKQPDVGLPKPDLVLFLQLQLADAAKRGAFGHERYENGAFQERALRCFHQLMKDTTLNWKVRIPELHTRKRGEVAQDDTVVAGTARCHAKAAAVSVCSSQMCEPGE

SEQ ID NO: 1024458 - protein, 185 aa, Homo sapiens
MAARRGALIVLEGVDRAGKSTQSRKLVEALCAAGHRAELLRFPERSTEIGKLLSSYLQKKSDVEDHSVHLLFSANRWEQVGRQSLILSPRLECSGTISAHCNLCLLSSSDYPASVSRVSGIIGMHHRAQLIFILLVETGFYHVGQAGLKLLTSSDPLISASQSARITGMSHCTQPPDAFSKMVHL

SEQ ID NO: 1024459 - protein, 142 aa, Homo sapiens; identical to SEQ ID NO: 1024456

SEQ ID NO: 1024460 - protein, 212 aa, Homo sapiens; identical to SEQ ID NO: 1024455

SEQ ID NO: 1024461 - protein, 193 aa, Homo sapiens
MAARRGALIVLEGVDRAGKSTQSRKLVEALCAAGHRAELLRFPERSTEIGKLLSSYLQKKSDVEDHSVHLLFSANRWEQVRFPLHSTLNVENFSLDWCKQPDVGLPKPDLVLFLQLQLADAAKRGAFGHERYENGAFQERALRCFHQLMKDTTLNWKMVDASKSIEAVHEDIRVLSEDAIRTATEKPLGELWK

SEQ ID NO: 1024462 - protein, 212 aa, Homo sapiens; identical to SEQ ID NO: 1024455

SEQ ID NO: 1024463 - protein, 155 aa, Homo sapiens
RTRLQGGAAQAQARVSVPPRVVLAPAPANPFEFGRGREILANHGGALLTPANGSSGRLRGDASGGRWTVMAARRGALIVLEGVDRAGKSTQSRKLVEALCAAGHRAELLRFPERSTEIGKLLSSYLQKKICRLPLLPRSWGALGTPVVGTLAVWT

SEQ ID NO: 1024464 - protein, 253 aa, Homo sapiens
MAARRGALIVLEGVDRAGKSTQSRKLVEALCAAGHRAELLRFPERSTEIGKLLSSYLQKKSDVEDHSVHLLFSANRWEQVGRQSLILSPRLECSGTISAHCNLCLLSSSDYPASVSRVSGMPLIKEKLSQGVTLVVDRYAFSGVAFTGAKENFSLDWCKQPDVGLPKPDLVLFLQLQLADAAKRGAFGHERYENGAFQERALRCFHQLMKDTTLNWKMVDASKSIEAVHEDIRVLSEDAIRTATEKPLGELWK

SEQ ID NO: 1024465 - protein, 114 aa, Homo sapiens
MAARRGALIVLEGVDRAGKSTQSRKLVEALCAAGHRAELLRFPERSTEIGKLLSSYLQKKSDVEDHSVHLLFSANRWEQVQGLCVMQAECSAQSQLTAASTSRVQVIFPPQPPK

SEQ ID NO: 1024466 - protein, 142 aa, Homo sapiens; identical to SEQ ID NO: 1024456

SEQ ID NO: 1024467 - protein, 193 aa, Homo sapiens; identical to SEQ ID NO: 1024461

SEQ ID NO: 1024468 - protein, 212 aa, Homo sapiens; identical to SEQ ID NO: 1024455

SEQ ID NO: 1024469 - protein, 188 aa, Homo sapiens
MAARRGALIVLEGVDRAGKSTQSRKLVEALCAAGHRAELLRFPERSTEIGKLLSSYLQKKSDVEDHSVHLLFSANRWEQVPLIKEKLSQGVTLVVDRYAFSGVAFTGAKELQLADAAKRGAFGHERYENGAFQERALRCFHQLMKDTTLNWKMVDASKSIEAVHEDIRVLSEDAIRTATEKPLGELWK

SEQ ID NO: 1024470 - protein, 152 aa, Homo sapiens
  misc_feature (140)..(140): Xaa can be any naturally occurring amino acid
MAARRGALIVLEGVDRAGKSTQSRKLVEALCAAGHRAELLRFPERSTEIGKLLSSYLQKKSDVEDHSVHLLFSANRWEQVPLIKEKLSQGVTLVVDRYAFSGVAFTGAKENFSLDWCKQPDVGLPKPDLVLFLHLQLRMXPRGSYGSDPSCH

SEQ ID NO: 1024471 - protein, 69 aa, Homo sapiens
KVAIFVGGVQLWRLLVSNSQDAAESAGSSSDWAEDDKHCFPEHFKNKVPEKQKLFQEDDEIPLYLKGGV

SEQ ID NO: 1024472 - protein, 64 aa, Homo sapiens
MHIWIAVLHFQVTSLGSWLSYWIRLSRISRCLQPTPLLQTAANTSFCQQTYATTAIAITDLTKM

SEQ ID NO: 1024473 - protein, 133 aa, Homo sapiens
MHIWIAVLHFQVTSLGSWLSYWIRLSRISRCLPNSHSRICLPELRRPYLPFSSVPTRPYCYSLAIASPAAIFTNKNCGSSVMEDFTSGGIRAGTTSSLDSDPDQLAVPTRSLSPVSETHFPPHPQRPHCVPAT

SEQ ID NO: 1024474 - protein, 45 aa, Homo sapiens
NSLTAADTAVYYCARDRGGVIDGNYREYYYGMDVWGPGITVAVSS

SEQ ID NO: 1024475 - protein, 183 aa, Homo sapiens
MDTRVTVRCLVLTVTWQCTKRAYTHELNLGVARECEPEMMPLMRLGSTAQLHPIPTVASPKMLRKRTSNGDFGSLSSCVLWDAADAVSLAVSDIPGEAMVKLYCPKCMDVYTPKSSRHHHTDGAYFGSGFPHMLFMVHPEYRPKRPANQFVPRLYGFKIHPHGLPGCKVPAASLFFSPVKKIR

SEQ ID NO: 1024476 - protein, 75 aa, Homo sapiens
EIWLGLNDMAGRGHLALDMTRRPHRLQELADMRSPRNPMAGKTENCAVLSGAANGKWFDKRCRDQLPYICQFGIV

SEQ ID NO: 1024477 - protein, 166 aa, Homo sapiens
SGAEAEWECGKRRIPGGRRGFPYPDPARVLASPAEGALAEWVGARLAAARFRRQELELGSGARAGVPTEPGGTGVVERERGREVPGSPNRNVQARSAPAGQTFVLSAREAESRAGGAGATETVPALGADGIARGRYPLEGSPGPWPDLVLRSRALGHAQREEGERC

SEQ ID NO: 1024478 - protein, 320 aa, Homo sapiens
LTGLGPVTSLIAPSSLSAAMIARQQCVRGGPRGFSCGSAIVGGGKRGAFSSVSMSGGAGRCSSGGFGSRSLYNLRGNKSISMSVAGSRQGACFGGAGGFGTGGFGAGGFGAGFGTGGFGGGFGGSFSGKGGPGFPVCPAGGIQEVTINQSLLTPLHVEIDPEIQKVRAEEGEQIKLLNNKFASFIDQGQFLEQQNKVLETKFVILLQQNMRTTTSRYKTLRPLFETYLSVLRKQLEYLVALTKGALGSGAEDHARTSGDLPLSFDTAITNALSAMNGAKRVEANYQGSGTCRKGGTSEGHTWADSPRPVPRTARAICRAK

SEQ ID NO: 1024479 - protein, 125 aa, Homo sapiens
  misc_feature (1)..(1): Xaa can be any naturally occurring amino acid
XGRREKSTCPGSTLKWFSGLGRESGWGPRCSSILCPWSQQAAPASRVLLGLILPPNELRSRPSRGGTWSDSVGLGGPALLTPPGGPFSTARGGCGRGAEGGTTTGREHGAGNPWAPVGGLWSSGR

SEQ ID NO: 1024480 - protein, 229 aa, Homo sapiens
RRGEEMRRGMEVYVTEEAAALLPQRPGPLKPGESPPRDEDAPARGNAPAAFAAPKRAVPSKPQPRPDTLILIPSRTGLCEDPRRAELRASNGTGCKTGQEWTSQDAGLAKGPWHASHPKGPRAIRGTSGSRPRPSFDHTKRSKYQHYSSQSLGNNGGKTMHIPQRPAESQLRRGTNREESPKVPPTQTDKHKRRSVGAENKPEATLGKNNPHTSDPPRTRTKKARGGRP

SEQ ID NO: 1024481 - protein, 235 aa, Homo sapiens
SGGRGLTLIQPGKVRRVEAGAELAAPSSAGGLSPVAGQTKEAARVGQARPAVAERSVWPVRGGCALLALCGALVACGWLLGADAQDALWSPAAGIDGGLRRVMRQVGRAFFLSMYLTRILLVAARRRLVSGVVLLVHRHLQDLHGVVRILLKGRAAPWSSVRLSVEPLCVQCILVSLNFKDIGNMHGTLRLLDENVVIFLGPGTYATVYQQGELDNLSILILQYPQFACMPFPET

SEQ ID NO: 1024482 - protein, 324 aa, Homo sapiens
SGGRGLTLIQPGKVRRVEAGAELAAPSSAGGLSPVAGQTKEAARVGQARPAACDSRQQNGTGLSGASALHELHDGWWTRGHAMTGWLPWAARKTQVARGARRTRHEAAPGRMLARRTASPSITSRYPGACARRLVSVWACGCTGPVTQDLHAWGSSLRWRRDAPGRRGCHGTSSWRFPLRLWCVVADSLRHYHLGEILATWGKLDGPWFGTEVQLLQCSLCAPSYLMQNGIPRMVGTGRTILSNAWILTRLPPRSFDRFNWPFPLGKPQELELFELKGDNGGSYKPLGVWKSFDCEPLGFGVRASDKAKVDPQGEDYRFSWKPP

SEQ ID NO: 1024483 - protein, 369 aa, Homo sapiens
MAQEPVTFRDVAIYFSREEWACLEPSQRALYRDVMLDNFSSVAALGFCSPRPDLVSRLEQWEEPWVEDRERPEFQAVQRGPRPGARKSADPKRHCDHPAWAHKKTHVRRERAREGSSFRKGFRLDTDDGQLPRAAPERTDAKPTAFPCQVLTQRCGRRPGRRERRKQRAVELSFICGTCGKALSCHSRLLAHQTVHTGTKAFECPECGQTFRWASNLQRHQKNHTREKPFCCEACGQAFSLKDRLAQHRKVHTEHRPYSCGDCGKAFKQKSNLLRHQLVHTGERPFYCADCGKAFRTKENLSHHQRVHSGEKPYTCAECGKSFRWPKGFSIHRRLHLTKRFYECGHCGKGFRHLGFFTRHQRTHRHGEV

SEQ ID NO: 1024484 - protein, 610 aa, Homo sapiens
MDMAQEPVTFRDVAIYFSREEWACLEPSQRALYRDVMLDNFSSVAALGEHGLSAAWAQGFCSPRPDLVSRLEQWEEPWVEDRERPEFQAVQRGPRPGARKSADPKRPCDHPAWAHKKTHVRRERAREGSSFRKGFRLDTDDGQLPRAAPERTDAKPTAFPCQVLTQRCGRRPGRRERRKQRAVELSFICGTCGKALSCHSRLLAHQTVHTGTKAFECPECGQTFRWASNLQRHQKNHTREKPFCCEACGQAFSLKDRLAQHRKVHTEHRPYSCGDCGKAFKQKSNLLRHQLVHTGERPFYCADCGKAFRTKENLSHHQRVHSGEKPYTCAECGKSFRWPKGFSIHRRLHLTKRFYECGHCGKGFRHLGFFTLASEDSQARGGVGAPEEWGAAPLREYWVLRESCSEKLLFSLENQPEFREAFLVLRAPQSPEKFTGKTARWEKQSHGYAGDGGGSGDGGGCARRRASWGCAESVRDPGATCQAGLRGGEACLVPTAVWLRDSTLAPSRRLLGLSFLALHPMLAARSGFPSCLCLGRGSCEHCTEAKTLLQPLRWAVETRAFVILNLIQGLGVVVRSGPPPVLQERPPPSSVGQSLGHAPGVGRSSWVSGQ

SEQ ID NO: 1024485 - protein, 645 aa, Homo sapiens
MARYRSPQLLPPGFKWISCPSLLSSWDDRSALLGTVLPQRGGLAVPMDMAQEPVTFRDVAIYFSREEWACLEPSQRALYRDVMLDNFSSVAALGFCSPRPDLVSRLEQWEEPWVEDRERPEFQAVQRGPRPGARKSADPKRPCDHPAWAHKKTHVRRERAREGSSFRKGFRLDTDDGQLPRAAPERTDAKPTAFPCQVLTQRCGRRPGRRERRKQRAVELSFICGTCGKALSCHSRLLAHQTVHTGTKAFECPECGQTFRWASNLQRHQKNHTREKPFCCEACGQAFSLKDRLAQHRKVHTEHRPYSCGDCGKAFKQKSNLLRHQLVHTGERPFYCADCGKAFRTKENLSHHQRVHSGEKPYTCAECGKSFRWPKGFSIHRRLHLTKRFYECGHCGKGFRHLGFFTRHQRTHRHGEVYGAPEEWGAAPLREYWVLRESCSEKLLFSLENQPEFREAFLVLRAPQSPEKFTGKTARWEKQSHGYAGDGGGSGDGGGCARRRASWGCAESVRDPGATCQAGLRGGEACLVPTAVWLRDSTLAPSRRLLGLSFLALHPMLAARSGFPSCLCLGRGSCEHCTEAKTLLQPLRWAVETRAFVILNLIQGLGVVVRSGPPPVLQERPPPSSVGQSLGHAPGVGRSSWVSGQ

SEQ ID NO: 1024486 - protein, 72 aa, Homo sapiens
EGGLTFQVLDNAPQAVPVGCNEHSLAGLDLGNLQERRVLGLGQGLSGERGGCRRSPRCLPTHVKLNPPPPPP

SEQ ID NO: 1024487 - protein, 180 aa, Homo sapiens
EGGLTFQVLDNAPQAVPVGCNEHSLAGLDLGNNLLVPEGQGPGNGVHEALAGGEFPGLQACVPTLLGDTCTLLSLPSQWARTRLPTLQLYQRPSQQRQPTLLMELQYGCFSSIWGSGMSKERLQIFTWFYPCFGGRFCLVEACEAPVMPLIEAPSAHHMQSHLVRAGQDGPTGADGPVHH

SEQ ID NO: 1024488 - protein, 107 aa, Homo sapiens
RSESTQSLRYLGNPLLPSWMCGLSDIVKRRRGRGKTLPPVCRQRAPRSREASAPGVTAANALLPSVSLPQLPSPSLLSLLPFLPAAKHTEPSDLQAQCRALALHGHK

SEQ ID NO: 1024489 - protein, 167 aa, Homo sapiens
RVVPAVHGGAVSFGNPGRTGHPEAVLSWRSGSSMSRTLASAVPLSSSRLLRDGWANSSSGLRAHVTKKEHWHLDKDTFDELLSLLSTLQELNAENIVNTNRIILTGHYVTLTRRLILETKNIYTADLSVSKAHVVHFTTNTEKLQKLKLEYETHNLRRCYAQKIAWD

SEQ ID NO: 1024490 - protein, 108 aa, Homo sapiens
MASRISGLYRMPDALAGQQFTSRDEDPYCVSCFGEFFAPKCSSCKRPIVGLGGGKYVSFEDRYWHHNCFSCARCFSIPGGPGLRTGWRHKCSAKGCELRQGPNARVFL

SEQ ID NO: 1024491 - protein, 118 aa, Homo sapiens
MASRISGLYRMPDALAGQQFTSRDEDPYCVSCFGEFFAPKCSSCKRPIVGLGGGKYVSFEDRYWHHNCFSCARCFSIPGGPGLRTGWRHKCSAKGCELRQGPNARAPGPTGPGLWLLF

SEQ ID NO: 1024492 - protein, 307 aa, Homo sapiens
MTPPRASPRTPPRASPTTTPSRASLTRTPSWASPTTTPSRASLMKMESTVSITRTPPRASPTGTPSRASPTGTPSRASLTGSPSRASLTGTPSRASLIGTPSRASLIGTPSRASLTGTPPRASLTGTSSTASLTRTPSRASLTRTQSSSSLTRTPSMASLTRTPPRASLTRTPPRASLTRTPPRASLTRTPPRASLTRTPSMVSLKRSPSRASLTRTPSRASLTMTPSRASLTRTPSTASLTGTPPTASLTRTPPTASLTRSPPTASLTRTPSTASLTRMPSTASLTRKSNVNQQCPASTPSSEVIS

SEQ ID NO: 1024493 - protein, 180 aa, Homo sapiens
SGVAAVDGCEALSQGPGAAVGSAGRTSRSVRGLRGRGAAEWSKPSLASGQACVTLVCESLLSPEVMLLSQARYSDAVRSCVEEQLQFTILSLVAAYPVQLVPGSFVMHTRGDPGMYDLYDADPSGSPLEDKPVLFSQTATGPTCPSKAVYQKFGKFYLIETVNIWSHLLGFLSLLHPGNI

SEQ ID NO: 1024494 - protein, 274 aa, Homo sapiens
MQTPRASPPRPALLLLLLLLGGAHGLFPEEPPPLSVAPRDYLNHYPVFVGSGPGRLTPAEGADDLNIQRVLRVNRTLFIGDRDNLYRVELEPPTSTELRYQRKLTWRSNPSDINVCRMKGKQEGECRNFVKVLLLRDESTLFVCGSNAFNPVCANYSIDTLQPVGDNISGMARCPYDPKHANVALFSDGMLFTATVTDFLAIDAVIYRSLGDRPTLRTVKHDSKWFKGETRKGSGPRPGRAQNLTFIKSPHQNKSPRGAWWRDFHHIFGICWPF

SEQ ID NO: 1024495 - protein, 888 aa, Homo sapiens [sequence omitted]

SEQ ID NO: 1024496 - protein, 517 aa, Homo sapiens [sequence omitted]

SEQ ID NO: 1024497 - protein, 888 aa, Homo sapiens [sequence omitted]

SEQ ID NO: 1024498 - protein, 687 aa, Homo sapiens [sequence omitted]

SEQ ID NO: 1024499 - protein, 135 aa, Homo sapiens
  misc_feature (26)..(26): Xaa can be any naturally occurring amino acid
AHLCETFWCELYLKNGRPRRRARHAXHFLSWPAEGTPASTRPLLDFRRKVNKCYRGRSCPIIVHCSDGAGRTGTYILIDMVLNRMAKGVKEIDIAATLEHVRDQRPGLVRSKDQFEFALTAVAEEVNAILKALPQ

SEQ ID NO: 1024500 - protein, 99 aa, Homo sapiens
SALHSQVFPALTPKRWTQVRRGTATVGGMAILQVTAGHPLAMAQALRATPPPWSRALRAPLAMAQVPAGSPATMVQALRASPWPMAQVTHPPGPTSLRK

SEQ ID NO: 1024501 - protein, 317 aa, Homo sapiens
GTRRSWWVLAPLTPLFAAPFGSVLVWSIHLSGGPSCPLPPVFPLFPYTFPGPCGGLAGASVLAFPTVISPSHTRDIEVCLGRFHVCRATCQVLISRRDHLVHGTQAPSDSSDSPVVPVCCHYSSFWLAAIEVSPGSTDCEVSLFFFSNVAYHGFCLLCSLKPCESCCVQAGPVACWAEGSQSSTGRLIEVSHLGYLLLPSRPVRPPPTSPAPAWSPRDYVALYDHVDPPEHTPCTLAPAHGTAIPCAWISPHHFVPDDLSDQLCRPCVVRGSVINSDGGRHSLVHQHWATAYPCPPIRFGCYGKGMFRTVHFPQCRH

SEQ ID NO: 1024502 - protein, 83 aa, Homo sapiens
PTCPSEAAWPWRRGWITVAQTHCHSGQLPCLHRRCYGKGMFRTVHLPSMSALSGPAPPSPATPLPSWAILLDGHLGGSGFYFC

SEQ ID NO: 1024503 - protein, 245 aa, Homo sapiens
APASRCNILSYDYSGYGASSGQGLPTRNLYALTSDGRMARPCASRYGISPDSIILYGQSIGTDAHQLDLASRYECAAVVLHLRRSPRECASPSPDTKKTYCFDAFPNIEKVSKITCSRAHHPAVTEDEVIDFSHGLASLRSSCTQERMVAACWVEGSGHILIIESLQPVILDAHCVRFISQELPSHARLAERPHIGQDLMQQRQAPGPHPTRTGPHTWGMHVTPAGRHQGAPPRSKGAVDDVQAT

SEQ ID NO: 1024504 - protein, 331 aa, Homo sapiens
APASRCNILSYDYSGYGASSGQGLPTRNLYALTSDGRMARPCASRYGISPDSIILYGQSIGTDAHQLDLASRYECAAVVLHLRRSPRECASPSPDTKKTYCFDAFPNIEKVSKITCSRAHHPAVTEDEVIDFSHGLASLRSSCTQERMVAACWVEGSGHILIIESLQPVILDAHCVRFISQELPSHARLAERPHIGQDLSNKGRPPDLTPVAGLRAWGCVCDSCCSIQGDLDPFQGLSTIVQAISPSDCCLTVRVKASTDSIVRNRKILTHYEESESRCLVDGGQRVKAEAVGLCSTVDDVSEDPGPTWTQVFFDLMQRNQNERPMSENND

SEQ ID NO: 1024505 - protein, 81 aa, Homo sapiens
GPGPPCPASLVLRASSGLPQPRGGNLVGTREPLLSQAIGRHWAIERLSRTCVDIGGRQEGAAPQCFYVISTFTAMNPALLQ

SEQ ID NO: 1024506 - protein, 151 aa, Homo sapiens
  misc_feature (104)..(104): Xaa can be any naturally occurring amino acid
  misc_feature (133)..(133): Xaa can be any naturally occurring amino acid
  misc_feature (135)..(135): Xaa can be any naturally occurring amino acid
  misc_feature (138)..(138): Xaa can be any naturally occurring amino acid
  misc_feature (145)..(145): Xaa can be any naturally occurring amino acid
  misc_feature (150)..(150): Xaa can be any naturally occurring amino acid
LAGYSEYMDPVIGSGAADEGRPFLGPGPFRAAGASAWRNPIPFPETFDGDTDRLPEFIVQYVLLTMFVDEYTFSNDALKTYATTAIAIHRIITNRLWLLVMWTXLGGIRAGHSPWDSDPDSWPFPKGALFNFXRXPFXSPFPREXLCFLXK

SEQ ID NO: 1024507 - protein, 128 aa, Homo sapiens
PLRLKVKNQWQEAFGGADDRTSPGTALWRSIIMQKPESVDKFFKRVNGKDISSPAFQAHIQRVFGGFDMCISMLDDSDVLASQLAHLHAQHVERGISAEYFDVFAESLMLAVESTIESCFDKDAWSQC

SEQ ID NO: 1024508 - protein, 710 aa, Homo sapiens
MDRSQQTSRTGYWTMMNIPPVEKVDKEQQTYFSESEIVVISRPDSSSTKSKEDALKHKSSGKIFASEHPEFQPATNSNEEIGQKNISRTSFTQETKKGPPVLLEDELREEVTVPVVQEGSAVKKVASAEIEPPSTEKFPAKIQPPLVEEATAKAEPRPAEETHVQVQPSTEETPDAEAATAVAENSVKVQPPPAEEAPLVEFPAEIQPPSAEESPSVELLAEILPPSAEESPSEEPPAEILPPPAEKSPSVELLGEIRSPSAQKAPIEVQPLPAEGALEEAPAKVEPPTVEETLAEVQPLLPEEAPREEARELQLSTAMETPAEEAPTEFQSPLPKETTAEEASAEIQLLAATEPPADETPAEARSPLSEETSAEEAHAEVQSPLAEETTAEEASAEIQLLAAIEAPADETPAEAQSPLSEETSAEEAPAEVQSPSAKGVSIEEAPLELQPPSGEETTAEEASAAIQLLAATEASAEEAPAEVQPPPAEEAPAEVQPPPAEEAPAEVQPPPAEEAPAEVQPPPAEEAPAEVQPPPAEEAPAEVQPPPAEEAPSEVQPPPAEEAPAEVQSLPAEETPIEETLAAVHSPPADDVPAEEASVDKHSPPADLLLTEEFPIGEASAEVSPPPSEQTPEDEALVENVSTEFQSPQVAGIPAVKLGSVVLEGEAKFEEVSKINSVLKDLSNTNDGQAPTLEIESVFHIELKQRPPEL

SEQ ID NO: 1024509 - protein, 310 aa, Homo sapiens
RTVQAPKPPPPDRCRFLPCPDRQQADSCPIIWGYRQYDNGSCSTGSKDFPIAKGERQILLLTVDTHTAKYDPSLKPLSVSYDQCNFLCRILKQIGQCFQAWSLSDSQGQQQCVKGWTPGLALTDLIHVALSLGVHFAWHKVQSTTCGIHPDYMLAELHLVHWNTKYGPFWDKLCINLMDCAAASVIHLFDRLGSAKPGLQKVVDCAGIPFPDKGKSADFTNFDPRGLLPESLDYWTYPGSLTHPPLLGMCDLALCSRNPSASSSEQVLKFRKLNFQWGKGEPEELIGGPPGRQVQTLKNRQSKVSFNRWS

SEQ ID NO: 1024510 - protein, 239 aa, Homo sapiens
RRSRMAVEQPWRPVRNGMDLKPHFHKDWQSAPAATWFNQPARKIRRCKARLRPTARRIAPPPASGPIRPIVRCPTVRYHTKVRAGRGFSLEELRVAGIHKKVARTIGISVDPRRPDTSSTESLQANVQRLKEYRPELILFPRKPHSAPKKGDSLQQNLKLAHPADRTGHARSGTVSYTRRQLTHSPEDTEDSHAFAHSSHGPATPGILRDTGTHDHGKARTRCRHERLQPSGALATQNQ

SEQ ID NO: 1024511 - protein, 999 aa, Homo sapiens
MENLESRLKNAPYFRCEKGTDSNPLCRKCETCVLAWKIFSTKEWFCRINDISQRRFLVGILKQLNSLYLLHYFQNILQTTQGKDFIYNRSRINLSKKEGKVVKSSLNQMLDKTVEQKMKEILYWFANSTQWTKANYTLLLLQMCNPKLLLTAANVIRVLFLREENNISGLNQDITDVCFSPEKDHSSKSATSQVYWTAKTQHTSLPLSKAPENEHLLGAASNPEEPWRNSLRCISKMNRLFSGKGDITKPGYDPCNLLVDLDDIRDLSSGFSKYRDFIRYLPIHLSKYILRMLDRHTLNKCASVSQHWAAMAQQVKMDLSAHGFIQNQITFLQGSYTRGIDPNYANKVSIPVPKMVDDGKSMRVKHPKWKLRTKNEYNLWTAYQNEETQQVLIEERNVFCGTYNVRILSDTWVQNRVIHYSGGDLIAVSSNRKIHLLDIIQVKAIPVEFRGHAGSVRALFLCEEENFLLSGSYDLSIRYWDLKSGVCTRIFGGHQGTITCMDLCKNRLVSGGRDCQVKVWDVDTGKCLKTFRHKDPILATRINDTYIVSSCERGLVKVWHIAMAQLVKTLSGHEGAVKCLFFDQWHLLSGSTDGLVMAWSMVGKYERCLMAFKHPKMVVNTESNVLMFQFEHIKWQYAVEKTKQKKNKEKEEEKEENSLMEILSKCNIQVHSPRESVSSKQTVIQELLPGKPPKSRVLLKPAKFSSAVLIEELQSQGKSKSPRRDADDVEKAQKQGQLETPGKLPSHPKKKSWKIPMSPDQFLLTVSTLQHAHNSGEFAYPCRPQTEITDVWGPSISYPRKVLNFKGKSIQRAVDRLRLSNPPIDVKRTSIPLEIQKLQPNLKISLHSPRVQSTIPQPMIIRSRFSGSLKGGDQVTSSIERAVCSTGPLTSMQVIKPNRMLAPQVGTATLSLKKERPRIYTALDPFRVNTEFVLLTVKEEKEHQEAKMKEYQARESTGVVDPGKVSKAAWIRKIKGLPIDNFTKQGKTAAPELGQNVFI

SEQ ID NO: 1024512 - protein, 185 aa, Homo sapiens
RVRPPPTAAGGSGDGVGSLAQSPECEDSDHPALAWPGGCRELPFLSSGAKVARRQRLLPSTSSSSPLRRSCGDVAPLTPLLPDPVSPRGGNELSPTSPEETALDPQALPGKAVSYQSSRQPPPPAGGSPNVGVPVDHNHSMENESLFTFTYGKTLCDYVFRQWLQLYCSQIRNCTVAQRRASGVA

SEQ ID NO: 1024513 - protein, 117 aa, Homo sapiens
MTKIKADPERARGSGGGVFRGAHLYQELLVNQNPIQLAVPWLSRRLKRKLYKCLKKAVKQKPDSAAGGERGPDNFVKQREKKGIMVWGRRHTCHVRYTAISQSCVRTEIVPYVYIPL

SEQ ID NO: 1024514 - protein, 233 aa, Homo sapiens
MSTPGVNSSASLSPDRLNSPVTIPAVMFIFGVVGNLVAIVVLCKSRKEQKETTFYTLVCGLAVTDLLGTLLVSPVTIATYMKGQWPGGQPLCEYSTFILLFFSLSGLSIICAMSVERYLAINHAYFYSHYVDKRLAGLTLFAVYASNVLFCALPNMGLGSSRLQYPDTWCFIDWTTNVTAHAAYSYMYAGFSSFLILATVLCNVLVCGALLRMHRQFMRRTSLGTEQHHAAAA

SEQ ID NO: 1024515 - protein, 939 aa, Homo sapiens
MEESEDSQSDSQTRISESQHSLKPNYLSQAKTDFSEQFQLLEDLQLKIAAKLLRSQIPPDVPPPLASGLVLKYPICLQCGRCSGLNCHHKLQTTSGPYLLIYPQLHLVRTPEGHGEVRLHLGFRLRIGKRSQISKYRERDRPVIRRSPISPSQRKAKIYTQASKSPTSTIDLQSGPSQSPAPVQVYIRRGQRSRPDLVEKTKTRAPGHYEFTQVHNLPESDSESTQNEKRAKVRTKKTSDSKYPMKRITKRLRKHRKFYTNSRTTIESPSRELAAHLRRKRIGATQTSTASLKRQPKKPSQPKFMQLLFQSLKRAFQTAHRVIASVGRKPVDGTRPDNLWASKNYYPKQNARDYCLPSSIKRDKRSADKLTPAGSTIKQEDILWGGTVQCRSAQQPRRAYSFQPRPLRLPKPTDSQSGIAFQTASVGQPLRTVQKDSSSRSKKNFYRNETSSQESKNLSTPGTRVQARGRILPGSPVKRTWHRHLKDKLTHKEHNHPSFYRERTPRGPSERTRHNPSWRNHRSPSERSQRSSLERRHHSPSQRSHCSPSRKNHSSPSERSWRSPSQRNHCSPPERSCHSLSERGLHSPSQRSHRGPSQRRHHSPSERSHRSPSERSHRSPSERRHRSPSQRSHRGPSERSHCSPSERRHRSPSQRSHRGPSERRHHSPSKRSHRSPARRSHRSPSERSHHSPSERSHHSPSERRHHSPSERSHCSPSERSHCSPSERRHRSPSERRHHSPSEKSHHSPSERSHHSPSERRRHSPLERSRHSLLERSHRSPSERRSHRSFERSHRRISERSHSPSEKSHLSPLERSRCSPSERRGHSSSGKTCHSPSERSHRSPSGMRQGRTSERSHRSSCERTRHSPSEMRPGRPSGRNHCSPSERSRRSPLKEGLKYSFPGERPSHSLSRDFKNQTTLLGTTHKNPKAGQVWRPEATR

SEQ ID NO: 1024516 - protein, 71 aa, Homo sapiens
MKGRINKELDGTIICHQRSSRAIDRAVAGSMVRAEREPSAPLIATTAGDGTDRQDVQHMAGSISSTDANET

SEQ ID NO: 1024517 - protein, 90 aa, Homo sapiens
GREGVEVSRMEPSPFGDVSSRLTTEQILYNIKQEYKRMQKRRHLETSFQHDRSVLHFWMHSHMHFSSRGPASPGTSYCSILTIKKRTALI

SEQ ID NO: 1024518 - protein, 724 aa, Homo sapiens
MTEVPTYTVITLNVNGLNCPIKRQIGKIRGKKHDSTIHDLQETHFRSADTNCLKVEDGKRHCMLTVIKREQGGILQIYLSTSFTTLHKFCYVVFLFLFVSSIFFFKSLFLIKNDNRQEKYILVIYCTGWYHTLIIMYHIIQNFENSGFEMSPQRNKYEEVMDIFISLNISFGDFFCDFFGDFFFIYLLFKSVVFNFHKFDEFSNLLLLLISNFILFAIGEYILHDISNKSQSDRSPHLTVITLNVSGSNCPIFKFIYTYICGLTYGISQKMFRVHLGRMCMLLLLKDDSVYICYSYLTVLFKSSISFFIFFVILSIIESVLLKFPTITVELSISSFNSVSFCFICFSGATIKYVNVYHRYIFLAKLGMRVLGDRLFILVKIHFTKFRVYVQFIWHCWIDIVLADMFYLGWLVDFVIFLYQNTESVLNNKNKNKPQFCKELQNANLWDFGYVKKLVESSLKFCSTWHYLKERDNFLFWKDLGGIVSKTNLLMVYFFPLSLIVNNCPPREAQIKILFILSFHFYPVSSNNHRSLLVFISGKTIKDYHFLGEMVLLHSTNLVINHEGLVFVPWFHILKYSVFILNFNICSNEIVNIYSIVFIFVILDSLKPRKSKHIIMSHHPVSCKNLSLIFFLSFTYKLFTYVVEFTTTSEMGYLWRGRECRGKNEYPLAISVILYFSTYRKYEVTTAECWIKFNSGVVNKIISILLDDGLEVNLLKKKFTLFPK

SEQ ID NO: 1024519 - protein, 204 aa, Homo sapiens
  misc_feature (46)..(46): Xaa can be any naturally occurring amino acid
  misc_feature (63)..(63): Xaa can be any naturally occurring amino acid
MRHCTTYGLITDKLAYKEQNEGAVHAVTGSALAFTPVTFANDLTIXYITESSWRAEANIDSKXCALEPGFLEAWILRATRSPYLSKPLRYFETFSIEIEMTCTLGGEIQNDNWRLREERRKSQEAQVLKQLAEKREHEREVLQKALEENNNFSKMAEEKLILKMEQIKENREANLAAIIERLQEKERHAAEVRRNKELQVELSG

SEQ ID NO: 1024520 - protein, 144 aa, Homo sapiens
VGSARRLQRSDGPEIGCRAPHLHLSGHAPLACPCSFLPTSLGGVCVSAPAPALLSWGTLPAIWYWGCPHCLVLGPGPGPLWAGFTCLFLMAGRPRNSPIRAGRNRRESLSAGIFELFVLFCKKRLTSKLHKSLFVPTEFSTPHT

SEQ ID NO: 1024521 - protein, 126 aa, Homo sapiens
  misc_feature (64)..(64): Xaa can be any naturally occurring amino acid
RERGRPDPRAELLFRRGSAGGRLPQSSSHQSSVRPSSEPRSRRLSSLGVTRCSIRGLDPTLGHXPDDWSSVYQSRVPHKSESRTRQSLPSPVTGELPGLQMQTWTLGPRRLWVHVRVRVFAAWCQG

SEQ ID NO: 1024522 - protein, 241 aa, Homo sapiens
MGFHLRIVHGSPNLEAVALLISKRPKGHTNGGNFPRFFILGTPVVTRFTASSYKVNPHFYRTSAPLIPGSSQLLFAPIVPVRKTSFTPPVKKPQQFSSMSCSLSLHSRAIHSYFLSMLTKHTSNTAEGKESVFVSKCRFLANSRMRWYHEEYLEHHTSRLRRTSYVGHNSCWVALVLLAWMWGLQGNYLVLILVLDVFPQLPLVDVVVDSVRALIEGALEEHDATQMMVRAKVEVLRNRQG

SEQ ID NO: 1024523 - protein, 155 aa, Homo sapiens
MRGAALLLMSADSVARCCSGPLGRGDTFDVGVLAPKRQRGQARCLPALEGPPGLGGRVSTQRSGEEARSLVSSPGAEGKCVLLQKVLTQVSALRTQNSQVMDQVQREGGPQPTPAGEEEGLKVGGQLHEQPLFLTSRSARQGEVSMSRRERTSTL

SEQ ID NO: 1024524 - protein, 155 aa, Homo sapiens; identical to SEQ ID NO: 1024523

SEQ ID NO: 1024525 - protein, 114 aa, Homo sapiens
MQPESSCQAGVFVGSSAMRSTVTPLKRPGISGFPRQQALPTPVIYPPWQILVDRAVTVCQLGIRQRLKSFLTGSGVHSSGGRRFIGGLRKKHQTFGSLGRGLAELAERGGEACV

SEQ ID NO: 1024526 - protein, 178 aa, Homo sapiens
TIEEEGSEVGSAGEDNPAGQMNPGWKPSDGGCELPDAVGKEHPSSDGAVVAPAPKSEEKDAAEIQKRKRLEQAGIKVMPAAQRFASQKQLSEEKEAIRDIVLRKENSFLTHQHGNDSEAEGEVVCRLADLEKDDFAAGKARMNQTKPMVPLNQLLYGPYPKKGAEKSDGSKQLSKGIS

SEQ ID NO: 1024527 - protein, 79 aa, Homo sapiens
MAPAAATGGSTLPSGFSVFTTLPDLLFIFEFVSGSEFGDERELIRFIFFWPFKVSGEGTYLRPIRSGNEAIVCLAAVLL

SEQ ID NO: 1024528 - protein, 57 aa, Homo sapiens
MAPAAATGGSTLPSGFSVFTTLPDLLFIFEFVSGSYIATLLYVVHAVFIFNQMEVFI

SEQ ID NO: 1024529 - protein, 53 aa, Homo sapiens
  misc_feature (37)..(37): Xaa can be any naturally occurring amino acid
  misc_feature (47)..(47): Xaa can be any naturally occurring amino acid
  misc_feature (52)..(53): Xaa can be any naturally occurring amino acid
MAPAAATGGSTLPSGFSVFTTLPDLLFIFEFVSGSWXSEGTGWAEPXLSSAXX

SEQ ID NO: 1024530 - protein, 326 aa, Homo sapiens
CCCARLKVSVMQDRQFSFEFFPPKTAEGAEKLRNTRAQLSPLKPRFISVTFGAGGTTQQGTLDAVVEIQREGIEAAPHLSCVGSSRESIRGILNTYREHGIRRIVALRGDMPSGMGEIGEFRFANELVEFIRQETGEAFHIEVAAYPEYHPQSRSARHDLENFARKVKAGADSAITQYFFNADAYFQFVDDARKLGVDVPIVPGIMPITNSSQLMRFSEMCGAEVPRWIAKRLEGFGDDRESIRASAGRGDGHVRPLLQAGAGPAISTRSIAGRSTRAIWQRSGLVNADCGKAQGDRPGRPTPIRCFAWVLDEPPGRSRQILEIRA

SEQ ID NO: 1024531 - protein, 303 aa, Homo sapiens
MEHPLFGCLRSPHATAQGLHPFSQSSLALHGRSDHMSYPELSTSSSSCIIAGYPNEEGMFASQHHRGHHHHHHHHHHHHQQQQHQALQTNWHLPQMSSPPSAARHSLCLQPDSGGPPELGSSPPVLCSNSSSLGSSTPTGAACAPGDYGRQALSPAEAEKRSGGKRKSDSSDSQEGNYKSEVNSKPRKERTAFTKEQIRELEAEFAHHNYLTRLRRYEIAVNLDLTERQVKVWFQNRRMKWKRVKGGQQGAAAREKELVNVKKGTLLPSELSGIGAATLQQTGDSIANEDSHDSDHSSEHAHL

SEQ ID NO: 1024532 - protein, 267 aa, Homo sapiens [sequence omitted]

SEQ ID NO: 1024533 - protein, 188 aa, Homo sapiens
MGSPPRRGRHQSPPAQSWGCSWMLSGRLAHGGHPHLPVHVTAFRAWVTWTLNSGEFSLRSREKEDSSLEGFPGPITERMRRERSWSGTQLRWQCNAGKLYCMKSLSLPLPPSFTWTLPKTRIPECSGVTKCSGTLGTRVWSQAAGVCILVLPLLSWLTWHKPLTLSEPYCLQWQMDLSTGPIAWGCYC

SEQ ID NO: 1024534 - protein, 146 aa, Homo sapiens
RKFMCLSLQQLKSQPSIWTQPNHITCFIPHFWKQLIIHIWLSSCSRNAWLLMNWDSRENDPTLDLLTGFPSLVVSGEIFVILVSFYNTLKIWNYFGCLQISFLFLFSPEFRSSLPGLQWQWHDLGLTAASASQGESLETQKDEGWQ

SEQ ID NO: 1024535 - protein, 337 aa, Homo sapiens
  misc_feature (313)..(313): Xaa can be any naturally occurring amino acid
  misc_feature (327)..(327): Xaa can be any naturally occurring amino acid
VAGASPPGPRRALCPGRARADACTPRVRGGVESAHGSAREQLAPAGRRRRAPLRQASSEHARRRRARPLPPALASELADCAAGRSRAGAAAAGGYSARGSPASPPPRRELAPSPSRAPTPAFFRRRWAAPPSGRSPALHNPLRLSMFHTPRPEPPRLLFFPPPPSPPHSCLHFLKEGFFSLSLPHTVAARDGPGGRPSFPRDNFTKMSSDRQRSDDESPSTSSGSSDADQRDPAAPEPEEQEERKPSATQQKKNTKLSSKTTAKLSTSAKRIQKELAEITLDPPPNCSAGPKGDNIYEWRSTILGPPGSVYEXGVFFLDITFSSDYXFKPPKVTFRT

SEQ ID NO: 1024536 - protein, 337 aa, Homo sapiens
  misc_feature (164)..(168): Xaa can be any naturally occurring amino acid
  misc_feature (176)..(177): Xaa can be any naturally occurring amino acid
  misc_feature (186)..(186): Xaa can be any naturally occurring amino acid
  misc_feature (191)..(193): Xaa can be any naturally occurring amino acid
  misc_feature (313)..(313): Xaa can be any naturally occurring amino acid
  misc_feature (327)..(327): Xaa can be any naturally occurring amino acid
VAGASPPGPRRALCPGRARADACTPRVRGGVESAHGSAREQLAPAGRRRRAPLRQASSEHARRRRARPLPPALASELADCAAGRSRAGAAAAGGYSARGSPASPPPRRELAPSPSRAPTPAFFRRRWAAPPSGRSPALHNPLRLSMFHTPRPEPPRLLFFFFSXXXXXNYFNFFNXXFFFFFFSHXVSARXXXGGLLNFPRDNFTKMSSDRQRSDDESPSTSSGSSDADQRDPAAPEPEEQEERKPSATQQKKNTKLSSKTTAKLSTSAKRIQKELAEITLDPPPNCSAGPKGDNIYEWRSTILGPPGSVYEXGVFFLDITFSSDYXFKPPKVTFRT

SEQ ID NO: 1024537 - protein, 78 aa, Homo sapiens
KQWYQRRVAITAGDLSELAADLWCVLSRLSCAKMLQSIIKNIWIPMKPYYTKVYQEIWIGMGLMGFIVYKIRAADKKK

SEQ ID NO: 1024538 - protein, 78 aa, Homo sapiens; identical to SEQ ID NO: 1024537

SEQ ID NO: 1024539 - protein, 78 aa, Homo sapiens; identical to SEQ ID NO: 1024537

SEQ ID NO: 1024540 - protein, 78 aa, Homo sapiens; identical to SEQ ID NO: 1024537

SEQ ID NO: 1024541 - protein, 47 aa, Homo sapiens
ILLTLKYGEEAMMLDTLSKSIFSTMFLGLMLSSGLQMKICPDSSALH

SEQ ID NO: 1024542 - protein, 257 aa, Homo sapiens
MSILFYVIFLAYLRGIQGNNMDQRSLPEDSLNSLIIKLIQADILKNKLSKQMVDVKENYQSTLPKAEAPREPERGGPAKSAFQPVIAMDTELLRQQRRYNSPRVLLSDSTPLEPPPLYLMEDYVGSPVVANRTSRRKRYAEHKSHRGEYSVCDSESLWVTDKSSAIDIRGHQVTVLGEIKTGNSPVKQYFYETRCKEARPVKNGCRGIDDKHWNSQCKTSQTYVRALTSENNKLVGWRWIRIDTSCVCALSRKIGRT

SEQ ID NO: 1024543 - protein, 116 aa, Homo sapiens
MPMFIVNTNVPRASVPDGFLSELTQQLAQATGKPPQYIAVHVVPDQLMAFGGSSEPCRALQPAQHRQDRRRAEPAPTASCCAACWPSACAISPDRVYINYYDMNAANVGWNNSTFA

SEQ ID NO: 1024544 - protein, 200 aa, Homo sapiens
EVADPPYATSDDAYGSQAAGGSFALSLIRVMNASPAPGTTAEEAMSRGSPPAPEGGSRYEQDGRFNWIHTPWACAVSPKWVPSLSTQAYSEPAGQVKSPDPSVSYAYLRWYVCHENAETMPVYGAQMLLSDAVQPGHAKAVGSSAPEKPREPVAVDLEAPEVQESYRQQLRSDIQKRLQEDPNYSPQRFPNAQRAFADDP

SEQ ID NO: 1024545 - protein, 164 aa, Homo sapiens
VRPGEQERRQPALNNNPRRSGSKRVLLICLDLFCLFMAGLPFLIIETSTIKPYHRGFYCNDESIKYPLKTGETINDAVLCAVGIVIAILAIITGEFYRIYYLKKSRSTIQNPYVAALYKQVGCFLFGLCHQPVFSQDIGQSVPLGAPAFLTSLSVCTPNFTQIN

SEQ ID NO: 1024546 - protein, 79 aa, Homo sapiens
VRPGEQERRQPALNNNPRRSGSKRVLLICLDLFCLFMAGLPFLIIETSTIKPYHRGFYCNDESIKYPLKTGETINDAGR

SEQ ID NO: 1024547 - protein, 142 aa, Homo sapiens
  misc_feature (108)..(108): Xaa can be any naturally occurring amino acid
  misc_feature (114)..(114): Xaa can be any naturally occurring amino acid
  misc_feature (137)..(137): Xaa can be any naturally occurring amino acid
ASVPRCCGGQPGGEVEVAVGGYGTSWRVPWRRSAAIYSSVGPAVSLRHAEDGAVKESGRLAGSQFQQSRCSHGPNQGGRCHPAVEVFEGEPGNKVNLAELVQGQEGCXVLSSWXPFTPGFFQDTPARVCWSRLKVLXGQGIP

SEQ ID NO: 1024548 - protein, 397 aa, Homo sapiens
MGLAGVCPETLSGYILVGGAGGQSAARQKDGAVKESGRLAGSQFQQSRCSHGPTLLHRTVLLPLPVEAERRSATDVVYSPLIGSKTVRSEEEEWVSWLGSVSVSKSTLSSPGFARSKAGRDVNPQRGDRVGGRELRGVKDVTLVESSYMGARTGVRRDRDVRLRGLLSSIGTVGSHTTKARAGVRANSIDASGGPMGSRELSVLVESSFIDGFRGVSRWEGPRIVERRDGQRWAPGIDRHSKDYVDKELRVYDVKLIFAACPSLVDIRGHNEVCEWWYRNVRQNCSLNGATCEWCEALNMKLTHPIIIYRSEGLGTNNSSSRSYLAATALFWRRALGNGVKITDEQTCGMRPRDTKNRAGQYEKTTHIGVQEGAYHRHTPREANRVSKKRDTYAAEQ

SEQ ID NO: 1024549 - protein, 286 aa, Homo sapiens
QQKIKRFKAKQGQNKFLSEIEDELFNPDYVEVDRIMDFARSTDDRGEPVTHYLVKWCSLPYEGSTWERRQDIDQAKIEEFEKLMSREPETERVERPPADDWKKSESSREYKNNNKLREYQLEGVNWLLFNWYNMRNCILADEMGLGKTIQSITFLYEIYLKGIHGPFLVIAPLSTIPNWEREFRTWTELNVVVYHGSQASRRTIQLYEMYFKDPQGRVIKGSYKFHAIITTFEMILTDCPELRNIPWRCVVIDEAHRLKNRNCKLLEGLKMMDLVSDHIGDCTEPE

SEQ ID NO: 1024550 - protein, 403 aa, Homo sapiens
QQKIKRFKAKQGQNKFLSEIEDELFNPDYVEVDRIMDFARSTDDRGEPVTHYLVKWCSLPYEGSTWERRQDIDQAKIEEFEKLMSREPETERVERPPADDWKKSESSREYKNNNKLREYQLEGVNWLLFNWYNMRNCILADEMGLGKTIQSITFLYEIYLKGIHGPFLVIAPLSTIPNWEREFRTWTELNVVVYHGSQASRRTIQLYEMYFKDPQGRVIKGSYKFHAIITTFEMILTDCPELRNIPWRCVVIDEAHRLKNRNCKLLEGLKMMDLEHKVLLTGTPLQNTVEELFSLLHFLEPSRFPSETTFMQEFGDLKTEEQVQKLQAILKPMMLRRLKEDVEKNLGPKEETIIEVELTNIQKKYYRAILEKNFTFLSKGGGQANVPNLLNTMMELRKCCNHP

SEQ ID NO: 1024551 - protein, 92 aa, Homo sapiens
  misc_feature (1)..(1): Xaa can be any naturally occurring amino acid
XPKLSDEIDTHRLTAPLALTAAHSIVITPTEPQVTLDVAVLGTGLRKSNYETKVMEYPTSGRNTEQLIDSLLAASQTTKWPINQENQRYQIR

SEQ ID NO: 1024552 - protein, 362 aa, Homo sapiens
RVMRLGLSLMRLDRFRDSILRSDEAVKPFGLKVSQLLLSTDESTFDDIVHSFVSLTAIQIGLIDLLSCMGLRPDGIVGHSLGEVACGYADGCLSQEEAVLAAYWRGQCIKEAHLPPGAMAAVGLSWEECKQRCPPGVVPACHNSKDTVTISGPQAPVFEFVEQLRKEGVFAKEVRTGGMAFHSYFMEAIAPPLLQELKKVIREPKPRSARWLSTSIPEAQWHSSLARTSSAEYNVNNLVSPVLFQEALWHVPEHAVVLEIAPHALLQAVLKRGLKPSCTIIPLMKKDHRDNLEFFLAGIGRLHLSGIDANPNALFPPVEFPAPRGTPLISPLIKWDHSLAWDVPAAEDFPNGSGSPSTASPV

SEQ ID NO: 1024553 - protein, 260 aa, Homo sapiens
LRLQHVESRSKDPFSRVPMLRRHLGVWEPSADLSVSSTYFILLKTQSECFKFLENTKSSGKLRELPLPCCLFLGSWTEPCLPTPGFASGCLCLFPGSWTESACPSPGLFPAARALVDPAVPEVILLQVIGSRESEAQAFAESISIPVGCCVFMFIVPSVLSPLELTDIPHPVLCCPLRGWGLQRERLRHPSHPCSSCSISTSCLESYLCISCGPGDMGEGAAPLGGQVAEPTAGEPLSGPGDGQLLCRAHGCPSAALREP

SEQ ID NO: 1024554 - protein, 194 aa, Homo sapiens
PLGAPPPRAHILAKGPPKAGCPPAESPPCQDPPWGRRNPSDYAPGRRPKRAAEMPFAPGTSRETPRRKWRVQRPLPSRPPKVKRSCPASKGRGQSALAVRQASVGSPTLQLRSSSDRISSGLAVSGSKVTSPRNLPQCLYQVPGPCNTVLSSIGNNFWGLQLHILDPAQGVLDVLQQPQSRQLAAALELGDELS

SEQ ID NO: 1024555 - protein, 255 aa, Homo sapiens
LGDICVGNVLQPGAGAIMARIAQFLSDIPETVPLSTVNRQCSSGLQAVASIAGGIRNGSYDIGMACGVESMSLADRGNPGQYYFALAAQKARKRQRLPDSLMGITSCTNVAERVWHFTGRTQDTFALASPADRQPEPRARASFQAEIAPGDHHGPMMTRAPRGSITCDPGLRVSAPDTTIGGPCANHLYALPFQVTDWVLTNCLDPLLAEVASMGAGCHASAAPCASRVPESAPLQPCASLGSLCTGSRSPPRIM

SEQ ID NO: 1024556 - protein, 1307 aa, Homo sapiens
GEWALPEEMVDNLPPSNNCILGHILHRLAEKSLPPRAESTTPELPSFAVKGCLLGKTLSGKTTILRSLQKDFPIQILSIDTLVQEAIQAFHDNEKVSEVLPIQKNDEEDALPVLQEEIKESQDPQHVFSAGPVSDEVLPETEGANADKTPKAEEVKSSDSFLKLTTRAQLGAKSEQLLKKGKSIPDVLLVDIIVNAINEIPVNQDCILDGFPMTLNQAQLLEEALTGCNRNLTEVERKKAQKSTLAIDPATSKEIPLPSPAFDFVILLDVSDTSSMSRMNDIIAEELSYKTAHEDISQRVAAENQDKDGDQNLRDQIQHRIIGFLDNWPLLEQWFSEPENILIKINAEIDKESLCEKVKEILTTEIAKKKNKVEKKLEEKEAEKKAAVSLAELPLPTPPPAPPPEPEKEKEIHQSHVPSKTPTAKGKPQSEAPHGKQESLQEGKGKKGETALKRKGSPKGKSSGGKVPVKKSPADSTDTSPVAIVPQPPKPGSEEWVYVNEPVPEEMPLFLVPYWELIENSYINTIKTVLRHLREDQHTVLAYLYEIRTSFQEFLKRPDHKQDFVAQWQADFNSLPDDLWDDEETKAELHQRVNDLRDRLWDICDARKEEAEQERLDIINESWLQDTLGMTMNHFFSLMQAELNRFQDTKRLLQDYYWGMESKIPVEDNKRFTRIPLVQLDSKDNSESQLRIPLVPRISISLETVTPKPKTKSVLKGKMDNSLENVESNFEADEKLVMDTWQQASLAVSHMVAAEIHQRLMEEEKENQPADPKEKSPQMGANKKVKKEPPKKKQEDKKPKGKSPPMAEATPVIVTTEEIAEIKRKNELRVKIKEEHLAALQFEEIATQFRLELIKTKALALLEDLVTKVVDVYKLMEKWLGERYLNEMASTEKLTDVARYHIETSTKIQNELYLSQEDFFINGNIKVFPDPPPSIRPPPVEKEEDGTLTIEQLDSLRDQFLDMAPKGIIGNKAFTDILIDLVTLNLGTNNFPSNWMHLTQPELQEITSLLTVNSEFVDWRKFLLVTSMPWPIPLEEELLETLQKFKAVDKEQLGTITFEQYMQAGLWFTGDEDIKIPENPLEPLPFNRQEHLIEFFFRLFADYEKDPPQLDYTQMLLYFACHPDTVEGVYRALSVAVGTHVFQQVKASIPSAEKTSSTDAGPAEEFPEPEENAAREERKLKDDTEKREQKDEEIPENANNEKMSMETLLKVFKGGSEAQDSNRFASHLKIENIYAEGFIKTFQDLGAKNLEPIEVAVLLKHPFIQDLISNYSDYKFPVHIIYVVEMIVCAKGWAPLPSGKQCARWRN

SEQ ID NO: 1024557 - protein, 1306 aa, Homo sapiens
GEWALPEEMVDNLPPSNNCILGHILHRLAEKSLPPRAESTTPELPSFAVKGCLLGKTLSGKTTILRSLQKDFPIQILSIDTLVQEAIQAFHDNEKVSEVLPIQKNDEEDALPVLQEEIKESQDPQHVFSAGPVSDEVLPETEGANADKTPKAEEVKSSDSFLKLTTRAQLGAKSEQLLKKGKSIPDVLLVDIIVNAINEIPVNQDCILDGFPMTLNQAQLLEEALTGCNRNLTEVERKKAQKSTLAIDPATSKEIPLPSPAFDFVILLDVSDTSSMSRMNDIIAEELSYKTAHEDISQRVAAENQDKDGDQNLRDQIQHRIIGFLDNWPLLEQWFSEPENILIKINAEIDKESLCEKVKEILTTEIAKKKNKVEKKLEEKEAEKKAAVSLAELPLPTPPPAPPPEPEKEKEIHQSHVPSKTPTAKGKPQSEAPHGKQESLQEGKGKKGETALKRKGSPKGKSSGGKVPVKKSPADSTDTSPVAIVPQPPKPGSEEWVYVNEPVPEEMPLFLVPYWELIENSYINTIKTVLRHLREDQHTVLAYLYEIRTSFQEFLKRPDHKQDFVAQWQADFNSLPDDLWDDEETKAELHQRVNDLRDRLWDICDARKEEAEQERLDIINESWLQDTLGMTMNHFFSLMQAELNRFQDTKRLLQDYYWGMESKIPVEDNKRFTRIPLVQLDSKDNSESQLRIPLVPRISISLETVTPKPKTKSVLKGKMDNSLENVESNFEADEKLVMDTWQQASLAVSHMVAAEIHQRLMEEEKENQPADPKEKSPQMGANKKVKKEPPKKKQEDKKPKGKSPPMAEATPVIVTTEEIAEIKRKNELRVKIKEEHLAALQFEEIATQFRLELIKTKALALLEDLVTKVVDVYKLMEKWLGERYLNEMASTEKLTDVARYHIETSTKIQNELYLSQEDFFINGNIKVFPDPPPSIRPPPVEKEEDGTLTIEQLDSLRDQFLDMAPKGIIGNKAFTDILIDLVTLNLGTNNFPSNWMHLTQPELQEITSLLTVNSEFVDWRKFLLVTSMPWPIPLEEELLETLQKFKAVDKEQLGTITFEQYMQAGLWFTGDEDIKIPENPLEPLPFNRQEHLIEFFFRLFADYEKDPPQLDYTQMLLYFACHPDTVEGVYRALSVAVGTHVFQQVKASIPSAEKTSSTDAGPAEEFPEPEENAAREERKLKDDTEKREQKDEEIPENANNEKMSMETLLKVFKGGSEAQDSNRFASHLKIENIYAEGFIKTFQDLGAKNLEPIEVAVLLKHPFIQDLISNYSDYKFPDIKIILQRSEHVQGSDGERSPSRHTEEKK

SEQ ID NO: 1024558 - protein, 1600 aa, Homo sapiens
GEWALPEEMVDNLPPSNNCILGHILHRLAEKSLPPRAESTTPELPSFAVKGCLLGKTLSGKTTILRSLQKDFPIQILSIDTLVQEAIQAFHDNEKVSEVLPIQKNDEEDALPVLQEEIKESQDPQHVFSAGPVSDEVLPETEGANADKTPKAEEVKSSDSFLKLTTRAQLGAKSEQLLKKGKSIPDVLLVDIIVNAINEIPVNQDCILDGFPMTLNQAQLLEEALTGCNRNLTEVERKKAQKSTLAIDPATSKEIPLPSPAFDFVILLDVSDTSSMSRMNDIIAEELSYKTAHEDISQRVAAENQDKDGDQNLRDQIQHRIIGFLDNWPLLEQWFSEPENILIKINAEIDKESLCEKVKEILTTEIAKKKNKVEKKLEEKEAEKKAAVSLAELPLPTPPPAPPPEPEKEKEIHQSHVPSKTPTAKGKPQSEAPHGKQESLQEGKGKKGETALKRKGSPKGKSSGGKVPVKKSPADSTDTSPVAIVPQPPKPGSEEWVYVNEPVPEEMPLFLVPYWELIENSYINTIKTVLRHLREDQHTVLAYLYEIRTSFQEFLKRPDHKQDFVAQWQADFNSLPDDLWDDEETKAELHQRVNDLRDRLWDICDARKEEAEQERLDIINESWLQDTLGMTMNHFFSLMQAELNRFQDTKRLLQDYYWGMESKIPVEDNKRFTRIPLVQLDSKDNSESQLRIPLVPRISISLETVTPKPKTKSVLKGKMDNSLENVESNFEADEKLVMDTWQQASLAVSHMVAAEIHQRLMEEEKENQPADPKEKSPQMGANKKVKKEPPKKKQEDKKPKGKSPPMAEATPVIVTTEEIAEIKRKNELRVKIKEEHLAALQFEEIATQFRLELIKTKALALLEDLVTKVVDVYKLMEKWLGERYLNEMASTEKLTDVARYHIETSTKIQNELYLSQEDFFINGNIKVFPDPPPSIRPPPVEKEEDGTLTIEQLDSLRDQFLDMAPKECSENCFQRPSPSTCDAFSKGDRKWLHGLQAALQNFLKGYPAIVRQLHSAGRGKSDTSQKKPKELLESLLQADIVKFAHFLLDVMNVLSILSCVNKNRNSSIADIFATLESMLEMLQMYQTRLGPKERMVDSATHFHGNCLRGKENISAVRNIVLTHLIKRLQGCFRDASQNVVRATVIGSFKLWPTKINQEFGEKEVSILTAHYEPVLEAANVKLSEVDTEWSMLKLEIYARFQNIRKLTWDFVNSIYLHKYPNILTLVDLVLTLPASSAEAEHGFSQMKWTKSHMHAKIKAESIIGNKAFTDILIDLVTLNLGTNNFPSNWMHLTQPELQEITSLLTVNSEFVDWRKFLLVTSMPWPIPLEEELLETLQKFKAVDKEQLGTITFEQYMQAGLWFTGDEDIKIPENPLEPLPFNRQEHLIEFFFRLFADYEKDPPQLDYTQMLLYFACHPDTVEGVYRALSVAVGTHVFQQVNASIPSAEKTSSTDAGPAEEFPEPEENAAREERKLKDDTEKREQKDEEIPENANNEKMSMETLLKVFKGGSEAQDSNRFASHLKIENIYAEGFIKTFQDLGAKNLEPIEVAVLLKHPFIQDLISNYSDYKFPDIKIILQRSEHVQGSDGERSPSRHTEEKK

SEQ ID NO: 1024559 - protein, 432 aa, Homo sapiens
GEWALPEEMVDNLPPSNNCILGHILHRLAEKSLPPRAESTTPELPSFAVKGCLLGKTLSGKTTILRSLQKDFPIQILSIDTLVQEAIQAFHDNEKVSEVLPIQKNDEEDALPVLQEEIKESQDPQHVFSAGPVSDEVLPETEGANADKTPKAEEVKSSDSFLKLTTRAQLGAKSEQLLKKGKSIPDVLLVDIIVNAINEIPVNQDCILDGFPMTLNQAQLLEEALTGCNRNLTEVERKKAQKSTLAIDPATSKEIPLPSPAFDFVILLDVSDTSSMSRMNDIIAEELSYKTAHEDISQRVAAENQDKDGDQNLRDQIQHRIIGFLDNWPLLEQWFSEPENILIKINAEIDKESLCEKVKEILTTEIAKKKNKVEKKLEEKEAEKKAAVSLAELPLPTPPPAPPPEPEKEKEIHQSHVPSKTPTAKGKPQSGD

SEQ ID NO: 1024560 - protein, 185 aa, Homo sapiens
MTHLQLKAAIDWFDGKEFSGNPIKVSFATRRADFNRGGGNGRGGRGRGGPMGRGGYGGGGSGGGGRGGFPSGGGGGGGQQRAGDWKCPNPTCENMNFSWRNECNQCKAPKPDGPGGGPGGSHMGGNYGDDRRGGRGGYDRGGYRGRGGDRGGFRGGRGGGDRGGFGPGKMDSRGEHRQDRRERPY

SEQ ID NO: 1024561 - protein, 333 aa, Homo sapiens
MAIKTRVVEVAAVAMDSRTVEAAAGVAVVAGGGGGGGGYNRSSGGYEPRGRGGGRGGRGGMGGSDRGGFNKFGGPRDQGSRHDSEQDNSDNNTIFVQGLGENVTIESVADYFKQIGIIKTNKKTGQPMINLYTDRETGKLKGEATVSFDDPPSAKAAIDWFDGKEFSGNPIKVSFATRRADFNRGGGNGRGGRGRGGPMGRGGYGGGGSGGGGRGGFPSGGGGGGGQQRAGDWKCPNPTCENMNFSWRNECNQCKAPKPDGPGGGPGGSHMGGNYGDDRRGGRGGYDRGGYRGRGGDRGGFRGGRGGGDRGGFGPGKMDSRGEHRQDRRERPY

SEQ ID NO: 1024562 - protein, 531 aa, Homo sapiens
MASNDYTQQATQSYGAYPTQPGQGYSQQSSQPYGQQSYSGYSQSTDTGYGQSSYSSYGQSQNTGYGTQSAPQGYGSTGGYGSSQSSQSSYGQQSSYPGYGPQPTPSSTSGSYGSSSQTSSYGQPPSYGQQPSYGGQQQSYGQQQSYNPSGYGQQNQYNSSSSGSGGGGSYGQDQSSMSGSGGGGGGGGGGGSGWWWLVMAIKTRVVEVAAVAMDSRTVEAAAGVAVVAGGGGGGGGYNRSSGGYEPRGRGGGRGGRGGMGGSDRGGFNKFGGPRDQGSRHDSEQDNSDNNTIFVQGLGENVTIESVADYFKQIGIIKTNKKTGQPMINLYTDRETGKLKGEATVSFDDPPSAKAAIDWFDGKEFSGNPIKVSFATRRADFNRGGGNGRGGRGRGGPMGRGGYGGGGSGGGGRGGFPSGGGGGGGQQRAGDWKCPNPTCENMNFSWRNECNQCKAPKPDGPGGGPGGSHMGGNYGDDRRGGRGGYDRGGYRGRGGDRGGFRGGRGGGDRGGFGPGKMDSRGEHRQDRRERPY

SEQ ID NO: 1024563 - protein, 292 aa, Homo sapiens
MAIKTRVVEVAAVAMDSRTVEAAAGVAVVAGGGGGGGGYNRSSGGYEPRGRGGGRGGRGGMGGSDRGGFNKFGGPRDQGSRHDSEQDNSDNNTIFVQGLGENVTIESVADYFKQIGIIKTNKKTGQPMINLYTDRETGKLKGEATVSFDDPPSAKAAIDWFDGKEFSGNPIKVSFATRRADFNRGGGNGRGGRGRGGPMGRGGYGGGGSGGGGRGGFPSGGGGGGGQQRAGDWKCPNPTCENMNFSWRNECNQCKAPKPFLFCRETRTLLEASLPLLLLPGTCSPFPALCLT

SEQ ID NO: 1024564 - protein, 531 aa, Homo sapiens; identical to SEQ ID NO: 1024562

SEQ ID NO: 1024565 - protein, 98 aa, Homo sapiens
  misc_feature (7)..(8): Xaa can be any naturally occurring amino acid
  misc_feature (73)..(73): Xaa can be any naturally occurring amino acid
  misc_feature (79)..(79): Xaa can be any naturally occurring amino acid
  misc_feature (84)..(84): Xaa can be any naturally occurring amino acid
  misc_feature (88)..(88): Xaa can be any naturally occurring amino acid
WRAVTDXXPLGPFNFTMFLTMFGEKLNGTDPEDVIRNAFACFERKPQVSSMRTTSGAAHHHGDRFTDEEVDEXYREAPXIRKQXNYVXLPDSENGAKV

SEQ ID NO: 1024566 - protein, 85 aa, Homo sapiens
MTKSKKELKELIGIQKYLKKVGISQENKKEVEKKLTVKPIETKNKFSQAKLLAGAVKHKSSESGNSVKRLKPDPEPDDKNQEPSS

SEQ ID NO: 1024567 - protein, 217 aa, Homo sapiens
  misc_feature (12)..(12): Xaa can be any naturally occurring amino acid
DGKSSTYINAAXMDSYRQPAAFIVTQYPLPNTVKDFWRLVYDYGCTSIVMLNEVDLSQGCPQYWPEEGMLRYGPIQVECMSCSMDCDVINRIFRICNLTRPQEGYLMVQQFQYLGWASHREVPGSKRSFLKLILQVEKWQEECEEGEGRTIIHCLNGGGRSGMFCAIGIVVEMVKRQNVVDVFHAVKTLRNSKPNMVEAPEQYRFCYDVALEYLESS

SEQ ID NO: 1024568 - protein, 217 aa, Homo sapiens; identical to SEQ ID NO: 1024567
  misc_feature (12)..(12): Xaa can be any naturally occurring amino acid

SEQ ID NO: 1024569 - protein, 217 aa, Homo sapiens; identical to SEQ ID NO: 1024567
  misc_feature (12)..(12): Xaa can be any naturally occurring amino acid

SEQ ID NO: 1024570 - protein, 217 aa, Homo sapiens; identical to SEQ ID NO: 1024567
  misc_feature (12)..(12): Xaa can be any naturally occurring amino acid

SEQ ID NO: 1024571 - protein, 71 aa, Homo sapiens
MEPFPSLPITQKEKWKLAAIFFKFFLRNVSILVVIIVLEDRIHHPLDVFANGFWIRFGRHSRSPVHYYWWL

SEQ ID NO: 1024572 - protein, 109 aa, Homo sapiens
MLSASRSRTAITSSLLLQLASACLRRFAEVRLQPLVLCSQVLQLLLHGRAFASTRFRRLRWMWSCVSSSTHALAALAPCQGLGLRRRTLISSSCSSPTTSFRGDSFQRP

SEQ ID NO: 1024573 - protein, 720 aa, Homo sapiens
MEEAEELLLEGKKALQLAREPRLGLDLGWNPSGEGCTQGLKDVPPEPTRDILALKSLPRGLALGPSLAKEQRLGVWCVGDPLQPGLLWGPLEEESASKEKGEGVKPRQEENLSLGPWGDVCACEQSSGWTSLVQRGRLESEGNVAPVRISERLHLQVYQLVLPGSELLLWPQPSSEGPSLTQPGLDKEAAVAVVTEVESAVQQEVASPGEDAAEPCIDPGSQSPSGIQAENMVSPGLKFPTQDRISKDSQPLGPLLQDGDVDEECPAQAQMPPELQSNSATQQDPDGSGASFSSSARGTQPHGYLAKKLHSPSDQCPPRAKTPEPGAQQSGFPTLSRSPPGPAGSSPKQGRRYRCGECGKAFLQLCHLKKHAFVHTGHKPFLCTECGKSYSSEESFKAHMLGHRGVRPFPCPQCDKAYGTQRDLKEHQVVHSGARPFACDQCGKAFARRPSLRLHRKTHQVPAAPAPCPCPVCGRPLANQGSLRNHMRLHTGEKPFLCPHCGRAFRQRGNLRGHLRLHTGERPYRCPHCADAFPQLPELRRHLISHTGEAHLCPVCGKALRDPHTLRAHERLHSGERPFPCPQCGRAYTLATKLRRHLKSHLEDKPYRCPTCGMGYTLPQSLRRHQLSHRPEAPCSPPSVPSAASEPTVVLLQAEPQLLDTHREEEVSPARDVVEVTISESQEKCFVVPEEPDAAPSLVLIHKDMGLGAWAEVVEVEMGT

SEQ ID NO: 1024574 - protein, 617 aa, Homo sapiens
MEEAEELLLEGKKALQLAREPRLGLDLGWNPSGEGCTQGLKDVPPEPTRDILALKSLPRGLALGPSLAKEQRLGVWCVGDPLQPGLLWGPLEEESASKEKGEGVKPRQEENLSLGPWGDVCACEQSSGWTSLVQRGRLESEGNVAPVRISERLHLQVYQLVLPGSELLLWPQPSSEGPSLTQPGLDKEAAVAVVTEVESAVQQEVASPGEDAAEPCIDPGSQSPSGIQAENMVSPGLKFPTQDRISKDSQPLGPLLQDGDVDEECPAQAQMPPELQSNSATQQDPDGSGASFSSSARGTQPHGYLAKKLHSPSDQCPPRAKTPEPGAQQSGFPTLSRSPPGPAGSSPKQGRRYRCGECGKAFLQLCHLKKHAFVHTGHKPFLCTECGKSYSSEESFKAHMLGHRGVRPFPCPQCDKAYGTQRDLKEHQVVHSGARPFACDQCGKAFARRPSLRLHRKTHQVPAAPAPCPCPVCGRPLANQGSLRNHMRLHTGEKPFLCPHCGRAFRQRGNLRGHLRLHTGERPYRCPHCADAFPQLPELRRHLISHTGEAHLCPVCGKALRDPHTLRAHERLHSGERPFPCPQCGRAYTLATKLRRHLKSHMGLGAWAEVVEVEMGT

SEQ ID NO: 1024575 - protein, 615 aa, Homo sapiens
MVLFQNLSLGPWGDVCACEQSSGWTSLVQRGRLESEGNVAPVRISERLHLQVYQLVLPGSELLLWPQPSSEGPSLTQPGLDKEAAVAVVTEVESAVQQEVASPGEDAAEPCIDPGSQSPSGIQAENMVSPGLKFPTQDRISKDSQPLGPLLQDGDVDEECPAQAQMPPELQSNSATQQDPDGSGASFSSSARGTQPHGYLAKKLHSPSDQCPPRAKTPEPGAQQSGFPTLSRSPPGPAGSSPKQGRRYRCGECGKAFLQLCHLKKHAFVHTGHKPFLCTECGKSYSSEESFKAHMLGHRGVRPFPCPQCDKAYGTQRDLKEHQVVHSGARPFACDQCGKAFARRPSLRLHRKTHQVPAAPAPCPCPVCGRPLANQGSLRNHMRLHTGEKPFLCPHCGRAFRQRGNLRGHLRLHTGERPYRCPHCADAFPQLPELRRHLISHTGEAHLCPVCGKALRDPHTLRAHERLHSGERPFPCPQCGRAYTLATKLRRHLKSHLEDKPYRCPTCGMGYTLPQSLRRHQLSHRPEAPCSPPSVPSAASEPTVVLLQAEPQLLDTHREEEVSPARDVVEVTISESQEKCFVVPEEPDAAPSLVLIHKDMGLGAWAEVVEVEMGT

SEQ ID NO: 1024576 - protein, 720 aa, Homo sapiens; identical to SEQ ID NO: 1024573

SEQ ID NO: 1024577 - protein, 747 aa, Homo sapiens
MEEAEELLLEGKKALQLAREPRLGLDLGWNPSGEGCTQGLKDVPPEPTRDILALKSLPRGLALGPSLAKEQRLGVWCVGDPLQPGLLWGPLEEESASNVMNVLLMADCKSHLCMCCDATLSLRCHTGGRLLCRHVDAFKFLCCELLLVYILVCSAWTDVDVEHCCAPSSVIMDDGFNLANVVPGLVLLAMGSELLLWPQPSSEGPSLTQPGLDKEAAVAVVTEVESAVQQEVASPGEDAAEPCIDPGSQSPSGIQAENMVSPGLKFPTQDRISKDSQPLGPLLQDGDVDEECPAQAQMPPELQSNSATQQDPDGSGASFSSSARGTQPHGYLAKKLHSPSDQCPPRAKTPEPGAQQSGFPTLSRSPPGPAGSSPKQGRRYRCGECGKAFLQLCHLKKHAFVHTGHKPFLCTECGKSYSSEESFKAHMLGHRGVRPFPCPQCDKAYGTQRDLKEHQVVHSGARPFACDQCGKAFARRPSLRLHRKTHQVPAAPAPCPCPVCGRPLANQGSLRNHMRLHTGEKPFLCPHCGRAFRQRGNLRGHLRLHTGERPYRCPHCADAFPQLPELRRHLISHTGEAHLCPVCGKALRDPHTLRAHERLHSGERPFPCPQCGRAYTLATKLRRHLKSHLEDKPYRCPTCGMGYTLPQSLRRHQLSHRPEAPCSPPSVPSAASEPTVVLLQAEPQLLDTHREEEVSPARDVVEVTISESQEKCFVVPEEPDAAPSLVLIHKDMGLGAWAEVVEVEMGT

SEQ ID NO: 1024578 - protein, 213 aa, Homo sapiens
MAYHSFLVEPISCHAWNKDRTQIAICPNNHEVHIYEKSGAKWTKVHELKEHNGQVTGIDWAPESNLYCDLRHRPERLRVDAEGPHMEAHAGHPADQPGLPAACAWAPNENKFACGQRALVVISICYYEQENDWWVLQAHSRSPSCSTVLSLDLAPQQCASWLPAPVTSRCRIFSAYIKEVEERLGPTRGVQDAFGELMSESEVVAVVHGAVST

SEQ ID NO: 1024579 - protein, 113 aa, Homo sapiens
MAYHSFLVEPISCHAWNKDRTQIAICPNNHEVHIYEKSGAKWTKVHELKEHNGQVTGIDWAPESNRIVTCGTDRNAYVWTLKGRTWKPTLVILRINRGCPLRALGPPTRTSLQ

SEQ ID NO: 1024580 - protein, 119 aa, Homo sapiens
  misc_feature (3)..(3): Xaa can be any naturally occurring amino acid
ITXPWIRQASAGFLQHPPYQQCPFLPPTGALLRKCTFTLAYPQTKRTKIKTPGGENKTLYNLEANNFWLSPCLSYQYKGAVSVRWVEPESCPQFGVELETENLCWAHTRATGLGNLLVS

SEQ ID NO: 1024581 - protein, 707 aa, Homo sapiens
MTTFKEAMTFKDVAVVFTEEELGLLDLAQRKLYRDVMLENFRNLLSVGHQAFHRDTFHFLREEKIWMMKTAIQREGNSGDKIQTEMETVSEAGTHQEWSFQQIWEKIASDLTRSQDLVINSSQFSKEGDFPCQTEAGLSVIHTRQKSSQGNGYKPSFSDVSHFDFHQQLHSGEKSHTCDECGKNFCYISALRIHQRVHMGEKCYKCDVCGKEFSQSSHLQTHQRVHTGEKPFKCVECGKGFSRRSALNVHHKLHTGEKPYNCEECGKAFIHDSQLQEHQRIHTGEKPFKCDICGKSFCGRSRLNRHSMVHTAEKPFRCDTCDKSFRQRSALNSHRMIHTGEKPYKCEECGKGFICRRDLYTHHMVHTGEKPYNCKECGKSFRWASCLLKHQRVHSGEKPFKCEECGKGFYTNSQCYSHQRSHSGEKPYKCVECGKGYKRRLDLDFHQRVHTGEKLYNCKECGKSFSRAPCLLKHERLHSGEKPFQCEECGKRFTQNSHLHSHQRVHTGEKPYKCEKCGKGYNSKFNLDMHQKVHTGERPYNCKECGKSFGWASCLLKHQRLRSGEKPFKCEECGKRFTQNSQLHSHQRVHTGEKPYKCDECGKGFSWSSTRLTHQRRHSRETPLKCEQHGKNIVQNSFSKVQEKVHSVEKPYKCEDCGKGYNRRLNLDMHQRVHMGEKTWKCRECDMCFSQASSLRLHQNVHVGEKP

SEQ ID NO: 1024582 - protein, 133 aa, Homo sapiens
MAKVQVNNVVVLDNPSPFYNPFQFEITFECIEDLSEDLEWKIIYVGSAESEEYDQVLDSVLVGPVPAGRHMFVFQADAPNPGLIPDADAVGVTVVLITCTYRGQEFIRVGYYVNNEYTETELRENPPVKPRLF

SEQ ID NO: 1024583 - protein, 120 aa, Homo sapiens
  misc_feature (15)..(15): Xaa can be any naturally occurring amino acid
FSTYFFNPLFFLFSXSSPYFLEEENLSENSDKFGIILRNELMKLPSDFVTAVRGKGLLNAIVIKETKDFYALKVFLLLLDNGLLANPTHGYIIIFAPPLVINDDELRESIEIINKTILSF

SEQ ID NO: 1024584 - protein, 120 aa, Homo sapiens; identical to SEQ ID NO: 1024583
  misc_feature (15)..(15): Xaa can be any naturally occurring amino acid

SEQ ID NO: 1024585 - protein, 69 aa, Homo sapiens
GTRFLSANSLTLGTLRKSRNFHEGTSISCDSNYSQNVSDISSSTVSLEMLDFQFHGRILMDGMFFSGRH

SEQ ID NO: 1024586 - protein, 122 aa, Homo sapiens
  misc_feature (20)..(20): Xaa can be any naturally occurring amino acid
  misc_feature (25)..(25): Xaa can be any naturally occurring amino acid
  misc_feature (32)..(32): Xaa can be any naturally occurring amino acid
  misc_feature (37)..(37): Xaa can be any naturally occurring amino acid
MALSPADKTNVKAAWGKVGXTRWRXMVSEALXEVCSXSFPTTKDLLPTLQYLSHGSAQVKGHGKKVADALTNAVANVDDMPNALSALRDLHEEQSFGVGPGSNFQGFLSHLPCLVNPGRQPP

SEQ ID NO: 1024587 - protein, 257 aa, Homo sapiens
MICLTENFRTDVKDFVTLLTANTCDIRKSILYLQFWIRSGGGVLEERPLTLYRGNSRNVQLVCSEHGLDNKIYPKNTKKKRVDLPKCDSGCAETLFGLKNIFSPSEDLFSFLKHKITMKEEWHKFIQLLTEFQMRNVDFLYSNLEFILPLPVDTIPETKNFCGPSVTVDASAATKSMNCLARKHSEREQPLKKSQKKKQKKTLVILDDSDLFDTDLDFPDQSISLSSVSSSSNAEESKTGDEESKARDQGKQSRDKE

SEQ ID NO: 1024588 - protein, 178 aa, Homo sapiens
SRPRILQSLYSVGFVGIRDKNTSSYSFCHDGRTPDKGFESNEKLLIHPCYWLGLNLNRNALAPEEAEEINDEYDINIISDNSAIRNKTIGQITTHLDQIPIGNEGATEFEQWCLDALRIVFASHLTDIKSHPNGNAVQRRDIIGTNGGKSDFWKRVLEDYKTRQVVFDGKNFEELGPS

SEQ ID NO: 1024589 - protein, 109 aa, Homo sapiens
  misc_feature (8)..(8): Xaa can be any naturally occurring amino acid
  misc_feature (32)..(32): Xaa can be any naturally occurring amino acid
NAGIKGLXPCACKPRPNFCNFLLKDGVFTRVXPGWCRNSRALRWSCPASALPKVPGIIGVSPPTPWQRGSIFKFSFHLTQLSTLVLGEYDLAEKSRVSAHYIVLNFPRL

SEQ ID NO: 1024590 - protein, 102 aa, Homo sapiens
  misc_feature (32)..(32): Xaa can be any naturally occurring amino acid
  misc_feature (68)..(68): Xaa can be any naturally occurring amino acid
  misc_feature (90)..(90): Xaa can be any naturally occurring amino acid
  misc_feature (96)..(96): Xaa can be any naturally occurring amino acid
LQGAWLRRPIAAGIKACVSTEAPPIIFATPTXLTSDSTVYDYAGKNKVPELQKFFQKADGVPVYLKRXLPDQMLYRTTMALTVGGTIYCXIALYNXSQPKNK

SEQ ID NO: 1024591 - protein, 258 aa, Homo sapiens
MSGAPVTVIPRPEAPRCAIPLAIICRWYADAHSISPLTASPGQLMTPPHGVLYARTHYVPRWSTLHVSMGPGLGLSPDNVALEVANAIIGHYDCTYGGGVHLSSPLASGAVANKLCQSFQTFSICYAETGLLGAHFVCDRMKIDDMMFVLQGQWMRLCTSATESEVARGKNILRNALVSHLDGTTPVCEDIGRSLLTYGRRIPLAEWESRIAEVDASVVREICSKYIYDQCPAVAGYGPIEQLPDYNRIRSGMFWLRF

SEQ ID NO: 1024592 - protein, 245 aa, Homo sapiens
MRLLAVRSQRDELIYHIIAHVRIAVEGPGLGLSPDNVALEVANAIIGHYDCTYGGGVHLSSPLASGAVANKLCQSFQTFSICYAETGLLGAHFVCDRMKIDDMMFVLQGQWMRLCTSATESEVARGKNILRNALVSHLDGTTPVCEDIGRSLLTYGRRIPLAEWESRIAEVDASVVREICSKYIYDQCPAVAGWESRIAEVDASVVREICSKYIYDQCPAVAGYGPIEQLPDYNRIRSGMFWLRF

SEQ ID NO: 1024593 - protein, 212 aa, Homo sapiens
SGSGRSADMEEDLFQLRQLPVVKFRRTGESARSEDDTASGEHEVQIEGVHVGLEAVELDDGAAVPKEFANPTDDTFMVEDAVEAIGFGKFQWKLSVLTGLAWMADAMEMMILSILAPQLHCEWRLPSWQVALLTSVVFVGMMSSSTLWGNISDQYGRENRADDQRAVDSVPMASLVHMRRVQLDPGAPGPGGLRDTEEFPKSVTLYAEYLPM

SEQ ID NO: 1024594 - protein, 197 aa, Homo sapiens
  misc_feature (5)..(5): Xaa can be any naturally occurring amino acid
  misc_feature (40)..(40): Xaa can be any naturally occurring amino acid
  misc_feature (122)..(122): Xaa can be any naturally occurring amino acid
  misc_feature (124)..(125): Xaa can be any naturally occurring amino acid
  misc_feature (127)..(127): Xaa can be any naturally occurring amino acid
  misc_feature (153)..(153): Xaa can be any naturally occurring amino acid
  misc_feature (159)..(159): Xaa can be any naturally occurring amino acid
  misc_feature (164)..(164): Xaa can be any naturally occurring amino acid
NLQAXIADAEQRGEMPLKDAKNKLEGLEDALQKAKQDLAXLLKEYQELMNVKLALDVEIATYRKLLEGEECRLNGEGVGQVNISVVQSTVSSGYGGASGVGSGLGLGGGSSNTYGSGLGVGXGXXFXSGRAIGGGLSPVGGGSSTIKYTTTSXPSRKSXNTKEXQLAPGPINLSGPSLARRALSFRLPCPLLASSLP

SEQ ID NO: 1024595 - protein, 31 aa, Homo sapiens
MKVDSSQEANAEVMREMTRKLYSQYEGKLQE

SEQ ID NO: 1024596 - protein, 127 aa, Homo sapiens
FFVFLRQGLTLSLRLECSGVNTAHYSLDLLDSSNPPTSAIQVAQIMCACHHIWLTFLYFVEKGSHFVAHAGLKLHVLNVILEIHLAFQSVGITAMSHHASQSSFSYSSCYIFFFKINLFVSQDGQGD

SEQ ID NO: 1024597 - protein, 519 aa, Homo sapiens
PSPASLLRAEGTRRMVVAKEYGRPGAAAHACNPSTSGRPRGADDLRPCNTCQHQHLTRNRRKQAGHTLTTLVQVIGVSGSWVLEITLSGRADGVLGWRLEVEESRHRQKLEGRVSRAGQKGAPRHGPQGSTLLMGPGPERGAPASSHSERADRRGFGLVFPDEIAGTFREAGEQAQQTSDVVLPVSCECAWPLRGVWDGESGEGNPTRPSPCCSWQLDLGNCASTLWRGLPLCWLQIRGAMGRDPPVQAGAHLPDPGVGERGAWEDARCLRAPGQQRGTDSPLGGDGPARGPCAVCLHRERKGSRDHGYVGHLKVESRSLETGAVGTRRSFLAELGWGSCSPPGAPDATPWLIPGEEAAESELMTVDVVAAGSQRMVGPGTQVTLGDVVTVTAVCGPLGSKQRESQETEGNLSLRLLILVTLLALDTSAISYQGYPIPGELESGLMGRKRGQRELRAVRDVPAPTLPTSSLGPFLPPSPTHSRVAPFTVSPGFNSEAGEQGLTSVCRRLSEWPARAGSS

SEQ ID NO: 1024598 - protein, 519 aa, Homo sapiens; identical to SEQ ID NO: 1024597

SEQ ID NO: 1024599 - protein, 374 aa, Homo sapiens
ADSRSLALLGPPDALPTRVSGTLGPNARLLALTLRFTPAGALAPTLPLTRAHTPPRALRSGSSPAPREGAGTAAESAEGPRGLPMADLSFIEDTVAFPEKEEDEEEEEEGVEWGYEEGVEWGLVFPDANGEYQSPINLNSREARYDPSLLDVRLSPNYVVCRDCEVTNDGHTIQVILKSKSVLSGGPLPQGHEFELYEVRFHWGRENQRGSEHTVNFKAFPMELHLIHWNSTLFGSIDEAVGKPHGIAIIALFVQIGKEHVGLKAVTEILQDIQYKGKSKTIPCFNPNTLLPDPLLRDYWVYEGSLTIPPCSEGVTWILFRYPLTISQLQIEEFRRLRTHVKGAELVEGCDGILGDNFRPTQPLSDRVIRAAFQ

SEQ ID NO: 1024600 - protein, 153 aa, Homo sapiens
MADLSFIEDTVAFPEKEEDEEEEEEGVEWGYEEGVEWGLVFPDANGEYQSPINLNSREARYDPSLLDVRLSPNYVVCRDCEVTNDGHTIQVILKSKSVLSGGPLPQGHEFELYEVRFHWGRENQRGSEHTVNFKAFPMEVRITNHLVKILFSE

SEQ ID NO: 1024601 - protein, 132 aa, Homo sapiens
  misc_feature (125)..(125): Xaa can be any naturally occurring amino acid
  misc_feature (130)..(130): Xaa can be any naturally occurring amino acid
MNSTPRNAQAPSHRECFLPSVARTPSVTKVTPAKKITFLKRGDPRFAGVRLAVHQRAFKTFSALMDELSQRVPLSFGVRSVTTPRGLHSLSALEQWKMEAVTLPDKKPPRPPVDQAGTGEKPTVXVGDVXAT

SEQ ID NO: 1024602 - protein, 80 aa, Homo sapiens
  misc_feature (5)..(5): Xaa can be any naturally occurring amino acid
LPFSXKSPIGAPSRLTVSLHQFQRGPQQTQEHRWVSPTQFLPLGSLFSEWSVCGEDSLSALGIGGLWVKRMKAIQSEDVA

SEQ ID NO: 1024603 - protein, 172 aa, Homo sapiens
MEMRSPLLAGGSPPQPVVPAHTDKSGAPPVRSIYDDISSPGLGSTPLTSRRQPNISVMQSPLVGSYIYSWEQGQSMFSPSKVSGQPAKDDIILLASWILCYTQGASFDFRRYTSNDSLGDCIWGVLKHSVFLHIITIWPSMGTFFNHVMVVHTGKKGAYIVIKLKLWGGERL

SEQ ID NO: 1024604 - protein, 105 aa, Homo sapiens
QSEWLKKYLNKVQTPSSACTGSKLGLTEATATSAARLQEPPPGHTGFLPDAAQLCLGHRVALQVTGQLAKLHSPLSSLDLCDNVYRGSGPWYASDLASCTTVPRP

SEQ ID NO: 1024605 - protein, 69 aa, Homo sapiens
GASGRFLGEGMSVLRPEGELARELRAACAEAQWSAPPTIQNAASRLVWEMGGTEAGGLGAWHMGPHHLV

SEQ ID NO: 1024606 - protein, 191 aa, Homo sapiens
  misc_feature (6)..(6): Xaa can be any naturally occurring amino acid
  misc_feature (11)..(11): Xaa can be any naturally occurring amino acid
MFGQDXLLLFXKMAGHALRQPIGKTPFWGVDPLCCVWEGYPWGFSEPGVWGPPALQGWDARESLFGRRRASQGPKYEIWTNPLHASQGERVAARKRWGLAQHVRCQCLWGHGTAGRERCSQDSASPASSTGLPEGSEPESSCCPRTPEDGVDSASPSAQIGAERKAGGSLGEDPGLCIDGAGLGSPEQGGR

SEQ ID NO: 1024607 - protein, 72 aa, Homo sapiens
ALAGAGAAVIAMVHYLMVLSANWAYVKDACRMQKYEDIKSKEEQELHDIHSTRSKEQLNGSHECIFLFLLTI

SEQ ID NO: 1024608 - protein, 86 aa, Homo sapiens
ALAGAGAAVIAMVHYLMVLSANWAYVKDACRMQKYEDIKSRRGFPIQNIHYIARKSGSRQPDECMLDCSLYVLSIALVLNYVYLIA

SEQ ID NO: 1024609 - protein, 110 aa, Homo sapiens
LHFFKPVLLLWHFDKMVRNQLLTGKRVHVPPCAGASVPDMWISMNGNVFLHVSAYSEFQNFENAKYFHGHLAFGLPRDEIERDFEIRIVFNQPSTCATMMYNKEFVAEEK

SEQ ID NO: 1024610 - protein, 182 aa, Homo sapiens
  misc_feature (133)..(133): Xaa can be any naturally occurring amino acid
  misc_feature (141)..(141): Xaa can be any naturally occurring amino acid
  misc_feature (146)..(146): Xaa can be any naturally occurring amino acid
  misc_feature (152)..(152): Xaa can be any naturally occurring amino acid
  misc_feature (155)..(155): Xaa can be any naturally occurring amino acid
  misc_feature (158)..(159): Xaa can be any naturally occurring amino acid
  misc_feature (163)..(163): Xaa can be any naturally occurring amino acid
  misc_feature (168)..(168): Xaa can be any naturally occurring amino acid
  misc_feature (170)..(170): Xaa can be any naturally occurring amino acid
  misc_feature (175)..(175): Xaa can be any naturally occurring amino acid
  misc_feature (177)..(177): Xaa can be any naturally occurring amino acid
  misc_feature (182)..(182): Xaa can be any naturally occurring amino acid
MSKNTVSSARFRKVDVDEYDENKFVDEEDGGDGQAGPDEGEVDSCLRQGNMTAALQAALKNPPFNTKSQAVKDRAGSIVLKVLISFTANDIEKEVQSLDKNGVDLLMKYIYKGFESPSDNKQCYVTAMDEKAXAAGRIGSXVRVLXAKKTVXSGXQWXXCLGXGECWXKXQKKQXPXLPCGX

SEQ ID NO: 1024611 - protein, 330 aa, Homo sapiens
NSRFSKWNTTLVTQVSGVQRALKFFQKLRIKKAPKWPKFLGCIKKLSTDSKPVFKERIKTATCLCGNAPEPGKTTGEVVSGVVIKVFNQPKAKAKELGIEICLMYIEIEKGEAVQEELLKGLDNKNPKIIVACIETLRKALSEFGSKIILLKPIIKVLPKLFESREKAVRDEAKLIAVEIYRWIRDALRPPLQNINSVQLKELEEEWVKLPTSAPRPTRFLRSQQELEAKLEQQQSAGGDAEGGGDDGDEVPQIDAYELLEAVEILSKLPKDFYDKIEAKKWQERKEALESVEVLIINPILEAGDYADLVKALKKVVGKDTYVLLELGIL

SEQ ID NO: 1024612 - protein, 37 aa, Homo sapiens
MEDDAPVIYGLEFQARALTPQTAETDAIRFLVGTHFL

SEQ ID NO: 1024613 - protein, 108 aa, Homo sapiens
IPGPPRKSLYSQEFPPWAHEPRDGNPKMEGGLRNKFTETEDQKQEKGQRVAERRSGGNNVTLHLGERGGAQGRRDSGGSGKGARRRIWDLAGVTGTQNKGHKEAGEGL

SEQ ID NO: 1024614 - protein, 301 aa, Homo sapiens
MPPHVVLTFRRLGCALASCRLAPARHRGSGLLHTAPVARSDRSAPVFTRALAFGDRIALVDQHGRHTYRELYSRSLRLSQEICRLCGCVGGDLREERVSFLCANDASYVVAQWASWMSGGVAVPLYRKHPAAQLEYVICDSQSSVVLASQEYLELLSPVVRKLGVPLLPLTPAIYTGAVEEPAEVPVPEQGWRNKGAMIIYTSGTTGRPKGVLSTHQNIRAVVTGLVHKWAWTKDDVILHVLPLHHVHGVVNALLCPLWVGATCVDDGLSSALSRFGKSSYSSEKAADQCLYGSGYQYTPK

SEQ ID NO: 1024615 - protein, 301 aa, Homo sapiens; identical to SEQ ID NO: 1024614

SEQ ID NO: 1024616 - protein, 123 aa, Homo sapiens
FRPDSRPRGTRPEPGPTPARARRRTRKSCGEADPAPWPRPSRRWVTGLVHKWAWTKDDVILHVLPLHHVHGVVNALLCPLWVGATCVDDGLSSALSRFGKSSYSSEKAADQCLYGSGYQYSPK

SEQ ID NO: 1024617 - protein, 69 aa, Homo sapiens
  misc_feature (1)..(1): Xaa can be any naturally occurring amino acid
  misc_feature (11)..(11): Xaa can be any naturally occurring amino acid
  misc_feature (20)..(20): Xaa can be any naturally occurring amino acid
  misc_feature (22)..(23): Xaa can be any naturally occurring amino acid
  misc_feature (50)..(50): Xaa can be any naturally occurring amino acid
XRHSNLQDLRXRQPRPGQAXAXXLGHTFPETHDMSLEETSFGFHSEDQRXLLRLLGTFIKNVFLLFYQE

SEQ ID NO: 1024618 - protein, 69 aa, Homo sapiens; identical to SEQ ID NO: 1024617
  misc_feature (1)..(1): Xaa can be any naturally occurring amino acid
  misc_feature (11)..(11): Xaa can be any naturally occurring amino acid
  misc_feature (20)..(20): Xaa can be any naturally occurring amino acid
  misc_feature (22)..(23): Xaa can be any naturally occurring amino acid
  misc_feature (50)..(50): Xaa can be any naturally occurring amino acid

SEQ ID NO: 1024619 - protein, 469 aa, Homo sapiens
GSSRSGNWAQVPAAALNPARAVIGRRPRAAAEAGDPKEAGAGCMGRRRQRVDPAAGARAGALPEAIAALSRSLPSGPSPEIFRRAKFDRPEATSALWQLLFRVLSPLPAGNALASLALEVQARLVKSALCSQGYPRLALAQLPEDGSQGSRELLLALSWLLARGPVPEQMLAQARVPLGDEMTVCQCEALASPGPPAPHMEAEGPVDVRHVQWLMGKLRFRWRQLVSSQQEQCALLSKIHLYTRGCHSDQSLSHLSVTEAEMLRDPEGGQQLLRTLERENQRLEAVLAWRRSELVFWRWMDTVLGTCAPEVPAAASQPTFLPWVPERGGGELDLVVRELQALEEELREAAERRRAAWEAKAGGCGRGPEWSAARRASREAVEKELGALQQCWERDGGPAQPHGPHRLVRREDGAAGDRDLRAAVVIRTLRSQEACLEAVLRRLQGQCRQELARLVGARPGLIWIPPPGR

SEQ ID NO: 1024620 - protein, 464 aa, Homo sapiens
TEGVRGGRGGACWGGGPEAGPGEAAWKRRSGAKEAEKKALPGARKWVRTRQNRLHSNSRGTVHWAWTRRRDPADAVIGCMSGQRGDWTSALWQLLFRVLSPLPAGNALASLALEVQARLVKSALCSQGYPRLALAQLPEDGSQGSRELLLALSWLLARGPVPEQMLAQARVPLGDEMTVCQCEALASPGPPAPHMEAEGPVDVRHVQWLMGKLRFRWRQLVSSQQEQCALLSKIHLYTRGCHSDQSLSHLSVTEAEMLRDPEGGQQLLRTLERENQRLEAVLAWRRSELVFWRWMDTVLGTCAPEVPAAASQPTFLPWVPERGGGELDLVVRELQALEEELREAAERRRAAWEAKAGGCGRGPEWSAARRASREAVEKELGALQQCWERDGGPAQPHGPHRLVRREDGAAGDRDLRAAVVIRTLRSQEACLEAVLRRLQGQCRQELARLVGARPGLIWIPPPGR

SEQ ID NO: 1024621 - protein, 428 aa, Homo sapiens
MAWRWRAARVDPAAGARAGALPEAIAALSRSLPSGPSPEIFRRAKFDRPEATSALWQLLFRVLSPLPAGNALASLALEVQARLVKSALCSQGYPRLALAQLPEDGSQGSRELLLALSWLLARGPVPEQMLAQARVPLGDEMTVCQCEALASPGPPAPHMEAEGPVDVRHVQWLMGKLRFRWRQLVSSQQEQCALLSKIHLYTRGCHSDQSLSHLSVTEAEMLRDPEGGQQLLRTLERENQRLEAVLAWRRSELVFWRWMDTVLGTCAPEVPAAASQPTFLPWVPERGGGELDLVVRELQALEEELREAAERRRAAWEAKAGGCGRGPEWSAARRASREAVEKELGALQQCWERDGGPAQPHGPHRLVRREDGAAGDRDLRAAVVIRTLRSQEACLEAVLRRLQGQCRQELARLVGARPGLIWIPPPGR

SEQ ID NO: 1024622 - protein, 502 aa, Homo sapiens
GSSRSGNWAQVPAAALNPARAVIGRRPRAAAEAGDPKEAGAGCMGRRRQRVDPAAGARAGALPEAIAALSRSLPSGPSPEIFRRAKFDRPEAVTLSRRAGGPGGVPGPRRELGRLRCLPAFYFPQTSALWQLLFRVLSPLPAGNALASLALEVQARLVKSALCSQGYPRLALAQLPEDGSQGSRELLLALSWLLARGPVPEQMLAQARVPLGDEMTVCQCEALASPGPPAPHMEAEGPVDVRHVQWLMGKLRFRWRQLVSSQQEQCALLSKIHLYTRGCHSDQSLSHLSVTEAEMLRDPEGGQQLLRTLERENQRLEAVLAWRRSELVFWRWMDTVLGTCAPEVPAAASQPTFLPWVPERGGGELDLVVRELQALEEELREAAERRRAAWEAKAGGCGRGPEWSAARRASREAVEKELGALQQCWERDGGPAQPHGPHRLVRREDGAAGDRDLRAAVVIRTLRSQEACLEAVLRRLQGQCRQELARLVGARPGLIWIPPPGR

SEQ ID NO: 1024623 - protein, 538 aa, Homo sapiens
GSSRSGNWAQVPAAALNPARAVIGRRPRAAAEAGDPKEAGAGCMGRRRQRVDPAAGARAGALPEAIAALSRSLPSGPSPEIFRRAKFDRPEATSALWQLLFRVLSPLPAGNALASLALEVQARLVKSALCSQGYPRLALAQLPEDGSQGSRELLLALSWLLARGPVPEQMLAQARVPLGDEMTVCQCEALASPGPPAPHMEAEGPVDVRHVQWLMGKLRFRWRQLVSSQQEQCALLSKIHLYTRGCHSDQSLSHLSVTEAEMLRDPEGGQQFLEREPPKTWTWPTQSACTPSALLGWVPEPSGMICGWYVSSQVCCRVTGQLPLDPGGASACSLLSPFRALLRTLERENQRLEAVLAWRRSELVFWRWMDTVLGTCAPEVPAAASQPTFLPWVPERGGGELDLVVRELQALEEELREAAERRRAAWEAKAGGCGRGPEWSAARRASREAVEKELGALQQCWERDGGPAQPHGPHRLVRREDGAAGDRDLRAAVVIRTLRSQEACLEAVLRRLQGQCRQELARLVGARPGLIWIPPPGR

SEQ ID NO: 1024624 - protein, 208 aa, Homo sapiens [sequence omitted]

SEQ ID NO: 1024625 - protein, 469 aa, Homo sapiens; identical to SEQ ID NO: 1024619

SEQ ID NO: 1024626 - protein, 466 aa, Homo sapiens
LNKAQSCSAISPTPPAKFCGAAVPHLLLPSPWLPPPCSSAALPGARKWVRTRQNRLHSNSRGTVHWAWTRRRDPADAVIGCMSGQRGDWTSALWQLLFRVLSPLPAGNALASLALEVQARLVKSALCSQGYPRLALAQLPEDGSQGSRELLLALSWLLARGPVPEQMLAQARVPLGDEMTVCQCEALASPGPPAPHMEAEGPVDVRHVQWLMGKLRFRWRQLVSSQQEQCALLSKIHLYTRGCHSDQSLSHLSVTEAEMLRDPEGGQQLLRTLERENQRLEAVLAWRRSELVFWRWMDTVLGTCAPEVPAAASQPTFLPWVPERGGGELDLVVRELQALEEELREAAERRRAAWEAKAGGCGRGPEWSAARRASREAVEKELGALQQCWERDGGPAQPHGPHRLVRREDGAAGDRDLRAAVVIRTLRSQEACLEAVLRRLQGQCRQELARLVGARPGLIWIPPPGR

SEQ ID NO: 1024627 - protein, 385 aa, Homo sapiens [sequence omitted]

SEQ ID NO: 1024628 - protein, 374 aa, Homo sapiens
MGTGLGSAVIGPPRSGSSSSVCSRHSLRATPWHRSPWGYPRLALAQLPEDGSQGSRELLLALSWLLARGPVPEQMLAQARVPLGDEMTVCQCEALASPGPPAPHMEAEGPVDVRHVQWLMGKLRFRWRQLVSSQQEQCALLSKIHLYTRGCHSDQSLSHLSVTEAEMLRDPEGGQQLLRTLERENQRLEAVLAWRRSELVFWRWMDTVLGTCAPEVPAAASQPTFLPWVPERGGGELDLVVRELQALEEELREAAERRRAAWEAKAGGCGRGPEWSAARRASREAVEKELGALQQCWERDGGPAQPHGPHRLVRREDGAAGDRDLRAAVVIRTLRSQEACLEAVLRRLQGQCRQELARLVGARPGLIWIPPPGR

SEQ ID NO: 1024629 - protein, 436 aa, Homo sapiens
GSSRSGNWAQVPAAALNPARAVIGRRPRAAAEAGDPKEAGAGCMGRRRQRVDPAAGARAGALPEAIAALSRSLPSGPSPEIFRRAKFDRPEATSALWQLLFRVLSPLPAGNALASLALEVQARLVKSALCSQGYPRLALAQLPEDGSQGSRELLLALSWLLARGPVPEQMLAQARVPLGDEMTVCQCEALASPGPPAPHMEAEGPVDVRHVQWLMGKLRFRWRQLVSSQQEQCALLSKLLRTLERENQRLEAVLAWRRSELVFWRWMDTVLGTCAPEVPAAASQPTFLPWVPERGGGELDLVVRELQALEEELREAAERRRAAWEAKAGGCGRGPEWSAARRASREAVEKELGALQQCWERDGGPAQPHGPHRLVRREDGAAGDRDLRAAVVIRTLRSQEACLEAVLRRLQGQCRQELARLVGARPGLIWIPPPGR

SEQ ID NO: 1024630 - protein, 208 aa, Homo sapiens [sequence omitted]

SEQ ID NO: 1024631 - protein, 286 aa, Homo sapiens
QVPNAADSAGATSLYRWYQNGFYSHQALHPWHRDTDLEFVDGEGKPRLIVSSSSQAPVIYQWSRTQKQFVAQGEVTQVPDAQAVKHFRAGRDSYLCLSRYIGDSKILRWEGTRFSEVQALPSRGSLALLPFLVGGRRYLALGSDFSFTQIYQWDEGRQKFVRFQELAVQAPRAFCYMPAGDAQATPVPQLRRGQTLVSRTHCGWISVPRGCEASGLLRLATGGWVGASVSTTLCLCEDKRPSCIHARVFRSRTSDVHGAPPWDWPQEDVHHHCNQALISREPHEKT

SEQ ID NO: 1024632 - protein, 400 aa, Homo sapiens
LAFPAVSAEPFLYSSDLYLALAQPGVSACTILKWDYVERQLRDYDRIPAPSAVHCKPMVVDSQLYVVVAQLFGGSYIYHWDPNTTRFTRLQDIDPQRVRKPNDLEAFRIDGDWYFAVADSSKAGATSLYRWYQNGFYSHQALHPWHRDTDLEFVDGEGKPRLIVSSSSQAPVIYQWSRTQKQFVAQGEVTQVPDAQAVKHFRAGRDSYLCLSRYIGDSKILRWEGTRFSEVQALPSRGSLALLPFLVGGRRYLALGSDFSFTQIYQWDEGRQKFVRFQELAVQAPRAFCYMPAGDAQATPVPQLRRGQTLVSRTHCGWISVPRGCEASGLLRLATGGWVGASVSTTLCLCEDKRPSCIHARVFRSRTSDVHGAPPWDWPQEDVHHHCNQALISREPHEKT

SEQ ID NO: 1024633 - protein, 124 aa, Homo sapiens
GNQLIPPNAQVKKATVFFNPAACKGKARTLFEKNAAPILHLSGMDVTIVKTDYEGQAKKLLELMENTDVIIVAGGDGTLQEVVTGVLRRTDEATFSKIPIGFIPLGETSSLSHTLFAESGNKVQ

SEQ ID NO: 1024634 - protein, 168 aa, Homo sapiens
GNQLIPPNAQVKKATVFFNPAACKGKARTLFEKNAAPILHLSGMDVTIVKTDYEGQAKKLLELMENTDVIIVAGGDGTLQEVVTGVLRRTDEATFSKIPIGFIPLGETSSLSHTLFAESGNKVHIFLCQIAILRGPVPSLFTVRVKGHPFFNPALVGFRVVAKDDAGF

SEQ ID NO: 1024635 - protein, 136 aa, Homo sapiens
MRSSYETLGKERTRNAGDQRPSRETCPAGASSRHRDAPGPGTASLHPCESGANPGGEFLPAAQQQSPLRPALSPSLPLSSSCARGTRALESAANAQVLAAPSPCRYSHSATAQRGSYLRNTADFVYLVLQSHLSEA

SEQ ID NO: 1024636 - protein, 131 aa, Homo sapiens
MWLPCIFFNFISSLAMYIHPSLSHALCRAFWFQNVPCAFLLWSSLNRMPFLPCLPVDRNILCIGELALTTIFLDAELLLFPSVFAQLCLCTVDFWLGHVDCLLHEFASFLRTMSVLFILEFSVPSRVHSTG

SEQ ID NO: 1024637 - protein, 104 aa, Homo sapiens
MSHTILLVQPTKRPEGRTYADYESVNECMEGVCKMYEEHLKGMNPNSPSITYDISQLFDFIDDLADLSCLVYRADTQTYQPYNKDWIKEKIYVLLRRQAQQAGK

SEQ ID NO: 1024638 - protein, 106 aa, Homo sapiens
SEARVTAAVSAAAVAKRVWRDVSHHFAGTAYQEARRRTYADYESVNECMEGVCKMYEEHLDFIDDLADLSCLVYRADTQTYQPYNKDWIKEKIYVLLRRQAQQAGK

SEQ ID NO: 1024639 - protein, 279 aa, Homo sapiens
KLEANMESVSCSAAAVRTGDMESQRDLSLVPERLQRREQERQLEVERRKQKRQNQEVEKENSHFFVATFARERAAVEELLERAESDERLEEAASRLQGLQKLINDSAFIFLAALRPAAKDNEALPGLQAALAERAPGGCKPKEDVFAFQDPGERMLVRFTKVEGGSWHPHRKLKAYTTPPNDQEGGNRDLGHSCVLRILQNMESQSSMEKETPGEVGNKRRQYLYGPELSNCTGQTCMEHRNHPGANKGTQLQLKLRSRMIHTVYMAHDETCPSQGMQR

SEQ ID NO: 1024640 - protein, 218 aa, Homo sapiens
GPLVARRRVLPLLSLTVFSLSFPVCAPCLCLHSPVRDVGSSRACMASCHPSVPLVRPRTVMPPSLLAREFECGLHLELLFLDHWKDRYLPDTLLFGGYVASCGRGQCYWLTSDLSQVRHDFLAHVLLGAAAFECITYQSFLEYSGRWWYGLENGHLARRPGSAAGTRDCPPRPPSRALSPSLVLKVPDVLLLTFCGVPACVLNAKATPRLEACVPEHA

SEQ ID NO: 1024641 - protein, 111 aa, Homo sapiens
LVEDLVTMFEMPPKDLEILHKLVDKPAAEFERIDSILKNVPLWVKGYPTAPHATDKSFGKEESVDVAAFLVVSFKEISRATLTFSNHHTDHSAAINSEARLSSSNKDSLKT

SEQ ID NO: 1024642 - protein, 229 aa, Homo sapiens
HEGGGRHWVSASGKRFSCLVPSSRPSGRASPPATAAAVLPVWPRVGLHWLWIHPHLLKMHPDLSPHLHTEECNVLINLLKECHKNHNILKFFGYCNDVDRELRKCLKNEYVENRTKSREDGIEYARRKFLILSEESETNNGIYTLMPGLREDPKTLGGYHERILAYLVVHNSFEWKVTCEKIEAWRNVKTLDSEYGGQALSNWLPLRRKPDFHVNPIATTSISEELSPQ

SEQ ID NO: 1024643 - protein, 116 aa, Homo sapiens
MSAPGRMPHTPTVSYQRAELLRGHAALLPAPCPFLALSLNLQNIDPCRSPTSQEEQRKTIPPACPCGPVFLGSLSGVGSLNPFSAPRLPHQGRLEGPPSGFCICASKHHCRWSLMT

SEQ ID NO: 1024644 - protein, 51 aa, Homo sapiens
  misc_feature (46)..(46): Xaa can be any naturally occurring amino acid
  misc_feature (49)..(49): Xaa can be any naturally occurring amino acid
MALQVLERAWPGKFVQVPRSRLVLCFLVGVDDRFQGGGAAACLTPXLAXPD

SEQ ID NO: 1024645 - protein, 196 aa, Homo sapiens
MRKSPGLSDCLWAWILLLSTLTGRSYGQPSLQDELKDNTTVFTRILDRLLDGYDNRLRPGLGERVTEVKTDIFVTSFGPVSDHDMEYTIDVFFRQSWKDERLKFKGPMTVLRLNNLMASKIWTPDTFFHNGKKSVAHNMTMPNKLLRITEDGTLLYTMRLTVRAECPMHLEDFPMDAHACPLKFGKLCLYKSRSCL

SEQ ID NO: 1024646 - protein, 205 aa, Homo sapiens
MAWQLLQPAMRKSPGLSDCLWAWILLLSTLTGRSYGQPSLQDELKDNTTVFTRILDRLLDGYDNRLRPGLGERVTEVKTDIFVTSFGPVSDHDMEYTIDVFFRQSWKDERLKFKGPMTVLRLNNLMASKIWTPDTFFHNGKKSVAHNMTMPNKLLRITEDGTLLYTMRLTVRAECPMHLEDFPMDAHACPLKFGKLCLYKSRSCL

SEQ ID NO: 1024647 - protein, 196 aa, Homo sapiens; identical to SEQ ID NO: 1024645

SEQ ID NO: 1024648 - protein, 219 aa, Homo sapiens
SGAGEQGSEQDRSLIPQQLLQPAMRKSPGLSDCLWAWILLLSTLTGRSYGQPSLQDELKDNTTVFTRILDRLLDGYDNRLRPGLGERVTEVKTDIFVTSFGPVSDHDMEYTIDVFFRQSWKDERLKFKGPMTVLRLNNLMASKIWTPDTFFHNGKKSVAHNMTMPNKLLRITEDGTLLYTMRLTVRAECPMHLEDFPMDAHACPLKFGKLCLYKSRSCL

SEQ ID NO: 1024649 - protein, 221 aa, Homo sapiens
RGCNLMFLARDIDLYLSTFQLLQPAMRKSPGLSDCLWAWILLLSTLTGRSYGQPSLQDELKDNTTVFTRILDRLLDGYDNRLRPGLGERVTEVKTDIFVTSFGPVSDHDMEYTIDVFFRQSWKDERLKFKGPMTVLRLNNLMASKIWTPDTFFHNGKKSVAHNMTMPNKLLRITEDGTLLYTMRLTVRAECPMHLEDFPMDAHACPLKFGKLCLYKSRSCL

SEQ ID NO: 1024650 - protein, 95 aa, Homo sapiens
GPLPLSPRPSSPLTVSGRTPDVRRRHTHLTRHTSYTNTISSHSHTGTCPSAPTFRHQSTLYIQMFMAALFTIAKNGKQLKCPSTIEWKTNCGMLI

SEQ ID NO: 1024651 - protein, 134 aa, Homo sapiens
VIQMTPRRTVYGSCLRRAENLEDRPKLSPSFGGMVPSKSRESVASEGSNQTSGYQSGYHSDDTDTTVYSSEEAELLKLIEIGVQTGSTAQILQPDSGTTLSSPTHSHPATHQYFSYLASTPVNLIGFVHSLNDY

SEQ ID NO: 1024652 - protein, 105 aa, Homo sapiens
VIQMTPRRTVYGSCLRRAENLEDRPKLSPSFGGMVPSKSRESVASEGSNQTSGYQSGYHSDDTDTTVYSSEEAELLKLIEIGVQTGSTAQILQPDSGTTLSSPPV

SEQ ID NO: 1024653 - protein, 123 aa, Homo sapiens
VIQMTPRRTVYGSCLRRAENLEDRPKLSPSFGGMVPSKSRESVASEGSNQTSGYQSGYHSDDTDTTVYSSEEAELLKLMLILYSEYHKERTFSSRLPAVLKSSDCTNQLLVSSGMNTLISVLM

SEQ ID NO: 1024654 - protein, 109 aa, Homo sapiens
  misc_feature (1)..(1): Xaa can be any naturally occurring amino acid
XKSLWFLKVLPAGSYFQSFPWRLLVCFRWGYCFSLWLLPSLLLSLVSSSSISLSTHLLLCTPDPSRRGESCGEGGVSVHYPGLGFPINAHSFVLFNKRTKSKKPQPTAF

SEQ ID NO: 1024655 - protein, 280 aa, Homo sapiens
MTRHGKNCTAGGVYTYHEKKKDTAASGYGTQNIRLSRMREEFDVVVFSLSFALPDPVVTPDGYLYEREAILEYILHQKKEIARQMKAYEKQRGTRREEQKELQRAASQDHVRGFLEKESAIVSRPLNPFTAKAFSGTSPDDVQLGPSVGPPSKDKGQSAAQFLDPVADARSKATKLEKPSRTVTCPCQGSPCALFGPDAVALSHRRQLRGPAVGLITLQERYVCAGDPRQLSKAPLRCAGGLWAGVTLECVEKLSEALGACDEDTFRRTHLLAGAGRAGE

SEQ ID NO: 1024656 - protein, 264 aa, Homo sapiens
MTRHGKNCTAGGVYTYHEKKKDTAASGYGTQNIDEPCHDPVVTPDGYLYEREAILEYILHQKKEIARQMKAYEKQRGTRREEQKELQRAASQDHVRGFLEKESAIVSRPLNPFTAKAFSGTSPDDVQLGPSVGPPSKDKGQSAAQFLDPVADARSKATKLEKPSRTVTCPCQGSPCALFGPDAVALSHRRQLRGPAVGLITLQERYVCAGDPRQLSKAPLRCAGGLWAGVTLECVEKLSEAWGPVTEDTFRRTHLLAGAGRAGE

SEQ ID NO: 1024657 - protein, 278 aa, Homo sapiens
  misc_feature (206)..(206): Xaa can be any naturally occurring amino acid
  misc_feature (224)..(224): Xaa can be any naturally occurring amino acid
  misc_feature (241)..(241): Xaa can be any naturally occurring amino acid
  misc_feature (244)..(244): Xaa can be any naturally occurring amino acid
  misc_feature (256)..(256): Xaa can be any naturally occurring amino acid
LCDALARDRTRLSPTRTTGPGFHRGPGPPARLAAPWWTLNTPTFPALPGMSQMFMKLATYLRMIKLEFDVEELTSTSVEHIIVNPNAAYDKFKDNESGDQRDLISHDRIGKTKRTGYESGEYEMLGGGSGSDGDTPAKVPGFLHEVQELTTEVEKIKTTVKESATEEKLTPVLLAKQLAALKQQLVASHLEKLLGPDAAINLTDPXGALANRLLLQLEATKNSXGGSGGKTTGTPPDSSLXTYXLHSRPEQDKFSXAAKVAELEKRLHRAGDSCNVVI

SEQ ID NO: 1024658 - protein, 169 aa, Homo sapiens
PEGGRGSWRTVFGSGGGAMTTLRAFTCDDLFRFNNINFDSLTETYGIPFYLQYLATARVFHCCRGTWWRLNGYIMGKAEGSSAREECTGTSPALSVAPRISTPLLWLLKLMESLEEIPDKNGVHFWWDLLCKEYLTQVCSYHVQGSVGSQCYIRTVIEYLSGQGNGGAP

SEQ ID NO: 1024659 - protein, 66 aa, Homo sapiens
QSTGNVQAFSTQSGMNLEWSQKCFEDNNWDYIQICQAFTHLKAKGEIPEVDIHEVIVVMPQKQSPL

SEQ ID NO: 1024660 - protein, 191 aa, Homo sapiens
RLVRLEALEIATAVTEFLRPRPLTGRRRWGAAGFTLRGVRKHQEKGCSHLEEKMLEQHTIFLNIIICLWMTMKFKDTDCLFIPLDIVIVYNTDNTMMIGSEDLEVPEAGFRHVAQAGLELDASNPPALTCQRAGITGSAGRRDGSNAMDLHVLQSVGGLGLCSESKYHPGWRWEVMGGPDRCLLLLAARRE

SEQ ID NO: 1024661 - protein, 135 aa, Homo sapiens
RLVRLEALEIATAVTEFLRPRPRREGGVGGRLGLPFESPCENRDTCPVEKGDAKAENARKDMASLNCGTCSCSCGVDHGNRSAGRRDGSNAMDLHVLQSVGGLGLCSESKYHPGWRWEVMGGPDRCLLLLAARRE

SEQ ID NO: 1024662 - protein, 404 aa, Homo sapiens [sequence omitted]

SEQ ID NO: 1024663 - protein, 74 aa, Homo sapiens
VTRWGRIQVPGVIGAQPVYQSVHPPKETPMTLPGTVPGPMLLQGGGSISAVRNGHWIHVFICKNGCLNFLTSYW

SEQ ID NO: 1024664 - protein, 126 aa, Homo sapiens
  misc_feature (26)..(26): Xaa can be any naturally occurring amino acid
  misc_feature (108)..(108): Xaa can be any naturally occurring amino acid
  misc_feature (119)..(119): Xaa can be any naturally occurring amino acid
AGHLGCRDHYFGCRHRNPSVELCVGXRITRRLPRPKGREQERHHAGEVTGHERTEGQAGAIGRELSGVEVTADRHRFGQPEMGSIRDRQRYPRDFAALNSFCASGQPXRFQGPRQFPTXFRVSRAS

SEQ ID NO: 1024665 - protein, 372 aa, Homo sapiens
GSEAWVAAQGEAGMSYPADDYESEAAYDPYAYPSDYDMHTGDPKQDLAYERQYEQQTYQVIPEVIKNFIQYFHKTVSDLIDQKVYELQASRVSSDVIDQKVYEIQDIYENSWTKLTERFFKNTPWPEAEAIAPQVGNDAVFLILYKELYYRHIYAKVSGGPSLEQRFESYYNYCNLFNYILNADGPAPLELPNSWLWDIIDEFIYQFQSFSQYRCKTGKKSEEEIDFLRSNPKIWNVHSVLNVLHSLVDKSNIQPTVGGIHKAEVTLESVVGSNGRTPSTKCLVTSAGRGSPGCTPCYGDYYQGIKVLENIELNKKSMYSRVPECQVTKKYYVGFAYLKMRDYQEPTGVFANILRLHPEEQQSMFQRTTYKY

SEQ ID NO: 1024666 - protein, 335 aa, Homo sapiens
GSEAWVAAQGEAGMSYPADDYESEAAYDPYAYPSDYDMHTGDPKQDLAYERQYEQQTYQVIPEVIKNFIQYFHKTVSDLIDQKVYELQASRVSSDVIDQKVYEIQDIYENSWTKLTERFFKNTPWPRLKPLLHRLAMTGTYMPKSVGDLPWSRGLNPILWDIIDEFIYQFQSFSQYRCKTGKKSEEEIDFLRSNPKIWNVHSVLNVLHSLVDKSNIQPTVGGIHKAEVTHESVVGSIGRTPSTKCLVTSAGRGSPACTPCYGDYYQGIKVLENIELNKKSMYSRVPECQVTKKYYVGFAYLKMRRYQDAIRRLRQHPPSTSRGAQSMFQRTTYKY

SEQ ID NO: 1024667 - protein, 447 aa, Homo sapiens
MAEGEGYFAMSEDELACSPYIPLGGDFGGGDFGGGDFGGGDFGGGDFGGGGSFGGHCLDYCESPTAHCNVLNWEQVQRLDGILSETIPIHGRGNFPTLELQPSLIVKVVRRRLAEKRIGVRDVRLNGSAASHVLHQDSGLGYKDLDLIFCADLRGEGEFQTVKDVVLDCLLDFLPEGVNKEKITPLTLKEAYVQKMVKVCNDSDRWSLISLSNNSGKNVELKFVDSLRRQFEFSVDSFQIKLDSLLLFYECSENPMTETFHPTIIGESVYGDFQEAFDHLCNKIIATRNPEEIRGGGLLKYCNLLVRGFRPASDEIKTLQRYMCSRFFIDFSDIGEQQRKLESYLQNHFVGLEDRKYEYLMTLHGVVNESTVCLMGHERRQTLNLITMLAIRVLADQNVIPNVANVTCYYQPAPYVADANFSNYYIAQVQPVFTCQQQTYSTWLPCN

SEQ ID NO: 1024668 - protein, 466 aa, Homo sapiens
MHQRYFWTDQGQVALGGHYMAEGEGYFAMSEDELACSPYIPLGGDFGGGDFGGGDFGGGDFGGGDFGGGGSFGGHCLDYCESPTAHCNVLNWEQVQRLDGILSETIPIHGRGNFPTLELQPSLIVKVVRRRLAEKRIGVRDVRLNGSAASHVLHQDSGLGYKDLDLIFCADLRGEGEFQTVKDVVLDCLLDFLPEGVNKEKITPLTLKEAYVQKMVKVCNDSDRWSLISLSNNSGKNVELKFVDSLRRQFEFSVDSFQIKLDSLLLFYECSENPMTETFHPTIIGESVYGDFQEAFDHLCNKIIATRNPEEIRGGGLLKYCNLLVRGFRPASDEIKALQRYMCSRFFIDFSDIGEQQRKLESYLQNHFVGLEDRKYEYLMTLHGVVNESTVCLMGHERRQTLNLITMLAIRVLADQNVIPNVANVTCYYQPAPYVADANFSNYYIAQVQPVFTCQQQTYSTWLPCN

SEQ ID NO: 1024669 - protein, 114 aa, Homo sapiens
MAVAGGGKGEILLHWPPKLGGELGGDARPSREPGLRATQPSVQSSLASGYQLPAALSSAGWHSARGKAEQVCEAKCLRGAPRGENPEEKETARIGPGKRINRSSLYMKKKKYRP

SEQ ID NO: 1024670 - protein, 282 aa, Homo sapiens
ESDRAVRSGAPHADGSREAVFCACIWRWRVGGRGRSCCTGRPSWGASSVVTRGPHVTERLQSDAAFGAVVTRVWLPAPRCPELGGLAFGPGKSGAGKGSGAREPRPCQQRLTDLGDRRRTAQGVPASFLHTPTCLGTQRPPGMGKQGRLGFQVRQSHQERWKPSPESLQENSEHRGGLGVRGWGGGGGRETRGAGSEGSPGSEHGKGRAAAGSSLAFRCSSPDPPRTAHPGSDMQVCEAKCLRGAPRGENPEEKETARIGPGKRRDGAAYAEWRGRPPFGRR

SEQ ID NO: 1024671 - protein, 50 aa, Homo sapiens
MEQPMQNGEEDRPLGGGEGTSLQEIDGGTGYADLTPNFPMAHNPIRAESN

SEQ ID NO: 1024672 - protein, 160 aa, Homo sapiens
MAKKYFTSDKTNEDWDAGPFMLHDKWDGRSKRNPGPPCVEAGNGGNAALEQRRAANPQRSSFGNAGTQSPEPGGGGNPRASSWPRKHFLAAPPFKIVFVRNVGWGPNFICRKKYNGGRPGNPTCLEPLGAEHWRSHWWHTQIWGHANFDTLSLGEQPTVL

SEQ ID NO: 1024673 - protein, 67 aa, Homo sapiens
  misc_feature (7)..(7): Xaa can be any naturally occurring amino acid
PSCMDAXTVPWWKKAAVPAGPLCLACPGLLHAGHLPEHAGLLTVPPEQGKEGPTSPTHMSDPSQLEA

SEQ ID NO: 1024674 - protein, 277 aa, Homo sapiens
RALPVRVVWNAVDSGHCLQTYSLHTEAVRAARWAPCGRRILSGGFDFALHLTDLETGTQLFSGRSDFRITTLKFHPKDHNIFLCGGFSSEMKAWDIRTGKVMRSYKATIQQTLDILFLREGSEFLSSTDASTRDSADRTIIAWDFRTSAKISNQIFHERFTCPSLALHPREPVFLAQTNGNYLALFSTVWPYRMSRRRRYEGHKVEGYSVGCECSPGGDLLVTGSADGRVLMYSFRTASRACTLQGHTQACVGTTYHPVLPSVLATCSWGGDMKIWH

SEQ ID NO: 1024675 - protein, 202 aa, Homo sapiens
RALPVRVVWNAVDSGHCLQTYSLHTEAVRAARWAPCGRRILSGGFDFALHLTDLETGTQLFSGRSDFRITTLKFHPKDHNIFLCGGFSSEMKAWDIRTGKVMRSYKATIQQTLDILFLREGSEFLSSTDASTRDSADRTNLPPRAALRPRHLLLGRGHEDLALSFLSLNLPDASWALGLPSSSRVDERNEHRGWLWVLGTTF

SEQ ID NO: 1024676 - protein, 271 aa, Homo sapiens
SPRPRRLLDSRWQSGVGFWTDGTDACYRRSLGELVSLLLLPRLIPMYVSAFLVLSHSPLYGHTAVVYPVTCGWTFELSPVLAVMSKAAENVHEQVMRSYKATIQQTLDILFLREGSEFLSSTDASTRDSADRTIIAWDFRTSAKISNQIFHERFTCPSLALHPREPVFLAQTNGNYLALFSTVWPYRMSRRRRYEGHKVEGYSVGCECSPGGDLLVTGSADGRVLMYSFRTASRACTLQGHTQACVGTTYHPVLPSVLATCSWGGDMKIWH

SEQ ID NO: 1024677 - protein, 230 aa, Homo sapiens
RALPVRVVWNAVDSGHCLQTYSLHTEAVRAARWAPCGRRILSGGFDFALHLTDLETGTQLFSGRSDFRITTLKFHPKDHNIFLCGGFSSEMKAWDIRTGKVMRSYKATIQQTLDILFLREGSEFLSSTDASTRDSADRTIIAWDFRTSAKISNQIFHVEGYSVGCECSPGGDLLVTGSADGRVLMYSFRTASRACTLQGHTQACVGTTYHPVLPSVLATCSWGGDMKIWH

SEQ ID NO: 1024678 - protein, 223 aa, Homo sapiens
MQGTQLFSGRSDFRITTLKFHPKDHNIFLCGGFSSEMKAWDIRTGKVMRSYKATIQQTLDILFLREGSEFLSSTDASTRDSADRTIIAWDFRTSAKISNQIFHERFTCPSLALHPREPVFLAQTNGNYLALFSTVWPYRMSRRRRYEGHKVEGYSVGCECSPGGDLLVTGSADGRVLMYSFRTASRACTLQGHTQACVGTTYHPVLPSVLATCSWGGDMKIWH

SEQ ID NO: 1024679 - protein, 194 aa, Homo sapiens
MSDLSYYLGLIGGLYFLLLSDAAGLCRCTQDYWLGWNVIAGSPPSPQRSRVCLQVPHGALVAETGLAFHCMSCSLSSKLRSIAVYYDNPHMVPPDKCRCAVGSILSEGEESPSPELIDLYQKFGFKVFSFPAPSHVVTATFPYTTILSIWLATRRSILAWIAYIKERKAVCLYSAGDLTGRPDRFMVAPVARLG

SEQ ID NO: 1024680 - protein, 105 aa, Homo sapiens
MGLNRSSTARVWVDLCTSVTMETYVQGRGQTHTAWISAEIDTCRGISHINYSRLLNTERCPKCTNVFCRCLFTLNEVDVSIRYNVDIVCDLAAHTADSLVNEAFG

SEQ ID NO: 1024681 - protein, 1109 aa, Homo sapiens
MLFTWESIFLTVLGHSFFAEGFCLGLSGPYLDPEQSSSFRFEWLIKLAPNISGTVEGNRTLVPLTLVEYTLYFHNPELCREFSSSRVPLLLFKIGFETCHRKVALQKYTVQCKKMLSHWPTLLRIAKVPTSHMCLNLYKPVFPFKKTRHLYPLTLQATPLAPFRLTLLSPGLGHQPGTCDTSAALQDLHYMFQVGVRTRYVLTLMDMTKDDDSVNKALLTGLSACDGECNEEGWILTKDWLLLLFRLVSQPLQHKSKSPVEFSFMHVCGLSSGTVVYHIVKYHTAKKITPRKALSHIPILLSYMFSKHSSTSLTFLLYVDSQIILWGWDEFKSYTKISVKSLKVYGVGGHLVHFSKASTRKPHRTVLVVHVLVFFLKCAIYCIVLPHNCTEMYSEFVEFLAEILLCLFHMNIFVILKEILFKFPFEKPHGSVIHVTDTFGFQCCLETVAKAGWCCLQAAAYGRQSHSNEIAPLNCAVSIPWVMAQGRTTYFVTRADSGFLDPQPQIIPGSIAFFTVLSEFPELKSAIAVDKTAIPTSDEIVPLLSSNGLGLRDVVKHFGGFKIFVRSPHFSIHPHWLPCTHLTVASQKSWLSLRWGAHGAAGDFLEKCKENSYSVSTSRATCVNLTKFTNNPPFFNICYCKHEYLNTDKKNTHTNRPTALEATELAQNYQRTLTGRSGFSRNIAYKCISVYLESILTAFQLIFEVISVKTGKQLRCSNFFFLVQTFNNLLIQQSLLSYIFICKVTLSAWQGAGACFFHIRPFLQYPGKHIITKGFYLKSFMEGLQFEKLHMFTEELLPSMQTLCSVVSQLCDNKMAISDLQGAVGNQIKYVIRDIITSIVFNRALCQLLRQSFNKVYRILKLVTITSLRDAVRNLANLEEEEAFRKGFSIYQKYLTSSNQYVMQTCFKGTKGIAKYLPKGGTFYLKFETNEISKISPKKDYPFKVIIFTKMKIFLLLFSCKIVESCFVGLRVTFSSNTKFFFYVEISFLFLLAIEMQCDEVFLFLFSLSHYVLASHFMKKRRKIPIYRALLVEALFNQQKIMAIGGPFIYCLYVVFEKKNHDAFVFAVCTPEINSISCLNAIHFAHVLYISNAYCIFICVHIYHQIFCT

SEQ ID NO: 1024682 - protein, 95 aa, Homo sapiens
MSFIFDWIYSGFSSVLQFLGLYKKTGKLVFLGLDNAGKTTLLHMLKDDRLGQHVPTLHPTSEELTIAGMTFTTFDLGWTCFKLEDGGKNYLPAIH

SEQ ID NO: 1024683 - protein, 95 aa, Homo sapiens; identical to SEQ ID NO: 1024682

SEQ ID NO: 1024684 - protein, 214 aa, Homo sapiens
MSDEGSRGAAACALCRCPRASQWLLFSGAGCAGWLLWLGGSVQFPGPHATSNGLAADGHHLLVALKSQTLLQNLMSEDDVRQCAARMASVEHAIPEAQREEVDADEDAASECCSQATCRSHLAGGGLSQARRTMLRSDEGAHVMLLSAKLCEKHGTNARRLLPAVWHAPAGGPVPGGGGLRDCGWLGGQPHRHVQSERAAIQEQVLGLGACVTC

SEQ ID NO: 1024685 - protein, 141 aa, Homo sapiens
MSCRSRRSRWACKEASVEHAIPEAQREEVDADEDAASECCSQATCRSHLAGGGLIQAWRSMLRSDEGAHVMLLSAKLCEKHGQMPADFCQLSGMHLLVGRYLAAGGCGTAGGWAASLIGTCSQNVQAIQEQVLGLGACVTC

SEQ ID NO: 1024686 - protein, 152 aa, Homo sapiens
  misc_feature (28)..(28): Xaa can be any naturally occurring amino acid
SPFFPAGVLPKSIGTVKKTLEIVNLGAXGTGEGWGATQWTPLNSLEHQDAPMAKVLSSMFFVFSSSLGSLALTGFQLALQLPGLSLHGTLALGLWLQLRSCSAGAAFGISGCGSGCDPEQDCVVAAVVVGPESALRGLIAHHEVRRRPIARA

SEQ ID NO: 1024687 - protein, 156 aa, Homo sapiens
MASALEQFVNSVRQLSAQGQMTQLCELINKSGELLAKNLSHLDTVLGALDVQEHSLGRFLGGLVGRVFLQCPSAPEIAKRYSQRLACSSSGSCDGEHIRVCKQTLLLGFAIQLTNALVERKQPLRGIGILKQAIDKMQMNTNQLTSIHADLCQLCR

SEQ ID NO: 1024688 - protein, 127 aa, Homo sapiens
MCDRKAVIKNADMSEEMQQDSVECATQALEKYNIEKDISSHIKKEFDKKVQFPPGIASVRRNFGSYVTHETKTLHRTSTVGQVAYFFMCNIWLIEAMDCAIHPVIQSKNKDCSLDSIIPETEIVMPC

SEQ ID NO: 1024689 - protein, 70 aa, Homo sapiens
IAPPVPPITAPLIAPSRPLRQNASSSTNGSSTHFCTFGLEHFLHRLDLEPFSVTAPTPADQQLLPFQSLI

SEQ ID NO: 1024690 - protein, 263 aa, Homo sapiens
QETLSCSYLGVPSDADSPAASNKISGASNSKPNRPSLAKIFSVIGWKSGQQQGLIAYSTALQIMYARDAVVGALMPAAMIAPVECPSFSSAAPSDASAMASPMNGEECMLAVDIEDRLSPNPWQEKREIVSSEDAVTPSAVTPSAPSASARPFIPVTDDLGAASIIAETMTKTKEDVESQNKAAGPEPQALDEFTSLLIADDTRVVVDLLKLSVCSRAGDRGRDVLSAVLSGMGTAYPQVADMLLELCVTELEDVATDSQSGR

SEQ ID NO: 1024691 - protein, 199 aa, Homo sapiens
QETLSCSYLGVPSDADSPAASNKISGASNSKPNRPSLAKIFSVIGWKSGQQQGLIAYSTALQIMYARDAVVGALMPAAMIAPVECPSFSSAAPSDASAMASPMNGEECMLAVDIEDRLSPNPWQEKREIVSSEDAVTPSAVTPSAPSASARPFIPVTDDLGAASIIAETMTKTKEVADMLLELCVTELEDVATDSQSGR

SEQ ID NO: 1024692 - protein, 148 aa, Homo sapiens
MTKILTDGLKKIQIFIIMSTDTWDPVCKCQKRVCICCPERLHTSDKPLPEVCFLSVRKHTLTGFNHGPLLSGNALSSHTEPGCHPYKLKQAQIREINKIPHPRIKKNQGINGLMDFPWRRKCGTIGISHRDEIPYHSRVWRLIINLLI

SEQ ID NO: 1024693 - protein, 83 aa, Homo sapiens
MIQSIWLDSQLFQLLSLPARCISDGTHQTLNSFPELESATEVFRASSVAALMETKKSLRAGNLHHDQPITQEHSQLLLQGCTC

SEQ ID NO: 1024694 - protein, 154 aa, Homo sapiens
  misc_feature (6)..(6): Xaa can be any naturally occurring amino acid
PTRFFXREQCGQGVTGSGARPGRYLLPIFLCRRNWMLLRCRPARGTAPPRVRSTRRSPAPCRRSALPLLALRPEARALLASSATLLLARPGPERALSRLLQDARLLLVQGHAVAHVHASAPNCISTSANLRVLPFTTVVDCDTVTLMPFSSVAA

SEQ ID NO: 1024695 - protein, 239 aa, Homo sapiens
MEREYMFCDITETVSILRYIFTCRIKPFLVSTAASSIFILQISVQAAQPGQGLRQRAFLTPRGELPDQRLKGLRRHKNPQPSIPKKPSGVTFPGGENITRSSLVTVRQGFRMPGIQRDTGPAVRITLPTVRHHEVLAGDQQVQTGCGVPGPRAFSGVLAVNADLQAQRAGLNGFRDGRNNRAQLLCQRSCLFCVPVQAAQHQRENSFQPRQGEDFCQHRVRHLLQANTVALEIIVGRKV

SEQ ID NO: 1024696 - protein, 136 aa, Homo sapiens
  misc_feature (121)..(122): Xaa can be any naturally occurring amino acid
  misc_feature (126)..(126): Xaa can be any naturally occurring amino acid
FVSSWEYKDIFFPISDTGTRHLQYNSPTHQGLEVYIGKAQASLCFQSQTKPMTSSRDKMYFQPTRCRWGDPPGAESQGYRAKPQGCAARPELPRGRTFEEEDLAAASGRPPPPGPGCLFAXXVQGXCARPANYTAW

SEQ ID NO: 1024697 - protein, 72 aa, Homo sapiens
HIQRAFMIIIIGSVTGDLFNVFRSIAHRKGITRHFQHLRIVTRCRQSLPHFAVTDPSVSVTAKYRLLYVDRE

SEQ ID NO: 1024698 - protein, 124 aa, Homo sapiens
LTRRCTCQLFAQAGYVGFGSHHRHMLALLRHANLLNALRQVIHQNPVGTIDRFTRVTVFVLLTRHIQCLIAYVDFWRVKARRIFQGGKLVCYRGVLQSFRFRRRLICRFWRIAQGRAQIVEIGP

SEQ ID NO: 1024699 - protein, 40 aa, Homo sapiens
IETNRLQEALNLFKSIWNNRWLRTISVILVSFNKARFLLR

SEQ ID NO: 1024700 - protein, 39 aa, Homo sapiens
IETNRLQEALNLFKSIWNNRGWVWLSSRMTMLELLLATT

SEQ ID NO: 1024701 - protein, 114 aa, Homo sapiens
LRKPPIMAEGKGGVSCLTWPEQEVERGRCHTLTNNQISGQLTQYQENSTTKLWLIIHEKPPTTQSPPTRPYLQHLGLQFNMRFGGNTDPNHITHKLQLLHTHDNPLICEGLICS

SEQ ID NO: 1024702 - protein, 175 aa, Homo sapiens
  misc_feature (12)..(12): Xaa can be any naturally occurring amino acid
MGEDLQWPLLLXSLPNLHPCCTCNGSILHCQGGRLRVRLPARHEVIHGPIHSMVMKSRPFPVFSCATPAWEKVPKTISSKLPCTVDPMDTNYCFSSTEKNCCVRNGTLTSARPRLEVDPRAQGYHANFCLGPCPYIWSLDTQYSKVLALYNQHNPGASAAPCCVTQRWSRGHRVL

SEQ ID NO: 1024703 - protein, 99 aa, Homo sapiens
MDHHILQKAQCFQGNLGRIAKSVSLVRMGPCLPGQWRKVNIISVTNKGLLHSFDLLKAVCLEFSPKNTVLATWQPYTTSKDGTPGIPNLHLYDVKLGTC

SEQ ID NO: 1024704 - protein, 259 aa, Homo sapiens
MVEDTGKKRRKKREGERTARNRNEKRGRQANSKETSSKKERTSGSDREQRRKKQEEGRTKKEKRERKEEQQKKEEKQEKDGREGKEQGRKREKRERAKKKRKQERKREEATRRREDRDEEERERKEKKSRGQRDKKEEKRKKQRRKKEGSEERKKKQKSNDNKEKRTERQKKEKEEKKERQKTDTERERRRKKKENEQHRQNRKENADKQSRDTKRSIGKREESRTEATAEERITRRGERDTEEEGATSRRHEGLTTDT

SEQ ID NO: 1024705 - protein, 115 aa, Homo sapiens
MARNAEKAMTALARFRQAQLEEGKVKERRPFLASECTELPKAEKWRRQIIGEISKKVAQIQNAGLGEFRIRDLNDEITSFLREKGHWEARIKELGGPHYGLPYMLDHEGKSSTTP

SEQ ID NO: 1024706 - protein, 180 aa, Homo sapiens
AVLILAVCSLSYPSVPSSVFPRAGCIRTGFVPQLGAIGPVSPLLAGHSCGEVGQLNSVGFHEEAESRGWPQTHTEGGGWLGTRDVEHKSLSSPINQAPSPQVSPAHWIRKSSVRPEAPGTGFSQFSREGHLQVTETSSTREDLTFESLPGHQRPSQPHGKLPRPDSGIIPPWLRHQPGKT

SEQ ID NO: 1024707 - protein, 126 aa, Homo sapiens
  misc_feature (13)..(13): Xaa can be any naturally occurring amino acid
  misc_feature (18)..(18): Xaa can be any naturally occurring amino acid
  misc_feature (34)..(34): Xaa can be any naturally occurring amino acid
  misc_feature (36)..(36): Xaa can be any naturally occurring amino acid
  misc_feature (41)..(41): Xaa can be any naturally occurring amino acid
  misc_feature (54)..(55): Xaa can be any naturally occurring amino acid
  misc_feature (57)..(57): Xaa can be any naturally occurring amino acid
MIITNYNPSLYTXVPINXRLTTQQFQAIPYLSFXSXYPSPXESSCLWGLEMSPXXPXRPSLPSHSWVSSGLREPHIHLHLDTCSRMARPLPPDAVVRVICQKKAFWMLLRCTLLGEPGIRPTVLAV

SEQ ID NO: 1024708 - protein, 200 aa, Homo sapiens
AERRHLVGAKPTPGSEQQPLRCPWPVSFHLSTSMGNIFANLFKGLFGKKEMRILMVGLDAAGKTTILYKLKLGEIVTTIPTIGFNVETVEYKNISFTVWDVGGQDKIRPLWRHYFQNTQGLIFVVDSNDRERVNEAREELMRMLAEDELRDAVLLVFANKQDLPNAMNAAEITDKLGLHSLRQQELVHSGHLRHQRRRAL

SEQ ID NO: 1024709 - protein, 200 aa, Homo sapiens; identical to SEQ ID NO: 1024708

SEQ ID NO: 1024710 - protein, 151 aa, Homo sapiens
  misc_feature (48)..(51): Xaa can be any naturally occurring amino acid
  misc_feature (54)..(54): Xaa can be any naturally occurring amino acid
  misc_feature (56)..(57): Xaa can be any naturally occurring amino acid
  misc_feature (59)..(59): Xaa can be any naturally occurring amino acid
  misc_feature (68)..(68): Xaa can be any naturally occurring amino acid
  misc_feature (71)..(71): Xaa can be any naturally occurring amino acid
  misc_feature (76)..(76): Xaa can be any naturally occurring amino acid
  misc_feature (83)..(83): Xaa can be any naturally occurring amino acid
  misc_feature (95)..(95): Xaa can be any naturally occurring amino acid
  misc_feature (97)..(98): Xaa can be any naturally occurring amino acid
  misc_feature (110)..(111): Xaa can be any naturally occurring amino acid
  misc_feature (117)..(117): Xaa can be any naturally occurring amino acid
  misc_feature (122)..(123): Xaa can be any naturally occurring amino acid
  misc_feature (126)..(126): Xaa can be any naturally occurring amino acid
  misc_feature (134)..(134): Xaa can be any naturally occurring amino acid
  misc_feature (141)..(142): Xaa can be any naturally occurring amino acid
AERRHLVGAKPTPGSEQQPLRCPWPVSFHLSTSMGNIFANLFKGLFGXXXXGEXGXXAXGGGGGGGMXWGXRGGGXGGTIRSXGVRGGTGGCKSXGXXGGGGGGRGRVGXXGGQWLXGGEGXXLVXGGGGGGGXGGGRGGXXGVRAGGGLA

SEQ ID NO: 1024711 - protein, 262 aa, Homo sapiens
MACYSRTPDLGDPPTSASKSAGITGMSHCAQLKADIFKRLHTVRLHTSMKQRVVLWLCSPLVCNPEIRQKSPKPSFRYAHHYIANAHHSTEQHLHLQSKKYKAESLCSGKKEMRILMVGLDAAGKTTILYKLKLGEIVTTIPTIGFNVETVEYKNISFTVWDVGGQDKIRPLWRHYFQNTQGLIFVVDSNDRERVNEAREELMRMLAEDELRDAVLLVFANKQDLPNAMNAAEITDKLGLHSLRQQELVHSGHLRHQRRRAL

SEQ ID NO: 1024712 - protein, 171 aa, Homo sapiens
MHTSMGNIFANLFKGLFGKKEMRILMVGLDAAGKTTILYKLKLGEIVTTIPTIGFNVETVEYKNISFTVWDVGGQDKIRPLWRHYFQNTQGLIFVVDSNDRERVNEAREELMRMLAEDELRDAVLLVFANKQDLPNAMNAAEITDKLGLHSLRQQELVHSGHLRHQRRRAL

SEQ ID NO: 1024713 - protein, 127 aa, Homo sapiens
MASSDIQVKELEKRASGQAFELILSPRSKESVPEFPLSPPKKKDLSLEEIQKKLEAAEERRKSHEAEVLKQLAEKREHEKEVLQKAIEENNNFSKMAEEKLTHKMEANKENREAQMACQTGTFAREG

SEQ ID NO: 1024714 - protein, 131 aa, Homo sapiens
MASSDIQVKELEKRASGQAFELILSPRSKESVPEFPLSPPKKKDLSLEEIQKKLEAAEERRKSHEAEVLKQLAEKREHEKEVLQKAIEENNNFSKMAEEKLTHRLREKDKHIEEVRKNKESKDPADETEAD

SEQ ID NO: 1024715 - protein, 129 aa, Homo sapiens
MASSDIQVKELEKRASGQAFELILSPRSKESVPEFPLSPPKKKDLSLEEIQKKLEAAEERRKSHEAEVLKQLAEKREHEKEVLQKAIEENNNFSKMAEEKLTHKMEANKENREAQMACQTGTLRERVST

SEQ ID NO: 1024716 - protein, 68 aa, Homo sapiens
  misc_feature (1)..(1): Xaa can be any naturally occurring amino acid
  misc_feature (4)..(4): Xaa can be any naturally occurring amino acid
  misc_feature (21)..(21): Xaa can be any naturally occurring amino acid
XNGXKQFPQRGKTAYEHELPXFKYGPHLIGEIWALEAPRNSGTKLPHCNPQPSLSSLGLPGVCPPSLA

SEQ ID NO: 1024717 - protein, 87 aa, Homo sapiens
NSVEKPVSSILSRTPSVAKSPEAKSPLQSQPHSRMKPAGSVNDMALDAFDLDRMKQEILEEVVRELHKVKEEIIDAIRQELSGISTT

SEQ ID NO: 1024718 - protein, 87 aa, Homo sapiens; identical to SEQ ID NO: 1024717

SEQ ID NO: 1024719 - protein, 96 aa, Homo sapiens
VADPFCLRVGWCSICLGAGIFVDRTRRSLYWEIMGTAPKLKEGMKPAGSVNDMALDAFDLDRMKQEILEEVVRELHKVKEEIIDAIRQELSGISTT

SEQ ID NO: 1024720 - protein, 116 aa, Homo sapiens
MCDQTKHSKCCPAKGNQCCPPQQNQCCQSKGNQCCPPKQNQCCQPKGSQCCPPKHNHCCQPKAPCCIQARCCGLETKPEVSPLNMESEPNSPQTQDKGCQTQQQPHSPQNESRPSK

SEQ ID NO: 1024721 - protein, 255 aa, Homo sapiens
MRPEDRMFHIRAVILRALSLAFLLSLRGAGAIKADHVSHLCQRLYMTHRPTGEFMFEFDEDEQVLCGSGQEGDRLASGGVGRAFSFEAQGGLANIAILNNNLNTLIQGVPTTLRPPMIPPEVTAVFPKEPVELGQPNTLICHIDRFFPPVLNVTWLCNGEPVTEGVAESLFLPRTDYSFHKFHYLTFVPSAEDVYDCRVEHWGLDQPLLKHWEAQEPIQMPETTETVLCALGLVLGLVGIIVGTVLIHKVSAFWP

SEQ ID NO: 1024722 - protein, 183 aa, Homo sapiens
MPDVGTLQRLPKVIGYPEPRQRSLAFTARQDRWLTRPWADGLVSLGVPRQRGQCWDAALALAGQRFPARAHVAVQSTQGQHVLYSRDHSVAESLNYVASWNMSMLQTQDLVKSVQATTEKQGTEKPFTFSIALRALRVPGHQQGARPCPALIHQKGRMGDDSCVLMPSDPVSQFIKLTEDEFL

SEQ ID NO: 1024723 - protein, 144 aa, Homo sapiens
MPDVGTLQRLPKVIGYPEPRQRSLAFTARQDRWLTRPWADGLVSLGVPRQRGQCWDAALALAGQRFPARAHVAVQSTQGQHVLYSRDHSVAESLNYVASWNMSMLQTQDLVKSVQATTEKQGTWDRHRSSQHILSPGGRRRVRK

SEQ ID NO: 1024724 - protein, 128 aa, Homo sapiens
  misc_feature (64)..(64): Xaa can be any naturally occurring amino acid
  misc_feature (92)..(92): Xaa can be any naturally occurring amino acid
  misc_feature (101)..(101): Xaa can be any naturally occurring amino acid
  misc_feature (105)..(105): Xaa can be any naturally occurring amino acid
  misc_feature (111)..(111): Xaa can be any naturally occurring amino acid
  misc_feature (126)..(126): Xaa can be any naturally occurring amino acid
METLTSQCILLPTHTHTHLSHMHAYTHTHTHTHTHTYTHTHTRSLSLSLSLSVSVLSVWSGGRXGASVLQHPSARRHPRPSPPESRTLPRTXPGSLPSAGXDFCXFVVSEXGTSNVGPVVGGWKSXGE

SEQ ID NO: 1024725 - protein, 99 aa, Homo sapiens
STDTRRPPRLKMPSQGEPNKPMSCSFGVFPNPLGALLLLATTPAAEDAAAKATAQPPTETGESSQAEENIEAVDETKPKESARQDEGKEEEPEADQEHA

SEQ ID NO: 1024726 - protein, 151 aa, Homo sapiens
MLSILKPRRSQEWRTALRRYCCPTDLQAPRSPVPPIRKVGISDVIVHANLATSLKKNTCNCQADLLSWRSWVNGISCHCPNLRPLSKSIFRDSTSLCSLSQQRLCPLHSKPEACWGLFVSVHAHFRVQSGGRGIRMGKKSRVSRNDETLQE

SEQ ID NO: 1024727 - protein, 210 aa, Homo sapiens
FSTVPTAITPPGGCTRVRGSSGVRLTAGRDLSRNLSPLTEPSLRSVHGLLLDTARIQKSMLSILKPRRSQEWRTALRRYCCPTDLQAPRSPVPPIRKVGISDVIVHANLATSLKKNTCNCQADLLSWRSWVNGISCHCPNLRPLSKSIFRDSTSLCSLSQQRLCPLHSKPEACWGLFVSVHAHFRVQSGGRGIRMGKKSRVSRNDETLQE

SEQ ID NO: 1024728 - protein, 143 aa, Homo sapiens
MLSILKPRRSQEWRTALRRYCCPTDLQAPRSPVPPIRKVGISDVIVHANLATSLKKNTCNCQADLLSWRSWVNGISCHCPNLRPLSKSIFRDSTSLCSLSQQRLCPLHSKPEACWGLFVSVHAHFRVQSALSPALHKVVAQIW

SEQ ID NO: 1024729 - protein, 175 aa, Homo sapiens
  misc_feature (12)..(12): Xaa can be any naturally occurring amino acid
  misc_feature (24)..(24): Xaa can be any naturally occurring amino acid
  misc_feature (35)..(35): Xaa can be any naturally occurring amino acid
  misc_feature (39)..(39): Xaa can be any naturally occurring amino acid
  misc_feature (42)..(42): Xaa can be any naturally occurring amino acid
  misc_feature (104)..(105): Xaa can be any naturally occurring amino acid
  misc_feature (113)..(114): Xaa can be any naturally occurring amino acid
  misc_feature (154)..(154): Xaa can be any naturally occurring amino acid
  misc_feature (160)..(160): Xaa can be any naturally occurring amino acid
EFGQRSLREEAXFPFLGLTKRKRXKLASDYGGGCXDQFXRRXKTQEISRPKFAILKVRGESSDSRSVKDEGSSDPKDIDQDNRSTSPSIPSPQDNESDSDSSAXXQMLQPSPXXLQAPNWAPQLPPQLLQGPLSCPRQAHALCHCSSPQGSPNXSQAPNXAQAPTAPVPHTHIQQ

SEQ ID NO: 1024730 - protein, 108 aa, Homo sapiens
MGPRHFWSPGRQELRAPQSFWFPFLLAGLLPAAGPRSRPGRGGLSSFGASPPAAGRGPPAPARALRGLSLGLCRALRLLGPLRGLLLAAAASFSPSFSSAFPRRPGRA

SEQ ID NO: 1024731 - protein, 70 aa, Homo sapiens
MGGSSCRCEMEGSARRGMSSLIRHRHALAQSRMPRAWPPPMGLPPLRQRTLKRSHPRGLLLTLPERQQMW

SEQ ID NO: 1024732 - protein, 135 aa, Homo sapiens
MPHPLSRTTKRGLECPNEIQPPLPDPILFLFERFFVHFKFKGRVWTKGRLFHPESAYLSEQAVCQGVWQGRAGGHGLTYLKSSGSGRGPEHLPTVNQKEGIPPLLPASPSPPKQAKPFPFPRSWVEKQVWSFAAS

SEQ ID NO: 1024733 - protein, 633 aa, Homo sapiens
MLNAAADRVKWTRSSAAKRAACLVAAAYALKTLYPIIGKRLKQSGHGKKKAAAYPAAENTEILHCTETICEKPSPGVNADFFKQLLELRKILFPKLVTTETGWLCLHSVALISRTFLSIYVAGLDGKIVKSIVEKKPRTFIIKLIKWLMIAIPATFVNSAIRYLECKLALAFRTRLVDHAYETYFTNQTYYKVINMDGRLANPDQSLTEDIMMFSQSVAHLYSNLTKPILDVMLTSYTLIQTATSRGASPIGPTLLAGLVVYATAKVLKACSPKFGKLVAEEAHRKGYLRYVHSRIIANVEEIAFYRGHKVEMKQLQKSYKALADQMNLILSKRLWYIMIEQFLMKYVWSSSGLIMVAIPIITATGFADGEDGQKQVMVSERTEAFTTARNLLASGADAIERIMSSYKEVTELAGYTARVYNMFWVFDEVKRGIYKRTAVIQESESHSKNGAKVELPLSDTLAIKGKVIDVDHGIICENVPIITPAGEVVASRLNFKVEEGMHLLITGPNGCGKSSLFRILSGLWPVYEGVLYKPPPQHMFYIPQRPYMSLGSLRDQVIYPDSVDDMHDKGYTDQDLERILHNVHLYHIVQREGGWDAVMDWKDVLSGGEKQRMGMARMFYHKPHLPFIPLTC

SEQ ID NO: 1024734 - protein, 633 aa, Homo sapiens; identical to SEQ ID NO: 1024733

SEQ ID NO: 1024735 - protein, 740 aa, Homo sapiens
MTHMLNAAADRVKWTRSSAAKRAACLVAAAYALKTLYPIIGKRLKQSGHGKKKAAAYPAAENTEILHCTETICEKPSPGVNADFFKQLLELRKILFPKLVTTETGWLCLHSVALISRTFLSIYVAGLDGKIVKSIVEKKPRTFIIKLIKWLMIAIPATFVNSAIRYLECKLALAFRTRLVDHAYETYFTNQTYYKVINMDGRLANPDQSLTEDIMMFSQSVAHLYSNLTKPILDVMLTSYTLIQTATSRGASPIGPTLLAGLVVYATAKVLKACSPKFGKLVAEEAHRKGYLRYVHSRIIANVEEIAFYRGHKVEMKQLQKSYKALADQMNLILSKRLWYIMIEQFLMKYVWSSSGLIMVAIPIITATGFADGEDGQKQVMVSERTEAFTTARNLLASGADAIERIMSSYKEVTELAGYTARVYNMFWVFDEVKRGIYKRTAVIQESESHSKNGAKVELPLSDTLAIKGKVIDVDHGIICENVPIITPAGEVVASRLNFKVEEGMHLLITGPNGCGKSSLFRILSGLWPVYEGVLYKPPPQHMFYIPQRPYMSLGSLRDQVIYPDSVDDMHDKGYTDQDLERILHNVHLYHIVQREGGWDAVMDWKDVLSGGEKQRMGMARMFYHKPKYALLDECTSAVSIDVEGKIFQAAKGAGISLLSITHRPSLWKYHTHLLQFDGEGGWRFEQLDTAIRLTLSEEKQKLESQLAGIPKMQQRLNELCKILGEDSVLKTIKNEDETS

SEQ ID NO: 1024736 - protein, 152 aa, Homo sapiens
VDRGGGLHIPVVALRFLPLSLRAHGGGQSGGDGGAKNDPAASSLPPAHLPCSVSQSAAGARFVLRPRACGAQAQRLQSEAGELSESEGCAGGQRESTARNITQRGNVAKDLEKMPPKKKASVGPLVIWLSSFWWSCGSAIFPDYSKYQDGAL

SEQ ID NO: 1024737 - protein, 252 aa, Homo sapiens
YHEEELRQLLPHDTRAGWWKSGDQKENLLKRRRQQKKHRKKNNIKKNPPPHNKNLRVEGWEGTKQGPFTKEGNHEAHFRLPGMPFAWGCRRISSGPSLAWHSSVEEVSPNPKESRRGAKRGAPNGPLRVRWPPSQRIVPNSQPEMVEAVKKHIFKPLLPLNEETRLSPSRYPRTALLNAIRKLPVGQSSGTHRAPAGAQQAALARRARLLPCPPAAPLGHSSRRRLVPPDDPASQIPGSRARPPPVQLPPKP

SEQ ID NO: 1024738 - protein, 114 aa, Homo sapiens
  misc_feature (113)..(114): Xaa can be any naturally occurring amino acid
GSYVVEPGPWRAASGGSSRGSVNVAEDRSTRARRCVALSSWGRDSCGCTGCPRPPACVFSALLVPGQDPGHLQGLSFALAMSDGPGRFLGHRPWEASPVWGPRAAWGGVFIWXX

SEQ ID NO: 1024739 - protein, 39 aa, Homo sapiens
MPSDEITIETPAALVCQSVSSEAIFRLIKGRHTMHQTWR

SEQ ID NO: 1024740 - protein, 125 aa, Homo sapiens
MYVKLVEALCAEHQINLIKVDDNKKLGEWVGLCKIDREGKPRKVVGCSCVVVKDYGRSLRPGMSLKSISNARNEEINPWLASTSTHNHHTITSTTPNNTTTTHTERQYTNNSNTQTNVAPRPKEA

SEQ ID NO: 1024741 - protein, 125 aa, Homo sapiens; identical to SEQ ID NO: 1024740

SEQ ID NO: 1024742 - protein, 113 aa, Homo sapiens
MYVKLVEALCAEHQINLIKVDDNKKLGEWVGLCKIDREGKPRKVVGCSCVVVKDYGKESQARDVHGRVFQMQEMKKSNIVWFTMWTSVEWCECGEGLNSGGGRNAGKLRGGWC

SEQ ID NO: 1024743 - protein, 106 aa, Homo sapiens
MAEEGSEDCPHPRWPSTWNSRAAKALDKYVYQSQYCGFLQPGTKCATQGTEGMGVHGCKRKILNGHPSYRKPRNGRKPIFVCLHPTVMSLCMSSWWRPFVLNTKST

SEQ ID NO: 1024744 - protein, 81 aa, Homo sapiens
LLQRLAEQSQRLADGVEALNRTLERLVKARPTREASPSLQDGGPASGVAQGPAGGSQDSPKGTHSGLEVFSGMILKVEEEI

SEQ ID NO: 1024745 - protein, 81 aa, Homo sapiens; identical to SEQ ID NO: 1024744

SEQ ID NO: 1024746 - protein, 81 aa, Homo sapiens; identical to SEQ ID NO: 1024744

SEQ ID NO: 1024747 - protein, 77 aa, Homo sapiens
EGHFATITLTFIDKNGETELCMEGRGIPAPEEERTRQAWQRYYFEGIKQTFGYGARLYKGQRQVDSILLATSVQLFS

SEQ ID NO: 1024748 - protein, 163 aa, Homo sapiens
WRGASLRALCLFECSCVLWAEGACCDARVALRCAQGRLGALNLHGEGCLHGALLMGAVRLPVEGRAHSSGAVSETWDRALPLGGPWMRVPVAVRVLLVPGARRGPVSVAAHGTWASGCSADSWSLLRWSPVPQPRLGPSSPRSRDPGPLCSPWAPVGFEALGL

SEQ ID NO: 1024749 - protein, 151 aa, Homo sapiens
  misc_feature (34)..(34): Xaa can be any naturally occurring amino acid
AYRLTLTQIALRELNESDEGKPASPLLVNAVPQXGWLLPLHLPPGIRTHAPAHHLAPATPRPEPWNPWPPTRARHSGPLPAHPAARLCVCARAARLDLEKGLRTPGSCDALHLSRLHQRLPLMSWSRALQGPLYMPSPFYKIFPLKTTYFL

SEQ ID NO: 1024750 - protein, 129 aa, Homo sapiens
MFLSFPTTKTYFPHFDLSHGSARLRARKKVADALTNAVATVDDMPKALSALSEILKGNKLRVDPVNFKLLSHCLLVTLAAHLPAEFNPAVHASLDKFLASVSTVADLQITVKLEASVGNAFFALGVPQP

SEQ ID NO: 1024751 - protein, 621 aa, Homo sapiens
ETEQGEQQRQLLEEELARLQREAAAARKKRQELEAELAKVRAEMEVLLASKARAEEESRSTSEKSKQRLEAEAGRFRELAEEAARLRALAEEAKRQRQLAEEDAARQRAEAERVLAEKLAAIGEATRLKTEAEIALKEKEAENERLRRLAEDEAFQRRRLEEQAAQHKADIEERLAQLRKASDSELERQKGLVEDTLRQRRQVEEEILALKASFEKAAAGKAELELELGRIRSNAEDTLRSKEQAELEAARQRQLAAEEERRRREAEERVQKSLAAEEEAARQRKAALEEVERLKANVEEARRLRERAEQESARQLQLAQEAAQKRLQAEEKAHAFAVQQKEQELQQTLQQEQSVLDQLRGEAEAARRAAEEAEEARVQAEREAAQARRQVEEAERLKQSAEEQAQARAQAQAAAEKLRKEAEQEAARRAQAEQAALRQKQAADAEMEKHKKFAEQTLRQKAQVEQELTTLRLQLEETDHQKNLLDEELQRLKAEATEAARQRSQVEEELFSVRVQMEELSKLKARIEAENRALILRDKDNTQRFLQEEAEKMKQVAEEAARLSVAAQEAARLRQLAEEDLAQQRALAEKMLKEKMQAVQEATRLKAEAEELLEPRRRSLQ

SEQ ID NO: 1024752 - protein, 444 aa, Homo sapiens
ETEQGEQQRQLLEEELARLQREAAAARKKRQELEAELAKVRAEMEVLLASKARAEEESRSTSEKSKQRLEAEAGRFRELAEEAARLRALAEEAKRQRQLAEEDAARQRAEAERVLAEKLAAIGEATRLKTEAEIALKEKEAENERLRRLAEDEAFQRRRLEEQAAQHKADIEERLAQLRKASDSELERQKGLVEDTLRQRRQVEEEILALKASFEKAAAGKAELELELGRIRSNAEDTLRSKEQAELEAARQRQLAAEEERRRREAEERVQKSLAAEEEAARQRKAALEEVERLKANVEEARRLRERAEQESARQLQLAQEAAQKRLQAEEKAHAFAVQQKEQELQQTLQQEQSVLDQLRGEAEAARRAAEEAEEARVQAEREAAQARRQVEEAERLKQSAEEQAQARAQAQAAAEKLRKEAEQEHPRGMRHPRGIAPQDKHPR

SEQ ID NO: 1024753 - protein, 579 aa, Homo sapiens [sequence omitted]

SEQ ID NO: 1024754 - protein, 561 aa, Homo sapiens
MRPWLRHLVLQALRNSRAFCGSHGKPAPLPVPQKIVATWEAISLGRQLVPEYFNFAHDVLDVWSRLEEAGHRPPNPAFWWVNGTGAEIKWSFEELGKQSRKAANVLGGACGLQPGDRMMLVLPRLPEWWLVSVACMRTGTVMIPGVTQLTEKDLKYRLQASRAKSIITSDSLAPRVDAISAECPSLQTKLLVSDSSRPGWLNFRELLREASTEHNCMRTKSRDPLAIYFTSGTTGAPKMVEHSQSSYGLGFVASGRRWVALTESDIFWNTTDTGWVKAAWTLFSAWPNGSCIFVHELPRVDAKVILNTLSKFPITTLCCVPTIFRLLVQEDLTRYQFQSLRHCLTGGEALNRDVREKWKHQTGVELYEGYGQSETVVICANPKGMVDDEGNVLPPGEEGNVAVRIRPTRPFCFFNCYLDNPEKTAASEQGDFYITGDRARMDKDGYFWFMGRNDDVINSSSYRIGPVEVESALAEHPAVLESAVVSSPDPIRGEVVKAFIVLTPAYSSHDPEALTRELQEHVKRVTAPYKYPRKVAFVSELPKTVSGKIQRSKLRSQEWGK

SEQ ID NO: 1024755 - protein, 581 aa, Homo sapiens
MRPWLRHLVLQALRNSRAFCGSHGKPAPLPVPQKIVATWEAISLGRQLVPEYFNFAHDVLDVWSRLEEAGHRPPNPAFWWVNGTGAEIKWSFEELGKQSRKAANVLGGACGLQPGDRMMLVLPRLPEWWLVSVACMRTGTVMIPGVTQLTEKDLKYRLQASRAKSIITSDSLAPRVDAISAECPSLQTKLLVSDSSRPGWLNFRELLREASTEHNCMRTKSRDPLAIYFTSGTTGAPKMVEHSQSSYGLGFVASGRRWVALTESDIFWNTTDTGWVKAAWTLFSAWPNGSCIFVHELPRVDAKVILNVPVSEPEALSDRRRGPQPDVREKWKHQTGVELYEGYGQSETVVICANPKGMKIKSGSMGKASPPYDVQIVDDEGNVLPPGEEGNVAVRIRPTRPFCFFNCYLDNPEKTAASEQGDFYITGDRARMDKDGYFWFMGRNDDVINSSRSSCLHFPPPFEDFMGVEGSPLEELFFPSSYRIGPVEVESALAEHPAVLESAVVSSPDPIRGEVVKAFIVLTPAYSSHDPEALTRELQEHVKRVTAPYKYPRKVAFVSELPKTVSGKIQRSKLRSQEWGK

SEQ ID NO: 1024756 - protein, 543 aa, Homo sapiens
MRPWLRHLVLQALRNSRAFCGSHGKPAPLPVPQKIVATWEAISLGRQLVPEYFNFAHDVLDVWSRLEEAGHRPPNPAFWWVNGTGAEIKWSFEELGKQSRKAANVLGGACGLQPGDRMMLVLPRLPEWWLVSVACMRTGTVMIPGVTQLTEKDLKYRLQASRAKSIITSDSLAPRVDAISAECPSLQTKLLVSDSSRPGWLNFRELLREASTEHNCMRTKSRDPLAIYFTSGTTGAPKMVEHSQSSYGLGFVASGRRWVALTESDIFWNTTDTGWVKAAWTLFSAWPNGSCIFVHELPRVDAKVILNTLSKFPITTLCCVPTIFRLLVQEDLTRYQFQSLRHCLTGGEALNRDVREKWKHQTGVELYEGYGQSETVVICANPKGMVDDEGNVLPPGEEGNVAVRIRPTRPFCFFNCYLDNPEKTAASEQGDFYITGDRARMDKDGYFWFMGRNDDVINSSSYRIGPVEVESALAEHPAVLESAVVSSPDPIRGEVVKAFIVLTPAYSSHDPEALTRELQEHVLPKTVSGKIQRSKLRSQEWGK

SEQ ID NO: 1024757 - protein, 561 aa, Homo sapiens; identical to SEQ ID NO: 1024754

SEQ ID NO: 1024758 - protein, 561 aa, Homo sapiens; identical to SEQ ID NO: 1024754

SEQ ID NO: 1024759 - protein, 130 aa, Homo sapiens [sequence omitted]

SEQ ID NO: 1024760 - protein, 298 aa, Homo sapiens
MRPWLRHLVLQALRNSRAFCGSHGKPAPLPVPQKIVATWEAISLGRQLVPEYFNFAHDVLDVWSRLEEAGHRPPNPAFWWVNGTGAEIKWSFEELGKQSRKAANVLGGACGLQPGDRMMLVLPRLPEWWLVSVACMRTGTVMIPGVTQLTEKDLKYRLQASRAKSIITSDSLAPRVDAISAECPSLQTKLLVSDSSRPGWLNFRELLREASTEHNCMRTKSRDPLAIYFTSGTTGGPQDGRALPEQLRTGFCGQRKVPEQLVSEDPRTESGEWSGGGGVRGKVSGTEVREPTELLRSQ

SEQ ID NO: 1024761 - protein, 579 aa, Homo sapiens [sequence omitted]

SEQ ID NO: 1024762 - protein, 608 aa, Homo sapiens
MRPWLRHLVLQALRNSRAFCGSHGKPAPLPVPQKIVATWEAISLGRQLVPEYFNFAHDVLDVWSRLEEAGHRPPNPAFWWVNGTGAEIKWSFEELGKQSRKAANVLGGACGLQPGDRMMLVLPRLPEWWLVSVACMRTGTVMIPGVTQLTEKDLKYRLQASRAKSIITSDSLAPRVDAISAECPSLQTKLLVSDSSRPGWLNFRELLREASTEHNCMRTKSRDPLAIYFTSGTTGAPKMVEHSQSSYGLGFVASGRRWVALTESDIFWNTTDTGWVKAAWTLFSAWPNGSCIFVHELPRVDAKVILNTLSKFPITTLCCVPTIFRLLVQEDLTRYQFQSLRHCLTGGEALNRDVREKWKHQTGVELYEGYGQSETVVICANPKGMKIKSGSMGKASPPYDVQIVDDEGNVLPPGEEGNVAVRIRPTRPFCFFNCYLDNPEKTAASEQGDFYITGDRARMDKDGYFWFMGRNDDVINSSRSSCLHFPPPFEDFMGVEGSPLEELFFPSSYRIGPVEVESALAEHPAVLESAVVSSPDPIRGEVVKAFIVLTPAYSSHDPEALTRELQEHVKRVTAPYKYPRKVAFVSELPKTVSGKIQRSKLRSQEWGK

SEQ ID NO: 1024763 - protein, 444 aa, Homo sapiens
MMLVLPRLPEWWLVSVACMRTGTVMIPGVTQLTEKDLKYRLQASRAKSIITSDSLAPRVDAISAECPSLQTKLLVSDSSRPGWLNFRELLREASTEHNCMRTKSRDPLAIYFTSGTTGAPKMVEHSQSSYGLGFVASGRRWVALTESDIFWNTTDTGWVKAAWTLFSAWPNGSCIFVHELPRVDAKVILNTLSKFPITTLCCVPTIFRLLVQEDLTRYQFQSLRHCLTGGEALNRDVREKWKHQTGVELYEGYGQSETVVICANPKGMVDDEGNVLPPGEEGNVAVRIRPTRPFCFFNCYLDNPEKTAASEQGDFYITGDRARMDKDGYFWFMGRNDDVINSSSYRIGPVEVESALAEHPAVLESAVVSSPDPIRGEVVKAFIVLTPAYSSHDPEALTRELQEHVKRVTAPYKYPRKVAFVSELPKTVSGKIQRSKLRSQEWGK

SEQ ID NO: 1024764 - protein, 543 aa, Homo sapiens; identical to SEQ ID NO: 1024756

SEQ ID NO: 1024765 - protein, 130 aa, Homo sapiens [sequence omitted]

SEQ ID NO: 1024766 - protein, 208 aa, Homo sapiens
MRPWLRHLVLQALRNSRAFCGSHGKPAPLPVPQKIVATWEAISLGRQLVPEYFNFAHDVLDVWSRLEEAGHRPPNPAFWWVNGTGAEIKWSFEELGKQSRKAANVLGGACGLQPGDRMMLVLPRLPEWWLVSVACMRTGTVMIPGVTQLTEKDLKYRLQASRAKSIITSDSLAPRVDAISAECPSLQTKLLVSDSSRPGWLNFRELLR

SEQ ID NO: 1024767 - protein, 927 aa, Homo sapiens
ARGRRRREPVAPVAPGRGRGRKMPVRRGHVAPQNTYLDTIIRKFEGQSRKFLIANAQMENCAIIYCNDGFCELFGYSRVEVMQQPCTCDFLTGPNTPSSAVSRLAQALLGAEECKVDILYYRKDASSFRCLVDVVPVKNEDGAVIMFILNFEDLAQLLAKCSSRSLSQRLLSQSFLGSEGSHGRPGGPGPGTGRGKYRTISQIPQFTLNFVEFNLEKHRSSSTTEIEIIAPHKVVERTQNVTEKVTQVLSLGADVLPEYKLQAPRIHRWTILHYSPFKAVWDWLILLLVIYTAVFTPYSAAFLLSDQDESRRGACSYTCSPLTVVDLIVDIMFVVDIVINFRTTYVNTNDEVVSHPRRIAVHYFKGWFLIDMVAAIPFDLLIFRTGSDETTTLIGLLKTARLLRLVRVARKLDRYSEYGAAVLFLLMCTFALIAHWLACICSLTSVGFGNVSPNTNSEKVFSICVMLIGSLMYASIFGNVSAIIQRLYSGTARYHTQMLRVKEFIRFHQIPNPLRQRLEEYFQHAWSYTNGIDMNAVLKGFPECLQADICLHLHRALLQHCPAFSGAGKGCLRALAVKFKTTHAPPGDTLVHLGDVLSTLYFISRGSIEILRDDVVVAILGKNDIFGEPVSLHAQPGKSSADVRALTYCDLHKIQRADLLEVLDMYPAFAESFWSKLEVTFNLRDAAGGLHSSPRQAPGSQDHQGFFLSDNQSRCSPSPEHLRCIWPLAELLQEMPPRHSPQSPQEDPDCWPLKLGSRLEQLQAQMNRLESRVSSDLSRILQLLQKPMPQGHASYILEAPASNDLALVPIASETTSPGPRLPQGFLPPAQTPSYGDLDDCSPKHRNSSPRMPHLAVATDKTLAPSSEQEQPEGLWPPLASPLHPLEVQGLICGPCFSSLPEHLGSVPKQLDFQRHGSDPGFAGSWGH

SEQ ID NO: 1024768 - protein, 994 aa, Homo sapiens
MPVRRGHVAPQNTYLDTIIRKFEGQSRKFLIANAQMENCAIIYCNDGFCELFGYSRVEVMQQPCTCDFLTGPNTPSSAVSRLAQALLGAEECKVDILYYRKDASSFRCLVDVVPVKNEDGAVIMFILNFEDLAQLLAKCSSRSLSQRLLSQSFLGSEGSHGRPGGPGPGTGRGKYRTISQIPQFTLNFVEFNLEKHRSSSTTEIEIIAPHKVVERTQNVTEKVTQVLSLGADVLPEYKLQAPRIHRWTILHYSPFKAVWDWLILLLVIYTAVFTPYSAAFLLSDQDESRRGACSYTCSPLTVVDLIVDIMFVVDIVINFRTTYVNTNDEVVSHPRRIAVHYFKGWFLIDMVAAIPFDLLIFRTGSDETTTLIGLLKTARLLRLVRVARKLDRYSEYGAAVLFLLMCTFALIAHWLACIWYAIGNVERPYLEHKIGWLDSLGVQLGKRYNGSDPASGPSVQDKYVTALYFTFSSLTSVGFGNVSPNTNSEKVFSICVMLIGSLMYASIFGNVSAIIQRLYSGTARYHTQMLRVKEFIRFHQIPNPLRQRLEEYFQHAWSYTNGIDMNAVLKGFPECLQADICLHLHRALLQHCPAFSGAGKGCLRALAVKFKTTHAPPGDTLVHLGDVLSTLYFISRGSIEILRDDVVVAILGKNDIFGEPVSLHAQPGKSSADVRALTYCDLHKIQRADLLEVLDMYPAFAESFWSKLEVTFNLRDAAGGLHSSPRQAPGSQDHQGFFLSDNQSGSPHELGPQFPSKGYSLLGPGSQNSMGAGPCAPGHPDAAPPLSISDASGLWPELLQEMPPRHSPQSPQEDPDCWPLKLGSRLEQLQAQMNRLESRVSSDLSRILQLLQKPMPQGHASYILEAPASNDLALVPIASETTSPGPRLPQGFLPPAQTPSYGDLDDCSPKHRNSSPRMPHLAVATDKTLAPSSEQEQPEGLWPPLASPLHPLEVQGLICGPCFSSLPEHLGSVPKQLDFQRHGSDPGFAGSWGH

SEQ ID NO: 1024769 - protein, 502 aa, Homo sapiens
MPVRRGHVAPQNTYLDTIIRKFEGQSRKFLIANAQMENCAIIYCNDGFCELFGYSRVEVMQQPCTCDFLTGPNTPSSAVSRLAQALLGAEECKVDILYYRKDASSFRCLVDVVPVKNEDGAVIMFILNFEDLAQLLAKCSSRSLSQRLLSQSFLGSEGSHGRPGGPGPGTGRGKYRTISQIPQFTLNFVEFNLEKHRSSSTTEIEIIAPHKVVERTQNVTEKVTQVLSLGADVLPEYKLQAPRIHRWTILHYSPFKAVWDWLILLLVIYTAVFTPYSAAFLLSDQDESRRGACSYTCSPLTVVDLIVDIMFVVDIVINFRTTYVNTNDEVVSHPRRIAVHYFKGWFLIDMVAAIPFDLLIFRTGSDETTTLIGLLKTARLLRLVRVARKLDRYSEYGAAVLFLLMCTFALIAHWLACIWYAIGNVERPYLEHKIGWLDSLGVQLGKRYNGSDPASGPSVQDKYVTALYFTFSSLTSVGFGNVSPNTNSEKVFSICVMLIGCE

SEQ ID NO: 1024770 - protein, 201 aa, Homo sapiens
WSSRACEAQASPAPRGLNKVLSHCHHAGSREKTQDHCLPQTLAEEPDAGQGQGMLGAGARGARGLRRCATCAERIPNAADPWPVPSSDLEWKLVALGQLGIAKGLEALRLGLDEQADYPEPLDSGHKNWPHILNNPGEQIYTGHLDKACTGWNATLRMWDSFKEDHGPLDASDAPVIIGPERPNATVETPCMETTNSHNSD

SEQ ID NO: 1024771 - protein, 31 aa, Homo sapiens
MARAWEVEVAVNHDSATALRPGQQSETLSPK

SEQ ID NO: 1024772 - protein, 111 aa, Homo sapiens
  misc_feature (6)..(6): Xaa can be any naturally occurring amino acid
  misc_feature (28)..(28): Xaa can be any naturally occurring amino acid
  misc_feature (57)..(58): Xaa can be any naturally occurring amino acid
MMQGGXYGSGGERYDSYESCDSRAVLSXRDLYRSGYDYSELDPEMEMAYEGQYDARXXSPMASGYGRMWEDPMGPGASACLGVSAALPLLPEHHPPSLRGGARVAEAGNQT

SEQ ID NO: 1024773 - protein, 149 aa, Homo sapiens
  misc_feature (136)..(136): Xaa can be any naturally occurring amino acid
MRSQLLSLAATTPSLGGPELSFYFTSTGFPLHFSLGDRARLRFGKKKKKKKKKKNLKIKEVHPCHSTQAELIFPCRFQDTFWPSAHSASCSLEQTERDSLRHRTFFFFFETEPGVTARPRLQKKKRGKLGACWLPXHGNSFCVISLGFL

SEQ ID NO: 1024774 - protein, 114 aa, Homo sapiens
  misc_feature (15)..(15): Xaa can be any naturally occurring amino acid
RPPEQQTAAWRCISXRTATSTLLSKFDVLGFGAGFRDSAVQIGFSDTLASQRMEPCSIRTSDTPKVRNRSRKAVTYARAICGARSPAPTMGLVTISINGTPARCSRSATSSLVN

SEQ ID NO: 1024775 - protein, 131 aa, Homo sapiens
MSDIEEVVEEYEEEEQEEAAVEEQEEAAEEDAEAEAETEETRAEEDEEEEEAKEAEDGPMEESKPKPRSFMPNLVPPKIPDGERVDFDDIHRKRMEKDLNELQALIEAHFENTEKEDEPDERLSQHDAFGG

SEQ ID NO: 1024776 - protein, 110 aa, Homo sapiens
MSDIEEVVEEYEEEEQEEAAVEEEEDLREDEDEQEEAAEEDAEAEAETEETRAEEDEEEEEAKEAEDGPMEESKPKPRSFMPNLVPPKIPDGERVDFDDIHRKRMEKDLN

SEQ ID NO: 1024777 - protein, 136 aa, Homo sapiens
APFSIFLAKQWRCFNQVSLTTAAIRNESHLASTCVASSCHTGLSWHSAHGTDICGSGQEPVDGALHRNAGLGMGDPACPTLLRAPPNSDNRLGSGLPEIRHPPAPLLRIPNGPDLAWKLSSTWLARKAANRDDDSE

SEQ ID NO: 1024778 - protein, 107 aa, Homo sapiens
VTRRVIVEEVGVSWRVVDSGDRFKVLAVVSWGSGVKWVAPPESSVLEDEMRRLLHRKGVEGYQWQPVQTTSPPRALRAVSILVPSSSDITSCCSAAKLWVSTVPSFV

SEQ ID NO: 1024779 - protein, 270 aa, Homo sapiens
MALRGPGLERPPLTCPELRQEQCCGGCQVGGAGPERRGGLGASTLSPGPDPLQPCVAQQPFPSLPSPLPLQGTLHSSPPGATGRPPLCLSEPSSVSPRPRCFLLPWGSPRPCPRQSQTGGSRGSPAPRPAESGSSSRTTEGGASCPPHPCHCPPAPSPTQGLENSWRQHREAAAYLHGRLQALGLQLFVKDPALRLPTVTTVAVPAGYDWRDIVSYVIDHFDIEIMGGLGPSTGKVLRIGLLGCNATRENVDRVTEALRAALQHCPKKKL

SEQ ID NO: 1024780 - protein, 410 aa, Homo sapiens
GSPSTNPHLSPLCPPCWEIFQALAKASAAPGSRAAGWVRTMASHKLLVTPPKALLKPLSIPNQLLLGPGPSNLPPRIMAAGGLQMIGSMSKDMYQIMDEIKEGIQYVFQTRNPLTLVISGSGHCALEAALVNVLEPGDSFLVGANGIWGQRAVDIGERIGARVHPMTKDPGGHYTLQEVEEGLAQHKPVLLFLTHGESSTGVLQPLDGFGELCHRYKCLLLVDSVASLGGTPLYMDRQGIDILYSGSQKALNAPPGTSLISFSDKANFWGCDDQPRMYHHTIPVISLYSLRESLALIAEQGLENSWRQHREAAAYLHGRLQALGLQLFVKDPALRLPTVTTVAVPAGYDWRDIVSYVIDHFDIEIMGGLGPSTGKVLRIGLLGCNATRENVDRVTEALRAALQHCPKKKL

SEQ ID NO: 1024781 - protein, 273 aa, Homo sapiens
GDAPASSSHAHHQGGVEAGPALLPGAVPPMGVVGVSGPCPLNSTTASLLPQGLAQHKPVLLFLTHGESSTGVLQPLDGFGELCHRYKCLLLVDSVASLGGTPLYMDRQKKMYSRKTKPFSFYLDIKWLANFWGCDDQPRMYHHTIPVISLYSLRESLALIAEQGLENSWRQHREAAAYLHGRLQALGLQLFVKDPALRLPTVTTVAVPAGYDWRDIVSYVIDHFDIEIMGGLGPSTGKVLRIGLLGCNATRENVDRVTEALRAALQHCPKKKL

SEQ ID NO: 1024782 - protein, 392 aa, Homo sapiens
MASHKLLVTPPKALLKPLSIPNQLLLGPGPSNLPPRIMAAGGLQMIGSMSKDMYQIMDEIKEGIQYVFQTRNPLTLVISGSGHCALEAALVNVLEPGDSFLVGANGIWGQRAVDIGERIGARVHPMTKDPGGHYTLQEVEEGLAQHKPVLLFLTHGESSTGVLQPLDGFGELCHRYKCLLLVDSVASLGGTPLYMDRQGIDILYSGSQKALNAPPGTSLISFSDKAKKKMYSRKTKPFSFYLDIKWLANFWGCDDQPRMYHHTIPVISLYSLRESLALIAEQGLENSWRQHREAAAYLHGRLQALGLQLFVKDPALRLPTVTTVAVPAGYDWRDIVSYVIDHFDIEIMGGLGPSTGKVLRIGLLGCNATRENVDRVTEALRAALQHCPKKKL

SEQ ID NO: 1024783 - protein, 392 aa, Homo sapiens
MASHKLLVTPPKALLKPLSIPNQLLLGPGPSNLPPRIMAAGGLQMIGSMSKDMYQIMDEIKEGIQYVFQTRNPLTLVISGSGHCALEAALVNVLEPGDSFLVGANGIWGQRAVDIGERIGARVHPMTKDPGGHYTLQEVEEGLAQHKPVLLFLTHGESSTGVLQPLDGFGELCHRYKCLLLVDSVAFLGGTPLYMDRQGIDILYSGSQKALNAPPGTSLISFSDKAKKKMYSRKTKPFSFYLDIKWLANFWGCDDQPRMYHHTIPVISLYSLRESLALIAEQGLENSWRQHREAAAYLHGRLQALGLQLFVKDPALRLPTVTTVAVPAGYDWRDIVSYVIDHFDIEIMGGLGPSTGKVLRIGLLGCNATRENVDRVTEALRAALQHCPKKKL

SEQ ID NO: 1024784 - protein, 134 aa, Homo sapiens [sequence omitted]

SEQ ID NO: 1024785 - protein, 186 aa, Homo sapiens
MSDNDDIEVESDEEQARFQSAADKRAHHNALERKRRDHIKDSFHSLRDSVPSLQGEKASRAQILDKATEYIQYMRRKNHTHQQDIDDLKRQNALLEQQVRALDEGEVNVPNLETKYHHPQTRASTPTPRAGTISAFDVGLGLQLGSPDPEDAPKQEEAPDWIARISHLGARASNNRLYCLTIVIII

SEQ ID NO: 1024786 - protein, 113 aa, Homo sapiens
MSDNDDIEVESDEEQARFQSAADKRAHHNALERKRRDHIKDSFHSLRDSVPSLQGEKLYFLFGKLCAPVLHRPKLMRDNATGMTFSSYPRCSKRREMLRFKDIAGSGPLTQMS

SEQ ID NO: 1024787 - protein, 113 aa, Homo sapiens
MRRKNHTHQQDIDDLKRQNALLEQQVRALDEGEVNVPNLETKYHHPQTRASTPTPRAGTISAFDVVARTPARKSDPEDAPKQGRSSGLDCQNKPPRGKGQQQQTVLSHIVIII

SEQ ID NO: 1024788 - protein, 76 aa, Homo sapiens
  misc_feature (57)..(57): Xaa can be any naturally occurring amino acid
SHRHKGKKRNPENEKLPAKAVYDFKAQTSKELSFKKGDTVYILRKIDQNLVFEGEHXRESGHLPDLIRRETHTSLR

SEQ ID NO: 1024789 - protein, 153 aa, Homo sapiens
MSSGAHGEEGSVRMWKTLTFFVALPGVAVSMLKCVPEVAPRRARETRVSSPSPNLRIRTKPFPWGDGNHTLFHNPHVNPTSKLATKMNKENLGTTYPGTRDHQTLVWTVTSAHGGRKSIWDLELTVSVDFVSRSDDVVYWSSRIPYAVWQEMA

SEQ ID NO: 1024790 - protein, 725 aa, Homo sapiens
MGLSLPKEKGLILCLWSKFCRWFQRRESWAQSRDEQNLLQQKRIWESPLLLAAKDNDVQALNKLLKYEDCKVHQRGAMGETALHIAALYDNLEAAMVLMEAAPELVFEPMTSELYEGQTALHIAVVNQNMNLVRALLARRASVSARATGTAFRRSPRNLIYFGEHPLSFAACVNSEEIVRLLIEHGADIRAQDSLGNTVLHILILQPNKTFACQMYNLLLSYDRHGDHLQPLDLVPNHQGLTPFKLAGVEGNTVMFQHLMQKRKHTQWTYGPLTSTLYDLTEIDSSGDEQSLLELIITTKKREARQILDQTPVKELVSLKWKRYGRPYFCMLGAIYLLYIICFTMCCIYRPLKPRTNNRTSPRDNTLLQQKLLQEAYVTPKDDIRLVGELVTVIGAIIILLVEVPDIFRMGVTRFFGQTILGGPFHVLIITYAFMVLVTMVMRLISASGEVVPMSFALVLGWCNVMYFARGFQMLGPFTIMIQKMIFGDLMRFCWLMAVVILGFASAFYIIFQTEDPEELGHFYDYPMALFSTFELVLTIIDGPANYNVDLPFMYSITYAAFAIIATLLMLNLLIAMMGDTHWRVAHERDELWRAQIVATTVMLERKLPRCLWPRSGICGREYGLGDRWFLRVEDRQDLNRQRIQRYAQAFHTRGSEDLDKDSVEKLELGCPFSPHLSLPTPSVSRSTSRSSANWERLRQGTLRRDLRGIINRGLEDGESWEYQI

SEQ ID NO: 1024791 - protein, 106 aa, Homo sapiens
MYVENHCSRPALLLQLWGRGSPAQARGWQGVRNSPVACSSPFRQEHCMSEHFKNRPACLGARSPPQGHKWGESPSQGTQAGAGKCRACGKRVSEGDRNGSGGGKWG

SEQ ID NO: 1024792 - protein, 538 aa, Homo sapiens
MNLVRALLARRASVSARATGTAFRRSPCNLIYFGEHPLSFAACVNSEEIVRLLIEHGADIRAQDSLGNTVLHILILQPNKTFACQMYNLLLSYDRHGDHLQPLDLVPNHQGLTPFKLAGVEGNTVMFQHLMQKRKHTQWTYGPLTSTLYDLTEIDSSGDEQSLLELIITTKKREARQILDQTPVKELVSLKWKRYGRPYFCMLGAIYLLYIICFTMCCIYRPLKPRTNNRTSPRDNTLLQQKLLQEAYMTPKDDIRLVGELVTVIGAIIILLVEVPDIFRMGVTRFFGQTILGGPFHVLIITYAFMVLVTMVMRLISASGEVVPMSFALVLGWCNVMYFARGFQMLGPFTIMIQKMIFGDLMRFCWLMAVVILGFASAFYIIFQTEDPEELGHFYDYPMALFSTFELFLTIIDGPANYNVDLPFMYSITYAAFAIIATLLMLNLLIAMMGDTHWRVAHERDELWRAQIVATTVMLERKLPRCLWPRSGICGREYGLGDRWFLRPAWALGLHPRVISGERALPRAPRQVQGSAELVESV

SEQ ID NO: 1024793 - protein, 260 aa, Homo sapiens
NSQPSPNWLGLLGDSQGTRQEGRRQETGPLQGDGGPALGGADVAPRLSPVRVWPRPQAPKEPALHPMGLSLPKEKGLILCLWSKFCRWFQRRESWAQSRDEQNLLQQKRIWESPLLLAAKDNDVQALNKLLKYEDCKVHQRGKKHKCSMISKVSPTHGASQEAQDLVLLASESIVSNPLSHRSHITHLSVKPGAMGETALHIAALYDNLEAAMVLMEAAPELVFEPMTSELYEGEGHGSGVKSRSDWLGISRQFSVMDII

SEQ ID NO: 1024794 - protein, 503 aa, Homo sapiens
MNLVRALLARRASVSARATGTAFRRSPCNLIYFGEHPLSFAACVNSEEIVRLLIEHGADIRAQDSLGNTVLHILILQPNKTFACQMYNLLLSYDRHGDHLQPLDLVPNHQGLTPFKLAGVEGNTVMFQHLMQKRKHTQWTYGPLTSTLYDLTEIDSSGDEQSLLELIITTKKREARQILDQTPVKELVSLKWKRYGRPYFCMLGAIYLLYIICFTMCCIYRPLKPRTNNRTSPRDNTLLQQKLLQEAYMTPKDDIRLVGELVTVIGAIIILLVEVPDIFRMGVTRFFGQTILGGPFHVLIITYAFMVLVTMVMRLISASGEVVPMSFALVLGWCNVMYFARGFQMLGPFTIMIQKMIFGDLMRFCWLMAVVILGFASAFYIIFQTEDPEELGHFYDYPMALFSTFELFLTIIDGPANYNVDLPFMYSITYAAFAIIATLLMLNLLIAMMGDTHWRVAHERDELWRAQIVATTVMLERKLPRCLWPRSGICGREYGLGDRWFLR

SEQ ID NO: 1024795 - protein, 106 aa, Homo sapiens; identical to SEQ ID NO: 1024791

SEQ ID NO: 1024796 - protein, 106 aa, Homo sapiens; identical to SEQ ID NO: 1024791

SEQ ID NO: 1024797 - protein, 725 aa, Homo sapiens; identical to SEQ ID NO: 1024790

SEQ ID NO: 1024798 - protein, 195 aa, Homo sapiens
EVAVRGLLHSERSRGPDGSACPELSASPRPPAEAARAQSCGPSSSAESSPSSSAMAGWNAYIDNLMADGTCHGRGHRGLQGLALRLGPPSPGKRSSTSPPAEVGVLVGKDRSSFYVNGLTLGGQKCSVIRDSLLQDGEFSMDLRTKSTGGAPTFNVTVTKTDKTLVLLMGKEGVHGGLINKKCYEMASHLRRSQY

SEQ ID NO: 1024799 - protein, 130 aa, Homo sapiens
EVAVRGLLHSERSRGPDGSACPELSASPRPPAEAARAAGGAGGGAERREASKPLRLVGTPTVDNTSCADRRAVRDRGTIVGLQWKSPFRTMEPAGPACKNSPITQSTAQAWIDGDDPSDGAKDPESKYHT

SEQ ID NO: 1024800 - protein, 195 aa, Homo sapiens; identical to SEQ ID NO: 1024798

SEQ ID NO: 1024801 - protein, 195 aa, Homo sapiens; identical to SEQ ID NO: 1024798

SEQ ID NO: 1024802 - protein, 113 aa, Homo sapiens
MCYMRNGRSPTPLRALFPRVLELSLCLCAPLPALPPPLPHHSLCTPSSSPHITTTTTTFNFLGHIIPTYPLILRAQNHTHGLGARAGWTDTSPYPYPSRVWLENFCFLGFFFS

SEQ ID NO: 1024803 - protein, 195 aa, Homo sapiens; identical to SEQ ID NO: 1024798

SEQ ID NO: 1024804 - protein, 74 aa, Homo sapiens
MPLGLRAAFVCTRVKPHSHTCTHAHAHTRTRSYTLTHTCAHTHTRTHTFIHTLTRSHTRSHTHAHMVTGTHVLQ

SEQ ID NO: 1024805 - protein, 433 aa, Homo sapiens
MSSEDRHLGSSCGSFIKTEPSSPSSGIDALSHHSPSGSSDASGGFGMALGTHANGLDSPPMFAGAGLGGNPCRKSYEDCTSGIMEDSAIKCEYMLNAIPKRLCLVCGDIASGYHYGVASCEACKAFFKRTIQGNIEYSCPATNECEITKRRRKSCQACRFMKCLKVGMLKEGVRLDRVRGGRQKYKRRLDSENSPYLSLQISPPAKKPLTKIVSYLLVAEPDKLYAMPPDDVPEGDIKALTTLCDLADRELVFLISWAKHIPGFSNLTLGDQMSLLQSAWMEILILGIVYRSLPYDDKLAYAEDYIMDEEHSRLVGLLELYRAILQLVRRYKKLKVEKEEFVMLKALALANSDSMYIENLEAVQKLQDLLHEALQDYELSQRHEEPRRAGKLLLTLPLLRQTAAKAVQHFYSVKLQGKVPMHKLFLEMLEAKV

SEQ ID NO: 1024806 - protein, 125 aa, Homo sapiens
MSMKEVDEQMLNVQNKNSSYFVEWIPNNVKTAVCNIPPRGLKMSATFISNSTAIQELFKRISEQFTAMFRRKALLHWYTGEGMDEMEFTEAQSHMNDLVSEYQQYQDATADEQGEFEEEEGEDEA

SEQ ID NO: 1024807 - protein, 38 aa, Homo sapiens
LSDSGFYLCAWRQRYGYTFGSGTRLTVVEDLNKVFPPE

SEQ ID NO: 1024808 - protein, 44 aa, Homo sapiens
SSPRSQGTQHCISVPAARQDYGYTFGSGTRLTVVEDLNKVFPPE

SEQ ID NO: 1024809 - protein, 46 aa, Homo sapiens
SSPRSQGTQHCISVPAARQDWNQPQHFGDGTRLSILEDLNKVFPPE

SEQ ID NO: 1024810 - protein, 41 aa, Homo sapiens
SCPQNRETRHCISRQHIDGYTFGSGTRLTVVEDLNKVFPPE

SEQ ID NO: 1024811 - protein, 37 aa, Homo sapiens
HISLQRWCRDMDNYGYTFGSGTRLTVVEDLNKVFPPE

SEQ ID NO: 1024812 - protein, 33 aa, Homo sapiens
LCASSLMGGGWLHLRFGDQVNRCRGPEQGVPTR

SEQ ID NO: 1024813 - protein, 36 aa, Homo sapiens
FYICSPVPLRGDYGYTFGSGTRLTVVEDLNKVFPPE

SEQ ID NO: 1024814 - protein, 42 aa, Homo sapiens
ASTNQTSMYLCASSFSTENGYTFGSGTRLTVVEDLNKVFPPE

SEQ ID NO: 1024815 - protein, 31 aa, Homo sapiens
LCRGETSHGYTFGSGTRLTVVEDLNKVFPPE

SEQ ID NO: 1024816 - protein, 36 aa, Homo sapiens
CASSQETDIVWNQPQHFGDGTRLSILEDLNKVFPPE

SEQ ID NO: 1024817 - protein, 40 aa, Homo sapiens
LSDSGFYLCAWRQRWNQPQHFGDGTRLSILEDLNKVFPPE

SEQ ID NO: 1024818 - protein, 43 aa, Homo sapiens
SCPQNRETRHCISRQHTGNQPQHFGDGTRLSILEDLNKVFPPE

SEQ ID NO: 1024819 - protein, 51 aa, Homo sapiens
SCPQNRETRHCISRQHIRPGQRVGTLGSPLHFGNGTRLTVTRGPEQGVPTR

SEQ ID NO: 1024820 - protein, 44 aa, Homo sapiens
ASTNQTSMYLCASSFSTERNQPQHFGDGTRLSILEDLNKVFPPE

SEQ ID NO: 1024821 - protein, 35 aa, Homo sapiens
FAPAAPDRDGVDGYTFGSGTRLTVVEDLNKVFPPE

SEQ ID NO: 1024822 - protein, 34 aa, Homo sapiens
CASSYSAASGHGYTFGSGTRLTVVEDLNKVFPPE

SEQ ID NO: 1024823 - protein, 35 aa, Homo sapiens
LCASSGRLFRNQPQHFGDGTRLSILEDLNKVFPPE

SEQ ID NO: 1024824 - protein, 34 aa, Homo sapiens
YFCAGRQDHNSPLHFGNGTRLTVTRGPEQGVPTR

SEQ ID NO: 1024825 - protein, 114 aa, Homo sapiens
MNSFSSFSFITDVLFERGALHQHRVDCGSERNLRICSRALFSSQGRLPSCGAPRRRPPAASCTSCAGASAAPTRPPHSARPTLPNSAEPSSPPSPRAPTWCRARDLPGAMRRRS

SEQ ID NO: 1024826 - protein, 134 aa, Homo sapiens
MSSFSTTTVSFLLLLAFQLLGQTRANSMYNAVSNADLMDFKNLLDHLEEKMPLEDEVVPHKCSVSRMKKRGCSQPPPEVPSWTREAAQPREMEVPLGAPGPPLIDLPPKEAEALLTALGPRRPLSGQMQMPNGW

SEQ ID NO: 1024827 - protein, 114 aa, Homo sapiens
KSPEIIDMSHCAWPVITSLRSYSCVERHRTHRSNGNILHTQKETHTQTKPLFTSKEFLSHSCLIPCIQRSYFFPLITFILHWSDVFCFVCVCVSEFFRAQLSRGWSSVCHTGFS

SEQ ID NO: 1024828 - protein, 58 aa, Homo sapiens
  misc_feature (22)..(22): Xaa can be any naturally occurring amino acid
  misc_feature (24)..(24): Xaa can be any naturally occurring amino acid
  misc_feature (28)..(29): Xaa can be any naturally occurring amino acid
  misc_feature (41)..(41): Xaa can be any naturally occurring amino acid
  misc_feature (45)..(45): Xaa can be any naturally occurring amino acid
  misc_feature (51)..(52): Xaa can be any naturally occurring amino acid
MRLGSSKLRVKPAPSRSFEQNXVXEDPXXQPRKPTVPGAIXDKLXPMLPYXXPVILAI

SEQ ID NO: 1024829 - protein, 126 aa, Homo sapiens
MGLLEVRSQLKQEEEEEEAAAFSRAEHDKVSEEAESQQQWDTSKGEQVSQNGLPAEQGSPRMAETVDTSEMVNGATEQRTSSKESSPIPFPTSDRKPDCLPARVRTYSRPEHWPVEVLMEQVEPHR

SEQ ID NO: 1024830 - protein, 328 aa, Homo sapiens
MGLLEVRSQLKQEEEEEEAAAFSRAEHDKVSEEAESQQQWDTSKGEQVSQNGLPAEQGSPRMAETVDTSEMVNGATEQRTSSKESSPIPFPTSDRKAKIAFQAQMAATLPAGTKKTPSAQMEGFLNRKHEWEAHIMKASSRSWHKVNGDINNQERVLYKGAKTAASGIPYHSEVPVSLKEAVCEVALDYQRKHVFKLRLNDGSEYLFQAKDDEEMNTWIQAISSAISSDKHEVSASTQSTPASSRAQTLPTSVVTISRESSPGKREKDKEKDKEKRDSLKGQTEMNSFPSPPALVLPTPPKIRKQSSDTNTLNHMEEHQATESNVFGL

SEQ ID NO: 1024831 - protein, 224 aa, Homo sapiens
MNNTNQTKYTPQAKPGDRLLLRITKYTLTPDKIEKINNKNKTIQQKKYQNANNNTHQVRHTHKTTHTKRAKINTKHSNKQNTDKQHTTENDKTKTKIENKETNIRKTRVRHQKQRKRQQQMTNNNRATKKKQNRISEPTSRTKTRRTQHQTPRHTAQTKQRTQYAEKGQSNTGKKSDKHNRTKTNRREQMKQQDRERHNEQGREEQKTKKQKEGKNKYEDTRMH

SEQ ID NO: 1024832 - protein, 142 aa, Homo sapiens
PLSLTFRCLIAAIMGRMHAPGKGLSQSALPYRRSVPTWLKLTSDDVKEQIYKLAKKGLTPSQIGVILRDSHGVAQVRFVTGNKILRILKSKGLAPDLPEDLYHLIKKAVAVRKHLERNRKDKDAKFRLILIESRIHRCGSIL

SEQ ID NO: 1024833 - protein, 117 aa, Homo sapiens
PLSLTFRCLIAAIMGRMHAPGKGLSQSALPYRRSVPTWLKLTSDDVKEQIYKLAKKGLTPSQIGVILRDSHGVAQVRFVTGNKILRILKSRTALTSKAYINKNEVVGRLEGKRNGES

SEQ ID NO: 1024834 - protein, 195 aa, Homo sapiens
IISSGNITGAYTFLVNVLEQQDVKLLEEPMAGRQTQPKQKTEESDDEAAVEEEEEEKKPKINKVAQTVWDWELMNDIKPIWQRPSKEVEEDEYKAFYKSFSKESDDPMAYIHFTAEGEVPPNQFNLYHHLLHVVCLTSMDLKERYIKLYVRVYSSQTLHDMMPNTHLSGCVTQMISLNVPRSSQHITAKVIGELS

SEQ ID NO: 1024835 - protein, 67 aa, Homo sapiens
SQVGTGEENSPVQSVFDKGLGNPSLSYTCLIFAELFPGTDLFYCVVLPGPSKEVKENIMSEHLPGHV

SEQ ID NO: 1024836 - protein, 122 aa, Homo sapiens
VVTIRETALLIDPKISCSSSRQWVALVVGHELAHQWFGNLVTMEWWTHLWLNEGFASWIEYVCVDHCFPEYDIWTQFVSADYTRAQELDALDNSHPIEYYRLSASCHNPESHCLPGQCGPSI

SEQ ID NO: 1024837 - protein, 251 aa, Homo sapiens
  misc_feature (202)..(202): Xaa can be any naturally occurring amino acid
  misc_feature (205)..(205): Xaa can be any naturally occurring amino acid
  misc_feature (247)..(247): Xaa can be any naturally occurring amino acid
MLNKQQSEDDVRRLFEAFGNIEECTILRGPDGNSKGCAFVKYSSHAEARPPFNALTRQPDHAGSLRPVWWSSFADTDKERTMRRMQQMVGQMGMFNPMAIPFGAYGAYAQALMQQQAALMASVAQGGYLNPMAAFAAAQMQQMAALNMIWAGSRTYDPNLSGSTPPGITAPAVPSIPSPMWVNGFTGLPLRPMGSVLRNVCXPMXIHRTQHRAPRQPTPCSRPTLELQSIEDVPSLLPMVRLARPFXSDGE

SEQ ID NO: 1024838 - protein, 99 aa, Homo sapiens
  misc_feature (91)..(91): Xaa can be any naturally occurring amino acid
ALPPRPSLESSSHGPTLPYGRGLNKGHKVTKNVSKPRHSERRGSVAKHTKFVRDMIPGRLCGFAPYERRAMELLKVSKDKPGPQIYQEKGXGRTSGAKR

SEQ ID NO: 1024839 - protein, 131 aa, Homo sapiens
  misc_feature (75)..(76): Xaa can be any naturally occurring amino acid
QILYGENIVKFRFSQQTAFQNDFTYTLTGFGTDFTHDVTVVVTDERVQVSNDTDRVVNVTFAHFFVSSDANLVEXXRLQRIHFSISIAPEQPVNTFSVSRLALALAFDVTLTACSSTPPDQRPSDQTAPGT

SEQ ID NO: 1024840 - protein, 137 aa, Homo sapiens
  misc_feature (16)..(16): Xaa can be any naturally occurring amino acid
  misc_feature (27)..(28): Xaa can be any naturally occurring amino acid
  misc_feature (30)..(30): Xaa can be any naturally occurring amino acid
  misc_feature (36)..(36): Xaa can be any naturally occurring amino acid
  misc_feature (60)..(60): Xaa can be any naturally occurring amino acid
  misc_feature (83)..(83): Xaa can be any naturally occurring amino acid
  misc_feature (104)..(104): Xaa can be any naturally occurring amino acid
  misc_feature (108)..(108): Xaa can be any naturally occurring amino acid
  misc_feature (130)..(130): Xaa can be any naturally occurring amino acid
MPSVSTLWAGGSLILXTGGSVVYVKRXXVXGDIEGXCLAPSCVYREVKPRRTAPCRLVGXLVEMEEEAIGLALGIQVGVVGEXVHLASGLWELRKLLILLKMLXQERXGMYPWGQGITCPISKGLFSCCXIPGRPSL

SEQ ID NO: 1024841 - protein, 36 aa, Homo sapiens
PLVGEVVVAPAATLRRRDPAALARRSSSRTRSRDQP

SEQ ID NO: 1024842 - protein, 528 aa, Homo sapiens
MPTPDATTPQAKGFRRAVSELDAKQAEAIMVRGQGAPGPSLTGSPWPGTAAPAASYTPTPRSPRFIGRRQSLIEDARKEREAAVAAAAAAVPSEPGDPLEAVAFEEKEGKAVLNLLFSPRATKPSALSRAVKVFETFEAKIHHLETRPAQRPRAGGPHLEYFVRLEVRRGDLAALLSGVRQVSEDVRSPAGPKVPWFPRKVSELDKCHHLVTKFDPDLDLDHPGFSDQVYRQRRKLIAEIAFQYRHGDPIPRVEYTAEEIATWKEVYTTLKGLYATHACGEHLEAFALLERFSGYREDNIPQLEDVSRFLKERTGFQLRPVAGLLSARDFLASLAFRVFQCTQYIRHASSPMHSPEPDCCHELLGHVPMLADRTFAQFSQDIGLASLGASDEEIEKLSTLSWFTVEFGLCKQNGEVKAYGAGLLSSYGELLHCLSEEPEIRAFDPEAAAVQPYQDQTYQSVYFVSESFSDAKDKLRSYASRIQRPFSVKFDPYTLAIDVLDSPQAVRRSLEGVQDELDTLAHALSAIG

SEQ ID NO: 1024843 - protein, 497 aa, Homo sapiens
MPTPDATTPQAKGFRRAVSELDAKQAEAIMSPRFIGRRQSLIEDARKEREAAVAAAAAAVPSEPGDPLEAVAFEEKEGKAVLNLLFSPRATKPSALSRAVKVFETFEAKIHHLETRPAQRPRAGGPHLEYFVRLEVRRGDLAALLSGVRQVSEDVRSPAGPKVPWFPRKVSELDKCHHLVTKFDPDLDLDHPGFSDQVYRQRRKLIAEIAFQYRHGDPIPRVEYTAEEIATWKEVYTTLKGLYATHACGEHLEAFALLERFSGYREDNIPQLEDVSRFLKERTGFQLRPVAGLLSARDFLASLAFRVFQCTQYIRHASSPMHSPEPDCCHELLGHVPMLADRTFAQFSQDIGLASLGASDEEIEKLSTLSWFTVEFGLCKQNGEVKAYGAGLLSSYGELLHCLSEEPEIRAFDPEAAAVQPYQDQTYQSVYFVSESFSDAKDKLRSYASRIQRPFSVKFDPYTLAIDVLDSPQAVRRSLEGVQDELDTLAHALSAIG

SEQ ID NO: 1024844 - protein, 537 aa, Homo sapiens
HLCLFLLLSLFLLLLPKTFEAKIHHLETRPAQRPRAGGPHLEYFVRLEVRRGDLAALLSGVRQVSEDVRSPAGPKVPWFPRKVSELDKCHHLVTKFDPDLDLDHPGFSDQVYRQRRKLIAEIAFQYRQLRGPCARDPDSVLQADAGPGGWEGRTKGRTHLVTSISASCQAALLQGFPCPQIPVGKLRPRGARATCRGHIAGSRHSQLGCTLLSILQPKGLAALGGCGPVPSEAPSLPPALLTPRGDLLTTGPLPSGDPIPRVEYTAEEIATWKEVYTTLKGLYATHACGEHLEAFALLERFSGYREDNIPQLEDVSRFLKERTGFQLRPVAGLLSARDFLASLAFRVFQCTQYIRHASSPMHSPEPDCCHELLGHVPMLADRTFAQFSQDIGLASLGASDEEIEKLSTLYWFTVEFGLCKQNGEVKAYGAGLLSSYGELLHCLSEEPEIRAFDPEAAAVQPYQDQTYQSVYFVSESFSDAKDKLRSYASRIQRPFSVKFDPYTLAIDVLDSPQAVRRSLEGVQDELDTLAHALSAIG

SEQ ID NO: 1024845 - protein, 444 aa, Homo sapiens
DLHTEPCPPPTPPRHRPRASAGPCLSWTPSRQRPSWATKPSALSRAVKVFETFEAKIHHLETRPAQRPRAGGPHLEYFVRLEVRRGDLAALLSGVRQVSEDVRSPAGPKVPWFPRKVSELDKCHHLVTKFDPDLDLDHPGFSDQVYRQRRKLIAEIAFQYRHGDPIPRVEYTAEEIATWKEVYTTLKGLYATHACGEHLEAFALLERFSGYREDNIPQLEDVSRFLKERTGFQLRPVAGLLSARDFLASLAFRVFQCTQYIRHASSPMHSPEPDCCHELLGHVPMLADRTFAQFSQDIGLASLGASDEEIEKLSTLYWFTVEFGLCKQNGEVKAYGAGLLSSYGELLHCLSEEPEIRAFDPEAAAVQPYQDQTYQSVYFVSESFSDAKDKLRSYASRIQRPFSVKFDPYTLAIDVLDSPQAVRRSLEGVQDELDTLAHALSAIG

SEQ ID NO: 1024846 - protein, 387 aa, Homo sapiens
DLHTEPCPPPTPPRHRPRASAGPCLSWTPSRQRPSWATKPSALSRAVKVFETFEAKIHHLETRPAQRPRAGGPHLEYFVRLEVRRGDLAALLSGVRQVSEDVRSPAGPKVPWFPRKVSELDKCHHLVTKFDPDLDLDHPGFSDQVYRQRRKLIAEIAFQYRHGDPIPRVEYTAEEIATWKEVYTTLKGLYATHACGEHLEAFALLERFSGYREDNIPQLEDVSRFLKERTGFQLRPVAGLLSARDFLASLAFRVFQCTQYIRHASSPMHSPEPDCCHELLGHVPMLADRTFAQFSQDIGLASLGASDEEIEKLSTLYWFTVEFGLCKQNGEVKAYGAGLLSSYGELLHCLSEEPEIRAFDPEAAAVQPYQDQTYQSVYFVSELSAIG

SEQ ID NO: 1024847 - protein, 543 aa, Homo sapiens
MPTPDATTPQAKGFRRAVSELDAKQAEAIMVRGQGAPGPSLTGSPWPGTAAPAASYTPTPRSPRFIGRRQSLIEDARKEREAAVAAAAAAVPSEPGDPLEAVAFEEKEGKAVLNLLFSPRATKPSALSRAVKVFETFEAKIHHLETRPAQRPRAGGPHLEYFVRLEVRRGDLAALLSGVRQVSEDVRSPAGPKVPWFPRKVSELDKCHHLVTKFDPDLDLDHPGFSDQVYRQRRKLIAEIAFQYRHGDPIPRVEYTAEEIATWKEVYTTLKGLYATHACGEHLEAFALLERFSGYREDNIPQLEDVSRFLKERTGFQLRPVAGLLSARDFLASLAFRVFQCTQYIRHASSPMHSPEPDCCHELLGHVPMLADRTFAQFSQVRLRPRREPGVTQGWLGAGGGRGSMCGWVKCAACSRAPPRRLGAPRVARHRAGLERSLPRPVLPPAGYLGTAPTGLRIWSRRAAWRRRPGVGADPGRPGKVSAAREVSQRPLEGLLTPPVPPPRALTQGFASPPSFILPAPQDIGLASLGASDEEIEKLSTVG

SEQ ID NO: 1024848 - protein, 476 aa, Homo sapiens
DLHTEPCPPPTPPRHRPRASAGPCLSWTPSRQRPSWATKPSALSRAVKVFETFEAKIHHLETRPAQRPRAGGPHLEYFVRLEVRRGDLAALLSGVRQVSEDVRSPAGPKVPWFPRKVSELDKCHHLVTKFDPDLDLDHPGFSDQVYRQRRKLIAEIAFQYRHGDPIPRVEYTAEEIATWKEVYTTLKGLYATHACGEHLEAFALLERFSGYREDNIPQLEDVSRFLKERTGFQLRPVAGLLSARDFLASLAFRVFQCTQYIRHASSPMHSPEPDCCHELLGHVPMLADRTFAQFSQDIGLASLGASDEEIEKLSTLYWFTVEFGLCKQNGEVKAYGAGLLSSYGELLHCLSEEPEIRAFDPEAAAVQPYQDQTYQSVYFVSESFSDAKDKLRSYASRIQRPFSVKFDPYTLAIDVLDSPQAVRRSLEGVKNDLGSITYFSLESARGFTESPSWFIHRQDFAMERMHGSRRGEDILK

SEQ ID NO: 1024849 - protein, 222 aa, Homo sapiens
LKGVARAASLVGRRRAGTGMALLLCLVCLTAALAHGCLHCHSNFSKKFSFYRHHVNFKSWWVGDIPVSGALLTDWSDDTMKELHLAIPAKITREKLDQVATAVYQMMDQLYQGKMYFPGYFPNELRNIFREQVHLIQNAIIESRIDCQHRCGIFQYETISCNNCTDSHVACFGYNCESSAQWKSAVQGLLNYINNWHKQDTSMRPRSSAFSWPGTHRATPAL

SEQ ID NO: 1024850 - protein, 251 aa, Homo sapiens
LKGVARAASLVGRRRAGTGMALLLCLVCLTAALAHGCLHCHSNFSKKFSFYRHHVNFKSWWVGDIPVSGALLTDWSDDTMKELHLAIPAKITREKLDQVATAVYQMMDQLYQGKMYFPGYFPNELRNIFREQVHLIQNAIIESRIDCQHRCGIFQYETISCNNCTDSHVACFGYNCESSAQWKSAVQGLLNYINNWHKQDTSMRPRSSAFSWPGTHRATPAFLVSPALRCLEPPHLANLTLEDAAECLKQH

SEQ ID NO: 1024851 - protein, 227 aa, Homo sapiens
LKGVARAASLVGRRRAGTGMALLLCLVCLTAALAHGCLHCHSNFSKKFSFYRHHVNFKSWWVGDIPVSGALLTDWSDDTMKELHLAIPAKITREKLDQVATAVYQMMDQLYQGKMYFPGYFPNELRNIFREQVHLIQNAIIESRIDCQHRCGIFQYETISCNNCTDSHVACFGYNCESSAQWKSAVQGLLNYINNWHNLVSPALRCLEPPHLANLTLEDAAECLKQH

SEQ ID NO: 1024852 - protein, 124 aa, Homo sapiens
  misc_feature (18)..(18): Xaa can be any naturally occurring amino acid
  misc_feature (46)..(46): Xaa can be any naturally occurring amino acid
PFCMALAHLPQQPRPAPXSAFSFYSACQNASAPPFKPALHLRARLXAGTISIPIKLKNTALAWPGQAAHALGNRERGEPSPFCSWLFFGLWGGIHFQGRGGNTKCIVVLLNTSHLFLIKKAADP

SEQ ID NO: 1024853 - protein, 116 aa, Homo sapiens
HRGSSVHPPSSSEAPCRRWCQHCHRTEKGTEYKRLQPQLTATDSRAGPLLSTTALSRHQGQTKGKSNHKAGGTPCKPCTMVAACARHGALGCKAGCKVLCTGDVGGTRLLGSGDNR

SEQ ID NO: 1024854 - protein, 116 aa, Homo sapiens; identical to SEQ ID NO: 1024853

SEQ ID NO: 1024855 - protein, 92 aa, Homo sapiens
EVKHVCPNVPIILVGIRRIFGMMSTQGGSIAKMKQEPVKPEEGRDMANRIGACGYMECSAKTKDGVREVFEMATRAALQARRGKKKSGCLVL

SEQ ID NO: 1024856 - protein, 92 aa, Homo sapiens; identical to SEQ ID NO: 1024855

SEQ ID NO: 1024857 - protein, 2414 aa, Homo sapiens
MAENVVEPGPPSAKRPKLSSPALSASASDGTDFGSLFDLEHDLPDELINSTELGLTNGGDINQLQTSLGMVQDAASKHKQLSELLRSGSSPNLNMGVGGPGQVMASQAQQSSPGLGLINSMVKSPMTQAGLTSPNMGMGTSGPNQGPTQSTGMMNSPVNQPAMGMNTGTNAGMNPGMLAAGNGQGIMPNQVMNGSIGAGRGRQDMQYPNPGMGSAGNLLTEPLQQGSPQMGGQTGLRGPQPLKMGMMNNPNPYGSPYTQNPGQQIGASGLGLQIQTKTVLSNNLSPFAMDKKAVPGGGMPNMGQQPAPQVQQPGLVTPVAQGMGSGAHTADPEKRKLIQQQLVLLLHAHKCQRREQANGEVRQCNLPHCRTMKNVLNHMTHCQSGKSCQVAHCASSRQIISHWKNCTRHDCPVCLPLKNAGDKRNQQPILTGAPVGLGNPSSLGVGQQSAPNLSTVSQIDPSSIERAYAALGLPYQVNQMPTQPQVQAKNQQNQQPGQSPQGMRPMSNMSASPMGVNGGVGVQTPSLLSDSMLHSAINSQNPMMSENASVPSLGPMPTAAQPSTTGIRKQWHEDITQDLRNHLVHKLVQAIFPTPDPAALKDRRMENLVAYARKVEGDMYESANNRAEYYHLLAEKIYKIQKELEEKRRTRLQKQNMLPNAAGMVPVSMNPGPNMGQPQPGMTSNGPLPDPSMIRGSVPNQMMPRITPQSGLNQFGQMSMAQPPIVPRQTPPLQHHGQLAQPGALNPPMGYGPRMQQPSNQGQFLPQTQFPSQGMNVTNIPLAPSSGQAPVSQAQMSSSSCPVNSPIMPPGSQGSHIHCPQLPQPALHQNSPSPVPSRTPTPHHTPPSIGAQQPPATTIPAPVPTPPAMPPGPQSQALHPPPRQTPTPPTTQLPQQVQPSLPAAPSADQPQQQPRSQQSTAASVPTPNAPLLPPQPATPLSQPAVSIEGQVSNPPSTSSTEVNSQAIAEKQPSQEVKMEAKMEVDQPEPADTQPEDISESKVEDCKMESTETEERSTELKTEIKEEEDQPSTSATQSSPAPGQSKKKIFKPEELRQALMPTLEALYRQDPESLPFRQPVDPQLLGIPDYFDIVKSPMDLSTIKRKLDTGQYQEPWQYVDDIWLMFNNAWLYNRKTSRVYKYCSKLSEVFEQEIDPVMQSLGYCCGRKLEFSPQTLCCYGKQLCTIPRDATYYSYQNRYHFCEKCFNEIQGESVSLGDDPSQPQTTINKEQFSKRKNDTLDPELFVECTECGRKMHQICVLHHEIIWPAGFVCDGCLKKSARTRKENKFSAKRLPSTRLGTFLENRVNDFLRRQNHPESGEVTVRVVHASDKTVEVKPGMKARFVDSGEMAESFPYRTKALFAFEEIDGVDLCFFGMHVQEYGSDCPPPNQRRVYISYLDSVHFFRPKCLRTAVYHEILIGYLEYVKKLGYTTGHIWACPPSEGDDYIFHCHPPDQKIPKPKRLQEWYKKMLDKAVSERIVHDYKDIFKQATEDRLTSAKELPYFEGDFWPNVLEESIKELEQEEEERKREENTSNESTDVTKGDSKNAKKKNNKKTSKNKSSLSRGNKKKPGMPNVSNDLSQKLYATMEKHKEVFFVIRLIAGPAANSLPPIVDPDPLIPCDLMDGRDAFLTLARDKHLEFSSLRRAQWSTMCMLVELHTQSQDRFVYTCNECKHHVETRWHCTVCEDYDLCITCYNTKNHDHKMEKLGLGLDDESNNQQAAATQSPGDSRRLSIQRCIQSLVHACQCRNANCSLPSCQKMKRVVQHTKGCKRKTNGGCPICKQLIALCCYHAKHCQENKCPVPFCLNIKQKLRQQQLQHRLQQAQMLRRRMASMQRTGVVGQQQGLPSPTPATPTTPTGQQPTTPQTPQPTSQPQPTPPNSMPPYLPRTQAAGPVSQGKAAGQVTPPTPPQTAQPPLPGPPPTAVEMAMQIQRAAETQRQMAHVQIFQRPIQHQMPPMTPMAPMGMNPPPMTRGPSGHLEPGMGPTGMQQQPPWSQGGLPQPQQLQSGMPRPAMMSVAQHGQPLNMAPQPGLGQVGISPLKPGTVSQQALQNLLRTLRSPSSPLQQQQVLSILHANPQLLAAFIKQRAAKYANSNPQPIPGQPGMPQGQPGLQPPTMPGQQGVHSNPAMQNMNPMQAGVQRAGLPQQQPQQQLQPPMGGMSPQAQQMNMNHNTMPSQFRDILRRQQMMQQQQQQGAGPGIGPGMANHNQFQQPQGVGYPPQPQQRMQHHMQQMQQGNMGQIGQLPQALGAEAGASLQAYQQRLLQQQMGSPVQPNPMSPQQHMLPNQAQSPHLQGQQIPNSLSNQVRSPQPVPSPRPQSQPPHSSPSPRMQPQPSPHHVSPQTSSPHPGLVAAQANPMEQGHFASPDQNSMLSQLASNPGMANLHGASATDLGLSTDNSDLNSNLSQSTLDIH

SEQ ID NO: 1024858 - protein, 1045 aa, Homo sapiens
MAENVVEPGPPSAKRPKLSSPALSASASDGTDFGSLFDLEHDLPDELINSTELGLTNGGDINQLQTSLGMVQDAASKHKQLSELLRSGSSPNLNMGVGGPGQVMASQAQQSSPGLGLINSMVKSPMTQAGLTSPNMGMGTSGPNQGPTQSTGMMNSPVNQPAMGMNTGTNAGMNPGMLAAGNGQGIMPNQVMNGSIGAGRGRQDMQYPNPGMGSAGNLLTEPLQQGSPQMGGQTGLRGPQPLKMGMMNNPNPYGSPYTQNPGQQIGASGLGLQIQTKTVLSNNLSPFAMDKKAVPGGGMPNMGQQPAPQVQQPGLVTPVAQGMGSGAHTADPEKRKLIQQQLVLLLHAHKCQRREQANGEVRQCNLPHCRTMKNVLNHMTHCQSGKSCQVAHCASSRQIISHWKNCTRHDCPVCLPLKNAGDKRNQQPILTGAPVGLGNPSSLGVGQQSAPNLSTVSQIDPSSIERAYAALGLPYQVNQMPTQPQVQAKNQQNQQPGQSPQGMRPMSNMSASPMGVNGGVGVQTPSLLSDSMLHSAINSQNPMMSENASVPSLGPMPTAAQPSTTGIRKQWHEDITQDLRNHLVHKLVQAIFPTPDPAALKDRRMENLVAYARKVEGDMYESANNRAEYYHLLAEKIYKIQKELEEKRRTRLQKQNMLPNAAGMVPVSMNPGPNMGQPQPGMTSNGPLPDPSMIRGSVPNQMMPRITPQSGLNQFGQMSMAQPPIVPRQTPPLQHHGQLAQPGALNPPMGYGPRMQQPSNQGQFLPQTQFPSQGMNVTNIPLAPSSGQAPVSQAQMSSSSCPVNSPIMPPGSQGSHIHCPQLPQPALHQNSPSPVPSRTPTPHHTPPSIGAQQPPATTIPAPVPTPPAMPPGPQSQALHPPPRQTPTPPTTQLPQQVQPSLPAAPSADQPQQQPRSQQSTAASVPTPNAPLLPPQPATPLSQPAVSIEGQVSNPPSTSSTEVNSQAIAEKQPSQEVKMEAKMEVDQPEPADTQPEDISESKVEDCKMESTETEERSTELKTEIIQEVEAVVSYDSRHSSPAWVTQ

SEQ ID NO: 1024859 - protein, 75 aa, Homo sapiens
PPGVKENGADPTGPREKGNPPSRPPMGALPGHLMRSEPPAKNRTGTEPPQGERTKFCPQTHSSSTSHLSGPARVL

SEQ ID NO: 1024860 - protein, 104 aa, Homo sapiens
VSYLAERGCLEQGPSCTILNHHLVQQLWPQTTPWEQREDKKYRVHKYTSVCRQIIRFFVLSVESTTDDAGKKQKSCLALTCYDSMKTVMPHLPHLKTKSEYQNY

SEQ ID NO: 1024861 - protein, 155 aa, Homo sapiens
MLHHFVFYTMNLPNCIRYSVRCMCVFSSDSIPSLLILLVLCHSVCCLKLFFKLIFPNSFIIYEKLGLNPLRISFKWMVRAFSGYLATDQLLLLWDRILGYNSLEILAVLAAAVFAFRAVNLMEVTSLAAAEAVLADLSTLKVMPLLQIFLFATVT

SEQ ID NO: 1024862 - protein, 52 aa, Homo sapiens
MICTGWNPRTLTGFCLDEALEPAPAKLDRPGFFKTLLGYSPSYYNLSGSYKR

SEQ ID NO: 1024863 - protein, 89 aa, Homo sapiens
RESGGAEEEEKADRLGPGSGRRGFPCSSWSETRPQCGNWRHHDLHWLEPKNPYWFLLDEALEPPPPKLDLTLLARSTSGFLWLLAPGLI

SEQ ID NO: 1024864 - protein, 406 aa, Homo sapiens
GVNCRRTLDVMSETNNEFLAALESAADQIKVGDVVTGELLAIDNDNQAVVGLSTGEEGVVPAREYSDDRNINLADELKIGDTIEAVVISNVTSDKEGVSYLLSKKRLDARKAWENLSFAEGDTVDAKVINAVRGGLIVDVNGVRGFVPASMVAERFVSDLNQFKNKDIKAQVIEIDPANARLILSRKAVAAQERAAQLAEVFSKLSVGEVVEGTVARLTDFGAFVDLGGVDGLVHVSEISHDRVKNPADVLTKGDKVDVKILALDTEKGRISLSIKATQRGPWDEAADQIAAGSVLEGTVKRVKDFGAFVEILPGIEGLVHVSQISNKRIENPSEVLKSGDKVQVKVLDIKPAEERISLSMKALEEKPEREDRRGNDGSASRADIAAYKQQDDSAATLGDIFGDKL

SEQ ID NO: 1024865 - protein, 92 aa, Homo sapiens
IEDGGGDLCRALPEESSCGQSQGHHVENFGLDSEKEKEPVVVEHSRKRNTGNLILVCPPFSEAAGIHTDLKDLQSRWGICTCKEGFGSHALS

SEQ ID NO: 1024866 - protein, 103 aa, Homo sapiens
MGHFTEEDKATITSLWGKVNVEDAGGETLVTWLHELRLPNGPYDGFFDKLMGIRMSSCLCTSLGNSQMSKATLATNGADFPWDDAMKMQAGLISQWHLRPMPE

SEQ ID NO: 1024867 - protein, 158 aa, Homo sapiens
MGHFTEEDKATITSLWGKVNVEDAGGETLGRLLVVYPWTQRFFDSFGNLSSASAIMGNPKVKAHGKRVLTSLGDAIKHLDDLKGTFAQLSELHCDKLHVDPETSSSWKCAGDRFGNPFRQRFTPEVAGFLAEDGDWRCQCLCPPDTTELTAYDCRLSR

SEQ ID NO: 1024868 - protein, 93 aa, Homo sapiens
MGHFTEEDKATITSLWGKVNVEDAGGETLEGSPGLFILWAPGFFYTSCAPCSVPVSSGNPKSETQQRWCILLSSLHAHVISEHSSIVITLTAA

SEQ ID NO: 1024869 - protein, 93 aa, Homo sapiens
GILDIAFLCCKILRTFSDISKFHHVRFGAGSAYDAPRVTSVLVTELGAAGHLSCGGSGTEFPGFGHVSAGRVEPHRQGALDSFSGFSLYVINR

SEQ ID NO: 1024870 - protein, 83 aa, Homo sapiens
LDRIVKESGGKLTRRLVNSQCEFERRKPDGTTTLGLLHPVDPIVGEPGYCPVRLGMTTGRLQSGVFTEEEFNNKDKRNKVTPV

SEQ ID NO: 1024871 - protein, 78 aa, Homo sapiens
LDRIVKESGGKLTRRLVNSQCEFERRKPDGTTTLGLLHPVDPIVGEPGTACETGIDNWRLSLGQYLQVVKEDKGPSHS

SEQ ID NO: 1024872 - protein, 59 aa, Homo sapiens
MSRALDVLQMKEDVLKFLAAGTHLGGTSLDFQMEKYISKRKSDGIYIINLKRTWEKLLL

SEQ ID NO: 1024873 - protein, 211 aa, Homo sapiens
WSQETPEACTAPKHWMLDKLTGVFAPRPSTGPHKLRECLPLIIFLRNRLKYALTGDEVKKICMQRFIKIDGKVRTDITYPAGFMDVISIDKTGENFRLIYDTKGRFAVSSYYTGEAKYKLCKVRKIFVGTKGIPHLVTHDARTIRYPDPLIKVNDTIQIDLETGKITDFIKFDTGNLCMVTGGANLGRIGVITNRERHAGSFDVVHVKDAN

SEQ ID NO: 1024874 - protein, 113 aa, Homo sapiens
MEPASAHLLLNDMIAGQHCLEVTIFICFSTSFCSSFSFSASSSISLTLDSSASGPQWRVPVTSTSPAPPPPLGCRGSRTSPGPGAPGGRGAGAAPLRARAPARAPAARPQAPP

SEQ ID NO: 1024875 - protein, 113 aa, Homo sapiens; identical to SEQ ID NO: 1024874

SEQ ID NO: 1024876 - protein, 33 aa, Homo sapiens
ASTNKTSCISLQQEDRVSSYEQYFGPGTRLTVT

SEQ ID NO: 1024877 - protein, 249 aa, Homo sapiens
MLQDVLEKPDLSLCTCEDFVVTDGTRQLASDACFHCSECKKLTGGKALCCQRRTKLLCTDCYSKEYSSKCQGNAKKTIMPGTRKMEYKGSSWHETCFICQRCQQTNWNQEFHPSKDNQNFCVPCYEKQHAMQAVQCNKAHHLGERVTYREQALDTKECFVLHTLTGTPAVWASASQTRDDFAYVTELLSVNLYCQASCAECTNPISGLAGPNNYILPVKNAPLPFKDCLNCSEVLPLMMKRDILHTDVP

SEQ ID NO: 1024878 - protein, 320 aa, Homo sapiens
EVEIHAGGFNQEPLLKRVNADANPRQYADTVKALRVRRLTVEAAQVPAQQLEGALRVLANSRLKELTLEDLKITGTMPPLPLEATELALSQLRLRNVSWATGRSWLAELQQWLKPGLKVLSIAQEHSPAFSCEQVRAFPALTSLDLSDNPGLGERGLMAAFCPHKFPAIQNLALRNTGMETPTGVCAALAAAGVQPHSLDLSHNSLRATVNPSAPRCMWSSALNSLNLSFAGLEQVPKELPAKLRVLDLSCNRLNRAPQPDELPEVDNLTLDGNPFLVPGTALPHEGSMNSGVVPACARSTLSVGVSGTLVQLQGARGFA

SEQ ID NO: 1024879 - protein, 102 aa, Homo sapiens
GFFPELGTSLSAMRFLAATFLLLALSTAAQAEPVQFKDCGSVDGVIKEVNVSPCPTPTLPAEQRTVLTASMSTFTSNIQSKSSKARGCMAILMGRPSSLSHS

SEQ ID NO: 1024880 - protein, 33 aa, Homo sapiens
ASTNQTSMYLCASSLFAANTGELFFGEGSRLTV

SEQ ID NO: 1024881 - protein, 32 aa, Homo sapiens
ASTNQTSMYLCASSLSQGRGGYTFGSGTRLTV

SEQ ID NO: 1024882 - protein, 31 aa, Homo sapiens
ASTNQTSMYLCASSLPGEDTQYFGPGTRLTV

SEQ ID NO: 1024883 - protein, 33 aa, Homo sapiens
ASTNQTSMYLCASSLPSSYNEQFFGPGTRLTVL

SEQ ID NO: 1024884 - protein, 32 aa, Homo sapiens
DSSIYLCSVGGTSPPSSYNEQFFGPGTRLTVL

SEQ ID NO: 1024885 - protein, 32 aa, Homo sapiens
ASTNQTSMYLCASSLSYGANVLTFGAGSRLTV

SEQ ID NO: 1024886 - protein, 30 aa, Homo sapiens
DSSFYICSARAASAANTGELFFGEGSRLTV

SEQ ID NO: 1024887 - protein, 33 aa, Homo sapiens
ASTNQTSMYLCASSLHGPTSYEQYFGPGTRLTV

SEQ ID NO: 1024888 - protein, 118 aa, Homo sapiens
TTSLYAVIMSERSFDFNSTHLRIYLEWKCQVILQKGFIFTIQFSFVQKWQGNIFISHSSLAFLILWAVSHLSRLPGYSLEPRSSVGQQQHNPLSHLLHCCLCHCSCAKTQRKNKKSNI

SEQ ID NO: 1024889 - protein, 113 aa, Homo sapiens
  misc_feature (7)..(7): Xaa can be any naturally occurring amino acid
  misc_feature (28)..(28): Xaa can be any naturally occurring amino acid
  misc_feature (31)..(31): Xaa can be any naturally occurring amino acid
  misc_feature (41)..(41): Xaa can be any naturally occurring amino acid
ACVCALXAGSPGSFCHHAACFIAKHQRXPAXSAARTGSSPXLTQQLAQATGKPPQYIAVHVVPDQLMAFGGSSEPCALCSLHSIGKIGGAQNRSYSKLLCGLLARRLRFSPDR

SEQ ID NO: 1024890 - protein, 252 aa, Homo sapiens
  misc_feature (204)..(204): Xaa can be any naturally occurring amino acid
GPQSRWRPEAARRAVPASVTEGRDQDECRAREEVACGGGVAERLVRMRDWRNPHPSSGPEPDGFVSKKGAREHGLSPADFFWRMLFPAKRWRSPISAVRAPAMRTTSGSSLMLASTSCVEYPMNVMWGAVRNCGELVSKKGKVCAEEHVELCDGGIRFPEKRSGGEGPCERVVLFKVARVKKRGCCFHDSGILAELLVPFWGVXLCLHLEEEGIRLNDGVWKEEICWLGKGGNESLVKGGGKGRGVKLGKFG

SEQ ID NO: 1024891 - protein, 874 aa, Homo sapiens
SGEPQSDDIEASRMKRAAAKHLIERYYHQLTEGCGNEACTNEFCASCPTFLRMDNNAAAIKALELYKINAKLCDPHPSKKGASSAYLENSKGAPNNSCSEIKMNKKGARIDFKDVTYLTEEKVYEILELCREREDYSPLIRVIGRVFSSAEALVQSFRKVKQHTKEELKSLQAKDEDKDEDEKEKAACSAAAMEEDSEASSSRIGDSSQGDNNLQKLGPDDVSVDIDAIRRVYTRLLSNEKIETAFLNALVYLSPNVECDLTYHNVYSRDPNYLNLFIIGMENRNLHSPEYLEMALPLFCKAMSKLPLAAQGKLIRLWSKYNADQIRRMMETFQQLITYKVISNEFNSRNLVNEFNSRNLVNDDDAIVAASKCLKMVYYANVVGGEVDTNHNEEDDEEPIPESSELTLQELLGEERRNKKGLRVDPLETELGVKTLDCRKPLIPFEEFINEPLNEVLEMDKDYTFFKVETENKFSFMTCPFILNAVTKNLGLYYDNRIRMYSERRITVLYSLVQGQQLNPYLRLKVRRDHIIDDALVRLEMIAMENPADLKKQLYVEFEGEQGVDEGGVSKEFFQLVVEEIFNPDIGMFTYDESTKLFWFNPSSFETEGQFTLIGIVLGLAIYNNCILDVHFPMVVYRKLMGKKGLFVDLGDSHPVLYQSLKDLLEYVGNVEDDMMITFQISQTNLFGNPMMYDLKENGDKIPITNENRKEFVNLYSDYILNKSVEKQFKAFRRGFHMVTNESPLKYLFRPEEIELLICGSRNLDFQALEETTEYDGGYTRDSVLIREFWEIVHSFTDEQKRLFLQFTTGTDRAPVGGLGKLKMIIAKNGPDTERLPTSHTCFNVLLLPEYSSKEKLKERLLKAITYAKGFGML

SEQ ID NO: 1024892 - protein, 121 aa, Homo sapiens
  misc_feature (115)..(115): Xaa can be any naturally occurring amino acid
GQCGTGTGRKKEAREQGEKVHLASGPARNESMRCLPTPTTVFVPSAEGAPLGPEPCWGSTTLREEVRRIISAPRVSARGRLKHPCDLNILDRDEIQDWPHATNTKFAIEKIRPKXHKKSKK

SEQ ID NO: 1024893 - protein, 156 aa, Homo sapiens
  misc_feature (1)..(1): Xaa can be any naturally occurring amino acid
  misc_feature (3)..(3): Xaa can be any naturally occurring amino acid
  misc_feature (5)..(5): Xaa can be any naturally occurring amino acid
XIXPXPHSRLYLQPPMAPKKPEPKKDDAKAAPKAAPAPAPPPEPERPKEVEFDASKIKIEFTPEQIEEFKEAFMLFDRTPKCEMRITYGQCGMSCGRWARTHTGRGAPCPGEPRQEELNTKMMDSETLLPMLSTFQTGQGPLGLVRARSERGNDLR

SEQ ID NO: 1024894 - protein, 156 aa, Homo sapiens
  misc_feature (1)..(1): Xaa can be any naturally occurring amino acid
  misc_feature (3)..(3): Xaa can be any naturally occurring amino acid
  misc_feature (5)..(5): Xaa can be any naturally occurring amino acid
  misc_feature (150)..(150): Xaa can be any naturally occurring amino acid
XIXPXPHSRLYLQPPMAPKKPEPKKDDAKAAPKAAPAPAPPPEPERPKEVEFDASKIKIEFTPEQIEEFKEAFMLFDRTPKCEMRITYGQCGMSCGRWARTHTGRGAPCPGEPRQEELNTKMMDSETLLPMLQHISRSTDTGTYEDFVEXAAGLRQ

SEQ ID NO: 1024895 - protein, 116 aa, Homo sapiens
YSHDCSDLRITTNAIGGIIESISDVRSVATFEMVVFVACGDTTVTYDMSEDTSEAKVKIPNTTVYCCQSTAGSAAVPIALKTFPFPGQTRAGTDPIYVQVRVSSSRISTFHQSVGS

SEQ ID NO: 1024896 - protein, 78 aa, Homo sapiens
  misc_feature (19)..(19): Xaa can be any naturally occurring amino acid
  misc_feature (52)..(52): Xaa can be any naturally occurring amino acid
  misc_feature (54)..(54): Xaa can be any naturally occurring amino acid
  misc_feature (58)..(58): Xaa can be any naturally occurring amino acid
GKSRMKNQNPPIPAGIRLXTGKPKNLSQQNRPQPLTKGTKPAGLHQHREDFXPXQIRXHIPKQGRKNKLCSDAYETPE

SEQ ID NO: 1024897 - protein, 345 aa, Homo sapiens
IQPGSPPAQRCPCSSGWRTEDRTLKPQVAEKPGVKMTERFDCHHCNESLFGKKYILREESPYCVVCFETLFANTCEECGKPIGCDCKDLSYKDRHWHEACFHCSQMQRNSPGGQALCCQGRTSCICTEHAIPTEYSSKCQECKKTIMPGTRKMEYKGSSWHETCFICHRCQQPNWNLRVSSPKTNQNFCVPCYEKQHAMQCVQCKKPITTGGVTYREQAWHKECFVCTDCRKQLSGQRFTARDDFAYCLNCFCDLYAKKCAGCTNPISGAWLAQEYISFGGTAVALTTALTVRSAPSHWWGRGSSPRATTILCPQMWEDLWFPPRSCVVSPPVFVSFPRTCFCSS

SEQ ID NO: 1024898 - protein, 439 aa, Homo sapiens
  misc_feature (66)..(66): Xaa can be any naturally occurring amino acid
EKEEKYSQEQAGVNSAEEGTGRDRAARGGVHGNREACGAALPPLSPPTVRVIAQTWDLMCCANHPXYTVSNTSTSVRGVYSDVVGHVCRRRSTRPAAEPQPPAARALQPRPGVPGPLRCRQVAEKPGVKMTERFDCHHCNESLFGKKYILREESPYCVVCFETLFANTCEECGKPIGCDCKDLSYKDRHWHEACFHCSQMQRNSPGGQALCCQGRTSCICTEHAIPTEYSSKCQECKKTIMPGTRKMEYKGSSWHETCFICHRCQQPNWNLRVSSPKTNQNFCVPCYEKQHAMQCVQCKKPITTGGVTYREQAWHKECFVCTACRKQLSGQRFTARDDFAYCLNCFCDLYAKKCAGCTNPISGAWLAQEYISFGGTAVALTNALTVRSAPSHWWGRGSSPRVTTILCPQMWEDLWFPPRSCVVSPPVFVSFPRTCFCSS

SEQ ID NO: 1024899 - protein, 310 aa, Homo sapiens
MTERFDCHHCNESLFGKKYILREESPYCVVCFETLFANTCEECGKPIGCDCKDLSYKDRHWHEACFHCSQMQRNSPGGQALCCQGRTSCICTEHAIPTEYSSKCQECKKTIMPGTRKMEYKGSSWHETCFICHRCQQPNWNLRVSSPKTNQNFCVPCYEKQHAMQCVQCKKPITTGGVTYREQAWHKECFVCTACRKQLSGQRFTARDDFAYCLNCFCDLYAKKCAGCTNPISGAWLAQEYISFGGTAVALTNALTVRSAPSHWWGRGSSPRVTTILCPQMWEDLWFPPRSCVVSPPVFVSFPRTCFCSS

SEQ ID NO: 1024900 - protein, 527 aa, Homo sapiens
  misc_feature (66)..(66): Xaa can be any naturally occurring amino acid
  misc_feature (254)..(255): Xaa can be any naturally occurring amino acid
  misc_feature (269)..(269): Xaa can be any naturally occurring amino acid
EKEEKYSQEQAGVNSAEEGTGRDRAARGGVHGNREACGAALPPLSPPTVRVIAQTWDLMCCANHPXYTVSNTSTSVRGVYSDVVGHVCRRRSTRPAAEPQPPAARALQPRPGVPGPLRCREYLLTHLLPRREAEGLSHQGSEVGAESGARPKERGAEPELGRLWLKTVSSWRLGWHFDFGQVAEKPGVKMTERFDCHHCNESLFGKKYILREESPYCVVCFETLFANTCEECGKPIGCDCKDKHGEPSHQTCPXXAQAFFFTFLFALGXYLSYKDRHWHEACFHCSQMQRNSPGGQALCCQGRTSCICTEHAIPTEYSSKCQECKKTIMPGTRKMEYKGSSWHETCFICHRCQQPNWNLRVSSPKTNQNFCVPCYEKQHAMQCVQCKKPITTGGVTYREQAWHKECFVCTACRKQLSGQRFTARDDFAYCLNCFCDLYAKKCAGCTNPISGAWLAQEYISFGGTAVALTNALTVRSAPSHWWGRGSSPRVTTILCPQMWEDLWFPPRSCVVSPPVFVSFPRTCFCSS

SEQ ID NO: 1024901 - protein, 501 aa, Homo sapiens
  misc_feature (66)..(66): Xaa can be any naturally occurring amino acid
EKEEKYSQEQAGVNSAEEGTGRDRAARGGVHGNREACGAALPPLSPPTVRVIAQTWDLMCCANHPXYTVSNTSTSVRGVYSDVVGHVCRRRSTRPAAEPQPPAARALQPRPGVPGPLRCREYLLTHLLPRREAEGLSHQGSEVGAESGARPKERGAEPELGRLWLKTVSSWRLGWHFDFGGSAETAKEIRDMTERFDCHHCNESLFGKKYILREESPYCVVCFETLFANTCEECGKPIGCDCKDLSYKDRHWHEACFHCSQMQRNSLGGQALCCQGRTSCICTEHAIPTEYSSKCQECKKTIMPGTRKMEYKGSSWHETCFICHRCQQPNWNLRVSSPKTNQNFCVPCYEKQHAMQCVQCKKPITTGGVTYREQAWHKECFVCTACRKQLSGQRFTARDDFAYCLNCFCDLYAKKCAGCTNPISGAWLAQEYISFGGTAVALTNALTVRSAPSHWWGRGSSPRVTTILCPQMWEDLWFPPRSCVVSPPVFVSFPRTCFCSS

SEQ ID NO: 1024902 - protein, 310 aa, Homo sapiens; identical to SEQ ID NO: 1024899

SEQ ID NO: 1024903 - protein, 296 aa, Homo sapiens
  misc_feature (66)..(66): Xaa can be any naturally occurring amino acid
EKEEKYSQEQAGVNSAEEGTGRDRAARGGVHGNREACGAALPPLSPPTVRVIAQTWDLMCCANHPXYTVSNTSTSVRGVYSDVVGHVCRRRSTRPAAEPQPPAARALQPRPGVPGPLRCREYLLTHLLPRREAEGLSHQGSEVGAESGARPKERGAEPELGRLWLKTVSSWRLGWHFDFGTGVSLCRPWLECSGSDSQITASFYTLGSTPFILPQPPKELGLQVAEKPGVKMTERFDCHHCNESLFGKKYILREESPYCVVCFETLFANTCEECGKPIGCDCKVPAAGLCGSPALP

SEQ ID NO: 1024904 - protein, 426 aa, Homo sapiens
MVICGVHFVKKHLQGKKEKRPPCKYIPGTCLLRSDPLLPPPPPARPGASPVSRSWDQAEIPAWADPCHRAQASSETRAREPTPEATLPDNYCAPKTRRARRKEPWQTQVAEKPGVKMTERFDCHHCNESLFGKKYILREESPYCVVCFETLFANTCEECGKPIGCDCKDLSYKDRHWHEACFHCSQMQRNSPGGQALCCQGRTSCICTEHAIPTEYSSKCQECKKTIMPGTRKMEYKGSSWHETCFICHRCQQPNWNLRVSSPKTNQNFCVPCYEKQHAMQCVQCKKPITTGGVTYREQAWHKECFVCTACRKQLSGQRFTARDDFAYCLNCFCDLYAKKCAGCTNPISGAWLAQEYISFGGTAVALTNALTVRSAPSHWWGRGSSPRVTTILCPQMWEDLWFPPRSCVVSPPVFVSFPRTCFCSS

SEQ ID NO: 1024905 - protein, 482 aa, Homo sapiens
  misc_feature (66)..(66): Xaa can be any naturally occurring amino acid
EKEEKYSQEQAGVNSAEEGTGRDRAARGGVHGNREACGAALPPLSPPTVRVIAQTWDLMCCANHPXYTVSNTSTSVRGVYSDVVGHVCRRRSTRPAAEPQPPAARALQPRPGVPGPLRCREYLLTHLLPRREAEGLSHQGSEVGAESGARPKERGAEPELGRLQVAEKPGVKMTERFDCHHCNESLFGKKYILREESPYCVVCFETLFANTCEECGKPIGCDCKDLSYKDRHWHEACFHCSQMQRNSPGGQALCCQGRTSCICTEHAIPTEYSSKCQECKKTIMPGTRKMEYKGSSWHETCFICHRCQQPNWNLRVSSPKTNQNFCVPCYEKQHAMQCVQCKKPITTGGVTYREQAWHKECFVCTACRKQLSGQRFTARDDFAYCLNCFCDLYAKKCAGCTNPISGAWLAQEYISFGGTAVALTNALTVRSAPSHWWGRGSSPRVTTILCPQMWEDLWFPPRSCVVSPPVFVSFPRTCFCSS

SEQ ID NO: 1024906 - protein, 326 aa, Homo sapiens
MTGLCGYSAPDMRGLRLIMIPVELLLCYLLLHPVDATSYGKQTNVLMHFPLSLESQTPSSDPLSCQFLHPKSLPGFSHMAPLPKFLVSLALRNALEEAGCQADVWALQLQLYRQGGVNATQVLIQHLRGLQKGRSTERNVSVEALASALQLLAREQQSTGRVGRSLPTEDCENEKEQAVHNVVQLLPGVGTFYNLGTALYYATQNCLGKARERGRDGAIDLGYDLLMTMAGMSGGPMGLAISAALKPALRSGVQQLIQYYQDQKDANISQPETTKEGLRAISDVSDLEETTTLASFISEVVSSAPYWGWAIIKSYDLDPGAGSLEI

SEQ ID NO: 1024907 - protein, 223 aa, Homo sapiens
MSGSSSVAAMKKVVQQLRLEAGLNRVKVSQAAADLKQFCLQNAQHDPLLTGSIFKYKSLSDPRKSVPFCSNNESFKRFPKPLLMDPVNIQESSHFERLYQKLIPVTHVPYIYNLLLPSVLTIYLSELPPEISISPRGNLWLVYTGSSHTQKDNLRLVSQGLDQHKEPPRRHLLVSRVALTHNRRLNRNRGALTWAKNGVSPVPPTFFGSPQGVDELTPVMPRV

SEQ ID NO: 1024908 - protein, 114 aa, Homo sapiens
MKSPTGDQLSFPPVSSTWLSGLLQPHMQAEVKEEKIVPTSAHDQERYQRSFSSVTCAAHMVSWRRRCRDRWSEREKLRLQSVHRKGLMPVCLRKWRVSSSERANFQEQPSQVHL

SEQ ID NO: 1024909 - protein, 602 aa, Homo sapiens
EETIFVRRGSRCFLGSGYGRKDIGSNRGVPQGSWELEEPRTPPSSGFELLCPWVKRPCSACELLPGRAAMALRNVPFRSEVLGWDPDSLADYFKKLNYKDCEKAVKKYHIDGARFLNLTENDIQKFPKLRVPILSKLSQEINKNEERRSIFTRKPQVPRFPEETESHEEDNGGWSSFEEDDYESPNDDQDGEDDGDYESPNEEEEAPVEDDADYEPPPSNDEEALQNSILPAKPFPNSNSMYIDRPPSGKTPQQPPVPPQRPMAALPPPPAGRNHSPLPPPQTNHEEPSRSRNHKTAKLPAPSIDRSTKPPLDRSLAPFDREPFTLGKKPPFSDKPSIPAGRSLGEHLPKIQKPPLPPTTERHERSSPLPGKKPPVPKHGWGPDRRENDEDDVHQRPLPQPALLPMSSNTFPSRSTKPSPMNPLPSSHMPGAFSESNSSFPQSASLPPYFSQGPSNRPPIRAEGRNFPLPLPNKPRPPSPAEEENSLNEEWYVSYITRPEAEAALRKINQDGTFLVRDSSKKTTTNPYVLMVLYKDKVYNIQIRYQKESQVYLLGTGLRGKEDFLSVSDIIDYFRKMPLLLIDGKNRGSRYQCTLTHAAGYP

SEQ ID NO: 1024910 - protein, 37 aa, Homo sapiens
  misc_feature (31)..(32): Xaa can be any naturally occurring amino acid
MLITATALHESAPRKTSKPRGTFNFPGQVPXXLCATS

SEQ ID NO: 1024911 - protein, 36 aa, Homo sapiens
MGAFRPGAGQPPDEMIYCWKWRRFPATSDEEMSHCQ

SEQ ID NO: 1024912 - protein, 485 aa, Homo sapiens
MNPELTMESLGTLHGARGGGSGGGGGGGGGGGGGGPGHEQELLASPSPHHARRGPRGSLRGPPPPPTAHQELGTAAAAAAAASRSAMVTSMASILDGGDYRPELSIPLHHAMSMSCDSSPPGMGMSNTYTTLTPLQPLPPISTVSDKFHHPHPHHHPHHHHHHHHQRLSGNVSGSFTLMRDERGLPAMNNLYSPYKEMPGMSQSLSPLAATPLGNGLGGLHNAQQSLPNYGPPGHDKMLSPNFDAHHTAMLTRGEQHLSRGLGTPPAAMMSHLNGLHHPGHTQSHGPVLAPSRERPPSSSSGSQVATSGQLEEINTKEVAQRITAELKRYSIPQAIFAQRVLCRSQGTLSDLLRNPKPWSKLKSGRETFRRMWKWLQEPEFQRMSALRLAACKRKEQEPNKDRNNSQKKSRLVFTDLQRRTLFAIFKENKRPSKEMQITISQQLGLELTTVSNFFMNARRRSLEKWQDDLSTGGSSSTSSTCTKA

SEQ ID NO: 1024913 - protein, 111 aa, Homo sapiens
CVNCWKQGARGSFLQFMPFTPVWKLVKVSAMSSPKVVFAIQDLNLPLGRQVAVKPLLHSEGLGMPPVGAGDWRSPRRPPREAVRKDEASCLTSAPHGARASSGFQFPAPDS

SEQ ID NO: 1024914 - protein, 30 aa, Homo sapiens
TAVYYCARGCQHLVNYFDYWGQGTLVTVSS

SEQ ID NO: 1024915 - protein, 35 aa, Homo sapiens
TAVYYCARGYYDSSGYFAGYYFDYWGQGTLVTVSS

SEQ ID NO: 1024916 - protein, 31 aa, Homo sapiens
TAVYYCAREGDGGNLSYFDYWGQGTLVTVSS

SEQ ID NO: 1024917 - protein, 34 aa, Homo sapiens
TAVYYCARGGSYYYDSSGPYFDYWGQGTLVTVSS

SEQ ID NO: 1024918 - protein, 633 aa, Homo sapiens
VVVALSRPCHEQALNSSGLHVLRPPSSATLSSEFSFGLPRASNLVSEARSHNALRAAAPAEECVSPRSAYCVRRRGRAELPACRAGLAARVGAIAASASAAPPSPPPPGPFAAARGERGGAAGAAMEPDSVIEDKTIELMISNGTSSVIVSRKRPSEGNYQKEKDLCIKYFDQWSESDQVEFVEHLISRMCHYQHGHINSYLKPMLQRDFITALPEQGLDHIAENILSYLDARSLCAAELVCKEWQRVISEGMLWKKLIERMVRTDPLWKGLSERRGWDQYLFKNRPTDGPPNSFYRSLYPKIIQDIETIESNWRCGRHNLQRIQCRSENSKGVYCLQYDDEKIISGLRDNSIKIWDKTSLECLKVLTGHTGSVLCLQYDERVIVTGSSDSTVRVWDVNTGEVLNTLIHHNEAVLHLRFSNGLMVTCSKDRSIAVWDMASATDITLRRVLVGHRAAVNVVDFDDKYIVSASGDRTIKVWSTSTCEFVRTLNGHKRGIACLQYRDRLVVSGSSDNTIRLWDIECGACLRVLEGHEELVRCIRFDNKRIVSGAYDGKIKVWDLQAALDPRAPASTLCLRTLVEHSGRVFRLQFDEFQIISSSHDDTILIWDFLNVPPSAQNETRSPSRTYTYISR

SEQ ID NO: 1024919 - protein, 520 aa, Homo sapiens
MIRLPCKKPAEIDAITLGKAILPPPRVISNGTSSVIVSRKRPSEGNYQKEKDLCIKYFDQWSESDQVEFVEHLISRMCHYQHGHINSYLKPMLQRDFITALPEQGLDHIAENILSYLDARSLCAAELVCKEWQRVISEGMLWKKLIERMVRTDPLWKGLSERRGWDQYLFKNRPTDGPPNSFYRSLYPKIIQDIETIESNWRCGRHNLQRIQCRSENSKGVYCLQYDDEKIISGLRDNSIKIWDKTSLECLKVLTGHTGSVLCLQYDERVIVTGSSDSTVRVWDVNTGEVLNTLIHHNEAVLHLRFSNGLMVTCSKDRSIAVWDMASATDITLRRVLVGHRAAVNVVDFDDKYIVSASGDRTIKVWSTSTCEFVRTLNGHKRGIACLQYRDRLVVSGSSDNTIRLWDIECGACLRVLEGHEELVRCIRFDNKRIVSGAYDGKIKVWDLQAALDPRAPASTLCLRTLVEHSGRVFRLQFDEFQIISSSHDDTILIWDFLNVPPSAQNETRSPSRTYTYISR

SEQ ID NO: 1024920 - protein, 372 aa, Homo sapiens
MVRTDPLWKGLSERRGWDQYLFKNRPTDGPPNSFYRSLYPKIIQDIETIESNWRCGRHNLQRIQCRSENSKGVYCLQYDDEKIISGLRDNSIKIWDKTSLECLKVLTGHTGSVLCLQYDERVIVTGSSDSTVRVWDVNTGEVLNTLIHHNEAVLHLRFSNGLMVTCSKDRSIAVWDMASATDITLRRVLVGHRAAVNVVDFDDKYIVSASGDRTIKVWSTSTCEFVRTLNGHKRGIACLQYRDRLVVSGSSDNTIRLWDIECGACLRVLEGHEELVRCIRFDNKRIVSGAYDGKIKVWDLQAALDPRAPASTLCLRTLVEHSGRVFRLQFDEFQIISSSHDDTILIWDFLNVPPSAQNETRSPSRTYTYISR

SEQ ID NO: 1024921 - protein, 539 aa, Homo sapiens
LLKKAGYSKRKESWKMLDCCLFSDKSELENPHSFWIGGSEVQNIFQISNGTSSVIVSRKRPSEGNYQKEKDLCIKYFDQWSESDQVEFVEHLISRMCHYQHGHINSYLKPMLQRDFITALPEQGLDHIAENILSYLDARSLCAAELVCKEWQRVISEGMLWKKLIERMVRTDPLWKGLSERRGWDQYLFKNRPTDGPPNSFYRSLYPKIIQDIETIESNWRCGRHNLQRIQCRSENSKGVYCLQYDDEKIISGLRDNSIKIWDKTSLECLKVLTGHTGSVLCLQYDERVIVTGSSDSTVRVWDVNTGEVLNTLIHHNEAVLHLRFSNGLMVTCSKDRSIAVWDMASATDITLRRVLVGHRAAVNVVDFDDKYIVSASGDRTIKVWSTSTCEFVRTLNGHKRGIACLQYRDRLVVSGSSDNTIRLWDIECGACLRVLEGHEELVRCIRFDNKRIVSGAYDGKIKVWDLQAALDPRAPASTLCLRTLVEHSGRVFRLQFDEFQIISSSHDDTILIWDFLNVPPSAQNETRSPSRTYTYISR

SEQ ID NO: 1024922 - protein, 542 aa, Homo sapiens
MEPDSVIEDKTIELMCSVPRSLWLGCANLVESMCALSCLQSMPSVRCLQISNGTSSVIVSRKRPSEGNYQKEKDLCIKYFDQWSESDQVEFVEHLISRMCHYQHGHINSYLKPMLQRDFITALPEQGLDHIAENILSYLDARSLCAAELVCKEWQRVISEGMLWKKLIERMVRTDPLWKGLSERRGWDQYLFKNRPTDGPPNSFYRSLYPKIIQDIETIESNWRCGRHNLQRIQCRSENSKGVYCLQYDDEKIISGLRDNSIKIWDKTSLECLKVLTGHTGSVLCLQYDERVIVTGSSDSTVRVWDVNTGEVLNTLIHHNEAVLHLRFSNGLMVTCSKDRSIAVWDMASATDITLRRVLVGHRAAVNVVDFDDKYIVSASGDRTIKVWSTSTCEFVRTLNGHKRGIACLQYRDRLVVSGSSDNTIRLWDIECGACLRVLEGHEELVRCIRFDNKRIVSGAYDGKIKVWDLQAALDPRAPASTLCLRTLVEHSGRVFRLQFDEFQIISSSHDDTILIWDFLNVPPSAQNETRSPSRTYTYISR

SEQ ID NO: 1024923 - protein, 530 aa, Homo sapiens
MEPDSVIEDKTIELMNTSVMADPNEDESPNEHLLFGTISNGTSSVIVSRKRPSEGNYQKEKDLCIKYFDQWSESDQVEFVEHLISRMCHYQHGHINSYLKPMLQRDFITALPEQGLDHIAENILSYLDARSLCAAELVCKEWQRVISEGMLWKKLIERMVRTDPLWKGLSERRGWDQYLFKNRPTDGPPNSFYRSLYPKIIQDIETIESNWRCGRHNLQRIQCRSENSKGVYCLQYDDEKIISGLRDNSIKIWDKTSLECLKVLTGHTGSVLCLQYDERVIVTGSSDSTVRVWDVNTGEVLNTLIHHNEAVLHLRFSNGLMVTCSKDRSIAVWDMASATDITLRRVLVGHRAAVNVVDFDDKYIVSASGDRTIKVWSTSTCEFVRTLNGHKRGIACLQYRDRLVVSGSSDNTIRLWDIECGACLRVLEGHEELVRCIRFDNKRIVSGAYDGKIKVWDLQAALDPRAPASTLCLRTLVEHSGRVFRLQFDEFQIISSSHDDTILIWDFLNVPPSAQNETRSPSRTYTYISR

SEQ ID NO: 1024924 - protein, 137 aa, Homo sapiens
TKNAPTITTEQKTVNETIHYQGAGNQTPADNTAQVTSTRQVSTDTVTGEKSYGLGQLIKALGSDSPVIKGYYARSAEIGAQTVSGDASDLDFTVIYTKDAPTNPLIQVNQRRQQTRFRLVKRRLLILWTHSCLNLVN

SEQ ID NO: 1024925 - protein, 360 aa, Homo sapiens
MNPTDIADTTLDESIYSNYYLYESIPKPCTKEGIKAFGELFLPPLYSLVFVFGLLGNSVVVLVLFKYKRLRSMTDVYLLNLAISDLLFVFSLPFWGYYAADQWVFGLGLCKMISWMYLVGFYSGIFFVMLMSIDRYLAIVHAVFSLRARTLTYGVITSLATWSVAVFASLPGFLFSTCYTERNHTYCKTKYSLNSTTWKVLSSLEINILGLVIPLGIMLFCYSMIIRTLQHCKNEKKNKAVKMIFAVVVLFLGFWTPYNIVLFLETLVELEVLQDCTFERYLDYAIQATETLAFVHCCLNPIIYFFLGEKFRKYILQLFKTCRGLFVLCQYCGLLQIYSADTPSSSYTQSTMDHDLHDAL

SEQ ID NO: 1024926 - protein, 615 aa, Homo sapiens [sequence omitted]

SEQ ID NO: 1024927 - protein, 264 aa, Homo sapiens
MDELFPLIFPAEPAQASGPYVEIIEQPKQRGMRFRYKCEGRSAGSIPGERSTDTTKTHPTIKINGYTGPGTVRISLVTKDPPHRPHPHELVGKDCRDGFYEAELCPDRCIHSFQNLGIQCVKKRDLEQAISQRIQTNNNPFQVPIEEQRGDYDLNAVRLCFQVTVRDPSGRPSACAVLSHPIFEIVPPTLRAQICRVNELWQLPPWGEISFGWRGERHAGFRTGGTGPFGRCPIGFFDLIDTWAVSTLSQRLHDSSNSREKHTK

SEQ ID NO: 1024928 - protein, 129 aa, Homo sapiens
MDELFPLIFPAEPAQASGPYVEIIEQPKQRGMRFRYKCEGRSAGSIPGERSTDTTKTHPTIKINGYTGPGTVRISLVTKDPPHRPSERELREPMEIPVPAQIQTIVHRIAGRKRKKDTHETSQEPSLTE

SEQ ID NO: 1024929 - protein, 72 aa, Homo sapiens
CFFSCCSNASGSTRISGSERDCTDCFKKMADKPDMGEIASFDKAKLKKTETQEKNTLPTKETIEQEKRSEIS

SEQ ID NO: 1024930 - protein, 72 aa, Homo sapiens; identical to SEQ ID NO: 1024929

SEQ ID NO: 1024931 - protein, 72 aa, Homo sapiens; identical to SEQ ID NO: 1024929

SEQ ID NO: 1024932 - protein, 72 aa, Homo sapiens; identical to SEQ ID NO: 1024929

SEQ ID NO: 1024933 - protein, 72 aa, Homo sapiens; identical to SEQ ID NO: 1024929

SEQ ID NO: 1024934 - protein, 526 aa, Homo sapiens
  misc_feature (6)..(6): Xaa can be any naturally occurring amino acid
  misc_feature (16)..(16): Xaa can be any naturally occurring amino acid
MGAALXLHPGAFLAPXSLPRGPAGQTQLASPRAWWMPVDPVPSTPSAEASVLPDLLEWTPDSQETPGCRRGEKAGKVAGRGEGWAQESPGQAGGPGPPGPADHLVSGGGAHQGSGPGAKPPGPDNVSSSGVPATEGPTSEVTELRGAVGEESQETLMMNSDQKAVKFLANFYINGGKHWTHGHLRQTQPEPTQPKASVLLLGPEPGMAWDETQPPKMKEIPVGLRLQTGTPQESLPTYTQTLRELLLEQRLLITADLEVPSPTRYQVPSPSDTRALSNPHYSIGCKHQGREGGGRRAWQTLWFQSESPFTQKADFDQEQKASLQAPGKRCPGPNTYNILPGSRLQSPRSRLLDEPSPAFTSWLSTSRTPGPAAYHVEDCNSRFPSAPGVVIQGVRRPKRHDTGPFCTLYSQLGTTCLARPPSGTMASPGAFPGLPWDLGPQPGLLTLWAPRCTLLAGQPFYGLWTRLAQPGSPICPSPRYTEMLLVFPSSVVCSCLSVTRGRVLEIWLPAGSFPAFPVEGSPFSCP

SEQ ID NO: 1024935 - protein, 198 aa, Homo sapiens
MPWPQHLQYPSWEPPAEPPLAGFSMSRPLRSPPGSAPPEPLAQPPTTWRTATHASLRRLAWSSRVYADPSATTQAPSARSRASWAQPAWPGHRVETMASPGAFPGLPWDLGPQPGLLTLWAPRCTLLAGQPFYGLWTRLAQPGSPICPSPRYTEMLLVFPSSVVCSCLSVTRGRVLEIWLPAGSFPAFPVEGSPFSCP

SEQ ID NO: 1024936 - protein, 536 aa, Homo sapiens
  misc_feature (6)..(6): Xaa can be any naturally occurring amino acid
  misc_feature (16)..(16): Xaa can be any naturally occurring amino acid
MGAALXLHPGAFLAPXSLPRGPAGQTQLASPRAWWMPVDPVPSTPSAEASVLPDLLEWTPDSQETPGCRRGEKAGKVAGRGEGWAQESPGQAGGPGPPGPADHLVSGGGAHQGSGPGAKPPGPDNVSSSGVPATEGPTSEVTELRGAVGEESQETLMMNSDQKAVKFLANFYINGGKHWTHGHLRQTQPEPTQPKASVLLLGPEPGMAWDETQPPKMKEIPVGLRLQTGTPQESLPTYTQTLRELWGGGRRAWQTLWFQSESPFTQKADFDQEQKWPSPAHYQLLSRPAFPAFSFRGCHSLPRHLKANPPRAAWGQGAGPQGAAPVPASGLFAGTWQEMPWPQHLQYPSWEPPAEPPLAGFSMSRPLRSPPGSAPPEPLAQPPTTWRTATHASLRRLAWSSRVYADPSATTQAPSARSRASWAQPAWPGHRVETMASPGAFPGLPWDLGPQPGLLTLWAPRCTLLAGQPFYGLWTRLAQPGSPICPSPRYTEMLLVFPSSVVCSCLSVTRGRVLEIWLPAGSFPAFPVEGSPFSCP

SEQ ID NO: 1024937 - protein, 616 aa, Homo sapiens
  misc_feature (6)..(6): Xaa can be any naturally occurring amino acid
  misc_feature (16)..(16): Xaa can be any naturally occurring amino acid
MGAALXLHPGAFLAPXSLPRGPAGQTQLASPRAWWMPVDPVPSTPSAEASVLPDLLEWTPDSQETPGCRRGEKAGKVAGRGEGWAQESPGQAGGPGPPGPADHLVSGGGAHQGSGPGAKPPGPDNVSSSGVPATEGPTSEVTELRGAVGEESQETLMMNSDQKAVKFLANFYINGGKHWTHGHLRQTQPEPTQPKASVLLLGPEPGMAWDETQPPKMKEIPVGLRLQTGTPQESLPTYTQTLRELCEEGPGHPTPKLVFGGLWEGPAERSPGPELASLWPVLEQRLLITADLEVPSPTRYQVPSPSDTRALSNPHYSIGCKHQGREGGGRRAWQTLWFQSESPFTQKADFDQEQKWPSPAHYQLLSRPAFPAFSFRGCHSLPRHLKANPPRAAWGQGAGPQGAAPVPASGLFAGTWQEMPWPQHLQYPSWEPPAEPPLAGFSMSRPLRSPPGSAPPEPLAQPPTTWRTATHASLRRLAWSSRVYADPSATTQAPSARSRASWAQPAWPGHRVETMASPGAFPGLPWDLGPQPGLLTLWAPRCTLLAGQPFYGLWTRLAQPGSPICPSPRYTEMLLVFPSSVVCSCLSVTRGRVLEIWLPAGSFPAFPVEGSPFSCP

SEQ ID NO: 1024938 - protein, 319 aa, Homo sapiens
MKMASSLAFLLLNFHVSLLLVQLLTPCSAQFSVLGPSGPILAMVGEDADLPCHLFPTMSAETMELKWVSSSLRQVVNVYADGKEVEDRQSAPYRGRTSILRDGITAGKAALRIHNVTASDSGKYLCYFQDGDFYEKALVELKVAALGSNLHVEVKGYEDGGIHLECRSTGWYPQPQIQWSNAKGENIPAVEAPVVADGVGLYEVAASVIMRGGSGEGVSCIIRNSLLGLEKTASISIADPFFRSAQPWIAALAGTLPILLLLLAGASYFLWRQQKEITALSSEIESEQEMKEMGYAATEREISLRESLQEELKRKKSST

SEQ ID NO: 1024939 - protein, 130 aa, Homo sapiens
MKMASSLAFLLLNFHVSLLLVQLLTPCSAQFSVLGPSGPILAMVGEDADLPCHLFPTMSAETMELKWVSSSLRQVVNVYADGKEVEDRQSAPYRGRTSILRDGITAGKAALRIHNVTASDSGKYLCYFQM

SEQ ID NO: 1024940 - protein, 123 aa, Homo sapiens
YILRLVNVMNVISTVWPNSWLIRLKSSMTSCAVTGSNAATGSSAKRTLGFCVNVRANDTRLLLTTSQLISPTNALSNIDIRSSASKGESFLFWKSPTTGPNGYPNHDSSHFADSIVQRYRWKS

SEQ ID NO: 1024941 - protein, 267 aa, Homo sapiens
SVGLIELACSSWVFCGFLRYWSQAYTPATMSKGPAVGIDLGTTYSCVGVFQHGKVEDNLPMIRGNRTTSKLCLPLLDTERLIGDAAKNQVAMNPTNTVFDAKRLIGRRFDDAVVQSDMKHWPFMVVNDAGSAQVSKYEYNGRKTKSFYPEEVSSMVLTKDDMDIAGSLPWERLSTTAVVHSASLTFKLTLRRQAYQEMLELFLGLHVLSTLLVKPTAAAIAYGLDGKGLEQKETCSSLTWGGGHFLMLSILTIEGWKSFEGPRSYSL

SEQ ID NO: 1024942 - protein, 36 aa, Homo sapiens
  misc_feature (19)..(19): Xaa can be any naturally occurring amino acid
MSKGPAVGIDLGTTYSCVXIREPNHSKLCRLKTGLI

SEQ ID NO: 1024943 - protein, 584 aa, Homo sapiens
MKMASSLAFLLLNFHVSLFLVQLLTPCSAQFSVLGPSGPILAMVGEDADLPCHLFPTMSAETMELRWVSSSLRQVVNVYADGKEVEDRQSAPYRGRTSILRDGITAGKAALRIHNVTASDSGKYLCYFQDGDFYEKALVELKVAALGSDLHIEVKGYEDGGIHLECRSTGWYPQPQIKWSDTKGENIPAVEAPVVADGVGLYAVAASVIMRGSSGGGVSCIIRNSLLGLEKTASISIADPFFRSAQPWIAALAGTLPISLLLLAGASYFLWRQQKEKIALSRETEREREMKEMGYAATEQEISLREKLQEELKWRKIQYMARGEKSLAYHEWKMALFKPADVILDPDTANAILLVSEDQRSVQRAEEPRDLPDNPERFEWRYCVLGCENFTSGRHYWEVEVGDRKEWHIGVCSKNVERKKGWVKMTPENGYWTMGLTDGNKYRALTEPRTNLKLPEPPRKVGIFLDYETGEISFYNATDGSHIYTFPHASFSEPLYPVFRILTLEPTALTICPIPKEVESSPDPDLVPDHSLETPLTPGLANESGEPQAEVTSLLLPAHPGAEVSPSATTNQNHKLQARTEALY

SEQ ID NO: 1024944 - protein, 96 aa, Homo sapiens
TLVRLETKAVENSMLGNQRAVQPDDRPHIPGQSAQLFIYQMSSPQLQQQPSANKYKQEKSKTTPFVNQLNSNADYVWKTFSANSSWRQSGSLTHHF

SEQ ID NO: 1024945 - protein, 67 aa, Homo sapiens
PVYAPGAYLALRLCVSYPPLSVSRDQTYCLGPSQLDKNEPRYRVTIMSLLTTLCICISQSTSPFSVM

SEQ ID NO: 1024946 - protein, 224 aa, Homo sapiens; identical to SEQ ID NO: 917137

SEQ ID NO: 1024947 - protein, 71 aa, Homo sapiens
  misc_feature (3)..(4): Xaa can be any naturally occurring amino acid
AEXXNTGKDGTSTHSLNSEKAEGSGMPRCRARPKPGSTTPGYMNKDKAGNPPDHSFLICQINTVIIAPHEM

SEQ ID NO: 1024948 - protein, 104 aa, Homo sapiens
FVYRTAVCIENSCMEKGVSKGETVRIHIFREIIRPAEKSLHESLNKIGALHPPQPTEAADLKSSYTPETDIIVPPMMLLGMLVRKESDTGQNALQTSFLSPTQG

SEQ ID NO: 1024949 - protein, 674 aa, Homo sapiens
MARAHWGCCPWLVLLCACAWGHTKPLDLGGQDVRNCSTNPPYLPVTVVNTTMSLTALRQQMQTQNLSAYIIPGTDAHMNEYIGQHDERRAWITGFTGSAGTAVVTMKKAAVWTDSRYWTQAERQMDCNWELHKEVGTTPIVTWLLTEIPAGGRVGFDPFLLSIDTWESYDLALQGSNRQLVSITTNLVDLVWGSERPPVPNQPIYALQEAFTGSTWQEKVSGVRSQMQKHQKVPTAVLLSALEETAWLFNLRASDIPYNPFFYSYTLLTDSSIRLFANKSRFSSETLSYLNSSCTGPMCVQIEDYSQVRDSIQAYSLGDVRIWIGTSYTMYGIYEMIPREKLVTDTYSPVMMTKAVKNSKEQALLKASHVRDAVAVIRYLVWLEKNVPKGTVDEFSGAEIVDKFRGEEQFSSGPSFETISASGLNAALAHYSPTKELNRKLSSDEMYLLDSGGQYWDGTTDITRTVHWGTPSAFQKEAYTRVLIGNIDLSRLIFPAATSGRMVEAFARRALWDAGLNYGHGTGHGIGNFLCVHEWPVGFQSNNIAMAKGMFTSIEPGYYKDGEFGIRLEDVALVVEAKTKYPGSYLTFEVVSFVPYDRNLIDVSLLSPEHLQYLNRYYQTIREKVGPELQRRQLLEEFEWLQQHTEPLAARAPDTASWASVLVVSTLAILGWSV

SEQ ID NO: 1024950 - protein, 559 aa, Homo sapiens
SLLAVVVLLALPVAWGQCNAPEWLPFARPTNLTDEFEFPIGTYLNYECRPGYSGRPFSIICLKNSVWTGAKDRCRRKSCRNPPDPVNGMVHVIKGIQFGSQIKYSCTKGYRLIGSSSATCIISGDTVIWDNETPICDRIPCGLPPTITNGDFISTNRENFHYGSVVTYRCNPGSGGRKVFELVGEPSIYCTSNDDQVGIWSGPAPQCIIPNKCTPPNVENGILVSDNRSLFSLNEVVEFRCQPGFVMKGPRRVKCQALNKWEPELPSCSRVCQPPPDVLHAERTQRDKDNFSPGQEVFYSCEPGYDLRGAASMRCTPQGDWSPAAPTCEVKSCDDFMGQLLNGRVLFPVNLQLGAKVDFVCDEGFQLKGSSASYCVLAGMESLWNSSVPVCEQIFCPSPPVIPNGRHTGKPLEVFPFGKAVNYTCDPHPDRGTSFDLIGESTIRCTSDPQGNGVWSSPAPRCGILGHCQAPDHFLFAKLKTQTNASDFPIGTSLKYECRPEYYGRPFSITCLDNLVWSSPKDVCKRKSCKTPPDPVNGMVHVITDIQVGSRINYSCTTG

SEQ ID NO: 1024951 - protein, 156 aa, Homo sapiens
QKRALSVHLHSDLQGLVQGSDSEAMMNNPGYESSPRERSARGHWYPYNERLICIYCGKSFNQKGSLDRHMRLHMGITPFVCKFCGKKYTRKDQLEYHIRGHTDDKPFRCEICGKCFPFQGTLNQHLRKTTHGVAEVRSRIESPERTDVYVEQKLGK

SEQ ID NO: 1024952 - protein, 147 aa, Homo sapiens
KEEEELVSLKDRIERRRAERAEQQRFRNEREKERQNRLAEERARREEEENRRKAEDEARKKKAFANNDEFWGYTQKQAQTERKRWKRQTEREKKKKTLLRGGRLSNSTVNRTTLGEAKGFADNYIFGRKSFPYERHHGRYAILLKGH

SEQ ID NO: 1024953 - protein, 288 aa, Homo sapiens
GDSKLENAGGDLKDGHHHYEGAVVILDAGAQYGKVIDRRVRELFVQSEIFPLETPAFAIKEQGFRAIIISGGPNSVYAEDAPWFDPAIFTIGKPVLGICYGMQMMNKVFGGTVHKKSVREDGVFNISVDNTCSLFRGLQKEEVVLLTHGDSVDKVADGFKVVARSGNIVAGIANESKKLYGAQFHPEVGLTENGKVILKNFLYDIAGCSGTFTVQNRELECIREIKERVGTSKVLVLLSGGVDSTVCTALLNRALNQEQVIAVHIDNGFMRKRESQSVEEALSLEFSQ

SEQ ID NO: 1024954 - protein, 316 aa, Homo sapiens
GDSKLENAGGDLKDGHHHYEGAVVILDAGAQYGKVIDRRVRELFVQSEIFPLETPAFAIKEQGFRAIIISGGPNSVYAEDAPWFDPAIFTIGKPVLGICYGMQMMNKVFGGTVHKKSVREDGVFNISVDNTCSLFRGLQKEEVVLLTHGDSVDKVADGFKVVARSGNIVAGIANESKKLYGAQFHPEVGLTENGKVILKNFLYDIAGCSGTFTVQNRELECIREIKERVGTSKVLVLLSGGVDSTVCTALLNRALNQEQVIAVHIDNGFMRKRESQSVEEALKKLGIQVKVINAAHSFYNGTTTLPISDEDRTPRK

SEQ ID NO: 1024955 - protein, 509 aa, Homo sapiens
  misc_feature (420)..(420): Xaa can be any naturally occurring amino acid
AEDMVQKVHSHSAEMEAQLSQALEELGGQKQRADMLEMELKMLKSQSSSAEQSFLFSREEADTLRLKVEELEGERSRLEEEKRMLEAQLERRALQGDYDQSRTKVLHMSLNPTSVARQRLREDHSQLQAECERLRGLLRAMERGGTVPADLEAAAASLPSSKEVAELKKQVESAELKNQRLKEVFQTKIQEFRKACYTLTGYQIDITTENQYRLTSLYAEHPGDCLIFKATSPSGSKMQLLETEFSHTVGELIEVHLRRQDSIPAFLSSLTLELFSRQTVAYLQARGHSRSHSAWPDLQVPCPASHRLGARPASPAPQGSSMTDRHAGTYVGLPAGAASTLSTCRPHASRSLGVGGGHQPGFLTLGNKIFSPKKKKEKGAVACSGEPGRPLAFGYGGMTGRLVGGWGGRAAGAVGGSDGXHAYEGGRPVITHKRRGARGEKIRGARPANIRLSGQERGEETRYHRPWRRGDSYNNGSPKTGGGPWSYSGGARTREAPGGSQGEVSATQY

SEQ ID NO: 1024956 - protein, 402 aa, Homo sapiens
  misc_feature (313)..(313): Xaa can be any naturally occurring amino acid
MSLNPTSVARQRLREDHSQLQAECERLRGLLRAMERGGTVPADLEAAAASLPSSKEVAELKKQVESAELKNQRLKEVFQTKIQEFRKACYTLTGYQIDITTENQYRLTSLYAEHPGDCLIFKATSPSGSKMQLLETEFSHTVGELIEVHLRRQDSIPAFLSSLTLELFSRQTVAYLQARGHSRSHSAWPDLQVPCPASHRLGARPASPAPQGSSMTDRHAGTYVGLPAGAASTLSTCRPHASRSLGVGGGHQPGFLTLGNKIFSPKKKKEKGAVACSGEPGRPLAFGYGGMTGRLVGGWGGRAAGAVGGSDGXHAYEGGRPVITHKRRGARGEKIRGARPANIRLSGQERGEETRYHRPWRRGDSYNNGSPKTGGGPWSYSGGARTREAPGGSQGEVSATQY

SEQ ID NO: 1024957 - protein, 381 aa, Homo sapiens
  misc_feature (292)..(292): Xaa can be any naturally occurring amino acid
RVHLMLHVALHGALGQRTVPADLEAAAASLPSSKEVAELKKQVESAELKNQRLKEVFQTKIQEFRKACYTLTGYQIDITTENQYRLTSLYAEHPGDCLIFKATSPSGSKMQLLETEFSHTVGELIEVHLRRQDSIPAFLSSLTLELFSRQTVAYLQARGHSRSHSAWPDLQVPCPASHRLGARPASPAPQGSSMTDRHAGTYVGLPAGAASTLSTCRPHASRSLGVGGGHQPGFLTLGNKIFSPKKKKEKGAGACSGEPGRPLAFGYGGMTGRLVGGWGGRAAGAVGGSDGXHAYEGGRPVITHKRRGARGEKIRGARPANIRLSGQERGEETRYHRPWRRGDSYNNGSPKTGGGPWSYSGGARTREAPGGSQGEVSATQY

SEQ ID NO: 1024958 - protein, 657 aa, Homo sapiens
NVQAGGMSLPRLLKVNIRTYDNSIPISESSRKSWNQKHFALTFPKPLQRGTNDKSRPLKSQITVTRHDKRKLEEGQKPAHKWIRHSFRKILQWPPIYTAAREQTPFRHLYTSKTHLKKAEYKKSKDEKGGTPLKKDSKKKGGSYATNPESKQIVEEKTKRQNEADKTPLKSSHENEQSKKSKSSSETNPESQNSKTVSKNCSQKDKKDSKNSKKTNTEFLHTKNNPKKDLKRSKTSNDPISEICSENSLNVDFLMLVGQSDDESINFDAWLRNYSQNNSKNYSLKYTKYTKKDTKKNAKKSSDAESEDSKDAKKDSKKVKKNVKKDDKKKDVKKDTESTDAESGDSKDERKDTKKDKKKLKKDDKKKDTKKYPESTDTESGDAKDARNDSRNLKKASKNDDKKKDAKKITFSTDSESELESKESQKDEKKDKKDSKTDNKKSVKNDEESTDADSEPKGDSKKGKKDEKKGKKDSKKDDKKKDAKKNAESTEMESDLELKKDKKHSKEKKGSKKDIKKDARKDTESTDAEFDESSKTGFKTSTKIKGSDTESEESLYKPGAKKKIDESDGTSANSKMEGLESKRGFRMSSKKTTFNEKGEKASTGRVPPSREKPPLPACEPSLPSPKVRRLCWCKMPPPPPKPRYAPLPEAPWIHKLL

SEQ ID NO: 1024959 - protein, 151 aa, Homo sapiens
SGSVSQAARRKMAVESRVTQEEIKKEPEKPIDREKTCPLLLQGLRPPITAATTELDEFLPGKMYRPASCMIYTWMDATLKKLTSLVEEVYPEARWKGSHFKFCNRFIQTVKQYLAIELKEIGSTMLAVRGDVTDSMTLQVAEVPDRRLLGH

SEQ ID NO: 1024960 - protein, 99 aa, Homo sapiens
  misc_feature (97)..(97): Xaa can be any naturally occurring amino acid
  misc_feature (99)..(99): Xaa can be any naturally occurring amino acid
RGELAECCARRGDGGLGQSLSKELLAEYQDLTFLTKQEILLAHRRFCELLPQEQRTWSRHFGHKFPSEQILSLPELKANPFKERICRVFFTFPAKDXLX

SEQ ID NO: 1024961 - protein, 173 aa, Homo sapiens
APFRSAICGGAATKMQIFVKTLTGKTITLEVEPSDTIENVKAKIQDKEGIPPDQQRLIFAGKQLEDGRTLSDYNIQKESTLHLVLRLRGGAKKRKKKSYTTPKKNKHKRKKVKLAVLKYYKVDENGKISRLRRECPSDECGAGVFMGSHFDRHYCGKCCLTYCFNKPEDKYTV

SEQ ID NO: 1024962 - protein, 153 aa, Homo sapiens
QDMQGPAVKLGRLVGYRETRLETQKPESGFLTDFVHSNEGIMQLEDGRTLSDYNIQKESTLHLVLRLRGGAKKRKKKSYTTPKKNKHKRKKVKLAVLKYYKVDENGKISRLRRECPSDECGAGVFMGSHFDRHYCGKCCLTYCFNKPEDKYTV

SEQ ID NO: 1024963 - protein, 125 aa, Homo sapiens
APFRSAICGGAATKMQIFVKTLTGKTITLEVEPSDTIENVKAKIQDKEGIPPDQQRLIFAGKQLEDGRTLSDYNIQKESTLHLVLRLRGGAKKRKKKSYTTPKKRSLVTIMRIRQSSLMMNMHLE

SEQ ID NO: 1024964 - protein, 43 aa, Homo sapiens
TAVYYCARDLLEQTTMRHIVAVPAAIYYYYMDVWGKGTTVTVS

SEQ ID NO: 1024965 - protein, 41 aa, Homo sapiens
MSGMEATVTIQSGKTGNMGLLECSKRLDHLPLSRVPGVLRP

SEQ ID NO: 1024966 - protein, 156 aa, Homo sapiens
  misc_feature (18)..(18): Xaa can be any naturally occurring amino acid
  misc_feature (23)..(23): Xaa can be any naturally occurring amino acid
  misc_feature (35)..(36): Xaa can be any naturally occurring amino acid
  misc_feature (44)..(44): Xaa can be any naturally occurring amino acid
  misc_feature (146)..(146): Xaa can be any naturally occurring amino acid
  misc_feature (152)..(152): Xaa can be any naturally occurring amino acid
GCGVRGFPPGKMTLETEXLWSLXIYNKTGCNPKDXXTPWGKAPXRMWWATHNVVCPVAQAGWATGCPRVPGSKPTSLNTVLPTLSLAPVDGGAPRLRDRVHLWDPPGPLSKLHGRGENLAQRLMRYWANFARTGDPNEPRDPKAPXMAPYPXGGSA

SEQ ID NO: 1024967 - protein, 80 aa, Homo sapiens
  misc_feature (34)..(34): Xaa can be any naturally occurring amino acid
  misc_feature (45)..(45): Xaa can be any naturally occurring amino acid
LAAGELRLPAQRPLPKRTAPFADVAPLQLKVRVXKGVEPRVVPGXTSQEVFEKTKRLLFLGAQATWTTCGMKAVLSFTCQ

SEQ ID NO: 1024968 - protein, 344 aa, Homo sapiens
RLGDSKAENRAEITVLVSDVNDNAPAFTQTSYTLFVRENNSPALHIGSVSATDRDSGINAQVTYSLLPPQDPHLPLTSLVSINADNGHLFALKSLDYEALQAFEFRVGATDRGSPALSSEALVRLLVLEANDNSPFVLYPLQNGSAPCTELVPRAAEPGYLVTKVVAVDGDSGQNAWLSYQLLKATEPGLFGVWAHNGEVRTARLLSERDAAKQRLVVLVKDNGEPPRSATATLHVLLVDGFSQPYLLLPEAAPAQAQADLLTVYLVVALASVSSLFLFSVLLFVAVRLCRRSRAASVGRCSVPEGPFPGQMVDVSGTGTLSQSYQYEVCLTGGSGTNEFKFLK

SEQ ID NO: 1024969 - protein, 465 aa, Homo sapiens
MPATPSLKVVHELPACTLCAGPLEDAVTVPCGHTFCRLCLPALSQMGAQSSGKILLCPLCQEEEQAETPMAPVPLGPLGETYCEEHGEKIYFFCENDAEFLCVFCREGPTHQAHTVGFLDEAIQPYRDRLRSRLEALSTERDEIEDVKCQEDQKLQVLLTQIESKKHQVETAFERLQQELEQQRCLLLARLRELEQQIWKERDEYITKVSEEVTRLGAQVKELEEKCQQPASELLQDVRVNQSRCEMKTFVSPEAISPDLVKKIRDFHRKILTLPEMMRMFSENLAHHLEIDSGVITLDPQTASRSLVLSEDRKSVRYTRQKKSLPDSPLRFDGLPAVLGFPGFSSGRHRWQVDLQLGDGGGCTVGVAGEGVRRKGEMGLSAEDGVWAVIISHQQCWASTSPGTDLPLSEIPRGVRVALDYEAGQVTLHNAQTQEPIFTFTASFSGKVFPFFAVWKKGSCLTLKG

SEQ ID NO: 1024970 - protein, 134 aa, Homo sapiens
  misc_feature (5)..(5): Xaa can be any naturally occurring amino acid
  misc_feature (27)..(27): Xaa can be any naturally occurring amino acid
  misc_feature (50)..(50): Xaa can be any naturally occurring amino acid
  misc_feature (110)..(110): Xaa can be any naturally occurring amino acid
  misc_feature (130)..(130): Xaa can be any naturally occurring amino acid
HLVGXQKVLDLLLPTEVSILHQHGTLXDMFELDLPTVHSIISKMIINEEXMASLDQPTQTVVMHRTEPTAQQNLALQLAEKLGTLVENNERVFDHKQGTYGGLLPENQKXRYRKNEGLHASVGVTPSSSXQRAY

SEQ ID NO: 1024971 - protein, 128 aa, Homo sapiens
PAARRRGAWAPPRAGASDSLHREAPPMPASSWGDSQNLLGPMNISIWGGAFPGHPSGGNLSLAPRTPGGLGPPLSASRPHSPPRVAGAGEEGASGLKTIKAGFFRDGQWSPEMEQRAPVAGIFSRSRL

SEQ ID NO: 1024972 - protein, 148 aa, Homo sapiens
NLKAQKFGRKAFGKHILGARPKQAGLELLTSGDPPTSASQGAGMTAVSHRAPPRSRGVLTGRLQASSDGREGIRAGVSSEMASGHLRWSREHLWRASSLEAACEPYGGPGLRAVRQTVSCRYVGEPCRQGLCLLSQNRTEEFGWGSPR

SEQ ID NO: 1024973 - protein, 145 aa, Homo sapiens
  misc_feature (8)..(8): Xaa can be any naturally occurring amino acid
  misc_feature (22)..(22): Xaa can be any naturally occurring amino acid
  misc_feature (31)..(31): Xaa can be any naturally occurring amino acid
  misc_feature (42)..(42): Xaa can be any naturally occurring amino acid
  misc_feature (48)..(48): Xaa can be any naturally occurring amino acid
GGNNTVAXPDYGHDLEPLGHTXSLGKEDQVXLTPRNWKWERXQLLGSXVELCLSLPCPSKDQEERNEPRSACQVSSEMASGHLRWSREHLWRASSLEAACEPYGGPGLRAVRQTVSCRYVGEPCRQGLCLLSQNRTEEFGWGSPR

SEQ ID NO: 1024974 - protein, 445 aa, Homo sapiens
MDLELDEYYNKTLATENNTAATRNSDFPVWDDYKSSVDDLQYFLIGLYTFVSLLGFMGNLLILMALMKKRNQKTTVNFLIGNLAFSDILVVLFCSPFTLTSVLLDQWMFGKVMCHIMPFLQCVSVLVSTLILISIAIVRYHMIKHPISNNLTANHGYFLIATVWTLGFAICSPLPVFHSLVELQETFGSALLSSRYLCVESWPSDSYRIAFTISLLLVQYILPLVCLTVSHTSVCRSISCGLSNKENRLEENEMINLTLHPSKKSGPQVKLSGSHKWSYSFIKKHRRRYSKKTACVLPAPERPSQENHSRILPENFGSVRSQLSSSSKFIPGVPTCFEIKPEENSDVHELRVKRSVTRIKKRSRSVFYRLTILILVFAVSWMPLHLFHVVTDFNDNLISNRHFKLVYCICHLLGMMSCCLNPILYGFLNNGIKADLVSLIHCLHM

SEQ ID NO: 1024975 - protein, 445 aa, Homo sapiens; identical to SEQ ID NO: 1024974

SEQ ID NO: 1024976 - protein, 231 aa, Homo sapiens
MDLELDEYYNKTLATENNTAATRNSDFPVWDDYKSSVDDLQYFLIGLYTFSGPQVKLSGSHKWSYSFIKKHRRRYSKKTACVLPAPERPSQENHSRILPENFGSVRSQLSSSSKFIPGVPTCFEIKPEENSDVHELRVKRSVTRIKKRSRSVFYRLTILILVFAVSWMPLHLFHVVTDFNDNLISNRHFKLVYCICHLLGMMSCCLNPILYGFLNNGIKADLVSLIHCLHM

SEQ ID NO: 1024977 - protein, 455 aa, Homo sapiens
MSFYSKQDYNMDLELDEYYNKTLATENNTAATRNSDFPVWDDYKSSVDDLQYFLIGLYTFVSLLGFMGNLLILMALMKKRNQKTTVNFLIGNLAFSDILVVLFCSPFTLTSVLLDQWMFGKVMCHIMPFLQCVSVLVSTLILISIAIVRYHMIKHPISNNLTANHGYFLIATVWTLGFAICSPLPVFHSLVELQETFGSALLSSRYLCVESWPSDSYRIAFTISLLLVQYILPLVCLTVSHTSVCRSISCGLSNKENRLEENEMINLTLHPSKKSGPQVKLSGSHKWSYSFIKKHRRRYSKKTACVLPAPERPSQENHSRILPENFGSVRSQLSSSSKFIPGVPTCFEIKPEENSDVHELRVKRSVTRIKKRSRSVFYRLTILILVFAVSWMPLHLFHVVTDFNDNLISNRHFKLVYCICHLLGMMSCCLNPILYGFLNNGIKADLVSLIHCLHM

SEQ ID NO: 1024978 - protein, 179 aa, Homo sapiens
STCPGAASMVHRNVISPHCRSAVEAHDVPRVDLVHDLQLADDLVRDGRLDLKVDQLPVHDEARGSVLDFGDHPRRCPRPALDPFEVIVFEFADLGFLGERSSSRFFCCSSSSSSSSFFCRSTEVSSEAPSLVGDGPSAMVGLMVDAGSDGFSGPASGSAGGGAAPLAGAIGGGPGAVRP

SEQ ID NO: 1024979 - protein, 193 aa, Homo sapiens
  misc_feature (1)..(1): Xaa can be any naturally occurring amino acid
  misc_feature (25)..(25): Xaa can be any naturally occurring amino acid
XPYKLTHEILQPDYIATECFVTDSXECTKSHCLSVQTGPLVKYSSDNFQAPSNYRYYPYQSSDSTTPQLPLPGQEGVLVPVYLPTIQSCWNYGFSCSSDELPVLGLTKSGGSDRTIAYENKALMLCEGLFVADVTDFEGWKAAIPSALDTNSSKSTSSFPCPAGHFQRLPHGHPPLLPDQLLRCGLDGVAQGW

SEQ ID NO: 1024980 - protein, 716 aa, Homo sapiens
  misc_feature (164)..(164): Xaa can be any naturally occurring amino acid
  misc_feature (172)..(172): Xaa can be any naturally occurring amino acid
GTPPVWSSPAKHCQESCEAAPAMCEEEDSTALVCDNGSWLCKAAFAGDDAPRAVFPSIVGRPRHQGVMVGMGQKDSYVGDEAQSKRGILTLKYPIEHGIITNWDDMEKIWHHSFYNELRVCPLKSIPPLTHGRHPLKPQRPNREKIDSKLLFEDFTMFPGHVMXAHPRRLLXSLMPLDAQHGYRAWTPGEWCHPQMSPSIEGYACAPMAIHESGIWAEPSISTVLTSMEDPGLYRGLFTFVYYCLSPENCPGTIKEKTVIMLALDFENEMATACILNPPFEKSYELPDGPSDHHRKLHTTPLPRDPVPVLPSSGMESAGVHESTYTQQIMKAVIIAITWTGHSTAEQTVPITGAPIYCTLGIARSIATRESLAYEPGDLKTRYTRLSRTLLTGLSVHLCLCPHAFDQQPTISPTDRDKTLGRCYQTVVETCINKHGRRHWGKSLVTLVRSRHSQRMSKTETDQAAHTATPRQATHQPQHNSSERSSTAASTDTQRSRAQPRQPTDGQRQANTTDHQHQDKALTCYSDYHITHTLISTSHSITLSKIDNNYDLNRHHIKEQNTQYTLICTHQLCNTSVLRMIQEQTKTATYTVHSMRTHRSIKYDKILDKPQNEAYKSPNTYIKEDELTRLRSGLTHSDRGKGYSRAGRTPKRASDASANQTEESPDRAHTERAAARRAAMHASVQTDQEEKRKRASRDPESRSHRNRHNERYREYG

SEQ ID NO: 1024981 - protein, 541 aa, Homo sapiens
EHHQCGAAQPSTVRNPVKQLQLCVSLMPSGTHNMAIVLGLLENGVTHNVPIYEGYACAPMAIHESGIWLAEDLNCTYLMEDPGLYRGLFTFVYYCLSPENCPGTIKEKTVIMLALDFENEMATACILNPPFEKSYELPDGPSDHHRKLHTTPLPRDPVPVLPSSGMESAGVHESTYTQQIMKAVIIAITWTGHSTAEQTVPITGAPIYCTLGIARSIATRESLAYEPGDLKTRYTRLSRTLLTGLSVHLCLCPHAFDQQPTISPTDRDKTLGRATKTVVETCINKHGRRHWGKSLVTLVRSRHSQRMSKTETDQAAHTATPRQATHQPQHNSSERSSTAASTDTQRSRAQPRQPTDGQRQANTTDHQHQDKALTCYSDYHITHTLISTSHSITLSKIDNNYDLNRHHIKEQNTQYTLICTHQLCNTSVLRMIQEQTKTATYTVHSMRTHRSIKYDKILDKPQNEAYKSPNTYIKEDELTRLRSGLTHSDRGKGYSRAGRTPKRASDASANQTEESPDRAHTERAAARRAAMHASVQTDQEE

SEQ ID NO: 1024982 - protein, 159 aa, Homo sapiens
MAKQHGKHPDTALAQNRKARHDYAVEETYEAGIALTGTEIKIRFAIGGSTLKDGFVSSFATVEAWMQNVHIESRLKRVNRYNVDPLRSRKLLLHKKEISKLGAATMTKGVTIIPLKMYLKHGFAKVLIGVAHGKREYDKRQDIKKREQQRQIDRVMKHY

SEQ ID NO: 1024983 - protein, 107 aa, Homo sapiens
GQFENLTPELPFEPNQEVPVAPSQSRQDLTDELAQKLFDVSEITSAAMVHSLPTAVPESPRIHPTRTPKTPRTPRLQDPNKTPRFYPVVKEPKAIDVKESKKEKNKA

SEQ ID NO: 1024984 - protein, 74 aa, Homo sapiens
  misc_feature (23)..(23): Xaa can be any naturally occurring amino acid
  misc_feature (31)..(31): Xaa can be any naturally occurring amino acid
ALNVLLDELLAVVGQIQVAVAEXPEYFVAQXQIAPNTFSAEGQQFLLVRHDVSLRVDRARPKQPVARRQGPILH

SEQ ID NO: 1024985 - protein, 417 aa, Homo sapiens
  misc_feature (30)..(30): Xaa can be any naturally occurring amino acid
  misc_feature (40)..(40): Xaa can be any naturally occurring amino acid
HERRSWWSERFPGEEMCKVPALASTPSSTXQDSGGLLRPXRSSGSRALAPPWDGAAASPPDLSRALLPQYWSAELNSGHFAFPQPVLTAKGTMTASSVLLHTGQKMPLIGLGTWKSEPGQVKAAIKHALSAGYRHIDCASVYGNETEIGEALKESVGSGKAVPREELFVTSKLWNTKHHPEDVEPALRKTLADLQLEYLDLYLMHWPYAFERGDNPFPKNADGTVRYDSTHYKETWKALEVLVAKGLVKALGLSNFNSRQIDDVLSVASVRPAVLQVECHPYLAQNELIAHCHARGLEVTAYSPLGSSDRAWRHPDEPVLLEEPVVLALAEKHGRSPAQILLRWQVQRKVICIPKSINPSRILQNIQVFDFTFSPEEMKQLDALNKNWRYIVPMITVDGKRVPRDAGHPLYPFNDPY

SEQ ID NO: 1024986 - protein, 210 aa, Homo sapiens
MSGYSSDRDRGRDRGFGAPRFGGSRAGPLSGKKFGNPGEKLVKKKWNLDELPKFEKNFYQEHPDLARRTAQEVETYRRSKEITVRGHNCPKPVLNFYEANFPANVMDVIARQNFTEPTAIQAQGWPVALSGLDYGLGSGAPELGILGKKPLVFNSAFPCPIVSTIPILHAIPLEKKRRCGPNMIWEAVDPKSGKRVPPGCPPRQVSLQHM

SEQ ID NO: 1024987 - protein, 214 aa, Homo sapiens
  misc_feature (94)..(94): Xaa can be any naturally occurring amino acid
  misc_feature (102)..(102): Xaa can be any naturally occurring amino acid
  misc_feature (106)..(106): Xaa can be any naturally occurring amino acid
  misc_feature (138)..(138): Xaa can be any naturally occurring amino acid
  misc_feature (141)..(141): Xaa can be any naturally occurring amino acid
  misc_feature (143)..(143): Xaa can be any naturally occurring amino acid
  misc_feature (154)..(154): Xaa can be any naturally occurring amino acid
  misc_feature (163)..(164): Xaa can be any naturally occurring amino acid
  misc_feature (166)..(167): Xaa can be any naturally occurring amino acid
  misc_feature (170)..(170): Xaa can be any naturally occurring amino acid
  misc_feature (193)..(193): Xaa can be any naturally occurring amino acid
MSGYSSDRDRGRDRGFGAPRFGGSRAGPLSGKKFGNPGEKLVKKKWNLDELPKFEKNFYQEHPDLARRTAQEVETYRRSKEITVRGHNCPKPGXKGGGGEGXGEGXGGDARQNFTEPTAIQAQGWPVALSGGGGGGVXQTXSXKTLSYFLPSIXHINHQPFLXXGXXPIXFVLAPTRELAQQVQQVAAEYCRXCRLKSTCIYGGAPKGHKYVIW

SEQ ID NO: 1024988 - protein, 619 aa, Homo sapiens [sequence omitted]

SEQ ID NO: 1024989 - protein, 671 aa, Homo sapiens [sequence omitted]

SEQ ID NO: 1024990 - protein, 612 aa, Homo sapiens
MRPRRLGRCCAGSRLGPGDPAALTCAPSPSASPAPEPSAQPQARGTGQRVGSRATSGTQFLSEARTGARPASEAGAKAGARRPSAFSAIQGDVRSMPDNSDAPWTRFVFQGPFGSRATGRGTGKAAGIWKTPAAYVGRRPGVSGPERAAFIRELEEALCPNLPPPVKKITQEDVKVMLYLLEEVCTAFLIQLLPPVWESVTYGMVLQRERDLNTAARIGQSLVKQNSVLMEENSKLEALLGSAKEEILYLRHQVNLRDELLQLYSDSDEEDEDEEEEEEEKEAEEEQEEEEAEEDLQCAHPCDAPKLISQEALLHQHHCPQLEALQEKLRLLEEENHQLREEASQLDTLEDEEQMLILECVEQFSEASQQMAELSEVLVLRLENYERQQQEVARLQAQVLKLQQRCRMYGAETEKLQKQLASEKEIQMQLQEEETLPGFQETLAEELRTSLRRMISDPVYFMERNYEMPRGDTSSLRYDFRYSEDREQVRGFEAEEGLMLAADIMRGEDFTPAEELVPQEELGAAKKVPAEEGVMEEAELVSEETEGWEEVELELDEATRMNVVTSALEASGLGPSHLDMNYVLQQLANWQDAHYRRQLRWKMLQKEPQPWT

SEQ ID NO: 1024991 - protein, 554 aa, Homo sapiens
MRPRRLGRCCAGSRLGPGDPAALTCAPSPSASPAPEPSAQPQARGTGQRVGSRATSGTQFLSEARTGARPASEAGAKAGARRPSAFSAIQGDVRSMPDNSDAPWTRFVFQGPFGSRATGRGTGKAAGIWKTPAAYVGRRPGVSGPERAAFIRELEEALCPNLPPPVKKITQEDVKVMLYLLEEVCTAFLIQLLPPVWESVTYGMVLQRERDLNTAARIGQSLVKQNSVLMEENSKLEALLGSAKEEILYLRHQVNLRDELLQLYSDSDEEDEDEEEEEEEKEAEEEQEEEEAEEDLQCAHPCDAPKLISQEALLHQHHCPQLEALQEKLRLLEEENHQLREEASQLDTLEDEEQMLILECVEQFSEASQQMAELSEVLVLRLENYERQQQEVARLQAQVLKLQQRCRMYGAETEKLQKQLASEKEIQMQLQEEETLPGFQETLAEELRTSLRRMISDPVYFMERNYEMPRGDTSSLRYDFRYSEDREQVRGFEAEEGLMLAADIMRGEDFTPAEELVPQEELGAAKKQLANWQDAHYRRQLRWKMLQKEPQPWT

SEQ ID NO: 1024992 - protein, 602 aa, Homo sapiens
MRPRRLGRCCAGSRLGPGDPAALTCAPSPSASPAPEPSAQPQARGTGQRVGSRATSGTQFLSEARTGARPASEAGAKAGARRPSAFSAIQGDVRSMPDNSDAPWTRFVFQGPFGSRATGRGTGKAAGIWKTPAAYVGRRPGVSGPERAAFIRELEEALCPNLPPPVKKITQEDVKVMLYLLEEVCTAFLIQLLPPVWESVTYGMVLQRERDLNTAARIGQSLVKQNSVLMEENSKLEALLGSAKEEILYLRHQVNLRDELLQLYSDSDEEDEDEEEEEEEKEAEEEQEEEEAEEDLQCAHPCDAPKLISQEALLHQHHCPQLEALQEKLRLLEEENHQLREEASQLDTLEDEEQMLILECVEQFSEASQQMAELSEVLVLRLENYERQQQEVARLQAQVLKLQQRCRMETLPGFQETLAEELRTSLRRMISDPVYFMERNYEMPRGDTSSLRYDFRYSEDREQVRGFEAEEGLMLAADIMRGEDFTPAEELVPQEELGAAKKVPAEEGVMEEAELVSEETEGWEEVELELDEATRMNVVTSALEASGLGPSHLDMNYVLQQLANWQDAHYRRQLRWKMLQKGECPHGALPAASRTSCRSSCR

SEQ ID NO: 1024993 - protein, 627 aa, Homo sapiens
MRPRRLGRCCAGSRLGPGDPAALTCAPSPSASPAPEPSAQPQARGTGQRVGSRATSGTQFLSEARTGARPASEAGAKAGARRPSAFSAIQGDVRSMPDNSDAPWTRFVFQGPFGSRATGRGTGKAAGIWKTPAAYVGRRPGVSGPERAAFIRELEEALCPNLPPPVKKITQEDVKVMLYLLEEVCTAFLIQLLPPVWESVTYGMVLQRERDLNTAARIGQSLVKQNSVLMEENSKLEALLGSAKEEILYLRHQVNLRDELLQLYSDSDEEDEDEEEEEEEKEAEEEQEEEEAEEDLQCAHPCDAPKLISQEALLHQHHCPQLEALQEKLRLLEEENHQLREEASQLDTLEDEEQMLILECVEQFSEASQQMAELSEVLVLRLENYERQQQEVARLQAQVLKLQQRCRMYGAETEKLQKQLASEKEIQMQLQEEETLPGFQETLAEELRTSLRRMISDPVYFMERNYEMPRGDTSSLRYDFRYSEDREQVRGFEAEEGLMLAADIMRGEDFTPAEELVPQEELGAAKKVPAEEGVMEEAELVSEETEGWEEVELELDEATRMNVVTSALEASGLGPSHLDMNYVLQQLANWQDAHYRRQLRWKMLQKGECPHGALPAASRTSCRSSCR

SEQ ID NO: 1024994 - protein, 458 aa, Homo sapiens
MRPRRLGRCCAGSRLGPGDPAALTCAPSPSASPAPEPSAQPQARGTGQRVGSRATSGTQFLSEARTGARPASEAGAKAGARRPSAFSAIQGDVRSMPDNSDAPWTRFVFQGPFGSRATGRGTGKAAGIWKTPAAYVGRRPGVSGPERAAFIRELEEALCPNLPPPVKKITQEDVKVMLYLLEEVCTAFLIQLLPPVWESVTYGMVLQRERDLNTAARIGQSLVKQNSVLMEENSKLEALLGSAKEEILYLRHQVNLRDELLQLYSDSDEEDEDEEEEEEEKEAEEEQEEEEAEEDLQCAHPCDAPKLISQEALLHQHHCPQLEALQEKLRLLEEENHQLREEASQLDTLEDEEQMLILECVEQFSEASQQMAELSEVLVLRLENYERQQQEVARLQAQVLKLQQRCRIFGAQTEKLQQQLASEKGVHPESLRAGSHMQDYGSRPRERQEDGKSHRQRS

SEQ ID NO: 1024995 - protein, 77 aa, Homo sapiens
IELLTCCNATVEEIEALMKAVTSIYNLLCTKVEQQESKRTWGPGLANPLFREWGSPAGTATPSSERRHPESDPSFGI

SEQ ID NO: 1024996 - protein, 120 aa, Homo sapiens
  misc_feature (23)..(23): Xaa can be any naturally occurring amino acid
RKQFFWDKVDSPKILGTEDMLWXRKVFNFRLASEFIGNELAIKKLHSWLKDWKRRAELEERQNLKGKRDEKHEDFSGGIDFKGSSDDEEESRLCNTVPYNRANRSGKNCCSVCLCPGAWI

SEQ ID NO: 1024997 - protein, 210 aa, Homo sapiens
  misc_feature (23)..(23): Xaa can be any naturally occurring amino acid
RKQFFWDKVDSPKILGTEDMLWXRKVFNFRLASEFIGNELAIKKLHSWLKDWKRRAELEERQNLKGKRDEKHEDFSGGIDFKGSSDDEEESRLCNTVLITGPTGVGKTAAVYACAQELGFKIFEVNASSQRSGRQILSQLKEATQSHQVDKQGVNSQKPCFFNSYYIGKSPKKISSPKKVVTSPRKVPPPSPKSSGPKRALPPKTLAKLF

SEQ ID NO: 1024998 - protein, 82 aa, Homo sapiens
AEEMLERVETLIRFHPGAQTLAGAAAAMDDREDLVYQAKWPEQAERYDEMVESMKKVAGMDVELTVEERNLLSVAYKNVIGA

SEQ ID NO: 1024999 - protein, 70 aa, Homo sapiens
MSRSLARSGLQLPAFVSELGMYLEVFVVFDFWERVWRRIGTSFTLKVFGQNSSGPLDVFIALLSIDPRYL

SEQ ID NO: 1025000 - protein, 143 aa, Homo sapiens
EVRTHAEIKAFSTQMSINGGQRLALKANIAGATDVKWVLTGVELTNSEEYRYGVSGSDQTLTIKQASHRDEGLLTCISKTKGGIVKVSVFFDTYQELSGAPAFTYSLDSNIMRQMSLLWNQCDTLNRWLNTAILSQCASVEVT

SEQ ID NO: 1025001 - protein, 230 aa, Homo sapiens
  misc_feature (5)..(5): Xaa can be any naturally occurring amino acid
IQLKXETSRQGVKTRSHWQGAAPSRRCGGHDGVLASALGRYERRSDSAQTLAGSAEPSGLGAPARGLRAGEPRAERGRSPGRRPTPPPAPRPGRPGPSAAGTALNLFEAPLRASRAGDCGSDSCVPAVGATSCGKQGKTTLVRRSSCLSPFVGDQHLVRMITISNRDPKPSHQGTSRVTITLTLNLGLLHFSAGCVNVRDPQLQAAVSWRNWTTATGWGSAVGDGTGRGR

SEQ ID NO: 1025002 - protein, 71 aa, Homo sapiens
MITISNRDPKPSHQGTSRVTITLTLNLGLLHFSAGCVNVRDPQLQAAVSWRNWTTATGWGSAVGDGTGRGR

SEQ ID NO: 1025003 - protein, 251 aa, Homo sapiens
MERAVQGTDGGGGSNSSSRSSSRATSAGSSPSCSLAGRGVSSRSAAAGLGGGGSRSSPGSVAASPSGGGGRRREPALEGVLSKYTNLLQGWQNRYFVLDFEAGILQYFVNEQSKHQKPRGVLSLSGAIVSLSDEAPHMLVVYSANGEMFKLRAADAKEKQFWVTQLRACAKYHMEMNSKSAPSSRSRSLTLLPHGTPNSASPCSQRHLSVGAPGVVTITHHKSPAAARRAKSQYSGQLHEVREMMNQVEGQ

SEQ ID NO: 1025004 - protein, 251 aa, Homo sapiens; identical to SEQ ID NO: 1025003

SEQ ID NO: 1025005 - protein, 158 aa, Homo sapiens
MERAVQGTDGGGGSNSSSRSSSRATSAGSSPSCSLAGRGVSSRSAAAGLGGGGSRSSPGSVAASPSGGGGRRREPALEGVLSKYTNLLQGWQNRYFVLDFEAGILQYFVNEQSKHQKPRGVLSLSGAIVSLSDEAPHMLVVYSANGEMFKLRGAFFSQ

SEQ ID NO: 1025006 - protein, 99 aa, Homo sapiens
PRFLQFPNLTSIVIQVLESAPSSRSRSLTLLPHGTPNSASPCSQRHLSVGAPGVVTITHHKSPAAARRAKSQYSGQLHEVREVHTLLTEESCLLHWFTG

SEQ ID NO: 1025007 - protein, 260 aa, Homo sapiens
MERAVQGTDGGGGSNSSSRSSSRATSAGSSPSCSLAGRGVSSRSAAAGLGGGGSRSSPGSVAASPSGGGGRRREPALEGVLSKYTNLLQGWQNRYFVLDFEAGILQYFVNEQSKHQKPRGVLSLSGAIVSLSDEAPHMLVVYSANGEMFKLRAADAKEKQFWVTQLRACAKYHMEMNSKSAPSSRSRSLTLLPHGTPNSASPCSQRHLSVGAPGVVTITHHKSPAAARRAKSQYSGQLHEVREVHTLLTEESCLLHWFTG

SEQ ID NO: 1025008 - protein, 526 aa, Homo sapiens
MAVFPSSGLPRCLLTLILLQLPKLDSAPFDVIGPPEPILAVVGEDAELPCRLSPNASAEHLELRWFRKKVSPAVLVHRDGREQEAEQMPEYRGRATLVQDGIAKGRVALRIRGVRVSDDGEYTCFFREDGSYEEALVHLKVAALGSDPHISMQVQENGEICLECTSVGWYPEPQVQWRTSKGEKFPSTSESRNPDEEGLFTVAASVIIRDTSTKNVSCYIQNLLLGQEKKVEISIPASSLPRLTPWIVAVAVILMVLGLLTIGSIFFTWRLYNERPRERRNEFSSKERLLEELKWKKATLHAVDVTLDPDTAHPHLFLYEDSKSVRLEDSRQKLPEKTERFDSWPCVLGRETFTSGRHYWEVEVGDRTDWAIGVCRENVMKKGFDPMTPENGFWAVELYGNGYWALTPLRTPLPLAGPPRRVGIFLDYESGDISFYNMNDGSDIYTFSNVTFSGPLRPFFCLWSSGKKPLTICPIADGPERVTVIANAQDLSKEIPLSPMGEESAPRDADTLHSKLIPTQPSQGAP

SEQ ID NO: 1025009 - protein, 568 aa, Homo sapiens
MTVLEITLAVILTLLGLAILAILLTRWARRKQSEMYISRYSSEQSARLLDYEDGRGSRHAYQHKVTLHMITERDPKRDYTPSTNSLALSRSSIALPQGSMSSIKCLQTTEEPPSRTAGAMMQFTALFPELQDLSSSLKKPLCKLQDLLYNIWIQCQIASHTITGHLQHPRSPMAPIIISQRTASQLAAPIRIPQVHTMDSSGKITLTPVVILTGYMDEELRKKSCSKIQILKCGGTARSQIAEKKTRKQLKNDIIFTNSVESLKSAHIKEPEREGKGTDLEKDKIGMEVKVDSDAGIPKRQETQLKISEDEYTTRTGSPNKEKCVRCTKRTGVQVKKSESGVPKGQEAQVTKSGLVVLKGQEAQVEKSEMGVPRRQESQVKKSQSGVSKGQEAQVKKRESVVLKGQEAQVEKSELKVPKGQEGQVEKTEADVPKEQEVQEKKSEAGVLKGPESQVKNTEVSVPETLESQVKKSESGVLKGQEAQEKKESFEDKGNNDKEKERDAEKDPNKKEKGDKNTKGDKGKDKVKGKRESEINGEKSKGSKRRRQIQEGSTTKKWKSKDKFFKGP

SEQ ID NO: 1025010 - protein, 115 aa, Homo sapiens
PETSNSQTEARTLASSMKVSAALLCLLLIAATFIPQGLAQPDAINAPVTCCYNFTNRKISVQRLASYRRITSSKCPKEAVIFKTIVAKEICADPKQKWVQDSMDHLDKQTQTPKT

SEQ ID NO: 1025011 - protein, 263 aa, Homo sapiens
MGAAVLFRSALSSQFGPAFALFLITVAGDPLRVIILVAGAFFWLVSLLLASVVWFILVHVTDRSDARLQYGLLILGAAVSVLLQEVFRFAYYKLLKKADEGLASLSEDGRSPISIRQMAYVSGLSFGIISGVFSVINILADALGPGVVGIHGDSPYYFLTSALSDRQHICSITLGVCLDAVKKRTAGLGGRHNRMDEFLNLGRGHRAIKQPRYRGAGPHTWRTPQLGTLGTERKREGNRRTPERTGRGGQYPQPKGDGKENRE

SEQ ID NO: 1025012 - protein, 177 aa, Homo sapiens
MGAAVLFRSALSSQFGPAFALFLITVAGDPLRVIILVAGAFFWLVSLLLASVVWFILVHVTDRSDARLQYGLLILGAAVSVLLQEVFRFAYYKLLKKADEGLASLSEDGRSPISIRQMAYVSGLSFGIISGVFSVINILADALGPGVVGIHGDSPYYFLTSALSDSSHYPAPYLLGH

SEQ ID NO: 1025013 - protein, 131 aa, Homo sapiens
RKWRGPSFGVSVPPLPLPRGLGVTLHRAPRGVACHPTRTPQLARPSHLPVWSGPHPPSHLTSHGGCGVISAALSSQFGPAFALFLITVAGDPLRVIILVAGAFFWLVSLLLASVVWFILVHVTDRSDARLQ

SEQ ID NO: 1025014 - protein, 510 aa, Homo sapiens
IANQDGSFYFMEMNTRLQVEHPVTEMITGQDLVEWQLRVAAGEPLPLSQEQLRIDGHALEARVYARIPDKQFLPSTGTLRTDLRDAVRVSYAGEDVHAAVDVASRMDTIDISYLISPYYDPLIAKLIVWGKDRDELARMRQALAAYLVVGLSTNIAFLQRLVASEPFARADLDTGLIARHEATLFAATGAVGMELIALAEAALLDAEHARRDRCRGSTLAMDPCRPVAAEPGAQRVLFAHGTDTLEVTLQAHAQGSTLFYADQAAPFRTHCVRPTDGPGRSRHAPARNGQVHRDAEFFHVFAGGRTSRWNGRTRGAGRSGGYVDILVLDREFMSTNTINSTTTSAIPSANLPLWSTGATVTRTPLLVMSDEDEHTISARTASSAKCCMGSATRSAKASSCSASRPRRVELRGQGVRYLRCEMQDSLAFPQSRLRRRVDNGPMPCLREAGAPGAPPDIEPTASALGFPGAGAIGRSAPDRMASRHEEILYRHILSFPCPDHPRRLRTAAMQ

SEQ ID NO: 1025015 - protein, 498 aa, Homo sapiens
IANQDGSFYFMEMNTRLQVEHPVTEMITGQDLVEWQLRVAAGEPLPLSQEQLRIDGHALEARVYARIPDKQFLPSTGTLRTDLRDAVRVSYAGEDVHGPAGVRIDSGVREGDAISPYYDPLIAKLIVWGKDRDELARMRQALAAYLVVGLSTNIAFLQRLVASEPFARADLDTGLIARHEATLFAPPARSAMELIALAEAALLDAEHARRDRCRGSTLAMDPCRPVAAEPGAQRVLFAHGTDTLEVTLQAHARGQARCSMPTRPRRSARIAFGRRNGPGRSRHAPARNGQVHRDAEFFHVFAGGRTSRWNGRNPWRKRAMPKSRCGKLTAPMPGKVIAVMVEPARRHRHAHAAAVMSDEDEHTISARTASSAKCCMGSATRSAKASSCSASRPRRVELRGQGVRYLRCEMQDSLAFPQSRLRRRVDNGPMPCLREAGARVPPPDIEPTASALGFPGAGAIGRSAPDRMASRHEEILYRHILSFPCPDHPRRLRTAAMQ

SEQ ID NO: 1025016 - protein, 82 aa, Homo sapiens
GVLAIRPDELRFRYSMVAYLRQAWTQLHPILPDLCKSSVEMHLRQNSKQMLRRLLQQRKIDEVRGLFTPTKLECYIPGKCLA

SEQ ID NO: 1025017 - protein, 117 aa, Homo sapiens [sequence omitted]

SEQ ID NO: 1025018 - protein, 172 aa, Homo sapiens
MCKGLAALPHSCLERAKEIKIKLGILLQKPDSVGDLVIPYNEKPEKPAKTQKTSLDEALQWRDSLDKLLQNNYGLAVSKSFLKSEFSEENLEFWIACEDYKKIKSPAKDGEKGKHIYEEFIQTEVLKKVNIDHFTKDITMKNLVEPSLSSFDMAQKRIHALMEGFSASVCAL

SEQ ID NO: 1025019 - protein, 115 aa, Homo sapiens
PVERKSLPEGRWRQRRERMNNKFDALKDDDSGDHDQNEENSTQKDGEKEKTERDKNQSSSKRKAVVPGPAEHPLQYNYTFWYSRRTPGVPRAHRSYEQNIKQIGTFASVEQFWRF

SEQ ID NO: 1025020 - protein, 156 aa, Homo sapiens
  misc_feature (156)..(156): Xaa can be any naturally occurring amino acid
YAPRRVVFQDDSLELKWDSDNDEENEDVPISMKELKPFTEKKDKKLDDISSNYTESFSTLDENDLLNPSEDIIAVQLKFRACLKILTVELRTLSTGYEIDGGKLRYQLYHWLEKEVIALQRTCDFCSDAEELQSAFGRNEDEFGLNEDAEDLPHQX

SEQ ID NO: 1025021 - protein, 1453 aa, Homo sapiens
MMLPQNSWHIDFGRCCCHQNLFSAVVTCILLLNSCFLISSFNGTDLELRLVNGDGPCSGTVEVKFQGQWGTVCDDGWNTTASTVVCKQLGCPFSFAMFRFGQAVTRHGKIWLDDVSCYGNESALWECQHREWGSHNCYHGEDVGVNCYGEANLGLRLVDGNNSCSGRVEVKFQERWGTICDDGWNLNTAAVVCRQLGCPSSFISSGVVNSPAVLRPIWLDDILCQGNELALWNCRHRGWGNHDCSHNEDVTLTCYDSSDLELRLVGGTNRCMGRVELKIQGRWGTVCHHKWNNAAADVVCKQLGCGTALHFAGLPHLQSGSDVVWLDGVSCSGNESFLWDCRHSGTVNFDCLHQNDVSVICSDGADLELRLADGSNNCSGRVEVRIHEQWWTICDQNWKNEQALVVCKQLGCPFSVFGSRRAKPSNEARDIWINSISCTGNESALWDCTYDGKAKRTCFRRSDAGVICSDKADLDLRLVGAHSPCYGRLEVKYQGEWGTVCHDRWSTRNAAVVCKQLGCGKPMHVFGMTYFKEASGPIWLDDVSCIGNESNIWDCEHSGWGKHNCVHREDVIVTCSGDATWGLRLVGGSNRCSGRLEVYFQGRWGTVCDDGWNSKAAAVVCSQLDCPSSIIGMGLGNASTGYGKIWLDDVSCDGDESDLWSCRNSGWGNNDCSHSEDVGVICSDASDMELRLVGGSSRCAGKVEVNVQGAVGILCANGWGMNIAEVVCRQLECGSAIRVSREPHFTERTLHILMSNSGCTGGEASLWDCIRWEWKQTACHLNMEASLICSAHRQPRLVGADMPCSGRVEVKHADTWRSVCDSDFSLHAANVLCRELNCGDAISLSVGDHFGKGNGLTWAEKFQCEGSETHLALCPIVQHPEDTCIHSREVGVVCSRYTDVRLVNGKSQCDGQVEINVLGHWGSLCDTHWDPEDARVLCRQLSCGTALSTTGGKYIGERSVRVWGHRFHCLGNESLLDNCQMTVLGAPPCIHGNTVSVICTGSLTQPLFPCLANVSDPYLSAVPEGSALICLEDKRLRLVDGDSRCAGRVEIYHDGFWGTICDDGWDLSDAHVVCQKLGCGVAFNATVSAHFGEGSGPIWLDDLNCTGMESHLWQCPSRGWGQHDCRHKEDAGVICSEFTALRLYSETETESCAGRLEVFYNGTWGSVGRRNITTAIAGIVCRQLGCGENGVVSLAPLSKTGSGFMWVDDIQCPKTHISIWQCLSAPWERRISSTAEETWITCEDRIRVRGGDTECSGRVEIWHAGSWGTVCDDSWDLAEAEVVCQQLGCGSALAALRDASFGQGTGTIWLDDMRCKGNESFLWDCHAKPWGQSDCGHKEDAGVRCSGQSLKSLNASSGRLALILSSIFGLLLPVLFILFLTWCRVQKQKHLPLRVSTRRRGSLEENLFHEMETCLKREDPHGTRTSDDTPNHGCEDASDTSLLGVLPASEATK

SEQ ID NO: 1025022 - protein, 1453 aa, Homo sapiens; identical to SEQ ID NO: 1025021

SEQ ID NO: 1025023 - protein, 1461 aa, Homo sapiens
DSGRDRPIMMLPQNSWHIDFGRCCCHQNLFSAVVTCILLLNSCFLISSFNGTDLELRLVNGDGPCSGTVEVKFQGQWGTVCDDGWNTTASTVVCKQLGCPFSFAMFRFGQAVTRHGKIWLDDVSCYGNESALWECQHREWGSHNCYHGEDVGVNCYGEANLGLRLVDGNNSCSGRVEVKFQERWGTICDDGWNLNTAAVVCRQLGCPSSFISSGVVNSPAVLRPIWLDDILCQGNELALWNCRHRGWGNHDCSHNEDVTLTCYDSSDLELRLVGGTNRCMGRVELKIQGRWGTVCHHKWNNAAADVVCKQLGCGTALHFAGLPHLQSGSDVVWLDGVSCSGNESFLWDCRHSGTVNFDCLHQNDVSVICSDGADLELRLADGSNNCSGRVEVRIHEQWWTICDQNWKNEQALVVCKQLGCPFSVFGSRRAKPSNEARDIWINSISCTGNESALWDCTYDGKAKRTCFRRSDAGVICSDKADLDLRLVGAHSPCYGRLEVKYQGEWGTVCHDRWSTRNAAVVCKQLGCGKPMHVFGMTYFKEASGPIWLDDVSCIGNESNIWDCEHSGWGKHNCVHREDVIVTCSGDATWGLRLVGGSNRCSGRLEVYFQGRWGTVCDDGWNSKAAAVVCSQLDCPSSIIGMGLGNASTGYGKIWLDDVSCDGDESDLWSCRNSGWGNNDCSHSEDVGVICSDASDMELRLVGGSSRCAGKVEVNVQGAVGILCANGWGMNIAEVVCRQLECGSAIRVSREPHFTERTLHILMSNSGCTGGEASLWDCIRWEWKQTACHLNMEASLICSAHRQPRLVGADMPCSGRVEVKHADTWRSVCDSDFSLHAANVLCRELNCGDAISLSVGDHFGKGNGLTWAEKFQCEGSETHLALCPIVQHPEDTCIHSREVGVVCSRYTDVRLVNGKSQCDGQVEINVLGHWGSLCDTHWDPEDARVLCRQLSCGTALSTTGGKYIGERSVRVWGHRFHCLGNESLLDNCQMTVLGAPPCIHGNTVSVICTGSLTQPLFPCLANVSDPYLSAVPEGSALICLEDKRLRLVDGDSRCAGRVEIYHDGFWGTICDDGWDLSDAHVVCQKLGCGVAFNATVSAHFGEGSGPIWLDDLNCTGMESHLWQCPSRGWGQHDCRHKEDAGVICSEFTALRLYSETETESCAGRLEVFYNGTWGSVGRRNITTAIAGIVCRQLGCGENGVVSLAPLSKTGSGFMWVDDIQCPKTHISIWQCLSAPWERRISSPAEETWITCEDRIRVRGGDTECSGRVEIWHAGSWGTVCDDSWDLAEAEVVCQQLGCGSALAALRDASFGQGTGTIWLDDMRCKGNESFLWDCHAKPWGQSDCGHKEDAGVRCSGQSLKSLNASSGHLALILSSIFGLLLLVLFILFLTWCRVQKQKHLPLRVSTRRRGSLEENLFHEMETCLKREDPHGTRTSDDTPNHGCEDASDTSLLGVLPASEATK

SEQ ID NO: 1025024 - protein, 1410 aa, Homo sapiens
DSGRDRPIMMLPQNSWHIDFGRCCCHQNLFSAVVTCILLLNSCFLISSFNGTDLELRLVNGDGPCSGTVEVKFQGQWGTVCDDGWNTTASTVVCKQLGCPFSFAMFRFGQAVTRHGKIWLDDVSCYGNESALWECQHREWGSHNCYHGEDVGVNCYGEANLGLRLVDGNNSCSGRVEVKFQERWGTICDDGWNLNTAAVVCRQLGCPSSFISSGVVNSPAVLRPIWLDDILCQGNELALWNCRHRGWGNHDCSHNEDVTLTCYDSSDLELRLVGGTNRCMGRVELKIQGRWGTVCHHKWNNAAADVVCKQLGCGTALHFAGLPHLQSGSDVVWLDGVSCSGNESFLWDCRHSGTVNFDCLHQNDVSVICSDGADLELRLADGSNNCSGRVEVRIHEQWWTICDQNWKNEQALVVCKQLGCPFSVFGSRRAKPSNEARDIWINSISCTGNESALWDCTYDGKAKRTCFRRSDAGVICSDKADLDLRLVGAHSPCYGRLEVKYQGEWGTVCHDRWSTRNAAVVCKQLGCGKPMHVFGMTYFKEASGPIWLDDVSCIGNESNIWDCEHSGWGKHNCVHREDVIVTCSGDATWGLRLVGGSNRCSGRLEVYFQGRWGTVCDDGWNSKAAAVVCSQLDCPSSIIGMGLGNASTGYGKIWLDDVSCDGDESDLWSCRNSGWGNNDCSHSEDVGVICSDASDMELRLVGGSSRCAGKVEVNVQGAVGILCANGWGMNIAEVVCRQLECGSAIRVSREPHFTERTLHILMSNSGCTGGEASLWDCIRWEWKQTACHLNMEASLICSAHRQPRLVGADMPCSGRVEVKHADTWRSVCDSDFSLHAANVLCRELNCGDAISLSVGDHFGKGNGLTWAEKFQCEGSETHLALCPIVQHPEDTCIHSREVGVVCSRYTDVRLVNGKSQCDGQVEINVLGHWGSLCDTHWDPEDARVLCRQLSCGTALSTTGGKYIGERSVRVWGHRFHCLGNESLLDNCQMTVLGAPPCIHGNTVSVICTGSLTQPLFPCLANVSDPYLSAVPEGSALICLEDKRLRLVDGDSRCAGRVEIYHDGFWGTICDDGWDLSDAHVVCQKLGCGVAFNATVSAHFGEGSGPIWLDDLNCTGMESHLWQCPSRGWGQHDCRHKEDAGVICSEFTALRLYSETETESCAGRLEVFYNGTWGSVGRRNITTAIAGIVCRQLGCGENGVVSLAPLSKTGSGFMWVDDIQCPKTHISIWQCLSAPWERRISSPAEETWITCEDRIRVRGGDTECSGRVEIWHAGSWGTVCDDSWDLAEAEVVCQQLGCGSALAALRDASFGQGTGTIWLDDMRCKGNESFLWDCHAKPWGQSDCGHKEDAGVRCSGQSLKSLNASSGHLALILSSIFGLLLLVLFILFLTWCRVQKQKHLPLRGESPTRIV

SEQ ID NO: 1025025 - protein, 1366 aa, Homo sapiens
MLSFVDTRTLLLLAVTLCLATCQSLQEETVRKGPAGDRGPRGERGPPGPPGRDGEDGPTGPPGPPGPPGPPGLGGNFAAQYDGKGVGLGPGPMGLMGPRGPPGAAGAPGPQGFQGPAGEPGEPGQTGPAGARGPAGPPGKAGEDGHPGKPGRPGERGVVGPQGARGFPGTPGLPGFKGIRGHNGLDGLKGQPGAPGVKGEPGAPGENGTPGQTGARGLPGERGRVGAPGPAGARGSDGSVGPVGPAGPNGSAGPPGFPGAPGPKGEIGAVGNAGPTGPAGPRGEVGLPGLSGPVGPPGNPGANGLTGAKGAAGLPGVAGAPGLPGPRGIPGPPGAAGTTGARGLVGEPGPAGSKGESGNKGEPGSAGPQGPPGPSGEEGKRGPNGEAGSAGPPGPPGLRGSPGSRGLPGADGRAGVMGPPGSRGASGPAGVRGPNGDAGRPGEPGLMGPRGLPGSPGNIGPAGKEGPVGLPGIDGRPGPIGPVGARGEPGNIGFPGPKGPTGDPGKNGDKGHAGLAGARGAPGPDGNNGAQGPPGPQGVQGGKGEQGPAGPPGFQGLPGPSGPAGEVGKPGERGLHGEFGLPGPAGPRGERGPPGESGAAGPTGPIGSRGPSGPPGPDGNKGEPGVVGAVGTAGPSGPSGLPGERGAAGIPGGKGEKGEPGLRGEIGNPGRDGARGAHGAVGAPGPAGATGDRGEAGAAGPAGPAGPRGSPGERGEVGPAGPNGFAGPAGAAGQPGAKGERGGKGPKGENGVVGPTGPVGAAGPAGPNGPPGPAGSRGDGGPPGMTGFPGAAGRTGPPGPSGISGPPGPPGPAGKEGLRGPRGDQGPVGRTGEVGAVGPPGFAGEKGPSGEAGTAGPPGTPGPQGLLGAPGILGLPGSRGERGLPGVAGAVGEPGPLGIAGPPGARGPPGAVGSPGVNGAPGEAGRDGNPGNDGPPGRDGQPGHKGERGYPGNIGPVGAAGAPGPHGPVGPAGKHGNRGETGPSGPVGPAGAVGPRGPSGPQGIRGDKGEPGEKGPRGLPGFKGHNGLQGLPGIAGHHGDQGAPGSVGPAGPRGPAGPSGPAGKDGRTGHPGTVGPAGIRGPQGHQGPAGPPGPPGPPGPPGVSGGGYDFGYDGDFYRADQPRSAPSLRPKDYEVDATLKSLNNQIETLLTPEGSRKNPARTCRDLRLSHPEWSSGYYWIDPNQGCTMEAIKVYCDFPTGETCIRAQPENIPAKNWYRSSKDKKHVWLGETINAGSQFEYNVEGVTSKEMATQLAFMRLLANYASQNITYPCKNSIAYMDEETGNLKKAVILQGSNDVELVAEGNSRFTYTVLVDGCSKKTNEWGKTIIEYKTNKPSRLPFLDIAPLDIGGADQEFFVDIGPVCFK

SEQ ID NO: 1025026 - protein, 1366 aa, Homo sapiens; identical to SEQ ID NO: 1025025

SEQ ID NO: 1025027 - protein, 1366 aa, Homo sapiens
MLSFVDTRTLLLLAVTLCLATCQSLQEETVRKGPAGDRGPRGERGPPGPPGRDGEDGPTGPPGPPGPPGPPGLGGNFAAQYDGKGVGLGPGPMGLMGPRGPPGAAGAPGPQGFQGPAGEPGEPGQTGPAGARGPAGPPGKAGEDGHPGKPGRPGERGVVGPQGARGFPGTPGLPGFKGIRGHNGLDGLKGQPGAPGVKGEPGAPGENGTPGQTGARGLPGERGRVGAPGPAGARGSDGSVGPVGPAGPNGSAGPPGFPGAPGPKGEIGAVGNAGPTGPAGPRGEVGLPGLSGPVGPPGNPGANGLTGAKGAAGLPGVAGAPGLPGPRGIPGPPGAAGTTGARGLVGEPGPAGSKGESGNKGEPGSAGPQGPPGPSGEEGKRGPNGEAGSAGPPGPPGLRGSPGSRGLPGADGRAGVMGPPGSRGASGPAGVRGPNGDAGRPGEPGLMGPRGLPGSPGNIGPAGKEGPVGLPGIDGRPGPIGPVGARGEPGNIGFPGPKGPTGDPGKNGDKGHAGLAGARGAPGPDGNNGAQGPPGPQGVQGGKGEQGPAGPPGFQGLPGPSGPAGEVGKPGERGLHGEFGLPGPAGPRGERGPPGESGAAGPTGPIGSRGPSGPPGPDGNKGEPGVVGAVGTAGPSGPSGLPGERGAAGIPGGKGEKGEPGLRGEIGNPGRDGARGAHGAVGAPGPAGATGDRGEAGAAGPAGPAGPRGSPGERGEVGPAGPNGFAGPAGAAGQPGAKGERGGKGPKGENGVVGPTGPVGAAGPAGPNGPPGPAGSRGDGGPPGMTGFPGAAGRTGPPGPSGISGPPGPPGPAGKEGLRGPRGDQGPVGRTGEVGAVGPPGFAGEKGPSGEAGTAGPPGTPGPQGLLGAPGILGLPGSRGERGLPGVAGAVGEPGPLGIAGPPGARGPPGAVGSPGVNGAPGEAGRDGNPGNDGPPGRDGQPGHKGERGYPGNIGPVGAAGAPGPHGPVGPAGKHGNRGETGPSGPVGPAGAVGPRGPSGPQGIRGDKGEPGEKGPRGLPGFKGHNGLQGLPGIAGHHGDQGAPGSVGPAGPRGPAGPSGPAGKDGRTGHPGTVGPAGIRGPQGHQGPAGPPGPPGPPGPPGVSGGGYDFGYDGDFYRADQPRSAPSLRPKDYEVDATLKSLNNQIETLLTPEGSRKNPARTCRDLRLSHPEWSSGYYWIDPNQGCTMEAIKVYCDFPTGETCIRAQPENIPAKNWYRSSKDKKHVWLGETINAGSQFEYNVEGVTSKEMATQLAFMRLLANYASQNITYHCKNSIAYMDEETGNLKKAVILQGSNDVELVAEGNSRFTYTVLVDGCSKKTNEWGKTIIEYKTNKPSRLPFLDIAPLDIGGADHEFFVDIGPVCFK

SEQ ID NO: 1025028 - protein, 493 aa, Homo sapiens
MLSFVDTRTLLLLAVTLCLATCQSLQEETVRKGPAGDRGPRGERGPPGPPGRDGEDGPTGPPGPPGPPGPPGLGGNFAAQYDGKGVGLGPGPMGLMGPRGPPGAAGAPGPQGFQGPAGEPGEPGQTGPAGARGPAGPPGKAGEDGHPGKPGRPGERGVVGPQGARGFPGTPGLPGFKGIRGHNGLDGLKGQPGAPGVKGEPGAPGENGTPGQTGARGLPGERGRVGAPGPAGARGSDGSVGPVGPAGPNGSAGPPGFPGAPGPKGEIGAVGNAGPTGPAGPRGEVGLPGLSGPVGPPGNPGANGLTGAKGAAGLPGVAGAPGLPGPRGIPGPPGAAGTTGARGLVGEPGPAGSKGESGNKGEPGSAGPQGPPGPSGEEGKRGPNGEAGSAGPPGPPGLRGSPGSRGLPGADGRAGVMGPPGSRGASGPAGVRGPNGDAGRPGEPGPWDPEVFLVPLEISAPLEKKVLSASLASTAGIKEIHGRARWLMSVVPA

SEQ ID NO: 1025029 - protein, 80 aa, Homo sapiens
  misc_feature (13)..(13): Xaa can be any naturally occurring amino acid
  misc_feature (16)..(16): Xaa can be any naturally occurring amino acid
SQITPYMRVCMRXELXTHTHTHSPAPSSVLWFRLGPDLMGLVKKGMVGAPEAFALFLPPGDLLSIGNSKQADIQRASTLI

SEQ ID NO: 1025030 - protein, 80 aa, Homo sapiens; identical to SEQ ID NO: 1025029
  misc_feature (13)..(13): Xaa can be any naturally occurring amino acid
  misc_feature (16)..(16): Xaa can be any naturally occurring amino acid

SEQ ID NO: 1025031 - protein, 92 aa, Homo sapiens
MGSGRDGGGDMNAPPAFESFLLFEGEKKITINKDTKVPNACLFTINKEDHTLGNIINITLHKDPQVLFAGYKSPTLEQVIIRSATRLNPGAY

SEQ ID NO: 1025032 - protein, 192 aa, Homo sapiens
MGSGRDGGGDMNAPPAFESFLLFEGEKKITINKDTKVPNACLFTINKEDHTLGNIINITLLNRPASAICWLQESPSPVGAQRSSIRVQTRRLVRTARLRDRPLTKAITDLISELSLLEDRFRVVIIRQAGMELDVGATREALFEPVSPVPICALTLRSSVPTCEESWYASTGHGPAVVVIRLTLTPTCSVHR

SEQ ID NO: 1025033 - protein, 82 aa, Homo sapiens
VDYNSEHEDLGVDQKSPNPYNPKIPIPKKQCPVPLKTRDVKEPREVGGMTRGRGMKDKRKSMKTKCTSQVFACNKKKKEIKG

SEQ ID NO: 1025034 - protein, 241 aa, Homo sapiens
RYTPPQFSIVMEYCELLTLRELLDRGKDLTLGKRMVLVLGAARGLYRLHHSEAPELHGKIRSSNFLVTQGYQVKIWVTWLSLGLAAFSTPMVSMAGVRGTRTYAVMIVLQFLEEHQLAGFELRKTQTSMSLGTTREKTDRVKSTAYLSPQELEDVFYQYDVKSEIYSFGIVLWEIATGDIPFQGCNSEKIRKLVAVKRQQEPLGEDCPSELREIIDECRAHDPSVRPSVDEILKKLSTFSK

SEQ ID NO: 1025035 - protein, 159 aa, Homo sapiens
RYTPPQFSIVMEYCELLTLRELLDRGKDLTLGKRMVLVLGAARGLYRLHHSEAPELQRKNQKLKLPGNSRLPSEALESSSGKSPLEISRFKVKNVKTGSASGCNSEKIRKLVAVKRQQEPLGEDCPSELREIIDECRAHDPSVRPSVDEILKKLSTFSK

SEQ ID NO: 1025036 - protein, 79 aa, Homo sapiens
RYTPPQFSIVMEYCELLTLRELLDRGKDLTLGKRMVLVLGAARGLYRLHHSEAPELHGKIRSSNFLVTQGYQVKIWVPG

SEQ ID NO: 1025037 - protein, 190 aa, Homo sapiens
MEDEGQTKIKQRRSRTNFTLEQLNELERLFDETHYPDAFMREELSQRLGLSEARVQVWFQNRRAKCRKQENQLHKGVLIGAASQFEACRVAPYVNVGALRMPFQQVQAQLQLDSAVAHAHHHLHPHLAAHAPYMMFPAPPFGLPLATLAADSASAASVVAAAAAAKTTSKNSSIADLRLKAKKHAAALGL

SEQ ID NO: 1025038 - protein, 331 aa, Homo sapiens
MEELTAFVSKSFDQKVKEKKEAITYREVLESGPLRGAKEPTGCTEAGRDDRSSPAVRAAGGGGGGGGGGGGGGGGGGVGGGGAGGGAGGGRSPVRELDMGAAERSREPGSPRLTEVSPELKDRKEDAKGMEDEGQTKIKQRRSRTNFTLEQLNELERLFDETHYPDAFMREELSQRLGLSEARVQVWFQNRRAKCRKQENQLHKGVLIGAASQFEACRVAPYVNVGALRMPFQQDSHCNVTPLPFQVQAQLQLDSAVAHAHHHLHPHLAAHAPYMMFPAPPFGLPLATLAADSASAASVVAAAAAAKTTSKNSSIADLRLKAKKHAAALGL

SEQ ID NO: 1025039 - protein, 355 aa, Homo sapiens
MEELTAFVSKSFDQKVKEKKEAITYREVLESGPLRGAKEPTGCTEAGRDDRSSPAVRAAGGGGGGGGGGGGGGGGGGVGGGGAGGGAGGGRSPVRELDMGAAERSREPGSPRLTEGRRKPTKAEVQATLLLPGEAFRFLVSPELKDRKEDAKGMEDEGQTKIKQRRSRTNFTLEQLNELERLFDETHYPDAFMREELSQRLGLSEARVQVWFQNRRAKCRKQENQLHKGVLIGAASQFEACRVAPYVNVGALRMPFQQDSHCNVTPLSFQVQAQLQLDSAVAHAHHHLHPHLAAHAPYMMFPAPPFGLPLATLAADSASAASVVAAAAAAKTTSKNSSIADLRLKAKKHAAALGL

SEQ ID NO: 1025040 - protein, 190 aa, Homo sapiens
MEDEGQTKIKQRRSRTNFTLEQLNELERLFDETHYPDAFMREELSQRLGLSEARVQVWFQNRRAKCRKQENQLHKGVLIGAASQFEACRVAPYVNVGALRMPFQQVQAQLQLDSAVAHAHHHLHPHLAAHAPYMMFPAPPFGLPLATLAADSASAASVVAAAAAAKTTSKDSSIADLRLKAKKHAAALGL

SEQ ID NO: 1025041 - protein, 190 aa, Homo sapiens; identical to SEQ ID NO: 1025040

SEQ ID NO: 1025042 - protein, 141 aa, Homo sapiens
PNGGDERSLGGFARRSNPEEASYEGSGGGGRGHFGSGRNGGGYMNALQPSSRSCSFEGEKITINKDTKVPMPAYSPSQETHTGNIIKYVPASPSPSAVIVSFLRPPQPRFLYSLQNCESIKALFFILPYIRLEAFGHLKEG

SEQ ID NO: 1025043 - protein, 87 aa, Homo sapiens
PNGGDERSLGGFARRSNPEEASYEGSGGGGRGHFGSGRNGGGYMNALQPSSRSCSFEGEKITINKDTKVPMPAYSPSTKKTTALQPR

SEQ ID NO: 1025044 - protein, 158 aa, Homo sapiens
PLPPSTYVEFTVSGTDCVAKEATEAAKCNLLAEVAVTCTVFQTQPVTSQPQPEGANEAVPTPVVDPDAPPSPPLGAPGLPPAGSPPDSHVLLAAPPGHQLHRAHYDLRHTFMGVVSLGSPSGEVSHPRKTRTVVQPSVGAAAGPVVPPCPGRIRHFKV

SEQ ID NO: 1025045 - protein, 176 aa, Homo sapiens
PLPPSTYVEFTVSGTDCVAKEATEAAKCNLLAEKQYGCCKATLSEKLGGAEVAVTCTVFQTQPVTSQPQPEGANEAVPTPVVDPDAPPSPPLGAPGLPPAGSPPDSHVLLAAPPGHQLHRAHYDLRHTFMGVVSLGSPSGEVSHPRKTRTVVQPSVGAAAGPVVPPCPGRIRHFKV

SEQ ID NO: 1025046 - protein, 243 aa, Homo sapiens
SWCGASRLVRVHSATMPEETQTQDQPMEEEEVETFAFQAEIAQLMSLIINTFYSNKEIFLRELISNSSDALDKIRYESLTDPSKLDSGKELHINLIPSKQDRTLTIVDTGIGMTKADLINNLGTIAKSGTKAFMEALQAGADISMIGQFGVGFYSAYLVAEKVTVITKHNDDEQYAWESSAGGSFTVRTDTGEPMGRGTKVILHLKEDKTEYLEEREIKEIVKESISQFIGYSITLFVEKGTK

SEQ ID NO: 1025047 - protein, 89 aa, Homo sapiens
GDQIDLSMATVEPETTPTPNPPTTEEEKTESNQEVANPEHYIKHPLQNRWALWFFKNDKSKTWQANLRLISKFDTVEDFWALYNHIQCV

SEQ ID NO: 1025048 - protein, 563 aa, Homo sapiens
MDFGSLETVVANSAFIAARGSFDGSSSQPSRDKKYLAKLKLPPLSKCESLRDSLSLEFESVCLEQPIGKKLFQQFLQSAEKHLPALELWKDIEDYDTADNDLQPQKAQTILAQYLDPQAKLFCSFLDEGIVAKFKEGPVEIQDGLFQPLLQATLAHLGQAPFQEYLGSLYFLRFLQWKWLEAQPMGEDWFLDFRVLGKGGFGEVSACQMKATGKLYACKKLNKKRLKKRKGYQGAMVEKKILMKVHSRFIVSLAYAFETKADLCLVMTIMNGGDIRYHIYNVNEENPGFPEPRALFYTAQIICGLEHLHQRRIVYRDLKPENVLLDNDGNVRISDLGLAVELLDGQSKTKGYAGTPGFMAPELLQGEEYDFSVDYFALGVTLYEMIAARGPFRARGEKVENKELKHRIISEPVKYPDKFSQASKDFCEALLEKDPEKRLGFRDETCDKLRAHPLFKDLNWRQLEAGMLMPPFIPDSKTVYAKDIQDVGAFSTVKGVAFDKTDTEFFQEFATGNCPIPWQEEMIETGIFGELNVWRSDGQMPDDMKGISGGSSSSSKSGMCLVS

SEQ ID NO: 1025049 - protein, 108 aa, Homo sapiens
ELQAKVIDTQQEVKLADIQISTANRTKKHAHLTDTEIMTLVDETNMYEGVGRRFILQSKEAIHSQLLEKQKIAEEKIKELEQKKSYLERSVKEAEDNIREMLMARRAQ

SEQ ID NO: 1025050 - protein, 149 aa, Homo sapiens
  misc_feature (11)..(11): Xaa can be any naturally occurring amino acid
MGTVNVIAAKXTLSTTDVGPLKPRSPPTYITPDFSFAHSLSVALPPFSGDDGIAKRTGYRSNESSWIFGSCFAINCIYWIAGTGFFPFGVYSVGIAAITAAICQSPEAHPDKDQRWLAAAVAGIFYLLAGLFGSAITGMMAALPVSWSR

SEQ ID NO: 1025051 - protein, 272 aa, Homo sapiens
RGGLTARGRKRTVSASSCQAGGWMRRSSLETWPASGTIILVSLHGRGGLLGKASISTELALALRHAGQTRWESVACGPVLPQYPPHARGRMGRVCALTCDRGMEHRSSSLEPRGAVASLAHVCVASCCENTCDESRECGAGPNVPRADTSMFCCLDVCLGRSCITWWWTCSPGNSPMVHFGRGIEALRPYQPLGALVVTTPQVVSLGDVRREMTFCRKTGLRLMANRGEYEWVHLPTLHGVHQRLLQGRRRGAGPARRGDLLRLQCPWTLSS

SEQ ID NO: 1025052 - protein, 394 aa, Homo sapiens
MADIDNKEQSELDQDLDDVEEVEEEETGEETKLKARQLTVQMMQNPQILAALQERLDGLVETPTGYIESLPRVVKRRVNALKNLQVKCAQIEAKFYEEVHDLERKYAVLYQPLFDKRFEIINAIYEPTEEECEWKPDEEDEISEELERTQAKIEDEKKDEEKGRPPKEFLNLWLTVFNELLTCSVIWLQEHDEPILKHLKDIKVKFSDAGQPMSFVLEFHFEPNEYFTNEVLTKTYRMRSEPDDSDPFSFDGPEIMGCTGCQIDWKKGKNVTLKTIKKKQKHKGRGTVRTVTKTVSNDSFFNFFAPPEVPESGDLDDDAEAILAADFEIGHFLRERIIPRSVLYFTGEAIEDDDDDYDEEGEEADEEGEEEGDEENDPDYDPKKDQNPAECKQQ

SEQ ID NO: 1025053 - protein, 381 aa, Homo sapiens
MADIDNKEQSELDQDLDDVEEVEEEETGEETKLKARQLTVQMMQNPQILAALQERLDGLVETPTGYIESLPRVVKRRVNALKNLQVKCAQIEAKFYEEVHDLERKYAVLYQPLFDKRFEIINAIYEPTEEECEWKPDEEDEISEELERTQAKIEDEKKDEEKGRPPKEFLNLWLTVFNELLTCSVIWLQEHDEPILKHLKDIKVKFSDAGQPMSFVLEFHFEPNEYFTNEVLTKTYRMRSEPDDSDPFSFDGPEIMGCTGCQIDWKKGKNVTLKTIKKKQKHKGRGTVRTVTKTVSNDSFFNFFAPPEVPESGDLDDDAEAILAADFEIGHFLRERIIPRSVLYFTGEAIEDDDDDYDEEGEEADEEGEEEGDEENDPDLK

SEQ ID NO: 1025054 - protein, 320 aa, Homo sapiens
MKLVLPVNTVAQIRKPKILMQEVSIIVATRKYAVLYQPLFDKRFEIINAIYEPTEEECEWKPDEEDEISEELERTQAKIEDEKKDEEKGRPPKEFLNLWLTVFNELLTCSVIWLQEHDEPILKHLKDIKVKFSDAGQPMSFVLEFHFEPNEYFTNEVLTKTYRMRSEPDDSDPFSFDGPEIMGCTGCQIDWKKGKNVTLKTIKKKQKHKGRGTVRTVTKTVSNDSFFNFFAPPEVPESGDLDDDAEAILAADFEIGHFLRERIIPRSVLYFTGEAIEDDDDDYDEEGEEADEEGEEEGDEENDPDYDPKKDQNPAECKQQ

SEQ ID NO: 1025055 - protein, 149 aa, Homo sapiens
MADQLTEEQVTEFKEAFSLFDKDGDGCITTRELGTVMRSLGQNPTEAELRDMMSEIDRDGNGTVDFPEFLGMMARKMKDTDNEEEIREAFRVFDKDGNGFVSAAELRHVMTRLGEKLSDEEVDEMIRAADTDGDGQVNYEEFVRVLVSK

SEQ ID NO: 1025056 - protein, 149 aa, Homo sapiens; identical to SEQ ID NO: 1025055

SEQ ID NO: 1025057 - protein, 325 aa, Homo sapiens
MRLRNQRQGRFFHLPFILQKALHSRQERALKFIEWETAAGGRPGREERKGNSGGRSPAWIAPKLTHHALTAGVIRGPRGSAGSRCKQARGVASARFAGPGLLSKQDRPGQAGQGRLAMMGEDLLLLKLQRLKPGRDSPPAARISTCHPRAGTAAGLRHWEGDPTVASSATHAPTPGMADQLTEEQVTEFKEAFSLFDKDGDGCITTRELGTVMRSLGQNPTEAELRDMMSEIDRDGNGTVDFPEFLGMMARKMKDTDNEEEIREAFRVFDKDGNGFVSAAELRHVMTRLGEKLSDEEVDEMIRAADTDGDGQVNYEEFVRVLVSK

SEQ ID NO: 1025058 - protein, 325 aa, Homo sapiens; identical to SEQ ID NO: 1025057

SEQ ID NO: 1025059 - protein, 149 aa, Homo sapiens; identical to SEQ ID NO: 1025055

SEQ ID NO: 1025060 - protein, 163 aa, Homo sapiens
  misc_feature (1)..(1): Xaa can be any naturally occurring amino acid
  misc_feature (159)..(159): Xaa can be any naturally occurring amino acid
  misc_feature (162)..(162): Xaa can be any naturally occurring amino acid
XFNGRVRSLVNLRGSDQDSALAPTICVKQHQRGTSLFQLYECRTATGVQFNRRNIKFQNPHILNNQRIDTGLVEVSNQPLRGFQLIIMQNGVKRDENFCTITMGKRHQLGNIFQAITGIMTGTKTRAADINSIGTVQNSFAWQWAGIGCRALNSFKSMXEDXV

SEQ ID NO: 1025061 - protein, 288 aa, Homo sapiens
MQIPQAPWPVVWAVLQLGWRPGWFLDSPDRPWNPPTFFPALLVVTEGDNATFTCSFSNTSESFVLNWYRMSPSNQTDKLAAFPEDRSQPGQDCRFRVTQLPNGRDFHMSVVRARRNDSGTYLCGAISLAPKAQIKESLRAELRVTERRAEVPTAHPSPSPRPAGQFQTLVVGVVGGLLGSLVLLVWVLAVICSRAARGTIGARRTGQPLKEDPSAVPVFSVDYGELDFQWREKTPEPPVPCVPEQTEYATIVFPSGMGTSSPARRGSADGPRSAQPLRPEDGHCSWPL

SEQ ID NO: 1025062 - protein, 348 aa, Homo sapiens
AWHEAEMQLKGKKVTDKFTESVYVLANEPSVALYRLQEHVRRSLPELAQHKADMQRWEEQSQGAIYTVEYACSAVKNLVDSSVYFRSVEGLLKQAISILGPYECHVPRATSPGGSTPALLSLILEETRGPPASCNPVSVPEVVATSLSLCSELTNPARLAASAWHLLVYPLGVSSLGLWDDFGGGMVEWVSAGPECTSTAAQWTMSAHLIPLSLHHSSSLFSMAIGPMLVPEDFHPPKTENGEPTLSSILPSAKKPRFNPEPHSLSVARALAMGKYTHLSTGTYPKPSNLPYRACVDPEGQNFHRTPIPSGFILAHIHNISRYTGLGDLQGVTPADTACPGRHTLHGE

SEQ ID NO: 1025063 - protein, 263 aa, Homo sapiens
  misc_feature (188)..(188): Xaa can be any naturally occurring amino acid
AWHEAEMQLKGKKVTDKFTESVYVLANEPSVALYRLQEHVRRSLPELAQHKADMQRWEEQSQGAIYTVEYACSAVKNLVDSSVYFRSVEGLLKQAISILGPYECQCPGPQVAPGTARPHCHSQLQGPSLSCAGNRCFSLIRKLSLSFCPGVWDLLLSCGIYNLSFKFTLKYARSCALLCAWPWAGPKXLWVVVEIQNLMANVDPEDRPGGSQGRHTDNSGKHGRQEHVRCAVKNTAGPLLGGGMSYMQTETIRGQTEFHVGQW

SEQ ID NO: 1025064 - protein, 332 aa, Homo sapiens
AWHEAEMQLKGKKVTDKFTESVYVLANEPSVALYRLQEHVRRSLPELAQHKADMQRWEEQSQGAIYTVEYACSAVKNLVDSSVYFRSVEGLLKQAISILGPYECQCPGPQVAPGTARPHCHSQLQGPSLSCAGNRCFSLIRKLSLSFCPGVWDLLLSCGIYNLSFKFTLKYRGPALCCVPGPGLGTGDIAVTETDRLIKGDIRTTQVNMADKSMSDACEEHCGAPPRRWHELHADRDDPGADGVPCGAVVRADALGLGSLGVFEKHREGFCGWSRPAGGDGAREMVWGWDPWECSRSTEKAYHGWSRPAGGDGAREMAGASPCPRTQSQGRL

SEQ ID NO: 1025065 - protein, 167 aa, Homo sapiens
TCAPGKPRRSLSPGWQRGGRTMPGVTVKDVNQQEFVRALAAFLKKSGKLKVPEWVDTVKLAKHKELAPYDENWFYTRAASTARHLYLRGGAGVGSMTKIYGGRQRNGVMPSHFQPRAPRVWPAGSSKALEGLKMVEKDQDGGRKLTPQGQRDLDRIAGQVAAANKKH

SEQ ID NO: 1025066 - protein, 149 aa, Homo sapiens
MPKNKGKGGKNRRRGKNENESEKREWVFKEDGQEYAQVIKMWGNGRWKHMCMMVKRGYAISGGNLRHQGWINTSDIIWVVYGTIRINKADVILTYNCRMKAKKPEGIWTSFQNMLKSMQQDIVVLEMDDEIPELRRIMENDDEEPLMII

SEQ ID NO: 1025067 - protein, 107 aa, Homo sapiens
KLLMGYVKPQIKQVVPEFVNASADAGGQQRHVHGPGPLPQLCAPRLPITCTPQNPDHVLDQDGEFDLDETMDVARHVEELLRRPMDSLDSRLSPPAGLFTSARGSLS

SEQ ID NO: 1025068 - protein, 62 aa, Homo sapiens
MLMTTFDKISLAQRLENKNSMRSREISAYLFKGNNRWKQSVELCKKDSLYKDAMQYASESKD

SEQ ID NO: 1025069 - protein, 229 aa, Homo sapiens
MLSFSMCPGVLQATRTFHTGQPHLVPVPPLPEYGGKVRYGLIPEEFFQFLYPKTGVTGPYVLGTGLILYALSKEIYVISAETFTALSVLGVLVYGIKQYGPFVADFADKLNEQKLAQLEEAKQASIQHIQNAIDTEKSQQALVQKAPLPFDVQRNYIAMGWEVTYRGTTVLEYIGKVKKSPGTIIYSVQNIDAFERTRTPDNWVEKPVVQRFPHGKKGNIAKGLATKAL

SEQ ID NO: 1025070 - protein, 276 aa, Homo sapiens
LVSGHLGSALTDSPIGVTGTLRLLPGLSLTMLSRVVLSAAATAAPSLKNAAFLGPGVLQATRTFHTGQPHLVPVPPLPEYGGKVRYGLIPEEFFQFLYPKTGVTGPYVLGTGLILYALSKEIYVISAETFTALSVLGVLVYGIKQYGPFVADFADKLNEQKLAQLEEAKQASIQHIQNAIDTEKSQQALVQKAPLPFDVQRNYIAMGWEVTYRGTTVLEYIGKVKKSPGTIIYSVQNIDAFERTRTPDNWVEKPVVQRFPHGKKGNIAKGLATKAL

SEQ ID NO: 1025071 - protein, 195 aa, Homo sapiens
SGILDLLPPSSLYPTPPIGACAGAWGGEGAPCSPSRSDHKQLPGTSIVGHLALRPLERCRPDFPCQPGAHSAAQRTVPHRTGALLGSTGASPVPVSLSASPLEGTLWAPPPPRVQLPQSWHPLLHSASVSHFRTSPGVFPGPARPCLTFPLLVCAGLRRTPCPHSTQPGIQTAAPRQPYLPFPVLGHVVATLCDL

SEQ ID NO: 1025072 - protein, 89 aa, Homo sapiens
ANSCMAQQSKVDRVRVTLAYLSSRLACIIPLSCISRIPCSDQRVLQSTTLATILVHDISSPRIEADIMPYLKQGFPSCFVTCATFDITV

SEQ ID NO: 1025073 - protein, 104 aa, Homo sapiens
MRVGIHSGRVHCGVLGLRKWQFDVWSNDVTLANHMEAGGKAGRIHITKATLNYLNGDYEVEPGCGGERNAYLKEHSIETFLILRCTQKRKEEKAMIAKMNRQRT

SEQ ID NO: 1025074 - protein, 151 aa, Homo sapiens
  misc_feature (93)..(93): Xaa can be any naturally occurring amino acid
  misc_feature (96)..(96): Xaa can be any naturally occurring amino acid
MDYHHAIQQLVSGERVEGQVLGFGHGVPDPGAWPSDWRRGPQEAVAREKLKLEEEKKKKLERFNSTRFNLDNLADLENLVQRSKKRLRHRVPXRKXEPLVKPQSQAQVEPVGLEMFLKAAAENQEYLIDKYLTDGGDPNAQNKAVVTMWKS

SEQ ID NO: 1025075 - protein, 109 aa, Homo sapiens
MSSSCPVATASVHPDAGAMAKQAFKTMEKTTPHLENEDTSVTNTPFYTNQYPLFIKTGYPLQPSRLSWAERSPCFSHQGLSDRAHACYAMPADSKIGRVQSGRDAGSWH

SEQ ID NO: 1025076 - protein, 75 aa, Homo sapiens
  misc_feature (48)..(48): Xaa can be any naturally occurring amino acid
MAKQAFKTMEKTTPHLENEDTSVTNTPFYTNQYPLFIKTGYPLQKKNXRKKRGGLWDSPLGAQSRLKGEGLKITG

SEQ ID NO: 1025077 - protein, 137 aa, Homo sapiens
MIVSASTCGAKNLQQFEIMSFDFKQAATVNVKYVDTKGNQIAQGEVTYPNGANVNGTYTTGQLEISNYKFVRMDDGTATGAKSLPATGTLTKAGDNGTVIYVYAEDAPTVTTESKTVNETFIIKALVIKLLLITPLK

SEQ ID NO: 1025078 - protein, 43 aa, Homo sapiens
MKWMFKEDHSLEHRCVESAKIRAKYPDRFQVIVEKVSGSQIVD

SEQ ID NO: 1025079 - protein, 303 aa, Homo sapiens
FLRRHQIETGLRAVVLAKLSSLFVKCLQNPFQSTSGLVAEKMIMVGKSTGPYLPSHRGATQAHRSPSPEWLFLHNTKDKNTVVQGLQRPGQLVNLLKMRQGEEVFQSLSKILDVASEEVLNEVNRRIPERSWPARPTSTEQVDDSHPDMRGLGQQQHGLLHILCSMYAILEQYIGSTGELGSRAFPESISNINETTAKALKSKPTHKLRIASFHRLTVSCGRRDKEQGTRPLAASRATDMGADPRKAATVQSQTRDRVWKHNTKPGAQTGGLPLLHEPEHLARRDWCNQNVFPTYHRGGHQSV

SEQ ID NO: 1025080 - protein, 479 aa, Homo sapiens
MNWSHSCISFCWIYFAASRLRAAETADGKYAQKLFNDLFEDYSNALRPVEDTDKVLNVTLQITLSQIKDMDERNQILTAYLWIRQIWHDAYLTWDRDQYDGLDSIRIPSDLVWRPDIVLYNKADDESSEPVNTNVVLRYDGLITWDAPAITKSSCVVDVTYFPFDNQQCNLTFGSWTYNGNQVDIFNALDSGDLSDFIEDVEWEVHGMPAVKNVISYGCCSEPYPDVTFTLLLKRRSSFYIVNLLIPCVLISFLAPLSFYLPAASGEKVSLGVTILLAMTVFQLMVAEIMPASENVPLIGKYYIATMALITASTALTIMVMNIHFCGAEARPVPHWARVVILKYMSRVLFVYDVGESCLSPHHSRERDHLTKVYSKLPESNLKAARNKDLSRKKDMNKRLKNDLGCQGKNPQEAESYCAQYKVLTRNIEYIAKCLKDHKATSSKGSEWKKVAKVIDRFFMWIFFIMVFVMTILIIARAD

SEQ ID NO: 1025081 - protein, 173 aa, Homo sapiens [sequence omitted]

SEQ ID NO: 1025082 - protein, 121 aa, Homo sapiens
  misc_feature (16)..(16): Xaa can be any naturally occurring amino acid
  misc_feature (19)..(19): Xaa can be any naturally occurring amino acid
KRLETRKRAPRRKCKXLSXGKPGIQVSGGKGGRRGKTFAAEETTPPRPLCLDPNSSSNIRDSARLLGPPVSLPCGTLCRESAKSWMAAIVLAETGCLANPSNLDECSLSDSPMRKSAFRST

SEQ ID NO: 1025083 - protein, 268 aa, Homo sapiens
MHEEQQRERTHTKAHNKRKHNTKTREGKQTHTEQRRHQNTEINRNETMTERAKTKTPGDNNNDPPTPPPERGTPTNSSITKMKQEIHHKDYTHRQNTDTYTNQPTNAKTQKQRDRKHNQDKQHRTTKKQNTPKRQDNKQTKATTTTTKQPTTDKRKHLQTQQQTTAQRKRRTKQPTKEQARTNTLPRNPTHTRRRQPYAKANTAPATRRATKANTEDERREETEGDETNIATQTQRKYNQQDKGPNAHRRQTKNSAAKTKHARSNRHQ

SEQ ID NO: 1025084 - protein, 113 aa, Homo sapiens
LSWKQSSGRFTNSEAWSTASPLGNLSKKLWELTGEVQFPPAPEEPSVSVARQESIFNVGALIKISTSSLFPDGMELQGWGTSQVNAQRCPELPLRLVWPIYLLTEHAKDDAQK

SEQ ID NO: 1025085 - protein, 188 aa, Homo sapiens
MGKEAADLLLLLLPVASSGCQERGRTFVWALPRAGNFTWYLKVSFGIRPETLGFSRLTTPFYRKHLEDCFRVSPGSLCNHLLWKCRTLCDILYPFFPGLVAMEGLVCCESTLDAVSLMLAREAEDVRGRGRLLGLSSFLCIILGLAWTAPASESCGPHPLAAEPSTVILGAIFPCRTGSLSPAPTFGL

SEQ ID NO: 1025086 - protein, 247 aa, Homo sapiens
MASLSRPSLPSCLCSFLLLLLLQVSSSYAGQFRVIGPRHPIRALVGDEVELPCRISPGKNATGMEVGWYRPPFSRVVHLYRNGKDQDGDQAPEYRGRTELLKDAIGEGKVTLRIRNVRFSDEGGFTCFFRDHSYQEEAAMELKVEDPFYWVSPGVLVLLAVLPVLLLQITVGLVFLCLQYRLRGKLRAEIENLHRTFDPHFLRVPCWKITLFVIVPVLGPLVALIICYNWLHRRLAGQFLEELRNPF

SEQ ID NO: 1025087 - protein, 171 aa, Homo sapiens
MASLSRPSLPSCLCSFLLLLLLQVSSSYAGQFRVIGPRHPIRALVGDEVELPCRISPGKNATGMEVGWYRPPFSRVVHLYRNGKDQDGDQAPEYRGRTELLKDAIGEGKVTLRIRNVRFSDEGGFTCFFRDHSYQEEAAMELKVEVSHSVTQDWLQWHDHGSLQPPPPRLK

SEQ ID NO: 1025088 - protein, 252 aa, Homo sapiens; identical to SEQ ID NO: 897948

SEQ ID NO: 1025089 - protein, 171 aa, Homo sapiens; identical to SEQ ID NO: 1025087

SEQ ID NO: 1025090 - protein, 208 aa, Homo sapiens [sequence omitted]

SEQ ID NO: 1025091 - protein, 247 aa, Homo sapiens; identical to SEQ ID NO: 1025086

SEQ ID NO: 1025092 - protein, 255 aa, Homo sapiens
PRPAPPRHALAPRHQPGIRQRPGAVARRPHIAAPPGGDKDRSSPRRFWEPVKWFTCKERIWFHPPEMTPQERCICTPRLPIKKIPPEVPFASVGDGETVEFDVVEGEKGAEASQMLPGPGGVPSSRPVNMPARPVTLIDATHDRMGPPCHYQQINQSCESGEKNERFGRVLPKARPHNAGPTAGEGSHPYYMRRPYGRRPQYSNPPVQGEVMEGADNQGAGEQGRPVRQNMYRGYRPRFRRGPPRQRQPREDGNE

SEQ ID NO: 1025093 - protein, 127 aa, Homo sapiens
MMHLYRKLNRRYPRSYGSSTQLPSQINQSCESGEKNERFGMSAPEGRAPQRRPYRRRGFPPYYMRRPYGRRPQYSNPPVQGEVMEGADNQGAGEQGRPVRQNMYRGYRPRFRRGPPRQRQPREDGNE

SEQ ID NO: 1025094 - protein, 144 aa, Homo sapiens
VTGPGECSSPTHVNMQRTGTMYRGDPRCTGAHIQLTSIMIQKYMSSWGIRTRSRTRECLRECRPNDAGPSGGRRGSHPYYMRRPYGRRPQYSNPPVQGEVMEGADNQGAGEQGRPVRQNMYRGYRPRFRRGPPRQRQPREDGNE

SEQ ID NO: 1025095 - protein, 93 aa, Homo sapiens
SSGIKRIVAIMAGEKPGGLGAPAGIGSRLGCERFSRSREILQAITMSTDTGVSLPSYEEDQGSKLIRKAKEAPFVPVGIAGFAAMCVHMDYIN

SEQ ID NO: 1025096 - protein, 122 aa, Homo sapiens
SSGIKRIVAIMAGEKPGGLGAPAGIGSRLGCERFSRSRNSGFCSNVCAYGLYKLKSRGNTKMSIHLIHMRVAAQGFVVGAMTVWYGLFHVSGILGQNLSLRRRDAVCGLCWRSCALVEMSYY

SEQ ID NO: 1025097 - protein, 93 aa, Homo sapiens
MSTDTGVSLPSYEEDQGSKLIRKAKEAPFVPVGIAGFAAIVAYGLYKLKSRGNTKMSIHLIHMRVAAQGFVVGAMTVGMGYSMYREFWAKPEP

SEQ ID NO: 1025098 - protein, 475 aa, Homo sapiens
FFRTYPDQPTLSLSHLCTASLLSLIYPHICPHFGVPTVTPLFPAFWPRVYVPLPSHRGSCVIPLNRFLWLHRVALAVASRHPRPRPDCPSPTCRLVVSFSLAVSLYRTPRVSLLSLLRRLCVGFALFVSSLRLFSSLGSVLSLYLVVVPRVSSMGLRCMVSEVVLLLPVVIRSQHCVAHRMSCLCCVSPSLFPGHLVCHPVCRVQHCEPRLVRYHLVVYIRSVVQNQLLMFESLLVQWLCRLHELSALWFVCRPGSLMPTFKGWQLLKSGSRKPVHLCSALIPGQKDPGLAAPPHGIEHPEPARAAAAGQGGQGDSVGQEQKPAHRSLPAPGSISTPGPAWARAAGAQHRTSVTGAGRGRTSGRSPDEGRGLGRGGVVGRSPELAPDEPELVNFLSVLEEAEPGLQIPKAGEVWDEGGAYGSGAEALGPAEEGRDGPCWAPSLPAPRPQFGGHAPACSGHRGKPLNPLAPGTHVR

SEQ ID NO: 1025099 - protein, 153 aa, Homo sapiens
GREPRRGLRGAWRLLGHAGPSGTGRLRVGGLRSWGLGGDGPAGRRRRQDRVGLRARRRPSRLLAPLAWCPAPGREAAGLDRAGLPGGARALAAGRPLLSAMAGLHPWVIFSGPLWPLLTPREQTTRTTQEQIKSRPQPARERASILFAPRVAV

SEQ ID NO: 1025100 - protein, 153 aa, Homo sapiens; identical to SEQ ID NO: 1025099

SEQ ID NO: 1025101 - protein, 128 aa, Homo sapiens
GREPRRGLRGAWRLLGHAGPSGTGRLRVGGLRSWGWEGTVLPGGGGGRTGWGCGPGAAPPGSWLPSPGAPRLLSAMAGLHPWVIFSGPLWPLLTPREQTTRTTQEQIKSRPQPARERASILFAPRVAV

SEQ ID NO: 1025102 - protein, 147 aa, Homo sapiens
MREPCAPSALPLTRPPTMPLSLEESAGHWTLHLLTRTTIPQHFSDPVMARILPTESWRCAWELHSDSLTSAWRLRAPGAFSHSDLSTTASTWHRTILTRFLQTEAASPQVQLWRGGGSDCFGPKWPQVAGRSCGWSLGRSHTCSTYW

SEQ ID NO: 1025103 - protein, 146 aa, Homo sapiens
MREPCAPSALPLTRPPTMPLSLEELQALDLHLLTRTTIPQHFSDPVMARILPTESWRCAWELHSDSLTSAWRLRAPGAFSHSDLSTTASTWHRTILTRFLQTEAASPQVQLWRGGGSDCFGPKWPQVAGRSCGWSLGRSHTCSTYW

SEQ ID NO: 1025104 - protein, 217 aa, Homo sapiens
MPTPHEAEKQITGPEEADRPPSMSSHDTASPAAPSRNPCCLCWCCCCSCSWNQERRRAWQASRESKLQPLPSCEVCATPSPEEVQSWAQSFDKLMHSPAGRSVFRAFLRTEYSEENMLFWLACEELKAEANQHVVDEKARLIYEDYVSILSPKEVSLDSRVREGINKKMQEPSAHTFDDAQLQIYTLMHRDSYPRFLSSPTYRALLLQGPSQSSSEA

SEQ ID NO: 1025105 - protein, 195 aa, Homo sapiens
MSSHDTASPAAPSRNPCCLCWCCCCSCSWNQERRRAWQASRESKLQPLPSCEVCATPSPEEVQSWAQSFDKLMHSPAGRSVFRAFLRTEYSEENMLFWLACEELKAEANQHVVDEKARLIYEDYVSILSPKEVSLDSRVREGINKKMQEPSAHTFDDAQLQIYTLMHRDSYPRFLSSPTYRALLLQGPSQSSSEA

SEQ ID NO: 1025106 - protein, 143 aa, Homo sapiens
MPTPHEAEKQITGPEEADRPPSMSSHDTASPAAPSRNPCCLCWCCCCSCSWNQERRRAWQASRESKLQPLPSCEVCATPSPEEVQSWAQSFDKLMHSPAGRSVFRAFLRTEYTRDTSFRWRREFRRRDTLCETRDLLRRLRFI

SEQ ID NO: 1025107 - protein, 217 aa, Homo sapiens; identical to SEQ ID NO: 1025104

SEQ ID NO: 1025108 - protein, 286 aa, Homo sapiens
MPTPHEAEKQITGPEEADRPPSMSSHDTASPAAPSRNPCCLCWCCCCSCSWNQERRRAWQASRESKLQPLPSCEVCATPSPEEVQSWAQSFDKLMHSPAGRSVFRAFLRTEYSEENMLFWLACEELKAEANQHVVDEKARLIYEDYVSILSPKEVSLDSRVREGINKKMQEPSAHTFDDAQLQIYTLMHRDSYPRFLSSPLRPTLGSLQVLVSAGLSGHMPGRLGSPPAETVLDPVGSAVSPGSAHPWPSRNSRCRAGLQVQGGPEAPSSARSWLAQCSWLGALAW

SEQ ID NO: 1025109 - protein, 217 aa, Homo sapiens; identical to SEQ ID NO: 1025104

SEQ ID NO: 1025110 - protein, 158 aa, Homo sapiens
MAEQATKSVLFVCLGNICRSPIAEAVFRKLVTDQNISENWRVDSAATSGYEIGNPPDYRGQSCMKRHGIPMSHVARQITKEDFATFDYILCMDESNLRDLNRKSNQVKTCKAKIELLGSYDPQKQLIIEDPYYGNDSDFETVYQQCVRCCRAFLEKAH

SEQ ID NO: 1025111 - protein, 158 aa, Homo sapiens
MAEQATKSVLFVCLGNICRSPIAEAVFRKLVTDQNISENWVIDSGAVSDWNVGRSPDPRAVSCLRNHGIHTAHKARQITKEDFATFDYILCMDESNLRDLNRKSNQVKTCKAKIELLGSYDPQKQLIIEDPYYGNDSDFETVYQQCVRCCRAFLEKAH

SEQ ID NO: 1025112 - protein, 180 aa, Homo sapiens [sequence omitted]

SEQ ID NO: 1025113 - protein, 403 aa, Homo sapiens
APGASCSALTRSAAAGSPAATLSGAPPADHHGRGPLLGAAVPGGRARAAGGDAGADPGWGAPELPRLRPGSRRGGVARGRTMASPALAAALAVAAAAGPNASGAGERGSGGVANASGASWGPPRGQYSAGAVAGLAAVVGFLIVFTVVGNVLVVIAVLTSRALRAPQNLFLVSLASADILVATLVMPFSLANELMAYWYFGQVWCGVYLALDVLFCTSSIVHLCAISLDRYWSVTQAVEYNLKRTPRRVKATIVAVWLISAVISFPPLVSLYRQPDGAAYPQCGLNDETWYILSSCIGSFFAPCLIMGLVYARIYLSEKRFTFVLAVVMGVFVLCWFPFFFSYSLYGICREACQVPGPLFKFFFWIGYCNSSLNPVIYTVFNQDFRRSFKHILFRRRRRGFRQ

SEQ ID NO: 1025114 - protein, 459 aa, Homo sapiens
APGASCSALTRSAAAGSPAATLSGAPPADHHGRGPLLGAAVPGGRARAAGGDAGADPGWGAPELPRLRPGSRRGGVARGRTMASPALAAALAVAAAAGPNASGAGERGSGGVANASGASWGPPRGQYSAGAVAGLAAVVGFLIVFTVVGNVLVVIAVLTSRALRAPQNLFLVSLASADILVATLVMPFSLANELMAYWYFGQVWCGVYLALDVLFCTSSIVHLCAISLDRYWSVTQAVEYNLKRTPRRVKATIVAVWLISAVISFPPLVSLYRQPDGAAYPQCGLNDETWYILSSCIGSFFAPCLIMGLVYARIYRVAKLRTRTLSEKRAPVGPDGASPTTENGLGAAAGAGENGHCAPPPADVEPDESSAAAERRRAGAVAAGRAAASGRGGGRGRCGRAGGGAGGGSVGGADRLQGVGRREGETPLPSPLSKGLLLGLPAWIQLWEPCRGVAVRSGF

SEQ ID NO: 1025115 - protein, 461 aa, Homo sapiens
MASPALAAALAVAAAAGPNASGAGERGSGGVANASGASWGPPRGQYSAGAVAGLAAVVGFLIVFTVVGNVLVVIAVLTSRALRAPQNLFLVSLASADILVATLVMPFSLANELMAYWYFGQVWCGVYLALDVLFCTSSIVHLCAISLDRYWSVTQAVEYNLKRTPRRVKATIVAVWLISAVISFPPLVSLYRQPDGAAYPQCGLNDETWYILSSCIGSFFAPCLIMGLVYARIYRVAKRRTRTLSEKRAPVGPDGASPTTENGLGAAAGEARTGTARPRPPTWSRTRAAQRPRGGAPGPLRRGGRRRAGAEGGAGGADGQGAGPGAAQSGALTASRSPGPGGRLSRASSRSVEFFLSRRRRARSSVCRRKVAQAREKRFTFVLAVVMGVFVLCWFPFFFIYSLYGICREACQVPGPLFKFFFWIGYCNSSLNPVIYTVFNQDFRPSFKHILFRRRRRGFRQ

SEQ ID NO: 1025116 - protein, 461 aa, Homo sapiens; identical to SEQ ID NO: 1025115

SEQ ID NO: 1025117 - protein, 230 aa, Homo sapiens
PPGTRPAERRNICPQAKLANPKGVDEHPCSTRVCPQAQAPGADPGDKAAGTTRPEPLGEMVRNEQLAQPDPLVASHPDSMLFPCGDLPGLLQRKNVHTVIISLLDADDLFLYVLNRGQQLDYPRSHTHLSALLLPWLPLALRSGGHRSMLAEDVRNSESPQVLKNGLGQTTVRAQRKGGPSGRVQARHLCFKLGLAMPRGSYGHWLSKCHEVGSVVALSPPNTVPWWRKH

SEQ ID NO: 1025118 - protein, 294 aa, Homo sapiens
SGVIRPGFQRACVAAACTVAARCPGRGVGDRSQSGASCRPIWGPKVGGPTEMLRGMYLTRQREPAEATHDEGSQGHEEQAGDLQTCGGESLEALLRAMQTDMIEGHFKPSSEDSPHVVAESLENVLVYKYGLAGVPSPSFGLSSVSENLEFWLACEDFKKVKSQSKMASKAKKIFAEVHRDPGMQGGQTWTSYTREHSKDNLQSVTRGWFDLETEAHLRAQWQEDSYPRFLRSDLYLDLINQKKMSPPDKGPPGGRCSEFTPGRARGPLAILLPAPVTEGQAKPIRSGVSRQTE

SEQ ID NO: 1025119 - protein, 255 aa, Homo sapiens
MFHCGSRQCGLQADAADPHVPSREGCGADGQEHHDAQGHPRAPGKQPSSGETAAPCEVTVPAQNTGLGPEKTSFFQALGITTKISRGTIEILSDVQLIKTGDKVGASEATLLNMLNISPFSFGLVIQQVFDNGSIYNPEVLDITEETLHSRFLEGVRNVASVCLQNGYPTVASSTPFYHQRVQTSPGLVLLRRITPSHLLNKVKPSVGEPSAFVAAAPVACCTKLLLLCEAQAKVEATEESESRNEHYGHSVLLD

SEQ ID NO: 1025120 - protein, 274 aa, Homo sapiens
MSLRGKAVVLMGKNTMMRKAIRGHLENNPALEKLLPHIRGNVGFVFTKEDLTEIRDMLLANKVPAAARAGAIAPCEVTVPAQNTGLGPEKTSFFQALGITTKISRGTIEILSDVQLIKTGDKVGASEATLLNMLNISPFSFGLVIQQVFDNGSIYNPEVLDITEETLHSRFLEGVRNVASVCLQNGYPTVASSTPFYHQRVQTSPGLVLLRRITPSHLLNKVKPSVGEPSAFVAAAPVACCTKLLLLCEAQAKVNATEESESRNEHYGHSVLLD

SEQ ID NO: 1025121 - protein, 319 aa, Homo sapiens
MPREDRATWKSNYFLKIIQLLDDYPKCFIVGADNVGSKQMQQIRMSLRGKAVVLMGKNTMMRKAIRGHLENNPALEKLLPHIRGNVGFVFTKEDLTEIRDMLLANKVPAAARAGAIAPCEVTVPAQNTGLGPEKTSFFQALGITTKISRGTIEILSDVQLIKTGDKVGASEATLLNMLNISPFSFGLVIQQVFDNGSIYNPEVLDITEETLHSRFLEGVRNVASVCLQNGYPTVASSTPFYHQRVQTSPGLVLLRRITPSHLLNKVKPSVGEPSCLCGCCPCGLLHKAAPVAVKPKLRLNATEESESRNEHYGHSVLLD

SEQ ID NO: 1025122 - protein, 210 aa, Homo sapiens
MRPRLWLLLAAQLTVLHGNSVLQQTPAYIKVQTNKMVMLSCEAKISLSNMRIYWLRQRQAPSSDSHHEFLALWDSAKGTIHGEEVEQEKIAVFRDASRFILNLTSVKPEDSGIYFCMIVGSPELTFGKGTQLSVVDFLPTTAQPTKKSTLKKRVCRLPRPETQKGPLCSPITLGLLVAGVLVLLVSLGVAIHLCCRRRRARLRFMKQFYK

SEQ ID NO: 1025123 - protein, 252 aa, Homo sapiens
DCLRRAPGARCPGRATMRPRLWLLLAAQLTVLHGNSVLQQTPAYIKVQTNKMVMLSCEAKISLSNMRIYWLRQRQAPSSDSHHEFLALWDSAKGTIHGEEVEQEKIAVFRDASRFILNLTSVKPEDSGIYFCMIVGSPELTFGKGTQLSVVDFLPTTAQPTKKSTLKKRVCRLPRPETQKGPLCSPITLGLLVAGVLVLLVSLGVAIHLCCRRRRARLRFMKQASRGRYIRNLCPPMPAWILQQYYNLTEAA

SEQ ID NO: 1025124 - protein, 213 aa, Homo sapiens
MRPRLWLLLAAQLTVLHGNSVLQQTPAYIKVQTNKMVMLSCEAKISLSNMRIYWLRQRQAPSSDSHHEFLALWDSAKGTIHGEEVEQEKIAVFRDASRFILNLTSVKPEDSGIYFCMIVGSPELTFGKGTQLSVVDFLPTTAQPTKKSTLKKRVCRLPRPETQKGRRRRARLRFMKQPQGEGISGTFVPQCLHGYYSNTTTSQKLLNPWILKT

SEQ ID NO: 1025125 - protein, 176 aa, Homo sapiens
MVEWLPSEAGVSLSNMRIYWLRQRQAPSSDSHHEFLALWDSAKGTIHGEEVEQEKIAVFRDASRFILNLTSVKPEDSGIYFCMIVGSPELTFGKGTQLSVVDFLPTTAQPTKKSTLKKRVCRLPRPETQKGPLCSPITLGLLVAGVLVLLVSLGVAIHLCCRRRRARLRFMKQFYK

SEQ ID NO: 1025126 - protein, 226 aa, Homo sapiens
DCLRRAPGARCPGRATMRPRLWLLLAAQLTVLHGNSVLQQTPAYIKVQTNKMVMLSCEAKISLSNMRIYWLRQRQAPSSDSHHEFLALWDSAKGTIHGEEVEQEKIAVFRDASRFILNLTSVKPEDSGIYFCMIVGSPELTFGKGTQLSVVDFLPTTAQPTKKSTLKKRVCRLPRPETQKGPLCSPITLGLLVAGVLVLLVSLGVAIHLCCRRRRARLRFMKQFYK

SEQ ID NO: 1025127 - protein, 92 aa, Homo sapiens
DCLRRAPGARCPGRATMRPRLWLLLAAQLTVLHGNSVLQQTPAYIKVQTNKMVMLSCEAKISLSNMRIYWLRQRQAPSSDSHHEFLSLNWDL

SEQ ID NO: 1025128 - protein, 213 aa, Homo sapiens; identical to SEQ ID NO: 1025124

SEQ ID NO: 1025129 - protein, 210 aa, Homo sapiens; identical to SEQ ID NO: 1025122

SEQ ID NO: 1025130 - protein, 221 aa, Homo sapiens
MRPRLWLLLAAQLTVLHGNSVLQQTPAYIKVQTNKMVMLSCEAKISLSNMRIYWLRQRQAPSSDSHHEFLALWDSAKGTIHGEEVEQEKIAVFRDASRFILNLTSVKPEDSGIYFCMIVGSPELTFGKGTQLSVVDFLPTTAQPTKKSTLKKRVCRLPRPETQKGPLCSPITLGLLVAGVLVLLVSLGVAIHLCCRRRRARLRFMKQLRLHPLEKCSRMDY

SEQ ID NO: 1025131 - protein, 186 aa, Homo sapiens
  misc_feature (5)..(5): Xaa can be any naturally occurring amino acid
  misc_feature (23)..(23): Xaa can be any naturally occurring amino acid
DGGVXRASSVVVNFSDAADGGRXRKVLAASVTELQWATQPGGGGTQVVGTFTPAVQKSVEDAALKQNLTTLHNRVNELGFSSRSLQQQGSDRIVVELPGVQDTAKAKDIIGRTATLEARLADPINTHPNPNDPVPPGEELFTQGIQAPVLLKKDVIFTGDRIIDASAGFDEHQRPSVNIRLEPRRP

SEQ ID NO: 1025132 - protein, 224 aa, Homo sapiens
MATLKEKLIAPVAEEEATVPNNKITVVGVGQVGMACAISILGKSLADELALVDVLEDKLKGEMMDLQHGSLFLQTPYHIVAALHTHLLPVTAQFLTTCCCVHLQAAPLQPHAQGARRSGLKIMAGRATLSTAPLTHSTLLPSDSLNATAPESALIHFAASSNPTLAHFPTVLLYPCEHLTLRLTPTPPDAALWPPGPPHSWHPCLHSSLTLYWADPTLGLPSHA

SEQ ID NO: 1025133 - protein, 137 aa, Homo sapiens
MGAYFFRHLKIVADKDYSVTANSKIVVVTAGVRQQEGESRLNLVQRNVNVFKFIIPQIVKYSPDCIIIVVSNPVDILTYVTWKLSGLPKHRVIGSGCNLDSARFRYLMAEKLGIHPSSCHGWIWGNMATQVWLCGVV

SEQ ID NO: 1025134 - protein, 137 aa, Homo sapiens; identical to SEQ ID NO: 1025133

SEQ ID NO: 1025135 - protein, 137 aa, Homo sapiens; identical to SEQ ID NO: 1025133

SEQ ID NO: 1025136 - protein, 144 aa, Homo sapiens
SSSGSQTPESENSRDFHATESQTVLNVSKGEAKPTRADAMVNRVPEGKAKSLPVQGLSETVGILHKVKSQKCPMLHHILIFYAIVVCALIISTFYMRYRINTLEEQLGLLTSIVDTHNTEQAAPSGLRSQVQFNVEVGLSRANS

SEQ ID NO: 1025137 - protein, 167 aa, Homo sapiens
  misc_feature (2)..(2): Xaa can be any naturally occurring amino acid
  misc_feature (5)..(5): Xaa can be any naturally occurring amino acid
RXASXGRIELAAERLRADDGRKAQDLGAHQREAARRLRVPLVPADADADPPETRIPHPEAGVARREIELLRIARTVRNMCLAVDAEHASVRVRHGDRVVRGIARALEEADRQHDAELAGQRREPGDLRVAFERLREFEMAHVLVEAEVRHREQLRAQHEMSPLRSGR

SEQ ID NO: 1025138 - protein, 155 aa, Homo sapiens
  misc_feature (56)..(56): Xaa can be any naturally occurring amino acid
  misc_feature (85)..(85): Xaa can be any naturally occurring amino acid
CPIPLIPKWLLAGPSWCPGHESRANRPQAGAALLAQLSILANISVQVALYIAFLFXSEAFADLTWASFPRFPFRFLSTSRTQLPXQASPCHLGPGLHTWESDRGSSLNSPGSDALNYHPRTHTTPALGGDGPGLLGVPPGEPQLEAGARRGTLGR

SEQ ID NO: 1025139 - protein, 140 aa, Homo sapiens
KNSFPRRRAAALAACAAMAKIKARDLRGKKKEELLKQLDDLKVELSQLRVAKVTGGAASKLSKIRVVRKSIARVLTVINQTQKENLRKFYKGKKYKPLDLRPKKTRAIARRLNKHEENLKTKKQQRKERLYPLRKYAVKA

SEQ ID NO: 1025140 - protein, 135 aa, Homo sapiens
KNSFPRRRAAALAACAAMAKIKARDLRGKKKEELLKQLDDLKVELSQLRVAKVTGGAASKLSKIRVVRKSIARVLTVINQTQKENLRKFYKGKKYKPLDLRPKKTRAIARRLNKHERPEPRRSTEERFPLPESRS

SEQ ID NO: 1025141 - protein, 82 aa, Homo sapiens
MAKIKARDLRGKKKEELLKQLDDLKVELSQLRVAKVTGGAASKLSKIRVVRKSIARVLTVINQTQRGNLRGFYQGAGGVKPL

SEQ ID NO: 1025142 - protein, 140 aa, Homo sapiens; identical to SEQ ID NO: 1025139

SEQ ID NO: 1025143 - protein, 213 aa, Homo sapiens
MAKIKARDLRGKKKEELLKQLDDLKVELSQLRVAKVTGGAASKLSKIRVVRKSIARVLTVINQTHLASGNSTEVMTSMLPDPLPTNDTRHAPSPYHARPEPDDHHPHRNEPPLPLPHPAQSLPPRTVPVPLFSPPPPLPLLISLLSRSPHSTPATLFSTPYLPLLSSLLPCPTLTSRPCPCPPPLATPSPHPSACPYTSPFLHLLRPPSPPPP

SEQ ID NO: 1025144 - protein, 211 aa, Homo sapiens
SYHIGSGYVFAPATSANDSEISSDALTDDSMSMTNSSVDGIPPYRVGSKKQLQREMHRSVKANGQVSLPHFPRTHRLPKEMTPVEPATFAAELISRLEKLKLELESRHSLEERLQQIREDEEREGSELTLNSREGAPTQHPLSLLPSGSYEEDPQTILDDHLSRVLKTPGCQSPGVGRYSPRSRSPDHHHHHHSQYHSLLPPGGKLPPAAA

SEQ ID NO: 1025145 - protein, 137 aa, Homo sapiens
MTTCLRIECKDESYCSHNSTVSDCQVGNTTDFCSVSTATPVPTANSTAKPTVQPSPSTTSKTVTTSGTTNNTVTPTSQPVRKSTSDAASFIGGIVLVLGVQAVIFFLNKLLHIQSTTLTTLLKTDPLNQYRTGSCTV

SEQ ID NO: 1025146 - protein, 717 aa, Homo sapiens
MVAERTHKAAATGARGPGELGAPGTVALVAARAERGARLPSPGSCGLLTLALCSLALSLLAHFRTAELQARVLRLEAERGEQQMETAILGRVNQLLDEKWKLHSRRRREAPKTSPGCNCPPGPPGPTGRPGLPGDKGAIGMPGRVGSPGDAGLSIIGPRGPPGQPGTRGFPGFPGPIGLDGKPGHPGPKGDMGLTGPPGQPGPQGQKGEKGQCGEYPHRECLSSMPAALRSSQIIALKLLPLLNSVRLAPPPVIKRRTFQGEQSQASIQGPPGPPGPPGPSGPLGHPGLPGPMGPPGLPGPPGPKGDPGIQGYHGRKGERGMPGMPGKHGAKGAPGIAVAGMKGEPGIPGTKGEKGAEGSPGLPGLLGQKGEKGDAGNSIGGGRGEPGPPGLPAPPGPKGEAGVDGQVGPPGQPGDKGERGAAGEQGPDGPKGSKGEPGKGEMVDYNGNINEALQEIRTLALMGPPGLPGQIGPPGAPGIPGQKGEIGLPGPPGHDGEKGPRGKPGDMGPPGPQGPPGKDGPPGVKGENGHPGSPGEKGEKGETGQAGSPGEKGEAGEKGNPGAEVPGLPGPEGPPGPPGLQGVPGPKGEAGLDGAKGEKGFQGEKGDRGPLGLPGASGLDGRPGPPGTPGPIGVPGPAGPKGERGSKGDPGMTGPTGAAGLPGLHGPPGDKGNRGERGKKGSRGPKGDKGDQGAPGLDAPCPLGEDGLPVQGCWNK

SEQ ID NO: 1025147 - protein, 695 aa, Homo sapiens
MVAERTHKAAATGARGPGELGAPGTVALVAARAERGARLPSPGSCGLLTLALCSLALSLLAHFRTAELQARVLRLEAERGEQQMETAILGRVNQLLDEKWKLHSRRRREAPKTSPGCNCPPGPPGPTGRPGLPGDKGAIGMPGRVGSPGDAGLSIIGPRGPPGQPGTRGFPGFPGPIGLDGIPGHPGPKGDMGLTGPPGQPGPQGQKGEKGQCGEYPHRECLSSMPAALRSSQIIALKGEQSQASIQGPPGPPGPPGPSGPLGHPGLPGPMGPPGLPGPPGPKGDPGIQGYHGRKGERGMPGMPGKHGAKGAPGIAVAGMKGEPGIPGTKGEKGAEGSPGLPGLLGQKGEKGDAGNSIGGGRGEPGPPGLPAPPGPKGEAGVDGQVGPPGQPGDKGERGAAGEQGPDGPKGSKGEPGKGEMVDYNGNINEALQEIRTLALMGPPGLPGQIGPPGAPGMPGQKGEIGLLGPPGHDGEKGPRGKPGDMGPPGPQGPPGKDGPPGVKGENGHPGSPGEKGEKGETGQAGSPGEKGEAGEKGNPGAEVPGLPGPEGPPGPPGLQGVPGPKGEAGLDGAKGEKGFQGEKGDRGPLGLPGASGLDGRPGPPGTPGPIGVPGPAGPKGERGSKGDPGMTGPTGAAGLPGLHGPPGDKGNRGERGKKGSRGPKGDKGDQGAPGLDAPCPLGEDGLPVQGCWNK

SEQ ID NO: 1025148 - protein, 824 aa, Homo sapiens
MSLLGDPLQALPPSAAPTGPLLAPPAGATLNRLREPLLRRLSELLDQAPEGRGWRRLAELAGSRGRLRLSCLDLEQCSLKVLEPEGSPSLCLLKLMGEKGCTVTELSDFLQAMEHTEVLQLLSPPGIKITVNPESKAVLAGQFVKLCCRATGHPFVQYQWFKMNKEIPNGNTSELIFNAVHVKDAGFYVCRVNNNFTFEFSQWSQLDVCDIPESFQRSVDGVSESKLQICVEPTSQKLMPGSTLVLQCVAVGSPIPHYQWFKNELPLTHETKKLYMVPYVDLEHQGTYWCHVYNDRDSQDSKKVEIIIGRTDEAVECTEDELNNLGHPDNKEQTTDQPLAKDKVALLIGNMNYREHPKLKAPLVDVYELTNLLRQLDFKVVSLLDLTEYEMRNAVDEFLLLLDKGVYGLLYYAGHGYENFGNSFMVPVDAPNPYRSENCLCVQNILKLMQEKETGLNVFLLDMCRKRNDYDDTIPILDALKVTANIVFGYATCQGAEAFEIQHSGLANGIFMKFLKDRLLEDKKITVLLDEVAEDMGKCHLTKGKQALEIRSSLSEKRALTDPIQGTEYSAESLVRNLQWAKAHELPESMCLKFDCGVQIQLGFAAEFSNVMIIYTSIVYKPPEIIMCDAYVTDFPLDLDIDPKDANKGTPEETGSYLVSKDLPKHCLYTRLSSLQKLKEHLVFTVCLSYQYSGLEDTVEDKQEVNVGKPLIAKLDMHRGLGRKTCFQTCLMSNGPYQSSAATSGGAGHYHSLQDPFHGVYHSHPGNPSNVTPADSCHCSRTPDAFISSFAHHASCHFSRSNVPVETTDEIPFSFSDRLRISEK

SEQ ID NO: 1025149 - protein, 824 aa, Homo sapiens; identical to SEQ ID NO: 1025148

SEQ ID NO: 1025150 - protein, 313 aa, Homo sapiens [sequence omitted]

SEQ ID NO: 1025151 - protein, 764 aa, Homo sapiens
MTEIAGGSLTRCKPDDSCCLIGAGSGASSSEGRAALPDLFFRPCLRGSEASGRCPGAEARDGAGGSPGSPGSPARAMSLLGDPLQALPPSAAPTGPLLAPPAGATLNRLREPLLRRLSELLDQAPEGRGWRRLAELAGSRGRLRLSCLDLEQCSLKVLEPEGSPSLCLLKLMGEKGCTVTELSDFLQAMEHTEVLQLLSPPGIKITVNPESKAVLAGQFVKLCCRATGHPFVQYQWFKMNKEIPNGNTSELIFNAVHVKDAGFYVCRVNNNFTFEFSQWSQLDVCDIPESFQRSVDGVSESKLQICVEPTSQKLMPGSTLVLQCVAVGSPIPHYQWFKNELPLTHETKKLYMVPYVDLEHQGTYWCHVYNDRDSQDSKKVEIIIGRTDEAVECTEDELNNLGHPDNKEQTTDQPLAKDKVALLIGNMNYREHPKLKAPLVDVYELTNLLRQLDFKVVSLLDLTEYEMRNAVDEFLLLLDKGVYGLLYYAGHGYENFGNSFMVPVDAPNPYRSENCLCVQNILKLMQEKETGLNVFLLDMCRKRNDYDDTIPILDALKVTANIVFGYATCQGAEAFEIQHSGLANGIFMKFLKDRLLEDKKITVLLDEVAEDMGKCHLTKGKQALEIRSSLSEKRALTDPIQGTEYSAESLVRNLQWAKAHELPESMCLKFDCGVQIQLGFAAEFSNVMIIYTSIVYKPPEIIMCDAYVTDFPLDLDIDPKDANKGTPEETGSYLVSKDLPKHCLYTRLSSLQKLKVTTFSVYSY

SEQ ID NO: 1025152 - protein, 354 aa, Homo sapiens
  misc_feature (12)..(12): Xaa can be any naturally occurring amino acid
SSLLLGIKRSSXLSLLSRWDYRCQGAEAFEIQHSGLANGIFMKFLKDRLLEDKKITVLLDEVAEDMGKCHLTKGKQALEIRSSLSEKRALTDPIQGTEYSAESLVRNLQWAKAHELPESMCLKFDCGVQIQLGFAAEFSNVMIIYTSIVYKPPEIIMCDAYVTDFPLDLDIDPKDANKGTPEETGSYLVSKDLPKHCLYTRLSSLQKLKEHLVFTVCLSYQYSGLEDTVEDKQEVNVGKPLIAKLDMHRGLGRKTCFQTCLMSNGPYQSSAATSGGAGHYHSLQDPFHGVYHSHPGNPSNVTPADSCHCSRTPDAFISSFAHHASCHFSRSNVPVETTDEIPFSFSDRLRISEK

SEQ ID NO: 1025153 - protein, 813 aa, Homo sapiens
MSLLGDPLQALPPSAAPTGPLLAPPAGATLNRLREPLLRRLSELLDQAPEGRGWRRLAELAGSRGRLRLSCLDLEQCSLKVLEPEGSPSLCLLKLMGEKGCTVTELSDFLQAMEHTEVLQLLSPPGIKITVNPESKAVLAGQFVKLCCRATGHPFVQYQWFKMNKEIPNGNTSELIFNAVHVKDAGFYVCRVNNNFTFEFSQWSQLDVCDIPESFQRSVDGVSESKLQICVEPTSQKLMPGSTLVLQCVAVGSPIPHYQWFKNELPLTHETKKLYMVPYVDLEHQGTYWCHVYNDRDSQDSKKVEIIIDELNNLGHPDNKEQTTDQPLAKDKVALLIGNMNYREHPKLKAPLVDVYELTNLLRQLDFKVVSLLDLTEYEMRNAVDEFLLLLDKGVYGLLYYAGHGYENFGNSFMVPVDAPNPYRSENCLCVQNILKLMQEKETGLNVFLLDMCRKRNDYDDTIPILDALKVTANIVFGYATCQGAEAFEIQHSGLANGIFMKFLKDRLLEDKKITVLLDEVAEDMGKCHLTKGKQALEIRSSLSEKRALTDPIQGTEYSAESLVRNLQWAKAHELPESMCLKFDCGVQIQLGFAAEFSNVMIIYTSIVYKPPEIIMCDAYVTDFPLDLDIDPKDANKGTPEETGSYLVSKDLPKHCLYTRLSSLQKLKEHLVFTVCLSYQYSGLEDTVEDKQEVNVGKPLIAKLDMHRGLGRKTCFQTCLMSNGPYQSSAATSGGAGHYHSLQDPFHGVYHSHPGNPSNVTPADSCHCSRTPDAFISSFAHHASCHFSRSNVPVETTDEIPFSFSDRLRISEK

SEQ ID NO: 1025154 - protein, 461 aa, Homo sapiens [sequence omitted]

SEQ ID NO: 1025155 - protein, 123 aa, Homo sapiens
LVPTVVVTERSPVTGGAQLVLVLGDLHIPHRCNSLPAKFKKLLVPGKIQHILCTGNLCTKESYDYLKTLAGDVHIVRGDFDENLNYPEQKVVTGGQFKIGLIHGQQVIPWGDTGQLSPVAEAI

SEQ ID NO: 1025156 - protein, 67 aa, Homo sapiens
  misc_feature (17)..(17): Xaa can be any naturally occurring amino acid
  misc_feature (38)..(38): Xaa can be any naturally occurring amino acid
KSGGMPRRHPRNTLKSXPKQAEESQMNPDDISTVVIVXKLTVIEKERKKFAIAVEISGLLLPSIVNI

SEQ ID NO: 1025157 - protein, 399 aa, Homo sapiens
ADSVLLGQPTSLAGVRKMATNFLSHENDSTFDKFKYEQTQKGDFYVAMMKRCLCPGASRPSDERQSSVILRASLPQMLIENIQKSLVWKLRPRGLQRQPAETTVSSSSGWPVWKWRTTMSAVCVVQELQQAIFKAGRARLNVLEKSSPGHRVTSPQTQHVSPMRQVEPQPRSSTPAEDDEDDDIDLFGSDNEEEDNEAAQLAGGAATAGTADDRGHEDSALVSKSSILLDVKPWDDAEDIGQWRPVVRSIQGLDRGLAWGGYQSLVARWGLPESEKATRIHSVLVDGRHTVGDHTFALDVKYDIPKVRETHVRSVQPCARFDNAAIRKSPADVFGTFTHGGLSGPGHAITKMDNGHNERNNTKNTTQSCRRNDIMREGPERQAEIDECSDHQRVTEHRR

SEQ ID NO: 1025158 - protein, 109 aa, Homo sapiens
AENRLNPGGGACSEPRSRHCTPAWATERDSISEKKELEGGTLRHPVHKAVKGVSGLAFLPRSDLRSPCSILCPLTGPLLDCQVPVWFGGEDFGVGRVSSWLSGILSKRK

SEQ ID NO: 1025159 - protein, 459 aa, Homo sapiens
FITTGQEGHVLISMRECLSIHIGQAGIQIGDACWELYCLEHGIQPNGVVLDTQQDQLENAKMEHTNASFDTFFCETRAGKHVPRALFVDLEPTVIDGIRTGQHRSLFHPEQLLSGKEDAANNYARGRYSVGSEVIDLVLERTRKLAEQCGGLQGFLIFRSFGGGTGSGFTSLLMERLTGEYSRKTKLEFSVYPAPRISTAVVEPYNSVLTTHSTTEHTDCTFMVDNEAVYDICHRKLGVECPSHASINRLVVQVVSSITASLRFEGPLNVDLIEFQTNLVPYPRIHFPMTAFAPIVSADKAYHEQFSVSDITTACFESSNQLVKCDPRLGKYMACCLLYRGDVVPKEVNAAIAATKSRHSVQFVDWCPTGFKVGINNRPPTVMPGGDLAKVHRSICMLSNTTAIVEAWARLDHKFDLMYAKRAFLHWYLREGMEEAEFLEAREDLAALERDYEEVAQSF

SEQ ID NO: 1025160 - protein, 299 aa, Homo sapiens
  misc_feature (256)..(257): Xaa can be any naturally occurring amino acid
  misc_feature (288)..(288): Xaa can be any naturally occurring amino acid
GCCVGVGGRFRWRTAVPWRAGCGAAAAVAQQAGQRDYDLLVCLAGGSGGLACAKDVPAQLGTEWCPVVDYVGTFSPRHPVWVPLAGNLAVQLLVLAIPKKLMHQAGTAGRPDPRCPQLWLGGGQPCRYDWRKMAEAVQNHVKSLNWGHVSSFRTEKSSTLTSKPALLTSTRFAALPKVGTEILLSADHIIIATGGRPRYPTHIEGALEYGLTSDDIFWLKESPGKNVGGRGQLCGLGVCWLPHRDWGWDTTIMMRXXPFRGFRPANVPPWFIGGTWASSWAPGFLEGXVALSGGFREAS

SEQ ID NO: 1025161 - protein, 170 aa, Homo sapiens
MALLTALDDTLPEEAQGPGRRMILLSTPSQSDALRACFERNLYPGIATKEELAQGIDIPEPRVQIWFQNERSCQLRQHRRQSRPWPGRRDPQKGRRKRTAITGSQTALLLRAFEKDRFPGIAAREELARETGLPESRIQIWFQNRRARHRGQSGRAPTQASIRCNAAPIG

SEQ ID NO: 1025162 - protein, 225 aa, Homo sapiens
GGPGMLRRPLAGLAAGRSVGRAPPDGMSGPRPVVLSGPSGAGKSTLLKRLLQEHSGIFGFSVSHTTRNPRPGEENGKDYYFVTREVMQRDIAAGDLHRACRVLGEPVWHEQGGGAGRAGMNRICVLDVDLARVCGNIQATDLRPIYISVQSAFTATCWEQRLRQRNTETEESLVKRLAAAQADMESSKEPGLFDVVIINDSLDQAYAELKEALSEEIKKAQRTGA

SEQ ID NO: 1025163 - protein, 246 aa, Homo sapiens
EDPVQESAGVSFSLHGQTRDDSRASVVKGWGLHVLCGSWKSPISSGGMSGPRPVVLSGPSGAGKSTLLKRLLQEHSGIFGFSVSHTTRNPRPGEENGKDYYFVTREVMQRDIAAGDLHRACRVLGEPVWHEQGGGAGRAGMNRICVLDVDLARVCGTSKATDLRPIYISVQSAFTATCWEQRLRQRNTETEESLVKRLAAAQADMESSKEPGLFDVVIINDSLDQAYAELKEALSEEIKKAQRTGA

SEQ ID NO: 1025164 - protein, 176 aa, Homo sapiens
MNDTQMKLTGLKEILTYLDNPIEQAQSRDVWLRYMTHTGNKNSHKQRCTPELQTDKVLTRAAKTIPWNEHEQNYHKDRQTAHGSQECTTLRTRERPEQPQPTYAKTGTQGRQNGRHNDTDTLDSNYTSDRPELRAQQTDDMREMGTLDKNCTKQQQEDRADPLKSRGTATQRNNEQ

SEQ ID NO: 1025165 - protein, 121 aa, Homo sapiens
SGSRASAAAEQRREPGGLPAGVKKKMTLQWAAVATFLYAEIGLILIFCLPYIPPQRWQKIFSFNVWGKIATSLEQGFPYHYHPIDCSISRVSRRVVTLYYSHWQKETVKQRCNLKGQAEKY

SEQ ID NO: 1025166 - protein, 171 aa, Homo sapiens
MTLCRMSWMLLSCLMFLSWVEGEESQKKLPSSRITCPQGSVAYGSYCYSLILIPQTWSNAELSCQMHFSGHLAFLLSTGEITFVSSLVKNSLTAYQYIWIGLHDPSHGTLPNGSGWKWSSSNVLTFYNWERNPSIAADRGYCAVLSQKSGFQKWRDFNCENELPYICKFKV

SEQ ID NO: 1025167 - protein, 135 aa, Homo sapiens
MLATRVFSLVGKRAISTSVCVRAHESVVKSEDFSLPAYMDRRDHPLPEVAPCQAPVCQPEGTEGRRRRPPGAASPWMRNVELYRIKFKESFAEMKRGSNEWKTVVGGAMFFTLFTGARYIMQADKLLCLRPLRKV

SEQ ID NO: 1025168 - protein, 184 aa, Homo sapiens
  misc_feature (122)..(122): Xaa can be any naturally occurring amino acid
MLATRVFSLVGKRAISTSVCVRAHESVVKSEDFSLPAYMDRRDHPLPEVAPCQAPVCQPEGTEGRRRRPPGAASPWMRNVELCGIDRDPSGRAQLRFSENAMSVTEAIVLIFVEPYLSRRAXLCRQEGLTLLGYSEVTVAQGPELYVRHRVTELCSADRIFCWAPFSVLSGGSLSAISAGIRHS

SEQ ID NO: 1025169 - protein, 130 aa, Homo sapiens
HEGIPCAKLGAPESLTTMPPPRLLFFLLFLTPMEVRPEEPLVVKVEEGDNAVLQCLKGTSDGPTQQLTWSRESPLKPFLKLSLAGQSMWRAAGRAGLGQGQEERREATMDRRGPRPQWSWREGLQALGPT

SEQ ID NO: 1025170 - protein, 269 aa, Homo sapiens
DPEPEVCNQEQNFAPELKASALDLDSAPGFKAGFLDPESIRRAQNILFPCPAARTLSLDRPISSDPSLTMPLSPGRAQRWAAGLGGTAPSYGNPSSDVQADGALGSRSPPGVGPEEEEGEGYEEPDSEEDSEFYENDSNLGQDQLSQDGSGYENPEDEPLGPEDEDSFSNAESYENEDEELTQPVARTMDFLSPHGSAWDPSREATSLGSQSYEDMRGILYAAPQLRSIRGQPGPNHEEDADSYENMDNPDGPDPAWGGGGRMGTWSTR

SEQ ID NO: 1025171 - protein, 405 aa, Homo sapiens
MSPKLYVWAKDRPEIWEGEPPCVPPRDSLNQSLSQDLTMAPGSTLWLSCGVPPDSVSRGPLSWTHVHPKGPKSLLSLELKDDRPARDMWVMETGLLLPRATAQDAGKYYCHRGNLTMSFHLEITARPVLWHWLLRTGGWKVSAVTLAYLIFCLCSLVGILHLQRALVLRRKRKRMTDPTRRFFKVTPPPGSGPQNQYGNVLSLPTPTSGLGRAQRWAAGLGGTAPSYGNPSSDVQADGALGSRSPPGVGPEEEEGEGYEEPDSEEDSEFYENDSNLGQDQLSQDGSGYENPEDEPLGPEDEDSFSNAESYENEDEELTQPVARTMDFLSPHGSAWDPSREATSLGSQSYEDMRGILYAAPQLRSIRGQPGPNHEEDADSYENMDNPDGPDPAWGGGGRMGTWSTR

SEQ ID NO: 1025172 - protein, 250 aa, Homo sapiens
DPEPEVCNQEQNFAPELKASALDLDSAPGFKAGFLDPESIRRAQNILFPCPAARTLSLDRPISSDPSLTMPLSPGRAQRWAAGLGGTAPSYGNPSSDVQADGALGSRSPPGVGPEEEEGEGYEEPDSEEDSEFYENDSNLGQDQLSQDGSGYENPEDEPLGPEDEDSFSNAESYENEDEELTQPVARTMGSQSYEDMRGILYAAPQLRSIRGQPGPNHEEDADSYENMDNPDGPDPAWGGGGRMGTWSTR

SEQ ID NO: 1025173 - protein, 556 aa, Homo sapiens [sequence omitted]

SEQ ID NO: 1025174 - protein, 556 aa, Homo sapiens [sequence omitted]

SEQ ID NO: 1025175 - protein, 573 aa, Homo sapiens
HEGIPCAKLGAPESLTTMPPPRLLFFLLFLTPMEVRPEEPLVVKVEEGDNAVLQCLKGTSDGPTQQLTWSRESPLKPFLKLSLGLPGLGIHMRPLAIWLFIFNVSQQMGGFYLCQPGPPSEKAWQPGWTVNVEGSGELFRWNVSDLGGLGCGLKNRSSEGPSSPSGKLMSPKLYVWAKDRPEIWEGEPPCVPPRDSLNQSLSQDLTMAPGSTLWLSCGVPPDSVSRGPLSWTHVHPKGPKSLLSLELKDDRPARDMWVMETGLLLPRATAQDAGKYYCHRGNLTMSFHLEITARPVLWHWLLRTGGWKVSAVTLAYLIFCLCSLVGILHLQRALVLRRKRKRMTDPTRRFFKVTPPPGSGPQNQYGNVLSLPTPTSGLGRAQRWAAGLGGTAPSYGNPSSDVQADGALGSRSPPGVGPEEEEGEGYEEPDSEEDSEFYENDSNLGQDQLSQDGSGYENPEDEPLGPEDEDSFSNAESYENEDEELTQPVARTMDFLSPHGSAWDPSREATSLGSQSYEDMRGILYAAPQLRSIRGQPGPNHEEDADSYENMDNPDGPDPAWGGGGRMGTWSTR

SEQ ID NO: 1025176 - protein, 113 aa, Homo sapiens
TPLYQTSKEELVEVGLIYSSYDLGGERLLSSNQKLYPGIQLVCEPLYPQGSPGYSHGLHCKPLCSLQNSGDEEELIFPSDVDPFPFHAASLTLDFGALKVSWTRHWDNSSMAC

SEQ ID NO: 1025177 - protein, 100 aa, Homo sapiens
ENGQQEGGPRGKWAATKQAHRGSSTVFSMFDQAQIQEFKEAFRVYIAQIRDVTSSAETSEGHLLHREMSVYQRAARVISSKATTSTSTMFGEELETPENH

SEQ ID NO: 1025178 - protein, 73 aa, Homo sapiens
ENGQQEGGPRGKWAATKQAHRGSSTVFSMFDQAQIQEFKEAFRVYIAQIRDVTSSAGRPLGGPPPAGKVVHRE

SEQ ID NO: 1025179 - protein, 363 aa, Homo sapiens
MKTLLLLLLVLLELGEAQGSLHRVPLRRHPSLKKKLRARSQLSEFWKSHNLDMIQFTESCSMDQSAKEPLINYLDMEYFGTISIGSPPQNFTVIFDTGSSNLWVPSVYCTSPACKTHSRFQPSQSSTYSQPGQSFSIQYGTGSLSGIIGADQVSVEGLTVVGQQFGESVTEPGQTFVDAEFDGILGLGYPSLAVGGVTPVFDNMMAQNLVDLPMFSVYMSSNPEGGAGSELIFGGYDHSHFSGSLNWVPVTKQAYWQIALDNMLWSVPTLTSCRMSPSPLTESPIPSAQLPTPYWTSWMECSSAAVAFKDLTSTLQLGPSGSWGMSSFDSFTQSLTVGITVWDWPQQSPKEGPCVCACLSDRP

SEQ ID NO: 1025180 - protein, 266 aa, Homo sapiens
MQPVSRWHKQEQLHFFPETHSRFQPSQSSTYSQPGQSFSIQYGTGSLSGIIGADQVSVEGLTVVGQQFGESVTEPGQTFVDAEFDGILGLGYPSLAVGGVTPVFDNMMAQNLVDLPMFSVYMSSNPEGGAGSELIFGGYDHSHFSGSLNWVPVTKQAYWQIALDNMLWSVPTLTSCRMSPSPLTESPIPSAQLPTPYWTSWMECSSAAVAFKDLTSTLQLGPSGSWGMSSFDSFTQSLTVGITVWDWPQQSPKEGPCVCACLSDRP

SEQ ID NO: 1025181 - protein, 356 aa, Homo sapiens
MKTLLLLLLVLLELGEAQGSLHRVPLRRHPSLKKKLRARSQLSEFWKSHNLDMIQFTESCSMDQSAKEPLINYLDMEYFGTISIGSPPQNFTVIFDTGSSNLWVPSVYCTSPACKTHSRFQPSQSSTYSQPGQSFSIQYGTGSLSGIIGADQVSVEGLTVVGQQFGESVTEPGQTFVDAEFDGILGLGYPSLAVGGVTPVFDNMMAQNLVDLPMFSVYMSSNPEGGAGSELIFGGYDHSHFSGSLNWVPVTKQAYWQIALDNMLWSVPTLTSCRMSPSPLTESPIPSAQLPTPYWTSWMECSSAAVAFKDLTSTLQLGPSGSWGMSSFDSFTQSLTVGPRLAGAARLARAPVLRGL

SEQ ID NO: 1025182 - protein, 396 aa, Homo sapiens
MKTLLLLLLVLLELGEAQGSLHRVPLRRHPSLKKKLRARSQLSEFWKSHNLDMIQFTESCSMDQSAKEPLINYLDMEYFGTISIGSPPQNFTVIFDTGSSNLWVPSVYCTSPACKTHSRFQPSQSSTYSQPGQSFSIQYGTGSLSGIIGADQVSVEGLTVVGQQFGESVTEPGQTFVDAEFDGILGLGYPSLAVGGVTPVFDNMMAQNLVDLPMFSVYMSSNPEGGAGSELIFGGYDHSHFSGSLNWVPVTKQAYWQIALDNIQVGGTVMFCSEGCQAIVDTGTSLITGPSDKIKQLQNAIGAAPVDGEYAVECANLNVMPDVTFTINGVPYTLSPTAYTLLDFVDGMQFCSSGFQGLDIHPPAGPLWILGDVFIRQFYSVFDRGNNRVGLAPAVP

SEQ ID NO: 1025183 - protein, 396 aa, Homo sapiens; identical to SEQ ID NO: 1025182

SEQ ID NO: 1025184 - protein, 204 aa, Homo sapiens
  misc_feature (58)..(58): Xaa can be any naturally occurring amino acid
  misc_feature (96)..(96): Xaa can be any naturally occurring amino acid
  misc_feature (108)..(108): Xaa can be any naturally occurring amino acid
  misc_feature (150)..(150): Xaa can be any naturally occurring amino acid
  misc_feature (158)..(158): Xaa can be any naturally occurring amino acid
  misc_feature (168)..(168): Xaa can be any naturally occurring amino acid
  misc_feature (170)..(170): Xaa can be any naturally occurring amino acid
  misc_feature (173)..(173): Xaa can be any naturally occurring amino acid
  misc_feature (175)..(175): Xaa can be any naturally occurring amino acid
  misc_feature (196)..(196): Xaa can be any naturally occurring amino acid
  misc_feature (203)..(203): Xaa can be any naturally occurring amino acid
RNTFLRPGALGQHCVLRLVSYLRLPSICVQRAPAPAQPVTLQGHTHRVPTQDSRHPPXCARPVTAPRPSSPTGTDWGTAWPSLHQGPLLMNSGALXRKGQPPTLSPSXLPLLSSFLKTASPKHNALAMKESEPWVRMDRLRSASTSGKPXNDANWARXDSPHTHTMPXVXGLXLXKEPPIAFLAPDKKRKLFWGYXTGPTPGXN

SEQ ID NO: 1025185 - protein, 614 aa, Homo sapiens [sequence omitted]

SEQ ID NO: 1025186 - protein, 129 aa, Homo sapiens
GRAGHHGPGRARPAVATSAFPAQEPRVFLRSALPAGRLSPSTTHLHLVTADNPAANWLHARSTRKKRCPYTKHQTLELEKEFLFNMYLTRDRRYEVARLLNLTERQVKIWFQNRRMKMKKINKDRAKDE

SEQ ID NO: 1025187 - protein, 129 aa, Homo sapiens; identical to SEQ ID NO: 1025186

SEQ ID NO: 1025188 - protein, 42 aa, Homo sapiens
MGESLELPRDLLNGFDQNADNDVVNEIQAEVVSDGDEELVGN

SEQ ID NO: 1025189 - protein, 290 aa, Homo sapiens
  misc_feature (9)..(9): Xaa can be any naturally occurring amino acid
LDARCESVXGKGSRNAPFACYEEIQSQSDRFGNCGRDRNNKYVFCGWRNLICGRLVCTYPTRKPFHQENGDVIYAFVRDSVCITVDYKLPRTVPDPLAVKNGSQCDIGRACVPCECVESRIIKASAHVCSQQCSGHGVCDSRNKCHCSPGYKPPNCQIRSKGFSIFPEEDMGSIMERASGKTENTWLLGFLIALPILIVTTAIVLARKQLKKWFAKEEEFPSSESKSEGSTQTYASQSSSEGSTQTYASQTRSESSSQADTSKSKSEDSAEAYTSRSKSQDSTQTQSSSN

SEQ ID NO: 1025190 - protein, 225 aa, Homo sapiens
  misc_feature (9)..(9): Xaa can be any naturally occurring amino acid
LDARCESVXGKGSRNAPFACYEEIQSQSDRFGNCGRDRNNKYVFCGWRNLICGRLVCTYPTRKPFHQENGDVIYAFVRDSVCITVDYKLPRTVPDPLAVKNGSQCDIGRACVPCECVESRIIKASAHVCSQQCSGHGVCDSRNKCHCSPGYKPPNCQIRSKGFSIFPEEDMGSIMERASGKTENTWLLGFLIALPILIVTTAIVLARKQLKKWFAKEEEFPSSEI

SEQ ID NO: 1025191 - protein, 96 aa, Homo sapiens
  misc_feature (90)..(91): Xaa can be any naturally occurring amino acid
DFDDRVSDEEKVRIAAKFITHAPPGEFNEVFNDVRYYLIMTISSGKGQHMHLPSINMDQFTPVKIEGYEDQVLITEHGDLCNSRFLPFQXXTKFSF

SEQ ID NO: 1025192 - protein, 281 aa, Homo sapiens
SFCTARSGSAAALRMRPVRLMKVFVTRRIPAEGRVALARAADCEVEQWDSDEPIPAKELERGVAGAHGLSASSPKHSGQEDPVMLQGGHSLQSSSASMLWGSYDQLGMDVQSTNAWDPELVHPRCPDRYHRELASLPATYPPAAVAGGHRGSEEWWLTSWKPSGCVAMDSTQSTVGIIGLGARPGIARRLKPFGVHEISCTQGRQLRPEEAGTNSRAELGLPPEAWCPNLFNDEALVFNLNRGSAQDSSEYEDRCVLTSDGHQTSTCPDCKVLAARSAPLV

SEQ ID NO: 1025193 - protein, 220 aa, Homo sapiens
MPNIGYGSNKKTKHMLPSGFRKFLVHNVKELEVLLMCNKSYCAEIAHNVSSKNRKAIVERAAQLAIRVTNPNARLRSEENESAAHVHVFCLNKCKNCHSGIFLQKKKGNLNRAGDKERHLHHTKKRQQLGTKRTATSSEGTAHSDCPPKHGFPKQDVRPPTRSSPQVKSHTKHSDSTAEHITTERRGRNSPGLEGHPSEEQNTIHTSGEKATGERVTQQD

SEQ ID NO: 1025194 - protein, 141 aa, Homo sapiens
PSLFLGAAYGGGSHLLLGIMAALRPLVKPKIVKKSKIKRNWRKPRGIDNRVRRRFKGQILMPNIGYGSNKKTKHMLPSGFRKFLVHNVKELEVLLMCNKSYCAEIAHNVSSKNRKAIVERAAQLAIRVTNPNARLRSEENE

SEQ ID NO: 1025195 - protein, 154 aa, Homo sapiens
PSLFLGAAYGGGSHLLLGIMAALRPLVKPKIVKKRTKKFIRHQSDRYVKIKRNWRKPRGIDNRVRRRFKGQILMPNIGYGSNKKTKHMLPSGFRKFLVHNVKELEVLLMCNKSYCAEIAHNVSSKNRKAIVERAAQLAIRVTNPNARLRSEENE

SEQ ID NO: 1025196 - protein, 90 aa, Homo sapiens
  misc_feature (2)..(2): Xaa can be any naturally occurring amino acid
  misc_feature (20)..(20): Xaa can be any naturally occurring amino acid
  misc_feature (22)..(22): Xaa can be any naturally occurring amino acid
RXSNYPGVPLVVPSRIRHCXIXGLADINVTLHETTYNSIMKCDIDIRKTLYASRFHTNEAIVSCFMDASRFHTNEGGLEECLRTAEALIT

SEQ ID NO: 1025197 - protein, 74 aa, Homo sapiens
  misc_feature (2)..(2): Xaa can be any naturally occurring amino acid
  misc_feature (20)..(20): Xaa can be any naturally occurring amino acid
  misc_feature (22)..(22): Xaa can be any naturally occurring amino acid
RXSNYPGVPLVVPSRIRHCXIXGLADINVTLHETTYNSIMKCDIDIRKTLYANNVLSGGTTMYPGFSDRYCRGN

SEQ ID NO: 1025198 - protein, 86 aa, Homo sapiens
LLLAGYDDFNCNVWDALKADRAGVLAGHDNRVTALGVTDDGMAVATGSWDSFLKIWTNASSMWMPWRLETIPTWTRSHESISIQPY

SEQ ID NO: 1025199 - protein, 73 aa, Homo sapiens
  misc_feature (15)..(15): Xaa can be any naturally occurring amino acid
  misc_feature (50)..(50): Xaa can be any naturally occurring amino acid
GPPVTMVSMSFKRNXVTGSTAPGLRLLPCPHRDVHPGDLVHGSKPIDGIXLTVEDDGCMFLVCICFHLCDKMI

SEQ ID NO: 1025200 - protein, 103 aa, Homo sapiens
  misc_feature (10)..(10): Xaa can be any naturally occurring amino acid
  misc_feature (31)..(31): Xaa can be any naturally occurring amino acid
PPENRRHNPXPRLVMYRCRIRGSQLVDIKMXPLLSIYFQTLRSFLTSVKRLFVFLVSLLHLNSFEEQSRLSKSKVPLFAFNWGVGREKGYLPHSFLFNSTFFK

SEQ ID NO: 1025201 - protein, 176 aa, Homo sapiens
  misc_feature (164)..(164): Xaa can be any naturally occurring amino acid
  misc_feature (171)..(171): Xaa can be any naturally occurring amino acid
  misc_feature (176)..(176): Xaa can be any naturally occurring amino acid
HRAGGNTGLNPCQPAGGRGAPLRIRETQRPSRRLQVATLPGPLWLRLRALALARERCNGLSLLGVAGEGLHLPQDGQVHQHLQQTEKLKEHLEAVAGEGLHLPQDGQVHQDLEQDGELKEHLEAVAVLKVSPLVLTSTILILVACCAWVGKRFCEGLLERSRLXFQGKFKXFRSRX

SEQ ID NO: 1025202 - protein, 406 aa, Homo sapiens
MDFGLALLLAGLLGLLLGQSLQVKPLQVEPPEPVVAVALGASRQLTCRLACADRGASVQWRGLDTSLGAVQSDTGRSVLTVRNASLSAAGTRVCVGSCGGRTFQHTVQLLVYAFPDQLTVSPAALVPGDPEVACTAHKVTPVDPNALSFSLLVGGQELEGAQALGPEVQEEEEEPQGDEDVLFRVTERWRLPPLGTPVPPALYCQATMRLPGLELSHRQAIPVLHSPTSPEPPDTTSPEPPNTTSPESPDTTSPESPDTTSQEPPDTTSQEPPDTTSQEPPDTTSPEPPDKTSPEPAPQQGSTHTPRSPGSTRTRRPEISQAGPTQGEVIPTGSSKPAGDQLPAALWTSSAVLGLLLLALPTYHLWKRCRHLAEDDTHPPASLRLLPQVSAWAGLRGTGQVGISPS

SEQ ID NO: 1025203 - protein, 743 aa, Homo sapiens
MAVAVRTLQEQLEKAKESLKNVDENIRKLTGRDPNDVRPIQARLLALSGPGGGRGRGSLLLRRGFSDSGGPPAKQRDLEGAVSRLGGERRTRRESRQESDPEDDDVKKPALQSSVVATSKERTRRDLIQDQNMDEKGKQRNRRIFGLLMGTLQKFKQESTVATERQNRRQEIEQKLEVQAEEERKQVENERRELFEERRAKQTELRLLEQKVELAQLQEEWNEHNAKIIKYIRTKTKPHLFYIPGRMCPATQKLIEESQRKMNALFDGRRIEFAEQINKMEARPRRQSMKEKEHQVVRNEEHKAEQEEGKVAQREEELVETGNQHNDVEIEEAGEEEEKEIGIVHSDAEKEQEEEEQKQEMEVKMEEETEVRESEKQQDSQPEEVMDVLEMVENVKHVIADQEVMETNRVESVEPSENEASKELEPEMEFEIEPDKECKSLSPGKENVSALDMEKESDEKEEKESEPQPEPVAQPQAQSQPQLQLQSQSEPQPQLQPEPAQPQLQSQPQLQLQSQCHAVLQSHPPSQPEDLSLAVLQPTPQVTQEHGHFLPERKDFPVESVKLTEVPVDPVLTVHPESESETNTRSRSRGRTRNRTTKSRSRSSSSSSSSSSSTSSSSGSSSSSGSSSSRSSSSSSSSTSGSSSRDSSSSTSSSSESRSRSRGRGHNRDRKHRRSVDRKRRDTSGLERSHKSSKGGSSRDTKGSKDKNSRSDRKRSISESSRSGKRSSRSERDRKSDRKDKRR

SEQ ID NO: 1025204 - protein, 77 aa, Homo sapiens
RTLAGTRYLPGYVRSGYILSTKEQCKMHCKVYSMTSFGLKKNLYTNLYLYVVAHARMNIKRCILCESGFYVVNVVRK

SEQ ID NO: 1025205 - protein, 162 aa, Homo sapiens
RTLAGTRYLPGYVRSGYILSTKEQCKMHCKVYSMTSFGLKKNLYTNLYLYVVAHARMNIKGVRKTTDVFTLDTMRNRNEGKEDNNRKSSGPSCNWNANTLNVIDISTKEDLSPTYSDVNLTHVPGNATLLPQCPCGESKLNYMQFHITRLHRKDLMLRNYNS

SEQ ID NO: 1025206 - protein, 102 aa, Homo sapiens
QTLPMEASSEPPLDAKSPVTNQLVDFQWKLGIAFSSDTFRSLKISLRCSYSKSVPDYSGQVKTTCFLNLRVHRFQNFYRQIQGDFCSYLNGVKTGSFVDKIL

SEQ ID NO: 1025207 - protein, 314 aa, Homo sapiens
PGVVLVGLTSAVARGLVSAGWAGGARGGLDEVKPLLPYKQFWWPDSFDLRFFPISKDQPRVLLPLANVALIDYTLEFLTATGVQETFVFCCWKAAQIKEHLLKSKWCLPYIFNVVRIITSELYRSLGDVLRDVDCPRLWCALTFFLVYGDVISTHQYQAEPLSEPQVETEAENKNVSVMTMIFNESSPAPNSLHEDNVVVAVDSTTTGNPKEEPGSLGFELPLSCVGGVIGGAALRRMSNSDLEPSRPQSRTPHTDEIMCSPKMRDADHAAASAGATHENECNANDKQRTKHAYGGECRTTRQERIDGASDRCS

SEQ ID NO: 1025208 - protein, 127 aa, Homo sapiens
HTSAERMASRKAGTRGKVAATKQAQRGSSNVFSMFEQAQIQEFKEAGAAPTLRPHPQAFSCIDQNRDGIICKADLRETYSSWEGSLREQLEDAAEQGPSFKSPTFLGELMDSREHLVLDFTSARVYR

SEQ ID NO: 1025209 - protein, 137 aa, Homo sapiens
HTSAERMASRKAGTRGKVAATKQAQRGSSNVFSMFEQAQIQEFKEVSPHLPPSLELGLLHLKAPIPQAFSCIDQNRDGIICKADLRETYSSWEGSLREQLEDAAEQGPSFKSPTFLGELMDSREHLVLDFTSARVYR

SEQ ID NO: 1025210 - protein, 94 aa, Homo sapiens
HTSAERMASRKAGTRGKVAATKQAQRGSSNVFSMFEQAQIQEFKEVSPHLPPSLELGLLHLKAPIPQAFSCIDQNRDGIICKADLRETYSSWGR

SEQ ID NO: 1025211 - protein, 112 aa, Homo sapiens
LDQTNVSAAARRRKMCLFAGFQRKAVVVGPKDEDYKQRTQKKAEVEGKDLPEHAVLKMKGNFTLPEVAECFDEITYVELQKEEAQNSWSIIRRTAKGSPPEKRQTIGYTERH

SEQ ID NO: 1025212 - protein, 112 aa, Homo sapiens
LDQTNVSAAARRRKMCLFAGFQRKAVVVGPKDEDYKQRTQKKAEVEGKDLPEHAVLKMKGNFTLPEVAECFDEITYVELQKEEAQNSWSIIRRTAKGSSTREETDTAQESIK

SEQ ID NO: 1025213 - protein, 150 aa, Homo sapiens
MGLLTGHLQSAGVKVRTAHAAAVGQLGSQASAGPSLLLSWLALRDKPYPFLTSRCNFFVVPADEAQARIPYARVNHNKYMVTERATYIGTSNWSGNYFRETAGTSLLVTQNGKGGLRSQLEAIFLRDWDSPYSHDLDTSADSVGNACRLL

SEQ ID NO: 1025214 - protein, 150 aa, Homo sapiens; identical to SEQ ID NO: 1025213

SEQ ID NO: 1025215 - protein, 107 aa, Homo sapiens
  misc_feature (7)..(7): Xaa can be any naturally occurring amino acid
HLHSCSXGHEFISKAKDIMGTLGPRCSGSRSLSPHPRFCLPHCGSSGSLPCSPTSTSTPTGLTLWPRDPAELGEGSAPKEMGVHAGPGPLAHPHFPGQKGPRVIISK

SEQ ID NO: 1025216 - protein, 108 aa, Homo sapiens [sequence omitted]

SEQ ID NO: 1025217 - protein, 515 aa, Homo sapiens
MALSQSVPFSATELLLASAIFCLVFWVLKGLRPRVPKGLKSPPEPWGWPLLGHVLTLGKNPHLALSRMSQRYGDVLQIRIGSTPVLVLSRLDTIRQALVRQGDDFKGRPDLYTSTLITDGQSLTFSTDSGPVWAARRRLAQNALNTFSIASDPASSSSCYLEEHVSKEAKALISRLQELMAGPGHFDPYNQVVVSVANVIGAMCFGQHFPESSDEMLSLVKNTHEFVETASSGNPLDFFPILRYLPNPALQRFKAFNQRFLWFLQKTVQEHYQDFDKNSVRDITGALFKHSKKGPRASGNLIPQEKIVNLVNDIFGAGFDTVTTAISWSLMYLVTKPEIQRKIQKELDTVIGRERRPRLSDRPQLPYLEAFILETFRHSSFLPFTIPHSTTRDTTLNGFYIPKKCCVFVNQWQVNHDPELWEDPSEFRPERFLTADGTAINKPLSEKMMLFGMGKRRCIGEVLAKWEIFLFLAILLQQLEFSVPPGVKVDLTPIYGLTMKHARCEHVQARRFSIN

SEQ ID NO: 1025218 - protein, 203 aa, Homo sapiens
RSRRQHCRRHYPLFLCCSDLDVLPVSHLFAAYMASCSTGRVSCWSDPERFSCALQGYIITDWCARLIKEYGTEQPEETFPNTETNGEFGKRPAEWIWREEQAFKRSRNTDEMVELRILLQSKNAGAVIGKGGKNIKALRTDYNASVSVPDSSGPERILSISADIETIGEILKKIIPTLEAGPEVAIDPLEAASSRSNLMLWNA

SEQ ID NO: 1025219 - protein, 274 aa, Homo sapiens
MQTPLSSVSLLQRPRRLACVPLVRGLYGYCMHWGVSCWSDPERFSCALQGYIITDWCARLIKEYGTEQPEETFPNTETNGEFGKRPAEWIWREEQAFKRSRNTDEMVELRILLQSKNAGAVIGKGGKNIKALRTDYNASVSVPDSSGPERILSISADIETIGEILKKIIPTLERVPTLLKEADFDLRAVKAVDFNHDVYARTDTYFRGVPKKGWALKEKSKQRKTFPGRRSSFKYHAIQTPFMSAQGGKNLAVGSPFEIVPSSETPGKPSGYVR

SEQ ID NO: 1025220 - protein, 87 aa, Homo sapiens
  misc_feature (83)..(83): Xaa can be any naturally occurring amino acid
  misc_feature (86)..(86): Xaa can be any naturally occurring amino acid
QVDTSGSWVSLALGSGYKRQGPLGVWCRHSMAGALVRKAADYVQGKDFRDYLMSTDFWGPVANWGLPIAAINDMKKSPEIISXRDXK

SEQ ID NO: 1025221 - protein, 133 aa, Homo sapiens
MAHRGPQRCLLMALATWKSEPGQVKAAVKYALSVGYRHIDCAAIYGNEPESGEALKEDVGPGKGGASGETAVGDIQSCGTPKHHPEDGGAVASGKTLGDLQLQYLGPLYLNGTALLLLEAGENNPFPKEMPDG

SEQ ID NO: 1025222 - protein, 172 aa, Homo sapiens
RLKLRIVGSLAGCRTEPRPQYPIHALCLCQGGNGGFLCLLHTGQKMPLDGSWSTWKSEPGQVKAAVKYALSVGYRHIDCAAIYGNEPESGEALKEDVGPGKGGASGETACWSTFQSCGTPKHHPEDVGAVPSGKTLGAPPAAVSGPLYLNGTALLLLEAGENNPFPQEMPDG

SEQ ID NO: 1025223 - protein, 34 aa, Homo sapiens
MGRLDGKVIILTAAAQGIGKSCLSFCREVPSHSH

SEQ ID NO: 1025224 - protein, 98 aa, Homo sapiens
MAEQSDEAVKYYTLEEIQKHNHSKSTWLILHHKVYDLTKFLEEHPGGEEVLREQAGGDATENFEDVGHSTDAREMSKTFIIGELHPDDRPKLNKPPEP

SEQ ID NO: 1025225 - protein, 157 aa, Homo sapiens
AWVLASSVPNPRTCLRAARDLRSVDSTYHSYRSEIHECTTLLAMTHPGLYSLALIKVYDLTKFLEEHPGGEEVLREQAGGDATENFEDVGHSTDAREMSKTFIIGELHPDDRPKLNKPPETLITTIDSSSSWWTNWVIPAISAVAVALMYRLYMAED

SEQ ID NO: 1025226 - protein, 183 aa, Homo sapiens
AVVRKCIKKDSGKEFAAKFMRKRRKGQDCRMEIIHEIAVLELAQDNPWVINLHEVYETASEMILVLEYAAGGEIFDQCVADREEAFKEKDVQRLMRQILEGVHFLHTRDVVHLDLKPQNILLTSESPLGDIKIVDFGLSRILKNSEELREIMGTPEYVAPEILSYDPISMATDMWSIGVLTYV

SEQ ID NO: 1025227 - protein, 124 aa, Homo sapiens
AVMAGVLKKTTGLVGWAVCQYSSREAKNIVHKDSVSVLRKSLKIAAYRKYTDQITNEKLAMVKAEPDVKKLEEQFQGGQLGRGGIFRADHDLNLGKKNEGMETMGAISGRASCRSVEMANIIIT

SEQ ID NO: 1025228 - protein, 252 aa, Homo sapiens
  misc_feature (24)..(24): Xaa can be any naturally occurring amino acid
  misc_feature (51)..(51): Xaa can be any naturally occurring amino acid
  misc_feature (62)..(62): Xaa can be any naturally occurring amino acid
  misc_feature (67)..(67): Xaa can be any naturally occurring amino acid
  misc_feature (87)..(88): Xaa can be any naturally occurring amino acid
  misc_feature (113)..(113): Xaa can be any naturally occurring amino acid
  misc_feature (117)..(117): Xaa can be any naturally occurring amino acid
  misc_feature (148)..(148): Xaa can be any naturally occurring amino acid
  misc_feature (153)..(153): Xaa can be any naturally occurring amino acid
  misc_feature (176)..(176): Xaa can be any naturally occurring amino acid
  misc_feature (183)..(183): Xaa can be any naturally occurring amino acid
  misc_feature (189)..(189): Xaa can be any naturally occurring amino acid
  misc_feature (192)..(192): Xaa can be any naturally occurring amino acid
  misc_feature (197)..(197): Xaa can be any naturally occurring amino acid
  misc_feature (202)..(205): Xaa can be any naturally occurring amino acid
  misc_feature (210)..(210): Xaa can be any naturally occurring amino acid
  misc_feature (215)..(215): Xaa can be any naturally occurring amino acid
  misc_feature (220)..(220): Xaa can be any naturally occurring amino acid
  misc_feature (247)..(247): Xaa can be any naturally occurring amino acid
MAEGNHRKKPLKVLESLGKDFLTXVLDNLVDQNVLNWKEEDKKKYYDAKTXDKVRVYGQTLXKISNXWQDKFFFNPFLSYTKYPPIXXLIRIVRLVPPVVQDESTDALKLCPXEEFXDYLCKERADVIFPIKEELIAHAWLSSLCNTXFDHLXPWNGADFVITGMMVLLLGLDYIXDVEENLXARDMEXALXAFATXSEHMXXXXTFLVXMSHGXLERIXGFVHYEKNQYVLLYVTIFQIFNNRICXSLKFN

SEQ ID NO: 1025229 - protein, 188 aa, Homo sapiens
  misc_feature (16)..(16): Xaa can be any naturally occurring amino acid
  misc_feature (142)..(144): Xaa can be any naturally occurring amino acid
  misc_feature (147)..(147): Xaa can be any naturally occurring amino acid
  misc_feature (150)..(150): Xaa can be any naturally occurring amino acid
IRGVTLLVQNHLTSAXMALIALGVSHPVLKQVAEQFLNMRGGLGLSGAKANYRGGEIREQNGDSLVHAAFVAEKCVAGSAEANAFSVLQHVLGAGPHVKRGSNTTSHLHQAVAKATQQPFDAPAPNPSHPDPGPLGIHTPPXXXPPXDPXKAPNNQVKTIAQGKPFQHRCPSCQEQAESWIPNVSGVF

SEQ ID NO: 1025230 - protein, 188 aa, Homo sapiens
  misc_feature (16)..(16): Xaa can be any naturally occurring amino acid
IRGVTLLVQNHLTSAXMALIALGVSHPVLKQVAEQFLNMRGGLGLSGAKANYRGGEIREQNGDSLVHAAFVAEKCVAGSAEANAFSVLQHVLGAGPHVKRGSNTTSHLHQAVAKATQQPFDVSAFNASHSDSGLFGIYTISQATAAGDVIKAPNNQVKTIAQGKPFQHRCPSCQEQAESWIPNVSGVF

SEQ ID NO: 1025231 - protein, 302 aa, Homo sapiens
  misc_feature (265)..(265): Xaa can be any naturally occurring amino acid
  misc_feature (278)..(278): Xaa can be any naturally occurring amino acid
  misc_feature (290)..(290): Xaa can be any naturally occurring amino acid
MWSQAYSPSNHVQWDLTVGIDLGTTYSCVGVFQHGKVEIIANDQGNRTTPSYVAFTDTERLIGDAAKNQAAMNPTNTVFDAKRLSGRRFEDAVVQSEMTTLGPPWLGEMTAGQAPKGQVELHTGRDQKASIPEEVSPMVPTKMKEIAEAYPGKTVTNAVVTVPAYLNDSQRQATKDAGTIAGLNVPRIINEPTAAAMAYGLDKKVGAERNVLIFDLGGGTFDVSILTIEDGIFEVKSTAGDTHLGGEDFDNRMVNHFIAEFKRNXKKDISENKRAVRXLRTACERAKRTXSSSTQASFEIDS

SEQ ID NO: 1025232 - protein, 64 aa, Homo sapiens
SLGNFKFLLREAENSFPKSFWELFSLYPPPPLRGVEGQFGPARVFPFGVCLAGETGGPGDRAAV

SEQ ID NO: 1025233 - protein, 71 aa, Homo sapiens
  misc_feature (1)..(1): Xaa can be any naturally occurring amino acid
  misc_feature (60)..(60): Xaa can be any naturally occurring amino acid
XSSLAFATAYPDSICKTGKLEMSYSKFKTKSLSFLGTFILKVAESLQLVTVHQSETEDGXFTECNNMTLIN

SEQ ID NO: 1025234 - protein, 137 aa, Homo sapiens
FCQPNLDLGYPHLKDFHHNMFQLLLQIKNRAPSCAPFRMGCIRPPLSSPVVPPTVTLQPVIYKYPGPGQSAHGGSIPRTPKNPEKLPKDPSWIIQMSSRGARLHRSPRQYTSELNMKSQKCYCFFQEYYVIECRQSP

SEQ ID NO: 1025235 - protein, 118 aa, Homo sapiens
  misc_feature (15)..(15): Xaa can be any naturally occurring amino acid
  misc_feature (22)..(22): Xaa can be any naturally occurring amino acid
  misc_feature (100)..(100): Xaa can be any naturally occurring amino acid
GVPTAAQVRVAGFCXDWCGKSXPVGSGHSILLRPQDCCSACPLPEEAAERAPLTGHHVGLLRIVHAAARLILCVSLLGFLATVTLIPAFLGPTSLSARLXGQDLNKTSRLAVFQNPRE

SEQ ID NO: 1025236 - protein, 282 aa, Homo sapiens
  misc_feature (255)..(255): Xaa can be any naturally occurring amino acid
  misc_feature (282)..(282): Xaa can be any naturally occurring amino acid
SKASSTRPPAELTVEVRGSNGAFYKGFIKDVHEDSLTVVFENNWQPERQVPFNEVRLPPPPDIKKEISEGDEVEVYSRANDQEPCGWWLAKVRMMKGEFYVIEYAACDATYNEIVTFERLRPVNQNKTVKKNTFFKCTVDVPEDLREACANENAHKDFKKAVGACRIFYHPETTPLMILSASEATVKRVNILSDMHLRSIRTKLMLMSEPEEATKHLECTKQLAAAFHEAICCEKTDLMGLAIGTHGSNIQQARXVPGVTAIELDEDTGTFRLYGESADAVX

SEQ ID NO: 1025237 - protein, 467 aa, Homo sapiens
MGNRSTADADGLLAGRGPAAGASAGASAGLAGQGAAALVGGVLLIGAVLAGNSLVCVSVATERALQTPTNSFIVSLAAADLLLALLVLPLFVYSEVQGGAWLLSPRLCDALMAMDVMLCTASIFNLCAISVDRFVAVAVPLRYNRQGGSRRQLLLIGATWLLSAAVAAPVLCGLNDVRGRDPAVCRLEDRDYVVYSSVCSFFLPCPLMLLLYWATFRGLQRWEVARRAKLHGRAPRRPSGPGPPSPTPPAPRLPQDPCGPDCAPPAPGLPRGPCGPDCAPAAPGLPPDPCGPDCAPPAPGLPQDPCGPDCAPPAPGLPRGPCGPDCAPPAPGLPQDPCGPDCAPPAPGLPPDPCGSNCAPPDAVRAAALPPQTPPQTRRRRRAKITGRERKAMRVLPVVVGAFLLCWTPFFVVHITQALCPACSVPPRLVSAVTWLGYVNSALNPVIYTVFNAEFRNVFRKALRACC

SEQ ID NO: 1025238 - protein, 79 aa, Homo sapiens
QPVSSSEERKGGVPERVACASGECVTSFVTAKRRLRFKNKHKKTKGQKVIPSIFLAETMRSKAKFPDQCRLLVIYGMCL

SEQ ID NO: 1025239 - protein, 103 aa, Homo sapiens
RTAGGAVEPGAGLLSGAEVTPWAAGAVEPGAGLLSGAEVTRTAGGAVEPGAGLVSGAEVTRTDWGGGGARGRPALRGRGDTHGWGGGGARGRPALRGRGDTHG

SEQ ID NO: 1025240 - protein, 165 aa, Homo sapiens
MSGGSADYNREHGGPEGMDPDGVIESNWNEIVDNFDDMNLKESLLRGIYAYGFEKPSAIQQRAINSLYKGYDVIAQAQSGTGKTATFAISILQQLEIEFKGDPSTSIVPPPENWLEQIQKVILALGDYMGATCHACIGGTNVRNEMLKLQAEAPHIVVGTPGRSV

SEQ ID NO: 1025241 - protein, 101 aa, Homo sapiens
IENRFQMKLLVWASAHQRKFHHFATVQKDEGLCSANVTRYYFNPRYRTCDAFTYTGCGGNDNNFVSREDCKRACAKALKKKKKMPKVRFASRIRKIRKKQF

SEQ ID NO: 1025242 - protein, 101 aa, Homo sapiens; identical to SEQ ID NO: 1025241

SEQ ID NO: 1025243 - protein, 101 aa, Homo sapiens; identical to SEQ ID NO: 1025241

SEQ ID NO: 1025244 - protein, 83 aa, Homo sapiens
MNLEEAGGKALAKTPRFTLTQRFFDSFETCVSSAILGNPRSRPCKKVLTSFEMLLKHDTYAALLAEELHCAAACDLRLSSGTY

SEQ ID NO: 1025245 - protein, 328 aa, Homo sapiens
SALLQAEVLDLDEDEDDLEVFSKDASLMDMNSFSPMMPTSPLSMINQIKFEDEPDLKDLFITVDEPESHVTTIETFITYRIITKTSRGEFDSSEFEVRRRYQDFLWLKGKLEEAHPTLIIPPLPEKFIVKGMVERFNDDFIETRRKALHKFLNRIADHPTLTFNEDFKIFLTAQAWELSSHKKQGPGLLSRMGQTVRAVASSMRGVKNRPEEFMEMNNFIELFSQKINLIDKISQRIYKEEREYFDEMKEYGPIHILWSASEEDLVDTLKDVASCIDRCCKATEKRMSGLSEALLPVVHEYVLYSEMLMGVMNRRDQIQAELDSKVEV

SEQ ID NO: 1025246 - protein, 121 aa, Homo sapiens
MDMNSFSPMMPTSPLSMINQIKFEDEPDLKDLFITVDEPESHVTTIETFITYRIITKTSRGEFDSSEFEVRRRYQDFLWLKGKLEEAHPTLIIPPLPEKFIVKGMVERFNDDFYETSVRDP

SEQ ID NO: 1025247 - protein, 301 aa, Homo sapiens
MDMNSFSPMMPTSPLSMINQIKFEDEPDLKDLFITVDEPESHVTTIETFITYRIITKTSRGEFDSSEFEVRRRYQDFLWLKGKLEEAHPTLIIPPLPEKFIVKGMVERFNDDFIETRRKALHKFLNRIADHPTLTFNEDFKIFLTAQAWELSSHKKQGPGLLSRMGQTVRAVASSMRGVKNRPEEFMEMNNFIELFSQKINLIDKISQRIYKEEREYFDEMKEYGPIHILWSASEEDLVDTLKDVASCIDRCCKATEKRMSGLSEALLPVVHEYVLYSEMLMGVMNRRDQIQAELDSKVEV

SEQ ID NO: 1025248 - protein, 137 aa, Homo sapiens
MGQTVRAVASSMRGVKNRPEEFMEMNNFIELFSQKINLIDKISQRIYKEEREYFDEMKEYGPIHILWSASEEDLVDTLKDVASCIDRCCKATEKRMSGLSEALLPVVHEYVLYSEMLMGVMNRRDQIQAELDSKVEV

SEQ ID NO: 1025249 - protein, 328 aa, Homo sapiens; identical to SEQ ID NO: 1025245

SEQ ID NO: 1025250 - protein, 79 aa, Homo sapiens
VDAILSAFRMFDPSGKGVVNKDEFKQLFLTQADKFSPAEVEQMSPDTHGPGGNIDYKSLCYIITMETMKMEMWFKASAH

SEQ ID NO: 1025251 - protein, 126 aa, Homo sapiens
  misc_feature (126)..(126): Xaa can be any naturally occurring amino acid
MAAPRSPSPTSSLTWTDFFWILNGCIQWYFKKYSHRYDKKYSWDVKSLVMGKKALEAAQIIIDVLQLPMSKEELVEESQTKLKEVFPTAALNAKGRKKTSSIHTAETWHPPLHLATSPGSRRLFDX

SEQ ID NO: 1025252 - protein, 191 aa, Homo sapiens
MAAPRSPSPTSSLTWTDFFWILNGCIQWYFKKYSHRYDKKYSWDVKSLVMGKKALEAAQIIIDVLQLPMSKEELVEESQTKLKEVFPTAALNAKGRKKTSSIHTAETWHPPLHLATSPGVRVVRYEQSRTKSSSACFSTWCSEMTPQCSIGTADPDIFLGVPRGSLPSSYGECLFFEELHLGEAALHLGYT

SEQ ID NO: 1025253 - protein, 576 aa, Homo sapiens
  misc_feature (569)..(569): Xaa can be any naturally occurring amino acid
MTQTRRMTFGKICSQESSSLQLTALNEMEDIVQEDGEVVAESGNNTPAHSQAIIPVDVDEEQAGPSGLQRVVKPTSITVHDSESDDEEDSLELQEVWIPKNGTRRYSEREEKTGESVQSRELSVSGKGKTPLRKRYNSHQMGQSKQFPLEESSCEKGCQVTSEQIKADMKAARDIPEKKKNKDVYPSCSSTTASTVGNSSSHYTASQSPDFVRTVNSGGSSEPSPTEVDVSRQCACSPGGSEDSEAMEEGDAESSVCPRCCCHRPQESQRRTSRCSDEERPSTSRACVVNGPDGTRSAFSFRTLPQGGSSGPAHDERTNGSGSGATGEDRRGSSQPESCDVQSNEDYPRRPLTRARSRLSHVLLVSESEVAKTKPRDADGKLAMRDRQYYKSTYYKVILVIEDDHVQVLVLKSKNLVGVTMTNCGITDLVLKDCPKMMFIHATRCRVLKHLKVENAPIVNRFDYAQCKKLNMDQVLDQILRMPPERNRIIYLRPMQQVDTLTLEQKLFSGPYPYHICIIHEFSNPPNVRNKVRIRRLDGTLYANINQELIKYEFFPGRPLRSEGRTLKXIPPSTPG

SEQ ID NO: 1025254 - protein, 197 aa, Homo sapiens
GRYEAIDQRLLDRCVDEEISLGDFVLSGGELPAMAMMDAVVRLLPGVLNDSLSAVQDSFADGLLDCPHYTRPEEYDGVRVPDVLLGGHHAEIERWRRQEALRNTLRKRPDLIVRARREKLLSRADEAWLANLAPKRRTPPEAAARAGIGGVVHACAAPDVNPSSIGARPGSRRVPTPTRWQKESVMNLIAKLEQEEI

SEQ ID NO: 1025255 - protein, 252 aa, Homo sapiens
GPQPLPSAADIATMVSGSSGLAAARLLSRSFLLPQNGIRHCSYTASRQHLYVDKNTKIICQGSTGNQGTFHSQQDIGHYGTKLVWRNHSRERRPDTSGLTCLYYCEGGQRTDRSNGSLSSMFLRLLLLLPLSEAIEAEIPLACVLSLKEFPSQDMVRRHSTNCCATEHTTKAYSRPNLALAAHQSLENSLNNWPSCLGHIHHHKERIGIVYRSGTLTLKQFTKQRTSPWGRLSALPLAGDPYNGTDSLDCLD

SEQ ID NO: 1025256 - protein, 54 aa, Homo sapiens
TVEYMVSVYAQNPSGESQPLVQTAVTTIPAPTDLKFTQVTLHSYIHVMLNIWCG

SEQ ID NO: 1025257 - protein, 231 aa, Homo sapiens
  misc_feature (23)..(23): Xaa can be any naturally occurring amino acid
MALLVDHIYAIREAATSNLKKLXEKFGKEWAHATIIPKVLAMSGDPNYLHRMTTLFCINVLSEVCGQDITTKHMLPTVLPMAGDPVANVLFNVAKSLQKMAPILDNSTFQIEVNPILEKLTQDQDVDVKYFAQEALLFFLSPDAGRGANTGLWCPPSNPHKSLFGETLGGLWVSLPVHGLTPGPFPQHGSSSPQPGKISHCPPPNGLGEHGVGQDSDLGRKGLLLPRQGEM

SEQ ID NO: 1025258 - protein, 287 aa, Homo sapiens
MAAEARVSRWYFGGLASCGAACCTHPLDLLKVHLQTQQEVKLRMTGMALRVVRTDGILALYSGLSASLCRQMTYSLTRFAIYETVRDRVAKGSQGPLPFHEKVLLGSVSGLAGGFVGTPADLVNVRMQNDVKLPQGQRRNYAHALDGLYRVAREEGLRRLFSGATMASSRGALVTVGQLSCYDQAKQLVLSTGYLSDNIFTHFVASFIAGGCATFLCQPLDVLKTRLMNSKGEYQGVFHCAVETAKLGPLAFYKGLVPAGIRLIPHTVLTFVFLEQLRKNFGIKVPS

SEQ ID NO: 1025259 - protein, 296 aa, Homo sapiens
MAAEARVSRWYFGGLASCGAACCTHPLDLLKVHLQTQQEVKLRMTGMALRVVRTDGILALYSGLSASLCRQMTYSLTRFAIYETVRDRVAKGSQGPLPFHEKVLLGSVSGLAGGFVGTPADLVNVRMQNDVKLPQGQRRNYAHALDGLYRVAREEGLRRLFSGATMASSRGALVTVGQLSCYDQAKQLVLSTGYLSDNIFTHFVASFIAAAGDEPPPQGGCATFLCQPLDVLKTRLMNSKGEYQGVFHCAVETAKLGPLAFYKGLVPAGIRLIPHTVLTFVFLEQLRKNFGIKVPS

SEQ ID NO: 1025260 - protein, 160 aa, Homo sapiens
GRFKAPGPPQSQGAWPSGPAPGARARIGCAGCGRAGGALNRARGAGRGALRPVHAGVGPGSGCGRAGIGLSWAMAAEARVSRWYFGGLASCGAACCTHPLDLLKVRPGPGTRGGWDPGAAETPAKAAARPHAPGDRRARGSLLESARRAPTPGWPIPGGP

SEQ ID NO: 1025261 - protein, 287 aa, Homo sapiens; identical to SEQ ID NO: 1025258

SEQ ID NO: 1025262 - protein, 241 aa, Homo sapiens
MALRVVRTDGILALYSGLSASLCRQMTYSLTRFAIYETVRDRVAKGSQGPLPFHEKVLLGSVSGLAGGFVGTPADLVNVRMQNDVKLPQGQRRNYAHALDGLYRVAREEGLRRLFSGATMASSRGALVTVGQLSCYDQAKQLVLSTGYLSDNIFTHFVASFIAGGCATFLCQPLDVLKTRLMNSKGEYQGVFHCAVETAKLGPLAFYKGLVPAGIRLIPHTVLTFVFLEQLRKNFGIKVPS

SEQ ID NO: 1025263 - protein, 476 aa, Homo sapiens
GRFKAPGPPQSQGAWPSGPAPGARARIGCAGCGRAGGALNRARGAGRGALRPVHAGVGPGSGCGRAGIGLSWAMAAEARVSRWYFGGLASCGAACCTHPLDLLKVHLQTQQEVKLRMTGMALRVVRTDGILALYSGLSASLCRQMTYSLTRFAIYETVRDRVAKGSQGPLPFHEKVLLGSVSGLAGGFVGTPADLVNVRMQNDVKLPQGQRRNYAHALDGLYRVAREEGLRRLFSGATMASSRGALVTVGQLWMCHVPVPAPGCAEDSPDELQGGVSGRFPLRRGDSEARASGLLQGPRPSWHPPHPPHRAHFCVSGTATQKLWHQSAILTSRGNGWAARPDTLGSSKESQAQHLLLGPRPPWPWPPVLRSRPLLSPHLLAELLLASSPLSCSCTTPALATRLSRLGTAWPCPSPAGSSSGEQGLPEADFSPLLGQGRGIIPASCPRCPKQHLPALSIEDLGGRVWVQPGCCSPKC

SEQ ID NO: 1025264 - protein, 287 aa, Homo sapiens; identical to SEQ ID NO: 1025258

SEQ ID NO: 1025265 - protein, 51 aa, Homo sapiens
  misc_feature (35)..(35): Xaa can be any naturally occurring amino acid
RLILQLLKLSPQFSIMSEPIRVFVTGAAGQIHIRXAYNSCAVGITPRPWTV

SEQ ID NO: 1025266 - protein, 649 aa, Homo sapiens
MAPGEKIKAKIKKNLPVTGPQAPTIKELMRWYCLNTNTHGCRRIVVSRGRLRRLLWIGFTLTAVALILWQCALLVFSFYTVSVSIKVHFRKLDFPAVTICNINPYKYSTVRHLLADLEQETREALKSLYGFPESRKRREAESWNSVSEGKQPRFSHRIPLLIFDQDEKGKARDFFTGRKRKVGGSIIHKASNVMHIESKQVVGFQLCSNDTSDCATYTFSSGINAIQEWYKLHYMNIMAQVPLEKKINMSYSAEELLVTCFFDGVSCDARNFTLFHHPMHGNCYTFNNRENETILSTSMGGSEYGLQVILYINEEEYNPFLVSSTGAKVIIHRQDEYPSVEDVGTEIETTMVTSIGMHLTESFKLSEPSSQCTEGGSDVPIRNIYNAAYSLQICLHSCFQTKMVEKCGCAQYSQPLPPAANYCNYQQHPNWMYCYYQLHRAFVQEELGCQSVCKEACRFKEWTLTTSLAQWPSVVSEKWLLPVLTWDQGRQVNKKLNKTDLAKLLIFYKDLNQRSIMESPANSIEMLLSNFGGQLGLWMSCSVVCVIEIIEVFFIDFFSIIARRQWQKAKEWWAWKQAPPCPEAPRSPQGQDNPALDIDDDLPTFNSALHLPPALGTQVPGTPPPKYNTLRLERAFSNQLTDTQMLDEL

SEQ ID NO: 1025267 - protein, 101 aa, Homo sapiens
VQATLRADPPLYQRTLPTSSSEFICDSRVPQLHRAGVVGKGPTRVLLCSPRWKHVSSRVKADGCPGGTSPRTSVLTMLLSQLLSSLTCPKPLPAGWKHEAG

SEQ ID NO: 1025268 - protein, 146 aa, Homo sapiens
  misc_feature (4)..(4): Xaa can be any naturally occurring amino acid
  misc_feature (7)..(7): Xaa can be any naturally occurring amino acid
  misc_feature (15)..(15): Xaa can be any naturally occurring amino acid
QLMXYYXFNTLTYRXILPSKAKKFGTRVDARQPVDPPDELDIARAPRRIGPHRLHVALDRDGVDGSSHDSGRCTMRFGTRMSATSGNSRSAACRCASSVGERHVRASNWICSERIPGVRSSMRAAGARRASTSAHEPKAQVQVEHT

SEQ ID NO: 1025269 - protein, 151 aa, Homo sapiens
QPGVLPLKPYGPVFVVELLGGYQFSPRGTSYYIITNFKNGSQIGILALEAKNWAQGMAGKQAVSASGKWLDGIRKWYYNAAGFNKLGLMRDDTIYEDEDVKEAIRRLPENLYNDRMFRIKRALALNLKHQILPKEQWTKYARGKISTLTRF

SEQ ID NO: 1025270 - protein, 57 aa, Homo sapiens
MAQSINITELNLPQLEMLKNQLDQEVEFLSTSIAQLKVVQTKYVVSQGMFDTSRNRA

SEQ ID NO: 1025271 - protein, 32 aa, Homo sapiens
ASTNQTSMYFCASSCRGTGELFFGEGSRLTVL

SEQ ID NO: 1025272 - protein, 32 aa, Homo sapiens
ASTNQTSMYFCASSYSGGAHEQYFGPGTRLTV

SEQ ID NO: 1025273 - protein, 440 aa, Homo sapiens
GEGLRRSSRSMSEWREGLSLSSTAHRVSGGRACQLSSRSTKDWREGLSHLQQEHEEWTARTVHISSTCTTEWRESLSLQKEHQEWTADPSLSSTCTKEWREGPLLSSKKHQGSEVGPVALQHVPPRQWREGPSLSSMSNPEMEEGSAICQALRVKSCDFISYQLLLSLSLRMKLASPAQEQCCLLPVLLLDCRGKSQTNLFHTLGISCINAISACSRTQYCLNNVLGVTKFITCRPDGRKAWGGGVPACIAAVRAAQSLRHPAMASAHQATSLRSSESFQFFLGHLNATVSTKSCRITLIGSDKPRFEPLSPPSKPLAREHRISFLEHVFCEGPEAIFEASWATCCPCCISFFLFGLVNCLSWQNNRTRTFSTQPSALGHAGLCLLPALEAQGLAWASRPEPPMYIAPILGTPPGSAARPPRTSFCSPGRALLTPKSAIF

SEQ ID NO: 1025274 - protein, 70 aa, Homo sapiens
FHPVTTQIKDARRLTSSFRSSSLMTVNTSSHQTSLGDPDKLCPGQPLKHPSPHQARMIFPIRLHNSPIRP

SEQ ID NO: 1025275 - protein, 30 aa, Homo sapiens
ICVLLCQQPLDSQGSSDEQFFGPGTRLTVL

SEQ ID NO: 1025276 - protein, 59 aa, Homo sapiens
MDDIYKAAVEQLTEEQKNEFKAAFDIFVLGAEDGCISTKELGKVMRILARPPPEELQRY

SEQ ID NO: 1025277 - protein, 244 aa, Homo sapiens
  misc_feature (32)..(32): Xaa can be any naturally occurring amino acid
  misc_feature (34)..(34): Xaa can be any naturally occurring amino acid
  misc_feature (51)..(51): Xaa can be any naturally occurring amino acid
  misc_feature (54)..(54): Xaa can be any naturally occurring amino acid
  misc_feature (56)..(59): Xaa can be any naturally occurring amino acid
  misc_feature (62)..(64): Xaa can be any naturally occurring amino acid
  misc_feature (66)..(67): Xaa can be any naturally occurring amino acid
  misc_feature (76)..(76): Xaa can be any naturally occurring amino acid
  misc_feature (78)..(78): Xaa can be any naturally occurring amino acid
  misc_feature (80)..(80): Xaa can be any naturally occurring amino acid
  misc_feature (83)..(83): Xaa can be any naturally occurring amino acid
  misc_feature (94)..(94): Xaa can be any naturally occurring amino acid
  misc_feature (173)..(173): Xaa can be any naturally occurring amino acid
  misc_feature (225)..(225): Xaa can be any naturally occurring amino acid
KQEAPTGAQEECAPPGDANRARHGVETQHRLXQXQLSELRAPGGAPAAKPXQPXGXXXXHPXXXKXXWQQHCHNFXSXIXIAXESGSTLRSWSXPTDSSTARRIEELQHNLQKKDADLRAMEERYRRYVDKARMVMQTMEPKQRPAAGAPPELHSLRTQLRERDVRIRHLEMXFEKSRSQREQEEKLLISAWYNMGMALQQRAGEERAPAHAQSFLAQQRLATNXRRGPLGRLASLNLRPTDKH

SEQ ID NO: 1025278 - protein, 126 aa, Homo sapiens
  misc_feature (2)..(2): Xaa can be any naturally occurring amino acid
RXFVHFYDMEIIEEEAFLAWKEDITQEFPGKGKALFQVNQWLTWLETAEEEESEEEADKRTSQSLKLCITFCFYDVTAFDLTTAKTHSAVMFSQYFKAEARQLGFPSAEGLWCSVMSVIIVYHQIF

SEQ ID NO: 1025279 - protein, 153 aa, Homo sapiens
  misc_feature (10)..(10): Xaa can be any naturally occurring amino acid
  misc_feature (22)..(22): Xaa can be any naturally occurring amino acid
  misc_feature (30)..(30): Xaa can be any naturally occurring amino acid
  misc_feature (35)..(35): Xaa can be any naturally occurring amino acid
  misc_feature (37)..(37): Xaa can be any naturally occurring amino acid
  misc_feature (45)..(45): Xaa can be any naturally occurring amino acid
  misc_feature (48)..(48): Xaa can be any naturally occurring amino acid
  misc_feature (51)..(51): Xaa can be any naturally occurring amino acid
  misc_feature (53)..(53): Xaa can be any naturally occurring amino acid
  misc_feature (57)..(58): Xaa can be any naturally occurring amino acid
  misc_feature (62)..(64): Xaa can be any naturally occurring amino acid
  misc_feature (66)..(66): Xaa can be any naturally occurring amino acid
  misc_feature (68)..(68): Xaa can be any naturally occurring amino acid
  misc_feature (78)..(78): Xaa can be any naturally occurring amino acid
  misc_feature (86)..(86): Xaa can be any naturally occurring amino acid
  misc_feature (88)..(88): Xaa can be any naturally occurring amino acid
MGNGIRPPHXEKPLRGKASQEXMPKHAGGXARRQXAXGSVMPQPXPPXKEXGXTGKXXTGDXXXAXTXPQAPKQRQPXARPPPAAXHXRPPQARKLNSNTEYCRNALCSVILELLQYLIIHLVVTEKFLTVIDGCCRNSILPVFLPLVMGFMC

SEQ ID NO: 1025280 - protein, 126 aa, Homo sapiens; identical to SEQ ID NO: 1025278
  misc_feature (2)..(2): Xaa can be any naturally occurring amino acid

SEQ ID NO: 1025281 - protein, 323 aa, Homo sapiens
VDNGQLSLIHTQMATSASIHSMPTGTIPPPTTIKATGSTHTAPGMTLTPVGPANPQAHLARPKLLHPYLTTLPPHTIREVTPTSTTNITPNHTSTGTRTPVAHTTSATSSRLPTPFTTHSPPTGSSPISSTGPMTATSFQTTTTYPTPSHPQTTLPTHVPPFSTSLVTPSTHTVITPTHAQMATSASIHSTPTGTIPPPTTLKATGSTHTAPPMTLTTSGTSQALSSFSTAKTSTSLHSHTSSTHHPEVTSTSTTNITPNPTSTGTPPMTVTTSGTSQSRSSFSTAKTSTSLHSHTSSTHHPEVTSTSTTSITPNHTSTGTRS

SEQ ID NO: 1025282 - protein, 241 aa, Homo sapiens
VDNGQLSLIHTQMATSASIHSMPTGTIPPPTTIKATGSTHTAPGMTLTPVGPANPQAHLARPKLLHPYLTTLPPHTIREVTPTSTTNITPNHTSTGTRTPVAHTTSATSSRLPTPFTTHSPPTGSSPISSTGPMTATSFQTTTTYPTPSHPQTTLPTHVPPFSTSLVTPSTHTVITPTHAQMATSASIHSTPTGTIPPPTTLKATGSTHTAPPMTLTTSGTSQALSSFSTAKTSTSLTLPR

SEQ ID NO: 1025283 - protein, 678 aa, Homo sapiens
RSIIADRPGYWPEHTPSESQPSSPSPTPSHPQTTLPTHVPPFSTSLVTPSTHTVITPTHAQMATSASIHSTPTGTIPPPTTLKATGSTHTAPPMTLTTSGTSQALSSFSTATASSSFISSSSWSSWLPQNSSSRPPSSPITTHHSSHLEFCNHSCFHNYSAVLLIFSQSFCPLYCFFLCALLPLLSPDFIAFCWHIFLFRVRPRALHNPELGVTLLIVHSSHDWIRVCISSFSFFSSCSTTIRATLPHTISSPFTLSALLPISTVTVSPTPSSHLASSTIAFPSTPRTTASTHTAPAFSSQSTTSRSTSLTTRVPTSGFVSLTSGVTGIPTSPVTNLTTRHPGPTLSPTTRFLTSSLTAHGSTPASAPVSSLGTPTPTSPGVCSVREQQEEITFKGCMANVTVTRCEGACISAASFNIITQQVDARCSCCRPLHSYEQHAWSCPAPIPARLAGGSYSPCRCSATACAALWPVETSRVAACSPGAEGLQMTDRKTPTSPLPACASSCFPGHQAWPPSALGRGSLGHRLERGCQAGAQTTTLLQTLSQQRGTEADSGHGPPRHTGHSRPPLPTVQHLPAPELGPSPAVAQNPADEATEQALDQTHQGRGGHGNLCRDGGKRPRQPPAQRRGDPQSQGGQRVAARAGQPPPLPARQKAPTSTTPIPSSLSLGEGVTRSETP

SEQ ID NO: 1025284 - protein, 142 aa, Homo sapiens
MATSASIHSTPTGTIPPPTTLKATGSTHTAPPMTLTTSGTSQALSSFSTAKTSTSLHSHTSSTHHPEVTSTSTTNITPNPTSTGTPPMTVTTSGTSQSRSSFSTAKTSTSLHSHTSSTHHPEVTSTSTTSITPNHTSTGTRS

SEQ ID NO: 1025285 - protein, 223 aa, Homo sapiens
TTSATSSRLTTPFTTHSPPTGSSPISSTGPMTATSFQTTTTYPTPSHPQTTLPTHVPPFSTSLVTPSTHTVITPTHAQMATSASIHSTPTGTIPPPTTLKATGSTHTAPPMTLTTSGTSQALSSFSTAKTSTSLHSHTSSTHHPEVTSTSTTNITPNPTSIGSSTPMAHTTSATSSRLTTPFTTHSPSTGSSPFSSTGPMTATSFQTTTTYPTPSLSQTTLPT

SEQ ID NO: 1025286 - protein, 668 aa, Homo sapiens
VDNGQLSLIHTQMATSASIHSMPTGTIPPPTTIKATGSTHTAPGMTLTPVGPANPQAHLARPKLLHPYLTTLPPHTIREVTPTSTTNITPNHTSTGTRTPVAHTTSATSSRLPTPFTTHSPPTGSSPISSTGPMTATSFQTTTTYPTPSHPQTTLPTHVPPFSTSLVTPSTHTVITPTHAQMATSASIHSTPTGTIPPPTTLKATGSTHTAPPMTLTTSGTSQALSSFSTATASSSFISSSSWSSWLPQNSSSRPPSSPITTQLTPLEFCNHSCFHNYSAVLLIFSQSFCPLYCFFLCALLPLLSPDFIAFCWHIFLFRVRPRALHNPELGVTLLIVHSSHDWIRAASPLFPSSPAASTTIRATLPHTISSPFTLSALLPISTVTVSPTPSSHLASSTIAFPSTPRTTASTHTAPAFSSQSTTSRSTSLTTRVPTSGFVSLTSGVTGIPTSPVTNLTTRHPGPTLSPTTRFLTSSLTAHGSTPASAPVSSLGTPTPTSPGVCSVREQQEEITFKGCMANVTVTRCEGACISAASFNIITQQVDARCSCCRPLHSYEQQLGCPAPIPARLAGGSYSPCRCSATACAALWPVETSRVAACSPGAEGLQMTDRKTPTSPLPACASSCFPGHQAWPPSALGRGSLGHRLERGCQAGAQTTTPPADPEPAERD

SEQ ID NO: 1025287 - protein, 178 aa, Homo sapiens
KSSSNFSSKTSKLKEHCNPEAKKPCPGKFLKRGEPSVAGTPSHPVFLRLTVAHVVPRTMASSSLSKLQGLLNVIHGFSPERGVLLNIFQGLQGRSLGDEAPSGPLQLLEGAGAAALAWLLQGAVVLRSRPGEGDGQDSLSERVEASPTAAPTPGGPGAQKGGRRHLHADKGIVLLQLL

SEQ ID NO: 1025288 - protein, 227 aa, Homo sapiens
MAVTALAARTWLGVWGVRTMQARGFGSDQSENVDRGAGSIREAGGAFGKREQAEEERYFRCWLTGYPSPDLDLPMAFQILKLSIAPTRFLAGALGGPIAAIEFPGAQSSIRLTLDVPNSLPRSRALPVYLRQLVFRPPQTVFHRAGLRITNPTASTPSLYQLPVSPLWQFVLRVVEEHAPDFFVTVSRSDPRQTSELPSLRSPRSLYRDLLRPPSYGSSFPSPSDAR

SEQ ID NO: 1025289 - protein, 105 aa, Homo sapiens
MAVTALAARTWLGVWGVRTMQARGFGSDQSENVDRGAGSIREAGGAFGKREQAEEERYFRATELENNWSALKRSSHEEEIFIIKKEIDASAERKLSRHKQQDHQC

SEQ ID NO: 1025290 - protein, 83 aa, Homo sapiens
  misc_feature (1)..(1): Xaa can be any naturally occurring amino acid
XMESRSVAQAEWNGANSAHCNLHLPRLKRLSCLSLLSSWDYRCPPPRPANFCIFSRDGVSPCWPGWSRTPDLVIHPPRPPNNL

SEQ ID NO: 1025291 - protein, 83 aa, Homo sapiens; identical to SEQ ID NO: 1025290
  misc_feature (1)..(1): Xaa can be any naturally occurring amino acid

SEQ ID NO: 1025292 - protein, 196 aa, Homo sapiens
MTATSIKTTTTYPTPSHPQTTLTTHVPPFSTSSVTPSTHTVITPTHAQMSTSASIHSTPTGTVPPLTTRMPTGSTRTGPPMTGTIIQTSKAHNSFSTAKTSTSLHSHASSTHHPETTPTSTTNITPKSTSAGTSTPVAHTTLATSSRLPTTFTTHFPPTGSSHVSSTGPMTATSSQTTTTHPPPSHPQTTLPTHVP

SEQ ID NO: 1025293 - protein, 505 aa, Homo sapiens
STSLVTPSTHTVIAPTHAQMATSASIHSAPTGTIPPPTTLKATGSTHTAPPITPTTSGTSQAHSSFSTNKTPTSLHSHTSSTHHPEVAPTSTTTITPNPTSTRTRTPVAHTNSATSSRPPPPFTTHSPPTGSSPFSSTGPMTATSFKTTTTYPTPSLPQTTPLTHVPPFSTSLVTPITHTVITPTHPQMSTSAYIHSTPTGTIASPTTVKATRSTYTAPLMTATTSRISQAHSSISTAKTSTSLHSHASSTHHPEVTPTSTTNVTPKSTSRDTSTPVTHTTSATSSRPPTPITTHSSPTRSSPLSSTGPMTATSIKTTTTYPTPSHPQTTLTTHVPPFSTSSVTPSTHTVITPTHAQMSTSASIHSTPTGTVPPLTTRMPTGSTRTGPPMTGTIIQTSKAHNSFSTAKTSTSLHSHASSTHHPETTPTSTTNITPKSTSAGTSTPVAHTTLATSSRLPTTFTTHFPPTGSSHVSSTGPMTATSSQTTTTHPPPSHPQTTLPTHVP

SEQ ID NO: 1025294 - protein, 282 aa, Homo sapiens
MSLHQFLLQPIHLSCLESVARTQNCPQYPDNHDVHLYKNEREPEGERSELKDHNGDITGIDWAPKSDRIVTLWGSRNAYVWSHNRWCEEANPGDPDELIAQLTFVKWSPLENNFAVGSGARLISVRNFESENDWWVSKRHETSRFAPQSSVLDSAFPTDVSAGTQDHVTSQCRSVTLPTITQTWLHQAEPARPWGSTDALWGSLLSKAQLPCVHLSGLRPTGGQDLRVPTEDPAFGQASGHGRANRLLRADVLSNTPQAPERRKHTTFTAHTIRGPLSVQKN

SEQ ID NO: 1025295 - protein, 51 aa, Homo sapiens
MVPWVEGGNRARSSPWVAINVSWDIRTLPSTSMTLGGDFSSAAIYFRRAHH

SEQ ID NO: 1025296 - protein, 142 aa, Homo sapiens
MVQVGGTAKKPEEPRSARVTLLSQSKSGFWFGAEKPGGLAFPRKAPPLPWPREQTKSTAGPITLGALRPAMVMEVGTLDAGRLRALLGERAAQCLLLDCRSFFALQDGHIAGSVNVRFRPSCAPAKGPWAWRHRAQHARVRG

SEQ ID NO: 1025297 - protein, 626 aa, Homo sapiens
MPLLLLLLLLPSPLHPHPICEVSKVASHLEVNCDKRNLTALPPDLPKDTTILHLSENLLYTFSLATLMPYTRLTQLNLDRCELTKLQVDGTLPVLGTLDLSHNQLQSLPLLGQTLPALTVLDVSFNRLTSLPLGALRGLGELQELYLKGNELKTLPPGLLTPTPKLEKLSLANNNLTELPAGLLNGLENLDTLLLQENSLYTIPKGFFGSHLLPFAFLHGNPWLCNCEILYFRRWLQDNAENVYVWKQGVDVKAMTSNVASVQCDNSDKFPVYKYPGKGCPTLGDEGDTDLYDYYPEEDTEGDKVRATRTVVKFPTKAHTTPWGLFYSWSTASLDSQMPSSLHPTQESTKEQTTFPPRWTPNFTLHMESITFSKTPKSTTEPTPSPTTSEPVPEPAPNMTTLEPTPSPTTPEPTSEPAPSPTTPEPTPIPTIATSPTILVSATSLITPKSTFLTTTKPVSLLESTKKTIPELDQPPKLRGVLQGHLESSRNDPFLHPDFCCLLPLGFYVLGLFWLLFASVVLILLLSWVGHVKPQALDSGQGAALTTATQTTHLELQRGRQVTVPRAWLLFLRGSLPTFRSSLFLWVRPNGRVGPLVAGRRPSALSQGRGQDLLSTVSIRYSGHSL

SEQ ID NO: 1025298 - protein, 120 aa, Homo sapiens
SIEVLMGRAIPRERHSPNNLKEQHHIRGSITQGIPRSYVEAQEDYLRREAKLLKREGTPPPPPLTGPDRGLQDAALGPLKLNGRHEALVATVKEAGRSIHEIPREELRTRPSCPLATASR

SEQ ID NO: 1025299 - protein, 313 aa, Homo sapiens
TPSGKRRKKKKERNTRFARVHTDPTTRTKGAWEAYTPAPRHSRYSQGQPVRAGTILAGSGWRTQPEYGNSRATIRCHTPVLELPSPRSRGRTGARQARVLALLLIPGAAWAAAGAPFLPSARQSSLSARFSRSSSFWRPSSSASFCQQPPRSSRTARDAWVPKSCHRACGAAPLALRVQEAAEGAQLTVLCLQTPVELLELADLAQVALQLPIHLLHEAAAAAPVPPGAAQHIISRQQAHALAIFHCTSSTAHRPSVTSSITHRPAHAIRHITMAGQALWSISTSHASTAGTHGATTSGPGAHSGSGLQAHST

SEQ ID NO: 1025300 - protein, 237 aa, Homo sapiens
NSQIWRHKVIWHLLGHSLGAYISTLDKEKLRKLTNRILFRYHLMAMQKLSDHENGCAYYPRRGKRRTCQRYVGLPFILDMKHFVVDGFNVLYNKKPVYILDAAARHWPGPIPYVISIGLPFPCCAVYPCNTVIGSQHQMDVAFLDETDYKMIIRARKTAPVACRTCRQRGHHVGTTQTQIVEIDKNSVKRNGIIGFMLQRCEFWPPLGSGDICLLNKMQAEDKMDSKKNNPGRGRVA

SEQ ID NO: 1025301 - protein, 195 aa, Homo sapiens
  misc_feature (10)..(10): Xaa can be any naturally occurring amino acid
  misc_feature (178)..(178): Xaa can be any naturally occurring amino acid
  misc_feature (180)..(180): Xaa can be any naturally occurring amino acid
  misc_feature (195)..(195): Xaa can be any naturally occurring amino acid
VSSAKRSLRXELKQRLRAMSAEERLRQSRVLSQKVIAPSEYQKSKSISIFLSMQDEIETEEIIKDIFQRGYICFIPRYRFQSNHMDMVRIESPEEISLLPKTSWNIPQPGEGDVREEALSTGGLDLIFMPGLGFDKHGNRLGRGKGYYDAYLKRCLQHQGSEALHPGGWLSKNRFSFXSXVMKRHEVDEALRNSX

SEQ ID NO: 1025302 - protein, 68 aa, Homo sapiens
  misc_feature (12)..(12): Xaa can be any naturally occurring amino acid
RVTEVQAPASGXTAAGTRGRAAPAHGQARCFPPGRPAVTITALPSQVTVLDSALTRSPRWAGNTDEDG

SEQ ID NO: 1025303 - protein, 48 aa, Homo sapiens
  misc_feature (1)..(1): Xaa can be any naturally occurring amino acid
  misc_feature (5)..(5): Xaa can be any naturally occurring amino acid
XSLNXLALRRFHALQVLLVVEVALVEGRREVGQHRVRTSQRVRQVLPA

SEQ ID NO: 1025304 - protein, 82 aa, Homo sapiens
  misc_feature (9)..(9): Xaa can be any naturally occurring amino acid
EVSGSNEKXTILPCLPQVVEINVKWLNPPKNPRLPWPTLPSHEAVTQNPSEETPTPSQYPPKVVLCHVCSLPAQTYMYITMD

SEQ ID NO: 1025305 - protein, 240 aa, Homo sapiens
MTKNEKKSLNQSLAEWKLFIYNPTTGEFLGRTAKSWGLILLFYLVFYGFLAALFSFTMWVMLQTLNDEVPKYRDQIPSPGLMAFSKKPVTRIGNIHSSTVVIPTFRIAGATFDRTVNEVSKTYTLEEARRTSKSVLMEHFGEQKGPVYVACQFPISLLQACEWYELILILVFSRKPCMLVTMNRILGYSLKGGARLDGSHALKDIPNVGVNLIRMTTPTFPYWHKTAVGFTRPVAQKKAP

SEQ ID NO: 1025306 - protein, 116 aa, Homo sapiens
  misc_feature (1)..(1): Xaa can be any naturally occurring amino acid
XIFLPHQTAVSSPASLCHSSSLWEDDVKEHPERGREKRDSGYASLAPHPPGPPLDPLFPQTRAHHARPLGRQDSISPPPSKNPGYVGRSRAVVRKRTKEGSDTGWGHLARPAKPGH

SEQ ID NO: 1025307 - protein, 133 aa, Homo sapiens
SGSALFAVAYEAYSAACSRGSLCPAWCLFCSGFLRSVVGPVTVFGPVLPARIGGMYFPCPHVPSLLALQYCILTSVSRLLCPLLPAFRSSLSFPVTPGCGVPEPFRGTATPSCLCHSHLCPSFPRYTIRCLWH

SEQ ID NO: 1025308 - protein, 111 aa, Homo sapiens
TNLIYFTALSTSTMTHYSEQFPTPHRPLWCVSPDPLVCMAPRVPVWSKLTWVTITTLSTLGHPNSQSLSFFILMILQVLSVSQDSVRVVFLKTFRGAGLHGHMGEMVTLRG

SEQ ID NO: 1025309 - protein, 157 aa, Homo sapiens [sequence omitted]

SEQ ID NO: 1025310 - protein, 181 aa, Homo sapiens
  misc_feature (1)..(1): Xaa can be any naturally occurring amino acid
  misc_feature (37)..(37): Xaa can be any naturally occurring amino acid
  misc_feature (48)..(48): Xaa can be any naturally occurring amino acid
  misc_feature (51)..(51): Xaa can be any naturally occurring amino acid
  misc_feature (80)..(80): Xaa can be any naturally occurring amino acid
  misc_feature (85)..(85): Xaa can be any naturally occurring amino acid
  misc_feature (108)..(108): Xaa can be any naturally occurring amino acid
  misc_feature (116)..(116): Xaa can be any naturally occurring amino acid
  misc_feature (121)..(121): Xaa can be any naturally occurring amino acid
  misc_feature (153)..(153): Xaa can be any naturally occurring amino acid
  misc_feature (162)..(162): Xaa can be any naturally occurring amino acid
  misc_feature (167)..(167): Xaa can be any naturally occurring amino acid
  misc_feature (170)..(172): Xaa can be any naturally occurring amino acid
  misc_feature (176)..(176): Xaa can be any naturally occurring amino acid
XVGKAIEEELQEIASEPTNKHLFYAEDFSTMDEISEXLKKGICEALEXSFXRQDSPAGELPKTVQQPTVQHRYLFEEDNXLRSTXKLSHSTKPSEPLRAKSTTMQMCXPYNVPEPXKRRSXKINTALRRNDTENGSPGKSPEIQMKISKSRSXIGSHCITDXNENAXRGXXXQAIXKSIML

SEQ ID NO: 1025311 - protein, 319 aa, Homo sapiens
  misc_feature (281)..(281): Xaa can be any naturally occurring amino acid
  misc_feature (298)..(298): Xaa can be any naturally occurring amino acid
  misc_feature (310)..(310): Xaa can be any naturally occurring amino acid
AGWYWSPSRYIEFFQNVSMVLLPPQVPECRQGPTHHPYGTNRCMQEQRRWQLGCTGDGQRTREFTHIWHCPLVRSVPGVDQLGWSTLQDSCVVNPVKLGRVKLELPMLELIAAGELRLGKKGTDRYRMVVGGAQAGDAGTYHCTAAEWIQDPDGSWAQIAEKRAVLAHVDVQTLSSQLAVTVGPGERRIGPGEPLELLCNVSRGTSPSRPSCCILCRSGDGTCGGTLGPCRLVAQLEHRGMWAAWALGYEGRHIAMEEGGIQNIPVRLEAARPGDAGTPTXPSPKPMFEGLGPGFREXASARSRPLPVTXCGKKVRGGL

SEQ ID NO: 1025312 - protein, 254 aa, Homo sapiens
  misc_feature (199)..(199): Xaa can be any naturally occurring amino acid
  misc_feature (221)..(221): Xaa can be any naturally occurring amino acid
  misc_feature (224)..(224): Xaa can be any naturally occurring amino acid
  misc_feature (239)..(239): Xaa can be any naturally occurring amino acid
  misc_feature (244)..(244): Xaa can be any naturally occurring amino acid
  misc_feature (253)..(253): Xaa can be any naturally occurring amino acid
AGWYWSPSRYIEFFQNVSMVLLPPQVPECRQGPTHHPYGTNRCMQEQRRWQLGCTGDGQRTREFTHIWHCPLVRSVPGVDQLGWSTLQDSCVVNPVKLGRVKLELPMLELIAAGELRLGKKGTDRYRMVVRGCPGRGRSAPTTALPLSGFRILMAAGPRLQRKGPSWPTWMCRRLCKCPLIHPTVGAGKGTVSWWALWXTGGTQIAHHTDSKELIFPQKLXQPXLAFLSPGPLNGFSLXQKLGXRDRQAPCLXG

SEQ ID NO: 1025313 - protein, 260 aa, Homo sapiens
  misc_feature (222)..(222): Xaa can be any naturally occurring amino acid
  misc_feature (239)..(239): Xaa can be any naturally occurring amino acid
  misc_feature (251)..(251): Xaa can be any naturally occurring amino acid
AGWYWSPSRYIEFFQNVSMVLLPPQVPECRQGPTHHPYGTNRCMQEQRRWQLGCTGDGQRTREFTHIWHCPLVRSVPGVDQLGWSTLQDSCVVNPVKLGRVKLELPMLELIAAGELRLGKKGTDRYRMVVGGAQAGDAGTYHCTAAEWIQDPDGSWAQIAEKRAVLAHVDVQTLSSQLAVTVGQPGALGYEGRHIAMEKVASRTYRLRLEAARPGDAGTPTXPSPKPMFEGLGPGFREXASARSRPLPVTXCGKKVRGGL

SEQ ID NO: 1025314 - protein, 143 aa, Homo sapiens
TPALASQSAGITGGRHCARLENNYYCSRFLGSYYVLRAPCSASQSSFLVYPPRFEDEWPLPSATITCSFSSILSSGSIRTLRSECSWLGKAQEPHPGSPPTDPTSNHDMLQPPQWPEQLNKASLFPFCTPENSCVGLFAMQSE

SEQ ID NO: 1025315 - protein, 48 aa, Homo sapiens
  misc_feature (8)..(9): Xaa can be any naturally occurring amino acid
MGSRTQGXXPRGGGLKPLCSHVAKLSSWRGWARHHLVRMFRGSAGFRG

SEQ ID NO: 1025316 - protein, 172 aa, Homo sapiens
MVEKKTSVRSQDPGQRRVLDRAARQLRINRQLEALENDNFQDDPHAGLPSVSGKKTASVLMTYADTGNEREENPRLINFKHSLPKKSFQSPVWAVSQNCESLADVALNLSSYGLVPGSPLSAGSLAAPFLGACLVCFTDPPLHAGVTLAGASELQHVQHDHEWTPNRETKVI

SEQ ID NO: 1025317 - protein, 237 aa, Homo sapiens
LPQGVTRALPFNRKRLPAHPTPLLHDCMLLMHHMRTCDQMSDCPVMLDVTGCATVMPEIFVLANLWMSLRAVPPGETGRSLVRAQPLSVTVCGSSLPEASPALPLSLPCPNCLWSLKPSLRPELGLRGPGAASRARTRERSAFRPKLKRAPHQGPAGSRLGPETFRQRFRQFRYQDAAGPREAFRQLRELSRQWLRPDIRTKEQIVEMLVQEQLLAILPEAARARRIRRRTDVRITG

SEQ ID NO: 1025318 - protein, 594 aa, Homo sapiens
MKIHNFLKGNPGFSGLNLNIPILSSLGSSAPSESHPSDFQRGPTSTSIDNIDGTPVRDERSGTPTQDEMMDKPTSSSVDTMSLLSKIISPGSSTPSSTRSPPPGRDESYPRELSNSVSTYRPFGLGSESPYKQPSDGMERPSSLMDSSQEKFYPDTSFQEDEDYRDFEYSGPPPSAMMNLEKKPAKSILKSSKLSDTTEYQPILSSYSHRAQEFGVKSAFPPSVRALLDSSENCDRLSSSPGLFGAFSVRGNEPGSDRSPSPKHPCRSHGSPPTSGVEKVLASTISTTSTIEFKNMLKNASRKPSDDKHFGQAPSKGTPSDGVSLSNLTQPSLTATDQQQQEEHYRIETRVSSSCLDLPDSTEEKGAPIETLGYHSASNRRMSGEPIQTVESIRVPGKGNRGHGREASRVGWFDLSTSGSSFDNGPSSASELASLGGGGSGGLTGFKTAPYKERAPQFQESVGSFRSNSFNSTFEHHLPPSPLEHGTPFQREPVGPSSAPPVPPKDHGGIFSRDAPTHLPSVDLSNPFTKEAALAHAAPPAPPGEHSGIPFPTPPPPNCFMGNISQQMVGDDGDTIRSTTSKVISRRMIANTKR

SEQ ID NO: 1025319 - protein, 285 aa, Homo sapiens
MKIHNFLKGNPGFSGLNLNIPILSSLGSSAPSESHPSDFQRGPTSTSIDNIDGTPVRDERSGTPTQDEMMDKPTSSSVDTMSLLSKIISPGSSTPSSTRSPPPGRDESYPRELSNSVSTYRPFGLGSESPYKQPSDGMERPSSLMDSSQEKFYPDTSFQEDEDYRDFEYSGPPPSAMMNLEKKPAKSILKSSKLSDTTEYQPILSSYSHRAQEFGVKSAFPPSVRALLDSSENCDRLSSSPGLFGAFSVRGNEPGSDRSPSPSKNDSFFTPDSNHNSLSQSTTGQ

SEQ ID NO: 1025320 - protein, 641 aa, Homo sapiens
MKIHNFLKGNPGFSGLNLNIPILSSLGSSAPSESHPSDFQRGPTSTSIDNIDGTPVRDERSGTPTQDEMMDKPTSSSVDTMSLLSKIISPGSSTPSSTRSPPPGRDESYPRELSNSVSTYRPFGLGSESPYKQPSDGMERPSSLMDSSQEKFYPDTSFQEDEDYRDFEYSGPPPSAMMNLEKKPAKSILKSSKLSDTTEYQPILSSYSHRAQEFGVKSAFPPSVRALLDSSENCDRLSSSPGLFGAFSVRGNEPGSDRSPSPSKNDSFFTPDSNHNSLSQSTTGHLSLPQKQYPDSPHPVPHRSLFSPQNTLAAPTGHPPTSGVEKVLASTISTTSTIEFKNMLKNASRKPSDDKHFGQAPSKGTPSDGVSLSNLTQPSLTATDQQQQEEHYRIETRVSSSCLDLPDSTEEKGAPIETLGYHSASNRRMSGEPIQTVESIRVPGKGNRGHGREASRVGWFDLSTSGSSFDNGPSSASELASLGGGGSGGLTGFKTAPYKERAPQFQESVGSFRSNSFNSTFEHHLPPSPLEHGTPFQREPVGPSSAPPVPPKDHGGIFSRDAPTHLPSVDLSNPFTKEAALAHAAPPAPPGEHSGIPFPTPPPPNCFMGNISQQMVGDDGDTIRSTTSKVISRRMIANTKR

SEQ ID NO: 1025321 - protein, 248 aa, Homo sapiens [sequence omitted]

SEQ ID NO: 1025322 - protein, 120 aa, Homo sapiens [sequence omitted]

SEQ ID NO: 1025323 - protein, 145 aa, Homo sapiens
  misc_feature (2)..(2): Xaa can be any naturally occurring amino acid
PXPPSSSQHGYYGKTLPREVTLPKSRMSPKKICKGPRKESQLSLGGQSCAGEPDEELVAAFPIFVRNAILGQKQPKRPRSESSCSKDVVRTGFDGLGGRTKFIQPTDTVMIRPLPVKPKTKVKQRVRVKTVPSLFQAKLDTFLWS

SEQ ID NO: 1025324 - protein, 117 aa, Homo sapiens
  misc_feature (2)..(2): Xaa can be any naturally occurring amino acid
  misc_feature (108)..(108): Xaa can be any naturally occurring amino acid
  misc_feature (111)..(111): Xaa can be any naturally occurring amino acid
PXPPSSSQHGYYGKTLPREVTLPKSRMSPKKICKGPRKESQLSLGGQSCAGEPDEELVAAFPIFVRNAILGQKQPKRPRSESSCSKDVVRTGFDGLGGRTKFIQPTDXSFXCDVELG

SEQ ID NO: 1025325 - protein, 117 aa, Homo sapiens; identical to SEQ ID NO: 1025324
  misc_feature (2)..(2): Xaa can be any naturally occurring amino acid
  misc_feature (108)..(108): Xaa can be any naturally occurring amino acid
  misc_feature (111)..(111): Xaa can be any naturally occurring amino acid

SEQ ID NO: 1025326 - protein, 189 aa, Homo sapiens
AAEPAPSAPSPAPSRVRAKQQPPTPGPGRGTSSFPTGNVRRACAQKQDEKMANFLLPRGTSSFRRFTRESLAAIEKRMAEKQARGSTTLQESREGLPEEEAPRPQLDLQASKKLPDLYGNPPQELIGEPLEDLDPFYSTQKTFIVLNKGKTIFRFSATNALYVLSPFHPSSESGCEDSGSLISFAVNTC

SEQ ID NO: 1025327 - protein, 2016 aa, Homo sapiens
MANFLLPRGTSSFRRFTRESLAAIEKRMAEKQARGSTTLQESREGLPEEEAPRPQLDLQASKKLPDLYGNPPQELIGEPLEDLDPFYSTQKTFIVLNKGKTIFRFSATNALYVLSPFHPVRRAAVKILVHSLFNMLIMCTILTNCVFMAQHDPPPWTKYVEYTFTAIYTFESLVKILARAFCLHAFTFLRDPWNWLDFSVIIMAYTTEFVDLGNVSALRTFRVLRALKTISVISGLKTIVGALIQSVKKLADVMVLTVFCLSVFALIGLQLFMGNLRHKCVRNFTALNGTNGSVEADGLVWESLDLYLSDPENYLLKNGTSDVLLCGNSSDAGTCPEGYRCLKAGENPDHGYTSFDSFAWAFLALFRLMTQDCWERLYQQTLRSAGKIYMIFFMLVIFLGSFYLVNLILAVVAMAYEEQNQATIAETEEKEKRFQEAMEMLKKEHEALTIRGVDTVSRSSLEMSPLAPVNSHERRSKRRKRMSSGTEECGEDRLPKSDSEDGPRAMNHLSLTRGLSRTSMKPRSSRGSIFTFRRRDLGSEADFADDENSTARESESHHTSLLVPWPLRRTSAQGQPSPGTSAPGHALHGKKNSTVDCNGVVSLLGAGDPEATSPGSHLLRPVMLEHPPDTTTPSEEPGGPQMLTSQAPCVDGFEEPGARQRALSAVSVLTSALEELEESRHKCPPCWNRLAQRYLIWECCPLWMSIKQGVKLVVMDPFTDLTITMCIVLNTLFMALEHYNMTSEFEEMLQVGNLVFTGIFTAEMTFKIIALDPYYYFQQGWNIFDSIIVILSLMELGLSRMSNLSVLRSFRLLRVFKLAKSWPTLNTLIKIIGNSVGALGNLTLVLAIIVFIFAVVGMQLFGKNYSELRDSDSGLLPRWHMMDFFHAFLIIFRILCGEWIETMWDCMEVSGQSLCLLVFLLVMVIGNLVVLNLFLALLLSSFSADNLTAPDEDREMNNLQLALARIQRGLRFVKRTTWDFCCGLLRHRPQKPAALAAQGQLPSCIATPYSPPPPETEKVPPTRKETQFEEGEQPGQGTPGDPEPVCVPIAVAESDTDDQEEDEENSLGTEEESSKQQESQPVSGWPRGPPDSRTWSQVSATASSEAEASASQADWRQQWKAEPQAPGCGETPEDSCSEGSTADMTNTAELLEQIPDLGQDVKDPEDCFTEGCVRRCPCCAVDTTQAPGKVWWRLRKTCYHIVEHSWFETFIIFMILLSSGALAFEDIYLEERKTIKVLLEYADKMFTYVFVLEMLLKWVAYGFKKYFTNAWCWLDFLIVDVSLVSLVANTLGFAEMGPIKSLRTLRALRPLRALSRFEGMRVVVNALVGAIPSIMNVLLVCLIFWLIFSIMGVNLFAGKFGRCINQTEGDLPLNYTIVNNKSQCESLNLTGELYWTKVKVNFDNVGAGYLALLQVATFKGWMDIMYAAVDSRGYEEQPQWEYNLYMYIYFVIFIIFGSFFTLNLFIGVIIDNFNQQKKKLGGQDIFMTEEQKKYYNAMKKLGSKKPQKPIPRPLNKYQGFIFDIVTKQAFDVTIMFLICLNMVTMMVETDDQSPEKINILAKINLLFVAIFTGECIVKLAALRHYYFTNSWNIFDFVVVILSIVGTVLSDIIQKYFFSPTLFRVIRLARIGRILRLIRGAKGIRTLLFALMMSLPALFNIGLLLFLVMFIYSIFGMANFAYVKWEAGIDDMFNFQTFANSMLCLFQITTSAGWDGLLSPILNTGPPYCDPTLPNSNGSRGDCGSPAVGILFFTTYIIISFLIVVNMYIAIILENFSVATEESTEPLSEDDFDMFYEIWEKFDPEATQFIEYSVLSDFADALSEPLRIAKPNQISLINMDLPMVSGDRIHCMDILFAFTKRVLGESGEMDALKIQMEEKFMAANPSKISYEPITTTLRRKHEEVSAMVIQRAFRRHLLQRSLKHASFLFRQQAGSGLSEEDAPEREGLIAYVMSENFSRPLGPPSSSSISSTSFPPSYDSVTRATSDNLQVRGSDYSHSEDLADFPPSPDRDRESIV

SEQ ID NO: 1025328 - protein, 142 aa, Homo sapiens
  misc_feature (8)..(8): Xaa can be any naturally occurring amino acid
KRPIENRXLILPSVTRNETGPYQCEIQDRYGGIRSNPVTLNVLYGPDLPRIYPSFTYYHSGENLYFVLFADSNPPAEYSWTINGKFQLSGQKLFIPQITTKHSGLYACSVRNSATGMESSKSITPKVSAPSGTGHLPGLNPL

SEQ ID NO: 1025329 - protein, 179 aa, Homo sapiens
MCLWEFQSCNDFWLVPEVYLTVCVKSDKKTSRKKGSSLFNPNHGTINTHGLILGSTPNTTPNTTTPTTPTPHHTTRTPHITHTTPTKALGAAPPPQIKHTGGAPPQKTIRLACLQDHRSNIVGSPTKHRRGTCRQPTAGGSVHTPPDTPPVYQQHNRARARHTRGRHSTDPTQPQHPEN

SEQ ID NO: 1025330 - protein, 105 aa, Homo sapiens
  misc_feature (88)..(88): Xaa can be any naturally occurring amino acid
MPAIAFPGGIGTLPLADLAKRRFFDVLQAMLRGEYSAPPMAKTLSFALHEVEPNRVVFKGVPAQEHLQSIRVRHPAAIELPPGAGSIXIPLGGISLAVGWDFYGI

SEQ ID NO: 1025331 - protein, 121 aa, Homo sapiens
TSNSEYTFPVSAVQPLLSIPQFLPRVSVLGGFSGIIQPSPTSLPSAHPLSCLREISLKLQIGSPSCLTSFSLHPHAQVVRVRGKQLDVSTAQTEGQPWLSAYPLNAFRQVTQLAKPSFLQL

SEQ ID NO: 1025332 - protein, 103 aa, Homo sapiens
HKHANPQGYYDMNSWYEHCRLVTGLANTGEYQSNPTLLRLYYSRASRGQSDVKKVPKGVPLQFDINSVGKQTGMTLNERFGILKEQRATLTYNKGGSRFVTVG

SEQ ID NO: 1025333 - protein, 111 aa, Homo sapiens
GELGIIICTRCCKRWGCSLVKYAERQQLDRMIARATRDLTSGRSGLSARFMRDFGLDDQNRPRHAADDGVTKEMYEYPGVQHHVKPAVHFLKRRNIGTVGLDLFTFFILAC

SEQ ID NO: 1025334 - protein, 102 aa, Homo sapiens
  misc_feature (44)..(44): Xaa can be any naturally occurring amino acid
  misc_feature (96)..(96): Xaa can be any naturally occurring amino acid
  misc_feature (100)..(100): Xaa can be any naturally occurring amino acid
LDLRNLPRRQQDSTQQLRIRLRQLPDVPIPLPRHHEHMHPRLRXDVPKRKRGVVLIHDVRRNLPSNNPLEQRLRRIAHTRHPTNPHWPRRRTHATXPPHXPR

SEQ ID NO: 1025335 - protein, 146 aa, Homo sapiens
  misc_feature (112)..(112): Xaa can be any naturally occurring amino acid
  misc_feature (114)..(114): Xaa can be any naturally occurring amino acid
  misc_feature (121)..(121): Xaa can be any naturally occurring amino acid
MATILTSNQRPPAAPRPGGRRTPAWMNLTSIPWPIPTSEVEAGKVAPREKLLPTPTAPPCGHKRKLVTKLQNSEREKPGARRSNRAGDEARPWTLHPAIDTALRRKEDPAQXPXPLATPPXPSTHSRSLSLSGATRKAPPTLRKTC

SEQ ID NO: 1025336 - protein, 246 aa, Homo sapiens
VTDPQRSRCCLRDPQRVLEYCRQMYPELQIARVEQATQAIPMERWCGGSLERQLAQPHQQVVPFLCLLGEFVSEALAGCLKGWPVSCTRSAWTNVRVQPGGIRRHKEACSSQGSSCNGSGMLLPCGSDRFRGVEYVCCPPPGPPTHRGTAVGDPIHPVLAPGEQSKRKLQDEEEEESFPTEQENEYFVEPPQLEEEEATVPPPSSHTLASGRQSHSHPEAHRTVWILHWHAGDISEPRVREAKGPG

SEQ ID NO: 1025337 - protein, 138 aa, Homo sapiens
  misc_feature (31)..(31): Xaa can be any naturally occurring amino acid
  misc_feature (34)..(34): Xaa can be any naturally occurring amino acid
  misc_feature (52)..(52): Xaa can be any naturally occurring amino acid
  misc_feature (134)..(134): Xaa can be any naturally occurring amino acid
TLQRSCNSEKIPKIPKKFGEKGLRRTLLNPXWGXNQELGKIRNTEPRPGPLXSPGYSGQEVRLGSGGHLHLRISRAALPSGSPSLPPSPGSVPAVPDGVKVVGRDTTLRRQLSLARPPWARAAPSTVAAAVAVXTNCW

SEQ ID NO: 1025338 - protein, 570 aa, Homo sapiens
MAQEVSEYLSQNPRVAAWVEALRCDGETDKHWRHRRDFLLRNAGDLAPAGGAASASTDEAADAESGTRNRQLQQLISFSMAWANHVFLGCRYPQKVMDKILSMAEGIKVTDAPTYTTRDELVAKEGVEEPSKKRVIEGKNSSAVEQDHAKTSAKTERASAQQENSSTCIGSAIKSESGNSARSSGISSQNSSTSDGDRSVSSQSSSSVSSQVTTAGSGKASEAEAPDKHGSASFVSLLKSSVNSHMTQSTDSRQQSGSPKKSALEGSSASASQSSSEIEVPLLGSSGSSEVELPLLSSKPSSETASSGLTSKTSSEASVSSSVAKNSSSSGTSLLTPKSSSSTNTSLLTSKSTSQVAASLLASKSSSQTSGSLVSKSTSLASVSQLASKSSSQTSTSQLPSKSTSQSSESSVKFSCKLTNEDVKQKQPFFNRLYKTVAWKLVAVGGFSPNVNHGELLNAAIEALKATLDVFFVPLKELADLPQNKSSQESIVCELRCKSVYLGTGCGKSKENAKAVASREALKLFLKKKVVVKICKRKYRGSEIEDLVLLDEESRPVNLPPALKHPQELL

SEQ ID NO: 1025339 - protein, 570 aa, Homo sapiens; identical to SEQ ID NO: 1025338

SEQ ID NO: 1025340 - protein, 580 aa, Homo sapiens
MAQEVSEYLSQNPRVAAWVEALRCDGETDKHWRHRRDFLLRNAGDLAPAGGAASASTDEAADAESGTRNRQLQQLISFSMAWANHVFLGCRYPQKVMDKILSMAEGIKVTDAPTYTTRDELVAKVKKRGISSSNEGVEEPSKKRVIEGKNSSAVEQDHAKTSAKTERASAQQENSSTCIGSAIKSESGNSARSSGISSQNSSTSDGDRSVSSQSSSSVSSQVTTAGSGKASEAEAPDKHGSASFVSLLKSSVNSHMTQSTDSRQQSGSPKKSALEGSSASASQSSSEIEVPLLGSSGSSEVELPLLSSKPSSETASSGLTSKTSSEASVSSSVAKNSSSSGTSLLTPKSSSSTNTSLLTSKSTSQVAASLLASKSSSQTSGSLVSKSTSLASVSQLASKSSSQTSTSQLPSKSTSQSSESSVKFSCKLTNEDVKQKQPFFNRLYKTVAWKLVAVGGFSPNVNHGELLNAAIEALKATLDVFFVPLKELADLPQNKSSQESIVCELRCKSVYLGTGCGKSKENAKAVASREALKLFLKKKVVVKICKRKYRGSEIEDLVLLDEESRPVNLPPALKHPQELL

SEQ ID NO: 1025341 - protein, 570 aa, Homo sapiens; identical to SEQ ID NO: 1025338

SEQ ID NO: 1025342 - protein, 126 aa, Homo sapiens
MAQEVSEYLSQNPRVAAWVEALRCDGETDKHWRHRRDFLLRNAGDLAPAGGAASASTDEAADAESGTRNRQLQQLISFSMAWANHVFLGCRYPQKVMDKILSMAEGIKVTDAPTYTTRDELVAKKG

SEQ ID NO: 1025343 - protein, 86 aa, Homo sapiens
HLPLTQEQKQMLGERLCPLIQAMHPTLAGKITGLWLTWIIQNFFICSSLQSHSVLRLMKLYAVLQAHQAKEAAQKAVNSATGVPTV

SEQ ID NO: 1025344 - protein, 86 aa, Homo sapiens; identical to SEQ ID NO: 1025343

SEQ ID NO: 1025345 - protein, 516 aa, Homo sapiens
LGARTSARLGDPAAPRRRLAPSPGPSVGILGPPRAPPPAAMASLGDLVRAWHLGAQAVDRGDWARALHLFSGVPAPPARLCFNAGCVHLLAGDPEAALRAFDQAVTKDTCMAVGFFQRGVANFQLARFQEALSDFWLALEQLRGHAAIDYTQLGLRFKLQAWEVLHNVASAQCQLGLWTEAASSLREAMSKWPEGSLNGLDSALDQVQRRGSLPPRQVPRGEVFRPHRWHLKHLEPVDFLGKAKVVASAIPDDQGWGVRPQQPQGPGANHDARSLIMDSPRAGTHQGPLDAETEVGADRCTSTAYQEQRPQVEQVGKQAPLSPGLPAMGGPGPGPCEDPAGAGGAGAGGSEPLVTVTVQCAFTVALRARRGADLSSLRALLGQALPHQAQLGQLSYLAPGEDGHWVPIPEEESLQRAWQDAAACPRGLQLQCRGAGGRPVLYQVVAQHSYSAQGPEDLGFRQGDTVDVLCEVDQAWLEGHCDGRIGIFPKCFVVPAGPRMSGAPGRLPRSQQGDQP

SEQ ID NO: 1025346 - protein, 172 aa, Homo sapiens
GNSGGPESPWWLRWSWAPPRLRQLLEEGLAEVTALPAGPTQEAPSEESLCSYLAPGEDGHWVPIPEEESLQRAWQDAAACPRGLQLQCRGAGGRPVLYQVVAQHSYSAQGPEDLGFRQGDTVDVLCEVDQAWLEGHCDGRIGIFPKCFVVPAGPRMSGAPGRLPRSQQGDQP

SEQ ID NO: 1025347 - protein, 523 aa, Homo sapiens
LGARTSARLGDPAAPRRRLAPSPGPSVGILGPPRAPPPAAMASLGDLVRAWHLGAQAVDRGDWARALHLFSGVPAPPARLCFNAGCVHLLAGDPEAALRAFDQAVTKDTCMAVGFFQRGVANFQLARFQEALSDFWLALEQLRGHAAIDYTQLGLRFKLQAWEVLHNVASAQCQLGLWTEAASSLREAMSKWPEGSLNGLDSALDQVQRRGSLPPRQVPRGEVFRPHRWHLKHLEPVDFLGKAKVVASAIPDDQGWGVRPQQPQGPGANHDARSLIMDSPRAGTHQGPLDAETEVGADRCTSTAYQEQRPQVEQVGKQAPLSPGLPAMGGPGPGPCEDPAGAGGAGAGGSEPLVTVTVQCAFTVALRARRGADLSSLRALLGQALPHQAQLGQLSYLAPGEDGHWVPIPEEESLQRAWQDAAACPRGLQLQCRGAGGRPVLYQVVAQHSYSAQGPEDLGFRQGDTVDVLCEEPDVPLAVDQAWLEGHCDGRIGIFPKCFVVPAGPRMSGAPGRLPRSQQGDQP

SEQ ID NO: 1025348 - protein, 584 aa, Homo sapiens
LGARTSARLGDPAAPRRRLAPSPGPSVGILGPPRAPPPAAMASLGDLVRAWHLGAQAVDRGDWARALHLFSGVPAPPARLCFNAGCVHLLAGDPEAALRAFDQAVTKDTCMAVGFFQRGVANFQLARFQEALSDFWLALEQLRGHAAIDYTQLGLRFKLQAWEVLHNVASAQCQLGLWTEAASSLREAMSKWPEGSLNGLDSALDQVQRRGSLPPRQVPRGEVFRPHRWHLKHLEPVDFLGKAKVVASAIPDDQGWGVRPQQPQGPGANHDARSLIMDSPRAGTHQGPLDAETEVGADRCTSTAYQEQRPQVEQVGKQAPLSPGLPAMGGPGPGPCEDPAGAGGAGAGGSEPLVTVTVQCAFTVALRARRGADLSSLRALLGQALPHQAQLGQLSYLAPGEDGHWVPIPEEESLQRAWQDAAACPRGLQLQCRGAGGRPVLYQVVAQHSYSAQGPEDLGFRQGDTVDVLCEGRVGMALPRQHRGARGVGGLELGLCCLADVAPKRPRLGNALQSPMSPLQWTRHGWRATVTAASASSPSASWSPPALGCQEPPAACPDPSREISPNDAVSMMLLIKTTPTAKKK

SEQ ID NO: 1025349 - protein, 136 aa, Homo sapiens
VVKRDSIATMSFSGKYQLQSQENFEAFMKAIGLPEELIQKGKDIKGVSEIVQNGKPLRLTITVGSKGIQTEFTVGKECNLKTLPGKKVRTGVKLEGAIKRGTTFKTIKFGTELNGTLYPIPMTLGEIAFKRFTRGF

SEQ ID NO: 1025350 - protein, 283 aa, Homo sapiens
  misc_feature (61)..(61): Xaa can be any naturally occurring amino acid
  misc_feature (66)..(66): Xaa can be any naturally occurring amino acid
  misc_feature (136)..(136): Xaa can be any naturally occurring amino acid
  misc_feature (170)..(170): Xaa can be any naturally occurring amino acid
  misc_feature (173)..(173): Xaa can be any naturally occurring amino acid
  misc_feature (181)..(181): Xaa can be any naturally occurring amino acid
  misc_feature (185)..(185): Xaa can be any naturally occurring amino acid
  misc_feature (188)..(189): Xaa can be any naturally occurring amino acid
  misc_feature (227)..(227): Xaa can be any naturally occurring amino acid
  misc_feature (231)..(231): Xaa can be any naturally occurring amino acid
  misc_feature (236)..(236): Xaa can be any naturally occurring amino acid
  misc_feature (276)..(276): Xaa can be any naturally occurring amino acid
AGRRCPDRSPPFGPDFGSSGVLMLLKPESTCPDPSLYDADSARSQNQSHAGVWPLTPRGRXPRLRXPHLATRTSQPRSRPEPPCAGTLLPLAGLYLVQGLPYGLQSGLLPVLLRAGGLSLTRVGLAKVLYAPWLLXLAWAPLVDAQGSARAWVTRTRRAWAWCVGCIPGXPPXWSLARPGXARRXWRXXACLFVEPWGAANARNVAPGPRLACAACLEPGRTWGPGXTLCXVVAYXAGGPRYLGGALLALLPTFSWPQLFLLLAAPTGWPRPGLGXTSLRRLH

SEQ ID NO: 1025351 - protein, 101 aa, Homo sapiens
DELASTKQKLEKAENQVLAMRKQSEDLTKEYDRLLEEHAKLQAAVMMVPVDKKEEKGLLSSPACSVAFQPGHVPACFLRARSVSLQYFVFVPCLLPPFPFH

SEQ ID NO: 1025352 - protein, 104 aa, Homo sapiens
YQKCTLLHLADGQVKEPFKPSKKDSIACTYSNKNDVDLRSSNDKWKEKIKKEGDCRKESNSSSNQLDKSQKLPDVKPSPINLRKKSLTVKVDIEECTFEGSSRS

SEQ ID NO: 1025353 - protein, 504 aa, Homo sapiens
VRLAEDLRIQKKNTPSQLEEALKTLSTRSSFQKRYPEDRDYRKYGHTSQRPKDVERYESREPARNPKWKPEHSLPPYQEDTDQWNLGPQTYRHAEREHPETSSATKVSYDYRHKRPKLLDGDQDFSDGRTQKYCKEEDRKYSFQKGPLNRELDCFNTGRGRETQDGQVKEPFKPSKKDSIACTYSNKNDVDLRSSNDKWKEKIKKEGDCRKESNSSSNQLDKSQKLPDVKPSPINLRKKSLTVKVDVKKTVDTFRVASSYSTERQMSHDLVAVGRKSENFHPVFEHLDSTQNTENKPTGEFAQEIITIIHQVKANYFPSPGITLHERFSTMQDIHKADVNEIPLNSDPEIHRRIDMSLAELQSKQAVIYESEQTLIKIIDPNDLRHDIERRRKERLQNEDEHIFHIASAAERDDQNSSFSKNYTTQRKDIITHKPFEVEGNHRNTRVRPFKSNFRGGRCQPNYKSGLVQKSLYIQAKYQRLRFTGPRGFITHKFRERLMRKKKF

SEQ ID NO: 1025354 - protein, 533 aa, Homo sapiens
VRLAEDLRIQKKNTPSQLEEALKTLSTRSSFQKRYPEDRDYRKYGHTSQRPKDVERYESREPARNPKWKPEHSLPPYQEDTDQWNLGPQTYRHAEREHPETSSATKVSYDYRHKRPKLLDGDQDFSDGRTQKYCKEEDRKYSFQKGPLNRELDCFNTGRGRETQDGQVKEPFKPSKKDSIACTYSNKNDVDLRSSNDKWKEKIKKEGDCRKESNSSSNQLDKSQKLPDVKPSPINLRKKSLTVKVDVKKTVDTFRVASSYSTERQMSHDLVAVGRKSENFHPVFEHLDSTQNTENKPTGEFAQEIITIIHQVKANYFPSPGITLHERFSTMQDIHKADVNEIPLNSDPEIHRRIDMSLAELQSKQAVIYESEQTLIKIIDPNDLRHDIERRRKERLQNEDEHIFHIASAAERDDQNSSFSKVKNVHTDGFQKPTHFIKSNFRKCIEKPYMNYTTQRKDIITHKPFEVEGNHRNTRVRPFKSNFRGGRCQPNYKSGLVQKSLYIQAKYQRLRFTGPRGFITHKFRERLMRKKKF

SEQ ID NO: 1025355 - protein, 258 aa, Homo sapiens
VRLAEDLRIQKKNTPSQLEEALKTLSTRSSFQKRYPEDRDYRKYGHTSQRPKDVERYESREPARNPKWKPEHSLPPYQEDTDQWNLGPQTYRHAEREHPETSSATKVSYDYRHKRPKLLDGDQDFSDGRTQKYCKEEDRKYSFQKGPLNRELDCFNTGRGRETQDGQVKEPFKPSKKDSIACTYSNKNDVDLRSSNDKWKEKIKKEGDCRKESNSSSNQLDKSQKLPDVKPSPINLRKKSLTVKVDIEECTFEGSSRS

SEQ ID NO: 1025356 - protein, 505 aa, Homo sapiens
VRLAEDLRIQKKNTPSQLEEALKTLSTRSSFQKRYPEDRDYRKYGHTSQRPKDVERYESREPARNPKWKPEHSLPPYQEDTDQWNLGPQTYRHAEREHPETSSATKVSYDYRHKRPKLLDGDQDFSDGRTQKYCKEEDRKYSFQKGPLNRELDCFNTGRGRETQDGQVKEPFKPSKKDSIACTYSNKNDVDLRSSNDKWKEKIKKEGDCRKESNSSSNQLDKSQKLPDVKPSPINLRKKSLTVKVDVKKTVDTFRVASSYSTERQMSHDLVAVGRKSENFHPVFEHLDSTQNTENKPTGEFAQEIITIIHQVKANYFPSPGITLHERFSTMQDIHKADVNEIPLNSDPEIHRRIDMSLAELQSKQAVIYESEQTLIKIIDPNDLRHDIERRRKERLQNEDEHIFHIASAAERDDQNSSFSKNYTTQRKDIITHKPFEVEGNHRNTRVRPFKSNFRGGRCQPNYKSGLVQKSLYIQAKYQRLRFTGPRGFITHKFRERLMRKKKVP

SEQ ID NO: 1025357 - protein, 512 aa, Homo sapiens
VRLAEDLRIQKKNTPSQLEEALKTLSTRSSFQKRYPEDRDYRKYGHTSQRPKDVERYESREPARNPKWKPEHSLPPYQEDTDQWNLGPQTYRHAEREHPETSSATKVSYDYRHKRPKLLDGDQDFSDGRTQKYCKEEDRKYSFQKGPLNRELDCFNTGRGRETQDGQVKEPFKPSKKDSIACTYSNKNDVDLRSSNDKWKEKIKKEGDCRKESNSSSNQLDKSQKLPDVKPSPINLRKKSLTVKVDVKKTVDTFRVASSYSTERQMSHDLVAVGRKSENFHPVFEHLDSTQNTENKPTGEFAQEIITIIHQVKANYFPSPGITLHERFSTMQDIHKADVNEIPLNSDPEIHRRIDMSLAELQSKQAVIYESEQTLIKIIDPNDLRHDIERRRKERLQNEDEHIFHIASAAERDDQNSSFSKNYTTQRKDIITHKPFEVEGNHRNTRVRPFKSNFRGGRCQPNYKSGLVQKSLYIQAKYQRLRFTGPRGFITHKFRERLMRKKKEYTDVATGI

SEQ ID NO: 1025358 - protein, 505 aa, Homo sapiens
VRLAEDLRIQKKNTPSQLEEALKTLSTRSSFQKRYPEDRDYRKYGHTSQRPKDVERYESREPARNPKWKPEHSLPPYQEDTDQWNLGPQTYRHAEREHPETSSATKVSYDYRHKRPKLLDGDQDFSDGRTQKYCKEEDRKYSFQKGPLNRELDCFNTGRGRETQDGQVKEPFKPSKKDSIACTYSNKNDVDLRSSNDKWKEKIKKEGDCRKESNSSSNQLDKSQKLPDVKPSPINLRKKSLTVKVDVKKTVDTFRVASSYSTERQMSHDLVAVGRKSENFHPVFEHLDSTQNTENKPTGEFAQEIITIIHQVKANYFPSPGITLHERFSTMQDIHKADVNEIPLNSDPEIHRRIDMSLAELQSKQAVIYESEQTLIKIIDPNDLRHDIERRRKERLQNEDEHIFHIASAAERDDQNSSFSKNYTTQRKDIITHKPFEVEGNHRNTRVRPFKSNFRGGRCQPNYKSGLVQKSLYIQAKYQRLRFTGPRGFITHKFRERLMRKKKVS

SEQ ID NO: 1025359 - protein, 167 aa, Homo sapiens
MCFFLSNLCWADIGFTSATVPKMIVDMRSHSGVISYADCLTRMSFLVLFACVEDMLLTVMAYDCFVAICRPLHYPVIVNPHLCVFLVSVSFSLACWIPSCAVGLCCNSPSSRMWKSLILSVTHLNLSSLPVLTASSIACSYISIVLCLVFFPFQGSFCLTIKLSPPF

SEQ ID NO: 1025360 - protein, 167 aa, Homo sapiens; identical to SEQ ID NO: 1025359

SEQ ID NO: 1025361 - protein, 338 aa, Homo sapiens
MVVMAPRTLFLLLSGALTLTETWAGSHSMRYFSAAVSRPGRGEPRFIAMGYVDDTQFVRFDSDSACPRMEPRAPWVEQEGPEYWEEETRNTKAHAQTDRMNLQTLRGYYNQSEASSHTLQWMIGCDLGSDGRLLRGYEQYAYDGKDYLALNEDLRSWTAADTAAQISKRKCEAANVAEQRRAYLEGTCVEWLHRYLENGKEMLQRADPPKTHVTHHPVFDYEATLRCWALGFYPAEIILTWQRDGEDQTQDVELVETRPAGDGTFQKWAAVVVPSGEEQRYTCHVQHEGLPEPLMLRWKQSSLPTIPIMGIVAGLVVLAAVVTGAAVAAVLWRKKSSD

SEQ ID NO: 1025362 - protein, 246 aa, Homo sapiens
MVVMAPRTLFLLLSGALTLTETWAGSHSMRYFSAAVSRPGRGEPRFIAMGYVDDTQFVRFDSDSACPRMEPRAPWVEQEGPEYWEEETRNTKAHAQTDRMNLQTLRGYYNQSEANPPKTHVTHHPVFDYEATLRCWALGFYPAEIILTWQRDGEDQTQDVELVETRPAGDGTFQKWAAVVVPSGEEQRYTCHVQHEGLPEPLMLRWKQSSLPTIPIMGIVAGLVVLAAVVTGAAVAAVLWRKKSSD

SEQ ID NO: 1025363 - protein, 132 aa, Homo sapiens
RGASCRVVGVGCGVSQRPSGPTLERLLRASYLAPRRHDHNPPPSRESTPTAGIAPEFCGSRWWIQFFIRCDEPTEQPVRKNKMGSNIFGTPEENQASWASQQVPSLVVAGKTWSHLDCRRRNSSGSKAPETS

SEQ ID NO: 1025364 - protein, 183 aa, Homo sapiens
DLQPAVESTSIAQRVDTIDWPTVDAELDRYGCAHVPGLMPASECDALTSLYPRDALYRSRVVMARHGFGRGEYKYFAYPLPALIAELRETLYPHLAPIANRWNQALGIDVRYPKDHTTFLDRLHAAGQTRPTPLILQYGPDDYNCLHQDLYGEHVFPLQVAILLSAPGRDFTGGEFVLTEQRP

SEQ ID NO: 1025365 - protein, 159 aa, Homo sapiens
VDILRKCRLVAKEYLDENNPEESIGDLQFNLNISEIENNIVSLLERSDRKVVILMDKLDEAYEPDNIGIGIIAGLAYASIELNQKAKCIRPIIFLRDNIFRSLSKEDPDYSRNIEGQVIRLHWDWAQLLMLSAKRMKVAFKLDIEKDQRVWDRCTADDP

SEQ ID NO: 1025366 - protein, 126 aa, Homo sapiens
SASLRAPQAEGRPLCSLWRTFIYLSPEYDTCPWKELAEFKVAKLSPGEAGEMAWSSCWALSQLRAHWSPTPTSLPCFGPYLLRPRPTSGWGFWQGAGRYHLAAPREHPADSVLHGCNVAFFRFSSI

SEQ ID NO: 1025367 - protein, 82 aa, Homo sapiens
ECYEDSPDTVASLRMMGHRGSVVRMVPKGDAGRGGPKGEPGSPGGKWSNVSDRPRSQAQNLSPAISLPASKDSFFPPTSTPT

SEQ ID NO: 1025368 - protein, 102 aa, Homo sapiens
MILSCARQAVYEQTMKLFAELEKLKGKREKPNEMHERKRQREEEIEAQEKAKREREWQKNFEESRDGRVDSWRNFQANTKGKKEKKNRTFLRPPKVKMEQRE

SEQ ID NO: 1025369 - protein, 90 aa, Homo sapiens
MHQLQGNKEYGSEKKGYLLKKSDGIRKVWQRRKCSVKNGILTISHATVSMFLNLPCLMGQKANTIMYSAVKIGANIFMHLGQIILDIPLP

SEQ ID NO: 1025370 - protein, 163 aa, Homo sapiens
HTLGYKDTPWCSPIKVKYGDVYCRAPQGGYYKTALGTSCDIRCQKGYELHGSSLLICQSNKRWSDKVICKQKRCPTLAMPANGGFKCVDGAYFNSRCEYYCSPGYTLKGERTVTCMDNKAWSGRPASCVDMEPPKNQVPKLLKERIFRNPNKLDSPGVLGDTE

SEQ ID NO: 1025371 - protein, 113 aa, Homo sapiens
MQNSISTSAVNRWNRDAPFPGRGRFSRTRGDGKRARTEAPSGSAAEKPLPGAAADGRLKLRLWRGASPVSDPPDTPGGGGDADAEQGERVATEAAAEVQSLPNASGRRRLAAR

SEQ ID NO: 1025372 - protein, 113 aa, Homo sapiens; identical to SEQ ID NO: 1025371

SEQ ID NO: 1025373 - protein, 113 aa, Homo sapiens; identical to SEQ ID NO: 1025371

SEQ ID NO: 1025374 - protein, 113 aa, Homo sapiens; identical to SEQ ID NO: 1025371

SEQ ID NO: 1025375 - protein, 228 aa, Homo sapiens
MGNGASRTPRALRAWGSPTRGFCEPGSEGRPRAPAQRGCAAERISQSATARGDFAYADPAPPVGRSPTLRLLGVLHTREKARKTGTRSTTACVSLHGWESLGQLKRAKWPKCACDNRVPGESVVGLGPGTPGARGGLGTPSCGSSTSPARAPGVFRVAGADARHPGALPGAPGAGALACTPSGLMLDELLASPEFLQQAQHFLETEAPGELEALEDAASLEAPLSEEE

SEQ ID NO: 1025376 - protein, 170 aa, Homo sapiens
VTSILLSVSELAYSRISHPITQGGAITDSLDHCMARPPSLEQFSCLRPSEIAGTTSVVLDRVVESEETIRQAKRLVAMASDLDFSPPEVPEPTFLENLLRYGLFLGAIFQLICVLAIIVPISKSHEGGGLNRFEAQKLLRLPREAQGCCSFCEQRGQRKRLRQKRSNEEA

SEQ ID NO: 1025377 - protein, 111 aa, Homo sapiens
  misc_feature (3)..(3): Xaa can be any naturally occurring amino acid
  misc_feature (24)..(24): Xaa can be any naturally occurring amino acid
  misc_feature (31)..(31): Xaa can be any naturally occurring amino acid
  misc_feature (35)..(35): Xaa can be any naturally occurring amino acid
  misc_feature (49)..(49): Xaa can be any naturally occurring amino acid
  misc_feature (63)..(63): Xaa can be any naturally occurring amino acid
RSXKNYGEWGRLCPKSRKNLFPEXPQGWPPXCPPXLAPPFIGSIHPPEXPAQSKPVPASQDGXQSRPSPPTSTGALKGPRSPKVGAGALTLRPWCGGKSEGLGDRQLGGAL

SEQ ID NO: 1025378 - protein, 127 aa, Homo sapiens
EDLENLVVSAVPSPPVLPRDWRVHLPGLWGQICGDLSLHPLLLWLPSLKYRTPGWAEPSQSATAQEGELVPALTGQALEGRDNHGRPAQIPRPGLGHRKKQHFLKGKRLPDRSLGFEAEAAVTVSPY

SEQ ID NO: 1025379 - protein, 110 aa, Homo sapiens
  misc_feature (2)..(2): Xaa can be any naturally occurring amino acid
  misc_feature (13)..(13): Xaa can be any naturally occurring amino acid
  misc_feature (23)..(23): Xaa can be any naturally occurring amino acid
  misc_feature (32)..(32): Xaa can be any naturally occurring amino acid
  misc_feature (48)..(48): Xaa can be any naturally occurring amino acid
PXLTTPSRGKNLXKDDFNLGKPXKSSGRSIVXTTSMTQATELQAESGXLLRRFKVSDEVKLPRAFCSRPPRLQQHPGREEASGVCLRAHLWFCRSPSARPRQHRTVCEAQ

SEQ ID NO: 1025380 - protein, 111 aa, Homo sapiens
  misc_feature (1)..(1): Xaa can be any naturally occurring amino acid
  misc_feature (43)..(44): Xaa can be any naturally occurring amino acid
  misc_feature (57)..(57): Xaa can be any naturally occurring amino acid
  misc_feature (73)..(73): Xaa can be any naturally occurring amino acid
  misc_feature (76)..(76): Xaa can be any naturally occurring amino acid
  misc_feature (78)..(78): Xaa can be any naturally occurring amino acid
  misc_feature (81)..(82): Xaa can be any naturally occurring amino acid
  misc_feature (86)..(86): Xaa can be any naturally occurring amino acid
  misc_feature (89)..(89): Xaa can be any naturally occurring amino acid
XEFRGRGKAQGLGNLDGRSGEACGGGEWGWVGVTQPTGEGVHXXAPIRGPRKPWGGXLGMEGVGVGLLPWGPXTPXHXFCXXTRHXLRXGHGWCLKTPRCEGTTKNLWPTL

SEQ ID NO: 1025381 - protein, 142 aa, Homo sapiens; identical to SEQ ID NO: 760521

SEQ ID NO: 1025382 - protein, 334 aa, Homo sapiens
MPKRRDILAIVLIVLPWTLLITVWHQSTLAPLLAVHKDEGSDPRRETPPGADPREYCTSDRDIVEVVRTEYVYTRPPPWSDTLPTIHVVTPTYSRPVQKAELTRMANTLLHVPNLHWLVVEDAPRRTPLTARLLRDTGLNYTHLHVETPRNYKLRGDARDPRIPRGTMQRNLALRWLRETFPRNSSQPGVVYFADDDNTYSLELFEEMRSTRRVSVWPVAFVGGLRYEAPRVNGAGKVVRWKTVFDPHRPFAIDMAGFAVNLRLILQRSQAYFKLRGVKGGYQESSLLRELVTLNDLEPKAANCTKILVWHTRTEKPVLVNEGKKGFTDPSVEI

SEQ ID NO: 1025383 - protein, 133 aa, Homo sapiens
  misc_feature (9)..(9): Xaa can be any naturally occurring amino acid
FPPLHARRXGFGIISQSTQLALKLSVVLLAPGPSVLTAARQTPAAKMVKQIESKTAFQEALDAAGDKLEVVDFSPTWCGPCKLLKPFFHSLSEKDFNGIFLEVDVDDCHDVASECEVCMPTFQYCKNGPKEPE

SEQ ID NO: 1025384 - protein, 65 aa, Homo sapiens
MVRKPGRQLQEGAEEKERRASKAAGGRAQWLTPGIPALWEAEAGGSRGQEIETILANTVKPPSLL

SEQ ID NO: 1025385 - protein, 68 aa, Homo sapiens
MEPAREQGGSLEHKLYLCPSELLGNMMRPHGNGILHITQAVLGVRQTGLSRAVCMQQLVHCSGPVDHF

SEQ ID NO: 1025386 - protein, 68 aa, Homo sapiens; identical to SEQ ID NO: 1025385

SEQ ID NO: 1025387 - protein, 181 aa, Homo sapiens
MNPRKKVDLKLIIVGAIGVGKTSLLHQYVHKTFYEEYQTTLGASILSKIIILGDTTLKLQIWDTGGQERFRSMVSTFYKGSDGCILAFDVTDLESFEALDIWRGDVLAKIVPMEQSYPMVLLGNKIDLADRKVPQEVAQGLVVEEKDIPYFEVSAKNDINGGAKRLRCWPHKGSDGGTRAS

SEQ ID NO: 1025388 - protein, 68 aa, Homo sapiens; identical to SEQ ID NO: 1025385

SEQ ID NO: 1025389 - protein, 68 aa, Homo sapiens; identical to SEQ ID NO: 1025385

SEQ ID NO: 1025390 - protein, 135 aa, Homo sapiens
  misc_feature (4)..(4): Xaa can be any naturally occurring amino acid
EFPXFENRTLILTPVYTRNETGPYECEIRDRDVGMNSDPVTLNVLYGPDLPSIYPSFTYYRSGENLYLILFAESNPPEEYFWTINGKFQKSGQKLSIPQITTKHRGLYTRSVRHSATGKESSKSITVASLCSFRI

SEQ ID NO: 1025391 - protein, 229 aa, Homo sapiens
ELGPSMAPEEHYRRLVSALSEASTFEDPQRLYHLGLPSHGEDPPWHDPPHHLPSHDLLRVRQEVAAAALRGPSGLEAHLPSSTAGQRRKQGLAQHREGAAPAAAPSFSERELPQPPPLLSPQNAPHVALGPHLRPPFLGVPSALCQTPGYGFLPPAQAEMFARQQELLRKQNLARLELPDDSCGRRSWRARAHSCWRPRPPAPQRRRRGAAAARGLLVLNHGAEPLLAL

SEQ ID NO: 1025392 - protein, 242 aa, Homo sapiens
  misc_feature (219)..(219): Xaa can be any naturally occurring amino acid
  misc_feature (221)..(221): Xaa can be any naturally occurring amino acid
  misc_feature (242)..(242): Xaa can be any naturally occurring amino acid
GQQGTNPYLTLHCVNQGTILLDLAPEDKEYQSVEEEMQSTIREHRDGGNAGGIFNRYNVIRIQKVVNKKLRERFCHRQKEVSEENHNHHNERMLFHGSPFINAIIHKGFDERHAYIGGMFGAGIYFAENSSKSNQYVYGIGGGTGCPTHKDRSCYICHRQMLFCRVTLGKSFLQFSTMKMGPRASRAPLQSLVDRASMGWHMLEYVHLTEENRLTQSIXIXFTRSLKARSPFPRTATAAEQX

SEQ ID NO: 1025393 - protein, 89 aa, Homo sapiens
SCSQGGNRGRRLCCRIREAQRRHLHFTLSASEDAIRKQPRHSLFMDAHFQFNRGIPGARAPSKLCFTNSLRVWNYLPSSHDGPLSSRPS

SEQ ID NO: 1025394 - protein, 149 aa, Homo sapiens
  misc_feature (146)..(146): Xaa can be any naturally occurring amino acid
GKNRLIFPVREGALGVVWVVPSSSSMVWQVLEGLSQDSAKRLRFVAGVIFVDEGAACGQSLEERSKTLAEVKPILQATGFPWHVVALEEVFSLPPSVLWCSAQELVGSEGAYKAAVDMLPPDSSHVLEVHAEVCPGAELKGRNSHXSPR

SEQ ID NO: 1025395 - protein, 582 aa, Homo sapiens [sequence omitted]

SEQ ID NO: 1025396 - protein, 108 aa, Homo sapiens
SCRIMRAWLFQHLTHPYPSEEQKKQLAQDTGLTILQVNNWFINARRRIVQPMIDQSNRAVSQGAAYSPEGQPMGSFVLDGQQHMGIRPAGPMSGMGMNMGMDGQWHYM

SEQ ID NO: 1025397 - protein, 108 aa, Homo sapiens; identical to SEQ ID NO: 1025396

SEQ ID NO: 1025398 - protein, 108 aa, Homo sapiens; identical to SEQ ID NO: 1025396

SEQ ID NO: 1025399 - protein, 106 aa, Homo sapiens
MVSNTWGSGLLAEHARGLRFSGWSYGNEYGTAKLHSSPDDPTPYSIKTWTPNAFIFAKPSPPPSHDDARRTPYPPWNDYVSTEPHNVKFCRSQCWRTGYGHSCPIV

SEQ ID NO: 1025400 - protein, 110 aa, Homo sapiens
MFRNLTRFLFPSLFSGLQSMPGDYVSQGGPMGMSMAQPSYTPPQMTPHPTQLRHGPPMHSYLPSHPHHPAMMMHGGPPTHPGMTMSAQSPTMLNSVDPNVGGQVMDIHAQ

SEQ ID NO: 1025401 - protein, 205 aa, Homo sapiens
LAHVADRVDTFKAFSKKMDDSVLQLSTVASELVRKHVGGFRKEFQKLGSAFQANQSFLPDWTPPFALRPYNSAISHTGRTYEAIGEMFAEQPKNDLFQMLDTLSLYQGLLSNFPDIIHLQKGAFAKVKESQRMSDEGRMVQDEADGIRRRCRVVGFALQAEMNHFHQRRELDFKHMMQNYLRQQILFYQRVGQQLEKTLRMYDNL

SEQ ID NO: 1025402 - protein, 205 aa, Homo sapiens; identical to SEQ ID NO: 1025401

SEQ ID NO: 1025403 - protein, 904 aa, Homo sapiens
MDRYLLLVIWGEGKFPSAASREAEHGPEVSSGEGTENQPDFTAANVYHLLKRSISASINPEDSTFPACSVGGIPGSKKWFFAVQAIYGFYQFCSSDWQEIHFDTEKDKIEDVLQTNIEECLGAVECFEEEDSNSRESLSLADLYEEAAENLHQLSDKLPAPGRAMVDIILLLSDKDPPKLKDYLPTVGALKHLREWYSAKITIAGNHCEINCQKIAEYLSANVVSLEDLRNVIDSKELWRGKIQIWERKFGFEISFPEFCLKGVTLKNFSTSNLNTDFLAKKIIPSKDKNILPKVFHYYGPALEFVQMIKLSDLPSCYMSDIEFELGLTNSTKQNSVLLLEQISSLCSKVGALFVLPCTISNILIPPPNQLSSRKWKEYIAKKPKTISVPDVEVKGECSSYYLLLQGNGNRRCKATLIHSANQINGSFALNLIHGKMKTKTEEAKLSFPFDLLSLPHFSGEQIVQREKQLANVQVLALEECLKRRKLAKQPETVSVAELKSLLVLTRKHFLDYFDAVIPKMILRKMDKIKTFNILNDFSPVEPNSSSLMETNPLEWPERHVLQNLETFEKTKQKMRTGSLPHSSEQLLGHKEGPRDSITLLDAKELLKYFTSDGLPIGDLQPLPIQKGEKTFVLTPELSPGKLQVLPFEKASVCHYHGIEYCLDDRKALERDGGFSELQSRLIRYETQTTCTRESFPVPTVLSPLPSPVVSSDPGSVPDGEVLQNELRTEVSRLKRRSKDLNCLYPRKRLVKSESSESLLSQTTGNSNHYHHHVTSRKPQTERSLPVTCPLVPIPSCETPKLATKTSSGQKSMHESKTSRQIKESRSQKHTRILKEVVTETLKKHSITETHECFTACSQRLFEISKFYLKDLKTSRGLFEEMKKTANNNAVQVIDWVLEKTSKK

SEQ ID NO: 1025404 - protein, 904 aa, Homo sapiens; identical to SEQ ID NO: 1025403

SEQ ID NO: 1025405 - protein, 271 aa, Homo sapiens
MDRYLLLVIWGEGKFPSAASREAEHGPEVSSGEGTENQPDFTAANVYHLLKRSISASINPEDSTFPACSVGGIPGSKKWFFAVQAIYGFYQFCSSDWQEIHFDTEKDKIEDVLQTNIEECLGAVECFEEEDSNSRESLSLADLYEEAAENLHQLSDKLPAPGRAMVDIILLLSDKDPPKLKDYLPTVGALKHLREWYSAKITIAGNHCEINCQKIAEYLSANVVSLEDLRNVIDSKELWRGKIQIWERKVNGLFTVCQVGLSILFTTQIFK

SEQ ID NO: 1025406 - protein, 163 aa, Homo sapiens
MDRYLLLVIWGEGKFPSAASREAEHGPEVSSGEGTENQPDFTAANVYHLLKRSISASINPEDSTFPACSVGGIPGSKKWFFAVQAIYGFYQFCSSDWQEIHFDTEKDKIEDVLQTNIEECLGAVECFEEEDSNSRESLSLAEYAYMVFVLSLKYLILDSYFNP

SEQ ID NO: 1025407 - protein, 196 aa, Homo sapiens
MDRYLLLVIWGEGKFPSAASREAEHGPEVSSGEGTENQPDFTAANVYHLLKRSISASINPEDSTFPACSVGGIPGSKKWFFAVQAIYGFYQFCSSDWQEIHFDTEKDKIEDVLQTNIEECLGAVECFEEEDSNSRESLSLADLYEEAAENLHQLSDKLPAPGRAMVDIILLLSDKDPPKLKDYLPTVGALKEIPKC

SEQ ID NO: 1025408 - protein, 202 aa, Homo sapiens
SLTRVIYGIMVPSLRLGKIPMKKIRATNCFGDNDPIDVCEIGSKILSCGEVIHVKILGILALIDEGETDWKLIAINANDPEASKFHDIDDVKKSNRGYLEATLNWFRLYKVPDGKPENQFAFNGEFKNKAFALEVIKSTHQCWKALLMKKCNGGAINCTNVQISDSPFRCTQEEARSLVESVSSSPNKESNEEEQVWHFLGK

SEQ ID NO: 1025409 - protein, 150 aa, Homo sapiens
  misc_feature (3)..(3): Xaa can be any naturally occurring amino acid
  misc_feature (14)..(14): Xaa can be any naturally occurring amino acid
  misc_feature (33)..(33): Xaa can be any naturally occurring amino acid
  misc_feature (40)..(40): Xaa can be any naturally occurring amino acid
PWXILGLETRTPFXNCQTFPAKNLGFPRKRKEXPKMLANXSRKIDWNAKLEGSQLRDYCAPPTLIRLLKCKRDSFPNFLACKQERHDWDYCEHRDYVMRMKEFERERRLLQRKKRREKKAARCLQRPGTRGSGPQGGPVRVHPPPYGPVK

SEQ ID NO: 1025410 - protein, 98 aa, Homo sapiens
  misc_feature (4)..(4): Xaa can be any naturally occurring amino acid
RLSXFIEAHGLKASSCRKPKIQIFNERPGKDPEKPEASMEVKGQKLIITRVLTEKTTEADLVFENGRYLAGLVYNMWKQDLLDWAITRDYSGGLVELI

SEQ ID NO: 1025411 - protein, 118 aa, Homo sapiens
MGTRILPDLCFVLLGLGIEVHGTQQAQQDEMPRPSFLTQVKESLSRYWESAKTRRHNLYEKTYLSAVDEKLKDLCTESTGAMSTYTGVFTGQGLSVLKGEEYQADPPSEGKGERALLP

SEQ ID NO: 1025412 - protein, 279 aa, Homo sapiens
GAQSAGMTGVSPVPGLVISLAVPNLPLIPSILSPTWSFLSPPSLPPDVVLSLTTQPTARRGPFPHHPAYRPTWSFPSPPSLPPDVVLSLTTQPAVGASVHGGLSESAFVLLSKTLGYEYERPQFFKEYYCLVVFISLRVSLGMGEHKTLPIRCRDYVTQQSSTNYTYFTMWKFCLEGEDGGLDSVLLQIVDVQDGLQIYGLHLANGSDLRPEVARLDFVRALESFPNVAWELQGMSCSTLEPPALQYYGIVLAKTIADFTPAIYAKANGSSESSLETIN

SEQ ID NO: 1025413 - protein, 265 aa, Homo sapiens
PTLERSPSPPSLPSDVSLSLTTHPTARRGHFSHHPAYRPTWSFPSPPSLPPDVVLSLTTQPTARRGPFRSPPSLPPDVVLSLTTQPAVGASVHGGLSESAFVLLSKTLGYEYERPQFYQRVLLSRGIHFSFVSLSVWASTKHYPSDVETMLPSSRPRNTAYFTIVEIPSSSASTEVSTLYCSRSWTCKIGLQIVWAPSDEGSDLRPEVARLDFVRALESFPNVAWELQGMSCSTLEPPALQYYGIVLAKTIADFTPAIYAKEWVL

SEQ ID NO: 1025414 - protein, 113 aa, Homo sapiens
  misc_feature (16)..(16): Xaa can be any naturally occurring amino acid
  misc_feature (33)..(33): Xaa can be any naturally occurring amino acid
  misc_feature (50)..(50): Xaa can be any naturally occurring amino acid
FALLQAQLRGTDAARXCRTSRLGRGSLCRRAEXFRDAFTQELRAAAELAXASHQVARGALAQTFNPGLCGAEALAFPSGLYSGINVEGSFRALRAASNPDWDCWPADIPRIRA

SEQ ID NO: 1025415 - protein, 105 aa, Homo sapiens
  misc_feature (20)..(20): Xaa can be any naturally occurring amino acid
  misc_feature (32)..(32): Xaa can be any naturally occurring amino acid
IVLFRLGDKKCNSVSTKRKXKAKTSTFFHHPXNIPPVLLSNPSSSWNPNLGTTHAFSVLGVLPFPECHGIITVCSGSCLASPARHDAPEIRVVVRVSRLLLFAAV

SEQ ID NO: 1025416 - protein, 143 aa, Homo sapiens
  misc_feature (16)..(16): Xaa can be any naturally occurring amino acid
  misc_feature (140)..(140): Xaa can be any naturally occurring amino acid
VENLLNGNETNFNNRXNSYEHELRNLNTTQLIGKFGPQKAKVVLTAIVIASHHRLRDRACLAQRHDNRTDHVDGTTWHAERDEQRRGRGMMSFVDHLPVLPVLLPALTAWLLLLIGDHGADAHGGHGHLKLLWGAPQALXPFS

SEQ ID NO: 1025417 - protein, 181 aa, Homo sapiens
MESTEDLILDDFKGKYWCFSCISFGFHHVSVLTEIVLLVTNANVLSDVNCEACRSSQMDSQVYTILTGKYTKKEWWYGPFMNIVLLSDLTKQISRDYGVLLEGSGLALRGLFIIDPNGVIKHLSVNDLPVGRSVEETLRLVKAFQYVETHGEVCPANWTPDSPTIKPSPAASKEYFQKVNQ

SEQ ID NO: 1025418 - protein, 132 aa, Homo sapiens
  misc_feature (21)..(21): Xaa can be any naturally occurring amino acid
  misc_feature (23)..(23): Xaa can be any naturally occurring amino acid
SDSIRYLMILSNKALEMSQNXLXKHEPKLQLKGYLLKNKKENKNNQNQVLEDTVTNAVCVCRIQVGPKVKLLAETGLPLLQTLLVTLAGAVSQWQMLSSPLSPEREIGGKACHTQRGRPKGSILSCVATTSW

SEQ ID NO: 1025419 - protein, 120 aa, Homo sapiens
WICWCSTTRLNRDMRKLQLKGYLLKNKKENKNNQNQVLEDTVTNAVCVCRIQVGPKVKLLAETGLPLLQTLLVTLAGAVSQWQMLSSPLSPEREIGGKACHTQRGRPKGSILSCVATTSW

SEQ ID NO: 1025420 - protein, 199 aa, Homo sapiens
  misc_feature (67)..(67): Xaa can be any naturally occurring amino acid
FPLTRHPLGLGNKDRAGRIHKSRRSRPSRPNTGETRSPGVLAAPCSPSHSGEQGQENRLNLGVGVCXPEIVPLHSSLAGLLGTVEVPGAPRVPSTRQTGIPGGLSAPLGFQTGAGRSGSRSRSWYSGGLADVAADRAGDAAGPGLCLRDLQKVSPRGRPRASLVSSVTLLLSSQKVVWEAGKAGLEECLVTEVQVVQKT

SEQ ID NO: 1025421 - protein, 407 aa, Homo sapiens
FVCMIPFIPYVQIQANPQRQKVDEWLPQAGEEEGRVFNGSGVSFWGRDNVHRFPSRSSSFCCEHQALEGASVLHYPQPSFTASPRCLTLLAVNNSYCQFGAISLCEVTNYTVRVANPPFSTWILFPENSGKPWAGAENLTCWIHDVDFLSCSWAVGPGAPADVQYDLYLNVANRRQQYECLHYKTDAQGTRIGCRFDDISRLSSGSQSSHILVRGRSAAFGIPCTDKFVVFSQIEILTPPNMTAKCNKTHSFMHWKMRSHFNRKFRYELQIQKRMQPVITEQVRDRTSFQLLNPGTYTVQIRARERVYEFLSAWSTPQRFECDQEEGANTRAWRTSLLIALGTLLALVCVFVICRRYLVMQRLFPRIPHMKDPIGDSFQNDKLVVWEAGKAGLEECLVTEVQVVQKT

SEQ ID NO: 1025422 - protein, 327 aa, Homo sapiens [sequence omitted]

SEQ ID NO: 1025423 - protein, 300 aa, Homo sapiens
MVLLWLTLLLIALPCLLQTKEGGKPWAGAENLTCWIHDVDFLSCSWAVGPGAPADVQYDLYLNVANRRQQYECLHYKTDAQGTRIGCRFDDISRLSSGSQSSHILVRGRSAAFGIPCTDKFVVFSQIEILTPPNMTAKCNKTHSFMHWKMRSHFNRKFRYELQIQKRMQPVITEQVRDRTSFQLLNPGTYTVQIRARERVYEFLSAWSTPQRFECDQEEGANTRAWRTSLLIALGTLLALVCVFVICRRYLVMQRLFPRIPHMKDPIGDSFQNDKLVVWEAGKAGLEECLVTEVQVVQKT

SEQ ID NO: 1025424 - protein, 284 aa, Homo sapiens
MFVNPGGKPWAGAENLTCWIHDVDFLSCSWAVGPGAPADVQYDLYLNVANRRQQYECLHYKTDAQGTRIGCRFDDISRLSSGSQSSHILVRGRSAAFGIPCTDKFVVFSQIEILTPPNMTAKCNKTHSFMHWKMRSHFNRKFRYELQIQKRMQPVITEQVRDRTSFQLLNPGTYTVQIRARERVYEFLSAWSTPQRFECDQEEGANTRAWRTSLLIALGTLLALVCVFVICRRYLVMQRLFPRIPHMKDPIGDSFQNDKLVVWEAGKAGLEECLVTEVQVVQKT

SEQ ID NO: 1025425 - protein, 378 aa, Homo sapiens
MVLLWLTLLLIALPCLLQTKEDPNPPITNLRMKAKAQQLTWDLNRNVTDIECVKDADYSMPAVNNSYCQFGAISLCEVTNYTVRVANPPFSTWILFPENSGKPWAGAENLTCWIHDVDFLSCSWAVGPGAPADVQYDLYLNVANRRQQYECLHYKTDAQGTRIGCRFDDISRLSSGSQSSHILVRGRSAAFGIPCTDKFVVFSQIEILTPPNMTAKCNKTHSFMHWKMRSHFNRKFRYELQIQKRMQPVITEQVRDRTSFQLLNPGTYTVQIRARERVYEFLSAWSTPQRFECDQEEGANTRAWRTSLLIALGTLLALVCVFVICRRYLVMQRLFPRIPHMKDPIGDSFQNDKLVVWEAGKAGLEECLVTEVQVVQKT

SEQ ID NO: 1025426 - protein, 243 aa, Homo sapiens
MVNPPTTTNTGASLKGGALPQQGRVTSQHLFFHFACVLASLQVMMTLTNWYTARVDPKMISTWPAVWVKDLCQLGRAAPLPVDPGSPTPPAQPRLQLRQPHSLPSGASCHLVPLGSVKANPGPSPQPISQGSPPTPAPAPGPAPEPGLLVVVPSGSEEHQAPAEPHPPRHTHTVELPLPSPPPCCPYSASRMKGLPCPQAPRERGCWRERGTPTTVGHPALKPWCSWSRPPGDPAPFLDFVPY

SEQ ID NO: 1025427 - protein, 192 aa, Homo sapiens
MVNPPTTTNTGASLKGGALPQQGRVTSQHLFFHFACVLASLQVMMTLTNWYTARVDPKMISTWPAVWVKDLCQLGRAAPLPVDPGSPTPPAQPRLQLRQPHSLPSGASCHLVPLGSVKANPAASSFPSSLLPILSISDERAPLSSGSTGAGLLERAGNSHHSGASGTEALVFLVTSPRGPCPLPGLRALLSL

SEQ ID NO: 1025428 - protein, 185 aa, Homo sapiens
MVNPPTTTNTGASLKGGALPQQGRVTSQHLFFHFACVLASLQVMMTLTNWYTARVDPEDDQHVARRVGERSVPAGQGCSFTCGPAPEPGLLVVVPSGSEEHQAPAEPHPPRHTHTVELPLPSPPPCCPYSASRMKGLPCPQAPRERGCWRERGTPTTVGHPALKPWCSWSRPPGDPAPFLDFVPY

SEQ ID NO: 1025429 - protein, 31 aa, Homo sapiens
MCHHARLIFVFLVETGFHHVGQAGLEFLTSS

SEQ ID NO: 1025430 - protein, 116 aa, Homo sapiens
MSTEKVCYPRFLSAEAIGIMRRLLRRNPERRLGSSERDAEDVKKQPFFRTLGWEALLARGLPPPFVPTLSGRTDVSNFDEEFTGEAPTLSPPRDGRPLTAAEQAAFLDFDFVAGGC

SEQ ID NO: 1025431 - protein, 190 aa, Homo sapiens
DPRLSFTRQSFVDRSLLTLLGHCSLDALREFFSTIVVDAIDVLKSRFTKLNESTFDTQITKKMGYYKILDVMYSRLPKDDVHAKESKINQVFHGSCITEGNELTKTLIKLCYDAFTENMAGENQLLERRRLYHCAAYNCAISVICCVFNELKFYQGFLFSEKPEKNLLIFENLIDLKRRYNFPVEVEVPM

SEQ ID NO: 1025432 - protein, 172 aa, Homo sapiens
  misc_feature (36)..(36): Xaa can be any naturally occurring amino acid
FLTVKILSVYRILSIKFDIFYKIYFMFNKTKDNYFXTFLKLNESTFDTQITKKMGYYKILDVMYSRLPKDDVHAKESKINQVFHGSCITEGNELTKTLIKLCYDAFTENMAGENQLLERRRLYHCAAYNCAISVICCVFNELKFYQGFLFSEKPEKNLLIFENLSNPDAAGW

SEQ ID NO: 1025433 - protein, 51 aa, Homo sapiens
MAGRKPRRCAHTFARRATRTVAGQGMRRSASGALPRDEKTSGWFLDRERKR

SEQ ID NO: 1025434 - protein, 458 aa, Homo sapiens
MALKVATVAGSAERVLLGPALLCRPWEVLGAHEVPSRNIFSEQTIPPSAKYGGRHTVTMIPGDGIGPELMLHCSSSVFRHACVPVDFEEVHVSSNADEEDIRNAIMAIRRNRVAELMLHVKSVFRHACVPVDFEEVHVSSNADEEDIRNAIMAIRRNRVALKGNIETNHNLPPSHKSRNNILRTSLDLYANVIHCKSLPGVVTRHKDIDILIVRENTEGEYSSLEHESVAGVVGEALKDHHQMAKSLRSWQSMPFQLAQEELGAEKVTAVAQGPHHVCPLTSLRAVQKQLQWPAWACSEGFGGPKAQLATRGAHRQASAPVALVGLAENPHLGEVGWDSVHFAGEGQVRIQTPETPWGPSVTPLSRPADCYLMGKLVSYSSAPNRKLGDGLLLQCCKEGGGAASLRYTFENMTVDSNTMQVLRLSSAVTPDLSALGFSQPCFRICSSARPLLVRSWCP

SEQ ID NO: 1025435 - protein, 318 aa, Homo sapiens
MRQISGVESNLEQIEVAKLDGTLRTTLLAGDIEHPRAIALDPRDGILFWTDWDASLPRIEAASMSGAGRRTVHRETGSGGWPNGLTVDYLEKRILWIDARSDAIYSARYDGSGHMEVLRGHEFLSHPFAVTLYGGEVYWTDWRTNTLAKANKWTGHNVTVVQRTNTQPFDLQVYHPSRQPMAPNPCEANGGQGPCSHLCLINYNRTVSCACPHLMKLHKDNTTCYEFKKFLLYARQMEIRGVDLDAPYYNYIISFTVPDIDNVTVLDYDAREQRVYWSDVRTQAIKRAFINGTGVETVVSADLPNAHGLAVDWVSRNL

SEQ ID NO: 1025436 - protein, 89 aa, Homo sapiens
AGRGGRNMAQALSEEEFQRMQAQLLELRTNNYQLSDELRKNGVELTSLRQKVAYLDKEFSKAQKVPPSTHPSTYPSTLASTYLTHSSLQ

SEQ ID NO: 1025437 - protein, 135 aa, Homo sapiens
AGRGGRNMAQALSEEEFQRMQAQLLELRTNNYQLSDELRKNGVGEPGGPYYKGVALGNGVRGFPSEAWQEGLSVSCHWLRLSFPAFPTPELTSLRQKVAYLDKEFSKAQKVPPSTHPSTYPSTLASTYLTHSSLQ

SEQ ID NO: 1025438 - protein, 219 aa, Homo sapiens
AGRGGRNMAQALSEEEFQRMQAQLLELRTNNYQLSDELRKNGVELTSLRQKVAYLDKEFSKAQKALSKSKKAQEVEVLLSENEMLQAKLHSQEEDFRLQNSTLMAEFSKERYGKEAGKFSAVSEGQGDPPGGPAPTVLAPMPLAEVELKWEMEKEEKRLLWEQLQGLESSKQAETSRLQEELAKLSEKLKKKPESLAVCRQKRRLCLMTAGTRLRNYNR

SEQ ID NO: 1025439 - protein, 133 aa, Homo sapiens
MAQALSEEEFQRMQAQLLELRTNNYQLSDELRKNGVGEPGGPYYKGVALGNGVRGFPSEAWQEGLSVSCHWLRLSFPAFPTPELTSLRQKVAYLDKEFSKAQKALSKSKKAQVRGSLVGECDWEMSWWAISVC

SEQ ID NO: 1025440 - protein, 272 aa, Homo sapiens
AGRGGRNMAQALSEEEFQRMQAQLLELRTNNYQLSDELRKNGVELTSLRQKVAYLDKEFSKAQKALSKSKKAQEVEVLLSENEMLQAKLHSQEEDFRLQNSTLMAEFSKLCSQMEQLEQENQQLKEGAAGAGVAQAGPLVDGELLRLQAENTALQKNVAALQERYGKEAGKFSAVSEGQGDPPGGPAPTVLAPMPLAEVELKWEMEKEEKRLLWEQLQGLESSKQAETSRLQEELAKLSEKLKKKPESLAVCRQKRRLCLMTAGTRLRNYNR

SEQ ID NO: 1025441 - protein, 198 aa, Homo sapiens
MGIKRIVKYMDKCYVGFSKYCSDSLLLCPFSSSVQLCSQMEQLEQENQQLKEGAAGAGVAQAGPLVDGELLRLQAENTALQKNVAALQERYGKEAGKFSAVSEGQGDPPGGPAPTVLAPMPLAEVELKWEMEKEEKRLLWEQLQGLESSKQAETSRLQEELAKLSEKLKKKPESLAVCRQKRRLCLMTAGTRLRNYNR

SEQ ID NO: 1025442 - protein, 122 aa, Homo sapiens
MTLSICVGGPFAPRHALKDFEGLRYNLVLSCEPRAKLLAARPVFCASGFGFHIPNRTQNPKRQLEEQWRVVAKIMDLGQTAWVHITAPLTNSVTFGRFLNLSVPSSSSVKWGLYSIYLLRLC

SEQ ID NO: 1025443 - protein, 322 aa, Homo sapiens
  misc_feature (3)..(3): Xaa can be any naturally occurring amino acid
  misc_feature (158)..(158): Xaa can be any naturally occurring amino acid
FFXFSRAIFYFLKVLKVIHLSKDDGCPSSQTISFSLSANPAAPKGLTLSEVVTSEPGPPHPTGWDVARLLQRPGGMVAWTSLWGQESVSMWAVTVDGGSKGRVLGRLWDGHNLVYGEITLFHQVSSNVSGLSHRNHFLGKFSEGTQIWKYHWITAGIXVQRLEPSPSWINGWDTQTWSRKALVLHHQKRRDTQGGDKAQGLAFYSKAQKSPRPEYGCWEPPRVNDTGWVGTIKPGKTKKSTSQCVHEKWLPRRNGEGGLRGRAGNECNTQTKGWKKRGPRGKQWVRGERRLHPPLHDFGTARGRREHNETTGMTTRRIENEN

SEQ ID NO: 1025444 - protein, 360 aa, Homo sapiens
MEDFNMESDSFEDFWKGEDLSNYSYSSTLPPFLLDAAPCEPESLEINKYFVVIIYALVFLLSLLGNSLVMLVILYSRVGRSVTDVYLLNLALADLLFALTLPIWAASKVNGWIFGTFLCKVVSLLKEVNFYSGILLLACISVDRYLAIVHATRTLTQKRYLVKFICLSIWGLSLLLALPVLLFRRTVYSSNVSPACYEDMGNNTANWRMLLRILPQSFGFIVPLLIMLFCYGFTLRTLFKAHMGQKHRAMRVIFAVVLIFLLCWLPYNLVLLADTLMRTQVIQETCERRNHIDRALDATEILGILHSCLNPLIYAFIGQKFRHGLLKILAIHGLISKDSLPKDSRPSFVGSSSGHTSTTL

SEQ ID NO: 1025445 - protein, 360 aa, Homo sapiens; identical to SEQ ID NO: 1025444

SEQ ID NO: 1025446 - protein, 360 aa, Homo sapiens; identical to SEQ ID NO: 1025444

SEQ ID NO: 1025447 - protein, 360 aa, Homo sapiens; identical to SEQ ID NO: 1025444

SEQ ID NO: 1025448 - protein, 360 aa, Homo sapiens; identical to SEQ ID NO: 1025444

SEQ ID NO: 1025449 - protein, 360 aa, Homo sapiens; identical to SEQ ID NO: 1025444

SEQ ID NO: 1025450 - protein, 149 aa, Homo sapiens
MLFSALLLEVIWILAADGGQHWTYEGPHGQDHWPASYPECGTQCPGLPIDIQTDSVTFDPDLPALQPHGYDQPGTEPLDLHNNGHTVQLSLPSTLYLGGLPRKYVAAQLHLHWGQKGSPGGSEHQINSEATFAELHIVHYDSDSYDSLS

SEQ ID NO: 1025451 - protein, 96 aa, Homo sapiens
  misc_feature (23)..(23): Xaa can be any naturally occurring amino acid
  misc_feature (27)..(27): Xaa can be any naturally occurring amino acid
  misc_feature (78)..(78): Xaa can be any naturally occurring amino acid
GPALSLRAANRSDLDEREASCEXKFAXNGIVHDVDVLGAGIRLVTLLVDRDGLYKMNRLYLTPDGFFFRVHMLALDFXSCNKPCPEFKPGIETDLE

SEQ ID NO: 1025452 - protein, 110 aa, Homo sapiens
  misc_feature (74)..(74): Xaa can be any naturally occurring amino acid
HESTGLRTAEEPDAAGALTFACRFGATGRDRPLLGAGSGGWNRPFPLGLVREGAGPILQAAACLRRSTGRHWLXWWEPVMKLVFLGRKEDHAAANFLPVSPSRPNRNFAG

SEQ ID NO: 1025453 - protein, 221 aa, Homo sapiens
GTRHLECEIQLLKNLLHERIVQYYGCLRDPQEKTLSIFMEYMPGGSIKDQLKAYGALTENVTRKYTRQILEGVHYLHSNMIVHRDIKGANILRDSTGNVKLGDFGASKRLQTICLSGTGMKSVTGTPYWMSPEVISGEGYGRKADIWSVACTVVEMLTEKPPWAEFEAMAAIFKIATQPTNPKLPPHVSDYTRDFLKRIFVEAKLRPSADELLRHMFVHYH

SEQ ID NO: 1025454 - protein, 221 aa, Homo sapiens; identical to SEQ ID NO: 1025453

SEQ ID NO: 1025455 - protein, 112 aa, Homo sapiens
METESGNQEKVMEEESTEKKKEVEKKKRSRVKQVLADIAKQVDFWFGDANLHKDRFLREQIEKSRDGYVDISLLVSFNKMKKLTTDGKLIARALRSSAVVEVRIKNNYCLYL

SEQ ID NO: 1025456 - protein, 223 aa, Homo sapiens
METESGNQEKVMEEESTEKKKEVEKKKRSRVKQVLADIAKQVDFWFGDANLHKDRFLREQIEKSRDGYVDISLLVSFNKMKKLTTDGKLIARALRSSAVVELDLEGTRIRRKKPLGERPKDEDERTVYVELLPKNVNHSWIERVFGKCGNVVYISIPHYKSTGDPKGFAFVEFETKEQAAKAIEFLNNPPEEAPRKPGIFPKTVKNKPIPALRVVGEYFSIFK

SEQ ID NO: 1025457 - protein, 400 aa, Homo sapiens
METESGNQEKVMEEESTEKKKEVEKKKRSRVKQVLADIAKQVDFWFGDANLHKDRFLREQIEKSRDGYVDISLLVSFNKMKKLTTDGKLIARALRSSAVVELDLEGTRIRRKKPLGERPKDEDERTVYVELLPKNVNHSWIERVFGKCGNVVYISIPHYKSTGDPKGFAFVEFETKEQAAKAIEFLNNPPEEAPRKPGIFPKTVKNKPIPALRVVEEKKKKKKKKGRMKKEDNIQAKEENMDTSNTSISKMKRSRPTSEGSDIESTEPQKQCSKKKKKRDRVEASSLPEVRTGKRKRSSSEDAESLAPRSKVKKIIQKDIIKEASEASKENRAPCLNGSSFFIYSPSISANLYVQEANRLLADLKSLALSWHTTQRNTISTQQHTSSSTLHNGTTQLIPN

SEQ ID NO: 1025458 - protein, 381 aa, Homo sapiens
MRSYQPESGKQFQNVLADIAKQVDFWFGDANLHKDRFLREQIEKSRDGYVDISLLVSFNKMKKLTTDGKLIARALRSSAVVELDLEGTRIRRKKPLGERPKDEDERTVYVELLPKNVNHSWIERVFGKCGNVVYISIPHYKSTGDPKGFAFVEFETKEQAAKAIEFLNNPPEEAPRKPGIFPKTVKNKPIPALRVVEEKKKKKKKKGRMKKEDNIQAKEENMDTSNTSISKMKRSRPTSEGSDIESTEPQKQCSKKKKKRDRVEASSLPEVRTGKRKRSSSEDAESLAPRSKVKKIIQKDIIKEASEASKENRAPCLNGSSFFIYSPSISANLYVQEANRLLADLKSLALSWHTTQRNTISTQQHTSSSTLHNGTTQLIPN

SEQ ID NO: 1025459 - protein, 123 aa, Homo sapiens
MKKLTTDGKLIARALRSSAVVELDLEGTRIRRKKPLGERPKDEDERTVYVELLPKNVNHSWIERVFGKCGNVVYISIPHYKSTGDPKGFAFVEFETKEQAAKAIEVSPDPKKKKRKKRNQVLK

SEQ ID NO: 1025460 - protein, 205 aa, Homo sapiens
  misc_feature (194)..(194): Xaa can be any naturally occurring amino acid
METESGNQEKVMEEESTEKKKEVEKKKRSRVKQVLADIAKQVDFWFGDANLHKDRFLREQIEKSRDGYVDISLLVSFNKMKKLTTDGKLIARALRSSAVVELDLEGTRIRRKKPLGERPKDEDERTVYVELLPKNVNHSWIERVFGKCGNVVYISIPHYKSTGDPKGFAFVEFETKEQAAKAIEFLKTTEEHRXLDILKGKIGIS

SEQ ID NO: 1025461 - protein, 468 aa, Homo sapiens
METESGNQEKVMEEESTEKKKEVEKKKRSRVKQVLADIAKQVDFWFGDANLHKDRFLREQIEKSRDGYVDISLLVSFNKMKKLTTDGKLIARALRSSAVVELDLEGTRIRRKKPLGERPKDEDERTVYVELLPKNVNHSWIERVFGKCGNVVYISIPHYKSTGDPKGFAFVEFETKEQAAKAIEFLNNPPEEAPRKPGIFPKTVKNKPIPALRVVEEKKKKKKKKGRMKKEDNIQAKEENMDTSNTSISKMKRSRPTSEGSDIESTEPQKQCSKKKKKRDRVEASSLPEVRTGKRKRSSSEDAESLAPRSKVKKIIQKDIIKEASEASKENRDIEISTEEEKDTGDLKDSSLLKTKGNHRKNHKRDINAEKKYTIKSVIKSDGGFDTSFSVQKLLLLKKDSQLIRGGLDAVGPKLGEDGKRREGAPEYVRPSLVVGYKSLCGNRFAPHLCRKLITQGKNKLAMGGATH

SEQ ID NO: 1025462 - protein, 202 aa, Homo sapiens
METESGNQEKVMEEESTEKKKEVEKKKRSRVKQVLADIAKQVDFWFGDANLHKDRFLREQIEKSRDGYVDISLLVSFNKMKKLTTDGKLIARALRSSAVVELDLEGTRIRRKKPLGERPKDEDERTVYVELLPKNVNHSWIERVFGKCGNVVYISIPHYKSTGDPKGFAFVEFETKEQAAKAIEVSPDPKKKKRKKRNQVLK

SEQ ID NO: 1025463 - protein, 389 aa, Homo sapiens
MEEESTEKKKEVEKKKRSRVKQVLADIAKQVDFWFGDANLHKDRFLREQIEKSRDGYVDISLLVSFNKMKKLTTDGKLIARALRSSAVVELDLEGTRIRRKKPLGERPKDEDERTVYVELLPKNVNHSWIERVFGKCGNVVYISIPHYKSTGDPKGFAFVEFETKEQAAKAIEFLNNPPEEAPRKPGIFPKTVKNKPIPALRVVEEKKKKKKKKGRMKKEDNIQAKEENMDTSNTSISKMKRSRPTSEGSDIESTEPQKQCSKKKKKRDRVEASSLPEVRTGKRKRSSSEDAESLAPRSKVKKIIQKDIIKEASEASKENRAPCLNGSSFFIYSPSISANLYVQEANRLLADLKSLALSWHTTQRNTISTQQHTSSSTLHNGTTQLIPN

SEQ ID NO: 1025464 - protein, 123 aa, Homo sapiens; identical to SEQ ID NO: 1025459

SEQ ID NO: 1025465 - protein, 225 aa, Homo sapiens
  misc_feature (209)..(209): Xaa can be any naturally occurring amino acid
METESGNQEKVMEEESTEKKKEVEKKKRSRVKQVLADIAKQVDFWFGDANLHKDRFLREQIEKSRDGYVDISLLVSFNKMKKLTTDGKLIARALRSSAVVELDLEGTRIRRKKPLGERPKDEDERTVYVELLPKNVNHSWIERVFGKCGNVVYISIPHYKSTGDPKGFAFVEFETKEQAAKAIEFLHPTERQIPDILTGNSISRVEKKXERSMKSIQQRTARHVV

SEQ ID NO: 1025466 - protein, 400 aa, Homo sapiens; identical to SEQ ID NO: 1025457

SEQ ID NO: 1025467 - protein, 157 aa, Homo sapiens
MRKKVFAAHVGGSGPSASYWLMWSEPAHPLTESSVYLRLTESVPSFCVAWKQTVRLLTSDRVSHWSAFPEARPSVSGSPAQAGSADGVRVHSGQCDSAVLGCSAKRPPDVGRWRVSSVESWPSASAAGKSAIATAGTRTGCVPALPHPSTGLRGRPH

SEQ ID NO: 1025468 - protein, 1023 aa, Homo sapiens
MTIATCAKCKSVHKISLQDLQKGTGKDGMYVCFQCSLGAAPPNFHFVSNNPSATHVGNKTENFSSSVNSKFKVRNFKPGKYYCDKCRFSTKDPLQYKKHTLQHEEIKFICSHCSYISYTKGEFQRHLVKHTGIFPYQCEYCDYGAIRNDYIVKHTKRVHERAGAKRPVKAVAKLEPKRTGTSKQNPELLKASNPRTTFQNKWSDQLSGFSLHANKDKMHNIMLLPEPKEYQKDVVCIPNKMTLSEPNEVNLFENKNVEVEVLSPAKEPVQPGMPLTVVAPAELVVPANCLAQLIDVKVVNGTQQLVLKLFPLEENNCLEAGRDNGGNSERMVKEKGSNEQEKVLSAEKTKSLTVDGNVGKLVGIDSFQPSVQKQLKNVKWVRSYDFIMPNSSVHNNGKSFINSETIEDFQKKNNLYPHRTAFPSVALKGHSLASVFKNSVLRSLGAASNPFPYKAAVCFAESGRNLHSNSQQLLPFAASPATCSFSGEKGLLPVSENDLESTSKVNIPVKVVSSNRKQEDNQTEEHKAVSTVGQISSQHKSEYLHINITGEDRSQQPGDKPLELKNSERTNNTNDGPVISSVFSLSSGSENVPEGIKWNSSTSKIKSIELLRRKIAQLIESCGKPSSLASNSAHRRSVGQASKGTSKATSEGIQEINVSLTGLGHSTGTLQKPPNDGGITGNRQLTHQQIYPHFADGSNRKTKSRVVQEAHVATPVLIPKGAVLRVLNSSENAHIIEATCEAPVSIPCSERQLIKPIPFCPVRQADSDLQPLRSERGPIDMSPNIETPLRPKLRKESAVCSTIHRKTGLLYGQQGSSELNKQGRLLSRSLSISRNKTKQVHLSRKKNKIQAEPSRCLKDPSIFQVARQLRLIAAKPDQLIKCPRRNQPVIVLNHPDVDSPEVTNVMKVINKYKGNVLKVVLSERTRCQLGIRRHHVRLTYQNAEEASQIKRQMMLKMKLKNVSPLNQRNYQVVDSLPDDSSQCVFKCWSCGRLYEDQEEWMSHGQRHLIEATRDWDVLSSKGK

SEQ ID NO: 1025469 - protein, 1023 aa, Homo sapiens; identical to SEQ ID NO: 1025468

SEQ ID NO: 1025470 - protein, 160 aa, Homo sapiens
MEEGSSSPVSPVDSLGTSEEELERQPKRFGRKRRYSKKSSEDGSPTPGKRGKKGSPSAQSFEELQSQRILANVRERQRTQSLNEAFAALRKIIPTLPSDKLSKIQTLKLAARYIDFLYQVLQSDEMDNKMTSCSYVAHERLSYAFSVWRMEGAWSMSASH

SEQ ID NO: 1025471 - protein, 160 aa, Homo sapiens; identical to SEQ ID NO: 1025470

SEQ ID NO: 1025472 - protein, 94 aa, Homo sapiens
SAVDSSRQRLTHFSAFSSLETQPSAARNPTAPSGLHGANVPSLSCPQAACSEGLTHSQTAFMAALSTGQGEAPGWLSVASAAQVELGCIRVCNF

SEQ ID NO: 1025473 - protein, 507 aa, Homo sapiens
MEEPAAPSEAHEAAGAQAGAEAAREGVSGPDLPVCEPSGESAAPDSALPHAARGWAPFPVAPVPAHLRRGGLRPAPASGGGAWPSPLPSRSSGIWTKQIICRYYIHGQCKEGENCRYSHDLSGRKMATEGGVSPPGASAGGGPSTAAHIEPPTQEVAEAPPAASSLSLPVIGSAAERGFFEAERDNADRGAAGGAGVESWADAIEFVPGQPYRGRWVASAPEAPLQSSETERKQMAVGSGLRFCYYASRGVCFRGESCMYLHGDICDMCGLQTLHPMDAAQREEHMRACIEAHEKDMELSFAVQRGMDKVCGICMEVVYEKANPNDRRFGILSNCNHSFCIRCIRRWRSARQFENRIVKSCPQCRVTSELVIPSEFWVEEEEEKQKLIQQYKEAMSNKACRYFAEGRGNCPFGDTCFYKHEYPEGWGDEPPGPGGGSFSAYWHQLVEPVRMGEGNMLYKSIKKELVVLRLASLLFKRFLSLRDELPFSEDQWDLLHYELEEYFNLIL

SEQ ID NO: 1025474 - protein, 105 aa, Homo sapiens
MEEPAAPSEAHEAAGAQAGAEAAREGVSGPDLPVCEPSGESAAPDSALPHAARGWAPFPVAPVPAHLRRGGLRPAPASGGGAWPSPLPSRSSGIWTKQIICRDIC

SEQ ID NO: 1025475 - protein, 192 aa, Homo sapiens
MGSELETAMETLINVFHAHFGANEGGQIIKARVNEVIADRELLPDWSLIMAFPGIVTRSVNARYGKQESPSKSFLEVGTSNEVHIMFNCMLPSTLSHLLLLGSSDHRPLASGALVRVPVPVYDLPSCLLSPSLQGPVERMWTVCWIKGRVTSEPSTELDERRMAGSSHGGMLVAVWHASLQLAMVATFLTGE

SEQ ID NO: 1025476 - protein, 84 aa, Homo sapiens
TINKEDHTLGNIIKSQLLKDPQVLFAGYKVPHPLEHKIIIRVQTTPDYSPQEAFTNAITDLISELSLLEERFRVAIKDKQEGIE

SEQ ID NO: 1025477 - protein, 86 aa, Homo sapiens
  misc_feature (4)..(4): Xaa can be any naturally occurring amino acid
IGEXDNNFHHGETAYDMIPEFKYDLTYGNLAPRGPRIRNEGPDSPTVCPSLIRADKHHRTIDGTSRNSPHRTGLILRYCFSSVKKM

SEQ ID NO: 1025478 - protein, 321 aa, Homo sapiens
MSLDEPSFLRPSRGSRSAESLWMNCTACFIRRCCRSDAASRMSVSLRPPSVRSPEENIAEAPGGPGSPQPPGSLSLELLQRRKGPEPPPFIAERDVAGSSQCALRGAGPAQSPRPARLPRVPRPASRVPCSPGGKAGEEAAALVGTDPAVRESTAAFSPKLPLLRGGPASPGLGVGSGGPMPWKPRPSLPLAEGTCSPVNAVADPGITDSRAMPRSPAARAAARILRNAPPRRQPGLQVNRPGPEDWRLPPRLGALRISPTSGSVDGAHEIEKYRGTRYVCISKEFMVHAESGINDHNSSLHAEHVSSTVLPALYTRKHYV

SEQ ID NO: 1025479 - protein, 91 aa, Homo sapiens
  misc_feature (7)..(7): Xaa can be any naturally occurring amino acid
KKFGKLXSDCAKKGNPQNQGHMAKKVLNPLRKSCYASRMTSKAPLPTLSDLHCNKLHVDPENFLLLGNVILIVLATHFSEDFTLQIQASWQ

SEQ ID NO: 1025480 - protein, 75 aa, Homo sapiens
MQLRLPLGPRVSVSEPQPECALESRWDARWALVILSPLQAQAGAVMAPLHSNLGNRVRPCLYKIKTKIKKSMWFL

SEQ ID NO: 1025481 - protein, 108 aa, Homo sapiens
  misc_feature (15)..(15): Xaa can be any naturally occurring amino acid
IRNEGQVSLLQGPAXSWTEEVDSQERQEWPLLTISALKGPRVAMLTAFPPAPTCLLRGTPYPGIDIHLVILIIVSGDKLSQLLSHMAHRSLEVPRILSGKTMGPKRSS

SEQ ID NO: 1025482 - protein, 108 aa, Homo sapiens; identical to SEQ ID NO: 1025481
  misc_feature (15)..(15): Xaa can be any naturally occurring amino acid

SEQ ID NO: 1025483 - protein, 108 aa, Homo sapiens; identical to SEQ ID NO: 1025481
  misc_feature (15)..(15): Xaa can be any naturally occurring amino acid

SEQ ID NO: 1025484 - protein, 75 aa, Homo sapiens; identical to SEQ ID NO: 1025480

SEQ ID NO: 1025485 - protein, 182 aa, Homo sapiens
MGPPGVGRRLVVEVLGAHSGRSPPSRDLEDNCTQRHPVRRQNKGVGKRALSTTAHNTPPGKRKMRRTTREGTNTTTSAPIVKPGESGHNTPYSVRTKVITHTRVRDPHAVRGSPTEYRGKIAGPHIGPPGVPGWSRPPSAKRTPGGNYSPVCTRRWGTNNNSNIVATNAEWRHKRRRVERDN

SEQ ID NO: 1025486 - protein, 161 aa, Homo sapiens
LACEREEPPVCAIDGRDRAGRRIERPAQEVPDAHLRNVAARIQPDHRRRTAVVAVRTLVPELDTASTPGARNRPECFRRSASASAKPSRKMLSPPVASLARQCRNCTPGCNSRVGKSVCGGRFSDVYALLSGRGFDSTSNRTPKLLSRIRPMRRAISSTRP

SEQ ID NO: 1025487 - protein, 195 aa, Homo sapiens [sequence omitted]

SEQ ID NO: 1025488 - protein, 215 aa, Homo sapiens
HEGIAGALQRLWETLCLPVQVLRSDPSIMTWERITDRLKTAFPQQTRKELTDFLRKLKDAYGKSLSELTFDEIVCKISQFIDPKKSQSQGKSVSNVNCVSPSHSPSQPDAAQPPKPAWRPLTSQGPATWEGASNPDEEEEEEEPCVICHENLSPENLSVLPCAHKFHAQCIKTMVDATGDMSNVQTPRFATRRIPWSPQPAVAQDLIQGTHVEIP

SEQ ID NO: 1025489 - protein, 233 aa, Homo sapiens
MPEARLLLLASVLLGLVLLVVLLLRSEALGWGLCLIGWNEFILQPIHNLLMGDTKEQRFLNQVLLACGSPGTPKSVLEAIDDLICEQKEWAMKRGLPRKGKIVDAVIQGAPALRAAGSLGGPTVWLLRLCAMARLLSPGAEAASPSRINPRTVPAITQRDGAFPLALKRQGHPCGWKPSQENHSPKVEEQGLNVDHTGAWSSFDHWKARVRADTASLGRNVGCCEAALLWLQQ

SEQ ID NO: 1025490 - protein, 85 aa, Homo sapiens
QIPRGPCSLSLPSILQEFCLNEKKNRSTGELRNRWELRAAEGQDSVCSPQRPSAWLVETTSSATLLRLGLPDGPAEGALVKSHFP

SEQ ID NO: 1025491 - protein, 561 aa, Homo sapiens
MSVRYSSSSKQFSSSRSGGGGGGGSSLRISSSKGSLGGGFSSGGFSGGSFSRGSSGGGCFGGSSGGYGGLGGFGGGSFRGSYGSSSFGGSYGGSFGGGSFGGGSFGGGSFGGGGFGGGGFGGGFGGGFGGDGGLLSGNEKVTMQNLNDRLASYLDKVRALEESNYELEGKIKERYDQHGNSRQGEPRDYSKYYKTIDDLKNQILNLTTDNANILLQIDNARLAADDFRLKYENEVALRQSVEADINGLRRVLDELTLTQADLEMQIESLTEELAYLKKNREEEMKHLRNVSTGDVNVEMNAAPGVDLTQLLNNMRNQYEQLAEQNRKDAEAWFNEKSKELTTEIDNNIEQISSYKSEITELRRNVQALEIELQSQLALKQSLEASLAETEGRYCVQLSQIQAQISALEEQLQEIRAETECQNTEYQQLTDIKIRLENEIQTYRSLLEGEGSSGGGGRGGGSFGGGYGGGSSGGGSSGGGYGGGSSSGGHGGSSSGGYGGGSFGGGGGGYGGGSSGGGSSSGGGYGGGSSSGGGYGGGSSSGGHKSSSSGSVGESSSKGPRY

SEQ ID NO: 1025492 - protein, 250 aa, Homo sapiens
HLLDHHLLHHYRTSVGPSTGLAPEYTILGAPPFLISPGMSGLRGLRYRSTFNLLGHYHLGRPPGLCHTISRHTSLAETEGRYCVQLSQIQAQISALEEQLQEIRAETECQNTEYQQLTDIKIRLENEIQTYRSLLEGEGSSGGGGRGGGSFGGGYGGGSSGGGSSGGGYGGGSSSGGHGGSSSGGYGGGSSGGGGGGYGGGSSGGGSSSGGGYGGGSSSGGGYGGGSSSGGHKSSSSGSVGESSSKGPRY

SEQ ID NO: 1025493 - protein, 264 aa, Homo sapiens
  misc_feature (227)..(227): Xaa can be any naturally occurring amino acid
HLLDHHLLHHYRTSVGPSTGLAPEYTILGAPPFLISPGMSGLRGLRYRSTFNLLGHYHLGRPPGLCHTISRHTSLAETEGRYCVQLSQIQAQISALEEQLQEIRAETECQNTEYQQLTDIKIRLENEIQTYRSLLEGEGSSGGGGRGGGSFGGGYGGGSSGGGSSGGGYGGGSSSGGHGGSSSGGYGGGSSGGGGGGYGGGSSGGGSSSGGGYGGGSSSGGGYAAEXSGGERSGGGYGGGSSSGGHKSSSSGSVGESSSKGPRY

SEQ ID NO: 1025494 - protein, 269 aa, Homo sapiens
HLLDHHLLHHYRTSVGPSTGLAPEYTILGAPPFLISPGMSGLRGLRYRSTFNLLGHYHLGRPPGLCHTISRHTSLAETEGRYCVQLSQIQAQISALEEQLQEIRAETECQNTEYQQLTDIKIRLENEIQTYRSLLEGEGSSGGGGRGGGSFGGGYGGGSSGGGSSGGGYGGGHGGSSGGGYGGGSSGGGSSGGGYGGGSSSGGQAGGSSSGGHGGSSSGGYGGGSSGGGGGGYGGGSSGGGRLRRRIRRRQLQRRPQVLLFRVRGRVFI

SEQ ID NO: 1025495 - protein, 112 aa, Homo sapiens
  misc_feature (12)..(12): Xaa can be any naturally occurring amino acid
GRASCSFPPLGXLSGAAALASLPTGRTAPNLPDAYGKELFDKANKHHFLHSLALLGVPHCRKPLWAGLLLASGTTLFCTSFYYQALSGDPSIQTLGPPGGTLLLLGWLALAL

SEQ ID NO: 1025496 - protein, 140 aa, Homo sapiens
  misc_feature (2)..(2): Xaa can be any naturally occurring amino acid
  misc_feature (11)..(11): Xaa can be any naturally occurring amino acid
  misc_feature (28)..(29): Xaa can be any naturally occurring amino acid
AXPAAAFRRLXLVRSCGLSFASYGAHAXXPDAYGKELFDKANSSFLRLRFLRGARAPNLPDAYGKELFDKANKHHFLHSLALLGVPHCRKPLWAGLLLASGTTLFCTSFYYQALSGDPSIQTLGPPGGTLLLLGWLALAL

SEQ ID NO: 1025497 - protein, 193 aa, Homo sapiens
QCPQKRSGPGRISESPSRESGLSRHFEAWQTEARNAAVLDLCHALLLPEMVMHVAAGCAVLVAAPDVMLVCDVPVVGGGLLMLLPGPWTWHWSLVLADLLAPACQPAPALGPHVPMPCPLDLKDALVLEVQAAARFAHHNLSNTAHWAAAVGHAQHRRCSGPSLAGHPTQATQQAQATGYPRHPRPQTTGLTP

SEQ ID NO: 1025498 - protein, 124 aa, Homo sapiens
MGKNQSRKTRNSKNQSASPPPKERSSSPATEQSWTENGLDELREEGLRRSNYSELKEEVGTDGKEVKNLEKKLDKWLTRITNAEKSLKELMELKTTAENYVTNAQASVANAINWKKEYQRWKPK

SEQ ID NO: 1025499 - protein, 80 aa, Homo sapiens
IRNEVGPCLLHLLTQFLQGRVRAFTHGTVQDMMLLREYRQLQEQQSLLPSLSPQPSPLFSKKQPEDNGAPLLLPIKRLEC

SEQ ID NO: 1025500 - protein, 124 aa, Homo sapiens
  misc_feature (16)..(16): Xaa can be any naturally occurring amino acid
GGCLREAAAGHVTGRXPHGRRPSSARPEPRPDPGHGVLLQKDERGLGPGPRGAEVLLDPSSPPTKALNGAEPNYHSLPSARTDEQALLSSILAKTASNIIDVSVCRLTVALEQHEYMDRARELQ

SEQ ID NO: 1025501 - protein, 76 aa, Homo sapiens
GHGGTLLNGWIPFIHAVSSLDWFVGECTSYWEHGCDKAKPSLGFGSLPLTFSALFDTANSPHQKQVRCQCYACTAC

SEQ ID NO: 1025502 - protein, 107 aa, Homo sapiens
TKKLAGRGGACLIHVHGRVYKVTRIHRLSHMLTNVIRRPYTFTLADPSPQCKLCARVNLNFTQCKSEHTLCAGFKEPSTKPVCMAYRHILLDNDYLLFFLFFLYLPV

SEQ ID NO: 1025503 - protein, 107 aa, Homo sapiens; identical to SEQ ID NO: 1025502

SEQ ID NO: 1025504 - protein, 193 aa, Homo sapiens
ISVEKVNYQIADQHILHDVDWQIPAGAHITLTGPSGGGKSTLLRIIAAMISKTSGTLIFDGQPIESYDPIMYRRQVSYCFQQPTLFGETVADNLAFPYQIRKQVMDTQRVVTPLNNVGLSERTLHQPIIELSGGERQRVGVFRTILFFTKVLLLDEVTACLDENNKQIVHALLRQLMSRSRDNVMITHDATEI

SEQ ID NO: 1025505 - protein, 113 aa, Homo sapiens
ALSPSLPTRFASGPNLKELAPPPRPQPRPRPCLLGLTHNLRSLLLIPVPFPLSRSKLSRQSATEIPLPMLPLADTEKLIREKDEELRRMQEMLEKMQAQMQQSQAQGEQSDAL

SEQ ID NO: 1025506 - protein, 113 aa, Homo sapiens; identical to SEQ ID NO: 1025505

SEQ ID NO: 1025507 - protein, 446 aa, Homo sapiens
MSHHDDGATVGLGIQMCEGWRVEAALSFLPHQRKWGETAGAVMAGGVMDKEYVGFAALPNQLHRKSVKKGFDFTLMVAGESGLGKSTLINSLFLTNLYEDRQVPEASARLTQTLAIERRGVEIEEGGVKVKLTLVDTPGFGDSVDCSDCWLPVVKFIEEQFEQYLRDESGLNRKNIQDSRVHCCLYFISPFGRGSGGGILGAGAFREELGGLCPLRLGNDQSLGCRLRPLDVAFLRAVHEKVNIIPVIGKADALMPQETQALKQKIRDQLKEEEIHIYQFPECDSDEDEDFKRQDAEMKESIPFAVVGSCEVVRDGGNRPVRGRRYSWGTVEVENPHHCDFLNLRRMLVQTHLQDLKEVTHDLLYEGYRARCLQSLARPGARDRASRSKLSRQSATEIPLPMLPLADTEKLIREKDEELRRMQEMLEKMQAQMQQSQAQGEQSDAL

SEQ ID NO: 1025508 - protein, 367 aa, Homo sapiens
MDKEYVGFAALPNQLHRKSVKKGFDFTLMVAGESGLGKSTLINSLFLTNLYEDRQVPEASARLTQTLAIERRGVEIEEGGVKVKLTLVDTPGFGDSVDCSDCWLPVVKFIEEQFEQYLRDESGLNRKNIQDSRVHCCLYFISPFGRGLRPLDVAFLRAVHEKVNIIPVIGKADALMPQETQALKQKIRDQLKEEEIHIYQFPECDSDEDEDFKRQDAEMKESIPFAVVGSCEVVRDGGNRPVRGRRYSWGTVEVENPHHCDFLNLRRMLVQTHLQDLKEVTHDLLYEGYRARCLQSLARPGARDRASRSKLSRQSATEIPLPMLPLADTEKLIREKDEELRRMQEMLEKMQAQMQQSQAQGEQSDAL

SEQ ID NO: 1025509 - protein, 501 aa, Homo sapiens
MSHHDDGATVGLGIQMCEGWRVEAALSFLPHQRKWGETAGAVMAGGVMDKEYVGFAALPNQLHRKSVKKGFDFTLMVAGESGLGKSTLINSLFLTNLYEDRQVPEASARLTQTLAIERRGVEIEEGGVKVKLTLVDTPGFGDSVDCSDCWLPVVKFIEEQFEQYLRDESGLNRKNIQDSRVHCCLYFISPFGRGSGGGILGAGAFREELGGLCPLRLGNDQSLGCRLRPLDVAFLRAVHEKVNIIPVIGKADALMPQETQALKQKIRDQLKEEEIHIYQFPECDSDEDEDFKRQDAEMKVWKQRRKAGRARWLTSVIPALWEAETGGSPEVRSSRPAWATWRDPTSTKNTQICQESIPFAVVGSCEVVRDGGNRPVRGRRYSWGTVEVENPHHCDFLNLRRMLVQTHLQDLKEVTHDLLYEGYRARCLQSLARPGARDRASRSKLSRQSATEIPLPMLPLADTEKLIREKDEELRRMQEMLEKMQAQMQQSQAQGEQSDAL

SEQ ID NO: 1025510 - protein, 183 aa, Homo sapiens
IRHAEEAEEAGVEIEAGKEKVSAVCANGEPLPPALQESIPFAVVGSCEVVRDGGNRPVRGRRYSWGTVEVENPHHCDFLNLRRMLVQTHLQDLKEVTHDLLYEGYRARCLQSLARPGARDRASRSKLSRQSATEIPLPMLPLADTEKLIREKDEELRRMQEMLEKMQAQMQQSQAQGEQSDAL

SEQ ID NO: 1025511 - protein, 214 aa, Homo sapiens
MSHHDDGATVGLGIQMCEGWRVEAALSFLPHQRKWGETAGAVMAGGVMDKEYVGFAALPNQLHRKSVKKGFDFTLMVAGESGLGKSTLINSLFLTNLYEDRQVPEASARLTQTLAIERRGVEIEEGGVKVKLTLVDTPGFGDSVDCSDCWLPVVKFIEEQFEQYLRDESGLNRKNIQDSRVHCCLYFISPFGRGSGGGILGAGAFREGWGVSAP

SEQ ID NO: 1025512 - protein, 180 aa, Homo sapiens
RLGSEAWVVHIYQFPECDSDEDEDFKRQDAEMKESIPFAVVGSCEVVRDGGNRPVRGRRYSWGTVEVENPHHCDFLNLRRMLVQTHLQDLKEVTHDLLYEGYRARCLQSLARPGARDRASRSKLSRQSATEIPLPMLPLADTEKLIREKDEELRRMQEMLEKMQAQMQQSQAQGEQSDAL

SEQ ID NO: 1025513 - protein, 390 aa, Homo sapiens
PCLTTMMELQWDLESRCVKDGGLKDKEYVGFAALPNQLHRKSVKKGFDFTLMVAGESGLGKSTLINSLFLTNLYEDRQVPEASARLTQTLAIERRGVEIEEGGVKVKLTLVDTPGFGDSVDCSDCWLPVVKFIEEQFEQYLRDESGLNRKNIQDSRVHCCLYFISPFGRGLRPLDVAFLRAVHEKVNIIPVIGKADALMPQETQALKQKIRDQLKEEEIHIYQFPECDSDEDEDFKRQDAEMKESIPFAVVGSCEVVRDGGNRPVRGRRYSWGTVEVENPHHCDFLNLRRMLVQTHLQDLKEVTHDLLYEGYRARCLQSLARPGARDRASRSKLSRQSATEIPLPMLPLADTEKLIREKDEELRRMQEMLEKMQAQMQQSQAQGEQSDAL

SEQ ID NO: 1025514 - protein, 469 aa, Homo sapiens
MSHHDDGATVGLGIQMCEGWRVEAALSFLPHQRKWGETAGAVMAGGVMDKEYVGFAALPNQLHRKSVKKGFDFTLMVAGESGLGKSTLINSLFLTNLYEDRQVPEASARLTQTLAIERRGVEIEEGGVKVKLTLVDTPGFGDSVDCSDCWLPVVKFIEEQFEQYLRDESGLNRKNIQDSRVHCCLYFISPFGRGLRPLDVAFLRAVHEKVNIIPVIGKADALMPQETQALKQKIRDQLKEEEIHIYQFPECDSDEDEDFKRQDAEMKVWKQRRKAGRARWLTSVIPALWEAETGGSPEVRSSRPAWATWRDPTSTKNTQICQESIPFAVVGSCEVVRDGGNRPVRGRRYSWGTVEVENPHHCDFLNLRRMLVQTHLQDLKEVTHDLLYEGYRARCLQSLARPGARDRASRSKLSRQSATEIPLPMLPLADTEKLIREKDEELRRMQEMLEKMQAQMQQSQAQGEQSDAL

SEQ ID NO: 1025515 - protein, 199 aa, Homo sapiens
MSVIVARFSTVSISVSPEIRDQLKEEEIHIYQFPECDSDEDEDFKRQDAEMKESIPFAVVGSCEVVRDGGNRPVRGRRYSWGTVEVENPHHCDFLNLRRMLVQTHLQDLKEVTHDLLYEGYRARCLQSLARPGARDRASRSKLSRQSATEIPLPMLPLADTEKLIREKDEELRRMQEMLEKMQAQMQQSQAQGEQSDAL

SEQ ID NO: 1025516 - protein, 367 aa, Homo sapiens; identical to SEQ ID NO: 1025508

SEQ ID NO: 1025517 - protein, 113 aa, Homo sapiens
MGFHHVAQAGLELPTSGDPSALASQSAGITGVSHRTWPQASISLALNHSWLGPSPVEPAPQPGVLLKCSKVVNPQPFPSPVARFCRSPLKAVAWAVPSFIPASRAKPRRQRLQ

SEQ ID NO: 1025518 - protein, 145 aa, Homo sapiens
MGFHHVAQAGLELPTSGDPSALASQSAGITGVSHRTWPQASISLALNHSWLGPSPVEPAPQPGVLLKCSKVVNPQPFPSPVARFCRSPLKAVAWAVPSFIPASRAKPRYPLVPCRGVAASSLGKGQGVISSFSGLSVLVPVTSVN

SEQ ID NO: 1025519 - protein, 55 aa, Homo sapiens
  misc_feature (48)..(49): Xaa can be any naturally occurring amino acid
MTHGDNETQHFGNRLNGKTFLRVSGLKKLSVNGTDSNPQSGTVYCSQXXEYNPRL

SEQ ID NO: 1025520 - protein, 208 aa, Homo sapiens
LYGGPRVACLCQVVCSAHLSGRLGVYDSFVFYPGCPCLASCRCFARWWVVVAVDLGECRISLAWWCSPACVVAGSAERKLAQSWGYVRKAACCGAPPMSLILGRITDMGLQALFVQWRRDSADPMPQDAPAMPRALGRCCSTIRASLHGAWWMRSGVAWLMTVHVVDTSIPDPCVLSSMRGDRRSLGPSVLQEYFALCRPYVSSTLPE

SEQ ID NO: 1025521 - protein, 120 aa, Homo sapiens
  misc_feature (26)..(26): Xaa can be any naturally occurring amino acid
  misc_feature (33)..(33): Xaa can be any naturally occurring amino acid
MASGHGFSSPVIIQGLSCMKTGLSQXFNLTRAXSWSTPRPLPVPYDSPHQMTLAKSRFLCGQGWLADWWKSRVDPKEAHVSSQHQFCTSSASVLVGVPVSPGPGWARALIREDAFAGRGG

SEQ ID NO: 1025522 - protein, 323 aa, Homo sapiens
MGGQVSASNSFSRLHCRNANEDWMSALCPRLWDVPLHHLSIPGSHDTMTYCLNKKSPISHEESRLLQLLNKALPCITRPVVLKWSVTQALDVTEQLDAGVRYLDLRIAHMLEGSEKNLHFVHMVYTTALVEDTLTEISEWLERHPREVVILACRNFEGLSEDLHEYLVACIKNIFGDMLCPRGEVPTLRQLWSRGQQVIVSYEDESSLRRHHELWPGVPYWWGNRVKTEALIRYLETMKSCGRPGGLFVAGINLTENLQYVLAHPSESLEKMTLPNLPRLSAWVREQCPGPGSRCTNIIAGDFIGADGFVSDVIALNQKLLWC

SEQ ID NO: 1025523 - protein, 343 aa, Homo sapiens
VAHACNPSTAEVAVARGSPLMGGQVSASNSFSRLHCRNANEDWMSALCPRLWDVPLHHLSIPGSHDTMTYCLNKKSPISHEESRLLQLLNKALPCITRPVVLKWSVTQALDVTEQLDAGVRYLDLRIAHMLEGSEKNLHFVHMVYTTALVEDTLTEISEWLERHPREVVILACRNFEGLSEDLHEYLVACIKNIFGDMLCPRGEVPTLRQLWSRGQQVIVSYEDESSLRRHHELWPGVPYWWGNRVKTEALIRYLETMKSCGRPGGLFVAGINLTENLQYVLAHPSESLEKMTLPNLPRLSAWVREQCPGPGSRCTNIIAGDFIGADGFVSDVIALNQKLLWC

SEQ ID NO: 1025524 - protein, 323 aa, Homo sapiens; identical to SEQ ID NO: 1025522

SEQ ID NO: 1025525 - protein, 358 aa, Homo sapiens
MGGQVSASNSFSRLHCRNANEDWMSALCPRLWDVPLHHLSIPGSHDTMTYCLNKKSPISHEESRLLQLLNKALPCITRPVVLKWSVTQALDVTEQLDAGVRYLDLRIAHMLEGSEKNLHFVHMVYTTALVEDTLTEISEWLERHPREVVILACRNFEGLSEDLHEYLVACIKNIFGDMLCPRGEVPTLRQLWSRGQQVIVSYEDESSLRRHHELWPGVPYWWGNRVKTEALIRYLETMKSCGRPGGLFVAGINLTENLQYVLAHPSESLEKMTLPNLPRLSAWVREQCPGPGSRCTNIIAGDFIGADGFVSDVIALNQKLLSCWFKFPASQWMPAPFLLPFPKQIVHFCLTRDISFSG

SEQ ID NO: 1025526 - protein, 323 aa, Homo sapiens; identical to SEQ ID NO: 1025522

SEQ ID NO: 1025527 - protein, 323 aa, Homo sapiens; identical to SEQ ID NO: 1025522

SEQ ID NO: 1025528 - protein, 323 aa, Homo sapiens; identical to SEQ ID NO: 1025522

SEQ ID NO: 1025529 - protein, 173 aa, Homo sapiens
SVCGPFHYNPHSDFHLHQRVHTNEKPYTCKECGKTFRYNSKLSRHQKIHTGEKPYSCEECGQAFSQNSHLLQHQKLHGGQRPYECTDCGKTFSYNSKLIRHQRIHTGEKPFKCKECGKAFSCSYDCIIHGTEFHNGEKPYGMLRSVGEGVLSSNSVLIQHQRIHTGEKPYECK

SEQ ID NO: 1025530 - protein, 178 aa, Homo sapiens
  misc_feature (167)..(167): Xaa can be any naturally occurring amino acid
VGTAYWAYAHSVSSVCLTVCSVHPRFLRMPQFPPYASISSIRPTVSSVCPSFLHTPRFPPYTPQFPPYAPQFPPYAQFPPYTPQFPLYASVSSIRTPVSSIRLSFLCMLQFPPYTSVSSVCLHSFLYKASDFPQYNPTVFLPYNFRFGLVFGKNGIGQTGTIVGVWXGKFGVLEGGFL

SEQ ID NO: 1025531 - protein, 49 aa, Homo sapiens
MEGCLGDAVRCRYDVWLEIKAISEVTPAHVMQGAGPGLWRYSAGYTARI

SEQ ID NO: 1025532 - protein, 62 aa, Homo sapiens
HGENHVAQFHQNQYQHQRCGVQQSILTHKEMLVVDGVGHAQMTAYQRTSGLSPMPDSSSWAS

SEQ ID NO: 1025533 - protein, 127 aa, Homo sapiens [sequence omitted]

SEQ ID NO: 1025534 - protein, 127 aa, Homo sapiens [sequence omitted]

SEQ ID NO: 1025535 - protein, 82 aa, Homo sapiens
DFSTSVPPRPGAAPGHILVLSRLQPLRAEVSRSRLLRVEYSYVKTTKLVFKGTKAKRRDGKKVSRSELKPLPLRTLSRSLGS

SEQ ID NO: 1025536 - protein, 127 aa, Homo sapiens [sequence omitted]

SEQ ID NO: 1025537 - protein, 82 aa, Homo sapiens; identical to SEQ ID NO: 1025535

SEQ ID NO: 1025538 - protein, 704 aa, Homo sapiens
MAVPPRGGRAAHMAAIRALQQWCRQQCEGYRDVNICNMTSHLPAAASASPKLTGLVPRQPGAMGVDSRTSCSPQKAQEANKARPSAWEPAAGNSPARASVPAAPNPAATSATSVHVRSPARPSESRLAPTPTEGKVRPRVTNSSPMGWSSAAPCTAAAASHPAVPPSAPDPRPATPQGGGAPRVAAPQTTLSSSSTSAATVDPPAWTPSASRTQQARNKFFQTSAVPPGTSLSGRGPTPSLVLSKDSSKEQARNFLKQALSALEEAGAPAPGRPSPATAAVPSSQPKTEAPQASPLAKPLQSSSPRVLGLPSRMEPPAPLSTSSTSQASALPPAGRRNLAESSGVGRVGAGSRPKPEAPMAKGKSTTLTQDMSTSLQEGQEDGPAGWRANLKPVDRRSPAERTLKPKEPRALAEPRAGEAPRKVSGSFAGSVHITLTPVRPDRTPRPASPGPSLPARSPSPPRRRRLAVPASLDVCDNWLRPEPPGQEARVQSWKEEEKKPHLQGKPGRPLSPANVPALPGETVTSPVRLHPDYLSPEEIQRQLQDIERRLDALELRGVELEKRLRAAEGDDAEDSLMVDWFWLIHEKQLLLRQESELMYKSKAQRLEEQQLDIEGELRRLMAKPEALKSLQERRREQELLEQYVSTVNDRSDIVDSLDEDRLREQEEDQMLRDMIEKLGLQRKKSKFRLSKIWSPKSKSSPSQ

SEQ ID NO: 1025539 - protein, 916 aa, Homo sapiens
MAVPPRGGRAAHMAAIRALQQWCRQQCEGYRDVNICNMTTSFRDGLAFCAILHRHRPDLINFSALKKENIYENNKLAFRVAEEHLGIPALLDAEDMVALKVPDRLSILTYVSQYYNYFHGRSPIGGMAGVKRASEDSEEEPSGKKAPVQAAKLPSPAPARKPPLSPAQTNPVVQRRNEGAGGPPPKTDQALAGSLVSSTCGVCGKHVHLVQRHLADGRLYHRSCFRCKQCSCTLHSGAYKATGEPGTFVCTSHLPAAASASPKLTGLVPRQPGAMGVDSRTSCSPQKAQEANKARPSAWEPAAGNSPARASVPAAPNPAATSATSVHVRSPARPSESRLAPTPTEGKVRPRVTNSSPMGWSSAAPCTAAAASHPAVPPSAPDPRPATPQGGGAPRVAAPQTTLSSSSTSAATVDPPAWTPSASRTQQARNKFFQTSAVPPGTSLSGRGPTPSLVLSKDSSKEQARNFLKQALSALEEAGAPAPGRPSPATAAVPSSQPKTEAPQASPLAKPLQSSSPRVLGLPSRMEPPAPLSTSSTSQASALPPAGRRNLAESSGVGRVGAGSRPKPEAPMAKGKSTTLTQDMSTSLQEGQEDGPAGWRANLKPVDRRSPAERTLKPKEPRALAEPRAGEAPRKVSGSFAGSVHITLTPVRPDRTPRPASPGPSLPARSPSPPRRRRLAVPASLDVCDNWLRPEPPGQEARVQSWKEEEKKPHLQGKPGRPLSPANVPALPGETVTSPVRLHPDYLSPEEIQRQLQDIERRLDALELRGVELEKRLRAAEGDDAEDSLMVDWFWLIHEKQLLLRQESELMYKSKAQRLEEQQLDIEGELRRLMAKPEALKSLQERRREQELLEQYVSTVNDRSDIVDSLDEDRLREQEEDQMLRDMIEKLGLQRKKSKFRLSKIWSPKSKSSPSQ

SEQ ID NO: 1025540 - protein, 855 aa, Homo sapiens
EGVGTDPGLCQKRCPHGYLSPVPGPPGPPRAPRPVLGTGTSGGTETLSEPGLGPSRSLLDSPIGGMAGVKRASEDSEEEPSGKKAPVQAAKLPSPAPARKPPLSPAQTNPVVQRRNEGAGGPPPKTDQALAGSLVSSTCGVCGKHVHLVQRHLADGRLYHRSCFRCKQCSCTLHSGAYKATGEPGTFVCTSHLPAAASASPKLTGLVPRQPGAMGVDSRTSCSPQKAQEANKARPSAWEPAAGNSPARASVPAAPNPAATSATSVHVRSPARPSESRLAPTPTEGKVRPRVTNSSPMGWSSAAPCTAAAASHPAVPPSAPDPRPATPQGGGAPRVAAPQTTLSSSSTSAATVDPPAWTPSASRTQQARNKFFQTSAVPPGTSLSGRGPTPSLVLSKDSSKEQARNFLKQALSALEEAGAPAPGRPSPATAAVPSSQPKTEAPQASPLAKPLQSSSPRVLGLPSRMEPPAPLSTSSTSQASALPPAGRRNLAESSGVGRVGAGSRPKPEAPMAKGKSTTLTQDMSTSLQEGQEDGPAGWRANLKPVDRRSPAERTLKPKEPRALAEPRAGEAPRKVSGSFAGSVHITLTPVRPDRTPRPASPGPSLPARSPSPPRRRRLAVPASLDVCDNWLRPEPPGQEARVQSWKEEEKKPHLQGKPGRPLSPANVPALPGETVTSPVRLHPDYLSPEEIQRQLQDIERRLDALELRGVELEKRLRAAEGDDAEDSLMVDWFWLIHEKQLLLRQESELMYKSKAQRLEEQQLDIEGELRRLMAKPEALKSLQERRREQELLEQYVSTVNDRSDIVDSLDEDRLREQEEDQMLRDMIEKLGLQRKKSKFRLSKIWSPKSKSSPSQ

SEQ ID NO: 1025541 - protein, 239 aa, Homo sapiens
VWYVGLDGQVPEAHPAPSPGRPLSPANVPALPGETVTSPVRVSSGGEPGRGPDLRHPHRPSVSQLHPDYLSPEEIQRQLQDIERRLDALELRGVELEKRLRAAEGDDAEDSLMVDWFWLIHEKQLLLRQESELMYKSKAQRLEEQQLDIEGELRRLMAKPEALKSLQERRREQELLEQYVSTVNDRSDIVDSLDEDRLREQEEDQMLRDMIEKLGLQRKKSKFRLSKIWSPKSKSSPSQ

SEQ ID NO: 1025542 - protein, 863 aa, Homo sapiens
MAVPPRGGRAAHMAAIRALQQWCRQQCEGYRDVNICNMTTSFRDGLAFCAILHRHRPDLINFSALKKENIYENNKLAFRVAEEHLGIPALLDAEDMVALKVPDRLSILTYVSQYYNYFHGRSPIGGMAGVKRASEDSEEEPSGKKAPVQAAKLPSPAPARKPPLSPAQTNPVVQRRNEGAGGPPPKTDQALAGSLVSSTCGVCGKHVHLVQRHLADGRLYHRSCFRCKQCSCTLHSGAYKATGEPGTFVCTSHLPAAASASPKLTGLVPRQPGAMGVDSRTSCSPQKAQEANKARPSAWEPAAGNSPARASVPAAPNPAATSATSVHVRSPARPSESRLAPTPTEGKVRPRVTNSSPMGWSSAAPCTAAAASHPAVPPSAPDPRPATPQGGGAPRVAAPQTTLSSSSTSAATVDPPAWTPSASRTQQARNKFFQTSAVPPGTSLSGRGPTPSLVLSKDSSKEQARNFLKQALSALEEAGAPAPGRPSPATAAVPSSQPKTEAPQASPLAKPLQSSSPRVLGLPSRMEPPAPLSTSSTSQASALPPAGRRNLAESSGVGRVGAGSRPKPEAPMAKGKSTTLTQDMSTSLQEGQEDGPAGWRANLKPVDRRSPAERTLKPKEPRALAEPRAGEAPRKVSGSFAGSVHITLTPVRPDRTPRPASPGPSLPARSPSPPRRRRLAVPASLDVCDNWLRPEPPGQEARVQSWKEEEKKPHLQGKPGRPLSPANVPALPGETVTSPVRLHPDYLSPEEIQRQLQDIERRLDALELRGVELEKRLRAAEGDDAEDSLMVDWFWLIHEKQLLLRQESELMYKSKAQRLEEQQLDIEGELRRLMAKPGASPARQPRGPSQGCRGAQDVWGPAL

SEQ ID NO: 1025543 - protein, 86 aa, Homo sapiens
LRGTQSGQVLTWEGTGLPADSEAQGGLWPVEGKDVSGRGTCVGHGCAAAALSTASLSTCPLGLQRKKSKFRLSKIWSPKSKSSPSQ

SEQ ID NO: 1025544 - protein, 901 aa, Homo sapiens
MAVPPRGGRAAHMAAIRALQQWCRQQCEGYRDVNICNMTTSFRDGLAFCAILHRHRPDLINFSALKKENIYENNKLAFRVAEEHLGIPALLDAEDMVALKVPDRLSILTYVSQYYNYFHGRSPIGGMAGVKRASEDSEEEPSGKKAPVQAAKLPSPAPARKPPLSPAQTNPVVQRRNEGAGGPPPKTDQALAGSLVSSTCGVCGKHVHLVQRHLADGRLYHRSCFRCKQCSCTLHSGAYKATGEPGTFVCTSHLPAAASASPKLTGLVPRQPGAMGVDSRTSCSPQKAQEANKARPSAWEPAAGNSPARASVPAAPNPAATSATSVHVRSPARPSESRLAPTPTEGKVRPRVTNSSPMGWSSAAPCTAAAASHPAVPPSAPDPRPATPQGGGAPRVAAPQTTLSSSSTSAATVDPPAWTPSASRTQQARNKFFQTSAVPPGTSLSGRGPTPSLVLSKDSSKEQARNFLKQALSALEEAGAPAPGRPSPATAAVPSSQPKTEAPQASPLAKPLQSSSPRVLGLPSRMEPPAPLSTSSTSQASALPPAGRRNLAESSGVGRVGAGSRPKPEAPMAKGKSTTLTQDMSTSLQEGQEDGPAGWRANLKPVDRRSPAERTLKPKEPRALAEPRAGEAPRKVSGSFAGSVHITLTPVRPDRTPRPASPGPSLPARSPSPPRRRRLAVPASLDVCDNWLRPEPPGQEARVQSWKEEEKKPHLQGKPGRPLSPANVPALPGETVTSPVRLHPDYLSPEEIQRQLQDIERRLDALELRGVELEKRLRAAEGDDAEDSLMVDWFWLIHEKQLLLRQESELMYKSKAQRLEEQQLDIEGELRRLMAKPEALKSLQERRREQELLEQYVSTVNDRSDIVDSLDEDRLRGLQRKKSKFRLSKIWSPKSKSSPSQ

SEQ ID NO: 1025545 - protein, 916 aa, Homo sapiens; identical to SEQ ID NO: 1025539

SEQ ID NO: 1025546 - protein, 294 aa, Homo sapiens
RGCRACDANPVQSGGPGMGMAGLPSELLAVLGQTPGSQWPCSEAVALSPYLGAARSPSPPRRRRLAVPASLDVCDNWLRPEPPGQEARVQSWKEEEKKPHLQGKPGRPLSPANVPALPGETVTSPVRVSSGGEPGRGPALRHPHRPSFPAAPRLPLPGGDTEAAAGHREAAGRPGAPRRGAGEATAGGRGRSKAQRLEEQQLDIEGELRRLMAKPEALKSLQERRREQELLEQYVSTVNDRSDIVDSLDEDRLREQEEDQMLRDMIEKLGLQRKKSKFRLSKIWSPKSKSSPSQ

SEQ ID NO: 1025547 - protein, 98 aa, Homo sapiens
MSGALHASDHVPNARSAKSQPLRRAAVSADDGAPDSSNSMEMKMQEHSDQVPVGNSPSVVSRMLAEKEQNTRQLPTRVDHAQLSLASFHCQILAHWSS

SEQ ID NO: 1025548 - protein, 86 aa, Homo sapiens
MSGALHASDHVPNARSAKSQPLRRAAVSADDGAPDSSNSMEMKMQEHSDQVPVGNSPSVVSRRYVVSRLGNPCVLSFYQHRDTTRD

SEQ ID NO: 1025549 - protein, 257 aa, Homo sapiens
VGRRRGALCRLRVAAPPGRVGRGARCLAAVLTLMRSRKLTGAVRSSARLKARSCSAARLASAQEVAGSTSAKTACLTSSSHKATDRRTSKKFKCDKGHLVKSELQKLVPKNDSASLPVTPETPCAVQQGAASLPLGGCRVVSDSRLAKTRDGLSVPKHSAGSGAEESNSSSTVQKQNEPGLQTEDVQKPPLQMDNSVFLDDDSNQPMPVSRFFGNVELMQDLPPASSSCPSMSRREFRKMHFRAKDDDDDDDDDAEM

SEQ ID NO: 1025550 - protein, 276 aa, Homo sapiens
VGRRRGALCRLRVAAPPGRVGRGARCLAAVLTLMRSRKLTGAVRSSARLKARSCSAARLASAQEVAGSTSAKTACLTSSSHKATDRRTSKKFKCDKGHLVKSELQKLVPKNDSASLPKVTPETPCENEFAEGSALLPGSEAGVSVQQGAASLPLGGCRVVSDSRLAKTRDGLSVPKHSAGSGAEESNSSSTVQKQNEPGLQTEDVQKPPLQMDNSVFLDDDSNQPMPVSRFFGNVELMQDLPPASSSCPSMSRREFRKMHFRAKDDDDDDDDDAEM

SEQ ID NO: 1025551 - protein, 136 aa, Homo sapiens
CRITASPAATMKWGRALSPWTSGRPITHDACSLQLGSQFIGTPCRGAATQLSREHRPKGAVLCTWGGQCSSWDTALHPVLSAPTRPFWKTCPLIPLITLCLESPSGALPAKGHPLGRLRAEPQPRGPQYPQKPLNH

SEQ ID NO: 1025552 - protein, 121 aa, Homo sapiens
EGRRQQRVVSPFLALLTLEPTFHHLLPIMQVSTAALAVLLCTMALCNQVLSAPLAADTPTACCFSYTSRQIPQNFIADYFETSSQCSKPSVIFLTKRGRQVCADPSEEWVQKYVSDLELSA

SEQ ID NO: 1025553 - protein, 69 aa, Homo sapiens
EGRRQQRVVSPFLALLTLEPTFHHLLPIMQVSTAALAVLLCTMALCNQVLSAPRESMLLLWVSPLSGHG

SEQ ID NO: 1025554 - protein, 41 aa, Homo sapiens
TAVYYCARDGSVLLAYCGGDCYSMDWFDPWGQGTLVTVSSG

SEQ ID NO: 1025555 - protein, 32 aa, Homo sapiens
  misc_feature (9)..(9): Xaa can be any naturally occurring amino acid
TAVYYCTTXRSTGDKIRFDPWGQGTLVTVSSG

SEQ ID NO: 1025556 - protein, 69 aa, Homo sapiens
MAMRLQPEPPSPWAASRGLPQLSQPLSLSFLGTRLAPDPVPTLHLARGHEDDGCEGTLTSWEYKNALTC

SEQ ID NO: 1025557 - protein, 110 aa, Homo sapiens
ARVLPGSLLRLRRREWPGSRDKRTLACLIQNFMPEDISVQWLHNEVQLPDARHSTTQPRKTKGSGFFVFSRLEVTRAEWEQKDEFICRAVHEAASPSQTVQRAVSVNPGK

SEQ ID NO: 1025558 - protein, 176 aa, Homo sapiens
ARVLPGSLLRLRRREWPGSRDKRTLACLIQNFMPEDISVQWLHNEVQLPDARHSTTQPRKTKGSGFFVFSRLEVTRAEWEQKDEFICRAVHEAASPSQTVQRAVSVNPELDVCVEEAEGEAPWTWTGLCIFAALFLLSVSYSAALTLLMVQRFLSATRQGRPQTSLDYTNVLQPHA

SEQ ID NO: 1025559 - protein, 100 aa, Homo sapiens
ARVLPGSLLRLRRREWPGSRDKRTLACLIQNFMPEDISVQWLHNEVQLPDARHSTTQPRKTKGSGFFVFSRLEGSIQLCSGEDWPDLLSTVAMTPGSYPQ

SEQ ID NO: 1025560 - protein, 92 aa, Homo sapiens
MFTKSFASMVDKSGKCPGSPALQRLSWLCRHLACTLPIARIPKRKVSSAEGATKEEPKRRLVQLSAKPAPAKVELKLKKAAAKDKSSDKKVQ

SEQ ID NO: 1025561 - protein, 109 aa, Homo sapiens
SAQGCAPGHSRALTVTALAGPASPRVWPAAPVPFTTPALTLLTLIWFGFGLLLKEGKERREELQEHKPRGPMCQQAPRLTTPCPEPRPRTPRPRQGSSFLPFQFLGSHC

SEQ ID NO: 1025562 - protein, 144 aa, Homo sapiens
  misc_feature (87)..(87): Xaa can be any naturally occurring amino acid
MGSSPFRSDPFLDSLAIVLSTAIKHERAFLPSCSSLELCLFKVLKRTSRSERITILSSTTILSLHINIVSPGRKCLDYLKTRQCVVXRSQPGQCVMAGLSPGQVSMQVSLVRCLAGRGPQISALKASKVLSSGLTPLTGRNCYG

SEQ ID NO: 1025563 - protein, 180 aa, Homo sapiens
  misc_feature (106)..(106): Xaa can be any naturally occurring amino acid
  misc_feature (109)..(109): Xaa can be any naturally occurring amino acid
  misc_feature (154)..(154): Xaa can be any naturally occurring amino acid
  misc_feature (161)..(162): Xaa can be any naturally occurring amino acid
  misc_feature (168)..(168): Xaa can be any naturally occurring amino acid
  misc_feature (171)..(171): Xaa can be any naturally occurring amino acid
MTNHVYFNLDGEQSDVRNHKLQILADEYLPVDERRHSARRPEICRRNVFDFRSAKIIASEFLADDDQRKVKGYRSRILVTAKGDGKKVAAHVWSADEKLQLKVYTXAPXCKFYSGNFLGGTPSRGTEPYPTGKGWLWKASFYRTARTTLKWPQXGLLPASXXQSIPRXRNXSLLLSNVTP

SEQ ID NO: 1025564 - protein, 117 aa, Homo sapiens
PCPVRRPPSGRVRAFRMRLGRSSGTSVARKTRACRGEAAAPHLPASAFVTQPPHPESLRAAGRPQHLLEDLAFRSDAGPRWAVQAESGGPEGLRWGRDEALGNRHIFLPSDCLLGGH

SEQ ID NO: 1025565 - protein, 117 aa, Homo sapiens
  misc_feature (28)..(28): Xaa can be any naturally occurring amino acid
NRLGRRLVLNRPRMKLKSGSTGPKKPRXTLVKTKEELHLVMTAPPPPPPPVYEPVSYHVQESLQDEGAEPTGYSAELSSEGIRDDRNEEKRITEAEKNERVQRQLLTLSSELSHGPR

SEQ ID NO: 1025566 - protein, 154 aa, Homo sapiens
  misc_feature (19)..(19): Xaa can be any naturally occurring amino acid
  misc_feature (30)..(30): Xaa can be any naturally occurring amino acid
  misc_feature (65)..(65): Xaa can be any naturally occurring amino acid
ADRMAALRAGEELERQAVXQIKSQEQLAAXLAEYTAKIALLFEARRRLVVWGGESGSTGPKKPRXILVKTKEELHLVMTAPPPPPPPVYEPVSYHVQESLQDEGAEPTGYSAELSSEGIRDDRNEEKRITEAEKNERVQRQLLTLSSELSHGPR

SEQ ID NO: 1025567 - protein, 31 aa, Homo sapiens
CAKDFSGNGAGVDSWGQGTLIIVSSPSPTSP

SEQ ID NO: 1025568 - protein, 236 aa, Homo sapiens
MADFDTYDDRAYSSFGGGRGSRGSAGGHGSRSQKELPTEPPYTAYVGNLPFNTVQGDIDAIFKDLSIRSVRLVRDKDTDKFKGFCYVEFDEVDSLKEALTYDGALLGDRSLRVDIAEGRKQDKGGFGFRKGGPDDRGMGSSRESRGGWDSRDDFSSGFRDDFLGGRGGSRPGDRRTGPPNGQPLQRWASPPVDPTWISENPHEEERAMGPTIPLKLNSRSPSSVGIPTCKTRGRLK

SEQ ID NO: 1025569 - protein, 216 aa, Homo sapiens
MADFDTYDDRAYSSFGGGRGSRGSAGGHGSRSQKELPTEPPYTAYVGNLPFNTVQGDIDAIFKDLSIRSVRLVRDKDTDKFKGFCYVEFDEVDSLKEALTYDGALLGDRSLRVDIAEGRKQDKGGFGFRKGGPDDRGFRDDFLGGRGGSRPGDRRTGPPNGQPLQRWASPPVDPTWISENPHEEERAMGPTIPLKLNSRSPSSVGIPTCKTRGRLK

SEQ ID NO: 1025570 - protein, 171 aa, Homo sapiens
  misc_feature (168)..(168): Xaa can be any naturally occurring amino acid
MADFDTYDDRAYSSFGGGRGSRGSAGGHGSRSQKELPTEPPYTAYVGNLPFNTVQGDIDAIFKDLSIRSVRLVRDKDTDKFKGFCYVEFDEVDSLKEALTYDGALLGDRSLRVDIAEGRKQDKGGFGFRKGGPDDRGFRDDFLGGRGGSRPGDRRTGPPMGSRFKNRXPIK

SEQ ID NO: 1025571 - protein, 423 aa, Homo sapiens
MDRGQPSLEPAAAAPRASGRCVIAPVRAVLRLRRRVCVLRKRRLLQPGGGPDVGTGAPRPGCSPRAPRADLDQPKFFTFDSPAELPSRTPRKKRRRSRLVLYPETSRKYRPRVEHRSRAQRCLLLLVAIVGFQVLNAIENLDDNAQRYDLDGLEKALQRAVFGQPAAVSRIVALMRDYLATHVHSRPLLLALHGPSGVGKSHVGRLLARHFRSVLEDSALVLQYHARHHCPEARAAQDCREELARRVADVVARAEAEEKTPLLVLDDVELMPRPLLDELHGFLQPQRSHHFHNAIYVLLSGAGGAEVTRFVLQNASRALPLRPDGFRSAEAAAAQAEEDLRASLLAVLSREHPLWQAAAIVPFLLLDKRDVVSCFRDEMAGEGFFPDQARAENLAAQLSFYRVAGREFAVTGCKQVVATVNLL

SEQ ID NO: 1025572 - protein, 423 aa, Homo sapiens; identical to SEQ ID NO: 1025571

SEQ ID NO: 1025573 - protein, 175 aa, Homo sapiens
IWMRYPQAASHHVVELAMRFQPIPVGIDDERRVIAGAVVLALAGPAVVLAAVLECGAVERVDLDRRSGLERQVQPRVGIGSDGARRMLQPQLGFGRTVPDRAVVAIQPRVAECAERVVVEGAAAADVGNAERKVIDHVRLLGLKRDVSAANLLITTTPAACSGVRRVCCRSTRGR

SEQ ID NO: 1025574 - protein, 376 aa, Homo sapiens [sequence omitted]

SEQ ID NO: 1025575 - protein, 104 aa, Homo sapiens
MGQCRSANAEDAQEFSDVERAIETLIKNFHQYSVEGGKETLTPSELRDLVTQQLPHLMPSNCGLEEKIANLGSCNDSKLEFRSFWELIGEAAKSVKLERPVRGH

SEQ ID NO: 1025576 - protein, 89 aa, Homo sapiens
YELIQRIRRLQRNFHQYSVEGGKETLTPSELRDLVTQQLPHLMPSNCGLEEKIANLGSCNDSKLEFRSFWELIGEAAKSVKLERPVRGH

SEQ ID NO: 1025577 - protein, 89 aa, Homo sapiens; identical to SEQ ID NO: 1025576

SEQ ID NO: 1025578 - protein, 89 aa, Homo sapiens; identical to SEQ ID NO: 1025576

SEQ ID NO: 1025579 - protein, 104 aa, Homo sapiens; identical to SEQ ID NO: 1025575

SEQ ID NO: 1025580 - protein, 104 aa, Homo sapiens; identical to SEQ ID NO: 1025575

SEQ ID NO: 1025581 - protein, 104 aa, Homo sapiens; identical to SEQ ID NO: 1025575

SEQ ID NO: 1025582 - protein, 104 aa, Homo sapiens; identical to SEQ ID NO: 1025575

SEQ ID NO: 1025583 - protein, 54 aa, Homo sapiens
  misc_feature (40)..(40): Xaa can be any naturally occurring amino acid
MDPNCSCAAGVSCTCASSCKCKECKCTSCKKSCCSCCPVXCQVCQAARQRGIGE

SEQ ID NO: 1025584 - protein, 161 aa, Homo sapiens
ERQPAHEQMWGDSLLIMCRCGVPACSHVPMWSARLLTRADVECPPAHVPIWSARLLTRAIVECPPAHTHADVECPPAHTCPCGVPACSHVPMWSARLLTHVPMWSARLLTRAHVECLPAHTRAHVECPPAHTKPWHGGSVGFLSCRPSQTLLPYILLMVAF

SEQ ID NO: 1025585 - protein, 139 aa, Homo sapiens
MSPRFVPMWSARLLTRADVECPPAHVPIWSARLLTRAIVECPPAHTHADVECPPAHTCPCGVPACSHVPMWSARLLTHVPMWSARLLTRAHVECLPAHTRAHVECPPAHTKPWHGGSVGFLSCRPSQTLLPYILLMVAF

SEQ ID NO: 1025586 - protein, 111 aa, Homo sapiens
  misc_feature (107)..(107): Xaa can be any naturally occurring amino acid
  misc_feature (111)..(111): Xaa can be any naturally occurring amino acid
MSPRFVPMWSARLLTRAHVECPPAHTCPCGVPACSHMSMRSARLLTHVHVECPPAHVPMWSAHLLTCADVECRLLHTRAHVGVARLLHVAHVGVLGLVQQVADVGVXRFVX

SEQ ID NO: 1025587 - protein, 136 aa, Homo sapiens
  misc_feature (132)..(132): Xaa can be any naturally occurring amino acid
  misc_feature (136)..(136): Xaa can be any naturally occurring amino acid
MHEPSLCANVECPPAHTCRRGVPACSRAHMECPPAHTCHCGVPACSHTCRVPMWSARLLTRAHVECLPAHTRAHVECPPAHVPMWSAHLLTCADVECRLLHTRAHVGVARLLHVAHVGVLGLVQQVADVGVXRFVX

SEQ ID NO: 1025588 - protein, 137 aa, Homo sapiens
HVKSCQNKRLKLAQAAFEDAVITKAVENASVDGDEIPEAMIEEDVHRQIDQYLGQLQQQGISRDMFFQISGQTEDDLHKQFEEGAATRVKTNLVLEAIVKAEGIDPTEEQITEEVNNLAAQYNMGPAQIRAHCQIHC

SEQ ID NO: 1025589 - protein, 97 aa, Homo sapiens
AAGASAPGAGAEFGRAEGARERSDAPGRMVLESVARIVKVQLPAYLKRLPAPESITGFARLTVSEWLVMAFPVVYSHLLGYPVQFVHSSRRRNQQKG

SEQ ID NO: 1025590 - protein, 124 aa, Homo sapiens
  misc_feature (107)..(107): Xaa can be any naturally occurring amino acid
RRHQYPSEAASTWTIIGLLFDALIDQTTRKTIWGLGRILLQVLHGDHPFYYFVIGQNGPILGSHRRSSIRRLPGNIYHFFGFRLALEPRIWLCTRINDATTNYGSDXPTIIENVSSRALHFNQR

SEQ ID NO: 1025591 - protein, 75 aa, Homo sapiens
PLLIGNSWPPFQLAMDPNCSCAAGDSCTCAGSCKCKECKCTSCKKSCCSCCPVGCAKCAQGCICKGGSDKCSCCA

SEQ ID NO: 1025592 - protein, 91 aa, Homo sapiens
MAPEKRFENPIRFGSRAGPKIELNGNPCAPKEGFPEGGTSGARDSGAVVSPTQIKRARGEQPSVFGTHSQRGVRSHRVLHTGPGTDNSRRG

SEQ ID NO: 1025593 - protein, 91 aa, Homo sapiens; identical to SEQ ID NO: 1025592

SEQ ID NO: 1025594 - protein, 68 aa, Homo sapiens
MDPNCSCAAGDSCTCAGSCKCKECKCTSCKKSHFWHLIKDLKGGSLCVCKLMFLGAQIPSNLAGTAIP

SEQ ID NO: 1025595 - protein, 105 aa, Homo sapiens
  misc_feature (15)..(15): Xaa can be any naturally occurring amino acid
FGTGNTARPDCASRXLTDFLLCAKLWCCASRESPGPLPAIPTKVLPTGKACPLAPTTRDPCPEGGLLGVCGNVGIFCRERGVLLGFEGLKGAEPRPDGLPAPAVT

SEQ ID NO: 1025596 - protein, 113 aa, Homo sapiens
  misc_feature (4)..(4): Xaa can be any naturally occurring amino acid
  misc_feature (6)..(6): Xaa can be any naturally occurring amino acid
  misc_feature (103)..(103): Xaa can be any naturally occurring amino acid
  misc_feature (111)..(111): Xaa can be any naturally occurring amino acid
GRAXRXRVKPLIDAISAGCDIARALTHASPQMLNSAAPRHGFKKRTEYRRRIVRTVARLQRHFQRRRNNGTNVTPPVEICRDDAGSSGTPSPFTDQQQSVWDXDDFIAAIXGR

SEQ ID NO: 1025597 - protein, 744 aa, Homo sapiens
MNTKKLAVTNGVVGLVGGIALLLGGWIVLYSGNRWNRTFAIVNVLFLLLKIATLVLGIVGLVQFSKEAVITKAPSVLLVVGGALAIIPFMGWIGGILSIIGGSIYLAISRNLSNKMAFIAVHIKKGDHDMINNSYLLKADLKREKDIPLISRESIIKLAKAHERGDVRYLNEAETNVYDLLTKIEVKRLASLYKSFIFDFSIEDSTVSYTFADIEEAIRDNIGVKNKRLLEDSTNLMSDIIRFAVTPVDYIFDFHKNDNGNLEVQRDQVLERFIEVLEQQTYENVWSDLMKYPFDNQTHGIRKHLMLGVAASTGKSIILEAIGKLYEASASFKSNRPENGFDAANWNADIIDKFVVLLDDDNPNVSINEDYLKNFLSNNMPQQLARGGGQRWSEIYYGSSVIALNTAPDFLKNQQNNKRVIFLKLTQSIEEMFTSEELNHLHNLEPKHILGYVNSEPTKLFKWRNDWSGVIEDLKEDVKQHISMRGYASLNDLKKTFGDKVMRDYQRTVEKAKNITVNGEAFYGLRQDAIIDEPYRVDQLTFSAFINLHDVIGERNFESLDEFKNDIEEYGKLKKEEQPLFSPAVYHDELTKANLTGFVGVVLDIDGANAADMDELEDKIAMTGISAVAWETASSTPSSLRARIWFYRVGGGLEEYASLVKKIAMKIDEPFDRASMPAEHRFFIGGTNVRLINTDSTAAENKPMTDMKKRGLVRAVQNAKDGEREQITYWALMRAEQENGGKEF

SEQ ID NO: 1025598 - protein, 53 aa, Homo sapiens
MTRTSTAAENKPMTDMKKRGLVRAVQNAKDGEREQITYWALMRAEQENGGKEF

SEQ ID NO: 1025599 - protein, 135 aa, Homo sapiens
  misc_feature (6)..(6): Xaa can be any naturally occurring amino acid
  misc_feature (24)..(24): Xaa can be any naturally occurring amino acid
  misc_feature (49)..(49): Xaa can be any naturally occurring amino acid
  misc_feature (56)..(56): Xaa can be any naturally occurring amino acid
  misc_feature (72)..(72): Xaa can be any naturally occurring amino acid
  misc_feature (75)..(75): Xaa can be any naturally occurring amino acid
  misc_feature (117)..(117): Xaa can be any naturally occurring amino acid
MSLRIXGSSLEKPEETHVEPLLLXRVDLCGRRHLVQRPVHVRMAFGETXNACGIGXTIAELMMPNARRPTSXGPXTREIDRAIELRDDQWHLLLQCFPCLGQFDTMLRAHEQRGAEXLLEQPEFPGSAAAARYGA

SEQ ID NO: 1025600 - protein, 128 aa, Homo sapiens
MEIQEIQLKEAKHIAEDADRKYEEVARKLVIIESDLERAEERAELSEGKCAELEEELKTVTNNLKSLEAQAEKYSQKEDRYEEEIKVLSDKLKEAETRAEFAERSVTKLEKSIDDLEEKVAHAKRRKP

SEQ ID NO: 1025601 - protein, 279 aa, Homo sapiens
DKYSEALKDAQEKLELAEKKATDAEADVASLNRRIQLVEEELDRAQERLATALQKLEEAEKAADESERGMKVIESRAQEDEEKMEIQEIQLKEAKHIAEDADRKYEEVARKLVIIESDLERAEERAELSEGKCAELEEELKTVTNNLKSLEAQAEKYSQKEDRYEEEIKVLSDKLKEAETRAEFAERSVTKLEKSIDDLEDEAVRSETEVQSHQRGAGPRSQRYDFHISFFASVLPRLPRRAGCPTSLSSAVVYVSSLTLGLSALDIPAFRCQGTALLL

SEQ ID NO: 1025602 - protein, 617 aa, Homo sapiens
MLVPLAKLSCLAYQCFHALKIKKNYLPLCAIRWSSTSTVPRITTHYTIYPRDKDKRWEGVNMERFAEEADVVIVGAGPAGLSAAVRLKQLAVAHEKDIRVCLVEKAAQIGAHTLSGACLDPGAFKELFPDWKEKGAPLNTPVTEDRFGILTEKYRIPVPILPGLPMNNHGNYIVRLGHLVSWMGEQAEALGVEVYPGYAAAEVLFHDDGSVKGIATNDVGIQKDGAPKATFERGLELHAKVTIFAEGCHGHLAKQLYKKFDLRANCEPQTYGIGLKELWVIDEKNWKPGRVDHTVGWPLDRHTYGGSFLYHLNEGEPLVALGLVVGLDYQNPYLSPFREFQRWKHHPSIRPTLEGGKRIAYGARALNEGGFQSIPKLTFPGGLLIGCSPGFMNVPKIKGTHTAMKSGILAAESIFNQLTSENLQSKTIGLHVTEYEDNLKNSWVWKELYSVRNIRPSCHGVLGVYGGMIYTGIFYWILRGMEPWTLKHKGSDFERLKPAKDCTPIEYPKPDGQISFDLLSSVALSGTNHEHDQPAHLTLRDDSIPVNRNLSIYDGPEQRFCPAGVYEFVPVEQGDGFRLQINAQNCVHCKTCDIKDPSQNINWVVPEGGGGPAYNGM

SEQ ID NO: 1025603 - protein, 604 aa, Homo sapiens
MLVPLAKLSCLAYQCFHALKIKKNYLPLCAIRWSSTSTVPRITTHYTIYPRDKDKRWEGVNMERFAEEADVVIVGAGPAGLSAAVRLKQLAVAHEKDIRVCLVEKAAQIGAHTLSGACLDPGAFKELFPDWKEKGAPLNTPVTEDRFGILTEKYRIPVPILPGLPMNNHGNYIVRLGHLVSWMGEQAEALGVEVYPGYAAAEVLFHDDGSVKGIATNDVGIQKDGAPKATFERGLELHAKVTIFAEGCHGHLAKQLYKKFDLRANCEPQTYGIGLKELWVIDEKNWKPGRVDHTVGWPLDRHTYGGSFLYHLNEGEPLVALGLVVGLDYQNPYLSPFREFQRWKHHPSIRPTLEGGKRIAYGARALNEGGFQSIPKLTFPGGLLIGCSPGFMNVPKIKGTHTAMKTSENLQSKTIGLHVTEYEDNLKNSWVWKELYSVRNIRPSCHGVLGVYGGMIYTGIFYWILRGMEPWTLKHKGSDFERLKPAKDCTPIEYPKPDGQISFDLLSSVALSGTNHEHDQPAHLTLRDDSIPVNRNLSIYDGPEQRFCPAGVYEFVPVEQGDGFRLQINAQNCVHCKTCDIKDPSQNINWVVPEGGGGPAYNGM

SEQ ID NO: 1025604 - protein, 335 aa, Homo sapiens
MLVPLAKLSCLAYQCFHALKIKKNYLPLCAIRWSSTSTVPRITTHYTIYPRDKDKRWEGVNMERFAEEADVVIVGAGPAGLSAAVRLKQLAVAHEKDIRVCLVEKAAQIGAHTLSGACLDPGAFKELFPDWKEKGAPLNTPVTEDRFGILTEKYRIPVPILPGLPMNNHGNYIVRLGHLVSWMGEQAEALGVEVYPGYAAAEVLFHDDGSVKGIATNDVGIQKDGAPKATFERGLELHAKVTIFAEGCHGHLAKQLYKKFDLRANCEPQTYGIGLKELWVIDEKNWKPGRVDHTVGWPLDRHTYGGSFLYHLNEGEPLVALGLVVGLDYQNPVEF

SEQ ID NO: 1025605 - protein, 510 aa, Homo sapiens
MSSRHTLSGACLDPGAFKELFPDWKEKGAPLNTPVTEDRFGILTEKYRIPVPILPGLPMNNHGNYIVRLGHLVSWMGEQAEALGVEVYPGYAAAEVLFHDDGSVKGIATNDVGIQKDGAPKATFERGLELHAKVTIFAEGCHGHLAKQLYKKFDLRANCEPQTYGIGLKELWVIDEKNWKPGRVDHTVGWPLDRHTYGGSFLYHLNEGEPLVALGLVVGLDYQNPYLSPFREFQRWKHHPSIRPTLEGGKRIAYGARALNEGGFQSIPKLTFPGGLLIGCSPGFMNVPKIKGTHTAMKSGILAAESIFNQLTSENLQSKTIGLHVTEYEDNLKNSWVWKELYSVRNIRPSCHGVLGVYGGMIYTGIFYWILRGMEPWTLKHKGSDFERLKPAKDCTPIEYPKPDGQISFDLLSSVALSGTNHEHDQPAHLTLRDDSIPVNRNLSIYDGPEQRFCPAGVYEFVPVEQGDGFRLQINAQNCVHCKTCDIKDPSQNINWVVPEGGGGPAYNGM

SEQ ID NO: 1025606 - protein, 448 aa, Homo sapiens
MLVPLAKLSCLAYQCFHALKIKKNYLPLCAIRWSSTSTVPRITTHYTIYPRDKDKRWEGVNMERFAEEADVVIVGAGPAGLSAAVRLKQLAVAHEKDIRVCLVEKAAQIGAHTLSGACLDPGAFKELFPDWKEKGAPLNTPVTEDRFGILTEKYRIPVPILPGLPMNNHGNYIVRLGHLVSWMGEQAEALGVEVYPGYAAAEVLFHDDGSVKGIATNDVGIQKDGAPKATFERGLELHAKVTIFAEGCHGHLAKQLYKKFDLRANCEPQTYGIGLKELWVIDEKNWKPGRVDHTVGWPLDRHTYGGSFLYHLNEGEPLVALGLVVGLDYQNPYLSPFREFQRWKHHPSIRPTLEGGKRIAYGARALNEGGFQSIPKLTFPGGLLIGCSPGFMNVPKIKGTHTAMKSGILAAESIFNQLTSENLQSKTIGKKFLCKVYKRKLLGYVYFN

SEQ ID NO: 1025607 - protein, 383 aa, Homo sapiens
MLVPLAKLSCLAYQCFHALKIKKNYLPLCAIRWSSTSTVPRITTHYTIYPRDKDKRWEGVNMERFAEEADVVIVGAGPAGLSAAVRLKQLAVAHEKDIRVCLVEKAAQIGAHTLSGACLDPGAFKELFPDWKEKGAPLNTPVTEDRFGILTEKYRIPVPILPGLPMNNHGNYIVRLGHLVSWMGEQAEALGVEVYPGYAAAEVLFHDDGSVKGIATNDVGIQKDGAPKATFERGLELHAKVTIFAEGCHGHLAKQLYKKFDLRANCEPQTYGIGLKELWVIDEKNWKPGRVDHTVGWPLDRHTYGGSFLYHLNEGEPLVALGLVVGLDYQNPYLESLFETSHLVEHPLAFGHLDVARLLPSQSLQGLPFHPFAAPRGPVVPPV

SEQ ID NO: 1025608 - protein, 599 aa, Homo sapiens
MLVPLAKLSCLAYQCFHALKIKKNYLPLCAIRWSSTSTVPRITTHYTIYPRDKDKRWEGVNMERFAEEADVVIVGAGPAGLSAAVRLKQLAVAHEKDIRVCLVEKAAQIGAHTLSGACLDPGAFKELFPDWKEKGAPLNTPVTEDRFGILTEKYRIPVPILPGLPMNNHGNYIVRLGHLVSWMGEQAEALGVEVYPGYAAAEVLFHDDGSVKGIATNDVGIQKDGAPKATFERGLELHAKVTIFAEGCHGHLAKQLYKKFDLRANCEPQTYGIGLKELWVIDEKNWKPGRVDHTVGWPLDRHTYGGSFLYHLNEGEPLVALGLVVGLDYQNPYLSPFREFQRWKHHPSIRPTLEGGKRIAYGARALNEGGFQSIPKLTFPGGLLIGCSPGFMNVPKIKGTHTAMKSGILAAESIFNQLTSENLQSKTIGLHVTEYEDNLKNSWVWKELYSVRNIRPSCHGVLGVYGGMIYTGIFYWILRGMEPWTLKHKGSDFERLKPAKDCTPIEYPTNHEHDQPAHLTLRDDSIPVNRNLSIYDGPEQRFCPAGVYEFVPVEQGDGFRLQINAQNCVHCKTCDIKDPSQNINWVVPEGGGGPAYNGM

SEQ ID NO: 1025609 - protein, 494 aa, Homo sapiens
MLVPLAKLSCLGAPLNTPVTEDRFGILTEKYRIPVPILPGLPMNNHGNYIVRLGHLVSWMGEQAEALGVEVYPGYAAAEVLFHDDGSVKGIATNDVGIQKDGAPKATFERGLELHAKVTIFAEGCHGHLAKQLYKKFDLRANCEPQTYGIGLKELWVIDEKNWKPGRVDHTVGWPLDRHTYGGSFLYHLNEGEPLVALGLVVGLDYQNPYLSPFREFQRWKHHPSIRPTLEGGKRIAYGARALNEGGFQSIPKLTFPGGLLIGCSPGFMNVPKIKGTHTAMKSGILAAESIFNQLTSENLQSKTIGLHVTEYEDNLKNSWVWKELYSVRNIRPSCHGVLGVYGGMIYTGIFYWILRGMEPWTLKHKGSDFERLKPAKDCTPIEYPKPDGQISFDLLSSVALSGTNHEHDQPAHLTLRDDSIPVNRNLSIYDGPEQRFCPAGVYEFVPVEQGDGFRLQINAQNCVHCKTCDIKDPSQNINWVVPEGGGGPAYNGM

SEQ ID NO: 1025610 - protein, 617 aa, Homo sapiens; identical to SEQ ID NO: 1025602

SEQ ID NO: 1025611 - protein, 72 aa, Homo sapiens
  misc_feature (45)..(45): Xaa can be any naturally occurring amino acid
  misc_feature (50)..(50): Xaa can be any naturally occurring amino acid
  misc_feature (55)..(55): Xaa can be any naturally occurring amino acid
  misc_feature (63)..(63): Xaa can be any naturally occurring amino acid
  misc_feature (70)..(70): Xaa can be any naturally occurring amino acid
MLGSTLTGRVHGRKGAGFLEDVGATLWGPGFSRHLARSGHLGLVXVGPGXWSGAXGAAQAPTXVNPAPWXLW

SEQ ID NO: 1025612 - protein, 116 aa, Homo sapiens
ASKNLSGIPQGCREFSTEVVFVAKYIFGKDRALLEAPGCWHYRVLRATLPVCEHPCSQMWLQAVALGFPSRSWEAGGKLRFLFRRASDLPLQDVCYYYYRKRTPLSTSHKVRSKGH

SEQ ID NO: 1025613 - protein, 440 aa, Homo sapiens [sequence omitted]

SEQ ID NO: 1025614 - protein, 218 aa, Homo sapiens
MKGAKCCRDQGRRKDVTSRSWGHGQRQGRFITDGKSVADHVHRGGPEQRSDMRTQENSGPGSGTAVHPHPGRGWHLRRHSCPSLARSNLGTDGGEEGQLEEAHFRKLPTEPVSILQTSSACRGSLTRQQGGPHQPTPMPGTPFTSGRVLKTPESSALCIKHRLRPCTQEDAILSLKSRAHHPGRSSLQTSLQTQRRPLELTTPGVRHCRHHCRHRDGH

SEQ ID NO: 1025615 - protein, 104 aa, Homo sapiens
MKGAKCCRDQGRRKDVTSRSWGHGQRQGRFITDGKSVADHVHRGGPEQRSDMRTQENSGPGSGTAVHPHPGRGWHLRRHSCPSLARSNLGTDGGRGRATRGGTF

SEQ ID NO: 1025616 - protein, 104 aa, Homo sapiens; identical to SEQ ID NO: 1025615

SEQ ID NO: 1025617 - protein, 104 aa, Homo sapiens; identical to SEQ ID NO: 1025615

SEQ ID NO: 1025618 - protein, 157 aa, Homo sapiens
  misc_feature (7)..(7): Xaa can be any naturally occurring amino acid
  misc_feature (11)..(11): Xaa can be any naturally occurring amino acid
  misc_feature (21)..(21): Xaa can be any naturally occurring amino acid
KKKLWAXINRXTKKQGNEALXFPLWGFPFSGLCANPAPPSGAAGLKGRNSVGGGCEFADPGSLLCSGGGKLQFDRDPPSLSPLLSRPRPGVLAVGSSEVGEACGVEGPAPAPAPVTPSCCLLHAQGTPMVQSSGKARTGLRPCVEMLHQRKAETRLP

SEQ ID NO: 1025619 - protein, 1255 aa, Homo sapiens
MTPGTQSPFFLLLLLTVLTVVTGSGHASSTPGGEKETSATQRSSVPSSTEKNAVSMTSSVLSSHSPGSGSSTTQGQDVTLAPATEPASGSAATWGQDVTSVPVTRPALGSTTPPAHDVTSAPDNKPAPGSTAPPAHGVTSAPDTRPAPGSTAPPAHGVTSAPDTRPAPGSTAPPAHGVTSAPDTRPAPGSTAPPAHGVTSAPDTRPAPGSTAPPAHGVTSAPDTRPAPGSTAPPAHGVTSAPDTRPAPGSTAPPAHGVTSAPDTRPAPGSTAPPAHGVTSAPDTRPAPGSTAPPAHGVTSAPDTRPAPGSTAPPAHGVTSAPDTRPAPGSTAPPAHGVTSAPDTRPAPGSTAPPAHGVTSAPDTRPAPGSTAPPAHGVTSAPDTRPAPGSTAPPAHGVTSAPDTRPAPGSTAPPAHGVTSAPDTRPAPGSTAPPAHGVTSAPDTRPAPGSTAPPAHGVTSAPDTRPAPGSTAPPAHGVTSAPDTRPAPGSTAPPAHGVTSAPDTRPAPGSTAPPAHGVTSAPDTRPAPGSTAPPAHGVTSAPDTRPAPGSTAPPAHGVTSAPDTRPAPGSTAPPAHGVTSAPDTRPAPGSTAPPAHGVTSAPDTRPAPGSTAPPAHGVTSAPDTRPAPGSTAPPAHGVTSAPDTRPAPGSTAPPAHGVTSAPDTRPAPGSTAPPAHGVTSAPDTRPAPGSTAPPAHGVTSAPDTRPAPGSTAPPAHGVTSAPDTRPAPGSTAPPAHGVTSAPDTRPAPGSTAPPAHGVTSAPDTRPAPGSTAPPAHGVTSAPDTRPAPGSTAPPAHGVTSAPDTRPAPGSTAPPAHGVTSAPDTRPAPGSTAPPAHGVTSAPDTRPAPGSTAPPAHGVTSAPDTRPAPGSTAPPAHGVTSAPDTRPAPGSTAPPAHGVTSAPDTRPAPGSTAPPAHGVTSAPDTRPAPGSTAPPAHGVTSAPDNRPALGSTAPPVHNVTSASGSASGSASTLVHNGTSARATTTPASKSTPFSIPSHHSDTPTTLASHSTKTDASSTHHSSVPPLTSSNHSTSPQLSTGVSFFFLSFHISNLQFNSSLEDPSTDYYQELQRDISEMFLQIYKQGGFLGLSNIKFRPGSVVVQLTLAFREGTINVHDVETQFNQYKTEAASRYNLTISDVSVSDVPFPFSAQSGAGVPGWGIALLVLVCVLVALAIVYLIALAVCQCRRKNYGQLDIFPARDTYHPMSEYPTYHTHGRYVPPSSTDRSPYEKVSAGNGGSSLSYTNPAVAAASANL

SEQ ID NO: 1025620 - protein, 515 aa, Homo sapiens
MTPGTQSPFFLLLLLTVLTVVTGSGHASSTPGGEKETSATQRSSVPSSTEKNAVSMTSSVLSSHSPGSGSSTTQGQDVTLAPATEPASGSAATWGQDVTSVPVTRPALGSTTPPAHDVTSAPDNKPAPGSTAPPAHGVTSAPDTRPPPGSTAPPAHGVTSAPDTRPPPGSTAPAAHGVTSAPDTRPAPGSTAPPAHGVTSAPDNRPALASTAPPVHNVTSASGSASGSASTLVHNGTSARATTTPASKSTPFSIPSHHSDTPTTLASHSTKTDASSTHHSTVPPLTSSNHSTSPQLSTGVSFFFLSFHISNLQFNSSLEDPSTDYYQELQRDISEMFLQIYKQGGFLGLSNIKFRPGSVVVQLTLAFREGTINVHDVETQFNQYKTEAASRYNLTISDVSVSDVPFPFSAQSGAGVPGWGIALLVLVCVLVALAIVYLIALAVCQCRRKNYGQLDIFPARDTYHPMSEYPTYHTHGRYVPPSSTDRSPYEKVSAGNGGSSLSYTNPAVAATSANL

SEQ ID NO: 1025621 - protein, 347 aa, Homo sapiens
MTPGTQSPFFLLLLLTVLTVVTGSGHASSTPGGEKETSATQRSSVPSSTEKNAVSMTSSVLSSHSPGSGSSTTQGQDVTLAPATEPASGSAATWGQDVTSVPVTRPALGSTTPPAHDVTSAPDNKPAPGSTAPPAHGVTSAPDTRPPPGSTAPPAHGVTSAPDTRPPPGSTAPAAHGVTSAPDTRPAPGSTAPPAHGVTSAPDNRPALGSTAPPVHNVTSASGSASGSASTLVHNGTSARATTTPASKSTPFSIPSHHSDTPTTLASHSTKTDASSTHHSTVPPLTSSNHSTSPQLSTGVSFFFLSFHISNLQFNSSLEDPSTDYYQELQRDISEMVSIGLSFPMLP

SEQ ID NO: 1025622 - protein, 197 aa, Homo sapiens
MFGGDFPTARDPQGNYFIDRDGPLFRYVLNFLRTSELTLPLDFKEFDLLRKEADFYQIEPLIQCLNDPKPLYPMDTFEEVVELSSTRKLSKYSNPVAVIITQLTITTKVHSLLEGISNYFTKWNKHMMDTRDCQVSFTFGPCDYHQEVSLRVHLMEYITKQGFTIRNTRVHHMSERANENTVEHNWTFCRLARKTDD

SEQ ID NO: 1025623 - protein, 237 aa, Homo sapiens
MDNGDWGYMMTDPVTLNVGGHLYTTSLTTLTRYPDSMLGAMFGGDFPTARDPQGNYFIDRDGPLFRYVLNFLRTSELTLPLDFKEFDLLRKEADFYQIEPLIQCLNDPKPLYPMDTFEEVVELSSTRKLSKYSNPVAVIITQLTITTKVHSLLEGISNYFTKWNKHMMDTRDCQVSFTFGPCDYHQEVSLRVHLMEYITKQGFTIRNTRVHHMSERANENTVEHNWTFCRLARKTDD

SEQ ID NO: 1025624 - protein, 237 aa, Homo sapiens; identical to SEQ ID NO: 1025623

SEQ ID NO: 1025625 - protein, 284 aa, Homo sapiens
ARALRPRASPGPAAAAAAAAHFPETWALEDASLEQMDNGDWGYMMTDPVTLNVGGHLYTTSLTTLTRYPDSMLGAMFGGDFPTARDPQGNYFIDRDGPLFRYVLNFLRTSELTLPLDFKEFDLLRKEADFYQIEPLIQCLNDPKPLYPMDTFEEVVELSSTRKLSKYSNPVAVIITQLTITTKVHSLLEGISNYFTKWNKHMMDTRDCQVSFTFGPCDYHQEVSLRVHLMEYITKQGFTIRNTRVHHMSERANENTVEHNWTFCRLVTGMSYSRFPDYWDPQIQ

SEQ ID NO: 1025626 - protein, 272 aa, Homo sapiens
ARALRPRASPGPAAAAAAAAHFPETWALEDASLEQMDNGDWGYMMTDPVTLNVGGHLYTTSLTTLTRYPDSMLGAMFGGDFPTARDPQGNYFIDRDGPLFRYVLNFLRTSELTLPLDFKEFDLLRKEADFYQIEPLIQCLNDPKPLYPMDTFEEVVELSSTRKLSKYSNPVAVIITQLTITTKVHSLLEGISNYFTKWNKHMMDTRDCQVSFTFGPCDYHQEVSLRVHLMEYITKQGFTIRNTRVHHMSERANENTVEHNWTFCRLARKTDD

SEQ ID NO: 1025627 - protein, 256 aa, Homo sapiens
ARALRPRASPGPAAAAAAAAHFPETWALEDASLEQMDNGDWGYMMTDPVTLNVGGHLYTTSLTTLTRYPDSMLGAMFGGDFPTARDPQGNYFIDRDGPLFRYVLNFLRTSELTLPLDFKEFDLLRKEADFYQIEPLIQCLNDPKPLYPMDTFEEVVELSSTRKLSKYSNPVAVIITQLTITTKVHSLLEGISNYFTKWNKHMMDTRDCQVSFTFGPCDYHQEVSLRVHLMEYITKQGFTIRNTRSNLRCDAAYTTH

SEQ ID NO: 1025628 - protein, 402 aa, Homo sapiens
MHMQGQTHSRIPQGTAGTQLLGKKCFALRMASRLAKEEGWLAEHMLILGITNPEGEKKYLAAAFPSACGKTNLAMMNPSLPGWKVECVGDDIAWMKFDAQGHLRAINPENGFFGVAPGTSVKTNPNAIKTIQKNTIFTNVAETSDGGVYWEGIDEPLASGVTITSWKNKEWSSEDGEPCAHPNSRFCTPASQCPIIDAAWESPEGVPIEGIIFGGRRPAGVPLVYEALSWQHGVFVGAAMRSEATAAAEHKGKIIMHDPFAMRPFFGYNFGKYLAHWLSMAQHPAAKLPKIFHVNWFRKDKEGKFLWPGFGENSRVLEWMFNRIDGKASTNVTPIGYIPKEDALNLKGLGHINMMELFSISKEFWDKEVEDIEKYLVDQVNADLPCEIEREILALKQRISQM

SEQ ID NO: 1025629 - protein, 622 aa, Homo sapiens
MPPQLQNGLNLSAKVVQGSLDSLPQAVREFLENNAELCQPDHIHICDGSEEENGRLLGQMEEEGILRRLKKYDNCWLALTDPRDVARIESKTVIVTQEQRDTVPIPKTGLSQLGRWMSEEDFEKAFNARFPGCMKGRTMYVIPFSMGPLGSPLSKIGIELTDSPYVVASMRIMTRMGTPVLEALGDGEFVKCLHSVGCPLPLQKPLVNNWPCNPELTLIAHLPDRREIISFGSGYGGNSLLGKKCFALRMASRLAEEEGWLAEHMLILGITNPEGEKKYLAAAFPSACGKTNLAMMNPSLPGWKVECVGDDIAWMKFDAQGHLRAINPENGFFGVAPGTSVKTNPNAIKTIQKNTIFTNVAETSDGGVYWEGIDEPLASGVTITSWKNKEWSSEDGEPCAHPNSRFCTPASQCPIIDAAWESPEGVPIEGIIFGGRRPAGVPLVYEALSWQHGVFVGAAMRSEATAAAEHKGKIIMHDPFAMRPFFGYNFGKYLAHWLSMAQHPAAKLPKIFHVNWFRKDKEGKFLWPGFGENSRVLEWMFNRIDGKASTNVTPIGYIPKEDALNLKGLGHINMMELFSISKEFWDKEVEDIEKYLVDQVNADLPCEIEREILALKQRISQM

SEQ ID NO: 1025630 - protein, 199 aa, Homo sapiens
  misc_feature (4)..(4): Xaa can be any naturally occurring amino acid
  misc_feature (20)..(20): Xaa can be any naturally occurring amino acid
  misc_feature (22)..(22): Xaa can be any naturally occurring amino acid
  misc_feature (30)..(30): Xaa can be any naturally occurring amino acid
  misc_feature (32)..(32): Xaa can be any naturally occurring amino acid
  misc_feature (35)..(35): Xaa can be any naturally occurring amino acid
  misc_feature (46)..(47): Xaa can be any naturally occurring amino acid
  misc_feature (68)..(68): Xaa can be any naturally occurring amino acid
  misc_feature (71)..(71): Xaa can be any naturally occurring amino acid
  misc_feature (73)..(73): Xaa can be any naturally occurring amino acid
  misc_feature (97)..(97): Xaa can be any naturally occurring amino acid
  misc_feature (100)..(101): Xaa can be any naturally occurring amino acid
  misc_feature (108)..(108): Xaa can be any naturally occurring amino acid
  misc_feature (124)..(125): Xaa can be any naturally occurring amino acid
  misc_feature (127)..(127): Xaa can be any naturally occurring amino acid
WVPXTAPGQRGGTRGPSSPXGXPWQGDWAXVXLWXRDPDHGAFCHXXGGGCCNQGHGKITGSQDGGGXSSXPXNLERPPPRACPCFGPVLSWTPPTXFFXXFFLVFPXPSICRGAPALYLGPLXXGXGRCGLGEAALLFSPHTTALVGVQGVGCCLWLSLFRPPRHSIWNQKAVDSGKWSLCPPHSSLVWSPVAHSPLP

SEQ ID NO: 1025631 - protein, 202 aa, Homo sapiens
  misc_feature (4)..(4): Xaa can be any naturally occurring amino acid
  misc_feature (20)..(20): Xaa can be any naturally occurring amino acid
  misc_feature (22)..(22): Xaa can be any naturally occurring amino acid
  misc_feature (30)..(30): Xaa can be any naturally occurring amino acid
  misc_feature (32)..(32): Xaa can be any naturally occurring amino acid
  misc_feature (35)..(35): Xaa can be any naturally occurring amino acid
  misc_feature (46)..(47): Xaa can be any naturally occurring amino acid
  misc_feature (68)..(68): Xaa can be any naturally occurring amino acid
  misc_feature (71)..(71): Xaa can be any naturally occurring amino acid
  misc_feature (73)..(73): Xaa can be any naturally occurring amino acid
  misc_feature (97)..(97): Xaa can be any naturally occurring amino acid
  misc_feature (100)..(101): Xaa can be any naturally occurring amino acid
  misc_feature (108)..(108): Xaa can be any naturally occurring amino acid
  misc_feature (124)..(125): Xaa can be any naturally occurring amino acid
  misc_feature (127)..(127): Xaa can be any naturally occurring amino acid
  misc_feature (150)..(150): Xaa can be any naturally occurring amino acid
  misc_feature (154)..(155): Xaa can be any naturally occurring amino acid
  misc_feature (157)..(157): Xaa can be any naturally occurring amino acid
WVPXTAPGQRGGTRGPSSPXGXPWQGDWAXVXLWXRDPDHGAFCHXXGGGCCNQGHGKITGSQDGGGXSSXPXNLERPPPRACPCFGPVLSWTPPTXFFXXFFLVFPXPSICRGAPALYLGPLXXGXGRCGLGEAALLFSPHTTALVGGXGVGXXFXFFFFFFFFFFLNSIWNQKAVDSGKWSLCPPHSSLVWSPVAHSPLP

SEQ ID NO: 1025632 - protein, 234 aa, Homo sapiens
RNNLDLLNDRERTTDRRKTTRARDDVLELEMDELNRHECMAPLTALVKHMHRSLGPPQGEEDSVPRDLPSWMKFLHGKLGNPIVPLNIRLFLAKLVINTEEVFRPYAKHWLSPLLQLAASENNGGEGIHYMVVEIVATILSWTGLATPTGVPKDEVLANRLLNFLMKHVFHPKRAVFRHNLEIIKTLVECWKDCLSIPYRLIFEKFSGKDPNSKDNSVGIQLLGIVMANACLPI

SEQ ID NO: 1025633 - protein, 269 aa, Homo sapiens
  misc_feature (1)..(1): Xaa can be any naturally occurring amino acid
  misc_feature (6)..(6): Xaa can be any naturally occurring amino acid
XIRLQXHSRVRRERSTKDWRVKLRRGSSFLNISYTLSRRPRPATGRFRRREQRDPTVHDDVLELEMDELNRHECMAPLTALVKHMHRSLGPPQGEEDSVPRDLPSWMKFLHGKLGNPIVPLNIRLFLAKLVINTEEVFRPYAKHWLSPLLQLAASENNGGEGIHYMVVEIVATILSWTGLATPTGVPKDEVLANRLLNFLMKHVFHPKRAVFRHNLEIIKTLVECWKDCLSIPYRLIFEKFSGKDPNSKDNSVGIQLLGIVMANACLPI

SEQ ID NO: 1025634 - protein, 287 aa, Homo sapiens
  misc_feature (19)..(19): Xaa can be any naturally occurring amino acid
KKYIEIRKEAREAANGDSXGPSYMSSLSYLADSTLSEEMSQFDFSTGVQSYSYSSQDPRPATGRFRRREQRDPTVHDDVLELEMDELNRHECMAPLTALVKHMHRSLGPPQGEEDSVPRDLPSWMKFLHGKLGNPIVPLNIRLFLAKLVINTEEVFRPYAKHWLSPLLQLAASENNGGEGIHYMVVEIVATILSWTGLATPTGVPKDEVLANRLLNFLMKHVFHPKRAVFRHNLEIIKTLVECWKDCLSIPYRLIFEKFSGKDPNSKDNSVGIQLLGIVMANACLPI

SEQ ID NO: 1025635 - protein, 296 aa, Homo sapiens [sequence omitted]

SEQ ID NO: 1025636 - protein, 170 aa, Homo sapiens
KVMRVEPNKMKKKWKSQAASMLIQRLKHVAEDATVNMNEVGALTSWLIIWELIWNSVQQRVGLSSQIGKSVPSLNEMHIEETVTNNLYTSTVRLRLRSNLAEGRRDLRPEIKVLSDKLKEAETRAEFAERSVTKLEKSIDDLEDELYAQKLKYKAISEELDHALNDMTSI

SEQ ID NO: 1025637 - protein, 140 aa, Homo sapiens
GQLSLLWGFKDGLGWIIRNGIGIHEHASIDLPGIKGLWPLRSDPNRETDDTLVLSFVGQTRVLMLNGEEVEETELMGFVDDQQTFFCGNVAHQQLIQITSASVRLVSQEPKALVSEWKEPQAKNISVDSCNSMTSVVGGL

SEQ ID NO: 1025638 - protein, 153 aa, Homo sapiens
MSITTGQKLLKSRILFHPRSLRGLQMILNSDRYAPSLHELGHFNIPTLCDPANLQWFILTKAQQARENMKRKEELKVIENELIQASTKKFSLEKLYKEPSISSIQMVDCCKRLLEQSLPYLHGMHLCISHFYSVMQDGDLCIPWNWKNGEAIK

SEQ ID NO: 1025639 - protein, 246 aa, Homo sapiens
RLAQQNLETLKKAKGCTIIFTDRSGMSAVGHVMLGTMDVHHHWTKLFERLPSYFDLQRRLMILEDQISYLLGGIQVVYIEELQPVLTLEEYYSLLDVFYNRLLKSRILFHPRSLRGLQMILNSDRYAPSLHELGHFNIPTLCDPANLQWFILTKAQQARENMKRKEELKVIENELIQASTKKFSLEKLYKEPSISSIQMVDCCKRLLEQSLPYLHGMHLCISHFYSVMQDGDLCIPWNWKNGEAIK

SEQ ID NO: 1025640 - protein, 117 aa, Homo sapiens
VECGKESTDTSPTLYWEPASAPDPQCERGPHVADGKKGCPELLSREAVAEPPSPTSHGIRRQQKLWGTEFATGVPADNRLKELPDTLGELRSLRTLDISENEVRRLPQMLAHVRTLE

SEQ ID NO: 1025641 - protein, 69 aa, Homo sapiens
VLNVERNQLTHLPRSIGNLLQLQTLSVKDNRLKELPDTLGELRSLRTLDISENEVRRLPQMLAHVRTLE

SEQ ID NO: 1025642 - protein, 133 aa, Homo sapiens
MSRRGWMSEAGKKQHRLAWVFAPGPGLEPAPLPAPGKSETTRGGAAAGGWAAAPWRVPEGRSQGLGVPAGGASRGRGGPLCLLHRVSYFVTKVLQPLAPAGTLGRPAASCRRHGTLGQQHPGPAAGGRVPGAP

SEQ ID NO: 1025643 - protein, 197 aa, Homo sapiens
MEPLASNIQVLLQAAEFLERREREAEHGYASLCPHRSPGPIHRRKKRPPQAPGAQDSGRWRAQLKRCLERLKQQMPLGADCARYTTLSLLRRARMHIQKLEDQEQRARQLKERLRSKQQSLQRQLEQLRGLAGAAERERLRADSLDSSGLSSERSDSDQEELEVDVESLVFGGEAELLRGFVAGQEHSYSHGGGAWL

SEQ ID NO: 1025644 - protein, 147 aa, Homo sapiens
MRPCARIAVQAPSTGGRSDPPRLLARRTAGGEEAGGGGSGGGGGRRPWSGPPLPTCCLHLLGQVSRSRKRSDPSCHLPTLQTHSHLSYSFKDYFLSTSRCAGNCQQQLGSRFHSHSRTPDIRPLTSPAGFLLFSPLPSPLHMLFPPI

SEQ ID NO: 1025645 - protein, 118 aa, Homo sapiens
MNWRSAGESQSCADSAMPPGATALWPSLPCHSCGRHEVGLALPSRPLPHRRAQLKRCLERLKQQMPLGADCARYTTLSLLRRARMHIQVEAPHCARTGLPWCMEGCAMEGLVGLGNET

SEQ ID NO: 1025646 - protein, 206 aa, Homo sapiens
MEPLASNIQVLLQAAEFLERREREAEHGYASLCPHRSPGPIHRRKKRPPQAPGAQDSGRSVHNELEKRRRAQLKRCLERLKQQMPLGADCARYTTLSLLRRARMHIQKLEDQEQRARQLKERLRSKQQSLQRQLEQLRGLAGAAERERLRADSLDSSGLSSERSDSDQEELEVDVESLVFGGEAELLRGFVAGQEHSYSHGGGAWL

SEQ ID NO: 1025647 - protein, 397 aa, Homo sapiens
MNAGSDPVVIVSAARTIIGSFNGALAAVPVQDLGSTVIKEVLKRATVAPEDVSEVIFGHVLAAGCGQNPVRQASVGAGIPYSVPAWSCQMICGSGLKAVCLAVQSIGIGDSSIVVAGGMENMSKAPHLAYLRTGVKIGEMPLTDSILCDGLTDAFHNCHMGITAENVATKWQVSREDQDKVAVLSQNRTENAQKAGHFDKEIVPVLVSTRKGLIEVKTDEFPRHGSNIEAMSKLKPYFLTDGTGTVTPANASGINDGAAAVALMKKSEADKRGLTPLARIVSWSQVGVEPSIMGIGPIPAIKQAVTKAGWSLEDVDIFEINEAFAAVSAAIVKELGLNPEKVNIEGGAIALGHPLGASGCRILVTLLHTLERMGRSRGVAALCIGGGMGIAMCVQRE

SEQ ID NO: 1025648 - protein, 388 aa, Homo sapiens
GQRRADGGRRSKMNAGSDPVVIVSAARTIIGSFNGALAAVPVQDLGSTVIKEVLKRATVAPEDVSEVIFGHVLAAGCGQNPVRQASVGAGIPYSVPAWSCQMICGSGLKAVCLAVQSIGIGDSSIVVAGGMENMSKAPHLAYLRTGVKIGEMPLTDSILCDGLTDAFHNCHMGITAENVATKWQVSREDQDKVAVLSQNRTENAQKAGHFDKEIVPVLVSTRKGLIEVKTDEFPRHGSNIEAMSKLKPYFLTDGTGTVTPANASGINDGAAAVALMKKSEADKRGLTPLARIVSWSQVGVEPSIMGIGPIPAIKQAVTKAGWSLEDVDIFEINEAFAAVSAAIVKELGLNPEKVNIEGGAIALGHPLGALGGPIFGPRSPPLKRMGRN

SEQ ID NO: 1025649 - protein, 89 aa, Homo sapiens
  misc_feature (4)..(4): Xaa can be any naturally occurring amino acid
  misc_feature (19)..(19): Xaa can be any naturally occurring amino acid
  misc_feature (72)..(72): Xaa can be any naturally occurring amino acid
  misc_feature (80)..(80): Xaa can be any naturally occurring amino acid
FTWXMGLIYRDGVMQAMDXFDKSQFLFRNPHCDLGEKLPGTHWPSNHIYSSQGLIPFYMGFIPAMQDNYALXFGNRTRRXYWKELGKAK

SEQ ID NO: 1025650 - protein, 87 aa, Homo sapiens
LQALETVNGVAWKWTGKEGLQWSSQTGNRDFFPSSIYPGLAASLPTPAPVLCCLEATWTFMRCILFCLWWMGWCKAQDLALPEVATC

SEQ ID NO: 1025651 - protein, 222 aa, Homo sapiens
  misc_feature (9)..(9): Xaa can be any naturally occurring amino acid
  misc_feature (11)..(11): Xaa can be any naturally occurring amino acid
LTFCRRVWXAXVVRQHISTDHQGQFVFVGSYNAGNVSVTVLEDGLPVGVVDVVEGLDGCHSANISPDNRTLWVPALKQDRICLFTVSDDGHLVAAGPAEVTTVEGAGPRHMVFHPNEQYAYCVNELNSSVDVWELKDPHGNIECVQTLDMMPENFSDTVGRLIFISPRMVANLYACDRTASLITVFSVSEDGSVLSKEASSLRNPSARFNVDHSGKYLIAAG

SEQ ID NO: 1025652 - protein, 172 aa, Homo sapiens
RPVGAKDGSENLAGKPALQIPSSRAAAPRPPVSAASGRPQDDTDSSRASLPELPRMQRPSLPDLSRPNTTSSTGMKHSSSAPPPPPPGRRANAPPTPLPMHSSKAPDYNREKPLPPTAGTKGFTLGREGPPASTPSQTTSFPCEYQNRTKWPVSGSSSSALPPASWGPQWTL

SEQ ID NO: 1025653 - protein, 420 aa, Homo sapiens
PNILETTEGLELLKTAHWATAGYTDKVVIGMDVAASEVLSGLGKYAPGLQVSRMIPSRYHLAWTSLAAPVQVLPSRTHPSGVYRSIPLHQACTGEHWPEVPQPSARHIPGQCAGIASPPVHPTQQQASPTGRATQQVRATLPTCIKRQPREAPMTDVYLQRVHSWTQANWYGASWCLHTLRRDDWQIPSIADLVVRTCATGPGSTTGCPFADTEALGHVTTKIPPHLTADAGTNHRAQGMGRPGHHRNTTLGPSNGLWSQGHTQRSHMLRPTQKPLTIGGPAIRPVQGQRTQNDDTGYPVQAYKRPKSHEDTSHTRDTANERTRTPTPPDHHPWHARHTQHEHKRPRAVEIATQNTKRIHPRTTTHPEDTTAKPKGGPTMRDPAGNTKREHTARNSTRHKKQQKTPPDSEKHNRRRNNVT

SEQ ID NO: 1025654 - protein, 104 aa, Homo sapiens
QPPPPLVGPGSTSSPQSLCEDRKRRSGSHHLGNGCFVLVMSTRHLIFWTPSPPQPLFLSPLTQRRLSDASFSLLGQSRSEEGKEGLGVRGQAMAKGPAAPHLSL

SEQ ID NO: 1025655 - protein, 113 aa, Homo sapiens
MNICIEEATLYYLLLKTPYLGVVAHARNRSTLGGQGGRIMRSGDRDHPGQQRRNPVSIYSFLESSTPGNFFHVLRRQILLPFRKPLIIFTPKSQYANDAHAFAVTSAPAASGR

SEQ ID NO: 1025656 - protein, 1061 aa, Homo sapiens
MPGPRRPAGSRLRLLLLLLLPPLLLLLRGSHAGNLTVAVVLPLANTSYPWSWARVGPAVELALAQVKARPDLLPGWTVRTVLGSSENALGVCSDTAAPLAAVDLKWEHNPAVFLGPGCVYAAAPVGRFTAHWRVPLLTAGAPALGFGVKDEYALTTRAGPSYAKLGDFVAALHRRLGWERQALMLYAYRPGDEEHCFFLVEGLFMRVRDRLNITVDHLEFAEDDLSHYTRLLRTMPRKGRVIYICSSPDAFRTLMLLALEAGLCGEDYVFFHLDIFGQSLQGGQGPAPRRPWERGDGQDVSARQAFQAAKIITYKDPDNPEYLEFLKQLKHLAYEQFNFTMEDGLVNTIPASFHDGLLLYIQAVTETLAHGGTVTDGENITQRMWNRSFQGVTGYLKIDSSGDRETDFSLWDMDPENGAFRVVLNYNGTSQELVAVSGRKLNWPLGYPPPDIPKCGFDNEDPACNQDHLSTLEVLALVGSLSLLGILIVSFFIYRKMQLEKELASELWRVRWEDVEPSSLERHLRSAGSRLTLSGRGSNYGSLLTTEGQFQVFAKTAYYKGNLVAVKRVNRKRIELTRKVLFELKHMRDVQNEHLTRFVGACTDPPNICILTEYCPRGSLQDILENESITLDWMFRYSLTNDIVKGMLFLHNGAICSHGNLKSSNCVVDGRFVLKITDYGLESFRDLDPEQGHTVYAKKLWTAPELLRMASPPVRGSQAGDVYSFGIILQEIALRSGVFHVEGLDLSPKEIIERVTRGEQPPFRPSLALQSHLEELGLLMQRCWAEDPQERPPFQQIRLTLRKFNRENSSNILDNLLSRMEQYANNLEELVEERTQAYLEEKRKAEALLYQILPHSVAEQLKRGETVQAEAFDSVTIYFSDIVGFTALSAESTPMQVVTLLNDLYTCFDAVIDNFDVYKVETIGDAYMVVSGLPVRNGRLHACEVARMALALLDAVRSFRIRHRPQEQLRLRIGIHTGPVCAGVVGLKMPRYCLFGDTVNTASRMESNGEALKIHLSSETKAVLEEFGGFELELRGDVEMKGKGKVRTYWLLGERGSSTRG

SEQ ID NO: 1025657 - protein, 1065 aa, Homo sapiens
MPGPRRPAGSRLRLLLLLLLPPLLLLLRGSHAGNLTVAVVLPLANTSYPWSWARVGPAVELALAQVKARPDLLPGWTVRTVLGSSENALGVCSDTAAPLAAVDLKWEHNPAVFLGPGCVYAAAPVGRFTAHWRVPLLTAGAPALGFGVKDEYALTTRAGPSYAKLGDFVAALHRRLGWERQALMLYAYRPGDEEHCFFLVEGLFMRVRDRLNITVDHLEFAEDDLSHYTRLLRTMPRKGRVIYICSSPDAFRTLMLLALEAGLCGEDYVFFHLDIFGQSLQGGQGPAPRRPWERGDGQDVSARQAFQAAKIITYKDPDNPEYLEFLKQLKHLAYEQFNFTMEDGLVNTIPASFHDGLLLYIQAVTETLAHGGTVTDGENITQRMWNRSFQGVTGYLKIDSSGDRETDFSLWDMDPENGAFRVVLNYNGTSQELVAVSGRKLNWPLGYPPPDIPKCGFDNEDPACNQDHLSTLEVLALVGSLSLLGILIVSFFIYRKMQLEKELASELWRVRWEDVEPSSLERHLRSAGSRLTLSGRGSNYGSLLTTEGQFQVFAKTAYYKGNLVAVKRVNRKRIELTRKVLFELKHMRDVQNEHLTRFVGACTDPPNICILTEYCPRGSLQDILENESITLDWMFRYSLTNDIVKGMLFLHNGAICSHGNLKSSNCVVDGRFVLKITDYGLESFRDLDPEQGHTVYAKKLWTAPELLRMASPPVRGSQAGDVYSFGIILQEIALRSGVFHVEGLDLSPKEIIERVTRGEQPPFRPSLALQSHLEELGLLMQRCWAEDPQERPPFQQIRLTLRKFNRENSSNILDNLLSRMEQYANNLEELVEERTQAYLEEKRKAEALLYQILPHSVAEQLKRGETVQAEAFDSVTIYFSDIVGFTALSAESTPMQVVTLLNDLYTCFDAVIDNFDVYKVETIGDAYMVVSGLPVRNGRLHACEVARMALALLDAVRSFRIRHRPQEQLRLRIGIHTGPVCAGVVGLKMPRYCLFGDTVNTASRMESNGEALKIHLSSETKAVLEEFGGFELELRGDVEMKGKGKVRTYCSLSCDWDTLGHLSIT

SEQ ID NO: 1025658 - protein, 110 aa, Homo sapiens
SDAAGYLEYPNRHDKEQLRLRIGIHTGPVCAGVVGLKMPRYCLFGDTVNTASRMESNGEALKIHLSSETKAVLEEFGGFELELRGDVEMKGKGKVRTYWLLGERGSSTRG

SEQ ID NO: 1025659 - protein, 102 aa, Homo sapiens
EVPATSKEQLRLRIGIHTGPVCAGVVGLKMPRYCLFGDTVNTASRMESNGEALKIHLSSETKAVLEEFGGFELELRGDVEMKGKGKVRTYWLLGERGSSTRG

SEQ ID NO: 1025660 - protein, 114 aa, Homo sapiens
SDAAGYLEYPNRHDKEQLRLRIGIHTGPVCAGVVGLKMPRYCLFGDTVNTASRMESNGEALKIHLSSETKAVLEEFGGFELELRGDVEMKGKGKVRTYCSLSCDWDTLGHLSIT

SEQ ID NO: 1025661 - protein, 1059 aa, Homo sapiens
MPGPRRPAGSRLRLLLLLLLPPLLLLLRGSHAGNLTVAVVLPLANTSYPWSWARVGPAVELALAQVKARPDLLPGWTVRTVLGSSENALGVCSDTAAPLAAVDLKWEHNPAVFLGPGCVYAAAPVGRFTAHWRVPLLTAGAPALGFGVKDEYALTTRAGPSYAKLGDFVAALHRRLGWERQALMLYAYRPGDEEHCFFLVEGLFMRVRDRLNITVDHLEFAEDDLSHYTRLLRTMPRKGRVIYICSSPDAFRTLMLLALEAGLCGEDYVFFHLDIFGQSLQGGQGPAPRRPWERGDGQDVSARQAFQAAKIITYKDPDNPEYLEFLKQLKHLAYEQFNFTMEDGLVNTIPASFHDGLLLYIQAVTETLAHGGTVTDGENITQRMWNRSFQGVTGYLKIDSSGDRETDFSLWDMDPENGAFRVVLNYNGTSQELVAVSGRKLNWPLGYPPPDIPKCGFDNEDPACNQDHLSTLEVLALVGSLSLLGILIVSFFIYRKMQLEKELASELWRVRWEDVEPSSLERHLRSAGSRLTLSGRGSNYGSLLTTEGQFQVFAKTAYYKGNLVAVKRVNRKRIELTRKVLFELKHMRDVQNEHLTRFVGACTDPPNICILTEYCPRGSLQDILENESITLDWMFRYSLTNDIVKGMLFLHNGAICSHGNLKSSNCVVDGRFVLKITDYGLESFRDLDPEQGHTVYAKKLWTAPELLRMASPPVRGSQAGDVYSFGIILQEIALRSGVFHVEGLDLSPKEIIERVTRGEQPPFRPSLALQSHLEELGLLMQRCWAEDPQERPPFQQIRLTLRKFNRENSSNILDNLLSRMEQYANNLEELVEERTQAYLEEKRKAEALLYQILPHSVAEQLKRGETVQAEAFDSVTIYFSDIVGFTALSAESTPMQVVTLLNDLYTCFDAVIDNFDVYKVETIGDAYMVVSGLPVRNGRLHACEVARMALALLDAVRSFRIRHRPQEQLRLRIGIHTGPVCAGVVGLKMPRYCLFGDTVNTASRMESNGEALKIHLSSETKAVLEEFGGFELELRGDVEMKGKGKVRTYCCLSAIGNPG

SEQ ID NO: 1025662 - protein, 1075 aa, Homo sapiens
MPGPRRPAGSRLRLLLLLLLPPLLLLLRGSHAGNLTVAVVLPLANTSYPWSWARVGPAVELALAQVKARPDLLPGWTVRTVLGSSENALGVCSDTAAPLAAVDLKWEHNPAVFLGPGCVYAAAPVGRFTAHWRVPLLTAGAPALGFGVKDEYALTTRAGPSYAKLGDFVAALHRRLGWERQALMLYAYRPGDEEHCFFLVEGLFMRVRDRLNITVDHLEFAEDDLSHYTRLLRTMPRKGRVIYICSSPDAFRTLMLLALEAGLCGEDYVFFHLDIFGQSLQGGQGPAPRRPWERGDGQDVSARQAFQAAKIITYKDPDNPEYLEFLKQLKHLAYEQFNFTMEDGLVNTIPASFHDGLLLYIQAVTETLAHGGTVTDGENITQRMWNRSFQGVTGYLKIDSSGDRETDFSLWDMDPENGAFRVVLNYNGTSQELVAVSGRKLNWPLGYPPPDIPKCGFDNEDPACNQDHLSTLEVLALVGSLSLLGILIVSFFIYRKMQLEKELASELWRVRWEDVEPSSLERHLRSAGSRLTLSGRGSNYGSLLTTEGQFQVFAKTAYYKGNLVAVKRVNRKRIELTRKVLFELKHMRDVQNEHLTRFVGACTDPPNICILTEYCPRGSLQDILENESITLDWMFRYSLTNDIVKGMLFLHNGAICSHGNLKSSNCVVDGRFVLKITDYGLESFRDLDPEQGHTVYAKKLWTAPELLRMASPPVRGSQAGDVYSFGIILQEIALRSGVFHVEGLDLSPKEIIERVTRGEQPPFRPSLALQSHLEELGLLMQRCWAEDPQERPPFQQIRLTLRKFNRENSSNILDNLLSRMEQYANNLEELVEERTQAYLEEKRKAEALLYQILPHSVAEQLKRGETVQAEAFDSVTIYFSDIVGFTALSAESTPMQVVTLLNDLYTCFDAVIDNFDVYKVETIGDAYMVVSGLPVRNGRLHACEVARMALALLDAVRSFRIRHRPQEQLRLRIGIHTGPVCAGVVGLKMPRYCLFGDTVNTASRMESNGEALKIHLSSETKAVLEEFGGFELELRGDVEMKGRVEKPAALPTFWGPRGSYPSQAANATPIPKALI

SEQ ID NO: 1025663 - protein, 1061 aa, Homo sapiens; identical to SEQ ID NO: 1025656

SEQ ID NO: 1025664 - protein, 262 aa, Homo sapiens
LGASVGEIGTRDKVNPQPDFCCTGAPNDPESGVGLGPGPRVLATRTPSSLALEWLDEVHSLVHSDTVKSQLCARSEMASILRSPQALQLTLALIKPDAVAHPLILEAVHQQILSNKFLIVRMRELLWRKEDCQRFYREHEGRFFYQRLVEFMASGPIRAYILAHKDAIQLWRTLMGPTRVFRARHVAPDSIRGSFGLTDTRNTTHGSDSVVSASREIAAFFPDFSEQRWYEEEEPQLRCGPVCYSPEGGVHYVAGTGGLGPA

SEQ ID NO: 1025665 - protein, 193 aa, Homo sapiens
MRLERSEMASILRSPQALQLTLALIKPDAVAHPLILEAVHQQILSNKFLIVRMRELLWRKEDCQRFYREHEGRFFYQRLVEFMASGPIRAYILAHKDAIQLWRTLMGPTRVFRARHVAPDSIRGSFGLTDTRNTTHGSDSVVSASREIAAFFPDFSEQRWYEEEEPQLRCGPVCYSPEGGVHYVAGTGGLGPA

SEQ ID NO: 1025666 - protein, 171 aa, Homo sapiens
MTQNLGSEMASILRSPQALQLTLALIKPDAVAHPLILEAVHQQILSNKFLIVRMRELLWRKEDCQRFYREHEAGQSEPTSLPTRMPSSSGGRSWDPPECSEHAMWPQILSVGVSASLTPATPPMVRTLWFQPAERLQPSSLTSVNSAGMRRKSPSCAVALCAIAQREVSTM

SEQ ID NO: 1025667 - protein, 186 aa, Homo sapiens
MASILRSPQALQLTLALIKPDAVAHPLILEAVHQQILSNKFLIVRMRELLWRKEDCQRFYREHEGRFFYQRLVEFMASGPIRAYILAHKDAIQLWRTLMGPTRVFRARHVAPDSIRGSFGLTDTRNTTHGSDSVVSASREIAAFFPDFSEQRWYEEEEPQLRCGPVCYSPEGGVHYVAGTGGLGPA

SEQ ID NO: 1025668 - protein, 230 aa, Homo sapiens
LGASVGEIGTRDKVNPQPDFCCTGAPNDPESGVGLGPGYEGRSEMASILRSPQALQLTLALIKPDAVAHPLILEAVHQQILSNKFLIVRMRELLWRKEDCQRFYREHEGRFFYQRLVEFMASGPIRAYILAHKDAIQLWRTLMGPTRVFRARHVAPDSIRGSFGLTDTRNTTHGSDSVVSASREIAAFFPDFSEQRWYEEEEPQLRCGPVCYSPEGGVHYVAGTGGLGPA

SEQ ID NO: 1025669 - protein, 247 aa, Homo sapiens
MHAPGKPATLQDNSQPHLTPRRNRTRTPSRAAQERLKDPARAAGYPGGAWWPGPVPEDRSEMASILRSPQALQLTLALIKPDAVAHPLILEAVHQQILSNKFLIVRMRELLWRKEDCQRFYREHEGRFFYQRLVEFMASGPIRAYILAHKDAIQLWRTLMGPTRVFRARHVAPDSIRGSFGLTDTRNTTHGSDSVVSASREIAAFFPDFSEQRWYEEEEPQLRCGPVCYSPEGGVHYVAGTGGLGPA

SEQ ID NO: 1025670 - protein, 224 aa, Homo sapiens
MHAPGKPATLQDNSQPHLTPRRNRTRTPSRAAQERLKDPARAAGYPGGAWWPGPVPEDRSEMASILRSPQALQLTLALIKPDAVAHPLILEAVHQQILSNKFLIVRMRELLWRKEDCQRFYREHEAGQSEPTSLPTRMPSSSGGRSWDPPECSEHAMWPQILSVGVSASLTPATPPMVRTLWFQPAERLQPSSLTSVNSAGMRRKSPSCAVALCAIAQREVSTM

SEQ ID NO: 1025671 - protein, 194 aa, Homo sapiens
MTQNLGSEMASILRSPQALQLTLALIKPDAVAHPLILEAVHQQILSNKFLIVRMRELLWRKEDCQRFYREHEGRFFYQRLVEFMASGPIRAYILAHKDAIQLWRTLMGPTRVFRARHVAPDSIRGSFGLTDTRNTTHGSDSVVSASREIAAFFPDFSEQRWYEEEEPQLRCGPVCYSPEGGVHYVAGTGGLGPA

SEQ ID NO: 1025672 - protein, 215 aa, Homo sapiens
MHAPGKPATLQDNSQPHLTPRRNRTRTPSRAAQERLKDPARAAGYPGGAWWPGPVPEDKAVHQQILSNKFLIVRMRELLWRKEDCQRFYREHEGRFFYQRLVEFMASGPIRAYILAHKDAIQLWRTLMGPTRVFRARHVAPDSIRGSFGLTDTRNTTHGSDSVVSASREIAAFFPDFSEQRWYEEEEPQLRCGPVCYSPEGGVHYVAGTGGLGPA

SEQ ID NO: 1025673 - protein, 131 aa, Homo sapiens
LGASVGEIGTRDKVNPQPDFCCTGAPNDPESGVGLGPGYEGILDLSVVVNQESRQPQLSCVSKGTMSSLQVGLGPGPRVLATRTPSSLALEWLDEVHSLVHSDTVKSQLCARYCLHLLVVKTELKGTCKEL

SEQ ID NO: 1025674 - protein, 337 aa, Homo sapiens
MWQVLEPTSYSILCLIRRPYPICHCSAKPIYAPTSCIRRLYWVPGPNPAFNLVALSYSGGGTSQEGKGQTSPNRWANFQTFQLEELPPDTLLTEPVAWLPAQPCPNGCEGSALERPEGWNCMGPVWTHSLCPRDALYRLLIGDEYTYNPRPAARVSQAAHPKEEQQKGDGQQKSTEDEPKEHKTNEYQDKMEQERERDKKARLAKYNRECANMETSKHLRKKPYSKRAHSGDHTTTRYKNMRHNQYTITTIQKERQEQGGKQPDTGRETDNKEQRTDNTNQENSTTSQTENKSDHDARAATSNRKTKHHDQQRHRHEHTHNRQHHQNKNDDRSRPTE

SEQ ID NO: 1025675 - protein, 81 aa, Homo sapiens
  misc_feature (9)..(9): Xaa can be any naturally occurring amino acid
HQHLSKESXAGNKPANAVLHKVLKQLEELLSDMKADVTRLPATIARIPPVAVRLQMSERNILSRLANRAPEPTPQQVAQQQ

SEQ ID NO: 1025676 - protein, 82 aa, Homo sapiens
  misc_feature (40)..(40): Xaa can be any naturally occurring amino acid
PWNPKPRKNGKAFNPGAKIGAPLGNGPPIARENPFQKRVXAMDPKFKSRYSGLTPGLKKIEEPKNPPILFNPLECISRSLQD

SEQ ID NO: 1025677 - protein, 178 aa, Homo sapiens
MYLVRSRGQAWQWAVLTCCGEPLSCGTRSLRAYAIETLSQAAILFTIAHVYDHRVTFTHGPGKLLLEIQTKVLGSEILTELRCILGFLAHTLVLNFVSHLHRPSSQERSGTVKAAGVQSSRATVFIFGRESPLSLYNEELVSMNVQGDYEPTDATGFININSLRLKEYHRLQSKVTAK

SEQ ID NO: 1025678 - protein, 84 aa, Homo sapiens
MLKAKDGPHVAAASFHGGTSLGVSNVAAKGWHFFKYNKWVLFLFFYCERSFGLHVDTCQVIIVMRCLINRSGLYKQARLSSLDG

SEQ ID NO: 1025679 - protein, 178 aa, Homo sapiens
KGDGGGASGVRRRVVVAAGGGGSGGGGVRVCMHAGHQPPKRTQLLRHVPAPGGMHWTLRRLADDGMWLLTHMLRNELEHMPCDYMTLDDVGLAVSSLTGAIGHHACVNVASAAPVPQCLGTQPWMPPPSWVPDGKLGSKAASSTKRIPASAIVLLQVELLPYSFPMSPPCLALAQARG

SEQ ID NO: 1025680 - protein, 360 aa, Homo sapiens
MESIFHEKQEGSLCAQHCLNNLLQGEYFSPVELSSIAHQLDEEERMRMAEGGVTSEDYRTFLQQPSGNMDDSGFFSIQVISNALKVWGLELILFNSPEYQRLRIDPINERSFICNYKEHWFTVRKLGKQWFNLNSLLTGPELISDTYLALFLAQLQQEGYSIFVVKGDLPDCEADQLLQMIRVQQMHRPKLIGEELAQLKEQRVHKTDLERMLEANDGSGMLDEDEEDLQRALALSRQEIDMEDEEADLRRAIQLSMQGSSRNISQDMTQTSGTNLTSEELRKRREAYFEKQQQKQQQQQQQQQQQQQQQQQQQQQQRDLSGQSSHPCERPATSSGALGSDLGKACSPFIMFATFTLYLT

SEQ ID NO: 1025681 - protein, 384 aa, Homo sapiens
GVGAVGSRQINMESIFHEKQEGSLCAQHCLNNLLQGEYFSPVELSSIAHQLDEEERMRMAEGGVTSEDYRTFLQQPSGNMDDSGFFSIQVISNALKVWGLELILFNSPEYQRLRIDPINERSFICNYKEHWFTVRKLGKQWFNLNSLLTGPELISDTYLALFLAQLQQEGYSIFVVKGDLPDCEADQLLQMIRVQQMHRPKLIGEELAQLKEQRVHKTDLERMLEANDGSGMLDEDEEDLQRALALSRQEIDMEDEEADLRRAIQLSMQGSSRNISQDMTQTSGTNLTSEELRKRREAYFEKQQQKQQQQQQQQQQQQQQQQQQQQQQRDLSGQSSHPCERPATSSGALGSDLGDAMSEEDMLQAAVTMSLETVRNDLKTEGKK

SEQ ID NO: 1025682 - protein, 384 aa, Homo sapiens; identical to SEQ ID NO: 1025681

SEQ ID NO: 1025683 - protein, 622 aa, Homo sapiens
MAHVRGLQLPGCLALAALCSLVHSQHVFLAPQQARSLLQRVRRANTFLEEVRKGNLERECVEETCSYEEAFEALESSTATDVFWAKYTACETARTPRDKLAACLEGNCAEGLGTNYRGHVNITRSGIECQLWRSRYPHKPEINSTTHPGADLQENFCRNPDSSTTGPWCYTTDPTVRRQECSIPVCGQDQVTVAMTPRSEGSSVNLSPPLEQCVPDRGQQYQGRLAVTTHGLPCLAWASAQAKALSKHQDFNSAVQLVENFCRNPDGDEEGVWCYVAGKPGDFGYCDLNYCEEAVEEETGDGLDEDSDRAIEGRTATSEYQTFFNPRTFGSGEADCGLRPLFEKKSLEDKTERELLESYIDGRIVEGSDAEIGMSPWQVMLFRKSPQELLCGASLISDRWVLTAAHCLLYPPWDKNFTENDLLVRIGKHSRTRYERNIEKISMLEKIYIHPRYNWRENLDRDIALMKLKKPVAFSDYIHPVCLPDRETAASLLQAGYKGRVTGWGNLKETWTANVGKGQPSVLQVVNLPIVERPVCKDSTRIRITDNMFCAGYKPDEGKRGDACEGDSGGPFVMKSPFNNRWYQMGIVSWGEGCDRDGKYGFYTHVFRLKKWIQKVIDQFGE

SEQ ID NO: 1025684 - protein, 119 aa, Homo sapiens
MAHVRGLQLPGCLALAALCSLVHSQHVFLAPQQARSLLQRVRRANTFLEEVRKGNLERECVEETCSYEEAFEALESSTATVSLGCSDEYRGLRPGPTLDTSTEKQARNATAPSLLTAVD

SEQ ID NO: 1025685 - protein, 472 aa, Homo sapiens
MAHVRGLQLPGCLALAALCSLVHSQHVFLAPQQARSLLQRVRRANTFLEEVRKGNLERECVEETCSYEEAFEALESSTATDVFWAKYTACETARTPRDKLAACLEGNCAEGLGTNYRGHVNITRSGIECQLWRSRYPHKPEINSTTHPGADLQENFCRNPDSSTTGPWCYTTDPTVRRQECSIPVCGQDQVTVAMTPRSEGSSVNLSPPLEQCVPDRGQQYQGRLAVTTHGLPCLAWASAQAKALSKHQDFNSAVQLVENFCRNPDGDEEGVWCYVAGKPGDFGYCDLNYCEEAVEEETGDGLDEDSDRAIEGRTATSEYQTFFNPRTFGSGEADCGLRPLFEKKSLEDKTERELLESYIDGRIVEGSDAEIGMSPWQVMLFRKSPQELLCGASLISDRWVLTAAHCLLYPPWDKNFTENDLLVRIGKHSRTRYERNIEKISMLEKIYIHPRYNWRENLDRDIALMKLAGAT

SEQ ID NO: 1025686 - protein, 100 aa, Homo sapiens
  misc_feature (16)..(16): Xaa can be any naturally occurring amino acid
GAILAHCSLPLPLVQXILLPQPPEELVPTGYKPDEGKRGDACEGDSGGPFVMKSPFNNRWYQMGIVSWGEGCDRDGKYGFYTHVFRLKKWIQKVIDQFGE

SEQ ID NO: 1025687 - protein, 494 aa, Homo sapiens
MAHVRGLQLPGCLALAALCSLVHSQHVFLAPQQARSLLQRVRRANTFLEEVRKGNLERECVEETCSYEEAFEALESSTATDVFWAKYTACETARTPRDKLAACLEGNCAEGLGTNYRGHVNITRSGIECQLWRSRYPHKPEINSTTHPGADLQENFCRNPDSSTTGPWCYTTDPTVRRQECSIPVCGQDQVTVAMTPRSEGSSVNLSPPLEQCVPDRGQQYQGRLAVTTHGLPCLAWASAQAKALSKHQDFNSAVQLVENFCRNPDGDEEGVWCYVAGKPGDFGYCDLNYCEEAVEEETGDGLDEDSDRAIEGRTATSEYQTFFNPRTFGSGEADCGLRPLFEKKSLEDKTERELLESYIDGRIVEGSDAEIGMSPWQVMLFRKSPQELLCGASLISDRWVLTAAHCLLYPPWDKNFTENDLLVRIGKHSRTRYERNIEKISMLEKIYIHPRYNWRENLDRDIALMKLKKPVAFSDYIHPVCLPDRETAARLQA

SEQ ID NO: 1025688 - protein, 328 aa, Homo sapiens
MTQKRGSRSHIEDTNEQSKNREEGQTYNKREKAEKSRKERTPKEEKRKQPGKKRKKGQRAPTRSKNNTKKKQEHNNVQSKRHKSKDEKRARDRKKQKPTGTKKKEKKTESAKETRNNETEGEDRKNKAEGENERREKQKQETTRRPPREQNTQGDESREHQREKRKTKEEGKKSNTRKKQARTEKQTREKNEDRKARTHAGEKGKMQQRKREERTKETRDTRSGGKSRDHSRTGQRAQQRGPRRENGGKRTRAKRKGDGKNNRNGEKEKKKKRKEQEEKRRKKTTREKKRKKQERRTTKRKENRSRKNKRDKNKNHDRQERRTKHKGK

SEQ ID NO: 1025689 - protein, 331 aa, Homo sapiens
MHKRHKNEAAEAISEDTNEQSKNREEGQTYNKREKAEKSRKERTPKEEKRKQPGKKRKKGQRAPTRSKNNTKKKQEHNNVQSKRHKSKDEKRARDRKKQKPTGTKKKEKKTESAKETRNNETEGEDRKNKAEGENERREKQKQETTRRPPREQNTQGDESREHQREKRKTKEEGKIEQHTKEASEDRETDKRKKEDRKARTHAGEKGKMQQRKREERTKETRDTRSGGKSRDHSRTGQRAQQRGPRRENGGKRTRAKRKGDGKNNRNGEKEKKKKRKEQEEKRRKKTTREKKRKKQERRTTKRKENRSRKNKRDKNKNHDRQERRTKHKGK

SEQ ID NO: 1025690 - protein, 79 aa, Homo sapiens
LDQIPSYDTHKIAVLYVGEGQSNSELAILSNEHGSYRYTEFLTGNGPAHREKDGQSDKVAIESLVALVMTAHYILRSTT

SEQ ID NO: 1025691 - protein, 198 aa, Homo sapiens
ILEGNNIFPPRNNPLPCVFPSPDFPPPKRDKNWEAPPGGGPLLKILDPPGSKNSAQSWGPRSVANMQLFVRAQELHPFEVTGQETVAQIKAHVASLEGIAPEDQVVLLAGAPLEDEAPLGQCGVEALTTLEVAGRMLGGKVHGSLARAGKVRGQTPKVAQQEKKKKKTGRAKRRMQYNRRFVNVVPPFGKKKGPNANS

SEQ ID NO: 1025692 - protein, 198 aa, Homo sapiens
ILEGNNIFPPRNNPLPCVFPSPDFPPPKRDKNWEAPPGGGPLLKILDPPGSKNSAQSWGPRSVANMQLFVRAQELHPFEVTGQETVAQIKAHVASLEGIAPEDQVVLLAGAPLEDEAPLGQCGVEALTTLEVAGRMLGGKVHGSLARAGKVRGQTPKVAQQEKKKKKTGRAKRRMQYNRRFVNVVPPFGKKKGPNANF

SEQ ID NO: 1025693 - protein, 198 aa, Homo sapiens; identical to SEQ ID NO: 1025692

SEQ ID NO: 1025694 - protein, 167 aa, Homo sapiens
SDVTRSQVCTDAPRFFLFLDSIFRGSWDRRSVANMQLFVRAQELHPFEVTGQETVAQIKAHVASLEGIAPEDQVVLLAGAPLEDEAPLGQCGVEALTTLEVAGRMLGGKVHGSLARAGKVRGQTPKVAKQEKKKKKTGRAKRRMQYNRRFVNVVPPFGKKKGPNANS

SEQ ID NO: 1025695 - protein, 167 aa, Homo sapiens
SDVTRSQVCTDAPRFFLFLDSIFRGSWDRRSVANMQLFVRAQELHPFEVTGQETVAQIKAHVASLEGIAPEDQVVLLAGAPLEDEAPLGQCGVEALTTLEVAGRMLGGKVHGSLARAGKVRGQTPKVAKQEKKKKKTGRAKRRMQYNRRFVNVVPPFGKKKGPNANF

SEQ ID NO: 1025696 - protein, 101 aa, Homo sapiens
YPVCCVEVSLFIPCRCREQKAVWNQHHRALWEKRKTCSLRSAGSWRVLGPCVVVHRILAFFLLSLYIGLREYTVSLCEYGQLAFTNMYLSTFSCLKKEKKT

SEQ ID NO: 1025697 - protein, 101 aa, Homo sapiens; identical to SEQ ID NO: 1025696

SEQ ID NO: 1025698 - protein, 137 aa, Homo sapiens
MSADLQWMVVRNCSSFLIKRNKQTYSTEPNNLKARNSFRYNGLIHRKTVGVEPAADGKGVVVVIKRRSGQRKPATSYVRTTINKNARATLSSIRHMIRKNKYRPDLRMAAIRRASAILRSQKPVMVKRKRTRPTKSS

SEQ ID NO: 1025699 - protein, 87 aa, Homo sapiens
SVPKREASRGQVRKPADFIALGAGGSGALGGAGPLPLHHHRLLAAQDGAWPVRIGCQCAGRGGTCSCRIMCLMLLSVHEHFCDGSPL

SEQ ID NO: 1025700 - protein, 174 aa, Homo sapiens
MSADLQWMVVRNCSSFLIKRNKQTYSTEPNNLKARNSFRYNGLIHRKTVGVEPAADGKGVVVVIKRRSGQRKPATSYVRTTINKNARATSAADGKGVVVVIKRRSGQRKPATSYVRTTINKNARATLSSIRHMIRKNKYRPDLRMAAIRRASAILRSQKPVMVKRKRTRPTKSS

SEQ ID NO: 1025701 - protein, 137 aa, Homo sapiens; identical to SEQ ID NO: 1025698

SEQ ID NO: 1025702 - protein, 222 aa, Homo sapiens
  misc_feature (8)..(9): Xaa can be any naturally occurring amino acid
  misc_feature (16)..(16): Xaa can be any naturally occurring amino acid
CLLIRLTXXEHRFGSXIKQCTAIRMLWAALSRVLQPCAVGPCLTMMPYIVECTVVASLASNSLCLHEHVASRPFPGGEPSDPGTRGVCCCCSPAHQCLASLPPSLDRAVEMAPAAWGKPNCQNSSHLSTIQEAGYCPASAFSVSAGSAQSPHPPKSPRWTASPTPPGPSQEPRLAISIYCLRPCRPWATGLAPVPPGSQCHHPRQAFPDPARNKQGTKCTHC

SEQ ID NO: 1025703 - protein, 299 aa, Homo sapiens
  misc_feature (2)..(2): Xaa can be any naturally occurring amino acid
  misc_feature (24)..(24): Xaa can be any naturally occurring amino acid
PXPPPGPASSFSCLVAASACAVGXGGRRPASAALSVPPRFFLPFTPDGLCFSDVVLEHAILPGPVVAPVTVCCLAVSCVVVMLGVLCVIALASCVCAWCLSSMPLLLPVPCPLVAVGPCLTMMPYIVECTVVASLASNSLCLHEHVASRPFPGGEPSDPGTRGVCCCCSPAHQCLASLPPSLDRAVEMAPAAWGKPNCQNSSHLSTIQEAGYCPASAFSVSAGSAQSPHPPKSPRWTASPTPPGPSQEPRLAISIYCLRPCRPWATGLAPVPPGSQCHHPRQAFPDPARNKQGTKCTHC

SEQ ID NO: 1025704 - protein, 299 aa, Homo sapiens; identical to SEQ ID NO: 1025703
  misc_feature (2)..(2): Xaa can be any naturally occurring amino acid
  misc_feature (24)..(24): Xaa can be any naturally occurring amino acid

SEQ ID NO: 1025705 - protein, 148 aa, Homo sapiens
MACRASLMFPILCGPRVCAPLGLLPPEGPFLVLGPMCLVLNTVGGLSPGTLRVSGTSPRPLAAAFDTTLLPRDRSSGPPRGTEAEMADEIATGSVSLGPGGDTIFGKIIRPGKYQAKIRFVMDDRLPVTFPLDHLPRFNGPPHRAIFW

SEQ ID NO: 1025706 - protein, 148 aa, Homo sapiens; identical to SEQ ID NO: 1025705

SEQ ID NO: 1025707 - protein, 181 aa, Homo sapiens
MAGSREVVAMDCEMVGLGPHRESGLARCSLVNVHGAVLYDKFIRPEGEITDYRTRVSGVTPQHMVGATPFAVARLEILQLLKGKLVVGHDLKHDFQALKEDMSGYTIYDTSTDRLLWREAKLDHCRRVSLRVLSERLLHKSIQNSLLGHSSVEDARATMELYQISQRIRARRGLPRLAVSD

SEQ ID NO: 1025708 - protein, 181 aa, Homo sapiens; identical to SEQ ID NO: 1025707

SEQ ID NO: 1025709 - protein, 181 aa, Homo sapiens; identical to SEQ ID NO: 1025707

SEQ ID NO: 1025710 - protein, 129 aa, Homo sapiens
  misc_feature (12)..(12): Xaa can be any naturally occurring amino acid
SLASPSPTQKMXGHVGVGTCLPGQILQLLKGKLVVGHDLKHDFQALKEDMSGYTIYDTSTDRLLWREAKLDHCRRVSLRVLSERLLHKSIQNSLLGHSSVEDARATMELYQISQRIRARRGLPRLAVSD

SEQ ID NO: 1025711 - protein, 161 aa, Homo sapiens
MAGSREVVAMDCEMVGLGPHRESGLARCSLVNVHGAVLYDKFIRPEGEITDYRTRVSGVTPQHMVGATPFAVARLEALKEDMSGYTIYDTSTDRLLWREAKLDHCRRVSLRVLSERLLHKSIQNSLLGHSSVEDARATMELYQISQRIRARRGLPRLAVSD

SEQ ID NO: 1025712 - protein, 166 aa, Homo sapiens
GTDADRREVMVACEQGEISAVASLVALAQVGVSCWGPATWQVPLGLSQMKEEGFNIQICPRILQLLKGKLVVGHDLKHDFQALKEDMSGYTIYDTSTDRLLWREAKLDHCRRVSLRVLSERLLHKSIQNSLLGHSSVEDARATMELYQISQRIRARRGLPRLAVSD

SEQ ID NO: 1025713 - protein, 257 aa, Homo sapiens
MAGSREVVAMDCEMVGLGPHRESGLARCSLVNVHGAVLYDKFIRPEGEITDYRTRVSGVTPQHMVGATPFAVARLEILQLLKGKLVVGHDLKHDFQALKEDMSGYTIYDTSTDRLLWREAKLDHCRRVSLRVLSERLLHKSIQNSLLGHSSVEDARATMELYQISQRIRARRGLPAVVEGAISRRGLSLGFLAATPAWNHFCKETHKHKKNTAQKKVVRRGEKKCGRIKVRIAGAKTRDTVVPDHIRNMTKPVSPSE

SEQ ID NO: 1025714 - protein, 118 aa, Homo sapiens
MAGSREVVAMDCEMVGLGPHRESGLARCSLVNVHGAVLYDKFIRPEGEITDYRTRVSGVTPQHMVGATPFAVARLEVPFPYSPTEACVKASCLACVTEREDDMWEAGQKKRRGWDITR

SEQ ID NO: 1025715 - protein, 120 aa, Homo sapiens
AFLLTENGATCGLYVILQLLKGKLVVGHDLKHDFQALKEDMSGYTIYDTSTDRLLWREAKLDHCRRVSLRVLSERLLHKSIQNSLLGHSSVEDARATMELYQISQRIRARRGLPRLAVSD

SEQ ID NO: 1025716 - protein, 166 aa, Homo sapiens
MAGSREVVAMDCEMVGLGPHRESGLARCSLVNVHGAVLYDKFIRPEGEITDYRTRVSGVTPQHMVGATPFAVARLELSEGQASRGFGNNPSPTSLAPLPWCPSVTCDPTCKISHTAVGRKPVVSPSHPGEGFLSSENHRLTSGSRLWGIYLDLVQLAGLKMGKLSS

SEQ ID NO: 1025717 - protein, 181 aa, Homo sapiens; identical to SEQ ID NO: 1025707

SEQ ID NO: 1025718 - protein, 290 aa, Homo sapiens
MMVNHNFTSFTSNERAVVKLNEVMQAALVNSDDRDWRYFVMLVPVLYDMQQFLVKEGSMNERFVAQAPKFDINFWRMIITVMAINFFKWQGKDVAELMKTSSAIDDLQFKFLQVDDKDDHFNLPVIAETFRGLSPKMKPLKGADSVVALEPKLTEAQIQAELEFADKRLAQFKAASVKDVVSDNVVNMLRGFHEGLATEYQATHDLWQPAMFNALATDKLFNYWSPAWDNLDGIGGEVKSYLTFLSQKQDISGLSEFVTGTAGIDRYIDVAALNHLLEQMPEDVLAERAL

SEQ ID NO: 1025719 - protein, 185 aa, Homo sapiens
PRLCGRMKECVPATERSNEYQLIDCAQYFLDKIDVIKQADYVPSDQDLLRCRVLTSGIFETKFQVDKVNFHMFDVGGQRDERRKWIQCFNDVTAIIFVVASSSYNMVIREDNQTNRLQEALNLFKSIWNNRWLRTISVILFLNTQDLLAEKVLAGKIQKLRTTFQNLLGKLLLRMLLPSPERTHA

SEQ ID NO: 1025720 - protein, 127 aa, Homo sapiens
PCNPSSRDKVNFHMFDVGGQRDERRKWIQCFNDVTAIIFVVASSSYNMVIREDNQTNRLQEALNLFKSIWNNRWLRTISVILFLNTQDLLAEKVLAGKIQKLRTTFQNLLGKLLLRMLLPSPERTHA

SEQ ID NO: 1025721 - protein, 50 aa, Homo sapiens
RKRSLSEASNARKAMQNFMFCYLIFFWLPNRFSRRLRKSVRLLIRLPPLF

SEQ ID NO: 1025722 - protein, 53 aa, Homo sapiens
ENVHYQRQVTHERRAEFHVLLPHILLVAKQIYACADFCNPVYAASVDYCVDVN

SEQ ID NO: 1025723 - protein, 146 aa, Homo sapiens
  misc_feature (88)..(88): Xaa can be any naturally occurring amino acid
  misc_feature (123)..(123): Xaa can be any naturally occurring amino acid
MQSLLLPYRSDPKFPAILEELTTANISRTKSYMRQPDGEHTAVRRPANGMSKRDEYYNSDKPVMTSGITSGAVIHKGKAIDPRNLPKXTSTTAAIVPRIAAAVAGQAAIVRLKPTALIIRHRXITHHTSALTSRAHTVTSFEMLNE

SEQ ID NO: 1025724 - protein, 241 aa, Homo sapiens
GGGGSGGDGDMESGAYGAAKAGGSFNLRRFLTQPQVVARAVCLVFALIVFSCIYGEGYSNAHKSKEMYCVFNRNEDAFRYGSAIGVLAFLALGFFFGGCCKTLISPPYQTTLMTSSQLVRWVTCSSQFSGPSCGVWGFCFLTNQWAVTNPKDVLVGADSVRAAITFSFFSIFSWGVLASLAYQRYKAGVDDFIQNYVDPTPDPNCLRLYPGASVDNNNSHLHQNAETTDGTSALCTERRLA

SEQ ID NO: 1025725 - protein, 113 aa, Homo sapiens
CGRGARDEAMALEAAGGPPEETLSLWKREQARLKAHVVDRDTEAWQRDPAFSGLQRVGGVDVSFVKGDSVRACASLVVLSFPELEVTWEDAELEAGPSVGSGVRSPGQGAVQA

SEQ ID NO: 1025726 - protein, 246 aa, Homo sapiens
MEQARLKAHVVDRDTEAWQRDPAFSGLQRVGGVDVSFVKGDSVRACASLVVLSFPELEVLLVDGNGVLHHRGFGVACHLGVLTDLPCVGVAKKLLQVDGLENNALHKEKIRLLQTRGDSFPLLGDSGTVLGMALRSHDRSTRPLYISVGHRMSLEAAVRLTCCCCRFRIPEPVRQADICSREHIRKSLGLPGPPTPRSPKAQRPVACPKGDSGESSGEGQPPQDHSPGPRTAPRPGSQEQAGKDWQ

SEQ ID NO: 1025727 - protein, 317 aa, Homo sapiens
CGRGARDEAMALEAAGGPPEETLSLWKREQARLKAHVVDRDTEAWQRDPAFSGLQRVGGVDVSFVKGDSVRACASLVVLSFPELEVVYEESRMVSLTAPYVSGFLAFREVPFLLELVQQLREKEPGLMPQVLLVDGNGVLHHRGFGVACHLGVLTDLPCVGVAKKLLQVDGLENNALHKEKIRLLQTRGDSFPLLGDSGTVLGMALRSHDRSTRPLYISVGHRMSLEAAVRLTCCCCRFRIPEPVRQADICSREHIRKSLGLPGPPTPRSPKAQRPVACPKGDSGESSGGAPSPQRQADRTTPGGRRSTAQHQVGQR

SEQ ID NO: 1025728 - protein, 179 aa, Homo sapiens
CGRGARDEAMALEAAGGPPEETLSLWKREQARLKAHVVDRDTEAWQRDPAFSGLQRVGGVDVSFVKGDSVRACASLVVLSFPELEFYAFQVAKPERDLPCTSCFVTAPSSCFGKQALPCLPFGAPEQNSWIPPQEERADGLELGNPGFTTAGILFKPLWVSHAAVGVWPFGPLHLWGKR

SEQ ID NO: 1025729 - protein, 264 aa, Homo sapiens
MALEAAGGPPEETLSLWKREQARLKAHVVDRDTEAWQRDPAFSGLQRVGGVDVSFVKGDSVRACASLVVLSFPELEVLLVDGNGVLHHRGFGVACHLGVLTDLPCVGVAKKLLQVDGLENNALHKEKIRLLQTRGDSFPLLGDSGTVLGMALRSHDRSTRPLYISVGHRMSLEAAVRLTCCCCRFRIPEPVRQADICSREHIRKSLGLPGPPTPRSPKAQRPVACPKGDSGESSGEGQPPQDHSPGPRTAPRPGSQEQAGKDWQ

SEQ ID NO: 1025730 - protein, 115 aa, Homo sapiens
MALRSHDRSTRPLYISVGHRMSLEAAVRLTCCCCRFRIPEPVRQADICSREHIRKSLGLPGPPTPRSPKAQRPVACPKGDSGESSGEGQPPQDHSPGPRTAPRPGSQEQAGKDWQ

SEQ ID NO: 1025731 - protein, 160 aa, Homo sapiens
CGRGARDEAMALEAAGGPPEETLSLWKREQARLKAHVVDRDTEAWQRDPAFSGLQRVGGVDVSFVKGDSVRACASLVVLSFPELEVLLVDGNGVLHHRGFGVACHLGVLTDLPCVGVAKKLLQVDGLENNALHKEKIRLLQTRGDSFPLLGDSGTVLGMG

SEQ ID NO: 1025732 - protein, 134 aa, Homo sapiens
MALRSHDRSTRPLYISVGHRMSLEAAVRLTCCCCRFRIPEPVRQADICSREHIRKSLGLPGPPTPRSPKAQRPVACPKGDSGESSFVERGGESTRPRLIPDRTPVVRAHVLVSFLIERGGESTRPRLVPDRTRW

SEQ ID NO: 1025733 - protein, 318 aa, Homo sapiens
CGRGARDEAMALEAAGGPPEETLSLWKREQARLKAHVVDRDTEAWQRDPAFSGLQRVGGVDVSFVKGDSVRACASLVVLSFPELEVVYEESRMVSLTAPYVSGFLAFREVPFLLELVQQLREKEPGLMPQVLLVDGNGVLHHRGFGVACHLGVLTDLPCVGVAKKLLQVDGLENNALHKEKIRLLQTRGDSFPLLGDSGTVLGMALRSHDRSTRPLYISVGHRMSLEAAVRLTCCCCRFRIPEPVRQADICSREHIRKSLGLPGPPTPRSPKAQRPVACPKGDSGESSGEGQPPQDHSPGPRTAPRPGSQEQAGKDWQ

SEQ ID NO: 1025734 - protein, 196 aa, Homo sapiens
CGRGARDEAMALEAAGGPPEETLSLWKREQARLKAHVVDRDTEAWQRDPAFSGLQRVGGVDVSFVKGDSVRACASLVVLSFPELEVLLVDGNGVLHHRGFGVACHLGVLTDLPCVGVAKKLLQVDGLENNALHKEKVPQPPGPPPAKTCLELPPTLFLLTFPCIFLLWDPMLALGVRHSQWRELLTPPAVSLDGRF

SEQ ID NO: 1025735 - protein, 269 aa, Homo sapiens
VAVCVDGLQRQAGRAGGLGPPEAAVWILGCCPGWGSRVLLRCPLVAALGPCTPTQGQPALSCPEYRGGSPALARVAVLTVLGTVTLEGEAGHQHCPLQDGLGFIWQLLRACVRLVGPCAAQTRCPHFRLRGAEKGAGGGLGGGRHHPSAQGGRVPPGHLGLDVRGLDQGPPEGVDQMLMCSWVQCLCWGLAPPWARVHGGHGPSGEEGGPRAGSRVWRAWEWSPSWGPRRFPQGATGAGAGGGQWTRWGDVETPKAPFQAALPPRPTDG

SEQ ID NO: 1025736 - protein, 78 aa, Homo sapiens
GSRGPGTVRLCPGGEGGQGRLSAAQLRPTCQLLAQLALPVAQHTGCLCGWFPDGEGTLPGAQGLAGVSPRPGSSTAFK

SEQ ID NO: 1025737 - protein, 175 aa, Homo sapiens
MSSKKAKTKTTKKRPQRATSNVFAMFDQSQIQEFKEAFNMIDQNRDGFIDKEDLHDMLASLGKNPTDAYLDAMMNEAPGPINFTMFLTMSGETLHGTDPEDVIRNAFACFDEEATGTIQEDYLRELLTNHGGSVLQMRKWMSCPEKHLLTTRELQVTSAYTHLEAMSRHRCVNEL

SEQ ID NO: 1025738 - protein, 102 aa, Homo sapiens
MSSKKAKTKTTKKRPQRATSNVFAMFDQSQIQEFKEAFNMIDQNRDGFIDKEDLHDMLASLGKNPTDAYLDAMMNEAPGPDVVFFDRVLIGAFTIPELDTEC

SEQ ID NO: 1025739 - protein, 196 aa, Homo sapiens
AEVSAPPLVRPQPNALRCRLRSRAGRPRFWCLASELNNHHVEQFAMFDQSQIQEFKEAFNMIDQNRDGFIDKEDLHDMLASLGKNPTDAYLDAMMNEAPGPINFTMFLTMSGETLHGTDPEDVIRNAFACFDEEATGTIQEDYLRELLTNHGGSVLQMRKWMSCPEKHLLTTRELQVTSAYTHLEAMSRHRCVNEL

SEQ ID NO: 1025740 - protein, 164 aa, Homo sapiens
MSSKKAKTKTTKKRPQRATSNVFAMFDQSQIQEFKEAFNMIDQNRDGFIDKEDLHDMLASLGKNPTDAYLDAMMNEAPGPINFTMFLTMSGETLHGTDPEDVIRNAFACFDEEATGTIQEDYLRELLTNHGGSVLQMRKWMSCPEKHLLRRKGKFQLHRVHTAS

SEQ ID NO: 1025741 - protein, 183 aa, Homo sapiens
RKCRRRHWSGHSLTLFAVVCGLAQGGPGSGVWRRVSRARLCSRDPSGRRLRTPAPPSRRAPAAGPGPGRQAAAGPVRLAEKEARGRRWREEGCWRGPGPDVQVPGGSRRWSRSGETPCWRSGRVPAVRGPALRHLGDLRHLGLGRPAARRQRLPSRRRGGSGGGLGPTRACSCGAPALCPTLS

SEQ ID NO: 1025742 - protein, 211 aa, Homo sapiens
MERPSLRALLLGAAGLLLLLLPLSSSSSSDTCGPCEPASCPPLPPLGCLLGETRDACGCCPMCARGEGEPCGGGGAGRGYCAPGMECVKSRKRRKGKAGAAAGGPGVSGVCVCKSRYPVCGSDGTTYPSGCQLRAASQRAESRGEKAITQVSKGTCEQGPSIVTPPKDIWNVTGAQVYLSCEVIGIPKPCPHLEQGKKGSLWSSEDRTLAW

SEQ ID NO: 1025743 - protein, 246 aa, Homo sapiens
MERPSLRALLLGAAGLLLLLLPLSSSSSSDTCGPCEPASCPPLPPLGCLLGETRDACGCCPMCARGEGEPCGGGGAGRGYCAPGMECVKSRKRRKGKAGAAAGGPGVSGVCVCKSRYPVCGSDGTTYPSGCQLRAASQRAESRGEKAITQVSKGTCEQGGHRALPSPTLRRSAQRRAHPTGRPRRPRPGLLTAIPPGAFPGARLGGDNQLRRPRALPTEPDVADSHPLHLLSGRDLLMDEVRCVSV

SEQ ID NO: 1025744 - protein, 234 aa, Homo sapiens
RVVSTQSGITAGDSRLAVPPHPAMERPSLRALLLGAAGLLLLLLPLSSSSSSDTCGPCEPASCPPLPPLGCLLGETRDACGCCPMCARGEGEPCGGGGAGRGYCAPGMECVKSRKRRKGKAGAAAGGPGVSGVCVCKSRYPVCGSDGTTYPSGCQLRAASQRAESRGEKAITQVSKGTCEQGPSIVTPPKDIWNVTGAQVYLSCEVIGIPKPCPHLEQGKKGSLWSSEDRTLAW

SEQ ID NO: 1025745 - protein, 121 aa, Homo sapiens
MPSWPNKAGVSPEWEKIVAFLLISGSSTASTSISTRDPSGCQLRAASQRAESRGEKAITQVSKGTCEQGPSIVTPPKDIWNVTGAQVYLSCEVIGIPKPCPHLEQGKKGSLWSSEDRTLAW

SEQ ID NO: 1025746 - protein, 302 aa, Homo sapiens
QSRGTDPTRVRKASSPRRRFSWNDKEGEFTKGPGEPAKGVPAPQWAAPQRSNSGTASGRAINDAGQRAPVGHLTLLGVNPGIVIDPELNEALSEVGESALKESSSFLRSEAVAQLWGQKKKNSNMTYEKLSRAMRYYYKREILERVDGTGDSSTSFGKNSYVGWKEEDGSPESELKGWNLYPGTKLTDQLRGRANHSWEDRKAKMAPPLEECSQLCCGEKLMFWCFVNHPPWDSENYGLASPTLLFGNYKKPWGGSITFYAASVSRVIWCLSQTQSQTLNADILLPPCSTSWSDAKEAWERP

SEQ ID NO: 1025747 - protein, 38 aa, Homo sapiens
  misc_feature (24)..(24): Xaa can be any naturally occurring amino acid
  misc_feature (27)..(27): Xaa can be any naturally occurring amino acid
  misc_feature (36)..(36): Xaa can be any naturally occurring amino acid
IEQVPQEYLLVSGDRCRSVIIHQXIFXRDIEQVSQXPS

SEQ ID NO: 1025748 - protein, 439 aa, Homo sapiens [sequence omitted]

SEQ ID NO: 1025749 - protein, 176 aa, Homo sapiens
VQRQIAFSVLQHVLGAGATGQGGAATPPAIWHQAVAKATQQPFDVSAFKASYSDSETIGPSEKISQATAAGDVIKAAYNQVKTIAQGNLSNTDVQAAKNKLKAAYLRSGESSECFREEVGSQALVAGSYMPPSTVLQQMDSVANGDIINAAKKFGSGQKSMAASGNWGHTPWVDEW

SEQ ID NO: 1025750 - protein, 204 aa, Homo sapiens
  misc_feature (123)..(123): Xaa can be any naturally occurring amino acid
  misc_feature (145)..(145): Xaa can be any naturally occurring amino acid
  misc_feature (147)..(147): Xaa can be any naturally occurring amino acid
  misc_feature (154)..(156): Xaa can be any naturally occurring amino acid
  misc_feature (160)..(160): Xaa can be any naturally occurring amino acid
  misc_feature (169)..(169): Xaa can be any naturally occurring amino acid
  misc_feature (174)..(175): Xaa can be any naturally occurring amino acid
  misc_feature (180)..(180): Xaa can be any naturally occurring amino acid
  misc_feature (185)..(185): Xaa can be any naturally occurring amino acid
  misc_feature (196)..(197): Xaa can be any naturally occurring amino acid
RRFTWCALACAPSSSGRVSLSVPSSPAMAALTRDPQFQKLQQWYREHRSELNLRRLFDANKDRFNHFNMTLNTNHGHILVDYSKNLVTEDVMRMLDGLWTKSKGVRGRPGADDKMGEKINYTXGFEPCWHVASAGNRVQNTPHPXRXQRCNARXXXGSGXDEVFMPAVXGAVTXXGYTGXNITDXINISIGGSELXXLMVTEAL

SEQ ID NO: 1025751 - protein, 200 aa, Homo sapiens
GPVEYAALQSGPGSGCSALVFCGSRCPLLFVSGNMASGVAVSDGVIKVFNDMKVRKSSTPEEVKKRKKAVLFCLSEDKKNIILEEGKEILVGDVGQTVDDPYATFVKMLPDKDCRYALYDATYETKESKKEDLVFIFWAPESAPLKSKMIYASSKDAIKKKLTGIKHELQANCYEEVKDRCTLAEKLGGSAVISLEGKPL

SEQ ID NO: 1025752 - protein, 209 aa, Homo sapiens
GPVEYAALQSGPGSGCSALVFCGSRCPLLFVSGNMASGVAVSDGVIKVFNDMKVRKSSTPEEVKKRKKAVLFCLSEDKKNIILEEGKEILVGDVGQTVDDPYATFVKMLPDKDCRYALYDATYETKESKKEDLVFIFWAPESAPLKSKMIYASSKDAIKKKLTGIKHELQANCYEEVKDRCTLAEKLGGSAVISWRQPLEPFCPLLVQS

SEQ ID NO: 1025753 - protein, 199 aa, Homo sapiens
GPVEYAALQSGPGSGCSALVFCGSRCPLLFVSGNMASGVAVSDGVIKVFNDMKVRKSSTPEEVKKRKKAVLFCLSEDKKNIILEGRGKGRIPGVGGRIWLGGAPQGKTFGSGTGTPLTAHPFVKMLPDKDCRYALYDATYETKESKKEDLVFIFWAPESAPLKSKHELQANCYEEVKDRCTLAEKLGGSAVISLEGKPL

SEQ ID NO: 1025754 - protein, 72 aa, Homo sapiens
QSNQGGQRHQGGQRQMIYASSKDAIKKKLTGIKHELQANCYEEVKDRCTLAEKLGGPEDKHQILPSCPPLCL

SEQ ID NO: 1025755 - protein, 182 aa, Homo sapiens
GPVEYAALQSGPGSGCSALVFCGSRCPLLFVSGNMASGVAVSDGVIKVFNDMKVRKSSTPEEVKKRKKAVLFCLSEDKKNIILEEGKEILVGDVGQTVDDPYATFVKMLPDKDCRYALYDATYETKESKKEDLVFIFWAPESAPLKSKHELQANCYEEVKDRCTLAEKLGGSAVISLEGKPL

SEQ ID NO: 1025756 - protein, 201 aa, Homo sapiens
  misc_feature (49)..(49): Xaa can be any naturally occurring amino acid
  misc_feature (56)..(56): Xaa can be any naturally occurring amino acid
  misc_feature (61)..(61): Xaa can be any naturally occurring amino acid
  misc_feature (71)..(73): Xaa can be any naturally occurring amino acid
  misc_feature (82)..(82): Xaa can be any naturally occurring amino acid
  misc_feature (85)..(85): Xaa can be any naturally occurring amino acid
  misc_feature (91)..(92): Xaa can be any naturally occurring amino acid
  misc_feature (97)..(97): Xaa can be any naturally occurring amino acid
  misc_feature (104)..(104): Xaa can be any naturally occurring amino acid
  misc_feature (108)..(108): Xaa can be any naturally occurring amino acid
  misc_feature (110)..(111): Xaa can be any naturally occurring amino acid
  misc_feature (116)..(116): Xaa can be any naturally occurring amino acid
  misc_feature (123)..(123): Xaa can be any naturally occurring amino acid
  misc_feature (126)..(126): Xaa can be any naturally occurring amino acid
  misc_feature (129)..(129): Xaa can be any naturally occurring amino acid
  misc_feature (131)..(131): Xaa can be any naturally occurring amino acid
  misc_feature (146)..(146): Xaa can be any naturally occurring amino acid
  misc_feature (165)..(165): Xaa can be any naturally occurring amino acid
  misc_feature (168)..(168): Xaa can be any naturally occurring amino acid
  misc_feature (171)..(171): Xaa can be any naturally occurring amino acid
  misc_feature (177)..(177): Xaa can be any naturally occurring amino acid
  misc_feature (197)..(197): Xaa can be any naturally occurring amino acid
GPVEYAVASVGSRQRLQRSRLLRLSVPSPFRFRKHGERQATAPEGGGCXSVACTQXALENXVRTPSPNTPXXXKVSHEGAGXAGXHVHTRXXGKAGXDVARTPXGLPXPXXRYTHXDTGSRGXGFXARXGXPLAERPASRLSSEGXALDWSMRRPNPARGRRGKXARXVSXRAPHPXLFLSARHPPSAAGSVSGAGXRDVC

SEQ ID NO: 1025757 - protein, 308 aa, Homo sapiens [sequence omitted]

SEQ ID NO: 1025758 - protein, 342 aa, Homo sapiens
MRPEGSLTYRVPERLRQGFCGVGRAAQALVCASAKEGTAFRMEAVQEGAAGVESEQAALGEEAVLLLDDIMAEVEVVAEEEGLVERREEAQPRQQAVPGPGPMTPESALEELLAVQVELEPVNAQARKAFSRQREKMERRRKPHLDRRGAVIQSVPGFWANVIANHPQMSALITDEDEDMLSYMVSLEVEEEKHPVHLCKIMLFFRSNPYFQNKVITKEYLVNITGDRWLPGWVVGGRWWVDHCQRDPAPFPQKSPVSVEYRASHSTPIEWYPDYEVEAYRRRHHNSSLNFFNWFSDHNFAGSNKIAEILCKDLWRNPLQYYKRMKPPEEGTETSGDSQLLS

SEQ ID NO: 1025759 - protein, 488 aa, Homo sapiens
MSGLLTDPEQRAQEPRYPGFVLGLDVGSSVIRCHVYDRAARVCGSSVQKVENLYPQIGWVEIDPDVLWIQFVAVIKEAVKAAGIQMNQIVGLGISTQRATFITWNKKTGNHFHNFISWQDLRAVELVKSWNNSLLMKIFHSSCRVLHFFTRSKRLFTASLFTFTTQQTSLRLVWILQNLTEVQKAVEEENCCFGTIDTWLLYKLTKGSVYATDFSNASTTGLFDPYKMCWSGMITSLISIPLSLLPPVRDTSHNFGSVDEEIFGVPIPIVALVADQQSAMFGECCFQTGDVKLTMGTGTFLDINTGNSLQQTTGGFYPLIGWKIGQEVVCLAESNAGDTGTAIKWAQQLDLFTDAAETEKMAKSLEDSEGVCFVPSFSGLQAPLNDPWACASFMGLKPSTSKYHLVRAILESIAFRNKQLYEMMKKEIHIPVRKIRADGGVCKNGFVMQMTSDLINENIDRPADIDMSCLGAASLAGLAVGFGLTRRN

SEQ ID NO: 1025760 - protein, 518 aa, Homo sapiens [sequence omitted]

SEQ ID NO: 1025761 - protein, 152 aa, Homo sapiens
MSGLLTDPEQRAQEPRYPGFVLGLDVGSSVIRCHVYDRAARVCGSSVQKVENLYPQIGWVEIDPDVLWIQFVAVIKEAVKAAGIQMNQIVGLGISTQRATFITWNKKTGNHFHNFISWQDLRAVELVKSWNNSLLMKDIKKTYAHTPHSSEV

SEQ ID NO: 1025762 - protein, 488 aa, Homo sapiens; identical to SEQ ID NO: 1025759

SEQ ID NO: 1025763 - protein, 252 aa, Homo sapiens [sequence omitted]

SEQ ID NO: 1025764 - protein, 112 aa, Homo sapiens
MAKFVIRPATAADCSDILRLIKELAKYEYMEEQVILTEKDLLEDGFGEHPFYHCLVAEVPKEHWTPEGNPRPFPEARGPSVMEKVRVGWVEPLPTQAEVSENLDKKNSQLVF

SEQ ID NO: 1025765 - protein, 128 aa, Homo sapiens
MVLESTPFTTAWLQKCRKSTGLRKDTALLGLAMYYFTYDPWIGKLLYLEDFFVMSDYRGFGIGSEILKNLSQVAMRCRCSSMHFLVAEWNEPSINFYKRRGASDLSSEEGWRLFKIDKEYLLKMATEE

SEQ ID NO: 1025766 - protein, 143 aa, Homo sapiens
MVLESTPFTTAWLQKCRKSTGLRKDTALLGLAMYYFTYDPWIGKLLYLEDFFVMSDYRGFGIGSEILKNLSQVAMRCRCSSMHFLVAEWNEPSINFYKRRGASDLSSEEGWRLFKIDKEYLLKMATKKCMLLQRHLIAVVLRR

SEQ ID NO: 1025767 - protein, 123 aa, Homo sapiens
SSVPSSTETLTSHVMLLLQDTALLGLAMYYFTYDPWIGKLLYLEDFFVMSDYRGFGIGSEILKNLSQVAMRCRCSSMHFLVAEWNEPSINFYKRRGASDLSSEEGWRLFKIDKEYLLKMATEE

SEQ ID NO: 1025768 - protein, 128 aa, Homo sapiens; identical to SEQ ID NO: 1025765

SEQ ID NO: 1025769 - protein, 92 aa, Homo sapiens
  misc_feature (72)..(72): Xaa can be any naturally occurring amino acid
  misc_feature (81)..(81): Xaa can be any naturally occurring amino acid
MAKFVIRPATAADCSDILRLIKELAKYEYMEEQVILTEKDLLEDGFGEHPFYHCLVAEVPKEHWTPEGYSLXLRHVHGPSXYMDGRGGELKD

SEQ ID NO: 1025770 - protein, 123 aa, Homo sapiens
MVLESTPFTTAWLQKCRKSTGLRKDTALLGLAMYYFTYDPWIGKLLYLEDFFVMSDYRGFGIGSEILKNLSQVAMRCRCSSMHFLVAEWNEPSINFYKRRGASDLSSEEGWRLFKIDKEYLLF

SEQ ID NO: 1025771 - protein, 129 aa, Homo sapiens
  misc_feature (4)..(4): Xaa can be any naturally occurring amino acid
RPSXGADWPITGRKMKVLWAALLVTFLAGCQAKVEQAVETEPGPYLSQQTVWQSGQPWELALGRFWDYLPWVQTLFEQGHEELLTFQVTHELKALIGKTIKELKAYMMGLEEQLFPLAGETLARLANEL

SEQ ID NO: 1025772 - protein, 310 aa, Homo sapiens
LPPLPPIPALPQQPPLPPSQPAFSQVPASSTSTLPPSTHSKTSAVSSQANSQPPVQVSVKTQVSVTAAIPHLKTSTLPPLPLPPLLPGDDDMDSPKETLPSKPVKKEKEQRTRHLLTDLPLPPELPGGDLSPPDSPEPKAITPPQQPYKKRPKICCPRYGERRQTESDWGKRCVDKFDIIGIIGEGTYGQVYKAKDKDTGELVALKKVRLDNEKEGFPITAIREIKILRQLIHRSVVNMKEIVTDKQDALDFKKDKGAFYLVFEYMDHDLMGLLESGLVHFSEDHIKSFMKQLMEGLEYCHKKNFLHRRY

SEQ ID NO: 1025773 - protein, 251 aa, Homo sapiens
LPPLPPIPALPQQPPLPPSQPAFSQVPASSTSTLPPSTHSKTSAVSSQANSQPPVQVSVKTQVSVTAAIPHLKTSTLPPLPLPPLLPGDDDMDRICCPRYGERRQTESDWGKRCVDKFDIIGIIGEGTYGQVYKAKDKDTGELVALKKVRLDNEKEGFPITAIREIKILRQLIHRSVVNMKEIVTDKQDALDFKKDKGAFYLVFEYMDHDLMGLLESGLVHFSEDHIKSFMKQLMEGLEYCHKKNFLHRRY

SEQ ID NO: 1025774 - protein, 334 aa, Homo sapiens
  misc_feature (23)..(23): Xaa can be any naturally occurring amino acid
  misc_feature (42)..(42): Xaa can be any naturally occurring amino acid
  misc_feature (52)..(52): Xaa can be any naturally occurring amino acid
  misc_feature (72)..(72): Xaa can be any naturally occurring amino acid
  misc_feature (82)..(82): Xaa can be any naturally occurring amino acid
  misc_feature (84)..(84): Xaa can be any naturally occurring amino acid
  misc_feature (91)..(91): Xaa can be any naturally occurring amino acid
  misc_feature (104)..(104): Xaa can be any naturally occurring amino acid
  misc_feature (117)..(117): Xaa can be any naturally occurring amino acid
  misc_feature (125)..(125): Xaa can be any naturally occurring amino acid
  misc_feature (130)..(131): Xaa can be any naturally occurring amino acid
  misc_feature (139)..(139): Xaa can be any naturally occurring amino acid
LFRTCLCLSEYDAMDVPENSILXVEHNLFKQRLDKDGHPREXQRLSRHELGXKSEVTVCLTPDSPGPLIRCXEPAYGCCRTXKXIQVPVNXPVEENGAGEATIXPLAGLGPFQSTPXHHLFAASXPPAAXXSSPSKHAXQPASNEGCPGCMAFLEVQISVDRETSHFAPGKSFQQSHVHVHDLQSFGLDNINMTHYIQHLSFGEDYPGIVNPLDHTNVTAPQASMMFQYFVKVVPTVYMKVAGEVLRTNQFSVTRHEKVANGLLGDQGLPGVFVLYELSPMMVKLTEKHRSFTHFLTGVCAIIGGMFTVAGLIDSLIYHSARAIQKKIDLGKTT

SEQ ID NO: 1025775 - protein, 253 aa, Homo sapiens
QRGAEAKDIKCCNTCHDVLQAYSGWGCAFKNPDTPEQCRREGFSQKMQEQKNEGCPGCMAFLEVQISVDRETSHFAPGKSFQQSHVHVHDLQSFGLDNINMTHYIQHLSFGEDYPGIVNPLDHTNVTAPQASMMFQYFVKVVPTVYMKVAGEVLRTNQFSVTRHEKVANGLLGDQGLPGVFVLYELSPMMVKLTEKHRSFTHFLTGVCAIIGGMFTVAGLIDSLIYHSARAIQPSWSTSPQRYLNWQEMHQKT

SEQ ID NO: 1025776 - protein, 128 aa, Homo sapiens
MAGGKAGKDSGKAKTKAVSRSQRAGLQFPVGRIHRHLKSRTTSHGRVGATAAVYSAAILEYLTAEVLELAGNASKDLKVKRITPRHLQLAIRGDEELDSLIKATIAGGGVIPHIHKSLIGKKGQQKTV

SEQ ID NO: 1025777 - protein, 242 aa, Homo sapiens
QRGAEAKDIKCCNTCHDVLQAYSGWGCAFKNPDTPEQCRREGFSQKMQEQKNEGCPGCMAFLEVQISVDRETSHFAPGKSFQQSHVHVHDLQSFGLDNINMTHYIQHLSFGEDYPGIVNPLDHTNVTAPQASMMFQYFVKVVPTVYMKVAGEVLRTNQFSVTRHEKVANGLLGDQGLPGVFVLYELSPMMVKLTEKHRSFTHFLTGVCAIIGGMFTVAGLIDSLIYHSARAIQKKIDLGKTT

SEQ ID NO: 1025778 - protein, 154 aa, Homo sapiens
MAGGKAGKDSGKAKTKAVSRSQRAGLQFPVGRIHRHLKSRTTSHGRVGATAAVYSAAILEYLTAEVLELAGNASKDLKVKRITPRHLQLAIRGDEELDSLIKATIAGGGVIPHIPHNHLTHKKKKKNNINHCLKDAWIPCYLRTLNTLTAVQCW

SEQ ID NO: 1025779 - protein, 128 aa, Homo sapiens; identical to SEQ ID NO: 1025776

SEQ ID NO: 1025780 - protein, 173 aa, Homo sapiens
MPAITVLLLVCLRLGGLGKAESLCTRSLKAAHGLWISISEQSGQDDDGAEARVKSGQPWCVFGELLLQPGPPVRTPTYMLPGEVLRTNQFSVTRHEKVANGLLGDQGLPGVFVLYELSPMMVKLTEKHRSFTHFLTGVCAIIGGMFTVAGLIDSLIYHSARAIQKKIDLGKTT

SEQ ID NO: 1025781 - protein, 74 aa, Homo sapiens
FAAASTETEGMAHAAQVGLQDATSPIIEELITFHDHALIIIFLICFLVLYALFLTLTTKLTNTNISDAQEIETV

SEQ ID NO: 1025782 - protein, 101 aa, Homo sapiens
LNIRKFILERYLTSVKNVAKLLTTPHPFTTHKRIHTGEKPYKCEECGKAFSRSSKLTEHKIIHTGEKPYKCERCDKAFNQSANLTKHKKIHTGEKLQNWNV

SEQ ID NO: 1025783 - protein, 71 aa, Homo sapiens
MEKRRLIERKKKDTHGNASDTRRQGDKHTTSPYDEWTYGRRDIELGQWRRECRIQDKILLSTRERRKNKKR

SEQ ID NO: 1025784 - protein, 102 aa, Homo sapiens
  misc_feature (75)..(75): Xaa can be any naturally occurring amino acid
PVGSGVGSLGLFLSFSLCRISRSPDYISKREKKKEKTFKCLLGITVCQVLLHTHTQHIETLTNTINQLDLANICXTLYILTRIHIHFRHTWSILSDRPYGWL

SEQ ID NO: 1025785 - protein, 131 aa, Homo sapiens
AFQNDELLLREVLAKHYLKCGNLQNVIQLLVVMSYRELAVYYAGLGIPGGSHCCRLNIPVSQVNPRDAKACVVHGSAPQRHLTSEQLGVTFGDFTTSEYTCVAKGPPFRRSLIMVDGLPRTGGAYPGAGTG

SEQ ID NO: 1025786 - protein, 328 aa, Homo sapiens
SDTYCQTHGEGKTALVKNLEAVRDLGGPHPPSALIKLEHLTQNRDDSGPRVDAFEQVEISTDMLIRRVVITSRCALSMTKHFSRTWTCSVQNLLVLCNMRQVFQAKHGKAYLFLSGQLPGDASEISTSLKVHRAVLWFREGDERQDTPKSVEIPFNSTNKVPVVYSLRTPRASEPQDLLVMKGAPERILDRCSSILLHGKEQPLDEELKDAFQNAYLELGGLGERVLGFCHLFLPDEQFPEGFQFDTDDVNFPIDNLCLSGLISMIDPPRAAVPDAVGKCRSAGIKVIMVTGDHPITAKAIAKGVGIISEGNETVEDIAAASTSQSAR

SEQ ID NO: 1025787 - protein, 61 aa, Homo sapiens
AVTRGRATQVTNMCIGVPWHAQVCTDVPWHPLVYPGVPAIGPWAGAPISSTSIPDVNVYLG

SEQ ID NO: 1025788 - protein, 187 aa, Homo sapiens
DGLQGNSTLAAILGHCVCPGTLEDRAAPRSFQLPHHSVKPSLAPALPPSRDGPPLGFNIPSQPKAVGTWDICFHGQVTSALHGRIWMLTLNWCSESSYGQVTSALHGRIWMLTLNWCSESSYGQVTSALHGRIWMLTLNWCSESSYGQVTSALHGRIWMLTLNWCSESSYGQVTSAFHRRIWTLTLN

SEQ ID NO: 1025789 - protein, 187 aa, Homo sapiens; identical to SEQ ID NO: 1025788

SEQ ID NO: 1025790 - protein, 141 aa, Homo sapiens
MAQHLSTLLLLLATLAVALAWSPKEEDRIIPGGIYNADLNDEWVQRALHFAISEYNKATKDDYYRRPLRVLRARQQTVGGVNYFFDVEVGRTICTKSQPNLDTCAFHEQPELQKKQLCSFEIYEVPWENRRSLVKSRCQES

SEQ ID NO: 1025791 - protein, 167 aa, Homo sapiens
HGLAPCLGLSPSSPAAPALCSASEETMAQHLSTLLLLLATLAVALAWSPKEEDRIIPGGIYNADLNDEWVQRALHFAISEYNKATKDDYYRRPLRVLRARQQTVGGVNYFFDVEVGRTICTKSQPNLDTCAFHEQPELQKKQLCSFEIYEVPWENRRSLVKSRCQES

SEQ ID NO: 1025792 - protein, 148 aa, Homo sapiens
HGLAPCLGLSPSSPAAPALCSASEETMAQHLSTLLLLLATLAVALAWSPKEEDRIIPGGIYNADLNDEWVQRALHFAISEYNKATKDDYYRRPLRVLRTICTKSQPNLDTCAFHEQPELQKKQLCSFEIYEVPWENRRSLVKSRCQES

SEQ ID NO: 1025793 - protein, 167 aa, Homo sapiens; identical to SEQ ID NO: 1025791

SEQ ID NO: 1025794 - protein, 167 aa, Homo sapiens; identical to SEQ ID NO: 1025791

SEQ ID NO: 1025795 - protein, 136 aa, Homo sapiens
MDVLVSNERYAGTTKGLLILTFPARQKAQYKVRKSEGAHCPLKPRGLGFRSRETPYPSTRTVLGPQVTAFFEENGQSRPPYRGAEPQARQQSWLVSLHAEATDARERHQTRKDPILNLPSATTRGRPSAQQKPPAR

SEQ ID NO: 1025796 - protein, 202 aa, Homo sapiens
MVDTPLRSIKSETSSNPSSPEICPNKEKPFMKLKENGRAISRSSSSTSSVSSTAGEGEAMEEGDSCGAAKPSTTSPFHAARCYVYSPVPDAAESPKPGGQLPTQIIMTPEFPTGCPKLPDNVPEIEPLKFRFEPSLQPIASLLVRVHYLCTGGVPSALSQGNFPLIRVPVTHVLLVPGRSAPVAVHRRLDHVPSPVAPLAPC

SEQ ID NO: 1025797 - protein, 201 aa, Homo sapiens
MGNLFGRKKQSRVTEQDKAILQLKQQRDKLRQYQKRIAQQLERERALARQLLRDGRKERAKLLLKKKRYQEQLLDRTENQISSLEAMVQSIEFTQIEMKVMEGLQFGNECLNKMHQVMSIEEVERILDETQEAVEYQRQIDELLAGSFTQEDEDAILEELSAITQEQIELPEVPSEPLPEKIPENVPVKARPRQAELVAAS

SEQ ID NO: 1025798 - protein, 224 aa, Homo sapiens
ATVAAGRRWRLDLVGPGPGAGAAMGNLFGRKKQSRVTEQDKAILQLKQQRDKLRQYQKRIAQQLERERALARQLLRDGRKERAKLLLKKKRYQEQLLDRTENQISSLEAMVQSIEFTQIEMKVMEGLQFGNECLNKMHQVMSIEEVERILDETQEAVEYQRQIDELLAGSFTQEDEDAILEELSAITQEQIELPEVPSEPLPEKIPENVPVKARPRQAELVAAS

SEQ ID NO: 1025799 - protein, 224 aa, Homo sapiens; identical to SEQ ID NO: 1025798

SEQ ID NO: 1025800 - protein, 160 aa, Homo sapiens
ATVAAGRRWRLDLVGPGPGAGAAMGNLFGRKKQSRVTEQDKAILQLKQQRDKLRQYQKRIAQQLERERALARQLLRDGRKERAKLLLKKKRYQEQLLDRTENQISSLEAMVQSIEFTQIEMKVMEGLQFGNECLNKMHQVMCPAGPRATSSQDRRLWGMA

SEQ ID NO: 1025801 - protein, 224 aa, Homo sapiens; identical to SEQ ID NO: 1025798

SEQ ID NO: 1025802 - protein, 201 aa, Homo sapiens; identical to SEQ ID NO: 1025797

SEQ ID NO: 1025803 - protein, 289 aa, Homo sapiens
ATVAAGRRWRLDLVGPGPGAGAAMGNLFGRKKQSRVTEQDKAILQLKQQRDKLRQYQKRIAQQLERERALARQLLRDGRKERAKLLLKKKRYQEQLLDRTENQISSLEAMVQSIEFTQIEMKVMEGLQFGNECLNKMHQVMSIEEVERILDETQEAVEYQRQIDELLAGSFTQEDEDAILEELSAITQEQIELPEVPSEPLPEKIPGISMFDSFEWLEFAGEQVDSRREQTECSQAFLCRGRACCLAVWLGGVALLALGLGLGYQGFGNWATSSERPYPFKETHSEIKL

SEQ ID NO: 1025804 - protein, 417 aa, Homo sapiens
KDLLFSQMYDKLSENSVAKGVFLECLEPYILSDKLVGITPQVMKDLIVHFQDKKLMENVEALIVHMDITSLDIQQVVLMCWENRLYDAMIYVYNRGMNEFISPMEKLFRVIAPPLNAGKTLTDEQVVMGNKLLVYISCCLAGRAYPLGDIPEDLVPLVKNQVFEFLIRLHSAEASPEEEIYPYIRTLLHFDTREFLNVLALTFEDFKNDKQAVEYQQRIVDILLKVMVENSDFTPSQVGCLFTFLARQLAKPDNTLFVNRTLFDQVLEFLCSPDDDSRHSERQQVLLELLQAGGIVQFEESRLIRMAEKAEFYQICEFMYEREHQYDKIIDCYLRDPLREEEVFNYIHNILSIPGHSAEEKQSVWQKAMDHIEELVVPGSLVKLRSWFATHFSGHIETVIKKLQNQVLLFKFLRSLS

SEQ ID NO: 1025805 - protein, 214 aa, Homo sapiens
KDLLFSQMYDKLSENSVAKGVFLECLEPYILSDKLVGITPQVMKDLIVHFQDKKLMENVEALIVHMDITSLDIQQVVLMCWENRLYDAMIYVYNRGMNEFISPMEKLFRVIAPPLNAGKTLTDEQVVMGNKLLVYISCCLAGRAYPLGDIPEDLVPLVKNQVFEFLIRLHSAEASPEEEIYPYIRTLLHFDTRELLETLEVEVAVSRDCTIALH

SEQ ID NO: 1025806 - protein, 436 aa, Homo sapiens
KDLLFSQMYDKLSENSVAKGVFLECLEPYILSDKLVGITPQVMKDLIVHFQDKKLMENVEALIVHMDITSLDIQQVVLMCWENRLYDAMIYVYNRGMNEFISPMEKLFRVIAPPLNAGKTLTDEQVVMGNKLLVYISCCLAGRAYPLGDIPEDLVPLVKNQVFEFLIRLHSAEASPEEEIYPYIRTLLHFDTREFLNVLALTFEDFKNDKQAVEYQQRIVDILLKHAYEQIQHNACNPVDDQINVMVENSDFTPSQVGCLFTFLARQLAKPDNTLFVNRTLFDQVLEFLCSPDDDSRHSERQQVLLELLQAGGIVQFEESRLIRMAEKAEFYQICEFMYEREHQYDKIIDCYLRDPLREEEVFNYIHNILSIPGHSAEEKQSVWQKAMDHIEELVVPGSLVKLRSWFATHFSGHIETVIKKLQNQVLLFKFLRSLS

SEQ ID NO: 1025807 - protein, 353 aa, Homo sapiens
MLAARSASGPIVWGGCPLPAKAKGQCNSLSRYPHSVGPQLLSSIQEEMRICWQLKSEQDEQVVMGNKLLVYISCCLAGRAYPLGDIPEDLVPLVKNQVFEFLIRLHSAEASPEEEIYPYIRTLLHFDTREFLNVLALTFEDFKNDKQAVEYQQRIVDILLKVMVENSDFTPSQVGCLFTFLARQLAKPDNTLFVNRTLFDQVLEFLCSPDDDSRHSERQQVLLELLQAGGIVQFEESRLIRMAEKAEFYQICEFMYEREHQYDKIIDCYLRDPLREEEVFNYIHNILSIPGHSAEEKQSVWQKAMDHIEELVVPGSLVKLRSWFATHFSGHIETVIKKLQNQVLLFKFLRSLS

SEQ ID NO: 1025808 - protein, 136 aa, Homo sapiens
KDLLFSQMYDKLSENSVAKGVFLECLEPYILSDKLVGITPQVMKDLIVHFQDKKLMENVEALIVHMDITSLDIQQVVLMCWENRLYDAMIYVYNRGMNEFISPMEKLFRVIAPPLNAGKTLTGIYFLSLNFLLSCI

SEQ ID NO: 1025809 - protein, 189 aa, Homo sapiens
DTTSKLQIPMAARFFTLIYAIKVKLLEVDSVYSDSLDMIVNALANSDLKVQHEGKIVCFCSDDRHRNSVVKAMFSLKSDTKWGRDELVVTLTEFITAAVIQVAKQRLWLFTFATVFRCAQSQELHGNASETMRCHLHRSALAQRLPPCGPLASQAQKPPERCFKDKPRRPAMLMRVFGNRFSKFCQWFV

SEQ ID NO: 1025810 - protein, 68 aa, Homo sapiens
  misc_feature (4)..(4): Xaa can be any naturally occurring amino acid
KRAXEDEDELGIVGGSHDNLPPPDPRLGRIALNMDTAQDKLPQDLPPLAGGDGTSTVRRPASRSGRSA

SEQ ID NO: 1025811 - protein, 143 aa, Homo sapiens [sequence omitted]

SEQ ID NO: 1025812 - protein, 1206 aa, Homo sapiens [sequence omitted]

SEQ ID NO: 1025813 - protein, 866 aa, Homo sapiens
KQKKVAPRPSIPVKQKPKEKEMTHSWPPPLTAIHTPSTAEPSKFPFPTKDSQHVSSVTQNQKQYDTSSKTHSNSQQGTSSMLEDDLQLSDSEDSDSEQTPEKPPSSSAPPSAPQSLPEPVASAHSSSAESESTSDSDSSSDSESESSSSDSEENEPLETPAPEPEPPTTNKWQLDNWLTKVSQPAAPPEGPRSTEPPRRHPESKGSSDSATSQEHSESKDPPPKSSSKAPRAPPEAPHPGKRSCQKSPAQQEPPQRQTVGTKQPKKPVKASARAGSRTSLQGGREPGLLPYGSRDQTSKDKPKVKTKGRPRAAASNEPKPAVPPSSEKKKHKSSLPAPSKALSGPEPAKDNVEDRTPEHFALVPLTESQGPPHSGSGSRTSGCRQAVVVQEDSRKDQTPIAFERHQAALTAQGHSSPDKAVMVKITLDLLSRIPQPPGKGSRQRKAEDKQPPAGKKHSSEKRSSDSSSKLAKKRKGEAERDCDNKKIRLEKEIKSQSSSSSSSHKESSKTKPSRPSSQSSKKEMLPPPPVSSSSQKPAKPALKRSRREADTCGQDPPKVPAVPRVNHKDSSIPKQRRVEGKGSRSSSADKGSSGDTANPFPVPSLPNGNSKPGKPQVKFDKQQADLHMREAKKMKQKAELMTDRVGKAFKYLEAVLSFNECGIATESESQSSKSAYSVYSETVDLIKFIMSLKSFSDATAPTQEKIFAVLCMRCQSILNMAMFRCKKDIAIKYSRTLNKHFESSSKVAQAPSPCIARSTGTPSPLSPMPSPASSVGSQSSAGSVGSSGVAATISTPVTIQIMTSSYVTITSHVLTAFDLWEQAEALTRKNKEFFARLRQMCAPWPSTAVWWTWCTIHDRVFSSYKN

SEQ ID NO: 1025814 - protein, 141 aa, Homo sapiens
MRVEIEYKERYLGPKHALKSHHPINPATSFSNFIITLLSISKDQHRQYQCPNDSPALTASFSRTTLLKIKRIYLEGTGVLGPSLPNKCRILVARTVCSQSSMNSQRWARPASLLSGFSSTMLIIQSTMARLYSKPPWQKRR

SEQ ID NO: 1025815 - protein, 77 aa, Homo sapiens
  misc_feature (45)..(45): Xaa can be any naturally occurring amino acid
  misc_feature (57)..(57): Xaa can be any naturally occurring amino acid
MGKIALQLKATLENITNLRPWAKDFRWYLKMKCGNGGEISDSWHXILLMDSLSLKWXRLHWLPWSRSSSSLQVKFSI

SEQ ID NO: 1025816 - protein, 33 aa, Homo sapiens
MAWSGPDPNFAPVPKLGTLEMWLLLTGALSLGD

SEQ ID NO: 1025817 - protein, 33 aa, Homo sapiens; identical to SEQ ID NO: 1025816

SEQ ID NO: 1025818 - protein, 161 aa, Homo sapiens
MSSKRTKTKTKKRPQRATSNVFAMFDQSQIQEFKEAFNMIDQNRDGFIDKEDLHDMLASLGKNPTDEYLDAMMNEAPGPINFTMFLTMFGEKLNGTDPEDVIRNAFACFDEEATGTIQEDYLRELLTTMGDRFTDEEVDELYREAPIDKKGNFNYIEFTRI

SEQ ID NO: 1025819 - protein, 161 aa, Homo sapiens; identical to SEQ ID NO: 1025818

SEQ ID NO: 1025820 - protein, 143 aa, Homo sapiens
MSSFAMFDQSQIQEFKEAFNMIDQNRDGFIDKEDLHDMLASLGKNPTDEYLDAMMNEAPGPINFTMFLTMFGEKLNGTDPEDVIRNAFACFDEEATGTIQEDYLRELLTTMGDRFTDEEVDELYREAPIDKKGNFNYIEFTRI

SEQ ID NO: 1025821 - protein, 161 aa, Homo sapiens; identical to SEQ ID NO: 1025818

SEQ ID NO: 1025822 - protein, 173 aa, Homo sapiens
MLGAWRGARILDSEPDLTTTMSSKRTKTKTKKRPQRATSNVFAMFDQSQIQEFKEAFNMIDQNRDGFIDKEDLHDMLASLGKNPTDEYLDAMMNEAPGPINFTMFLTMFGEKLNGTDPEDVIRNAFACFDEEATGTIQEDYLRELLTTMGDRFTDEEVDELYREAPIDKDKDD

SEQ ID NO: 1025823 - protein, 161 aa, Homo sapiens; identical to SEQ ID NO: 1025818

SEQ ID NO: 1025824 - protein, 161 aa, Homo sapiens; identical to SEQ ID NO: 1025818

SEQ ID NO: 1025825 - protein, 110 aa, Homo sapiens
PSLTSGWDYRHAPPCQANFVFLVEMGFRHVGQAGLELLTSSDPPSSALQSAGITGMSHHDWPEGASSSWGVGGPCPASATAPCKYQLLGTGEVPGTNANQRKAVWFRLWS

SEQ ID NO: 1025826 - protein, 110 aa, Homo sapiens; identical to SEQ ID NO: 1025825

SEQ ID NO: 1025827 - protein, 110 aa, Homo sapiens; identical to SEQ ID NO: 1025825

SEQ ID NO: 1025828 - protein, 289 aa, Homo sapiens
MAPKQDPKPKFQEGERVLCFHGPLLYEAKCVKVAIKDKQVKYFIHYSGWNKNWDEWVPESRVLKYVDTNLQKQRELQKANQEQYAEGKMRGAAPGKKTSGLQQKNVEVKTKKNKQKTPGNGDGGSTSETPQPPRKKRARVDPTVENEETFMNRVEVKVKIPEELKPWLVDDWDLITRQKQLFYLPAKKNVDSILEDYANYKKSRGNTDNKEYAVNEVVAGYKISRMLGPSYSIIERPRMWILRIFEPSPGVGTSELGWDASPGERFSFQPTEMLLRKVPKGTMFLFKDW

SEQ ID NO: 1025829 - protein, 141 aa, Homo sapiens
RAGPFQHIHFRQVLERAAGLDARAEGQGGRLGVQETSWSEGKAAACTSMNKLFSFWKRKNETLSQGYNLRDKGFKGNFTVAASAGHLKKLKEYLQIKKYDVNMQGQKNTRKRFAPRLVLMDHTDVVHYPNLSNNANIDVRG

SEQ ID NO: 1025830 - protein, 176 aa, Homo sapiens
IGSGDIGFLEPLHEENFIHKLKKPLNTVNYTYLEVCYICNPYRSLPIYSPEKVEEYRNRNFYELSPHIFALSDYAYRSLRDQDKDQCILITGESGAGKTEASKLVMSYVAAVCGKGAEVNQVKEQLLQSNPVLEAFGNAKTVRNDNSSRFGKYMDIEFDFKGDPLGGVISNYLLEK

SEQ ID NO: 1025831 - protein, 206 aa, Homo sapiens
MKQEGSARRRGADKAKPPPGGGEQEPPPPPAPQDVEMKEEAATGGGSTGEADGKTAAAAAEHSQRELDTVTLEDIKEHVKQLEKAVSGKEPRFVLRALRMLPSTSRRLNHYVLYKAVQGFFTSNNATRDFLLPFLEEPMDTEADLQFRPRTGKAASTPLLPEVEAYLQLLVVIFMMNSKRYKEAQKISDDLMQKISTQNRRGLRPW

SEQ ID NO: 1025832 - protein, 206 aa, Homo sapiens; identical to SEQ ID NO: 1025831

SEQ ID NO: 1025833 - protein, 206 aa, Homo sapiens; identical to SEQ ID NO: 1025831

SEQ ID NO: 1025834 - protein, 206 aa, Homo sapiens; identical to SEQ ID NO: 1025831

SEQ ID NO: 1025835 - protein, 143 aa, Homo sapiens
MSSIASDINVMHCDNIYDEDCCVSGKEPRFVLRALRMLPSTSRRLNHYVLYKAVQGFFTSNNATRDFLLPFLEEPMDTEADLQFRPRTGKAASTPLLPEVEAYLQLLVVIFMMNSKRYKEAQKISDDLMQKISTQNRRGLRPW

SEQ ID NO: 1025836 - protein, 501 aa, Homo sapiens
  misc_feature (4)..(4): Xaa can be any naturally occurring amino acid
EREXESMEMGRRIHLELRNRTPSDVKELFLDNSRSNERHTLDRPPQHAIFKQLEFFKSQSNAQAVHLQSRKRYHKFTTNSQAKLELKRITEISGGLEDILHDKVSEPYSTLTFSVATHTYRHISHQSRATDQQVTKYLTAALRTFTNYGDGLTQPCKRTLTTHDMSVKAAIPANSHILDRDYDQGEQDHKCRNHLNTPRTARREHHDEKRDPEHDMTEKEAPNTTKAKQITTDKKAQENKRQRSRRRETPRTARDSTNNVEHKPKTQKNDQKTQQRREDHENTAKRTRTLNTRDRSKTTENRRETQEGSHSDKRAPSTQHSSTPKRGAIRTTTPTTEDERNSQRRNQREEDTAKTGNTQKTKANEKKRQNATDHATTQRTESATRNNKTQRQKETDGGNSEARESETRAERRRENNKDTGRNEQEKGRNGERHTDRNTTRKQRTPQKRQHREREQRRARTRRDERAAKRQNRQARTEAAERKKKQEADSEKSTRREEQEDR

SEQ ID NO: 1025837 - protein, 315 aa, Homo sapiens [sequence omitted]

SEQ ID NO: 1025838 - protein, 125 aa, Homo sapiens [sequence omitted]

SEQ ID NO: 1025839 - protein, 125 aa, Homo sapiens [sequence omitted]

SEQ ID NO: 1025840 - protein, 88 aa, Homo sapiens
VDSRALHIASAYTAPNLKRTHAHEPELFLSRSRPVAAKAKQAHLTTLKHIQAPWWKKLGEESGDEIDVPKDELSIELENLFIGGTKPP

SEQ ID NO: 1025841 - protein, 468 aa, Homo sapiens
LRLKKKMNYYTFSKCDCFSLLALGGHVELIQNVLQSDHFLHLLQADNVQIGSAVMMMLQNILQINRVIYSEVGRKALYSILDEVIFKLFSTPSPVIRSTATKLLLLMAESHQEILILLRQSTCYKGLRRLLSKQETGTEFSQELRQLVGLLSPMVYQEVEEQKLHQAACLIQAYWKGFQTRKRLKKLPSAVIALQRSFRSKRSKMLLEINRQKEEEDLKLQLQLQRQRAMRLSRELQLSMLEIVHPGQVEKHYREMEEKSALNIQKHWRGYRERKNFHQQRQSLIEYKAAVTLQRAALKFLAKCRKKKKLFAPWRGLQELTDARRVELKKRVDDYVRRHLGSPMSDVVSRELHAQAQERLQHYFMGRALEERAQQHREALIAQISTNVEQLMKAPSLKEAEGKEPELFLSRSRPVAAKAKQAHLTTLKHIQAPWWKKLGEESGDEIDVPKDELSIELENLFIGGTKPP

SEQ ID NO: 1025842 - protein, 213 aa, Homo sapiens
MEEKSALNIQKHWRGYRERKNFHQQRQSLIEYKAAVTLQRAALKFLAKCRKKKKLFAPWRGLQELTDARRVELKKRVDDYVRRHLGSPMSDVVSRELHAQAQERLQHYFMGRALEERAQQHREALIAQISTNVEQLMKAPSLKEAEGKEPELFLSRSRPVAAKAKQAHLTTLKHIQAPWWKKLGEESGDEIDVPKDELSIELENLFIGGTKPP

SEQ ID NO: 1025843 - protein, 450 aa, Homo sapiens
LRLKKKMNYYTFSKCDCFSLLALGGHVELIQNVLQSDHFLHLLQADNVQIGSAVMMMLQNILQINRVIYSEVGRKALYSILDEVIFKLFSTPSPVIRSTATKLLLLMAESHQEILILLRQSTCYKGLRRLLSKQETGTEFSQELRQLVGLLSPMVYQEVEEQKLHQAACLIQAYWKGFQTRKRLKKLPSAVIALQRSFRSKRSKMLLEINRQKEEEDLKLQLQLQRQRAMRLSRELQLSMLEIVHPGQVEKHYREMEEKSALNIQKHWRGYRERKNFHQQRQSLIEYKAAVTLQRAALKFLAKCRKRVELKKRVDDYVRRHLGSPMSDVVSRELHAQAQERLQHYFMGRALEERAQQHREALIAQISTNVEQLMKAPSLKEAEGKEPELFLSRSRPVAAKAKQAHLTTLKHIQAPWWKKLGEESGDEIDVPKDELSIELENLFIGGTKPP

SEQ ID NO: 1025844 - protein, 468 aa, Homo sapiens; identical to SEQ ID NO: 1025841

SEQ ID NO: 1025845 - protein, 227 aa, Homo sapiens
APPEVRVASRDPVPSKPTSPYFKTKMKKVRLKELESRLQQVDGFEKPKLLLEQYPTRPHIAACMLYTIHNTYDDFENKVGGRSKDVVVEYFSIGTGIVLGAGCVCEDFDIDEDALEIFNRNAEEVVEWTKICDIGSHVNVCLLSEADDVPSHSMTVIIESSLVGTREHNEGTDMAFLKTGWGNGKNSSIFPLNKSSSSRKSSSMTWQDHTSITKKKSVDIGSGPNAG

SEQ ID NO: 1025846 - protein, 277 aa, Homo sapiens
RGRGRGCCGRVRLLRRGLHVDCGKLGNKLTSSCGKPSSNRMSLQWTAVATFLYAEVFVVLLLCIPFISPKRWQKIFKSRLVEVLVSYGNTFFVVLSVILVLLVIDAVREIRKYDDVTEKVNLQNNPGAMEHFHMKLFRAQRNLYIAGFSLLLSFLVRRLVTLISQQATLLASNEAFKKQGESASEAAKKYMEENEQLKKGAAVDGGKLDVGNAEVKLEEENRSLKADLQKLKDELASTKQKLEKAENQVLAMRKQFEGLTKEYDRFAGGARKAAGLQ

SEQ ID NO: 1025847 - protein, 313 aa, Homo sapiens
RGRGRGCCGRVRLLRRGLHVDCGKLGNKLTSSCGKPSSNRMSLQWTAVATFLYAEVFVVLLLCIPFISPKRWQKIFKSRLVEVLVSYGNTFFVVLSVILVLLVIDAVREIRKYDDVTEKVNLQNNPGAMEHFHMKLFRAQRNLYIAGFSLLLSFLVRRLVTLISQQATLLASNEAFKKQGESASEAAKKYMEENEQLKKGAAVDGGKLDVGNAEVKLEEENRSLKADLQKLKDELASTKQKLEKAENQVLAMRKQFEGLTKEYHLARACCFLRARPLPPVLLFVPFCFPHSLPQVIARHFGPCPHSPSTLQGT

SEQ ID NO: 1025848 - protein, 225 aa, Homo sapiens
MREVFVVLLLCIPFISPKRWQKIFKSRLVEVLVSYGNTFFVVLSVILVLLVIDAVREIRKYDDVTEKVNLQNNPGAMEHFHMKLFRAQRNLYIAGFSLLLSFLVRRLVTLISQQATLLASNEAFKKQGESASEAAKKYMEENEQLKKGAAVDGGKLDVGNAEVKLEEENRSLKADLQKLKDELASTKQKLEKAENQVLAMRKQFEGLTKEYDRFAGGARKAAGLQ

SEQ ID NO: 1025849 - protein, 114 aa, Homo sapiens
RGRGRGCCGRVRLLRRGLHVDCGKLGNKLTSSCGKPSSNRMSLQWTAVATFLYAGGLCCVASLHSLQFLLKEWQKIFKSRLVEVLVSYGNTFFVVLSVILVLLVIDAVRENSEV

SEQ ID NO: 1025850 - protein, 277 aa, Homo sapiens; identical to SEQ ID NO: 1025846

SEQ ID NO: 1025851 - protein, 261 aa, Homo sapiens
  misc_feature (16)..(16): Xaa can be any naturally occurring amino acid
HPPCKALAKDLPKSTXDSSLCQEDNTEYEKYDYREMLHNATFCLVPRGRRLGSFRFLEALQAACVPVMLSNGWELPFSEVINWNQAAVIGDERLLLQIPSTIRSIHQDKILALRQQTQFLWEAYFSSVEKIVLTTLEIIQDRIFKHISRNSLIWNKHPGGLFVLPQYSSYLGDFPYYYANLGLKPPSKFTAVIHAVTPLVSQSQPVLKLLVAAAKSQYCAQIIVLWNCDKPLPAKHRWPATAVPVVVIEGESKVMRSGFLP

SEQ ID NO: 1025852 - protein, 264 aa, Homo sapiens
  misc_feature (16)..(16): Xaa can be any naturally occurring amino acid
HPPCKALAKDLPKSTXDSSLCQEDNTEYEKYDYREMLHNATFCLVPRGRRLGSFRFLEALQAACVPVMLSNGWELPFSEVINWNQAAVIGDERLLLQIPSTIRSIHQDKILALRQQTQFLWEAYFSSVEKIVLTTLEIIQDRIFKHISRNSLIWNKHPGGLFVLPQYSSYLGDFPYYYANLGLKPPSKFTAVIHAVTPLVSQSQPVCQLSKNLDEQNDKKKKANENSTPGSWDCTRLLQTHLTGFCVPRLGCVQFNYGTLNNYF

SEQ ID NO: 1025853 - protein, 425 aa, Homo sapiens
  misc_feature (16)..(16): Xaa can be any naturally occurring amino acid
HPPCKALAKDLPKSTXDSSLCQEDNTEYEKYDYREMLHNATFCLVPRGRRLGSFRFLEALQAACVPVMLSNGWELPFSEVINWNQAAVIGDERLLLQIPSTIRSIHQDKILALRQQTQFLWEAYFSSVEKIVLTTLEIIQDRIFKHISRNSLIWNKHPGGLFVLPQYSSYLGDFPYYYANLGLKPPSKFTAVIHAVTPLVSQSQPVLKLLVAAAKSQYCAQIIVLWNCDKPLPAKHRWPATAVPVVVIEGESKVDFAFTVWQSFPERIVGYPARSHFWDNSKERWGYTSKWTNDYSMVLTGAAIYHKYYHYLYSHYLPASLKNMVDQLANCEDILMNFLVSAVTKLPPIKVTQKKQYKETMMGQTSRASRWADPDHFAQRQSCMNTFASWFGYMPLIHSQMRLDPVLFKDQVSILRKKYRDIERL

SEQ ID NO: 1025854 - protein, 293 aa, Homo sapiens
  misc_feature (16)..(16): Xaa can be any naturally occurring amino acid
HPPCKALAKDLPKSTXDSSLCQEDNTEYEKYDYREMLHNATFCLVPRGRRLGSFRFLEALQAACVPVMLSNGWELPFSEVINWNQAAVIGDERLLLQIPSTIRSIHQDKILALRQQTQFLWEAYFSSVEKIVLTTLEIIQDRIFKHISRNSLIWNKHPGGLFVLPQYSSYLGDFPYYYANLGLKPPSKFTAVIHAVTPLVSQSQPVLKLLVAAAKSQYCAQIIVLWNCDKPLPAMCQLSKNLDEQNDKKKKANENSTPGSWDCTRLLQTHLTGFCVPRLGCVQFNYGTLNNYF

SEQ ID NO: 1025855 - protein, 455 aa, Homo sapiens
  misc_feature (16)..(16): Xaa can be any naturally occurring amino acid
HPPCKALAKDLPKSTXDSSLCQEDNTEYEKYDYREMLHNATFCLVPRGRRLGSFRFLEALQAACVPVMLSNGWELPFSEVINWNQAAVIGDERLLLQIPSTIRSIHQDKILALRQQTQFLWEAYFSSVEKIVLTTLEIIQDRIFKHISRNSLIWNKHPGGLFVLPQYSSYLGDFPYYYANLGLKPPSKFTAVIHAVTPLVSQSQPVLKLLVAAAKSQYCAQIIVLWNCDKPLPAKHRWPATAVPVVVIEGESKVMSSRFLPYDNIITDAVLSLDEDTVLSTTEVDFAFTVWQSFPERIVGYPARSHFWDNSKERWGYTSKWTNDYSMVLTGAAIYHKYYHYLYSHYLPASLKNMVDQLANCEDILMNFLVSAVTKLPPIKVTQKKQYKETMMGQTSRASRWADPDHFAQRQSCMNTFASWFGYMPLIHSQMRLDPVLFKDQVSILRKKYRDIERL

SEQ ID NO: 1025856 - protein, 382 aa, Homo sapiens
  misc_feature (16)..(16): Xaa can be any naturally occurring amino acid
HPPCKALAKDLPKSTXDSSLWQEDNTEYEKYDYREMLHNATFCLVPRGRRLGSFRFLEALQAACVPVMLSNGWELPFSEVINWNQAAVIGDERLLLQIPSTIRSIHQDKILALRQQTQFLWEAYFSSVEKIVLTTLEIIQDRIFKHISRNSLIWNKHPGGLFVLPQYSSYLGDFPYYYANLGLKPPSKFTAVIHAVTPLVSQSQPVLKLLVAAAKSQYCAQIIVLWNCDKPLPAKHRWPATAVPVVVIEGESKVMSSRFLPYDNIITDAVLSLDEDTVLSTTEVDFAFTVWQSFPERIVGYPARSHFWDNSLPSADPLISRARLCQLSKNLDEQNDKKKKANENSTPGSWDCTRLLQTHLTGFCVPRLGCVQFNYGTLNNYF

SEQ ID NO: 1025857 - protein, 119 aa, Homo sapiens
MAVLPHIRDPFPLGLWGSLGAKPEGQAPLYPPTLSKRVVPLCTRAGLRLLSTLFIPAEAAGWFSHPRVCRYIDFVLKEDRLKRRLPLPRAEKPLVVGRTQWAIKGRNSMAWPRLKLNLE

SEQ ID NO: 1025858 - protein, 226 aa, Homo sapiens
MAVLPHIRDPFPLGLWGSLGAKPEGQAPLYPPTLSKRVVPLCTRAGLRLLSTLFIPAEAAGWFSHPRVCRYIDFVLKEDRQKKKKKKKKKKPFYSYCLTHATTKNKQQNKTKRTRARYSNPLRSLAADSRTAHDHYLTAGAGPAPKHTSAAAAQNSTASTQHHHPPRPTTSTARRAPETTRHRDTAAQPHRQEPGRTRRSPSSPQDRRGDTRRGRGERNKAAPTPA

SEQ ID NO: 1025859 - protein, 119 aa, Homo sapiens; identical to SEQ ID NO: 1025857

SEQ ID NO: 1025860 - protein, 111 aa, Homo sapiens
  misc_feature (2)..(3): Xaa can be any naturally occurring amino acid
  misc_feature (8)..(8): Xaa can be any naturally occurring amino acid
  misc_feature (10)..(13): Xaa can be any naturally occurring amino acid
  misc_feature (15)..(15): Xaa can be any naturally occurring amino acid
  misc_feature (18)..(20): Xaa can be any naturally occurring amino acid
  misc_feature (25)..(25): Xaa can be any naturally occurring amino acid
  misc_feature (27)..(27): Xaa can be any naturally occurring amino acid
  misc_feature (29)..(30): Xaa can be any naturally occurring amino acid
  misc_feature (32)..(33): Xaa can be any naturally occurring amino acid
  misc_feature (36)..(37): Xaa can be any naturally occurring amino acid
  misc_feature (40)..(40): Xaa can be any naturally occurring amino acid
  misc_feature (42)..(42): Xaa can be any naturally occurring amino acid
  misc_feature (44)..(44): Xaa can be any naturally occurring amino acid
  misc_feature (50)..(51): Xaa can be any naturally occurring amino acid
  misc_feature (54)..(54): Xaa can be any naturally occurring amino acid
  misc_feature (58)..(64): Xaa can be any naturally occurring amino acid
  misc_feature (66)..(66): Xaa can be any naturally occurring amino acid
  misc_feature (68)..(70): Xaa can be any naturally occurring amino acid
  misc_feature (72)..(73): Xaa can be any naturally occurring amino acid
  misc_feature (77)..(78): Xaa can be any naturally occurring amino acid
  misc_feature (83)..(83): Xaa can be any naturally occurring amino acid
  misc_feature (93)..(93): Xaa can be any naturally occurring amino acid
  misc_feature (95)..(95): Xaa can be any naturally occurring amino acid
  misc_feature (103)..(103): Xaa can be any naturally occurring amino acid
  misc_feature (105)..(105): Xaa can be any naturally occurring amino acid
  misc_feature (111)..(111): Xaa can be any naturally occurring amino acid
MXXPDDPXCXXXXPXSLXXXAHPAXWXLXXYXXAIXXEKXGXLXPGLPSXXPRXPTPXXXXXXXSXRXXXGXXSGMXXAVISXQRTAKSTKKXPXKAIEKIEXSXEQQVAX

SEQ ID NO: 1025861 - protein, 415 aa, Homo sapiens
PTRPLLMGEMHMVDTVTWHKMRGEHMVWVVLLSLLCYLVLFLCRHSSHRGVFLSVTILIYLLMGEMHMVDTVTWHKMRGAQMIVAMKAVSLGFDLDRGEVGTVPSPVEFMGYLYFVGTIVFGPWISFHSYLQAVQGRPLSCRWLQKVARSLALALLCLVLSTCVGPYLFPYFIPLNGDRLLRNKKRKARGTMVRWLRAYESAVSFHFSNYFVGFLSEATATLAGAGFTEEKDHLEWDLTVSKPLNVELPRSMVEVVTSWNLPMSYWLNNYVFKNALRLGTFSAVLVTYAASALLHGFSFHLAAVLLSLAFITYVEHVLRKRLARILSACVLSKRCPPDCSHQHRLGLGVRALNLLFGALAIFHLAYLGSLFDVDVDDTTEEQGYGMAYTVHKWSELSWASHWVTFGCWIFYRLIG

SEQ ID NO: 1025862 - protein, 434 aa, Homo sapiens
GIPPRMDGQMDRSGRKEAVVLGTEDALPPPLPPPGSLYHFFQLHMVWVVLLSLLCYLVLFLCRHSSHRGVFLSVTILIYLLMGEMHMVDTVTWHKMRGAQMIVAMKAVSLGFDLDRGEVGTVPSPVEFMGYLYFVGTIVFGPWISFHSYLQAVQGRPLSCRWLQKVARSLALALLCLVLSTCVGPYLFPYFIPLNGDRLLRNKKRKARGTMVRWLRAYESAVSFHFSNYFVGFLSEATATLAGAGFTEEKDHLEWDLTVSKPLNVELPRSMVEVVTSWNLPMSYWLNNYVFKNALRLGTFSAVLVTYAASALLHGFSFHLAAVLLSLAFITYVEHVLRKRLARILSACVLSKRCPPDCSHQHRLGLGVRALNLLFGALAIFHLAYLGSLFDVDVDDTTEEQGYGMAYTVHKWSELSWASHWVTFGCWIFYRLIG

SEQ ID NO: 1025863 - protein, 461 aa, Homo sapiens
MATFSRQEFFQQLLQGCLLPTAQQGLDQIWLLLAICLACRLLWRLGLPSYLKHASTVAGGFFSLYHFFQLHMVWVVLLSLLCYLVLFLCRHSSHRGVFLSVTILIYLLMGEMHMVDTVTWHKMRGAQMIVAMKAVSLGFDLDRGEVGTVPSPVEFMGYLYFVGTIVFGPWISFHSYLQTVQGRPLSCRWLQKVARSLALALLCLVLSTCVGPYLFPYFIPLNGDRLLRNKKRKARGTMVRWLRAYESAVSFHFSNYFVGFLSEATATLAGAGFTEEKDHLEWDLTVSKPLNVELPRSMVEVVTSWNLPMSYWLNNYVFKNALRLGTFSAVLVTYAASALLHGFSFHLAAVLLSLAFITYVEHVLRKRLARILSACVLSKRCPPDCSHQHRLGLGVRALNLLFGALAIFHLAYLGSLFDVDVDDTTEEQGYGMAYTVHKWSELSWASHWVTFGCWIFYRLIG

SEQ ID NO: 1025864 - protein, 152 aa, Homo sapiens
  misc_feature (11)..(11): Xaa can be any naturally occurring amino acid
  misc_feature (13)..(13): Xaa can be any naturally occurring amino acid
EALKDQGLVMXAXAAPLLYIGIVGDTGRFMYSMDQETFRVVSELFGYDFDYEAVFAPYVNISENAAKLSGYVLQNLTILPSGFAYVVLTKALLEQFDLQDSGTAFVVPLPATIDKVKAWAIFEEQDEGNYRVRLRSRRLSLTNCDQFRVGHP

SEQ ID NO: 1025865 - protein, 254 aa, Homo sapiens [sequence omitted]

SEQ ID NO: 1025866 - protein, 252 aa, Homo sapiens
GRRGSAHASGAAGRLALSGPEAVATAAPELVCAAIGEPMAKWGEGDPRWIVEERADATNVNNWHWTERDASNWSTDKRVETLFRGQCRFKDEEGKCDGDGWMSKVLMEEALHVSNRLTGKLYLLLLNGGVYTKTVTGTLYSQEYKYQGHVEIPSLSDENSVDEAGGLAVSLAKRMSPDTNLVGLMKEEGVKLLREADGNLHQHLRTEFTQGMIFLQMNEEVQVDPRWGISTEKLRSARAKAGPSKTQADLLE

SEQ ID NO: 1025867 - protein, 427 aa, Homo sapiens
QPLPTYDEVLLCTPATTFEEVALLLRRCLTLGSLGHKVYSLLFADQLSYEVARQAEELFHNLCTQQHREDYQLVMVCDGDWEHCYLPSAFSQHKVFVTPQAPLEAIQAYLAGHYRVPKQTLSAAAVFNDRLCVGIVASERAGVGKSLYVKRLHDKMKMQLNVKNVPLKTIRLIDPQVDESRVLGALLPFLDAQYQKVPVLFHLDVTSSVQTGIWVFLFKLLILQYLMDINGKMWLRNPCHLYIVEILERRTSVPSRSSSALRTRVPQFSFLDIFPKVTCRPPKEVIDMELSALRSDTEPGMDLWEFCSETFQRPYQYLRRFNQNQDLDTFQYQEGSVEGTPEECLQHFLFHCGVINPSWSELRNFARFLNYQLRDCEASLFCNPSFIGDTLRGFKKFVVTFMIFMQEILPHHHSTPLSPTSKVVHLE

SEQ ID NO: 1025868 - protein, 288 aa, Homo sapiens [sequence omitted]

SEQ ID NO: 1025869 - protein, 137 aa, Homo sapiens
SGVLADYATLGQALIEATEQAIQVDQVTQDEYVAILEKNDLPHDLAVLFASFQSPIAEDRLMWLQMIYNCFGSRLNAIARCFEGNFVTVKLNGLPVTNHWEFKGQGRHTLICVFFKLSDPSILAYIQLINQRLSSKG

SEQ ID NO: 1025870 - protein, 626 aa, Homo sapiens
MAGERPPLRGPGPGPGEVPGEGPPGPGGTGGGPGRGRPSSYRVLRSAVSSLARVDDFHCAEKIGAGFFSEVYKVRHRQSGQVMVLKMNKLPSNRGNTLREVQLMNRLRHPNILRFMGVCVHQGQLHALTEYMNGGTLEQLLSSPEPLSWPVRLHLALDIARGLRYLHSKGVFHRDLTSKNCLVRREDRGFTAVVGDFGLAEKIPVYREGARKEPLAVVGSPYWMAPEVLRGELYDEKADVFAFGIVLCELIARVPADPDYLPRTEDFGLDVPAFRTLVGDDCPLPFLLLAIHCCNLEPSTRAPFTEITQHLEWILEQLPEPAPLTRTALTHNQGSVARGGPSATLPRPDPRLSRSRSDLFLPPSPESPPNWGDNLTRVNPFSLREDLRGGKIKLLDTPSKPVLPLVPPSPFPSTQLPLVTTPETLVQPGTPARRCRSLPSSPELPRRMETALPGPGPPAVGPSAEEKMECEGSSPEPEPPGPAPQLPLAVATDNFISTCSSASQPWSPRSGPVLNNNPPAVVVNSPQGWAGEPWNRAQHSLPRAAALERTEPSPPPSAPREPDEGLPCPGCCLGPFSFGFLSMCPRPTPAVARYRNLNCEAGSLLCHRGHHAKPPTPSLQLPGARS

SEQ ID NO: 1025871 - protein, 115 aa, Homo sapiens
FSQTLPRIGVPLRGSQPCLPTSYTGAPSTANPNWNKPQCRPPDPSGRNVMGSESPVIEQHWICEGEENSLEPHLGEREPKPKITCHSLKDNCTEDLDLKTPHDSHPSHSTSGILF

SEQ ID NO: 1025872 - protein, 346 aa, Homo sapiens
  misc_feature (234)..(234): Xaa can be any naturally occurring amino acid
  misc_feature (238)..(238): Xaa can be any naturally occurring amino acid
  misc_feature (250)..(250): Xaa can be any naturally occurring amino acid
  misc_feature (255)..(255): Xaa can be any naturally occurring amino acid
  misc_feature (269)..(269): Xaa can be any naturally occurring amino acid
  misc_feature (272)..(273): Xaa can be any naturally occurring amino acid
  misc_feature (281)..(281): Xaa can be any naturally occurring amino acid
  misc_feature (286)..(286): Xaa can be any naturally occurring amino acid
  misc_feature (289)..(289): Xaa can be any naturally occurring amino acid
  misc_feature (301)..(301): Xaa can be any naturally occurring amino acid
  misc_feature (310)..(310): Xaa can be any naturally occurring amino acid
  misc_feature (321)..(321): Xaa can be any naturally occurring amino acid
  misc_feature (338)..(338): Xaa can be any naturally occurring amino acid
ADPAQLRRHPGYKRTASATLSDPAAAAMQPSSLLPLALCLLAAPASALVRIPLHKFTSIRRTMSEVGGSVEDLIAKGPVSKYSQAVPAVTEGPIPEVLKNYMDAQYYGEIGIGTPPQCFTIVFDTGSSNLWVPSIHCKLLDIACWIHHKYNSDKSSTYVKNGTSFDIHYGSGSLSGYLSQDTVSVPCQSASSASALGGVKVERQVFGEATKQPGITFIAAKFDGILGMAYPRIXDNNXLPVFDNLLQQKXVDQNXFSFYLSRDPDAHLXGEXXLGGTDSKXYKGFXSYXNFTRKAYWQVHXDQVEVASGXTLCKEGCEAIXDTGTSLMVGPVDEVREXQKAIGAVP

SEQ ID NO: 1025873 - protein, 374 aa, Homo sapiens
  misc_feature (262)..(262): Xaa can be any naturally occurring amino acid
  misc_feature (266)..(266): Xaa can be any naturally occurring amino acid
  misc_feature (278)..(278): Xaa can be any naturally occurring amino acid
  misc_feature (283)..(283): Xaa can be any naturally occurring amino acid
  misc_feature (297)..(297): Xaa can be any naturally occurring amino acid
  misc_feature (300)..(301): Xaa can be any naturally occurring amino acid
  misc_feature (309)..(309): Xaa can be any naturally occurring amino acid
  misc_feature (314)..(314): Xaa can be any naturally occurring amino acid
  misc_feature (317)..(317): Xaa can be any naturally occurring amino acid
  misc_feature (329)..(329): Xaa can be any naturally occurring amino acid
  misc_feature (338)..(338): Xaa can be any naturally occurring amino acid
  misc_feature (349)..(349): Xaa can be any naturally occurring amino acid
  misc_feature (366)..(366): Xaa can be any naturally occurring amino acid
ADPAQLRRHPGYKRTASATLSDPAAAAMQPSSLLPLALCLLAAPASALVRIPLHKFTSIRRTMSEVGGSVEDLIAKGPVSKYSQAVPAVTEGPIPEVLKNYMDAQYYGEIGIGTPPQCWAPIPEVLKNYMDAQYYGEIGIGTPPQCFTIVFDTGSSNLWVPSIHCKLLDIACWIHHKYNSDKSSTYVKNGTSFDIHYGSGSLSGYLSQDTVSVPCQSASSASALGGVKVERQVFGEATKQPGITFIAAKFDGILGMAYPRIXDNNXLPVFDNLLQQKXVDQNXFSFYLSRDPDAHLXGEXXLGGTDSKXYKGFXSYXNFTRKAYWQVHXDQVEVASGXTLCKEGCEAIXDTGTSLMVGPVDEVREXQKAIGAVP

SEQ ID NO: 1025874 - protein, 102 aa, Homo sapiens
IDQEIAQIMNSLDEAAIVTSITGISNRLGSVILAEINHINNFQSPDQLLAFAGLEPSVYQSGQMNATGKIVKRGSTSLRWALCQAAEYASHWSPTLRQYRQK

SEQ ID NO: 1025875 - protein, 117 aa, Homo sapiens
MRLSLPLLLLLLGAWAIPGGLGDRAPLTATAPQLDDEEMYSAHMPAHLRCDACRAVAYQVSPSPLSPCPAHTPSQARPLHPPHIPPPAFDPQSLPLGIKPQMQPFIYSMPQFTHLPA

SEQ ID NO: 1025876 - protein, 189 aa, Homo sapiens
MRLSLPLLLLLLGAWAIPGGLGDRAPLTATAPQLDDEEMYSAHMPAHLRCDACRAVAYQMWQNLAKAETKLHTSNSGGRRELSELVYTDVLDRSCSRNWQDYGVREVDQVKRLTGPGLSEGPEPSISVMVTGGPWPTRLSRTCLHYLGEFGEDQIYEAHQQGRGALEALLCGGPQGACSEKVSATREEL

SEQ ID NO: 1025877 - protein, 117 aa, Homo sapiens; identical to SEQ ID NO: 1025875

SEQ ID NO: 1025878 - protein, 117 aa, Homo sapiens; identical to SEQ ID NO: 1025875

SEQ ID NO: 1025879 - protein, 147 aa, Homo sapiens
MVTGGPWPTRLSRTCLHYLGSLEKTRSMKPTNKAEGLWRHCYVGDPRGPAQRRCQPQEKSSSPGLYPPLKEAGACSDGLHSRLQAARRAGSPCSVLPSCLPPPASGHSGLGGSQRLPLWTQIKPSDLTSFLCKRCLWGWECRHWCFC

SEQ ID NO: 1025880 - protein, 112 aa, Homo sapiens
MRRCTQPTCPLTCAVMPAELWLTSYGVREVDQVKRLTGPGLSEGPEPSISVMVTGGPWPTRLSRTCLHYLGEFGEDQIYEAHQQGRGALEALLCGGPQGACSEKVSATREEL

SEQ ID NO: 1025881 - protein, 130 aa, Homo sapiens
MWQNLAKAETKLHTSNSGGRRELSELVYTDVLDRSCSRNWQDYGVREVDQVKRLTGPGLSEGPEPSISVMVTGGPWPTRLSRTCLHYLGEFGEDQIYEAHQQGRGALEALLCGGPQGACSEKVSATREEL

SEQ ID NO: 1025882 - protein, 141 aa, Homo sapiens
MVQVHTCERLHMWQNLAKAETKLHTSNSGGRRELSELVYTDVLDRSCSRNWQDYGVREVDQVKRLTGPGLSEGPEPSISVMVTGGPWPTRLSRTCLHYLGEFGEDQIYEAHQQGRGALEALLCGGPQGACSEKVSATREEL

SEQ ID NO: 1025883 - protein, 117 aa, Homo sapiens; identical to SEQ ID NO: 1025875

SEQ ID NO: 1025884 - protein, 117 aa, Homo sapiens; identical to SEQ ID NO: 1025875

SEQ ID NO: 1025885 - protein, 117 aa, Homo sapiens; identical to SEQ ID NO: 1025875

SEQ ID NO: 1025886 - protein, 189 aa, Homo sapiens; identical to SEQ ID NO: 1025876

SEQ ID NO: 1025887 - protein, 130 aa, Homo sapiens; identical to SEQ ID NO: 1025881

SEQ ID NO: 1025888 - protein, 123 aa, Homo sapiens
MRLSLPLLLLLLGAWAIPGGLGDRAPLTATAPQLDDEEMYSAHMPAHLRCDACRAVAYQSLLVPDVAKSGKGRDQTSYLKLWGAAGAERVGLHGCPGPELLPELAGLRSSRSGPSETSHRPRT

SEQ ID NO: 1025889 - protein, 72 aa, Homo sapiens
RELEERISEMAVLAVMHVSPQILDHLTMIDNKNESELEAHLCRMMKHSMDQTGSKSDKETEKGASRIVSGLT

SEQ ID NO: 1025890 - protein, 1272 aa, Homo sapiens
MLNQSAVRIRAGFCLIRLWLLRGLYVGPSLRMFFEDEKPALLSQIDAEFEKMQGQSPPAPTRGISKHSTSGTDEGEDGDEPDDGSNDVVDLLPRTEISDKITSELVSKIGDKNWKIRKEGLDEVAGIINDAKFIQPNIGELPTALKGRLNDSNKILVQQTLNILQQLAVAMGPNIKQHVKNLGIPIITVLGDSKNNVRAAALATVNAWAEQTGMKEWLEGEDLSEELKKENPFLRQELLGWLAEKLPTLRSTPTDLILCVPHLYSCLEDRNGDVRKKAQDALPFFMMHLGYEKMAKATGKLKPTSKDQVLAMLEKAKVNMPAKPAPPTKATSKPMGGSAPAKFQPASAPAEDCISSSTEPKPDPKKAKAPGLSSKAKSAQGKKMPSKTSLKEDEDKSGPIFIVVPNGKEQRMKDEKGLKVLKWNFTTPRDEYIEQLKTQMSSCVAKWLQDEMFHSDFQHHNKALAVMVDHLESEKEGVIGCLDLILKWLTLRFFDTNTSVLMKALEYLKLLFTLLSEEEYHLTENEASSFIPYLVVKVGEPKDVIRKDVRAILNRMCLVYPASKMFPFIMEGTKSKNSKQRAECLEELGCLVESYGMNVCQPTPGKALKEIAVHIGDRDNAVRNAALNTIVTVYNVHGDQVFKLIGNLSEKDMSMLEERIKRSAKRPSAAPIKQVEEKPQRAQNISSNANMLRKGPAEDMSSKLNQARSMSGHPEAAQMVRREFQLDLDEIENDNGTVRCEMPELVQHKLDDIFEPVLIPEPKIRAVSPHFDDMHSNTASTINFIISQVASGDINTSIQALTQIDEVLRQEDKAEAMSGHIDQFLIATFMQLRLIYNTHMADEKLEKDEIIKLYSCIIGNMISLFQIESLAREASTGVLKDLMHGLITLMLDSRIEDLEEGQQVIRSVNLLVVKVLEKSDQTNILSALLVLLQDSLLATASSPKFSELVMKCLWRMVRLLPDTINSINLDRILLDIHIFMKVFPKEKLKQCKSEFPIRTLKTLLHTLCKLKGPKILDHLTMIDNKNESELEAHLCRMMKHSMDQTGSKSDKETEKGASRIDEKSSKAKVNDFLAEIFKKIGSKENTKEGLAELYEYKKKYSDADIEPFLKNSSQFFQSYVERGLRVIEMEREGKGRISTSTGISPQMEVTCVPTPTSTVSSIGNTNGEEVGPSVYLERLKILRQRCGLDNTKQDDRPPLTSLLSKPAVPTVASSTDMLHSKLSQLRESREQHQHSDLDSNQTHSSGTVTSSSSTANIDDLKKRLERIKSSRK

SEQ ID NO: 1025891 - protein, 1637 aa, Homo sapiens
RRNVKWSSPAGGIDAIFLTTTLQNISEDVLAVMDNKNPTIKQQTSLFIARSFRHCTASTLPKSLLKPFCAALLKHINDSAPEVRDAAFEALGTALKVVGEKALNPFLADVDTLKLDKIKECSEKVELIHGKKAGLAADKKEFKPLPGRTAASGAAGDKDTKDISAPKPGPLKKAPAAKAGGPPKKGKPAAPGGAGNTGTKNKKGLETKEIVEPELSIEVCEEKASAVLPPTCIQLLDSSNWKERLACMEEFQKAVELMDRTEMPCQALVRMLAKKPGWKETNFQVMQMKLHIVALIAQKGNFSKTSAQVVLDGLVDKIGDVKCGNNAKEAMTAIAEACMLPWTAEQVVSMAFSQKNPKNQSETLNWLSNAIKEFGFSGLNVKAFISNVKTALAATNPAVRTAAITLLGVMYLYVGPSLRMFFEDEKPALLSQIDAEFEKMQGQSPPAPTRGISKHSTSGTDEGEDGDEPDDGSNDVVDLLPRTEISDKITSELVSKIGDKNWKIRKEGLDEVAGIINDAKFIQPNIGELPTALKGRLNDSNKILVQQTLNILQQLAVAMGPNIKQHVKNLGIPIITVLGDSKNNVRAAALATVNAWAEQTGMKEWLEGEDLSEELKKENPFLRQELLGWLAEKLPTLRSTPTDLILCVPHLYSCLEDRNGDVRKKAQDALPFFMMHLGYEKMAKATGKLKPTSKDQVLAMLEKAKVNMPAKPAPPTKATSKPMGGSAPAKFQPASAPAEDCISSSTEPKPDPKKAKAPGLSSKAKSAQGKKMPSKTSLKEDEDKSGPIFIVVPNGKEQRMKDEKGLKVLKWNFTTPRDEYIEQLKTQMSSCVAKWLQDEMFHSDFQHHNKALAVMVDHLESEKEGVIGCLDLILKWLTLRFFDTNTSVLMKALEYLKLLFTLLSEEEYHLTENEASSFIPYLVVKVGEPKDVIRKDVRAILNRMCLVYPASKMFPFIMEGTKSKNSKQRAECLEELGCLVESYGMNVCQPTPGKALKEIAVHIGDRDNAVRNAALNTIVTVYNVHGDQVFKLIGNLSEKDMSMLEERIKRSAKRPSAAPIKQVEEKPQRAQNISSNANMLRKGPAEDMSSKLNQARSMSGHPEAAQMVRREFQLDLDEIENDNGTEPKIRAVSPHFDDMHSNTASTINFIISQVASGDINTSIQALTQIDEVLRQEDKAEAMSGHIDQFLIATFMQLRLIYNTHMADEKLEKDEIIKLYSCIIGNMISLFQIESLAREASTGVLKDLMHGLITLMLDSRIEDLEEGQQVIRSVNLLVVKVLEKSDQTNILSALLVLLQDSLLATASSPKFSELVMKCLWRMVRLLPDTINSINLDRILLDIHIFMKVFPKEKLKQCKSEFPIRTLKTLLHTLCKLKGPKILDHLTMIDNKNESELEAHLCRMMKHSMDQTGSKSDKETEKGASRIDEKSSKAKVNDFLAEIFKKIGSKENTKEGLAELYEYKKKYSDADIEPFLKNSSQFFQSYVERGLRVIEMEREGKGRISTSTGISPQMEVTCVPTPTSTVSSIGNTNGEEVGPSVYLERLKILRQRCGLDNTKQDDRPPLTSLLSKPAVPTVASSTDMLHSKLSQLRESREQHQHSDLDSNQTHSSGTVTSSSSTANIDDLKKRLERIKSSRK

SEQ ID NO: 1025892 - protein, 713 aa, Homo sapiens
  misc_feature (7)..(7): Xaa can be any naturally occurring amino acid
MLPMIQXYNLMISSKSKNSKQRAECLEELGCLVESYGMNVCQPTPGKALKEIAVHIGDRDNAVRNAALNTIVTVYNVHGDQVFKLIGNLSEKDMSMLEERIKRSAKRPSAAPIKQVEEKPQRAQNISSNANMLRKGPAEDMSSKLNQARSMSGHPEAAQMVRREFQLDLDEIENDNGTVRCEMPELVQHKLDDIFEPVLIPEPKIRAVSPHFDDMHSNTASTINFIISQVASGDINTSIQALTQIDEVLRQEDKAEAMSGHIDQFLIATFMQLRLIYNTHMADEKLEKDEIIKLYSCIIGNMISLFQIESLAREASTGVLKDLMHGLITLMLDSRIEDLEEGQQVIRSVNLLVVKVLEKSDQTNILSALLVLLQDSLLATASSPKFSELVMKCLWRMVRLLPDTINSINLDRILLDIHIFMKVFPKEKLKQCKSEFPIRTLKTLLHTLCKLKGPKILDHLTMIDNKNESELEAHLCRMMKHSMDQTGSKSDKETEKGASRIDEKSSKAKVNDFLAEIFKKIGSKENTKEGLAELYEYKKKYSDADIEPFLKNSSQFFQSYVERGLRVIEMEREGKGRISTSTGISPQMEVTCVPTPTSTVSSIGNTNGEEVGPSVYLERLKILRQRCGLDNTKQDDRPPLTSLLSKPAVPTVASSTDMLHSKLSQLRESREQHQHSDLDSNQTHSSGTVTSSSSTANIDDLKKRLERIKSSRK

SEQ ID NO: 1025893 - protein, 1622 aa, Homo sapiens
RRNVKWSSPAGGIDAIFLTTTLQNISEDVLAVMDNKNPTIKQQTSLFIARSFRHCTASTLPKSLLKPFCAALLKHINDSAPEVRDAAFEALGTALKVVGEKALNPFLADVDTLKLDKIKECSEKVELIHGKKAGLAADKKEFKPLPGRTAASGAAGDKDTKDISAPKPGPLKKAPAAKAGGPPKKGKPAAPGGAGNTGTKNKKGLETKEIVEPELSIEVCEEKASAVLPPTCIQLLDSSNWKERLACMEEFQKAVELMDRTEMPCQALVRMLAKKPGWKETNFQVMQMKLHIVALIAQKGNFSKTSAQVVLDGLVDKIGDVKCGNNAKEAMTAIAEACMLPWTAEQVVSMAFSQKNPKNQSETLNWLSNAIKEFGFSGLNVKAFISNVKTALAATNPAVRTAAITLLGVMYLYVGPSLRMFFEDEKPALLSQIDAEFEKMQGQSPPAPTRGISKHSTSGTDEGEDGDEPDDGSNDVVDLLPRTEISDKITSELVSKIGDKNWKIRKEGLDEVAGIINDAKFIQPNIGELPTALKGRLNDSNKILVQQTLNILQQLAVAMGPNIKQHVKNLGIPIITVLGDSKNNVRAAALATVNAWAEQTGMKEWLEGEDLSEELKKENPFLRQELLGWLAEKLPTLRSTPTDLILCVPHLYSCLEDRNGDVRKKAQDALPFFMMHLGYEKMAKATGKLKPTSKDQVLAMLEKAKVNMPAKPAPPTKATSKPMGGSAPAKFQPASAPAEDCISSSTEPKPDPKKAKAPGLSSKAKSAQGKKMPSKTSLKEDEDKSGPIFIVVPNGKEQRMKDEKGLKVLKWNFTTPRDEYIEQLKTQMSSCVAKWLQDEMFHSDFQHHNKALAVMVDHLESEKEGVIGCLDLILKWLTLRFFDTNTSVLMKALEYLKLLFTLLSEEEYHLTENEASSFIPYLVVKVGEPKDVIRKDVRAILNRMCLVYPASKMFPFIMEGTKSKNSKQRAECLEELGCLVESYGMNVCQPTPGKALKEIAVHIGDRDNAVRNAALNTIVTVYNVHGDQVFKLIGNLSEKDMSMLEERIKRSAKRPSAAPIKQVEEKPQRAQNISSNANMLRKGPAEDMSSKLNQARSMSGHPEAAQMVRREFQLDLDEIENDNGTVRCEMPELVQHKLDDIFEPVLIPEPKIRAVSPHFDDMHSNTASTINFIISQVASGDINTSIQALTQIDEVLRQEDKAEAMSGHIDQFLIATFMQLRLIYNTHMADEKLEKDEIIKLYSCIIGNMISLFQIESLAREASTGVLKDLMHGLITLMLDSRIEDLEEGQQVIRSVNLLVVKVLEKSDQTNILSALLVLLQDSLLATASSPKFSELVMKCLWRMVRLLPDTINSINLDRILLDIHIFMKVFPKEKLKQCKSEFPIRTLKTLLHTLCKLKGPKILDHLTMIDNKNESELEAHLCRMMKHSMDQTGSKSDKETEKGASRIDEKSSKAKVNDFLAEIFKKIGSKENTKEGLAELYEYKKKYSDADIEPFLKNSSQFFQSYVERGLRVIEMEREGKGRISTSTGISPQMEVTCVPTPTSTVSSIGNTNGEEVGPSVYLERLKILRQRCGLDNTKQDDRPPLTSLLSKPAVPTVASSTDMLHSIQTWILTRLTLQEL

SEQ ID NO: 1025894 - protein, 1660 aa, Homo sapiens
RRNVKWSSPAGGIDAIFLTTTLQNISEDVLAVMDNKNPTIKQQTSLFIARSFRHCTASTLPKSLLKPFCAALLKHINDSAPEVRDAAFEALGTALKVVGEKALNPFLADVDTLKLDKIKECSEKVELIHGKKAGLAADKKEFKPLPGRTAASGAAGDKDTKDISAPKPGPLKKAPAAKAGGPPKKGKPAAPGGAGNTGTKNKKGLETKEIVEPELSIEVCEEKASAVLPPTCIQLLDSSNWKERLACMEEFQKAVELMDRTEMPCQALVRMLAKKPGWKETNFQVMQMKLHIVALIAQKGNFSKTSAQVVLDGLVDKIGDVKCGNNAKEAMTAIAEACMLPWTAEQVVSMAFSQKNPKNQSETLNWLSNAIKEFGFSGLNVKAFISNVKTALAATNPAVRTAAITLLGVMYLYVGPSLRMFFEDEKPALLSQIDAEFEKMQGQSPPAPTRGISKHSTSGTDEGEDGDEPDDGSNDVVDLLPRTEISDKITSELVSKIGDKNWKIRKEGLDEVAGIINDAKFIQPNIGELPTALKGRLNDSNKILVQQTLNILQQLAVAMGPNIKQHVKNLGIPIITVLGDSKNNVRAAALATVNAWAEQTGMKEWLEGEDLSEELKKENPFLRQELLGWLAEKLPTLRSTPTDLILCVPHLYSCLEDRNGDVRKKAQDALPFFMMHLGYEKMAKATGKLKPTSKDQVLAMLEKAKVNMPAKPAPPTKATSKPMGGSAPAKFQPASAPAEDCISSSTEPKPDPKKAKAPGLSSKAKSAQGKKMPSKTSLKEDEDKSGPIFIVVPNGKEQRMKDEKGLKVLKWNFTTPRDEYIEQLKTQMSSCVAKWLQDEMFHSDFQHHNKALAVMVDHLESEKEGVIGCLDLILKWLTLRFFDTNTSVLMKALEYLKLLFTLLSEEEYHLTENEASSFIPYLVVKVGEPKDVIRKDVRAILNRMCLVYPASKMFPFIMEGTKSKNSKQRAECLEELGCLVESYGMNVCQPTPGKALKEIAVHIGDRDNAVRNAALNTIVTVYNVHGDQVFKLIGNLSEKDMSMLEERIKRSAKRPSAAPIKQVEEKPQRAQNISSNANMLRKGPAEDMSSKLNQARSMSGHPEAAQMVRREFQLDLDEIENDNGTVRCEMPELVQHKLDDIFEPVLIPEPKIRAVSPHFDDMHSNTASTINFIISQVASGDINTSIQALTQIDEVLRQEDKAEAMSGHIDQFLIATFMQLRLIYNTHMADEKLEKDEIIKLYSCIIGNMISLFQIESLAREASTGVLKDLMHGLITLMLDSRIEDLEEGQQVIRSVNLLVVKVLEKSDQTNILSALLVLLQDSLLATASSPKFSELVMKCLWRMVRLLPDTINSINLDRILLDIHIFMKVFPKEKLKQCKSEFPIRTLKTLLHTLCKLKGPKILDHLTMIDNKNESELEAHLCRMMKHSMDQTGSKSDKETEKGASRIDEKSSKAKVNDFLAEIFKKIGSKENTKEGLAELYEYKKKYSDADIEPFLKNSSQFFQSYVERGLRVIEMEREGKGRISTSTGISPQMEVTCVPTPTSTVSSIGNTNGEEVGPSVYLERLKILRQRCGLDNTKQDDRPPLTSLLSKPAVPTVASSTDMLHSKLSQLRESREQHQHSDLDSNQTHSSGTVTSSSSTANIDDLKKRLERIKSSRK

SEQ ID NO: 1025895 - protein, 1660 aa, Homo sapiens; identical to SEQ ID NO: 1025894

SEQ ID NO: 1025896 - protein, 151 aa, Homo sapiens
NRDDRYDRGRALVACPLSTRHVPHQMEVTCVPTPTSTVSSIGNTNGEEVGPSVYLERLKILRQRCGLDNTKQDDRPPLTSLLSKPAVPTVASSTDMLHSKLSQLRESREQHQHSDLDSNQTHSSGTVTSSSSTANIDDLKKRLERIKSSRK

SEQ ID NO: 1025897 - protein, 1388 aa, Homo sapiens
RRNVKWSSPAGGIDAIFLTTTLQNISEDVLAVMDNKNPTIKQQTSLFIARSFRHCTASTLPKSLLKPFCAALLKHINDSAPEVRDAAFEALGTALKVVGEKALNPFLADVDTLKLDKIKECSEKVELIHGKKAGLAADKKEFKPLPGRTAASGAAGDKDTKDISAPKPGPLKKAPAAKAGGPPKKGKPAAPGGAGNTGTKNKKGLETKEIVEPELSIEVCEEKASAVLPPTCIQLLDSSNWKERLACMEEFQKAVELMDRTEMPCQALVRMLAKKPGWKETNFQVMQMKLHIVALIAQKGNFSKTSAQVVLDGLVDKIGDVKCGNNAKEAMTAIAEACMLPWTAEQVVSMAFSQKNPKNQSETLNWLSNAIKEFGFSGLNVKAFISNVKTALAATNPAVRTAAITLLGVMYLYVGPSLRMFFEDEKPALLSQIDAEFEKMQGQSPPAPTRGISKHSTSGTDEGEDGDEPDDGSNDVVDLLPRTEISDKITSELVSKIGDKNWKIRKEGLDEVAGIINDAKFIQPNIGELPTALKGRLNDSNKILVQQTLNILQQLAVAMGPNIKQHVKNLGIPIITVLGDSKNNVRAAALATVNAWAEQTGMKEWLEGEDLSEELKKENPFLRQELLGWLAEKLPTLRSTPTDLILCVPHLYSCLEDRNGDVRKKAQDALPFFMMHLGYEKMAKATGKLKPTSKDQVLAMLEKAKVNMPAKPAPPTKATSKPMGGSAPAKFQPASAPAEDCISSSTEPKPDPKKAKAPGLSSKAKSAQGKKMPSKTSLKEDEDKSGPIFIVVPNGKEQRMKDEKGLKVLKWNFTTPRDEYIEQLKTQMSSCVAKWLQDEMFHSDFQHHNKALAVMVDHLESEKEGVIGCLDLILKWLTLRFFDTNTSVLMKALEYLKLLFTLLSEEEYHLTENEASSFIPYLVVKVGEPKDVIRKDVRAILNRMCLVYPASKMFPFIMEGTKSKNSKQRAECLEELGCLVESYGMNVCQPTPGKALKEIAVHIGDRDNAVRNAALNTIVTVYNVHGDQVFKLIGNLSEKDMSMLEERIKRSAKRPSAAPIKQVEEKPQRAQNISSNANMLRKGPAEDMSSKLNQARSMSGHPEAAQMVRREFQLDLDEIENDNGTVRCEMPELVQHKLDDIFEPVLIPEPKIRAVSPHFDDMHSNTASTINFIISQVASGDINTSIQALTQIDEVLRQEDKAEAMSGHIDQFLIATFMQLRLIYNTHMADEKLEKDEIIKLYSCIIGNMISLFQIESLAREASTGVLKDLMHGLITLMLDSRIEDLEEGQQVIRSVNLLVVKVLEKSDQTNILSALLVLLQDSLLATASSPKFSELVMKCLWRMVRLLPDTINSINLDRILLDIHIFMKVFPKEKLKQCKSEFPIRTL

SEQ ID NO: 1025898 - protein, 677 aa, Homo sapiens
RRNVKWSSPAGGIDAIFLTTTLQNISEDVLAVMDNKNPTIKQQTSLFIARSFRHCTASTLPKSLLKPFCAALLKHINDSAPEVRDAAFEALGTALKVVGEKALNPFLADVDTLKLDKIKECSEKVELIHGKKAGLAADKKEFKPLPGRTAASGAAGDKDTKDISAPKPGPLKKAPAAKAGGPPKKGKPAAPGGAGNTGTKNKKGLETKEIVEPELSIEVCEEKASAVLPPTCIQLLDSSNWKERLACMEEFQKAVELMDRTEMPCQALVRMLAKKPGWKETNFQVMQMKLHIVALIAQKGNFSKTSAQVVLDGLVDKIGDVKCGNNAKEAMTAIAEACMLPWTAEQVVSMAFSQKNPKNQSETLNWLSNAIKEFGFSGLNVKAFISNVKTALAATNPAVRTAAITLLGVMYLYVGPSLRMFFEDEKPALLSQIDAEFEKMQGQSPPAPTRGISKHSTSGTDEGEDGDEPDDGSNDVVDLLPRTEISDKITSELVSKIGDKNWKIRKEGLDEVAGIINDAKFIQPNIGELPTALKGRLNDSNKILVQQTLNILQQLAVAMGPNIKQHVKNLGIPIITVLGDSKNNVRAAALATVNAWAEQTGMKEWLEGEDLSEELKKENPFLRQELLGWLAEKLPTLRSTPTDLILCVPHLYSCSRRLSVDEFSVQTCKQLPPLCSV

SEQ ID NO: 1025899 - protein, 378 aa, Homo sapiens
RRNVKWSSPAGGIDAIFLTTTLQNISEDVLAVMDNKNPTIKQQTSLFIARSFRHCTASTLPKSLLKPFCAALLKHINDSAPEVRDAAFEALGTALKVVGEKALNPFLADVDTLKLDKIKECSEKVELIHGKKAGLAADKKEFKPLPGRTAASGAAGDKDTKDISAPKPGPLKKAPAAKAGGPPKKGKPAAPGGAGNTGTKNKKGLETKEIVEPELSIEVCEEKASAVLPPTCIQLLDSSNWKERLACMEEFQKAVELMDRTEMPCQALVRMLAKKPGWKETNFQVMQMKLHIVALIAQKGNFSKTSAQVVLDGLVDKIGDVKCGNNAKEAMTAIAEACMLPWTAEQVVSMAFSQKNPKNQSETLNWLSNAIKEFGFSG

SEQ ID NO: 1025900 - protein, 1660 aa, Homo sapiens; identical to SEQ ID NO: 1025894

SEQ ID NO: 1025901 - protein, 961 aa, Homo sapiens
MLEKAKVNMPAKPAPPTKATSKPMGGSAPAKFQPASAPAEDCISSSTEPKPDPKKAKAPGLSSKAKSAQGKKMPSKTSLKEDEDKSGPIFIVVPNGKEQRMKDEKGLKVLKWNFTTPRDEYIEQLKTQMSSCVAKWLQDEMFHSDFQHHNKALAVMVDHLESEKEGVIGCLDLILKWLTLRFFDTNTSVLMKALEYLKLLFTLLSEEEYHLTENEASSFIPYLVVKVGEPKDVIRKDVRAILNRMCLVYPASKMFPFIMEGTKSKNSKQRAECLEELGCLVESYGMNVCQPTPGKALKEIAVHIGDRDNAVRNAALNTIVTVYNVHGDQVFKLIGNLSEKDMSMLEERIKRSAKRPSAAPIKQVEEKPQRAQNISSNANMLRKGPAEDMSSKLNQARSMSGHPEAAQMVRREFQLDLDEIENDNGTVRCEMPELVQHKLDDIFEPVLIPEPKIRAVSPHFDDMHSNTASTINFIISQVASGDINTSIQALTQIDEVLRQEDKAEAMSGHIDQFLIATFMQLRLIYNTHMADEKLEKDEIIKLYSCIIGNMISLFQIESLAREASTGVLKDLMHGLITLMLDSRIEDLEEGQQVIRSVNLLVVKVLEKSDQTNILSALLVLLQDSLLATASSPKFSELVMKCLWRMVRLLPDTINSINLDRILLDIHIFMKVFPKEKLKQCKSEFPIRTLKTLLHTLCKLKGPKILDHLTMIDNKNESELEAHLCRMMKHSMDQTGSKSDKETEKGASRIDEKSSKAKVNDFLAEIFKKIGSKENTKEGLAELYEYKKKYSDADIEPFLKNSSQFFQSYVERGLRVIEMEREGKGRISTSTGISPQMEVTCVPTPTSTVSSIGNTNGEEVGPSVYLERLKILRQRCGLDNTKQDDRPPLTSLLSKPAVPTVASSTDMLHSKLSQLRESREQHQHSDLDSNQTHSSGTVTSSSSTANIDDLKKRLERIKSSRK

SEQ ID NO: 1025902 - protein, 1642 aa, Homo sapiens
RRNVKWSSPAGGIDAIFLTTTLQNISEDVLAVMDNKNPTIKQQTSLFIARSFRHCTASTLPKSLLKPFCAALLKHINDSAPEVRDAAFEALGTALKVVGEKALNPFLADVDTLKLDKIKECSEKVELIHGKKAGLAADKKEFKPLPGRTAASGAAGDKDTKDISAPKPGPLKKAPAAKAGGPPKKGKPAAPGGAGNTGTKNKKGLETKEIVEPELSIEVCEEKASAVLPPTCIQLLDSSNWKERLACMEEFQKAVELMDRTEMPCQALVRMLAKKPGWKETNFQVMQMKLHIVALIAQKGNFSKTSAQVVLDGLVDKIGDVKCGNNAKEAMTAIAEACMLPWTAEQVVSMAFSQKNPKNQSETLNWLSNAIKEFGFSGLNVKAFISNVKTALAATNPAVRTAAITLLGVMYLYVGPSLRMFFEDEKPALLSQIDAEFEKMQGQSPPAPTRGISKHSTSGTDEGEDGDEPDDGSNDVVDLLPRTEISDKITSELVSKIGDKNWKIRKEGLDEVAGIINDAKFIQPNIGELPTALKGRLNDSNKILVQQTLNILQQLAVAMGPNIKQHVKNLGIPIITVLGDSKNNVRAAALATVNAWAEQTGMKEWLEGEDLSEELKKENPFLRQELLGWLAEKLPTLRSTPTDLILCVPHLYSCLEDRNGDVRKKAQDALPFFMMHLGYEKMAKATGKLKPTSKDQVLAMLEKAKVNMPAKPAPPTKATSKPMGGSAPAKFQPASAPAEDCISSSTEPKPDPKKAKAPGLSSKAKSAQGKKMPSKTSLKEDEDKSGPIFIVVPNGKEQRMKDEKGLKVLKWNFTTPRDEYIEQLKTQMSSCVAKWLQDEMFHSDFQHHNKALAVMVDHLESEKEGVIGCLDLILKWLTLRFFDTNTSVLMKALEYLKLLFTLLSEEEYHLTENEASSFIPYLVVKVGEPKDVIRKDVRAILNRMCLVYPASKMFPFIMEGTKSKNSKQRAECLEELGCLVESYGMNVCQPTPGKALKEIAVHIGDRDNAVRNAALNTIVTVYNVHGDQVFKLIGNLSEKDMSMLEERIKRSAKRPSAAPIKQVEEKPQRAQNISSNANMLRKGPAEDMSSKLNQARSMSGHPEAAQMVRREFQLDLDEIENDNGTVRCEMPELVQHKLDDIFEPVLIPEPKIRAVSPHFDDMHSNTASTINFIISQVASGDINTSIQALTQIDEVLRQEDKAEAMSGHIDQFLIATFMQLRLIYNTHMADEKLEKDEIIKLYSCIIGNMISLFQIESLAREASTGVLKDLMHGLITLMLDSRIEDLEEGQQVIRSVNLLVVKVLEKSDQTNILSALLVLLQDSLLATASSPKFSELVMKCLWRMVRLLPDTINSINLDRILLDIHIFMKVFPKEKLKQCKSEFPIRTLKTLLHTLCKLKGPKILDHLTMIDNKNESELEAHLCRMMKHSMDQTGSKSDKETEKGASRIDEKSSKAKVNDFLAEIFKKIGSKENTKEGLAELYEYKKKYSDADIEPFLKMEREGKGRISTSTGISPQMEVTCVPTPTSTVSSIGNTNGEEVGPSVYLERLKILRQRCGLDNTKQDDRPPLTSLLSKPAVPTVASSTDMLHSKLSQLRESREQHQHSDLDSNQTHSSGTVTSSSSTANIDDLKKRLERIKSSRK

SEQ ID NO: 1025903 - protein, 1623 aa, Homo sapiens
RRNVKWSSPAGGIDAIFLTTTLQNISEDVLAVMDNKNPTIKQQTSLFIARSFRHCTASTLPKSLLKPFCAALLKHINDSAPEVRDAAFEALGTALKVVGEKALNPFLADVDTLKLDKIKECSEKVELIHGKKAGLAADKKEFKPLPGRTAASGAAGDKDTKDISAPKPGPLKKAPAAKAGGPPKKGKPAAPGGAGNTGTKNKKGLETKEIVEPELSIEVCEEKASAVLPPTCIQLLDSSNWKERLACMEEFQKAVELMDRTEMPCQALVRMLAKKPGWKETNFQVMQMKLHIVALIAQKGNFSKTSAQVVLDGLVDKIGDVKCGNNAKEAMTAIAEACMLPWTAEQVVSMAFSQKNPKNQSETLNWLSNAIKEFGFSGLNVKAFISNVKTALAATNPAVRTAAITLLGVMYLYVGPSLRMFFEDEKPALLSQIDAEFEKMQGQSPPAPTRGISKHSTSGTDEGEDGDEPDDGSNDVVDLLPRTEISDKITSELVSKIGDKNWKIRKEGLDEVAGIINDAKFIQPNIGELPTALKGRLNDSNKILVQQTLNILQQLAVAMGPNIKQHVKNLGIPIITVLGDSKNNVRAAALATVNAWAEQTGMKEWLEGEDLSEELKKENPFLRQELLGWLAEKLPTLRSTPTDLILCVPHLYSCLEDRNGDVRKKAQDALPFFMMHLGYEKMAKATGKLKPTSKDQVLAMLEKAKVNMPAKPAPPTKATSKPMGGSAPAKFQPASAPAEDCISSSTEPKPDPKKAKAPGLSSKAKSAQGKKMPSKTSLKEDEDKSGPIFIVVPNGKEQRMKDEKGLKVLKWNFTTPRDEYIEQLKTQMSSCVAKWLQDEMFHSDFQHHNKALAVMVDHLESEKEGVIGCLDLILKWLTLRFFDTNTSVLMKALEYLKLLFTLLSEEEYHLTENEASSFIPYLVVKVGEPKDVIRKDVRAILNRMCLVYPASKMFPFIMEGTKSKNSKQRAECLEELGCLVESYGMNVCQPTPGKALKEIAVHIGDRDNAVRNAALNTIVTVYNVHGDQVFKLIGNLSEKDMSMLEERIKRSAKRPSAAPIKQVEEKPQRAQNISSNANMLRKGPAEDMSSKLNQARSMSGHPEAAQMVRREFQLDLDEIENDNGTVRCEMPELVQHKLDDIFEPVLIPEPKIRAVSPHFDDMHSNTASTINFIISQVASGDINTSIQALTQIDEVLRQEDKAEAMSGHIDQFLIATFMQLRLIYNTHMADEKLEKDEIIKLYSCIIGNMISLFQIESLAREASTGVLKDLMHGLITLMLDSRIEDLEEGQQVIRSVNLLVVKVLEKSDQTNILSALLVLLQDSLLATASSPKFSELVMKCLWRMVRLLPDTINSINLDRILLDIHIFMKVFPKEKLKQCKSEFPIRTLKTLLHTLCKLKGPKILDHLTMIDNKNESELEAHLCRMMKHSMDQTGSKSDKETEKGASRIDEKSSKAKVNDFLAEIFKKIGSKENTKEGLAELYEYKKKYSDADIEPFLKNSSQFFQSYVERGLRVIEMEREGKGRISTSTGISPQMEVTCVPTPTSTVSSIGNTNGEEVGPSVYLERLKILRQRCGLDNTKQDDRPPLTSLLSKPAVPTVASSTDMLHSKLSQLRESREQHQLT

SEQ ID NO: 1025904 - protein, 1660 aa, Homo sapiens; identical to SEQ ID NO: 1025894

SEQ ID NO: 1025905 - protein, 1678 aa, Homo sapiens
RRNVKWSSPAGGIDAIFLTTTLQNISEDVLAVMDNKNPTIKQQTSLFIARSFRHCTASTLPKSLLKPFCAALLKHINDSAPEVRDAAFEALGTALKVVGEKALNPFLADVDTLKLDKIKECSEKVELIHGKKAGLAADKKEFKPLPGRTAASGAAGDKDTKDISAPKPGPLKKAPAAKAGGPPKKGKPAAPGGAGNTGTKNKKGLETKEIVEPELSIEVCEEKASAVLPPTCIQLLDSSNWKERLACMEEFQKAVELMDRTEMPCQALVRMLAKKPGWKETNFQVMQMKLHIVALIAQKGNFSKTSAQVVLDGLVDKIGDVKCGNNAKEAMTAIAEACMLPWTAEQVVSMAFSQKNPKNQSETLNWLSNAIKEFGFSGLNVKAFISNVKTALAATNPAVRTAAITLLGVMYLYVGPSLRMFFEDEKPALLSQIDAEFEKMQGQSPPAPTRGISKHSTSGTDEGEDGDEPDDGSNDVVDLLPRTEISDKITSELVSKIGDKNWKIRKEGLDEVAGIINDAKFIQPNIGELPTALKGRLNDSNKILVQQTLNILQQLAVAMGPNIKQHVKNLGIPIITVLGDSKNNVRAAALATVNAWAEQTGMKEWLEGEDLSEELKKENPFLRQELLGWLAEKLPTLRSTPTDLILCVPHLYSCLEDRNGDVRKKAQDALPFFMMHLGYEKMAKATGKLKPTSKDQVLAMLEKAKVNMPAKPAPPTKATSKPMGGSAPAKFQPASAPAEDCISSSTEPKPDPKKAKAPGLSSKAKSAQGKKMPSKTSLKEDEDKSGPIFIVVPNGKEQRMKDEKGLKVLKWNFTTPRDEYIEQLKTQMSSCVAKWLQDEMFHSDFQHHNKALAVMVDHLESEKEGVIGCLDLILKWLTLRFFDTNTSVLMKALEYLKLLFTLLSEEEYHLTENEASSFIPYLVVKVGEPKDVIRKDVRAILNRMCLVYPASKMFPFIMEGTKSKNSKQRAECLEELGCLVESYGMNVCQPTPGKALKEIAVHIGDRDNAVRNAALNTIVTVYNVHGDQVFKLIGNLSEKDMSMLEERIKRSAKRPSAAPIKQVEEKPQRAQNISSNANMLRKGPAEDMSSKLNQARSMSGHPEAAQMVRREFQLDLDEIENDNGTVRCEMPELVQHKLDDIFEPVLIPEPKIRAVSPHFDDMHSNTASTINFIISQVASGDINTSIQALTQIDEVLRQEDKAEAMSGHIDQFLIATFMQLRLIYNTHMADEKLEKDEIIKLYSCIIGNMISLFQIESLAREASTGVLKDLMHGLITLMLDSRIEDLEEGQQVIRSVNLLVVKVLEKSDQTNILSALLVLLQDSLLATASSPKFSELVMKCLWRMVRLLPDTINSINLDRILLDIHIFMKVFPKEKLKQCKSEFPIRTLKTLLHTLCKLKGPKILDHLTMIDNKNESELEAHLCRMMKHSMDQTGSKSDKETEKGASRIDEKSSKAKVNDFLAEIFKKIGSKENTKEGLAELYEYKKKYSDADIEPFLKNSSQFFQSYVERGLRVIEMEREGKGRISTSTGISPQMEVTCVPTPTSTVSSIGNTNGEEVGPSVYLERLKILRQRCGLDNTKVPVLFFCAVQGGKSTSRSEARLGQQRGWLSLAVRFWKLILDLLEPGLLDNLFSFLKNQMTGVSLTPWFQTSSSKGALPTNCPQKISHAASGAPFTGLP

SEQ ID NO: 1025906 - protein, 1179 aa, Homo sapiens
RRNVKWSSPAGGIDAIFLTTTLQNISEDVLAVMDNKNPTIKQQTSLFIARSFRHCTASTLPKSLLKPFCAALLKHINDSAPEVRDAAFEALGTALKVVGEKALNPFLADVDTLKLDKIKECSEKVELIHGKKAGLAADKKEFKPLPGRTAASGAAGDKDTKDISAPKPGPLKKAPAAKAGGPPKKGKPAAPGGAGNTGTKNKKGLETKEIVEPELSIEVCEEKASAVLPPTCIQLLDSSNWKERLACMEEFQKAVELMDRTEMPCQALVRMLAKKPGWKETNFQVMQMKLHIVALIAQKGNFSKTSAQVVLDGLVDKIGDVKCGNNAKEAMTAIAEACMLPWTAEQVVSMAFSQKNPKNQSETLNWLSNAIKEFGFSGLNVKAFISNVKTALAATNPAVRTAAITLLGVMYLYVGPSLRMFFEDEKPALLSQIDAEFEKMQGQSPPAPTRGISKHSTSGTDEGEDGDEPDDGSNDVVDLLPRTEISDKITSELVSKIGDKNWKIRKEGLDEVAGIINDAKFIQPNIGELPTALKGRLNDSNKILVQQTLNILQQLAVAMGPNIKQHVKNLGIPIITVLGDSKNNVRAAALATVNAWAEQTGMKEWLEGEDLSEELKKENPFLRQELLGWLAEKLPTLRSTPTDLILCVPHLYSCLEDRNGDVRKKAQDALPFFMMHLGYEKMAKATGKLKPTSKDQVLAMLEKAKVNMPAKPAPPTKATSKPMGGSAPAKFQPASAPAEDCISSSTEPKPDPKKAKAPGLSSKAKSAQGKKMPSKTSLKEDEDKSGPIFIVVPNGKEQRMKDEKGLKVLKWNFTTPRDEYIEQLKTQMSSCVAKWLQDEMFHSDFQHHNKALAVMVDHLESEKEGVIGCLDLILKWLTLRFFDTNTSVLMKALEYLKLLFTLLSEEEYHLTENEASSFIPYLVVKVGEPKDVIRKDVRAILNRMCLVYPASKMFPFIMEGTKSKNSKQRAECLEELGCLVESYGMNVCQPTPGKALKEIAVHIGDRDNAVRNAALNTIVTVYNVHGDQVFKLIGNLSEKDMSMLEERIKRSAKRPSAAPIKQVEEKPQRAQNISSNANMLRKGPAEDMSSKLNQARSMSGHPEAAQMVRREFQLDLDEIENDNGTVRCEMPELVQHKLDDIFEPVLILNQERVFLHPLVPARIRVPPIPIPVPGGLHQS

SEQ ID NO: 1025907 - protein, 569 aa, Homo sapiens
  misc_feature (520)..(520): Xaa can be any naturally occurring amino acid
  misc_feature (548)..(548): Xaa can be any naturally occurring amino acid
  misc_feature (564)..(564): Xaa can be any naturally occurring amino acid
RRNVKWSSPAGGIDAIFLTTTLQNISEDVLAVMDNKNPTIKQQTSLFIARSFRHCTASTLPKSLLKPFCAALLKHINDSAPEVRDAAFEALGTALKVVGEKALNPFLADVDTLKLDKIKECSEKVELIHGKKAGLAADKKEFKPLPGRTAASGAAGDKDTKDISAPKPGPLKKAPAAKAGGPPKKGKPAAPGGAGNTGTKNKKGLETKEIVEPELSIEVCEEKASAVLPPTCIQLLDSSNWKERLACMEEFQKAVELMDRTEMPCQALVRMLAKKPGWKETNFQVMQMKLHIVALIAQKGNFSKTSAQVVLDGLVDKIGDVKCGNNAKEAMTAIAEACMLPWTAEQVVSMAFSQKNPKNQSETLNWLSNAIKEFGFSGLNVKAFISNVKTALAATNPAVRTAAITLLGVMYLYVGPSLRMFFEDEKPALLSQIDAEFEKMQGQSPPAPTRGISKHSTSGTDEGEDGDEPDDGSNDVVDLLPRTEISDKITSELVSKIGDKNWKIRKEGLDEVAGIINDRXKQKQKALINPSHLVRLLHYHETGFHHRXHIGLRLLGSSDPPTLXSQSTG

SEQ ID NO: 1025908 - protein, 202 aa, Homo sapiens
MVHKFTRFVNEKRREVPLFFTCGLPALHGDSRVECSKAHPPAHDTYPPTSARLVATCVWGARAPAFSLAVSPDWGTSLLQTPTLACEAELPDKNRSSSASFSNHFVSCLVLDSKLGPSGRYDSMTPESEAEAPQGFVRPLTDPPSHLGSAYPPALREDECLKLMYQELKVPAEEPANVLPMNEIEAWKAAEKKARWVLLVLI

SEQ ID NO: 1025909 - protein, 984 aa, Homo sapiens
MERRWPLGLGLVLLLCAPLPPGARAKEVTLMDTSKAQGELGWLLDPPKDGWSEQQQILNGTPLYMYQDCPMQGRRDTDHWLRSNWIYRGEEASRVHVELQFTVRDCKSFPGGAGPLGCKETFNLLYMESDQDVGIQLRRPLFQKVTTVAADQSFTIRDLASGSVKLNVERCSLGRLTRRGLYLAFHNPGACVALVSVRVFYQRCPETLNGLAQFPDTLPGPAGLVEVAGTCLPHARASPRPSGAPRMHCSPDGEWLVPVGRCHCEPGYEEGGSGEACVACPSGSYRMDMDTPHCLTCPQQSTAESEGATICTCESGHYRAPGEGPQVACTGPPSAPRNLSFSASGTQLSLRWEPPADTGGRQDVRYSVRCSQCQGTAQDGGPCQPCGVGVHFSPGARALTTPAVHVNGLEPYANYTFNVEAQNGVSGLGSSGHASTSVSISMGHAESLSGLSLRLVKKEPRQLELTWAGSRPRSPGANLTYELHVLNQDEERYQMVLEPRVLLTELQPDTTYIVRVRMLTPLGPGPFSPDHEFRTSPPVSRGLTGGEIVAVIFGLLLGAALLLGILVFRSRRAQRQRQQRHVTAPPMWIERTSCAEALCGTSRHTRTLHREPWTLPGGWSNFPSRELDPAWLMVDTVIGEGEFGEVYRGTLRLPSQDCKTVAIKTLKDTSPGGQWWNFLREATIMGQFSHPHILHLEGVVTKRKPIMIITEFMENAALDAFLREREDQLVPGQLVAMLQGIASGMNYLSNHNYVHRDLAARNILVNQNLCCKVSDFGLTRLLDDFDGTYETQGGKIPIRWTAPEAIAHRIFTTASDVWSFGIVMWEVLSFGDKPYGEMSNQEVMKSIEDGYRLPPPVDCPAPLYELMKNCWAYDRARRPHFQKLQAHLEQLLANPHSLRTIANFDPRVTLRLPSLSGSDGIPYRTVSEWLESIRMKRYILHFHSAGLDTMECVLELTAEDLTQMGITLPGHQKRILCSIQGFKD

SEQ ID NO: 1025910 - protein, 146 aa, Homo sapiens
TPTHSPAHCPGAPWKRGPPSPTCCFVLWFSPPEVKKCCRPVCLSICLVGVELIQSTDLFRALEDPPQAWQPSSCILGLPSFPGSPLPGPTRARWVEPLPHTRPSFRALPWKPALPEGPFAQFGPSWVLPPYLFSVPGPLRMRPLKA

SEQ ID NO: 1025911 - protein, 203 aa, Homo sapiens
  misc_feature (11)..(11): Xaa can be any naturally occurring amino acid
  misc_feature (29)..(29): Xaa can be any naturally occurring amino acid
  misc_feature (48)..(48): Xaa can be any naturally occurring amino acid
  misc_feature (68)..(69): Xaa can be any naturally occurring amino acid
  misc_feature (78)..(79): Xaa can be any naturally occurring amino acid
  misc_feature (93)..(93): Xaa can be any naturally occurring amino acid
MGLVSPEAAPXFIFPKAFRAPSTRNQMEXPQEHGGPLGPAAPFPTSHXSKLRPAPLVPWAPLGEPGGXXATTLLVFVXXGFSSFPWVSVNACXSLVLFSSILVLVGVELIQSTDLFRALEDPPQAWQPSSCILGLPSFPGSPLPGPTRARWVEPLPHTRPSFRALPWKPALPEGPFAQFGPSWVLPPYLFSVPGPLRMRPLKA

SEQ ID NO: 1025912 - protein, 225 aa, Homo sapiens
MRVMAPRTLILLLSGALALTETWAGSHSMRYFSTSVSWPGRGEPRFIAVGYVDDTQFVRFDSDAASPRGEPREPWVEQEGPEYWDRETQKYKRQAQADRVNLRKLRGYYNQSEDGSHTLQRMFGCDLGPDGRLLRGYNQFAYDGKDYIALNEDLRSWTAADTAAQITQRKWEAAREAEQRRAYLEGTCVEWLRRIPGEREGDAAARGTPKDTRGPTIPSLTMRPP

SEQ ID NO: 1025913 - protein, 399 aa, Homo sapiens
GGVSPDVCPALSDEPGGLTASRGRVHEASPPTFQKDALLGSKPNKPSLPSSSQNLGQTEVSKVSETVQEELTPPPQKAAPQGKSKSDPLKKKTDRAPPSPPCDITCLESFRDSMVLGWKQPDKIGGAEITGYYVNYREVIDGVPGKWREANVKAVSEEAYKISNLKENMVYQFQVAAMNMAGLGAPSAVSECFKCEEWTIAVPGPPHSLKCSEVRKDSLVLQWKPPVHSGRTPVTGYFVDLKEAKAKEDQWRGLNEAAIKNVYLKVRGLKEGVSYVFRVRAINQAGVGKPSDLAGPVVAETRPGTKEVVVNVDDDGVISLNFECDKMTPKSEFSWSKDYVSTEDSPRLEVESKGNKTKMTFKDLWEWIDFGYLLLANVTDTDGISIKLLNKIEGRIETF

SEQ ID NO: 1025914 - protein, 319 aa, Homo sapiens
SYSQGSEAIEVKAAIAPPSPPCDITCLESFRDSMVLGWKQPDKIGGAEITGYYVNYREVIDGVPGKWREANVKAVSEEAYKISNLKENMVYQFQVAAMNMAGLGAPSAVSECFKCEEWTIAVPGPPHSLKCSEVRKDSLVLQWKPPVHSGRTPVTGYFVDLKEAKAKEDQWRGLNEAAIKNVYLKVRGLKEGVSYVFRVRAINQAGVGKPSDLAGPVVAETRPGTKEVVVNVDDDGVISLNFECDKMTPKSEFSWSKDYVSTEDSPRLEVESKGNKTKMTFKDLWEWIDFGYLLLANVTDTDGISIKLLNKIEGRIETF

SEQ ID NO: 1025915 - protein, 231 aa, Homo sapiens
MVYQFQVAAMNMAGLGAPSAVSECFKCEEWTIAVPGPPHSLKCSEVRKDSLVLQWKPPVHSGRTPVTGYFVDLKEAKAKEDQWRGLNEAAIKNVYLKVRGLKEGVSYVFRVRAINQAGVGKPSDLAGPVVAETRPGTKEVVVNVDDDGVISLNFECDKMTPKSEFSWSKDYVSTEDSPRLEVESKGNKTKMTFKDLWEWIDFGYLLLANVTDTDGISIKLLNKIEGRIETF

SEQ ID NO: 1025916 - protein, 195 aa, Homo sapiens
FRNLHVDDQMAVIQYSWMGLMVFAMGWRSFTNVNSRMLYFAPDLVFNEYRMHKSRMYSQCVRMRHLSQEFGWLQITPQEFLCMKALLLFSIIPVDGLKNQKFFDELRMNYIKELDRIIACKRKNPTSCSRRFYQLTKLLDSVQPIARELHQFTFDLLIKSHMVSVDFPEMMAEIISVQVPKILSGKVKPIYFHTQ

SEQ ID NO: 1025917 - protein, 94 aa, Homo sapiens
PTPRPPTPPASTPPWGLTFSLPTICSPSFVLSSLGFTAVAFVTGSLALWAPAFLLRSRVVLGETPPCLPGDSCSSSDRCPDGAMLGGLRVAGLE

SEQ ID NO: 1025918 - protein, 528 aa, Homo sapiens
MAGSDTAPFLSQADDPDDGPVPGTPGLPGSTGNPKSEEPEVPDQEGLQRITGLSPGRSALIVAVLCYINLLNYMDRFTVAGVLPDIEQFFNIGDSSSGLIQTVFISSYMVLAPVFGYLGDRYNRKYLMCGGIAFWSLVTLGSSFIPGEHFWLLLLTRGLVGVGEASYSTIAPTLIADLFVADQRSRMLSIFYFAIPVGSGLGYIAGSKVKDMAGDWHWALRVTPGLGVVAVLLLFLVVREPPRGAVERHSDLPPLNPTSWWADLRALARNPSFVLSSLGFTAVAFVTGSLALWAPAFLLRSRVVLGETPPCLPGDSCSSSDSLIFGLITCLTGVLGVGLGVEISRRLRHSNPRADPLVCATGLLGSAPFLFLSLACARGSIVATYIFIFIGETLLSMNWAIVADILLYVVIPTRRSTAEAFQIVLSHLLGDAGSPYLIGLISDRLRRNWPPSFLSEFRALQFSLMLCAFVGALGGAAFLGTAIFIEADRRRAQLHVQGLLHEAGSTDDRIVVPQRGRSTRVPVASVLI

SEQ ID NO: 1025919 - protein, 605 aa, Homo sapiens
MAERPRGFRSRVAGHVSKACPRGPLPPWLQRDMTGFKQHGGCRGAAPGLSDSKCSGLLPRVGSSVGPERGRARPPGTMAGSDTAPFLSQADDPDDGPVPGTPGLPGSTGNPKSEEPEVPDQEGLQRITGLSPGRSALIVAVLCYINLLNYMDRFTVAGVLPDIEQFFNIGDSSSGLIQTVFISSYMVLAPVFGYLGDRYNRKYLMCGGIAFWSLVTLGSSFIPGEHFWLLLLTRGLVGVGEASYSTIAPTLIADLFVADQRSRMLSIFYFAIPVGSGLGYIAGSKVKDMAGDWHWALRVTPGLGVVAVLLLFLVVREPPRGAVERHSDLPPLNPTSWWADLRALARNPSFVLSSLGFTAVAFVTGSLALWAPAFLLRSRVVLGETPPCLPGDSCSSSDSLIFGLITCLTGVLGVGLGVEISRRLRHSNPRADPLVCATGLLGSAPFLFLSLACARGSIVATYIFIFIGETLLSMNWAIVADILLYVVIPTRRSTAEAFQIVLSHLLGDAGSPYLIGLISDRLRRNWPPSFLSEFRALQFSLMLCAFVGALGGAAFLGTAIFIEADRRRAQLHVQGLLHEAGSTDDRIVVPQRGRSTRVPVASVLI

SEQ ID NO: 1025920 - protein, 383 aa, Homo sapiens
MAGSDTAPFLSQADDPDDGPVPGTPGLPGSTGNPKSEEPEVPDQEGLQRITGLSPGRSALIVAVLCYINLLNYMDRFTVAGVLPDIEQFFNIGDSSSGLIQTVFISSYMVLAPVFGYLGDRYNRKYLMCGGIAFWSLVTLGSSFIPGEHFWLLLLTRGLVGVGEASYSTIAPTLIADLFVADQRSRMLSIFYFAIPVGSGLGYIAGSKVKDMAGDWHWALRVTPGLGVVAVLLLFLVVREPPRGAVERHSDLPPLNPTSWWADLRALARNPSFVLSSLGFTAVAFVTGSLALWAPAFLLRSRVVLGETPPCLPGDSCSSSDSLIFGLITCLTGVLGVGLGVEISRRLRHSNPRADPLVCATGLLGSAPFLFLSLACARGSIVA

SEQ ID NO: 1025921 - protein, 122 aa, Homo sapiens
LFDAPGTAGSGKVPGYSGDRPAVTMTCEPWRNAQGGFRSRVAGHVSKACPRGPLPPWLQRDMTGFKQHGGCRGAAPGLSDSKCSGLLPRVRGGLRVGSCPLQPAPVPDITCIPHVPSALCVY

SEQ ID NO: 1025922 - protein, 469 aa, Homo sapiens
MAGSDTAPFLSQADDPDDGPVPGTPGLPGSTGNPKSEEPEVPDQEGLQRITGLSPGRSALIVAVLCYINLLNYMDRFTVAGVLPDIEQFFNIGDSSSGLIQTVFISSYMVLAPVFGYLGDRYNRKYLMCGGIAFWSLVTLGSSFIPGEHFWLLLLTRGLVGVGEASYSTIAPTLIADLFVADQRSRMLSIFYFAIPVGSGLGYIAGSKVKDMAGDWHWALRVTPGLGVVAVLLLFLVVREPPRGAVERHSDLPPLNPTSWWADLRALARNPSFVLSSLGFTAVAFVTGSLALWAPAFLLRSRVVLGETPPCLPGDSCSSSDSLIFGLITCLTGVLGVGLGVEISRRLRHSNPRADPLVCATGLLGSAPFLFLSLACARGSIVATYIFIFIGETLLSMNWAIVADILLYVVIPTRRSTAEAFQIVLSHLPAHLPQLALGPPHEGPGPNPLAWPSFQRDPGPCASSQTLHG

SEQ ID NO: 1025923 - protein, 626 aa, Homo sapiens
  misc_feature (17)..(17): Xaa can be any naturally occurring amino acid
  misc_feature (24)..(24): Xaa can be any naturally occurring amino acid
ANDGVLPRWCMRPGPEXGNSAEWXSGASTPGEGWPPRGIVPSSARSCPRHHVYSARPLRAVCLLRRGGVTGPGSLLSGALCFRASSPSPGALPSPVFGPSSFLQPPPLAQADDPDDGPVPGTPGLPGSTGNPKSEEPEVPDQEGLQRITGLSPGRSALIVAVLCYINLLNYMDRFTVAGVLPDIEQFFNIGDSSSGLIQTVFISSYMVLAPVFGYLGDRYNRKYLMCGGIAFWSLVTLGSSFIPGEHFWLLLLTRGLVGVGEASYSTIAPTLIADLFVADQRSRMLSIFYFAIPVGSGLGYIAGSKVKDMAGDWHWALRVTPGLGVVAVLLLFLVVREPPRGAVERHSDLPPLNPTSWWADLRALARNPSFVLSSLGFTAVAFVTGSLALWAPAFLLRSRVVLGETPPCLPGDSCSSSDSLIFGLITCLTGVLGVGLGVEISRRLRHSNPRADPLVCATGLLGSAPFLFLSLACARGSIVATYIFIFIGETLLSMNWAIVADILLYVVIPTRRSTAEAFQIVLSHLLGDAGSPYLIGLISDRLRRNWPPSFLSEFRALQFSLMLCAFVGALGGAAFLGTAIFIEADRRRAQLHVQGLLHEAGSTDDRIVVPQRGRSTRVPVASVLI

SEQ ID NO: 1025924 - protein, 428 aa, Homo sapiens
MAGSDTAPFLSQADDPDDGPVPGTPGLPGSTGNPKSEEPEVPDQEGLQRITGLSPGRSALIVAVLCYINLLNYMDRFTVAGVLPDIEQFFNIGDSSSGLIQTVFISSYMVLAPVFGYLGDRYNRKYLMCGGIAFWSLVTLGSSFIPGEHFWLLLLTRGLVGVGEASYSTIAPTLIADLFVADQRSRMLSIFYFAIPVGSGLGYIAGSKVKDMAGDWHWALRVTPGLGVVAVLLLFLVVREPPRGAVERHSDLPPLNPTSWWADLRALARNPSFVLSSLGFTAVAFVTGSLALWAPAFLLRSRVVLGETPPCLPGDSCSSSDSLIFGLITCLTGVLGVGLGVEISRRLRHSNPRADPLVCATGLLGSAPFLFLSLACARGSIVATYIFIFIGETLLSMNWAIVADILLYVVIPTRRSTAGAAPRARCYL

SEQ ID NO: 1025925 - protein, 422 aa, Homo sapiens
LLLAPFLWHTLVLQCTSRKYLMCGGIAFWSLVTLGSSFIPGEHFWLLLLTRGLVGVGEASYSTIAPTLIADLFVADQRSRMLSIFYFAIPVGSGLGYIAGSKVKDMAGDWHWALRVTPGLGVVAVLLLFLVVREPPRGAVERHSDLPPLNPTSWWADLRALARNPSFVLSSLGFTAVAFVTGSLALWAPAFLLRSRVVLGETPPCLPGDSCSSSDSLIFGLITCLTGVLGVGLGVEISRRLRHSNPRADPLVCATGLLGSAPFLFLSLACARGSIVATYIFIFIGETLLSMNWAIVADILLYVVIPTRRSTAEAFQIVLSHLLGDAGSPYLIGLISDRLRRNWPPSFLSEFRALQFSLMLCAFVGALGGAAFLGTAIFIEADRRRAQLHVQGLLHEAGSTDDRIVVPQRGRSTRVPVASVLI

SEQ ID NO: 1025926 - protein, 132 aa, Homo sapiens [sequence omitted]

SEQ ID NO: 1025927 - protein, 72 aa, Homo sapiens
FVCLSIQLTWALPSPLRPAARSRVHRRPDCGAPAGPLHPRARGQCAHLRGCRSPTCTSATAGPGPTPRRAWA

SEQ ID NO: 1025928 - protein, 539 aa, Homo sapiens
MAGSDTAPFLSQADDPDDGPVPGTPGLPGSTGNPKSEEPEVPDQEGLQRITGLSPGRSALIVAVLCYINLLNYMDRFTVAGVLPDIEQFFNIGDSSSGLIQTVFISSYMVLAPVFGYLGDRYNRKYLMCGGIAFWSLVTLGSSFIPGEHFWLLLLTRGLVGVGEASYSTIAPTLIADLFVADQRSRMLSIFYFAIPVGSGLGYIAGSKVKDMAGDWHWALRVTPGLGVEWALIVAKLVCTEVCCKEKPEQRRMPVEMQSTPDLPPLNPTSWWADLRALARNPSFVLSSLGFTAVAFVTGSLALWAPAFLLRSRVVLGETPPCLPGDSCSSSDSLIFGLITCLTGVLGVGLGVEISRRLRHSNPRADPLVCATGLLGSAPFLFLSLACARGSIVATYIFIFIGETLLSMNWAIVADILLYVVIPTRRSTAEAFQIVLSHLLGDAGSPYLIGLISDRLRRNWPPSFLSEFRALQFSLMLCAFVGALGGAAFLGTAIFIEADRRRAQLHVQGLLHEAGSTDDRIVVPQRGRSTRVPVASVLI

SEQ ID NO: 1025929 - protein, 476 aa, Homo sapiens
MAGSDTAPFLSQADDPDDGPVPGTPGLPGSTGNPKSEEPEVPDQEGLQRITGLSPGRSALIVAVLCYINLLNYMDRFTVAGVLPDIEQFFNIGDSSSGLIQTVFISSYMVLAPVFGYLGDRYNRKYLMCGGIAFWSLVTLGSSFIPGEHFWLLLLTRGLVGVGEASYSTIAPTLIADLFVADQRSRMLSIFYFAIPVGSGLGYIAGSKVKDMAGDWHWALRVTPGLGVVAVLLLFLVVREPPRGAVERHSDLPPLNPTSWWADLRALARNLIFGLITCLTGVLGVGLGVEISRRLRHSNPRADPLVCATGLLGSAPFLFLSLACARGSIVATYIFIFIGETLLSMNWAIVADILLYVVIPTRRSTAEAFQIVLSHLLGDAGSPYLIGLISDRLRRNWPPSFLSEFRALQFSLMLCAFVGALGGAAFLGTAIFIEADRRRAQLHVQGLLHEAGSTDDRIVVPQRGRSTRVPVASVLI

SEQ ID NO: 1025930 - protein, 455 aa, Homo sapiens
MDRFTVAGVLPDIEQFFNIGDSSSGLIQTVFISSYMVLAPVFGYLGDRYNRKYLMCGGIAFWSLVTLGSSFIPGEHFWLLLLTRGLVGVGEASYSTIAPTLIADLFVADQRSRMLSIFYFAIPVGSGLGYIAGSKVKDMAGDWHWALRVTPGLGVVAVLLLFLVVREPPRGAVERHSDLPPLNPTSWWADLRALARNPSFVLSSLGFTAVAFVTGSLALWAPAFLLRSRVVLGETPPCLPGDSCSSSDSLIFGLITCLTGVLGVGLGVEISRRLRHSNPRADPLVCATGLLGSAPFLFLSLACARGSIVATYIFIFIGETLLSMNWAIVADILLYVVIPTRRSTAEAFQIVLSHLLGDAGSPYLIGLISDRLRRNWPPSFLSEFRALQFSLMLCAFVGALGGAAFLGTAIFIEADRRRAQLHVQGLLHEAGSTDDRIVVPQRGRSTRVPVASVLI

SEQ ID NO: 1025931 - protein, 565 aa, Homo sapiens
SIALLKLHPSIYPSIHPSFIESKKPANQTLGGRQDGSRELGLLLGFESQADDPDDGPVPGTPGLPGSTGNPKSEEPEVPDQEGLQRITGLSPGRSALIVAVLCYINLLNYMDRFTVAGVLPDIEQFFNIGDSSSGLIQTVFISSYMVLAPVFGYLGDRYNRKYLMCGGIAFWSLVTLGSSFIPGEHFWLLLLTRGLVGVGEASYSTIAPTLIADLFVADQRSRMLSIFYFAIPVGSGLGYIAGSKVKDMAGDWHWALRVTPGLGVVAVLLLFLVVREPPRGAVERHSDLPPLNPTSWWADLRALARNPSFVLSSLGFTAVAFVTGSLALWAPAFLLRSRVVLGETPPCLPGDSCSSSDSLIFGLITCLTGVLGVGLGVEISRRLRHSNPRADPLVCATGLLGSAPFLFLSLACARGSIVATYIFIFIGETLLSMNWAIVADILLYVVIPTRRSTAEAFQIVLSHLLGDAGSPYLIGLISDRLRRNWPPSFLSEFRALQFSLMLCAFVGALGGAAFLGTAIFIEADRRRAQLHVQGLLHEAGSTDDRIVVPQRGRSTRVPVASVLI

SEQ ID NO: 1025932 - protein, 311 aa, Homo sapiens
MAGSDTAPFLSQADDPDDGPVPGTPGLPGSTGNPKSEEPEVPDQEGLQRITGLSPGRSALIVAVLCYINLLNYMDRFTVAGVLPDIEQFFNIGDSSSGLIQTVFISSYMVLAPVFGYLGDRYNRKYLMCGGIAFWSLVTLGSSFIPGEHFWLLLLTRGLVGVGEASYSTIAPTLIADLFVADQRSRMLSIFYFAIPVGSGLGYIAGSKVKDMAGDWHWALSGLISDRLRRNWPPSFLSEFRALQFSLMLCAFVGALGGAAFLGTAIFIEADRRRAQLHVQGLLHEAGSTDDRIVVPQRGRSTRVPVASVLI

SEQ ID NO: 1025933 - protein, 361 aa, Homo sapiens
  misc_feature (355)..(355): Xaa can be any naturally occurring amino acid
MAGSDTAPFLSQADDPDDGPVPGTPGLPGSTGNPKSEEPEVPDQEGLQRITGLSPGRSALIVAVLCYINLLNYMDRFTVAGVLPDIEQFFNIGDSSSGLIQTVFISSYMVLAPVFGYLGDRYNRKYLMCGGIAFWSLVTLGSSFIPGEHFWLLLLTRGLVGVGEASYSTIAPTLIADLFVADQRSRMLSIFYFAIPVGSGLGYIAGSKVKDMAGDWHWALRVTPGLGVVAVLLLFLVVREPPRGAVERHSDLPPLNPTSWWADLRALARNPSFVLSSLGFTAVAFVTGSLALWAPAFLLRSRVVLGETPPCLPGDSCSSSDSLIFGLITCLTGVLGVGLGVEISRRLSAAATLQXRTEMLE

SEQ ID NO: 1025934 - protein, 376 aa, Homo sapiens
MAGSDTAPFLSQADDPDDGPVPGTPGLPGSTGNPKSEEPEVPDQEGLQRITGLSPGRSALIVAVLCYINLLNYMDRFTVAGVLPDIEQFFNIGDSSSGLIQTVFISSYMVLAPVFGYLGDRYNRKYLMCGGIAFWSLVTLGSSFIPGEHFWLLLLTRGLVGVGEASYSTIAPTLIADLFVADQRSRMLSIFYFAIPVGSGLGYIAGSKVKDMAGDWHWALRVTPGLGVVAVLLLFLVVREPPRGAVERHSDLPPLNPTSWWADLRALARNLIFGLITCLTGVLGVGLGVEISRRLRHSNPRADPLVCATGLLGSAPFLFLSLACARGSIVATYIFIFIGETLLSMNWAIVADILLYVVIPTRRSTAGAAPRARCYL

SEQ ID NO: 1025935 - protein, 305 aa, Homo sapiens
LASVEVTVQSVRLLLSVVRSAVSVSHSDLPPLNPTSWWADLRALARNPSFVLSSLGFTAVAFVTGSLALWAPAFLLRSRVVLGETPPCLPGDSCSSSDSLIFGLITCLTGVLGVGLGVEISRRLRHSNPRADPLVCATGLLGSAPFLFLSLACARGSIVATYIFIFIGETLLSMNWAIVADILLYVVIPTRRSTAEAFQIVLSHLLGDAGSPYLIGLISDRLRRNWPPSFLSEFRALQFSLMLCAFVGALGGAAFLGTAIFIEADRRRAQLHVQGLLHEAGSTDDRIVVPQRGRSTRVPVASVLI

SEQ ID NO: 1025936 - protein, 133 aa, Homo sapiens
MGSSGEEVGVQEGDPSPQGQPQGLGAICNGIKFVARHQKNDLVFLWVASDLAPRLHPRAPEDCGSFLRALGESLPFWAGRLRWGTALLRVSWLSVTRESHTHALPGACHLASQGLAEGWGLELPLSYPQTCLL

SEQ ID NO: 1025937 - protein, 528 aa, Homo sapiens; identical to SEQ ID NO: 1025918

SEQ ID NO: 1025938 - protein, 342 aa, Homo sapiens [sequence omitted]

SEQ ID NO: 1025939 - protein, 376 aa, Homo sapiens; identical to SEQ ID NO: 1025934

SEQ ID NO: 1025940 - protein, 122 aa, Homo sapiens; identical to SEQ ID NO: 1025921

SEQ ID NO: 1025941 - protein, 198 aa, Homo sapiens
  misc_feature (137)..(137): Xaa can be any naturally occurring amino acid
  misc_feature (146)..(146): Xaa can be any naturally occurring amino acid
  misc_feature (163)..(163): Xaa can be any naturally occurring amino acid
  misc_feature (195)..(195): Xaa can be any naturally occurring amino acid
IYNGFTSSATGTLVCELAFGEWSVLYDDVIDTVRNTSECGIVEFYAPWCGHCQRLTPEWKKAATALKDVVKVGAVDADKHHSPREGQNGVQGFPTIKILGSNKNRTRRLPRWQNMGEAIVDAALVLCATREGSAWGXEGEDKVLEXKEEVISSSKKDVIELTXDSFDKNVLDSEDVWMVEFYATWCGHCKNLEPXWAA

SEQ ID NO: 1025942 - protein, 70 aa, Homo sapiens
RKDLGMDDLGIYSCDVTDTDGIASSYLIDEEELKRLLALSHEHKFPTVPVKSELAVEILEKAQVRFLDAG

SEQ ID NO: 1025943 - protein, 58 aa, Homo sapiens
LDKANTTTASLPPHLHPNRHINAPHSQTPLTPPLRYRVSRTVTCYGKDEVIEYLVPYT

SEQ ID NO: 1025944 - protein, 90 aa, Homo sapiens
LDKANTTTASLPPHLHPNRHINAPHSQTPLTPPPLAETNHDTHHHHHHGDPNPNTHRHTDPNNDTHQHHHHGDPNPNTHRHTDPKIDTHH

SEQ ID NO: 1025945 - protein, 150 aa, Homo sapiens
TKNRIYTAVSAIGVWYVLYIAYRFLANGRWLRGAMIAIVFVILAYFVVLNIIYYFTNTVVKWDISPKIEKVLGGPQLEEEKAAVHEVIAPANGLYQRQHVMLGEVTVNATQQDNITQLATAFDATRADEDKIMAILVNRHNGNYFTARSD

SEQ ID NO: 1025946 - protein, 358 aa, Homo sapiens [sequence omitted]

SEQ ID NO: 1025947 - protein, 395 aa, Homo sapiens
MLLKTVLLLGHVAQVLMLDNGLLQTPPMGWLAWERFRCNINCDEDPKNCISEQLFMEMADRMAQDGWRDMGYTYLNIDDCWIGGRDASGRLMPDPKRFPHGIPFLADYVHSLGLKLGIYADMGNFTCMGYPGTTLDKVVQDAQTFAEWKVDMLKLDGCFSTPEEAAQGYPKMAAGLNATGRPIAFSCSWPAYEGGLPPRVNYSLQADICNLWRNYDDIQDSWRSVLSILNWFVEHQDILQPVAGPGHWNDPDMLLIGNFGLSLEQSRAQMALWTVLAAPLLMSTDLRTISAQNMDILQNPLMIKINQDPLGIQGRRIHKEKSLIEVYMRPLSNKASALVFFSCRTDMPYRYHSSLGQLNFTGSVIYEAQDVYSGDIISGLRDETNFTVIINPSGE

SEQ ID NO: 1025948 - protein, 186 aa, Homo sapiens
TGKKPFKCKECGKGLSSDTALIQHQRIHTGEKPYECKECGKAFSSSSVFLQHQRFHTGEKLYECNECWKTFSCSSSFTVHQRMHTGEKPYECKECGKRLSSITALTQHQRIHTGEKPFECKECGKAFNQKITLISAPASFTLAEKPYGVVKVLWLKPFSWCGKISSGFRNYTLRKTPVPSIGVFLS

SEQ ID NO: 1025949 - protein, 68 aa, Homo sapiens
PTFLNGCGYHVLSRGCRWAVGLDLAAAMDSSSKYGNFERYHQETKVHQKHPENYQVYENGSGSKICPS

SEQ ID NO: 1025950 - protein, 117 aa, Homo sapiens
MAVATMFSRAGVAGLSAWTLQPQWIQVRNMATLKDITRRLKSIKNIQKITKSMKMVAAAKYARAERELKPARIYGLGSLALYEKADIKGPEDKKKHLLIGVSSDRGLGGAIQYPPVC

SEQ ID NO: 1025951 - protein, 54 aa, Homo sapiens
MAVATMFSRAGVAGLSAWTLQPQWIQVIGNRKGPRTRNCRKGKDQILEHCWDLQ

SEQ ID NO: 1025952 - protein, 99 aa, Homo sapiens
LLLFYHCGKLPGNLVVELLENRSYLPQPSCGIPKPKGGKQVCADPSESWVQEYVYDPGTELSCSETGSLQGRSPEPGCFSMSRISSILRTPLRSSCLFS

SEQ ID NO: 1025953 - protein, 102 aa, Homo sapiens
MALLKANKDLISAGLKEFSVLLNQQVFNDPLVSEEDMVTVVEDWMNFYINYYRQQVTGEPQERDKALQELRQELNTLANPFLAKYRDFLKSHELPSHPPPSS

SEQ ID NO: 1025954 - protein, 102 aa, Homo sapiens; identical to SEQ ID NO: 1025953

SEQ ID NO: 1025955 - protein, 127 aa, Homo sapiens
  misc_feature (27)..(27): Xaa can be any naturally occurring amino acid
MVELMETTRDTGYNAEERECESWCCGXILVFPNPIADHILPCQLPLRNPQVFNDPLVSEEDMVTVVEDWMNFYINYYRQQVTGEPQERDKALQELRQELNTLANPFLAKYRDFLKSHELPSHPPPSS

SEQ ID NO: 1025956 - protein, 135 aa, Homo sapiens
  misc_feature (4)..(4): Xaa can be any naturally occurring amino acid
MTPXPTSIAWHREIHAPSRVWVRHIQPVRPEGRWLFLRPIRISFPQDLKEFSVLLNQQVFNDPLVSEEDMVTVVEDWMNFYINYYRQQVTGEPQERDKALQELRQELNTLANPFLAKYRDFLKSHELPSHPPPSS

SEQ ID NO: 1025957 - protein, 102 aa, Homo sapiens; identical to SEQ ID NO: 1025953

SEQ ID NO: 1025958 - protein, 102 aa, Homo sapiens; identical to SEQ ID NO: 1025953

SEQ ID NO: 1025959 - protein, 117 aa, Homo sapiens
GRQANNTVRMAKGDPKKPKGKMSAYAFFVQTCREEHKKKNPEVPVNFAEFSKKCSERWKTMSGKEKSKFDEMAKADKVRYDREMKDYGPAKGGKKKKDPNAPKRPPSGFFLFCSEFR

SEQ ID NO: 1025960 - protein, 527 aa, Homo sapiens
MENQEKASIAGHMFDVVVIGGGISGLSAAKLLTEYGVSVLVLEARDRVGGRTYTIRNEHVDYVDVGGAYVGPTQNRILRLSKELGIETYKVNVSERLVQYVKGKTYPFRGAFPPVWNPIAYLDYNNLWRTIDNMGKEIPTDAPWEAQHADKWDKMTMKELIDKICWTKTARRFAYLFVNINVTSEPHEVSALWFLWYVKQCGGTTRIFSVTNGGQERKFVGGSGQVSERIMDLLGDQVKLNHPVTHVDQSSDNIIIETLNHEHYECKYVINAIPPTLTAKIHFRPELPAERNQLIQRLPMGAVIKCMMYYKEAFWKKKDYCGCMIIEDEDAPISITLDDTKPDGSLPAIMGFILARKADRLAKLHKEIRKKKICELYAKVLGSQEALHPVHYEEKNWCEEQYSGGCYTAYFPPGIMTQYGRVIRQPVGRIFFAGTETATKWSGYMEGAVEAGERAAREVLNGLGKVTEKDIWVQEPESKDVPAVEITHTFWERNLPSVSGLLKIIGFSTSVTALGFVLYKYKLLPRS

SEQ ID NO: 1025961 - protein, 527 aa, Homo sapiens; identical to SEQ ID NO: 1025960

SEQ ID NO: 1025962 - protein, 246 aa, Homo sapiens
NSGGRRRTTSCATSLPSIANAFHQWIQETRTYLLDGSCMVEESGTLRDPSLEATKSQCTMEIRAMMKSVSTKRSTVPGGRHGGGPHPGLQVHGAQLRGPLPSHVATYAWNTAWCRCLLCQHNPGCSRSRPGTQHGVTEEARQMNSDDVLDTLHKDKSGRLDPSGVQILPVLPWGYELPYGGDTGEADPEFEAILDTVDPNRDGHVSLQEYMAFMISRETENAKSSEEIESAFRALSSEGKPYVTKE

SEQ ID NO: 1025963 - protein, 100 aa, Homo sapiens
  misc_feature (84)..(84): Xaa can be any naturally occurring amino acid
  misc_feature (88)..(88): Xaa can be any naturally occurring amino acid
  misc_feature (94)..(96): Xaa can be any naturally occurring amino acid
MANRGPAYGLSREVQQKIEKQYDADLEQILIQWITTQCRKDVGRPQPGRENFQNWLMDGTVLCELINALYPRRVQAPSKEEPGXDQGXQAEGAXXXGPGR

SEQ ID NO: 1025964 - protein, 250 aa, Homo sapiens
LACDSVRSSASALIVTLHRDCTWHVLLDVLPGDLTFVLKLGMCLPFMVPLLDECIASSFDRVSCIPFAVTRREMLKADFEAHLGSCSADNSPETLVQTNEQRMTLVVTSSSSIAAWYASMCAQVPEVEEDPGLHHGLQAEWSRSLSFLQAAERYGINTTDIFQTVDLWEGKNMACVQRTLMNLGGLAVARDDGLFSGDPNWFPKKSKENPRNFSDNQLQEGKNVIGLQMGTNRGASQAGMTGYGMPRQIL

SEQ ID NO: 1025965 - protein, 249 aa, Homo sapiens
LALALSQSCSSSPLERSPQPPPPIGMANRGPAYGLSREVQQKIEKQYDADLEQILIQWITTQCRKDVGRPQPGRENFQNWLMDGTVLCELINALYPRRVQAPSKRQIQASTMAFKQNGADLSVSCKQLSAMAFTNPLDHSSQNLWNPHRHREQRNHCPCVHAGTAHIDSMGLAWKDAPEIDWGSSTLWGTSPIFGFPSKAHITKAESLTRNFSDNQLQEGKNVIGLQMGTNRGASQAGMTGYGMPRQIL

SEQ ID NO: 1025966 - protein, 202 aa, Homo sapiens
MANRGPAYGLSREVQQKIEKQYDADLEQILIQWITTQCRKDVGRPQPGRENFQNWLMDGTVLCELINALYPRRVQAPSKRQIQASTMAFKPEWSRSLSFLQAAERYGINTTDIFQTVDLWEGKNMACVQRTLMNLGGLAVARDDGLFSGDPNWFPKKSKENPRNFSDNQLQEGKNVIGLQMGTNRGASQAGMTGYGMPRQIL

SEQ ID NO: 1025967 - protein, 202 aa, Homo sapiens; identical to SEQ ID NO: 1025966

SEQ ID NO: 1025968 - protein, 152 aa, Homo sapiens
RVGGLRVCFGDRKGIIMEHLEGVINKPEAEMSPQELQLHYFKMHDYDGNNLLDGLELSTAITHVHKEEGSEQAPLMSEDELINIIDGVLRDDDNNNDGYIDYAEFANITAVDVIWPSPGLYTNVTRDNVIEHFSYMQINSFQLLLQHFGKNL

SEQ ID NO: 1025969 - protein, 338 aa, Homo sapiens
MAGAGPAPGLPGAGGPVVPGPGAGIPGKSGEERLKEMEAEMALFEQEVLGAPVPGIPTAVPAVPTVPTVPTVEAMQVPAAPVIRPIIATNTYQQVQQTLEARSKLLQPRVVPPMVGGPPFVGPVGFGPGDRSHLDSPEAREAMFLRRAAAGRPPYGPTAPSPGPRGPPLPGPPGPPMMLPPMARAPGPPLGSMAALRPPLEEPAAPRELGLGLGLGLKEKEEAVVAAAAGLEEASAAVAVGGRRCPSWPCSHWGQFLPLALAIAIARSLSPRALSRWEVGPAGLLRHTLLHSVNIRVPWCSHRVPETRLGDEKPMRPLGVLQFGFLWMGPPGVPHLGG

SEQ ID NO: 1025970 - protein, 222 aa, Homo sapiens
MAGAGPAPGLPGAGGPVVPGPGAGIPGKSGEERLKEMEAEMALFEQEVLGAPVPGIPTAVPAVPTVPTVPTVEASMAALRPPLEEPAAPRELGLGLGLGLKEKEEAVVAAAAGLEEASAAVAVGGRRCPSWPCSHWGQFLPLALAIAICLGALSPRALSRWEVGPAGLLRHTLLHSVNIRVPWCSHRVPETRLGDEKPMRPLGVLQFGFLWMGPPGVPHLGG

SEQ ID NO: 1025971 - protein, 192 aa, Homo sapiens
MAGAGPAPGLPGAGGPVVPGPGAGIPGKSGEERLKEMEAEMALFEQEVLGAPVPGIPTAVPAVPTVPTVPTVEAMQVPAAPVIRPIIATNTYQQVQQTLEARSKLLQPRVVPPMVGGPPFVGPVGFGPGDRSHLDSPEAREAMFLRRAAVAPRGPYPASAFVPHVLQRADSVSPLQRRSSVAGPTGWGGPCV

SEQ ID NO: 1025972 - protein, 227 aa, Homo sapiens
  misc_feature (12)..(12): Xaa can be any naturally occurring amino acid
  misc_feature (21)..(21): Xaa can be any naturally occurring amino acid
  misc_feature (31)..(31): Xaa can be any naturally occurring amino acid
  misc_feature (40)..(40): Xaa can be any naturally occurring amino acid
  misc_feature (43)..(43): Xaa can be any naturally occurring amino acid
  misc_feature (46)..(46): Xaa can be any naturally occurring amino acid
  misc_feature (54)..(54): Xaa can be any naturally occurring amino acid
  misc_feature (56)..(56): Xaa can be any naturally occurring amino acid
  misc_feature (60)..(60): Xaa can be any naturally occurring amino acid
  misc_feature (63)..(63): Xaa can be any naturally occurring amino acid
  misc_feature (65)..(66): Xaa can be any naturally occurring amino acid
  misc_feature (68)..(68): Xaa can be any naturally occurring amino acid
  misc_feature (72)..(72): Xaa can be any naturally occurring amino acid
  misc_feature (77)..(77): Xaa can be any naturally occurring amino acid
  misc_feature (83)..(84): Xaa can be any naturally occurring amino acid
  misc_feature (86)..(89): Xaa can be any naturally occurring amino acid
  misc_feature (91)..(92): Xaa can be any naturally occurring amino acid
  misc_feature (98)..(99): Xaa can be any naturally occurring amino acid
  misc_feature (101)..(101): Xaa can be any naturally occurring amino acid
  misc_feature (103)..(108): Xaa can be any naturally occurring amino acid
  misc_feature (110)..(110): Xaa can be any naturally occurring amino acid
  misc_feature (114)..(114): Xaa can be any naturally occurring amino acid
  misc_feature (116)..(116): Xaa can be any naturally occurring amino acid
  misc_feature (120)..(123): Xaa can be any naturally occurring amino acid
  misc_feature (125)..(126): Xaa can be any naturally occurring amino acid
  misc_feature (128)..(130): Xaa can be any naturally occurring amino acid
  misc_feature (132)..(134): Xaa can be any naturally occurring amino acid
  misc_feature (136)..(138): Xaa can be any naturally occurring amino acid
  misc_feature (140)..(143): Xaa can be any naturally occurring amino acid
  misc_feature (145)..(145): Xaa can be any naturally occurring amino acid
  misc_feature (147)..(147): Xaa can be any naturally occurring amino acid
  misc_feature (149)..(151): Xaa can be any naturally occurring amino acid
  misc_feature (153)..(156): Xaa can be any naturally occurring amino acid
  misc_feature (159)..(159): Xaa can be any naturally occurring amino acid
  misc_feature (167)..(179): Xaa can be any naturally occurring amino acid
  misc_feature (181)..(187): Xaa can be any naturally occurring amino acid
  misc_feature (189)..(191): Xaa can be any naturally occurring amino acid
  misc_feature (194)..(194): Xaa can be any naturally occurring amino acid
PVFLSRLCDVLXLGWFFSGAXLCLLAGLAFXAFVFCRCGXVGXVRXPSLGACAXVXRGCXFLXVXXVXGGWXLFLWXGLPALXXPXXXXPXXPSFFLXXPXPXXXXXXFXFPPXSXSPPXXXXLXXLXXXLXXXFXXXPXXXXPXPXPXXXGXXXXSLXWAVWGVGXXXXXXXXXXXXXPXXXXXXXVXXXRRXRLTAGPWRRAGRASEAAWRTCCGCRRSPTCQSG

SEQ ID NO: 1025973 - protein, 133 aa, Homo sapiens
YHTIFHTAHVRCQLTLEKKDSAQGTEDAPDNSSLELLADTSGQAENKRLKRGSPRIEEMRALRSARAPSPSEAAPRRPEATAAPLTPRGREHREAHGRALAPGRASLGSRLEDVLWLQEVSNLSEWLSPSPGP

SEQ ID NO: 1025974 - protein, 446 aa, Homo sapiens
DALICTDDFIAKVVQRCMSIPVTMRAIRRKAETIQADTPALSLIAETVEDMVKKNLPPASSPGYGMTTGNNPMSGTTTPTNTFPGGPITTLFNMSMSIKDRHESVGHGEDFSKVSQNPILTSLLQITGNGGSTIGSSPTPPHHTPPPVSSMAGNTKNHPMLMNLLKDNPAQDFSTLYGSSPLERQNSSSGSPRMEICSGSNKTKKKKSSRLPPEKPKHQTEDDFQRELFSMDVDSQNPIFDVNMTADTLDTPHITPAPSQCSTPPTTYPQPVPHPQPSIQRMVRLSSSDSIGPDVTDILSDIAEEASKLPSTSDDGPAMGTPLRDSSSSGHSQSTLYDSDVFQTNNNENPYTDPADLIADAAGSPSSDSPTKSFFLMHGVDFNPDLLNSQSQSGLEKEYFDEKQQSGDNDDFHRICLPRPLILWGCQCCQGTPGTPVQGNTKRKVI

SEQ ID NO: 1025975 - protein, 440 aa, Homo sapiens
SRGSRAPSGCILPGCASGSRWSRKAETIQADTPALSLIAETVEDMVKKNLPPASSPGYGMTTGNNPMSGTTTPTNTFPGGPITTLFNMSMSIKDRHESVGHGEDFSKVSQNPILTSLLQITGNGGSTIGSSPTPPHHTPPPVSSMAGNTKNHPMLMNLLKDNPAQDFSTLYGSSPLERQNSSSGSPRMEICSGSNKTKKKKSSRLPPEKPKHQTEDDFQRELFSMDVDSQNPIFDVNMTADTLDTPHITPAPSQCSTPPTTYPQPVPHPQPSIQRMVRLSSSDSIGPDVTDILSDIAEEASKLPSTSDDGPAMGTPLRDSSSSGHSQSTLYDSDVFQTNNNENPYTDPADLIADAAGSPSSDSPTKSFFLMHGVDFNPDLLNSQSQSGLEKEYFDEKQQSGDNDDFHRICLPRPLILWGCQCCQGTPGTPVQGNTKRKVI

SEQ ID NO: 1025976 - protein, 364 aa, Homo sapiens
VAARAAAGGGGMEPDPEPAAVEVPAGRVLSARELFAARSRSQKLPQRSHGPKDFLPDGSAAQAERLRRCREELWQLLAEQRVERLGSLVAAEWRPEEGFVELKSPAGKFWQTMGFSEQGRQRLHPEEALYLLECGSIHLFHQDLPLSIQEAYQLLLTDHTVTFLQYQVFSHLKRLGYVVRRFQPSSVLSPYERQLNLDASVQHLEDGDGKRKRSSSSPRSINKKAKALDNSLQPKSLAASSPPPCSQPSQCPEEKPQESSHEGPGGPSSSEAWANLAGRRGWGHGSQGGTTKESQRERTKAEKQEDNKPEMIKNHQGAHKGRQQRKTTIMVTIQNDCEHTRREQTEHRDTMIKATDTHPRELLD

SEQ ID NO: 1025977 - protein, 136 aa, Homo sapiens
VAARAAAGGGGMEPDPEPAAVEVPAGRVLSARELFAARSRSQKLPQRSHGPKDFLPDGSAAQAERLRRCREELWQLLAEQRVERLGSLVAAEWRPEEGFVELKSPAGKFWQTMGFSEQGRQRLHPERPVWALALGV

SEQ ID NO: 1025978 - protein, 537 aa, Homo sapiens
VAARAAAGGGGMEPDPEPAAVEVPAGRVLSARELFAARSRSQKLPQRSHGPKDFLPDGSAAQAERLRRCREELWQLLAEQRVERLGSLVAAEWRPEEGFVELKSPAGKFWQTMGFSEQGRQRLHPEEALYLLECGSIHLFHQDLPLSIQEAYQLLLTDHTVTFLQYQVFSHLKRLGYVVRRFQPSSVLSPYERQLNLDASVQHLEDGDGKRKRSSSSPRSINKKAKALDNSLQPKSLAASSPPPCSQPSQCPEEKPQESSPMKGPGGPFQLLGSLGPSPGPAREGVGCSWESGRAENGVTGAGKRRWNFEQISFPNMASDSRHTLLRAPAPELLPANVAGRETDAESWCQKLNQRKENLSRREREHHAEAAQFQEDVNADPEVQRCSSWREYKELLQRRQVQRSQRRAPHLWGQPVTPLLSPGQASSPAVVLQHISVLQTTHLPDGGVRLLEKSGGLEIIFDVYQADAVATFRKNNPGKPYARMCISGFDEPVPDLCSLKRLSYQSGDVPLIFALVDHGDISFYSFRDFTLPQDVGH

SEQ ID NO: 1025979 - protein, 537 aa, Homo sapiens; identical to SEQ ID NO: 1025978

SEQ ID NO: 1025980 - protein, 573 aa, Homo sapiens
VAARAAAGGGGMEPDPEPAAVEVPAGRVLSARELFAARSRSQKLPQRSHGPKDFLPDGSAAQAERLRRCREELWQLLAEQRVERLGSLVAAEWRPEEGFVELKSPAGKFWQTMGFSEQGRQRLHPEEALYLLECGSIHLFHQDLPLSIQEAYQLLLTDHTVTFLQYQVFSHLKRLGYVVRRFQPSSVLSPYERQLNLDASVQHLEDGDGKRKRSSSSPRSINKKAKALDNSLQPKSLAASSPPPCSQPSQCPEEKPQESSPMKGPGGPFQLLGSLGPSPGPAREGVGCSWESGRAENGVTGAGKRRWNFEQISFPNMASDSRHTLLRAPAPELLPANVAGRETDAESWCQKLNQRKENLSRREREHHAEAAQFQEDVNADPEVQRCSSWREYKELLQRRQVQRSQRRAPHLWGQPVTPLLSPGQASSPGTPSACHIFEGHWQLRNHRTLERAWMNWDGLRLKEDVGGGSGPTSTVSSPAAAAGPVWEGLEKPWSFSISLCCRQHTFLMEVSGCWRSLGAWKSSLMFTRPTLWPHSERITLANPMPGCALVDLMSLSQTSAASSGCLTRVGMSL

SEQ ID NO: 1025981 - protein, 477 aa, Homo sapiens
MAPPSGRHQCGDPSLEEALVPGGGGASAPSWAGQRLPPPALETWLLEPSRRDRTEDTKEWQRLHPEEALYLLECGSIHLFHQDLPLSIQEAYQLLLTDHTVTFLQYQVFSHLKRLGYVVRRFQPSSVLSPYERQLNLDASVQHLEDGDGKRKRSSSSPRSINKKAKALDNSLQPKSLAASSPPPCSQPSQCPEEKPQESSPMKGPGGPFQLLGSLGPSPGPAREGVGCSWESGRAENGVTGAGKRRWNFEQISFPNMASDSRHTLLRAPAPELLPANVAGRETDAESWCQKLNQRKENLSRREREHHAEAAQFQEDVNADPEVQRCSSWREYKELLQRRQVQRSQRRAPHLWGQPVTPLLSPGQASSPAVVLQHISVLQTTHLPDGGVRLLEKSGGLEIIFDVYQADAVATFRKNNPGKPYARMCISGFDEPVPDLCSLKRLSYQSGDVPLIFALVDHGDISFYSFRDFTLPQDVGH

SEQ ID NO: 1025982 - protein, 473 aa, Homo sapiens
VAARAAAGGGGMEPDPEPAAVEVPAGRVLSARELFAARSRSQKLPQRSHGPKDFLPDGSAAQAERLRRCREELWQLLAEQRVERLGSLVAAEWRPEEGFVELKSPAGKFWQTMGFSEQGRQRLHPEEALYLLECGSIHLFHQDLPLSIQEAYQLLLTDHTVTFLQYQVFSHLKRLGYVVRRFQPSSVLSPYERQLNLDASVQHLEDGDGKRKRSSSSPRSINKKAKALDNSLQPKSLAASSPPPCSQPSQCPEAQPWPGQGGGGVQLGEWQSRERSQGAGKRRWNFEQISFPNMASDSRHTLLRAPAPELLPANVAGRETDAESWCQKLNQRKENLSRREREHHAEAAQFQEDVNADPEVQRCSSWREYKELLQRRQVQRSQRRAPHLWGQPVTPLLSPGQASSPGTPSACHIFEGHWQLRNHRTLERAWMNWDGLRLKEDVGGGSGPTSTVSSPAAAAGPVWEGLEMVSQER

SEQ ID NO: 1025983 - protein, 555 aa, Homo sapiens
VAARAAAGGGGMEPDPEPAAVEVPAGRVLSARELFAARSRSQKLPQRSHGPKDFLPDGSAAQAERLRRCREELWQLLAEQRVERLGSLVAAEWRPEEGFVELKSPAGKFWQTMGFSEQGRQRLHPEEALYLLECGSIHLFHQDLPLSIQEAYQLLLTDHTVTFLQYQVFSHLKRLGYVVRRFQPRSPGRGGGSVAHPLFSPHSSVLSPYERQLNLDASVQHLEDGDGKRKRSSSSPRSINKKAKALDNSLQPKSLAASSPPPCSQPSQCPEEKPQESSPMKGPGGPFQLLGSLGPSPGPAREGVGCSWESGRAENGVTGAGKRRWNFEQISFPNMASDSRHTLLRAPAPELLPANVAGRETDAESWCQKLNQRKENLSRREREHHAEAAQFQEDVNADPEVQRCSSWREYKELLQRRQVQRSQRRAPHLWGQPVTPLLSPGQASSPAVVLQHISVLQTTHLPDGGVRLLEKSGGLEIIFDVYQADAVATFRKNNPGKPYARMCISGFDEPVPDLCSLKRLSYQSGDVPLIFALVDHGDISFYSFRDFTLPQDVGH

SEQ ID NO: 1025984 - protein, 255 aa, Homo sapiens
VAARAAAGGGGMEPDPEPAAVEVPAGRVLSARELFAARSRSQKLPQRSHGPKDFLPDGSAAQAERLRRCREELWQLLAEQRVERLGSLVAAEWRPEEGFVELKSPAGKFWQTMGFSEQGRQRLHPEEALYLLECGSIHLFHQDLPLSIQEAYQLLLTDHTVTFLQYQVFSHLKRLGYVVRRFQPSSVLSPYERQLNLDASVQHLEDGDGKRKRSSSSPRSINKKAKALDNSLQPKSLAASSPPPCSQPSQCPEGV

SEQ ID NO: 1025985 - protein, 512 aa, Homo sapiens
WRRAQRQAAAGWSPIPSPRPWRFPRGACSVCVRWPWPGVGVWGAAGGQRWVGKPGCPGTLARLAPDALAADPCVPFSPSATESIYSRPHRGIDRTHAPSRLAVDPKALSCHRTSSEQLQGQSGMTGPCCQGKDASAQPALAGRHAGCRKLAMSDMTIGELARRWEAQGQEGSFRGHVRDVIQQDGEQNLHGAESKLVRSPTTDGEGTRDTKTVSAHRAKKGAYAYSFLGRWCGIPSHRTFHIPSPKRNQLPHLLIIISQGGQGIYAKDSCYCNCNHRNPNKRKYETQLYPYWTRVTQNRDTYTATSTLERGTGSRGEQARLRNTAPKRYPQQTTKPSIEPMNPSERLERSASSHTHTDKPKEGEQHTGAADMARTRGASKRTKRSGTHTPTQHTRRKHRAAERADRQEKTHRTQETKRAGGRQAEDKREGQQGSTKAEKHKAQERDSDPGEAARTHRNDRGQGEEQRSTPDTKVRQTKEQRDKQSNSDRRQQQGNETERDKTKKARRDRPRK

SEQ ID NO: 1025986 - protein, 149 aa, Homo sapiens
MAPPSGRHQCGDPSLEEALVPGGGGASAPSWAGQRLPPPALETWLLEPSRRDRTEDTEGMANLPGPLLTVPGWPSACKVGICTPSARPSLSPSALLAQPGRCGTKQREAAEGRYKCDHSHCTPDAGSSGFTGEKPRGGLGAKEGPSASP

SEQ ID NO: 1025987 - protein, 496 aa, Homo sapiens
VAARAAAGGGGMEPDPEPAAVEVPAGRVLSARELFAARSRSQKLPQRSHGPKDFLPDGSAAQAERLRRCREELWQLLAEQRVERLGSLVAAEWRPEEGFVELKSPAGKFWQTMGFSEQGRQRLHPEEALYLLECGSIHLFHQDLPLSIQEAYQLLLTDHTVTFLQYQVFSHLKRLGYVVRRFQPSSVLSPYERQLNLDASVQHLEDGDGKRKRSSSSPRSINKKAKALDNSLQPKSLAASSPPPCSQPSQCPEEKPQESSPMKGPGGPFQLLGSLGPSPGPAREGVGCSWESGRAENGVTGAGKRRWNFEQISFPNMASDSRHTLLRAPAPELLPANVAGRETDAESWCQKLNQRKENLSRREREHHAEAAQFQEDVNADPEVQRCSSWREYKELLQRRQVQRSQRRAPHLWGQPVTPLLSPGQASSPGTPSACHIFEGHWQLRNHRTLERAWMNWDGLRLKEDVGGGSGPTSTVSSPAAAAGPVWEGLEMVSQER

SEQ ID NO: 1025988 - protein, 433 aa, Homo sapiens
VAARAAAGGGGMEPDPEPAAVEVPAGRVLSARELFAARSRSQKLPQRSHGPKDFLPDGSAAQAERLRRCREELWQLLAEQRVERLGSLVAAEWRPEEGFVELKSPAGKFWQTMGFSEQGRQRLHPEEALYLLECGSIHLFHQDLPLSIQEAYQLLLTDHTVTFLQYQVFSHLKRLGYVVRRFQPSSVLSPYERQLNLDASVQHLEDGDGKRKRSSSSPRSINKKAKALDNSLQPKSLAASSPPPCSQPSQCPEEKPQESSPMKGPGGPFQLLGSLGPSPGPAREGVGCSWESGRAENGVTGAGKRRWNFEQISFPNMASDSRHTLLRAPAPELLPANVAGRETDAESWCQKLNQRKENLSRREREHHAEAAQFQEDVNADPEVQRCSSWREYKELLQRRQVQRSQRRAPHLWGQPVTPLLSPGQASSPDNTPS

SEQ ID NO: 1025989 - protein, 568 aa, Homo sapiens
VAARAAAGGGGMEPDPEPAAVEVPAGRVLSARELFAARSRSQKLPQRSHGPKDFLPDGSAAQAERLRRCREELWQLLAEQRVERLGSLVAAEWRPEEGFVELKSPAVSGGLVGPGTALPALPVPPSLVTLALGPTLRCKFWQTMGFSEQGRQRLHPEEALYLLECGSIHLFHQDLPLSIQEAYQLLLTDHTVTFLQYQVFSHLKRLGYVVRRFQPSSVLSPYERQLNLDASVQHLEDGDGKRKRSSSSPRSINKKAKALDNSLQPKSLAASSPPPCSQPSQCPEEKPQESSPMKGPGGPFQLLGSLGPSPGPAREGVGCSWESGRAENGVTGAGKRRWNFEQISFPNMASDSRHTLLRAPAPELLPANVAGRETDAESWCQKLNQRKENLSRREREHHAEAAQFQEDVNADPEVQRCSSWREYKELLQRRQVQRSQRRAPHLWGQPVTPLLSPGQASSPAVVLQHISVLQTTHLPDGGVRLLEKSGGLEIIFDVYQADAVATFRKNNPGKPYARMCISGFDEPVPDLCSLKRLSYQSGDVPLIFALVDHGDISFYSFRDFTLPQDVGH

SEQ ID NO: 1025990 - protein, 561 aa, Homo sapiens
VAARAAAGGGGMEPDPEPAAVEVPAGRVLSARELFAARSRSQKLPQRSHGPKDFLPDGSAAQAERLRRCREELWQLLAEQRVERLGSLVAAEWRPEEGFVELKSPAGKFWQTMGFSEQGRQRLHPEEALYLLECGSIHLFHQDLPLSIQEAYQLLLTDHTVTFLQYQVFSHLKRLGYVVRRFQPSSVLSPYERQLNLDASVQHLEDGDGKRKRSSSSPLVTPTSRWPPRECWCLGPWKMHRLSKNQQLPCRLRETLGDLPSAPMGRVHLSNPGQMCCFSPTSLRSINKKAKALDNSLQPKSLAASSPPPCSQPSQCPEEKPQESSPMKGPGGPFQLLGSLGPSPGPAREGVGCSWESGRAENGVTGAGKRRWNFEQISFPNMASDSRHTLLRAPAPELLPANVAGRETDAESWCQKLNQRKENLSRREREHHAEAAQFQEDVNADPEVQRCSSWREYKELLQRRQVQRSQRRAPHLWGQPVTPLLSPGQASSPGTPSACHIFEGHWQLRNHRTLERAWMNWDGLRLKEDVGGGSGPTSTVSSPAAAAGPVWEGLEMVSQER

SEQ ID NO: 1025991 - protein, 323 aa, Homo sapiens [sequence omitted]

SEQ ID NO: 1025992 - protein, 276 aa, Homo sapiens [sequence omitted]

SEQ ID NO: 1025993 - protein, 221 aa, Homo sapiens
MEAGGFLDSLIYGACVVFTLGMFSAGLSDLRHMRMTRSVDNVQFLPFLTTEVNNLGWLSYGALKGDGILIVVNTVGAALQTLYILAYLHYCPRKRVVLLQTATLLGVLLLGYGYFWLLVPNPEARLQQLGLFCSVFTISMYLSPLADLAKVIQTKSTQCLSYPLTIATLLTSASWCLYGFRLRDPYIMVSNFPGIVTSFIRFWLFWKYPQEQDRNYWLLQT

SEQ ID NO: 1025994 - protein, 112 aa, Homo sapiens
MRGLHPWHVLRRPLGPQAHANDPECGQRPVPALSHHGSQAKVIQTKSTQCLSYPLTIATLLTSASWCLYGFRLRDPYIMVSNFPGIVTSFIRFWLFWKYPQEQDRNYWLLQT

SEQ ID NO: 1025995 - protein, 241 aa, Homo sapiens
ESRGLGCSRSRQPQARGGRWARDPTLVVMEAGGFLDSLIYGACVVFTSDLRHMRMTRSVDNVQFLPFLTTEVNNLGWLSYGALKGDGILIVVNTVGAALQTLYILAYLHYCPRKRVVLLQTATLLGVLLLGYGYFWLLVPNPEARLQQLGLFCSVFTISMYLSPLADLAKVIQTKSTQCLSYPLTIATLLTSASWCLYGFRLRDPYIMVSNFPGIVTSFIRFWLFWKYPQEQDRNYWLLQT

SEQ ID NO: 1025996 - protein, 221 aa, Homo sapiens; identical to SEQ ID NO: 1025993

SEQ ID NO: 1025997 - protein, 103 aa, Homo sapiens
MIQRLGPQAHANDPECGQRPVPALSHHGSQAKVIQTKSTQCLSYPLTIATLLTSASWCLYGFRLRDPYIMVSNFPGIVTSFIRFWLFWKYPQEQDRNYWLLQT

SEQ ID NO: 1025998 - protein, 206 aa, Homo sapiens
MSETTVSHIKIHVCKGPLGGPPLTLNPFEPCPSPPPCSNLGWLSYGALKGDGILIVVNTVGAALQTLYILAYLHYCPRKRVVLLQTATLLGVLLLGYGYFWLLVPNPEARLQQLGLFCSVFTISMYLSPLADLAKVIQTKSTQCLSYPLTIATLLTSASWCLYGFRLRDPYIMVSNFPGIVTSFIRFWLFWKYPQEQDRNYWLLQT

SEQ ID NO: 1025999 - protein, 215 aa, Homo sapiens
RAAGLGCSRSRQPQARGGRWARDPTLVVMEAGGFLDSLIYGACVVFTNLGWLSYGALKGDGILIVVNTVGAALQTLYILAYLHYCPRKRVVLLQTATLLGVLLLGYGYFWLLVPNPEARLQQLGLFCSVFTISMYLSPLADLAKVIQTKSTQCLSYPLTIATLLTSASWCLYGFRLRDPYIMVSNFPGIVTSFIRFWLFWKYPQEQDRNYWLLQT

SEQ ID NO: 1026000 - protein, 206 aa, Homo sapiens; identical to SEQ ID NO: 1025998

SEQ ID NO: 1026001 - protein, 221 aa, Homo sapiens; identical to SEQ ID NO: 1025993

SEQ ID NO: 1026002 - protein, 158 aa, Homo sapiens
MRGLHLGPQAHANDPECGQRPVPALSHHGSQRVVLLQTATLLGVLLLGYGYFWLLVPNPEARLQQLGLFCSVFTISMYLSPLADLAKVIQTKSTQCLSYPLTIATLLTSASWCLYGFRLRDPYIMVSNFPGIVTSFIRFWLFWKYPQEQDRNYWLLQT

SEQ ID NO: 1026003 - protein, 167 aa, Homo sapiens
MEAGGFLDSLIYGACVVFTLGMFSAGLSDLRHMRMTRSVDNVQFLPFLTTEVNNLGWLSYGALKGDGILIVVNTVGAALQTLYILAYLHYCPRKAKVIQTKSTQCLSYPLTIATLLTSASWCLYGFRLRDPYIMVSNFPGIVTSFIRFWLFWKYPQEQDRNYWLLQT

SEQ ID NO: 1026004 - protein, 179 aa, Homo sapiens [sequence omitted]

SEQ ID NO: 1026005 - protein, 221 aa, Homo sapiens; identical to SEQ ID NO: 1025993

SEQ ID NO: 1026006 - protein, 156 aa, Homo sapiens
MEELGPQAHANDPECGQRPVPALSHHGSQRVVLLQTATLLGVLLLGYGYFWLLVPNPEARLQQLGLFCSVFTISMYLSPLADLAKVIQTKSTQCLSYPLTIATLLTSASWCLYGFRLRDPYIMVSNFPGIVTSFIRFWLFWKYPQEQDRNYWLLQT

SEQ ID NO: 1026007 - protein, 221 aa, Homo sapiens; identical to SEQ ID NO: 1025993

SEQ ID NO: 1026008 - protein, 110 aa, Homo sapiens
KSKKNGRAQIELAVIIIRSRTNDFARPELIKPGYPTNLLIGVLDFHTQDITRLNVGFTIEINRAVDFRCICHAATNRAFFVHFVDNHQNFTAHFLLQALGGNLLLQLHET

SEQ ID NO: 1026009 - protein, 360 aa, Homo sapiens
SSRRELRLCNLMGAKMAMEMRLPVARKPLSERLGRDTKKHLVVPGDTITTDTGFMRGHGTYMGEEKLIASVAGSVERVNKLICVKALKTRYIGEVGDIVLGRITEVQQKRWKVETNSRLDSVLLLSSMNLPGGELRRRSAEDELAMRGFLQEGDLISAEVQAAFSDGSCLFATRGDLKYGKLGHGGRGTRFPASLVKRQKTHCHDVAMWCLSDSLVTTASSGLPKPEHKRTRKQEGLIARLEPGSLLMRGDYPDSERDHLRRYTQRTTQHDTQDIRDGTKDPSHIRRSTRKPEIREERGREHDPGTGKHRDKAGTKNTAHDLQKQTRKNPTLRTRDENPDPAAETHNTSNPTDHERPTKR

SEQ ID NO: 1026010 - protein, 77 aa, Homo sapiens
AASVLSAALLAPGGSSGRDAQAAPPRDLDKKRHAELKMDQALLLIHNELLWTNLTVYWKSECCYHCITLLLDQRRKE

SEQ ID NO: 1026011 - protein, 80 aa, Homo sapiens
AASVLSAALLAPGGSSGRDAQAAPPRDLDKKRHAELKMDQALLLIHNELLWTNLTVYWKSECCYHVCISSHSVLFALGLV

SEQ ID NO: 1026012 - protein, 184 aa, Homo sapiens
FENLISNMTFMLPFQFFNPLPPALIGSLPEQYMLEQGHDQSQDPKQEVHGPFPDSSFLTSSSTPFQVEKDQCLNCPDAITKKEDSTHLSDSSSYNIVTKFERTQLSPEAKVKPERNSLGTKKGRVFCTAGEKTFYDKGTLKIHYNAVHLKIKHKCTIEGCNMVFSSLRSRNRHSANPNPRLHMP

SEQ ID NO: 1026013 - protein, 98 aa, Homo sapiens
MRDNWVITWAPYPPLSNSYNVLLPEVVIFCAVMILVNTMVIAWSSSTVTNAGPKPAMACSGATVACCQGWWALVTGFVVGWFISNQRIALAIKIIGIK

SEQ ID NO: 1026014 - protein, 183 aa, Homo sapiens
AIELALKVIGLQEAEGVLLLKAQAPGSKPQSPLKNGGPYHMWGQPLQRAKGNKAPVSSATTSLHETSSVFVDSLTKATCAPQHGAPGPGPADASKVVAKGLGLSKAYVGQKSSFTVDCSKAGNNMLLVGVHGPRTPCEEILVKHVGSRLYSVSYLLKDKGEYTLVVKWGDEHIPGSPYRVVVP

SEQ ID NO: 1026015 - protein, 196 aa, Homo sapiens
AIELALKVIGLQEAEGVLLLKAQAPGSKPQSPLKNGGPYHMWGQPLQRAKGNKAPVSSATTSLHETSSVFVDSLTKATCAPQHGAPGPGPADASKVVAKGLGLSKAYVGQKSSFTVDCSKAGNNMLLVGVHGPRTPCEEILVKHVGSRLYSVSYLLKDKGEYTLVVKWGDEHIPGSPRLRAPQRGRGCLGYRVVVP

SEQ ID NO: 1026016 - protein, 183 aa, Homo sapiens; identical to SEQ ID NO: 1026014

SEQ ID NO: 1026017 - protein, 183 aa, Homo sapiens; identical to SEQ ID NO: 1026014

SEQ ID NO: 1026018 - protein, 183 aa, Homo sapiens; identical to SEQ ID NO: 1026014

SEQ ID NO: 1026019 - protein, 112 aa, Homo sapiens
MEKTELIQKAKLAEQAERYDDMATVHERQRPSRAPRLSNEERNLLSGGLHENVWSGAAGSAWRVISSIRDRKTDNSEQKLQADYRTIRERQLDCPEAEDPLLRPPVSGNWSG

SEQ ID NO: 1026020 - protein, 466 aa, Homo sapiens
ERAGGLYPSLVLRASPLFGSALSAAMAQADIALIGLAVMGQNLILNMNDHGFVVCAFNRTVSKVDDFLANEAKGTKVVGAQSLKEMVSKLKKPRRIILLVKAGQAVDDFIEKLVPLLDTGDIIIDGGNSEYEGHHKTVPRPQGQGNFICGERSQWWRGRGPVWPIAHARREQRSVAHIKTIFQGIAAKVGTGEPCCDWVGDEGAGHFVKMVHNGIEYGDMQLICEAYHLMKDVLGMAQDEMAQAFEDWNKTELDSFLIEITANILKFQDTDGKHLLPKIRDSAGQKGTGKWTGNLRPGIRRTRHLIGEAVFARCLSSSERMREFKLARKLRGPQKFQLDGDKKSFLEDIRTGHSTASKIISYAQGFYAAKGRQPPRFGWTLKYGGIALMWRGGCIIRSVSLGKIQDAYDRKPELQRLLLDDFFKSAVEHCQDSWRRGSQHWGPGWHSHDLVSALALSFYDGYRPEM

SEQ ID NO: 1026021 - protein, 443 aa, Homo sapiens
ERLRVFPSLVLRASPLFGSALSAAMAQADIALIGLAVMGQNLILNMNDHGFVVCAFNRTVSKVDDFLANEAKGTKVVGAQSLKEMVSKLKKPRRIILLVKAGQAVDDFIEKLRRCRDLKAKGILFVGSGVSGGEEGARYGPSLMPGGNKEAWPTSRPSSKALLQKWELENPAVTGWEMREQATFVKMVHNGIEYGDMQLICEAYHLMKDVLGMAQDEMAQAFEDWNKTELDSFLIEITANILKFQDTDGKHLLPKIRDSAGQKGTGKWTGNLRPGIRRTRHLIGEAVFARCLSSSERMREFKLARKLRGPQKFQLDGDKKSFLEDIRTGHSTASKIISYAQGFYAAKGRQPPRFGWTLKYGGIALMWRGGCIIRSVSLGKIQDAYDRKPELQRLLLDDFFKSAVEHCQDSWRRGSQHWGPGWHSHDLVSALALSFYDGYRPEM

SEQ ID NO: 1026022 - protein, 348 aa, Homo sapiens
MNGTEGPNFYVPFSNVTGVVRSPFEQPQYYLAEPWQFSMLAAYMFLLIVLGFPINFLTLYVTVQHKKLRTPLNYILLNLAVADLFMVFGGFTTTLYTSLHGYFVFGPTGCNLEGFFATLGGEIALWSLVVLAIERYVVVCKPMSNFRFGENHAIMGVVFTWIMALACAAPPLVGWSRYIPEGMQCSCGIDYYTLKPEVNNESFVIYMFVVHFTIPMIVIFFCYGQLVFTVKEAAAQQQESATTQKAEKEVTRMVIIMVIFFLICWLPYASVAFYIFTHQGSNFGPIFMTLPAFFAKSSSIYNPVIYIMLNKQFRNCMLTTLCCGKNPLGDDDASATASKTETSQVAPA

SEQ ID NO: 1026023 - protein, 348 aa, Homo sapiens; identical to SEQ ID NO: 1026022

SEQ ID NO: 1026024 - protein, 362 aa, Homo sapiens
  misc_feature (14)..(14): Xaa can be any naturally occurring amino acid
PPLPPYWCYQIEVXDIVGTEGPNFYVPFSNVTGVVRSPFEQPQYYLAEPWQFSMLAAYMFLLIVLGFPINFLTLYVTVQHKKLRTPLNYILLNLAVADLFMVFGGFTTTLYTSLHGYFVFGPTGCNLEGFFATLGGEIALWSLVVLAIERYVVVCKPMSNFRFGENHAIMGVVFTWIMALACAAPPLVGWSRYIPEGMQCSCGIDYYTLKPEVNNESFVIYMFVVHFTIPMIVIFFCYGQLVFTVKEAVPSSRSSTTQKAEKEVTRMVIIMVIFFLICWLPYASVAFYIFTHQGSNFGPIFMTLPAFFAKSSSIYNPVIYIMLNKQFRNCMLTTLCCGKNPLGDDDASATASKTETSQVAPA

SEQ ID NO: 1026025 - protein, 229 aa, Homo sapiens [sequence omitted]

SEQ ID NO: 1026026 - protein, 133 aa, Homo sapiens
SQRNNEHARSDETELILEIEDSAKMGDVSYGYSYWYLSHTVMSGDSERRYLDLSLLLRCEVYLCDTMNEKCKPTCSGTRFRSGSVIDQSRVLNLGPITRKGVQATVSRAFSSLGLLKVWLPLLLSATLTLTFQ

SEQ ID NO: 1026027 - protein, 436 aa, Homo sapiens
MGQPSLTWMLMVVVASWFITTAATDTSEARWCSECHSNATCTEDEAVTTCTCQEGFTGDGLTCVDLDECAIPGAHNCSANSSCVNTPGSFSCVCPEGFRLSPGLGCTDVDECAEPGLSHCHALATCVNVVGSYLCVCPAGYRGDGWHCECSPGSCGPGLDCVPEGDALVCADPCQAHRTLDEYWRSTEYGEGYACDTDLRGWYRFVGQGGARMAETCVPVLRCNTAAPMWLNGTHPSSDEGIVSRKACAHWSGHCCLWDASVQVKACAGGYYVYNLTAPPECHLAYCTDPSSVEGTCEECSIDEDCKSNNGRWHCQCKQDFNITDISLLEHRLECGANDMKVSLGKCQLKSLGFDKVFMYLSDSRCSGFNDRDNRDWVSVVTPARDGPCGTVLTVRPGQWGTEPEHCLVQVSALSLPSYRSFGELFSLAVPQFHQL

SEQ ID NO: 1026028 - protein, 228 aa, Homo sapiens
TWRKKSAHCKLLAGTSPGLAVSWSNVAPSSACALNIRVGGTGMFTVRMALFQTPSYTQPYQGSSVTLSTEAFLYVGTMLDGGDLSRFALLMTNCYATPSSNATDPLKYFIIQDRCPHTRDSTIQVVENGESSQGRFSVQMFRFAGNYDLVYLHCEVYLCDTMNEKCKPTCSGTRFRSGSVIDQSRVLNLGPITRKGVQATVSRAFSSLGLLKVWLPLLLSATLTLTFQ

SEQ ID NO: 1026029 - protein, 640 aa, Homo sapiens
MGQPSLTWMLMVVVASWFITTAATDTSEARWCSECHSNATCTEDEAVTTCTCQEGFTGDGLTCVDLDECAIPGAHNCSANSSCVNTPGSFSCVCPEGFRLSPGLGCTDVDECAEPGLSHCHALATCVNVVGSYLCVCPAGYRGDGWHCECSPGSCGPGLDCVPEGDALVCADPCQAHRTLDEYWRSTEYGEGYACDTDLRGWYRFVGQGGARMAETCVPVLRCNTAAPMWLNGTHPSSDEGIVSRKACAHWSGHCCLWDASVQVKACAGGYYVYNLTAPPECHLAYCTDPSSVEGTCEECSIDEDCKSNNGRWHCQCKQDFNITDISLLEHRLECGANDMKVSLGKCQLKSLGFDKVFMYLSDSRCSGFNDRDNRDWVSVVTPARDGPCGTVLTRNETHATYSNTLYLADEIIIRDLNIKINFACSYPLDMKVSLKTALQPMVSALNIRVGGTGMFTVRMALFQTPSYTQPYQGSSVTLSTEAFLYVGTMLDGGDLSRFALLMTNCYATPSSNATDPLKYFIIQDRCPHTRDSTIQVVENGESSQGRFSVQMFRFAGNYDLVYLHCEVYLCDTMNEKCKPTCSGTRFRSGSVIDQSRVLNLGPITRKGVQATVSRAFSSLGLLKVWLPLLLSATLTLTFQ

SEQ ID NO: 1026030 - protein, 448 aa, Homo sapiens
MGQPSLTWMLMVVVASWFITTAATDTSEARWCSECHSNATCTEDEAVTTCTCQEGFTGDGLTCVDLDECAIPGAHNCSANSSCVNTPGSFSCVCPEGFRLSPGLGCTDVDECAEPGLSHCHALATCVNVVGSYLCVCPAGYRGDGWHCECSPGSCGPGLDCVPEGDALVCADPCQAHRTLDEYWRSTEYGEGYACDTDLRGWYRFVGQGGARMAETCVPVLRCNTAAPMWLNGTHPSSDEGIVSRKACAHWSGHCCLWDASVQVKACAGGYYVYNLTAPPECHLAYCTDPSSVEGTCEECSIDEDCKSNNGRWHCQCKQDFNITDISLLEHRLECGANDMKVSLGKCQLKSLGFDKVFMYLSDSRCSGFNDRDNRDWVSVVTPARDGPCGTVLTRNETHATYSNTLYLADEIIIRDLNIKINFACSYPLDMKVSLKTALQPMVKMPTH

SEQ ID NO: 1026031 - protein, 640 aa, Homo sapiens
MGQPSLTWMLMVVVASWFITTAATDTSEARWCSECHSNATCTEDEAVTTCTCQEGFTGDGLTCVDLDECAIPGAHNCSANSSCVNTPGSFSCVCPEGFRLSPGLGCTDVDECAEPGLSHCHALATCVNVVGSYLCVCPAGYRGDGWHCECSPGSCGPGLDCVPEGDALVCADPCQAHRTLDEYWRSTEYGEGYACDTDLRGWYRFVGQGGARMAETCVPVLRCNTAAPMWLNGTHPSSDEGIVSRKACAHWSGHCCLWDASVQVKACAGGYYVYNLTAPPECHLAYCTDPSSVEGTCEECSIDEDCKSNNGRWHCQCKQDFNITDISLLEHRLECGANDMKVSLGKCQLKSLGFDKVFMYLSDSRCSGFNDRDNRDWVSVVTPARDGPCGTVLTRNETHATYSNTLYLADEIIIRDLNIKINFACSYPLDMKVSLKTALQPMVSALNIRVGGTGMFTVRMALFQTPSYTQPYQGSSVTLSTEAFLYVGTMLDGGDLSRFALLMTNCYATPSSNATDPLKYFIIQDRCPHTRDSTIQVVENGESSQGRFSVQMFRFAGNYDLVYLDCEVYLCDTMNEKCKPTCSGTRFRSGSVIDQSRVLNLGPITRKGVQATVSRAFSSLGLLKVWLPLLLSATLTLTFQ

SEQ ID NO: 1026032 - protein, 313 aa, Homo sapiens
MGQPSLTWMLMVVVASWFITTAATDTSEARWCSECHSNATCTEDEAVTTCTCQEGFTGDGPCGTVLTRNETHATYSNTLYLADEIIIRDLNIKINFACSYPLDMKVSLKTALQPMVSALNIRVGGTGMFTVRMALFQTPSYTQPYQGSSVTLSTEAFLYVGTMLDGGDLSRFALLMTNCYATPSSNATDPLKYFIIQDRCPHTRDSTIQVVENGESSQGRFSVQMFRFAGNYDLVYLHCEVYLCDTMNEKCKPTCSGTRFRSGSVIDQSRVLNLGPITRKGVQATVSRAFSSLGLLKVWLPLLLSATLTLTFQ

SEQ ID NO: 1026033 - protein, 793 aa, Homo sapiens
KPQLELRPQTSMQGEESLRILVEPEGDSFPLMEISTCETEASEQWDYVLVAQRHTQRDPRQARQQQFLEELRRKGFHIKVIRDQKQVFFGIRADNSVFGLYRTLLLEPEGPAPHAELAAPTTIPVTTSLRIRIVNFVVMNNKTSAGETFEDLMKDGVFEARFPLHKGEGRLKKTWARWRHMFREQPVDEIRNYFGEKVALYFVWLGWYTYMLVPAALTGLLVFLSGFSLFEASQISKEICEAHDILMCPLGDHSRRYQRLSETCTFAKLTHLFDNDGTVVFAIFMALWATVFLEIWKRQRARVVLHWDLYVWDEEQEEMALQLINCPDYKLRPYQHSYLRSTVILVLTLLMICLMIGMAHVLVVYRVLASALFSSSAVPFLEEQVTTAVVVTGALVHYVTIVIMTKINRRVALKLCDFEMPRTFSERESRFTIRFFTLQFFTHFSSLIYIAFILGRINGHPGKSTRLAGLWKLEECHASGCMMDLFVQMAIIMGLKQTLSNCVEYLVPWVTHKCRSLRASESGHLPRDPELRDWRRNYLLNPVNTFSLFDEFMEMMIQYGFTTIFVAAFPLAPLLALFSNLVEIRLDAIKMVWLQRRLVPRKAKDIGTWLQVLETIGVLAVIANGMVIAFTSEFIPRVVYKYRYSPCLKEGNSTVDCLKGYVNHSLSVFHTKDFQDPDGIEGSENVTLCRYRDYRNPPDYNFSEQFWFLLAIRLAFVILFEHVALCIKLIAAWFVPDIPQSVKNKVLEVKYQRLREKMWHGRQRLGGVGAGSRPPMPAHPTPASIFSARSTDV

SEQ ID NO: 1026034 - protein, 58 aa, Homo sapiens
TQCSCILQVTQDPLAYGKAKELCKAADMVQDIRGEDEPRDEIEKATYGVVPYLALPYD

SEQ ID NO: 1026035 - protein, 168 aa, Homo sapiens [sequence omitted]

SEQ ID NO: 1026036 - protein, 99 aa, Homo sapiens
  misc_feature (33)..(33): Xaa can be any naturally occurring amino acid
RPEQGLLAPDALHGPHMPAVSEEEMALQLINCXVQRPPGAETVPPPAPPTSPPLCVLRGAVRRLCPCGAAGIPCMFRAVSCHPIPPAPSLWGLSGLAQP

SEQ ID NO: 1026037 - protein, 78 aa, Homo sapiens
AIMILDWIIVISNVFLKSLKPERLEPDQYTEVLTWKTPWVHPARCAHTPPQHVGESTGTMRRPRAPLSGAGWGEEVSP

SEQ ID NO: 1026038 - protein, 126 aa, Homo sapiens
MPACILTGLLSAAGGAGSSGVESPWEVTPEGLDPRSSNLHVSWRVPLAKEEELWDWRPCSSGCLGAWGGFGDLSSFCRGDLQVTVWMLCCVFGPCRVLSPLPTCAERGWCFPKFLEGASSSALLAS

SEQ ID NO: 1026039 - protein, 77 aa, Homo sapiens
TQCSCILQVTQDPLAYGKAKELCKAADMVQDIRGPSGVEETKMKEDEPRDEIEKATYGVVPLRRYLALPYASMQALP

SEQ ID NO: 1026040 - protein, 30 aa, Homo sapiens
MARPRSEDEPRDEIEKATYGVVPYLALPYD

SEQ ID NO: 1026041 - protein, 825 aa, Homo sapiens
KPQLELRPQTSMQGEESLRILVEPEGDSFPLMEISTCETEASEQWDYVLVAQRHTQRDPRQARQQQFLEELRRKGFHIKVIRDQKQVFFGIRADNSVFGLYRTLLLEPEGPAPHAELAAPTTIPVTTSLRIRIVNFVVMNNKTSAGETFEDLMKDGVFEARFPLHKGEGRLKKTWARWRHMFREQPVDEIRNYFGEKVALYFVWLGWYTYMLVPAALTGLLVFLSGFSLFEASQISKEICEAHDILMCPLGDHSRRYQRLSETCTFAKLTHLFDNDGTVVFAIFMALWATVFLEIWKRQRARVVLHWDLYVWDEEQVRWSWQRSSGRPEQGLLAPDALHGPHMPAVSEEEMALQLINCPDYKLRPYQHSYLRSTVILVLTLLMICLMIGMAHVLVVYRVLASALFSSSAVPFLEEQVTTAVVVTGALVHYVTIVIMTKINRRVALKLCDFEMPRTFSERESRFTIRFFTLQFFTHFSSLIYIAFILGRINGHPGKSTRLAGLWKLEECHASGCMMDLFVQMAIIMGLKQTLSNCVEYLVPWVTHKCRSLRASESGHLPRDPELRDWRRNYLLNPVNTFSLFDEFMEMMIQYGFTTIFVAAFPLAPLLALFSNLVEIRLDAIKMVWLQRRLVPRKAKDIGTWLQVLETIGVLAVIANGMVIAFTSEFIPRVVYKYRYSPCLKEGNSTVDCLKGYVNHSLSVFHTKDFQDPDGIEGSENVTLCRYRDYRNPPDYNFSEQFWFLLAIRLAFVILFEHVALCIKLIAAWFVPDIPQSVKNKVLEVKYQRLREKMWHGRQRLGGVGAGSRPPMPAHPTPASIFSARSTDV

SEQ ID NO: 1026042 - protein, 173 aa, Homo sapiens
MVIAFTSEFIPRVVYKYRYSPCLKEGNSTVDCLKGYVNHSLSVFHTKDFQDPDGIEGSENVTLCRYRDYRNPPDYNFSEQFWFLLAIRLAFVILFEVSQNRERPRSGSGQCSPQSFSPALKPPNASWHLTVLGLSCAALARGLVHQAHRRLVRARHPSVGEEQGSGGEVPEAA

SEQ ID NO: 1026043 - protein, 853 aa, Homo sapiens
KPQLELRPQTSMQGEESLRILVEPEGDSFPLMEISTCETEASEQWDYVLVAQRHTQRDPRQARQQQFLEELRRKGFHIKVIRDQKQVFFGIRADNSVFGLYRTLLLEPEGPAPHAELAAPTTIPVTTSLRIRIVNFVVMNNKTSAGETFEDLMKDGVFEARFPLHKGEGRLKKTWARWRHMFREQPVDEIRNYFGEKVALYFVWLGWYTYMLVPAALTGLLVFLSGFSLFEASQISKEICEAHDILMCPLGDHSRRYQRLSETCTFAKLTHLFDNDGTVVFAIFMALWATVFLEIWKRQRARVVLHWDLYVWDEEQVRWSWQRSSGRPEQGLLAPDALHGPHMPAVSEEEMALQLINCPDYKLRPYQHSYLRSTVILVLTLLMICLMIGMAHVLVVYRVLASALFSSSAVPFLEEQVTTAVVVTGALVHYVTIVIMTKINRRVALKLCDFEMPRTFSERESRFTIRFFTLQFFTHFSSLIYIAFILGRINGHPGKSTRLAGLWKLEECHASGCMMDLFVQMAIIMGLKQTLSNCVEYLVPWVTHKCRSLRASESGHLPRDPELRDWRRNYLLNPVNTFSLFDEFMEMMIQYGFTTIFVAAFPLAPLLALFSNLVEIRLDAIKMVWLQRRLVPRKAKDIGQTGRAQDGRELGGLRPVGFPLARPAHLEKIISRISGRRQPPALLRRPRMRVEPGWEGTRSGRGRALCRLLPQTVRSSEALQLAPKGDPGSASGWGWNRAAGLCPKTGHAETDRQQGSDGSWGAGCGERERGVREAPSLGPRLQGLTLGWEPRRWSGLGAQLRSSGRWRMRIPRFLPVHVRLRGAGAQEAMLCHGWGLPSVNTASLGLQGDNTHR

SEQ ID NO: 1026044 - protein, 227 aa, Homo sapiens
MGPVLREAFSQQGRLSSIWEPALQLPACLGCCLHPWGGNACLHLDGPPVGCWRSWELSMTRECSVSLKNCGRRLQERKEPRFLQGRGSVGRGRPGVSVGSGRVLTLFKLRLLPLRQDEDSGVESPWEVTPEGLDPRSSNLHVSWRVPLAKEEELWDWRPCSSGCLGAWGGFGDLSSFCRGDLQVTVWMLCCVFGPCRVLSPLPTCAERGWCFPKFLEGASSSALLAS

SEQ ID NO: 1026045 - protein, 60 aa, Homo sapiens
VPIAYGKAKELCKAADMVQDIKMNHEDEPRDEIEKATYGVVPLRRYLALPYATMQALPKY

SEQ ID NO: 1026046 - protein, 79 aa, Homo sapiens
VPIAYGKAKELCKAADMVQDIKMNHSEVVPYGKALPYAFAYGKARSEDEPRDEIEKATYGVVPLRRYLALPYASMQALP

SEQ ID NO: 1026047 - protein, 173 aa, Homo sapiens; identical to SEQ ID NO: 1026042

SEQ ID NO: 1026048 - protein, 137 aa, Homo sapiens
  misc_feature (130)..(130): Xaa can be any naturally occurring amino acid
MPACILTGLLSAAGGAGSAEAASRKAGTQASLGREETQRRMAFLLGRLPTESPSELSPQEGEVPRTPSTGGCRLVGAEEATEEAETVRARARQWPESWTASGYLHTPPFSCLSEDKRTANAPPPRPRYLXYSGSAVV

SEQ ID NO: 1026049 - protein, 76 aa, Homo sapiens
RLDHARSATYKKAAACHRGAVDAGPRALGLLVTVWGSPFLCQAPIVICISLKSILAGVVAHSYNPNTLGSRGGRIL

SEQ ID NO: 1026050 - protein, 385 aa, Homo sapiens
YKLTISSEEKVFEAVIAWVNHDKDVRQEFMARLMEHVRLPLLPREYLVQRVEEEALVKNSSACKDYLIEAMKYHLLPTEQRILMKSVRTRLRTPMNLPKLMVVVGGQAPKAIRSVECYDFKEERWHQVAELPSRRCGAGMVYMAGLVFAVGGFNGSLRVRTVDSYDPVKDQWTSVANMRDRRSTLGAAVLNGLLYGVGGFDGSTGLSSVEAYNIKSNEWFHVAPMNTRRSSVGVGVVGGLLYAVGGYDGASRQCLSTVECYNATTNEWTYIAEMSTRRSGAGVGVLNNLLYAVGGHDGPLVRKSVEVYDPTTNAWRQVADMNMCRRNAGVCAVNGLLYVVGGDDGSCNLASVEYYNPTTDKWTVVSSCMSTGRSYAGVTVIDKPL

SEQ ID NO: 1026051 - protein, 387 aa, Homo sapiens
  misc_feature (290)..(290): Xaa can be any naturally occurring amino acid
PACGAGMTLKINSLYLAMRVFPRPASESPPLGARSDAEDLTAAMSSNECFKCGRSGHWARECPTGGGRGRGMRSRGRGFQFVSSSLPDICYRCGESGHLAKDCDLQEDACYNCGRGGHIAKDCKEPKREREQCCYNCGKPGHLARDCDHADEQKCYSCGEFGHIQKDCTKVKCYRCGETGHVAINCSKTSEVNCYRCGESGPLHGNAQLRLQPNNFPLCRPSFFLIDDRVHFSESSSLPKVGTIEATPGSELYCAVSTAEGVNKNRLCAITTTKVMSAGTRSKDKVGKEXPFVACELGMAGMASGESEPVSRLGPWTVPCGGNTRMRRTPNIRDGRGRLRPTAKTPERVGHWKRGGPQKTLQADTARTNTGGTGGHKQPRTGETEVD

SEQ ID NO: 1026052 - protein, 171 aa, Homo sapiens
MTLKINSLYLAMRVFPRPASESPPLWARSDAEDLTAAMSSNECFKCGRSGHWARECPTGGGRGRGMRSRGRGGFTSDRGSSLFPRLFQIFVIAVVSLVILPRIVIFRRMPAITAVEVATLPRTARSPRESESNAATTVANQAIWLVTATMQMSRNAILVENSDTFKKTAPK

SEQ ID NO: 1026053 - protein, 175 aa, Homo sapiens
PACGAGMTLKINSLYLAMRVFPRPASESPPLGARSDAEDLTAAMSSNECFKCGRSGHWARECPTGGGRGRGMRSRGRGFQFVSSSLPDICYRCGESGHLAKDCDLQEDACYNCGRGGHIAKDCKEPKREREQCCYNCGKPGHLARDCDHADEQKCYSCGEFGHIQKDCTKVKCYR

SEQ ID NO: 1026054 - protein, 231 aa, Homo sapiens
MAAALFVLLGFALLGTHGASGAAGTVFTTVEDLGSKILLTCSLNDSATEVTGHRWLKGGVVLKEDALPGQKTEFKVDSDDQWGEYSRAVYPSTGVAMRSTGPKHSTLAPVRSQERETCVSHTSAQDTTIQSRGGARQCTIAQSRAKVHAVHVANTWYNTEDMEALGYERIDLSVFDVTRAARFESVLPEGCKRFFSRRFAPLGAGSRLLQHFEDNLETIGCAQIPQCQCNP

SEQ ID NO: 1026055 - protein, 269 aa, Homo sapiens
MAAALFVLLGFALLGTHGASGAAGTVFTTVEDLGSKILLTCSLNDSATEVTGHRWLKGGVVLKEDALPGQKTEFKVDSDDQWGEYSCVFLPEPMGTANIQLHGPPRVKAVKSSEHINEGETAMLVCKSESVPPVTDWAWYKITDSEDKALMNGSESRFFVSSSQGRSELHIENLNMEADPGQYRCNGTSSKGSDQAIITLRVRSHLAALWPFLGIVAEVLVLVTIIFIYEKRRKPEDVLDDDDAGSAPLKSSGQHQNDKGKNVRQRNSS

SEQ ID NO: 1026056 - protein, 269 aa, Homo sapiens; identical to SEQ ID NO: 1026055

SEQ ID NO: 1026057 - protein, 269 aa, Homo sapiens; identical to SEQ ID NO: 1026055

SEQ ID NO: 1026058 - protein, 269 aa, Homo sapiens; identical to SEQ ID NO: 1026055

SEQ ID NO: 1026059 - protein, 30 aa, Homo sapiens
MAAALFVLLGFALPTTHAPTRPNRGVRLEA

SEQ ID NO: 1026060 - protein, 269 aa, Homo sapiens; identical to SEQ ID NO: 1026055

SEQ ID NO: 1026061 - protein, 202 aa, Homo sapiens
MAAALFVLLGFALLGTHGASGAAGTVFTTVEDLGSKILLTCSLNDSATEVTGHRWLKGGVVLKEDALPGQKTEFKVDSDDQWGEYSCVFLPEPMGTANIQLHGPPRVKAVKSSEHINEGETAMLVCKSESVPPVTDWAWYKITDSEDKALMNGSESRFFVSSSQGRSELHIENLNMEADPGAGAGHHHLHLREAPEARGRPG

SEQ ID NO: 1026062 - protein, 72 aa, Homo sapiens
DPGLGQPDNLLPSQGLFYFIYYLIRSSSPTHGTRNQQSGTFKSTGCFPQFQELVSTCYKLVEKLESGSVFHP

SEQ ID NO: 1026063 - protein, 199 aa, Homo sapiens
KNVRMPLRKNPEFATFIETPSFKGREVPVWPQERNVHTLPYSTPEAGTDPKKCGPTLAMSLKAHCTFFSKFPKVYAERNHALPSETTFLTGTLTHMRVFHVFSLITFICPPEICACHPYARKPSTEELARPRPKRFWKGEATCETPPEGKADHEISSPDRSAVPPWCPTQKDRGWGWVQHTEFPFKRRIWSWTWSSPLQ

SEQ ID NO: 1026064 - protein, 66 aa, Homo sapiens
  misc_feature (8)..(8): Xaa can be any naturally occurring amino acid
  misc_feature (18)..(18): Xaa can be any naturally occurring amino acid
  misc_feature (25)..(25): Xaa can be any naturally occurring amino acid
DDKERSPXRCVSHPPITXHTSGHCXFRTAPDPPESLIPVAPLAEFSSPSYLKHVFQSLAPPSLGIW

SEQ ID NO: 1026065 - protein, 424 aa, Homo sapiens
MDSGPLWDANPTPRGTLSAPNATTPWLGRDEELAKVEIGVLATVLVLATGGNLAVLLTLGQLGRKRSRMHLFVLHLALTDLAVALFQVLPQLLWDITYRFQGPDLLCRAVKYLQVLSMFASTYMLLAMTLDRYLAVCHPLRSLQQPGQSTYLLIAAPWLLAAIFSLPQVFIFSLREVIQGSGVLDCWADFGFPWGPRAYLTWTTLAIFVLPVTMLTACYSLICHEICKNLKVKTQAWRVGGGGWRTWDRPSPSTLAATTRGLPSRVSSINTISRAKIRTVKMTFVIVLAYIACWAPFFSVQMWSVWDKNAPDEDSTNVAFTISMLLGNLNSCCNPWIYMGFNSHLLPRPLRHLACCGGPQPRMRRRLSDGSLSSRHTTLLTRSSCPATLSLSLSLTLSGRPRPEESPRDLELADGEGTAETIIF

SEQ ID NO: 1026066 - protein, 424 aa, Homo sapiens; identical to SEQ ID NO: 1026065

SEQ ID NO: 1026067 - protein, 254 aa, Homo sapiens
GTRCPRRHGAGEAMAPAASRLRAEAGLGALPRRALAQYLLFLRLYPVLTKAATSGIFVSTWELPVPSMIEKKRKKENSRSLDVGGPLRYAVYGFFFTGPLSHFFYFFMEHWIPPEVPLAGLRRLLLDRLVFAPAFLMLFFLIMNFLEGKDASAFAAKMRGGFWPALRMNWRVWTPLQFININYVPLKPGPQDHSHTGRMGCSTPCSMAGYPQMLQEEAWQSLQGPRASLPQKFRVLFANLAALFWYAYLASLGK

SEQ ID NO: 1026068 - protein, 153 aa, Homo sapiens
  misc_feature (27)..(27): Xaa can be any naturally occurring amino acid
  misc_feature (41)..(41): Xaa can be any naturally occurring amino acid
  misc_feature (52)..(52): Xaa can be any naturally occurring amino acid
  misc_feature (84)..(84): Xaa can be any naturally occurring amino acid
PSCPAKEFWAQDRHLLPSMSRLLLAIXLIIFHLAGLLLRVXVLSTHVCCLRXHRTKSNSQFKNHHDEGLGARNSVLMGSETVHXPPSLLLEGKDASAFAAKMRGGFWPALRMNWRVWTPLQFININYVPLKFRVLFANLAALFWYAYLASLGK

SEQ ID NO: 1026069 - protein, 209 aa, Homo sapiens
GTRCPRRHGAGEAMAPAASRLRAEAGLGALPRRALAQYLLFLRLYPVLTKAATSGIFVSTWELPVPSMIEKKRKKENSRSLDVGGPLRYAVYGFFFTGPLSHFFYFFMEHWIPPEVPLAGLRRLLLDRLVFAPAFLMLFFLIMNFLEGKDASAFAAKMRGGFWPALRMNWRVWTPLQFININYVPLKFRVLFANLAALFWYAYLASLGK

SEQ ID NO: 1026070 - protein, 540 aa, Homo sapiens
VYGHGGGGTPAGWLPTFRAHLPGGQAGASVAGPQTSEAFAITVRDVNERPPQPQASVPLRLTRGSRAPISRAQLSVVDPDSAPGEIEYEVQRAPHNGFLSLVGGGLGPVTRFTQADVDSGRLAFVANGSSVAGIFQLSMSDGASPPLPMSLAVDILPSAIEVQLRAPLEVPQALGRSSLSQQQLRVVSDREEPEAAYRLIQGPQYGHLLVGGRPTSAFSQFQIDQGEVVFAFTNFSSSHDHFRVLALARGVNASAVVNVTVRALLHVWAGGPWPQGATLRLDPTVLDAGELANRTGSVPRFRLLEGPRHGRVVRVPRARTEPGGSQLVEQFTQQDLEDGRLGLEVGRPEGRAPGPAGDSLTLELWAQGVPPAVASLDFATEPYNAARPYSVALLSVPEAARTEAGKPESSTPTGEPGPMASSPEPAVAKGGFLSFLEANMFSVIIPMCLVLLLLALILPLLFYLRKRNKTGKHDVQVLTAKPRNGLAGDTETFRKVEPGQAIPLTAVPGQGPPPGGQPDPELLQFCRTPNPALKNGQYWV

SEQ ID NO: 1026071 - protein, 540 aa, Homo sapiens; identical to SEQ ID NO: 1026070

SEQ ID NO: 1026072 - protein, 540 aa, Homo sapiens; identical to SEQ ID NO: 1026070

SEQ ID NO: 1026073 - protein, 540 aa, Homo sapiens; identical to SEQ ID NO: 1026070

SEQ ID NO: 1026074 - protein, 540 aa, Homo sapiens; identical to SEQ ID NO: 1026070

SEQ ID NO: 1026075 - protein, 540 aa, Homo sapiens; identical to SEQ ID NO: 1026070

SEQ ID NO: 1026076 - protein, 540 aa, Homo sapiens; identical to SEQ ID NO: 1026070

SEQ ID NO: 1026077 - protein, 145 aa, Homo sapiens
MTNVPLSVLLMSSAENSEQSNPQATAHAHPDRVAGGFLSFLEANMFSVIIPMCLVLLLLALILPLLFYLRKRNKTGKHDVQVLTAKPRNGLAGDTETFRKVEPGQAIPLTAVPGQGPPPGGQPDPELLQFCRTPNPALKNGQYWV

SEQ ID NO: 1026078 - protein, 93 aa, Homo sapiens
  misc_feature (1)..(1): Xaa can be any naturally occurring amino acid
XSRSEMLFQSGDAGWYTVSAKNEAGIVSCTARLDVYTQWHQQSQSTKPKKVRPSASRYAALSDQGLDIKAAFQPEANPSHLTLNTALVESEDL

SEQ ID NO: 1026079 - protein, 93 aa, Homo sapiens; identical to SEQ ID NO: 1026078
  misc_feature (1)..(1): Xaa can be any naturally occurring amino acid

SEQ ID NO: 1026080 - protein, 93 aa, Homo sapiens; identical to SEQ ID NO: 1026078
  misc_feature (1)..(1): Xaa can be any naturally occurring amino acid

SEQ ID NO: 1026081 - protein, 93 aa, Homo sapiens; identical to SEQ ID NO: 1026078
  misc_feature (1)..(1): Xaa can be any naturally occurring amino acid

SEQ ID NO: 1026082 - protein, 93 aa, Homo sapiens; identical to SEQ ID NO: 1026078
  misc_feature (1)..(1): Xaa can be any naturally occurring amino acid

SEQ ID NO: 1026083 - protein, 93 aa, Homo sapiens; identical to SEQ ID NO: 1026078
  misc_feature (1)..(1): Xaa can be any naturally occurring amino acid

SEQ ID NO: 1026084 - protein, 93 aa, Homo sapiens; identical to SEQ ID NO: 1026078
  misc_feature (1)..(1): Xaa can be any naturally occurring amino acid

SEQ ID NO: 1026085 - protein, 93 aa, Homo sapiens; identical to SEQ ID NO: 1026078
  misc_feature (1)..(1): Xaa can be any naturally occurring amino acid

SEQ ID NO: 1026086 - protein, 93 aa, Homo sapiens; identical to SEQ ID NO: 1026078
  misc_feature (1)..(1): Xaa can be any naturally occurring amino acid

SEQ ID NO: 1026087 - protein, 93 aa, Homo sapiens; identical to SEQ ID NO: 1026078
  misc_feature (1)..(1): Xaa can be any naturally occurring amino acid

SEQ ID NO: 1026088 - protein, 435 aa, Homo sapiens [sequence omitted]

SEQ ID NO: 1026089 - protein, 223 aa, Homo sapiens
MTALSLQADLPAESFTLLRWWCGMHGDECSMISCSLKLIGIKKVQGGALEDSQLVGWCGIQEDVFSYAWRLNCNPKKVPNPKIALLNVELELKAEKDNAEIRVHTVEDYQAIVDAEWNILYDKLEKIHHSGAKVVLSKIPIGDWATQYFADRDDVLCWAEVAEGGSGRGQMMGCLSGQMQEPVLKCVCTGDCAGDDGQLFEKNRDWTGEEKILMGGRKGKRRR

SEQ ID NO: 1026090 - protein, 156 aa, Homo sapiens
MTALSLQADLPAESFTLLRWWCGMHGDECSMISCSLKLIGIKKVQGGALEDSQLVGWCGIQEDVFSYAWRLNCNPKKVPNPKIALLNVELELKAEKDNAEIRVHTVEDYQAIVDAEWNILYDKLEKIHHSGARHSKGQSWDCGTFWVAFQTQRKRK

SEQ ID NO: 1026091 - protein, 151 aa, Homo sapiens
  misc_feature (143)..(143): Xaa can be any naturally occurring amino acid
MTALSLQADLPAESFTLLRWWCGMHGDECSMISCSLKLIGIKKVQGGALEDSQLVGWCGIQEDVFSYAWRLNCNPKKVPNPKIALLNVELELKAEKDNAEIRVHTVEDYQAIVDAEWNILYDKLEKIHHSGAKCCLVQDSHMXICGHRSTL

SEQ ID NO: 1026092 - protein, 73 aa, Homo sapiens
GFKIVKVPDAYLGGKQAIFAPDNVGRVFVGISTMRTIDAVDFDGVELQGAGKDGIYIPDDNHKAIFFVNTPAK

SEQ ID NO: 1026093 - protein, 258 aa, Homo sapiens
  misc_feature (10)..(10): Xaa can be any naturally occurring amino acid
  misc_feature (13)..(13): Xaa can be any naturally occurring amino acid
  misc_feature (18)..(18): Xaa can be any naturally occurring amino acid
  misc_feature (21)..(21): Xaa can be any naturally occurring amino acid
  misc_feature (23)..(23): Xaa can be any naturally occurring amino acid
  misc_feature (39)..(39): Xaa can be any naturally occurring amino acid
  misc_feature (44)..(45): Xaa can be any naturally occurring amino acid
  misc_feature (56)..(56): Xaa can be any naturally occurring amino acid
  misc_feature (105)..(105): Xaa can be any naturally occurring amino acid
  misc_feature (143)..(143): Xaa can be any naturally occurring amino acid
  misc_feature (172)..(172): Xaa can be any naturally occurring amino acid
MYTHHALHHXTTXSNVKXDIXPXMRRQAALGSRGSELKXVSSHXXHVGEGLCSGRXPCLQPHYLPMTDPFPITQGPSLAQMDAYSSVYCQACGCGCMWVFTHMPXGMRDCLCVHACTATCLPMCLSGNVYHLCACSCVLLDSXNPFSPVLHSNDNSSLTPKPKGKTSSRSNXSALTDTSTLRATILHCLQILPTMTDVPEVFGFTTLPNPPLLFSEGPSQGYIPPPQFSLREINLPEINQGRCVSKGHGPPWQGWGFY

SEQ ID NO: 1026094 - protein, 195 aa, Homo sapiens
AIYLPGLLYLSLTISLTMKRHLPGLLYLSLTISLTMKCHLSAWPPLSLTHDLTHDEAPSARPPLSLTHDLTHDEAPSARPPLTLTHDLTHDEVPSICLASSISHSRSHYTMKRHLSARPPLTLTHDLTHDEAPSICPASSTLTHDLTHDEVPSARPPLSLTHDLTHDEVPSICPASSNSHSRSHSRRSAIYLPGL

SEQ ID NO: 1026095 - protein, 241 aa, Homo sapiens
ELQPPGTRDPAPPLITPATPQLSAAPDAMDPALAAQMSEAVAEKMLQYRRDTAGWKICREGNGVSVSWRPSVEFPGNLYRGEGIVYGTLEEVWDCVKPAVGGLRVKWDENVTGFEIIQSITDTLCVSRTSTPSAAMKLISPRDFVDLVLVKRYEDGTISSNATHVEHPLCPPKPGFVRGFNHPCGCFCEPLPGEPTKTNLVTFFHTDLSGYLPQNVVDSFFPRSMTRFYANLQKAVKQFHE

SEQ ID NO: 1026096 - protein, 106 aa, Homo sapiens
MKLISPRDFVDLVLVKRYEDGTISSNATHVEHPLCPPKPGFVRGFNHPCGCFCEPLPGEPTKTNLVTFFHTDLSGYLPQNVVDSFFPRSMTRFYANLQKAVKQFHE

SEQ ID NO: 1026097 - protein, 133 aa, Homo sapiens
  misc_feature (18)..(18): Xaa can be any naturally occurring amino acid
GEYGTCFRPWRHGRGCGXASPTGWVSILKISRSREDSWVEGTARDETRSLYHGHFHWAGLCLPAWRSSPAPLLQIITQLCCCLHREPTKTNLVTFFHTDLSGYLPQNVVDSFFPRSMTRFYANLQKAVKQFHE

SEQ ID NO: 1026098 - protein, 106 aa, Homo sapiens; identical to SEQ ID NO: 1026096

SEQ ID NO: 1026099 - protein, 106 aa, Homo sapiens; identical to SEQ ID NO: 1026096

SEQ ID NO: 1026100 - protein, 241 aa, Homo sapiens; identical to SEQ ID NO: 1026095

SEQ ID NO: 1026101 - protein, 113 aa, Homo sapiens
  misc_feature (18)..(18): Xaa can be any naturally occurring amino acid
  misc_feature (21)..(21): Xaa can be any naturally occurring amino acid
SFQTLATLSKMYLFCTRXIQXFSSSVVTKPSPSLSIRSTIFPSLSLLSSGVSSSKFLESSLPRKASWSYWKLWLSSGGRLPSSESGRTHGSLRTVGLARRTRAPAPAPAAAQG

SEQ ID NO: 1026102 - protein, 178 aa, Homo sapiens
RGAGGTRSGAGTHPLAARVLDRFAQEVSSRDGKGDLGEPPPTRPTVGTNLTDIVAQRKITIRELGGCMGPIWSSYYGNCRSLLFVMDASDPTQLSASCVQLLGLLSAEQLAEASVLILFNKIDLPCYMSTEEMKSLIRLPDIIACAKQNITTAEISAREGTGLAGVLAWLQATHRAND

SEQ ID NO: 1026103 - protein, 190 aa, Homo sapiens
ALSRGAELRVPGGAKHGMCLLLGATGVGKTLLVKRLQEVSSRDGKGDLGEPPPTRPTVGTNLTDIVAQRKITIRELGGCMGPIWSSYYGNCRSLLFVMDASDPTQLSASCVQLLGLLSAEQLAEASVLILFNKIDLPCYMSTEEMKSLIRLPDIIACAKQNITTAEISAREGTGLAGVLAWLQATHRAND

SEQ ID NO: 1026104 - protein, 77 aa, Homo sapiens
RGAGGTRSGAGTHPLAARVLDRFAQVGTNLTDIVAQRKITIRELGGCMGPIWSSYYGNCRSLLGLCRGYQYGELMAT

SEQ ID NO: 1026105 - protein, 109 aa, Homo sapiens
ALSRGAELRVPGGAKHGMCLLLGATGVGKTLLVKRLQEVSSRDGKGDLGEPPPTRPTVGTNLTDIVAQRKITIRELGGCMGPIWSSYYGNCRSLLGLCRGYQYGELMAT

SEQ ID NO: 1026106 - protein, 169 aa, Homo sapiens
ALSRGAELRVPGGAKHGMCLLLGATGVGKTLLVKRLQEVSSRDGKGDLGEPPPTRPTVGTNLTDIVAQRKITIRELGGCMGPIWSSYYGNCRSLLVGCNPIWASFREVCLHFCDVQSPTLLCVERGLGYLVTILLMEIGLSYCCFLLGTLSGFWCLRSQAPGRSSQRAC

SEQ ID NO: 1026107 - protein, 77 aa, Homo sapiens; identical to SEQ ID NO: 1026104

SEQ ID NO: 1026108 - protein, 305 aa, Homo sapiens
PSGPWAPARAGAGASGMAFRQALQLAACGLAGGSAAVLFSAVAVGKPRAGGDAEPRPAEPPAWAGGARPGPGVWDPNWDRREPLSLINVRKRNVESGEEELASKLDHYKAKATRHIFLIRHSQYHVDGSLEKDRTLTPLGREQAELTGLRLASLGLKFNKIVHSSMTRAIETTDIISRHLPGVCKVSTDLLREGAPIEPDPPVSHWKPEAVQYYEDGARIEAAFRNYIHRADARQEEDSYEIFICHANVIRYIVCRALQFPPEGWLRLSLNNGSITHLVIRPNGRVALRTLGDTGFMPPDKITRS

SEQ ID NO: 1026109 - protein, 264 aa, Homo sapiens
EYTSACSSQIVNNLEITSCRKTQTWEQRSQGHILYFNIRREPLSLINVRKRNVESGEEELASKLDHYKAKATRHIFLIRHSQYHVDGSLEKDRTLTPLGREQAELTGLRLASLGLKFNKIVHSSMTRAIETTDIISRHLPGVCKVSTDLLREGAPIEPDPPVSHWKPEAVQYYEDGARIEAAFRNYIHRADARQEEDSYEIFICHANVIRYIVCRALQFPPEGWLRLSLNNGSITHLVIRPNGRVALRTLGDTGFMPPDKITRS

SEQ ID NO: 1026110 - protein, 232 aa, Homo sapiens
PSGPWAPARAGAGASGMAFRQALQLAACGLAGGSAAVLFSAVAVGKPRAGGDAEPRPAEPPAWAGGARPGPGVWDPNWDRREPLSLINVRKRNVESGEEELASKLDHYKAKATRHIFLIRHSQYHVDGSLEKDRTLTPLGREQAELTGLRLASLGLKFNKIVHSSMTRAIETTDIISRHLPAVLRRRSPDRGRLPELHPPRRCQAGGGQLRDLHLSRQRHPLHRVQSTAVSS

SEQ ID NO: 1026111 - protein, 305 aa, Homo sapiens; identical to SEQ ID NO: 1026108

SEQ ID NO: 1026112 - protein, 305 aa, Homo sapiens; identical to SEQ ID NO: 1026108

SEQ ID NO: 1026113 - protein, 305 aa, Homo sapiens; identical to SEQ ID NO: 1026108

SEQ ID NO: 1026114 - protein, 255 aa, Homo sapiens
MAFRQALQLAACGLAGGSAAVLFSAVAVGKPRAGGDAEPRPAEPPAWAGGARPGPGVWDPNWDRREPLSLINVRKRNVESGEEELASKLDHYKAKATRHIFLIRHSQYHVDGSLEKDRTLTPLGREQAELTGLRLASLGLKFNKIVHSSMTRAIETTDIISRHLPGVCKVSTDLLREGAPIEPDPPVSHWKPEAVQYYEDGARIEAAFRNYIHRADARQEEDSYEIFICHANVIRYIVCSIPPLLSAGDFVVLGS

SEQ ID NO: 1026115 - protein, 305 aa, Homo sapiens; identical to SEQ ID NO: 1026108

SEQ ID NO: 1026116 - protein, 305 aa, Homo sapiens; identical to SEQ ID NO: 1026108

SEQ ID NO: 1026117 - protein, 305 aa, Homo sapiens; identical to SEQ ID NO: 1026108

SEQ ID NO: 1026118 - protein, 305 aa, Homo sapiens; identical to SEQ ID NO: 1026108

SEQ ID NO: 1026119 - protein, 305 aa, Homo sapiens; identical to SEQ ID NO: 1026108

SEQ ID NO: 1026120 - protein, 255 aa, Homo sapiens; identical to SEQ ID NO: 1026114

SEQ ID NO: 1026121 - protein, 546 aa, Homo sapiens
HVLIIHERIHTGEKPYECNECQKAFNTKSNLMVHQRTHTGEKPYVCSDCGKAFTFKSQLIVHQGIHTGVKPYGCIQCGKGFSLKSQLIVHQRSHTGMKPYVCNECGKAFRSKSYLIIHTRTHTGEKLHECNNCGKAFSFKSQLIIHQRIHTGENPYECHECGKAFSRKYQLISHQRTHAGEKPYECTDCGKAFGLKSQLIIHQRTHTGEKPFECSECQKAFNTKSNLIVHQRTHTGEKPYSCNECGKAFTFKSQLIVHKGVHTGVKPYGCSQCAKTFSLKSQLIVHQRSHTGVKPYGCSECGKAFRSKSYLIIHMRTHTGEKPHECRECGKSFSFNSQLIVHQRIHTGENPYECSECGKAFNRKDQLISHQRTHAGEKPYGCSECGKAFSSKSYLIIHMRTHSGEKPYECNECGKAFIFGNHYSLYMSELMQGSTLINAVNVRNPSVGNYAFLYTRECTQERKPYECSECGKKPFIRNSQLIVHQRTHSGEKPYGCNECGKTFSQKSILSAHQRTHTGEKPCKCTECGNSLLLEVTAHYASENSCR

SEQ ID NO: 1026122 - protein, 527 aa, Homo sapiens
MLIIHERIHTGEKPYECNECQKAFNTKSNLMVHQRTHTGEKPYVCSDCGKAFTFKSQLIVHQGIHTGVKPYGCIQCGKGFSLKSQLIVHQRSHTGMKPYVCNECGKAFRSKSYLIIHTRTHTGDIIHQRIHTGENPYECHECGKAFSRKYQLISHQRTHAGEKPYECTDCGKAFGLKSQLIIHQRTHTGEKPFECSECQKAFNTKSNLIVHQRTHTGEKPYSCNECGKAFTFKSQLIVHKGVHTGVKPYGCSQCAKTFSLKSQLIVHQRSHTGVKPYGCSECGKAFRSKSYLIIHMRTHTGEKPHECRECGKSFSFNSQLIVHQRIHTGENPYECSECGKAFNRKDQLISHQRTHAGEKPYGCSECGKAFSSKSYLIIHMRTHSGEKPYECNECGKAFILGNHYSLYMSELMQGSTLINAVNVRNPSVGNYAFLYTRECTQERKPYECSECGKKPFIRNSQLIVHQRTHSGEKPYGCNECGKTFSQKSILSAHQRTHTGEKPCKCTECGNSLLLEVTAHYASENSCR

SEQ ID NO: 1026123 - protein, 546 aa, Homo sapiens; identical to SEQ ID NO: 1026121

SEQ ID NO: 1026124 - protein, 179 aa, Homo sapiens
MQVTGPARPFHRLRPPDTHPRGSVHAAGVLDGLASGRPGLLGAPAPAPALTQHPSLPQGAGALPAGRRRPDRPRPAPPWPLSPRPSHLPSRVSAAPPPAGSRGLLETQDTSGFASPGRRPRDRRPARLVRVRVRTPMARLVVTTAAAATAESASAATVMRGMSGDTPSTVALALYSKGE

SEQ ID NO: 1026125 - protein, 82 aa, Homo sapiens
LFLMAAAMAGQEDPVQREIHQDWANREYIEIITSSIKKIADFLNSFDMSCRSRLATLNEKLTALERRIEYIEARVTKGETLT

SEQ ID NO: 1026126 - protein, 240 aa, Homo sapiens
MSILKIHAREIFDSRGNPTVEVDLFTSKGLFRAAVPSGASTGIYEALELRDNDKTRYMGKGVSKAVEHINKTIAPALVSKKLNVTEQEKIDKLMIEMDGTENKSKFGANAILGVSLAVCKAGAVEKGVPLYRHIADLAGNSEVILPVPAFNVINGGSHAGNKLAMQEFMILPVGAANFREAMRIGAEVYHNLKNVIKEKYGKDATNVGDEGGFAPNILENKEGLELLKTAIGKAATLTTP

SEQ ID NO: 1026127 - protein, 403 aa, Homo sapiens
  misc_feature (78)..(78): Xaa can be any naturally occurring amino acid
  misc_feature (80)..(81): Xaa can be any naturally occurring amino acid
  misc_feature (83)..(83): Xaa can be any naturally occurring amino acid
MDAALLLGDFPLLPPPGSAREIFDSRGNPTVEVDLFTSKGLFRAAVPSGASTGIYEALELRDNDKTRYMGKGVSKRAXLXXHXFKLKTLFGALAALVSKKLNVTEQEKIDKLMIEMDGTENKSKFGANAILGVSLAVCKAGAVEKGVPLYRHIADLAGNSEVILPVPAFNVINGGSHAGNKLAMQEFMILPVGAANFREAMRIGAEVYHNLKNVIKEKYGKDATNVGDEGGFAPNILENKEGLELLKTAIGKAGYTDKVVIGMDVAASEFFRSGKYDLDFRSPDDPQQVHLGLTQLADLYQVPSFTRTTQWMSIDRSLDQRVTGELGEKFTSPDAGIQVVGDDLTVTNQKRIDKAVNEKSCNGSCSSQPDSLRNESASGVRVASQGWGARGLIAGRRNTKDRV

SEQ ID NO: 1026128 - protein, 125 aa, Homo sapiens
MSILKIHAREIFDSRGNPTVEVDLFTSKGLFRAAVPSGASTGIYEALELRDNDKTRYMGKGVSKAVEHINKTIAPALVSKKLNVTEQEKIDKLMIEMDGTENKSKFGANAILGVSLAVCNLRLPG

SEQ ID NO: 1026129 - protein, 384 aa, Homo sapiens
MSILKIHAREIFDSRGNPTVEVDLFTSKGLFRAAVPSGASTGIYEALELRDNDKTRYMGKGVSKAVEHINKTIAPALVSKKLNVTEQEKIDKLMIEMDGTENKSKFGANAILGVSLAVCKAGAVEKGVPLYRHIADLAGNSEVILPVPAFNVINGGSHAGNKLAMQEFMILPVGAANFREAMRIGAEVYHNLKNVIKEKYGKDATNVGDEGGFAPNILENKEGLELLKTAIGKAGYTDKVVIGMDVAASEFFRSGKYDLDFRSPDDPQQVHLGLTQLADLYQVPSFTRTTQWMSIDRSLDQRVTGELGEKFTSPDAGIQVVGDDLTVTNQKRIDKAWNEKSCNGSCSSQPDSLRNESASGVRVASQGWGARGLIAGRRNTKDRV

SEQ ID NO: 1026130 - protein, 395 aa, Homo sapiens
MDAALLLGDFPLLPPPGSAREIFDSRGNPTVEVDLFTSKGLFRAAVPSGASTGIYEALELRDNDKTRYMGKGVSKAVEHINKTIAPALVSKKLNVTEQEKIDKLMIEMDGTENKSKFGANAILGVSLAVCKAGAVEKGVPLYRHIADLAGNSEVILPVPAFNVINGGSHAGNKLAMQEFMILPVGAANFREAMRIGAEVYHNLKNVIKEKYGKDATNVGDEGGFAPNILENKEGLELLKTAIGKAGYTDKVVIGMDVAASEFFRSGKYDLDFRSPDDPQQVHLGLTQLADLYQVPSFTRTTQWMSIDRSLDQRVTGELGEKFTSPDAGIQVVGDDLTVTNQKRIDKAWNREVLHWLLLKSPDSLRNESASGVRVASQGWGARGLIAGRRNTKDRV

SEQ ID NO: 1026131 - protein, 384 aa, Homo sapiens
MSILKIHAREIFDSRGNPTVEVDLFTSKGLFRAAVPSGASTGIYEALELRDNDKTRYMGKGVSKAVEHINKTIAPALVSKKLNVTEQEKIDKLMIEMDGTENKSKFGANRLAERVPCRLRAGAVEKGVPLYRHIADLAGNSEVILPVPAFNVINGGSHAGNKLAMQEFMILPVGAANFREAMRIGAEVYHNLKNVIKEKYGKDATNVGDEGGFAPNILENKEGLELLKTAIGKAGYTDKVVIGMDVAASEFFRSGKYDLDFRSPDDPQQVHLGLTQLADLYQVPSFTRTTQWMSIDRSLDQRVTGELGEKFTSPDAGIQVVGDDLTVTNQKRIDKAWNEKSCNGSCSSQPDSLRNESASGVRVASQGWGARGLIAGRRNTKDRV

SEQ ID NO: 1026132 - protein, 436 aa, Homo sapiens
WHEGRSPARARLQPQPDPASTEAERRTPYPGSIGAPAGEGKVPGLVIYLLWPWQNQDEALSCLPSEAYSLSRQHGLPLAVNTMSAGGGRAFAWQVFPPMPTCRVYGTVAHQDGHLLVLGGCGRAGLPLDTAETLDMASHTWLALAPLPTARAGAAAVVLGKQVLVVGGVDEVQSPVAAVEAFLMDEGRWERRATLPQAAMGVATVERDGMVYALGGMGPDTAPQAQVRVYEPRRDCWLSLPSMPTPCYGASTFLHGNKIYVLGGRQGKLPVTAFEAFDLEARTWTRHPSLPSRRAFAGCAMAEGSVFSLGGLQQPGPHNFYSRPHFVNTVEMFDLEHGSWTKLPRSLRMRDKRADFVVGSLGGHIVAIGGLGNQPCPLGSVESFSLARRRWEALPAMPTARCSCSSLQAGPRLFVIGGVAQGPSQAVEALCLRDGV

SEQ ID NO: 1026133 - protein, 227 aa, Homo sapiens
MVYALGGMGPDTAPQAQVRVYEPRRDCWLSLPSMPTPCYGASTFLHGNKIYVLGGRQGKLPVTAFEAFDLEARTWTRHPSLPSRRAFAGCAMAEGSVFSLGGLQQPGPHNFYSRPHFVNTVEMFDLEHGSWTKLPRSLRMRDKRADFVVGSLGGHIVAIGGLGNQPCPLGSVESFSLARRRWEALPAMPTARCSCSSLQAGPRLFVIGGVAQGPSQAVEALCLRDGV

SEQ ID NO: 1026134 - protein, 443 aa, Homo sapiens
WHEGRSPARARLQPQPDPASTEAERRTPYPGSIGAPAGEGKVPGLVIYLLWPWQNQDEALSCLPSEAYSLSRQHGLPLAVNTMSAGGGRAFAWQVFPPMPTCRVYGTVAHQDGHLLVLGGCGRAGLPLDTAETLDMASHTWLALAPLPTARAGAAAVVLGKQVLVVGGVDEVQSPVAAVEAFLMDEGRWERRATLPQAAMGVATVERDGMVYALGGMGPDTAPQAQVRVYEPRRDCWLSLPSMPTPCYGASTFLHGNKIYVLGTPIPLTGGRQGKLPVTAFEAFDLEARTWTRHPSLPSRRAFAGCAMAEGSVFSLGGLQQPGPHNFYSRPHFVNTVEMFDLEHGSWTKLPRSLRMRDKRADFVVGSLGGHIVAIGGLGNQPCPLGSVESFSLARRRWEALPAMPTARCSCSSLQAGPRLFVIGGVAQGPSQAVEALCLRDGV

SEQ ID NO: 1026135 - protein, 402 aa, Homo sapiens
WHEGRSPARARLQPQPDPASTEAERRTPYPGSIGAPAGEGKVPGLVIYLLWPWQNQDEALSCLPSEAYSLSRQHGLPLAVNTMSAGGGRAFAWQVFPPMPTCRVYGTVAHQDGHLLVLGGCGRAGLPLDTAETLDMASHTWLALAPLPTARAGAAAVVLGKQVLVVGGVDEVQSPVAAVEAFLMDEGRWERRATLPQAAMGVATVERDGMVYALGGMGPDTAPQAQVRVYEPRRDCWLSLPSMPTPCYGASTFLHGNKIYVLGGRQGKLPVTAFEAFDLEARTWTRHPSLPSRRAFAGCAMAEGSVFSLGGLQQPGPHNFYSRPHFVNTVEMFDLEHGNQPCPLGSVESFSLARRRWEALPAMPTARCSCSSLQAGPRLFVIGGVAQGPSQAVEALCLRDGV

SEQ ID NO: 1026136 - protein, 359 aa, Homo sapiens
WHEGRSPARARLQPQPDPASTEAERRTPYPGSIGAPAGEGKVPGLVIYLLWPWQNQDEALSCLPSEAYSLSRQHGLPLAVNTMSAGGGRAFAWQVFPPMPTCRVYGTVAHQDGHLLVLGGCGRAGLPLDTAETLDMASHTWLALAPLPTARAGAAAVVLGKQVLVVGGVDEVQSPVAAVEAFLMDEGRWERRATLPQAAMGVATVERDGMVYALGGMGPDTAPQAQVRVYEPRRDCWLSLPSMPTPCYGASTFLHGNKIYVLGGRQGKLPVTAFEAFDLEARTWTRHPSLPSRRAFAGCAMAEGSVFSLGGLQQPGPHNFYSRPHFVNTVEMFDLEHGEQWLFWAVLPLSVGWRGIVCT

SEQ ID NO: 1026137 - protein, 359 aa, Homo sapiens; identical to SEQ ID NO: 1026136

SEQ ID NO: 1026138 - protein, 266 aa, Homo sapiens
GTRAGAPPEPDFSPSQIPRQRRRNGGPRTLAASEHRRDGMVYALGGMGPDTAPQAQVRVYEPRRDCWLSLPSMPTPCYGASTFLHGNKIYVLGGRQGKLPVTAFEAFDLEARTWTRHPSLPSRRAFAGCAMAEGSVFSLGGLQQPGPHNFYSRPHFVNTVEMFDLEHGSWTKLPRSLRMRDKRADFVVGSLGGHIVAIGGLGNQPCPLGSVESFSLARRRWEALPAMPTARCSCSSLQAGPRLFVIGGVAQGPSQAVEALCLRDGV

SEQ ID NO: 1026139 - protein, 436 aa, Homo sapiens; identical to SEQ ID NO: 1026132

SEQ ID NO: 1026140 - protein, 182 aa, Homo sapiens
MKSFLLVVNALALTLPFLAVEVQNQKQPACHENDERPFYQKTAPYVPMYYVPNSYPYYGTNLYQRRPAIAINNPCVPRTYYANPAVVRPHAQIPQRQYLPNSHPPTVVRRPNLHPSFIAIPPKKIQDKIIIPTINTIATVEPTPAPATEPTVDSVVTPEAFSESIITSTPETTTVAVTPPTA

SEQ ID NO: 1026141 - protein, 182 aa, Homo sapiens
MKSFLLVVNALALTLPFLAVEVQNQKQPACHENDERPFYQKTAPYVPMYYVPNSYPYYGTNLYQRRPAIAINNPYVPRTYYANPAVVRPHAQIPQRQYLPNSHPPTVVRRPNLHPSFIAIPPKKIQDKIIIPTINTIATVEPTPTPATEPTVDSVVTPEAFSESIITSTPETTTVAVTPPTA

SEQ ID NO: 1026142 - protein, 44 aa, Homo sapiens
MSQQLGAQPRPNLVERRNIRCSRRNLIIYERGQLTGLHFSKPIL

SEQ ID NO: 1026143 - protein, 93 aa, Homo sapiens
RPAYPYCVSSGLRDCKRASLKRSGLWAAEPPGILTAEQEAEVRVQDGLKMSQQLGAQPRPNLVERRNIRCSRRNLIIYERGQLTGLHFSKPIL

SEQ ID NO: 1026144 - protein, 1230 aa, Homo sapiens
MDPAAPWLFWEAAAPALKRPWLLMVAPRLPAGARDSGQFPRKGQAGSPSRGRVRKLGGAEATLGPRTPCLVTVQLLKSTDVGRHSLLYLKEIGRGWFGKVFLGEVNSGISSAQVVVKELQASASVQEQMQFLEEVQPYRALKHSNLLQCLAQCAEVTPYLLVMEFCPLGDLKGYLRSCRVAESMAPDPRTLQRMACEVACGVLHLHRNNFVHSDLALRNCLLTADLTVKIGDYGLAHCKYREDYFVTADQLWVPLRWIAPELVDEVHSNLLVVDQTKSGNVWSLGVTIWELFELGTQPYPQHSDQQVLAYTVREQQLKLPKPQLQLTLSDRWYEVMQFCWLQPEQRPTAEEVHLLLSYLCAKGATEAEEEFERRWRSLRPGGGGVGPGPGAAGPMLGGVVELAAASSFPLLEQFAGDGFHADGDDVLTVTETSRGLNFEYKWEAGRGAEAFPATLSPGRTARLQELCAPDGAPPGVVPVLSAHSPSLGSEYFIRLEEAAPAAGHDPDCAGCAPSPPATADQDDDSDGSTAASLAMEPLLGHGPPVDVPWGRGDHYPRRSLARDPLCPSRSPSPSAGPLSLAEGGAEDADWGVAAFCPAFFEDPLGTSPLGSSGAPPLPLTGEDELEEVGARRAAQRGHWRSNVSANNNSGSRCPESWDPVSAGCHAEGCPSPKQTPRASPEPGYPGEPLLGLQAASAQEPGCCPGLPHLCSAQGLAPAPCLVTPSWTETASSGGDHPQAEPKLATEAEGTTGPRLPLPSVPSPSQEGAPLPSEEASAPDAPDALPDSPTPATGGEVSAIKLASALNGSSSSPEVEAPSSEDEDTAEATSGIFTDTSSDGLQARRPDVVPAFRSLQKQVGTPDSLDSLDIPSSASDGGYEVFSPSATGPSGGQPRALDSGYDTENYESPEFVLKEAQEGCEPQAFAELASEGEGPGPETRLSTSLSGLNEKNPYRDSAYFSDLEAEAEATSGPEKKCGGDRAPGPELGLPSTGQPSEQVCLRPGVSGEAQGSGPGEVLPPLLQLEGSSPEPSTCPSGLVPEPPEPQGPAKVRPGPSPSCSQFFLLTPVPLRSEGNSSEFQGPPGLLSGPAPQKRMGGPGTPRAPLRLALPGLPAALEGRPEEEEEDSEDSDESDEELRCYSVQEPSEDSEEEAPAVPVVVAESQSARNLRSLLKMPSLLSETFCEDLERKKKAVSFFDDVTVYLFDQVGRRHPGSARGWGSRSRRKGWERP

SEQ ID NO: 1026145 - protein, 95 aa, Homo sapiens
RDGGQVGVAGEAALVSQNPVFTCCPACQDLKLVPGVRVKRLETWAAPAPQGWRHRSPCQAAARMVTEKVGTTSWWLLAADSGASAPRGVLEKPVG

SEQ ID NO: 1026146 - protein, 1335 aa, Homo sapiens
MDPAAPWLFWEAAAPALKRPWLLMVAPRLPAGARDSGQFPRKGQAGSPSRGRVRKLGGAEATLGPRTPCLVTVQLLKSTDVGRHSLLYLKEIGRGWFGKVFLGEVNSGISSAQVVVKELQASASVQEQMQFLEEVQPYRALKHSNLLQCLAQCAEVTPYLLVMEFCPLGDLKGYLRSCRVAESMAPDPRTLQRMACEVACGVLHLHRNNFVHSDLALRNCLLTADLTVKIGDYGLAHCKYREDYFVTADQLWVPLRWIAPELVDEVHSNLLVVDQTKSGNVWSLGVTIWELFELGTQPYPQHSDQQVLAYTVREQQLKLPKPQLQLTLSDRWYEVMQFCWLQPEQRPTAEEVHLLLSYLCAKGATEAEEEFERRWRSLRPGGGGVGPGPGAAGPMLGGVVELAAASSFPLLEQFAGDGFHADGDDVLTVTETSRGLNFEYKWEAGRGAEAFPATLSPGRTARLQELCAPDGAPPGVVPVLSAHSPSLGSEYFIRLEEAAPAAGHDPDCAGCAPSPPATADQDDDSDGSTAASLAMEPLLGHGPPVDVPWGRGDHYPRRSLARDPLCPSRSPSPSAGPLSLAEGGAEDADWGVAAFCPAFFEDPLGTSPLGSSGAPPLPLTGEDELEEVGARRAAQRGHWRSNVSANNNSGSRCPESWDPVSAGCHAEGCPSPKQTPRASPEPGYPGEPLLGLQAASAQEPGCCPGLPHLCSAQGLAPAPCLVTPSWTETASSGGDHPQAEPKLATEAEGTTGPRLPLPSVPSPSQEGAPLPSEEASAPDAPDALPDSPTPATGGEVSAIKLASALNGSSSSPEVEAPSSEDEDTAEATSGIFTDTSSDGLQARRPDVVPAFRSLQKQVGTPDSLDSLDIPSSASDGGYEVFSPSATGPSGGQPRALDSGYDTENYESPEFVLKEAQEGCEPQAFAELASEGEGPGPETRLSTSLSGLNEKNPYRDSAYFSDLEAEAEATSGPEKKCGGDRAPGPELGLPSTGQPSEQVCLRPGVSGEAQGSGPGEVLPPLLQLEGSSPEPSTCPSGLVPEPPEPQGPAKVRPGPSPSCSQFFLLTPVPLRSEGNSSEFQGPPGLLSGPAPQKRMGGPGTPRAPLRLALPGLPAALEGRPEEEEEDSEDSDESDEELRCYSVQEPSEDSEEEAPAVPVVVAESQSARNLRSLLKMPSLLSETFCEDLERKKKAVSFFDDVTVYLFDQESPTRELGEPFPGAKESPPTFLRGSPGSPSAPNRPQQADGSPNGSTAEEGGGFAWDDDFPLMTAKAAFAMALDPAAPAPAAPTPTPAPFSRFTVSPAPTSRFSITHVSDSDAESKRGPEAGAGGESKEA

SEQ ID NO: 1026147 - protein, 105 aa, Homo sapiens
VFSAGGSAFATQVKPAAEIIPPAIMLPIISAIFFISLNLGYWLTLISCNKERLPCVDKIKRHFVAGFNFTHFRLRGDGKAHGHLRPVHGSNRIVMDGDLFCFPDR

SEQ ID NO: 1026148 - protein, 141 aa, Homo sapiens
MGPKGRTVIIEQSWGSPKVTKDGVTVAKSIDLKDKYKNIGAKLVQDVANNTNEEAGDGTTTATVLARSIAKEGFEKISKGANPVENRRGVMLAVDAVIFELNSSLNCDHPLKKLHRLLRISAKEKKNIGISSLIDEKVGER

SEQ ID NO: 1026149 - protein, 104 aa, Homo sapiens
MGQEFGSQPPHVLMPRVFRQVELKSQEAPSLQQQPDQYAGAPVPQGAWMCGQAGWTPQEHPGLSGEAVGTGEAAGGAGEAACHSFRAAENRELNIPSSKSGSRN

SEQ ID NO: 1026150 - protein, 163 aa, Homo sapiens
TGYSPGSGNHQKWLESVGRQLQAEVENNQMLSLLNRRQEERLHEQEERLHEQEERLREQEERLCEQEERLREHEERLCEQEERLREQEERLCEQEERLREQEERLCEQEERLREQEERLCEQEKLPGQERLLEEVEKLLVQERRQEEQERLHAILFGLRRTGS

SEQ ID NO: 1026151 - protein, 155 aa, Homo sapiens
STTTTKFAAGSTERLCEQEERLHEQEERLHEQEERLREQEERLCEQEERLREHEERLCEQEERLREQEERLCEQEERLREQEERLCEQEERLREQEERLCEQEKLPGQERLLEEVEKLLVQERRQEEQERLLERERLLEEVEKLLEQERSQARAR

SEQ ID NO: 1026152 - protein, 218 aa, Homo sapiens
STTTTKFAAGSTERLCDLLNRRQEERLREQEERLREQEERQREQEDRLHEQEERLREQEERLCEQEERLCEQEERLREHEERLCEQEERLCEQEERLHEQEERLHEQEERLREQEERLCEQEERLREHEERLCEQEERLREQEERLCEQEERLREQEERLCEQEERLREQEERLCEQEKLPGQERLLEEVEKLLVQERRQEEQERLHAILFGLRRTGS

SEQ ID NO: 1026153 - protein, 273 aa, Homo sapiens
AQMVWGAPAVTEHPTPSAWLMLSSFKEALSAALWRRGVRLQGPEWFQSLKPEAGQGSGELARGEWCKAGVRKPHAFSRLQKLLLAWGSEGLGQTASWPPVVSPIPGFLDWVPKKMQRVGCVELLNTVQRRVQPRLHVFGHIHEGYGVMADGTTTYVNASVCTVNYQPVNPPIVIDLPTPRKLLTAPHCPCPARPCQLHRPGPATGSFHAELPGRPIWLRGTGLAGRSGPWNDSLGLLSPGVGTLRIPIRGYLCSFNFIPGVLTSCVYLVQRTY

SEQ ID NO: 1026154 - protein, 184 aa, Homo sapiens
RIREGVDILITHGPPLGFLDWVPKKMQRVGCVELLNTVQRRVQPRLHVFGHIHEGYGVMADGTTTYVNASVCTVNYQPVNPPIVIDLPTPRKLLTAPHCPCPARPCQLHRPGPATGSFHAELPGRPIWLRGTGLAGRSGPWNDSLGLLSPGVGTLRIPIRGYLCSFNFIPGVLTSCVYLVQRTY

SEQ ID NO: 1026155 - protein, 68 aa, Homo sapiens
RQSEGETLASPSSHPALSPMGHTQLQPVAWGGPCHAGVCKAGPGPGKDGGSSTQVAMLSGYWADTAHN

SEQ ID NO: 1026156 - protein, 106 aa, Homo sapiens
MFQPLSSKVLPQGPGMVAHTCNPNPLGGQSKQITRSGNWDHPGQHGEIPSVLKVQKLAECGSVCLWSQLLGRLRQEDCLSPGGGGCSESRLAIAAQPGYRSESVSQ

SEQ ID NO: 1026157 - protein, 73 aa, Homo sapiens
  misc_feature (40)..(40): Xaa can be any naturally occurring amino acid
  misc_feature (43)..(43): Xaa can be any naturally occurring amino acid
GGADKRIQVPKAREGYEENEEFLRTCTTAAGGGSDRGHLXAGXGRMFPSAGDPQLLLSEEETESGLCQAPVLL

SEQ ID NO: 1026158 - protein, 167 aa, Homo sapiens
MGKYYSCESMADNACVLFAVSVLRFIISSVLVYGAISYQVGWLIPFFCYRLFDFVLSRLVAISSLTYLPRIKEYLDQLPDFPYKDDLLALDSSCLLFIVLVFLALFIIFKAYLINCVGNCYKYINNRNVPEMAVYPAFEAPPQYVLPTYEMAVKMPEKEPPPPYLPA

SEQ ID NO: 1026159 - protein, 222 aa, Homo sapiens
  misc_feature (1)..(1): Xaa can be any naturally occurring amino acid
XTESHSVVQAGVHDVILAHWKLPPPRFKQFSCLSPLSSWDYSVALFYNFGKSWKSDPGIIKATEEQKKKTIVELAETGSLDLSIFCSTCLIRKPVRSKHCGVCNRCIAKFDHHCPWVGNCVGAGNHRYFMGYLFFLLFMICWMIYGCISYWGLHCETTYTKDGFWTYITQIATCSPWMFWMFLNSVFHFMWVAVLLMCQMYQISCLGITTNERMNAREIQAL

SEQ ID NO: 1026160 - protein, 141 aa, Homo sapiens
PSFRSFNSSPGSTDTTLLPASTTTSGPSQESTTSHSSPGSTDTALSPGSTTALSFGQESTTFHSSPGSTHTTLFPDSTTSSGIVEASTRVHSSTGSPRTTLSPASSTSPGLQGESTAFQTHPASTHTTPSPRNVLLKLLKL

SEQ ID NO: 1026161 - protein, 1287 aa, Homo sapiens
ESVPQSLSVPMEYTASSLGSQSTTFHSSPGDTETTLLPDDTITSGLVEASTPTHSSTGSLHTTLTPASSTSAGLQEESTTFQSWPSSSDTTPSPPGTTAAPVEVSTTYHSRPSSTPTTHFSASSTTLGRSEESTTVHSSPGATGTALFPTRSATSVLVGEPTTSPISSGSTETTALPGSTTTAGLSEKSTTFYSSPRSPDTTLSPASTTSSGVSEESTTSHSRPGSTHTTAFPGSTTMPGVSQESTASHSSPGSTDTTLSPGSTTASSLGPESTTFHSSPGSTETTLLPDNTTASGLLEASTPVHSSTGSPHTTLSPAGSTTRQGESTTFQSWPNSKDTTPAPPTTTSAFVELSTTSHGSPSSTPTTHFSASSTTLGRSEESTTVHSSPVATATTPSPARSTTSGLVEESTTYHSSPGSTQTMHFPESDTTSGRGEESTTSHSSTTHTISSAPSTTSALVEEPTSYHSSPGSTATTHFPDSSTTSGRSEESTASHSSQDATGTIVLPARSTTSVLLGESTTSPISSGSMETTALPGSTTTPGLSEKSTTFHSSPRSPATTLSPASTTSSGVSEESTTSHSRPGSTHTTAFPDSTTTPGLSRHSTTSHSSPGSTDTTLLPASTTTSGPSQESTTSHSSPGSTDTALSPGSTTALSFGQESTTFHSSPGSTHTTLFPDSTTSSGIVEASTRVHSSTGSPRTTLSPASSTSPGLQGESTAFQTHPASTHTTPSPPSTATAPVEESTTYHRSPGSTPTTHFPASSTTSGHSEKSTIFHSSPDASGTTPSSAHSTTSGRGESTTSRISPGSTEITTLPGSTTTPGLSEASTTFYSSPRSPTTTLSPASMTSLGVGEESTTSRSQPGSTHSTVSPASTTTPGLSEESTTVYSSSPGSTETTVFPRSTTTSVRGEEPTTFHSRPASTHTTLFTEDSTTSGLTEESTAFPGSPASTQTGLPATLTTADLGEESTTFPSSSGSTGTTLSPARSTTSGLVGESTPSRLSPSSTETTTLPGSPTTPSLSEKSTTFYTSPRSPDATLSPATTTSSGVSEESSTSHSQPGSTHTTAFPDSTTTSGLSQEPTTSHSSQGSTEATLSPGSTTASSLGQQSTTFHSSPGDTETTLLPDDTITSGLVEASTPTHSSTGSLHTTLTPASSTSAGLQEESTTFQSWPSSSDTTPSPPGTTAAPVEVSTTYHSRPSSTPTTHFSASSTTLGRSEESTTVHSSPGATGTALFPTRSATSVLVGEPTTSPISSGSTETTALPGSTTTPGLSEESTTFYSSPPAAEMRDP

SEQ ID NO: 1026162 - protein, 1195 aa, Homo sapiens
ESVPQSLSVPMEYTASSLGSQSTTFHSSPGDTETTLLPDDTITSGLVEASTPTHSSTGSLHTTLTPASSTSAGLQEESTTFQSWPSSSDTTPSPPGTTAAPVEVSTTYHSRPSSTPTTHFSASSTTLGRSEESTTVHSSPGATGTALFPTRSATSVLVGEPTTSPISSGSTETTALPGSTTTAGLSEKSTTFYSSPRSPDTTLSPASTTSSGVSEESTTSHSRPGSTHTTAFPGSTTMPGVSQESTASHSSPGSTDTTLSPGSTTASSLGPESTTFHSSPGSTETTLLPDNTTASGLLEASTPVHSSTGSPHTTLSPAGSTTRQGESTTFQSWPNSKDTTPAPPTTTSAFVELSTTSHGSPSSTPTTHFSASSTTLGRSEESTTVHSSPVATATTPSPARSTTSGLVEESTTYHSSPGSTQTMHFPESDTTSGRGEESTTSHSSTTHTISSAPSTTSALVEEPTSYHSSPGSTATTHFPDSSTTSGRSEESTASHSSQDATGTIVLPARSTTSVLLGESTTSPISSGSMETTALPGSTTTPGLSEKSTTFHSSPRSPATTLSPASTTSSGVSEESTTSHSRPGSTHTTAFPDSTTTPGLSRHSTTSHSSPGSTDTTLLPASTTTSGPSQESTTSHSSPGSTDTALSPGSTTALSFGQESTTFHSSPGSTHTTLFPDSTTSSGIVEASTRVHSSTGSPRTTLSPASSTSPGLQGESTAFQTHPASTHTTPSPPSTATAPVEESTTYHRSPGSTPTTHFPASSTTSGHSEKSTIFHSSPDASGTTPSSAHSTTSGRGESTTSRISPGSTEITTLPGSTTTPGLSEASTTFYSSPRSPTTTLSPASMTSLGVGEESTTSRSQPGSTHSTVSPASTTTPGLSEESTTVYSSSPGSTETTVFPRSTTTSVRGEEPTTFHSRPASTHTTLFTEDSTTSGLTEESTAFPGSPASTQTGLPATLTTADLGEESTTFPSSSGSTGTTLSPARSTTSGLVGESTPSRLSPSSTETTTLPGSPTTPSLSEKSTTFYTSPRSPDATLSPATTTSSGVSEESSTSHSQPGSTHTTAFPDSTTTSGLSQEPTTSHSSQGSTEATLSPGSTTASSLGQQSTTFHSSPGDTETTLLPDDTITSGLVEASTPTHSSTGSLHTTLTPASSTSAGLQEESTTFQSWPSSSDTTPSPPGSGAAGLWVAEIGYRRS

SEQ ID NO: 1026163 - protein, 1288 aa, Homo sapiens
ESVPQSLSVPMEYTASSLGSQSTTFHSSPGDTETTLLPDDTITSGLVEASTPTHSSTGSLHTTLTPASSTSAGLQEESTTFQSWPSSSDTTPSPPGTTAAPVEVSYNLPQQPGLNSNNTLPCQLHNLRPQGGINSIPQQPDAMGSGTTPSSAHSTTSGRGESTTSRISPGSTEITALPGSTTTPGLSEKSTTFYSSPRSPDTTHLPARMTSSGVSEESTTSHSRPGSTHTTAFPGSTTMPGVSQESTASHSSPGSTDTTLSPGSTTASSLGPESTTFHSSPGSTETTLLPDNTTASGLLEASTPVHSSTGSPHTTLSPAGSTTRQGESTTFQSWPNSKDTTPAPPTTTSAFVELSTTSHGSPSSTPTTHFSASSTTLGRSEESTTVHSSPVATATTPSPARSTTSGLVEESTTYHSSPGSTQTMHFPESDTTSGRGEESTTSHSSTTHTISSAPSTTSALVEEPTSYHSSPGSTATTHFPDSSTTSGRSEESTASHSSQDATGTIVLPARSTTSVLLGESTTSPISSGSMETTALPGSTTTPGLSEKSTTFHSSPRSPATTLSPASTTSSGVSEESTTSHSRPGSTHTTAFPDSTTTPGLSRHSTTSHSSPGSTDTTLLPASTTTSGPSQESTTSHSSPGSTDTALSPGSTTALSFGQESTTFHSSPGSTHTTLFPDSTTSSGIVEASTRVHSSTGSPRTTLSPASSTSPGLQGESTAFQTHPASTHTTPSPPSTATAPVEESTTYHRSPGSTPTTHFPASSTTSGHSEKSTIFHSSPDASGTTPSSAHSTTSGRGESTTSRISPGSTEITTLPGSTTTPGLSEASTTFYSSPRSPTTTLSPASMTSLGVGEESTTSRSQPGSTHSTVSPASTTTPGLSEESTTVYSSSPGSTETTVFPRSTTTSVRGEEPTTFHSRPASTHTTLFTEDSTTSGLTEESTAFPGSPASTQTGLPATLTTADLGEESTTFPSSSGSTGTTLSPARSTTSGLVGESTPSRLSPSSTETTTLPGSPTTPSLSEKSTTFYTSPRSPDATLSPATTTSSGVSEESSTSHSQPGSTHTTAFPDSTTTSGLSQEPTTSHSSQGSTEATLSPGSTTASSLGQQSTTFHSSPGDTETTLLPDDTITSGLVEASTPTHSSTGSLHTTLTPASSTSAGLQEESTTFQSWPSSSDTTPSPPGTTAAPVEVSTTYHSRPSSTPTTHFSASSTTLGRSEESTTVHSSPGATGTALFPTRSATSVLVGEPTTSPISSGSTETTALPGSTTTAGLSEESTTFYSSPPAAEMRDP

SEQ ID NO: 1026164 - protein, 1287 aa, Homo sapiens; identical to SEQ ID NO: 1026161

SEQ ID NO: 1026165 - protein, 1287 aa, Homo sapiens; identical to SEQ ID NO: 1026161

SEQ ID NO: 1026166 - protein, 950 aa, Homo sapiens
ESVPQSLSVPMEYTASSLGSQSTTFHSSPGDTETTLLPDDTITSGLVEASTPTHSSTGSLHTTLTPASSTSAGLQEESTTFQSWPSSSDTTPSPPGTTAAPVEVSTTYHSRPSSTPTTHFSASSTTLGRSEESTTVHSSPGATGTALFPTRSATSVLVGEPTTSPISSGSTETTALPGSTTTAGLSEKSTTFYSSPRSPDTTLSPASTTSSGVSEESTTSHSRPGSTHTTAFPGSTTMPGVSQESTASHSSPGSTDTTLSPGSTTASSLGPESTTFHSSPGSTETTLLPDNTTASGLLEASTPVHSSTGSPHTTLSPAGSTTRQGESTTFQSWPNSKDTTPAPPTTTSAFVELSTTSHGSPSSTPTTHFSASSTTLGRSEESTTVHSSPVATATTPSPARSTTSGLVEESTTYHSSPGSTQTMHFPESDTTSGRGEESTTSHSSTTHTISSAPSTTSALVEEPTSYHSSPGSTATTHFPDSSTTSGRSEESTASHSSQDATGTIVLPARSTTSVLLGESTTSPISSGSMETTALPGSTTTPGLSEKSTTFHSSPRSPATTLSPASTTSSGVSEESTTSHSRPGSTHTTAFPDSTTTPGLSRHSTTSHSSPGSTDTTLLPASTTTSGPSQESTTSHSSPGSTDTALSPGSTTALSFGQESTTFHSSPGSTHTTLFPDSTTSSGIVEASTRVHSSTGSPRTTLSPASSTSPGLQGESTAFQTHPASTHTTPSPPSTATAPVEESTTYHRSPGSTPTTHFPASSTTSGHSEKSTIFHSSPDASGTTPSSAHSTTSGRGESTTSRISPGSTEITTLPGSTTTPGLSEASTTFYSSPRSPTTTLSPASMTSLGVGEESTTSRSQPGSTHSTVSPASTTTPGLSEESTTVYSSSPGSTETTVFPRSTTTSVRGEEPTTFHSRPASTHTTLLPDNTTASASLNNLRPSTAARAKLGR

SEQ ID NO: 1026167 - protein, 1206 aa, Homo sapiens
ESVPQSLSVPMEYTASSLGSQSTTFHSSPGDTETTLLPDDTITSGLVEASTPTHSSTGSLHTTLTPASSTSAGLQEESTTFQSWPSSSDTTPSPPGTTAAPVEVSYNLPQQPGLNSNNTLPCQLHNLRPQGGINSIPQQPDAMGSGTTPSSAHSTTSGRGESTTSRISPGSTEITTTLSPGSTTASSLGPESTTFHSSPGSTETTLLPDNTTASGLLEASTPVHSSTGSPHTTLSPAGSTTRQGESTTFQSWPNSKDTTPAPPTTTSAFVELSTTSHGSPSSTPTTHFSASSTTLGRSEESTTVHSSPVATATTPSPARSTTSGLVEESTTYHSSPGSTQTMHFPESDTTSGRGEESTTSHSSTTHTISSAPSTTSALVEEPTSYHSSPGSTATTHFPDSSTTSGRSEESTASHSSQDATGTIVLPARSTTSVLLGESTTSPISSGSMETTALPGSTTTPGLSEKSTTFHSSPRSPATTLSPASTTSSGVSEESTTSHSRPGSTHTTAFPDSTTTPGLSRHSTTSHSSPGSTDTTLLPASTTTSGPSQESTTSHSSPGSTDTALSPGSTTALSFGQESTTFHSSPGSTHTTLFPDSTTSSGIVEASTRVHSSTGSPRTTLSPASSTSPGLQGESTAFQTHPASTHTTPSPPSTATAPVEESTTYHRSPGSTPTTHFPASSTTSGHSEKSTIFHSSPDASGTTPSSAHSTTSGRGESTTSRISPGSTEITTLPGSTTTPGLSEASTTFYSSPRSPTTTLSPASMTSLGVGEESTTSRSQPGSTHSTVSPASTTTPGLSEESTTVYSSSPGSTETTVFPRSTTTSVRGEEPTTFHSRPASTHTTLFTEDSTTSGLTEESTAFPGSPASTQTGLPATLTTADLGEESTTFPSSSGSTGTTLSPARSTTSGLVGESTPSRLSPSSTETTTLPGSPTTPSLSEKSTTFYTSPRSPDATLSPATTTSSGVSEESSTSHSQPGSTHTTAFPDSTTTSGLSQEPTTSHSSQGSTEATLSPGSTTASSLGQQSTTFHSSPGDTETTLLPDDTITSGLVEASTPTHSSTGSLHTTLTPASSTSAGLQEESTTFQSWPSSSDTTPSPPGTTAAPVEVSTTYHSRPSSTPTTHFSASSTTLGRSEESTTVHSSPGATGTALFPTRSATSVLVGEPTTSPISSGSTETTALPGSTTTPGLSEESTTFYSSPPAAEMRDP

SEQ ID NO: 1026168 - protein, 1011 aa, Homo sapiens
ESVPQSLSVPMEYTASSLGSQSTTFHSSPGDTETTLLPDDTITSGLVEASTPTHSSTGSLHTTLTPASSTSAGLQEESTTFQSWPSSSDTTPSPPGTTAAPVEVSTTYHSRPSSTPTTHFSASSTTLGRSEESTTVHSSPGATGTALFPTRSATSVLVGEPTTSPISSGSTETTALPGSTTTAGLSEKSTTFYSSPRSPDTTLSPASTTSSGVSEESTTSHSRPGSTHTTAFPGSTTMPGVSQESTASHSSPGSTDTTLSPGSTTASSLGPESTTFHSSPGSTETTLLPDNTTASGLLEASTPVHSSTGSPHTTLSPAGSTTRQGESTTFQSWPNSKDTTPAPPTTTSAFVELSTTSHGSPSSTPTTHFSASSTTLGRSEESTTVHSSPVATATTPSPARSTTSGLVEESTTYHSSPGSTQTMHFPESDTTSGRGEESTTSHSSTTHTISSAPSTTSALVEEPTSYHSSPGSTATTHFPDSSTTSGRSEESTASHSSQDATGTIVLPARSTTSVLLGESTTSPISSGSMETTALPGSTTTPGLSEKSTTFHSSPRSPATTLSPASTTSSGVSEESTTSHSRPGSTHTTAFPDSTTTPGLSRHSTTSHSSPGSTDTTLLPASTTTSGPSQESTTSHSSPGSTDTALSPGSTTALSFGQESTTFHSSPGSTHTTLFPDSTTSSGIVEASTRVHSSTGSPRTTLSPASSTSPGLQGESTAFQTHPASTHTTPSPPSTATAPVEESTTYHRSPGSTPTTHFPASSTTSGHSEKSTIFHSSPDASGTTPSSAHSTTSGRGESTTSRISPGSTEITTLPGSTTTPGLSEASTTFYSSPRSPTTTLSPASMTSLGVGEESTTSRSQPGSTHSTVSPASTTTPGLSEESTTGTYNFPQQPRLNRGNTVPWQYHSLIPWSTIYNLPQQPRRHRETGFPRRDDRSSERPGGMLERLQVDIGSIHKTLTPFQFHMAYAISRKYVVLCRCARGFTVTNLYLHGTKSSPVCEACYNCTRSSELE

SEQ ID NO: 1026169 - protein, 821 aa, Homo sapiens
ESVPQSLSVPMEYTASSLGSQSTTFHSSPGDTETTLLPDDTITSGLVEASTPTHSSTGSLHTTLTPASSTSAGLQEESTTFQSWPSSSDTTPSPPGTTAAPVEVSTTYHSRPSSTPTTHFSASSTTLGRSEESTTVHSSPGATGTALFPTRSATSVLVGEPTTSPISSGSTETTALPGSTTTAGLSEKSTTFYSSPRSPDTTLSPASTTSSGVSEESTTSHSRPGSTHTTAFPGSTTMPGVSQESTASHSSPGSTDTTLSPGSTTASSLGPESTTFHSSPGSTETTLLPDNTTASGLLEASTPVHSSTGSPHTTLSPAGSTTRQGESTTFQSWPNSKDTTPAPPTTTSAFVELSTTSHGSPSSTPTTHFSASSTTLGRSEESTTVHSSPVATATTPSPARSTTSGLVEESTTYHSSPGSTQTMHFPESDTTSGRGEESTTSHSSTTHTISSAPSTTSALVEEPTSYHSSPGSTATTHFPDSSTTSGRSEESTASHSSQDATGTIVLPARSTTSVLLGESTTSPISSGSMETTALPGSTTTPGLSEKSTTFHSSPRSPATTLSPASTTSSGVSEESTTSHSRPGSTHTTAFPDSTTTPGLSRHSTTSHSSPGSTDTTLLPASTTTSGPSQESTTSHSSPGSTDTALSPGSTTALSFGQESTTFHSSPGSTHTTLFPDSTTSSGIVEASTRVHSSTGSPRTTLSPASSTSPGLQGESTAFQTHPASTHTTPSPPSTATAPVEESTTYHRSPGSTPTTHFPASSTTSGHSEKSTIFHSSPDASGTTPSSAHSTTSGRGESTTSRQSKLNRNNNFTRQSHNTKPQ

SEQ ID NO: 1026170 - protein, 928 aa, Homo sapiens
ESVPQSLSVPMEYTASSLGSQSTTFHSSPGDTETTLLPDDTITSGLVEASTPTHSSTGSLHTTLTPASSTSAGLQEESTTFQSWPSSSDTTPSPPGTTAAPVEVSYNLPQQPGLNSNNTLPCQLHNLRPQGGINSIPQQPDAMGTTVLPAGSTPSVLVGDSTPSPISSGSMETTALPGSTTTPGLSEKSTTFYSSPRSPETLSPASTTSSGVSEESTTSHSRPGSTHTTAFPDSTTTPGLSRHSTTSHSSPGSTDTTLLPASTTTSGPSQESTTSHSSPGSTDTALSPGSTTALSFGQESTTFHSSPGSTHTTLFPDSTTSSGIVEASTRVHSSTGSPRTTLSPASSTSPGLQGESTAFQTHPASTHTTPSPPSTATAPVEESTTYHRSPGSTPTTHFPASSTTSGHSEKSTIFHSSPDASGTTPSSAHSTTSGRGESTTSRISPGSTEITTLPGSTTTPGLSEASTTFYSSPRSPTTTLSPASMTSLGVGEESTTSRSQPGSTHSTVSPASTTTPGLSEESTTVYSSSPGSTETTVFPRSTTTSVRGEEPTTFHSRPASTHTTLFTEDSTTSGLTEESTAFPGSPASTQTGLPATLTTADLGEESTTFPSSSGSTGTTLSPARSTTSGLVGESTPSRLSPSSTETTTLPGSPTTPSLSEKSTTFYTSPRSPDATLSPATTTSSGVSEESSTSHSQPGSTHTTAFPDSTTTSGLSQEPTTSHSSQGSTEATLSPGSTTASSLGQQSTTFHSSPGDTETTLLPDDTITSGLVEASTPTHSSTGSLHTTLTPASSTSAGLQEESTTFQSWPSSSDTTPSPPGTTAAPVEVSTTYHSRPSSTPTTHFSASSTTLGRSEESTTVHSSPGATGTALFPTRSATSVLVGEPTTSPISSGSTETTALPGSTTTAGLSEESTTFYSSPPAAEMRDP

SEQ ID NO: 1026171 - protein, 739 aa, Homo sapiens
ESVPQSLSVPMEYTASSLGSQSTTFHSSPGDTETTLLPDDTITSGLVEASTPTHSSTGSLHTTLTPASSTSAGLQEESTTFQSWPSSSDTTPSPPGTTAAPVEVSTTYHSRPSSTPTTHFSASSTTLGRSEESTTVHSSPGATGTALFPTRSATSVLVGEPTTSPISSGSTETTALPGSTTTAGLSEKSTTFYSSPRSPDTTLSPASTTSSGVSEESTTSHSRPGSTHTTAFPGSTTMPGVSQESTASHSSPGSTDTTLSPGSTTASSLGPESTTFHSSPGSTETTLLPDNTTASGLLEASTPVHSSTGSPHTTLSPAGSTTRQGESTTFQSWPNSKDTTPAPPTTTSAFVELSTTSHGSPSSTPTTHFSASSTTLGRSEESTTVHSSPVATATTPSPARSTTSGLVEESTTYHSSPGSTQTMHFPESDTTSGRGEESTTSHSSTTHTISSAPSTTSALVEEPTSYHSSPGSTATTHFPDSSTTSGRSEESTASHSSQDATGTIVLPARSTTSVLLGESTTSPISSGSMETTALPGSTTTPGLSEKSTTFHSSPRSPATTLSPASTTSSGVSEESTTSHSRPGSTHTTAFPDSTTTPGLSRHSTTSHSSPGSTDTTLLPASTTTSGPSQESTTSHSSPGSTDTALSPGSTTALSFGQESTTFHSSPGSTHTTLFPDSTTSSGIVEASTRVHSSTGSPRTTLSPASSTSLDSRENFLHHRPSQPQSHHVITTQAHILQLL

SEQ ID NO: 1026172 - protein, 770 aa, Homo sapiens
ESVPQSLSVPMEYTASSLGSQSTTFHSSPGDTETTLLPDDTITSGLVEASTPTHSSTGSLHTTLTPASSTSAGLQEESTTFQSWPSSSDTTPSPPGTTAAPVEVSTTYHSRPSSTPTTHFSASSTTLGRSEESTTVHSSPGATGTALFPTRSATSVLVGEPTTSPISSGSTETTALPGSTTTAGLSEKSTTFYSSPRSPDTTLSPASTTSSGVSEESTTSHSRPGSTHTTAFPGSTTMPGVSQESTASHSSPGSTDTTLSPGSTTASSLGPESTTFHSSPGSTETTLLPDNTTASGPTDTTLSPVRNQQLSISSPRSPTTTLSPASMTSLGVGEESTTSRSQPGSTHSTVSPASTTTPGLSEESTTVYSSSPGSTETTVFPRSTTTSVRGEEPTTFHSRPASTHTTLFTEDSTTSGLTEESTAFPGSPASTQTGLPATLTTADLGEESTTFPSSSGSTGTTLSPARSTTSGLVGESTPSRLSPSSTETTTLPGSPTTPSLSEKSTTFYTSPRSPDATLSPATTTSSGVSEESSTSHSQPGSTHTTAFPDSTTTSGLSQEPTTSHSSQGSTEATLSPGSTTASSLGQQSTTFHSSPGDTETTLLPDDTITSGLVEASTPTHSSTGSLHTTLTPASSTSAGLQEESTTFQSWPSSSDTTPSPPGTTAAPVEVSTTYHSRPSSTPTTHFSASSTTLGRSEESTTVHSSPGATGTALFPTRSATSVLVGEPTTSPISSGSTETTALPGSTTTPGLSEESTTFYSSPPAAEMRDP

SEQ ID NO: 1026173 - protein, 470 aa, Homo sapiens
GSDQCIVITCIVITCIVITCIVIQCIVTSLGVGEESTTSRSQPGSTHSTVSPASTTTPGLSEESTTVYSSSPGSTETTVFPRSTTTSVRGEEPTTFHSRPASTHTTLFTEDSTTSGLTEESTAFPGSPASTQTGLPATLTTADLGEESTTFPSSSGSTGTTLSPARSTTSGLVGESTPSRLSPSSTETTTLPGSPTTPSLSEKSTTFYTSPRSPDATLSPATTTSSGVSEESSTSHSQPGSTHTTAFPDSTTTSGLSQEPTTSHSSQGSTEATLSPGSTTASSLGQQSTTFHSSPGDTETTLLPDDTITSGLVEASTPTHSSTGSLHTTLTPASSTSAGLQEESTTFQSWPSSSDTTPSPPGTTAAPVEVSTTYHSRPSSTPTTHFSASSTTLGRSEESTTVHSSPGATGTALFPTRSATSVLVGEPTTSPISSGSTETTALPGSTTTPGLSEESTTFYSSPPAAEMRDP

SEQ ID NO: 1026174 - protein, 454 aa, Homo sapiens
RCSRGCYHVHVTSLGVGEESTTSRSQPGSTHSTVSPASTTTPGLSEESTTVYSSSPGSTETTVFPRSTTTSVRGEEPTTFHSRPASTHTTLFTEDSTTSGLTEESTAFPGSPASTQTGLPATLTTADLGEESTTFPSSSGSTGTTLSPARSTTSGLVGESTPSRLSPSSTETTTLPGSPTTPSLSEKSTTFYTSPRSPDATLSPATTTSSGVSEESSTSHSQPGSTHTTAFPDSTTTSGLSQEPTTSHSSQGSTEATLSPGSTTASSLGQQSTTFHSSPGDTETTLLPDDTITSGLVEASTPTHSSTGSLHTTLTPASSTSAGLQEESTTFQSWPSSSDTTPSPPGTTAAPVEVSTTYHSRPSSTPTTHFSASSTTLGRSEESTTVHSSPGATGTALFPTRSATSVLVGEPTTSPISSGSTETTALPGSTTTPGLSEESTTFYSSPPAAEMRDP

SEQ ID NO: 1026175 - protein, 599 aa, Homo sapiens
ESVPQSLSVPMEYTASSLGSQSTTFHSSPGDTETTLLPDDTITSGLVEASTPTHSSTGSLHTTLTPASSTSAGLQEESTTFQSWPSSSDTTPSPPGTTAAPVEVSTTYHSRPSSTPTTHFSASSTTLGRSEESTTVHSSPGATGTALFPTRSATSVLVGEPTTSPISSGSTETTALPGSTTTAGLSEKSTTFYSSPRSPDTTLSPASTTSSGVSEESTTSHSRPGSTHTTAFPGSTTMPGVSQESTASHSSPGSTDTTLSPGSTTASSLGPESTTFHSSPGSTETTLLPDNTTASGLLEASTPVHSSTGSPHTTLSPAGSTTRQGESTTFQSWPTFYTSPRSPDATLSPATTTSSGVSEESSTSHSQPGSTHTTAFPDSTTTSGLSQEPTTSHSSQGSTEATLSPGSTTASSLGQQSTTFHSSPGDTETTLLPDDTITSGLVEASTPTHSSTGSLHTTLTPASSTSAGLQEESTTFQSWPSSSDTTPSPPGTTAAPVEVSTTYHSRPSSTPTTHFSASSTTLGRSEESTTVHSSPGATGTALFPTRSATSVLVGEPTTSPISSGSTETTALPGSTTTPGLSEESTTFYSSPPAAEMRDP

SEQ ID NO: 1026176 - protein, 377 aa, Homo sapiens
ESVPQSLSVPMEYTASSLGSQSTTFHSSPGDTETTLLPDDTITSGLVEASTPTHSSTGSLHTTLTPASSTSAGLQEESTTFQSWPSSSDTTPSPPGTTAAPVEVSTTYHSRPSSTPTTHFSASSTTLGRSEESTTVHSSPGATGTALFPTRSATSVLVGEPTTSPISSGSTETTALPGSTTTAGLSEKSTTFYSSPRSPDTTLSPASTTSSGVSEESTTSHSRPGSTHTTAFPGSTTMPGVSQESTASHSSPGSTDTTLSPGSTTASSLGPESTTFHSSPGSTETTLLPDNTTASGLLEASTPVHSSTGSPHTTLSPAGSTTRQGESTTFQSWPSSKDTSPAPSGTTSAFVKLSTTYHSSPSSTPKPTPPYYQTTLK

SEQ ID NO: 1026177 - protein, 208 aa, Homo sapiens
GALEDAITCMTTLSPGSTTASSLGPESTTFHSSPGSTETTLLPDNTTASGLLEASTPVHSSTGSPHTTLSPAGSTTRQGESTTFQSWPNSKDTTPAPPTTTSAFVELSTTSHGSPSSTPTTHHFSASSTTLGRSEESTTVHSSPGATGTALFPTRSATSVLVGEPTTSPISSGSTETTALPGSTTTAGLSEKSTTFYSSPPAAEMRDP

SEQ ID NO: 1026178 - protein, 281 aa, Homo sapiens
ESVPQSLSVPMEYTASSLGSQSTTFHSSPGDTETTLLPDDTITSGLVEASTPTHSSTGSLHTTLTPASSTSAGLQEESTTFQSWPSSSDTTPSPPGTTAAPVEVSYNLPQQPGLNSNNTLPCQLHNLRPQGGINSIPQQPDAMGSGTTPSSAHSTTSGRGESTTSRISPGSTEITAARSTTSGLVEESTTYHSSPGSTQTMHFPESDTTSGRGEESTTSHSSTTHTISSAPSTTSALVEEPTSYHSSPLQQHTSLTAPQPQAVVRNQSASTQQAMIDYRRQ

SEQ ID NO: 1026179 - protein, 204 aa, Homo sapiens
ESVPQSLSVPMEYTASSLGSQSTTFHSSPGDTETTLLPDDTITSGLVEASTPTHSSTGSLHTTLTPASSTSAGLQEESTTFQSWPSSSDTTPSPPGTTAAPVEVSTTYHSRPSSTPTTHFSASSTTLGRSEESTTVHSSPGATGTALFPTRSATSVLVGEPTTSPISSGSTETTALPGSTTTPGLSEESTTFYSSPPAAEMRDP

SEQ ID NO: 1026180 - protein, 114 aa, Homo sapiens
VEPWLLWEDTTLTPASSTSAGLQEESTTFQSWPSSSDTTPSPPGTTAAPVEVSTTYHSRPSSTPTTHFSASSTTLGRSEKSTTVHSSPGATGTALFPTRSATSVLVGEPTTSPG

SEQ ID NO: 1026181 - protein, 1205 aa, Homo sapiens
MEVIQLLHPHPVQATFYTFSDYGVSVTFITGSTATKHFLDSSTNSGHSEESTVSHSSPGATGTALFPTRSATSVLVGEPTTSPISSGSTETTALPGSTTTAGLSEKSTTFYSSPRSPDTTLSPASTTSSGVSEESTTSHSRPGSTHTTAFPGSTTMPGVSQESTASHSSPGSTDTTLSPGSTTASSLGPESTTFHSSPGSTETTLLPDNTTASGLLEASTPVHSSTGSPHTTLSPAGSTTRQGESTTFQSWPNSKDTTPAPPTTTSAFVELSTTSHGSPSSTPTTHFSASSTTLGRSEESTTVHSSPVATATTPSPARSTTSGLVEESTTYHSSPGSTQTMHFPESDTTSGRGEESTTSHSSTTHTISSAPSTTSALVEEPTSYHSSPGSTATTHFPDSSTTSGRSEESTASHSSQDATGTIVLPARSTTSVLLGESTTSPISSGSMETTALPGSTTTPGLSEKSTTFHSSPRSPATTLSPASTTSSGVSEESTTSHSRPGSTHTTAFPDSTTTPGLSRHSTTSHSSPGSTDTTLLPASTTTSGPSQESTTSHSSPGSTDTALSPGSTTALSFGQESTTFHSSPGSTHTTLFPDSTTSSGIVEASTRVHSSTGSPRTTLSPASSTSPGLQGESTAFQTHPASTHTTPSPPSTATAPVEESTTYHRSPGSTPTTHFPASSTTSGHSEKSTIFHSSPDASGTTPSSAHSTTSGRGESTTSRISPGSTEITTLPGSTTTPGLSEASTTFYSSPRSPTTTLSPASMTSLGVGEESTTSRSQPGSTHSTVSPASTTTPGLSEESTTVYSSSPGSTETTVFPRSTTTSVRGEEPTTFHSRPASTHTTLFTEDSTTSGLTEESTAFPGSPASTQTGLPATLTTADLGEESTTFPSSSGSTGTTLSPARSTTSGLVGESTPSRLSPSSTETTTLPGSPTTPSLSEKSTTFYTSPRSPDATLSPATTTSSGVSEESSTSHSQPGSTHTTAFPDSTTTSGLSQEPTTSHSSQGSTEATLSPGSTTASSLGQQSTTFHSSPGDTETTLLPDDTITSGLVEASTPTHSSTGSLHTTLTPASSTSAGLQEESTTFQSWPSSSDTTPSPPGTTAAPVEVSTTYHSRPSSTPTTHFSASSTTLGRSEESTTVHSSPGATGTALFPTRSATSVLVGEPTTSPISSGSTETTALPGSTTTPGLSEESTTFYSSPPAAEMRDP

SEQ ID NO: 1026182 - protein, 1148 aa, Homo sapiens
MAATVLPAGSTPSVLVGDSTPSPISSGSMETTALPGSTTTPGLSEKSTTFYSSPRSPDTTHLPARMTSSGVSEESTTSHSRPGSTHTTAFPGSTTMPGVSQESTASHSSPGSTDTTLSPGSTTASSLGPESTTFHSSPGSTETTLLPDNTTASGLLEASTPVHSSTGSPHTTLSPAGSTTRQGESTTFQSWPNSKDTTPAPPTTTSAFVELSTTSHGSPSSTPTTHFSASSTTLGRSEESTTVHSSPVATATTPSPARSTTSGLVEESTTYHSSPGSTQTMHFPESDTTSGRGEESTTSHSSTTHTISSAPSTTSALVEEPTSYHSSPGSTATTHFPDSSTTSGRSEESTASHSSQDATGTIVLPARSTTSVLLGESTTSPISSGSMETTALPGSTTTPGLSEKSTTFHSSPRSPATTLSPASTTSSGVSEESTTSHSRPGSTHTTAFPDSTTTPGLSRHSTTSHSSPGSTDTTLLPASTTTSGPSQESTTSHSSPGSTDTALSPGSTTALSFGQESTTFHSSPGSTHTTLFPDSTTSSGIVEASTRVHSSTGSPRTTLSPASSTSPGLQGESTAFQTHPASTHTTPSPPSTATAPVEESTTYHRSPGSTPTTHFPASSTTSGHSEKSTIFHSSPDASGTTPSSAHSTTSGRGESTTSRISPGSTEITTLPGSTTTPGLSEASTTFYSSPRSPTTTLSPASMTSLGVGEESTTSRSQPGSTHSTVSPASTTTPGLSEESTTVYSSSPGSTETTVFPRSTTTSVRGEEPTTFHSRPASTHTTLFTEDSTTSGLTEESTAFPGSPASTQTGLPATLTTADLGEESTTFPSSSGSTGTTLSPARSTTSGLVGESTPSRLSPSSTETTTLPGSPTTPSLSEKSTTFYTSPRSPDATLSPATTTSSGVSEESSTSHSQPGSTHTTAFPDSTTTSGLSQEPTTSHSSQGSTEATLSPGSTTASSLGQQSTTFHSSPGDTETTLLPDDTITSGLVEASTPTHSSTGSLHTTLTPASSTSAGLQEESTTFQSWPSSSDTTPSPPGTTAAPVEVSTTYHSRPSSTPTTHFSASSTTLGRSEESTTVHSSPGATGTALFPTRSATSVLVGEPTTSPISSGSTETTALPGSTTTPGLSEESTTFYSSPPAAEMRDPESH

SEQ ID NO: 1026183 - protein, 865 aa, Homo sapiens
MHFPESDTTSGRGEESTTSHSSTTHTISSAPSTTSALVEEPTSYHSSPGSTATTHFPDSSTTSGRSEESTASHSSQDATGTIVLPARSTTSVLLGESTTSPISSGSMETTALPGSTTTPGLSEKSTTFHSSPRSPATTLSPASTTSSGVSEESTTSHSRPGSTHTTAFPDSTTTPGLSRHSTTSHSSPGSTDTTLLPASTTTSGPSQESTTSHSSPGSTDTALSPGSTTALSFGQESTTFHSSPGSTHTTLFPDSTTSSGIVEASTRVHSSTGSPRTTLSPASSTSPGLQGESTAFQTHPASTHTTPSPPSTATAPVEESTTYHRSPGSTPTTHFPASSTTSGHSEKSTIFHSSPDASGTTPSSAHSTTSGRGESTTSRISPGSTEITTLPGSTTTPGLSEASTTFYSSPRSPTTTLSPASMTSLGVGEESTTSRSQPGSTHSTVSPASTTTPGLSEESTTVYSSSPGSTETTVFPRSTTTSVRGEEPTTFHSRPASTHTTLFTEDSTTSGLTEESTAFPGSPASTQTGLPATLTTADLGEESTTFPSSSGSTGTTLSPARSTTSGLVGESTPSRLSPSSTETTTLPGSPTTPSLSEKSTTFYTSPRSPDATLSPATTTSSGVSEESSTSHSQPGSTHTTAFPDSTTTSGLSQEPTTSHSSQGSTEATLSPGSTTASSLGQQSTTFHSSPGDTETTLLPDDTITSGLVEASTPTHSSTGSLHTTLTPASSTSAGLQEESTTFQSWPSSSDTTPSPPGTTAAPVEVSTTYHSRPSSTPTTHFSASSTTLGRSEESTTVHSSPGATGTALFPTRSATSVLVGEPTTSPISSGSTETTALPGSTTTAGLSEKSTTFYSSPPAAEMRDP

SEQ ID NO: 1026184 - protein, 685 aa, Homo sapiens
ESVPQSLSVPMEYTASSLGSQSTTFHSSPGDTETTLLPDDTITSGLVEASTPTHSSTGSLHTTLTPASSTSAGLQEESTTFQSWPSSSDTTPSPPGTTAAPVEVSTTYHSRPSSTPTTHFSASSTTLGRSEESTTVHSSPGATGTALFPTRSATSVLVGEPTTSPISSGSTETTALPGSTTTAGLSEKSTTFYSSPRSPDTTLSPASTTSSGVSEESTTSHSRPGSTHTTAFPGSTTMPGVSQESTASHSSPGSTDTTLSPGSTTASSLGPESTTFHSSPGSTETTLLPDNTTASGLLEASTPVHSSTGSPHTTLSPAGSTTRQGESTTFQSWPNSKDTTPAPPTTTSAFVELSTTSHGSPSSTPTTHFSASSTTLGRSEESTTVHSSPVATATTPSPARSTTSGLVEESTTYHSSPGSTQTMHFPESDTTSGRGEESTTSHSSTTHTISSAPSTTSALVEEPTSYHSSPGSTATTHFPDSSTTSGRSEESTASHSSQDATGTIVLPARSTTSVLLGESTTSPISSGSMETTALPGSTTTPGLSEKSTTFHSSPRSPATTLSPASTTSSGVSEESTTSHSRPGSTHTTAFPDSTTTPGLSRHSTTSHSSPGSTDTTLLPASTTTSGPSQESTTSHSSPGSTDTALSPGSTTALSFGQESTTSWTSGRIYRLPDPPSLNSHDAFTS

SEQ ID NO: 1026185 - protein, 1265 aa, Homo sapiens
ESVPQSLSVPMEYTASSLGSQSTTFHSSPGDTETTLLPDDTITSGLVEASTPTHSSTGSLHTTLTPASSTSAGLQEESTTFQSWPSSSDTTPSPPGTTAAPVEVSTTYHSRPSSTPTTHFSASSTTLGRSEESTTVHSSPGATGTALFPTRSATSVLVGEPTTSPISSGSTETTALPGSTTTAGLSEKSTTFYSSPRSPDTTLSPASTTSSGVSEESTTSHSRPGSTHTTAFPGSTTMPGVSQESTASHSSPGSTDTTLSPGSTTASSLGPESTTFHSSPGSTETTLLPDNTTASGLLEASTPVHSSTGSPHTTLSPAGSTTRQGESTTFQSWPNSKDTTPAPPTTTSAFVELSTTSHGSPSSTPTTHFSASSTTLGRSEESTTVHSSPVATATTPSPARSTTSGLVEESTTYHSSPGSTQTMHFPESDTTSGRGEESTTSHSSTTHTISSAPSTTSALVEEPTSYHSSPGSTATTHFPDSSTTSGRSEESTASHSSQDATGTIVLPARSTTSVLLGESTTSPISSGSMETTALPGSTTTPGLSEKSTTFHSSPRSPATTLSPASTTSSGVSEESTTSHSRPGSTHTTAFPDSTTTPGLSRHSTTSHSSPGSTDTTLLPASTTTSGPSQESTTSHSSPGSTDTALSPGSTTALSFGQESTTFHSSPGSTHTTLFPDSTTSSGIVEASTRVHSSTGSPRTTLSPASSTSPGLQGESTAFQTHPASTHTTPSPPSTATAPVEESTTYHRSPGSTPTTHFPASSTTSGHSEKSTIFHSSPDASGTTPSSAHSTTSGRGESTTSRISPGSTEITTLPGSTTTPGLSEASTTFYSSPRSPTTTLSPASMTSLGVGEESTTSRSQPGSTHSTVSPASTTTPGLSEESTTRGEEPTTFHSRPASTHTTLFTEDSTTSGLTEESTAFPGSPASTQTGLPATLTTADLGEESTTFPSSSGSTGTTLSPARSTTSGLVGESTPSRLSPSSTETTTLPGSPTTPSLSEKSTTFYTSPRSPDATLSPATTTSSGVSEESSTSHSQPGSTHTTAFPDSTTTSGLSQEPTTSHSSQGSTEATLSPGSTTASSLGQQSTTFHSSPGDTETTLLPDDTITSGLVEASTPTHSSTGSLHTTLTPASSTSAGLQEESTTFQSWPSSSDTTPSPPGTTAAPVEVSTTYHSRPSSTPTTHFSASSTTLGRSEESTTVHSSPGATGTALFPTRSATSVLVGEPTTSPISSGSTETTALPGSTTTPGLSEESTTFYSSPPAAEMRDP

SEQ ID NO: 1026186 - protein, 1288 aa, Homo sapiens
ESVPQSLSVPMEYTASSLGSQSTTFHSSPGDTETTLLPDDTITSGLVEASTPTHSSTGSLHTTLTPASSTSAGLQEESTTFQSWPSSSDTTPSPPGTTAAPVEVSTTYHSRPSSTPTTHFSASSTTLGRSEESTTVHSSPGATGTALFPTRSATSVLVGEPTTSPISSGSTETTALPGSTTTAGLSEKSTTFYSSPRSPDTTLSPASTTSSGVSEESTTSHSRPGSTHTTAFPGSTTMPGVSQESTASHSSPGSTDTTLSPGSTTASSLGPESTTFHSSPGSTETTLLPDNTTASGLLEASTPVHSSTGSPHTTLSPAGSTTRQGESTTFQSWPNSKDTTPAPPTTTSAFVELSTTSHGSPSSTPTTHFSASSTTLGRSEESTTVHSSPVATATTPSPARSTTSGLVEESTTYHSSPGSTQTMHFPESDTTSGRGEESTTSHSSTTHTISSAPSTTSALVEEPTSYHSSPGSTATTHFPDSSTTSGRSEESTASHSSQDATGTIVLPARSTTSVLLGESTTSPISSGSMETTALPGSTTTPGLSEKSTTFHSSPRSPATTLSPASTTSSGVSEESTTSHSRPGSTHTTAFPDSTTTPGLSRHSTTSHSSPGSTDTTLLPASTTTSGPSQESTTSHSSPGSTDTALSPGSTTALSFGQESTTFHSSPGSTHTTLFPDSTTSSGIVEASTRVHSSTGSPRTTLSPASSTSAGLQEESTTFQSWPSSSDTTPSPPGTTAAPVEVSTTYHSRPSSTPTTHFSASSTTLGRSEKSTTVHSSPGATGTALFPTRSATSVLVGEPTTSPISPGSTEITTLPGSTTTPGLSEASTTFYSSPRSPTTTLSPASMTSLGVGEESTTSRSQPGSTHSTVSPASTTTPGLSEESTTVYSSSPGSTETTVFPRSTTTSVRGEEPTTFHSRPASTHTTLFTEDSTTSGLTEESTAFPGSPASTQTGLPATLTTADLGEESTTFPSSSGSTGTTLSPARSTTSGLVGESTPSRLSPSSTETTTLPGSPTTPSLSEKSTTFYTSPRSPDATLSPATTTSSGVSEESSTSHSQPGSTHTTAFPDSTTTSGLSQEPTTSHSSQGSTEATLSPGSTTASSLGQQSTTFHSSPGDTETTLLPDDTITSGLVEASTPTHSSTGSLHTTLTPASSTSAGLQEESTTFQSWPSSSDTTPSPPGTTAAPVEVSTTYHSRPSSTPTTHFSASSTTLGRSEESTTVHSSPGATGTALFPTRSATSVLVGEPTTSPISSGSTETTALPGSTTTAGLSEESTTFYSSPPAAEMRDP

SEQ ID NO: 1026187 - protein, 1178 aa, Homo sapiens
ESVPQSLSVPMEYTASSLGSQSTTFHSSPGDTETTLLPDDTITSGLVEASTPTHSSTGSLHTTLTPASSTSAGLQEESTTFQSWPSSSDTTPSPPGTTAAPVEVSTTYHSRPSSTPTTHFSASSTTLGRSEESTTVHSSPGATGTALFPTRSATSVLVGEPTTSPISSGSTETTALPGSTTTAGLSEKSTTFYSSPRSPDTTLSPASTTSSGVSEESTTSHSRPGSTHTTAFPGSTTMPGVSQESTASHSSPGSTDTTLSPGSTTASSLGPESTTFHSSPGSTETTLLPARSTTSGLVEESTTYHSSPGSTQTMHFPESDTTSGRGEESTTSHSSTTHTISSAPSTTSALVEEPTSYHSSPGSTATTHFPDSSTTSGRSEESTASHSSQDATGTIVLPARSTTSVLLGESTTSPISSGSMETTALPGSTTTPGLSEKSTTFHSSPRSPATTLSPASTTSSGVSEESTTSHSRPGSTHTTAFPDSTTTPGLSRHSTTSHSSPGSTDTTLLPASTTTSGPSQESTTSHSSPGSTDTALSPGSTTALSFGQESTTFHSSPGSTHTTLFPDSTTSSGIVEASTRVHSSTGSPRTTLSPASSTSPGLQGESTAFQTHPASTHTTPSPPSTATAPVEESTTYHRSPGSTPTTHFPASSTTSGHSEKSTIFHSSPDASGTTPSSAHSTTSGRGESTTSRISPGSTEITTLPGSTTTPGLSEASTTFYSSPRSPTTTLSPASMTSLGVGEESTTSRSQPGSTHSTVSPASTTTPGLSEESTTVYSSSPGSTETTVFPRSTTTSVRGEEPTTFHSRPASTHTTLFTEDSTTSGLTEESTAFPGSPASTQTGLPATLTTADLGEESTTFPSSSGSTGTTLSPARSTTSGLVGESTPSRLSPSSTETTTLPGSPTTPSLSEKSTTFYTSPRSPDATLSPATTTSSGVSEESSTSHSQPGSTHTTAFPDSTTTSGLSQEPTTSHSSQGSTEATLSPGSTTASSLGQQSTTFHSSPGDTETTLLPDDTITSGLVEASTPTHSSTGSLHTTLTPASSTSAGLQEESTTFQSWPSSSDTTPSPPGTTAAPVEVSTTYHSRPSSTPTTHFSASSTTLGRSEESTTVHSSPGATGTALFPTRSATSVLVGEPTTSPISSGSTETTALPGSTTTPGLSEESTTFYSSPPAAEMRDP

SEQ ID NO: 1026188 - protein, 1113 aa, Homo sapiens
ESVPQSLSVPMEYTASSLGSQSTTFHSSPGDTETTLLPDDTITSGLVEASTPTHSSTGSLHTTLTPASSTSAGLQEESTTFQSWPSSSDTTPSPPGTTAAPVEVSTTYHSRPSSTPTTHFSASSTTLGRSEESTTVHSSPGATGTALFPTRSATSVLVGEPTTSPISSGSTETTALPGSTTTAGLSEKSTTFYSSPRSPDTTLSPASTTSSGVSEESTTSHSRPGSTHTTAFPGSTTMPGVSQESTASHSSPGSTDTTLSPGSTTASSLGPESTTFHSSPGSTETTLLPDNTTASGLLEASTPVHSSTGSPHTTLSPAGSTTRQGESTTFQSWPNSKDTTPAPPTTTSAFVELSTTSHGSPSSTPTTHFSASSTTLGRSEESTTVHSSPVATATTPSPARSTTSGLVEESTTYHSSPGSTQTMHFPESDTTSGRGEESTTSHSSTTHTISSAPSTTSALVEEPTSYHSSPGSTATTHFPDSSTTSGRSEESTASHSSQDATGTIVLPARSTTSVLLGESTTSPRTTLSPASSTSPGLQGESTAFQTHPASTHTTPSPPSTATAPVEESTTYHRSPGSTPTTHFPASSTTSGHSEKSTIFHSSPDASGTTPSSAHSTTSGRGESTTSRISPGSTEITTLPGSTTTPGLSEASTTFYSSPRSPTTTLSPASMTSLGVGEESTTSRSQPGSTHSTVSPASTTTPGLSEESTTVYSSSPGSTETTVFPRSTTTSVRGEEPTTFHSRPASTHTTLFTEDSTTSGLTEESTAFPGSPASTQTGLPATLTTADLGEESTTFPSSSGSTGTTLSPARSTTSGLVGESTPSRLSPSSTETTTLPGSPTTPSLSEKSTTFYTSPRSPDATLSPATTTSSGVSEESSTSHSQPGSTHTTAFPDSTTTSGLSQEPTTSHSSQGSTEATLSPGSTTASSLGQQSTTFHSSPGDTETTLLPDDTITSGLVEASTPTHSSTGSLHTTLTPASSTSAGLQEESTTFQSWPSSSDTTPSPPGTTAAPVEVSTTYHSRPSSTPTTHFSASSTTLGRSEESTTVHSSPGATGTALFPTRSATSVLVGEPTTSPISSGSTETTALPGSTTTPGLSEESTTFYSSPPAAEMRDP

SEQ ID NO: 1026189 - protein, 444 aa, Homo sapiens
MTSLGVGEESTTSRSQPGSTHSTVSPASTTTPGLSEESTTVYSSSPGSTETTVFPRSTTTSVRGEEPTTFHSRPASTHTTLFTEDSTTSGLTEESTAFPGSPASTQTGLPATLTTADLGEESTTFPSSSGSTGTTLSPARSTTSGLVGESTPSRLSPSSTETTTLPGSPTTPSLSEKSTTFYTSPRSPDATLSPATTTSSGVSEESSTSHSQPGSTHTTAFPDSTTTSGLSQEPTTSHSSQGSTEATLSPGSTTASSLGQQSTTFHSSPGDTETTLLPDDTITSGLVEASTPTHSSTGSLHTTLTPASSTSAGLQEESTTFQSWPSSSDTTPSPPGTTAAPVEVSTTYHSRPSSTPTTHFSASSTTLGRSEESTTVHSSPGATGTALFPTRSATSVLVGEPTTSPISSGSTETTALPGSTTTAGLSEKSTTFYSSPPAAEMRDP

SEQ ID NO: 1026190 - protein, 1090 aa, Homo sapiens
ESVPQSLSVPMEYTASSLGSQSTTFHSSPGDTETTLLPDDTITSGLVEASTPTHSSTGSLHTTLTPASSTSAGLQEESTTFQSWPSSSDTTPSPPGTTAAPVEVSTTYHSRPSSTPTTHFSASSTTLGRSEESTTVHSSPGATGTALFPTRSATSVLVGEPTTSPISSGSTETTALPGSTTTAGLSEKSTTFYSSPRSPDTTLSPASTTSSGVSEESTTSHSRPGSTHTTAFPGSTTMPGVSQESTASHSSPGSTDTTLSPGSTTASSLGPESTTFHSSPGSTETTLLPDNTTASGLLEASTPVHSSTGSPHTTLSPAGSTTRQGESTTFQSWPNSKDTTPAPPTTTSAFVELSTTSHGSPSSTPTTHFSASSTTLGRSEESTTVHSSPVATATTPSPARSTTSGLVEESTTYHSSPGSTQTMHFPESDTTSGRGEESTTSHSSTTHTISSAPSTTSALVEEPTSYHSSPGSTATTHFPDSSTTSGRSEESTASHSSQDATGTIVLPARSTTSVLLGESTTSPISSGSMETTALPGSTTTPGLSEKSTTFHSSPRSPATTLSPASTTSSGVSEESTTSHSRPGSTHTTAFPDSTTTPGLSRHSTTSHSSPGSTDTTLLPASTTTSGPSQESTTSHSSPGSTDTALSPGSTTALSFGQESTTFHSSPGSTHTTLFPDSTTSSGIVEASTRVHSSTGSPRTTLSPASSTSLDFRENLPPSRPTQPQLTRRLHLLAPQQPLLKNLQPTTAAQARLQQHTSLPAPQLRATVRNQQYSTAAQMQVEQHPHLPTPQPQVVENLQPHVSPSSTETTTLPGSPTTPSLSEKSTTFYTSPRSPDATLSPATTTSSGVSEESSTSHSQPGSTHTTAFPDSTTTSGLSQEPTTSHSSQGSTEATLSPGSTTASSLGQQSTTFHSSPGDTETTLLPDDTITSGLVEASTPTHSSTGSLHTTLTPASSTSAGLQEESTTFQSWPSSSDTTPSPPGTTAAPVEVSTTYHSRPSSTPTTHFSASSTTLGRSEESTTVHSSPGATGTALFPTRSATSVLVGEPTTSPISSGSTETTALPGSTTTPGLSEESTTFYSSPPAAEMRDP

SEQ ID NO: 1026191 - protein, 846 aa, Homo sapiens
ESVPQSLSVPMEYTASSLGSQSTTFHSSPGDTETTLLPDDTITSGLVEASTPTHSSTGSLHTTLTPASSTSAGLQEESTTFQSWPSSSDTTPSPPGTTAAPVEVSTTYHSRPSSTPTTHFSASSTTLGRSEEINNSPQQPRCNWNSTLPYPLCNLSSCWRTYNVTHSSPGSTDTTLLPASTTTSGPSQESTTSHSSPGSTDTALSPGSTTALSFGQESTTFHSSPGSTHTTLFPDSTTSSGIVEASTRVHSSTGSPRTTLSPASSTSPGLQGESTAFQTHPASTHTTPSPPSTATAPVEESTTYHRSPGSTPTTHFPASSTTSGHSEKSTIFHSSPDASGTTPSSAHSTTSGRGESTTSRISPGSTEITTLPGSTTTPGLSEASTTFYSSPRSPTTTLSPASMTSLGVGEESTTSRSQPGSTHSTVSPASTTTPGLSEESTTVYSSSPGSTETTVFPRSTTTSVRGEEPTTFHSRPASTHTTLFTEDSTTSGLTEESTAFPGSPASTQTGLPATLTTADLGEESTTFPSSSGSTGTTLSPARSTTSGLVGESTPSRLSPSSTETTTLPGSPTTPSLSEKSTTFYTSPRSPDATLSPATTTSSGVSEESSTSHSQPGSTHTTAFPDSTTTSGLSQEPTTSHSSQGSTEATLSPGSTTASSLGQQSTTFHSSPGDTETTLLPDDTITSGLVEASTPTHSSTGSLHTTLTPASSTSAGLQEESTTFQSWPSSSDTTPSPPGTTAAPVEVSTTYHSRPSSTPTTHFSASSTTLGRSEESTTVHSSPGATGTALFPTRSATSVLVGEPTTSPISSGSTETTALPGSTTTPGLSEESTTFYSSPPAAEMRDP

SEQ ID NO: 1026192 - protein, 702 aa, Homo sapiens
ESVPQSLSVPMEYTASSLGSQSTTFHSSPGDTETTLLPDDTITSGLVEASTPTHSSTGSLHTTLTPASSTSAGLQEESTTFQSWPSSSDTTPSPPGTTAAPVEVSTTYHSRPSSTPTTHFSASSTTLGRSEESTTVHSSPGATGTALFPTRSATSVLVGEPTTSPISSGSTETTALPGSTTTAGLSEKSTTFYSSPRSPDTTLSPASTTSSGVSEESTTSHSRPGSTHTTAFPGSTTMPGVSQESTASHSSPGSTDTTLSPGSTTASSLGPESTTFHSSPGSTETTLLPDNTTASGLLEASTPVHSSTGSPHTTLSPAGSTTRQGESTTFQSWPNSKDTTPAPPTTTSAFVELSTTSHGSPSSTPTTHFSASSTTLGRSEESTTVHSSPVATATTPSPARSTTSGLVEESTTYHSSPGSTQTMHFPESDTTSGRGEESTTSHSSTTHTISSAPSTTSALVEEPTSYHSSPGSTATTHFPDSSTTSGRSEESTASHSSQDATGTIVLPARSTTSVLLGESTTSPISSGSMETTALPGSTTTPGLSEKSTTFHSSPRSPATTLSPASTTSSGVSEESTTSHSRPGSTHTTAFPDSTTTPGLSRHSTTSHSSPGSTDTTLLPASTTTSGPSQESTTSHSSPGSTDTALSPGSTTALSFGQESTTFHSSPGSTHTTLFPDSTTSSGILSCTPESTNGRKQTQPAPM

SEQ ID NO: 1026193 - protein, 598 aa, Homo sapiens
ESVPQSLSVPMEYTASSLGSQSTTFHSSPGDTETTLLPDDTITSGLVEASTPTHSSTGSLHTTLTPASSTSAGLQEESTTFQSWPSSSDTTPSPPGTTAAPVEVSTTYHSRPSSTPTTHFSASSTTLGRSEESTTVHSSPGATGTALFPTRSATSVLVGEPTTSPISSGSTETTALPGSTTTAGLSEKSTTFYSSPRSPDTTLSPASTTSSGVSEESTTSHSRPGSTHTTAFPGSTTMPGVSQESTASHSSPGSTDTTLSPGSTTASSLGPESTTFHSSPGSTETTLLPDNTTASGLLEASTPVHSSTGSPHTTLSPAGSTTRQGESTTFQSWPNSKDTTPAPPTTTSAFVELSTTSHGSPSSTPTTHFSASSTTLGRSEESTTVHSSPVATATTPSPARSTTSGLVEESTTYHSSPGSTQTMHFPESDTTSGRGEESTTSHSSTTHTISSAPSTTSALVEEPTSYHSSPGSTATTHFPDSSTTSGRSEESTASHSSQDATGTIVLPARSTTSVLLGESTTSPISSGSMETTALPGSTTTPGLSEKSTTFHSSPRSPATTLSPASTTSSGVSEESTTSPTRFYSLNSVTCQHHHARPQ

SEQ ID NO: 1026194 - protein, 550 aa, Homo sapiens
ESVPQSLSVPMEYTASSLGSQSTTFHSSPGDTETTLLPDDTITSGLVEASTPTHSSTGSLHTTLTPASSTSAGLQEESTTFQSWPSSSDTTPSPPGTTAAPVEVSTTYHSRPSSTPTTHFSASSTTLGRSEESTTVHSSPGATGTALFPTRSATSVLVGEPTTSPISSGSTETTALPGSTTTAGLSEKSTTFYSSPRSPDTTLSPASTTSSGVSEESTTSHSRPGSTHTTAFPGSTTMPGVSQESTASHSSPGSTDTTLSPGSTTASSLGPESTTFHSSPGSTETTLLPDNTTASGLLEASTPVHSSTGSPHTTLSPAGSTTRQGESTTFQSWPNSKDTTPAPPTTTSAFVELSTTSHGSPSSTPTTHFSASSTTLGRSEESTTVHSSPVATATTPSPARSTTSGLVEESTTYHSSPGSTQTMHFPESDTTSGRGEESTTSHSSTTHTISSAPSTTSALVEEPTSYHSSPGSTATTHFPDSSTTSGRSEESTASHSSQDATGTIVLPARSTTSVLLGESTTSPISSGSMETTALPGSTTTRNVLLKLLKL

SEQ ID NO: 1026195 - protein, 529 aa, Homo sapiens
ESVPQSLSVPMEYTASSLGSQSTTFHSSPGDTETTLLPDDTITSGLVEASTPTHSSTGSLHTTLTPASSTSAGLQEESTTFQSWPSSSDTTPSPPGTTAAPVEVSTTYHSRPSSTPTTHFSASSTTLGRSEESTTVHSSPGATGTALFPTRSATSVLVGEPTTSPISSGSTETTALPGSTTTAGLSEKSTTFYSSPRSPDTTLSPASTTSSGVSEESTTSHSRPGSTHTTAFPGSTTMPGVSQESTASHSSPGSTDTTLSPGSTTASSLGPESTTFHSSPGSTETTLLPDNTTASGLLEASTPVHSSTGSPHTTLSPAGSTTRQGESTTFQSWPNSKDTTPAPPTTTSAFVELSTTSHGSPSSTPTTHFSASSTTLGRSEESTTVHSSPVATATTPSPARSTTSGLVEESTTYHSSPGSTQTMHFPESDTTSGRGEESTTSHSSTTHTISSAPSTTSALVEEPTSYHSSPGSTATTHFPDSSTTSGRSEESTASHSSQDATGTYKWNHTLTCPFYYLRPHCYYHPRYMQ

SEQ ID NO: 1026196 - protein, 652 aa, Homo sapiens
ESVPQSLSVPMEYTASSLGSQSTTFHSSPGDTETTLLPDDTITSGLVEASTPTHSSTGSLHTTLTPASSTSAGLQEESTTFQSWPSSSDTTPSPPGTTAAPVEVSYNLPQQPGLNSNNTLPCQLHNLRPEGGIKSIPQQARCNGKWNNTLSAHSTTSGRGESTTSRISPGSTEITRYPAVPQHQASVRNLPLSTVAPDHQNHNTLTCCMTSLGVGEESTTSRSQPGSTHSTVSPASTTTPGLSEESTTVYSSSPGSTETTVFPRSTTTSVRGEEPTTFHSRPASTHTTLFTEDSTTSGLTEESTAFPGSPASTQTGLPATLTTADLGEESTTFPSSSGSTGTTLSPARSTTSGLVGESTPSRLSPSSTETTTLPGSPTTPSLSEKSTTFYTSPRSPDATLSPATTTSSGVSEESSTSHSQPGSTHTTAFPDSTTTSGLSQEPTTSHSSQGSTEATLSPGSTTASSLGQQSTTFHSSPGDTETTLLPDDTITSGLVEASTPTHSSTGSLHTTLTPASSTSAGLQEESTTFQSWPSSSDTTPSPPGTTAAPVEVSTTYHSRPSSTPTTHFSASSTTLGRSEESTTVHSSPGATGTALFPTRSATSVLVGEPTTSPISSGSTETTALPGSTTTAGLSEKSTTFYSSPPAAEMRDP

SEQ ID NO: 1026197 - protein, 454 aa, Homo sapiens
ESVPQSLSVPMEYTASSLGSQSTTFHSSPGDTETTLLPDDTITSGLVEASTPTHSSTGSLHTTLTPASSTSAGLQEESTTFQSWPSSSDTTPSPPGTTAAPVEVSTTYHSRPSSTPTTHFSASSTTLGRSEESTTVHSSPGATGTALFPTRSATSVLVGEPTTSPISSGSTETTALPGSTTTAGLSEKSTTFYSSPRSPDTTLSPASTTSSGVSEESTTSHSRPGSTHTTAFPGSTTMPGVSQESTASHSSPGSTDTTLSPGSTTASSLGPESTTFHSSPGSTETTLLPDNTTASGLLEASTPVHSSTGSPHTTLSPAGSTTRQGESTTFQSWPNSKDTTPAPPTTTSAFVELSTTSHGSPSSTPTTHHFSASSTTLGRSEESTTVHSSPGATGTALFPTRSATSVLVGEPTTSPISSGSTETTALPGSTTTPGLSEESTTFYSSPPAAEMRDP

SEQ ID NO: 1026198 - protein, 454 aa, Homo sapiens
ESVPQSLSVPMEYTASSLGSQSTTFHSSPGDTETTLLPDDTITSGLVEASTPTHSSTGSLHTTLTPASSTSAGLQEESTTFQSWPSSSDTTPSPPGTTAAPVEVSYNLPQQPGLNSNNTLPCQLHNLRPQGGINSIPQQPDAMGTTVLPAGSTPSVLVGDSTPSPISSGSMETTALPGSTTTPGLSEKSTTFYSSPRSPETLSPASTTSSGVSEESTTSHSRPGSTHTTAFPDSTTTPGLSQEPTTSHSSQGSTEATLSPGSTTASSLGQQSTTFHSSPGDTETTLLPDDTITSGLVEASTPTHSSTGSLHTTLTPASSTSAGLQEESTTFQSWPSSSDTTPSPPGTTAAPVEVSTTYHSRPSSTPTTHFSASSTTLGRSEESTTVHSSPGATGTALFPTRSATSVLVGEPTTSPISSGSTETTALPGSTTTPGLSEESTTFYSSPPAAEMRDP

SEQ ID NO: 1026199 - protein, 390 aa, Homo sapiens
ESVPQSLSVPMEYTASSLGSQSTTFHSSPGDTETTLLPDDTITSGLVEASTPTHSSTGSLHTTLTPASSTSAGLQEESTTFQSWPSSSDTTPSPPGTTAAPVEVSYNLPQQPGLNSNNTLPCQLHNLRPEGGIKSIPQQARCKGTTVLPAGSTPSVLVGDSTPSPISSGSMETTALPGSTTTPGLSEKSTTFYSSPRSPETLSPASTTSSGVSEESTTSHSRPGSTHTTAFPDSTTTPGLSRHSTTSHSSPGSTDTTLLPASTTTSGPSQESTTSHSSPGSTDTALSPGSTTALSFGQESTTFHSSPGSTHTTLFPDSTTSSGIVEASTRVHSSTGSPRTTLSPASSTSLTPGRTFSITDHPNLNHTTSSLPRPISYNFYNSGTSSIRSC

SEQ ID NO: 1026200 - protein, 235 aa, Homo sapiens
ESVPQSLSVPMEYTASSLGSQSTTFHSSPGDTETTLLPDDTITSGLVEASTPTHSSTGSLHTTLTPASSTSAGLQEESTTFQSWPSSSDTTPSPPGTTAAPVEVSTTYHSRPSSTPTTHFSASSTTLGRGSAVIYNLTHQSRLKGNNNVTLAVPQTPGLSEASTTFYSSPRSPTTTLSPASMTSLGVGEESTTSRSQPGSTHSTVSPASTTTPGLSEESTTVHKPAAQESTRPRI

SEQ ID NO: 1026201 - protein, 990 aa, Homo sapiens
ESVPQSLSVPMEYTASSLGSQSTTFHSSPGDTETTLLPDDTITSGLVEASTPTHSSTGSLHTTLTPASSTSAGLQEESTTFQSWPSSSDTTPSPPGTTAAPVEVSTTYHSRPSSTPTTHFSASSTTLGRSEESTTVHSSPGATGTALFPTRSATSVLVGEPTTSPISSGSTETTALPGSTTTAGLSEKSTTFYSSPRSPDTTLSPASTTSSGVSEESTTSHSRPGSTHTTAFPGSTTMPGVSQESTASHSSPGSTDTTLSPGSTTASSLGPESTTFHSSPGSTETTLLPDNTTASGLLEASTPVHSSTGSPHTTLSPAGSTTRQGESTTFQSWPNSKDTTPAPPTTTSAFVELSTTSHGSPSSTPTTHFSASSTTLGRSEESTTVHSSPVATATTPSPARSTTSGLVEESTTYHSSPGSTQTMHFPESDTTSGRGEESTTSHSSTTHTISSAPSTTSALVEEPTSYHSSPGSTATTHFPDSSTTSGRSEESTASHSSQDATGTIVLPARSTTSVLLGESTTSPISSGSMETTALPGSTTTPGLSEKSTTFHSSPRSPATTLSPASTTSSGVSEESTTSHSRPGSTHTTAFPDSTTTPGLSRHSTTSHSSPGSTDTTLLPASTTTSGPSQESTTSHSSPGSTDTALSPGSTTALSFGQESTTFHSSPGSTHTTLFPDSTTSSGIVEASTRVHSSTGSPRTTLSPASSTSPGLQGESTAFQTHPASTHTTPSPPSTATAPVEESTTYHRSPGSTPTTHFPASSTTSGHSEKSTIFHSSPDASGTTPSSAHSTTSGRGESTTSRISPGSTEITTLPGSTTTPGLSEASTTFYSSPRSPTTTLSPASMTSLGVGEESTTSRSQPGSTHSTVSPASTTTPGLSEESTTVYSSSPGSTETTVFPRSTTTSVRGEEPTTFHSRPASTHTTLFTEDSTTSGLTEESTAFPGSPASTQTGLPATLTTADLGEESTTFPSSSMAQPTSSTSRGKSGAELD

SEQ ID NO: 1026202 - protein, 930 aa, Homo sapiens
ESVPQSLSVPMEYTASSLGSQSTTFHSSPGDTETTLLPDDTITSGLVEASTPTHSSTGSLHTTLTPASSTSAGLQEESTTFQSWPSSSDTTPSPPGTTAAPVEVSTTYHSRPSSTPTTHFSASSTTLGRSEESTTVHSSPGATGTALFPTRSATSVLVGEPTTSPISSGSTETTALPGSTTTAGLSEKSTTFYSSPRSPDTTLSPASTTSSGVSEESTTSHSRPGSTHTTAFPGSTTMPGVSQESTASHSSPGSTDTTLSPGSTTASSLGPESTTFHSSPGSTETTLLPDNTTASGLLEASTPVHSSTGSPHTTLSPAGSTTRQGESTTFQSWPNSKDTTPAPPTTTSAFVELSTTSHGSPSSTPTTHFSASSTTLGRSEESTTVHSSPVATATTPSPARSTTSGLVEESTTYHSSPGSTQTMHFPESDTTSGRGEESTTSHSSTTHTISSAPSTTSALVEEPTSYHSSPGSTATTHFPDSSTTSGRSEESTASHSSQDATGTIVLPARSTTSVLLGESTTSPISSGSMETTALPGSTTTPGLSEKSTTFHSSPRSPATTLSPASTTSSGVSEESTTSHSRPGSTHTTAFPDSTTTPGLSRHSTTSHSSPGSTDTTLLPASTTTSGPSQESTTSHSSPGSTDTALSPGSTTALSFGQESTTFHSSPGSTHTTLFPDSTTSSGIVEASTRVHSSTGSPRTTLSPASSTSPGLQGESTAFQTHPASTHTTPSPPSTATAPVEESTTYHRSPGSTPTTHFPASSTTSGHSEKSTIFHSSPDASGTTPSSAHSTTSGRGESTTSRISPGSTEITTLPGSTTTPGLSEASTTFYSSPRSPTTTLSPASMTSLGVGEESTTSRSQPGSTHSTVSPASTTTPGLSEESTTVYSSSPGSTETTVFPRSTTTSVRGEEPTTFHSRALSCSQHLTLAARA

SEQ ID NO: 1026203 - protein, 839 aa, Homo sapiens
ESVPQSLSVPMEYTASSLGSQSTTFHSSPGDTETTLLPDDTITSGLVEASTPTHSSTGSLHTTLTPASSTSAGLQEESTTFQSWPSSSDTTPSPPGTTAAPVEVSTTYHSRPSSTPTTHFSASSTTLGRSEESTTVHSSPGATGTALFPTRSATSVLVGEPTTSPISSGSTETTALPGSTTTAGLSEKSTTFYSSPRSPDTTLSPASTTSSGVSEESTTSHSRPGSTHTTAFPGSTTMPGVSQESTASHSSPGSTDTTLSPGSTTASSLGPESTTFHSSPGSTETTLLPDNTTASGLLEASTPVHSSTGSPHTTLSPAGSTTRQGESTTFQSWPNSKDTTPAPPTTTSAFVELSTTSHGSPSSTPTTHFSASSTTLGRSEESTTVHSSPVATATTPSPARSTTSGLVEESTTYHSSPGSTQTMHFPESDTTSGRGEESTTSHSSTTHTISSAPSTTSALVEEPTSYHSSPGSTATTHFPDSSTTSGRSEESTASHSSQDATGTIVLPARSTTSVLLGESTTSPISSGSMETTALPGSTTTPGLSEKSTTFHSSPRSPATTLSPASTTSSGVSEESTTSHSRPGSTHTTAFPDSTTTPGLSRHSTTSHSSPGSTDTTLLPASTTTSGPSQESTTSHSSPGSTDTALSPGSTTALSFGQESTTFHSSPGSTHTTLFPDSTTSSGIVEASTRVHSSTGSPRTTLSPASSTSPGLQGESTAFQTHPASTHTTPSPPSTATAPVEESTTYHRSPGSTPTTHFPASSTTSGHSEKSTIFHSSPDASGTTPSSAHSTTSGRGESTTSRISPGSTEITTLPGSTTTPGLSEASTTFYSRLQQQPRLN

SEQ ID NO: 1026204 - protein, 857 aa, Homo sapiens
ESVPQSLSVPMEYTASSLGSQSTTFHSSPGDTETTLLPDDTITSGLVEASTPTHSSTGSLHTTLTPASSTSAGLQEESTTFQSWPSSSDTTPSPPGTTAAPVEVSTTYHSRPSSTPTTHFSASSTTLGRSEESTTVHSSPGATGTALFPTRSATSVLVGEPTTSPISSGSTETTALPGSTTTAGLSEKSTTFYSSPRSPDTTLSPASTTSSGVSEESTTSHSRPGSTHTTAFPGSTTMPGVSQESTASHSSPGSTDTTLSPGSTTASSLGPESTTFHSSPGSTETTLLPDNTTASGLLEASTPVHSSTGSPHTTLSPAGSTTRQGESTTFQSWPNSKDTTPAPPTTTSAFVELSTTSHGSPSSTPTTHFSASSTTLGRSEESTTVHSSPVATATTPSPARSTTSGLVEESTTYHSSPGSTQTMHFPESDTTSGRGEESTTSHSSTTHTISSAPSTTSALVEEPTSYHSSPGSTATTHFPDSSTTSGRSEESTASHSSQDATGTIVLPARSTTSVLLGESTTSPISSGSMETTALPGSTTTPGLSEKSTTFHSSPRSPATTLSPASTTSSGVSEESTTSHSRPGSTHTTAFPDSTTTPGLSRHSTTSHSSPGSTDTTLLPASTTTSGPSQESTTSHSSPGSTDTALSPGSTTALSFGQESTTFHSSPGSTHTTLFPDSTTSSGIVEASTRVHSSTGSPRTTLSPASSTSPGLQGESTAFQTHPASTHTTPSPPSTATAPVEESTTYHRSPGSTPTTHFPASSTTSGHSEKSTIFHSSPDASGTTPSSAHSTTSGRGESTTSRISPGSTEITTLPGSTTTPGLSEASTTFYSQGTDVCVFEPGCCGKLLIPDWKPDAGV

SEQ ID NO: 1026205 - protein, 741 aa, Homo sapiens
ESVPQSLSVPMEYTASSLGSQSTTFHSSPGDTETTLLPDDTITSGLVEASTPTHSSTGSLHTTLTPASSTSAGLQEESTTFQSWPSSSDTTPSPPGTTAAPVEVSTTYHSRPSSTPTTHFSASSTTLGRSEESTTVHSSPGATGTALFPTRSATSVLVGEPTTSPISSGSTETTALPGSTTTAGLSEKSTTFYSSPRSPDTTLSPASTTSSGVSEESTTSHSRPGSTHTTAFPGSTTMPGVSQESTASHSSPGSTDTTLSPGSTTASSLGPESTTFHSSPGSTETTLLPDNTTASGLLEASTPVHSSTGSPHTTLSPAGSTTRQGESTTFQSWPNSKDTTPAPPTTTSAFVELSTTSHGSPSSTPTTHFSASSTTLGRSEESTTVHSSPVATATTPSPARSTTSGLVEESTTYHSSPGSTQTMHFPESDTTSGRGEESTTSHSSTTHTISSAPSTTSALVEEPTSYHSSPGSTATTHFPDSSTTSGRSEESTASHSSQDATGTIVLPARSTTSVLLGESTTSPISSGSMETTALPGSTTTPGLSEKSTTFHSSPRSPATTLSPASTTSSGVSEESTTSHSRPGSTHTTAFPDSTTTPGLSRHSTTSHSSPGSTDTTLLPASTTTSGPSQESTTSHSSPGSTDTALSPGSTTALSFGQESTTFHSSPGSTHTTLFPDSTTSSGIVEASTRVHSSTGSPRTTLSPASSTSPGLQGESTAFQTHPASTHTTPSPRNVLLKLLKL

SEQ ID NO: 1026206 - protein, 641 aa, Homo sapiens
ESVPQSLSVPMEYTASSLGSQSTTFHSSPGDTETTLLPDDTITSGLVEASTPTHSSTGSLHTTLTPASSTSAGLQEESTTFQSWPSSSDTTPSPPGTTAAPVEVSTTYHSRPSSTPTTHFSASSTTLGRSEESTTVHSSPGATGTALFPTRSATSVLVGEPTTSPISSGSTETTALPGSTTTAGLSEKSTTFYSSPRSPDTTLSPASTTSSGVSEESTTSHSRPGSTHTTAFPGSTTMPGVSQESTASHSSPGSTDTTLSPGSTTASSLGPESTTFHSSPGSTETTLLPDNTTASGLLEASTPVHSSTGSPHTTLSPAGSTTRQGESTTFQSWPNSKDTTPAPPTTTSAFVELSTTSHGSPSSTPTTHFSASSTTLGRSEESTTVHSSPVATATTPSPARSTTSGLVEESTTYHSSPGSTQTMHFPESDTTSGRGEESTTSHSSTTHTISSAPSTTSALVEEPTSYHSSPGSTATTHFPDSSTTSGRSEESTASHSSQDATGTIVLPARSTTSVLLGESTTSPISSGSMETTALPGSTTTPGLSEKSTTFHSSPRSPATTLSPASTTSSGVSEESTTSHSRPGSTHTTAFPDSTTTPGLSRHSTTSHSSPGSTDTTLLPASTTTSGPSQESTTSHSSPGST

SEQ ID NO: 1026207 - protein, 470 aa, Homo sapiens
ESVPQSLSVPMEYTASSLGSQSTTFHSSPGDTETTLLPDDTITSGLVEASTPTHSSTGSLHTTLTPASSTSAGLQEESTTFQSWPSSSDTTPSPPGTTAAPVEVSTTYHSRPSSTPTTHFSASSTTLGRSEESTTVHSSPGATGTALFPTRSATSVLVGEPTTSPISSGSTETTALPGSTTTAGLSEKSTTFYSSPRSPDTTLSPASTTSSGVSEESTTSHSRPGSTHTTAFPGSTTMPGVSQESTASHSSPGSTDTTLSPGSTTASSLGPESTTFHSSPGSTETTLLPDNTTASGLLEASTPVHSSTGSPHTTLSPAGSTTRQGESTTFQSWPNSKDTTPAPPTTTSAFVELSTTSHGSPSSTPTTHFSASSTTLGRSEESTTVHSSPVATATTPSPARSTTSGLVEESTTYHSSPGSTQTMHFPESDTTSGRGEESTTSHSSTTHTISSAPSTTSALVEEPTSYHSSP

SEQ ID NO: 1026208 - protein, 629 aa, Homo sapiens
ESVPQSLSVPMEYTASSLGSQSTTFHSSPGDTETTLLPDDTITSGLVEASTPTHSSTGSLHTTLTPASSTSAGLQEESTTFQSWPSSSDTTPSPPGTTAAPVEVSTTYHSRPSSTPTTHFSASSTTLGRGSAVIYNLTHQSRLKRNNNVTWQYHKHQASVRHLPPSTAAPDHHPRSPTTTLSPASMTSLGVGEESTTSRSQPGSTHSTVSPASTTTPGLSEESTTVYSSSPGSTETTVFPRSTTTSVRGEEPTTFHSRPASTHTTLFTEDSTTSGLTEESTAFPGSPASTQTGLPATLTTADLGEESTTFPSSSGSTGTTLSPARSTTSGLVGESTPSRLSPSSTETTTLPGSPTTPSLSEKSTTFYTSPRSPDATLSPATTTSSGVSEESSTSHSQPGSTHTTAFPDSTTTSGLSQEPTTSHSSQGSTEATLSPGSTTASSLGQQSTTFHSSPGDTETTLLPDDTITSGLVEASTPTHSSTGSLHTTLTPASSTSAGLQEESTTFQSWPSSSDTTPSPPGTTAAPVEVSTTYHSRPSSTPTTHFSASSTTLGRSEESTTVHSSPGATGTALFPTRSATSVLVGEPTTSPISSGSTETTALPGSTTTPGLSEESTTFYSSPPAAEMRDP

SEQ ID NO: 1026209 - protein, 276 aa, Homo sapiens
ESVPQSLSVPMEYTASSLGSQSTTFHSSPGDTETTLLPDDTITSGLVEASTPTHSSTGSLHTTLTPASSTSAGLQEESTTFQSWPSSSDTTPSPPGTTAAPVEVSTTYHSRPSSTPTTHFSASSTTLGRGSAVIYNLTHQSRLKGNNNVTWQYHKHQASVRHLPPSTAAPDHHPRSPTTTLSPASMTSLGVGEESTTSRSQPGSTHSTVSPASTTTPGLSEESTTGILQLPTAAQAQRIQHCTCLVSAYGTGLEGGTTGIQSEFFITTTRDPGLNG

SEQ ID NO: 1026210 - protein, 186 aa, Homo sapiens
MAVFLLLLSSVNGLSGPQFLWFLSSPGCVPPPPFFCKWPVRASGLERSLGNLPHQQEAAGQLDLGNVDSQIYLQPRPLWTCSALVPTAEATSCPSGCQWHLCPSICLLSFRYPSFSHMAPLVHQQSLWLYFHSTSHHFPPLPDYLAASGHQCLSQESPKWSPPSPPPNISREHSSRVIAFSNRLQP

SEQ ID NO: 1026211 - protein, 241 aa, Homo sapiens
SRLSRGRQAPRRAEGLHVRDAPTSGCALLERGPHPDTAIEEIKEKSEDCKTQNLGIVWEKADAWRKAHSAPTLPSGLAEDEILHRVALRRQSSICGPSIPKIDSEIRQGEHGSTKSALRLVSKCTWIVQPWWVTVELGFLLSSSCMTAVIWRGPKKNGMIKQFLRDVDWGEVDYLIVDTPPGTSDEHLSVVRYLATAHIDGAVIITIPRRCHSGGPGESILAQGNLPSRGGGTLRAPFLGN

SEQ ID NO: 1026212 - protein, 194 aa, Homo sapiens [sequence omitted]

SEQ ID NO: 1026213 - protein, 45 aa, Homo sapiens
MRTFPKDAFMINTKLVLVCSAATVLVIRSSYPLIDHTLLSEAVTL

SEQ ID NO: 1026214 - protein, 275 aa, Homo sapiens
  misc_feature (212)..(212): Xaa can be any naturally occurring amino acid
MFSSSAKIVKPNGEKPDEFESGISQALLELEMNSDLKAQLRELNITAAKEIEVGGGRKAIIIFVPVPQLKSFQKIQVRLVRELEKKFSGKHVVFIAQRRILPKPTRKSRTKNKQKRPRSRTLTAVHDAILEDLVFPSEIVGKRIRVKLDGSRLIKVHLDKAQQNNVEHKVETFSGVYPTLMGSDDNFYSPHLQLATEMNNGEDFFINHSSHXTFVFKAKILLHTLREPLSIPVDHYLALVITFAPPHPPPPLNTTPCVPSNAIIYYQLDRSPRPK

SEQ ID NO: 1026215 - protein, 104 aa, Homo sapiens
MIIFTLQRRILPKPTRKSRTKNKQKRPRSRTLTAVHDAILEDLVFPSEIVGKRIRVKLDGSRLIKVHLDKAQQNNVEHKVETFSGVYKKLTGKDVNFEFPEFQL

SEQ ID NO: 1026216 - protein, 63 aa, Homo sapiens
MFSSSAKIVKPNGEKPDEFESGISQALLELEMNSDLKAQLRELNITAAKEIEVGGDLLKVIFC

SEQ ID NO: 1026217 - protein, 194 aa, Homo sapiens [sequence omitted]

SEQ ID NO: 1026218 - protein, 166 aa, Homo sapiens
  misc_feature (6)..(6): Xaa can be any naturally occurring amino acid
  misc_feature (13)..(13): Xaa can be any naturally occurring amino acid
LGDQGXAPRGAAXDYGSPAAGIPPRRGGRKAIIIFVPVPQLKSFQKIQVRLVRELEKKFSGKHVVFIAQRRILPKPTRKSRTKNKQKRPRSRTLTAVHDAILEDLVFPSEIVGKRIRVKLDGSRLIKVHLDKAQQNNVEHKVETFSGVYKKLTGKDVNFEFPEFQL

SEQ ID NO: 1026219 - protein, 187 aa, Homo sapiens
MFSSSAKIVKPNGEKPDEFESGISQALLELEMNSDLKAQLRELNITAAKEIEVGGGRKAIIIFVPVPQLKSFQKIQVRLVRELEKKFSGKHVVFIAQRRSLPKSSDEHDVMLEDLDIQAKVPAGDTASDYDGTRIIQVHYDRAQQNTVAHTVATLSECYETLTVNDAKFEFADFQLLTCTTHWVYSQ

SEQ ID NO: 1026220 - protein, 104 aa, Homo sapiens; identical to SEQ ID NO: 1026215

SEQ ID NO: 1026221 - protein, 492 aa, Homo sapiens [sequence omitted]

SEQ ID NO: 1026222 - protein, 492 aa, Homo sapiens [sequence omitted]

SEQ ID NO: 1026223 - protein, 492 aa, Homo sapiens [sequence omitted]

SEQ ID NO: 1026224 - protein, 396 aa, Homo sapiens
MGSAPWAPVLLLALGLRGLQAGARRAPDPGFQERFFQQRLDHFNFERFGNKTFPQRFLVSDRFWVRGEGPIFFYTGNEGDVWAFANNSGFVAELAAERGALLVFAEHRYYGKSLPFGAQSTQRGHTELLTVEQALADFAELLRALRRDLGAQDAPAIAFGGSYGGMLSAYLRMKYPHLVAGALAASAPVLAVAGLGDSNQFFRDVTADFEGQSPKCTQGVREAFRQIKDLFLQGAYDTVRWEFGTCQPLSDEKDLTQLFMFARNAFTVLAMMDYPYPTDFLGPLPANPVKVGCDRLLSEAQRITGLRALAGLVYNASGSEHCYDIYRLYHSCADPTGCGTGPDARAWDYQACTEINLTFASNNVTDMFPDLPFTDELRQPRREQQPALRGGPRLSL

SEQ ID NO: 1026225 - protein, 476 aa, Homo sapiens
MGSAPWAPVLLLALGLRGLQAGARRAPDPGFQERFFQQRLDHFNFERFGNKTFPQRFLVSDRFWVRGEGPIFFYTGNEGDVWAFANNSGFVAELAAERGALLVFAEHRYYGKSLPFGAQSTQRGHTELLTVEQALADFAELLRALRRDLGAQDAPAIAFGGSYGGMLSAYLRMKYPHLVAGALAASAPVLAVAGLGDSNQFFRDVTADFEGQSPKCTQGVREAFRQIKDLFLQGAYDTVRWEFGTCQPLSDEKDLTQLFMFARNAFTVLAMMDYPYPTDFLGPLPANPVKVGCDRLLSEAQRITGLRALAGALPPAPDGTGCGTGPDARAWDYQACTEINLTFASNNVTDMFPDLPFTDELRQRYCLDTWGVWPRPDWLLTSFWGGDLRAASNIIFSNGNLDPWAGGGIRRNLSASVIAVTIQGGAHHLDLRASHPEDPASVVEARKLEATIIGEWVKAARREQQPALRGGPRLSL

SEQ ID NO: 1026226 - protein, 349 aa, Homo sapiens
MGSAPWAPVLLLALGLRGLQAGARRAPDPGFQERFFQQRLDHFNFERFGNKTFPQRFLVSDRFWVRGEGPIFFYTGNEGDVWAFANNSGFVAELAAERGALLVFAEHRYYGKSLPFGAQSTQRGHTELLTVEQALADFAELLRALRRDLGAQDAPAIAFGGSYGGMLSAYLRMKYPHLVAGALAASAPVLAVAGLGDSNQFFRDVTADFEGQSPKCTQGVREAFRQIKDLFLQGAYDTVRWEFGTCQPLSDEKDLTQLFMFARNAFTVLAMMDYPYPTDFLGPLPANPVKVGCDRLLSEAQRITGLRALAHWLRHRPRRQGLGLPGLHRDQPDLRQQQCDRYVPRPALH

SEQ ID NO: 1026227 - protein, 376 aa, Homo sapiens
MGSAPWAPVLLLALGLRGLQAGARRAPDPGFQERFFQQRLDHFNFERFGNKTFPQRFLVSDRFWVRGEGPIFFYTGNEGDVWAFANNSGFVAELAAERGALLVFAEHRYYGKSLPFGAQSTQRGHTELLTVEQALADFAELLRALRRDLGAQDAPAIAFGGSYGGMLSAYLRMKYPHLVAGALAASAPVLAVAGLGDSNQFFRDVTADFEGQSPKCTQGVREAFRQIKDLFLQGAYDTVRWEFGTCQPLSDEKDLTQLFMFARNAFTVLAMMDYPYPTDFLGPLPANPVKVGCDRLLSEAQRITGLRALAGLVYNASGSEHCYDIYRLYHSCADPTGCGTGPDARAWDYQISEPPATSSSPTGTWTPGQGAGFGGT

SEQ ID NO: 1026228 - protein, 515 aa, Homo sapiens
MGSAPWAPVLLLALGLRGLQAGGEWRRPPAHSPVPAPPLRFASPHARRAPDPGFQERFFQQRLDHFNFERFGNKTFPQRFLVSDRFWVRGEGPIFFYTGNEGDVWAFANNSGFVAELAAERGALLVFAEHRYYGKSLPFGAQSTQRGHTELLTVEQALADFAELLRALRRDLGAQDAPAIAFGGSYGGMLSAYLRMKYPHLVAGALAASAPVLAVAGLGDSNQFFRDVTADFEGQSPKCTQGVREAFRQIKDLFLQGAYDTVRWEFGTCQPLSDEKDLTQLFMFARNAFTVLAMMDYPYPTDFLGPLPANPVKVGCDRLLSEAQRITGLRALAGLVYNASGSEHCYDIYRLYHSCADPTGCGTGPDARAWDYQACTEINLTFASNNVTDMFPDLPFTDELRQRYCLDTWGVWPRPDWLLTSFWGGDLRAASNIIFSNGNLDPWAGGGIRRNLSASVIAVTIQGGAHHLDLRASHPEDPASVVEARKLEATIIGEWVKAARREQQPALRGGPRLSL

SEQ ID NO: 1026229 - protein, 354 aa, Homo sapiens
MGSAPWAPVLLLALGLRGLQAGARRAPDPGFQERFFQQRLDHFNFERFGNKTFPQRFLVSDRFWVRGEGPIFFYTGNEGDVWAFANNSGFVAELAAERGALLVFAEHRYYGKSLPFGAQSTQRGHTELLTVEQALADFAELLRALRRDLGAQDAPAIAFGGSYGGMLSAYLRMKYPHLVAGALAASAPVLAVAGLGDSNQFFRDVTADFEGQSPKCTQGVREAFRQIKDLFLQGAYDTVRWEFGTCQPLSDEKDLTQLFMFARNAFTVLAMMDYPYPTDFLGPLPANPVKVRRRLSKGATGEGRPGVSTKAGGQRPDPHPGAREAELVEEGPTLMSPLLLHPLRPDSYCSALAR

SEQ ID NO: 1026230 - protein, 325 aa, Homo sapiens
CGDLEDPGLPLGCGGAGVQRAVLAVAGLGDSNQFFRDVTADFEGQSPKCTQGVREAFRQIKDLFLQGAYDTVRWEFGTCQPLSDEKDLTQLFMFARNAFTVLAMMDYPYPTDFLGPLPANPVKVGCDRLLSEAQRITGLRALAGLVYNASGSEHCYDIYRLYHSCADPTGCGTGPDARAWDYQACTEINLTFASNNVTDMFPDLPFTDELRQRYCLDTWGVWPRPDWLLTSFWGGDLRAASNIIFSNGNLDPWAGGGIRRNLSASVIAVTIQGGAHHLDLRASHPEDPASVVEARKLEATIIGEWVKAARREQQPALRGGPRLSL

SEQ ID NO: 1026231 - protein, 470 aa, Homo sapiens
MGSAPWAPVLLLALGLRGLQAGGEWRRPPAHSPVPAPPLRFASPHSPQGPGPRLPGALLPAASGPLQLRALRQQDLPSALPGVGQVLGPGRGAHLLLHWERGRRVGLRQQLGLRRGAGGRAGGSTGLRGAPLLREVAAVRCAVHAARAHGAADGGAGPGRLRRAAPRATTRPRGPGCPRHRLRWKDFEGQSPKCTQGVREAFRQIKDLFLQGAYDTVRWEFGTCQPLSDEKDLTQLFMFARNAFTVLAMMDYPYPTDFLGPLPANPVKVGCDRLLSEAQRITGLRALAGLVYNASGSEHCYDIYRLYHSCADPTGCGTGPDARAWDYQACTEINLTFASNNVTDMFPDLPFTDELRQRYCLDTWGVWPRPDWLLTSFWGGDLRAASNIIFSNGNLDPWAGGGIRRNLSASVIAVTIQGGAHHLDLRASHPEDPASVVEARKLEATIIGEWVKAARREQQPALRGGPRLSL

SEQ ID NO: 1026232 - protein, 280 aa, Homo sapiens
MGSAPWAPVLLLALGLRGLQAGARRAPDPGFQERFFQQRLDHFNFERFGNKTFPQRFLVSDRFWVRGEGPIFFYTGNEGDVWAFANNSGFVAELAAERGALLVFAEHRYYGKSLPFGAQSTQRGHTELLTVEQALADFAELLRALRRDLGAQDAPAIAFGGSYGGMLSAYLRMKYPHLVAGALAASAPVLAVAGLGDSNQFFRDVTADFEGQSPKCTQGVREAFRQIKDLFLQGATTRRRGSRHCSVSERRPDQSSCSPHAYVLHEGFPTMILVLRNRRA

SEQ ID NO: 1026233 - protein, 436 aa, Homo sapiens
MGSAPWAPVLLLALGLRGLQAGARRAPDPGFQERFFQQRLDHFNFERFGNKTFPQRFLVSDRFWVRGEGPIFFYTGNEGDVWAFANNSGFVAELAAERGALLVFAEHRYYGKSLPFGAQSTQRGHTELLTVEQALADFAELLRALRRDLGAQDAPAIAFGGSYGGMLSAYLRMKYPHLVAGALAASAPVLAVAGLGDSNQFFRDVTADFEGQSPKCTQGVREAFRQIKDLFLQGAYDTVRWEFGTCQPLSDEKDLTQLFMFARNAFTVLAMMDYPYPTDFLGPLPANPVKVGCDRLLSEAQRITGLRALAGLVYNASGSEHCYDIYRLYHSCADPTGCGTGPDARAWDYQACTEINLTFASNNVTDMFPDLPFTDELRQRSQSRQQHHLLQREPGPLGRGRDSEEPECLSHRRHHPGGSAPPRPQSLPPRRSCFRG

SEQ ID NO: 1026234 - protein, 662 aa, Homo sapiens
MGSAPWAPVLLLALGLRGLQAGARRAPDPGFQERFFQQRLDHFNFERFGNKTFPQRFLVSDRFWVRGEGPIFFYTGNEGDVWAFANNSGFVAELAAERGALLVFAEHRYYGKSLPFGAQSTQRGHTELLTVEQALADFAELLRALRRDLGAQDAPAIAFGGSYGGMLSAYLRMKYPHLVAGALAASAPVLAVAGLGDSNQFFRDVTADFEGQSPKCTQGVREAFRQIKDLFLQGAYDTVRWEFGTCQPLSDEKDLTQLFMFARNAFTVLAMMDYPYPTDFLGPLPANPVKVGCDRLLSEAQRITGLRALAGALPPAPDGQVWRPRLGLGPGAGWGEDPQPGQGLCLLPQGCGGVDSTTFPETLGEAGAVPGDPLSTGCSQAQLGGCCPRGPWGPQHGGQQRAAGPTLPRGERGASTVRPGAGSTDTADLQAGSLEGLPHWDLQIQSPDPLEEPFRGGTGWWPEPAVCLCVAAGPQRLSSPGLVYNASGSEHCYDIYRLYHSCADPTGCGTGPDARAWDYQACTEINLTFASNNVTDMFPDLPFTDELRQRYCLDTWGVWPRPDWLLTSFWGGDLRAASNIIFSNGNLDPWAGGGIRRNLSASVIAVTIQGGAHHLDLRASHPEDPASVVEARKLEATIIGEWVKAARREQQPALRGGPRLSL

SEQ ID NO: 1026235 - protein, 376 aa, Homo sapiens; identical to SEQ ID NO: 1026227

SEQ ID NO: 1026236 - protein, 345 aa, Homo sapiens
MGSAPWAPVLLLALGLRGLQAGARRAPDPGFQERFFQQRLDHFNFERFGNKTFPQRFLVSDRFWVRGEGPIFFYTGNEGDVWAFANNSGFVAELAAERGALLVFAEHRYYGKSLPFGAQSTQRGHTELLTVEQALADFAELLRALRRDLGAQDAPAIAFGGSYGGMLSAYLRMKYPHLVAGALAASAPVLAVAGLGDSNQFFRDVTADFEGQSPKCTQGVREAFRQIKDLFLQGAYDTVRWEFGTCQPLSDEKDLTQLFMFARNAFTVLAMMDYPYPTDFLGPLPANPVKVGCDRLLSEAQRITGLRALAGLVYNASGSEHCYDIYRLYHSCADPPGQGAGFGGT

SEQ ID NO: 1026237 - protein, 565 aa, Homo sapiens
MGSAPWAPVLLLALGLRGLQAGARRAPDPGFQERFFQQRLDHFNFERFGNKTFPQRFLVSDRFWVRGEGPIFFYTGNEGDVWAFANNSGFVAELAAERGALLVFAEHRYYGKSLPFGAQSTQRGHTELLTVEQALADFAELLRALRRDLGAQDAPAIAFGGKEALPPVLPATCSAWMCGHTSGLSQWELHPHLAQGWNLWVSEVSSSLWHLWAPEEEKRKWGVGGSSLTLCPSPSYGGMLSAYLRMKYPHLVAGALAASAPVLAVAGLGDSNQFFRDVTADFEGQSPKCTQGVREAFRQIKDLFLQGAYDTVRWEFGTCQPLSDEKDLTQLFMFARNAFTVLAMMDYPYPTDFLGPLPANPVKVGCDRLLSEAQRITGLRALAGLVYNASGSEHCYDIYRLYHSCADPTGCGTGPDARAWDYQACTEINLTFASNNVTDMFPDLPFTDELRQRYCLDTWGVWPRPDWLLTSFWGGDLRAASNIIFSNGNLDPWAGGGIRRNLSASVIAVTIQGGAHHLDLRASHPEDPASVVEARKLEATIIGEWVKAARREQQPALRGGPRLSL

SEQ ID NO: 1026238 - protein, 406 aa, Homo sapiens
MSLPSALPGVGQVLGPGRGAHLLLHWERGRRVGLRQQLGLRRGAGGRAGGSTGLRGAPLLREVAAVRCAVHAARAHGAADGGAGPGRLRRAAPRATTRPRGPVLAVAGLGDSNQFFRDVTADFEGQSPKCTQGVREAFRQIKDLFLQGAYDTVRWEFGTCQPLSDEKDLTQLFMFARNAFTVLAMMDYPYPTDFLGPLPANPVKVGCDRLLSEAQRITGLRALAGLVYNASGSEHCYDIYRLYHSCADPTGCGTGPDARAWDYQACTEINLTFASNNVTDMFPDLPFTDELRQRYCLDTWGVWPRPDWLLTSFWGGDLRAASNIIFSNGNLDPWAGGGIRRNLSASVIAVTIQGGAHHLDLRASHPEDPASVVEARKLEATIIGEWVKAARREQQPALRGGPRLSL

SEQ ID NO: 1026239 - protein, 357 aa, Homo sapiens
MGSAPWAPVLLLALGLRGLQAGGEWRRPPAHSPVPAPPLRFASPHARRAPDPGFQERFFQQRLDQFFRDVTADFEGQSPKCTQGVREAFRQIKDLFLQGAYDTVRWEFGTCQPLSDEKDLTQLFMFARNAFTVLAMMDYPYPTDFLGPLPANPVKVGCDRLLSEAQRITGLRALAGLVYNASGSEHCYDIYRLYHSCADPTGCGTGPDARAWDYQACTEINLTFASNNVTDMFPDLPFTDELRQRYCLDTWGVWPRPDWLLTSFWGGDLRAASNIIFSNGNLDPWAGGGIRRNLSASVIAVTIQGGAHHLDLRASHPEDPASVVEARKLEATIIGEWVKAARREQQPALRGGPRLSL

SEQ ID NO: 1026240 - protein, 295 aa, Homo sapiens
LDVSTVSFPQDFEGQSPKCTQGVREAFRQIKDLFLQGAYDTVRWEFGTCQPLSDEKDLTQLFMFARNAFTVLAMMDYPYPTDFLGPLPANPVKVGCDRLLSEAQRITGLRALAGLVYNASGSEHCYDIYRLYHSCADPTGCGTGPDARAWDYQACTEINLTFASNNVTDMFPDLPFTDELRQRYCLDTWGVWPRPDWLLTSFWGGDLRAASNIIFSNGNLDPWAGGGIRRNLSASVIAVTIQGGAHHLDLRASHPEDPASVVEARKLEATIIGEWVKAARREQQPALRGGPRLSL

SEQ ID NO: 1026241 - protein, 377 aa, Homo sapiens
VQFPNVTGARGRRHGLRSLGPGPAAGARAARPPGGGPQGPGPRLPGALLPAASGPLQLRALRQQDLPSALPGVGQVLGPGRGAHLLLHWERGRRVGLRQQLGLRRGAGGRAGGSTGLRGAPLLREVAAVRCAVHAARAHGAADGGAGPGRLRRAAPRATTRPRGPGCPRHRLRWKAYDTVRWEFGTCQPLSDEKDLTQLFMFARNAFTVLAMMDYPYPTDFLGPLPANPVKVGCDRLLSEAQRITGLRALAGLVYNASGSEHCYDIYRLYHSCADPTGCGTGPDARAWDYQACTEINLTFASNNVTDMFPDLPFTDELRQRSQSRQQHHLLQREPGPLGRGRDSEEPECLSHRRHHPGGSAPPRPQSLPPRRSCFRG

SEQ ID NO: 1026242 - protein, 241 aa, Homo sapiens
MGSAPWAPVLLLALGLRGLQAGARRAPDPGFQERFFQQRLDHFNFERFGNKTFPQRFLVSEWRPPALARARPSQDANRAHSVNPTPVMQKLNNEKRINGYTAEKRTNNICDNRRSNVEAKVVEHHSTERNQNFDQQVTEEATEKTTRHISQDDHAPPTAKLDRPHGTPPKTTPGTKSDACMHGKEQRPGNDDTETHDTHADHEKRPHTPQGKRPAQTNPALKHKGRDRPGQQTQQTDSKYT

SEQ ID NO: 1026243 - protein, 492 aa, Homo sapiens [sequence omitted]

SEQ ID NO: 1026244 - protein, 492 aa, Homo sapiens [sequence omitted]

SEQ ID NO: 1026245 - protein, 460 aa, Homo sapiens
VQFPNVTGARGRRHGLRSLGPGPAAGARAARPPGGGPQGPGPRLPGALLPAASGPLQLRALRQQDLPSALPGVGQVLGPGRGAHLLLHWERGRRVGLRQQLGLRRGAGGRAGGSTGLRGAPLLREVAAVRCAVHAARAHGAADGGAGPGRLRRAAPRATTRPRGPGCPRHRLRWKDFEGQSPKCTQGVREAFRQIKDLFLQGAYDTVRWEFGTCQPLSDEKDLTQLFMFARNAFTVLAMMDYPYPTDFLGPLPANPVKVGCDRLLSEAQRITGLRALAGLVYNASGSEHCYDIYRLYHSCADPTGCGTGPDARAWDYQACTEINLTFASNNVTDMFPDLPFTDELRQRYCLDTWGVWPRPDWLLTSFWGGDLRAASNIIFSNGNLDPWAGGGIRRNLSASVIAVTIQGGAHHLDLRASHPEDPASVVEARKLEATIIGEWVKAARREQQPALRGGPRLSL

SEQ ID NO: 1026246 - protein, 465 aa, Homo sapiens
MGSAPWAPVLLLALGLRGLQAGARRAPDPGFQERFFQQRLDHFNFERFGNKTFPQRFLVSDRFWVRGEGPIFFYTGNEGDVWAFANNSGFVAELAAERGALLVFAEHRYYGKSLPFGAQSTQRGHTELLTVEQALADFAELLRALRRDLGAQDAPAIAFGGSYGGMLSAYLRMKYPHLVAGALAASAPVLAVAGLGDSNQFFRDVTAAYDTVRWEFGTCQPLSDEKDLTQLFMFARNAFTVLAMMDYPYPTDFLGPLPANPVKVGCDRLLSEAQRITGLRALAGLVYNASGSEHCYDIYRLYHSCADPTGCGTGPDARAWDYQACTEINLTFASNNVTDMFPDLPFTDELRQRYCLDTWGVWPRPDWLLTSFWGGDLRAASNIIFSNGNLDPWAGGGIRRNLSASVIAVTIQGGAHHLDLRASHPEDPASVVEARKLEATIIGEWVKAARREQQPALRGGPRLSL

SEQ ID NO: 1026247 - protein, 391 aa, Homo sapiens
VQFPNVTGARGRRHGLRSLGPGPAAGARAARPPGGGPQGPGPRLPGALLPAASGPLQLRALRQQDLPSALPGVGQVLGPGRGAHLLLHWERGRRVGLRQQLGLRRGAGGRAGGSTGLRGAPLLREVAAVRCAVHAARAHGAADGGAGPGRLRRAAPRATTRPRGPGCPRHRLRWKAYDTVRWEFGTCQPLSDEKDLTQLFMFARNAFTVLAMMDYPYPTDFLGPLPANPVKVGCDRLLSEAQRITGLRALAGLVYNASGSEHCYDIYRLYHSCADPTGCGTGPDARAWDYQACTEINLTFASNNVTDMFPDLPFTDELRQRSQSRQQHHLLQREPGPLGRGRDSEEPECLSHRRHHPGGSAPPRPQSSTKKSVRDEAKLRPYRMGKSTLPQ

SEQ ID NO: 1026248 - protein, 68 aa, Homo sapiens
TTLICHDPDTLMVLILQQLRRVQYKPFSNCRRLVCACWITPNCLYLIATPDTLPAKELSDTSGVRDRL

SEQ ID NO: 1026249 - protein, 155 aa, Homo sapiens [sequence omitted]

SEQ ID NO: 1026250 - protein, 256 aa, Homo sapiens
MDDKTKPGHAVDFSVSIPVRAKKEVSPPLSASGNSVVTHSLAFLFLPEECPAGSHRSEHTGACNPCTEGVDYTNASNNEPSCFPCTVCKSDQKHKSSCTMTRDTVCQCKEGTFRNENSPEMCRKCSRCPSGEVQVSNCTSWDDIQCVEEFGANATVETPAAEETMNTSPGTPAPAAEETMNTSPGTPAPAAEETMTTSPGTPAPAAEETMTTSPGTPAPAAEETMTTSPGTPASSHYLSCTIVGIIVLIVLLIVFV

SEQ ID NO: 1026251 - protein, 386 aa, Homo sapiens
MGLWGQSVPTASSARAGRYPGARTASGTRPWLLDPKILKFVVFIVAVLLPVRVDSATIPRQDEVPQQTVAPQQQRRSLKEEECPAGSHRSEYTGACNPCTEGVDYTIASNNLPSCLLCTVCKSGQTNKSSCTTTRDTVCQCEKGSFQDKNSPEMCRTCRTGCPRGMVKVSNCTPRSDIKCKNESAASSTGKTPAAEETVTTILGMLASPYHYLIIIVVLVIILAVVVVGFSCRKKFISYLKGICSGGGGGPERVHRVLFRRRSCPSRVPGAEDNARNETLSNRYLQPTQVSEQEIQGQELAELTGVTVESPEEPQRLLEQAEAEGCQRRRLLVPVNDADSADISTLLDASATLEEGHAKETIQDQLVGSEKLFYEEDEAGSATSCL

SEQ ID NO: 1026252 - protein, 299 aa, Homo sapiens [sequence omitted]

SEQ ID NO: 1026253 - protein, 736 aa, Homo sapiens
GSVTSSASGPAQSVAKMFRAVEEGLTYKFHAAWSSVLQLLCVFFEACGRQAHPVMRKCLQSLCDLRLSPHFPHTAALDQAVGAAVTSMGPEVVLQAVPLEIDGSEETLDFPRSWLLPVIRDHVQETRLGFFTTYFLPLANTLKSKAMDLAQAGSTVESKIYDTLQWQMWTLLPGFCTRPTDVAISFKGLARTLGMAISERPDLRVTVCQALRTLITKGCQEADRAEVSRFAKNFLPILFNLYGQPVAAGDTPAPRRLIIREEADGNKMEEEEGAKGEDEEMADPMEDVIIRNKKHQKLKHQKEAEEEELEIPPQYQAGGSGIHRPVAKKAMPGAEYKAKKAKGDVKKKGRPDPYAYIPPTEASSDFTRLSVLDLVVALAPCADEAAISKLYSTIRPYLESKAHGVQKKAYRVLEEVCASPQGPGALFVQSHLEDLKKTLLDSLRSTSSPAKRPRLKCLLHIVRKLSAEHKEFITALIPEVILCTKEVSVGARKNAFALLVEMGHAFLRFGSNQEEALQCYLVLIYPGLVGAVTMVSCSILALTHLLFEFKGLMGPSTVEQLLENVCLLLASRTRDVVKSALGFIKVAVTVMDVAHLAKHVQLVMEAIGELSDDMRRHFRMKLRNLFTKFIRKFGFELVKRLLPEEYHRVLVNIRKAEARAKRHRALSQAAVEEICAVLAAVTEVPRWDTKTAERIVDPEAQGPWAALWSSLRPFQPPGCLATSSRCSRFWQSLDSG

SEQ ID NO: 1026254 - protein, 149 aa, Homo sapiens
MADDEDYEEVVEYYTEEVVYEEVPGETITKIYETTTTRTSDYEQSETSKPALAQPALAQPASAKPVERRKVIRKKVDPSKFMTPYIAHSQKMQDLFSPNKYKEKFEKTKGQPYASTTDTPELRRIKKVQDQLSEVKYRMDGDVLRLYVT

SEQ ID NO: 1026255 - protein, 1650 aa, Homo sapiens
MFSKKLYTEDWEADKSLFYPYNDSPELRRVAQAQKALSDVAYKKGLAEQQAQFTPLADPPDIEFAKKVTNQVSKQKYKEDYENKIKGKWSETPCFEVANARMNADNISTRKYQEDFENMKDQIYFMQTETPEYKMNKKAGVAASKVKYKEDYEKNKGKADYNVLPASENPQLRQLKAAGDALSDKLYKENYEKTKAKSINYCETPKFKLDTVLQNFSSDKKYKDSYLKDILGHYVGSFEDPYHSHCMKVTAQNSDKNYKAEYEEDRGKGFFPQTITQEYEAIKKLDQCKDHTYKVHPDKTKFTQVTDSPVLLQAQVNSKQLSDLNYKAKHESEKFKCHIPPDTPAFIQHKVNAYNLSDNLYKQDWEKSKAKKFDIKVDAIPLLAAKANTKNTSDVMYKKDYEKNKGKMIGVLSINDDPKMLHSLKVAKNQSDRLYKENYEKTKAKSMNYCETPKYQLDTQLKNFSEARYKDLYVKDVLGHYVGSMEDPYHTHCMKVAAQNSDKSYKAEYEEDKGKCYFPQTITQEYEAIKKLDQCKDHTYKVHPDKTKFTAVTDSPVLLQAQLNTKQLSDLNYKAKHEGEKFKCHIPADAPQFIQHRVNAYNLSDNVYKQDWEKSKAKKFDIKVDAIPLLAAKANTKNTSDVMYKKDYEKSKGKMIGALSINDDPKMLHSLKTAKNQSDREYRKDYEKSKTIYTAPLDMLQVTQAKKSQAIASDVDYKHILHSYSYPPDSINVDLAKKAYALQSDVEYKADYNSWMKGCGWVPFGSLEMEKAKRASDILNEKKYRQHPDTLKFTSIEDAPITVQSKINQAQRSDIAYKAKGEEIIHKYNLPPDLPQFIQAKVNAYNISENMYKADLKDLSKKGYDLRTDAIPIRAAKAARQAASDVQYKKDYEKAKGKMVGFQSLQDDPKLVHYMNVAKIQSDREYKKDYEKTKSKYNTPHDMFNVVAAKKAQDVVSNVNYKHSLHHYTYLPDAMDLELSKNMMQIQSDNVYKEDYNNWMKGIGWIPIGSLDVEKVKKAGDALNEKKYRQHPDTLKFTSIVDSPVMVQAKQNTKQVSDILYKAKGEDVKHKYTMSPDLPQFLQAKCNAYNISDVCYKRDWHDLIAKGNNVLGDAIPITAAKASRNIASDYKYKEAYEKSKGKHVGFRSLQDDPKLVHYMNVAKLQSDREYKKNYENTKTSYHTPGDMVSITAAKMAQDVATNVNYKQPLHHYTYLPDAMSLEHTRNVNQIQSDNVYKDEYNSFLKGIGWIPIGSLEVEKVKKAGDALNERKYRQHPDTVKFTSVPDSMGMVLAQHNTKQLSDLNYKVEGEKLKHKYTIDPELPQFIQAKVNALNMSDAHYKADWKKTIAKGYDLRPDAIPIVAAKSSRNIASDCKYKEAYEKAKGKQVGFLSLQDDPKLVHYMNVAKIQSDREYKKGYEASKTKYHTPLDMVSVTAAKKSQEVATNANYRQSYHHYTLLPDALNVEHSRNAMQIQSDNLYKSDFTNWMKGIGWVPIESLEVEKAKKAGEILSEKKYRQHPEKLKFTYAMDTMEQALNKSNKLNMDKRLYTEKWNKDKTTIHVMPDTPDILLSRVNQITMSDKLYKAGWEEEKKKGYDLRPDAIAIKAARASRDIASDYKYKKAYEQAKSKEHKLLRDPQIQARYCSAELQ

SEQ ID NO: 1026256 - protein, 1348 aa, Homo sapiens
LNYKVEGEKLKHKYTIDAMSLEHTRNVNQIQSDNVYKDEYNSFLKGIGWIPIGSLEVEKVKKAGDALNERKYRQHPDTVKFTSVPDSMGMVLAQHNTKQLSDLNYKVEGEKLKHKYTIDPELPQFIQAKVNALNMSDAHYKADWKKTIAKGYDLRPDAIPIVAAKSSRNIASDCKYKEAYEKAKGKQVGFLSLQDDPKLVHYMNVAKIQSDREYKKGYEASKTKYHTPLDMVSVTAAKKSQEVATNANYRQSYHHYTLLPDALNVEHSRNAMQIQSDNLYKSDFTNWMKGIGWVPIESLEVEKAKKAGEILSEKKYRQHPEKLKFTYAMDTMEQALNKSNKLNMDKRLYTEKWNKDKTTIHVMPDTPDILLSRVNQITMSDKLYKAGWEEEKKKGYDLRPDAIAIKAARASRDIASDYKYKKAYEQAKGKHIGFRSLEDDPKLVHFMQVAKMQSDREYKKGYEKSKTSFHTPVDMLSVVAAKKSQEVATNANYRNVIHTYNMLPDAMSFELAKNMMQIQSDNQYKADYADFMKGIGWLPLGSLEAEKNKKAMEIISEKPEYRQHPDTLKYSTLMDSMNMVLAQNNAKIMNEHLYKQAWEADKTKVHIMPDIPQIILAKANAINMSDKLYKLSLEESKKKGYDLRPDAIPIKAAKASRDIASDYKYKYNYEKGKGKMVGFRSLEDDPKLVHSMQVAKMQSDREYKKNYENTKTSYHTPADMLSVTAAKDAQANITNTNYKHLIHKYILLPDAMNIELTRNMNRIQSDNEYKQDYNEWYKGLGWSPAGSLEVEKAKKATEYASDQKYRQHPSNFQFKKLTDSMDMVLAKQNAHTMNKHLYTIDWNKDKTKIHVMPDTPDILQAKQNQTLYSQKLYKLGWEEALKKGYDLPVDAISVQLAKASRDIASDYKYKQGYRKQLGHHVGFRSLQDDPKLVLSMNVAKMQSEREYKKDFEKWKTKFSSPVDMLGVVLAKKCQELVSDVDYKNYLHQWTCLPDQNDVVQAKKVYELQSENLYKSDLEWLRGIGWSPLGSLEAEKNKRASEIISEKKYRQPPDRNKFTSIPDAMDIVLAKTNAKNRSDRLYREAWDKDKTQIHIMPDTPDIVLAKANLINTSDKLYRMGYEELKRKGYDLPVDAIPIKAAKASREIASEYKYKEGFRKQLGHHIGARNIEDDPKMMWSMHVAKIQSDREYKKDFEKWKTKFSSPVDMLGVVLAKKCQTLVSDVDYKNYLHQWTCLPDQSDVIHARQAYDLQSDNLYKSDLQWLKGIGWMTSGSLEDEKNKRATQILSDHVYRQHPDQFKFSSLMDSIPMVLAKNNAITMNHRLYTEAWDKDKTTVHIMPDTPEVLLAK

SEQ ID NO: 1026257 - protein, 2548 aa, Homo sapiens
MFSKKLYTEDWEADKSLFYPYNDSPELRRVAQAQKALSDVAYKKGLAEQQAQFTPLADPPDIEFAKKVTNQVSKQKYKEDYENKIKGKWSETPCFEVANARMNADNISTRKYQEDFENMKDQIYFMQTETPEYKMNKKAGVAASKVKYKEDYEKNKGKADYNVLPASENPQLRQLKAAGDALSDKLYKENYEKTKAKSINYCETPKFKLDTVLQNFSSDKKYKDSYLKDILGHYVGSFEDPYHSHCMKVTAQNSDKNYKAEYEEDRGKGFFPQTITQEYEAIKKLDQCKDHTYKVHPDKTKFTQVTDSPVLLQAQVNSKQLSDLNYKAKHESEKFKCHIPPDTPAFIQHKVNAYNLSDNLYKQDWEKSKAKKFDIKVDAIPLLAAKANTKNTSDVMYKKDYEKNKGKMIGVLSINDDPKMLHSLKVAKNQSDRLYKENYEKTKAKSMNYCETPKYQLDTQLKNFSEARYKDLYVKDVLGHYVGSMEDPYHTHCMKVAAQNSDKSYKAEYEEDKGKCYFPQTITQEYEAIKKLDQCKDHTYKVHPDKTKFTAVTDSPVLLQAQLNTKQLSDLNYKAKHEGEKFKCHIPADAPQFIQHRVNAYNLSDNVYKQDWEKSKAKKFDIKVDAIPLLAAKANTKNTSDVMYKKDYEKSKGKMIGALSINDDPKMLHSLKTAKNQSDREYRKDYEKSKTIYTAPLDMLQVTQAKKSQAIASDVDYKHILHSYSYPPDSINVDLAKKAYALQSDVEYKADYNSWMKGCGWVPFGSLEMEKAKRASDILNEKKYRQHPDTLKFTSIEDAPITVQSKINQAQRSDIAYKAKGEEIIHKYNLPPDLPQFIQAKVNAYNISENMYKADLKDLSKKGYDLRTDAIPIRAAKAARQAASDVQYKKDYEKAKGKMVGFQSLQDDPKLVHYMNVAKIQSDREYKKDYEKTKSKYNTPHDMFNVVAAKKAQDVVSNVNYKHSLHHYTYLPDAMDLELSKNMMQIQSDNVYKEDYNNWMKGIGWIPIGSLDVEKVKKAGDALNEKKYRQHPDTLKFTSIVDSPVMVQAKQNTKQVSDILYKAKGEDVKHKYTMSPDLPQFLQAKCNAYNISDVCYKRDWHDLIAKGNNVLGDAIPITAAKASRNIASDYKYKEAYEKSKGKHVGFRSLQDDPKLVHYMNVAKLQSDREYKKNYENTKTSYHTPGDMVSITAAKMAQDVATNVNYKQPLHHYTYLPDAMSLEHTRNVNQIQSDNVYKDEYNSFLKGIGWIPIGSLEVEKVKKAGDALNERKYRQHPDTVKFTSVPDSMGMVLAQHNTKQLSDLNYKVEGEKLKHKYTIDPELPQFIQAKVNALNMSDAHYKADWKKTIAKGYDLRPDAIPIVAAKSSRNIASDCKYKEAYEKAKGKQVGFLSLQDDPKLVHYMNVAKIQSDREYKKGYEASKTKYHTPLDMVSVTAAKKSQEVATNANYRQSYHHYTLLPDALNVEHSRNAMQIQSDNLYKSDFTNWMKGIGWVPIESLEVEKAKKAGEILSEKKYRQHPEKLKFTYAMDTMEQALNKSNKLNMDKRLYTEKWNKDKTTIHVMPDTPDILLSRVNQITMSDKLYKAGWEEEKKKGYDLRPDAIAIKAARASRDIASDYKYKKAYEQAKGKHIGFRSLEDDPKLVHFMQVAKMQSDREYKKGYEKSKTSFHTPVDMLSVVAAKKSQEVATNANYRNVIHTYNMLPDAMSFELAKNMMQIQSDNQYKADYADFMKGIGWLPLGSLEAEKNKKAMEIISEKPEYRQHPDTLKYSTLMDSMNMVLAQNNAKIMNEHLYKQAWEADKTKVHIMPDIPQIILAKANAINMSDKLYKLSLEESKKKGYDLRPDAIPIKAAKASRDIASDYKYKYNYEKGKGKMVGFRSLEDDPKLVHSMQVAKMQSDREYKKNYENTKTSYHTPADMLSVTAAKDAQANITNTNYKHLIHKYILLPDAMNIELTRNMNRIQSDNEYKQDYNEWYKGLGWSPAGSLEVEKAKKATEYASDQKYRQHPSNFQFKKLTDSMDMVLAKQNAHTMNKHLYTIDWNKDKTKIHVMPDTPDILQAKQNQTLYSQKLYKLGWEEALKKGYDLPVDAISVQLAKASRDIASDYKYKQGYRKQLGHHVGFRSLQDDPKLVLSMNVAKMQSEREYKKDFEKWKTKFSSPVDMLGVVLAKKCQELVSDVDYKNYLHQWTCLPDQNDVVQAKKVYELQSENLYKSDLEWLRGIGWSPLGSLEAEKNKRASEIISEKKYRQPPDRNKFTSIPDAMDIVLAKTNAKNRSDRLYREAWDKDKTQIHIMPDTPDIVLAKANLINTSDKLYRMGYEELKRKGYDLPVDAIPIKAAKASREIASEYKYKEGFRKQLGHHIGARNIEDDPKMMWSMHVAKIQSDREYKKDFEKWKTKFSSPVDMLGVVLAKKCQTLVSDVDYKNYLHQWTCLPDQSDVIHARQAYDLQSDNLYKSDLQWLKGIGWMTSGSLEDEKNKRATQILSDHVYRQHPDQFKFSSLMDSIPMVLAKNNAITMNHRLYTEAWDKDKTTVHIMPDTPEVLLAK

SEQ ID NO: 1026258 - protein, 629 aa, Homo sapiens
MGRGCSLAVRGSARVAGPAAVADREDLKPAAGQRVNMKYILVTGGVHIRNRKRGIIAIQCGHEYSSHVVYSVTSIKMDPYINIDAGTFSPYEHGEVFVLDDGGEVDLDLGNYERFLDIRLTKDNNLTTGKIYQYVINKERKGDYLGKTVQVVPHITDAIQEWVMRQALIPVDEDGLEPQVCVIELGGTVGDIESMPFIEAFRQFQFKVKRENFCNIHVSLVPQPSSTGEQKTKPTQNSVRELRGLGLSPDLVVCRCSNPLDTSVKEKISMFCHVEPEQVICVHDVSSIYRVPLLLEEQGVVDYFLRRLDLPIERQPRKMLMKWKEMADRYDRLLETCSIALVGKYTKFSDSYASVIKALEHSALAINHKLEIKYIDSADLEPITSQEEPVRYHEAWQKLCSAHGVLVPGGFGVRGTEGKIQAIAWARNQKKPYLGVCLGMQLAVVEFSRNVLGWQDANSTEFDPTNSHPVARRHARTHPGQMGGTMRLGKRRTLFQTKNSVMRKLYGDADYLEERHRHRFEVNPVWKKCLEEQGLKFVGQDVEGERMEIVELEDHPFFVGVQYHPEFLSRPIKPSPPYFGLLLASVGRLSHYLQKGCRLSPRDTYSDRSGSSSPDSEITELKFPSINHD

SEQ ID NO: 1026259 - protein, 629 aa, Homo sapiens; identical to SEQ ID NO: 1026258

SEQ ID NO: 1026260 - protein, 417 aa, Homo sapiens
MPFIEAFRQFQFKVKRENFCNIHVSLVPQPSSTGEQKTKPTQNSVRELRGLGLSPDLVVCRCSNPLDTSVKEVSSIYRVPLLLEEQGVVDYFLRRLDLPIERQPRKMLMKWKEMADRYDRLLETCSIALVGKYTKFSDSYASVIKALEHSALAINHKLEIKYIDSADLEPITSQEEPVRYHEAWQKLCSAHGVLVPGGFGVRGTEGKIQAIAWARNQKKPYLGVCLGMQLAVVEYSRNVLGWQDANSTEFDPTNSHPVARRHARTHPGQMGGTMRLGKRRTLFQTKNSVMRKLYGDADYLEERHRHRFEVNPVWKKCLEEQGLKFVGQDVEGERMEIVELEDHPFFVGVQYHPEFLSRPIKPSPPYFGLLLASVGRLSHYLQKGCRLSPRDTYSDRSGSSSPDSEITELKFPSINHD

SEQ ID NO: 1026261 - protein, 112 aa, Homo sapiens [sequence omitted]

SEQ ID NO: 1026262 - protein, 629 aa, Homo sapiens; identical to SEQ ID NO: 1026258

SEQ ID NO: 1026263 - protein, 602 aa, Homo sapiens
MGRGCSLAVRGSARVAGPAAVADREDLKPAAGQRVNMKYILVTGGVHIRNRKRGIIAIQCGHEYSSHVVYSVTSIKMDPYINIDAGTFSPYEHGEVFVLDDGGEVDLDLGNYERFLDIRLTKDNNLTTGKIYQYVINKERKGDYLGKTVQVVPHITDAIQEWVMRQALIPVDEDGLEPQVCVIELGGTVGDIESMPFIEAFRQFQFKVKRENFCNIHVSLVPQPSSTGEQKTKPTQNSVRELRGLGLSPDLVVCRCSNPLDTSVKEKISMFCHVEPEQVICVHDVSSIYRVPLLLEEQGVVDYFLRRLDLPIERQPRKMLMKWKEMADRYDRLLETCSIALVGKYTKFSDSYASVIKALEHSALAINHKLEIKYIDSADLEPITSQEEPVRYHEAWQKLCSAHGVLVPGGFGVRGTEGKIQAIAWARNQKKPYLGVCLGMQLAVVEFSRNVLGWQDANSTEFDPTNSHPVARRHARTHPGQMGGTMRLGKRRTLFQTKNSVMRKLYGDADYLEERHRHRFEVNPVWKKCLEEQGLKFVGQDVEGERMEIVELEDHPFFVGVQYHPEFLSRPIKPSPPYFGLLLASVGRLSHYLQKGCRLSPR

SEQ ID NO: 1026264 - protein, 493 aa, Homo sapiens
MPASVGTNTRMSCGYSVISIKMDPYINIDAGTFSPYEHGEVFVLDDGGEVDLDLGNYERFLDIRLTKDNNLTTGKIYQYVINKERKGDYLGKTVQVVPHITDAIQEWVMRQALIPVDEDGLEPQVCVIELGGTVGDIESMPFIEAFRQFQFKVKRENFCNIHVSLVPQPSSTGEQKTKPTQNSVRELRGLGLSPDLVVCRCSNPLDTSVKEKISMFCHVEPEQVICVHDVSSIYRVPLLLEEQGVVDYFLRRLDLPIERQPRKMLMKWKEMADRYDRLLETCSIALVGKYTKFSDSYASVIKALEHSALAINHKLEIKYIDSADLEPITSQEEPVRYHEAWQKLCSAHGVLVPRGEPWFQTKNSVMRKLYGDADYLEERHRHRFEVNPVWKKCLEEQGLKFVGQDVEGERMEIVELEDHPFFVGVQYHPEFLSRPIKPSPPYFGLLLASVGRLSHYLQKGCRLSPRDTYSDRSGSSSPDSEITELKFPSINHD

SEQ ID NO: 1026265 - protein, 435 aa, Homo sapiens
MPFIEAFRQFQFKVKRENFCNIHVSLVPQPSSTGEQKTKPTQNSVRELRGLGLSPDLVVCRCSNPLDTSVKEKISMFCHVEPEQVICVHDVSSIYRVPLLLEEQGVVDYFLRRLDLPIERQPRKMLMKWKEMADRYDRLLETCSIALVGKYTKFSDSYASVIKALEHSALAINHKLEIKYIDSADLEPITSQEEPVRYHEAWQKLCSAHGVLVPGGFGVRGTEGKIQAIAWARNQKKPYLGVCLGMQLAVVEYSRNVLGWQDANSTEFDPTNSHPVARRHARTHPGQMGGTMRLGKRRTLFQTKNSVMRKLYGDADYLEERHRHRFEVNPVWKKCLEEQGLKFVGQDVEGERMEIVELEDHPFFVGVQYHPEFLSRPIKPSPPYFGLLLASVGRLSHYLQKGCRLSPRDTYSDRSGSSSPDSEITELKFPSINHD

SEQ ID NO: 1026266 - protein, 417 aa, Homo sapiens
MPFIEAFRQFQFKVKRENFCNIHVSLVPQPSSTGEQKTKPTQNSVRELRGLGLSPDLVVCRCSNPLDTSVKEKISMFCHVEPEQVICVHDVSSIYRVPLLLEEQGVVDYFLRRLDLPIERQPRTCSIALVGKYTKFSDSYASVIKALEHSALAINHKLEIKYIDSADLEPITSQEEPVRYHEAWQKLCSAHGVLVPGGFGVRGTEGKIQAIAWARNQKKPYLGVCLGMQLAVVEYSRNVLGWQDANSTEFDPTNSHPVARRHARTHPGQMGGTMRLGKRRTLFQTKNSVMRKLYGDADYLEERHRHRFEVNPVWKKCLEEQGLKFVGQDVEGERMEIVELEDHPFFVGVQYHPEFLSRPIKPSPPYFGLLLASVGRLSHYLQKGCRLSPRDTYSDRSGSSSPDSEITELKFPSINHD

SEQ ID NO: 1026267 - protein, 134 aa, Homo sapiens
MPASVGTNTRMSCGYSVISIKMDPYINIDAGTFSPYEHGEVFVLDDGGEVDLDLGNYERFLDIRLTKDNNLTTGKIYQYVINKERKGDYLGKTVQVVPHITDALSPRDTYSDRSGSSSPDSEITELKFPSINHD

SEQ ID NO: 1026268 - protein, 364 aa, Homo sapiens
MALALLEDWCRIMSVDEQKSLMVTGIPADFEEAEIQEVLQETLKSLGRYRLLGKIFRKQENANAVLLELLEDTDVSAIPSEVQGKGGVWKVIFKTPNQDTEFLERLNLFLEKEGQTVSGMFRALGQEGVSPATVPCISPELLAHLLGQAMAHAPQPLLPMRYRKLRVFSGSAVPAPEEESFEVWLEQATEIVKEWPVTEAEKKRWLAESLRGPALDLMHIVQADNPSISVEECLEAFKQVFGSLESRRTAQVRYLKTYQEEGEKVSAYVLRLETLLRRAVEKRAIPRRIADQVRLEQVMAGATLNQMLWCRLRELKDQGPPPSFLELMKVIREEEEEEASFENESIEEPEERDGYGRWNHEGDD

SEQ ID NO: 1026269 - protein, 364 aa, Homo sapiens; identical to SEQ ID NO: 1026268

SEQ ID NO: 1026270 - protein, 364 aa, Homo sapiens; identical to SEQ ID NO: 1026268

SEQ ID NO: 1026271 - protein, 377 aa, Homo sapiens
GGPKRWWDLDLSWCPGSGYCHGKEFKDESENSENMVTGIPADFEEAEIQEVLQETLKSLGRYRLLGKIFRKQENANAVLLELLEDTDVSAIPSEVQGKGGVWKVIFKTPNQDTEFLERLNLFLEKEGQTVSGMFRALGQEGVSPATVPCISPELLAHLLGQAMAHAPQPLLPMRYRKLRVFSGSAVPAPEEESFEVWLEQATEIVKEWPVTEAEKKRWLAESLRGPALDLMHIVQADNPSISVEECLEAFKQVFGSLESRRTAQVRYLKTYQEEGEKVSAYVLRLETLLRRAVEKRAIPRRIADQVRLEQVMAGATLNQMLWCRLRELKDQGPPPSFLELMKVIREEEEEEASFENESIEEPEERDGYGRWNHEGDD

SEQ ID NO: 1026272 - protein, 680 aa, Homo sapiens
MADGGRIRIGALTRRYSGALGGRGCGVDGWTSGIMERGGRRGEEKIREGGEGGEGKGEGGGGGGIRGGTSVKVSGQGATKKRARGAGGGGISHITLYSPPGKPREHARASEHLPSHGHGGGGRGGVERAPLRRQEGLRGARGETAAPSSSCLGDHLLTTQLTTLPPQEKIQTVFEQLVLVDHPNIVKLHKYWLDTSEACARVSTGKAPGRQRPQLGGAGMGTNPQLVEILSSHRAGHLHHRVRVIRQPQAIPQKDQEEPQGHERPGMGSGLGQPRGQDGVGAASGTGMVRGCPAASDRGWARMRGGLRRPSRLSWPTRPTESCVRRQAWKRWCTQILSALSFLHACSPPIIHGNLTSDTIFIQHNGLIKIGSVWHRIFSNALPDDLRSPIRAEREELRNLHFFPPEYGEVADGTAVDIFSFGMCALEMAVLEIQTNGDTRVTEEAIARARHSLSDPNMREFILCCLARDPARRPSAHSLLFHRVLFEVHSLKLLAAHCFIQHQYLMPENVVEEKTKAMDLHAVLAELPRPRRPPLQWRYSEVSFMELDKFLEDVRNGIYPLMNFAATRPLGLPRVLAPPPEEVQKAKTPTPEPFDSETRKVIQMQCNLERSEDKARWHLTLLLVLEDRLHRQLTYDLLPTDSAQDLASELVHYGFLHEDDRMKLAAFLESTFLKYRGTQA

SEQ ID NO: 1026273 - protein, 680 aa, Homo sapiens; identical to SEQ ID NO: 1026272

SEQ ID NO: 1026274 - protein, 680 aa, Homo sapiens; identical to SEQ ID NO: 1026272

SEQ ID NO: 1026275 - protein, 610 aa, Homo sapiens
RIPRAGAGALGCRGGSRLGCWARGQAGRERLRRRRIAQRAVAWAGRTMAAPEPAPRRAREREREREDESEDESDILEESPCGRWQKRREQVNQGNMPGLQSTFLAMDTEEGVEVVWNELHFGDRKAFAAHEEKIQTVFEQLVLVDHPNIVKLHKYWLDTSEACARVIFITEYVSSGSLKQFLKKTKKNHKAMNARVWGAGWGSHGDRTGLGQPRGLGWCGGARRPRTGAGRGCGAGSAGPAASPAPTRPTESCVRRQAWKRWCTQILSALSFLHACSPPIIHGNLTSDTIFIQHNGLIKIGSVWHRIFSNALPDDLRSPIRAEREELRNLHFFPPEYGEVADGTAVDIFSFGMCALEMAVLEIQTNGDTRVTEEAIARARHSLSDPNMREFILCCLARDPARRPSAHSLLFHRVLFEVHSLKLLAAHCFIQHQYLMPENVVEEKTKAMDLHAVLAELPRPRRPPLQWRYSEVSFMELDKFLEDVRNGIYPLMNFAATRPLGLPRVLAPPPEEVQKAKTPTPEPFDSETRKVIQMQCNLERSEDKARWHLTLLLVLEDRLHRQLTYDLLPTDSAQDLASELVHYGFLHEDDRMKLAAFLESTFLKYRGTQA

SEQ ID NO: 1026276 - protein, 562 aa, Homo sapiens
ERGGWKPLRGPSRPANQPPLDPFGLALALGLPEGQSPAQDHLPMPLDSAASFLGIPLDPLKPAPNPLSPALGEEPLAPGGSYPPSPTFPQVAQGLQPTLGPTGQVNQGNMPGLQSTFLAMDTEEGVEVVWNELHFGDRKAFAAHEEKIQTVFEQLVLVDHPNIVKLHKYWLDTSEACARVIFITEYVSSGSLKQFLKKTKKNHKAMNARAWKRWCTQILSALSFLHACSPPIIHGNLTSDTIFIQHNGLIKIGSVWHRIFSNALPDDLRSPIRAEREELRNLHFFPPEYGEVADGTAVDIFSFGMCALEMAVLEIQTNGDTRVTEEAIARARHSLSDPNMREFILCCLARDPARRPSAHSLLFHRVLFEVHSLKLLAAHCFIQHQYLMPENVVEEKTKAMDLHAVLAELPRPRRPPLQWRYSEVSFMELDKFLEDVRNGIYPLMNFAATRPLGLPRVLAPPPEEVQKAKTPTPEPFDSETRKVIQMQCNLERSEDKARWHLTLLLVLEDRLHRQLTYDLLPTDSAQDLASELVHYGFLHEDDRMKLAAFLESTFLKYRGTQA

SEQ ID NO: 1026277 - protein, 680 aa, Homo sapiens; identical to SEQ ID NO: 1026272

SEQ ID NO: 1026278 - protein, 680 aa, Homo sapiens; identical to SEQ ID NO: 1026272

SEQ ID NO: 1026279 - protein, 425 aa, Homo sapiens
MGEDAAQAEKFQHPGSDMRQEKPSSPSPMPSSTPSPSLNLGNTEEAIRDNSQVNAVTVLTLLDKLVNMLDAVQENQHKMEQRQISLEGSVKGIQNDLTKLSKYQASTSNTVSKLLEKSRKVSAHTRAVKERMDRQCAQVKRLENNHAQLLRRNHFKVLIFQEENEIPASVFVKQPVSGAVEGKEELPDENKSLEETLHTVDLSSDDDLPHDEEALEDSAEEKVEESRAEKIKRSSLKKVDSLKKAFSRQNIEKKMNKLGTKIVSVERREKIKKSLTSNHQKISSGKSSPFKVSPLTFGRKKVREGESHAENETKSEDLPSSEQMPNDQEEESFAEGHSEASLASALVEGEIAEEAAEKATSRGSNSGMDSNIDLTIVEDEEEESVALEQAQKVRYEGSYALTSEEAERSDGDPVQPAVLQVHQTS

SEQ ID NO: 1026280 - protein, 294 aa, Homo sapiens
MDRQCAQVKRLENNHAQLLRRNHFKVLIFQEENEIPASVFVKQPVSGAVEGKEELPDENKSLEETLHTVDLSSDDDLPHDEEALEDSAEEKVEESRAEKIKRSSLKKVDSLKKAFSRQNIEKKMNKLGTKIVSVERREKIKKSLTSNHQKISSGKSSPFKVSPLTFGRKKVREGESHAENETKSEDLPSSEQMPNDQEEESFAEGHSEASLASALVEGEIAEEAAEKATSRGSNSGMDSNIDLTIVEDEEEESVALEQAQKVRYEGSYALTSEEAERSDGDPVQPAVLQVHQTS

SEQ ID NO: 1026281 - protein, 375 aa, Homo sapiens [sequence omitted]

SEQ ID NO: 1026282 - protein, 242 aa, Homo sapiens
MGEDAAQAEKFQHPGSDMRQEKPSSPSPMPSSTPSPSLNLGNTEEAIRDNSQVNAVTVLTLLDKLVNMLDAVQENQHKMEQRQISLEGSVKGIQNDLTKLSKYQASTSNTVSKLLEKSRKVSAHTRAVKERMDRQCAQVKRLENNHAQLLRRNHFKVLIFQEENEIPASVFVKQPVSGAVEGKEELPDENKSLEETLHTVDLSSDDDLPHDEEALEDSAEEKVEESRAEKIKKVSQPLRKVG

SEQ ID NO: 1026283 - protein, 425 aa, Homo sapiens; identical to SEQ ID NO: 1026279

SEQ ID NO: 1026284 - protein, 114 aa, Homo sapiens [sequence omitted]

SEQ ID NO: 1026285 - protein, 242 aa, Homo sapiens
  misc_feature (233)..(233): Xaa can be any naturally occurring amino acid
MGFCHVGQDGLELTSGDPPTGLPKCWDYRCEPLCPASFYFVNGVFDRYQMVIFMKHSWSVYGGSGIWPHVRVPVFNHELDTALFRATVTTCGEKCSPHHPREAPTRHPREAPMQTFRRRFHCSSENGPRPPWAPPCHQGLWLLPVHRDRQPGLEGAGHGFGCLRWVETRSALAGRALTSRYPVPLCGPGRLVLPAGRKLQELRVAVIWRMSRSSPGGRGAEAFNIIRSNTWLXRQAHFPSLQ

SEQ ID NO: 1026286 - protein, 93 aa, Homo sapiens
  misc_feature (24)..(24): Xaa can be any naturally occurring amino acid
LGSGMSPLLCRPWHLLGGAPNWTXQQEEPEPAQKGSRGRASGPEYGPAAEAARAGPPGPTGVAGFFGASGRAGGLLGQGWTLGPGAAAVSSKP

SEQ ID NO: 1026287 - protein, 93 aa, Homo sapiens; identical to SEQ ID NO: 1026286
  misc_feature (24)..(24): Xaa can be any naturally occurring amino acid

SEQ ID NO: 1026288 - protein, 250 aa, Homo sapiens [sequence omitted]

SEQ ID NO: 1026289 - protein, 250 aa, Homo sapiens [sequence omitted]

SEQ ID NO: 1026290 - protein, 250 aa, Homo sapiens [sequence omitted]

SEQ ID NO: 1026291 - protein, 250 aa, Homo sapiens [sequence omitted]

SEQ ID NO: 1026292 - protein, 250 aa, Homo sapiens [sequence omitted]

SEQ ID NO: 1026293 - protein, 178 aa, Homo sapiens
HHATNGVVHLINKVISTITNNIQQFYSLEGAPYCEGCYTDTLEKCNTCGEPITDRMLRATGQGYHPHCFTCVVCARPLGGTSFIAGPGHPAPLLSPTTTRRPPRRCSVCSAPLMPEPAPPPPAPPRRPGTPPSPCPVPPSAALPPPPPPRGRLPLPATPCPAPLPRPPSPRPPPPPPP

SEQ ID NO: 1026294 - protein, 600 aa, Homo sapiens
  misc_feature (411)..(411): Xaa can be any naturally occurring amino acid
  misc_feature (433)..(433): Xaa can be any naturally occurring amino acid
  misc_feature (480)..(480): Xaa can be any naturally occurring amino acid
  misc_feature (483)..(483): Xaa can be any naturally occurring amino acid
  misc_feature (495)..(495): Xaa can be any naturally occurring amino acid
  misc_feature (503)..(503): Xaa can be any naturally occurring amino acid
  misc_feature (513)..(513): Xaa can be any naturally occurring amino acid
  misc_feature (526)..(526): Xaa can be any naturally occurring amino acid
  misc_feature (576)..(576): Xaa can be any naturally occurring amino acid
  misc_feature (586)..(586): Xaa can be any naturally occurring amino acid
GRSVSSIDVEIDSLSSLAGMDMTKNDPIQEARAVIWICAPDQWSSSHVSCPSRSTKPAAGGTVTPGLLGTVPFAGSQPLPQVPAPGSVARDSATVHAPSAQLPRALRSQLHVQSQDASLCALASTQPRGGPRHSSPVPAPKFTPVTPKFTPVASKFMSLGDPEVDRGIYEPKSIEWGHPEALSAGTGSPQSPSFTYAQQREKPRVQEKQHPVPPPAQNQNQVRSPGAPGPLTLKEVEELEQLTQQLMQDMEHPQRQNVAVNELCGRCHQPLARAQPAVRALGQLFHIACFTCHQCAQQLQGQRVLHVCDGVRLYCSGRVTTVRSALCVGMCVGVSLVQVWATAKSCMWWCRVPLSTPSYLYVPPLGTSPGRNAVSNTGGEEAAVQLNRRMPRTAATWVQRALNSTRRRACXFELMMLVILAGLGNPLWNECSXRVSIREVARAQTRVHTLGVPHDRKPRRLDSSTREVSIAILGYWMPHXYAXESVVPEDVKHVXAAVWVRPXEKPRKRIATXAQVLYHRLLTRTXRERAPHGPNWTSSIDELRMTIAAFDSVPRMATDTRKDSHHVGLVRPQETXKVECDYVTRXYRNPKLTIASDMLD

SEQ ID NO: 1026295 - protein, 457 aa, Homo sapiens
GRSVSSIDVEIDSLSSLAGMDMTKNDPIQEARAVIWICAPDQWSSSHVSCPSRSTKPAAGGTVTPGLLGTVPFAGSQPLPQVPAPGSVARDSATVHAPSAQLPRALRSQLHVQSQDASLCALASTQPRGGPRHSSPVPAPKFTPVTPKFTPVASKFMSLGDPEVDRGIYEPKSIEWGHPEALSAGTGSPQSPSFTYAQQREKPRVQEKQHPVPPPAQNQNQVRSPGAPGPLTLKEVEELEQLTQQLMQDMEHPQRQNVAVNELCGRCHQPLARAQPAVRALGQLFHIACFTCHQCAQQLQGQQFYSLEGAPYCEGCYTDTLEKCNTCGEPITDRMLRATGQGYHPHCFTCVVCARPLGGTSFIAGPGHPAPLLSPTTTRRPPRRCSVCSAPLMPEPAPPPPAPPRRPGTPPSPCPVPPSAALPPPPPPRGRLPLPATPCPAPLPRPPSPRPPPPPPP

SEQ ID NO: 1026296 - protein, 241 aa, Homo sapiens
MLGLQVRSPGAPGPLTLKEVEELEQLTQQLMQDMEHPQRQNVAVNELCGRCHQPLARAQPAVRALGQLFHIACFTCHQCAQQLQGQQFYSLEGAPYCEGCYTDTLEKCNTCGEPITDRMLRATGQGYHPHCFTCVVCARPLGGTSFIAGPGHPAPLLSPTTTRRPPRRCSVCSAPLMPEPAPPPPAPPRRPGTPPSPCPVPPSAALPPPPPPRGRLPLPATPCPAPLPRPPSPRPPPPPPP

SEQ ID NO: 1026297 - protein, 100 aa, Homo sapiens
SGSPTAPCCGSQQLGRREEWQRQGSPVSRRLSARRGPQAPGTRLPRRHPARAFPAATMPKRKVSSAEGAAKEEPKRRSARLSAKPPAKVEAKPKKGSSEG

SEQ ID NO: 1026298 - protein, 69 aa, Homo sapiens
GNRGAKGKQCLKWLTKKLKKTYHAATMPKRKVSSAEGAAKEEPKRRSARLSAKPPAKVEAKPKKGSSEG

SEQ ID NO: 1026299 - protein, 100 aa, Homo sapiens; identical to SEQ ID NO: 1026297

SEQ ID NO: 1026300 - protein, 100 aa, Homo sapiens; identical to SEQ ID NO: 1026297

SEQ ID NO: 1026301 - protein, 100 aa, Homo sapiens; identical to SEQ ID NO: 1026297

SEQ ID NO: 1026302 - protein, 100 aa, Homo sapiens; identical to SEQ ID NO: 1026297

SEQ ID NO: 1026303 - protein, 100 aa, Homo sapiens; identical to SEQ ID NO: 1026297

SEQ ID NO: 1026304 - protein, 100 aa, Homo sapiens; identical to SEQ ID NO: 1026297

SEQ ID NO: 1026305 - protein, 113 aa, Homo sapiens
MSAIQNLHSFDPFADASKGDDLLPAGTEDYIHIRIQQRNGRKTLTTVQGIADDYDKKKLVKAFKKKFACNGTVIEHPEYGEVIQLQGDQRKNICQFLVEIGLAKDDQLKVHGF

SEQ ID NO: 1026306 - protein, 129 aa, Homo sapiens
SGPQSLSRRRGFSSLPLEPPRFPTFRSPLPAFSRHRRRRLPQAVSTEEKESYRMSAIQNLHSFGKLWERSRARVGQRGLPGPETCSGKLPSAPGLRKLGQGKLDQGRRAAGSRPGPRGRTLSATGRSRR

SEQ ID NO: 1026307 - protein, 113 aa, Homo sapiens; identical to SEQ ID NO: 1026305

SEQ ID NO: 1026308 - protein, 113 aa, Homo sapiens; identical to SEQ ID NO: 1026305

SEQ ID NO: 1026309 - protein, 126 aa, Homo sapiens
SGPQSLSRRRGFSSLTEEKESYRMSAIQNLHSFDPFADASKGDDLLPAGTEDYIHIRIQQRNGRKTLTTVQGIADDYDKKKLVKAFKKKFACNGTVIEHPEYGEVIQLQGDQRKNICQFPRRDWTG

SEQ ID NO: 1026310 - protein, 139 aa, Homo sapiens
EGFTSPAHLEPSFRRRSPAAFPHALRFAWRSPRKDRSYVVSRPPSFDPFADASKGDDLLPAGTEDYIHIRIQQRNGRKTLTTVQGIADDYDKKKLVKAFKKKFACNGTVIEHPEYGEVIQLQGDQRKNICQFPRRDWTG

SEQ ID NO: 1026311 - protein, 113 aa, Homo sapiens; identical to SEQ ID NO: 1026305

SEQ ID NO: 1026312 - protein, 113 aa, Homo sapiens; identical to SEQ ID NO: 1026305

SEQ ID NO: 1026313 - protein, 126 aa, Homo sapiens; identical to SEQ ID NO: 1026309

SEQ ID NO: 1026314 - protein, 139 aa, Homo sapiens
AAVRLGRPPSREYDPPAALRTRALRGVFTEEKESYRMSAIQNLHSFDPFADASKGDDLLPAGTEDYIHIRIQQRNGRKTLTTVQGIADDYDKKKLVKAFKKKFACNGTVIEHPEYGEVIQLQGDQRKNICQFPRRDWTG

SEQ ID NO: 1026315 - protein, 113 aa, Homo sapiens; identical to SEQ ID NO: 1026305

SEQ ID NO: 1026316 - protein, 132 aa, Homo sapiens
SGPQSLSRRRGFSSLPLEPPRFPTFRSPLPAFSRHRRRRLPQAVSTEEKESYRMSAIQNLHSFGKLWERSRARVGQRGLPGPETCSGKLPSAPGLRKLGQGKLDQGRRAAGSRPGPRGRTLSATGRSRRPLC

SEQ ID NO: 1026317 - protein, 122 aa, Homo sapiens
SGPQSLSRRRGFSSLPLEPPRFPTFRSPLPAFSRHRRRRLPQAVSTEEKESYRMSAIQNLHSFDPFADASKGDDLLPAGTEDYIHIRIQQRNGRKTLTTVQGIADDYDKKKLVKAFKKVGLQ

SEQ ID NO: 1026318 - protein, 113 aa, Homo sapiens; identical to SEQ ID NO: 1026305

SEQ ID NO: 1026319 - protein, 113 aa, Homo sapiens; identical to SEQ ID NO: 1026305

SEQ ID NO: 1026320 - protein, 228 aa, Homo sapiens
SGPQSLSRRRGFSSLPLEPPRFPTFRSPLPAFSRHRRRRLPQAVSTEEKESYRMSAIQNLHSFDPFADASKGDDLLPAGTEDYIHIRIQQRNGRKTLTTVQGIADDYDKKKLVKAFKKKFACNGTVIEHPEYGEVIQLQGDQRKNICQFPRRVEVQSLLDLCLSAGKSQILSVSFCWGHKSWLCKAEQNLSWVLKYIDLFLFYRKKQKGLVYLWFTVSVDLLHRCKFE

SEQ ID NO: 1026321 - protein, 118 aa, Homo sapiens
RAEFGTSTEEKESYRMSAIQNLHSFDPFADASKGDDLLPAGTEDYIHIRIQQRNGRKTLTTVQGIADDYDKKKLVKAFKKKFACNGTVIEHPEYGEVIQLQGDQRKNICQFPRRDWTG

SEQ ID NO: 1026322 - protein, 139 aa, Homo sapiens; identical to SEQ ID NO: 1026310

SEQ ID NO: 1026323 - protein, 129 aa, Homo sapiens; identical to SEQ ID NO: 1026306

SEQ ID NO: 1026324 - protein, 118 aa, Homo sapiens; identical to SEQ ID NO: 1026321

SEQ ID NO: 1026325 - protein, 68 aa, Homo sapiens
EGFSSPAHLEPSFRRRSPAAFPHALRFAWRSPRKDSFVCSYPDLPLSNSIYDAMLMLVMTCRVAEIII

SEQ ID NO: 1026326 - protein, 156 aa, Homo sapiens
SGPQSLSRRRGFSSLPLEPPRFPTFRSPLPAFSRHRRRRLPQAVSTEEKESYRMSAIQNLHSFDPFADASKGDDLLPAGTEDYIHIRIQQRNGRKTLTTVQGIADDYDKKKLVKAFKKKFACNGTVIEHPEYGEVIQLQGDQRKNICQFPRRDWTG

SEQ ID NO: 1026327 - protein, 124 aa, Homo sapiens
MLLLGLIRFPLCLQKFACNGTVIEHPEYGEVIQLQGDQRKNICQFPRRVEVQSLLDLCLSAGKSQILSVSFCWGHKSWLCKAEQNLSWVLKYIDLFLFYRKKQKGLVYLWFTVSVDLLHRCKFE

SEQ ID NO: 1026328 - protein, 113 aa, Homo sapiens; identical to SEQ ID NO: 1026305

SEQ ID NO: 1026329 - protein, 113 aa, Homo sapiens; identical to SEQ ID NO: 1026305

SEQ ID NO: 1026330 - protein, 113 aa, Homo sapiens; identical to SEQ ID NO: 1026305

SEQ ID NO: 1026331 - protein, 113 aa, Homo sapiens; identical to SEQ ID NO: 1026305

SEQ ID NO: 1026332 - protein, 113 aa, Homo sapiens; identical to SEQ ID NO: 1026305

SEQ ID NO: 1026333 - protein, 113 aa, Homo sapiens; identical to SEQ ID NO: 1026305

SEQ ID NO: 1026334 - protein, 113 aa, Homo sapiens; identical to SEQ ID NO: 1026305

SEQ ID NO: 1026335 - protein, 113 aa, Homo sapiens; identical to SEQ ID NO: 1026305

SEQ ID NO: 1026336 - protein, 113 aa, Homo sapiens; identical to SEQ ID NO: 1026305

SEQ ID NO: 1026337 - protein, 113 aa, Homo sapiens; identical to SEQ ID NO: 1026305

SEQ ID NO: 1026338 - protein, 129 aa, Homo sapiens; identical to SEQ ID NO: 1026306

SEQ ID NO: 1026339 - protein, 168 aa, Homo sapiens
RTLRTLAWWQMWLPAAELPVPLSPQRPGHFLHVSPAHVNCRENQGSLRAAWRRHQTPGVPTWAPHPPHAQARLGVGTGGVVSGSWFLDLASEGYKGGCTSKWPNRFEEGALRGVCTFCAGCSSRTEELFLHVFLNSMAMEQVKATPWGLAQHIKDDFSRTPDLIPTFP

SEQ ID NO: 1026340 - protein, 220 aa, Homo sapiens
  misc_feature (64)..(64): Xaa can be any naturally occurring amino acid
  misc_feature (74)..(75): Xaa can be any naturally occurring amino acid
  misc_feature (79)..(79): Xaa can be any naturally occurring amino acid
  misc_feature (83)..(85): Xaa can be any naturally occurring amino acid
  misc_feature (91)..(92): Xaa can be any naturally occurring amino acid
  misc_feature (94)..(94): Xaa can be any naturally occurring amino acid
  misc_feature (97)..(97): Xaa can be any naturally occurring amino acid
  misc_feature (101)..(102): Xaa can be any naturally occurring amino acid
  misc_feature (104)..(104): Xaa can be any naturally occurring amino acid
PREFPKARKPSRAPLAMETVISSDSSPAVENEHPQALVTKGVRAAPLWDSKKQSFVGMLNINDXINILHRYYKXXLVKXYGLXXXKIENWXXVXIKXYFKXXVXISPYCQAGVEAGPLPLIRKQESHKLPVIEPRIQAITLYILTHKRILKFLKLFITEFPKAKVHVPSLWKSYRFGTYANIAMVRTTTPVYVALGIFVQHRVSALQWWMRRGRVGGQST

SEQ ID NO: 1026341 - protein, 262 aa, Homo sapiens
  misc_feature (107)..(107): Xaa can be any naturally occurring amino acid
  misc_feature (117)..(118): Xaa can be any naturally occurring amino acid
  misc_feature (122)..(122): Xaa can be any naturally occurring amino acid
  misc_feature (126)..(128): Xaa can be any naturally occurring amino acid
  misc_feature (134)..(135): Xaa can be any naturally occurring amino acid
  misc_feature (137)..(137): Xaa can be any naturally occurring amino acid
  misc_feature (140)..(140): Xaa can be any naturally occurring amino acid
  misc_feature (144)..(145): Xaa can be any naturally occurring amino acid
  misc_feature (147)..(147): Xaa can be any naturally occurring amino acid
PREFPKARKPSRAPLAMETVISSDSSPAVENEHPQETPESNNSVYTSFMKSHRCYDLIQKSSKLVVFDTSLQVKKAFFALVTKGVRAAPLWDSKKQSFVGMLTINDXINILHRYYKXXLVKXYGLXXXKIENWXXVXIKXEFKXXVXISPNARLVWMLVLFINSGNKIHKLPVIEPRIQAITLYILTHKRILKFLKLFITEFPKAKVHVPSLWKSYRFGTYANIAMVRTTTPVYVALGIFVQHRVSALQWWMRRGRVGGQST

SEQ ID NO: 1026342 - protein, 96 aa, Homo sapiens
PREFPKARKPSRAPLAMETVISSDSSPAVENEHPQETPESNNSVYTSFMKSHRCYDLIQKSSKLVVFDTSLQVKKAFFGLWVDLTGVTEPAPLIRD

SEQ ID NO: 1026343 - protein, 103 aa, Homo sapiens
MTGGYSMNFNMSSSRGPLPVKRGPPPRSGGPPPKRSALQDQFAVAGEWGGRAPVSRGKKIVMEVHLEGKRWPLVETCNWSQEMTGNNIKTVIQERITSSGTQD

SEQ ID NO: 1026344 - protein, 103 aa, Homo sapiens; identical to SEQ ID NO: 1026343

SEQ ID NO: 1026345 - protein, 179 aa, Homo sapiens
MVQAWYMDDAPGDPRQPHRPDPGRPVGLEQLRRLGVLYWKLDADKYENDPELEKIRRERNYSWMDIITICKDKLPNYEEKIKMFYEEHLHLDDEIRYILDGSGYFDVRDKEDQWIRIFMEKGDMVTLPAGIYHRFTVDEKNYTKAMRLFVGEPVWTAYNRPADHFEARGQYVKFLAQTA

SEQ ID NO: 1026346 - protein, 170 aa, Homo sapiens
AGPRLPIRQSAADGLRARPLGSNTAPALRVMVQAWYMDDAPGDPRQPHRPDPGRPVGLEQLRRLGVLYWKLDADKYENDPELEKIRRERNYSWMDIITICKDKLPHPGWQWVLRCEGQGGPVDPDLHGEGRHGDAPRGDLSPLHGGREELHEGHAAVCGRTGVDSVQPAR

SEQ ID NO: 1026347 - protein, 134 aa, Homo sapiens
AGPRLPIRQSAADGLRARPLGSNTAPALRVMVQAWYMDDAPGDPRQPHRPDPGRPVGLEQLRRLGVLYWKLDADKYENDPELEKIRRERNYSWMDIITICKDKLPNFEVHSECDWALSCKVLGGLSDSATYGPS

SEQ ID NO: 1026348 - protein, 187 aa, Homo sapiens
PKGPGCVAPCPAGIGRSTAKTPGPPGSQKCRSLHSGSLTSCNTGVCCSLDADKYENDPELEKIRRERNYSWMDIITICKDKLPNYEEKIKMFYEEHLHLDDEIRYILDGSGYFDVRDKEDQWIRIFMEKGDMVTLPAGIYHRFTVDEKNYTKAMRLFVGEPVWTAYNRPADHFEARGQYVKFLAQTA

SEQ ID NO: 1026349 - protein, 209 aa, Homo sapiens
AGPRLPIRQSAADGLRARPLGSNTAPALRVMVQAWYMDDAPGDPRQPHRPDPGRPVGLEQLRRLGVLYWKLDADKYENDPELEKIRRERNYSWMDIITICKDKLPNYEEKIKMFYEEHLHLDDEIRYILDGSGYFDVRDKEDQWIRIFMEKGDMVTLPAGIYHRFTVDEKNYTKAMRLFVGEPVWTAYNRPADHFEARGQYVKFLAQTA

SEQ ID NO: 1026350 - protein, 179 aa, Homo sapiens; identical to SEQ ID NO: 1026345

SEQ ID NO: 1026351 - protein, 179 aa, Homo sapiens; identical to SEQ ID NO: 1026345

SEQ ID NO: 1026352 - protein, 180 aa, Homo sapiens
  misc_feature (1)..(1): Xaa can be any naturally occurring amino acid
XSASGRHNDCVVSCIDEPATGTTPTGAVAEQLRRLGVLYWKLDADKYENDPELEKIRRERNYSWMDIITICKDKLPNYEEKIKMFYEEHLHLDDEIRYILDGSGYFDVRDKEDQWIRIFMEKGDMVTLPAGIYHRFTVDEKNYTKAMRLFVGEPVWTAYNRPADHFEARGQYVKFLAQTA

SEQ ID NO: 1026353 - protein, 213 aa, Homo sapiens
AGPRLPIRQSAADGLRARPLGSNTAPALRVMVQAWYMDDAPGDPRQPHRPDPGRPVGLEQLRRLGVLYWKLDADKYENDPELEKIRRERNYSWMDIITICKDKLPNYEEKIKMFYEEHLHLDDEIRYILDGSGYFDVRDKEDQWIRIFMEKGDMVTLPAGIYHRFTVDEKNYTKAMRLFVGEPVWTAYNRPADHFEARGQYVKFLAQTASPAV

SEQ ID NO: 1026354 - protein, 136 aa, Homo sapiens
MRTPGPLPVLLLLLAGAPAARPTPPTCYSRMRALSQEITRDFNLLQVSEPSEPCVRYLPRLYLDIHNYCVLDKLRDFVASPPCWKVAQVDSLKDKARKLYTIMNSFCRRDLVFLLDDCNALEYPIPVTTVLPDRQR

SEQ ID NO: 1026355 - protein, 76 aa, Homo sapiens
GRGCTSAWHHEDAWASARAAAAPGGSPRRAAHSPDLLLPHAGPEPGDHPRLQPPAGLGALGYSCWMTAMPWNTQSQ

SEQ ID NO: 1026356 - protein, 59 aa, Homo sapiens
MCEIPAQAVPGHTQLLCAGQAAGLCGLAPVLESGPGRFLEGQSTEAVHHHELVLQERFG

SEQ ID NO: 1026357 - protein, 75 aa, Homo sapiens
DILVKVSLKKEEAVDGDVVLQVRGMRCGKVEDKKKRDNPEDVSSRLGRSGGKPLHRKQQGTGDIFLGVDRSVQAL

SEQ ID NO: 1026358 - protein, 75 aa, Homo sapiens; identical to SEQ ID NO: 1026357

SEQ ID NO: 1026359 - protein, 75 aa, Homo sapiens; identical to SEQ ID NO: 1026357

SEQ ID NO: 1026360 - protein, 140 aa, Homo sapiens
GRMDGRGPRCFLTRRCLLSSVITPPKTVLDDHTQTLFQANLFPAALVHLGAEEPAGVYLEPGLLEHAISPSAADVLVARYMSRAAGSPSPLPAPDPAPKSEPAAEEGALVPPEPIPGTAQPVKRSLGKVPKWLKLPASKR

SEQ ID NO: 1026361 - protein, 548 aa, Homo sapiens
MILRGCQERCSVSDRYLLQVEICTSRSPEQSSARVVEDGATLPRSREGPENMVRIALQLDDGSRLQDSFCSGQTLWELLSHFPQIRECLQHPGGATPVCVYTRDEVTGEAALRGTTLQSLGLTGGSATIRFVMKCYDPVGKTPGSLGSSASAGQAAASAPLPLESGELSRGDLSRPEDADTSGPCCEHTQEKQSTRAPAAAPFVPFSGGGQRQGGPPGPTRPLTSSSAKLPKSLSSPGGPSKPKKSKSGQDPQQEQEQERERDPQQEQERERPVDREPVDREPVVCHPDLEERLQAWPAELPDEFFELTVDDVRRRLAQLKSERKRLEEAPLVTKAFREAQIKEKLERYPKAGVRWCHLGSLQAPASRVQDGSPCLSLPSELGFQVALRVLFPDRYVLQGFFRPSETVGDLRDFVRSHLGNPELSFYLFITPPKTVLDDHTQTLFQANLFPAALVHLGAEEPAGVYLEPGLLEHAISPSAADVLVARYMSRAAGSPSPLPAPDPAPKSEPAAEEGALVPPEPIPGTAQPVKRSLGKVPKWLKLPASKR

SEQ ID NO: 1026362 - protein, 302 aa, Homo sapiens
MILRGCQERCSVSDRYLLQVEICTSRSPEQSSARVVEDGATLPRSREGPENMVRIALQLDDGSRLQDSFCSGQTLWELLSHFPQIRECLQHPGGATPVCVYTRDEVTGEAALRGTTLQSLGLTGGSATIRFVMKCYDPVGKTPGSLGSSASAGQAAASAPLPLESGELSRGDLSRPEDADTSGPCCEHTQEKQSTRAPAAAPFVPFSGGGQRQGGPPGPTRPLTSSSAKLPKSLSSPGGPSKPKKSKSGQDPQQEQEQERERDPQQEQERERPVDREPVDREPGGVPPRPGGAAAGLASGAA

SEQ ID NO: 1026363 - protein, 146 aa, Homo sapiens
EPLQALVSLHATQSADPPPPPSPRPSSGDPSRVKAGHKHVGTGRANLFPAALVHLGAEEPAGVYLEPGLLEHAISPSAADVLVARYMSRAAGSPSPLPAPDPAPKSEPAAEEGALVPPEPIPGTAQPVKRSLGKVPKWLKLPASKR

SEQ ID NO: 1026364 - protein, 409 aa, Homo sapiens
MILRGCQERCSVSDRYLLQVEICTSRSPEQSSARVVEDGATLPRSREGPENMVRIALQLDDGSRLQDSFCSGQTLWELLSHFPQIRECLQHPGGATPVCVYTRDEVTGEAALRGTTLQSLGLTGGSATISSPGGPSKPKKSKSGQDPQQEQEQERERDPQQEQERERPVDREPVDREPVVCHPDLEERLQAWPAELPDEFFELTVDDVRRRLAQLKSERKRLEEAPLVTKAFREAQIKEKLERYPKVALRVLFPDRYVLQGFFRPSETVGDLRDFVRSHLGNPELSFYLFITPPKTVLDDHTQTLFQANLFPAALVHLGAEEPAGVYLEPGLLEHAISPSAADVLVARYMSRAAGSPSPLPAPDPAPKSEPAAEEGALVPPEPIPGTAQPVKRSLGKVPKWLKLPASKR

SEQ ID NO: 1026365 - protein, 537 aa, Homo sapiens
MILRGCQERCSVSDRYLLQVEICTSRSPEQSSARVVEDGATLPRSREGPENMVRIALQLDDGSRLQDSFCSGQTLWELLSHFPQIRECLQHPGGATPVCVYTRDEVTGEAALRGTTLQSLGLTGGSATIRFVMKCYDPVGKTPGSLGSSASAGQAAASAPLPLESGELSRGDLSRPEDADTSGPCCEHTQEKQSTRAPAAAPFVPFSGGGQRQGGPPGPTRPLTSSSAKLPKSLSSPGGPSKPKKSKSGQDPQQEQEQERERDPQQEQERERPVDREPVDREPVVCHPDLEERLQAWPAELPDEFFELTVDDVRRRLAQLKSERKRLEEAPLVTKAFREAQIKEKLERYPKVALRVLFPDRYVLQGFFRPSETVGDLRDFVRSHLGNPELSFYLFITPPKTVLDDHTQTLFQANLFPAALVHLGAEEPAGVYLEPGLLEHAISPSAADVLVAGSAGGSGGTSRGGTHHSVSSPPHRYMSRAAGSPSPLPAPDPAPKSEPAAEEGALVPPEPIPGTAQPVKRSLGKVPKWLKLPASKR

SEQ ID NO: 1026366 - protein, 514 aa, Homo sapiens
MILRGCQERCSVSDRYLLQVEICTSRSPEQSSARVVEDGATLPRSREGPENMVRIALQLDDGSRLQDSFCSGQTLWELLSHFPQIRECLQHPGGATPVCVYTRDEVTGEAALRGTTLQSLGLTGGSATIRFVMKCYDPVGKTPGSLGSSASAGQAAASAPLPLESGELSRGDLSRPEDADTSGPCCEHTQEKQSTRAPAAAPFVPFSGGGQRQGGPPGPTRPLTSSSAKLPKSLSSPGGPSKPKKSKSGQDPQQEQEQERERDPQQEQERERPVDREPVDREPVVCHPDLEERLQAWPAELPDEFFELTVDDVRRRLAQLKSERKRLEEAPLVTKAFREAQIKEKLERYPKVALRVLFPDRYVLQGFFRPSETVGDLRDFVRSHLGNPELSFYLFITPPKTVLDDHTQTLFQANLFPAALVHLGAEEPAGVYLEPGLLEHAISPSAADVLVARYMSRAAGSPSPLPAPDPAPKSEPAAEEGALVPPEPIPGTAQPVKRSLGKVPKWLKLPASKR

SEQ ID NO: 1026367 - protein, 119 aa, Homo sapiens
  misc_feature (80)..(80): Xaa can be any naturally occurring amino acid
  misc_feature (85)..(85): Xaa can be any naturally occurring amino acid
MILRGCQERCSVSDRYLLQVEICTSRSPEQSSARVVEDGATLPRSREGPENMVRIALQLDDGSRLQDSFCSGQTLWKRGXLFFFXQKGPMSFSAIFHRSGSACSTPAGPPQSACTRGMR

SEQ ID NO: 1026368 - protein, 323 aa, Homo sapiens
MNPNCARCGKIVYPTEKVNCLDKFWHKACFHCETCKMTLNMKNYKGYEKKPYCNAHYPKQSFTMVADTPENLRLKQQSELQSQVRYKEEFEKNKGKGFSVVADTPELQRIKKTQDQISNIKYHEEFEKSRMGPSGGEGMEPERRDSQDGSSYRRPLEQQQPHHIPTSAPVYQQPQQQPVAQSYGGYKEPAAPVSIQRSAPICLQHIPRHRIRPGRDPSILQCLCFLKPATACDSYPSSSFFCQLKPSSATSAGSLLWQASPLIDFLVFSLDGTGMGLSGGGRGPWGRAGMGDLLACGPHLPLCSLPSHPPAQLLTYPHIPGLG

SEQ ID NO: 1026369 - protein, 261 aa, Homo sapiens [sequence omitted]

SEQ ID NO: 1026370 - protein, 161 aa, Homo sapiens
ENVYLAAGTVYGLETQLTELEDAARCIHSGTDETHLADLEDQVATAAAQVHHAELQISDIESRISALTIAGLNIAPCVRFTRRRDQKQRTQVQTIDTSRQQRRKLPAPPVKAEKIETSSVTTIKTFNHNFILQGSSTNRTKERKGTTKDLMEPALESAVMY

SEQ ID NO: 1026371 - protein, 190 aa, Homo sapiens
MPGKHQHFQEPEVGCCGKYFLFGFNIVFWVLGALFLAIGLWAWGEKGVLSNISALTDLGGLDPVWLFVVVGGVMSVLGFAGCDWNLNIYFNCTDLNPSRERCGVPFSCCVRDPAEDVLNTQCGYDVRLKLELEQQGFIHTKGCVGQFEKWLQDNLIVVAGVFMGIALLQIFGICLAQNLVSDIKAVKANW

SEQ ID NO: 1026372 - protein, 258 aa, Homo sapiens
MPGKHQHFQEPEVGCCGKYFLFGFNIVFWVLGALFLAIGLWAWGEKGVLSNISALTDLGGLDPVWLFVVVGGVMSVLGFAGCIGALRENTFLLKFLATGILAFVFKDWIRDQLNLFINNNVKAYRDDIDLQNLIDFAQEYWSCCGARGPNDWNLNIYFNCTDLNPSRERCGVPFSCCVRDPAEDVLNTQCGYDVRLKLELEQQGFIHTKGCVGQFEKWLQDNLIVVAGVFMGIALLQIFGICLAQNLVSDIKAVKANW

SEQ ID NO: 1026373 - protein, 204 aa, Homo sapiens
MPGKHQHFQEPEVGCCGKYFLFGFNIVFWFSVFLGLIFFLELATGILAFVFKDWIRDQLNLFINNNVKAYRDDIDLQNLIDFAQEYWSCCGARGPNDWNLNIYFNCTDLNPSRERCGVPFSCCVRDPAEDVLNTQCGYDVRLKLELEQQGFIHTKGCVGQFEKWLQDNLIVVAGVFMGIALLQIFGICLAQNLVSDIKAVKANW

SEQ ID NO: 1026374 - protein, 270 aa, Homo sapiens; identical to SEQ ID NO: 754354

SEQ ID NO: 1026375 - protein, 562 aa, Homo sapiens
EHTLALASNGGVYAWGSNSEGQLGLGHTNHVREPTLVTGHAKGKMFGRSRLAAATVLHGQHHLSHQEHQVCQYLLQLGLPDTVPPQYGALREVSIHTVRARLRLLYHFSDLMYSSWRLLNLSPNNQNSTSHYNAGTWGIVQGQLRPLLAPRVYTLPMVRSIGKTMVQGKNYGPQITVKRISTRGRKCKPIFVQIARQVVKLNASDLRLPSRAWKVKLVGEGADDAGGVFDDTITEMCQELETGIVDLLIPSPNATAEVGYNRDRFLFNPSACLDEHLMQFKFLGILMGVAIRTKKPLDLHLAPLVWKQLCCVPLTLEDLEEVDLLYVQTLNSILHIEDSGITEESFHEMIPLDSFVGQSADGKMVPIIPGGNSIPLTFSNRKEYVERAIEYRLHEMDRQVAAVREGMSWIVPVPLLSLLTAKQLEQMVCGMPEISVEVLKKVVRYREVDEQHQLVQWFWHTLEEFSNEERVLFMRFVSGRSRLPANTADISQRFQIMKVDRPYDSLPTSQTCFFQLRLPPYSSQLVMAERLRYAINNCRSIDMDNYMLSRNVDNAEGSDTDY

SEQ ID NO: 1026376 - protein, 179 aa, Homo sapiens
  misc_feature (12)..(12): Xaa can be any naturally occurring amino acid
FPFPVPHPLSPXTLILVAAVREGMSWIVPVPLLSLLTAKQLEQMVCGMPEISVEVLKKVVRYREVDEQHQLVQWFWHTLEEFSNEERVLFMRFVSGRSRLPANTADISQRFQIMKVDRPYDSLPTSQTCFFQLRLPPYSSQLVMAERLRYAINNCRSIDMDNYMLSRNVDNAEGSDTDY

SEQ ID NO: 1026377 - protein, 156 aa, Homo sapiens
MSWIVPVPLLSLLTAKQLEQMVCGMPEISVEVLKKVVRYREVDEQHQLVQWFWHTLEEFSNEERVLFMRFVSGRSRLPANTADISQRFQIMKVDRPYDSLPTSQTCFFQLRLPPYSSQLVMAERLRYAINNCRSIDMDNYMLSRNVDNAEGSDTDY

SEQ ID NO: 1026378 - protein, 123 aa, Homo sapiens
CCPWRGREREGGQRGSHGQLHLTVVLSILPALWGHPCSWLPVCTLLVDGYEGQVPSYYTLILCQALCVVYSLKQSCQSELLLTLHTQALEEVRTRRNIFTQSLEGHGAVGPQLILSGPVSVST

SEQ ID NO: 1026379 - protein, 276 aa, Homo sapiens [sequence omitted]

SEQ ID NO: 1026380 - protein, 488 aa, Homo sapiens
MPGGRRGPSRQQLSRSALPSLQTLVGGGCGNGTGLRNRNGSAIGLPVPPITALITPGPVRHCQIPDLPVDGSLLFEFLFFIYLLVALFIQYINIYKTVWWYPYNHPASCTSLNFHLIDYHLAAFITVMLARRLVWALISEATKAGAASMIHYMVLISARLVLLTLCGWVLCWTLVNLFRSHSVLNLLFLGYPFGVYVPLCCFHQDSRAHLLLTDYNYVVQHEAVEESASTVGGLAKSKDFLSLLLESLKEQFNNATPIPTHSCPLSPDLIRNEVECLKADFNHRIKEVLFNSLFSAYYVAFLPLCFVKSTQYYDMRWSCEHLIMVWINAFVMLTTQLLPSKYCDLLHKSAAHLGKWQKLEHGSYSNAPQHIWSENTIWPQGVLVRHSRCLYRAMGPYNVAVPSDVSHARFYFLFHRPLRLLNLLILIEGSVVFYQLYSLLRSEKWNHTLSMALILFCNYYVLFKLLRDRIVLGRAYSYPLNSYELKAN

SEQ ID NO: 1026381 - protein, 339 aa, Homo sapiens
MGAYSLNSFFSSTCWLLFSFSTSTFIKQCGGILTIILLLVHHWFGVYVPLCCFHQDSRAHLLLTDYNYVVQHEAVEESASTVGGLAKSKDFLSLLLESLKEQFNNATPIPTHSCPLSPDLIRNEVECLKADFNHRIKEVLFNSLFSAYYVAFLPLCFVKSTQYYDMRWSCEHLIMVWINAFVMLTTQLLPSKYCDLLHKSAAHLGKWQKLEHGSYSNAPQHIWSENTIWPQGVLVRHSRCLYRAMGPYNVAVPSDVSHARFYFLFHRPLRLLNLLILIEGSVVFYQLYSLLRSEKWNHTLSMALILFCNYYVLFKLLRDRIVLGRAYSYPLNSYELKAN

SEQ ID NO: 1026382 - protein, 488 aa, Homo sapiens; identical to SEQ ID NO: 1026380

SEQ ID NO: 1026383 - protein, 488 aa, Homo sapiens; identical to SEQ ID NO: 1026380

SEQ ID NO: 1026384 - protein, 525 aa, Homo sapiens
MPGGRRGPSRQQLSRSALPSLQTLVGGGCGNGTGLRNRNGSAIGLPVPPITALITPGPVRHCQIPDLPVDGSLLFEFLFFIYLLVALFIQYINIYKTVWWYPYNHPASCTSLNFHLIDYHLAAFITVMLARRLVWALISEVCVCKLLIFRNPISGSRVTGNTKSRSENHLKLTKKQQATKAGAASMIHYMVLISARLVLLTLCGWVLCWTLVNLFRSHSVLNLLFLGYPFGVYVPLCCFHQDSRAHLLLTDYNYVVQHEAVEESASTVGGLAKSKDFLSLLLESLKEQFNNATPIPTHSCPLSPDLIRNEVECLKADFNHRIKEVLFNSLFSAYYVAFLPLCFVKSTQYYDMRWSCEHLIMVWINAFVMLTTQLLPSKYCDLLHKSAAHLGKWQKLEHGSYSNAPQHIWSENTIWPQGVLVRHSRCLYRAMGPYNVAVPSDVSHARFYFLFHRPLRLLNLLILIEGSVVFYQLYSLLRSEKWNHTLSMALILFCNYYVLFKLLRDRIVLGRAYSYPLNSYELKAN

SEQ ID NO: 1026385 - protein, 488 aa, Homo sapiens; identical to SEQ ID NO: 1026380

SEQ ID NO: 1026386 - protein, 361 aa, Homo sapiens [sequence omitted]

SEQ ID NO: 1026387 - protein, 364 aa, Homo sapiens
  misc_feature (6)..(6): Xaa can be any naturally occurring amino acid
  misc_feature (15)..(15): Xaa can be any naturally occurring amino acid
MNVHCXYGKKLKSSXDNEFTISNVPLELCLLLRVLTILLTKVISYIDEVIRCDFRWYLWSHFHTLFYRFGVYVPLCCFHQDSRAHLLLTDYNYVVQHEAVEESASTVGGLAKSKDFLSLLLESLKEQFNNATPIPTHSCPLSPDLIRNEVECLKADFNHRIKEVLFNSLFSAYYVAFLPLCFVKSTQYYDMRWSCEHLIMVWINAFVMLTTQLLPSKYCDLLHKSAAHLGKWQKLEHGSYSNAPQHIWSENTIWPQGVLVRHSRCLYRAMGPYNVAVPSDVSHARFYFLFHRPLRLLNLLILIEGSVVFYQLYSLLRSEKWNHTLSMALILFCNYYVLFKLLRDRIVLGRAYSYPLNSYELKAN

SEQ ID NO: 1026388 - protein, 80 aa, Homo sapiens
MDGGKVKLKHKVPISNGTQMIRWGFNIGVSGTGVSGAQRKIQDSLKWQKPPKVTFLYCHDELELPEKFKKIETLINGVEK

SEQ ID NO: 1026389 - protein, 125 aa, Homo sapiens
MACARPLISVYSEKGESSGKNVTLPAVFKAPIRPDIVNFVHTNLRKNNRQPYAVSELAGHQTSAESWGTGRAVARIPRVSDVLCWYFYSLCATVSSFGENIVMSLGGRIVFGHPPKNLCAVLHLL

SEQ ID NO: 1026390 - protein, 232 aa, Homo sapiens [sequence omitted]

SEQ ID NO: 1026391 - protein, 247 aa, Homo sapiens
  misc_feature (217)..(217): Xaa can be any naturally occurring amino acid
  misc_feature (234)..(234): Xaa can be any naturally occurring amino acid
  misc_feature (247)..(247): Xaa can be any naturally occurring amino acid
MRNRRRIQRRGPCIIYNEDNGIIKAFRNIPGITLLNVSKLNILKLAPGGHVGRFCIWTESAFRKLDELYGTWRKAASLKSNYNLPMHKMINTDLSRILKSPEIQRALRAPRKKIHRRVLKKNPLKNLRIMLKLNPYAKTMRRNTILRQARNHKLRVDKAAAAAAALQAKSDEKAAVAGKKPVVGKKGKKAAVGVKKQKKPLVGKKAAATKKPAPVYXYVYVSVSMYVYVYVCCXYIYVCVCICICLX

SEQ ID NO: 1026392 - protein, 207 aa, Homo sapiens
MRNRRRIQRRGPCIIYNEDNGIIKAFRNIPGITLLNVSKLNILKLAPGGHVGRFCIWTESAFRKLDELYGTWRKAASLKSNYNLPMHKMINTDLSRILKSPEIQRALRAPRKKIHRRVLKKNPLKNLRIMLKLNPYAKTMRRNTILRQARNHKLRVDKAAAAAAALQAKSDEKAAVAGKKPVVGKKGGLLWLRAERPRWKRNLPGPA

SEQ ID NO: 1026393 - protein, 139 aa, Homo sapiens
MACARPLISVYSEKGESSGKNVTLPAVFKAPIRPDIVNFVHTNLRKNNRQPYAVSELAGHQTSAESWGTGRAVARIPRVRGGGTHRSGQGAFGNMCRGGRMFAPTKTWRRWHRRVNTTQKRYAICSALVCLSPTSTGHV

SEQ ID NO: 1026394 - protein, 232 aa, Homo sapiens [sequence omitted]

SEQ ID NO: 1026395 - protein, 232 aa, Homo sapiens [sequence omitted]

SEQ ID NO: 1026396 - protein, 232 aa, Homo sapiens [sequence omitted]

SEQ ID NO: 1026397 - protein, 139 aa, Homo sapiens; identical to SEQ ID NO: 1026393

SEQ ID NO: 1026398 - protein, 112 aa, Homo sapiens
MACARPLISVYSEKGESSGKNVTLPAVFKAPIRPDIVNFVHTNLRKNNRQPYAVSELAGHQTSAESWGTGRAVARIPRVRGGGTHRSAQDAIGNVSWRPNVCTNQNLAPLAS

SEQ ID NO: 1026399 - protein, 125 aa, Homo sapiens
MWYSVHLFGVLSDSKHLSTRRWSRKSCDVVSHPCIKVCKLFKAPIRPDIVNFVHTNLRKNNRQPYAVSELAGHQTSAESWGTGRAVARIPTVVGLTASGQVLLETCVVEAECLHQPKPGAVGIVE

SEQ ID NO: 1026400 - protein, 232 aa, Homo sapiens [sequence omitted]

SEQ ID NO: 1026401 - protein, 218 aa, Homo sapiens
MRNRRRIQRRGPCIIYNEDNGIIKAFRNIPGITLLNVSKLNILKLAPGGHVGRFCIWTESAFRKLDELYGTWRKAASLKSNYNLPMHKMINTDLSRILKSPEIQRALRAPRKKIHRRVLKKNPLKNLRIMLKLNPYAKTMRRNTILRQARNHKLRVDKAAAAAAALQAKSDEKAAVAGKKPVVGKKGKKAAVGVKKQKKPLVGARCASLLPSAFKVLV

SEQ ID NO: 1026402 - protein, 139 aa, Homo sapiens; identical to SEQ ID NO: 1026393

SEQ ID NO: 1026403 - protein, 226 aa, Homo sapiens
MVSSRPSETSLELLSLLTLSRVIPGMFLLNVSKLNILKLAPGGHVGRFCIWTESAFRKLDELYGTWRKAASLKSNYNLPMHKMINTDLSRILKSPEIQRALRAPRKKIHRRVLKKNPLKNLRIMLKLNPYAKTMRRNTILRQARNHKLRVDKAAAAAAALQAKSDEKAAVAGKKPVVGKKGKKAAVGVKKQKKPLVGKKAAATKKPAPEKKPAEKKPTTEEKKPAA

SEQ ID NO: 1026404 - protein, 232 aa, Homo sapiens [sequence omitted]

SEQ ID NO: 1026405 - protein, 232 aa, Homo sapiens [sequence omitted]

SEQ ID NO: 1026406 - protein, 232 aa, Homo sapiens [sequence omitted]

SEQ ID NO: 1026407 - protein, 232 aa, Homo sapiens [sequence omitted]

SEQ ID NO: 1026408 - protein, 113 aa, Homo sapiens
  misc_feature (31)..(31): Xaa can be any naturally occurring amino acid
MACARPLISVYSEKGESSGKNVTLPAVGVKXQKKLRVDKAAAAAAALQAKSDEKAAVAGKKPVVGKKGKKAAVGVKKQKKPLVGKKAAATKKPAPEKKPAEKKPTTEEKKPAA

SEQ ID NO: 1026409 - protein, 100 aa, Homo sapiens
MACARPLISVYSEKGESSGKNVTLPAVFKAPIRPDIVNFVHTNLRKNNRQPYAVSELAGHQTSAESWGTGRAVARIPRVEVWLRLQVFDMFVSDVDTNCL

SEQ ID NO: 1026410 - protein, 139 aa, Homo sapiens; identical to SEQ ID NO: 1026393

SEQ ID NO: 1026411 - protein, 232 aa, Homo sapiens [sequence omitted]

SEQ ID NO: 1026412 - protein, 232 aa, Homo sapiens [sequence omitted]

SEQ ID NO: 1026413 - protein, 144 aa, Homo sapiens [sequence omitted]

SEQ ID NO: 1026414 - protein, 261 aa, Homo sapiens
MLGARVAAHLDALGPLVPYVPPPLLPSMFYVGLFFVNVLILYYAFLMEYIVLNVGLVFLPEDMDQALVDLGVLSDPARAFTMLTRSSTSLMRTWSRVSTAVPLFPTRSGTHALDQPPDHAAELVGGTIWTGMVPQEETLPCLRGLPAPLKSFVPTERFLFEPRRVEERLGLSAEVGKAPAPTEGGTQEASQDLICLQCQIDGLALASDYLQLRWMFTGTQPEFASLHFIPERTCFPHFTFGEDTSNCGHTQKRLPAPFDVS

SEQ ID NO: 1026415 - protein, 261 aa, Homo sapiens; identical to SEQ ID NO: 1026414

SEQ ID NO: 1026416 - protein, 261 aa, Homo sapiens; identical to SEQ ID NO: 1026414

SEQ ID NO: 1026417 - protein, 261 aa, Homo sapiens; identical to SEQ ID NO: 1026414

SEQ ID NO: 1026418 - protein, 289 aa, Homo sapiens
MLGARVAAHLDALGPLVPYVPPPLLPSMFYVGLFFVNVLILYYAFLMEYIVLNVGLVFLPEDMDQALVDLGVLSDPARAFTMLTRSSTSLMRTWSRVSTAVPLFPTRSGTHALDQPPDHAAELVGGTIWTGMVPQEETLPCLRGLPAPLKSFVPTERFLFEPRRVEERLGLSAEVGKAPAPTEGGTQEASQDLICLQCQIDGLALASDYLQLRWMFTGTQPEFASLHFIPERTCFPHFTFGEDTSNCGHTQKRLPAPFDVTRSSASWQNRHHAGECHVTPLAGNAFLKV

SEQ ID NO: 1026419 - protein, 61 aa, Homo sapiens
MSKFTSRCFLDQQQHQEPLTQYSQVHYLNHHHCYPITQYSQLHFFNHHHREPLKQYSQLHF

SEQ ID NO: 1026420 - protein, 213 aa, Homo sapiens
MGSSPQSPLVGSLECLPGVWSLPEDAAFVLSSPSSMAISSQTFSLPLFRLSMVWWPRTFECALCWLITGFGLAVDLITLGWGCRLLPVGLPWNLCLVEMSGPDPVGCRSGTGALVGLGVQSKMLCWGLCSGGSSGLTHCLFLSLHLGMFPEQFKRPTHSPVCSWEPRAQQHQLQPREPRRQLQQGARVAPLGRRRRESTKAPADILYRPMPGY

SEQ ID NO: 1026421 - protein, 205 aa, Homo sapiens
MGSSPQSPLVGSLECLPGVWSLPEDAAFVLSSPSSMAISSQTFSLPLFRLSMVWWPRTFECALCWLITGFGLAVDLITLGWGCRLLPVGLPWNLCLVEMSGPDPVGCRSGTGALVGLGVQSKMLCWGLCSGGSSGLTHCLFLSLHLGMFPEQFKRPTHSPVCSWEPRAQQHQLQPREPRRQLQQGARVAPLNHGLSPVASASGGK

SEQ ID NO: 1026422 - protein, 280 aa, Homo sapiens
  misc_feature (204)..(204): Xaa can be any naturally occurring amino acid
  misc_feature (207)..(207): Xaa can be any naturally occurring amino acid
  misc_feature (231)..(231): Xaa can be any naturally occurring amino acid
  misc_feature (258)..(259): Xaa can be any naturally occurring amino acid
MQMKCNWHDPHPQILHLNSHPKKHSYFMHPRSYTHTTHSTRMNTAHTRAQHTHEHTAHTQTHSTHSTQMSTQHTHKRTAHTRTHMHTQHTNARHTHAHTCTHSTHANAQHTLGKAQHTRKKAHTRAHSTQTHSTRTHMHTQHTSTQHTHKDTAHTCTHSTNTRTQHTRTQHNQHTHKHSTHAHSTCTHSTHMNTAHSTHMHTAXTLXSTHEHSTHKHTAHTCTHSTHTHAXQYMNTAHSTKTRSTHVAHASSHLHTHXXPHTHTPTKLDETISYLSTTIS

SEQ ID NO: 1026423 - protein, 280 aa, Homo sapiens; identical to SEQ ID NO: 1026422
  misc_feature (204)..(204): Xaa can be any naturally occurring amino acid
  misc_feature (207)..(207): Xaa can be any naturally occurring amino acid
  misc_feature (231)..(231): Xaa can be any naturally occurring amino acid
  misc_feature (258)..(259): Xaa can be any naturally occurring amino acid

SEQ ID NO: 1026424 - protein, 210 aa, Homo sapiens
  misc_feature (204)..(204): Xaa can be any naturally occurring amino acid
MQMKCNWHDPHPQILHLNSHPKKHSYFMHPRSYTHTTHSTRMNTAHTRAQHTHEHTAHTQTHSTHSTQMSTQHTHKRTAHTRTHMHTQHTNARHTHAHTCTHSTHANAQHTLGKAQHTRKKAHTRAHSTQTHSTRTHMHTQHTSTQHTHKDTAHTCTHSTNTRTQHTRTQHNQHTHKHSTHAHSTCTHSTHMNTAHSTHMHTAXTHAQHT

SEQ ID NO: 1026425 - protein, 114 aa, Homo sapiens
MLTRKIKLWDINAHITCRLCSGYLIDATTVTECLHTSQARQKQEPGPGAETILKISQKSHFTLKVLWVVSEQMRPRLGERNTGETPHSSHGAARPVAAVTVLTAGSFQISRGVP

SEQ ID NO: 1026426 - protein, 229 aa, Homo sapiens
MLTRKIKLWDINAHITCRLCSGYLIDATTVTECLHTFCRSCLVKYLEENNTCPTCRIVIHQSHPLQYIGHDRTMQDIVYKLVPGLQEAEMRKQREFYHKLGMEVPGDLTGGDLLCTPATRSPSHWGHHSRRQAHTEARANPQQNDTTREQTGDTGMRRSPAQAGRTGDDTRVGPGNAEPNSDAQKPRATGEQHRGTGTHQRHRDKALQPVRHGSALAKAANSNNDSGEA

SEQ ID NO: 1026427 - protein, 173 aa, Homo sapiens
MLTRKIKLWDINAHITCRLCSGYLIDATTVTECLHTCTCPARATQGGRALPSSVLFRTLAFVLPHAFSSSPTKAGTRTRGRDDLEDKSEKSFHAKGPVGGVRADEASLRRAKHRRDPTFLPRSSKASSRCDSAHCWQFPNLQRSSLDPSKGNLPVCSSHLMCVLTPDESVLWC

SEQ ID NO: 1026428 - protein, 229 aa, Homo sapiens; identical to SEQ ID NO: 1026426

SEQ ID NO: 1026429 - protein, 112 aa, Homo sapiens
AQTHTAHAPSAAPPTRRSARLGHFRLFVLNSGRAFFLLLLGGTQRERRPLPPPARTPRAPCSPAAPRPQASQCSRDPRRRAQKMEKEPGPEGGCRSESACGARRQRRVGVLA

SEQ ID NO: 1026430 - protein, 167 aa, Homo sapiens
MLSKRMTAKRRELKPASQARKRMVKERSDCHPAGCDSPPDSPAGAGFGGAAPPAALCAHWAPGPWWPCRLFPRAMRPLHGDELRDDLCLLSGAEGSAMLCPGGGSSSPPPPPPPGARGAGRGPGGGGGGGRKRRREELCALPPSAPRGRRTGGGGSGGGESPPQQRP

SEQ ID NO: 1026431 - protein, 235 aa, Homo sapiens
MARKALPPNPPGPELVLLLLQWTLSWLSRRFGQELQQALLGPARCTAGPLPCCLSSRELLLPGDLIQPDKVPSSGYHCNGPEGKQQHGTAHPAADGLVPAGSPPGTSRPLSHPSMPQPTMDRGIQLPPQTRPLPLSLVTPKVHACYPGPVPALAGQWHDSAGGQSWEIQAITGSRLLSMVAGALQGNQAHAGTPPSAQGLGCLSHTPGRTVDNVGLTKGFLADEGDEHPRSPIVT

SEQ ID NO: 1026432 - protein, 173 aa, Homo sapiens
MARKALPPNPPGPELVLLLLQWTLSWLSRRFGQELQQALLGPARCTAGPLPCCLSSRELLLPGDLIQPDKVPSSGYHCNGPEGKQQHGTAHPAADGLVPAGSPPGTSRPLSQPFHAPAHHGQGYPASSSNSVHLTPERHMNTQGPCLYTQSPCHNTSWVTGMKVLISSLAHPG

SEQ ID NO: 1026433 - protein, 136 aa, Homo sapiens; identical to SEQ ID NO: 778873

SEQ ID NO: 1026434 - protein, 136 aa, Homo sapiens; identical to SEQ ID NO: 778873

SEQ ID NO: 1026435 - protein, 136 aa, Homo sapiens; identical to SEQ ID NO: 778873

SEQ ID NO: 1026436 - protein, 55 aa, Homo sapiens
MATYRVLNGSHGLLVPVPGKLGNLKFTLTQKNNNKDTRTQKPLPGLFGPRKEVCI

SEQ ID NO: 1026437 - protein, 136 aa, Homo sapiens; identical to SEQ ID NO: 778873

SEQ ID NO: 1026438 - protein, 136 aa, Homo sapiens; identical to SEQ ID NO: 778873

SEQ ID NO: 1026439 - protein, 88 aa, Homo sapiens
PGTVTVVKQVTEEEPSSNHTVMIQETVQQASVELAEQHHLVVSSDDVEGIETVTVYTQGGEASEFIVYVQEAMQPVEEQAVEQPAQEL

SEQ ID NO: 1026440 - protein, 88 aa, Homo sapiens; identical to SEQ ID NO: 1026439

SEQ ID NO: 1026441 - protein, 88 aa, Homo sapiens; identical to SEQ ID NO: 1026439

SEQ ID NO: 1026442 - protein, 216 aa, Homo sapiens
  misc_feature (17)..(17): Xaa can be any naturally occurring amino acid
HLVCKVARFGHSPQGPXCLLRWAAPEVIAHGKHTTSSDVWSFGILMWEVMSYGERPYWDMSEQEVLNAIEQEFRLPPPPGCPPGLHLLMLDTWQKDRARRPHFDQLVAAFDKMIRKPDTLQAGGDPGERPSQALLTPVALDFPCLDSPQAWLSAIGLECYQDNFSKFGLCTFSDVAQLSLEDLPALGITLAGHQKKLLHHIQLLQQHLRQQGSVEV

SEQ ID NO: 1026443 - protein, 75 aa, Homo sapiens
VRGAVVFQSVFPVAGVQLKCESFLGLHAVHRNGLDEDDRHGRGQLFQPRFSDDSSLGVPASPCRDSMAEGQVCCQ

SEQ ID NO: 1026444 - protein, 109 aa, Homo sapiens
MGGAADACFVHGTLIDVLGLHAVHRNGLDEDDRHGRGQLFQPRFSDDSSLGVPASPCRDSMAEGQVCCQYSEGGAGRKGGVLTLPALCRAGLYPKRLQASCHSWKQRPS

SEQ ID NO: 1026445 - protein, 75 aa, Homo sapiens; identical to SEQ ID NO: 1026443

SEQ ID NO: 1026446 - protein, 66 aa, Homo sapiens
EPLLAAYPGWNYINGHPTSNAALFLIERRPHHWPAMKFRSHPDHSTYAEVEPSGHEKEGFMEAEQC

SEQ ID NO: 1026447 - protein, 61 aa, Homo sapiens
MCSYDTWLCALPNPTLALHTSHFKFMMLKDMEDTDDHDDDDDDADDDEDNSLAPTRDQDAW

SEQ ID NO: 1026448 - protein, 175 aa, Homo sapiens
LKAVSSVTVAGEFWGTRAKGLEKARSEPKKKQLCPGEEKLAHSRVEPSFQWKMAGPMFALSPTIAPRGCSYPIVIITFFGRMIPAISVSIRAAERKEAHPGNRYLDQSKSYFEAEVLREKGGKIVFPKRVFSLGHAKIIIPSNPRGWIFQKKANRKVVPPFLHMTDPYYCLTRLE

SEQ ID NO: 1026449 - protein, 118 aa, Homo sapiens
DYSRQTALESTSYIQLPEAELRMERMLPLLALGLLAAGFCPAVLCHPNSPLDEENLTQENQDRGTHVDLGLASANVDFAFSLYKQLVLKAPDKNVIFSPLSISNRLGPSCLWGPIIPP

SEQ ID NO: 1026450 - protein, 319 aa, Homo sapiens
  misc_feature (247)..(247): Xaa can be any naturally occurring amino acid
MGNAMFVKEQLSLLDRFTEDAKRLYGSEAFATDFQDSAAAKKLINDYVKNGTRGKITDLIKDLDSQTMMVLVNYIFFKAKWEMPFDPQDTHQSRCYLSKKKWVMVPMMSLHHLTIPYFRDEELSCTVVELKYTGNASALFILPDQDKDGGSGSHAAPRKTLKRWRDSLEFREIGELYLPRSFPILDGDYKPELTYLHPGMGTYEDSLHTAKADLSGTHRAPRNLAVSQVVHKVCLMYLTEGTECRIXCHSESKVSLLICDVVETRTMVRFRQALRDDHGAEETRQNIFFMSKVSNPSKLELGIKQGASSKELGNELDAG

SEQ ID NO: 1026451 - protein, 337 aa, Homo sapiens
  misc_feature (265)..(265): Xaa can be any naturally occurring amino acid
MNELVVTLNQSSDELQLSMGNAMFVKEQLSLLDRFTEDAKRLYGSEAFATDFQDSAAAKKLINDYVKNGTRGKITDLIKDLDSQTMMVLVNYIFFKAKWEMPFDPQDTHQSRCYLSKKKWVMVPMMSLHHLTIPYFRDEELSCTVVELKYTGNASALFILPDQDKDGGSGSHAAPRKTLKRWRDSLEFREIGELYHAQKFFQSRGDYKPELTYLHPGMGTYEDSLHTAKADLSGTHRAPRNLAVSQVVHKVCLMYLTEGTECRIXCHSESKVSLLICDVVETRTMVRFRQALRDDHGAEETRQNIFFMSKVSNPSKLELGIKQGASSKELGNELDAG

SEQ ID NO: 1026452 - protein, 377 aa, Homo sapiens
  misc_feature (345)..(345): Xaa can be any naturally occurring amino acid
DYSRQTALESTSYIQLPEAELRMERMLPLLALGLLAAGFCPAVLCHPNSPLDEENLTQENQDRGTHVDLGLASANVDFAFQPVTKQLVLKAPDKNVIFSPLSISTALAFLSLGAHNTTLTEILKGLKFNLTETSEAEIHQSFQHLLRTLNQSSDELQLSMGNAMFVKEQLSLLDRFTEDAKKRLVCGYHSGTLWRDCTCTRNFILALAYRTLYQSDLTVEKRLGKRTSGDTHSPRISHSNGTLWTFCQRTTLECSSLDFADLYKSLHNLQNTAPQQTIGRMELLHLFLDPGTRKWHLTSRLQQIPRGVSFTLRTVPSAYTPLLRGAPLFAAMRRPLWHLAPRVSXATVSNRLYGSSKATPPVSSLSCPQRVDPLATP

SEQ ID NO: 1026453 - protein, 478 aa, Homo sapiens
  misc_feature (406)..(406): Xaa can be any naturally occurring amino acid
DYSRQTALESTSYIQLPEAELRMERMLPLLALGLLAAGFCPAVLCHPNSPLDEENLTQENQDRGTHVDLGLASANVDFAFQPVTKQLVLKAPDKNVIFSPLSISTALAFLSLGAHNTTLTEILKGLKFNLTETSEAEIHQSFQHLLRTLNQSSDELQLSMGNAMFVKEQLSLLDRFTEDAKRLYGSEAFATDFQDSAAAKKLINDYVKNGTRGKITDLIKDLDSQTMMVLVNYIFFKAKWEMPFDPQDTHQSRCYLSKKKWVMVPMMSLHHLTIPYFRDEELSCTVVELKYTGNASALFILPDQDKDGGSGSHAAPRKTLKRWRDSLEFREIGELYHAQKFFQSRGDYKPELTYLHPGMGTYEDSLHTAKADLSGTHRAPRNLAVSQVVHKVCLMYLTEGTECRIXCHSESKVSLLICDVVETRTMVRFRQALRDDHGAEETRQNIFFMSKVSNPSKLELGIKQGASSKELGNELDAG

SEQ ID NO: 1026454 - protein, 229 aa, Homo sapiens
  misc_feature (157)..(157): Xaa can be any naturally occurring amino acid
PQLTYPPDVAHLSLPYEANYAHLTIPYFRDEELSCTVVELKYTGNASALFILPDQDKDGGSGSHAAPRKTLKRWRDSLEFREIGELYHAQKFFQSRGDYKPELTYLHPGMGTYEDSLHTAKADLSGTHRAPRNLAVSQVVHKVCLMYLTEGTECRIXCHSESKVSLLICDVVETRTMVRFRQALRDDHGAEETRQNIFFMSKVSNPSKLELGIKQGASSKELGNELDAG

SEQ ID NO: 1026455 - protein, 80 aa, Homo sapiens
  misc_feature (16)..(16): Xaa can be any naturally occurring amino acid
ILRPPPALRGTHPQPXPTLEVLVTALWELWPSTWLTIQICPWKTCSTDPISLQQSVSRLQEHSHLTLTKKTFRLLCFDCY

SEQ ID NO: 1026456 - protein, 274 aa, Homo sapiens
RWDSSTFERWGVWEPQRQWQEEVRRWWWWAPDDRPVSLTSRLPKTGETIHGHKFFIGFGGKGANQCVQAARLGAMTSMVCKVGKDSFGNDYIENLKQNDISTEFTYQTKDAATGTASIIVNNEVKTLFNPAPAIADLDPQFYTLSDVFCCNESEAEILTGLTVGSAADAGEAALVLLKRGCQVVIITLGAEGCVVLSQTEPEPKHIPTEKVKAVDTTGAGDSFVGALAFYLAYYPNLSLEDMLNRSNFIAAVSVQAAGTQSSYPYKKDLPLTLF

SEQ ID NO: 1026457 - protein, 329 aa, Homo sapiens
RWDSSTFERWGVWEPQRQWQEEVRRWWWWAPDDRPVSLTSRLPKTGETIHGHKFFIGFGGKGANQCVQAARLGAMTSMVCKVGKDSFGNDYIENLKQNDISTEFTYQTKDAATGTASIIVNNEGQNIIVIVAGANLLLNTEDLRAAANVISRAKVMVCQLEITPATSLEALTMARRSGVKTLFNPAPAIADLDPQFYTLSDVFCCNESEAEILTGLTVGSAADAGEAALVLLKRGCQVVIITLGAEGCVVLSQTEPEPKHIPTEKVKAVDTTGAGDSFVGALAFYLAYYPNLSLEDMLNRSNFIAAVSVQAAGTQSSYPYKKDLPLTLF

SEQ ID NO: 1026458 - protein, 329 aa, Homo sapiens; identical to SEQ ID NO: 1026457

SEQ ID NO: 1026459 - protein, 80 aa, Homo sapiens; identical to SEQ ID NO: 1026455
  misc_feature (16)..(16): Xaa can be any naturally occurring amino acid

SEQ ID NO: 1026460 - protein, 293 aa, Homo sapiens
RWDSSTFERWGVWEPQRQWQEEVRRWWWWAPDDRPVSLTSRLPKTGETIHGHKFFIGFGGKGANQCVQAARLGAMTSMVCKVGKDSFGNDYIENLKQNDISTEFTYQTKDAATGTASIIVNNEGQNIIVIVAGANLLLNTEDLRAAANVISRAKVMVCQLEITPATSLEALTMARRSGVKTLFNPAPAIADLDPQFYTLSDVFCCNESEAEILTGLTVGSAADAGEAALVLLKRGCQVVIITLGAEGCVVLSQTEPEPKHIPTEKVKAVDTTCRPGSRPKSEAASVKKQKHYK

SEQ ID NO: 1026461 - protein, 300 aa, Homo sapiens
DKTENFEMNNSHQPPTSSSNSQGLWKVPASSGAGATAALADGLKFASVQASAPQGNSHKETSKSKVKRSKTSKDANKSLPSAALYGIPEISSTGKRQEVQGRPGEATGMNSALGQSVSSGGSGNPNSNSTSTSTSAATAGAGSCGKSKEEKPGKSQSSRGAKRDKDAGKSRKDKHDLLQGHQNGSGSQAPSGGHLYGFGAKSNGGGASPFHCGGTGSGSVAAAGEVSKSAPDSGLMGNSMLVKKEEEEEESHRRIKKLKTEKVDPPVYSASATTADFQQSHASDSTLLLFPIFIQYCSTG

SEQ ID NO: 1026462 - protein, 456 aa, Homo sapiens
DKTENFEMNNSHQPPTSSSNSQGLWKVPASSGAGATAALADGLKFASVQASAPQGNSHKETSKSKVKRSKTSKDANKSLPSAALYGIPEISSTGKRQEVQGRPGEATGMNSALGQSVSSGGSGNPNSNSTSTSTSAATAGAGSCGKSKEEKPGKSQSSRGAKRDKDAGKSRKDKHDLLQGHQNGSGSQAPSGGHLYGFGAKSNGGGASPFHCGGTGSGSVAAAGEVSKSAPDSGLMGNSMLVKKEEEEEESHRRIKKLKTEKVDPPVYSASATTADFQQSHASDSTLLLFPIFIHIAAPVEQLLVRTRSVGVNTCEVGVVTEPECLGPCEPGTSVNLEGIVWHETEEGVLVVNVTWRNKTYVGTLLDCTKHDWAPPRFCESPTSDLEMRGGRGRGKRARSAAAAPGSEASFTESRGLQNKNRGGANGKGKAGSLNAADEGPPNCAAEDIKVSSSSV

SEQ ID NO: 1026463 - protein, 300 aa, Homo sapiens; identical to SEQ ID NO: 1026461

SEQ ID NO: 1026464 - protein, 146 aa, Homo sapiens
PSSTFCKVYTITPLLSDNREKRGLALDADNSNATEGTPTACAVPAHREGGCNKEVLGILVSYRVKVKLVVSRGGDVSVELPFVLMHPKPDTSSSRPPSAPETDVPVDTNLIEFDTNYATDDDIVFEDFARLRLKGMKDDDYDDQLC

SEQ ID NO: 1026465 - protein, 116 aa, Homo sapiens
PSSTFCKVYTITPLLSDNREKRGLALDADNSNATDGHTNSLCCPSTSEGGCNKEVLGILVSYRVKVKLVVSRGGDVSVELPFVLMHPKPDTSSSRPPSAPETDVPVDTNLIEFDTK

SEQ ID NO: 1026466 - protein, 106 aa, Homo sapiens
PSSTFCKVYTITPLLSDNREKRGLALDADNSNATDGHTNSLCCPSTSEGGCNKEVLGILVSYRVKVKLVVSRGGDVSVELPFVLMHPKPHDHTPSSSVPPLCFRTA

SEQ ID NO: 1026467 - protein, 94 aa, Homo sapiens
MPLNSTRLNLDMDLNPAGSNGSMVSLVSGASGYSATSTSSFKKGHSLREKLAEMETFRDILCRQVDTLQKYFDACADAVSKDELQRDKVVEDDE

SEQ ID NO: 1026468 - protein, 94 aa, Homo sapiens; identical to SEQ ID NO: 1026467

SEQ ID NO: 1026469 - protein, 215 aa, Homo sapiens
RSCIPTPPSPFSAPPAFLPVVTRESRRGLSSGGSAGRNAGVTATAAAADGWKGRLPSPLVLLPRSARCQARRRRGGRTSSLLLLPPTPERALFASPSPDPSPRGLGASSGAAEGAGAGLLLGCRASMSDNQSWNSSGSEEDPETESGPPVERCGVLSKWTNYIHGWQDRWVVLKNNALSYYKSEDETEYGCRGSICLSKAVITPHDLMNVDLILV

SEQ ID NO: 1026470 - protein, 87 aa, Homo sapiens
MYLFSELWFAFLDCGHHHVTHTSSGKSVQPSLDPLHGDDIQVFGSCVVSTIDYSSYRKTQGNPEFRTRGPTTSSLRHLERRKKEKRT

SEQ ID NO: 1026471 - protein, 196 aa, Homo sapiens
MSPRFPARPWVVKLVASLHEDLHEVSVRSRPSPVPTPGWLGEGVALVDGPPVGDPLSRVPDQCRVRTKTVKKAARVIIEKYYTRLGNDFHTNKRVCEEIAIIPSKKLRNKIAGYVTHLMKRIQRGPVRGISIKLQEEERERRDNYVPEVSALDQEIIEVDPDTKEMLKLLDFGSLSNLQVTQPTVGMNFKTPRGPV

SEQ ID NO: 1026472 - protein, 238 aa, Homo sapiens
VGVLARGLHPPQSSPICSFPRSSAHREALGREGAGALSRLERNWCTAVIPSLKALAARHCLSRALSGSAQHGGPQPGIRPGLGAALFPGRLRWLVSDPVLSTRKGRVRTKTVKKAARVIIEKYYTRLGNDFHTNKRVCEEIAIIPSKKLRNKIAGYVTHLMKRIQRGPVRGISIKLQEEERERRDNYVPEVSALDQEIIEVDPDTKEMLKLLDFGSLSNLQVTQPTVGMNFKTPRGPV

SEQ ID NO: 1026473 - protein, 138 aa, Homo sapiens
MASSLYLLVVNISSGGRCLGDVFSLPVTSIVANHTCCPTLVVLSRQVCYPLAPLRESCLMIARHGCHSFGEQGQFGSSQLQAVRTSRRKLPWYTSHGQYLLMTCGTQNPDNTFEPKIVNTAIGRCCKVCNSHEQQGLL

SEQ ID NO: 1026474 - protein, 138 aa, Homo sapiens; identical to SEQ ID NO: 1026473

SEQ ID NO: 1026475 - protein, 135 aa, Homo sapiens [sequence omitted]

SEQ ID NO: 1026476 - protein, 138 aa, Homo sapiens; identical to SEQ ID NO: 1026473

SEQ ID NO: 1026477 - protein, 135 aa, Homo sapiens [sequence omitted]

SEQ ID NO: 1026478 - protein, 87 aa, Homo sapiens; identical to SEQ ID NO: 1026470

SEQ ID NO: 1026479 - protein, 138 aa, Homo sapiens; identical to SEQ ID NO: 1026473

SEQ ID NO: 1026480 - protein, 138 aa, Homo sapiens; identical to SEQ ID NO: 1026473

SEQ ID NO: 1026481 - protein, 135 aa, Homo sapiens [sequence omitted]

SEQ ID NO: 1026482 - protein, 161 aa, Homo sapiens
  misc_feature (8)..(9): Xaa can be any naturally occurring amino acid
  misc_feature (26)..(26): Xaa can be any naturally occurring amino acid
  misc_feature (29)..(30): Xaa can be any naturally occurring amino acid
ERERERGXXEREEREREREREREREXERXXRTKTVKKAARVIIEKYYTRLGNDFHTNKRVCEEIAIIPSKKLRNKIAGYVTHLMKRIQRGPVRGISIKLQEEERERRDNYVPEVSALDQEIIEVDPDTKEMLKLLDFGSLSNLQVTQPTVGMNFKTPRGPV

SEQ ID NO: 1026483 - protein, 85 aa, Homo sapiens
RDVPVKHVYRVLQCQEEELTQLVSTMSDGWKFEQLISIGSSYNYGNEDQAEFLCVVSRELNNSTNGIVIEPSEKAKILQERGSRM

SEQ ID NO: 1026484 - protein, 85 aa, Homo sapiens; identical to SEQ ID NO: 1026483

SEQ ID NO: 1026485 - protein, 85 aa, Homo sapiens; identical to SEQ ID NO: 1026483

SEQ ID NO: 1026486 - protein, 85 aa, Homo sapiens; identical to SEQ ID NO: 1026483

SEQ ID NO: 1026487 - protein, 85 aa, Homo sapiens; identical to SEQ ID NO: 1026483

SEQ ID NO: 1026488 - protein, 85 aa, Homo sapiens; identical to SEQ ID NO: 1026483

SEQ ID NO: 1026489 - protein, 85 aa, Homo sapiens; identical to SEQ ID NO: 1026483

SEQ ID NO: 1026490 - protein, 85 aa, Homo sapiens; identical to SEQ ID NO: 1026483

SEQ ID NO: 1026491 - protein, 85 aa, Homo sapiens; identical to SEQ ID NO: 1026483

SEQ ID NO: 1026492 - protein, 85 aa, Homo sapiens; identical to SEQ ID NO: 1026483

SEQ ID NO: 1026493 - protein, 85 aa, Homo sapiens; identical to SEQ ID NO: 1026483

SEQ ID NO: 1026494 - protein, 85 aa, Homo sapiens; identical to SEQ ID NO: 1026483

SEQ ID NO: 1026495 - protein, 85 aa, Homo sapiens; identical to SEQ ID NO: 1026483

SEQ ID NO: 1026496 - protein, 110 aa, Homo sapiens
FPQVNVTGACYNEKLFLFDAGGSYTHTPPRRAVETKPRLRYTQNAEKINQALHEQDGDGKTKGAPCDRGAGSPGGSSHGAGLNRDHPCRASQGGEPYPGPSAPRHTCFSP

SEQ ID NO: 1026497 - protein, 127 aa, Homo sapiens
MLFSMTRGQSPGAAPGAQPEISKLAGYKKPKDREAACVKSATHGGRTQAACGHSAGPGLQGEAAGEGRGEGAFWLKARNSKYSSLGINIPPNKGAQGSCLGKVGCRRHDPRHSGLSAPFPRPMSQAL

SEQ ID NO: 1026498 - protein, 127 aa, Homo sapiens
MLFSMTRGQSPGAAPGAQPEISKLAGYKKQKEQGSCLRKKCHPRRQDTGSVWPFSRPGLQGEAAGEGRGEGAFWLKARNSKYSSLGINIPPNKGAQGSCLGKVGCRRHDPRHSGLSAPFPRPMSQAL

SEQ ID NO: 1026499 - protein, 127 aa, Homo sapiens; identical to SEQ ID NO: 1026498

SEQ ID NO: 1026500 - protein, 1348 aa, Homo sapiens
GAKDLVCSKMSRAKDAVSSGVASVVDVAKGVVQGGLDTTRSALTGTKEAVSSGVTGAMDMAKGAVQGGLDTSKAVLTGTKDTVSTGLTGAVNVAKGTVQAGVDTTKTVLTGTKDTVTTGVMGAVNLAKGTVQTGVETSKAVLTGTKDAVSTGLTGAVNVARGSIQTGVDTSKTVLTGTKDTVCSGVTSAMNVAKGTIQTGVDTSKTVLTGTKDTVCSGVTGAMNVAKGTIQTGVDTSKTVLTGTKDTVCSGVTGAMNVAKGTIQTGVDTTKTVLTGTKNTVCSGVTGAVNLAKEAIQGGLDTTKSMVMGTKDTMSTGLTGAANVAKGAMQTGLNTTQNIATGTKDTVCSGVTGAMNLARGTIQTGVDTTKIVLTGTKDTVCSGVTGAANVAKGAVQGGLDTTKSVLTGTKDAVSTGLTGAVNVAKGTVQTGVDTTKTVLTGTKDTVCSGVTSAVNVAKGAVQGGLDTTKSVVIGTKDTMSTGLTGAANVAKGAVQTGVDTAKTVLTGTKDTVTTGLVGAVNVAKGTVQTGMDTTKTVLTGTKDTIYSGVTSAVNVAKGAVQTGLKTTQNIATGTKNTFGSGVTGAVNVAKGAVQTGVDTAKTVLTGTKDTVTTGLMGAVNVAKGTVQTSVDTTKTVLTGTKDTVCSGVTGAANVAKGAVQTGVDTAKTVLTGTKDTVCSGVTGAVNVAKGAVQTGLKTTQNIATGTKNTLGSGVTGAANVAKGAVQGGLDTTKSVLTGTKDAVSTGLTGAVNLAKGTVQTGMDTTKTVLTGTKDAVCSGVTGAANVAKGAVQTGVDTAKTVLTGTKDTVTTGLMGAVNVAKGTVQTSVDTTKTVLTGTKDTVCSGVTGAANVAKGAVQGGLDTTKSVLTGTKDTVSTGLTGAVNLAKGTVQTGVDTSKTVLTGTKDTVCSGVTGAVNVAKGTVQTGVDTAKTVLSGAKDAVTTGVTGAVNVAKGTVQTGVDASKAVLMGTKDTVFSGVTGAMSMAKGAVQGGLDTTKTVLTGTKDAVSAGLMGSGNVATGATHTGLSTFQNWLPSTPATSWGGLTSSRTTDNGGEQTALSPQEAPFSGISTPPDVLSVGPEPAWEAAATTKGLATDVATFTQGAAPGREDTGLLTTTHGPEEAPRLAMLQNELEGLGDIFHPMNAEEQAQLAASQPGPKVLSAEQGSYFVRLGDLGPSFRQRAFEHAVSHLQHGQFQARDTLAQLQDCFRLIEKAQQAPEGQPRLDQGSGASAEDAAVQEERDAGVLSRVCGLLRQLHTAYSGLVSSLQGLPAELQQPVGRARHSLCELYGIVASAGSVEELPAERLVQSREGVHQAWQGLEQLLEGLQHNPPLSWLVGPFALPAGGQ

SEQ ID NO: 1026501 - protein, 1349 aa, Homo sapiens
GAKDLVCSKMSRAKDAVSSGVASVVDVAKGVVQGGLDTTRSALTGTKEAVSSGVTGAMDMAKGAVQGGLDTSKAVLTGTKDTVSTGLTGAVNVAKGDRTGLVWTTTKTVLTGTKDTVTTGVMGAVNLAKGTVQTGVETSKAVLTGTKDAVSTGLTGAVNVARGSIQTGVDTSKTVLTGTKDTVCSGVTSAMNVAKGTIQTGVDTSKTVLTGTKDTVCSGVTGAMNVAKGTIQTGVDTSKTVLTGTKDTVCSGVTGAMNVAKGTIQTGVDTTKTVLTGTKNTVCSGVTGAVNLAKEAIQGGLDTTKSMVMGTKDTMSTGLTGAANVAKGAMQTGLNTTQNIATGTKDTVCSGVTGAMNLARGTIQTGVDTTKIVLTGTKDTVCSGVTGAANVAKGAVQGGLDTTKSVLTGTKDAVSTGLTGAVNVAKGTVQTGVDTTKTVLTGTKDTVCSGVTSAVNVAKGAVQGGLDTTKSVVIGTKDTMSTGLTGAANVAKGAVQTGVDTAKTVLTGTKDTVTTGLVGAVNVAKGTVQTGMDTTKTVLTGTKDTIYSGVTSAVNVAKGAVQTGLKTTQNIATGTKNTFGSGVTGAVNVAKGAVQTGVDTAKTVLTGTKDTVTTGLMGAVNVAKGTVQTSVDTTKTVLTGTKDTVCSGVTGAANVAKGAVQTGVDTAKTVLTGTKDTVCSGVTGAVNVAKGAVQTGLKTTQNIATGTKNTLGSGVTGAANVAKGAVQGGLDTTKSVLTGTKDAVSTGLTGAVNLAKGTVQTGMDTTKTVLTGTKDAVCSGVTGAANVAKGAVQTGVDTAKTVLTGTKDTVTTGLMGAVNVAKGTVQTSVDTTKTVLTGTKDTVCSGVTGAANVAKGAVQGGLDTTKSVLTGTKDTVSTGLTGAVNLAKGTVQTGVDTSKTVLTGTKDTVCSGVTGAVNVAKGTVQTGVDTAKTVLSGAKDAVTTGVTGAVNVAKGTVQTGVDASKAVLMGTKDTVFSGVTGAMSMAKGAVQGGLDTTKTVLTGTKDAVSAGLMGSGNVATGATHTGLSTFQNWLPSTPATSWGGLTSSRTTDNGGEQTALSPQEAPFSGISTPPDVLSVGPEPAWEAAATTKGLATDVATFTQGAAPGREDTGLLTTTHGPEEAPRLAMLQNELEGLGDIFHPMNAEEQAQLAASQPGPKVLSAEQGSYFVRLGDLGPSFRQRAFEHAVSHLQHGQFQARDTLAQLQDCFRLIEKAQQAPEGQPRLDQGSGASAEDAAVQEERDAGVLSRVCGLLRQLHTAYSGLVSSLQGLPAELQQPVGRARHSLCELYGIVASAGSVEELPAERLVQSREGVHQAWQGLEQLLEGLQHNPPLSWLVGPFALPAGGQ

SEQ ID NO: 1026502 - protein, 952 aa, Homo sapiens
GAKDLVCSKMSRAKDAVSSGVASVVDVAKGVVQGGLDTTRSALTGTKEAVSSGVTGAMDMAKGAVQGGLDTSKAVLTGTKDTVSTGLTGAVNVAKGTVQAGVDTTKTVLTGTKDTVTTGVMGAVNLAKGTVQTGVETSKAVLTGTKDAVSTGLTGAVNVARGSIQTGVDTSKTVLTGTKDTVCSGVTSAMNVAKGTIQTGVDTSKTVLTGTKDTVCSGVTGAMNVAKGTIQTGVDTSKTVLTGTKDTVCSGVTGAMNVAKGTIQTGVDTTKTVLTGTKNTVCSGVTGAVNLAKEAIQGGLDTTKSMVMGTKDTMSTGLTGAANVAKGAMQTGLNTTQNIATGTKDTVCSGVTGAMNLARGTIQTGVDTTKIVLTGTKDTVCSGVTGAANVAKGAVQGGLDTTKSVLTGTKDAVSTGLTGAVNVAKGTVQTGVDTTKTVLTGTKDTVCSGVTSAVNVAKGAVQGGLDTTKSVVIGTKDTMSTGLTGAANVAKGAVQTGVDTAKTVLTGTKDTVTTGLVGAVNVAKGTVQTGMDTTKTVLTGTKDTIYSGVTSAVNVAKGAVQTGLKTTQNIATGTKNTFGSGVTGAVNVAKGAVQTGVDTAKTVLTGTKDTVTTGLMGAVNVAKGTVQTSVDTTKTVLTGTKDTVCSGVTGAANVAKGAVQTGVDTAKTVLTGTKDTVCSGVTGAVNVAKGAVQTGLKTTQNIATGTKNTLGSGVTGAANVAKGAVQGGLDTTKSVLTGTKDAVSTGLTGAVNLAKGTVQTGMDTTKTVLTGTKDAVCSGVTGAANVAKGAVQTGVDTAKTVLTGTKDTVTTGLMGAVNVAKGTVQTSVDTTKTVLTGTKDTVCSGVTGAANVAKGAVQGGLDTTKSVLTGTKDTVSTGLTGAVNLAKGTVQTGVDTSKTVLTGTKDTVCSGVTGAVNVAKGTVQTGVDTAKTVLSGAKDAVTTGVTGAVNVA

SEQ ID NO: 1026503 - protein, 375 aa, Homo sapiens
RGRGRGGARAGDQRAGAGSRSRVRAAAAMSCPVPACCALLLVLGLCRARPRNALLLLADDGGFESGAYNNSAIATPHLDALARRSLLFRNAFTSVSSCSPSRASLLTGLPQHQNGMYGLHQDVHHFNSFDKVRSLPLLLSQAGVRTGIIGKKHVGPETVYPFDFAYTEENGSVLQVGRNITRIKLLVRKFLQTQDDRPFFLYVAFHDPHRCGHSQPQYGTFCEKFGNGESGMGRIPDWTPQAYDPLDVLVPYFVPNTPAARADLAAQYTTVGRMDQGVGLVLQELRDAGVLNDTLVIFTSDNGIPFPSGRTNLYWPGTAEPLLVSSPEHPKRWGQVSEAYVSLLGMPLSVSVRKGVGVDLGRARWPDRFSSTPIT

SEQ ID NO: 1026504 - protein, 530 aa, Homo sapiens
RGRGRGGARAGDQRAGAGSRSRVRAAAAMSCPVPACCALLLVLGLCRARPRNALLLLADDGGFESGAYNNSAIATPHLDALARRSLLFRNAFTSVSSCSPSRASLLTGLPQHQNGMYGLHQDVHHFNSFDKVRSLPLLLSQAGVRTGIIGKKHVGPETVYPFDFAYTEENGSVLQVGRNITRIKLLVRKFLQTQDDRPFFLYVAFHDPHRCGHSQPQYGTFCEKFGNGESGMGRIPDWTPQAYDPLDVLVPYFVPNTPAARADLAAQYTTVGRMDQGVGLVLQELRDAGVLNDTLVIFTSDNGIPFPSGRTNLYWPGTAEPLLVSSPEHPKRWGQVSEAYVSLLDLTPTILDWFSIPYPSYAIFGSKTIHLTGRSLLPALEAEPLLATVFGSQSHHEVTMSYPMRSVQHRHFRLVHNLNFKMPFPIDQDFYVSPTFQDLLNRTTAGQPTGWYKDLRHYYYRARWELYDRSRDPHETQNLATDPRFAQLLEMLRDQLAKWQWETHDPWVCAPDGVLEEKLSPQCQPLHNEL

SEQ ID NO: 1026505 - protein, 336 aa, Homo sapiens
  misc_feature (5)..(5): Xaa can be any naturally occurring amino acid
  misc_feature (64)..(64): Xaa can be any naturally occurring amino acid
GPRLXARQAQGHLPRQDSRVDPSLEAEPPATNMDLRRGPWVGPWRRHTAAHRPRQTLDALLPPXTSPKALDLLRRLLVFAPDKRLSATQALQHPYVQRFHCPSDEWAREADVRPRAHEGVQLSVPEYRSRVYQMILECGGSSGTSREKGPEGVSPSQAHLHKPRADPQLPSRTPVQGPRPRPQSSPGHDPAEHESPRAAKNVPRQNSAPLLQTALLGNGERPPGAKEAPPLTLSLVKPSGRGAAPSLTSQAAAQVANQALIRGDWNRGGGVRVASVQQVPPRLPPEARPGRRMFSTSALQGAQGGARALLGGYSQAYGTVCHSALGHLPLLEGHHV

SEQ ID NO: 1026506 - protein, 715 aa, Homo sapiens
MAANMYRVGDYVYFENSSSNPYLIRRIEELNKTANGNVEAKVVCFYRRRDISSTLIALADKHATLSVCYKAGPGADNGEEGEIEEEMENPEMVDLPEKLKHQLRHRELFLSRQLESLPATHIRGKCSVTLLNETESLKSYLEREDFFFYSLVYDPQQKTLLADKGEIRVGNRYQADITDLLKEGEEDGRDQSRLETQVWEAHNPLTDKQIDQFLVVARSVGTFARALDCSSSVRQPSLHMSAAAASRDITLFHAMDTLHKNIYDISKAISALVPQGGPVLCRDEMEEWSASEANLFEEALEKYGKDFTDIQQDFLPWKSLTSIIEYYYMWKTTDRYVQQKRLKAAEAESKLKQVYIPNYNKPNPNQISVNNVKAGVVNGTGAPGQSPGAGRACESCYTTQSYQWYSWGPPNMQCRLCASCWTYWKKYGGLKMPTRLDGERPGPNRSNMSPHGLPARSSGSPKFAMKTRQAFYLHTTKLTRIARRLCREILRPWHAARNPYLPINSAAIKAECTARLPEASQSPLVLKQAVRKPLEAVLRYLETHPRPPKPDPVKSVSSVLSSLTPAKVAPVINNGSPTILGKRSYEQHNGVDGNMKKRLLMPSRGLANHGQTRHMGPSRNLLLNGKSYPTKVRLIRGGSLPPVKRRRMNWIDAPGDVFYMPKEETRKIRKLLSSSETKRAARRPYKPIALRQSQALPPRPPPPAPVNDEPIVIED

SEQ ID NO: 1026507 - protein, 255 aa, Homo sapiens
MKTRQAFYLHTTKLTRIARRLCREILRPWHAARHPYLPINSAAIKAECTARLPEASQSPLVLKQAVRKPLEAVLRYLETHPRPPKPDPVKSVSSVLSSLTPAKVAPVINNGSPTILGKRSYEQHNGVDGNMKKRLLMPSRGTYLGLANHGQTRHMGPSRNLLLNGKSYPTKVRLIRGGSLPPVKRRRMNWIDAPDDVFYMATEETRKIRKLLSSSETKRAARRPYKPIALRQSQALPPRPPPPAPVNDEPIVIED

SEQ ID NO: 1026508 - protein, 255 aa, Homo sapiens; identical to SEQ ID NO: 1026507

SEQ ID NO: 1026509 - protein, 255 aa, Homo sapiens; identical to SEQ ID NO: 1026507

SEQ ID NO: 1026510 - protein, 251 aa, Homo sapiens [sequence omitted]

SEQ ID NO: 1026511 - protein, 251 aa, Homo sapiens [sequence omitted]

SEQ ID NO: 1026512 - protein, 577 aa, Homo sapiens
AGTGRDFGIAPSAAPGSPGPSAAAGPDMAANMYRVGDYVYFENSSSNPYLIRRIEELNKTANGNVEAKVVCFYRRRDISSTLIALADKHATLSVCYKAGPGADNGEEGEIEEEMENPEMVDLPEKLKHQLRHRELFLSRQLESLPATHIRGKCSVTLLNETESLKSYLEREDFFFYSLVYDPQQKTLLADKGEIRVGNRYQADITDLLKEGEEDGRDQSRLETQVWEAHNPLTDKQIDQFLVVARSVGTFARALDCSSSVRQPSLHMSAAAASRDITLFHAMDTLHKNIYDISKAISALVPQGGPVLCRDEMEEWSASEANLFEEALEKYGKDFTDIQQDFLPWKSLTSIIEYYYMWKTTDRYVQQKRLKAAEAESKLKQVYIPNYNKPNPNQISVNNVKAGVVNGTGAPGQSPGAGRACESCYTTQSYQWYSWGPPNMQCRLCASCWTYWKKYGGLKMPTRLDGERPGPNRSNMSPHGLPARSSGSPKFAMKTRQAFYLHTTKLTRIARRLCREILRPWHAARHPYLPINSAAIKAECTARLPEASQSPLVLKQAVRKPLEAVLRYLETHPRPPQA

SEQ ID NO: 1026513 - protein, 251 aa, Homo sapiens [sequence omitted]

SEQ ID NO: 1026514 - protein, 577 aa, Homo sapiens; identical to SEQ ID NO: 1026512

SEQ ID NO: 1026515 - protein, 577 aa, Homo sapiens; identical to SEQ ID NO: 1026512

SEQ ID NO: 1026516 - protein, 793 aa, Homo sapiens
  misc_feature (518)..(518): Xaa can be any naturally occurring amino acid
  misc_feature (527)..(527): Xaa can be any naturally occurring amino acid
  misc_feature (531)..(531): Xaa can be any naturally occurring amino acid
AGTGRDFGIAPSAAPGSPGPSAAAGPDMAANMYRVGDYVYFENSSSNPYLIRRIEELNKTANGNVEAKVVCFYRRRDISSTLIALADKHATLSVCYKAGPGADNGEEGEIEEEMENPEMVDLPEKLKHQLRHRELFLSRQLESLPATHIRGKCSVTLLNETESLKSYLEREDFFFYSLVYDPQQKTLLADKGEIRVGNRYQADITDLLKEGEEDGRDQSRLETQVWEAHNPLTDKQIDQFLVVARSVGTFARALDCSSSVRQPSLHMSAAAASRDITLFHAMDTLHKNIYDISKAISALVPQGGPVLCRDEMEEWSASEANLFEEALEKYGKDFTDIQQDFLPWKSLTSIIEYYYMWKTTDRYVQQKRLKAAEAESKLKQVYIPNYNKPNPNQISVNNVKAGVVNGTGAPGQSPGAGRACESCYTTQSYQWYSWGPPNMQCRLCASCWTYWKKYGSAPPPALTCRETRSLADTGGGEEEARLTYSENAEELSFLALCLLFGWSGDEGPPRAPVLRRGXFHNYIGDLXAHSXIPCGQSCSYRGKHNRGSDGQHVRRRLLHAQLGSGKPRTDQAHGEEEQPMMGSGALTHELFGVLERRPGQPCQVPRGSFQEAWQDQRGCSMWGPWPLCQAQRCAADQPSGLPWARLGVRVAHWGGGGLARHSTLAGGPSQREPCRLRWSWPLAGCPGSAPPLQGPSRNLLLNGKSYPTKVRLIRGGSLPPVKRRRMNWIDAPDDVFYMATEETRKIRKLLSSSETKRAARRPYKPIALRQSQALPPRPPPPAPVNDEPIVIED

SEQ ID NO: 1026517 - protein, 534 aa, Homo sapiens
AGTGRDFGIAPSAAPGSPGPSAAAGPDMAANMYRVGDYVYFENSSSNPYLIRRIEELNKTANGNVEAKVVCFYRRRDISSTLIALADKHATLSVCYKAGPGADNGEEGEIEEEMENPEMVDLPEKLKHQLRHRELFLSRQLESLPATHIRGKCSVTLLNETESLKSYLEREDFFFYSLVYDPQQKTLLADKGEIRVGNRYQADITDLLKEGEEDGRDQSRLETQVWEAHNPLTDKQIDQFLVVARSVGTFARALDCSSSVRQPSLHMSAAAASRDITLFHAMDTLHKNIYDISKAISALVPQGGPVLCRDEMEEWSASEANLFEEALEKYGKDFTDIQQDFLPWKSLTSIIEYYYMWKTTDRYVQQKRLKAAEAESKLKQVYIPNYNKPNPNQISVNNVKAGVVNGTGAPGQSPGAGRACESCYTTQSYQWYSWGPPNMQCRLCASCWTYWKKYGGLKMPTRLDGERPGPNRSNMSPHGLPARSSGSPKFAMKTRQAFYLHTTKLTRIARRLCREILRPWHAARHPYLPIVIED

SEQ ID NO: 1026518 - protein, 121 aa, Homo sapiens
MKKRLLMPSRGLANHGQTRHMGPSRNLLLNGKSYPTKVRLIRGGSLPPVKRRRMNWIDAPDDVFYMATEETRKIRKLLSSSETKRAARRPYKPIALRQSQALPPRPPPPAPVNDEPIVIED

SEQ ID NO: 1026519 - protein, 517 aa, Homo sapiens
AGTGRDFGIAPSAAPGSPGPSAAAGPDMAANMYRVGDYVYFENSSSNPYLIRRIEELNKTANGNVEAKVVCFYRRRDISSTLIALADKHATLSVCYKAGPGADNGEEGEIEEEMENPEMVDLPEKLKHQLRHRELFLSRQLESLPATHIRGKCSVTLLNETESLKSYLEREDFFFYSLVYDPQQKTLLADKGEIRVGNRYQADITDLLKEGEEDGRDQSRLETQVWEAHNPLTDKQIDQFLVVARSVGTFARALDCSSSVRQPSLHMSAAAASRDITLFHAMDTLHKNIYDISKAISALVPQGGPVLCRDEMEEWSASEANLFEEALEKYGKDFTDIQQDFLPWKSLTSIIEYYYMQEDPQAALILGNQACCPPALQAHRPAPEPGPAAAATATCARQRRAHRHRGLGAAPTCGRPPPLARPHGPFPASPPPAPQFGSAPPPALTCRETRSLADTGGGEEEARLTYSENAEELSFLALCLLFGWSGDEGPPRAPVLRGLLPGGRALRFCCVLLKVPF

SEQ ID NO: 1026520 - protein, 529 aa, Homo sapiens
AGTGRDFGIAPSAAPGSPGPSAAAGPDMAANMYRVGDYVYFENSSSNPYLIRRIEELNKTANGNVEAKVVCFYRRRDISSTLIALADKHATLSVCYKAGPGADNGEEGEIEEEMENPEMVDLPEKLKHQLRHRELFLSRQLESLPATHIRGKCSVTLLNETESLKSYLEREDFFFYSLVYDPQQKTLLADKGEIRVGNRYQADITDLLKEGEEDGRDQSRLETQVWEAHNPLTDKQIDQFLVVARSVGTFARALDCSSSVRQPSLHMSAAAASRDITLFHAMDTLHKNIYDISKAISALVPQGGPVLCRDEMEEWSASEANLFEEALEKYGKDFTDIQQDFLPWKSLTSIIEYYYMWKTTDRYVQQKRLKAAEAESKLKQVYIPNYNKPNPNQISVNNVKAGVVNGTGAPGQSPGAGRACESCYTTQSYQWYSWGPPNMQCRLCASCWTYWKKYGSAPPPALTCRETRSLADTGGGEEEARLTYSENAEELSFLALCLLFGWSGDEGPPRAPVLPVPLCCGAFCPEAGP

SEQ ID NO: 1026521 - protein, 150 aa, Homo sapiens
AELIPLHSSLNRVRSVGTRAVGVQDALSRGLISLLHFSSGLANHGQTRHMGPSRNLLLNGKSYPTKVRLIRGGSLPPVKRRRMNWIDAPDDVFYMATEETRKIRKLLSSSETKRAARRPYKPIALRQSQALPPRPPPPAPVNDEPIVIED

SEQ ID NO: 1026522 - protein, 403 aa, Homo sapiens
AGTGRDFGIAPSAAPGSPGPSAAAGPDMAANMYRVGDYVYFENSSSNPYLIRRIEELNKTANGNVEAKVVCFYRRRDISSTLIALADKHATLSVCYKAGPGADNGEEGEIEEEMENPEMVDLPEKLKHQLRHRELFLSRQLESLPATHIRGKCSVTLLNETESLKSYLEREDFFFYSLVYDPQQKTLLADKGEIRVGNRYQADITDLLKEGEEDGRDQSRLETQVWEAHNPLTDKQIDQFLVVARSVGTFARALDCSSSVRQPSLHMSAAAASRDITLFHAMDTLHKNIYDISKAISALVPQGGPVLCRDEMEEWSASEANLFEEALEKYGKDFTDIQQDFLPWKSLTSIIEYYYMWKTTDRYVQQKRLKAAEAESKLKQVYIPNYNKPNPWRTLGEERKKRG

SEQ ID NO: 1026523 - protein, 167 aa, Homo sapiens
  misc_feature (51)..(52): Xaa can be any naturally occurring amino acid
SGHAPLACPCSFLPTSLGGVCVSPQPQPSFPGHPPSHLVLGLPPLPSPWAXXSPLWAGFTCLFLMAGRPRNSPIRAGRNRRESLSAGIFELFVLFCKKRLTCRETRSLADTGGGEEEARLTYSENAEELSFLALCLLFGWSGDEGPPRAPVLPVPLCCGAFCPEAGP

SEQ ID NO: 1026524 - protein, 170 aa, Homo sapiens
  misc_feature (51)..(52): Xaa can be any naturally occurring amino acid
SGHAPLACPCSFLPTSLGGVCVSPQPQPSFPGHPPSHLVLGLPPLPSPWAXXSPLWAGFTCLFLMAGRPRNSPIRAGRNRRESLSAGIFELFVLFCKKRLTCRETRSKLHKSLFVPTEFSKCPTSRPHLQRNALLGGHWGRRGRSAANLFRECRGVVVFSFVFTFWLERR

SEQ ID NO: 1026525 - protein, 577 aa, Homo sapiens; identical to SEQ ID NO: 1026512

SEQ ID NO: 1026526 - protein, 577 aa, Homo sapiens; identical to SEQ ID NO: 1026512

SEQ ID NO: 1026527 - protein, 577 aa, Homo sapiens; identical to SEQ ID NO: 1026512

SEQ ID NO: 1026528 - protein, 184 aa, Homo sapiens [sequence omitted]

SEQ ID NO: 1026529 - protein, 457 aa, Homo sapiens
AGTGRDFGIAPSAAPGSPGPSAAAGPDMAANMYRVGDYVYFENSSSNPYLIRRIEELNKTANGNVEAKVVCFYRRRDISSTLIALADKHATLSVCYKAGPGADNGEEGEIEEEMENPEMVDLPEKLKHQLRHRELFLSRQLESLPATHIRGKCSVTLLNETESLKSYLEREDFFFYSLVYDPQQKTLLADKGEIRVGNRYQADITDLLKEGEEDGRDQSRLETQVWEAHNPLTDKQIDQFLVVARSVGTFARALDCSSSVRQPSLHMSAAAASRDITLFHAMDTLHKNIYDISKAISALVPQGGPVLCRDEMEEWSASEANLFEEALEKYGKDFTDIQQDFLPWKSLTSIIEYYYMWKTTDRYVQQKRLKAAEAESKLKQVYIPNYNKPNPNQISVNNVKAGVVNGTGAPGQSPGAGRACESCYMSSLRILLDILEEIWWLENANPVRWREARTKPQ

SEQ ID NO: 1026530 - protein, 445 aa, Homo sapiens
AGTGRDFGIAPSAAPGSPGPSAAAGPDMAANMYRVGDYVYFENSSSNPYLIRRIEELNKTANGNVEAKVVCFYRRRDISSTLIALADKHATLSVCYKAGPGADNGEEGEIEEEMENPEMVDLPEKLKHQLRHRELFLSRQLESLPATHIRGKCSVTLLNETESLKSYLEREDFFFYSLVYDPQQKTLLADKGEIRVGNRYQADITDLLKEGEEDGRDQSRLETQVWEAHNPLTDKQIDQFLVVARSVGTFARALDCSSSVRQPSLHMSAAAASRDITLFHAMDTLHKNIYDISKAISALVPQGGPVLCRDEMEEWSASEANLFEEALEKYGKDFTDIQQDFLPWKSLTSIIEYYYMWKTTDRYVQQKRLKAAEAESKLKQVYIPNYNKPNPNQISVNNVKAGVVNGTGAPGPKVLLCSVEGAILNFIFITFFVDELELCNLHLEC

SEQ ID NO: 1026531 - protein, 211 aa, Homo sapiens
MDPASWPNSRSAPWAPHPALWEVRGLWHPIPKHMPGGWGPARAVGGDLFLAGAGGSLRALGKSPASWWGSAGHSVAALQRGLCRCWTDSLAEALLVSARQGLANHGQTRHMGPSRNLLLNGKSYPTKVRLIRGGSLPPVKRRRMNWIDAPDDVFYMATEETRKIRKLLSSSETKRAARRPYKPIALRQSQALPPRPPPPAPVNDEPIVIED

SEQ ID NO: 1026532 - protein, 163 aa, Homo sapiens
LNFPHLTRESQPCSACEGASPLAAWLGGALGSEGSATEEAPVLTCSGQDLGAGEEASWVKTAPGGTGAHEVGSLSSLGRHELIRGGSLPPVKRRRMNWIDAPDDVFYMATEETRKIRKLLSSSETKRAARRPYKPIALRQSQALPPRPPPPAPVNDEPIVIED

SEQ ID NO: 1026533 - protein, 94 aa, Homo sapiens
ISVVSTSLWYNFWHSPASIISAPPPALTCRETRSLADTGGGEEEARLTYSENAEELSFLALCLLFGWSGDEGPPRAPVLPVPLCCGAFCPEAGP

SEQ ID NO: 1026534 - protein, 715 aa, Homo sapiens; identical to SEQ ID NO: 1026506

SEQ ID NO: 1026535 - protein, 255 aa, Homo sapiens; identical to SEQ ID NO: 1026507

SEQ ID NO: 1026536 - protein, 255 aa, Homo sapiens; identical to SEQ ID NO: 1026507

SEQ ID NO: 1026537 - protein, 255 aa, Homo sapiens; identical to SEQ ID NO: 1026507

SEQ ID NO: 1026538 - protein, 255 aa, Homo sapiens; identical to SEQ ID NO: 1026507

SEQ ID NO: 1026539 - protein, 453 aa, Homo sapiens
EEVKSTTKTQRIASHSHVQRAGAGRERLGQAGGSGLVGQENAREACGVIVELIKSKKMAGRAVLLAGPPGTGKTALALAIAQELGSKVPFCPMVGSEVYSTEIKKTEVLMENFRRAIGLRIKETKEVYEGEVTELTPCETENPMGGYGKTISHVIIGLKTAKGTKQLKLDPSIFESLQKERVEAGDVIYIEANSGAVKRQGRCDTYATEFDLEAEEYVPLPKGDVHKKKEIIQDVTLHDLDVANARPQGGQDILSMMGQLMKPKKTEITDKLRGEINKVVNKYIDQGIAELVPGVLFVDEVHMLDIECFTYLHRALESSIAPIVIFASNRGNCVIRGTEDITSPHGIPLDLLDRVMIIRTMLYTPQEMKQIIKIRAQTEGINISEEALNHLGEIGTKTTLRYSVQLLTPANLLAKINGKDSIEKEHVEEISELFYDAKSSAKILADQQDKYMK

SEQ ID NO: 1026540 - protein, 396 aa, Homo sapiens
MAGRAVLLAGPPGTGKTALALAIAQELGSKVPFCPMVGSEVYSTEIKKTEVLMENFRRAIGLRIKETKEVYEGEVTELTPCETENPMGGYGKTISHVIIGLKTAKGTKQLKLDPSIFESLQKERVEAGDVIYIEANSGAVKRQGRCDTYATEFDLEAEEYVPLPKGDVHKKKEIIQDVTLHDLDVANARPQGGQDILSMMGQLMKPKKTEITDKLRGEINKVVNKYIDQGIAELVPGVLFVDEVHMLDIECFTYLHRALESSIAPIVIFASNRGNCVIRGTEDITSPHGIPLDLLDRVMIIRTMLYTPQEMKQIIKIRAQTEGINISEEALNHLGEIGTKTTLRYSVQLLTPANLLAKINGKDSIEKEHVEEISELFYDAKSSAKILADQQDKYMK

SEQ ID NO: 1026541 - protein, 453 aa, Homo sapiens; identical to SEQ ID NO: 1026539

SEQ ID NO: 1026542 - protein, 426 aa, Homo sapiens
EEVKSTTKTQRIASHSHVQRAGAGRERLGQAGGSGLVGQENAREACGVIVELIKSKKMAGRAVLLAGPPGTGKTALALAIAQELGSKVPFCPMVGSEVYSTEIKKTEVLMENFRRAIGLRIKETKEVYEGEVTELTPCETENPMGGYGKTISHVIIGLKTAKGTKQLKLDPSIFESLQKERVEAGDVIYIEANSGAVKRQGRCDTYATEFDLEAEEYVPLPKGDVHKKKEIIQDVTLHDLDVANARPQGGQDILSMMGQLMKPKKTEITDKLRGEINKVVNKYIDQGIAELVPGVLFVDEVHMLDIECFTYLHRALESSIAPIVIFASNRGNCVIRGTEDITSPHGIPLDLLDRVMIIRTMLYTPQEMKQIIKIRAQTEGINISEEALNHLGEIGTKTTLRYSVQLLTPANLLAKILADQQDKYMK

SEQ ID NO: 1026543 - protein, 372 aa, Homo sapiens
EEVKSTTKTQRIASHSHVQRAGAGRERLGQAGGSGLVGQENAREACGVIVELIKSKKMAGRAVLLAGPPGTGKTALALAIAQELGSKVPFCPMVGSEVYSTEIKKTEVLMENFRRAIGLRIKETKEVYEGEVTELTPCETENPMGGYGKTISHVIIGLKTAKGTKQLKLDPSIFESLQKERVEAGDVIYIEANSGAVKRQGRCDTYATEFDLEAEEYVPLPKGDVHKKKEIIQDVTLHDLDVANARPQGGQDILSMMGQLMKPKKTEITDKLRGEINKVVNKYIDQGIAELVPGVLFVDEVHMLDIECFTYLHRALESSIAPIVIFASNRGNCVIRGTEDITSPHGIPLDLLDRVMIIRTMLYTPQEMKQVP

SEQ ID NO: 1026544 - protein, 385 aa, Homo sapiens
EEVKSTTKTQRIASHSHVQRAGAGRERLGQAGGSGLVGQENAREACGVIVELIKSKKMAGRAVLLAGPPGTGKTALALAIAQELGSKVPFCPMVGSEVYSTEIKKTEVLMENFRRAIGLRIKETKEVYEGEVTELTPCETENPMGGYGKTISHVIIGLKTAKGTKQLKLDPSIFESLQKERVEAGDVIYIEANSGAVKRQGRCDTYATEFDLEAEEYVPLPKGDVHKKKEIIQDVTLHDLDVANARPQGGQDILSMMGQLMKPKKTEITDKLRGEINKVVNKYIDQGIAELVPGVLFVDEVHMLDIECFTYLHRALESSIAPIVIFASNRGNCVIRGTEDITSPHGIPLDLLDRVMIIRTMLYTPQEMKQVPSRVLYVQHTTASQ

SEQ ID NO: 1026545 - protein, 453 aa, Homo sapiens; identical to SEQ ID NO: 1026539

SEQ ID NO: 1026546 - protein, 453 aa, Homo sapiens; identical to SEQ ID NO: 1026539

SEQ ID NO: 1026547 - protein, 412 aa, Homo sapiens
EEVKSTTKTQRIASHSHVQRAGAGRERLGQAGGSGLVGQENAREACGVIVELIKSKKMAGRAVLLAGPPGTGKTALALAIAQELGSKVPFCPMVGSEVYSTEIKKTEVLMENFRRAIGLRIKETKEVYEGEVTELTPCETENPMGGYGKTISHVIIGLKTAKGTKQLKLDPSIFESLQKERVEAGDVIYIEANSGAVKRQGRCDTYATEFDLEAEEYVPLPKGDVHKKKEIIQDVTLHDLDVANARPQGGQDILSMMGQLMKPKKTEITDKLRGEINKVVNKYIDQGIAELVPGVLFVDEVHMLDIECFTYLHRALESSIAPIVIFASNRGNCVIRGTEDITSPHGIPLDLLDRVMIIRTMLYTPQEMKQQVCLAWVQPVGACPWAWGCRPHSGVVCSAVSSVWKAFLFKLS

SEQ ID NO: 1026548 - protein, 1377 aa, Homo sapiens
DSRCSVAASASSTNLIHLSSKGHISPAKDTSLQQRTPAEMSPVLHFYVRPSGHEGAASGHTRRKLQGKLPELQGVETELCYNVNWTAEALPSAEETKKLMWLFGCPLLLDDVARESWLLPGSNDLLLEVGPRLNFSTPTSTNIVSVCRATGLGPVDRVETTRRYRLSFAHPPSAEVEAIALATLHDRMTEQHFPHPIQSFSPESMPEPLNGPINILGEGRLALEKANQELGLALDSWDLDFYTKRFQELQRNPSTVEAFDLAQSNSEHSRHWFFKGQLHVDGQKLVHSLFESIMSTQESSNPNNVLKFCDNSSAIQGKEVRFLRPEDPTRPSRFQQQQGLRHVVFTAETHNFPTGVCPFSGATTGTGGRIRDVQCTGRGAHVVAGTAGYCFGNLHIPGYNLPWEDLSFQYPGNFARPLEVAIEASNGASDYGNKFGEPVLAGFARSLGLQLPDGQRREWIKPIMFSGGIGSMEADHISKEAPEPGMEVVKVGGPVYRIGVGGGAASSVQVQGDNTSDLDFGAVQRGDPEMEQKMNRVIRACVEAPKGNPICSLHDQGAGGNGNVLKELSDPAGAIIYTSRFQLGDPTLNALEIWGAEYQESNALLLRSPNRDFLTHVSARERCPACFVGTITGDRRIVLVDDRECPVRRNGQGGCPPDTLPTPVDLELEWVLGKMPRKEFFLQRKPPMLQPLALPPGLSVHQALERVLRLPAVASKRYLTNKVDRSVGGLVAQQQCVGPLQTPLADVAVVALSHEELIGAATALGEQPVKSLLDPKVAARLAVAEALTNLVFALVTDLRDVKCSGNWMWAAKLPGEGAALADACEAMVAVMAALGVAVDGGKDSLSMAARVGTETVRAPGSLVISAYAVCPDITATVTPDLKHPEGRGHLLYVALSPGQHRLGGTALAQCFSQLGEHPPDLDLPENLVRAFSITQGLLKDRLLCSGHDVSDGGLVTCLLEMAFAGNCGLQVDVPVPRVDVLSVLFAEEPGLVLEVQEPDLAQVLKRYRDAGLHCLELGHTGEAGPHAMVRVSVNGAVVLEEPVGELRALWEETSFQLDRLQAEPRCVAEEERGLRERMGPSYCLPPTFPKASVPREPGGPSPRVAILREEGSNGDREMADAFHLAGFEVWDVTMQDLCSGAIGLDTFRGVAFVGGFSYADVLGSAKGWAAAVTFHPRAGAELRRFRKRPDTFSLGVCNGCQLLALLGWVGGDPNEDAAEMGPDSQPARPGLLLRHNLSGRYESRWASVRVGPGPALMLRGMEGAVLPVWSAHGEGYVAFSSPELQAQIEARGLAPLHWADDDGNPTEQYPLNPNGSPGGVAGICSCDGRHLAVMPHPERAVRPWQWAWRPPPFDTLTTSPWLQLFINARNWTLEGSC

SEQ ID NO: 1026549 - protein, 1416 aa, Homo sapiens
DSRCSVAASASSTNLIHLSSKGHISPAKDTSLQQRTPAEMSPVLHFYVRPSGHEGAASGHTRRKLQGKLPELQGVETELCYNVNWTAEALPSAEETKKLMWLFGCPLLLDDVARESWLLPGSNDLLLEVGPRLNFSTPTSTNIVSVCRATGLGPVDRVETTRRYRLSFAHPPSAEVEAIALATLHDRMTEQHFPHPIQSFSPESMPEPLNGPINILGEGRLALEKANQELGLALDSWDLDFYTKRFQELQRNPSTVEAFDLAQSNSEHSRHWFFKGQLHVDGQKLVHSLFESIMSTQESSNPNNVLKFCDNSRCCALDWVGVRTRGGEAPGPGWVSVGPQKGSKVHDGYVHSAIQGKEVRFLRPEDPTRPSRFQQQQGLRHVVFTAETHNFPTGVCPFSGATTGTGGRIRDVQCTGRGAHVVAGTAGYCFGNLHIPGYNLPWEDLSFQYPGNFARPLEVAIEASNGASDYGNKFGEPVLAGFARSLGLQLPDGQRREWIKPIMFSGGIGSMEADHISKEAPEPGMEVVKVGGPVYRIGVGGGAASSVQVQGDNTSDLDFGAVQRGDPEMEQKMNRVIRACVEAPKGNPICSLHDQGAGGNGNVLKELSDPAGAIIYTSRFQLGDPTLNALEIWGAEYQESNALLLRSPNRDFLTHVSARERCPACFVGTITGDRRIVLVDDRECPVRRNGQGDAPPTPLPTPVDLELEWVLGKMPRKEFFLQRKPPMLQPLALPPGLSVHQALERVLRLPAVASKRYLTNKVDRSVGGLVAQQQCVGPLQTPLADVAVVALSHEELIGAATALGEQPVKSLLDPKVAARLAVAEALTNLVFALVTDLRDVKCSGNWMWAAKLPGEGAALADACEAMVAVMAALGVAVDGGKDSLSMAARVGTETVRAPGSLVISAYAVCPDITATVTPDLKHPEGRGHLLYVALSPGQHRLGGTALAQCFSQLGEHPPDLDLPENLVRAFSITQGLLKDRLLCSGHDVSDGGLVTCLLEMAFAGNCGLQVDVPVPRVDVLSVLFAEEPGLVLEVQEPDLAQVLKRYRDAGLHCLELGHTGEAGPHAMVRVSVNGAVVLEEPVGELRALWEETSFQLDRLQAEPRCVAEEERGLRERMGPSYCLPPTFPKASVPREPGGPSPRVAILREEGSNGDREMADAFHLAGFEVWDVTMQDLCSGAIGLDTFRGVAFVGGFSYADVLGSAKGWAAAVTFHPRAGAELRRFRKRPDTFSLGVCNGCQLLALLGWVGGDPNEDAAEMGPDSQPARPGLLLRHNLSGRYESRWASVRVGPGPALMLRGMEGAVLPVWSAHGEGYVAFSSPELQAQIEARGLAPLHWADDDGNPTEQYPLNPNGSPGGVAGICSCDGRHLAVMPHPERAVRPWQWAWRPPPFDTLTTSPWLQLFINARNWTLEGSC

SEQ ID NO: 1026550 - protein, 1416 aa, Homo sapiens; identical to SEQ ID NO: 1026549

SEQ ID NO: 1026551 - protein, 119 aa, Homo sapiens
ARGKDLGSHFPPPSIPGYVAFSSPELQAQIEARGLAPLHWADDDGNPTEQYPLNPNGSPGGVAGICSCDGRHLAVMPHPERAVRPWQWAWRPPPFDTLTTSPWLQLFINARNWTLEGSC

SEQ ID NO: 1026552 - protein, 1317 aa, Homo sapiens
DSRCSVAASASSTNLIHLSSKGHISPAKDTSLQQRTPAEMSPVLHFYVRPSGHEGAASGHTRRKLQGKLPELQGVETELCYNVNWTAEALPSAEETKKLMWLFGCPLLLDDVARESWLLPGSNDLLLEVGPRLNFSTPTSTNIVSVCRATGLGPVDRVETTRRYRLSFAHPPSAEVEAIALATLHDRMTEQHFPHPIQSFSPESMPEPLNGPINILGEGRLALEKANQELGLALDSWDLDFYTKRFQELQRNPSTVEAFDLAQSNSEHSRHWFFKGQLHVDGQKLVHSLFESIMSTQESSNPNNVLKFCDNSRCCALDWVGVRTRGGEAPGPGWVSVGPQKGSKVHDGYVHSAIQGKEVRFLRPEDPTRPSRFQQQQGLRHVVFTAETHNFPTGVCPFSGATTGTGGRIRDVQCTGRGAHVVAGTAGYCFGNLHIPGYNLPWEDLSFQYPGNFARPLEVAIEASNGASDYGNKFGEPVLAGFARSLGLQLPDGQRREWIKPIMFSGGIGSMEADHISKEAPEPGMEVVKVGGPVYRIGVGGGAASSVQVQGDNTSDLDFGAVQRGDPEMEQKMNRVIRACVEAPKGNPICSLHDQGAGGNGNVLKELSDPAGAIIYTSRFQLGDPTLNALEIWGAEYQESNALLLRSPNRDFLTHVSARERCPACFVGTITGDRRIVLVDDRECPVRRNGQGDAPPTPLPTPVDLELEWVLGKMPRKEFFLQRKPPMLQPLALPPGLSVHQALERVLRLPAVASKRYLTNKVDRSVGGLVAQQQCVGPLQTPLADVAVVALSHEELIGAATALGEQPVKSLLDPKVAARLAVAEALTNLVFALVTDLRDVKCSGNWMWAAKLPGEGAALADACEAMVAVMAALGVAVDGGKDSLSMAARVGTETVRAPGSLVISAYAVCPDITATVTPDLKHPEGRGHLLYVALSPGQHRLGGTALAQCFSQLGEHPPDLDLPENLVRAFSITQGLLKDRLLCSGHDVSDGGLVTCLLEMAFAGNCGLQVDVPVPRVDVLSVLFAEEPGLVLEVQEPDLAQVLKRYRDAGLHCLELGHTGEAGPHAMVRVSVNGAVVLEEPVGELRALWEETSFQLDRLQAEPRCVAEEERGLRERMGPSYCLPPTFPKASVPREPGGPSPRVAILREEGSNGDREMADAFHLAGFEVWDVTMQDLCSGAIGLDTFRGVAFVGGFSYADVLGSAKGWAAAVTFHPRAGVEYNGVISAHCNLCLLGSSNFPASASRVAGSTGTHHHTQLIFVFLVEIGFHHVSQAGLKLLTSSDSPASASQSAGITGGSHYSWPSSSVSDRGGWGSHP

SEQ ID NO: 1026553 - protein, 620 aa, Homo sapiens
DSRCSVAASASSTNLIHLSSKGHISPAKDTSLQQRTPAEMSPVLHFYVRPSGHEGAASGHTRRKLQGKLPELQGVETELCYNVNWTAEALPSAEETKKLMWLFGCPLLLDDVARESWLLPGSNDLLLEVGPRLNFSTPTSTNIVSVCRATGLGPVDRVETTRRYRLSFAHPPSAEVEAIALATLHDRMTEQHFPHPIQSFSPESMPEPLNGPINILGEGRLALEKANQELGLALDSWDLDFYTKRFQELQRNPSTVEAFDLAQSNSEHSRHWFFKGQLHVDGQKLVHSLFESIMSTQESSNPNNVLKFCDNSRCCALDWVGVRTRGGEAPGPGWVSVGPQKGSKVHDGYVHSAIQGKEVRFLRPEDPTRPSRFQQQQGLRHVVFTAETHNFPTGVCPFSGATTGTGGRIRDVQCTGRGAHVVAGTAGYCFGNLHIPGYNLPWEDLSFQYPGNFARPLEVAIEASNGASDYGNKFGEPVLAGFARSLGLQLPDGQRREWIKPIMFSGGIGSMEADHISKEAPEPGMEVVKVGGPVYRIGVGGGAASSVQVQGDNTSDLDFGAVQRGDPEMEQKMNRVIRACVEAPKGNPICSLHDQGAGGNGEERSWNKRLGLPGILPGFV

SEQ ID NO: 1026554 - protein, 1416 aa, Homo sapiens; identical to SEQ ID NO: 1026549

SEQ ID NO: 1026555 - protein, 1416 aa, Homo sapiens; identical to SEQ ID NO: 1026549

SEQ ID NO: 1026556 - protein, 1416 aa, Homo sapiens; identical to SEQ ID NO: 1026549

SEQ ID NO: 1026557 - protein, 83 aa, Homo sapiens
MTCSVALLLILGLRCSGVRPGLVGEGHNPSLLVCLLLKDSRTNQGSCPGGPWSERDIESVTSDNCEATLGYRNHSLPSNYYNS

SEQ ID NO: 1026558 - protein, 83 aa, Homo sapiens; identical to SEQ ID NO: 1026557

SEQ ID NO: 1026559 - protein, 93 aa, Homo sapiens
WLQAMVKKETLNVPTIGVIAVVLATHLCDEVSLAGFGYDLNQPRTPLHYFDSQCMAAMNFQTMHNVTTETKFLLKLVKEGVVKDLSGGIDREF

SEQ ID NO: 1026560 - protein, 83 aa, Homo sapiens; identical to SEQ ID NO: 1026557

SEQ ID NO: 1026561 - protein, 1444 aa, Homo sapiens [sequence omitted]

SEQ ID NO: 1026562 - protein, 1104 aa, Homo sapiens
MDDRCYPVIFPDERNFRPFTSDSLAAIEKRIAIQKEKKKSKDQTGEVPQPRPQLDLKASRKLPKLYGDIPRELIGKPLEDLDPFYRNHKTFMVLNRKRTIYRFSAKHALFIFGPFNSIRSLAIRVSVHSLFSMFIIGTVIINCVFMATGPAKKQLEQTKRLSQNLSLDHFDEHGDPLQRQRALSAVSILTITMKEQEKSQEPCLPCGENLASKYLVWNCCPQWLCVKKVLRTVMTDPFTELAITICIIINTVFLAMEHHKMEASFEKMLNIGNLVFTSIFIAEMCLKIIALDPYHYFRRGWNIFDSIVALLSFADVMNCVLQKRSWPFLRSFRVLRVFKLAKSWPTLNTLIKIIGNSVGALGNLTVVLVIVIFIFSVVGMQLFGRSFNSQKSPKLCNPTGPTVSCLRHWHMGDFWHSFLVVFRILCGEWIENMWECMQEANASSSLCVIVFILITVIGKLVVLNLFIALLLNSFSNEERNGNLEGEARKTKVQLALDRFRRAFCFVRHTLEHFCHKWCRKQNLPQQKEVAGGCAAQSKDIIPLVMEMKRGSETQEELGILTSVPKTLGVRHDWTWLAPLAEEEDDVEFSGEDNAQRITQPEPEQQAYELHQENKKPTSQRVQSVEIDMFSEDEPHLTIQDPRKKSDVTSILSECSTIDLQDGFGWLPEMVPKKQPERCLPKGFGCCFPCCSVDKRKPPWVIWWNLRKTCYQIVKHSWFESFIIFVILLSSGALIFEDVHLENQPKIQELLNCTDIIFTHIFILEMVLKWVAFGFGKYFTSAWCCLDFIIVIVSVTTLINLMELKSFRTLRALRPLRALSQFEGMKVVVNALIGAIPAILNVLLVCLIFWLVFCILGVYFFSGKFGKCINGTDSVINYTIITNKSQCESGNFSWINQKVNFDNVGNAYLALLQVATFKGWMDIIYAAVDSTEKEQQPEFESNSLGYIYFVVFIIFGSFFTLNLFIGVIIDNFNQQQKKLGGQDIFMTEEQKKYYNAMKKLGSKKPQKPIPRPLNKCQGLVFDIVTSQIFDIIIISLIILNMISMMAESYNQPKAMKSILDHLNWVFVVIFTLECLIKIFALRQYYFTNGWNLFDCVVVLLSIVSK

SEQ ID NO: 1026563 - protein, 1791 aa, Homo sapiens
MDDRCYPVIFPDERNFRPFTSDSLAAIEKRIAIQKEKKKSKDQTGEVPQPRPQLDLKASRKLPKLYGDIPRELIGKPLEDLDPFYRNHKTFMVLNRKRTIYRFSAKHALFIFGPFNSIRSLAIRVSVHSLFSMFIIGTVIINCVFMATGPAKNSNSNNTDIAECVFTGIYIFEALIKILARGFILDEFSFLRDPWNWLDSIVIGIAIVSYIPGITIKLLPLRTFRVFRALKAISVVSRLKVIVGALLRSVKKLVNVIILTFFCLSIFALVGQQLFMGSLNLKCISRDCKNISNPEAYDHCFEKKENSPEFKMCGIWMGNSACSIQYECKHTKINPDYNYTNFDNFGWSFLAMFRLMTQDSWEKLYQQTLRTTGLYSVFFFIVVIFLGSFYLINLTLAVVTMAYEEQNKNVAAEIEAKEKMFQEAQQLLKEEKEALVAMGIDRSSLTSLETSYFTPKKRKLFGNKKRKSFFLRESGKDQPPGSDSDEDCQKKPQLLEQTKRLSQNLSLDHFDEHGDPLQRQRALSAVSILTITMKEQEKSQEPCLPCGENLASKYLVWNCCPQWLCVKKVLRTVMTDPFTELAITICIIINTVFLAMEHHKMEASFEKMLNIGNLVFTSIFIAEMCLKIIALDPYHYFRRGWNIFDSIVALLSFADVMNCVLQKRSWPFLRSFRVLRVFKLAKSWPTLNTLIKIIGNSVGALGNLTVVLVIVIFIFSVVGMQLFGRSFNSQKSPKLCNPTGPTVSCLRHWHMGDFWHSFLVVFRILCGEWIENMWECMQEANASSSLCVIVFILITVIGKLVVLNLFIALLLNSFSNEERNGNLEGEARKTKVQLALDRFRRAFCFVRHTLEHFCHKWCRKQNLPQQKEVAGGCAAQSKDIIPLVMEMKRGSETQEELGILTSVPKTLGVRHDWTWLAPLAEEEDDVEFSGEDNAQRITQPEPEQQAYELHQENKKPTSQRVQSVEIDMFSEDEPHLTIQDPRKKSDVTSILSECSTIDLQDGFGWLPEMVPKKQPERCLPKGFGCCFPCCSVDKRKPPWVIWWNLRKTCYQIVKHSWFESFIIFVILLSSGALIFEDVHLENQPKIQELLNCTDIIFTHIFILEMVLKWVAFGFGKYFTSAWCCLDFIIVIVSVTTLINLMELKSFRTLRALRPLRALSQFEGMKVVVNALIGAIPAILNVLLVCLIFWLVFCILGVYFFSGKFGKCINGTDSVINYTIITNKSQCESGNFSWINQKVNFDNVGNAYLALLQVATFKGWMDIIYAAVDSTEKEQQPEFESNSLGYIYFVVFIIFGSFFTLNLFIGVIIDNFNQQQKKLGGQDIFMTEEQKKYYNAMKKLGSKKPQKPIPRPLNKCQGLVFDIVTSQIFDIIIISLIILNMISMMAESYNQPKAMKSILDHLNWVFVVIFTLECLIKIFALRQYYFTNGWNLFDCVVVLLSIVSTMISTLENQEHIPFPPTLFRIVRLARIGRILRLVRAARGIRTLLFALMMSLPSLFNIGLLLFLIMFIYAILGMNWFSKVNPESGIDDIFNFKTFASSMLCLFQISTSAGWDSLLSPMLRSKESCNSSSENCHLPGIATSYFVSYIIISFLIVVNMYIAVILENFNTATEESEDPLGEDDFDIFYEVWEKFDPEATQFIKYSALSDFADALPEPLRVAKPNKYQFLVMDLPMVSEDRLHCMDILFAFTARVLGGSDGLDSMKAMMEEKFMEANPLKKLYEPIVTTTKRKEEERGAAIIQKAFRKYMMKVTKGDQGDQNDLENGPHSPLQTLCNGDLSSFGVAKGKVHCD

SEQ ID NO: 1026564 - protein, 1791 aa, Homo sapiens
MDDRCYPVIFPDERNFRPFTSDSLAAIEKRIAIQKEKKKSKDQTGEVPQPRPQLDLKASRKLPKLYGDIPRELIGKPLEDLDPFYRNHKTFMVLNRKRTIYRFSAKHALFIFGPFNSIRSLAIRVSVHSLFSMFIIGTVIINCVFMATGPAKNSNSNNTDIAECVFTGIYIFEALIKILARGFILDEFSFLRDPWNWLDSIVIGIAIVSYIPGITIKLLPLRTFRVFRALKAISVVSRLKVIVGALLRSVKKLVNVIILTFFCLSIFALVGQQLFMGSLNLKCISRDCKNISNPEAYDHCFEKKENSPEFKMCGIWMGNSACSIQYECKHTKINPDYNYTNFDNFGWSFLAMFRLMTQDSWEKLYQQTLRTTGLYSVFFFIVVIFLGSFYLINLTLAVVTMAYEEQNKNVAAEIEAKEKMFQEAQQLLKEEKEALVAMGIDRSSLTSLETSYFTPKKRKLFGNKKRKSFFLRESGKDQPPGSDSDEDCQKKPQLLEQTKRLSQNLSLDHFDEHGDPLQRQRALSAVSILTITMKEQEKSQEPCLPCGENLASKYLVWNCCPQWLCVKKVLRTVMTDPFTELAITICIIINTVFLAMEHHKMEASFEKMLNIGNLVFTSIFIAEMCLKIIALDPYHYFRRGWNIFDSIVALLSFADVMNCVLQKRSWPFLRSFRVLRVFKLAKSWPTLNTLIKIIGNSVGALGSLTVVLVIVIFIFSVVGMQLFGRSFNSQKSPKLCNPTGPTVSCLRHWHMGDFWHSFLVVFRILCGEWIENMWECMQEANASSSLCVIVFILITVIGKLVVLNLFIALLLNSFSNEERNGNLEGEARKTKVQLALDRFRRAFCFVRHTLEHFCHKWCRKQNLPQQKEVAGGCAAQSKDIIPLVMEMKRGSETQEELGILTSVPKTLGVRHDWTWLAPLAEEEDDVEFSGEDNAQRITQPEPEQQAYELHQENKKPTSQRVQSVEIDMFSEDEPHLTIQDPRKKSDVTSILSECSTIDLQDGFGWLPEMVPKKQPERCLPKGFGCCFPCCSVDKRKPPWVIWWNLRKTCYQIVKHSWFESFIIFVILLSSGALIFEDVHLENQPKIQELLNCTDIIFTHIFILEMVLKWVAFGFGKYFTSAWCCLDFIIVIVSVTTLINLMELKSFRTLRALRPLRALSQFEGMKVVVNALIGAIPAILNVLLVCLIFWLVFCILGVYFFSGKFGKCINGTDSVINYTIITNKSQCESGNFSWINQKVNFDNVGNAYLALLQVATFKGWMDIIYAAVDSTEKEQQPEFESNSLGYIYFVVFIIFGSFFTLNLFIGVIIDNFNQQQKKLGGQDIFMTEEQKKYYNAMKKLGSKKPQKPIPRPLNKCQGLVFDIVTSQIFDIIIISLIILNMISMMAESYNQPKAMKSILDHLNWVFVVIFTLECLIKIFALRQYYFTNGWNLFDCVVVLLSIVSTMISTLENQEHIPFPPTLFRIVRLARIGRILRLVRAARGIRTLLFALMMSLPSLFNIGLLLFLIMFIYAILGMNWFSKVNPESGIDDIFNFKTFASSMLCLFQISTSAGWDSLLSPMLRSKESCNSSSENCHLPGIATSYFVSYIIISFLIVVNMYIAVILENFNTATEESEDPLGEDDFDIFYEVWEKFDPEATQFIKYSALSDFADALPEPLRVAKPNKYQFLVMDLPMVSEDRLHCMDILFAFTARVLGGSDGLDSMKAMMEEKFMEANPLKKLYEPIVTTTKRKEEERGAAIIQKAFRKYMMKVTKGDQGDQNDLENGPHSPLQTLCNGDLSSFGVAKGKVHCD

SEQ ID NO: 1026565 - protein, 79 aa, Homo sapiens
  misc_feature (3)..(3): Xaa can be any naturally occurring amino acid
  misc_feature (18)..(18): Xaa can be any naturally occurring amino acid
  misc_feature (23)..(23): Xaa can be any naturally occurring amino acid
  misc_feature (43)..(43): Xaa can be any naturally occurring amino acid
GQXAHDSHKSQQLRKPLXFTRIXPLLTPEVTNVFLLPWLWLYXGGPFQSKSSKNVLSAYCVLRLGYSAAPTLRGPLAIV

SEQ ID NO: 1026566 - protein, 92 aa, Homo sapiens
QTQRRARAMASERLPNRPACLLVASGAAEGVSAQSFLHCFTMASTAFNLQVATPGGKAMEFVDVTESNARWVQDFRLKAYSSLANMMKPHLY

SEQ ID NO: 1026567 - protein, 71 aa, Homo sapiens
DLQDPIPALGMRKLVGRVVGVCSPSLLGGLGQENRLDPGGGGCSELTSCHCTLVWVTEQDSISKKKKKKIL

SEQ ID NO: 1026568 - protein, 220 aa, Homo sapiens
MASERLPNRPACLLVASGAAEGVSAQSFLHCFTMASTAFNLQVATPGGKAMEFVDVTESNARWVQDFRLKAYASPAKLESIDGARYHALLIPSCPGALTDLASSGSLARILQHFHSESKPICAVGHGVAALCCATNEDRSWVFDSYSLTGPSVCELVRAPGFARLPLVVEDFVKDSGACFSASEPDAVHVVLDRHLVTGQNASSTVPAVQNLLFLCGSRK

SEQ ID NO: 1026569 - protein, 287 aa, Homo sapiens
MASERLPNRPACLLVASGAAEGVSAQSFLHCFTMASTAFNLQVATPGGKAMEFVDVTESNARWVQDFRLKAYASPAKLESIDGARYHALLIPSCPGALTDLASSGSLARILQHFHSESKPICAVGHGVAALCCATNEDRSWVFDSYSLTGPSVCELVRAPGFARLPLVVEDFVKDSGACFSASEPDAVHVVLDRHLVTGQNASSTVPAVQNLLFLCGSRSSSLCPKADRHWQHFPVEEIFLACGFKVAGLGAAPGWGRGGKQEDRPPEEQRRAGEDFPIYQCVFIYP

SEQ ID NO: 1026570 - protein, 201 aa, Homo sapiens
MASERLPNRPACLLVASGAAEGVSAQSFLHCFTMASTAFNLQVATPGGKAMEFVDVTESNARWVQDFRLKAYASPAKLESIDGARYHALLIPSCPGALTDLASSGSLARILQHFHSESKPICAVGHGVAALCCATNEDRSWVFDSYSLTGPSVCELVRAPGFARLPLVVEDFVKDSGACFSELGQRRKARGQTSRRAAEGG

SEQ ID NO: 1026571 - protein, 250 aa, Homo sapiens
MASERLPNRPACLLVASGAAEGVSAQSFLHCFTMASTAFNLQVATPGGKAMEFVDVTESNARWVQDFRLKAYASPAKLESIDGARYHALLIPSCPGALTDLASSGSLARILQHFHSESKPICAVGHGVAALCCATNEDRSWVFDSYSLTGPSVCELVRAPGFARLPLVVEDFVKDSGACFSAAAASCPKADRHWQHFPVEEIFLACGFKVAGFGQAPGWGRGGKQEDRPPEEQRRAGEDFPIYQCVFIYP

SEQ ID NO: 1026572 - protein, 230 aa, Homo sapiens
MASERLPNRPACLLVASGAAEGVSAQSFLHCFTMASTAFNLQVATPGGKAMEFVDVTESNARWVQDFRLKAYASPAKLESIDGARYHALLIPSCPGALTDLASSGSLARILQHFHSESKPICAVGHGVAALCCATNEDRSWVFDSYSLTGAWACLRSPHPAPQPSVCELVRAPGFARLPLVVEDFVKDSGACFSAAGAEEESKRTDLQKSSGGRVRISPYTSVCSSTHEE

SEQ ID NO: 1026573 - protein, 80 aa, Homo sapiens
FGTRKTVQLGRAQWLTPVTPALWEAEAGGSRGQEIETILANMVKPISTKKKKKKKKENIVNLVAYKQQKSVSVLEAGSPR

SEQ ID NO: 1026574 - protein, 220 aa, Homo sapiens; identical to SEQ ID NO: 1026568

SEQ ID NO: 1026575 - protein, 257 aa, Homo sapiens
MASERLPNRPACLLVASGAAEGVSAQSFLHCFTMASTAFNLQVATPGGKAMEFVDVTESNARWVQDFRLKAYASPAKLESIDGARYHALLIPSCPGALTDLASSGSLARILQHFHSESKPICAVGHGVAALCCATNEDRSWVFDSYSLTGPSVCELVRAPGFARLPLVVEDFVKDSGACFSATQTGCPMLTLGAPPGVRGSQWVRWTLPEVWCPRSSPASEPDAVHVVLDRHLVTGQNASSTVPAVQNLLFLCGSRK

SEQ ID NO: 1026576 - protein, 233 aa, Homo sapiens
MASERLPNRPACLLVASGAAEGVSAQSFLHCFTMASTAFNLQVATPGGKAMEFVDVTESNARWVQDFRLKAYASPAKLESIDGARYHALLIPSCPGALTDLASSGSLARILQHFHSESKPICAVGHGVAALCCATNEDRSWVFDSYSLTGAWACLRSPHPAPQPSVCELVRAPGFARLPLVVEDFVKDSGACFSASEPDAVHVVLDRHLVTGQNASSTVPAVQNLLFLCGSRK

SEQ ID NO: 1026577 - protein, 217 aa, Homo sapiens
MASERLPNRPACLLVASGAAEGVSAQSFLHCFTMASTAFNLQVATPGGKAMEFVDVTESNARWVQDFRLKAYASPAKLESIDGARYHALLIPSCPGALTDLASSGSLARILQHFHSESKPICAVGHGVAALCCATNEDRSWVFDSYSLTGPSVCELVRAPGFARLPLVVEDFVKDSGACFSAAGAEEESKRTDLQKSSGGRVRISPYTSVCSSTHEE

SEQ ID NO: 1026578 - protein, 178 aa, Homo sapiens
MASERLPNRPACLLVASGAAEGVSAQSFLHCFTMASTAFNLQVATPGGKAMEFVDVTESNARWVQDFRLKAYASPAKLESIDGARYHALLIPSCPGALTDLASSGSLARILQHFHSESKPICAVGHGVAARGGGLREGFGRLLQCSWGRGGKQEDRPPEEQRRAGEDFPIYQCVFIYP

SEQ ID NO: 1026579 - protein, 562 aa, Homo sapiens
MAASAKRKQEEKHLKMLRDMTGLPRNRKCFDCDQRGPTYVNMTVGSFVCTSCSGSLRGLNPPHRVKSISMTTFTQQEIEFLQKHGNEVCKQIWLGLFDDRSSAIPDFRDPQKVKEFLQEKYEKKRWYVPPEQAKVVASVHASISGSSASSTSSTPEVKPLKSLLGDSAPTLHLNKGTPSQSPVVGRSQGQQQEKKQFDLLSDLGSDIFAAPAPQSTATANFANFAHFNSHAAQNSANADFANFDAFGQSSGSSNFGGFPTASHSPFQPQTTGGSAASVNANFAHFDNFPKSSSADFGTFNTSQSHQTASAVSKVSTNKAGLQTADKYAALANLDNIFSAGQGGDQGSGFGTTGKAPVGSVVSVPSQSSASSDKYAALAELDSVFSSAATSSNAYTSTSNASSNVFGTVPVVASAQTQPASSSVPAPFGRTPSTNPFVAAAGPSVASSTNPFQTNARGATAATFGTASMSMPTGFGTPAPYSLPTSFSGSFQQPAFPAQAAFPQQTAFSQQPNGAGFAAFGQTKPVVTPFGQVAAAGVSSNPFMTGAPTGQFPTGSSSTNPFL

SEQ ID NO: 1026580 - protein, 562 aa, Homo sapiens; identical to SEQ ID NO: 1026579

SEQ ID NO: 1026581 - protein, 660 aa, Homo sapiens
WRRRRRLSRLCRLVWPVSPRTTAPGPRRAQYSQAAAAGSGAGGARRRRAAAAARAARGTAGPRRSAARLPALPASSLGAAAMAASAKRKQEEKHLKMLRDMTGLPHNRKCFDCDQRGPTYVNMTVGSFVCTSCSGSLRGLNPPHRVKSISMTTFTQQEIEFLQKHGNEVCKQIWLGLFDDRSSAIPDFRDPQKVKEFLQEKYEKKRWYVPPEQAKVVASVHASISGSSASSTSSTPEVKPLKSLLGDSAPTLHLNKGTPSQSPVVGRSQGQQQEKKQFDLLSDLGSDIFAAPAPQSTATANFANFAHFNSHAAQNSANADFANFDAFGQSSGSSNFGGFPTASHSPFQPQTTGGSAASVNANFAHFDNFPKSSSADFGTFNTSQSHQTASAVSKVSTNKAGLQTADKYAALANLDNIFSAGQGGDQGSGFGTTGKAPVGSVVSVPSQSSASSDKYAALAELDSVFSSAATSSNAYTSTSNASSNVFGTVPVVASAQTQPASSSVPAPFGATPSTNPFVAAAGPSVASSTNPFQTNARGATAATFWSNAFSSVSSAHFAATFGTASMSMPTGFGTPAPYSLPTSFSGSFQQPAFPAQAAFPQQTAFSQQPNGAGFAAFGQTKPVVTPFGQVAAAGVSSNPFMTGAPTGQFPTGSSSTNPFL

SEQ ID NO: 1026582 - protein, 571 aa, Homo sapiens
WRRRRRLSRLCRLVWPVSPRTTAPGPRRAQYSQAAAAGSGAGGARRRRAAAAARAARGTAGPRRSAARLPALPASSLGAAAMAASAKRKQEEKHLKMLRDMTGLPHNRKCFDCDQRGPTYVNMTVGSFVCTSCSGSLRGLNPPHRVKSISMTTFTQQEIEFLQKHGNEVCKQIWLGLFDDRSSAIPDFRDPQKVKEFLQEKYEKKRWYVPPEQAKVVASVHASISGSSASSTSSTPEVKPLKSLLGDSAPTLHLNKGTPSQSPVVGRSQGQQQEKKQFDLLSDLGSDIFAAPAPQSTATANFANFAHFNSHAAGGSAASVNANFAHFDNFPKSSSADFGTFNTSQSHQTASAVSKVSTNKAGLQTADKYAALANLDNIFSAGQGGDQGSGFGTTGKAPVGSVVSVPSQSSASSDKYAALAELDSVFSSAATSSNAYTSTSNASSNVFGTVPVVASAQTQPASSSVPAPFGAFGTASMSMPTGFGTPAPYSLPTSFSGSFQQPAFPAQAAFPQQTAFSQQPNGAGFAAFGQTKPVVTPFGQVAAAGVSSNPFMTGAPTGQFPTGSSSTNPFL

SEQ ID NO: 1026583 - protein, 378 aa, Homo sapiens
WRRRRRLSRLCRLVWPVSPRTTAPGPRRAQYSQAAAAGSGAGGARRRRAAAAARAARGTAGPRRSAARLPALPASSLGAAAMAASAKRKQEEKHLKMLRDMTGLPHNRKCFDCDQRGPTYVNMTVGSFVCTSCSGSLRGLNPPHRVKSISMTTFTQQEIEFLQKHGNEVCKQIWLGLFDDRSSAIPDFRDPQKVKEFLQEKYEKKRWYVPPEQAKVVASVHASISGSSASSTSSTPEVKPLKSLLGDSAPTLHLNKGTPSQSPVVGRSQGQQQEKKQFDLLSDLGSDIFAAPAPQSTATANFANFAHFNSHAAMFLEQCQWLLLHRHSLLHQVCLLHLELRLPQIHLLLLLVLLWHLLQTHFRPMPEEQQRQPLALHP

SEQ ID NO: 1026584 - protein, 353 aa, Homo sapiens
MCHVFSFIVFIFINICGSLPFTAQNSANADFANFDAFGQSSGSSNFGGFPTASHSPFQPQTTGGSAASVNANFAHFDNFPKSSSADFGTFNTSQSHQTASAVSKVSTNKAGLQTADKYAALANLDNIFSAGQGGDQGSGFGTTGKAPVGSVVSVPSQSSASSDKYAALAELDSVFSSAATSSNAYTSTSNASSNVFGTVPVVASAQTQPASSSVPAPFGATPSTNPFVAAAGPSVASSTNPFQTNARGATAATFGTASMSMPTGFGTPAPYSLPTSFSGSFQQPAFPAQAAFPQQTAFSQQPNGAGFAAFGQTKPVVTPFGQVAAAGVSSNPFMTGAPTGQFPTGSSSTNPFL

SEQ ID NO: 1026585 - protein, 596 aa, Homo sapiens
WRRRRRLSRLCRLVWPVSPRTTAPGPRRAQYSQAAAAGSGAGGARRRRAAAAARAARGTAGPRRSAARLPALPASSLGAAAMAASAKRKQEEKHLKMLRDMTGLPHNRKCFDCDQRGPTYVNMTVGSFVCTSCSGSLRGLNPPHRVKSISMTTFTQQEIEFLQKHGNEVCKQIWLGLFDDRSSAIPDFRDPQKVKEFLQEKYEKKRWYVPPEQAKVVASVHASISGSSASSTSSTPEVKPLKSLLGDSAPTLHLNKGTPSQSPVVGRSQGQQQEKKQFDLLSDLGSDIFAAPAPQSTATANFANFAHFNSHAAQNSANADFANFDAFGQSSGSSNFGGFPTASHSPFQPQTTGGSAASVNANFAHFDNFPKSSSADFGTFNTSQSHQTASAVSKVSTNKAGLQTADKYAALANLDNIFSAGQGGDQGSGFGTTGKAPVGSVVSVPSQSSASSDKYAALAELDSVFSSAATSSNAYTSTSNASSNVFGTVPVVASAQTQPASSSVPAPFGATPSTNPFVAAAGPSVASSTNPFQTNARGATAATFGTASMSMPTGFGTPAPYSLPTSFSGSFQQPAFPAQAAFPQQTAFSQQPNGKI

SEQ ID NO: 1026586 - protein, 604 aa, Homo sapiens
WRRRRRLSRLCRLVWPVSPRTTAPGPRRAQYSQAAAAGSGAGGARRRRAAAAARAARGTAGPRRSAARLPALPASSLGAAAMAASAKRKQEEKHLKMLRDMTGLPHNRKCFDCDQRGPTYVNMTVGSFVCTSCSGSLRGLNPPHRVKSISMTTFTQQEIEFLQKHGNEVCKQIWLGLFDDRSSAIPDFRDPQKVKEFLQEKYEKKRWYVPPEQAKVVASVHASISGSSASSTSSTPEVKPLKSLLGDSAPTLHLNKGTPSQSPVVGRSQGQQQEKKQFDLLSDLGSDIFAAPAPQSTATANFANFAHFNSHAAGGSAASVNANFAHFDNFPKSSSADFGTFNTSQSHQTASAVSKVSTNKAGLQTADKYAALANLDNIFSAGQGGDQGSGFGTTGKAPVGSVVSVPSQSSASSDKYAALAELDSVFSSAATSSNAYTSTSNASSNVFGTVPVVASAQTQPASSSVPAPFGATPSTNPFVAAAGPSVASSTNPFQTNARGATAATFGTASMSMPTGFGTPAPYSLPTSFSGSFQQPAFPAQAAFPQQTAFSQQPNGAGFAAFGQTKPVVTPFGQVAAAGVSSNPFMTGAPTGQFPTGSSSTNPFL

SEQ ID NO: 1026587 - protein, 440 aa, Homo sapiens
MEMKYVPPEQAKVVASVHASISGSSASSTSSTPEVKPLKSLLGDSAPTLHLNKGTPSQSPVVGRSQGQQQEKKQFDLLSDLGSDIFAAPAPQSTATANFANFAHFNSHAAQNSANADFANFDAFGQSSGSSNFGGFPTASHSPFQPQTTGGSAASVNANFAHFDNFPKSSSADFGTFNTSQSHQTASAVSKVSTNKAGLQTADKYAALANLDNIFSAGQGGDQGSGFGTTGKAPVGSVVSVPSQSSASSDKYAALAELDSVFSSAATSSNAYTSTSNASSNVFGTVPVVASAQTQPASSSVPAPFGATPSTNPFVAAAGPSVASSTNPFQTNARGATAATFGTASMSMPTGFGTPAPYSLPTSFSGSFQQPAFPAQAAFPQQTAFSQQPNGAGFAAFGQTKPVVTPFGQVAAAGVSSNPFMTGAPTGQFPTGSSSTNPFL

SEQ ID NO: 1026588 - protein, 162 aa, Homo sapiens
PEAACRWLIVTPDPSNNMLILVSPDPFGSTPSTNPFVAAAGPSVASSTNPFQTNARGATAATFGTASMSMPTGFGTPAPYSLPTSFSGSFQQPAFPAQAAFPQQTAFSQQPNGAGFAAFGQTKPVVTPFGQVAAAGVSSNPFMTGAPTGQFPTGSSSTNPFL

SEQ ID NO: 1026589 - protein, 426 aa, Homo sapiens
WRRRRRLSRLCRLVWPVSPRTTAPGPRRAQYSQAAAAGSGAGGARRRRAAAAARAARGTAGPRRSAARLPALPASSLGAAAMAASAKRKQEEKHLKMLRDMTGLPHNRKCFDCDQRGPTYVNMTVGSFVCTSCSGSLRGLNPPHRVKSISMTTFTQQEIEFLQKHGNEVCKQIWLGLFDDRSSAIPDFRDPQKVKEFLQEKYEKKRWYVPPEQAKVVASVHASISGSSASSTSSTPEVKPLKSLLGDSAPTLHLNKGTPSQSPVVGRSQGQQQEKKQFDLLSDLGSDIFAAPAPQSTATANFANFAHFNSHAAQNSANADFANFDAFGQSSGSSNFGGFPTASHSPFQPQTTGGSAASVNANFAHFDNFPKSSSADFGTFNTSQSHQTASAVSKVSTNKAGLQTADKYAALANLDNIFSAGQGIKL

SEQ ID NO: 1026590 - protein, 218 aa, Homo sapiens
  misc_feature (113)..(113): Xaa can be any naturally occurring amino acid
  misc_feature (116)..(116): Xaa can be any naturally occurring amino acid
  misc_feature (119)..(119): Xaa can be any naturally occurring amino acid
  misc_feature (121)..(121): Xaa can be any naturally occurring amino acid
  misc_feature (123)..(125): Xaa can be any naturally occurring amino acid
  misc_feature (128)..(128): Xaa can be any naturally occurring amino acid
  misc_feature (130)..(131): Xaa can be any naturally occurring amino acid
  misc_feature (134)..(134): Xaa can be any naturally occurring amino acid
  misc_feature (140)..(140): Xaa can be any naturally occurring amino acid
  misc_feature (142)..(142): Xaa can be any naturally occurring amino acid
  misc_feature (145)..(146): Xaa can be any naturally occurring amino acid
  misc_feature (152)..(152): Xaa can be any naturally occurring amino acid
MGKDYYCILGIEKGASDEDIKKAYRKQALKFHPDKNKSPQAEEKFKEVAEAYEVLSDPKKREIYDQFGEEGLKGGAGGTDGQGGTFRYTFHGDPHATFAAFFGGSNPFESFFXRRXGGXRXSXXXGKXWXXFMXLWFTHXVXIQXXGILWGXSRLKQDPPVIHELRVSLEEIYSGCTKRMKISRKRLNADGRSYRSEDKILTIEIKKGWKEGTKITFP

SEQ ID NO: 1026591 - protein, 322 aa, Homo sapiens
HEWVLLTRAPERTICCHRRPAEGIADFGRWQCCMTPVIQDNPSGWGPCAVPEQFAGYASYQPFSEGRSLEEEVAALDEEPSIAKIRGTQSKYSSQIWWWKSKYAYFHEEDDSSFQLVAVRGARRRRATKGIEGEFAQQEIIRRDMDRRSMLQFNPAGILSYPVSRQGWRDEAHSDVLETVPETKFGVRQNWDQNSTERPVDSSVEVRGEWEVTEAWAWPQMVRWLLWTYVLLVACEGGGPTLSPVLCTGRSEVWICRGRCKGFSCVYTPGNCLRHWGTRDVCLMHLQVDVPQVRMGQVPPCRRLLSQGTYPRFSLWSDRGDT

SEQ ID NO: 1026592 - protein, 120 aa, Homo sapiens
  misc_feature (5)..(5): Xaa can be any naturally occurring amino acid
  misc_feature (114)..(114): Xaa can be any naturally occurring amino acid
IPKNXTQAQFFLIAQVVKSGQNGPHSSMVSFLPVSCPSNRGYRASTSAHVMLPWARSGTMLGSSEISALICRIESRSPQSCSVGGLVHCVKVNGDTKSHANLISPGIAPFRLTXRKSSTL

SEQ ID NO: 1026593 - protein, 103 aa, Homo sapiens
QVSIYDALTIDIIFQCIGHLDGNQQSFDQEVPTSLDVAWLLFWSKVKGSSPDASSVCRIRCFTCSHSTNIDSRWYSSAMPKVLFRDSSMADSRALSFSFFRKP

SEQ ID NO: 1026594 - protein, 254 aa, Homo sapiens
MAATARRGWGAAAVAAGLRRRFCHMLKNPYTIKKQPLHQFVQRPLFPLPAAFYHPVRYMFIQTQDTPNPNSLKFIPGKPVLETRTMDFPTPAAAFRSPLARQLFRIEGVKSVFFGPDFITVTKENEELDWNLLKPDIYATIMDFFASGLPLVTEETPSGEAGSEEDDEVVAMIKELLDTRIRPTVQEDGGDVIYKGFEDGIVQLKLQGSCTSCPSSIITLKNGIQNMLQFYIPEVEGVEQVMDDESDEKEANSP

SEQ ID NO: 1026595 - protein, 231 aa, Homo sapiens [sequence omitted]

SEQ ID NO: 1026596 - protein, 221 aa, Homo sapiens
MAATARRGWGAAAVAAGLRRRFCHMLKNPYTIKKQPLHQFVQRPLFPLPAAFYHPVRYMFIQTQDTPNPNSLKFIPGKPVLETRTMDFPTPAAAFRSPLARQLFRIEGVKSVFFGPDFITVTKENEELDWNLLKPDIYATIMDFFASGLPLVTEETPSGEAGSEEDDEVVAMIKELLDTRIRYVLLSLPEFKCFGGIFHYSNIVLVGHEIIVDFQNKCKLM

SEQ ID NO: 1026597 - protein, 185 aa, Homo sapiens
MAATARRGWGAAAVAAGLRRRFCHMLKNPYTIKKQPLHQFVQRPLFPLPAAFYHPVRYMFIQTQDTPNPNSLKFIPGKPVLETRTMDFPTPAAAFRSPLARQLFRIEGVKSVFFGPDFITVTKENEELDWNLLKPDIYATIMDFFASGLPLVTEETPSGEAGSEEDDEVVAMIKELLDTRIRGYG

SEQ ID NO: 1026598 - protein, 113 aa, Homo sapiens
MDFFASGLPLVTEETPSGEAGSEEDDEVVAMIKELLDTRIRPTVQEDGGDVIYKGFEDGIVQLKLQGSCTSCPSSIITLKNGIQNMLQFYIPEVEGVEQVMDDESDEKEANSP

SEQ ID NO: 1026599 - protein, 196 aa, Homo sapiens
MFIQTQDTPNPNSLKFIPGKPVLETRTMDFPTPAAAFRSPLARQLFRIEGVKSVFFGPDFITVTKENEELDWNLLKPDIYATIMDFFASGLPLVTEETPSGEAGSEEDDEVVAMIKELLDTRIRPTVQEDGGDVIYKGFEDGIVQLKLQGSCTSCPSSIITLKNGIQNMLQFYIPEVEGVEQVMDDESDEKEANSP

SEQ ID NO: 1026600 - protein, 857 aa, Homo sapiens
GTRPGWDGSCTTSTISFSFVSFPGTQQRRPPGLRPPHHPRGQDQLWLVLTGLTQQVALTFLRLLDVHTEVEEEEEKEEGSSLAQEQVAQGLRRLEGSSWPFSMVSHGSSPSLLEALSSDFLACKICLEQLRAPKTLPCLHTYCQDCLAQLADGGRVRCPECRETVPVPPEGVASFKTNFFVNGLLDLVKARACGDLRAGKPACALCPLVGGTSTGGPATARCLDCADDLCQACADGHRCTRQTHTHRVVDLVGYRAGWYDEEARERQAAQCPQHPGEALRFLCQPCSQLLCRECRLDPHLDHPCLPLAEAVRARRPGLEGLLAGVDNNLVELEAARRVEKEALARLREQAARVGTQVEEAAEGVLRALLAQKQEVLGQLRAHVEAAEEAARERLAELEGREQVARAAAAFARRVLSLGREAEILSLEGAIAQRLRQLQGCPWAPGPAPCLLPQLELHPGLLDKNCHLLRLSFEEQQPQKDGGKDGAGTQGGEESQSRREDEPKTERQGGVQPQAGDGAQTPKEEKAQTTREEGAQTLEEDRAQTPHEDGGPQPHRGGRPNKKKKFKGRLKSISREPSPALGPNLDGSGLLPRPIFYCSFPTRMPGDKRSPRITGLCPFGPREILVADEQNRALKRFSLNGDYKGTVPVPEGCSPCSVAALQSAVAFSASARLYLINPNGEVQWRRALSLSQASHAVAALPSGDRVAVSVAGHVEVYNMEGSLATRFIPGGKASRGLRALVFLTTSPQGHFVGSDWQQNSVVICDGLGQVVGEYKGPGLHGCQPGSVSVDKKGYIFLTLREVNKVVILDPKGSLLGDFLTAYHGLEKPRVTTMVDGRYLVVSLSNGTIHIFRVRSPDS

SEQ ID NO: 1026601 - protein, 398 aa, Homo sapiens
GTRPGWDGSCTTSTISFSFVSFPGTQQRRPPGLRPPHHPRGQDQLWLVLTGLTQQVALTFLRLLDVHTEVEEEEEKEEGSSLAQEQVAQGLRRLEGSSWPFSMVSHGSSPSLLEALSSDFLACKICLEQLRAPKTLPCLHTYCQDCLAQLADGGRVRCPECRETVPVPPEGVASFKTNFFVNGLLDLVKARACGDLRAGKPACALCPLVGGTSTGGPATARCLDCADDLCQACADGHRCTRQTHTHRVVDLVGYRAGWYDEEARERQAAQCPQHPGEALRFLCQPCSQLLCRECRLDPHLDHPCLPLAEAVRARRPGLEGLLAGVDNNLVELEAARRVEKEALARLREQAARVGTQVEEAAEGVLRALLAQKQENHLNPGGGSCSELRSHHCTPAWVT

SEQ ID NO: 1026602 - protein, 839 aa, Homo sapiens
GTRPGWDGSCTTSTISFSFVSFPGTQQRRPPGLRPPHHPRGQDQLWLVLTGLTQQVALTFLRLLDVHTEVEEEEEKEEGSSLAQEQVAQGLRRLEGSSWPFSMVSHGSSPSLLEALSSDFLACKICLEQLRAPKTLPCLHTYCQDCLAQLADGGRVRCPECRETVPVPPEGVASFKTNFFVNGLLDLVKARACGDLRAGKPACALCPLVGGTSTGGPATARCLDCADDLCQACADGHRCTRQTHTHRVVDLVGYRAGWYDEEARERQAAQCPQHPGEALRFLCQPCSQLLCRECRLDPHLDHPCLPLAEAVRARRPGLEGLLAGVDNNLVELEAARRVEKEALARLREQAARVGTQVEEAAEGVLRALLAQKQEVLGQLRAHVEAAEEAARERLAELEGREQVARAAAAFARRVLSLGREAEILSLEGAIAQRLRQLQGCPWAPGPAPCLLPQLELHPGLLDKNCHLLRLSFEEQQPQKDGGKDGAGTQGGEESQSRREDEPKTERQGGVQPQAGDGAQTPKEEKAQTTREEGAQTLEEDRAQTPHEDGGPQPHRGGRPNKKKKFKGRLKSISREPSPALGPNLDGSGLLPRPIFYCSFPTRMPGDKRSPRITGLCPFGPREILVADEQNRALKRFSLNGDYKGTVPVPEGCSPCSVAALQSAVAFSASARLYLINPNGEVQWRRALSLSQASHAVAALPSGDRVAVSVAGHVEVYNMEGSLATRFIPGGKASRGLRALVFLTTSPQGHFVGSDWQQNSVVICDGLGQVVGEYKGPGLHGCQPGSVSVDKKGYIFLTLREVNKVVILDPKGSLLGDFLTAYHGLGNGTIHIFRVRSPDS

SEQ ID NO: 1026603 - protein, 256 aa, Homo sapiens
  misc_feature (212)..(212): Xaa can be any naturally occurring amino acid
  misc_feature (219)..(219): Xaa can be any naturally occurring amino acid
GTRPGWDGSCTTSTISFSFVSFPGTQQRRPPGLRPPHHPRGQDQLWLVLTGLTQQVALTFLRLLDVHTEVEEEEEKEEGSSLAQEQVAQGLRRLEGSSWPFSMVSHGSSPSLLEALSSDFLACKICLEQLRAPKTLPCLHTYCQGSSDVLVVVVSMLSTAPRAHPATFVFQVSMSTKVYKGDSCKPLLRAQELHSILTPIVPPTQAITLGPXCLPTHQXGDRFASSYKLTITMGDQTYNEMGDVDQFPPPETWGSL

SEQ ID NO: 1026604 - protein, 594 aa, Homo sapiens
GTRPGWDGSCTTSTISFSFVSFPGTQQRRPPGLRPPHHPRGQDQLWLVLTGLTQQVALTFLRLLDVHTEVEEEEEKEEGSSLAQEQVAQGLRRLEGSSWPFSMVSHGSSPSLLEALSSDFLACKICLEQLRAPKTLPCLHTYCQDCLAQLADGGRVRCPECRETVPVPPEGVASFKTNFFVNGLLDLVKARACGDLRAGKPACALCPLVGGTSTGGPATARCLDCADDLCQACADGHRCTRQTHTHRVVDLVGYRAGWYDEEARERQAAQCPQHPGEALRFLCQPCSQLLCRECRLDPHLDHPCLPLAEAVRARRPGLEGLLAGVDNNLVELEAARRVEKEALARLREQAARVGTQVEEAAEGVLRALLAQKQEVLGQLRAHVEAAEEAARERLAELEGREQVARAAAAFARRVLSLGREAEILSLEGAIAQRLRQLQGCPWAPGPAPCLLPQLELHPGLLDKNCHLLRLSFEEQQPQKDGGKDGAGTQGGEESQSRREDEPKTERQGGVQPQAGDGAQTPKEEKAQTTREEGAQTLEEDRAQTPHEDGGPQPHRGGRPNKKKKFKGRLKSISCASPAHSCCADECLLDPHLDS

SEQ ID NO: 1026605 - protein, 73 aa, Homo sapiens
  misc_feature (2)..(2): Xaa can be any naturally occurring amino acid
PXGNAEARVGGSFPLQFMSWLPLEFCTGEVGWDVQNKQDFLLEQVWTSELEMGTETTISCAPCGQGRTHWSLI

SEQ ID NO: 1026606 - protein, 68 aa, Homo sapiens
AQPPAVLCGSQLQPLRCSKTREEAKTELSQPGIAALALKVTKKTRKTRKVIREAGELVKVTDPRFSAP

SEQ ID NO: 1026607 - protein, 75 aa, Homo sapiens
HVVHDIRESRQDMPRAVTTHYGDDTHGFPPPRVQALSWTSAGNVDTPSSVCGGQRMCLHPQTFRSCAESVPQPVS

SEQ ID NO: 1026608 - protein, 127 aa, Homo sapiens
GSTPRCALRFAAAAASVLQDQRGSKDRAFPARHRCFGLEGDKEDKEDKEGDPGGWRACQGHRPTVFRPLGSKLFPGHLQAMSTRPPVSVAGKGCVSTPRPSDPVLKVSLSLFPEKPRGFWLVTFSFS

SEQ ID NO: 1026609 - protein, 73 aa, Homo sapiens; identical to SEQ ID NO: 1026605
  misc_feature (2)..(2): Xaa can be any naturally occurring amino acid

SEQ ID NO: 1026610 - protein, 73 aa, Homo sapiens; identical to SEQ ID NO: 1026605
  misc_feature (2)..(2): Xaa can be any naturally occurring amino acid

SEQ ID NO: 1026611 - protein, 127 aa, Homo sapiens; identical to SEQ ID NO: 1026608

SEQ ID NO: 1026612 - protein, 613 aa, Homo sapiens
MDTNFWVLLRDGIKTSKILEMTNIDGKSQFVSYEMQRNLSLEHAKTSVLLLNKVDLLWDDLFLILQFVWHTSVEHFQIRNVTFGGKAYLDHNSFDYSNTVMRTIKLEHVHFRVFYIQQDKIYLLLTKMDIENLTISNAQMPHMLFPNYPTKFQYLNFANNILTDELFKRTIQLPHLKTLILNGNKLETLSLVSCFANNTPLEHLDLSQNLLQHKNDENCSWPETVVNMNLSYNKLSDSVFRCLPKSIQILDLNNNQIQTVPKETIHLMALRELNIAFNFLTDLPGCSHFSRLSVLNIEMNFILSPSLDFVQSCQEVKTLNAGRNPFRCTCELKNFIQLETYSEVMMVGWSDSYTCEYPLNLRGIRLKDVHLHELSCNTALLIVTIVVIMLVLGLAVAFCCLHFDLPWYLRMLGQCTQTWHRVRKTTQEQLKRNVRFHAFISYSEHDSLWVKNELIPNLEKEDGSILICLYESYFDPGKSISENIVSFIEKSYKSIFVLSPNFVQNEWCHYEFYFAHHNLFHENSDHIILILLEPIPFYCIPTRYHKLKALLEKKAYLEWPKDRRKCGLFWANLRAAINVNVLATREMYELQTFTELNEESRGSTISLMRTDCL

SEQ ID NO: 1026613 - protein, 811 aa, Homo sapiens
MRLIRNIYIFCSIVMTAEGDAPELPEERELMTNCSNMSLRKVPADLTPATTTLDLSYNLLFQLQSSDFHSVSKLRVLILCHNRIQQLDLKTFEFNKELRYLDLSNNRLKSVTWYLLAGLRYLDLSFNDFDTMPICEEAGNMSHLEILGLSGAKIQKSDFQKIAHLHLNTVFLGFRTLPHYEEGSLPILNTTKLHIVLPMDTNFWVLLRDGIKTSKILEMTNIDGKSQFVSYEMQRNLSLENAKTSVLLLNKVDLLWDDLFLILQFVWHTSVEHFQIRNVTFGGKAYLDHNSFDYSNTVMRTIKLEHVHFRVFYIQQDKIYLLLTKMDIENLTISNAQMPHMLFPNYPTKFQYLNFANNILTDELFKRTIQLPHLKTLILNGNKLETLSLVSCFANNTPLEHLDLSQNLLQHKNDENCSWPETVVNMNLSYNKLSDSVFRCLPKSIQILDLNNNQIQTVPKETIHLMALRELNIAFNFLTDLPGCSHFSRLSVLNIEMNFILSPSLDFVQSCQEVKTLNAGRNPFRCTCELKNFIQLETYSEVMMVGWSDSYTCEYPLNLRGIRLKDVHLHELSCNTALLIVTIVVIMLVLGLAVAFCCLHFDLPWYLRMLGQCTQTWHRVRKTTQEQLKRNVRFHAFISYSEHDSLWVKNELIPNLEKEDGSILICLYESYFDPGKSISENIVSFIEKSYKSIFVLSPNFVQNEWCHYEFYFAHHNLFHENSDHIILILLEPIPFYCIPTRYHKLKALLEKKAYLEWPKDRRKCGLFWANLRAAINVNVLATREMYELQTFTELNEESRGSTISLMRTDCL

SEQ ID NO: 1026614 - protein, 671 aa, Homo sapiens
MNGAPSPEDGASPSSPPLPPPPPPSWREFCESHARAAALDFARRFRLYLASHPQYAGPGAEAAFSRRFAELFLQHFEAEVARASGSLSPPILAPLSPGAEISPHDLSLESCRVGGPLAVLGPSRSSEDLAGPLPSSVSSSSTTSSKPKLKKRFSLRSVGRSVRGSVRGILQWRGTVDPPSSAGPLETSSGPPVLGGNSNSNSSGGAGTVGRGLVSDGTSPGERWTHRFERLRLSRGGGALKDGAGMVQREELLSFMGAEEAAPDPAGVGRGGGVAGPPSGGGGQPQWQKCRLLLRSEGEGGGGSRLEFFVPPKASRPRLSIPCSSITDVRTTTALEMPDRENTFVVKVEGPSEYIMETVDAQHVKAWVSDIQECLSPGPCPATSPRPMTLPLAPGTSFLTRENTDSLELSCLNHSESLPSQDLLLGPSESNDRLSQGAYGGLSDRPSASISPSSASIAASHFDSMELLPPELPPRIPIEEGPPAGTVHPLSAPYPPLDTPETATGSFLFQGEPEGGEGDQPLSGYPWFHGMLSRLKAAQLVLTGGTGSHGVFLVRQSETRRGEYVLTFNFQGKAKHLRLSLNEEGQCRVQHLWFQSIFDMLEHFRVHPIPLESGGSSDVVLVSYVPSSQRQQGREQAGSHAGVCEGDGCHPDASCTLMPFGASDCVTDHLP

SEQ ID NO: 1026615 - protein, 426 aa, Homo sapiens
MVQREELLSFMGAEEAAPDPAGVGRGGGVAGPPSGGGGQPQWQKCRLLLRSEGEGGGGSRLEFFVPPKASRPRLSIPCSSITDVRTTTALEMPDRENTFVVKVEGPSEYIMETVDAQHVKAWVSDIQECLSPGPCPATSPRPMTLPLAPGTSFLTRENTDSLELSCLNHSESLPSQDLLLGPSESNDRLSQGAYGGLSDRPSASISPSSASIAASHFDSMELLPPELPPRIPIEEGPPAGTVHPLSAPYPPLDTPETATGSFLFQGEPEGGEGDQPLSGYPWFHGMLSRLKAAQLALTGGTGSHGVFLVRQSETRRGEYVLTFNFQGKAKHLRLSLNEEGQCRVQHLWFQSIFDMLEHFRVHPIPLESGGSSDVVLVSYVPSSQRQQGREQAGSHAGVCEGDGCHPDASCTLMPFGASDCVTDHLP

SEQ ID NO: 1026616 - protein, 683 aa, Homo sapiens [sequence omitted]

SEQ ID NO: 1026617 - protein, 301 aa, Homo sapiens
MTLPLAPGAGTGSRAGPMTLPLAPGTSFLTRENTDSLELSCLNHSESLPSQDLLLGPSESNDRLSQGAYGGLSDRPSASISPSSASIAASHFDSMELLPPELPPRIPIEEGPPAGTVHPLSAPYPPLDTPETATGSFLFQGEPEGGEGDQPLSGYPWFHGMLSRLKAAQLVLTGGTGSHGVFLVRQSETRRGEYVLTFNFQGKAKHLRLSLNEEGQCRVQHLWFQSIFDMLEHFRVHPIPLESGGSSDVVLVSYVPSSQRQQGREQAGSHAGVCEGDGCHPDASCTLMPFGASDCVTDHLP

SEQ ID NO: 1026618 - protein, 765 aa, Homo sapiens
MNGAPSPEDGASPSSPPLPPPPPPSWREFCESHARAAALDFARRFRLYLASHPQYAGPGAEAAFSRRFAELFLQHFEAEVARASGSLSPPILAPLSPGAEISPHDLSLESCRVGGPLAVLGPSRSSEDLAGPLPSSVSSSSTTSSKPKLKKRFSLRSVGRSVRGSVRGILQWRGTVDPPSSAGPLETSSGPPVLGGNSNSNSSGGAGTVGRGLVSDGTSPGERWTHRFERLRLSRGGGALKDGAGMVQREELLSFMGAEEAAPDPAGVGRGGGVAGPPSGGGGQPQWQKCRLLLRSEGEGGGGSRLEFFVPPKASRPRLSIPCSSITDVRTTTALEMPDRENTFVVKVEGPSEYIMETVDAQHVKAWVSDIQECLSPGPCPATSPRPMTLPLAPGTSFLTRENTDSLELSCLNHSESLPSQDLLLGPSESNDRLSQGAYGGLSDRPSASISPSSASIAASHFDSMELLPPELPPRIPIEEGPPAGTVHPLSAPYPPLDTPETATGSFLFQGEPEGGEGDQPLSGYPWFHGMLSRLKAAQLVLTGGTGSHGVFLVRQSETRRGEYVLTFNFQGKAKHLRLSLNEEGQCRVQHLWFQSIFDMLEHFRVHPIPLESGGSSDVVLVSYVPSSQRQQGLFSYHSYPEPTTSHDPPQPPEPPSWTDPPQPGAEEASRAPEVAAAAAAAAKERQEKEKAGGGGVPEELVPVVELVPVVELEEAIAPGSEAQGAGSGGDAGVPPMVQLQQSPLGGDGEEGGHPRAINNQYSFV

SEQ ID NO: 1026619 - protein, 205 aa, Homo sapiens
  misc_feature (18)..(18): Xaa can be any naturally occurring amino acid
  misc_feature (21)..(21): Xaa can be any naturally occurring amino acid
ESERGREGREKKGKKKKXRKXVPLSAPYPPLDTPETATGSFLFQGEPEGGEGDQPLSGYPWFHGMLSRLKAAQLVLTGGTGSHGVFLVRQSETRRGEYVLTFNFQGKAKHLRLSLNEEGQCRVQHLWFQSIFDMLEHFRVHPIPLESGGSSDVVLVSYVPSSQRQQGREQAGSHAGVCEGDGCHPDASCTLMPFGASDCVTDHLP

SEQ ID NO: 1026620 - protein, 671 aa, Homo sapiens; identical to SEQ ID NO: 1026614

SEQ ID NO: 1026621 - protein, 121 aa, Homo sapiens
MAEVSMKVPFPPAAVLYGLFLQRRERGSCTPARNRAGRSSRSGWGRREREPPPPPPPPELTSGTEMQLLPPTPRLLAASLFVPHRLPRAGDLGSMSSLRGSSGQPHPGGHFPINYPQPEAG

SEQ ID NO: 1026622 - protein, 708 aa, Homo sapiens
MNGAPSPEDGASPSSPPLPPPPPPSWREFCESHARAAALDFARRFRLYLASHPQYAGPGAEAAFSRRFAELFLQHFEAEVARASGSLSPPILAPLSPGAEISPHDLSLESCRVGGPLAVLGPSRSSEDLAGPLPSSVSSSSTTSSKPKLKKRFSLRSVGRSVRGSVRGILQWRGTVDPPSSAGPLETSSGPPVLGGNSNSNSSGGAGTVGRGLVSDGTSPGERWTHRFERLRLSRGGGALKDGAGMVQREELLSFMGAEEAAPDPAGVGRGGGVAGPPSGGGGQPQWQKCRLLLRSEGEGGGGSRLEFFVPPKASRPRLSIPCSSITDVRTTTALEMPDRENTFVVKVEGPSEYIMETVDAQHVKAWVSDIQECLSPGEKPDFCRYRDIEWGWGAALRLSPGDFPPSTIFPGLCRPCPATSPRPMTLPLAPGTSFLTRENTDSLELSCLNHSESLPSQDLLLGPSESNDRLSQGAYGGLSDRPSASISPSSASIAASHFDSMELLPPELPPRIPIEEGPPAGTVHPLSAPYPPLDTPETATGSFLFQGEPEGGEGDQPLSGYPWFHGMLSRLKAAQLVLTGGTGSHGVFLVRQSETRRGEYVLTFNFQGKAKHLRLSLNEEGQCRVQHLWFQSIFDMLEHFRVHPIPLESGGSSDVVLVSYVPSSQRQQGREQAGSHAGVCEGDGCHPDASCTLMPFGASDCVTDHLP

SEQ ID NO: 1026623 - protein, 774 aa, Homo sapiens
MNGAPSPEDGASPSSPPLPPPPPPSWREFCESHARAAALDFARRFRLYLASHPQYAGPGAEAAFSRRFAELFLQHFEAEVARASGSLSPPILAPLSPGAEISPHDLSLESCRVGGPLAVLGPSRSSEDLAGPLPSSVSSSSTTSSKPKLKKRFSLRSVGRSVRGSVRGILQWRGTVDPPSSAGPLETSSGPPVLGGNSNSNSSGGAGTVGRGLVSDGTSPGERWTHRFERLRLSRGGGALKDGAGMVQREELLSFMGAEEAAPDPAGVGRGGGVAGPPSGGGGQPQWQKCRLLLRSEGEGGGGSRLEFFVPPKASRPRLSIPCSSITDVRTTTALEMPDRENTFVVKVEGPSEYIMETVDAQHVKAWVSDIQECLSPGPCPATSPRPMTLPLAPGTSFLTRENTDSLELSCLNHSESLPSQDLLLGPSESNDRLSQGAYGGLSDRPSASISPSSASIAASHFDSMELLPPELPPRIPIEEGPPAGTVHPLSAPYPPLDTPETATGSFLFQGEPEGGEGDQPLSGYPWFHGMLSRLKAAQLVLTGGTGSHGVFLVRQSETRRGEYVLTFNFQGKAKHLRLSLNEEGQCRVQHLWFQSIFDMLEHFRVHPIPLESGGSSDVVLVSYVPSSQRQQGEQSRSAGEEVPVHPRSEEPTTSHDPPQPPEPPSWTDPPQPGAEEASRAPEVAAAAAAAAKERQEKEKAGGGGVPEELVPVVELVPVVELEEAIAPGSEAQGAGSGGDAGVPPMVQLQQSPLGGDGEEGGHPRAINNQYSFV

SEQ ID NO: 1026624 - protein, 120 aa, Homo sapiens
MTTRDKKRTRVKYVLTFNFQGKAKHLRLSLNEEGQCRVQHLWFQSIFDMLEHFRVHPIPLESGGSSDVVLVSYVPSSQRQQGREQAGSHAGVCEGDGCHPDASCTLMPFGASDCVTDHLP

SEQ ID NO: 1026625 - protein, 670 aa, Homo sapiens
MNGAPSPEDGASPSSPPLPPPPPPSWREFCESHARAAALDFARRFRLYLASHPQYAGPGAEAAFSRRFAELFLQHFEAEVARASGSLSPPILAPLSPGAEISPHDLSLESCRVGGPLAVLGPSRSSEDLAGPLPSSVSSSSTTSSKPKLKKRFSLRSVGRSVRGSVRGILQWRGTVDPPSSAGPLETSSGPPVLGGNSNSNSSGGAGTVGRGLVSDGTSPGERWTHRFERLRLSRGGGALKDGAGMVQREELLSFMGAEEAAPDPAGVGRGGGVAGPPSGGGGQPQWQKCRLLLRSEGEGGGGSRLEFFVPPKASRPRLSIPCSSITDVRTTTALEMPDRENTFVVKVEGPSEYIMETVDAQHVKAWVSDIQECLSPGPCPATSPRPMTLPLAPGTSFLTRENTDSLELSCLNHSESLPSQDLLLGPSESNDRLSQGAYGGLSDRPSASISPSSASIAASHFDSMELLPPELPPRIPIEEGPPAGTVHPLSAPYPPLDTPETATGSFLFQGEPEGGEGDQPLSGYPWFHGMLSRLKAAQLVLTGGTGSHGVFLVRQSETRRGEYVLTFNFQGKAKHLRLSLNEEGQCRVQHLWFQSIFDMLEHFRVHPIPLESGGSSDVVLVSYVPSSQRQQGEQSRSAGEEVPVHPRSEVCVPERWGGEGGLSTGEACV

SEQ ID NO: 1026626 - protein, 426 aa, Homo sapiens; identical to SEQ ID NO: 1026615

SEQ ID NO: 1026627 - protein, 426 aa, Homo sapiens; identical to SEQ ID NO: 1026615

SEQ ID NO: 1026628 - protein, 756 aa, Homo sapiens
MNGAPSPEDGASPSSPPLPPPPPPSWREFCESHARAAALDFARRFRLYLASHPQYAGPGAEAAFSRRFAELFLQHFEAEVARASGSLSPPILAPLSPGAEISPHDLSLESCRVGGPLAVLGPSRSSEDLAGPLPSSVSSSSTTSSKPKLKKRFSLRSVGRSVRGSVRGILQWRGTVDPPSSAGPLETSSGPPVLGGNSNSNSSGGAGTVGRGLVSDGTSPGERWTHRFERLRLSRGGGALKDGAGMVQREELLSFMGAEEAAPDPAGVGRGGGVAGPPSGGGGQPQWQKCRLLLRSEGEGGGGSRLEFFVPPKASRPRLSIPCSSITDVRTTTALEMPDRENTFVVKVEGPSEYIMETVDAQHVKAWVSDIQECLSPGPCPATSPRPMTLPLAPGTSFLTRENTDSLELSCLNHSESLPSQDLLLGPSESNDRLSQGAYGGLSDRPSASISPSSASIAASHFDSMELLPPELPPRIPIEEGPPAGTVHPLSAPYPPLDTPETATGSFLFQGEPEGGEGDQPLSGYPWFHGMLSRLKAAQLVLTGGTGSHGVFLVRQSETRRGEYVLTFNFQGKAKHLRLSLNEEGQCRVQHLWFQSIFDMLEHFRVHPIPLESGGSSDVVLVSYVPSSQRQQEPTTSHDPPQPPEPPSWTDPPQPGAEEASRAPEVAAAAAAAAKERQEKEKAGGGGVPEELVPVVELVPVVELEEAIAPGSEAQGAGSGGDAGVPPMVQLQQSPLGGDGEEGGHPRAINNQYSFV

SEQ ID NO: 1026629 - protein, 106 aa, Homo sapiens [sequence omitted]

SEQ ID NO: 1026630 - protein, 106 aa, Homo sapiens [sequence omitted]

SEQ ID NO: 1026631 - protein, 212 aa, Homo sapiens
MVNVPKTRRTFCKKCGKHQPHKVTQYKKGKDSLYAQGKRRYDRKQSGYGGQTKPIFRKKAKTTKKIVLRLECVEPNCRSKRMLAIKRCKHFELGGDKKKKKNTKTSAFLSSSRREEGHAQPAFGNAQARQAMAVEGGMNLCEVLGSTSFLRGLWPLCQGDLIAVGVGAQFVLSQTIIPGATPGSLLPVVIIAGGVFLFREGYEGQLRACTEN

SEQ ID NO: 1026632 - protein, 106 aa, Homo sapiens [sequence omitted]

SEQ ID NO: 1026633 - protein, 106 aa, Homo sapiens [sequence omitted]

SEQ ID NO: 1026634 - protein, 106 aa, Homo sapiens [sequence omitted]

SEQ ID NO: 1026635 - protein, 149 aa, Homo sapiens
ASPLRDEEEEEEEMVVSEEEEEKGPSDPVLSVIFYYEDNKILSLCSKKKKKKKKKKKKKFKKKKKRKKQKQQKGAWARAPRGAPTRKKVFPETTTSWWAARGGPTSRGAMETHRGRQNTSGVPQERGDLLGGDDENEGGGGGLLPPQIT

SEQ ID NO: 1026636 - protein, 106 aa, Homo sapiens [sequence omitted]

SEQ ID NO: 1026637 - protein, 526 aa, Homo sapiens
MASGPHSTATAAAAASSAAPSAGGSSSGTTTTTTTTTGGILIGDRLYSEVSLTIDHSLIPEERLSPTPSMQDGLDLPSETDLRILGCELIQAAGILLRLPQVAMATGQVLFHRFFYSKSFVKHSFEIVAMACINLASKIEEAPRRIRDVINVFHHLRQLRGKRTPSPLILDQNYINTKNQVIKAERRVLKELGFCVHVKHPHKIIVMYLQVLECERNQTLVQTAWNYMNDSLRTNVFVRFQPETIACACIYLAARALQIPLPTRPHWFLLFGTTEEEIQEICIETLRLYTRKKPNYELLEKEVEKRKVALQEAKLKAKGLNPDGTPALSTLGGFSPASKPSSPREVKAEEKSPISINVKTVKKEPEDRQQASKSPYNGVRKDSKRSRNSRSASRSRSRTRSRSRSHTPRRHYNNRRSRSGTYSSRSRSRSRSHSESPRRHHNHGSPHLKAKHTRDDLKSSNRHGHKRKKSRSRSQSKSRDHSDAAKKHRHERGHHRDRRERSRSFERSHKSKHHGGSRSGHGRHRR

SEQ ID NO: 1026638 - protein, 358 aa, Homo sapiens
MLANAATSILGIRDLVKLRYSCGYHKQGGFDRPWLEKASSASEDPKVCRSTQHSPRRPRCRAAEARPGGTSWRAAARRGDVRAEAHAGVKLAQNPAVTGNIRRAENAGESCFGFRLRWACVRLAKTMASGPHSTATAAAAASSAAPSAGGSSSGTTTTTTTTTGGILIGDRLYSEVSLTIDHSLIPEERLSPTPSMQDGLDLPSETDLRILGCELIQAAGILLRLPQVAMATGQVLFHRFFYSKSFVKHSFEIVAMACINLASKIEEAPRRIRDVINVFHHLRQLRGKRTPSPLILDQNYINTKNQVIKAERRVLKELGFCVHVKHPHKIIVMYLQVLECERNQTLVQTAWVVHDGKS

SEQ ID NO: 1026639 - protein, 358 aa, Homo sapiens; identical to SEQ ID NO: 1026638

SEQ ID NO: 1026640 - protein, 358 aa, Homo sapiens; identical to SEQ ID NO: 1026638

SEQ ID NO: 1026641 - protein, 358 aa, Homo sapiens; identical to SEQ ID NO: 1026638

SEQ ID NO: 1026642 - protein, 701 aa, Homo sapiens
MLANAATSILGIRDLVKLRYSCGYHKQGGFDRPWLEKASSASEDPKVCRSTQHSPRRPRCRAAEARPGGTSWRAAARRGDVRAEAHAGVKLAQNPAVTGNIRRAENAGESCFGFRLRWACVRLAKTMASGPHSTATAAAAASSAAPSAGGSSSGTTTTTTTTTGGILIGDRLYSEVSLTIDHSLIPEERLSPTPSMQDGLDLPSETDLRILGCELIQAAGILLRLPQVAMATGQVLFHRFFYSKSFVKHSFEIVAMACINLASKIEEAPRRIRDVINVFHHLRQLRGKSTSYIYQSLGDVEWYIEMKLSSWQHELKYRKSPRRSQCSENRSLESGTNRTPSPLILDQNYINTKNQVIKAERRVLKELGFCVHVKHPHKIIVMYLQVLECERNQTLVQTAWNYMNDSLRTNVFVRFQPETIACACIYLAARALQIPLPTRPHWFLLFGTTEEEIQEICIETLRLYTRKKPNYELLEKEVEKRKVALQEAKLKAKGLNPDGTPALSTLGGFSPASKPSSPREVKAEEKSPISINVKTVKKEPEDRQQASKSPYNGVRKDSKRSRNSRSASRSRSRTRSRSRSHTPRRHYNNRRSRSGTYSSRSRSRSRSHSESPRRHHNHGSPHLKAKHTRDDLKSSNRHGHKRKKSRSRSQSKSRDHSDAAKKHRHERGHHRDRRERSRSFERSHKSKHHGGSRSGHGRHRR

SEQ ID NO: 1026643 - protein, 358 aa, Homo sapiens; identical to SEQ ID NO: 1026638

SEQ ID NO: 1026644 - protein, 172 aa, Homo sapiens
MASGPHSTATAAAAASSAAPSAGGSSSGTTTTTTTTTGGILIGDRLYSEVSLTIDHSLIPEERLSPTPSMQDGLDLPSETDLRILGCELIQAAGILLRLPQVAMATGQVLFHRFFYSKSFVKHSFEIVAMACINLASKIEEAPRRIRDVINVFHHLRQLRGKSDQLHLPKPG

SEQ ID NO: 1026645 - protein, 227 aa, Homo sapiens
ILCLLYILVTWCVSCSGMKALDMNSCRGLSSLGGFSPASKPSSPREVKAEEKSPISINVKTVKKEPEDRQQASKSPYNGVRKDSKRSRNSRSASRSRSRTRSRSRSHTPRRHYNNRRSRSGTYSSRSRSRSRSHSESPRRHHNHGSPHLKAKHTRDDLKSSNRHGHKRKKSRSRSQSKSRDHSDAAKKHRHERGHHRDRRERSRSFERSHKSKHHGGSRSGHGRHRR

SEQ ID NO: 1026646 - protein, 141 aa, Homo sapiens
SNICMNLFTYHDESLVHRKAYEKSFSLSPPGSSSSTHPERLTDYAKKARVVPGPQQLLQYCQLCAEHTRDDLKSSNRHGHKRKKSRSRSQSKSRDHSDAAKKHRHERGHHRDRRERSRSFERSHKSKHHGGSRSGHGRHRR

SEQ ID NO: 1026647 - protein, 554 aa, Homo sapiens
MLANAATSILGIRDLVKLRYSCGYHKQGGFDRPWLEKASSASEDPKVCRSTQHSPRRPRCRAAEARPGGTSWRAAARRGDVRAEAHAGVKLAQNPAVTGNIRRAENAGESCFGFRLRWACVRLAKTMASGPHSTATAAAAASSAAPSAGGSSSGTTTTTTTTTGGILIGDRLYSEVSLTIDHSLIPEERLSPTPSMQDGLDLPSETDLRILGCELIQAAGILLRLPQVAMATGQVLFHRFFYSKSFVKHSFEIVAMACINLASKIEEAPRRIRDVINVFHHLRQLRGKRTPSPLILDQNYINTKNQVIKAERRVLKELGFCVHVKHPHKIIVMYLQVLECERNQTLVQTAWNYMNDSLRTNVFVRFQPETIACACIYLAARALQIPLPTRPHWFLLFGTTEEEIQEICIETLRLYTRKKPNYELLEKEVEKRKVALQEAKLKAKGLNPDGTPALSTLGGFSPASKPSSPREVKAEEKSPISINVKTVKKEPEDRQQASKSPYNGVRKDSKRSRNSRSASRSRSRTRSRSRSHTPRRQDEVLLRCPGRSRTPGLK

SEQ ID NO: 1026648 - protein, 358 aa, Homo sapiens; identical to SEQ ID NO: 1026638

SEQ ID NO: 1026649 - protein, 298 aa, Homo sapiens
MLANAATSILGIRDLVKLRYSCGYHKQGGFDRPWLEKASSASEDPKVCRSTQHSPRRPRCRAAEARPGGTSWRAAARRGDVRAEAHAGVKLAQNPAVTGNIRRAENAGESCFGFRLRWACVRLAKTMASGPHSTATAAAAASSAAPSAGGSSSGTTTTTTTTTGGILIGDRLYSEVSLTIDHSLIPEERLSPTPSMQDGLDLPSETDLRILGCELIQAAGILLRLPQVAMATGQVLFHRFFYSKSFVKHSFEIVAMACINLASKIEEAPRRIRDVINVFHHLRQLRGKSDQLHLPKPG

SEQ ID NO: 1026650 - protein, 358 aa, Homo sapiens; identical to SEQ ID NO: 1026638

SEQ ID NO: 1026651 - protein, 358 aa, Homo sapiens; identical to SEQ ID NO: 1026638

SEQ ID NO: 1026652 - protein, 320 aa, Homo sapiens
MYLQVLECERNQTLVQTAWNYMNDSLRTNVFVRFQPETIACACIYLAARALQIPLPTRPHWFLLFGTTEEEIQEICIETLRLYTRKKPNYELLEKEVEKRKVALQEAKLKAKGLNPDGTPALSTLGGFSPASKPSSPREVKAEEKSPISINVKTVKKEPEDRQQASKSPYNGVRKDSKRSRNSRSASRSRSRTRSRSRSHTPRRHYNNRRSRSGTYSSRSRSRSRSHSESPRRHHNHGSPHLKAKHTRDDLKSSNRHGHKRKKSRSRSQSKSRDHSDAAKKHRHERGHHRDRRERSRSFERSHKSKHHGGSRSGHGRHRR

SEQ ID NO: 1026653 - protein, 358 aa, Homo sapiens; identical to SEQ ID NO: 1026638

SEQ ID NO: 1026654 - protein, 358 aa, Homo sapiens; identical to SEQ ID NO: 1026638

SEQ ID NO: 1026655 - protein, 320 aa, Homo sapiens [sequence omitted]

SEQ ID NO: 1026656 - protein, 526 aa, Homo sapiens; identical to SEQ ID NO: 1026637

SEQ ID NO: 1026657 - protein, 298 aa, Homo sapiens; identical to SEQ ID NO: 1026649

SEQ ID NO: 1026658 - protein, 301 aa, Homo sapiens
MADQPKPISPLKNLLAGGFGGVCLVFVGHPLDTVKVRLQTQPPSLPGQPPMYSGTFDCFRKTLFREGITGLYRGMAAPIIGVTPMFAVCFFGFGLGKKLQQKHPEDVLSYPQLFAAGMLSGVFTTGIMTPGERIKCLLQIQASSGESKYTGTLDCAKKLYQEFGIRGIYKGTVLTLMRDVPASGMYFMTYEWLKNIFTPEGKRVSELSAPRILVAGGIAGIFNWAVAIPPDVLKSRFQTAPPGKYPNGFRDVLRELIRDEGVTSLYKGFNAVMIRAFPANAACFLGFEVAMKFLNWATPNL

SEQ ID NO: 1026659 - protein, 181 aa, Homo sapiens
MADQPKPISPLKNLLAGGFGGVCLVFVGHPLDTVKVRLQTQPPSLPGQPPMYSGTFDCFRKTLFREGITGLYRGMAAPIIGVTPMFAVCFFGFGLGKKLQQKHPEDVLSYPQLFAAGMLSGVFTTGIMTPGERIKCLLQIQASSGESKYTGTLDCAKKLYQEFGIRGIYKGTVLTLMRDDK

SEQ ID NO: 1026660 - protein, 301 aa, Homo sapiens; identical to SEQ ID NO: 1026658

SEQ ID NO: 1026661 - protein, 301 aa, Homo sapiens; identical to SEQ ID NO: 1026658

SEQ ID NO: 1026662 - protein, 408 aa, Homo sapiens
MLQNPQEKSQAYPRRRRPGCYAYRQNPEAIAAAAMYTFLPDNFSPAKPKPSKELKPLLAAVVAWCYYSVSLRKAERLRAELLDLKAGGFSIRNQKGEQVFRLAFRSGALDLDSCSRDGALLGCSLTADGLPLHFFIQTVRPKDTVMCYRVRWEEAAPGRAVEHAMFLGDAAAHWYGGAEMRTQHWPIRLDGQQEPQPFVTSDVYSSDAAFGGILERYWLSSRAAAIKVNDSVPFHLGWNSTERSLRLQARYHDTPYKPPAGRAAAPELSYRVCVGSDVTSIHKYMVRRYFNKPSRVPAPEAFRDPIWSTWALYGRAVDQDKVLRFAQQIRLHHFNSSHLEIDDMYTPAYGDFDFDEVKFPNASDMFRRLRDAGFRVTLWVHPFVNYNSSRFGEGVERELFVREPTGRL

SEQ ID NO: 1026663 - protein, 374 aa, Homo sapiens
MLQNPQEKSQAYPRRRRPGCYAYRQNPEAIAAAAMYTFLPDNFSPAKPKPSKELKPLLGSAVLGLLLVLAAVVAWCYYSVSLRKAERLRAELLDLKAGGFSIRNQKGEQVFRLAFRSGALDLDSCSRDGALLGCSLTAHWYGGAEMRTQHWPIRLDGQQEPQPFVTSDVYSSDAAFGGILERYWLSSRAAAIKVNDSVPFHLGWNSTERSLRLQARYHDTPYKPPAGRAAAPELSYRVCVGSDVTSIHKYMVRRYFNKPSRVPAPEAFRDPIWSTWALYGRAVDQDKVLRFAQQIRLHHFNSSHLEIDDMYTPAYGDFDFDEVKFPNASDMFRRLRDAGFRVTLWVHPFVNYNSSRFGEGVERELFVREPTGRL

SEQ ID NO: 1026664 - protein, 419 aa, Homo sapiens
MLQNPQEKSQAYPRRRRPGCYAYRQNPEAIAAAAMYTFLPDNFSPAKPKPSKELKPLLGSAVLGLLLVLAAVVAWCYYSVSLRKAERLRAELLDLKAGGFSIRNQKGEQVFRLAFRSGALDLDSCSRDGALLGCSLTADGLPLHFFIQTVRPKDTVMCYRVRWEEAAPGRAVEHAMFLGDAAAHWYGGAEMRTQHWPIRLDGQQEPQPFVTSDVYSSDAAFGGILERYWLSSRAAAIKVNDSVPFHLGWNSTERSLRLQARYHDTPYKPPAGRAAAPELSYRVCVGSDVTSIHKYMVRRYFNKPSRVPAPEAFRDPIWSTWALYGRAVDQDKVLRFAQQIRLHHFNSSHLEIDDMYTPAYGDFDFDEVKFPNASDMFRRLRDAGFRVTLWVHPFVNYNSSRFGEGVERELFVREPTGRL

SEQ ID NO: 1026665 - protein, 367 aa, Homo sapiens
MYAGLSLFTAGERGGRCLSVPRPRSLPVLGHLHIFAACRKIIHYTLRIITSQCYSFVTENAKEPENALDKLFSSEQQASILHVLNTASTKELEAFRLLRGRRSINIVEHRENFGPFQNLESLMNVPLFKYKSTVQVCNSILCPKTGREKRKSPENRFLRKLLKPDIERERLKAVNSIISIVFGTRRIAWAHLDRKLTVLDWQQSDRWSLMRGIYSSSVYLEEISSIISKMPKADFYVLEKTGLSIQNSSLFPILLHFHIMEAMLYALLNKTFAQDGQHQVLSMNRNAVGKHFELMIGDSRTSGKELVKQFLFDSILKADPRVFFPSDKIVHYRQMFLSTELQRVEELYDSLLQAIAFYELAVFDSQP

SEQ ID NO: 1026666 - protein, 249 aa, Homo sapiens
RGYVRKNWTLLDSSLEMYAGLSLFTAGERGGRCLSVPRPRSLPVLGHLHIFAACRKIIHYTLRIITSQCYSFVTENAKEPENALDKLFSSEQQASILHVLNTASTKELEAFRLLRGRRSINIVEHRENFGPFQNLESLMNVPLFKYKSTVQVCNSILCPKTGREKRKSPENRFLRKLLKPDIERERLKAVNSIISIVFGTRRIAWAHLDRKLTVLDWQQSDRWSLMRGIYSSSVYLEEVRQLHLQIPTC

SEQ ID NO: 1026667 - protein, 367 aa, Homo sapiens; identical to SEQ ID NO: 1026665

SEQ ID NO: 1026668 - protein, 367 aa, Homo sapiens; identical to SEQ ID NO: 1026665

SEQ ID NO: 1026669 - protein, 367 aa, Homo sapiens; identical to SEQ ID NO: 1026665

SEQ ID NO: 1026670 - protein, 67 aa, Homo sapiens
QLAQGREEHYEEEEEEEEDGAAVAEKSHRRAEMYRHPISRQRSANGFFSSCSNINLPTELWIFNYKN

SEQ ID NO: 1026671 - protein, 381 aa, Homo sapiens
SALEKKGPCDRDYKKFWAGLQGLTIYFYNSNRDFQHVEKLNLGAFEKLTDEIPWGSSRDPGTHFSLILRNQEIKFKVETLECREMWKGFILTVVELRVPTDLTLLPGHLYMMSEVLAKEEARRALETPSCFLKVSRLEAQLLLERYPECGNLLLRPSGDGADGVSVTTRQMHNGTHVVRHYKVKREGPKYVIDVEQPFSCTSLDAVVNYFVSHTKKALVPFLLDEDYEKVLGYVEADKENGENVWVAPSAPGPGPAPCTGGPKPLSPASSQDKLPPLPPLPNQEENYVTPIGDGPAVDYENQDVASSSWPVILKPKKLPKPPAKLPKPPVGPKPEPKVFNGGLGRKLPVSSAQPLLPHSRAGRHDGRATEEAGEKRRALEH

SEQ ID NO: 1026672 - protein, 358 aa, Homo sapiens
SALEKKGPCDRDYKKFWAGLQGLTIYFYNSNRDFQHVEKLNLGAFEKLTDEIPWGSSRDPGTHFSLILRNQEIKFKVETLECREMWKGFILTVVELRVPTDLTLLPGHLYMMSEVLAKEEARRALETPSCFLKVSRLEAQLLLERYPECGNLLLRPSGDGADGVSVTTRQMHNGTHVVRHYKVKREGPKYVIDVEQPFSCTSLDAVVNYFVSHTKKALVPFLLDEDYEKVLGYVEADKENGENVWVAPSAPGPGPAPCTGGPKPLSPASSQDKLPPLPPLPNQEENYVTPIGDGPAVDYENQDVASSSWPVILKPKKLPKPPAKLPKPPVGPKPHSRAGRHDGRATEEAGEKRRALEH

SEQ ID NO: 1026673 - protein, 178 aa, Homo sapiens
RPAQTQTYTWAHTQTHRDTCLSPGMHTDPPANLQVSLYDMGLDSDHVSPSGPAPCTGGPKPLSPASSQDKLPPLPPLPNQEENYVTPIGDGPAVDYENQDVASSSWPVILKPKKLPKPPAKLPKPPVGPKPEPKVFNGGLGRKLPVSSAQPLLPHSRAGRHDGRATEEAGEKRRALEH

SEQ ID NO: 1026674 - protein, 459 aa, Homo sapiens
SALEKKGPCDRDYKKFWAGLQGLTIYFYNSNRDFQHVEKLNLGAFEKLTDEIPWGSSRDPGTHFSLILRNQEIKFKVETLECREMWKGFILTVVELRVPTDLTLLPGHLYMMSEVLAKEEARRALETPSCFLKVSRLEAQLLLERYPECGNLLLRPSGDGADGVSVTTRQMHNGTHVVRHYKVKREGPKYVIDVEQPFSCTSLDAVVNYFVSHTKKALVPFLLDEDYEKVLGYVEADKENGENVWVAPSAPGPGPAPCTGGPKPLSPASSQDKLPPLPPLPNQEENYVTPIGDGPAVDYENQDVASSSWPVILKPKKLPKPPAKLPKPPVGPKPSRDGVSPCCQAGLELLSSSDATHFSLPKCWDYRREPPNLASICRLLQSPKSLMVAWAGSCQSVQPSLFFPTAGLADMTAELQKKLERRGGHWSTDSDTPGTSGLVPGHGQRPDSFSQDKNSDPRE

SEQ ID NO: 1026675 - protein, 416 aa, Homo sapiens
MASALSATPMAQAVWVSCLHTTMRALLGYEWGAMLTAYYRVSSRAGSASGHLPSVVVYDIMLLMRTILCYCGMKLNLGAFEKLTDEIPWGSSRDPGTHFSLILRNQEIKFKVETLECREMWKGFILTVVELRVPTDLTLLPGHLYMMSEVLAKEEARRALETPSCFLKVSRLEAQLLLERYPECGNLLLRPSGDGADGVSVTTRQMHNGTHVVRHYKVKREGPKYVIDVEQPFSCTSLDAVVNYFVSHTKKALVPFLLDEDYEKVLGYVEADKENGENVWVAPSAPGPGPAPCTGGPKPLSPASSQDKLPPLPPLPNQEENYVTPIGDGPAVDYENQDVASSSWPVILKPKKLPKPPAKLPKPPVGPKPEPKVFNGGLGRKLPVSSAQPLLPHSRAGRHDGRATEEAGEKRRALEH

SEQ ID NO: 1026676 - protein, 360 aa, Homo sapiens; identical to SEQ ID NO: 753172

SEQ ID NO: 1026677 - protein, 353 aa, Homo sapiens
MPKFKQRRRKLKAKAERLFKKKEASHFQSKLITPPPPPPSPERVGISSIDISQSRSWLTSSWNFNFPNIRDAIKLWTNRVWSIYSWCQNCITQSLEVLKDTIFPSRICHRELYSVKQQFCILESKLCKLQEALKTISESSSCPSCGQTCHMSGKLTNVPACVLITPGDSKAVLPPTLPQPASHFPPPPPPPPLPPPPPPLAPVLLRKPSLAKALQAGPLKKDGPMQITVKDLLTVKLKKTQSLDEKRKLIPSPKARNPLVTVSDLQHVTLKPNSKVLSTRVTNVLITPGKSQMDLRKLLRKVDVERSPGGTPLTNKENMETGTGLTPVMTQALRRKFQLAHPRSPILLPQPPE

SEQ ID NO: 1026678 - protein, 135 aa, Homo sapiens
  misc_feature (55)..(55): Xaa can be any naturally occurring amino acid
  misc_feature (72)..(73): Xaa can be any naturally occurring amino acid
MSLPFSRRPLLERGEMPSEAVPSLPFHLLPPSFPRTDRSPGRSPLGYVPNLAPAXVGMWMDVCIRERENMCXXCRPRAHTHDKCEGVAVAPCSDLGQFDSALGVCLYSYSCHCNDFTPNCDIFIKCVNKYIKIGK

SEQ ID NO: 1026679 - protein, 363 aa, Homo sapiens
PVSFFDDNLCEPSHISGPILLKHTAFATFPNEKAAIKALTRLHQLKLLGHTLVVEFAKEQDRVHSPCPTSGSEKKKRSDDPVEDDKEKKELGYLTVENGIAPNHGLTFPLNSCLKYMYPPPSSTILANIVNALASVPKFYVQVLHLMNKMNLPTPFGPITARPPMYEDYMPLHAPLPPTSPQPPEEPPLPDEDEELSSEESEYESTDDEDRQRMNKLMELANLQPKRPKTIKQRHVRKKRKIKDMLNTPLCPSHSSLHPVLLPSDVFDQPQPVGNKRIEFHISTDMPAAFKKDLEKEQNCEEKNHDLPATEVDASNIGFGKIFPKPNLDITEEIKEDSDEMPSECISRKEKKKGQNLLEKKCE

SEQ ID NO: 1026680 - protein, 370 aa, Homo sapiens
EPPAEEKEDLLKNFGAQSVRVLSDKGRLKHTAFATFPNEKAAIKALTRLHQLKLLGHTLVVEFAKEQDRVHSPCPTSGSEKKKRSDDPVEDDKEKKELGYLTVENGIAPNHGLTFPLNSCLKYMYPPPSSTILANIVNALASVPKFYVQVLHLMNKMNLPTPFGPITARPPMYEDYMPLHAPLPPTSPQPPEEPPLPDEDEELSSEESEYESTDDEDRQRMNKLMELANLQPKRPKTIKQRHVRKKRKIKDMLNTPLCPSHSSLHPVLLPSDVFDQPQPVGNKRIEFHISTDMPAAFKKDLEKEQNCEEKNHDLPATEVDASNIGFGKIFPKPNLDITEEIKEDSDEMPSECISRKEKKKGQNLLEKKCE

SEQ ID NO: 1026681 - protein, 200 aa, Homo sapiens
VLDSMKRDKNLNGAAAIRRQLARFLLPDEDEELSSEESEYESTDDEDRQRMNKLMELANLQPKRPKTIKQRHVRKKRKIKDMLNTPLCPSHSSLHPVLLPSDVFDQPQPVGNKRIEFHISTDMPAAFKKDLEKEQNCEEKNHDLPATEVDASNIGFGKIFPKPNLDITEEIKEDSDEMPSECISRKEKKKGQNLLEKKCE

SEQ ID NO: 1026682 - protein, 180 aa, Homo sapiens; identical to SEQ ID NO: 831501

SEQ ID NO: 1026683 - protein, 363 aa, Homo sapiens
MLPQNLSGYIWYKRQITYLYHYITSYVLNGQKIIYRPTYNKKKKIYSNSSLLIQNFTQEDAGSYTLHIVKRGDGTGGVTGHFTFTLYLETPKPSISSSNLNPREAMEAVSLTCDPETPDASYLWWMNGQSLPMTHRLQLSKTNRTLFLFGVTKYIAGPYECEIRNPVSASRSDPVTLNLLPKLPKPYITINNLNPRENKDVLNFTCEPKSENYTYIWWLNGQSLPVSPRVKRPIENRILILPSVTRNETGPYQCEIRDRYGGIRSDPVTLNVLYGPDLPRIYPSFTYYRSGENLYLSCFADSNPPAQYSWTINGKFQLSGQKLFIPQITTKHSGLYACSVRNSATGKESSKSITVKVSDWILP

SEQ ID NO: 1026684 - protein, 209 aa, Homo sapiens
MMPYKPSLHEPSGDSSRSDPVTLNLLPKLPKPYITINNLNPRENKDVLNFTCEPKSENYTYIWWLNGQSLPVSPRVKRPIENRILILPSVTRNETGPYQCEIRDRYGGIRSDPVTLNVLYGPDLPRIYPSFTYYRSGENLYLSCFADSNPPAQYSWTINGKFQLSGQKLFIPQITTKHSGLYACSVRNSATGKESSKSITVKVSDWILP

SEQ ID NO: 1026685 - protein, 363 aa, Homo sapiens
MLPQNLSGYIWYKRQITYLYHYITSYVLNGQKIIYRPTYNKKKKIYSNSSLLIQNFTQEDAGSYTLHIVKRGDGTGGVTGHFTFTLYLETPKPSISSSNLNPREAMEAVSLTCDPETPDASYLWWMNGQSLPMTHRLQLSKTNRTLFLFGVTKYIAGPYECEIRNPVSASRSDPVTLNLLPKLPKPYITINNLNPRENKDVLNFTCEPKSENYTYIWWLNGQSLPVSPRVKRPIENRILILPSVTRNETGPYQCEIRDRYGGIRSDPVTLNVLYGPDLPRIYPSFTYYRSGENLYLSCFADSNPPAQYSWTINGKFQLSGQKLFIPQITTKHSGLYACSVRNSATGKESSKSMTVEVSDWTVP

SEQ ID NO: 1026686 - protein, 363 aa, Homo sapiens; identical to SEQ ID NO: 1026685

SEQ ID NO: 1026687 - protein, 244 aa, Homo sapiens
MFTQEDAGSYTLHIVKRGDGTGGVTGHFTFTLYLETPKPSISSSNLNPREAMEAVSLTCDPETPDASYLWWMNGQSLPMTHRLQLSKTNRTLFLFGVTKYIAGPYECEIRNPVSASRSDPVTLNLLPKLPKPYITINNLNPRENKDVLNFTCEPKSENYTYIWWLNGQSLPVSPRVKRPIENRILILPSVTRNETGPYQCEIRDRYGGIRSDPVTLNVLPKLPKPYITINNLNPREIKDREQEK

SEQ ID NO: 1026688 - protein, 363 aa, Homo sapiens; identical to SEQ ID NO: 1026685

SEQ ID NO: 1026689 - protein, 363 aa, Homo sapiens; identical to SEQ ID NO: 1026685

SEQ ID NO: 1026690 - protein, 363 aa, Homo sapiens; identical to SEQ ID NO: 1026683

SEQ ID NO: 1026691 - protein, 363 aa, Homo sapiens; identical to SEQ ID NO: 1026685

SEQ ID NO: 1026692 - protein, 363 aa, Homo sapiens; identical to SEQ ID NO: 1026685

SEQ ID NO: 1026693 - protein, 320 aa, Homo sapiens
MFTQEDAGSYTLHIVKRGDGTGGVTGHFTFTLYLETPKPSISSSNLNPREAMEAVSLTCDPETPDASYLWWMNGQSLPMTHRLQLSKTNRTLFLFGVTKYIAGPYECEIRNPVSASRSDPVTLNLLPKLPKPYITINNLNPRENKDVLNFTCEPKSENYTYIWWLNGQSLPVSPRVKRPIENRILILPSVTRNETGPYQCEIRDRYGGIRSDPVTLNVLYGPDLPRIYPSFTYYRSGENLYLSCFADSNPPAQYSWTINGKFQLSGQKLFIPQITTKHSGLYACSVRNSATGKESSKSMTGQSLCCHSGKKDIFLALIHY

SEQ ID NO: 1026694 - protein, 328 aa, Homo sapiens
MGMNKVEEKKYIKKKNDDIECKKKDEGKYKLKIIKRGDETREEIRHFTFTLYLETPKPYISSSNLNPREAMEAVSLTCDPETPDASYLWWMNGQSLPMTHRLQLSKTNRTLFLFGVTKYIAGPYECEIRNPVSASRSDPVTLNLLPKLPKPYITINNLNPRENKDVLNFTCEPKSENYTYIWWLNGQSLPVSPRVKRPIENRILILPSVTRNETGPYQCEIRDRYGGIRSDPVTLNVLYGPDLPRIYPSFTYYRSGENLYLSCFADSNPPAQYSWTINGKFQLSGQKLFIPQITTKHSGLYACSVRNSATGKESSKSITVKVSDWILP

SEQ ID NO: 1026695 - protein, 186 aa, Homo sapiens
RGSPDDYGGSSDHLATKCEVYKDVLNFTCEPKSENYTYIWWLNGQSLPVSPRVKRPIENRILILPSVTRNETGPYQCEIRDRYGGIRSDPVTLNVLYGPDLPRIYPSFTYYRSGENLYLSCFADSNPPAQYSWTINGKFQLSGQKLFIPQITTKHSGLYACSVRNSATGKESSKSITVKVSDWILP

SEQ ID NO: 1026696 - protein, 363 aa, Homo sapiens; identical to SEQ ID NO: 1026685

SEQ ID NO: 1026697 - protein, 299 aa, Homo sapiens
MMGKEEEIARIARRLDKMVTKKSAEGAMDLLRELKAMPITLHLLQSTRVGMSVNALRKQSSDEEVIALAKSLIKSWKKLLDASDAKARERGRGMPLPTSSRDASEAPDPSRKRPELPRAPSTPRITTFPPVPVTCDAVRNKCREMLTAALQTDHDHVAIGADCERLSAQIEECIFRDVGNTDMKYKNRVRSRISNLKDAKNPDLRRNVLCGAITPQQIAVMTSEEMASDELKEIRKAMTKEAIREHQMARTGGTQTDLFTCGKCRKKNCTYTQVQTRSSDEPMTTFVVCNECGNRWKFC

SEQ ID NO: 1026698 - protein, 143 aa, Homo sapiens
SGGCRGRPRGRGFEPGVCRPRRGCVGCGGCGRWRRPGPGSCPAAEAGATGAGVAAPEAMMGKEEEIARIARRLDKMVTKKSAHLSPATVWSLRLDPLFFWSFRASPASSQPLSSSFTGQPDTCLACGPIFFPVCPHPTRTRFL

SEQ ID NO: 1026699 - protein, 272 aa, Homo sapiens
MDLLRELKAMPITLHLLQSTRVGMSVNALRKQSSDEEVIALAKSLIKSWKKLLDASDAKARERGRGMPLPTSSRDASEAPDPSRKRPELPRAPSTPRITTFPPVPVTCDAVRNKCREMLTAALQTDHDHVAIGADCERLSAQIEECIFRDVGNTDMKYKNRVRSRISNLKDAKNPDLRRNVLCGAITPQQIAVMTSEEMASDELKEIRKAMTKEAIREHQMARTGGTQTDLFTCGKCRKKNCTYTQVQTRSSDEPMTTFVVCNECGNRWKFC

SEQ ID NO: 1026700 - protein, 272 aa, Homo sapiens; identical to SEQ ID NO: 1026699

SEQ ID NO: 1026701 - protein, 272 aa, Homo sapiens; identical to SEQ ID NO: 1026699

SEQ ID NO: 1026702 - protein, 272 aa, Homo sapiens; identical to SEQ ID NO: 1026699

SEQ ID NO: 1026703 - protein, 299 aa, Homo sapiens; identical to SEQ ID NO: 1026697

SEQ ID NO: 1026704 - protein, 503 aa, Homo sapiens
SGGCRVRPRGRGFEPGVCRPRRGCVGCGGCGRWRRPGPGSCPAAEAGATGAGVAAPEAMMGKEEEIARIARRLDKMVTKKSAEGAMDLLRELKAMPITLHLLQSTRVGMSVNALRKQSSDEEVIALAKSLIKSWKKLLDASDAKARERGRGMPLPTSSRDASEAPDPSRKRPELPRAPSTPRITTFPPVPVTCDAVRNKCREMLTAALQTDHDHVAIGADCERLSAQIEEYILWVGAVGLGFWWSQEAAWPGALWWLLDATAQLSRGHLPGWSPAWVVRLSHLRRAPGPAEGLILSACGAQVPWGCSLKLGLSQEWAWGRLGLQPFTSPPGVGGQTDPCVAGQNLSSPHPNMAPSGAGGMVEGSDVVLRWVLKTLARIFRDVGNTDMKYKNRVRSRISNLKDAKNPDLRRNVLCGAITPQQIAVMTSEEMASDELKEIRKAMTKEAIREHQMARTGGTQTDLFTCGKCRKKNCTYTQVQTRSSDEPMTTFVVCNECGNRWKFC

SEQ ID NO: 1026705 - protein, 384 aa, Homo sapiens
SGGCRVRPRGRGFEPGVCRPRRGCVGCGGCGRWRRPGPGSCPAAEAGATGAGVAAPEAMMGKEEEIARIARRLDKMVTKKSAEGAMDLLRELKAMPITLHLLQSTRVGMSVNALRKQSSDEEVIALAKSLIKSWKKLLDASDAKARERGRGMPLPTSSRDASEAPDPSRKRPELPRAPSTPRITTFPPVPVTCDAVRNKCREMLTAALQTDHDHVAIGADCERLSAQIEECIFRDVGNTDMKYKNRVRSRISNLKDAKNPDLRRNVLCGAITPQQIAVMTSEVSPCWRGWRAAPSERWAKPLSRRQEMAKMASDELKEIRKAMTKEAIREHQMARTGGTQTDLFTCGKCRKKNCTYTQVQTRSSDEPMTTFVVCNECGNRWKFC

SEQ ID NO: 1026706 - protein, 445 aa, Homo sapiens
MDLLRELKAMPITLHLLQSTRVGMSVNALRKQSSDEEVIALAKSLIKSWKKLLDASDAKARERGRGMPLPTSSRDASEAPDPSRKRPELPRAPSTPRITTFPPVPVTCDAVRNKCREMLTAALQTDHDHVAIGADCERLSAQIEEYILWVGAVGLGFWWSQEAAWPGALWWLLDATAQLSRGHLPGWSPAWVVRLSHLRRAPGPAEGLILSACGAYVPWGCSLKLGLSQEWAWGRLGLQPFTSPPGVGGQTDPCVAGQNLSSPHPNMAPSGAGGSVEGSDVVLRWVLKTLARIFRDVGNTDMKYKNRVRSRISNLKDAKNPDLRRNVLCGAITPQQIAVMTSEVSPCWRGWRAAPSERWAKPLSRRQEMAKMASDELKEIRKAMTKEAIREHQMARTGGTQTDLFTCGKCRKKNCTYTQVQTRSSDEPMTTFVVCNECGNRWKFC

SEQ ID NO: 1026707 - protein, 100 aa, Homo sapiens
SGGCRGRPRGRGFEPGVCRPRRGCVGCGGCGRWRRPGPGSCPAAEAGATGAGVAAPEAMMGKEEEIARIARRLDKMVTKKSARLSPSVSHSICRRQQFGV

SEQ ID NO: 1026708 - protein, 272 aa, Homo sapiens; identical to SEQ ID NO: 1026699

SEQ ID NO: 1026709 - protein, 272 aa, Homo sapiens; identical to SEQ ID NO: 1026699

SEQ ID NO: 1026710 - protein, 418 aa, Homo sapiens
MDLLRELKAMPITLHLLQSTRVGMSVNALRKQSSDEEVIALAKSLIKSWKKLLDASDAKARERGRGMPLPTSSRDASEAPDPSRKRPELPRAPSTPRITTFPPVPVTCDAVRNKCREMLTAALQTDHDHVAIGADCERLSAQIEEYILWVGAVGLGFWWSQEAAWPGALWWLLDATAQLSRGHLPGWSPAWVVRLSHLRRAPGPAEGLILSACGAYVPWGCSLKLGLSQEWAWGRLGLQPFTSPPGVGGQTDPCVAGQNLSSPHPNMAPSGAGGSVEGSDVVLRWVLKTLARIFRDVGNTDMKYKNRVRSRISNLKDAKNPDLRRNVLCGAITPQQIAVMTSEEMASDELKEIRKAMTKEAIREHQMARTGGTQTDLFTCGKCRKKNCTYTQVQTRSSDEPMTTFVVCNECGNRWKFC

SEQ ID NO: 1026711 - protein, 382 aa, Homo sapiens
SGGCRVRPRGRGFEPGVCRPRRGCVGCGGCGRWRRPGPGSCPAAEAGATGAGVAAPEAMMGKEEEIARIARRLDKMVTKKSAEGAMDLLRELKAMPITLHLLQSTRVGMSVNALRKQSSDEEVIALAKSLIKSWKKLLDASDAKARERGRGMPLPTSSRDASEAPDPSRKRPELPRAPSTPRITTFPPVPVTCDAVRNKCREMLTAALQTDHDHVAIGADCERLSAQIEECIFRDVGNTDMKYKNRVRSRISNLKDAKNPDLRRNVLCGAITPQQIAVMTSEEMASDELKEIRKAMTKEAIREHQMARTGGTQTDLFTCGKCRKKNCTYTQVQTRSSDEPMTTFVVCNECGNRWKVGEQAQAAPPSSILWRWGVSASVGSVV

SEQ ID NO: 1026712 - protein, 124 aa, Homo sapiens
SGGCRGRPRGRGFEPGVCRPRRGCVGCGGCGRWRRPGPGSCPAAEAGATGAGVAAPEAMMGKEEEIARIARRLDKMVTKKSAVRGAGRQDPGNPAPPRPRRARRPPLGPEDDLRGRTRPLPGRD

SEQ ID NO: 1026713 - protein, 299 aa, Homo sapiens; identical to SEQ ID NO: 1026697

SEQ ID NO: 1026714 - protein, 163 aa, Homo sapiens
LQLKPREAKCRMSKFQAVGTACASSEVATGWHMERRAEGLVQQEGGRRENRSLEGEGGDGPQCLLAGRDADSAQGQTKYPTQYTGSSCWCWFFIFSDTESHSVAQAGVQWPDLGSLQPPPPGFKRFSCLSLLSSWDYRRAPPCPANFFIFSRDGFLPCWLGWS

SEQ ID NO: 1026715 - protein, 163 aa, Homo sapiens
MKLNISFPATGCQKLIEVDDERKLRTFYEKRMATEVAADALGEEWKGYVVRISGGNDKQGFPMKQGVLTHGRVRLLLSKGHSCYRPRRTGERKRKSVRGCIVDANLSVLNLVIVKKGEKDIPGLTDTTVPRRLGPKRASRIRKLFNLSKEDDVRQYVVRKPLN

SEQ ID NO: 1026716 - protein, 163 aa, Homo sapiens; identical to SEQ ID NO: 1026715

SEQ ID NO: 1026717 - protein, 215 aa, Homo sapiens
MKLNISFPATGCQKLIEVDDERKLRTFYEKRMATEVAADALGEEWKGYVVRISGGNDKQGFPMKQGVLTHGRVRLLLSKGHSCYRPRRTGERKRKSVRGCIVDANLSVLNLVIVKKGEKDIPGLTDTTVPRRLGPKRASRTGERKRKSVRGCIVDANLSVLNLVIVKKGEKDIPGLTDTTVPRRLGPKRASRIRKLFNLSKEDDVRQYVVRKPLN

SEQ ID NO: 1026718 - protein, 125 aa, Homo sapiens
MKLNISFPATGCQKLIEVDDERKLRTFYEKRMATEVAADALGEEWKGYVVRISGGNDKQGFPMKQGVLTHGRVRLLLSKGHSCYRPRRTGERKRKISSWLHCGCKSERSQLGYCKKRREGYSWTD

SEQ ID NO: 1026719 - protein, 178 aa, Homo sapiens
  misc_feature (87)..(87): Xaa can be any naturally occurring amino acid
MKLNISFPATGCQKLIEVDDERKLRTFYEKRMATEVAADALGEEWKGYVVRISGGNDKQGFPMKQGVLTHGRVPYSEQADTPWSRHXNCLLLSKGHSCYRPRRTGERKRKSVRGCIVDANLSVLNLVIVKKGEKDIPGLTDTTVPRRLGPKRASRIRKLFNLSKEDDVRQYVVRKPLN

SEQ ID NO: 1026720 - protein, 125 aa, Homo sapiens; identical to SEQ ID NO: 1026718

SEQ ID NO: 1026721 - protein, 88 aa, Homo sapiens
  misc_feature (12)..(12): Xaa can be any naturally occurring amino acid
  misc_feature (18)..(18): Xaa can be any naturally occurring amino acid
PACPLLLGKGPXPGDWRXRKSVRGCIVDANLSVLNLVIVKKGEKDIPGLTDTTVPRRLGPKRASRIRKLFNLSKEDDVRQYVVRKPLN

SEQ ID NO: 1026722 - protein, 163 aa, Homo sapiens; identical to SEQ ID NO: 1026715

SEQ ID NO: 1026723 - protein, 163 aa, Homo sapiens; identical to SEQ ID NO: 1026715

SEQ ID NO: 1026724 - protein, 215 aa, Homo sapiens; identical to SEQ ID NO: 1026717

SEQ ID NO: 1026725 - protein, 125 aa, Homo sapiens; identical to SEQ ID NO: 1026718

SEQ ID NO: 1026726 - protein, 427 aa, Homo sapiens
MKLNISFPATGCQKLIEVDDERKLRTFYEKRMATEVAADALGEEWKGYVVRISGGNDKQGFPMKQGVLTHGRVQPCSLQSRGHSLFTSTQGSNWQQQHKQQHIQLQSVAIAGMQNICSDSSNMCVHWSNNKAAARHHIHGTCTCITSPDSQSTSLGAPEDSSVSQHIQQQHCSNHHHHKTSMQSSGADIVGQSNKPVQHNSTGKATPYGTKRPAQQISHSESRDSHTKRWSLPDTKRTAIEAHDSKQQSPKNNITETDGLARLTGLKPEAHTTTRTGTAYRADTPPVQHKGDSRPHEHLTSFGGRCTTFDTTSNARHRQDVRNNTEVAQTHRVKEHSNSAHRDRHRGTRPNQKETNTTTEGGHQNDAAPEPTTNCIVTTQGGPQQNRIGKYESNKKQGTERLINRGVPVAKQLDTATMGPQHTIRST

SEQ ID NO: 1026727 - protein, 283 aa, Homo sapiens
GLFLTIQVLCSALIPLQLQSPWVLASLVGPGSPRPARLPHPALRTPGCPGFAEVLQTFSTCKGMLGEILSAFEFMDAVCMQLVGRHLHLASPVQESPFYVLIETSGSNAGHDAEKLGHFLEHALGSGLVTDGTMATDQRKVKMLWALRERITEALSRDGYVYKYDLSLPVERLYDIVTDLRARLGPHAKHVVGYGHLGDGNLHLNVTAEAFSPSLLAALEPHVYEWTAGQQGSVSAEHGVGFRKRDVLGYSKPPGALQLMQQLKALLDPKGILNPYKTLPSQA

SEQ ID NO: 1026728 - protein, 510 aa, Homo sapiens
GLFLTIQVLCSALIPLQLQSPWVLASLVGPGSPRPARLPHPALRTPGCPGFAEVLQTFSTCKGMLGEILSAFEFMDAVCMQLVGRHLHLASPVQESPFYVLIETSGSNAGHDAEKLGHFLEHALGSGLVTDGTMATDQRKVKGLALTQAGGSDTVAAHCSLDLLGSSNPPASASRVAESTDLHNGSSKQAKATQTTGQICLSPRIWPGSASATSTVCSSSESFLPRGPPAVSLLLHGPPTVSFPPPWATHHVLPSPVAHPPCPCLPPDMPLELPGPCCCPHCLCDSAPPSLPCPTLVQGASRPILILRAFPGPCHSVPCHDLKLQVGASPFRHGCPPSVRCPSRLIAGVPGCSVLSWSLGHSLSGIDSRMLWALRERITEALSRDGYVYKYDLSLPVERLYDIVTDLRARLGPHAKHVVGYGHLGDGNLHLNVTAEAFSPSLLAALEPHVYEWTAGQQGSVSAEHGVGFRKRDVLGYSKPPGALQLMQQLKALLDPKGILNPYKTLPSQA

SEQ ID NO: 1026729 - protein, 769 aa, Homo sapiens
  misc_feature (661)..(661): Xaa can be any naturally occurring amino acid
GLFLTIQVLCSALIPLQLQSPWVLASLVGPGSPRPARLPHPALRTPGCPGFAEVLQTFSTCKGMLGEILSAFEFMDAVCMQLVGRHLHLASPVQESPFYVLIETSGSNAGHDAEKLGHFLEHALGSGLVTDGTMATDQRKVKGLALTQAGGSDTVAAHCSLDLLGSSNPPASASRVAESTDLHNGSSKQAKATQTTGQICLSPRIWPGSASATSTVCSSSESFLPRGPPAVSLLLHGPPTVSFPPPWATHHVLPSPVAHPPCPCLPPDMPLELPGPCCCPHCLCDSAPPSLPCPTLVQGASRPILILRAFPGPCHSVPCHDLKLQVGASPFRHGCPPSVRCPSRLIAGVPGCSVLSWSLGHSLSGIDSRMLWALRERITEALSRDGYVYKYDLSLPVERLYDIVTDLRARLGPHAKHVVGYGHLGERRPGAAALCVLVVGPTVTVTLPGFEAGQFDHGLWLSISPVDTGRTTVSDREGKILIVVMTRFEYFGKDCHRALVMAERMAQLVRTFWDLQWHAGLEGISLNPGVRDAGLRGSSHRARPRGLCSAEPPAALPLQMGGFQNHVQIIFFLQKNHALTCKLLIHRKKMFQSYQFFFSRRSFTLVTQAGVQWRNLGFTELHLLGFTQFSLPSLPSLWDCRRQHQGWLILDLGETGFEAMXGRDGLELLNVGCTGQSGPSQGGTYRRWSPLGRQDNGNRLCEPVKQRLKGPKSTRRDNNDEWQRAHAAKKIRRHRRGQQTHNTPAARMRHRGERAEQHLAKRALRILLQ

SEQ ID NO: 1026730 - protein, 151 aa, Homo sapiens
GDWASCSEWAGIPRKWDKSASSEVAPALYASAATPRHGARVTGLEVLLCHPVQVSAPSLCACETFSLENSSLISTCLCIASLSRPERWARAPSCCSVSGAARLQTPPLSSFPSLHLRVGFPRAAASLVAPTNPGALTYLFEEQRLLSAGKT

SEQ ID NO: 1026731 - protein, 591 aa, Homo sapiens
GLFLTIQVLCSALIPLQLQSPWVLASLVGPGSPRPARLPHPALRTPGCPGFAEVLQTFSTCKGMLGEILSAFEFMDAVCMQLVGRHLHLASPVQESPFYVLIETSGSNAGHDAEKLGHFLEHALGSGLVTDGTMATDQRKVKGLALTQAGGSDTVAAHCSLDLLGSSNPPASASRVAESTDLHNGSSKQAKATQTTGQICLSPRIWPGSASATSTVCSSSESFLPRGPPAVSLLLHGPPTVSFPPPWATHHVLPSPVAHPPCPCLPPDMPLELPGPCCCPHCLCDSAPPSLPCPTLVQGASRPILILRAFPGPCHSVPCHDLKLQVGASPFRHGCPPSVRCPSRLIAGVPGCSVLSWSLGHSLSGIDSRWIGATPGLGHSLSWVRAPPGLGHSLSGVGATPGLGHLLSGVGASPGEDTEHAAALTPCGVPPVPGCRSHSQPLSHLVSSSEMLWALRERITEALSRDGYVYKYDLSLPVERLYDIVTDLRARLGPHAKHVVGYGHLGDGNLHLNVTAEAFSPSLLAALEPHVYEWTAGQQGSVSAEHGVGFRKRDVLGYSKPPGALQLMQQLKALLDPKGILNPYKTLPSQA

SEQ ID NO: 1026732 - protein, 323 aa, Homo sapiens
MPLELPGPCCCPHCLCDSAPPSLPCPTLVQGASRPILILRAFPGPCHSVPCHDLKLQVGASPFRHGCPPSVRCPSRLIAGVPGCSVLSWSLGHSLSGIDSRWIGATPGLGHSLSWVRAPPGLGHSLSGVGATPGLGHLLSGVGASPGEDTEHAAALTPCGVPPVPGCRSHSQPLSHLVSSSEMLWALRERITEALSRDGYVYKYDLSLPVERLYDIVTDLRARLGPHAKHVVGYGHLGDGNLHLNVTAEAFSPSLLAALEPHVYEWTAGQQGSVSAEHGVGFRKRDVLGYSKPPGALQLMQQLKALLDPKGILNPYKTLPSQA

SEQ ID NO: 1026733 - protein, 151 aa, Homo sapiens
SLPDHQVLCSALIPLQLQSPCVLASLVGPGSPRPARLPHPALRTPGCPGFAEVLQTFSTCKGMLGEILSAFEFMDAVCMQLVGRHLHLASPVQESPFYVLIETSGSNAGHDAEKLGHFLEHALGSGLVTDGTMATDQRKVKGLALTQAGVQ

SEQ ID NO: 1026734 - protein, 268 aa, Homo sapiens
  misc_feature (160)..(160): Xaa can be any naturally occurring amino acid
IFTYRRGFALPGQAGLKLLTSGYPPASAPQSAGITVTMPLRPAQRPLQCLAPSCSTPSDGRISNHVQIIFFLQKNHALTCKLLIHRKKMFQSYQFFFSRRSFTLVTQAGVQWRNLGFTELHLLGFTQFSLPSLPSLWDCRRQHQGWLILDLGETGFEAMXGRDGLELLNVGCTGQSGPSQGGTYRRWSPLGRQDNGNRLCEPVKQRLKGPKSTRRDNNDEGNGPMRPKRSGDTDGGSRHTTHQRQECATEERERTASSKTGAPHIAAV

SEQ ID NO: 1026735 - protein, 338 aa, Homo sapiens
PELLSPGFPECSSGQKQSAQIPEEITNGGTISVLREVSPVTNQQKALAHVVYIQPIKLLIFMNAVISVSASFFLDKMATPAVPVSAPPATPTPVPAAAPASVPAPTPAPAAAPVPAAAPASSSDPAAAAAATAAPGQTPASAQAPAQTPAPALPGPALPGPFPGGRVVRLHPVILASIVDSYERRNEGAARVIGTLLGTVDKHSVEVTNCFSVPHNESEDEVAVDMEFAKNMYELHTKVSPNELILGWYATGHDITEHSVLIHEYYSREAPKPIHLTVDTSLQNGRMSIKAYVSTLMGVPGRTMGVMFTPLTVKYAYYDTERIGVDLIMKTCFSPQQR

SEQ ID NO: 1026736 - protein, 378 aa, Homo sapiens
PELLSPGFPECSSGQKQSAQIPEEITNGGTISVLREVSPVTNQQKALAHVVYIQPIKLLIFMNAVISFRLLLSRQDGHTGGTSKCSSGHANPSPGGGPSLSSSANASTGCGSGSRCGSSLILRPCGSSGCNCGSWPDPGLSASSSADPSARSAWSCSSRALPRRPRGQAAPSHFGLHCGQLRETQRGCCPSYRDPVGNCRQTLKWRSPIAFQCRTMSQKMKCVGIQAVPLQFLAVHLLGSPHGPSHTHELELLEPRSFFPFVAVDMEFAKNMYELHTKVSPNELILGWYATGHDITEHSVLIHEYYSREAPKPIHLTVDTSLQNGRMSIKAYVSTLMGVPGRTMGVMFTPLTVKYAYYDTERIGVDLIMKTCFSPQQR

SEQ ID NO: 1026737 - protein, 334 aa, Homo sapiens
PELLSPGFPECSSGQKQSAQIPEEITNGGTISVLREVSPVTNQQKALAHVVYIQPIKLLIFMNAVISFRLLLSRQDGHTGGTSKCSSGHANPSPGGGPSLSSSANASTGCGSGSRCGSSLILRPCGSSGCNCGSWPDPGLSASSSADPSARSAWSCSSRALPRRPRGQAAPSHFGLHCGQLRETQRGCCPSYRDPVGNCRQTLKWRSPIAFQCRTMSQKMKWLLTWNLLRICMNCIQKFLQMSSSWAGKLGRWGLGLMEGLFVIAGVFCYWTGSYTLPFGGKSIASVLLTVSSGSMPVIPAGRLRQEDHLSPVVQDQPEQNSETLSLQKHFLKT

SEQ ID NO: 1026738 - protein, 338 aa, Homo sapiens; identical to SEQ ID NO: 1026735

SEQ ID NO: 1026739 - protein, 132 aa, Homo sapiens
MCRQVCARATRLVGHPRVSLFYFRGALLHARNLLCDPTEGVGDFHVGPRSFTARLHTVTALPRERRGNPVFREEERKSEETQNIEDQGKGPAASGVNSCKSPHFGRAEGTEESMRSGKFETKPGPNSGQRCV

SEQ ID NO: 1026740 - protein, 293 aa, Homo sapiens
MLSSLLLVAVASGYGPPSSRPSSRVVNGEDAVPYSWPWQVSLQYEKSGSFYHTCGGSLIAPDWVVTAGQCISSSWTYQVVLGEYNLGVKEGPEQVIPINIWGPSVCIHSGTASCVACGNDIALIKLSRSCPAGRCQSSFASLPPGGDIAFAKRDIPCYITGWGRLVYQAGQVPDKLQEALLPRWWDYEQLLQVDTWWGTSGEDNHWCVLERDIRIRAANVVTHGRDPPRTWPHSMDWLADTGPLVVKPSIWNTDLLGMHTKARRKGPREFHYEVIRAPSTWNSRKTIRKAHWN

SEQ ID NO: 1026741 - protein, 314 aa, Homo sapiens
MRSCYVAQAGLKLVRSSDPPASASQSTRITASGYGPPSSRPSSRVVNGEDAVPYSWPWQVSLQYEKSGSFYHTCGGSLIAPDWVVTAGQCISSSWTYQVVLGRVQPWCEGGPRRQVIPINIWGPSVCIHSGTASCVACGNDIALIKLSRSCPAGRCQSSFASLPPGGDIAFAKRDIPCYITGWGRLVYQAGQVPDKLQEALLPRWWDYEQLLQVDTWWGTSGEDNHWCVLERDIRIRAANVVTHGRDPPRTWPHSMDWLADTGPLVVKPSIWNTDLLGMHTKARRKGPREFHYEVIRAPSTWNSRKTIRKAHWN

SEQ ID NO: 1026742 - protein, 209 aa, Homo sapiens
CGRRIPMERGGGGSGTGSRPEGTARGTSLPGKIAEPGAVRTSQPNYRPQGMEGFLKSDERQRLAKERREEREKCLAAREQQILEKQKRARLQYEKQMEERWRKLEEQRQREDQKRAAVEEKRKQKLREEEERLEAMMRRSLERTQQLELKKKYSWGAPLAIGPGGHDGESEQYPKPTASEVEAGQDHIHYRTAGDHMADSCAKYTQRHS

SEQ ID NO: 1026743 - protein, 738 aa, Homo sapiens
CGRRIPMERGGGGSGTGSRPEGTARGTSLPGKIAEPGAVRTSQPNYRPQGMEGFLKSDERQRLAKERREEREKCLAAREQQILEKQKRARLQYEKQMEERWRKLEEQRQREDQKRAAVEEKRKQKLREEEERLEAMMRRSLERTQQLELKKKYSWGAPLAIGPGGHDACDKLSTSTMSLPKPTEPPMNKRLSSSTVAISYSPDRVFHVCPRLAPLGPLNPSYKSSPTRNIEKKKATSTSTSGAGDVGKEALSGGEASLVEKVKRGQRTATSLPVVNFGSPLRRCEFSGGIPKRPSSPVISKTATKAYPQSPKTTKPPYPGSPVKYRLPALSGQDMPKRKAEKEKSNKEREGTLAQQAAGPQGEEALEKHVVDKHASEKHAAAAGGKAENSAALGKPTAGTTDAGEAAKILAEKRRQARLQKEQEEQERLEKEEQDRLEREELKRKAEEERLRLEEEARKQEEERKRQEEEKKKQEGEEKRKAGEEAKRKAEEELLLKEKQEQEKQEKAMIEKQKEAAETKAREVAEQMRLEREQIMLQIEQERLERKKRIDEIMKRTRKSDVPPQVKKEDPKVGVQPAVCVEKKTKLVVPNKMEINGLNTCQEVNGVDHAAPETYPQDIFSNGLKPAGGLIHLDALDGKSNSLDDSTEEVQSMDVSPVSKEELISIPEFSPVSEMIPGVSLDQNGTGNARALQDLLDFTGPPTFPKRSSENLSLDDCNKNLIEGFNSPGQETPLNTFC

SEQ ID NO: 1026744 - protein, 730 aa, Homo sapiens
CGRRIPMERGGGGSGTGSRPEGTARGTSLPGKIAEPGAVRTSQPNYRPQGMEGFLKSDERQRLAKERREEREKCLAAREQQILEKQKRARLQYEKQMEERWRKLEEQRQREDQKRAAVEEKRKQKLREEEERLEAMMRRSLERTQQLELKKKYSWGAPLAIGPGGHDACDKLSTSTMSLPKPTEPPMNKRLSSSTVAISYSPDRAPLGPLNPSYKSSPTRNIEKKKATSTSTSGAGDVGKEALSGGEASLVEKVKRGQRTATSLPVVNFGSPLRRCEFSGGIPKRPSSPVISKTATKAYPQSPKTTKPPYPGSPVKYRLPALSGQDMPKRKAEKEKSNKEREGTLAQQAAGPQGEEALEKHVVDKHASEKHAAAAGGKAENSAALGKPTAGTTDAGEAAKILAEKRRQARLQKEQEEQERLEKEEQDRLEREELKRKAEEERLRLEEEARKQEEERKRQEEEKKKQEGEEKRKAGEEAKRKAEEELLLKEKQEQEKQEKAMIEKQKEAAETKAREVAEQMRLEREQIMLQIEQERLERKKRIDEIMKRTRKSDVPPQVKKEDPKVGVQPAVCVEKKTKLVVPNKMEINGLNTCQEVNGVDHAAPETYPQDIFSNGLKPAGGLIHLDALDGKSNSLDDSTEEVQSMDVSPVSKEELISIPEFSPVSEMIPGVSLDQNGTGNARALQDLLDFTGPPTFPKRSSENLSLDDCNKNLIEGFNSPGQETPLNTFC

SEQ ID NO: 1026745 - protein, 738 aa, Homo sapiens; identical to SEQ ID NO: 1026743

SEQ ID NO: 1026746 - protein, 543 aa, Homo sapiens
MLSGQANDSVFHVCPRLAPLGPLNPSYKSSPTRNIEKKKATSTSTSGAGDVGKEALSGGEASLVEKVKRGQRTATSLPVVNFGSPLRRCEFSGGIPKRPSSPVISKTATKAYPQSPKTTKPPYPGSPVKYRLPALSGQDMPKRKAEKEKSNKEREGTLAQQAAGPQGEEALEKHVVDKHASEKHAAAAGGKAENSAALGKPTAGTTDAGEAAKILAEKRRQARLQKEQEEQERLEKEEQDRLEREELKRKAEEERLRLEEEARKQEEERKRQEEEKKKQEGEEKRKAGEEAKRKAEEELLLKEKQEQEKQEKAMIEKQKEAAETKAREVAEQMRLEREQIMLQIEQERLERKKRIDEIMKRTRKSDVPPQVKKEDPKVGVQPAVCVEKKTKLVVPNKMEINGLNTCQEVNGVDHAAPETYPQDIFSNGLKPAGGLIHLDALDGKSNSLDDSTEEVQSMDVSPVSKEELISIPEFSPVSEMIPGVSLDQNGTGNARALQDLLDFTGPPTFPKRSSENLSLDDCNKNLIEGFNSPGQETPLNTFC

SEQ ID NO: 1026747 - protein, 242 aa, Homo sapiens
MLSGQANDSVFHVCPRLAPLGPLNPSYKSSPTRNIEKKKATSTSTSGAGDVGKEALSGGEASLVEKVKRGQRTATSLPVVNFGSPLRRCEFSGGIPKRPSSPVISKTATKAYPQSPKTTKPPYPGSPVKYRLPALSGQDMPKRKAEKEKSNKEREGTLAQQAAGPQGEEALEKHVVDKHASEKHAAAAGGKAENSAALGKPTAGTTDAGEAAKILAEKRRQARLQKEQEEQERLEKEEQDRM

SEQ ID NO: 1026748 - protein, 407 aa, Homo sapiens
  misc_feature (353)..(353): Xaa can be any naturally occurring amino acid
  misc_feature (356)..(357): Xaa can be any naturally occurring amino acid
  misc_feature (361)..(363): Xaa can be any naturally occurring amino acid
  misc_feature (368)..(368): Xaa can be any naturally occurring amino acid
  misc_feature (373)..(373): Xaa can be any naturally occurring amino acid
  misc_feature (377)..(378): Xaa can be any naturally occurring amino acid
MPRAPLPCACGAACPGCGSCRDSVDFSLADAINTEFKNTRTNEKVELQELNDRFANYIDKVRFLEQQNKILLAELEQLKGQGKSRLGDLYEEEMRELRRQVDQLTNDKARVEVERDNLAEDIMRLREKLQEEMLQREEAENTLQSFRQDVDNASLARLDLERQSGIFAKEEIAFLKKLHEEEIQELQAQIQEQHVQIDVDVSKPDLTAALRDVRQQYESVAAKNLQEAEEWYKSKFADLSEAANRNNDALRQAKQESTEYRRQVQSLTCEVDALKGTNESLERQMREMEENFAVEAANYQDTIGRLQDEIQNMKEEMARHLREYQDLLNVKMALDIEIATYRKLLEGEESRRXPRXXGGAXXXGGGGXGEGGXGGGXXGKRTLLIKTVETRDGQVINETSQHHDDLE

SEQ ID NO: 1026749 - protein, 207 aa, Homo sapiens
MPRAPLPCACGAACPGCGSCRDSVDFSLADAINTEFKNTRTNEKVELQELNDRFANYIDKVRFLEQQNKILLAELEQLKGQGKSRLGDLYEEEMRELRRQVDQLTNDKARVEVERDNLAEDIMRLREKLQEEMLQREEAENTLQSFRQDVDNASLARLDLERQSGIFAEENPFWNLHAEESRTSSSDQDTCPIDVMFQLTQAASYVV

SEQ ID NO: 1026750 - protein, 515 aa, Homo sapiens
  misc_feature (38)..(38): Xaa can be any naturally occurring amino acid
  misc_feature (41)..(41): Xaa can be any naturally occurring amino acid
  misc_feature (43)..(44): Xaa can be any naturally occurring amino acid
  misc_feature (46)..(46): Xaa can be any naturally occurring amino acid
  misc_feature (48)..(48): Xaa can be any naturally occurring amino acid
  misc_feature (50)..(50): Xaa can be any naturally occurring amino acid
  misc_feature (52)..(52): Xaa can be any naturally occurring amino acid
  misc_feature (56)..(56): Xaa can be any naturally occurring amino acid
  misc_feature (59)..(61): Xaa can be any naturally occurring amino acid
  misc_feature (63)..(63): Xaa can be any naturally occurring amino acid
  misc_feature (91)..(91): Xaa can be any naturally occurring amino acid
  misc_feature (104)..(104): Xaa can be any naturally occurring amino acid
  misc_feature (111)..(112): Xaa can be any naturally occurring amino acid
  misc_feature (123)..(123): Xaa can be any naturally occurring amino acid
  misc_feature (132)..(132): Xaa can be any naturally occurring amino acid
  misc_feature (134)..(134): Xaa can be any naturally occurring amino acid
  misc_feature (141)..(141): Xaa can be any naturally occurring amino acid
  misc_feature (148)..(148): Xaa can be any naturally occurring amino acid
TRGLSLRGPRARDAAALPPPTPTAPSFASSPGASPREXGGXGXXGXSXAXVXEGGXEVXXXEXLGGGGRRGGGEGEGGGGEGGGGGGGGGXGGGREGEGERVGXGGGGGVXXGGVWGGGGGGXAGGEGGEEXGXLGVGGGXRGEVGRXGGEEKVELQELNDRFANYIDKVRFLEQQNKILLAELEQLKGQGKSRLGDLYEEEMRELRRQVDQLTNDKARVEVERDNLAEDIMRLREKLQEEMLQREEAENTLQSFRQDVDNASLARLDLERQVESLPEEIAFLKKLHEEEIQELQAQIQEQHVQIDVDVSKPDLTAALRDVRQQYESVAAKNLQEAEEWYKSKFADLSEAANRNNDALRQAKQESTEYRRQVQSLTCEVDALKGTNESLERQMREMEENFAVEAANYQDTIGRLQDEIQNMKEEMARHLREYQDLLNVKMALDIEIATYRKLLEGEESRISLPLPNFSSLNLRETNLDSLPLVDTHSKRTLLIKTVETRDGQVINETSQHHDDLE

SEQ ID NO: 1026751 - protein, 407 aa, Homo sapiens
MPRAPLPCACGAACPGCGSCRDSVDFSLADAINTEFKNTRTNEKVELQELNDRFANYIDKVRFLEQQNKILLAELEQLKGQGKSRLGDLYEEEMRELRRQVDQLTNDKARVEVERDNLAEDIMRLREKLQEEMLQREEAENTLQSFRQDVDNASLARLDLERQSGIFAKEEIAFLKKLHEEEIQELQAQIQEQHVQIDVDVSKPDLTAALRDVRQQYESVAAKNLQEAEEWYKSKFADLSEAANRNNDALRQAKQESTEYRRQVQSLTCEVDALKGTNESLERQMREMEENFAVEAANYQDTIGRLQDEIQNMKEEMARHLREYQDLLNVKMALDIEIATYRKLLEGEESRISLPLPNFSSLNLRETNLDSLPLVDTHSKRTLLIKTVETRDGQVINETSQHHDDLE

SEQ ID NO: 1026752 - protein, 407 aa, Homo sapiens; identical to SEQ ID NO: 1026751

SEQ ID NO: 1026753 - protein, 407 aa, Homo sapiens; identical to SEQ ID NO: 1026751

SEQ ID NO: 1026754 - protein, 174 aa, Homo sapiens
MPRAPLPCACGAACPGCGSCRDSVDFSLADAINTEFKNTRTNEKVELQELNDRFANYIDKVRFLEQQNKILLAELEQLKGQGKSRLGDLYEEEMRELRRQVDQLTNDKARVEVERDNLAEDIMRLREKLQEEMLQREEAENTLQSFRQDVDNASLARLDLERQSGIFAKKRLPF

SEQ ID NO: 1026755 - protein, 137 aa, Homo sapiens
MATITITNTILASLEPLSSFCGANGGGCVGSLWGLPLGSSAWLRLGVLWEPVAKGLWSQCRGGPGFSTVESIDDYVNVPESGESAEASLDGSREYVNVSQELHPGAAKTEPAALSSQEAEEVEEEGAPDYENLQELN

SEQ ID NO: 1026756 - protein, 233 aa, Homo sapiens
MEEAILVPCVLGLLLLPILAMLMALCVHCHRLPGSYDSTSSDSLYPRGIQFKRPHTVAPWPPAYPPVTSYPPLSQPDLLPIPRSPQPLGGSHRTPSSRRDSDGANSVASYENEEPACEDADEDEDDYHNPGYLVVLPDSTPATSTAAPSAPALSTPGIRDSAFSMESIDDYVNVPESGESAEASLDGSREYVNVSQELHPGAAKTEPAALSSQEAEEVEEEGAPDYENLQELN

SEQ ID NO: 1026757 - protein, 233 aa, Homo sapiens; identical to SEQ ID NO: 1026756

SEQ ID NO: 1026758 - protein, 233 aa, Homo sapiens; identical to SEQ ID NO: 1026756

SEQ ID NO: 1026759 - protein, 288 aa, Homo sapiens
  misc_feature (83)..(83): Xaa can be any naturally occurring amino acid
  misc_feature (106)..(106): Xaa can be any naturally occurring amino acid
MEEAILVPCVLGLLLLPILAMLMALCVHCHRLPGSYDSTSSDSLYPRGIQFKRPHTVAPWPPAYPPVTSYPPLSQPDLLPIPXVAAQPLPLQSSAPPPPNSTLYPXTFLDWGPLSLLQLLLPPEPHLRHDPWPLTPRRSPQPLGGSHRTPSSRRDSDGANSVASYENEEPACEDADEDEDDYHNPGYLVVLPDSTPATSTAAPSAPALSTPGIRDSAFSMESIDDYVNVPESGESAEASLDGSREYVNVSQELHPGAAKTEPAALSSQEAEEVEEEGAPDYENLQELN

SEQ ID NO: 1026760 - protein, 245 aa, Homo sapiens
AGGREGGHGEAGAEEGQVGLGRRGNWIPRLQPRPWSDHPGSRDFPQSAGRTLSPVKEGTHPGSPGEGTAASSRAPLPPGAYLPPAPCRVRSSPHLHLALTLPLRGLGVQPACSPSQDPRSPLGAPQPACEDADEDEDDYHNPGYLVVLPDSTPATSTAAPSAPALSTPGIRDSAFSMESIDDYVNVPESGESAEASLDGSREYVNVSQELHPGAAKTEPAALSSQEAEEVEEEGAPDYENLQELN

SEQ ID NO: 1026761 - protein, 165 aa, Homo sapiens
MEEAILVPCVLGLLLLPILAMLMALCVHCHRLPGSYDSTSSDSLYPRGIQFKRPHTVAPWPPAYPPVTSYPPLSQPDLLPIPRSPQPLGGSHRTPSSRRDSDGANSVASYENEEPACEDADEDEDDYHNPGYLVVLPDSTPATSTAELRACGGRVCPGTRLAWDG

SEQ ID NO: 1026762 - protein, 187 aa, Homo sapiens [sequence omitted]

SEQ ID NO: 1026763 - protein, 353 aa, Homo sapiens
  misc_feature (148)..(148): Xaa can be any naturally occurring amino acid
  misc_feature (171)..(171): Xaa can be any naturally occurring amino acid
MEEAILVPCVLGLLLLPILAMLMALCVHCHRLPGEWETGGGTQGPGTPTGSSSTPSPCVCPGSVPASVLIPAPLRVPGSQHLLPYAPPVPSSPALSFPGSYDSTSSDSLYPRGIQFKRPHTVAPWPPAYPPVTSYPPLSQPDLLPIPXVAAQPLPLQSSAPPPPNSTLYPXTFLDWGPLSLLQLLLPPEPHLRHDPWPLTPRRSPQPLGGSHRTPSSRRDSDGANSVASYENEEPACEDADEDEDDYHNPGYLVVLPDSTPATSTAAPSAPALSTPGIRDSAFSMESIDDYVNVPESGESAEASLDGSREYVNVSQELHPGAAKTEPAALSSQEAEEVEEEGAPDYENLQELN

SEQ ID NO: 1026764 - protein, 66 aa, Homo sapiens
GSPGAEGPRIDMILKVIVMVQGAGADRGSSASGRGAVRKHHQVAWVVIVVLILIRILTWRPALAPA

SEQ ID NO: 1026765 - protein, 262 aa, Homo sapiens
MEEAILVPCVLGLLLLPILAMLMALCVHCHRLPGSYDSTSSDSLYPRGIQFKRPHTVAPWPPAYPPVTSYPPLSQPDLLPIPRSPQPLGGSHRTPSSRRDSDGANSVASYENEGASGIRGAQAGWGVWGPSWTRLTPVSLPPEPACEDADEDEDDYHNPGYLVVLPDSTPATSTAAPSAPALSTPGIRDSAFSMESIDDYVNVPESGESAEASLDGSREYVNVSQELHPGAAKTEPAALSSQEAEEVEEEGAPDYENLQELN

SEQ ID NO: 1026766 - protein, 233 aa, Homo sapiens; identical to SEQ ID NO: 1026756

SEQ ID NO: 1026767 - protein, 221 aa, Homo sapiens
MRENNLAAESHSPPLYPPPRGGTQHLSGDDTFPLTLGRRPTHGGATREGVGFFSPREGHSLGAKVGPLYIHSRGDSGDLSRVRSTHSRGFPSIREETHHPTRNFGHVCPHLHTPTISRYITPQCVKNSPPNTLYLNAYTSTKRKKAAGKAHEHPRKGEESFLNTTEKKRRNNEEITEQRKIDQKAVDSQILPKIKAIPQLQGYLRSVFALTNGIYPHKLVF

SEQ ID NO: 1026768 - protein, 177 aa, Homo sapiens
MPRYYPTEDVPRKLLSHGKKPFSQHVRKLRASITPGTILIILTGRHRGKRVVFLKQLASGLLLVTGPLVLNRVPLRRTHQKFVIATSTKIDISNVKIPKHLTDAYFKKKKLRKPRHQEGEIFDTEKEKYEITEQRKIDQKAVDSQILPKIKAIPQLQGYLRSVFALTNGIYPHKLVF

SEQ ID NO: 1026769 - protein, 177 aa, Homo sapiens; identical to SEQ ID NO: 1026768

SEQ ID NO: 1026770 - protein, 177 aa, Homo sapiens
  misc_feature (107)..(110): Xaa can be any naturally occurring amino acid
MPRYYPTEDVPRKLLSHGKKPFSQHVRKLRASITPGTILIILTGRHRGKRVVFLKQLASGLLLVTGPLVLNRVPLRRTHQKFVIATSTKIDISNVKIPQEKKENPIXXXXNILLMLTSRRRSCGSPDTRKVRSSTQKKRNMRLRSSARLIRKLWTHKFYQKSKLFLSSRATCDLCLL

SEQ ID NO: 1026771 - protein, 105 aa, Homo sapiens
FSFPSCKMAGEKVEKPDTKEKKPEAKKVDAGGKVKKGNLKAKKPKKGKPHCSRNPVLVRGIGRYSRSAMYSRKAMYKRKYSAAKSKVEKNKEGEGSRNCYKTSWW

SEQ ID NO: 1026772 - protein, 335 aa, Homo sapiens
  misc_feature (75)..(75): Xaa can be any naturally occurring amino acid
FSFPSCKMAGEKVEKPDTKEKKPEAKKVDAGGKVKKGNLKAKKPKKGKPHCSRNPVLVRGIGRYSRSAPPKFGLXFPYKKKEDKGPSLGFTRGSTQPLNPRLKRTKKEKVLATVTKPVGGDKNGGTGFKTPPPGGGLWRVVKLRKMPRYYPTEDVPRKLLSHGKKPFSQHVRKLRASITPGTILIILTGRHRGKRVVFLKQLASGLLLVTWGTPSLGGFPPFHGPLVLNRVPLRRTHQKFVIATSTKIDISNVKIPKHLTDAYFKKKKLRKPRHQEGEIFDTEKEKYEITEQRKIDQKAVDSQILPKIKAIPQLQGYLRSVFALTNGIYPHKLVF

SEQ ID NO: 1026773 - protein, 177 aa, Homo sapiens; identical to SEQ ID NO: 1026768

SEQ ID NO: 1026774 - protein, 100 aa, Homo sapiens
NTKNMTMKLHWKYEISNSKVQKHLTDAYFKKKKLRKPRHQEGEIFDTEKEKYEITEQRKIDQKAVDSQILPKIKAIPQLQGYLRSVFALTNGIYPHKLVF

SEQ ID NO: 1026775 - protein, 177 aa, Homo sapiens; identical to SEQ ID NO: 1026768

SEQ ID NO: 1026776 - protein, 105 aa, Homo sapiens; identical to SEQ ID NO: 1026771

SEQ ID NO: 1026777 - protein, 338 aa, Homo sapiens
  misc_feature (84)..(84): Xaa can be any naturally occurring amino acid
FSFPSCKMAGEKVEKPDTKEKKPEAKKVDAGGKVKKGNLKAKKPKKGKPHCSRNPVLVRGIGRYSRSAMYSRKAMSLSRTRSHXSRSNPTGRIRARKHRHEGVSTTPELTNRPDIALRWIIGNRERSTPCVALRDLSSDTIALKIYMPTGKDVALWTMLYDANVRIENALSARASGEEELCRMLEQLNPSVEPEFVNPSLHCERSTGWQGGVVFLKQLASGLLLVTGPLVLNRVPLRRTHQKFVIATSTKIDISNVKIPKHLTDAYFKKKKLRKPRHQEGEIFDTEKEKYEITEQRKIDQKAVDSQILPKIKAIPQLQGYLRSVFALTNGIYPHKLVF

SEQ ID NO: 1026778 - protein, 136 aa, Homo sapiens
AGRLSHLQAAYGRRAPSVPSVAVWPEWVPSSPTLVLAQTLWQDVWGLTQQERVQAGQAVHLDPHLPREHPTLVFDVALSPSPCKVPFCHPKKTTPTSSFPLLSIPEAGAAKFILGKPQNWSIWCRGTSSLLPSPDQ

SEQ ID NO: 1026779 - protein, 23 aa, Homo sapiens
METSEGPGLESTGSYLGIQQRSP

SEQ ID NO: 1026780 - protein, 23 aa, Homo sapiens
METSEGPGLESTGSYLGIQQRSP

SEQ ID NO: 1026781 - protein, 23 aa, Homo sapiens
METSEGPGLESTGSYLGIQQRSP

SEQ ID NO: 1026782 - protein, 23 aa, Homo sapiens
METSEGPGLESTGSYLGIQQRSP

SEQ ID NO: 1026783 - protein, 23 aa, Homo sapiens
METSEGPGLESTGSYLGIQQRSP

SEQ ID NO: 1026784 - protein, 23 aa, Homo sapiens
METSEGPGLESTGSYLGIQQRSP

SEQ ID NO: 1026785 - protein, 177 aa, Homo sapiens
IQPFPLHPITRQRQFRTTTYIRQPDDILTLIPSNSSSSAKRYKAAFTECCQAADKAACLLPKLDELRDEGKASSAKQRLKCASLQKFGERAFKAWAVARLSQRFPKAEFAEVSKLVTDLTKVHTECCHGDLLECADDRADLAKYICENQDSISSKLKECCEKPLLEKSHLNAEMPEE

SEQ ID NO: 1026786 - protein, 341 aa, Homo sapiens
  misc_feature (1)..(1): Xaa can be any naturally occurring amino acid
XPFHCCRSASFSLLSTPHAFGTMKWVTFISLLFLFSSAYSRGVFRRDAHKSEVAHRFKDLGEENFKALVLIAFAQYLQQCPFEDHVKLVNEVTEFAKTCVADESAENCDKSLHTLFGDKLCTVATLRETYGEMADCCAKQEPERNECFLQHKDDNPNLPRLVRPEVDVMCTAFHDNEETFLKKYLYEIARRHPYFYAPELLFFAKRYKAAFTECCQAADKAACLLPKLDELRDEGKASSAKQRLKCASLQKFGERAFKAWAVARLSQRFPKAEFAEVSKLVTDLTKVHTECCHGDLLECADDRADLAKYICENQDLNFIYTVSLENIIIGIIGLYLPKLFV

SEQ ID NO: 1026787 - protein, 589 aa, Homo sapiens
RPLFVFFLSSCGEFRTRSTPHAFGTMKWVTFISLLFLFSSAYSRGVFRRDAHKSEVAHRFKDLGEENFKALVLIAFAQYLQQCPFEDHVKLVNEVTEFAKTCVADESAENCDKSLHTLFGDKLCTVATLRETYGEMADCCAKQEPERNECFLQHKDDNPNLPRLVRPEVDVMCTAFHDNEETFLKKYLYEIARRHPYFYAPELLFFAKRYKAAFTECCQAADKAACLLPKLDELRDEGKASSAKQRLKCASLQKFGERAFKAWAVARLSQRFPKAEFAEVSKLVTDLTKVHTECCHGDLLECADDRADLAKYICENQDSISSKLKECCEKPLLEKSHCIAEVENDEMPADLASLAADFVESKDVCENYAEAQDVFLGMFLYEYARRHSEYSVVLLLRLAKTYETTLEKCCAAADTHECYAKEFDEFKPLVEEPQNLIKQNCELFEQLGECKFQNALLVRYTKKVPQVSTSTLVEVSRNLGKVGANVETFWSKKMACAQDYLFVGLDQICVLPEKTPRSDRVTKCCTEYFVNTRTCFSDLEVDETYASQESNAETFTFHADICTLSVKGRHILKHTALVELVKHKRQATC

SEQ ID NO: 1026788 - protein, 217 aa, Homo sapiens
MKRHFHPYFYAPELLFFAKRYKAAFTECCQAADKAACLLPKLDELRDEGKASSAKQRLKCASLQKFGERAFKAWAVARLSQRFPKAEFAEVSKLVTDLTKVHTECCHGDLLECADDRADLAKYICENQDSISSKLKECCEKPLLEKSHCIAEVENDEMPADLASLAADFVESKDVCENYAEAQDVFLGMFLYEYARRHSEYSVVLLLRLAKTYETTL

SEQ ID NO: 1026789 - protein, 382 aa, Homo sapiens
MKLPEDILTFMPRNSFSLLKGIKLLLQNVAKLLIKLPACCQSSMNFGMKGRLRLPNRDSSVPVSFPKAEFAEVSKLVTDLTKVHTECCHGDLLECADDRADLAKYICENQDSISSKLKECCEKPLLEKSHCIAEVENDEMPADLASLAADFVESKDVCENYAEAQDVFLGMFLYEYARRHSEYSVVLLLRLAKTYETTLEKCCAAADTHECYAKEFDEFKPLVEEPQNLIKQNCELFEQLGECKFQNALLVRYTKKVPQVSTSTLVEVSRNLEKWAANVETFWSKKMACAQDYLFVGLDQICVLPEKTPRSDRVTKCCTEYFVNTRTCFSDLEVDETYASQESNAETFTFHADICTLSVKGRHILKHTALVELVKHKRQATC

SEQ ID NO: 1026790 - protein, 387 aa, Homo sapiens
MKRHFKRYKAAFTECCQAADKAACLLPKLDELRDEGKASSAKQRLKCASLQKFGERAFKAWAVARLSQRFPKAEFAEVSKLVTDLTKVHTECCHGDLLECADDRADLAKYICENQDSISSKLKECCEKPLLEKSHCIAEVENDEMPADLASLAADFVESKDVCENYAEAQDVFLGMFLYEYARRHSEYSVVLLLRLAKTYETTLEKCCAAADTHECYAKEFDEFKPLVEEPQNLIKQNCELFEQLGECKFQNALLVRYTKKVPQVSTSTLVEVSRNLGKVGANVETFWSKKMACAQDYLFVVLDQICVLPEKTPRSDRVTKCCTEYFVNTRTCFSDLEVDETYASQESNAETFTFHADICTLSVKGRHILKHTALVELVKHKRQATC

SEQ ID NO: 1026791 - protein, 586 aa, Homo sapiens
  misc_feature (1)..(1): Xaa can be any naturally occurring amino acid
XPFHCCRSASFSLLSTPHAFGTMKWVTFISLLFLFSSAYSRGVFRRDAHKSEVAHRFKDLGEENFKALVLIAFAQYLQQCPFEDHVKLVNEVTEFAKTCVADESAENCDKSLHTLFGDKLCTVATLRETYGEMADCCAKQEPERNECFLQHKDDNPNLPRLVRPEVDVMCTAFHDNEETFLKKYLYEIARRHPYFYAPELLFFAKRYKAAFTECCQAADKAACLLPKLDELRDEGKASSAKQRLKCASLQKFGERAFKAWAVARLSQRFPKAEFAEVSKLVTDLTKVHTECCHGDLLECADDRADLAKYICENQDSISSKLKECCEKPLLEKSHCIAEVENDEMPADLASLAADFVESKDVCENYAEAQDVFLGMFLYEYARRHSEYSVVLLLRLAKTYETTLEKCCAAADTHECYAKVFDEFKPLVEEPQNLIKQNCELFEQLGEYKFQNALLVRYTKKVPQVSTSTLVEVSRNLGKVGANVETFWSKKMACAQDYLFVGLDHLCVLPEKTPRSDRVTKCCTEYFVNTRTCFSDLEVDETYASQESNAETFTFHADICTLSVKGRHILKHTALVELVKHKRQATC

SEQ ID NO: 1026792 - protein, 373 aa, Homo sapiens
  misc_feature (1)..(1): Xaa can be any naturally occurring amino acid
XPFHCCRSASFSLLSTPHAFGTMKWVTFISLLFLFSSAYSRGVFRRDAHKSEVAHRFKDLGEENFKALVLIAFAQYLQQCPFEDHVKLVNEVTEFAKTCVADESAENCDKSLHTLFGDKLCTVATLRETYGEMADCCAKQEPERNECFLQHKDDNPNLPRLVRPEVDVMCTAFHDNEETFLKKYLYEIARRHPYFYAPELLFFAKRYKAAFTECCQAADKAACLLPKLDELRDEGKASSAKQRLKCASLQKFGERAFKAWAVARLSQRFPKAEFAEVSKLVTDLTKVHTECCHGDLLECADDRADLAKYICENQDSISSKLKECCEKPLLEKSHCIAEVENDEMPADLASLAADFVESKDVCEGILSTLSCCC

SEQ ID NO: 1026793 - protein, 253 aa, Homo sapiens
  misc_feature (1)..(1): Xaa can be any naturally occurring amino acid
XPFHCCRSASFSLLSTPHAFGTMKWVTFISLLFLFSSAYSRGVFRRDAHKSEVAHRFKDLGEENFKALVLIAFAQYLQQCPFEDHVKLVNEVTEFAKTCVADESAENCDKSLHTLFGDKLCTVATLRETYGEMADCCAKQEPERNECFLQHKDDNPNLPRLVRPEVDVMCTAFHDNEETFLKKYLYEIARRHPYFYAPELLFFAKRYKAAFTECCQAADKAACLLPKLDELRDEGKASSAKQRLKCASLISQS

SEQ ID NO: 1026794 - protein, 528 aa, Homo sapiens
  misc_feature (1)..(1): Xaa can be any naturally occurring amino acid
XPFHCCRSASFSLLSTPHAFGTMKWVTFISLLFLFSSAYSRGVFRRDAHKSEVAHRFKDLGEENFKALVLIAFAQYLQQCPFEDHVKLVNEVTEFAKTCVADESAENCDKSLHTLFGDKLCTVATLRETYGEMADCCAKQEPERNECFLQHKDDNPNLPRLVRPEVDVMCTAFHDNEETFLKKYLYEIARRQKFGERAFKAWAVARLSQRFPKAEFAEVSKLVTDLTKVHTECCHGDLLECADDRADLAKYICENQDSISSKLKECCEKPLLEKSHCIAEVENDEMPADLASLAADFVESKDVCENYAEAQDVFLGMFLYEYARRHSEYSVVLLLRLAKTYETTLEKCCAAADTHECYAKVFDEFKPLVEEPQNLIKQNCELFEQLGEYKFQNALLVRYTKKVPQVSTSTLVEVSRNLGKVGANVDNILEQKDGLCTSYLFVGLDQLCVLPEKTPRSDRVTKCCTEYFVNTRTCFSDLEVDETYASQESNAETFTFHADICTLSVKGRHILKHTALVELVKHKRQATC

SEQ ID NO: 1026795 - protein, 200 aa, Homo sapiens
  misc_feature (1)..(1): Xaa can be any naturally occurring amino acid
  misc_feature (187)..(187): Xaa can be any naturally occurring amino acid
XPFHCCRSASFSLLSTPHAFGTMKWVTFISLLFLFSSAYSRGVFRRDAHKSEVAHRFKDLGEENFKALVLIAFAQYLQQCPFEDHVKLVNEVTEFAKTCVADESAENCDKSLHTLFGDKLCTVATLRETYGEMADCCAKQEPERNECFLQHKDDNPNLPRLVRPEVDVMCTAFHDNEETFWLRISCXQMCNCVKCCCAKS

SEQ ID NO: 1026796 - protein, 382 aa, Homo sapiens
MKLPEDILTFMPRNSFSLLKGIKLLLQNVAKLLIKLPACCQSSMNFGMKGRLRLPNRDSSVPVSFPKAEFAEVSKLVTDLTKVHTECCHGDLLECADDRADLAKYICENQDSISSKLKECCEKPLLEKSHCIAEVENDEMPADLASLAADFVESKDVCENYAEAQDVFLGMFLYEYARRHSEYSVVLLLRLAKTYETTLEKCCAAADTHECYAKEFDEFKPLVEEPQNLIKQNCELFEQLGECKFQNALLVRYTKKVPQVSTSTLVEVSRNLGKVGANVETFWSKKMACAQDYLFVGLDQICVLPEKTPRSDRVTKCCTEYFVNTRTCFSDLEVDETYASQESNAETFTFHADICTLSVKGRHILKHTALVELVKHKRQATC

SEQ ID NO: 1026797 - protein, 229 aa, Homo sapiens
  misc_feature (1)..(1): Xaa can be any naturally occurring amino acid
XPFHCCRSASFSLLSTPHAFGTMKWVTFISLLFLFSSAYSRGVFRRDAHKSEVAHRFKDLGEENFKALVLIAFAQYLQQCPFEDHVKLVNEVTEYHVVLHEISLINVTNTLNPFGDKLCTVATLRETYGEMADCCAKQEPERNECFLQHKDDNPNLPRLVRPEVDVMCTAFHDNEETFLKKYLYEIARRHPYFYAPELLFFAKRLNLVFTKVAKLCKNFSPLPKFINLG

SEQ ID NO: 1026798 - protein, 364 aa, Homo sapiens
  misc_feature (1)..(1): Xaa can be any naturally occurring amino acid
XPFHCCRSASFSLLSTPHAFGTMKWVTFISLLFLFSSAYSRGVFRRDAHKSEVAHRFKDLGEENFKALVLIAFAQYLQQCPFEDHVKLVNEVTEFAKTCVADESAENCDKSLHTLFGDKLCTVATLRETYGEMADCCAKQEPERNECFLQHKDDNPNLPRLVRPEVDVMCTAFHDNEETFLKKYLYEIARRHPYFYAPELLFFAKRYKAAFTECCQAADKAACLLPKLDELRDEGKASSAKQRLKCASLQKFGERAFKAWAVARLSQRFPKAEFAEVSKLVTDLTKVHTECCHGDLLECADDRADLAKYICENQDSISSKLKECCEKPLLEKSHCIAEVENDEMPADLASLAADFVESKDVCKT

SEQ ID NO: 1026799 - protein, 567 aa, Homo sapiens
  misc_feature (1)..(1): Xaa can be any naturally occurring amino acid
XPFHCCRSASFSLLSTPHAFGTMKWVTFISLLFLFSSAYSRGVFRRDAHKSEVAHRFKDLGEENFKALVLIAFAQYLQQCPFEDHVKLVNEVTEFAKTCVADESAENCDKSLHTLFGDKLCTVATLRETYGEMADCCAKQEPERNECFLQHKDDNPNLPRLVRPEVDVMCTAFHDNEETFLKKYLYEIARRHPYFYAPELLFFALLPKLDELRDEGKASSAKQRLKCASLQKFGERAFKAWAVARLSQRFPKAEFAEVSKLVTDLTKVHTECCHGDLLECADDRADLAKYICENQDSISSKLKECCEKPLLEKSHCIAEVENDEMPADLASLAADFVESKDVCENYAEAQDVFLGMFLYEYARRHSEYSVVLLLRLAKTYETTLEKCCAAADTHECYAKVFDEFKPLVEEPQNLIKQNCELFEQLGEYKFQNALLVRYTKKVPQVSTSTLVEVSRNLGKVGANVETFWSKKMACAQDYLFVGLDHLCVLPEKTPRSDRVTKCCTEYFVNTRTCFSDLEVDETYASQESNAETFTFHADICTLSVKGRHILKHTALVELVKHKRQATC

SEQ ID NO: 1026800 - protein, 382 aa, Homo sapiens; identical to SEQ ID NO: 1026796

SEQ ID NO: 1026801 - protein, 101 aa, Homo sapiens
GIKGEKGNPGVGTQGPRGPPGPAGPSGESRPGSPGAPGSPGPRGPPGHLGVPGPQGPSGQPGYCDPSSCSAYGVRAPHPDQPEFTPVQDELEAMELWGPGV

SEQ ID NO: 1026802 - protein, 55 aa, Homo sapiens
MGATRAKGGPKENRGQNKRRGLPNKKRGGTQAFGQSQGSRGANGGHTGATGANNT

SEQ ID NO: 1026803 - protein, 74 aa, Homo sapiens
LVSKEKKEIQALEPKVQEAPLDQQDLQGRVGLAALGPLALLDQEAHQVIWGFLDPKVLLASLDIVTPHHVLPMV

SEQ ID NO: 1026804 - protein, 74 aa, Homo sapiens; identical to SEQ ID NO: 1026803

SEQ ID NO: 1026805 - protein, 134 aa, Homo sapiens
  misc_feature (98)..(98): Xaa can be any naturally occurring amino acid
KKVRTGPGAVAHACNPSTLGGPAGRIPSREWHHFLVVNMKGNDISSGTVLSDYVGSGPPKGTGLHRYVWLVYEQDRPLKCDEPIQIGVLRMGSSHVRXSNRSGDHRGKFKVASFRKKYELRAPVAWHVLPGRVG

SEQ ID NO: 1026806 - protein, 121 aa, Homo sapiens
KKVRTGPGAVAHACNPSTLGGPAGRIPSREWHHFLVVNMKGNDISSGTVLSDYVGSGPPKGTGLHRYVWLVYEQDRPLKCDEPILSNRSGDHRGKFKVASFRKKYELRAPVAWHVLPGRVG

SEQ ID NO: 1026807 - protein, 220 aa, Homo sapiens
MTSPVYLSCPRLAYRCHSRLHALNGPLTVASWTYNQVESGPVHPDHKWHETSGAPDEMSPTPGTILYKLGKVLHAQPVFKNRPTMNFVRWVSIQGKLYELGPDHTPGVVLPVRKGSLHILVEEWLLYISLDVSKRGARERSDISSGTVLSDYVGSGPPKGTGLHRYVWLVYEQDRPLKCDEPILSNRSGDHRGKFKVASFRKKYELRAPVAWHVLPGRVG

SEQ ID NO: 1026808 - protein, 121 aa, Homo sapiens; identical to SEQ ID NO: 1026806

SEQ ID NO: 1026809 - protein, 305 aa, Homo sapiens
TDPRLRRGSAVPLGASASPSPASPASSASSPAAGTRDPSVCPTPDPARDMSTPARRRLMRDFKRLQGGSSSRSQAGTPCRRTIIMAVERGYSIRALKGPRYERWNHCKAYNRNATEEYPRLNHYSSIVSKMSHPNVYCAMVVYVWNTTSATEESNPMMCLPFNIHTALLDEPNPNSQHTAKAAQTYQDSTTGEYEQRVNSIVAQSRRDLVERRVMVHSKLTLDNEFLAGGDSLPLPVVTFRSHPQNTVSAFTSRSDPNLYFSLPPYTVYVMSPVRPNTQIIIAKMRQEIMRTRGTGVISKTIVRD

SEQ ID NO: 1026810 - protein, 184 aa, Homo sapiens
MGTMKTQRDGHSLGRWSLVLLLLGLVMPLAIIAQVLSYKEAVLRAIDGINQRSSDANLYRLLDLDPRPTMDGDPDTPKPVSFTVKETVCPRTTQQSPEDCDFKKDGLVKRCMGTVTLNQARGSFDISCDKDNKRFALLGDFFRKSKEKIAKSLKELSRESRIFAESCTRQISFLPIQHTAPTMI

SEQ ID NO: 1026811 - protein, 109 aa, Homo sapiens
SCVPTRSLRGHCALSTTAFPRLRIPRTPAPRSRRPPDGVPALRMCVLLVVSANALQPLEHQDPSLRLEPGPSRLPGPSTAAIRTGGLAIARNHPAGVQLIFTSVGREIM

SEQ ID NO: 1026812 - protein, 139 aa, Homo sapiens
SPKTRGQPAYMPPPGIDPPRQALHLARSQPGAMRPAAAYAQDRCPPAPASVLRIPRSHIWFLSHTCHEDDSTERHDCTIACLSSASLPLSLFISDGSVRGTRGVHDIAFVEADNEVDSSSDACTFKITNNAMKISFAKK

SEQ ID NO: 1026813 - protein, 148 aa, Homo sapiens
SPKTRGQPAYMPPPGIDPPRQALHLARSQPGAMPPQLAYAQDRCPPAPASVLRIHRSHIWFLSHTCHEDDSTERHDCTIACLSSASLPLSLFISDGSVRGTRGVHDIAFVEADNEVQAGAARRVPMHGLLRDSAAVTKTAMKISFAKK

SEQ ID NO: 1026814 - protein, 112 aa, Homo sapiens
SPKTRGQPAYMPPPGIDPPRQALHLARSQPGAMPPSASLCSGQMPPSTSLCSENPPESHLGPQPHLPRGSPRAQCCPQRFQITFPASRRSLWNPGGTDICPSLESLDHHIER

SEQ ID NO: 1026815 - protein, 134 aa, Homo sapiens
  misc_feature (118)..(118): Xaa can be any naturally occurring amino acid
DAWAVALAADAGSRTLGVMYYKFSGFTQKLAGAWASEAYSPQGLKPVVSTEAPPIIFATPTKLTSDSTVYDYAGKNKVPELQKFFQKADGVPVYLKRGFCDLIKIALTRDRLDVLLDXVGKGPIYVRVIGALIS

SEQ ID NO: 1026816 - protein, 132 aa, Homo sapiens
DAWAVALAADAGSRTLGVMYYKFSGFTQKLAGAWASEAYSPQGLKPVVSTEAPPIIFATPTKLTSDSTVYDYAGKNKVPELQKFFQKADGVPVYLKRGLPDQMLYRTTMALTVGGTIYCLIALYMASQPKNK

SEQ ID NO: 1026817 - protein, 132 aa, Homo sapiens; identical to SEQ ID NO: 1026816

SEQ ID NO: 1026818 - protein, 319 aa, Homo sapiens
MVLPPPDRRHVCLTTLVIMGSMAVMDAYLVEQNQGPRKIGVCIIVLVGDVCFLLVLRYVAVWVGAEVRTAKRGYAMILWFLYIFVLEIKLYFIFQNYKAARRGAADPVARKALTLLLSVCVPGLFLLLVALDRMEYVRTFRKREDLRGRLFWVALDLLDLLDMQASLWEPPRSGLPLWAEGLTFFYCYMLLLVLPCVALSEVSMQGEHIAPQKMMLYPVLSLATVNVVAVLARAANMALFRDSRVSAIFVGKNVVALATKACTFLEYRRQVRDFPPPALSLELQPPPPQRNSVPPPPPPLHGPPGRPHMSSPTRDPLDT

SEQ ID NO: 1026819 - protein, 207 aa, Homo sapiens
MVLPPPDRRHVCLTTLVIMGSMAVMDAYLVEQNQGPRKIGVCIIVLVGDVCFLLVLRYVAVWVGAEVRTAKRGYAMILWFLYIFVLEIKLYFIFQNYKAARRGAADPVARKALTLLLSVCVPGLFLLLVALDRMEYVRTFRKREDLRGRLFWVALDLLDLLDMQASLWEPPRSGLPLWARGALNLSFLLLTIACCLGACPVRFGGFQ

SEQ ID NO: 1026820 - protein, 169 aa, Homo sapiens
EAATEERGPRARLSSATANALYSSNLRDDTKAILEQISAHGQKHRAVPAPSPGPTHNSPELGRPPAAGVLAPDMSDKDKCSAIFRSDSLGTQGRLSRTLPASAEERDRLLRRMESMRKEKRVYSRFEVFCKTEEASSPGAGEGPAEEGTRDSKVGKFVPKILGTFKSKK

SEQ ID NO: 1026821 - protein, 169 aa, Homo sapiens; identical to SEQ ID NO: 1026820

SEQ ID NO: 1026822 - protein, 169 aa, Homo sapiens; identical to SEQ ID NO: 1026820

SEQ ID NO: 1026823 - protein, 169 aa, Homo sapiens; identical to SEQ ID NO: 1026820

SEQ ID NO: 1026824 - protein, 169 aa, Homo sapiens; identical to SEQ ID NO: 1026820

SEQ ID NO: 1026825 - protein, 142 aa, Homo sapiens
MAESSATFTPMAPQIFFYLPLPTHRARPILRIISLLRNLKHRHYPPACNYSNSLHRLCPPVRPNIILRGHSNYKLTIRHPIHWDRPSSMNLRRLLSRQSHPHTILYLSLHLALHYCSPSSTPPPILARNGIKQPPRNHLPFR

SEQ ID NO: 1026826 - protein, 142 aa, Homo sapiens; identical to SEQ ID NO: 1026825

SEQ ID NO: 1026827 - protein, 109 aa, Homo sapiens
TSSRICRAGQLHFVFFGESPSQHLRMMKLRLTPWRLPDPPNHHRTIPSHALLTRRLNRLFINRPHHSRRKLWLNHPLPSRQWRLKYSYICLFLHIGRGLYYGSFLYSET

SEQ ID NO: 1026828 - protein, 688 aa, Homo sapiens
  misc_feature (628)..(628): Xaa can be any naturally occurring amino acid
  misc_feature (654)..(654): Xaa can be any naturally occurring amino acid
  misc_feature (657)..(657): Xaa can be any naturally occurring amino acid
  misc_feature (686)..(686): Xaa can be any naturally occurring amino acid
MEDPFEEADQPTTEPGMVLDSVEAGDTTPPTKRKSKFSGFGKIFKPWKWRKKKSSDKFKETSEVLERKISMRKPREELVKRGVLWEDPEQGGEDPGKPSDAMLKNGHTTPIGNARSSSPVQVEEEPVRLASLRKAIPEEDLKKRLGSTGSQPNSEAESVPENVPKPPLLPPKRPLSSSHEASEGQAKDATSSGGTARFIISTSITTAPAATTAATSLAKTVNLSVTPSPAPRTLPAAPASTNTTATPSLTHMVPAKQPPIPPPKPAHRNSNPVIAELSQAINSGTLLSKPSPPLPPKRGIPSTSVPTLESAAAITTKTPSDEREKSTCSMGSELLPMISPRSPSPPLPTHIPPEPPRTPPFPAKTFQVVPEIEFPPSLDLHQEIPQQEDQKKEVPKRILDQNFGEPHIPSRLPPLPLHIRIQQALTSPLPMTPILEGSHRAHSLLFENSDSFSEDSSTLGRTRSLPITIEMLKVPDDEEEEEQTCPSTFSEEMTPTSVIPKLPQCLREEEEKESDSDSEGPIQYRDEEDEDESYQSALANKVKRKDTLAMKLNHRPSEPELNLNSWPCKSKEEWNEIRHQIGNTLIRRLSQRPTPEELEQRNILQPKNEADRQAEKTEKINRRLTRKXQVKGQLVRLNSLPGRFLRFNEYERVXDAXDYDRAKPNKTLGPKLDPCLDKGCPLGKRXLN

SEQ ID NO: 1026829 - protein, 480 aa, Homo sapiens
MEDPFEEADQPTTEPGMVLDSVEAGDTTPPTKRKSKFSGFGKIFKPWKWRKKKSSDKFKETSEVLERKISMRKPREELVKRGVLWEDPEQGGEDPGKPSDAMLKNGHTTPIGNARSSSPVQVEEEPVRLASLRKAIPEEDLKKRLGSTGSQPNSEAESVPENVPKPPLLPPKRPLSSSHEASEGQAKDATSSGGTARFIISTSITTAPAATTAATSLAKTVNLSVTPSPAPRTLPAAPASTNTTATPSLTHMVPAKQPPIPPPKPAHRNSNPVIAELSQAINSGTLLSKPSPPLPPKRGIPSTSVPTLESAAAITTKTPSDEREKSTCSMGSELLPMISPRSPSPPLPTHIPPEPPRTPPFPAKTFQVVPEIEFPPSLDLHQEIPQQEDQKKEVPKRILDQNFGEPHIPSRLPPLPLHIRIQQALTSPLPMTPILEGSHRAHSLLFENSDSFSEDSSTLGRTRSLPITIEMLNDTYLSHS

SEQ ID NO: 1026830 - protein, 698 aa, Homo sapiens
  misc_feature (638)..(638): Xaa can be any naturally occurring amino acid
  misc_feature (664)..(664): Xaa can be any naturally occurring amino acid
  misc_feature (667)..(667): Xaa can be any naturally occurring amino acid
  misc_feature (696)..(696): Xaa can be any naturally occurring amino acid
MGQADVSRPVNPDAVEEADQPTTEPGMVLDSVEAGDTTPPTKRKSKFSGFGKIFKPWKWRKKKSSDKFKETSEVLERKISMRKPREELVKRGVLWEDPEQGGEDPGKPSDAMLKNGHTTPIGNARSSSPVQVEEEPVRLASLRKAIPEEDLKKRLGSTGSQPNSEAESVPENVPKPPLLPPKRPLSSSHEASEGQAKDATSSGGTARFIISTSITTAPAATTAATSLAKTVNLSVTPSPAPRTLPAAPASTNTTATPSLTHMVPAKQPPIPPPKPAHRNSNPVIAELSQAINSGTLLSKPSPPLPPKRGIPSTSVPTLESAAAITTKTPSDEREKSTCSMGSELLPMISPRSPSPPLPTHIPPEPPRTPPFPAKTFQVVPEIEFPPSLDLHQEIPQQEDQKKEVPKRILDQNFGEPHIPSRLPPLPLHIRIQQALTSPLPMTPILEGSHRAHSLLFENSDSFSEDSSTLGRTRSLPITIEMLKVPDDEEEEEQTCPSTFSEEMTPTSVIPKLPQCLREEEEKESDSDSEGPIQYRDEEDEDESYQSALANKVKRKDTLAMKLNHRPSEPELNLNSWPCKSKEEWNEIRHQIGNTLIRRLSQRPTPEELEQRNILQPKNEADRQAEKTEKINRRLTRKXQVKGQLVRLNSLPGRFLRFNEYERVXDAXDYDRAKPNKTLGPKLDPCLDKGCPLGKRXLN

SEQ ID NO: 1026831 - protein, 594 aa, Homo sapiens
MEDPFEEADQPTTEPGMVLDSVEAGDTTPPTKRKSKFSGFGKIFKPWKWRKKKSSDKFKETSEVLERKISMRKPREELVKRGVLWEDPEQGGEDPGKPSDAMLKNGHTTPIGNARSSSPVQVEEEPVRLASLRKAIPEEDLKKRLGSTGSQPNSEAESVPENVPKPPLLPPKRPLSSSHEASEGQAKDATSSGGTARFIISTSITTAPAATTAATSLAKTVNLSVTPSPAPRTLPAAPASTNTTATPSLTHMVPAKQPPIPPPKPAHRNSNPVIAELSQAINSGTLLSKPSPPLPPKRGIPSTSVPTLESAAAITTKTPSDEREKSTCSMGSELLPMISPRSPSPPLPTHIPPEPPRTPPFPAKTFQVVPEIEFPPSLDLHQEIPQQEDQKKEVPKRILDQNFGEPHIPSRLPPLPLHIRIQQALTSPLPMTPILEGSHRAHSLLFENSDSFSEDSSTLGRTRSLPITIEMLKVPDDEEEEEQTCPSTFSEEMTPTSVIPKLPQCLREEEEKESDSDSEGPIQYRDEEDEDESYQSALANKVKRKDTLAMKLNHRPSEPELNLNSWPCKSKEEWNEIRHQIGNTLIRRLSQRPT

SEQ ID NO: 1026832 - protein, 714 aa, Homo sapiens
  misc_feature (683)..(683): Xaa can be any naturally occurring amino acid
  misc_feature (709)..(709): Xaa can be any naturally occurring amino acid
  misc_feature (713)..(713): Xaa can be any naturally occurring amino acid
GGQGWAAAWRPTGQVGFPGEAAVEAEEAAAEIWKQYLTSLNWLIVAWKIHLTSPENLGTVEEADQPTTEPGMVLDSVEAGDTTPPTKRKSKFSGFGKIFKPWKWRKKKSSDKFKETSEVLERKISMRKPREELVKRGVLWEDPEQGGEDPGKPSDAMLKNGHTTPIGNARSSSPVQVEEEPVRLASLRKAIPEEDLKKRLGSTGSQPNSEAESVPENVPKPPLLPPKRPLSSSHEASEGQAKDATSSGGTARFIISTSITTAPAATTAATSLAKTVNLSVTPSPAPRTLPAAPASTNTTATPSLTHMVPAKQPPIPPPKPAHRNSNPVIAELSQAINSGTLLSKPSPPLPPKRGIPSTSVPTLESAAAITTKTPSDEREKSTCSMGSELLPMISPRSPSPPLPTHIPPEPPRTPPFPAKTFQVVPEIEFPPSLDLHQEIPQQEDQKKEVPKRILDQNFGEPHIPSRLPPLPLHIRIQQALTSPLPMTPILEGSHRAHSLLFENSDSFSEDSSTLGRTRSLPITIEMLKVPDDEEEEEQTCPSTFSEEMTPTSVIPKLPQCLREEEEKESDSDSEGPIQYRDEEDEDESYQSALANKVKRKDTLAMKLNHRPSEPELNLNSWPCKSKEEWNEIRHQIGNTLIRRLSQRPTPEELEQRNILQPKNEADRQAEKTEKINRRLTRKXQVKGQLVRLNSLPGRFLRFNEYVEGXGCSXL

SEQ ID NO: 1026833 - protein, 305 aa, Homo sapiens
  misc_feature (10)..(10): Xaa can be any naturally occurring amino acid
RPLTAAAPTXPVSRIPRPPRQRPAMEAIKKKMQMLKLDKENAIDRAEQAEADKKAAEDKCKQVEEELTHLQKKLKGTEDELDKYSEDLKDAQEKLELTEKKASDAEGDVAALNRRIQLVEEELDRAQERLATALQKLEEAEKAADESERGMKVIENRAMKDEEKMEIQEMQLKEAKHIAEEADRKYEEVARKLVILEGELERAEERAEVSELKCGDLEEELKNVTNNLKSLEAASEKYSEKEDKYEEEIKLLSDKLKEAETRAEFAERTVAKLEKTIDDLEEKLAQAKRRERGLTSDTGSDTKRT

SEQ ID NO: 1026834 - protein, 242 aa, Homo sapiens
MCEDEIAVNKTVAVRDAFLWHIPPAGHKRRHPLELQPQGSPAEGDVAALNRRIQLVEEELDRAQERLATALQKLEEAEKAADESERGMKVIENRAMKDEEKMEIQEMQLKEAKHIAEEADRKYEEVARKLVILEGELERAEERAEVSELKCGDLEEELKNVTNNLKSLEAASEKYSEKEDKYEEEIKLLSDKLKEAETRAEFAERTVAKLEKTIDDLEEKLAQAKRRERGLTSDTGSDTKRT

SEQ ID NO: 1026835 - protein, 245 aa, Homo sapiens
MAGLNSLEAVKRKIQALQQQADEAEDRAQGLQRELDGERERREKAEGDVAALNRRIQLVEEELDRAQERLATALQKLEEAEKAADESERGMKVIENRAMKDEEKMEIQEMQLKEAKHIAEEADRKYEEVARKLVILEGELERAEERAEVSELKCGDLEEELKNVTNNLKSLEAASEKYSEKEDKYEEEIKLLSDKLKEAETRAEFAERTVAKLEKTIDDLEEKLAQAKRRERGLTSDTGSDTKRT

SEQ ID NO: 1026836 - protein, 245 aa, Homo sapiens; identical to SEQ ID NO: 1026835

SEQ ID NO: 1026837 - protein, 225 aa, Homo sapiens
MAGLNSLEAVKRKIQALQQQADEAEDRAQGLQRELDGERERREKAEGDVAALNRRIQLVEEELDRAQERLATALQKLEEAEKAADESERGMKVIENRAMKDEEKMEIQEMQLKEAKHIAEEADRKYEEVARKLVILEGELERAEERAEVSELKCGDLEEELKNVTNNLKSLEAASEKYSEKEDKYEEEIKLLSDKLKEAETRAEFAERTVANSARVSASLECRQT

SEQ ID NO: 1026838 - protein, 232 aa, Homo sapiens
VLCGSGKAFGMPTMRLLSFVVLALFAVTQAEEGARLLASKSLLNRYAVEGRDLTLQYNIYNVGSSAALDVELSDDSFPPEDFGIVSGMLNVKWDRIAPASNVSHTVVLRPLKAGYFNFTSATITYLAQEDGPVVIGSTSAPGQGGILAQREFDRRFSPHFLDWAAFGVMTLPSIGIPPAIVVLQQEEYDTPKTRRTDWGFTASSPTKFRLLLQQIHVLSALHRVSSHATLLS

SEQ ID NO: 1026839 - protein, 219 aa, Homo sapiens
MRLLSFVVLALFAVTQAEEGARLLASKSLLNRYAVEGRDLTLQYNIYNVGSSAALDVELSDDSFPPEDFGIVSGMLNVKWDRIAPASNVSHTVVLRPLKAGYFNFTSATITYLAQEDGPVVIGSTSAPGQGGILAQREFDRRFSPHFLDWAAFGVMTLPSIGIPPAIVVLQQEEYDTPKTRRTDWGFTASSPTKFRLLLQQIHVLSALHRVSSHATLLS

SEQ ID NO: 1026840 - protein, 303 aa, Homo sapiens
MGSQGLDWRVGYRDVRRTPTRYRGGIHNRAVAKEEGSSGKADGHYLCEGKHTGILQVRDRPKSGTPRKPCSGPHGVPSEDSTRPMRLLSFVVLALFAVTQAEEGARLLASKSLLNRYAVEGRDLTLQYNIYNVGSSAALDVELSDDSFPPEDFGIVSGMLNVKWDRIAPASNVSHTVVLRPLKAGYFNFTSATITYLAQEDGPVVIGSTSAPGQGGILAQREFDRRFSPHFLDWAAFGVMTLPSIGIPPAIVVLQQEEYDTPKTRRTDWGFTASSPTKFRLLLQQIHVLSALHRVSSHATLLS

SEQ ID NO: 1026841 - protein, 692 aa, Homo sapiens
MGLLSDPVRRRALARLVLRLNAPLCVLSYVAGIAWFLALVFPPLTQRTYMSENAMGSTMVEEQFAGGDRARAFARDFAAHRKKSGALPVAWLERTMRSVGLEVYTQSFSRKLPFPDETHERYVLGEWGVPGPRKHLGGRGLGWVSPCGGVMGPGSSVGGKSLVGTGGLGKLWGALQPPTTKLHCGSPHRCCIQMVSGTNVYGILRAPRAASTESLVLTVPCGSDSTNSQAVGLLLALAAHFRGQIYWAKDIVFLVTEHDLLGTEAWLEAYHDVNVTGMQSSPLQGRAGAIQAAVALELSSDVVTSLDVAVEGLNGQLPNLDLLNLFQTFCQKGGLLCTLQGKLQPEDWTSLDGPLQGLQTLLLMVLRQASGRPHGSHGLFLRYRVEALTLRGINSFRQYKYDLVAVGKALEGMFRKLNHLLERLHQSFFLYLLPGLSRFVSIGLYMPAVGFLLLVLGLKALELWMQLHEAGMGLEEPGGAPGPSVPLPPSQGVGLASLVAPLLISQAMGLALYVLPVLGQHVATQHFPVAEAEAVVLTLLAIYAAGLALPHNTHRVVSTQAPDRGWMALKLVALIYLALQLGCIALTNFSLGFLLATTMVPTAALAKPHGPRTLYAALLVLTSPAATLLGSLFLWRELQEAPLSLAEGWQLFLAALAQGVLEHHTYGALLFPLLSLGLYPCWLLFWNVLFWK

SEQ ID NO: 1026842 - protein, 621 aa, Homo sapiens
MGLLSDPVRRRALARLVLRLNAPLCVLSYVAGIAWFLALVFPPLTQRTYMSENAMGSTMVEEQFAGGDRARAFARDFAAHRKKSGALPVAWLERTMRSVGLEVYTQSFSRKLPFPDETHERYMVSGTNVYGILRAPRAASTESLVLTVPCGSDSTNSQAVGLLLALAAHFRGQIYWAKDIVFLVTEHDLLGTEAWLEAYHDVNVTGMQSSPLQGRAGAIQAAVALELSSDVVTSLDVAVEGLNGQLPNLDLLNLFQTFCQKGGLLCTLQGKLQPEDWTSLDGPLQGLQTLLLMVLRQASGRPHGSHGLFLRYRVEALTLRGINSFRQYKYDLVAVGKALEGMFRKLNHLLERLHQSFFLYLLPGLSRFVSIGLYMPAVGFLLLVLGLKALELWMQLHEAGMGLEEPGGAPGPSVPLPPSQGVGLASLVAPLLISQAMGLALYVLPVLGQHVATQHFPVAEAEAVVLTLLAIYAAGLALPHNTHRVVSTQAPDRGWMALKLVALIYLALQLGCIALTNFSLGFLLATTMVPTAALAKPHGPRTLYAALLVLTSPAATLLGSLFLWRELQEAPLSLAEGWQLFLAALAQGVLEHHTYGALLFPLLSLGLYPCWLLFWNVLFWK

SEQ ID NO: 1026843 - protein, 715 aa, Homo sapiens
MGLLSDPVRRRALARLVLRLNAPLCVLSYVAGIAWFLALVFPPLTQRTYMSENAMGSTMVEEQFAGGDRARAFARDFAAHRKKSGALPVAWLERTMRSVGLEVYTQSFSRKLPFPDETHERYMVSGTNVYGILRAPRAASTESLVLTVPCGSDSTNSQAVGLLLALAAHFRGQIYWAKDIVFLVTEHDLLGTEAWLEAYHDVNVTGMQSSPLQGRAGAIQAAVALELSSDVVTSLDVAVEGLNGQLPNLDLLNLFQTFCQKGGLLCTLQGKLQPEDWTSLDGPLQGLQTLLLMVLRQASGRPHGSHGLFLRYRVEALTLRGINSFRQYKYDLVAVGKALEGMFRPFHAQDGVSAGAELGDGLVALASREPAPHLTGLLEGMFRKLNHLLERLHQSFFLYLLPGLSRFVSIGLYMPAVGFLLLVLGLKISSAPCHLPVTSLQSPQLRLGRVFHPDGGWGTGVSPGSPSGQIPLHLLLGSLIGLALELWMQLHEAGMGLEEPGGAPGPSVPLPPSQGVGLASLVAPLLISQAMGLALYVLPVLGQHVATQHFPVAEAEAVVLTLLAIYAAGLALPHNTHRVVSTQAPDRGWMALKLVALIYLALQLGCIALTNFSLGFLLATTMVPTAALAKPHGPRTLYAALLVLTSPAATLLGSLFLWRELQEAPLSLAEGWQLFLAALAQGVLEHHTYGALLFPLLSLGLYPCWLLFWNVLFWK

SEQ ID NO: 1026844 - protein, 593 aa, Homo sapiens
MGLLSDPVRRRALARLVLRLNAPLCVLSYVAGIAWFLALVFPPLTQRTYMSENAMGSTMVEEQFAGGDRARAFARDFAAHRKKSGALPVAWLERTMRSVGLEVYTQSFSRKLPFPDETHERYMVSGTNVYGILRAPRAASTESLVLTVPCGSDSTNSQAVGLLLALAAHFRGQIYWAKDIVFLVTEHDLLGTEAWLEAYHDVNVTSLDVAVEGLNGQLPNLDLLNLFQTFCQKGGLLCTLQGKLQPEDWTSLDGPLQGLQTLLLMVLRQASGRPHGSHGLFLRYRVEALTLRGINSFRQYKYDLVAVGKALEGMFRKLNHLLERLHQSFFLYLLPGLSRFVSIGLYMPAVGFLLLVLGLKALELWMQLHEAGMGLEEPGGAPGPSVPLPPSQGVGLASLVAPLLISQAMGLALYVLPVLGQHVATQHFPVAEAEAVVLTLLAIYAAGLALPHNTHRVVSTQAPDRGWMALKLVALIYLALQLGCIALTNFSLGFLLATTMVPTAALAKPHGPRTLYAALLVLTSPAATLLGSLFLWRELQEAPLSLAEGWQLFLAALAQGVLEHHTYGALLFPLLSLGLYPCWLLFWNVLFWK

SEQ ID NO: 1026845 - protein, 245 aa, Homo sapiens
  misc_feature (244)..(244): Xaa can be any naturally occurring amino acid
MGLLSDPVRRRALARLVLRLNAPLCVLSYVAGIAWFLALVFPPLTQRTYMSENAMGSTMVEEQFAGGDRARAFARDFAAHRKKSGALPVAWLERTMRSVGLEVYTQSFSRKLPFPDETHERYMVSGTNVYGILRAPRAASTESLVLTVPCGSDSTNSQAVGLLLALAAHFRGQIYWAKDIVFLVTEHDLLGTEAWLEAYHDVNVTGMQSSPLQGRAGAIQAAVALELSSDVVHQLGPAAQSLFXF

SEQ ID NO: 1026846 - protein, 726 aa, Homo sapiens
MGLLSDPVRRRALARLVLRLNAPLCVLSYVAGIAWFLALVFPPLTQRTYMSENAMGSTMVEEQFAGGDRARAFARDFAAHRKKSGALPVAWLERTMRSVGLEVYTQSFSRKLPFPDETHERYMVSGTNVYGILRAPRAASTESLVLTVPCGSDSTNSQAVGLLLALAAHFRGQIYWAKDIVFLVTEHDLLGTEAWLEAYHDVNVTGMQSSPLQGRAGAIQAAVALELSSDVVTSLDVAVEGLNGQLPNLDLLNLFQTFCQKGGLLCTLQGKLQPEDWTSLDGPLQGLQTLLLMVLRQASGRPHGSHGLFLRYRVEALTLRGINSFRQYKYDLVAVGKALEGMFRKLNHLLERLHQSFFLYLLPGLSRFVSIGLYMPAVGFLLLVLGLKISSAPCHLPVTSLQSPQLWLGRVFHPDGGWGTGVSPGSPSGQIPLHLLLGSLIGLALELWMQLHEAGMGLEEPGGAPGPSVPLPPSQVMDPFCCWNGLLGSDWCLVLQLSLSWWDGGGFGDPLAPGSISKSLCALQGGVGLASLVAPLLISQAMGLALYVLPVLGQHVATQHFPVAEAEAVVLTLLAIYAAGLALPHNTHRVVSTQAPDRGWMALKLVALIYLALQLGCIALTNFSLGFLLATTMVPTAALAKPHGPRTLYAALLVLTSPAATLLGSLFLWRELQEAPLSLAEGWQLFLAALAQGVLEHHTYGALLFPLLSLGLYPCWLLFWNVLFWK

SEQ ID NO: 1026847 - protein, 654 aa, Homo sapiens
MGLLSDPVRRRALARLVLRLNAPLCVLSYVAGIAWFLALVFPPLTQRTYMSENAMGSTMVEEQFAGGDRARAFARDFAAHRKKSGALPVAWLERTMRSVGLEVYTQSFSRKLPFPDETHERYMVSGTNVYGILRAPRAASTESLVLTVPCGSDSTNSQAVGLLLALAAHFRGQIYWAKDIVFLVTEHDLLGTEAWLEAYHDVNVTGMQSSPLQGRAGAIQAAVALELSSDVVTSLDVAVEGLNGQLPNLDLLNLFQTFCQKGGLLCTLQGKLQPEDWTSLDGPLQGLQTLLLMVLRQASGRPHGSHGLFLRYRVEALTLRGINSFRQYKYDLVAVGKALEGMFRKLNHLLERLHQSFFLYLLPGLSRFVSIGLYMPAVGFLLLVLGLKALELWMQLHEAGMGLEEPGGAPGPSVPLPPSQGVGLASLVAPLLISQAMGLALYVLPVLGQHVATQHFPVAEAEAVVLTLLAIYAAGLALPHNTHRVVSTQELVVGGRGRGPLDMQTACGLPLSPLSYRVVSTQAPDRGWMALKLVALIYLALQLGCIALTNFSLGFLLATTMVPTAALAKPHGPRTLYAALLVLTSPAATLLGSLFLWRELQEAPLSLAEGWQLFLAALAQGVLEHHTYGALLFPLLSLGLYPCWLLFWNVLFWK

SEQ ID NO: 1026848 - protein, 703 aa, Homo sapiens
MGLLSDPVRRRALARLVLRLNAPLCVLSYVAGIAWFLALVFPPLTQRTYMSENAMGSTMVEEQFAGGDRARAFARDFAAHRKKSGALPVAWLERTMRSVGLEVYTQSFSRKLPFPDETHERYMVSGTNVYGILRAPRAASTESLVLTVPCGSDSTNSQAVGLLLALAAHFRGQIYWAKDIVFLVTEHDLLGTEAWLEAYHDVNVTGMQSSPLQGRAGAIQAAVALELSSDVVTSLDVAVEGLNGQLPNLDLLNLFQTFCQKGGLLCTLQGKVGLPACLRAEGHRVCGRGCLILSCTSKLQPEDWTSLDGPLQGLQTLLLMVLRQASGRPHGSHGLFLRYRVEALTLRGINSFRQYKYDLVAVGKALEGMFRKLNHLLERLHQSFFLYLLPGLSRFVSIGLYMPAVGFLLLVLGLKISSAPCHLPVTSLQSPQLWLGRVFHPDGGWGTGVSPGSPSGQIPLHLLLGSLIGYALELWMQLHEAGMGLEEPGGAPGPSVPLPPSQGVGLASLVAPLLISQAMGLALYVLPVLGQHVATQHFPVAEAEAVVLTLLAIYAAGLALPHNTHRVVSTQAPDRGWMALKLVALIYLALQLGCIALTNFSLGFLLATTMVPTAALAKPHGPRTLYAALLVLTSPAATLLGSLFLWRELQEAPLSLAEGWQLFLAALAQGVLEHHTYGALLFPLLSLGLYPCWLLFWNVLFWK

SEQ ID NO: 1026849 - protein, 499 aa, Homo sapiens
MVSGTNVYGILRAPRAASTESLVLTVPCGSDSTNSQAVGLLLALAAHFRGQIYWAKDIVFLVTEHDLLGTEAWLEAYHDVNVTGMQSSPLQGRAGAIQAAVALELSSDVVTSLDVAVEGLNGQLPNLDLLNLFQTFCQKGGLLCTLQGKLQPEDWTSLDGPLQGLQTLLLMVLRQASGRPHGSHGLFLRYRVEALTLRGINSFRQYKYDLVAVGKALEGMFRKLNHLLERLHQSFFLYLLPGLSRFVSIGLYMPAVGFLLLVLGLKALELWMQLHEAGMGLEEPGGAPGPSVPLPPSQGVGLASLVAPLLISQAMGLALYVLPVLGQHVATQHFPVAEAEAVVLTLLAIYAAGLALPHNTHRVVSTQAPDRGWMALKLVALIYLALQLGCIALTNFSLGFLLATTMVPTAALAKPHGPRTLYAALLVLTSPAATLLGSLFLWRELQEAPLSLAEGWQLFLAALAQGVLEHHTYGALLFPLLSLGLYPCWLLFWNVLFWK

SEQ ID NO: 1026850 - protein, 329 aa, Homo sapiens
MVLRQASGRPHGSHGLFLRYRVEALTLRGINSFRQYKYDLVAVGKALEGMFRKLNHLLERLHQSFFLYLLPGLSRFVSIGLYMPAVGFLLLVLGLKALELWMQLHEAGMGLEEPGGAPGPSVPLPPSQGVGLASLVAPLLISQAMGLALYVLPVLGQHVATQHFPVAEAEAVVLTLLAIYAAGLALPHNTHRVVSTQAPDRGWMALKLVALIYLALQLGCIALTNFSLGFLLATTMVPTAALAKPHGPRTLYAALLVLTSPAATLLGSLFLWRELQEAPLSLAEGWQLFLAALAQGVLEHHTYGALLFPLLSLGLYPCWLLFWNVLFWK

SEQ ID NO: 1026851 - protein, 621 aa, Homo sapiens; identical to SEQ ID NO: 1026842

SEQ ID NO: 1026852 - protein, 621 aa, Homo sapiens; identical to SEQ ID NO: 1026842

SEQ ID NO: 1026853 - protein, 499 aa, Homo sapiens; identical to SEQ ID NO: 1026849

SEQ ID NO: 1026854 - protein, 448 aa, Homo sapiens
MGLLSDPVRRRALARLVLRLNAPLCVLSYVAGIAWFLALVFPPLTQRTYMSENAMGSTMVEEQFAGGDRARAFARDFAAHRKKSGALPVAWLERTMRSVGLEVYTQSFSRKLPFPDETHERYMVSGTNVYGILRAPRAASTESLVLTVPCGSDSTNSQAVGLLLALAAHFRGQIYWAKDIVFLVTEHDLLGTEAWLEAYHDVNVTGMQSSPLQGRAGAIQAAVALELSSDVVTSLDVAVEGLNGQLPNLDLLNLFQTFCQKGGLLCTLQGKLQPEDWTSLDGPLQGLQTLLLMVLRQASGRPHGSHGLFLRYRVEALTLRGINSFRQYKYDLVAVGKALEGMFRKLNHLLERLHQSFFLYLLPGLSRFVSIGLYMPAVGFLLLVLGLKALELWMQLHEAGMGLEEPGGAPGPSVPLPPSQVTGHGTGPLCPASAGPTRCHPALPSGRG

SEQ ID NO: 1026855 - protein, 667 aa, Homo sapiens
  misc_feature (544)..(544): Xaa can be any naturally occurring amino acid
MGLLSDPVRRRALARLVLRLNAPLCVLSYVAGIAWFLALVFPPLTQRTYMSENAMGSTMVEEQFAGGDRARAFARDFAAHRKKSGALPVAWLERTMRSVGLEVYTQSFSRKLPFPDETHERYMVSGTNVYGILRAPRAASTESLVLTVPCGSDSTNSQAVGLLLALAAHFRGQIYWAKDIVFLVTEHDLLGTEAWLEAYHDVNVTGMQSSPLQGRAGAIQAAVALELSSDVVTSLDVAVEGLNGQLPNLDLLNLFQTFCQKGGLLCTLQGKLQPEDWTSLDGPLQGLQTLLLMVLRQASGRPHGSHGLFLRYRVEALTLRGINSFRQYKYDLVAVGKALEGMFRKLNHLLERLHQSFFLYLLPGLSRFVSIGLYMPAVGFLLLVLGLKALELWMQLHEAGMGLEEPGGAPGPSVPLPPSQGVGLASLVAPLLISQAMGLALYVLPVLGQHVATQHFPVAEAEAVVLTLLAIYAAGLALPHNTHRVVSTQAPDRGWMALKLVALIYLALQLGCIALTNFSLGFLLATTMVPTAALAKPHGPRYVXISPTSPNACALITDRTLIQQPFPPTWCPCPHHGAYLDVASPPRTLYAALLVLTSPAATLLGSLFLWRELQEAPLSLAEGWQLFLAALAQGVLEHHTYGALLFPLLSLGLYPCWLLFWNVLFWK

SEQ ID NO: 1026856 - protein, 607 aa, Homo sapiens
MGLLSDPVRRRALARLVLRLNAPLCVLSYVAGIAWFLALVFPPLTQRTYMSENAMGSTMVEEQFAGGDRARAFARDFAAHRKKSGALPVAWLERTMRSVGLEVYTQSFSRKLPFPDETHERYMVSGTNVYGILRAPRAASTESLVLTVPCGSDSTNSQAVGLLLALAAHFREHDLLGTEAWLEAYHDVNVTGMQSSPLQGRAGAIQAAVALELSSDVVTSLDVAVEGLNGQLPNLDLLNLFQTFCQKGGLLCTLQGKLQPEDWTSLDGPLQGLQTLLLMVLRQASGRPHGSHGLFLRYRVEALTLRGINSFRQYKYDLVAVGKALEGMFRKLNHLLERLHQSFFLYLLPGLSRFVSIGLYMPAVGFLLLVLGLKALELWMQLHEAGMGLEEPGGAPGPSVPLPPSQGVGLASLVAPLLISQAMGLALYVLPVLGQHVATQHFPVAEAEAVVLTLLAIYAAGLALPHNTHRVVSTQAPDRGWMALKLVALIYLALQLGCIALTNFSLGFLLATTMVPTAALAKPHGPRTLYAALLVLTSPAATLLGSLFLWRELQEAPLSLAEGWQLFLAALAQGVLEHHTYGALLFPLLSLGLYPCWLLFWNVLFWK

SEQ ID NO: 1026857 - protein, 187 aa, Homo sapiens
  misc_feature (111)..(111): Xaa can be any naturally occurring amino acid
MGLLSDPVRRRALARLVLRLNAPLCVLSYVAGIAWFLALVFPPLTQRTYMSENAMGSTMVEEQFAGGDRARAFARDFAAHRKKSGWPPPWCPLLRLPSLMGPGPFMLPPFXVWGAEPSPAATLLGSLFLWRELQEAPLSLAEGWQLFLAALAQGVLEHHTYGALLFPLLSLGLYPCWLLFWNVLFWK

SEQ ID NO: 1026858 - protein, 161 aa, Homo sapiens
LSMVTPDDVNAIILAQKNMLDRCEKTHEMLLNFSYLSSARLQQMSERFLHHTRTLVEMKRDLDSIFRRIRTLKGKLARQHPEAFSHIPEASFLEEEDEDPIPPSTRTTIATSEQSTGSCDTSPDTVSPSLSPGFEDLSHVQPGSPAINGRSQTDDEEMTGE

SEQ ID NO: 1026859 - protein, 161 aa, Homo sapiens; identical to SEQ ID NO: 1026858

SEQ ID NO: 1026860 - protein, 170 aa, Homo sapiens
GVQAGIRPPPQARTTQKQKSRATMSSWSRQRPKSPGGIQPHVSRTLFLLLLLAASAWGVTLSPKDCQVFRSDHGSSISCQPPAEIPGYLPADTVHLAVEFFNLTHLPANLLQGASKLQELHLSSNGLESLSPEFLRPVPQLRVLDLTRNALTGLPPGGRITRSGDRDHLG

SEQ ID NO: 1026861 - protein, 347 aa, Homo sapiens
MSSWSRQRPKSPGGIQPHVSRTLFLLLLLAASAWGVTLSPKDCQVFRSDHGSSISCQPPAEIPGYLPADTVHLAVEFFNLTHLPANLLQGASKLQELHLSSNGLESLSPEFLRPVPQLRVLDLTRNALTGLPPGLFQASATLDTLVLKENQLEVLEVSWLHGLKALGHLDLSGNRLRKLPPGLLANFTLLRTLDLGENQLETLPPDLLRGPLQLERLHLEGNKLQVLGKDLLLPQPDLRYLFLNGNKLARVAAGAFQGLRQLDMLDLSNNSLASVPEGLWASLGQPNWDMRDGFDISGNPWICDQNLSDLYRWLQAQKDKMFSQNDTRCAGPEAVKGQTLLAVAKSQ

SEQ ID NO: 1026862 - protein, 347 aa, Homo sapiens; identical to SEQ ID NO: 1026861

SEQ ID NO: 1026863 - protein, 347 aa, Homo sapiens; identical to SEQ ID NO: 1026861

SEQ ID NO: 1026864 - protein, 98 aa, Homo sapiens
  misc_feature (6)..(6): Xaa can be any naturally occurring amino acid
  misc_feature (8)..(8): Xaa can be any naturally occurring amino acid
  misc_feature (13)..(14): Xaa can be any naturally occurring amino acid
  misc_feature (23)..(23): Xaa can be any naturally occurring amino acid
GEHALXRXNGFFXXYWMKNPQHXKDIGQYASVRNVLDEDNDNVGQPNEYDLNDSFLDDEEEDYEPTDEDSDWEPGKEDEEKEDVEELLKEAKRFMKRK

SEQ ID NO: 1026865 - protein, 98 aa, Homo sapiens; identical to SEQ ID NO: 1026864
  misc_feature (6)..(6): Xaa can be any naturally occurring amino acid
  misc_feature (8)..(8): Xaa can be any naturally occurring amino acid
  misc_feature (13)..(14): Xaa can be any naturally occurring amino acid
  misc_feature (23)..(23): Xaa can be any naturally occurring amino acid

SEQ ID NO: 1026866 - protein, 233 aa, Homo sapiens
RACKRSQRAKGETLPPVQLGSSLRDVLLLGAVSGKTKGRGLVMEDCAPEMIEMPTSTLEEMPQSFSAITLSNTEMNNIKTNAQRNKLPIEELGKVSKHKIATKRTPHKEDEAMSCSENCSSAQGDSLQDESQGSHSESSSNPSNPETLHAKATDSVLQGSEGNKVKRTSCMYGANCYRKNPVHFQHFSHPGDSDYGGVQIVGQDETDDRPECPYGPSCYRLEVQCPVEKHQLS

SEQ ID NO: 1026867 - protein, 341 aa, Homo sapiens
RACKRSQRAKGETLPPVQLGSSLRDVLLLGAVSGKTKGRGLVMEDCAPEMIEMPTSTLEEMPQSFSAITLSNTEMNNIKTNAQRNKLPIEELGKVSKHKIATKRTPHKEDEAMSCSENCSSAQGDSLQDESQGSHSESSSNPSNPETLHAKATDSVLQGSEGNKVKRTSCMYGANCYRKNPVHFQHFSHPGDSDYGGVQIVGQDETDDRPECPYGPSCYRKNPQHKIEYRHNTLPEADSAHNISAHRMRKLNAYYPGCTHLHLYVAYKQLTCNAMRNVLDEDNDNVGQPNEYDLNDSFLDDEEEDYEPTDEDSDWEPGKEDEEKEDVEELLKEAKRFMKRK

SEQ ID NO: 1026868 - protein, 413 aa, Homo sapiens
RACKRSQRAKGETLPPVQLGSSLRDVLLLGAVSGKTKGRGLVMEDCAPEMIEMPTSTLEEMPQSFSAITLSNTEMNNIKTNAQRNKLPIEELGKVSKHKIATKRTPHKEDEAMSCSENCSSAQGDSLQDESQGSHSESSSNPSNPETLHAKATDSVLQGSEGNKVKRTSCMYGANCYRKNPVHFQHFSHPGDSDYGGVQIVGQDETDDRPECPYGPSCYRKNPQHKIEYRHNTLPVRNVLDEDNDNVGQPNEYDLNDSFLDDEEEDYEPTDEDSDWGGRRRRKKKVMVRKEDGDEDEGKLRSVTGKRAVKMMTMTDVDTKKQKTTRMTRTAKKEQLSKTKGRGTNTLKSGSEYKRAPSEEGRPPTGQAPEMKAHQNNQMKMAQRGTADNTAETKNQKEGAKTNTETEEQKNTK

SEQ ID NO: 1026869 - protein, 98 aa, Homo sapiens
  misc_feature (11)..(11): Xaa can be any naturally occurring amino acid
WEGPLALKGAXALFILAAPYFICPGSSMVWPMEGGAGPQIPPAKLSLSPRGALFSSFPNFPSPRTRLDSPLRLQEGRRGESPTPSSLWPQPPCPPPGI

SEQ ID NO: 1026870 - protein, 98 aa, Homo sapiens; identical to SEQ ID NO: 1026869
  misc_feature (11)..(11): Xaa can be any naturally occurring amino acid

SEQ ID NO: 1026871 - protein, 96 aa, Homo sapiens
GLPAPLQRKWLFAKVVENSKPPTRSGSALSHACFCYALICSIPVFTYIVLVTSLRYHLFIWSVFSPKLLYEGMHLLITAAVCVFFTAMDQTRLTQS

SEQ ID NO: 1026872 - protein, 150 aa, Homo sapiens [sequence omitted]

SEQ ID NO: 1026873 - protein, 45 aa, Homo sapiens
MTGPQQRGRTGLAVMSWSETKATEAPLPPKCSEAARSGWCWPVRG

SEQ ID NO: 1026874 - protein, 514 aa, Homo sapiens
MREQLRFLHLNTVQLSKLLQENVPSYEKDPGFEQFKMSERLHGNWIRLYLEEKHSEVLFNLGSKVLRQYLDALKTLSLSLSAQVAQYDIYSMMVLTLLLLSVPQALRRKAELEVPLSSPGFSLLFYLVILVLSAVHVIVCTSAESSCYFCGLSWLAAGGVMVLASALLCVIVSVLTNVLVGGNTPRKNPMHPSSRWSELDLLILLGTAGHVLSLGASSFVEEEHQTWYFLVNTLCLALSQETYRNYFLGDDGEPPCGLCVEQGHDGATAAWQDGPGCDVLERDKGHGSPSTSEVLRGREKWMVLASPWLILACCRLLRSLNQTGVQWAHRPDLGHWLTSSDHKAELSVLAALSLLVVFVLVQRGCSPVSKAALALGLLGVYCYRAAIGSVRFPWRPDSKDISKGIIEARFVYVFVLGILFTGTKDLLKSQVIAADFKLKTVGLWEIYSGLVLLAALLFRPHNLPVLAFSLLIQTLMTKFIWKPLRHDAAEITVMHYWFGQAFFYFQVGFHYYHG

SEQ ID NO: 1026875 - protein, 577 aa, Homo sapiens
LILISSAFERKPGDIRHPKHVQQTDVAATLAIALGLPIPKDSVGSLLFPVVEGRPMREQLRFLHLNTVQLSKLLQENVPSYEKDPGFEQFKMSERLHGNWIRLYLEEKHSEVLFNLGSKVLRQYLDALKTLSLSLSAQVAQYDIYSMMVGTVVVLEVLTLLLLSVPQALRRKAELEVPLSSPGFSLLFYLVILVLSAVHVIVCTSAESSCYFCGLSWLAAGGVMVLASALLCVIVSVLTNVLVGGNTPRKNPMHPSSRWSELDLLILLGTAGHVLSLGASSFVEEEHQTWYFLVNTLCLALSQETYRNYFLGDDGEPPCGLCVEQGHDGATAAWQDGPGCDVLERDKGHGSPSTSEVLRGREKWMVLASPWLILACCRLLRSLNQTGVQWAHRPDLGHWLTSSDHKAELSVLAALSLLVVFVLVQRGCSPVSKAALALGLLGVYCYRAAIGSVRFPWRPDSKDISKGIIEARFVYVFVLGILFTGTKDLLKSQVIAADFKLKTVGLWEIYSGLVLLAALLFRPHNLPVLAFSLLIQTLMTKFIWKPLRHDAAEITVMHYWFGQAFFYFQVGFHYYHG

SEQ ID NO: 1026876 - protein, 577 aa, Homo sapiens; identical to SEQ ID NO: 1026875

SEQ ID NO: 1026877 - protein, 577 aa, Homo sapiens; identical to SEQ ID NO: 1026875

SEQ ID NO: 1026878 - protein, 695 aa, Homo sapiens
LILISSAFERKPGDIRHPKHVQQTDVAATLAIALGLPIPKDSVGSLLFPVVEGRPMREQLRFLHLNTVQLSKLLQENVPSYEKDPGFEQFKMSERLHGNWIRLYLEEKHSEVLFNLGSKVLRQYLDALKTLSLSLSAQVAQYDIYSMMVGTVVVLEVLTLLLLSVPQALRRKAELEVPLSSPGFSLLFYLVILVLSAVHVIVCTSAESSCYFCGLSWLAAGGVMVLASALLCVIVSVLTNVLVGGNTPRKNPMHPSSRWSELDLLILLGTAGHVLSLGASSFVEEEHQTWYFLVNTLCLALSQETYRNYFLGDDGEPPCGLCVEQGHDGATAAWQDGPGCDVLERDKGHGSPSTSEVLRGREKWMVLASPWLILACCRLLRSLNQTGVQWAHRPDLGHWLTSSDHKAELSVLAALSLLVVFVLVQRGCSPVSKAALALGLLGVYCYRAAIGSVRFPWRPDSKDISKGIIEARFVYVFVLGILFTGTKDLLKSQVIAADFKLKTVGLWEIYSGLVLLAALLFRPHNLPVLAFSLLIQTLMTKFIWKPLRHDAAEITVMHYWFGQAFFYFQGNSNNIATVDISAGFVGLDTYVEIPAVLLTAFGTYAGPVLWASHLVHFLSSETLWVSAMLHDSFCYPLHMTITDYACIEPVTAGVKPTIYTADFSPKLLYEGMHLLITAAVCVFFTAMDQTRLTQS

SEQ ID NO: 1026879 - protein, 466 aa, Homo sapiens
LILISSAFERKPGDIRHPKHVQQTDVAATLAIALGLPIPKDSVGSLLFPVVEGRPMREQLRFLHLNTVQLSKLLQENVPSYEKDPGFEQFKMSERLHGNWIRLYLEEKHSEVLFNLGSKVLRQYLDALKTLSLSLSAQVAQYDIYSMMVGTVVVLEVLTLLLLSVPQALRRKAELEVPLSSPGFSLLFYLVILVLSAVHVIVCTSAESSCYFCGLSWLAAGGVMVLASALLCVIVSVLTNVLVGGNTPRKNPMHPSSRWSELDLLILLGTAGHVLSLGASSFVEEEHQTWYFLVNTLCLALSQETYRNYFLGDDGEPPCGLCVEQGHDGATAAWQDGPGCDVLERDKGHGSPSTSEVLRGREKWMVLASPWLILACCRLLRSLNQTGVQWAHRPDLGHWLTSSDHKAELSVLAALSLLVVFVLVQRGCSPVSKAALALGLLGVYCYRAAIGSVRFPWRPDSKDISK

SEQ ID NO: 1026880 - protein, 388 aa, Homo sapiens
MFSFFSGDIRHPKHVQQTDVAATLAIALGLPIPKDSVGSLLFPVVEGRPMREQLRFLHLNTVQLSKLLQENVPSYEKDPGFEQFKMSERLHGNWIRLYLEEKHSEVLFNLGSKVLRQYLDALKTLSLSLSAQVAQYDIYSMMVLTLLLLSVPQALRRKAELEVPLSSPGFSLLFYLVILVLSAVHVIVCTSAESSCYFCGLSWLAAGGVMVLASALLCVIVSVLTNVLVGGNTPRKNPMHPSSRWSELDLLILLGTAGHVLSLGASSFVEEEHQTWYFLVNTLCLALSQETYRNYFLGDDGEPPCGLCVEQGHDGATAAWQDGPGCDVLERDKGHGSPSTSEVLRGREKWMVLASPWLILACCRLLRSLNQTGVQWAHRPDLGHWLTR

SEQ ID NO: 1026881 - protein, 289 aa, Homo sapiens
MFSFFSGDIRHPKHVQQTDVAATLAIALGLPIPKDSVGSLLFPVVEGRPMREQLRFLHLNTVQLSKLLQENVPSYEKDPGFEQFKMSERLHGNWIRLYLEEKHSEVLFNLGSKVLRQYLDALKTLSLSLSAQVAQYDIYSMMVLTLLLLSVPQALRRKAELEVPLSSPGFSLLFYLVILVLSAVHVIVCTSAESSCYFCGLSWLAAGGVMVLASALLCVIVSVLTNVLVGGNTPRKTLVEHLVCATCWQCPGQGASGKDVEQPYPRPLGVPTQVFTSVLSGQMPQFLES

SEQ ID NO: 1026882 - protein, 112 aa, Homo sapiens
ALYSKGKSYWSLFENKSVVTCVICKWHVLIHIFFLINTQWFSTESCLLLLRTDLFYSSFHVHRFGDISALSFIYMECIFSKTSLRGNAPAHYSCCLCILHGNGSNQTHTVLD

SEQ ID NO: 1026883 - protein, 577 aa, Homo sapiens; identical to SEQ ID NO: 1026875

SEQ ID NO: 1026884 - protein, 206 aa, Homo sapiens
MGPSIWPAVCLHVSFPEKPRRGDFGWSPLQSSDHKAELSVLAALSLLVVFVLVQRGCSPVSKAALALGLLGVYCYRAAIGSVRFPWRPDSKDISKGIIEARFVYVFVLGILFTGTKDLLKSQVIAADFKLKTVGLWEIYSGLVLLAALLFRPHNLPVLAFSLLIQTLMTKFIWKPLRHDAAEITVMHYWFGQAFFYFQVGFHYYHG

SEQ ID NO: 1026885 - protein, 109 aa, Homo sapiens
MTRLSLGEHVRIPGATLVAQFFWKILSSDHKAELSVLAALSLLVVFVLVQRGCSPVSKAALALGLLGVYCYRAAIGSVRFPWRPDSKDISNRATPTTLPPWTSPQASWA

SEQ ID NO: 1026886 - protein, 577 aa, Homo sapiens; identical to SEQ ID NO: 1026875

SEQ ID NO: 1026887 - protein, 577 aa, Homo sapiens; identical to SEQ ID NO: 1026875

SEQ ID NO: 1026888 - protein, 355 aa, Homo sapiens
MREQLRFLHLNTVQLSKLLQENVPSYEKDPGFEQFKMSERLHGNWIRLYLEEKHSEVLFNLGSKVLRQYLDALKTLSLSLSAQVAQYDIYSMMVLTLLLLSVPQALRRKAELEVPLSSPGFSLLFYLVILVLSAVHVIVCTSAESSCYFCGLSWLAAGGVMVLASALLCVIVSVLTNVLVGGNTPRKNPMHPSSRWSELDLLILLGTAGHVLSLGASSFVEEEHQTWYFLVNTLCLALSQETYRNYFLGDDGEPPCGLCVEQGHDGATAAWQDGPGCDVLERDKGHGSPSTSEVLRGREKWMVLASPWLILACCRLLRSLNQTGVQWAHRPDLGHWLTSHSENALITAKMAPSHS

SEQ ID NO: 1026889 - protein, 604 aa, Homo sapiens
MSERLHGNWIRLYLEEKHSEVLFNLGSKVLRQYLDALKTLSLSLSAQVAQYDIYSMMVGTVVVLEVLTLLLLSVPQALRRKAELEVPLSSPGFSLLFYLVILVLSAVHVIVCTSAESSCYFCGLSWLAAGGVMVLASALLCVIVSVLTNVLVGGNTPRKNPMHPSSRWSELDLLILLGTAGHVLSLGASSFVEEEHQTWYFLVNTLCLALSQETYRNYFLGDDGEPPCGLCVEQGHDGATAAWQDGPGCDVLERDKGHGSPSTSEVLRGREKWMVLASPWLILACCRLLRSLNQTGVQWAHRPDLGHWLTSSDHKAELSVLAALSLLVVFVLVQRGCSPVSKAALALGLLGVYCYRAAIGSVRFPWRPDSKDISKGIIEARFVYVFVLGILFTGTKDLLKSQVIAADFKLKTVGLWEIYSGLVLLAALLFRPHNLPVLAFSLLIQTLMTKFIWKPLRHDAAEITVMHYWFGQAFFYFQGNSNNIATVDISAGFVGLDTYVEIPAVLLTAFGTYAGPVLWASHLVHFLSSETRSGSALSHACFCYALICSIPVFTYIVLVTSLRYHLFIWSVFSPKLLYEGMHLLITAAVCVFFTAMDQTRLTQS

SEQ ID NO: 1026890 - protein, 260 aa, Homo sapiens [sequence omitted]

SEQ ID NO: 1026891 - protein, 260 aa, Homo sapiens [sequence omitted]

SEQ ID NO: 1026892 - protein, 260 aa, Homo sapiens [sequence omitted]

SEQ ID NO: 1026893 - protein, 107 aa, Homo sapiens
MLALLGLSQALNILLGLKGLAPAEISAVCEKGNFNVAHGLAWSYYIGYLRLILPELQARIRTYNQHYNNLLRGAVSQRLYILPPTPLEYSLSLAVSLYSTPFSTVLF

SEQ ID NO: 1026894 - protein, 260 aa, Homo sapiens [sequence omitted]

SEQ ID NO: 1026895 - protein, 164 aa, Homo sapiens [sequence omitted]

SEQ ID NO: 1026896 - protein, 166 aa, Homo sapiens
MADPNIRFLDKLPQQTGDRAGIKDRVYSNSIYELLENGQRAGTCVLEYATPLQTLFAMSQYSQAGFSREDRLEQAKLFCRTLEDILADAPESQNNCRLIAYQEPADDSSFSLSQEVLRHLRQEEKEEVTVGSLKTSAVPSTSTMSQEPELLISGMEKPLPLRTDFS

SEQ ID NO: 1026897 - protein, 113 aa, Homo sapiens [sequence omitted]

SEQ ID NO: 1026898 - protein, 95 aa, Homo sapiens
MRGKPKAHAVSDSRHLREERSQIDKVTKSRRPTLVGEQFDRPNPNCTEGLDSIMGKPKGTSQEKAQIAMAQRNRMQKTHNRAKRDDTQEDLTPKE

SEQ ID NO: 1026899 - protein, 294 aa, Homo sapiens
MLALLGLSQALNILLGLKGLAPAEISAVCEKGNFNVAHGLAWSYYIGYLRLILPALEYSGDKISAHCNLCSQVQVILLLTSLNSSGLPELQARIRTYNQHYNNLLRGAVSQRLYILLPLDCGVPDNLSMADPNIRFLDKLPQQTGDRAGIKDRVYSNSIYELLENGQRAGTCVLEYATPLQTLFAMSQYSQAGFSREDRLEQAKLFCRTLEDILADAPESQNNCRLIAYQEPADDSSFSLSQEVLRHLRQEEKEEVTVGSLKTSAVPSTSTMSQEPELLISGMEKPLPLRTDFS

SEQ ID NO: 1026900 - protein, 304 aa, Homo sapiens
YGSGTGLKAGVHGVEPIMSWNSGFGNGKRGIKSGAGWEALEEEEEFSGVLDGGPPATSCCPQGLAPAEISAVCEKGNFNVAHGLAWSYYIGYLRLILPELQARIRTYNQHYNNLLRGAVSQRLYILLPLDCGVPDNLSMADPNIRFLDKLPQQTGDRAGIKDRVYSNSIYELLENGQRAGTCVLEYATPLQTLFAMSQYSQAGFSREDRLEQAKLFCRTLEDILADAPESQNNCRLIAYQEPADDSSFSLSQEVLRHLRQEEKEEVTVGSLKTSAVPSTSTMSQEPELLISGMEKPLPLRTDFS

SEQ ID NO: 1026901 - protein, 110 aa, Homo sapiens
SFSSRSDKKGPKTIAEMRKQDLAKDTDPLKAEAPGLDEGKELGHPGPAVHLAHSAVGRGEPAGTPVGMADLVAPEQVKKHYRRAVLAVHPDQGCGAAVRAARQDDLHGAE

SEQ ID NO: 1026902 - protein, 110 aa, Homo sapiens; identical to SEQ ID NO: 1026901

SEQ ID NO: 1026903 - protein, 110 aa, Homo sapiens; identical to SEQ ID NO: 1026901

SEQ ID NO: 1026904 - protein, 110 aa, Homo sapiens; identical to SEQ ID NO: 1026901

SEQ ID NO: 1026905 - protein, 74 aa, Homo sapiens
  misc_feature (16)..(16): Xaa can be any naturally occurring amino acid
RPRDRLREDDRGHEEXPPKPLMLPLLPKEQLIHAPPAIVTSVIYLVFRAWPLEPRHVVGHAAGAHGPWCLHRTL

SEQ ID NO: 1026906 - protein, 145 aa, Homo sapiens
MPPEGGQIIPPARRCLYASVLTATPRLMEPIYLVEIQCPKQVVGGIYRVFNRKRGPVFEESQVAGPPMFVVKAYLAVNESFGFTPYLRSNTGGQAFPQCVFSPWQILPGDPFDNNNRPNQVVGETRQRKGLKKGIPALGNFLDKL

SEQ ID NO: 1026907 - protein, 271 aa, Homo sapiens
MSVVLEFHFDTQRLHLPTQVADKKAYKMKWRSQIRGDPLCLEGPEMWTVTGCTMDWKKGKNVTCQEPSRKGRSIRVEALLDTITETMYPHESLLQLLQSIESIRGWRITWMKILNSALASDFEIGHFFRERIVPTVLCCTSLEEAIRRTDDNYEEGEEGEEEELEKVTRREKTRDDAQMKPKVYFCLLIIPYVSRREPSSRRNARQKEDATQGGWHSGCGIRLGRGSVVPRKSGTEYTTNGEGSNTSLLTNGYDSMKRTRVDDPTGTNRPG

SEQ ID NO: 1026908 - protein, 138 aa, Homo sapiens
MAEREEDDDTEEAWMQLRPTEPLPSQCCGSGCSPCVFDLYHRDLARWEAAQASKDRSLLRGPESQSCPSKLNPETFVAFCIIAMDRLTKDTYRVRFALPGNSQLGLRPGQHLILRYTQGIVDDLENSESLYAHQPCQR

SEQ ID NO: 1026909 - protein, 86 aa, Homo sapiens
MAEREEDDDTEEAWMQLRPTEPLPSQCCGSGCSPCVFDLYHRDLARWEAAQASKDRSLLRGPESQRGIVDDLENSESLYAHQPCQR

SEQ ID NO: 1026910 - protein, 137 aa, Homo sapiens
MAEREEDDDTEEAWMQLRPTEPLPSQCCGSGCSPCVFDLYHRDLARWEAAQASKDRSLLRGPESQSCPSKLNPETFVAFCIIAMDRLTKDTYRVRFALPGNSQLGLRPGQHLILRYTQVAGGPKLHSPALLFASCWP

SEQ ID NO: 1026911 - protein, 218 aa, Homo sapiens
APPPRVCPGKGLAGGRPSGPLLPEGSSRLELTALERVVRISAKPTKRLQEALQPILEKHGLSPLEVVLHRPGEKQPLDLGKLVSSVAAQRLVLDTLPGVKISKARDKSPCRSQGCPPRTQDKATHPPPASPSSLVKVPSSATGKRQTCDIEGLVELLNRVQSSGAHDQRGLLRKEDLVLPEFLQLPAQGPSSEETPPQTKSAAQPIGGSLNSTTDSAL

SEQ ID NO: 1026912 - protein, 163 aa, Homo sapiens
AGRRPVPRAADLSPQPGEKQPLDLGKLVSSVAAQRLVLDTLPGVKISKARDKSPCRSQGCPPRTQDKATHPPPASPSSLVKVPSSATGKRQTCDIEGLVELLNRVQSSGAHDQRGLLRKEDLVLPEFLQLPAQGPSSEETPPQTKSAAQPIGGSLNSTTDSAL

SEQ ID NO: 1026913 - protein, 441 aa, Homo sapiens
MFRAQQLQIFNLMKFDSYARFVKSPLYRECLLAEAEGRPLREPGSSRLGSPDATRKKPKLKPGKSLPLGVEELGQLPPVEGPGGRPLRKSFRRELGGTANAALRRESQGSLNSSASLDLGFLAFVSSKSESHRKSLGSTEGESESRPGKYCCVYLPDGTASLALARPGLTIRDMLAGICEKRGSLYLTSSLPGGNEQKALVLDQDCTVLADQEVRLENRITFELELTALERVVRISAKPTKRLQEALQPILEKHGLSPLEVVLHRPGEKQPLDLGKLVSSVAAQRLVLDTLPGVKISKARDKSPCRSQGCPPRTQDKATHPPPASPSSLVKVPSSATGKRQTCDIEGLELLNRVQSSGAHDQRGLLRKEDLVLPEFLQLPAQGPAPRRPTTDQISSPAHRGILELHHRLSPLTATQQSRTAAWHPAGRACHGSALHALSVP

SEQ ID NO: 1026914 - protein, 441 aa, Homo sapiens; identical to SEQ ID NO: 1026913

SEQ ID NO: 1026915 - protein, 467 aa, Homo sapiens
MPGKPKHLGVPNGRMVLAVSDGELSSTTGPQGQGEGRGSSLSIHSLPSGPSSPFPTEEQPVASWALSFERLLQDPLGLAYFTEFLKKEFSAENVTFWKACERFQQIPASDTQQLAQEARNIYQEFLSSQALSPVNIDRQAWLGEEVLAEPRPDMFRAQQLQIFNLMKFDSYARFVKSPLYRECLLAEAEGRPLREPGSSRLGSPDATRKKPKLKPGKSLPLGVEELGQLPPVEGPGGRPLRKSFRRELGGTANAALRRESQGSLNSSASLDLGFLAFVSSKSESHRKSLGSTEGESESRPGKYCCVYLPDGTASLALARPGLTIRDMLAGICEKRGLSLPDIKVYLVGNEQKALVLDQDCTVLADQEVRLENRITFELELTALERVVRISAKPTKRLQEALQPILEKHGLSPLEVVLHRPGEKQPLDLGKLVSSVAAQRLVLDTLPGVKISKARDKSPCRSQAWWSC

SEQ ID NO: 1026916 - protein, 241 aa, Homo sapiens
MLAGICEKRGLSLPDIKVYLVGNEQKALVLDQDCTVLADQEVRLENRITFELELTALERVVRISAKPTKRLQEALQPILEKHGLSPLEVVLHRPGEKQPLDLGKLVSSVAAQRLVLDTLPGVKISKARDKSPCRSQGCPPRTQDKATHPPPASPSSLVKVPSSATGKRQTCDIEGLVELLNRVQSSGAHDQRGLLRKEDLVLPEFLQLPAQGPSSEETPPQTKSAAQPIGGSLNSTTDSAL

SEQ ID NO: 1026917 - protein, 692 aa, Homo sapiens
MPGKPKHLGVPNGRMVLAVSDGELSSTTGPQGQGEGRGSSLSIHSLPSGPSSPFPTEEQPVASWALSFERLLQDPLGLAYFTEFLKKEFSAENVTFWKACERFQQIPASDTQQLAQEARNIYQEFLSSQALSPVNIDRQAWLGEEVLAEPRPDMFRAQQLQIFNLMKFDSYARFVKSPLYRECLLAEAEGRPLREPGSSRLGSPDATRKKPKLKPGKSLPLGVEELGQLPPVEGPGGRPLRKSFRRELGGTANAALRRESQGSLNSSASLDLGFLAFVSSKSESHRKSLGSTEGESESRPGKYCCVYLPDGTASLALARPGLTIRDMLAGICEKRGLSLPDIKVYLVGNEQKALVLDQDCTVLADQEVRLENRITFELELTALERVVRISAKPTKRLQEALQPILEKHGLSPLEVVLHRPGEKQPLDLGKLVSSVAAQRLVLDTLPGVKISKARDKSPCRSQGCPPRTQDKATHPPPASPSSLVKVPSSATGKRQTCDIEGTWWMSWGSERLGQWGWGPFRVASESLELRQGAGCHWAWNRKDGGWGVKGAGTWGPQAIGAGARKAVATVRQWDYRGLAYEAGLLGGPLMLWLASRPGGAAEPGAEQRGPRPEGPSEERGPGTSRISAAARPRAQLRGDPTTDQISSPAHRGILELHHRLSPLTATQQSRTAAWHPAGRACHGSALHALSVP

SEQ ID NO: 1026918 - protein, 435 aa, Homo sapiens
GQPQGPGLGAGSPAPPPQPRLTCSGVAPQIFNLMKFDSYARFVKSPLYRECLLAEAEGRPLREPGSSRLGSPDATRKKPKLKPGKSLPLGVEELGQLPPVEGPGGRPLRKSFRRELGGTANAALRRESQGSLNSSASLDLGFLAFVSSKSESHRKSLGSTEGESESRPGKYCCVYLPDGTASLALARPGLTIRDMLAGICEKRGLSLPDIKVYLVGNEQKALVLDQDCTVLADQEVRLENRITFELELTALERVVRISAKPTKRLQEALQPILEKHGLSPLEVVLHRPGEKQPLDLGKLVSSVAAQRLVLDTLPGVKISKARDKSPCRSQGCPPRTQDKATHPPPASPSSLVKVPSSATGKRQTCDIEGLVELLNRVQSSGAHDQRGLLRKEDLVLPEFLQLPAQGPSSEETPPQTKSAAQPIGGSLNSTTDSAL

SEQ ID NO: 1026919 - protein, 337 aa, Homo sapiens
MGEGGGLFAFIAPSSLELGGTANAALRRESQGSLNSSASLDLGFLAFVSSKSESHRKSLGSTEGESESRPGKYCCVYLPDGTASLALARPGLTIRDMLAGICEKRGLSLPDIKVYLVGNEQKALVLDQDCTVLADQEVRLENRITFELELTALERVVRISAKPTKRLQEALQPILEKHGLSPLEVVLHRPGEKQPLDLGKLVSSVAAQRLVLDTLPGVKISKARDKSPCRSQGCPPRTQDKATHPPPASPSSLVKVPSSATGKRQTCDIEGLVELLNRVQSSGAHDQRGLLRKEDLVLPEFLQLPAQGPSSEETPPQTKSAAQPIGGSLNSTTDSAL

SEQ ID NO: 1026920 - protein, 201 aa, Homo sapiens
MFRAQQLQIFNLMKFDSYARFVKSPLYRECLLAEAEGRPLREPGSSRLGSPDATRKKPKLKPGKSLPLGVEELGQLPPVEGPGGRPLRKSFRRELGGTANAALRRESQGSLNSSASLDLGFLAFVSSKSESHRKSLGSTEGESESRPGKYCCVYLPDGTASLALARPGLTIRDMLAGICEKRGLSLPDIKVYLVGNEQVGT

SEQ ID NO: 1026921 - protein, 208 aa, Homo sapiens
MPRGYNWAFLVGRSQQPGLVLIPGTCLLPEVTEEDQGRICVVIDLDETLVHSSFKPINNADFIVPIEIEGTTHQVYVLKRPYVDEFLRRMGELFECVLFTASLAKYADPVTDLLDRCGVFRARLFRESCVFHQGCYVKDLSRLGRDLRKTLILDNSPASYIFHPENAVPVQSWFDDMADTELLNLIPIFEELSGAEDVYTSLGQLRAP

SEQ ID NO: 1026922 - protein, 208 aa, Homo sapiens; identical to SEQ ID NO: 1026921

SEQ ID NO: 1026923 - protein, 180 aa, Homo sapiens
MPRGYNWAFLVGRSQQPGLVLIPGTCLLPEVTEEDQGRICVVIDLDETLVHSSFKPINNADFIVPIEIEGTTHQVYVLKRPYVDEFLRRMGELFECVLFTASLAKGCYVKDLSRLGRDLRKTLILDNSPASYIFHPENAVPVQSWFDDMADTELLNLIPIFEELSGAEDVYTSLGQLRAP

SEQ ID NO: 1026924 - protein, 208 aa, Homo sapiens; identical to SEQ ID NO: 1026921

SEQ ID NO: 1026925 - protein, 104 aa, Homo sapiens
SGGDSCLQASDRSSGFGWGGKGSEMARDHLLLFLSRICSSVSSTSSTQVRDSGLVSTQKPGSCDPCQLHGQGDVHSPWCLASHLPDLGSHLFPILVEGLLCARH

SEQ ID NO: 1026926 - protein, 106 aa, Homo sapiens
LGEIVASRLKTEAVGLDGVGKAVRWHVTTSFSSSVGSAPVSPVPVLPEIPGTCLLPEVTEEDQGRICVVIDLDETLVHSSFKPINNADFIVPIEIEGTTHQVYRVV

SEQ ID NO: 1026927 - protein, 208 aa, Homo sapiens
LRLGPLIHWKPGEGYSQFSGSVGSQGPQASSQVAQEAGLQGLRAPCCCVTGEGTQYCKTFITGMPPTGCSALPQVYVLKRPYVDEFLRRMGELFECVLFTASLAKYADPVTDLLDRCGVFRARLFRESCVFHQGCYVKDLSRLGRDLRKTLILDNSPASYIFHPENAVPVQSWFDDMADTELLNLIPIFEELSGAEDVYTSLGQLRAP

SEQ ID NO: 1026928 - protein, 194 aa, Homo sapiens
MPRGYNWAFLVGRSQQPGLVLIPGTCLLPEVTEEDQGRICVVIDLDETLVHSSFKPINNADFIVPIEIEGTTHQVYVLKRPYVDEFLRRMGELFECVLFTASLAKYADPVTDLLDRCGVFRARLFRESCVFHQGCYVKDLSRLGRDLRKTLILDNSPASYIFHPENAVPVQSWFDDMADTELLNLIPIFEELGC

SEQ ID NO: 1026929 - protein, 228 aa, Homo sapiens
LPFRSAVILLQEPQVRSSACAPSRNGMVLNAPLPQWTWQRRVATWFNQPARKIRRRKARQCQGAAALVPRPASGPIRPIVRCPTVRYHTKVRAGRGFSLEELRVAGIHKKVARTIGISVDPRRRNKSTESLQANVQRLKEYRSKLILFPRKPSAPKKGDSSAEELKLATQLTGPVMPVRNVYKKEKARVITEEEKNFKAFASLRMARAQRPALRHTGKKSQGSRRTGC

SEQ ID NO: 1026930 - protein, 228 aa, Homo sapiens; identical to SEQ ID NO: 1026929

SEQ ID NO: 1026931 - protein, 228 aa, Homo sapiens; identical to SEQ ID NO: 1026929

SEQ ID NO: 1026932 - protein, 149 aa, Homo sapiens
MQHAYWELKREMSNLHLVTQVQAELLRKLKTSTAIKKACAPVGCSEDLGRDSTKLHLMNFTATYTRHPPLLPNGKALCHTTSSPLPGDVKVLSEKAILQSWTDNERSIPNDGTCFQEHSSYGRNSLEDNSWVFPSPPKSSETAFGETKN

SEQ ID NO: 1026933 - protein, 81 aa, Homo sapiens
SDLKIELQKAKQTDPYQEDNLKSRDLQKLSISSDNMQHAYWELKREMSNLHLVTQVQAELLRKLKTSTAIKKGKSLFTGNH

SEQ ID NO: 1026934 - protein, 224 aa, Homo sapiens
SDLKIELQKAKQTDPYQEDNLKSRDLQKLSISSDNMQHAYWELKREMSNLHLVTQVQAELLRKLKTSTAIKKACAPVGCSEDLGRDSTKLHLMNFTATYTRHPPLLPNGKALCHTTSSPLPGDVKVLSEKAILQSWTDNERSIPNDGTCFQEHSSYGRNSLEDNSWVFPSPPKSSETAFGETKSKTLPLPKPSTTGITWDQHIQNCLLYRINMGQKIHGSSPMQ

SEQ ID NO: 1026935 - protein, 488 aa, Homo sapiens
RAANAASSQWPNEVEMMTTRSLITIAHVRKLRNIGSGQRRHSRPRQSCGREAIVISRDAQARPPCGIRYLSSYDTGPPDTLQCKQVATWQQLELKKACPPGLNEIEIRAKSSIRFTSAVTGDGCKSHTGAWGKPVIEYKTPKTSRMPIINVAPLDVGAPDQELGFEVGPVCFLETSLHPNLAPSHPTNFPPNPETDKQPKLNPLKSQKMGDNFTWTLENIFFLCIHLSNLVFIFDQPNMTKNQKCIHPYQKKKFKKGIYLINFLKKEAGPPGLKTHAGVGPFVARGVFETPMACPFELLFSKPPWGPSPPLLPKFWSPQKTQGNIVWSAQQIKGNAQTPMGAPTLQPVRARQRTPRPWGTWGSLQSCQKKPCAKSGGLPRGSVENIVPYGDMEGGQCRGEATKATINGDSRRSSQQGAHGYEITAEKPPVGRNRVSNTLGCPQGTGTGAEHGAVLGVTGVLRKKYPGLVLEVPRDKLTAAGMKTDEGP

SEQ ID NO: 1026936 - protein, 506 aa, Homo sapiens
RAANAASSQWPNEVEMMTTRSLITIAHVRKLRNIGSGQRRHSRPRQSCGREAIVISRDAQARPPCGIRYLSSYDTGPPDTLQCKQVATWQQLELKKACPPGLNEIEIRAKSSIRFTSAVTGDGCKSHTGAWGKPVIEYKTPKTSRMPIINVAPLDVGAPDQELGFEVGPVCFLETSLHPNLAPSHPTNFPPNPETDKQPKLNPLKSQKMGDNFTWTLENIFFLCIHLSNLVFGHVRLVKDKNKFEEMNAKIFDQPNMTKNQKCIHPYQKKKFKKGIYLINFLKKEAGPPGLKTHAGVGPFVARGVFETPMACPFELLFSKPPWGPSPPLLPKFWSPQKTQGNIVWSAQQIKGNAQTPMGAPTLQPVRARQRTPRPWGTWGSLQSCQKKPCAKSGGLPRGSVENIVPYGDMEGGQCRGEATKATINGDSRRSSQQGAHGYEITAEKPPVGRNRVSNTLGCPQGTGTGAEHGAVLGVTGVLRKKYPGLVLEVPRDKLTAAGMKTDEGP

SEQ ID NO: 1026937 - protein, 279 aa, Homo sapiens
MQLKPMEINPEMLNKVLSRLGVAGQWRFVDVLGLEEESLGSVPAPACALLLLFPLTAQHENFRKKQIEELKGQEVSPKVYFMKQTIGNSCGTIGLIHAVANNQDKLGFEDGSVLKQFLSETEKMSPEDRAKCFEKNEAIQAAHDAVAQEGQCRVDDKVNFHFILFNNVDGHLYELDGRMPFPVNHGASSEDTLLKDAAKVCREFHRSVSKGEVRFSGRGSLARQPNAPVGGTLLISPLPFNMKIFTPPMQSKNASVLVKTQGGSFCSCRHAFPLSTPGA

SEQ ID NO: 1026938 - protein, 237 aa, Homo sapiens
MQLKPMEINPEMLNKVLSRLGVAGQWRFVDVLGLEEESLGSVPAPACALLLLFPLTAQHENFRKKQIEELKGQEVSPKVYFMKQTIGNSCGTIGLIHAVANNQDKLGFEDGSVLKQFLSETEKMSPEDRAKCFEKNEAIQAAHDAVAQEGQCRDAAKVCREFHRSVSKGEVRFSGRGSLARQPNAPVGGTLLISPLPFNMKIFTPPMQSKNASVLVKTQGGSFCSCRHAFPLSTPGA

SEQ ID NO: 1026939 - protein, 194 aa, Homo sapiens
MGEIKVSPDYNWFRGTVPLKKIIVDDDDSKIWSLYDAGPRSIRCPLIFLPPVSGTADVFFRQILALTGWGYRVIALQYPVYWDHLEFCDGFRKLLDHLQLDKVHLFGASLGGFLAQKFAEYTHKSPRVHSLILCNSFSDTSIFNQTWTANSFWLMPAFMLKKIVLGNFSSGPVDPMMADAIDFMGRQARKFGSE

SEQ ID NO: 1026940 - protein, 194 aa, Homo sapiens; identical to SEQ ID NO: 1026939

SEQ ID NO: 1026941 - protein, 180 aa, Homo sapiens
LQDSAREIIVDDDDSKIWSLYDAGPRSIRCPLIFLPPVSGTADVFFRQILALTGWGYRVIALQYPVYWDHLEFCDGFRKLLDHLQLDKVHLFGASLGGFLAQKFAEYTHKSPRVHSLILCNSFSDTSIFNQTWTANSFWLMPAFMLKKIVLGNFSSGPVDPMMADAIDFMGRQARKFGSE

SEQ ID NO: 1026942 - protein, 176 aa, Homo sapiens
MGEIKVSPDYNWFRGTVPLKKIIVDDDDSKIWSLYDAGPRSIRCPLIFLPPVSGTADVFFRQILALTGWGYRVIALQYPVYWDHLEFCDGFRGGFLAQKFAEYTHKSPRVHSLILCNSFSDTSIFNQTWTANSFWLMPAFMLKKIVLGNFSSGPVDPMMADAIDFMGRQARKFGSE

SEQ ID NO: 1026943 - protein, 167 aa, Homo sapiens
MGEIKVSPDYNWFRGTVPLKKIIVDDDDSKIWSLYDAGPRSIRCPLIFLPPVSGTADVFFRQILALTGWGYRVIAVHLFGASLGGFLAQKFAEYTHKSPRVHSLILCNSFSDTSIFNQTWTANSFWLMPAFMLKKIVLGNFSSGPVDPMMADAIDFMGRQARKFGSE

SEQ ID NO: 1026944 - protein, 194 aa, Homo sapiens; identical to SEQ ID NO: 1026939

SEQ ID NO: 1026945 - protein, 257 aa, Homo sapiens
HASARQLSGGRAGGARRPKLAWPRAPPPQRPASRTHRAACCARGSRVLRRPPRPGPSRLHGPRSYWSEERPPEGGEGTWGRPRQIIVDDDDSKIWSLYDAGPRSIRCPLIFLPPVSGTADVFFRQILALTGWGYRVIALQYPVYWDHLEFCDGFRKLLDHLQLDKVHLFGASLGGFLAQKFAEYTHKSPRVHSLILCNSFSDTSIFNQTWTANSFWLMPAFMLKKIVLGNFSSGPVDPMMADAIDFMGRQARKFGSE

SEQ ID NO: 1026946 - protein, 194 aa, Homo sapiens; identical to SEQ ID NO: 1026939

SEQ ID NO: 1026947 - protein, 160 aa, Homo sapiens
ILLNPSSRSPDLQSMEQIRRIMRPTDVPDTGLLCDLLWSDPDKDVQGWGENDRGVSFTFGADVVSKFLNRHDLDLICRAHQVVEDGYEFFAKRQLVTLFSAPNYCGEFDNAGGMMSVDETLMCSFQILKPSEKKAKYQYGGLNSGRPVTPPRTANPPKKR

SEQ ID NO: 1026948 - protein, 166 aa, Homo sapiens
  misc_feature (4)..(4): Xaa can be any naturally occurring amino acid
AIVXEKIFCCHGGLSPDLQSMEQIRRIMRPTDVPDTGLLCDLLWSDPDKDVQGWGENDRGVSFTFGADVVSKFLNRHDLDLICRAHQVVEDGYEFFAKRQLVTLFSAPNYCGEFDNAGGMMSVDETLMCSFQILKPSEKKAKYQYGGLNSGRPVTPPRTANPPKKR

SEQ ID NO: 1026949 - protein, 166 aa, Homo sapiens; identical to SEQ ID NO: 1026948
  misc_feature (4)..(4): Xaa can be any naturally occurring amino acid

SEQ ID NO: 1026950 - protein, 166 aa, Homo sapiens; identical to SEQ ID NO: 1026948
  misc_feature (4)..(4): Xaa can be any naturally occurring amino acid

SEQ ID NO: 1026951 - protein, 166 aa, Homo sapiens; identical to SEQ ID NO: 1026948
  misc_feature (4)..(4): Xaa can be any naturally occurring amino acid

SEQ ID NO: 1026952 - protein, 166 aa, Homo sapiens; identical to SEQ ID NO: 1026948
  misc_feature (4)..(4): Xaa can be any naturally occurring amino acid

SEQ ID NO: 1026953 - protein, 160 aa, Homo sapiens; identical to SEQ ID NO: 1026947

SEQ ID NO: 1026954 - protein, 166 aa, Homo sapiens; identical to SEQ ID NO: 1026948
  misc_feature (4)..(4): Xaa can be any naturally occurring amino acid

SEQ ID NO: 1026955 - protein, 166 aa, Homo sapiens; identical to SEQ ID NO: 1026948
  misc_feature (4)..(4): Xaa can be any naturally occurring amino acid

SEQ ID NO: 1026956 - protein, 116 aa, Homo sapiens
NKLGTLGLRVFNSQREHPLGKAKPSCEQPFNLAHGVFFFFFLFFFFFFFFELLFVFRSTVHENPFLTSLGKLTLSLFPPSIRRMYLNECWSVGHFVNYGYWVLNCLILPCECCIRL

SEQ ID NO: 1026957 - protein, 166 aa, Homo sapiens; identical to SEQ ID NO: 1026948
  misc_feature (4)..(4): Xaa can be any naturally occurring amino acid

SEQ ID NO: 1026958 - protein, 166 aa, Homo sapiens; identical to SEQ ID NO: 1026948
  misc_feature (4)..(4): Xaa can be any naturally occurring amino acid

SEQ ID NO: 1026959 - protein, 82 aa, Homo sapiens
ILLNPSSRSPDLQSMEQIRRIMRPTDVPDTGLLCDLLWSDPDKDVQGWGENDRGVSFTFGADVVSKFLNRHDLDLICRAHQV

SEQ ID NO: 1026960 - protein, 280 aa, Homo sapiens
MSAELGVEVLHCVAVNGGACHSGLWSADCAGSGISQPLQPPAYVASQAETKTCRTVVTQRPMDMGQQHFCARTTFRELLEKASNPKILSLCPEIKWHFIGHLQKQNVNKLMAVPNLFMLETVDSVKLADKVNSSWQRKGSPERLKVMVQINTSGEGSKHGLPPSETIAIVEHINAKCPNLEFVGLMTIGSFGHDLSQGPNPDFQLLLSLREELCKKLNIPADQVELSMGMSADFQHAVEVGSTNVRIGSTIFGERDYSKKPTPDKCAADVKAPLEVAQEH

SEQ ID NO: 1026961 - protein, 290 aa, Homo sapiens
MSAELGVEVLHCVAVNGGACHSGLWSADCAGSGISQPLQPPAYVAVKQKPNLQDMVTQRPMDMGQQHFCARTTFRELLEKASNPKILSLCPEIKWHFIGHLQKQNVNKLMAVPNLFMLETVDSVKLADKVNSSWQRKGSPERLKVMVQINTSGEEIYLFSVSLLERGKHGLPPSETIAIVEHINAKCPNLEFVGLMTIGSFGHDLSQGPNPDFQLLLSLREELCKKLNIPADQVELSMGMSADFQHAVEVGSTNVRIGSTIFGERDYSKKPTPDKCAADVKAPLEVAQEH

SEQ ID NO: 1026962 - protein, 280 aa, Homo sapiens; identical to SEQ ID NO: 1026960

SEQ ID NO: 1026963 - protein, 280 aa, Homo sapiens; identical to SEQ ID NO: 1026960

SEQ ID NO: 1026964 - protein, 280 aa, Homo sapiens; identical to SEQ ID NO: 1026960

SEQ ID NO: 1026965 - protein, 280 aa, Homo sapiens; identical to SEQ ID NO: 1026960

SEQ ID NO: 1026966 - protein, 231 aa, Homo sapiens
CKQGYQLIEGNQVLHSFTAVCQDDGTWHRAMPRCKIKDCGQPRNLPNGDFRYTTTMGVNTYKARIQYYCHEPYYKMQTRAGSRESEQGVYTCTAQGIWKNEQKGEKIPRCLPVCGKPVNPVEQRQRIIGGQKAKMGNFPWQVFTNIHGRGGGALLGDRWILTAAHTLYPKEHEAQSNASLDVFLGHTNVEELMKLGNHPIRRVSVHPDYRHHEHRQIVDDAPSHASMAYSS

SEQ ID NO: 1026967 - protein, 242 aa, Homo sapiens
CKQGYQLIEGNQVLHSFTAVCQDDGTWHRAMPRCKIKDCGQPRNLPNGDFRYTTTMGVNTYKARIQYYCHEPYYKMQTRAGSRESEQGVYTCTAQGIWKNEQKGEKIPRCLPVCGKPVNPVEQRQRIIGGQKAKMGNFPWQVFTNIHGRGGGALLGDRWILTAAHTLYPKEHEAQSNASLDVFLGHTNVEELMKLGNHPIRRVSVHPDYRQDESYNFEGDIALLELENSVTLGPNLLPHLPP

SEQ ID NO: 1026968 - protein, 234 aa, Homo sapiens
  misc_feature (16)..(16): Xaa can be any naturally occurring amino acid
  misc_feature (22)..(22): Xaa can be any naturally occurring amino acid
  misc_feature (31)..(32): Xaa can be any naturally occurring amino acid
  misc_feature (35)..(35): Xaa can be any naturally occurring amino acid
  misc_feature (43)..(43): Xaa can be any naturally occurring amino acid
  misc_feature (45)..(45): Xaa can be any naturally occurring amino acid
  misc_feature (47)..(48): Xaa can be any naturally occurring amino acid
  misc_feature (60)..(60): Xaa can be any naturally occurring amino acid
  misc_feature (64)..(65): Xaa can be any naturally occurring amino acid
  misc_feature (67)..(67): Xaa can be any naturally occurring amino acid
  misc_feature (70)..(71): Xaa can be any naturally occurring amino acid
  misc_feature (77)..(77): Xaa can be any naturally occurring amino acid
  misc_feature (79)..(81): Xaa can be any naturally occurring amino acid
  misc_feature (83)..(83): Xaa can be any naturally occurring amino acid
  misc_feature (90)..(90): Xaa can be any naturally occurring amino acid
  misc_feature (92)..(94): Xaa can be any naturally occurring amino acid
  misc_feature (97)..(99): Xaa can be any naturally occurring amino acid
  misc_feature (101)..(101): Xaa can be any naturally occurring amino acid
LSTSCPNTPVIPKGNXESAKSXRPSFGMCFXXAYXKMLGRCFXVXLXXISLSIRAGVQAXHHRXXPXRVXXLTNFLXGXXXRXARSLEKXVXXXGVXXXSXGVCAPLTKRIPFYDLGLMGYVSGFGVMEEKIAHDLRFVRLPVANPQACENWLRGKNRMDVFSQNMFCAGHPSLKQDACQGDSGGVFAVRDPNTDRWVATGIVSWGIGCSRGYGFYTKVLNYVDWIKKEMEEED

SEQ ID NO: 1026969 - protein, 88 aa, Homo sapiens
AAAYYYYCSEFKLLTMYGDMFCAGHPSLKQDACQGDSGGVFAVRDPNTDRWVATGIVSWGIGCSRGYGFYTKVLNYVDWIKKEMEEED

SEQ ID NO: 1026970 - protein, 242 aa, Homo sapiens; identical to SEQ ID NO: 1026967

SEQ ID NO: 1026971 - protein, 242 aa, Homo sapiens; identical to SEQ ID NO: 1026967

SEQ ID NO: 1026972 - protein, 242 aa, Homo sapiens; identical to SEQ ID NO: 1026967

SEQ ID NO: 1026973 - protein, 242 aa, Homo sapiens; identical to SEQ ID NO: 1026967

SEQ ID NO: 1026974 - protein, 242 aa, Homo sapiens; identical to SEQ ID NO: 1026967

SEQ ID NO: 1026975 - protein, 102 aa, Homo sapiens
KINFPSVPQALPGGGGAPTVITAAHTLYPKEHEAQSNASLDVFLGHTNVEELMKLGNHPIRRVSVHPDYRQDESYNFEGDIALLELENSVTLGPNLLPHLPP

SEQ ID NO: 1026976 - protein, 264 aa, Homo sapiens
MVKSSLQRILNSHCFAREKEGDKPSATIHASRTMPLLSLHSRGAAAVRVPGSPSTAVVTRVRGLGGAPDAPHPPLKIPGGRGNSQRDHNLSANLFYSDDRLNVTEELTSNDKTRILNVQSRLTDAKRINWRTVLSGGSLYIEIPGGALPEGSKDSFAVLLEFAEEQLRADHVFICFHKNREDRAPLLRTFSFLGFEIVRPGHPLVPKRPDACFMAYTFEKESFGRGGGVGPPRGWASGPWGPPLSTGWVGTVNSLISPGFVRML

SEQ ID NO: 1026977 - protein, 197 aa, Homo sapiens
MVKSSLQRILNSHCFAREKEGDKPSATIHASRTMPLLSQHSRGAAAARVLGLPLIAVVTRVRGLGGAPDAPHPPLKIPGGRGNSQRDHSLSASILYSDERLNVTEEPTSNDKTRVLSIQSTLTEAKQVTWRAVWSGGSLYIEIPGGALPEGSKDSFAVLLEFAEEHSRLTTFSSASPRTVRTEPPYSEPSAFLALRL

SEQ ID NO: 1026978 - protein, 264 aa, Homo sapiens; identical to SEQ ID NO: 1026976

SEQ ID NO: 1026979 - protein, 264 aa, Homo sapiens; identical to SEQ ID NO: 1026976

SEQ ID NO: 1026980 - protein, 243 aa, Homo sapiens
RAAAAARRDAAEVFLVSDPSGRMVKSSLQRILNSHCFAREKEGDKPSATIHASRTMPLPEPARRQRRPQRREGLPPRAVVTRVRGLGGAPDAPHPPLKIPGGRGKIARGIPASRPRRCYSDQRLSVTEELTPSGQTRVLHVRSRLSDARQVSWRAVLSANRLYVELPAGALPEGCKDSLAVLLEFAEEQLRAEHVFICFPKNREDRAALLRTFGFLGFELVRPGHPLVPARPDACFLAYSLQG

SEQ ID NO: 1026981 - protein, 305 aa, Homo sapiens
  misc_feature (9)..(9): Xaa can be any naturally occurring amino acid
  misc_feature (51)..(51): Xaa can be any naturally occurring amino acid
  misc_feature (54)..(54): Xaa can be any naturally occurring amino acid
  misc_feature (70)..(70): Xaa can be any naturally occurring amino acid
  misc_feature (78)..(78): Xaa can be any naturally occurring amino acid
  misc_feature (84)..(85): Xaa can be any naturally occurring amino acid
  misc_feature (88)..(89): Xaa can be any naturally occurring amino acid
  misc_feature (93)..(93): Xaa can be any naturally occurring amino acid
IQKLSKKNXPPTPPQFPPSPPPPPPPTHPPHLFLLSHPTPPILKSSLHPIXNTXLFPTHNQPHKPTPTIXPTPTIPLXTLNTPXXTTXXTSTXSLTAVVTRVRGLGGAPDAPHPPLKIPGGRGNSQRDHNLSANLFYSDDRLNVTEELTSNDKTRILNVQSRLTDAKRINWRTVLSGGSLYIEIPGGALPEGSKDSFAVLLEFAEEQLRADHVFICFHKNREDRAPLLRTFSFLGFEIVRPGHPLVPKRPDACFMAYTFEKESFGRGGGVGPPRGWASGPWGPPLSTGWVGTVNSLISPGFVRML

SEQ ID NO: 1026982 - protein, 321 aa, Homo sapiens
HASSPRRGGRLGAGGQRCLRRPQLPGTALLCACLLCQPPLQPPPPTPQRGLLLGPAAGPVAHRAPTLRPPGVPSPSGPLAPGLGSCWCPGRPAPSSVLRVCPTLLPELGGEPGTVPGCLGAQPGQGELSSEGWSQTPGLMQSSCLGLPMCWNYRYELPRSAQTQGSSPPYYVLCWPPVKGENSRQAKMFYREAAKSFPQWMTQSPSQTTPQIQPQGTLLLRVPLGQGMQSTRRWSSEDGTLPESCVSLGKLTRLSEPVSRCTGLCTELCGDHADIAAHPPSCSWDRPFTPASPPATGLSEGADSSPRTSHCPFEGLSFLTL

SEQ ID NO: 1026983 - protein, 139 aa, Homo sapiens
RIVFLLPFPPLLVVLFVSVVCRALSGVSVPFSPAVLWFSFSSLSFFAPVLLCGRGCVCVSPFVCPPCVFVVSSLLPRDSSVCPSCFVFLFFSFFFFFSCCFFSFFFFVVCLFVFFKMNKLKTFISSKKNVWHLEFSSCK

SEQ ID NO: 1026984 - protein, 134 aa, Homo sapiens
MFYREAAKSFPQWMTQSPSQTTPQIQPQGTLLLRVPLGQGMQSTRRWSSEDGTLPESCVSLGKLTRLSEPVSRCTGLCTELCGDHADIAAHPPSCSWDRPFTPASPPATGLSEGADSSPRTSHCPFEGLSFLTL

SEQ ID NO: 1026985 - protein, 69 aa, Homo sapiens
IIPEMGIICDGTNLIAPDSTRTPSVTPVLTKMANNEMANAWSIPGPRFFAFQAALKIMKPIIASVSTNC

SEQ ID NO: 1026986 - protein, 251 aa, Homo sapiens
MATVRPPVAVKPATAAKPVAAKPAAVRPPAAAAAKPVATKPEVPRPQAAKPAATKPATTKPMVKMSREVQVFEITENSAKLHWERAEPPGPYFYDLTVTSAHDQSLVLKQNLTVTDRVIGGLLAGQTYHVAVVCYLRSQVRATYHGSFSTKKSQPPPPQPARSASSSTINLMVSTEPLALTETDICKLPKDEGTCRDFILKWYYDPNTKSCARFWYGGCGGNENKFGSQKECEKVCAPVLAKPGVISVMGT

SEQ ID NO: 1026987 - protein, 367 aa, Homo sapiens
RTRGARVAVVQHAPSESVDNASMPPVKVEFSLTDYGSKEKLVDFLSRGMTQLQGTRALGSAIEYTIENVFESAPNPRDLKIVVLMLTGEVPEQQLEEAQRVILQAKCKGYFFVVLGIGRKVNIKEVYTFASEPNDVFFKLVDKSTELNEEPLMRFGRLLPSFVSSENAFYLSPDIRKQCDWFQGDQPTKNLVKFGHKQVNVPNNVTSSPTSNPVTTTKPVTTTKPVTTTTKPVTTTTKPVTIINQPSVKPAAAKPAPAKPVAAKPVATKMATVRPPVAVKPATAAKPVAAKPAAVRPPAAAAAKPVATKPEVPRPQAAKPAATKPATTKPMVKMSREVQVFEITENRYMQVAERRRNLQGFHIKMVL

SEQ ID NO: 1026988 - protein, 142 aa, Homo sapiens
GPIRLMVGLEADLLAGQTYHVAVVCYLRSQVRATYHGSFSTKKSQPPPPQPARSASSSTINLMVSTEPLALTETDICKLPKDEGTCRDFILKWYYDPNTKSCARFWYGGCGGNENKFGSQKECEKVCAPVLAKPGVISVMGT

SEQ ID NO: 1026989 - protein, 520 aa, Homo sapiens
RTRGARVAVVQHAPSESVDNASMPPVKVEFSLTDDGSKEKLVDFLSRGMTQLQGTRALGSAIEYTIENVFESAPNPRDLKIVVLMLTGEVPEQQLEEAQRVILQAKCKGYFFVVLGIGRKVNIKEVYTFASEPNDVFFKLVDKSTELNEEPLMRFGRLLPSFVSSENAFYLSPDIRKQCDWFQGDQPTKNLVKFGHKQVNVPNNVTSSPTSNPVTTTKPVTTTKPVTTTTKPVTTTTKPVTIINQPSVKPAAAKPAPAKPVAAKPVATKMATVRPPVAVKPATAAKPVAAKPAAVRPPAAAAAKPVATKPEVPRPQAAKPAATKPATTKPMVKMSREVQVFEITENSAKLHWERAEPPGPYFYDLTVTSAHDQSLVLKQNLTVTDRVIGGLLAGQTYHVAVVCYLRSQVRATYHGSFSTKKSQPPPPQPARSASSSTINLMVSTEPLALTETDICKLPKDEGTCRDFILKWYYDPNTKSCARFWYGGCGGNENKFGSQKECEKVCAPVLAKPGVISVMGT

SEQ ID NO: 1026990 - protein, 455 aa, Homo sapiens
RTRGARVAVVQHAPSESVDNASMPPVKVEFSLTDDGSKEKLVDFLSRGMTQLQGTRALGSAIEYTIENVFESAPNPRDLKIVVLMLTGEVPEQQLEEAQRVILQAKCKGYFFVVLGIGRKVNIKEVYTFASEPNDVFFKLVDKSTELNEEPLMRFGRLLPSFVSSENAFYLSPDIRKQCDWFQGDQPTKNLVKFGHKQVNVPNNVTSSPTSNPVTTTKPVTTTKPVTTTTKPVTTTTKPVTIINQPSVKPAAAKPAPAKPVAAKPVATKMATVRPPVAVKPATAAKPVAAKPAAVRPPAAAAAKPVATKPEVPRPQAAKPAATKPATTKPMVKMSREVQVFEITENSAKLHWERAEPPGPYFYDLTVTSAHDQSLVLKQNLTVTDRVIGGLLAGQTYHVAVVCYLRSQVRATYHGSFSTKKSQPPPPQPARSASSSTINLMVSTEPLALTETGEL

SEQ ID NO: 1026991 - protein, 243 aa, Homo sapiens
RTRGARVAVVQHAPSESVDNASMPPVKVEFSLTDYGSKEKLVDFLSRGMTQLQGTRALGSAIEYTIENVFESAPNPRDLKIVVLMLTGEVPEQQLEEAQRVILQAKCKGYFFVVLGIGRKVNIKEVYTFASEPNDVFFKLVDKSTELNEEPLMRFGRLLPSFVSSENAFYLSPDIRKQCDWFQGDQPTKNLVKFGHKQVNVPNNVTSSPTSNPVTTTKPVTTTKPVTTTTKPDLPPNKKEFSS

SEQ ID NO: 1026992 - protein, 403 aa, Homo sapiens
PDVIYPQEVYTFASEPNDVFFKLVDKSTELNEEPLMRFGRLLPSFVSSENAFYLSPDIRKQCDWFQGDQPTKNLVKFGHKQVNVPNNVTSSPTSNPVTTTKPVTTTKPVTTTTKPVTTTTKPVTIINQPSVKPAAAKPAPAKPVAAKPVATKMATVRPPVAVKPATAAKPVAAKPAAVRPPAAAAAKPVATKPEVPRPQAAKPAATKPATTKPMVKMSREVQVFEITENSAKLHWERAEPPGPYFYDLTVTSAHDQSLVLKQNLTVTDRVIGGLLAGQTYHVAVVCYLRSQVRATYHGSFSTKKSQPPPPQPARSASSSTINLMVSTEPLALTETDICKLPKDEGTCRDFILKWYYDPNTKSCARFWYGGCGGNENKFGSQKECEKVCAPVLAKPGVISVMGT

SEQ ID NO: 1026993 - protein, 335 aa, Homo sapiens
IATNTNLTQNKKTYSDPDNVTSSPTSNPVTTTKPVTTTKPVTTTTKPVTTTTKPVTIINQPSVKPAAAKPAPAKPVAAKPVATKMATVRPPVAVKPATAAKPVAAKPAAVRPPAAAAAKPVATKPEVPRPQAAKPAATKPATTKPMVKMSREVQVFEITENSAKLHWERAEPPGPYFYDLTVTSAHDQSLVLKQNLTVTDRVIGGLLAGQTYHVAVVCYLRSQVRATYHGSFSTKKSQPPPPQPARSASSSTINLMVSTEPLALTETDICKLPKDEGTCRDFILKWYYDPNTKSCARFWYGGCGGNENKFGSQKECEKVCAPVLAKPGVISVMGT

SEQ ID NO: 1026994 - protein, 520 aa, Homo sapiens; identical to SEQ ID NO: 1026989

SEQ ID NO: 1026995 - protein, 99 aa, Homo sapiens
ELVTEFISQQCLSSSTINLMVSTEPLALTETDICKLPKDEGTCRDFILKWYYDPNTKSCARFWYGGCGGNENKFGSQKECEKVCAPVLAKPGVISVMGT

SEQ ID NO: 1026996 - protein, 520 aa, Homo sapiens; identical to SEQ ID NO: 1026989

SEQ ID NO: 1026997 - protein, 223 aa, Homo sapiens
RTRGARVAVVQHAPSESVDNASMPPVKVEFSLTDYGSKEKLVDFLSRGMTQLQGTRALGSAIEYTIENVFESAPNPRDLKIVVLMLTGEVPEQQLEEAQRVILQAKCKGYFFVVLGIGRKVNIKEVYTFASEPNDVFFKLVDKSTELNEEPLMRFGRLLPSFVSSENAFYLSPDIRKQCDWFQGDQPTKNLVKFGHKQVNVPNNVTSSPTSNPVTFLIPVRSS

SEQ ID NO: 1026998 - protein, 520 aa, Homo sapiens; identical to SEQ ID NO: 1026989

SEQ ID NO: 1026999 - protein, 336 aa, Homo sapiens
YDFKKKKVCKTCAPRQAPDNVTSSPTSNPVTTTKPVTTTKPVTTTTKPVTTTTKPVTIINQPSVKPAAAKPAPAKPVAAKPVATKMATVRPPVAVKPATAAKPVAAKPAAVRPPAAAAAKPVATKPEVPRPQAAKPAATKPATTKPMVKMSREVQVFEITENSAKLHWERAEPPGPYFYDLTVTSAHDQSLVLKQNLTVTDRVIGGLLAGQTYHVAVVCYLRSQVRATYHGSFSTKKSQPPPPQPARSASSSTINLMVSTEPLALTETDICKLPKDEGTCRDFILKWYYDPNTKSCARFWYGGCGGNENKFGSQKECEKVCAPVLAKPGVISVMGT

SEQ ID NO: 1027000 - protein, 271 aa, Homo sapiens
MGNGGRSGLQQGKGNVDGVAATPTAASASCQYRCIECNQEAKELYRDYNHGVLKITICKSCQKPVDKYIEYDPVIILINAILCKAQAYRHILFNTQINIHGKLCIFCLLCEAYLRWWQLQDSNQNTAPDDLIRYAKEWDFYRMFAIAALEQTAYFIGIFTFLWVERPMTAKKKPNFILLLKALLLSSYGKLLLIPAVIWEHDYTSVCLKLIKVFVLTSNFQAIRVTLNINRKLSFLAVLSGLLLESIMVYFFQSMEWDVGSDYAIFKSQDF

SEQ ID NO: 1027001 - protein, 203 aa, Homo sapiens
MGNGGRSGLQQGKGNVDGVAATPTAASASCQYRCIECNQEAKELYRDYNHGVLKITICKSCQKPVDKYIEYDPVIILINAILCKAQGRSMDYILSLQVSSRLHTIHDRIEPPCHTCLVVACLLKALSLRVGWQAFDRIPNARIVLASVEWTYCSPEYCVIGRVGECVLTKGTVVYGRFGLGMFRKTKNFVALYLGQLLGPICV

SEQ ID NO: 1027002 - protein, 340 aa, Homo sapiens
MGNGGRSGLQQGKGNVDGVAATPTAASASCQYRCIECNQEAKELYRDYNHGVLKITICKSCQKPVDKYIEYDPVIILINAILCKAQAYRHILFNTQINIHGKLCIFCLLCEAYLRWWQLQDSNQNTAPDDLIRYAKEWDFYRMFAIAALVNLLQKHWMSFHLKAFEVALPVPGMPVPLMPRCLTPAYPSRVGYNDTFYMKCTSDTPDLLFRLYFVLLIEQTAYFIGIFTFLWVERPMTAKKKPNFILLLKALLLSSYGKLLLIPAVIWEHDYTSVCLKLIKVFVLTSNFQAIRVTLNINRKLSFLAVLSGLLLESIMVYFFQSMEWDVGSDYAIFKSQDF

SEQ ID NO: 1027003 - protein, 271 aa, Homo sapiens; identical to SEQ ID NO: 1027000

SEQ ID NO: 1027004 - protein, 286 aa, Homo sapiens
MGNGGRSGLQQGKGNVDGVAATPTAASASCQYRCIECNQEAKELYRDYNHGVLKITICKSCQKPVDKYIEYDPVIILINAILCKAQAYRHILFNTQINIHGQDSNQNTAPDDLIRYAKEWDFYRMFAIAALGWSAVAQSQLTAALNSWAQAILLPRPPRSAGTTEQTAYFIGIFTFLWVERPMTAKKKPNFILLLKALLLSSYGKLLLIPAVIWEHDYTSVCLKLIKVFVLTSNFQAIRVTLNINRKLSFLAVLSGLLLESIMVYFFQSMEWDVGSDYAIFKSQDF

SEQ ID NO: 1027005 - protein, 129 aa, Homo sapiens
MFAIAALEQTAYFIGIFTFLWVERPMTAKKKPNFILLLKALLLSSYGKLLLIPAVIWEHDYTSVCLKLIKVFVLTSNFQAIRVTLNINRKLSFLAVLSGLLLESIMVYFFQSMEWDVGSDYAIFKSQDF

SEQ ID NO: 1027006 - protein, 129 aa, Homo sapiens; identical to SEQ ID NO: 1027005

SEQ ID NO: 1027007 - protein, 237 aa, Homo sapiens
  misc_feature (119)..(120): Xaa can be any naturally occurring amino acid
  misc_feature (124)..(125): Xaa can be any naturally occurring amino acid
  misc_feature (127)..(127): Xaa can be any naturally occurring amino acid
  misc_feature (131)..(131): Xaa can be any naturally occurring amino acid
  misc_feature (140)..(141): Xaa can be any naturally occurring amino acid
  misc_feature (143)..(144): Xaa can be any naturally occurring amino acid
  misc_feature (146)..(146): Xaa can be any naturally occurring amino acid
  misc_feature (148)..(149): Xaa can be any naturally occurring amino acid
  misc_feature (151)..(152): Xaa can be any naturally occurring amino acid
MFAIAALEQTAYFIGIFTFLWVERPMTAKKKPNFILLLKALLLSSYGKLLLIPAVIWEHDYTSVCLKLIKVFVLTSNFQAIRVTLNINRKLSFLAVLSGLLLESIMVYFFQSMEWDVGXXYPPXXPXPPRXPLPPPPPCXXPXXLXKXXPXXYKPTSSFLLSKMKQRLETLSEKESNDNSGGYPPPQMHPRDKPFTYRYSQSHIETPTWTQGMLLQRLNDMQQVKVYTLYTRPGKRS

SEQ ID NO: 1027008 - protein, 304 aa, Homo sapiens
MGNGGRSGLQQGKGNVDGVAATPTAASASCQYRCIECNQEAKELYRDYNHGVLKITICKSCQKPVDKYIEYDPVIILINAILCKAQAYRHILFNTQINIHGKLCIFCLLCEAYLRWWQLQDSNQNTAPDDLIRYAKEWDFYRMFAIAALGWSAVAQSQLTAALNSWAQAILLPRPPSVAGTTEQTAYFIGIFTFLWVERPMTAKKKPNFILLLKALLLSSYGKLLLIPAVIWEHDYTSVCLKLIKVFVLTSNFQAIRVTLNINRKLSFLAVLSGLLLESIMVYFFQSMEWDVGSDYAIFKSQDF

SEQ ID NO: 1027009 - protein, 253 aa, Homo sapiens
MGNGGRSGLQQGKGNVDGVAATPTAASASCQYRCIECNQEAKELYRDYNHGVLKITICKSCQKPVDKYIEYDPVIILINAILCKAQAYRHILFNTQINIHGKLCIFCLLCEAYLRWWQLQDSNQNTAPDDLIRYAKEWDFYRMFAIAALEQTAYFIGIFTFLWVERPMTAKKKPNFILLLKALLLSSYGLKLIKVFVLTSNFQAIRVTLNINRKLSFLAVLSGLLLESIMVYFFQSMEWDVGSDYAIFKSQDF

SEQ ID NO: 1027010 - protein, 104 aa, Homo sapiens
MTAKKKPNFILLLKALLLSSYGKLLLIPAVIWEHDYTSVCLKLIKVFVLTSNFQAIRVTLNINRKLSFLAVLSGLLLESIMVYFFQSMEWDVGSDYAIFKSQDF

SEQ ID NO: 1027011 - protein, 190 aa, Homo sapiens
MGNGGRSGLQQGKGNVDGVAATPTAASASCQYRCIECNQEAKELYRDYNHGVLKITICKSCQKPVDKYIEYDPVIILINAILCKAQAYRHILFNTQINIHGKLCIFCLLCEAYLRWWQLQDSNQNTAPDDLIRYAKEWDFYRMFAIAALEQTAYFIGIFTFLSFGNMTTHLCASNSLKYLFLHQIFRQLE

SEQ ID NO: 1027012 - protein, 271 aa, Homo sapiens; identical to SEQ ID NO: 1027000

SEQ ID NO: 1027013 - protein, 271 aa, Homo sapiens; identical to SEQ ID NO: 1027000

SEQ ID NO: 1027014 - protein, 100 aa, Homo sapiens
NKEFISAVAQVKAFRSLWPSDIFGSCEDDPVQTLLHIYFHHQTLGQTGSFAVIGSNLDMSEANYKLMELNLEIRESLRMVQSYQLLAQAKPMGNMVSTGF

SEQ ID NO: 1027015 - protein, 100 aa, Homo sapiens; identical to SEQ ID NO: 1027014

SEQ ID NO: 1027016 - protein, 104 aa, Homo sapiens
STITYIYNGTNLKNLTNLITLWPSDIFGSCEDDPVQTLLHIYFHHQTLGQTGSFAVIGSNLDMSEANYKLMELNLEIRESLRMVQSYQLLAQAKPMGNMVSTGF

SEQ ID NO: 1027017 - protein, 325 aa, Homo sapiens
MAEEQPQVELFVKAGSDGAKIGNCPFSQRLFMVLWLKGVTFNVTTVDTKRRTETVQKLCPGGQLPFLLYGTEVHTDTNKIEEFLEAVLCPPRYPKLAALNPESNTAGLDIFAKFSAYIKNSNPALNDNLEKGLLKALKVLDNYLTSPLPEEVDETSAEDEGVSQRKFLDGNELTLADCKPVAKRYTYVQVVCTEVHRGFTIPEAIPGSAYGDLRQVPEPGNESRVSTCPDDEEIKAQPNEQSGKGPRNKPPCLGTAPQPRSDESRPQKAPGWFTTLATRYGHTAKSGQWARESRRSTCSGMVMVEEGMRERNGGLSQIITVGWDD

SEQ ID NO: 1027018 - protein, 332 aa, Homo sapiens
SCHLLHGMAEEQPQVELFVKAGSDGAKIGNCPFSQRLFMVLWLKGVTFNVTTVDTKRRTETVQKLCPGGQLPFLLYGTEVHTDTNKIEEFLEAVLCPPRYPKLAALNPESNTAGLDIFAKFSAYIKNSNPALNDNLEKGLLKALKVLDNYLTSPLPEEVDETSAEDEGVSQRKFLDGNELTLADCKPVAKRYTYVQVVCTEVHRGFTIPEAIPGSAYGDLSKCQSPGMNLVCRTCPDDEEIKAQPNEQSGKGPRNKPPCLGTAPQPRSDESRPQKAPGWFTTLATRYGHTAKSGQWARESRRSTCSGMVMVEEGMRERNGGLSQIITVGWDD

SEQ ID NO: 1027019 - protein, 337 aa, Homo sapiens
RDELDFLLLIATMAEEQPQVELFVKAGSDGAKIGNCPFSQRLFMVLWLKGVTFNVTTVDTKRRTETVQKLCPGGQLPFLLYGTEVHTDTNKIEEFLEAVLCPPRYPKLAALNPESNTAGLDIFAKFSAYIKNSNPALNDNLEKGLLKALKVLDNYLTSPLPEEVDETSAEDEGVSQRKFLDGNELTLADCKPVAKRYTYVQVVCTEVHRGFTIPEAIPGSAYGDLSKCQSPGMNLVCRTCPDDEEIKAQPNEQSGKGPRNKPPCLGTAPQPRSHESRPQKAPGWFTTLATRYGHTAKSGQWARESRRSTCSGMVMVEEGMRERNGGLSQIITVGWDD

SEQ ID NO: 1027020 - protein, 34 aa, Homo sapiens
MSRTLASVGPIENMMTGESGSNKRLGGPRGSDSP

SEQ ID NO: 1027021 - protein, 100 aa, Homo sapiens
NYLTSPLPEEVDEPSAEDEGVSQRKFLDGNELTLADCNLLPKLHIVQVVCKKYRGFTIPEAFRGVHRYLSNAYAREEFASTCPDDEEIELAYEQVAKALK

SEQ ID NO: 1027022 - protein, 100 aa, Homo sapiens; identical to SEQ ID NO: 1027021

SEQ ID NO: 1027023 - protein, 158 aa, Homo sapiens
MRSHQDIRMCLGEKAADSGTDCCSSEGGLAFHEGTVELYAVKGGPLEVCGAQLPQAESLALTNSYGGLAVAEGLLLVCCGSLTGEMGPQAVEVVGVWENSEGHEGYNPLKFVEWPDDPQRRSPGELLRVTLLWRHRVAQNTGVLGIKVKIMLPWEPNW

SEQ ID NO: 1027024 - protein, 126 aa, Homo sapiens
MGSRQDAHGNDETHKTQQDNRGRKRPQVRLPIGTNTHPPMTGDRETEELWEHPETPQSRTPKTHKKKYKDSADTRKRNRLQETNDSHQITQNDRRTANLTDGSEDKQRQNHKRPNTTPIPSNSKST

SEQ ID NO: 1027025 - protein, 72 aa, Homo sapiens
MAALWGGGDCAPGCVPGGSTLPSPSREARTEITEHAFRQSHLTRKSRLLWPIPTRGFSRGGPLDSSFNWLHV

SEQ ID NO: 1027026 - protein, 211 aa, Homo sapiens
MMLCDTTMWHVGSRWQFGIAWGPFTHGQWLKAVAHVVMCVCCPCVHICCHAMGCACMWCSVPCCGCLCPTDVHLLCPRVWCGEGPHVDLVTAVCPHRSAPGGWLWQTVHASRGVKGMGRDQTRRGGRGGVNELSGGRMVQAGVRSAAGGEREALASRARGQGGPRGAATEPGSVPQRSGLETRPGLQLGWTCPPVAEGPRRQVRWTVTSRT

SEQ ID NO: 1027027 - protein, 82 aa, Homo sapiens
VSAPQLTPANSQSRMSTNMCGVNLGLQGQAEDRVLRGLPHQLLQVVLGAGATGPRHHLQILRVQVRLMSQDAGRDEGGPRLG

SEQ ID NO: 1027028 - protein, 500 aa, Homo sapiens
MEVDGTPRRGGCKMPLPVQVFNLQGAVEPMQIDVDPQEDPQNAPDVNYVVENPSLDLEQYAASYSGLMRIERLQFIADHCPTLRVEALKMALSFVQRTFNVDMYEEIHRKLSEATRELQNAPDAIPESGVEPPALDTAWVEATRKKALLKLEKLDTDLKNYKGNSIKESIRRGHDDLGDHYLDCGDLSNALKCYSRARDYCTSAKHVINMCLNVIKVSVYLQNWSHVLSYVSKAESTPEIAEQRGERDSQTQAILTKLKCAAGLAELAARKYKQAAKCLLLASFDHCDFPELLSPSNVAIYGGLCALATFDRQELQRNVISSSSFKLFLELEPQVRDIIFKFYESKYASCLKMLDEMKDNLLLDMYLAPHVRTLYTQIRNRALIQYFSPYVSADMHRMAAAFNTTVAALEDELTQLILEGLISARVDSHSKILYARDVDQRSTTFEKSLLMGKEFQRRAKAMMLRAAVLRNQIHVKSPPREGSQGELTPANSQSRMSTNM

SEQ ID NO: 1027029 - protein, 500 aa, Homo sapiens; identical to SEQ ID NO: 1027028

SEQ ID NO: 1027030 - protein, 291 aa, Homo sapiens [sequence omitted]

SEQ ID NO: 1027031 - protein, 291 aa, Homo sapiens [sequence omitted]

SEQ ID NO: 1027032 - protein, 291 aa, Homo sapiens [sequence omitted]

SEQ ID NO: 1027033 - protein, 318 aa, Homo sapiens
MCLNVIKVSVYLQNWSHVLSYVSKAESTPEIAEQRGERDSQTQAILTKLKCAAGLAELAARKYKQAAKCLLLASFDHCDFPELLSPSNVAIYGGLCALATFDRQELQRNVISSSSFKLFLELEPQVRDIIFKFYESKYASCLKMLDEMKDNLLLDMYLAPHVRTLYTQIRNRALIQYFSPYVSADMHRMAAAFNTTVAALEDELTQLILEGLISARVDSHSKILYARDVDQRSTTFEKSLLMGKEFQRRAKAMMLRAAVLRNQIHVKVGWLEGGQAHGVWGLVAVSCSLSPLQKSPPREGSQGELTPANSQSRMSTNM

SEQ ID NO: 1027034 - protein, 291 aa, Homo sapiens [sequence omitted]

SEQ ID NO: 1027035 - protein, 291 aa, Homo sapiens [sequence omitted]

SEQ ID NO: 1027036 - protein, 361 aa, Homo sapiens
MCLNVIKVSVYLQNWSHVLSYVSKAESTPEIAEQRGERDSQTQAILTKLKCAAGLAELAARKYKQAAKCLLLASFDHCDFPELLSPSNVAIYGGLCALATFDRQELQRNVISSSSFKLFLELEPQVRDIIFKFYESKYASCLKMLDEMKDNLLLDMYLAPHVRTLYTQIRNRALIQYFSPYVSADMHRMAAAFNTTVAALEDELTQLILEGLISARVDSHSKILYARDVDQRSTTFEKSLLMGKEFQRRAKAMMLRAAVLRNQIHVPPPRTSDLQAAQCLPAAQLRGLATGCHPACVPSLGLRRQAAASCGPSWKERPAGLDPVGFCPQGADCAAPRPSGTISQTPPVPASVRCRQVGGVH

SEQ ID NO: 1027037 - protein, 158 aa, Homo sapiens
SEVPESMEVDGTPRRGGCKMPLPVQVFNLQGAVEPMQIDVDPQEDPQNAPDVNYVVENPSLDLEQYAASYSGLMRIERLQFIADHCPTLRVEALKMALSFVQRTFNVDMYEEIHRKLSEATSPLSGSCRTHPTPSLRAAWSPQPWTRPGWRPRGRRRC

SEQ ID NO: 1027038 - protein, 291 aa, Homo sapiens [sequence omitted]

SEQ ID NO: 1027039 - protein, 317 aa, Homo sapiens
MCLNVIKVSVYLQNWSHVLSYVSKAESTPEIAEQRGERDSQTQAILTKLKCAAGLAELAARKYKQAAKCLLLASFDHCDFPELLSPSNVAIYGGLCALATFDRQELQRNVISSSSFKLFLELEPQVRDIIFKFYESKYASCLKMLDEMKVGPAWGRGEVGPCLASCPGPDQPLPQDNLLLDMYLAPHVRTLYTQIRNRALIQYFSPYVSADMHRMAAAFNTTVAALEDELTQLILEGLISARVDSHSKILYARDVDQRSTTFEKSLLMGKEFQRRAKAMMLRAAVLRNQIHVKSPPREGSQGELTPANSQSRMSTNM

SEQ ID NO: 1027040 - protein, 291 aa, Homo sapiens [sequence omitted]

SEQ ID NO: 1027041 - protein, 248 aa, Homo sapiens
MCLNVIKVSVYLQNWSHVLSYVSKAESTPEIAEQRGERDSQTQAILTKLKCAAGLAELAARKYKQAAKCLLLASFDHCDFPELLSPSNVAIYGGLCALATFDRQELQRNVISSSSFKLFLELEPQVRDIIFKFYESNVRHHVSMMLDSDDRTTCSWTCIWPPMSGPCTPRFATVPSSSKILYARDVDQRSTTFEKSLLMGKEFQRRAKAMMLRAAVLRNQIHVKSPPREGSQGELTPANSQSRMSTNM

SEQ ID NO: 1027042 - protein, 291 aa, Homo sapiens [sequence omitted]

SEQ ID NO: 1027043 - protein, 246 aa, Homo sapiens
MCLNVIKVSVYLQNWSHVLSYVSKAESTPEIAEQRGERDSQTQAILTKLKCAAGLAELAARKYKQAAKCLLLASFDHCDFPELLSPSNVAIYGGLCALATFDRQELQRNVISSSSFKLFLELEPQVRDIIFKFYESKYASCLKMLDEMKDNLLLDMYLAPHVRTLYTQIRNRALIQYFSPYVSADMHRMAAAFNTTVAALEDELTQLILEGLISARVDSHSKSPPREGSQGELTPANSQSRMSTNM

SEQ ID NO: 1027044 - protein, 370 aa, Homo sapiens
MCLNVIKVSVYLQNWSHVLSYVSKAESTPEIAEQRGERDSQTQAILTKLKCAAGLAELAARKYKQAAKCLLLASFDHCDFPELLSPSNVAIYGGLCALATFDRQELQRNVISSSSFKLFLELEPQVRDIIFKFYESKYASCLKMLDEMKVGPAWGRGEVGPCLASCPGPDQPLPQDNLLLDMYLAPHVRTLYTQIRNRALIQYFSPYVSADMHRMAAAFNTTVAALEDELTQLILEGLISARVDSHSKVAVGCVGGGGSWGLSLGPAELVACTKILYARDVDQRSTTFEKSLLMGKEFQRRAKAMMLRAAVLRNQIHVKVGWLEGGQAHGVWGLVAVSCSLSPLQKSPPREGSQGELTPANSQSRMSTNM

SEQ ID NO: 1027045 - protein, 158 aa, Homo sapiens; identical to SEQ ID NO: 1027037

SEQ ID NO: 1027046 - protein, 500 aa, Homo sapiens; identical to SEQ ID NO: 1027028

SEQ ID NO: 1027047 - protein, 500 aa, Homo sapiens; identical to SEQ ID NO: 1027028

SEQ ID NO: 1027048 - protein, 141 aa, Homo sapiens
SPSPASPTPCSLLLSPPDPSRPHRHRDFSPYVSADMHRMAAAFNTTVAALEDELTQLILEGLISARVDSHSKILYARDVDQRSTTFEKSLLMGKEFQRRAKAMMLRAAVLRNQIHVKSPPREGSQGELTPANSQSRMSTNM

SEQ ID NO: 1027049 - protein, 270 aa, Homo sapiens
GAGSGNCGGGVGISSRDYCRRFCQVVEDYAGRWQVPLPQLQVLQTALCCFTTASASFPDECEHVQYVLSSLAVSFFELLLFFGRDEFYEEPLKDILGSFQECQNHLRRYGNVNLELVTRIIRDGGPWEDPVLQAVLKAQPASQEIVNKYLSSENPLFFELRARYLIACERIPEAMALIKSCINHPEISKDLYFHQALFTCLFMSPVEDQLFREVLFETIFAYYHFNPTKKKPKKKSSPLLLLNSFYSNAKDLRITLSGCVFFWHHNLRSC

SEQ ID NO: 1027050 - protein, 320 aa, Homo sapiens
GAGSGNCGGGVGISSRDYCRRFCQVVEDYAGRWQVPLPQLQVLQTALCCFTTASASFPDECEHVQYVLSSLAVSFFELLLFFGRDEFYEEPLKDILGSFQECQNHLRRYGNVNLELVTRIIRDGGPWEDPVLQAVLKAQPASQEIVNKYLSSENPLFFELRARYLIACERIPEAMALIKSCINHPEISKDLYFHQALFTCLFMSPVEDQLFREHLLKTDCKSGIDIICNAEKEGKTMLALQLCESFLIPQLQNGDMYCIWELIFIWSKLQLKSNPSKQVFVDQCYQLLRTATNVRVIFPFMKIIKDEVNRIYLSLKFKIE

SEQ ID NO: 1027051 - protein, 50 aa, Homo sapiens
MLGSLIQEGMGGRLTPNSAKAKKFLPLLVFWAFDLYTRGLSENQDEVEPR

SEQ ID NO: 1027052 - protein, 236 aa, Homo sapiens
MAEAEESPGDPGTASPRPLFAGLSDISISQDIPVEGEITIPMRSRIREFDSSTLNESVRNTIMRDLKAVGKKFMHVLYPRKSNTLLRDWDLWGPLILCVTLALMLQRDSADSEKDGGPQFAEVFVIVWFGAVTITLNSKLLGGNISFFQSLCVLGYCILPLTVAMLICRLVLLADPGPVNFMVRLFVVIVMFAWSIVASTALLADSQPPNRRALAVYPVFLFYFVISWMILTFTPQ

SEQ ID NO: 1027053 - protein, 236 aa, Homo sapiens; identical to SEQ ID NO: 1027052

SEQ ID NO: 1027054 - protein, 236 aa, Homo sapiens; identical to SEQ ID NO: 1027052

SEQ ID NO: 1027055 - protein, 236 aa, Homo sapiens; identical to SEQ ID NO: 1027052

SEQ ID NO: 1027056 - protein, 236 aa, Homo sapiens; identical to SEQ ID NO: 1027052

SEQ ID NO: 1027057 - protein, 236 aa, Homo sapiens; identical to SEQ ID NO: 1027052

SEQ ID NO: 1027058 - protein, 226 aa, Homo sapiens
MAEAEESPGDPGTASPRPLFAGLSDISISQDIPVEGEITIPMRSRIREFDSSTLNESVRNTIMRDLKAVGKKFMHVLYPRKSNTLLRDWDLWGPLILCVTLALMLQRDSADSEKDGGPQFAEVFVIVWFGAVTITLNSKLLGGNISFFQSLCVLGYCILPLTVAMLICRLVLLADPGPVNFMVRLFVVIVMFAWSIVGPQVERNCTPEAILKELHLRSIMCTWSWT

SEQ ID NO: 1027059 - protein, 236 aa, Homo sapiens
MAEAEESPGDPGTASPRPLFAGLSDISISQDIPVEGEITIPMRSRIREFDSSTLNESVRNTIMRDLKAVGKKFMHVLYPRKSNTLLRDWDLWGPLILCVTLALMLQRDSADSEKDGGPQFAEVFVIVWFGAVTITLNSKLLGGNISFFQSLCVLGYCILPLTVAMLICRLVLLADPGPVNFMVRLFVVIVMFAWSIVASTAFLADSQPPNRRALAVYPVFLFYFVISWMILTFTPQ

SEQ ID NO: 1027060 - protein, 236 aa, Homo sapiens; identical to SEQ ID NO: 1027052

SEQ ID NO: 1027061 - protein, 236 aa, Homo sapiens; identical to SEQ ID NO: 1027052

SEQ ID NO: 1027062 - protein, 236 aa, Homo sapiens; identical to SEQ ID NO: 1027052

SEQ ID NO: 1027063 - protein, 236 aa, Homo sapiens; identical to SEQ ID NO: 1027052

SEQ ID NO: 1027064 - protein, 236 aa, Homo sapiens; identical to SEQ ID NO: 1027052

SEQ ID NO: 1027065 - protein, 77 aa, Homo sapiens
EIDNARELQEQRDSLNSRNYRKYKFGTIDLEGQLSDLEQRLEKSQNEQEAFRNNLKTLLEILDGKIFELTELRDNLA

SEQ ID NO: 1027066 - protein, 93 aa, Homo sapiens
  misc_feature (87)..(87): Xaa can be any naturally occurring amino acid
EIDNARELQEQRDSLNSRNYRKYKFGTIDLEGQLSDLEQRLEKSQNEQEAFRNNLKTLLEILDGKIFELTELRDNLAPPPPHTQKPXISVPIN

SEQ ID NO: 1027067 - protein, 93 aa, Homo sapiens
EIDNAIELQEQRDSLNSRNYRKYKFGTIDLEGQLSDLEQRLEKSQNEQEAFRNNLKTLLEILDGKIFELTELRDNLADATRMLLRKVKSLCPF

SEQ ID NO: 1027068 - protein, 214 aa, Homo sapiens
SYVVHTWSGVVQAGVFGRAWEHKSLFHHVSRTSHSGPGLVAKMVKPKYKGRSTINPSKASTNPDRVQGAGGQNMRDRATIRRLNMYRQKERRNSRGKIIKPLQYQSTVASGTVARVEPNIKWFGNTRVIKQSSLQKFQEEMDTVMKDPYNSGDEDSSKSPDVSSSMIESGLSNLKVHILDTEESPRTSSLGLKSQRTTTITYLHRDMQSLIDKC

SEQ ID NO: 1027069 - protein, 240 aa, Homo sapiens
SYVVHTWSGVVQAGVFGRAWEHKSLFHHVSRTSHSGPGLVAKMVKPKYKGRSTINPSKASTNPDRVQGAGGQNMRDRATIRRLNMYRQKERRNSRGKIIKPLQYQSTVASGTVARVEPNIKWFGNTRVHLKPVHPSPTNFQAAQHGITSLMKASHHTSLLHASQHQRSPTVSFSTHSTSGPSLTLQTLPHSLQLPDHLSPHNLTNSWTPYTLHTTHILTPTPSIIRTHCILTSSSLLATH

SEQ ID NO: 1027070 - protein, 131 aa, Homo sapiens
EAGQPSPGCSCTHMWPLLTMHITQLNRECLLHLFSFLDKDSRKSLARTCSQLHDVFEDPALWSLLHFRSLTELQKDNFLLGPALRSLSICWHSSRVQVCSIEDWLKSAFQRSICSRHESLVNDFLLRVCDR

SEQ ID NO: 1027071 - protein, 229 aa, Homo sapiens
NSTLSASNKCCINGASTVVTAIFGGILQNEVNCLICGTESRKFDPFLDLSLDIPSQFRSKRSKNQENGPVCSLRDCLRSFTDLEELDETELYMCHKCKKKQKSTKKFWIQKLPKVLCLHLKRFHWTAYLRNKVDTYVEFPLRGLDMKCYLLEPENSGPESCLYDLAAVVVHHGSGVGSGHYTAYATHEGRWFHFNDSTVTLTDEETVVKAKAYILFYVEHQAKAGSDKL

SEQ ID NO: 1027072 - protein, 256 aa, Homo sapiens
PFHSIPFNSIPCHPIRVDSIPFHSISIPFLSIPFHSIPLWLIPFHSTAIFGGILQNEVNCLICGTESRKFDPFLDLSLDIPSQFRSKRSKNQENGPVCSLRDCLRSFTDLEELDETELYMCHKCKKKQKSTKKFWIQKLPKVLCLHLKRFHWTAYLRNKVDTYVEFPLRGLDMKCYLLEPENSGPESCLYDLAAVVVHHGSGVGSGHYTAYATHEGRWFHFNDSTVTLTDEETVVKAKAYILFYVEHQAKAGSDKL

SEQ ID NO: 1027073 - protein, 256 aa, Homo sapiens; identical to SEQ ID NO: 1027072

SEQ ID NO: 1027074 - protein, 71 aa, Homo sapiens
  misc_feature (62)..(62): Xaa can be any naturally occurring amino acid
MAKMGDSRGQEIETILANKVKPTVCTKKKYKKLAGRGGGHLESQLLRRLRQENGVNPGGGAXSEPRTATAP

SEQ ID NO: 1027075 - protein, 119 aa, Homo sapiens
NSTLSASNKCCINGASTVVTAIFGGILQNEVNCLICGTESRKFDPFLDLSLDIPSQFRSKRSKNQENGPVCSLRDCLRSFTDLEELDETELYMCHKCKKKQKSTKKFWIQKLPKVSVEF

SEQ ID NO: 1027076 - protein, 274 aa, Homo sapiens
EAGQPSPGCSCTHMWPLLTMHITQLNRECLLHLFSFLDKDSRKSLARTCSQLHDVFEDPALWSLLHFRSLTELQKDNFLLGPALRSLSICWHSSRVQVCSIEDWLKSAFQRSICSRHESLVNDFLLRVCDRVRGLNDTVAPGTYRLSAVRSPRRREAPAPSSGTPIAVGPKSPRWGGPDHSEFADLRSGVTGARAAARRGLGSLRAERPSETPPAPGVSWGPPPPGAPVVISVKQEEGKQGRTGRRSHRAAPPCGFARTRVCPPTFPGADAFPQ

SEQ ID NO: 1027077 - protein, 256 aa, Homo sapiens; identical to SEQ ID NO: 1027072

SEQ ID NO: 1027078 - protein, 119 aa, Homo sapiens; identical to SEQ ID NO: 1027075

SEQ ID NO: 1027079 - protein, 256 aa, Homo sapiens; identical to SEQ ID NO: 1027072

SEQ ID NO: 1027080 - protein, 119 aa, Homo sapiens; identical to SEQ ID NO: 1027075

SEQ ID NO: 1027081 - protein, 99 aa, Homo sapiens
AAFLSAERGGKMAVQISKKRKFVADGIFKAELNEFLTRELAEDGYSGVEVRVTPTRTEIIILATRTQNVLGEKGRRIRELTAVVQKRFGFPEGQCRALC

SEQ ID NO: 1027082 - protein, 99 aa, Homo sapiens; identical to SEQ ID NO: 1027081

SEQ ID NO: 1027083 - protein, 101 aa, Homo sapiens
TTKYQQAVRMLVQYTGLRFNENDMGRGYNYKAELNEFLTRELAEDGYSGVEVRVTPTRTEIIILATRTQNVLGEKGRRIRELTAVVQKRFGFPEGQCRALC

SEQ ID NO: 1027084 - protein, 99 aa, Homo sapiens; identical to SEQ ID NO: 1027081

SEQ ID NO: 1027085 - protein, 99 aa, Homo sapiens; identical to SEQ ID NO: 1027081

SEQ ID NO: 1027086 - protein, 99 aa, Homo sapiens; identical to SEQ ID NO: 1027081

SEQ ID NO: 1027087 - protein, 105 aa, Homo sapiens
  misc_feature (8)..(8): Xaa can be any naturally occurring amino acid
IVVPPRGXLGYRLIHGRRAVQISKKRKFVADGIFKAELNEFLTRELAEDGYSGVEVRVTPTRTEIIILATRTQNVLGEKGRRIRELTAVVQKRFGFPEGQCRALC

SEQ ID NO: 1027088 - protein, 99 aa, Homo sapiens; identical to SEQ ID NO: 1027081

SEQ ID NO: 1027089 - protein, 106 aa, Homo sapiens
TPARTTRQVEGSVVNLAQRAVQISKKRKFVADGIFKAELNEFLTRELAEDGYSGVEVRVTPTRTEIIILATRTQNVLGEKGRRIRELTAVVQKRFGFPEGQCRALC

SEQ ID NO: 1027090 - protein, 117 aa, Homo sapiens
  misc_feature (93)..(93): Xaa can be any naturally occurring amino acid
  misc_feature (95)..(97): Xaa can be any naturally occurring amino acid
  misc_feature (99)..(100): Xaa can be any naturally occurring amino acid
  misc_feature (104)..(104): Xaa can be any naturally occurring amino acid
  misc_feature (106)..(109): Xaa can be any naturally occurring amino acid
  misc_feature (111)..(112): Xaa can be any naturally occurring amino acid
  misc_feature (114)..(116): Xaa can be any naturally occurring amino acid
AAFLSAERGGKMAVQISKKRKFVADGIFKAELNEFLTRELAEDGYSGVEVRVTPTRTEIIILATRTQNVLGEKGRRIRELTAVVQKRFGFPEXNXXXNXXKDGXKXXXXNXXGXXXT

SEQ ID NO: 1027091 - protein, 1029 aa, Homo sapiens
MLKPQPLQQPSQPQQPPPTQQAVARRPPGGTSPPNGGLPGPLATSAAPPGPPAAASPCLGPVAAAGSGLRRGAEGILAPQPPPPQQHQERPGAAAIGSARGQSTGKGPPQSPVFEGVYNNSRMLHFLTAVVGSTCDVKVKNGTTYEGIFKTLSSKFELAVDAVHRKASEPAGGPRREDIVDTMVFKPSDVMLVHFRNVDFNYATKDKFTDSAIAMNSKVNGEHKEKVLQRWEGGDSNSDDYDLESDMSNGWDPNEMFKFNEENYGVKTTYDSSLSSYTVPLEKDNSEEFRQRELRAAQLAREIESSPQYRLRIAMENDDGRTEEEKHSAVQRQGSGRESPSLASREGKYIPLPQRVREGPRGGVRCSSSRGGRPGLSSLPPRGPHHLDNSSPGPGSEARGINGGPSRMSPKAQRPLRGAKTLSSPSNRPSGETSVPPPPAVGRMYPPRSPKSAAPAPISASCPEPPIGSAVPTSSASIPVTSSVSDPGVGSISPASPKISLAPTDVKELSTKEPGRTLEPQELARIAGKVPGLQNEQKRFQLEELRKFGAQFKLQPSSSPENSLDPFPPRILKEEPKGKEKEVDGLLTSEPMGSPVSSKTESVSDKEDKPPLAPSGGTEGPEQPPPPCPSQTGSPPVGLIKGEDKDEGPVAEQVKKSTLNPNAKEFNPTKPLLSVNKSTSTPTSPGPRSHSTPSIPVLTAGQSGLYSPQYISYIPQIHMGPAVQATQMYPYPVSNSVPGQQGKYRGAKGSLPPQRSDQHQPASAPPMMQAAAAAGPPLVAATPYSSYIPYNPQQFPGQPAMMQPMAHYPSQPVFAPMLQSNPRMLTSGSHPQAIVSSSTPQYPSAEQPTPQALYATVHQSYPHHATQLHAHQPQPATTPTGSQPQSQHAAPSPVQHQAGQAPHLGSGQPQQNLYHPGALTGTPPSLPPGPSAQSPQSSFPQPAAVYAIHHQQLPHGFTNMAHVTQAHVQTGITAAPPPHPGAPHPPQVMLLHPPQSHGGPPQGAVPQSGVPALSASTPSPYPYIGHPQG

SEQ ID NO: 1027092 - protein, 504 aa, Homo sapiens
RDAPHFLDGMAAGKRRSSFPRWDGGRAEMLLTFLQPRDPLPFRLAALPRSAVFSLHPRHRGAPPARPRRAPAARSPSLPALSSGAPAPAPSLPPFSLIPLPDAAIMLKPQPLQQPSQPQQPPPTQQAVARRPPGGTSPPNGGLPGPLATSAAPPGPPAAASPCLGPVAAAGSGLRRGAEGILAPQPPPPQQHQERPGAAAIGSARGQSTGKGPPQSPVFEGVYNNSRMLHFLTAVVGSTCDVKVKNGTTYEGIFKTLSSKFELAVDAVHRKASEPAGGPRREDIVDTMVFKPSDVMLVHFRNVDFNYATKDKFTDSAIAMNSKVNGEHKEKVLQRWEGGDSNSDDYDLESDMSNGWDPNEMFKFNEENYGVKTTYDSSLSSYTVPLEKDNSEEFRQRELRAAQLAREIESSPQYRLRIAMENDDGRTEEEKHSAVQRQGSGRESPSLASREGKYIPLPHRGQGQGPAGVGGSCSAPARPHPVLPSHPLIYSPAGDGRSFIFYYL

SEQ ID NO: 1027093 - protein, 1180 aa, Homo sapiens [sequence omitted]

SEQ ID NO: 1027094 - protein, 1159 aa, Homo sapiens
RDAPHFLDGMAAGKRRSSFPRWDGGRAEMLLTFLQPRDPLPFRLAALPRSAVFSLHPRHRGAPPARPRRAPAARSPSLPALSSGAPAPAPSLPPFSLIPLPDAAIMLKPQPLQQPSQPQQPPPTQQAVARRPPGGTSPPNGGLPGPLATSAAPPGPPAAASPCLGPVAAAGSGLRRGAEGILAPQPPPPQQHQERPGAAAIGSARGQSTGKGPPQSPVFEGVYNNSRMLHFLTAVVGSTCDVKVKNGTTYEGIFKTLSSKFELAVDAVHRKASEPAGGPRREDIVDTMVFKPSDVMLVHFRNVDFNYATKDKFTDSAIAMNSKVNGEHKEKSNGWDPNEMFKFNEENYGVKTTYDSSLSSYTVPLEKDNSEEFRQRELRAAQLAREIESSPQYRLRIAMENDDGRTEEEKHSAVQRQGSGRESPSLASREGKYIPLPQRVREGPRGGVRCSSSRGGRPGLSSLPPRGPHHLDNSSPGPGSEARGINGGPSRMSPKAQRPLRGAKTLSSPSNRPSGETSVPPPPAVGRMYPPRSPKSAAPAPISASCPEPPIGSAVPTSSASIPVTSSVSDPGVGSISPASPKISLAPTDVKELSTKEPGRTLEPQELARIAGKVPGLQNEQKRFQLEELRKFGAQFKLQPSSSPENSLDPFPPRILKEEPKGKEKEVDGLLTSEPMGSPVSSKTESVSDKEDKPPLAPSGGTEGPEQPPPPCPSQTGSPPVGLIKGEDKDEGPVAEQVKKSTLNPNAKEFNPTKPLLSVNKSTSTPTSPGPRTHSTPSIPVLTAGQSGLYSPQYISYIPQIHMGPAVQAPQMYPYPVSNSVPGQQGKYRGAKGSLPPQRSDQHQPASAPPMMQAAAAAGPPLVAATPYSSYIPYNPQQFPGQPAMMQPMAHYPSQPVFAPMLQSNPRMLTSGSHPQAIVSSSTPQYPSAEQPTPQALYATVHQSYPHHATQLHAHQPQPATTPTGSQPQSQHAAPSPVQHQAGQAPHLGSGQPQQNLYHPGALTGTPPSLPPGPSAQSPQSSFPQPAAVYAIHHQQLPHGFTNMAHVTQAHVQTGITAAPPPHPGAPHPPQVMLLHPPQSHGGPPQGAVPQSGVPALSASTPSPYPYIGHPQGEQPGQAPGFPGGADDRIREFSLAGGIWHGRAEGLQVGQDARVLGGE

SEQ ID NO: 1027095 - protein, 1135 aa, Homo sapiens
RDAPHFLDGMAAGKRRSSFPRWDGGRAEMLLTFLQPRDPLPFRLAALPRSAVFSLHPRHRGAPPARPRRAPAARSPSLPALSSGAPAPAPSLPPFSLIPLPDAAIMLKPQPLQQPSQPQQPPPTQQAVARRPPGGTSPPNGGLPGPLATSAAPPGPPAAASPCLGPVAAAGSGLRRGAEGILAPQPPPPQQHQERPGAAAIGSARGQSTGKGPPQSPVFEGVYNNSRMLHFLTAVVGSTCDVKVKNGTTYEGIFKTLSSKFELAVDAVHRKASEPAGGPRREDIVDTMVFKPSDVMLVHFRNVDFNYATKDKFTDSAIAMNSKVNGEHKEKVLQRWEGGDSNSDDYDLESDMSNGWDPNEMFKFNEENYGVKTTYDSSLSSYTVPLEKDNSEEFRQRELRAAQLAREIESSPQYRLRIAMENDDGRTEEEKHSAVQRQGSGRESPSLASREGKYIPLPQRVREGPRGGVRCSSSRGGRPGLSSLPPRGPHHLDNSSPGPGSEARGINGGPSRMSPKAQRPLRGAKTLSSPSNRPSGETSVPPPPAVGRMYPPRSPKSAAPAPISASCPEPPIGSAVPTSSASIPVTSSVSDPGVGSISPASPKISLAPTDVKELSTKEPGRTLEPQELARIAGKVPGLQNEQKRFQLEELRKFGAQFKLQPSSSPENSLDPFPPRILKEEPKGKEKEVDGLLTSEPMGSPVSSKTESVSDKEDKPPLAPSGGTEGPEQPPPPCPSQTGSPPVGLIKGEDKDEGPVAEQVKKSTLNPNAKEFNPTKPLLSVNKSTSTPTSPGPRTHSTPSIPVLTAGQSGLYSPQYISYIPQIHMGPAVQAPQMYPYPVSNSVPGQQGKYRGAKGSLPPQRSDQHQPASAPPMMQAAAAAGPPLVAATPYSSYIPYNPQQFPGQPAMMQPMAHYPSQPVFAPMLQSNPRMLTSGSHPQAIVSSSTPQYPSAEQPTPQALYATVHQSYPHHATQLHAHQPQPATTPTGSQPQSQHAAPSPVQHQAGQAPHLGSGQPQQNLYHPGALTGTPPSLPPGPSAQSPQSSFPQPAAVYAIHHQQLPHGFTNMAHVTQAHVQTGITAAPPPHPGAPHPPQVMLLHPPQSHGGPPQGAVPQSGVPALSASTPSPYPYIGHPQSM

SEQ ID NO: 1027096 - protein, 1180 aa, Homo sapiens [sequence omitted]

SEQ ID NO: 1027097 - protein, 1061 aa, Homo sapiens
RDAPHFLDGMAAGKRRSSFPRWDGGRAEMLLTFLQPRDPLPFRLAALPRSAVFSLHPRHRGAPPARPRRAPAARSPSLPALSSGAPAPAPSLPPFSLIPLPDAAIMLKPQPLQQPSQPQQPPPTQQAVARRPPGGTSPPNGGLPGPLATSAAPPGPPAAASPCLGPVAAAGSGLRRGAEGILAPQPPPPQQHQERPGAAAIGSARGQSTGKGPPQSPVFEGVYNNSRMLHFLTAVVGSTCDVKVKNGTTYEGIFKTLSSKFELAVDAVHRKASEPAGGPRREDIVDTMVFKPSDVMLVHFRNVDFNYATKDKFTDSAIAMNSKVNGEHKEKVLQRWEGGDSNSDDYDLESDMSNGWDPNEMFKFNEENYGVKTTYDSSLSSYTVPLEKDNSEEFRQRELRAAQLAREIESSPQYRLRIAMENDDGRTEEEKHSAVQRQGSGRESPSLASREGKYIPLPQRVREGPRGGVRCSSSRGGRPGLSSLPPRGPHHLDNSSPGPGSEARGINGGPSRMSPKAQRPLRGAKTLSSPSNRPSGETSVPPPPAVGRMYPPRSPKSAAPAPISASCPEPPIGSAVPTSSASIPVTSSVSDPGVGSISPASPKISLAPTDVKELSTKEPGRTLEPQELARIAGKVPGLQNEQKRFQLEELRKFGAQFKLQPSSSPENSLDPFPPRILKEEPKGKEKEVDGLLTSEPMGSPVSSKTESVSDKEDKPPLAPSGGTEGPEQPPPPCPSQTGSPPVGLIKGEDKDEGPVAEQVKKSTLNPNAKEFNPTKPLLSVNKSTSTPTSPGPRTHSTPSIPVLTAGQSGLYSPQYISYIPQIHMGPAVQAPQMYPYPVSNSVPGQQGKYRGAKGSLPPQRSDQHQPASAPPMMQAAAAAGPPLVAATPYSSYIPYNPQQFPGQPAMMQPMAHYPSQPVFAPMLQSNPRMLTSGSHPQAIVSSSTPQYPSAEQPTPQALYATVHQSYPHHATQLHAHQPQPATTPTGSQPQSQHAAPSPVQHQAGQAPHLGSGQPQQNLYQPRPPLSLPSLYSPSGRCHHVEASAATTALPAPAAAPHATGR

SEQ ID NO: 1027098 - protein, 869 aa, Homo sapiens
RDAPHFLDGMAAGKRRSSFPRWDGGRAEMLLTFLQPRDPLPFRLAALPRSAVFSLHPRHRGAPPARPRRAPAARSPSLPALSSGAPAPAPSLPPFSLIPLPDAAIMLKPQPLQQPSQPQQPPPTQQAVARRPPGGTSPPNGGLPGPLATSAAPPGPPAAASPCLGPVAAAGSGLRRGAEGILAPQPPPPQQHQERPGAAAIGSARGQSTGKGPPQSPVFEGVYNNSRMLHFLTAVVGSTCDVKVKNGTTYEGIFKTLSSKFELAVDAVHRKASEPAGGPRREDIVDTMVFKPSDVMLVHFRNVDFNYATKDKFTDSAIAMNSKVNGEHKEKVLQRWEGGDSNSDDYDLESDMSNGWDPNEMFKFNEENYGVKTTYDSSLSSYTVPLEKDNSEEFRQRELRAAQLAREIESSPQYRLRIAMENDDGRTEEEKHSAVQRQGSGRESPSLASREGKYIPLPQRVREGPRGGVRCSSSRGGRPGLSSLPPRGPHHLDNSSPGPGSEARGINGGPSRMSPKAQRPLRGAKTLSSPSNRPSGETSVPPPPAVGRMYPPRSPKSAAPAPISASCPEPPIGSAVPTSSASIPVTSSVSDPGVGSISPASPKISLAPTDVKELSTKEPGRTLEPQELARIAGKVPGLQNEQKRFQLEELRKFGAQFKLQPSSSPENSLDPFPPRILKEEPKGKEKEVDGLLTSEPMGSPVSSKTESVSDKEDKPPLAPSGGTEGPEQPPPPCPSQTGSPPVGLIKGEDKDEGPVAEQVKKSTLNPNAKEFNPTKPLLSVNKSTSTPTSPGPRTHSTPSIPVLTAGQSGLYSPQYISYIPQIHMGPAVQAPQMYPYPVSNSVPGQQGKYLRTAWILFLPGSIKGEPKGI

SEQ ID NO: 1027099 - protein, 1149 aa, Homo sapiens
RDAPHFLDGMAAGKRRSSFPRWDGGRAEMLLTFLQPRDPLPFRLAALPRSAVFSLHPRHRGAPPARPRRAPAARSPSLPALSSGAPAPAPSLPPFSLIPLPDAAIMLKPQPLQQPSQPQQPPPTQQAVARRPPGGTSPPNGGLPGPLATSAAPPGPPAAASPCLGPVAAAGSGLRRGAEGILAPQPPPPQQHQERPGAAAIGSARGQSTGKGPPQSPVFEGVYNNSRMLHFLTAVVGSTCDVKVKNGTTYEGIFKTLSSKFELAVDAVHRKASEPAGGPRREDIVDTMVFKPSDVMLVHFRNVDFNYATKDKFTDSAIAMNSKVNGEHKEKVLQRWEGGDSNSDDYDLESDMSNGWDPNEMFKFNEENYGVKTTYDSSLSSYTVPLEKDNSEEFRQRELRAAQLAREIESSPQYRLRIAMENDDGRTEEEKHSAVQRQGSGRESPSLASREGKYIPLPQRVREGPRGGVRCSSSRGGRPGLSSLPPRGPHHLDNSSPGPGSEARGINGGPSRMSPKAQRPLRGAKTLSSPSNRPSGETSVPPPPAVGRMYPPRSPKSAAPAPISASCPEPPIGSAVPTSSASIPVTSSVSDPGVGSISPASPKISLAPTDVKELSTKEPGRTLEPQELARIAGKVPGLQNEQKRFQLEELRKFGAQFKLQPSSSPENSLDPFPPRILKEEPKGKEKEVDGLLTSEPMGSPVSSKTESVSDKEDKPPLAPSGGTEGPEQPPPPCPSQTGSPPVGLIKGEDKDEGPVAEQVKKSTLNPNAKEFNPTKPLLSVNKSTSTPTSPGPRTHSTPSIPVLTAGQSGLYSPQYISYIPQIHMGPAVQAPQMYPYPVSNSVPGQQGKYRGAKGSLPPQRSDQHQPASAPPMMQAAAAAGPPLVAATPYSSYIPYNPQQFPGQPAMMQPMAHYPSQPVFAPMLQSNPRMLTSGSHPQAIVSSSTPQYPSAEQPTPQALYATVHQSYPHHATQLHAHQPQPATTPTGSQPQSQHAAPSPVQHQAGQAPHLGSGQPQQNLYHPGALTGTPPSLPPGPSAQSPQSSFPQPAAVYAIHHQQLPHGFTNMAHVTQAHVQTGITAAPPPHPGAPHPPQVMLLHPPQSHGGPPQGAVPQSGVPALSASTPSPYPYIGHPQVQSHPSQQLPFHPPGN

SEQ ID NO: 1027100 - protein, 105 aa, Homo sapiens
MVVVCGCCLRVPLEKDNSEEFRQRELRAAQLAREIESSPQYRLRIAMENDDGRTEEEKHSAVQRQGSGRESPSLASRLTVANSQDYLGLLGISWGLGPELMSAVV

SEQ ID NO: 1027101 - protein, 1179 aa, Homo sapiens
RDAPHFLDGMAAGKRRSSFPRWDGGRAEMLLTFLQPRDPLPFRLAALPRSAVFSLHPRHRGAPPARPRRAPAARSPSLPALSSGAPAPAPSLPPFSLIPLPDAAIMLKPQPLQQPSQPQQPPPTQQAVARRPPGGTSPPNGGLPGPLATSAAPPGPPAAASPCLGPVAAAGSGLRRGAEGILAPQPPPPQQHQERPGAAAIGSARGQSTGKGPPQSPVFEGVYNNSRMLHFLTAVVGSTCDVKVKNGTTYEGIFKTLSSKFELAVDAVHRKASEPAGGPRREDIVDTMVFKPSDVMLVHFRNVDFNYATKDKFTDSAIAMNSKVNGEHKEKVLQRWEGGDSNSDDYDLESDMSNGWDPNEMFKFNEENYGVKTTYDSSLSSYTVPLEKDNSEEFRQRELRAAQLAREIESSPQYRLRIAMENDDGRTEEEKHSAVQRQGSGRESPSLASREGKYIPLPQRVREGPRGGVRCSSSRGGRPGLSSLPPRGPHHLDNSSPGPGSEARGINGGPSRMSPKAQRPLRGAKTLSSPSNRPSGETSVPPPPAVGRMYPPRSPKSAAPAPISASCPEPPIGSAVPTSSASIPVTSSVSDPGVGSISPASPKISLAPTDVKELSTKEPGRTLEPQELARIAGKVPGLQNEQKRFQLEELRKFGAQFKLQPSSSPENSLDPFPPRILKEEPKGKEKEVDGLLTSEPMGSPVSSKTESVSDKEDKPPLAPSGGTEGPEQPPPPCPSQTGSPPVGLIKGEDKDEGPVAEQVKKSTLNPNAKEFNPTKPLLSVNKSTSTPTSPGPRTHSTPSIPVLTAGQSGLYSPQYISYIPQIHMGPAVQAPQMYPYPVSNSVPGQQGKYRGAKGSLPPQRSDQHQPASAPPMMQAAAAAGPPLVAATPYSSYIPYNPQQFPGQPAMMQPMAHYPSQPVFAPMLQSNPRMLTSGSHPQAIVSSSTPQYPSAEQPTPQALYATVHQSYPHHATQLHAHQPQPATTPTGSQPQSQHAAPSPVQHQAGQAPHLGSGQPQQNLYHPGALTGTPPSLPPGPSAQSPQSSFPQPAAVYAIHHQQLPHGFTNMAHVTQAHVQTGITAAPPPHPGAPHPPQVMLLHPPQSHGGPPQGAVPQSGVPALSASTPSPYPYIGHPQGEQPGQAPGFPGGADDRIQFNLIPPSSSPSTPRGTEDCPGRDLRPP

SEQ ID NO: 1027102 - protein, 616 aa, Homo sapiens
RDAPHFLDGMAAGKRRSSFPRWDGGRAEMLLTFLQPRDPLPFRLAALPRSAVFSLHPRHRGAPPARPRRAPAARSPSLPALSSGAPAPAPSLPPFSLIPLPDAAIMLKPQPLQQPSQPQQPPPTQQAVARRPPGGTSPPNGGLPGPLATSAAPPGPPAAASPCLGPVAAAGSGLRRGAEGILAPQPPPPQQHQERPGAAAIGSARGQSTGKGPPQSPVFEGVYNNSRMLHFLTAVVGSTCDVKVKNGTTYEGIFKTLSSKFELAVDAVHRKASEPAGGPRREDIVDTMVFKPSDVMLVHFRNVDFNYATKDKFTDSAIAMNSKVNGEHKEKVLQRWEGGDSNSDDYDLESDMSNGWDPNEMFKFNEENYGVKTTYDSSLSSYTVPLEKDNSEEFRQRELRAAQLAREIESSPQYRLRIAMENDDGRTEEEKHSAVQRQGSGRESPSLASREGKYIPLPQRVREGPRGGVRCSSSRGGRPGLSSLPPRGPHHLDNSSPGPGSEARGINGGPSRMSPKAQRPLRGAKTLSSPSNRPSGETSVPPPPAVGRMYPPRSPKSAAPAPISASCPEPPIGSAVPTSSASIPVTSSVSDPGVGSISPASPKISLAPTDSPWSSE

SEQ ID NO: 1027103 - protein, 1180 aa, Homo sapiens [sequence omitted]

SEQ ID NO: 1027104 - protein, 1060 aa, Homo sapiens
RDAPHFLDGMAAGKRRSSFPRWDGGRAEMLLTFLQPRDPLPFRLAALPRSAVFSLHPRHRGAPPARPRRAPAARSPSLPALSSGAPAPAPSLPPFSLIPLPDAAIMLKPQPLQQPSQPQQPPPTQQAVARRPPGGTSPPNGGLPGPLATSAAPPGPPAAASPCLGPVAAAGSGLRRGAEGILAPQPPPPQQHQERPGAAAIGSARGQSTGKGPPQSPVFEGVYNNSRMLHFLTAVVGSTCDVKVKNGTTYEGIFKTLSSKFELAVDAVHRKASEPAGGPRREDIVDTMVFKPSDVMLVHFRNVDFNYATKDKFTDSAIAMNSKVNGEHKEKVLQRWEGGDSNSDDYDLESDMSNGWDPNEMFKFNEENYGVKTTYDSSLSSYTVPLEKDNSEEFRQRELRAAQLAREIESSPQYRLRIAMENDDGRTEEEKHSAVQRQGSGRESPSLASREGKYIPLPQRVREGPRGGVRCSSSRGGRPGLSSLPPRGPHHLDNSSPGPGSEARGINGGPSRMSPKAQRPLRGAKTLSSPSNRPSGETSVPPPPAVGRMYPPRSPKSAAPAPISASCPEPPIGSAVPTSSASIPVTSSVSDPGVGSISPASPKISLAPTDVKELSTKEPGRTLEPQELARIAGKVPGLQNEQKRFQLEELRKFGAQFKLQPSSSPENSLDPFPPRILKEEPKGKEKEVDGLLTSEPMGSPVSSKTESVSDKEDKPPLAPSGGTEGPEQPPPPCPSQTGSPPVGLIKGEDKDEGPVAEQVKKSTLNPNAKEFNPTKPLLSVNKSTSTPTSPGPRTHSTPSIPVLTAGQSGLYSPQYISYIPQIHMGPAVQAPQMYPYPVSNSVPGQQGKYRGAKGSLPPQRSDQHQPASAPPMMQAAAAAGPPLVAATPYSSYIPYNPQQFPGQPAMMQPMAHYPSQPVFAPMLQSNPRMLTSGSHPQAIVSSSTPQYPSAEQPTPQALYATVHQSYPHHATQLHAHQPQPATTPTGSQPQSQHAAPSPVQHQAGQAPHLGSGQPQQNLYHPGALTGTPPSLPPGPSAQSLKKSPAAGCAPQRPGQSRPPH

SEQ ID NO: 1027105 - protein, 1104 aa, Homo sapiens
  misc_feature (1055)..(1055): Xaa can be any naturally occurring amino acid
  misc_feature (1057)..(1060): Xaa can be any naturally occurring amino acid
  misc_feature (1063)..(1064): Xaa can be any naturally occurring amino acid
  misc_feature (1067)..(1068): Xaa can be any naturally occurring amino acid
  misc_feature (1074)..(1075): Xaa can be any naturally occurring amino acid
  misc_feature (1077)..(1077): Xaa can be any naturally occurring amino acid
  misc_feature (1080)..(1080): Xaa can be any naturally occurring amino acid
  misc_feature (1082)..(1084): Xaa can be any naturally occurring amino acid
  misc_feature (1086)..(1087): Xaa can be any naturally occurring amino acid
  misc_feature (1090)..(1097): Xaa can be any naturally occurring amino acid
  misc_feature (1100)..(1100): Xaa can be any naturally occurring amino acid
RDAPHFLDGMAAGKRRSSFPRWDGGRAEMLLTFLQPRDPLPFRLAALPRSAVFSLHPRHRGAPPARPRRAPAARSPSLPALSSGAPAPAPSLPPFSLIPLPDAAIMLKPQPLQQPSQPQQPPPTQQAVARRPPGGTSPPNGGLPGPLATSAAPPGPPAAASPCLGPVAAAGSGLRRGAEGILAPQPPPPQQHQERPGAAAIGSARGQSTGKGPPQSPVFEGVYNNSRMLHFLTAVVGSTCDVKVKNGTTYEGIFKTLSSKFELAVDAVHRKASEPAGGPRREDIVDTMVFKPSDVMLVHFRNVDFNYATKDKFTDSAIAMNSKVNGEHKEKVLQRWEGGDSNSDDYDLESDMSNGWDPNEMFKFNEENYGVKTTYDSSLSSYTVPLEKDNSEEFRQRELRAAQLAREIESSPQYRLRIAMENDDGRTEEEKHSAVQRQGSGRESPSLASREGKYIPLPQRVREGPRGGVRCSSSRGGRPGLSSLPPRGPHHLDNSSPGPGSEARGINGGPSRMSPKAQRPLRGAKTLSSPSNRPSGETSVPPPPAVGRMYPPRSPKSAAPAPISASCPEPPIGSAVPTSSASIPVTSSVSDPGVGSISPASPKISLAPTDVKELSTKEPGRTLEPQELARIAGKVPGLQNEQKRFQLEELRKFGAQFKLQPSSSPENSLDPFPPRILKEEPKGKEKEVDGLLTSEPMGSPVSSKTESVSDKEDKPPLAPSGGTEGPEQPPPPCPSQTGSPPVGLIKGEDKDEGPVAEQVKKSTLNPNAKEFNPTKPLLSVNKSTSTPTSPGPRTHSTPSIPVLTAGQSGLYSPQYISYIPQIHMGPAVQAPQMYPYPVSNSVPGQQGKYRGAKGSLPPQRSDQHQPASAPPMMQAAAAAGPPLVAATPYSSYIPYNPQQFPGQPAMMQPMAHYPSQPVFAPMLQSNPRMLTSGSHPQAIVSSSTPQYPSAEQPTPQALYATVHQSYPHHATQLHAHQPQPATTPTGSQPQSQHAAPSPVQHQAGQAPHLGSGQPQQNLYHPGALTGTPPSLPPGPSAQSPSRASFPQAKPACCMXIXXXXSMXXRHXXTMAQCXXRXKCXTXXXTXXTHXXXXXXXXKKXKKGG

SEQ ID NO: 1027106 - protein, 434 aa, Homo sapiens
YTGLIERDLWDRVSSHSLPLLGFSRIQLSSLVGQNKSTSTPTSPGPRTHSTPSIPVLTAGQSGLYSPQYISYIPQIHMGPAVQAPQMYPYPVSNSVPGQQGKYRGAKGSLPPQRSDQHQPASAPPMMQAAAAAGPPLVAATPYSSYIPYNPQQFPGQPAMMQPMAHYPSQPVFAPMLQSNPRMLTSGSHPQAIVSSSTPQYPSAEQPTPQALYATVHQSYPHHATQLHAHQPQPATTPTGSQPQSQHAAPSPVQHQAGQAPHLGSGQPQQNLYHPGALTGTPPSLPPGPSAQSPQSSFPQPAAVYAIHHQQLPHGFTNMAHVTQAHVQTGITAAPPPHPGAPHPPQVMLLHPPQSHGGPPQGAVPQSGVPALSASTPSPYPYIGHPQGEQPGQAPGFPGGADDRIREFSLAGGIWHGRAEGLQVGQDARVLGGE

SEQ ID NO: 1027107 - protein, 468 aa, Homo sapiens
  misc_feature (74)..(74): Xaa can be any naturally occurring amino acid
  misc_feature (86)..(86): Xaa can be any naturally occurring amino acid
GASWGTTEGWRTISVIRFLNKQDLARGESPGWGNLKIGGLLSENLARYTNSVEDATPGARERTQRVTRGQCTSXREEFLEDQHGQXEMGVTTGYPHFTCAGDTENIRRVSNDGRDIIQRMHLRQYERLQTSEQRGKYRGAKGSLPPQRSDQHQPASAPPMMQAAAAAGPPLVAATPYSSYIPYNPQQFPGQPAMMQPMAHYPSQPVFAPMLQSNPRMLTSGSHPQAIVSSSTPQYPSAEQPTPQALYATVHQSYPHHATQLHAHQPQPATTPTGSQPQSQHAAPSPVQHQAGQAPHLGSGQPQQNLYHPGALTGTPPSLPPGPSAQSPQSSFPQPAAVYAIHHQQLPHGFTNMAHVTQAHVQTGITAAPPPHPGAPHPPQVMLLHPPQSHGGPPQGAVPQSGVPALSASTPSPYPYIGHPQGEQPGQAPGFPGGADDRIREFSLAGGIWHGRAEGLQVGQDARVLGGE

SEQ ID NO: 1027108 - protein, 511 aa, Homo sapiens
RDAPHFLDGMAAGKRRSSFPRWDGGRAEMLLTFLQPRDPLPFRLAALPRSAVFSLHPRHRGAPPARPRRAPAARSPSLPALSSGAPAPAPSLPPFSLIPLPDAAIMLKPQPLQQPSQPQQPPPTQQAVARRPPGGTSPPNGGLPGPLATSAAPPGPPAAASPCLGPVAAAGSGLRRGAEGILAPQPPPPQQHQERPGAAAIGSARGQSTGKGPPQSPVFEGVYNNSRMLHFLTAVVGSTCDVKVKNGTTYEGIFKTLSSKFELAVDAVHRKASEPAGGPRREDIVDTMVFKPSDVMLVHFRNVDFNYATKDKFTDSAIAMNSKVNGEHKEKVLQRWEGGDSNSDDYDLESDMSNGWDPNEMFKFNEENYGVKTTYDSSLSSYTVPLEKDNSEEFRQRELRAAQLAREIESSPQYRLRIAMENDDGRTEEEKHSAVQRQGSGRESPSLASREGKYIPLPQRVREGPRGGVRCSSSRGGRPGLSSLPPRGPHHLDNSSPGPGSEARGINGGEL

SEQ ID NO: 1027109 - protein, 1051 aa, Homo sapiens
MGWRPGRDAPHFPPAARPPPLPPRGASSRRGFLSPPPTPRGSPRPPTAGPGCPIPLASRALQRGPSPGPLSPSLLSNSPSGRCHHVEASAATTALPAPAAAPHATCRGPSAPRGHSPPNGGLPGPLATSAAPPGPPAAASPCLGPVAAAGSGLRRGAEGILAPQPPPPQQHQERPGAAAIGSARGQSTGKGPPQSPVFEGVYNNSRMLHFLTAVVGSTCDVKVKNGTTYEGIFKTLSSKFELAVDAVHRKASEPAGGPRREDIVDTMVFKPSDVMLVHFRNVDFNYATKDKFTDSAIAMNSKVNGEHKEKVLQRWEGGDSNSDDYDLESDMSNGWDPNEMFKFNEENYGVKTTYDSSLSSYTVPLEKDNSEEFRQRELRAAQLAREIESSPQYRLRIAMENDDGRTEEEKHSAVQRQGSGRESPSLASREGKYIPLPQRVREGPRGGVRCSSSRGGRPGLSSLPPRGPHHLDNSSPGPGSEARGINGGPSRMSPKAQRPLRGAKTLSSPSNRLLENFCSTSSCSGPDVSPRSPKSAAPAPISASCPEPPIGSAVPTSSASIPVTSSVSDPGVGSISPASPKISLAPTDVKELSTKEPGRTLEPQELARIAGKVPGLQNEQKRFQLEELRKFGAQFKLQPSSSPENSLDPFPPRILKEEPKGKEKEVDGLLTSEPMGSPVSSKTESVSDKEDKPPLAPSGGTEGPEQPPPPCPSQTGSPPVGLIKGEDKDEGPVAEQVKKSTLNPNAKEFNPTKPLLSVNKSTSTPTSPGPRTHSTPSIPVLTAGQSGLYSPQYISYIPQIHMGPAVQAPQMYPYPVSNSVPGQQGKYRGAKGSLPPQRSDQHQPASAPPMMQAAAAAGPPLVAATPYSSYIPYNPQQFPGQPAMMQPMAHYPSQPVFAPMLQSNPRMLTSGSHPQAIVSSSTPQYPSAEQPTPQALYATVHQSYPHHATQLHAHQPQPATTPTGSQPQSQHAAPSPVQVPAMGGAEWSWCRNGWPEEGIELGVISEWRGLGASELLACVALNLPLPSSIRRGRPHTWAVDSHSRICTTQGP

SEQ ID NO: 1027110 - protein, 1075 aa, Homo sapiens [sequence omitted]

SEQ ID NO: 1027111 - protein, 1141 aa, Homo sapiens
RDAPHFLDGMAAGKRRSSFPRWDGGRAEMLLTFLQPRDPLPFRLAALPRSAVFSLHPRHRGAPPARPRRAPAARSPSLPALSSGAPAPAPSLPPFSLIPLPDAAIMLKPQPLQQPSQPQQPPPTQQAVARRPPGGTSPPNGGLPGPLATSAAPPGPPAAASPCLGPVAAAGSGLRRGAEGILAPQPPPPQQHQERPGAAAIGSARGQSTGKGPPQSPVFEGVYNNSRMLHFLTAVVGSTCDVKVKNGTTYEGIFKTLSSKFELAVDAVHRKASEPAGGPRREDIVDTMVFKPSDVMLVHFRNVDFNYATKDKFTDSAIAMNSKVNGEHKEKVLQRWEGGDSNSDDYDLESDMSNGWDPNEMFKFNEENYGVKTTYDSSLSSYTVPLEKDNSEEFRQRELRAAQLAREIESSPQYRLRIAMENDDGRTEEEKHSAVQRQGSGRESPSLASREGKYIPLPQRVREGPRGGVRCSSSRGGRPGLSSLPPRGPHHLDNSSPGPGSEARGINGGPSRMSPKAQRPLRGAKTLSSPSNRPSGETSVPPPPAVGRMYPPRSPKSAAPAPISASCPEPPIGSAVPTSSASIPVTSSVSDPGVGSISPASPKISLAPTDVKELSTKEPGRTLEPQELARIAGKVPGLQNEQKRFQLEELRKFGAQFKLQPSSSPENSLDPFPPRILKEEPKGKEKEVDGLLTSEPMGSPVSSKTESVSDKEDKPPLAPSGGTEGPEQPPPPCPSQTGSPPVGLIKGEDKDEGPVAEQVKKSTLNPNAKEFNPTKPLLSVNKSTSTPTSPGPRTHSTPSIPVLTAGQSGLYSPQYISYIPQIHMGPAVQAPQMYPYPVSNSVPGQQGKYRGAKGSLPPQRSDQHQPASAPPMMQAAAAAGPPLVAATPYSSYIPYNPQQFPGQPAMMQPMAHYPSQPVFAPMLQSNPRMLTSGSHPQAIVSSSTPQYPSAEQPTPQALYATVHQSYPHHATQLHAHQPQPATTPTGSQPQSQHAAPSPVQHQAGQAPHLGSGQPQQNLYHPGALTGTPPSLPPGPSAQSPQSSFPQPAAVYAIHHQQLPHGFTNMAHVTQAHVQTGITAAPPPHPGAPHPPQVMLLHPPQSHGGPPQGAVPQSGVPALSASTPSPYPYIGHPQLPFHPPGN

SEQ ID NO: 1027112 - protein, 1029 aa, Homo sapiens; identical to SEQ ID NO: 1027091

SEQ ID NO: 1027113 - protein, 1029 aa, Homo sapiens; identical to SEQ ID NO: 1027091

SEQ ID NO: 1027114 - protein, 761 aa, Homo sapiens
MENDDGRTEEEKHSAVQRQGSGRESPSLASREGKYIPLPQRVREGPRGGVRCSSSRGGRPGLSSLPPRGPHHLDNSSPGPGSEARGINGGPSRMSPKAQRPLRGAKTLSSPSNRPSGETSVPPPPAVGRMYPPRSPKSAAPAPISASCPEPPIGSAVPTSSASIPVTSSVSDPGVGSISPASPKISLAPTDVKELSTKEPGRTLEPQELARIAGKVPGLQNEQKRFQLEELRKFGAQFKLQPSSSPENSLDPFPPRILKEEPKGKEKEVDGLLTSEPMGSPVSSKTESVSDKEDKPPLAPSGGTEGPEQPPPPCPSQTGSPPVGLIKGEDKDEGPVAEQVKKSTLNPNAKEFNPTKPLLSVNKSTSTPTSPGPRTHSTPSIPVLTAGQSGLYSPQYISYIPQIHMGPAVQAPQMYPYPVSNSVPGQQGKYRGAKGSLPPQRSDQHQPASAPPMMQAAAAAGPPLVAATPYSSYIPYNPQQFPGQPAMMQPMAHYPSQPVFAPMLQSNPRMLTSGSHPQAIVSSSTPQYPSAEQPTPQALYATVHQSYPHHATQLHAHQPQPATTPTGSQPQSQHAAPSPVQHQAGQAPHLGSGQPQQNLYHPGALTGTPPSLPPGPSAQSPQSSFPQPAAVYAIHHQQLPHGFTNMAHVTQAHVQTGITAAPPPHPGAPHPPQVMLLHPPQSHGGPPQGAVPQSGVPALSASTPSPYPYIGHPQGEQPGQAPGFPGGADDRIREFSLAGGIWHGRAEGLQVGQDARVLGGE

SEQ ID NO: 1027115 - protein, 484 aa, Homo sapiens
MGSPVSSKTESVSDKEDKPPLAPSGGTEGPEQPPPPCPSQTGSPPVGLIKGEDKDEGPVAEQVKKSTLNPNAKEFNPTKPLLSVNKSTSTPTSPGPRTHSTPSIPVLTAGQSGLYSPQYISYIPQIHMGPAVQAPQMYPYPVSNSVPGQQGKYRGAKGSLPPQRSDQHQPASAPPMMQAAAAAGPPLVAATPYSSYIPYNPQQFPGQPAMMQPMAHYPSQPVFAPMLQSNPRMLTSGSHPQAIVSSSTPQYPSAEQPTPQALYATVHQSYPHHATQLHAHQPQPATTPTGSQPQSQHAAPSPVQHQAGQAPHLGSGQPQQNLYHPGALTGTPPSLPPGPSAQSPQSSFPQPAAVYAIHHQQLPHGFTNMAHVTQAHVQTGITAAPPPHPGAPHPPQVMLLHPPQSHGGPPQGAVPQSGVPALSASTPSPYPYIGHPQGEQPGQAPGFPGGADDRIREFSLAGGIWHGRAEGLQVGQDARVLGGE

SEQ ID NO: 1027116 - protein, 752 aa, Homo sapiens
RDAPHFLDGMAAGKRRSSFPRWDGGRAEMLLTFLQPRDPLPFRLAALPRSAVFSLHPRHRGAPPARPRRAPAARSPSLPALSSGAPAPAPSLPPFSLIPLPDAAIMLKPQPLQQPSQPQQPPPTQQAVARRPPGGTSPPNGGLPGPLATSAAPPGPPAAASPCLGPVAAAGSGLRRGAEGILAPQPPPPQQHQERPGAAAIGSARGQSTGKGPPQSPVFEGVYNNSRMLHFLTAVVGSTCDVKVKNGTTYEGIFKTLSSKFELAVDAVHRKASEPAGGPRREDIVDTMVFKPSDVMLVHFRNVDFNYATKDKFTDSAIAMNSKVNGEHKEKVLQRWEGGDSNSDDYDLESDMSNGWDPNEMFKFNEENYGVKTTYDSSLSSYTVPLEKDNSEEFRQRELRAAQLAREIESSPQYRLRIAMENDDGRTEEEKHSAVQRQGSGRESPSLASREGKYIPLPQRVREGPRGGVRCSSSRGGRPGLSSLPPRGPHHLDNSSPGPGSEARGINGGPSRMSPKAQRPLRGAKTLSSPSNRPSGETSVPPPPAVGRMYPPRSPKSAAPAPISVPFCRAAYPPSPLCHCSPVLPTPCHTAPCPPAAAGYHAYWKPAAVPACGPQSCPASGGAGPTLGQWTATAESVPPRGPDRHAALSATGTFCPVPSEQLPPASRCVCHPPPAAAPRLHQHGPCYPGPCPNWNHSSPAPSPWGSPPAPGDAAAPTPESWGAPPRRGAPEWGACTLSFHTLTLPLHRTPPR

SEQ ID NO: 1027117 - protein, 636 aa, Homo sapiens
RDAPHFLDGMAAGKRRSSFPRWDGGRAEMLLTFLQPRDPLPFRLAALPRSAVFSLHPRHRGAPPARPRRAPAARSPSLPALSSGAPAPAPSLPPFSLIPLPDAAIMLKPQPLQQPSQPQQPPPTQQAVARRPPGGTSPPNGGLPGPLATSAAPPGPPAAASPCLGPVAAAGSGLRRGAEGILAPQPPPPQQHQERPGAAAIGSARGQSTGKGPPQSPVFEGVYNNSRMLHFLTAVVGSTCDVKVKNGTTYEGIFKTLSSKFELAVDAVHRKASEPAGGPRREDIVDTMVFKPSDVMLVHFRNVDFNYATKDKFTDSAIAMNSKVNGEHKEKVLQRWEGGDSNSDDYDLESDMSNGWDPNEMFKFNEENYGVKTTYDSSLSSYTVPLEKDNSEEFRQRELRAAQLAREIESSPQYRLRIAMENDDGRTEEEKHSAVQRQGSGRESPSLASREGKYIPLPQRVREGPRGGVRCSSSRGGRPGLSSLPPRGPHHLDNSSPGPGSEARGINGGPSRMSPKAQRPLRGAKTLSSPSNRPSGETSVPPPPAVGRMYPPRSPKSAAPAPISVPFCRAAYPPSPLCHCSPVLPTHATQSMPPARAGTRYGGQRSPAWGPVCPAQGGGPTWEWSQDLVPRPKGRL

SEQ ID NO: 1027118 - protein, 271 aa, Homo sapiens
RDAPHFLDGMAAGKRRSSFPRWDGGRAEMLLTFLQPRDPLPFRLAALPRSAVFSLHPRHRGAPPARPRRAPAARSPSLPALSSGAPAPAPSLPPFSLIPLPDAAIMLKPQPLQQPSQPQQPPPTQQAVARRPPGGTSPPNGGLPGPLATSAAPPGPPAAASPCLGPVAAAGSGLRRGAEGILAPQPPPPQQHQERPGAAAIGSARGQSTGKGPPQSPVFEGVYNNSRMLHFLTAVVVSWYLTPGLFKERNASTFWRHSSYFSHSARAPLVM

SEQ ID NO: 1027119 - protein, 176 aa, Homo sapiens
GPGRAGWGLGMQPPVPGPLGLLDPAEGLSRRKKTSLWFVGSLLLVSVLIVTVGLAATTRTENVTVGGYYPGIILGFGSFLGIIGINLVENRRQMLVAAIVFISFGVVAAFCCAIVDGVFAAQHIEPRPLTTGRCQFYSSGVGYLYDVYQTEVSRSTEIHVGFAQLTPPTPRGFPCT

SEQ ID NO: 1027120 - protein, 172 aa, Homo sapiens
GPGRAGWGLGMQPPVPGPLGLLDPAEGLSRRKKTSLWFVGSLLLVSVLIVTVGLAATTRTENVTVGGYYPGIILGFGSFLGIIGINLVENRRQMTKRRGKDIKPGGSPRFTWQQCRVKSRHCLSMMFVAVCAATAIRFSWKSVLLMHCFGDYNFKNKNWLILSVRGGSLQIK

SEQ ID NO: 1027121 - protein, 162 aa, Homo sapiens
PPLPTDTHWEVRPARRTCVGARAVLGLGTVVGRSMLAALSQIFEKTGQVMLQRCLPNASRRTCCSVVEVLELGFGSFLGIIGINLVENRRQMLVAAIVFISFGVVAAFCCAIVDGVFAAQHIEPRPLTTGRCQFYSSGVGYLYDVYQTEVSEMRGVMTRGRP

SEQ ID NO: 1027122 - protein, 153 aa, Homo sapiens
ALGLTYLSLLLIPAAGASSWPPHSTPSHGSPSPVKHARDKWTTEAETVLCVWPGRLTLSPLTAFSDAAFSHCAQPLALRDLAVVYTLGPASFLVSLASCLALGSGLTACRARRRRLRTAALRPPRPPDPNPDPDPHGCASPADPGSPAAAAQA

SEQ ID NO: 1027123 - protein, 185 aa, Homo sapiens
IDGHRLARLEAEGARRLTLLRSLSLQDNELAALAPGLLGRLPALDALHLRGNPWGCGCALRPLCAWLRRHPLPASEAETVLCVWPGRLTLSPLTAFSDAAFSHCAQPLALRDLAVVYTLGPASFLVSLASCLALGSGLTACRARRRRLRTAALRPPRPPDPNPDPDPHGCASPADPGSPAAAAQA

SEQ ID NO: 1027124 - protein, 185 aa, Homo sapiens; identical to SEQ ID NO: 1027123

SEQ ID NO: 1027125 - protein, 105 aa, Homo sapiens
  misc_feature (5)..(5): Xaa can be any naturally occurring amino acid
MSASXRCGVVEEVVRESSPCPAVSVANSQYVPHRVEQYAMRAFADALEVIPMALSENSGMISIQTMTEVRARQVKEMNPALGIDCMHKGTNDMKQQHVIETLIAE

SEQ ID NO: 1027126 - protein, 119 aa, Homo sapiens
TVGSTPASLAVSAKDPYKQPGPQGGPNPSQAGQQQGQQKQKRHRTRFTPAQLNELERSFAKTHYPDIFMREELALRIGLTESRVQAACAFLYRVISFSTRKLVPIAIPQWTRKARLRPV

SEQ ID NO: 1027127 - protein, 74 aa, Homo sapiens
SVLRAIMSVLTPLLLRGLTGSAGGSQCRRQDPFVAAGGKLGIMELAVGLTSCFVTFLLPAGWILSHLETYRRPE

SEQ ID NO: 1027128 - protein, 71 aa, Homo sapiens
  misc_feature (1)..(1): Xaa can be any naturally occurring amino acid
XDLCPLNQHLSQQLFLDKARFKHHWENLEQIKPMFFNTWKERCVCLVLFFAETQTLLVQAPARGAGGVKAE

SEQ ID NO: 1027129 - protein, 71 aa, Homo sapiens; identical to SEQ ID NO: 1027128
  misc_feature (1)..(1): Xaa can be any naturally occurring amino acid

SEQ ID NO: 1027130 - protein, 299 aa, Homo sapiens
SSRSRLGLNSAEANFATDGRGGGGSRNATRSCEQLCDLQLDVPGAACGGWQRRGRLRVGRADCARPLRPAHLVGRSMLPDWLRASASGASVWGCAGVHGLQCGAGLMRRAGVLRPRCGGWDSTGISRAGPGAARGGAAMPDENIFLFVPNLIGYARIVFAIISFYFMPCCPLTGSSFYLLSGLLDAFDGHAARALNQGTRFGAMLDMLTDRCSTMCLLVNLALLYPGATLFFQISMSLDVASHWLHLHSSVVRGSESHKMIDLSGNPVLRIYYTSRPALFTLCAGNELFYCLLYLVPFL

SEQ ID NO: 1027131 - protein, 254 aa, Homo sapiens
SSRSRLGLNSAEANFATDGRGGGGSRNATRSCEQLCDLQLDVPGAACGGWQRRGRLRVGRADCARPLRPAHLVGRSMLPDWLRASASGASVWGCAGVHGLQVVLADAPGRRAEAALRGLGQHWHLQSRARGSKGRRRDAMTKISSCSCPTSSGTRFGAMLDMLTDRCSTMCLLVNLALLYPGATLFFQISMSLDVASHWLHLHSSVVRGSESHKMIDLSGNPVLRIYYTSRPALFTLCAGNELFYCLLYLVPFL

SEQ ID NO: 1027132 - protein, 271 aa, Homo sapiens
SSRSRLGLNSAEANFATDGRGGGGSRNATRSCEQLCDLQLDVPGAACGGWQRRGRLRVGRADCARPLRPAHLVGRSMLPDWLRASASGASVWGCAGVHGLQCGAGLMRRAGVLRPRCGGWDSTGISRAGPGAARGGAAMPDENIFLFVPNLIGGLLDAFDGHAARALNQGTRFGAMLDMLTDRCSTMCLLVNLALLYPGATLFFQISMSLDVASHWLHLHSSVVRGSESHKMIDLSGNPVLRIYYTSRPALFTLCAGNELFYCLLYLVPFL

SEQ ID NO: 1027133 - protein, 280 aa, Homo sapiens
AALACRAQPHVAVSAAPLGGPGCFPFDQPGKALGGRCTGRRGGHQSCPGPSEDRLARTYLCQPVRMMPCSESVGPLPATCSHCTWFLRWCSTGGTAWLGPVAPLKALAAHSCGKPHRRYFCMRRTLPCTSRSPCSPRAPAPPAAAPRTLRAGPQAGLGACRPTPGVSRWGAGPSRRWPPPACVTGTTSPCCSALAVATGARPPPLRGNRPHHTRCAAAGRLGVAPGPGQSWRPPAPGTLPRGGSGCRGRSPPPAGGRRPCASAQTPCVQMSAPRESPPAH

SEQ ID NO: 1027134 - protein, 280 aa, Homo sapiens; identical to SEQ ID NO: 1027133

SEQ ID NO: 1027135 - protein, 280 aa, Homo sapiens; identical to SEQ ID NO: 1027133

SEQ ID NO: 1027136 - protein, 280 aa, Homo sapiens; identical to SEQ ID NO: 1027133

SEQ ID NO: 1027137 - protein, 215 aa, Homo sapiens
MMPCSESVGPLPATCSHCTWFLRWCSTGGTAWLGPVAPLKALAAHSCGKPHRRYFCMRRTLPCTSRSPCSPRAPAPPAAAPRTLRAGPQAGLGACRPTPGVSRWGAGPSRRWPPPACVTGTTSPCCSALAVATGARPPPLRGNRPHHTRCAAAGRLGVAPGPGQSWRPPAPGTLPRGGSGCRGRSPPPAGGRRPCASAQTPCVQMSAPRESPPAH

SEQ ID NO: 1027138 - protein, 280 aa, Homo sapiens; identical to SEQ ID NO: 1027133

SEQ ID NO: 1027139 - protein, 119 aa, Homo sapiens
CPSPFVCPSPFVCPSPFVCPSPFVCPSPFVCPSPFVCPSPFVCPSPFVCPSPFVCPSPFVCPSPFVCPSPFVGRPRRENCLNPGGGGCSELRLCHCTPAWATRAKLRLKKKNVVAFSGS

SEQ ID NO: 1027140 - protein, 134 aa, Homo sapiens
VSIPLRVSIPLRVSIPLRVSIPLRVSIPLRVSIPLRVSIPLRVSIPLRVSIPLRVSIPLRVSIPLRVSIPLRVHTQEPGEWLELLQEPGSLYILRGSARYDFSHEILRDEESIFGGTAGYPGTDAIYRDLPLPP

SEQ ID NO: 1027141 - protein, 92 aa, Homo sapiens
CPSPFVCPSPFVCPSPFVCPSPFVCPSPFVCPSPFVCPSPFVCPSPFVCPSPFVCPSPFVCPSPFVCPSPFVNKTRIRSQIQESLSVFQFMT

SEQ ID NO: 1027142 - protein, 103 aa, Homo sapiens
CPSPFVCPSPFVCPSPFVCPSPFVCPSPFVCPSPFVCPSPFVCPSPFVCPSPFVCPSPFVCPSPFVCPSPFGRTREAGTKHRRLCPEGPMASGEVHGFGRGTI

SEQ ID NO: 1027143 - protein, 110 aa, Homo sapiens
CPSPFVCPSPFVCPSPFVCPSPFVCPSPFVCPSPFVCPSPFVCPSPFVCPSPFVCPSPFVCPSPFVCPSPFELLIYERVSVVCRGVERLKCHWRARHSAICLEPQNFERL

SEQ ID NO: 1027144 - protein, 109 aa, Homo sapiens
CPSPFVCPSPFVCPSPFVCPSPFVCPSPFVCPSPFVCPSPFVCPSPFVCPSPFVVLGYLASHMQKTETEPLLTPQTKINSRWIKELDVKSKTTKTLEDNVGNTILTKGD

SEQ ID NO: 1027145 - protein, 81 aa, Homo sapiens
CPSPFVCPSPFVCPSPFVCPSPFVCPSPFVCPSPFVCPSPFVCPSPFVCPSPFVCPSPFVCPSPFVCPSPFVLANTMGKGH

SEQ ID NO: 1027146 - protein, 81 aa, Homo sapiens
CPSPFVCPSPFVCPSPFVCPSPFVCPSPFVCPSPFVCPSPFVCPSPFVCPSPFVCPSPFVCPSPFVCPSPFVCPSPFVCPS

SEQ ID NO: 1027147 - protein, 88 aa, Homo sapiens
VSIPLRVSIPLRVSIPLRVSIPLRVSIPLRVSIPLRVSIPLRVSIPLRVSIPLRVSIPLRVSIPLRVSIPLRVSSEQLPTKGDDIDPV

SEQ ID NO: 1027148 - protein, 146 aa, Homo sapiens
IRIGDLKPTGEIPKQVKVKKLKNLKTLDSKPGVYTSYKPYLNRDEEIIKQLQKGVQQKRPSEAQSVILRRYFLELTQSFIIPLERYVASLMPLQKSISPWKSPPQLRQFLPEEFMKTLEKTGPQLTSRIKRRLDWTLPAFPKVSKF

SEQ ID NO: 1027149 - protein, 146 aa, Homo sapiens; identical to SEQ ID NO: 1027148

SEQ ID NO: 1027150 - protein, 110 aa, Homo sapiens
MTPNRGPLSPPNDLRPSHVISLPLHNAPHTRPTNQHTNHIPMMARCNTRKHIPRPPHTTCPKRPSIRDNPIYYLRSFFLRRIFLSLLPLQPSPYPPIRRALAQQAYPVNP

SEQ ID NO: 1027151 - protein, 134 aa, Homo sapiens
MTPNRGPLSPPNDLRPSHVISLPLHNAPHTRPTNQHTNHIPMMARCNTRKHIPRPPHTTCPKRPSIRDNPIYYLRSFFLRRIFLSLLPLQPSPYPPIRRALAPNRHHPAKSPRSPTPKHIRITRIRSINHLSSP

SEQ ID NO: 1027152 - protein, 150 aa, Homo sapiens
MTPNRGPLSPPNDLRPSHVISLPLHNAPHTRPTNQHTNHIPMMARCNTRKHIPRPPHTTCPKRPSIRDNPIYYLRSFFLRRIFLSLLPLQPSPYPPIRRALAPQNKGQFQTPGFKNIPPFKEKSFPQVPFKKQPIFPGNITSRPISKGKG

SEQ ID NO: 1027153 - protein, 90 aa, Homo sapiens
MPIPEDLSTTSGGQQSSKSDRVVGKWVTSGLCACETFISLYFSKTVMKGCKSFYPLCSLNWHIKEIWHKDQQDGGPLVCGRMDTHRPAWP

SEQ ID NO: 1027154 - protein, 119 aa, Homo sapiens
  misc_feature (1)..(1): Xaa can be any naturally occurring amino acid
XLVVLAPPGLVVVFVCFFYGFSRGDILFVRAWPVHIGRWRGGSAALVSVSCVCVVLVAPAGGAVIFRCRWGCGAAPLCVSPAPASVVVGCFPSGVGSRRLLLLFSPLPLCVFYAAATVS

SEQ ID NO: 1027155 - protein, 519 aa, Homo sapiens
MDADEGQDMSQVSGKESPPVSDTPDEGDEPMPIPEDLSTTSGGQQSSKSDRVVASNVKVETQSDEENGRACEMNGEECAEDLRMLDASGEKMNGSHRDQGSSALSGVGGIRLPNGKLKCDICGIICIGPNVLMVHKRSHTGERPFQCNQCGASFTQKGNLLRHIKLHSGEKPFKCHLCNYACRRRDALTGHLRTHSVGKPHKCGYCGRSYKQRSSLEEHKERCHNYLESMGLPGTLYPVIKEETNHSEMAEDLCKIGSERSLVLDRLASNVAKRKSSMPQKFLGDKGLSDTPYDSSASYEKENEMMKSHVMDQAINNAINYLGAESLRPLVQTPPGGSEVVPVISPMYQLHKPLAEGTPRSNHSAQDSAVENLLLLSKAKLVPSEREASPSNSCQDSTDTESNNEEQRSGLIYLTNHIAPHARNGLSLKEEHRAYDLLRAASENSQDALRVVSTSGEQMKVYKCEHCRVLFLDHVMYTIHMGCHGFRDPFECNMCGYHSQDRYEFSSHITRGEHRFHMS

SEQ ID NO: 1027156 - protein, 582 aa, Homo sapiens
MRNLLEEEEDTEGPVARHQDPSQVAGSEGNSEQPLGPQSLDLCGKGSSHLALARPRLVDNLRTMDADEGQDMSQVSGKESPPVSDTPDEGDEPMPIPEDLSTTSGGQQSSKSDRVVASNVKVETQSDEENGRACEMNGEECAEDLRMLDASGEKMNGSHRDQGSSALSGVGGIRLPNGKLKCDICGIICIGPNVLMVHKRSHTGERPFQCNQCGASFTQKGNLLRHIKLHSGEKPFKCHLCNYACRRRDALTGHLRTHSVGKPHKCGYCGRSYKQRSSLEEHKERCHNYLESMGLPGTLYPVIKEETNHSEMAEDLCKIGSERSLVLDRLASNVAKRKSSMPQKFLGDKGLSDTPYDSSASYEKENEMMKSHVMDQAINNAINYLGAESLRPLVQTPPGGSEVVPVISPMYQLHKPLAEGTPRSNHSAQDSAVENLLLLSKAKLVPSEREASPSNSCQDSTDTESNNEEQRSGLIYLTNHIAPHARNGLSLKEEHRAYDLLRAASENSQDALRVVSTSGEQMKVYKCEHCRVLFLDHVMYTIHMGCHGFRDPFECNMCGYHSQDRYEFSSHITRGEHRFHMS

SEQ ID NO: 1027157 - protein, 595 aa, Homo sapiens
EFRRRGRIPVWAGRSAAARRASLAGQREPRLRGCSSPPRISLGPKARRTNPHNLRTMDADEGQDMSQVSGKESPPVSDTPDEGDEPMPIPEDLSTTSGGQQSSKSDRVVVTYGADDFRDFHAIIPKSFSPSNVKVETQSDEENGRACEMNGEECAEDLRMLDASGEKMNGSHRDQGSSALSGVGGIRLPNGKLKCDICGIICIGPNVLMVHKRSHTGERPFQCNQCGASFTQKGNLLRHIKLHSGEKPFKCHLCNYACRRRDALTGHLRTHSVGKPHKCGYCGRSYKQRSSLEEHKERCHNYLESMGLPGTLYPVIKEETNHSEMAEDLCKIGSERSLVLDRLASNVAKRKSSMPQKFLGDKGLSDTPYDSSASYEKENEMMKSHVMDQAINNAINYLGAESLRPLVQTPPGGSEVVPVISPMYQLHKPLAEGTPRSNHSAQDSAVENLLLLSKAKLVPSEREASPSNSCQDSTDTESNNEEQRSGLIYLTNHIAPHARNGLSLKEEHRAYDLLRAASENSQDALRVVSTSGEQMKVYKCEHCRVLFLDHVMYTIHMGCHGFRDPFECNMCGYHSQDRYEFSSHITRGEHRFHMS

SEQ ID NO: 1027158 - protein, 221 aa, Homo sapiens
MRNLLEEEEDTEGPVARHQDPSQVAGSEGNSEQPLGPQSLDLCGKGSSHLALARPRLVDNLRTMDADEGQDMSQVSGKESPPVSDTPDEGDEPMPIPEDLSTTSGGQQSSKSDRVVASNVKVETQSDEENGRACEMNGEECAEDLRMLDASGEKMNGSHRDQGSSALSGVGGIRLPNGKLKCDICGIICIGPNVLMVHKRSHTGKAWLSFSFSGLEKVHGV

SEQ ID NO: 1027159 - protein, 495 aa, Homo sapiens
MRNLLEEEEDTEGPVARHQDPSQVAGSEGNSEQPLGPQSLDLCGKGSSHLALARPRLVDNLRTMDADEGQDMSQVSGKESPPVSDTPDEGDEPMPIPEDLSTTSGGQQSSKSDRVVENGPSSAISAGPHSPRRATCSGTSSCIPGEKPFKCHLCNYACRRRDALTGHLRTHSVGKPHKCGYCGRSYKQRSSLEEHKERCHNYLESMGLPGTLYPVIKEETNHSEMAEDLCKIGSERSLVLDRLASNVAKRKSSMPQKFLGDKGLSDTPYDSSASYEKENEMMKSHVMDQAINNAINYLGAESLRPLVQTPPGGSEVVPVISPMYQLHKPLAEGTPRSNHSAQDSAVENLLLLSKAKLVPSEREASPSNSCQDSTDTESNNEEQRSGLIYLTNHIAPHARNGLSLKEEHRAYDLLRAASENSQDALRVVSTSGEQMKVYKCEHCRVLFLDHVMYTIHMGCHGFRDPFECNMCGYHSQDRYEFSSHITRGEHRFHMS

SEQ ID NO: 1027160 - protein, 516 aa, Homo sapiens [sequence omitted]

SEQ ID NO: 1027161 - protein, 516 aa, Homo sapiens [sequence omitted]

SEQ ID NO: 1027162 - protein, 505 aa, Homo sapiens
MPQALERADGSWAWVVLLATMVTQGLTLGFPTCIGIFFTELQWEFQASNSETSWFPSILTAVLHMAGPLCSILVGRFGCRVTVMLGGVLASLGMVASSFSHNLSQLYFTAGFITGLGMCFSFQSSITVLGFYFVRRRVLANALASMGVSLGITLWPLLSRYLLENLGWRGTFLVFGGIFLHCCICGAIIRPVATSVAPETKECPPPPPETPALGCLAACGRTIQRHLAFDILRHNTGYCVYILGVMWSVLGFPLPQVFLVPYAMWHSVDEQQAALLISIIGFSNIFLRPLAGLMAGRPAFASHRKYLFSLALLLNGLTNLVCAASGDFWVLVGYCLAYSVSMSGIGALIFQVLMDIVPMDQFPRALGLFTVLDGLAFLISPPLAGLLLDATNNFSYVFYMSSFFLISAALFMGGSFYALQKKEQGKQAVAADALERDLFLEAKDGPGKQRSPEIMCQSSRQPRPAGVNKHLWGCPASSRTSHEWLLWPKAVLQAKQTALGWNSPT

SEQ ID NO: 1027163 - protein, 505 aa, Homo sapiens; identical to SEQ ID NO: 1027162

SEQ ID NO: 1027164 - protein, 505 aa, Homo sapiens; identical to SEQ ID NO: 1027162

SEQ ID NO: 1027165 - protein, 417 aa, Homo sapiens
MTIDPTPGCRWKAPVRLQAGFPSCPAGLGMCFSFQSSITVLGFYFVRRRVLANALASMGVSLGITLWPLLSRYLLENLGWRGTFLVFGGIFLHCCICGAIIRPVATSVAPETKECPPPPPETPALGCLAACGRTIQRHLAFDILRHNTGYCVYILGVMWSVLGFPLPQVFLVPYAMWHSVDEQQAALLISIIGFSNIFLRPLAGLMAGRPAFASHRKYLFSLALLLNGLTNLVCAASGDFWVLVGYCLAYSVSMSGIGALIFQVLMDIVPMDQFPRALGLFTVLDGLAFLISPPLAGLLLDATNNFSYVFYMSSFFLISAALFMGGSFYALQKKEQGKQAVAADALERDLFLEAKDGPGKQRSPEIMCQSSRQPRPAGVNKHLWGCPASSRTSHEWLLWPKAVLQAKQTALGWNSPT

SEQ ID NO: 1027166 - protein, 523 aa, Homo sapiens
PAEQGQTSPILNPHFVGEKLRHGEGSGFAQATWPVHGRWVSESRPARALETTWLVPAGTALSSHSPPLPATSSFSCYLLAVFSPGPLCSILVGRFGCRVTVMLGGVLASLGMVASSFSHNLSQLYFTAGFITGLGMCFSFQSSITVLGFYFVRRRVLANALASMGVSLGITLWPLLSRYLLENLGWRGTFLVFGGIFLHCCICGAIIRPVATSVAPETKECPPPPPETPALGCLAACGRTIQRHLAFDILRHNTGYCVYILGVMWSVLGFPLPQVFLVPYAMWHSVDEQQAALLISIIGFSNIFLRPLAGLMAGRPAFASHRKYLFSLALLLNGLTNLVCAASGDFWVLVGYCLAYSVSMSGIGALIFQVLMDIVPMDQFPRALGLFTVLDGLAFLISPPLAGLLLDATNNFSYVFYMSSFFLISAALFMGGSFYALQKKEQGKQAVAADALERDLFLEAKDGPGKQRSPEIMCQSSRQPRPAGVNKHLWGCPASSRTSHEWLLWPKAVLQAKQTALGWNSPT

SEQ ID NO: 1027167 - protein, 101 aa, Homo sapiens
  misc_feature (9)..(9): Xaa can be any naturally occurring amino acid
PAVREHTAXLGGGLVTLAKLDLCSPGLLLDATNNFSYVFYMSSFFLISAALFMGGSFYALQKKEQGKQAVAADALERDLFLEAKDGPGKQRSPEIMYVTSV

SEQ ID NO: 1027168 - protein, 522 aa, Homo sapiens
MPQALERADGSWAWVVLLATMVTQGLTLGFPTCIGIFFTELQWEFQASNSETSWFPSILTAVLHMAGPLCSILVGRFGCRVTVMLGGVLASLGMVASSFSHNLSQLYFTAGFITGGKAPVRLQAGFPSCPAGLGMCFSFQSSITVLGFYFVRRRVLANALASMGVSLGITLWPLLSRYLLENLGWRGTFLVFGGIFLHCCICGAIIRPVATSVAPETKECPPPPPETPALGCLAACGRTIQRHLAFDILRHNTGYCVYILGVMWSVLGFPLPQVFLVPYAMWHSVDEQQAALLISIIGFSNIFLRPLAGLMAGRPAFASHRKYLFSLALLLNGLTNLVCAASGDFWVLVGYCLAYSVSMSGIGALIFQVLMDIVPMDQFPRALGLFTVLDGLAFLISPPLAGLLLDATNNFSYVFYMSSFFLISAALFMGGSFYALQKKEQGKQAVAADALERDLFLEAKDGPGKQRSPEIMCQSSRQPRPAGVNKHLWGCPASSRTSHEWLLWPKAVLQAKQTALGWNSPT

SEQ ID NO: 1027169 - protein, 505 aa, Homo sapiens; identical to SEQ ID NO: 1027162

SEQ ID NO: 1027170 - protein, 505 aa, Homo sapiens; identical to SEQ ID NO: 1027162

SEQ ID NO: 1027171 - protein, 505 aa, Homo sapiens; identical to SEQ ID NO: 1027162

SEQ ID NO: 1027172 - protein, 264 aa, Homo sapiens
KGLRSSSVCEQILKPELHPGARAMRRERCGCPPPASPPWRCCGCSSVFAAENMDAFDLLCPQTMELGGPVPMAAWAWEYCCTAAGYLAAAWPRPWSCCPELLPLPGPWDAWLRCAAGACCCLGDELEMILCPASTATWRRQLHILPAVLSLWLTDAFLAGGLATSSLQCITWGKVVSLYAVAAGLAVDCVRQAQPAMVHALVDCLGEFVRKTLATWLRRRGGWTDVLKCVVSTDPGLRSHWLVAALCSFGRFLKAAFFVLLPER

SEQ ID NO: 1027173 - protein, 123 aa, Homo sapiens
KGLRSSSVCEQILKPELHPGARPCGGRGITWGKVVSLYAVAAGLAVDCVRQAQPAMVHALVDCLGEFVRKTLATWLRRRGGWTDVLKCVVSTDPGLRSHWLVAALCSFGRFLKAAFFVLLPER

SEQ ID NO: 1027174 - protein, 123 aa, Homo sapiens; identical to SEQ ID NO: 1027173

SEQ ID NO: 1027175 - protein, 123 aa, Homo sapiens; identical to SEQ ID NO: 1027173

SEQ ID NO: 1027176 - protein, 264 aa, Homo sapiens; identical to SEQ ID NO: 1027172

SEQ ID NO: 1027177 - protein, 123 aa, Homo sapiens; identical to SEQ ID NO: 1027173

SEQ ID NO: 1027178 - protein, 107 aa, Homo sapiens
MGLRLREWTCNGKFWWEPRRTEGLNDPPEQPGFSGEFLKFGFNPAQEFSWGIVLSEGELNTPHLGLLNTSGKSRFHSDSNNWGKIVAYKPYYLEDSSTKLYLKWQVV

SEQ ID NO: 1027179 - protein, 107 aa, Homo sapiens; identical to SEQ ID NO: 1027178

SEQ ID NO: 1027180 - protein, 107 aa, Homo sapiens; identical to SEQ ID NO: 1027178

SEQ ID NO: 1027181 - protein, 159 aa, Homo sapiens
PVVTRSVGGEIVLPLHIRGEVLTTCFSIARLPVGATPFHSGKLTISHPQASGAASAPSASYQALAKPGDPFLPGGSQDPSDRTPPITPAQVLIRFPTQRKLVVIPQSVTPETIAEKSKVFDFELSTQDMTTLLSYNRNWRVCALLSCTSPKDYPFHEEF

SEQ ID NO: 1027182 - protein, 159 aa, Homo sapiens; identical to SEQ ID NO: 1027181

SEQ ID NO: 1027183 - protein, 294 aa, Homo sapiens
MPSSVSWGILLLAGLCCLVPVSLAEDPQGDAAQKTDTFHHDQDHPTFNKITPNLAEFAFSLYRQLAHQSNSTNIFFSPVSIATAFAMLSLGTKADTHDEILEGLNFNLTEIPEAQIHEGFQELLRTLNQPDSQLQLTTGNGLFLSEGLKLVDKFAEDVKKLYHSEAFTVNFGDTEEAKKQINDYVEKGYSRGQIRGLGPRSLTDDTVCALVNDIFFQRANGRDPLTVKDTEEEDFHVGQVTTVKVPMMKRLRHVNIQHCKKLSSWVLLMKILGNATHLLPACEGKYSTWKMNHQ

SEQ ID NO: 1027184 - protein, 193 aa, Homo sapiens
MPSSVSWGILLLAGLCCLVPVSLAEDPQGDAAQKTDTFHHDQDHPTFNKITPNLAEFAFSLYRQLAHQSNSTNIFFSPVSIATAFAMLSLGTKADTHHGVLQGLNLSLTDIPAARIHDSFQDLLLTVNQPESQLHLTTGDGLLLTDGLLVDGFLEDVERFACGRLNCPVRGWLEPAQGDAGPHREGDDSGELC

SEQ ID NO: 1027185 - protein, 266 aa, Homo sapiens
MPSSVSWGILLLAGLCCLVPVSLAEDPQGDAAQKTDTFHHDQDHPTFNKITPNLAEFAFSLYRQLAHQSNSTNIFFSPVSIATAFAMLSLGTKAVLRTLNQPDSQLQLTTGNGLFLSEGLKLVDKFAEDVKKLYHSEAFTCQLRGHRRGQETDQRLRGERVLKGKIRGLGPRSLTDDTVCALVNDIFFQRANGRDPLTVKDTEEEDFHVGQVTTVKVPMIEAFRHVNIQHCKKLSSWVLLMRYWAMHRIFFLPDEGKYSTWKMNHQ

SEQ ID NO: 1027186 - protein, 243 aa, Homo sapiens
AAAAFARTVCGLSSVTALSVCLAPALCGFLALTKRSLSSSARVSEEEELEALSVASTCQLVWDSPAAAGSIDVCVTCHSLDGKCQLKPEPSPAYYEFIGVQDCQDVLHLYRLLWASAVLNVLGLFLGIITAAVLGAFKDMVPLSQLAYGPAVPPQTLYNPAQQILAYAGFRLTPEPVPTCSSYPLPLQPCSRFPVAPSSALASSEDLQPPSPSSSGSGLPGQAPPCYAPTYFPPGEKPPPYAP

SEQ ID NO: 1027187 - protein, 104 aa, Homo sapiens
  misc_feature (4)..(4): Xaa can be any naturally occurring amino acid
ALNXIRAFHAIESLLQSDGDDFNYIIAFFLGTAACLYQCYLLVYYTGWRNVKSFLTFGLICLCNMYLYELRNLWQLFFHVTVGAFVTLQIWLRQAQGKAPDYDV

SEQ ID NO: 1027188 - protein, 70 aa, Homo sapiens
AWATLRILSGRHGWRNVKSFLTFGLICLCNMYLYELRNLWQLFFHVTVGAFVTLQIWLRQAQGKAPDYDV

SEQ ID NO: 1027189 - protein, 104 aa, Homo sapiens; identical to SEQ ID NO: 1027187
  misc_feature (4)..(4): Xaa can be any naturally occurring amino acid

SEQ ID NO: 1027190 - protein, 104 aa, Homo sapiens; identical to SEQ ID NO: 1027187
  misc_feature (4)..(4): Xaa can be any naturally occurring amino acid

SEQ ID NO: 1027191 - protein, 104 aa, Homo sapiens; identical to SEQ ID NO: 1027187
  misc_feature (4)..(4): Xaa can be any naturally occurring amino acid

SEQ ID NO: 1027192 - protein, 190 aa, Homo sapiens
  misc_feature (165)..(165): Xaa can be any naturally occurring amino acid
RPPWEPARPRPRPPPRPPRWLRFSLMMSSRDMSILSAMAGAESGIGSSPRVSTPARHFRRRVRPSGATASERLLIGRWRTAARAGRGEAGRRVRTGVRDSAGAVEGVGPRLWSFLYLPARTPALPTEGRVGRCVIRLAKVRGRRGWGGGRWRRSLRAPPSPHAPXDRPGLGALGALRARRVPGSCWESLF

SEQ ID NO: 1027193 - protein, 377 aa, Homo sapiens
  misc_feature (303)..(303): Xaa can be any naturally occurring amino acid
RPPWEPARPRPRPPPRPPRWLRFSLMMSSRDMSILSAMAGAESGIGSSPRVSTPARHFRRRVRPSGATASERLLIGRWRTAARAGRGEAGRRVRTGVRDSAGAVEGVGPRLWSFLYLPARTPALPTEGRVGRDGVSSCWPGPFEIFEDILNVRLCCHEGEDKFWDGVAYCGSWVANDENCGIFRMAFTDAALIFKVPGTDFPLCGASAPTVFHMRCVLKWFRTVWVPASMAHCGRRGMECQGGGGPTWLSLEGAILENSFLMLAPMAAGEQRPEAATGGTKGLELRFVAITIFDLLPYVKFIXLLNSCGKQPVKKIVGGRAKSLTTLVGAAGGGNGYVQGPGDCGVPQKRGGGLKHGRSCPAHPRARKTRTPEKNRD

SEQ ID NO: 1027194 - protein, 443 aa, Homo sapiens
IDCSTKQRENVYLAACGETLNIDFSLPFTDLSPATCNTKFSLRGEDVDLHLFLPDCHPSKYSLFMLVKNCHPNKMIHDTGIPAECQSGQKTVKPKWRNVTQEKSGWVECWTVPSVMLTIDYTWHPIYPQKADEQLKQSLSEMEETMLSVLRPSQKTSDRVVSSPSTSSRPPIDPSELPPDKLHVEMELSPDSQITLYGPLLNAFLCIKENYFGEDDMYMDFEEVISSPVLSLSTSSSSGWTAVGMENDKKENEGSAKSIHPLALRPWDITVLVNLYKVHGRLPVHGTTDGPECPTAFLERLCFEMKKGFRETMLQLILSPLNVFVSDNYQQRPPVDEVLREGHINLSGLQLRAHAMFSAEGLPLGSDSLEYAWLIDVQAGSLTAKVTAPQVWFSEYYLLTYFLFPFSTHLLKNNLYACLNVHCISTDGILMGVILAIQNFSYR

SEQ ID NO: 1027195 - protein, 594 aa, Homo sapiens
IDCSTKQRENVYLAACGETLNIDFSLPFTDLSPATCNTKFSLRGEDVDLHLFLPDCHPSKYSLFMLVKNCHPNKMIHDTGIPAECQSGQKTVKPKWRNVTQEKSGWVECWTVPSVMLTIDYTWHPIYPQKADEQLKQSLSEMEETMLSVLRPSQKTSDRVVSSPSTSSRPPIDPSELPPDKLHVEMELSPDSQITLYGPLLNAFLCIKENYFGEDDMYMDFEEVISSPVLSLSTSSSSGWTAVGMENDKKENEGSAKSIHPLALRPWDITVLVNLYKVHGRLPVHGTTDGPECPTAFLERLCFEMKKGFRETMLQLILSPLNVFVSDNYQQRPPVDEVLREGHINLSGLQLRAHAMFSAEGLPLGSDSLEYAWLIDVQAGSLTAKVTAPQLACLLEWGQTFVFHVVCREYELERPKSVIICQHGIDRRFCESKLSCIPGPCPTSDDLKYTMIRLAVDGTLNIVSIVEHGCATNIKMGAIRVANCNLHNQSVGEGISAAIQDFQVRQYIEQLNNCRIGLQPAVLRRAYWLEAGSANLGLITVDIALAADHHSKHEAQRHFLETHDARTKRLWFLWPDDILKNKRCRNHNLLVLAS

SEQ ID NO: 1027196 - protein, 635 aa, Homo sapiens
IDCSTKQRENVYLAACGETLNIDFSLPFTDLSPATCNTKFSLRGEDVDLHLFLPDCHPSKYSLFMLVKNCHPNKMIHDTGIPAECQSGQKTVKPKWRNVTQEKSGWVECWTVPSVMLTIDYTWHPIYPQKADEQLKQSLSEMEETMLSVLRPSQKTSDRVVSSPSTSSRPPIDPSELPPDKLHVEMELSPDSQITLYGPLLNAFLCIKENYFGEDDMYMDFEEVISSPVLSLSTSSSSGWTAVGMENDKKENEGSAKSIHPLALRPWDITVLVNLYKVHGRLPVHGTTDGPECPTAFLERLCFEMKKGFRETMLQLILSPLNVFVSDNYQQRPPVDEVLREGHINLSGLQLRAHAMFSAEGLPLGSDSLEYAWLIDVQAGSLTAKVTAPQLACLLEWGQTFVFHVVCREYELERPKSVIICQHGIDRRFCESKLSCIPGPCPTSDDLKYTMIRLAVDGTLNIVSIVEHGCATNIKMGAIRVANCNLHNQSVGEGISAAIQDFQVRQYIEQLNNCRIGLQPAVLRRAYWLEAGSANLGLITVDIALAADHHSKHEAQRHFLETHDARTKRLWFLWPDDILKNKRCRNKCGCLGGCRFFGGTVTGLDFFKLEDLTPSSSSAFSSTSAESDMYMDTNV

SEQ ID NO: 1027197 - protein, 82 aa, Homo sapiens
TSIRSGCLLGCVDLIDCLSQKQFKEQFPDISQESDSPFVFICKNPQEMVVKVPIEGNPKIWKLDSKIHQGAKKGLMKQNKAV

SEQ ID NO: 1027198 - protein, 82 aa, Homo sapiens
ENTFEGSGRGSLRWQESLCSSLRDCDKRQEERIQERFGQADECPRAKDACQGVPCPQEQLAPEALLCSITDQAHSVTCVAVA

SEQ ID NO: 1027199 - protein, 205 aa, Homo sapiens
LKPASISVSLPFTDFPRYPLTNYTFGTKEPLYEKDSSVAARFQRMREEFDKIGMRRTVEGVLIVHEHRLPHVLLLQLGTTFFKLPGGELNPGEDEVEGLKRLMTEILGRQDGVLQDWVIDDCIGNWWRPNFEPPQYPYIPAHITKPKEHKKLFLVQLQEKALFAVPKNYKLVAAPLFELYDNAPGYGPIISSLPQLLSRFNFIYN
